United States Patent Application Publication US 2010/0105134 A1 - sequence listing, part 3

SEQ ID NO: 47432 - DNA, 13 bp, Artificial Sequence
  Description of Artificial Sequence: Synthetic oligonucleotide
  Description of Combined DNA/RNA Molecule: Synthetic oligonucleotide
  modified_base (8): LNA-G
uuucuucggagtt

SEQ ID NO: 47433 - DNA, 12 bp, Artificial Sequence
  Description of Artificial Sequence: Synthetic oligonucleotide
  Description of Combined DNA/RNA Molecule: Synthetic oligonucleotide
  modified_base (7): LNA-G
uucuucggagtt

SEQ ID NO: 47434 - DNA, 11 bp, Artificial Sequence
  Description of Artificial Sequence: Synthetic oligonucleotide
  Description of Combined DNA/RNA Molecule: Synthetic oligonucleotide
  modified_base (6): LNA-G
ucuucggagtt

SEQ ID NO: 47435 - DNA, 10 bp, Artificial Sequence
  Description of Artificial Sequence: Synthetic oligonucleotide
  Description of Combined DNA/RNA Molecule: Synthetic oligonucleotide
  modified_base (5): LNA-G
cuucggagtt

SEQ ID NO: 47436 - DNA, 9 bp, Artificial Sequence
  Description of Artificial Sequence: Synthetic oligonucleotide
  Description of Combined DNA/RNA Molecule: Synthetic oligonucleotide
  modified_base (4): LNA-G
uucggagtt

SEQ ID NO: 47437 - DNA, 8 bp, Artificial Sequence
  Description of Artificial Sequence: Synthetic oligonucleotide
  Description of Combined DNA/RNA Molecule: Synthetic oligonucleotide
  modified_base (3): LNA-G
ucggagtt

SEQ ID NO: 47438 - DNA, 7 bp, Artificial Sequence
  Description of Artificial Sequence: Synthetic oligonucleotide
  Description of Combined DNA/RNA Molecule: Synthetic oligonucleotide
  modified_base (2): LNA-G
cggagtt

SEQ ID NO: 47439 - DNA, 13 bp, Artificial Sequence
  Description of Artificial Sequence: Synthetic oligonucleotide
  Description of Combined DNA/RNA Molecule: Synthetic oligonucleotide
  modified_base (1): LNA-U
  modified_base (8): LNA-G
uuucuucggagtt

SEQ ID NO: 47440 - DNA, 12 bp, Artificial Sequence
  Description of Artificial Sequence: Synthetic oligonucleotide
  Description of Combined DNA/RNA Molecule: Synthetic oligonucleotide
  modified_base (1): LNA-U
  modified_base (7): LNA-G
uucuucggagtt

SEQ ID NO: 47441 - DNA, 11 bp, Artificial Sequence
  Description of Artificial Sequence: Synthetic oligonucleotide
  Description of Combined DNA/RNA Molecule: Synthetic oligonucleotide
  modified_base (1): LNA-U
  modified_base (6): LNA-G
ucuucggagtt

SEQ ID NO: 47442 - DNA, 10 bp, Artificial Sequence
  Description of Artificial Sequence: Synthetic oligonucleotide
  Description of Combined DNA/RNA Molecule: Synthetic oligonucleotide
  modified_base (1): LNA-C
  modified_base (5): LNA-G
cuucggagtt

SEQ ID NO: 47443 - DNA, 9 bp, Artificial Sequence
  Description of Artificial Sequence: Synthetic oligonucleotide
  Description of Combined DNA/RNA Molecule: Synthetic oligonucleotide
  modified_base (1): LNA-U
  modified_base (4): LNA-G
uucggagtt

SEQ ID NO: 47444 - DNA, 8 bp, Artificial Sequence
  Description of Artificial Sequence: Synthetic oligonucleotide
  Description of Combined DNA/RNA Molecule: Synthetic oligonucleotide
  modified_base (1): LNA-U
  modified_base (3): LNA-G
ucggagtt

SEQ ID NO: 47445 - DNA, 7 bp, Artificial Sequence
  Description of Artificial Sequence: Synthetic oligonucleotide
  Description of Combined DNA/RNA Molecule: Synthetic oligonucleotide
  modified_base (1): LNA-C
  modified_base (2): LNA-G
cggagtt

SEQ ID NO: 47446 - DNA, 21 bp, Artificial Sequence
  Description of Artificial Sequence: Synthetic oligonucleotide
  Description of Combined DNA/RNA Molecule: Synthetic oligonucleotide
  modified_base (2): LNA-G
  modified_base (16): LNA-G
ggaucuuauuucuucggagtt

SEQ ID NO: 47447 - DNA, 25 bp, Artificial Sequence
  Description of Artificial Sequence: Synthetic oligonucleotide
  Description of Combined DNA/RNA Molecule: Synthetic oligonucleotide
ggaucuuauuucuucggagacaatg

SEQ ID NO: 47448 - RNA, 25 nt, Artificial Sequence
  Description of Artificial Sequence: Synthetic oligonucleotide
uuaagcagaguucaaaagcccuuca

SEQ ID NO: 47449 - RNA, 25 nt, Artificial Sequence
  Description of Artificial Sequence: Synthetic oligonucleotide
uaagcagaguucaaaagcccuucag

SEQ ID NO: 47450 - RNA, 25 nt, Artificial Sequence
  Description of Artificial Sequence: Synthetic oligonucleotide
agcagaguucaaaagcccuucagcg

SEQ ID NO: 47451 - RNA, 25 nt, Artificial Sequence
  Description of Artificial Sequence: Synthetic oligonucleotide
cucagggucugagugaagccgcucg

SEQ ID NO: 47452 - RNA, 25 nt, Artificial Sequence
  Description of Artificial Sequence: Synthetic oligonucleotide
caagcaacuacaucacgccagucaa

SEQ ID NO: 47453 - RNA, 25 nt, Artificial Sequence
  Description of Artificial Sequence: Synthetic oligonucleotide
aucaauggcagcuucuuggugcgug

SEQ ID NO: 47454 - RNA, 25 nt, Artificial Sequence
  Description of Artificial Sequence: Synthetic oligonucleotide
uuccagcccacauuggauucaucag

SEQ ID NO: 47455 - RNA, 25 nt, Artificial Sequence
  Description of Artificial Sequence: Synthetic oligonucleotide
cagcugagaauguggaauaccuaag

SEQ ID NO: 47456 - RNA, 25 nt, Artificial Sequence
  Description of Artificial Sequence: Synthetic oligonucleotide
aacguaucuccuaauuugaggcuca

SEQ ID NO: 47457 - RNA, 25 nt, Artificial Sequence
  Description of Artificial Sequence: Synthetic oligonucleotide
ccuaaaauaauuucucuacaauugg

SEQ ID NO: 47458 - RNA, 25 nt, Artificial Sequence
  Description of Artificial Sequence: Synthetic oligonucleotide
uggaagauucagcuaguuaggagcc

SEQ ID NO: 47459 - RNA, 25 nt, Artificial Sequence
  Description of Artificial Sequence: Synthetic oligonucleotide
uuaaacucuccuagucaauauccac

SEQ ID NO: 47460 - RNA, 25 nt, Artificial Sequence
  Description of Artificial Sequence: Synthetic oligonucleotide
cagccuacaguuauguucagucaca

SEQ ID NO: 47461 - RNA, 25 nt, Artificial Sequence
  Description of Artificial Sequence: Synthetic oligonucleotide
guuauguucagucacacacacauac

SEQ ID NO: 47462 - RNA, 25 nt, Artificial Sequence
  Description of Artificial Sequence: Synthetic oligonucleotide
cacauacaaaauguuccuuuugcuu

SEQ ID NO: 47463 - RNA, 25 nt, Artificial Sequence
  Description of Artificial Sequence: Synthetic oligonucleotide
uccuuuugcuuuuaaaguaauuuuu

SEQ ID NO: 47464 - RNA, 25 nt, Artificial Sequence
  Description of Artificial Sequence: Synthetic oligonucleotide
ugaccugugaagcaacagucaaugg

SEQ ID NO: 47465 - RNA, 25 nt, Artificial Sequence
  Description of Artificial Sequence: Synthetic oligonucleotide
cuaucucacacaucgacaaaccaau

SEQ ID NO: 47466 - RNA, 25 nt, Artificial Sequence
  Description of Artificial Sequence: Synthetic oligonucleotide
uguccucaauuguacugcuaccacu

SEQ ID NO: 47467 - RNA, 25 nt, Artificial Sequence
  Description of Artificial Sequence: Synthetic oligonucleotide
aaaccguagcuggcaagcggucuua

SEQ ID NO: 47468 - RNA, 25 nt, Artificial Sequence
  Description of Artificial Sequence: Synthetic oligonucleotide
uagcuggcaagcggucuuaccggcu

SEQ ID NO: 47469 - RNA, 25 nt, Artificial Sequence
  Description of Artificial Sequence: Synthetic oligonucleotide
uuguaugguuaaaagauggguuacc

SEQ ID NO: 47470 - RNA, 25 nt, Artificial Sequence
  Description of Artificial Sequence: Synthetic oligonucleotide
ugguuaaaagauggguuaccugcga

SEQ ID NO: 47471 - RNA, 25 nt, Artificial Sequence
  Description of Artificial Sequence: Synthetic oligonucleotide
cagggaauuauacaaucuugcugag

SEQ ID NO: 47472 - RNA, 25 nt, Artificial Sequence
  Description of Artificial Sequence: Synthetic oligonucleotide
acaaucuugcugagcauaaaacagu

SEQ ID NO: 47473 - RNA, 25 nt, Artificial Sequence
  Description of Artificial Sequence: Synthetic oligonucleotide
ccaauaaugaagaguccuuuauccu

SEQ ID NO: 47474 - RNA, 25 nt, Artificial Sequence
  Description of Artificial Sequence: Synthetic oligonucleotide
acuuuggauguuccaacgcaaguug

SEQ ID NO: 47475 - RNA, 25 nt, Artificial Sequence
  Description of Artificial Sequence: Synthetic oligonucleotide
aaugcuuccacuaaacugaaaccau

SEQ ID NO: 47476 - RNA, 25 nt, Artificial Sequence
  Description of Artificial Sequence: Synthetic oligonucleotide
gagaaaguuugacuuuguuaaauau

SEQ ID NO: 47477 - RNA, 25 nt, Artificial Sequence
  Description of Artificial Sequence: Synthetic oligonucleotide
aaagaacuacuguauauuaaaaguu

SEQ ID NO: 47478 - RNA, 25 nt, Artificial Sequence
  Description of Artificial Sequence: Synthetic oligonucleotide
uuagaaauacggguuuugacuuaac

SEQ ID NO: 47479 - RNA, 25 nt, Artificial Sequence
  Description of Artificial Sequence: Synthetic oligonucleotide
aacauggguacagcaaacucagcac

SEQ ID NO: 47480 - RNA, 25 nt, Artificial Sequence
  Description of Artificial Sequence: Synthetic oligonucleotide
aaagacacagaagaugcugaccuca

SEQ ID NO: 47481 - RNA, 25 nt, Artificial Sequence
  Description of Artificial Sequence: Synthetic oligonucleotide
uaguagggagguuuauucagaucgc

SEQ ID NO: 47482 - RNA, 25 nt, Artificial Sequence
  Description of Artificial Sequence: Synthetic oligonucleotide
gccuucugcagcaggguucugggau

SEQ ID NO: 47483 - RNA, 25 nt, Artificial Sequence
  Description of Artificial Sequence: Synthetic oligonucleotide
ggucugguacauauuggaaauuaug

SEQ ID NO: 47484 - RNA, 25 nt, Artificial Sequence
  Description of Artificial Sequence: Synthetic oligonucleotide
cuaguccuuccgauggaagcacuag

SEQ ID NO: 47485 - RNA, 25 nt, Artificial Sequence
  Description of Artificial Sequence: Synthetic oligonucleotide
ccagugaauauuguuuuuaugugga

SEQ ID NO: 47486 - RNA, 25 nt, Artificial Sequence
  Description of Artificial Sequence: Synthetic oligonucleotide
augaauucaaguuggaauugguaga

SEQ ID NO: 47487 - RNA, 25 nt, Artificial Sequence
  Description of Artificial Sequence: Synthetic oligonucleotide
caggacacagauuuagacuuggaga

SEQ ID NO: 47488 - RNA, 25 nt, Artificial Sequence
  Description of Artificial Sequence: Synthetic oligonucleotide
cucaaagcacaguuacaguauucca

SEQ ID NO: 47489 - RNA, 25 nt, Artificial Sequence
  Description of Artificial Sequence: Synthetic oligonucleotide
accacugccaccacugaugaauuaa

SEQ ID NO: 47490 - RNA, 25 nt, Artificial Sequence
  Description of Artificial Sequence: Synthetic oligonucleotide
gaaacuacuagugccacaucaucac

SEQ ID NO: 47491 - RNA, 25 nt, Artificial Sequence
  Description of Artificial Sequence: Synthetic oligonucleotide
aagucggacagccucaccaaacaga

SEQ ID NO: 47492 - RNA, 25 nt, Artificial Sequence
  Description of Artificial Sequence: Synthetic oligonucleotide
gaaagcgaaaaauggaacaugaugg

SEQ ID NO: 47493 - RNA, 25 nt, Artificial Sequence
  Description of Artificial Sequence: Synthetic oligonucleotide
cccucugauuuagcauguagacugc

SEQ ID NO: 47494 - RNA, 25 nt, Artificial Sequence
  Description of Artificial Sequence: Synthetic oligonucleotide
ugagcuauuuaaggaucuauuuaug

SEQ ID NO: 47495 - RNA, 25 nt, Artificial Sequence
  Description of Artificial Sequence: Synthetic oligonucleotide
aaaaggugaaaaagcacuauuauca

SEQ ID NO: 47496 - RNA, 25 nt, Artificial Sequence
  Description of Artificial Sequence: Synthetic oligonucleotide
gaaaaagcacuauuaucaguucugc

SEQ ID NO: 47497 - RNA, 25 nt, Artificial Sequence
  Description of Artificial Sequence: Synthetic oligonucleotide
ggcugaaaagaaagauuaaaccuac

SEQ ID NO: 47498 - RNA, 25 nt, Artificial Sequence
  Description of Artificial Sequence: Synthetic oligonucleotide
uaaacccuuauaauaaaauccuucu

SEQ ID NO: 47499 - RNA, 25 nt, Artificial Sequence
  Description of Artificial Sequence: Synthetic oligonucleotide
cauacuauuagccaaugcuguagac

SEQ ID NO: 47500 - RNA, 25 nt, Artificial Sequence
  Description of Artificial Sequence: Synthetic oligonucleotide
gacagaagcauuuugauaggaauag

SEQ ID NO: 47501 - RNA, 25 nt, Artificial Sequence
  Description of Artificial Sequence: Synthetic oligonucleotide
agagcaaauaagauaauggcccuga

SEQ ID NO: 47502 - RNA, 25 nt, Artificial Sequence
  Description of Artificial Sequence: Synthetic oligonucleotide
ccaacauuuuucucuuccucaagca

SEQ ID NO: 47503 - RNA, 25 nt, Artificial Sequence
  Description of Artificial Sequence: Synthetic oligonucleotide
uuaaguaugagaaaaguucagccca

SEQ ID NO: 47504 - RNA, 25 nt, Artificial Sequence
  Description of Artificial Sequence: Synthetic oligonucleotide
caggaauaaagauggcugcugaacc

SEQ ID NO: 47505 - RNA, 25 nt, Artificial Sequence
  Description of Artificial Sequence: Synthetic oligonucleotide
aauuugaaugaccaaguucucuuca

SEQ ID NO: 47506 - RNA, 25 nt, Artificial Sequence
  Description of Artificial Sequence: Synthetic oligonucleotide
auguauaaagauagccagccuagag

SEQ ID NO: 47507 - RNA, 25 nt, Artificial Sequence
  Description of Artificial Sequence: Synthetic oligonucleotide
ggcuguaacuaucucugugaagugu

SEQ ID NO: 47508 - RNA, 25 nt, Artificial Sequence
  Description of Artificial Sequence: Synthetic oligonucleotide
ucugugaagugugagaaaauuucaa

SEQ ID NO: 47509 - RNA, 25 nt, Artificial Sequence
  Description of Artificial Sequence: Synthetic oligonucleotide
ccuuuaaggaaaugaauccuccuga

SEQ ID NO: 47510 - RNA, 25 nt, Artificial Sequence
  Description of Artificial Sequence: Synthetic oligonucleotide
aaggauacaaaaagugacaucauau

SEQ ID NO: 47511 - RNA, 25 nt, Artificial Sequence
  Description of Artificial Sequence: Synthetic oligonucleotide
agaugcaauuugaaucuucaucaua

SEQ ID NO: 47512 - RNA, 25 nt, Artificial Sequence
  Description of Artificial Sequence: Synthetic oligonucleotide
guucaaaacgaagacuagcuauuaa

SEQ ID NO: 47513 - RNA, 25 nt, Artificial Sequence
  Description of Artificial Sequence: Synthetic oligonucleotide
gugaaaccucaucucuacuaaaaau

SEQ ID NO: 47514 - RNA, 25 nt, Artificial Sequence
  Description of Artificial Sequence: Synthetic oligonucleotide
acgaaagagaagcucuaucucgccu

SEQ ID NO: 47515 - RNA, 25 nt, Artificial Sequence
  Description of Artificial Sequence: Synthetic oligonucleotide
cuccacaagcgccuucgguccaguu

SEQ ID NO: 47516 - RNA, 25 nt, Artificial Sequence
  Description of Artificial Sequence: Synthetic oligonucleotide
gagaagauuccaaagauguagccgc

SEQ ID NO: 47517 - RNA, 25 nt, Artificial Sequence
  Description of Artificial Sequence: Synthetic oligonucleotide
aaucuggauucaaugaggagacuug

SEQ ID NO: 47518 - RNA, 25 nt, Artificial Sequence
  Description of Artificial Sequence: Synthetic oligonucleotide
agaacagauuugagaguagugagga

SEQ ID NO: 47519 - RNA, 25 nt, Artificial Sequence
  Description of Artificial Sequence: Synthetic oligonucleotide
ccagagcugugcagaugaguacaaa

SEQ ID NO: 47520 - RNA, 25 nt, Artificial Sequence
  Description of Artificial Sequence: Synthetic oligonucleotide
ccucagauuguuguuguuaaugggc

SEQ ID NO: 47521 - RNA, 25 nt, Artificial Sequence
  Description of Artificial Sequence: Synthetic oligonucleotide
cuauuuuaauuauuuuuaauuuauu

SEQ ID NO: 47522 - RNA, 25 nt, Artificial Sequence
  Description of Artificial Sequence: Synthetic oligonucleotide
uuuaauuuauuaauauuuaaauaug

SEQ ID NO: 47523 - RNA, 25 nt, Artificial Sequence
  Description of Artificial Sequence: Synthetic oligonucleotide
augcaguuugaauauccuuuguuuc

SEQ ID NO: 47524 - RNA, 25 nt, Artificial Sequence
  Description of Artificial Sequence: Synthetic oligonucleotide
caugcugcuggcgucuaaguguuug

SEQ ID NO: 47525 - RNA, 25 nt, Artificial Sequence
  Description of Artificial Sequence: Synthetic oligonucleotide
agaugugcauuucaccugugacaaa

SEQ ID NO: 47526 - RNA, 25 nt, Artificial Sequence
  Description of Artificial Sequence: Synthetic oligonucleotide
ucaaaaccugugccaggcugaauua

SEQ ID NO: 47527 - RNA, 25 nt, Artificial Sequence
  Description of Artificial Sequence: Synthetic oligonucleotide
gaauguggguagucauucuuacaau

SEQ ID NO: 47528 - RNA, 25 nt, Artificial Sequence
  Description of Artificial Sequence: Synthetic oligonucleotide
auguggguagucauucuuacaauug

SEQ ID NO: 47529 - RNA, 25 nt, Artificial Sequence
  Description of Artificial Sequence: Synthetic oligonucleotide
ugaaaaugagcaucagagaguguac

SEQ ID NO: 47530 - RNA, 25 nt, Artificial Sequence
  Description of Artificial Sequence: Synthetic oligonucleotide
uugcuuuucauguagaacucagcag

SEQ ID NO: 47531 - RNA, 25 nt, Artificial Sequence
  Description of Artificial Sequence: Synthetic oligonucleotide
uguauuucuauauuuauuuucagua

SEQ ID NO: 47532 - RNA, 25 nt, Artificial Sequence
  Description of Artificial Sequence: Synthetic oligonucleotide
uuugauuaauguuucuuaaauggaa

SEQ ID NO: 47533 - RNA, 25 nt, Artificial Sequence
  Description of Artificial Sequence: Synthetic oligonucleotide
caacguguauagugccuaaaauugu

SEQ ID NO: 47534 - RNA, 25 nt, Artificial Sequence
  Description of Artificial Sequence: Synthetic oligonucleotide
cauauccuuggcuacuaacaucugg

SEQ ID NO: 47535 - RNA, 25 nt, Artificial Sequence
  Description of Artificial Sequence: Synthetic oligonucleotide
uacuaacaucuggagacugugagcu

SEQ ID NO: 47536 - RNA, 25 nt, Artificial Sequence
  Description of Artificial Sequence: Synthetic oligonucleotide
cauaaguugugugcuuuuuauuaau

SEQ ID NO: 47537 - RNA, 25 nt, Artificial Sequence
  Description of Artificial Sequence: Synthetic oligonucleotide
gcaucauuuuggcucuucuuacauu

SEQ ID NO: 47538 - RNA, 25 nt, Artificial Sequence
  Description of Artificial Sequence: Synthetic oligonucleotide
gcucuucuuacauuuguaaaaaugu

SEQ ID NO: 47539 - RNA, 25 nt, Artificial Sequence
  Description of Artificial Sequence: Synthetic oligonucleotide
agauuaggucaucuuaauucauauu

SEQ ID NO: 47540 - RNA, 25 nt, Artificial Sequence
  Description of Artificial Sequence: Synthetic oligonucleotide
auggaauugaaagaacuaaucauga

SEQ ID NO: 47541 - RNA, 25 nt, Artificial Sequence
  Description of Artificial Sequence: Synthetic oligonucleotide
cacacucauuccuucugcucuuggg

SEQ ID NO: 47542 - RNA, 25 nt, Artificial Sequence
  Description of Artificial Sequence: Synthetic oligonucleotide
uguagagguaaccaguagcuuugag

SEQ ID NO: 47543 - RNA, 25 nt, Artificial Sequence
  Description of Artificial Sequence: Synthetic oligonucleotide
caaccacaugccacguaauauuuca

SEQ ID NO: 47544 - RNA, 25 nt, Artificial Sequence
  Description of Artificial Sequence: Synthetic oligonucleotide
ucggaaacaaguuauucucuucacu

SEQ ID NO: 47545 - RNA, 25 nt, Artificial Sequence
  Description of Artificial Sequence: Synthetic oligonucleotide
acucccaauaacuaaugcuaagaaa

SEQ ID NO: 47546 - RNA, 25 nt, Artificial Sequence
  Description of Artificial Sequence: Synthetic oligonucleotide
aaugcuaagaaaugcugaaaaucaa

SEQ ID NO: 47547 - RNA, 25 nt, Artificial Sequence
  Description of Artificial Sequence: Synthetic oligonucleotide
gucuuucucuaaauaugauuacuuu

SEQ ID NO: 47548 - RNA, 25 nt, Artificial Sequence
  Description of Artificial Sequence: Synthetic oligonucleotide
ugaauuucaggcauuuuguucuaca

SEQ ID NO: 47549 - RNA, 25 nt, Artificial Sequence
  Description of Artificial Sequence: Synthetic oligonucleotide
cgauucccucucacccgggacucuc

SEQ ID NO: 47550 - RNA, 25 nt, Artificial Sequence
  Description of Artificial Sequence: Synthetic oligonucleotide
aggaaagugaaccuuuaaaguaaag

SEQ ID NO: 47551 - RNA, 25 nt, Artificial Sequence
  Description of Artificial Sequence: Synthetic oligonucleotide
gaggcugcaugcucuggaagccugg

SEQ ID NO: 47552 - RNA, 25 nt, Artificial Sequence
  Description of Artificial Sequence: Synthetic oligonucleotide
ucucugaacagaaaacaaaagagag

SEQ ID NO: 47553 - RNA, 25 nt, Artificial Sequence
  Description of Artificial Sequence: Synthetic oligonucleotide
aacuuggcuguaaucaguuaugccg

SEQ ID NO: 47554 - RNA, 25 nt, Artificial Sequence
  Description of Artificial Sequence: Synthetic oligonucleotide
agaagccaaaauuaaaagaagucca

SEQ ID NO: 47555 - RNA, 25 nt, Artificial Sequence
  Description of Artificial Sequence: Synthetic oligonucleotide
auuaaaagaaguccaggugagguua

SEQ ID NO: 47556 - RNA, 25 nt, Artificial Sequence
  Description of Artificial Sequence: Synthetic oligonucleotide
gaauccggauuaucgggaagaggac

SEQ ID NO: 47557 - RNA, 25 nt, Artificial Sequence
  Description of Artificial Sequence: Synthetic oligonucleotide
aaugugacaucaaagcaaguauugu

SEQ ID NO: 47558 - RNA, 25 nt, Artificial Sequence
  Description of Artificial Sequence: Synthetic oligonucleotide
caucaaagcaaguauuguagcacuc

SEQ ID NO: 47559 - RNA, 25 nt, Artificial Sequence
  Description of Artificial Sequence: Synthetic oligonucleotide
agagagagaaaacaaaaccacaaau

SEQ ID NO: 47560 - RNA, 25 nt, Artificial Sequence
  Description of Artificial Sequence: Synthetic oligonucleotide
ucgcuguaguauuuaagcccauaca

SEQ ID NO: 47561 - RNA, 25 nt, Artificial Sequence
  Description of Artificial Sequence: Synthetic oligonucleotide
cgcuguaguauuuaagcccauacag

SEQ ID NO: 47562 - RNA, 25 nt, Artificial Sequence
  Description of Artificial Sequence: Synthetic oligonucleotide
auuuaagcccauacagaaaccuucc

SEQ ID NO: 47563 - RNA, 25 nt, Artificial Sequence
  Description of Artificial Sequence: Synthetic oligonucleotide
auuaaaauaaacaugguauaccuac

SEQ ID NO: 47564 - RNA, 25 nt, Artificial Sequence
  Description of Artificial Sequence: Synthetic oligonucleotide
cuguucugaucggccaguuuucgga

SEQ ID NO: 47565 - RNA, 25 nt, Artificial Sequence
  Description of Artificial Sequence: Synthetic oligonucleotide
aaauaauuugaacuuuggaacaggg

SEQ ID NO: 47566 - RNA, 25 nt, Artificial Sequence
  Description of Artificial Sequence: Synthetic oligonucleotide
ugcgaccuuaauuuaacuuuccagu

SEQ ID NO: 47567 - RNA, 25 nt, Artificial Sequence
  Description of Artificial Sequence: Synthetic oligonucleotide
cugagaaagcuaaaguuugguuuug

SEQ ID NO: 47568 - RNA, 25 nt, Artificial Sequence
  Description of Artificial Sequence: Synthetic oligonucleotide
aguaaagaugcuacuucccacugua

SEQ ID NO: 47569 - RNA, 25 nt, Artificial Sequence
  Description of Artificial Sequence: Synthetic oligonucleotide
cugcuuaauugcugauaccauauga

SEQ ID NO: 47570 - RNA, 25 nt, Artificial Sequence
  Description of Artificial Sequence: Synthetic oligonucleotide
uaccauaugaaugaaacaugggcug

SEQ ID NO: 47571 - RNA, 25 nt, Artificial Sequence
  Description of Artificial Sequence: Synthetic oligonucleotide
aacuuucuuauccaacuuuuucaua

SEQ ID NO: 47572 - RNA, 25 nt, Artificial Sequence
  Description of Artificial Sequence: Synthetic oligonucleotide
ccuugcaugacaucaugaggccgga

SEQ ID NO: 47573 - RNA, 25 nt, Artificial Sequence
  Description of Artificial Sequence: Synthetic oligonucleotide
ugaauuuguauaugacugcauuugu

SEQ ID NO: 47574 - RNA, 25 nt, Artificial Sequence
  Description of Artificial Sequence: Synthetic oligonucleotide
gaauccuaguagaauguuuacuacc

SEQ ID NO: 47575 - RNA, 25 nt, Artificial Sequence
  Description of Artificial Sequence: Synthetic oligonucleotide
gaaagggaagaauuuuuugaugaaa

SEQ ID NO: 47576 - RNA, 25 nt, Artificial Sequence
  Description of Artificial Sequence: Synthetic oligonucleotide
uaucggcaugccagugugugaauuu

SEQ ID NO: 47577 - RNA, 25 nt, Artificial Sequence
  Description of Artificial Sequence: Synthetic oligonucleotide
caccucauaguagagcaauguaugu

SEQ ID NO: 47578 - RNA, 25 nt, Artificial Sequence
  Description of Artificial Sequence: Synthetic oligonucleotide
ccagaauugccaaagcacauauaua

SEQ ID NO: 47579 - RNA, 25 nt, Artificial Sequence
  Description of Artificial Sequence: Synthetic oligonucleotide
uggugaucuggguaauaguuucucc

SEQ ID NO: 47580 - RNA, 25 nt, Artificial Sequence
  Description of Artificial Sequence: Synthetic oligonucleotide
gaucuggguaauaguuucuccaaau

SEQ ID NO: 47581 - RNA, 25 nt, Artificial Sequence
  Description of Artificial Sequence: Synthetic oligonucleotide
ggaugugaugaauacuuccuagaaa

SEQ ID NO: 47582 - RNA, 25 nt, Artificial Sequence
  Description of Artificial Sequence: Synthetic oligonucleotide
cauuuccacagcuacaccauauaug

SEQ ID NO: 47583 - RNA, 25 nt, Artificial Sequence
  Description of Artificial Sequence: Synthetic oligonucleotide
acagcuacaccauauaugaauggag

SEQ ID NO: 47584 - RNA, 25 nt, Artificial Sequence
  Description of Artificial Sequence: Synthetic oligonucleotide
ugcaguucuuacacgagaagaagau

SEQ ID NO: 47585 - RNA, 25 nt, Artificial Sequence
  Description of Artificial Sequence: Synthetic oligonucleotide
acgagaagaagaucauuuacaggga

SEQ ID NO: 47586 - RNA, 25 nt, Artificial Sequence
  Description of Artificial Sequence: Synthetic oligonucleotide
cgagaagaagaucauuuacagggac

SEQ ID NO: 47587 - RNA, 25 nt, Artificial Sequence
  Description of Artificial Sequence: Synthetic oligonucleotide
aagaagaucauuuacagggaccuga

SEQ ID NO: 47588 - RNA, 25 nt, Artificial Sequence
  Description of Artificial Sequence: Synthetic oligonucleotide
agaggaagagguguuugacugcauc

SEQ ID NO: 47589 - RNA, 25 nt, Artificial Sequence
  Description of Artificial Sequence: Synthetic oligonucleotide
gaggaagagguguuugacugcaucg

SEQ ID NO: 47590 - RNA, 25 nt, Artificial Sequence
  Description of Artificial Sequence: Synthetic oligonucleotide
cuacuuugagggcgaguucacaggg

SEQ ID NO: 47591 - RNA, 25 nt, Artificial Sequence
  Description of Artificial Sequence: Synthetic oligonucleotide
agggcaucuccuggcaccucugucc

SEQ ID NO: 47592 - RNA, 25 nt, Artificial Sequence
  Description of Artificial Sequence: Synthetic oligonucleotide
ggagugauaugguuugucuuuuuaa

SEQ ID NO: 47593 - RNA, 25 nt, Artificial Sequence
  Description of Artificial Sequence: Synthetic oligonucleotide
gagugauaugguuugucuuuuuaag

SEQ ID NO: 47594 - RNA, 25 nt, Artificial Sequence
  Description of Artificial Sequence: Synthetic oligonucleotide
ugcaguaaagauccuaaagguuguc

SEQ ID NO: 47595 - RNA, 25 nt, Artificial Sequence
  Description of Artificial Sequence: Synthetic oligonucleotide
aguaaagauccuaaagguugucgac

SEQ ID NO: 47596 - RNA, 25 nt, Artificial Sequence
  Description of Artificial Sequence: Synthetic oligonucleotide
ugacaaaggacaaccuggcaauugu

SEQ ID NO: 47597 - RNA, 25 nt, Artificial Sequence
  Description of Artificial Sequence: Synthetic oligonucleotide
gcaauugugacccaguggugcgagg

SEQ ID NO: 47598 - RNA, 25 nt, Artificial Sequence
  Description of Artificial Sequence: Synthetic oligonucleotide
aacaucauccauagagacaugaaau

SEQ ID NO: 47599 - RNA, 25 nt, Artificial Sequence
  Description of Artificial Sequence: Synthetic oligonucleotide
ugaaauccaacaauauauuucucca

SEQ ID NO: 47600 - RNA, 25 nt, Artificial Sequence
  Description of Artificial Sequence: Synthetic oligonucleotide
aacaauauauuucuccaugaaggcu

SEQ ID NO: 47601 - RNA, 25 nt, Artificial Sequence
  Description of Artificial Sequence: Synthetic oligonucleotide
aacaguaaagucacgcuggaguggu

SEQ ID NO: 47602 - RNA, 25 nt, Artificial Sequence
  Description of Artificial Sequence: Synthetic oligonucleotide
ugugaagaaaguaaaggaagagagg

SEQ ID NO: 47603 - RNA, 25 nt, Artificial Sequence
  Description of Artificial Sequence: Synthetic oligonucleotide
cuuccgagccauccuugcaucgggc

SEQ ID NO: 47604 - RNA, 25 nt, Artificial Sequence
  Description of Artificial Sequence: Synthetic oligonucleotide
aauggagguugaauauccuacugug

SEQ ID NO: 47605 - RNA, 25 nt, Artificial Sequence
  Description of Artificial Sequence: Synthetic oligonucleotide
ggagguugaauauccuacuguguaa

SEQ ID NO: 47606 - RNA, 25 nt, Artificial Sequence
  Description of Artificial Sequence: Synthetic oligonucleotide
auuuugaguuuucccuuguagugua

SEQ ID NO: 47607 - RNA, 25 nt, Artificial Sequence
  Description of Artificial Sequence: Synthetic oligonucleotide
uauccuguuuguucuuuguugauug

SEQ ID NO: 47608 - RNA, 25 nt, Artificial Sequence
  Description of Artificial Sequence: Synthetic oligonucleotide
ccuguuuguucuuuguugauugaaa

SEQ ID NO: 47609 - RNA, 25 nt, Artificial Sequence
  Description of Artificial Sequence: Synthetic oligonucleotide
cucuacagccuucuuuuucuuccau

SEQ ID NO: 47610 - RNA, 25 nt, Artificial Sequence
  Description of Artificial Sequence: Synthetic oligonucleotide
ucuuccauagcuaaucuuccuucua

SEQ ID NO: 47611 - RNA, 25 nt, Artificial Sequence
  Description of Artificial Sequence: Synthetic oligonucleotide
auaaucuuccuguugaaugcuucau

SEQ ID NO: 47612 - RNA, 25 nt, Artificial Sequence
  Description of Artificial Sequence: Synthetic oligonucleotide
uaaucuuccuguugaaugcuucaug

SEQ ID NO: 47613 - RNA, 25 nt, Artificial Sequence
  Description of Artificial Sequence: Synthetic oligonucleotide
cuucaugacuugaauucuacuuuga

SEQ ID NO: 47614 - RNA, 25 nt, Artificial Sequence
  Description of Artificial Sequence: Synthetic oligonucleotide
aagagggagagaagcaacuacagac

SEQ ID NO: 47615 - RNA, 25 nt, Artificial Sequence
  Description of Artificial Sequence: Synthetic oligonucleotide
cgucuccuaccagaccaaggucaac

SEQ ID NO: 47616 - RNA, 25 nt, Artificial Sequence
  Description of Artificial Sequence: Synthetic oligonucleotide
gaucaaucggcccgacuaucucgac

SEQ ID NO: 47617 - RNA, 25 nt, Artificial Sequence
  Description of Artificial Sequence: Synthetic oligonucleotide
ggacgaacauccaaccuucccaaac

SEQ ID NO: 47618 - RNA, 25 nt, Artificial Sequence
  Description of Artificial Sequence: Synthetic oligonucleotide
agggucggaacccaagcuuagaacu

SEQ ID NO: 47619 - RNA, 25 nt, Artificial Sequence
  Description of Artificial Sequence: Synthetic oligonucleotide
ucggaacccaagcuuagaacuuuaa

SEQ ID NO: 47620 - RNA, 25 nt, Artificial Sequence
  Description of Artificial Sequence: Synthetic oligonucleotide
acccaagcuuagaacuuuaagcaac

SEQ ID NO: 47621 - RNA, 25 nt, Artificial Sequence
  Description of Artificial Sequence: Synthetic oligonucleotide
gaacuuuaagcaacaagaccaccac

SEQ ID NO: 47622 - RNA, 25 nt, Artificial Sequence
  Description of Artificial Sequence: Synthetic oligonucleotide
acuauucaguggcgagaaauaaagu

SEQ ID NO: 47623 - RNA, 25 nt, Artificial Sequence
  Description of Artificial Sequence: Synthetic oligonucleotide
cuauucaguggcgagaaauaaaguu

SEQ ID NO: 47624 - RNA, 25 nt, Artificial Sequence
  Description of Artificial Sequence: Synthetic oligonucleotide
aaacacagauaacaggaaaugaucc

SEQ ID NO: 47625 - RNA, 25 nt, Artificial Sequence
  Description of Artificial Sequence: Synthetic oligonucleotide
cuuaagaaaagagaagaaaugaaac

SEQ ID NO: 47626 - RNA, 25 nt, Artificial Sequence
  Description of Artificial Sequence: Synthetic oligonucleotide
cugaaggaguguguuuccauccucc

SEQ ID NO: 47627 - RNA, 25 nt, Artificial Sequence
  Description of Artificial Sequence: Synthetic oligonucleotide
ucaccgcgggacugaaaaucuuuga

SEQ ID NO: 47628 - RNA, 25 nt, Artificial Sequence
  Description of Artificial Sequence: Synthetic oligonucleotide
agcagaaauaagcgugccguucagg

SEQ ID NO: 47629 - RNA, 25 nt, Artificial Sequence
  Description of Artificial Sequence: Synthetic oligonucleotide
aagcgugccguucaggguccagaag

SEQ ID NO: 47630 - RNA, 25 nt, Artificial Sequence
  Description of Artificial Sequence: Synthetic oligonucleotide
agaaacagucacucaagacugcuug

SEQ ID NO: 47631 - RNA, 25 nt, Artificial Sequence
  Description of Artificial Sequence: Synthetic oligonucleotide
agaggaagaagguccaugucuuugg

SEQ ID NO: 47632 - RNA, 25 nt, Artificial Sequence
  Description of Artificial Sequence: Synthetic oligonucleotide
uguauucaaaauaugccugaaacac

SEQ ID NO: 47633 - RNA, 25 nt, Artificial Sequence
  Description of Artificial Sequence: Synthetic oligonucleotide
auuuuccucccuuucucuguaccuc

SEQ ID NO: 47634 - RNA, 25 nt, Artificial Sequence
  Description of Artificial Sequence: Synthetic oligonucleotide
caaagaaagauagagcaagacaaga

SEQ ID NO: 47635 - RNA, 25 nt, Artificial Sequence
  Description of Artificial Sequence: Synthetic oligonucleotide
aagaaagauagagcaagacaagaaa

SEQ ID NO: 47636 - RNA, 25 nt, Artificial Sequence
  Description of Artificial Sequence: Synthetic oligonucleotide
gaaagcauuuguuuguacaagaucc

SEQ ID NO: 47637 - RNA, 25 nt, Artificial Sequence
  Description of Artificial Sequence: Synthetic oligonucleotide
ugaguuaaacgaacguacuugcaga

SEQ ID NO: 47638 - RNA, 25 nt, Artificial Sequence
  Description of Artificial Sequence: Synthetic oligonucleotide
acugauacagaacgaucgauacaga

SEQ ID NO: 47639 - RNA, 25 nt, Artificial Sequence
  Description of Artificial Sequence: Synthetic oligonucleotide
auauuauauauauauaaaaauaaau

SEQ ID NO: 47640 - RNA, 25 nt, Artificial Sequence
  Description of Artificial Sequence: Synthetic oligonucleotide
auuauauauauauaaaaauaaauau

SEQ ID NO: 47641 - RNA, 25 nt, Artificial Sequence
  Description of Artificial Sequence: Synthetic oligonucleotide
ucacuggauguauuugacugcugug

SEQ ID NO: 47642 - RNA, 25 nt, Artificial Sequence
  Description of Artificial Sequence: Synthetic oligonucleotide
cagggaagaggaggagaugagagac

SEQ ID NO: 47643 - RNA, 25 nt, Artificial Sequence
  Description of Artificial Sequence: Synthetic oligonucleotide
augaucuuuuuuuugucccacuugg

SEQ ID NO: 47644 - RNA, 27 nt, Artificial Sequence
  Description of Artificial Sequence: Synthetic oligonucleotide
ggccgugaacuccucaucaaaauaccu

SEQ ID NO: 47645 - RNA, 27 nt, Artificial Sequence
  Description of Artificial Sequence: Synthetic oligonucleotide
uggugugauggugaucaucugggccgu

SEQ ID NO: 47646 - RNA, 27 nt, Artificial Sequence
  Description of Artificial Sequence: Synthetic oligonucleotide
aaacccgcaggauaguuuucuucccua

SEQ ID NO: 47647 - RNA, 27 nt, Artificial Sequence
  Description of Artificial Sequence: Synthetic oligonucleotide
caaacuggaugaaauaaauuaaaaccc

SEQ ID NO: 47648 - RNA, 27 nt, Artificial Sequence
  Description of Artificial Sequence: Synthetic oligonucleotide
agaaguccuuaacauuucccuacguga

SEQ ID NO: 47649 - RNA, 27 nt, Artificial Sequence
  Description of Artificial Sequence: Synthetic oligonucleotide
cucugucccacuggguaaacccuggcc

SEQ ID NO: 47650 - RNA, 27 nt, Artificial Sequence
  Description of Artificial Sequence: Synthetic oligonucleotide
cacaauaacaaauuuaaaccuugcucc

SEQ ID NO: 47651 - RNA, 27 nt, Artificial Sequence
  Description of Artificial Sequence: Synthetic oligonucleotide
aaaugcauuugaacaacauaauacaca

SEQ ID NO: 47652 - RNA, 27 nt, Artificial Sequence
  Description of Artificial Sequence: Synthetic oligonucleotide
ggcuuuccugucacaaagauuaaaaac

SEQ ID NO: 47653 - RNA, 27 nt, Artificial Sequence
  Description of Artificial Sequence: Synthetic oligonucleotide
agggcuuuccugucacaaagauuaaaa

SEQ ID NO: 47654 - RNA, 27 nt, Artificial Sequence
  Description of Artificial Sequence: Synthetic oligonucleotide
ggccaugcugggagacauaagcagcag

SEQ ID NO: 47655 - RNA, 27 nt, Artificial Sequence
  Description of Artificial Sequence: Synthetic oligonucleotide
ucagggagaagcuucugaaacacuucu

SEQ ID NO: 47656 - RNA, 27 nt, Artificial Sequence
  Description of Artificial Sequence: Synthetic oligonucleotide
aagggcuucuuccuuauugauggucag

SEQ ID NO: 47657 - RNA, 27 nt, Artificial Sequence
  Description of Artificial Sequence: Synthetic oligonucleotide
ugaagggcuucuuccuuauugaugguc

SEQ ID NO: 47658 - RNA, 27 nt, Artificial Sequence
  Description of Artificial Sequence: Synthetic oligonucleotide
cgcugaagggcuucuuccuuauugaug

SEQ ID NO: 47659 - RNA, 27 nt, Artificial Sequence
  Description of Artificial Sequence: Synthetic oligonucleotide
gccgcugaagggcuucuuccuuauuga

SEQ ID NO: 47660 - RNA, 27 nt, Artificial Sequence
  Description of Artificial Sequence: Synthetic oligonucleotide
acuggccgcugaagggcuucuuccuua

SEQ ID NO: 47661 - RNA, 27 nt, Artificial Sequence
  Description of Artificial Sequence: Synthetic oligonucleotide
cggagcuuuucaccuuuaguuaugcuu

SEQ ID NO: 47662 - RNA, 27 nt, Artificial Sequence
  Description of Artificial Sequence: Synthetic oligonucleotide
ccggagcuuuucaccuuuaguuaugcu

SEQ ID NO: 47663 - RNA, 27 nt, Artificial Sequence
  Description of Artificial Sequence: Synthetic oligonucleotide
cagacuguugacuggcgugauguaguu

SEQ ID NO: 47664 - RNA, 27 nt, Artificial Sequence
  Description of Artificial Sequence: Synthetic oligonucleotide
cuuuugaacucugcuuaaauccagugg

SEQ ID NO: 47665 - RNA, 27 nt, Artificial Sequence
  Description of Artificial Sequence: Synthetic oligonucleotide
gcuuuugaacucugcuuaaauccagug

SEQ ID NO: 47666 - RNA, 27 nt, Artificial Sequence
  Description of Artificial Sequence: Synthetic oligonucleotide
agggcuuuugaacucugcuuaaaucca

SEQ ID NO: 47667 - RNA, 27 nt, Artificial Sequence
  Description of Artificial Sequence: Synthetic oligonucleotide
aagggcuuuugaacucugcuuaaaucc

SEQ ID NO: 47668 - RNA, 27 nt, Artificial Sequence
  Description of Artificial Sequence: Synthetic oligonucleotide
ugaagggcuuuugaacucugcuuaaau

SEQ ID NO: 47669 - RNA, 27 nt, Artificial Sequence
  Description of Artificial Sequence: Synthetic oligonucleotide
cugaagggcuuuugaacucugcuuaaa

SEQ ID NO: 47670 - RNA, 27 nt, Artificial Sequence
  Description of Artificial Sequence: Synthetic oligonucleotide
cgcugaagggcuuuugaacucugcuua

SEQ ID NO: 47671 - RNA, 27 nt, Artificial Sequence
  Description of Artificial Sequence: Synthetic oligonucleotide
cgagcggcuucacucagacccugaggc

SEQ ID NO: 47672 - RNA, 27 nt, Artificial Sequence
  Description of Artificial Sequence: Synthetic oligonucleotide
uugacuggcgugauguaguugcuuggg

SEQ ID NO: 47673 - RNA, 27 nt, Artificial Sequence
  Description of Artificial Sequence: Synthetic oligonucleotide
cacgcaccaagaagcugccauugaucc

SEQ ID NO: 47674 - RNA, 27 nt, Artificial Sequence
  Description of Artificial Sequence: Synthetic oligonucleotide
cugaugaauccaaugugggcuggaauc

SEQ ID NO: 47675 - RNA, 27 nt, Artificial Sequence
  Description of Artificial Sequence: Synthetic oligonucleotide
cuuagguauuccacauucucagcugug

SEQ ID NO: 47676 - RNA, 27 nt, Artificial Sequence
  Description of Artificial Sequence: Synthetic oligonucleotide
ugagccucaaauuaggagauacguuuu

SEQ ID NO: 47677 - RNA, 27 nt, Artificial Sequence
  Description of Artificial Sequence: Synthetic oligonucleotide
ccaauuguagagaaauuauuuuaggaa

SEQ ID NO: 47678 - RNA, 27 nt, Artificial Sequence
  Description of Artificial Sequence: Synthetic oligonucleotide
ggcuccuaacuagcugaaucuuccaau

SEQ ID NO: 47679 - RNA, 27 nt, Artificial Sequence
  Description of Artificial Sequence: Synthetic oligonucleotide
guggauauugacuaggagaguuuaaaa

SEQ ID NO: 47680 - RNA, 27 nt, Artificial Sequence
  Description of Artificial Sequence: Synthetic oligonucleotide
ugugacugaacauaacuguaggcugaa

SEQ ID NO: 47681 - RNA, 27 nt, Artificial Sequence
  Description of Artificial Sequence: Synthetic oligonucleotide
guaugugugugugacugaacauaacug

SEQ ID NO: 47682 - RNA, 27 nt, Artificial Sequence
  Description of Artificial Sequence: Synthetic oligonucleotide
aagcaaaaggaacauuuuguaugugug

SEQ ID NO: 47683 - RNA, 27 nt, Artificial Sequence
  Description of Artificial Sequence: Synthetic oligonucleotide
aaaaauuacuuuaaaagcaaaaggaac

SEQ ID NO: 47684 - RNA, 27 nt, Artificial Sequence
  Description of Artificial Sequence: Synthetic oligonucleotide
ccauugacuguugcuucacaggucaga

SEQ ID NO: 47685 - RNA, 27 nt, Artificial Sequence
  Description of Artificial Sequence: Synthetic oligonucleotide
auugguuugucgaugugugagauaguu

SEQ ID NO: 47686 - RNA, 27 nt, Artificial Sequence
  Description of Artificial Sequence: Synthetic oligonucleotide
agugguagcaguacaauugaggacaag

SEQ ID NO: 47687 - RNA, 27 nt, Artificial Sequence
  Description of Artificial Sequence: Synthetic oligonucleotide
uaagaccgcuugccagcuacgguuuca

SEQ ID NO: 47688 - RNA, 27 nt, Artificial Sequence
  Description of Artificial Sequence: Synthetic oligonucleotide
agccgguaagaccgcuugccagcuacg

SEQ ID NO: 47689 - RNA, 27 nt, Artificial Sequence
  Description of Artificial Sequence: Synthetic oligonucleotide
gguaacccaucuuuuaaccauacaacu

SEQ ID NO: 47690 - RNA, 27 nt, Artificial Sequence
  Description of Artificial Sequence: Synthetic oligonucleotide
ucgcagguaacccaucuuuuaaccaua

SEQ ID NO: 47691 - RNA, 27 nt, Artificial Sequence
  Description of Artificial Sequence: Synthetic oligonucleotide
cucagcaagauuguauaauucccugca

SEQ ID NO: 47692 - RNA, 27 nt, Artificial Sequence
  Description of Artificial Sequence: Synthetic oligonucleotide
acuguuuuaugcucagcaagauuguau

SEQ ID NO: 47693 - RNA, 27 nt, Artificial Sequence
  Description of Artificial Sequence: Synthetic oligonucleotide
aggauaaaggacucuucauuauuggaa

SEQ ID NO: 47694 - RNA, 27 nt, Artificial Sequence
  Description of Artificial Sequence: Synthetic oligonucleotide
caacuugcguuggaacauccaaagugu

SEQ ID NO: 47695 - RNA, 27 nt, Artificial Sequence
  Description of Artificial Sequence: Synthetic oligonucleotide
augguuucaguuuaguggaagcauuua

SEQ ID NO: 47696 - RNA, 27 nt, Artificial Sequence
  Description of Artificial Sequence: Synthetic oligonucleotide
auauuuaacaaagucaaacuuucucac

SEQ ID NO: 47697 - RNA, 27 nt, Artificial Sequence
  Description of Artificial Sequence: Synthetic oligonucleotide
aacuuuuaauauacaguaguucuuuuc

SEQ ID NO: 47698 - RNA, 27 nt, Artificial Sequence
  Description of Artificial Sequence: Synthetic oligonucleotide
guuaagucaaaacccguauuucuaaag

SEQ ID NO: 47699 - RNA, 27 nt, Artificial Sequence
  Description of Artificial Sequence: Synthetic oligonucleotide
gugcugaguuugcuguacccauguuga

SEQ ID NO: 47700 - RNA, 27 nt, Artificial Sequence
  Description of Artificial Sequence: Synthetic oligonucleotide
ugaggucagcaucuucugugucuuuac

SEQ ID NO: 47701 - RNA, 27 nt, Artificial Sequence
  Description of Artificial Sequence: Synthetic oligonucleotide
gcgaucugaauaaaccucccuacuagc

SEQ ID NO: 47702 - RNA, 27 nt, Artificial Sequence
  Description of Artificial Sequence: Synthetic oligonucleotide
aucccagaacccugcugcagaaggcca

SEQ ID NO: 47703 - RNA, 27 nt, Artificial Sequence
  Description of Artificial Sequence: Synthetic oligonucleotide
cauaauuuccaauauguaccagaccuu

SEQ ID NO: 47704 - RNA, 27 nt, Artificial Sequence
  Description of Artificial Sequence: Synthetic oligonucleotide
cuagugcuuccaucggaaggacuaggu

SEQ ID NO: 47705 - RNA, 27 nt, Artificial Sequence
  Description of Artificial Sequence: Synthetic oligonucleotide
uccacauaaaaacaauauucacuggga

SEQ ID NO: 47706 - RNA, 27 nt, Artificial Sequence
  Description of Artificial Sequence: Synthetic oligonucleotide
ucuaccaauuccaacuugaauucauug

SEQ ID NO: 47707 - RNA, 27 nt, Artificial Sequence
  Description of Artificial Sequence: Synthetic oligonucleotide
ucuccaagucuaaaucuguguccugag

SEQ ID NO: 47708 - RNA, 27 nt, Artificial Sequence
  Description of Artificial Sequence: Synthetic oligonucleotide
uggaauacuguaacugugcuuugagga

SEQ ID NO: 47709 - RNA, 27 nt, Artificial Sequence
  Description of Artificial Sequence: Synthetic oligonucleotide
uuaauucaucagugguggcagugguag

SEQ ID NO: 47710 - RNA, 27 nt, Artificial Sequence
  Description of Artificial Sequence: Synthetic oligonucleotide
gugaugauguggcacuaguaguuucuu

SEQ ID NO: 47711 - RNA, 27 nt, Artificial Sequence
  Description of Artificial Sequence: Synthetic oligonucleotide
ucuguuuggugaggcuguccgacuuug

SEQ ID NO: 47712 - RNA, 27 nt, Artificial Sequence
  Description of Artificial Sequence: Synthetic oligonucleotide
ccaucauguuccauuuuucgcuuucuc

SEQ ID NO: 47713 - RNA, 27 nt, Artificial Sequence
  Description of Artificial Sequence: Synthetic oligonucleotide
gcagucuacaugcuaaaucagagggua

SEQ ID NO: 47714 - RNA, 27 nt, Artificial Sequence
  Description of Artificial Sequence: Synthetic oligonucleotide
cauaaauagauccuuaaauagcucaaa

SEQ ID NO: 47715 - RNA, 27 nt, Artificial Sequence
  Description of Artificial Sequence: Synthetic oligonucleotide
ugauaauagugcuuuuucaccuuuuuc

SEQ ID NO: 47716 - RNA, 27 nt, Artificial Sequence
  Description of Artificial Sequence: Synthetic oligonucleotide
gcagaacugauaauagugcuuuuucac

SEQ ID NO: 47717 - RNA, 27 nt, Artificial Sequence
  Description of Artificial Sequence: Synthetic oligonucleotide
guagguuuaaucuuucuuuucagccau

SEQ ID NO: 47718 - RNA, 27 nt, Artificial Sequence
  Description of Artificial Sequence: Synthetic oligonucleotide
agaaggauuuuauuauaaggguuuaau

SEQ ID NO: 47719 - RNA, 27 nt, Artificial Sequence
  Description of Artificial Sequence: Synthetic oligonucleotide
gucuacagcauuggcuaauaguaugaa

SEQ ID NO: 47720 - RNA, 27 nt, Artificial Sequence
  Description of Artificial Sequence: Synthetic oligonucleotide
cuauuccuaucaaaaugcuucugucua

SEQ ID NO: 47721 - RNA, 27 nt, Artificial Sequence
  Description of Artificial Sequence: Synthetic oligonucleotide
ucagggccauuaucuuauuugcucuau

SEQ ID NO: 47722 - RNA, 27 nt, Artificial Sequence
  Description of Artificial Sequence: Synthetic oligonucleotide
ugcuugaggaagagaaaaauguugguc

SEQ ID NO: 47723 - RNA, 27 nt, Artificial Sequence
  Description of Artificial Sequence: Synthetic oligonucleotide
ugggcugaacuuuucucauacuuaaag

SEQ ID NO: 47724 - RNA, 27 nt, Artificial Sequence
  Description of Artificial Sequence: Synthetic oligonucleotide
gguucagcagccaucuuuauuccugcg

SEQ ID NO: 47725 - RNA, 27 nt, Artificial Sequence
  Description of Artificial Sequence: Synthetic oligonucleotide
ugaagagaacuuggucauucaaauuuc

SEQ ID NO: 47726 - RNA, 27 nt, Artificial Sequence
  Description of Artificial Sequence: Synthetic oligonucleotide
cucuaggcuggcuaucuuuauacauac

SEQ ID NO: 47727 - RNA, 27 nt, Artificial Sequence
  Description of Artificial Sequence: Synthetic oligonucleotide
acacuucacagagauaguuacagccau

SEQ ID NO: 47728 - RNA, 27 nt, Artificial Sequence
  Description of Artificial Sequence: Synthetic oligonucleotide
uugaaauuuucucacacuucacagaga

SEQ ID NO: 47729 - RNA, 27 nt, Artificial Sequence
  Description of Artificial Sequence: Synthetic oligonucleotide
ucaggaggauucauuuccuuaaaggaa

SEQ ID NO: 47730 - RNA, 27 nt, Artificial Sequence
  Description of Artificial Sequence: Synthetic oligonucleotide
auaugaugucacuuuuuguauccuuga

SEQ ID NO: 47731 - RNA, 27 nt, Artificial Sequence
  Description of Artificial Sequence: Synthetic oligonucleotide
uaugaugaagauucaaauugcaucuua

SEQ ID NO: 47732 - RNA, 27 nt, Artificial Sequence
  Description of Artificial Sequence: Synthetic oligonucleotide
uuaauagcuagucuucguuuugaacag

SEQ ID NO: 47733 - RNA, 27 nt, Artificial Sequence
  Description of Artificial Sequence: Synthetic oligonucleotide
auuuuuaguagagaugagguuucacca

SEQ ID NO: 47734 - RNA, 27 nt, Artificial Sequence
  Description of Artificial Sequence: Synthetic oligonucleotide
aggcgagauagagcuucucuuucguuc

SEQ ID NO: 47735 - RNA, 27 nt, Artificial Sequence
  Description of Artificial Sequence: Synthetic oligonucleotide
aacuggaccgaaggcgcuuguggagaa

SEQ ID NO: 47736 - RNA, 27 nt, Artificial Sequence
  Description of Artificial Sequence: Synthetic oligonucleotide
gcggcuacaucuuuggaaucuucuccu

SEQ ID NO: 47737 - RNA, 27 nt, Artificial Sequence
  Description of Artificial Sequence: Synthetic oligonucleotide
caagucuccucauugaauccagauugg

SEQ ID NO: 47738 - RNA, 27 nt, Artificial Sequence
  Description of Artificial Sequence: Synthetic oligonucleotide
uccucacuacucucaaaucuguucugg

SEQ ID NO: 47739 - RNA, 27 nt, Artificial Sequence
  Description of Artificial Sequence: Synthetic oligonucleotide
uuuguacucaucugcacagcucuggcu

SEQ ID NO: 47740 - RNA, 27 nt, Artificial Sequence
  Description of Artificial Sequence: Synthetic oligonucleotide
gcccauuaacaacaacaaucugaggug

SEQ ID NO: 47741 - RNA, 27 nt, Artificial Sequence
  Description of Artificial Sequence: Synthetic oligonucleotide
aauaaauuaaaaauaauuaaaauagug

SEQ ID NO: 47742 - RNA, 27 nt, Artificial Sequence
  Description of Artificial Sequence: Synthetic oligonucleotide
cauauuuaaauauuaauaaauuaaaaa

SEQ ID NO: 47743 - RNA, 27 nt, Artificial Sequence
  Description of Artificial Sequence: Synthetic oligonucleotide
gaaacaaaggauauucaaacugcauag

SEQ ID NO: 47744 - RNA, 27 nt, Artificial Sequence
  Description of Artificial Sequence: Synthetic oligonucleotide
caaacacuuagacgccagcagcauggg

SEQ ID NO: 47745 - RNA, 27 nt, Artificial Sequence
  Description of Artificial Sequence: Synthetic oligonucleotide
uuugucacaggugaaaugcacaucuga

SEQ ID NO: 47746 - RNA, 27 nt, Artificial Sequence
  Description of Artificial Sequence: Synthetic oligonucleotide
uaauucagccuggcacagguuuugauc

SEQ ID NO: 47747 - RNA, 27 nt, Artificial Sequence
  Description of Artificial Sequence: Synthetic oligonucleotide
auuguaagaaugacuacccacauucac

SEQ ID NO: 47748 - RNA, 27 nt, Artificial Sequence
  Description of Artificial Sequence: Synthetic oligonucleotide
caauuguaagaaugacuacccacauuc

SEQ ID NO: 47749 - RNA, 27 nt, Artificial Sequence
  Description of Artificial Sequence: Synthetic oligonucleotide
guacacucucugaugcucauuuucaua

SEQ ID NO: 47750 - RNA, 27 nt, Artificial Sequence
  Description of Artificial Sequence: Synthetic oligonucleotide
cugcugaguucuacaugaaaagcaaau

SEQ ID NO: 47751 - RNA, 27 nt, Artificial Sequence
  Description of Artificial Sequence: Synthetic oligonucleotide
uacugaaaauaaauauagaaauacaac

SEQ ID NO: 47752 - RNA, 27 nt, Artificial Sequence
  Description of Artificial Sequence: Synthetic oligonucleotide
uuccauuuaagaaacauuaaucaaaac

SEQ ID NO: 47753 - RNA, 27 nt, Artificial Sequence
  Description of Artificial Sequence: Synthetic oligonucleotide
acaauuuuaggcacuauacacguuguu

SEQ ID NO: 47754 - RNA, 27 nt, Artificial Sequence
  Description of Artificial Sequence: Synthetic oligonucleotide
ccagauguuaguagccaaggauauggu

SEQ ID NO: 47755 - RNA, 27 nt, Artificial Sequence
  Description of Artificial Sequence: Synthetic oligonucleotide
agcucacagucuccagauguuaguagc

SEQ ID NO: 47756 - RNA, 27 nt, Artificial Sequence
  Description of Artificial Sequence: Synthetic oligonucleotide
auuaauaaaaagcacacaacuuauggc

SEQ ID NO: 47757 - RNA, 27 nt, Artificial Sequence
  Description of Artificial Sequence: Synthetic oligonucleotide
aauguaagaagagccaaaaugaugcau

SEQ ID NO: 47758 - RNA, 27 nt, Artificial Sequence
  Description of Artificial Sequence: Synthetic oligonucleotide
acauuuuuacaaauguaagaagagcca

SEQ ID NO: 47759 - RNA, 27 nt, Artificial Sequence
  Description of Artificial Sequence: Synthetic oligonucleotide
aauaugaauuaagaugaccuaaucugu

SEQ ID NO: 47760 - RNA, 27 nt, Artificial Sequence
  Description of Artificial Sequence: Synthetic oligonucleotide
ucaugauuaguucuuucaauuccaucc

SEQ ID NO: 47761 - RNA, 27 nt, Artificial Sequence
  Description of Artificial Sequence: Synthetic oligonucleotide
cccaagagcagaaggaaugagugugca

SEQ ID NO: 47762 - RNA, 27 nt, Artificial Sequence
  Description of Artificial Sequence: Synthetic oligonucleotide
cucaaagcuacugguuaccucuacacc

SEQ ID NO: 47763 - RNA, 27 nt, Artificial Sequence
  Description of Artificial Sequence: Synthetic oligonucleotide
ugaaauauuacguggcaugugguuggg

SEQ ID NO: 47764 - RNA, 27 nt, Artificial Sequence
  Description of Artificial Sequence: Synthetic oligonucleotide
agugaagagaauaacuuguuuccgaag

SEQ ID NO: 47765 - RNA, 27 nt, Artificial Sequence
  Description of Artificial Sequence: Synthetic oligonucleotide
uuucuuagcauuaguuauugggaguga

SEQ ID NO: 47766 - RNA, 27 nt, Artificial Sequence
  Description of Artificial Sequence: Synthetic oligonucleotide
uugauuuucagcauuucuuagcauuag

SEQ ID NO: 47767 - RNA, 27 nt, Artificial Sequence
  Description of Artificial Sequence: Synthetic oligonucleotide
aaaguaaucauauuuagagaaagacag

SEQ ID NO: 47768 - RNA, 27 nt, Artificial Sequence
  Description of Artificial Sequence: Synthetic oligonucleotide
uguagaacaaaaugccugaaauucagc

SEQ ID NO: 47769 - RNA, 27 nt, Artificial Sequence
  Description of Artificial Sequence: Synthetic oligonucleotide
gagagucccgggugagagggaaucgcc

SEQ ID NO: 47770 - RNA, 27 nt, Artificial Sequence
  Description of Artificial Sequence: Synthetic oligonucleotide
cuuuacuuuaaagguucacuuuccuug

SEQ ID NO: 47771 - RNA, 27 nt, Artificial Sequence
  Description of Artificial Sequence: Synthetic oligonucleotide
ccaggcuuccagagcaugcagccuccu

SEQ ID NO: 47772 - RNA, 27 nt, Artificial Sequence
  Description of Artificial Sequence: Synthetic oligonucleotide
cucucuuuuguuuucuguucagagaaa

SEQ ID NO: 47773 - RNA, 27 nt, Artificial Sequence
  Description of Artificial Sequence: Synthetic oligonucleotide
cggcauaacugauuacagccaaguuca

SEQ ID NO: 47774 - RNA, 27 nt, Artificial Sequence
  Description of Artificial Sequence: Synthetic oligonucleotide
uggacuucuuuuaauuuuggcuucuuc

SEQ ID NO: 47775 - RNA, 27 nt, Artificial Sequence
  Description of Artificial Sequence: Synthetic oligonucleotide
uaaccucaccuggacuucuuuuaauuu

SEQ ID NO: 47776 - RNA, 27 nt, Artificial Sequence
  Description of Artificial Sequence: Synthetic oligonucleotide
guccucuucccgauaauccggauucag

SEQ ID NO: 47777 - RNA, 27 nt, Artificial Sequence
  Description of Artificial Sequence: Synthetic oligonucleotide
acaauacuugcuuugaugucacauuaa

SEQ ID NO: 47778 - RNA, 27 nt, Artificial Sequence
  Description of Artificial Sequence: Synthetic oligonucleotide
gagugcuacaauacuugcuuugauguc

SEQ ID NO: 47779 - RNA, 27 nt, Artificial Sequence
  Description of Artificial Sequence: Synthetic oligonucleotide
auuugugguuuuguuuucucucucucu

SEQ ID NO: 47780 - RNA, 27 nt, Artificial Sequence
  Description of Artificial Sequence: Synthetic oligonucleotide
uguaugggcuuaaauacuacagcgagg

SEQ ID NO: 47781 - RNA, 27 nt, Artificial Sequence
  Description of Artificial Sequence: Synthetic oligonucleotide
cuguaugggcuuaaauacuacagcgag

SEQ ID NO: 47782 - RNA, 27 nt, Artificial Sequence
  Description of Artificial Sequence: Synthetic oligonucleotide
ggaagguuucuguaugggcuuaaauac

SEQ ID NO: 47783 - RNA, 27 nt, Artificial Sequence
  Description of Artificial Sequence: Synthetic oligonucleotide
guagguauaccauguuuauuuuaauac

SEQ ID NO: 47784 - RNA, 27 nt, Artificial Sequence
  Description of Artificial Sequence: Synthetic oligonucleotide
uccgaaaacuggccgaucagaacagcc

SEQ ID NO: 47785 - RNA, 27 nt, Artificial Sequence
  Description of Artificial Sequence: Synthetic oligonucleotide
cccuguuccaaaguucaaauuauuugu

SEQ ID NO: 47786 - RNA, 27 nt, Artificial Sequence
  Description of Artificial Sequence: Synthetic oligonucleotide
acuggaaaguuaaauuaaggucgcaau

SEQ ID NO: 47787 - RNA, 27 nt, Artificial Sequence
  Description of Artificial Sequence: Synthetic oligonucleotide
caaaaccaaacuuuagcuuucucagcc

SEQ ID NO: 47788 - RNA, 27 nt, Artificial Sequence
  Description of Artificial Sequence: Synthetic oligonucleotide
uacagugggaaguagcaucuuuacuuu

SEQ ID NO: 47789 - RNA, 27 nt, Artificial Sequence
  Description of Artificial Sequence: Synthetic oligonucleotide
ucauaugguaucagcaauuaagcagua

SEQ ID NO: 47790 - RNA, 27 nt, Artificial Sequence
  Description of Artificial Sequence: Synthetic oligonucleotide
cagcccauguuucauucauaugguauc

SEQ ID NO: 47791 - RNA, 27 nt, Artificial Sequence
  Description of Artificial Sequence: Synthetic oligonucleotide
uaugaaaaaguuggauaagaaaguugg

SEQ ID NO: 47792 - RNA, 27 nt, Artificial Sequence
  Description of Artificial Sequence: Synthetic oligonucleotide
uccggccucaugaugucaugcaaggcu

SEQ ID NO: 47793 - RNA, 27 nt, Artificial Sequence
  Description of Artificial Sequence: Synthetic oligonucleotide
acaaaugcagucauauacaaauucagg

SEQ ID NO: 47794 - RNA, 27 nt, Artificial Sequence
  Description of Artificial Sequence: Synthetic oligonucleotide
gguaguaaacauucuacuaggauucuu

SEQ ID NO: 47795 - RNA, 27 nt, Artificial Sequence
  Description of Artificial Sequence: Synthetic oligonucleotide
uuucaucaaaaaauucuucccuuucug

SEQ ID NO: 47796 - RNA, 27 nt, Artificial Sequence
  Description of Artificial Sequence: Synthetic oligonucleotide
aaauucacacacuggcaugccgauagc

SEQ ID NO: 47797 - RNA, 27 nt, Artificial Sequence
  Description of Artificial Sequence: Synthetic oligonucleotide
acauacauugcucuacuaugaggugaa

SEQ ID NO: 47798 - RNA, 27 nt, Artificial Sequence
  Description of Artificial Sequence: Synthetic oligonucleotide
uauauaugugcuuuggcaauucuggug

SEQ ID NO: 47799 - RNA, 27 nt, Artificial Sequence
  Description of Artificial Sequence: Synthetic oligonucleotide
ggagaaacuauuacccagaucaccacu

SEQ ID NO: 47800 - RNA, 27 nt, Artificial Sequence
  Description of Artificial Sequence: Synthetic oligonucleotide
auuuggagaaacuauuacccagaucac

SEQ ID NO: 47801 - RNA, 27 nt, Artificial Sequence
  Description of Artificial Sequence: Synthetic oligonucleotide
uuucuaggaaguauucaucacauccac

SEQ ID NO: 47802 - RNA, 27 nt, Artificial Sequence
  Description of Artificial Sequence: Synthetic oligonucleotide
cauauaugguguagcuguggaaaugcg

SEQ ID NO: 47803 - RNA, 27 nt, Artificial Sequence
  Description of Artificial Sequence: Synthetic oligonucleotide
cuccauucauauaugguguagcugugg

SEQ ID NO: 47804 - RNA, 27 nt, Artificial Sequence
  Description of Artificial Sequence: Synthetic oligonucleotide
aucuucuucucguguaagaacugcagc

SEQ ID NO: 47805 - RNA, 27 nt, Artificial Sequence
  Description of Artificial Sequence: Synthetic oligonucleotide
ucccuguaaaugaucuucuucucgugu

SEQ ID NO: 47806 - RNA, 27 nt, Artificial Sequence
  Description of Artificial Sequence: Synthetic oligonucleotide
gucccuguaaaugaucuucuucucgug

SEQ ID NO: 47807 - RNA, 27 nt, Artificial Sequence
  Description of Artificial Sequence: Synthetic oligonucleotide
ucaggucccuguaaaugaucuucuucu

SEQ ID NO: 47808 - RNA, 27 nt, Artificial Sequence
  Description of Artificial Sequence: Synthetic oligonucleotide
gaugcagucaaacaccucuuccucugu

SEQ ID NO: 47809 - RNA, 27 nt, Artificial Sequence
  Description of Artificial Sequence: Synthetic oligonucleotide
cgaugcagucaaacaccucuuccucug

SEQ ID NO: 47810 - RNA, 27 nt, Artificial Sequence
  Description of Artificial Sequence: Synthetic oligonucleotide
cccugugaacucgcccucaaaguagcg

SEQ ID NO: 47811 - RNA, 27 nt, Artificial Sequence
  Description of Artificial Sequence: Synthetic oligonucleotide
ggacagaggugccaggagaugcccuca

SEQ ID NO: 47812 - RNA, 27 nt, Artificial Sequence
  Description of Artificial Sequence: Synthetic oligonucleotide
uuaaaaagacaaaccauaucacuccuu

SEQ ID NO: 47813 - RNA, 27 nt, Artificial Sequence
  Description of Artificial Sequence: Synthetic oligonucleotide
cuuaaaaagacaaaccauaucacuccu

SEQ ID NO: 47814 - RNA, 27 nt, Artificial Sequence
  Description of Artificial Sequence: Synthetic oligonucleotide
gacaaccuuuaggaucuuuacugcaac

SEQ ID NO: 47815 - RNA, 27 nt, Artificial Sequence
  Description of Artificial Sequence: Synthetic oligonucleotide
gucgacaaccuuuaggaucuuuacugc

SEQ ID NO: 47816 - RNA, 27 nt, Artificial Sequence
  Description of Artificial Sequence: Synthetic oligonucleotide
acaauugccagguuguccuuugucaug

SEQ ID NO: 47817 - RNA, 27 nt, Artificial Sequence
  Description of Artificial Sequence: Synthetic oligonucleotide
ccucgcaccacugggucacaauugcca

SEQ ID NO: 47818 - RNA, 27 nt, Artificial Sequence
  Description of Artificial Sequence: Synthetic oligonucleotide
auuucaugucucuauggaugauguucu

SEQ ID NO: 47819 - RNA, 27 nt, Artificial Sequence
  Description of Artificial Sequence: Synthetic oligonucleotide
uggagaaauauauuguuggauuucaug

SEQ ID NO: 47820 - RNA, 27 nt, Artificial Sequence
  Description of Artificial Sequence: Synthetic oligonucleotide
agccuucauggagaaauauauuguugg

SEQ ID NO: 47821 - RNA, 27 nt, Artificial Sequence
  Description of Artificial Sequence: Synthetic oligonucleotide
accacuccagcgugacuuuacuguugc

SEQ ID NO: 47822 - RNA, 27 nt, Artificial Sequence
  Description of Artificial Sequence: Synthetic oligonucleotide
ccucucuuccuuuacuuucuucacaca

SEQ ID NO: 47823 - RNA, 27 nt, Artificial Sequence
  Description of Artificial Sequence: Synthetic oligonucleotide
gcccgaugcaaggauggcucggaagcg

SEQ ID NO: 47824 - RNA, 27 nt, Artificial Sequence
  Description of Artificial Sequence: Synthetic oligonucleotide
cacaguaggauauucaaccuccauuuc

SEQ ID NO: 47825 - RNA, 27 nt, Artificial Sequence
  Description of Artificial Sequence: Synthetic oligonucleotide
uuacacaguaggauauucaaccuccau

SEQ ID NO: 47826 - RNA, 27 nt, Artificial Sequence
  Description of Artificial Sequence: Synthetic oligonucleotide
uacacuacaagggaaaacucaaaaucu

SEQ ID NO: 47827 - RNA, 27 nt, Artificial Sequence
  Description of Artificial Sequence: Synthetic oligonucleotide
caaucaacaaagaacaaacaggauaaa

SEQ ID NO: 47828 - RNA, 27 nt, Artificial Sequence
  Description of Artificial Sequence: Synthetic oligonucleotide
uuucaaucaacaaagaacaaacaggau

SEQ ID NO: 47829 - RNA, 27 nt, Artificial Sequence
  Description of Artificial Sequence: Synthetic oligonucleotide
auggaagaaaaagaaggcuguagagaa

SEQ ID NO: 47830 - RNA, 27 nt, Artificial Sequence
  Description of Artificial Sequence: Synthetic oligonucleotide
uagaaggaagauuagcuauggaagaaa

SEQ ID NO: 47831 - RNA, 27 nt, Artificial Sequence
  Description of Artificial Sequence: Synthetic oligonucleotide
augaagcauucaacaggaagauuauuu

SEQ ID NO: 47832 - RNA, 27 nt, Artificial Sequence
  Description of Artificial Sequence: Synthetic oligonucleotide
caugaagcauucaacaggaagauuauu

SEQ ID NO: 47833 - RNA, 27 nt, Artificial Sequence
  Description of Artificial Sequence: Synthetic oligonucleotide
ucaaaguagaauucaagucaugaagca

SEQ ID NO: 47834 - RNA, 27 nt, Artificial Sequence
  Description of Artificial Sequence: Synthetic oligonucleotide
gucuguaguugcuucucucccucuuag

SEQ ID NO: 47835 - RNA, 27 nt, Artificial Sequence
  Description of Artificial Sequence: Synthetic oligonucleotide
guugaccuuggucugguaggagacggc

SEQ ID NO: 47836 - RNA, 27 nt, Artificial Sequence
  Description of Artificial Sequence: Synthetic oligonucleotide
gucgagauagucgggccgauugaucuc

SEQ ID NO: 47837 - RNA, 27 nt, Artificial Sequence
  Description of Artificial Sequence: Synthetic oligonucleotide
guuugggaagguuggauguucguccuc

SEQ ID NO: 47838 - RNA, 27 nt, Artificial Sequence
  Description of Artificial Sequence: Synthetic oligonucleotide
aguucuaagcuuggguuccgacccuaa

SEQ ID NO: 47839 - RNA, 27 nt, Artificial Sequence
  Description of Artificial Sequence: Synthetic oligonucleotide
uuaaaguucuaagcuuggguuccgacc

SEQ ID NO: 47840 - RNA, 27 nt, Artificial Sequence
  Description of Artificial Sequence: Synthetic oligonucleotide
guugcuuaaaguucuaagcuuggguuc

SEQ ID NO: 47841 - RNA, 27 nt, Artificial Sequence
  Description of Artificial Sequence: Synthetic oligonucleotide
gugguggucuuguugcuuaaaguucua

SEQ ID NO: 47842 - RNA, 27 nt, Artificial Sequence
  Description of Artificial Sequence: Synthetic oligonucleotide
acuuuauuucucgccacugaauaguag

SEQ ID NO: 47843 - RNA, 27 nt, Artificial Sequence
  Description of Artificial Sequence: Synthetic oligonucleotide
aacuuuauuucucgccacugaauagua

SEQ ID NO: 47844 - RNA, 27 nt, Artificial Sequence
  Description of Artificial Sequence: Synthetic oligonucleotide
ggaucauuuccuguuaucuguguuugu

SEQ ID NO: 47845 - RNA, 27 nt, Artificial Sequence
  Description of Artificial Sequence: Synthetic oligonucleotide
guuucauuucuucucuuuucuuaaggc

SEQ ID NO: 47846 - RNA, 27 nt, Artificial Sequence
  Description of Artificial Sequence: Synthetic oligonucleotide
ggaggauggaaacacacuccuucaguu

SEQ ID NO: 47847 - RNA, 27 nt, Artificial Sequence
  Description of Artificial Sequence: Synthetic oligonucleotide
ucaaagauuuucagucccgcggugaca

SEQ ID NO: 47848 - RNA, 27 nt, Artificial Sequence
  Description of Artificial Sequence: Synthetic oligonucleotide
ccugaacggcacgcuuauuucugcugu

SEQ ID NO: 47849 - RNA, 27 nt, Artificial Sequence
  Description of Artificial Sequence: Synthetic oligonucleotide
cuucuggacccugaacggcacgcuuau

SEQ ID NO: 47850 - RNA, 27 nt, Artificial Sequence
  Description of Artificial Sequence: Synthetic oligonucleotide
caagcagucuugagugacuguuucuuc

SEQ ID NO: 47851 - RNA, 27 nt, Artificial Sequence
  Description of Artificial Sequence: Synthetic oligonucleotide
ccaaagacauggaccuucuuccucuga

SEQ ID NO: 47852 - RNA, 27 nt, Artificial Sequence
  Description of Artificial Sequence: Synthetic oligonucleotide
guguuucaggcauauuuugaauacauc

SEQ ID NO: 47853 - RNA, 27 nt, Artificial Sequence
  Description of Artificial Sequence: Synthetic oligonucleotide
gagguacagagaaagggaggaaaauag

SEQ ID NO: 47854 - RNA, 27 nt, Artificial Sequence
  Description of Artificial Sequence: Synthetic oligonucleotide
ucuugucuugcucuaucuuucuuuggu

SEQ ID NO: 47855 - RNA, 27 nt, Artificial Sequence
  Description of Artificial Sequence: Synthetic oligonucleotide
uuucuugucuugcucuaucuuucuuug

SEQ ID NO: 47856 - RNA, 27 nt, Artificial Sequence
  Description of Artificial Sequence: Synthetic oligonucleotide
ggaucuuguacaaacaaaugcuuucuc

SEQ ID NO: 47857 - RNA, 27 nt, Artificial Sequence
  Description of Artificial Sequence: Synthetic oligonucleotide
ucugcaaguacguucguuuaacucaag

SEQ ID NO: 47858 - RNA, 27 nt, Artificial Sequence
  Description of Artificial Sequence: Synthetic oligonucleotide
ucuguaucgaucguucuguaucagucu

SEQ ID NO: 47859 - RNA, 27 nt, Artificial Sequence
  Description of Artificial Sequence: Synthetic oligonucleotide
auuuauuuuuauauauauauaauauau

SEQ ID NO: 47860 - RNA, 27 nt, Artificial Sequence
  Description of Artificial Sequence: Synthetic oligonucleotide
auauuuauuuuuauauauauauaauau

SEQ ID NO: 47861 - RNA, 27 nt, Artificial Sequence
  Description of Artificial Sequence: Synthetic oligonucleotide
cacagcagucaaauacauccagugaag

SEQ ID NO: 47862 - RNA, 27 nt, Artificial Sequence
  Description of Artificial Sequence: Synthetic oligonucleotide
gucucucaucuccuccucuucccuguc

SEQ ID NO: 47863 - RNA, 27 nt, Artificial Sequence
  Description of Artificial Sequence: Synthetic oligonucleotide
ccaagugggacaaaaaaaagaucaugc

SEQ ID NO: 47864 - RNA, 14 nt, Artificial Sequence
  Description of Artificial Sequence: Synthetic oligonucleotide
guauuuugaugagg

SEQ ID NO: 47865 - RNA, 12 nt, Artificial Sequence
  Description of Artificial Sequence: Synthetic oligonucleotide
ggcccagaugau

SEQ ID NO: 47866 - RNA, 14 nt, Artificial Sequence
  Description of Artificial Sequence: Synthetic oligonucleotide
gggaagaaaacuau

SEQ ID NO: 47867 - RNA, 15 nt, Artificial Sequence
  Description of Artificial Sequence: Synthetic oligonucleotide
guuuuaauuuauuuc

SEQ ID NO: 47868 - RNA, 12 nt, Artificial Sequence
  Description of Artificial Sequence: Synthetic oligonucleotide
acguagggaaau

SEQ ID NO: 47869 - RNA, 12 nt, Artificial Sequence
  Description of Artificial Sequence: Synthetic oligonucleotide
ccaggguuuacc

SEQ ID NO: 47870 - RNA, 11 nt, Artificial Sequence
  Description of Artificial Sequence: Synthetic oligonucleotide
agcaagguuua

SEQ ID NO: 47871 - RNA, 12 nt, Artificial Sequence
  Description of Artificial Sequence: Synthetic oligonucleotide
uguauuauguug

SEQ ID NO: 47872 - RNA, 15 nt, Artificial Sequence
  Description of Artificial Sequence: Synthetic oligonucleotide
uuuuaaucuuuguga

SEQ ID NO: 47873 - RNA, 14 nt, Artificial Sequence
  Description of Artificial Sequence: Synthetic oligonucleotide
uuaaucuuugugac

SEQ ID NO: 47874 - RNA, 13 nt, Artificial Sequence
  Description of Artificial Sequence: Synthetic oligonucleotide
gcugcuuaugucu

SEQ ID NO: 47875 - RNA, 14 nt, Artificial Sequence
  Description of Artificial Sequence: Synthetic oligonucleotide
aaguguuucagaag

SEQ ID NO: 47876 - RNA, 13 nt, Artificial Sequence
  Description of Artificial Sequence: Synthetic oligonucleotide
gaccaucaauaag

SEQ ID NO: 47877 - RNA, 13 nt, Artificial Sequence
  Description of Artificial Sequence: Synthetic oligonucleotide
ccaucaauaagga

SEQ ID NO: 47878 - RNA, 14 nt, Artificial Sequence
  Description of Artificial Sequence: Synthetic oligonucleotide
ucaauaaggaagaa

SEQ ID NO: 47879 - RNA, 14 nt, Artificial Sequence
  Description of Artificial Sequence: Synthetic oligonucleotide
aauaaggaagaagc

SEQ ID NO: 47880 - RNA, 13 nt, Artificial Sequence
  Description of Artificial Sequence: Synthetic oligonucleotide
aggaagaagcccu

SEQ ID NO: 47881 - RNA, 13 nt, Artificial Sequence
  Description of Artificial Sequence: Synthetic oligonucleotide
gcauaacuaaagg

SEQ ID NO: 47882 - RNA, 14 nt, Artificial Sequence
  Description of Artificial Sequence: Synthetic oligonucleotide
cauaacuaaaggug

SEQ ID NO: 47883 - RNA, 12 nt, Artificial Sequence
  Description of Artificial Sequence: Synthetic oligonucleotide
cuacaucacgcc

SEQ ID NO: 47884 - RNA, 12 nt, Artificial Sequence
  Description of Artificial Sequence: Synthetic oligonucleotide
acuggauuuaag

SEQ ID NO: 47885 - RNA, 12 nt, Artificial Sequence
  Description of Artificial Sequence: Synthetic oligonucleotide
cuggauuuaagc

SEQ ID NO: 47886 - RNA, 13 nt, Artificial Sequence
  Description of Artificial Sequence: Synthetic oligonucleotide
gauuuaagcagag

SEQ ID NO: 47887 - RNA, 13 nt, Artificial Sequence
  Description of Artificial Sequence: Synthetic oligonucleotide
auuuaagcagagu

SEQ ID NO: 47888 - RNA, 13 nt, Artificial Sequence
  Description of Artificial Sequence: Synthetic oligonucleotide
uuaagcagaguuc

SEQ ID NO: 47889 - RNA, 13 nt, Artificial Sequence
  Description of Artificial Sequence: Synthetic oligonucleotide
uaagcagaguuca

SEQ ID NO: 47890 - RNA, 14 nt, Artificial Sequence
  Description of Artificial Sequence: Synthetic oligonucleotide
agcagaguucaaaa

SEQ ID NO: 47891 - RNA, 12 nt, Artificial Sequence
  Description of Artificial Sequence: Synthetic oligonucleotide
cucagggucuga

SEQ ID NO: 47892 - RNA, 13 nt, Artificial Sequence
  Description of Artificial Sequence: Synthetic oligonucleotide
caagcaacuacau

SEQ ID NO: 47893 - RNA, 12 nt, Artificial Sequence
  Description of Artificial Sequence: Synthetic oligonucleotide
aucaauggcagc

SEQ ID NO: 47894 - RNA, 11 nt, Artificial Sequence
  Description of Artificial Sequence: Synthetic oligonucleotide
uuccagcccac

SEQ ID NO: 47895 - RNA, 12 nt, Artificial Sequence
  Description of Artificial Sequence: Synthetic oligonucleotide
cagcugagaaug

SEQ ID NO: 47896 - RNA, 13 nt, Artificial Sequence
  Description of Artificial Sequence: Synthetic oligonucleotide
aacguaucuccua

SEQ ID NO: 47897 - RNA, 14 nt, Artificial Sequence
  Description of Artificial Sequence: Synthetic oligonucleotide
ccuaaaauaauuuc

SEQ ID NO: 47898 - RNA, 13 nt, Artificial Sequence
  Description of Artificial Sequence: Synthetic oligonucleotide
uggaagauucagc

SEQ ID NO: 47899 - RNA, 12 nt, Artificial Sequence
  Description of Artificial Sequence: Synthetic oligonucleotide
uuaaacucuccu

SEQ ID NO: 47900 - RNA, 12 nt, Artificial Sequence
  Description of Artificial Sequence: Synthetic oligonucleotide
cagccuacaguu

SEQ ID NO: 47901 - RNA, 13 nt, Artificial Sequence
  Description of Artificial Sequence: Synthetic oligonucleotide
guuauguucaguc

SEQ ID NO: 47902 - RNA, 13 nt, Artificial Sequence
  Description of Artificial Sequence: Synthetic oligonucleotide
cacauacaaaaug

SEQ ID NO: 47903 - RNA, 9 nt, Artificial Sequence
  Description of Artificial Sequence: Synthetic oligonucleotide
uccuuuugc

SEQ ID NO: 47904 - RNA, 12 nt, Artificial Sequence
  Description of Artificial Sequence: Synthetic oligonucleotide
ugaccugugaag

SEQ ID NO: 47905 - RNA, 12 nt, Artificial Sequence
  Description of Artificial Sequence: Synthetic oligonucleotide
cuaucucacaca

SEQ ID NO: 47906 - RNA, 13 nt, Artificial Sequence
  Description of Artificial Sequence: Synthetic oligonucleotide
uguccucaauugu

SEQ ID NO: 47907 - RNA, 12 nt, Artificial Sequence
  Description of Artificial Sequence: Synthetic oligonucleotide
aaaccguagcug

SEQ ID NO: 47908 - RNA, 12 nt, Artificial Sequence
  Description of Artificial Sequence: Synthetic oligonucleotide
uagcuggcaagc

SEQ ID NO: 47909 - RNA, 14 nt, Artificial Sequence
  Description of Artificial Sequence: Synthetic oligonucleotide
uuguaugguuaaaa

SEQ ID NO: 47910 - RNA, 14 nt, Artificial Sequence
  Description of Artificial Sequence: Synthetic oligonucleotide
ugguuaaaagaugg

SEQ ID NO: 47911 - RNA, 13 nt, Artificial Sequence
  Description of Artificial Sequence: Synthetic oligonucleotide
cagggaauuauac

SEQ ID NO: 47912 - RNA, 12 nt, Artificial Sequence
  Description of Artificial Sequence: Synthetic oligonucleotide
acaaucuugcug

SEQ ID NO: 47913 - RNA, 13 nt, Artificial Sequence
  Description of Artificial Sequence: Synthetic oligonucleotide
ccaauaaugaaga

SEQ ID NO: 47914 - RNA, 13 nt, Artificial Sequence
  Description of Artificial Sequence: Synthetic oligonucleotide
acuuuggauguuc

SEQ ID NO: 47915 - RNA, 12 nt, Artificial Sequence
  Description of Artificial Sequence: Synthetic oligonucleotide
aaugcuuccacu

SEQ ID NO: 47916 - RNA, 11 nt, Artificial Sequence
  Description of Artificial Sequence: Synthetic oligonucleotide
gagaaaguuug

SEQ ID NO: 47917 - RNA, 11 nt, Artificial Sequence
  Description of Artificial Sequence: Synthetic oligonucleotide
aaagaacuacu

SEQ ID NO: 47918 - RNA, 12 nt, Artificial Sequence
  Description of Artificial Sequence: Synthetic oligonucleotide
uuagaaauacgg

SEQ ID NO: 47919 - RNA, 12 nt, Artificial Sequence
  Description of Artificial Sequence: Synthetic oligonucleotide
aacauggguaca

SEQ ID NO: 47920 - RNA, 14 nt, Artificial Sequence
  Description of Artificial Sequence: Synthetic oligonucleotide
aaagacacagaaga

SEQ ID NO: 47921 - RNA, 11 nt, Artificial Sequence
  Description of Artificial Sequence: Synthetic oligonucleotide
uaguagggagg

SEQ ID NO: 47922 - RNA, 12 nt, Artificial Sequence
  Description of Artificial Sequence: Synthetic oligonucleotide
gccuucugcagc

SEQ ID NO: 47923 - RNA, 10 nt, Artificial Sequence
  Description of Artificial Sequence: Synthetic oligonucleotide
ggucugguac

SEQ ID NO: 47924 - RNA, 12 nt, Artificial Sequence
  Description of Artificial Sequence: Synthetic oligonucleotide
cuaguccuuccg

SEQ ID NO: 47925 - RNA, 12 nt, Artificial Sequence
  Description of Artificial Sequence: Synthetic oligonucleotide
ccagugaauauu

SEQ ID NO: 47926 - RNA, 13 nt, Artificial Sequence
  Description of Artificial Sequence: Synthetic oligonucleotide
augaauucaaguu

SEQ ID NO: 47927 - RNA, 12 nt, Artificial Sequence
  Description of Artificial Sequence: Synthetic oligonucleotide
caggacacagau

SEQ ID NO: 47928 - RNA, 12 nt, Artificial Sequence
  Description of Artificial Sequence: Synthetic oligonucleotide
cucaaagcacag

SEQ ID NO: 47929 - RNA, 10 nt, Artificial Sequence
  Description of Artificial Sequence: Synthetic oligonucleotide
accacugcca

SEQ ID NO: 47930 - RNA, 13 nt, Artificial Sequence
  Description of Artificial Sequence: Synthetic oligonucleotide
gaaacuacuagug

SEQ ID NO: 47931 - RNA, 12 nt, Artificial Sequence
  Description of Artificial Sequence: Synthetic oligonucleotide
aagucggacagc

SEQ ID NO: 47932 - RNA, 13 nt, Artificial Sequence
  Description of Artificial Sequence: Synthetic oligonucleotide
gaaagcgaaaaau

SEQ ID NO: 47933 - RNA, 13 nt, Artificial Sequence
  Description of Artificial Sequence: Synthetic oligonucleotide
cccucugauuuag

SEQ ID NO: 47934 - RNA, 12 nt, Artificial Sequence
  Description of Artificial Sequence: Synthetic oligonucleotide
ugagcuauuuaa

SEQ ID NO: 47935 - RNA, 13 nt, Artificial Sequence
  Description of Artificial Sequence: Synthetic oligonucleotide
aaaaggugaaaaa

SEQ ID NO: 47936 - RNA, 14 nt, Artificial Sequence
  Description of Artificial Sequence: Synthetic oligonucleotide
gaaaaagcacuauu

SEQ ID NO: 47937 - RNA, 12 nt, Artificial Sequence
  Description of Artificial Sequence: Synthetic oligonucleotide
ggcugaaaagaa

SEQ ID NO: 47938 - RNA, 12 nt, Artificial Sequence
  Description of Artificial Sequence: Synthetic oligonucleotide
uaaacccuuaua

SEQ ID NO: 47939 - RNA, 13 nt, Artificial Sequence
  Description of Artificial Sequence: Synthetic oligonucleotide
cauacuauuagcc

SEQ ID NO: 47940 - RNA, 12 nt, Artificial Sequence
  Description of Artificial Sequence: Synthetic oligonucleotide
gacagaagcauu

SEQ ID NO: 47941 - RNA, 14 nt, Artificial Sequence
  Description of Artificial Sequence: Synthetic oligonucleotide
agagcaaauaagau

SEQ ID NO: 47942 - RNA, 14 nt, Artificial Sequence
  Description of Artificial Sequence: Synthetic oligonucleotide
ccaacauuuuucuc

SEQ ID NO: 47943 - RNA, 15 nt, Artificial Sequence
  Description of Artificial Sequence: Synthetic oligonucleotide
uuaaguaugagaaaa

SEQ ID NO: 47944 - RNA, 14 nt, Artificial Sequence
  Description of Artificial Sequence: Synthetic oligonucleotide
caggaauaaagaug

SEQ ID NO: 47945 - RNA, 13 nt, Artificial Sequence
  Description of Artificial Sequence: Synthetic oligonucleotide
aauuugaaugacc

SEQ ID NO: 47946 - RNA, 14 nt, Artificial Sequence
  Description of Artificial Sequence: Synthetic oligonucleotide
auguauaaagauag

SEQ ID NO: 47947 - RNA, 12 nt, Artificial Sequence
  Description of Artificial Sequence: Synthetic oligonucleotide
ggcuguaacuau

SEQ ID NO: 47948 - RNA, 11 nt, Artificial Sequence
  Description of Artificial Sequence: Synthetic oligonucleotide
ucugugaagug

SEQ ID NO: 47949 - RNA, 14 nt, Artificial Sequence
  Description of Artificial Sequence: Synthetic oligonucleotide
ccuuuaaggaaaug

SEQ ID NO: 47950 - RNA, 13 nt, Artificial Sequence
  Description of Artificial Sequence: Synthetic oligonucleotide
aaggauacaaaaa

SEQ ID NO: 47951 - RNA, 12 nt, Artificial Sequence
  Description of Artificial Sequence: Synthetic oligonucleotide
agaugcaauuug

SEQ ID NO: 47952 - RNA, 12 nt, Artificial Sequence
  Description of Artificial Sequence: Synthetic oligonucleotide
guucaaaacgaa

SEQ ID NO: 47953 - RNA, 11 nt, Artificial Sequence
  Description of Artificial Sequence: Synthetic oligonucleotide
gugaaaccuca

SEQ ID NO: 47954 - RNA, 13 nt, Artificial Sequence
  Description of Artificial Sequence: Synthetic oligonucleotide
acgaaagagaagc

SEQ ID NO: 47955 - RNA, 12 nt, Artificial Sequence
  Description of Artificial Sequence: Synthetic oligonucleotide
cuccacaagcgc

SEQ ID NO: 47956 - RNA, 14 nt, Artificial Sequence
  Description of Artificial Sequence: Synthetic oligonucleotide
gagaagauuccaaa

SEQ ID NO: 47957 - RNA, 13 nt, Artificial Sequence
  Description of Artificial Sequence: Synthetic oligonucleotide
aaucuggauucaa

SEQ ID NO: 47958 - RNA, 13 nt, Artificial Sequence
  Description of Artificial Sequence: Synthetic oligonucleotide
agaacagauuuga

SEQ ID NO: 47959 - RNA, 11 nt, Artificial Sequence
  Description of Artificial Sequence: Synthetic oligonucleotide
ccagagcugug

SEQ ID NO: 47960 - RNA, 12 nt, Artificial Sequence
  Description of Artificial Sequence: Synthetic oligonucleotide
ccucagauuguu

SEQ ID NO: 47961 - RNA, 12 nt, Artificial Sequence
  Description of Artificial Sequence: Synthetic oligonucleotide
cuauuuuaauua

SEQ ID NO: 47962 - RNA, 13 nt, Artificial Sequence
  Description of Artificial Sequence: Synthetic oligonucleotide
uuuaauuuauuaa

SEQ ID NO: 47963 - RNA, 12 nt, Artificial Sequence
  Description of Artificial Sequence: Synthetic oligonucleotide
augcaguuugaa

SEQ ID NO: 47964 - RNA, 11 nt, Artificial Sequence
  Description of Artificial Sequence: Synthetic oligonucleotide
caugcugcugg

SEQ ID NO: 47965 - RNA, 13 nt, Artificial Sequence
  Description of Artificial Sequence: Synthetic oligonucleotide
agaugugcauuuc

SEQ ID NO: 47966 - RNA, 12 nt, Artificial Sequence
  Description of Artificial Sequence: Synthetic oligonucleotide
ucaaaaccugug

SEQ ID NO: 47967 - RNA, 11 nt, Artificial Sequence
  Description of Artificial Sequence: Synthetic oligonucleotide
gaaugugggua

SEQ ID NO: 47968 - RNA, 10 nt, Artificial Sequence
  Description of Artificial Sequence: Synthetic oligonucleotide
auguggguag

SEQ ID NO: 47969 - RNA, 13 nt, Artificial Sequence
  Description of Artificial Sequence: Synthetic oligonucleotide
ugaaaaugagcau

SEQ ID NO: 47970 - RNA, 13 nt, Artificial Sequence
  Description of Artificial Sequence: Synthetic oligonucleotide
uugcuuuucaugu

SEQ ID NO: 47971 - RNA, 12 nt, Artificial Sequence
  Description of Artificial Sequence: Synthetic oligonucleotide
uguauuucuaua

SEQ ID NO: 47972 - RNA, 13 nt, Artificial Sequence
  Description of Artificial Sequence: Synthetic oligonucleotide
uuugauuaauguu

SEQ ID NO: 47973 - RNA, 12 nt, Artificial Sequence
  Description of Artificial Sequence: Synthetic oligonucleotide
caacguguauag

SEQ ID NO: 47974 - RNA, 12 nt, Artificial Sequence
  Description of Artificial Sequence: Synthetic oligonucleotide
cauauccuuggc

SEQ ID NO: 47975 - RNA, 13 nt, Artificial Sequence
  Description of Artificial Sequence: Synthetic oligonucleotide
uacuaacaucugg

SEQ ID NO: 47976 - RNA, 11 nt, Artificial Sequence
  Description of Artificial Sequence: Synthetic oligonucleotide
cauaaguugug

SEQ ID NO: 47977 - RNA, 12 nt, Artificial Sequence
  Description of Artificial Sequence: Synthetic oligonucleotide
gcaucauuuugg

SEQ ID NO: 47978 - RNA, 10 nt, Artificial Sequence
  Description of Artificial Sequence: Synthetic oligonucleotide
gcucuucuua

SEQ ID NO: 47979 - RNA, 10 nt, Artificial Sequence
  Description of Artificial Sequence: Synthetic oligonucleotide
agauuagguc

SEQ ID NO: 47980 - RNA, 12 nt, Artificial Sequence
  Description of Artificial Sequence: Synthetic oligonucleotide
auggaauugaaa

SEQ ID NO: 47981 - RNA, 13 nt, Artificial Sequence
  Description of Artificial Sequence: Synthetic oligonucleotide
cacacucauuccu

SEQ ID NO: 47982 - RNA, 12 nt, Artificial Sequence
  Description of Artificial Sequence: Synthetic oligonucleotide
uguagagguaac

SEQ ID NO: 47983 - RNA, 11 nt, Artificial Sequence
  Description of Artificial Sequence: Synthetic oligonucleotide
caaccacaugc

SEQ ID NO: 47984 - RNA, 12 nt, Artificial Sequence
  Description of Artificial Sequence: Synthetic oligonucleotide
ucggaaacaagu

SEQ ID NO: 47985 - RNA, 11 nt, Artificial Sequence
  Description of Artificial Sequence: Synthetic oligonucleotide
acucccaauaa

SEQ ID NO: 47986 - RNA, 13 nt, Artificial Sequence
  Description of Artificial Sequence: Synthetic oligonucleotide
aaugcuaagaaau

SEQ ID NO: 47987 - RNA, 11 nt, Artificial Sequence
  Description of Artificial Sequence: Synthetic oligonucleotide
gucuuucucua

SEQ ID NO: 47988 - RNA, 11 nt, Artificial Sequence
  Description of Artificial Sequence: Synthetic oligonucleotide
ugaauuucagg

SEQ ID NO: 47989 - RNA, 13 nt, Artificial Sequence
  Description of Artificial Sequence: Synthetic oligonucleotide
cgauucccucuca

SEQ ID NO: 47990 - RNA, 11 nt, Artificial Sequence
  Description of Artificial Sequence: Synthetic oligonucleotide
aggaaagugaa

SEQ ID NO: 47991 - RNA, 12 nt, Artificial Sequence
  Description of Artificial Sequence: Synthetic oligonucleotide
gaggcugcaugc

SEQ ID NO: 47992 - RNA, 11 nt, Artificial Sequence
  Description of Artificial Sequence: Synthetic oligonucleotide
ucucugaacag

SEQ ID NO: 47993 - RNA, 12 nt, Artificial Sequence
  Description of Artificial Sequence: Synthetic oligonucleotide
aacuuggcugua

SEQ ID NO: 47994 - RNA, 12 nt, Artificial Sequence
  Description of Artificial Sequence: Synthetic oligonucleotide
agaagccaaaau

SEQ ID NO: 47995 - RNA, 14 nt, Artificial Sequence
  Description of Artificial Sequence: Synthetic oligonucleotide
auuaaaagaagucc

SEQ ID NO: 47996 - RNA, 14 nt, Artificial Sequence
  Description of Artificial Sequence: Synthetic oligonucleotide
gaauccggauuauc

SEQ ID NO: 47997 - RNA, 12 nt, Artificial Sequence
  Description of Artificial Sequence: Synthetic oligonucleotide
aaugugacauca

SEQ ID NO: 47998 - RNA, 13 nt, Artificial Sequence
  Description of Artificial Sequence: Synthetic oligonucleotide
caucaaagcaagu

SEQ ID NO: 47999 - RNA, 11 nt, Artificial Sequence
  Description of Artificial Sequence: Synthetic oligonucleotide
agagagagaaa

SEQ ID NO: 48000 - RNA, 13 nt, Artificial Sequence
  Description of Artificial Sequence: Synthetic oligonucleotide
ucgcuguaguauu

SEQ ID NO: 48001 - RNA, 14 nt, Artificial Sequence
  Description of Artificial Sequence: Synthetic oligonucleotide
cgcuguaguauuua

SEQ ID NO: 48002 - RNA, 13 nt, Artificial Sequence
  Description of Artificial Sequence: Synthetic oligonucleotide
auuuaagcccaua

SEQ ID NO: 48003 - RNA, 15 nt, Artificial Sequence
  Description of Artificial Sequence: Synthetic oligonucleotide
auuaaaauaaacaug

SEQ ID NO: 48004 - RNA, 12 nt, Artificial Sequence
  Description of Artificial Sequence: Synthetic oligonucleotide
cuguucugaucg

SEQ ID NO: 48005 - RNA, 16 nt, Artificial Sequence
  Description of Artificial Sequence: Synthetic oligonucleotide
aaauaauuugaacuuu

SEQ ID NO: 48006 - RNA, 12 nt, Artificial Sequence
  Description of Artificial Sequence: Synthetic oligonucleotide
ugcgaccuuaau

SEQ ID NO: 48007 - RNA, 11 nt, Artificial Sequence
  Description of Artificial Sequence: Synthetic oligonucleotide
cugagaaagcu

SEQ ID NO: 48008 - RNA, 13 nt, Artificial Sequence
  Description of Artificial Sequence: Synthetic oligonucleotide
aguaaagaugcua

SEQ ID NO: 48009 - RNA, 12 nt, Artificial Sequence
  Description of Artificial Sequence: Synthetic oligonucleotide
cugcuuaauugc

SEQ ID NO: 48010 - RNA, 14 nt, Artificial Sequence
  Description of Artificial Sequence: Synthetic oligonucleotide
uaccauaugaauga

SEQ ID NO: 48011 - RNA, 12 nt, Artificial Sequence
  Description of Artificial Sequence: Synthetic oligonucleotide
aacuuucuuauc

SEQ ID NO: 48012 - RNA, 13 nt, Artificial Sequence
  Description of Artificial Sequence: Synthetic oligonucleotide
ccuugcaugacau

SEQ ID NO: 48013 - RNA, 14 nt, Artificial Sequence
  Description of Artificial Sequence: Synthetic oligonucleotide
ugaauuuguauaug

SEQ ID NO: 48014 - RNA, 12 nt, Artificial Sequence
  Description of Artificial Sequence: Synthetic oligonucleotide
gaauccuaguag

SEQ ID NO: 48015 - RNA, 10 nt, Artificial Sequence
  Description of Artificial Sequence: Synthetic oligonucleotide
gaaagggaag

SEQ ID NO: 48016 - RNA, 11 nt, Artificial Sequence
  Description of Artificial Sequence: Synthetic oligonucleotide
uaucggcaugc

SEQ ID NO: 48017 - RNA, 12 nt, Artificial Sequence
  Description of Artificial Sequence: Synthetic oligonucleotide
caccucauagua

SEQ ID NO: 48018 - RNA, 11 nt, Artificial Sequence
  Description of Artificial Sequence: Synthetic oligonucleotide
ccagaauugcc

SEQ ID NO: 48019 - RNA, 11 nt, Artificial Sequence
  Description of Artificial Sequence: Synthetic oligonucleotide
uggugaucugg

SEQ ID NO: 48020 - RNA, 12 nt, Artificial Sequence
  Description of Artificial Sequence: Synthetic oligonucleotide
gaucuggguaau

SEQ ID NO: 48021 - RNA, 12 nt, Artificial Sequence
  Description of Artificial Sequence: Synthetic oligonucleotide
ggaugugaugaa

SEQ ID NO: 48022 - RNA, 12 nt, Artificial Sequence
  Description of Artificial Sequence: Synthetic oligonucleotide
cauuuccacagc

SEQ ID NO: 48023 - RNA, 11 nt, Artificial Sequence
  Description of Artificial Sequence: Synthetic oligonucleotide
acagcuacacc

SEQ ID NO: 48024 - RNA, 12 nt, Artificial Sequence
  Description of Artificial Sequence: Synthetic oligonucleotide
ugcaguucuuac

SEQ ID NO: 48025 - RNA, 12 nt, Artificial Sequence
  Description of Artificial Sequence: Synthetic oligonucleotide
acgagaagaaga

SEQ ID NO: 48026 - RNA, 12 nt, Artificial Sequence
  Description of Artificial Sequence: Synthetic oligonucleotide
cgagaagaagau

SEQ ID NO: 48027 - RNA, 15 nt, Artificial Sequence
  Description of Artificial Sequence: Synthetic oligonucleotide
aagaagaucauuuac

SEQ ID NO: 48028 - RNA, 11 nt, Artificial Sequence
  Description of Artificial Sequence: Synthetic oligonucleotide
agaggaagagg

SEQ ID NO: 48029 - RNA, 12 nt, Artificial Sequence
  Description of Artificial Sequence: Synthetic oligonucleotide
gaggaagaggug

SEQ ID NO: 48030 - RNA, 13 nt, Artificial Sequence
  Description of Artificial Sequence: Synthetic oligonucleotide
cuacuuugagggc

SEQ ID NO: 48031 - RNA, 12 nt, Artificial Sequence
  Description of Artificial Sequence: Synthetic oligonucleotide
agggcaucuccu

SEQ ID NO: 48032 - RNA, 10 nt, Artificial Sequence
  Description of Artificial Sequence: Synthetic oligonucleotide
ggagugauau

SEQ ID NO: 48033 - RNA, 11 nt, Artificial Sequence
  Description of Artificial Sequence: Synthetic oligonucleotide
gagugauaugg

SEQ ID NO: 48034 - RNA, 12 nt, Artificial Sequence
  Description of Artificial Sequence: Synthetic oligonucleotide
ugcaguaaagau

SEQ ID NO: 48035 - RNA, 13 nt, Artificial Sequence
  Description of Artificial Sequence: Synthetic oligonucleotide
aguaaagauccua

SEQ ID NO: 48036 - RNA, 12 nt, Artificial Sequence
  Description of Artificial Sequence: Synthetic oligonucleotide
ugacaaaggaca

SEQ ID NO: 48037 - RNA, 13 nt, Artificial Sequence
  Description of Artificial Sequence: Synthetic oligonucleotide
gcaauugugaccc

SEQ ID NO: 48038 - RNA, 12 nt, Artificial Sequence
  Description of Artificial Sequence: Synthetic oligonucleotide
aacaucauccau

SEQ ID NO: 48039 - RNA, 12 nt, Artificial Sequence
  Description of Artificial Sequence: Synthetic oligonucleotide
ugaaauccaaca

SEQ ID NO: 48040 - RNA, 15 nt, Artificial Sequence
  Description of Artificial Sequence: Synthetic oligonucleotide
aacaauauauuucuc

SEQ ID NO: 48041 - RNA, 14 nt, Artificial Sequence
  Description of Artificial Sequence: Synthetic oligonucleotide
aacaguaaagucac

SEQ ID NO: 48042 - RNA, 14 nt, Artificial Sequence
  Description of Artificial Sequence: Synthetic oligonucleotide
ugugaagaaaguaa

SEQ ID NO: 48043 - RNA, 13 nt, Artificial Sequence
  Description of Artificial Sequence: Synthetic oligonucleotide
cuuccgagccauc

SEQ ID NO: 48044 - RNA, 12 nt, Artificial Sequence
  Description of Artificial Sequence: Synthetic oligonucleotide
aauggagguuga

SEQ ID NO: 48045 - RNA, 12 nt, Artificial Sequence
  Description of Artificial Sequence: Synthetic oligonucleotide
ggagguugaaua

SEQ ID NO: 48046 - RNA, 13 nt, Artificial Sequence
  Description of Artificial Sequence: Synthetic oligonucleotide
auuuugaguuuuc

SEQ ID NO: 48047 - RNA, 12 nt, Artificial Sequence
  Description of Artificial Sequence: Synthetic oligonucleotide
uauccuguuugu

SEQ ID NO: 48048 - RNA, 11 nt, Artificial Sequence
  Description of Artificial Sequence: Synthetic oligonucleotide
ccuguuuguuc

SEQ ID NO: 48049 - RNA, 10 nt, Artificial Sequence
  Description of Artificial Sequence: Synthetic oligonucleotide
cucuacagcc

SEQ ID NO: 48050 - RNA, 12 nt, Artificial Sequence
  Description of Artificial Sequence: Synthetic oligonucleotide
ucuuccauagcu

SEQ ID NO: 48051 - RNA, 12 nt, Artificial Sequence
  Description of Artificial Sequence: Synthetic oligonucleotide
auaaucuuccug

SEQ ID NO: 48052 - RNA, 12 nt, Artificial Sequence
  Description of Artificial Sequence: Synthetic oligonucleotide
uaaucuuccugu

SEQ ID NO: 48053 - RNA, 12 nt, Artificial Sequence
  Description of Artificial Sequence: Synthetic oligonucleotide
cuucaugacuug

SEQ ID NO: 48054 - RNA, 12 nt, Artificial Sequence
  Description of Artificial Sequence: Synthetic oligonucleotide
aagagggagaga

SEQ ID NO: 48055 - RNA, 12 nt, Artificial Sequence
  Description of Artificial Sequence: Synthetic oligonucleotide
cgucuccuacca

SEQ ID NO: 48056 - RNA, 12 nt, Artificial Sequence
  Description of Artificial Sequence: Synthetic oligonucleotide
gaucaaucggcc

SEQ ID NO: 48057 - RNA, 12 nt, Artificial Sequence
  Description of Artificial Sequence: Synthetic oligonucleotide
ggacgaacaucc

SEQ ID NO: 48058 - RNA, 11 nt, Artificial Sequence
  Description of Artificial Sequence: Synthetic oligonucleotide
agggucggaac

SEQ ID NO: 48059 - RNA, 10 nt, Artificial Sequence
  Description of Artificial Sequence: Synthetic oligonucleotide
ucggaaccca

SEQ ID NO: 48060 - RNA, 11 nt, Artificial Sequence
  Description of Artificial Sequence: Synthetic oligonucleotide
acccaagcuua

SEQ ID NO: 48061 - RNA, 14 nt, Artificial Sequence
  Description of Artificial Sequence: Synthetic oligonucleotide
gaacuuuaagcaac

SEQ ID NO: 48062 - RNA, 11 nt, Artificial Sequence
  Description of Artificial Sequence: Synthetic oligonucleotide
acuauucagug

SEQ ID NO: 48063 - RNA, 11 nt, Artificial Sequence
  Description of Artificial Sequence: Synthetic oligonucleotide
cuauucagugg

SEQ ID NO: 48064 - RNA, 13 nt, Artificial Sequence
  Description of Artificial Sequence: Synthetic oligonucleotide
aaacacagauaac

SEQ ID NO: 48065 - RNA, 12 nt, Artificial Sequence
  Description of Artificial Sequence: Synthetic oligonucleotide
cuuaagaaaaga

SEQ ID NO: 48066 - RNA, 12 nt, Artificial Sequence
  Description of Artificial Sequence: Synthetic oligonucleotide
cugaaggagugu

SEQ ID NO: 48067 - RNA, 10 nt, Artificial Sequence
  Description of Artificial Sequence: Synthetic oligonucleotide
ucaccgcggg

SEQ ID NO: 48068 - RNA, 14 nt, Artificial Sequence
  Description of Artificial Sequence: Synthetic oligonucleotide
agcagaaauaagcg

SEQ ID NO: 48069 - RNA, 12 nt, Artificial Sequence
  Description of Artificial Sequence: Synthetic oligonucleotide
aagcgugccguu

SEQ ID NO: 48070 - RNA, 12 nt, Artificial Sequence
  Description of Artificial Sequence: Synthetic oligonucleotide
agaaacagucac

SEQ ID NO: 48071 - RNA, 12 nt, Artificial Sequence
  Description of Artificial Sequence: Synthetic oligonucleotide
agaggaagaagg

SEQ ID NO: 48072 - RNA, 14 nt, Artificial Sequence
  Description of Artificial Sequence: Synthetic oligonucleotide
uguauucaaaauau

SEQ ID NO: 48073 - RNA, 13 nt, Artificial Sequence
  Description of Artificial Sequence: Synthetic oligonucleotide
auuuuccucccuu

SEQ ID NO: 48074 - RNA, 13 nt, Artificial Sequence
  Description of Artificial Sequence: Synthetic oligonucleotide
caaagaaagauag

SEQ ID NO: 48075 - RNA, 12 nt, Artificial Sequence
  Description of Artificial Sequence: Synthetic oligonucleotide
aagaaagauaga

SEQ ID NO: 48076 - RNA, 13 nt, Artificial Sequence
  Description of Artificial Sequence: Synthetic oligonucleotide
gaaagcauuuguu

SEQ ID NO: 48077 - RNA, 13 nt, Artificial Sequence
  Description of Artificial Sequence: Synthetic oligonucleotide
ugaguuaaacgaa

SEQ ID NO: 48078 - RNA, 12 nt, Artificial Sequence
  Description of Artificial Sequence: Synthetic oligonucleotide
acugauacagaa

SEQ ID NO: 48079 - RNA, 12 nt, Artificial Sequence
  Description of Artificial Sequence: Synthetic oligonucleotide
auauuauauaua

SEQ ID NO: 48080 - RNA, 12 nt, Artificial Sequence
  Description of Artificial Sequence: Synthetic oligonucleotide
auuauauauaua

SEQ ID NO: 48081 - RNA, 12 nt, Artificial Sequence
  Description of Artificial Sequence: Synthetic oligonucleotide
ucacuggaugua

SEQ ID NO: 48082 - RNA, 12 nt, Artificial Sequence
  Description of Artificial Sequence: Synthetic oligonucleotide
cagggaagagga

SEQ ID NO: 48083 - RNA, 15 nt, Artificial Sequence
  Description of Artificial Sequence: Synthetic oligonucleotide
augaucuuuuuuuug

SEQ ID NO: 48084 - RNA, 11 nt, Artificial Sequence
  Description of Artificial Sequence: Synthetic oligonucleotide
aguucacggcc

SEQ ID NO: 48085 - RNA, 13 nt, Artificial Sequence
  Description of Artificial Sequence: Synthetic oligonucleotide
caccaucacacca

SEQ ID NO: 48086 - RNA, 11 nt, Artificial Sequence
  Description of Artificial Sequence: Synthetic oligonucleotide
ccugcggguuu

SEQ ID NO: 48087 - RNA, 10 nt, Artificial Sequence
  Description of Artificial Sequence: Synthetic oligonucleotide
auccaguuug

SEQ ID NO: 48088 - RNA, 13 nt, Artificial Sequence
  Description of Artificial Sequence: Synthetic oligonucleotide
guuaaggacuucu

SEQ ID NO: 48089 - RNA, 13 nt, Artificial Sequence
  Description of Artificial Sequence: Synthetic oligonucleotide
cagugggacagag

SEQ ID NO: 48090 - RNA, 14 nt, Artificial Sequence
  Description of Artificial Sequence: Synthetic oligonucleotide
aauuuguuauugug

SEQ ID NO: 48091 - RNA, 13 nt, Artificial Sequence
  Description of Artificial Sequence: Synthetic oligonucleotide
uucaaaugcauuu

SEQ ID NO: 48092 - RNA, 10 nt, Artificial Sequence
  Description of Artificial Sequence: Synthetic oligonucleotide
caggaaagcc

SEQ ID NO: 48093 - RNA, 11 nt, Artificial Sequence
  Description of Artificial Sequence: Synthetic oligonucleotide
aggaaagcccu

SEQ ID NO: 48094 - RNA, 12 nt, Artificial Sequence
  Description of Artificial Sequence: Synthetic oligonucleotide
cccagcauggcc

SEQ ID NO: 48095 - RNA, 11 nt, Artificial Sequence
  Description of Artificial Sequence: Synthetic oligonucleotide
cuucucccuga

SEQ ID NO: 48096 - RNA, 12 nt, Artificial Sequence
  Description of Artificial Sequence: Synthetic oligonucleotide
gaagaagcccuu

SEQ ID NO: 48097 - RNA, 12 nt, Artificial Sequence
  Description of Artificial Sequence: Synthetic oligonucleotide
agaagcccuuca

SEQ ID NO: 48098 - RNA, 11 nt, Artificial Sequence
  Description of Artificial Sequence: Synthetic oligonucleotide
gcccuucagcg

SEQ ID NO: 48099 - RNA, 11 nt, Artificial Sequence
  Description of Artificial Sequence: Synthetic oligonucleotide
ccuucagcggc

SEQ ID NO: 48100 - RNA, 12 nt, Artificial Sequence
  Description of Artificial Sequence: Synthetic oligonucleotide
ucagcggccagu

SEQ ID NO: 48101 - RNA, 12 nt, Artificial Sequence
  Description of Artificial Sequence: Synthetic oligonucleotide
ugaaaagcuccg

SEQ ID NO: 48102 - RNA, 11 nt, Artificial Sequence
  Description of Artificial Sequence: Synthetic oligonucleotide
aaaagcuccgg

SEQ ID NO: 48103 - RNA, 13 nt, Artificial Sequence
  Description of Artificial Sequence: Synthetic oligonucleotide
agucaacagucug

SEQ ID NO: 48104 - RNA, 13 nt, Artificial Sequence
  Description of Artificial Sequence: Synthetic oligonucleotide
cagaguucaaaag

SEQ ID NO: 48105 - RNA, 13 nt, Artificial Sequence
  Description of Artificial Sequence: Synthetic oligonucleotide
agaguucaaaagc

SEQ ID NO: 48106 - RNA, 12 nt, Artificial Sequence
  Description of Artificial Sequence: Synthetic oligonucleotide
uucaaaagcccu

SEQ ID NO: 48107 - RNA, 12 nt, Artificial Sequence
  Description of Artificial Sequence: Synthetic oligonucleotide
ucaaaagcccuu

SEQ ID NO: 48108 - RNA, 12 nt, Artificial Sequence
  Description of Artificial Sequence: Synthetic oligonucleotide
aaaagcccuuca

SEQ ID NO: 48109 - RNA, 12 nt, Artificial Sequence
  Description of Artificial Sequence: Synthetic oligonucleotide
aaagcccuucag

SEQ ID NO: 48110 - RNA, 13 nt, Artificial Sequence
  Description of Artificial Sequence: Synthetic oligonucleotide
gugaagccgcucg

SEQ ID NO: 48111 - RNA, 12 nt, Artificial Sequence
  Description of Artificial Sequence: Synthetic oligonucleotide
cacgccagucaa

SEQ ID NO: 48112 - RNA, 13 nt, Artificial Sequence
  Description of Artificial Sequence: Synthetic oligonucleotide
uucuuggugcgug

SEQ ID NO: 48113 - RNA, 14 nt, Artificial Sequence
  Description of Artificial Sequence: Synthetic oligonucleotide
auuggauucaucag

SEQ ID NO: 48114 - RNA, 13 nt, Artificial Sequence
  Description of Artificial Sequence: Synthetic oligonucleotide
uggaauaccuaag

SEQ ID NO: 48115 - RNA, 12 nt, Artificial Sequence
  Description of Artificial Sequence: Synthetic oligonucleotide
auuugaggcuca

SEQ ID NO: 48116 - RNA, 11 nt, Artificial Sequence
  Description of Artificial Sequence: Synthetic oligonucleotide
ucuacaauugg

SEQ ID NO: 48117 - RNA, 12 nt, Artificial Sequence
  Description of Artificial Sequence: Synthetic oligonucleotide
uaguuaggagcc

SEQ ID NO: 48118 - RNA, 13 nt, Artificial Sequence
  Description of Artificial Sequence: Synthetic oligonucleotide
agucaauauccac

SEQ ID NO: 48119 - RNA, 13 nt, Artificial Sequence
  Description of Artificial Sequence: Synthetic oligonucleotide
auguucagucaca

SEQ ID NO: 48120 - RNA, 12 nt, Artificial Sequence
  Description of Artificial Sequence: Synthetic oligonucleotide
acacacacauac

SEQ ID NO: 48121 - RNA, 12 nt, Artificial Sequence
  Description of Artificial Sequence: Synthetic oligonucleotide
uuccuuuugcuu

SEQ ID NO: 48122 - RNA, 16 nt, Artificial Sequence
  Description of Artificial Sequence: Synthetic oligonucleotide
uuuuaaaguaauuuuu

SEQ ID NO: 48123 - RNA, 13 nt, Artificial Sequence
  Description of Artificial Sequence: Synthetic oligonucleotide
caacagucaaugg

SEQ ID NO: 48124 - RNA, 13 nt, Artificial Sequence
  Description of Artificial Sequence: Synthetic oligonucleotide
ucgacaaaccaau

SEQ ID NO: 48125 - RNA, 12 nt, Artificial Sequence
  Description of Artificial Sequence: Synthetic oligonucleotide
acugcuaccacu

SEQ ID NO: 48126 - RNA, 13 nt, Artificial Sequence
  Description of Artificial Sequence: Synthetic oligonucleotide
gcaagcggucuua

SEQ ID NO: 48127 - RNA, 13 nt, Artificial Sequence
  Description of Artificial Sequence: Synthetic oligonucleotide
ggucuuaccggcu

SEQ ID NO: 48128 - RNA, 11 nt, Artificial Sequence
  Description of Artificial Sequence: Synthetic oligonucleotide
gauggguuacc

SEQ ID NO: 48129 - RNA, 11 nt, Artificial Sequence
  Description of Artificial Sequence: Synthetic oligonucleotide
guuaccugcga

SEQ ID NO: 48130 - RNA, 12 nt, Artificial Sequence
  Description of Artificial Sequence: Synthetic oligonucleotide
aaucuugcugag

SEQ ID NO: 48131 - RNA, 13 nt, Artificial Sequence
  Description of Artificial Sequence: Synthetic oligonucleotide
agcauaaaacagu

SEQ ID NO: 48132 - RNA, 12 nt, Artificial Sequence
  Description of Artificial Sequence: Synthetic oligonucleotide
guccuuuauccu

SEQ ID NO: 48133 - RNA, 12 nt, Artificial Sequence
  Description of Artificial Sequence: Synthetic oligonucleotide
caacgcaaguug

SEQ ID NO: 48134 - RNA, 13 nt, Artificial Sequence
  Description of Artificial Sequence: Synthetic oligonucleotide
aaacugaaaccau

SEQ ID NO: 48135 - RNA, 14 nt, Artificial Sequence
  Description of Artificial Sequence: Synthetic oligonucleotide
acuuuguuaaauau

SEQ ID NO: 48136 - RNA, 14 nt, Artificial Sequence
  Description of Artificial Sequence: Synthetic oligonucleotide
guauauuaaaaguu

SEQ ID NO: 48137 - RNA, 13 nt, Artificial Sequence
  Description of Artificial Sequence: Synthetic oligonucleotide
guuuugacuuaac

SEQ ID NO: 48138 - RNA, 13 nt, Artificial Sequence
  Description of Artificial Sequence: Synthetic oligonucleotide
gcaaacucagcac

SEQ ID NO: 48139 - RNA, 11 nt, Artificial Sequence
  Description of Artificial Sequence: Synthetic oligonucleotide
ugcugaccuca

SEQ ID NO: 48140 - RNA, 14 nt, Artificial Sequence
  Description of Artificial Sequence: Synthetic oligonucleotide
uuuauucagaucgc

SEQ ID NO: 48141 - RNA, 13 nt, Artificial Sequence
  Description of Artificial Sequence: Synthetic oligonucleotide
aggguucugggau

SEQ ID NO: 48142 - RNA, 15 nt, Artificial Sequence
  Description of Artificial Sequence: Synthetic oligonucleotide
auauuggaaauuaug

SEQ ID NO: 48143 - RNA, 13 nt, Artificial Sequence
  Description of Artificial Sequence: Synthetic oligonucleotide
auggaagcacuag

SEQ ID NO: 48144 - RNA, 13 nt, Artificial Sequence
  Description of Artificial Sequence: Synthetic oligonucleotide
guuuuuaugugga

SEQ ID NO: 48145 - RNA, 12 nt, Artificial Sequence
  Description of Artificial Sequence: Synthetic oligonucleotide
ggaauugguaga

SEQ ID NO: 48146 - RNA, 13 nt, Artificial Sequence
  Description of Artificial Sequence: Synthetic oligonucleotide
uuagacuuggaga

SEQ ID NO: 48147 - RNA, 13 nt, Artificial Sequence
  Description of Artificial Sequence: Synthetic oligonucleotide
uuacaguauucca

SEQ ID NO: 48148 - RNA, 15 nt, Artificial Sequence
  Description of Artificial Sequence: Synthetic oligonucleotide
ccacugaugaauuaa

SEQ ID NO: 48149 - RNA, 12 nt, Artificial Sequence
  Description of Artificial Sequence: Synthetic oligonucleotide
ccacaucaucac

SEQ ID NO: 48150 - RNA, 13 nt, Artificial Sequence
  Description of Artificial Sequence: Synthetic oligonucleotide
cucaccaaacaga

SEQ ID NO: 48151 - RNA, 12 nt, Artificial Sequence
  Description of Artificial Sequence: Synthetic oligonucleotide
ggaacaugaugg

SEQ ID NO: 48152 - RNA, 12 nt, Artificial Sequence
  Description of Artificial Sequence: Synthetic oligonucleotide
cauguagacugc

SEQ ID NO: 48153 - RNA, 13 nt, Artificial Sequence
  Description of Artificial Sequence: Synthetic oligonucleotide
ggaucuauuuaug

SEQ ID NO: 48154 - RNA, 12 nt, Artificial Sequence
  Description of Artificial Sequence: Synthetic oligonucleotide
gcacuauuauca

SEQ ID NO: 48155 - RNA, 11 nt, Artificial Sequence
  Description of Artificial Sequence: Synthetic oligonucleotide
aucaguucugc

SEQ ID NO: 48156 - RNA, 13 nt, Artificial Sequence
  Description of Artificial Sequence: Synthetic oligonucleotide
agauuaaaccuac

SEQ ID NO: 48157 - RNA, 13 nt, Artificial Sequence
  Description of Artificial Sequence: Synthetic oligonucleotide
auaaaauccuucu

SEQ ID NO: 48158 - RNA, 12 nt, Artificial Sequence
  Description of Artificial Sequence: Synthetic oligonucleotide
aaugcuguagac

SEQ ID NO: 48159 - RNA, 13 nt, Artificial Sequence
  Description of Artificial Sequence: Synthetic oligonucleotide
uugauaggaauag

SEQ ID NO: 48160 - RNA, 11 nt, Artificial Sequence
  Description of Artificial Sequence: Synthetic oligonucleotide
aauggcccuga

SEQ ID NO: 48161 - RNA, 11 nt, Artificial Sequence
  Description of Artificial Sequence: Synthetic oligonucleotide
uuccucaagca

SEQ ID NO: 48162 - RNA, 10 nt, Artificial Sequence
  Description of Artificial Sequence: Synthetic oligonucleotide
guucagccca

SEQ ID NO: 48163 - RNA, 11 nt, Artificial Sequence
  Description of Artificial Sequence: Synthetic oligonucleotide
gcugcugaacc

SEQ ID NO: 48164 - RNA, 12 nt, Artificial Sequence
  Description of Artificial Sequence: Synthetic oligonucleotide
aaguucucuuca

SEQ ID NO: 48165 - RNA, 11 nt, Artificial Sequence
  Description of Artificial Sequence: Synthetic oligonucleotide
ccagccuagag

SEQ ID NO: 48166 - RNA, 13 nt, Artificial Sequence
  Description of Artificial Sequence: Synthetic oligonucleotide
cucugugaagugu

SEQ ID NO: 48167 - RNA, 14 nt, Artificial Sequence
  Description of Artificial Sequence: Synthetic oligonucleotide
ugagaaaauuucaa

SEQ ID NO: 48168 - RNA, 11 nt, Artificial Sequence
  Description of Artificial Sequence: Synthetic oligonucleotide
aauccuccuga

SEQ ID NO: 48169 - RNA, 12 nt, Artificial Sequence
  Description of Artificial Sequence: Synthetic oligonucleotide
gugacaucauau

SEQ ID NO: 48170 - RNA, 13 nt, Artificial Sequence
  Description of Artificial Sequence: Synthetic oligonucleotide
aaucuucaucaua

SEQ ID NO: 48171 - RNA, 13 nt, Artificial Sequence
  Description of Artificial Sequence: Synthetic oligonucleotide
gacuagcuauuaa

SEQ ID NO: 48172 - RNA, 14 nt, Artificial Sequence
  Description of Artificial Sequence: Synthetic oligonucleotide
ucucuacuaaaaau

SEQ ID NO: 48173 - RNA, 12 nt, Artificial Sequence
  Description of Artificial Sequence: Synthetic oligonucleotide
ucuaucucgccu

SEQ ID NO: 48174 - RNA, 13 nt, Artificial Sequence
  Description of Artificial Sequence: Synthetic oligonucleotide
cuucgguccaguu

SEQ ID NO: 48175 - RNA, 11 nt, Artificial Sequence
  Description of Artificial Sequence: Synthetic oligonucleotide
gauguagccgc

SEQ ID NO: 48176 - RNA, 12 nt, Artificial Sequence
  Description of Artificial Sequence: Synthetic oligonucleotide
ugaggagacuug

SEQ ID NO: 48177 - RNA, 12 nt, Artificial Sequence
  Description of Artificial Sequence: Synthetic oligonucleotide
gaguagugagga

SEQ ID NO: 48178 - RNA, 14 nt, Artificial Sequence
  Description of Artificial Sequence: Synthetic oligonucleotide
cagaugaguacaaa

SEQ ID NO: 48179 - RNA, 13 nt, Artificial Sequence
  Description of Artificial Sequence: Synthetic oligonucleotide
guuguuaaugggc

SEQ ID NO: 48180 - RNA, 13 nt, Artificial Sequence
  Description of Artificial Sequence: Synthetic oligonucleotide
uuuuuaauuuauu

SEQ ID NO: 48181 - RNA, 12 nt, Artificial Sequence
  Description of Artificial Sequence: Synthetic oligonucleotide
uauuuaaauaug

SEQ ID NO: 48182 - RNA, 13 nt, Artificial Sequence
  Description of Artificial Sequence: Synthetic oligonucleotide
uauccuuuguuuc

SEQ ID NO: 48183 - RNA, 14 nt, Artificial Sequence
  Description of Artificial Sequence: Synthetic oligonucleotide
cgucuaaguguuug

SEQ ID NO: 48184 - RNA, 12 nt, Artificial Sequence
  Description of Artificial Sequence: Synthetic oligonucleotide
accugugacaaa

SEQ ID NO: 48185 - RNA, 13 nt, Artificial Sequence
  Description of Artificial Sequence: Synthetic oligonucleotide
ccaggcugaauua

SEQ ID NO: 48186 - RNA, 14 nt, Artificial Sequence
  Description of Artificial Sequence: Synthetic oligonucleotide
gucauucuuacaau

SEQ ID NO: 48187 - RNA, 15 nt, Artificial Sequence
  Description of Artificial Sequence: Synthetic oligonucleotide
ucauucuuacaauug

SEQ ID NO: 48188 - RNA, 12 nt, Artificial Sequence
  Description of Artificial Sequence: Synthetic oligonucleotide
cagagaguguac

SEQ ID NO: 48189 - RNA, 12 nt, Artificial Sequence
  Description of Artificial Sequence: Synthetic oligonucleotide
agaacucagcag

SEQ ID NO: 48190 - RNA, 13 nt, Artificial Sequence
  Description of Artificial Sequence: Synthetic oligonucleotide
uuuauuuucagua

SEQ ID NO: 48191 - RNA, 12 nt, Artificial Sequence
  Description of Artificial Sequence: Synthetic oligonucleotide
ucuuaaauggaa

SEQ ID NO: 48192 - RNA, 13 nt, Artificial Sequence
  Description of Artificial Sequence: Synthetic oligonucleotide
ugccuaaaauugu

SEQ ID NO: 48193 - RNA, 12 nt, Artificial Sequence
  Description of Artificial Sequence: Synthetic oligonucleotide
agacugugagcu

SEQ ID NO: 48194 - RNA, 14 nt, Artificial Sequence
  Description of Artificial Sequence: Synthetic oligonucleotide
ugcuuuuuauuaau

SEQ ID NO: 48195 - RNA, 13 nt, Artificial Sequence
  Description of Artificial Sequence: Synthetic oligonucleotide
cucuucuuacauu

SEQ ID NO: 48196 - RNA, 15 nt, Artificial Sequence
  Description of Artificial Sequence: Synthetic oligonucleotide
cauuuguaaaaaugu

SEQ ID NO: 48197 - RNA, 15 nt, Artificial Sequence
  Description of Artificial Sequence: Synthetic oligonucleotide
aucuuaauucauauu

SEQ ID NO: 48198 - RNA, 13 nt, Artificial Sequence
  Description of Artificial Sequence: Synthetic oligonucleotide
gaacuaaucauga

SEQ ID NO: 48199 - RNA, 12 nt, Artificial Sequence
  Description of Artificial Sequence: Synthetic oligonucleotide
ucugcucuuggg

SEQ ID NO: 48200 - RNA, 13 nt, Artificial Sequence
  Description of Artificial Sequence: Synthetic oligonucleotide
caguagcuuugag

SEQ ID NO: 48201 - RNA, 14 nt, Artificial Sequence
  Description of Artificial Sequence: Synthetic oligonucleotide
cacguaauauuuca

SEQ ID NO: 48202 - RNA, 13 nt, Artificial Sequence
  Description of Artificial Sequence: Synthetic oligonucleotide
uauucucuucacu

SEQ ID NO: 48203 - RNA, 14 nt, Artificial Sequence
  Description of Artificial Sequence: Synthetic oligonucleotide
cuaaugcuaagaaa

SEQ ID NO: 48204 - RNA, 12 nt, Artificial Sequence
  Description of Artificial Sequence: Synthetic oligonucleotide
gcugaaaaucaa

SEQ ID NO: 48205 - RNA, 14 nt, Artificial Sequence
  Description of Artificial Sequence: Synthetic oligonucleotide
aauaugauuacuuu

SEQ ID NO: 48206 - RNA, 14 nt, Artificial Sequence
  Description of Artificial Sequence: Synthetic oligonucleotide
cauuuuguucuaca

SEQ ID NO: 48207 - RNA, 12 nt, Artificial Sequence
  Description of Artificial Sequence: Synthetic oligonucleotide
cccgggacucuc

SEQ ID NO: 48208 - RNA, 14 nt, Artificial Sequence
  Description of Artificial Sequence: Synthetic oligonucleotide
ccuuuaaaguaaag

SEQ ID NO: 48209 - RNA, 13 nt, Artificial Sequence
  Description of Artificial Sequence: Synthetic oligonucleotide
ucuggaagccugg

SEQ ID NO: 48210 - RNA, 14 nt, Artificial Sequence
  Description of Artificial Sequence: Synthetic oligonucleotide
aaaacaaaagagag

SEQ ID NO: 48211 - RNA, 13 nt, Artificial Sequence
  Description of Artificial Sequence: Synthetic oligonucleotide
aucaguuaugccg

SEQ ID NO: 48212 - RNA, 13 nt, Artificial Sequence
  Description of Artificial Sequence: Synthetic oligonucleotide
uaaaagaagucca

SEQ ID NO: 48213 - RNA, 11 nt, Artificial Sequence
  Description of Artificial Sequence: Synthetic oligonucleotide
aggugagguua

SEQ ID NO: 48214 - RNA, 11 nt, Artificial Sequence
  Description of Artificial Sequence: Synthetic oligonucleotide
gggaagaggac

SEQ ID NO: 48215 - RNA, 13 nt, Artificial Sequence
  Description of Artificial Sequence: Synthetic oligonucleotide
aagcaaguauugu

SEQ ID NO: 48216 - RNA, 12 nt, Artificial Sequence
  Description of Artificial Sequence: Synthetic oligonucleotide
auuguagcacuc

SEQ ID NO: 48217 - RNA, 14 nt, Artificial Sequence
  Description of Artificial Sequence: Synthetic oligonucleotide
acaaaaccacaaau

SEQ ID NO: 48218 - RNA, 12 nt, Artificial Sequence
  Description of Artificial Sequence: Synthetic oligonucleotide
uaagcccauaca

SEQ ID NO: 48219 - RNA, 11 nt, Artificial Sequence
  Description of Artificial Sequence: Synthetic oligonucleotide
agcccauacag

SEQ ID NO: 48220 - RNA, 12 nt, Artificial Sequence
  Description of Artificial Sequence: Synthetic oligonucleotide
cagaaaccuucc

SEQ ID NO: 48221 - RNA, 10 nt, Artificial Sequence
  Description of Artificial Sequence: Synthetic oligonucleotide
guauaccuac

SEQ ID NO: 48222 - RNA, 13 nt, Artificial Sequence
  Description of Artificial Sequence: Synthetic oligonucleotide
gccaguuuucgga

SEQ ID NO: 48223 - RNA, 9 nt, Artificial Sequence
  Description of Artificial Sequence: Synthetic oligonucleotide
ggaacaggg

SEQ ID NO: 48224 - RNA, 13 nt, Artificial Sequence
  Description of Artificial Sequence: Synthetic oligonucleotide
uuaacuuuccagu

SEQ ID NO: 48225 - RNA, 14 nt, Artificial Sequence
  Description of Artificial Sequence: Synthetic oligonucleotide
aaaguuugguuuug

SEQ ID NO: 48226 - RNA, 12 nt, Artificial Sequence
  Description of Artificial Sequence: Synthetic oligonucleotide
cuucccacugua

SEQ ID NO: 48227 - RNA, 13 nt, Artificial Sequence
  Description of Artificial Sequence: Synthetic oligonucleotide
ugauaccauauga

SEQ ID NO: 48228 - RNA, 11 nt, Artificial Sequence
  Description of Artificial Sequence: Synthetic oligonucleotide
aacaugggcug

SEQ ID NO: 48229 - RNA, 13 nt, Artificial Sequence
  Description of Artificial Sequence: Synthetic oligonucleotide
caacuuuuucaua

SEQ ID NO: 48230 - RNA, 12 nt, Artificial Sequence
  Description of Artificial Sequence: Synthetic oligonucleotide
caugaggccgga

SEQ ID NO: 48231 - RNA, 11 nt, Artificial Sequence
  Description of Artificial Sequence: Synthetic oligonucleotide
acugcauuugu

SEQ ID NO: 48232 - RNA, 13 nt, Artificial Sequence
  Description of Artificial Sequence: Synthetic oligonucleotide
aauguuuacuacc

SEQ ID NO: 48233 - RNA, 15 nt, Artificial Sequence
  Description of Artificial Sequence: Synthetic oligonucleotide
aauuuuuugaugaaa

SEQ ID NO: 48234 - RNA, 14 nt, Artificial Sequence
  Description of Artificial Sequence: Synthetic oligonucleotide
cagugugugaauuu

SEQ ID NO: 48235 - RNA, 13 nt, Artificial Sequence
  Description of Artificial Sequence: Synthetic oligonucleotide
gagcaauguaugu

SEQ ID NO: 48236 - RNA, 14 nt, Artificial Sequence
  Description of Artificial Sequence: Synthetic oligonucleotide
aaagcacauauaua

SEQ ID NO: 48237 - RNA, 14 nt, Artificial Sequence
  Description of Artificial Sequence: Synthetic oligonucleotide
guaauaguuucucc

SEQ ID NO: 48238 - RNA, 13 nt, Artificial Sequence
  Description of Artificial Sequence: Synthetic oligonucleotide
aguuucuccaaau

SEQ ID NO: 48239 - RNA, 13 nt, Artificial Sequence
  Description of Artificial Sequence: Synthetic oligonucleotide
uacuuccuagaaa

SEQ ID NO: 48240 - RNA, 13 nt, Artificial Sequence
  Description of Artificial Sequence: Synthetic oligonucleotide
uacaccauauaug

SEQ ID NO: 48241 - RNA, 14 nt, Artificial Sequence
  Description of Artificial Sequence: Synthetic oligonucleotide
auauaugaauggag

SEQ ID NO: 48242 - RNA, 13 nt, Artificial Sequence
  Description of Artificial Sequence: Synthetic oligonucleotide
acgagaagaagau

SEQ ID NO: 48243 - RNA, 13 nt, Artificial Sequence
  Description of Artificial Sequence: Synthetic oligonucleotide
ucauuuacaggga

SEQ ID NO: 48244 - RNA, 13 nt, Artificial Sequence
  Description of Artificial Sequence: Synthetic oligonucleotide
cauuuacagggac

SEQ ID NO: 48245 - RNA, 10 nt, Artificial Sequence
  Description of Artificial Sequence: Synthetic oligonucleotide
agggaccuga

SEQ ID NO: 48246 - RNA, 14 nt, Artificial Sequence
  Description of Artificial Sequence: Synthetic oligonucleotide
uguuugacugcauc

SEQ ID NO: 48247 - RNA, 13 nt, Artificial Sequence
  Description of Artificial Sequence: Synthetic oligonucleotide
uuugacugcaucg

SEQ ID NO: 48248 - RNA, 12 nt, Artificial Sequence
  Description of Artificial Sequence: Synthetic oligonucleotide
gaguucacaggg

SEQ ID NO: 48249 - RNA, 13 nt, Artificial Sequence
  Description of Artificial Sequence: Synthetic oligonucleotide
ggcaccucugucc

SEQ ID NO: 48250 - RNA, 15 nt, Artificial Sequence
  Description of Artificial Sequence: Synthetic oligonucleotide
gguuugucuuuuuaa

SEQ ID NO: 48251 - RNA, 14 nt, Artificial Sequence
  Description of Artificial Sequence: Synthetic oligonucleotide
uuugucuuuuuaag

SEQ ID NO: 48252 - RNA, 13 nt, Artificial Sequence
  Description of Artificial Sequence: Synthetic oligonucleotide
ccuaaagguuguc

SEQ ID NO: 48253 - RNA, 12 nt, Artificial Sequence
  Description of Artificial Sequence: Synthetic oligonucleotide
aagguugucgac

SEQ ID NO: 48254 - RNA, 13 nt, Artificial Sequence
  Description of Artificial Sequence: Synthetic oligonucleotide
accuggcaauugu

SEQ ID NO: 48255 - RNA, 12 nt, Artificial Sequence
  Description of Artificial Sequence: Synthetic oligonucleotide
aguggugcgagg

SEQ ID NO: 48256 - RNA, 13 nt, Artificial Sequence
  Description of Artificial Sequence: Synthetic oligonucleotide
agagacaugaaau

SEQ ID NO: 48257 - RNA, 13 nt, Artificial Sequence
  Description of Artificial Sequence: Synthetic oligonucleotide
auauauuucucca

SEQ ID NO: 48258 - RNA, 10 nt, Artificial Sequence
  Description of Artificial Sequence: Synthetic oligonucleotide
caugaaggcu

SEQ ID NO: 48259 - RNA, 11 nt, Artificial Sequence
  Description of Artificial Sequence: Synthetic oligonucleotide
gcuggaguggu

SEQ ID NO: 48260 - RNA, 11 nt, Artificial Sequence
  Description of Artificial Sequence: Synthetic oligonucleotide
aggaagagagg

SEQ ID NO: 48261 - RNA, 12 nt, Artificial Sequence
  Description of Artificial Sequence: Synthetic oligonucleotide
cuugcaucgggc

SEQ ID NO: 48262 - RNA, 13 nt, Artificial Sequence
  Description of Artificial Sequence: Synthetic oligonucleotide
auauccuacugug

SEQ ID NO: 48263 - RNA, 13 nt, Artificial Sequence
  Description of Artificial Sequence: Synthetic oligonucleotide
uccuacuguguaa

SEQ ID NO: 48264 - RNA, 12 nt, Artificial Sequence
  Description of Artificial Sequence: Synthetic oligonucleotide
ccuuguagugua

SEQ ID NO: 48265 - RNA, 13 nt, Artificial Sequence
  Description of Artificial Sequence: Synthetic oligonucleotide
ucuuuguugauug

SEQ ID NO: 48266 - RNA, 14 nt, Artificial Sequence
  Description of Artificial Sequence: Synthetic oligonucleotide
uuuguugauugaaa

SEQ ID NO: 48267 - RNA, 15 nt, Artificial Sequence
  Description of Artificial Sequence: Synthetic oligonucleotide
uucuuuuucuuccau

SEQ ID NO: 48268 - RNA, 13 nt, Artificial Sequence
  Description of Artificial Sequence: Synthetic oligonucleotide
aaucuuccuucua

SEQ ID NO: 48269 - RNA, 13 nt, Artificial Sequence
  Description of Artificial Sequence: Synthetic oligonucleotide
uugaaugcuucau

SEQ ID NO: 48270 - RNA, 13 nt, Artificial Sequence
  Description of Artificial Sequence: Synthetic oligonucleotide
ugaaugcuucaug

SEQ ID NO: 48271 - RNA, 13 nt, Artificial Sequence
  Description of Artificial Sequence: Synthetic oligonucleotide
aauucuacuuuga

SEQ ID NO: 48272 - RNA, 13 nt, Artificial Sequence
  Description of Artificial Sequence: Synthetic oligonucleotide
agcaacuacagac

SEQ ID NO: 48273 - RNA, 13 nt, Artificial Sequence
  Description of Artificial Sequence: Synthetic oligonucleotide
gaccaaggucaac

SEQ ID NO: 48274 - RNA, 13 nt, Artificial Sequence
  Description of Artificial Sequence: Synthetic oligonucleotide
cgacuaucucgac

SEQ ID NO: 48275 - RNA, 13 nt, Artificial Sequence
  Description of Artificial Sequence: Synthetic oligonucleotide
aaccuucccaaac

SEQ ID NO: 48276 - RNA, 14 nt, Artificial Sequence
  Description of Artificial Sequence: Synthetic oligonucleotide
ccaagcuuagaacu

SEQ ID NO: 48277 - RNA, 15 nt, Artificial Sequence
  Description of Artificial Sequence: Synthetic oligonucleotide
agcuuagaacuuuaa

SEQ ID NO: 48278 - RNA, 11 nt, Artificial Sequence
  Description of Artificial Sequence: Synthetic oligonucleotide
aagaccaccac

SEQ ID NO: 48279 - RNA, 14 nt, Artificial Sequence
  Description of Artificial Sequence: Synthetic oligonucleotide
gcgagaaauaaagu

SEQ ID NO: 48280 - RNA, 14 nt, Artificial Sequence
  Description of Artificial Sequence: Synthetic oligonucleotide
cgagaaauaaaguu

SEQ ID NO: 48281 - RNA, 12 nt, Artificial Sequence
  Description of Artificial Sequence: Synthetic oligonucleotide
aggaaaugaucc

SEQ ID NO: 48282 - RNA, 13 nt, Artificial Sequence
  Description of Artificial Sequence: Synthetic oligonucleotide
gaagaaaugaaac

SEQ ID NO: 48283 - RNA, 13 nt, Artificial Sequence
  Description of Artificial Sequence: Synthetic oligonucleotide
guuuccauccucc

SEQ ID NO: 48284 - RNA, 15 nt, Artificial Sequence
  Description of Artificial Sequence: Synthetic oligonucleotide
acugaaaaucuuuga

SEQ ID NO: 48285 - RNA, 11 nt, Artificial Sequence
  Description of Artificial Sequence: Synthetic oligonucleotide
ugccguucagg

SEQ ID NO: 48286 - RNA, 13 nt, Artificial Sequence
  Description of Artificial Sequence: Synthetic oligonucleotide
caggguccagaag

SEQ ID NO: 48287 - RNA, 13 nt, Artificial Sequence
  Description of Artificial Sequence: Synthetic oligonucleotide
ucaagacugcuug

SEQ ID NO: 48288 - RNA, 13 nt, Artificial Sequence
  Description of Artificial Sequence: Synthetic oligonucleotide
uccaugucuuugg

SEQ ID NO: 48289 - RNA, 11 nt, Artificial Sequence
  Description of Artificial Sequence: Synthetic oligonucleotide
gccugaaacac

SEQ ID NO: 48290 - RNA, 12 nt, Artificial Sequence
  Description of Artificial Sequence: Synthetic oligonucleotide
ucucuguaccuc

SEQ ID NO: 48291 - RNA, 12 nt, Artificial Sequence
  Description of Artificial Sequence: Synthetic oligonucleotide
agcaagacaaga

SEQ ID NO: 48292 - RNA, 13 nt, Artificial Sequence
  Description of Artificial Sequence: Synthetic oligonucleotide
gcaagacaagaaa

SEQ ID NO: 48293 - RNA, 12 nt, Artificial Sequence
  Description of Artificial Sequence: Synthetic oligonucleotide
uguacaagaucc

SEQ ID NO: 48294 - RNA, 12 nt, Artificial Sequence
  Description of Artificial Sequence: Synthetic oligonucleotide
cguacuugcaga

SEQ ID NO: 48295 - RNA, 13 nt, Artificial Sequence
  Description of Artificial Sequence: Synthetic oligonucleotide
cgaucgauacaga

SEQ ID NO: 48296 - RNA, 13 nt, Artificial Sequence
  Description of Artificial Sequence: Synthetic oligonucleotide
uauaaaaauaaau

SEQ ID NO: 48297 - RNA, 13 nt, Artificial Sequence
  Description of Artificial Sequence: Synthetic oligonucleotide
uaaaaauaaauau

SEQ ID NO: 48298 - RNA, 13 nt, Artificial Sequence
  Description of Artificial Sequence: Synthetic oligonucleotide
uuugacugcugug

SEQ ID NO: 48299 - RNA, 13 nt, Artificial Sequence
  Description of Artificial Sequence: Synthetic oligonucleotide
ggagaugagagac

SEQ ID NO: 48300 - RNA, 10 nt, Artificial Sequence
  Description of Artificial Sequence: Synthetic oligonucleotide
ucccacuugg

SEQ ID NO: 48301 - RNA, 10 nt, Artificial Sequence
  Description of Artificial Sequence: Synthetic oligonucleotide
guucacggcc

SEQ ID NO: 48302 - RNA, 12 nt, Artificial Sequence
  Description of Artificial Sequence: Synthetic oligonucleotide
accaucacacca

SEQ ID NO: 48303 - RNA, 10 nt, Artificial Sequence
  Description of Artificial Sequence: Synthetic oligonucleotide
cugcggguuu

SEQ ID NO: 48304 - RNA, 9 nt, Artificial Sequence
  Description of Artificial Sequence: Synthetic oligonucleotide
uccaguuug

SEQ ID NO: 48305 - RNA, 12 nt, Artificial Sequence
  Description of Artificial Sequence: Synthetic oligonucleotide
uuaaggacuucu

SEQ ID NO: 48306 - RNA, 12 nt, Artificial Sequence
  Description of Artificial Sequence: Synthetic oligonucleotide
agugggacagag

SEQ ID NO: 48307 - RNA, 13 nt, Artificial Sequence
  Description of Artificial Sequence: Synthetic oligonucleotide
auuuguuauugug

SEQ ID NO: 48308 - RNA, 12 nt, Artificial Sequence
  Description of Artificial Sequence: Synthetic oligonucleotide
ucaaaugcauuu

SEQ ID NO: 48309 - RNA, 9 nt, Artificial Sequence
  Description of Artificial Sequence: Synthetic oligonucleotide
aggaaagcc

SEQ ID NO: 48310 - RNA, 10 nt, Artificial Sequence
  Description of Artificial Sequence: Synthetic oligonucleotide
ggaaagcccu

SEQ ID NO: 48311 - RNA, 11 nt, Artificial Sequence
  Description of Artificial Sequence: Synthetic oligonucleotide
ccagcauggcc

SEQ ID NO: 48312 - RNA, 10 nt, Artificial Sequence
  Description of Artificial Sequence: Synthetic oligonucleotide
uucucccuga

SEQ ID NO: 48313 - RNA, 11 nt, Artificial Sequence
  Description of Artificial Sequence: Synthetic oligonucleotide
aagaagcccuu

SEQ ID NO: 48314 - RNA, 11 nt, Artificial Sequence
  Description of Artificial Sequence: Synthetic oligonucleotide
gaagcccuuca

SEQ ID NO: 48315 - RNA, 10 nt, Artificial Sequence
  Description of Artificial Sequence: Synthetic oligonucleotide
cccuucagcg

SEQ ID NO: 48316 - RNA, 10 nt, Artificial Sequence
  Description of Artificial Sequence: Synthetic oligonucleotide
cuucagcggc

SEQ ID NO: 48317 - RNA, 11 nt, Artificial Sequence
  Description of Artificial Sequence: Synthetic oligonucleotide
cagcggccagu

SEQ ID NO: 48318 - RNA, 11 nt, Artificial Sequence
  Description of Artificial Sequence: Synthetic oligonucleotide
gaaaagcuccg

SEQ ID NO: 48319 - RNA, 10 nt, Artificial Sequence
  Description of Artificial Sequence: Synthetic oligonucleotide
aaagcuccgg

SEQ ID NO: 48320 - RNA, 12 nt, Artificial Sequence
  Description of Artificial Sequence: Synthetic oligonucleotide
gucaacagucug

SEQ ID NO: 48321 - RNA, 12 nt, Artificial Sequence
  Description of Artificial Sequence: Synthetic oligonucleotide
agaguucaaaag

SEQ ID NO: 48322 - RNA, 12 nt, Artificial Sequence
  Description of Artificial Sequence: Synthetic oligonucleotide
gaguucaaaagc

SEQ ID NO: 48323 - RNA, 11 nt, Artificial Sequence
  Description of Artificial Sequence: Synthetic oligonucleotide
ucaaaagcccu

SEQ ID NO: 48324 - RNA, 11 nt, Artificial Sequence
  Description of Artificial Sequence: Synthetic oligonucleotide
caaaagcccuu

SEQ ID NO: 48325 - RNA, 11 nt, Artificial Sequence
  Description of Artificial Sequence: Synthetic oligonucleotide
aaagcccuuca

SEQ ID NO: 48326 - RNA, 11 nt, Artificial Sequence
  Description of Artificial Sequence: Synthetic oligonucleotide
aagcccuucag

SEQ ID NO: 48327 - RNA, 12 nt, Artificial Sequence
  Description of Artificial Sequence: Synthetic oligonucleotide
ugaagccgcucg

SEQ ID NO: 48328 - RNA, 11 nt, Artificial Sequence
  Description of Artificial Sequence: Synthetic oligonucleotide
acgccagucaa

SEQ ID NO: 48329 - RNA, 12 nt, Artificial Sequence
  Description of Artificial Sequence: Synthetic oligonucleotide
ucuuggugcgug

SEQ ID NO: 48330 - RNA, 13 nt, Artificial Sequence
  Description of Artificial Sequence: Synthetic oligonucleotide
uuggauucaucag

SEQ ID NO: 48331 - RNA, 12 nt, Artificial Sequence
  Description of Artificial Sequence: Synthetic oligonucleotide
ggaauaccuaag

SEQ ID NO: 48332 - RNA, 11 nt, Artificial Sequence
  Description of Artificial Sequence: Synthetic oligonucleotide
uuugaggcuca

SEQ ID NO: 48333 - RNA, 10 nt, Artificial Sequence
  Description of Artificial Sequence: Synthetic oligonucleotide
cuacaauugg

SEQ ID NO: 48334 - RNA, 11 nt, Artificial Sequence
  Description of Artificial Sequence: Synthetic oligonucleotide
aguuaggagcc

SEQ ID NO: 48335 - RNA, 12 nt, Artificial Sequence
  Description of Artificial Sequence: Synthetic oligonucleotide
gucaauauccac

SEQ ID NO: 48336 - RNA, 12 nt, Artificial Sequence
  Description of Artificial Sequence: Synthetic oligonucleotide
uguucagucaca

SEQ ID NO: 48337 - RNA, 11 nt, Artificial Sequence
  Description of Artificial Sequence: Synthetic oligonucleotide
cacacacauac

SEQ ID NO: 48338 - RNA, 11 nt, Artificial Sequence
  Description of Artificial Sequence: Synthetic oligonucleotide
uccuuuugcuu

SEQ ID NO: 48339 - RNA, 15 nt, Artificial Sequence
  Description of Artificial Sequence: Synthetic oligonucleotide
uuuaaaguaauuuuu

SEQ ID NO: 48340 - RNA, 12 nt, Artificial Sequence
  Description of Artificial Sequence: Synthetic oligonucleotide
aacagucaaugg

SEQ ID NO: 48341 - RNA, 12 nt, Artificial Sequence
  Description of Artificial Sequence: Synthetic oligonucleotide
cgacaaaccaau

SEQ ID NO: 48342 - RNA, 11 nt, Artificial Sequence
  Description of Artificial Sequence: Synthetic oligonucleotide
cugcuaccacu

SEQ ID NO: 48343 - RNA, 12 nt, Artificial Sequence
  Description of Artificial Sequence: Synthetic oligonucleotide
caagcggucuua

SEQ ID NO: 48344 - RNA, 12 nt, Artificial Sequence
  Description of Artificial Sequence: Synthetic oligonucleotide
gucuuaccggcu

SEQ ID NO: 48345 - RNA, 10 nt, Artificial Sequence
  Description of Artificial Sequence: Synthetic oligonucleotide
auggguuacc

SEQ ID NO: 48346 - RNA, 10 nt, Artificial Sequence
  Description of Artificial Sequence: Synthetic oligonucleotide
uuaccugcga

SEQ ID NO: 48347 - RNA, 11 nt, Artificial Sequence
  Description of Artificial Sequence: Synthetic oligonucleotide
aucuugcugag

SEQ ID NO: 48348 - RNA, 12 nt, Artificial Sequence
  Description of Artificial Sequence: Synthetic oligonucleotide
gcauaaaacagu

SEQ ID NO: 48349 - RNA, 11 nt, Artificial Sequence
  Description of Artificial Sequence: Synthetic oligonucleotide
uccuuuauccu

SEQ ID NO: 48350 - RNA, 11 nt, Artificial Sequence
  Description of Artificial Sequence: Synthetic oligonucleotide
aacgcaaguug

SEQ ID NO: 48351 - RNA, 12 nt, Artificial Sequence
  Description of Artificial Sequence: Synthetic oligonucleotide
aacugaaaccau

SEQ ID NO: 48352 - RNA, 13 nt, Artificial Sequence
  Description of Artificial Sequence: Synthetic oligonucleotide
cuuuguuaaauau

SEQ ID NO: 48353 - RNA, 13 nt, Artificial Sequence
  Description of Artificial Sequence: Synthetic oligonucleotide
uauauuaaaaguu

SEQ ID NO: 48354 - RNA, 12 nt, Artificial Sequence
  Description of Artificial Sequence: Synthetic oligonucleotide
uuuugacuuaac

SEQ ID NO: 48355 - RNA, 12 nt, Artificial Sequence
  Description of Artificial Sequence: Synthetic oligonucleotide
caaacucagcac

SEQ ID NO: 48356 - RNA, 10 nt, Artificial Sequence
  Description of Artificial Sequence: Synthetic oligonucleotide
gcugaccuca

SEQ ID NO: 48357 - RNA, 13 nt, Artificial Sequence
  Description of Artificial Sequence: Synthetic oligonucleotide
uuauucagaucgc

SEQ ID NO: 48358 - RNA, 12 nt, Artificial Sequence
  Description of Artificial Sequence: Synthetic oligonucleotide
ggguucugggau

SEQ ID NO: 48359 - RNA, 14 nt, Artificial Sequence
  Description of Artificial Sequence: Synthetic oligonucleotide
uauuggaaauuaug

SEQ ID NO: 48360 - RNA, 12 nt, Artificial Sequence
  Description of Artificial Sequence: Synthetic oligonucleotide
uggaagcacuag

SEQ ID NO: 48361 - RNA, 12 nt, Artificial Sequence
  Description of Artificial Sequence: Synthetic oligonucleotide
uuuuuaugugga

SEQ ID NO: 48362 - RNA, 11 nt, Artificial Sequence
  Description of Artificial Sequence: Synthetic oligonucleotide
gaauugguaga

SEQ ID NO: 48363 - RNA, 12 nt, Artificial Sequence
  Description of Artificial Sequence: Synthetic oligonucleotide
uagacuuggaga

SEQ ID NO: 48364 - RNA, 12 nt, Artificial Sequence
  Description of Artificial Sequence: Synthetic oligonucleotide
uacaguauucca

SEQ ID NO: 48365 - RNA, 14 nt, Artificial Sequence
  Description of Artificial Sequence: Synthetic oligonucleotide
cacugaugaauuaa

SEQ ID NO: 48366 - RNA, 11 nt, Artificial Sequence
  Description of Artificial Sequence: Synthetic oligonucleotide
cacaucaucac

SEQ ID NO: 48367 - RNA, 12 nt, Artificial Sequence
  Description of Artificial Sequence: Synthetic oligonucleotide
ucaccaaacaga

SEQ ID NO: 48368 - RNA, 11 nt, Artificial Sequence
  Description of Artificial Sequence: Synthetic oligonucleotide
gaacaugaugg

SEQ ID NO: 48369 - RNA, 11 nt, Artificial Sequence
  Description of Artificial Sequence: Synthetic oligonucleotide
auguagacugc

SEQ ID NO: 48370 - RNA, 12 nt, Artificial Sequence
  Description of Artificial Sequence: Synthetic oligonucleotide
gaucuauuuaug

SEQ ID NO: 48371 - RNA, 11 nt, Artificial Sequence
  Description of Artificial Sequence: Synthetic oligonucleotide
cacuauuauca

SEQ ID NO: 48372 - RNA, 10 nt, Artificial Sequence
  Description of Artificial Sequence: Synthetic oligonucleotide
ucaguucugc

SEQ ID NO: 48373 - RNA, 12 nt, Artificial Sequence
  Description of Artificial Sequence: Synthetic oligonucleotide
gauuaaaccuac

SEQ ID NO: 48374 - RNA, 12 nt, Artificial Sequence
  Description of Artificial Sequence: Synthetic oligonucleotide
uaaaauccuucu

SEQ ID NO: 48375 - RNA, 11 nt, Artificial Sequence
  Description of Artificial Sequence: Synthetic oligonucleotide
augcuguagac

SEQ ID NO: 48376 - RNA, 12 nt, Artificial Sequence
  Description of Artificial Sequence: Synthetic oligonucleotide
ugauaggaauag

SEQ ID NO: 48377 - RNA, 10 nt, Artificial Sequence
  Description of Artificial Sequence: Synthetic oligonucleotide
auggcccuga

SEQ ID NO: 48378 - RNA, 10 nt, Artificial Sequence
  Description of Artificial Sequence: Synthetic oligonucleotide
uccucaagca

SEQ ID NO: 48379 - RNA, 9 nt, Artificial Sequence
  Description of Artificial Sequence: Synthetic oligonucleotide
uucagccca

SEQ ID NO: 48380 - RNA, 10 nt, Artificial Sequence
  Description of Artificial Sequence: Synthetic oligonucleotide
cugcugaacc

SEQ ID NO: 48381 - RNA, 11 nt, Artificial Sequence
  Description of Artificial Sequence: Synthetic oligonucleotide
aguucucuuca

SEQ ID NO: 48382 - RNA, 10 nt, Artificial Sequence
  Description of Artificial Sequence: Synthetic oligonucleotide
cagccuagag

SEQ ID NO: 48383 - RNA, 12 nt, Artificial Sequence
  Description of Artificial Sequence: Synthetic oligonucleotide
ucugugaagugu

SEQ ID NO: 48384 - RNA, 13 nt, Artificial Sequence
  Description of Artificial Sequence: Synthetic oligonucleotide
gagaaaauuucaa

SEQ ID NO: 48385 - RNA, 10 nt, Artificial Sequence
  Description of Artificial Sequence: Synthetic oligonucleotide
auccuccuga

SEQ ID NO: 48386 - RNA, 11 nt, Artificial Sequence
  Description of Artificial Sequence: Synthetic oligonucleotide
ugacaucauau

SEQ ID NO: 48387 - RNA, 12 nt, Artificial Sequence
  Description of Artificial Sequence: Synthetic oligonucleotide
aucuucaucaua

SEQ ID NO: 48388 - RNA, 12 nt, Artificial Sequence
  Description of Artificial Sequence: Synthetic oligonucleotide
acuagcuauuaa

SEQ ID NO: 48389 - RNA, 13 nt, Artificial Sequence
  Description of Artificial Sequence: Synthetic oligonucleotide
cucuacuaaaaau

SEQ ID NO: 48390 - RNA, 11 nt, Artificial Sequence
  Description of Artificial Sequence: Synthetic oligonucleotide
cuaucucgccu

SEQ ID NO: 48391 - RNA, 12 nt, Artificial Sequence
  Description of Artificial Sequence: Synthetic oligonucleotide
uucgguccaguu

SEQ ID NO: 48392 - RNA, 10 nt, Artificial Sequence
  Description of Artificial Sequence: Synthetic oligonucleotide
auguagccgc

SEQ ID NO: 48393 - RNA, 11 nt, Artificial Sequence
  Description of Artificial Sequence: Synthetic oligonucleotide
gaggagacuug

SEQ ID NO: 48394 - RNA, 11 nt, Artificial Sequence
  Description of Artificial Sequence: Synthetic oligonucleotide
aguagugagga

SEQ ID NO: 48395 - RNA, 13 nt, Artificial Sequence
  Description of Artificial Sequence: Synthetic oligonucleotide
agaugaguacaaa

SEQ ID NO: 48396 - RNA, 12 nt, Artificial Sequence
  Description of Artificial Sequence: Synthetic oligonucleotide
uuguuaaugggc

SEQ ID NO: 48397 - RNA, 12 nt, Artificial Sequence
  Description of Artificial Sequence: Synthetic oligonucleotide
uuuuaauuuauu

SEQ ID NO: 48398 - RNA, 11 nt, Artificial Sequence
  Description of Artificial Sequence: Synthetic oligonucleotide
auuuaaauaug

SEQ ID NO: 48399 - RNA, 12 nt, Artificial Sequence
  Description of Artificial Sequence: Synthetic oligonucleotide
auccuuuguuuc

SEQ ID NO: 48400 - RNA, 13 nt, Artificial Sequence
  Description of Artificial Sequence: Synthetic oligonucleotide
gucuaaguguuug

SEQ ID NO: 48401 - RNA, 11 nt, Artificial Sequence
  Description of Artificial Sequence: Synthetic oligonucleotide
ccugugacaaa

SEQ ID NO: 48402 - RNA, 12 nt, Artificial Sequence
  Description of Artificial Sequence: Synthetic oligonucleotide
caggcugaauua

SEQ ID NO: 48403 - RNA, 13 nt, Artificial Sequence
  Description of Artificial Sequence: Synthetic oligonucleotide
ucauucuuacaau

SEQ ID NO: 48404 - RNA, 14 nt, Artificial Sequence
  Description of Artificial Sequence: Synthetic oligonucleotide
cauucuuacaauug

SEQ ID NO: 48405 - RNA, 11 nt, Artificial Sequence
  Description of Artificial Sequence: Synthetic oligonucleotide
agagaguguac

SEQ ID NO: 48406 - RNA, 11 nt, Artificial Sequence
  Description of Artificial Sequence: Synthetic oligonucleotide
gaacucagcag

SEQ ID NO: 48407 - RNA, 12 nt, Artificial Sequence
  Description of Artificial Sequence: Synthetic oligonucleotide
uuauuuucagua

SEQ ID NO: 48408 - RNA, 11 nt, Artificial Sequence
  Description of Artificial Sequence: Synthetic oligonucleotide
cuuaaauggaa

SEQ ID NO: 48409 - RNA, 12 nt, Artificial Sequence
  Description of Artificial Sequence: Synthetic oligonucleotide
gccuaaaauugu

SEQ ID NO: 48410 - RNA, 12 nt, Artificial Sequence
  Description of Artificial Sequence: Synthetic oligonucleotide
acuaacaucugg

SEQ ID NO: 48411 - RNA, 11 nt, Artificial Sequence
  Description of Artificial Sequence: Synthetic oligonucleotide
gacugugagcu

SEQ ID NO: 48412 - RNA, 13 nt, Artificial Sequence
  Description of Artificial Sequence: Synthetic oligonucleotide
gcuuuuuauuaau

SEQ ID NO: 48413 - RNA, 12 nt, Artificial Sequence
  Description of Artificial Sequence: Synthetic oligonucleotide
ucuucuuacauu

SEQ ID NO: 48414 - RNA, 14 nt, Artificial Sequence
  Description of Artificial Sequence: Synthetic oligonucleotide
auuuguaaaaaugu

SEQ ID NO: 48415 - RNA, 14 nt, Artificial Sequence
  Description of Artificial Sequence: Synthetic oligonucleotide
ucuuaauucauauu

SEQ ID NO: 48416 - RNA, 12 nt, Artificial Sequence
  Description of Artificial Sequence: Synthetic oligonucleotide
aacuaaucauga

SEQ ID NO: 48417 - RNA, 11 nt, Artificial Sequence
  Description of Artificial Sequence: Synthetic oligonucleotide
cugcucuuggg

SEQ ID NO: 48418 - RNA, 12 nt, Artificial Sequence
  Description of Artificial Sequence: Synthetic oligonucleotide
aguagcuuugag

SEQ ID NO: 48419 - RNA, 13 nt, Artificial Sequence
  Description of Artificial Sequence: Synthetic oligonucleotide
acguaauauuuca

SEQ ID NO: 48420 - RNA, 12 nt, Artificial Sequence
  Description of Artificial Sequence: Synthetic oligonucleotide
auucucuucacu

SEQ ID NO: 48421 - RNA, 13 nt, Artificial Sequence
  Description of Artificial Sequence: Synthetic oligonucleotide
uaaugcuaagaaa

SEQ ID NO: 48422 - RNA, 11 nt, Artificial Sequence
  Description of Artificial Sequence: Synthetic oligonucleotide
cugaaaaucaa

SEQ ID NO: 48423 - RNA, 13 nt, Artificial Sequence
  Description of Artificial Sequence: Synthetic oligonucleotide
auaugauuacuuu

SEQ ID NO: 48424 - RNA, 13 nt, Artificial Sequence
  Description of Artificial Sequence: Synthetic oligonucleotide
auuuuguucuaca

SEQ ID NO: 48425 - RNA, 11 nt, Artificial Sequence
  Description of Artificial Sequence: Synthetic oligonucleotide
ccgggacucuc

SEQ ID NO: 48426 - RNA, 13 nt, Artificial Sequence
  Description of Artificial Sequence: Synthetic oligonucleotide
cuuuaaaguaaag

SEQ ID NO: 48427 - RNA, 12 nt, Artificial Sequence
  Description of Artificial Sequence: Synthetic oligonucleotide
cuggaagccugg

SEQ ID NO: 48428 - RNA, 13 nt, Artificial Sequence
  Description of Artificial Sequence: Synthetic oligonucleotide
aaacaaaagagag

SEQ ID NO: 48429 - RNA, 12 nt, Artificial Sequence
  Description of Artificial Sequence: Synthetic oligonucleotide
ucaguuaugccg

SEQ ID NO: 48430 - RNA, 12 nt, Artificial Sequence
  Description of Artificial Sequence: Synthetic oligonucleotide
aaaagaagucca

SEQ ID NO: 48431 - RNA, 10 nt, Artificial Sequence
  Description of Artificial Sequence: Synthetic oligonucleotide
ggugagguua

SEQ ID NO: 48432 - RNA, 10 nt, Artificial Sequence
  Description of Artificial Sequence: Synthetic oligonucleotide
ggaagaggac

SEQ ID NO: 48433 - RNA, 12 nt, Artificial Sequence
  Description of Artificial Sequence: Synthetic oligonucleotide
agcaaguauugu

SEQ ID NO: 48434 - RNA, 11 nt, Artificial Sequence
  Description of Artificial Sequence: Synthetic oligonucleotide
uuguagcacuc

SEQ ID NO: 48435 - RNA, 13 nt, Artificial Sequence
  Description of Artificial Sequence: Synthetic oligonucleotide
caaaaccacaaau

SEQ ID NO: 48436 - RNA, 11 nt, Artificial Sequence
  Description of Artificial Sequence: Synthetic oligonucleotide
aagcccauaca

SEQ ID NO: 48437 - RNA, 10 nt, Artificial Sequence
  Description of Artificial Sequence: Synthetic oligonucleotide
gcccauacag

SEQ ID NO: 48438 - RNA, 11 nt, Artificial Sequence
  Description of Artificial Sequence: Synthetic oligonucleotide
agaaaccuucc

SEQ ID NO: 48439 - RNA, 9 nt, Artificial Sequence
  Description of Artificial Sequence: Synthetic oligonucleotide
uauaccuac

SEQ ID NO: 48440 - RNA, 12 nt, Artificial Sequence
  Description of Artificial Sequence: Synthetic oligonucleotide
ccaguuuucgga

SEQ ID NO: 48441 - RNA, 8 nt, Artificial Sequence
  Description of Artificial Sequence: Synthetic oligonucleotide
gaacaggg

SEQ ID NO: 48442 - RNA, 12 nt, Artificial Sequence
  Description of Artificial Sequence: Synthetic oligonucleotide
uaacuuuccagu

SEQ ID NO: 48443 - RNA, 13 nt, Artificial Sequence
  Description of Artificial Sequence: Synthetic oligonucleotide
aaguuugguuuug

SEQ ID NO: 48444 - RNA, 11 nt, Artificial Sequence
  Description of Artificial Sequence: Synthetic oligonucleotide
uucccacugua

SEQ ID NO: 48445 - RNA, 12 nt, Artificial Sequence
  Description of Artificial Sequence: Synthetic oligonucleotide
gauaccauauga

SEQ ID NO: 48446 - RNA, 10 nt, Artificial Sequence
  Description of Artificial Sequence: Synthetic oligonucleotide
acaugggcug

SEQ ID NO: 48447 - RNA, 12 nt, Artificial Sequence
  Description of Artificial Sequence: Synthetic oligonucleotide
aacuuuuucaua

SEQ ID NO: 48448 - RNA, 11 nt, Artificial Sequence
  Description of Artificial Sequence: Synthetic oligonucleotide
augaggccgga

SEQ ID NO: 48449 - RNA, 10 nt, Artificial Sequence
  Description of Artificial Sequence: Synthetic oligonucleotide
cugcauuugu

SEQ ID NO: 48450 - RNA, 12 nt, Artificial Sequence
  Description of Artificial Sequence: Synthetic oligonucleotide
auguuuacuacc

SEQ ID NO: 48451 - RNA, 14 nt, Artificial Sequence
  Description of Artificial Sequence: Synthetic oligonucleotide
auuuuuugaugaaa

SEQ ID NO: 48452 - RNA, 13 nt, Artificial Sequence
  Description of Artificial Sequence: Synthetic oligonucleotide
agugugugaauuu

SEQ ID NO: 48453 - RNA, 12 nt, Artificial Sequence
  Description of Artificial Sequence: Synthetic oligonucleotide
agcaauguaugu

SEQ ID NO: 48454 - RNA, 13 nt, Artificial Sequence
  Description of Artificial Sequence: Synthetic oligonucleotide
aagcacauauaua

SEQ ID NO: 48455 - RNA, 13 nt, Artificial Sequence
  Description of Artificial Sequence: Synthetic oligonucleotide
uaauaguuucucc

SEQ ID NO: 48456 - RNA, 12 nt, Artificial Sequence
  Description of Artificial Sequence: Synthetic oligonucleotide
guuucuccaaau

SEQ ID NO: 48457 - RNA, 12 nt, Artificial Sequence
  Description of Artificial Sequence: Synthetic oligonucleotide
acuuccuagaaa

SEQ ID NO: 48458 - RNA, 12 nt, Artificial Sequence
  Description of Artificial Sequence: Synthetic oligonucleotide
acaccauauaug

SEQ ID NO: 48459 - RNA, 13 nt, Artificial Sequence
  Description of Artificial Sequence: Synthetic oligonucleotide
uauaugaauggag

SEQ ID NO: 48460 - RNA, 12 nt, Artificial Sequence
  Description of Artificial Sequence: Synthetic oligonucleotide
cauuuacaggga

SEQ ID NO: 48461 - RNA, 12 nt, Artificial Sequence
  Description of Artificial Sequence: Synthetic oligonucleotide
auuuacagggac

SEQ ID NO: 48462 - RNA, 9 nt, Artificial Sequence
  Description of Artificial Sequence: Synthetic oligonucleotide
gggaccuga

SEQ ID NO: 48463 - RNA, 13 nt, Artificial Sequence
  Description of Artificial Sequence: Synthetic oligonucleotide
guuugacugcauc

SEQ ID NO: 48464 - RNA, 12 nt, Artificial Sequence
  Description of Artificial Sequence: Synthetic oligonucleotide
uugacugcaucg

SEQ ID NO: 48465 - RNA, 11 nt, Artificial Sequence
  Description of Artificial Sequence: Synthetic oligonucleotide
aguucacaggg

SEQ ID NO: 48466 - RNA, 12 nt, Artificial Sequence
  Description of Artificial Sequence: Synthetic oligonucleotide
gcaccucugucc

SEQ ID NO: 48467 - RNA, 14 nt, Artificial Sequence
  Description of Artificial Sequence: Synthetic oligonucleotide
guuugucuuuuuaa

SEQ ID NO: 48468 - RNA, 13 nt, Artificial Sequence
  Description of Artificial Sequence: Synthetic oligonucleotide
uugucuuuuuaag

SEQ ID NO: 48469 - RNA, 12 nt, Artificial Sequence
  Description of Artificial Sequence: Synthetic oligonucleotide
cuaaagguuguc

SEQ ID NO: 48470 - RNA, 11 nt, Artificial Sequence
  Description of Artificial Sequence: Synthetic oligonucleotide
agguugucgac

SEQ ID NO: 48471 - RNA, 12 nt, Artificial Sequence
  Description of Artificial Sequence: Synthetic oligonucleotide
ccuggcaauugu

SEQ ID NO: 48472 - RNA, 11 nt, Artificial Sequence
  Description of Artificial Sequence: Synthetic oligonucleotide
guggugcgagg

SEQ ID NO: 48473 - RNA, 12 nt, Artificial Sequence
  Description of Artificial Sequence: Synthetic oligonucleotide
gagacaugaaau

SEQ ID NO: 48474 - RNA, 12 nt, Artificial Sequence
  Description of Artificial Sequence: Synthetic oligonucleotide
uauauuucucca

SEQ ID NO: 48475 - RNA, 9 nt, Artificial Sequence
  Description of Artificial Sequence: Synthetic oligonucleotide
augaaggcu

SEQ ID NO: 48476 - RNA, 10 nt, Artificial Sequence
  Description of Artificial Sequence: Synthetic oligonucleotide
cuggaguggu

SEQ ID NO: 48477 - RNA, 10 nt, Artificial Sequence
  Description of Artificial Sequence: Synthetic oligonucleotide
ggaagagagg

SEQ ID NO: 48478 - RNA, 11 nt, Artificial Sequence
  Description of Artificial Sequence: Synthetic oligonucleotide
uugcaucgggc

SEQ ID NO: 48479 - RNA, 12 nt, Artificial Sequence
  Description of Artificial Sequence: Synthetic oligonucleotide
uauccuacugug

SEQ ID NO: 48480 - RNA, 12 nt, Artificial Sequence
  Description of Artificial Sequence: Synthetic oligonucleotide
ccuacuguguaa

SEQ ID NO: 48481 - RNA, 11 nt, Artificial Sequence
  Description of Artificial Sequence: Synthetic oligonucleotide
cuuguagugua

SEQ ID NO: 48482 - RNA, 12 nt, Artificial Sequence
  Description of Artificial Sequence: Synthetic oligonucleotide
cuuuguugauug

SEQ ID NO: 48483 - RNA, 13 nt, Artificial Sequence
  Description of Artificial Sequence: Synthetic oligonucleotide
uuguugauugaaa

SEQ ID NO: 48484 - RNA, 14 nt, Artificial Sequence
  Description of Artificial Sequence: Synthetic oligonucleotide
ucuuuuucuuccau

SEQ ID NO: 48485 - RNA, 12 nt, Artificial Sequence
  Description of Artificial Sequence: Synthetic oligonucleotide
aucuuccuucua

SEQ ID NO: 48486 - RNA, 12 nt, Artificial Sequence
  Description of Artificial Sequence: Synthetic oligonucleotide
ugaaugcuucau

SEQ ID NO: 48487 - RNA, 12 nt, Artificial Sequence
  Description of Artificial Sequence: Synthetic oligonucleotide
gaaugcuucaug

SEQ ID NO: 48488 - RNA, 12 nt, Artificial Sequence
  Description of Artificial Sequence: Synthetic oligonucleotide
auucuacuuuga

SEQ ID NO: 48489 - RNA, 12 nt, Artificial Sequence
  Description of Artificial Sequence: Synthetic oligonucleotide
gcaacuacagac

SEQ ID NO: 48490 - RNA, 12 nt, Artificial Sequence
  Description of Artificial Sequence: Synthetic oligonucleotide
accaaggucaac

SEQ ID NO: 48491 - RNA, 12 nt, Artificial Sequence
  Description of Artificial Sequence: Synthetic oligonucleotide
gacuaucucgac

SEQ ID NO: 48492 - RNA, 12 nt, Artificial Sequence
  Description of Artificial Sequence: Synthetic oligonucleotide
accuucccaaac

SEQ ID NO: 48493 - RNA, 13 nt, Artificial Sequence
  Description of Artificial Sequence: Synthetic oligonucleotide
caagcuuagaacu

SEQ ID NO: 48494 - RNA, 14 nt, Artificial Sequence
  Description of Artificial Sequence: Synthetic oligonucleotide
gcuuagaacuuuaa

SEQ ID NO: 48495 - RNA, 13 nt, Artificial Sequence
  Description of Artificial Sequence: Synthetic oligonucleotide
aacuuuaagcaac

SEQ ID NO: 48496 - RNA, 10 nt, Artificial Sequence
  Description of Artificial Sequence: Synthetic oligonucleotide
agaccaccac

SEQ ID NO: 48497 - RNA, 13 nt, Artificial Sequence
  Description of Artificial Sequence: Synthetic oligonucleotide
cgagaaauaaagu

SEQ ID NO: 48498 - RNA, 13 nt, Artificial Sequence
  Description of Artificial Sequence: Synthetic oligonucleotide
gagaaauaaaguu

SEQ ID NO: 48499 - RNA, 11 nt, Artificial Sequence
  Description of Artificial Sequence: Synthetic oligonucleotide
ggaaaugaucc

SEQ ID NO: 48500 - RNA, 12 nt, Artificial Sequence
  Description of Artificial Sequence: Synthetic oligonucleotide
aagaaaugaaac

SEQ ID NO: 48501 - RNA, 12 nt, Artificial Sequence
  Description of Artificial Sequence: Synthetic oligonucleotide
uuuccauccucc

SEQ ID NO: 48502 - RNA, 14 nt, Artificial Sequence
  Description of Artificial Sequence: Synthetic oligonucleotide
cugaaaaucuuuga

SEQ ID NO: 48503 - RNA, 10 nt, Artificial Sequence
  Description of Artificial Sequence: Synthetic oligonucleotide
gccguucagg

SEQ ID NO: 48504 - RNA, 12 nt, Artificial Sequence
  Description of Artificial Sequence: Synthetic oligonucleotide
aggguccagaag

SEQ ID NO: 48505 - RNA, 12 nt, Artificial Sequence
  Description of Artificial Sequence: Synthetic oligonucleotide
caagacugcuug

SEQ ID NO: 48506 - RNA, 12 nt, Artificial Sequence
  Description of Artificial Sequence: Synthetic oligonucleotide
ccaugucuuugg

SEQ ID NO: 48507 - RNA, 10 nt, Artificial Sequence
  Description of Artificial Sequence: Synthetic oligonucleotide
ccugaaacac

SEQ ID NO: 48508 - RNA, 11 nt, Artificial Sequence
  Description of Artificial Sequence: Synthetic oligonucleotide
cucuguaccuc

SEQ ID NO: 48509 - RNA, 11 nt, Artificial Sequence
  Description of Artificial Sequence: Synthetic oligonucleotide
gcaagacaaga

SEQ ID NO: 48510 - RNA, 12 nt, Artificial Sequence
  Description of Artificial Sequence: Synthetic oligonucleotide
caagacaagaaa

SEQ ID NO: 48511 - RNA, 11 nt, Artificial Sequence
  Description of Artificial Sequence: Synthetic oligonucleotide
guacaagaucc

SEQ ID NO: 48512 - RNA, 11 nt, Artificial Sequence
  Description of Artificial Sequence: Synthetic oligonucleotide
guacuugcaga

SEQ ID NO: 48513 - RNA, 12 nt, Artificial Sequence
  Description of Artificial Sequence: Synthetic oligonucleotide
gaucgauacaga

SEQ ID NO: 48514 - RNA, 12 nt, Artificial Sequence
  Description of Artificial Sequence: Synthetic oligonucleotide
auaaaaauaaau

SEQ ID NO: 48515 - RNA, 12 nt, Artificial Sequence
  Description of Artificial Sequence: Synthetic oligonucleotide
aaaaauaaauau

SEQ ID NO: 48516 - RNA, 12 nt, Artificial Sequence
  Description of Artificial Sequence: Synthetic oligonucleotide
uugacugcugug

SEQ ID NO: 48517 - RNA, 12 nt, Artificial Sequence
  Description of Artificial Sequence: Synthetic oligonucleotide
gagaugagagac

SEQ ID NO: 48518 - RNA, 9 nt, Artificial Sequence
  Description of Artificial Sequence: Synthetic oligonucleotide
cccacuugg

SEQ ID NO: 48519 - RNA, 1204 nt, Homo sapiens
gaaauucuuacaaaaacugaaagugaaaugaggaagacagauugagcaauccaaucggaggguaaaugccagcaaaccuacuguacaguagggguagagaugcagaaaggcagaaaggagaaaauucaggauaacucuccugaggggugagccaagcccugccauguagugcacgcaggacaucaacaaacacagauaacaggaaaugauccauucccuguggucacuuauucuaaaggccccaaccuucaaaguucaaguagugauauggaugacuccacagaaagggagcagucacgccuuacuucuugccuuaagaaaagagaagaaaugaaacugaaggaguguguuuccauccucccacggaaggaaagccccucuguccgauccuccaaagacggaaagcugcuggcugcaaccuugcugcuggcacugcugucuugcugccucacgguggugucuuucuaccagguggccgcccugcaaggggaccuggccagccuccgggcagagcugcagggccaccacgcggagaagcugccagcaggagcaggagcccccaaggccggccuggaggaagcuccagcugucaccgcgggacugaaaaucuuugaaccaccagcuccaggagaaggcaacuccagucagaacagcagaaauaagcgugccguucaggguccagaagaaacagucacucaagacugcuugcaacugauugcagacagugaaacaccaacuauacaaaaaggaucuuacacauuuguuccauggcuucucagcuuuaaaaggggaagugcccuagaagaaaaagagaauaaaauauuggucaaagaaacugguuacuuuuuuauauauggucagguuuuauauacugauaagaccuacgccaugggacaucuaauucagaggaagaagguccaugucuuuggggaugaauugagucuggugacuuuguuucgauguauucaaaauaugccugaaacacuacccaauaauuccugcuauucagcuggcauugcaaaacuggaagaaggagaugaacuccaacuugcaauaccaagagaaaaugcacaaauaucacuggauggagaugucacauuuuuuggugcauugaaacugcugugaccuacuuacaccaugucuguagcuauuuuccucccuuucucuguaccucuaagaagaaagaaucuaacugaaaauacca

SEQ ID NO: 48520 - RNA, 19 nt, Artificial Sequence
  Description of Artificial Sequence: Synthetic oligonucleotide
gaaauucuuacaaaaacug

SEQ ID NO: 48521 - RNA, 19 nt, Artificial Sequence
  Description of Artificial Sequence: Synthetic oligonucleotide
gaaagugaaaugaggaaga

SEQ ID NO: 48522 - RNA, 19 nt, Artificial Sequence
  Description of Artificial Sequence: Synthetic oligonucleotide
acagauugagcaauccaau

SEQ ID NO: 48523 - RNA, 19 nt, Artificial Sequence
  Description of Artificial Sequence: Synthetic oligonucleotide
ucggaggguaaaugccagc

SEQ ID NO: 48524 - RNA, 19 nt, Artificial Sequence
  Description of Artificial Sequence: Synthetic oligonucleotide
caaaccuacuguacaguag

SEQ ID NO: 48525 - RNA, 19 nt, Artificial Sequence
  Description of Artificial Sequence: Synthetic oligonucleotide
gggguagagaugcagaaag

SEQ ID NO: 48526 - RNA, 19 nt, Artificial Sequence
  Description of Artificial Sequence: Synthetic oligonucleotide
ggcagaaaggagaaaauuc

SEQ ID NO: 48527 - RNA, 19 nt, Artificial Sequence
  Description of Artificial Sequence: Synthetic oligonucleotide
caggauaacucuccugagg

SEQ ID NO: 48528 - RNA, 19 nt, Artificial Sequence
  Description of Artificial Sequence: Synthetic oligonucleotide
gggugagccaagcccugcc

SEQ ID NO: 48529 - RNA, 19 nt, Artificial Sequence
  Description of Artificial Sequence: Synthetic oligonucleotide
cauguagugcacgcaggac

SEQ ID NO: 48530 - RNA, 19 nt, Artificial Sequence
  Description of Artificial Sequence: Synthetic oligonucleotide
caucaacaaacacagauaa

SEQ ID NO: 48531 - RNA, 19 nt, Artificial Sequence
  Description of Artificial Sequence: Synthetic oligonucleotide
acaggaaaugauccauucc

SEQ ID NO: 48532 - RNA, 19 nt, Artificial Sequence
  Description of Artificial Sequence: Synthetic oligonucleotide
ccuguggucacuuauucua

SEQ ID NO: 48533 - RNA, 19 nt, Artificial Sequence
  Description of Artificial Sequence: Synthetic oligonucleotide
aaaggccccaaccuucaaa

SEQ ID NO: 48534 - RNA, 19 nt, Artificial Sequence
  Description of Artificial Sequence: Synthetic oligonucleotide
aguucaaguagugauaugg

SEQ ID NO: 48535 - RNA, 19 nt, Artificial Sequence
  Description of Artificial Sequence: Synthetic oligonucleotide
gaugacuccacagaaaggg

SEQ ID NO: 48536 - RNA, 19 nt, Artificial Sequence
  Description of Artificial Sequence: Synthetic oligonucleotide
gagcagucacgccuuacuu

SEQ ID NO: 48537 - RNA, 19 nt, Artificial Sequence
  Description of Artificial Sequence: Synthetic oligonucleotide
ucuugccuuaagaaaagag

SEQ ID NO: 48538 - RNA, 19 nt, Artificial Sequence
  Description of Artificial Sequence: Synthetic oligonucleotide
gaagaaaugaaacugaagg

SEQ ID NO: 48539 - RNA, 19 nt, Artificial Sequence
  Description of Artificial Sequence: Synthetic oligonucleotide
gaguguguuuccauccucc

SEQ ID NO: 48540 - RNA, 19 nt, Artificial Sequence
  Description of Artificial Sequence: Synthetic oligonucleotide
ccacggaaggaaagccccu

SEQ ID NO: 48541 - RNA, 19 nt, Artificial Sequence
  Description of Artificial Sequence: Synthetic oligonucleotide
ucuguccgauccuccaaag

SEQ ID NO: 48542 - RNA, 19 nt, Artificial Sequence
  Description of Artificial Sequence: Synthetic oligonucleotide
gacggaaagcugcuggcug

SEQ ID NO: 48543 - RNA, 19 nt, Artificial Sequence
  Description of Artificial Sequence: Synthetic oligonucleotide
gcaaccuugcugcuggcac

SEQ ID NO: 48544 - RNA, 19 nt, Artificial Sequence
  Description of Artificial Sequence: Synthetic oligonucleotide
cugcugucuugcugccuca

SEQ ID NO: 48545 - RNA, 19 nt, Artificial Sequence
  Description of Artificial Sequence: Synthetic oligonucleotide
acgguggugucuuucuacc

SEQ ID NO: 48546 - RNA, 19 nt, Artificial Sequence
  Description of Artificial Sequence: Synthetic oligonucleotide
cagguggccgcccugcaag

SEQ ID NO: 48547 - RNA, 19 nt, Artificial Sequence
  Description of Artificial Sequence: Synthetic oligonucleotide
ggggaccuggccagccucc

SEQ ID NO: 48548 - RNA, 19 nt, Artificial Sequence
  Description of Artificial Sequence: Synthetic oligonucleotide
cgggcagagcugcagggcc

SEQ ID NO: 48549 - RNA, 19 nt, Artificial Sequence
  Description of Artificial Sequence: Synthetic oligonucleotide
caccacgcggagaagcugc

SEQ ID NO: 48550 - RNA, 19 nt, Artificial Sequence
  Description of Artificial Sequence: Synthetic oligonucleotide
ccagcaggagcaggagccc

SEQ ID NO: 48551 - RNA, 19 nt, Artificial Sequence
  Description of Artificial Sequence: Synthetic oligonucleotide
cccaaggccggccuggagg

SEQ ID NO: 48552 - RNA, 19 nt, Artificial Sequence
  Description of Artificial Sequence: Synthetic oligonucleotide
gaagcuccagcugucaccg

SEQ ID NO: 48553 - RNA, 19 nt, Artificial Sequence
  Description of Artificial Sequence: Synthetic oligonucleotide
gcgggacugaaaaucuuug

SEQ ID NO: 48554 - RNA, 19 nt, Artificial Sequence
  Description of Artificial Sequence: Synthetic oligonucleotide
gaaccaccagcuccaggag

SEQ ID NO: 48555 - RNA, 19 nt, Artificial Sequence
  Description of Artificial Sequence: Synthetic oligonucleotide
gaaggcaacuccagucaga

SEQ ID NO: 48556 - RNA, 19 nt, Artificial Sequence
  Description of Artificial Sequence: Synthetic oligonucleotide
aacagcagaaauaagcgug

SEQ ID NO: 48557 - RNA, 19 nt, Artificial Sequence
  Description of Artificial Sequence: Synthetic oligonucleotide
gccguucaggguccagaag

SEQ ID NO: 48558 - RNA, 19 nt, Artificial Sequence
  Description of Artificial Sequence: Synthetic oligonucleotide
gaaacagucacucaagacu

SEQ ID NO: 48559 - RNA, 19 nt, Artificial Sequence
  Description of Artificial Sequence: Synthetic oligonucleotide
ugcuugcaacugauugcag

SEQ ID NO: 48560 - RNA, 19 nt, Artificial Sequence
  Description of Artificial Sequence: Synthetic oligonucleotide
gacagugaaacaccaacua

SEQ ID NO: 48561 - RNA, 19 nt, Artificial Sequence
  Description of Artificial Sequence: Synthetic oligonucleotide
auacaaaaaggaucuuaca

SEQ ID NO: 48562 - RNA, 19 nt, Artificial Sequence
  Description of Artificial Sequence: Synthetic oligonucleotide
acauuuguuccauggcuuc

SEQ ID NO: 48563 - RNA, 19 nt, Artificial Sequence
  Description of Artificial Sequence: Synthetic oligonucleotide
cucagcuuuaaaaggggaa

SEQ ID NO: 48564 - RNA, 19 nt, Artificial Sequence
  Description of Artificial Sequence: Synthetic oligonucleotide
agugcccuagaagaaaaag

SEQ ID NO: 48565 - RNA, 19 nt, Artificial Sequence
  Description of Artificial Sequence: Synthetic oligonucleotide
gagaauaaaauauugguca

SEQ ID NO: 48566 - RNA, 19 nt, Artificial Sequence
  Description of Artificial Sequence: Synthetic oligonucleotide
aaagaaacugguuacuuuu

SEQ ID NO: 48567 - RNA, 19 nt, Artificial Sequence
  Description of Artificial Sequence: Synthetic oligonucleotide
uuuauauauggucagguuu

SEQ ID NO: 48568 - RNA, 19 nt, Artificial Sequence
  Description of Artificial Sequence: Synthetic oligonucleotide
uuauauacugauaagaccu

SEQ ID NO: 48569 - RNA, 19 nt, Artificial Sequence
  Description of Artificial Sequence: Synthetic oligonucleotide
uacgccaugggacaucuaa

SEQ ID NO: 48570 - RNA, 19 nt, Artificial Sequence
  Description of Artificial Sequence: Synthetic oligonucleotide
auucagaggaagaaggucc

SEQ ID NO: 48571 - RNA, 19 nt, Artificial Sequence
  Description of Artificial Sequence: Synthetic oligonucleotide
caugucuuuggggaugaau

SEQ ID NO: 48572 - RNA, 19 nt, Artificial Sequence
  Description of Artificial Sequence: Synthetic oligonucleotide
uugagucuggugacuuugu

SEQ ID NO: 48573 - RNA, 19 nt, Artificial Sequence
  Description of Artificial Sequence: Synthetic oligonucleotide
uuucgauguauucaaaaua

SEQ ID NO: 48574 - RNA, 19 nt, Artificial Sequence
  Description of Artificial Sequence: Synthetic oligonucleotide
augccugaaacacuaccca

SEQ ID NO: 48575 - RNA, 19 nt, Artificial Sequence
  Description of Artificial Sequence: Synthetic oligonucleotide
aauaauuccugcuauucag

SEQ ID NO: 48576 - RNA, 19 nt, Artificial Sequence
  Description of Artificial Sequence: Synthetic oligonucleotide
gcuggcauugcaaaacugg

SEQ ID NO: 48577 - RNA, 19 nt, Artificial Sequence
  Description of Artificial Sequence: Synthetic oligonucleotide
gaagaaggagaugaacucc

SEQ ID NO: 48578 - RNA, 19 nt, Artificial Sequence
  Description of Artificial Sequence: Synthetic oligonucleotide
caacuugcaauaccaagag

SEQ ID NO: 48579 - RNA, 19 nt, Artificial Sequence
  Description of Artificial Sequence: Synthetic oligonucleotide
gaaaaugcacaaauaucac

SEQ ID NO: 48580 - RNA, 19 nt, Artificial Sequence
  Description of Artificial Sequence: Synthetic oligonucleotide
cuggauggagaugucacau

SEQ ID NO: 48581 - RNA, 19 nt, Artificial Sequence
  Description of Artificial Sequence: Synthetic oligonucleotide
uuuuuuggugcauugaaac

SEQ ID NO: 48582 - RNA, 19 nt, Artificial Sequence
  Description of Artificial Sequence: Synthetic oligonucleotide
cugcugugaccuacuuaca

SEQ ID NO: 48583 - RNA, 19 nt, Artificial Sequence
  Description of Artificial Sequence: Synthetic oligonucleotide
accaugucuguagcuauuu

SEQ ID NO: 48584 - RNA, 19 nt, Artificial Sequence
  Description of Artificial Sequence: Synthetic oligonucleotide
uuccucccuuucucuguac

SEQ ID NO: 48585 - RNA, 19 nt, Artificial Sequence
  Description of Artificial Sequence: Synthetic oligonucleotide
ccucuaagaagaaagaauc

SEQ ID NO: 48586 - RNA, 19 nt, Artificial Sequence
  Description of Artificial Sequence: Synthetic oligonucleotide
aaucuaacugaaaauacca

SEQ ID NO: 48587 - RNA, 25 nt, Artificial Sequence
  Description of Artificial Sequence: Synthetic oligonucleotide
gaaauucuuacaaaaacugaaagug

SEQ ID NO: 48588 - RNA, 25 nt, Artificial Sequence
  Description of Artificial Sequence: Synthetic oligonucleotide
gaaaugaggaagacagauugagcaa

SEQ ID NO: 48589 - RNA, 25 nt, Artificial Sequence
  Description of Artificial Sequence: Synthetic oligonucleotide
auccaaucggaggguaaaugccagc

SEQ ID NO: 48590 - RNA, 25 nt, Artificial Sequence
  Description of Artificial Sequence: Synthetic oligonucleotide
caaaccuacuguacaguagggguag

SEQ ID NO: 48591 - RNA, 25 nt, Artificial Sequence
  Description of Artificial Sequence: Synthetic oligonucleotide
gagaugcagaaaggcagaaaggaga

SEQ ID NO: 48592 - RNA, 25 nt, Artificial Sequence
  Description of Artificial Sequence: Synthetic oligonucleotide
aaaauucaggauaacucuccugagg

SEQ ID NO: 48593 - RNA, 25 nt, Artificial Sequence
  Description of Artificial Sequence: Synthetic oligonucleotide
gggugagccaagcccugccauguag

SEQ ID NO: 48594 - RNA, 25 nt, Artificial Sequence
  Description of Artificial Sequence: Synthetic oligonucleotide
gugcacgcaggacaucaacaaacac

SEQ ID NO: 48595 - RNA, 25 nt, Artificial Sequence
  Description of Artificial Sequence: Synthetic oligonucleotide
cagauaacaggaaaugauccauucc

SEQ ID NO: 48596 - RNA, 25 nt, Artificial Sequence
  Description of Artificial Sequence: Synthetic oligonucleotide
ccuguggucacuuauucuaaaggcc

SEQ ID NO: 48597 - RNA, 25 nt, Artificial Sequence
  Description of Artificial Sequence: Synthetic oligonucleotide
cccaaccuucaaaguucaaguagug

SEQ ID NO: 48598 - RNA, 25 nt, Artificial Sequence
  Description of Artificial Sequence: Synthetic oligonucleotide
gauauggaugacuccacagaaaggg

SEQ ID NO: 48599 - RNA, 25 nt, Artificial Sequence
  Description of Artificial Sequence: Synthetic oligonucleotide
gagcagucacgccuuacuucuugcc

SEQ ID NO: 48600 - RNA, 25 nt, Artificial Sequence
  Description of Artificial Sequence: Synthetic oligonucleotide
ccacggaaggaaagccccucugucc

SEQ ID NO: 48601 - RNA, 25 nt, Artificial Sequence
  Description of Artificial Sequence: Synthetic oligonucleotide
cgauccuccaaagacggaaagcugc

SEQ ID NO: 48602 - RNA, 25 nt, Artificial Sequence
  Description of Artificial Sequence: Synthetic oligonucleotide
cuggcugcaaccuugcugcuggcac

SEQ ID NO: 48603 - RNA, 25 nt, Artificial Sequence
  Description of Artificial Sequence: Synthetic oligonucleotide
cugcugucuugcugccucacggugg

SEQ ID NO: 48604 - RNA, 25 nt, Artificial Sequence
  Description of Artificial Sequence: Synthetic oligonucleotide
gugucuuucuaccagguggccgccc

SEQ ID NO: 48605 - RNA, 25 nt, Artificial Sequence
  Description of Artificial Sequence: Synthetic oligonucleotide
cugcaaggggaccuggccagccucc

SEQ ID NO: 48606 - RNA, 25 nt, Artificial Sequence
  Description of Artificial Sequence: Synthetic oligonucleotide
cgggcagagcugcagggccaccacg

SEQ ID NO: 48607 - RNA, 25 nt, Artificial Sequence
  Description of Artificial Sequence: Synthetic oligonucleotide
gcggagaagcugccagcaggagcag

SEQ ID NO: 48608 - RNA, 25 nt, Artificial Sequence
  Description of Artificial Sequence: Synthetic oligonucleotide
ggagcccccaaggccggccuggagg

SEQ ID NO: 48609 - RNA, 25 nt, Artificial Sequence
  Description of Artificial Sequence: Synthetic oligonucleotide
gaagcuccagcugucaccgcgggac

SEQ ID NO: 48610 - RNA, 25 nt, Artificial Sequence
  Description of Artificial Sequence: Synthetic oligonucleotide
cugaaaaucuuugaaccaccagcuc

SEQ ID NO: 48611 - RNA, 25 nt, Artificial Sequence
  Description of Artificial Sequence: Synthetic oligonucleotide
ccaggagaaggcaacuccagucaga

SEQ ID NO: 48612 - RNA, 25 nt, Artificial Sequence
  Description of Artificial Sequence: Synthetic oligonucleotide
aacagcagaaauaagcgugccguuc

SEQ ID NO: 48613 - RNA, 25 nt, Artificial Sequence
  Description of Artificial Sequence: Synthetic oligonucleotide
caggguccagaagaaacagucacuc

SEQ ID NO: 48614 - RNA, 25 nt, Artificial Sequence
  Description of Artificial Sequence: Synthetic oligonucleotide
caagacugcuugcaacugauugcag

SEQ ID NO: 48615 - RNA, 25 nt, Artificial Sequence
  Description of Artificial Sequence: Synthetic oligonucleotide
gacagugaaacaccaacuauacaaa

SEQ ID NO: 48616 - RNA, 25 nt, Artificial Sequence
  Description of Artificial Sequence: Synthetic oligonucleotide
aaaggaucuuacacauuuguuccau

SEQ ID NO: 48617 - RNA, 25 nt, Artificial Sequence
  Description of Artificial Sequence: Synthetic oligonucleotide
uggcuucucagcuuuaaaaggggaa

SEQ ID NO: 48618 - RNA, 25 nt, Artificial Sequence
  Description of Artificial Sequence: Synthetic oligonucleotide
agugcccuagaagaaaaagagaaua

SEQ ID NO: 48619 - RNA, 25 nt, Artificial Sequence
  Description of Artificial Sequence: Synthetic oligonucleotide
aaaauauuggucaaagaaacugguu

SEQ ID NO: 48620 - RNA, 25 nt, Artificial Sequence
  Description of Artificial Sequence: Synthetic oligonucleotide
uacuuuuuuauauauggucagguuu

SEQ ID NO: 48621 - RNA, 25 nt, Artificial Sequence
  Description of Artificial Sequence: Synthetic oligonucleotide
uuauauacugauaagaccuacgcca

SEQ ID NO: 48622 - RNA, 25 nt, Artificial Sequence
  Description of Artificial Sequence: Synthetic oligonucleotide
augggacaucuaauucagaggaaga

SEQ ID NO: 48623 - RNA, 25 nt, Artificial Sequence
  Description of Artificial Sequence: Synthetic oligonucleotide
aagguccaugucuuuggggaugaau

SEQ ID NO: 48624 - RNA, 25 nt, Artificial Sequence
  Description of Artificial Sequence: Synthetic oligonucleotide
uugagucuggugacuuuguuucgau

SEQ ID NO: 48625 - RNA, 25 nt, Artificial Sequence
  Description of Artificial Sequence: Synthetic oligonucleotide
cuacccaauaauuccugcuauucag

SEQ ID NO: 48626 - RNA, 25 nt, Artificial Sequence
  Description of Artificial Sequence: Synthetic oligonucleotide
gcuggcauugcaaaacuggaagaag

SEQ ID NO: 48627 - RNA, 25 nt, Artificial Sequence
  Description of Artificial Sequence: Synthetic oligonucleotide
ggagaugaacuccaacuugcaauac

SEQ ID NO: 48628 - RNA, 25 nt, Artificial Sequence
  Description of Artificial Sequence: Synthetic oligonucleotide
ccaagagaaaaugcacaaauaucac

SEQ ID NO: 48629 - RNA, 25 nt, Artificial Sequence
  Description of Artificial Sequence: Synthetic oligonucleotide
cuggauggagaugucacauuuuuug

SEQ ID NO: 48630 - RNA, 25 nt, Artificial Sequence
  Description of Artificial Sequence: Synthetic oligonucleotide
ggugcauugaaacugcugugaccua

SEQ ID NO: 48631 - RNA, 25 nt, Artificial Sequence
  Description of Artificial Sequence: Synthetic oligonucleotide
acuuacaccaugucuguagcuauuu

SEQ ID NO: 48632 - RNA, 25 nt, Artificial Sequence
  Description of Artificial Sequence: Synthetic oligonucleotide
uuccucccuuucucuguaccucuaa

SEQ ID NO: 48633 - RNA, 25 nt, Artificial Sequence
  Description of Artificial Sequence: Synthetic oligonucleotide
agaagaaagaaucuaacugaaaaua

SEQ ID NO: 48634 - RNA, 25 nt, Artificial Sequence
  Description of Artificial Sequence: Synthetic oligonucleotide
agaaagaaucuaacugaaaauacca

SEQ ID NO: 48635 - DNA, 21 bp, Artificial Sequence
  Description of Artificial Sequence: Synthetic oligonucleotide
  Description of Combined DNA/RNA Molecule: Synthetic oligonucleotide
cuacacaaaucagcgauuutt

SEQ ID NO: 48636 - DNA, 21 bp, Artificial Sequence
  Description of Artificial Sequence: Synthetic oligonucleotide
  Description of Combined DNA/RNA Molecule: Synthetic oligonucleotide
aaaucgcugauuuguguagtt

SEQ ID NO: 48637 - DNA, 25 bp, Artificial Sequence
  Description of Artificial Sequence: Synthetic oligonucleotide
  Description of Combined DNA/RNA Molecule: Synthetic oligonucleotide
cuacacaaaucagcgauuuccaugt

SEQ ID NO: 48638 - RNA, 27 nt, Artificial Sequence
  Description of Artificial Sequence: Synthetic oligonucleotide
acauggaaaucgcugauuuguguaguc

SEQ ID NO: 48639 - RNA, 13 nt, Artificial Sequence
  Description of Artificial Sequence: Synthetic oligonucleotide
cuacacaaaucag

SEQ ID NO: 48640 - DNA, 11 bp, Artificial Sequence
  Description of Artificial Sequence: Synthetic oligonucleotide
  Description of Combined DNA/RNA Molecule: Synthetic oligonucleotide
gauuuccaugt

SEQ ID NO: 48641 - DNA, 21 bp, Artificial Sequence
  Description of Artificial Sequence: Synthetic oligonucleotide
  Description of Combined DNA/RNA Molecule: Synthetic oligonucleotide
ggaucuuauuucuucggagtt

SEQ ID NO: 48642 - DNA, 21 bp, Artificial Sequence
  Description of Artificial Sequence: Synthetic oligonucleotide
  Description of Combined DNA/RNA Molecule: Synthetic oligonucleotide
cuccgaagaaauaagaucctt

SEQ ID NO: 48643 - RNA, 11 nt, Artificial Sequence
  Description of Artificial Sequence: Synthetic oligonucleotide
ggaucuuauuu

SEQ ID NO: 48644 - DNA, 10 bp, Artificial Sequence
  Description of Artificial Sequence: Synthetic oligonucleotide
  Description of Combined DNA/RNA Molecule: Synthetic oligonucleotide
cuucggagtt

SEQ ID NO: 48645 - RNA, 27 nt, Artificial Sequence
  Description of Artificial Sequence: Synthetic oligonucleotide
cauugucuccgaagaaauaagauccuu

SEQ ID NO: 48646 - RNA, 8 nt, Artificial Sequence
  Description of Artificial Sequence: Synthetic oligonucleotide
  modified_base (2): LNA-G
ggaucuua

SEQ ID NO: 48647 - DNA, 17 bp, Artificial Sequence
  Description of Artificial Sequence: Synthetic oligonucleotide
  Description of Combined DNA/RNA Molecule: Synthetic oligonucleotide
uuucuucggagacaatg

SEQ ID NO: 48648 - DNA, 16 bp, Artificial Sequence
  Description of Artificial Sequence: Synthetic oligonucleotide
  Description of Combined DNA/RNA Molecule: Synthetic oligonucleotide
uucuucggagacaatg

SEQ ID NO: 48649 - DNA, 15 bp, Artificial Sequence
  Description of Artificial Sequence: Synthetic oligonucleotide
  Description of Combined DNA/RNA Molecule: Synthetic oligonucleotide
ucuucggagacaatg

SEQ ID NO: 48650 - DNA, 14 bp, Artificial Sequence
  Description of Artificial Sequence: Synthetic oligonucleotide
  Description of Combined DNA/RNA Molecule: Synthetic oligonucleotide
cuucggagacaatg

SEQ ID NO: 48651 - DNA, 13 bp, Artificial Sequence
  Description of Artificial Sequence: Synthetic oligonucleotide
  Description of Combined DNA/RNA Molecule: Synthetic oligonucleotide
uucggagacaatg

SEQ ID NO: 48652 - DNA, 12 bp, Artificial Sequence
  Description of Artificial Sequence: Synthetic oligonucleotide
  Description of Combined DNA/RNA Molecule: Synthetic oligonucleotide
ucggagacaatg

SEQ ID NO: 48653 - DNA, 11 bp, Artificial Sequence
  Description of Artificial Sequence: Synthetic oligonucleotide
  Description of Combined DNA/RNA Molecule: Synthetic oligonucleotide
cggagacaatg

SEQ ID NO: 48654 - RNA, 9 nt, Artificial Sequence
  Description of Artificial Sequence: Synthetic oligonucleotide
  modified_base (2): LNA-G
ggaucuuau

SEQ ID NO: 48655 - RNA, 10 nt, Artificial Sequence
  Description of Artificial Sequence: Synthetic oligonucleotide
  modified_base (2): LNA-G
ggaucuuauu

SEQ ID NO: 48656 - RNA, 11 nt, Artificial Sequence
  Description of Artificial Sequence: Synthetic oligonucleotide
  modified_base (2): LNA-G
ggaucuuauuu

SEQ ID NO: 48657 - RNA, 12 nt, Artificial Sequence
  Description of Artificial Sequence: Synthetic oligonucleotide
  modified_base (2): LNA-G
ggaucuuauuuc

SEQ ID NO: 48658 - RNA, 8 nt, Artificial Sequence
  Description of Artificial Sequence: Synthetic oligonucleotide
  modified_base (3): LNA-A
cuacacaa

SEQ ID NO: 48659 - DNA, 13 bp, Artificial Sequence
  Description of Artificial Sequence: Synthetic oligonucleotide
  Description of Combined DNA/RNA Molecule: Synthetic oligonucleotide
  modified_base (8): LNA-A
aucagcgauuutt

SEQ ID NO: 48660 - DNA, 12 bp, Artificial Sequence
  Description of Artificial Sequence: Synthetic oligonucleotide
  Description of Combined DNA/RNA Molecule: Synthetic oligonucleotide
  modified_base (7): LNA-A
ucagcgauuutt

SEQ ID NO: 48661 - DNA, 11 bp, Artificial Sequence
  Description of Artificial Sequence: Synthetic oligonucleotide
  Description of Combined DNA/RNA Molecule: Synthetic oligonucleotide
  modified_base (6): LNA-A
cagcgauuutt

SEQ ID NO: 48662 - DNA, 10 bp, Artificial Sequence
  Description of Artificial Sequence: Synthetic oligonucleotide
  Description of Combined DNA/RNA Molecule: Synthetic oligonucleotide
  modified_base (5): LNA-A
agcgauuutt

SEQ ID NO: 48663 - DNA, 9 bp, Artificial Sequence
  Description of Artificial Sequence: Synthetic oligonucleotide
  Description of Combined DNA/RNA Molecule: Synthetic oligonucleotide
  modified_base (4): LNA-A
gcgauuutt

SEQ ID NO: 48664 - DNA, 8 bp, Artificial Sequence
  Description of Artificial Sequence: Synthetic oligonucleotide
  Description of Combined DNA/RNA Molecule: Synthetic oligonucleotide
  modified_base (3): LNA-A
cgauuutt

SEQ ID NO: 48665 - DNA, 7 bp, Artificial Sequence
  Description of Artificial Sequence: Synthetic oligonucleotide
  Description of Combined DNA/RNA Molecule: Synthetic oligonucleotide
  modified_base (2): LNA-A
gauuutt

SEQ ID NO: 48666 - RNA, 9 nt, Artificial Sequence
  Description of Artificial Sequence: Synthetic oligonucleotide
  modified_base (3): LNA-A
cuacacaaa

SEQ ID NO: 48667 - RNA, 10 nt, Artificial Sequence
  Description of Artificial Sequence: Synthetic oligonucleotide
  modified_base (3): LNA-A
cuacacaaau

SEQ ID NO: 48668 - RNA, 11 nt, Artificial Sequence
  Description of Artificial Sequence: Synthetic oligonucleotide
  modified_base (3): LNA-A
cuacacaaauc

SEQ ID NO: 48669 - RNA, 12 nt, Artificial Sequence
  Description of Artificial Sequence: Synthetic oligonucleotide
  modified_base (3): LNA-A
cuacacaaauca

SEQ ID NO: 48670 - RNA, 13 nt, Artificial Sequence
  Description of Artificial Sequence: Synthetic oligonucleotide
  modified_base (3): LNA-A
cuacacaaaucag

SEQ ID NO: 48671 - RNA, 14 nt, Artificial Sequence
  Description of Artificial Sequence: Synthetic oligonucleotide
  modified_base (3): LNA-A
cuacacaaaucagc

SEQ ID NO: 48672 - RNA, 13 nt, Artificial Sequence
  Description of Artificial Sequence: Synthetic oligonucleotide
  modified_base (2): LNA-G
ggaucuuauuucu

SEQ ID NO: 48673 - RNA, 14 nt, Artificial Sequence
  Description of Artificial Sequence: Synthetic oligonucleotide
  modified_base (2): LNA-G
ggaucuuauuucuu

SEQ ID NO: 48674 - RNA, 8 nt, Artificial Sequence
  Description of Artificial Sequence: Synthetic oligonucleotide
  modified_base (2): LNA-G
  modified_base (8): LNA-A
ggaucuua

SEQ ID NO: 48675 - RNA, 9 nt, Artificial Sequence
  Description of Artificial Sequence: Synthetic oligonucleotide
  modified_base (2): LNA-G
  modified_base (9): LNA-U
ggaucuuau

SEQ ID NO: 48676 - RNA, 10 nt, Artificial Sequence
  Description of Artificial Sequence: Synthetic oligonucleotide
  modified_base (2): LNA-G
  modified_base (10): LNA-U
ggaucuuauu

SEQ ID NO: 48677 - RNA, 11 nt, Artificial Sequence
  Description of Artificial Sequence: Synthetic oligonucleotide
  modified_base (2): LNA-G
  modified_base (11): LNA-U
ggaucuuauuu

SEQ ID NO: 48678 - RNA, 12 nt, Artificial Sequence
  Description of Artificial Sequence: Synthetic oligonucleotide
  modified_base (2): LNA-G
  modified_base (12): LNA-C
ggaucuuauuuc

SEQ ID NO: 48679 - RNA, 13 nt, Artificial Sequence
  Description of Artificial Sequence: Synthetic oligonucleotide
  modified_base (2): LNA-G
  modified_base (13): LNA-U
ggaucuuauuucu

SEQ ID NO: 48680 - RNA, 14 nt, Artificial Sequence
  Description of Artificial Sequence: Synthetic oligonucleotide
  modified_base (2): LNA-G
  modified_base (14): LNA-U
ggaucuuauuucuu

SEQ ID NO: 48681 - DNA, 13 bp, Artificial Sequence
  Description of Artificial Sequence: Synthetic oligonucleotide
  Description of Combined DNA/RNA Molecule: Synthetic oligonucleotide
  modified_base (8): LNA-G
uuucuucggagtt

SEQ ID NO: 48682 - DNA, 12 bp, Artificial Sequence
  Description of Artificial Sequence: Synthetic oligonucleotide
  Description of Combined DNA/RNA Molecule: Synthetic oligonucleotide
  modified_base (7): LNA-G
uucuucggagtt

SEQ ID NO: 48683 - DNA, 11 bp, Artificial Sequence
  Description of Artificial Sequence: Synthetic oligonucleotide
  Description of Combined DNA/RNA Molecule: Synthetic oligonucleotide
  modified_base (6): LNA-G
ucuucggagtt

SEQ ID NO: 48684 - DNA, 10 bp, Artificial Sequence
  Description of Artificial Sequence: Synthetic oligonucleotide
  Description of Combined DNA/RNA Molecule: Synthetic oligonucleotide
  modified_base (5): LNA-G
cuucggagtt

SEQ ID NO: 48685 - DNA, 9 bp, Artificial Sequence
  Description of Artificial Sequence: Synthetic oligonucleotide
  Description of Combined DNA/RNA Molecule: Synthetic oligonucleotide
  modified_base (4): LNA-G
uucggagtt

SEQ ID NO: 48686 - DNA, 8 bp, Artificial Sequence
  Description of Artificial Sequence: Synthetic oligonucleotide
  Description of Combined DNA/RNA Molecule: Synthetic oligonucleotide
  modified_base (3): LNA-G
ucggagtt

SEQ ID NO: 48687 - DNA, 7 bp, Artificial Sequence
  Description of Artificial Sequence: Synthetic oligonucleotide
  Description of Combined DNA/RNA Molecule: Synthetic oligonucleotide
  modified_base (2): LNA-G
cggagtt

SEQ ID NO: 48688 - DNA, 13 bp, Artificial Sequence
  Description of Artificial Sequence: Synthetic oligonucleotide
  Description of Combined DNA/RNA Molecule: Synthetic oligonucleotide
  modified_base (1): LNA-U
  modified_base (8): LNA-G
uuucuucggagtt

SEQ ID NO: 48689 - DNA, 12 bp, Artificial Sequence
  Description of Artificial Sequence: Synthetic oligonucleotide
  Description of Combined DNA/RNA Molecule: Synthetic oligonucleotide
  modified_base (1): LNA-U
  modified_base (7): LNA-G
uucuucggagtt

SEQ ID NO: 48690 - DNA, 11 bp, Artificial Sequence
  Description of Artificial Sequence: Synthetic oligonucleotide
  Description of Combined DNA/RNA Molecule: Synthetic oligonucleotide
  modified_base (1): LNA-U
  modified_base (6): LNA-G
ucuucggagtt

SEQ ID NO: 48691 - DNA, 10 bp, Artificial Sequence
  Description of Artificial Sequence: Synthetic oligonucleotide
  Description of Combined DNA/RNA Molecule: Synthetic oligonucleotide
  modified_base (1): LNA-C
  modified_base (5): LNA-G
cuucggagtt

SEQ ID NO: 48692 - DNA, 9 bp, Artificial Sequence
  Description of Artificial Sequence: Synthetic oligonucleotide
  Description of Combined DNA/RNA Molecule: Synthetic oligonucleotide
  modified_base (1): LNA-U
  modified_base (4): LNA-G
uucggagtt

SEQ ID NO: 48693 - DNA, 8 bp, Artificial Sequence
  Description of Artificial Sequence: Synthetic oligonucleotide
  Description of Combined DNA/RNA Molecule: Synthetic oligonucleotide
  modified_base (1): LNA-U
  modified_base (3): LNA-G
ucggagtt

SEQ ID NO: 48694 - DNA, 7 bp, Artificial Sequence
  Description of Artificial Sequence: Synthetic oligonucleotide
  Description of Combined DNA/RNA Molecule: Synthetic oligonucleotide
  modified_base (1): LNA-C
  modified_base (2): LNA-G
cggagtt

SEQ ID NO: 48695 - DNA, 21 bp, Artificial Sequence
  Description of Artificial Sequence: Synthetic oligonucleotide
  Description of Combined DNA/RNA Molecule: Synthetic oligonucleotide
  modified_base (2): LNA-G
  modified_base (16): LNA-G
ggaucuuauuucuucggagtt

SEQ ID NO: 48696 - DNA, 25 bp, Artificial Sequence
  Description of Artificial Sequence: Synthetic oligonucleotide
  Description of Combined DNA/RNA Molecule: Synthetic oligonucleotide
ggaucuuauuucuucggagacaatg

SEQ ID NO: 48697 - RNA, 25 nt, Artificial Sequence
  Description of Artificial Sequence: Synthetic oligonucleotide
uuaagcagaguucaaaagcccuuca

SEQ ID NO: 48698 - RNA, 25 nt, Artificial Sequence
  Description of Artificial Sequence: Synthetic oligonucleotide
uaagcagaguucaaaagcccuucag

SEQ ID NO: 48699 - RNA, 25 nt, Artificial Sequence
  Description of Artificial Sequence: Synthetic oligonucleotide
agcagaguucaaaagcccuucagcg

SEQ ID NO: 48700 - RNA, 25 nt, Artificial Sequence
  Description of Artificial Sequence: Synthetic oligonucleotide
cucagggucugagugaagccgcucg

SEQ ID NO: 48701 - RNA, 25 nt, Artificial Sequence
  Description of Artificial Sequence: Synthetic oligonucleotide
caagcaacuacaucacgccagucaa

SEQ ID NO: 48702 - RNA, 25 nt, Artificial Sequence
  Description of Artificial Sequence: Synthetic oligonucleotide
aucaauggcagcuucuuggugcgug

SEQ ID NO: 48703 - RNA, 25 nt, Artificial Sequence
  Description of Artificial Sequence: Synthetic oligonucleotide
uuccagcccacauuggauucaucag

SEQ ID NO: 48704 - RNA, 25 nt, Artificial Sequence
  Description of Artificial Sequence: Synthetic oligonucleotide
cagcugagaauguggaauaccuaag

SEQ ID NO: 48705 - RNA, 25 nt, Artificial Sequence
  Description of Artificial Sequence: Synthetic oligonucleotide
aacguaucuccuaauuugaggcuca

SEQ ID NO: 48706 - RNA, 25 nt, Artificial Sequence
  Description of Artificial Sequence: Synthetic oligonucleotide
ccuaaaauaauuucucuacaauugg

SEQ ID NO: 48707 - RNA, 25 nt, Artificial Sequence
  Description of Artificial Sequence: Synthetic oligonucleotide
uggaagauucagcuaguuaggagcc

SEQ ID NO: 48708 - RNA, 25 nt, Artificial Sequence
  Description of Artificial Sequence: Synthetic oligonucleotide
uuaaacucuccuagucaauauccac

SEQ ID NO: 48709 - RNA, 25 nt, Artificial Sequence
  Description of Artificial Sequence: Synthetic oligonucleotide
cagccuacaguuauguucagucaca

SEQ ID NO: 48710 - RNA, 25 nt, Artificial Sequence
  Description of Artificial Sequence: Synthetic oligonucleotide
guuauguucagucacacacacauac

SEQ ID NO: 48711 - RNA, 25 nt, Artificial Sequence
  Description of Artificial Sequence: Synthetic oligonucleotide
cacauacaaaauguuccuuuugcuu

SEQ ID NO: 48712 - RNA, 25 nt, Artificial Sequence
  Description of Artificial Sequence: Synthetic oligonucleotide
uccuuuugcuuuuaaaguaauuuuu

SEQ ID NO: 48713 - RNA, 25 nt, Artificial Sequence
  Description of Artificial Sequence: Synthetic oligonucleotide
ugaccugugaagcaacagucaaugg

SEQ ID NO: 48714 - RNA, 25 nt, Artificial Sequence
  Description of Artificial Sequence: Synthetic oligonucleotide
cuaucucacacaucgacaaaccaau

SEQ ID NO: 48715 - RNA, 25 nt, Artificial Sequence
  Description of Artificial Sequence: Synthetic oligonucleotide
uguccucaauuguacugcuaccacu

SEQ ID NO: 48716 - RNA, 25 nt, Artificial Sequence
  Description of Artificial Sequence: Synthetic oligonucleotide
aaaccguagcuggcaagcggucuua

SEQ ID NO: 48717 - RNA, 25 nt, Artificial Sequence
  Description of Artificial Sequence: Synthetic oligonucleotide
uagcuggcaagcggucuuaccggcu

SEQ ID NO: 48718 - RNA, 25 nt, Artificial Sequence
  Description of Artificial Sequence: Synthetic oligonucleotide
uuguaugguuaaaagauggguuacc

SEQ ID NO: 48719 - RNA, 25 nt, Artificial Sequence
  Description of Artificial Sequence: Synthetic oligonucleotide
ugguuaaaagauggguuaccugcga

SEQ ID NO: 48720 - RNA, 25 nt, Artificial Sequence
  Description of Artificial Sequence: Synthetic oligonucleotide
cagggaauuauacaaucuugcugag

SEQ ID NO: 48721 - RNA, 25 nt, Artificial Sequence
  Description of Artificial Sequence: Synthetic oligonucleotide
acaaucuugcugagcauaaaacagu

SEQ ID NO: 48722 - RNA, 25 nt, Artificial Sequence
  Description of Artificial Sequence: Synthetic oligonucleotide
ccaauaaugaagaguccuuuauccu

SEQ ID NO: 48723 - RNA, 25 nt, Artificial Sequence
  Description of Artificial Sequence: Synthetic oligonucleotide
acuuuggauguuccaacgcaaguug

SEQ ID NO: 48724 - RNA, 25 nt, Artificial Sequence
  Description of Artificial Sequence: Synthetic oligonucleotide
aaugcuuccacuaaacugaaaccau

SEQ ID NO: 48725 - RNA, 25 nt, Artificial Sequence
  Description of Artificial Sequence: Synthetic oligonucleotide
gagaaaguuugacuuuguuaaauau

SEQ ID NO: 48726 - RNA, 25 nt, Artificial Sequence
  Description of Artificial Sequence: Synthetic oligonucleotide
aaagaacuacuguauauuaaaaguu

SEQ ID NO: 48727 - RNA, 25 nt, Artificial Sequence
  Description of Artificial Sequence: Synthetic oligonucleotide
uuagaaauacggguuuugacuuaac

SEQ ID NO: 48728 - RNA, 25 nt, Artificial Sequence
  Description of Artificial Sequence: Synthetic oligonucleotide
aacauggguacagcaaacucagcac

SEQ ID NO: 48729 - RNA, 25 nt, Artificial Sequence
  Description of Artificial Sequence: Synthetic oligonucleotide
aaagacacagaagaugcugaccuca

SEQ ID NO: 48730 - RNA, 25 nt, Artificial Sequence
  Description of Artificial Sequence: Synthetic oligonucleotide
uaguagggagguuuauucagaucgc

SEQ ID NO: 48731 - RNA, 25 nt, Artificial Sequence
  Description of Artificial Sequence: Synthetic oligonucleotide
gccuucugcagcaggguucugggau

SEQ ID NO: 48732 - RNA, 25 nt, Artificial Sequence
  Description of Artificial Sequence: Synthetic oligonucleotide
ggucugguacauauuggaaauuaug

SEQ ID NO: 48733 - RNA, 25 nt, Artificial Sequence
  Description of Artificial Sequence: Synthetic oligonucleotide
cuaguccuuccgauggaagcacuag

SEQ ID NO: 48734 - RNA, 25 nt, Artificial Sequence
  Description of Artificial Sequence: Synthetic oligonucleotide
ccagugaauauuguuuuuaugugga

SEQ ID NO: 48735 - RNA, 25 nt, Artificial Sequence
  Description of Artificial Sequence: Synthetic oligonucleotide
augaauucaaguuggaauugguaga

SEQ ID NO: 48736 - RNA, 25 nt, Artificial Sequence
  Description of Artificial Sequence: Synthetic oligonucleotide
caggacacagauuuagacuuggaga

SEQ ID NO: 48737 - RNA, 25 nt, Artificial Sequence
  Description of Artificial Sequence: Synthetic oligonucleotide
cucaaagcacaguuacaguauucca

SEQ ID NO: 48738 - RNA, 25 nt, Artificial Sequence
  Description of Artificial Sequence: Synthetic oligonucleotide
accacugccaccacugaugaauuaa

SEQ ID NO: 48739 - RNA, 25 nt, Artificial Sequence
  Description of Artificial Sequence: Synthetic oligonucleotide
gaaacuacuagugccacaucaucac

SEQ ID NO: 48740 - RNA, 25 nt, Artificial Sequence
  Description of Artificial Sequence: Synthetic oligonucleotide
aagucggacagccucaccaaacaga

SEQ ID NO: 48741 - RNA, 25 nt, Artificial Sequence
  Description of Artificial Sequence: Synthetic oligonucleotide
gaaagcgaaaaauggaacaugaugg

SEQ ID NO: 48742 - RNA, 25 nt, Artificial Sequence
  Description of Artificial Sequence: Synthetic oligonucleotide
cccucugauuuagcauguagacugc

SEQ ID NO: 48743 - RNA, 25 nt, Artificial Sequence
  Description of Artificial Sequence: Synthetic oligonucleotide
ugagcuauuuaaggaucuauuuaug

SEQ ID NO: 48744 - RNA, 25 nt, Artificial Sequence
  Description of Artificial Sequence: Synthetic oligonucleotide
aaaaggugaaaaagcacuauuauca

SEQ ID NO: 48745 - RNA, 25 nt, Artificial Sequence
  Description of Artificial Sequence: Synthetic oligonucleotide
gaaaaagcacuauuaucaguucugc

SEQ ID NO: 48746 - RNA, 25 nt, Artificial Sequence
  Description of Artificial Sequence: Synthetic oligonucleotide
ggcugaaaagaaagauuaaaccuac

SEQ ID NO: 48747 - RNA, 25 nt, Artificial Sequence
  Description of Artificial Sequence: Synthetic oligonucleotide
uaaacccuuauaauaaaauccuucu

SEQ ID NO: 48748 - RNA, 25 nt, Artificial Sequence
  Description of Artificial Sequence: Synthetic oligonucleotide
cauacuauuagccaaugcuguagac

SEQ ID NO: 48749 - RNA, 25 nt, Artificial Sequence
  Description of Artificial Sequence: Synthetic oligonucleotide
gacagaagcauuuugauaggaauag

SEQ ID NO: 48750 - RNA, 25 nt, Artificial Sequence
  Description of Artificial Sequence: Synthetic oligonucleotide
agagcaaauaagauaauggcccuga

SEQ ID NO: 48751 - RNA, 25 nt, Artificial Sequence
  Description of Artificial Sequence: Synthetic oligonucleotide
ccaacauuuuucucuuccucaagca

SEQ ID NO: 48752 - RNA, 25 nt, Artificial Sequence
  Description of Artificial Sequence: Synthetic oligonucleotide
uuaaguaugagaaaaguucagccca

SEQ ID NO: 48753 - RNA, 25 nt, Artificial Sequence
  Description of Artificial Sequence: Synthetic oligonucleotide
caggaauaaagauggcugcugaacc

SEQ ID NO: 48754 - RNA, 25 nt, Artificial Sequence
  Description of Artificial Sequence: Synthetic oligonucleotide
aauuugaaugaccaaguucucuuca

SEQ ID NO: 48755 - RNA, 25 nt, Artificial Sequence
  Description of Artificial Sequence: Synthetic oligonucleotide
auguauaaagauagccagccuagag

SEQ ID NO: 48756 - RNA, 25 nt, Artificial Sequence
  Description of Artificial Sequence: Synthetic oligonucleotide
ggcuguaacuaucucugugaagugu

SEQ ID NO: 48757 - RNA, 25 nt, Artificial Sequence
  Description of Artificial Sequence: Synthetic oligonucleotide
ucugugaagugugagaaaauuucaa

SEQ ID NO: 48758 - RNA, 25 nt, Artificial Sequence
  Description of Artificial Sequence: Synthetic oligonucleotide
ccuuuaaggaaaugaauccuccuga

SEQ ID NO: 48759 - RNA, 25 nt, Artificial Sequence
  Description of Artificial Sequence: Synthetic oligonucleotide
aaggauacaaaaagugacaucauau

SEQ ID NO: 48760 - RNA, 25 nt, Artificial Sequence
  Description of Artificial Sequence: Synthetic oligonucleotide
agaugcaauuugaaucuucaucaua

SEQ ID NO: 48761 - RNA, 25 nt, Artificial Sequence
  Description of Artificial Sequence: Synthetic oligonucleotide
guucaaaacgaagacuagcuauuaa

SEQ ID NO: 48762 - RNA, 25 nt, Artificial Sequence
  Description of Artificial Sequence: Synthetic oligonucleotide
gugaaaccucaucucuacuaaaaau

SEQ ID NO: 48763 - RNA, 25 nt, Artificial Sequence
  Description of Artificial Sequence: Synthetic oligonucleotide
acgaaagagaagcucuaucucgccu

SEQ ID NO: 48764 - RNA, 25 nt, Artificial Sequence
  Description of Artificial Sequence: Synthetic oligonucleotide
cuccacaagcgccuucgguccaguu

SEQ ID NO: 48765 - RNA, 25 nt, Artificial Sequence
  Description of Artificial Sequence: Synthetic oligonucleotide
gagaagauuccaaagauguagccgc

SEQ ID NO: 48766 - RNA, 25 nt, Artificial Sequence
  Description of Artificial Sequence: Synthetic oligonucleotide
aaucuggauucaaugaggagacuug

SEQ ID NO: 48767 - RNA, 25 nt, Artificial Sequence
  Description of Artificial Sequence: Synthetic oligonucleotide
agaacagauuugagaguagugagga

SEQ ID NO: 48768 - RNA, 25 nt, Artificial Sequence
  Description of Artificial Sequence: Synthetic oligonucleotide
ccagagcugugcagaugaguacaaa

SEQ ID NO: 48769 - RNA, 25 nt, Artificial Sequence
  Description of Artificial Sequence: Synthetic oligonucleotide
ccucagauuguuguuguuaaugggc

SEQ ID NO: 48770 - RNA, 25 nt, Artificial Sequence
  Description of Artificial Sequence: Synthetic oligonucleotide
cuauuuuaauuauuuuuaauuuauu

SEQ ID NO: 48771 - RNA, 25 nt, Artificial Sequence
  Description of Artificial Sequence: Synthetic oligonucleotide
uuuaauuuauuaauauuuaaauaug

SEQ ID NO: 48772 - RNA, 25 nt, Artificial Sequence
  Description of Artificial Sequence: Synthetic oligonucleotide
augcaguuugaauauccuuuguuuc

SEQ ID NO: 48773 - RNA, 25 nt, Artificial Sequence
  Description of Artificial Sequence: Synthetic oligonucleotide
caugcugcuggcgucuaaguguuug

SEQ ID NO: 48774 - RNA, 25 nt, Artificial Sequence
  Description of Artificial Sequence: Synthetic oligonucleotide
agaugugcauuucaccugugacaaa

SEQ ID NO: 48775 - RNA, 25 nt, Artificial Sequence
  Description of Artificial Sequence: Synthetic oligonucleotide
ucaaaaccugugccaggcugaauua

SEQ ID NO: 48776 - RNA, 25 nt, Artificial Sequence
  Description of Artificial Sequence: Synthetic oligonucleotide
gaauguggguagucauucuuacaau

SEQ ID NO: 48777 - RNA, 25 nt, Artificial Sequence
  Description of Artificial Sequence: Synthetic oligonucleotide
auguggguagucauucuuacaauug

SEQ ID NO: 48778 - RNA, 25 nt, Artificial Sequence
  Description of Artificial Sequence: Synthetic oligonucleotide
ugaaaaugagcaucagagaguguac

SEQ ID NO: 48779 - RNA, 25 nt, Artificial Sequence
  Description of Artificial Sequence: Synthetic oligonucleotide
uugcuuuucauguagaacucagcag

SEQ ID NO: 48780 - RNA, 25 nt, Artificial Sequence
  Description of Artificial Sequence: Synthetic oligonucleotide
uguauuucuauauuuauuuucagua

SEQ ID NO: 48781 - RNA, 25 nt, Artificial Sequence
  Description of Artificial Sequence: Synthetic oligonucleotide
uuugauuaauguuucuuaaauggaa

SEQ ID NO: 48782 - RNA, 25 nt, Artificial Sequence
  Description of Artificial Sequence: Synthetic oligonucleotide
caacguguauagugccuaaaauugu

SEQ ID NO: 48783 - RNA, 25 nt, Artificial Sequence
  Description of Artificial Sequence: Synthetic oligonucleotide
cauauccuuggcuacuaacaucugg

SEQ ID NO: 48784 - RNA, 25 nt, Artificial Sequence
  Description of Artificial Sequence: Synthetic oligonucleotide
uacuaacaucuggagacugugagcu

SEQ ID NO: 48785 - RNA, 25 nt, Artificial Sequence
  Description of Artificial Sequence: Synthetic oligonucleotide
cauaaguugugugcuuuuuauuaau

SEQ ID NO: 48786 - RNA, 25 nt, Artificial Sequence
  Description of Artificial Sequence: Synthetic oligonucleotide
gcaucauuuuggcucuucuuacauu

SEQ ID NO: 48787 - RNA, 25 nt, Artificial Sequence
  Description of Artificial Sequence: Synthetic oligonucleotide
gcucuucuuacauuuguaaaaaugu

SEQ ID NO: 48788 - RNA, 25 nt, Artificial Sequence
  Description of Artificial Sequence: Synthetic oligonucleotide
agauuaggucaucuuaauucauauu

SEQ ID NO: 48789 - RNA, 25 nt, Artificial Sequence
  Description of Artificial Sequence: Synthetic oligonucleotide
auggaauugaaagaacuaaucauga

SEQ ID NO: 48790 - RNA, 25 nt, Artificial Sequence
  Description of Artificial Sequence: Synthetic oligonucleotide
cacacucauuccuucugcucuuggg

SEQ ID NO: 48791 - RNA, 25 nt, Artificial Sequence
  Description of Artificial Sequence: Synthetic oligonucleotide
uguagagguaaccaguagcuuugag

SEQ ID NO: 48792 - RNA, 25 nt, Artificial Sequence
  Description of Artificial Sequence: Synthetic oligonucleotide
caaccacaugccacguaauauuuca

SEQ ID NO: 48793 - RNA, 25 nt, Artificial Sequence
  Description of Artificial Sequence: Synthetic oligonucleotide
ucggaaacaaguuauucucuucacu

SEQ ID NO: 48794 - RNA, 25 nt, Artificial Sequence
  Description of Artificial Sequence: Synthetic oligonucleotide
acucccaauaacuaaugcuaagaaa

SEQ ID NO: 48795 - RNA, 25 nt, Artificial Sequence
  Description of Artificial Sequence: Synthetic oligonucleotide
aaugcuaagaaaugcugaaaaucaa

SEQ ID NO: 48796 - RNA, 25 nt, Artificial Sequence
  Description of Artificial Sequence: Synthetic oligonucleotide
gucuuucucuaaauaugauuacuuu

SEQ ID NO: 48797 - RNA, 25 nt, Artificial Sequence
  Description of Artificial Sequence: Synthetic oligonucleotide
ugaauuucaggcauuuuguucuaca

SEQ ID NO: 48798 - RNA, 25 nt, Artificial Sequence
  Description of Artificial Sequence: Synthetic oligonucleotide
cgauucccucucacccgggacucuc

SEQ ID NO: 48799 - RNA, 25 nt, Artificial Sequence
  Description of Artificial Sequence: Synthetic oligonucleotide
aggaaagugaaccuuuaaaguaaag

SEQ ID NO: 48800 - RNA, 25 nt, Artificial Sequence
  Description of Artificial Sequence: Synthetic oligonucleotide
gaggcugcaugcucuggaagccugg

SEQ ID NO: 48801 - RNA, 25 nt, Artificial Sequence
  Description of Artificial Sequence: Synthetic oligonucleotide
ucucugaacagaaaacaaaagagag

SEQ ID NO: 48802 - RNA, 25 nt, Artificial Sequence
  Description of Artificial Sequence: Synthetic oligonucleotide
aacuuggcuguaaucaguuaugccg

SEQ ID NO: 48803 - RNA, 25 nt, Artificial Sequence
  Description of Artificial Sequence: Synthetic oligonucleotide
agaagccaaaauuaaaagaagucca

SEQ ID NO: 48804 - RNA, 25 nt, Artificial Sequence
  Description of Artificial Sequence: Synthetic oligonucleotide
auuaaaagaaguccaggugagguua

SEQ ID NO: 48805 - RNA, 25 nt, Artificial Sequence
  Description of Artificial Sequence: Synthetic oligonucleotide
gaauccggauuaucgggaagaggac

SEQ ID NO: 48806 - RNA, 25 nt, Artificial Sequence
  Description of Artificial Sequence: Synthetic oligonucleotide
aaugugacaucaaagcaaguauugu

SEQ ID NO: 48807 - RNA, 25 nt, Artificial Sequence
  Description of Artificial Sequence: Synthetic oligonucleotide
caucaaagcaaguauuguagcacuc

SEQ ID NO: 48808 - RNA, 25 nt, Artificial Sequence
  Description of Artificial Sequence: Synthetic oligonucleotide
agagagagaaaacaaaaccacaaau

SEQ ID NO: 48809 - RNA, 25 nt, Artificial Sequence
  Description of Artificial Sequence: Synthetic oligonucleotide
ucgcuguaguauuuaagcccauaca

SEQ ID NO: 48810 - RNA, 25 nt, Artificial Sequence
  Description of Artificial Sequence: Synthetic oligonucleotide
cgcuguaguauuuaagcccauacag

SEQ ID NO: 48811 - RNA, 25 nt, Artificial Sequence
  Description of Artificial Sequence: Synthetic oligonucleotide
auuuaagcccauacagaaaccuucc

SEQ ID NO: 48812 - RNA, 25 nt, Artificial Sequence
  Description of Artificial Sequence: Synthetic oligonucleotide
auuaaaauaaacaugguauaccuac

SEQ ID NO: 48813 - RNA, 25 nt, Artificial Sequence
  Description of Artificial Sequence: Synthetic oligonucleotide
cuguucugaucggccaguuuucgga

SEQ ID NO: 48814 - RNA, 25 nt, Artificial Sequence
  Description of Artificial Sequence: Synthetic oligonucleotide
aaauaauuugaacuuuggaacaggg

SEQ ID NO: 48815 - RNA, 25 nt, Artificial Sequence
  Description of Artificial Sequence: Synthetic oligonucleotide
ugcgaccuuaauuuaacuuuccagu

SEQ ID NO: 48816 - RNA, 25 nt, Artificial Sequence
  Description of Artificial Sequence: Synthetic oligonucleotide
cugagaaagcuaaaguuugguuuug

SEQ ID NO: 48817 - RNA, 25 nt, Artificial Sequence
  Description of Artificial Sequence: Synthetic oligonucleotide
aguaaagaugcuacuucccacugua

SEQ ID NO: 48818 - RNA, 25 nt, Artificial Sequence
  Description of Artificial Sequence: Synthetic oligonucleotide
cugcuuaauugcugauaccauauga

SEQ ID NO: 48819 - RNA, 25 nt, Artificial Sequence
  Description of Artificial Sequence: Synthetic oligonucleotide
uaccauaugaaugaaacaugggcug

SEQ ID NO: 48820 - RNA, 25 nt, Artificial Sequence
  Description of Artificial Sequence: Synthetic oligonucleotide
aacuuucuuauccaacuuuuucaua

SEQ ID NO: 48821 - RNA, 25 nt, Artificial Sequence
  Description of Artificial Sequence: Synthetic oligonucleotide
ccuugcaugacaucaugaggccgga

SEQ ID NO: 48822 - RNA, 25 nt, Artificial Sequence
  Description of Artificial Sequence: Synthetic oligonucleotide
ugaauuuguauaugacugcauuugu

SEQ ID NO: 48823 - RNA, 25 nt, Artificial Sequence
  Description of Artificial Sequence: Synthetic oligonucleotide
gaauccuaguagaauguuuacuacc

SEQ ID NO: 48824 - RNA, 25 nt, Artificial Sequence
  Description of Artificial Sequence: Synthetic oligonucleotide
gaaagggaagaauuuuuugaugaaa

SEQ ID NO: 48825 - RNA, 25 nt, Artificial Sequence
  Description of Artificial Sequence: Synthetic oligonucleotide
uaucggcaugccagugugugaauuu

SEQ ID NO: 48826 - RNA, 25 nt, Artificial Sequence
  Description of Artificial Sequence: Synthetic oligonucleotide
caccucauaguagagcaauguaugu

SEQ ID NO: 48827 - RNA, 25 nt, Artificial Sequence
  Description of Artificial Sequence: Synthetic oligonucleotide
ccagaauugccaaagcacauauaua

SEQ ID NO: 48828 - RNA, 25 nt, Artificial Sequence
  Description of Artificial Sequence: Synthetic oligonucleotide
uggugaucuggguaauaguuucucc

SEQ ID NO: 48829 - RNA, 25 nt, Artificial Sequence
  Description of Artificial Sequence: Synthetic oligonucleotide
gaucuggguaauaguuucuccaaau

SEQ ID NO: 48830 - RNA, 25 nt, Artificial Sequence
  Description of Artificial Sequence: Synthetic oligonucleotide
ggaugugaugaauacuuccuagaaa

SEQ ID NO: 48831 - RNA, 25 nt, Artificial Sequence
  Description of Artificial Sequence: Synthetic oligonucleotide
cauuuccacagcuacaccauauaug

SEQ ID NO: 48832 - RNA, 25 nt, Artificial Sequence
  Description of Artificial Sequence: Synthetic oligonucleotide
acagcuacaccauauaugaauggag

SEQ ID NO: 48833 - RNA, 25 nt, Artificial Sequence
  Description of Artificial Sequence: Synthetic oligonucleotide
ugcaguucuuacacgagaagaagau

SEQ ID NO: 48834 - RNA, 25 nt, Artificial Sequence
  Description of Artificial Sequence: Synthetic oligonucleotide
acgagaagaagaucauuuacaggga

SEQ ID NO: 48835 - RNA, 25 nt, Artificial Sequence
  Description of Artificial Sequence: Synthetic oligonucleotide
cgagaagaagaucauuuacagggac

SEQ ID NO: 48836 - RNA, 25 nt, Artificial Sequence
  Description of Artificial Sequence: Synthetic oligonucleotide
aagaagaucauuuacagggaccuga

SEQ ID NO: 48837 - RNA, 25 nt, Artificial Sequence
  Description of Artificial Sequence: Synthetic oligonucleotide
agaggaagagguguuugacugcauc

SEQ ID NO: 48838 - RNA, 25 nt, Artificial Sequence
  Description of Artificial Sequence: Synthetic oligonucleotide
gaggaagagguguuugacugcaucg

SEQ ID NO: 48839 - RNA, 25 nt, Artificial Sequence
  Description of Artificial Sequence: Synthetic oligonucleotide
cuacuuugagggcgaguucacaggg

SEQ ID NO: 48840 - RNA, 25 nt, Artificial Sequence
  Description of Artificial Sequence: Synthetic oligonucleotide
agggcaucuccuggcaccucugucc

SEQ ID NO: 48841 - RNA, 25 nt, Artificial Sequence
  Description of Artificial Sequence: Synthetic oligonucleotide
ggagugauaugguuugucuuuuuaa

SEQ ID NO: 48842 - RNA, 25 nt, Artificial Sequence
  Description of Artificial Sequence: Synthetic oligonucleotide
gagugauaugguuugucuuuuuaag

SEQ ID NO: 48843 - RNA, 25 nt, Artificial Sequence
  Description of Artificial Sequence: Synthetic oligonucleotide
ugcaguaaagauccuaaagguuguc

SEQ ID NO: 48844 - RNA, 25 nt, Artificial Sequence
  Description of Artificial Sequence: Synthetic oligonucleotide
aguaaagauccuaaagguugucgac

SEQ ID NO: 48845 - RNA, 25 nt, Artificial Sequence
  Description of Artificial Sequence: Synthetic oligonucleotide
ugacaaaggacaaccuggcaauugu

SEQ ID NO: 48846 - RNA, 25 nt, Artificial Sequence
  Description of Artificial Sequence: Synthetic oligonucleotide
gcaauugugacccaguggugcgagg

SEQ ID NO: 48847 - RNA, 25 nt, Artificial Sequence
  Description of Artificial Sequence: Synthetic oligonucleotide
aacaucauccauagagacaugaaau

SEQ ID NO: 48848 - RNA, 25 nt, Artificial Sequence
  Description of Artificial Sequence: Synthetic oligonucleotide
ugaaauccaacaauauauuucucca

SEQ ID NO: 48849 - RNA, 25 nt, Artificial Sequence
  Description of Artificial Sequence: Synthetic oligonucleotide
aacaauauauuucuccaugaaggcu

SEQ ID NO: 48850 - RNA, 25 nt, Artificial Sequence
  Description of Artificial Sequence: Synthetic oligonucleotide
aacaguaaagucacgcuggaguggu

SEQ ID NO: 48851 - RNA, 25 nt, Artificial Sequence
  Description of Artificial Sequence: Synthetic oligonucleotide
ugugaagaaaguaaaggaagagagg

SEQ ID NO: 48852 - RNA, 25 nt, Artificial Sequence
  Description of Artificial Sequence: Synthetic oligonucleotide
cuuccgagccauccuugcaucgggc

SEQ ID NO: 48853 - RNA, 25 nt, Artificial Sequence
  Description of Artificial Sequence: Synthetic oligonucleotide
aauggagguugaauauccuacugug

SEQ ID NO: 48854 - RNA, 25 nt, Artificial Sequence
  Description of Artificial Sequence: Synthetic oligonucleotide
ggagguugaauauccuacuguguaa

SEQ ID NO: 48855 - RNA, 25 nt, Artificial Sequence
  Description of Artificial Sequence: Synthetic oligonucleotide
auuuugaguuuucccuuguagugua

SEQ ID NO: 48856 - RNA, 25 nt, Artificial Sequence
  Description of Artificial Sequence: Synthetic oligonucleotide
uauccuguuuguucuuuguugauug

SEQ ID NO: 48857 - RNA, 25 nt, Artificial Sequence
  Description of Artificial Sequence: Synthetic oligonucleotide
ccuguuuguucuuuguugauugaaa

SEQ ID NO: 48858 - RNA, 25 nt, Artificial Sequence
  Description of Artificial Sequence: Synthetic oligonucleotide
cucuacagccuucuuuuucuuccau

SEQ ID NO: 48859 - RNA, 25 nt, Artificial Sequence
  Description of Artificial Sequence: Synthetic oligonucleotide
ucuuccauagcuaaucuuccuucua

SEQ ID NO: 48860 - RNA, 25 nt, Artificial Sequence
  Description of Artificial Sequence: Synthetic oligonucleotide
auaaucuuccuguugaaugcuucau

SEQ ID NO: 48861 - RNA, 25 nt, Artificial Sequence
  Description of Artificial Sequence: Synthetic oligonucleotide
uaaucuuccuguugaaugcuucaug

SEQ ID NO: 48862 - RNA, 25 nt, Artificial Sequence
  Description of Artificial Sequence: Synthetic oligonucleotide
cuucaugacuugaauucuacuuuga

SEQ ID NO: 48863 - RNA, 25 nt, Artificial Sequence
  Description of Artificial Sequence: Synthetic oligonucleotide
aagagggagagaagcaacuacagac

SEQ ID NO: 48864 - RNA, 25 nt, Artificial Sequence
  Description of Artificial Sequence: Synthetic oligonucleotide
cgucuccuaccagaccaaggucaac

SEQ ID NO: 48865 - RNA, 25 nt, Artificial Sequence
  Description of Artificial Sequence: Synthetic oligonucleotide
gaucaaucggcccgacuaucucgac

SEQ ID NO: 48866 - RNA, 25 nt, Artificial Sequence
  Description of Artificial Sequence: Synthetic oligonucleotide
ggacgaacauccaaccuucccaaac

SEQ ID NO: 48867 - RNA, 25 nt, Artificial Sequence
  Description of Artificial Sequence: Synthetic oligonucleotide
agggucggaacccaagcuuagaacu

SEQ ID NO: 48868 - RNA, 25 nt, Artificial Sequence
  Description of Artificial Sequence: Synthetic oligonucleotide
ucggaacccaagcuuagaacuuuaa

SEQ ID NO: 48869 - RNA, 25 nt, Artificial Sequence
  Description of Artificial Sequence: Synthetic oligonucleotide
acccaagcuuagaacuuuaagcaac

SEQ ID NO: 48870 - RNA, 25 nt, Artificial Sequence
  Description of Artificial Sequence: Synthetic oligonucleotide
gaacuuuaagcaacaagaccaccac

SEQ ID NO: 48871 - RNA, 25 nt, Artificial Sequence
  Description of Artificial Sequence: Synthetic oligonucleotide
acuauucaguggcgagaaauaaagu

SEQ ID NO: 48872 - RNA, 25 nt, Artificial Sequence
  Description of Artificial Sequence: Synthetic oligonucleotide
cuauucaguggcgagaaauaaaguu

SEQ ID NO: 48873 - RNA, 25 nt, Artificial Sequence
  Description of Artificial Sequence: Synthetic oligonucleotide
aaacacagauaacaggaaaugaucc

SEQ ID NO: 48874 - RNA, 25 nt, Artificial Sequence
  Description of Artificial Sequence: Synthetic oligonucleotide
cuuaagaaaagagaagaaaugaaac

SEQ ID NO: 48875 - RNA, 25 nt, Artificial Sequence
  Description of Artificial Sequence: Synthetic oligonucleotide
cugaaggaguguguuuccauccucc

SEQ ID NO: 48876 - RNA, 25 nt, Artificial Sequence
  Description of Artificial Sequence: Synthetic oligonucleotide
ucaccgcgggacugaaaaucuuuga

SEQ ID NO: 48877 - RNA, 25 nt, Artificial Sequence
  Description of Artificial Sequence: Synthetic oligonucleotide
agcagaaauaagcgugccguucagg

SEQ ID NO: 48878 - RNA, 25 nt, Artificial Sequence
  Description of Artificial Sequence: Synthetic oligonucleotide
aagcgugccguucaggguccagaag

SEQ ID NO: 48879 - RNA, 25 nt, Artificial Sequence
  Description of Artificial Sequence: Synthetic oligonucleotide
agaaacagucacucaagacugcuug

SEQ ID NO: 48880 - RNA, 25 nt, Artificial Sequence
  Description of Artificial Sequence: Synthetic oligonucleotide
agaggaagaagguccaugucuuugg

SEQ ID NO: 48881 - RNA, 25 nt, Artificial Sequence
  Description of Artificial Sequence: Synthetic oligonucleotide
uguauucaaaauaugccugaaacac

SEQ ID NO: 48882 - RNA, 25 nt, Artificial Sequence
  Description of Artificial Sequence: Synthetic oligonucleotide
auuuuccucccuuucucuguaccuc

SEQ ID NO: 48883 - RNA, 25 nt, Artificial Sequence
  Description of Artificial Sequence: Synthetic oligonucleotide
caaagaaagauagagcaagacaaga

SEQ ID NO: 48884 - RNA, 25 nt, Artificial Sequence
  Description of Artificial Sequence: Synthetic oligonucleotide
aagaaagauagagcaagacaagaaa

SEQ ID NO: 48885 - RNA, 25 nt, Artificial Sequence
  Description of Artificial Sequence: Synthetic oligonucleotide
gaaagcauuuguuuguacaagaucc

SEQ ID NO: 48886 - RNA, 25 nt, Artificial Sequence
  Description of Artificial Sequence: Synthetic oligonucleotide
ugaguuaaacgaacguacuugcaga

SEQ ID NO: 48887 - RNA, 25 nt, Artificial Sequence
  Description of Artificial Sequence: Synthetic oligonucleotide
acugauacagaacgaucgauacaga

SEQ ID NO: 48888 - RNA, 25 nt, Artificial Sequence
  Description of Artificial Sequence: Synthetic oligonucleotide
auauuauauauauauaaaaauaaau

SEQ ID NO: 48889 - RNA, 25 nt, Artificial Sequence
  Description of Artificial Sequence: Synthetic oligonucleotide
auuauauauauauaaaaauaaauau

SEQ ID NO: 48890 - RNA, 25 nt, Artificial Sequence
  Description of Artificial Sequence: Synthetic oligonucleotide
ucacuggauguauuugacugcugug

SEQ ID NO: 48891 - RNA, 25 nt, Artificial Sequence
  Description of Artificial Sequence: Synthetic oligonucleotide
cagggaagaggaggagaugagagac

SEQ ID NO: 48892 - RNA, 25 nt, Artificial Sequence
  Description of Artificial Sequence: Synthetic oligonucleotide
augaucuuuuuuuugucccacuugg

SEQ ID NO: 48893 - RNA, 27 nt, Artificial Sequence
  Description of Artificial Sequence: Synthetic oligonucleotide
ggccgugaacuccucaucaaaauaccu

SEQ ID NO: 48894 - RNA, 27 nt, Artificial Sequence
  Description of Artificial Sequence: Synthetic oligonucleotide
uggugugauggugaucaucugggccgu

SEQ ID NO: 48895 - RNA, 27 nt, Artificial Sequence
  Description of Artificial Sequence: Synthetic oligonucleotide
aaacccgcaggauaguuuucuucccua

SEQ ID NO: 48896 - RNA, 27 nt, Artificial Sequence
  Description of Artificial Sequence: Synthetic oligonucleotide
caaacuggaugaaauaaauuaaaaccc

SEQ ID NO: 48897 - RNA, 27 nt, Artificial Sequence
  Description of Artificial Sequence: Synthetic oligonucleotide
agaaguccuuaacauuucccuacguga

SEQ ID NO: 48898 - RNA, 27 nt, Artificial Sequence
  Description of Artificial Sequence: Synthetic oligonucleotide
cucugucccacuggguaaacccuggcc

SEQ ID NO: 48899 - RNA, 27 nt, Artificial Sequence
  Description of Artificial Sequence: Synthetic oligonucleotide
cacaauaacaaauuuaaaccuugcucc

SEQ ID NO: 48900 - RNA, 27 nt, Artificial Sequence
  Description of Artificial Sequence: Synthetic oligonucleotide
aaaugcauuugaacaacauaauacaca

SEQ ID NO: 48901 - RNA, 27 nt, Artificial Sequence
  Description of Artificial Sequence: Synthetic oligonucleotide
ggcuuuccugucacaaagauuaaaaac

SEQ ID NO: 48902 - RNA, 27 nt, Artificial Sequence
  Description of Artificial Sequence: Synthetic oligonucleotide
agggcuuuccugucacaaagauuaaaa

SEQ ID NO: 48903 - RNA, 27 nt, Artificial Sequence
  Description of Artificial Sequence: Synthetic oligonucleotide
ggccaugcugggagacauaagcagcag

SEQ ID NO: 48904 - RNA, 27 nt, Artificial Sequence
  Description of Artificial Sequence: Synthetic oligonucleotide
ucagggagaagcuucugaaacacuucu

SEQ ID NO: 48905 - RNA, 27 nt, Artificial Sequence
  Description of Artificial Sequence: Synthetic oligonucleotide
aagggcuucuuccuuauugauggucag

SEQ ID NO: 48906 - RNA, 27 nt, Artificial Sequence
  Description of Artificial Sequence: Synthetic oligonucleotide
ugaagggcuucuuccuuauugaugguc

SEQ ID NO: 48907 - RNA, 27 nt, Artificial Sequence
  Description of Artificial Sequence: Synthetic oligonucleotide
cgcugaagggcuucuuccuuauugaug

SEQ ID NO: 48908 - RNA, 27 nt, Artificial Sequence
  Description of Artificial Sequence: Synthetic oligonucleotide
gccgcugaagggcuucuuccuuauuga

SEQ ID NO: 48909 - RNA, 27 nt, Artificial Sequence
  Description of Artificial Sequence: Synthetic oligonucleotide
acuggccgcugaagggcuucuuccuua

SEQ ID NO: 48910 - RNA, 27 nt, Artificial Sequence
  Description of Artificial Sequence: Synthetic oligonucleotide
cggagcuuuucaccuuuaguuaugcuu

SEQ ID NO: 48911 - RNA, 27 nt, Artificial Sequence
  Description of Artificial Sequence: Synthetic oligonucleotide
ccggagcuuuucaccuuuaguuaugcu

SEQ ID NO: 48912 - RNA, 27 nt, Artificial Sequence
  Description of Artificial Sequence: Synthetic oligonucleotide
cagacuguugacuggcgugauguaguu

SEQ ID NO: 48913 - RNA, 27 nt, Artificial Sequence
  Description of Artificial Sequence: Synthetic oligonucleotide
cuuuugaacucugcuuaaauccagugg

SEQ ID NO: 48914 - RNA, 27 nt, Artificial Sequence
  Description of Artificial Sequence: Synthetic oligonucleotide
gcuuuugaacucugcuuaaauccagug

SEQ ID NO: 48915 - RNA, 27 nt, Artificial Sequence
  Description of Artificial Sequence: Synthetic oligonucleotide
agggcuuuugaacucugcuuaaaucca

SEQ ID NO: 48916 - RNA, 27 nt, Artificial Sequence
  Description of Artificial Sequence: Synthetic oligonucleotide
aagggcuuuugaacucugcuuaaaucc

SEQ ID NO: 48917 - RNA, 27 nt, Artificial Sequence
  Description of Artificial Sequence: Synthetic oligonucleotide
ugaagggcuuuugaacucugcuuaaau

SEQ ID NO: 48918 - RNA, 27 nt, Artificial Sequence
  Description of Artificial Sequence: Synthetic oligonucleotide
cugaagggcuuuugaacucugcuuaaa

SEQ ID NO: 48919 - RNA, 27 nt, Artificial Sequence
  Description of Artificial Sequence: Synthetic oligonucleotide
cgcugaagggcuuuugaacucugcuua

SEQ ID NO: 48920 - RNA, 27 nt, Artificial Sequence
  Description of Artificial Sequence: Synthetic oligonucleotide
cgagcggcuucacucagacccugaggc

SEQ ID NO: 48921 - RNA, 27 nt, Artificial Sequence
  Description of Artificial Sequence: Synthetic oligonucleotide
uugacuggcgugauguaguugcuuggg

SEQ ID NO: 48922 - RNA, 27 nt, Artificial Sequence
  Description of Artificial Sequence: Synthetic oligonucleotide
cacgcaccaagaagcugccauugaucc

SEQ ID NO: 48923 - RNA, 27 nt, Artificial Sequence
  Description of Artificial Sequence: Synthetic oligonucleotide
cugaugaauccaaugugggcuggaauc

SEQ ID NO: 48924 - RNA, 27 nt, Artificial Sequence
  Description of Artificial Sequence: Synthetic oligonucleotide
cuuagguauuccacauucucagcugug

SEQ ID NO: 48925 - RNA, 27 nt, Artificial Sequence
  Description of Artificial Sequence: Synthetic oligonucleotide
ugagccucaaauuaggagauacguuuu

SEQ ID NO: 48926 - RNA, 27 nt, Artificial Sequence
  Description of Artificial Sequence: Synthetic oligonucleotide
ccaauuguagagaaauuauuuuaggaa

SEQ ID NO: 48927 - RNA, 27 nt, Artificial Sequence
  Description of Artificial Sequence: Synthetic oligonucleotide
ggcuccuaacuagcugaaucuuccaau

SEQ ID NO: 48928 - RNA, 27 nt, Artificial Sequence
  Description of Artificial Sequence: Synthetic oligonucleotide
guggauauugacuaggagaguuuaaaa

SEQ ID NO: 48929 - RNA, 27 nt, Artificial Sequence
  Description of Artificial Sequence: Synthetic oligonucleotide
ugugacugaacauaacuguaggcugaa

SEQ ID NO: 48930 - RNA, 27 nt, Artificial Sequence
  Description of Artificial Sequence: Synthetic oligonucleotide
guaugugugugugacugaacauaacug

SEQ ID NO: 48931 - RNA, 27 nt, Artificial Sequence
  Description of Artificial Sequence: Synthetic oligonucleotide
aagcaaaaggaacauuuuguaugugug

SEQ ID NO: 48932 - RNA, 27 nt, Artificial Sequence
  Description of Artificial Sequence: Synthetic oligonucleotide
aaaaauuacuuuaaaagcaaaaggaac

SEQ ID NO: 48933 - RNA, 27 nt, Artificial Sequence
  Description of Artificial Sequence: Synthetic oligonucleotide
ccauugacuguugcuucacaggucaga

SEQ ID NO: 48934 - RNA, 27 nt, Artificial Sequence
  Description of Artificial Sequence: Synthetic oligonucleotide
auugguuugucgaugugugagauaguu

SEQ ID NO: 48935 - RNA, 27 nt, Artificial Sequence
  Description of Artificial Sequence: Synthetic oligonucleotide
agugguagcaguacaauugaggacaag

SEQ ID NO: 48936 - RNA, 27 nt, Artificial Sequence
  Description of Artificial Sequence: Synthetic oligonucleotide
uaagaccgcuugccagcuacgguuuca

SEQ ID NO: 48937 - RNA, 27 nt, Artificial Sequence
  Description of Artificial Sequence: Synthetic oligonucleotide
agccgguaagaccgcuugccagcuacg

SEQ ID NO: 48938 - RNA, 27 nt, Artificial Sequence
  Description of Artificial Sequence: Synthetic oligonucleotide
gguaacccaucuuuuaaccauacaacu

SEQ ID NO: 48939 - RNA, 27 nt, Artificial Sequence
  Description of Artificial Sequence: Synthetic oligonucleotide
ucgcagguaacccaucuuuuaaccaua

SEQ ID NO: 48940 - RNA, 27 nt, Artificial Sequence
  Description of Artificial Sequence: Synthetic oligonucleotide
cucagcaagauuguauaauucccugca

SEQ ID NO: 48941 - RNA, 27 nt, Artificial Sequence
  Description of Artificial Sequence: Synthetic oligonucleotide
acuguuuuaugcucagcaagauuguau

SEQ ID NO: 48942 - RNA, 27 nt, Artificial Sequence
  Description of Artificial Sequence: Synthetic oligonucleotide
aggauaaaggacucuucauuauuggaa

SEQ ID NO: 48943 - RNA, 27 nt, Artificial Sequence
  Description of Artificial Sequence: Synthetic oligonucleotide
caacuugcguuggaacauccaaagugu

SEQ ID NO: 48944 - RNA, 27 nt, Artificial Sequence
  Description of Artificial Sequence: Synthetic oligonucleotide
augguuucaguuuaguggaagcauuua

SEQ ID NO: 48945 - RNA, 27 nt, Artificial Sequence
  Description of Artificial Sequence: Synthetic oligonucleotide
auauuuaacaaagucaaacuuucucac

SEQ ID NO: 48946 - RNA, 27 nt, Artificial Sequence
  Description of Artificial Sequence: Synthetic oligonucleotide
aacuuuuaauauacaguaguucuuuuc

SEQ ID NO: 48947 - RNA, 27 nt, Artificial Sequence
  Description of Artificial Sequence: Synthetic oligonucleotide
guuaagucaaaacccguauuucuaaag

SEQ ID NO: 48948 - RNA, 27 nt, Artificial Sequence
  Description of Artificial Sequence: Synthetic oligonucleotide
gugcugaguuugcuguacccauguuga

SEQ ID NO: 48949 - RNA, 27 nt, Artificial Sequence
  Description of Artificial Sequence: Synthetic oligonucleotide
ugaggucagcaucuucugugucuuuac

SEQ ID NO: 48950 - RNA, 27 nt, Artificial Sequence
  Description of Artificial Sequence: Synthetic oligonucleotide
gcgaucugaauaaaccucccuacuagc

SEQ ID NO: 48951 - RNA, 27 nt, Artificial Sequence
  Description of Artificial Sequence: Synthetic oligonucleotide
aucccagaacccugcugcagaaggcca

SEQ ID NO: 48952 - RNA, 27 nt, Artificial Sequence
  Description of Artificial Sequence: Synthetic oligonucleotide
cauaauuuccaauauguaccagaccuu

SEQ ID NO: 48953 - RNA, 27 nt, Artificial Sequence
  Description of Artificial Sequence: Synthetic oligonucleotide
cuagugcuuccaucggaaggacuaggu

SEQ ID NO: 48954 - RNA, 27 nt, Artificial Sequence
  Description of Artificial Sequence: Synthetic oligonucleotide
uccacauaaaaacaauauucacuggga

SEQ ID NO: 48955 - RNA, 27 nt, Artificial Sequence
  Description of Artificial Sequence: Synthetic oligonucleotide
ucuaccaauuccaacuugaauucauug

SEQ ID NO: 48956 - RNA, 27 nt, Artificial Sequence
  Description of Artificial Sequence: Synthetic oligonucleotide
ucuccaagucuaaaucuguguccugag

SEQ ID NO: 48957 - RNA, 27 nt, Artificial Sequence
  Description of Artificial Sequence: Synthetic oligonucleotide
uggaauacuguaacugugcuuugagga

SEQ ID NO: 48958 - RNA, 27 nt, Artificial Sequence
  Description of Artificial Sequence: Synthetic oligonucleotide
uuaauucaucagugguggcagugguag

SEQ ID NO: 48959 - RNA, 27 nt, Artificial Sequence
  Description of Artificial Sequence: Synthetic oligonucleotide
gugaugauguggcacuaguaguuucuu

SEQ ID NO: 48960 - RNA, 27 nt, Artificial Sequence
  Description of Artificial Sequence: Synthetic oligonucleotide
ucuguuuggugaggcuguccgacuuug

SEQ ID NO: 48961 - RNA, 27 nt, Artificial Sequence
  Description of Artificial Sequence: Synthetic oligonucleotide
ccaucauguuccauuuuucgcuuucuc

SEQ ID NO: 48962 - RNA, 27 nt, Artificial Sequence
  Description of Artificial Sequence: Synthetic oligonucleotide
gcagucuacaugcuaaaucagagggua

SEQ ID NO: 48963 - RNA, 27 nt, Artificial Sequence
  Description of Artificial Sequence: Synthetic oligonucleotide
cauaaauagauccuuaaauagcucaaa

SEQ ID NO: 48964 - RNA, 27 nt, Artificial Sequence
  Description of Artificial Sequence: Synthetic oligonucleotide
ugauaauagugcuuuuucaccuuuuuc

SEQ ID NO: 48965 - RNA, 27 nt, Artificial Sequence
  Description of Artificial Sequence: Synthetic oligonucleotide
gcagaacugauaauagugcuuuuucac

SEQ ID NO: 48966 - RNA, 27 nt, Artificial Sequence
  Description of Artificial Sequence: Synthetic oligonucleotide
guagguuuaaucuuucuuuucagccau

SEQ ID NO: 48967 - RNA, 27 nt, Artificial Sequence
  Description of Artificial Sequence: Synthetic oligonucleotide
agaaggauuuuauuauaaggguuuaau

SEQ ID NO: 48968 - RNA, 27 nt, Artificial Sequence
  Description of Artificial Sequence: Synthetic oligonucleotide
gucuacagcauuggcuaauaguaugaa

SEQ ID NO: 48969 - RNA, 27 nt, Artificial Sequence
  Description of Artificial Sequence: Synthetic oligonucleotide
cuauuccuaucaaaaugcuucugucua

SEQ ID NO: 48970 - RNA, 27 nt, Artificial Sequence
  Description of Artificial Sequence: Synthetic oligonucleotide
ucagggccauuaucuuauuugcucuau

SEQ ID NO: 48971 - RNA, 27 nt, Artificial Sequence
  Description of Artificial Sequence: Synthetic oligonucleotide
ugcuugaggaagagaaaaauguugguc

SEQ ID NO: 48972 - RNA, 27 nt, Artificial Sequence
  Description of Artificial Sequence: Synthetic oligonucleotide
ugggcugaacuuuucucauacuuaaag

SEQ ID NO: 48973 - RNA, 27 nt, Artificial Sequence
  Description of Artificial Sequence: Synthetic oligonucleotide
gguucagcagccaucuuuauuccugcg

SEQ ID NO: 48974 - RNA, 27 nt, Artificial Sequence
  Description of Artificial Sequence: Synthetic oligonucleotide
ugaagagaacuuggucauucaaauuuc

SEQ ID NO: 48975 - RNA, 27 nt, Artificial Sequence
  Description of Artificial Sequence: Synthetic oligonucleotide
cucuaggcuggcuaucuuuauacauac

SEQ ID NO: 48976 - RNA, 27 nt, Artificial Sequence
  Description of Artificial Sequence: Synthetic oligonucleotide
acacuucacagagauaguuacagccau

SEQ ID NO: 48977 - RNA, 27 nt, Artificial Sequence
  Description of Artificial Sequence: Synthetic oligonucleotide
uugaaauuuucucacacuucacagaga

SEQ ID NO: 48978 - RNA, 27 nt, Artificial Sequence
  Description of Artificial Sequence: Synthetic oligonucleotide
ucaggaggauucauuuccuuaaaggaa

SEQ ID NO: 48979 - RNA, 27 nt, Artificial Sequence
  Description of Artificial Sequence: Synthetic oligonucleotide
auaugaugucacuuuuuguauccuuga

SEQ ID NO: 48980 - RNA, 27 nt, Artificial Sequence
  Description of Artificial Sequence: Synthetic oligonucleotide
uaugaugaagauucaaauugcaucuua

SEQ ID NO: 48981 - RNA, 27 nt, Artificial Sequence
  Description of Artificial Sequence: Synthetic oligonucleotide
uuaauagcuagucuucguuuugaacag

SEQ ID NO: 48982 - RNA, 27 nt, Artificial Sequence
  Description of Artificial Sequence: Synthetic oligonucleotide
auuuuuaguagagaugagguuucacca

SEQ ID NO: 48983 - RNA, 27 nt, Artificial Sequence
  Description of Artificial Sequence: Synthetic oligonucleotide
aggcgagauagagcuucucuuucguuc

SEQ ID NO: 48984 - RNA, 27 nt, Artificial Sequence
  Description of Artificial Sequence: Synthetic oligonucleotide
aacuggaccgaaggcgcuuguggagaa

SEQ ID NO: 48985 - RNA, 27 nt, Artificial Sequence
  Description of Artificial Sequence: Synthetic oligonucleotide
gcggcuacaucuuuggaaucuucuccu

SEQ ID NO: 48986 - RNA, 27 nt, Artificial Sequence
  Description of Artificial Sequence: Synthetic oligonucleotide
caagucuccucauugaauccagauugg

SEQ ID NO: 48987 - RNA, 27 nt, Artificial Sequence
  Description of Artificial Sequence: Synthetic oligonucleotide
uccucacuacucucaaaucuguucugg

SEQ ID NO: 48988 - RNA, 27 nt, Artificial Sequence
  Description of Artificial Sequence: Synthetic oligonucleotide
uuuguacucaucugcacagcucuggcu

SEQ ID NO: 48989 - RNA, 27 nt, Artificial Sequence
  Description of Artificial Sequence: Synthetic oligonucleotide
gcccauuaacaacaacaaucugaggug

SEQ ID NO: 48990 - RNA, 27 nt, Artificial Sequence
  Description of Artificial Sequence: Synthetic oligonucleotide
aauaaauuaaaaauaauuaaaauagug

SEQ ID NO: 48991 - RNA, 27 nt, Artificial Sequence
  Description of Artificial Sequence: Synthetic oligonucleotide
cauauuuaaauauuaauaaauuaaaaa

SEQ ID NO: 48992 - RNA, 27 nt, Artificial Sequence
  Description of Artificial Sequence: Synthetic oligonucleotide
gaaacaaaggauauucaaacugcauag

SEQ ID NO: 48993 - RNA, 27 nt, Artificial Sequence
  Description of Artificial Sequence: Synthetic oligonucleotide
caaacacuuagacgccagcagcauggg

SEQ ID NO: 48994 - RNA, 27 nt, Artificial Sequence
  Description of Artificial Sequence: Synthetic oligonucleotide
uuugucacaggugaaaugcacaucuga

SEQ ID NO: 48995 - RNA, 27 nt, Artificial Sequence
  Description of Artificial Sequence: Synthetic oligonucleotide
uaauucagccuggcacagguuuugauc

SEQ ID NO: 48996 - RNA, 27 nt, Artificial Sequence
  Description of Artificial Sequence: Synthetic oligonucleotide
auuguaagaaugacuacccacauucac

SEQ ID NO: 48997 - RNA, 27 nt, Artificial Sequence
  Description of Artificial Sequence: Synthetic oligonucleotide
caauuguaagaaugacuacccacauuc

SEQ ID NO: 48998 - RNA, 27 nt, Artificial Sequence
  Description of Artificial Sequence: Synthetic oligonucleotide
guacacucucugaugcucauuuucaua

SEQ ID NO: 48999 - RNA, 27 nt, Artificial Sequence
  Description of Artificial Sequence: Synthetic oligonucleotide
cugcugaguucuacaugaaaagcaaau

SEQ ID NO: 49000 - RNA, 27 nt, Artificial Sequence
  Description of Artificial Sequence: Synthetic oligonucleotide
uacugaaaauaaauauagaaauacaac

SEQ ID NO: 49001 - RNA, 27 nt, Artificial Sequence
  Description of Artificial Sequence: Synthetic oligonucleotide
uuccauuuaagaaacauuaaucaaaac

SEQ ID NO: 49002 - RNA, 27 nt, Artificial Sequence
  Description of Artificial Sequence: Synthetic oligonucleotide
acaauuuuaggcacuauacacguuguu

SEQ ID NO: 49003 - RNA, 27 nt, Artificial Sequence
  Description of Artificial Sequence: Synthetic oligonucleotide
ccagauguuaguagccaaggauauggu

SEQ ID NO: 49004 - RNA, 27 nt, Artificial Sequence
  Description of Artificial Sequence: Synthetic oligonucleotide
agcucacagucuccagauguuaguagc

SEQ ID NO: 49005 - RNA, 27 nt, Artificial Sequence
  Description of Artificial Sequence: Synthetic oligonucleotide
auuaauaaaaagcacacaacuuauggc

SEQ ID NO: 49006 - RNA, 27 nt, Artificial Sequence
  Description of Artificial Sequence: Synthetic oligonucleotide
aauguaagaagagccaaaaugaugcau

SEQ ID NO: 49007 - RNA, 27 nt, Artificial Sequence
  Description of Artificial Sequence: Synthetic oligonucleotide
acauuuuuacaaauguaagaagagcca

SEQ ID NO: 49008 - RNA, 27 nt, Artificial Sequence
  Description of Artificial Sequence: Synthetic oligonucleotide
aauaugaauuaagaugaccuaaucugu

SEQ ID NO: 49009 - RNA, 27 nt, Artificial Sequence
  Description of Artificial Sequence: Synthetic oligonucleotide
ucaugauuaguucuuucaauuccaucc

SEQ ID NO: 49010 - RNA, 27 nt, Artificial Sequence
  Description of Artificial Sequence: Synthetic oligonucleotide
cccaagagcagaaggaaugagugugca

SEQ ID NO: 49011 - RNA, 27 nt, Artificial Sequence
  Description of Artificial Sequence: Synthetic oligonucleotide
cucaaagcuacugguuaccucuacacc

SEQ ID NO: 49012 - RNA, 27 nt, Artificial Sequence
  Description of Artificial Sequence: Synthetic oligonucleotide
ugaaauauuacguggcaugugguuggg

SEQ ID NO: 49013 - RNA, 27 nt, Artificial Sequence
  Description of Artificial Sequence: Synthetic oligonucleotide
agugaagagaauaacuuguuuccgaag

SEQ ID NO: 49014 - RNA, 27 nt, Artificial Sequence
  Description of Artificial Sequence: Synthetic oligonucleotide
uuucuuagcauuaguuauugggaguga

SEQ ID NO: 49015 - RNA, 27 nt, Artificial Sequence
  Description of Artificial Sequence: Synthetic oligonucleotide
uugauuuucagcauuucuuagcauuag

SEQ ID NO: 49016 - RNA, 27 nt, Artificial Sequence
  Description of Artificial Sequence: Synthetic oligonucleotide
aaaguaaucauauuuagagaaagacag

SEQ ID NO: 49017 - RNA, 27 nt, Artificial Sequence
  Description of Artificial Sequence: Synthetic oligonucleotide
uguagaacaaaaugccugaaauucagc

SEQ ID NO: 49018 - RNA, 27 nt, Artificial Sequence
  Description of Artificial Sequence: Synthetic oligonucleotide
gagagucccgggugagagggaaucgcc

SEQ ID NO: 49019 - RNA, 27 nt, Artificial Sequence
  Description of Artificial Sequence: Synthetic oligonucleotide
cuuuacuuuaaagguucacuuuccuug

SEQ ID NO: 49020 - RNA, 27 nt, Artificial Sequence
  Description of Artificial Sequence: Synthetic oligonucleotide
ccaggcuuccagagcaugcagccuccu

SEQ ID NO: 49021 - RNA, 27 nt, Artificial Sequence
  Description of Artificial Sequence: Synthetic oligonucleotide
cucucuuuuguuuucuguucagagaaa

SEQ ID NO: 49022 - RNA, 27 nt, Artificial Sequence
  Description of Artificial Sequence: Synthetic oligonucleotide
cggcauaacugauuacagccaaguuca

SEQ ID NO: 49023 - RNA, 27 nt, Artificial Sequence
  Description of Artificial Sequence: Synthetic oligonucleotide
uggacuucuuuuaauuuuggcuucuuc

SEQ ID NO: 49024 - RNA, 27 nt, Artificial Sequence
  Description of Artificial Sequence: Synthetic oligonucleotide
uaaccucaccuggacuucuuuuaauuu

SEQ ID NO: 49025 - RNA, 27 nt, Artificial Sequence
  Description of Artificial Sequence: Synthetic oligonucleotide
guccucuucccgauaauccggauucag

SEQ ID NO: 49026 - RNA, 27 nt, Artificial Sequence
  Description of Artificial Sequence: Synthetic oligonucleotide
acaauacuugcuuugaugucacauuaa

SEQ ID NO: 49027 - RNA, 27 nt, Artificial Sequence
  Description of Artificial Sequence: Synthetic oligonucleotide
gagugcuacaauacuugcuuugauguc

SEQ ID NO: 49028 - RNA, 27 nt, Artificial Sequence
  Description of Artificial Sequence: Synthetic oligonucleotide
auuugugguuuuguuuucucucucucu

SEQ ID NO: 49029 - RNA, 27 nt, Artificial Sequence
  Description of Artificial Sequence: Synthetic oligonucleotide
uguaugggcuuaaauacuacagcgagg

SEQ ID NO: 49030 - RNA, 27 nt, Artificial Sequence
  Description of Artificial Sequence: Synthetic oligonucleotide
cuguaugggcuuaaauacuacagcgag

SEQ ID NO: 49031 - RNA, 27 nt, Artificial Sequence
  Description of Artificial Sequence: Synthetic oligonucleotide
ggaagguuucuguaugggcuuaaauac

SEQ ID NO: 49032 - RNA, 27 nt, Artificial Sequence
  Description of Artificial Sequence: Synthetic oligonucleotide
guagguauaccauguuuauuuuaauac

SEQ ID NO: 49033 - RNA, 27 nt, Artificial Sequence
  Description of Artificial Sequence: Synthetic oligonucleotide
uccgaaaacuggccgaucagaacagcc

SEQ ID NO: 49034 - RNA, 27 nt, Artificial Sequence
  Description of Artificial Sequence: Synthetic oligonucleotide
cccuguuccaaaguucaaauuauuugu

SEQ ID NO: 49035 - RNA, 27 nt, Artificial Sequence
  Description of Artificial Sequence: Synthetic oligonucleotide
acuggaaaguuaaauuaaggucgcaau

SEQ ID NO: 49036 - RNA, 27 nt, Artificial Sequence
  Description of Artificial Sequence: Synthetic oligonucleotide
caaaaccaaacuuuagcuuucucagcc

SEQ ID NO: 49037 - RNA, 27 nt, Artificial Sequence
  Description of Artificial Sequence: Synthetic oligonucleotide
uacagugggaaguagcaucuuuacuuu

SEQ ID NO: 49038 - RNA, 27 nt, Artificial Sequence
  Description of Artificial Sequence: Synthetic oligonucleotide
ucauaugguaucagcaauuaagcagua

SEQ ID NO: 49039 - RNA, 27 nt, Artificial Sequence
  Description of Artificial Sequence: Synthetic oligonucleotide
cagcccauguuucauucauaugguauc

SEQ ID NO: 49040 - RNA, 27 nt, Artificial Sequence
  Description of Artificial Sequence: Synthetic oligonucleotide
uaugaaaaaguuggauaagaaaguugg

SEQ ID NO: 49041 - RNA, 27 nt, Artificial Sequence
  Description of Artificial Sequence: Synthetic oligonucleotide
uccggccucaugaugucaugcaaggcu

SEQ ID NO: 49042 - RNA, 27 nt, Artificial Sequence
  Description of Artificial Sequence: Synthetic oligonucleotide
acaaaugcagucauauacaaauucagg

SEQ ID NO: 49043 - RNA, 27 nt, Artificial Sequence
  Description of Artificial Sequence: Synthetic oligonucleotide
gguaguaaacauucuacuaggauucuu

SEQ ID NO: 49044 - RNA, 27 nt, Artificial Sequence
  Description of Artificial Sequence: Synthetic oligonucleotide
uuucaucaaaaaauucuucccuuucug

SEQ ID NO: 49045 - RNA, 27 nt, Artificial Sequence
  Description of Artificial Sequence: Synthetic oligonucleotide
aaauucacacacuggcaugccgauagc

SEQ ID NO: 49046 - RNA, 27 nt, Artificial Sequence
  Description of Artificial Sequence: Synthetic oligonucleotide
acauacauugcucuacuaugaggugaa

SEQ ID NO: 49047 - RNA, 27 nt, Artificial Sequence
  Description of Artificial Sequence: Synthetic oligonucleotide
uauauaugugcuuuggcaauucuggug

SEQ ID NO: 49048 - RNA, 27 nt, Artificial Sequence
  Description of Artificial Sequence: Synthetic oligonucleotide
ggagaaacuauuacccagaucaccacu

SEQ ID NO: 49049 - RNA, 27 nt, Artificial Sequence
  Description of Artificial Sequence: Synthetic oligonucleotide
auuuggagaaacuauuacccagaucac

SEQ ID NO: 49050 - RNA, 27 nt, Artificial Sequence
  Description of Artificial Sequence: Synthetic oligonucleotide
uuucuaggaaguauucaucacauccac

SEQ ID NO: 49051 - RNA, 27 nt, Artificial Sequence
  Description of Artificial Sequence: Synthetic oligonucleotide
cauauaugguguagcuguggaaaugcg

SEQ ID NO: 49052 - RNA, 27 nt, Artificial Sequence
  Description of Artificial Sequence: Synthetic oligonucleotide
cuccauucauauaugguguagcugugg

SEQ ID NO: 49053 - RNA, 27 nt, Artificial Sequence
  Description of Artificial Sequence: Synthetic oligonucleotide
aucuucuucucguguaagaacugcagc

SEQ ID NO: 49054 - RNA, 27 nt, Artificial Sequence
  Description of Artificial Sequence: Synthetic oligonucleotide
ucccuguaaaugaucuucuucucgugu

SEQ ID NO: 49055 - RNA, 27 nt, Artificial Sequence
  Description of Artificial Sequence: Synthetic oligonucleotide
gucccuguaaaugaucuucuucucgug

SEQ ID NO: 49056 - RNA, 27 nt, Artificial Sequence
  Description of Artificial Sequence: Synthetic oligonucleotide
ucaggucccuguaaaugaucuucuucu

SEQ ID NO: 49057 - RNA, 27 nt, Artificial Sequence
  Description of Artificial Sequence: Synthetic oligonucleotide
gaugcagucaaacaccucuuccucugu

SEQ ID NO: 49058 - RNA, 27 nt, Artificial Sequence
  Description of Artificial Sequence: Synthetic oligonucleotide
cgaugcagucaaacaccucuuccucug

SEQ ID NO: 49059 - RNA, 27 nt, Artificial Sequence
  Description of Artificial Sequence: Synthetic oligonucleotide
cccugugaacucgcccucaaaguagcg

SEQ ID NO: 49060 - RNA, 27 nt, Artificial Sequence
  Description of Artificial Sequence: Synthetic oligonucleotide
ggacagaggugccaggagaugcccuca

SEQ ID NO: 49061 - RNA, 27 nt, Artificial Sequence
  Description of Artificial Sequence: Synthetic oligonucleotide
uuaaaaagacaaaccauaucacuccuu

SEQ ID NO: 49062 - RNA, 27 nt, Artificial Sequence
  Description of Artificial Sequence: Synthetic oligonucleotide
cuuaaaaagacaaaccauaucacuccu

SEQ ID NO: 49063 - RNA, 27 nt, Artificial Sequence
  Description of Artificial Sequence: Synthetic oligonucleotide
gacaaccuuuaggaucuuuacugcaac

SEQ ID NO: 49064 - RNA, 27 nt, Artificial Sequence
  Description of Artificial Sequence: Synthetic oligonucleotide
gucgacaaccuuuaggaucuuuacugc

SEQ ID NO: 49065 - RNA, 27 nt, Artificial Sequence
  Description of Artificial Sequence: Synthetic oligonucleotide
acaauugccagguuguccuuugucaug

SEQ ID NO: 49066 - RNA, 27 nt, Artificial Sequence
  Description of Artificial Sequence: Synthetic oligonucleotide
ccucgcaccacugggucacaauugcca

SEQ ID NO: 49067 - RNA, 27 nt, Artificial Sequence
  Description of Artificial Sequence: Synthetic oligonucleotide
auuucaugucucuauggaugauguucu

SEQ ID NO: 49068 - RNA, 27 nt, Artificial Sequence
  Description of Artificial Sequence: Synthetic oligonucleotide
uggagaaauauauuguuggauuucaug

SEQ ID NO: 49069 - RNA, 27 nt, Artificial Sequence
  Description of Artificial Sequence: Synthetic oligonucleotide
agccuucauggagaaauauauuguugg

SEQ ID NO: 49070 - RNA, 27 nt, Artificial Sequence
  Description of Artificial Sequence: Synthetic oligonucleotide
accacuccagcgugacuuuacuguugc

SEQ ID NO: 49071 - RNA, 27 nt, Artificial Sequence
  Description of Artificial Sequence: Synthetic oligonucleotide
ccucucuuccuuuacuuucuucacaca

SEQ ID NO: 49072 - RNA, 27 nt, Artificial Sequence
  Description of Artificial Sequence: Synthetic oligonucleotide
gcccgaugcaaggauggcucggaagcg

SEQ ID NO: 49073 - RNA, 27 nt, Artificial Sequence
  Description of Artificial Sequence: Synthetic oligonucleotide
cacaguaggauauucaaccuccauuuc

SEQ ID NO: 49074 - RNA, 27 nt, Artificial Sequence
  Description of Artificial Sequence: Synthetic oligonucleotide
uuacacaguaggauauucaaccuccau

SEQ ID NO: 49075 - RNA, 27 nt, Artificial Sequence
  Description of Artificial Sequence: Synthetic oligonucleotide
uacacuacaagggaaaacucaaaaucu

SEQ ID NO: 49076 - RNA, 27 nt, Artificial Sequence
  Description of Artificial Sequence: Synthetic oligonucleotide
caaucaacaaagaacaaacaggauaaa

SEQ ID NO: 49077 - RNA, 27 nt, Artificial Sequence
  Description of Artificial Sequence: Synthetic oligonucleotide
uuucaaucaacaaagaacaaacaggau

SEQ ID NO: 49078 - RNA, 27 nt, Artificial Sequence
  Description of Artificial Sequence: Synthetic oligonucleotide
auggaagaaaaagaaggcuguagagaa

SEQ ID NO: 49079 - RNA, 27 nt, Artificial Sequence
  Description of Artificial Sequence: Synthetic oligonucleotide
uagaaggaagauuagcuauggaagaaa

SEQ ID NO: 49080 - RNA, 27 nt, Artificial Sequence
  Description of Artificial Sequence: Synthetic oligonucleotide
augaagcauucaacaggaagauuauuu

SEQ ID NO: 49081 - RNA, 27 nt, Artificial Sequence
  Description of Artificial Sequence: Synthetic oligonucleotide
caugaagcauucaacaggaagauuauu

SEQ ID NO: 49082 - RNA, 27 nt, Artificial Sequence
  Description of Artificial Sequence: Synthetic oligonucleotide
ucaaaguagaauucaagucaugaagca

SEQ ID NO: 49083 - RNA, 27 nt, Artificial Sequence
  Description of Artificial Sequence: Synthetic oligonucleotide
gucuguaguugcuucucucccucuuag

SEQ ID NO: 49084 - RNA, 27 nt, Artificial Sequence
  Description of Artificial Sequence: Synthetic oligonucleotide
guugaccuuggucugguaggagacggc

SEQ ID NO: 49085 - RNA, 27 nt, Artificial Sequence
  Description of Artificial Sequence: Synthetic oligonucleotide
gucgagauagucgggccgauugaucuc

SEQ ID NO: 49086 - RNA, 27 nt, Artificial Sequence
  Description of Artificial Sequence: Synthetic oligonucleotide
guuugggaagguuggauguucguccuc

SEQ ID NO: 49087 - RNA, 27 nt, Artificial Sequence
  Description of Artificial Sequence: Synthetic oligonucleotide
aguucuaagcuuggguuccgacccuaa

SEQ ID NO: 49088 - RNA, 27 nt, Artificial Sequence
  Description of Artificial Sequence: Synthetic oligonucleotide
uuaaaguucuaagcuuggguuccgacc

SEQ ID NO: 49089 - RNA, 27 nt, Artificial Sequence
  Description of Artificial Sequence: Synthetic oligonucleotide
guugcuuaaaguucuaagcuuggguuc

SEQ ID NO: 49090 - RNA, 27 nt, Artificial Sequence
  Description of Artificial Sequence: Synthetic oligonucleotide
gugguggucuuguugcuuaaaguucua

SEQ ID NO: 49091 - RNA, 27 nt, Artificial Sequence
  Description of Artificial Sequence: Synthetic oligonucleotide
acuuuauuucucgccacugaauaguag

SEQ ID NO: 49092 - RNA, 27 nt, Artificial Sequence
  Description of Artificial Sequence: Synthetic oligonucleotide
aacuuuauuucucgccacugaauagua

SEQ ID NO: 49093 - RNA, 27 nt, Artificial Sequence
  Description of Artificial Sequence: Synthetic oligonucleotide
ggaucauuuccuguuaucuguguuugu

SEQ ID NO: 49094 - RNA, 27 nt, Artificial Sequence
  Description of Artificial Sequence: Synthetic oligonucleotide
guuucauuucuucucuuuucuuaaggc

SEQ ID NO: 49095 - RNA, 27 nt, Artificial Sequence
  Description of Artificial Sequence: Synthetic oligonucleotide
ggaggauggaaacacacuccuucaguu

SEQ ID NO: 49096 - RNA, 27 nt, Artificial Sequence
  Description of Artificial Sequence: Synthetic oligonucleotide
ucaaagauuuucagucccgcggugaca

SEQ ID NO: 49097 - RNA, 27 nt, Artificial Sequence
  Description of Artificial Sequence: Synthetic oligonucleotide
ccugaacggcacgcuuauuucugcugu

SEQ ID NO: 49098 - RNA, 27 nt, Artificial Sequence
  Description of Artificial Sequence: Synthetic oligonucleotide
cuucuggacccugaacggcacgcuuau

SEQ ID NO: 49099 - RNA, 27 nt, Artificial Sequence
  Description of Artificial Sequence: Synthetic oligonucleotide
caagcagucuugagugacuguuucuuc

SEQ ID NO: 49100 - RNA, 27 nt, Artificial Sequence
  Description of Artificial Sequence: Synthetic oligonucleotide
ccaaagacauggaccuucuuccucuga

SEQ ID NO: 49101 - RNA, 27 nt, Artificial Sequence
  Description of Artificial Sequence: Synthetic oligonucleotide
guguuucaggcauauuuugaauacauc

SEQ ID NO: 49102 - RNA, 27 nt, Artificial Sequence
  Description of Artificial Sequence: Synthetic oligonucleotide
gagguacagagaaagggaggaaaauag

SEQ ID NO: 49103 - RNA, 27 nt, Artificial Sequence
  Description of Artificial Sequence: Synthetic oligonucleotide
ucuugucuugcucuaucuuucuuuggu

SEQ ID NO: 49104 - RNA, 27 nt, Artificial Sequence
  Description of Artificial Sequence: Synthetic oligonucleotide
uuucuugucuugcucuaucuuucuuug

SEQ ID NO: 49105 - RNA, 27 nt, Artificial Sequence
  Description of Artificial Sequence: Synthetic oligonucleotide
ggaucuuguacaaacaaaugcuuucuc

SEQ ID NO: 49106 - RNA, 27 nt, Artificial Sequence
  Description of Artificial Sequence: Synthetic oligonucleotide
ucugcaaguacguucguuuaacucaag

SEQ ID NO: 49107 - RNA, 27 nt, Artificial Sequence
  Description of Artificial Sequence: Synthetic oligonucleotide
ucuguaucgaucguucuguaucagucu

SEQ ID NO: 49108 - RNA, 27 nt, Artificial Sequence
  Description of Artificial Sequence: Synthetic oligonucleotide
auuuauuuuuauauauauauaauauau

SEQ ID NO: 49109 - RNA, 27 nt, Artificial Sequence
  Description of Artificial Sequence: Synthetic oligonucleotide
auauuuauuuuuauauauauauaauau

SEQ ID NO: 49110 - RNA, 27 nt, Artificial Sequence
  Description of Artificial Sequence: Synthetic oligonucleotide
cacagcagucaaauacauccagugaag

SEQ ID NO: 49111 - RNA, 27 nt, Artificial Sequence
  Description of Artificial Sequence: Synthetic oligonucleotide
gucucucaucuccuccucuucccuguc

SEQ ID NO: 49112 - RNA, 27 nt, Artificial Sequence
  Description of Artificial Sequence: Synthetic oligonucleotide
ccaagugggacaaaaaaaagaucaugc

SEQ ID NO: 49113 - RNA, 14 nt, Artificial Sequence
  Description of Artificial Sequence: Synthetic oligonucleotide
guauuuugaugagg

SEQ ID NO: 49114 - RNA, 12 nt, Artificial Sequence
  Description of Artificial Sequence: Synthetic oligonucleotide
ggcccagaugau

SEQ ID NO: 49115 - RNA, 14 nt, Artificial Sequence
  Description of Artificial Sequence: Synthetic oligonucleotide
gggaagaaaacuau

SEQ ID NO: 49116 - RNA, 15 nt, Artificial Sequence
  Description of Artificial Sequence: Synthetic oligonucleotide
guuuuaauuuauuuc

SEQ ID NO: 49117 - RNA, 12 nt, Artificial Sequence
  Description of Artificial Sequence: Synthetic oligonucleotide
acguagggaaau

SEQ ID NO: 49118 - RNA, 12 nt, Artificial Sequence
  Description of Artificial Sequence: Synthetic oligonucleotide
ccaggguuuacc

SEQ ID NO: 49119 - RNA, 11 nt, Artificial Sequence
  Description of Artificial Sequence: Synthetic oligonucleotide
agcaagguuua

SEQ ID NO: 49120 - RNA, 12 nt, Artificial Sequence
  Description of Artificial Sequence: Synthetic oligonucleotide
uguauuauguug

SEQ ID NO: 49121 - RNA, 15 nt, Artificial Sequence
  Description of Artificial Sequence: Synthetic oligonucleotide
uuuuaaucuuuguga

SEQ ID NO: 49122 - RNA, 14 nt, Artificial Sequence
  Description of Artificial Sequence: Synthetic oligonucleotide
uuaaucuuugugac

SEQ ID NO: 49123 - RNA, 13 nt, Artificial Sequence
  Description of Artificial Sequence: Synthetic oligonucleotide
gcugcuuaugucu

SEQ ID NO: 49124 - RNA, 14 nt, Artificial Sequence
  Description of Artificial Sequence: Synthetic oligonucleotide
aaguguuucagaag

SEQ ID NO: 49125 - RNA, 13 nt, Artificial Sequence
  Description of Artificial Sequence: Synthetic oligonucleotide
gaccaucaauaag

SEQ ID NO: 49126 - RNA, 13 nt, Artificial Sequence
  Description of Artificial Sequence: Synthetic oligonucleotide
ccaucaauaagga

SEQ ID NO: 49127 - RNA, 14 nt, Artificial Sequence
  Description of Artificial Sequence: Synthetic oligonucleotide
ucaauaaggaagaa

SEQ ID NO: 49128 - RNA, 14 nt, Artificial Sequence
  Description of Artificial Sequence: Synthetic oligonucleotide
aauaaggaagaagc

SEQ ID NO: 49129 - RNA, 13 nt, Artificial Sequence
  Description of Artificial Sequence: Synthetic oligonucleotide
aggaagaagcccu

SEQ ID NO: 49130 - RNA, 13 nt, Artificial Sequence
  Description of Artificial Sequence: Synthetic oligonucleotide
gcauaacuaaagg

SEQ ID NO: 49131 - RNA, 14 nt, Artificial Sequence
  Description of Artificial Sequence: Synthetic oligonucleotide
cauaacuaaaggug

SEQ ID NO: 49132 - RNA, 12 nt, Artificial Sequence
  Description of Artificial Sequence: Synthetic oligonucleotide
cuacaucacgcc

SEQ ID NO: 49133 - RNA, 12 nt, Artificial Sequence
  Description of Artificial Sequence: Synthetic oligonucleotide
acuggauuuaag

SEQ ID NO: 49134 - RNA, 12 nt, Artificial Sequence
  Description of Artificial Sequence: Synthetic oligonucleotide
cuggauuuaagc

SEQ ID NO: 49135 - RNA, 13 nt, Artificial Sequence
  Description of Artificial Sequence: Synthetic oligonucleotide
gauuuaagcagag

SEQ ID NO: 49136 - RNA, 13 nt, Artificial Sequence
  Description of Artificial Sequence: Synthetic oligonucleotide
auuuaagcagagu

SEQ ID NO: 49137 - RNA, 13 nt, Artificial Sequence
  Description of Artificial Sequence: Synthetic oligonucleotide
uuaagcagaguuc

SEQ ID NO: 49138 - RNA, 13 nt, Artificial Sequence
  Description of Artificial Sequence: Synthetic oligonucleotide
uaagcagaguuca

SEQ ID NO: 49139 - RNA, 14 nt, Artificial Sequence
  Description of Artificial Sequence: Synthetic oligonucleotide
agcagaguucaaaa

SEQ ID NO: 49140 - RNA, 12 nt, Artificial Sequence
  Description of Artificial Sequence: Synthetic oligonucleotide
cucagggucuga

SEQ ID NO: 49141 - RNA, 13 nt, Artificial Sequence
  Description of Artificial Sequence: Synthetic oligonucleotide
caagcaacuacau

SEQ ID NO: 49142 - RNA, 12 nt, Artificial Sequence
  Description of Artificial Sequence: Synthetic oligonucleotide
aucaauggcagc

SEQ ID NO: 49143 - RNA, 11 nt, Artificial Sequence
  Description of Artificial Sequence: Synthetic oligonucleotide
uuccagcccac

SEQ ID NO: 49144 - RNA, 12 nt, Artificial Sequence
  Description of Artificial Sequence: Synthetic oligonucleotide
cagcugagaaug

SEQ ID NO: 49145 - RNA, 13 nt, Artificial Sequence
  Description of Artificial Sequence: Synthetic oligonucleotide
aacguaucuccua

SEQ ID NO: 49146 - RNA, 14 nt, Artificial Sequence
  Description of Artificial Sequence: Synthetic oligonucleotide
ccuaaaauaauuuc

SEQ ID NO: 49147 - RNA, 13 nt, Artificial Sequence
  Description of Artificial Sequence: Synthetic oligonucleotide
uggaagauucagc

SEQ ID NO: 49148 - RNA, 12 nt, Artificial Sequence
  Description of Artificial Sequence: Synthetic oligonucleotide
uuaaacucuccu

SEQ ID NO: 49149 - RNA, 12 nt, Artificial Sequence
  Description of Artificial Sequence: Synthetic oligonucleotide
cagccuacaguu

SEQ ID NO: 49150 - RNA, 13 nt, Artificial Sequence
  Description of Artificial Sequence: Synthetic oligonucleotide
guuauguucaguc

SEQ ID NO: 49151 - RNA, 13 nt, Artificial Sequence
  Description of Artificial Sequence: Synthetic oligonucleotide
cacauacaaaaug

SEQ ID NO: 49152 - RNA, 9 nt, Artificial Sequence
  Description of Artificial Sequence: Synthetic oligonucleotide
uccuuuugc

SEQ ID NO: 49153 - RNA, 12 nt, Artificial Sequence
  Description of Artificial Sequence: Synthetic oligonucleotide
ugaccugugaag

SEQ ID NO: 49154 - RNA, 12 nt, Artificial Sequence
  Description of Artificial Sequence: Synthetic oligonucleotide
cuaucucacaca

SEQ ID NO: 49155 - RNA, 13 nt, Artificial Sequence
  Description of Artificial Sequence: Synthetic oligonucleotide
uguccucaauugu

SEQ ID NO: 49156 - RNA, 12 nt, Artificial Sequence
  Description of Artificial Sequence: Synthetic oligonucleotide
aaaccguagcug

SEQ ID NO: 49157 - RNA, 12 nt, Artificial Sequence
  Description of Artificial Sequence: Synthetic oligonucleotide
uagcuggcaagc

SEQ ID NO: 49158 - RNA, 14 nt, Artificial Sequence
  Description of Artificial Sequence: Synthetic oligonucleotide
uuguaugguuaaaa

SEQ ID NO: 49159 - RNA, 14 nt, Artificial Sequence
  Description of Artificial Sequence: Synthetic oligonucleotide
ugguuaaaagaugg

SEQ ID NO: 49160 - RNA, 13 nt, Artificial Sequence
  Description of Artificial Sequence: Synthetic oligonucleotide
cagggaauuauac

SEQ ID NO: 49161 - RNA, 12 nt, Artificial Sequence
  Description of Artificial Sequence: Synthetic oligonucleotide
acaaucuugcug

SEQ ID NO: 49162 - RNA, 13 nt, Artificial Sequence
  Description of Artificial Sequence: Synthetic oligonucleotide
ccaauaaugaaga

SEQ ID NO: 49163 - RNA, 13 nt, Artificial Sequence
  Description of Artificial Sequence: Synthetic oligonucleotide
acuuuggauguuc

SEQ ID NO: 49164 - RNA, 12 nt, Artificial Sequence
  Description of Artificial Sequence: Synthetic oligonucleotide
aaugcuuccacu

SEQ ID NO: 49165 - RNA, 11 nt, Artificial Sequence
  Description of Artificial Sequence: Synthetic oligonucleotide
gagaaaguuug

SEQ ID NO: 49166 - RNA, 11 nt, Artificial Sequence
  Description of Artificial Sequence: Synthetic oligonucleotide
aaagaacuacu

SEQ ID NO: 49167 - RNA, 12 nt, Artificial Sequence
  Description of Artificial Sequence: Synthetic oligonucleotide
uuagaaauacgg

SEQ ID NO: 49168 - RNA, 12 nt, Artificial Sequence
  Description of Artificial Sequence: Synthetic oligonucleotide
aacauggguaca

SEQ ID NO: 49169 - RNA, 14 nt, Artificial Sequence
  Description of Artificial Sequence: Synthetic oligonucleotide
aaagacacagaaga

SEQ ID NO: 49170 - RNA, 11 nt, Artificial Sequence
  Description of Artificial Sequence: Synthetic oligonucleotide
uaguagggagg

SEQ ID NO: 49171 - RNA, 12 nt, Artificial Sequence
  Description of Artificial Sequence: Synthetic oligonucleotide
gccuucugcagc

SEQ ID NO: 49172 - RNA, 10 nt, Artificial Sequence
  Description of Artificial Sequence: Synthetic oligonucleotide
ggucugguac

SEQ ID NO: 49173 - RNA, 12 nt, Artificial Sequence
  Description of Artificial Sequence: Synthetic oligonucleotide
cuaguccuuccg

SEQ ID NO: 49174 - RNA, 12 nt, Artificial Sequence
  Description of Artificial Sequence: Synthetic oligonucleotide
ccagugaauauu

SEQ ID NO: 49175 - RNA, 13 nt, Artificial Sequence
  Description of Artificial Sequence: Synthetic oligonucleotide
augaauucaaguu

SEQ ID NO: 49176 - RNA, 12 nt, Artificial Sequence
  Description of Artificial Sequence: Synthetic oligonucleotide
caggacacagau

SEQ ID NO: 49177 - RNA, 12 nt, Artificial Sequence
  Description of Artificial Sequence: Synthetic oligonucleotide
cucaaagcacag

SEQ ID NO: 49178 - RNA, 10 nt, Artificial Sequence
  Description of Artificial Sequence: Synthetic oligonucleotide
accacugcca

SEQ ID NO: 49179 - RNA, 13 nt, Artificial Sequence
  Description of Artificial Sequence: Synthetic oligonucleotide
gaaacuacuagug

SEQ ID NO: 49180 - RNA, 12 nt, Artificial Sequence
  Description of Artificial Sequence: Synthetic oligonucleotide
aagucggacagc

SEQ ID NO: 49181 - RNA, 13 nt, Artificial Sequence
  Description of Artificial Sequence: Synthetic oligonucleotide
gaaagcgaaaaau

SEQ ID NO: 49182 - RNA, 13 nt, Artificial Sequence
  Description of Artificial Sequence: Synthetic oligonucleotide
cccucugauuuag

SEQ ID NO: 49183 - RNA, 12 nt, Artificial Sequence
  Description of Artificial Sequence: Synthetic oligonucleotide
ugagcuauuuaa

SEQ ID NO: 49184 - RNA, 13 nt, Artificial Sequence
  Description of Artificial Sequence: Synthetic oligonucleotide
aaaaggugaaaaa

SEQ ID NO: 49185 - RNA, 14 nt, Artificial Sequence
  Description of Artificial Sequence: Synthetic oligonucleotide
gaaaaagcacuauu

SEQ ID NO: 49186 - RNA, 12 nt, Artificial Sequence
  Description of Artificial Sequence: Synthetic oligonucleotide
ggcugaaaagaa

SEQ ID NO: 49187 - RNA, 12 nt, Artificial Sequence
  Description of Artificial Sequence: Synthetic oligonucleotide
uaaacccuuaua

SEQ ID NO: 49188 - RNA, 13 nt, Artificial Sequence
  Description of Artificial Sequence: Synthetic oligonucleotide
cauacuauuagcc

SEQ ID NO: 49189 - RNA, 12 nt, Artificial Sequence
  Description of Artificial Sequence: Synthetic oligonucleotide
gacagaagcauu

SEQ ID NO: 49190 - RNA, 14 nt, Artificial Sequence
  Description of Artificial Sequence: Synthetic oligonucleotide
agagcaaauaagau

SEQ ID NO: 49191 - RNA, 14 nt, Artificial Sequence
  Description of Artificial Sequence: Synthetic oligonucleotide
ccaacauuuuucuc

SEQ ID NO: 49192 - RNA, 15 nt, Artificial Sequence
  Description of Artificial Sequence: Synthetic oligonucleotide
uuaaguaugagaaaa

SEQ ID NO: 49193 - RNA, 14 nt, Artificial Sequence
  Description of Artificial Sequence: Synthetic oligonucleotide
caggaauaaagaug

SEQ ID NO: 49194 - RNA, 13 nt, Artificial Sequence
  Description of Artificial Sequence: Synthetic oligonucleotide
aauuugaaugacc

SEQ ID NO: 49195 - RNA, 14 nt, Artificial Sequence
  Description of Artificial Sequence: Synthetic oligonucleotide
auguauaaagauag

SEQ ID NO: 49196 - RNA, 12 nt, Artificial Sequence
  Description of Artificial Sequence: Synthetic oligonucleotide
ggcuguaacuau

SEQ ID NO: 49197 - RNA, 11 nt, Artificial Sequence
  Description of Artificial Sequence: Synthetic oligonucleotide
ucugugaagug

SEQ ID NO: 49198 - RNA, 14 nt, Artificial Sequence
  Description of Artificial Sequence: Synthetic oligonucleotide
ccuuuaaggaaaug

SEQ ID NO: 49199 - RNA, 13 nt, Artificial Sequence
  Description of Artificial Sequence: Synthetic oligonucleotide
aaggauacaaaaa

SEQ ID NO: 49200 - RNA, 12 nt, Artificial Sequence
  Description of Artificial Sequence: Synthetic oligonucleotide
agaugcaauuug

SEQ ID NO: 49201 - RNA, 12 nt, Artificial Sequence
  Description of Artificial Sequence: Synthetic oligonucleotide
guucaaaacgaa

SEQ ID NO: 49202 - RNA, 11 nt, Artificial Sequence
  Description of Artificial Sequence: Synthetic oligonucleotide
gugaaaccuca

SEQ ID NO: 49203 - RNA, 13 nt, Artificial Sequence
  Description of Artificial Sequence: Synthetic oligonucleotide
acgaaagagaagc

SEQ ID NO: 49204 - RNA, 12 nt, Artificial Sequence
  Description of Artificial Sequence: Synthetic oligonucleotide
cuccacaagcgc

SEQ ID NO: 49205 - RNA, 14 nt, Artificial Sequence
  Description of Artificial Sequence: Synthetic oligonucleotide
gagaagauuccaaa

SEQ ID NO: 49206 - RNA, 13 nt, Artificial Sequence
  Description of Artificial Sequence: Synthetic oligonucleotide
aaucuggauucaa

SEQ ID NO: 49207 - RNA, 13 nt, Artificial Sequence
  Description of Artificial Sequence: Synthetic oligonucleotide
agaacagauuuga

SEQ ID NO: 49208 - RNA, 11 nt, Artificial Sequence
  Description of Artificial Sequence: Synthetic oligonucleotide
ccagagcugug

SEQ ID NO: 49209 - RNA, 12 nt, Artificial Sequence
  Description of Artificial Sequence: Synthetic oligonucleotide
ccucagauuguu

SEQ ID NO: 49210 - RNA, 12 nt, Artificial Sequence
  Description of Artificial Sequence: Synthetic oligonucleotide
cuauuuuaauua

SEQ ID NO: 49211 - RNA, 13 nt, Artificial Sequence
  Description of Artificial Sequence: Synthetic oligonucleotide
uuuaauuuauuaa

SEQ ID NO: 49212 - RNA, 12 nt, Artificial Sequence
  Description of Artificial Sequence: Synthetic oligonucleotide
augcaguuugaa

SEQ ID NO: 49213 - RNA, 11 nt, Artificial Sequence
  Description of Artificial Sequence: Synthetic oligonucleotide
caugcugcugg

SEQ ID NO: 49214 - RNA, 13 nt, Artificial Sequence
  Description of Artificial Sequence: Synthetic oligonucleotide
agaugugcauuuc

SEQ ID NO: 49215 - RNA, 12 nt, Artificial Sequence
  Description of Artificial Sequence: Synthetic oligonucleotide
ucaaaaccugug

SEQ ID NO: 49216 - RNA, 11 nt, Artificial Sequence
  Description of Artificial Sequence: Synthetic oligonucleotide
gaaugugggua

SEQ ID NO: 49217 - RNA, 10 nt, Artificial Sequence
  Description of Artificial Sequence: Synthetic oligonucleotide
auguggguag

SEQ ID NO: 49218 - RNA, 13 nt, Artificial Sequence
  Description of Artificial Sequence: Synthetic oligonucleotide
ugaaaaugagcau

SEQ ID NO: 49219 - RNA, 13 nt, Artificial Sequence
  Description of Artificial Sequence: Synthetic oligonucleotide
uugcuuuucaugu

SEQ ID NO: 49220 - RNA, 12 nt, Artificial Sequence
  Description of Artificial Sequence: Synthetic oligonucleotide
uguauuucuaua

SEQ ID NO: 49221 - RNA, 13 nt, Artificial Sequence
  Description of Artificial Sequence: Synthetic oligonucleotide
uuugauuaauguu

SEQ ID NO: 49222 - RNA, 12 nt, Artificial Sequence
  Description of Artificial Sequence: Synthetic oligonucleotide
caacguguauag

SEQ ID NO: 49223 - RNA, 12 nt, Artificial Sequence
  Description of Artificial Sequence: Synthetic oligonucleotide
cauauccuuggc

SEQ ID NO: 49224 - RNA, 13 nt, Artificial Sequence
  Description of Artificial Sequence: Synthetic oligonucleotide
uacuaacaucugg

SEQ ID NO: 49225 - RNA, 11 nt, Artificial Sequence
  Description of Artificial Sequence: Synthetic oligonucleotide
cauaaguugug

SEQ ID NO: 49226 - RNA, 12 nt, Artificial Sequence
  Description of Artificial Sequence: Synthetic oligonucleotide
gcaucauuuugg

SEQ ID NO: 49227 - RNA, 10 nt, Artificial Sequence
  Description of Artificial Sequence: Synthetic oligonucleotide
gcucuucuua

SEQ ID NO: 49228 - RNA, 10 nt, Artificial Sequence
  Description of Artificial Sequence: Synthetic oligonucleotide
agauuagguc

SEQ ID NO: 49229 - RNA, 12 nt, Artificial Sequence
  Description of Artificial Sequence: Synthetic oligonucleotide
auggaauugaaa

SEQ ID NO: 49230 - RNA, 13 nt, Artificial Sequence
  Description of Artificial Sequence: Synthetic oligonucleotide
cacacucauuccu

SEQ ID NO: 49231 - RNA, 12 nt, Artificial Sequence
  Description of Artificial Sequence: Synthetic oligonucleotide
uguagagguaac

SEQ ID NO: 49232 - RNA, 11 nt, Artificial Sequence
  Description of Artificial Sequence: Synthetic oligonucleotide
caaccacaugc

SEQ ID NO: 49233 - RNA, 12 nt, Artificial Sequence
  Description of Artificial Sequence: Synthetic oligonucleotide
ucggaaacaagu

SEQ ID NO: 49234 - RNA, 11 nt, Artificial Sequence
  Description of Artificial Sequence: Synthetic oligonucleotide
acucccaauaa

SEQ ID NO: 49235 - RNA, 13 nt, Artificial Sequence
  Description of Artificial Sequence: Synthetic oligonucleotide
aaugcuaagaaau

SEQ ID NO: 49236 - RNA, 11 nt, Artificial Sequence
  Description of Artificial Sequence: Synthetic oligonucleotide
gucuuucucua

SEQ ID NO: 49237 - RNA, 11 nt, Artificial Sequence
  Description of Artificial Sequence: Synthetic oligonucleotide
ugaauuucagg

SEQ ID NO: 49238 - RNA, 13 nt, Artificial Sequence
  Description of Artificial Sequence: Synthetic oligonucleotide
cgauucccucuca

SEQ ID NO: 49239 - RNA, 11 nt, Artificial Sequence
  Description of Artificial Sequence: Synthetic oligonucleotide
aggaaagugaa

SEQ ID NO: 49240 - RNA, 12 nt, Artificial Sequence
  Description of Artificial Sequence: Synthetic oligonucleotide
gaggcugcaugc

SEQ ID NO: 49241 - RNA, 11 nt, Artificial Sequence
  Description of Artificial Sequence: Synthetic oligonucleotide
ucucugaacag

SEQ ID NO: 49242 - RNA, 12 nt, Artificial Sequence
  Description of Artificial Sequence: Synthetic oligonucleotide
aacuuggcugua

SEQ ID NO: 49243 - RNA, 12 nt, Artificial Sequence
  Description of Artificial Sequence: Synthetic oligonucleotide
agaagccaaaau

SEQ ID NO: 49244 - RNA, 14 nt, Artificial Sequence
  Description of Artificial Sequence: Synthetic oligonucleotide
auuaaaagaagucc

SEQ ID NO: 49245 - RNA, 14 nt, Artificial Sequence
  Description of Artificial Sequence: Synthetic oligonucleotide
gaauccggauuauc

SEQ ID NO: 49246 - RNA, 12 nt, Artificial Sequence
  Description of Artificial Sequence: Synthetic oligonucleotide
aaugugacauca

SEQ ID NO: 49247 - RNA, 13 nt, Artificial Sequence
  Description of Artificial Sequence: Synthetic oligonucleotide
caucaaagcaagu

SEQ ID NO: 49248 - RNA, 11 nt, Artificial Sequence
  Description of Artificial Sequence: Synthetic oligonucleotide
agagagagaaa

SEQ ID NO: 49249 - RNA, 13 nt, Artificial Sequence
  Description of Artificial Sequence: Synthetic oligonucleotide
ucgcuguaguauu

SEQ ID NO: 49250 - RNA, 14 nt, Artificial Sequence
  Description of Artificial Sequence: Synthetic oligonucleotide
cgcuguaguauuua

SEQ ID NO: 49251 - RNA, 13 nt, Artificial Sequence
  Description of Artificial Sequence: Synthetic oligonucleotide
auuuaagcccaua

SEQ ID NO: 49252 - RNA, 15 nt, Artificial Sequence
  Description of Artificial Sequence: Synthetic oligonucleotide
auuaaaauaaacaug

SEQ ID NO: 49253 - RNA, 12 nt, Artificial Sequence
  Description of Artificial Sequence: Synthetic oligonucleotide
cuguucugaucg

SEQ ID NO: 49254 - RNA, 16 nt, Artificial Sequence
  Description of Artificial Sequence: Synthetic oligonucleotide
aaauaauuugaacuuu

SEQ ID NO: 49255 - RNA, 12 nt, Artificial Sequence
  Description of Artificial Sequence: Synthetic oligonucleotide
ugcgaccuuaau

SEQ ID NO: 49256 - RNA, 11 nt, Artificial Sequence
  Description of Artificial Sequence: Synthetic oligonucleotide
cugagaaagcu

SEQ ID NO: 49257 - RNA, 13 nt, Artificial Sequence
  Description of Artificial Sequence: Synthetic oligonucleotide
aguaaagaugcua

SEQ ID NO: 49258 - RNA, 12 nt, Artificial Sequence
  Description of Artificial Sequence: Synthetic oligonucleotide
cugcuuaauugc

SEQ ID NO: 49259 - RNA, 14 nt, Artificial Sequence
  Description of Artificial Sequence: Synthetic oligonucleotide
uaccauaugaauga

SEQ ID NO: 49260 - RNA, 12 nt, Artificial Sequence
  Description of Artificial Sequence: Synthetic oligonucleotide
aacuuucuuauc

SEQ ID NO: 49261 - RNA, 13 nt, Artificial Sequence
  Description of Artificial Sequence: Synthetic oligonucleotide
ccuugcaugacau

SEQ ID NO: 49262 - RNA, 14 nt, Artificial Sequence
  Description of Artificial Sequence: Synthetic oligonucleotide
ugaauuuguauaug

SEQ ID NO: 49263 - RNA, 12 nt, Artificial Sequence
  Description of Artificial Sequence: Synthetic oligonucleotide
gaauccuaguag

SEQ ID NO: 49264 - RNA, 10 nt, Artificial Sequence
  Description of Artificial Sequence: Synthetic oligonucleotide
gaaagggaag

SEQ ID NO: 49265 - RNA, 11 nt, Artificial Sequence
  Description of Artificial Sequence: Synthetic oligonucleotide
uaucggcaugc

SEQ ID NO: 49266 - RNA, 12 nt, Artificial Sequence
  Description of Artificial Sequence: Synthetic oligonucleotide
caccucauagua

SEQ ID NO: 49267 - RNA, 11 nt, Artificial Sequence
  Description of Artificial Sequence: Synthetic oligonucleotide
ccagaauugcc

SEQ ID NO: 49268 - RNA, 11 nt, Artificial Sequence
  Description of Artificial Sequence: Synthetic oligonucleotide
uggugaucugg

SEQ ID NO: 49269 - RNA, 12 nt, Artificial Sequence
  Description of Artificial Sequence: Synthetic oligonucleotide
gaucuggguaau

SEQ ID NO: 49270 - RNA, 12 nt, Artificial Sequence
  Description of Artificial Sequence: Synthetic oligonucleotide
ggaugugaugaa

SEQ ID NO: 49271 - RNA, 12 nt, Artificial Sequence
  Description of Artificial Sequence: Synthetic oligonucleotide
cauuuccacagc

SEQ ID NO: 49272 - RNA, 11 nt, Artificial Sequence
  Description of Artificial Sequence: Synthetic oligonucleotide
acagcuacacc

SEQ ID NO: 49273 - RNA, 12 nt, Artificial Sequence
  Description of Artificial Sequence: Synthetic oligonucleotide
ugcaguucuuac

SEQ ID NO: 49274 - RNA, 12 nt, Artificial Sequence
  Description of Artificial Sequence: Synthetic oligonucleotide
acgagaagaaga

SEQ ID NO: 49275 - RNA, 12 nt, Artificial Sequence
  Description of Artificial Sequence: Synthetic oligonucleotide
cgagaagaagau

SEQ ID NO: 49276 - RNA, 15 nt, Artificial Sequence
  Description of Artificial Sequence: Synthetic oligonucleotide
aagaagaucauuuac

SEQ ID NO: 49277 - RNA, 11 nt, Artificial Sequence
  Description of Artificial Sequence: Synthetic oligonucleotide
agaggaagagg

SEQ ID NO: 49278 - RNA, 12 nt, Artificial Sequence
  Description of Artificial Sequence: Synthetic oligonucleotide
gaggaagaggug

SEQ ID NO: 49279 - RNA, 13 nt, Artificial Sequence
  Description of Artificial Sequence: Synthetic oligonucleotide
cuacuuugagggc

SEQ ID NO: 49280 - RNA, 12 nt, Artificial Sequence
  Description of Artificial Sequence: Synthetic oligonucleotide
agggcaucuccu

SEQ ID NO: 49281 - RNA, 10 nt, Artificial Sequence
  Description of Artificial Sequence: Synthetic oligonucleotide
ggagugauau

SEQ ID NO: 49282 - RNA, 11 nt, Artificial Sequence
  Description of Artificial Sequence: Synthetic oligonucleotide
gagugauaugg

SEQ ID NO: 49283 - RNA, 12 nt, Artificial Sequence
  Description of Artificial Sequence: Synthetic oligonucleotide
ugcaguaaagau

SEQ ID NO: 49284 - RNA, 13 nt, Artificial Sequence
  Description of Artificial Sequence: Synthetic oligonucleotide
aguaaagauccua

SEQ ID NO: 49285 - RNA, 12 nt, Artificial Sequence
  Description of Artificial Sequence: Synthetic oligonucleotide
ugacaaaggaca

SEQ ID NO: 49286 - RNA, 13 nt, Artificial Sequence
  Description of Artificial Sequence: Synthetic oligonucleotide
gcaauugugaccc

SEQ ID NO: 49287 - RNA, 12 nt, Artificial Sequence
  Description of Artificial Sequence: Synthetic oligonucleotide
aacaucauccau

SEQ ID NO: 49288 - RNA, 12 nt, Artificial Sequence
  Description of Artificial Sequence: Synthetic oligonucleotide
ugaaauccaaca

SEQ ID NO: 49289 - RNA, 15 nt, Artificial Sequence
  Description of Artificial Sequence: Synthetic oligonucleotide
aacaauauauuucuc

SEQ ID NO: 49290 - RNA, 14 nt, Artificial Sequence
  Description of Artificial Sequence: Synthetic oligonucleotide
aacaguaaagucac

SEQ ID NO: 49291 - RNA, 14 nt, Artificial Sequence
  Description of Artificial Sequence: Synthetic oligonucleotide
ugugaagaaaguaa

SEQ ID NO: 49292 - RNA, 13 nt, Artificial Sequence
  Description of Artificial Sequence: Synthetic oligonucleotide
cuuccgagccauc

SEQ ID NO: 49293 - RNA, 12 nt, Artificial Sequence
  Description of Artificial Sequence: Synthetic oligonucleotide
aauggagguuga

SEQ ID NO: 49294 - RNA, 12 nt, Artificial Sequence
  Description of Artificial Sequence: Synthetic oligonucleotide
ggagguugaaua

SEQ ID NO: 49295 - RNA, 13 nt, Artificial Sequence
  Description of Artificial Sequence: Synthetic oligonucleotide
auuuugaguuuuc

SEQ ID NO: 49296 - RNA, 12 nt, Artificial Sequence
  Description of Artificial Sequence: Synthetic oligonucleotide
uauccuguuugu

SEQ ID NO: 49297 - RNA, 11 nt, Artificial Sequence
  Description of Artificial Sequence: Synthetic oligonucleotide
ccuguuuguuc

SEQ ID NO: 49298 - RNA, 10 nt, Artificial Sequence
  Description of Artificial Sequence: Synthetic oligonucleotide
cucuacagcc

SEQ ID NO: 49299 - RNA, 12 nt, Artificial Sequence
  Description of Artificial Sequence: Synthetic oligonucleotide
ucuuccauagcu

SEQ ID NO: 49300 - RNA, 12 nt, Artificial Sequence
  Description of Artificial Sequence: Synthetic oligonucleotide
auaaucuuccug

SEQ ID NO: 49301 - RNA, 12 nt, Artificial Sequence
  Description of Artificial Sequence: Synthetic oligonucleotide
uaaucuuccugu

SEQ ID NO: 49302 - RNA, 12 nt, Artificial Sequence
  Description of Artificial Sequence: Synthetic oligonucleotide
cuucaugacuug

SEQ ID NO: 49303 - RNA, 12 nt, Artificial Sequence
  Description of Artificial Sequence: Synthetic oligonucleotide
aagagggagaga

SEQ ID NO: 49304 - RNA, 12 nt, Artificial Sequence
  Description of Artificial Sequence: Synthetic oligonucleotide
cgucuccuacca

SEQ ID NO: 49305 - RNA, 12 nt, Artificial Sequence
  Description of Artificial Sequence: Synthetic oligonucleotide
gaucaaucggcc

SEQ ID NO: 49306 - RNA, 12 nt, Artificial Sequence
  Description of Artificial Sequence: Synthetic oligonucleotide
ggacgaacaucc

SEQ ID NO: 49307 - RNA, 11 nt, Artificial Sequence
  Description of Artificial Sequence: Synthetic oligonucleotide
agggucggaac

SEQ ID NO: 49308 - RNA, 10 nt, Artificial Sequence
  Description of Artificial Sequence: Synthetic oligonucleotide
ucggaaccca

SEQ ID NO: 49309 - RNA, 11 nt, Artificial Sequence
  Description of Artificial Sequence: Synthetic oligonucleotide
acccaagcuua

SEQ ID NO: 49310 - RNA, 14 nt, Artificial Sequence
  Description of Artificial Sequence: Synthetic oligonucleotide
gaacuuuaagcaac

SEQ ID NO: 49311 - RNA, 11 nt, Artificial Sequence
  Description of Artificial Sequence: Synthetic oligonucleotide
acuauucagug

SEQ ID NO: 49312 - RNA, 11 nt, Artificial Sequence
  Description of Artificial Sequence: Synthetic oligonucleotide
cuauucagugg

SEQ ID NO: 49313 - RNA, 13 nt, Artificial Sequence
  Description of Artificial Sequence: Synthetic oligonucleotide
aaacacagauaac

SEQ ID NO: 49314 - RNA, 12 nt, Artificial Sequence
  Description of Artificial Sequence: Synthetic oligonucleotide
cuuaagaaaaga

SEQ ID NO: 49315 - RNA, 12 nt, Artificial Sequence
  Description of Artificial Sequence: Synthetic oligonucleotide
cugaaggagugu

SEQ ID NO: 49316 - RNA, 10 nt, Artificial Sequence
  Description of Artificial Sequence: Synthetic oligonucleotide
ucaccgcggg

SEQ ID NO: 49317 - RNA, 14 nt, Artificial Sequence
  Description of Artificial Sequence: Synthetic oligonucleotide
agcagaaauaagcg

SEQ ID NO: 49318 - RNA, 12 nt, Artificial Sequence
  Description of Artificial Sequence: Synthetic oligonucleotide
aagcgugccguu

SEQ ID NO: 49319 - RNA, 12 nt, Artificial Sequence
  Description of Artificial Sequence: Synthetic oligonucleotide
agaaacagucac

SEQ ID NO: 49320 - RNA, 12 nt, Artificial Sequence
  Description of Artificial Sequence: Synthetic oligonucleotide
agaggaagaagg

SEQ ID NO: 49321 - RNA, 14 nt, Artificial Sequence
  Description of Artificial Sequence: Synthetic oligonucleotide
uguauucaaaauau

SEQ ID NO: 49322 - RNA, 13 nt, Artificial Sequence
  Description of Artificial Sequence: Synthetic oligonucleotide
auuuuccucccuu

SEQ ID NO: 49323 - RNA, 13 nt, Artificial Sequence
  Description of Artificial Sequence: Synthetic oligonucleotide
caaagaaagauag

SEQ ID NO: 49324 - RNA, 12 nt, Artificial Sequence
  Description of Artificial Sequence: Synthetic oligonucleotide
aagaaagauaga

SEQ ID NO: 49325 - RNA, 13 nt, Artificial Sequence
  Description of Artificial Sequence: Synthetic oligonucleotide
gaaagcauuuguu

SEQ ID NO: 49326 - RNA, 13 nt, Artificial Sequence
  Description of Artificial Sequence: Synthetic oligonucleotide
ugaguuaaacgaa

SEQ ID NO: 49327 - RNA, 12 nt, Artificial Sequence
  Description of Artificial Sequence: Synthetic oligonucleotide
acugauacagaa

SEQ ID NO: 49328 - RNA, 12 nt, Artificial Sequence
  Description of Artificial Sequence: Synthetic oligonucleotide
auauuauauaua

SEQ ID NO: 49329 - RNA, 12 nt, Artificial Sequence
  Description of Artificial Sequence: Synthetic oligonucleotide
auuauauauaua

SEQ ID NO: 49330 - RNA, 12 nt, Artificial Sequence
  Description of Artificial Sequence: Synthetic oligonucleotide
ucacuggaugua

SEQ ID NO: 49331 - RNA, 12 nt, Artificial Sequence
  Description of Artificial Sequence: Synthetic oligonucleotide
cagggaagagga

SEQ ID NO: 49332 - RNA, 15 nt, Artificial Sequence
  Description of Artificial Sequence: Synthetic oligonucleotide
augaucuuuuuuuug

SEQ ID NO: 49333 - RNA, 11 nt, Artificial Sequence
  Description of Artificial Sequence: Synthetic oligonucleotide
aguucacggcc

SEQ ID NO: 49334 - RNA, 13 nt, Artificial Sequence
  Description of Artificial Sequence: Synthetic oligonucleotide
caccaucacacca

SEQ ID NO: 49335 - RNA, 11 nt, Artificial Sequence
  Description of Artificial Sequence: Synthetic oligonucleotide
ccugcggguuu

SEQ ID NO: 49336 - RNA, 10 nt, Artificial Sequence
  Description of Artificial Sequence: Synthetic oligonucleotide
auccaguuug

SEQ ID NO: 49337 - RNA, 13 nt, Artificial Sequence
  Description of Artificial Sequence: Synthetic oligonucleotide
guuaaggacuucu

SEQ ID NO: 49338 - RNA, 13 nt, Artificial Sequence
  Description of Artificial Sequence: Synthetic oligonucleotide
cagugggacagag

SEQ ID NO: 49339 - RNA, 14 nt, Artificial Sequence
  Description of Artificial Sequence: Synthetic oligonucleotide
aauuuguuauugug

SEQ ID NO: 49340 - RNA, 13 nt, Artificial Sequence
  Description of Artificial Sequence: Synthetic oligonucleotide
uucaaaugcauuu

SEQ ID NO: 49341 - RNA, 10 nt, Artificial Sequence
  Description of Artificial Sequence: Synthetic oligonucleotide
caggaaagcc

SEQ ID NO: 49342 - RNA, 11 nt, Artificial Sequence
  Description of Artificial Sequence: Synthetic oligonucleotide
aggaaagcccu

SEQ ID NO: 49343 - RNA, 12 nt, Artificial Sequence
  Description of Artificial Sequence: Synthetic oligonucleotide
cccagcauggcc

SEQ ID NO: 49344 - RNA, 11 nt, Artificial Sequence
  Description of Artificial Sequence: Synthetic oligonucleotide
cuucucccuga

SEQ ID NO: 49345 - RNA, 12 nt, Artificial Sequence
  Description of Artificial Sequence: Synthetic oligonucleotide
gaagaagcccuu

SEQ ID NO: 49346 - RNA, 12 nt, Artificial Sequence
  Description of Artificial Sequence: Synthetic oligonucleotide
agaagcccuuca

SEQ ID NO: 49347 - RNA, 11 nt, Artificial Sequence
  Description of Artificial Sequence: Synthetic oligonucleotide
gcccuucagcg

SEQ ID NO: 49348 - RNA, 11 nt, Artificial Sequence
  Description of Artificial Sequence: Synthetic oligonucleotide
ccuucagcggc

SEQ ID NO: 49349 - RNA, 12 nt, Artificial Sequence
  Description of Artificial Sequence: Synthetic oligonucleotide
ucagcggccagu

SEQ ID NO: 49350 - RNA, 12 nt, Artificial Sequence
  Description of Artificial Sequence: Synthetic oligonucleotide
ugaaaagcuccg

SEQ ID NO: 49351 - RNA, 11 nt, Artificial Sequence
  Description of Artificial Sequence: Synthetic oligonucleotide
aaaagcuccgg

SEQ ID NO: 49352 - RNA, 13 nt, Artificial Sequence
  Description of Artificial Sequence: Synthetic oligonucleotide
agucaacagucug

SEQ ID NO: 49353 - RNA, 13 nt, Artificial Sequence
  Description of Artificial Sequence: Synthetic oligonucleotide
cagaguucaaaag

SEQ ID NO: 49354 - RNA, 13 nt, Artificial Sequence
  Description of Artificial Sequence: Synthetic oligonucleotide
agaguucaaaagc

SEQ ID NO: 49355 - RNA, 12 nt, Artificial Sequence
  Description of Artificial Sequence: Synthetic oligonucleotide
uucaaaagcccu

SEQ ID NO: 49356 - RNA, 12 nt, Artificial Sequence
  Description of Artificial Sequence: Synthetic oligonucleotide
ucaaaagcccuu

SEQ ID NO: 49357 - RNA, 12 nt, Artificial Sequence
  Description of Artificial Sequence: Synthetic oligonucleotide
aaaagcccuuca

SEQ ID NO: 49358 - RNA, 12 nt, Artificial Sequence
  Description of Artificial Sequence: Synthetic oligonucleotide
aaagcccuucag

SEQ ID NO: 49359 - RNA, 13 nt, Artificial Sequence
  Description of Artificial Sequence: Synthetic oligonucleotide
gugaagccgcucg

SEQ ID NO: 49360 - RNA, 12 nt, Artificial Sequence
  Description of Artificial Sequence: Synthetic oligonucleotide
cacgccagucaa

SEQ ID NO: 49361 - RNA, 13 nt, Artificial Sequence
  Description of Artificial Sequence: Synthetic oligonucleotide
uucuuggugcgug

SEQ ID NO: 49362 - RNA, 14 nt, Artificial Sequence
  Description of Artificial Sequence: Synthetic oligonucleotide
auuggauucaucag

SEQ ID NO: 49363 - RNA, 13 nt, Artificial Sequence
  Description of Artificial Sequence: Synthetic oligonucleotide
uggaauaccuaag

SEQ ID NO: 49364 - RNA, 12 nt, Artificial Sequence
  Description of Artificial Sequence: Synthetic oligonucleotide
auuugaggcuca

SEQ ID NO: 49365 - RNA, 11 nt, Artificial Sequence
  Description of Artificial Sequence: Synthetic oligonucleotide
ucuacaauugg

SEQ ID NO: 49366 - RNA, 12 nt, Artificial Sequence
  Description of Artificial Sequence: Synthetic oligonucleotide
uaguuaggagcc

SEQ ID NO: 49367 - RNA, 13 nt, Artificial Sequence
  Description of Artificial Sequence: Synthetic oligonucleotide
agucaauauccac

SEQ ID NO: 49368 - RNA, 13 nt, Artificial Sequence
  Description of Artificial Sequence: Synthetic oligonucleotide
auguucagucaca

SEQ ID NO: 49369 - RNA, 12 nt, Artificial Sequence
  Description of Artificial Sequence: Synthetic oligonucleotide
acacacacauac

SEQ ID NO: 49370 - RNA, 12 nt, Artificial Sequence
  Description of Artificial Sequence: Synthetic oligonucleotide
uuccuuuugcuu

SEQ ID NO: 49371 - RNA, 16 nt, Artificial Sequence
  Description of Artificial Sequence: Synthetic oligonucleotide
uuuuaaaguaauuuuu

SEQ ID NO: 49372 - RNA, 13 nt, Artificial Sequence
  Description of Artificial Sequence: Synthetic oligonucleotide
caacagucaaugg

SEQ ID NO: 49373 - RNA, 13 nt, Artificial Sequence
  Description of Artificial Sequence: Synthetic oligonucleotide
ucgacaaaccaau

SEQ ID NO: 49374 - RNA, 12 nt, Artificial Sequence
  Description of Artificial Sequence: Synthetic oligonucleotide
acugcuaccacu

SEQ ID NO: 49375 - RNA, 13 nt, Artificial Sequence
  Description of Artificial Sequence: Synthetic oligonucleotide
gcaagcggucuua

SEQ ID NO: 49376 - RNA, 13 nt, Artificial Sequence
  Description of Artificial Sequence: Synthetic oligonucleotide
ggucuuaccggcu

SEQ ID NO: 49377 - RNA, 11 nt, Artificial Sequence
  Description of Artificial Sequence: Synthetic oligonucleotide
gauggguuacc

SEQ ID NO: 49378 - RNA, 11 nt, Artificial Sequence
  Description of Artificial Sequence: Synthetic oligonucleotide
guuaccugcga

SEQ ID NO: 49379 - RNA, 12 nt, Artificial Sequence
  Description of Artificial Sequence: Synthetic oligonucleotide
aaucuugcugag

SEQ ID NO: 49380 - RNA, 13 nt, Artificial Sequence
  Description of Artificial Sequence: Synthetic oligonucleotide
agcauaaaacagu

SEQ ID NO: 49381 - RNA, 12 nt, Artificial Sequence
  Description of Artificial Sequence: Synthetic oligonucleotide
guccuuuauccu

SEQ ID NO: 49382 - RNA, 12 nt, Artificial Sequence
  Description of Artificial Sequence: Synthetic oligonucleotide
caacgcaaguug

SEQ ID NO: 49383 - RNA, 13 nt, Artificial Sequence
  Description of Artificial Sequence: Synthetic oligonucleotide
aaacugaaaccau

SEQ ID NO: 49384 - RNA, 14 nt, Artificial Sequence
  Description of Artificial Sequence: Synthetic oligonucleotide
acuuuguuaaauau

SEQ ID NO: 49385 - RNA, 14 nt, Artificial Sequence
  Description of Artificial Sequence: Synthetic oligonucleotide
guauauuaaaaguu

SEQ ID NO: 49386 - RNA, 13 nt, Artificial Sequence
  Description of Artificial Sequence: Synthetic oligonucleotide
guuuugacuuaac

SEQ ID NO: 49387 - RNA, 13 nt, Artificial Sequence
  Description of Artificial Sequence: Synthetic oligonucleotide
gcaaacucagcac

SEQ ID NO: 49388 - RNA, 11 nt, Artificial Sequence
  Description of Artificial Sequence: Synthetic oligonucleotide
ugcugaccuca

SEQ ID NO: 49389 - RNA, 14 nt, Artificial Sequence
  Description of Artificial Sequence: Synthetic oligonucleotide
uuuauucagaucgc

SEQ ID NO: 49390 - RNA, 13 nt, Artificial Sequence
  Description of Artificial Sequence: Synthetic oligonucleotide
aggguucugggau

SEQ ID NO: 49391 - RNA, 15 nt, Artificial Sequence
  Description of Artificial Sequence: Synthetic oligonucleotide
auauuggaaauuaug

SEQ ID NO: 49392 - RNA, 13 nt, Artificial Sequence
  Description of Artificial Sequence: Synthetic oligonucleotide
auggaagcacuag

SEQ ID NO: 49393 - RNA, 13 nt, Artificial Sequence
  Description of Artificial Sequence: Synthetic oligonucleotide
guuuuuaugugga

SEQ ID NO: 49394 - RNA, 12 nt, Artificial Sequence
  Description of Artificial Sequence: Synthetic oligonucleotide
ggaauugguaga

SEQ ID NO: 49395 - RNA, 13 nt, Artificial Sequence
  Description of Artificial Sequence: Synthetic oligonucleotide
uuagacuuggaga

SEQ ID NO: 49396 - RNA, 13 nt, Artificial Sequence
  Description of Artificial Sequence: Synthetic oligonucleotide
uuacaguauucca

SEQ ID NO: 49397 - RNA, 15 nt, Artificial Sequence
  Description of Artificial Sequence: Synthetic oligonucleotide
ccacugaugaauuaa

SEQ ID NO: 49398 - RNA, 12 nt, Artificial Sequence
  Description of Artificial Sequence: Synthetic oligonucleotide
ccacaucaucac

SEQ ID NO: 49399 - RNA, 13 nt, Artificial Sequence
  Description of Artificial Sequence: Synthetic oligonucleotide
cucaccaaacaga

SEQ ID NO: 49400 - RNA, 12 nt, Artificial Sequence
  Description of Artificial Sequence: Synthetic oligonucleotide
ggaacaugaugg

SEQ ID NO: 49401 - RNA, 12 nt, Artificial Sequence
  Description of Artificial Sequence: Synthetic oligonucleotide
cauguagacugc

SEQ ID NO: 49402 - RNA, 13 nt, Artificial Sequence
  Description of Artificial Sequence: Synthetic oligonucleotide
ggaucuauuuaug

SEQ ID NO: 49403 - RNA, 12 nt, Artificial Sequence
  Description of Artificial Sequence: Synthetic oligonucleotide
gcacuauuauca

SEQ ID NO: 49404 - RNA, 11 nt, Artificial Sequence
  Description of Artificial Sequence: Synthetic oligonucleotide
aucaguucugc

SEQ ID NO: 49405 - RNA, 13 nt, Artificial Sequence
  Description of Artificial Sequence: Synthetic oligonucleotide
agauuaaaccuac

SEQ ID NO: 49406 - RNA, 13 nt, Artificial Sequence
  Description of Artificial Sequence: Synthetic oligonucleotide
auaaaauccuucu

SEQ ID NO: 49407 - RNA, 12 nt, Artificial Sequence
  Description of Artificial Sequence: Synthetic oligonucleotide
aaugcuguagac

SEQ ID NO: 49408 - RNA, 13 nt, Artificial Sequence
  Description of Artificial Sequence: Synthetic oligonucleotide
uugauaggaauag

SEQ ID NO: 49409 - RNA, 11 nt, Artificial Sequence
  Description of Artificial Sequence: Synthetic oligonucleotide
aauggcccuga

SEQ ID NO: 49410 - RNA, 11 nt, Artificial Sequence
  Description of Artificial Sequence: Synthetic oligonucleotide
uuccucaagca

SEQ ID NO: 49411 - RNA, 10 nt, Artificial Sequence
  Description of Artificial Sequence: Synthetic oligonucleotide
guucagccca

SEQ ID NO: 49412 - RNA, 11 nt, Artificial Sequence
  Description of Artificial Sequence: Synthetic oligonucleotide
gcugcugaacc

SEQ ID NO: 49413 - RNA, 12 nt, Artificial Sequence
  Description of Artificial Sequence: Synthetic oligonucleotide
aaguucucuuca

SEQ ID NO: 49414 - RNA, 11 nt, Artificial Sequence
  Description of Artificial Sequence: Synthetic oligonucleotide
ccagccuagag

SEQ ID NO: 49415 - RNA, 13 nt, Artificial Sequence
  Description of Artificial Sequence: Synthetic oligonucleotide
cucugugaagugu

SEQ ID NO: 49416 - RNA, 14 nt, Artificial Sequence
  Description of Artificial Sequence: Synthetic oligonucleotide
ugagaaaauuucaa

SEQ ID NO: 49417 - RNA, 11 nt, Artificial Sequence
  Description of Artificial Sequence: Synthetic oligonucleotide
aauccuccuga

SEQ ID NO: 49418 - RNA, 12 nt, Artificial Sequence
  Description of Artificial Sequence: Synthetic oligonucleotide
gugacaucauau

SEQ ID NO: 49419 - RNA, 13 nt, Artificial Sequence
  Description of Artificial Sequence: Synthetic oligonucleotide
aaucuucaucaua

SEQ ID NO: 49420 - RNA, 13 nt, Artificial Sequence
  Description of Artificial Sequence: Synthetic oligonucleotide
gacuagcuauuaa

SEQ ID NO: 49421 - RNA, 14 nt, Artificial Sequence
  Description of Artificial Sequence: Synthetic oligonucleotide
ucucuacuaaaaau

SEQ ID NO: 49422 - RNA, 12 nt, Artificial Sequence
  Description of Artificial Sequence: Synthetic oligonucleotide
ucuaucucgccu

SEQ ID NO: 49423 - RNA, 13 nt, Artificial Sequence
  Description of Artificial Sequence: Synthetic oligonucleotide
cuucgguccaguu

SEQ ID NO: 49424 - RNA, 11 nt, Artificial Sequence
  Description of Artificial Sequence: Synthetic oligonucleotide
gauguagccgc

SEQ ID NO: 49425 - RNA, 12 nt, Artificial Sequence
  Description of Artificial Sequence: Synthetic oligonucleotide
ugaggagacuug

SEQ ID NO: 49426 - RNA, 12 nt, Artificial Sequence
  Description of Artificial Sequence: Synthetic oligonucleotide
gaguagugagga

SEQ ID NO: 49427 - RNA, 14 nt, Artificial Sequence
  Description of Artificial Sequence: Synthetic oligonucleotide
cagaugaguacaaa

SEQ ID NO: 49428 - RNA, 13 nt, Artificial Sequence
  Description of Artificial Sequence: Synthetic oligonucleotide
guuguuaaugggc

SEQ ID NO: 49429 - RNA, 13 nt, Artificial Sequence
  Description of Artificial Sequence: Synthetic oligonucleotide
uuuuuaauuuauu

SEQ ID NO: 49430 - RNA, 12 nt, Artificial Sequence
  Description of Artificial Sequence: Synthetic oligonucleotide
uauuuaaauaug

SEQ ID NO: 49431 - RNA, 13 nt, Artificial Sequence
  Description of Artificial Sequence: Synthetic oligonucleotide
uauccuuuguuuc

SEQ ID NO: 49432 - RNA, 14 nt, Artificial Sequence
  Description of Artificial Sequence: Synthetic oligonucleotide
cgucuaaguguuug

SEQ ID NO: 49433 - RNA, 12 nt, Artificial Sequence
  Description of Artificial Sequence: Synthetic oligonucleotide
accugugacaaa

SEQ ID NO: 49434 - RNA, 13 nt, Artificial Sequence
  Description of Artificial Sequence: Synthetic oligonucleotide
ccaggcugaauua

SEQ ID NO: 49435 - RNA, 14 nt, Artificial Sequence
  Description of Artificial Sequence: Synthetic oligonucleotide
gucauucuuacaau

SEQ ID NO: 49436 - RNA, 15 nt, Artificial Sequence
  Description of Artificial Sequence: Synthetic oligonucleotide
ucauucuuacaauug

SEQ ID NO: 49437 - RNA, 12 nt, Artificial Sequence
  Description of Artificial Sequence: Synthetic oligonucleotide
cagagaguguac

SEQ ID NO: 49438 - RNA, 12 nt, Artificial Sequence
  Description of Artificial Sequence: Synthetic oligonucleotide
agaacucagcag

SEQ ID NO: 49439 - RNA, 13 nt, Artificial Sequence
  Description of Artificial Sequence: Synthetic oligonucleotide
uuuauuuucagua

SEQ ID NO: 49440 - RNA, 12 nt, Artificial Sequence
  Description of Artificial Sequence: Synthetic oligonucleotide
ucuuaaauggaa

SEQ ID NO: 49441 - RNA, 13 nt, Artificial Sequence
  Description of Artificial Sequence: Synthetic oligonucleotide
ugccuaaaauugu

SEQ ID NO: 49442 - RNA, 12 nt, Artificial Sequence
  Description of Artificial Sequence: Synthetic oligonucleotide
agacugugagcu

SEQ ID NO: 49443 - RNA, 14 nt, Artificial Sequence
  Description of Artificial Sequence: Synthetic oligonucleotide
ugcuuuuuauuaau

SEQ ID NO: 49444 - RNA, 13 nt, Artificial Sequence
  Description of Artificial Sequence: Synthetic oligonucleotide
cucuucuuacauu

SEQ ID NO: 49445 - RNA, 15 nt, Artificial Sequence
  Description of Artificial Sequence: Synthetic oligonucleotide
cauuuguaaaaaugu

SEQ ID NO: 49446 - RNA, 15 nt, Artificial Sequence
  Description of Artificial Sequence: Synthetic oligonucleotide
aucuuaauucauauu

SEQ ID NO: 49447 - RNA, 13 nt, Artificial Sequence
  Description of Artificial Sequence: Synthetic oligonucleotide
gaacuaaucauga

SEQ ID NO: 49448 - RNA, 12 nt, Artificial Sequence
  Description of Artificial Sequence: Synthetic oligonucleotide
ucugcucuuggg

SEQ ID NO: 49449 - RNA, 13 nt, Artificial Sequence
  Description of Artificial Sequence: Synthetic oligonucleotide
caguagcuuugag

SEQ ID NO: 49450 - RNA, 14 nt, Artificial Sequence
  Description of Artificial Sequence: Synthetic oligonucleotide
cacguaauauuuca

SEQ ID NO: 49451 - RNA, 13 nt, Artificial Sequence
  Description of Artificial Sequence: Synthetic oligonucleotide
uauucucuucacu

SEQ ID NO: 49452 - RNA, 14 nt, Artificial Sequence
  Description of Artificial Sequence: Synthetic oligonucleotide
cuaaugcuaagaaa

SEQ ID NO: 49453 - RNA, 12 nt, Artificial Sequence
  Description of Artificial Sequence: Synthetic oligonucleotide
gcugaaaaucaa

SEQ ID NO: 49454 - RNA, 14 nt, Artificial Sequence
  Description of Artificial Sequence: Synthetic oligonucleotide
aauaugauuacuuu

SEQ ID NO: 49455 - RNA, 14 nt, Artificial Sequence
  Description of Artificial Sequence: Synthetic oligonucleotide
cauuuuguucuaca

SEQ ID NO: 49456 - RNA, 12 nt, Artificial Sequence
  Description of Artificial Sequence: Synthetic oligonucleotide
cccgggacucuc

SEQ ID NO: 49457 - RNA, 14 nt, Artificial Sequence
  Description of Artificial Sequence: Synthetic oligonucleotide
ccuuuaaaguaaag

SEQ ID NO: 49458 - RNA, 13 nt, Artificial Sequence
  Description of Artificial Sequence: Synthetic oligonucleotide
ucuggaagccugg

SEQ ID NO: 49459 - RNA, 14 nt, Artificial Sequence
  Description of Artificial Sequence: Synthetic oligonucleotide
aaaacaaaagagag

SEQ ID NO: 49460 - RNA, 13 nt, Artificial Sequence
  Description of Artificial Sequence: Synthetic oligonucleotide
aucaguuaugccg

SEQ ID NO: 49461 - RNA, 13 nt, Artificial Sequence
  Description of Artificial Sequence: Synthetic oligonucleotide
uaaaagaagucca

SEQ ID NO: 49462 - RNA, 11 nt, Artificial Sequence
  Description of Artificial Sequence: Synthetic oligonucleotide
aggugagguua

SEQ ID NO: 49463 - RNA, 11 nt, Artificial Sequence
  Description of Artificial Sequence: Synthetic oligonucleotide
gggaagaggac

SEQ ID NO: 49464 - RNA, 13 nt, Artificial Sequence
  Description of Artificial Sequence: Synthetic oligonucleotide
aagcaaguauugu

SEQ ID NO: 49465 - RNA, 12 nt, Artificial Sequence
  Description of Artificial Sequence: Synthetic oligonucleotide
auuguagcacuc

SEQ ID NO: 49466 - RNA, 14 nt, Artificial Sequence
  Description of Artificial Sequence: Synthetic oligonucleotide
acaaaaccacaaau

SEQ ID NO: 49467 - RNA, 12 nt, Artificial Sequence
  Description of Artificial Sequence: Synthetic oligonucleotide
uaagcccauaca

SEQ ID NO: 49468 - RNA, 11 nt, Artificial Sequence
  Description of Artificial Sequence: Synthetic oligonucleotide
agcccauacag

SEQ ID NO: 49469 - RNA, 12 nt, Artificial Sequence
  Description of Artificial Sequence: Synthetic oligonucleotide
cagaaaccuucc

SEQ ID NO: 49470 - RNA, 10 nt, Artificial Sequence
  Description of Artificial Sequence: Synthetic oligonucleotide
guauaccuac

SEQ ID NO: 49471 - RNA, 13 nt, Artificial Sequence
  Description of Artificial Sequence: Synthetic oligonucleotide
gccaguuuucgga

SEQ ID NO: 49472 - RNA, 9 nt, Artificial Sequence
  Description of Artificial Sequence: Synthetic oligonucleotide
ggaacaggg

SEQ ID NO: 49473 - RNA, 13 nt, Artificial Sequence
  Description of Artificial Sequence: Synthetic oligonucleotide
uuaacuuuccagu

SEQ ID NO: 49474 - RNA, 14 nt, Artificial Sequence
  Description of Artificial Sequence: Synthetic oligonucleotide
aaaguuugguuuug

SEQ ID NO: 49475 - RNA, 12 nt, Artificial Sequence
  Description of Artificial Sequence: Synthetic oligonucleotide
cuucccacugua

SEQ ID NO: 49476 - RNA, 13 nt, Artificial Sequence
  Description of Artificial Sequence: Synthetic oligonucleotide
ugauaccauauga

SEQ ID NO: 49477 - RNA, 11 nt, Artificial Sequence
  Description of Artificial Sequence: Synthetic oligonucleotide
aacaugggcug

SEQ ID NO: 49478 - RNA, 13 nt, Artificial Sequence
  Description of Artificial Sequence: Synthetic oligonucleotide
caacuuuuucaua

SEQ ID NO: 49479 - RNA, 12 nt, Artificial Sequence
  Description of Artificial Sequence: Synthetic oligonucleotide
caugaggccgga

SEQ ID NO: 49480 - RNA, 11 nt, Artificial Sequence
  Description of Artificial Sequence: Synthetic oligonucleotide
acugcauuugu

SEQ ID NO: 49481 - RNA, 13 nt, Artificial Sequence
  Description of Artificial Sequence: Synthetic oligonucleotide
aauguuuacuacc

SEQ ID NO: 49482 - RNA, 15 nt, Artificial Sequence
  Description of Artificial Sequence: Synthetic oligonucleotide
aauuuuuugaugaaa

SEQ ID NO: 49483 - RNA, 14 nt, Artificial Sequence
  Description of Artificial Sequence: Synthetic oligonucleotide
cagugugugaauuu

SEQ ID NO: 49484 - RNA, 13 nt, Artificial Sequence
  Description of Artificial Sequence: Synthetic oligonucleotide
gagcaauguaugu

SEQ ID NO: 49485 - RNA, 14 nt, Artificial Sequence
  Description of Artificial Sequence: Synthetic oligonucleotide
aaagcacauauaua

SEQ ID NO: 49486 - RNA, 14 nt, Artificial Sequence
  Description of Artificial Sequence: Synthetic oligonucleotide
guaauaguuucucc

SEQ ID NO: 49487 - RNA, 13 nt, Artificial Sequence
  Description of Artificial Sequence: Synthetic oligonucleotide
aguuucuccaaau

SEQ ID NO: 49488 - RNA, 13 nt, Artificial Sequence
  Description of Artificial Sequence: Synthetic oligonucleotide
uacuuccuagaaa

SEQ ID NO: 49489 - RNA, 13 nt, Artificial Sequence
  Description of Artificial Sequence: Synthetic oligonucleotide
uacaccauauaug

SEQ ID NO: 49490 - RNA, 14 nt, Artificial Sequence
  Description of Artificial Sequence: Synthetic oligonucleotide
auauaugaauggag

SEQ ID NO: 49491 - RNA, 13 nt, Artificial Sequence
  Description of Artificial Sequence: Synthetic oligonucleotide
acgagaagaagau

SEQ ID NO: 49492 - RNA, 13 nt, Artificial Sequence
  Description of Artificial Sequence: Synthetic oligonucleotide
ucauuuacaggga

SEQ ID NO: 49493 - RNA, 13 nt, Artificial Sequence
  Description of Artificial Sequence: Synthetic oligonucleotide
cauuuacagggac

SEQ ID NO: 49494 - RNA, 10 nt, Artificial Sequence
  Description of Artificial Sequence: Synthetic oligonucleotide
agggaccuga

SEQ ID NO: 49495 - RNA, 14 nt, Artificial Sequence
  Description of Artificial Sequence: Synthetic oligonucleotide
uguuugacugcauc

SEQ ID NO: 49496 - RNA, 13 nt, Artificial Sequence
  Description of Artificial Sequence: Synthetic oligonucleotide
uuugacugcaucg

SEQ ID NO: 49497 - RNA, 12 nt, Artificial Sequence
  Description of Artificial Sequence: Synthetic oligonucleotide
gaguucacaggg

SEQ ID NO: 49498 - RNA, 13 nt, Artificial Sequence
  Description of Artificial Sequence: Synthetic oligonucleotide
ggcaccucugucc

SEQ ID NO: 49499 - RNA, 15 nt, Artificial Sequence
  Description of Artificial Sequence: Synthetic oligonucleotide
gguuugucuuuuuaa

SEQ ID NO: 49500 - RNA, 14 nt, Artificial Sequence
  Description of Artificial Sequence: Synthetic oligonucleotide
uuugucuuuuuaag

SEQ ID NO: 49501 - RNA, 13 nt, Artificial Sequence
  Description of Artificial Sequence: Synthetic oligonucleotide
ccuaaagguuguc

SEQ ID NO: 49502 - RNA, 12 nt, Artificial Sequence
  Description of Artificial Sequence: Synthetic oligonucleotide
aagguugucgac

SEQ ID NO: 49503 - RNA, 13 nt, Artificial Sequence
  Description of Artificial Sequence: Synthetic oligonucleotide
accuggcaauugu

SEQ ID NO: 49504 - RNA, 12 nt, Artificial Sequence
  Description of Artificial Sequence: Synthetic oligonucleotide
aguggugcgagg

SEQ ID NO: 49505 - RNA, 13 nt, Artificial Sequence
  Description of Artificial Sequence: Synthetic oligonucleotide
agagacaugaaau

SEQ ID NO: 49506 - RNA, 13 nt, Artificial Sequence
  Description of Artificial Sequence: Synthetic oligonucleotide
auauauuucucca

SEQ ID NO: 49507 - RNA, 10 nt, Artificial Sequence
  Description of Artificial Sequence: Synthetic oligonucleotide
caugaaggcu

SEQ ID NO: 49508 - RNA, 11 nt, Artificial Sequence
  Description of Artificial Sequence: Synthetic oligonucleotide
gcuggaguggu

SEQ ID NO: 49509 - RNA, 11 nt, Artificial Sequence
  Description of Artificial Sequence: Synthetic oligonucleotide
aggaagagagg

SEQ ID NO: 49510 - RNA, 12 nt, Artificial Sequence
  Description of Artificial Sequence: Synthetic oligonucleotide
cuugcaucgggc

SEQ ID NO: 49511 - RNA, 13 nt, Artificial Sequence
  Description of Artificial Sequence: Synthetic oligonucleotide
auauccuacugug

SEQ ID NO: 49512 - RNA, 13 nt, Artificial Sequence
  Description of Artificial Sequence: Synthetic oligonucleotide
uccuacuguguaa

SEQ ID NO: 49513 - RNA, 12 nt, Artificial Sequence
  Description of Artificial Sequence: Synthetic oligonucleotide
ccuuguagugua

SEQ ID NO: 49514 - RNA, 13 nt, Artificial Sequence
  Description of Artificial Sequence: Synthetic oligonucleotide
ucuuuguugauug

SEQ ID NO: 49515 - RNA, 14 nt, Artificial Sequence
  Description of Artificial Sequence: Synthetic oligonucleotide
uuuguugauugaaa

SEQ ID NO: 49516 - RNA, 15 nt, Artificial Sequence
  Description of Artificial Sequence: Synthetic oligonucleotide
uucuuuuucuuccau

SEQ ID NO: 49517 - RNA, 13 nt, Artificial Sequence
  Description of Artificial Sequence: Synthetic oligonucleotide
aaucuuccuucua

SEQ ID NO: 49518 - RNA, 13 nt, Artificial Sequence
  Description of Artificial Sequence: Synthetic oligonucleotide
uugaaugcuucau

SEQ ID NO: 49519 - RNA, 13 nt, Artificial Sequence
  Description of Artificial Sequence: Synthetic oligonucleotide
ugaaugcuucaug

SEQ ID NO: 49520 - RNA, 13 nt, Artificial Sequence
  Description of Artificial Sequence: Synthetic oligonucleotide
aauucuacuuuga

SEQ ID NO: 49521 - RNA, 13 nt, Artificial Sequence
  Description of Artificial Sequence: Synthetic oligonucleotide
agcaacuacagac

SEQ ID NO: 49522 - RNA, 13 nt, Artificial Sequence
  Description of Artificial Sequence: Synthetic oligonucleotide
gaccaaggucaac

SEQ ID NO: 49523 - RNA, 13 nt, Artificial Sequence
  Description of Artificial Sequence: Synthetic oligonucleotide
cgacuaucucgac

SEQ ID NO: 49524 - RNA, 13 nt, Artificial Sequence
  Description of Artificial Sequence: Synthetic oligonucleotide
aaccuucccaaac

SEQ ID NO: 49525 - RNA, 14 nt, Artificial Sequence
  Description of Artificial Sequence: Synthetic oligonucleotide
ccaagcuuagaacu

SEQ ID NO: 49526 - RNA, 15 nt, Artificial Sequence
  Description of Artificial Sequence: Synthetic oligonucleotide
agcuuagaacuuuaa

SEQ ID NO: 49527 - RNA, 11 nt, Artificial Sequence
  Description of Artificial Sequence: Synthetic oligonucleotide
aagaccaccac

SEQ ID NO: 49528 - RNA, 14 nt, Artificial Sequence
  Description of Artificial Sequence: Synthetic oligonucleotide
gcgagaaauaaagu

SEQ ID NO: 49529 - RNA, 14 nt, Artificial Sequence
  Description of Artificial Sequence: Synthetic oligonucleotide
cgagaaauaaaguu

SEQ ID NO: 49530 - RNA, 12 nt, Artificial Sequence
  Description of Artificial Sequence: Synthetic oligonucleotide
aggaaaugaucc

SEQ ID NO: 49531 - RNA, 13 nt, Artificial Sequence
  Description of Artificial Sequence: Synthetic oligonucleotide
gaagaaaugaaac

SEQ ID NO: 49532 - RNA, 13 nt, Artificial Sequence
  Description of Artificial Sequence: Synthetic oligonucleotide
guuuccauccucc

SEQ ID NO: 49533 - RNA, 15 nt, Artificial Sequence
  Description of Artificial Sequence: Synthetic oligonucleotide
acugaaaaucuuuga

SEQ ID NO: 49534 - RNA, 11 nt, Artificial Sequence
  Description of Artificial Sequence: Synthetic oligonucleotide
ugccguucagg

SEQ ID NO: 49535 - RNA, 13 nt, Artificial Sequence
  Description of Artificial Sequence: Synthetic oligonucleotide
caggguccagaag

SEQ ID NO: 49536 - RNA, 13 nt, Artificial Sequence
  Description of Artificial Sequence: Synthetic oligonucleotide
ucaagacugcuug

SEQ ID NO: 49537 - RNA, 13 nt, Artificial Sequence
  Description of Artificial Sequence: Synthetic oligonucleotide
uccaugucuuugg

SEQ ID NO: 49538 - RNA, 11 nt, Artificial Sequence
  Description of Artificial Sequence: Synthetic oligonucleotide
gccugaaacac

SEQ ID NO: 49539 - RNA, 12 nt, Artificial Sequence
  Description of Artificial Sequence: Synthetic oligonucleotide
ucucuguaccuc

SEQ ID NO: 49540 - RNA, 12 nt, Artificial Sequence
  Description of Artificial Sequence: Synthetic oligonucleotide
agcaagacaaga

SEQ ID NO: 49541 - RNA, 13 nt, Artificial Sequence
  Description of Artificial Sequence: Synthetic oligonucleotide
gcaagacaagaaa

SEQ ID NO: 49542 - RNA, 12 nt, Artificial Sequence
  Description of Artificial Sequence: Synthetic oligonucleotide
uguacaagaucc

SEQ ID NO: 49543 - RNA, 12 nt, Artificial Sequence
  Description of Artificial Sequence: Synthetic oligonucleotide
cguacuugcaga

SEQ ID NO: 49544 - RNA, 13 nt, Artificial Sequence
  Description of Artificial Sequence: Synthetic oligonucleotide
cgaucgauacaga

SEQ ID NO: 49545 - RNA, 13 nt, Artificial Sequence
  Description of Artificial Sequence: Synthetic oligonucleotide
uauaaaaauaaau

SEQ ID NO: 49546 - RNA, 13 nt, Artificial Sequence
  Description of Artificial Sequence: Synthetic oligonucleotide
uaaaaauaaauau

SEQ ID NO: 49547 - RNA, 13 nt, Artificial Sequence
  Description of Artificial Sequence: Synthetic oligonucleotide
uuugacugcugug

SEQ ID NO: 49548 - RNA, 13 nt, Artificial Sequence
  Description of Artificial Sequence: Synthetic oligonucleotide
ggagaugagagac

SEQ ID NO: 49549 - RNA, 10 nt, Artificial Sequence
  Description of Artificial Sequence: Synthetic oligonucleotide
ucccacuugg

SEQ ID NO: 49550 - RNA, 10 nt, Artificial Sequence
  Description of Artificial Sequence: Synthetic oligonucleotide
guucacggcc

SEQ ID NO: 49551 - RNA, 12 nt, Artificial Sequence
  Description of Artificial Sequence: Synthetic oligonucleotide
accaucacacca

SEQ ID NO: 49552 - RNA, 10 nt, Artificial Sequence
  Description of Artificial Sequence: Synthetic oligonucleotide
cugcggguuu

SEQ ID NO: 49553 - RNA, 9 nt, Artificial Sequence
  Description of Artificial Sequence: Synthetic oligonucleotide
uccaguuug

SEQ ID NO: 49554 - RNA, 12 nt, Artificial Sequence
  Description of Artificial Sequence: Synthetic oligonucleotide
uuaaggacuucu

SEQ ID NO: 49555 - RNA, 12 nt, Artificial Sequence
  Description of Artificial Sequence: Synthetic oligonucleotide
agugggacagag

SEQ ID NO: 49556 - RNA, 13 nt, Artificial Sequence
  Description of Artificial Sequence: Synthetic oligonucleotide
auuuguuauugug

SEQ ID NO: 49557 - RNA, 12 nt, Artificial Sequence
  Description of Artificial Sequence: Synthetic oligonucleotide
ucaaaugcauuu

SEQ ID NO: 49558 - RNA, 9 nt, Artificial Sequence
  Description of Artificial Sequence: Synthetic oligonucleotide
aggaaagcc

SEQ ID NO: 49559 - RNA, 10 nt, Artificial Sequence
  Description of Artificial Sequence: Synthetic oligonucleotide
ggaaagcccu

SEQ ID NO: 49560 - RNA, 11 nt, Artificial Sequence
  Description of Artificial Sequence: Synthetic oligonucleotide
ccagcauggcc

SEQ ID NO: 49561 - RNA, 10 nt, Artificial Sequence
  Description of Artificial Sequence: Synthetic oligonucleotide
uucucccuga

SEQ ID NO: 49562 - RNA, 11 nt, Artificial Sequence
  Description of Artificial Sequence: Synthetic oligonucleotide
aagaagcccuu

SEQ ID NO: 49563 - RNA, 11 nt, Artificial Sequence
  Description of Artificial Sequence: Synthetic oligonucleotide
gaagcccuuca

SEQ ID NO: 49564 - RNA, 10 nt, Artificial Sequence
  Description of Artificial Sequence: Synthetic oligonucleotide
cccuucagcg

SEQ ID NO: 49565 - RNA, 10 nt, Artificial Sequence
  Description of Artificial Sequence: Synthetic oligonucleotide
cuucagcggc

SEQ ID NO: 49566 - RNA, 11 nt, Artificial Sequence
  Description of Artificial Sequence: Synthetic oligonucleotide
cagcggccagu

SEQ ID NO: 49567 - RNA, 11 nt, Artificial Sequence
  Description of Artificial Sequence: Synthetic oligonucleotide
gaaaagcuccg

SEQ ID NO: 49568 - RNA, 10 nt, Artificial Sequence
  Description of Artificial Sequence: Synthetic oligonucleotide
aaagcuccgg

SEQ ID NO: 49569 - RNA, 12 nt, Artificial Sequence
  Description of Artificial Sequence: Synthetic oligonucleotide
gucaacagucug

SEQ ID NO: 49570 - RNA, 12 nt, Artificial Sequence
  Description of Artificial Sequence: Synthetic oligonucleotide
agaguucaaaag

SEQ ID NO: 49571 - RNA, 12 nt, Artificial Sequence
  Description of Artificial Sequence: Synthetic oligonucleotide
gaguucaaaagc

SEQ ID NO: 49572 - RNA, 11 nt, Artificial Sequence
  Description of Artificial Sequence: Synthetic oligonucleotide
ucaaaagcccu

SEQ ID NO: 49573 - RNA, 11 nt, Artificial Sequence
  Description of Artificial Sequence: Synthetic oligonucleotide
caaaagcccuu

SEQ ID NO: 49574 - RNA, 11 nt, Artificial Sequence
  Description of Artificial Sequence: Synthetic oligonucleotide
aaagcccuuca

SEQ ID NO: 49575 - RNA, 11 nt, Artificial Sequence
  Description of Artificial Sequence: Synthetic oligonucleotide
aagcccuucag

SEQ ID NO: 49576 - RNA, 12 nt, Artificial Sequence
  Description of Artificial Sequence: Synthetic oligonucleotide
ugaagccgcucg

SEQ ID NO: 49577 - RNA, 11 nt, Artificial Sequence
  Description of Artificial Sequence: Synthetic oligonucleotide
acgccagucaa

SEQ ID NO: 49578 - RNA, 12 nt, Artificial Sequence
  Description of Artificial Sequence: Synthetic oligonucleotide
ucuuggugcgug

SEQ ID NO: 49579 - RNA, 13 nt, Artificial Sequence
  Description of Artificial Sequence: Synthetic oligonucleotide
uuggauucaucag

SEQ ID NO: 49580 - RNA, 12 nt, Artificial Sequence
  Description of Artificial Sequence: Synthetic oligonucleotide
ggaauaccuaag

SEQ ID NO: 49581 - RNA, 11 nt, Artificial Sequence
  Description of Artificial Sequence: Synthetic oligonucleotide
uuugaggcuca

SEQ ID NO: 49582 - RNA, 10 nt, Artificial Sequence
  Description of Artificial Sequence: Synthetic oligonucleotide
cuacaauugg

SEQ ID NO: 49583 - RNA, 11 nt, Artificial Sequence
  Description of Artificial Sequence: Synthetic oligonucleotide
aguuaggagcc

SEQ ID NO: 49584 - RNA, 12 nt, Artificial Sequence
  Description of Artificial Sequence: Synthetic oligonucleotide
gucaauauccac

SEQ ID NO: 49585 - RNA, 12 nt, Artificial Sequence
  Description of Artificial Sequence: Synthetic oligonucleotide
uguucagucaca

SEQ ID NO: 49586 - RNA, 11 nt, Artificial Sequence
  Description of Artificial Sequence: Synthetic oligonucleotide
cacacacauac

SEQ ID NO: 49587 - RNA, 11 nt, Artificial Sequence
  Description of Artificial Sequence: Synthetic oligonucleotide
uccuuuugcuu

SEQ ID NO: 49588 - RNA, 15 nt, Artificial Sequence
  Description of Artificial Sequence: Synthetic oligonucleotide
uuuaaaguaauuuuu

SEQ ID NO: 49589 - RNA, 12 nt, Artificial Sequence
  Description of Artificial Sequence: Synthetic oligonucleotide
aacagucaaugg

SEQ ID NO: 49590 - RNA, 12 nt, Artificial Sequence
  Description of Artificial Sequence: Synthetic oligonucleotide
cgacaaaccaau

SEQ ID NO: 49591 - RNA, 11 nt, Artificial Sequence
  Description of Artificial Sequence: Synthetic oligonucleotide
cugcuaccacu

SEQ ID NO: 49592 - RNA, 12 nt, Artificial Sequence
  Description of Artificial Sequence: Synthetic oligonucleotide
caagcggucuua

SEQ ID NO: 49593 - RNA, 12 nt, Artificial Sequence
  Description of Artificial Sequence: Synthetic oligonucleotide
gucuuaccggcu

SEQ ID NO: 49594 - RNA, 10 nt, Artificial Sequence
  Description of Artificial Sequence: Synthetic oligonucleotide
auggguuacc

SEQ ID NO: 49595 - RNA, 10 nt, Artificial Sequence
  Description of Artificial Sequence: Synthetic oligonucleotide
uuaccugcga

SEQ ID NO: 49596 - RNA, 11 nt, Artificial Sequence
  Description of Artificial Sequence: Synthetic oligonucleotide
aucuugcugag

SEQ ID NO: 49597 - RNA, 12 nt, Artificial Sequence
  Description of Artificial Sequence: Synthetic oligonucleotide
gcauaaaacagu

SEQ ID NO: 49598 - RNA, 11 nt, Artificial Sequence
  Description of Artificial Sequence: Synthetic oligonucleotide
uccuuuauccu

SEQ ID NO: 49599 - RNA, 11 nt, Artificial Sequence
  Description of Artificial Sequence: Synthetic oligonucleotide
aacgcaaguug

SEQ ID NO: 49600 - RNA, 12 nt, Artificial Sequence
  Description of Artificial Sequence: Synthetic oligonucleotide
aacugaaaccau

SEQ ID NO: 49601 - RNA, 13 nt, Artificial Sequence
  Description of Artificial Sequence: Synthetic oligonucleotide
cuuuguuaaauau

SEQ ID NO: 49602 - RNA, 13 nt, Artificial Sequence
  Description of Artificial Sequence: Synthetic oligonucleotide
uauauuaaaaguu

SEQ ID NO: 49603 - RNA, 12 nt, Artificial Sequence
  Description of Artificial Sequence: Synthetic oligonucleotide
uuuugacuuaac

SEQ ID NO: 49604 - RNA, 12 nt, Artificial Sequence
  Description of Artificial Sequence: Synthetic oligonucleotide
caaacucagcac

SEQ ID NO: 49605 - RNA, 10 nt, Artificial Sequence
  Description of Artificial Sequence: Synthetic oligonucleotide
gcugaccuca

SEQ ID NO: 49606 - RNA, 13 nt, Artificial Sequence
  Description of Artificial Sequence: Synthetic oligonucleotide
uuauucagaucgc

SEQ ID NO: 49607 - RNA, 12 nt, Artificial Sequence
  Description of Artificial Sequence: Synthetic oligonucleotide
ggguucugggau

SEQ ID NO: 49608 - RNA, 14 nt, Artificial Sequence
  Description of Artificial Sequence: Synthetic oligonucleotide
uauuggaaauuaug

SEQ ID NO: 49609 - RNA, 12 nt, Artificial Sequence
  Description of Artificial Sequence: Synthetic oligonucleotide
uggaagcacuag

SEQ ID NO: 49610 - RNA, 12 nt, Artificial Sequence
  Description of Artificial Sequence: Synthetic oligonucleotide
uuuuuaugugga

SEQ ID NO: 49611 - RNA, 11 nt, Artificial Sequence
  Description of Artificial Sequence: Synthetic oligonucleotide
gaauugguaga

SEQ ID NO: 49612 - RNA, 12 nt, Artificial Sequence
  Description of Artificial Sequence: Synthetic oligonucleotide
uagacuuggaga

SEQ ID NO: 49613 - RNA, 12 nt, Artificial Sequence
  Description of Artificial Sequence: Synthetic oligonucleotide
uacaguauucca

SEQ ID NO: 49614 - RNA, 14 nt, Artificial Sequence
  Description of Artificial Sequence: Synthetic oligonucleotide
cacugaugaauuaa

SEQ ID NO: 49615 - RNA, 11 nt, Artificial Sequence
  Description of Artificial Sequence: Synthetic oligonucleotide
cacaucaucac

SEQ ID NO: 49616 - RNA, 12 nt, Artificial Sequence
  Description of Artificial Sequence: Synthetic oligonucleotide
ucaccaaacaga

SEQ ID NO: 49617 - RNA, 11 nt, Artificial Sequence
  Description of Artificial Sequence: Synthetic oligonucleotide
gaacaugaugg

SEQ ID NO: 49618 - RNA, 11 nt, Artificial Sequence
  Description of Artificial Sequence: Synthetic oligonucleotide
auguagacugc

SEQ ID NO: 49619 - RNA, 12 nt, Artificial Sequence
  Description of Artificial Sequence: Synthetic oligonucleotide
gaucuauuuaug

SEQ ID NO: 49620 - RNA, 11 nt, Artificial Sequence
  Description of Artificial Sequence: Synthetic oligonucleotide
cacuauuauca

SEQ ID NO: 49621 - RNA, 10 nt, Artificial Sequence
  Description of Artificial Sequence: Synthetic oligonucleotide
ucaguucugc

SEQ ID NO: 49622 - RNA, 12 nt, Artificial Sequence
  Description of Artificial Sequence: Synthetic oligonucleotide
gauuaaaccuac

SEQ ID NO: 49623 - RNA, 12 nt, Artificial Sequence
  Description of Artificial Sequence: Synthetic oligonucleotide
uaaaauccuucu

SEQ ID NO: 49624 - RNA, 11 nt, Artificial Sequence
  Description of Artificial Sequence: Synthetic oligonucleotide
augcuguagac

SEQ ID NO: 49625 - RNA, 12 nt, Artificial Sequence
  Description of Artificial Sequence: Synthetic oligonucleotide
ugauaggaauag

SEQ ID NO: 49626 - RNA, 10 nt, Artificial Sequence
  Description of Artificial Sequence: Synthetic oligonucleotide
auggcccuga

SEQ ID NO: 49627 - RNA, 10 nt, Artificial Sequence
  Description of Artificial Sequence: Synthetic oligonucleotide
uccucaagca

SEQ ID NO: 49628 - RNA, 9 nt, Artificial Sequence
  Description of Artificial Sequence: Synthetic oligonucleotide
uucagccca

SEQ ID NO: 49629 - RNA, 10 nt, Artificial Sequence
  Description of Artificial Sequence: Synthetic oligonucleotide
cugcugaacc

SEQ ID NO: 49630 - RNA, 11 nt, Artificial Sequence
  Description of Artificial Sequence: Synthetic oligonucleotide
aguucucuuca

SEQ ID NO: 49631 - RNA, 10 nt, Artificial Sequence
  Description of Artificial Sequence: Synthetic oligonucleotide
cagccuagag

SEQ ID NO: 49632 - RNA, 12 nt, Artificial Sequence
  Description of Artificial Sequence: Synthetic oligonucleotide
ucugugaagugu

SEQ ID NO: 49633 - RNA, 13 nt, Artificial Sequence
  Description of Artificial Sequence: Synthetic oligonucleotide
gagaaaauuucaa

SEQ ID NO: 49634 - RNA, 10 nt, Artificial Sequence
  Description of Artificial Sequence: Synthetic oligonucleotide
auccuccuga

SEQ ID NO: 49635 - RNA, 11 nt, Artificial Sequence
  Description of Artificial Sequence: Synthetic oligonucleotide
ugacaucauau

SEQ ID NO: 49636 - RNA, 12 nt, Artificial Sequence
  Description of Artificial Sequence: Synthetic oligonucleotide
aucuucaucaua

SEQ ID NO: 49637 - RNA, 12 nt, Artificial Sequence
  Description of Artificial Sequence: Synthetic oligonucleotide
acuagcuauuaa

SEQ ID NO: 49638 - RNA, 13 nt, Artificial Sequence
  Description of Artificial Sequence: Synthetic oligonucleotide
cucuacuaaaaau

SEQ ID NO: 49639 - RNA, 11 nt, Artificial Sequence
  Description of Artificial Sequence: Synthetic oligonucleotide
cuaucucgccu

SEQ ID NO: 49640 - RNA, 12 nt, Artificial Sequence
  Description of Artificial Sequence: Synthetic oligonucleotide
uucgguccaguu

SEQ ID NO: 49641 - RNA, 10 nt, Artificial Sequence
  Description of Artificial Sequence: Synthetic oligonucleotide
auguagccgc

SEQ ID NO: 49642 - RNA, 11 nt, Artificial Sequence
  Description of Artificial Sequence: Synthetic oligonucleotide
gaggagacuug

SEQ ID NO: 49643 - RNA, 11 nt, Artificial Sequence
  Description of Artificial Sequence: Synthetic oligonucleotide
aguagugagga

SEQ ID NO: 49644 - RNA, 13 nt, Artificial Sequence
  Description of Artificial Sequence: Synthetic oligonucleotide
agaugaguacaaa

SEQ ID NO: 49645 - RNA, 12 nt, Artificial Sequence
  Description of Artificial Sequence: Synthetic oligonucleotide
uuguuaaugggc

SEQ ID NO: 49646 - RNA, 12 nt, Artificial Sequence
  Description of Artificial Sequence: Synthetic oligonucleotide
uuuuaauuuauu

SEQ ID NO: 49647 - RNA, 11 nt, Artificial Sequence
  Description of Artificial Sequence: Synthetic oligonucleotide
auuuaaauaug

SEQ ID NO: 49648 - RNA, 12 nt, Artificial Sequence
  Description of Artificial Sequence: Synthetic oligonucleotide
auccuuuguuuc

SEQ ID NO: 49649 - RNA, 13 nt, Artificial Sequence
  Description of Artificial Sequence: Synthetic oligonucleotide
gucuaaguguuug

SEQ ID NO: 49650 - RNA, 11 nt, Artificial Sequence
  Description of Artificial Sequence: Synthetic oligonucleotide
ccugugacaaa

SEQ ID NO: 49651 - RNA, 12 nt, Artificial Sequence
  Description of Artificial Sequence: Synthetic oligonucleotide
caggcugaauua

SEQ ID NO: 49652 - RNA, 13 nt, Artificial Sequence
  Description of Artificial Sequence: Synthetic oligonucleotide
ucauucuuacaau

SEQ ID NO: 49653 - RNA, 14 nt, Artificial Sequence
  Description of Artificial Sequence: Synthetic oligonucleotide
cauucuuacaauug

SEQ ID NO: 49654 - RNA, 11 nt, Artificial Sequence
  Description of Artificial Sequence: Synthetic oligonucleotide
agagaguguac

SEQ ID NO: 49655 - RNA, 11 nt, Artificial Sequence
  Description of Artificial Sequence: Synthetic oligonucleotide
gaacucagcag

SEQ ID NO: 49656 - RNA, 12 nt, Artificial Sequence
  Description of Artificial Sequence: Synthetic oligonucleotide
uuauuuucagua

SEQ ID NO: 49657 - RNA, 11 nt, Artificial Sequence
  Description of Artificial Sequence: Synthetic oligonucleotide
cuuaaauggaa

SEQ ID NO: 49658 - RNA, 12 nt, Artificial Sequence
  Description of Artificial Sequence: Synthetic oligonucleotide
gccuaaaauugu

SEQ ID NO: 49659 - RNA, 12 nt, Artificial Sequence
  Description of Artificial Sequence: Synthetic oligonucleotide
acuaacaucugg

SEQ ID NO: 49660 - RNA, 11 nt, Artificial Sequence
  Description of Artificial Sequence: Synthetic oligonucleotide
gacugugagcu

SEQ ID NO: 49661 - RNA, 13 nt, Artificial Sequence
  Description of Artificial Sequence: Synthetic oligonucleotide
gcuuuuuauuaau

SEQ ID NO: 49662 - RNA, 12 nt, Artificial Sequence
  Description of Artificial Sequence: Synthetic oligonucleotide
ucuucuuacauu

SEQ ID NO: 49663 - RNA, 14 nt, Artificial Sequence
  Description of Artificial Sequence: Synthetic oligonucleotide
auuuguaaaaaugu

SEQ ID NO: 49664 - RNA, 14 nt, Artificial Sequence
  Description of Artificial Sequence: Synthetic oligonucleotide
ucuuaauucauauu

SEQ ID NO: 49665 - RNA, 12 nt, Artificial Sequence
  Description of Artificial Sequence: Synthetic oligonucleotide
aacuaaucauga

SEQ ID NO: 49666 - RNA, 11 nt, Artificial Sequence
  Description of Artificial Sequence: Synthetic oligonucleotide
cugcucuuggg

SEQ ID NO: 49667 - RNA, 12 nt, Artificial Sequence
  Description of Artificial Sequence: Synthetic oligonucleotide
aguagcuuugag

SEQ ID NO: 49668 - RNA, 13 nt, Artificial Sequence
  Description of Artificial Sequence: Synthetic oligonucleotide
acguaauauuuca

SEQ ID NO: 49669 - RNA, 12 nt, Artificial Sequence
  Description of Artificial Sequence: Synthetic oligonucleotide
auucucuucacu

SEQ ID NO: 49670 - RNA, 13 nt, Artificial Sequence
  Description of Artificial Sequence: Synthetic oligonucleotide
uaaugcuaagaaa

SEQ ID NO: 49671 - RNA, 11 nt, Artificial Sequence
  Description of Artificial Sequence: Synthetic oligonucleotide
cugaaaaucaa

SEQ ID NO: 49672 - RNA, 13 nt, Artificial Sequence
  Description of Artificial Sequence: Synthetic oligonucleotide
auaugauuacuuu

SEQ ID NO: 49673 - RNA, 13 nt, Artificial Sequence
  Description of Artificial Sequence: Synthetic oligonucleotide
auuuuguucuaca

SEQ ID NO: 49674 - RNA, 11 nt, Artificial Sequence
  Description of Artificial Sequence: Synthetic oligonucleotide
ccgggacucuc

SEQ ID NO: 49675 - RNA, 13 nt, Artificial Sequence
  Description of Artificial Sequence: Synthetic oligonucleotide
cuuuaaaguaaag

SEQ ID NO: 49676 - RNA, 12 nt, Artificial Sequence
  Description of Artificial Sequence: Synthetic oligonucleotide
cuggaagccugg

SEQ ID NO: 49677 - RNA, 13 nt, Artificial Sequence
  Description of Artificial Sequence: Synthetic oligonucleotide
aaacaaaagagag

SEQ ID NO: 49678 - RNA, 12 nt, Artificial Sequence
  Description of Artificial Sequence: Synthetic oligonucleotide
ucaguuaugccg

SEQ ID NO: 49679 - RNA, 12 nt, Artificial Sequence
  Description of Artificial Sequence: Synthetic oligonucleotide
aaaagaagucca

SEQ ID NO: 49680 - RNA, 10 nt, Artificial Sequence
  Description of Artificial Sequence: Synthetic oligonucleotide
ggugagguua

SEQ ID NO: 49681 - RNA, 10 nt, Artificial Sequence
  Description of Artificial Sequence: Synthetic oligonucleotide
ggaagaggac

SEQ ID NO: 49682 - RNA, 12 nt, Artificial Sequence
  Description of Artificial Sequence: Synthetic oligonucleotide
agcaaguauugu

SEQ ID NO: 49683 - RNA, 11 nt, Artificial Sequence
  Description of Artificial Sequence: Synthetic oligonucleotide
uuguagcacuc

SEQ ID NO: 49684 - RNA, 13 nt, Artificial Sequence
  Description of Artificial Sequence: Synthetic oligonucleotide
caaaaccacaaau

SEQ ID NO: 49685 - RNA, 11 nt, Artificial Sequence
  Description of Artificial Sequence: Synthetic oligonucleotide
aagcccauaca

SEQ ID NO: 49686 - RNA, 10 nt, Artificial Sequence
  Description of Artificial Sequence: Synthetic oligonucleotide
gcccauacag

SEQ ID NO: 49687 - RNA, 11 nt, Artificial Sequence
  Description of Artificial Sequence: Synthetic oligonucleotide
agaaaccuucc

SEQ ID NO: 49688 - RNA, 9 nt, Artificial Sequence
  Description of Artificial Sequence: Synthetic oligonucleotide
uauaccuac

SEQ ID NO: 49689 - RNA, 12 nt, Artificial Sequence
  Description of Artificial Sequence: Synthetic oligonucleotide
ccaguuuucgga

SEQ ID NO: 49690 - RNA, 8 nt, Artificial Sequence
  Description of Artificial Sequence: Synthetic oligonucleotide
gaacaggg

SEQ ID NO: 49691 - RNA, 12 nt, Artificial Sequence
  Description of Artificial Sequence: Synthetic oligonucleotide
uaacuuuccagu

SEQ ID NO: 49692 - RNA, 13 nt, Artificial Sequence
  Description of Artificial Sequence: Synthetic oligonucleotide
aaguuugguuuug

SEQ ID NO: 49693 - RNA, 11 nt, Artificial Sequence
  Description of Artificial Sequence: Synthetic oligonucleotide
uucccacugua

SEQ ID NO: 49694 - RNA, 12 nt, Artificial Sequence
  Description of Artificial Sequence: Synthetic oligonucleotide
gauaccauauga

SEQ ID NO: 49695 - RNA, 10 nt, Artificial Sequence
  Description of Artificial Sequence: Synthetic oligonucleotide
acaugggcug

SEQ ID NO: 49696 - RNA, 12 nt, Artificial Sequence
  Description of Artificial Sequence: Synthetic oligonucleotide
aacuuuuucaua

SEQ ID NO: 49697 - RNA, 11 nt, Artificial Sequence
  Description of Artificial Sequence: Synthetic oligonucleotide
augaggccgga

SEQ ID NO: 49698 - RNA, 10 nt, Artificial Sequence
  Description of Artificial Sequence: Synthetic oligonucleotide
cugcauuugu

SEQ ID NO: 49699 - RNA, 12 nt, Artificial Sequence
  Description of Artificial Sequence: Synthetic oligonucleotide
auguuuacuacc

SEQ ID NO: 49700 - RNA, 14 nt, Artificial Sequence
  Description of Artificial Sequence: Synthetic oligonucleotide
auuuuuugaugaaa

SEQ ID NO: 49701 - RNA, 13 nt, Artificial Sequence
  Description of Artificial Sequence: Synthetic oligonucleotide
agugugugaauuu

SEQ ID NO: 49702 - RNA, 12 nt, Artificial Sequence
  Description of Artificial Sequence: Synthetic oligonucleotide
agcaauguaugu

SEQ ID NO: 49703 - RNA, 13 nt, Artificial Sequence
  Description of Artificial Sequence: Synthetic oligonucleotide
aagcacauauaua

SEQ ID NO: 49704 - RNA, 13 nt, Artificial Sequence
  Description of Artificial Sequence: Synthetic oligonucleotide
uaauaguuucucc

SEQ ID NO: 49705 - RNA, 12 nt, Artificial Sequence
  Description of Artificial Sequence: Synthetic oligonucleotide
guuucuccaaau

SEQ ID NO: 49706 - RNA, 12 nt, Artificial Sequence
  Description of Artificial Sequence: Synthetic oligonucleotide
acuuccuagaaa

SEQ ID NO: 49707 - RNA, 12 nt, Artificial Sequence
  Description of Artificial Sequence: Synthetic oligonucleotide
acaccauauaug

SEQ ID NO: 49708 - RNA, 13 nt, Artificial Sequence
  Description of Artificial Sequence: Synthetic oligonucleotide
uauaugaauggag

SEQ ID NO: 49709 - RNA, 12 nt, Artificial Sequence
  Description of Artificial Sequence: Synthetic oligonucleotide
cauuuacaggga

SEQ ID NO: 49710 - RNA, 12 nt, Artificial Sequence
  Description of Artificial Sequence: Synthetic oligonucleotide
auuuacagggac

SEQ ID NO: 49711 - RNA, 9 nt, Artificial Sequence
  Description of Artificial Sequence: Synthetic oligonucleotide
gggaccuga

SEQ ID NO: 49712 - RNA, 13 nt, Artificial Sequence
  Description of Artificial Sequence: Synthetic oligonucleotide
guuugacugcauc

SEQ ID NO: 49713 - RNA, 12 nt, Artificial Sequence
  Description of Artificial Sequence: Synthetic oligonucleotide
uugacugcaucg

SEQ ID NO: 49714 - RNA, 11 nt, Artificial Sequence
  Description of Artificial Sequence: Synthetic oligonucleotide
aguucacaggg

SEQ ID NO: 49715 - RNA, 12 nt, Artificial Sequence
  Description of Artificial Sequence: Synthetic oligonucleotide
gcaccucugucc

SEQ ID NO: 49716 - RNA, 14 nt, Artificial Sequence
  Description of Artificial Sequence: Synthetic oligonucleotide
guuugucuuuuuaa

SEQ ID NO: 49717 - RNA, 13 nt, Artificial Sequence
  Description of Artificial Sequence: Synthetic oligonucleotide
uugucuuuuuaag

SEQ ID NO: 49718 - RNA, 12 nt, Artificial Sequence
  Description of Artificial Sequence: Synthetic oligonucleotide
cuaaagguuguc

SEQ ID NO: 49719 - RNA, 11 nt, Artificial Sequence
  Description of Artificial Sequence: Synthetic oligonucleotide
agguugucgac

SEQ ID NO: 49720 - RNA, 12 nt, Artificial Sequence
  Description of Artificial Sequence: Synthetic oligonucleotide
ccuggcaauugu

SEQ ID NO: 49721 - RNA, 11 nt, Artificial Sequence
  Description of Artificial Sequence: Synthetic oligonucleotide
guggugcgagg

SEQ ID NO: 49722 - RNA, 12 nt, Artificial Sequence
  Description of Artificial Sequence: Synthetic oligonucleotide
gagacaugaaau

SEQ ID NO: 49723 - RNA, 12 nt, Artificial Sequence
  Description of Artificial Sequence: Synthetic oligonucleotide
uauauuucucca

SEQ ID NO: 49724 - RNA, 9 nt, Artificial Sequence
  Description of Artificial Sequence: Synthetic oligonucleotide
augaaggcu

SEQ ID NO: 49725 - RNA, 10 nt, Artificial Sequence
  Description of Artificial Sequence: Synthetic oligonucleotide
cuggaguggu

SEQ ID NO: 49726 - RNA, 10 nt, Artificial Sequence
  Description of Artificial Sequence: Synthetic oligonucleotide
ggaagagagg

SEQ ID NO: 49727 - RNA, 11 nt, Artificial Sequence
  Description of Artificial Sequence: Synthetic oligonucleotide
uugcaucgggc

SEQ ID NO: 49728 - RNA, 12 nt, Artificial Sequence
  Description of Artificial Sequence: Synthetic oligonucleotide
uauccuacugug

SEQ ID NO: 49729 - RNA, 12 nt, Artificial Sequence
  Description of Artificial Sequence: Synthetic oligonucleotide
ccuacuguguaa

SEQ ID NO: 49730 - RNA, 11 nt, Artificial Sequence
  Description of Artificial Sequence: Synthetic oligonucleotide
cuuguagugua

SEQ ID NO: 49731 - RNA, 12 nt, Artificial Sequence
  Description of Artificial Sequence: Synthetic oligonucleotide
cuuuguugauug

SEQ ID NO: 49732 - RNA, 13 nt, Artificial Sequence
  Description of Artificial Sequence: Synthetic oligonucleotide
uuguugauugaaa

SEQ ID NO: 49733 - RNA, 14 nt, Artificial Sequence
  Description of Artificial Sequence: Synthetic oligonucleotide
ucuuuuucuuccau

SEQ ID NO: 49734 - RNA, 12 nt, Artificial Sequence
  Description of Artificial Sequence: Synthetic oligonucleotide
aucuuccuucua

SEQ ID NO: 49735 - RNA, 12 nt, Artificial Sequence
  Description of Artificial Sequence: Synthetic oligonucleotide
ugaaugcuucau

SEQ ID NO: 49736 - RNA, 12 nt, Artificial Sequence
  Description of Artificial Sequence: Synthetic oligonucleotide
gaaugcuucaug

SEQ ID NO: 49737 - RNA, 12 nt, Artificial Sequence
  Description of Artificial Sequence: Synthetic oligonucleotide
auucuacuuuga

SEQ ID NO: 49738 - RNA, 12 nt, Artificial Sequence
  Description of Artificial Sequence: Synthetic oligonucleotide
gcaacuacagac

SEQ ID NO: 49739 - RNA, 12 nt, Artificial Sequence
  Description of Artificial Sequence: Synthetic oligonucleotide
accaaggucaac

SEQ ID NO: 49740 - RNA, 12 nt, Artificial Sequence
  Description of Artificial Sequence: Synthetic oligonucleotide
gacuaucucgac

SEQ ID NO: 49741 - RNA, 12 nt, Artificial Sequence
  Description of Artificial Sequence: Synthetic oligonucleotide
accuucccaaac

SEQ ID NO: 49742 - RNA, 13 nt, Artificial Sequence
  Description of Artificial Sequence: Synthetic oligonucleotide
caagcuuagaacu

SEQ ID NO: 49743 - RNA, 14 nt, Artificial Sequence
  Description of Artificial Sequence: Synthetic oligonucleotide
gcuuagaacuuuaa

SEQ ID NO: 49744 - RNA, 13 nt, Artificial Sequence
  Description of Artificial Sequence: Synthetic oligonucleotide
aacuuuaagcaac

SEQ ID NO: 49745 - RNA, 10 nt, Artificial Sequence
  Description of Artificial Sequence: Synthetic oligonucleotide
agaccaccac

SEQ ID NO: 49746 - RNA, 13 nt, Artificial Sequence
  Description of Artificial Sequence: Synthetic oligonucleotide
cgagaaauaaagu

SEQ ID NO: 49747 - RNA, 13 nt, Artificial Sequence
  Description of Artificial Sequence: Synthetic oligonucleotide
gagaaauaaaguu

SEQ ID NO: 49748 - RNA, 11 nt, Artificial Sequence
  Description of Artificial Sequence: Synthetic oligonucleotide
ggaaaugaucc

SEQ ID NO: 49749 - RNA, 12 nt, Artificial Sequence
  Description of Artificial Sequence: Synthetic oligonucleotide
aagaaaugaaac

SEQ ID NO: 49750 - RNA, 12 nt, Artificial Sequence
  Description of Artificial Sequence: Synthetic oligonucleotide
uuuccauccucc

SEQ ID NO: 49751 - RNA, 14 nt, Artificial Sequence
  Description of Artificial Sequence: Synthetic oligonucleotide
cugaaaaucuuuga

SEQ ID NO: 49752 - RNA, 10 nt, Artificial Sequence
  Description of Artificial Sequence: Synthetic oligonucleotide
gccguucagg

SEQ ID NO: 49753 - RNA, 12 nt, Artificial Sequence
  Description of Artificial Sequence: Synthetic oligonucleotide
aggguccagaag

SEQ ID NO: 49754 - RNA, 12 nt, Artificial Sequence
  Description of Artificial Sequence: Synthetic oligonucleotide
caagacugcuug

SEQ ID NO: 49755 - RNA, 12 nt, Artificial Sequence
  Description of Artificial Sequence: Synthetic oligonucleotide
ccaugucuuugg

SEQ ID NO: 49756 - RNA, 10 nt, Artificial Sequence
  Description of Artificial Sequence: Synthetic oligonucleotide
ccugaaacac

SEQ ID NO: 49757 - RNA, 11 nt, Artificial Sequence
  Description of Artificial Sequence: Synthetic oligonucleotide
cucuguaccuc

SEQ ID NO: 49758 - RNA, 11 nt, Artificial Sequence
  Description of Artificial Sequence: Synthetic oligonucleotide
gcaagacaaga

SEQ ID NO: 49759 - RNA, 12 nt, Artificial Sequence
  Description of Artificial Sequence: Synthetic oligonucleotide
caagacaagaaa

SEQ ID NO: 49760 - RNA, 11 nt, Artificial Sequence
  Description of Artificial Sequence: Synthetic oligonucleotide
guacaagaucc

SEQ ID NO: 49761 - RNA, 11 nt, Artificial Sequence
  Description of Artificial Sequence: Synthetic oligonucleotide
guacuugcaga

SEQ ID NO: 49762 - RNA, 12 nt, Artificial Sequence
  Description of Artificial Sequence: Synthetic oligonucleotide
gaucgauacaga

SEQ ID NO: 49763 - RNA, 12 nt, Artificial Sequence
  Description of Artificial Sequence: Synthetic oligonucleotide
auaaaaauaaau

SEQ ID NO: 49764 - RNA, 12 nt, Artificial Sequence
  Description of Artificial Sequence: Synthetic oligonucleotide
aaaaauaaauau

SEQ ID NO: 49765 - RNA, 12 nt, Artificial Sequence
  Description of Artificial Sequence: Synthetic oligonucleotide
uugacugcugug

SEQ ID NO: 49766 - RNA, 12 nt, Artificial Sequence
  Description of Artificial Sequence: Synthetic oligonucleotide
gagaugagagac

SEQ ID NO: 49767 - RNA, 9 nt, Artificial Sequence
  Description of Artificial Sequence: Synthetic oligonucleotide
cccacuugg

SEQ ID NO: 49768 - RNA, 5916 nt, Homo sapiens
gccccucccuccgcccgcccgccggcccgcccgucagucuggcaggcaggcaggcaaucgguccgaguggcugucggcucuucagcucucccgcucggcgucuuccuuccuccucccggucagcgucggcggcugcaccggcggcggcgcagucccugcgggaggggcgacaagagcugagcggcggccgccgagcgucgagcucagcgcggcggaggcggcggcggcccggcagccaacauggcggcggcggcggcggcgggcgcgggcccggagaugguccgcgggcagguguucgacguggggccgcgcuacaccaaccucucguacaucggcgagggcgccuacggcauggugugcucugcuuaugauaaugucaacaaaguucgaguagcuaucaagaaaaucagccccuuugagcaccagaccuacugccagagaacccugagggagauaaaaaucuuacugcgcuucagacaugagaacaucauuggaaucaaugacauuauucgagcaccaaccaucgagcaaaugaaagauguauauauaguacaggaccucauggaaacagaucuuuacaagcucuugaagacacaacaccucagcaaugaccauaucugcuauuuucucuaccagauccucagaggguuaaaauauauccauucagcuaacguucugcaccgugaccucaagccuuccaaccugcugcucaacaccaccugugaucucaagaucugugacuuuggccuggcccguguugcagauccagaccaugaucacacaggguuccugacagaauauguggccacacguugguacagggcuccagaaauuauguugaauuccaagggcuacaccaaguccauugauauuuggucuguaggcugcauucuggcagaaaugcuuucuaacaggcccaucuuuccagggaagcauuaucuugaccagcugaaccacauuuuggguauucuuggauccccaucacaagaagaccugaauuguauaauaaauuuaaaagcuaggaacuauuugcuuucucuuccacacaaaaauaaggugccauggaacaggcuguucccaaaugcugacuccaaagcucuggacuuauuggacaaaauguugacauucaacccacacaagaggauugaaguagaacaggcucuggcccacccauaucuggagcaguauuacgacccgagugacgagcccaucgccgaagcaccauucaaguucgacauggaauuggaugacuugccuaaggaaaagcucaaagaacuaauuuuugaagagacugcuagauuccagccaggauacagaucuuaaauuugucaggacaagggcucagaggacuggacgugcucagacaucgguguucuucuucccaguucuugaccccugguccugucuccagcccgucuuggcuuauccacuuugacuccuuugagccguuuggaggggcgguuucugguaguuguggcuuuuaugcuuucaaagaauuucuucaguccagagaauuccuccuggcagcccugugugugucacccauuggugaccugcggcaguauguacuucagugcaccuacugcuuacuguugcuuuagucacuaauugcuuucugguuugaaagaugcagugguuccucccucuccugaauccuuuucuacaugaugcccugcugaccaugcagccgcaccagagagagauucuuccccaauuggcucuagucacuggcaucucacuuuaugauagggaaggcuacuaccuagggcacuuuaagucagugacagccccuuauuugcacuucaccuuuugaccauaacuguuuccccagagcaggagcuuguggaaauaccuuggcugauguugcagccugcagcaagugcuuccgucuccggaauccuuggggagcacuuguccacgucuuuucucauaucaugguagucacuaacauauauaagguaugugcuauuggcccagcuuuuagaaaaugcagucauuuuucuaaauaaaaaggaaguacugcacccagcagugucacucuguaguuacuguggucacuuguaccauauagagguguaacacuugucaagaagcguuaugugcaguacuuaauguuuguaagacuuacaaaaaaagauuuaaaguggcagcuucacucgacauuuggugagagaaguacaaagguugcagugcugagcugugggcgguuucuggggaugucccaggguggaacuccacaugcuggugcauauacgcccuugagcuacuucaaauguggguguuucaguaaccacguuccaugccugaggauuuagcagagaggaacacugcgucuuuaaaugagaaaguauacaauucuuuuuccuucuacagcaugucagcaucucaaguucauuuuucaaccuacaguauaacaauuuguaauaaagccuccaggagcucaugacgugaagcacuguucuguccucaaguacucaaauauuucugauacugcugagucagacugucagaaaaagcuagcacuaacucguguuuggagcucuauccauauuuuacugaucucuuuaaguauuuguuccugccacuguguacuguggaguugacucgguguucugucccagugcggugccuccucuugacuuccccacugcucucuguggugagaaauuugccuuguucaauaauuacuguacccucgcaugacuguuacagcuuucugugcagagaugacuguccaagugccacaugccuacgauugaaaugaaaacucuauuguuaccucugaguuguguuccacggaaaaugcuauccagcagaucauuuaggaaaaauaauucuauuuuuagcuuuucauuucucagcuguccuuuuuucuuguuugauuuuugacagcaauggagaauggguuauauaaagacugccugcuaauaugaacagaaaugcauuuguaauucaugaaaauaaauguacaucuucuaucuucacauucauguuaagauucaguguugcuuuccucuggaucagcgugucugaauggacagucagguucagguugugcugaacacagaaaugcucacaggccucacuuugccgcccaggcacuggcccagcacuuggauuuacauaagaugaguuagaaagguacuucuguaggguccuuuuuaccucugcucggcagagaaucgaugcugucauguuccuuuauucacaaucuuaggucucaaauauucugucaaacccuaacaaagaagccccgacaucucagguuggauucccugguucucucuaaagagggccugcccuugugccccagaggugcugcugggcacagccaagaguugggaagggccgccccacaguacgcaguccucaccacccagcccagggugcucacgcucaccacuccuguggcugaggaaggauagcuggcucauccucggaaaacagacccacaucucuauucuugcccugaaauacgcgcuuuucacuugcgugcucagagcugccgucugaagguccacacagcauugacgggacacagaaaugugacuguuaccggauaacacugauuagucaguuuucauuuauaaaaaagcauugacaguuuuauuacucuuguuucuuuuuaaauggaaaguuacuauuauaagguuaauuuggaguccucuucuaaauagaaaaccauauccuuggcuacuaacaucuggagacugugagcuccuucccauuccccuuccugguacuguggagucagauuggcaugaaaccacuaacuucauucuagaaucauuguagccauaaguugugugcuuuuuauuaaucaugccaaacauaauguaacugggcagagaaugguccuaaccaagguaccuaugaaaagcgcuagcuaucauguguaguagaugcaucauuuuggcucuucuuacauuuguaaaaauguacagauuaggucaucuuaauucauauuagugacacggaacagcaccuccacuauuuguauguucaaauaagcuuucagacuaauagcuuuuuuggugucuaaaauguaagcaaaaaauuccugcugaaacauuccaguccuuucauuuaguauaaaagaaauacugaacaagccagugggauggaauugaaagaacuaaucaugaggacucuguccugacacagguccucaaagcuagcagagauacgcagacauuguggcaucuggguagaagaauacuguauugugugugcagugcacaguguguggugugugcacacucauuccuucugcucuugggcacaggcaguggguguagagguaaccaguagcuuugagaagcuacauguagcucaccagugguuuucucuaaggaaucacaaaaguaaacuacccaaccacaugccacguaauauuucagccauucagaggaaacuguuuucucuuuauuugcuuauauguuaauaugguuuuuaaauugguaacuuuuauauaguaugguaacaguauguuaauacacacauacauacgcacacaugcuuuggguccuuccauaauacuuuuauauuuguaaaucaauguuuuggagcaaucccaaguuuaagggaaauauuuuuguaaauguaaugguuuugaaaaucugagcaauccuuuugcuuauacauuuuuaaagcauuugugcuuuaaaauuguuaugcugguguuugaaacaugauacuccuguggugcagaugagaagcuauaacagugaauaugugguuucucuuacgucauccaccuugacaugaugggucagaaacaaauggaaauccagagcaaguccuccaggguugcaccagguuuaccuaaagcuuguugccuuuucuugugcuguuuaugcguguagagcacucaagaaaguucugaaacugcuuuguaucugcuuuguacuguuggugccuucuugguauuguaccccaaaauucugcauagauuauuuaguauaaugguaaguuaaaaaauguuaaaggaagauuuuauuaagaaucugaauguuuauucauuauauuguuacaauuuaacauuaacauuuauuugugguauuugugauuugguuaaucuguauaaaaauuguaaguagaaagguuuauauuucaucuuaauucuuuugauguuguaaacguacuuuuuaaaagauggauuauuugaauguuuauggcaccugacuuguaaaaaaaaaaaacuacaaaaaaauccuuagaaucauuaaauugugucccuguauuaccaaaauaacacagcaccgugcauguauaguuuaauugcaguuucaucugugaaaacgugaaauugucuaguccuucguuauguuccccagaugucuuccagauuugcucugcaugugguaacuuguguuagggcugugagcuguuccucgaguugaauggggaugucagugcuccuaggguucuccaggugguucuucagaccuucaccuguggggggggggguaggcggugcccacgcccaucuccucauccuccugaacuucugcaaccccacugcugggcagacauccugggcaaccccuuuuuucagagcaagaagucauaaagauaggauuucuuggacauuugguucuuaucaauauugggcauuauguaaugacuuauuuacaaaacaaagauacuggaaaauguuuuggaugugguguuauggaaagagcacaggccuuggacccauccagcuggguucagaacuacccccugcuuauaacugcggcuggcugugggccagucauucugcgucucugcuuucuuccucugcuucagacugucagcuguaaaguggaagcaauauuacuugccuuguauaugguaaagauuauaaaaauacauuucaacuguucagcauaguacuucaaagcaaguacucaguaaauagcaagucuuuuuaaa

SEQ ID NO: 49769 - RNA, 1499 nt, Homo sapiens
gccccucccuccgcccgcccgccggcccgcccgucagucuggcaggcaggcaggcaaucgguccgaguggcugucggcucuucagcucucccgcucggcgucuuccuuccuccucccggucagcgucggcggcugcaccggcggcggcgcagucccugcgggaggggcgacaagagcugagcggcggccgccgagcgucgagcucagcgcggcggaggcggcggcggcccggcagccaacauggcggcggcggcggcggcgggcgcgggcccggagaugguccgcgggcagguguucgacguggggccgcgcuacaccaaccucucguacaucggcgagggcgccuacggcauggugugcucugcuuaugauaaugucaacaaaguucgaguagcuaucaagaaaaucagccccuuugagcaccagaccuacugccagagaacccugagggagauaaaaaucuuacugcgcuucagacaugagaacaucauuggaaucaaugacauuauucgagcaccaaccaucgagcaaaugaaagauguauauauaguacaggaccucauggaaacagaucuuuacaagcucuugaagacacaacaccucagcaaugaccauaucugcuauuuucucuaccagauccucagaggguuaaaauauauccauucagcuaacguucugcaccgugaccucaagccuuccaaccugcugcucaacaccaccugugaucucaagaucugugacuuuggccuggcccguguugcagauccagaccaugaucacacaggguuccugacagaauauguggccacacguugguacagggcuccagaaauuauguugaauuccaagggcuacaccaaguccauugauauuuggucuguaggcugcauucuggcagaaaugcuuucuaacaggcccaucuuuccagggaagcauuaucuugaccagcugaaccacauuuuggguauucuuggauccccaucacaagaagaccugaauuguauaauaaauuuaaaagcuaggaacuauuugcuuucucuuccacacaaaaauaaggugccauggaacaggcuguucccaaaugcugacuccaaagcucuggacuuauuggacaaaauguugacauucaacccacacaagaggauugaaguagaacaggcucuggcccacccauaucuggagcaguauuacgacccgagugacgagcccaucgccgaagcaccauucaaguucgacauggaauuggaugacuugccuaaggaaaagcucaaagaacuaauuuuugaagagacugcuagauuccagccaggauacagaucuuaaauuugucagguaccuggaguuuaauacagugagcucuagcaagggaggcgcugccuuuuguuucuagaauauuauguuccucaagguccauuauuuuguauucuuuuccaagcuccuuauuggaagguauuuuuuuaaauuuagaauuaaaaauuauuuagaaaguuacauauaaa

SEQ ID NO: 49770 - RNA, 19 nt, Artificial Sequence
  Description of Artificial Sequence: Synthetic oligonucleotide
gccccucccuccgcccgcc

SEQ ID NO: 49771 - RNA, 19 nt, Artificial Sequence
  Description of Artificial Sequence: Synthetic oligonucleotide
ccgccggcccgcccgucag

SEQ ID NO: 49772 - RNA, 19 nt, Artificial Sequence
  Description of Artificial Sequence: Synthetic oligonucleotide
gucuggcaggcaggcaggc

SEQ ID NO: 49773 - RNA, 19 nt, Artificial Sequence
  Description of Artificial Sequence: Synthetic oligonucleotide
caaucgguccgaguggcug

SEQ ID NO: 49774 - RNA, 19 nt, Artificial Sequence
  Description of Artificial Sequence: Synthetic oligonucleotide
gucggcucuucagcucucc

SEQ ID NO: 49775 - RNA, 19 nt, Artificial Sequence
  Description of Artificial Sequence: Synthetic oligonucleotide
ccgcucggcgucuuccuuc

SEQ ID NO: 49776 - RNA, 19 nt, Artificial Sequence
  Description of Artificial Sequence: Synthetic oligonucleotide
ccuccucccggucagcguc

SEQ ID NO: 49777 - RNA, 19 nt, Artificial Sequence
  Description of Artificial Sequence: Synthetic oligonucleotide
cggcggcugcaccggcggc

SEQ ID NO: 49778 - RNA, 19 nt, Artificial Sequence
  Description of Artificial Sequence: Synthetic oligonucleotide
cggcgcagucccugcggga

SEQ ID NO: 49779 - RNA, 19 nt, Artificial Sequence
  Description of Artificial Sequence: Synthetic oligonucleotide
aggggcgacaagagcugag

SEQ ID NO: 49780 - RNA, 19 nt, Artificial Sequence
  Description of Artificial Sequence: Synthetic oligonucleotide
gcggcggccgccgagcguc

SEQ ID NO: 49781 - RNA, 19 nt, Artificial Sequence
  Description of Artificial Sequence: Synthetic oligonucleotide
cgagcucagcgcggcggag

SEQ ID NO: 49782 - RNA, 19 nt, Artificial Sequence
  Description of Artificial Sequence: Synthetic oligonucleotide
ggcggcggcggcccggcag

SEQ ID NO: 49783 - RNA, 19 nt, Artificial Sequence
  Description of Artificial Sequence: Synthetic oligonucleotide
gccaacauggcggcggcgg

SEQ ID NO: 49784 - RNA, 19 nt, Artificial Sequence
  Description of Artificial Sequence: Synthetic oligonucleotide
gcggcggcgggcgcgggcc

SEQ ID NO: 49785 - RNA, 19 nt, Artificial Sequence
  Description of Artificial Sequence: Synthetic oligonucleotide
ccggagaugguccgcgggc

SEQ ID NO: 49786 - RNA, 19 nt, Artificial Sequence
  Description of Artificial Sequence: Synthetic oligonucleotide
cagguguucgacguggggc

SEQ ID NO: 49787 - RNA, 19 nt, Artificial Sequence
  Description of Artificial Sequence: Synthetic oligonucleotide
ccgcgcuacaccaaccucu

SEQ ID NO: 49788 - RNA, 19 nt, Artificial Sequence
  Description of Artificial Sequence: Synthetic oligonucleotide
ucguacaucggcgagggcg

SEQ ID NO: 49789 - RNA, 19 nt, Artificial Sequence
  Description of Artificial Sequence: Synthetic oligonucleotide
gccuacggcauggugugcu

SEQ ID NO: 49790 - RNA, 19 nt, Artificial Sequence
  Description of Artificial Sequence: Synthetic oligonucleotide
ucugcuuaugauaauguca

SEQ ID NO: 49791 - RNA, 19 nt, Artificial Sequence
  Description of Artificial Sequence: Synthetic oligonucleotide
aacaaaguucgaguagcua

SEQ ID NO: 49792 - RNA, 19 nt, Artificial Sequence
  Description of Artificial Sequence: Synthetic oligonucleotide
aucaagaaaaucagccccu

SEQ ID NO: 49793 - RNA, 19 nt, Artificial Sequence
  Description of Artificial Sequence: Synthetic oligonucleotide
uuugagcaccagaccuacu

SEQ ID NO: 49794 - RNA, 19 nt, Artificial Sequence
  Description of Artificial Sequence: Synthetic oligonucleotide
ugccagagaacccugaggg

SEQ ID NO: 49795 - RNA, 19 nt, Artificial Sequence
  Description of Artificial Sequence: Synthetic oligonucleotide
gagauaaaaaucuuacugc

SEQ ID NO: 49796 - RNA, 19 nt, Artificial Sequence
  Description of Artificial Sequence: Synthetic oligonucleotide
cgcuucagacaugagaaca

SEQ ID NO: 49797 - RNA, 19 nt, Artificial Sequence
  Description of Artificial Sequence: Synthetic oligonucleotide
aucauuggaaucaaugaca

SEQ ID NO: 49798 - RNA, 19 nt, Artificial Sequence
  Description of Artificial Sequence: Synthetic oligonucleotide
auuauucgagcaccaacca

SEQ ID NO: 49799 - RNA, 19 nt, Artificial Sequence
  Description of Artificial Sequence: Synthetic oligonucleotide
aucgagcaaaugaaagaug

SEQ ID NO: 49800 - RNA, 19 nt, Artificial Sequence
  Description of Artificial Sequence: Synthetic oligonucleotide
guauauauaguacaggacc

SEQ ID NO: 49801 - RNA, 19 nt, Artificial Sequence
  Description of Artificial Sequence: Synthetic oligonucleotide
cucauggaaacagaucuuu

SEQ ID NO: 49802 - RNA, 19 nt, Artificial Sequence
  Description of Artificial Sequence: Synthetic oligonucleotide
uacaagcucuugaagacac

SEQ ID NO: 49803 - RNA, 19 nt, Artificial Sequence
  Description of Artificial Sequence: Synthetic oligonucleotide
caacaccucagcaaugacc

SEQ ID NO: 49804 - RNA, 19 nt, Artificial Sequence
  Description of Artificial Sequence: Synthetic oligonucleotide
cauaucugcuauuuucucu

SEQ ID NO: 49805 - RNA, 19 nt, Artificial Sequence
  Description of Artificial Sequence: Synthetic oligonucleotide
uaccagauccucagagggu

SEQ ID NO: 49806 - RNA, 19 nt, Artificial Sequence
  Description of Artificial Sequence: Synthetic oligonucleotide
uuaaaauauauccauucag

SEQ ID NO: 49807 - RNA, 19 nt, Artificial Sequence
  Description of Artificial Sequence: Synthetic oligonucleotide
gcuaacguucugcaccgug

SEQ ID NO: 49808 - RNA, 19 nt, Artificial Sequence
  Description of Artificial Sequence: Synthetic oligonucleotide
gaccucaagccuuccaacc

SEQ ID NO: 49809 - RNA, 19 nt, Artificial Sequence
  Description of Artificial Sequence: Synthetic oligonucleotide
cugcugcucaacaccaccu

SEQ ID NO: 49810 - RNA, 19 nt, Artificial Sequence
  Description of Artificial Sequence: Synthetic oligonucleotide
ugugaucucaagaucugug

SEQ ID NO: 49811 - RNA, 19 nt, Artificial Sequence
  Description of Artificial Sequence: Synthetic oligonucleotide
gacuuuggccuggcccgug

SEQ ID NO: 49812 - RNA, 19 nt, Artificial Sequence
  Description of Artificial Sequence: Synthetic oligonucleotide
guugcagauccagaccaug

SEQ ID NO: 49813 - RNA, 19 nt, Artificial Sequence
  Description of Artificial Sequence: Synthetic oligonucleotide
gaucacacaggguuccuga

SEQ ID NO: 49814 - RNA, 19 nt, Artificial Sequence
  Description of Artificial Sequence: Synthetic oligonucleotide
acagaauauguggccacac

SEQ ID NO: 49815 - RNA, 19 nt, Artificial Sequence
  Description of Artificial Sequence: Synthetic oligonucleotide
cguugguacagggcuccag

SEQ ID NO: 49816 - RNA, 19 nt, Artificial Sequence
  Description of Artificial Sequence: Synthetic oligonucleotide
gaaauuauguugaauucca

SEQ ID NO: 49817 - RNA, 19 nt, Artificial Sequence
  Description of Artificial Sequence: Synthetic oligonucleotide
aagggcuacaccaagucca

SEQ ID NO: 49818 - RNA, 19 nt, Artificial Sequence
  Description of Artificial Sequence: Synthetic oligonucleotide
auugauauuuggucuguag

SEQ ID NO: 49819 - RNA, 19 nt, Artificial Sequence
  Description of Artificial Sequence: Synthetic oligonucleotide
ggcugcauucuggcagaaa

SEQ ID NO: 49820 - RNA, 19 nt, Artificial Sequence
  Description of Artificial Sequence: Synthetic oligonucleotide
augcuuucuaacaggccca

SEQ ID NO: 49821 - RNA, 19 nt, Artificial Sequence
  Description of Artificial Sequence: Synthetic oligonucleotide
aucuuuccagggaagcauu

SEQ ID NO: 49822 - RNA, 19 nt, Artificial Sequence
  Description of Artificial Sequence: Synthetic oligonucleotide
uaucuugaccagcugaacc

SEQ ID NO: 49823 - RNA, 19 nt, Artificial Sequence
  Description of Artificial Sequence: Synthetic oligonucleotide
cacauuuuggguauucuug

SEQ ID NO: 49824 - RNA, 19 nt, Artificial Sequence
  Description of Artificial Sequence: Synthetic oligonucleotide
ggauccccaucacaagaag

SEQ ID NO: 49825 - RNA, 19 nt, Artificial Sequence
  Description of Artificial Sequence: Synthetic oligonucleotide
gaccugaauuguauaauaa

SEQ ID NO: 49826 - RNA, 19 nt, Artificial Sequence
  Description of Artificial Sequence: Synthetic oligonucleotide
aauuuaaaagcuaggaacu

SEQ ID NO: 49827 - RNA, 19 nt, Artificial Sequence
  Description of Artificial Sequence: Synthetic oligonucleotide
uauuugcuuucucuuccac

SEQ ID NO: 49828 - RNA, 19 nt, Artificial Sequence
  Description of Artificial Sequence: Synthetic oligonucleotide
cacaaaaauaaggugccau

SEQ ID NO: 49829 - RNA, 19 nt, Artificial Sequence
  Description of Artificial Sequence: Synthetic oligonucleotide
uggaacaggcuguucccaa

SEQ ID NO: 49830 - RNA, 19 nt, Artificial Sequence
  Description of Artificial Sequence: Synthetic oligonucleotide
aaugcugacuccaaagcuc

SEQ ID NO: 49831 - RNA, 19 nt, Artificial Sequence
  Description of Artificial Sequence: Synthetic oligonucleotide
cuggacuuauuggacaaaa

SEQ ID NO: 49832 - RNA, 19 nt, Artificial Sequence
  Description of Artificial Sequence: Synthetic oligonucleotide
auguugacauucaacccac

SEQ ID NO: 49833 - RNA, 19 nt, Artificial Sequence
  Description of Artificial Sequence: Synthetic oligonucleotide
cacaagaggauugaaguag

SEQ ID NO: 49834 - RNA, 19 nt, Artificial Sequence
  Description of Artificial Sequence: Synthetic oligonucleotide
gaacaggcucuggcccacc

SEQ ID NO: 49835 - RNA, 19 nt, Artificial Sequence
  Description of Artificial Sequence: Synthetic oligonucleotide
ccauaucuggagcaguauu

SEQ ID NO: 49836 - RNA, 19 nt, Artificial Sequence
  Description of Artificial Sequence: Synthetic oligonucleotide
uacgacccgagugacgagc

SEQ ID NO: 49837 - RNA, 19 nt, Artificial Sequence
  Description of Artificial Sequence: Synthetic oligonucleotide
cccaucgccgaagcaccau

SEQ ID NO: 49838 - RNA, 19 nt, Artificial Sequence
  Description of Artificial Sequence: Synthetic oligonucleotide
uucaaguucgacauggaau

SEQ ID NO: 49839 - RNA, 19 nt, Artificial Sequence
  Description of Artificial Sequence: Synthetic oligonucleotide
uuggaugacuugccuaagg

SEQ ID NO: 49840 - RNA, 19 nt, Artificial Sequence
  Description of Artificial Sequence: Synthetic oligonucleotide
gaaaagcucaaagaacuaa

SEQ ID NO: 49841 - RNA, 19 nt, Artificial Sequence
  Description of Artificial Sequence: Synthetic oligonucleotide
auuuuugaagagacugcua

SEQ ID NO: 49842 - RNA, 19 nt, Artificial Sequence
  Description of Artificial Sequence: Synthetic oligonucleotide
agauuccagccaggauaca

SEQ ID NO: 49843 - RNA, 19 nt, Artificial Sequence
  Description of Artificial Sequence: Synthetic oligonucleotide
agaucuuaaauuugucagg

SEQ ID NO: 49844 - RNA, 19 nt, Artificial Sequence
  Description of Artificial Sequence: Synthetic oligonucleotide
guaccuggaguuuaauaca

SEQ ID NO: 49845 - RNA, 19 nt, Artificial Sequence
  Description of Artificial Sequence: Synthetic oligonucleotide
agugagcucuagcaaggga

SEQ ID NO: 49846 - RNA, 19 nt, Artificial Sequence
  Description of Artificial Sequence: Synthetic oligonucleotide
aggcgcugccuuuuguuuc

SEQ ID NO: 49847 - RNA, 19 nt, Artificial Sequence
  Description of Artificial Sequence: Synthetic oligonucleotide
cuagaauauuauguuccuc

SEQ ID NO: 49848 - RNA, 19 nt, Artificial Sequence
  Description of Artificial Sequence: Synthetic oligonucleotide
caagguccauuauuuugua

SEQ ID NO: 49849 - RNA, 19 nt, Artificial Sequence
  Description of Artificial Sequence: Synthetic oligonucleotide
auucuuuuccaagcuccuu

SEQ ID NO: 49850 - RNA, 19 nt, Artificial Sequence
  Description of Artificial Sequence: Synthetic oligonucleotide
uauuggaagguauuuuuuu

SEQ ID NO: 49851 - RNA, 19 nt, Artificial Sequence
  Description of Artificial Sequence: Synthetic oligonucleotide
uaaauuuagaauuaaaaau

SEQ ID NO: 49852 - RNA, 19 nt, Artificial Sequence
  Description of Artificial Sequence: Synthetic oligonucleotide
uuauuuagaaaguuacaua

SEQ ID NO: 49853 - RNA, 19 nt, Artificial Sequence
  Description of Artificial Sequence: Synthetic oligonucleotide
uuagaaaguuacauauaaa

SEQ ID NO: 49854 - RNA, 19 nt, Artificial Sequence
  Description of Artificial Sequence: Synthetic oligonucleotide
gacaagggcucagaggacu

SEQ ID NO: 49855 - RNA, 19 nt, Artificial Sequence
  Description of Artificial Sequence: Synthetic oligonucleotide
uggacgugcucagacaucg

SEQ ID NO: 49856 - RNA, 19 nt, Artificial Sequence
  Description of Artificial Sequence: Synthetic oligonucleotide
gguguucuucuucccaguu

SEQ ID NO: 49857 - RNA, 19 nt, Artificial Sequence
  Description of Artificial Sequence: Synthetic oligonucleotide
ucuugaccccugguccugu

SEQ ID NO: 49858 - RNA, 19 nt, Artificial Sequence
  Description of Artificial Sequence: Synthetic oligonucleotide
ucuccagcccgucuuggcu

SEQ ID NO: 49859 - RNA, 19 nt, Artificial Sequence
  Description of Artificial Sequence: Synthetic oligonucleotide
uuauccacuuugacuccuu

SEQ ID NO: 49860 - RNA, 19 nt, Artificial Sequence
  Description of Artificial Sequence: Synthetic oligonucleotide
uugagccguuuggaggggc

SEQ ID NO: 49861 - RNA, 19 nt, Artificial Sequence
  Description of Artificial Sequence: Synthetic oligonucleotide
cgguuucugguaguugugg

SEQ ID NO: 49862 - RNA, 19 nt, Artificial Sequence
  Description of Artificial Sequence: Synthetic oligonucleotide
gcuuuuaugcuuucaaaga

SEQ ID NO: 49863 - RNA, 19 nt, Artificial Sequence
  Description of Artificial Sequence: Synthetic oligonucleotide
aauuucuucaguccagaga

SEQ ID NO: 49864 - RNA, 19 nt, Artificial Sequence
  Description of Artificial Sequence: Synthetic oligonucleotide
aauuccuccuggcagcccu

SEQ ID NO: 49865 - RNA, 19 nt, Artificial Sequence
  Description of Artificial Sequence: Synthetic oligonucleotide
ugugugugucacccauugg

SEQ ID NO: 49866 - RNA, 19 nt, Artificial Sequence
  Description of Artificial Sequence: Synthetic oligonucleotide
gugaccugcggcaguaugu

SEQ ID NO: 49867 - RNA, 19 nt, Artificial Sequence
  Description of Artificial Sequence: Synthetic oligonucleotide
uacuucagugcaccuacug

SEQ ID NO: 49868 - RNA, 19 nt, Artificial Sequence
  Description of Artificial Sequence: Synthetic oligonucleotide
gcuuacuguugcuuuaguc

SEQ ID NO: 49869 - RNA, 19 nt, Artificial Sequence
  Description of Artificial Sequence: Synthetic oligonucleotide
cacuaauugcuuucugguu

SEQ ID NO: 49870 - RNA, 19 nt, Artificial Sequence
  Description of Artificial Sequence: Synthetic oligonucleotide
uugaaagaugcagugguuc

SEQ ID NO: 49871 - RNA, 19 nt, Artificial Sequence
  Description of Artificial Sequence: Synthetic oligonucleotide
ccucccucuccugaauccu

SEQ ID NO: 49872 - RNA, 19 nt, Artificial Sequence
  Description of Artificial Sequence: Synthetic oligonucleotide
uuuucuacaugaugcccug

SEQ ID NO: 49873 - RNA, 19 nt, Artificial Sequence
  Description of Artificial Sequence: Synthetic oligonucleotide
gcugaccaugcagccgcac

SEQ ID NO: 49874 - RNA, 19 nt, Artificial Sequence
  Description of Artificial Sequence: Synthetic oligonucleotide
ccagagagagauucuuccc

SEQ ID NO: 49875 - RNA, 19 nt, Artificial Sequence
  Description of Artificial Sequence: Synthetic oligonucleotide
ccaauuggcucuagucacu

SEQ ID NO: 49876 - RNA, 19 nt, Artificial Sequence
  Description of Artificial Sequence: Synthetic oligonucleotide
uggcaucucacuuuaugau

SEQ ID NO: 49877 - RNA, 19 nt, Artificial Sequence
  Description of Artificial Sequence: Synthetic oligonucleotide
uagggaaggcuacuaccua

SEQ ID NO: 49878 - RNA, 19 nt, Artificial Sequence
  Description of Artificial Sequence: Synthetic oligonucleotide
agggcacuuuaagucagug

SEQ ID NO: 49879 - RNA, 19 nt, Artificial Sequence
  Description of Artificial Sequence: Synthetic oligonucleotide
gacagccccuuauuugcac

SEQ ID NO: 49880 - RNA, 19 nt, Artificial Sequence
  Description of Artificial Sequence: Synthetic oligonucleotide
cuucaccuuuugaccauaa

SEQ ID NO: 49881 - RNA, 19 nt, Artificial Sequence
  Description of Artificial Sequence: Synthetic oligonucleotide
acuguuuccccagagcagg

SEQ ID NO: 49882 - RNA, 19 nt, Artificial Sequence
  Description of Artificial Sequence: Synthetic oligonucleotide
gagcuuguggaaauaccuu

SEQ ID NO: 49883 - RNA, 19 nt, Artificial Sequence
  Description of Artificial Sequence: Synthetic oligonucleotide
uggcugauguugcagccug

SEQ ID NO: 49884 - RNA, 19 nt, Artificial Sequence
  Description of Artificial Sequence: Synthetic oligonucleotide
gcagcaagugcuuccgucu

SEQ ID NO: 49885 - RNA, 19 nt, Artificial Sequence
  Description of Artificial Sequence: Synthetic oligonucleotide
uccggaauccuuggggagc

SEQ ID NO: 49886 - RNA, 19 nt, Artificial Sequence
  Description of Artificial Sequence: Synthetic oligonucleotide
cacuuguccacgucuuuuc

SEQ ID NO: 49887 - RNA, 19 nt, Artificial Sequence
  Description of Artificial Sequence: Synthetic oligonucleotide
cucauaucaugguagucac

SEQ ID NO: 49888 - RNA, 19 nt, Artificial Sequence
  Description of Artificial Sequence: Synthetic oligonucleotide
cuaacauauauaagguaug

SEQ ID NO: 49889 - RNA, 19 nt, Artificial Sequence
  Description of Artificial Sequence: Synthetic oligonucleotide
gugcuauuggcccagcuuu

SEQ ID NO: 49890 - RNA, 19 nt, Artificial Sequence
  Description of Artificial Sequence: Synthetic oligonucleotide
uuagaaaaugcagucauuu

SEQ ID NO: 49891 - RNA, 19 nt, Artificial Sequence
  Description of Artificial Sequence: Synthetic oligonucleotide
uuucuaaauaaaaaggaag

SEQ ID NO: 49892 - RNA, 19 nt, Artificial Sequence
  Description of Artificial Sequence: Synthetic oligonucleotide
guacugcacccagcagugu

SEQ ID NO: 49893 - RNA, 19 nt, Artificial Sequence
  Description of Artificial Sequence: Synthetic oligonucleotide
ucacucuguaguuacugug

SEQ ID NO: 49894 - RNA, 19 nt, Artificial Sequence
  Description of Artificial Sequence: Synthetic oligonucleotide
ggucacuuguaccauauag

SEQ ID NO: 49895 - RNA, 19 nt, Artificial Sequence
  Description of Artificial Sequence: Synthetic oligonucleotide
gagguguaacacuugucaa

SEQ ID NO: 49896 - RNA, 19 nt, Artificial Sequence
  Description of Artificial Sequence: Synthetic oligonucleotide
agaagcguuaugugcagua

SEQ ID NO: 49897 - RNA, 19 nt, Artificial Sequence
  Description of Artificial Sequence: Synthetic oligonucleotide
acuuaauguuuguaagacu

SEQ ID NO: 49898 - RNA, 19 nt, Artificial Sequence
  Description of Artificial Sequence: Synthetic oligonucleotide
uuacaaaaaaagauuuaaa

SEQ ID NO: 49899 - RNA, 19 nt, Artificial Sequence
  Description of Artificial Sequence: Synthetic oligonucleotide
aguggcagcuucacucgac

SEQ ID NO: 49900 - RNA, 19 nt, Artificial Sequence
  Description of Artificial Sequence: Synthetic oligonucleotide
cauuuggugagagaaguac

SEQ ID NO: 49901 - RNA, 19 nt, Artificial Sequence
  Description of Artificial Sequence: Synthetic oligonucleotide
caaagguugcagugcugag

SEQ ID NO: 49902 - RNA, 19 nt, Artificial Sequence
  Description of Artificial Sequence: Synthetic oligonucleotide
gcugugggcgguuucuggg

SEQ ID NO: 49903 - RNA, 19 nt, Artificial Sequence
  Description of Artificial Sequence: Synthetic oligonucleotide
ggaugucccaggguggaac

SEQ ID NO: 49904 - RNA, 19 nt, Artificial Sequence
  Description of Artificial Sequence: Synthetic oligonucleotide
cuccacaugcuggugcaua

SEQ ID NO: 49905 - RNA, 19 nt, Artificial Sequence
  Description of Artificial Sequence: Synthetic oligonucleotide
auacgcccuugagcuacuu

SEQ ID NO: 49906 - RNA, 19 nt, Artificial Sequence
  Description of Artificial Sequence: Synthetic oligonucleotide
ucaaauguggguguuucag

SEQ ID NO: 49907 - RNA, 19 nt, Artificial Sequence
  Description of Artificial Sequence: Synthetic oligonucleotide
guaaccacguuccaugccu

SEQ ID NO: 49908 - RNA, 19 nt, Artificial Sequence
  Description of Artificial Sequence: Synthetic oligonucleotide
ugaggauuuagcagagagg

SEQ ID NO: 49909 - RNA, 19 nt, Artificial Sequence
  Description of Artificial Sequence: Synthetic oligonucleotide
gaacacugcgucuuuaaau

SEQ ID NO: 49910 - RNA, 19 nt, Artificial Sequence
  Description of Artificial Sequence: Synthetic oligonucleotide
ugagaaaguauacaauucu

SEQ ID NO: 49911 - RNA, 19 nt, Artificial Sequence
  Description of Artificial Sequence: Synthetic oligonucleotide
uuuuuccuucuacagcaug

SEQ ID NO: 49912 - RNA, 19 nt, Artificial Sequence
  Description of Artificial Sequence: Synthetic oligonucleotide
gucagcaucucaaguucau

SEQ ID NO: 49913 - RNA, 19 nt, Artificial Sequence
  Description of Artificial Sequence: Synthetic oligonucleotide
uuuuucaaccuacaguaua

SEQ ID NO: 49914 - RNA, 19 nt, Artificial Sequence
  Description of Artificial Sequence: Synthetic oligonucleotide
aacaauuuguaauaaagcc

SEQ ID NO: 49915 - RNA, 19 nt, Artificial Sequence
  Description of Artificial Sequence: Synthetic oligonucleotide
cuccaggagcucaugacgu

SEQ ID NO: 49916 - RNA, 19 nt, Artificial Sequence
  Description of Artificial Sequence: Synthetic oligonucleotide
ugaagcacuguucuguccu

SEQ ID NO: 49917 - RNA, 19 nt, Artificial Sequence
  Description of Artificial Sequence: Synthetic oligonucleotide
ucaaguacucaaauauuuc

SEQ ID NO: 49918 - RNA, 19 nt, Artificial Sequence
  Description of Artificial Sequence: Synthetic oligonucleotide
cugauacugcugagucaga

SEQ ID NO: 49919 - RNA, 19 nt, Artificial Sequence
  Description of Artificial Sequence: Synthetic oligonucleotide
acugucagaaaaagcuagc

SEQ ID NO: 49920 - RNA, 19 nt, Artificial Sequence
  Description of Artificial Sequence: Synthetic oligonucleotide
cacuaacucguguuuggag

SEQ ID NO: 49921 - RNA, 19 nt, Artificial Sequence
  Description of Artificial Sequence: Synthetic oligonucleotide
gcucuauccauauuuuacu

SEQ ID NO: 49922 - RNA, 19 nt, Artificial Sequence
  Description of Artificial Sequence: Synthetic oligonucleotide
ugaucucuuuaaguauuug

SEQ ID NO: 49923 - RNA, 19 nt, Artificial Sequence
  Description of Artificial Sequence: Synthetic oligonucleotide
guuccugccacuguguacu

SEQ ID NO: 49924 - RNA, 19 nt, Artificial Sequence
  Description of Artificial Sequence: Synthetic oligonucleotide
uguggaguugacucggugu

SEQ ID NO: 49925 - RNA, 19 nt, Artificial Sequence
  Description of Artificial Sequence: Synthetic oligonucleotide
uucugucccagugcggugc

SEQ ID NO: 49926 - RNA, 19 nt, Artificial Sequence
  Description of Artificial Sequence: Synthetic oligonucleotide
ccuccucuugacuucccca

SEQ ID NO: 49927 - RNA, 19 nt, Artificial Sequence
  Description of Artificial Sequence: Synthetic oligonucleotide
acugcucucuguggugaga

SEQ ID NO: 49928 - RNA, 19 nt, Artificial Sequence
  Description of Artificial Sequence: Synthetic oligonucleotide
aaauuugccuuguucaaua

SEQ ID NO: 49929 - RNA, 19 nt, Artificial Sequence
  Description of Artificial Sequence: Synthetic oligonucleotide
aauuacuguacccucgcau

SEQ ID NO: 49930 - RNA, 19 nt, Artificial Sequence
  Description of Artificial Sequence: Synthetic oligonucleotide
ugacuguuacagcuuucug

SEQ ID NO: 49931 - RNA, 19 nt, Artificial Sequence
  Description of Artificial Sequence: Synthetic oligonucleotide
gugcagagaugacugucca

SEQ ID NO: 49932 - RNA, 19 nt, Artificial Sequence
  Description of Artificial Sequence: Synthetic oligonucleotide
aagugccacaugccuacga

SEQ ID NO: 49933 - RNA, 19 nt, Artificial Sequence
  Description of Artificial Sequence: Synthetic oligonucleotide
auugaaaugaaaacucuau

SEQ ID NO: 49934 - RNA, 19 nt, Artificial Sequence
  Description of Artificial Sequence: Synthetic oligonucleotide
uuguuaccucugaguugug

SEQ ID NO: 49935 - RNA, 19 nt, Artificial Sequence
  Description of Artificial Sequence: Synthetic oligonucleotide
guuccacggaaaaugcuau

SEQ ID NO: 49936 - RNA, 19 nt, Artificial Sequence
  Description of Artificial Sequence: Synthetic oligonucleotide
uccagcagaucauuuagga

SEQ ID NO: 49937 - RNA, 19 nt, Artificial Sequence
  Description of Artificial Sequence: Synthetic oligonucleotide
aaaaauaauucuauuuuua

SEQ ID NO: 49938 - RNA, 19 nt, Artificial Sequence
  Description of Artificial Sequence: Synthetic oligonucleotide
agcuuuucauuucucagcu

SEQ ID NO: 49939 - RNA, 19 nt, Artificial Sequence
  Description of Artificial Sequence: Synthetic oligonucleotide
uguccuuuuuucuuguuug

SEQ ID NO: 49940 - RNA, 19 nt, Artificial Sequence
  Description of Artificial Sequence: Synthetic oligonucleotide
gauuuuugacagcaaugga

SEQ ID NO: 49941 - RNA, 19 nt, Artificial Sequence
  Description of Artificial Sequence: Synthetic oligonucleotide
agaauggguuauauaaaga

SEQ ID NO: 49942 - RNA, 19 nt, Artificial Sequence
  Description of Artificial Sequence: Synthetic oligonucleotide
acugccugcuaauaugaac

SEQ ID NO: 49943 - RNA, 19 nt, Artificial Sequence
  Description of Artificial Sequence: Synthetic oligonucleotide
cagaaaugcauuuguaauu

SEQ ID NO: 49944 - RNA, 19 nt, Artificial Sequence
  Description of Artificial Sequence: Synthetic oligonucleotide
ucaugaaaauaaauguaca

SEQ ID NO: 49945 - RNA, 19 nt, Artificial Sequence
  Description of Artificial Sequence: Synthetic oligonucleotide
aucuucuaucuucacauuc

SEQ ID NO: 49946 - RNA, 19 nt, Artificial Sequence
  Description of Artificial Sequence: Synthetic oligonucleotide
cauguuaagauucaguguu

SEQ ID NO: 49947 - RNA, 19 nt, Artificial Sequence
  Description of Artificial Sequence: Synthetic oligonucleotide
ugcuuuccucuggaucagc

SEQ ID NO: 49948 - RNA, 19 nt, Artificial Sequence
  Description of Artificial Sequence: Synthetic oligonucleotide
cgugucugaauggacaguc

SEQ ID NO: 49949 - RNA, 19 nt, Artificial Sequence
  Description of Artificial Sequence: Synthetic oligonucleotide
cagguucagguugugcuga

SEQ ID NO: 49950 - RNA, 19 nt, Artificial Sequence
  Description of Artificial Sequence: Synthetic oligonucleotide
aacacagaaaugcucacag

SEQ ID NO: 49951 - RNA, 19 nt, Artificial Sequence
  Description of Artificial Sequence: Synthetic oligonucleotide
ggccucacuuugccgccca

SEQ ID NO: 49952 - RNA, 19 nt, Artificial Sequence
  Description of Artificial Sequence: Synthetic oligonucleotide
aggcacuggcccagcacuu

SEQ ID NO: 49953 - RNA, 19 nt, Artificial Sequence
  Description of Artificial Sequence: Synthetic oligonucleotide
uggauuuacauaagaugag

SEQ ID NO: 49954 - RNA, 19 nt, Artificial Sequence
  Description of Artificial Sequence: Synthetic oligonucleotide
guuagaaagguacuucugu

SEQ ID NO: 49955 - RNA, 19 nt, Artificial Sequence
  Description of Artificial Sequence: Synthetic oligonucleotide
uaggguccuuuuuaccucu

SEQ ID NO: 49956 - RNA, 19 nt, Artificial Sequence
  Description of Artificial Sequence: Synthetic oligonucleotide
ugcucggcagagaaucgau

SEQ ID NO: 49957 - RNA, 19 nt, Artificial Sequence
  Description of Artificial Sequence: Synthetic oligonucleotide
ugcugucauguuccuuuau

SEQ ID NO: 49958 - RNA, 19 nt, Artificial Sequence
  Description of Artificial Sequence: Synthetic oligonucleotide
uucacaaucuuaggucuca

SEQ ID NO: 49959 - RNA, 19 nt, Artificial Sequence
  Description of Artificial Sequence: Synthetic oligonucleotide
aaauauucugucaaacccu

SEQ ID NO: 49960 - RNA, 19 nt, Artificial Sequence
  Description of Artificial Sequence: Synthetic oligonucleotide
uaacaaagaagccccgaca

SEQ ID NO: 49961 - RNA, 19 nt, Artificial Sequence
  Description of Artificial Sequence: Synthetic oligonucleotide
aucucagguuggauucccu

SEQ ID NO: 49962 - RNA, 19 nt, Artificial Sequence
  Description of Artificial Sequence: Synthetic oligonucleotide
ugguucucucuaaagaggg

SEQ ID NO: 49963 - RNA, 19 nt, Artificial Sequence
  Description of Artificial Sequence: Synthetic oligonucleotide
gccugcccuugugccccag

SEQ ID NO: 49964 - RNA, 19 nt, Artificial Sequence
  Description of Artificial Sequence: Synthetic oligonucleotide
gaggugcugcugggcacag

SEQ ID NO: 49965 - RNA, 19 nt, Artificial Sequence
  Description of Artificial Sequence: Synthetic oligonucleotide
gccaagaguugggaagggc

SEQ ID NO: 49966 - RNA, 19 nt, Artificial Sequence
  Description of Artificial Sequence: Synthetic oligonucleotide
ccgccccacaguacgcagu

SEQ ID NO: 49967 - RNA, 19 nt, Artificial Sequence
  Description of Artificial Sequence: Synthetic oligonucleotide
uccucaccacccagcccag

SEQ ID NO: 49968 - RNA, 19 nt, Artificial Sequence
  Description of Artificial Sequence: Synthetic oligonucleotide
gggugcucacgcucaccac

SEQ ID NO: 49969 - RNA, 19 nt, Artificial Sequence
  Description of Artificial Sequence: Synthetic oligonucleotide
cuccuguggcugaggaagg

SEQ ID NO: 49970 - RNA, 19 nt, Artificial Sequence
  Description of Artificial Sequence: Synthetic oligonucleotide
gauagcuggcucauccucg

SEQ ID NO: 49971 - RNA, 19 nt, Artificial Sequence
  Description of Artificial Sequence: Synthetic oligonucleotide
ggaaaacagacccacaucu

SEQ ID NO: 49972 - RNA, 19 nt, Artificial Sequence
  Description of Artificial Sequence: Synthetic oligonucleotide
ucuauucuugcccugaaau

SEQ ID NO: 49973 - RNA, 19 nt, Artificial Sequence
  Description of Artificial Sequence: Synthetic oligonucleotide
uacgcgcuuuucacuugcg

SEQ ID NO: 49974 - RNA, 19 nt, Artificial Sequence
  Description of Artificial Sequence: Synthetic oligonucleotide
gugcucagagcugccgucu

SEQ ID NO: 49975 - RNA, 19 nt, Artificial Sequence
  Description of Artificial Sequence: Synthetic oligonucleotide
ugaagguccacacagcauu

SEQ ID NO: 49976 - RNA, 19 nt, Artificial Sequence
  Description of Artificial Sequence: Synthetic oligonucleotide
ugacgggacacagaaaugu

SEQ ID NO: 49977 - RNA, 19 nt, Artificial Sequence
  Description of Artificial Sequence: Synthetic oligonucleotide
ugacuguuaccggauaaca

SEQ ID NO: 49978 - RNA, 19 nt, Artificial Sequence
  Description of Artificial Sequence: Synthetic oligonucleotide
acugauuagucaguuuuca

SEQ ID NO: 49979 - RNA, 19 nt, Artificial Sequence
  Description of Artificial Sequence: Synthetic oligonucleotide
auuuauaaaaaagcauuga

SEQ ID NO: 49980 - RNA, 19 nt, Artificial Sequence
  Description of Artificial Sequence: Synthetic oligonucleotide
acaguuuuauuacucuugu

SEQ ID NO: 49981 - RNA, 19 nt, Artificial Sequence
  Description of Artificial Sequence: Synthetic oligonucleotide
uuucuuuuuaaauggaaag

SEQ ID NO: 49982 - RNA, 19 nt, Artificial Sequence
  Description of Artificial Sequence: Synthetic oligonucleotide
guuacuauuauaagguuaa

SEQ ID NO: 49983 - RNA, 19 nt, Artificial Sequence
  Description of Artificial Sequence: Synthetic oligonucleotide
auuuggaguccucuucuaa

SEQ ID NO: 49984 - RNA, 19 nt, Artificial Sequence
  Description of Artificial Sequence: Synthetic oligonucleotide
aauagaaaaccauauccuu

SEQ ID NO: 49985 - RNA, 19 nt, Artificial Sequence
  Description of Artificial Sequence: Synthetic oligonucleotide
uggcuacuaacaucuggag

SEQ ID NO: 49986 - RNA, 19 nt, Artificial Sequence
  Description of Artificial Sequence: Synthetic oligonucleotide
gacugugagcuccuuccca

SEQ ID NO: 49987 - RNA, 19 nt, Artificial Sequence
  Description of Artificial Sequence: Synthetic oligonucleotide
auuccccuuccugguacug

SEQ ID NO: 49988 - RNA, 19 nt, Artificial Sequence
  Description of Artificial Sequence: Synthetic oligonucleotide
guggagucagauuggcaug

SEQ ID NO: 49989 - RNA, 19 nt, Artificial Sequence
  Description of Artificial Sequence: Synthetic oligonucleotide
gaaaccacuaacuucauuc

SEQ ID NO: 49990 - RNA, 19 nt, Artificial Sequence
  Description of Artificial Sequence: Synthetic oligonucleotide
cuagaaucauuguagccau

SEQ ID NO: 49991 - RNA, 19 nt, Artificial Sequence
  Description of Artificial Sequence: Synthetic oligonucleotide
uaaguugugugcuuuuuau

SEQ ID NO: 49992 - RNA, 19 nt, Artificial Sequence
  Description of Artificial Sequence: Synthetic oligonucleotide
uuaaucaugccaaacauaa

SEQ ID NO: 49993 - RNA, 19 nt, Artificial Sequence
  Description of Artificial Sequence: Synthetic oligonucleotide
auguaacugggcagagaau

SEQ ID NO: 49994 - RNA, 19 nt, Artificial Sequence
  Description of Artificial Sequence: Synthetic oligonucleotide
ugguccuaaccaagguacc

SEQ ID NO: 49995 - RNA, 19 nt, Artificial Sequence
  Description of Artificial Sequence: Synthetic oligonucleotide
cuaugaaaagcgcuagcua

SEQ ID NO: 49996 - RNA, 19 nt, Artificial Sequence
  Description of Artificial Sequence: Synthetic oligonucleotide
aucauguguaguagaugca

SEQ ID NO: 49997 - RNA, 19 nt, Artificial Sequence
  Description of Artificial Sequence: Synthetic oligonucleotide
aucauuuuggcucuucuua

SEQ ID NO: 49998 - RNA, 19 nt, Artificial Sequence
  Description of Artificial Sequence: Synthetic oligonucleotide
acauuuguaaaaauguaca

SEQ ID NO: 49999 - RNA, 19 nt, Artificial Sequence
  Description of Artificial Sequence: Synthetic oligonucleotide
agauuaggucaucuuaauu

SEQ ID NO: 50000 - RNA, 19 nt, Artificial Sequence
  Description of Artificial Sequence: Synthetic oligonucleotide
ucauauuagugacacggaa

SEQ ID NO: 50001 - RNA, 19 nt, Artificial Sequence
  Description of Artificial Sequence: Synthetic oligonucleotide
acagcaccuccacuauuug

SEQ ID NO: 50002 - RNA, 19 nt, Artificial Sequence
  Description of Artificial Sequence: Synthetic oligonucleotide
guauguucaaauaagcuuu

SEQ ID NO: 50003 - RNA, 19 nt, Artificial Sequence
  Description of Artificial Sequence: Synthetic oligonucleotide
ucagacuaauagcuuuuuu

SEQ ID NO: 50004 - RNA, 19 nt, Artificial Sequence
  Description of Artificial Sequence: Synthetic oligonucleotide
uggugucuaaaauguaagc

SEQ ID NO: 50005 - RNA, 19 nt, Artificial Sequence
  Description of Artificial Sequence: Synthetic oligonucleotide
caaaaaauuccugcugaaa

SEQ ID NO: 50006 - RNA, 19 nt, Artificial Sequence
  Description of Artificial Sequence: Synthetic oligonucleotide
acauuccaguccuuucauu

SEQ ID NO: 50007 - RNA, 19 nt, Artificial Sequence
  Description of Artificial Sequence: Synthetic oligonucleotide
uuaguauaaaagaaauacu

SEQ ID NO: 50008 - RNA, 19 nt, Artificial Sequence
  Description of Artificial Sequence: Synthetic oligonucleotide
ugaacaagccagugggaug

SEQ ID NO: 50009 - RNA, 19 nt, Artificial Sequence
  Description of Artificial Sequence: Synthetic oligonucleotide
ggaauugaaagaacuaauc

SEQ ID NO: 50010 - RNA, 19 nt, Artificial Sequence
  Description of Artificial Sequence: Synthetic oligonucleotide
caugaggacucuguccuga

SEQ ID NO: 50011 - RNA, 19 nt, Artificial Sequence
  Description of Artificial Sequence: Synthetic oligonucleotide
acacagguccucaaagcua

SEQ ID NO: 50012 - RNA, 19 nt, Artificial Sequence
  Description of Artificial Sequence: Synthetic oligonucleotide
agcagagauacgcagacau

SEQ ID NO: 50013 - RNA, 19 nt, Artificial Sequence
  Description of Artificial Sequence: Synthetic oligonucleotide
uuguggcaucuggguagaa

SEQ ID NO: 50014 - RNA, 19 nt, Artificial Sequence
  Description of Artificial Sequence: Synthetic oligonucleotide
agaauacuguauugugugu

SEQ ID NO: 50015 - RNA, 19 nt, Artificial Sequence
  Description of Artificial Sequence: Synthetic oligonucleotide
ugcagugcacagugugugg

SEQ ID NO: 50016 - RNA, 19 nt, Artificial Sequence
  Description of Artificial Sequence: Synthetic oligonucleotide
gugugugcacacucauucc

SEQ ID NO: 50017 - RNA, 19 nt, Artificial Sequence
  Description of Artificial Sequence: Synthetic oligonucleotide
cuucugcucuugggcacag

SEQ ID NO: 50018 - RNA, 19 nt, Artificial Sequence
  Description of Artificial Sequence: Synthetic oligonucleotide
ggcaguggguguagaggua

SEQ ID NO: 50019 - RNA, 19 nt, Artificial Sequence
  Description of Artificial Sequence: Synthetic oligonucleotide
aaccaguagcuuugagaag

SEQ ID NO: 50020 - RNA, 19 nt, Artificial Sequence
  Description of Artificial Sequence: Synthetic oligonucleotide
gcuacauguagcucaccag

SEQ ID NO: 50021 - RNA, 19 nt, Artificial Sequence
  Description of Artificial Sequence: Synthetic oligonucleotide
gugguuuucucuaaggaau

SEQ ID NO: 50022 - RNA, 19 nt, Artificial Sequence
  Description of Artificial Sequence: Synthetic oligonucleotide
ucacaaaaguaaacuaccc

SEQ ID NO: 50023 - RNA, 19 nt, Artificial Sequence
  Description of Artificial Sequence: Synthetic oligonucleotide
caaccacaugccacguaau

SEQ ID NO: 50024 - RNA, 19 nt, Artificial Sequence
  Description of Artificial Sequence: Synthetic oligonucleotide
uauuucagccauucagagg

SEQ ID NO: 50025 - RNA, 19 nt, Artificial Sequence
  Description of Artificial Sequence: Synthetic oligonucleotide
gaaacuguuuucucuuuau

SEQ ID NO: 50026 - RNA, 19 nt, Artificial Sequence
  Description of Artificial Sequence: Synthetic oligonucleotide
uuugcuuauauguuaauau

SEQ ID NO: 50027 - RNA, 19 nt, Artificial Sequence
  Description of Artificial Sequence: Synthetic oligonucleotide
ugguuuuuaaauugguaac

SEQ ID NO: 50028 - RNA, 19 nt, Artificial Sequence
  Description of Artificial Sequence: Synthetic oligonucleotide
cuuuuauauaguaugguaa

SEQ ID NO: 50029 - RNA, 19 nt, Artificial Sequence
  Description of Artificial Sequence: Synthetic oligonucleotide
acaguauguuaauacacac

SEQ ID NO: 50030 - RNA, 19 nt, Artificial Sequence
  Description of Artificial Sequence: Synthetic oligonucleotide
cauacauacgcacacaugc

SEQ ID NO: 50031 - RNA, 19 nt, Artificial Sequence
  Description of Artificial Sequence: Synthetic oligonucleotide
cuuuggguccuuccauaau

SEQ ID NO: 50032 - RNA, 19 nt, Artificial Sequence
  Description of Artificial Sequence: Synthetic oligonucleotide
uacuuuuauauuuguaaau

SEQ ID NO: 50033 - RNA, 19 nt, Artificial Sequence
  Description of Artificial Sequence: Synthetic oligonucleotide
ucaauguuuuggagcaauc

SEQ ID NO: 50034 - RNA, 19 nt, Artificial Sequence
  Description of Artificial Sequence: Synthetic oligonucleotide
cccaaguuuaagggaaaua

SEQ ID NO: 50035 - RNA, 19 nt, Artificial Sequence
  Description of Artificial Sequence: Synthetic oligonucleotide
auuuuuguaaauguaaugg

SEQ ID NO: 50036 - RNA, 19 nt, Artificial Sequence
  Description of Artificial Sequence: Synthetic oligonucleotide
guuuugaaaaucugagcaa

SEQ ID NO: 50037 - RNA, 19 nt, Artificial Sequence
  Description of Artificial Sequence: Synthetic oligonucleotide
auccuuuugcuuauacauu

SEQ ID NO: 50038 - RNA, 19 nt, Artificial Sequence
  Description of Artificial Sequence: Synthetic oligonucleotide
uuuuaaagcauuugugcuu

SEQ ID NO: 50039 - RNA, 19 nt, Artificial Sequence
  Description of Artificial Sequence: Synthetic oligonucleotide
uuaaaauuguuaugcuggu

SEQ ID NO: 50040 - RNA, 19 nt, Artificial Sequence
  Description of Artificial Sequence: Synthetic oligonucleotide
uguuugaaacaugauacuc

SEQ ID NO: 50041 - RNA, 19 nt, Artificial Sequence
  Description of Artificial Sequence: Synthetic oligonucleotide
ccuguggugcagaugagaa

SEQ ID NO: 50042 - RNA, 19 nt, Artificial Sequence
  Description of Artificial Sequence: Synthetic oligonucleotide
agcuauaacagugaauaug

SEQ ID NO: 50043 - RNA, 19 nt, Artificial Sequence
  Description of Artificial Sequence: Synthetic oligonucleotide
gugguuucucuuacgucau

SEQ ID NO: 50044 - RNA, 19 nt, Artificial Sequence
  Description of Artificial Sequence: Synthetic oligonucleotide
uccaccuugacaugauggg

SEQ ID NO: 50045 - RNA, 19 nt, Artificial Sequence
  Description of Artificial Sequence: Synthetic oligonucleotide
gucagaaacaaauggaaau

SEQ ID NO: 50046 - RNA, 19 nt, Artificial Sequence
  Description of Artificial Sequence: Synthetic oligonucleotide
uccagagcaaguccuccag

SEQ ID NO: 50047 - RNA, 19 nt, Artificial Sequence
  Description of Artificial Sequence: Synthetic oligonucleotide
ggguugcaccagguuuacc

SEQ ID NO: 50048 - RNA, 19 nt, Artificial Sequence
  Description of Artificial Sequence: Synthetic oligonucleotide
cuaaagcuuguugccuuuu

SEQ ID NO: 50049 - RNA, 19 nt, Artificial Sequence
  Description of Artificial Sequence: Synthetic oligonucleotide
ucuugugcuguuuaugcgu

SEQ ID NO: 50050 - RNA, 19 nt, Artificial Sequence
  Description of Artificial Sequence: Synthetic oligonucleotide
uguagagcacucaagaaag

SEQ ID NO: 50051 - RNA, 19 nt, Artificial Sequence
  Description of Artificial Sequence: Synthetic oligonucleotide
guucugaaacugcuuugua

SEQ ID NO: 50052 - RNA, 19 nt, Artificial Sequence
  Description of Artificial Sequence: Synthetic oligonucleotide
aucugcuuuguacuguugg

SEQ ID NO: 50053 - RNA, 19 nt, Artificial Sequence
  Description of Artificial Sequence: Synthetic oligonucleotide
gugccuucuugguauugua

SEQ ID NO: 50054 - RNA, 19 nt, Artificial Sequence
  Description of Artificial Sequence: Synthetic oligonucleotide
accccaaaauucugcauag

SEQ ID NO: 50055 - RNA, 19 nt, Artificial Sequence
  Description of Artificial Sequence: Synthetic oligonucleotide
gauuauuuaguauaauggu

SEQ ID NO: 50056 - RNA, 19 nt, Artificial Sequence
  Description of Artificial Sequence: Synthetic oligonucleotide
uaaguuaaaaaauguuaaa

SEQ ID NO: 50057 - RNA, 19 nt, Artificial Sequence
  Description of Artificial Sequence: Synthetic oligonucleotide
aggaagauuuuauuaagaa

SEQ ID NO: 50058 - RNA, 19 nt, Artificial Sequence
  Description of Artificial Sequence: Synthetic oligonucleotide
aucugaauguuuauucauu

SEQ ID NO: 50059 - RNA, 19 nt, Artificial Sequence
  Description of Artificial Sequence: Synthetic oligonucleotide
uauauuguuacaauuuaac

SEQ ID NO: 50060 - RNA, 19 nt, Artificial Sequence
  Description of Artificial Sequence: Synthetic oligonucleotide
cauuaacauuuauuugugg

SEQ ID NO: 50061 - RNA, 19 nt, Artificial Sequence
  Description of Artificial Sequence: Synthetic oligonucleotide
guauuugugauuugguuaa

SEQ ID NO: 50062 - RNA, 19 nt, Artificial Sequence
  Description of Artificial Sequence: Synthetic oligonucleotide
aucuguauaaaaauuguaa

SEQ ID NO: 50063 - RNA, 19 nt, Artificial Sequence
  Description of Artificial Sequence: Synthetic oligonucleotide
aguagaaagguuuauauuu

SEQ ID NO: 50064 - RNA, 19 nt, Artificial Sequence
  Description of Artificial Sequence: Synthetic oligonucleotide
ucaucuuaauucuuuugau

SEQ ID NO: 50065 - RNA, 19 nt, Artificial Sequence
  Description of Artificial Sequence: Synthetic oligonucleotide
uguuguaaacguacuuuuu

SEQ ID NO: 50066 - RNA, 19 nt, Artificial Sequence
  Description of Artificial Sequence: Synthetic oligonucleotide
uaaaagauggauuauuuga

SEQ ID NO: 50067 - RNA, 19 nt, Artificial Sequence
  Description of Artificial Sequence: Synthetic oligonucleotide
aauguuuauggcaccugac

SEQ ID NO: 50068 - RNA, 19 nt, Artificial Sequence
  Description of Artificial Sequence: Synthetic oligonucleotide
uacaaaaaaauccuuagaa

SEQ ID NO: 50069 - RNA, 19 nt, Artificial Sequence
  Description of Artificial Sequence: Synthetic oligonucleotide
aucauuaaauugugucccu

SEQ ID NO: 50070 - RNA, 19 nt, Artificial Sequence
  Description of Artificial Sequence: Synthetic oligonucleotide
uguauuaccaaaauaacac

SEQ ID NO: 50071 - RNA, 19 nt, Artificial Sequence
  Description of Artificial Sequence: Synthetic oligonucleotide
cagcaccgugcauguauag

SEQ ID NO: 50072 - RNA, 19 nt, Artificial Sequence
  Description of Artificial Sequence: Synthetic oligonucleotide
guuuaauugcaguuucauc

SEQ ID NO: 50073 - RNA, 19 nt, Artificial Sequence
  Description of Artificial Sequence: Synthetic oligonucleotide
cugugaaaacgugaaauug

SEQ ID NO: 50074 - RNA, 19 nt, Artificial Sequence
  Description of Artificial Sequence: Synthetic oligonucleotide
gucuaguccuucguuaugu

SEQ ID NO: 50075 - RNA, 19 nt, Artificial Sequence
  Description of Artificial Sequence: Synthetic oligonucleotide
uuccccagaugucuuccag

SEQ ID NO: 50076 - RNA, 19 nt, Artificial Sequence
  Description of Artificial Sequence: Synthetic oligonucleotide
gauuugcucugcauguggu

SEQ ID NO: 50077 - RNA, 19 nt, Artificial Sequence
  Description of Artificial Sequence: Synthetic oligonucleotide
uaacuuguguuagggcugu

SEQ ID NO: 50078 - RNA, 19 nt, Artificial Sequence
  Description of Artificial Sequence: Synthetic oligonucleotide
ugagcuguuccucgaguug

SEQ ID NO: 50079 - RNA, 19 nt, Artificial Sequence
  Description of Artificial Sequence: Synthetic oligonucleotide
gaauggggaugucagugcu

SEQ ID NO: 50080 - RNA, 19 nt, Artificial Sequence
  Description of Artificial Sequence: Synthetic oligonucleotide
uccuaggguucuccaggug

SEQ ID NO: 50081 - RNA, 19 nt, Artificial Sequence
  Description of Artificial Sequence: Synthetic oligonucleotide
gguucuucagaccuucacc

SEQ ID NO: 50082 - RNA, 19 nt, Artificial Sequence
  Description of Artificial Sequence: Synthetic oligonucleotide
gcggugcccacgcccaucu

SEQ ID NO: 50083 - RNA, 19 nt, Artificial Sequence
  Description of Artificial Sequence: Synthetic oligonucleotide
uccucauccuccugaacuu

SEQ ID NO: 50084 - RNA, 19 nt, Artificial Sequence
  Description of Artificial Sequence: Synthetic oligonucleotide
ucugcaaccccacugcugg

SEQ ID NO: 50085 - RNA, 19 nt, Artificial Sequence
  Description of Artificial Sequence: Synthetic oligonucleotide
ggcagacauccugggcaac

SEQ ID NO: 50086 - RNA, 19 nt, Artificial Sequence
  Description of Artificial Sequence: Synthetic oligonucleotide
ccccuuuuuucagagcaag

SEQ ID NO: 50087 - RNA, 19 nt, Artificial Sequence
  Description of Artificial Sequence: Synthetic oligonucleotide
gaagucauaaagauaggau

SEQ ID NO: 50088 - RNA, 19 nt, Artificial Sequence
  Description of Artificial Sequence: Synthetic oligonucleotide
uuucuuggacauuugguuc

SEQ ID NO: 50089 - RNA, 19 nt, Artificial Sequence
  Description of Artificial Sequence: Synthetic oligonucleotide
cuuaucaauauugggcauu

SEQ ID NO: 50090 - RNA, 19 nt, Artificial Sequence
  Description of Artificial Sequence: Synthetic oligonucleotide
uauguaaugacuuauuuac

SEQ ID NO: 50091 - RNA, 19 nt, Artificial Sequence
  Description of Artificial Sequence: Synthetic oligonucleotide
caaaacaaagauacuggaa

SEQ ID NO: 50092 - RNA, 19 nt, Artificial Sequence
  Description of Artificial Sequence: Synthetic oligonucleotide
aaauguuuuggauguggug

SEQ ID NO: 50093 - RNA, 19 nt, Artificial Sequence
  Description of Artificial Sequence: Synthetic oligonucleotide
guuauggaaagagcacagg

SEQ ID NO: 50094 - RNA, 19 nt, Artificial Sequence
  Description of Artificial Sequence: Synthetic oligonucleotide
gccuuggacccauccagcu

SEQ ID NO: 50095 - RNA, 19 nt, Artificial Sequence
  Description of Artificial Sequence: Synthetic oligonucleotide
uggguucagaacuaccccc

SEQ ID NO: 50096 - RNA, 19 nt, Artificial Sequence
  Description of Artificial Sequence: Synthetic oligonucleotide
cugcuuauaacugcggcug

SEQ ID NO: 50097 - RNA, 19 nt, Artificial Sequence
  Description of Artificial Sequence: Synthetic oligonucleotide
ggcugugggccagucauuc

SEQ ID NO: 50098 - RNA, 19 nt, Artificial Sequence
  Description of Artificial Sequence: Synthetic oligonucleotide
cugcgucucugcuuucuuc

SEQ ID NO: 50099 - RNA, 19 nt, Artificial Sequence
  Description of Artificial Sequence: Synthetic oligonucleotide
ccucugcuucagacuguca

SEQ ID NO: 50100 - RNA, 19 nt, Artificial Sequence
  Description of Artificial Sequence: Synthetic oligonucleotide
agcuguaaaguggaagcaa

SEQ ID NO: 50101 - RNA, 19 nt, Artificial Sequence
  Description of Artificial Sequence: Synthetic oligonucleotide
auauuacuugccuuguaua

SEQ ID NO: 50102 - RNA, 19 nt, Artificial Sequence
  Description of Artificial Sequence: Synthetic oligonucleotide
augguaaagauuauaaaaa

SEQ ID NO: 50103 - RNA, 19 nt, Artificial Sequence
  Description of Artificial Sequence: Synthetic oligonucleotide
auacauuucaacuguucag

SEQ ID NO: 50104 - RNA, 19 nt, Artificial Sequence
  Description of Artificial Sequence: Synthetic oligonucleotide
gcauaguacuucaaagcaa

SEQ ID NO: 50105 - RNA, 19 nt, Artificial Sequence
  Description of Artificial Sequence: Synthetic oligonucleotide
aguacucaguaaauagcaa

SEQ ID NO: 50106 - RNA, 19 nt, Artificial Sequence
  Description of Artificial Sequence: Synthetic oligonucleotide
aauagcaagucuuuuuaaa

SEQ ID NO: 50107 - RNA, 25 nt, Artificial Sequence
  Description of Artificial Sequence: Synthetic oligonucleotide
gccccucccuccgcccgcccgccgg

SEQ ID NO: 50108 - RNA, 25 nt, Artificial Sequence
  Description of Artificial Sequence: Synthetic oligonucleotide
gcccgcccgucagucuggcaggcag

SEQ ID NO: 50109 - RNA, 25 nt, Artificial Sequence
  Description of Artificial Sequence: Synthetic oligonucleotide
ggcaggcaaucgguccgaguggcug

SEQ ID NO: 50110 - RNA, 25 nt, Artificial Sequence
  Description of Artificial Sequence: Synthetic oligonucleotide
gucggcucuucagcucucccgcucg

SEQ ID NO: 50111 - RNA, 25 nt, Artificial Sequence
  Description of Artificial Sequence: Synthetic oligonucleotide
ggcgucuuccuuccuccucccgguc

SEQ ID NO: 50112 - RNA, 25 nt, Artificial Sequence
  Description of Artificial Sequence: Synthetic oligonucleotide
cagcgucggcggcugcaccggcggc

SEQ ID NO: 50113 - RNA, 25 nt, Artificial Sequence
  Description of Artificial Sequence: Synthetic oligonucleotide
cggcgcagucccugcgggaggggcg

SEQ ID NO: 50114 - RNA, 25 nt, Artificial Sequence
  Description of Artificial Sequence: Synthetic oligonucleotide
gacaagagcugagcggcggccgccg

SEQ ID NO: 50115 - RNA, 25 nt, Artificial Sequence
  Description of Artificial Sequence: Synthetic oligonucleotide
gagcgucgagcucagcgcggcggag

SEQ ID NO: 50116 - RNA, 25 nt, Artificial Sequence
  Description of Artificial Sequence: Synthetic oligonucleotide
ggcggcggcggcccggcagccaaca

SEQ ID NO: 50117 - RNA, 25 nt, Artificial Sequence
  Description of Artificial Sequence: Synthetic oligonucleotide
auggcggcggcggcggcggcgggcg

SEQ ID NO: 50118 - RNA, 25 nt, Artificial Sequence
  Description of Artificial Sequence: Synthetic oligonucleotide
gcgggcccggagaugguccgcgggc

SEQ ID NO: 50119 - RNA, 25 nt, Artificial Sequence
  Description of Artificial Sequence: Synthetic oligonucleotide
cagguguucgacguggggccgcgcu

SEQ ID NO: 50120 - RNA, 25 nt, Artificial Sequence
  Description of Artificial Sequence: Synthetic oligonucleotide
uacaccaaccucucguacaucggcg

SEQ ID NO: 50121 - RNA, 25 nt, Artificial Sequence
  Description of Artificial Sequence: Synthetic oligonucleotide
gagggcgccuacggcauggugugcu

SEQ ID NO: 50122 - RNA, 25 nt, Artificial Sequence
  Description of Artificial Sequence: Synthetic oligonucleotide
ucugcuuaugauaaugucaacaaag

SEQ ID NO: 50123 - RNA, 25 nt, Artificial Sequence
  Description of Artificial Sequence: Synthetic oligonucleotide
guucgaguagcuaucaagaaaauca

SEQ ID NO: 50124 - RNA, 25 nt, Artificial Sequence
  Description of Artificial Sequence: Synthetic oligonucleotide
agccccuuugagcaccagaccuacu

SEQ ID NO: 50125 - RNA, 25 nt, Artificial Sequence
  Description of Artificial Sequence: Synthetic oligonucleotide
ugccagagaacccugagggagauaa

SEQ ID NO: 50126 - RNA, 25 nt, Artificial Sequence
  Description of Artificial Sequence: Synthetic oligonucleotide
aaaaucuuacugcgcuucagacaug

SEQ ID NO: 50127 - RNA, 25 nt, Artificial Sequence
  Description of Artificial Sequence: Synthetic oligonucleotide
gagaacaucauuggaaucaaugaca

SEQ ID NO: 50128 - RNA, 25 nt, Artificial Sequence
  Description of Artificial Sequence: Synthetic oligonucleotide
auuauucgagcaccaaccaucgagc

SEQ ID NO: 50129 - RNA, 25 nt, Artificial Sequence
  Description of Artificial Sequence: Synthetic oligonucleotide
caaaugaaagauguauauauaguac

SEQ ID NO: 50130 - RNA, 25 nt, Artificial Sequence
  Description of Artificial Sequence: Synthetic oligonucleotide
caggaccucauggaaacagaucuuu

SEQ ID NO: 50131 - RNA, 25 nt, Artificial Sequence
  Description of Artificial Sequence: Synthetic oligonucleotide
uacaagcucuugaagacacaacacc

SEQ ID NO: 50132 - RNA, 25 nt, Artificial Sequence
  Description of Artificial Sequence: Synthetic oligonucleotide
cucagcaaugaccauaucugcuauu

SEQ ID NO: 50133 - RNA, 25 nt, Artificial Sequence
  Description of Artificial Sequence: Synthetic oligonucleotide
uuucucuaccagauccucagagggu

SEQ ID NO: 50134 - RNA, 25 nt, Artificial Sequence
  Description of Artificial Sequence: Synthetic oligonucleotide
uuaaaauauauccauucagcuaacg

SEQ ID NO: 50135 - RNA, 25 nt, Artificial Sequence
  Description of Artificial Sequence: Synthetic oligonucleotide
guucugcaccgugaccucaagccuu

SEQ ID NO: 50136 - RNA, 25 nt, Artificial Sequence
  Description of Artificial Sequence: Synthetic oligonucleotide
uccaaccugcugcucaacaccaccu

SEQ ID NO: 50137 - RNA, 25 nt, Artificial Sequence
  Description of Artificial Sequence: Synthetic oligonucleotide
ugugaucucaagaucugugacuuug

SEQ ID NO: 50138 - RNA, 25 nt, Artificial Sequence
  Description of Artificial Sequence: Synthetic oligonucleotide
ggccuggcccguguugcagauccag

SEQ ID NO: 50139 - RNA, 25 nt, Artificial Sequence
  Description of Artificial Sequence: Synthetic oligonucleotide
gaccaugaucacacaggguuccuga

SEQ ID NO: 50140 - RNA, 25 nt, Artificial Sequence
  Description of Artificial Sequence: Synthetic oligonucleotide
acagaauauguggccacacguuggu

SEQ ID NO: 50141 - RNA, 25 nt, Artificial Sequence
  Description of Artificial Sequence: Synthetic oligonucleotide
uacagggcuccagaaauuauguuga

SEQ ID NO: 50142 - RNA, 25 nt, Artificial Sequence
  Description of Artificial Sequence: Synthetic oligonucleotide
aauuccaagggcuacaccaagucca

SEQ ID NO: 50143 - RNA, 25 nt, Artificial Sequence
  Description of Artificial Sequence: Synthetic oligonucleotide
auugauauuuggucuguaggcugca

SEQ ID NO: 50144 - RNA, 25 nt, Artificial Sequence
  Description of Artificial Sequence: Synthetic oligonucleotide
auucuggcagaaaugcuuucuaaca

SEQ ID NO: 50145 - RNA, 25 nt, Artificial Sequence
  Description of Artificial Sequence: Synthetic oligonucleotide
aggcccaucuuuccagggaagcauu

SEQ ID NO: 50146 - RNA, 25 nt, Artificial Sequence
  Description of Artificial Sequence: Synthetic oligonucleotide
uaucuugaccagcugaaccacauuu

SEQ ID NO: 50147 - RNA, 25 nt, Artificial Sequence
  Description of Artificial Sequence: Synthetic oligonucleotide
uuggguauucuuggauccccaucac

SEQ ID NO: 50148 - RNA, 25 nt, Artificial Sequence
  Description of Artificial Sequence: Synthetic oligonucleotide
caagaagaccugaauuguauaauaa

SEQ ID NO: 50149 - RNA, 25 nt, Artificial Sequence
  Description of Artificial Sequence: Synthetic oligonucleotide
aauuuaaaagcuaggaacuauuugc

SEQ ID NO: 50150 - RNA, 25 nt, Artificial Sequence
  Description of Artificial Sequence: Synthetic oligonucleotide
cuuucucuuccacacaaaaauaagg

SEQ ID NO: 50151 - RNA, 25 nt, Artificial Sequence
  Description of Artificial Sequence: Synthetic oligonucleotide
gugccauggaacaggcuguucccaa

SEQ ID NO: 50152 - RNA, 25 nt, Artificial Sequence
  Description of Artificial Sequence: Synthetic oligonucleotide
aaugcugacuccaaagcucuggacu

SEQ ID NO: 50153 - RNA, 25 nt, Artificial Sequence
  Description of Artificial Sequence: Synthetic oligonucleotide
uuauuggacaaaauguugacauuca

SEQ ID NO: 50154 - RNA, 25 nt, Artificial Sequence
  Description of Artificial Sequence: Synthetic oligonucleotide
aacccacacaagaggauugaaguag

SEQ ID NO: 50155 - RNA, 25 nt, Artificial Sequence
  Description of Artificial Sequence: Synthetic oligonucleotide
gaacaggcucuggcccacccauauc

SEQ ID NO: 50156 - RNA, 25 nt, Artificial Sequence
  Description of Artificial Sequence: Synthetic oligonucleotide
cuggagcaguauuacgacccgagug

SEQ ID NO: 50157 - RNA, 25 nt, Artificial Sequence
  Description of Artificial Sequence: Synthetic oligonucleotide
gacgagcccaucgccgaagcaccau

SEQ ID NO: 50158 - RNA, 25 nt, Artificial Sequence
  Description of Artificial Sequence: Synthetic oligonucleotide
uucaaguucgacauggaauuggaug

SEQ ID NO: 50159 - RNA, 25 nt, Artificial Sequence
  Description of Artificial Sequence: Synthetic oligonucleotide
gacuugccuaaggaaaagcucaaag

SEQ ID NO: 50160 - RNA, 25 nt, Artificial Sequence
  Description of Artificial Sequence: Synthetic oligonucleotide
gaacuaauuuuugaagagacugcua

SEQ ID NO: 50161 - RNA, 25 nt, Artificial Sequence
  Description of Artificial Sequence: Synthetic oligonucleotide
agauuccagccaggauacagaucuu

SEQ ID NO: 50162 - RNA, 25 nt, Artificial Sequence
  Description of Artificial Sequence: Synthetic oligonucleotide
uaaauuugucagguaccuggaguuu

SEQ ID NO: 50163 - RNA, 25 nt, Artificial Sequence
  Description of Artificial Sequence: Synthetic oligonucleotide
uaauacagugagcucuagcaaggga

SEQ ID NO: 50164 - RNA, 25 nt, Artificial Sequence
  Description of Artificial Sequence: Synthetic oligonucleotide
aggcgcugccuuuuguuucuagaau

SEQ ID NO: 50165 - RNA, 25 nt, Artificial Sequence
  Description of Artificial Sequence: Synthetic oligonucleotide
uauuauguuccucaagguccauuau

SEQ ID NO: 50166 - RNA, 25 nt, Artificial Sequence
  Description of Artificial Sequence: Synthetic oligonucleotide
uuuuguauucuuuuccaagcuccuu

SEQ ID NO: 50167 - RNA, 25 nt, Artificial Sequence
  Description of Artificial Sequence: Synthetic oligonucleotide
uauuggaagguauuuuuuuaaauuu

SEQ ID NO: 50168 - RNA, 25 nt, Artificial Sequence
  Description of Artificial Sequence: Synthetic oligonucleotide
uagaauuaaaaauuauuuagaaagu

SEQ ID NO: 50169 - RNA, 25 nt, Artificial Sequence
  Description of Artificial Sequence: Synthetic oligonucleotide
aauuauuuagaaaguuacauauaaa

SEQ ID NO: 50170 - RNA, 25 nt, Artificial Sequence
  Description of Artificial Sequence: Synthetic oligonucleotide
uaaauuugucaggacaagggcucag

SEQ ID NO: 50171 - RNA, 25 nt, Artificial Sequence
  Description of Artificial Sequence: Synthetic oligonucleotide
gaggacuggacgugcucagacaucg

SEQ ID NO: 50172 - RNA, 25 nt, Artificial Sequence
  Description of Artificial Sequence: Synthetic oligonucleotide
gguguucuucuucccaguucuugac

SEQ ID NO: 50173 - RNA, 25 nt, Artificial Sequence
  Description of Artificial Sequence: Synthetic oligonucleotide
ccccugguccugucuccagcccguc

SEQ ID NO: 50174 - RNA, 25 nt, Artificial Sequence
  Description of Artificial Sequence: Synthetic oligonucleotide
cuuggcuuauccacuuugacuccuu

SEQ ID NO: 50175 - RNA, 25 nt, Artificial Sequence
  Description of Artificial Sequence: Synthetic oligonucleotide
uugagccguuuggaggggcgguuuc

SEQ ID NO: 50176 - RNA, 25 nt, Artificial Sequence
  Description of Artificial Sequence: Synthetic oligonucleotide
cugguaguuguggcuuuuaugcuuu

SEQ ID NO: 50177 - RNA, 25 nt, Artificial Sequence
  Description of Artificial Sequence: Synthetic oligonucleotide
ucaaagaauuucuucaguccagaga

SEQ ID NO: 50178 - RNA, 25 nt, Artificial Sequence
  Description of Artificial Sequence: Synthetic oligonucleotide
aauuccuccuggcagcccugugugu

SEQ ID NO: 50179 - RNA, 25 nt, Artificial Sequence
  Description of Artificial Sequence: Synthetic oligonucleotide
ugucacccauuggugaccugcggca

SEQ ID NO: 50180 - RNA, 25 nt, Artificial Sequence
  Description of Artificial Sequence: Synthetic oligonucleotide
aguauguacuucagugcaccuacug

SEQ ID NO: 50181 - RNA, 25 nt, Artificial Sequence
  Description of Artificial Sequence: Synthetic oligonucleotide
gcuuacuguugcuuuagucacuaau

SEQ ID NO: 50182 - RNA, 25 nt, Artificial Sequence
  Description of Artificial Sequence: Synthetic oligonucleotide
uugcuuucugguuugaaagaugcag

SEQ ID NO: 50183 - RNA, 25 nt, Artificial Sequence
  Description of Artificial Sequence: Synthetic oligonucleotide
gugguuccucccucuccugaauccu

SEQ ID NO: 50184 - RNA, 25 nt, Artificial Sequence
  Description of Artificial Sequence: Synthetic oligonucleotide
uuuucuacaugaugcccugcugacc

SEQ ID NO: 50185 - RNA, 25 nt, Artificial Sequence
  Description of Artificial Sequence: Synthetic oligonucleotide
caugcagccgcaccagagagagauu

SEQ ID NO: 50186 - RNA, 25 nt, Artificial Sequence
  Description of Artificial Sequence: Synthetic oligonucleotide
ucuuccccaauuggcucuagucacu

SEQ ID NO: 50187 - RNA, 25 nt, Artificial Sequence
  Description of Artificial Sequence: Synthetic oligonucleotide
uggcaucucacuuuaugauagggaa

SEQ ID NO: 50188 - RNA, 25 nt, Artificial Sequence
  Description of Artificial Sequence: Synthetic oligonucleotide
aggcuacuaccuagggcacuuuaag

SEQ ID NO: 50189 - RNA, 25 nt, Artificial Sequence
  Description of Artificial Sequence: Synthetic oligonucleotide
gucagugacagccccuuauuugcac

SEQ ID NO: 50190 - RNA, 25 nt, Artificial Sequence
  Description of Artificial Sequence: Synthetic oligonucleotide
cuucaccuuuugaccauaacuguuu

SEQ ID NO: 50191 - RNA, 25 nt, Artificial Sequence
  Description of Artificial Sequence: Synthetic oligonucleotide
uccccagagcaggagcuuguggaaa

SEQ ID NO: 50192 - RNA, 25 nt, Artificial Sequence
  Description of Artificial Sequence: Synthetic oligonucleotide
auaccuuggcugauguugcagccug

SEQ ID NO: 50193 - RNA, 25 nt, Artificial Sequence
  Description of Artificial Sequence: Synthetic oligonucleotide
gcagcaagugcuuccgucuccggaa

SEQ ID NO: 50194 - RNA, 25 nt, Artificial Sequence
  Description of Artificial Sequence: Synthetic oligonucleotide
auccuuggggagcacuuguccacgu

SEQ ID NO: 50195 - RNA, 25 nt, Artificial Sequence
  Description of Artificial Sequence: Synthetic oligonucleotide
ucuuuucucauaucaugguagucac

SEQ ID NO: 50196 - RNA, 25 nt, Artificial Sequence
  Description of Artificial Sequence: Synthetic oligonucleotide
cuaacauauauaagguaugugcuau

SEQ ID NO: 50197 - RNA, 25 nt, Artificial Sequence
  Description of Artificial Sequence: Synthetic oligonucleotide
uuggcccagcuuuuagaaaaugcag

SEQ ID NO: 50198 - RNA, 25 nt, Artificial Sequence
  Description of Artificial Sequence: Synthetic oligonucleotide
gucauuuuucuaaauaaaaaggaag

SEQ ID NO: 50199 - RNA, 25 nt, Artificial Sequence
  Description of Artificial Sequence: Synthetic oligonucleotide
guacugcacccagcagugucacucu

SEQ ID NO: 50200 - RNA, 25 nt, Artificial Sequence
  Description of Artificial Sequence: Synthetic oligonucleotide
uguaguuacuguggucacuuguacc

SEQ ID NO: 50201 - RNA, 25 nt, Artificial Sequence
  Description of Artificial Sequence: Synthetic oligonucleotide
cauauagagguguaacacuugucaa

SEQ ID NO: 50202 - RNA, 25 nt, Artificial Sequence
  Description of Artificial Sequence: Synthetic oligonucleotide
agaagcguuaugugcaguacuuaau

SEQ ID NO: 50203 - RNA, 25 nt, Artificial Sequence
  Description of Artificial Sequence: Synthetic oligonucleotide
uguuuguaagacuuacaaaaaaaga

SEQ ID NO: 50204 - RNA, 25 nt, Artificial Sequence
  Description of Artificial Sequence: Synthetic oligonucleotide
auuuaaaguggcagcuucacucgac

SEQ ID NO: 50205 - RNA, 25 nt, Artificial Sequence
  Description of Artificial Sequence: Synthetic oligonucleotide
cauuuggugagagaaguacaaaggu

SEQ ID NO: 50206 - RNA, 25 nt, Artificial Sequence
  Description of Artificial Sequence: Synthetic oligonucleotide
uugcagugcugagcugugggcgguu

SEQ ID NO: 50207 - RNA, 25 nt, Artificial Sequence
  Description of Artificial Sequence: Synthetic oligonucleotide
uucuggggaugucccaggguggaac

SEQ ID NO: 50208 - RNA, 25 nt, Artificial Sequence
  Description of Artificial Sequence: Synthetic oligonucleotide
cuccacaugcuggugcauauacgcc

SEQ ID NO: 50209 - RNA, 25 nt, Artificial Sequence
  Description of Artificial Sequence: Synthetic oligonucleotide
ccuugagcuacuucaaaugugggug

SEQ ID NO: 50210 - RNA, 25 nt, Artificial Sequence
  Description of Artificial Sequence: Synthetic oligonucleotide
guuucaguaaccacguuccaugccu

SEQ ID NO: 50211 - RNA, 25 nt, Artificial Sequence
  Description of Artificial Sequence: Synthetic oligonucleotide
ugaggauuuagcagagaggaacacu

SEQ ID NO: 50212 - RNA, 25 nt, Artificial Sequence
  Description of Artificial Sequence: Synthetic oligonucleotide
ugcgucuuuaaaugagaaaguauac

SEQ ID NO: 50213 - RNA, 25 nt, Artificial Sequence
  Description of Artificial Sequence: Synthetic oligonucleotide
caauucuuuuuccuucuacagcaug

SEQ ID NO: 50214 - RNA, 25 nt, Artificial Sequence
  Description of Artificial Sequence: Synthetic oligonucleotide
gucagcaucucaaguucauuuuuca

SEQ ID NO: 50215 - RNA, 25 nt, Artificial Sequence
  Description of Artificial Sequence: Synthetic oligonucleotide
aaccuacaguauaacaauuuguaau

SEQ ID NO: 50216 - RNA, 25 nt, Artificial Sequence
  Description of Artificial Sequence: Synthetic oligonucleotide
uaaagccuccaggagcucaugacgu

SEQ ID NO: 50217 - RNA, 25 nt, Artificial Sequence
  Description of Artificial Sequence: Synthetic oligonucleotide
ugaagcacuguucuguccucaagua

SEQ ID NO: 50218 - RNA, 25 nt, Artificial Sequence
  Description of Artificial Sequence: Synthetic oligonucleotide
acucaaauauuucugauacugcuga

SEQ ID NO: 50219 - RNA, 25 nt, Artificial Sequence
  Description of Artificial Sequence: Synthetic oligonucleotide
agucagacugucagaaaaagcuagc

SEQ ID NO: 50220 - RNA, 25 nt, Artificial Sequence
  Description of Artificial Sequence: Synthetic oligonucleotide
cacuaacucguguuuggagcucuau

SEQ ID NO: 50221 - RNA, 25 nt, Artificial Sequence
  Description of Artificial Sequence: Synthetic oligonucleotide
uccauauuuuacugaucucuuuaag

SEQ ID NO: 50222 - RNA, 25 nt, Artificial Sequence
  Description of Artificial Sequence: Synthetic oligonucleotide
guauuuguuccugccacuguguacu

SEQ ID NO: 50223 - RNA, 25 nt, Artificial Sequence
  Description of Artificial Sequence: Synthetic oligonucleotide
uguggaguugacucgguguucuguc

SEQ ID NO: 50224 - RNA, 25 nt, Artificial Sequence
  Description of Artificial Sequence: Synthetic oligonucleotide
cccagugcggugccuccucuugacu

SEQ ID NO: 50225 - RNA, 25 nt, Artificial Sequence
  Description of Artificial Sequence: Synthetic oligonucleotide
uuccccacugcucucuguggugaga

SEQ ID NO: 50226 - RNA, 25 nt, Artificial Sequence
  Description of Artificial Sequence: Synthetic oligonucleotide
aaauuugccuuguucaauaauuacu

SEQ ID NO: 50227 - RNA, 25 nt, Artificial Sequence
  Description of Artificial Sequence: Synthetic oligonucleotide
uguacccucgcaugacuguuacagc

SEQ ID NO: 50228 - RNA, 25 nt, Artificial Sequence
  Description of Artificial Sequence: Synthetic oligonucleotide
cuuucugugcagagaugacugucca

SEQ ID NO: 50229 - RNA, 25 nt, Artificial Sequence
  Description of Artificial Sequence: Synthetic oligonucleotide
aagugccacaugccuacgauugaaa

SEQ ID NO: 50230 - RNA, 25 nt, Artificial Sequence
  Description of Artificial Sequence: Synthetic oligonucleotide
augaaaacucuauuguuaccucuga

SEQ ID NO: 50231 - RNA, 25 nt, Artificial Sequence
  Description of Artificial Sequence: Synthetic oligonucleotide
aguuguguuccacggaaaaugcuau

SEQ ID NO: 50232 - RNA, 25 nt, Artificial Sequence
  Description of Artificial Sequence: Synthetic oligonucleotide
uccagcagaucauuuaggaaaaaua

SEQ ID NO: 50233 - RNA, 25 nt, Artificial Sequence
  Description of Artificial Sequence: Synthetic oligonucleotide
aauucuauuuuuagcuuuucauuuc

SEQ ID NO: 50234 - RNA, 25 nt, Artificial Sequence
  Description of Artificial Sequence: Synthetic oligonucleotide
cucagcuguccuuuuuucuuguuug

SEQ ID NO: 50235 - RNA, 25 nt, Artificial Sequence
  Description of Artificial Sequence: Synthetic oligonucleotide
gauuuuugacagcaauggagaaugg

SEQ ID NO: 50236 - RNA, 25 nt, Artificial Sequence
  Description of Artificial Sequence: Synthetic oligonucleotide
gguuauauaaagacugccugcuaau

SEQ ID NO: 50237 - RNA, 25 nt, Artificial Sequence
  Description of Artificial Sequence: Synthetic oligonucleotide
uaugaacagaaaugcauuuguaauu

SEQ ID NO: 50238 - RNA, 25 nt, Artificial Sequence
  Description of Artificial Sequence: Synthetic oligonucleotide
ucaugaaaauaaauguacaucuucu

SEQ ID NO: 50239 - RNA, 25 nt, Artificial Sequence
  Description of Artificial Sequence: Synthetic oligonucleotide
uaucuucacauucauguuaagauuc

SEQ ID NO: 50240 - RNA, 25 nt, Artificial Sequence
  Description of Artificial Sequence: Synthetic oligonucleotide
caguguugcuuuccucuggaucagc

SEQ ID NO: 50241 - RNA, 25 nt, Artificial Sequence
  Description of Artificial Sequence: Synthetic oligonucleotide
cgugucugaauggacagucagguuc

SEQ ID NO: 50242 - RNA, 25 nt, Artificial Sequence
  Description of Artificial Sequence: Synthetic oligonucleotide
cagguugugcugaacacagaaaugc

SEQ ID NO: 50243 - RNA, 25 nt, Artificial Sequence
  Description of Artificial Sequence: Synthetic oligonucleotide
cucacaggccucacuuugccgccca

SEQ ID NO: 50244 - RNA, 25 nt, Artificial Sequence
  Description of Artificial Sequence: Synthetic oligonucleotide
aggcacuggcccagcacuuggauuu

SEQ ID NO: 50245 - RNA, 25 nt, Artificial Sequence
  Description of Artificial Sequence: Synthetic oligonucleotide
uacauaagaugaguuagaaagguac

SEQ ID NO: 50246 - RNA, 25 nt, Artificial Sequence
  Description of Artificial Sequence: Synthetic oligonucleotide
cuucuguaggguccuuuuuaccucu

SEQ ID NO: 50247 - RNA, 25 nt, Artificial Sequence
  Description of Artificial Sequence: Synthetic oligonucleotide
ugcucggcagagaaucgaugcuguc

SEQ ID NO: 50248 - RNA, 25 nt, Artificial Sequence
  Description of Artificial Sequence: Synthetic oligonucleotide
cauguuccuuuauucacaaucuuag

SEQ ID NO: 50249 - RNA, 25 nt, Artificial Sequence
  Description of Artificial Sequence: Synthetic oligonucleotide
ggucucaaauauucugucaaacccu

SEQ ID NO: 50250 - RNA, 25 nt, Artificial Sequence
  Description of Artificial Sequence: Synthetic oligonucleotide
uaacaaagaagccccgacaucucag

SEQ ID NO: 50251 - RNA, 25 nt, Artificial Sequence
  Description of Artificial Sequence: Synthetic oligonucleotide
gguuggauucccugguucucucuaa

SEQ ID NO: 50252 - RNA, 25 nt, Artificial Sequence
  Description of Artificial Sequence: Synthetic oligonucleotide
aagagggccugcccuugugccccag

SEQ ID NO: 50253 - RNA, 25 nt, Artificial Sequence
  Description of Artificial Sequence: Synthetic oligonucleotide
gaggugcugcugggcacagccaaga

SEQ ID NO: 50254 - RNA, 25 nt, Artificial Sequence
  Description of Artificial Sequence: Synthetic oligonucleotide
aguugggaagggccgccccacagua

SEQ ID NO: 50255 - RNA, 25 nt, Artificial Sequence
  Description of Artificial Sequence: Synthetic oligonucleotide
acgcaguccucaccacccagcccag

SEQ ID NO: 50256 - RNA, 25 nt, Artificial Sequence
  Description of Artificial Sequence: Synthetic oligonucleotide
gggugcucacgcucaccacuccugu

SEQ ID NO: 50257 - RNA, 25 nt, Artificial Sequence
  Description of Artificial Sequence: Synthetic oligonucleotide
uggcugaggaaggauagcuggcuca

SEQ ID NO: 50258 - RNA, 25 nt, Artificial Sequence
  Description of Artificial Sequence: Synthetic oligonucleotide
auccucggaaaacagacccacaucu

SEQ ID NO: 50259 - RNA, 25 nt, Artificial Sequence
  Description of Artificial Sequence: Synthetic oligonucleotide
ucuauucuugcccugaaauacgcgc

SEQ ID NO: 50260 - RNA, 25 nt, Artificial Sequence
  Description of Artificial Sequence: Synthetic oligonucleotide
cuuuucacuugcgugcucagagcug

SEQ ID NO: 50261 - RNA, 25 nt, Artificial Sequence
  Description of Artificial Sequence: Synthetic oligonucleotide
gccgucugaagguccacacagcauu

SEQ ID NO: 50262 - RNA, 25 nt, Artificial Sequence
  Description of Artificial Sequence: Synthetic oligonucleotide
ugacgggacacagaaaugugacugu

SEQ ID NO: 50263 - RNA, 25 nt, Artificial Sequence
  Description of Artificial Sequence: Synthetic oligonucleotide
uuaccggauaacacugauuagucag

SEQ ID NO: 50264 - RNA, 25 nt, Artificial Sequence
  Description of Artificial Sequence: Synthetic oligonucleotide
guuuucauuuauaaaaaagcauuga

SEQ ID NO: 50265 - RNA, 25 nt, Artificial Sequence
  Description of Artificial Sequence: Synthetic oligonucleotide
acaguuuuauuacucuuguuucuuu

SEQ ID NO: 50266 - RNA, 25 nt, Artificial Sequence
  Description of Artificial Sequence: Synthetic oligonucleotide
uuuaaauggaaaguuacuauuauaa

SEQ ID NO: 50267 - RNA, 25 nt, Artificial Sequence
  Description of Artificial Sequence: Synthetic oligonucleotide
agguuaauuuggaguccucuucuaa

SEQ ID NO: 50268 - RNA, 25 nt, Artificial Sequence
  Description of Artificial Sequence: Synthetic oligonucleotide
aauagaaaaccauauccuuggcuac

SEQ ID NO: 50269 - RNA, 25 nt, Artificial Sequence
  Description of Artificial Sequence: Synthetic oligonucleotide
cuaacaucuggagacugugagcucc

SEQ ID NO: 50270 - RNA, 25 nt, Artificial Sequence
  Description of Artificial Sequence: Synthetic oligonucleotide
cuucccauuccccuuccugguacug

SEQ ID NO: 50271 - RNA, 25 nt, Artificial Sequence
  Description of Artificial Sequence: Synthetic oligonucleotide
guggagucagauuggcaugaaacca

SEQ ID NO: 50272 - RNA, 25 nt, Artificial Sequence
  Description of Artificial Sequence: Synthetic oligonucleotide
acuaacuucauucuagaaucauugu

SEQ ID NO: 50273 - RNA, 25 nt, Artificial Sequence
  Description of Artificial Sequence: Synthetic oligonucleotide
uagccauaaguugugugcuuuuuau

SEQ ID NO: 50274 - RNA, 25 nt, Artificial Sequence
  Description of Artificial Sequence: Synthetic oligonucleotide
uuaaucaugccaaacauaauguaac

SEQ ID NO: 50275 - RNA, 25 nt, Artificial Sequence
  Description of Artificial Sequence: Synthetic oligonucleotide
cugggcagagaaugguccuaaccaa

SEQ ID NO: 50276 - RNA, 25 nt, Artificial Sequence
  Description of Artificial Sequence: Synthetic oligonucleotide
agguaccuaugaaaagcgcuagcua

SEQ ID NO: 50277 - RNA, 25 nt, Artificial Sequence
  Description of Artificial Sequence: Synthetic oligonucleotide
aucauguguaguagaugcaucauuu

SEQ ID NO: 50278 - RNA, 25 nt, Artificial Sequence
  Description of Artificial Sequence: Synthetic oligonucleotide
uuggcucuucuuacauuuguaaaaa

SEQ ID NO: 50279 - RNA, 25 nt, Artificial Sequence
  Description of Artificial Sequence: Synthetic oligonucleotide
auguacagauuaggucaucuuaauu

SEQ ID NO: 50280 - RNA, 25 nt, Artificial Sequence
  Description of Artificial Sequence: Synthetic oligonucleotide
ucauauuagugacacggaacagcac

SEQ ID NO: 50281 - RNA, 25 nt, Artificial Sequence
  Description of Artificial Sequence: Synthetic oligonucleotide
ccuccacuauuuguauguucaaaua

SEQ ID NO: 50282 - RNA, 25 nt, Artificial Sequence
  Description of Artificial Sequence: Synthetic oligonucleotide
aagcuuucagacuaauagcuuuuuu

SEQ ID NO: 50283 - RNA, 25 nt, Artificial Sequence
  Description of Artificial Sequence: Synthetic oligonucleotide
uggugucuaaaauguaagcaaaaaa

SEQ ID NO: 50284 - RNA, 25 nt, Artificial Sequence
  Description of Artificial Sequence: Synthetic oligonucleotide
auuccugcugaaacauuccaguccu

SEQ ID NO: 50285 - RNA, 25 nt, Artificial Sequence
  Description of Artificial Sequence: Synthetic oligonucleotide
uuucauuuaguauaaaagaaauacu

SEQ ID NO: 50286 - RNA, 25 nt, Artificial Sequence
  Description of Artificial Sequence: Synthetic oligonucleotide
ugaacaagccagugggauggaauug

SEQ ID NO: 50287 - RNA, 25 nt, Artificial Sequence
  Description of Artificial Sequence: Synthetic oligonucleotide
gaaagaacuaaucaugaggacucug

SEQ ID NO: 50288 - RNA, 25 nt, Artificial Sequence
  Description of Artificial Sequence: Synthetic oligonucleotide
guccugacacagguccucaaagcua

SEQ ID NO: 50289 - RNA, 25 nt, Artificial Sequence
  Description of Artificial Sequence: Synthetic oligonucleotide
agcagagauacgcagacauuguggc

SEQ ID NO: 50290 - RNA, 25 nt, Artificial Sequence
  Description of Artificial Sequence: Synthetic oligonucleotide
caucuggguagaagaauacuguauu

SEQ ID NO: 50291 - RNA, 25 nt, Artificial Sequence
  Description of Artificial Sequence: Synthetic oligonucleotide
ugugugugcagugcacagugugugg

SEQ ID NO: 50292 - RNA, 25 nt, Artificial Sequence
  Description of Artificial Sequence: Synthetic oligonucleotide
gugugugcacacucauuccuucugc

SEQ ID NO: 50293 - RNA, 25 nt, Artificial Sequence
  Description of Artificial Sequence: Synthetic oligonucleotide
cucuugggcacaggcagugggugua

SEQ ID NO: 50294 - RNA, 25 nt, Artificial Sequence
  Description of Artificial Sequence: Synthetic oligonucleotide
agagguaaccaguagcuuugagaag

SEQ ID NO: 50295 - RNA, 25 nt, Artificial Sequence
  Description of Artificial Sequence: Synthetic oligonucleotide
gcuacauguagcucaccagugguuu

SEQ ID NO: 50296 - RNA, 25 nt, Artificial Sequence
  Description of Artificial Sequence: Synthetic oligonucleotide
uucucuaaggaaucacaaaaguaaa

SEQ ID NO: 50297 - RNA, 25 nt, Artificial Sequence
  Description of Artificial Sequence: Synthetic oligonucleotide
acuacccaaccacaugccacguaau

SEQ ID NO: 50298 - RNA, 25 nt, Artificial Sequence
  Description of Artificial Sequence: Synthetic oligonucleotide
uauuucagccauucagaggaaacug

SEQ ID NO: 50299 - RNA, 25 nt, Artificial Sequence
  Description of Artificial Sequence: Synthetic oligonucleotide
guuuucucuuuauuugcuuauaugu

SEQ ID NO: 50300 - RNA, 25 nt, Artificial Sequence
  Description of Artificial Sequence: Synthetic oligonucleotide
uuaauaugguuuuuaaauugguaac

SEQ ID NO: 50301 - RNA, 25 nt, Artificial Sequence
  Description of Artificial Sequence: Synthetic oligonucleotide
cuuuuauauaguaugguaacaguau

SEQ ID NO: 50302 - RNA, 25 nt, Artificial Sequence
  Description of Artificial Sequence: Synthetic oligonucleotide
uguuaauacacacauacauacgcac

SEQ ID NO: 50303 - RNA, 25 nt, Artificial Sequence
  Description of Artificial Sequence: Synthetic oligonucleotide
cacaugcuuuggguccuuccauaau

SEQ ID NO: 50304 - RNA, 25 nt, Artificial Sequence
  Description of Artificial Sequence: Synthetic oligonucleotide
uacuuuuauauuuguaaaucaaugu

SEQ ID NO: 50305 - RNA, 25 nt, Artificial Sequence
  Description of Artificial Sequence: Synthetic oligonucleotide
uuuuggagcaaucccaaguuuaagg

SEQ ID NO: 50306 - RNA, 25 nt, Artificial Sequence
  Description of Artificial Sequence: Synthetic oligonucleotide
ggaaauauuuuuguaaauguaaugg

SEQ ID NO: 50307 - RNA, 25 nt, Artificial Sequence
  Description of Artificial Sequence: Synthetic oligonucleotide
guuuugaaaaucugagcaauccuuu

SEQ ID NO: 50308 - RNA, 25 nt, Artificial Sequence
  Description of Artificial Sequence: Synthetic oligonucleotide
uugcuuauacauuuuuaaagcauuu

SEQ ID NO: 50309 - RNA, 25 nt, Artificial Sequence
  Description of Artificial Sequence: Synthetic oligonucleotide
ugugcuuuaaaauuguuaugcuggu

SEQ ID NO: 50310 - RNA, 25 nt, Artificial Sequence
  Description of Artificial Sequence: Synthetic oligonucleotide
uguuugaaacaugauacuccugugg

SEQ ID NO: 50311 - RNA, 25 nt, Artificial Sequence
  Description of Artificial Sequence: Synthetic oligonucleotide
gugcagaugagaagcuauaacagug

SEQ ID NO: 50312 - RNA, 25 nt, Artificial Sequence
  Description of Artificial Sequence: Synthetic oligonucleotide
gaauaugugguuucucuuacgucau

SEQ ID NO: 50313 - RNA, 25 nt, Artificial Sequence
  Description of Artificial Sequence: Synthetic oligonucleotide
uccaccuugacaugaugggucagaa

SEQ ID NO: 50314 - RNA, 25 nt, Artificial Sequence
  Description of Artificial Sequence: Synthetic oligonucleotide
aacaaauggaaauccagagcaaguc

SEQ ID NO: 50315 - RNA, 25 nt, Artificial Sequence
  Description of Artificial Sequence: Synthetic oligonucleotide
ccuccaggguugcaccagguuuacc

SEQ ID NO: 50316 - RNA, 25 nt, Artificial Sequence
  Description of Artificial Sequence: Synthetic oligonucleotide
cuaaagcuuguugccuuuucuugug

SEQ ID NO: 50317 - RNA, 25 nt, Artificial Sequence
  Description of Artificial Sequence: Synthetic oligonucleotide
gcuguuuaugcguguagagcacuca

SEQ ID NO: 50318 - RNA, 25 nt, Artificial Sequence
  Description of Artificial Sequence: Synthetic oligonucleotide
aagaaaguucugaaacugcuuugua

SEQ ID NO: 50319 - RNA, 25 nt, Artificial Sequence
  Description of Artificial Sequence: Synthetic oligonucleotide
aucugcuuuguacuguuggugccuu

SEQ ID NO: 50320 - RNA, 25 nt, Artificial Sequence
  Description of Artificial Sequence: Synthetic oligonucleotide
ucuugguauuguaccccaaaauucu

SEQ ID NO: 50321 - RNA, 25 nt, Artificial Sequence
  Description of Artificial Sequence: Synthetic oligonucleotide
ugcauagauuauuuaguauaauggu

SEQ ID NO: 50322 - RNA, 25 nt, Artificial Sequence
  Description of Artificial Sequence: Synthetic oligonucleotide
uaaguuaaaaaauguuaaaggaaga

SEQ ID NO: 50323 - RNA, 25 nt, Artificial Sequence
  Description of Artificial Sequence: Synthetic oligonucleotide
auuuuauuaagaaucugaauguuua

SEQ ID NO: 50324 - RNA, 25 nt, Artificial Sequence
  Description of Artificial Sequence: Synthetic oligonucleotide
auucauuauauuguuacaauuuaac

SEQ ID NO: 50325 - RNA, 25 nt, Artificial Sequence
  Description of Artificial Sequence: Synthetic oligonucleotide
cauuaacauuuauuugugguauuug

SEQ ID NO: 50326 - RNA, 25 nt, Artificial Sequence
  Description of Artificial Sequence: Synthetic oligonucleotide
gugauuugguuaaucuguauaaaaa

SEQ ID NO: 50327 - RNA, 25 nt, Artificial Sequence
  Description of Artificial Sequence: Synthetic oligonucleotide
auuguaaguagaaagguuuauauuu

SEQ ID NO: 50328 - RNA, 25 nt, Artificial Sequence
  Description of Artificial Sequence: Synthetic oligonucleotide
ucaucuuaauucuuuugauguugua

SEQ ID NO: 50329 - RNA, 25 nt, Artificial Sequence
  Description of Artificial Sequence: Synthetic oligonucleotide
aaacguacuuuuuaaaagauggauu

SEQ ID NO: 50330 - RNA, 25 nt, Artificial Sequence
  Description of Artificial Sequence: Synthetic oligonucleotide
uauuugaauguuuauggcaccugac

SEQ ID NO: 50331 - RNA, 25 nt, Artificial Sequence
  Description of Artificial Sequence: Synthetic oligonucleotide
aaaauccuuagaaucauuaaauugu

SEQ ID NO: 50332 - RNA, 25 nt, Artificial Sequence
  Description of Artificial Sequence: Synthetic oligonucleotide
ugucccuguauuaccaaaauaacac

SEQ ID NO: 50333 - RNA, 25 nt, Artificial Sequence
  Description of Artificial Sequence: Synthetic oligonucleotide
cagcaccgugcauguauaguuuaau

SEQ ID NO: 50334 - RNA, 25 nt, Artificial Sequence
  Description of Artificial Sequence: Synthetic oligonucleotide
uugcaguuucaucugugaaaacgug

SEQ ID NO: 50335 - RNA, 25 nt, Artificial Sequence
  Description of Artificial Sequence: Synthetic oligonucleotide
gaaauugucuaguccuucguuaugu

SEQ ID NO: 50336 - RNA, 25 nt, Artificial Sequence
  Description of Artificial Sequence: Synthetic oligonucleotide
uuccccagaugucuuccagauuugc

SEQ ID NO: 50337 - RNA, 25 nt, Artificial Sequence
  Description of Artificial Sequence: Synthetic oligonucleotide
cucugcaugugguaacuuguguuag

SEQ ID NO: 50338 - RNA, 25 nt, Artificial Sequence
  Description of Artificial Sequence: Synthetic oligonucleotide
gggcugugagcuguuccucgaguug

SEQ ID NO: 50339 - RNA, 25 nt, Artificial Sequence
  Description of Artificial Sequence: Synthetic oligonucleotide
gaauggggaugucagugcuccuagg

SEQ ID NO: 50340 - RNA, 25 nt, Artificial Sequence
  Description of Artificial Sequence: Synthetic oligonucleotide
gguucuccaggugguucuucagacc

SEQ ID NO: 50341 - RNA, 25 nt, Artificial Sequence
  Description of Artificial Sequence: Synthetic oligonucleotide
gcggugcccacgcccaucuccucau

SEQ ID NO: 50342 - RNA, 25 nt, Artificial Sequence
  Description of Artificial Sequence: Synthetic oligonucleotide
uccuccugaacuucugcaaccccac

SEQ ID NO: 50343 - RNA, 25 nt, Artificial Sequence
  Description of Artificial Sequence: Synthetic oligonucleotide
cugcugggcagacauccugggcaac

SEQ ID NO: 50344 - RNA, 25 nt, Artificial Sequence
  Description of Artificial Sequence: Synthetic oligonucleotide
ccccuuuuuucagagcaagaaguca

SEQ ID NO: 50345 - RNA, 25 nt, Artificial Sequence
  Description of Artificial Sequence: Synthetic oligonucleotide
auaaagauaggauuucuuggacauu

SEQ ID NO: 50346 - RNA, 25 nt, Artificial Sequence
  Description of Artificial Sequence: Synthetic oligonucleotide
uugguucuuaucaauauugggcauu

SEQ ID NO: 50347 - RNA, 25 nt, Artificial Sequence
  Description of Artificial Sequence: Synthetic oligonucleotide
uauguaaugacuuauuuacaaaaca

SEQ ID NO: 50348 - RNA, 25 nt, Artificial Sequence
  Description of Artificial Sequence: Synthetic oligonucleotide
aaagauacuggaaaauguuuuggau

SEQ ID NO: 50349 - RNA, 25 nt, Artificial Sequence
  Description of Artificial Sequence: Synthetic oligonucleotide
ugugguguuauggaaagagcacagg

SEQ ID NO: 50350 - RNA, 25 nt, Artificial Sequence
  Description of Artificial Sequence: Synthetic oligonucleotide
gccuuggacccauccagcuggguuc

SEQ ID NO: 50351 - RNA, 25 nt, Artificial Sequence
  Description of Artificial Sequence: Synthetic oligonucleotide
cagaacuacccccugcuuauaacug

SEQ ID NO: 50352 - RNA, 25 nt, Artificial Sequence
  Description of Artificial Sequence: Synthetic oligonucleotide
gcggcuggcugugggccagucauuc

SEQ ID NO: 50353 - RNA, 25 nt, Artificial Sequence
  Description of Artificial Sequence: Synthetic oligonucleotide
cugcgucucugcuuucuuccucugc

SEQ ID NO: 50354 - RNA, 25 nt, Artificial Sequence
  Description of Artificial Sequence: Synthetic oligonucleotide
cuucagacugucagcuguaaagugg

SEQ ID NO: 50355 - RNA, 25 nt, Artificial Sequence
  Description of Artificial Sequence: Synthetic oligonucleotide
gaagcaauauuacuugccuuguaua

SEQ ID NO: 50356 - RNA, 25 nt, Artificial Sequence
  Description of Artificial Sequence: Synthetic oligonucleotide
augguaaagauuauaaaaauacauu

SEQ ID NO: 50357 - RNA, 25 nt, Artificial Sequence
  Description of Artificial Sequence: Synthetic oligonucleotide
uucaacuguucagcauaguacuuca

SEQ ID NO: 50358 - RNA, 25 nt, Artificial Sequence
  Description of Artificial Sequence: Synthetic oligonucleotide
aaagcaaguacucaguaaauagcaa

SEQ ID NO: 50359 - RNA, 25 nt, Artificial Sequence
  Description of Artificial Sequence: Synthetic oligonucleotide
ucaguaaauagcaagucuuuuuaaa

SEQ ID NO: 50360 - DNA, 21 bp, Artificial Sequence
  Description of Artificial Sequence: Synthetic oligonucleotide
  Description of Combined DNA/RNA Molecule: Synthetic oligonucleotide
cuacacaaaucagcgauuutt

SEQ ID NO: 50361 - DNA, 21 bp, Artificial Sequence
  Description of Artificial Sequence: Synthetic oligonucleotide
  Description of Combined DNA/RNA Molecule: Synthetic oligonucleotide
aaaucgcugauuuguguagtt

SEQ ID NO: 50362 - DNA, 25 bp, Artificial Sequence
  Description of Artificial Sequence: Synthetic oligonucleotide
  Description of Combined DNA/RNA Molecule: Synthetic oligonucleotide
cuacacaaaucagcgauuuccaugt

SEQ ID NO: 50363 - RNA, 27 nt, Artificial Sequence
  Description of Artificial Sequence: Synthetic oligonucleotide
acauggaaaucgcugauuuguguaguc

SEQ ID NO: 50364 - RNA, 13 nt, Artificial Sequence
  Description of Artificial Sequence: Synthetic oligonucleotide
cuacacaaaucag

SEQ ID NO: 50365 - DNA, 11 bp, Artificial Sequence
  Description of Artificial Sequence: Synthetic oligonucleotide
  Description of Combined DNA/RNA Molecule: Synthetic oligonucleotide
gauuuccaugt

SEQ ID NO: 50366 - DNA, 21 bp, Artificial Sequence
  Description of Artificial Sequence: Synthetic oligonucleotide
  Description of Combined DNA/RNA Molecule: Synthetic oligonucleotide
ggaucuuauuucuucggagtt

SEQ ID NO: 50367 - DNA, 21 bp, Artificial Sequence
  Description of Artificial Sequence: Synthetic oligonucleotide
  Description of Combined DNA/RNA Molecule: Synthetic oligonucleotide
cuccgaagaaauaagaucctt

SEQ ID NO: 50368 - RNA, 11 nt, Artificial Sequence
  Description of Artificial Sequence: Synthetic oligonucleotide
ggaucuuauuu

SEQ ID NO: 50369 - DNA, 10 bp, Artificial Sequence
  Description of Artificial Sequence: Synthetic oligonucleotide
  Description of Combined DNA/RNA Molecule: Synthetic oligonucleotide
cuucggagtt

SEQ ID NO: 50370 - RNA, 27 nt, Artificial Sequence
  Description of Artificial Sequence: Synthetic oligonucleotide
cauugucuccgaagaaauaagauccuu

SEQ ID NO: 50371 - RNA, 8 nt, Artificial Sequence
  Description of Artificial Sequence: Synthetic oligonucleotide
  modified_base (2): LNA-G
ggaucuua

SEQ ID NO: 50372 - DNA, 17 bp, Artificial Sequence
  Description of Artificial Sequence: Synthetic oligonucleotide
  Description of Combined DNA/RNA Molecule: Synthetic oligonucleotide
uuucuucggagacaatg

SEQ ID NO: 50373 - DNA, 16 bp, Artificial Sequence
  Description of Artificial Sequence: Synthetic oligonucleotide
  Description of Combined DNA/RNA Molecule: Synthetic oligonucleotide
uucuucggagacaatg

SEQ ID NO: 50374 - DNA, 15 bp, Artificial Sequence
  Description of Artificial Sequence: Synthetic oligonucleotide
  Description of Combined DNA/RNA Molecule: Synthetic oligonucleotide
ucuucggagacaatg

SEQ ID NO: 50375 - DNA, 14 bp, Artificial Sequence
  Description of Artificial Sequence: Synthetic oligonucleotide
  Description of Combined DNA/RNA Molecule: Synthetic oligonucleotide
cuucggagacaatg

SEQ ID NO: 50376 - DNA, 13 bp, Artificial Sequence
  Description of Artificial Sequence: Synthetic oligonucleotide
  Description of Combined DNA/RNA Molecule: Synthetic oligonucleotide
uucggagacaatg

SEQ ID NO: 50377 - DNA, 12 bp, Artificial Sequence
  Description of Artificial Sequence: Synthetic oligonucleotide
  Description of Combined DNA/RNA Molecule: Synthetic oligonucleotide
ucggagacaatg

SEQ ID NO: 50378 - DNA, 11 bp, Artificial Sequence
  Description of Artificial Sequence: Synthetic oligonucleotide
  Description of Combined DNA/RNA Molecule: Synthetic oligonucleotide
cggagacaatg

SEQ ID NO: 50379 - RNA, 9 nt, Artificial Sequence
  Description of Artificial Sequence: Synthetic oligonucleotide
  modified_base (2): LNA-G
ggaucuuau

SEQ ID NO: 50380 - RNA, 10 nt, Artificial Sequence
  Description of Artificial Sequence: Synthetic oligonucleotide
  modified_base (2): LNA-G
ggaucuuauu

SEQ ID NO: 50381 - RNA, 11 nt, Artificial Sequence
  Description of Artificial Sequence: Synthetic oligonucleotide
  modified_base (2): LNA-G
ggaucuuauuu

SEQ ID NO: 50382 - RNA, 12 nt, Artificial Sequence
  Description of Artificial Sequence: Synthetic oligonucleotide
  modified_base (2): LNA-G
ggaucuuauuuc

SEQ ID NO: 50383 - RNA, 8 nt, Artificial Sequence
  Description of Artificial Sequence: Synthetic oligonucleotide
  modified_base (3): LNA-A
cuacacaa

SEQ ID NO: 50384 - DNA, 13 bp, Artificial Sequence
  Description of Artificial Sequence: Synthetic oligonucleotide
  Description of Combined DNA/RNA Molecule: Synthetic oligonucleotide
  modified_base (8): LNA-A
aucagcgauuutt

SEQ ID NO: 50385 - DNA, 12 bp, Artificial Sequence
  Description of Artificial Sequence: Synthetic oligonucleotide
  Description of Combined DNA/RNA Molecule: Synthetic oligonucleotide
  modified_base (7): LNA-A
ucagcgauuutt

SEQ ID NO: 50386 - DNA, 11 bp, Artificial Sequence
  Description of Artificial Sequence: Synthetic oligonucleotide
  Description of Combined DNA/RNA Molecule: Synthetic oligonucleotide
  modified_base (6): LNA-A
cagcgauuutt

SEQ ID NO: 50387 - DNA, 10 bp, Artificial Sequence
  Description of Artificial Sequence: Synthetic oligonucleotide
  Description of Combined DNA/RNA Molecule: Synthetic oligonucleotide
  modified_base (5): LNA-A
agcgauuutt

SEQ ID NO: 50388 - DNA, 9 bp, Artificial Sequence
  Description of Artificial Sequence: Synthetic oligonucleotide
  Description of Combined DNA/RNA Molecule: Synthetic oligonucleotide
  modified_base (4): LNA-A
gcgauuutt

SEQ ID NO: 50389 - DNA, 8 bp, Artificial Sequence
  Description of Artificial Sequence: Synthetic oligonucleotide
  Description of Combined DNA/RNA Molecule: Synthetic oligonucleotide
  modified_base (3): LNA-A
cgauuutt

SEQ ID NO: 50390 - DNA, 7 bp, Artificial Sequence
  Description of Artificial Sequence: Synthetic oligonucleotide
  Description of Combined DNA/RNA Molecule: Synthetic oligonucleotide
  modified_base (2): LNA-A
gauuutt

SEQ ID NO: 50391 - RNA, 9 nt, Artificial Sequence
  Description of Artificial Sequence: Synthetic oligonucleotide
  modified_base (3): LNA-A
cuacacaaa

SEQ ID NO: 50392 - RNA, 10 nt, Artificial Sequence
  Description of Artificial Sequence: Synthetic oligonucleotide
  modified_base (3): LNA-A
cuacacaaau

SEQ ID NO: 50393 - RNA, 11 nt, Artificial Sequence
  Description of Artificial Sequence: Synthetic oligonucleotide
  modified_base (3): LNA-A
cuacacaaauc

SEQ ID NO: 50394 - RNA, 12 nt, Artificial Sequence
  Description of Artificial Sequence: Synthetic oligonucleotide
  modified_base (3): LNA-A
cuacacaaauca

SEQ ID NO: 50395 - RNA, 13 nt, Artificial Sequence
  Description of Artificial Sequence: Synthetic oligonucleotide
  modified_base (3): LNA-A
cuacacaaaucag

SEQ ID NO: 50396 - RNA, 14 nt, Artificial Sequence
  Description of Artificial Sequence: Synthetic oligonucleotide
  modified_base (3): LNA-A
cuacacaaaucagc

SEQ ID NO: 50397 - RNA, 13 nt, Artificial Sequence
  Description of Artificial Sequence: Synthetic oligonucleotide
  modified_base (2): LNA-G
ggaucuuauuucu

SEQ ID NO: 50398 - RNA, 14 nt, Artificial Sequence
  Description of Artificial Sequence: Synthetic oligonucleotide
  modified_base (2): LNA-G
ggaucuuauuucuu

SEQ ID NO: 50399 - RNA, 8 nt, Artificial Sequence
  Description of Artificial Sequence: Synthetic oligonucleotide
  modified_base (2): LNA-G
  modified_base (8): LNA-A
ggaucuua

SEQ ID NO: 50400 - RNA, 9 nt, Artificial Sequence
  Description of Artificial Sequence: Synthetic oligonucleotide
  modified_base (2): LNA-G
  modified_base (9): LNA-U
ggaucuuau

SEQ ID NO: 50401 - RNA, 10 nt, Artificial Sequence
  Description of Artificial Sequence: Synthetic oligonucleotide
  modified_base (2): LNA-G
  modified_base (10): LNA-U
ggaucuuauu

SEQ ID NO: 50402 - RNA, 11 nt, Artificial Sequence
  Description of Artificial Sequence: Synthetic oligonucleotide
  modified_base (2): LNA-G
  modified_base (11): LNA-U
ggaucuuauuu

SEQ ID NO: 50403 - RNA, 12 nt, Artificial Sequence
  Description of Artificial Sequence: Synthetic oligonucleotide
  modified_base (2): LNA-G
  modified_base (12): LNA-C
ggaucuuauuuc

SEQ ID NO: 50404 - RNA, 13 nt, Artificial Sequence
  Description of Artificial Sequence: Synthetic oligonucleotide
  modified_base (2): LNA-G
  modified_base (13): LNA-U
ggaucuuauuucu

SEQ ID NO: 50405 - RNA, 14 nt, Artificial Sequence
  Description of Artificial Sequence: Synthetic oligonucleotide
  modified_base (2): LNA-G
  modified_base (14): LNA-U
ggaucuuauuucuu

SEQ ID NO: 50406 - DNA, 13 bp, Artificial Sequence
  Description of Artificial Sequence: Synthetic oligonucleotide
  Description of Combined DNA/RNA Molecule: Synthetic oligonucleotide
  modified_base (8): LNA-G
uuucuucggagtt

SEQ ID NO: 50407 - DNA, 12 bp, Artificial Sequence
  Description of Artificial Sequence: Synthetic oligonucleotide
  Description of Combined DNA/RNA Molecule: Synthetic oligonucleotide
  modified_base (7): LNA-G
uucuucggagtt

SEQ ID NO: 50408 - DNA, 11 bp, Artificial Sequence
  Description of Artificial Sequence: Synthetic oligonucleotide
  Description of Combined DNA/RNA Molecule: Synthetic oligonucleotide
  modified_base (6): LNA-G
ucuucggagtt

SEQ ID NO: 50409 - DNA, 10 bp, Artificial Sequence
  Description of Artificial Sequence: Synthetic oligonucleotide
  Description of Combined DNA/RNA Molecule: Synthetic oligonucleotide
  modified_base (5): LNA-G
cuucggagtt

SEQ ID NO: 50410 - DNA, 9 bp, Artificial Sequence
  Description of Artificial Sequence: Synthetic oligonucleotide
  Description of Combined DNA/RNA Molecule: Synthetic oligonucleotide
  modified_base (4): LNA-G
uucggagtt

SEQ ID NO: 50411 - DNA, 8 bp, Artificial Sequence
  Description of Artificial Sequence: Synthetic oligonucleotide
  Description of Combined DNA/RNA Molecule: Synthetic oligonucleotide
  modified_base (3): LNA-G
ucggagtt

SEQ ID NO: 50412 - DNA, 7 bp, Artificial Sequence
  Description of Artificial Sequence: Synthetic oligonucleotide
  Description of Combined DNA/RNA Molecule: Synthetic oligonucleotide
  modified_base (2): LNA-G
cggagtt

SEQ ID NO: 50413 - DNA, 13 bp, Artificial Sequence
  Description of Artificial Sequence: Synthetic oligonucleotide
  Description of Combined DNA/RNA Molecule: Synthetic oligonucleotide
  modified_base (1): LNA-U
  modified_base (8): LNA-G
uuucuucggagtt

SEQ ID NO: 50414 - DNA, 12 bp, Artificial Sequence
  Description of Artificial Sequence: Synthetic oligonucleotide
  Description of Combined DNA/RNA Molecule: Synthetic oligonucleotide
  modified_base (1): LNA-U
  modified_base (7): LNA-G
uucuucggagtt

SEQ ID NO: 50415 - DNA, 11 bp, Artificial Sequence
  Description of Artificial Sequence: Synthetic oligonucleotide
  Description of Combined DNA/RNA Molecule: Synthetic oligonucleotide
  modified_base (1): LNA-U
  modified_base (6): LNA-G
ucuucggagtt

SEQ ID NO: 50416 - DNA, 10 bp, Artificial Sequence
  Description of Artificial Sequence: Synthetic oligonucleotide
  Description of Combined DNA/RNA Molecule: Synthetic oligonucleotide
  modified_base (1): LNA-C
  modified_base (5): LNA-G
cuucggagtt

SEQ ID NO: 50417 - DNA, 9 bp, Artificial Sequence
  Description of Artificial Sequence: Synthetic oligonucleotide
  Description of Combined DNA/RNA Molecule: Synthetic oligonucleotide
  modified_base (1): LNA-U
  modified_base (4): LNA-G
uucggagtt

SEQ ID NO: 50418 - DNA, 8 bp, Artificial Sequence
  Description of Artificial Sequence: Synthetic oligonucleotide
  Description of Combined DNA/RNA Molecule: Synthetic oligonucleotide
  modified_base (1): LNA-U
  modified_base (3): LNA-G
ucggagtt

SEQ ID NO: 50419 - DNA, 7 bp, Artificial Sequence
  Description of Artificial Sequence: Synthetic oligonucleotide
  Description of Combined DNA/RNA Molecule: Synthetic oligonucleotide
  modified_base (1): LNA-C
  modified_base (2): LNA-G
cggagtt

SEQ ID NO: 50420 - DNA, 21 bp, Artificial Sequence
  Description of Artificial Sequence: Synthetic oligonucleotide
  Description of Combined DNA/RNA Molecule: Synthetic oligonucleotide
  modified_base (2): LNA-G
  modified_base (16): LNA-G
ggaucuuauuucuucggagtt

SEQ ID NO: 50421 - DNA, 25 bp, Artificial Sequence
  Description of Artificial Sequence: Synthetic oligonucleotide
  Description of Combined DNA/RNA Molecule: Synthetic oligonucleotide
ggaucuuauuucuucggagacaatg

SEQ ID NO: 50422 - RNA, 25 nt, Artificial Sequence
  Description of Artificial Sequence: Synthetic oligonucleotide
uuaagcagaguucaaaagcccuuca

SEQ ID NO: 50423 - RNA, 25 nt, Artificial Sequence
  Description of Artificial Sequence: Synthetic oligonucleotide
uaagcagaguucaaaagcccuucag

SEQ ID NO: 50424 - RNA, 25 nt, Artificial Sequence
  Description of Artificial Sequence: Synthetic oligonucleotide
agcagaguucaaaagcccuucagcg

SEQ ID NO: 50425 - RNA, 25 nt, Artificial Sequence
  Description of Artificial Sequence: Synthetic oligonucleotide
cucagggucugagugaagccgcucg

SEQ ID NO: 50426 - RNA, 25 nt, Artificial Sequence
  Description of Artificial Sequence: Synthetic oligonucleotide
caagcaacuacaucacgccagucaa

SEQ ID NO: 50427 - RNA, 25 nt, Artificial Sequence
  Description of Artificial Sequence: Synthetic oligonucleotide
aucaauggcagcuucuuggugcgug

SEQ ID NO: 50428 - RNA, 25 nt, Artificial Sequence
  Description of Artificial Sequence: Synthetic oligonucleotide
uuccagcccacauuggauucaucag

SEQ ID NO: 50429 - RNA, 25 nt, Artificial Sequence
  Description of Artificial Sequence: Synthetic oligonucleotide
cagcugagaauguggaauaccuaag

SEQ ID NO: 50430 - RNA, 25 nt, Artificial Sequence
  Description of Artificial Sequence: Synthetic oligonucleotide
aacguaucuccuaauuugaggcuca

SEQ ID NO: 50431 - RNA, 25 nt, Artificial Sequence
  Description of Artificial Sequence: Synthetic oligonucleotide
ccuaaaauaauuucucuacaauugg

SEQ ID NO: 50432 - RNA, 25 nt, Artificial Sequence
  Description of Artificial Sequence: Synthetic oligonucleotide
uggaagauucagcuaguuaggagcc

SEQ ID NO: 50433 - RNA, 25 nt, Artificial Sequence
  Description of Artificial Sequence: Synthetic oligonucleotide
uuaaacucuccuagucaauauccac

SEQ ID NO: 50434 - RNA, 25 nt, Artificial Sequence
  Description of Artificial Sequence: Synthetic oligonucleotide
cagccuacaguuauguucagucaca

SEQ ID NO: 50435 - RNA, 25 nt, Artificial Sequence
  Description of Artificial Sequence: Synthetic oligonucleotide
guuauguucagucacacacacauac

SEQ ID NO: 50436 - RNA, 25 nt, Artificial Sequence
  Description of Artificial Sequence: Synthetic oligonucleotide
cacauacaaaauguuccuuuugcuu

SEQ ID NO: 50437 - RNA, 25 nt, Artificial Sequence
  Description of Artificial Sequence: Synthetic oligonucleotide
uccuuuugcuuuuaaaguaauuuuu

SEQ ID NO: 50438 - RNA, 25 nt, Artificial Sequence
  Description of Artificial Sequence: Synthetic oligonucleotide
ugaccugugaagcaacagucaaugg

SEQ ID NO: 50439 - RNA, 25 nt, Artificial Sequence
  Description of Artificial Sequence: Synthetic oligonucleotide
cuaucucacacaucgacaaaccaau

SEQ ID NO: 50440 - RNA, 25 nt, Artificial Sequence
  Description of Artificial Sequence: Synthetic oligonucleotide
uguccucaauuguacugcuaccacu

SEQ ID NO: 50441 - RNA, 25 nt, Artificial Sequence
  Description of Artificial Sequence: Synthetic oligonucleotide
aaaccguagcuggcaagcggucuua

SEQ ID NO: 50442 - RNA, 25 nt, Artificial Sequence
  Description of Artificial Sequence: Synthetic oligonucleotide
uagcuggcaagcggucuuaccggcu

SEQ ID NO: 50443 - RNA, 25 nt, Artificial Sequence
  Description of Artificial Sequence: Synthetic oligonucleotide
uuguaugguuaaaagauggguuacc

SEQ ID NO: 50444 - RNA, 25 nt, Artificial Sequence
  Description of Artificial Sequence: Synthetic oligonucleotide
ugguuaaaagauggguuaccugcga

SEQ ID NO: 50445 - RNA, 25 nt, Artificial Sequence
  Description of Artificial Sequence: Synthetic oligonucleotide
cagggaauuauacaaucuugcugag

SEQ ID NO: 50446 - RNA, 25 nt, Artificial Sequence
  Description of Artificial Sequence: Synthetic oligonucleotide
acaaucuugcugagcauaaaacagu

SEQ ID NO: 50447 - RNA, 25 nt, Artificial Sequence
  Description of Artificial Sequence: Synthetic oligonucleotide
ccaauaaugaagaguccuuuauccu

SEQ ID NO: 50448 - RNA, 25 nt, Artificial Sequence
  Description of Artificial Sequence: Synthetic oligonucleotide
acuuuggauguuccaacgcaaguug

SEQ ID NO: 50449 - RNA, 25 nt, Artificial Sequence
  Description of Artificial Sequence: Synthetic oligonucleotide
aaugcuuccacuaaacugaaaccau

SEQ ID NO: 50450 - RNA, 25 nt, Artificial Sequence
  Description of Artificial Sequence: Synthetic oligonucleotide
gagaaaguuugacuuuguuaaauau

SEQ ID NO: 50451 - RNA, 25 nt, Artificial Sequence
  Description of Artificial Sequence: Synthetic oligonucleotide
aaagaacuacuguauauuaaaaguu

SEQ ID NO: 50452 - RNA, 25 nt, Artificial Sequence
  Description of Artificial Sequence: Synthetic oligonucleotide
uuagaaauacggguuuugacuuaac

SEQ ID NO: 50453 - RNA, 25 nt, Artificial Sequence
  Description of Artificial Sequence: Synthetic oligonucleotide
aacauggguacagcaaacucagcac

SEQ ID NO: 50454 - RNA, 25 nt, Artificial Sequence
  Description of Artificial Sequence: Synthetic oligonucleotide
aaagacacagaagaugcugaccuca

SEQ ID NO: 50455 - RNA, 25 nt, Artificial Sequence
  Description of Artificial Sequence: Synthetic oligonucleotide
uaguagggagguuuauucagaucgc

SEQ ID NO: 50456 - RNA, 25 nt, Artificial Sequence
  Description of Artificial Sequence: Synthetic oligonucleotide
gccuucugcagcaggguucugggau

SEQ ID NO: 50457 - RNA, 25 nt, Artificial Sequence
  Description of Artificial Sequence: Synthetic oligonucleotide
ggucugguacauauuggaaauuaug

SEQ ID NO: 50458 - RNA, 25 nt, Artificial Sequence
  Description of Artificial Sequence: Synthetic oligonucleotide
cuaguccuuccgauggaagcacuag

SEQ ID NO: 50459 - RNA, 25 nt, Artificial Sequence
  Description of Artificial Sequence: Synthetic oligonucleotide
ccagugaauauuguuuuuaugugga

SEQ ID NO: 50460 - RNA, 25 nt, Artificial Sequence
  Description of Artificial Sequence: Synthetic oligonucleotide
augaauucaaguuggaauugguaga

SEQ ID NO: 50461 - RNA, 25 nt, Artificial Sequence
  Description of Artificial Sequence: Synthetic oligonucleotide
caggacacagauuuagacuuggaga

SEQ ID NO: 50462 - RNA, 25 nt, Artificial Sequence
  Description of Artificial Sequence: Synthetic oligonucleotide
cucaaagcacaguuacaguauucca

SEQ ID NO: 50463 - RNA, 25 nt, Artificial Sequence
  Description of Artificial Sequence: Synthetic oligonucleotide
accacugccaccacugaugaauuaa

SEQ ID NO: 50464 - RNA, 25 nt, Artificial Sequence
  Description of Artificial Sequence: Synthetic oligonucleotide
gaaacuacuagugccacaucaucac

SEQ ID NO: 50465 - RNA, 25 nt, Artificial Sequence
  Description of Artificial Sequence: Synthetic oligonucleotide
aagucggacagccucaccaaacaga

SEQ ID NO: 50466 - RNA, 25 nt, Artificial Sequence
  Description of Artificial Sequence: Synthetic oligonucleotide
gaaagcgaaaaauggaacaugaugg

SEQ ID NO: 50467 - RNA, 25 nt, Artificial Sequence
  Description of Artificial Sequence: Synthetic oligonucleotide
cccucugauuuagcauguagacugc

SEQ ID NO: 50468 - RNA, 25 nt, Artificial Sequence
  Description of Artificial Sequence: Synthetic oligonucleotide
ugagcuauuuaaggaucuauuuaug

SEQ ID NO: 50469 - RNA, 25 nt, Artificial Sequence
  Description of Artificial Sequence: Synthetic oligonucleotide
aaaaggugaaaaagcacuauuauca

SEQ ID NO: 50470 - RNA, 25 nt, Artificial Sequence
  Description of Artificial Sequence: Synthetic oligonucleotide
gaaaaagcacuauuaucaguucugc

SEQ ID NO: 50471 - RNA, 25 nt, Artificial Sequence
  Description of Artificial Sequence: Synthetic oligonucleotide
ggcugaaaagaaagauuaaaccuac

SEQ ID NO: 50472 - RNA, 25 nt, Artificial Sequence
  Description of Artificial Sequence: Synthetic oligonucleotide
uaaacccuuauaauaaaauccuucu

SEQ ID NO: 50473 - RNA, 25 nt, Artificial Sequence
  Description of Artificial Sequence: Synthetic oligonucleotide
cauacuauuagccaaugcuguagac

SEQ ID NO: 50474 - RNA, 25 nt, Artificial Sequence
  Description of Artificial Sequence: Synthetic oligonucleotide
gacagaagcauuuugauaggaauag

SEQ ID NO: 50475 - RNA, 25 nt, Artificial Sequence
  Description of Artificial Sequence: Synthetic oligonucleotide
agagcaaauaagauaauggcccuga

SEQ ID NO: 50476 - RNA, 25 nt, Artificial Sequence
  Description of Artificial Sequence: Synthetic oligonucleotide
ccaacauuuuucucuuccucaagca

SEQ ID NO: 50477 - RNA, 25 nt, Artificial Sequence
  Description of Artificial Sequence: Synthetic oligonucleotide
uuaaguaugagaaaaguucagccca

SEQ ID NO: 50478 - RNA, 25 nt, Artificial Sequence
  Description of Artificial Sequence: Synthetic oligonucleotide
caggaauaaagauggcugcugaacc

SEQ ID NO: 50479 - RNA, 25 nt, Artificial Sequence
  Description of Artificial Sequence: Synthetic oligonucleotide
aauuugaaugaccaaguucucuuca

SEQ ID NO: 50480 - RNA, 25 nt, Artificial Sequence
  Description of Artificial Sequence: Synthetic oligonucleotide
auguauaaagauagccagccuagag

SEQ ID NO: 50481 - RNA, 25 nt, Artificial Sequence
  Description of Artificial Sequence: Synthetic oligonucleotide
ggcuguaacuaucucugugaagugu

SEQ ID NO: 50482 - RNA, 25 nt, Artificial Sequence
  Description of Artificial Sequence: Synthetic oligonucleotide
ucugugaagugugagaaaauuucaa

SEQ ID NO: 50483 - RNA, 25 nt, Artificial Sequence
  Description of Artificial Sequence: Synthetic oligonucleotide
ccuuuaaggaaaugaauccuccuga

SEQ ID NO: 50484 - RNA, 25 nt, Artificial Sequence
  Description of Artificial Sequence: Synthetic oligonucleotide
aaggauacaaaaagugacaucauau

SEQ ID NO: 50485 - RNA, 25 nt, Artificial Sequence
  Description of Artificial Sequence: Synthetic oligonucleotide
agaugcaauuugaaucuucaucaua

SEQ ID NO: 50486 - RNA, 25 nt, Artificial Sequence
  Description of Artificial Sequence: Synthetic oligonucleotide
guucaaaacgaagacuagcuauuaa

SEQ ID NO: 50487 - RNA, 25 nt, Artificial Sequence
  Description of Artificial Sequence: Synthetic oligonucleotide
gugaaaccucaucucuacuaaaaau

SEQ ID NO: 50488 - RNA, 25 nt, Artificial Sequence
  Description of Artificial Sequence: Synthetic oligonucleotide
acgaaagagaagcucuaucucgccu

SEQ ID NO: 50489 - RNA, 25 nt, Artificial Sequence
  Description of Artificial Sequence: Synthetic oligonucleotide
cuccacaagcgccuucgguccaguu

SEQ ID NO: 50490 - RNA, 25 nt, Artificial Sequence
  Description of Artificial Sequence: Synthetic oligonucleotide
gagaagauuccaaagauguagccgc

SEQ ID NO: 50491 - RNA, 25 nt, Artificial Sequence
  Description of Artificial Sequence: Synthetic oligonucleotide
aaucuggauucaaugaggagacuug

SEQ ID NO: 50492 - RNA, 25 nt, Artificial Sequence
  Description of Artificial Sequence: Synthetic oligonucleotide
agaacagauuugagaguagugagga

SEQ ID NO: 50493 - RNA, 25 nt, Artificial Sequence
  Description of Artificial Sequence: Synthetic oligonucleotide
ccagagcugugcagaugaguacaaa

SEQ ID NO: 50494 - RNA, 25 nt, Artificial Sequence
  Description of Artificial Sequence: Synthetic oligonucleotide
ccucagauuguuguuguuaaugggc

SEQ ID NO: 50495 - RNA, 25 nt, Artificial Sequence
  Description of Artificial Sequence: Synthetic oligonucleotide
cuauuuuaauuauuuuuaauuuauu

SEQ ID NO: 50496 - RNA, 25 nt, Artificial Sequence
  Description of Artificial Sequence: Synthetic oligonucleotide
uuuaauuuauuaauauuuaaauaug

SEQ ID NO: 50497 - RNA, 25 nt, Artificial Sequence
  Description of Artificial Sequence: Synthetic oligonucleotide
augcaguuugaauauccuuuguuuc

SEQ ID NO: 50498 - RNA, 25 nt, Artificial Sequence
  Description of Artificial Sequence: Synthetic oligonucleotide
caugcugcuggcgucuaaguguuug

SEQ ID NO: 50499 - RNA, 25 nt, Artificial Sequence
  Description of Artificial Sequence: Synthetic oligonucleotide
agaugugcauuucaccugugacaaa

SEQ ID NO: 50500 - RNA, 25 nt, Artificial Sequence
  Description of Artificial Sequence: Synthetic oligonucleotide
ucaaaaccugugccaggcugaauua

SEQ ID NO: 50501 - RNA, 25 nt, Artificial Sequence
  Description of Artificial Sequence: Synthetic oligonucleotide
gaauguggguagucauucuuacaau

SEQ ID NO: 50502 - RNA, 25 nt, Artificial Sequence
  Description of Artificial Sequence: Synthetic oligonucleotide
auguggguagucauucuuacaauug

SEQ ID NO: 50503 - RNA, 25 nt, Artificial Sequence
  Description of Artificial Sequence: Synthetic oligonucleotide
ugaaaaugagcaucagagaguguac

SEQ ID NO: 50504 - RNA, 25 nt, Artificial Sequence
  Description of Artificial Sequence: Synthetic oligonucleotide
uugcuuuucauguagaacucagcag

SEQ ID NO: 50505 - RNA, 25 nt, Artificial Sequence
  Description of Artificial Sequence: Synthetic oligonucleotide
uguauuucuauauuuauuuucagua

SEQ ID NO: 50506 - RNA, 25 nt, Artificial Sequence
  Description of Artificial Sequence: Synthetic oligonucleotide
uuugauuaauguuucuuaaauggaa

SEQ ID NO: 50507 - RNA, 25 nt, Artificial Sequence
  Description of Artificial Sequence: Synthetic oligonucleotide
caacguguauagugccuaaaauugu

SEQ ID NO: 50508 - RNA, 25 nt, Artificial Sequence
  Description of Artificial Sequence: Synthetic oligonucleotide
cauauccuuggcuacuaacaucugg

SEQ ID NO: 50509 - RNA, 25 nt, Artificial Sequence
  Description of Artificial Sequence: Synthetic oligonucleotide
uacuaacaucuggagacugugagcu

SEQ ID NO: 50510 - RNA, 25 nt, Artificial Sequence
  Description of Artificial Sequence: Synthetic oligonucleotide
cauaaguugugugcuuuuuauuaau

SEQ ID NO: 50511 - RNA, 25 nt, Artificial Sequence
  Description of Artificial Sequence: Synthetic oligonucleotide
gcaucauuuuggcucuucuuacauu

SEQ ID NO: 50512 - RNA, 25 nt, Artificial Sequence
  Description of Artificial Sequence: Synthetic oligonucleotide
gcucuucuuacauuuguaaaaaugu

SEQ ID NO: 50513 - RNA, 25 nt, Artificial Sequence
  Description of Artificial Sequence: Synthetic oligonucleotide
agauuaggucaucuuaauucauauu

SEQ ID NO: 50514 - RNA, 25 nt, Artificial Sequence
  Description of Artificial Sequence: Synthetic oligonucleotide
auggaauugaaagaacuaaucauga

SEQ ID NO: 50515 - RNA, 25 nt, Artificial Sequence
  Description of Artificial Sequence: Synthetic oligonucleotide
cacacucauuccuucugcucuuggg

SEQ ID NO: 50516 - RNA, 25 nt, Artificial Sequence
  Description of Artificial Sequence: Synthetic oligonucleotide
uguagagguaaccaguagcuuugag

SEQ ID NO: 50517 - RNA, 25 nt, Artificial Sequence
  Description of Artificial Sequence: Synthetic oligonucleotide
caaccacaugccacguaauauuuca

SEQ ID NO: 50518 - RNA, 25 nt, Artificial Sequence
  Description of Artificial Sequence: Synthetic oligonucleotide
ucggaaacaaguuauucucuucacu

SEQ ID NO: 50519 - RNA, 25 nt, Artificial Sequence
  Description of Artificial Sequence: Synthetic oligonucleotide
acucccaauaacuaaugcuaagaaa

SEQ ID NO: 50520 - RNA, 25 nt, Artificial Sequence
  Description of Artificial Sequence: Synthetic oligonucleotide
aaugcuaagaaaugcugaaaaucaa

SEQ ID NO: 50521 - RNA, 25 nt, Artificial Sequence
  Description of Artificial Sequence: Synthetic oligonucleotide
gucuuucucuaaauaugauuacuuu

SEQ ID NO: 50522 - RNA, 25 nt, Artificial Sequence
  Description of Artificial Sequence: Synthetic oligonucleotide
ugaauuucaggcauuuuguucuaca

SEQ ID NO: 50523 - RNA, 25 nt, Artificial Sequence
  Description of Artificial Sequence: Synthetic oligonucleotide
cgauucccucucacccgggacucuc

SEQ ID NO: 50524 - RNA, 25 nt, Artificial Sequence
  Description of Artificial Sequence: Synthetic oligonucleotide
aggaaagugaaccuuuaaaguaaag

SEQ ID NO: 50525 - RNA, 25 nt, Artificial Sequence
  Description of Artificial Sequence: Synthetic oligonucleotide
gaggcugcaugcucuggaagccugg

SEQ ID NO: 50526 - RNA, 25 nt, Artificial Sequence
  Description of Artificial Sequence: Synthetic oligonucleotide
ucucugaacagaaaacaaaagagag

SEQ ID NO: 50527 - RNA, 25 nt, Artificial Sequence
  Description of Artificial Sequence: Synthetic oligonucleotide
aacuuggcuguaaucaguuaugccg

SEQ ID NO: 50528 - RNA, 25 nt, Artificial Sequence
  Description of Artificial Sequence: Synthetic oligonucleotide
agaagccaaaauuaaaagaagucca

SEQ ID NO: 50529 - RNA, 25 nt, Artificial Sequence
  Description of Artificial Sequence: Synthetic oligonucleotide
auuaaaagaaguccaggugagguua

SEQ ID NO: 50530 - RNA, 25 nt, Artificial Sequence
  Description of Artificial Sequence: Synthetic oligonucleotide
gaauccggauuaucgggaagaggac

SEQ ID NO: 50531 - RNA, 25 nt, Artificial Sequence
  Description of Artificial Sequence: Synthetic oligonucleotide
aaugugacaucaaagcaaguauugu

SEQ ID NO: 50532 - RNA, 25 nt, Artificial Sequence
  Description of Artificial Sequence: Synthetic oligonucleotide
caucaaagcaaguauuguagcacuc

SEQ ID NO: 50533 - RNA, 25 nt, Artificial Sequence
  Description of Artificial Sequence: Synthetic oligonucleotide
agagagagaaaacaaaaccacaaau

SEQ ID NO: 50534 - RNA, 25 nt, Artificial Sequence
  Description of Artificial Sequence: Synthetic oligonucleotide
ucgcuguaguauuuaagcccauaca

SEQ ID NO: 50535 - RNA, 25 nt, Artificial Sequence
  Description of Artificial Sequence: Synthetic oligonucleotide
cgcuguaguauuuaagcccauacag

SEQ ID NO: 50536 - RNA, 25 nt, Artificial Sequence
  Description of Artificial Sequence: Synthetic oligonucleotide
auuuaagcccauacagaaaccuucc

SEQ ID NO: 50537 - RNA, 25 nt, Artificial Sequence
  Description of Artificial Sequence: Synthetic oligonucleotide
auuaaaauaaacaugguauaccuac

SEQ ID NO: 50538 - RNA, 25 nt, Artificial Sequence
  Description of Artificial Sequence: Synthetic oligonucleotide
cuguucugaucggccaguuuucgga

SEQ ID NO: 50539 - RNA, 25 nt, Artificial Sequence
  Description of Artificial Sequence: Synthetic oligonucleotide
aaauaauuugaacuuuggaacaggg

SEQ ID NO: 50540 - RNA, 25 nt, Artificial Sequence
  Description of Artificial Sequence: Synthetic oligonucleotide
ugcgaccuuaauuuaacuuuccagu

SEQ ID NO: 50541 - RNA, 25 nt, Artificial Sequence
  Description of Artificial Sequence: Synthetic oligonucleotide
cugagaaagcuaaaguuugguuuug

SEQ ID NO: 50542 - RNA, 25 nt, Artificial Sequence
  Description of Artificial Sequence: Synthetic oligonucleotide
aguaaagaugcuacuucccacugua

SEQ ID NO: 50543 - RNA, 25 nt, Artificial Sequence
  Description of Artificial Sequence: Synthetic oligonucleotide
cugcuuaauugcugauaccauauga

SEQ ID NO: 50544 - RNA, 25 nt, Artificial Sequence
  Description of Artificial Sequence: Synthetic oligonucleotide
uaccauaugaaugaaacaugggcug

SEQ ID NO: 50545 - RNA, 25 nt, Artificial Sequence
  Description of Artificial Sequence: Synthetic oligonucleotide
aacuuucuuauccaacuuuuucaua

SEQ ID NO: 50546 - RNA, 25 nt, Artificial Sequence
  Description of Artificial Sequence: Synthetic oligonucleotide
ccuugcaugacaucaugaggccgga

SEQ ID NO: 50547 - RNA, 25 nt, Artificial Sequence
  Description of Artificial Sequence: Synthetic oligonucleotide
ugaauuuguauaugacugcauuugu

SEQ ID NO: 50548 - RNA, 25 nt, Artificial Sequence
  Description of Artificial Sequence: Synthetic oligonucleotide
gaauccuaguagaauguuuacuacc

SEQ ID NO: 50549 - RNA, 25 nt, Artificial Sequence
  Description of Artificial Sequence: Synthetic oligonucleotide
gaaagggaagaauuuuuugaugaaa

SEQ ID NO: 50550 - RNA, 25 nt, Artificial Sequence
  Description of Artificial Sequence: Synthetic oligonucleotide
uaucggcaugccagugugugaauuu

SEQ ID NO: 50551 - RNA, 25 nt, Artificial Sequence
  Description of Artificial Sequence: Synthetic oligonucleotide
caccucauaguagagcaauguaugu

SEQ ID NO: 50552 - RNA, 25 nt, Artificial Sequence
  Description of Artificial Sequence: Synthetic oligonucleotide
ccagaauugccaaagcacauauaua

SEQ ID NO: 50553 - RNA, 25 nt, Artificial Sequence
  Description of Artificial Sequence: Synthetic oligonucleotide
uggugaucuggguaauaguuucucc

SEQ ID NO: 50554 - RNA, 25 nt, Artificial Sequence
  Description of Artificial Sequence: Synthetic oligonucleotide
gaucuggguaauaguuucuccaaau

SEQ ID NO: 50555 - RNA, 25 nt, Artificial Sequence
  Description of Artificial Sequence: Synthetic oligonucleotide
ggaugugaugaauacuuccuagaaa

SEQ ID NO: 50556 - RNA, 25 nt, Artificial Sequence
  Description of Artificial Sequence: Synthetic oligonucleotide
cauuuccacagcuacaccauauaug

SEQ ID NO: 50557 - RNA, 25 nt, Artificial Sequence
  Description of Artificial Sequence: Synthetic oligonucleotide
acagcuacaccauauaugaauggag

SEQ ID NO: 50558 - RNA, 25 nt, Artificial Sequence
  Description of Artificial Sequence: Synthetic oligonucleotide
ugcaguucuuacacgagaagaagau

SEQ ID NO: 50559 - RNA, 25 nt, Artificial Sequence
  Description of Artificial Sequence: Synthetic oligonucleotide
acgagaagaagaucauuuacaggga

SEQ ID NO: 50560 - RNA, 25 nt, Artificial Sequence
  Description of Artificial Sequence: Synthetic oligonucleotide
cgagaagaagaucauuuacagggac

SEQ ID NO: 50561 - RNA, 25 nt, Artificial Sequence
  Description of Artificial Sequence: Synthetic oligonucleotide
aagaagaucauuuacagggaccuga

SEQ ID NO: 50562 - RNA, 25 nt, Artificial Sequence
  Description of Artificial Sequence: Synthetic oligonucleotide
agaggaagagguguuugacugcauc

SEQ ID NO: 50563 - RNA, 25 nt, Artificial Sequence
  Description of Artificial Sequence: Synthetic oligonucleotide
gaggaagagguguuugacugcaucg

SEQ ID NO: 50564 - RNA, 25 nt, Artificial Sequence
  Description of Artificial Sequence: Synthetic oligonucleotide
cuacuuugagggcgaguucacaggg

SEQ ID NO: 50565 - RNA, 25 nt, Artificial Sequence
  Description of Artificial Sequence: Synthetic oligonucleotide
agggcaucuccuggcaccucugucc

SEQ ID NO: 50566 - RNA, 25 nt, Artificial Sequence
  Description of Artificial Sequence: Synthetic oligonucleotide
ggagugauaugguuugucuuuuuaa

SEQ ID NO: 50567 - RNA, 25 nt, Artificial Sequence
  Description of Artificial Sequence: Synthetic oligonucleotide
gagugauaugguuugucuuuuuaag

SEQ ID NO: 50568 - RNA, 25 nt, Artificial Sequence
  Description of Artificial Sequence: Synthetic oligonucleotide
ugcaguaaagauccuaaagguuguc

SEQ ID NO: 50569 - RNA, 25 nt, Artificial Sequence
  Description of Artificial Sequence: Synthetic oligonucleotide
aguaaagauccuaaagguugucgac

SEQ ID NO: 50570 - RNA, 25 nt, Artificial Sequence
  Description of Artificial Sequence: Synthetic oligonucleotide
ugacaaaggacaaccuggcaauugu

SEQ ID NO: 50571 - RNA, 25 nt, Artificial Sequence
  Description of Artificial Sequence: Synthetic oligonucleotide
gcaauugugacccaguggugcgagg

SEQ ID NO: 50572 - RNA, 25 nt, Artificial Sequence
  Description of Artificial Sequence: Synthetic oligonucleotide
aacaucauccauagagacaugaaau

SEQ ID NO: 50573 - RNA, 25 nt, Artificial Sequence
  Description of Artificial Sequence: Synthetic oligonucleotide
ugaaauccaacaauauauuucucca

SEQ ID NO: 50574 - RNA, 25 nt, Artificial Sequence
  Description of Artificial Sequence: Synthetic oligonucleotide
aacaauauauuucuccaugaaggcu

SEQ ID NO: 50575 - RNA, 25 nt, Artificial Sequence
  Description of Artificial Sequence: Synthetic oligonucleotide
aacaguaaagucacgcuggaguggu

SEQ ID NO: 50576 - RNA, 25 nt, Artificial Sequence
  Description of Artificial Sequence: Synthetic oligonucleotide
ugugaagaaaguaaaggaagagagg

SEQ ID NO: 50577 - RNA, 25 nt, Artificial Sequence
  Description of Artificial Sequence: Synthetic oligonucleotide
cuuccgagccauccuugcaucgggc

SEQ ID NO: 50578 - RNA, 25 nt, Artificial Sequence
  Description of Artificial Sequence: Synthetic oligonucleotide
aauggagguugaauauccuacugug

SEQ ID NO: 50579 - RNA, 25 nt, Artificial Sequence
  Description of Artificial Sequence: Synthetic oligonucleotide
ggagguugaauauccuacuguguaa

SEQ ID NO: 50580 - RNA, 25 nt, Artificial Sequence
  Description of Artificial Sequence: Synthetic oligonucleotide
auuuugaguuuucccuuguagugua

SEQ ID NO: 50581 - RNA, 25 nt, Artificial Sequence
  Description of Artificial Sequence: Synthetic oligonucleotide
uauccuguuuguucuuuguugauug

SEQ ID NO: 50582 - RNA, 25 nt, Artificial Sequence
  Description of Artificial Sequence: Synthetic oligonucleotide
ccuguuuguucuuuguugauugaaa

SEQ ID NO: 50583 - RNA, 25 nt, Artificial Sequence
  Description of Artificial Sequence: Synthetic oligonucleotide
cucuacagccuucuuuuucuuccau

SEQ ID NO: 50584 - RNA, 25 nt, Artificial Sequence
  Description of Artificial Sequence: Synthetic oligonucleotide
ucuuccauagcuaaucuuccuucua

SEQ ID NO: 50585 - RNA, 25 nt, Artificial Sequence
  Description of Artificial Sequence: Synthetic oligonucleotide
auaaucuuccuguugaaugcuucau

SEQ ID NO: 50586 - RNA, 25 nt, Artificial Sequence
  Description of Artificial Sequence: Synthetic oligonucleotide
uaaucuuccuguugaaugcuucaug

SEQ ID NO: 50587 - RNA, 25 nt, Artificial Sequence
  Description of Artificial Sequence: Synthetic oligonucleotide
cuucaugacuugaauucuacuuuga

SEQ ID NO: 50588 - RNA, 25 nt, Artificial Sequence
  Description of Artificial Sequence: Synthetic oligonucleotide
aagagggagagaagcaacuacagac

SEQ ID NO: 50589 - RNA, 25 nt, Artificial Sequence
  Description of Artificial Sequence: Synthetic oligonucleotide
cgucuccuaccagaccaaggucaac

SEQ ID NO: 50590 - RNA, 25 nt, Artificial Sequence
  Description of Artificial Sequence: Synthetic oligonucleotide
gaucaaucggcccgacuaucucgac

SEQ ID NO: 50591 - RNA, 25 nt, Artificial Sequence
  Description of Artificial Sequence: Synthetic oligonucleotide
ggacgaacauccaaccuucccaaac

SEQ ID NO: 50592 - RNA, 25 nt, Artificial Sequence
  Description of Artificial Sequence: Synthetic oligonucleotide
agggucggaacccaagcuuagaacu

SEQ ID NO: 50593 - RNA, 25 nt, Artificial Sequence
  Description of Artificial Sequence: Synthetic oligonucleotide
ucggaacccaagcuuagaacuuuaa

SEQ ID NO: 50594 - RNA, 25 nt, Artificial Sequence
  Description of Artificial Sequence: Synthetic oligonucleotide
acccaagcuuagaacuuuaagcaac

SEQ ID NO: 50595 - RNA, 25 nt, Artificial Sequence
  Description of Artificial Sequence: Synthetic oligonucleotide
gaacuuuaagcaacaagaccaccac

SEQ ID NO: 50596 - RNA, 25 nt, Artificial Sequence
  Description of Artificial Sequence: Synthetic oligonucleotide
acuauucaguggcgagaaauaaagu

SEQ ID NO: 50597 - RNA, 25 nt, Artificial Sequence
  Description of Artificial Sequence: Synthetic oligonucleotide
cuauucaguggcgagaaauaaaguu

SEQ ID NO: 50598 - RNA, 25 nt, Artificial Sequence
  Description of Artificial Sequence: Synthetic oligonucleotide
aaacacagauaacaggaaaugaucc

SEQ ID NO: 50599 - RNA, 25 nt, Artificial Sequence
  Description of Artificial Sequence: Synthetic oligonucleotide
cuuaagaaaagagaagaaaugaaac

SEQ ID NO: 50600 - RNA, 25 nt, Artificial Sequence
  Description of Artificial Sequence: Synthetic oligonucleotide
cugaaggaguguguuuccauccucc

SEQ ID NO: 50601 - RNA, 25 nt, Artificial Sequence
  Description of Artificial Sequence: Synthetic oligonucleotide
ucaccgcgggacugaaaaucuuuga

SEQ ID NO: 50602 - RNA, 25 nt, Artificial Sequence
  Description of Artificial Sequence: Synthetic oligonucleotide
agcagaaauaagcgugccguucagg

SEQ ID NO: 50603 - RNA, 25 nt, Artificial Sequence
  Description of Artificial Sequence: Synthetic oligonucleotide
aagcgugccguucaggguccagaag

SEQ ID NO: 50604 - RNA, 25 nt, Artificial Sequence
  Description of Artificial Sequence: Synthetic oligonucleotide
agaaacagucacucaagacugcuug

SEQ ID NO: 50605 - RNA, 25 nt, Artificial Sequence
  Description of Artificial Sequence: Synthetic oligonucleotide
agaggaagaagguccaugucuuugg

SEQ ID NO: 50606 - RNA, 25 nt, Artificial Sequence
  Description of Artificial Sequence: Synthetic oligonucleotide
uguauucaaaauaugccugaaacac

SEQ ID NO: 50607 - RNA, 25 nt, Artificial Sequence
  Description of Artificial Sequence: Synthetic oligonucleotide
auuuuccucccuuucucuguaccuc

SEQ ID NO: 50608 - RNA, 25 nt, Artificial Sequence
  Description of Artificial Sequence: Synthetic oligonucleotide
caaagaaagauagagcaagacaaga

SEQ ID NO: 50609 - RNA, 25 nt, Artificial Sequence
  Description of Artificial Sequence: Synthetic oligonucleotide
aagaaagauagagcaagacaagaaa

SEQ ID NO: 50610 - RNA, 25 nt, Artificial Sequence
  Description of Artificial Sequence: Synthetic oligonucleotide
gaaagcauuuguuuguacaagaucc

SEQ ID NO: 50611 - RNA, 25 nt, Artificial Sequence
  Description of Artificial Sequence: Synthetic oligonucleotide
ugaguuaaacgaacguacuugcaga

SEQ ID NO: 50612 - RNA, 25 nt, Artificial Sequence
  Description of Artificial Sequence: Synthetic oligonucleotide
acugauacagaacgaucgauacaga

SEQ ID NO: 50613 - RNA, 25 nt, Artificial Sequence
  Description of Artificial Sequence: Synthetic oligonucleotide
auauuauauauauauaaaaauaaau

SEQ ID NO: 50614 - RNA, 25 nt, Artificial Sequence
  Description of Artificial Sequence: Synthetic oligonucleotide
auuauauauauauaaaaauaaauau

SEQ ID NO: 50615 - RNA, 25 nt, Artificial Sequence
  Description of Artificial Sequence: Synthetic oligonucleotide
ucacuggauguauuugacugcugug

SEQ ID NO: 50616 - RNA, 25 nt, Artificial Sequence
  Description of Artificial Sequence: Synthetic oligonucleotide
cagggaagaggaggagaugagagac

SEQ ID NO: 50617 - RNA, 25 nt, Artificial Sequence
  Description of Artificial Sequence: Synthetic oligonucleotide
augaucuuuuuuuugucccacuugg

SEQ ID NO: 50618 - RNA, 27 nt, Artificial Sequence
  Description of Artificial Sequence: Synthetic oligonucleotide
ggccgugaacuccucaucaaaauaccu

SEQ ID NO: 50619 - RNA, 27 nt, Artificial Sequence
  Description of Artificial Sequence: Synthetic oligonucleotide
uggugugauggugaucaucugggccgu

SEQ ID NO: 50620 - RNA, 27 nt, Artificial Sequence
  Description of Artificial Sequence: Synthetic oligonucleotide
aaacccgcaggauaguuuucuucccua

SEQ ID NO: 50621 - RNA, 27 nt, Artificial Sequence
  Description of Artificial Sequence: Synthetic oligonucleotide
caaacuggaugaaauaaauuaaaaccc

SEQ ID NO: 50622 - RNA, 27 nt, Artificial Sequence
  Description of Artificial Sequence: Synthetic oligonucleotide
agaaguccuuaacauuucccuacguga

SEQ ID NO: 50623 - RNA, 27 nt, Artificial Sequence
  Description of Artificial Sequence: Synthetic oligonucleotide
cucugucccacuggguaaacccuggcc

SEQ ID NO: 50624 - RNA, 27 nt, Artificial Sequence
  Description of Artificial Sequence: Synthetic oligonucleotide
cacaauaacaaauuuaaaccuugcucc

SEQ ID NO: 50625 - RNA, 27 nt, Artificial Sequence
  Description of Artificial Sequence: Synthetic oligonucleotide
aaaugcauuugaacaacauaauacaca

SEQ ID NO: 50626 - RNA, 27 nt, Artificial Sequence
  Description of Artificial Sequence: Synthetic oligonucleotide
ggcuuuccugucacaaagauuaaaaac

SEQ ID NO: 50627 - RNA, 27 nt, Artificial Sequence
  Description of Artificial Sequence: Synthetic oligonucleotide
agggcuuuccugucacaaagauuaaaa

SEQ ID NO: 50628 - RNA, 27 nt, Artificial Sequence
  Description of Artificial Sequence: Synthetic oligonucleotide
ggccaugcugggagacauaagcagcag

SEQ ID NO: 50629 - RNA, 27 nt, Artificial Sequence
  Description of Artificial Sequence: Synthetic oligonucleotide
ucagggagaagcuucugaaacacuucu

SEQ ID NO: 50630 - RNA, 27 nt, Artificial Sequence
  Description of Artificial Sequence: Synthetic oligonucleotide
aagggcuucuuccuuauugauggucag

SEQ ID NO: 50631 - RNA, 27 nt, Artificial Sequence
  Description of Artificial Sequence: Synthetic oligonucleotide
ugaagggcuucuuccuuauugaugguc

SEQ ID NO: 50632 - RNA, 27 nt, Artificial Sequence
  Description of Artificial Sequence: Synthetic oligonucleotide
cgcugaagggcuucuuccuuauugaug

SEQ ID NO: 50633 - RNA, 27 nt, Artificial Sequence
  Description of Artificial Sequence: Synthetic oligonucleotide
gccgcugaagggcuucuuccuuauuga

SEQ ID NO: 50634 - RNA, 27 nt, Artificial Sequence
  Description of Artificial Sequence: Synthetic oligonucleotide
acuggccgcugaagggcuucuuccuua

SEQ ID NO: 50635 - RNA, 27 nt, Artificial Sequence
  Description of Artificial Sequence: Synthetic oligonucleotide
cggagcuuuucaccuuuaguuaugcuu

SEQ ID NO: 50636 - RNA, 27 nt, Artificial Sequence
  Description of Artificial Sequence: Synthetic oligonucleotide
ccggagcuuuucaccuuuaguuaugcu

SEQ ID NO: 50637 - RNA, 27 nt, Artificial Sequence
  Description of Artificial Sequence: Synthetic oligonucleotide
cagacuguugacuggcgugauguaguu

SEQ ID NO: 50638 - RNA, 27 nt, Artificial Sequence
  Description of Artificial Sequence: Synthetic oligonucleotide
cuuuugaacucugcuuaaauccagugg

SEQ ID NO: 50639 - RNA, 27 nt, Artificial Sequence
  Description of Artificial Sequence: Synthetic oligonucleotide
gcuuuugaacucugcuuaaauccagug

SEQ ID NO: 50640 - RNA, 27 nt, Artificial Sequence
  Description of Artificial Sequence: Synthetic oligonucleotide
agggcuuuugaacucugcuuaaaucca

SEQ ID NO: 50641 - RNA, 27 nt, Artificial Sequence
  Description of Artificial Sequence: Synthetic oligonucleotide
aagggcuuuugaacucugcuuaaaucc

SEQ ID NO: 50642 - RNA, 27 nt, Artificial Sequence
  Description of Artificial Sequence: Synthetic oligonucleotide
ugaagggcuuuugaacucugcuuaaau

SEQ ID NO: 50643 - RNA, 27 nt, Artificial Sequence
  Description of Artificial Sequence: Synthetic oligonucleotide
cugaagggcuuuugaacucugcuuaaa

SEQ ID NO: 50644 - RNA, 27 nt, Artificial Sequence
  Description of Artificial Sequence: Synthetic oligonucleotide
cgcugaagggcuuuugaacucugcuua

SEQ ID NO: 50645 - RNA, 27 nt, Artificial Sequence
  Description of Artificial Sequence: Synthetic oligonucleotide
cgagcggcuucacucagacccugaggc

SEQ ID NO: 50646 - RNA, 27 nt, Artificial Sequence
  Description of Artificial Sequence: Synthetic oligonucleotide
uugacuggcgugauguaguugcuuggg

SEQ ID NO: 50647 - RNA, 27 nt, Artificial Sequence
  Description of Artificial Sequence: Synthetic oligonucleotide
cacgcaccaagaagcugccauugaucc

SEQ ID NO: 50648 - RNA, 27 nt, Artificial Sequence
  Description of Artificial Sequence: Synthetic oligonucleotide
cugaugaauccaaugugggcuggaauc

SEQ ID NO: 50649 - RNA, 27 nt, Artificial Sequence
  Description of Artificial Sequence: Synthetic oligonucleotide
cuuagguauuccacauucucagcugug

SEQ ID NO: 50650 - RNA, 27 nt, Artificial Sequence
  Description of Artificial Sequence: Synthetic oligonucleotide
ugagccucaaauuaggagauacguuuu

SEQ ID NO: 50651 - RNA, 27 nt, Artificial Sequence
  Description of Artificial Sequence: Synthetic oligonucleotide
ccaauuguagagaaauuauuuuaggaa

SEQ ID NO: 50652 - RNA, 27 nt, Artificial Sequence
  Description of Artificial Sequence: Synthetic oligonucleotide
ggcuccuaacuagcugaaucuuccaau

SEQ ID NO: 50653 - RNA, 27 nt, Artificial Sequence
  Description of Artificial Sequence: Synthetic oligonucleotide
guggauauugacuaggagaguuuaaaa

SEQ ID NO: 50654 - RNA, 27 nt, Artificial Sequence
  Description of Artificial Sequence: Synthetic oligonucleotide
ugugacugaacauaacuguaggcugaa

SEQ ID NO: 50655 - RNA, 27 nt, Artificial Sequence
  Description of Artificial Sequence: Synthetic oligonucleotide
guaugugugugugacugaacauaacug

SEQ ID NO: 50656 - RNA, 27 nt, Artificial Sequence
  Description of Artificial Sequence: Synthetic oligonucleotide
aagcaaaaggaacauuuuguaugugug

SEQ ID NO: 50657 - RNA, 27 nt, Artificial Sequence
  Description of Artificial Sequence: Synthetic oligonucleotide
aaaaauuacuuuaaaagcaaaaggaac

SEQ ID NO: 50658 - RNA, 27 nt, Artificial Sequence
  Description of Artificial Sequence: Synthetic oligonucleotide
ccauugacuguugcuucacaggucaga

SEQ ID NO: 50659 - RNA, 27 nt, Artificial Sequence
  Description of Artificial Sequence: Synthetic oligonucleotide
auugguuugucgaugugugagauaguu

SEQ ID NO: 50660 - RNA, 27 nt, Artificial Sequence
  Description of Artificial Sequence: Synthetic oligonucleotide
agugguagcaguacaauugaggacaag

SEQ ID NO: 50661 - RNA, 27 nt, Artificial Sequence
  Description of Artificial Sequence: Synthetic oligonucleotide
uaagaccgcuugccagcuacgguuuca

SEQ ID NO: 50662 - RNA, 27 nt, Artificial Sequence
  Description of Artificial Sequence: Synthetic oligonucleotide
agccgguaagaccgcuugccagcuacg

SEQ ID NO: 50663 - RNA, 27 nt, Artificial Sequence
  Description of Artificial Sequence: Synthetic oligonucleotide
gguaacccaucuuuuaaccauacaacu

SEQ ID NO: 50664 - RNA, 27 nt, Artificial Sequence
  Description of Artificial Sequence: Synthetic oligonucleotide
ucgcagguaacccaucuuuuaaccaua

SEQ ID NO: 50665 - RNA, 27 nt, Artificial Sequence
  Description of Artificial Sequence: Synthetic oligonucleotide
cucagcaagauuguauaauucccugca

SEQ ID NO: 50666 - RNA, 27 nt, Artificial Sequence
  Description of Artificial Sequence: Synthetic oligonucleotide
acuguuuuaugcucagcaagauuguau

SEQ ID NO: 50667 - RNA, 27 nt, Artificial Sequence
  Description of Artificial Sequence: Synthetic oligonucleotide
aggauaaaggacucuucauuauuggaa

SEQ ID NO: 50668 - RNA, 27 nt, Artificial Sequence
  Description of Artificial Sequence: Synthetic oligonucleotide
caacuugcguuggaacauccaaagugu

SEQ ID NO: 50669 - RNA, 27 nt, Artificial Sequence
  Description of Artificial Sequence: Synthetic oligonucleotide
augguuucaguuuaguggaagcauuua

SEQ ID NO: 50670 - RNA, 27 nt, Artificial Sequence
  Description of Artificial Sequence: Synthetic oligonucleotide
auauuuaacaaagucaaacuuucucac

SEQ ID NO: 50671 - RNA, 27 nt, Artificial Sequence
  Description of Artificial Sequence: Synthetic oligonucleotide
aacuuuuaauauacaguaguucuuuuc

SEQ ID NO: 50672 - RNA, 27 nt, Artificial Sequence
  Description of Artificial Sequence: Synthetic oligonucleotide
guuaagucaaaacccguauuucuaaag

SEQ ID NO: 50673 - RNA, 27 nt, Artificial Sequence
  Description of Artificial Sequence: Synthetic oligonucleotide
gugcugaguuugcuguacccauguuga

SEQ ID NO: 50674 - RNA, 27 nt, Artificial Sequence
  Description of Artificial Sequence: Synthetic oligonucleotide
ugaggucagcaucuucugugucuuuac

SEQ ID NO: 50675 - RNA, 27 nt, Artificial Sequence
  Description of Artificial Sequence: Synthetic oligonucleotide
gcgaucugaauaaaccucccuacuagc

SEQ ID NO: 50676 - RNA, 27 nt, Artificial Sequence
  Description of Artificial Sequence: Synthetic oligonucleotide
aucccagaacccugcugcagaaggcca

SEQ ID NO: 50677 - RNA, 27 nt, Artificial Sequence
  Description of Artificial Sequence: Synthetic oligonucleotide
cauaauuuccaauauguaccagaccuu

SEQ ID NO: 50678 - RNA, 27 nt, Artificial Sequence
  Description of Artificial Sequence: Synthetic oligonucleotide
cuagugcuuccaucggaaggacuaggu

SEQ ID NO: 50679 - RNA, 27 nt, Artificial Sequence
  Description of Artificial Sequence: Synthetic oligonucleotide
uccacauaaaaacaauauucacuggga

SEQ ID NO: 50680 - RNA, 27 nt, Artificial Sequence
  Description of Artificial Sequence: Synthetic oligonucleotide
ucuaccaauuccaacuugaauucauug

SEQ ID NO: 50681 - RNA, 27 nt, Artificial Sequence
  Description of Artificial Sequence: Synthetic oligonucleotide
ucuccaagucuaaaucuguguccugag

SEQ ID NO: 50682 - RNA, 27 nt, Artificial Sequence
  Description of Artificial Sequence: Synthetic oligonucleotide
uggaauacuguaacugugcuuugagga

SEQ ID NO: 50683 - RNA, 27 nt, Artificial Sequence
  Description of Artificial Sequence: Synthetic oligonucleotide
uuaauucaucagugguggcagugguag

SEQ ID NO: 50684 - RNA, 27 nt, Artificial Sequence
  Description of Artificial Sequence: Synthetic oligonucleotide
gugaugauguggcacuaguaguuucuu

SEQ ID NO: 50685 - RNA, 27 nt, Artificial Sequence
  Description of Artificial Sequence: Synthetic oligonucleotide
ucuguuuggugaggcuguccgacuuug

SEQ ID NO: 50686 - RNA, 27 nt, Artificial Sequence
  Description of Artificial Sequence: Synthetic oligonucleotide
ccaucauguuccauuuuucgcuuucuc

SEQ ID NO: 50687 - RNA, 27 nt, Artificial Sequence
  Description of Artificial Sequence: Synthetic oligonucleotide
gcagucuacaugcuaaaucagagggua

SEQ ID NO: 50688 - RNA, 27 nt, Artificial Sequence
  Description of Artificial Sequence: Synthetic oligonucleotide
cauaaauagauccuuaaauagcucaaa

SEQ ID NO: 50689 - RNA, 27 nt, Artificial Sequence
  Description of Artificial Sequence: Synthetic oligonucleotide
ugauaauagugcuuuuucaccuuuuuc

SEQ ID NO: 50690 - RNA, 27 nt, Artificial Sequence
  Description of Artificial Sequence: Synthetic oligonucleotide
gcagaacugauaauagugcuuuuucac

SEQ ID NO: 50691 - RNA, 27 nt, Artificial Sequence
  Description of Artificial Sequence: Synthetic oligonucleotide
guagguuuaaucuuucuuuucagccau

SEQ ID NO: 50692 - RNA, 27 nt, Artificial Sequence
  Description of Artificial Sequence: Synthetic oligonucleotide
agaaggauuuuauuauaaggguuuaau

SEQ ID NO: 50693 - RNA, 27 nt, Artificial Sequence
  Description of Artificial Sequence: Synthetic oligonucleotide
gucuacagcauuggcuaauaguaugaa

SEQ ID NO: 50694 - RNA, 27 nt, Artificial Sequence
  Description of Artificial Sequence: Synthetic oligonucleotide
cuauuccuaucaaaaugcuucugucua

SEQ ID NO: 50695 - RNA, 27 nt, Artificial Sequence
  Description of Artificial Sequence: Synthetic oligonucleotide
ucagggccauuaucuuauuugcucuau

SEQ ID NO: 50696 - RNA, 27 nt, Artificial Sequence
  Description of Artificial Sequence: Synthetic oligonucleotide
ugcuugaggaagagaaaaauguugguc

SEQ ID NO: 50697 - RNA, 27 nt, Artificial Sequence
  Description of Artificial Sequence: Synthetic oligonucleotide
ugggcugaacuuuucucauacuuaaag

SEQ ID NO: 50698 - RNA, 27 nt, Artificial Sequence
  Description of Artificial Sequence: Synthetic oligonucleotide
gguucagcagccaucuuuauuccugcg

SEQ ID NO: 50699 - RNA, 27 nt, Artificial Sequence
  Description of Artificial Sequence: Synthetic oligonucleotide
ugaagagaacuuggucauucaaauuuc

SEQ ID NO: 50700 - RNA, 27 nt, Artificial Sequence
  Description of Artificial Sequence: Synthetic oligonucleotide
cucuaggcuggcuaucuuuauacauac

SEQ ID NO: 50701 - RNA, 27 nt, Artificial Sequence
  Description of Artificial Sequence: Synthetic oligonucleotide
acacuucacagagauaguuacagccau

SEQ ID NO: 50702 - RNA, 27 nt, Artificial Sequence
  Description of Artificial Sequence: Synthetic oligonucleotide
uugaaauuuucucacacuucacagaga

SEQ ID NO: 50703 - RNA, 27 nt, Artificial Sequence
  Description of Artificial Sequence: Synthetic oligonucleotide
ucaggaggauucauuuccuuaaaggaa

SEQ ID NO: 50704 - RNA, 27 nt, Artificial Sequence
  Description of Artificial Sequence: Synthetic oligonucleotide
auaugaugucacuuuuuguauccuuga

SEQ ID NO: 50705 - RNA, 27 nt, Artificial Sequence
  Description of Artificial Sequence: Synthetic oligonucleotide
uaugaugaagauucaaauugcaucuua

SEQ ID NO: 50706 - RNA, 27 nt, Artificial Sequence
  Description of Artificial Sequence: Synthetic oligonucleotide
uuaauagcuagucuucguuuugaacag

SEQ ID NO: 50707 - RNA, 27 nt, Artificial Sequence
  Description of Artificial Sequence: Synthetic oligonucleotide
auuuuuaguagagaugagguuucacca

SEQ ID NO: 50708 - RNA, 27 nt, Artificial Sequence
  Description of Artificial Sequence: Synthetic oligonucleotide
aggcgagauagagcuucucuuucguuc

SEQ ID NO: 50709 - RNA, 27 nt, Artificial Sequence
  Description of Artificial Sequence: Synthetic oligonucleotide
aacuggaccgaaggcgcuuguggagaa

SEQ ID NO: 50710 - RNA, 27 nt, Artificial Sequence
  Description of Artificial Sequence: Synthetic oligonucleotide
gcggcuacaucuuuggaaucuucuccu

SEQ ID NO: 50711 - RNA, 27 nt, Artificial Sequence
  Description of Artificial Sequence: Synthetic oligonucleotide
caagucuccucauugaauccagauugg

SEQ ID NO: 50712 - RNA, 27 nt, Artificial Sequence
  Description of Artificial Sequence: Synthetic oligonucleotide
uccucacuacucucaaaucuguucugg

SEQ ID NO: 50713 - RNA, 27 nt, Artificial Sequence
  Description of Artificial Sequence: Synthetic oligonucleotide
uuuguacucaucugcacagcucuggcu

SEQ ID NO: 50714 - RNA, 27 nt, Artificial Sequence
  Description of Artificial Sequence: Synthetic oligonucleotide
gcccauuaacaacaacaaucugaggug

SEQ ID NO: 50715 - RNA, 27 nt, Artificial Sequence
  Description of Artificial Sequence: Synthetic oligonucleotide
aauaaauuaaaaauaauuaaaauagug

SEQ ID NO: 50716 - RNA, 27 nt, Artificial Sequence
  Description of Artificial Sequence: Synthetic oligonucleotide
cauauuuaaauauuaauaaauuaaaaa

SEQ ID NO: 50717 - RNA, 27 nt, Artificial Sequence
  Description of Artificial Sequence: Synthetic oligonucleotide
gaaacaaaggauauucaaacugcauag

SEQ ID NO: 50718 - RNA, 27 nt, Artificial Sequence
  Description of Artificial Sequence: Synthetic oligonucleotide
caaacacuuagacgccagcagcauggg

SEQ ID NO: 50719 - RNA, 27 nt, Artificial Sequence
  Description of Artificial Sequence: Synthetic oligonucleotide
uuugucacaggugaaaugcacaucuga

SEQ ID NO: 50720 - RNA, 27 nt, Artificial Sequence
  Description of Artificial Sequence: Synthetic oligonucleotide
uaauucagccuggcacagguuuugauc

SEQ ID NO: 50721 - RNA, 27 nt, Artificial Sequence
  Description of Artificial Sequence: Synthetic oligonucleotide
auuguaagaaugacuacccacauucac

SEQ ID NO: 50722 - RNA, 27 nt, Artificial Sequence
  Description of Artificial Sequence: Synthetic oligonucleotide
caauuguaagaaugacuacccacauuc

SEQ ID NO: 50723 - RNA, 27 nt, Artificial Sequence
  Description of Artificial Sequence: Synthetic oligonucleotide
guacacucucugaugcucauuuucaua

SEQ ID NO: 50724 - RNA, 27 nt, Artificial Sequence
  Description of Artificial Sequence: Synthetic oligonucleotide
cugcugaguucuacaugaaaagcaaau

SEQ ID NO: 50725 - RNA, 27 nt, Artificial Sequence
  Description of Artificial Sequence: Synthetic oligonucleotide
uacugaaaauaaauauagaaauacaac

SEQ ID NO: 50726 - RNA, 27 nt, Artificial Sequence
  Description of Artificial Sequence: Synthetic oligonucleotide
uuccauuuaagaaacauuaaucaaaac

SEQ ID NO: 50727 - RNA, 27 nt, Artificial Sequence
  Description of Artificial Sequence: Synthetic oligonucleotide
acaauuuuaggcacuauacacguuguu

SEQ ID NO: 50728 - RNA, 27 nt, Artificial Sequence
  Description of Artificial Sequence: Synthetic oligonucleotide
ccagauguuaguagccaaggauauggu

SEQ ID NO: 50729 - RNA, 27 nt, Artificial Sequence
  Description of Artificial Sequence: Synthetic oligonucleotide
agcucacagucuccagauguuaguagc

SEQ ID NO: 50730 - RNA, 27 nt, Artificial Sequence
  Description of Artificial Sequence: Synthetic oligonucleotide
auuaauaaaaagcacacaacuuauggc

SEQ ID NO: 50731 - RNA, 27 nt, Artificial Sequence
  Description of Artificial Sequence: Synthetic oligonucleotide
aauguaagaagagccaaaaugaugcau

SEQ ID NO: 50732 - RNA, 27 nt, Artificial Sequence
  Description of Artificial Sequence: Synthetic oligonucleotide
acauuuuuacaaauguaagaagagcca

SEQ ID NO: 50733 - RNA, 27 nt, Artificial Sequence
  Description of Artificial Sequence: Synthetic oligonucleotide
aauaugaauuaagaugaccuaaucugu

SEQ ID NO: 50734 - RNA, 27 nt, Artificial Sequence
  Description of Artificial Sequence: Synthetic oligonucleotide
ucaugauuaguucuuucaauuccaucc

SEQ ID NO: 50735 - RNA, 27 nt, Artificial Sequence
  Description of Artificial Sequence: Synthetic oligonucleotide
cccaagagcagaaggaaugagugugca

SEQ ID NO: 50736 - RNA, 27 nt, Artificial Sequence
  Description of Artificial Sequence: Synthetic oligonucleotide
cucaaagcuacugguuaccucuacacc

SEQ ID NO: 50737 - RNA, 27 nt, Artificial Sequence
  Description of Artificial Sequence: Synthetic oligonucleotide
ugaaauauuacguggcaugugguuggg

SEQ ID NO: 50738 - RNA, 27 nt, Artificial Sequence
  Description of Artificial Sequence: Synthetic oligonucleotide
agugaagagaauaacuuguuuccgaag

SEQ ID NO: 50739 - RNA, 27 nt, Artificial Sequence
  Description of Artificial Sequence: Synthetic oligonucleotide
uuucuuagcauuaguuauugggaguga

SEQ ID NO: 50740 - RNA, 27 nt, Artificial Sequence
  Description of Artificial Sequence: Synthetic oligonucleotide
uugauuuucagcauuucuuagcauuag

SEQ ID NO: 50741 - RNA, 27 nt, Artificial Sequence
  Description of Artificial Sequence: Synthetic oligonucleotide
aaaguaaucauauuuagagaaagacag

SEQ ID NO: 50742 - RNA, 27 nt, Artificial Sequence
  Description of Artificial Sequence: Synthetic oligonucleotide
uguagaacaaaaugccugaaauucagc

SEQ ID NO: 50743 - RNA, 27 nt, Artificial Sequence
  Description of Artificial Sequence: Synthetic oligonucleotide
gagagucccgggugagagggaaucgcc

SEQ ID NO: 50744 - RNA, 27 nt, Artificial Sequence
  Description of Artificial Sequence: Synthetic oligonucleotide
cuuuacuuuaaagguucacuuuccuug

SEQ ID NO: 50745 - RNA, 27 nt, Artificial Sequence
  Description of Artificial Sequence: Synthetic oligonucleotide
ccaggcuuccagagcaugcagccuccu

SEQ ID NO: 50746 - RNA, 27 nt, Artificial Sequence
  Description of Artificial Sequence: Synthetic oligonucleotide
cucucuuuuguuuucuguucagagaaa

SEQ ID NO: 50747 - RNA, 27 nt, Artificial Sequence
  Description of Artificial Sequence: Synthetic oligonucleotide
cggcauaacugauuacagccaaguuca

SEQ ID NO: 50748 - RNA, 27 nt, Artificial Sequence
  Description of Artificial Sequence: Synthetic oligonucleotide
uggacuucuuuuaauuuuggcuucuuc

SEQ ID NO: 50749 - RNA, 27 nt, Artificial Sequence
  Description of Artificial Sequence: Synthetic oligonucleotide
uaaccucaccuggacuucuuuuaauuu

SEQ ID NO: 50750 - RNA, 27 nt, Artificial Sequence
  Description of Artificial Sequence: Synthetic oligonucleotide
guccucuucccgauaauccggauucag

SEQ ID NO: 50751 - RNA, 27 nt, Artificial Sequence
  Description of Artificial Sequence: Synthetic oligonucleotide
acaauacuugcuuugaugucacauuaa

SEQ ID NO: 50752 - RNA, 27 nt, Artificial Sequence
  Description of Artificial Sequence: Synthetic oligonucleotide
gagugcuacaauacuugcuuugauguc

SEQ ID NO: 50753 - RNA, 27 nt, Artificial Sequence
  Description of Artificial Sequence: Synthetic oligonucleotide
auuugugguuuuguuuucucucucucu

SEQ ID NO: 50754 - RNA, 27 nt, Artificial Sequence
  Description of Artificial Sequence: Synthetic oligonucleotide
uguaugggcuuaaauacuacagcgagg

SEQ ID NO: 50755 - RNA, 27 nt, Artificial Sequence
  Description of Artificial Sequence: Synthetic oligonucleotide
cuguaugggcuuaaauacuacagcgag

SEQ ID NO: 50756 - RNA, 27 nt, Artificial Sequence
  Description of Artificial Sequence: Synthetic oligonucleotide
ggaagguuucuguaugggcuuaaauac

SEQ ID NO: 50757 - RNA, 27 nt, Artificial Sequence
  Description of Artificial Sequence: Synthetic oligonucleotide
guagguauaccauguuuauuuuaauac

SEQ ID NO: 50758 - RNA, 27 nt, Artificial Sequence
  Description of Artificial Sequence: Synthetic oligonucleotide
uccgaaaacuggccgaucagaacagcc

SEQ ID NO: 50759 - RNA, 27 nt, Artificial Sequence
  Description of Artificial Sequence: Synthetic oligonucleotide
cccuguuccaaaguucaaauuauuugu

SEQ ID NO: 50760 - RNA, 27 nt, Artificial Sequence
  Description of Artificial Sequence: Synthetic oligonucleotide
acuggaaaguuaaauuaaggucgcaau

SEQ ID NO: 50761 - RNA, 27 nt, Artificial Sequence
  Description of Artificial Sequence: Synthetic oligonucleotide
caaaaccaaacuuuagcuuucucagcc

SEQ ID NO: 50762 - RNA, 27 nt, Artificial Sequence
  Description of Artificial Sequence: Synthetic oligonucleotide
uacagugggaaguagcaucuuuacuuu

SEQ ID NO: 50763 - RNA, 27 nt, Artificial Sequence
  Description of Artificial Sequence: Synthetic oligonucleotide
ucauaugguaucagcaauuaagcagua

SEQ ID NO: 50764 - RNA, 27 nt, Artificial Sequence
  Description of Artificial Sequence: Synthetic oligonucleotide
cagcccauguuucauucauaugguauc

SEQ ID NO: 50765 - RNA, 27 nt, Artificial Sequence
  Description of Artificial Sequence: Synthetic oligonucleotide
uaugaaaaaguuggauaagaaaguugg

SEQ ID NO: 50766 - RNA, 27 nt, Artificial Sequence
  Description of Artificial Sequence: Synthetic oligonucleotide
uccggccucaugaugucaugcaaggcu

SEQ ID NO: 50767 - RNA, 27 nt, Artificial Sequence
  Description of Artificial Sequence: Synthetic oligonucleotide
acaaaugcagucauauacaaauucagg

SEQ ID NO: 50768 - RNA, 27 nt, Artificial Sequence
  Description of Artificial Sequence: Synthetic oligonucleotide
gguaguaaacauucuacuaggauucuu

SEQ ID NO: 50769 - RNA, 27 nt, Artificial Sequence
  Description of Artificial Sequence: Synthetic oligonucleotide
uuucaucaaaaaauucuucccuuucug

SEQ ID NO: 50770 - RNA, 27 nt, Artificial Sequence
  Description of Artificial Sequence: Synthetic oligonucleotide
aaauucacacacuggcaugccgauagc

SEQ ID NO: 50771 - RNA, 27 nt, Artificial Sequence
  Description of Artificial Sequence: Synthetic oligonucleotide
acauacauugcucuacuaugaggugaa

SEQ ID NO: 50772 - RNA, 27 nt, Artificial Sequence
  Description of Artificial Sequence: Synthetic oligonucleotide
uauauaugugcuuuggcaauucuggug

SEQ ID NO: 50773 - RNA, 27 nt, Artificial Sequence
  Description of Artificial Sequence: Synthetic oligonucleotide
ggagaaacuauuacccagaucaccacu

SEQ ID NO: 50774 - RNA, 27 nt, Artificial Sequence
  Description of Artificial Sequence: Synthetic oligonucleotide
auuuggagaaacuauuacccagaucac

SEQ ID NO: 50775 - RNA, 27 nt, Artificial Sequence
  Description of Artificial Sequence: Synthetic oligonucleotide
uuucuaggaaguauucaucacauccac

SEQ ID NO: 50776 - RNA, 27 nt, Artificial Sequence
  Description of Artificial Sequence: Synthetic oligonucleotide
cauauaugguguagcuguggaaaugcg

SEQ ID NO: 50777 - RNA, 27 nt, Artificial Sequence
  Description of Artificial Sequence: Synthetic oligonucleotide
cuccauucauauaugguguagcugugg

SEQ ID NO: 50778 - RNA, 27 nt, Artificial Sequence
  Description of Artificial Sequence: Synthetic oligonucleotide
aucuucuucucguguaagaacugcagc

SEQ ID NO: 50779 - RNA, 27 nt, Artificial Sequence
  Description of Artificial Sequence: Synthetic oligonucleotide
ucccuguaaaugaucuucuucucgugu

SEQ ID NO: 50780 - RNA, 27 nt, Artificial Sequence
  Description of Artificial Sequence: Synthetic oligonucleotide
gucccuguaaaugaucuucuucucgug

SEQ ID NO: 50781 - RNA, 27 nt, Artificial Sequence
  Description of Artificial Sequence: Synthetic oligonucleotide
ucaggucccuguaaaugaucuucuucu

SEQ ID NO: 50782 - RNA, 27 nt, Artificial Sequence
  Description of Artificial Sequence: Synthetic oligonucleotide
gaugcagucaaacaccucuuccucugu

SEQ ID NO: 50783 - RNA, 27 nt, Artificial Sequence
  Description of Artificial Sequence: Synthetic oligonucleotide
cgaugcagucaaacaccucuuccucug

SEQ ID NO: 50784 - RNA, 27 nt, Artificial Sequence
  Description of Artificial Sequence: Synthetic oligonucleotide
cccugugaacucgcccucaaaguagcg

SEQ ID NO: 50785 - RNA, 27 nt, Artificial Sequence
  Description of Artificial Sequence: Synthetic oligonucleotide
ggacagaggugccaggagaugcccuca

SEQ ID NO: 50786 - RNA, 27 nt, Artificial Sequence
  Description of Artificial Sequence: Synthetic oligonucleotide
uuaaaaagacaaaccauaucacuccuu

SEQ ID NO: 50787 - RNA, 27 nt, Artificial Sequence
  Description of Artificial Sequence: Synthetic oligonucleotide
cuuaaaaagacaaaccauaucacuccu

SEQ ID NO: 50788 - RNA, 27 nt, Artificial Sequence
  Description of Artificial Sequence: Synthetic oligonucleotide
gacaaccuuuaggaucuuuacugcaac

SEQ ID NO: 50789 - RNA, 27 nt, Artificial Sequence
  Description of Artificial Sequence: Synthetic oligonucleotide
gucgacaaccuuuaggaucuuuacugc

SEQ ID NO: 50790 - RNA, 27 nt, Artificial Sequence
  Description of Artificial Sequence: Synthetic oligonucleotide
acaauugccagguuguccuuugucaug

SEQ ID NO: 50791 - RNA, 27 nt, Artificial Sequence
  Description of Artificial Sequence: Synthetic oligonucleotide
ccucgcaccacugggucacaauugcca

SEQ ID NO: 50792 - RNA, 27 nt, Artificial Sequence
  Description of Artificial Sequence: Synthetic oligonucleotide
auuucaugucucuauggaugauguucu

SEQ ID NO: 50793 - RNA, 27 nt, Artificial Sequence
  Description of Artificial Sequence: Synthetic oligonucleotide
uggagaaauauauuguuggauuucaug

SEQ ID NO: 50794 - RNA, 27 nt, Artificial Sequence
  Description of Artificial Sequence: Synthetic oligonucleotide
agccuucauggagaaauauauuguugg

SEQ ID NO: 50795 - RNA, 27 nt, Artificial Sequence
  Description of Artificial Sequence: Synthetic oligonucleotide
accacuccagcgugacuuuacuguugc

SEQ ID NO: 50796 - RNA, 27 nt, Artificial Sequence
  Description of Artificial Sequence: Synthetic oligonucleotide
ccucucuuccuuuacuuucuucacaca

SEQ ID NO: 50797 - RNA, 27 nt, Artificial Sequence
  Description of Artificial Sequence: Synthetic oligonucleotide
gcccgaugcaaggauggcucggaagcg

SEQ ID NO: 50798 - RNA, 27 nt, Artificial Sequence
  Description of Artificial Sequence: Synthetic oligonucleotide
cacaguaggauauucaaccuccauuuc

SEQ ID NO: 50799 - RNA, 27 nt, Artificial Sequence
  Description of Artificial Sequence: Synthetic oligonucleotide
uuacacaguaggauauucaaccuccau

SEQ ID NO: 50800 - RNA, 27 nt, Artificial Sequence
  Description of Artificial Sequence: Synthetic oligonucleotide
uacacuacaagggaaaacucaaaaucu

SEQ ID NO: 50801 - RNA, 27 nt, Artificial Sequence
  Description of Artificial Sequence: Synthetic oligonucleotide
caaucaacaaagaacaaacaggauaaa

SEQ ID NO: 50802 - RNA, 27 nt, Artificial Sequence
  Description of Artificial Sequence: Synthetic oligonucleotide
uuucaaucaacaaagaacaaacaggau

SEQ ID NO: 50803 - RNA, 27 nt, Artificial Sequence
  Description of Artificial Sequence: Synthetic oligonucleotide
auggaagaaaaagaaggcuguagagaa

SEQ ID NO: 50804 - RNA, 27 nt, Artificial Sequence
  Description of Artificial Sequence: Synthetic oligonucleotide
uagaaggaagauuagcuauggaagaaa

SEQ ID NO: 50805 - RNA, 27 nt, Artificial Sequence
  Description of Artificial Sequence: Synthetic oligonucleotide
augaagcauucaacaggaagauuauuu

SEQ ID NO: 50806 - RNA, 27 nt, Artificial Sequence
  Description of Artificial Sequence: Synthetic oligonucleotide
caugaagcauucaacaggaagauuauu

SEQ ID NO: 50807 - RNA, 27 nt, Artificial Sequence
  Description of Artificial Sequence: Synthetic oligonucleotide
ucaaaguagaauucaagucaugaagca

SEQ ID NO: 50808 - RNA, 27 nt, Artificial Sequence
  Description of Artificial Sequence: Synthetic oligonucleotide
gucuguaguugcuucucucccucuuag

SEQ ID NO: 50809 - RNA, 27 nt, Artificial Sequence
  Description of Artificial Sequence: Synthetic oligonucleotide
guugaccuuggucugguaggagacggc

SEQ ID NO: 50810 - RNA, 27 nt, Artificial Sequence
  Description of Artificial Sequence: Synthetic oligonucleotide
gucgagauagucgggccgauugaucuc

SEQ ID NO: 50811 - RNA, 27 nt, Artificial Sequence
  Description of Artificial Sequence: Synthetic oligonucleotide
guuugggaagguuggauguucguccuc

SEQ ID NO: 50812 - RNA, 27 nt, Artificial Sequence
  Description of Artificial Sequence: Synthetic oligonucleotide
aguucuaagcuuggguuccgacccuaa

SEQ ID NO: 50813 - RNA, 27 nt, Artificial Sequence
  Description of Artificial Sequence: Synthetic oligonucleotide
uuaaaguucuaagcuuggguuccgacc

SEQ ID NO: 50814 - RNA, 27 nt, Artificial Sequence
  Description of Artificial Sequence: Synthetic oligonucleotide
guugcuuaaaguucuaagcuuggguuc

SEQ ID NO: 50815 - RNA, 27 nt, Artificial Sequence
  Description of Artificial Sequence: Synthetic oligonucleotide
gugguggucuuguugcuuaaaguucua

SEQ ID NO: 50816 - RNA, 27 nt, Artificial Sequence
  Description of Artificial Sequence: Synthetic oligonucleotide
acuuuauuucucgccacugaauaguag

SEQ ID NO: 50817 - RNA, 27 nt, Artificial Sequence
  Description of Artificial Sequence: Synthetic oligonucleotide
aacuuuauuucucgccacugaauagua

SEQ ID NO: 50818 - RNA, 27 nt, Artificial Sequence
  Description of Artificial Sequence: Synthetic oligonucleotide
ggaucauuuccuguuaucuguguuugu

SEQ ID NO: 50819 - RNA, 27 nt, Artificial Sequence
  Description of Artificial Sequence: Synthetic oligonucleotide
guuucauuucuucucuuuucuuaaggc

SEQ ID NO: 50820 - RNA, 27 nt, Artificial Sequence
  Description of Artificial Sequence: Synthetic oligonucleotide
ggaggauggaaacacacuccuucaguu

SEQ ID NO: 50821 - RNA, 27 nt, Artificial Sequence
  Description of Artificial Sequence: Synthetic oligonucleotide
ucaaagauuuucagucccgcggugaca

SEQ ID NO: 50822 - RNA, 27 nt, Artificial Sequence
  Description of Artificial Sequence: Synthetic oligonucleotide
ccugaacggcacgcuuauuucugcugu

SEQ ID NO: 50823 - RNA, 27 nt, Artificial Sequence
  Description of Artificial Sequence: Synthetic oligonucleotide
cuucuggacccugaacggcacgcuuau

SEQ ID NO: 50824 - RNA, 27 nt, Artificial Sequence
  Description of Artificial Sequence: Synthetic oligonucleotide
caagcagucuugagugacuguuucuuc

SEQ ID NO: 50825 - RNA, 27 nt, Artificial Sequence
  Description of Artificial Sequence: Synthetic oligonucleotide
ccaaagacauggaccuucuuccucuga

SEQ ID NO: 50826 - RNA, 27 nt, Artificial Sequence
  Description of Artificial Sequence: Synthetic oligonucleotide
guguuucaggcauauuuugaauacauc

SEQ ID NO: 50827 - RNA, 27 nt, Artificial Sequence
  Description of Artificial Sequence: Synthetic oligonucleotide
gagguacagagaaagggaggaaaauag

SEQ ID NO: 50828 - RNA, 27 nt, Artificial Sequence
  Description of Artificial Sequence: Synthetic oligonucleotide
ucuugucuugcucuaucuuucuuuggu

SEQ ID NO: 50829 - RNA, 27 nt, Artificial Sequence
  Description of Artificial Sequence: Synthetic oligonucleotide
uuucuugucuugcucuaucuuucuuug

SEQ ID NO: 50830 - RNA, 27 nt, Artificial Sequence
  Description of Artificial Sequence: Synthetic oligonucleotide
ggaucuuguacaaacaaaugcuuucuc

SEQ ID NO: 50831 - RNA, 27 nt, Artificial Sequence
  Description of Artificial Sequence: Synthetic oligonucleotide
ucugcaaguacguucguuuaacucaag

SEQ ID NO: 50832 - RNA, 27 nt, Artificial Sequence
  Description of Artificial Sequence: Synthetic oligonucleotide
ucuguaucgaucguucuguaucagucu

SEQ ID NO: 50833 - RNA, 27 nt, Artificial Sequence
  Description of Artificial Sequence: Synthetic oligonucleotide
auuuauuuuuauauauauauaauauau

SEQ ID NO: 50834 - RNA, 27 nt, Artificial Sequence
  Description of Artificial Sequence: Synthetic oligonucleotide
auauuuauuuuuauauauauauaauau

SEQ ID NO: 50835 - RNA, 27 nt, Artificial Sequence
  Description of Artificial Sequence: Synthetic oligonucleotide
cacagcagucaaauacauccagugaag

SEQ ID NO: 50836 - RNA, 27 nt, Artificial Sequence
  Description of Artificial Sequence: Synthetic oligonucleotide
gucucucaucuccuccucuucccuguc

SEQ ID NO: 50837 - RNA, 27 nt, Artificial Sequence
  Description of Artificial Sequence: Synthetic oligonucleotide
ccaagugggacaaaaaaaagaucaugc

SEQ ID NO: 50838 - RNA, 14 nt, Artificial Sequence
  Description of Artificial Sequence: Synthetic oligonucleotide
guauuuugaugagg

SEQ ID NO: 50839 - RNA, 12 nt, Artificial Sequence
  Description of Artificial Sequence: Synthetic oligonucleotide
ggcccagaugau

SEQ ID NO: 50840 - RNA, 14 nt, Artificial Sequence
  Description of Artificial Sequence: Synthetic oligonucleotide
gggaagaaaacuau

SEQ ID NO: 50841 - RNA, 15 nt, Artificial Sequence
  Description of Artificial Sequence: Synthetic oligonucleotide
guuuuaauuuauuuc

SEQ ID NO: 50842 - RNA, 12 nt, Artificial Sequence
  Description of Artificial Sequence: Synthetic oligonucleotide
acguagggaaau

SEQ ID NO: 50843 - RNA, 12 nt, Artificial Sequence
  Description of Artificial Sequence: Synthetic oligonucleotide
ccaggguuuacc

SEQ ID NO: 50844 - RNA, 11 nt, Artificial Sequence
  Description of Artificial Sequence: Synthetic oligonucleotide
agcaagguuua

SEQ ID NO: 50845 - RNA, 12 nt, Artificial Sequence
  Description of Artificial Sequence: Synthetic oligonucleotide
uguauuauguug

SEQ ID NO: 50846 - RNA, 15 nt, Artificial Sequence
  Description of Artificial Sequence: Synthetic oligonucleotide
uuuuaaucuuuguga

SEQ ID NO: 50847 - RNA, 14 nt, Artificial Sequence
  Description of Artificial Sequence: Synthetic oligonucleotide
uuaaucuuugugac

SEQ ID NO: 50848 - RNA, 13 nt, Artificial Sequence
  Description of Artificial Sequence: Synthetic oligonucleotide
gcugcuuaugucu

SEQ ID NO: 50849 - RNA, 14 nt, Artificial Sequence
  Description of Artificial Sequence: Synthetic oligonucleotide
aaguguuucagaag

SEQ ID NO: 50850 - RNA, 13 nt, Artificial Sequence
  Description of Artificial Sequence: Synthetic oligonucleotide
gaccaucaauaag

SEQ ID NO: 50851 - RNA, 13 nt, Artificial Sequence
  Description of Artificial Sequence: Synthetic oligonucleotide
ccaucaauaagga

SEQ ID NO: 50852 - RNA, 14 nt, Artificial Sequence
  Description of Artificial Sequence: Synthetic oligonucleotide
ucaauaaggaagaa

SEQ ID NO: 50853 - RNA, 14 nt, Artificial Sequence
  Description of Artificial Sequence: Synthetic oligonucleotide
aauaaggaagaagc

SEQ ID NO: 50854 - RNA, 13 nt, Artificial Sequence
  Description of Artificial Sequence: Synthetic oligonucleotide
aggaagaagcccu

SEQ ID NO: 50855 - RNA, 13 nt, Artificial Sequence
  Description of Artificial Sequence: Synthetic oligonucleotide
gcauaacuaaagg

SEQ ID NO: 50856 - RNA, 14 nt, Artificial Sequence
  Description of Artificial Sequence: Synthetic oligonucleotide
cauaacuaaaggug

SEQ ID NO: 50857 - RNA, 12 nt, Artificial Sequence
  Description of Artificial Sequence: Synthetic oligonucleotide
cuacaucacgcc

SEQ ID NO: 50858 - RNA, 12 nt, Artificial Sequence
  Description of Artificial Sequence: Synthetic oligonucleotide
acuggauuuaag

SEQ ID NO: 50859 - RNA, 12 nt, Artificial Sequence
  Description of Artificial Sequence: Synthetic oligonucleotide
cuggauuuaagc

SEQ ID NO: 50860 - RNA, 13 nt, Artificial Sequence
  Description of Artificial Sequence: Synthetic oligonucleotide
gauuuaagcagag

SEQ ID NO: 50861 - RNA, 13 nt, Artificial Sequence
  Description of Artificial Sequence: Synthetic oligonucleotide
auuuaagcagagu

SEQ ID NO: 50862 - RNA, 13 nt, Artificial Sequence
  Description of Artificial Sequence: Synthetic oligonucleotide
uuaagcagaguuc

SEQ ID NO: 50863 - RNA, 13 nt, Artificial Sequence
  Description of Artificial Sequence: Synthetic oligonucleotide
uaagcagaguuca

SEQ ID NO: 50864 - RNA, 14 nt, Artificial Sequence
  Description of Artificial Sequence: Synthetic oligonucleotide
agcagaguucaaaa

SEQ ID NO: 50865 - RNA, 12 nt, Artificial Sequence
  Description of Artificial Sequence: Synthetic oligonucleotide
cucagggucuga

SEQ ID NO: 50866 - RNA, 13 nt, Artificial Sequence
  Description of Artificial Sequence: Synthetic oligonucleotide
caagcaacuacau

SEQ ID NO: 50867 - RNA, 12 nt, Artificial Sequence
  Description of Artificial Sequence: Synthetic oligonucleotide
aucaauggcagc

SEQ ID NO: 50868 - RNA, 11 nt, Artificial Sequence
  Description of Artificial Sequence: Synthetic oligonucleotide
uuccagcccac

SEQ ID NO: 50869 - RNA, 12 nt, Artificial Sequence
  Description of Artificial Sequence: Synthetic oligonucleotide
cagcugagaaug

SEQ ID NO: 50870 - RNA, 13 nt, Artificial Sequence
  Description of Artificial Sequence: Synthetic oligonucleotide
aacguaucuccua

SEQ ID NO: 50871 - RNA, 14 nt, Artificial Sequence
  Description of Artificial Sequence: Synthetic oligonucleotide
ccuaaaauaauuuc

SEQ ID NO: 50872 - RNA, 13 nt, Artificial Sequence
  Description of Artificial Sequence: Synthetic oligonucleotide
uggaagauucagc

SEQ ID NO: 50873 - RNA, 12 nt, Artificial Sequence
  Description of Artificial Sequence: Synthetic oligonucleotide
uuaaacucuccu

SEQ ID NO: 50874 - RNA, 12 nt, Artificial Sequence
  Description of Artificial Sequence: Synthetic oligonucleotide
cagccuacaguu

SEQ ID NO: 50875 - RNA, 13 nt, Artificial Sequence
  Description of Artificial Sequence: Synthetic oligonucleotide
guuauguucaguc

SEQ ID NO: 50876 - RNA, 13 nt, Artificial Sequence
  Description of Artificial Sequence: Synthetic oligonucleotide
cacauacaaaaug

SEQ ID NO: 50877 - RNA, 9 nt, Artificial Sequence
  Description of Artificial Sequence: Synthetic oligonucleotide
uccuuuugc

SEQ ID NO: 50878 - RNA, 12 nt, Artificial Sequence
  Description of Artificial Sequence: Synthetic oligonucleotide
ugaccugugaag

SEQ ID NO: 50879 - RNA, 12 nt, Artificial Sequence
  Description of Artificial Sequence: Synthetic oligonucleotide
cuaucucacaca

SEQ ID NO: 50880 - RNA, 13 nt, Artificial Sequence
  Description of Artificial Sequence: Synthetic oligonucleotide
uguccucaauugu

SEQ ID NO: 50881 - RNA, 12 nt, Artificial Sequence
  Description of Artificial Sequence: Synthetic oligonucleotide
aaaccguagcug

SEQ ID NO: 50882 - RNA, 12 nt, Artificial Sequence
  Description of Artificial Sequence: Synthetic oligonucleotide
uagcuggcaagc

SEQ ID NO: 50883 - RNA, 14 nt, Artificial Sequence
  Description of Artificial Sequence: Synthetic oligonucleotide
uuguaugguuaaaa

SEQ ID NO: 50884 - RNA, 14 nt, Artificial Sequence
  Description of Artificial Sequence: Synthetic oligonucleotide
ugguuaaaagaugg

SEQ ID NO: 50885 - RNA, 13 nt, Artificial Sequence
  Description of Artificial Sequence: Synthetic oligonucleotide
cagggaauuauac

SEQ ID NO: 50886 - RNA, 12 nt, Artificial Sequence
  Description of Artificial Sequence: Synthetic oligonucleotide
acaaucuugcug

SEQ ID NO: 50887 - RNA, 13 nt, Artificial Sequence
  Description of Artificial Sequence: Synthetic oligonucleotide
ccaauaaugaaga

SEQ ID NO: 50888 - RNA, 13 nt, Artificial Sequence
  Description of Artificial Sequence: Synthetic oligonucleotide
acuuuggauguuc

SEQ ID NO: 50889 - RNA, 12 nt, Artificial Sequence
  Description of Artificial Sequence: Synthetic oligonucleotide
aaugcuuccacu

SEQ ID NO: 50890 - RNA, 11 nt, Artificial Sequence
  Description of Artificial Sequence: Synthetic oligonucleotide
gagaaaguuug

SEQ ID NO: 50891 - RNA, 11 nt, Artificial Sequence
  Description of Artificial Sequence: Synthetic oligonucleotide
aaagaacuacu

SEQ ID NO: 50892 - RNA, 12 nt, Artificial Sequence
  Description of Artificial Sequence: Synthetic oligonucleotide
uuagaaauacgg

SEQ ID NO: 50893 - RNA, 12 nt, Artificial Sequence
  Description of Artificial Sequence: Synthetic oligonucleotide
aacauggguaca

SEQ ID NO: 50894 - RNA, 14 nt, Artificial Sequence
  Description of Artificial Sequence: Synthetic oligonucleotide
aaagacacagaaga

SEQ ID NO: 50895 - RNA, 11 nt, Artificial Sequence
  Description of Artificial Sequence: Synthetic oligonucleotide
uaguagggagg

SEQ ID NO: 50896 - RNA, 12 nt, Artificial Sequence
  Description of Artificial Sequence: Synthetic oligonucleotide
gccuucugcagc

SEQ ID NO: 50897 - RNA, 10 nt, Artificial Sequence
  Description of Artificial Sequence: Synthetic oligonucleotide
ggucugguac

SEQ ID NO: 50898 - RNA, 12 nt, Artificial Sequence
  Description of Artificial Sequence: Synthetic oligonucleotide
cuaguccuuccg

SEQ ID NO: 50899 - RNA, 12 nt, Artificial Sequence
  Description of Artificial Sequence: Synthetic oligonucleotide
ccagugaauauu

SEQ ID NO: 50900 - RNA, 13 nt, Artificial Sequence
  Description of Artificial Sequence: Synthetic oligonucleotide
augaauucaaguu

SEQ ID NO: 50901 - RNA, 12 nt, Artificial Sequence
  Description of Artificial Sequence: Synthetic oligonucleotide
caggacacagau

SEQ ID NO: 50902 - RNA, 12 nt, Artificial Sequence
  Description of Artificial Sequence: Synthetic oligonucleotide
cucaaagcacag

SEQ ID NO: 50903 - RNA, 10 nt, Artificial Sequence
  Description of Artificial Sequence: Synthetic oligonucleotide
accacugcca

SEQ ID NO: 50904 - RNA, 13 nt, Artificial Sequence
  Description of Artificial Sequence: Synthetic oligonucleotide
gaaacuacuagug

SEQ ID NO: 50905 - RNA, 12 nt, Artificial Sequence
  Description of Artificial Sequence: Synthetic oligonucleotide
aagucggacagc

SEQ ID NO: 50906 - RNA, 13 nt, Artificial Sequence
  Description of Artificial Sequence: Synthetic oligonucleotide
gaaagcgaaaaau

SEQ ID NO: 50907 - RNA, 13 nt, Artificial Sequence
  Description of Artificial Sequence: Synthetic oligonucleotide
cccucugauuuag

SEQ ID NO: 50908 - RNA, 12 nt, Artificial Sequence
  Description of Artificial Sequence: Synthetic oligonucleotide
ugagcuauuuaa

SEQ ID NO: 50909 - RNA, 13 nt, Artificial Sequence
  Description of Artificial Sequence: Synthetic oligonucleotide
aaaaggugaaaaa

SEQ ID NO: 50910 - RNA, 14 nt, Artificial Sequence
  Description of Artificial Sequence: Synthetic oligonucleotide
gaaaaagcacuauu

SEQ ID NO: 50911 - RNA, 12 nt, Artificial Sequence
  Description of Artificial Sequence: Synthetic oligonucleotide
ggcugaaaagaa

SEQ ID NO: 50912 - RNA, 12 nt, Artificial Sequence
  Description of Artificial Sequence: Synthetic oligonucleotide
uaaacccuuaua

SEQ ID NO: 50913 - RNA, 13 nt, Artificial Sequence
  Description of Artificial Sequence: Synthetic oligonucleotide
cauacuauuagcc

SEQ ID NO: 50914 - RNA, 12 nt, Artificial Sequence
  Description of Artificial Sequence: Synthetic oligonucleotide
gacagaagcauu

SEQ ID NO: 50915 - RNA, 14 nt, Artificial Sequence
  Description of Artificial Sequence: Synthetic oligonucleotide
agagcaaauaagau

SEQ ID NO: 50916 - RNA, 14 nt, Artificial Sequence
  Description of Artificial Sequence: Synthetic oligonucleotide
ccaacauuuuucuc

SEQ ID NO: 50917 - RNA, 15 nt, Artificial Sequence
  Description of Artificial Sequence: Synthetic oligonucleotide
uuaaguaugagaaaa

SEQ ID NO: 50918 - RNA, 14 nt, Artificial Sequence
  Description of Artificial Sequence: Synthetic oligonucleotide
caggaauaaagaug

SEQ ID NO: 50919 - RNA, 13 nt, Artificial Sequence
  Description of Artificial Sequence: Synthetic oligonucleotide
aauuugaaugacc

SEQ ID NO: 50920 - RNA, 14 nt, Artificial Sequence
  Description of Artificial Sequence: Synthetic oligonucleotide
auguauaaagauag

SEQ ID NO: 50921 - RNA, 12 nt, Artificial Sequence
  Description of Artificial Sequence: Synthetic oligonucleotide
ggcuguaacuau

SEQ ID NO: 50922 - RNA, 11 nt, Artificial Sequence
  Description of Artificial Sequence: Synthetic oligonucleotide
ucugugaagug

SEQ ID NO: 50923 - RNA, 14 nt, Artificial Sequence
  Description of Artificial Sequence: Synthetic oligonucleotide
ccuuuaaggaaaug

SEQ ID NO: 50924 - RNA, 13 nt, Artificial Sequence
  Description of Artificial Sequence: Synthetic oligonucleotide
aaggauacaaaaa

SEQ ID NO: 50925 - RNA, 12 nt, Artificial Sequence
  Description of Artificial Sequence: Synthetic oligonucleotide
agaugcaauuug

SEQ ID NO: 50926 - RNA, 12 nt, Artificial Sequence
  Description of Artificial Sequence: Synthetic oligonucleotide
guucaaaacgaa

SEQ ID NO: 50927 - RNA, 11 nt, Artificial Sequence
  Description of Artificial Sequence: Synthetic oligonucleotide
gugaaaccuca

SEQ ID NO: 50928 - RNA, 13 nt, Artificial Sequence
  Description of Artificial Sequence: Synthetic oligonucleotide
acgaaagagaagc

SEQ ID NO: 50929 - RNA, 12 nt, Artificial Sequence
  Description of Artificial Sequence: Synthetic oligonucleotide
cuccacaagcgc

SEQ ID NO: 50930 - RNA, 14 nt, Artificial Sequence
  Description of Artificial Sequence: Synthetic oligonucleotide
gagaagauuccaaa

SEQ ID NO: 50931 - RNA, 13 nt, Artificial Sequence
  Description of Artificial Sequence: Synthetic oligonucleotide
aaucuggauucaa

SEQ ID NO: 50932 - RNA, 13 nt, Artificial Sequence
  Description of Artificial Sequence: Synthetic oligonucleotide
agaacagauuuga

SEQ ID NO: 50933 - RNA, 11 nt, Artificial Sequence
  Description of Artificial Sequence: Synthetic oligonucleotide
ccagagcugug

SEQ ID NO: 50934 - RNA, 12 nt, Artificial Sequence
  Description of Artificial Sequence: Synthetic oligonucleotide
ccucagauuguu

SEQ ID NO: 50935 - RNA, 12 nt, Artificial Sequence
  Description of Artificial Sequence: Synthetic oligonucleotide
cuauuuuaauua

SEQ ID NO: 50936 - RNA, 13 nt, Artificial Sequence
  Description of Artificial Sequence: Synthetic oligonucleotide
uuuaauuuauuaa

SEQ ID NO: 50937 - RNA, 12 nt, Artificial Sequence
  Description of Artificial Sequence: Synthetic oligonucleotide
augcaguuugaa

SEQ ID NO: 50938 - RNA, 11 nt, Artificial Sequence
  Description of Artificial Sequence: Synthetic oligonucleotide
caugcugcugg

SEQ ID NO: 50939 - RNA, 13 nt, Artificial Sequence
  Description of Artificial Sequence: Synthetic oligonucleotide
agaugugcauuuc

SEQ ID NO: 50940 - RNA, 12 nt, Artificial Sequence
  Description of Artificial Sequence: Synthetic oligonucleotide
ucaaaaccugug

SEQ ID NO: 50941 - RNA, 11 nt, Artificial Sequence
  Description of Artificial Sequence: Synthetic oligonucleotide
gaaugugggua

SEQ ID NO: 50942 - RNA, 10 nt, Artificial Sequence
  Description of Artificial Sequence: Synthetic oligonucleotide
auguggguag

SEQ ID NO: 50943 - RNA, 13 nt, Artificial Sequence
  Description of Artificial Sequence: Synthetic oligonucleotide
ugaaaaugagcau

SEQ ID NO: 50944 - RNA, 13 nt, Artificial Sequence
  Description of Artificial Sequence: Synthetic oligonucleotide
uugcuuuucaugu

SEQ ID NO: 50945 - RNA, 12 nt, Artificial Sequence
  Description of Artificial Sequence: Synthetic oligonucleotide
uguauuucuaua

SEQ ID NO: 50946 - RNA, 13 nt, Artificial Sequence
  Description of Artificial Sequence: Synthetic oligonucleotide
uuugauuaauguu

SEQ ID NO: 50947 - RNA, 12 nt, Artificial Sequence
  Description of Artificial Sequence: Synthetic oligonucleotide
caacguguauag

SEQ ID NO: 50948 - RNA, 12 nt, Artificial Sequence
  Description of Artificial Sequence: Synthetic oligonucleotide
cauauccuuggc

SEQ ID NO: 50949 - RNA, 13 nt, Artificial Sequence
  Description of Artificial Sequence: Synthetic oligonucleotide
uacuaacaucugg

SEQ ID NO: 50950 - RNA, 11 nt, Artificial Sequence
  Description of Artificial Sequence: Synthetic oligonucleotide
cauaaguugug

SEQ ID NO: 50951 - RNA, 12 nt, Artificial Sequence
  Description of Artificial Sequence: Synthetic oligonucleotide
gcaucauuuugg

SEQ ID NO: 50952 - RNA, 10 nt, Artificial Sequence
  Description of Artificial Sequence: Synthetic oligonucleotide
gcucuucuua

SEQ ID NO: 50953 - RNA, 10 nt, Artificial Sequence
  Description of Artificial Sequence: Synthetic oligonucleotide
agauuagguc

SEQ ID NO: 50954 - RNA, 12 nt, Artificial Sequence
  Description of Artificial Sequence: Synthetic oligonucleotide
auggaauugaaa

SEQ ID NO: 50955 - RNA, 13 nt, Artificial Sequence
  Description of Artificial Sequence: Synthetic oligonucleotide
cacacucauuccu

SEQ ID NO: 50956 - RNA, 12 nt, Artificial Sequence
  Description of Artificial Sequence: Synthetic oligonucleotide
uguagagguaac

SEQ ID NO: 50957 - RNA, 11 nt, Artificial Sequence
  Description of Artificial Sequence: Synthetic oligonucleotide
caaccacaugc

SEQ ID NO: 50958 - RNA, 12 nt, Artificial Sequence
  Description of Artificial Sequence: Synthetic oligonucleotide
ucggaaacaagu

SEQ ID NO: 50959 - RNA, 11 nt, Artificial Sequence
  Description of Artificial Sequence: Synthetic oligonucleotide
acucccaauaa

SEQ ID NO: 50960 - RNA, 13 nt, Artificial Sequence
  Description of Artificial Sequence: Synthetic oligonucleotide
aaugcuaagaaau

SEQ ID NO: 50961 - RNA, 11 nt, Artificial Sequence
  Description of Artificial Sequence: Synthetic oligonucleotide
gucuuucucua

SEQ ID NO: 50962 - RNA, 11 nt, Artificial Sequence
  Description of Artificial Sequence: Synthetic oligonucleotide
ugaauuucagg

SEQ ID NO: 50963 - RNA, 13 nt, Artificial Sequence
  Description of Artificial Sequence: Synthetic oligonucleotide
cgauucccucuca

SEQ ID NO: 50964 - RNA, 11 nt, Artificial Sequence
  Description of Artificial Sequence: Synthetic oligonucleotide
aggaaagugaa

SEQ ID NO: 50965 - RNA, 12 nt, Artificial Sequence
  Description of Artificial Sequence: Synthetic oligonucleotide
gaggcugcaugc

SEQ ID NO: 50966 - RNA, 11 nt, Artificial Sequence
  Description of Artificial Sequence: Synthetic oligonucleotide
ucucugaacag

SEQ ID NO: 50967 - RNA, 12 nt, Artificial Sequence
  Description of Artificial Sequence: Synthetic oligonucleotide
aacuuggcugua

SEQ ID NO: 50968 - RNA, 12 nt, Artificial Sequence
  Description of Artificial Sequence: Synthetic oligonucleotide
agaagccaaaau

SEQ ID NO: 50969 - RNA, 14 nt, Artificial Sequence
  Description of Artificial Sequence: Synthetic oligonucleotide
auuaaaagaagucc

SEQ ID NO: 50970 - RNA, 14 nt, Artificial Sequence
  Description of Artificial Sequence: Synthetic oligonucleotide
gaauccggauuauc

SEQ ID NO: 50971 - RNA, 12 nt, Artificial Sequence
  Description of Artificial Sequence: Synthetic oligonucleotide
aaugugacauca

SEQ ID NO: 50972 - RNA, 13 nt, Artificial Sequence
  Description of Artificial Sequence: Synthetic oligonucleotide
caucaaagcaagu

SEQ ID NO: 50973 - RNA, 11 nt, Artificial Sequence
  Description of Artificial Sequence: Synthetic oligonucleotide
agagagagaaa

SEQ ID NO: 50974 - RNA, 13 nt, Artificial Sequence
  Description of Artificial Sequence: Synthetic oligonucleotide
ucgcuguaguauu

SEQ ID NO: 50975 - RNA, 14 nt, Artificial Sequence
  Description of Artificial Sequence: Synthetic oligonucleotide
cgcuguaguauuua

SEQ ID NO: 50976 - RNA, 13 nt, Artificial Sequence
  Description of Artificial Sequence: Synthetic oligonucleotide
auuuaagcccaua

SEQ ID NO: 50977 - RNA, 15 nt, Artificial Sequence
  Description of Artificial Sequence: Synthetic oligonucleotide
auuaaaauaaacaug

SEQ ID NO: 50978 - RNA, 12 nt, Artificial Sequence
  Description of Artificial Sequence: Synthetic oligonucleotide
cuguucugaucg

SEQ ID NO: 50979 - RNA, 16 nt, Artificial Sequence
  Description of Artificial Sequence: Synthetic oligonucleotide
aaauaauuugaacuuu

SEQ ID NO: 50980 - RNA, 12 nt, Artificial Sequence
  Description of Artificial Sequence: Synthetic oligonucleotide
ugcgaccuuaau

SEQ ID NO: 50981 - RNA, 11 nt, Artificial Sequence
  Description of Artificial Sequence: Synthetic oligonucleotide
cugagaaagcu

SEQ ID NO: 50982 - RNA, 13 nt, Artificial Sequence
  Description of Artificial Sequence: Synthetic oligonucleotide
aguaaagaugcua

SEQ ID NO: 50983 - RNA, 12 nt, Artificial Sequence
  Description of Artificial Sequence: Synthetic oligonucleotide
cugcuuaauugc

SEQ ID NO: 50984 - RNA, 14 nt, Artificial Sequence
  Description of Artificial Sequence: Synthetic oligonucleotide
uaccauaugaauga

SEQ ID NO: 50985 - RNA, 12 nt, Artificial Sequence
  Description of Artificial Sequence: Synthetic oligonucleotide
aacuuucuuauc

SEQ ID NO: 50986 - RNA, 13 nt, Artificial Sequence
  Description of Artificial Sequence: Synthetic oligonucleotide
ccuugcaugacau

SEQ ID NO: 50987 - RNA, 14 nt, Artificial Sequence
  Description of Artificial Sequence: Synthetic oligonucleotide
ugaauuuguauaug

SEQ ID NO: 50988 - RNA, 12 nt, Artificial Sequence
  Description of Artificial Sequence: Synthetic oligonucleotide
gaauccuaguag

SEQ ID NO: 50989 - RNA, 10 nt, Artificial Sequence
  Description of Artificial Sequence: Synthetic oligonucleotide
gaaagggaag

SEQ ID NO: 50990 - RNA, 11 nt, Artificial Sequence
  Description of Artificial Sequence: Synthetic oligonucleotide
uaucggcaugc

SEQ ID NO: 50991 - RNA, 12 nt, Artificial Sequence
  Description of Artificial Sequence: Synthetic oligonucleotide
caccucauagua

SEQ ID NO: 50992 - RNA, 11 nt, Artificial Sequence
  Description of Artificial Sequence: Synthetic oligonucleotide
ccagaauugcc

SEQ ID NO: 50993 - RNA, 11 nt, Artificial Sequence
  Description of Artificial Sequence: Synthetic oligonucleotide
uggugaucugg

SEQ ID NO: 50994 - RNA, 12 nt, Artificial Sequence
  Description of Artificial Sequence: Synthetic oligonucleotide
gaucuggguaau

SEQ ID NO: 50995 - RNA, 12 nt, Artificial Sequence
  Description of Artificial Sequence: Synthetic oligonucleotide
ggaugugaugaa

SEQ ID NO: 50996 - RNA, 12 nt, Artificial Sequence
  Description of Artificial Sequence: Synthetic oligonucleotide
cauuuccacagc

SEQ ID NO: 50997 - RNA, 11 nt, Artificial Sequence
  Description of Artificial Sequence: Synthetic oligonucleotide
acagcuacacc

SEQ ID NO: 50998 - RNA, 12 nt, Artificial Sequence
  Description of Artificial Sequence: Synthetic oligonucleotide
ugcaguucuuac

SEQ ID NO: 50999 - RNA, 12 nt, Artificial Sequence
  Description of Artificial Sequence: Synthetic oligonucleotide
acgagaagaaga

SEQ ID NO: 51000 - RNA, 12 nt, Artificial Sequence
  Description of Artificial Sequence: Synthetic oligonucleotide
cgagaagaagau

SEQ ID NO: 51001 - RNA, 15 nt, Artificial Sequence
  Description of Artificial Sequence: Synthetic oligonucleotide
aagaagaucauuuac

SEQ ID NO: 51002 - RNA, 11 nt, Artificial Sequence
  Description of Artificial Sequence: Synthetic oligonucleotide
agaggaagagg

SEQ ID NO: 51003 - RNA, 12 nt, Artificial Sequence
  Description of Artificial Sequence: Synthetic oligonucleotide
gaggaagaggug

SEQ ID NO: 51004 - RNA, 13 nt, Artificial Sequence
  Description of Artificial Sequence: Synthetic oligonucleotide
cuacuuugagggc

SEQ ID NO: 51005 - RNA, 12 nt, Artificial Sequence
  Description of Artificial Sequence: Synthetic oligonucleotide
agggcaucuccu

SEQ ID NO: 51006 - RNA, 10 nt, Artificial Sequence
  Description of Artificial Sequence: Synthetic oligonucleotide
ggagugauau

SEQ ID NO: 51007 - RNA, 11 nt, Artificial Sequence
  Description of Artificial Sequence: Synthetic oligonucleotide
gagugauaugg

SEQ ID NO: 51008 - RNA, 12 nt, Artificial Sequence
  Description of Artificial Sequence: Synthetic oligonucleotide
ugcaguaaagau

SEQ ID NO: 51009 - RNA, 13 nt, Artificial Sequence
  Description of Artificial Sequence: Synthetic oligonucleotide
aguaaagauccua

SEQ ID NO: 51010 - RNA, 12 nt, Artificial Sequence
  Description of Artificial Sequence: Synthetic oligonucleotide
ugacaaaggaca

SEQ ID NO: 51011 - RNA, 13 nt, Artificial Sequence
  Description of Artificial Sequence: Synthetic oligonucleotide
gcaauugugaccc

SEQ ID NO: 51012 - RNA, 12 nt, Artificial Sequence
  Description of Artificial Sequence: Synthetic oligonucleotide
aacaucauccau

SEQ ID NO: 51013 - RNA, 12 nt, Artificial Sequence
  Description of Artificial Sequence: Synthetic oligonucleotide
ugaaauccaaca

SEQ ID NO: 51014 - RNA, 15 nt, Artificial Sequence
  Description of Artificial Sequence: Synthetic oligonucleotide
aacaauauauuucuc

SEQ ID NO: 51015 - RNA, 14 nt, Artificial Sequence
  Description of Artificial Sequence: Synthetic oligonucleotide
aacaguaaagucac

SEQ ID NO: 51016 - RNA, 14 nt, Artificial Sequence
  Description of Artificial Sequence: Synthetic oligonucleotide
ugugaagaaaguaa

SEQ ID NO: 51017 - RNA, 13 nt, Artificial Sequence
  Description of Artificial Sequence: Synthetic oligonucleotide
cuuccgagccauc

SEQ ID NO: 51018 - RNA, 12 nt, Artificial Sequence
  Description of Artificial Sequence: Synthetic oligonucleotide
aauggagguuga

SEQ ID NO: 51019 - RNA, 12 nt, Artificial Sequence
  Description of Artificial Sequence: Synthetic oligonucleotide
ggagguugaaua

SEQ ID NO: 51020 - RNA, 13 nt, Artificial Sequence
  Description of Artificial Sequence: Synthetic oligonucleotide
auuuugaguuuuc

SEQ ID NO: 51021 - RNA, 12 nt, Artificial Sequence
  Description of Artificial Sequence: Synthetic oligonucleotide
uauccuguuugu

SEQ ID NO: 51022 - RNA, 11 nt, Artificial Sequence
  Description of Artificial Sequence: Synthetic oligonucleotide
ccuguuuguuc

SEQ ID NO: 51023 - RNA, 10 nt, Artificial Sequence
  Description of Artificial Sequence: Synthetic oligonucleotide
cucuacagcc

SEQ ID NO: 51024 - RNA, 12 nt, Artificial Sequence
  Description of Artificial Sequence: Synthetic oligonucleotide
ucuuccauagcu

SEQ ID NO: 51025 - RNA, 12 nt, Artificial Sequence
  Description of Artificial Sequence: Synthetic oligonucleotide
auaaucuuccug

SEQ ID NO: 51026 - RNA, 12 nt, Artificial Sequence
  Description of Artificial Sequence: Synthetic oligonucleotide
uaaucuuccugu

SEQ ID NO: 51027 - RNA, 12 nt, Artificial Sequence
  Description of Artificial Sequence: Synthetic oligonucleotide
cuucaugacuug

SEQ ID NO: 51028 - RNA, 12 nt, Artificial Sequence
  Description of Artificial Sequence: Synthetic oligonucleotide
aagagggagaga

SEQ ID NO: 51029 - RNA, 12 nt, Artificial Sequence
  Description of Artificial Sequence: Synthetic oligonucleotide
cgucuccuacca

SEQ ID NO: 51030 - RNA, 12 nt, Artificial Sequence
  Description of Artificial Sequence: Synthetic oligonucleotide
gaucaaucggcc

SEQ ID NO: 51031 - RNA, 12 nt, Artificial Sequence
  Description of Artificial Sequence: Synthetic oligonucleotide
ggacgaacaucc

SEQ ID NO: 51032 - RNA, 11 nt, Artificial Sequence
  Description of Artificial Sequence: Synthetic oligonucleotide
agggucggaac

SEQ ID NO: 51033 - RNA, 10 nt, Artificial Sequence
  Description of Artificial Sequence: Synthetic oligonucleotide
ucggaaccca

SEQ ID NO: 51034 - RNA, 11 nt, Artificial Sequence
  Description of Artificial Sequence: Synthetic oligonucleotide
acccaagcuua

SEQ ID NO: 51035 - RNA, 14 nt, Artificial Sequence
  Description of Artificial Sequence: Synthetic oligonucleotide
gaacuuuaagcaac

SEQ ID NO: 51036 - RNA, 11 nt, Artificial Sequence
  Description of Artificial Sequence: Synthetic oligonucleotide
acuauucagug

SEQ ID NO: 51037 - RNA, 11 nt, Artificial Sequence
  Description of Artificial Sequence: Synthetic oligonucleotide
cuauucagugg

SEQ ID NO: 51038 - RNA, 13 nt, Artificial Sequence
  Description of Artificial Sequence: Synthetic oligonucleotide
aaacacagauaac

SEQ ID NO: 51039 - RNA, 12 nt, Artificial Sequence
  Description of Artificial Sequence: Synthetic oligonucleotide
cuuaagaaaaga

SEQ ID NO: 51040 - RNA, 12 nt, Artificial Sequence
  Description of Artificial Sequence: Synthetic oligonucleotide
cugaaggagugu

SEQ ID NO: 51041 - RNA, 10 nt, Artificial Sequence
  Description of Artificial Sequence: Synthetic oligonucleotide
ucaccgcggg

SEQ ID NO: 51042 - RNA, 14 nt, Artificial Sequence
  Description of Artificial Sequence: Synthetic oligonucleotide
agcagaaauaagcg

SEQ ID NO: 51043 - RNA, 12 nt, Artificial Sequence
  Description of Artificial Sequence: Synthetic oligonucleotide
aagcgugccguu

SEQ ID NO: 51044 - RNA, 12 nt, Artificial Sequence
  Description of Artificial Sequence: Synthetic oligonucleotide
agaaacagucac

SEQ ID NO: 51045 - RNA, 12 nt, Artificial Sequence
  Description of Artificial Sequence: Synthetic oligonucleotide
agaggaagaagg

SEQ ID NO: 51046 - RNA, 14 nt, Artificial Sequence
  Description of Artificial Sequence: Synthetic oligonucleotide
uguauucaaaauau

SEQ ID NO: 51047 - RNA, 13 nt, Artificial Sequence
  Description of Artificial Sequence: Synthetic oligonucleotide
auuuuccucccuu

SEQ ID NO: 51048 - RNA, 13 nt, Artificial Sequence
  Description of Artificial Sequence: Synthetic oligonucleotide
caaagaaagauag

SEQ ID NO: 51049 - RNA, 12 nt, Artificial Sequence
  Description of Artificial Sequence: Synthetic oligonucleotide
aagaaagauaga

SEQ ID NO: 51050 - RNA, 13 nt, Artificial Sequence
  Description of Artificial Sequence: Synthetic oligonucleotide
gaaagcauuuguu

SEQ ID NO: 51051 - RNA, 13 nt, Artificial Sequence
  Description of Artificial Sequence: Synthetic oligonucleotide
ugaguuaaacgaa

SEQ ID NO: 51052 - RNA, 12 nt, Artificial Sequence
  Description of Artificial Sequence: Synthetic oligonucleotide
acugauacagaa

SEQ ID NO: 51053 - RNA, 12 nt, Artificial Sequence
  Description of Artificial Sequence: Synthetic oligonucleotide
auauuauauaua

SEQ ID NO: 51054 - RNA, 12 nt, Artificial Sequence
  Description of Artificial Sequence: Synthetic oligonucleotide
auuauauauaua

SEQ ID NO: 51055 - RNA, 12 nt, Artificial Sequence
  Description of Artificial Sequence: Synthetic oligonucleotide
ucacuggaugua

SEQ ID NO: 51056 - RNA, 12 nt, Artificial Sequence
  Description of Artificial Sequence: Synthetic oligonucleotide
cagggaagagga

SEQ ID NO: 51057 - RNA, 15 nt, Artificial Sequence
  Description of Artificial Sequence: Synthetic oligonucleotide
augaucuuuuuuuug

SEQ ID NO: 51058 - RNA, 11 nt, Artificial Sequence
  Description of Artificial Sequence: Synthetic oligonucleotide
aguucacggcc

SEQ ID NO: 51059 - RNA, 13 nt, Artificial Sequence
  Description of Artificial Sequence: Synthetic oligonucleotide
caccaucacacca

SEQ ID NO: 51060 - RNA, 11 nt, Artificial Sequence
  Description of Artificial Sequence: Synthetic oligonucleotide
ccugcggguuu

SEQ ID NO: 51061 - RNA, 10 nt, Artificial Sequence
  Description of Artificial Sequence: Synthetic oligonucleotide
auccaguuug

SEQ ID NO: 51062 - RNA, 13 nt, Artificial Sequence
  Description of Artificial Sequence: Synthetic oligonucleotide
guuaaggacuucu

SEQ ID NO: 51063 - RNA, 13 nt, Artificial Sequence
  Description of Artificial Sequence: Synthetic oligonucleotide
cagugggacagag

SEQ ID NO: 51064 - RNA, 14 nt, Artificial Sequence
  Description of Artificial Sequence: Synthetic oligonucleotide
aauuuguuauugug

SEQ ID NO: 51065 - RNA, 13 nt, Artificial Sequence
  Description of Artificial Sequence: Synthetic oligonucleotide
uucaaaugcauuu

SEQ ID NO: 51066 - RNA, 10 nt, Artificial Sequence
  Description of Artificial Sequence: Synthetic oligonucleotide
caggaaagcc

SEQ ID NO: 51067 - RNA, 11 nt, Artificial Sequence
  Description of Artificial Sequence: Synthetic oligonucleotide
aggaaagcccu

SEQ ID NO: 51068 - RNA, 12 nt, Artificial Sequence
  Description of Artificial Sequence: Synthetic oligonucleotide
cccagcauggcc

SEQ ID NO: 51069 - RNA, 11 nt, Artificial Sequence
  Description of Artificial Sequence: Synthetic oligonucleotide
cuucucccuga

SEQ ID NO: 51070 - RNA, 12 nt, Artificial Sequence
  Description of Artificial Sequence: Synthetic oligonucleotide
gaagaagcccuu

SEQ ID NO: 51071 - RNA, 12 nt, Artificial Sequence
  Description of Artificial Sequence: Synthetic oligonucleotide
agaagcccuuca

SEQ ID NO: 51072 - RNA, 11 nt, Artificial Sequence
  Description of Artificial Sequence: Synthetic oligonucleotide
gcccuucagcg

SEQ ID NO: 51073 - RNA, 11 nt, Artificial Sequence
  Description of Artificial Sequence: Synthetic oligonucleotide
ccuucagcggc

SEQ ID NO: 51074 - RNA, 12 nt, Artificial Sequence
  Description of Artificial Sequence: Synthetic oligonucleotide
ucagcggccagu

SEQ ID NO: 51075 - RNA, 12 nt, Artificial Sequence
  Description of Artificial Sequence: Synthetic oligonucleotide
ugaaaagcuccg

SEQ ID NO: 51076 - RNA, 11 nt, Artificial Sequence
  Description of Artificial Sequence: Synthetic oligonucleotide
aaaagcuccgg

SEQ ID NO: 51077 - RNA, 13 nt, Artificial Sequence
  Description of Artificial Sequence: Synthetic oligonucleotide
agucaacagucug

SEQ ID NO: 51078 - RNA, 13 nt, Artificial Sequence
  Description of Artificial Sequence: Synthetic oligonucleotide
cagaguucaaaag

SEQ ID NO: 51079 - RNA, 13 nt, Artificial Sequence
  Description of Artificial Sequence: Synthetic oligonucleotide
agaguucaaaagc

SEQ ID NO: 51080 - RNA, 12 nt, Artificial Sequence
  Description of Artificial Sequence: Synthetic oligonucleotide
uucaaaagcccu

SEQ ID NO: 51081 - RNA, 12 nt, Artificial Sequence
  Description of Artificial Sequence: Synthetic oligonucleotide
ucaaaagcccuu

SEQ ID NO: 51082 - RNA, 12 nt, Artificial Sequence
  Description of Artificial Sequence: Synthetic oligonucleotide
aaaagcccuuca

SEQ ID NO: 51083 - RNA, 12 nt, Artificial Sequence
  Description of Artificial Sequence: Synthetic oligonucleotide
aaagcccuucag

SEQ ID NO: 51084 - RNA, 13 nt, Artificial Sequence
  Description of Artificial Sequence: Synthetic oligonucleotide
gugaagccgcucg

SEQ ID NO: 51085 - RNA, 12 nt, Artificial Sequence
  Description of Artificial Sequence: Synthetic oligonucleotide
cacgccagucaa

SEQ ID NO: 51086 - RNA, 13 nt, Artificial Sequence
  Description of Artificial Sequence: Synthetic oligonucleotide
uucuuggugcgug

SEQ ID NO: 51087 - RNA, 14 nt, Artificial Sequence
  Description of Artificial Sequence: Synthetic oligonucleotide
auuggauucaucag

SEQ ID NO: 51088 - RNA, 13 nt, Artificial Sequence
  Description of Artificial Sequence: Synthetic oligonucleotide
uggaauaccuaag

SEQ ID NO: 51089 - RNA, 12 nt, Artificial Sequence
  Description of Artificial Sequence: Synthetic oligonucleotide
auuugaggcuca

SEQ ID NO: 51090 - RNA, 11 nt, Artificial Sequence
  Description of Artificial Sequence: Synthetic oligonucleotide
ucuacaauugg

SEQ ID NO: 51091 - RNA, 12 nt, Artificial Sequence
  Description of Artificial Sequence: Synthetic oligonucleotide
uaguuaggagcc

SEQ ID NO: 51092 - RNA, 13 nt, Artificial Sequence
  Description of Artificial Sequence: Synthetic oligonucleotide
agucaauauccac

SEQ ID NO: 51093 - RNA, 13 nt, Artificial Sequence
  Description of Artificial Sequence: Synthetic oligonucleotide
auguucagucaca

SEQ ID NO: 51094 - RNA, 12 nt, Artificial Sequence
  Description of Artificial Sequence: Synthetic oligonucleotide
acacacacauac

SEQ ID NO: 51095 - RNA, 12 nt, Artificial Sequence
  Description of Artificial Sequence: Synthetic oligonucleotide
uuccuuuugcuu

SEQ ID NO: 51096 - RNA, 16 nt, Artificial Sequence
  Description of Artificial Sequence: Synthetic oligonucleotide
uuuuaaaguaauuuuu

SEQ ID NO: 51097 - RNA, 13 nt, Artificial Sequence
  Description of Artificial Sequence: Synthetic oligonucleotide
caacagucaaugg

SEQ ID NO: 51098 - RNA, 13 nt, Artificial Sequence
  Description of Artificial Sequence: Synthetic oligonucleotide
ucgacaaaccaau

SEQ ID NO: 51099 - RNA, 12 nt, Artificial Sequence
  Description of Artificial Sequence: Synthetic oligonucleotide
acugcuaccacu

SEQ ID NO: 51100 - RNA, 13 nt, Artificial Sequence
  Description of Artificial Sequence: Synthetic oligonucleotide
gcaagcggucuua

SEQ ID NO: 51101 - RNA, 13 nt, Artificial Sequence
  Description of Artificial Sequence: Synthetic oligonucleotide
ggucuuaccggcu

SEQ ID NO: 51102 - RNA, 11 nt, Artificial Sequence
  Description of Artificial Sequence: Synthetic oligonucleotide
gauggguuacc

SEQ ID NO: 51103 - RNA, 11 nt, Artificial Sequence
  Description of Artificial Sequence: Synthetic oligonucleotide
guuaccugcga

SEQ ID NO: 51104 - RNA, 12 nt, Artificial Sequence
  Description of Artificial Sequence: Synthetic oligonucleotide
aaucuugcugag

SEQ ID NO: 51105 - RNA, 13 nt, Artificial Sequence
  Description of Artificial Sequence: Synthetic oligonucleotide
agcauaaaacagu

SEQ ID NO: 51106 - RNA, 12 nt, Artificial Sequence
  Description of Artificial Sequence: Synthetic oligonucleotide
guccuuuauccu

SEQ ID NO: 51107 - RNA, 12 nt, Artificial Sequence
  Description of Artificial Sequence: Synthetic oligonucleotide
caacgcaaguug

SEQ ID NO: 51108 - RNA, 13 nt, Artificial Sequence
  Description of Artificial Sequence: Synthetic oligonucleotide
aaacugaaaccau

SEQ ID NO: 51109 - RNA, 14 nt, Artificial Sequence
  Description of Artificial Sequence: Synthetic oligonucleotide
acuuuguuaaauau

SEQ ID NO: 51110 - RNA, 14 nt, Artificial Sequence
  Description of Artificial Sequence: Synthetic oligonucleotide
guauauuaaaaguu

SEQ ID NO: 51111 - RNA, 13 nt, Artificial Sequence
  Description of Artificial Sequence: Synthetic oligonucleotide
guuuugacuuaac

SEQ ID NO: 51112 - RNA, 13 nt, Artificial Sequence
  Description of Artificial Sequence: Synthetic oligonucleotide
gcaaacucagcac

SEQ ID NO: 51113 - RNA, 11 nt, Artificial Sequence
  Description of Artificial Sequence: Synthetic oligonucleotide
ugcugaccuca

SEQ ID NO: 51114 - RNA, 14 nt, Artificial Sequence
  Description of Artificial Sequence: Synthetic oligonucleotide
uuuauucagaucgc

SEQ ID NO: 51115 - RNA, 13 nt, Artificial Sequence
  Description of Artificial Sequence: Synthetic oligonucleotide
aggguucugggau

SEQ ID NO: 51116 - RNA, 15 nt, Artificial Sequence
  Description of Artificial Sequence: Synthetic oligonucleotide
auauuggaaauuaug

SEQ ID NO: 51117 - RNA, 13 nt, Artificial Sequence
  Description of Artificial Sequence: Synthetic oligonucleotide
auggaagcacuag

SEQ ID NO: 51118 - RNA, 13 nt, Artificial Sequence
  Description of Artificial Sequence: Synthetic oligonucleotide
guuuuuaugugga

SEQ ID NO: 51119 - RNA, 12 nt, Artificial Sequence
  Description of Artificial Sequence: Synthetic oligonucleotide
ggaauugguaga

SEQ ID NO: 51120 - RNA, 13 nt, Artificial Sequence
  Description of Artificial Sequence: Synthetic oligonucleotide
uuagacuuggaga

SEQ ID NO: 51121 - RNA, 13 nt, Artificial Sequence
  Description of Artificial Sequence: Synthetic oligonucleotide
uuacaguauucca

SEQ ID NO: 51122 - RNA, 15 nt, Artificial Sequence
  Description of Artificial Sequence: Synthetic oligonucleotide
ccacugaugaauuaa

SEQ ID NO: 51123 - RNA, 12 nt, Artificial Sequence
  Description of Artificial Sequence: Synthetic oligonucleotide
ccacaucaucac

SEQ ID NO: 51124 - RNA, 13 nt, Artificial Sequence
  Description of Artificial Sequence: Synthetic oligonucleotide
cucaccaaacaga

SEQ ID NO: 51125 - RNA, 12 nt, Artificial Sequence
  Description of Artificial Sequence: Synthetic oligonucleotide
ggaacaugaugg

SEQ ID NO: 51126 - RNA, 12 nt, Artificial Sequence
  Description of Artificial Sequence: Synthetic oligonucleotide
cauguagacugc

SEQ ID NO: 51127 - RNA, 13 nt, Artificial Sequence
  Description of Artificial Sequence: Synthetic oligonucleotide
ggaucuauuuaug

SEQ ID NO: 51128 - RNA, 12 nt, Artificial Sequence
  Description of Artificial Sequence: Synthetic oligonucleotide
gcacuauuauca

SEQ ID NO: 51129 - RNA, 11 nt, Artificial Sequence
  Description of Artificial Sequence: Synthetic oligonucleotide
aucaguucugc

SEQ ID NO: 51130 - RNA, 13 nt, Artificial Sequence
  Description of Artificial Sequence: Synthetic oligonucleotide
agauuaaaccuac

SEQ ID NO: 51131 - RNA, 13 nt, Artificial Sequence
  Description of Artificial Sequence: Synthetic oligonucleotide
auaaaauccuucu

SEQ ID NO: 51132 - RNA, 12 nt, Artificial Sequence
  Description of Artificial Sequence: Synthetic oligonucleotide
aaugcuguagac

SEQ ID NO: 51133 - RNA, 13 nt, Artificial Sequence
  Description of Artificial Sequence: Synthetic oligonucleotide
uugauaggaauag

SEQ ID NO: 51134 - RNA, 11 nt, Artificial Sequence
  Description of Artificial Sequence: Synthetic oligonucleotide
aauggcccuga

SEQ ID NO: 51135 - RNA, 11 nt, Artificial Sequence
  Description of Artificial Sequence: Synthetic oligonucleotide
uuccucaagca

SEQ ID NO: 51136 - RNA, 10 nt, Artificial Sequence
  Description of Artificial Sequence: Synthetic oligonucleotide
guucagccca

SEQ ID NO: 51137 - RNA, 11 nt, Artificial Sequence
  Description of Artificial Sequence: Synthetic oligonucleotide
gcugcugaacc

SEQ ID NO: 51138 - RNA, 12 nt, Artificial Sequence
  Description of Artificial Sequence: Synthetic oligonucleotide
aaguucucuuca

SEQ ID NO: 51139 - RNA, 11 nt, Artificial Sequence
  Description of Artificial Sequence: Synthetic oligonucleotide
ccagccuagag

SEQ ID NO: 51140 - RNA, 13 nt, Artificial Sequence
  Description of Artificial Sequence: Synthetic oligonucleotide
cucugugaagugu

SEQ ID NO: 51141 - RNA, 14 nt, Artificial Sequence
  Description of Artificial Sequence: Synthetic oligonucleotide
ugagaaaauuucaa

SEQ ID NO: 51142 - RNA, 11 nt, Artificial Sequence
  Description of Artificial Sequence: Synthetic oligonucleotide
aauccuccuga

SEQ ID NO: 51143 - RNA, 12 nt, Artificial Sequence
  Description of Artificial Sequence: Synthetic oligonucleotide
gugacaucauau

SEQ ID NO: 51144 - RNA, 13 nt, Artificial Sequence
  Description of Artificial Sequence: Synthetic oligonucleotide
aaucuucaucaua

SEQ ID NO: 51145 - RNA, 13 nt, Artificial Sequence
  Description of Artificial Sequence: Synthetic oligonucleotide
gacuagcuauuaa

SEQ ID NO: 51146 - RNA, 14 nt, Artificial Sequence
  Description of Artificial Sequence: Synthetic oligonucleotide
ucucuacuaaaaau

SEQ ID NO: 51147 - RNA, 12 nt, Artificial Sequence
  Description of Artificial Sequence: Synthetic oligonucleotide
ucuaucucgccu

SEQ ID NO: 51148 - RNA, 13 nt, Artificial Sequence
  Description of Artificial Sequence: Synthetic oligonucleotide
cuucgguccaguu

SEQ ID NO: 51149 - RNA, 11 nt, Artificial Sequence
  Description of Artificial Sequence: Synthetic oligonucleotide
gauguagccgc

SEQ ID NO: 51150 - RNA, 12 nt, Artificial Sequence
  Description of Artificial Sequence: Synthetic oligonucleotide
ugaggagacuug

SEQ ID NO: 51151 - RNA, 12 nt, Artificial Sequence
  Description of Artificial Sequence: Synthetic oligonucleotide
gaguagugagga

SEQ ID NO: 51152 - RNA, 14 nt, Artificial Sequence
  Description of Artificial Sequence: Synthetic oligonucleotide
cagaugaguacaaa

SEQ ID NO: 51153 - RNA, 13 nt, Artificial Sequence
  Description of Artificial Sequence: Synthetic oligonucleotide
guuguuaaugggc

SEQ ID NO: 51154 - RNA, 13 nt, Artificial Sequence
  Description of Artificial Sequence: Synthetic oligonucleotide
uuuuuaauuuauu

SEQ ID NO: 51155 - RNA, 12 nt, Artificial Sequence
  Description of Artificial Sequence: Synthetic oligonucleotide
uauuuaaauaug

SEQ ID NO: 51156 - RNA, 13 nt, Artificial Sequence
  Description of Artificial Sequence: Synthetic oligonucleotide
uauccuuuguuuc

SEQ ID NO: 51157 - RNA, 14 nt, Artificial Sequence
  Description of Artificial Sequence: Synthetic oligonucleotide
cgucuaaguguuug

SEQ ID NO: 51158 - RNA, 12 nt, Artificial Sequence
  Description of Artificial Sequence: Synthetic oligonucleotide
accugugacaaa

SEQ ID NO: 51159 - RNA, 13 nt, Artificial Sequence
  Description of Artificial Sequence: Synthetic oligonucleotide
ccaggcugaauua

SEQ ID NO: 51160 - RNA, 14 nt, Artificial Sequence
  Description of Artificial Sequence: Synthetic oligonucleotide
gucauucuuacaau

SEQ ID NO: 51161 - RNA, 15 nt, Artificial Sequence
  Description of Artificial Sequence: Synthetic oligonucleotide
ucauucuuacaauug

SEQ ID NO: 51162 - RNA, 12 nt, Artificial Sequence
  Description of Artificial Sequence: Synthetic oligonucleotide
cagagaguguac

SEQ ID NO: 51163 - RNA, 12 nt, Artificial Sequence
  Description of Artificial Sequence: Synthetic oligonucleotide
agaacucagcag

SEQ ID NO: 51164 - RNA, 13 nt, Artificial Sequence
  Description of Artificial Sequence: Synthetic oligonucleotide
uuuauuuucagua

SEQ ID NO: 51165 - RNA, 12 nt, Artificial Sequence
  Description of Artificial Sequence: Synthetic oligonucleotide
ucuuaaauggaa

SEQ ID NO: 51166 - RNA, 13 nt, Artificial Sequence
  Description of Artificial Sequence: Synthetic oligonucleotide
ugccuaaaauugu

SEQ ID NO: 51167 - RNA, 12 nt, Artificial Sequence
  Description of Artificial Sequence: Synthetic oligonucleotide
agacugugagcu

SEQ ID NO: 51168 - RNA, 14 nt, Artificial Sequence
  Description of Artificial Sequence: Synthetic oligonucleotide
ugcuuuuuauuaau

SEQ ID NO: 51169 - RNA, 13 nt, Artificial Sequence
  Description of Artificial Sequence: Synthetic oligonucleotide
cucuucuuacauu

SEQ ID NO: 51170 - RNA, 15 nt, Artificial Sequence
  Description of Artificial Sequence: Synthetic oligonucleotide
cauuuguaaaaaugu

SEQ ID NO: 51171 - RNA, 15 nt, Artificial Sequence
  Description of Artificial Sequence: Synthetic oligonucleotide
aucuuaauucauauu

SEQ ID NO: 51172 - RNA, 13 nt, Artificial Sequence
  Description of Artificial Sequence: Synthetic oligonucleotide
gaacuaaucauga

SEQ ID NO: 51173 - RNA, 12 nt, Artificial Sequence
  Description of Artificial Sequence: Synthetic oligonucleotide
ucugcucuuggg

SEQ ID NO: 51174 - RNA, 13 nt, Artificial Sequence
  Description of Artificial Sequence: Synthetic oligonucleotide
caguagcuuugag

SEQ ID NO: 51175 - RNA, 14 nt, Artificial Sequence
  Description of Artificial Sequence: Synthetic oligonucleotide
cacguaauauuuca

SEQ ID NO: 51176 - RNA, 13 nt, Artificial Sequence
  Description of Artificial Sequence: Synthetic oligonucleotide
uauucucuucacu

SEQ ID NO: 51177 - RNA, 14 nt, Artificial Sequence
  Description of Artificial Sequence: Synthetic oligonucleotide
cuaaugcuaagaaa

SEQ ID NO: 51178 - RNA, 12 nt, Artificial Sequence
  Description of Artificial Sequence: Synthetic oligonucleotide
gcugaaaaucaa

SEQ ID NO: 51179 - RNA, 14 nt, Artificial Sequence
  Description of Artificial Sequence: Synthetic oligonucleotide
aauaugauuacuuu

SEQ ID NO: 51180 - RNA, 14 nt, Artificial Sequence
  Description of Artificial Sequence: Synthetic oligonucleotide
cauuuuguucuaca

SEQ ID NO: 51181 - RNA, 12 nt, Artificial Sequence
  Description of Artificial Sequence: Synthetic oligonucleotide
cccgggacucuc

SEQ ID NO: 51182 - RNA, 14 nt, Artificial Sequence
  Description of Artificial Sequence: Synthetic oligonucleotide
ccuuuaaaguaaag

SEQ ID NO: 51183 - RNA, 13 nt, Artificial Sequence
  Description of Artificial Sequence: Synthetic oligonucleotide
ucuggaagccugg

SEQ ID NO: 51184 - RNA, 14 nt, Artificial Sequence
  Description of Artificial Sequence: Synthetic oligonucleotide
aaaacaaaagagag

SEQ ID NO: 51185 - RNA, 13 nt, Artificial Sequence
  Description of Artificial Sequence: Synthetic oligonucleotide
aucaguuaugccg

SEQ ID NO: 51186 - RNA, 13 nt, Artificial Sequence
  Description of Artificial Sequence: Synthetic oligonucleotide
uaaaagaagucca

SEQ ID NO: 51187 - RNA, 11 nt, Artificial Sequence
  Description of Artificial Sequence: Synthetic oligonucleotide
aggugagguua

SEQ ID NO: 51188 - RNA, 11 nt, Artificial Sequence
  Description of Artificial Sequence: Synthetic oligonucleotide
gggaagaggac

SEQ ID NO: 51189 - RNA, 13 nt, Artificial Sequence
  Description of Artificial Sequence: Synthetic oligonucleotide
aagcaaguauugu

SEQ ID NO: 51190 - RNA, 12 nt, Artificial Sequence
  Description of Artificial Sequence: Synthetic oligonucleotide
auuguagcacuc

SEQ ID NO: 51191 - RNA, 14 nt, Artificial Sequence
  Description of Artificial Sequence: Synthetic oligonucleotide
acaaaaccacaaau

SEQ ID NO: 51192 - RNA, 12 nt, Artificial Sequence
  Description of Artificial Sequence: Synthetic oligonucleotide
uaagcccauaca

SEQ ID NO: 51193 - RNA, 11 nt, Artificial Sequence
  Description of Artificial Sequence: Synthetic oligonucleotide
agcccauacag

SEQ ID NO: 51194 - RNA, 12 nt, Artificial Sequence
  Description of Artificial Sequence: Synthetic oligonucleotide
cagaaaccuucc

SEQ ID NO: 51195 - RNA, 10 nt, Artificial Sequence
  Description of Artificial Sequence: Synthetic oligonucleotide
guauaccuac

SEQ ID NO: 51196 - RNA, 13 nt, Artificial Sequence
  Description of Artificial Sequence: Synthetic oligonucleotide
gccaguuuucgga

SEQ ID NO: 51197 - RNA, 9 nt, Artificial Sequence
  Description of Artificial Sequence: Synthetic oligonucleotide
ggaacaggg

SEQ ID NO: 51198 - RNA, 13 nt, Artificial Sequence
  Description of Artificial Sequence: Synthetic oligonucleotide
uuaacuuuccagu

SEQ ID NO: 51199 - RNA, 14 nt, Artificial Sequence
  Description of Artificial Sequence: Synthetic oligonucleotide
aaaguuugguuuug

SEQ ID NO: 51200 - RNA, 12 nt, Artificial Sequence
  Description of Artificial Sequence: Synthetic oligonucleotide
cuucccacugua

SEQ ID NO: 51201 - RNA, 13 nt, Artificial Sequence
  Description of Artificial Sequence: Synthetic oligonucleotide
ugauaccauauga

SEQ ID NO: 51202 - RNA, 11 nt, Artificial Sequence
  Description of Artificial Sequence: Synthetic oligonucleotide
aacaugggcug

SEQ ID NO: 51203 - RNA, 13 nt, Artificial Sequence
  Description of Artificial Sequence: Synthetic oligonucleotide
caacuuuuucaua

SEQ ID NO: 51204 - RNA, 12 nt, Artificial Sequence
  Description of Artificial Sequence: Synthetic oligonucleotide
caugaggccgga

SEQ ID NO: 51205 - RNA, 11 nt, Artificial Sequence
  Description of Artificial Sequence: Synthetic oligonucleotide
acugcauuugu

SEQ ID NO: 51206 - RNA, 13 nt, Artificial Sequence
  Description of Artificial Sequence: Synthetic oligonucleotide
aauguuuacuacc

SEQ ID NO: 51207 - RNA, 15 nt, Artificial Sequence
  Description of Artificial Sequence: Synthetic oligonucleotide
aauuuuuugaugaaa

SEQ ID NO: 51208 - RNA, 14 nt, Artificial Sequence
  Description of Artificial Sequence: Synthetic oligonucleotide
cagugugugaauuu

SEQ ID NO: 51209 - RNA, 13 nt, Artificial Sequence
  Description of Artificial Sequence: Synthetic oligonucleotide
gagcaauguaugu

SEQ ID NO: 51210 - RNA, 14 nt, Artificial Sequence
  Description of Artificial Sequence: Synthetic oligonucleotide
aaagcacauauaua

SEQ ID NO: 51211 - RNA, 14 nt, Artificial Sequence
  Description of Artificial Sequence: Synthetic oligonucleotide
guaauaguuucucc

SEQ ID NO: 51212 - RNA, 13 nt, Artificial Sequence
  Description of Artificial Sequence: Synthetic oligonucleotide
aguuucuccaaau

SEQ ID NO: 51213 - RNA, 13 nt, Artificial Sequence
  Description of Artificial Sequence: Synthetic oligonucleotide
uacuuccuagaaa

SEQ ID NO: 51214 - RNA, 13 nt, Artificial Sequence
  Description of Artificial Sequence: Synthetic oligonucleotide
uacaccauauaug

SEQ ID NO: 51215 - RNA, 14 nt, Artificial Sequence
  Description of Artificial Sequence: Synthetic oligonucleotide
auauaugaauggag

SEQ ID NO: 51216 - RNA, 13 nt, Artificial Sequence
  Description of Artificial Sequence: Synthetic oligonucleotide
acgagaagaagau

SEQ ID NO: 51217 - RNA, 13 nt, Artificial Sequence
  Description of Artificial Sequence: Synthetic oligonucleotide
ucauuuacaggga

SEQ ID NO: 51218 - RNA, 13 nt, Artificial Sequence
  Description of Artificial Sequence: Synthetic oligonucleotide
cauuuacagggac

SEQ ID NO: 51219 - RNA, 10 nt, Artificial Sequence
  Description of Artificial Sequence: Synthetic oligonucleotide
agggaccuga

SEQ ID NO: 51220 - RNA, 14 nt, Artificial Sequence
  Description of Artificial Sequence: Synthetic oligonucleotide
uguuugacugcauc

SEQ ID NO: 51221 - RNA, 13 nt, Artificial Sequence
  Description of Artificial Sequence: Synthetic oligonucleotide
uuugacugcaucg

SEQ ID NO: 51222 - RNA, 12 nt, Artificial Sequence
  Description of Artificial Sequence: Synthetic oligonucleotide
gaguucacaggg

SEQ ID NO: 51223 - RNA, 13 nt, Artificial Sequence
  Description of Artificial Sequence: Synthetic oligonucleotide
ggcaccucugucc

SEQ ID NO: 51224 - RNA, 15 nt, Artificial Sequence
  Description of Artificial Sequence: Synthetic oligonucleotide
gguuugucuuuuuaa

SEQ ID NO: 51225 - RNA, 14 nt, Artificial Sequence
  Description of Artificial Sequence: Synthetic oligonucleotide
uuugucuuuuuaag

SEQ ID NO: 51226 - RNA, 13 nt, Artificial Sequence
  Description of Artificial Sequence: Synthetic oligonucleotide
ccuaaagguuguc

SEQ ID NO: 51227 - RNA, 12 nt, Artificial Sequence
  Description of Artificial Sequence: Synthetic oligonucleotide
aagguugucgac

SEQ ID NO: 51228 - RNA, 13 nt, Artificial Sequence
  Description of Artificial Sequence: Synthetic oligonucleotide
accuggcaauugu

SEQ ID NO: 51229 - RNA, 12 nt, Artificial Sequence
  Description of Artificial Sequence: Synthetic oligonucleotide
aguggugcgagg

SEQ ID NO: 51230 - RNA, 13 nt, Artificial Sequence
  Description of Artificial Sequence: Synthetic oligonucleotide
agagacaugaaau

SEQ ID NO: 51231 - RNA, 13 nt, Artificial Sequence
  Description of Artificial Sequence: Synthetic oligonucleotide
auauauuucucca

SEQ ID NO: 51232 - RNA, 10 nt, Artificial Sequence
  Description of Artificial Sequence: Synthetic oligonucleotide
caugaaggcu

SEQ ID NO: 51233 - RNA, 11 nt, Artificial Sequence
  Description of Artificial Sequence: Synthetic oligonucleotide
gcuggaguggu

SEQ ID NO: 51234 - RNA, 11 nt, Artificial Sequence
  Description of Artificial Sequence: Synthetic oligonucleotide
aggaagagagg

SEQ ID NO: 51235 - RNA, 12 nt, Artificial Sequence
  Description of Artificial Sequence: Synthetic oligonucleotide
cuugcaucgggc

SEQ ID NO: 51236 - RNA, 13 nt, Artificial Sequence
  Description of Artificial Sequence: Synthetic oligonucleotide
auauccuacugug

SEQ ID NO: 51237 - RNA, 13 nt, Artificial Sequence
  Description of Artificial Sequence: Synthetic oligonucleotide
uccuacuguguaa

SEQ ID NO: 51238 - RNA, 12 nt, Artificial Sequence
  Description of Artificial Sequence: Synthetic oligonucleotide
ccuuguagugua

SEQ ID NO: 51239 - RNA, 13 nt, Artificial Sequence
  Description of Artificial Sequence: Synthetic oligonucleotide
ucuuuguugauug

SEQ ID NO: 51240 - RNA, 14 nt, Artificial Sequence
  Description of Artificial Sequence: Synthetic oligonucleotide
uuuguugauugaaa

SEQ ID NO: 51241 - RNA, 15 nt, Artificial Sequence
  Description of Artificial Sequence: Synthetic oligonucleotide
uucuuuuucuuccau

SEQ ID NO: 51242 - RNA, 13 nt, Artificial Sequence
  Description of Artificial Sequence: Synthetic oligonucleotide
aaucuuccuucua

SEQ ID NO: 51243 - RNA, 13 nt, Artificial Sequence
  Description of Artificial Sequence: Synthetic oligonucleotide
uugaaugcuucau

SEQ ID NO: 51244 - RNA, 13 nt, Artificial Sequence
  Description of Artificial Sequence: Synthetic oligonucleotide
ugaaugcuucaug

SEQ ID NO: 51245 - RNA, 13 nt, Artificial Sequence
  Description of Artificial Sequence: Synthetic oligonucleotide
aauucuacuuuga

SEQ ID NO: 51246 - RNA, 13 nt, Artificial Sequence
  Description of Artificial Sequence: Synthetic oligonucleotide
agcaacuacagac

SEQ ID NO: 51247 - RNA, 13 nt, Artificial Sequence
  Description of Artificial Sequence: Synthetic oligonucleotide
gaccaaggucaac

SEQ ID NO: 51248 - RNA, 13 nt, Artificial Sequence
  Description of Artificial Sequence: Synthetic oligonucleotide
cgacuaucucgac

SEQ ID NO: 51249 - RNA, 13 nt, Artificial Sequence
  Description of Artificial Sequence: Synthetic oligonucleotide
aaccuucccaaac

SEQ ID NO: 51250 - RNA, 14 nt, Artificial Sequence
  Description of Artificial Sequence: Synthetic oligonucleotide
ccaagcuuagaacu

SEQ ID NO: 51251 - RNA, 15 nt, Artificial Sequence
  Description of Artificial Sequence: Synthetic oligonucleotide
agcuuagaacuuuaa

SEQ ID NO: 51252 - RNA, 11 nt, Artificial Sequence
  Description of Artificial Sequence: Synthetic oligonucleotide
aagaccaccac

SEQ ID NO: 51253 - RNA, 14 nt, Artificial Sequence
  Description of Artificial Sequence: Synthetic oligonucleotide
gcgagaaauaaagu

SEQ ID NO: 51254 - RNA, 14 nt, Artificial Sequence
  Description of Artificial Sequence: Synthetic oligonucleotide
cgagaaauaaaguu

SEQ ID NO: 51255 - RNA, 12 nt, Artificial Sequence
  Description of Artificial Sequence: Synthetic oligonucleotide
aggaaaugaucc

SEQ ID NO: 51256 - RNA, 13 nt, Artificial Sequence
  Description of Artificial Sequence: Synthetic oligonucleotide
gaagaaaugaaac

SEQ ID NO: 51257 - RNA, 13 nt, Artificial Sequence
  Description of Artificial Sequence: Synthetic oligonucleotide
guuuccauccucc

SEQ ID NO: 51258 - RNA, 15 nt, Artificial Sequence
  Description of Artificial Sequence: Synthetic oligonucleotide
acugaaaaucuuuga

SEQ ID NO: 51259 - RNA, 11 nt, Artificial Sequence
  Description of Artificial Sequence: Synthetic oligonucleotide
ugccguucagg

SEQ ID NO: 51260 - RNA, 13 nt, Artificial Sequence
  Description of Artificial Sequence: Synthetic oligonucleotide
caggguccagaag

SEQ ID NO: 51261 - RNA, 13 nt, Artificial Sequence
  Description of Artificial Sequence: Synthetic oligonucleotide
ucaagacugcuug

SEQ ID NO: 51262 - RNA, 13 nt, Artificial Sequence
  Description of Artificial Sequence: Synthetic oligonucleotide
uccaugucuuugg

SEQ ID NO: 51263 - RNA, 11 nt, Artificial Sequence
  Description of Artificial Sequence: Synthetic oligonucleotide
gccugaaacac

SEQ ID NO: 51264 - RNA, 12 nt, Artificial Sequence
  Description of Artificial Sequence: Synthetic oligonucleotide
ucucuguaccuc

SEQ ID NO: 51265 - RNA, 12 nt, Artificial Sequence
  Description of Artificial Sequence: Synthetic oligonucleotide
agcaagacaaga

SEQ ID NO: 51266 - RNA, 13 nt, Artificial Sequence
  Description of Artificial Sequence: Synthetic oligonucleotide
gcaagacaagaaa

SEQ ID NO: 51267 - RNA, 12 nt, Artificial Sequence
  Description of Artificial Sequence: Synthetic oligonucleotide
uguacaagaucc

SEQ ID NO: 51268 - RNA, 12 nt, Artificial Sequence
  Description of Artificial Sequence: Synthetic oligonucleotide
cguacuugcaga

SEQ ID NO: 51269 - RNA, 13 nt, Artificial Sequence
  Description of Artificial Sequence: Synthetic oligonucleotide
cgaucgauacaga

SEQ ID NO: 51270 - RNA, 13 nt, Artificial Sequence
  Description of Artificial Sequence: Synthetic oligonucleotide
uauaaaaauaaau

SEQ ID NO: 51271 - RNA, 13 nt, Artificial Sequence
  Description of Artificial Sequence: Synthetic oligonucleotide
uaaaaauaaauau

SEQ ID NO: 51272 - RNA, 13 nt, Artificial Sequence
  Description of Artificial Sequence: Synthetic oligonucleotide
uuugacugcugug

SEQ ID NO: 51273 - RNA, 13 nt, Artificial Sequence
  Description of Artificial Sequence: Synthetic oligonucleotide
ggagaugagagac

SEQ ID NO: 51274 - RNA, 10 nt, Artificial Sequence
  Description of Artificial Sequence: Synthetic oligonucleotide
ucccacuugg

SEQ ID NO: 51275 - RNA, 10 nt, Artificial Sequence
  Description of Artificial Sequence: Synthetic oligonucleotide
guucacggcc

SEQ ID NO: 51276 - RNA, 12 nt, Artificial Sequence
  Description of Artificial Sequence: Synthetic oligonucleotide
accaucacacca

SEQ ID NO: 51277 - RNA, 10 nt, Artificial Sequence
  Description of Artificial Sequence: Synthetic oligonucleotide
cugcggguuu

SEQ ID NO: 51278 - RNA, 9 nt, Artificial Sequence
  Description of Artificial Sequence: Synthetic oligonucleotide
uccaguuug

SEQ ID NO: 51279 - RNA, 12 nt, Artificial Sequence
  Description of Artificial Sequence: Synthetic oligonucleotide
uuaaggacuucu

SEQ ID NO: 51280 - RNA, 12 nt, Artificial Sequence
  Description of Artificial Sequence: Synthetic oligonucleotide
agugggacagag

SEQ ID NO: 51281 - RNA, 13 nt, Artificial Sequence
  Description of Artificial Sequence: Synthetic oligonucleotide
auuuguuauugug

SEQ ID NO: 51282 - RNA, 12 nt, Artificial Sequence
  Description of Artificial Sequence: Synthetic oligonucleotide
ucaaaugcauuu

SEQ ID NO: 51283 - RNA, 9 nt, Artificial Sequence
  Description of Artificial Sequence: Synthetic oligonucleotide
aggaaagcc

SEQ ID NO: 51284 - RNA, 10 nt, Artificial Sequence
  Description of Artificial Sequence: Synthetic oligonucleotide
ggaaagcccu

SEQ ID NO: 51285 - RNA, 11 nt, Artificial Sequence
  Description of Artificial Sequence: Synthetic oligonucleotide
ccagcauggcc

SEQ ID NO: 51286 - RNA, 10 nt, Artificial Sequence
  Description of Artificial Sequence: Synthetic oligonucleotide
uucucccuga

SEQ ID NO: 51287 - RNA, 11 nt, Artificial Sequence
  Description of Artificial Sequence: Synthetic oligonucleotide
aagaagcccuu

SEQ ID NO: 51288 - RNA, 11 nt, Artificial Sequence
  Description of Artificial Sequence: Synthetic oligonucleotide
gaagcccuuca

SEQ ID NO: 51289 - RNA, 10 nt, Artificial Sequence
  Description of Artificial Sequence: Synthetic oligonucleotide
cccuucagcg

SEQ ID NO: 51290 - RNA, 10 nt, Artificial Sequence
  Description of Artificial Sequence: Synthetic oligonucleotide
cuucagcggc

SEQ ID NO: 51291 - RNA, 11 nt, Artificial Sequence
  Description of Artificial Sequence: Synthetic oligonucleotide
cagcggccagu

SEQ ID NO: 51292 - RNA, 11 nt, Artificial Sequence
  Description of Artificial Sequence: Synthetic oligonucleotide
gaaaagcuccg

SEQ ID NO: 51293 - RNA, 10 nt, Artificial Sequence
  Description of Artificial Sequence: Synthetic oligonucleotide
aaagcuccgg

SEQ ID NO: 51294 - RNA, 12 nt, Artificial Sequence
  Description of Artificial Sequence: Synthetic oligonucleotide
gucaacagucug

SEQ ID NO: 51295 - RNA, 12 nt, Artificial Sequence
  Description of Artificial Sequence: Synthetic oligonucleotide
agaguucaaaag

SEQ ID NO: 51296 - RNA, 12 nt, Artificial Sequence
  Description of Artificial Sequence: Synthetic oligonucleotide
gaguucaaaagc

SEQ ID NO: 51297 - RNA, 11 nt, Artificial Sequence
  Description of Artificial Sequence: Synthetic oligonucleotide
ucaaaagcccu

SEQ ID NO: 51298 - RNA, 11 nt, Artificial Sequence
  Description of Artificial Sequence: Synthetic oligonucleotide
caaaagcccuu

SEQ ID NO: 51299 - RNA, 11 nt, Artificial Sequence
  Description of Artificial Sequence: Synthetic oligonucleotide
aaagcccuuca

SEQ ID NO: 51300 - RNA, 11 nt, Artificial Sequence
  Description of Artificial Sequence: Synthetic oligonucleotide
aagcccuucag

SEQ ID NO: 51301 - RNA, 12 nt, Artificial Sequence
  Description of Artificial Sequence: Synthetic oligonucleotide
ugaagccgcucg

SEQ ID NO: 51302 - RNA, 11 nt, Artificial Sequence
  Description of Artificial Sequence: Synthetic oligonucleotide
acgccagucaa

SEQ ID NO: 51303 - RNA, 12 nt, Artificial Sequence
  Description of Artificial Sequence: Synthetic oligonucleotide
ucuuggugcgug

SEQ ID NO: 51304 - RNA, 13 nt, Artificial Sequence
  Description of Artificial Sequence: Synthetic oligonucleotide
uuggauucaucag

SEQ ID NO: 51305 - RNA, 12 nt, Artificial Sequence
  Description of Artificial Sequence: Synthetic oligonucleotide
ggaauaccuaag

SEQ ID NO: 51306 - RNA, 11 nt, Artificial Sequence
  Description of Artificial Sequence: Synthetic oligonucleotide
uuugaggcuca

SEQ ID NO: 51307 - RNA, 10 nt, Artificial Sequence
  Description of Artificial Sequence: Synthetic oligonucleotide
cuacaauugg

SEQ ID NO: 51308 - RNA, 11 nt, Artificial Sequence
  Description of Artificial Sequence: Synthetic oligonucleotide
aguuaggagcc

SEQ ID NO: 51309 - RNA, 12 nt, Artificial Sequence
  Description of Artificial Sequence: Synthetic oligonucleotide
gucaauauccac

SEQ ID NO: 51310 - RNA, 12 nt, Artificial Sequence
  Description of Artificial Sequence: Synthetic oligonucleotide
uguucagucaca

SEQ ID NO: 51311 - RNA, 11 nt, Artificial Sequence
  Description of Artificial Sequence: Synthetic oligonucleotide
cacacacauac

SEQ ID NO: 51312 - RNA, 11 nt, Artificial Sequence
  Description of Artificial Sequence: Synthetic oligonucleotide
uccuuuugcuu

SEQ ID NO: 51313 - RNA, 15 nt, Artificial Sequence
  Description of Artificial Sequence: Synthetic oligonucleotide
uuuaaaguaauuuuu

SEQ ID NO: 51314 - RNA, 12 nt, Artificial Sequence
  Description of Artificial Sequence: Synthetic oligonucleotide
aacagucaaugg

SEQ ID NO: 51315 - RNA, 12 nt, Artificial Sequence
  Description of Artificial Sequence: Synthetic oligonucleotide
cgacaaaccaau

SEQ ID NO: 51316 - RNA, 11 nt, Artificial Sequence
  Description of Artificial Sequence: Synthetic oligonucleotide
cugcuaccacu

SEQ ID NO: 51317 - RNA, 12 nt, Artificial Sequence
  Description of Artificial Sequence: Synthetic oligonucleotide
caagcggucuua

SEQ ID NO: 51318 - RNA, 12 nt, Artificial Sequence
  Description of Artificial Sequence: Synthetic oligonucleotide
gucuuaccggcu

SEQ ID NO: 51319 - RNA, 10 nt, Artificial Sequence
  Description of Artificial Sequence: Synthetic oligonucleotide
auggguuacc

SEQ ID NO: 51320 - RNA, 10 nt, Artificial Sequence
  Description of Artificial Sequence: Synthetic oligonucleotide
uuaccugcga

SEQ ID NO: 51321 - RNA, 11 nt, Artificial Sequence
  Description of Artificial Sequence: Synthetic oligonucleotide
aucuugcugag

SEQ ID NO: 51322 - RNA, 12 nt, Artificial Sequence
  Description of Artificial Sequence: Synthetic oligonucleotide
gcauaaaacagu

SEQ ID NO: 51323 - RNA, 11 nt, Artificial Sequence
  Description of Artificial Sequence: Synthetic oligonucleotide
uccuuuauccu

SEQ ID NO: 51324 - RNA, 11 nt, Artificial Sequence
  Description of Artificial Sequence: Synthetic oligonucleotide
aacgcaaguug

SEQ ID NO: 51325 - RNA, 12 nt, Artificial Sequence
  Description of Artificial Sequence: Synthetic oligonucleotide
aacugaaaccau

SEQ ID NO: 51326 - RNA, 13 nt, Artificial Sequence
  Description of Artificial Sequence: Synthetic oligonucleotide
cuuuguuaaauau

SEQ ID NO: 51327 - RNA, 13 nt, Artificial Sequence
  Description of Artificial Sequence: Synthetic oligonucleotide
uauauuaaaaguu

SEQ ID NO: 51328 - RNA, 12 nt, Artificial Sequence
  Description of Artificial Sequence: Synthetic oligonucleotide
uuuugacuuaac

SEQ ID NO: 51329 - RNA, 12 nt, Artificial Sequence
  Description of Artificial Sequence: Synthetic oligonucleotide
caaacucagcac

SEQ ID NO: 51330 - RNA, 10 nt, Artificial Sequence
  Description of Artificial Sequence: Synthetic oligonucleotide
gcugaccuca

SEQ ID NO: 51331 - RNA, 13 nt, Artificial Sequence
  Description of Artificial Sequence: Synthetic oligonucleotide
uuauucagaucgc

SEQ ID NO: 51332 - RNA, 12 nt, Artificial Sequence
  Description of Artificial Sequence: Synthetic oligonucleotide
ggguucugggau

SEQ ID NO: 51333 - RNA, 14 nt, Artificial Sequence
  Description of Artificial Sequence: Synthetic oligonucleotide
uauuggaaauuaug

SEQ ID NO: 51334 - RNA, 12 nt, Artificial Sequence
  Description of Artificial Sequence: Synthetic oligonucleotide
uggaagcacuag

SEQ ID NO: 51335 - RNA, 12 nt, Artificial Sequence
  Description of Artificial Sequence: Synthetic oligonucleotide
uuuuuaugugga

SEQ ID NO: 51336 - RNA, 11 nt, Artificial Sequence
  Description of Artificial Sequence: Synthetic oligonucleotide
gaauugguaga

SEQ ID NO: 51337 - RNA, 12 nt, Artificial Sequence
  Description of Artificial Sequence: Synthetic oligonucleotide
uagacuuggaga

SEQ ID NO: 51338 - RNA, 12 nt, Artificial Sequence
  Description of Artificial Sequence: Synthetic oligonucleotide
uacaguauucca

SEQ ID NO: 51339 - RNA, 14 nt, Artificial Sequence
  Description of Artificial Sequence: Synthetic oligonucleotide
cacugaugaauuaa

SEQ ID NO: 51340 - RNA, 11 nt, Artificial Sequence
  Description of Artificial Sequence: Synthetic oligonucleotide
cacaucaucac

SEQ ID NO: 51341 - RNA, 12 nt, Artificial Sequence
  Description of Artificial Sequence: Synthetic oligonucleotide
ucaccaaacaga

SEQ ID NO: 51342 - RNA, 11 nt, Artificial Sequence
  Description of Artificial Sequence: Synthetic oligonucleotide
gaacaugaugg

SEQ ID NO: 51343 - RNA, 11 nt, Artificial Sequence
  Description of Artificial Sequence: Synthetic oligonucleotide
auguagacugc

SEQ ID NO: 51344 - RNA, 12 nt, Artificial Sequence
  Description of Artificial Sequence: Synthetic oligonucleotide
gaucuauuuaug

SEQ ID NO: 51345 - RNA, 11 nt, Artificial Sequence
  Description of Artificial Sequence: Synthetic oligonucleotide
cacuauuauca

SEQ ID NO: 51346 - RNA, 10 nt, Artificial Sequence
  Description of Artificial Sequence: Synthetic oligonucleotide
ucaguucugc

SEQ ID NO: 51347 - RNA, 12 nt, Artificial Sequence
  Description of Artificial Sequence: Synthetic oligonucleotide
gauuaaaccuac

SEQ ID NO: 51348 - RNA, 12 nt, Artificial Sequence
  Description of Artificial Sequence: Synthetic oligonucleotide
uaaaauccuucu

SEQ ID NO: 51349 - RNA, 11 nt, Artificial Sequence
  Description of Artificial Sequence: Synthetic oligonucleotide
augcuguagac

SEQ ID NO: 51350 - RNA, 12 nt, Artificial Sequence
  Description of Artificial Sequence: Synthetic oligonucleotide
ugauaggaauag

SEQ ID NO: 51351 - RNA, 10 nt, Artificial Sequence
  Description of Artificial Sequence: Synthetic oligonucleotide
auggcccuga

SEQ ID NO: 51352 - RNA, 10 nt, Artificial Sequence
  Description of Artificial Sequence: Synthetic oligonucleotide
uccucaagca

SEQ ID NO: 51353 - RNA, 9 nt, Artificial Sequence
  Description of Artificial Sequence: Synthetic oligonucleotide
uucagccca

SEQ ID NO: 51354 - RNA, 10 nt, Artificial Sequence
  Description of Artificial Sequence: Synthetic oligonucleotide
cugcugaacc

SEQ ID NO: 51355 - RNA, 11 nt, Artificial Sequence
  Description of Artificial Sequence: Synthetic oligonucleotide
aguucucuuca

SEQ ID NO: 51356 - RNA, 10 nt, Artificial Sequence
  Description of Artificial Sequence: Synthetic oligonucleotide
cagccuagag

SEQ ID NO: 51357 - RNA, 12 nt, Artificial Sequence
  Description of Artificial Sequence: Synthetic oligonucleotide
ucugugaagugu

SEQ ID NO: 51358 - RNA, 13 nt, Artificial Sequence
  Description of Artificial Sequence: Synthetic oligonucleotide
gagaaaauuucaa

SEQ ID NO: 51359 - RNA, 10 nt, Artificial Sequence
  Description of Artificial Sequence: Synthetic oligonucleotide
auccuccuga

SEQ ID NO: 51360 - RNA, 11 nt, Artificial Sequence
  Description of Artificial Sequence: Synthetic oligonucleotide
ugacaucauau

SEQ ID NO: 51361 - RNA, 12 nt, Artificial Sequence
  Description of Artificial Sequence: Synthetic oligonucleotide
aucuucaucaua

SEQ ID NO: 51362 - RNA, 12 nt, Artificial Sequence
  Description of Artificial Sequence: Synthetic oligonucleotide
acuagcuauuaa

SEQ ID NO: 51363 - RNA, 13 nt, Artificial Sequence
  Description of Artificial Sequence: Synthetic oligonucleotide
cucuacuaaaaau

SEQ ID NO: 51364 - RNA, 11 nt, Artificial Sequence
  Description of Artificial Sequence: Synthetic oligonucleotide
cuaucucgccu

SEQ ID NO: 51365 - RNA, 12 nt, Artificial Sequence
  Description of Artificial Sequence: Synthetic oligonucleotide
uucgguccaguu

SEQ ID NO: 51366 - RNA, 10 nt, Artificial Sequence
  Description of Artificial Sequence: Synthetic oligonucleotide
auguagccgc

SEQ ID NO: 51367 - RNA, 11 nt, Artificial Sequence
  Description of Artificial Sequence: Synthetic oligonucleotide
gaggagacuug

SEQ ID NO: 51368 - RNA, 11 nt, Artificial Sequence
  Description of Artificial Sequence: Synthetic oligonucleotide
aguagugagga

SEQ ID NO: 51369 - RNA, 13 nt, Artificial Sequence
  Description of Artificial Sequence: Synthetic oligonucleotide
agaugaguacaaa

SEQ ID NO: 51370 - RNA, 12 nt, Artificial Sequence
  Description of Artificial Sequence: Synthetic oligonucleotide
uuguuaaugggc

SEQ ID NO: 51371 - RNA, 12 nt, Artificial Sequence
  Description of Artificial Sequence: Synthetic oligonucleotide
uuuuaauuuauu

SEQ ID NO: 51372 - RNA, 11 nt, Artificial Sequence
  Description of Artificial Sequence: Synthetic oligonucleotide
auuuaaauaug

SEQ ID NO: 51373 - RNA, 12 nt, Artificial Sequence
  Description of Artificial Sequence: Synthetic oligonucleotide
auccuuuguuuc

SEQ ID NO: 51374 - RNA, 13 nt, Artificial Sequence
  Description of Artificial Sequence: Synthetic oligonucleotide
gucuaaguguuug

SEQ ID NO: 51375 - RNA, 11 nt, Artificial Sequence
  Description of Artificial Sequence: Synthetic oligonucleotide
ccugugacaaa

SEQ ID NO: 51376 - RNA, 12 nt, Artificial Sequence
  Description of Artificial Sequence: Synthetic oligonucleotide
caggcugaauua

SEQ ID NO: 51377 - RNA, 13 nt, Artificial Sequence
  Description of Artificial Sequence: Synthetic oligonucleotide
ucauucuuacaau

SEQ ID NO: 51378 - RNA, 14 nt, Artificial Sequence
  Description of Artificial Sequence: Synthetic oligonucleotide
cauucuuacaauug

SEQ ID NO: 51379 - RNA, 11 nt, Artificial Sequence
  Description of Artificial Sequence: Synthetic oligonucleotide
agagaguguac

SEQ ID NO: 51380 - RNA, 11 nt, Artificial Sequence
  Description of Artificial Sequence: Synthetic oligonucleotide
gaacucagcag

SEQ ID NO: 51381 - RNA, 12 nt, Artificial Sequence
  Description of Artificial Sequence: Synthetic oligonucleotide
uuauuuucagua

SEQ ID NO: 51382 - RNA, 11 nt, Artificial Sequence
  Description of Artificial Sequence: Synthetic oligonucleotide
cuuaaauggaa

SEQ ID NO: 51383 - RNA, 12 nt, Artificial Sequence
  Description of Artificial Sequence: Synthetic oligonucleotide
gccuaaaauugu

SEQ ID NO: 51384 - RNA, 12 nt, Artificial Sequence
  Description of Artificial Sequence: Synthetic oligonucleotide
acuaacaucugg

SEQ ID NO: 51385 - RNA, 11 nt, Artificial Sequence
  Description of Artificial Sequence: Synthetic oligonucleotide
gacugugagcu

SEQ ID NO: 51386 - RNA, 13 nt, Artificial Sequence
  Description of Artificial Sequence: Synthetic oligonucleotide
gcuuuuuauuaau

SEQ ID NO: 51387 - RNA, 12 nt, Artificial Sequence
  Description of Artificial Sequence: Synthetic oligonucleotide
ucuucuuacauu

SEQ ID NO: 51388 - RNA, 14 nt, Artificial Sequence
  Description of Artificial Sequence: Synthetic oligonucleotide
auuuguaaaaaugu

SEQ ID NO: 51389 - RNA, 14 nt, Artificial Sequence
  Description of Artificial Sequence: Synthetic oligonucleotide
ucuuaauucauauu

SEQ ID NO: 51390 - RNA, 12 nt, Artificial Sequence
  Description of Artificial Sequence: Synthetic oligonucleotide
aacuaaucauga

SEQ ID NO: 51391 - RNA, 11 nt, Artificial Sequence
  Description of Artificial Sequence: Synthetic oligonucleotide
cugcucuuggg

SEQ ID NO: 51392 - RNA, 12 nt, Artificial Sequence
  Description of Artificial Sequence: Synthetic oligonucleotide
aguagcuuugag

SEQ ID NO: 51393 - RNA, 13 nt, Artificial Sequence
  Description of Artificial Sequence: Synthetic oligonucleotide
acguaauauuuca

SEQ ID NO: 51394 - RNA, 12 nt, Artificial Sequence
  Description of Artificial Sequence: Synthetic oligonucleotide
auucucuucacu

SEQ ID NO: 51395 - RNA, 13 nt, Artificial Sequence
  Description of Artificial Sequence: Synthetic oligonucleotide
uaaugcuaagaaa

SEQ ID NO: 51396 - RNA, 11 nt, Artificial Sequence
  Description of Artificial Sequence: Synthetic oligonucleotide
cugaaaaucaa

SEQ ID NO: 51397 - RNA, 13 nt, Artificial Sequence
  Description of Artificial Sequence: Synthetic oligonucleotide
auaugauuacuuu

SEQ ID NO: 51398 - RNA, 13 nt, Artificial Sequence
  Description of Artificial Sequence: Synthetic oligonucleotide
auuuuguucuaca

SEQ ID NO: 51399 - RNA, 11 nt, Artificial Sequence
  Description of Artificial Sequence: Synthetic oligonucleotide
ccgggacucuc

SEQ ID NO: 51400 - RNA, 13 nt, Artificial Sequence
  Description of Artificial Sequence: Synthetic oligonucleotide
cuuuaaaguaaag

SEQ ID NO: 51401 - RNA, 12 nt, Artificial Sequence
  Description of Artificial Sequence: Synthetic oligonucleotide
cuggaagccugg

SEQ ID NO: 51402 - RNA, 13 nt, Artificial Sequence
  Description of Artificial Sequence: Synthetic oligonucleotide
aaacaaaagagag

SEQ ID NO: 51403 - RNA, 12 nt, Artificial Sequence
  Description of Artificial Sequence: Synthetic oligonucleotide
ucaguuaugccg

SEQ ID NO: 51404 - RNA, 12 nt, Artificial Sequence
  Description of Artificial Sequence: Synthetic oligonucleotide
aaaagaagucca

SEQ ID NO: 51405 - RNA, 10 nt, Artificial Sequence
  Description of Artificial Sequence: Synthetic oligonucleotide
ggugagguua

SEQ ID NO: 51406 - RNA, 10 nt, Artificial Sequence
  Description of Artificial Sequence: Synthetic oligonucleotide
ggaagaggac

SEQ ID NO: 51407 - RNA, 12 nt, Artificial Sequence
  Description of Artificial Sequence: Synthetic oligonucleotide
agcaaguauugu

SEQ ID NO: 51408 - RNA, 11 nt, Artificial Sequence
  Description of Artificial Sequence: Synthetic oligonucleotide
uuguagcacuc

SEQ ID NO: 51409 - RNA, 13 nt, Artificial Sequence
  Description of Artificial Sequence: Synthetic oligonucleotide
caaaaccacaaau

SEQ ID NO: 51410 - RNA, 11 nt, Artificial Sequence
  Description of Artificial Sequence: Synthetic oligonucleotide
aagcccauaca

SEQ ID NO: 51411 - RNA, 10 nt, Artificial Sequence
  Description of Artificial Sequence: Synthetic oligonucleotide
gcccauacag

SEQ ID NO: 51412 - RNA, 11 nt, Artificial Sequence
  Description of Artificial Sequence: Synthetic oligonucleotide
agaaaccuucc

SEQ ID NO: 51413 - RNA, 9 nt, Artificial Sequence
  Description of Artificial Sequence: Synthetic oligonucleotide
uauaccuac

SEQ ID NO: 51414 - RNA, 12 nt, Artificial Sequence
  Description of Artificial Sequence: Synthetic oligonucleotide
ccaguuuucgga

SEQ ID NO: 51415 - RNA, 8 nt, Artificial Sequence
  Description of Artificial Sequence: Synthetic oligonucleotide
gaacaggg

SEQ ID NO: 51416 - RNA, 12 nt, Artificial Sequence
  Description of Artificial Sequence: Synthetic oligonucleotide
uaacuuuccagu

SEQ ID NO: 51417 - RNA, 13 nt, Artificial Sequence
  Description of Artificial Sequence: Synthetic oligonucleotide
aaguuugguuuug

SEQ ID NO: 51418 - RNA, 11 nt, Artificial Sequence
  Description of Artificial Sequence: Synthetic oligonucleotide
uucccacugua

SEQ ID NO: 51419 - RNA, 12 nt, Artificial Sequence
  Description of Artificial Sequence: Synthetic oligonucleotide
gauaccauauga

SEQ ID NO: 51420 - RNA, 10 nt, Artificial Sequence
  Description of Artificial Sequence: Synthetic oligonucleotide
acaugggcug

SEQ ID NO: 51421 - RNA, 12 nt, Artificial Sequence
  Description of Artificial Sequence: Synthetic oligonucleotide
aacuuuuucaua

SEQ ID NO: 51422 - RNA, 11 nt, Artificial Sequence
  Description of Artificial Sequence: Synthetic oligonucleotide
augaggccgga

SEQ ID NO: 51423 - RNA, 10 nt, Artificial Sequence
  Description of Artificial Sequence: Synthetic oligonucleotide
cugcauuugu

SEQ ID NO: 51424 - RNA, 12 nt, Artificial Sequence
  Description of Artificial Sequence: Synthetic oligonucleotide
auguuuacuacc

SEQ ID NO: 51425 - RNA, 14 nt, Artificial Sequence
  Description of Artificial Sequence: Synthetic oligonucleotide
auuuuuugaugaaa

SEQ ID NO: 51426 - RNA, 13 nt, Artificial Sequence
  Description of Artificial Sequence: Synthetic oligonucleotide
agugugugaauuu

SEQ ID NO: 51427 - RNA, 12 nt, Artificial Sequence
  Description of Artificial Sequence: Synthetic oligonucleotide
agcaauguaugu

SEQ ID NO: 51428 - RNA, 13 nt, Artificial Sequence
  Description of Artificial Sequence: Synthetic oligonucleotide
aagcacauauaua

SEQ ID NO: 51429 - RNA, 13 nt, Artificial Sequence
  Description of Artificial Sequence: Synthetic oligonucleotide
uaauaguuucucc

SEQ ID NO: 51430 - RNA, 12 nt, Artificial Sequence
  Description of Artificial Sequence: Synthetic oligonucleotide
guuucuccaaau

SEQ ID NO: 51431 - RNA, 12 nt, Artificial Sequence
  Description of Artificial Sequence: Synthetic oligonucleotide
acuuccuagaaa

SEQ ID NO: 51432 - RNA, 12 nt, Artificial Sequence
  Description of Artificial Sequence: Synthetic oligonucleotide
acaccauauaug

SEQ ID NO: 51433 - RNA, 13 nt, Artificial Sequence
  Description of Artificial Sequence: Synthetic oligonucleotide
uauaugaauggag

SEQ ID NO: 51434 - RNA, 12 nt, Artificial Sequence
  Description of Artificial Sequence: Synthetic oligonucleotide
cauuuacaggga

SEQ ID NO: 51435 - RNA, 12 nt, Artificial Sequence
  Description of Artificial Sequence: Synthetic oligonucleotide
auuuacagggac

SEQ ID NO: 51436 - RNA, 9 nt, Artificial Sequence
  Description of Artificial Sequence: Synthetic oligonucleotide
gggaccuga

SEQ ID NO: 51437 - RNA, 13 nt, Artificial Sequence
  Description of Artificial Sequence: Synthetic oligonucleotide
guuugacugcauc

SEQ ID NO: 51438 - RNA, 12 nt, Artificial Sequence
  Description of Artificial Sequence: Synthetic oligonucleotide
uugacugcaucg

SEQ ID NO: 51439 - RNA, 11 nt, Artificial Sequence
  Description of Artificial Sequence: Synthetic oligonucleotide
aguucacaggg

SEQ ID NO: 51440 - RNA, 12 nt, Artificial Sequence
  Description of Artificial Sequence: Synthetic oligonucleotide
gcaccucugucc

SEQ ID NO: 51441 - RNA, 14 nt, Artificial Sequence
  Description of Artificial Sequence: Synthetic oligonucleotide
guuugucuuuuuaa

SEQ ID NO: 51442 - RNA, 13 nt, Artificial Sequence
  Description of Artificial Sequence: Synthetic oligonucleotide
uugucuuuuuaag

SEQ ID NO: 51443 - RNA, 12 nt, Artificial Sequence
  Description of Artificial Sequence: Synthetic oligonucleotide
cuaaagguuguc

SEQ ID NO: 51444 - RNA, 11 nt, Artificial Sequence
  Description of Artificial Sequence: Synthetic oligonucleotide
agguugucgac

SEQ ID NO: 51445 - RNA, 12 nt, Artificial Sequence
  Description of Artificial Sequence: Synthetic oligonucleotide
ccuggcaauugu

SEQ ID NO: 51446 - RNA, 11 nt, Artificial Sequence
  Description of Artificial Sequence: Synthetic oligonucleotide
guggugcgagg

SEQ ID NO: 51447 - RNA, 12 nt, Artificial Sequence
  Description of Artificial Sequence: Synthetic oligonucleotide
gagacaugaaau

SEQ ID NO: 51448 - RNA, 12 nt, Artificial Sequence
  Description of Artificial Sequence: Synthetic oligonucleotide
uauauuucucca

SEQ ID NO: 51449 - RNA, 9 nt, Artificial Sequence
  Description of Artificial Sequence: Synthetic oligonucleotide
augaaggcu

SEQ ID NO: 51450 - RNA, 10 nt, Artificial Sequence
  Description of Artificial Sequence: Synthetic oligonucleotide
cuggaguggu

SEQ ID NO: 51451 - RNA, 10 nt, Artificial Sequence
  Description of Artificial Sequence: Synthetic oligonucleotide
ggaagagagg

SEQ ID NO: 51452 - RNA, 11 nt, Artificial Sequence
  Description of Artificial Sequence: Synthetic oligonucleotide
uugcaucgggc

SEQ ID NO: 51453 - RNA, 12 nt, Artificial Sequence
  Description of Artificial Sequence: Synthetic oligonucleotide
uauccuacugug

SEQ ID NO: 51454 - RNA, 12 nt, Artificial Sequence
  Description of Artificial Sequence: Synthetic oligonucleotide
ccuacuguguaa

SEQ ID NO: 51455 - RNA, 11 nt, Artificial Sequence
  Description of Artificial Sequence: Synthetic oligonucleotide
cuuguagugua

SEQ ID NO: 51456 - RNA, 12 nt, Artificial Sequence
  Description of Artificial Sequence: Synthetic oligonucleotide
cuuuguugauug

SEQ ID NO: 51457 - RNA, 13 nt, Artificial Sequence
  Description of Artificial Sequence: Synthetic oligonucleotide
uuguugauugaaa

SEQ ID NO: 51458 - RNA, 14 nt, Artificial Sequence
  Description of Artificial Sequence: Synthetic oligonucleotide
ucuuuuucuuccau

SEQ ID NO: 51459 - RNA, 12 nt, Artificial Sequence
  Description of Artificial Sequence: Synthetic oligonucleotide
aucuuccuucua

SEQ ID NO: 51460 - RNA, 12 nt, Artificial Sequence
  Description of Artificial Sequence: Synthetic oligonucleotide
ugaaugcuucau

SEQ ID NO: 51461 - RNA, 12 nt, Artificial Sequence
  Description of Artificial Sequence: Synthetic oligonucleotide
gaaugcuucaug

SEQ ID NO: 51462 - RNA, 12 nt, Artificial Sequence
  Description of Artificial Sequence: Synthetic oligonucleotide
auucuacuuuga

SEQ ID NO: 51463 - RNA, 12 nt, Artificial Sequence
  Description of Artificial Sequence: Synthetic oligonucleotide
gcaacuacagac

SEQ ID NO: 51464 - RNA, 12 nt, Artificial Sequence
  Description of Artificial Sequence: Synthetic oligonucleotide
accaaggucaac

SEQ ID NO: 51465 - RNA, 12 nt, Artificial Sequence
  Description of Artificial Sequence: Synthetic oligonucleotide
gacuaucucgac

SEQ ID NO: 51466 - RNA, 12 nt, Artificial Sequence
  Description of Artificial Sequence: Synthetic oligonucleotide
accuucccaaac

SEQ ID NO: 51467 - RNA, 13 nt, Artificial Sequence
  Description of Artificial Sequence: Synthetic oligonucleotide
caagcuuagaacu

SEQ ID NO: 51468 - RNA, 14 nt, Artificial Sequence
  Description of Artificial Sequence: Synthetic oligonucleotide
gcuuagaacuuuaa

SEQ ID NO: 51469 - RNA, 13 nt, Artificial Sequence
  Description of Artificial Sequence: Synthetic oligonucleotide
aacuuuaagcaac

SEQ ID NO: 51470 - RNA, 10 nt, Artificial Sequence
  Description of Artificial Sequence: Synthetic oligonucleotide
agaccaccac

SEQ ID NO: 51471 - RNA, 13 nt, Artificial Sequence
  Description of Artificial Sequence: Synthetic oligonucleotide
cgagaaauaaagu

SEQ ID NO: 51472 - RNA, 13 nt, Artificial Sequence
  Description of Artificial Sequence: Synthetic oligonucleotide
gagaaauaaaguu

SEQ ID NO: 51473 - RNA, 11 nt, Artificial Sequence
  Description of Artificial Sequence: Synthetic oligonucleotide
ggaaaugaucc

SEQ ID NO: 51474 - RNA, 12 nt, Artificial Sequence
  Description of Artificial Sequence: Synthetic oligonucleotide
aagaaaugaaac

SEQ ID NO: 51475 - RNA, 12 nt, Artificial Sequence
  Description of Artificial Sequence: Synthetic oligonucleotide
uuuccauccucc

SEQ ID NO: 51476 - RNA, 14 nt, Artificial Sequence
  Description of Artificial Sequence: Synthetic oligonucleotide
cugaaaaucuuuga

SEQ ID NO: 51477 - RNA, 10 nt, Artificial Sequence
  Description of Artificial Sequence: Synthetic oligonucleotide
gccguucagg

SEQ ID NO: 51478 - RNA, 12 nt, Artificial Sequence
  Description of Artificial Sequence: Synthetic oligonucleotide
aggguccagaag

SEQ ID NO: 51479 - RNA, 12 nt, Artificial Sequence
  Description of Artificial Sequence: Synthetic oligonucleotide
caagacugcuug

SEQ ID NO: 51480 - RNA, 12 nt, Artificial Sequence
  Description of Artificial Sequence: Synthetic oligonucleotide
ccaugucuuugg

SEQ ID NO: 51481 - RNA, 10 nt, Artificial Sequence
  Description of Artificial Sequence: Synthetic oligonucleotide
ccugaaacac

SEQ ID NO: 51482 - RNA, 11 nt, Artificial Sequence
  Description of Artificial Sequence: Synthetic oligonucleotide
cucuguaccuc

SEQ ID NO: 51483 - RNA, 11 nt, Artificial Sequence
  Description of Artificial Sequence: Synthetic oligonucleotide
gcaagacaaga

SEQ ID NO: 51484 - RNA, 12 nt, Artificial Sequence
  Description of Artificial Sequence: Synthetic oligonucleotide
caagacaagaaa

SEQ ID NO: 51485 - RNA, 11 nt, Artificial Sequence
  Description of Artificial Sequence: Synthetic oligonucleotide
guacaagaucc

SEQ ID NO: 51486 - RNA, 11 nt, Artificial Sequence
  Description of Artificial Sequence: Synthetic oligonucleotide
guacuugcaga

SEQ ID NO: 51487 - RNA, 12 nt, Artificial Sequence
  Description of Artificial Sequence: Synthetic oligonucleotide
gaucgauacaga

SEQ ID NO: 51488 - RNA, 12 nt, Artificial Sequence
  Description of Artificial Sequence: Synthetic oligonucleotide
auaaaaauaaau

SEQ ID NO: 51489 - RNA, 12 nt, Artificial Sequence
  Description of Artificial Sequence: Synthetic oligonucleotide
aaaaauaaauau

SEQ ID NO: 51490 - RNA, 12 nt, Artificial Sequence
  Description of Artificial Sequence: Synthetic oligonucleotide
uugacugcugug

SEQ ID NO: 51491 - RNA, 12 nt, Artificial Sequence
  Description of Artificial Sequence: Synthetic oligonucleotide
gagaugagagac

SEQ ID NO: 51492 - RNA, 9 nt, Artificial Sequence
  Description of Artificial Sequence: Synthetic oligonucleotide
cccacuugg

SEQ ID NO: 51493 - RNA, 3245 nt, Homo sapiens
cgcaggucgggaggacgagcaccgagucgagggcucgcucgucugggccgcccgagagucuuaaucgcgggcgcuugggccgccaucuuagauggcgggaguaagaggaaaacgauugugaggcgggaacggcuuucugcugccuuuuuugggccccgaaaagggucagcuggccgggcuuuggggcgcgugcccugaggcgcggagcgcguuugcuacgaugcgggggcugcucggggcuccguccccugggcuggggacgcgccgaaugugaccgccucccgcucccucacccgccgcggggaggaggagcgggcgagaagcugccgccgaacgacaggacguuggggcggccuggcucccucagguuuaagaauuguuuaagcugcaucaauggagcacauacagggagcuuggaagacgaucagcaaugguuuuggauucaaagaugccguguuugauggcuccagcugcaucucuccuacaauaguucagcaguuuggcuaucagcgccgggcaucagaugauggcaaacucacagauccuucuaagacaagcaacacuauccguguuuucuugccgaacaagcaaagaacaguggucaaugugcgaaauggaaugagcuugcaugacugccuuaugaaagcacucaaggugaggggccugcaaccagagugcugugcaguguucagacuucuccacgaacacaaagguaaaaaagcacgcuuagauuggaauacugaugcugcgucuuugauuggagaagaacuucaaguagauuuccuggaucauguuccccucacaacacacaacuuugcucggaagacguuccugaagcuugccuucugugacaucugucagaaauuccugcucaauggauuucgaugucagacuuguggcuacaaauuucaugagcacuguagcaccaaaguaccuacuauguguguggacuggaguaacaucagacaacucuuauuguuuccaaauuccacuauuggugauaguggagucccagcacuaccuucuuugacuaugcgucguaugcgagagucuguuuccaggaugccuguuaguucucagcacagauauucuacaccucacgccuucaccuuuaacaccuccagucccucaucugaagguucccucucccagaggcagaggucgacauccacaccuaauguccacauggucagcaccacccugccuguggacagcaggaugauugaggaugcaauucgaagucacagcgaaucagccucaccuucagcccuguccaguagccccaacaaucugagcccaacaggcuggucacagccgaaaacccccgugccagcacaaagagagcgggcaccaguaucugggacccaggagaaaaacaaaauuaggccucguggacagagagauucaagcuauuauugggaaauagaagccagugaagugaugcuguccacucggauugggucaggcucuuuuggaacuguuuauaaggguaaauggcacggagauguugcaguaaagauccuaaagguugucgacccaaccccagagcaauuccaggccuucaggaaugagguggcuguucugcgcaaaacacggcaugugaacauucugcuuuucaugggguacaugacaaaggacaaccuggcaauugugacccaguggugcgagggcagcagccucuacaaacaccugcauguccaggagaccaaguuucagauguuccagcuaauugacauugcccggcagacggcucagggaauggacuauuugcaugcaaagaacaucauccauagagacaugaaauccaacaauauauuucuccaugaaggcuuaacagugaaaauuggagauuuugguuuggcaacaguaaagucacgcuggagugguucucagcagguugaacaaccuacuggcucuguccucuggauggccccagaggugauccgaaugcaggauaacaacccauucaguuuccagucggaugucuacuccuauggcaucguauuguaugaacugaugacgggggagcuuccuuauucucacaucaacaaccgagaucagaucaucuucauggugggccgaggauaugccuccccagaucuuaguaagcuauauaagaacugccccaaagcaaugaagaggcugguagcugacugugugaagaaaguaaaggaagagaggccucuuuuuccccagauccugucuuccauugagcugcuccaacacucucuaccgaagaucaaccggagcgcuuccgagccauccuugcaucgggcagcccacacugaggauaucaaugcuugcacgcugaccacguccccgaggcugccugucuucuaguugacuuugcaccugucuucaggcugccaggggaggaggagaagccagcaggcaccacuuuucugcucccuuucuccagaggcagaacacauguuuucagagaagcugcugcuaaggaccuucuagacugcucacagggccuuaacuucauguugccuucuuuucuaucccuuugggcccugggagaaggaagccauuugcagugcugguguguccugcucccuccccacauuccccaugcucaaggcccagccuucuguagaugcgcaaguggauguugaugguaguacaaaaagcaggggcccagccccagcuguuggcuacaugaguauuuagaggaaguaagguagcaggcaguccagcccugauguggagacacaugggauuuuggaaaucagcuucuggaggaaugcaugucacaggcgggacuuucuucagagaguggugcagcgccagacauuuugcacauaaggcaccaaacagcccaggacugccgagacucuggccgcccgaaggagccugcuuugguacuauggaacuuuucuuaggggacacguccuccuuucacagcuucuaagguguccagugcauugggaugguuuuccaggcaaggcacucggccaauccgcaucucagcccucucagggagcagucuuccaucaugcugaauuuugucuuccaggagcugccccuauggggcggggccgcagggccagccuuguuucucuaacaaacaaacaaacaaacagccuuguuucucuagucacaucauguguauacaaggaagccaggaauacagguuuucuugaugauuuggguuuuaauuuuguuuuuauugcaccugacaaaauacaguuaucugauggucccucaauuauguuauuuuaauaaaauaaauuaaauuu

SEQ ID NO: 51494 - RNA, 19 nt, Artificial Sequence
  Description of Artificial Sequence: Synthetic oligonucleotide
cgcaggucgggaggacgag

SEQ ID NO: 51495 - RNA, 19 nt, Artificial Sequence
  Description of Artificial Sequence: Synthetic oligonucleotide
gcaccgagucgagggcucg

SEQ ID NO: 51496 - RNA, 19 nt, Artificial Sequence
  Description of Artificial Sequence: Synthetic oligonucleotide
gcucgucugggccgcccga

SEQ ID NO: 51497 - RNA, 19 nt, Artificial Sequence
  Description of Artificial Sequence: Synthetic oligonucleotide
agagucuuaaucgcgggcg

SEQ ID NO: 51498 - RNA, 19 nt, Artificial Sequence
  Description of Artificial Sequence: Synthetic oligonucleotide
gcuugggccgccaucuuag

SEQ ID NO: 51499 - RNA, 19 nt, Artificial Sequence
  Description of Artificial Sequence: Synthetic oligonucleotide
gauggcgggaguaagagga

SEQ ID NO: 51500 - RNA, 19 nt, Artificial Sequence
  Description of Artificial Sequence: Synthetic oligonucleotide
aaaacgauugugaggcggg

SEQ ID NO: 51501 - RNA, 19 nt, Artificial Sequence
  Description of Artificial Sequence: Synthetic oligonucleotide
gaacggcuuucugcugccu

SEQ ID NO: 51502 - RNA, 19 nt, Artificial Sequence
  Description of Artificial Sequence: Synthetic oligonucleotide
uuuuuugggccccgaaaag

SEQ ID NO: 51503 - RNA, 19 nt, Artificial Sequence
  Description of Artificial Sequence: Synthetic oligonucleotide
gggucagcuggccgggcuu

SEQ ID NO: 51504 - RNA, 19 nt, Artificial Sequence
  Description of Artificial Sequence: Synthetic oligonucleotide
uuggggcgcgugcccugag

SEQ ID NO: 51505 - RNA, 19 nt, Artificial Sequence
  Description of Artificial Sequence: Synthetic oligonucleotide
ggcgcggagcgcguuugcu

SEQ ID NO: 51506 - RNA, 19 nt, Artificial Sequence
  Description of Artificial Sequence: Synthetic oligonucleotide
uacgaugcgggggcugcuc

SEQ ID NO: 51507 - RNA, 19 nt, Artificial Sequence
  Description of Artificial Sequence: Synthetic oligonucleotide
cggggcuccguccccuggg

SEQ ID NO: 51508 - RNA, 19 nt, Artificial Sequence
  Description of Artificial Sequence: Synthetic oligonucleotide
gcuggggacgcgccgaaug

SEQ ID NO: 51509 - RNA, 19 nt, Artificial Sequence
  Description of Artificial Sequence: Synthetic oligonucleotide
gugaccgccucccgcuccc

SEQ ID NO: 51510 - RNA, 19 nt, Artificial Sequence
  Description of Artificial Sequence: Synthetic oligonucleotide
cucacccgccgcggggagg

SEQ ID NO: 51511 - RNA, 19 nt, Artificial Sequence
  Description of Artificial Sequence: Synthetic oligonucleotide
gaggagcgggcgagaagcu

SEQ ID NO: 51512 - RNA, 19 nt, Artificial Sequence
  Description of Artificial Sequence: Synthetic oligonucleotide
ugccgccgaacgacaggac

SEQ ID NO: 51513 - RNA, 19 nt, Artificial Sequence
  Description of Artificial Sequence: Synthetic oligonucleotide
cguuggggcggccuggcuc

SEQ ID NO: 51514 - RNA, 19 nt, Artificial Sequence
  Description of Artificial Sequence: Synthetic oligonucleotide
cccucagguuuaagaauug

SEQ ID NO: 51515 - RNA, 19 nt, Artificial Sequence
  Description of Artificial Sequence: Synthetic oligonucleotide
guuuaagcugcaucaaugg

SEQ ID NO: 51516 - RNA, 19 nt, Artificial Sequence
  Description of Artificial Sequence: Synthetic oligonucleotide
gagcacauacagggagcuu

SEQ ID NO: 51517 - RNA, 19 nt, Artificial Sequence
  Description of Artificial Sequence: Synthetic oligonucleotide
uggaagacgaucagcaaug

SEQ ID NO: 51518 - RNA, 19 nt, Artificial Sequence
  Description of Artificial Sequence: Synthetic oligonucleotide
gguuuuggauucaaagaug

SEQ ID NO: 51519 - RNA, 19 nt, Artificial Sequence
  Description of Artificial Sequence: Synthetic oligonucleotide
gccguguuugauggcucca

SEQ ID NO: 51520 - RNA, 19 nt, Artificial Sequence
  Description of Artificial Sequence: Synthetic oligonucleotide
agcugcaucucuccuacaa

SEQ ID NO: 51521 - RNA, 19 nt, Artificial Sequence
  Description of Artificial Sequence: Synthetic oligonucleotide
auaguucagcaguuuggcu

SEQ ID NO: 51522 - RNA, 19 nt, Artificial Sequence
  Description of Artificial Sequence: Synthetic oligonucleotide
uaucagcgccgggcaucag

SEQ ID NO: 51523 - RNA, 19 nt, Artificial Sequence
  Description of Artificial Sequence: Synthetic oligonucleotide
gaugauggcaaacucacag

SEQ ID NO: 51524 - RNA, 19 nt, Artificial Sequence
  Description of Artificial Sequence: Synthetic oligonucleotide
gauccuucuaagacaagca

SEQ ID NO: 51525 - RNA, 19 nt, Artificial Sequence
  Description of Artificial Sequence: Synthetic oligonucleotide
aacacuauccguguuuucu

SEQ ID NO: 51526 - RNA, 19 nt, Artificial Sequence
  Description of Artificial Sequence: Synthetic oligonucleotide
uugccgaacaagcaaagaa

SEQ ID NO: 51527 - RNA, 19 nt, Artificial Sequence
  Description of Artificial Sequence: Synthetic oligonucleotide
acaguggucaaugugcgaa

SEQ ID NO: 51528 - RNA, 19 nt, Artificial Sequence
  Description of Artificial Sequence: Synthetic oligonucleotide
aauggaaugagcuugcaug

SEQ ID NO: 51529 - RNA, 19 nt, Artificial Sequence
  Description of Artificial Sequence: Synthetic oligonucleotide
gacugccuuaugaaagcac

SEQ ID NO: 51530 - RNA, 19 nt, Artificial Sequence
  Description of Artificial Sequence: Synthetic oligonucleotide
cucaaggugaggggccugc

SEQ ID NO: 51531 - RNA, 19 nt, Artificial Sequence
  Description of Artificial Sequence: Synthetic oligonucleotide
caaccagagugcugugcag

SEQ ID NO: 51532 - RNA, 19 nt, Artificial Sequence
  Description of Artificial Sequence: Synthetic oligonucleotide
guguucagacuucuccacg

SEQ ID NO: 51533 - RNA, 19 nt, Artificial Sequence
  Description of Artificial Sequence: Synthetic oligonucleotide
gaacacaaagguaaaaaag

SEQ ID NO: 51534 - RNA, 19 nt, Artificial Sequence
  Description of Artificial Sequence: Synthetic oligonucleotide
gcacgcuuagauuggaaua

SEQ ID NO: 51535 - RNA, 19 nt, Artificial Sequence
  Description of Artificial Sequence: Synthetic oligonucleotide
acugaugcugcgucuuuga

SEQ ID NO: 51536 - RNA, 19 nt, Artificial Sequence
  Description of Artificial Sequence: Synthetic oligonucleotide
auuggagaagaacuucaag

SEQ ID NO: 51537 - RNA, 19 nt, Artificial Sequence
  Description of Artificial Sequence: Synthetic oligonucleotide
guagauuuccuggaucaug

SEQ ID NO: 51538 - RNA, 19 nt, Artificial Sequence
  Description of Artificial Sequence: Synthetic oligonucleotide
guuccccucacaacacaca

SEQ ID NO: 51539 - RNA, 19 nt, Artificial Sequence
  Description of Artificial Sequence: Synthetic oligonucleotide
aacuuugcucggaagacgu

SEQ ID NO: 51540 - RNA, 19 nt, Artificial Sequence
  Description of Artificial Sequence: Synthetic oligonucleotide
uuccugaagcuugccuucu

SEQ ID NO: 51541 - RNA, 19 nt, Artificial Sequence
  Description of Artificial Sequence: Synthetic oligonucleotide
ugugacaucugucagaaau

SEQ ID NO: 51542 - RNA, 19 nt, Artificial Sequence
  Description of Artificial Sequence: Synthetic oligonucleotide
uuccugcucaauggauuuc

SEQ ID NO: 51543 - RNA, 19 nt, Artificial Sequence
  Description of Artificial Sequence: Synthetic oligonucleotide
cgaugucagacuuguggcu

SEQ ID NO: 51544 - RNA, 19 nt, Artificial Sequence
  Description of Artificial Sequence: Synthetic oligonucleotide
uacaaauuucaugagcacu

SEQ ID NO: 51545 - RNA, 19 nt, Artificial Sequence
  Description of Artificial Sequence: Synthetic oligonucleotide
uguagcaccaaaguaccua

SEQ ID NO: 51546 - RNA, 19 nt, Artificial Sequence
  Description of Artificial Sequence: Synthetic oligonucleotide
acuauguguguggacugga

SEQ ID NO: 51547 - RNA, 19 nt, Artificial Sequence
  Description of Artificial Sequence: Synthetic oligonucleotide
aguaacaucagacaacucu

SEQ ID NO: 51548 - RNA, 19 nt, Artificial Sequence
  Description of Artificial Sequence: Synthetic oligonucleotide
uuauuguuuccaaauucca

SEQ ID NO: 51549 - RNA, 19 nt, Artificial Sequence
  Description of Artificial Sequence: Synthetic oligonucleotide
acuauuggugauaguggag

SEQ ID NO: 51550 - RNA, 19 nt, Artificial Sequence
  Description of Artificial Sequence: Synthetic oligonucleotide
gucccagcacuaccuucuu

SEQ ID NO: 51551 - RNA, 19 nt, Artificial Sequence
  Description of Artificial Sequence: Synthetic oligonucleotide
uugacuaugcgucguaugc

SEQ ID NO: 51552 - RNA, 19 nt, Artificial Sequence
  Description of Artificial Sequence: Synthetic oligonucleotide
cgagagucuguuuccagga

SEQ ID NO: 51553 - RNA, 19 nt, Artificial Sequence
  Description of Artificial Sequence: Synthetic oligonucleotide
augccuguuaguucucagc

SEQ ID NO: 51554 - RNA, 19 nt, Artificial Sequence
  Description of Artificial Sequence: Synthetic oligonucleotide
cacagauauucuacaccuc

SEQ ID NO: 51555 - RNA, 19 nt, Artificial Sequence
  Description of Artificial Sequence: Synthetic oligonucleotide
cacgccuucaccuuuaaca

SEQ ID NO: 51556 - RNA, 19 nt, Artificial Sequence
  Description of Artificial Sequence: Synthetic oligonucleotide
accuccagucccucaucug

SEQ ID NO: 51557 - RNA, 19 nt, Artificial Sequence
  Description of Artificial Sequence: Synthetic oligonucleotide
gaagguucccucucccaga

SEQ ID NO: 51558 - RNA, 19 nt, Artificial Sequence
  Description of Artificial Sequence: Synthetic oligonucleotide
aggcagaggucgacaucca

SEQ ID NO: 51559 - RNA, 19 nt, Artificial Sequence
  Description of Artificial Sequence: Synthetic oligonucleotide
acaccuaauguccacaugg

SEQ ID NO: 51560 - RNA, 19 nt, Artificial Sequence
  Description of Artificial Sequence: Synthetic oligonucleotide
gucagcaccacccugccug

SEQ ID NO: 51561 - RNA, 19 nt, Artificial Sequence
  Description of Artificial Sequence: Synthetic oligonucleotide
guggacagcaggaugauug

SEQ ID NO: 51562 - RNA, 19 nt, Artificial Sequence
  Description of Artificial Sequence: Synthetic oligonucleotide
gaggaugcaauucgaaguc

SEQ ID NO: 51563 - RNA, 19 nt, Artificial Sequence
  Description of Artificial Sequence: Synthetic oligonucleotide
cacagcgaaucagccucac

SEQ ID NO: 51564 - RNA, 19 nt, Artificial Sequence
  Description of Artificial Sequence: Synthetic oligonucleotide
ccuucagcccuguccagua

SEQ ID NO: 51565 - RNA, 19 nt, Artificial Sequence
  Description of Artificial Sequence: Synthetic oligonucleotide
agccccaacaaucugagcc

SEQ ID NO: 51566 - RNA, 19 nt, Artificial Sequence
  Description of Artificial Sequence: Synthetic oligonucleotide
ccaacaggcuggucacagc

SEQ ID NO: 51567 - RNA, 19 nt, Artificial Sequence
  Description of Artificial Sequence: Synthetic oligonucleotide
ccgaaaacccccgugccag

SEQ ID NO: 51568 - RNA, 19 nt, Artificial Sequence
  Description of Artificial Sequence: Synthetic oligonucleotide
gcacaaagagagcgggcac

SEQ ID NO: 51569 - RNA, 19 nt, Artificial Sequence
  Description of Artificial Sequence: Synthetic oligonucleotide
ccaguaucugggacccagg

SEQ ID NO: 51570 - RNA, 19 nt, Artificial Sequence
  Description of Artificial Sequence: Synthetic oligonucleotide
gagaaaaacaaaauuaggc

SEQ ID NO: 51571 - RNA, 19 nt, Artificial Sequence
  Description of Artificial Sequence: Synthetic oligonucleotide
ccucguggacagagagauu

SEQ ID NO: 51572 - RNA, 19 nt, Artificial Sequence
  Description of Artificial Sequence: Synthetic oligonucleotide
ucaagcuauuauugggaaa

SEQ ID NO: 51573 - RNA, 19 nt, Artificial Sequence
  Description of Artificial Sequence: Synthetic oligonucleotide
auagaagccagugaaguga

SEQ ID NO: 51574 - RNA, 19 nt, Artificial Sequence
  Description of Artificial Sequence: Synthetic oligonucleotide
augcuguccacucggauug

SEQ ID NO: 51575 - RNA, 19 nt, Artificial Sequence
  Description of Artificial Sequence: Synthetic oligonucleotide
gggucaggcucuuuuggaa

SEQ ID NO: 51576 - RNA, 19 nt, Artificial Sequence
  Description of Artificial Sequence: Synthetic oligonucleotide
acuguuuauaaggguaaau

SEQ ID NO: 51577 - RNA, 19 nt, Artificial Sequence
  Description of Artificial Sequence: Synthetic oligonucleotide
uggcacggagauguugcag

SEQ ID NO: 51578 - RNA, 19 nt, Artificial Sequence
  Description of Artificial Sequence: Synthetic oligonucleotide
guaaagauccuaaagguug

SEQ ID NO: 51579 - RNA, 19 nt, Artificial Sequence
  Description of Artificial Sequence: Synthetic oligonucleotide
gucgacccaaccccagagc

SEQ ID NO: 51580 - RNA, 19 nt, Artificial Sequence
  Description of Artificial Sequence: Synthetic oligonucleotide
caauuccaggccuucagga

SEQ ID NO: 51581 - RNA, 19 nt, Artificial Sequence
  Description of Artificial Sequence: Synthetic oligonucleotide
aaugagguggcuguucugc

SEQ ID NO: 51582 - RNA, 19 nt, Artificial Sequence
  Description of Artificial Sequence: Synthetic oligonucleotide
cgcaaaacacggcauguga

SEQ ID NO: 51583 - RNA, 19 nt, Artificial Sequence
  Description of Artificial Sequence: Synthetic oligonucleotide
aacauucugcuuuucaugg

SEQ ID NO: 51584 - RNA, 19 nt, Artificial Sequence
  Description of Artificial Sequence: Synthetic oligonucleotide
ggguacaugacaaaggaca

SEQ ID NO: 51585 - RNA, 19 nt, Artificial Sequence
  Description of Artificial Sequence: Synthetic oligonucleotide
aaccuggcaauugugaccc

SEQ ID NO: 51586 - RNA, 19 nt, Artificial Sequence
  Description of Artificial Sequence: Synthetic oligonucleotide
caguggugcgagggcagca

SEQ ID NO: 51587 - RNA, 19 nt, Artificial Sequence
  Description of Artificial Sequence: Synthetic oligonucleotide
agccucuacaaacaccugc

SEQ ID NO: 51588 - RNA, 19 nt, Artificial Sequence
  Description of Artificial Sequence: Synthetic oligonucleotide
cauguccaggagaccaagu

SEQ ID NO: 51589 - RNA, 19 nt, Artificial Sequence
  Description of Artificial Sequence: Synthetic oligonucleotide
uuucagauguuccagcuaa

SEQ ID NO: 51590 - RNA, 19 nt, Artificial Sequence
  Description of Artificial Sequence: Synthetic oligonucleotide
auugacauugcccggcaga

SEQ ID NO: 51591 - RNA, 19 nt, Artificial Sequence
  Description of Artificial Sequence: Synthetic oligonucleotide
acggcucagggaauggacu

SEQ ID NO: 51592 - RNA, 19 nt, Artificial Sequence
  Description of Artificial Sequence: Synthetic oligonucleotide
uauuugcaugcaaagaaca

SEQ ID NO: 51593 - RNA, 19 nt, Artificial Sequence
  Description of Artificial Sequence: Synthetic oligonucleotide
aucauccauagagacauga

SEQ ID NO: 51594 - RNA, 19 nt, Artificial Sequence
  Description of Artificial Sequence: Synthetic oligonucleotide
aaauccaacaauauauuuc

SEQ ID NO: 51595 - RNA, 19 nt, Artificial Sequence
  Description of Artificial Sequence: Synthetic oligonucleotide
cuccaugaaggcuuaacag

SEQ ID NO: 51596 - RNA, 19 nt, Artificial Sequence
  Description of Artificial Sequence: Synthetic oligonucleotide
gugaaaauuggagauuuug

SEQ ID NO: 51597 - RNA, 19 nt, Artificial Sequence
  Description of Artificial Sequence: Synthetic oligonucleotide
gguuuggcaacaguaaagu

SEQ ID NO: 51598 - RNA, 19 nt, Artificial Sequence
  Description of Artificial Sequence: Synthetic oligonucleotide
ucacgcuggagugguucuc

SEQ ID NO: 51599 - RNA, 19 nt, Artificial Sequence
  Description of Artificial Sequence: Synthetic oligonucleotide
cagcagguugaacaaccua

SEQ ID NO: 51600 - RNA, 19 nt, Artificial Sequence
  Description of Artificial Sequence: Synthetic oligonucleotide
acuggcucuguccucugga

SEQ ID NO: 51601 - RNA, 19 nt, Artificial Sequence
  Description of Artificial Sequence: Synthetic oligonucleotide
auggccccagaggugaucc

SEQ ID NO: 51602 - RNA, 19 nt, Artificial Sequence
  Description of Artificial Sequence: Synthetic oligonucleotide
cgaaugcaggauaacaacc

SEQ ID NO: 51603 - RNA, 19 nt, Artificial Sequence
  Description of Artificial Sequence: Synthetic oligonucleotide
ccauucaguuuccagucgg

SEQ ID NO: 51604 - RNA, 19 nt, Artificial Sequence
  Description of Artificial Sequence: Synthetic oligonucleotide
gaugucuacuccuauggca

SEQ ID NO: 51605 - RNA, 19 nt, Artificial Sequence
  Description of Artificial Sequence: Synthetic oligonucleotide
aucguauuguaugaacuga

SEQ ID NO: 51606 - RNA, 19 nt, Artificial Sequence
  Description of Artificial Sequence: Synthetic oligonucleotide
augacgggggagcuuccuu

SEQ ID NO: 51607 - RNA, 19 nt, Artificial Sequence
  Description of Artificial Sequence: Synthetic oligonucleotide
uauucucacaucaacaacc

SEQ ID NO: 51608 - RNA, 19 nt, Artificial Sequence
  Description of Artificial Sequence: Synthetic oligonucleotide
cgagaucagaucaucuuca

SEQ ID NO: 51609 - RNA, 19 nt, Artificial Sequence
  Description of Artificial Sequence: Synthetic oligonucleotide
auggugggccgaggauaug

SEQ ID NO: 51610 - RNA, 19 nt, Artificial Sequence
  Description of Artificial Sequence: Synthetic oligonucleotide
gccuccccagaucuuagua

SEQ ID NO: 51611 - RNA, 19 nt, Artificial Sequence
  Description of Artificial Sequence: Synthetic oligonucleotide
aagcuauauaagaacugcc

SEQ ID NO: 51612 - RNA, 19 nt, Artificial Sequence
  Description of Artificial Sequence: Synthetic oligonucleotide
cccaaagcaaugaagaggc

SEQ ID NO: 51613 - RNA, 19 nt, Artificial Sequence
  Description of Artificial Sequence: Synthetic oligonucleotide
cugguagcugacuguguga

SEQ ID NO: 51614 - RNA, 19 nt, Artificial Sequence
  Description of Artificial Sequence: Synthetic oligonucleotide
aagaaaguaaaggaagaga

SEQ ID NO: 51615 - RNA, 19 nt, Artificial Sequence
  Description of Artificial Sequence: Synthetic oligonucleotide
aggccucuuuuuccccaga

SEQ ID NO: 51616 - RNA, 19 nt, Artificial Sequence
  Description of Artificial Sequence: Synthetic oligonucleotide
auccugucuuccauugagc

SEQ ID NO: 51617 - RNA, 19 nt, Artificial Sequence
  Description of Artificial Sequence: Synthetic oligonucleotide
cugcuccaacacucucuac

SEQ ID NO: 51618 - RNA, 19 nt, Artificial Sequence
  Description of Artificial Sequence: Synthetic oligonucleotide
ccgaagaucaaccggagcg

SEQ ID NO: 51619 - RNA, 19 nt, Artificial Sequence
  Description of Artificial Sequence: Synthetic oligonucleotide
gcuuccgagccauccuugc

SEQ ID NO: 51620 - RNA, 19 nt, Artificial Sequence
  Description of Artificial Sequence: Synthetic oligonucleotide
caucgggcagcccacacug

SEQ ID NO: 51621 - RNA, 19 nt, Artificial Sequence
  Description of Artificial Sequence: Synthetic oligonucleotide
gaggauaucaaugcuugca

SEQ ID NO: 51622 - RNA, 19 nt, Artificial Sequence
  Description of Artificial Sequence: Synthetic oligonucleotide
acgcugaccacguccccga

SEQ ID NO: 51623 - RNA, 19 nt, Artificial Sequence
  Description of Artificial Sequence: Synthetic oligonucleotide
aggcugccugucuucuagu

SEQ ID NO: 51624 - RNA, 19 nt, Artificial Sequence
  Description of Artificial Sequence: Synthetic oligonucleotide
uugacuuugcaccugucuu

SEQ ID NO: 51625 - RNA, 19 nt, Artificial Sequence
  Description of Artificial Sequence: Synthetic oligonucleotide
ucaggcugccaggggagga

SEQ ID NO: 51626 - RNA, 19 nt, Artificial Sequence
  Description of Artificial Sequence: Synthetic oligonucleotide
aggagaagccagcaggcac

SEQ ID NO: 51627 - RNA, 19 nt, Artificial Sequence
  Description of Artificial Sequence: Synthetic oligonucleotide
ccacuuuucugcucccuuu

SEQ ID NO: 51628 - RNA, 19 nt, Artificial Sequence
  Description of Artificial Sequence: Synthetic oligonucleotide
ucuccagaggcagaacaca

SEQ ID NO: 51629 - RNA, 19 nt, Artificial Sequence
  Description of Artificial Sequence: Synthetic oligonucleotide
auguuuucagagaagcugc

SEQ ID NO: 51630 - RNA, 19 nt, Artificial Sequence
  Description of Artificial Sequence: Synthetic oligonucleotide
cugcuaaggaccuucuaga

SEQ ID NO: 51631 - RNA, 19 nt, Artificial Sequence
  Description of Artificial Sequence: Synthetic oligonucleotide
acugcucacagggccuuaa

SEQ ID NO: 51632 - RNA, 19 nt, Artificial Sequence
  Description of Artificial Sequence: Synthetic oligonucleotide
acuucauguugccuucuuu

SEQ ID NO: 51633 - RNA, 19 nt, Artificial Sequence
  Description of Artificial Sequence: Synthetic oligonucleotide
uucuaucccuuugggcccu

SEQ ID NO: 51634 - RNA, 19 nt, Artificial Sequence
  Description of Artificial Sequence: Synthetic oligonucleotide
ugggagaaggaagccauuu

SEQ ID NO: 51635 - RNA, 19 nt, Artificial Sequence
  Description of Artificial Sequence: Synthetic oligonucleotide
ugcagugcugguguguccu

SEQ ID NO: 51636 - RNA, 19 nt, Artificial Sequence
  Description of Artificial Sequence: Synthetic oligonucleotide
ugcucccuccccacauucc

SEQ ID NO: 51637 - RNA, 19 nt, Artificial Sequence
  Description of Artificial Sequence: Synthetic oligonucleotide
cccaugcucaaggcccagc

SEQ ID NO: 51638 - RNA, 19 nt, Artificial Sequence
  Description of Artificial Sequence: Synthetic oligonucleotide
ccuucuguagaugcgcaag

SEQ ID NO: 51639 - RNA, 19 nt, Artificial Sequence
  Description of Artificial Sequence: Synthetic oligonucleotide
guggauguugaugguagua

SEQ ID NO: 51640 - RNA, 19 nt, Artificial Sequence
  Description of Artificial Sequence: Synthetic oligonucleotide
acaaaaagcaggggcccag

SEQ ID NO: 51641 - RNA, 19 nt, Artificial Sequence
  Description of Artificial Sequence: Synthetic oligonucleotide
gccccagcuguuggcuaca

SEQ ID NO: 51642 - RNA, 19 nt, Artificial Sequence
  Description of Artificial Sequence: Synthetic oligonucleotide
augaguauuuagaggaagu

SEQ ID NO: 51643 - RNA, 19 nt, Artificial Sequence
  Description of Artificial Sequence: Synthetic oligonucleotide
uaagguagcaggcagucca

SEQ ID NO: 51644 - RNA, 19 nt, Artificial Sequence
  Description of Artificial Sequence: Synthetic oligonucleotide
agcccugauguggagacac

SEQ ID NO: 51645 - RNA, 19 nt, Artificial Sequence
  Description of Artificial Sequence: Synthetic oligonucleotide
caugggauuuuggaaauca

SEQ ID NO: 51646 - RNA, 19 nt, Artificial Sequence
  Description of Artificial Sequence: Synthetic oligonucleotide
agcuucuggaggaaugcau

SEQ ID NO: 51647 - RNA, 19 nt, Artificial Sequence
  Description of Artificial Sequence: Synthetic oligonucleotide
ugucacaggcgggacuuuc

SEQ ID NO: 51648 - RNA, 19 nt, Artificial Sequence
  Description of Artificial Sequence: Synthetic oligonucleotide
cuucagagaguggugcagc

SEQ ID NO: 51649 - RNA, 19 nt, Artificial Sequence
  Description of Artificial Sequence: Synthetic oligonucleotide
cgccagacauuuugcacau

SEQ ID NO: 51650 - RNA, 19 nt, Artificial Sequence
  Description of Artificial Sequence: Synthetic oligonucleotide
uaaggcaccaaacagccca

SEQ ID NO: 51651 - RNA, 19 nt, Artificial Sequence
  Description of Artificial Sequence: Synthetic oligonucleotide
aggacugccgagacucugg

SEQ ID NO: 51652 - RNA, 19 nt, Artificial Sequence
  Description of Artificial Sequence: Synthetic oligonucleotide
gccgcccgaaggagccugc

SEQ ID NO: 51653 - RNA, 19 nt, Artificial Sequence
  Description of Artificial Sequence: Synthetic oligonucleotide
cuuugguacuauggaacuu

SEQ ID NO: 51654 - RNA, 19 nt, Artificial Sequence
  Description of Artificial Sequence: Synthetic oligonucleotide
uuucuuaggggacacgucc

SEQ ID NO: 51655 - RNA, 19 nt, Artificial Sequence
  Description of Artificial Sequence: Synthetic oligonucleotide
cuccuuucacagcuucuaa

SEQ ID NO: 51656 - RNA, 19 nt, Artificial Sequence
  Description of Artificial Sequence: Synthetic oligonucleotide
agguguccagugcauuggg

SEQ ID NO: 51657 - RNA, 19 nt, Artificial Sequence
  Description of Artificial Sequence: Synthetic oligonucleotide
gaugguuuuccaggcaagg

SEQ ID NO: 51658 - RNA, 19 nt, Artificial Sequence
  Description of Artificial Sequence: Synthetic oligonucleotide
gcacucggccaauccgcau

SEQ ID NO: 51659 - RNA, 19 nt, Artificial Sequence
  Description of Artificial Sequence: Synthetic oligonucleotide
ucucagcccucucagggag

SEQ ID NO: 51660 - RNA, 19 nt, Artificial Sequence
  Description of Artificial Sequence: Synthetic oligonucleotide
gcagucuuccaucaugcug

SEQ ID NO: 51661 - RNA, 19 nt, Artificial Sequence
  Description of Artificial Sequence: Synthetic oligonucleotide
gaauuuugucuuccaggag

SEQ ID NO: 51662 - RNA, 19 nt, Artificial Sequence
  Description of Artificial Sequence: Synthetic oligonucleotide
gcugccccuauggggcggg

SEQ ID NO: 51663 - RNA, 19 nt, Artificial Sequence
  Description of Artificial Sequence: Synthetic oligonucleotide
ggccgcagggccagccuug

SEQ ID NO: 51664 - RNA, 19 nt, Artificial Sequence
  Description of Artificial Sequence: Synthetic oligonucleotide
guuucucuaacaaacaaac

SEQ ID NO: 51665 - RNA, 19 nt, Artificial Sequence
  Description of Artificial Sequence: Synthetic oligonucleotide
caaacaaacagccuuguuu

SEQ ID NO: 51666 - RNA, 19 nt, Artificial Sequence
  Description of Artificial Sequence: Synthetic oligonucleotide
ucucuagucacaucaugug

SEQ ID NO: 51667 - RNA, 19 nt, Artificial Sequence
  Description of Artificial Sequence: Synthetic oligonucleotide
guauacaaggaagccagga

SEQ ID NO: 51668 - RNA, 19 nt, Artificial Sequence
  Description of Artificial Sequence: Synthetic oligonucleotide
aauacagguuuucuugaug

SEQ ID NO: 51669 - RNA, 19 nt, Artificial Sequence
  Description of Artificial Sequence: Synthetic oligonucleotide
gauuuggguuuuaauuuug

SEQ ID NO: 51670 - RNA, 19 nt, Artificial Sequence
  Description of Artificial Sequence: Synthetic oligonucleotide
guuuuuauugcaccugaca

SEQ ID NO: 51671 - RNA, 19 nt, Artificial Sequence
  Description of Artificial Sequence: Synthetic oligonucleotide
aaaauacaguuaucugaug

SEQ ID NO: 51672 - RNA, 19 nt, Artificial Sequence
  Description of Artificial Sequence: Synthetic oligonucleotide
ggucccucaauuauguuau

SEQ ID NO: 51673 - RNA, 19 nt, Artificial Sequence
  Description of Artificial Sequence: Synthetic oligonucleotide
uuuuaauaaaauaaauuaa

SEQ ID NO: 51674 - RNA, 19 nt, Artificial Sequence
  Description of Artificial Sequence: Synthetic oligonucleotide
aauaaaauaaauuaaauuu

SEQ ID NO: 51675 - RNA, 25 nt, Artificial Sequence
  Description of Artificial Sequence: Synthetic oligonucleotide
cgcaggucgggaggacgagcaccga

SEQ ID NO: 51676 - RNA, 25 nt, Artificial Sequence
  Description of Artificial Sequence: Synthetic oligonucleotide
agucgagggcucgcucgucugggcc

SEQ ID NO: 51677 - RNA, 25 nt, Artificial Sequence
  Description of Artificial Sequence: Synthetic oligonucleotide
cgcccgagagucuuaaucgcgggcg

SEQ ID NO: 51678 - RNA, 25 nt, Artificial Sequence
  Description of Artificial Sequence: Synthetic oligonucleotide
gcuugggccgccaucuuagauggcg

SEQ ID NO: 51679 - RNA, 25 nt, Artificial Sequence
  Description of Artificial Sequence: Synthetic oligonucleotide
gggaguaagaggaaaacgauuguga

SEQ ID NO: 51680 - RNA, 25 nt, Artificial Sequence
  Description of Artificial Sequence: Synthetic oligonucleotide
aggcgggaacggcuuucugcugccu

SEQ ID NO: 51681 - RNA, 25 nt, Artificial Sequence
  Description of Artificial Sequence: Synthetic oligonucleotide
uuuuuugggccccgaaaagggucag

SEQ ID NO: 51682 - RNA, 25 nt, Artificial Sequence
  Description of Artificial Sequence: Synthetic oligonucleotide
gcuggccgggcuuuggggcgcgugc

SEQ ID NO: 51683 - RNA, 25 nt, Artificial Sequence
  Description of Artificial Sequence: Synthetic oligonucleotide
cccugaggcgcggagcgcguuugcu

SEQ ID NO: 51684 - RNA, 25 nt, Artificial Sequence
  Description of Artificial Sequence: Synthetic oligonucleotide
uacgaugcgggggcugcucggggcu

SEQ ID NO: 51685 - RNA, 25 nt, Artificial Sequence
  Description of Artificial Sequence: Synthetic oligonucleotide
uccguccccugggcuggggacgcgc

SEQ ID NO: 51686 - RNA, 25 nt, Artificial Sequence
  Description of Artificial Sequence: Synthetic oligonucleotide
ccgaaugugaccgccucccgcuccc

SEQ ID NO: 51687 - RNA, 25 nt, Artificial Sequence
  Description of Artificial Sequence: Synthetic oligonucleotide
cucacccgccgcggggaggaggagc

SEQ ID NO: 51688 - RNA, 25 nt, Artificial Sequence
  Description of Artificial Sequence: Synthetic oligonucleotide
cgggcgagaagcugccgccgaacga

SEQ ID NO: 51689 - RNA, 25 nt, Artificial Sequence
  Description of Artificial Sequence: Synthetic oligonucleotide
acaggacguuggggcggccuggcuc

SEQ ID NO: 51690 - RNA, 25 nt, Artificial Sequence
  Description of Artificial Sequence: Synthetic oligonucleotide
cccucagguuuaagaauuguuuaag

SEQ ID NO: 51691 - RNA, 25 nt, Artificial Sequence
  Description of Artificial Sequence: Synthetic oligonucleotide
gcugcaucaauggagcacauacagg

SEQ ID NO: 51692 - RNA, 25 nt, Artificial Sequence
  Description of Artificial Sequence: Synthetic oligonucleotide
ggagcuuggaagacgaucagcaaug

SEQ ID NO: 51693 - RNA, 25 nt, Artificial Sequence
  Description of Artificial Sequence: Synthetic oligonucleotide
gguuuuggauucaaagaugccgugu

SEQ ID NO: 51694 - RNA, 25 nt, Artificial Sequence
  Description of Artificial Sequence: Synthetic oligonucleotide
uuugauggcuccagcugcaucucuc

SEQ ID NO: 51695 - RNA, 25 nt, Artificial Sequence
  Description of Artificial Sequence: Synthetic oligonucleotide
ccuacaauaguucagcaguuuggcu

SEQ ID NO: 51696 - RNA, 25 nt, Artificial Sequence
  Description of Artificial Sequence: Synthetic oligonucleotide
uaucagcgccgggcaucagaugaug

SEQ ID NO: 51697 - RNA, 25 nt, Artificial Sequence
  Description of Artificial Sequence: Synthetic oligonucleotide
ggcaaacucacagauccuucuaaga

SEQ ID NO: 51698 - RNA, 25 nt, Artificial Sequence
  Description of Artificial Sequence: Synthetic oligonucleotide
acaagcaacacuauccguguuuucu

SEQ ID NO: 51699 - RNA, 25 nt, Artificial Sequence
  Description of Artificial Sequence: Synthetic oligonucleotide
uugccgaacaagcaaagaacagugg

SEQ ID NO: 51700 - RNA, 25 nt, Artificial Sequence
  Description of Artificial Sequence: Synthetic oligonucleotide
gucaaugugcgaaauggaaugagcu

SEQ ID NO: 51701 - RNA, 25 nt, Artificial Sequence
  Description of Artificial Sequence: Synthetic oligonucleotide
uugcaugacugccuuaugaaagcac

SEQ ID NO: 51702 - RNA, 25 nt, Artificial Sequence
  Description of Artificial Sequence: Synthetic oligonucleotide
cucaaggugaggggccugcaaccag

SEQ ID NO: 51703 - RNA, 25 nt, Artificial Sequence
  Description of Artificial Sequence: Synthetic oligonucleotide
gagugcugugcaguguucagacuuc

SEQ ID NO: 51704 - RNA, 25 nt, Artificial Sequence
  Description of Artificial Sequence: Synthetic oligonucleotide
cuccacgaacacaaagguaaaaaag

SEQ ID NO: 51705 - RNA, 25 nt, Artificial Sequence
  Description of Artificial Sequence: Synthetic oligonucleotide
gcacgcuuagauuggaauacugaug

SEQ ID NO: 51706 - RNA, 25 nt, Artificial Sequence
  Description of Artificial Sequence: Synthetic oligonucleotide
gcugcgucuuugauuggagaagaac

SEQ ID NO: 51707 - RNA, 25 nt, Artificial Sequence
  Description of Artificial Sequence: Synthetic oligonucleotide
cuucaaguagauuuccuggaucaug

SEQ ID NO: 51708 - RNA, 25 nt, Artificial Sequence
  Description of Artificial Sequence: Synthetic oligonucleotide
guuccccucacaacacacaacuuug

SEQ ID NO: 51709 - RNA, 25 nt, Artificial Sequence
  Description of Artificial Sequence: Synthetic oligonucleotide
gcucggaagacguuccugaagcuug

SEQ ID NO: 51710 - RNA, 25 nt, Artificial Sequence
  Description of Artificial Sequence: Synthetic oligonucleotide
gccuucugugacaucugucagaaau

SEQ ID NO: 51711 - RNA, 25 nt, Artificial Sequence
  Description of Artificial Sequence: Synthetic oligonucleotide
uuccugcucaauggauuucgauguc

SEQ ID NO: 51712 - RNA, 25 nt, Artificial Sequence
  Description of Artificial Sequence: Synthetic oligonucleotide
cagacuuguggcuacaaauuucaug

SEQ ID NO: 51713 - RNA, 25 nt, Artificial Sequence
  Description of Artificial Sequence: Synthetic oligonucleotide
gagcacuguagcaccaaaguaccua

SEQ ID NO: 51714 - RNA, 25 nt, Artificial Sequence
  Description of Artificial Sequence: Synthetic oligonucleotide
acuauguguguggacuggaguaaca

SEQ ID NO: 51715 - RNA, 25 nt, Artificial Sequence
  Description of Artificial Sequence: Synthetic oligonucleotide
aucagacaacucuuauuguuuccaa

SEQ ID NO: 51716 - RNA, 25 nt, Artificial Sequence
  Description of Artificial Sequence: Synthetic oligonucleotide
aauuccacuauuggugauaguggag

SEQ ID NO: 51717 - RNA, 25 nt, Artificial Sequence
  Description of Artificial Sequence: Synthetic oligonucleotide
gucccagcacuaccuucuuugacua

SEQ ID NO: 51718 - RNA, 25 nt, Artificial Sequence
  Description of Artificial Sequence: Synthetic oligonucleotide
augcgucguaugcgagagucuguuu

SEQ ID NO: 51719 - RNA, 25 nt, Artificial Sequence
  Description of Artificial Sequence: Synthetic oligonucleotide
uccaggaugccuguuaguucucagc

SEQ ID NO: 51720 - RNA, 25 nt, Artificial Sequence
  Description of Artificial Sequence: Synthetic oligonucleotide
cacagauauucuacaccucacgccu

SEQ ID NO: 51721 - RNA, 25 nt, Artificial Sequence
  Description of Artificial Sequence: Synthetic oligonucleotide
uucaccuuuaacaccuccagucccu

SEQ ID NO: 51722 - RNA, 25 nt, Artificial Sequence
  Description of Artificial Sequence: Synthetic oligonucleotide
ucaucugaagguucccucucccaga

SEQ ID NO: 51723 - RNA, 25 nt, Artificial Sequence
  Description of Artificial Sequence: Synthetic oligonucleotide
aggcagaggucgacauccacaccua

SEQ ID NO: 51724 - RNA, 25 nt, Artificial Sequence
  Description of Artificial Sequence: Synthetic oligonucleotide
aauguccacauggucagcaccaccc

SEQ ID NO: 51725 - RNA, 25 nt, Artificial Sequence
  Description of Artificial Sequence: Synthetic oligonucleotide
cugccuguggacagcaggaugauug

SEQ ID NO: 51726 - RNA, 25 nt, Artificial Sequence
  Description of Artificial Sequence: Synthetic oligonucleotide
gaggaugcaauucgaagucacagcg

SEQ ID NO: 51727 - RNA, 25 nt, Artificial Sequence
  Description of Artificial Sequence: Synthetic oligonucleotide
gaaucagccucaccuucagcccugu

SEQ ID NO: 51728 - RNA, 25 nt, Artificial Sequence
  Description of Artificial Sequence: Synthetic oligonucleotide
uccaguagccccaacaaucugagcc

SEQ ID NO: 51729 - RNA, 25 nt, Artificial Sequence
  Description of Artificial Sequence: Synthetic oligonucleotide
ccaacaggcuggucacagccgaaaa

SEQ ID NO: 51730 - RNA, 25 nt, Artificial Sequence
  Description of Artificial Sequence: Synthetic oligonucleotide
acccccgugccagcacaaagagagc

SEQ ID NO: 51731 - RNA, 25 nt, Artificial Sequence
  Description of Artificial Sequence: Synthetic oligonucleotide
cgggcaccaguaucugggacccagg

SEQ ID NO: 51732 - RNA, 25 nt, Artificial Sequence
  Description of Artificial Sequence: Synthetic oligonucleotide
gagaaaaacaaaauuaggccucgug

SEQ ID NO: 51733 - RNA, 25 nt, Artificial Sequence
  Description of Artificial Sequence: Synthetic oligonucleotide
ggacagagagauucaagcuauuauu

SEQ ID NO: 51734 - RNA, 25 nt, Artificial Sequence
  Description of Artificial Sequence: Synthetic oligonucleotide
ugggaaauagaagccagugaaguga

SEQ ID NO: 51735 - RNA, 25 nt, Artificial Sequence
  Description of Artificial Sequence: Synthetic oligonucleotide
augcuguccacucggauugggucag

SEQ ID NO: 51736 - RNA, 25 nt, Artificial Sequence
  Description of Artificial Sequence: Synthetic oligonucleotide
ggcucuuuuggaacuguuuauaagg

SEQ ID NO: 51737 - RNA, 25 nt, Artificial Sequence
  Description of Artificial Sequence: Synthetic oligonucleotide
gguaaauggcacggagauguugcag

SEQ ID NO: 51738 - RNA, 25 nt, Artificial Sequence
  Description of Artificial Sequence: Synthetic oligonucleotide
guaaagauccuaaagguugucgacc

SEQ ID NO: 51739 - RNA, 25 nt, Artificial Sequence
  Description of Artificial Sequence: Synthetic oligonucleotide
ccaaccccagagcaauuccaggccu

SEQ ID NO: 51740 - RNA, 25 nt, Artificial Sequence
  Description of Artificial Sequence: Synthetic oligonucleotide
uucaggaaugagguggcuguucugc

SEQ ID NO: 51741 - RNA, 25 nt, Artificial Sequence
  Description of Artificial Sequence: Synthetic oligonucleotide
cgcaaaacacggcaugugaacauuc

SEQ ID NO: 51742 - RNA, 25 nt, Artificial Sequence
  Description of Artificial Sequence: Synthetic oligonucleotide
cugcuuuucaugggguacaugacaa

SEQ ID NO: 51743 - RNA, 25 nt, Artificial Sequence
  Description of Artificial Sequence: Synthetic oligonucleotide
aaggacaaccuggcaauugugaccc

SEQ ID NO: 51744 - RNA, 25 nt, Artificial Sequence
  Description of Artificial Sequence: Synthetic oligonucleotide
caguggugcgagggcagcagccucu

SEQ ID NO: 51745 - RNA, 25 nt, Artificial Sequence
  Description of Artificial Sequence: Synthetic oligonucleotide
uacaaacaccugcauguccaggaga

SEQ ID NO: 51746 - RNA, 25 nt, Artificial Sequence
  Description of Artificial Sequence: Synthetic oligonucleotide
accaaguuucagauguuccagcuaa

SEQ ID NO: 51747 - RNA, 25 nt, Artificial Sequence
  Description of Artificial Sequence: Synthetic oligonucleotide
auugacauugcccggcagacggcuc

SEQ ID NO: 51748 - RNA, 25 nt, Artificial Sequence
  Description of Artificial Sequence: Synthetic oligonucleotide
cagggaauggacuauuugcaugcaa

SEQ ID NO: 51749 - RNA, 25 nt, Artificial Sequence
  Description of Artificial Sequence: Synthetic oligonucleotide
aagaacaucauccauagagacauga

SEQ ID NO: 51750 - RNA, 25 nt, Artificial Sequence
  Description of Artificial Sequence: Synthetic oligonucleotide
aaauccaacaauauauuucuccaug

SEQ ID NO: 51751 - RNA, 25 nt, Artificial Sequence
  Description of Artificial Sequence: Synthetic oligonucleotide
gaaggcuuaacagugaaaauuggag

SEQ ID NO: 51752 - RNA, 25 nt, Artificial Sequence
  Description of Artificial Sequence: Synthetic oligonucleotide
gauuuugguuuggcaacaguaaagu

SEQ ID NO: 51753 - RNA, 25 nt, Artificial Sequence
  Description of Artificial Sequence: Synthetic oligonucleotide
ucacgcuggagugguucucagcagg

SEQ ID NO: 51754 - RNA, 25 nt, Artificial Sequence
  Description of Artificial Sequence: Synthetic oligonucleotide
guugaacaaccuacuggcucugucc

SEQ ID NO: 51755 - RNA, 25 nt, Artificial Sequence
  Description of Artificial Sequence: Synthetic oligonucleotide
cucuggauggccccagaggugaucc

SEQ ID NO: 51756 - RNA, 25 nt, Artificial Sequence
  Description of Artificial Sequence: Synthetic oligonucleotide
cgaaugcaggauaacaacccauuca

SEQ ID NO: 51757 - RNA, 25 nt, Artificial Sequence
  Description of Artificial Sequence: Synthetic oligonucleotide
aguuuccagucggaugucuacuccu

SEQ ID NO: 51758 - RNA, 25 nt, Artificial Sequence
  Description of Artificial Sequence: Synthetic oligonucleotide
uauggcaucguauuguaugaacuga

SEQ ID NO: 51759 - RNA, 25 nt, Artificial Sequence
  Description of Artificial Sequence: Synthetic oligonucleotide
augacgggggagcuuccuuauucuc

SEQ ID NO: 51760 - RNA, 25 nt, Artificial Sequence
  Description of Artificial Sequence: Synthetic oligonucleotide
cacaucaacaaccgagaucagauca

SEQ ID NO: 51761 - RNA, 25 nt, Artificial Sequence
  Description of Artificial Sequence: Synthetic oligonucleotide
aucuucauggugggccgaggauaug

SEQ ID NO: 51762 - RNA, 25 nt, Artificial Sequence
  Description of Artificial Sequence: Synthetic oligonucleotide
gccuccccagaucuuaguaagcuau

SEQ ID NO: 51763 - RNA, 25 nt, Artificial Sequence
  Description of Artificial Sequence: Synthetic oligonucleotide
uauaagaacugccccaaagcaauga

SEQ ID NO: 51764 - RNA, 25 nt, Artificial Sequence
  Description of Artificial Sequence: Synthetic oligonucleotide
aagaggcugguagcugacuguguga

SEQ ID NO: 51765 - RNA, 25 nt, Artificial Sequence
  Description of Artificial Sequence: Synthetic oligonucleotide
aagaaaguaaaggaagagaggccuc

SEQ ID NO: 51766 - RNA, 25 nt, Artificial Sequence
  Description of Artificial Sequence: Synthetic oligonucleotide
cuuuuuccccagauccugucuucca

SEQ ID NO: 51767 - RNA, 25 nt, Artificial Sequence
  Description of Artificial Sequence: Synthetic oligonucleotide
auugagcugcuccaacacucucuac

SEQ ID NO: 51768 - RNA, 25 nt, Artificial Sequence
  Description of Artificial Sequence: Synthetic oligonucleotide
ccgaagaucaaccggagcgcuuccg

SEQ ID NO: 51769 - RNA, 25 nt, Artificial Sequence
  Description of Artificial Sequence: Synthetic oligonucleotide
gagccauccuugcaucgggcagccc

SEQ ID NO: 51770 - RNA, 25 nt, Artificial Sequence
  Description of Artificial Sequence: Synthetic oligonucleotide
cacacugaggauaucaaugcuugca

SEQ ID NO: 51771 - RNA, 25 nt, Artificial Sequence
  Description of Artificial Sequence: Synthetic oligonucleotide
acgcugaccacguccccgaggcugc

SEQ ID NO: 51772 - RNA, 25 nt, Artificial Sequence
  Description of Artificial Sequence: Synthetic oligonucleotide
ccugucuucuaguugacuuugcacc

SEQ ID NO: 51773 - RNA, 25 nt, Artificial Sequence
  Description of Artificial Sequence: Synthetic oligonucleotide
cugucuucaggcugccaggggagga

SEQ ID NO: 51774 - RNA, 25 nt, Artificial Sequence
  Description of Artificial Sequence: Synthetic oligonucleotide
aggagaagccagcaggcaccacuuu

SEQ ID NO: 51775 - RNA, 25 nt, Artificial Sequence
  Description of Artificial Sequence: Synthetic oligonucleotide
uucugcucccuuucuccagaggcag

SEQ ID NO: 51776 - RNA, 25 nt, Artificial Sequence
  Description of Artificial Sequence: Synthetic oligonucleotide
gaacacauguuuucagagaagcugc

SEQ ID NO: 51777 - RNA, 25 nt, Artificial Sequence
  Description of Artificial Sequence: Synthetic oligonucleotide
cugcuaaggaccuucuagacugcuc

SEQ ID NO: 51778 - RNA, 25 nt, Artificial Sequence
  Description of Artificial Sequence: Synthetic oligonucleotide
cacagggccuuaacuucauguugcc

SEQ ID NO: 51779 - RNA, 25 nt, Artificial Sequence
  Description of Artificial Sequence: Synthetic oligonucleotide
cuucuuuucuaucccuuugggcccu

SEQ ID NO: 51780 - RNA, 25 nt, Artificial Sequence
  Description of Artificial Sequence: Synthetic oligonucleotide
ugggagaaggaagccauuugcagug

SEQ ID NO: 51781 - RNA, 25 nt, Artificial Sequence
  Description of Artificial Sequence: Synthetic oligonucleotide
gcugguguguccugcucccucccca

SEQ ID NO: 51782 - RNA, 25 nt, Artificial Sequence
  Description of Artificial Sequence: Synthetic oligonucleotide
acauuccccaugcucaaggcccagc

SEQ ID NO: 51783 - RNA, 25 nt, Artificial Sequence
  Description of Artificial Sequence: Synthetic oligonucleotide
ccuucuguagaugcgcaaguggaug

SEQ ID NO: 51784 - RNA, 25 nt, Artificial Sequence
  Description of Artificial Sequence: Synthetic oligonucleotide
guugaugguaguacaaaaagcaggg

SEQ ID NO: 51785 - RNA, 25 nt, Artificial Sequence
  Description of Artificial Sequence: Synthetic oligonucleotide
ggcccagccccagcuguuggcuaca

SEQ ID NO: 51786 - RNA, 25 nt, Artificial Sequence
  Description of Artificial Sequence: Synthetic oligonucleotide
augaguauuuagaggaaguaaggua

SEQ ID NO: 51787 - RNA, 25 nt, Artificial Sequence
  Description of Artificial Sequence: Synthetic oligonucleotide
agcaggcaguccagcccugaugugg

SEQ ID NO: 51788 - RNA, 25 nt, Artificial Sequence
  Description of Artificial Sequence: Synthetic oligonucleotide
gagacacaugggauuuuggaaauca

SEQ ID NO: 51789 - RNA, 25 nt, Artificial Sequence
  Description of Artificial Sequence: Synthetic oligonucleotide
agcuucuggaggaaugcaugucaca

SEQ ID NO: 51790 - RNA, 25 nt, Artificial Sequence
  Description of Artificial Sequence: Synthetic oligonucleotide
aggcgggacuuucuucagagagugg

SEQ ID NO: 51791 - RNA, 25 nt, Artificial Sequence
  Description of Artificial Sequence: Synthetic oligonucleotide
gugcagcgccagacauuuugcacau

SEQ ID NO: 51792 - RNA, 25 nt, Artificial Sequence
  Description of Artificial Sequence: Synthetic oligonucleotide
uaaggcaccaaacagcccaggacug

SEQ ID NO: 51793 - RNA, 25 nt, Artificial Sequence
  Description of Artificial Sequence: Synthetic oligonucleotide
gccgagacucuggccgcccgaagga

SEQ ID NO: 51794 - RNA, 25 nt, Artificial Sequence
  Description of Artificial Sequence: Synthetic oligonucleotide
agccugcuuugguacuauggaacuu

SEQ ID NO: 51795 - RNA, 25 nt, Artificial Sequence
  Description of Artificial Sequence: Synthetic oligonucleotide
uuucuuaggggacacguccuccuuu

SEQ ID NO: 51796 - RNA, 25 nt, Artificial Sequence
  Description of Artificial Sequence: Synthetic oligonucleotide
ucacagcuucuaagguguccagugc

SEQ ID NO: 51797 - RNA, 25 nt, Artificial Sequence
  Description of Artificial Sequence: Synthetic oligonucleotide
cauugggaugguuuuccaggcaagg

SEQ ID NO: 51798 - RNA, 25 nt, Artificial Sequence
  Description of Artificial Sequence: Synthetic oligonucleotide
gcacucggccaauccgcaucucagc

SEQ ID NO: 51799 - RNA, 25 nt, Artificial Sequence
  Description of Artificial Sequence: Synthetic oligonucleotide
cccucucagggagcagucuuccauc

SEQ ID NO: 51800 - RNA, 25 nt, Artificial Sequence
  Description of Artificial Sequence: Synthetic oligonucleotide
caugcugaauuuugucuuccaggag

SEQ ID NO: 51801 - RNA, 25 nt, Artificial Sequence
  Description of Artificial Sequence: Synthetic oligonucleotide
gcugccccuauggggcggggccgca

SEQ ID NO: 51802 - RNA, 25 nt, Artificial Sequence
  Description of Artificial Sequence: Synthetic oligonucleotide
agggccagccuuguuucucuaacaa

SEQ ID NO: 51803 - RNA, 25 nt, Artificial Sequence
  Description of Artificial Sequence: Synthetic oligonucleotide
aacaaacaaacaaacagccuuguuu

SEQ ID NO: 51804 - RNA, 25 nt, Artificial Sequence
  Description of Artificial Sequence: Synthetic oligonucleotide
ucucuagucacaucauguguauaca

SEQ ID NO: 51805 - RNA, 25 nt, Artificial Sequence
  Description of Artificial Sequence: Synthetic oligonucleotide
aaggaagccaggaauacagguuuuc

SEQ ID NO: 51806 - RNA, 25 nt, Artificial Sequence
  Description of Artificial Sequence: Synthetic oligonucleotide
cuugaugauuuggguuuuaauuuug

SEQ ID NO: 51807 - RNA, 25 nt, Artificial Sequence
  Description of Artificial Sequence: Synthetic oligonucleotide
guuuuuauugcaccugacaaaauac

SEQ ID NO: 51808 - RNA, 25 nt, Artificial Sequence
  Description of Artificial Sequence: Synthetic oligonucleotide
caguuaucugauggucccucaauua

SEQ ID NO: 51809 - RNA, 25 nt, Artificial Sequence
  Description of Artificial Sequence: Synthetic oligonucleotide
auguuauuuuaauaaaauaaauuaa

SEQ ID NO: 51810 - RNA, 25 nt, Artificial Sequence
  Description of Artificial Sequence: Synthetic oligonucleotide
uauuuuaauaaaauaaauuaaauuu

SEQ ID NO: 51811 - DNA, 21 bp, Artificial Sequence
  Description of Artificial Sequence: Synthetic oligonucleotide
  Description of Combined DNA/RNA Molecule: Synthetic oligonucleotide
cuacacaaaucagcgauuutt

SEQ ID NO: 51812 - DNA, 21 bp, Artificial Sequence
  Description of Artificial Sequence: Synthetic oligonucleotide
  Description of Combined DNA/RNA Molecule: Synthetic oligonucleotide
aaaucgcugauuuguguagtt

SEQ ID NO: 51813 - DNA, 25 bp, Artificial Sequence
  Description of Artificial Sequence: Synthetic oligonucleotide
  Description of Combined DNA/RNA Molecule: Synthetic oligonucleotide
cuacacaaaucagcgauuuccaugt

SEQ ID NO: 51814 - RNA, 27 nt, Artificial Sequence
  Description of Artificial Sequence: Synthetic oligonucleotide
acauggaaaucgcugauuuguguaguc

SEQ ID NO: 51815 - RNA, 13 nt, Artificial Sequence
  Description of Artificial Sequence: Synthetic oligonucleotide
cuacacaaaucag

SEQ ID NO: 51816 - DNA, 11 bp, Artificial Sequence
  Description of Artificial Sequence: Synthetic oligonucleotide
  Description of Combined DNA/RNA Molecule: Synthetic oligonucleotide
gauuuccaugt

SEQ ID NO: 51817 - DNA, 21 bp, Artificial Sequence
  Description of Artificial Sequence: Synthetic oligonucleotide
  Description of Combined DNA/RNA Molecule: Synthetic oligonucleotide
ggaucuuauuucuucggagtt

SEQ ID NO: 51818 - DNA, 21 bp, Artificial Sequence
  Description of Artificial Sequence: Synthetic oligonucleotide
  Description of Combined DNA/RNA Molecule: Synthetic oligonucleotide
cuccgaagaaauaagaucctt

SEQ ID NO: 51819 - RNA, 11 nt, Artificial Sequence
  Description of Artificial Sequence: Synthetic oligonucleotide
ggaucuuauuu

SEQ ID NO: 51820 - DNA, 10 bp, Artificial Sequence
  Description of Artificial Sequence: Synthetic oligonucleotide
  Description of Combined DNA/RNA Molecule: Synthetic oligonucleotide
cuucggagtt

SEQ ID NO: 51821 - RNA, 27 nt, Artificial Sequence
  Description of Artificial Sequence: Synthetic oligonucleotide
cauugucuccgaagaaauaagauccuu

SEQ ID NO: 51822 - RNA, 8 nt, Artificial Sequence
  Description of Artificial Sequence: Synthetic oligonucleotide
  modified_base (2): LNA-G
ggaucuua

SEQ ID NO: 51823 - DNA, 17 bp, Artificial Sequence
  Description of Artificial Sequence: Synthetic oligonucleotide
  Description of Combined DNA/RNA Molecule: Synthetic oligonucleotide
uuucuucggagacaatg

SEQ ID NO: 51824 - DNA, 16 bp, Artificial Sequence
  Description of Artificial Sequence: Synthetic oligonucleotide
  Description of Combined DNA/RNA Molecule: Synthetic oligonucleotide
uucuucggagacaatg

SEQ ID NO: 51825 - DNA, 15 bp, Artificial Sequence
  Description of Artificial Sequence: Synthetic oligonucleotide
  Description of Combined DNA/RNA Molecule: Synthetic oligonucleotide
ucuucggagacaatg

SEQ ID NO: 51826 - DNA, 14 bp, Artificial Sequence
  Description of Artificial Sequence: Synthetic oligonucleotide
  Description of Combined DNA/RNA Molecule: Synthetic oligonucleotide
cuucggagacaatg

SEQ ID NO: 51827 - DNA, 13 bp, Artificial Sequence
  Description of Artificial Sequence: Synthetic oligonucleotide
  Description of Combined DNA/RNA Molecule: Synthetic oligonucleotide
uucggagacaatg

SEQ ID NO: 51828 - DNA, 12 bp, Artificial Sequence
  Description of Artificial Sequence: Synthetic oligonucleotide
  Description of Combined DNA/RNA Molecule: Synthetic oligonucleotide
ucggagacaatg

SEQ ID NO: 51829 - DNA, 11 bp, Artificial Sequence
  Description of Artificial Sequence: Synthetic oligonucleotide
  Description of Combined DNA/RNA Molecule: Synthetic oligonucleotide
cggagacaatg

SEQ ID NO: 51830 - RNA, 9 nt, Artificial Sequence
  Description of Artificial Sequence: Synthetic oligonucleotide
  modified_base (2): LNA-G
ggaucuuau

SEQ ID NO: 51831 - RNA, 10 nt, Artificial Sequence
  Description of Artificial Sequence: Synthetic oligonucleotide
  modified_base (2): LNA-G
ggaucuuauu

SEQ ID NO: 51832 - RNA, 11 nt, Artificial Sequence
  Description of Artificial Sequence: Synthetic oligonucleotide
  modified_base (2): LNA-G
ggaucuuauuu

SEQ ID NO: 51833 - RNA, 12 nt, Artificial Sequence
  Description of Artificial Sequence: Synthetic oligonucleotide
  modified_base (2): LNA-G
ggaucuuauuuc

SEQ ID NO: 51834 - RNA, 8 nt, Artificial Sequence
  Description of Artificial Sequence: Synthetic oligonucleotide
  modified_base (3): LNA-A
cuacacaa

SEQ ID NO: 51835 - DNA, 13 bp, Artificial Sequence
  Description of Artificial Sequence: Synthetic oligonucleotide
  Description of Combined DNA/RNA Molecule: Synthetic oligonucleotide
  modified_base (8): LNA-A
aucagcgauuutt

SEQ ID NO: 51836 - DNA, 12 bp, Artificial Sequence
  Description of Artificial Sequence: Synthetic oligonucleotide
  Description of Combined DNA/RNA Molecule: Synthetic oligonucleotide
  modified_base (7): LNA-A
ucagcgauuutt

SEQ ID NO: 51837 - DNA, 11 bp, Artificial Sequence
  Description of Artificial Sequence: Synthetic oligonucleotide
  Description of Combined DNA/RNA Molecule: Synthetic oligonucleotide
  modified_base (6): LNA-A
cagcgauuutt

SEQ ID NO: 51838 - DNA, 10 bp, Artificial Sequence
  Description of Artificial Sequence: Synthetic oligonucleotide
  Description of Combined DNA/RNA Molecule: Synthetic oligonucleotide
  modified_base (5): LNA-A
agcgauuutt

SEQ ID NO: 51839 - DNA, 9 bp, Artificial Sequence
  Description of Artificial Sequence: Synthetic oligonucleotide
  Description of Combined DNA/RNA Molecule: Synthetic oligonucleotide
  modified_base (4): LNA-A
gcgauuutt

SEQ ID NO: 51840 - DNA, 8 bp, Artificial Sequence
  Description of Artificial Sequence: Synthetic oligonucleotide
  Description of Combined DNA/RNA Molecule: Synthetic oligonucleotide
  modified_base (3): LNA-A
cgauuutt

SEQ ID NO: 51841 - DNA, 7 bp, Artificial Sequence
  Description of Artificial Sequence: Synthetic oligonucleotide
  Description of Combined DNA/RNA Molecule: Synthetic oligonucleotide
  modified_base (2): LNA-A
gauuutt

SEQ ID NO: 51842 - RNA, 9 nt, Artificial Sequence
  Description of Artificial Sequence: Synthetic oligonucleotide
  modified_base (3): LNA-A
cuacacaaa

SEQ ID NO: 51843 - RNA, 10 nt, Artificial Sequence
  Description of Artificial Sequence: Synthetic oligonucleotide
  modified_base (3): LNA-A
cuacacaaau

SEQ ID NO: 51844 - RNA, 11 nt, Artificial Sequence
  Description of Artificial Sequence: Synthetic oligonucleotide
  modified_base (3): LNA-A
cuacacaaauc

SEQ ID NO: 51845 - RNA, 12 nt, Artificial Sequence
  Description of Artificial Sequence: Synthetic oligonucleotide
  modified_base (3): LNA-A
cuacacaaauca

SEQ ID NO: 51846 - RNA, 13 nt, Artificial Sequence
  Description of Artificial Sequence: Synthetic oligonucleotide
  modified_base (3): LNA-A
cuacacaaaucag

SEQ ID NO: 51847 - RNA, 14 nt, Artificial Sequence
  Description of Artificial Sequence: Synthetic oligonucleotide
  modified_base (3): LNA-A
cuacacaaaucagc

SEQ ID NO: 51848 - RNA, 13 nt, Artificial Sequence
  Description of Artificial Sequence: Synthetic oligonucleotide
  modified_base (2): LNA-G
ggaucuuauuucu

SEQ ID NO: 51849 - RNA, 14 nt, Artificial Sequence
  Description of Artificial Sequence: Synthetic oligonucleotide
  modified_base (2): LNA-G
ggaucuuauuucuu

SEQ ID NO: 51850 - RNA, 8 nt, Artificial Sequence
  Description of Artificial Sequence: Synthetic oligonucleotide
  modified_base (2): LNA-G
  modified_base (8): LNA-A
ggaucuua

SEQ ID NO: 51851 - RNA, 9 nt, Artificial Sequence
  Description of Artificial Sequence: Synthetic oligonucleotide
  modified_base (2): LNA-G
  modified_base (9): LNA-U
ggaucuuau

SEQ ID NO: 51852 - RNA, 10 nt, Artificial Sequence
  Description of Artificial Sequence: Synthetic oligonucleotide
  modified_base (2): LNA-G
  modified_base (10): LNA-U
ggaucuuauu

SEQ ID NO: 51853 - RNA, 11 nt, Artificial Sequence
  Description of Artificial Sequence: Synthetic oligonucleotide
  modified_base (2): LNA-G
  modified_base (11): LNA-U
ggaucuuauuu

SEQ ID NO: 51854 - RNA, 12 nt, Artificial Sequence
  Description of Artificial Sequence: Synthetic oligonucleotide
  modified_base (2): LNA-G
  modified_base (12): LNA-C
ggaucuuauuuc

SEQ ID NO: 51855 - RNA, 13 nt, Artificial Sequence
  Description of Artificial Sequence: Synthetic oligonucleotide
  modified_base (2): LNA-G
  modified_base (13): LNA-U
ggaucuuauuucu

SEQ ID NO: 51856 - RNA, 14 nt, Artificial Sequence
  Description of Artificial Sequence: Synthetic oligonucleotide
  modified_base (2): LNA-G
  modified_base (14): LNA-U
ggaucuuauuucuu

SEQ ID NO: 51857 - DNA, 13 bp, Artificial Sequence
  Description of Artificial Sequence: Synthetic oligonucleotide
  Description of Combined DNA/RNA Molecule: Synthetic oligonucleotide
  modified_base (8): LNA-G
uuucuucggagtt

SEQ ID NO: 51858 - DNA, 12 bp, Artificial Sequence
  Description of Artificial Sequence: Synthetic oligonucleotide
  Description of Combined DNA/RNA Molecule: Synthetic oligonucleotide
  modified_base (7): LNA-G
uucuucggagtt

SEQ ID NO: 51859 - DNA, 11 bp, Artificial Sequence
  Description of Artificial Sequence: Synthetic oligonucleotide
  Description of Combined DNA/RNA Molecule: Synthetic oligonucleotide
  modified_base (6): LNA-G
ucuucggagtt

SEQ ID NO: 51860 - DNA, 10 bp, Artificial Sequence
  Description of Artificial Sequence: Synthetic oligonucleotide
  Description of Combined DNA/RNA Molecule: Synthetic oligonucleotide
  modified_base (5): LNA-G
cuucggagtt

SEQ ID NO: 51861 - DNA, 9 bp, Artificial Sequence
  Description of Artificial Sequence: Synthetic oligonucleotide
  Description of Combined DNA/RNA Molecule: Synthetic oligonucleotide
  modified_base (4): LNA-G
uucggagtt

SEQ ID NO: 51862 - DNA, 8 bp, Artificial Sequence
  Description of Artificial Sequence: Synthetic oligonucleotide
  Description of Combined DNA/RNA Molecule: Synthetic oligonucleotide
  modified_base (3): LNA-G
ucggagtt

SEQ ID NO: 51863 - DNA, 7 bp, Artificial Sequence
  Description of Artificial Sequence: Synthetic oligonucleotide
  Description of Combined DNA/RNA Molecule: Synthetic oligonucleotide
  modified_base (2): LNA-G
cggagtt

SEQ ID NO: 51864 - DNA, 13 bp, Artificial Sequence
  Description of Artificial Sequence: Synthetic oligonucleotide
  Description of Combined DNA/RNA Molecule: Synthetic oligonucleotide
  modified_base (1): LNA-U
  modified_base (8): LNA-G
uuucuucggagtt

SEQ ID NO: 51865 - DNA, 12 bp, Artificial Sequence
  Description of Artificial Sequence: Synthetic oligonucleotide
  Description of Combined DNA/RNA Molecule: Synthetic oligonucleotide
  modified_base (1): LNA-U
  modified_base (7): LNA-G
uucuucggagtt

SEQ ID NO: 51866 - DNA, 11 bp, Artificial Sequence
  Description of Artificial Sequence: Synthetic oligonucleotide
  Description of Combined DNA/RNA Molecule: Synthetic oligonucleotide
  modified_base (1): LNA-U
  modified_base (6): LNA-G
ucuucggagtt

SEQ ID NO: 51867 - DNA, 10 bp, Artificial Sequence
  Description of Artificial Sequence: Synthetic oligonucleotide
  Description of Combined DNA/RNA Molecule: Synthetic oligonucleotide
  modified_base (1): LNA-C
  modified_base (5): LNA-G
cuucggagtt

SEQ ID NO: 51868 - DNA, 9 bp, Artificial Sequence
  Description of Artificial Sequence: Synthetic oligonucleotide
  Description of Combined DNA/RNA Molecule: Synthetic oligonucleotide
  modified_base (1): LNA-U
  modified_base (4): LNA-G
uucggagtt

SEQ ID NO: 51869 - DNA, 8 bp, Artificial Sequence
  Description of Artificial Sequence: Synthetic oligonucleotide
  Description of Combined DNA/RNA Molecule: Synthetic oligonucleotide
  modified_base (1): LNA-U
  modified_base (3): LNA-G
ucggagtt

SEQ ID NO: 51870 - DNA, 7 bp, Artificial Sequence
  Description of Artificial Sequence: Synthetic oligonucleotide
  Description of Combined DNA/RNA Molecule: Synthetic oligonucleotide
  modified_base (1): LNA-C
  modified_base (2): LNA-G
cggagtt

SEQ ID NO: 51871 - DNA, 21 bp, Artificial Sequence
  Description of Artificial Sequence: Synthetic oligonucleotide
  Description of Combined DNA/RNA Molecule: Synthetic oligonucleotide
  modified_base (2): LNA-G
  modified_base (16): LNA-G
ggaucuuauuucuucggagtt

SEQ ID NO: 51872 - DNA, 25 bp, Artificial Sequence
  Description of Artificial Sequence: Synthetic oligonucleotide
  Description of Combined DNA/RNA Molecule: Synthetic oligonucleotide
ggaucuuauuucuucggagacaatg

SEQ ID NO: 51873 - RNA, 25 nt, Artificial Sequence
  Description of Artificial Sequence: Synthetic oligonucleotide
uuaagcagaguucaaaagcccuuca

SEQ ID NO: 51874 - RNA, 25 nt, Artificial Sequence
  Description of Artificial Sequence: Synthetic oligonucleotide
uaagcagaguucaaaagcccuucag

SEQ ID NO: 51875 - RNA, 25 nt, Artificial Sequence
  Description of Artificial Sequence: Synthetic oligonucleotide
agcagaguucaaaagcccuucagcg

SEQ ID NO: 51876 - RNA, 25 nt, Artificial Sequence
  Description of Artificial Sequence: Synthetic oligonucleotide
cucagggucugagugaagccgcucg

SEQ ID NO: 51877 - RNA, 25 nt, Artificial Sequence
  Description of Artificial Sequence: Synthetic oligonucleotide
caagcaacuacaucacgccagucaa

SEQ ID NO: 51878 - RNA, 25 nt, Artificial Sequence
  Description of Artificial Sequence: Synthetic oligonucleotide
aucaauggcagcuucuuggugcgug

SEQ ID NO: 51879 - RNA, 25 nt, Artificial Sequence
  Description of Artificial Sequence: Synthetic oligonucleotide
uuccagcccacauuggauucaucag

SEQ ID NO: 51880 - RNA, 25 nt, Artificial Sequence
  Description of Artificial Sequence: Synthetic oligonucleotide
cagcugagaauguggaauaccuaag

SEQ ID NO: 51881 - RNA, 25 nt, Artificial Sequence
  Description of Artificial Sequence: Synthetic oligonucleotide
aacguaucuccuaauuugaggcuca

SEQ ID NO: 51882 - RNA, 25 nt, Artificial Sequence
  Description of Artificial Sequence: Synthetic oligonucleotide
ccuaaaauaauuucucuacaauugg

SEQ ID NO: 51883 - RNA, 25 nt, Artificial Sequence
  Description of Artificial Sequence: Synthetic oligonucleotide
uggaagauucagcuaguuaggagcc

SEQ ID NO: 51884 - RNA, 25 nt, Artificial Sequence
  Description of Artificial Sequence: Synthetic oligonucleotide
uuaaacucuccuagucaauauccac

SEQ ID NO: 51885 - RNA, 25 nt, Artificial Sequence
  Description of Artificial Sequence: Synthetic oligonucleotide
cagccuacaguuauguucagucaca

SEQ ID NO: 51886 - RNA, 25 nt, Artificial Sequence
  Description of Artificial Sequence: Synthetic oligonucleotide
guuauguucagucacacacacauac

SEQ ID NO: 51887 - RNA, 25 nt, Artificial Sequence
  Description of Artificial Sequence: Synthetic oligonucleotide
cacauacaaaauguuccuuuugcuu

SEQ ID NO: 51888 - RNA, 25 nt, Artificial Sequence
  Description of Artificial Sequence: Synthetic oligonucleotide
uccuuuugcuuuuaaaguaauuuuu

SEQ ID NO: 51889 - RNA, 25 nt, Artificial Sequence
  Description of Artificial Sequence: Synthetic oligonucleotide
ugaccugugaagcaacagucaaugg

SEQ ID NO: 51890 - RNA, 25 nt, Artificial Sequence
  Description of Artificial Sequence: Synthetic oligonucleotide
cuaucucacacaucgacaaaccaau

SEQ ID NO: 51891 - RNA, 25 nt, Artificial Sequence
  Description of Artificial Sequence: Synthetic oligonucleotide
uguccucaauuguacugcuaccacu

SEQ ID NO: 51892 - RNA, 25 nt, Artificial Sequence
  Description of Artificial Sequence: Synthetic oligonucleotide
aaaccguagcuggcaagcggucuua

SEQ ID NO: 51893 - RNA, 25 nt, Artificial Sequence
  Description of Artificial Sequence: Synthetic oligonucleotide
uagcuggcaagcggucuuaccggcu

SEQ ID NO: 51894 - RNA, 25 nt, Artificial Sequence
  Description of Artificial Sequence: Synthetic oligonucleotide
uuguaugguuaaaagauggguuacc

SEQ ID NO: 51895 - RNA, 25 nt, Artificial Sequence
  Description of Artificial Sequence: Synthetic oligonucleotide
ugguuaaaagauggguuaccugcga

SEQ ID NO: 51896 - RNA, 25 nt, Artificial Sequence
  Description of Artificial Sequence: Synthetic oligonucleotide
cagggaauuauacaaucuugcugag

SEQ ID NO: 51897 - RNA, 25 nt, Artificial Sequence
  Description of Artificial Sequence: Synthetic oligonucleotide
acaaucuugcugagcauaaaacagu

SEQ ID NO: 51898 - RNA, 25 nt, Artificial Sequence
  Description of Artificial Sequence: Synthetic oligonucleotide
ccaauaaugaagaguccuuuauccu

SEQ ID NO: 51899 - RNA, 25 nt, Artificial Sequence
  Description of Artificial Sequence: Synthetic oligonucleotide
acuuuggauguuccaacgcaaguug

SEQ ID NO: 51900 - RNA, 25 nt, Artificial Sequence
  Description of Artificial Sequence: Synthetic oligonucleotide
aaugcuuccacuaaacugaaaccau

SEQ ID NO: 51901 - RNA, 25 nt, Artificial Sequence
  Description of Artificial Sequence: Synthetic oligonucleotide
gagaaaguuugacuuuguuaaauau

SEQ ID NO: 51902 - RNA, 25 nt, Artificial Sequence
  Description of Artificial Sequence: Synthetic oligonucleotide
aaagaacuacuguauauuaaaaguu

SEQ ID NO: 51903 - RNA, 25 nt, Artificial Sequence
  Description of Artificial Sequence: Synthetic oligonucleotide
uuagaaauacggguuuugacuuaac

SEQ ID NO: 51904 - RNA, 25 nt, Artificial Sequence
  Description of Artificial Sequence: Synthetic oligonucleotide
aacauggguacagcaaacucagcac

SEQ ID NO: 51905 - RNA, 25 nt, Artificial Sequence
  Description of Artificial Sequence: Synthetic oligonucleotide
aaagacacagaagaugcugaccuca

SEQ ID NO: 51906 - RNA, 25 nt, Artificial Sequence
  Description of Artificial Sequence: Synthetic oligonucleotide
uaguagggagguuuauucagaucgc

SEQ ID NO: 51907 - RNA, 25 nt, Artificial Sequence
  Description of Artificial Sequence: Synthetic oligonucleotide
gccuucugcagcaggguucugggau

SEQ ID NO: 51908 - RNA, 25 nt, Artificial Sequence
  Description of Artificial Sequence: Synthetic oligonucleotide
ggucugguacauauuggaaauuaug

SEQ ID NO: 51909 - RNA, 25 nt, Artificial Sequence
  Description of Artificial Sequence: Synthetic oligonucleotide
cuaguccuuccgauggaagcacuag

SEQ ID NO: 51910 - RNA, 25 nt, Artificial Sequence
  Description of Artificial Sequence: Synthetic oligonucleotide
ccagugaauauuguuuuuaugugga

SEQ ID NO: 51911 - RNA, 25 nt, Artificial Sequence
  Description of Artificial Sequence: Synthetic oligonucleotide
augaauucaaguuggaauugguaga

SEQ ID NO: 51912 - RNA, 25 nt, Artificial Sequence
  Description of Artificial Sequence: Synthetic oligonucleotide
caggacacagauuuagacuuggaga

SEQ ID NO: 51913 - RNA, 25 nt, Artificial Sequence
  Description of Artificial Sequence: Synthetic oligonucleotide
cucaaagcacaguuacaguauucca

SEQ ID NO: 51914 - RNA, 25 nt, Artificial Sequence
  Description of Artificial Sequence: Synthetic oligonucleotide
accacugccaccacugaugaauuaa

SEQ ID NO: 51915 - RNA, 25 nt, Artificial Sequence
  Description of Artificial Sequence: Synthetic oligonucleotide
gaaacuacuagugccacaucaucac

SEQ ID NO: 51916 - RNA, 25 nt, Artificial Sequence
  Description of Artificial Sequence: Synthetic oligonucleotide
aagucggacagccucaccaaacaga

SEQ ID NO: 51917 - RNA, 25 nt, Artificial Sequence
  Description of Artificial Sequence: Synthetic oligonucleotide
gaaagcgaaaaauggaacaugaugg

SEQ ID NO: 51918 - RNA, 25 nt, Artificial Sequence
  Description of Artificial Sequence: Synthetic oligonucleotide
cccucugauuuagcauguagacugc

SEQ ID NO: 51919 - RNA, 25 nt, Artificial Sequence
  Description of Artificial Sequence: Synthetic oligonucleotide
ugagcuauuuaaggaucuauuuaug

SEQ ID NO: 51920 - RNA, 25 nt, Artificial Sequence
  Description of Artificial Sequence: Synthetic oligonucleotide
aaaaggugaaaaagcacuauuauca

SEQ ID NO: 51921 - RNA, 25 nt, Artificial Sequence
  Description of Artificial Sequence: Synthetic oligonucleotide
gaaaaagcacuauuaucaguucugc

SEQ ID NO: 51922 - RNA, 25 nt, Artificial Sequence
  Description of Artificial Sequence: Synthetic oligonucleotide
ggcugaaaagaaagauuaaaccuac

SEQ ID NO: 51923 - RNA, 25 nt, Artificial Sequence
  Description of Artificial Sequence: Synthetic oligonucleotide
uaaacccuuauaauaaaauccuucu

SEQ ID NO: 51924 - RNA, 25 nt, Artificial Sequence
  Description of Artificial Sequence: Synthetic oligonucleotide
cauacuauuagccaaugcuguagac

SEQ ID NO: 51925 - RNA, 25 nt, Artificial Sequence
  Description of Artificial Sequence: Synthetic oligonucleotide
gacagaagcauuuugauaggaauag

SEQ ID NO: 51926 - RNA, 25 nt, Artificial Sequence
  Description of Artificial Sequence: Synthetic oligonucleotide
agagcaaauaagauaauggcccuga

SEQ ID NO: 51927 - RNA, 25 nt, Artificial Sequence
  Description of Artificial Sequence: Synthetic oligonucleotide
ccaacauuuuucucuuccucaagca

SEQ ID NO: 51928 - RNA, 25 nt, Artificial Sequence
  Description of Artificial Sequence: Synthetic oligonucleotide
uuaaguaugagaaaaguucagccca

SEQ ID NO: 51929 - RNA, 25 nt, Artificial Sequence
  Description of Artificial Sequence: Synthetic oligonucleotide
caggaauaaagauggcugcugaacc

SEQ ID NO: 51930 - RNA, 25 nt, Artificial Sequence
  Description of Artificial Sequence: Synthetic oligonucleotide
aauuugaaugaccaaguucucuuca

SEQ ID NO: 51931 - RNA, 25 nt, Artificial Sequence
  Description of Artificial Sequence: Synthetic oligonucleotide
auguauaaagauagccagccuagag

SEQ ID NO: 51932 - RNA, 25 nt, Artificial Sequence
  Description of Artificial Sequence: Synthetic oligonucleotide
ggcuguaacuaucucugugaagugu

SEQ ID NO: 51933 - RNA, 25 nt, Artificial Sequence
  Description of Artificial Sequence: Synthetic oligonucleotide
ucugugaagugugagaaaauuucaa

SEQ ID NO: 51934 - RNA, 25 nt, Artificial Sequence
  Description of Artificial Sequence: Synthetic oligonucleotide
ccuuuaaggaaaugaauccuccuga

SEQ ID NO: 51935 - RNA, 25 nt, Artificial Sequence
  Description of Artificial Sequence: Synthetic oligonucleotide
aaggauacaaaaagugacaucauau

SEQ ID NO: 51936 - RNA, 25 nt, Artificial Sequence
  Description of Artificial Sequence: Synthetic oligonucleotide
agaugcaauuugaaucuucaucaua

SEQ ID NO: 51937 - RNA, 25 nt, Artificial Sequence
  Description of Artificial Sequence: Synthetic oligonucleotide
guucaaaacgaagacuagcuauuaa

SEQ ID NO: 51938 - RNA, 25 nt, Artificial Sequence
  Description of Artificial Sequence: Synthetic oligonucleotide
gugaaaccucaucucuacuaaaaau

SEQ ID NO: 51939 - RNA, 25 nt, Artificial Sequence
  Description of Artificial Sequence: Synthetic oligonucleotide
acgaaagagaagcucuaucucgccu

SEQ ID NO: 51940 - RNA, 25 nt, Artificial Sequence
  Description of Artificial Sequence: Synthetic oligonucleotide
cuccacaagcgccuucgguccaguu

SEQ ID NO: 51941 - RNA, 25 nt, Artificial Sequence
  Description of Artificial Sequence: Synthetic oligonucleotide
gagaagauuccaaagauguagccgc

SEQ ID NO: 51942 - RNA, 25 nt, Artificial Sequence
  Description of Artificial Sequence: Synthetic oligonucleotide
aaucuggauucaaugaggagacuug

SEQ ID NO: 51943 - RNA, 25 nt, Artificial Sequence
  Description of Artificial Sequence: Synthetic oligonucleotide
agaacagauuugagaguagugagga

SEQ ID NO: 51944 - RNA, 25 nt, Artificial Sequence
  Description of Artificial Sequence: Synthetic oligonucleotide
ccagagcugugcagaugaguacaaa

SEQ ID NO: 51945 - RNA, 25 nt, Artificial Sequence
  Description of Artificial Sequence: Synthetic oligonucleotide
ccucagauuguuguuguuaaugggc

SEQ ID NO: 51946 - RNA, 25 nt, Artificial Sequence
  Description of Artificial Sequence: Synthetic oligonucleotide
cuauuuuaauuauuuuuaauuuauu

SEQ ID NO: 51947 - RNA, 25 nt, Artificial Sequence
  Description of Artificial Sequence: Synthetic oligonucleotide
uuuaauuuauuaauauuuaaauaug

SEQ ID NO: 51948 - RNA, 25 nt, Artificial Sequence
  Description of Artificial Sequence: Synthetic oligonucleotide
augcaguuugaauauccuuuguuuc

SEQ ID NO: 51949 - RNA, 25 nt, Artificial Sequence
  Description of Artificial Sequence: Synthetic oligonucleotide
caugcugcuggcgucuaaguguuug

SEQ ID NO: 51950 - RNA, 25 nt, Artificial Sequence
  Description of Artificial Sequence: Synthetic oligonucleotide
agaugugcauuucaccugugacaaa

SEQ ID NO: 51951 - RNA, 25 nt, Artificial Sequence
  Description of Artificial Sequence: Synthetic oligonucleotide
ucaaaaccugugccaggcugaauua

SEQ ID NO: 51952 - RNA, 25 nt, Artificial Sequence
  Description of Artificial Sequence: Synthetic oligonucleotide
gaauguggguagucauucuuacaau

SEQ ID NO: 51953 - RNA, 25 nt, Artificial Sequence
  Description of Artificial Sequence: Synthetic oligonucleotide
auguggguagucauucuuacaauug

SEQ ID NO: 51954 - RNA, 25 nt, Artificial Sequence
  Description of Artificial Sequence: Synthetic oligonucleotide
ugaaaaugagcaucagagaguguac

SEQ ID NO: 51955 - RNA, 25 nt, Artificial Sequence
  Description of Artificial Sequence: Synthetic oligonucleotide
uugcuuuucauguagaacucagcag

SEQ ID NO: 51956 - RNA, 25 nt, Artificial Sequence
  Description of Artificial Sequence: Synthetic oligonucleotide
uguauuucuauauuuauuuucagua

SEQ ID NO: 51957 - RNA, 25 nt, Artificial Sequence
  Description of Artificial Sequence: Synthetic oligonucleotide
uuugauuaauguuucuuaaauggaa

SEQ ID NO: 51958 - RNA, 25 nt, Artificial Sequence
  Description of Artificial Sequence: Synthetic oligonucleotide
caacguguauagugccuaaaauugu

SEQ ID NO: 51959 - RNA, 25 nt, Artificial Sequence
  Description of Artificial Sequence: Synthetic oligonucleotide
cauauccuuggcuacuaacaucugg

SEQ ID NO: 51960 - RNA, 25 nt, Artificial Sequence
  Description of Artificial Sequence: Synthetic oligonucleotide
uacuaacaucuggagacugugagcu

SEQ ID NO: 51961 - RNA, 25 nt, Artificial Sequence
  Description of Artificial Sequence: Synthetic oligonucleotide
cauaaguugugugcuuuuuauuaau

SEQ ID NO: 51962 - RNA, 25 nt, Artificial Sequence
  Description of Artificial Sequence: Synthetic oligonucleotide
gcaucauuuuggcucuucuuacauu

SEQ ID NO: 51963 - RNA, 25 nt, Artificial Sequence
  Description of Artificial Sequence: Synthetic oligonucleotide
gcucuucuuacauuuguaaaaaugu

SEQ ID NO: 51964 - RNA, 25 nt, Artificial Sequence
  Description of Artificial Sequence: Synthetic oligonucleotide
agauuaggucaucuuaauucauauu

SEQ ID NO: 51965 - RNA, 25 nt, Artificial Sequence
  Description of Artificial Sequence: Synthetic oligonucleotide
auggaauugaaagaacuaaucauga

SEQ ID NO: 51966 - RNA, 25 nt, Artificial Sequence
  Description of Artificial Sequence: Synthetic oligonucleotide
cacacucauuccuucugcucuuggg

SEQ ID NO: 51967 - RNA, 25 nt, Artificial Sequence
  Description of Artificial Sequence: Synthetic oligonucleotide
uguagagguaaccaguagcuuugag

SEQ ID NO: 51968 - RNA, 25 nt, Artificial Sequence
  Description of Artificial Sequence: Synthetic oligonucleotide
caaccacaugccacguaauauuuca

SEQ ID NO: 51969 - RNA, 25 nt, Artificial Sequence
  Description of Artificial Sequence: Synthetic oligonucleotide
ucggaaacaaguuauucucuucacu

SEQ ID NO: 51970 - RNA, 25 nt, Artificial Sequence
  Description of Artificial Sequence: Synthetic oligonucleotide
acucccaauaacuaaugcuaagaaa

SEQ ID NO: 51971 - RNA, 25 nt, Artificial Sequence
  Description of Artificial Sequence: Synthetic oligonucleotide
aaugcuaagaaaugcugaaaaucaa

SEQ ID NO: 51972 - RNA, 25 nt, Artificial Sequence
  Description of Artificial Sequence: Synthetic oligonucleotide
gucuuucucuaaauaugauuacuuu

SEQ ID NO: 51973 - RNA, 25 nt, Artificial Sequence
  Description of Artificial Sequence: Synthetic oligonucleotide
ugaauuucaggcauuuuguucuaca

SEQ ID NO: 51974 - RNA, 25 nt, Artificial Sequence
  Description of Artificial Sequence: Synthetic oligonucleotide
cgauucccucucacccgggacucuc

SEQ ID NO: 51975 - RNA, 25 nt, Artificial Sequence
  Description of Artificial Sequence: Synthetic oligonucleotide
aggaaagugaaccuuuaaaguaaag

SEQ ID NO: 51976 - RNA, 25 nt, Artificial Sequence
  Description of Artificial Sequence: Synthetic oligonucleotide
gaggcugcaugcucuggaagccugg

SEQ ID NO: 51977 - RNA, 25 nt, Artificial Sequence
  Description of Artificial Sequence: Synthetic oligonucleotide
ucucugaacagaaaacaaaagagag

SEQ ID NO: 51978 - RNA, 25 nt, Artificial Sequence
  Description of Artificial Sequence: Synthetic oligonucleotide
aacuuggcuguaaucaguuaugccg

SEQ ID NO: 51979 - RNA, 25 nt, Artificial Sequence
  Description of Artificial Sequence: Synthetic oligonucleotide
agaagccaaaauuaaaagaagucca

SEQ ID NO: 51980 - RNA, 25 nt, Artificial Sequence
  Description of Artificial Sequence: Synthetic oligonucleotide
auuaaaagaaguccaggugagguua

SEQ ID NO: 51981 - RNA, 25 nt, Artificial Sequence
  Description of Artificial Sequence: Synthetic oligonucleotide
gaauccggauuaucgggaagaggac

SEQ ID NO: 51982 - RNA, 25 nt, Artificial Sequence
  Description of Artificial Sequence: Synthetic oligonucleotide
aaugugacaucaaagcaaguauugu

SEQ ID NO: 51983 - RNA, 25 nt, Artificial Sequence
  Description of Artificial Sequence: Synthetic oligonucleotide
caucaaagcaaguauuguagcacuc

SEQ ID NO: 51984 - RNA, 25 nt, Artificial Sequence
  Description of Artificial Sequence: Synthetic oligonucleotide
agagagagaaaacaaaaccacaaau

SEQ ID NO: 51985 - RNA, 25 nt, Artificial Sequence
  Description of Artificial Sequence: Synthetic oligonucleotide
ucgcuguaguauuuaagcccauaca

SEQ ID NO: 51986 - RNA, 25 nt, Artificial Sequence
  Description of Artificial Sequence: Synthetic oligonucleotide
cgcuguaguauuuaagcccauacag

SEQ ID NO: 51987 - RNA, 25 nt, Artificial Sequence
  Description of Artificial Sequence: Synthetic oligonucleotide
auuuaagcccauacagaaaccuucc

SEQ ID NO: 51988 - RNA, 25 nt, Artificial Sequence
  Description of Artificial Sequence: Synthetic oligonucleotide
auuaaaauaaacaugguauaccuac

SEQ ID NO: 51989 - RNA, 25 nt, Artificial Sequence
  Description of Artificial Sequence: Synthetic oligonucleotide
cuguucugaucggccaguuuucgga

SEQ ID NO: 51990 - RNA, 25 nt, Artificial Sequence
  Description of Artificial Sequence: Synthetic oligonucleotide
aaauaauuugaacuuuggaacaggg

SEQ ID NO: 51991 - RNA, 25 nt, Artificial Sequence
  Description of Artificial Sequence: Synthetic oligonucleotide
ugcgaccuuaauuuaacuuuccagu

SEQ ID NO: 51992 - RNA, 25 nt, Artificial Sequence
  Description of Artificial Sequence: Synthetic oligonucleotide
cugagaaagcuaaaguuugguuuug

SEQ ID NO: 51993 - RNA, 25 nt, Artificial Sequence
  Description of Artificial Sequence: Synthetic oligonucleotide
aguaaagaugcuacuucccacugua

SEQ ID NO: 51994 - RNA, 25 nt, Artificial Sequence
  Description of Artificial Sequence: Synthetic oligonucleotide
cugcuuaauugcugauaccauauga

SEQ ID NO: 51995 - RNA, 25 nt, Artificial Sequence
  Description of Artificial Sequence: Synthetic oligonucleotide
uaccauaugaaugaaacaugggcug

SEQ ID NO: 51996 - RNA, 25 nt, Artificial Sequence
  Description of Artificial Sequence: Synthetic oligonucleotide
aacuuucuuauccaacuuuuucaua

SEQ ID NO: 51997 - RNA, 25 nt, Artificial Sequence
  Description of Artificial Sequence: Synthetic oligonucleotide
ccuugcaugacaucaugaggccgga

SEQ ID NO: 51998 - RNA, 25 nt, Artificial Sequence
  Description of Artificial Sequence: Synthetic oligonucleotide
ugaauuuguauaugacugcauuugu

SEQ ID NO: 51999 - RNA, 25 nt, Artificial Sequence
  Description of Artificial Sequence: Synthetic oligonucleotide
gaauccuaguagaauguuuacuacc

SEQ ID NO: 52000 - RNA, 25 nt, Artificial Sequence
  Description of Artificial Sequence: Synthetic oligonucleotide
gaaagggaagaauuuuuugaugaaa

SEQ ID NO: 52001 - RNA, 25 nt, Artificial Sequence
  Description of Artificial Sequence: Synthetic oligonucleotide
uaucggcaugccagugugugaauuu

SEQ ID NO: 52002 - RNA, 25 nt, Artificial Sequence
  Description of Artificial Sequence: Synthetic oligonucleotide
caccucauaguagagcaauguaugu

SEQ ID NO: 52003 - RNA, 25 nt, Artificial Sequence
  Description of Artificial Sequence: Synthetic oligonucleotide
ccagaauugccaaagcacauauaua

SEQ ID NO: 52004 - RNA, 25 nt, Artificial Sequence
  Description of Artificial Sequence: Synthetic oligonucleotide
uggugaucuggguaauaguuucucc

SEQ ID NO: 52005 - RNA, 25 nt, Artificial Sequence
  Description of Artificial Sequence: Synthetic oligonucleotide
gaucuggguaauaguuucuccaaau

SEQ ID NO: 52006 - RNA, 25 nt, Artificial Sequence
  Description of Artificial Sequence: Synthetic oligonucleotide
ggaugugaugaauacuuccuagaaa

SEQ ID NO: 52007 - RNA, 25 nt, Artificial Sequence
  Description of Artificial Sequence: Synthetic oligonucleotide
cauuuccacagcuacaccauauaug

SEQ ID NO: 52008 - RNA, 25 nt, Artificial Sequence
  Description of Artificial Sequence: Synthetic oligonucleotide
acagcuacaccauauaugaauggag

SEQ ID NO: 52009 - RNA, 25 nt, Artificial Sequence
  Description of Artificial Sequence: Synthetic oligonucleotide
ugcaguucuuacacgagaagaagau

SEQ ID NO: 52010 - RNA, 25 nt, Artificial Sequence
  Description of Artificial Sequence: Synthetic oligonucleotide
acgagaagaagaucauuuacaggga

SEQ ID NO: 52011 - RNA, 25 nt, Artificial Sequence
  Description of Artificial Sequence: Synthetic oligonucleotide
cgagaagaagaucauuuacagggac

SEQ ID NO: 52012 - RNA, 25 nt, Artificial Sequence
  Description of Artificial Sequence: Synthetic oligonucleotide
aagaagaucauuuacagggaccuga

SEQ ID NO: 52013 - RNA, 25 nt, Artificial Sequence
  Description of Artificial Sequence: Synthetic oligonucleotide
agaggaagagguguuugacugcauc

SEQ ID NO: 52014 - RNA, 25 nt, Artificial Sequence
  Description of Artificial Sequence: Synthetic oligonucleotide
gaggaagagguguuugacugcaucg

SEQ ID NO: 52015 - RNA, 25 nt, Artificial Sequence
  Description of Artificial Sequence: Synthetic oligonucleotide
cuacuuugagggcgaguucacaggg

SEQ ID NO: 52016 - RNA, 25 nt, Artificial Sequence
  Description of Artificial Sequence: Synthetic oligonucleotide
agggcaucuccuggcaccucugucc

SEQ ID NO: 52017 - RNA, 25 nt, Artificial Sequence
  Description of Artificial Sequence: Synthetic oligonucleotide
ggagugauaugguuugucuuuuuaa

SEQ ID NO: 52018 - RNA, 25 nt, Artificial Sequence
  Description of Artificial Sequence: Synthetic oligonucleotide
gagugauaugguuugucuuuuuaag

SEQ ID NO: 52019 - RNA, 25 nt, Artificial Sequence
  Description of Artificial Sequence: Synthetic oligonucleotide
ugcaguaaagauccuaaagguuguc

SEQ ID NO: 52020 - RNA, 25 nt, Artificial Sequence
  Description of Artificial Sequence: Synthetic oligonucleotide
aguaaagauccuaaagguugucgac

SEQ ID NO: 52021 - RNA, 25 nt, Artificial Sequence
  Description of Artificial Sequence: Synthetic oligonucleotide
ugacaaaggacaaccuggcaauugu

SEQ ID NO: 52022 - RNA, 25 nt, Artificial Sequence
  Description of Artificial Sequence: Synthetic oligonucleotide
gcaauugugacccaguggugcgagg

SEQ ID NO: 52023 - RNA, 25 nt, Artificial Sequence
  Description of Artificial Sequence: Synthetic oligonucleotide
aacaucauccauagagacaugaaau

SEQ ID NO: 52024 - RNA, 25 nt, Artificial Sequence
  Description of Artificial Sequence: Synthetic oligonucleotide
ugaaauccaacaauauauuucucca

SEQ ID NO: 52025 - RNA, 25 nt, Artificial Sequence
  Description of Artificial Sequence: Synthetic oligonucleotide
aacaauauauuucuccaugaaggcu

SEQ ID NO: 52026 - RNA, 25 nt, Artificial Sequence
  Description of Artificial Sequence: Synthetic oligonucleotide
aacaguaaagucacgcuggaguggu

SEQ ID NO: 52027 - RNA, 25 nt, Artificial Sequence
  Description of Artificial Sequence: Synthetic oligonucleotide
ugugaagaaaguaaaggaagagagg

SEQ ID NO: 52028 - RNA, 25 nt, Artificial Sequence
  Description of Artificial Sequence: Synthetic oligonucleotide
cuuccgagccauccuugcaucgggc

SEQ ID NO: 52029 - RNA, 25 nt, Artificial Sequence
  Description of Artificial Sequence: Synthetic oligonucleotide
aauggagguugaauauccuacugug

SEQ ID NO: 52030 - RNA, 25 nt, Artificial Sequence
  Description of Artificial Sequence: Synthetic oligonucleotide
ggagguugaauauccuacuguguaa

SEQ ID NO: 52031 - RNA, 25 nt, Artificial Sequence
  Description of Artificial Sequence: Synthetic oligonucleotide
auuuugaguuuucccuuguagugua

SEQ ID NO: 52032 - RNA, 25 nt, Artificial Sequence
  Description of Artificial Sequence: Synthetic oligonucleotide
uauccuguuuguucuuuguugauug

SEQ ID NO: 52033 - RNA, 25 nt, Artificial Sequence
  Description of Artificial Sequence: Synthetic oligonucleotide
ccuguuuguucuuuguugauugaaa

SEQ ID NO: 52034 - RNA, 25 nt, Artificial Sequence
  Description of Artificial Sequence: Synthetic oligonucleotide
cucuacagccuucuuuuucuuccau

SEQ ID NO: 52035 - RNA, 25 nt, Artificial Sequence
  Description of Artificial Sequence: Synthetic oligonucleotide
ucuuccauagcuaaucuuccuucua

SEQ ID NO: 52036 - RNA, 25 nt, Artificial Sequence
  Description of Artificial Sequence: Synthetic oligonucleotide
auaaucuuccuguugaaugcuucau

SEQ ID NO: 52037 - RNA, 25 nt, Artificial Sequence
  Description of Artificial Sequence: Synthetic oligonucleotide
uaaucuuccuguugaaugcuucaug

SEQ ID NO: 52038 - RNA, 25 nt, Artificial Sequence
  Description of Artificial Sequence: Synthetic oligonucleotide
cuucaugacuugaauucuacuuuga

SEQ ID NO: 52039 - RNA, 25 nt, Artificial Sequence
  Description of Artificial Sequence: Synthetic oligonucleotide
aagagggagagaagcaacuacagac

SEQ ID NO: 52040 - RNA, 25 nt, Artificial Sequence
  Description of Artificial Sequence: Synthetic oligonucleotide
cgucuccuaccagaccaaggucaac

SEQ ID NO: 52041 - RNA, 25 nt, Artificial Sequence
  Description of Artificial Sequence: Synthetic oligonucleotide
gaucaaucggcccgacuaucucgac

SEQ ID NO: 52042 - RNA, 25 nt, Artificial Sequence
  Description of Artificial Sequence: Synthetic oligonucleotide
ggacgaacauccaaccuucccaaac

SEQ ID NO: 52043 - RNA, 25 nt, Artificial Sequence
  Description of Artificial Sequence: Synthetic oligonucleotide
agggucggaacccaagcuuagaacu

SEQ ID NO: 52044 - RNA, 25 nt, Artificial Sequence
  Description of Artificial Sequence: Synthetic oligonucleotide
ucggaacccaagcuuagaacuuuaa

SEQ ID NO: 52045 - RNA, 25 nt, Artificial Sequence
  Description of Artificial Sequence: Synthetic oligonucleotide
acccaagcuuagaacuuuaagcaac

SEQ ID NO: 52046 - RNA, 25 nt, Artificial Sequence
  Description of Artificial Sequence: Synthetic oligonucleotide
gaacuuuaagcaacaagaccaccac

SEQ ID NO: 52047 - RNA, 25 nt, Artificial Sequence
  Description of Artificial Sequence: Synthetic oligonucleotide
acuauucaguggcgagaaauaaagu

SEQ ID NO: 52048 - RNA, 25 nt, Artificial Sequence
  Description of Artificial Sequence: Synthetic oligonucleotide
cuauucaguggcgagaaauaaaguu

SEQ ID NO: 52049 - RNA, 25 nt, Artificial Sequence
  Description of Artificial Sequence: Synthetic oligonucleotide
aaacacagauaacaggaaaugaucc

SEQ ID NO: 52050 - RNA, 25 nt, Artificial Sequence
  Description of Artificial Sequence: Synthetic oligonucleotide
cuuaagaaaagagaagaaaugaaac

SEQ ID NO: 52051 - RNA, 25 nt, Artificial Sequence
  Description of Artificial Sequence: Synthetic oligonucleotide
cugaaggaguguguuuccauccucc

SEQ ID NO: 52052 - RNA, 25 nt, Artificial Sequence
  Description of Artificial Sequence: Synthetic oligonucleotide
ucaccgcgggacugaaaaucuuuga

SEQ ID NO: 52053 - RNA, 25 nt, Artificial Sequence
  Description of Artificial Sequence: Synthetic oligonucleotide
agcagaaauaagcgugccguucagg

SEQ ID NO: 52054 - RNA, 25 nt, Artificial Sequence
  Description of Artificial Sequence: Synthetic oligonucleotide
aagcgugccguucaggguccagaag

SEQ ID NO: 52055 - RNA, 25 nt, Artificial Sequence
  Description of Artificial Sequence: Synthetic oligonucleotide
agaaacagucacucaagacugcuug

SEQ ID NO: 52056 - RNA, 25 nt, Artificial Sequence
  Description of Artificial Sequence: Synthetic oligonucleotide
agaggaagaagguccaugucuuugg

SEQ ID NO: 52057 - RNA, 25 nt, Artificial Sequence
  Description of Artificial Sequence: Synthetic oligonucleotide
uguauucaaaauaugccugaaacac

SEQ ID NO: 52058 - RNA, 25 nt, Artificial Sequence
  Description of Artificial Sequence: Synthetic oligonucleotide
auuuuccucccuuucucuguaccuc

SEQ ID NO: 52059 - RNA, 25 nt, Artificial Sequence
  Description of Artificial Sequence: Synthetic oligonucleotide
caaagaaagauagagcaagacaaga

SEQ ID NO: 52060 - RNA, 25 nt, Artificial Sequence
  Description of Artificial Sequence: Synthetic oligonucleotide
aagaaagauagagcaagacaagaaa

SEQ ID NO: 52061 - RNA, 25 nt, Artificial Sequence
  Description of Artificial Sequence: Synthetic oligonucleotide
gaaagcauuuguuuguacaagaucc

SEQ ID NO: 52062 - RNA, 25 nt, Artificial Sequence
  Description of Artificial Sequence: Synthetic oligonucleotide
ugaguuaaacgaacguacuugcaga

SEQ ID NO: 52063 - RNA, 25 nt, Artificial Sequence
  Description of Artificial Sequence: Synthetic oligonucleotide
acugauacagaacgaucgauacaga

SEQ ID NO: 52064 - RNA, 25 nt, Artificial Sequence
  Description of Artificial Sequence: Synthetic oligonucleotide
auauuauauauauauaaaaauaaau

SEQ ID NO: 52065 - RNA, 25 nt, Artificial Sequence
  Description of Artificial Sequence: Synthetic oligonucleotide
auuauauauauauaaaaauaaauau

SEQ ID NO: 52066 - RNA, 25 nt, Artificial Sequence
  Description of Artificial Sequence: Synthetic oligonucleotide
ucacuggauguauuugacugcugug

SEQ ID NO: 52067 - RNA, 25 nt, Artificial Sequence
  Description of Artificial Sequence: Synthetic oligonucleotide
cagggaagaggaggagaugagagac

SEQ ID NO: 52068 - RNA, 25 nt, Artificial Sequence
  Description of Artificial Sequence: Synthetic oligonucleotide
augaucuuuuuuuugucccacuugg

SEQ ID NO: 52069 - RNA, 27 nt, Artificial Sequence
  Description of Artificial Sequence: Synthetic oligonucleotide
ggccgugaacuccucaucaaaauaccu

SEQ ID NO: 52070 - RNA, 27 nt, Artificial Sequence
  Description of Artificial Sequence: Synthetic oligonucleotide
uggugugauggugaucaucugggccgu

SEQ ID NO: 52071 - RNA, 27 nt, Artificial Sequence
  Description of Artificial Sequence: Synthetic oligonucleotide
aaacccgcaggauaguuuucuucccua

SEQ ID NO: 52072 - RNA, 27 nt, Artificial Sequence
  Description of Artificial Sequence: Synthetic oligonucleotide
caaacuggaugaaauaaauuaaaaccc

SEQ ID NO: 52073 - RNA, 27 nt, Artificial Sequence
  Description of Artificial Sequence: Synthetic oligonucleotide
agaaguccuuaacauuucccuacguga

SEQ ID NO: 52074 - RNA, 27 nt, Artificial Sequence
  Description of Artificial Sequence: Synthetic oligonucleotide
cucugucccacuggguaaacccuggcc

SEQ ID NO: 52075 - RNA, 27 nt, Artificial Sequence
  Description of Artificial Sequence: Synthetic oligonucleotide
cacaauaacaaauuuaaaccuugcucc

SEQ ID NO: 52076 - RNA, 27 nt, Artificial Sequence
  Description of Artificial Sequence: Synthetic oligonucleotide
aaaugcauuugaacaacauaauacaca

SEQ ID NO: 52077 - RNA, 27 nt, Artificial Sequence
  Description of Artificial Sequence: Synthetic oligonucleotide
ggcuuuccugucacaaagauuaaaaac

SEQ ID NO: 52078 - RNA, 27 nt, Artificial Sequence
  Description of Artificial Sequence: Synthetic oligonucleotide
agggcuuuccugucacaaagauuaaaa

SEQ ID NO: 52079 - RNA, 27 nt, Artificial Sequence
  Description of Artificial Sequence: Synthetic oligonucleotide
ggccaugcugggagacauaagcagcag

SEQ ID NO: 52080 - RNA, 27 nt, Artificial Sequence
  Description of Artificial Sequence: Synthetic oligonucleotide
ucagggagaagcuucugaaacacuucu

SEQ ID NO: 52081 - RNA, 27 nt, Artificial Sequence
  Description of Artificial Sequence: Synthetic oligonucleotide
aagggcuucuuccuuauugauggucag

SEQ ID NO: 52082 - RNA, 27 nt, Artificial Sequence
  Description of Artificial Sequence: Synthetic oligonucleotide
ugaagggcuucuuccuuauugaugguc

SEQ ID NO: 52083 - RNA, 27 nt, Artificial Sequence
  Description of Artificial Sequence: Synthetic oligonucleotide
cgcugaagggcuucuuccuuauugaug

SEQ ID NO: 52084 - RNA, 27 nt, Artificial Sequence
  Description of Artificial Sequence: Synthetic oligonucleotide
gccgcugaagggcuucuuccuuauuga

SEQ ID NO: 52085 - RNA, 27 nt, Artificial Sequence
  Description of Artificial Sequence: Synthetic oligonucleotide
acuggccgcugaagggcuucuuccuua

SEQ ID NO: 52086 - RNA, 27 nt, Artificial Sequence
  Description of Artificial Sequence: Synthetic oligonucleotide
cggagcuuuucaccuuuaguuaugcuu

SEQ ID NO: 52087 - RNA, 27 nt, Artificial Sequence
  Description of Artificial Sequence: Synthetic oligonucleotide
ccggagcuuuucaccuuuaguuaugcu

SEQ ID NO: 52088 - RNA, 27 nt, Artificial Sequence
  Description of Artificial Sequence: Synthetic oligonucleotide
cagacuguugacuggcgugauguaguu

SEQ ID NO: 52089 - RNA, 27 nt, Artificial Sequence
  Description of Artificial Sequence: Synthetic oligonucleotide
cuuuugaacucugcuuaaauccagugg

SEQ ID NO: 52090 - RNA, 27 nt, Artificial Sequence
  Description of Artificial Sequence: Synthetic oligonucleotide
gcuuuugaacucugcuuaaauccagug

SEQ ID NO: 52091 - RNA, 27 nt, Artificial Sequence
  Description of Artificial Sequence: Synthetic oligonucleotide
agggcuuuugaacucugcuuaaaucca

SEQ ID NO: 52092 - RNA, 27 nt, Artificial Sequence
  Description of Artificial Sequence: Synthetic oligonucleotide
aagggcuuuugaacucugcuuaaaucc

SEQ ID NO: 52093 - RNA, 27 nt, Artificial Sequence
  Description of Artificial Sequence: Synthetic oligonucleotide
ugaagggcuuuugaacucugcuuaaau

SEQ ID NO: 52094 - RNA, 27 nt, Artificial Sequence
  Description of Artificial Sequence: Synthetic oligonucleotide
cugaagggcuuuugaacucugcuuaaa

SEQ ID NO: 52095 - RNA, 27 nt, Artificial Sequence
  Description of Artificial Sequence: Synthetic oligonucleotide
cgcugaagggcuuuugaacucugcuua

SEQ ID NO: 52096 - RNA, 27 nt, Artificial Sequence
  Description of Artificial Sequence: Synthetic oligonucleotide
cgagcggcuucacucagacccugaggc

SEQ ID NO: 52097 - RNA, 27 nt, Artificial Sequence
  Description of Artificial Sequence: Synthetic oligonucleotide
uugacuggcgugauguaguugcuuggg

SEQ ID NO: 52098 - RNA, 27 nt, Artificial Sequence
  Description of Artificial Sequence: Synthetic oligonucleotide
cacgcaccaagaagcugccauugaucc

SEQ ID NO: 52099 - RNA, 27 nt, Artificial Sequence
  Description of Artificial Sequence: Synthetic oligonucleotide
cugaugaauccaaugugggcuggaauc

SEQ ID NO: 52100 - RNA, 27 nt, Artificial Sequence
  Description of Artificial Sequence: Synthetic oligonucleotide
cuuagguauuccacauucucagcugug

SEQ ID NO: 52101 - RNA, 27 nt, Artificial Sequence
  Description of Artificial Sequence: Synthetic oligonucleotide
ugagccucaaauuaggagauacguuuu

SEQ ID NO: 52102 - RNA, 27 nt, Artificial Sequence
  Description of Artificial Sequence: Synthetic oligonucleotide
ccaauuguagagaaauuauuuuaggaa

SEQ ID NO: 52103 - RNA, 27 nt, Artificial Sequence
  Description of Artificial Sequence: Synthetic oligonucleotide
ggcuccuaacuagcugaaucuuccaau

SEQ ID NO: 52104 - RNA, 27 nt, Artificial Sequence
  Description of Artificial Sequence: Synthetic oligonucleotide
guggauauugacuaggagaguuuaaaa

SEQ ID NO: 52105 - RNA, 27 nt, Artificial Sequence
  Description of Artificial Sequence: Synthetic oligonucleotide
ugugacugaacauaacuguaggcugaa

SEQ ID NO: 52106 - RNA, 27 nt, Artificial Sequence
  Description of Artificial Sequence: Synthetic oligonucleotide
guaugugugugugacugaacauaacug

SEQ ID NO: 52107 - RNA, 27 nt, Artificial Sequence
  Description of Artificial Sequence: Synthetic oligonucleotide
aagcaaaaggaacauuuuguaugugug

SEQ ID NO: 52108 - RNA, 27 nt, Artificial Sequence
  Description of Artificial Sequence: Synthetic oligonucleotide
aaaaauuacuuuaaaagcaaaaggaac

SEQ ID NO: 52109 - RNA, 27 nt, Artificial Sequence
  Description of Artificial Sequence: Synthetic oligonucleotide
ccauugacuguugcuucacaggucaga

SEQ ID NO: 52110 - RNA, 27 nt, Artificial Sequence
  Description of Artificial Sequence: Synthetic oligonucleotide
auugguuugucgaugugugagauaguu

SEQ ID NO: 52111 - RNA, 27 nt, Artificial Sequence
  Description of Artificial Sequence: Synthetic oligonucleotide
agugguagcaguacaauugaggacaag

SEQ ID NO: 52112 - RNA, 27 nt, Artificial Sequence
  Description of Artificial Sequence: Synthetic oligonucleotide
uaagaccgcuugccagcuacgguuuca

SEQ ID NO: 52113 - RNA, 27 nt, Artificial Sequence
  Description of Artificial Sequence: Synthetic oligonucleotide
agccgguaagaccgcuugccagcuacg

SEQ ID NO: 52114 - RNA, 27 nt, Artificial Sequence
  Description of Artificial Sequence: Synthetic oligonucleotide
gguaacccaucuuuuaaccauacaacu

SEQ ID NO: 52115 - RNA, 27 nt, Artificial Sequence
  Description of Artificial Sequence: Synthetic oligonucleotide
ucgcagguaacccaucuuuuaaccaua

SEQ ID NO: 52116 - RNA, 27 nt, Artificial Sequence
  Description of Artificial Sequence: Synthetic oligonucleotide
cucagcaagauuguauaauucccugca

SEQ ID NO: 52117 - RNA, 27 nt, Artificial Sequence
  Description of Artificial Sequence: Synthetic oligonucleotide
acuguuuuaugcucagcaagauuguau

SEQ ID NO: 52118 - RNA, 27 nt, Artificial Sequence
  Description of Artificial Sequence: Synthetic oligonucleotide
aggauaaaggacucuucauuauuggaa

SEQ ID NO: 52119 - RNA, 27 nt, Artificial Sequence
  Description of Artificial Sequence: Synthetic oligonucleotide
caacuugcguuggaacauccaaagugu

SEQ ID NO: 52120 - RNA, 27 nt, Artificial Sequence
  Description of Artificial Sequence: Synthetic oligonucleotide
augguuucaguuuaguggaagcauuua

SEQ ID NO: 52121 - RNA, 27 nt, Artificial Sequence
  Description of Artificial Sequence: Synthetic oligonucleotide
auauuuaacaaagucaaacuuucucac

SEQ ID NO: 52122 - RNA, 27 nt, Artificial Sequence
  Description of Artificial Sequence: Synthetic oligonucleotide
aacuuuuaauauacaguaguucuuuuc

SEQ ID NO: 52123 - RNA, 27 nt, Artificial Sequence
  Description of Artificial Sequence: Synthetic oligonucleotide
guuaagucaaaacccguauuucuaaag

SEQ ID NO: 52124 - RNA, 27 nt, Artificial Sequence
  Description of Artificial Sequence: Synthetic oligonucleotide
gugcugaguuugcuguacccauguuga

SEQ ID NO: 52125 - RNA, 27 nt, Artificial Sequence
  Description of Artificial Sequence: Synthetic oligonucleotide
ugaggucagcaucuucugugucuuuac

SEQ ID NO: 52126 - RNA, 27 nt, Artificial Sequence
  Description of Artificial Sequence: Synthetic oligonucleotide
gcgaucugaauaaaccucccuacuagc

SEQ ID NO: 52127 - RNA, 27 nt, Artificial Sequence
  Description of Artificial Sequence: Synthetic oligonucleotide
aucccagaacccugcugcagaaggcca

SEQ ID NO: 52128 - RNA, 27 nt, Artificial Sequence
  Description of Artificial Sequence: Synthetic oligonucleotide
cauaauuuccaauauguaccagaccuu

SEQ ID NO: 52129 - RNA, 27 nt, Artificial Sequence
  Description of Artificial Sequence: Synthetic oligonucleotide
cuagugcuuccaucggaaggacuaggu

SEQ ID NO: 52130 - RNA, 27 nt, Artificial Sequence
  Description of Artificial Sequence: Synthetic oligonucleotide
uccacauaaaaacaauauucacuggga

SEQ ID NO: 52131 - RNA, 27 nt, Artificial Sequence
  Description of Artificial Sequence: Synthetic oligonucleotide
ucuaccaauuccaacuugaauucauug

SEQ ID NO: 52132 - RNA, 27 nt, Artificial Sequence
  Description of Artificial Sequence: Synthetic oligonucleotide
ucuccaagucuaaaucuguguccugag

SEQ ID NO: 52133 - RNA, 27 nt, Artificial Sequence
  Description of Artificial Sequence: Synthetic oligonucleotide
uggaauacuguaacugugcuuugagga

SEQ ID NO: 52134 - RNA, 27 nt, Artificial Sequence
  Description of Artificial Sequence: Synthetic oligonucleotide
uuaauucaucagugguggcagugguag

SEQ ID NO: 52135 - RNA, 27 nt, Artificial Sequence
  Description of Artificial Sequence: Synthetic oligonucleotide
gugaugauguggcacuaguaguuucuu

SEQ ID NO: 52136 - RNA, 27 nt, Artificial Sequence
  Description of Artificial Sequence: Synthetic oligonucleotide
ucuguuuggugaggcuguccgacuuug

SEQ ID NO: 52137 - RNA, 27 nt, Artificial Sequence
  Description of Artificial Sequence: Synthetic oligonucleotide
ccaucauguuccauuuuucgcuuucuc

SEQ ID NO: 52138 - RNA, 27 nt, Artificial Sequence
  Description of Artificial Sequence: Synthetic oligonucleotide
gcagucuacaugcuaaaucagagggua

SEQ ID NO: 52139 - RNA, 27 nt, Artificial Sequence
  Description of Artificial Sequence: Synthetic oligonucleotide
cauaaauagauccuuaaauagcucaaa

SEQ ID NO: 52140 - RNA, 27 nt, Artificial Sequence
  Description of Artificial Sequence: Synthetic oligonucleotide
ugauaauagugcuuuuucaccuuuuuc

SEQ ID NO: 52141 - RNA, 27 nt, Artificial Sequence
  Description of Artificial Sequence: Synthetic oligonucleotide
gcagaacugauaauagugcuuuuucac

SEQ ID NO: 52142 - RNA, 27 nt, Artificial Sequence
  Description of Artificial Sequence: Synthetic oligonucleotide
guagguuuaaucuuucuuuucagccau

SEQ ID NO: 52143 - RNA, 27 nt, Artificial Sequence
  Description of Artificial Sequence: Synthetic oligonucleotide
agaaggauuuuauuauaaggguuuaau

SEQ ID NO: 52144 - RNA, 27 nt, Artificial Sequence
  Description of Artificial Sequence: Synthetic oligonucleotide
gucuacagcauuggcuaauaguaugaa

SEQ ID NO: 52145 - RNA, 27 nt, Artificial Sequence
  Description of Artificial Sequence: Synthetic oligonucleotide
cuauuccuaucaaaaugcuucugucua

SEQ ID NO: 52146 - RNA, 27 nt, Artificial Sequence
  Description of Artificial Sequence: Synthetic oligonucleotide
ucagggccauuaucuuauuugcucuau

SEQ ID NO: 52147 - RNA, 27 nt, Artificial Sequence
  Description of Artificial Sequence: Synthetic oligonucleotide
ugcuugaggaagagaaaaauguugguc

SEQ ID NO: 52148 - RNA, 27 nt, Artificial Sequence
  Description of Artificial Sequence: Synthetic oligonucleotide
ugggcugaacuuuucucauacuuaaag

SEQ ID NO: 52149 - RNA, 27 nt, Artificial Sequence
  Description of Artificial Sequence: Synthetic oligonucleotide
gguucagcagccaucuuuauuccugcg

SEQ ID NO: 52150 - RNA, 27 nt, Artificial Sequence
  Description of Artificial Sequence: Synthetic oligonucleotide
ugaagagaacuuggucauucaaauuuc

SEQ ID NO: 52151 - RNA, 27 nt, Artificial Sequence
  Description of Artificial Sequence: Synthetic oligonucleotide
cucuaggcuggcuaucuuuauacauac

SEQ ID NO: 52152 - RNA, 27 nt, Artificial Sequence
  Description of Artificial Sequence: Synthetic oligonucleotide
acacuucacagagauaguuacagccau

SEQ ID NO: 52153 - RNA, 27 nt, Artificial Sequence
  Description of Artificial Sequence: Synthetic oligonucleotide
uugaaauuuucucacacuucacagaga

SEQ ID NO: 52154 - RNA, 27 nt, Artificial Sequence
  Description of Artificial Sequence: Synthetic oligonucleotide
ucaggaggauucauuuccuuaaaggaa

SEQ ID NO: 52155 - RNA, 27 nt, Artificial Sequence
  Description of Artificial Sequence: Synthetic oligonucleotide
auaugaugucacuuuuuguauccuuga

SEQ ID NO: 52156 - RNA, 27 nt, Artificial Sequence
  Description of Artificial Sequence: Synthetic oligonucleotide
uaugaugaagauucaaauugcaucuua

SEQ ID NO: 52157 - RNA, 27 nt, Artificial Sequence
  Description of Artificial Sequence: Synthetic oligonucleotide
uuaauagcuagucuucguuuugaacag

SEQ ID NO: 52158 - RNA, 27 nt, Artificial Sequence
  Description of Artificial Sequence: Synthetic oligonucleotide
auuuuuaguagagaugagguuucacca

SEQ ID NO: 52159 - RNA, 27 nt, Artificial Sequence
  Description of Artificial Sequence: Synthetic oligonucleotide
aggcgagauagagcuucucuuucguuc

SEQ ID NO: 52160 - RNA, 27 nt, Artificial Sequence
  Description of Artificial Sequence: Synthetic oligonucleotide
aacuggaccgaaggcgcuuguggagaa

SEQ ID NO: 52161 - RNA, 27 nt, Artificial Sequence
  Description of Artificial Sequence: Synthetic oligonucleotide
gcggcuacaucuuuggaaucuucuccu

SEQ ID NO: 52162 - RNA, 27 nt, Artificial Sequence
  Description of Artificial Sequence: Synthetic oligonucleotide
caagucuccucauugaauccagauugg

SEQ ID NO: 52163 - RNA, 27 nt, Artificial Sequence
  Description of Artificial Sequence: Synthetic oligonucleotide
uccucacuacucucaaaucuguucugg

SEQ ID NO: 52164 - RNA, 27 nt, Artificial Sequence
  Description of Artificial Sequence: Synthetic oligonucleotide
uuuguacucaucugcacagcucuggcu

SEQ ID NO: 52165 - RNA, 27 nt, Artificial Sequence
  Description of Artificial Sequence: Synthetic oligonucleotide
gcccauuaacaacaacaaucugaggug

SEQ ID NO: 52166 - RNA, 27 nt, Artificial Sequence
  Description of Artificial Sequence: Synthetic oligonucleotide
aauaaauuaaaaauaauuaaaauagug

SEQ ID NO: 52167 - RNA, 27 nt, Artificial Sequence
  Description of Artificial Sequence: Synthetic oligonucleotide
cauauuuaaauauuaauaaauuaaaaa

SEQ ID NO: 52168 - RNA, 27 nt, Artificial Sequence
  Description of Artificial Sequence: Synthetic oligonucleotide
gaaacaaaggauauucaaacugcauag

SEQ ID NO: 52169 - RNA, 27 nt, Artificial Sequence
  Description of Artificial Sequence: Synthetic oligonucleotide
caaacacuuagacgccagcagcauggg

SEQ ID NO: 52170 - RNA, 27 nt, Artificial Sequence
  Description of Artificial Sequence: Synthetic oligonucleotide
uuugucacaggugaaaugcacaucuga

SEQ ID NO: 52171 - RNA, 27 nt, Artificial Sequence
  Description of Artificial Sequence: Synthetic oligonucleotide
uaauucagccuggcacagguuuugauc

SEQ ID NO: 52172 - RNA, 27 nt, Artificial Sequence
  Description of Artificial Sequence: Synthetic oligonucleotide
auuguaagaaugacuacccacauucac

SEQ ID NO: 52173 - RNA, 27 nt, Artificial Sequence
  Description of Artificial Sequence: Synthetic oligonucleotide
caauuguaagaaugacuacccacauuc

SEQ ID NO: 52174 - RNA, 27 nt, Artificial Sequence
  Description of Artificial Sequence: Synthetic oligonucleotide
guacacucucugaugcucauuuucaua

SEQ ID NO: 52175 - RNA, 27 nt, Artificial Sequence
  Description of Artificial Sequence: Synthetic oligonucleotide
cugcugaguucuacaugaaaagcaaau

SEQ ID NO: 52176 - RNA, 27 nt, Artificial Sequence
  Description of Artificial Sequence: Synthetic oligonucleotide
uacugaaaauaaauauagaaauacaac

SEQ ID NO: 52177 - RNA, 27 nt, Artificial Sequence
  Description of Artificial Sequence: Synthetic oligonucleotide
uuccauuuaagaaacauuaaucaaaac

SEQ ID NO: 52178 - RNA, 27 nt, Artificial Sequence
  Description of Artificial Sequence: Synthetic oligonucleotide
acaauuuuaggcacuauacacguuguu

SEQ ID NO: 52179 - RNA, 27 nt, Artificial Sequence
  Description of Artificial Sequence: Synthetic oligonucleotide
ccagauguuaguagccaaggauauggu

SEQ ID NO: 52180 - RNA, 27 nt, Artificial Sequence
  Description of Artificial Sequence: Synthetic oligonucleotide
agcucacagucuccagauguuaguagc

SEQ ID NO: 52181 - RNA, 27 nt, Artificial Sequence
  Description of Artificial Sequence: Synthetic oligonucleotide
auuaauaaaaagcacacaacuuauggc

SEQ ID NO: 52182 - RNA, 27 nt, Artificial Sequence
  Description of Artificial Sequence: Synthetic oligonucleotide
aauguaagaagagccaaaaugaugcau

SEQ ID NO: 52183 - RNA, 27 nt, Artificial Sequence
  Description of Artificial Sequence: Synthetic oligonucleotide
acauuuuuacaaauguaagaagagcca

SEQ ID NO: 52184 - RNA, 27 nt, Artificial Sequence
  Description of Artificial Sequence: Synthetic oligonucleotide
aauaugaauuaagaugaccuaaucugu

SEQ ID NO: 52185 - RNA, 27 nt, Artificial Sequence
  Description of Artificial Sequence: Synthetic oligonucleotide
ucaugauuaguucuuucaauuccaucc

SEQ ID NO: 52186 - RNA, 27 nt, Artificial Sequence
  Description of Artificial Sequence: Synthetic oligonucleotide
cccaagagcagaaggaaugagugugca

SEQ ID NO: 52187 - RNA, 27 nt, Artificial Sequence
  Description of Artificial Sequence: Synthetic oligonucleotide
cucaaagcuacugguuaccucuacacc

SEQ ID NO: 52188 - RNA, 27 nt, Artificial Sequence
  Description of Artificial Sequence: Synthetic oligonucleotide
ugaaauauuacguggcaugugguuggg

SEQ ID NO: 52189 - RNA, 27 nt, Artificial Sequence
  Description of Artificial Sequence: Synthetic oligonucleotide
agugaagagaauaacuuguuuccgaag

SEQ ID NO: 52190 - RNA, 27 nt, Artificial Sequence
  Description of Artificial Sequence: Synthetic oligonucleotide
uuucuuagcauuaguuauugggaguga

SEQ ID NO: 52191 - RNA, 27 nt, Artificial Sequence
  Description of Artificial Sequence: Synthetic oligonucleotide
uugauuuucagcauuucuuagcauuag

SEQ ID NO: 52192 - RNA, 27 nt, Artificial Sequence
  Description of Artificial Sequence: Synthetic oligonucleotide
aaaguaaucauauuuagagaaagacag

SEQ ID NO: 52193 - RNA, 27 nt, Artificial Sequence
  Description of Artificial Sequence: Synthetic oligonucleotide
uguagaacaaaaugccugaaauucagc

SEQ ID NO: 52194 - RNA, 27 nt, Artificial Sequence
  Description of Artificial Sequence: Synthetic oligonucleotide
gagagucccgggugagagggaaucgcc

SEQ ID NO: 52195 - RNA, 27 nt, Artificial Sequence
  Description of Artificial Sequence: Synthetic oligonucleotide
cuuuacuuuaaagguucacuuuccuug

SEQ ID NO: 52196 - RNA, 27 nt, Artificial Sequence
  Description of Artificial Sequence: Synthetic oligonucleotide
ccaggcuuccagagcaugcagccuccu

SEQ ID NO: 52197 - RNA, 27 nt, Artificial Sequence
  Description of Artificial Sequence: Synthetic oligonucleotide
cucucuuuuguuuucuguucagagaaa

SEQ ID NO: 52198 - RNA, 27 nt, Artificial Sequence
  Description of Artificial Sequence: Synthetic oligonucleotide
cggcauaacugauuacagccaaguuca

SEQ ID NO: 52199 - RNA, 27 nt, Artificial Sequence
  Description of Artificial Sequence: Synthetic oligonucleotide
uggacuucuuuuaauuuuggcuucuuc

SEQ ID NO: 52200 - RNA, 27 nt, Artificial Sequence
  Description of Artificial Sequence: Synthetic oligonucleotide
uaaccucaccuggacuucuuuuaauuu

SEQ ID NO: 52201 - RNA, 27 nt, Artificial Sequence
  Description of Artificial Sequence: Synthetic oligonucleotide
guccucuucccgauaauccggauucag

SEQ ID NO: 52202 - RNA, 27 nt, Artificial Sequence
  Description of Artificial Sequence: Synthetic oligonucleotide
acaauacuugcuuugaugucacauuaa

SEQ ID NO: 52203 - RNA, 27 nt, Artificial Sequence
  Description of Artificial Sequence: Synthetic oligonucleotide
gagugcuacaauacuugcuuugauguc

SEQ ID NO: 52204 - RNA, 27 nt, Artificial Sequence
  Description of Artificial Sequence: Synthetic oligonucleotide
auuugugguuuuguuuucucucucucu

SEQ ID NO: 52205 - RNA, 27 nt, Artificial Sequence
  Description of Artificial Sequence: Synthetic oligonucleotide
uguaugggcuuaaauacuacagcgagg

SEQ ID NO: 52206 - RNA, 27 nt, Artificial Sequence
  Description of Artificial Sequence: Synthetic oligonucleotide
cuguaugggcuuaaauacuacagcgag

SEQ ID NO: 52207 - RNA, 27 nt, Artificial Sequence
  Description of Artificial Sequence: Synthetic oligonucleotide
ggaagguuucuguaugggcuuaaauac

SEQ ID NO: 52208 - RNA, 27 nt, Artificial Sequence
  Description of Artificial Sequence: Synthetic oligonucleotide
guagguauaccauguuuauuuuaauac

SEQ ID NO: 52209 - RNA, 27 nt, Artificial Sequence
  Description of Artificial Sequence: Synthetic oligonucleotide
uccgaaaacuggccgaucagaacagcc

SEQ ID NO: 52210 - RNA, 27 nt, Artificial Sequence
  Description of Artificial Sequence: Synthetic oligonucleotide
cccuguuccaaaguucaaauuauuugu

SEQ ID NO: 52211 - RNA, 27 nt, Artificial Sequence
  Description of Artificial Sequence: Synthetic oligonucleotide
acuggaaaguuaaauuaaggucgcaau

SEQ ID NO: 52212 - RNA, 27 nt, Artificial Sequence
  Description of Artificial Sequence: Synthetic oligonucleotide
caaaaccaaacuuuagcuuucucagcc

SEQ ID NO: 52213 - RNA, 27 nt, Artificial Sequence
  Description of Artificial Sequence: Synthetic oligonucleotide
uacagugggaaguagcaucuuuacuuu

SEQ ID NO: 52214 - RNA, 27 nt, Artificial Sequence
  Description of Artificial Sequence: Synthetic oligonucleotide
ucauaugguaucagcaauuaagcagua

SEQ ID NO: 52215 - RNA, 27 nt, Artificial Sequence
  Description of Artificial Sequence: Synthetic oligonucleotide
cagcccauguuucauucauaugguauc

SEQ ID NO: 52216 - RNA, 27 nt, Artificial Sequence
  Description of Artificial Sequence: Synthetic oligonucleotide
uaugaaaaaguuggauaagaaaguugg

SEQ ID NO: 52217 - RNA, 27 nt, Artificial Sequence
  Description of Artificial Sequence: Synthetic oligonucleotide
uccggccucaugaugucaugcaaggcu

SEQ ID NO: 52218 - RNA, 27 nt, Artificial Sequence
  Description of Artificial Sequence: Synthetic oligonucleotide
acaaaugcagucauauacaaauucagg

SEQ ID NO: 52219 - RNA, 27 nt, Artificial Sequence
  Description of Artificial Sequence: Synthetic oligonucleotide
gguaguaaacauucuacuaggauucuu

SEQ ID NO: 52220 - RNA, 27 nt, Artificial Sequence
  Description of Artificial Sequence: Synthetic oligonucleotide
uuucaucaaaaaauucuucccuuucug

SEQ ID NO: 52221 - RNA, 27 nt, Artificial Sequence
  Description of Artificial Sequence: Synthetic oligonucleotide
aaauucacacacuggcaugccgauagc

SEQ ID NO: 52222 - RNA, 27 nt, Artificial Sequence
  Description of Artificial Sequence: Synthetic oligonucleotide
acauacauugcucuacuaugaggugaa

SEQ ID NO: 52223 - RNA, 27 nt, Artificial Sequence
  Description of Artificial Sequence: Synthetic oligonucleotide
uauauaugugcuuuggcaauucuggug

SEQ ID NO: 52224 - RNA, 27 nt, Artificial Sequence
  Description of Artificial Sequence: Synthetic oligonucleotide
ggagaaacuauuacccagaucaccacu

SEQ ID NO: 52225 - RNA, 27 nt, Artificial Sequence
  Description of Artificial Sequence: Synthetic oligonucleotide
auuuggagaaacuauuacccagaucac

SEQ ID NO: 52226 - RNA, 27 nt, Artificial Sequence
  Description of Artificial Sequence: Synthetic oligonucleotide
uuucuaggaaguauucaucacauccac

SEQ ID NO: 52227 - RNA, 27 nt, Artificial Sequence
  Description of Artificial Sequence: Synthetic oligonucleotide
cauauaugguguagcuguggaaaugcg

SEQ ID NO: 52228 - RNA, 27 nt, Artificial Sequence
  Description of Artificial Sequence: Synthetic oligonucleotide
cuccauucauauaugguguagcugugg

SEQ ID NO: 52229 - RNA, 27 nt, Artificial Sequence
  Description of Artificial Sequence: Synthetic oligonucleotide
aucuucuucucguguaagaacugcagc

SEQ ID NO: 52230 - RNA, 27 nt, Artificial Sequence
  Description of Artificial Sequence: Synthetic oligonucleotide
ucccuguaaaugaucuucuucucgugu

SEQ ID NO: 52231 - RNA, 27 nt, Artificial Sequence
  Description of Artificial Sequence: Synthetic oligonucleotide
gucccuguaaaugaucuucuucucgug

SEQ ID NO: 52232 - RNA, 27 nt, Artificial Sequence
  Description of Artificial Sequence: Synthetic oligonucleotide
ucaggucccuguaaaugaucuucuucu

SEQ ID NO: 52233 - RNA, 27 nt, Artificial Sequence
  Description of Artificial Sequence: Synthetic oligonucleotide
gaugcagucaaacaccucuuccucugu

SEQ ID NO: 52234 - RNA, 27 nt, Artificial Sequence
  Description of Artificial Sequence: Synthetic oligonucleotide
cgaugcagucaaacaccucuuccucug

SEQ ID NO: 52235 - RNA, 27 nt, Artificial Sequence
  Description of Artificial Sequence: Synthetic oligonucleotide
cccugugaacucgcccucaaaguagcg

SEQ ID NO: 52236 - RNA, 27 nt, Artificial Sequence
  Description of Artificial Sequence: Synthetic oligonucleotide
ggacagaggugccaggagaugcccuca

SEQ ID NO: 52237 - RNA, 27 nt, Artificial Sequence
  Description of Artificial Sequence: Synthetic oligonucleotide
uuaaaaagacaaaccauaucacuccuu

SEQ ID NO: 52238 - RNA, 27 nt, Artificial Sequence
  Description of Artificial Sequence: Synthetic oligonucleotide
cuuaaaaagacaaaccauaucacuccu

SEQ ID NO: 52239 - RNA, 27 nt, Artificial Sequence
  Description of Artificial Sequence: Synthetic oligonucleotide
gacaaccuuuaggaucuuuacugcaac

SEQ ID NO: 52240 - RNA, 27 nt, Artificial Sequence
  Description of Artificial Sequence: Synthetic oligonucleotide
gucgacaaccuuuaggaucuuuacugc

SEQ ID NO: 52241 - RNA, 27 nt, Artificial Sequence
  Description of Artificial Sequence: Synthetic oligonucleotide
acaauugccagguuguccuuugucaug

SEQ ID NO: 52242 - RNA, 27 nt, Artificial Sequence
  Description of Artificial Sequence: Synthetic oligonucleotide
ccucgcaccacugggucacaauugcca

SEQ ID NO: 52243 - RNA, 27 nt, Artificial Sequence
  Description of Artificial Sequence: Synthetic oligonucleotide
auuucaugucucuauggaugauguucu

SEQ ID NO: 52244 - RNA, 27 nt, Artificial Sequence
  Description of Artificial Sequence: Synthetic oligonucleotide
uggagaaauauauuguuggauuucaug

SEQ ID NO: 52245 - RNA, 27 nt, Artificial Sequence
  Description of Artificial Sequence: Synthetic oligonucleotide
agccuucauggagaaauauauuguugg

SEQ ID NO: 52246 - RNA, 27 nt, Artificial Sequence
  Description of Artificial Sequence: Synthetic oligonucleotide
accacuccagcgugacuuuacuguugc

SEQ ID NO: 52247 - RNA, 27 nt, Artificial Sequence
  Description of Artificial Sequence: Synthetic oligonucleotide
ccucucuuccuuuacuuucuucacaca

SEQ ID NO: 52248 - RNA, 27 nt, Artificial Sequence
  Description of Artificial Sequence: Synthetic oligonucleotide
gcccgaugcaaggauggcucggaagcg

SEQ ID NO: 52249 - RNA, 27 nt, Artificial Sequence
  Description of Artificial Sequence: Synthetic oligonucleotide
cacaguaggauauucaaccuccauuuc

SEQ ID NO: 52250 - RNA, 27 nt, Artificial Sequence
  Description of Artificial Sequence: Synthetic oligonucleotide
uuacacaguaggauauucaaccuccau

SEQ ID NO: 52251 - RNA, 27 nt, Artificial Sequence
  Description of Artificial Sequence: Synthetic oligonucleotide
uacacuacaagggaaaacucaaaaucu

SEQ ID NO: 52252 - RNA, 27 nt, Artificial Sequence
  Description of Artificial Sequence: Synthetic oligonucleotide
caaucaacaaagaacaaacaggauaaa

SEQ ID NO: 52253 - RNA, 27 nt, Artificial Sequence
  Description of Artificial Sequence: Synthetic oligonucleotide
uuucaaucaacaaagaacaaacaggau

SEQ ID NO: 52254 - RNA, 27 nt, Artificial Sequence
  Description of Artificial Sequence: Synthetic oligonucleotide
auggaagaaaaagaaggcuguagagaa

SEQ ID NO: 52255 - RNA, 27 nt, Artificial Sequence
  Description of Artificial Sequence: Synthetic oligonucleotide
uagaaggaagauuagcuauggaagaaa

SEQ ID NO: 52256 - RNA, 27 nt, Artificial Sequence
  Description of Artificial Sequence: Synthetic oligonucleotide
augaagcauucaacaggaagauuauuu

SEQ ID NO: 52257 - RNA, 27 nt, Artificial Sequence
  Description of Artificial Sequence: Synthetic oligonucleotide
caugaagcauucaacaggaagauuauu

SEQ ID NO: 52258 - RNA, 27 nt, Artificial Sequence
  Description of Artificial Sequence: Synthetic oligonucleotide
ucaaaguagaauucaagucaugaagca

SEQ ID NO: 52259 - RNA, 27 nt, Artificial Sequence
  Description of Artificial Sequence: Synthetic oligonucleotide
gucuguaguugcuucucucccucuuag

SEQ ID NO: 52260 - RNA, 27 nt, Artificial Sequence
  Description of Artificial Sequence: Synthetic oligonucleotide
guugaccuuggucugguaggagacggc

SEQ ID NO: 52261 - RNA, 27 nt, Artificial Sequence
  Description of Artificial Sequence: Synthetic oligonucleotide
gucgagauagucgggccgauugaucuc

SEQ ID NO: 52262 - RNA, 27 nt, Artificial Sequence
  Description of Artificial Sequence: Synthetic oligonucleotide
guuugggaagguuggauguucguccuc

SEQ ID NO: 52263 - RNA, 27 nt, Artificial Sequence
  Description of Artificial Sequence: Synthetic oligonucleotide
aguucuaagcuuggguuccgacccuaa

SEQ ID NO: 52264 - RNA, 27 nt, Artificial Sequence
  Description of Artificial Sequence: Synthetic oligonucleotide
uuaaaguucuaagcuuggguuccgacc

SEQ ID NO: 52265 - RNA, 27 nt, Artificial Sequence
  Description of Artificial Sequence: Synthetic oligonucleotide
guugcuuaaaguucuaagcuuggguuc

SEQ ID NO: 52266 - RNA, 27 nt, Artificial Sequence
  Description of Artificial Sequence: Synthetic oligonucleotide
gugguggucuuguugcuuaaaguucua

SEQ ID NO: 52267 - RNA, 27 nt, Artificial Sequence
  Description of Artificial Sequence: Synthetic oligonucleotide
acuuuauuucucgccacugaauaguag

SEQ ID NO: 52268 - RNA, 27 nt, Artificial Sequence
  Description of Artificial Sequence: Synthetic oligonucleotide
aacuuuauuucucgccacugaauagua

SEQ ID NO: 52269 - RNA, 27 nt, Artificial Sequence
  Description of Artificial Sequence: Synthetic oligonucleotide
ggaucauuuccuguuaucuguguuugu

SEQ ID NO: 52270 - RNA, 27 nt, Artificial Sequence
  Description of Artificial Sequence: Synthetic oligonucleotide
guuucauuucuucucuuuucuuaaggc

SEQ ID NO: 52271 - RNA, 27 nt, Artificial Sequence
  Description of Artificial Sequence: Synthetic oligonucleotide
ggaggauggaaacacacuccuucaguu

SEQ ID NO: 52272 - RNA, 27 nt, Artificial Sequence
  Description of Artificial Sequence: Synthetic oligonucleotide
ucaaagauuuucagucccgcggugaca

SEQ ID NO: 52273 - RNA, 27 nt, Artificial Sequence
  Description of Artificial Sequence: Synthetic oligonucleotide
ccugaacggcacgcuuauuucugcugu

SEQ ID NO: 52274 - RNA, 27 nt, Artificial Sequence
  Description of Artificial Sequence: Synthetic oligonucleotide
cuucuggacccugaacggcacgcuuau

SEQ ID NO: 52275 - RNA, 27 nt, Artificial Sequence
  Description of Artificial Sequence: Synthetic oligonucleotide
caagcagucuugagugacuguuucuuc

SEQ ID NO: 52276 - RNA, 27 nt, Artificial Sequence
  Description of Artificial Sequence: Synthetic oligonucleotide
ccaaagacauggaccuucuuccucuga

SEQ ID NO: 52277 - RNA, 27 nt, Artificial Sequence
  Description of Artificial Sequence: Synthetic oligonucleotide
guguuucaggcauauuuugaauacauc

SEQ ID NO: 52278 - RNA, 27 nt, Artificial Sequence
  Description of Artificial Sequence: Synthetic oligonucleotide
gagguacagagaaagggaggaaaauag

SEQ ID NO: 52279 - RNA, 27 nt, Artificial Sequence
  Description of Artificial Sequence: Synthetic oligonucleotide
ucuugucuugcucuaucuuucuuuggu

SEQ ID NO: 52280 - RNA, 27 nt, Artificial Sequence
  Description of Artificial Sequence: Synthetic oligonucleotide
uuucuugucuugcucuaucuuucuuug

SEQ ID NO: 52281 - RNA, 27 nt, Artificial Sequence
  Description of Artificial Sequence: Synthetic oligonucleotide
ggaucuuguacaaacaaaugcuuucuc

SEQ ID NO: 52282 - RNA, 27 nt, Artificial Sequence
  Description of Artificial Sequence: Synthetic oligonucleotide
ucugcaaguacguucguuuaacucaag

SEQ ID NO: 52283 - RNA, 27 nt, Artificial Sequence
  Description of Artificial Sequence: Synthetic oligonucleotide
ucuguaucgaucguucuguaucagucu

SEQ ID NO: 52284 - RNA, 27 nt, Artificial Sequence
  Description of Artificial Sequence: Synthetic oligonucleotide
auuuauuuuuauauauauauaauauau

SEQ ID NO: 52285 - RNA, 27 nt, Artificial Sequence
  Description of Artificial Sequence: Synthetic oligonucleotide
auauuuauuuuuauauauauauaauau

SEQ ID NO: 52286 - RNA, 27 nt, Artificial Sequence
  Description of Artificial Sequence: Synthetic oligonucleotide
cacagcagucaaauacauccagugaag

SEQ ID NO: 52287 - RNA, 27 nt, Artificial Sequence
  Description of Artificial Sequence: Synthetic oligonucleotide
gucucucaucuccuccucuucccuguc

SEQ ID NO: 52288 - RNA, 27 nt, Artificial Sequence
  Description of Artificial Sequence: Synthetic oligonucleotide
ccaagugggacaaaaaaaagaucaugc

SEQ ID NO: 52289 - RNA, 14 nt, Artificial Sequence
  Description of Artificial Sequence: Synthetic oligonucleotide
guauuuugaugagg

SEQ ID NO: 52290 - RNA, 12 nt, Artificial Sequence
  Description of Artificial Sequence: Synthetic oligonucleotide
ggcccagaugau

SEQ ID NO: 52291 - RNA, 14 nt, Artificial Sequence
  Description of Artificial Sequence: Synthetic oligonucleotide
gggaagaaaacuau

SEQ ID NO: 52292 - RNA, 15 nt, Artificial Sequence
  Description of Artificial Sequence: Synthetic oligonucleotide
guuuuaauuuauuuc

SEQ ID NO: 52293 - RNA, 12 nt, Artificial Sequence
  Description of Artificial Sequence: Synthetic oligonucleotide
acguagggaaau

SEQ ID NO: 52294 - RNA, 12 nt, Artificial Sequence
  Description of Artificial Sequence: Synthetic oligonucleotide
ccaggguuuacc

SEQ ID NO: 52295 - RNA, 11 nt, Artificial Sequence
  Description of Artificial Sequence: Synthetic oligonucleotide
agcaagguuua

SEQ ID NO: 52296 - RNA, 12 nt, Artificial Sequence
  Description of Artificial Sequence: Synthetic oligonucleotide
uguauuauguug

SEQ ID NO: 52297 - RNA, 15 nt, Artificial Sequence
  Description of Artificial Sequence: Synthetic oligonucleotide
uuuuaaucuuuguga

SEQ ID NO: 52298 - RNA, 14 nt, Artificial Sequence
  Description of Artificial Sequence: Synthetic oligonucleotide
uuaaucuuugugac

SEQ ID NO: 52299 - RNA, 13 nt, Artificial Sequence
  Description of Artificial Sequence: Synthetic oligonucleotide
gcugcuuaugucu

SEQ ID NO: 52300 - RNA, 14 nt, Artificial Sequence
  Description of Artificial Sequence: Synthetic oligonucleotide
aaguguuucagaag

SEQ ID NO: 52301 - RNA, 13 nt, Artificial Sequence
  Description of Artificial Sequence: Synthetic oligonucleotide
gaccaucaauaag

SEQ ID NO: 52302 - RNA, 13 nt, Artificial Sequence
  Description of Artificial Sequence: Synthetic oligonucleotide
ccaucaauaagga

SEQ ID NO: 52303 - RNA, 14 nt, Artificial Sequence
  Description of Artificial Sequence: Synthetic oligonucleotide
ucaauaaggaagaa

SEQ ID NO: 52304 - RNA, 14 nt, Artificial Sequence
  Description of Artificial Sequence: Synthetic oligonucleotide
aauaaggaagaagc

SEQ ID NO: 52305 - RNA, 13 nt, Artificial Sequence
  Description of Artificial Sequence: Synthetic oligonucleotide
aggaagaagcccu

SEQ ID NO: 52306 - RNA, 13 nt, Artificial Sequence
  Description of Artificial Sequence: Synthetic oligonucleotide
gcauaacuaaagg

SEQ ID NO: 52307 - RNA, 14 nt, Artificial Sequence
  Description of Artificial Sequence: Synthetic oligonucleotide
cauaacuaaaggug

SEQ ID NO: 52308 - RNA, 12 nt, Artificial Sequence
  Description of Artificial Sequence: Synthetic oligonucleotide
cuacaucacgcc

SEQ ID NO: 52309 - RNA, 12 nt, Artificial Sequence
  Description of Artificial Sequence: Synthetic oligonucleotide
acuggauuuaag

SEQ ID NO: 52310 - RNA, 12 nt, Artificial Sequence
  Description of Artificial Sequence: Synthetic oligonucleotide
cuggauuuaagc

SEQ ID NO: 52311 - RNA, 13 nt, Artificial Sequence
  Description of Artificial Sequence: Synthetic oligonucleotide
gauuuaagcagag

SEQ ID NO: 52312 - RNA, 13 nt, Artificial Sequence
  Description of Artificial Sequence: Synthetic oligonucleotide
auuuaagcagagu

SEQ ID NO: 52313 - RNA, 13 nt, Artificial Sequence
  Description of Artificial Sequence: Synthetic oligonucleotide
uuaagcagaguuc

SEQ ID NO: 52314 - RNA, 13 nt, Artificial Sequence
  Description of Artificial Sequence: Synthetic oligonucleotide
uaagcagaguuca

SEQ ID NO: 52315 - RNA, 14 nt, Artificial Sequence
  Description of Artificial Sequence: Synthetic oligonucleotide
agcagaguucaaaa

SEQ ID NO: 52316 - RNA, 12 nt, Artificial Sequence
  Description of Artificial Sequence: Synthetic oligonucleotide
cucagggucuga

SEQ ID NO: 52317 - RNA, 13 nt, Artificial Sequence
  Description of Artificial Sequence: Synthetic oligonucleotide
caagcaacuacau

SEQ ID NO: 52318 - RNA, 12 nt, Artificial Sequence
  Description of Artificial Sequence: Synthetic oligonucleotide
aucaauggcagc

SEQ ID NO: 52319 - RNA, 11 nt, Artificial Sequence
  Description of Artificial Sequence: Synthetic oligonucleotide
uuccagcccac

SEQ ID NO: 52320 - RNA, 12 nt, Artificial Sequence
  Description of Artificial Sequence: Synthetic oligonucleotide
cagcugagaaug

SEQ ID NO: 52321 - RNA, 13 nt, Artificial Sequence
  Description of Artificial Sequence: Synthetic oligonucleotide
aacguaucuccua

SEQ ID NO: 52322 - RNA, 14 nt, Artificial Sequence
  Description of Artificial Sequence: Synthetic oligonucleotide
ccuaaaauaauuuc

SEQ ID NO: 52323 - RNA, 13 nt, Artificial Sequence
  Description of Artificial Sequence: Synthetic oligonucleotide
uggaagauucagc

SEQ ID NO: 52324 - RNA, 12 nt, Artificial Sequence
  Description of Artificial Sequence: Synthetic oligonucleotide
uuaaacucuccu

SEQ ID NO: 52325 - RNA, 12 nt, Artificial Sequence
  Description of Artificial Sequence: Synthetic oligonucleotide
cagccuacaguu

SEQ ID NO: 52326 - RNA, 13 nt, Artificial Sequence
  Description of Artificial Sequence: Synthetic oligonucleotide
guuauguucaguc

SEQ ID NO: 52327 - RNA, 13 nt, Artificial Sequence
  Description of Artificial Sequence: Synthetic oligonucleotide
cacauacaaaaug

SEQ ID NO: 52328 - RNA, 9 nt, Artificial Sequence
  Description of Artificial Sequence: Synthetic oligonucleotide
uccuuuugc

SEQ ID NO: 52329 - RNA, 12 nt, Artificial Sequence
  Description of Artificial Sequence: Synthetic oligonucleotide
ugaccugugaag

SEQ ID NO: 52330 - RNA, 12 nt, Artificial Sequence
  Description of Artificial Sequence: Synthetic oligonucleotide
cuaucucacaca

SEQ ID NO: 52331 - RNA, 13 nt, Artificial Sequence
  Description of Artificial Sequence: Synthetic oligonucleotide
uguccucaauugu

SEQ ID NO: 52332 - RNA, 12 nt, Artificial Sequence
  Description of Artificial Sequence: Synthetic oligonucleotide
aaaccguagcug

SEQ ID NO: 52333 - RNA, 12 nt, Artificial Sequence
  Description of Artificial Sequence: Synthetic oligonucleotide
uagcuggcaagc

SEQ ID NO: 52334 - RNA, 14 nt, Artificial Sequence
  Description of Artificial Sequence: Synthetic oligonucleotide
uuguaugguuaaaa

SEQ ID NO: 52335 - RNA, 14 nt, Artificial Sequence
  Description of Artificial Sequence: Synthetic oligonucleotide
ugguuaaaagaugg

SEQ ID NO: 52336 - RNA, 13 nt, Artificial Sequence
  Description of Artificial Sequence: Synthetic oligonucleotide
cagggaauuauac

SEQ ID NO: 52337 - RNA, 12 nt, Artificial Sequence
  Description of Artificial Sequence: Synthetic oligonucleotide
acaaucuugcug

SEQ ID NO: 52338 - RNA, 13 nt, Artificial Sequence
  Description of Artificial Sequence: Synthetic oligonucleotide
ccaauaaugaaga

SEQ ID NO: 52339 - RNA, 13 nt, Artificial Sequence
  Description of Artificial Sequence: Synthetic oligonucleotide
acuuuggauguuc

SEQ ID NO: 52340 - RNA, 12 nt, Artificial Sequence
  Description of Artificial Sequence: Synthetic oligonucleotide
aaugcuuccacu

SEQ ID NO: 52341 - RNA, 11 nt, Artificial Sequence
  Description of Artificial Sequence: Synthetic oligonucleotide
gagaaaguuug

SEQ ID NO: 52342 - RNA, 11 nt, Artificial Sequence
  Description of Artificial Sequence: Synthetic oligonucleotide
aaagaacuacu

SEQ ID NO: 52343 - RNA, 12 nt, Artificial Sequence
  Description of Artificial Sequence: Synthetic oligonucleotide
uuagaaauacgg

SEQ ID NO: 52344 - RNA, 12 nt, Artificial Sequence
  Description of Artificial Sequence: Synthetic oligonucleotide
aacauggguaca

SEQ ID NO: 52345 - RNA, 14 nt, Artificial Sequence
  Description of Artificial Sequence: Synthetic oligonucleotide
aaagacacagaaga

SEQ ID NO: 52346 - RNA, 11 nt, Artificial Sequence
  Description of Artificial Sequence: Synthetic oligonucleotide
uaguagggagg

SEQ ID NO: 52347 - RNA, 12 nt, Artificial Sequence
  Description of Artificial Sequence: Synthetic oligonucleotide
gccuucugcagc

SEQ ID NO: 52348 - RNA, 10 nt, Artificial Sequence
  Description of Artificial Sequence: Synthetic oligonucleotide
ggucugguac

SEQ ID NO: 52349 - RNA, 12 nt, Artificial Sequence
  Description of Artificial Sequence: Synthetic oligonucleotide
cuaguccuuccg

SEQ ID NO: 52350 - RNA, 12 nt, Artificial Sequence
  Description of Artificial Sequence: Synthetic oligonucleotide
ccagugaauauu

SEQ ID NO: 52351 - RNA, 13 nt, Artificial Sequence
  Description of Artificial Sequence: Synthetic oligonucleotide
augaauucaaguu

SEQ ID NO: 52352 - RNA, 12 nt, Artificial Sequence
  Description of Artificial Sequence: Synthetic oligonucleotide
caggacacagau

SEQ ID NO: 52353 - RNA, 12 nt, Artificial Sequence
  Description of Artificial Sequence: Synthetic oligonucleotide
cucaaagcacag

SEQ ID NO: 52354 - RNA, 10 nt, Artificial Sequence
  Description of Artificial Sequence: Synthetic oligonucleotide
accacugcca

SEQ ID NO: 52355 - RNA, 13 nt, Artificial Sequence
  Description of Artificial Sequence: Synthetic oligonucleotide
gaaacuacuagug

SEQ ID NO: 52356 - RNA, 12 nt, Artificial Sequence
  Description of Artificial Sequence: Synthetic oligonucleotide
aagucggacagc

SEQ ID NO: 52357 - RNA, 13 nt, Artificial Sequence
  Description of Artificial Sequence: Synthetic oligonucleotide
gaaagcgaaaaau

SEQ ID NO: 52358 - RNA, 13 nt, Artificial Sequence
  Description of Artificial Sequence: Synthetic oligonucleotide
cccucugauuuag

SEQ ID NO: 52359 - RNA, 12 nt, Artificial Sequence
  Description of Artificial Sequence: Synthetic oligonucleotide
ugagcuauuuaa

SEQ ID NO: 52360 - RNA, 13 nt, Artificial Sequence
  Description of Artificial Sequence: Synthetic oligonucleotide
aaaaggugaaaaa

SEQ ID NO: 52361 - RNA, 14 nt, Artificial Sequence
  Description of Artificial Sequence: Synthetic oligonucleotide
gaaaaagcacuauu

SEQ ID NO: 52362 - RNA, 12 nt, Artificial Sequence
  Description of Artificial Sequence: Synthetic oligonucleotide
ggcugaaaagaa

SEQ ID NO: 52363 - RNA, 12 nt, Artificial Sequence
  Description of Artificial Sequence: Synthetic oligonucleotide
uaaacccuuaua

SEQ ID NO: 52364 - RNA, 13 nt, Artificial Sequence
  Description of Artificial Sequence: Synthetic oligonucleotide
cauacuauuagcc

SEQ ID NO: 52365 - RNA, 12 nt, Artificial Sequence
  Description of Artificial Sequence: Synthetic oligonucleotide
gacagaagcauu

SEQ ID NO: 52366 - RNA, 14 nt, Artificial Sequence
  Description of Artificial Sequence: Synthetic oligonucleotide
agagcaaauaagau

SEQ ID NO: 52367 - RNA, 14 nt, Artificial Sequence
  Description of Artificial Sequence: Synthetic oligonucleotide
ccaacauuuuucuc

SEQ ID NO: 52368 - RNA, 15 nt, Artificial Sequence
  Description of Artificial Sequence: Synthetic oligonucleotide
uuaaguaugagaaaa

SEQ ID NO: 52369 - RNA, 14 nt, Artificial Sequence
  Description of Artificial Sequence: Synthetic oligonucleotide
caggaauaaagaug

SEQ ID NO: 52370 - RNA, 13 nt, Artificial Sequence
  Description of Artificial Sequence: Synthetic oligonucleotide
aauuugaaugacc

SEQ ID NO: 52371 - RNA, 14 nt, Artificial Sequence
  Description of Artificial Sequence: Synthetic oligonucleotide
auguauaaagauag

SEQ ID NO: 52372 - RNA, 12 nt, Artificial Sequence
  Description of Artificial Sequence: Synthetic oligonucleotide
ggcuguaacuau

SEQ ID NO: 52373 - RNA, 11 nt, Artificial Sequence
  Description of Artificial Sequence: Synthetic oligonucleotide
ucugugaagug

SEQ ID NO: 52374 - RNA, 14 nt, Artificial Sequence
  Description of Artificial Sequence: Synthetic oligonucleotide
ccuuuaaggaaaug

SEQ ID NO: 52375 - RNA, 13 nt, Artificial Sequence
  Description of Artificial Sequence: Synthetic oligonucleotide
aaggauacaaaaa

SEQ ID NO: 52376 - RNA, 12 nt, Artificial Sequence
  Description of Artificial Sequence: Synthetic oligonucleotide
agaugcaauuug

SEQ ID NO: 52377 - RNA, 12 nt, Artificial Sequence
  Description of Artificial Sequence: Synthetic oligonucleotide
guucaaaacgaa

SEQ ID NO: 52378 - RNA, 11 nt, Artificial Sequence
  Description of Artificial Sequence: Synthetic oligonucleotide
gugaaaccuca

SEQ ID NO: 52379 - RNA, 13 nt, Artificial Sequence
  Description of Artificial Sequence: Synthetic oligonucleotide
acgaaagagaagc

SEQ ID NO: 52380 - RNA, 12 nt, Artificial Sequence
  Description of Artificial Sequence: Synthetic oligonucleotide
cuccacaagcgc

SEQ ID NO: 52381 - RNA, 14 nt, Artificial Sequence
  Description of Artificial Sequence: Synthetic oligonucleotide
gagaagauuccaaa

SEQ ID NO: 52382 - RNA, 13 nt, Artificial Sequence
  Description of Artificial Sequence: Synthetic oligonucleotide
aaucuggauucaa

SEQ ID NO: 52383 - RNA, 13 nt, Artificial Sequence
  Description of Artificial Sequence: Synthetic oligonucleotide
agaacagauuuga

SEQ ID NO: 52384 - RNA, 11 nt, Artificial Sequence
  Description of Artificial Sequence: Synthetic oligonucleotide
ccagagcugug

SEQ ID NO: 52385 - RNA, 12 nt, Artificial Sequence
  Description of Artificial Sequence: Synthetic oligonucleotide
ccucagauuguu

SEQ ID NO: 52386 - RNA, 12 nt, Artificial Sequence
  Description of Artificial Sequence: Synthetic oligonucleotide
cuauuuuaauua

SEQ ID NO: 52387 - RNA, 13 nt, Artificial Sequence
  Description of Artificial Sequence: Synthetic oligonucleotide
uuuaauuuauuaa

SEQ ID NO: 52388 - RNA, 12 nt, Artificial Sequence
  Description of Artificial Sequence: Synthetic oligonucleotide
augcaguuugaa

SEQ ID NO: 52389 - RNA, 11 nt, Artificial Sequence
  Description of Artificial Sequence: Synthetic oligonucleotide
caugcugcugg

SEQ ID NO: 52390 - RNA, 13 nt, Artificial Sequence
  Description of Artificial Sequence: Synthetic oligonucleotide
agaugugcauuuc

SEQ ID NO: 52391 - RNA, 12 nt, Artificial Sequence
  Description of Artificial Sequence: Synthetic oligonucleotide
ucaaaaccugug

SEQ ID NO: 52392 - RNA, 11 nt, Artificial Sequence
  Description of Artificial Sequence: Synthetic oligonucleotide
gaaugugggua

SEQ ID NO: 52393 - RNA, 10 nt, Artificial Sequence
  Description of Artificial Sequence: Synthetic oligonucleotide
auguggguag

SEQ ID NO: 52394 - RNA, 13 nt, Artificial Sequence
  Description of Artificial Sequence: Synthetic oligonucleotide
ugaaaaugagcau

SEQ ID NO: 52395 - RNA, 13 nt, Artificial Sequence
  Description of Artificial Sequence: Synthetic oligonucleotide
uugcuuuucaugu

SEQ ID NO: 52396 - RNA, 12 nt, Artificial Sequence
  Description of Artificial Sequence: Synthetic oligonucleotide
uguauuucuaua

SEQ ID NO: 52397 - RNA, 13 nt, Artificial Sequence
  Description of Artificial Sequence: Synthetic oligonucleotide
uuugauuaauguu

SEQ ID NO: 52398 - RNA, 12 nt, Artificial Sequence
  Description of Artificial Sequence: Synthetic oligonucleotide
caacguguauag

SEQ ID NO: 52399 - RNA, 12 nt, Artificial Sequence
  Description of Artificial Sequence: Synthetic oligonucleotide
cauauccuuggc

SEQ ID NO: 52400 - RNA, 13 nt, Artificial Sequence
  Description of Artificial Sequence: Synthetic oligonucleotide
uacuaacaucugg

SEQ ID NO: 52401 - RNA, 11 nt, Artificial Sequence
  Description of Artificial Sequence: Synthetic oligonucleotide
cauaaguugug

SEQ ID NO: 52402 - RNA, 12 nt, Artificial Sequence
  Description of Artificial Sequence: Synthetic oligonucleotide
gcaucauuuugg

SEQ ID NO: 52403 - RNA, 10 nt, Artificial Sequence
  Description of Artificial Sequence: Synthetic oligonucleotide
gcucuucuua

SEQ ID NO: 52404 - RNA, 10 nt, Artificial Sequence
  Description of Artificial Sequence: Synthetic oligonucleotide
agauuagguc

SEQ ID NO: 52405 - RNA, 12 nt, Artificial Sequence
  Description of Artificial Sequence: Synthetic oligonucleotide
auggaauugaaa

SEQ ID NO: 52406 - RNA, 13 nt, Artificial Sequence
  Description of Artificial Sequence: Synthetic oligonucleotide
cacacucauuccu

SEQ ID NO: 52407 - RNA, 12 nt, Artificial Sequence
  Description of Artificial Sequence: Synthetic oligonucleotide
uguagagguaac

SEQ ID NO: 52408 - RNA, 11 nt, Artificial Sequence
  Description of Artificial Sequence: Synthetic oligonucleotide
caaccacaugc

SEQ ID NO: 52409 - RNA, 12 nt, Artificial Sequence
  Description of Artificial Sequence: Synthetic oligonucleotide
ucggaaacaagu

SEQ ID NO: 52410 - RNA, 11 nt, Artificial Sequence
  Description of Artificial Sequence: Synthetic oligonucleotide
acucccaauaa

SEQ ID NO: 52411 - RNA, 13 nt, Artificial Sequence
  Description of Artificial Sequence: Synthetic oligonucleotide
aaugcuaagaaau

SEQ ID NO: 52412 - RNA, 11 nt, Artificial Sequence
  Description of Artificial Sequence: Synthetic oligonucleotide
gucuuucucua

SEQ ID NO: 52413 - RNA, 11 nt, Artificial Sequence
  Description of Artificial Sequence: Synthetic oligonucleotide
ugaauuucagg

SEQ ID NO: 52414 - RNA, 13 nt, Artificial Sequence
  Description of Artificial Sequence: Synthetic oligonucleotide
cgauucccucuca

SEQ ID NO: 52415 - RNA, 11 nt, Artificial Sequence
  Description of Artificial Sequence: Synthetic oligonucleotide
aggaaagugaa

SEQ ID NO: 52416 - RNA, 12 nt, Artificial Sequence
  Description of Artificial Sequence: Synthetic oligonucleotide
gaggcugcaugc

SEQ ID NO: 52417 - RNA, 11 nt, Artificial Sequence
  Description of Artificial Sequence: Synthetic oligonucleotide
ucucugaacag

SEQ ID NO: 52418 - RNA, 12 nt, Artificial Sequence
  Description of Artificial Sequence: Synthetic oligonucleotide
aacuuggcugua

SEQ ID NO: 52419 - RNA, 12 nt, Artificial Sequence
  Description of Artificial Sequence: Synthetic oligonucleotide
agaagccaaaau

SEQ ID NO: 52420 - RNA, 14 nt, Artificial Sequence
  Description of Artificial Sequence: Synthetic oligonucleotide
auuaaaagaagucc

SEQ ID NO: 52421 - RNA, 14 nt, Artificial Sequence
  Description of Artificial Sequence: Synthetic oligonucleotide
gaauccggauuauc

SEQ ID NO: 52422 - RNA, 12 nt, Artificial Sequence
  Description of Artificial Sequence: Synthetic oligonucleotide
aaugugacauca

SEQ ID NO: 52423 - RNA, 13 nt, Artificial Sequence
  Description of Artificial Sequence: Synthetic oligonucleotide
caucaaagcaagu

SEQ ID NO: 52424 - RNA, 11 nt, Artificial Sequence
  Description of Artificial Sequence: Synthetic oligonucleotide
agagagagaaa

SEQ ID NO: 52425 - RNA, 13 nt, Artificial Sequence
  Description of Artificial Sequence: Synthetic oligonucleotide
ucgcuguaguauu

SEQ ID NO: 52426 - RNA, 14 nt, Artificial Sequence
  Description of Artificial Sequence: Synthetic oligonucleotide
cgcuguaguauuua

SEQ ID NO: 52427 - RNA, 13 nt, Artificial Sequence
  Description of Artificial Sequence: Synthetic oligonucleotide
auuuaagcccaua

SEQ ID NO: 52428 - RNA, 15 nt, Artificial Sequence
  Description of Artificial Sequence: Synthetic oligonucleotide
auuaaaauaaacaug

SEQ ID NO: 52429 - RNA, 12 nt, Artificial Sequence
  Description of Artificial Sequence: Synthetic oligonucleotide
cuguucugaucg

SEQ ID NO: 52430 - RNA, 16 nt, Artificial Sequence
  Description of Artificial Sequence: Synthetic oligonucleotide
aaauaauuugaacuuu

SEQ ID NO: 52431 - RNA, 12 nt, Artificial Sequence
  Description of Artificial Sequence: Synthetic oligonucleotide
ugcgaccuuaau

SEQ ID NO: 52432 - RNA, 11 nt, Artificial Sequence
  Description of Artificial Sequence: Synthetic oligonucleotide
cugagaaagcu

SEQ ID NO: 52433 - RNA, 13 nt, Artificial Sequence
  Description of Artificial Sequence: Synthetic oligonucleotide
aguaaagaugcua

SEQ ID NO: 52434 - RNA, 12 nt, Artificial Sequence
  Description of Artificial Sequence: Synthetic oligonucleotide
cugcuuaauugc

SEQ ID NO: 52435 - RNA, 14 nt, Artificial Sequence
  Description of Artificial Sequence: Synthetic oligonucleotide
uaccauaugaauga

SEQ ID NO: 52436 - RNA, 12 nt, Artificial Sequence
  Description of Artificial Sequence: Synthetic oligonucleotide
aacuuucuuauc

SEQ ID NO: 52437 - RNA, 13 nt, Artificial Sequence
  Description of Artificial Sequence: Synthetic oligonucleotide
ccuugcaugacau

SEQ ID NO: 52438 - RNA, 14 nt, Artificial Sequence
  Description of Artificial Sequence: Synthetic oligonucleotide
ugaauuuguauaug

SEQ ID NO: 52439 - RNA, 12 nt, Artificial Sequence
  Description of Artificial Sequence: Synthetic oligonucleotide
gaauccuaguag

SEQ ID NO: 52440 - RNA, 10 nt, Artificial Sequence
  Description of Artificial Sequence: Synthetic oligonucleotide
gaaagggaag

SEQ ID NO: 52441 - RNA, 11 nt, Artificial Sequence
  Description of Artificial Sequence: Synthetic oligonucleotide
uaucggcaugc

SEQ ID NO: 52442 - RNA, 12 nt, Artificial Sequence
  Description of Artificial Sequence: Synthetic oligonucleotide
caccucauagua

SEQ ID NO: 52443 - RNA, 11 nt, Artificial Sequence
  Description of Artificial Sequence: Synthetic oligonucleotide
ccagaauugcc

SEQ ID NO: 52444 - RNA, 11 nt, Artificial Sequence
  Description of Artificial Sequence: Synthetic oligonucleotide
uggugaucugg

SEQ ID NO: 52445 - RNA, 12 nt, Artificial Sequence
  Description of Artificial Sequence: Synthetic oligonucleotide
gaucuggguaau

SEQ ID NO: 52446 - RNA, 12 nt, Artificial Sequence
  Description of Artificial Sequence: Synthetic oligonucleotide
ggaugugaugaa

SEQ ID NO: 52447 - RNA, 12 nt, Artificial Sequence
  Description of Artificial Sequence: Synthetic oligonucleotide
cauuuccacagc

SEQ ID NO: 52448 - RNA, 11 nt, Artificial Sequence
  Description of Artificial Sequence: Synthetic oligonucleotide
acagcuacacc

SEQ ID NO: 52449 - RNA, 12 nt, Artificial Sequence
  Description of Artificial Sequence: Synthetic oligonucleotide
ugcaguucuuac

SEQ ID NO: 52450 - RNA, 12 nt, Artificial Sequence
  Description of Artificial Sequence: Synthetic oligonucleotide
acgagaagaaga

SEQ ID NO: 52451 - RNA, 12 nt, Artificial Sequence
  Description of Artificial Sequence: Synthetic oligonucleotide
cgagaagaagau

SEQ ID NO: 52452 - RNA, 15 nt, Artificial Sequence
  Description of Artificial Sequence: Synthetic oligonucleotide
aagaagaucauuuac

SEQ ID NO: 52453 - RNA, 11 nt, Artificial Sequence
  Description of Artificial Sequence: Synthetic oligonucleotide
agaggaagagg

SEQ ID NO: 52454 - RNA, 12 nt, Artificial Sequence
  Description of Artificial Sequence: Synthetic oligonucleotide
gaggaagaggug

SEQ ID NO: 52455 - RNA, 13 nt, Artificial Sequence
  Description of Artificial Sequence: Synthetic oligonucleotide
cuacuuugagggc

SEQ ID NO: 52456 - RNA, 12 nt, Artificial Sequence
  Description of Artificial Sequence: Synthetic oligonucleotide
agggcaucuccu

SEQ ID NO: 52457 - RNA, 10 nt, Artificial Sequence
  Description of Artificial Sequence: Synthetic oligonucleotide
ggagugauau

SEQ ID NO: 52458 - RNA, 11 nt, Artificial Sequence
  Description of Artificial Sequence: Synthetic oligonucleotide
gagugauaugg

SEQ ID NO: 52459 - RNA, 12 nt, Artificial Sequence
  Description of Artificial Sequence: Synthetic oligonucleotide
ugcaguaaagau

SEQ ID NO: 52460 - RNA, 13 nt, Artificial Sequence
  Description of Artificial Sequence: Synthetic oligonucleotide
aguaaagauccua

SEQ ID NO: 52461 - RNA, 12 nt, Artificial Sequence
  Description of Artificial Sequence: Synthetic oligonucleotide
ugacaaaggaca

SEQ ID NO: 52462 - RNA, 13 nt, Artificial Sequence
  Description of Artificial Sequence: Synthetic oligonucleotide
gcaauugugaccc

SEQ ID NO: 52463 - RNA, 12 nt, Artificial Sequence
  Description of Artificial Sequence: Synthetic oligonucleotide
aacaucauccau

SEQ ID NO: 52464 - RNA, 12 nt, Artificial Sequence
  Description of Artificial Sequence: Synthetic oligonucleotide
ugaaauccaaca

SEQ ID NO: 52465 - RNA, 15 nt, Artificial Sequence
  Description of Artificial Sequence: Synthetic oligonucleotide
aacaauauauuucuc

SEQ ID NO: 52466 - RNA, 14 nt, Artificial Sequence
  Description of Artificial Sequence: Synthetic oligonucleotide
aacaguaaagucac

SEQ ID NO: 52467 - RNA, 14 nt, Artificial Sequence
  Description of Artificial Sequence: Synthetic oligonucleotide
ugugaagaaaguaa

SEQ ID NO: 52468 - RNA, 13 nt, Artificial Sequence
  Description of Artificial Sequence: Synthetic oligonucleotide
cuuccgagccauc

SEQ ID NO: 52469 - RNA, 12 nt, Artificial Sequence
  Description of Artificial Sequence: Synthetic oligonucleotide
aauggagguuga

SEQ ID NO: 52470 - RNA, 12 nt, Artificial Sequence
  Description of Artificial Sequence: Synthetic oligonucleotide
ggagguugaaua

SEQ ID NO: 52471 - RNA, 13 nt, Artificial Sequence
  Description of Artificial Sequence: Synthetic oligonucleotide
auuuugaguuuuc

SEQ ID NO: 52472 - RNA, 12 nt, Artificial Sequence
  Description of Artificial Sequence: Synthetic oligonucleotide
uauccuguuugu

SEQ ID NO: 52473 - RNA, 11 nt, Artificial Sequence
  Description of Artificial Sequence: Synthetic oligonucleotide
ccuguuuguuc

SEQ ID NO: 52474 - RNA, 10 nt, Artificial Sequence
  Description of Artificial Sequence: Synthetic oligonucleotide
cucuacagcc

SEQ ID NO: 52475 - RNA, 12 nt, Artificial Sequence
  Description of Artificial Sequence: Synthetic oligonucleotide
ucuuccauagcu

SEQ ID NO: 52476 - RNA, 12 nt, Artificial Sequence
  Description of Artificial Sequence: Synthetic oligonucleotide
auaaucuuccug

SEQ ID NO: 52477 - RNA, 12 nt, Artificial Sequence
  Description of Artificial Sequence: Synthetic oligonucleotide
uaaucuuccugu

SEQ ID NO: 52478 - RNA, 12 nt, Artificial Sequence
  Description of Artificial Sequence: Synthetic oligonucleotide
cuucaugacuug

SEQ ID NO: 52479 - RNA, 12 nt, Artificial Sequence
  Description of Artificial Sequence: Synthetic oligonucleotide
aagagggagaga

SEQ ID NO: 52480 - RNA, 12 nt, Artificial Sequence
  Description of Artificial Sequence: Synthetic oligonucleotide
cgucuccuacca

SEQ ID NO: 52481 - RNA, 12 nt, Artificial Sequence
  Description of Artificial Sequence: Synthetic oligonucleotide
gaucaaucggcc

SEQ ID NO: 52482 - RNA, 12 nt, Artificial Sequence
  Description of Artificial Sequence: Synthetic oligonucleotide
ggacgaacaucc

SEQ ID NO: 52483 - RNA, 11 nt, Artificial Sequence
  Description of Artificial Sequence: Synthetic oligonucleotide
agggucggaac

SEQ ID NO: 52484 - RNA, 10 nt, Artificial Sequence
  Description of Artificial Sequence: Synthetic oligonucleotide
ucggaaccca

SEQ ID NO: 52485 - RNA, 11 nt, Artificial Sequence
  Description of Artificial Sequence: Synthetic oligonucleotide
acccaagcuua

SEQ ID NO: 52486 - RNA, 14 nt, Artificial Sequence
  Description of Artificial Sequence: Synthetic oligonucleotide
gaacuuuaagcaac

SEQ ID NO: 52487 - RNA, 11 nt, Artificial Sequence
  Description of Artificial Sequence: Synthetic oligonucleotide
acuauucagug

SEQ ID NO: 52488 - RNA, 11 nt, Artificial Sequence
  Description of Artificial Sequence: Synthetic oligonucleotide
cuauucagugg

SEQ ID NO: 52489 - RNA, 13 nt, Artificial Sequence
  Description of Artificial Sequence: Synthetic oligonucleotide
aaacacagauaac

SEQ ID NO: 52490 - RNA, 12 nt, Artificial Sequence
  Description of Artificial Sequence: Synthetic oligonucleotide
cuuaagaaaaga

SEQ ID NO: 52491 - RNA, 12 nt, Artificial Sequence
  Description of Artificial Sequence: Synthetic oligonucleotide
cugaaggagugu

SEQ ID NO: 52492 - RNA, 10 nt, Artificial Sequence
  Description of Artificial Sequence: Synthetic oligonucleotide
ucaccgcggg

SEQ ID NO: 52493 - RNA, 14 nt, Artificial Sequence
  Description of Artificial Sequence: Synthetic oligonucleotide
agcagaaauaagcg

SEQ ID NO: 52494 - RNA, 12 nt, Artificial Sequence
  Description of Artificial Sequence: Synthetic oligonucleotide
aagcgugccguu

SEQ ID NO: 52495 - RNA, 12 nt, Artificial Sequence
  Description of Artificial Sequence: Synthetic oligonucleotide
agaaacagucac

SEQ ID NO: 52496 - RNA, 12 nt, Artificial Sequence
  Description of Artificial Sequence: Synthetic oligonucleotide
agaggaagaagg

SEQ ID NO: 52497 - RNA, 14 nt, Artificial Sequence
  Description of Artificial Sequence: Synthetic oligonucleotide
uguauucaaaauau

SEQ ID NO: 52498 - RNA, 13 nt, Artificial Sequence
  Description of Artificial Sequence: Synthetic oligonucleotide
auuuuccucccuu

SEQ ID NO: 52499 - RNA, 13 nt, Artificial Sequence
  Description of Artificial Sequence: Synthetic oligonucleotide
caaagaaagauag

SEQ ID NO: 52500 - RNA, 12 nt, Artificial Sequence
  Description of Artificial Sequence: Synthetic oligonucleotide
aagaaagauaga

SEQ ID NO: 52501 - RNA, 13 nt, Artificial Sequence
  Description of Artificial Sequence: Synthetic oligonucleotide
gaaagcauuuguu

SEQ ID NO: 52502 - RNA, 13 nt, Artificial Sequence
  Description of Artificial Sequence: Synthetic oligonucleotide
ugaguuaaacgaa

SEQ ID NO: 52503 - RNA, 12 nt, Artificial Sequence
  Description of Artificial Sequence: Synthetic oligonucleotide
acugauacagaa

SEQ ID NO: 52504 - RNA, 12 nt, Artificial Sequence
  Description of Artificial Sequence: Synthetic oligonucleotide
auauuauauaua

SEQ ID NO: 52505 - RNA, 12 nt, Artificial Sequence
  Description of Artificial Sequence: Synthetic oligonucleotide
auuauauauaua

SEQ ID NO: 52506 - RNA, 12 nt, Artificial Sequence
  Description of Artificial Sequence: Synthetic oligonucleotide
ucacuggaugua

SEQ ID NO: 52507 - RNA, 12 nt, Artificial Sequence
  Description of Artificial Sequence: Synthetic oligonucleotide
cagggaagagga

SEQ ID NO: 52508 - RNA, 15 nt, Artificial Sequence
  Description of Artificial Sequence: Synthetic oligonucleotide
augaucuuuuuuuug

SEQ ID NO: 52509 - RNA, 11 nt, Artificial Sequence
  Description of Artificial Sequence: Synthetic oligonucleotide
aguucacggcc

SEQ ID NO: 52510 - RNA, 13 nt, Artificial Sequence
  Description of Artificial Sequence: Synthetic oligonucleotide
caccaucacacca

SEQ ID NO: 52511 - RNA, 11 nt, Artificial Sequence
  Description of Artificial Sequence: Synthetic oligonucleotide
ccugcggguuu

SEQ ID NO: 52512 - RNA, 10 nt, Artificial Sequence
  Description of Artificial Sequence: Synthetic oligonucleotide
auccaguuug

SEQ ID NO: 52513 - RNA, 13 nt, Artificial Sequence
  Description of Artificial Sequence: Synthetic oligonucleotide
guuaaggacuucu

SEQ ID NO: 52514 - RNA, 13 nt, Artificial Sequence
  Description of Artificial Sequence: Synthetic oligonucleotide
cagugggacagag

SEQ ID NO: 52515 - RNA, 14 nt, Artificial Sequence
  Description of Artificial Sequence: Synthetic oligonucleotide
aauuuguuauugug

SEQ ID NO: 52516 - RNA, 13 nt, Artificial Sequence
  Description of Artificial Sequence: Synthetic oligonucleotide
uucaaaugcauuu

SEQ ID NO: 52517 - RNA, 10 nt, Artificial Sequence
  Description of Artificial Sequence: Synthetic oligonucleotide
caggaaagcc

SEQ ID NO: 52518 - RNA, 11 nt, Artificial Sequence
  Description of Artificial Sequence: Synthetic oligonucleotide
aggaaagcccu

SEQ ID NO: 52519 - RNA, 12 nt, Artificial Sequence
  Description of Artificial Sequence: Synthetic oligonucleotide
cccagcauggcc

SEQ ID NO: 52520 - RNA, 11 nt, Artificial Sequence
  Description of Artificial Sequence: Synthetic oligonucleotide
cuucucccuga

SEQ ID NO: 52521 - RNA, 12 nt, Artificial Sequence
  Description of Artificial Sequence: Synthetic oligonucleotide
gaagaagcccuu

SEQ ID NO: 52522 - RNA, 12 nt, Artificial Sequence
  Description of Artificial Sequence: Synthetic oligonucleotide
agaagcccuuca

SEQ ID NO: 52523 - RNA, 11 nt, Artificial Sequence
  Description of Artificial Sequence: Synthetic oligonucleotide
gcccuucagcg

SEQ ID NO: 52524 - RNA, 11 nt, Artificial Sequence
  Description of Artificial Sequence: Synthetic oligonucleotide
ccuucagcggc

SEQ ID NO: 52525 - RNA, 12 nt, Artificial Sequence
  Description of Artificial Sequence: Synthetic oligonucleotide
ucagcggccagu

SEQ ID NO: 52526 - RNA, 12 nt, Artificial Sequence
  Description of Artificial Sequence: Synthetic oligonucleotide
ugaaaagcuccg

SEQ ID NO: 52527 - RNA, 11 nt, Artificial Sequence
  Description of Artificial Sequence: Synthetic oligonucleotide
aaaagcuccgg

SEQ ID NO: 52528 - RNA, 13 nt, Artificial Sequence
  Description of Artificial Sequence: Synthetic oligonucleotide
agucaacagucug

SEQ ID NO: 52529 - RNA, 13 nt, Artificial Sequence
  Description of Artificial Sequence: Synthetic oligonucleotide
cagaguucaaaag

SEQ ID NO: 52530 - RNA, 13 nt, Artificial Sequence
  Description of Artificial Sequence: Synthetic oligonucleotide
agaguucaaaagc

SEQ ID NO: 52531 - RNA, 12 nt, Artificial Sequence
  Description of Artificial Sequence: Synthetic oligonucleotide
uucaaaagcccu

SEQ ID NO: 52532 - RNA, 12 nt, Artificial Sequence
  Description of Artificial Sequence: Synthetic oligonucleotide
ucaaaagcccuu

SEQ ID NO: 52533 - RNA, 12 nt, Artificial Sequence
  Description of Artificial Sequence: Synthetic oligonucleotide
aaaagcccuuca

SEQ ID NO: 52534 - RNA, 12 nt, Artificial Sequence
  Description of Artificial Sequence: Synthetic oligonucleotide
aaagcccuucag

SEQ ID NO: 52535 - RNA, 13 nt, Artificial Sequence
  Description of Artificial Sequence: Synthetic oligonucleotide
gugaagccgcucg

SEQ ID NO: 52536 - RNA, 12 nt, Artificial Sequence
  Description of Artificial Sequence: Synthetic oligonucleotide
cacgccagucaa

SEQ ID NO: 52537 - RNA, 13 nt, Artificial Sequence
  Description of Artificial Sequence: Synthetic oligonucleotide
uucuuggugcgug

SEQ ID NO: 52538 - RNA, 14 nt, Artificial Sequence
  Description of Artificial Sequence: Synthetic oligonucleotide
auuggauucaucag

SEQ ID NO: 52539 - RNA, 13 nt, Artificial Sequence
  Description of Artificial Sequence: Synthetic oligonucleotide
uggaauaccuaag

SEQ ID NO: 52540 - RNA, 12 nt, Artificial Sequence
  Description of Artificial Sequence: Synthetic oligonucleotide
auuugaggcuca

SEQ ID NO: 52541 - RNA, 11 nt, Artificial Sequence
  Description of Artificial Sequence: Synthetic oligonucleotide
ucuacaauugg

SEQ ID NO: 52542 - RNA, 12 nt, Artificial Sequence
  Description of Artificial Sequence: Synthetic oligonucleotide
uaguuaggagcc

SEQ ID NO: 52543 - RNA, 13 nt, Artificial Sequence
  Description of Artificial Sequence: Synthetic oligonucleotide
agucaauauccac

SEQ ID NO: 52544 - RNA, 13 nt, Artificial Sequence
  Description of Artificial Sequence: Synthetic oligonucleotide
auguucagucaca

SEQ ID NO: 52545 - RNA, 12 nt, Artificial Sequence
  Description of Artificial Sequence: Synthetic oligonucleotide
acacacacauac

SEQ ID NO: 52546 - RNA, 12 nt, Artificial Sequence
  Description of Artificial Sequence: Synthetic oligonucleotide
uuccuuuugcuu

SEQ ID NO: 52547 - RNA, 16 nt, Artificial Sequence
  Description of Artificial Sequence: Synthetic oligonucleotide
uuuuaaaguaauuuuu

SEQ ID NO: 52548 - RNA, 13 nt, Artificial Sequence
  Description of Artificial Sequence: Synthetic oligonucleotide
caacagucaaugg

SEQ ID NO: 52549 - RNA, 13 nt, Artificial Sequence
  Description of Artificial Sequence: Synthetic oligonucleotide
ucgacaaaccaau

SEQ ID NO: 52550 - RNA, 12 nt, Artificial Sequence
  Description of Artificial Sequence: Synthetic oligonucleotide
acugcuaccacu

SEQ ID NO: 52551 - RNA, 13 nt, Artificial Sequence
  Description of Artificial Sequence: Synthetic oligonucleotide
gcaagcggucuua

SEQ ID NO: 52552 - RNA, 13 nt, Artificial Sequence
  Description of Artificial Sequence: Synthetic oligonucleotide
ggucuuaccggcu

SEQ ID NO: 52553 - RNA, 11 nt, Artificial Sequence
  Description of Artificial Sequence: Synthetic oligonucleotide
gauggguuacc

SEQ ID NO: 52554 - RNA, 11 nt, Artificial Sequence
  Description of Artificial Sequence: Synthetic oligonucleotide
guuaccugcga

SEQ ID NO: 52555 - RNA, 12 nt, Artificial Sequence
  Description of Artificial Sequence: Synthetic oligonucleotide
aaucuugcugag

SEQ ID NO: 52556 - RNA, 13 nt, Artificial Sequence
  Description of Artificial Sequence: Synthetic oligonucleotide
agcauaaaacagu

SEQ ID NO: 52557 - RNA, 12 nt, Artificial Sequence
  Description of Artificial Sequence: Synthetic oligonucleotide
guccuuuauccu

SEQ ID NO: 52558 - RNA, 12 nt, Artificial Sequence
  Description of Artificial Sequence: Synthetic oligonucleotide
caacgcaaguug

SEQ ID NO: 52559 - RNA, 13 nt, Artificial Sequence
  Description of Artificial Sequence: Synthetic oligonucleotide
aaacugaaaccau

SEQ ID NO: 52560 - RNA, 14 nt, Artificial Sequence
  Description of Artificial Sequence: Synthetic oligonucleotide
acuuuguuaaauau

SEQ ID NO: 52561 - RNA, 14 nt, Artificial Sequence
  Description of Artificial Sequence: Synthetic oligonucleotide
guauauuaaaaguu

SEQ ID NO: 52562 - RNA, 13 nt, Artificial Sequence
  Description of Artificial Sequence: Synthetic oligonucleotide
guuuugacuuaac

SEQ ID NO: 52563 - RNA, 13 nt, Artificial Sequence
  Description of Artificial Sequence: Synthetic oligonucleotide
gcaaacucagcac

SEQ ID NO: 52564 - RNA, 11 nt, Artificial Sequence
  Description of Artificial Sequence: Synthetic oligonucleotide
ugcugaccuca

SEQ ID NO: 52565 - RNA, 14 nt, Artificial Sequence
  Description of Artificial Sequence: Synthetic oligonucleotide
uuuauucagaucgc

SEQ ID NO: 52566 - RNA, 13 nt, Artificial Sequence
  Description of Artificial Sequence: Synthetic oligonucleotide
aggguucugggau

SEQ ID NO: 52567 - RNA, 15 nt, Artificial Sequence
  Description of Artificial Sequence: Synthetic oligonucleotide
auauuggaaauuaug

SEQ ID NO: 52568 - RNA, 13 nt, Artificial Sequence
  Description of Artificial Sequence: Synthetic oligonucleotide
auggaagcacuag

SEQ ID NO: 52569 - RNA, 13 nt, Artificial Sequence
  Description of Artificial Sequence: Synthetic oligonucleotide
guuuuuaugugga

SEQ ID NO: 52570 - RNA, 12 nt, Artificial Sequence
  Description of Artificial Sequence: Synthetic oligonucleotide
ggaauugguaga

SEQ ID NO: 52571 - RNA, 13 nt, Artificial Sequence
  Description of Artificial Sequence: Synthetic oligonucleotide
uuagacuuggaga

SEQ ID NO: 52572 - RNA, 13 nt, Artificial Sequence
  Description of Artificial Sequence: Synthetic oligonucleotide
uuacaguauucca

SEQ ID NO: 52573 - RNA, 15 nt, Artificial Sequence
  Description of Artificial Sequence: Synthetic oligonucleotide
ccacugaugaauuaa

SEQ ID NO: 52574 - RNA, 12 nt, Artificial Sequence
  Description of Artificial Sequence: Synthetic oligonucleotide
ccacaucaucac

SEQ ID NO: 52575 - RNA, 13 nt, Artificial Sequence
  Description of Artificial Sequence: Synthetic oligonucleotide
cucaccaaacaga

SEQ ID NO: 52576 - RNA, 12 nt, Artificial Sequence
  Description of Artificial Sequence: Synthetic oligonucleotide
ggaacaugaugg

SEQ ID NO: 52577 - RNA, 12 nt, Artificial Sequence
  Description of Artificial Sequence: Synthetic oligonucleotide
cauguagacugc

SEQ ID NO: 52578 - RNA, 13 nt, Artificial Sequence
  Description of Artificial Sequence: Synthetic oligonucleotide
ggaucuauuuaug

SEQ ID NO: 52579 - RNA, 12 nt, Artificial Sequence
  Description of Artificial Sequence: Synthetic oligonucleotide
gcacuauuauca

SEQ ID NO: 52580 - RNA, 11 nt, Artificial Sequence
  Description of Artificial Sequence: Synthetic oligonucleotide
aucaguucugc

SEQ ID NO: 52581 - RNA, 13 nt, Artificial Sequence
  Description of Artificial Sequence: Synthetic oligonucleotide
agauuaaaccuac

SEQ ID NO: 52582 - RNA, 13 nt, Artificial Sequence
  Description of Artificial Sequence: Synthetic oligonucleotide
auaaaauccuucu

SEQ ID NO: 52583 - RNA, 12 nt, Artificial Sequence
  Description of Artificial Sequence: Synthetic oligonucleotide
aaugcuguagac

SEQ ID NO: 52584 - RNA, 13 nt, Artificial Sequence
  Description of Artificial Sequence: Synthetic oligonucleotide
uugauaggaauag

SEQ ID NO: 52585 - RNA, 11 nt, Artificial Sequence
  Description of Artificial Sequence: Synthetic oligonucleotide
aauggcccuga

SEQ ID NO: 52586 - RNA, 11 nt, Artificial Sequence
  Description of Artificial Sequence: Synthetic oligonucleotide
uuccucaagca

SEQ ID NO: 52587 - RNA, 10 nt, Artificial Sequence
  Description of Artificial Sequence: Synthetic oligonucleotide
guucagccca

SEQ ID NO: 52588 - RNA, 11 nt, Artificial Sequence
  Description of Artificial Sequence: Synthetic oligonucleotide
gcugcugaacc

SEQ ID NO: 52589 - RNA, 12 nt, Artificial Sequence
  Description of Artificial Sequence: Synthetic oligonucleotide
aaguucucuuca

SEQ ID NO: 52590 - RNA, 11 nt, Artificial Sequence
  Description of Artificial Sequence: Synthetic oligonucleotide
ccagccuagag

SEQ ID NO: 52591 - RNA, 13 nt, Artificial Sequence
  Description of Artificial Sequence: Synthetic oligonucleotide
cucugugaagugu

SEQ ID NO: 52592 - RNA, 14 nt, Artificial Sequence
  Description of Artificial Sequence: Synthetic oligonucleotide
ugagaaaauuucaa

SEQ ID NO: 52593 - RNA, 11 nt, Artificial Sequence
  Description of Artificial Sequence: Synthetic oligonucleotide
aauccuccuga

SEQ ID NO: 52594 - RNA, 12 nt, Artificial Sequence
  Description of Artificial Sequence: Synthetic oligonucleotide
gugacaucauau

SEQ ID NO: 52595 - RNA, 13 nt, Artificial Sequence
  Description of Artificial Sequence: Synthetic oligonucleotide
aaucuucaucaua

SEQ ID NO: 52596 - RNA, 13 nt, Artificial Sequence
  Description of Artificial Sequence: Synthetic oligonucleotide
gacuagcuauuaa

SEQ ID NO: 52597 - RNA, 14 nt, Artificial Sequence
  Description of Artificial Sequence: Synthetic oligonucleotide
ucucuacuaaaaau

SEQ ID NO: 52598 - RNA, 12 nt, Artificial Sequence
  Description of Artificial Sequence: Synthetic oligonucleotide
ucuaucucgccu

SEQ ID NO: 52599 - RNA, 13 nt, Artificial Sequence
  Description of Artificial Sequence: Synthetic oligonucleotide
cuucgguccaguu

SEQ ID NO: 52600 - RNA, 11 nt, Artificial Sequence
  Description of Artificial Sequence: Synthetic oligonucleotide
gauguagccgc

SEQ ID NO: 52601 - RNA, 12 nt, Artificial Sequence
  Description of Artificial Sequence: Synthetic oligonucleotide
ugaggagacuug

SEQ ID NO: 52602 - RNA, 12 nt, Artificial Sequence
  Description of Artificial Sequence: Synthetic oligonucleotide
gaguagugagga

SEQ ID NO: 52603 - RNA, 14 nt, Artificial Sequence
  Description of Artificial Sequence: Synthetic oligonucleotide
cagaugaguacaaa

SEQ ID NO: 52604 - RNA, 13 nt, Artificial Sequence
  Description of Artificial Sequence: Synthetic oligonucleotide
guuguuaaugggc

SEQ ID NO: 52605 - RNA, 13 nt, Artificial Sequence
  Description of Artificial Sequence: Synthetic oligonucleotide
uuuuuaauuuauu

SEQ ID NO: 52606 - RNA, 12 nt, Artificial Sequence
  Description of Artificial Sequence: Synthetic oligonucleotide
uauuuaaauaug

SEQ ID NO: 52607 - RNA, 13 nt, Artificial Sequence
  Description of Artificial Sequence: Synthetic oligonucleotide
uauccuuuguuuc

SEQ ID NO: 52608 - RNA, 14 nt, Artificial Sequence
  Description of Artificial Sequence: Synthetic oligonucleotide
cgucuaaguguuug

SEQ ID NO: 52609 - RNA, 12 nt, Artificial Sequence
  Description of Artificial Sequence: Synthetic oligonucleotide
accugugacaaa

SEQ ID NO: 52610 - RNA, 13 nt, Artificial Sequence
  Description of Artificial Sequence: Synthetic oligonucleotide
ccaggcugaauua

SEQ ID NO: 52611 - RNA, 14 nt, Artificial Sequence
  Description of Artificial Sequence: Synthetic oligonucleotide
gucauucuuacaau

SEQ ID NO: 52612 - RNA, 15 nt, Artificial Sequence
  Description of Artificial Sequence: Synthetic oligonucleotide
ucauucuuacaauug

SEQ ID NO: 52613 - RNA, 12 nt, Artificial Sequence
  Description of Artificial Sequence: Synthetic oligonucleotide
cagagaguguac

SEQ ID NO: 52614 - RNA, 12 nt, Artificial Sequence
  Description of Artificial Sequence: Synthetic oligonucleotide
agaacucagcag

SEQ ID NO: 52615 - RNA, 13 nt, Artificial Sequence
  Description of Artificial Sequence: Synthetic oligonucleotide
uuuauuuucagua

SEQ ID NO: 52616 - RNA, 12 nt, Artificial Sequence
  Description of Artificial Sequence: Synthetic oligonucleotide
ucuuaaauggaa

SEQ ID NO: 52617 - RNA, 13 nt, Artificial Sequence
  Description of Artificial Sequence: Synthetic oligonucleotide
ugccuaaaauugu

SEQ ID NO: 52618 - RNA, 12 nt, Artificial Sequence
  Description of Artificial Sequence: Synthetic oligonucleotide
agacugugagcu

SEQ ID NO: 52619 - RNA, 14 nt, Artificial Sequence
  Description of Artificial Sequence: Synthetic oligonucleotide
ugcuuuuuauuaau

SEQ ID NO: 52620 - RNA, 13 nt, Artificial Sequence
  Description of Artificial Sequence: Synthetic oligonucleotide
cucuucuuacauu

SEQ ID NO: 52621 - RNA, 15 nt, Artificial Sequence
  Description of Artificial Sequence: Synthetic oligonucleotide
cauuuguaaaaaugu

SEQ ID NO: 52622 - RNA, 15 nt, Artificial Sequence
  Description of Artificial Sequence: Synthetic oligonucleotide
aucuuaauucauauu

SEQ ID NO: 52623 - RNA, 13 nt, Artificial Sequence
  Description of Artificial Sequence: Synthetic oligonucleotide
gaacuaaucauga

SEQ ID NO: 52624 - RNA, 12 nt, Artificial Sequence
  Description of Artificial Sequence: Synthetic oligonucleotide
ucugcucuuggg

SEQ ID NO: 52625 - RNA, 13 nt, Artificial Sequence
  Description of Artificial Sequence: Synthetic oligonucleotide
caguagcuuugag

SEQ ID NO: 52626 - RNA, 14 nt, Artificial Sequence
  Description of Artificial Sequence: Synthetic oligonucleotide
cacguaauauuuca

SEQ ID NO: 52627 - RNA, 13 nt, Artificial Sequence
  Description of Artificial Sequence: Synthetic oligonucleotide
uauucucuucacu

SEQ ID NO: 52628 - RNA, 14 nt, Artificial Sequence
  Description of Artificial Sequence: Synthetic oligonucleotide
cuaaugcuaagaaa

SEQ ID NO: 52629 - RNA, 12 nt, Artificial Sequence
  Description of Artificial Sequence: Synthetic oligonucleotide
gcugaaaaucaa

SEQ ID NO: 52630 - RNA, 14 nt, Artificial Sequence
  Description of Artificial Sequence: Synthetic oligonucleotide
aauaugauuacuuu

SEQ ID NO: 52631 - RNA, 14 nt, Artificial Sequence
  Description of Artificial Sequence: Synthetic oligonucleotide
cauuuuguucuaca

SEQ ID NO: 52632 - RNA, 12 nt, Artificial Sequence
  Description of Artificial Sequence: Synthetic oligonucleotide
cccgggacucuc

SEQ ID NO: 52633 - RNA, 14 nt, Artificial Sequence
  Description of Artificial Sequence: Synthetic oligonucleotide
ccuuuaaaguaaag

SEQ ID NO: 52634 - RNA, 13 nt, Artificial Sequence
  Description of Artificial Sequence: Synthetic oligonucleotide
ucuggaagccugg

SEQ ID NO: 52635 - RNA, 14 nt, Artificial Sequence
  Description of Artificial Sequence: Synthetic oligonucleotide
aaaacaaaagagag

SEQ ID NO: 52636 - RNA, 13 nt, Artificial Sequence
  Description of Artificial Sequence: Synthetic oligonucleotide
aucaguuaugccg

SEQ ID NO: 52637 - RNA, 13 nt, Artificial Sequence
  Description of Artificial Sequence: Synthetic oligonucleotide
uaaaagaagucca

SEQ ID NO: 52638 - RNA, 11 nt, Artificial Sequence
  Description of Artificial Sequence: Synthetic oligonucleotide
aggugagguua

SEQ ID NO: 52639 - RNA, 11 nt, Artificial Sequence
  Description of Artificial Sequence: Synthetic oligonucleotide
gggaagaggac

SEQ ID NO: 52640 - RNA, 13 nt, Artificial Sequence
  Description of Artificial Sequence: Synthetic oligonucleotide
aagcaaguauugu

SEQ ID NO: 52641 - RNA, 12 nt, Artificial Sequence
  Description of Artificial Sequence: Synthetic oligonucleotide
auuguagcacuc

SEQ ID NO: 52642 - RNA, 14 nt, Artificial Sequence
  Description of Artificial Sequence: Synthetic oligonucleotide
acaaaaccacaaau

SEQ ID NO: 52643 - RNA, 12 nt, Artificial Sequence
  Description of Artificial Sequence: Synthetic oligonucleotide
uaagcccauaca

SEQ ID NO: 52644 - RNA, 11 nt, Artificial Sequence
  Description of Artificial Sequence: Synthetic oligonucleotide
agcccauacag

SEQ ID NO: 52645 - RNA, 12 nt, Artificial Sequence
  Description of Artificial Sequence: Synthetic oligonucleotide
cagaaaccuucc

SEQ ID NO: 52646 - RNA, 10 nt, Artificial Sequence
  Description of Artificial Sequence: Synthetic oligonucleotide
guauaccuac

SEQ ID NO: 52647 - RNA, 13 nt, Artificial Sequence
  Description of Artificial Sequence: Synthetic oligonucleotide
gccaguuuucgga

SEQ ID NO: 52648 - RNA, 9 nt, Artificial Sequence
  Description of Artificial Sequence: Synthetic oligonucleotide
ggaacaggg

SEQ ID NO: 52649 - RNA, 13 nt, Artificial Sequence
  Description of Artificial Sequence: Synthetic oligonucleotide
uuaacuuuccagu

SEQ ID NO: 52650 - RNA, 14 nt, Artificial Sequence
  Description of Artificial Sequence: Synthetic oligonucleotide
aaaguuugguuuug

SEQ ID NO: 52651 - RNA, 12 nt, Artificial Sequence
  Description of Artificial Sequence: Synthetic oligonucleotide
cuucccacugua

SEQ ID NO: 52652 - RNA, 13 nt, Artificial Sequence
  Description of Artificial Sequence: Synthetic oligonucleotide
ugauaccauauga

SEQ ID NO: 52653 - RNA, 11 nt, Artificial Sequence
  Description of Artificial Sequence: Synthetic oligonucleotide
aacaugggcug

SEQ ID NO: 52654 - RNA, 13 nt, Artificial Sequence
  Description of Artificial Sequence: Synthetic oligonucleotide
caacuuuuucaua

SEQ ID NO: 52655 - RNA, 12 nt, Artificial Sequence
  Description of Artificial Sequence: Synthetic oligonucleotide
caugaggccgga

SEQ ID NO: 52656 - RNA, 11 nt, Artificial Sequence
  Description of Artificial Sequence: Synthetic oligonucleotide
acugcauuugu

SEQ ID NO: 52657 - RNA, 13 nt, Artificial Sequence
  Description of Artificial Sequence: Synthetic oligonucleotide
aauguuuacuacc

SEQ ID NO: 52658 - RNA, 15 nt, Artificial Sequence
  Description of Artificial Sequence: Synthetic oligonucleotide
aauuuuuugaugaaa

SEQ ID NO: 52659 - RNA, 14 nt, Artificial Sequence
  Description of Artificial Sequence: Synthetic oligonucleotide
cagugugugaauuu

SEQ ID NO: 52660 - RNA, 13 nt, Artificial Sequence
  Description of Artificial Sequence: Synthetic oligonucleotide
gagcaauguaugu

SEQ ID NO: 52661 - RNA, 14 nt, Artificial Sequence
  Description of Artificial Sequence: Synthetic oligonucleotide
aaagcacauauaua

SEQ ID NO: 52662 - RNA, 14 nt, Artificial Sequence
  Description of Artificial Sequence: Synthetic oligonucleotide
guaauaguuucucc

SEQ ID NO: 52663 - RNA, 13 nt, Artificial Sequence
  Description of Artificial Sequence: Synthetic oligonucleotide
aguuucuccaaau

SEQ ID NO: 52664 - RNA, 13 nt, Artificial Sequence
  Description of Artificial Sequence: Synthetic oligonucleotide
uacuuccuagaaa

SEQ ID NO: 52665 - RNA, 13 nt, Artificial Sequence
  Description of Artificial Sequence: Synthetic oligonucleotide
uacaccauauaug

SEQ ID NO: 52666 - RNA, 14 nt, Artificial Sequence
  Description of Artificial Sequence: Synthetic oligonucleotide
auauaugaauggag

SEQ ID NO: 52667 - RNA, 13 nt, Artificial Sequence
  Description of Artificial Sequence: Synthetic oligonucleotide
acgagaagaagau

SEQ ID NO: 52668 - RNA, 13 nt, Artificial Sequence
  Description of Artificial Sequence: Synthetic oligonucleotide
ucauuuacaggga

SEQ ID NO: 52669 - RNA, 13 nt, Artificial Sequence
  Description of Artificial Sequence: Synthetic oligonucleotide
cauuuacagggac

SEQ ID NO: 52670 - RNA, 10 nt, Artificial Sequence
  Description of Artificial Sequence: Synthetic oligonucleotide
agggaccuga

SEQ ID NO: 52671 - RNA, 14 nt, Artificial Sequence
  Description of Artificial Sequence: Synthetic oligonucleotide
uguuugacugcauc

SEQ ID NO: 52672 - RNA, 13 nt, Artificial Sequence
  Description of Artificial Sequence: Synthetic oligonucleotide
uuugacugcaucg

SEQ ID NO: 52673 - RNA, 12 nt, Artificial Sequence
  Description of Artificial Sequence: Synthetic oligonucleotide
gaguucacaggg

SEQ ID NO: 52674 - RNA, 13 nt, Artificial Sequence
  Description of Artificial Sequence: Synthetic oligonucleotide
ggcaccucugucc

SEQ ID NO: 52675 - RNA, 15 nt, Artificial Sequence
  Description of Artificial Sequence: Synthetic oligonucleotide
gguuugucuuuuuaa

SEQ ID NO: 52676 - RNA, 14 nt, Artificial Sequence
  Description of Artificial Sequence: Synthetic oligonucleotide
uuugucuuuuuaag

SEQ ID NO: 52677 - RNA, 13 nt, Artificial Sequence
  Description of Artificial Sequence: Synthetic oligonucleotide
ccuaaagguuguc

SEQ ID NO: 52678 - RNA, 12 nt, Artificial Sequence
  Description of Artificial Sequence: Synthetic oligonucleotide
aagguugucgac

SEQ ID NO: 52679 - RNA, 13 nt, Artificial Sequence
  Description of Artificial Sequence: Synthetic oligonucleotide
accuggcaauugu

SEQ ID NO: 52680 - RNA, 12 nt, Artificial Sequence
  Description of Artificial Sequence: Synthetic oligonucleotide
aguggugcgagg

SEQ ID NO: 52681 - RNA, 13 nt, Artificial Sequence
  Description of Artificial Sequence: Synthetic oligonucleotide
agagacaugaaau

SEQ ID NO: 52682 - RNA, 13 nt, Artificial Sequence
  Description of Artificial Sequence: Synthetic oligonucleotide
auauauuucucca

SEQ ID NO: 52683 - RNA, 10 nt, Artificial Sequence
  Description of Artificial Sequence: Synthetic oligonucleotide
caugaaggcu

SEQ ID NO: 52684 - RNA, 11 nt, Artificial Sequence
  Description of Artificial Sequence: Synthetic oligonucleotide
gcuggaguggu

SEQ ID NO: 52685 - RNA, 11 nt, Artificial Sequence
  Description of Artificial Sequence: Synthetic oligonucleotide
aggaagagagg

SEQ ID NO: 52686 - RNA, 12 nt, Artificial Sequence
  Description of Artificial Sequence: Synthetic oligonucleotide
cuugcaucgggc

SEQ ID NO: 52687 - RNA, 13 nt, Artificial Sequence
  Description of Artificial Sequence: Synthetic oligonucleotide
auauccuacugug

SEQ ID NO: 52688 - RNA, 13 nt, Artificial Sequence
  Description of Artificial Sequence: Synthetic oligonucleotide
uccuacuguguaa

SEQ ID NO: 52689 - RNA, 12 nt, Artificial Sequence
  Description of Artificial Sequence: Synthetic oligonucleotide
ccuuguagugua

SEQ ID NO: 52690 - RNA, 13 nt, Artificial Sequence
  Description of Artificial Sequence: Synthetic oligonucleotide
ucuuuguugauug

SEQ ID NO: 52691 - RNA, 14 nt, Artificial Sequence
  Description of Artificial Sequence: Synthetic oligonucleotide
uuuguugauugaaa

SEQ ID NO: 52692 - RNA, 15 nt, Artificial Sequence
  Description of Artificial Sequence: Synthetic oligonucleotide
uucuuuuucuuccau

SEQ ID NO: 52693 - RNA, 13 nt, Artificial Sequence
  Description of Artificial Sequence: Synthetic oligonucleotide
aaucuuccuucua

SEQ ID NO: 52694 - RNA, 13 nt, Artificial Sequence
  Description of Artificial Sequence: Synthetic oligonucleotide
uugaaugcuucau

SEQ ID NO: 52695 - RNA, 13 nt, Artificial Sequence
  Description of Artificial Sequence: Synthetic oligonucleotide
ugaaugcuucaug

SEQ ID NO: 52696 - RNA, 13 nt, Artificial Sequence
  Description of Artificial Sequence: Synthetic oligonucleotide
aauucuacuuuga

SEQ ID NO: 52697 - RNA, 13 nt, Artificial Sequence
  Description of Artificial Sequence: Synthetic oligonucleotide
agcaacuacagac

SEQ ID NO: 52698 - RNA, 13 nt, Artificial Sequence
  Description of Artificial Sequence: Synthetic oligonucleotide
gaccaaggucaac

SEQ ID NO: 52699 - RNA, 13 nt, Artificial Sequence
  Description of Artificial Sequence: Synthetic oligonucleotide
cgacuaucucgac

SEQ ID NO: 52700 - RNA, 13 nt, Artificial Sequence
  Description of Artificial Sequence: Synthetic oligonucleotide
aaccuucccaaac

SEQ ID NO: 52701 - RNA, 14 nt, Artificial Sequence
  Description of Artificial Sequence: Synthetic oligonucleotide
ccaagcuuagaacu

SEQ ID NO: 52702 - RNA, 15 nt, Artificial Sequence
  Description of Artificial Sequence: Synthetic oligonucleotide
agcuuagaacuuuaa

SEQ ID NO: 52703 - RNA, 11 nt, Artificial Sequence
  Description of Artificial Sequence: Synthetic oligonucleotide
aagaccaccac

SEQ ID NO: 52704 - RNA, 14 nt, Artificial Sequence
  Description of Artificial Sequence: Synthetic oligonucleotide
gcgagaaauaaagu

SEQ ID NO: 52705 - RNA, 14 nt, Artificial Sequence
  Description of Artificial Sequence: Synthetic oligonucleotide
cgagaaauaaaguu

SEQ ID NO: 52706 - RNA, 12 nt, Artificial Sequence
  Description of Artificial Sequence: Synthetic oligonucleotide
aggaaaugaucc

SEQ ID NO: 52707 - RNA, 13 nt, Artificial Sequence
  Description of Artificial Sequence: Synthetic oligonucleotide
gaagaaaugaaac

SEQ ID NO: 52708 - RNA, 13 nt, Artificial Sequence
  Description of Artificial Sequence: Synthetic oligonucleotide
guuuccauccucc

SEQ ID NO: 52709 - RNA, 15 nt, Artificial Sequence
  Description of Artificial Sequence: Synthetic oligonucleotide
acugaaaaucuuuga

SEQ ID NO: 52710 - RNA, 11 nt, Artificial Sequence
  Description of Artificial Sequence: Synthetic oligonucleotide
ugccguucagg

SEQ ID NO: 52711 - RNA, 13 nt, Artificial Sequence
  Description of Artificial Sequence: Synthetic oligonucleotide
caggguccagaag

SEQ ID NO: 52712 - RNA, 13 nt, Artificial Sequence
  Description of Artificial Sequence: Synthetic oligonucleotide
ucaagacugcuug

SEQ ID NO: 52713 - RNA, 13 nt, Artificial Sequence
  Description of Artificial Sequence: Synthetic oligonucleotide
uccaugucuuugg

SEQ ID NO: 52714 - RNA, 11 nt, Artificial Sequence
  Description of Artificial Sequence: Synthetic oligonucleotide
gccugaaacac

SEQ ID NO: 52715 - RNA, 12 nt, Artificial Sequence
  Description of Artificial Sequence: Synthetic oligonucleotide
ucucuguaccuc

SEQ ID NO: 52716 - RNA, 12 nt, Artificial Sequence
  Description of Artificial Sequence: Synthetic oligonucleotide
agcaagacaaga

SEQ ID NO: 52717 - RNA, 13 nt, Artificial Sequence
  Description of Artificial Sequence: Synthetic oligonucleotide
gcaagacaagaaa

SEQ ID NO: 52718 - RNA, 12 nt, Artificial Sequence
  Description of Artificial Sequence: Synthetic oligonucleotide
uguacaagaucc

SEQ ID NO: 52719 - RNA, 12 nt, Artificial Sequence
  Description of Artificial Sequence: Synthetic oligonucleotide
cguacuugcaga

SEQ ID NO: 52720 - RNA, 13 nt, Artificial Sequence
  Description of Artificial Sequence: Synthetic oligonucleotide
cgaucgauacaga

SEQ ID NO: 52721 - RNA, 13 nt, Artificial Sequence
  Description of Artificial Sequence: Synthetic oligonucleotide
uauaaaaauaaau

SEQ ID NO: 52722 - RNA, 13 nt, Artificial Sequence
  Description of Artificial Sequence: Synthetic oligonucleotide
uaaaaauaaauau

SEQ ID NO: 52723 - RNA, 13 nt, Artificial Sequence
  Description of Artificial Sequence: Synthetic oligonucleotide
uuugacugcugug

SEQ ID NO: 52724 - RNA, 13 nt, Artificial Sequence
  Description of Artificial Sequence: Synthetic oligonucleotide
ggagaugagagac

SEQ ID NO: 52725 - RNA, 10 nt, Artificial Sequence
  Description of Artificial Sequence: Synthetic oligonucleotide
ucccacuugg

SEQ ID NO: 52726 - RNA, 10 nt, Artificial Sequence
  Description of Artificial Sequence: Synthetic oligonucleotide
guucacggcc

SEQ ID NO: 52727 - RNA, 12 nt, Artificial Sequence
  Description of Artificial Sequence: Synthetic oligonucleotide
accaucacacca

SEQ ID NO: 52728 - RNA, 10 nt, Artificial Sequence
  Description of Artificial Sequence: Synthetic oligonucleotide
cugcggguuu

SEQ ID NO: 52729 - RNA, 9 nt, Artificial Sequence
  Description of Artificial Sequence: Synthetic oligonucleotide
uccaguuug

SEQ ID NO: 52730 - RNA, 12 nt, Artificial Sequence
  Description of Artificial Sequence: Synthetic oligonucleotide
uuaaggacuucu

SEQ ID NO: 52731 - RNA, 12 nt, Artificial Sequence
  Description of Artificial Sequence: Synthetic oligonucleotide
agugggacagag

SEQ ID NO: 52732 - RNA, 13 nt, Artificial Sequence
  Description of Artificial Sequence: Synthetic oligonucleotide
auuuguuauugug

SEQ ID NO: 52733 - RNA, 12 nt, Artificial Sequence
  Description of Artificial Sequence: Synthetic oligonucleotide
ucaaaugcauuu

SEQ ID NO: 52734 - RNA, 9 nt, Artificial Sequence
  Description of Artificial Sequence: Synthetic oligonucleotide
aggaaagcc

SEQ ID NO: 52735 - RNA, 10 nt, Artificial Sequence
  Description of Artificial Sequence: Synthetic oligonucleotide
ggaaagcccu

SEQ ID NO: 52736 - RNA, 11 nt, Artificial Sequence
  Description of Artificial Sequence: Synthetic oligonucleotide
ccagcauggcc

SEQ ID NO: 52737 - RNA, 10 nt, Artificial Sequence
  Description of Artificial Sequence: Synthetic oligonucleotide
uucucccuga

SEQ ID NO: 52738 - RNA, 11 nt, Artificial Sequence
  Description of Artificial Sequence: Synthetic oligonucleotide
aagaagcccuu

SEQ ID NO: 52739 - RNA, 11 nt, Artificial Sequence
  Description of Artificial Sequence: Synthetic oligonucleotide
gaagcccuuca

SEQ ID NO: 52740 - RNA, 10 nt, Artificial Sequence
  Description of Artificial Sequence: Synthetic oligonucleotide
cccuucagcg

SEQ ID NO: 52741 - RNA, 10 nt, Artificial Sequence
  Description of Artificial Sequence: Synthetic oligonucleotide
cuucagcggc

SEQ ID NO: 52742 - RNA, 11 nt, Artificial Sequence
  Description of Artificial Sequence: Synthetic oligonucleotide
cagcggccagu

SEQ ID NO: 52743 - RNA, 11 nt, Artificial Sequence
  Description of Artificial Sequence: Synthetic oligonucleotide
gaaaagcuccg

SEQ ID NO: 52744 - RNA, 10 nt, Artificial Sequence
  Description of Artificial Sequence: Synthetic oligonucleotide
aaagcuccgg

SEQ ID NO: 52745 - RNA, 12 nt, Artificial Sequence
  Description of Artificial Sequence: Synthetic oligonucleotide
gucaacagucug

SEQ ID NO: 52746 - RNA, 12 nt, Artificial Sequence
  Description of Artificial Sequence: Synthetic oligonucleotide
agaguucaaaag

SEQ ID NO: 52747 - RNA, 12 nt, Artificial Sequence
  Description of Artificial Sequence: Synthetic oligonucleotide
gaguucaaaagc

SEQ ID NO: 52748 - RNA, 11 nt, Artificial Sequence
  Description of Artificial Sequence: Synthetic oligonucleotide
ucaaaagcccu

SEQ ID NO: 52749 - RNA, 11 nt, Artificial Sequence
  Description of Artificial Sequence: Synthetic oligonucleotide
caaaagcccuu

SEQ ID NO: 52750 - RNA, 11 nt, Artificial Sequence
  Description of Artificial Sequence: Synthetic oligonucleotide
aaagcccuuca

SEQ ID NO: 52751 - RNA, 11 nt, Artificial Sequence
  Description of Artificial Sequence: Synthetic oligonucleotide
aagcccuucag

SEQ ID NO: 52752 - RNA, 12 nt, Artificial Sequence
  Description of Artificial Sequence: Synthetic oligonucleotide
ugaagccgcucg

SEQ ID NO: 52753 - RNA, 11 nt, Artificial Sequence
  Description of Artificial Sequence: Synthetic oligonucleotide
acgccagucaa

SEQ ID NO: 52754 - RNA, 12 nt, Artificial Sequence
  Description of Artificial Sequence: Synthetic oligonucleotide
ucuuggugcgug

SEQ ID NO: 52755 - RNA, 13 nt, Artificial Sequence
  Description of Artificial Sequence: Synthetic oligonucleotide
uuggauucaucag

SEQ ID NO: 52756 - RNA, 12 nt, Artificial Sequence
  Description of Artificial Sequence: Synthetic oligonucleotide
ggaauaccuaag

SEQ ID NO: 52757 - RNA, 11 nt, Artificial Sequence
  Description of Artificial Sequence: Synthetic oligonucleotide
uuugaggcuca

SEQ ID NO: 52758 - RNA, 10 nt, Artificial Sequence
  Description of Artificial Sequence: Synthetic oligonucleotide
cuacaauugg

SEQ ID NO: 52759 - RNA, 11 nt, Artificial Sequence
  Description of Artificial Sequence: Synthetic oligonucleotide
aguuaggagcc

SEQ ID NO: 52760 - RNA, 12 nt, Artificial Sequence
  Description of Artificial Sequence: Synthetic oligonucleotide
gucaauauccac

SEQ ID NO: 52761 - RNA, 12 nt, Artificial Sequence
  Description of Artificial Sequence: Synthetic oligonucleotide
uguucagucaca

SEQ ID NO: 52762 - RNA, 11 nt, Artificial Sequence
  Description of Artificial Sequence: Synthetic oligonucleotide
cacacacauac

SEQ ID NO: 52763 - RNA, 11 nt, Artificial Sequence
  Description of Artificial Sequence: Synthetic oligonucleotide
uccuuuugcuu

SEQ ID NO: 52764 - RNA, 15 nt, Artificial Sequence
  Description of Artificial Sequence: Synthetic oligonucleotide
uuuaaaguaauuuuu

SEQ ID NO: 52765 - RNA, 12 nt, Artificial Sequence
  Description of Artificial Sequence: Synthetic oligonucleotide
aacagucaaugg

SEQ ID NO: 52766 - RNA, 12 nt, Artificial Sequence
  Description of Artificial Sequence: Synthetic oligonucleotide
cgacaaaccaau

SEQ ID NO: 52767 - RNA, 11 nt, Artificial Sequence
  Description of Artificial Sequence: Synthetic oligonucleotide
cugcuaccacu

SEQ ID NO: 52768 - RNA, 12 nt, Artificial Sequence
  Description of Artificial Sequence: Synthetic oligonucleotide
caagcggucuua

SEQ ID NO: 52769 - RNA, 12 nt, Artificial Sequence
  Description of Artificial Sequence: Synthetic oligonucleotide
gucuuaccggcu

SEQ ID NO: 52770 - RNA, 10 nt, Artificial Sequence
  Description of Artificial Sequence: Synthetic oligonucleotide
auggguuacc

SEQ ID NO: 52771 - RNA, 10 nt, Artificial Sequence
  Description of Artificial Sequence: Synthetic oligonucleotide
uuaccugcga

SEQ ID NO: 52772 - RNA, 11 nt, Artificial Sequence
  Description of Artificial Sequence: Synthetic oligonucleotide
aucuugcugag

SEQ ID NO: 52773 - RNA, 12 nt, Artificial Sequence
  Description of Artificial Sequence: Synthetic oligonucleotide
gcauaaaacagu

SEQ ID NO: 52774 - RNA, 11 nt, Artificial Sequence
  Description of Artificial Sequence: Synthetic oligonucleotide
uccuuuauccu

SEQ ID NO: 52775 - RNA, 11 nt, Artificial Sequence
  Description of Artificial Sequence: Synthetic oligonucleotide
aacgcaaguug

SEQ ID NO: 52776 - RNA, 12 nt, Artificial Sequence
  Description of Artificial Sequence: Synthetic oligonucleotide
aacugaaaccau

SEQ ID NO: 52777 - RNA, 13 nt, Artificial Sequence
  Description of Artificial Sequence: Synthetic oligonucleotide
cuuuguuaaauau

SEQ ID NO: 52778 - RNA, 13 nt, Artificial Sequence
  Description of Artificial Sequence: Synthetic oligonucleotide
uauauuaaaaguu

SEQ ID NO: 52779 - RNA, 12 nt, Artificial Sequence
  Description of Artificial Sequence: Synthetic oligonucleotide
uuuugacuuaac

SEQ ID NO: 52780 - RNA, 12 nt, Artificial Sequence
  Description of Artificial Sequence: Synthetic oligonucleotide
caaacucagcac

SEQ ID NO: 52781 - RNA, 10 nt, Artificial Sequence
  Description of Artificial Sequence: Synthetic oligonucleotide
gcugaccuca

SEQ ID NO: 52782 - RNA, 13 nt, Artificial Sequence
  Description of Artificial Sequence: Synthetic oligonucleotide
uuauucagaucgc

SEQ ID NO: 52783 - RNA, 12 nt, Artificial Sequence
  Description of Artificial Sequence: Synthetic oligonucleotide
ggguucugggau

SEQ ID NO: 52784 - RNA, 14 nt, Artificial Sequence
  Description of Artificial Sequence: Synthetic oligonucleotide
uauuggaaauuaug

SEQ ID NO: 52785 - RNA, 12 nt, Artificial Sequence
  Description of Artificial Sequence: Synthetic oligonucleotide
uggaagcacuag

SEQ ID NO: 52786 - RNA, 12 nt, Artificial Sequence
  Description of Artificial Sequence: Synthetic oligonucleotide
uuuuuaugugga

SEQ ID NO: 52787 - RNA, 11 nt, Artificial Sequence
  Description of Artificial Sequence: Synthetic oligonucleotide
gaauugguaga

SEQ ID NO: 52788 - RNA, 12 nt, Artificial Sequence
  Description of Artificial Sequence: Synthetic oligonucleotide
uagacuuggaga

SEQ ID NO: 52789 - RNA, 12 nt, Artificial Sequence
  Description of Artificial Sequence: Synthetic oligonucleotide
uacaguauucca

SEQ ID NO: 52790 - RNA, 14 nt, Artificial Sequence
  Description of Artificial Sequence: Synthetic oligonucleotide
cacugaugaauuaa

SEQ ID NO: 52791 - RNA, 11 nt, Artificial Sequence
  Description of Artificial Sequence: Synthetic oligonucleotide
cacaucaucac

SEQ ID NO: 52792 - RNA, 12 nt, Artificial Sequence
  Description of Artificial Sequence: Synthetic oligonucleotide
ucaccaaacaga

SEQ ID NO: 52793 - RNA, 11 nt, Artificial Sequence
  Description of Artificial Sequence: Synthetic oligonucleotide
gaacaugaugg

SEQ ID NO: 52794 - RNA, 11 nt, Artificial Sequence
  Description of Artificial Sequence: Synthetic oligonucleotide
auguagacugc

SEQ ID NO: 52795 - RNA, 12 nt, Artificial Sequence
  Description of Artificial Sequence: Synthetic oligonucleotide
gaucuauuuaug

SEQ ID NO: 52796 - RNA, 11 nt, Artificial Sequence
  Description of Artificial Sequence: Synthetic oligonucleotide
cacuauuauca

SEQ ID NO: 52797 - RNA, 10 nt, Artificial Sequence
  Description of Artificial Sequence: Synthetic oligonucleotide
ucaguucugc

SEQ ID NO: 52798 - RNA, 12 nt, Artificial Sequence
  Description of Artificial Sequence: Synthetic oligonucleotide
gauuaaaccuac

SEQ ID NO: 52799 - RNA, 12 nt, Artificial Sequence
  Description of Artificial Sequence: Synthetic oligonucleotide
uaaaauccuucu

SEQ ID NO: 52800 - RNA, 11 nt, Artificial Sequence
  Description of Artificial Sequence: Synthetic oligonucleotide
augcuguagac

SEQ ID NO: 52801 - RNA, 12 nt, Artificial Sequence
  Description of Artificial Sequence: Synthetic oligonucleotide
ugauaggaauag

SEQ ID NO: 52802 - RNA, 10 nt, Artificial Sequence
  Description of Artificial Sequence: Synthetic oligonucleotide
auggcccuga

SEQ ID NO: 52803 - RNA, 10 nt, Artificial Sequence
  Description of Artificial Sequence: Synthetic oligonucleotide
uccucaagca

SEQ ID NO: 52804 - RNA, 9 nt, Artificial Sequence
  Description of Artificial Sequence: Synthetic oligonucleotide
uucagccca

SEQ ID NO: 52805 - RNA, 10 nt, Artificial Sequence
  Description of Artificial Sequence: Synthetic oligonucleotide
cugcugaacc

SEQ ID NO: 52806 - RNA, 11 nt, Artificial Sequence
  Description of Artificial Sequence: Synthetic oligonucleotide
aguucucuuca

SEQ ID NO: 52807 - RNA, 10 nt, Artificial Sequence
  Description of Artificial Sequence: Synthetic oligonucleotide
cagccuagag

SEQ ID NO: 52808 - RNA, 12 nt, Artificial Sequence
  Description of Artificial Sequence: Synthetic oligonucleotide
ucugugaagugu

SEQ ID NO: 52809 - RNA, 13 nt, Artificial Sequence
  Description of Artificial Sequence: Synthetic oligonucleotide
gagaaaauuucaa

SEQ ID NO: 52810 - RNA, 10 nt, Artificial Sequence
  Description of Artificial Sequence: Synthetic oligonucleotide
auccuccuga

SEQ ID NO: 52811 - RNA, 11 nt, Artificial Sequence
  Description of Artificial Sequence: Synthetic oligonucleotide
ugacaucauau

SEQ ID NO: 52812 - RNA, 12 nt, Artificial Sequence
  Description of Artificial Sequence: Synthetic oligonucleotide
aucuucaucaua

SEQ ID NO: 52813 - RNA, 12 nt, Artificial Sequence
  Description of Artificial Sequence: Synthetic oligonucleotide
acuagcuauuaa

SEQ ID NO: 52814 - RNA, 13 nt, Artificial Sequence
  Description of Artificial Sequence: Synthetic oligonucleotide
cucuacuaaaaau

SEQ ID NO: 52815 - RNA, 11 nt, Artificial Sequence
  Description of Artificial Sequence: Synthetic oligonucleotide
cuaucucgccu

SEQ ID NO: 52816 - RNA, 12 nt, Artificial Sequence
  Description of Artificial Sequence: Synthetic oligonucleotide
uucgguccaguu

SEQ ID NO: 52817 - RNA, 10 nt, Artificial Sequence
  Description of Artificial Sequence: Synthetic oligonucleotide
auguagccgc

SEQ ID NO: 52818 - RNA, 11 nt, Artificial Sequence
  Description of Artificial Sequence: Synthetic oligonucleotide
gaggagacuug

SEQ ID NO: 52819 - RNA, 11 nt, Artificial Sequence
  Description of Artificial Sequence: Synthetic oligonucleotide
aguagugagga

SEQ ID NO: 52820 - RNA, 13 nt, Artificial Sequence
  Description of Artificial Sequence: Synthetic oligonucleotide
agaugaguacaaa

SEQ ID NO: 52821 - RNA, 12 nt, Artificial Sequence
  Description of Artificial Sequence: Synthetic oligonucleotide
uuguuaaugggc

SEQ ID NO: 52822 - RNA, 12 nt, Artificial Sequence
  Description of Artificial Sequence: Synthetic oligonucleotide
uuuuaauuuauu

SEQ ID NO: 52823 - RNA, 11 nt, Artificial Sequence
  Description of Artificial Sequence: Synthetic oligonucleotide
auuuaaauaug

SEQ ID NO: 52824 - RNA, 12 nt, Artificial Sequence
  Description of Artificial Sequence: Synthetic oligonucleotide
auccuuuguuuc

SEQ ID NO: 52825 - RNA, 13 nt, Artificial Sequence
  Description of Artificial Sequence: Synthetic oligonucleotide
gucuaaguguuug

SEQ ID NO: 52826 - RNA, 11 nt, Artificial Sequence
  Description of Artificial Sequence: Synthetic oligonucleotide
ccugugacaaa

SEQ ID NO: 52827 - RNA, 12 nt, Artificial Sequence
  Description of Artificial Sequence: Synthetic oligonucleotide
caggcugaauua

SEQ ID NO: 52828 - RNA, 13 nt, Artificial Sequence
  Description of Artificial Sequence: Synthetic oligonucleotide
ucauucuuacaau

SEQ ID NO: 52829 - RNA, 14 nt, Artificial Sequence
  Description of Artificial Sequence: Synthetic oligonucleotide
cauucuuacaauug

SEQ ID NO: 52830 - RNA, 11 nt, Artificial Sequence
  Description of Artificial Sequence: Synthetic oligonucleotide
agagaguguac

SEQ ID NO: 52831 - RNA, 11 nt, Artificial Sequence
  Description of Artificial Sequence: Synthetic oligonucleotide
gaacucagcag

SEQ ID NO: 52832 - RNA, 12 nt, Artificial Sequence
  Description of Artificial Sequence: Synthetic oligonucleotide
uuauuuucagua

SEQ ID NO: 52833 - RNA, 11 nt, Artificial Sequence
  Description of Artificial Sequence: Synthetic oligonucleotide
cuuaaauggaa

SEQ ID NO: 52834 - RNA, 12 nt, Artificial Sequence
  Description of Artificial Sequence: Synthetic oligonucleotide
gccuaaaauugu

SEQ ID NO: 52835 - RNA, 12 nt, Artificial Sequence
  Description of Artificial Sequence: Synthetic oligonucleotide
acuaacaucugg

SEQ ID NO: 52836 - RNA, 11 nt, Artificial Sequence
  Description of Artificial Sequence: Synthetic oligonucleotide
gacugugagcu

SEQ ID NO: 52837 - RNA, 13 nt, Artificial Sequence
  Description of Artificial Sequence: Synthetic oligonucleotide
gcuuuuuauuaau

SEQ ID NO: 52838 - RNA, 12 nt, Artificial Sequence
  Description of Artificial Sequence: Synthetic oligonucleotide
ucuucuuacauu

SEQ ID NO: 52839 - RNA, 14 nt, Artificial Sequence
  Description of Artificial Sequence: Synthetic oligonucleotide
auuuguaaaaaugu

SEQ ID NO: 52840 - RNA, 14 nt, Artificial Sequence
  Description of Artificial Sequence: Synthetic oligonucleotide
ucuuaauucauauu

SEQ ID NO: 52841 - RNA, 12 nt, Artificial Sequence
  Description of Artificial Sequence: Synthetic oligonucleotide
aacuaaucauga

SEQ ID NO: 52842 - RNA, 11 nt, Artificial Sequence
  Description of Artificial Sequence: Synthetic oligonucleotide
cugcucuuggg

SEQ ID NO: 52843 - RNA, 12 nt, Artificial Sequence
  Description of Artificial Sequence: Synthetic oligonucleotide
aguagcuuugag

SEQ ID NO: 52844 - RNA, 13 nt, Artificial Sequence
  Description of Artificial Sequence: Synthetic oligonucleotide
acguaauauuuca

SEQ ID NO: 52845 - RNA, 12 nt, Artificial Sequence
  Description of Artificial Sequence: Synthetic oligonucleotide
auucucuucacu

SEQ ID NO: 52846 - RNA, 13 nt, Artificial Sequence
  Description of Artificial Sequence: Synthetic oligonucleotide
uaaugcuaagaaa

SEQ ID NO: 52847 - RNA, 11 nt, Artificial Sequence
  Description of Artificial Sequence: Synthetic oligonucleotide
cugaaaaucaa

SEQ ID NO: 52848 - RNA, 13 nt, Artificial Sequence
  Description of Artificial Sequence: Synthetic oligonucleotide
auaugauuacuuu

SEQ ID NO: 52849 - RNA, 13 nt, Artificial Sequence
  Description of Artificial Sequence: Synthetic oligonucleotide
auuuuguucuaca

SEQ ID NO: 52850 - RNA, 11 nt, Artificial Sequence
  Description of Artificial Sequence: Synthetic oligonucleotide
ccgggacucuc

SEQ ID NO: 52851 - RNA, 13 nt, Artificial Sequence
  Description of Artificial Sequence: Synthetic oligonucleotide
cuuuaaaguaaag

SEQ ID NO: 52852 - RNA, 12 nt, Artificial Sequence
  Description of Artificial Sequence: Synthetic oligonucleotide
cuggaagccugg

SEQ ID NO: 52853 - RNA, 13 nt, Artificial Sequence
  Description of Artificial Sequence: Synthetic oligonucleotide
aaacaaaagagag

SEQ ID NO: 52854 - RNA, 12 nt, Artificial Sequence
  Description of Artificial Sequence: Synthetic oligonucleotide
ucaguuaugccg

SEQ ID NO: 52855 - RNA, 12 nt, Artificial Sequence
  Description of Artificial Sequence: Synthetic oligonucleotide
aaaagaagucca

SEQ ID NO: 52856 - RNA, 10 nt, Artificial Sequence
  Description of Artificial Sequence: Synthetic oligonucleotide
ggugagguua

SEQ ID NO: 52857 - RNA, 10 nt, Artificial Sequence
  Description of Artificial Sequence: Synthetic oligonucleotide
ggaagaggac

SEQ ID NO: 52858 - RNA, 12 nt, Artificial Sequence
  Description of Artificial Sequence: Synthetic oligonucleotide
agcaaguauugu

SEQ ID NO: 52859 - RNA, 11 nt, Artificial Sequence
  Description of Artificial Sequence: Synthetic oligonucleotide
uuguagcacuc

SEQ ID NO: 52860 - RNA, 13 nt, Artificial Sequence
  Description of Artificial Sequence: Synthetic oligonucleotide
caaaaccacaaau

SEQ ID NO: 52861 - RNA, 11 nt, Artificial Sequence
  Description of Artificial Sequence: Synthetic oligonucleotide
aagcccauaca

SEQ ID NO: 52862 - RNA, 10 nt, Artificial Sequence
  Description of Artificial Sequence: Synthetic oligonucleotide
gcccauacag

SEQ ID NO: 52863 - RNA, 11 nt, Artificial Sequence
  Description of Artificial Sequence: Synthetic oligonucleotide
agaaaccuucc

SEQ ID NO: 52864 - RNA, 9 nt, Artificial Sequence
  Description of Artificial Sequence: Synthetic oligonucleotide
uauaccuac

SEQ ID NO: 52865 - RNA, 12 nt, Artificial Sequence
  Description of Artificial Sequence: Synthetic oligonucleotide
ccaguuuucgga

SEQ ID NO: 52866 - RNA, 8 nt, Artificial Sequence
  Description of Artificial Sequence: Synthetic oligonucleotide
gaacaggg

SEQ ID NO: 52867 - RNA, 12 nt, Artificial Sequence
  Description of Artificial Sequence: Synthetic oligonucleotide
uaacuuuccagu

SEQ ID NO: 52868 - RNA, 13 nt, Artificial Sequence
  Description of Artificial Sequence: Synthetic oligonucleotide
aaguuugguuuug

SEQ ID NO: 52869 - RNA, 11 nt, Artificial Sequence
  Description of Artificial Sequence: Synthetic oligonucleotide
uucccacugua

SEQ ID NO: 52870 - RNA, 12 nt, Artificial Sequence
  Description of Artificial Sequence: Synthetic oligonucleotide
gauaccauauga

SEQ ID NO: 52871 - RNA, 10 nt, Artificial Sequence
  Description of Artificial Sequence: Synthetic oligonucleotide
acaugggcug

SEQ ID NO: 52872 - RNA, 12 nt, Artificial Sequence
  Description of Artificial Sequence: Synthetic oligonucleotide
aacuuuuucaua

SEQ ID NO: 52873 - RNA, 11 nt, Artificial Sequence
  Description of Artificial Sequence: Synthetic oligonucleotide
augaggccgga

SEQ ID NO: 52874 - RNA, 10 nt, Artificial Sequence
  Description of Artificial Sequence: Synthetic oligonucleotide
cugcauuugu

SEQ ID NO: 52875 - RNA, 12 nt, Artificial Sequence
  Description of Artificial Sequence: Synthetic oligonucleotide
auguuuacuacc

SEQ ID NO: 52876 - RNA, 14 nt, Artificial Sequence
  Description of Artificial Sequence: Synthetic oligonucleotide
auuuuuugaugaaa

SEQ ID NO: 52877 - RNA, 13 nt, Artificial Sequence
  Description of Artificial Sequence: Synthetic oligonucleotide
agugugugaauuu

SEQ ID NO: 52878 - RNA, 12 nt, Artificial Sequence
  Description of Artificial Sequence: Synthetic oligonucleotide
agcaauguaugu

SEQ ID NO: 52879 - RNA, 13 nt, Artificial Sequence
  Description of Artificial Sequence: Synthetic oligonucleotide
aagcacauauaua

SEQ ID NO: 52880 - RNA, 13 nt, Artificial Sequence
  Description of Artificial Sequence: Synthetic oligonucleotide
uaauaguuucucc

SEQ ID NO: 52881 - RNA, 12 nt, Artificial Sequence
  Description of Artificial Sequence: Synthetic oligonucleotide
guuucuccaaau

SEQ ID NO: 52882 - RNA, 12 nt, Artificial Sequence
  Description of Artificial Sequence: Synthetic oligonucleotide
acuuccuagaaa

SEQ ID NO: 52883 - RNA, 12 nt, Artificial Sequence
  Description of Artificial Sequence: Synthetic oligonucleotide
acaccauauaug

SEQ ID NO: 52884 - RNA, 13 nt, Artificial Sequence
  Description of Artificial Sequence: Synthetic oligonucleotide
uauaugaauggag

SEQ ID NO: 52885 - RNA, 12 nt, Artificial Sequence
  Description of Artificial Sequence: Synthetic oligonucleotide
cauuuacaggga

SEQ ID NO: 52886 - RNA, 12 nt, Artificial Sequence
  Description of Artificial Sequence: Synthetic oligonucleotide
auuuacagggac

SEQ ID NO: 52887 - RNA, 9 nt, Artificial Sequence
  Description of Artificial Sequence: Synthetic oligonucleotide
gggaccuga

SEQ ID NO: 52888 - RNA, 13 nt, Artificial Sequence
  Description of Artificial Sequence: Synthetic oligonucleotide
guuugacugcauc

SEQ ID NO: 52889 - RNA, 12 nt, Artificial Sequence
  Description of Artificial Sequence: Synthetic oligonucleotide
uugacugcaucg

SEQ ID NO: 52890 - RNA, 11 nt, Artificial Sequence
  Description of Artificial Sequence: Synthetic oligonucleotide
aguucacaggg

SEQ ID NO: 52891 - RNA, 12 nt, Artificial Sequence
  Description of Artificial Sequence: Synthetic oligonucleotide
gcaccucugucc

SEQ ID NO: 52892 - RNA, 14 nt, Artificial Sequence
  Description of Artificial Sequence: Synthetic oligonucleotide
guuugucuuuuuaa

SEQ ID NO: 52893 - RNA, 13 nt, Artificial Sequence
  Description of Artificial Sequence: Synthetic oligonucleotide
uugucuuuuuaag

SEQ ID NO: 52894 - RNA, 12 nt, Artificial Sequence
  Description of Artificial Sequence: Synthetic oligonucleotide
cuaaagguuguc

SEQ ID NO: 52895 - RNA, 11 nt, Artificial Sequence
  Description of Artificial Sequence: Synthetic oligonucleotide
agguugucgac

SEQ ID NO: 52896 - RNA, 12 nt, Artificial Sequence
  Description of Artificial Sequence: Synthetic oligonucleotide
ccuggcaauugu

SEQ ID NO: 52897 - RNA, 11 nt, Artificial Sequence
  Description of Artificial Sequence: Synthetic oligonucleotide
guggugcgagg

SEQ ID NO: 52898 - RNA, 12 nt, Artificial Sequence
  Description of Artificial Sequence: Synthetic oligonucleotide
gagacaugaaau

SEQ ID NO: 52899 - RNA, 12 nt, Artificial Sequence
  Description of Artificial Sequence: Synthetic oligonucleotide
uauauuucucca

SEQ ID NO: 52900 - RNA, 9 nt, Artificial Sequence
  Description of Artificial Sequence: Synthetic oligonucleotide
augaaggcu

SEQ ID NO: 52901 - RNA, 10 nt, Artificial Sequence
  Description of Artificial Sequence: Synthetic oligonucleotide
cuggaguggu

SEQ ID NO: 52902 - RNA, 10 nt, Artificial Sequence
  Description of Artificial Sequence: Synthetic oligonucleotide
ggaagagagg

SEQ ID NO: 52903 - RNA, 11 nt, Artificial Sequence
  Description of Artificial Sequence: Synthetic oligonucleotide
uugcaucgggc

SEQ ID NO: 52904 - RNA, 12 nt, Artificial Sequence
  Description of Artificial Sequence: Synthetic oligonucleotide
uauccuacugug

SEQ ID NO: 52905 - RNA, 12 nt, Artificial Sequence
  Description of Artificial Sequence: Synthetic oligonucleotide
ccuacuguguaa

SEQ ID NO: 52906 - RNA, 11 nt, Artificial Sequence
  Description of Artificial Sequence: Synthetic oligonucleotide
cuuguagugua

SEQ ID NO: 52907 - RNA, 12 nt, Artificial Sequence
  Description of Artificial Sequence: Synthetic oligonucleotide
cuuuguugauug

SEQ ID NO: 52908 - RNA, 13 nt, Artificial Sequence
  Description of Artificial Sequence: Synthetic oligonucleotide
uuguugauugaaa

SEQ ID NO: 52909 - RNA, 14 nt, Artificial Sequence
  Description of Artificial Sequence: Synthetic oligonucleotide
ucuuuuucuuccau

SEQ ID NO: 52910 - RNA, 12 nt, Artificial Sequence
  Description of Artificial Sequence: Synthetic oligonucleotide
aucuuccuucua

SEQ ID NO: 52911 - RNA, 12 nt, Artificial Sequence
  Description of Artificial Sequence: Synthetic oligonucleotide
ugaaugcuucau

SEQ ID NO: 52912 - RNA, 12 nt, Artificial Sequence
  Description of Artificial Sequence: Synthetic oligonucleotide
gaaugcuucaug

SEQ ID NO: 52913 - RNA, 12 nt, Artificial Sequence
  Description of Artificial Sequence: Synthetic oligonucleotide
auucuacuuuga

SEQ ID NO: 52914 - RNA, 12 nt, Artificial Sequence
  Description of Artificial Sequence: Synthetic oligonucleotide
gcaacuacagac

SEQ ID NO: 52915 - RNA, 12 nt, Artificial Sequence
  Description of Artificial Sequence: Synthetic oligonucleotide
accaaggucaac

SEQ ID NO: 52916 - RNA, 12 nt, Artificial Sequence
  Description of Artificial Sequence: Synthetic oligonucleotide
gacuaucucgac

SEQ ID NO: 52917 - RNA, 12 nt, Artificial Sequence
  Description of Artificial Sequence: Synthetic oligonucleotide
accuucccaaac

SEQ ID NO: 52918 - RNA, 13 nt, Artificial Sequence
  Description of Artificial Sequence: Synthetic oligonucleotide
caagcuuagaacu

SEQ ID NO: 52919 - RNA, 14 nt, Artificial Sequence
  Description of Artificial Sequence: Synthetic oligonucleotide
gcuuagaacuuuaa

SEQ ID NO: 52920 - RNA, 13 nt, Artificial Sequence
  Description of Artificial Sequence: Synthetic oligonucleotide
aacuuuaagcaac

SEQ ID NO: 52921 - RNA, 10 nt, Artificial Sequence
  Description of Artificial Sequence: Synthetic oligonucleotide
agaccaccac

SEQ ID NO: 52922 - RNA, 13 nt, Artificial Sequence
  Description of Artificial Sequence: Synthetic oligonucleotide
cgagaaauaaagu

SEQ ID NO: 52923 - RNA, 13 nt, Artificial Sequence
  Description of Artificial Sequence: Synthetic oligonucleotide
gagaaauaaaguu

SEQ ID NO: 52924 - RNA, 11 nt, Artificial Sequence
  Description of Artificial Sequence: Synthetic oligonucleotide
ggaaaugaucc

SEQ ID NO: 52925 - RNA, 12 nt, Artificial Sequence
  Description of Artificial Sequence: Synthetic oligonucleotide
aagaaaugaaac

SEQ ID NO: 52926 - RNA, 12 nt, Artificial Sequence
  Description of Artificial Sequence: Synthetic oligonucleotide
uuuccauccucc

SEQ ID NO: 52927 - RNA, 14 nt, Artificial Sequence
  Description of Artificial Sequence: Synthetic oligonucleotide
cugaaaaucuuuga

SEQ ID NO: 52928 - RNA, 10 nt, Artificial Sequence
  Description of Artificial Sequence: Synthetic oligonucleotide
gccguucagg

SEQ ID NO: 52929 - RNA, 12 nt, Artificial Sequence
  Description of Artificial Sequence: Synthetic oligonucleotide
aggguccagaag

SEQ ID NO: 52930 - RNA, 12 nt, Artificial Sequence
  Description of Artificial Sequence: Synthetic oligonucleotide
caagacugcuug

SEQ ID NO: 52931 - RNA, 12 nt, Artificial Sequence
  Description of Artificial Sequence: Synthetic oligonucleotide
ccaugucuuugg

SEQ ID NO: 52932 - RNA, 10 nt, Artificial Sequence
  Description of Artificial Sequence: Synthetic oligonucleotide
ccugaaacac

SEQ ID NO: 52933 - RNA, 11 nt, Artificial Sequence
  Description of Artificial Sequence: Synthetic oligonucleotide
cucuguaccuc

SEQ ID NO: 52934 - RNA, 11 nt, Artificial Sequence
  Description of Artificial Sequence: Synthetic oligonucleotide
gcaagacaaga

SEQ ID NO: 52935 - RNA, 12 nt, Artificial Sequence
  Description of Artificial Sequence: Synthetic oligonucleotide
caagacaagaaa

SEQ ID NO: 52936 - RNA, 11 nt, Artificial Sequence
  Description of Artificial Sequence: Synthetic oligonucleotide
guacaagaucc

SEQ ID NO: 52937 - RNA, 11 nt, Artificial Sequence
  Description of Artificial Sequence: Synthetic oligonucleotide
guacuugcaga

SEQ ID NO: 52938 - RNA, 12 nt, Artificial Sequence
  Description of Artificial Sequence: Synthetic oligonucleotide
gaucgauacaga

SEQ ID NO: 52939 - RNA, 12 nt, Artificial Sequence
  Description of Artificial Sequence: Synthetic oligonucleotide
auaaaaauaaau

SEQ ID NO: 52940 - RNA, 12 nt, Artificial Sequence
  Description of Artificial Sequence: Synthetic oligonucleotide
aaaaauaaauau

SEQ ID NO: 52941 - RNA, 12 nt, Artificial Sequence
  Description of Artificial Sequence: Synthetic oligonucleotide
uugacugcugug

SEQ ID NO: 52942 - RNA, 12 nt, Artificial Sequence
  Description of Artificial Sequence: Synthetic oligonucleotide
gagaugagagac

SEQ ID NO: 52943 - RNA, 9 nt, Artificial Sequence
  Description of Artificial Sequence: Synthetic oligonucleotide
cccacuugg

SEQ ID NO: 52944 - RNA, 3008 nt, Homo sapiens
uaauuaugggucuguaaccacccuggacugggugcuccucacugacggacuugucugaaccucucuuugucuccagcgcccagcacugggccuggcaaaaccugagacgcccgguacauguuggccaaaugaaugaaccagauucagaccggcaggggcgcugugguuuaggaggggccugggguuucucccaggagguuuuugggcuugcgcuggagggcucuggacucccguuugcgccaguggccugcauccugguccugucuuccucauguuugaauuucuuugcuuuccuagucuggggagcagggaggagcccugugcccugucccaggauccauggguaggaacaccauggacagggagagcaaacggggccaucugucaccaggggcuuagggaaggccgagccagccugggucaaagaagucaaaggggcugccuggaggaggcagccugucagcuggugcaucagaggcuguggccaggccagcugggcucggggagcgccagccugagaggagcgcgugagcgucgcgggagccucgggcaccaugagcgacguggcuauugugaaggaggguuggcugcacaaacgaggggaguacaucaagaccuggcggccacgcuacuuccuccucaagaaugauggcaccuucauuggcuacaaggagcggccgcaggauguggaccaacgugaggcuccccucaacaacuucucuguggcgcagugccagcugaugaagacggagcggccccggcccaacaccuucaucauccgcugccugcaguggaccacugucaucgaacgcaccuuccauguggagacuccugaggagcgggaggaguggacaaccgccauccagacuguggcugacggccucaagaagcaggaggaggaggagauggacuuccggucgggcucacccagugacaacucaggggcugaagagauggaggugucccuggccaagcccaagcaccgcgugaccaugaacgaguuugaguaccugaagcugcugggcaagggcacuuucggcaaggugauccuggugaaggagaaggccacaggccgcuacuacgccaugaagauccucaagaaggaagucaucguggccaaggacgagguggcccacacacucaccgagaaccgcguccugcagaacuccaggcaccccuuccucacagcccugaaguacucuuuccagacccacgaccgccucugcuuugucauggaguacgccaacgggggcgagcuguucuuccaccugucccgggagcguguguucuccgaggaccgggcccgcuucuauggcgcugagauugugucagcccuggacuaccugcacucggagaagaacgugguguaccgggaccucaagcuggagaaccucaugcuggacaaggacgggcacauuaagaucacagacuucgggcugugcaaggaggggaucaaggacggugccaccaugaagaccuuuugcggcacaccugaguaccuggcccccgaggugcuggaggacaaugacuacggccgugcaguggacuggugggggcugggcguggucauguacgagaugaugugcggucgccugcccuucuacaaccaggaccaugagaagcuuuuugagcucauccucauggaggagauccgcuucccgcgcacgcuuggucccgaggccaaguccuugcuuucagggcugcucaagaaggaccccaagcagaggcuuggcgggggcuccgaggacgccaaggagaucaugcagcaucgcuucuuugccgguaucguguggcagcacguguacgagaagaagcucagcccacccuucaagccccaggucacgucggagacugacaccagguauuuugaugaggaguucacggcccagaugaucaccaucacaccaccugaccaagaugacagcauggaguguguggacagcgagcgcaggccccacuucccccaguucuccuacucggccagcggcacggccugaggcggcgguggacugcgcuggacgauagcuuggagggauggagaggcggccucgugccaugaucuguauuuaaugguuuuuauuucucgggugcauuugagagaagccacgcuguccucucgagcccagauggaaagacguuuuugugcugugggcagcacccucccccgcagcgggguagggaagaaaacuauccugcggguuuuaauuuauuucauccaguuuguucuccggguguggccucagcccucagaacaauccgauucacguagggaaauguuaaggacuucugcagcuaugcgcaauguggcauuggggggccgggcagguccugcccauguguccccucacucugucagccagccgcccugggcugucugucaccagcuaucugucaucucucuggggcccugggccucaguucaaccugguggcaccagaugcaaccucacuaugguaugcuggccagcacccucuccuggggguggcaggcacacagcagccccccagcacuaaggccgugucucugaggacgucaucggaggcugggccccugggaugggaccagggaugggggaugggccaggguuuacccagugggacagaggagcaagguuuaaauuuguuauuguguauuauguuguucaaaugcauuuuggggguuuuuaaucuuugugacaggaaagcccucccccuuccccuucugugucacaguucuuggugacugucccaccgggagccucccccucagaugaucucuccacgguagcacuugaccuuuucgacgcuuaaccuuuccgcugucgccccaggcccucccugacucccuguggggguggccaucccugggccccuccacgccuccuggccagacgcugccgcugccgcugcaccacggcguuuuuuuacaacauucaacuuuaguauuuuuacuauuauaauauaauauggaaccuucccuccaaauucuucaauaaaaguugcuuuucaaaaaaaaaaaaaaaaaaaaaa

SEQ ID NO: 52945 - RNA, 2878 nt, Homo sapiens
cggcaggaccgagcgcggcaggcggcuggcccagcgcagccagcgcggcccgaaggacgggagcaggcggccgagcaccgagcgcugggcaccgggcaccgagcggcggcggcacgcgaggcccggccccgagcagcgcccccgcccgccgcggccuccagcccggccccgcccagcgccggcccgcggggaugcggagcggcgggcgccggaggccgcggcccggcuaggcccgcgcucgcgcccggacgcggcggcccggggcuuagggaaggccgagccagccugggucaaagaagucaaaggggcugccuggaggaggcagccugucagcuggugcaucagaggcuguggccaggccagcugggcucggggagcgccagccugagaggagcgcgugagcgucgcgggagccucgggcaccaugagcgacguggcuauugugaaggaggguuggcugcacaaacgaggggaguacaucaagaccuggcggccacgcuacuuccuccucaagaaugauggcaccuucauuggcuacaaggagcggccgcaggauguggaccaacgugaggcuccccucaacaacuucucuguggcgcagugccagcugaugaagacggagcggccccggcccaacaccuucaucauccgcugccugcaguggaccacugucaucgaacgcaccuuccauguggagacuccugaggagcgggaggaguggacaaccgccauccagacuguggcugacggccucaagaagcaggaggaggaggagauggacuuccggucgggcucacccagugacaacucaggggcugaagagauggaggugucccuggccaagcccaagcaccgcgugaccaugaacgaguuugaguaccugaagcugcugggcaagggcacuuucggcaaggugauccuggugaaggagaaggccacaggccgcuacuacgccaugaagauccucaagaaggaagucaucguggccaaggacgagguggcccacacacucaccgagaaccgcguccugcagaacuccaggcaccccuuccucacagcccugaaguacucuuuccagacccacgaccgccucugcuuugucauggaguacgccaacgggggcgagcuguucuuccaccugucccgggagcguguguucuccgaggaccgggcccgcuucuauggcgcugagauugugucagcccuggacuaccugcacucggagaagaacgugguguaccgggaccucaagcuggagaaccucaugcuggacaaggacgggcacauuaagaucacagacuucgggcugugcaaggaggggaucaaggacggugccaccaugaagaccuuuugcggcacaccugaguaccuggcccccgaggugcuggaggacaaugacuacggccgugcaguggacuggugggggcugggcguggucauguacgagaugaugugcggucgccugcccuucuacaaccaggaccaugagaagcuuuuugagcucauccucauggaggagauccgcuucccgcgcacgcuuggucccgaggccaaguccuugcuuucagggcugcucaagaaggaccccaagcagaggcuuggcgggggcuccgaggacgccaaggagaucaugcagcaucgcuucuuugccgguaucguguggcagcacguguacgagaagaagcucagcccacccuucaagccccaggucacgucggagacugacaccagguauuuugaugaggaguucacggcccagaugaucaccaucacaccaccugaccaagaugacagcauggaguguguggacagcgagcgcaggccccacuucccccaguucuccuacucggccagcggcacggccugaggcggcgguggacugcgcuggacgauagcuuggagggauggagaggcggccucgugccaugaucuguauuuaaugguuuuuauuucucgggugcauuugagagaagccacgcuguccucucgagcccagauggaaagacguuuuugugcugugggcagcacccucccccgcagcgggguagggaagaaaacuauccugcggguuuuaauuuauuucauccaguuuguucuccggguguggccucagcccucagaacaauccgauucacguagggaaauguuaaggacuucugcagcuaugcgcaauguggcauuggggggccgggcagguccugcccauguguccccucacucugucagccagccgcccugggcugucugucaccagcuaucugucaucucucuggggcccugggccucaguucaaccugguggcaccagaugcaaccucacuaugguaugcuggccagcacccucuccuggggguggcaggcacacagcagccccccagcacuaaggccgugucucugaggacgucaucggaggcugggccccugggaugggaccagggaugggggaugggccaggguuuacccagugggacagaggagcaagguuuaaauuuguuauuguguauuauguuguucaaaugcauuuuggggguuuuuaaucuuugugacaggaaagcccucccccuuccccuucugugucacaguucuuggugacugucccaccgggagccucccccucagaugaucucuccacgguagcacuugaccuuuucgacgcuuaaccuuuccgcugucgccccaggcccucccugacucccuguggggguggccaucccugggccccuccacgccuccuggccagacgcugccgcugccgcugcaccacggcguuuuuuuacaacauucaacuuuaguauuuuuacuauuauaauauaauauggaaccuucccuccaaauucuucaauaaaaguugcuuuucaaaaaaaaaaaaaaaaaaaaaa

SEQ ID NO: 52946 - RNA, 2794 nt, Homo sapiens
cggcaggaccgagcgcggcaggcggcuggcccagcgcagccagcgcggcccgaaggacgggagcaggcggccgagcaccgagcgcugggcaccgggcaccgagcggcggcggcacgcgaggcccggccccgagcagcgcccccgcccgccgcggccuccagcccggccccgcccagcgccggcccgcggggaugcggagcggcgggcgccggaggccgcggcccggcuaggcccgcgcucgcgcccggacgcggcggcccgaggcuguggccaggccagcugggcucggggagcgccagccugagaggagcgcgugagcgucgcgggagccucgggcaccaugagcgacguggcuauugugaaggaggguuggcugcacaaacgaggggaguacaucaagaccuggcggccacgcuacuuccuccucaagaaugauggcaccuucauuggcuacaaggagcggccgcaggauguggaccaacgugaggcuccccucaacaacuucucuguggcgcagugccagcugaugaagacggagcggccccggcccaacaccuucaucauccgcugccugcaguggaccacugucaucgaacgcaccuuccauguggagacuccugaggagcgggaggaguggacaaccgccauccagacuguggcugacggccucaagaagcaggaggaggaggagauggacuuccggucgggcucacccagugacaacucaggggcugaagagauggaggugucccuggccaagcccaagcaccgcgugaccaugaacgaguuugaguaccugaagcugcugggcaagggcacuuucggcaaggugauccuggugaaggagaaggccacaggccgcuacuacgccaugaagauccucaagaaggaagucaucguggccaaggacgagguggcccacacacucaccgagaaccgcguccugcagaacuccaggcaccccuuccucacagcccugaaguacucuuuccagacccacgaccgccucugcuuugucauggaguacgccaacgggggcgagcuguucuuccaccugucccgggagcguguguucuccgaggaccgggcccgcuucuauggcgcugagauugugucagcccuggacuaccugcacucggagaagaacgugguguaccgggaccucaagcuggagaaccucaugcuggacaaggacgggcacauuaagaucacagacuucgggcugugcaaggaggggaucaaggacggugccaccaugaagaccuuuugcggcacaccugaguaccuggcccccgaggugcuggaggacaaugacuacggccgugcaguggacuggugggggcugggcguggucauguacgagaugaugugcggucgccugcccuucuacaaccaggaccaugagaagcuuuuugagcucauccucauggaggagauccgcuucccgcgcacgcuuggucccgaggccaaguccuugcuuucagggcugcucaagaaggaccccaagcagaggcuuggcgggggcuccgaggacgccaaggagaucaugcagcaucgcuucuuugccgguaucguguggcagcacguguacgagaagaagcucagcccacccuucaagccccaggucacgucggagacugacaccagguauuuugaugaggaguucacggcccagaugaucaccaucacaccaccugaccaagaugacagcauggaguguguggacagcgagcgcaggccccacuucccccaguucuccuacucggccagcggcacggccugaggcggcgguggacugcgcuggacgauagcuuggagggauggagaggcggccucgugccaugaucuguauuuaaugguuuuuauuucucgggugcauuugagagaagccacgcuguccucucgagcccagauggaaagacguuuuugugcugugggcagcacccucccccgcagcgggguagggaagaaaacuauccugcggguuuuaauuuauuucauccaguuuguucuccggguguggccucagcccucagaacaauccgauucacguagggaaauguuaaggacuucugcagcuaugcgcaauguggcauuggggggccgggcagguccugcccauguguccccucacucugucagccagccgcccugggcugucugucaccagcuaucugucaucucucuggggcccugggccucaguucaaccugguggcaccagaugcaaccucacuaugguaugcuggccagcacccucuccuggggguggcaggcacacagcagccccccagcacuaaggccgugucucugaggacgucaucggaggcugggccccugggaugggaccagggaugggggaugggccaggguuuacccagugggacagaggagcaagguuuaaauuuguuauuguguauuauguuguucaaaugcauuuuggggguuuuuaaucuuugugacaggaaagcccucccccuuccccuucugugucacaguucuuggugacugucccaccgggagccucccccucagaugaucucuccacgguagcacuugaccuuuucgacgcuuaaccuuuccgcugucgccccaggcccucccugacucccuguggggguggccaucccugggccccuccacgccuccuggccagacgcugccgcugccgcugcaccacggcguuuuuuuacaacauucaacuuuaguauuuuuacuauuauaauauaauauggaaccuucccuccaaauucuucaauaaaaguugcuuuucaaaaaaaaaaaaaaaaaaaaaa

SEQ ID NO: 52947 - RNA, 19 nt, Artificial Sequence
  Description of Artificial Sequence: Synthetic oligonucleotide
cggcaggaccgagcgcggc

SEQ ID NO: 52948 - RNA, 19 nt, Artificial Sequence
  Description of Artificial Sequence: Synthetic oligonucleotide
caggcggcuggcccagcgc

SEQ ID NO: 52949 - RNA, 19 nt, Artificial Sequence
  Description of Artificial Sequence: Synthetic oligonucleotide
cagccagcgcggcccgaag

SEQ ID NO: 52950 - RNA, 19 nt, Artificial Sequence
  Description of Artificial Sequence: Synthetic oligonucleotide
ggacgggagcaggcggccg

SEQ ID NO: 52951 - RNA, 19 nt, Artificial Sequence
  Description of Artificial Sequence: Synthetic oligonucleotide
gagcaccgagcgcugggca

SEQ ID NO: 52952 - RNA, 19 nt, Artificial Sequence
  Description of Artificial Sequence: Synthetic oligonucleotide
accgggcaccgagcggcgg

SEQ ID NO: 52953 - RNA, 19 nt, Artificial Sequence
  Description of Artificial Sequence: Synthetic oligonucleotide
gcggcacgcgaggcccggc

SEQ ID NO: 52954 - RNA, 19 nt, Artificial Sequence
  Description of Artificial Sequence: Synthetic oligonucleotide
ccccgagcagcgcccccgc

SEQ ID NO: 52955 - RNA, 19 nt, Artificial Sequence
  Description of Artificial Sequence: Synthetic oligonucleotide
cccgccgcggccuccagcc

SEQ ID NO: 52956 - RNA, 19 nt, Artificial Sequence
  Description of Artificial Sequence: Synthetic oligonucleotide
ccggccccgcccagcgccg

SEQ ID NO: 52957 - RNA, 19 nt, Artificial Sequence
  Description of Artificial Sequence: Synthetic oligonucleotide
ggcccgcggggaugcggag

SEQ ID NO: 52958 - RNA, 19 nt, Artificial Sequence
  Description of Artificial Sequence: Synthetic oligonucleotide
gcggcgggcgccggaggcc

SEQ ID NO: 52959 - RNA, 19 nt, Artificial Sequence
  Description of Artificial Sequence: Synthetic oligonucleotide
cgcggcccggcuaggcccg

SEQ ID NO: 52960 - RNA, 19 nt, Artificial Sequence
  Description of Artificial Sequence: Synthetic oligonucleotide
gcgcucgcgcccggacgcg

SEQ ID NO: 52961 - RNA, 19 nt, Artificial Sequence
  Description of Artificial Sequence: Synthetic oligonucleotide
ggcggcccgaggcuguggc

SEQ ID NO: 52962 - RNA, 19 nt, Artificial Sequence
  Description of Artificial Sequence: Synthetic oligonucleotide
ccaggccagcugggcucgg

SEQ ID NO: 52963 - RNA, 19 nt, Artificial Sequence
  Description of Artificial Sequence: Synthetic oligonucleotide
gggagcgccagccugagag

SEQ ID NO: 52964 - RNA, 19 nt, Artificial Sequence
  Description of Artificial Sequence: Synthetic oligonucleotide
ggagcgcgugagcgucgcg

SEQ ID NO: 52965 - RNA, 19 nt, Artificial Sequence
  Description of Artificial Sequence: Synthetic oligonucleotide
gggagccucgggcaccaug

SEQ ID NO: 52966 - RNA, 19 nt, Artificial Sequence
  Description of Artificial Sequence: Synthetic oligonucleotide
gagcgacguggcuauugug

SEQ ID NO: 52967 - RNA, 19 nt, Artificial Sequence
  Description of Artificial Sequence: Synthetic oligonucleotide
gaaggaggguuggcugcac

SEQ ID NO: 52968 - RNA, 19 nt, Artificial Sequence
  Description of Artificial Sequence: Synthetic oligonucleotide
caaacgaggggaguacauc

SEQ ID NO: 52969 - RNA, 19 nt, Artificial Sequence
  Description of Artificial Sequence: Synthetic oligonucleotide
caagaccuggcggccacgc

SEQ ID NO: 52970 - RNA, 19 nt, Artificial Sequence
  Description of Artificial Sequence: Synthetic oligonucleotide
cuacuuccuccucaagaau

SEQ ID NO: 52971 - RNA, 19 nt, Artificial Sequence
  Description of Artificial Sequence: Synthetic oligonucleotide
ugauggcaccuucauuggc

SEQ ID NO: 52972 - RNA, 19 nt, Artificial Sequence
  Description of Artificial Sequence: Synthetic oligonucleotide
cuacaaggagcggccgcag

SEQ ID NO: 52973 - RNA, 19 nt, Artificial Sequence
  Description of Artificial Sequence: Synthetic oligonucleotide
ggauguggaccaacgugag

SEQ ID NO: 52974 - RNA, 19 nt, Artificial Sequence
  Description of Artificial Sequence: Synthetic oligonucleotide
ggcuccccucaacaacuuc

SEQ ID NO: 52975 - RNA, 19 nt, Artificial Sequence
  Description of Artificial Sequence: Synthetic oligonucleotide
cucuguggcgcagugccag

SEQ ID NO: 52976 - RNA, 19 nt, Artificial Sequence
  Description of Artificial Sequence: Synthetic oligonucleotide
gcugaugaagacggagcgg

SEQ ID NO: 52977 - RNA, 19 nt, Artificial Sequence
  Description of Artificial Sequence: Synthetic oligonucleotide
gccccggcccaacaccuuc

SEQ ID NO: 52978 - RNA, 19 nt, Artificial Sequence
  Description of Artificial Sequence: Synthetic oligonucleotide
caucauccgcugccugcag

SEQ ID NO: 52979 - RNA, 19 nt, Artificial Sequence
  Description of Artificial Sequence: Synthetic oligonucleotide
guggaccacugucaucgaa

SEQ ID NO: 52980 - RNA, 19 nt, Artificial Sequence
  Description of Artificial Sequence: Synthetic oligonucleotide
acgcaccuuccauguggag

SEQ ID NO: 52981 - RNA, 19 nt, Artificial Sequence
  Description of Artificial Sequence: Synthetic oligonucleotide
gacuccugaggagcgggag

SEQ ID NO: 52982 - RNA, 19 nt, Artificial Sequence
  Description of Artificial Sequence: Synthetic oligonucleotide
ggaguggacaaccgccauc

SEQ ID NO: 52983 - RNA, 19 nt, Artificial Sequence
  Description of Artificial Sequence: Synthetic oligonucleotide
ccagacuguggcugacggc

SEQ ID NO: 52984 - RNA, 19 nt, Artificial Sequence
  Description of Artificial Sequence: Synthetic oligonucleotide
ccucaagaagcaggaggag

SEQ ID NO: 52985 - RNA, 19 nt, Artificial Sequence
  Description of Artificial Sequence: Synthetic oligonucleotide
ggaggagauggacuuccgg

SEQ ID NO: 52986 - RNA, 19 nt, Artificial Sequence
  Description of Artificial Sequence: Synthetic oligonucleotide
gucgggcucacccagugac

SEQ ID NO: 52987 - RNA, 19 nt, Artificial Sequence
  Description of Artificial Sequence: Synthetic oligonucleotide
caacucaggggcugaagag

SEQ ID NO: 52988 - RNA, 19 nt, Artificial Sequence
  Description of Artificial Sequence: Synthetic oligonucleotide
gauggaggugucccuggcc

SEQ ID NO: 52989 - RNA, 19 nt, Artificial Sequence
  Description of Artificial Sequence: Synthetic oligonucleotide
caagcccaagcaccgcgug

SEQ ID NO: 52990 - RNA, 19 nt, Artificial Sequence
  Description of Artificial Sequence: Synthetic oligonucleotide
gaccaugaacgaguuugag

SEQ ID NO: 52991 - RNA, 19 nt, Artificial Sequence
  Description of Artificial Sequence: Synthetic oligonucleotide
guaccugaagcugcugggc

SEQ ID NO: 52992 - RNA, 19 nt, Artificial Sequence
  Description of Artificial Sequence: Synthetic oligonucleotide
caagggcacuuucggcaag

SEQ ID NO: 52993 - RNA, 19 nt, Artificial Sequence
  Description of Artificial Sequence: Synthetic oligonucleotide
ggugauccuggugaaggag

SEQ ID NO: 52994 - RNA, 19 nt, Artificial Sequence
  Description of Artificial Sequence: Synthetic oligonucleotide
gaaggccacaggccgcuac

SEQ ID NO: 52995 - RNA, 19 nt, Artificial Sequence
  Description of Artificial Sequence: Synthetic oligonucleotide
cuacgccaugaagauccuc

SEQ ID NO: 52996 - RNA, 19 nt, Artificial Sequence
  Description of Artificial Sequence: Synthetic oligonucleotide
caagaaggaagucaucgug

SEQ ID NO: 52997 - RNA, 19 nt, Artificial Sequence
  Description of Artificial Sequence: Synthetic oligonucleotide
ggccaaggacgagguggcc

SEQ ID NO: 52998 - RNA, 19 nt, Artificial Sequence
  Description of Artificial Sequence: Synthetic oligonucleotide
ccacacacucaccgagaac

SEQ ID NO: 52999 - RNA, 19 nt, Artificial Sequence
  Description of Artificial Sequence: Synthetic oligonucleotide
ccgcguccugcagaacucc

SEQ ID NO: 53000 - RNA, 19 nt, Artificial Sequence
  Description of Artificial Sequence: Synthetic oligonucleotide
caggcaccccuuccucaca

SEQ ID NO: 53001 - RNA, 19 nt, Artificial Sequence
  Description of Artificial Sequence: Synthetic oligonucleotide
agcccugaaguacucuuuc

SEQ ID NO: 53002 - RNA, 19 nt, Artificial Sequence
  Description of Artificial Sequence: Synthetic oligonucleotide
ccagacccacgaccgccuc

SEQ ID NO: 53003 - RNA, 19 nt, Artificial Sequence
  Description of Artificial Sequence: Synthetic oligonucleotide
cugcuuugucauggaguac

SEQ ID NO: 53004 - RNA, 19 nt, Artificial Sequence
  Description of Artificial Sequence: Synthetic oligonucleotide
cgccaacgggggcgagcug

SEQ ID NO: 53005 - RNA, 19 nt, Artificial Sequence
  Description of Artificial Sequence: Synthetic oligonucleotide
guucuuccaccugucccgg

SEQ ID NO: 53006 - RNA, 19 nt, Artificial Sequence
  Description of Artificial Sequence: Synthetic oligonucleotide
ggagcguguguucuccgag

SEQ ID NO: 53007 - RNA, 19 nt, Artificial Sequence
  Description of Artificial Sequence: Synthetic oligonucleotide
ggaccgggcccgcuucuau

SEQ ID NO: 53008 - RNA, 19 nt, Artificial Sequence
  Description of Artificial Sequence: Synthetic oligonucleotide
uggcgcugagauuguguca

SEQ ID NO: 53009 - RNA, 19 nt, Artificial Sequence
  Description of Artificial Sequence: Synthetic oligonucleotide
agcccuggacuaccugcac

SEQ ID NO: 53010 - RNA, 19 nt, Artificial Sequence
  Description of Artificial Sequence: Synthetic oligonucleotide
cucggagaagaacguggug

SEQ ID NO: 53011 - RNA, 19 nt, Artificial Sequence
  Description of Artificial Sequence: Synthetic oligonucleotide
guaccgggaccucaagcug

SEQ ID NO: 53012 - RNA, 19 nt, Artificial Sequence
  Description of Artificial Sequence: Synthetic oligonucleotide
ggagaaccucaugcuggac

SEQ ID NO: 53013 - RNA, 19 nt, Artificial Sequence
  Description of Artificial Sequence: Synthetic oligonucleotide
caaggacgggcacauuaag

SEQ ID NO: 53014 - RNA, 19 nt, Artificial Sequence
  Description of Artificial Sequence: Synthetic oligonucleotide
gaucacagacuucgggcug

SEQ ID NO: 53015 - RNA, 19 nt, Artificial Sequence
  Description of Artificial Sequence: Synthetic oligonucleotide
gugcaaggaggggaucaag

SEQ ID NO: 53016 - RNA, 19 nt, Artificial Sequence
  Description of Artificial Sequence: Synthetic oligonucleotide
ggacggugccaccaugaag

SEQ ID NO: 53017 - RNA, 19 nt, Artificial Sequence
  Description of Artificial Sequence: Synthetic oligonucleotide
gaccuuuugcggcacaccu

SEQ ID NO: 53018 - RNA, 19 nt, Artificial Sequence
  Description of Artificial Sequence: Synthetic oligonucleotide
ugaguaccuggcccccgag

SEQ ID NO: 53019 - RNA, 19 nt, Artificial Sequence
  Description of Artificial Sequence: Synthetic oligonucleotide
ggugcuggaggacaaugac

SEQ ID NO: 53020 - RNA, 19 nt, Artificial Sequence
  Description of Artificial Sequence: Synthetic oligonucleotide
cuacggccgugcaguggac

SEQ ID NO: 53021 - RNA, 19 nt, Artificial Sequence
  Description of Artificial Sequence: Synthetic oligonucleotide
cuggugggggcugggcgug

SEQ ID NO: 53022 - RNA, 19 nt, Artificial Sequence
  Description of Artificial Sequence: Synthetic oligonucleotide
ggucauguacgagaugaug

SEQ ID NO: 53023 - RNA, 19 nt, Artificial Sequence
  Description of Artificial Sequence: Synthetic oligonucleotide
gugcggucgccugcccuuc

SEQ ID NO: 53024 - RNA, 19 nt, Artificial Sequence
  Description of Artificial Sequence: Synthetic oligonucleotide
cuacaaccaggaccaugag

SEQ ID NO: 53025 - RNA, 19 nt, Artificial Sequence
  Description of Artificial Sequence: Synthetic oligonucleotide
gaagcuuuuugagcucauc

SEQ ID NO: 53026 - RNA, 19 nt, Artificial Sequence
  Description of Artificial Sequence: Synthetic oligonucleotide
ccucauggaggagauccgc

SEQ ID NO: 53027 - RNA, 19 nt, Artificial Sequence
  Description of Artificial Sequence: Synthetic oligonucleotide
cuucccgcgcacgcuuggu

SEQ ID NO: 53028 - RNA, 19 nt, Artificial Sequence
  Description of Artificial Sequence: Synthetic oligonucleotide
ucccgaggccaaguccuug

SEQ ID NO: 53029 - RNA, 19 nt, Artificial Sequence
  Description of Artificial Sequence: Synthetic oligonucleotide
gcuuucagggcugcucaag

SEQ ID NO: 53030 - RNA, 19 nt, Artificial Sequence
  Description of Artificial Sequence: Synthetic oligonucleotide
gaaggaccccaagcagagg

SEQ ID NO: 53031 - RNA, 19 nt, Artificial Sequence
  Description of Artificial Sequence: Synthetic oligonucleotide
gcuuggcgggggcuccgag

SEQ ID NO: 53032 - RNA, 19 nt, Artificial Sequence
  Description of Artificial Sequence: Synthetic oligonucleotide
ggacgccaaggagaucaug

SEQ ID NO: 53033 - RNA, 19 nt, Artificial Sequence
  Description of Artificial Sequence: Synthetic oligonucleotide
gcagcaucgcuucuuugcc

SEQ ID NO: 53034 - RNA, 19 nt, Artificial Sequence
  Description of Artificial Sequence: Synthetic oligonucleotide
cgguaucguguggcagcac

SEQ ID NO: 53035 - RNA, 19 nt, Artificial Sequence
  Description of Artificial Sequence: Synthetic oligonucleotide
cguguacgagaagaagcuc

SEQ ID NO: 53036 - RNA, 19 nt, Artificial Sequence
  Description of Artificial Sequence: Synthetic oligonucleotide
cagcccacccuucaagccc

SEQ ID NO: 53037 - RNA, 19 nt, Artificial Sequence
  Description of Artificial Sequence: Synthetic oligonucleotide
ccaggucacgucggagacu

SEQ ID NO: 53038 - RNA, 19 nt, Artificial Sequence
  Description of Artificial Sequence: Synthetic oligonucleotide
ugacaccagguauuuugau

SEQ ID NO: 53039 - RNA, 19 nt, Artificial Sequence
  Description of Artificial Sequence: Synthetic oligonucleotide
ugaggaguucacggcccag

SEQ ID NO: 53040 - RNA, 19 nt, Artificial Sequence
  Description of Artificial Sequence: Synthetic oligonucleotide
gaugaucaccaucacacca

SEQ ID NO: 53041 - RNA, 19 nt, Artificial Sequence
  Description of Artificial Sequence: Synthetic oligonucleotide
accugaccaagaugacagc

SEQ ID NO: 53042 - RNA, 19 nt, Artificial Sequence
  Description of Artificial Sequence: Synthetic oligonucleotide
cauggaguguguggacagc

SEQ ID NO: 53043 - RNA, 19 nt, Artificial Sequence
  Description of Artificial Sequence: Synthetic oligonucleotide
cgagcgcaggccccacuuc

SEQ ID NO: 53044 - RNA, 19 nt, Artificial Sequence
  Description of Artificial Sequence: Synthetic oligonucleotide
cccccaguucuccuacucg

SEQ ID NO: 53045 - RNA, 19 nt, Artificial Sequence
  Description of Artificial Sequence: Synthetic oligonucleotide
ggccagcggcacggccuga

SEQ ID NO: 53046 - RNA, 19 nt, Artificial Sequence
  Description of Artificial Sequence: Synthetic oligonucleotide
aggcggcgguggacugcgc

SEQ ID NO: 53047 - RNA, 19 nt, Artificial Sequence
  Description of Artificial Sequence: Synthetic oligonucleotide
cuggacgauagcuuggagg

SEQ ID NO: 53048 - RNA, 19 nt, Artificial Sequence
  Description of Artificial Sequence: Synthetic oligonucleotide
ggauggagaggcggccucg

SEQ ID NO: 53049 - RNA, 19 nt, Artificial Sequence
  Description of Artificial Sequence: Synthetic oligonucleotide
gugccaugaucuguauuua

SEQ ID NO: 53050 - RNA, 19 nt, Artificial Sequence
  Description of Artificial Sequence: Synthetic oligonucleotide
aaugguuuuuauuucucgg

SEQ ID NO: 53051 - RNA, 19 nt, Artificial Sequence
  Description of Artificial Sequence: Synthetic oligonucleotide
ggugcauuugagagaagcc

SEQ ID NO: 53052 - RNA, 19 nt, Artificial Sequence
  Description of Artificial Sequence: Synthetic oligonucleotide
cacgcuguccucucgagcc

SEQ ID NO: 53053 - RNA, 19 nt, Artificial Sequence
  Description of Artificial Sequence: Synthetic oligonucleotide
ccagauggaaagacguuuu

SEQ ID NO: 53054 - RNA, 19 nt, Artificial Sequence
  Description of Artificial Sequence: Synthetic oligonucleotide
uugugcugugggcagcacc

SEQ ID NO: 53055 - RNA, 19 nt, Artificial Sequence
  Description of Artificial Sequence: Synthetic oligonucleotide
ccucccccgcagcggggua

SEQ ID NO: 53056 - RNA, 19 nt, Artificial Sequence
  Description of Artificial Sequence: Synthetic oligonucleotide
agggaagaaaacuauccug

SEQ ID NO: 53057 - RNA, 19 nt, Artificial Sequence
  Description of Artificial Sequence: Synthetic oligonucleotide
gcggguuuuaauuuauuuc

SEQ ID NO: 53058 - RNA, 19 nt, Artificial Sequence
  Description of Artificial Sequence: Synthetic oligonucleotide
cauccaguuuguucuccgg

SEQ ID NO: 53059 - RNA, 19 nt, Artificial Sequence
  Description of Artificial Sequence: Synthetic oligonucleotide
gguguggccucagcccuca

SEQ ID NO: 53060 - RNA, 19 nt, Artificial Sequence
  Description of Artificial Sequence: Synthetic oligonucleotide
agaacaauccgauucacgu

SEQ ID NO: 53061 - RNA, 19 nt, Artificial Sequence
  Description of Artificial Sequence: Synthetic oligonucleotide
uagggaaauguuaaggacu

SEQ ID NO: 53062 - RNA, 19 nt, Artificial Sequence
  Description of Artificial Sequence: Synthetic oligonucleotide
uucugcagcuaugcgcaau

SEQ ID NO: 53063 - RNA, 19 nt, Artificial Sequence
  Description of Artificial Sequence: Synthetic oligonucleotide
uguggcauuggggggccgg

SEQ ID NO: 53064 - RNA, 19 nt, Artificial Sequence
  Description of Artificial Sequence: Synthetic oligonucleotide
ggcagguccugcccaugug

SEQ ID NO: 53065 - RNA, 19 nt, Artificial Sequence
  Description of Artificial Sequence: Synthetic oligonucleotide
guccccucacucugucagc

SEQ ID NO: 53066 - RNA, 19 nt, Artificial Sequence
  Description of Artificial Sequence: Synthetic oligonucleotide
ccagccgcccugggcuguc

SEQ ID NO: 53067 - RNA, 19 nt, Artificial Sequence
  Description of Artificial Sequence: Synthetic oligonucleotide
cugucaccagcuaucuguc

SEQ ID NO: 53068 - RNA, 19 nt, Artificial Sequence
  Description of Artificial Sequence: Synthetic oligonucleotide
caucucucuggggcccugg

SEQ ID NO: 53069 - RNA, 19 nt, Artificial Sequence
  Description of Artificial Sequence: Synthetic oligonucleotide
ggccucaguucaaccuggu

SEQ ID NO: 53070 - RNA, 19 nt, Artificial Sequence
  Description of Artificial Sequence: Synthetic oligonucleotide
uggcaccagaugcaaccuc

SEQ ID NO: 53071 - RNA, 19 nt, Artificial Sequence
  Description of Artificial Sequence: Synthetic oligonucleotide
cacuaugguaugcuggcca

SEQ ID NO: 53072 - RNA, 19 nt, Artificial Sequence
  Description of Artificial Sequence: Synthetic oligonucleotide
agcacccucuccugggggu

SEQ ID NO: 53073 - RNA, 19 nt, Artificial Sequence
  Description of Artificial Sequence: Synthetic oligonucleotide
uggcaggcacacagcagcc

SEQ ID NO: 53074 - RNA, 19 nt, Artificial Sequence
  Description of Artificial Sequence: Synthetic oligonucleotide
cccccagcacuaaggccgu

SEQ ID NO: 53075 - RNA, 19 nt, Artificial Sequence
  Description of Artificial Sequence: Synthetic oligonucleotide
ugucucugaggacgucauc

SEQ ID NO: 53076 - RNA, 19 nt, Artificial Sequence
  Description of Artificial Sequence: Synthetic oligonucleotide
cggaggcugggccccuggg

SEQ ID NO: 53077 - RNA, 19 nt, Artificial Sequence
  Description of Artificial Sequence: Synthetic oligonucleotide
gaugggaccagggaugggg

SEQ ID NO: 53078 - RNA, 19 nt, Artificial Sequence
  Description of Artificial Sequence: Synthetic oligonucleotide
ggaugggccaggguuuacc

SEQ ID NO: 53079 - RNA, 19 nt, Artificial Sequence
  Description of Artificial Sequence: Synthetic oligonucleotide
ccagugggacagaggagca

SEQ ID NO: 53080 - RNA, 19 nt, Artificial Sequence
  Description of Artificial Sequence: Synthetic oligonucleotide
aagguuuaaauuuguuauu

SEQ ID NO: 53081 - RNA, 19 nt, Artificial Sequence
  Description of Artificial Sequence: Synthetic oligonucleotide
uguguauuauguuguucaa

SEQ ID NO: 53082 - RNA, 19 nt, Artificial Sequence
  Description of Artificial Sequence: Synthetic oligonucleotide
aaugcauuuuggggguuuu

SEQ ID NO: 53083 - RNA, 19 nt, Artificial Sequence
  Description of Artificial Sequence: Synthetic oligonucleotide
uuaaucuuugugacaggaa

SEQ ID NO: 53084 - RNA, 19 nt, Artificial Sequence
  Description of Artificial Sequence: Synthetic oligonucleotide
aagcccucccccuuccccu

SEQ ID NO: 53085 - RNA, 19 nt, Artificial Sequence
  Description of Artificial Sequence: Synthetic oligonucleotide
uucugugucacaguucuug

SEQ ID NO: 53086 - RNA, 19 nt, Artificial Sequence
  Description of Artificial Sequence: Synthetic oligonucleotide
ggugacugucccaccggga

SEQ ID NO: 53087 - RNA, 19 nt, Artificial Sequence
  Description of Artificial Sequence: Synthetic oligonucleotide
agccucccccucagaugau

SEQ ID NO: 53088 - RNA, 19 nt, Artificial Sequence
  Description of Artificial Sequence: Synthetic oligonucleotide
ucucuccacgguagcacuu

SEQ ID NO: 53089 - RNA, 19 nt, Artificial Sequence
  Description of Artificial Sequence: Synthetic oligonucleotide
ugaccuuuucgacgcuuaa

SEQ ID NO: 53090 - RNA, 19 nt, Artificial Sequence
  Description of Artificial Sequence: Synthetic oligonucleotide
accuuuccgcugucgcccc

SEQ ID NO: 53091 - RNA, 19 nt, Artificial Sequence
  Description of Artificial Sequence: Synthetic oligonucleotide
caggcccucccugacuccc

SEQ ID NO: 53092 - RNA, 19 nt, Artificial Sequence
  Description of Artificial Sequence: Synthetic oligonucleotide
cuguggggguggccauccc

SEQ ID NO: 53093 - RNA, 19 nt, Artificial Sequence
  Description of Artificial Sequence: Synthetic oligonucleotide
cugggccccuccacgccuc

SEQ ID NO: 53094 - RNA, 19 nt, Artificial Sequence
  Description of Artificial Sequence: Synthetic oligonucleotide
ccuggccagacgcugccgc

SEQ ID NO: 53095 - RNA, 19 nt, Artificial Sequence
  Description of Artificial Sequence: Synthetic oligonucleotide
cugccgcugcaccacggcg

SEQ ID NO: 53096 - RNA, 19 nt, Artificial Sequence
  Description of Artificial Sequence: Synthetic oligonucleotide
guuuuuuuacaacauucaa

SEQ ID NO: 53097 - RNA, 19 nt, Artificial Sequence
  Description of Artificial Sequence: Synthetic oligonucleotide
acuuuaguauuuuuacuau

SEQ ID NO: 53098 - RNA, 19 nt, Artificial Sequence
  Description of Artificial Sequence: Synthetic oligonucleotide
uuauaauauaauauggaac

SEQ ID NO: 53099 - RNA, 19 nt, Artificial Sequence
  Description of Artificial Sequence: Synthetic oligonucleotide
ccuucccuccaaauucuuc

SEQ ID NO: 53100 - RNA, 19 nt, Artificial Sequence
  Description of Artificial Sequence: Synthetic oligonucleotide
caauaaaaguugcuuuuca

SEQ ID NO: 53101 - RNA, 19 nt, Artificial Sequence
  Description of Artificial Sequence: Synthetic oligonucleotide
ggcggcccggggcuuaggg

SEQ ID NO: 53102 - RNA, 19 nt, Artificial Sequence
  Description of Artificial Sequence: Synthetic oligonucleotide
gaaggccgagccagccugg

SEQ ID NO: 53103 - RNA, 19 nt, Artificial Sequence
  Description of Artificial Sequence: Synthetic oligonucleotide
ggucaaagaagucaaaggg

SEQ ID NO: 53104 - RNA, 19 nt, Artificial Sequence
  Description of Artificial Sequence: Synthetic oligonucleotide
ggcugccuggaggaggcag

SEQ ID NO: 53105 - RNA, 19 nt, Artificial Sequence
  Description of Artificial Sequence: Synthetic oligonucleotide
gccugucagcuggugcauc

SEQ ID NO: 53106 - RNA, 19 nt, Artificial Sequence
  Description of Artificial Sequence: Synthetic oligonucleotide
cagaggcuguggccaggcc

SEQ ID NO: 53107 - RNA, 19 nt, Artificial Sequence
  Description of Artificial Sequence: Synthetic oligonucleotide
cagcugggcucggggagcg

SEQ ID NO: 53108 - RNA, 19 nt, Artificial Sequence
  Description of Artificial Sequence: Synthetic oligonucleotide
gccagccugagaggagcgc

SEQ ID NO: 53109 - RNA, 19 nt, Artificial Sequence
  Description of Artificial Sequence: Synthetic oligonucleotide
cgugagcgucgcgggagcc

SEQ ID NO: 53110 - RNA, 19 nt, Artificial Sequence
  Description of Artificial Sequence: Synthetic oligonucleotide
cucgggcaccaugagcgac

SEQ ID NO: 53111 - RNA, 19 nt, Artificial Sequence
  Description of Artificial Sequence: Synthetic oligonucleotide
cguggcuauugugaaggag

SEQ ID NO: 53112 - RNA, 19 nt, Artificial Sequence
  Description of Artificial Sequence: Synthetic oligonucleotide
ggguuggcugcacaaacga

SEQ ID NO: 53113 - RNA, 19 nt, Artificial Sequence
  Description of Artificial Sequence: Synthetic oligonucleotide
aggggaguacaucaagacc

SEQ ID NO: 53114 - RNA, 19 nt, Artificial Sequence
  Description of Artificial Sequence: Synthetic oligonucleotide
cuggcggccacgcuacuuc

SEQ ID NO: 53115 - RNA, 19 nt, Artificial Sequence
  Description of Artificial Sequence: Synthetic oligonucleotide
ccuccucaagaaugauggc

SEQ ID NO: 53116 - RNA, 19 nt, Artificial Sequence
  Description of Artificial Sequence: Synthetic oligonucleotide
caccuucauuggcuacaag

SEQ ID NO: 53117 - RNA, 19 nt, Artificial Sequence
  Description of Artificial Sequence: Synthetic oligonucleotide
ggagcggccgcaggaugug

SEQ ID NO: 53118 - RNA, 19 nt, Artificial Sequence
  Description of Artificial Sequence: Synthetic oligonucleotide
ggaccaacgugaggcuccc

SEQ ID NO: 53119 - RNA, 19 nt, Artificial Sequence
  Description of Artificial Sequence: Synthetic oligonucleotide
ccucaacaacuucucugug

SEQ ID NO: 53120 - RNA, 19 nt, Artificial Sequence
  Description of Artificial Sequence: Synthetic oligonucleotide
ggcgcagugccagcugaug

SEQ ID NO: 53121 - RNA, 19 nt, Artificial Sequence
  Description of Artificial Sequence: Synthetic oligonucleotide
gaagacggagcggccccgg

SEQ ID NO: 53122 - RNA, 19 nt, Artificial Sequence
  Description of Artificial Sequence: Synthetic oligonucleotide
gcccaacaccuucaucauc

SEQ ID NO: 53123 - RNA, 19 nt, Artificial Sequence
  Description of Artificial Sequence: Synthetic oligonucleotide
ccgcugccugcaguggacc

SEQ ID NO: 53124 - RNA, 19 nt, Artificial Sequence
  Description of Artificial Sequence: Synthetic oligonucleotide
cacugucaucgaacgcacc

SEQ ID NO: 53125 - RNA, 19 nt, Artificial Sequence
  Description of Artificial Sequence: Synthetic oligonucleotide
cuuccauguggagacuccu

SEQ ID NO: 53126 - RNA, 19 nt, Artificial Sequence
  Description of Artificial Sequence: Synthetic oligonucleotide
ugaggagcgggaggagugg

SEQ ID NO: 53127 - RNA, 19 nt, Artificial Sequence
  Description of Artificial Sequence: Synthetic oligonucleotide
gacaaccgccauccagacu

SEQ ID NO: 53128 - RNA, 19 nt, Artificial Sequence
  Description of Artificial Sequence: Synthetic oligonucleotide
uguggcugacggccucaag

SEQ ID NO: 53129 - RNA, 19 nt, Artificial Sequence
  Description of Artificial Sequence: Synthetic oligonucleotide
gaagcaggaggaggaggag

SEQ ID NO: 53130 - RNA, 19 nt, Artificial Sequence
  Description of Artificial Sequence: Synthetic oligonucleotide
gauggacuuccggucgggc

SEQ ID NO: 53131 - RNA, 19 nt, Artificial Sequence
  Description of Artificial Sequence: Synthetic oligonucleotide
cucacccagugacaacuca

SEQ ID NO: 53132 - RNA, 19 nt, Artificial Sequence
  Description of Artificial Sequence: Synthetic oligonucleotide
aggggcugaagagauggag

SEQ ID NO: 53133 - RNA, 19 nt, Artificial Sequence
  Description of Artificial Sequence: Synthetic oligonucleotide
ggugucccuggccaagccc

SEQ ID NO: 53134 - RNA, 19 nt, Artificial Sequence
  Description of Artificial Sequence: Synthetic oligonucleotide
caagcaccgcgugaccaug

SEQ ID NO: 53135 - RNA, 19 nt, Artificial Sequence
  Description of Artificial Sequence: Synthetic oligonucleotide
gaacgaguuugaguaccug

SEQ ID NO: 53136 - RNA, 19 nt, Artificial Sequence
  Description of Artificial Sequence: Synthetic oligonucleotide
gaagcugcugggcaagggc

SEQ ID NO: 53137 - RNA, 19 nt, Artificial Sequence
  Description of Artificial Sequence: Synthetic oligonucleotide
cacuuucggcaaggugauc

SEQ ID NO: 53138 - RNA, 19 nt, Artificial Sequence
  Description of Artificial Sequence: Synthetic oligonucleotide
ccuggugaaggagaaggcc

SEQ ID NO: 53139 - RNA, 19 nt, Artificial Sequence
  Description of Artificial Sequence: Synthetic oligonucleotide
cacaggccgcuacuacgcc

SEQ ID NO: 53140 - RNA, 19 nt, Artificial Sequence
  Description of Artificial Sequence: Synthetic oligonucleotide
caugaagauccucaagaag

SEQ ID NO: 53141 - RNA, 19 nt, Artificial Sequence
  Description of Artificial Sequence: Synthetic oligonucleotide
ggaagucaucguggccaag

SEQ ID NO: 53142 - RNA, 19 nt, Artificial Sequence
  Description of Artificial Sequence: Synthetic oligonucleotide
ggacgagguggcccacaca

SEQ ID NO: 53143 - RNA, 19 nt, Artificial Sequence
  Description of Artificial Sequence: Synthetic oligonucleotide
acucaccgagaaccgcguc

SEQ ID NO: 53144 - RNA, 19 nt, Artificial Sequence
  Description of Artificial Sequence: Synthetic oligonucleotide
ccugcagaacuccaggcac

SEQ ID NO: 53145 - RNA, 19 nt, Artificial Sequence
  Description of Artificial Sequence: Synthetic oligonucleotide
ccccuuccucacagcccug

SEQ ID NO: 53146 - RNA, 19 nt, Artificial Sequence
  Description of Artificial Sequence: Synthetic oligonucleotide
gaaguacucuuuccagacc

SEQ ID NO: 53147 - RNA, 19 nt, Artificial Sequence
  Description of Artificial Sequence: Synthetic oligonucleotide
ccacgaccgccucugcuuu

SEQ ID NO: 53148 - RNA, 19 nt, Artificial Sequence
  Description of Artificial Sequence: Synthetic oligonucleotide
ugucauggaguacgccaac

SEQ ID NO: 53149 - RNA, 19 nt, Artificial Sequence
  Description of Artificial Sequence: Synthetic oligonucleotide
cgggggcgagcuguucuuc

SEQ ID NO: 53150 - RNA, 19 nt, Artificial Sequence
  Description of Artificial Sequence: Synthetic oligonucleotide
ccaccugucccgggagcgu

SEQ ID NO: 53151 - RNA, 19 nt, Artificial Sequence
  Description of Artificial Sequence: Synthetic oligonucleotide
uguguucuccgaggaccgg

SEQ ID NO: 53152 - RNA, 19 nt, Artificial Sequence
  Description of Artificial Sequence: Synthetic oligonucleotide
ggcccgcuucuauggcgcu

SEQ ID NO: 53153 - RNA, 19 nt, Artificial Sequence
  Description of Artificial Sequence: Synthetic oligonucleotide
ugagauugugucagcccug

SEQ ID NO: 53154 - RNA, 19 nt, Artificial Sequence
  Description of Artificial Sequence: Synthetic oligonucleotide
ggacuaccugcacucggag

SEQ ID NO: 53155 - RNA, 19 nt, Artificial Sequence
  Description of Artificial Sequence: Synthetic oligonucleotide
gaagaacgugguguaccgg

SEQ ID NO: 53156 - RNA, 19 nt, Artificial Sequence
  Description of Artificial Sequence: Synthetic oligonucleotide
ggaccucaagcuggagaac

SEQ ID NO: 53157 - RNA, 19 nt, Artificial Sequence
  Description of Artificial Sequence: Synthetic oligonucleotide
ccucaugcuggacaaggac

SEQ ID NO: 53158 - RNA, 19 nt, Artificial Sequence
  Description of Artificial Sequence: Synthetic oligonucleotide
cgggcacauuaagaucaca

SEQ ID NO: 53159 - RNA, 19 nt, Artificial Sequence
  Description of Artificial Sequence: Synthetic oligonucleotide
agacuucgggcugugcaag

SEQ ID NO: 53160 - RNA, 19 nt, Artificial Sequence
  Description of Artificial Sequence: Synthetic oligonucleotide
ggaggggaucaaggacggu

SEQ ID NO: 53161 - RNA, 19 nt, Artificial Sequence
  Description of Artificial Sequence: Synthetic oligonucleotide
ugccaccaugaagaccuuu

SEQ ID NO: 53162 - RNA, 19 nt, Artificial Sequence
  Description of Artificial Sequence: Synthetic oligonucleotide
uugcggcacaccugaguac

SEQ ID NO: 53163 - RNA, 19 nt, Artificial Sequence
  Description of Artificial Sequence: Synthetic oligonucleotide
ccuggcccccgaggugcug

SEQ ID NO: 53164 - RNA, 19 nt, Artificial Sequence
  Description of Artificial Sequence: Synthetic oligonucleotide
ggaggacaaugacuacggc

SEQ ID NO: 53165 - RNA, 19 nt, Artificial Sequence
  Description of Artificial Sequence: Synthetic oligonucleotide
ccgugcaguggacuggugg

SEQ ID NO: 53166 - RNA, 19 nt, Artificial Sequence
  Description of Artificial Sequence: Synthetic oligonucleotide
ggggcugggcguggucaug

SEQ ID NO: 53167 - RNA, 19 nt, Artificial Sequence
  Description of Artificial Sequence: Synthetic oligonucleotide
guacgagaugaugugcggu

SEQ ID NO: 53168 - RNA, 19 nt, Artificial Sequence
  Description of Artificial Sequence: Synthetic oligonucleotide
ucgccugcccuucuacaac

SEQ ID NO: 53169 - RNA, 19 nt, Artificial Sequence
  Description of Artificial Sequence: Synthetic oligonucleotide
ccaggaccaugagaagcuu

SEQ ID NO: 53170 - RNA, 19 nt, Artificial Sequence
  Description of Artificial Sequence: Synthetic oligonucleotide
uuuugagcucauccucaug

SEQ ID NO: 53171 - RNA, 19 nt, Artificial Sequence
  Description of Artificial Sequence: Synthetic oligonucleotide
ggaggagauccgcuucccg

SEQ ID NO: 53172 - RNA, 19 nt, Artificial Sequence
  Description of Artificial Sequence: Synthetic oligonucleotide
gcgcacgcuuggucccgag

SEQ ID NO: 53173 - RNA, 19 nt, Artificial Sequence
  Description of Artificial Sequence: Synthetic oligonucleotide
ggccaaguccuugcuuuca

SEQ ID NO: 53174 - RNA, 19 nt, Artificial Sequence
  Description of Artificial Sequence: Synthetic oligonucleotide
agggcugcucaagaaggac

SEQ ID NO: 53175 - RNA, 19 nt, Artificial Sequence
  Description of Artificial Sequence: Synthetic oligonucleotide
ccccaagcagaggcuuggc

SEQ ID NO: 53176 - RNA, 19 nt, Artificial Sequence
  Description of Artificial Sequence: Synthetic oligonucleotide
cgggggcuccgaggacgcc

SEQ ID NO: 53177 - RNA, 19 nt, Artificial Sequence
  Description of Artificial Sequence: Synthetic oligonucleotide
caaggagaucaugcagcau

SEQ ID NO: 53178 - RNA, 19 nt, Artificial Sequence
  Description of Artificial Sequence: Synthetic oligonucleotide
ucgcuucuuugccgguauc

SEQ ID NO: 53179 - RNA, 19 nt, Artificial Sequence
  Description of Artificial Sequence: Synthetic oligonucleotide
cguguggcagcacguguac

SEQ ID NO: 53180 - RNA, 19 nt, Artificial Sequence
  Description of Artificial Sequence: Synthetic oligonucleotide
cgagaagaagcucagccca

SEQ ID NO: 53181 - RNA, 19 nt, Artificial Sequence
  Description of Artificial Sequence: Synthetic oligonucleotide
acccuucaagccccagguc

SEQ ID NO: 53182 - RNA, 19 nt, Artificial Sequence
  Description of Artificial Sequence: Synthetic oligonucleotide
cacgucggagacugacacc

SEQ ID NO: 53183 - RNA, 19 nt, Artificial Sequence
  Description of Artificial Sequence: Synthetic oligonucleotide
cagguauuuugaugaggag

SEQ ID NO: 53184 - RNA, 19 nt, Artificial Sequence
  Description of Artificial Sequence: Synthetic oligonucleotide
guucacggcccagaugauc

SEQ ID NO: 53185 - RNA, 19 nt, Artificial Sequence
  Description of Artificial Sequence: Synthetic oligonucleotide
caccaucacaccaccugac

SEQ ID NO: 53186 - RNA, 19 nt, Artificial Sequence
  Description of Artificial Sequence: Synthetic oligonucleotide
ccaagaugacagcauggag

SEQ ID NO: 53187 - RNA, 19 nt, Artificial Sequence
  Description of Artificial Sequence: Synthetic oligonucleotide
guguguggacagcgagcgc

SEQ ID NO: 53188 - RNA, 19 nt, Artificial Sequence
  Description of Artificial Sequence: Synthetic oligonucleotide
caggccccacuucccccag

SEQ ID NO: 53189 - RNA, 19 nt, Artificial Sequence
  Description of Artificial Sequence: Synthetic oligonucleotide
guucuccuacucggccagc

SEQ ID NO: 53190 - RNA, 19 nt, Artificial Sequence
  Description of Artificial Sequence: Synthetic oligonucleotide
cggcacggccugaggcggc

SEQ ID NO: 53191 - RNA, 19 nt, Artificial Sequence
  Description of Artificial Sequence: Synthetic oligonucleotide
cgguggacugcgcuggacg

SEQ ID NO: 53192 - RNA, 19 nt, Artificial Sequence
  Description of Artificial Sequence: Synthetic oligonucleotide
gauagcuuggagggaugga

SEQ ID NO: 53193 - RNA, 19 nt, Artificial Sequence
  Description of Artificial Sequence: Synthetic oligonucleotide
agaggcggccucgugccau

SEQ ID NO: 53194 - RNA, 19 nt, Artificial Sequence
  Description of Artificial Sequence: Synthetic oligonucleotide
ugaucuguauuuaaugguu

SEQ ID NO: 53195 - RNA, 19 nt, Artificial Sequence
  Description of Artificial Sequence: Synthetic oligonucleotide
uuuuauuucucgggugcau

SEQ ID NO: 53196 - RNA, 19 nt, Artificial Sequence
  Description of Artificial Sequence: Synthetic oligonucleotide
uuugagagaagccacgcug

SEQ ID NO: 53197 - RNA, 19 nt, Artificial Sequence
  Description of Artificial Sequence: Synthetic oligonucleotide
guccucucgagcccagaug

SEQ ID NO: 53198 - RNA, 19 nt, Artificial Sequence
  Description of Artificial Sequence: Synthetic oligonucleotide
ggaaagacguuuuugugcu

SEQ ID NO: 53199 - RNA, 19 nt, Artificial Sequence
  Description of Artificial Sequence: Synthetic oligonucleotide
ugugggcagcacccucccc

SEQ ID NO: 53200 - RNA, 19 nt, Artificial Sequence
  Description of Artificial Sequence: Synthetic oligonucleotide
ccgcagcgggguagggaag

SEQ ID NO: 53201 - RNA, 19 nt, Artificial Sequence
  Description of Artificial Sequence: Synthetic oligonucleotide
gaaaacuauccugcggguu

SEQ ID NO: 53202 - RNA, 19 nt, Artificial Sequence
  Description of Artificial Sequence: Synthetic oligonucleotide
uuuaauuuauuucauccag

SEQ ID NO: 53203 - RNA, 19 nt, Artificial Sequence
  Description of Artificial Sequence: Synthetic oligonucleotide
guuuguucuccgggugugg

SEQ ID NO: 53204 - RNA, 19 nt, Artificial Sequence
  Description of Artificial Sequence: Synthetic oligonucleotide
gccucagcccucagaacaa

SEQ ID NO: 53205 - RNA, 19 nt, Artificial Sequence
  Description of Artificial Sequence: Synthetic oligonucleotide
auccgauucacguagggaa

SEQ ID NO: 53206 - RNA, 19 nt, Artificial Sequence
  Description of Artificial Sequence: Synthetic oligonucleotide
aauguuaaggacuucugca

SEQ ID NO: 53207 - RNA, 19 nt, Artificial Sequence
  Description of Artificial Sequence: Synthetic oligonucleotide
agcuaugcgcaauguggca

SEQ ID NO: 53208 - RNA, 19 nt, Artificial Sequence
  Description of Artificial Sequence: Synthetic oligonucleotide
auuggggggccgggcaggu

SEQ ID NO: 53209 - RNA, 19 nt, Artificial Sequence
  Description of Artificial Sequence: Synthetic oligonucleotide
uccugcccauguguccccu

SEQ ID NO: 53210 - RNA, 19 nt, Artificial Sequence
  Description of Artificial Sequence: Synthetic oligonucleotide
ucacucugucagccagccg

SEQ ID NO: 53211 - RNA, 19 nt, Artificial Sequence
  Description of Artificial Sequence: Synthetic oligonucleotide
gcccugggcugucugucac

SEQ ID NO: 53212 - RNA, 19 nt, Artificial Sequence
  Description of Artificial Sequence: Synthetic oligonucleotide
ccagcuaucugucaucucu

SEQ ID NO: 53213 - RNA, 19 nt, Artificial Sequence
  Description of Artificial Sequence: Synthetic oligonucleotide
ucuggggcccugggccuca

SEQ ID NO: 53214 - RNA, 19 nt, Artificial Sequence
  Description of Artificial Sequence: Synthetic oligonucleotide
aguucaaccugguggcacc

SEQ ID NO: 53215 - RNA, 19 nt, Artificial Sequence
  Description of Artificial Sequence: Synthetic oligonucleotide
cagaugcaaccucacuaug

SEQ ID NO: 53216 - RNA, 19 nt, Artificial Sequence
  Description of Artificial Sequence: Synthetic oligonucleotide
gguaugcuggccagcaccc

SEQ ID NO: 53217 - RNA, 19 nt, Artificial Sequence
  Description of Artificial Sequence: Synthetic oligonucleotide
cucuccuggggguggcagg

SEQ ID NO: 53218 - RNA, 19 nt, Artificial Sequence
  Description of Artificial Sequence: Synthetic oligonucleotide
gcacacagcagccccccag

SEQ ID NO: 53219 - RNA, 19 nt, Artificial Sequence
  Description of Artificial Sequence: Synthetic oligonucleotide
gcacuaaggccgugucucu

SEQ ID NO: 53220 - RNA, 19 nt, Artificial Sequence
  Description of Artificial Sequence: Synthetic oligonucleotide
ugaggacgucaucggaggc

SEQ ID NO: 53221 - RNA, 19 nt, Artificial Sequence
  Description of Artificial Sequence: Synthetic oligonucleotide
cugggccccugggauggga

SEQ ID NO: 53222 - RNA, 19 nt, Artificial Sequence
  Description of Artificial Sequence: Synthetic oligonucleotide
accagggaugggggauggg

SEQ ID NO: 53223 - RNA, 19 nt, Artificial Sequence
  Description of Artificial Sequence: Synthetic oligonucleotide
gccaggguuuacccagugg

SEQ ID NO: 53224 - RNA, 19 nt, Artificial Sequence
  Description of Artificial Sequence: Synthetic oligonucleotide
ggacagaggagcaagguuu

SEQ ID NO: 53225 - RNA, 19 nt, Artificial Sequence
  Description of Artificial Sequence: Synthetic oligonucleotide
uaaauuuguuauuguguau

SEQ ID NO: 53226 - RNA, 19 nt, Artificial Sequence
  Description of Artificial Sequence: Synthetic oligonucleotide
uuauguuguucaaaugcau

SEQ ID NO: 53227 - RNA, 19 nt, Artificial Sequence
  Description of Artificial Sequence: Synthetic oligonucleotide
uuuuggggguuuuuaaucu

SEQ ID NO: 53228 - RNA, 19 nt, Artificial Sequence
  Description of Artificial Sequence: Synthetic oligonucleotide
uuugugacaggaaagcccu

SEQ ID NO: 53229 - RNA, 19 nt, Artificial Sequence
  Description of Artificial Sequence: Synthetic oligonucleotide
ucccccuuccccuucugug

SEQ ID NO: 53230 - RNA, 19 nt, Artificial Sequence
  Description of Artificial Sequence: Synthetic oligonucleotide
gucacaguucuuggugacu

SEQ ID NO: 53231 - RNA, 19 nt, Artificial Sequence
  Description of Artificial Sequence: Synthetic oligonucleotide
ugucccaccgggagccucc

SEQ ID NO: 53232 - RNA, 19 nt, Artificial Sequence
  Description of Artificial Sequence: Synthetic oligonucleotide
ccccucagaugaucucucc

SEQ ID NO: 53233 - RNA, 19 nt, Artificial Sequence
  Description of Artificial Sequence: Synthetic oligonucleotide
cacgguagcacuugaccuu

SEQ ID NO: 53234 - RNA, 19 nt, Artificial Sequence
  Description of Artificial Sequence: Synthetic oligonucleotide
uuucgacgcuuaaccuuuc

SEQ ID NO: 53235 - RNA, 19 nt, Artificial Sequence
  Description of Artificial Sequence: Synthetic oligonucleotide
ccgcugucgccccaggccc

SEQ ID NO: 53236 - RNA, 19 nt, Artificial Sequence
  Description of Artificial Sequence: Synthetic oligonucleotide
cucccugacucccuguggg

SEQ ID NO: 53237 - RNA, 19 nt, Artificial Sequence
  Description of Artificial Sequence: Synthetic oligonucleotide
ggguggccaucccugggcc

SEQ ID NO: 53238 - RNA, 19 nt, Artificial Sequence
  Description of Artificial Sequence: Synthetic oligonucleotide
cccuccacgccuccuggcc

SEQ ID NO: 53239 - RNA, 19 nt, Artificial Sequence
  Description of Artificial Sequence: Synthetic oligonucleotide
cagacgcugccgcugccgc

SEQ ID NO: 53240 - RNA, 19 nt, Artificial Sequence
  Description of Artificial Sequence: Synthetic oligonucleotide
cugcaccacggcguuuuuu

SEQ ID NO: 53241 - RNA, 19 nt, Artificial Sequence
  Description of Artificial Sequence: Synthetic oligonucleotide
uuacaacauucaacuuuag

SEQ ID NO: 53242 - RNA, 19 nt, Artificial Sequence
  Description of Artificial Sequence: Synthetic oligonucleotide
guauuuuuacuauuauaau

SEQ ID NO: 53243 - RNA, 19 nt, Artificial Sequence
  Description of Artificial Sequence: Synthetic oligonucleotide
uauaauauggaaccuuccc

SEQ ID NO: 53244 - RNA, 19 nt, Artificial Sequence
  Description of Artificial Sequence: Synthetic oligonucleotide
cuccaaauucuucaauaaa

SEQ ID NO: 53245 - RNA, 19 nt, Artificial Sequence
  Description of Artificial Sequence: Synthetic oligonucleotide
aaguugcuuuucaaaaaaa

SEQ ID NO: 53246 - RNA, 19 nt, Artificial Sequence
  Description of Artificial Sequence: Synthetic oligonucleotide
uaauuaugggucuguaacc

SEQ ID NO: 53247 - RNA, 19 nt, Artificial Sequence
  Description of Artificial Sequence: Synthetic oligonucleotide
cacccuggacugggugcuc

SEQ ID NO: 53248 - RNA, 19 nt, Artificial Sequence
  Description of Artificial Sequence: Synthetic oligonucleotide
ccucacugacggacuuguc

SEQ ID NO: 53249 - RNA, 19 nt, Artificial Sequence
  Description of Artificial Sequence: Synthetic oligonucleotide
cugaaccucucuuugucuc

SEQ ID NO: 53250 - RNA, 19 nt, Artificial Sequence
  Description of Artificial Sequence: Synthetic oligonucleotide
ccagcgcccagcacugggc

SEQ ID NO: 53251 - RNA, 19 nt, Artificial Sequence
  Description of Artificial Sequence: Synthetic oligonucleotide
ccuggcaaaaccugagacg

SEQ ID NO: 53252 - RNA, 19 nt, Artificial Sequence
  Description of Artificial Sequence: Synthetic oligonucleotide
gcccgguacauguuggcca

SEQ ID NO: 53253 - RNA, 19 nt, Artificial Sequence
  Description of Artificial Sequence: Synthetic oligonucleotide
aaaugaaugaaccagauuc

SEQ ID NO: 53254 - RNA, 19 nt, Artificial Sequence
  Description of Artificial Sequence: Synthetic oligonucleotide
cagaccggcaggggcgcug

SEQ ID NO: 53255 - RNA, 19 nt, Artificial Sequence
  Description of Artificial Sequence: Synthetic oligonucleotide
gugguuuaggaggggccug

SEQ ID NO: 53256 - RNA, 19 nt, Artificial Sequence
  Description of Artificial Sequence: Synthetic oligonucleotide
gggguuucucccaggaggu

SEQ ID NO: 53257 - RNA, 19 nt, Artificial Sequence
  Description of Artificial Sequence: Synthetic oligonucleotide
uuuuugggcuugcgcugga

SEQ ID NO: 53258 - RNA, 19 nt, Artificial Sequence
  Description of Artificial Sequence: Synthetic oligonucleotide
agggcucuggacucccguu

SEQ ID NO: 53259 - RNA, 19 nt, Artificial Sequence
  Description of Artificial Sequence: Synthetic oligonucleotide
uugcgccaguggccugcau

SEQ ID NO: 53260 - RNA, 19 nt, Artificial Sequence
  Description of Artificial Sequence: Synthetic oligonucleotide
uccugguccugucuuccuc

SEQ ID NO: 53261 - RNA, 19 nt, Artificial Sequence
  Description of Artificial Sequence: Synthetic oligonucleotide
cauguuugaauuucuuugc

SEQ ID NO: 53262 - RNA, 19 nt, Artificial Sequence
  Description of Artificial Sequence: Synthetic oligonucleotide
cuuuccuagucuggggagc

SEQ ID NO: 53263 - RNA, 19 nt, Artificial Sequence
  Description of Artificial Sequence: Synthetic oligonucleotide
cagggaggagcccugugcc

SEQ ID NO: 53264 - RNA, 19 nt, Artificial Sequence
  Description of Artificial Sequence: Synthetic oligonucleotide
ccugucccaggauccaugg

SEQ ID NO: 53265 - RNA, 19 nt, Artificial Sequence
  Description of Artificial Sequence: Synthetic oligonucleotide
gguaggaacaccauggaca

SEQ ID NO: 53266 - RNA, 19 nt, Artificial Sequence
  Description of Artificial Sequence: Synthetic oligonucleotide
agggagagcaaacggggcc

SEQ ID NO: 53267 - RNA, 19 nt, Artificial Sequence
  Description of Artificial Sequence: Synthetic oligonucleotide
caucugucaccaggggcuu

SEQ ID NO: 53268 - RNA, 19 nt, Artificial Sequence
  Description of Artificial Sequence: Synthetic oligonucleotide
uagggaaggccgagccagc

SEQ ID NO: 53269 - RNA, 19 nt, Artificial Sequence
  Description of Artificial Sequence: Synthetic oligonucleotide
ccugggucaaagaagucaa

SEQ ID NO: 53270 - RNA, 19 nt, Artificial Sequence
  Description of Artificial Sequence: Synthetic oligonucleotide
aaggggcugccuggaggag

SEQ ID NO: 53271 - RNA, 19 nt, Artificial Sequence
  Description of Artificial Sequence: Synthetic oligonucleotide
ggcagccugucagcuggug

SEQ ID NO: 53272 - RNA, 19 nt, Artificial Sequence
  Description of Artificial Sequence: Synthetic oligonucleotide
gcaucagaggcuguggcca

SEQ ID NO: 53273 - RNA, 19 nt, Artificial Sequence
  Description of Artificial Sequence: Synthetic oligonucleotide
aggccagcugggcucgggg

SEQ ID NO: 53274 - RNA, 19 nt, Artificial Sequence
  Description of Artificial Sequence: Synthetic oligonucleotide
gagcgccagccugagagga

SEQ ID NO: 53275 - RNA, 19 nt, Artificial Sequence
  Description of Artificial Sequence: Synthetic oligonucleotide
agcgcgugagcgucgcggg

SEQ ID NO: 53276 - RNA, 19 nt, Artificial Sequence
  Description of Artificial Sequence: Synthetic oligonucleotide
gagccucgggcaccaugag

SEQ ID NO: 53277 - RNA, 19 nt, Artificial Sequence
  Description of Artificial Sequence: Synthetic oligonucleotide
gcgacguggcuauugugaa

SEQ ID NO: 53278 - RNA, 19 nt, Artificial Sequence
  Description of Artificial Sequence: Synthetic oligonucleotide
aggaggguuggcugcacaa

SEQ ID NO: 53279 - RNA, 19 nt, Artificial Sequence
  Description of Artificial Sequence: Synthetic oligonucleotide
aacgaggggaguacaucaa

SEQ ID NO: 53280 - RNA, 19 nt, Artificial Sequence
  Description of Artificial Sequence: Synthetic oligonucleotide
agaccuggcggccacgcua

SEQ ID NO: 53281 - RNA, 19 nt, Artificial Sequence
  Description of Artificial Sequence: Synthetic oligonucleotide
acuuccuccucaagaauga

SEQ ID NO: 53282 - RNA, 19 nt, Artificial Sequence
  Description of Artificial Sequence: Synthetic oligonucleotide
auggcaccuucauuggcua

SEQ ID NO: 53283 - RNA, 19 nt, Artificial Sequence
  Description of Artificial Sequence: Synthetic oligonucleotide
acaaggagcggccgcagga

SEQ ID NO: 53284 - RNA, 19 nt, Artificial Sequence
  Description of Artificial Sequence: Synthetic oligonucleotide
auguggaccaacgugaggc

SEQ ID NO: 53285 - RNA, 19 nt, Artificial Sequence
  Description of Artificial Sequence: Synthetic oligonucleotide
cuccccucaacaacuucuc

SEQ ID NO: 53286 - RNA, 19 nt, Artificial Sequence
  Description of Artificial Sequence: Synthetic oligonucleotide
cuguggcgcagugccagcu

SEQ ID NO: 53287 - RNA, 19 nt, Artificial Sequence
  Description of Artificial Sequence: Synthetic oligonucleotide
ugaugaagacggagcggcc

SEQ ID NO: 53288 - RNA, 19 nt, Artificial Sequence
  Description of Artificial Sequence: Synthetic oligonucleotide
cccggcccaacaccuucau

SEQ ID NO: 53289 - RNA, 19 nt, Artificial Sequence
  Description of Artificial Sequence: Synthetic oligonucleotide
ucauccgcugccugcagug

SEQ ID NO: 53290 - RNA, 19 nt, Artificial Sequence
  Description of Artificial Sequence: Synthetic oligonucleotide
ggaccacugucaucgaacg

SEQ ID NO: 53291 - RNA, 19 nt, Artificial Sequence
  Description of Artificial Sequence: Synthetic oligonucleotide
gcaccuuccauguggagac

SEQ ID NO: 53292 - RNA, 19 nt, Artificial Sequence
  Description of Artificial Sequence: Synthetic oligonucleotide
cuccugaggagcgggagga

SEQ ID NO: 53293 - RNA, 19 nt, Artificial Sequence
  Description of Artificial Sequence: Synthetic oligonucleotide
aguggacaaccgccaucca

SEQ ID NO: 53294 - RNA, 19 nt, Artificial Sequence
  Description of Artificial Sequence: Synthetic oligonucleotide
agacuguggcugacggccu

SEQ ID NO: 53295 - RNA, 19 nt, Artificial Sequence
  Description of Artificial Sequence: Synthetic oligonucleotide
ucaagaagcaggaggagga

SEQ ID NO: 53296 - RNA, 19 nt, Artificial Sequence
  Description of Artificial Sequence: Synthetic oligonucleotide
aggagauggacuuccgguc

SEQ ID NO: 53297 - RNA, 19 nt, Artificial Sequence
  Description of Artificial Sequence: Synthetic oligonucleotide
cgggcucacccagugacaa

SEQ ID NO: 53298 - RNA, 19 nt, Artificial Sequence
  Description of Artificial Sequence: Synthetic oligonucleotide
acucaggggcugaagagau

SEQ ID NO: 53299 - RNA, 19 nt, Artificial Sequence
  Description of Artificial Sequence: Synthetic oligonucleotide
uggaggugucccuggccaa

SEQ ID NO: 53300 - RNA, 19 nt, Artificial Sequence
  Description of Artificial Sequence: Synthetic oligonucleotide
agcccaagcaccgcgugac

SEQ ID NO: 53301 - RNA, 19 nt, Artificial Sequence
  Description of Artificial Sequence: Synthetic oligonucleotide
ccaugaacgaguuugagua

SEQ ID NO: 53302 - RNA, 19 nt, Artificial Sequence
  Description of Artificial Sequence: Synthetic oligonucleotide
accugaagcugcugggcaa

SEQ ID NO: 53303 - RNA, 19 nt, Artificial Sequence
  Description of Artificial Sequence: Synthetic oligonucleotide
agggcacuuucggcaaggu

SEQ ID NO: 53304 - RNA, 19 nt, Artificial Sequence
  Description of Artificial Sequence: Synthetic oligonucleotide
ugauccuggugaaggagaa

SEQ ID NO: 53305 - RNA, 19 nt, Artificial Sequence
  Description of Artificial Sequence: Synthetic oligonucleotide
aggccacaggccgcuacua

SEQ ID NO: 53306 - RNA, 19 nt, Artificial Sequence
  Description of Artificial Sequence: Synthetic oligonucleotide
acgccaugaagauccucaa

SEQ ID NO: 53307 - RNA, 19 nt, Artificial Sequence
  Description of Artificial Sequence: Synthetic oligonucleotide
agaaggaagucaucguggc

SEQ ID NO: 53308 - RNA, 19 nt, Artificial Sequence
  Description of Artificial Sequence: Synthetic oligonucleotide
ccaaggacgagguggccca

SEQ ID NO: 53309 - RNA, 19 nt, Artificial Sequence
  Description of Artificial Sequence: Synthetic oligonucleotide
acacacucaccgagaaccg

SEQ ID NO: 53310 - RNA, 19 nt, Artificial Sequence
  Description of Artificial Sequence: Synthetic oligonucleotide
gcguccugcagaacuccag

SEQ ID NO: 53311 - RNA, 19 nt, Artificial Sequence
  Description of Artificial Sequence: Synthetic oligonucleotide
ggcaccccuuccucacagc

SEQ ID NO: 53312 - RNA, 19 nt, Artificial Sequence
  Description of Artificial Sequence: Synthetic oligonucleotide
cccugaaguacucuuucca

SEQ ID NO: 53313 - RNA, 19 nt, Artificial Sequence
  Description of Artificial Sequence: Synthetic oligonucleotide
agacccacgaccgccucug

SEQ ID NO: 53314 - RNA, 19 nt, Artificial Sequence
  Description of Artificial Sequence: Synthetic oligonucleotide
gcuuugucauggaguacgc

SEQ ID NO: 53315 - RNA, 19 nt, Artificial Sequence
  Description of Artificial Sequence: Synthetic oligonucleotide
ccaacgggggcgagcuguu

SEQ ID NO: 53316 - RNA, 19 nt, Artificial Sequence
  Description of Artificial Sequence: Synthetic oligonucleotide
ucuuccaccugucccggga

SEQ ID NO: 53317 - RNA, 19 nt, Artificial Sequence
  Description of Artificial Sequence: Synthetic oligonucleotide
agcguguguucuccgagga

SEQ ID NO: 53318 - RNA, 19 nt, Artificial Sequence
  Description of Artificial Sequence: Synthetic oligonucleotide
accgggcccgcuucuaugg

SEQ ID NO: 53319 - RNA, 19 nt, Artificial Sequence
  Description of Artificial Sequence: Synthetic oligonucleotide
gcgcugagauugugucagc

SEQ ID NO: 53320 - RNA, 19 nt, Artificial Sequence
  Description of Artificial Sequence: Synthetic oligonucleotide
cccuggacuaccugcacuc

SEQ ID NO: 53321 - RNA, 19 nt, Artificial Sequence
  Description of Artificial Sequence: Synthetic oligonucleotide
cggagaagaacguggugua

SEQ ID NO: 53322 - RNA, 19 nt, Artificial Sequence
  Description of Artificial Sequence: Synthetic oligonucleotide
accgggaccucaagcugga

SEQ ID NO: 53323 - RNA, 19 nt, Artificial Sequence
  Description of Artificial Sequence: Synthetic oligonucleotide
agaaccucaugcuggacaa

SEQ ID NO: 53324 - RNA, 19 nt, Artificial Sequence
  Description of Artificial Sequence: Synthetic oligonucleotide
aggacgggcacauuaagau

SEQ ID NO: 53325 - RNA, 19 nt, Artificial Sequence
  Description of Artificial Sequence: Synthetic oligonucleotide
ucacagacuucgggcugug

SEQ ID NO: 53326 - RNA, 19 nt, Artificial Sequence
  Description of Artificial Sequence: Synthetic oligonucleotide
gcaaggaggggaucaagga

SEQ ID NO: 53327 - RNA, 19 nt, Artificial Sequence
  Description of Artificial Sequence: Synthetic oligonucleotide
acggugccaccaugaagac

SEQ ID NO: 53328 - RNA, 19 nt, Artificial Sequence
  Description of Artificial Sequence: Synthetic oligonucleotide
ccuuuugcggcacaccuga

SEQ ID NO: 53329 - RNA, 19 nt, Artificial Sequence
  Description of Artificial Sequence: Synthetic oligonucleotide
aguaccuggcccccgaggu

SEQ ID NO: 53330 - RNA, 19 nt, Artificial Sequence
  Description of Artificial Sequence: Synthetic oligonucleotide
ugcuggaggacaaugacua

SEQ ID NO: 53331 - RNA, 19 nt, Artificial Sequence
  Description of Artificial Sequence: Synthetic oligonucleotide
acggccgugcaguggacug

SEQ ID NO: 53332 - RNA, 19 nt, Artificial Sequence
  Description of Artificial Sequence: Synthetic oligonucleotide
ggugggggcugggcguggu

SEQ ID NO: 53333 - RNA, 19 nt, Artificial Sequence
  Description of Artificial Sequence: Synthetic oligonucleotide
ucauguacgagaugaugug

SEQ ID NO: 53334 - RNA, 19 nt, Artificial Sequence
  Description of Artificial Sequence: Synthetic oligonucleotide
gcggucgccugcccuucua

SEQ ID NO: 53335 - RNA, 19 nt, Artificial Sequence
  Description of Artificial Sequence: Synthetic oligonucleotide
acaaccaggaccaugagaa

SEQ ID NO: 53336 - RNA, 19 nt, Artificial Sequence
  Description of Artificial Sequence: Synthetic oligonucleotide
agcuuuuugagcucauccu

SEQ ID NO: 53337 - RNA, 19 nt, Artificial Sequence
  Description of Artificial Sequence: Synthetic oligonucleotide
ucauggaggagauccgcuu

SEQ ID NO: 53338 - RNA, 19 nt, Artificial Sequence
  Description of Artificial Sequence: Synthetic oligonucleotide
ucccgcgcacgcuuggucc

SEQ ID NO: 53339 - RNA, 19 nt, Artificial Sequence
  Description of Artificial Sequence: Synthetic oligonucleotide
ccgaggccaaguccuugcu

SEQ ID NO: 53340 - RNA, 19 nt, Artificial Sequence
  Description of Artificial Sequence: Synthetic oligonucleotide
uuucagggcugcucaagaa

SEQ ID NO: 53341 - RNA, 19 nt, Artificial Sequence
  Description of Artificial Sequence: Synthetic oligonucleotide
aggaccccaagcagaggcu

SEQ ID NO: 53342 - RNA, 19 nt, Artificial Sequence
  Description of Artificial Sequence: Synthetic oligonucleotide
uuggcgggggcuccgagga

SEQ ID NO: 53343 - RNA, 19 nt, Artificial Sequence
  Description of Artificial Sequence: Synthetic oligonucleotide
acgccaaggagaucaugca

SEQ ID NO: 53344 - RNA, 19 nt, Artificial Sequence
  Description of Artificial Sequence: Synthetic oligonucleotide
agcaucgcuucuuugccgg

SEQ ID NO: 53345 - RNA, 19 nt, Artificial Sequence
  Description of Artificial Sequence: Synthetic oligonucleotide
guaucguguggcagcacgu

SEQ ID NO: 53346 - RNA, 19 nt, Artificial Sequence
  Description of Artificial Sequence: Synthetic oligonucleotide
uguacgagaagaagcucag

SEQ ID NO: 53347 - RNA, 19 nt, Artificial Sequence
  Description of Artificial Sequence: Synthetic oligonucleotide
gcccacccuucaagcccca

SEQ ID NO: 53348 - RNA, 19 nt, Artificial Sequence
  Description of Artificial Sequence: Synthetic oligonucleotide
aggucacgucggagacuga

SEQ ID NO: 53349 - RNA, 19 nt, Artificial Sequence
  Description of Artificial Sequence: Synthetic oligonucleotide
acaccagguauuuugauga

SEQ ID NO: 53350 - RNA, 19 nt, Artificial Sequence
  Description of Artificial Sequence: Synthetic oligonucleotide
aggaguucacggcccagau

SEQ ID NO: 53351 - RNA, 19 nt, Artificial Sequence
  Description of Artificial Sequence: Synthetic oligonucleotide
ugaucaccaucacaccacc

SEQ ID NO: 53352 - RNA, 19 nt, Artificial Sequence
  Description of Artificial Sequence: Synthetic oligonucleotide
cugaccaagaugacagcau

SEQ ID NO: 53353 - RNA, 19 nt, Artificial Sequence
  Description of Artificial Sequence: Synthetic oligonucleotide
uggaguguguggacagcga

SEQ ID NO: 53354 - RNA, 19 nt, Artificial Sequence
  Description of Artificial Sequence: Synthetic oligonucleotide
agcgcaggccccacuuccc

SEQ ID NO: 53355 - RNA, 19 nt, Artificial Sequence
  Description of Artificial Sequence: Synthetic oligonucleotide
cccaguucuccuacucggc

SEQ ID NO: 53356 - RNA, 19 nt, Artificial Sequence
  Description of Artificial Sequence: Synthetic oligonucleotide
ccagcggcacggccugagg

SEQ ID NO: 53357 - RNA, 19 nt, Artificial Sequence
  Description of Artificial Sequence: Synthetic oligonucleotide
gcggcgguggacugcgcug

SEQ ID NO: 53358 - RNA, 19 nt, Artificial Sequence
  Description of Artificial Sequence: Synthetic oligonucleotide
ggacgauagcuuggaggga

SEQ ID NO: 53359 - RNA, 19 nt, Artificial Sequence
  Description of Artificial Sequence: Synthetic oligonucleotide
auggagaggcggccucgug

SEQ ID NO: 53360 - RNA, 19 nt, Artificial Sequence
  Description of Artificial Sequence: Synthetic oligonucleotide
gccaugaucuguauuuaau

SEQ ID NO: 53361 - RNA, 19 nt, Artificial Sequence
  Description of Artificial Sequence: Synthetic oligonucleotide
ugguuuuuauuucucgggu

SEQ ID NO: 53362 - RNA, 19 nt, Artificial Sequence
  Description of Artificial Sequence: Synthetic oligonucleotide
ugcauuugagagaagccac

SEQ ID NO: 53363 - RNA, 19 nt, Artificial Sequence
  Description of Artificial Sequence: Synthetic oligonucleotide
cgcuguccucucgagccca

SEQ ID NO: 53364 - RNA, 19 nt, Artificial Sequence
  Description of Artificial Sequence: Synthetic oligonucleotide
agauggaaagacguuuuug

SEQ ID NO: 53365 - RNA, 19 nt, Artificial Sequence
  Description of Artificial Sequence: Synthetic oligonucleotide
gugcugugggcagcacccu

SEQ ID NO: 53366 - RNA, 19 nt, Artificial Sequence
  Description of Artificial Sequence: Synthetic oligonucleotide
ucccccgcagcgggguagg

SEQ ID NO: 53367 - RNA, 19 nt, Artificial Sequence
  Description of Artificial Sequence: Synthetic oligonucleotide
ggaagaaaacuauccugcg

SEQ ID NO: 53368 - RNA, 19 nt, Artificial Sequence
  Description of Artificial Sequence: Synthetic oligonucleotide
ggguuuuaauuuauuucau

SEQ ID NO: 53369 - RNA, 19 nt, Artificial Sequence
  Description of Artificial Sequence: Synthetic oligonucleotide
uccaguuuguucuccgggu

SEQ ID NO: 53370 - RNA, 19 nt, Artificial Sequence
  Description of Artificial Sequence: Synthetic oligonucleotide
uguggccucagcccucaga

SEQ ID NO: 53371 - RNA, 19 nt, Artificial Sequence
  Description of Artificial Sequence: Synthetic oligonucleotide
aacaauccgauucacguag

SEQ ID NO: 53372 - RNA, 19 nt, Artificial Sequence
  Description of Artificial Sequence: Synthetic oligonucleotide
gggaaauguuaaggacuuc

SEQ ID NO: 53373 - RNA, 19 nt, Artificial Sequence
  Description of Artificial Sequence: Synthetic oligonucleotide
cugcagcuaugcgcaaugu

SEQ ID NO: 53374 - RNA, 19 nt, Artificial Sequence
  Description of Artificial Sequence: Synthetic oligonucleotide
uggcauuggggggccgggc

SEQ ID NO: 53375 - RNA, 19 nt, Artificial Sequence
  Description of Artificial Sequence: Synthetic oligonucleotide
cagguccugcccauguguc

SEQ ID NO: 53376 - RNA, 19 nt, Artificial Sequence
  Description of Artificial Sequence: Synthetic oligonucleotide
ccccucacucugucagcca

SEQ ID NO: 53377 - RNA, 19 nt, Artificial Sequence
  Description of Artificial Sequence: Synthetic oligonucleotide
agccgcccugggcugucug

SEQ ID NO: 53378 - RNA, 19 nt, Artificial Sequence
  Description of Artificial Sequence: Synthetic oligonucleotide
gucaccagcuaucugucau

SEQ ID NO: 53379 - RNA, 19 nt, Artificial Sequence
  Description of Artificial Sequence: Synthetic oligonucleotide
ucucucuggggcccugggc

SEQ ID NO: 53380 - RNA, 19 nt, Artificial Sequence
  Description of Artificial Sequence: Synthetic oligonucleotide
ccucaguucaaccuggugg

SEQ ID NO: 53381 - RNA, 19 nt, Artificial Sequence
  Description of Artificial Sequence: Synthetic oligonucleotide
gcaccagaugcaaccucac

SEQ ID NO: 53382 - RNA, 19 nt, Artificial Sequence
  Description of Artificial Sequence: Synthetic oligonucleotide
cuaugguaugcuggccagc

SEQ ID NO: 53383 - RNA, 19 nt, Artificial Sequence
  Description of Artificial Sequence: Synthetic oligonucleotide
cacccucuccugggggugg

SEQ ID NO: 53384 - RNA, 19 nt, Artificial Sequence
  Description of Artificial Sequence: Synthetic oligonucleotide
gcaggcacacagcagcccc

SEQ ID NO: 53385 - RNA, 19 nt, Artificial Sequence
  Description of Artificial Sequence: Synthetic oligonucleotide
cccagcacuaaggccgugu

SEQ ID NO: 53386 - RNA, 19 nt, Artificial Sequence
  Description of Artificial Sequence: Synthetic oligonucleotide
ucucugaggacgucaucgg

SEQ ID NO: 53387 - RNA, 19 nt, Artificial Sequence
  Description of Artificial Sequence: Synthetic oligonucleotide
gaggcugggccccugggau

SEQ ID NO: 53388 - RNA, 19 nt, Artificial Sequence
  Description of Artificial Sequence: Synthetic oligonucleotide
ugggaccagggauggggga

SEQ ID NO: 53389 - RNA, 19 nt, Artificial Sequence
  Description of Artificial Sequence: Synthetic oligonucleotide
augggccaggguuuaccca

SEQ ID NO: 53390 - RNA, 19 nt, Artificial Sequence
  Description of Artificial Sequence: Synthetic oligonucleotide
agugggacagaggagcaag

SEQ ID NO: 53391 - RNA, 19 nt, Artificial Sequence
  Description of Artificial Sequence: Synthetic oligonucleotide
gguuuaaauuuguuauugu

SEQ ID NO: 53392 - RNA, 19 nt, Artificial Sequence
  Description of Artificial Sequence: Synthetic oligonucleotide
uguauuauguuguucaaau

SEQ ID NO: 53393 - RNA, 19 nt, Artificial Sequence
  Description of Artificial Sequence: Synthetic oligonucleotide
ugcauuuuggggguuuuua

SEQ ID NO: 53394 - RNA, 19 nt, Artificial Sequence
  Description of Artificial Sequence: Synthetic oligonucleotide
aaucuuugugacaggaaag

SEQ ID NO: 53395 - RNA, 19 nt, Artificial Sequence
  Description of Artificial Sequence: Synthetic oligonucleotide
gcccucccccuuccccuuc

SEQ ID NO: 53396 - RNA, 19 nt, Artificial Sequence
  Description of Artificial Sequence: Synthetic oligonucleotide
cugugucacaguucuuggu

SEQ ID NO: 53397 - RNA, 19 nt, Artificial Sequence
  Description of Artificial Sequence: Synthetic oligonucleotide
ugacugucccaccgggagc

SEQ ID NO: 53398 - RNA, 19 nt, Artificial Sequence
  Description of Artificial Sequence: Synthetic oligonucleotide
ccucccccucagaugaucu

SEQ ID NO: 53399 - RNA, 19 nt, Artificial Sequence
  Description of Artificial Sequence: Synthetic oligonucleotide
ucuccacgguagcacuuga

SEQ ID NO: 53400 - RNA, 19 nt, Artificial Sequence
  Description of Artificial Sequence: Synthetic oligonucleotide
accuuuucgacgcuuaacc

SEQ ID NO: 53401 - RNA, 19 nt, Artificial Sequence
  Description of Artificial Sequence: Synthetic oligonucleotide
cuuuccgcugucgccccag

SEQ ID NO: 53402 - RNA, 19 nt, Artificial Sequence
  Description of Artificial Sequence: Synthetic oligonucleotide
ggcccucccugacucccug

SEQ ID NO: 53403 - RNA, 19 nt, Artificial Sequence
  Description of Artificial Sequence: Synthetic oligonucleotide
guggggguggccaucccug

SEQ ID NO: 53404 - RNA, 19 nt, Artificial Sequence
  Description of Artificial Sequence: Synthetic oligonucleotide
gggccccuccacgccuccu

SEQ ID NO: 53405 - RNA, 19 nt, Artificial Sequence
  Description of Artificial Sequence: Synthetic oligonucleotide
uggccagacgcugccgcug

SEQ ID NO: 53406 - RNA, 19 nt, Artificial Sequence
  Description of Artificial Sequence: Synthetic oligonucleotide
gccgcugcaccacggcguu

SEQ ID NO: 53407 - RNA, 19 nt, Artificial Sequence
  Description of Artificial Sequence: Synthetic oligonucleotide
uuuuuuacaacauucaacu

SEQ ID NO: 53408 - RNA, 19 nt, Artificial Sequence
  Description of Artificial Sequence: Synthetic oligonucleotide
uuuaguauuuuuacuauua

SEQ ID NO: 53409 - RNA, 19 nt, Artificial Sequence
  Description of Artificial Sequence: Synthetic oligonucleotide
auaauauaauauggaaccu

SEQ ID NO: 53410 - RNA, 19 nt, Artificial Sequence
  Description of Artificial Sequence: Synthetic oligonucleotide
uucccuccaaauucuucaa

SEQ ID NO: 53411 - RNA, 19 nt, Artificial Sequence
  Description of Artificial Sequence: Synthetic oligonucleotide
auaaaaguugcuuuucaaa

SEQ ID NO: 53412 - RNA, 25 nt, Artificial Sequence
  Description of Artificial Sequence: Synthetic oligonucleotide
cggcaggaccgagcgcggcaggcgg

SEQ ID NO: 53413 - RNA, 25 nt, Artificial Sequence
  Description of Artificial Sequence: Synthetic oligonucleotide
gcuggcccagcgcagccagcgcggc

SEQ ID NO: 53414 - RNA, 25 nt, Artificial Sequence
  Description of Artificial Sequence: Synthetic oligonucleotide
cccgaaggacgggagcaggcggccg

SEQ ID NO: 53415 - RNA, 25 nt, Artificial Sequence
  Description of Artificial Sequence: Synthetic oligonucleotide
gagcaccgagcgcugggcaccgggc

SEQ ID NO: 53416 - RNA, 25 nt, Artificial Sequence
  Description of Artificial Sequence: Synthetic oligonucleotide
caccgagcggcggcggcacgcgagg

SEQ ID NO: 53417 - RNA, 25 nt, Artificial Sequence
  Description of Artificial Sequence: Synthetic oligonucleotide
gcccggccccgagcagcgcccccgc

SEQ ID NO: 53418 - RNA, 25 nt, Artificial Sequence
  Description of Artificial Sequence: Synthetic oligonucleotide
cccgccgcggccuccagcccggccc

SEQ ID NO: 53419 - RNA, 25 nt, Artificial Sequence
  Description of Artificial Sequence: Synthetic oligonucleotide
ccgcccagcgccggcccgcggggau

SEQ ID NO: 53420 - RNA, 25 nt, Artificial Sequence
  Description of Artificial Sequence: Synthetic oligonucleotide
ugcggagcggcgggcgccggaggcc

SEQ ID NO: 53421 - RNA, 25 nt, Artificial Sequence
  Description of Artificial Sequence: Synthetic oligonucleotide
cgcggcccggcuaggcccgcgcucg

SEQ ID NO: 53422 - RNA, 25 nt, Artificial Sequence
  Description of Artificial Sequence: Synthetic oligonucleotide
gcgcccggacgcggcggcccgaggc

SEQ ID NO: 53423 - RNA, 25 nt, Artificial Sequence
  Description of Artificial Sequence: Synthetic oligonucleotide
cuguggccaggccagcugggcucgg

SEQ ID NO: 53424 - RNA, 25 nt, Artificial Sequence
  Description of Artificial Sequence: Synthetic oligonucleotide
gggagcgccagccugagaggagcgc

SEQ ID NO: 53425 - RNA, 25 nt, Artificial Sequence
  Description of Artificial Sequence: Synthetic oligonucleotide
cgugagcgucgcgggagccucgggc

SEQ ID NO: 53426 - RNA, 25 nt, Artificial Sequence
  Description of Artificial Sequence: Synthetic oligonucleotide
caccaugagcgacguggcuauugug

SEQ ID NO: 53427 - RNA, 25 nt, Artificial Sequence
  Description of Artificial Sequence: Synthetic oligonucleotide
gaaggaggguuggcugcacaaacga

SEQ ID NO: 53428 - RNA, 25 nt, Artificial Sequence
  Description of Artificial Sequence: Synthetic oligonucleotide
aggggaguacaucaagaccuggcgg

SEQ ID NO: 53429 - RNA, 25 nt, Artificial Sequence
  Description of Artificial Sequence: Synthetic oligonucleotide
gccacgcuacuuccuccucaagaau

SEQ ID NO: 53430 - RNA, 25 nt, Artificial Sequence
  Description of Artificial Sequence: Synthetic oligonucleotide
ugauggcaccuucauuggcuacaag

SEQ ID NO: 53431 - RNA, 25 nt, Artificial Sequence
  Description of Artificial Sequence: Synthetic oligonucleotide
ggagcggccgcaggauguggaccaa

SEQ ID NO: 53432 - RNA, 25 nt, Artificial Sequence
  Description of Artificial Sequence: Synthetic oligonucleotide
acgugaggcuccccucaacaacuuc

SEQ ID NO: 53433 - RNA, 25 nt, Artificial Sequence
  Description of Artificial Sequence: Synthetic oligonucleotide
cucuguggcgcagugccagcugaug

SEQ ID NO: 53434 - RNA, 25 nt, Artificial Sequence
  Description of Artificial Sequence: Synthetic oligonucleotide
gaagacggagcggccccggcccaac

SEQ ID NO: 53435 - RNA, 25 nt, Artificial Sequence
  Description of Artificial Sequence: Synthetic oligonucleotide
caccuucaucauccgcugccugcag

SEQ ID NO: 53436 - RNA, 25 nt, Artificial Sequence
  Description of Artificial Sequence: Synthetic oligonucleotide
guggaccacugucaucgaacgcacc

SEQ ID NO: 53437 - RNA, 25 nt, Artificial Sequence
  Description of Artificial Sequence: Synthetic oligonucleotide
cuuccauguggagacuccugaggag

SEQ ID NO: 53438 - RNA, 25 nt, Artificial Sequence
  Description of Artificial Sequence: Synthetic oligonucleotide
gcgggaggaguggacaaccgccauc

SEQ ID NO: 53439 - RNA, 25 nt, Artificial Sequence
  Description of Artificial Sequence: Synthetic oligonucleotide
ccagacuguggcugacggccucaag

SEQ ID NO: 53440 - RNA, 25 nt, Artificial Sequence
  Description of Artificial Sequence: Synthetic oligonucleotide
gaagcaggaggaggaggagauggac

SEQ ID NO: 53441 - RNA, 25 nt, Artificial Sequence
  Description of Artificial Sequence: Synthetic oligonucleotide
cuuccggucgggcucacccagugac

SEQ ID NO: 53442 - RNA, 25 nt, Artificial Sequence
  Description of Artificial Sequence: Synthetic oligonucleotide
caacucaggggcugaagagauggag

SEQ ID NO: 53443 - RNA, 25 nt, Artificial Sequence
  Description of Artificial Sequence: Synthetic oligonucleotide
ggugucccuggccaagcccaagcac

SEQ ID NO: 53444 - RNA, 25 nt, Artificial Sequence
  Description of Artificial Sequence: Synthetic oligonucleotide
ccgcgugaccaugaacgaguuugag

SEQ ID NO: 53445 - RNA, 25 nt, Artificial Sequence
  Description of Artificial Sequence: Synthetic oligonucleotide
guaccugaagcugcugggcaagggc

SEQ ID NO: 53446 - RNA, 25 nt, Artificial Sequence
  Description of Artificial Sequence: Synthetic oligonucleotide
cacuuucggcaaggugauccuggug

SEQ ID NO: 53447 - RNA, 25 nt, Artificial Sequence
  Description of Artificial Sequence: Synthetic oligonucleotide
gaaggagaaggccacaggccgcuac

SEQ ID NO: 53448 - RNA, 25 nt, Artificial Sequence
  Description of Artificial Sequence: Synthetic oligonucleotide
cuacgccaugaagauccucaagaag

SEQ ID NO: 53449 - RNA, 25 nt, Artificial Sequence
  Description of Artificial Sequence: Synthetic oligonucleotide
ggaagucaucguggccaaggacgag

SEQ ID NO: 53450 - RNA, 25 nt, Artificial Sequence
  Description of Artificial Sequence: Synthetic oligonucleotide
gguggcccacacacucaccgagaac

SEQ ID NO: 53451 - RNA, 25 nt, Artificial Sequence
  Description of Artificial Sequence: Synthetic oligonucleotide
ccgcguccugcagaacuccaggcac

SEQ ID NO: 53452 - RNA, 25 nt, Artificial Sequence
  Description of Artificial Sequence: Synthetic oligonucleotide
ccccuuccucacagcccugaaguac

SEQ ID NO: 53453 - RNA, 25 nt, Artificial Sequence
  Description of Artificial Sequence: Synthetic oligonucleotide
cucuuuccagacccacgaccgccuc

SEQ ID NO: 53454 - RNA, 25 nt, Artificial Sequence
  Description of Artificial Sequence: Synthetic oligonucleotide
cugcuuugucauggaguacgccaac

SEQ ID NO: 53455 - RNA, 25 nt, Artificial Sequence
  Description of Artificial Sequence: Synthetic oligonucleotide
cgggggcgagcuguucuuccaccug

SEQ ID NO: 53456 - RNA, 25 nt, Artificial Sequence
  Description of Artificial Sequence: Synthetic oligonucleotide
gucccgggagcguguguucuccgag

SEQ ID NO: 53457 - RNA, 25 nt, Artificial Sequence
  Description of Artificial Sequence: Synthetic oligonucleotide
ggaccgggcccgcuucuauggcgcu

SEQ ID NO: 53458 - RNA, 25 nt, Artificial Sequence
  Description of Artificial Sequence: Synthetic oligonucleotide
ugagauugugucagcccuggacuac

SEQ ID NO: 53459 - RNA, 25 nt, Artificial Sequence
  Description of Artificial Sequence: Synthetic oligonucleotide
ccugcacucggagaagaacguggug

SEQ ID NO: 53460 - RNA, 25 nt, Artificial Sequence
  Description of Artificial Sequence: Synthetic oligonucleotide
guaccgggaccucaagcuggagaac

SEQ ID NO: 53461 - RNA, 25 nt, Artificial Sequence
  Description of Artificial Sequence: Synthetic oligonucleotide
ccucaugcuggacaaggacgggcac

SEQ ID NO: 53462 - RNA, 25 nt, Artificial Sequence
  Description of Artificial Sequence: Synthetic oligonucleotide
cauuaagaucacagacuucgggcug

SEQ ID NO: 53463 - RNA, 25 nt, Artificial Sequence
  Description of Artificial Sequence: Synthetic oligonucleotide
gugcaaggaggggaucaaggacggu

SEQ ID NO: 53464 - RNA, 25 nt, Artificial Sequence
  Description of Artificial Sequence: Synthetic oligonucleotide
ugccaccaugaagaccuuuugcggc

SEQ ID NO: 53465 - RNA, 25 nt, Artificial Sequence
  Description of Artificial Sequence: Synthetic oligonucleotide
cacaccugaguaccuggcccccgag

SEQ ID NO: 53466 - RNA, 25 nt, Artificial Sequence
  Description of Artificial Sequence: Synthetic oligonucleotide
ggugcuggaggacaaugacuacggc

SEQ ID NO: 53467 - RNA, 25 nt, Artificial Sequence
  Description of Artificial Sequence: Synthetic oligonucleotide
ccgugcaguggacuggugggggcug

SEQ ID NO: 53468 - RNA, 25 nt, Artificial Sequence
  Description of Artificial Sequence: Synthetic oligonucleotide
gggcguggucauguacgagaugaug

SEQ ID NO: 53469 - RNA, 25 nt, Artificial Sequence
  Description of Artificial Sequence: Synthetic oligonucleotide
gugcggucgccugcccuucuacaac

SEQ ID NO: 53470 - RNA, 25 nt, Artificial Sequence
  Description of Artificial Sequence: Synthetic oligonucleotide
ccaggaccaugagaagcuuuuugag

SEQ ID NO: 53471 - RNA, 25 nt, Artificial Sequence
  Description of Artificial Sequence: Synthetic oligonucleotide
gcucauccucauggaggagauccgc

SEQ ID NO: 53472 - RNA, 25 nt, Artificial Sequence
  Description of Artificial Sequence: Synthetic oligonucleotide
cuucccgcgcacgcuuggucccgag

SEQ ID NO: 53473 - RNA, 25 nt, Artificial Sequence
  Description of Artificial Sequence: Synthetic oligonucleotide
ggccaaguccuugcuuucagggcug

SEQ ID NO: 53474 - RNA, 25 nt, Artificial Sequence
  Description of Artificial Sequence: Synthetic oligonucleotide
gcucaagaaggaccccaagcagagg

SEQ ID NO: 53475 - RNA, 25 nt, Artificial Sequence
  Description of Artificial Sequence: Synthetic oligonucleotide
gcuuggcgggggcuccgaggacgcc

SEQ ID NO: 53476 - RNA, 25 nt, Artificial Sequence
  Description of Artificial Sequence: Synthetic oligonucleotide
caaggagaucaugcagcaucgcuuc

SEQ ID NO: 53477 - RNA, 25 nt, Artificial Sequence
  Description of Artificial Sequence: Synthetic oligonucleotide
cuuugccgguaucguguggcagcac

SEQ ID NO: 53478 - RNA, 25 nt, Artificial Sequence
  Description of Artificial Sequence: Synthetic oligonucleotide
cguguacgagaagaagcucagccca

SEQ ID NO: 53479 - RNA, 25 nt, Artificial Sequence
  Description of Artificial Sequence: Synthetic oligonucleotide
acccuucaagccccaggucacgucg

SEQ ID NO: 53480 - RNA, 25 nt, Artificial Sequence
  Description of Artificial Sequence: Synthetic oligonucleotide
ggagacugacaccagguauuuugau

SEQ ID NO: 53481 - RNA, 25 nt, Artificial Sequence
  Description of Artificial Sequence: Synthetic oligonucleotide
ugaggaguucacggcccagaugauc

SEQ ID NO: 53482 - RNA, 25 nt, Artificial Sequence
  Description of Artificial Sequence: Synthetic oligonucleotide
caccaucacaccaccugaccaagau

SEQ ID NO: 53483 - RNA, 25 nt, Artificial Sequence
  Description of Artificial Sequence: Synthetic oligonucleotide
ugacagcauggaguguguggacagc

SEQ ID NO: 53484 - RNA, 25 nt, Artificial Sequence
  Description of Artificial Sequence: Synthetic oligonucleotide
cgagcgcaggccccacuucccccag

SEQ ID NO: 53485 - RNA, 25 nt, Artificial Sequence
  Description of Artificial Sequence: Synthetic oligonucleotide
guucuccuacucggccagcggcacg

SEQ ID NO: 53486 - RNA, 25 nt, Artificial Sequence
  Description of Artificial Sequence: Synthetic oligonucleotide
ggccugaggcggcgguggacugcgc

SEQ ID NO: 53487 - RNA, 25 nt, Artificial Sequence
  Description of Artificial Sequence: Synthetic oligonucleotide
cuggacgauagcuuggagggaugga

SEQ ID NO: 53488 - RNA, 25 nt, Artificial Sequence
  Description of Artificial Sequence: Synthetic oligonucleotide
agaggcggccucgugccaugaucug

SEQ ID NO: 53489 - RNA, 25 nt, Artificial Sequence
  Description of Artificial Sequence: Synthetic oligonucleotide
guauuuaaugguuuuuauuucucgg

SEQ ID NO: 53490 - RNA, 25 nt, Artificial Sequence
  Description of Artificial Sequence: Synthetic oligonucleotide
ggugcauuugagagaagccacgcug

SEQ ID NO: 53491 - RNA, 25 nt, Artificial Sequence
  Description of Artificial Sequence: Synthetic oligonucleotide
guccucucgagcccagauggaaaga

SEQ ID NO: 53492 - RNA, 25 nt, Artificial Sequence
  Description of Artificial Sequence: Synthetic oligonucleotide
acguuuuugugcugugggcagcacc

SEQ ID NO: 53493 - RNA, 25 nt, Artificial Sequence
  Description of Artificial Sequence: Synthetic oligonucleotide
ccucccccgcagcgggguagggaag

SEQ ID NO: 53494 - RNA, 25 nt, Artificial Sequence
  Description of Artificial Sequence: Synthetic oligonucleotide
gaaaacuauccugcggguuuuaauu

SEQ ID NO: 53495 - RNA, 25 nt, Artificial Sequence
  Description of Artificial Sequence: Synthetic oligonucleotide
uuauuucauccaguuuguucuccgg

SEQ ID NO: 53496 - RNA, 25 nt, Artificial Sequence
  Description of Artificial Sequence: Synthetic oligonucleotide
gguguggccucagcccucagaacaa

SEQ ID NO: 53497 - RNA, 25 nt, Artificial Sequence
  Description of Artificial Sequence: Synthetic oligonucleotide
auccgauucacguagggaaauguua

SEQ ID NO: 53498 - RNA, 25 nt, Artificial Sequence
  Description of Artificial Sequence: Synthetic oligonucleotide
aaggacuucugcagcuaugcgcaau

SEQ ID NO: 53499 - RNA, 25 nt, Artificial Sequence
  Description of Artificial Sequence: Synthetic oligonucleotide
uguggcauuggggggccgggcaggu

SEQ ID NO: 53500 - RNA, 25 nt, Artificial Sequence
  Description of Artificial Sequence: Synthetic oligonucleotide
uccugcccauguguccccucacucu

SEQ ID NO: 53501 - RNA, 25 nt, Artificial Sequence
  Description of Artificial Sequence: Synthetic oligonucleotide
ugucagccagccgcccugggcuguc

SEQ ID NO: 53502 - RNA, 25 nt, Artificial Sequence
  Description of Artificial Sequence: Synthetic oligonucleotide
cugucaccagcuaucugucaucucu

SEQ ID NO: 53503 - RNA, 25 nt, Artificial Sequence
  Description of Artificial Sequence: Synthetic oligonucleotide
ucuggggcccugggccucaguucaa

SEQ ID NO: 53504 - RNA, 25 nt, Artificial Sequence
  Description of Artificial Sequence: Synthetic oligonucleotide
accugguggcaccagaugcaaccuc

SEQ ID NO: 53505 - RNA, 25 nt, Artificial Sequence
  Description of Artificial Sequence: Synthetic oligonucleotide
cacuaugguaugcuggccagcaccc

SEQ ID NO: 53506 - RNA, 25 nt, Artificial Sequence
  Description of Artificial Sequence: Synthetic oligonucleotide
cucuccuggggguggcaggcacaca

SEQ ID NO: 53507 - RNA, 25 nt, Artificial Sequence
  Description of Artificial Sequence: Synthetic oligonucleotide
agcagccccccagcacuaaggccgu

SEQ ID NO: 53508 - RNA, 25 nt, Artificial Sequence
  Description of Artificial Sequence: Synthetic oligonucleotide
ugucucugaggacgucaucggaggc

SEQ ID NO: 53509 - RNA, 25 nt, Artificial Sequence
  Description of Artificial Sequence: Synthetic oligonucleotide
cugggccccugggaugggaccaggg

SEQ ID NO: 53510 - RNA, 25 nt, Artificial Sequence
  Description of Artificial Sequence: Synthetic oligonucleotide
gaugggggaugggccaggguuuacc

SEQ ID NO: 53511 - RNA, 25 nt, Artificial Sequence
  Description of Artificial Sequence: Synthetic oligonucleotide
ccagugggacagaggagcaagguuu

SEQ ID NO: 53512 - RNA, 25 nt, Artificial Sequence
  Description of Artificial Sequence: Synthetic oligonucleotide
uaaauuuguuauuguguauuauguu

SEQ ID NO: 53513 - RNA, 25 nt, Artificial Sequence
  Description of Artificial Sequence: Synthetic oligonucleotide
uguucaaaugcauuuuggggguuuu

SEQ ID NO: 53514 - RNA, 25 nt, Artificial Sequence
  Description of Artificial Sequence: Synthetic oligonucleotide
ucccccuuccccuucugugucacag

SEQ ID NO: 53515 - RNA, 25 nt, Artificial Sequence
  Description of Artificial Sequence: Synthetic oligonucleotide
guucuuggugacugucccaccggga

SEQ ID NO: 53516 - RNA, 25 nt, Artificial Sequence
  Description of Artificial Sequence: Synthetic oligonucleotide
agccucccccucagaugaucucucc

SEQ ID NO: 53517 - RNA, 25 nt, Artificial Sequence
  Description of Artificial Sequence: Synthetic oligonucleotide
cacgguagcacuugaccuuuucgac

SEQ ID NO: 53518 - RNA, 25 nt, Artificial Sequence
  Description of Artificial Sequence: Synthetic oligonucleotide
cgcuuaaccuuuccgcugucgcccc

SEQ ID NO: 53519 - RNA, 25 nt, Artificial Sequence
  Description of Artificial Sequence: Synthetic oligonucleotide
caggcccucccugacucccuguggg

SEQ ID NO: 53520 - RNA, 25 nt, Artificial Sequence
  Description of Artificial Sequence: Synthetic oligonucleotide
ggguggccaucccugggccccucca

SEQ ID NO: 53521 - RNA, 25 nt, Artificial Sequence
  Description of Artificial Sequence: Synthetic oligonucleotide
acgccuccuggccagacgcugccgc

SEQ ID NO: 53522 - RNA, 25 nt, Artificial Sequence
  Description of Artificial Sequence: Synthetic oligonucleotide
cugccgcugcaccacggcguuuuuu

SEQ ID NO: 53523 - RNA, 25 nt, Artificial Sequence
  Description of Artificial Sequence: Synthetic oligonucleotide
uuacaacauucaacuuuaguauuuu

SEQ ID NO: 53524 - RNA, 25 nt, Artificial Sequence
  Description of Artificial Sequence: Synthetic oligonucleotide
uuacuauuauaauauaauauggaac

SEQ ID NO: 53525 - RNA, 25 nt, Artificial Sequence
  Description of Artificial Sequence: Synthetic oligonucleotide
ccuucccuccaaauucuucaauaaa

SEQ ID NO: 53526 - RNA, 25 nt, Artificial Sequence
  Description of Artificial Sequence: Synthetic oligonucleotide
gcgcccggacgcggcggcccggggc

SEQ ID NO: 53527 - RNA, 25 nt, Artificial Sequence
  Description of Artificial Sequence: Synthetic oligonucleotide
cuuagggaaggccgagccagccugg

SEQ ID NO: 53528 - RNA, 25 nt, Artificial Sequence
  Description of Artificial Sequence: Synthetic oligonucleotide
ggucaaagaagucaaaggggcugcc

SEQ ID NO: 53529 - RNA, 25 nt, Artificial Sequence
  Description of Artificial Sequence: Synthetic oligonucleotide
cuggaggaggcagccugucagcugg

SEQ ID NO: 53530 - RNA, 25 nt, Artificial Sequence
  Description of Artificial Sequence: Synthetic oligonucleotide
gugcaucagaggcuguggccaggcc

SEQ ID NO: 53531 - RNA, 25 nt, Artificial Sequence
  Description of Artificial Sequence: Synthetic oligonucleotide
cagcugggcucggggagcgccagcc

SEQ ID NO: 53532 - RNA, 25 nt, Artificial Sequence
  Description of Artificial Sequence: Synthetic oligonucleotide
cugagaggagcgcgugagcgucgcg

SEQ ID NO: 53533 - RNA, 25 nt, Artificial Sequence
  Description of Artificial Sequence: Synthetic oligonucleotide
gggagccucgggcaccaugagcgac

SEQ ID NO: 53534 - RNA, 25 nt, Artificial Sequence
  Description of Artificial Sequence: Synthetic oligonucleotide
cguggcuauugugaaggaggguugg

SEQ ID NO: 53535 - RNA, 25 nt, Artificial Sequence
  Description of Artificial Sequence: Synthetic oligonucleotide
gcugcacaaacgaggggaguacauc

SEQ ID NO: 53536 - RNA, 25 nt, Artificial Sequence
  Description of Artificial Sequence: Synthetic oligonucleotide
caagaccuggcggccacgcuacuuc

SEQ ID NO: 53537 - RNA, 25 nt, Artificial Sequence
  Description of Artificial Sequence: Synthetic oligonucleotide
ccuccucaagaaugauggcaccuuc

SEQ ID NO: 53538 - RNA, 25 nt, Artificial Sequence
  Description of Artificial Sequence: Synthetic oligonucleotide
cauuggcuacaaggagcggccgcag

SEQ ID NO: 53539 - RNA, 25 nt, Artificial Sequence
  Description of Artificial Sequence: Synthetic oligonucleotide
ggauguggaccaacgugaggcuccc

SEQ ID NO: 53540 - RNA, 25 nt, Artificial Sequence
  Description of Artificial Sequence: Synthetic oligonucleotide
ccucaacaacuucucuguggcgcag

SEQ ID NO: 53541 - RNA, 25 nt, Artificial Sequence
  Description of Artificial Sequence: Synthetic oligonucleotide
gugccagcugaugaagacggagcgg

SEQ ID NO: 53542 - RNA, 25 nt, Artificial Sequence
  Description of Artificial Sequence: Synthetic oligonucleotide
gccccggcccaacaccuucaucauc

SEQ ID NO: 53543 - RNA, 25 nt, Artificial Sequence
  Description of Artificial Sequence: Synthetic oligonucleotide
ccgcugccugcaguggaccacuguc

SEQ ID NO: 53544 - RNA, 25 nt, Artificial Sequence
  Description of Artificial Sequence: Synthetic oligonucleotide
caucgaacgcaccuuccauguggag

SEQ ID NO: 53545 - RNA, 25 nt, Artificial Sequence
  Description of Artificial Sequence: Synthetic oligonucleotide
gacuccugaggagcgggaggagugg

SEQ ID NO: 53546 - RNA, 25 nt, Artificial Sequence
  Description of Artificial Sequence: Synthetic oligonucleotide
gacaaccgccauccagacuguggcu

SEQ ID NO: 53547 - RNA, 25 nt, Artificial Sequence
  Description of Artificial Sequence: Synthetic oligonucleotide
ugacggccucaagaagcaggaggag

SEQ ID NO: 53548 - RNA, 25 nt, Artificial Sequence
  Description of Artificial Sequence: Synthetic oligonucleotide
ggaggagauggacuuccggucgggc

SEQ ID NO: 53549 - RNA, 25 nt, Artificial Sequence
  Description of Artificial Sequence: Synthetic oligonucleotide
cucacccagugacaacucaggggcu

SEQ ID NO: 53550 - RNA, 25 nt, Artificial Sequence
  Description of Artificial Sequence: Synthetic oligonucleotide
ugaagagauggaggugucccuggcc

SEQ ID NO: 53551 - RNA, 25 nt, Artificial Sequence
  Description of Artificial Sequence: Synthetic oligonucleotide
caagcccaagcaccgcgugaccaug

SEQ ID NO: 53552 - RNA, 25 nt, Artificial Sequence
  Description of Artificial Sequence: Synthetic oligonucleotide
gaacgaguuugaguaccugaagcug

SEQ ID NO: 53553 - RNA, 25 nt, Artificial Sequence
  Description of Artificial Sequence: Synthetic oligonucleotide
gcugggcaagggcacuuucggcaag

SEQ ID NO: 53554 - RNA, 25 nt, Artificial Sequence
  Description of Artificial Sequence: Synthetic oligonucleotide
ggugauccuggugaaggagaaggcc

SEQ ID NO: 53555 - RNA, 25 nt, Artificial Sequence
  Description of Artificial Sequence: Synthetic oligonucleotide
cacaggccgcuacuacgccaugaag

SEQ ID NO: 53556 - RNA, 25 nt, Artificial Sequence
  Description of Artificial Sequence: Synthetic oligonucleotide
gauccucaagaaggaagucaucgug

SEQ ID NO: 53557 - RNA, 25 nt, Artificial Sequence
  Description of Artificial Sequence: Synthetic oligonucleotide
ggccaaggacgagguggcccacaca

SEQ ID NO: 53558 - RNA, 25 nt, Artificial Sequence
  Description of Artificial Sequence: Synthetic oligonucleotide
acucaccgagaaccgcguccugcag

SEQ ID NO: 53559 - RNA, 25 nt, Artificial Sequence
  Description of Artificial Sequence: Synthetic oligonucleotide
gaacuccaggcaccccuuccucaca

SEQ ID NO: 53560 - RNA, 25 nt, Artificial Sequence
  Description of Artificial Sequence: Synthetic oligonucleotide
agcccugaaguacucuuuccagacc

SEQ ID NO: 53561 - RNA, 25 nt, Artificial Sequence
  Description of Artificial Sequence: Synthetic oligonucleotide
ccacgaccgccucugcuuugucaug

SEQ ID NO: 53562 - RNA, 25 nt, Artificial Sequence
  Description of Artificial Sequence: Synthetic oligonucleotide
ggaguacgccaacgggggcgagcug

SEQ ID NO: 53563 - RNA, 25 nt, Artificial Sequence
  Description of Artificial Sequence: Synthetic oligonucleotide
guucuuccaccugucccgggagcgu

SEQ ID NO: 53564 - RNA, 25 nt, Artificial Sequence
  Description of Artificial Sequence: Synthetic oligonucleotide
uguguucuccgaggaccgggcccgc

SEQ ID NO: 53565 - RNA, 25 nt, Artificial Sequence
  Description of Artificial Sequence: Synthetic oligonucleotide
cuucuauggcgcugagauuguguca

SEQ ID NO: 53566 - RNA, 25 nt, Artificial Sequence
  Description of Artificial Sequence: Synthetic oligonucleotide
agcccuggacuaccugcacucggag

SEQ ID NO: 53567 - RNA, 25 nt, Artificial Sequence
  Description of Artificial Sequence: Synthetic oligonucleotide
gaagaacgugguguaccgggaccuc

SEQ ID NO: 53568 - RNA, 25 nt, Artificial Sequence
  Description of Artificial Sequence: Synthetic oligonucleotide
caagcuggagaaccucaugcuggac

SEQ ID NO: 53569 - RNA, 25 nt, Artificial Sequence
  Description of Artificial Sequence: Synthetic oligonucleotide
caaggacgggcacauuaagaucaca

SEQ ID NO: 53570 - RNA, 25 nt, Artificial Sequence
  Description of Artificial Sequence: Synthetic oligonucleotide
agacuucgggcugugcaaggagggg

SEQ ID NO: 53571 - RNA, 25 nt, Artificial Sequence
  Description of Artificial Sequence: Synthetic oligonucleotide
gaucaaggacggugccaccaugaag

SEQ ID NO: 53572 - RNA, 25 nt, Artificial Sequence
  Description of Artificial Sequence: Synthetic oligonucleotide
gaccuuuugcggcacaccugaguac

SEQ ID NO: 53573 - RNA, 25 nt, Artificial Sequence
  Description of Artificial Sequence: Synthetic oligonucleotide
ccuggcccccgaggugcuggaggac

SEQ ID NO: 53574 - RNA, 25 nt, Artificial Sequence
  Description of Artificial Sequence: Synthetic oligonucleotide
caaugacuacggccgugcaguggac

SEQ ID NO: 53575 - RNA, 25 nt, Artificial Sequence
  Description of Artificial Sequence: Synthetic oligonucleotide
cuggugggggcugggcguggucaug

SEQ ID NO: 53576 - RNA, 25 nt, Artificial Sequence
  Description of Artificial Sequence: Synthetic oligonucleotide
guacgagaugaugugcggucgccug

SEQ ID NO: 53577 - RNA, 25 nt, Artificial Sequence
  Description of Artificial Sequence: Synthetic oligonucleotide
gcccuucuacaaccaggaccaugag

SEQ ID NO: 53578 - RNA, 25 nt, Artificial Sequence
  Description of Artificial Sequence: Synthetic oligonucleotide
gaagcuuuuugagcucauccucaug

SEQ ID NO: 53579 - RNA, 25 nt, Artificial Sequence
  Description of Artificial Sequence: Synthetic oligonucleotide
ggaggagauccgcuucccgcgcacg

SEQ ID NO: 53580 - RNA, 25 nt, Artificial Sequence
  Description of Artificial Sequence: Synthetic oligonucleotide
gcuuggucccgaggccaaguccuug

SEQ ID NO: 53581 - RNA, 25 nt, Artificial Sequence
  Description of Artificial Sequence: Synthetic oligonucleotide
gcuuucagggcugcucaagaaggac

SEQ ID NO: 53582 - RNA, 25 nt, Artificial Sequence
  Description of Artificial Sequence: Synthetic oligonucleotide
ccccaagcagaggcuuggcgggggc

SEQ ID NO: 53583 - RNA, 25 nt, Artificial Sequence
  Description of Artificial Sequence: Synthetic oligonucleotide
cuccgaggacgccaaggagaucaug

SEQ ID NO: 53584 - RNA, 25 nt, Artificial Sequence
  Description of Artificial Sequence: Synthetic oligonucleotide
gcagcaucgcuucuuugccgguauc

SEQ ID NO: 53585 - RNA, 25 nt, Artificial Sequence
  Description of Artificial Sequence: Synthetic oligonucleotide
cguguggcagcacguguacgagaag

SEQ ID NO: 53586 - RNA, 25 nt, Artificial Sequence
  Description of Artificial Sequence: Synthetic oligonucleotide
gaagcucagcccacccuucaagccc

SEQ ID NO: 53587 - RNA, 25 nt, Artificial Sequence
  Description of Artificial Sequence: Synthetic oligonucleotide
ccaggucacgucggagacugacacc

SEQ ID NO: 53588 - RNA, 25 nt, Artificial Sequence
  Description of Artificial Sequence: Synthetic oligonucleotide
cagguauuuugaugaggaguucacg

SEQ ID NO: 53589 - RNA, 25 nt, Artificial Sequence
  Description of Artificial Sequence: Synthetic oligonucleotide
accugaccaagaugacagcauggag

SEQ ID NO: 53590 - RNA, 25 nt, Artificial Sequence
  Description of Artificial Sequence: Synthetic oligonucleotide
guguguggacagcgagcgcaggccc

SEQ ID NO: 53591 - RNA, 25 nt, Artificial Sequence
  Description of Artificial Sequence: Synthetic oligonucleotide
ccacuucccccaguucuccuacucg

SEQ ID NO: 53592 - RNA, 25 nt, Artificial Sequence
  Description of Artificial Sequence: Synthetic oligonucleotide
ggccagcggcacggccugaggcggc

SEQ ID NO: 53593 - RNA, 25 nt, Artificial Sequence
  Description of Artificial Sequence: Synthetic oligonucleotide
cgguggacugcgcuggacgauagcu

SEQ ID NO: 53594 - RNA, 25 nt, Artificial Sequence
  Description of Artificial Sequence: Synthetic oligonucleotide
uuggagggauggagaggcggccucg

SEQ ID NO: 53595 - RNA, 25 nt, Artificial Sequence
  Description of Artificial Sequence: Synthetic oligonucleotide
gugccaugaucuguauuuaaugguu

SEQ ID NO: 53596 - RNA, 25 nt, Artificial Sequence
  Description of Artificial Sequence: Synthetic oligonucleotide
uuuuauuucucgggugcauuugaga

SEQ ID NO: 53597 - RNA, 25 nt, Artificial Sequence
  Description of Artificial Sequence: Synthetic oligonucleotide
agaagccacgcuguccucucgagcc

SEQ ID NO: 53598 - RNA, 25 nt, Artificial Sequence
  Description of Artificial Sequence: Synthetic oligonucleotide
ccagauggaaagacguuuuugugcu

SEQ ID NO: 53599 - RNA, 25 nt, Artificial Sequence
  Description of Artificial Sequence: Synthetic oligonucleotide
ugugggcagcacccucccccgcagc

SEQ ID NO: 53600 - RNA, 25 nt, Artificial Sequence
  Description of Artificial Sequence: Synthetic oligonucleotide
cgggguagggaagaaaacuauccug

SEQ ID NO: 53601 - RNA, 25 nt, Artificial Sequence
  Description of Artificial Sequence: Synthetic oligonucleotide
gcggguuuuaauuuauuucauccag

SEQ ID NO: 53602 - RNA, 25 nt, Artificial Sequence
  Description of Artificial Sequence: Synthetic oligonucleotide
guuuguucuccggguguggccucag

SEQ ID NO: 53603 - RNA, 25 nt, Artificial Sequence
  Description of Artificial Sequence: Synthetic oligonucleotide
gcccucagaacaauccgauucacgu

SEQ ID NO: 53604 - RNA, 25 nt, Artificial Sequence
  Description of Artificial Sequence: Synthetic oligonucleotide
uagggaaauguuaaggacuucugca

SEQ ID NO: 53605 - RNA, 25 nt, Artificial Sequence
  Description of Artificial Sequence: Synthetic oligonucleotide
agcuaugcgcaauguggcauugggg

SEQ ID NO: 53606 - RNA, 25 nt, Artificial Sequence
  Description of Artificial Sequence: Synthetic oligonucleotide
gggccgggcagguccugcccaugug

SEQ ID NO: 53607 - RNA, 25 nt, Artificial Sequence
  Description of Artificial Sequence: Synthetic oligonucleotide
guccccucacucugucagccagccg

SEQ ID NO: 53608 - RNA, 25 nt, Artificial Sequence
  Description of Artificial Sequence: Synthetic oligonucleotide
gcccugggcugucugucaccagcua

SEQ ID NO: 53609 - RNA, 25 nt, Artificial Sequence
  Description of Artificial Sequence: Synthetic oligonucleotide
aucugucaucucucuggggcccugg

SEQ ID NO: 53610 - RNA, 25 nt, Artificial Sequence
  Description of Artificial Sequence: Synthetic oligonucleotide
ggccucaguucaaccugguggcacc

SEQ ID NO: 53611 - RNA, 25 nt, Artificial Sequence
  Description of Artificial Sequence: Synthetic oligonucleotide
cagaugcaaccucacuaugguaugc

SEQ ID NO: 53612 - RNA, 25 nt, Artificial Sequence
  Description of Artificial Sequence: Synthetic oligonucleotide
cuggccagcacccucuccugggggu

SEQ ID NO: 53613 - RNA, 25 nt, Artificial Sequence
  Description of Artificial Sequence: Synthetic oligonucleotide
uggcaggcacacagcagccccccag

SEQ ID NO: 53614 - RNA, 25 nt, Artificial Sequence
  Description of Artificial Sequence: Synthetic oligonucleotide
gcacuaaggccgugucucugaggac

SEQ ID NO: 53615 - RNA, 25 nt, Artificial Sequence
  Description of Artificial Sequence: Synthetic oligonucleotide
cgucaucggaggcugggccccuggg

SEQ ID NO: 53616 - RNA, 25 nt, Artificial Sequence
  Description of Artificial Sequence: Synthetic oligonucleotide
gaugggaccagggaugggggauggg

SEQ ID NO: 53617 - RNA, 25 nt, Artificial Sequence
  Description of Artificial Sequence: Synthetic oligonucleotide
gccaggguuuacccagugggacaga

SEQ ID NO: 53618 - RNA, 25 nt, Artificial Sequence
  Description of Artificial Sequence: Synthetic oligonucleotide
aggagcaagguuuaaauuuguuauu

SEQ ID NO: 53619 - RNA, 25 nt, Artificial Sequence
  Description of Artificial Sequence: Synthetic oligonucleotide
uguguauuauguuguucaaaugcau

SEQ ID NO: 53620 - RNA, 25 nt, Artificial Sequence
  Description of Artificial Sequence: Synthetic oligonucleotide
uuuuggggguuuuuaaucuuuguga

SEQ ID NO: 53621 - RNA, 25 nt, Artificial Sequence
  Description of Artificial Sequence: Synthetic oligonucleotide
acaggaaagcccucccccuuccccu

SEQ ID NO: 53622 - RNA, 25 nt, Artificial Sequence
  Description of Artificial Sequence: Synthetic oligonucleotide
uucugugucacaguucuuggugacu

SEQ ID NO: 53623 - RNA, 25 nt, Artificial Sequence
  Description of Artificial Sequence: Synthetic oligonucleotide
ugucccaccgggagccucccccuca

SEQ ID NO: 53624 - RNA, 25 nt, Artificial Sequence
  Description of Artificial Sequence: Synthetic oligonucleotide
agaugaucucuccacgguagcacuu

SEQ ID NO: 53625 - RNA, 25 nt, Artificial Sequence
  Description of Artificial Sequence: Synthetic oligonucleotide
ugaccuuuucgacgcuuaaccuuuc

SEQ ID NO: 53626 - RNA, 25 nt, Artificial Sequence
  Description of Artificial Sequence: Synthetic oligonucleotide
ccgcugucgccccaggcccucccug

SEQ ID NO: 53627 - RNA, 25 nt, Artificial Sequence
  Description of Artificial Sequence: Synthetic oligonucleotide
gacucccuguggggguggccauccc

SEQ ID NO: 53628 - RNA, 25 nt, Artificial Sequence
  Description of Artificial Sequence: Synthetic oligonucleotide
cugggccccuccacgccuccuggcc

SEQ ID NO: 53629 - RNA, 25 nt, Artificial Sequence
  Description of Artificial Sequence: Synthetic oligonucleotide
cagacgcugccgcugccgcugcacc

SEQ ID NO: 53630 - RNA, 25 nt, Artificial Sequence
  Description of Artificial Sequence: Synthetic oligonucleotide
cacggcguuuuuuuacaacauucaa

SEQ ID NO: 53631 - RNA, 25 nt, Artificial Sequence
  Description of Artificial Sequence: Synthetic oligonucleotide
acuuuaguauuuuuacuauuauaau

SEQ ID NO: 53632 - RNA, 25 nt, Artificial Sequence
  Description of Artificial Sequence: Synthetic oligonucleotide
uauaauauggaaccuucccuccaaa

SEQ ID NO: 53633 - RNA, 25 nt, Artificial Sequence
  Description of Artificial Sequence: Synthetic oligonucleotide
auucuucaauaaaaguugcuuuuca

SEQ ID NO: 53634 - RNA, 25 nt, Artificial Sequence
  Description of Artificial Sequence: Synthetic oligonucleotide
uaauuaugggucuguaaccacccug

SEQ ID NO: 53635 - RNA, 25 nt, Artificial Sequence
  Description of Artificial Sequence: Synthetic oligonucleotide
ggacugggugcuccucacugacgga

SEQ ID NO: 53636 - RNA, 25 nt, Artificial Sequence
  Description of Artificial Sequence: Synthetic oligonucleotide
acuugucugaaccucucuuugucuc

SEQ ID NO: 53637 - RNA, 25 nt, Artificial Sequence
  Description of Artificial Sequence: Synthetic oligonucleotide
ccagcgcccagcacugggccuggca

SEQ ID NO: 53638 - RNA, 25 nt, Artificial Sequence
  Description of Artificial Sequence: Synthetic oligonucleotide
aaaaccugagacgcccgguacaugu

SEQ ID NO: 53639 - RNA, 25 nt, Artificial Sequence
  Description of Artificial Sequence: Synthetic oligonucleotide
uuggccaaaugaaugaaccagauuc

SEQ ID NO: 53640 - RNA, 25 nt, Artificial Sequence
  Description of Artificial Sequence: Synthetic oligonucleotide
cagaccggcaggggcgcugugguuu

SEQ ID NO: 53641 - RNA, 25 nt, Artificial Sequence
  Description of Artificial Sequence: Synthetic oligonucleotide
uaggaggggccugggguuucuccca

SEQ ID NO: 53642 - RNA, 25 nt, Artificial Sequence
  Description of Artificial Sequence: Synthetic oligonucleotide
aggagguuuuugggcuugcgcugga

SEQ ID NO: 53643 - RNA, 25 nt, Artificial Sequence
  Description of Artificial Sequence: Synthetic oligonucleotide
agggcucuggacucccguuugcgcc

SEQ ID NO: 53644 - RNA, 25 nt, Artificial Sequence
  Description of Artificial Sequence: Synthetic oligonucleotide
caguggccugcauccugguccuguc

SEQ ID NO: 53645 - RNA, 25 nt, Artificial Sequence
  Description of Artificial Sequence: Synthetic oligonucleotide
cuuccucauguuugaauuucuuugc

SEQ ID NO: 53646 - RNA, 25 nt, Artificial Sequence
  Description of Artificial Sequence: Synthetic oligonucleotide
cuuuccuagucuggggagcagggag

SEQ ID NO: 53647 - RNA, 25 nt, Artificial Sequence
  Description of Artificial Sequence: Synthetic oligonucleotide
ggagcccugugcccugucccaggau

SEQ ID NO: 53648 - RNA, 25 nt, Artificial Sequence
  Description of Artificial Sequence: Synthetic oligonucleotide
uccauggguaggaacaccauggaca

SEQ ID NO: 53649 - RNA, 25 nt, Artificial Sequence
  Description of Artificial Sequence: Synthetic oligonucleotide
agggagagcaaacggggccaucugu

SEQ ID NO: 53650 - RNA, 25 nt, Artificial Sequence
  Description of Artificial Sequence: Synthetic oligonucleotide
ucaccaggggcuuagggaaggccga

SEQ ID NO: 53651 - RNA, 25 nt, Artificial Sequence
  Description of Artificial Sequence: Synthetic oligonucleotide
agccagccugggucaaagaagucaa

SEQ ID NO: 53652 - RNA, 25 nt, Artificial Sequence
  Description of Artificial Sequence: Synthetic oligonucleotide
aaggggcugccuggaggaggcagcc

SEQ ID NO: 53653 - RNA, 25 nt, Artificial Sequence
  Description of Artificial Sequence: Synthetic oligonucleotide
cugucagcuggugcaucagaggcug

SEQ ID NO: 53654 - RNA, 25 nt, Artificial Sequence
  Description of Artificial Sequence: Synthetic oligonucleotide
guggccaggccagcugggcucgggg

SEQ ID NO: 53655 - RNA, 25 nt, Artificial Sequence
  Description of Artificial Sequence: Synthetic oligonucleotide
gagcgccagccugagaggagcgcgu

SEQ ID NO: 53656 - RNA, 25 nt, Artificial Sequence
  Description of Artificial Sequence: Synthetic oligonucleotide
ugagcgucgcgggagccucgggcac

SEQ ID NO: 53657 - RNA, 25 nt, Artificial Sequence
  Description of Artificial Sequence: Synthetic oligonucleotide
ccaugagcgacguggcuauugugaa

SEQ ID NO: 53658 - RNA, 25 nt, Artificial Sequence
  Description of Artificial Sequence: Synthetic oligonucleotide
aggaggguuggcugcacaaacgagg

SEQ ID NO: 53659 - RNA, 25 nt, Artificial Sequence
  Description of Artificial Sequence: Synthetic oligonucleotide
gggaguacaucaagaccuggcggcc

SEQ ID NO: 53660 - RNA, 25 nt, Artificial Sequence
  Description of Artificial Sequence: Synthetic oligonucleotide
cacgcuacuuccuccucaagaauga

SEQ ID NO: 53661 - RNA, 25 nt, Artificial Sequence
  Description of Artificial Sequence: Synthetic oligonucleotide
auggcaccuucauuggcuacaagga

SEQ ID NO: 53662 - RNA, 25 nt, Artificial Sequence
  Description of Artificial Sequence: Synthetic oligonucleotide
agcggccgcaggauguggaccaacg

SEQ ID NO: 53663 - RNA, 25 nt, Artificial Sequence
  Description of Artificial Sequence: Synthetic oligonucleotide
gugaggcuccccucaacaacuucuc

SEQ ID NO: 53664 - RNA, 25 nt, Artificial Sequence
  Description of Artificial Sequence: Synthetic oligonucleotide
cuguggcgcagugccagcugaugaa

SEQ ID NO: 53665 - RNA, 25 nt, Artificial Sequence
  Description of Artificial Sequence: Synthetic oligonucleotide
agacggagcggccccggcccaacac

SEQ ID NO: 53666 - RNA, 25 nt, Artificial Sequence
  Description of Artificial Sequence: Synthetic oligonucleotide
ccuucaucauccgcugccugcagug

SEQ ID NO: 53667 - RNA, 25 nt, Artificial Sequence
  Description of Artificial Sequence: Synthetic oligonucleotide
ggaccacugucaucgaacgcaccuu

SEQ ID NO: 53668 - RNA, 25 nt, Artificial Sequence
  Description of Artificial Sequence: Synthetic oligonucleotide
uccauguggagacuccugaggagcg

SEQ ID NO: 53669 - RNA, 25 nt, Artificial Sequence
  Description of Artificial Sequence: Synthetic oligonucleotide
gggaggaguggacaaccgccaucca

SEQ ID NO: 53670 - RNA, 25 nt, Artificial Sequence
  Description of Artificial Sequence: Synthetic oligonucleotide
agacuguggcugacggccucaagaa

SEQ ID NO: 53671 - RNA, 25 nt, Artificial Sequence
  Description of Artificial Sequence: Synthetic oligonucleotide
agcaggaggaggaggagauggacuu

SEQ ID NO: 53672 - RNA, 25 nt, Artificial Sequence
  Description of Artificial Sequence: Synthetic oligonucleotide
uccggucgggcucacccagugacaa

SEQ ID NO: 53673 - RNA, 25 nt, Artificial Sequence
  Description of Artificial Sequence: Synthetic oligonucleotide
acucaggggcugaagagauggaggu

SEQ ID NO: 53674 - RNA, 25 nt, Artificial Sequence
  Description of Artificial Sequence: Synthetic oligonucleotide
ugucccuggccaagcccaagcaccg

SEQ ID NO: 53675 - RNA, 25 nt, Artificial Sequence
  Description of Artificial Sequence: Synthetic oligonucleotide
gcgugaccaugaacgaguuugagua

SEQ ID NO: 53676 - RNA, 25 nt, Artificial Sequence
  Description of Artificial Sequence: Synthetic oligonucleotide
accugaagcugcugggcaagggcac

SEQ ID NO: 53677 - RNA, 25 nt, Artificial Sequence
  Description of Artificial Sequence: Synthetic oligonucleotide
cuuucggcaaggugauccuggugaa

SEQ ID NO: 53678 - RNA, 25 nt, Artificial Sequence
  Description of Artificial Sequence: Synthetic oligonucleotide
aggagaaggccacaggccgcuacua

SEQ ID NO: 53679 - RNA, 25 nt, Artificial Sequence
  Description of Artificial Sequence: Synthetic oligonucleotide
acgccaugaagauccucaagaagga

SEQ ID NO: 53680 - RNA, 25 nt, Artificial Sequence
  Description of Artificial Sequence: Synthetic oligonucleotide
aagucaucguggccaaggacgaggu

SEQ ID NO: 53681 - RNA, 25 nt, Artificial Sequence
  Description of Artificial Sequence: Synthetic oligonucleotide
uggcccacacacucaccgagaaccg

SEQ ID NO: 53682 - RNA, 25 nt, Artificial Sequence
  Description of Artificial Sequence: Synthetic oligonucleotide
gcguccugcagaacuccaggcaccc

SEQ ID NO: 53683 - RNA, 25 nt, Artificial Sequence
  Description of Artificial Sequence: Synthetic oligonucleotide
ccuuccucacagcccugaaguacuc

SEQ ID NO: 53684 - RNA, 25 nt, Artificial Sequence
  Description of Artificial Sequence: Synthetic oligonucleotide
cuuuccagacccacgaccgccucug

SEQ ID NO: 53685 - RNA, 25 nt, Artificial Sequence
  Description of Artificial Sequence: Synthetic oligonucleotide
gcuuugucauggaguacgccaacgg

SEQ ID NO: 53686 - RNA, 25 nt, Artificial Sequence
  Description of Artificial Sequence: Synthetic oligonucleotide
ggggcgagcuguucuuccaccuguc

SEQ ID NO: 53687 - RNA, 25 nt, Artificial Sequence
  Description of Artificial Sequence: Synthetic oligonucleotide
cccgggagcguguguucuccgagga

SEQ ID NO: 53688 - RNA, 25 nt, Artificial Sequence
  Description of Artificial Sequence: Synthetic oligonucleotide
accgggcccgcuucuauggcgcuga

SEQ ID NO: 53689 - RNA, 25 nt, Artificial Sequence
  Description of Artificial Sequence: Synthetic oligonucleotide
agauugugucagcccuggacuaccu

SEQ ID NO: 53690 - RNA, 25 nt, Artificial Sequence
  Description of Artificial Sequence: Synthetic oligonucleotide
ugcacucggagaagaacguggugua

SEQ ID NO: 53691 - RNA, 25 nt, Artificial Sequence
  Description of Artificial Sequence: Synthetic oligonucleotide
accgggaccucaagcuggagaaccu

SEQ ID NO: 53692 - RNA, 25 nt, Artificial Sequence
  Description of Artificial Sequence: Synthetic oligonucleotide
ucaugcuggacaaggacgggcacau

SEQ ID NO: 53693 - RNA, 25 nt, Artificial Sequence
  Description of Artificial Sequence: Synthetic oligonucleotide
uuaagaucacagacuucgggcugug

SEQ ID NO: 53694 - RNA, 25 nt, Artificial Sequence
  Description of Artificial Sequence: Synthetic oligonucleotide
gcaaggaggggaucaaggacggugc

SEQ ID NO: 53695 - RNA, 25 nt, Artificial Sequence
  Description of Artificial Sequence: Synthetic oligonucleotide
ccaccaugaagaccuuuugcggcac

SEQ ID NO: 53696 - RNA, 25 nt, Artificial Sequence
  Description of Artificial Sequence: Synthetic oligonucleotide
caccugaguaccuggcccccgaggu

SEQ ID NO: 53697 - RNA, 25 nt, Artificial Sequence
  Description of Artificial Sequence: Synthetic oligonucleotide
ugcuggaggacaaugacuacggccg

SEQ ID NO: 53698 - RNA, 25 nt, Artificial Sequence
  Description of Artificial Sequence: Synthetic oligonucleotide
gugcaguggacuggugggggcuggg

SEQ ID NO: 53699 - RNA, 25 nt, Artificial Sequence
  Description of Artificial Sequence: Synthetic oligonucleotide
gcguggucauguacgagaugaugug

SEQ ID NO: 53700 - RNA, 25 nt, Artificial Sequence
  Description of Artificial Sequence: Synthetic oligonucleotide
gcggucgccugcccuucuacaacca

SEQ ID NO: 53701 - RNA, 25 nt, Artificial Sequence
  Description of Artificial Sequence: Synthetic oligonucleotide
aggaccaugagaagcuuuuugagcu

SEQ ID NO: 53702 - RNA, 25 nt, Artificial Sequence
  Description of Artificial Sequence: Synthetic oligonucleotide
ucauccucauggaggagauccgcuu

SEQ ID NO: 53703 - RNA, 25 nt, Artificial Sequence
  Description of Artificial Sequence: Synthetic oligonucleotide
ucccgcgcacgcuuggucccgaggc

SEQ ID NO: 53704 - RNA, 25 nt, Artificial Sequence
  Description of Artificial Sequence: Synthetic oligonucleotide
ccaaguccuugcuuucagggcugcu

SEQ ID NO: 53705 - RNA, 25 nt, Artificial Sequence
  Description of Artificial Sequence: Synthetic oligonucleotide
ucaagaaggaccccaagcagaggcu

SEQ ID NO: 53706 - RNA, 25 nt, Artificial Sequence
  Description of Artificial Sequence: Synthetic oligonucleotide
uuggcgggggcuccgaggacgccaa

SEQ ID NO: 53707 - RNA, 25 nt, Artificial Sequence
  Description of Artificial Sequence: Synthetic oligonucleotide
aggagaucaugcagcaucgcuucuu

SEQ ID NO: 53708 - RNA, 25 nt, Artificial Sequence
  Description of Artificial Sequence: Synthetic oligonucleotide
uugccgguaucguguggcagcacgu

SEQ ID NO: 53709 - RNA, 25 nt, Artificial Sequence
  Description of Artificial Sequence: Synthetic oligonucleotide
uguacgagaagaagcucagcccacc

SEQ ID NO: 53710 - RNA, 25 nt, Artificial Sequence
  Description of Artificial Sequence: Synthetic oligonucleotide
ccuucaagccccaggucacgucgga

SEQ ID NO: 53711 - RNA, 25 nt, Artificial Sequence
  Description of Artificial Sequence: Synthetic oligonucleotide
agacugacaccagguauuuugauga

SEQ ID NO: 53712 - RNA, 25 nt, Artificial Sequence
  Description of Artificial Sequence: Synthetic oligonucleotide
aggaguucacggcccagaugaucac

SEQ ID NO: 53713 - RNA, 25 nt, Artificial Sequence
  Description of Artificial Sequence: Synthetic oligonucleotide
ccaucacaccaccugaccaagauga

SEQ ID NO: 53714 - RNA, 25 nt, Artificial Sequence
  Description of Artificial Sequence: Synthetic oligonucleotide
acagcauggaguguguggacagcga

SEQ ID NO: 53715 - RNA, 25 nt, Artificial Sequence
  Description of Artificial Sequence: Synthetic oligonucleotide
agcgcaggccccacuucccccaguu

SEQ ID NO: 53716 - RNA, 25 nt, Artificial Sequence
  Description of Artificial Sequence: Synthetic oligonucleotide
ucuccuacucggccagcggcacggc

SEQ ID NO: 53717 - RNA, 25 nt, Artificial Sequence
  Description of Artificial Sequence: Synthetic oligonucleotide
ccugaggcggcgguggacugcgcug

SEQ ID NO: 53718 - RNA, 25 nt, Artificial Sequence
  Description of Artificial Sequence: Synthetic oligonucleotide
ggacgauagcuuggagggauggaga

SEQ ID NO: 53719 - RNA, 25 nt, Artificial Sequence
  Description of Artificial Sequence: Synthetic oligonucleotide
aggcggccucgugccaugaucugua

SEQ ID NO: 53720 - RNA, 25 nt, Artificial Sequence
  Description of Artificial Sequence: Synthetic oligonucleotide
auuuaaugguuuuuauuucucgggu

SEQ ID NO: 53721 - RNA, 25 nt, Artificial Sequence
  Description of Artificial Sequence: Synthetic oligonucleotide
ugcauuugagagaagccacgcuguc

SEQ ID NO: 53722 - RNA, 25 nt, Artificial Sequence
  Description of Artificial Sequence: Synthetic oligonucleotide
ccucucgagcccagauggaaagacg

SEQ ID NO: 53723 - RNA, 25 nt, Artificial Sequence
  Description of Artificial Sequence: Synthetic oligonucleotide
guuuuugugcugugggcagcacccu

SEQ ID NO: 53724 - RNA, 25 nt, Artificial Sequence
  Description of Artificial Sequence: Synthetic oligonucleotide
ucccccgcagcgggguagggaagaa

SEQ ID NO: 53725 - RNA, 25 nt, Artificial Sequence
  Description of Artificial Sequence: Synthetic oligonucleotide
aaacuauccugcggguuuuaauuua

SEQ ID NO: 53726 - RNA, 25 nt, Artificial Sequence
  Description of Artificial Sequence: Synthetic oligonucleotide
auuucauccaguuuguucuccgggu

SEQ ID NO: 53727 - RNA, 25 nt, Artificial Sequence
  Description of Artificial Sequence: Synthetic oligonucleotide
uguggccucagcccucagaacaauc

SEQ ID NO: 53728 - RNA, 25 nt, Artificial Sequence
  Description of Artificial Sequence: Synthetic oligonucleotide
ccgauucacguagggaaauguuaag

SEQ ID NO: 53729 - RNA, 25 nt, Artificial Sequence
  Description of Artificial Sequence: Synthetic oligonucleotide
ggacuucugcagcuaugcgcaaugu

SEQ ID NO: 53730 - RNA, 25 nt, Artificial Sequence
  Description of Artificial Sequence: Synthetic oligonucleotide
uggcauuggggggccgggcaggucc

SEQ ID NO: 53731 - RNA, 25 nt, Artificial Sequence
  Description of Artificial Sequence: Synthetic oligonucleotide
cugcccauguguccccucacucugu

SEQ ID NO: 53732 - RNA, 25 nt, Artificial Sequence
  Description of Artificial Sequence: Synthetic oligonucleotide
ucagccagccgcccugggcugucug

SEQ ID NO: 53733 - RNA, 25 nt, Artificial Sequence
  Description of Artificial Sequence: Synthetic oligonucleotide
gucaccagcuaucugucaucucucu

SEQ ID NO: 53734 - RNA, 25 nt, Artificial Sequence
  Description of Artificial Sequence: Synthetic oligonucleotide
uggggcccugggccucaguucaacc

SEQ ID NO: 53735 - RNA, 25 nt, Artificial Sequence
  Description of Artificial Sequence: Synthetic oligonucleotide
cugguggcaccagaugcaaccucac

SEQ ID NO: 53736 - RNA, 25 nt, Artificial Sequence
  Description of Artificial Sequence: Synthetic oligonucleotide
cuaugguaugcuggccagcacccuc

SEQ ID NO: 53737 - RNA, 25 nt, Artificial Sequence
  Description of Artificial Sequence: Synthetic oligonucleotide
cuccuggggguggcaggcacacagc

SEQ ID NO: 53738 - RNA, 25 nt, Artificial Sequence
  Description of Artificial Sequence: Synthetic oligonucleotide
cagccccccagcacuaaggccgugu

SEQ ID NO: 53739 - RNA, 25 nt, Artificial Sequence
  Description of Artificial Sequence: Synthetic oligonucleotide
ucucugaggacgucaucggaggcug

SEQ ID NO: 53740 - RNA, 25 nt, Artificial Sequence
  Description of Artificial Sequence: Synthetic oligonucleotide
gggccccugggaugggaccagggau

SEQ ID NO: 53741 - RNA, 25 nt, Artificial Sequence
  Description of Artificial Sequence: Synthetic oligonucleotide
ugggggaugggccaggguuuaccca

SEQ ID NO: 53742 - RNA, 25 nt, Artificial Sequence
  Description of Artificial Sequence: Synthetic oligonucleotide
agugggacagaggagcaagguuuaa

SEQ ID NO: 53743 - RNA, 25 nt, Artificial Sequence
  Description of Artificial Sequence: Synthetic oligonucleotide
aauuuguuauuguguauuauguugu

SEQ ID NO: 53744 - RNA, 25 nt, Artificial Sequence
  Description of Artificial Sequence: Synthetic oligonucleotide
uucaaaugcauuuuggggguuuuua

SEQ ID NO: 53745 - RNA, 25 nt, Artificial Sequence
  Description of Artificial Sequence: Synthetic oligonucleotide
aaucuuugugacaggaaagcccucc

SEQ ID NO: 53746 - RNA, 25 nt, Artificial Sequence
  Description of Artificial Sequence: Synthetic oligonucleotide
ccccuuccccuucugugucacaguu

SEQ ID NO: 53747 - RNA, 25 nt, Artificial Sequence
  Description of Artificial Sequence: Synthetic oligonucleotide
ucuuggugacugucccaccgggagc

SEQ ID NO: 53748 - RNA, 25 nt, Artificial Sequence
  Description of Artificial Sequence: Synthetic oligonucleotide
ccucccccucagaugaucucuccac

SEQ ID NO: 53749 - RNA, 25 nt, Artificial Sequence
  Description of Artificial Sequence: Synthetic oligonucleotide
cgguagcacuugaccuuuucgacgc

SEQ ID NO: 53750 - RNA, 25 nt, Artificial Sequence
  Description of Artificial Sequence: Synthetic oligonucleotide
cuuaaccuuuccgcugucgccccag

SEQ ID NO: 53751 - RNA, 25 nt, Artificial Sequence
  Description of Artificial Sequence: Synthetic oligonucleotide
ggcccucccugacucccuguggggg

SEQ ID NO: 53752 - RNA, 25 nt, Artificial Sequence
  Description of Artificial Sequence: Synthetic oligonucleotide
guggccaucccugggccccuccacg

SEQ ID NO: 53753 - RNA, 25 nt, Artificial Sequence
  Description of Artificial Sequence: Synthetic oligonucleotide
gccuccuggccagacgcugccgcug

SEQ ID NO: 53754 - RNA, 25 nt, Artificial Sequence
  Description of Artificial Sequence: Synthetic oligonucleotide
gccgcugcaccacggcguuuuuuua

SEQ ID NO: 53755 - RNA, 25 nt, Artificial Sequence
  Description of Artificial Sequence: Synthetic oligonucleotide
acaacauucaacuuuaguauuuuua

SEQ ID NO: 53756 - RNA, 25 nt, Artificial Sequence
  Description of Artificial Sequence: Synthetic oligonucleotide
acuauuauaauauaauauggaaccu

SEQ ID NO: 53757 - RNA, 25 nt, Artificial Sequence
  Description of Artificial Sequence: Synthetic oligonucleotide
uucccuccaaauucuucaauaaaag

SEQ ID NO: 53758 - RNA, 5263 nt, Homo sapiens
cggggggggccgcgccgugcuagccguugggccugccucggaggaggcgucgccgccgccgcugccgcugccggcgccguugccgcugccgggaaacacaaggaaagggaaccagcgcagcguggcgaugggcggggguagagccccgccggagaggcugggcggcugccggugacagacugugcccuguccacggugccuccugcauguccugcugcccugagcugucccgagcuaggugacagcguaccacgcugccaccaugaaugaggugucugucaucaaagaaggcuggcuccacaagcguggugaauacaucaagaccuggaggccacgguacuuccugcugaagagcgacggcuccuucauuggguacaaggagaggcccgaggccccugaucagacucuaccccccuuaaacaacuucuccguagcagaaugccagcugaugaagaccgagaggccgcgacccaacaccuuugucauacgcugccugcaguggaccacagucaucgagaggaccuuccacguggauucuccagacgagagggaggaguggaugcgggccauccagauggucgccaacagccucaagcagcgggccccaggcgaggaccccauggacuacaaguguggcucccccagugacuccuccacgacugaggagauggaaguggcggucagcaaggcacgggcuaaagugaccaugaaugacuucgacuaucucaaacuccuuggcaagggaaccuuuggcaaagucauccuggugcgggagaaggccacuggccgcuacuacgccaugaagauccugcggaaggaagucaucauugccaaggaugaagucgcucacacagucaccgagagccggguccuccagaacaccaggcacccguuccucacugcgcugaaguaugccuuccagacccacgaccgccugugcuuugugauggaguaugccaacgggggugagcuguucuuccaccugucccgggagcgugucuucacagaggagcgggcccgguuuuauggugcagagauugucucggcucuugaguacuugcacucgcgggacgugguauaccgcgacaucaagcuggaaaaccucaugcuggacaaagauggccacaucaagaucacugacuuuggccucugcaaagagggcaucagugacggggccaccaugaaaaccuucugugggaccccggaguaccuggcgccugaggugcuggaggacaaugacuauggccgggccguggacuggugggggcuggguguggucauguacgagaugaugugcggccgccugcccuucuacaaccaggaccacgagcgccucuucgagcucauccucauggaagagauccgcuucccgcgcacgcucagccccgaggccaagucccugcuugcugggcugcuuaagaaggaccccaagcagaggcuugguggggggcccagcgaugccaaggaggucauggagcacagguucuuccucagcaucaacuggcaggacgugguccagaagaagcuccugccacccuucaaaccucaggucacguccgaggucgacacaagguacuucgaugaugaauuuaccgcccaguccaucacaaucacacccccugaccgcuaugacagccugggcuuacuggagcuggaccagcggacccacuucccccaguucuccuacucggccagcauccgcgagugagcagucugcccacgcagaggacgcacgcucgcugccaucaccgcugggugguuuuuucccccuaacuuuuuacuuagccuuuuugguuuguguccccacccccaccuccucacccccuuuccaguucuucuucaggccccucccagacgcaccccagcggccccugcagccccugccuccagccuccagccucaccuuugugcccagacucgcauuuggaagacuccaccucccgcccaggccugggcuguugggcgguuggagauucagguuuuaauccacacaagccccagugaggggugaagcauggcgccuggggccugccugaguuucuggccugggugucgugcuggugucugccuccgcgcugcugcaucuggacgaaggcugccuucuggugggacgcgacacccggcagacaguggugcugccuuccaggccccguggccuaggcucggaguggccaggcacggggcgguccaaucccccacccgcugucccccuaugggggcagaaaagcaauaauguccaggggcaggcaggggcccuugggagcugcagggcuggggguuagggcugcucccuggugaauggagucagauccuaggaucuguaccauggggaaccaggaguggccgggcugggugccgccuccugguccggccuccuccccaccaaacuguccucacccuauggaugaggcaggaggaacauuuggggccaaaccugccugccucccagccccgugccuuacuagggcuuccuuccagcuggccuuaccucccgcuggacccugggccuggccuggccccacugggggcuaugggcugggcucacccucuccucugcggggguggagggccaccagccuuggcuguuacaaucuuacaccggacaguauugggccccauggacuuggucagggaggggugggggugggcaucucugguaccuauugggguggggggccucugaaaagggaggcuccuaggccccccucaccccucccucuccccagggccccacguucugcagccuuaagguugaacaugagugcacguccaugucagugcugugggacuccugugcgugccucggacugcgugugucggcgggacgcaggcacacgugggugugugugcauguguguuugugugagggcagcguguccuccagugugcauggugugugggcuugggccccaucccuggcccgagcauuucauccugugggggaggggugcugaccuagugggaggagccccacugugauccaugagcugcccugcccacgccuccccucccuguagcaacaccucuggguguuuggaguuuagcuuuuguggguuugcucucccuaucccaucuccuguacuacacaguucauggcaggguggggaggggugggguugguucgggugggugagggucuuuuuccucugugugcgauguuguuaucugacaguucuccgucccuacuggccuuucuccucgucuucauauuuguacgguacaagcaauaaagacacucauuucagaccagggcccagccugcacucacgccagcccaaccacucugggcuuugccuuggugauggagucagaccccugggccccagcuccuccuguacuagccguucccuucagcaaggagggcacugagcucagggugagggcagcuggggugugugcaggagcucaggcuggagaggguggguggagcuggugcuguggggcugagggguaugggaaggcuccccgcaugugggggugggguggacagagaccacuccaggcccucagugcugcuuaggcuaagagaggugggguggagggacagggcuggaagaucuggguagcccagaaugaggagggugccugugcugucacugaaugagagggagugguucauuccacccggcugccgagccucagaggggggcauuccuauccugccccaccucccuguuuaugcugccaccuggaagccuugaggcccccaaauuccaguacagacccagugguguguucaugguggcgugguugcugucaccugggagcuccugagcguuugguuagaacccuguucagcuuggggucagcccuccccuagucacugcccuuuagccuggaugugucugggccccugcacuucccgugcuugagucacguggcugcauggccgggcgcuggccggauggaacaccucccccagcaagggaccagggaccagagcccuggccugcccugcugagcccugcugugcagagggccuggcacagaugaauuugagauuuugccgcaagguguuagcacuucacacccauugagucuuugagauuuuaagugaauguaagcagaaaaagucagauccaauuuacagaaaucagaguuagcuacagcuaggacucguuugguugggguuuuuuaguuugucuuucuaaagucauguggaccuuaauuuaauuacaaaagucuacccugguggucauaaaauaggcaggccuaugaagaaaggccuuuuacucuuccaucucaucccagccccgaguugacccacguugcugcuccucacaccauggugaugcaggucucguagugugggcacaggccuggcuaccucaucuuuuuagugccucucuccucuuccacaggauggggucccacagcugcagcagcuggccccguaguugagcaugugugguuauccuguagagcuuuucccaagaaggguguuugaacuuagagucuuaauaaaaucuuaccaaauaaauuuugaguagaauaaucgucuuuugcaauguacauuuuaaaaauuucacacauucuuuuuuguauauaaagaacagugacugggcacaguggcucaugccuguaaucccagcaauuugggaggccgaggcgggcgggucucuugaggccagggguucgagaccagccugggcaucauagggagaccuucaucucuacaaaaaauacaaaaauuagcugggcaugguggugcaugccugcaaucccagcuaacuuggaaggcugaggugaggugggaagaucacuugagcccaggaguuugaggcugcagugagcuaugauugcggcacugcacugcagccugggacaaugagacugugucucuaaaaauaaaaaaaaaaaaaacaugauacaugcuauuaaaaaagacagcaaagcaggaguauaagaaaggaaauucacccgaggucgcagggccuugaguacucauuuuggugcugauuaccucucugcaaauggacacggcaucauaaauugguaguuuccugcucuuuuuguguaaucuuuuccaguuaaugugaagccucugggggcugcccucgugcacugaugguuguguggagucgggggcggcagugcgauucccuuuuagcugcugcauggggggaacucaggcuuuccagcugcuuccugggguuccaugggguagaccccucaaccgcuucagcugccccguuaacaggaauugacuugguuucguuuggugcuaccagcaguccuguaauaaacuagcuauccaucugua

SEQ ID NO: 53759 - RNA, 19 nt, Artificial Sequence
  Description of Artificial Sequence: Synthetic oligonucleotide
cggggggggccgcgccgug

SEQ ID NO: 53760 - RNA, 19 nt, Artificial Sequence
  Description of Artificial Sequence: Synthetic oligonucleotide
gcuagccguugggccugcc

SEQ ID NO: 53761 - RNA, 19 nt, Artificial Sequence
  Description of Artificial Sequence: Synthetic oligonucleotide
cucggaggaggcgucgccg

SEQ ID NO: 53762 - RNA, 19 nt, Artificial Sequence
  Description of Artificial Sequence: Synthetic oligonucleotide
gccgccgcugccgcugccg

SEQ ID NO: 53763 - RNA, 19 nt, Artificial Sequence
  Description of Artificial Sequence: Synthetic oligonucleotide
ggcgccguugccgcugccg

SEQ ID NO: 53764 - RNA, 19 nt, Artificial Sequence
  Description of Artificial Sequence: Synthetic oligonucleotide
gggaaacacaaggaaaggg

SEQ ID NO: 53765 - RNA, 19 nt, Artificial Sequence
  Description of Artificial Sequence: Synthetic oligonucleotide
gaaccagcgcagcguggcg

SEQ ID NO: 53766 - RNA, 19 nt, Artificial Sequence
  Description of Artificial Sequence: Synthetic oligonucleotide
gaugggcggggguagagcc

SEQ ID NO: 53767 - RNA, 19 nt, Artificial Sequence
  Description of Artificial Sequence: Synthetic oligonucleotide
cccgccggagaggcugggc

SEQ ID NO: 53768 - RNA, 19 nt, Artificial Sequence
  Description of Artificial Sequence: Synthetic oligonucleotide
cggcugccggugacagacu

SEQ ID NO: 53769 - RNA, 19 nt, Artificial Sequence
  Description of Artificial Sequence: Synthetic oligonucleotide
ugugcccuguccacggugc

SEQ ID NO: 53770 - RNA, 19 nt, Artificial Sequence
  Description of Artificial Sequence: Synthetic oligonucleotide
ccuccugcauguccugcug

SEQ ID NO: 53771 - RNA, 19 nt, Artificial Sequence
  Description of Artificial Sequence: Synthetic oligonucleotide
gcccugagcugucccgagc

SEQ ID NO: 53772 - RNA, 19 nt, Artificial Sequence
  Description of Artificial Sequence: Synthetic oligonucleotide
cuaggugacagcguaccac

SEQ ID NO: 53773 - RNA, 19 nt, Artificial Sequence
  Description of Artificial Sequence: Synthetic oligonucleotide
cgcugccaccaugaaugag

SEQ ID NO: 53774 - RNA, 19 nt, Artificial Sequence
  Description of Artificial Sequence: Synthetic oligonucleotide
ggugucugucaucaaagaa

SEQ ID NO: 53775 - RNA, 19 nt, Artificial Sequence
  Description of Artificial Sequence: Synthetic oligonucleotide
aggcuggcuccacaagcgu

SEQ ID NO: 53776 - RNA, 19 nt, Artificial Sequence
  Description of Artificial Sequence: Synthetic oligonucleotide
uggugaauacaucaagacc

SEQ ID NO: 53777 - RNA, 19 nt, Artificial Sequence
  Description of Artificial Sequence: Synthetic oligonucleotide
cuggaggccacgguacuuc

SEQ ID NO: 53778 - RNA, 19 nt, Artificial Sequence
  Description of Artificial Sequence: Synthetic oligonucleotide
ccugcugaagagcgacggc

SEQ ID NO: 53779 - RNA, 19 nt, Artificial Sequence
  Description of Artificial Sequence: Synthetic oligonucleotide
cuccuucauuggguacaag

SEQ ID NO: 53780 - RNA, 19 nt, Artificial Sequence
  Description of Artificial Sequence: Synthetic oligonucleotide
ggagaggcccgaggccccu

SEQ ID NO: 53781 - RNA, 19 nt, Artificial Sequence
  Description of Artificial Sequence: Synthetic oligonucleotide
ugaucagacucuacccccc

SEQ ID NO: 53782 - RNA, 19 nt, Artificial Sequence
  Description of Artificial Sequence: Synthetic oligonucleotide
cuuaaacaacuucuccgua

SEQ ID NO: 53783 - RNA, 19 nt, Artificial Sequence
  Description of Artificial Sequence: Synthetic oligonucleotide
agcagaaugccagcugaug

SEQ ID NO: 53784 - RNA, 19 nt, Artificial Sequence
  Description of Artificial Sequence: Synthetic oligonucleotide
gaagaccgagaggccgcga

SEQ ID NO: 53785 - RNA, 19 nt, Artificial Sequence
  Description of Artificial Sequence: Synthetic oligonucleotide
acccaacaccuuugucaua

SEQ ID NO: 53786 - RNA, 19 nt, Artificial Sequence
  Description of Artificial Sequence: Synthetic oligonucleotide
acgcugccugcaguggacc

SEQ ID NO: 53787 - RNA, 19 nt, Artificial Sequence
  Description of Artificial Sequence: Synthetic oligonucleotide
cacagucaucgagaggacc

SEQ ID NO: 53788 - RNA, 19 nt, Artificial Sequence
  Description of Artificial Sequence: Synthetic oligonucleotide
cuuccacguggauucucca

SEQ ID NO: 53789 - RNA, 19 nt, Artificial Sequence
  Description of Artificial Sequence: Synthetic oligonucleotide
agacgagagggaggagugg

SEQ ID NO: 53790 - RNA, 19 nt, Artificial Sequence
  Description of Artificial Sequence: Synthetic oligonucleotide
gaugcgggccauccagaug

SEQ ID NO: 53791 - RNA, 19 nt, Artificial Sequence
  Description of Artificial Sequence: Synthetic oligonucleotide
ggucgccaacagccucaag

SEQ ID NO: 53792 - RNA, 19 nt, Artificial Sequence
  Description of Artificial Sequence: Synthetic oligonucleotide
gcagcgggccccaggcgag

SEQ ID NO: 53793 - RNA, 19 nt, Artificial Sequence
  Description of Artificial Sequence: Synthetic oligonucleotide
ggaccccauggacuacaag

SEQ ID NO: 53794 - RNA, 19 nt, Artificial Sequence
  Description of Artificial Sequence: Synthetic oligonucleotide
guguggcucccccagugac

SEQ ID NO: 53795 - RNA, 19 nt, Artificial Sequence
  Description of Artificial Sequence: Synthetic oligonucleotide
cuccuccacgacugaggag

SEQ ID NO: 53796 - RNA, 19 nt, Artificial Sequence
  Description of Artificial Sequence: Synthetic oligonucleotide
gauggaaguggcggucagc

SEQ ID NO: 53797 - RNA, 19 nt, Artificial Sequence
  Description of Artificial Sequence: Synthetic oligonucleotide
caaggcacgggcuaaagug

SEQ ID NO: 53798 - RNA, 19 nt, Artificial Sequence
  Description of Artificial Sequence: Synthetic oligonucleotide
gaccaugaaugacuucgac

SEQ ID NO: 53799 - RNA, 19 nt, Artificial Sequence
  Description of Artificial Sequence: Synthetic oligonucleotide
cuaucucaaacuccuuggc

SEQ ID NO: 53800 - RNA, 19 nt, Artificial Sequence
  Description of Artificial Sequence: Synthetic oligonucleotide
caagggaaccuuuggcaaa

SEQ ID NO: 53801 - RNA, 19 nt, Artificial Sequence
  Description of Artificial Sequence: Synthetic oligonucleotide
agucauccuggugcgggag

SEQ ID NO: 53802 - RNA, 19 nt, Artificial Sequence
  Description of Artificial Sequence: Synthetic oligonucleotide
gaaggccacuggccgcuac

SEQ ID NO: 53803 - RNA, 19 nt, Artificial Sequence
  Description of Artificial Sequence: Synthetic oligonucleotide
cuacgccaugaagauccug

SEQ ID NO: 53804 - RNA, 19 nt, Artificial Sequence
  Description of Artificial Sequence: Synthetic oligonucleotide
gcggaaggaagucaucauu

SEQ ID NO: 53805 - RNA, 19 nt, Artificial Sequence
  Description of Artificial Sequence: Synthetic oligonucleotide
ugccaaggaugaagucgcu

SEQ ID NO: 53806 - RNA, 19 nt, Artificial Sequence
  Description of Artificial Sequence: Synthetic oligonucleotide
ucacacagucaccgagagc

SEQ ID NO: 53807 - RNA, 19 nt, Artificial Sequence
  Description of Artificial Sequence: Synthetic oligonucleotide
ccggguccuccagaacacc

SEQ ID NO: 53808 - RNA, 19 nt, Artificial Sequence
  Description of Artificial Sequence: Synthetic oligonucleotide
caggcacccguuccucacu

SEQ ID NO: 53809 - RNA, 19 nt, Artificial Sequence
  Description of Artificial Sequence: Synthetic oligonucleotide
ugcgcugaaguaugccuuc

SEQ ID NO: 53810 - RNA, 19 nt, Artificial Sequence
  Description of Artificial Sequence: Synthetic oligonucleotide
ccagacccacgaccgccug

SEQ ID NO: 53811 - RNA, 19 nt, Artificial Sequence
  Description of Artificial Sequence: Synthetic oligonucleotide
gugcuuugugauggaguau

SEQ ID NO: 53812 - RNA, 19 nt, Artificial Sequence
  Description of Artificial Sequence: Synthetic oligonucleotide
ugccaacgggggugagcug

SEQ ID NO: 53813 - RNA, 19 nt, Artificial Sequence
  Description of Artificial Sequence: Synthetic oligonucleotide
ggagcgugucuucacagag

SEQ ID NO: 53814 - RNA, 19 nt, Artificial Sequence
  Description of Artificial Sequence: Synthetic oligonucleotide
ggagcgggcccgguuuuau

SEQ ID NO: 53815 - RNA, 19 nt, Artificial Sequence
  Description of Artificial Sequence: Synthetic oligonucleotide
uggugcagagauugucucg

SEQ ID NO: 53816 - RNA, 19 nt, Artificial Sequence
  Description of Artificial Sequence: Synthetic oligonucleotide
ggcucuugaguacuugcac

SEQ ID NO: 53817 - RNA, 19 nt, Artificial Sequence
  Description of Artificial Sequence: Synthetic oligonucleotide
cucgcgggacgugguauac

SEQ ID NO: 53818 - RNA, 19 nt, Artificial Sequence
  Description of Artificial Sequence: Synthetic oligonucleotide
ccgcgacaucaagcuggaa

SEQ ID NO: 53819 - RNA, 19 nt, Artificial Sequence
  Description of Artificial Sequence: Synthetic oligonucleotide
aaaccucaugcuggacaaa

SEQ ID NO: 53820 - RNA, 19 nt, Artificial Sequence
  Description of Artificial Sequence: Synthetic oligonucleotide
agauggccacaucaagauc

SEQ ID NO: 53821 - RNA, 19 nt, Artificial Sequence
  Description of Artificial Sequence: Synthetic oligonucleotide
cacugacuuuggccucugc

SEQ ID NO: 53822 - RNA, 19 nt, Artificial Sequence
  Description of Artificial Sequence: Synthetic oligonucleotide
caaagagggcaucagugac

SEQ ID NO: 53823 - RNA, 19 nt, Artificial Sequence
  Description of Artificial Sequence: Synthetic oligonucleotide
cggggccaccaugaaaacc

SEQ ID NO: 53824 - RNA, 19 nt, Artificial Sequence
  Description of Artificial Sequence: Synthetic oligonucleotide
cuucugugggaccccggag

SEQ ID NO: 53825 - RNA, 19 nt, Artificial Sequence
  Description of Artificial Sequence: Synthetic oligonucleotide
guaccuggcgccugaggug

SEQ ID NO: 53826 - RNA, 19 nt, Artificial Sequence
  Description of Artificial Sequence: Synthetic oligonucleotide
gcuggaggacaaugacuau

SEQ ID NO: 53827 - RNA, 19 nt, Artificial Sequence
  Description of Artificial Sequence: Synthetic oligonucleotide
uggccgggccguggacugg

SEQ ID NO: 53828 - RNA, 19 nt, Artificial Sequence
  Description of Artificial Sequence: Synthetic oligonucleotide
gugggggcugggugugguc

SEQ ID NO: 53829 - RNA, 19 nt, Artificial Sequence
  Description of Artificial Sequence: Synthetic oligonucleotide
cauguacgagaugaugugc

SEQ ID NO: 53830 - RNA, 19 nt, Artificial Sequence
  Description of Artificial Sequence: Synthetic oligonucleotide
cggccgccugcccuucuac

SEQ ID NO: 53831 - RNA, 19 nt, Artificial Sequence
  Description of Artificial Sequence: Synthetic oligonucleotide
caaccaggaccacgagcgc

SEQ ID NO: 53832 - RNA, 19 nt, Artificial Sequence
  Description of Artificial Sequence: Synthetic oligonucleotide
ccucuucgagcucauccuc

SEQ ID NO: 53833 - RNA, 19 nt, Artificial Sequence
  Description of Artificial Sequence: Synthetic oligonucleotide
cauggaagagauccgcuuc

SEQ ID NO: 53834 - RNA, 19 nt, Artificial Sequence
  Description of Artificial Sequence: Synthetic oligonucleotide
cccgcgcacgcucagcccc

SEQ ID NO: 53835 - RNA, 19 nt, Artificial Sequence
  Description of Artificial Sequence: Synthetic oligonucleotide
cgaggccaagucccugcuu

SEQ ID NO: 53836 - RNA, 19 nt, Artificial Sequence
  Description of Artificial Sequence: Synthetic oligonucleotide
ugcugggcugcuuaagaag

SEQ ID NO: 53837 - RNA, 19 nt, Artificial Sequence
  Description of Artificial Sequence: Synthetic oligonucleotide
ggaccccaagcagaggcuu

SEQ ID NO: 53838 - RNA, 19 nt, Artificial Sequence
  Description of Artificial Sequence: Synthetic oligonucleotide
ugguggggggcccagcgau

SEQ ID NO: 53839 - RNA, 19 nt, Artificial Sequence
  Description of Artificial Sequence: Synthetic oligonucleotide
ugccaaggaggucauggag

SEQ ID NO: 53840 - RNA, 19 nt, Artificial Sequence
  Description of Artificial Sequence: Synthetic oligonucleotide
gcacagguucuuccucagc

SEQ ID NO: 53841 - RNA, 19 nt, Artificial Sequence
  Description of Artificial Sequence: Synthetic oligonucleotide
caucaacuggcaggacgug

SEQ ID NO: 53842 - RNA, 19 nt, Artificial Sequence
  Description of Artificial Sequence: Synthetic oligonucleotide
gguccagaagaagcuccug

SEQ ID NO: 53843 - RNA, 19 nt, Artificial Sequence
  Description of Artificial Sequence: Synthetic oligonucleotide
gccacccuucaaaccucag

SEQ ID NO: 53844 - RNA, 19 nt, Artificial Sequence
  Description of Artificial Sequence: Synthetic oligonucleotide
ggucacguccgaggucgac

SEQ ID NO: 53845 - RNA, 19 nt, Artificial Sequence
  Description of Artificial Sequence: Synthetic oligonucleotide
cacaagguacuucgaugau

SEQ ID NO: 53846 - RNA, 19 nt, Artificial Sequence
  Description of Artificial Sequence: Synthetic oligonucleotide
ugaauuuaccgcccagucc

SEQ ID NO: 53847 - RNA, 19 nt, Artificial Sequence
  Description of Artificial Sequence: Synthetic oligonucleotide
caucacaaucacacccccu

SEQ ID NO: 53848 - RNA, 19 nt, Artificial Sequence
  Description of Artificial Sequence: Synthetic oligonucleotide
ugaccgcuaugacagccug

SEQ ID NO: 53849 - RNA, 19 nt, Artificial Sequence
  Description of Artificial Sequence: Synthetic oligonucleotide
gggcuuacuggagcuggac

SEQ ID NO: 53850 - RNA, 19 nt, Artificial Sequence
  Description of Artificial Sequence: Synthetic oligonucleotide
ccagcggacccacuucccc

SEQ ID NO: 53851 - RNA, 19 nt, Artificial Sequence
  Description of Artificial Sequence: Synthetic oligonucleotide
ccaguucuccuacucggcc

SEQ ID NO: 53852 - RNA, 19 nt, Artificial Sequence
  Description of Artificial Sequence: Synthetic oligonucleotide
cagcauccgcgagugagca

SEQ ID NO: 53853 - RNA, 19 nt, Artificial Sequence
  Description of Artificial Sequence: Synthetic oligonucleotide
agucugcccacgcagagga

SEQ ID NO: 53854 - RNA, 19 nt, Artificial Sequence
  Description of Artificial Sequence: Synthetic oligonucleotide
acgcacgcucgcugccauc

SEQ ID NO: 53855 - RNA, 19 nt, Artificial Sequence
  Description of Artificial Sequence: Synthetic oligonucleotide
caccgcugggugguuuuuu

SEQ ID NO: 53856 - RNA, 19 nt, Artificial Sequence
  Description of Artificial Sequence: Synthetic oligonucleotide
ucccccuaacuuuuuacuu

SEQ ID NO: 53857 - RNA, 19 nt, Artificial Sequence
  Description of Artificial Sequence: Synthetic oligonucleotide
uagccuuuuugguuugugu

SEQ ID NO: 53858 - RNA, 19 nt, Artificial Sequence
  Description of Artificial Sequence: Synthetic oligonucleotide
uccccacccccaccuccuc

SEQ ID NO: 53859 - RNA, 19 nt, Artificial Sequence
  Description of Artificial Sequence: Synthetic oligonucleotide
cacccccuuuccaguucuu

SEQ ID NO: 53860 - RNA, 19 nt, Artificial Sequence
  Description of Artificial Sequence: Synthetic oligonucleotide
ucuucaggccccucccaga

SEQ ID NO: 53861 - RNA, 19 nt, Artificial Sequence
  Description of Artificial Sequence: Synthetic oligonucleotide
acgcaccccagcggccccu

SEQ ID NO: 53862 - RNA, 19 nt, Artificial Sequence
  Description of Artificial Sequence: Synthetic oligonucleotide
ugcagccccugccuccagc

SEQ ID NO: 53863 - RNA, 19 nt, Artificial Sequence
  Description of Artificial Sequence: Synthetic oligonucleotide
ccuccagccucaccuuugu

SEQ ID NO: 53864 - RNA, 19 nt, Artificial Sequence
  Description of Artificial Sequence: Synthetic oligonucleotide
ugcccagacucgcauuugg

SEQ ID NO: 53865 - RNA, 19 nt, Artificial Sequence
  Description of Artificial Sequence: Synthetic oligonucleotide
gaagacuccaccucccgcc

SEQ ID NO: 53866 - RNA, 19 nt, Artificial Sequence
  Description of Artificial Sequence: Synthetic oligonucleotide
ccaggccugggcuguuggg

SEQ ID NO: 53867 - RNA, 19 nt, Artificial Sequence
  Description of Artificial Sequence: Synthetic oligonucleotide
gcgguuggagauucagguu

SEQ ID NO: 53868 - RNA, 19 nt, Artificial Sequence
  Description of Artificial Sequence: Synthetic oligonucleotide
uuuaauccacacaagcccc

SEQ ID NO: 53869 - RNA, 19 nt, Artificial Sequence
  Description of Artificial Sequence: Synthetic oligonucleotide
cagugaggggugaagcaug

SEQ ID NO: 53870 - RNA, 19 nt, Artificial Sequence
  Description of Artificial Sequence: Synthetic oligonucleotide
ggcgccuggggccugccug

SEQ ID NO: 53871 - RNA, 19 nt, Artificial Sequence
  Description of Artificial Sequence: Synthetic oligonucleotide
gaguuucuggccugggugu

SEQ ID NO: 53872 - RNA, 19 nt, Artificial Sequence
  Description of Artificial Sequence: Synthetic oligonucleotide
ucgugcuggugucugccuc

SEQ ID NO: 53873 - RNA, 19 nt, Artificial Sequence
  Description of Artificial Sequence: Synthetic oligonucleotide
ccgcgcugcugcaucugga

SEQ ID NO: 53874 - RNA, 19 nt, Artificial Sequence
  Description of Artificial Sequence: Synthetic oligonucleotide
acgaaggcugccuucuggu

SEQ ID NO: 53875 - RNA, 19 nt, Artificial Sequence
  Description of Artificial Sequence: Synthetic oligonucleotide
ugggacgcgacacccggca

SEQ ID NO: 53876 - RNA, 19 nt, Artificial Sequence
  Description of Artificial Sequence: Synthetic oligonucleotide
agacaguggugcugccuuc

SEQ ID NO: 53877 - RNA, 19 nt, Artificial Sequence
  Description of Artificial Sequence: Synthetic oligonucleotide
ccaggccccguggccuagg

SEQ ID NO: 53878 - RNA, 19 nt, Artificial Sequence
  Description of Artificial Sequence: Synthetic oligonucleotide
gcucggaguggccaggcac

SEQ ID NO: 53879 - RNA, 19 nt, Artificial Sequence
  Description of Artificial Sequence: Synthetic oligonucleotide
cggggcgguccaauccccc

SEQ ID NO: 53880 - RNA, 19 nt, Artificial Sequence
  Description of Artificial Sequence: Synthetic oligonucleotide
cacccgcugucccccuaug

SEQ ID NO: 53881 - RNA, 19 nt, Artificial Sequence
  Description of Artificial Sequence: Synthetic oligonucleotide
gggggcagaaaagcaauaa

SEQ ID NO: 53882 - RNA, 19 nt, Artificial Sequence
  Description of Artificial Sequence: Synthetic oligonucleotide
auguccaggggcaggcagg

SEQ ID NO: 53883 - RNA, 19 nt, Artificial Sequence
  Description of Artificial Sequence: Synthetic oligonucleotide
gggcccuugggagcugcag

SEQ ID NO: 53884 - RNA, 19 nt, Artificial Sequence
  Description of Artificial Sequence: Synthetic oligonucleotide
gggcuggggguuagggcug

SEQ ID NO: 53885 - RNA, 19 nt, Artificial Sequence
  Description of Artificial Sequence: Synthetic oligonucleotide
gcucccuggugaauggagu

SEQ ID NO: 53886 - RNA, 19 nt, Artificial Sequence
  Description of Artificial Sequence: Synthetic oligonucleotide
ucagauccuaggaucugua

SEQ ID NO: 53887 - RNA, 19 nt, Artificial Sequence
  Description of Artificial Sequence: Synthetic oligonucleotide
accauggggaaccaggagu

SEQ ID NO: 53888 - RNA, 19 nt, Artificial Sequence
  Description of Artificial Sequence: Synthetic oligonucleotide
uggccgggcugggugccgc

SEQ ID NO: 53889 - RNA, 19 nt, Artificial Sequence
  Description of Artificial Sequence: Synthetic oligonucleotide
ccuccugguccggccuccu

SEQ ID NO: 53890 - RNA, 19 nt, Artificial Sequence
  Description of Artificial Sequence: Synthetic oligonucleotide
uccccaccaaacuguccuc

SEQ ID NO: 53891 - RNA, 19 nt, Artificial Sequence
  Description of Artificial Sequence: Synthetic oligonucleotide
cacccuauggaugaggcag

SEQ ID NO: 53892 - RNA, 19 nt, Artificial Sequence
  Description of Artificial Sequence: Synthetic oligonucleotide
ggaggaacauuuggggcca

SEQ ID NO: 53893 - RNA, 19 nt, Artificial Sequence
  Description of Artificial Sequence: Synthetic oligonucleotide
aaaccugccugccucccag

SEQ ID NO: 53894 - RNA, 19 nt, Artificial Sequence
  Description of Artificial Sequence: Synthetic oligonucleotide
gccccgugccuuacuaggg

SEQ ID NO: 53895 - RNA, 19 nt, Artificial Sequence
  Description of Artificial Sequence: Synthetic oligonucleotide
gcuuccuuccagcuggccu

SEQ ID NO: 53896 - RNA, 19 nt, Artificial Sequence
  Description of Artificial Sequence: Synthetic oligonucleotide
uuaccucccgcuggacccu

SEQ ID NO: 53897 - RNA, 19 nt, Artificial Sequence
  Description of Artificial Sequence: Synthetic oligonucleotide
ugggccuggccuggcccca

SEQ ID NO: 53898 - RNA, 19 nt, Artificial Sequence
  Description of Artificial Sequence: Synthetic oligonucleotide
acugggggcuaugggcugg

SEQ ID NO: 53899 - RNA, 19 nt, Artificial Sequence
  Description of Artificial Sequence: Synthetic oligonucleotide
ggcucacccucuccucugc

SEQ ID NO: 53900 - RNA, 19 nt, Artificial Sequence
  Description of Artificial Sequence: Synthetic oligonucleotide
cggggguggagggccacca

SEQ ID NO: 53901 - RNA, 19 nt, Artificial Sequence
  Description of Artificial Sequence: Synthetic oligonucleotide
agccuuggcuguuacaauc

SEQ ID NO: 53902 - RNA, 19 nt, Artificial Sequence
  Description of Artificial Sequence: Synthetic oligonucleotide
cuuacaccggacaguauug

SEQ ID NO: 53903 - RNA, 19 nt, Artificial Sequence
  Description of Artificial Sequence: Synthetic oligonucleotide
gggccccauggacuugguc

SEQ ID NO: 53904 - RNA, 19 nt, Artificial Sequence
  Description of Artificial Sequence: Synthetic oligonucleotide
cagggaggggugggggugg

SEQ ID NO: 53905 - RNA, 19 nt, Artificial Sequence
  Description of Artificial Sequence: Synthetic oligonucleotide
ggcaucucugguaccuauu

SEQ ID NO: 53906 - RNA, 19 nt, Artificial Sequence
  Description of Artificial Sequence: Synthetic oligonucleotide
ugggguggggggccucuga

SEQ ID NO: 53907 - RNA, 19 nt, Artificial Sequence
  Description of Artificial Sequence: Synthetic oligonucleotide
aaaagggaggcuccuaggc

SEQ ID NO: 53908 - RNA, 19 nt, Artificial Sequence
  Description of Artificial Sequence: Synthetic oligonucleotide
ccccccucaccccucccuc

SEQ ID NO: 53909 - RNA, 19 nt, Artificial Sequence
  Description of Artificial Sequence: Synthetic oligonucleotide
cuccccagggccccacguu

SEQ ID NO: 53910 - RNA, 19 nt, Artificial Sequence
  Description of Artificial Sequence: Synthetic oligonucleotide
ucugcagccuuaagguuga

SEQ ID NO: 53911 - RNA, 19 nt, Artificial Sequence
  Description of Artificial Sequence: Synthetic oligonucleotide
aacaugagugcacguccau

SEQ ID NO: 53912 - RNA, 19 nt, Artificial Sequence
  Description of Artificial Sequence: Synthetic oligonucleotide
ugucagugcugugggacuc

SEQ ID NO: 53913 - RNA, 19 nt, Artificial Sequence
  Description of Artificial Sequence: Synthetic oligonucleotide
ccugugcgugccucggacu

SEQ ID NO: 53914 - RNA, 19 nt, Artificial Sequence
  Description of Artificial Sequence: Synthetic oligonucleotide
ugcgugugucggcgggacg

SEQ ID NO: 53915 - RNA, 19 nt, Artificial Sequence
  Description of Artificial Sequence: Synthetic oligonucleotide
gcaggcacacgugggugug

SEQ ID NO: 53916 - RNA, 19 nt, Artificial Sequence
  Description of Artificial Sequence: Synthetic oligonucleotide
gugugcauguguguuugug

SEQ ID NO: 53917 - RNA, 19 nt, Artificial Sequence
  Description of Artificial Sequence: Synthetic oligonucleotide
gugagggcagcguguccuc

SEQ ID NO: 53918 - RNA, 19 nt, Artificial Sequence
  Description of Artificial Sequence: Synthetic oligonucleotide
ccagugugcauggugugug

SEQ ID NO: 53919 - RNA, 19 nt, Artificial Sequence
  Description of Artificial Sequence: Synthetic oligonucleotide
gggcuugggccccaucccu

SEQ ID NO: 53920 - RNA, 19 nt, Artificial Sequence
  Description of Artificial Sequence: Synthetic oligonucleotide
uggcccgagcauuucaucc

SEQ ID NO: 53921 - RNA, 19 nt, Artificial Sequence
  Description of Artificial Sequence: Synthetic oligonucleotide
cugugggggaggggugcug

SEQ ID NO: 53922 - RNA, 19 nt, Artificial Sequence
  Description of Artificial Sequence: Synthetic oligonucleotide
gaccuagugggaggagccc

SEQ ID NO: 53923 - RNA, 19 nt, Artificial Sequence
  Description of Artificial Sequence: Synthetic oligonucleotide
ccacugugauccaugagcu

SEQ ID NO: 53924 - RNA, 19 nt, Artificial Sequence
  Description of Artificial Sequence: Synthetic oligonucleotide
ugcccugcccacgccuccc

SEQ ID NO: 53925 - RNA, 19 nt, Artificial Sequence
  Description of Artificial Sequence: Synthetic oligonucleotide
ccucccuguagcaacaccu

SEQ ID NO: 53926 - RNA, 19 nt, Artificial Sequence
  Description of Artificial Sequence: Synthetic oligonucleotide
ucuggguguuuggaguuua

SEQ ID NO: 53927 - RNA, 19 nt, Artificial Sequence
  Description of Artificial Sequence: Synthetic oligonucleotide
agcuuuuguggguuugcuc

SEQ ID NO: 53928 - RNA, 19 nt, Artificial Sequence
  Description of Artificial Sequence: Synthetic oligonucleotide
cucccuaucccaucuccug

SEQ ID NO: 53929 - RNA, 19 nt, Artificial Sequence
  Description of Artificial Sequence: Synthetic oligonucleotide
guacuacacaguucauggc

SEQ ID NO: 53930 - RNA, 19 nt, Artificial Sequence
  Description of Artificial Sequence: Synthetic oligonucleotide
caggguggggagggguggg

SEQ ID NO: 53931 - RNA, 19 nt, Artificial Sequence
  Description of Artificial Sequence: Synthetic oligonucleotide
gguugguucggguggguga

SEQ ID NO: 53932 - RNA, 19 nt, Artificial Sequence
  Description of Artificial Sequence: Synthetic oligonucleotide
agggucuuuuuccucugug

SEQ ID NO: 53933 - RNA, 19 nt, Artificial Sequence
  Description of Artificial Sequence: Synthetic oligonucleotide
gugcgauguuguuaucuga

SEQ ID NO: 53934 - RNA, 19 nt, Artificial Sequence
  Description of Artificial Sequence: Synthetic oligonucleotide
acaguucuccgucccuacu

SEQ ID NO: 53935 - RNA, 19 nt, Artificial Sequence
  Description of Artificial Sequence: Synthetic oligonucleotide
uggccuuucuccucgucuu

SEQ ID NO: 53936 - RNA, 19 nt, Artificial Sequence
  Description of Artificial Sequence: Synthetic oligonucleotide
ucauauuuguacgguacaa

SEQ ID NO: 53937 - RNA, 19 nt, Artificial Sequence
  Description of Artificial Sequence: Synthetic oligonucleotide
agcaauaaagacacucauu

SEQ ID NO: 53938 - RNA, 19 nt, Artificial Sequence
  Description of Artificial Sequence: Synthetic oligonucleotide
uucagaccagggcccagcc

SEQ ID NO: 53939 - RNA, 19 nt, Artificial Sequence
  Description of Artificial Sequence: Synthetic oligonucleotide
cugcacucacgccagccca

SEQ ID NO: 53940 - RNA, 19 nt, Artificial Sequence
  Description of Artificial Sequence: Synthetic oligonucleotide
aaccacucugggcuuugcc

SEQ ID NO: 53941 - RNA, 19 nt, Artificial Sequence
  Description of Artificial Sequence: Synthetic oligonucleotide
cuuggugauggagucagac

SEQ ID NO: 53942 - RNA, 19 nt, Artificial Sequence
  Description of Artificial Sequence: Synthetic oligonucleotide
ccccugggccccagcuccu

SEQ ID NO: 53943 - RNA, 19 nt, Artificial Sequence
  Description of Artificial Sequence: Synthetic oligonucleotide
uccuguacuagccguuccc

SEQ ID NO: 53944 - RNA, 19 nt, Artificial Sequence
  Description of Artificial Sequence: Synthetic oligonucleotide
cuucagcaaggagggcacu

SEQ ID NO: 53945 - RNA, 19 nt, Artificial Sequence
  Description of Artificial Sequence: Synthetic oligonucleotide
ugagcucagggugagggca

SEQ ID NO: 53946 - RNA, 19 nt, Artificial Sequence
  Description of Artificial Sequence: Synthetic oligonucleotide
agcuggggugugugcagga

SEQ ID NO: 53947 - RNA, 19 nt, Artificial Sequence
  Description of Artificial Sequence: Synthetic oligonucleotide
agcucaggcuggagagggu

SEQ ID NO: 53948 - RNA, 19 nt, Artificial Sequence
  Description of Artificial Sequence: Synthetic oligonucleotide
uggguggagcuggugcugu

SEQ ID NO: 53949 - RNA, 19 nt, Artificial Sequence
  Description of Artificial Sequence: Synthetic oligonucleotide
uggggcugagggguauggg

SEQ ID NO: 53950 - RNA, 19 nt, Artificial Sequence
  Description of Artificial Sequence: Synthetic oligonucleotide
gaaggcuccccgcaugugg

SEQ ID NO: 53951 - RNA, 19 nt, Artificial Sequence
  Description of Artificial Sequence: Synthetic oligonucleotide
ggggugggguggacagaga

SEQ ID NO: 53952 - RNA, 19 nt, Artificial Sequence
  Description of Artificial Sequence: Synthetic oligonucleotide
accacuccaggcccucagu

SEQ ID NO: 53953 - RNA, 19 nt, Artificial Sequence
  Description of Artificial Sequence: Synthetic oligonucleotide
ugcugcuuaggcuaagaga

SEQ ID NO: 53954 - RNA, 19 nt, Artificial Sequence
  Description of Artificial Sequence: Synthetic oligonucleotide
aggugggguggagggacag

SEQ ID NO: 53955 - RNA, 19 nt, Artificial Sequence
  Description of Artificial Sequence: Synthetic oligonucleotide
gggcuggaagaucugggua

SEQ ID NO: 53956 - RNA, 19 nt, Artificial Sequence
  Description of Artificial Sequence: Synthetic oligonucleotide
agcccagaaugaggagggu

SEQ ID NO: 53957 - RNA, 19 nt, Artificial Sequence
  Description of Artificial Sequence: Synthetic oligonucleotide
ugccugugcugucacugaa

SEQ ID NO: 53958 - RNA, 19 nt, Artificial Sequence
  Description of Artificial Sequence: Synthetic oligonucleotide
augagagggagugguucau

SEQ ID NO: 53959 - RNA, 19 nt, Artificial Sequence
  Description of Artificial Sequence: Synthetic oligonucleotide
uuccacccggcugccgagc

SEQ ID NO: 53960 - RNA, 19 nt, Artificial Sequence
  Description of Artificial Sequence: Synthetic oligonucleotide
ccucagaggggggcauucc

SEQ ID NO: 53961 - RNA, 19 nt, Artificial Sequence
  Description of Artificial Sequence: Synthetic oligonucleotide
cuauccugccccaccuccc

SEQ ID NO: 53962 - RNA, 19 nt, Artificial Sequence
  Description of Artificial Sequence: Synthetic oligonucleotide
cuguuuaugcugccaccug

SEQ ID NO: 53963 - RNA, 19 nt, Artificial Sequence
  Description of Artificial Sequence: Synthetic oligonucleotide
ggaagccuugaggccccca

SEQ ID NO: 53964 - RNA, 19 nt, Artificial Sequence
  Description of Artificial Sequence: Synthetic oligonucleotide
aaauuccaguacagaccca

SEQ ID NO: 53965 - RNA, 19 nt, Artificial Sequence
  Description of Artificial Sequence: Synthetic oligonucleotide
agugguguguucauggugg

SEQ ID NO: 53966 - RNA, 19 nt, Artificial Sequence
  Description of Artificial Sequence: Synthetic oligonucleotide
gcgugguugcugucaccug

SEQ ID NO: 53967 - RNA, 19 nt, Artificial Sequence
  Description of Artificial Sequence: Synthetic oligonucleotide
gggagcuccugagcguuug

SEQ ID NO: 53968 - RNA, 19 nt, Artificial Sequence
  Description of Artificial Sequence: Synthetic oligonucleotide
gguuagaacccuguucagc

SEQ ID NO: 53969 - RNA, 19 nt, Artificial Sequence
  Description of Artificial Sequence: Synthetic oligonucleotide
cuuggggucagcccucccc

SEQ ID NO: 53970 - RNA, 19 nt, Artificial Sequence
  Description of Artificial Sequence: Synthetic oligonucleotide
cuagucacugcccuuuagc

SEQ ID NO: 53971 - RNA, 19 nt, Artificial Sequence
  Description of Artificial Sequence: Synthetic oligonucleotide
ccuggaugugucugggccc

SEQ ID NO: 53972 - RNA, 19 nt, Artificial Sequence
  Description of Artificial Sequence: Synthetic oligonucleotide
ccugcacuucccgugcuug

SEQ ID NO: 53973 - RNA, 19 nt, Artificial Sequence
  Description of Artificial Sequence: Synthetic oligonucleotide
gagucacguggcugcaugg

SEQ ID NO: 53974 - RNA, 19 nt, Artificial Sequence
  Description of Artificial Sequence: Synthetic oligonucleotide
gccgggcgcuggccggaug

SEQ ID NO: 53975 - RNA, 19 nt, Artificial Sequence
  Description of Artificial Sequence: Synthetic oligonucleotide
ggaacaccucccccagcaa

SEQ ID NO: 53976 - RNA, 19 nt, Artificial Sequence
  Description of Artificial Sequence: Synthetic oligonucleotide
agggaccagggaccagagc

SEQ ID NO: 53977 - RNA, 19 nt, Artificial Sequence
  Description of Artificial Sequence: Synthetic oligonucleotide
cccuggccugcccugcuga

SEQ ID NO: 53978 - RNA, 19 nt, Artificial Sequence
  Description of Artificial Sequence: Synthetic oligonucleotide
agcccugcugugcagaggg

SEQ ID NO: 53979 - RNA, 19 nt, Artificial Sequence
  Description of Artificial Sequence: Synthetic oligonucleotide
gccuggcacagaugaauuu

SEQ ID NO: 53980 - RNA, 19 nt, Artificial Sequence
  Description of Artificial Sequence: Synthetic oligonucleotide
ugagauuuugccgcaaggu

SEQ ID NO: 53981 - RNA, 19 nt, Artificial Sequence
  Description of Artificial Sequence: Synthetic oligonucleotide
uguuagcacuucacaccca

SEQ ID NO: 53982 - RNA, 19 nt, Artificial Sequence
  Description of Artificial Sequence: Synthetic oligonucleotide
auugagucuuugagauuuu

SEQ ID NO: 53983 - RNA, 19 nt, Artificial Sequence
  Description of Artificial Sequence: Synthetic oligonucleotide
uaagugaauguaagcagaa

SEQ ID NO: 53984 - RNA, 19 nt, Artificial Sequence
  Description of Artificial Sequence: Synthetic oligonucleotide
aaaagucagauccaauuua

SEQ ID NO: 53985 - RNA, 19 nt, Artificial Sequence
  Description of Artificial Sequence: Synthetic oligonucleotide
acagaaaucagaguuagcu

SEQ ID NO: 53986 - RNA, 19 nt, Artificial Sequence
  Description of Artificial Sequence: Synthetic oligonucleotide
uacagcuaggacucguuug

SEQ ID NO: 53987 - RNA, 19 nt, Artificial Sequence
  Description of Artificial Sequence: Synthetic oligonucleotide
gguugggguuuuuuaguuu

SEQ ID NO: 53988 - RNA, 19 nt, Artificial Sequence
  Description of Artificial Sequence: Synthetic oligonucleotide
ugucuuucuaaagucaugu

SEQ ID NO: 53989 - RNA, 19 nt, Artificial Sequence
  Description of Artificial Sequence: Synthetic oligonucleotide
uggaccuuaauuuaauuac

SEQ ID NO: 53990 - RNA, 19 nt, Artificial Sequence
  Description of Artificial Sequence: Synthetic oligonucleotide
caaaagucuacccuggugg

SEQ ID NO: 53991 - RNA, 19 nt, Artificial Sequence
  Description of Artificial Sequence: Synthetic oligonucleotide
gucauaaaauaggcaggcc

SEQ ID NO: 53992 - RNA, 19 nt, Artificial Sequence
  Description of Artificial Sequence: Synthetic oligonucleotide
cuaugaagaaaggccuuuu

SEQ ID NO: 53993 - RNA, 19 nt, Artificial Sequence
  Description of Artificial Sequence: Synthetic oligonucleotide
uacucuuccaucucauccc

SEQ ID NO: 53994 - RNA, 19 nt, Artificial Sequence
  Description of Artificial Sequence: Synthetic oligonucleotide
cagccccgaguugacccac

SEQ ID NO: 53995 - RNA, 19 nt, Artificial Sequence
  Description of Artificial Sequence: Synthetic oligonucleotide
cguugcugcuccucacacc

SEQ ID NO: 53996 - RNA, 19 nt, Artificial Sequence
  Description of Artificial Sequence: Synthetic oligonucleotide
cauggugaugcaggucucg

SEQ ID NO: 53997 - RNA, 19 nt, Artificial Sequence
  Description of Artificial Sequence: Synthetic oligonucleotide
guagugugggcacaggccu

SEQ ID NO: 53998 - RNA, 19 nt, Artificial Sequence
  Description of Artificial Sequence: Synthetic oligonucleotide
uggcuaccucaucuuuuua

SEQ ID NO: 53999 - RNA, 19 nt, Artificial Sequence
  Description of Artificial Sequence: Synthetic oligonucleotide
agugccucucuccucuucc

SEQ ID NO: 54000 - RNA, 19 nt, Artificial Sequence
  Description of Artificial Sequence: Synthetic oligonucleotide
cacaggauggggucccaca

SEQ ID NO: 54001 - RNA, 19 nt, Artificial Sequence
  Description of Artificial Sequence: Synthetic oligonucleotide
agcugcagcagcuggcccc

SEQ ID NO: 54002 - RNA, 19 nt, Artificial Sequence
  Description of Artificial Sequence: Synthetic oligonucleotide
cguaguugagcaugugugg

SEQ ID NO: 54003 - RNA, 19 nt, Artificial Sequence
  Description of Artificial Sequence: Synthetic oligonucleotide
guuauccuguagagcuuuu

SEQ ID NO: 54004 - RNA, 19 nt, Artificial Sequence
  Description of Artificial Sequence: Synthetic oligonucleotide
ucccaagaaggguguuuga

SEQ ID NO: 54005 - RNA, 19 nt, Artificial Sequence
  Description of Artificial Sequence: Synthetic oligonucleotide
aacuuagagucuuaauaaa

SEQ ID NO: 54006 - RNA, 19 nt, Artificial Sequence
  Description of Artificial Sequence: Synthetic oligonucleotide
aaucuuaccaaauaaauuu

SEQ ID NO: 54007 - RNA, 19 nt, Artificial Sequence
  Description of Artificial Sequence: Synthetic oligonucleotide
uugaguagaauaaucgucu

SEQ ID NO: 54008 - RNA, 19 nt, Artificial Sequence
  Description of Artificial Sequence: Synthetic oligonucleotide
uuuugcaauguacauuuua

SEQ ID NO: 54009 - RNA, 19 nt, Artificial Sequence
  Description of Artificial Sequence: Synthetic oligonucleotide
aaaaauuucacacauucuu

SEQ ID NO: 54010 - RNA, 19 nt, Artificial Sequence
  Description of Artificial Sequence: Synthetic oligonucleotide
uuuuuguauauaaagaaca

SEQ ID NO: 54011 - RNA, 19 nt, Artificial Sequence
  Description of Artificial Sequence: Synthetic oligonucleotide
agugacugggcacaguggc

SEQ ID NO: 54012 - RNA, 19 nt, Artificial Sequence
  Description of Artificial Sequence: Synthetic oligonucleotide
cucaugccuguaaucccag

SEQ ID NO: 54013 - RNA, 19 nt, Artificial Sequence
  Description of Artificial Sequence: Synthetic oligonucleotide
gcaauuugggaggccgagg

SEQ ID NO: 54014 - RNA, 19 nt, Artificial Sequence
  Description of Artificial Sequence: Synthetic oligonucleotide
gcgggcgggucucuugagg

SEQ ID NO: 54015 - RNA, 19 nt, Artificial Sequence
  Description of Artificial Sequence: Synthetic oligonucleotide
gccagggguucgagaccag

SEQ ID NO: 54016 - RNA, 19 nt, Artificial Sequence
  Description of Artificial Sequence: Synthetic oligonucleotide
gccugggcaucauagggag

SEQ ID NO: 54017 - RNA, 19 nt, Artificial Sequence
  Description of Artificial Sequence: Synthetic oligonucleotide
gaccuucaucucuacaaaa

SEQ ID NO: 54018 - RNA, 19 nt, Artificial Sequence
  Description of Artificial Sequence: Synthetic oligonucleotide
aaauacaaaaauuagcugg

SEQ ID NO: 54019 - RNA, 19 nt, Artificial Sequence
  Description of Artificial Sequence: Synthetic oligonucleotide
ggcaugguggugcaugccu

SEQ ID NO: 54020 - RNA, 19 nt, Artificial Sequence
  Description of Artificial Sequence: Synthetic oligonucleotide
ugcaaucccagcuaacuug

SEQ ID NO: 54021 - RNA, 19 nt, Artificial Sequence
  Description of Artificial Sequence: Synthetic oligonucleotide
ggaaggcugaggugaggug

SEQ ID NO: 54022 - RNA, 19 nt, Artificial Sequence
  Description of Artificial Sequence: Synthetic oligonucleotide
gggaagaucacuugagccc

SEQ ID NO: 54023 - RNA, 19 nt, Artificial Sequence
  Description of Artificial Sequence: Synthetic oligonucleotide
caggaguuugaggcugcag

SEQ ID NO: 54024 - RNA, 19 nt, Artificial Sequence
  Description of Artificial Sequence: Synthetic oligonucleotide
gugagcuaugauugcggca

SEQ ID NO: 54025 - RNA, 19 nt, Artificial Sequence
  Description of Artificial Sequence: Synthetic oligonucleotide
acugcacugcagccuggga

SEQ ID NO: 54026 - RNA, 19 nt, Artificial Sequence
  Description of Artificial Sequence: Synthetic oligonucleotide
acaaugagacugugucucu

SEQ ID NO: 54027 - RNA, 19 nt, Artificial Sequence
  Description of Artificial Sequence: Synthetic oligonucleotide
aaacaugauacaugcuauu

SEQ ID NO: 54028 - RNA, 19 nt, Artificial Sequence
  Description of Artificial Sequence: Synthetic oligonucleotide
uaaaaaagacagcaaagca

SEQ ID NO: 54029 - RNA, 19 nt, Artificial Sequence
  Description of Artificial Sequence: Synthetic oligonucleotide
aggaguauaagaaaggaaa

SEQ ID NO: 54030 - RNA, 19 nt, Artificial Sequence
  Description of Artificial Sequence: Synthetic oligonucleotide
auucacccgaggucgcagg

SEQ ID NO: 54031 - RNA, 19 nt, Artificial Sequence
  Description of Artificial Sequence: Synthetic oligonucleotide
ggccuugaguacucauuuu

SEQ ID NO: 54032 - RNA, 19 nt, Artificial Sequence
  Description of Artificial Sequence: Synthetic oligonucleotide
uggugcugauuaccucucu

SEQ ID NO: 54033 - RNA, 19 nt, Artificial Sequence
  Description of Artificial Sequence: Synthetic oligonucleotide
ugcaaauggacacggcauc

SEQ ID NO: 54034 - RNA, 19 nt, Artificial Sequence
  Description of Artificial Sequence: Synthetic oligonucleotide
cauaaauugguaguuuccu

SEQ ID NO: 54035 - RNA, 19 nt, Artificial Sequence
  Description of Artificial Sequence: Synthetic oligonucleotide
ugcucuuuuuguguaaucu

SEQ ID NO: 54036 - RNA, 19 nt, Artificial Sequence
  Description of Artificial Sequence: Synthetic oligonucleotide
uuuuccaguuaaugugaag

SEQ ID NO: 54037 - RNA, 19 nt, Artificial Sequence
  Description of Artificial Sequence: Synthetic oligonucleotide
gccucugggggcugcccuc

SEQ ID NO: 54038 - RNA, 19 nt, Artificial Sequence
  Description of Artificial Sequence: Synthetic oligonucleotide
cgugcacugaugguugugu

SEQ ID NO: 54039 - RNA, 19 nt, Artificial Sequence
  Description of Artificial Sequence: Synthetic oligonucleotide
uggagucgggggcggcagu

SEQ ID NO: 54040 - RNA, 19 nt, Artificial Sequence
  Description of Artificial Sequence: Synthetic oligonucleotide
ugcgauucccuuuuagcug

SEQ ID NO: 54041 - RNA, 19 nt, Artificial Sequence
  Description of Artificial Sequence: Synthetic oligonucleotide
gcugcauggggggaacuca

SEQ ID NO: 54042 - RNA, 19 nt, Artificial Sequence
  Description of Artificial Sequence: Synthetic oligonucleotide
aggcuuuccagcugcuucc

SEQ ID NO: 54043 - RNA, 19 nt, Artificial Sequence
  Description of Artificial Sequence: Synthetic oligonucleotide
cugggguuccaugggguag

SEQ ID NO: 54044 - RNA, 19 nt, Artificial Sequence
  Description of Artificial Sequence: Synthetic oligonucleotide
gaccccucaaccgcuucag

SEQ ID NO: 54045 - RNA, 19 nt, Artificial Sequence
  Description of Artificial Sequence: Synthetic oligonucleotide
gcugccccguuaacaggaa

SEQ ID NO: 54046 - RNA, 19 nt, Artificial Sequence
  Description of Artificial Sequence: Synthetic oligonucleotide
auugacuugguuucguuug

SEQ ID NO: 54047 - RNA, 19 nt, Artificial Sequence
  Description of Artificial Sequence: Synthetic oligonucleotide
ggugcuaccagcaguccug

SEQ ID NO: 54048 - RNA, 19 nt, Artificial Sequence
  Description of Artificial Sequence: Synthetic oligonucleotide
guaauaaacuagcuaucca

SEQ ID NO: 54049 - RNA, 19 nt, Artificial Sequence
  Description of Artificial Sequence: Synthetic oligonucleotide
aacuagcuauccaucugua

SEQ ID NO: 54050 - RNA, 25 nt, Artificial Sequence
  Description of Artificial Sequence: Synthetic oligonucleotide
cggggggggccgcgccgugcuagcc

SEQ ID NO: 54051 - RNA, 25 nt, Artificial Sequence
  Description of Artificial Sequence: Synthetic oligonucleotide
cguugggccugccucggaggaggcg

SEQ ID NO: 54052 - RNA, 25 nt, Artificial Sequence
  Description of Artificial Sequence: Synthetic oligonucleotide
gucgccgccgccgcugccgcugccg

SEQ ID NO: 54053 - RNA, 25 nt, Artificial Sequence
  Description of Artificial Sequence: Synthetic oligonucleotide
ggcgccguugccgcugccgggaaac

SEQ ID NO: 54054 - RNA, 25 nt, Artificial Sequence
  Description of Artificial Sequence: Synthetic oligonucleotide
cacaaggaaagggaaccagcgcagc

SEQ ID NO: 54055 - RNA, 25 nt, Artificial Sequence
  Description of Artificial Sequence: Synthetic oligonucleotide
cguggcgaugggcggggguagagcc

SEQ ID NO: 54056 - RNA, 25 nt, Artificial Sequence
  Description of Artificial Sequence: Synthetic oligonucleotide
cccgccggagaggcugggcggcugc

SEQ ID NO: 54057 - RNA, 25 nt, Artificial Sequence
  Description of Artificial Sequence: Synthetic oligonucleotide
ccggugacagacugugcccugucca

SEQ ID NO: 54058 - RNA, 25 nt, Artificial Sequence
  Description of Artificial Sequence: Synthetic oligonucleotide
acggugccuccugcauguccugcug

SEQ ID NO: 54059 - RNA, 25 nt, Artificial Sequence
  Description of Artificial Sequence: Synthetic oligonucleotide
gcccugagcugucccgagcuaggug

SEQ ID NO: 54060 - RNA, 25 nt, Artificial Sequence
  Description of Artificial Sequence: Synthetic oligonucleotide
gacagcguaccacgcugccaccaug

SEQ ID NO: 54061 - RNA, 25 nt, Artificial Sequence
  Description of Artificial Sequence: Synthetic oligonucleotide
gaaugaggugucugucaucaaagaa

SEQ ID NO: 54062 - RNA, 25 nt, Artificial Sequence
  Description of Artificial Sequence: Synthetic oligonucleotide
aggcuggcuccacaagcguggugaa

SEQ ID NO: 54063 - RNA, 25 nt, Artificial Sequence
  Description of Artificial Sequence: Synthetic oligonucleotide
auacaucaagaccuggaggccacgg

SEQ ID NO: 54064 - RNA, 25 nt, Artificial Sequence
  Description of Artificial Sequence: Synthetic oligonucleotide
guacuuccugcugaagagcgacggc

SEQ ID NO: 54065 - RNA, 25 nt, Artificial Sequence
  Description of Artificial Sequence: Synthetic oligonucleotide
cuccuucauuggguacaaggagagg

SEQ ID NO: 54066 - RNA, 25 nt, Artificial Sequence
  Description of Artificial Sequence: Synthetic oligonucleotide
gcccgaggccccugaucagacucua

SEQ ID NO: 54067 - RNA, 25 nt, Artificial Sequence
  Description of Artificial Sequence: Synthetic oligonucleotide
accccccuuaaacaacuucuccgua

SEQ ID NO: 54068 - RNA, 25 nt, Artificial Sequence
  Description of Artificial Sequence: Synthetic oligonucleotide
agcagaaugccagcugaugaagacc

SEQ ID NO: 54069 - RNA, 25 nt, Artificial Sequence
  Description of Artificial Sequence: Synthetic oligonucleotide
cgagaggccgcgacccaacaccuuu

SEQ ID NO: 54070 - RNA, 25 nt, Artificial Sequence
  Description of Artificial Sequence: Synthetic oligonucleotide
ugucauacgcugccugcaguggacc

SEQ ID NO: 54071 - RNA, 25 nt, Artificial Sequence
  Description of Artificial Sequence: Synthetic oligonucleotide
cacagucaucgagaggaccuuccac

SEQ ID NO: 54072 - RNA, 25 nt, Artificial Sequence
  Description of Artificial Sequence: Synthetic oligonucleotide
cguggauucuccagacgagagggag

SEQ ID NO: 54073 - RNA, 25 nt, Artificial Sequence
  Description of Artificial Sequence: Synthetic oligonucleotide
ggaguggaugcgggccauccagaug

SEQ ID NO: 54074 - RNA, 25 nt, Artificial Sequence
  Description of Artificial Sequence: Synthetic oligonucleotide
ggucgccaacagccucaagcagcgg

SEQ ID NO: 54075 - RNA, 25 nt, Artificial Sequence
  Description of Artificial Sequence: Synthetic oligonucleotide
ggccccaggcgaggaccccauggac

SEQ ID NO: 54076 - RNA, 25 nt, Artificial Sequence
  Description of Artificial Sequence: Synthetic oligonucleotide
cuacaaguguggcucccccagugac

SEQ ID NO: 54077 - RNA, 25 nt, Artificial Sequence
  Description of Artificial Sequence: Synthetic oligonucleotide
cuccuccacgacugaggagauggaa

SEQ ID NO: 54078 - RNA, 25 nt, Artificial Sequence
  Description of Artificial Sequence: Synthetic oligonucleotide
aguggcggucagcaaggcacgggcu

SEQ ID NO: 54079 - RNA, 25 nt, Artificial Sequence
  Description of Artificial Sequence: Synthetic oligonucleotide
uaaagugaccaugaaugacuucgac

SEQ ID NO: 54080 - RNA, 25 nt, Artificial Sequence
  Description of Artificial Sequence: Synthetic oligonucleotide
cuaucucaaacuccuuggcaaggga

SEQ ID NO: 54081 - RNA, 25 nt, Artificial Sequence
  Description of Artificial Sequence: Synthetic oligonucleotide
aaccuuuggcaaagucauccuggug

SEQ ID NO: 54082 - RNA, 25 nt, Artificial Sequence
  Description of Artificial Sequence: Synthetic oligonucleotide
gcgggagaaggccacuggccgcuac

SEQ ID NO: 54083 - RNA, 25 nt, Artificial Sequence
  Description of Artificial Sequence: Synthetic oligonucleotide
cuacgccaugaagauccugcggaag

SEQ ID NO: 54084 - RNA, 25 nt, Artificial Sequence
  Description of Artificial Sequence: Synthetic oligonucleotide
ggaagucaucauugccaaggaugaa

SEQ ID NO: 54085 - RNA, 25 nt, Artificial Sequence
  Description of Artificial Sequence: Synthetic oligonucleotide
agucgcucacacagucaccgagagc

SEQ ID NO: 54086 - RNA, 25 nt, Artificial Sequence
  Description of Artificial Sequence: Synthetic oligonucleotide
ccggguccuccagaacaccaggcac

SEQ ID NO: 54087 - RNA, 25 nt, Artificial Sequence
  Description of Artificial Sequence: Synthetic oligonucleotide
cccguuccucacugcgcugaaguau

SEQ ID NO: 54088 - RNA, 25 nt, Artificial Sequence
  Description of Artificial Sequence: Synthetic oligonucleotide
ugccuuccagacccacgaccgccug

SEQ ID NO: 54089 - RNA, 25 nt, Artificial Sequence
  Description of Artificial Sequence: Synthetic oligonucleotide
gugcuuugugauggaguaugccaac

SEQ ID NO: 54090 - RNA, 25 nt, Artificial Sequence
  Description of Artificial Sequence: Synthetic oligonucleotide
cgggggugagcuguucuuccaccug

SEQ ID NO: 54091 - RNA, 25 nt, Artificial Sequence
  Description of Artificial Sequence: Synthetic oligonucleotide
gucccgggagcgugucuucacagag

SEQ ID NO: 54092 - RNA, 25 nt, Artificial Sequence
  Description of Artificial Sequence: Synthetic oligonucleotide
ggagcgggcccgguuuuauggugca

SEQ ID NO: 54093 - RNA, 25 nt, Artificial Sequence
  Description of Artificial Sequence: Synthetic oligonucleotide
agagauugucucggcucuugaguac

SEQ ID NO: 54094 - RNA, 25 nt, Artificial Sequence
  Description of Artificial Sequence: Synthetic oligonucleotide
cuugcacucgcgggacgugguauac

SEQ ID NO: 54095 - RNA, 25 nt, Artificial Sequence
  Description of Artificial Sequence: Synthetic oligonucleotide
ccgcgacaucaagcuggaaaaccuc

SEQ ID NO: 54096 - RNA, 25 nt, Artificial Sequence
  Description of Artificial Sequence: Synthetic oligonucleotide
caugcuggacaaagauggccacauc

SEQ ID NO: 54097 - RNA, 25 nt, Artificial Sequence
  Description of Artificial Sequence: Synthetic oligonucleotide
caagaucacugacuuuggccucugc

SEQ ID NO: 54098 - RNA, 25 nt, Artificial Sequence
  Description of Artificial Sequence: Synthetic oligonucleotide
caaagagggcaucagugacggggcc

SEQ ID NO: 54099 - RNA, 25 nt, Artificial Sequence
  Description of Artificial Sequence: Synthetic oligonucleotide
caccaugaaaaccuucugugggacc

SEQ ID NO: 54100 - RNA, 25 nt, Artificial Sequence
  Description of Artificial Sequence: Synthetic oligonucleotide
cccggaguaccuggcgccugaggug

SEQ ID NO: 54101 - RNA, 25 nt, Artificial Sequence
  Description of Artificial Sequence: Synthetic oligonucleotide
gcuggaggacaaugacuauggccgg

SEQ ID NO: 54102 - RNA, 25 nt, Artificial Sequence
  Description of Artificial Sequence: Synthetic oligonucleotide
ggccguggacuggugggggcugggu

SEQ ID NO: 54103 - RNA, 25 nt, Artificial Sequence
  Description of Artificial Sequence: Synthetic oligonucleotide
uguggucauguacgagaugaugugc

SEQ ID NO: 54104 - RNA, 25 nt, Artificial Sequence
  Description of Artificial Sequence: Synthetic oligonucleotide
cggccgccugcccuucuacaaccag

SEQ ID NO: 54105 - RNA, 25 nt, Artificial Sequence
  Description of Artificial Sequence: Synthetic oligonucleotide
ggaccacgagcgccucuucgagcuc

SEQ ID NO: 54106 - RNA, 25 nt, Artificial Sequence
  Description of Artificial Sequence: Synthetic oligonucleotide
cauccucauggaagagauccgcuuc

SEQ ID NO: 54107 - RNA, 25 nt, Artificial Sequence
  Description of Artificial Sequence: Synthetic oligonucleotide
cccgcgcacgcucagccccgaggcc

SEQ ID NO: 54108 - RNA, 25 nt, Artificial Sequence
  Description of Artificial Sequence: Synthetic oligonucleotide
caagucccugcuugcugggcugcuu

SEQ ID NO: 54109 - RNA, 25 nt, Artificial Sequence
  Description of Artificial Sequence: Synthetic oligonucleotide
uaagaaggaccccaagcagaggcuu

SEQ ID NO: 54110 - RNA, 25 nt, Artificial Sequence
  Description of Artificial Sequence: Synthetic oligonucleotide
ugguggggggcccagcgaugccaag

SEQ ID NO: 54111 - RNA, 25 nt, Artificial Sequence
  Description of Artificial Sequence: Synthetic oligonucleotide
ggaggucauggagcacagguucuuc

SEQ ID NO: 54112 - RNA, 25 nt, Artificial Sequence
  Description of Artificial Sequence: Synthetic oligonucleotide
ccucagcaucaacuggcaggacgug

SEQ ID NO: 54113 - RNA, 25 nt, Artificial Sequence
  Description of Artificial Sequence: Synthetic oligonucleotide
gguccagaagaagcuccugccaccc

SEQ ID NO: 54114 - RNA, 25 nt, Artificial Sequence
  Description of Artificial Sequence: Synthetic oligonucleotide
cuucaaaccucaggucacguccgag

SEQ ID NO: 54115 - RNA, 25 nt, Artificial Sequence
  Description of Artificial Sequence: Synthetic oligonucleotide
ggucgacacaagguacuucgaugau

SEQ ID NO: 54116 - RNA, 25 nt, Artificial Sequence
  Description of Artificial Sequence: Synthetic oligonucleotide
ugaauuuaccgcccaguccaucaca

SEQ ID NO: 54117 - RNA, 25 nt, Artificial Sequence
  Description of Artificial Sequence: Synthetic oligonucleotide
aaucacacccccugaccgcuaugac

SEQ ID NO: 54118 - RNA, 25 nt, Artificial Sequence
  Description of Artificial Sequence: Synthetic oligonucleotide
cagccugggcuuacuggagcuggac

SEQ ID NO: 54119 - RNA, 25 nt, Artificial Sequence
  Description of Artificial Sequence: Synthetic oligonucleotide
ccagcggacccacuucccccaguuc

SEQ ID NO: 54120 - RNA, 25 nt, Artificial Sequence
  Description of Artificial Sequence: Synthetic oligonucleotide
cuccuacucggccagcauccgcgag

SEQ ID NO: 54121 - RNA, 25 nt, Artificial Sequence
  Description of Artificial Sequence: Synthetic oligonucleotide
gugagcagucugcccacgcagagga

SEQ ID NO: 54122 - RNA, 25 nt, Artificial Sequence
  Description of Artificial Sequence: Synthetic oligonucleotide
acgcacgcucgcugccaucaccgcu

SEQ ID NO: 54123 - RNA, 25 nt, Artificial Sequence
  Description of Artificial Sequence: Synthetic oligonucleotide
ugggugguuuuuucccccuaacuuu

SEQ ID NO: 54124 - RNA, 25 nt, Artificial Sequence
  Description of Artificial Sequence: Synthetic oligonucleotide
uuuacuuagccuuuuugguuugugu

SEQ ID NO: 54125 - RNA, 25 nt, Artificial Sequence
  Description of Artificial Sequence: Synthetic oligonucleotide
uccccacccccaccuccucaccccc

SEQ ID NO: 54126 - RNA, 25 nt, Artificial Sequence
  Description of Artificial Sequence: Synthetic oligonucleotide
cuuuccaguucuucuucaggccccu

SEQ ID NO: 54127 - RNA, 25 nt, Artificial Sequence
  Description of Artificial Sequence: Synthetic oligonucleotide
ucccagacgcaccccagcggccccu

SEQ ID NO: 54128 - RNA, 25 nt, Artificial Sequence
  Description of Artificial Sequence: Synthetic oligonucleotide
ugcagccccugccuccagccuccag

SEQ ID NO: 54129 - RNA, 25 nt, Artificial Sequence
  Description of Artificial Sequence: Synthetic oligonucleotide
gccucaccuuugugcccagacucgc

SEQ ID NO: 54130 - RNA, 25 nt, Artificial Sequence
  Description of Artificial Sequence: Synthetic oligonucleotide
cauuuggaagacuccaccucccgcc

SEQ ID NO: 54131 - RNA, 25 nt, Artificial Sequence
  Description of Artificial Sequence: Synthetic oligonucleotide
ccaggccugggcuguugggcgguug

SEQ ID NO: 54132 - RNA, 25 nt, Artificial Sequence
  Description of Artificial Sequence: Synthetic oligonucleotide
ggagauucagguuuuaauccacaca

SEQ ID NO: 54133 - RNA, 25 nt, Artificial Sequence
  Description of Artificial Sequence: Synthetic oligonucleotide
aagccccagugaggggugaagcaug

SEQ ID NO: 54134 - RNA, 25 nt, Artificial Sequence
  Description of Artificial Sequence: Synthetic oligonucleotide
ggcgccuggggccugccugaguuuc

SEQ ID NO: 54135 - RNA, 25 nt, Artificial Sequence
  Description of Artificial Sequence: Synthetic oligonucleotide
cuggccugggugucgugcugguguc

SEQ ID NO: 54136 - RNA, 25 nt, Artificial Sequence
  Description of Artificial Sequence: Synthetic oligonucleotide
cugccuccgcgcugcugcaucugga

SEQ ID NO: 54137 - RNA, 25 nt, Artificial Sequence
  Description of Artificial Sequence: Synthetic oligonucleotide
acgaaggcugccuucuggugggacg

SEQ ID NO: 54138 - RNA, 25 nt, Artificial Sequence
  Description of Artificial Sequence: Synthetic oligonucleotide
gcgacacccggcagacaguggugcu

SEQ ID NO: 54139 - RNA, 25 nt, Artificial Sequence
  Description of Artificial Sequence: Synthetic oligonucleotide
ugccuuccaggccccguggccuagg

SEQ ID NO: 54140 - RNA, 25 nt, Artificial Sequence
  Description of Artificial Sequence: Synthetic oligonucleotide
gcucggaguggccaggcacggggcg

SEQ ID NO: 54141 - RNA, 25 nt, Artificial Sequence
  Description of Artificial Sequence: Synthetic oligonucleotide
gguccaaucccccacccgcuguccc

SEQ ID NO: 54142 - RNA, 25 nt, Artificial Sequence
  Description of Artificial Sequence: Synthetic oligonucleotide
cccuaugggggcagaaaagcaauaa

SEQ ID NO: 54143 - RNA, 25 nt, Artificial Sequence
  Description of Artificial Sequence: Synthetic oligonucleotide
auguccaggggcaggcaggggcccu

SEQ ID NO: 54144 - RNA, 25 nt, Artificial Sequence
  Description of Artificial Sequence: Synthetic oligonucleotide
uugggagcugcagggcuggggguua

SEQ ID NO: 54145 - RNA, 25 nt, Artificial Sequence
  Description of Artificial Sequence: Synthetic oligonucleotide
agggcugcucccuggugaauggagu

SEQ ID NO: 54146 - RNA, 25 nt, Artificial Sequence
  Description of Artificial Sequence: Synthetic oligonucleotide
ucagauccuaggaucuguaccaugg

SEQ ID NO: 54147 - RNA, 25 nt, Artificial Sequence
  Description of Artificial Sequence: Synthetic oligonucleotide
gggaaccaggaguggccgggcuggg

SEQ ID NO: 54148 - RNA, 25 nt, Artificial Sequence
  Description of Artificial Sequence: Synthetic oligonucleotide
gugccgccuccugguccggccuccu

SEQ ID NO: 54149 - RNA, 25 nt, Artificial Sequence
  Description of Artificial Sequence: Synthetic oligonucleotide
uccccaccaaacuguccucacccua

SEQ ID NO: 54150 - RNA, 25 nt, Artificial Sequence
  Description of Artificial Sequence: Synthetic oligonucleotide
auggaugaggcaggaggaacauuug

SEQ ID NO: 54151 - RNA, 25 nt, Artificial Sequence
  Description of Artificial Sequence: Synthetic oligonucleotide
ggggccaaaccugccugccucccag

SEQ ID NO: 54152 - RNA, 25 nt, Artificial Sequence
  Description of Artificial Sequence: Synthetic oligonucleotide
gccccgugccuuacuagggcuuccu

SEQ ID NO: 54153 - RNA, 25 nt, Artificial Sequence
  Description of Artificial Sequence: Synthetic oligonucleotide
uuccagcuggccuuaccucccgcug

SEQ ID NO: 54154 - RNA, 25 nt, Artificial Sequence
  Description of Artificial Sequence: Synthetic oligonucleotide
ggacccugggccuggccuggcccca

SEQ ID NO: 54155 - RNA, 25 nt, Artificial Sequence
  Description of Artificial Sequence: Synthetic oligonucleotide
acugggggcuaugggcugggcucac

SEQ ID NO: 54156 - RNA, 25 nt, Artificial Sequence
  Description of Artificial Sequence: Synthetic oligonucleotide
cccucuccucugcggggguggaggg

SEQ ID NO: 54157 - RNA, 25 nt, Artificial Sequence
  Description of Artificial Sequence: Synthetic oligonucleotide
gccaccagccuuggcuguuacaauc

SEQ ID NO: 54158 - RNA, 25 nt, Artificial Sequence
  Description of Artificial Sequence: Synthetic oligonucleotide
cuuacaccggacaguauugggcccc

SEQ ID NO: 54159 - RNA, 25 nt, Artificial Sequence
  Description of Artificial Sequence: Synthetic oligonucleotide
cauggacuuggucagggaggggugg

SEQ ID NO: 54160 - RNA, 25 nt, Artificial Sequence
  Description of Artificial Sequence: Synthetic oligonucleotide
ggggugggcaucucugguaccuauu

SEQ ID NO: 54161 - RNA, 25 nt, Artificial Sequence
  Description of Artificial Sequence: Synthetic oligonucleotide
ugggguggggggccucugaaaaggg

SEQ ID NO: 54162 - RNA, 25 nt, Artificial Sequence
  Description of Artificial Sequence: Synthetic oligonucleotide
gaggcuccuaggccccccucacccc

SEQ ID NO: 54163 - RNA, 25 nt, Artificial Sequence
  Description of Artificial Sequence: Synthetic oligonucleotide
cucccucuccccagggccccacguu

SEQ ID NO: 54164 - RNA, 25 nt, Artificial Sequence
  Description of Artificial Sequence: Synthetic oligonucleotide
ucugcagccuuaagguugaacauga

SEQ ID NO: 54165 - RNA, 25 nt, Artificial Sequence
  Description of Artificial Sequence: Synthetic oligonucleotide
agugcacguccaugucagugcugug

SEQ ID NO: 54166 - RNA, 25 nt, Artificial Sequence
  Description of Artificial Sequence: Synthetic oligonucleotide
gggacuccugugcgugccucggacu

SEQ ID NO: 54167 - RNA, 25 nt, Artificial Sequence
  Description of Artificial Sequence: Synthetic oligonucleotide
ugcgugugucggcgggacgcaggca

SEQ ID NO: 54168 - RNA, 25 nt, Artificial Sequence
  Description of Artificial Sequence: Synthetic oligonucleotide
acacgugggugugugugcaugugug

SEQ ID NO: 54169 - RNA, 25 nt, Artificial Sequence
  Description of Artificial Sequence: Synthetic oligonucleotide
guuugugugagggcagcguguccuc

SEQ ID NO: 54170 - RNA, 25 nt, Artificial Sequence
  Description of Artificial Sequence: Synthetic oligonucleotide
ccagugugcauggugugugggcuug

SEQ ID NO: 54171 - RNA, 25 nt, Artificial Sequence
  Description of Artificial Sequence: Synthetic oligonucleotide
gggccccaucccuggcccgagcauu

SEQ ID NO: 54172 - RNA, 25 nt, Artificial Sequence
  Description of Artificial Sequence: Synthetic oligonucleotide
uucauccugugggggaggggugcug

SEQ ID NO: 54173 - RNA, 25 nt, Artificial Sequence
  Description of Artificial Sequence: Synthetic oligonucleotide
gaccuagugggaggagccccacugu

SEQ ID NO: 54174 - RNA, 25 nt, Artificial Sequence
  Description of Artificial Sequence: Synthetic oligonucleotide
ugauccaugagcugcccugcccacg

SEQ ID NO: 54175 - RNA, 25 nt, Artificial Sequence
  Description of Artificial Sequence: Synthetic oligonucleotide
gccuccccucccuguagcaacaccu

SEQ ID NO: 54176 - RNA, 25 nt, Artificial Sequence
  Description of Artificial Sequence: Synthetic oligonucleotide
ucuggguguuuggaguuuagcuuuu

SEQ ID NO: 54177 - RNA, 25 nt, Artificial Sequence
  Description of Artificial Sequence: Synthetic oligonucleotide
uguggguuugcucucccuaucccau

SEQ ID NO: 54178 - RNA, 25 nt, Artificial Sequence
  Description of Artificial Sequence: Synthetic oligonucleotide
ucuccuguacuacacaguucauggc

SEQ ID NO: 54179 - RNA, 25 nt, Artificial Sequence
  Description of Artificial Sequence: Synthetic oligonucleotide
caggguggggaggggugggguuggu

SEQ ID NO: 54180 - RNA, 25 nt, Artificial Sequence
  Description of Artificial Sequence: Synthetic oligonucleotide
uucgggugggugagggucuuuuucc

SEQ ID NO: 54181 - RNA, 25 nt, Artificial Sequence
  Description of Artificial Sequence: Synthetic oligonucleotide
cucugugugcgauguuguuaucuga

SEQ ID NO: 54182 - RNA, 25 nt, Artificial Sequence
  Description of Artificial Sequence: Synthetic oligonucleotide
acaguucuccgucccuacuggccuu

SEQ ID NO: 54183 - RNA, 25 nt, Artificial Sequence
  Description of Artificial Sequence: Synthetic oligonucleotide
uucuccucgucuucauauuuguacg

SEQ ID NO: 54184 - RNA, 25 nt, Artificial Sequence
  Description of Artificial Sequence: Synthetic oligonucleotide
gguacaagcaauaaagacacucauu

SEQ ID NO: 54185 - RNA, 25 nt, Artificial Sequence
  Description of Artificial Sequence: Synthetic oligonucleotide
uucagaccagggcccagccugcacu

SEQ ID NO: 54186 - RNA, 25 nt, Artificial Sequence
  Description of Artificial Sequence: Synthetic oligonucleotide
ucacgccagcccaaccacucugggc

SEQ ID NO: 54187 - RNA, 25 nt, Artificial Sequence
  Description of Artificial Sequence: Synthetic oligonucleotide
cuuugccuuggugauggagucagac

SEQ ID NO: 54188 - RNA, 25 nt, Artificial Sequence
  Description of Artificial Sequence: Synthetic oligonucleotide
ccccugggccccagcuccuccugua

SEQ ID NO: 54189 - RNA, 25 nt, Artificial Sequence
  Description of Artificial Sequence: Synthetic oligonucleotide
acuagccguucccuucagcaaggag

SEQ ID NO: 54190 - RNA, 25 nt, Artificial Sequence
  Description of Artificial Sequence: Synthetic oligonucleotide
gggcacugagcucagggugagggca

SEQ ID NO: 54191 - RNA, 25 nt, Artificial Sequence
  Description of Artificial Sequence: Synthetic oligonucleotide
agcuggggugugugcaggagcucag

SEQ ID NO: 54192 - RNA, 25 nt, Artificial Sequence
  Description of Artificial Sequence: Synthetic oligonucleotide
ggcuggagaggguggguggagcugg

SEQ ID NO: 54193 - RNA, 25 nt, Artificial Sequence
  Description of Artificial Sequence: Synthetic oligonucleotide
gugcuguggggcugagggguauggg

SEQ ID NO: 54194 - RNA, 25 nt, Artificial Sequence
  Description of Artificial Sequence: Synthetic oligonucleotide
gaaggcuccccgcaugugggggugg

SEQ ID NO: 54195 - RNA, 25 nt, Artificial Sequence
  Description of Artificial Sequence: Synthetic oligonucleotide
ggguggacagagaccacuccaggcc

SEQ ID NO: 54196 - RNA, 25 nt, Artificial Sequence
  Description of Artificial Sequence: Synthetic oligonucleotide
ccucagugcugcuuaggcuaagaga

SEQ ID NO: 54197 - RNA, 25 nt, Artificial Sequence
  Description of Artificial Sequence: Synthetic oligonucleotide
aggugggguggagggacagggcugg

SEQ ID NO: 54198 - RNA, 25 nt, Artificial Sequence
  Description of Artificial Sequence: Synthetic oligonucleotide
gaagaucuggguagcccagaaugag

SEQ ID NO: 54199 - RNA, 25 nt, Artificial Sequence
  Description of Artificial Sequence: Synthetic oligonucleotide
ggagggugccugugcugucacugaa

SEQ ID NO: 54200 - RNA, 25 nt, Artificial Sequence
  Description of Artificial Sequence: Synthetic oligonucleotide
augagagggagugguucauuccacc

SEQ ID NO: 54201 - RNA, 25 nt, Artificial Sequence
  Description of Artificial Sequence: Synthetic oligonucleotide
ccggcugccgagccucagagggggg

SEQ ID NO: 54202 - RNA, 25 nt, Artificial Sequence
  Description of Artificial Sequence: Synthetic oligonucleotide
gcauuccuauccugccccaccuccc

SEQ ID NO: 54203 - RNA, 25 nt, Artificial Sequence
  Description of Artificial Sequence: Synthetic oligonucleotide
cuguuuaugcugccaccuggaagcc

SEQ ID NO: 54204 - RNA, 25 nt, Artificial Sequence
  Description of Artificial Sequence: Synthetic oligonucleotide
cuugaggcccccaaauuccaguaca

SEQ ID NO: 54205 - RNA, 25 nt, Artificial Sequence
  Description of Artificial Sequence: Synthetic oligonucleotide
agacccagugguguguucauggugg

SEQ ID NO: 54206 - RNA, 25 nt, Artificial Sequence
  Description of Artificial Sequence: Synthetic oligonucleotide
gcgugguugcugucaccugggagcu

SEQ ID NO: 54207 - RNA, 25 nt, Artificial Sequence
  Description of Artificial Sequence: Synthetic oligonucleotide
uccugagcguuugguuagaacccug

SEQ ID NO: 54208 - RNA, 25 nt, Artificial Sequence
  Description of Artificial Sequence: Synthetic oligonucleotide
guucagcuuggggucagcccucccc

SEQ ID NO: 54209 - RNA, 25 nt, Artificial Sequence
  Description of Artificial Sequence: Synthetic oligonucleotide
cuagucacugcccuuuagccuggau

SEQ ID NO: 54210 - RNA, 25 nt, Artificial Sequence
  Description of Artificial Sequence: Synthetic oligonucleotide
ugugucugggccccugcacuucccg

SEQ ID NO: 54211 - RNA, 25 nt, Artificial Sequence
  Description of Artificial Sequence: Synthetic oligonucleotide
gugcuugagucacguggcugcaugg

SEQ ID NO: 54212 - RNA, 25 nt, Artificial Sequence
  Description of Artificial Sequence: Synthetic oligonucleotide
gccgggcgcuggccggauggaacac

SEQ ID NO: 54213 - RNA, 25 nt, Artificial Sequence
  Description of Artificial Sequence: Synthetic oligonucleotide
ccucccccagcaagggaccagggac

SEQ ID NO: 54214 - RNA, 25 nt, Artificial Sequence
  Description of Artificial Sequence: Synthetic oligonucleotide
ccagagcccuggccugcccugcuga

SEQ ID NO: 54215 - RNA, 25 nt, Artificial Sequence
  Description of Artificial Sequence: Synthetic oligonucleotide
agcccugcugugcagagggccuggc

SEQ ID NO: 54216 - RNA, 25 nt, Artificial Sequence
  Description of Artificial Sequence: Synthetic oligonucleotide
cacagaugaauuugagauuuugccg

SEQ ID NO: 54217 - RNA, 25 nt, Artificial Sequence
  Description of Artificial Sequence: Synthetic oligonucleotide
gcaagguguuagcacuucacaccca

SEQ ID NO: 54218 - RNA, 25 nt, Artificial Sequence
  Description of Artificial Sequence: Synthetic oligonucleotide
auugagucuuugagauuuuaaguga

SEQ ID NO: 54219 - RNA, 25 nt, Artificial Sequence
  Description of Artificial Sequence: Synthetic oligonucleotide
aauguaagcagaaaaagucagaucc

SEQ ID NO: 54220 - RNA, 25 nt, Artificial Sequence
  Description of Artificial Sequence: Synthetic oligonucleotide
caauuuacagaaaucagaguuagcu

SEQ ID NO: 54221 - RNA, 25 nt, Artificial Sequence
  Description of Artificial Sequence: Synthetic oligonucleotide
uacagcuaggacucguuugguuggg

SEQ ID NO: 54222 - RNA, 25 nt, Artificial Sequence
  Description of Artificial Sequence: Synthetic oligonucleotide
gguuuuuuaguuugucuuucuaaag

SEQ ID NO: 54223 - RNA, 25 nt, Artificial Sequence
  Description of Artificial Sequence: Synthetic oligonucleotide
gucauguggaccuuaauuuaauuac

SEQ ID NO: 54224 - RNA, 25 nt, Artificial Sequence
  Description of Artificial Sequence: Synthetic oligonucleotide
caaaagucuacccugguggucauaa

SEQ ID NO: 54225 - RNA, 25 nt, Artificial Sequence
  Description of Artificial Sequence: Synthetic oligonucleotide
aaauaggcaggccuaugaagaaagg

SEQ ID NO: 54226 - RNA, 25 nt, Artificial Sequence
  Description of Artificial Sequence: Synthetic oligonucleotide
gccuuuuacucuuccaucucauccc

SEQ ID NO: 54227 - RNA, 25 nt, Artificial Sequence
  Description of Artificial Sequence: Synthetic oligonucleotide
cagccccgaguugacccacguugcu

SEQ ID NO: 54228 - RNA, 25 nt, Artificial Sequence
  Description of Artificial Sequence: Synthetic oligonucleotide
ugcuccucacaccauggugaugcag

SEQ ID NO: 54229 - RNA, 25 nt, Artificial Sequence
  Description of Artificial Sequence: Synthetic oligonucleotide
ggucucguagugugggcacaggccu

SEQ ID NO: 54230 - RNA, 25 nt, Artificial Sequence
  Description of Artificial Sequence: Synthetic oligonucleotide
uggcuaccucaucuuuuuagugccu

SEQ ID NO: 54231 - RNA, 25 nt, Artificial Sequence
  Description of Artificial Sequence: Synthetic oligonucleotide
ucucuccucuuccacaggauggggu

SEQ ID NO: 54232 - RNA, 25 nt, Artificial Sequence
  Description of Artificial Sequence: Synthetic oligonucleotide
ucccacagcugcagcagcuggcccc

SEQ ID NO: 54233 - RNA, 25 nt, Artificial Sequence
  Description of Artificial Sequence: Synthetic oligonucleotide
cguaguugagcaugugugguuaucc

SEQ ID NO: 54234 - RNA, 25 nt, Artificial Sequence
  Description of Artificial Sequence: Synthetic oligonucleotide
cuguagagcuuuucccaagaagggu

SEQ ID NO: 54235 - RNA, 25 nt, Artificial Sequence
  Description of Artificial Sequence: Synthetic oligonucleotide
uguuugaacuuagagucuuaauaaa

SEQ ID NO: 54236 - RNA, 25 nt, Artificial Sequence
  Description of Artificial Sequence: Synthetic oligonucleotide
aaucuuaccaaauaaauuuugagua

SEQ ID NO: 54237 - RNA, 25 nt, Artificial Sequence
  Description of Artificial Sequence: Synthetic oligonucleotide
agaauaaucgucuuuugcaauguac

SEQ ID NO: 54238 - RNA, 25 nt, Artificial Sequence
  Description of Artificial Sequence: Synthetic oligonucleotide
cauuuuaaaaauuucacacauucuu

SEQ ID NO: 54239 - RNA, 25 nt, Artificial Sequence
  Description of Artificial Sequence: Synthetic oligonucleotide
uuuuuguauauaaagaacagugacu

SEQ ID NO: 54240 - RNA, 25 nt, Artificial Sequence
  Description of Artificial Sequence: Synthetic oligonucleotide
ugggcacaguggcucaugccuguaa

SEQ ID NO: 54241 - RNA, 25 nt, Artificial Sequence
  Description of Artificial Sequence: Synthetic oligonucleotide
aucccagcaauuugggaggccgagg

SEQ ID NO: 54242 - RNA, 25 nt, Artificial Sequence
  Description of Artificial Sequence: Synthetic oligonucleotide
gcgggcgggucucuugaggccaggg

SEQ ID NO: 54243 - RNA, 25 nt, Artificial Sequence
  Description of Artificial Sequence: Synthetic oligonucleotide
gguucgagaccagccugggcaucau

SEQ ID NO: 54244 - RNA, 25 nt, Artificial Sequence
  Description of Artificial Sequence: Synthetic oligonucleotide
uagggagaccuucaucucuacaaaa

SEQ ID NO: 54245 - RNA, 25 nt, Artificial Sequence
  Description of Artificial Sequence: Synthetic oligonucleotide
aaauacaaaaauuagcugggcaugg

SEQ ID NO: 54246 - RNA, 25 nt, Artificial Sequence
  Description of Artificial Sequence: Synthetic oligonucleotide
guggugcaugccugcaaucccagcu

SEQ ID NO: 54247 - RNA, 25 nt, Artificial Sequence
  Description of Artificial Sequence: Synthetic oligonucleotide
uaacuuggaaggcugaggugaggug

SEQ ID NO: 54248 - RNA, 25 nt, Artificial Sequence
  Description of Artificial Sequence: Synthetic oligonucleotide
gggaagaucacuugagcccaggagu

SEQ ID NO: 54249 - RNA, 25 nt, Artificial Sequence
  Description of Artificial Sequence: Synthetic oligonucleotide
uuugaggcugcagugagcuaugauu

SEQ ID NO: 54250 - RNA, 25 nt, Artificial Sequence
  Description of Artificial Sequence: Synthetic oligonucleotide
ugcggcacugcacugcagccuggga

SEQ ID NO: 54251 - RNA, 25 nt, Artificial Sequence
  Description of Artificial Sequence: Synthetic oligonucleotide
acaaugagacugugucucuaaaaau

SEQ ID NO: 54252 - RNA, 25 nt, Artificial Sequence
  Description of Artificial Sequence: Synthetic oligonucleotide
ugcuauuaaaaaagacagcaaagca

SEQ ID NO: 54253 - RNA, 25 nt, Artificial Sequence
  Description of Artificial Sequence: Synthetic oligonucleotide
aggaguauaagaaaggaaauucacc

SEQ ID NO: 54254 - RNA, 25 nt, Artificial Sequence
  Description of Artificial Sequence: Synthetic oligonucleotide
ccgaggucgcagggccuugaguacu

SEQ ID NO: 54255 - RNA, 25 nt, Artificial Sequence
  Description of Artificial Sequence: Synthetic oligonucleotide
ucauuuuggugcugauuaccucucu

SEQ ID NO: 54256 - RNA, 25 nt, Artificial Sequence
  Description of Artificial Sequence: Synthetic oligonucleotide
ugcaaauggacacggcaucauaaau

SEQ ID NO: 54257 - RNA, 25 nt, Artificial Sequence
  Description of Artificial Sequence: Synthetic oligonucleotide
uugguaguuuccugcucuuuuugug

SEQ ID NO: 54258 - RNA, 25 nt, Artificial Sequence
  Description of Artificial Sequence: Synthetic oligonucleotide
guaaucuuuuccaguuaaugugaag

SEQ ID NO: 54259 - RNA, 25 nt, Artificial Sequence
  Description of Artificial Sequence: Synthetic oligonucleotide
gccucugggggcugcccucgugcac

SEQ ID NO: 54260 - RNA, 25 nt, Artificial Sequence
  Description of Artificial Sequence: Synthetic oligonucleotide
cugaugguuguguggagucgggggc

SEQ ID NO: 54261 - RNA, 25 nt, Artificial Sequence
  Description of Artificial Sequence: Synthetic oligonucleotide
cggcagugcgauucccuuuuagcug

SEQ ID NO: 54262 - RNA, 25 nt, Artificial Sequence
  Description of Artificial Sequence: Synthetic oligonucleotide
gcugcauggggggaacucaggcuuu

SEQ ID NO: 54263 - RNA, 25 nt, Artificial Sequence
  Description of Artificial Sequence: Synthetic oligonucleotide
uccagcugcuuccugggguuccaug

SEQ ID NO: 54264 - RNA, 25 nt, Artificial Sequence
  Description of Artificial Sequence: Synthetic oligonucleotide
gggguagaccccucaaccgcuucag

SEQ ID NO: 54265 - RNA, 25 nt, Artificial Sequence
  Description of Artificial Sequence: Synthetic oligonucleotide
gcugccccguuaacaggaauugacu

SEQ ID NO: 54266 - RNA, 25 nt, Artificial Sequence
  Description of Artificial Sequence: Synthetic oligonucleotide
uugguuucguuuggugcuaccagca

SEQ ID NO: 54267 - RNA, 25 nt, Artificial Sequence
  Description of Artificial Sequence: Synthetic oligonucleotide
aguccuguaauaaacuagcuaucca

SEQ ID NO: 54268 - RNA, 25 nt, Artificial Sequence
  Description of Artificial Sequence: Synthetic oligonucleotide
guaauaaacuagcuauccaucugua

SEQ ID NO: 54269 - RNA, 3588 nt, Homo sapiens
gcagcagcagagaauccaaacccuaaagcugauaucacaaaguaccauuucuccaaguugggggcucagaggggagucaucaugagcgauguuaccauugugaaagaagguuggguucagaagaggggagaauauauaaaaaacuggaggccaagauacuuccuuuugaagacagauggcucauucauaggauauaaagagaaaccucaagauguggauuuaccuuauccccucaacaacuuuucaguggcaaaaugccaguuaaugaaaacagaacgaccaaagccaaacacauuuauaaucagaugucuccaguggacuacuguuauagagagaacauuucauguagauacuccagaggaaagggaagaauggacagaagcuauccaggcuguagcagacagacugcagaggcaagaagaggagagaaugaauuguaguccaacuucacaaauugauaauauaggagaggaagagauggaugccucuacaacccaucauaaaagaaagacaaugaaugauuuugacuauuugaaacuacuagguaaaggcacuuuugggaaaguuauuuugguucgagagaaggcaaguggaaaauacuaugcuaugaagauucugaagaaagaagucauuauugcaaaggaugaaguggcacacacucuaacugaaagcagaguauuaaagaacacuagacaucccuuuuuaacauccuugaaauauuccuuccagacaaaagaccguuuguguuuugugauggaauauguuaaugggggcgagcuguuuuuccauuugucgagagagcggguguucucugaggaccgcacacguuucuauggugcagaaauugucucugccuuggacuaucuacauuccggaaagauuguguaccgugaucucaaguuggagaaucuaaugcuggacaaagauggccacauaaaaauuacagauuuuggacuuugcaaagaagggaucacagaugcagccaccaugaagacauucuguggcacuccagaauaucuggcaccagagguguuagaagauaaugacuauggccgagcaguagacugguggggccuagggguugucauguaugaaaugaugugugggagguuaccuuucuacaaccaggaccaugagaaacuuuuugaauuaauauuaauggaagacauuaaauuuccucgaacacucucuucagaugcaaaaucauugcuuucagggcucuugauaaaggauccaaauaaacgccuugguggaggaccagaugaugcaaaagaaauuaugagacacaguuucuucucuggaguaaacuggcaagauguauaugauaaaaagcuuguaccuccuuuuaaaccucaaguaacaucugagacagauacuagauauuuugaugaagaauuuacagcucagacuauuacaauaacaccaccugaaaaauaugaugaggaugguauggacugcauggacaaugagaggcggccgcauuucccucaauuuuccuacucugcaaguggacgagaauaagucucuuucauucugcuacuucacugucaucuucaauuuauuacugaaaaugauuccuggacaucaccaguccuagcucuuacacauagcaggggcaccuuccgacaucccagaccagccaaggguccucaccccucgccaccuuucacccucaugaaaacacacauacacgcaaauacacuccaguuuuuguuuuugcaugaaauuguaucucagucuaaggucucaugcuguugcugcuacugucuuacuauuauagcaacuuuaagaaguaauuuuccaaccuuuggaagucaugagcccaccauuguucauuugugcaccaauuaucaucuuuugaucuuuuaguuuuucccucagugaaggcuaaaugagauacacugauucuagguacauuuuuuaacuuucuagaagagaaaaacuaacuagacuaagaagauuuaguuuauaaauucagaacaagcaauuguggaagggugguggcgugcauauguaaagcacaucagauccgugcgugaaguaggcauauaucacuaagcuguggcuggaauugauuaggaagcauuugguagaaggacugaacaacuguugggauauauauauauauauauaauuuuuuuuuuuuaaauuccugguggauacuguagaagaagcccauaucacauguggaugucgagacuucacgggcaaucaugagcaagugaacacuguucuaccaagaacugaaggcauaugcacagucaaggucacuuaaagggucuuaugaaacaauuugagccagagagcaucuuuccccugugcuuggaaaccuuuuuuccuucuugacauuuaucaccucugauggcugaagaauguagacagguauaaugauacugcuuuucaccaaaauuucuacaccaagguaaacagguguuugccuuauuuaauuuuuuacuuucaguucuacgugaauuagcuuuuucucagauguugaaacuuugaauguccuuuuaugauuuuguuuauauugcaguaguauuuauuuuuuagugaugagaauuguaugucauguuagcaaacgcagcuccaacuuauauaaaauagacuuacugcaguuacuuuugacccaugugcaaggauuguacacgcugaugagaaucaugcacuuuuucuccucuguuaaaaaaaaugauaaggcucugaaauggaauauauugguuagaauuuggcuuugggagaagagaugcugccauuuaaccccuugguacugaaaaugagaaaauccccaacuaugcaugccaagggguuaaugaaacaaauagcuguugacguuugcucauuuaagaauuugaaacguuaugaugaccuggcaacaaaaaguaaugaagaaaauugagaccugagugaagauaagaaaugaucuuuacguggcaaaaugaacacaucuugaguauuuaggaaaugggcagugaaggcuaagaaccugguguguuucuugggaucaugguacauuuaucacugaauuaagccaucagggaaaaaacaacaaaaaaagagaacaccuccagcuuuucuuuuucuguauauacucaugucccccagauuccaacauuucucacugaaagggggcauguaugcaaaccucaucuuucuccuucauuaaugaugaucuucagauuaaacccuuuggugcuaggagcugacaauuuccaaagcagccugugaaguccuaggggcugggggccacucuugcggcaagcagaaggccauccuacuccgcggagugaucauggaaauguauuuuaguuaaacucugacagcucccaaacggaagacuacagcaugacguaguauuaugauugcauuguaugaaagagcaagugacuuucuaaguaggaugaaucauauucauaugcagaugucuuagccucuugacgcuggaaguguggauuuauagcuaugaaaccacugcuggcagugggugggccacugggacugacggggguuaaagggcauuuuacuaaggcagcuaagacauauucagacaucaacguuauccuucuuuuucauauuucuaccugagugaag

SEQ ID NO: 54270 - RNA, 1703 nt, Homo sapiens
gcagcagcagagaauccaaacccuaaagcugauaucacaaaguaccauuucuccaaguugggggcucagaggggagucaucaugagcgauguuaccauugugaaagaagguuggguucagaagaggggagaauauauaaaaaacuggaggccaagauacuuccuuuugaagacagauggcucauucauaggauauaaagagaaaccucaagauguggauuuaccuuauccccucaacaacuuuucaguggcaaaaugccaguuaaugaaaacagaacgaccaaagccaaacacauuuauaaucagaugucuccaguggacuacuguuauagagagaacauuucauguagauacuccagaggaaagggaagaauggacagaagcuauccaggcuguagcagacagacugcagaggcaagaagaggagagaaugaauuguaguccaacuucacaaauugauaauauaggagaggaagagauggaugccucuacaacccaucauaaaagaaagacaaugaaugauuuugacuauuugaaacuacuagguaaaggcacuuuugggaaaguuauuuugguucgagagaaggcaaguggaaaauacuaugcuaugaagauucugaagaaagaagucauuauugcaaaggaugaaguggcacacacucuaacugaaagcagaguauuaaagaacacuagacaucccuuuuuaacauccuugaaauauuccuuccagacaaaagaccguuuguguuuugugauggaauauguuaaugggggcgagcuguuuuuccauuugucgagagagcggguguucucugaggaccgcacacguuucuauggugcagaaauugucucugccuuggacuaucuacauuccggaaagauuguguaccgugaucucaaguuggagaaucuaaugcuggacaaagauggccacauaaaaauuacagauuuuggacuuugcaaagaagggaucacagaugcagccaccaugaagacauucuguggcacuccagaauaucuggcaccagagguguuagaagauaaugacuauggccgagcaguagacugguggggccuagggguugucauguaugaaaugaugugugggagguuaccuuucuacaaccaggaccaugagaaacuuuuugaauuaauauuaauggaagacauuaaauuuccucgaacacucucuucagaugcaaaaucauugcuuucagggcucuugauaaaggauccaaauaaacgccuugguggaggaccagaugaugcaaaagaaauuaugagacacaguuucuucucuggaguaaacuggcaagauguauaugauaaaaagcuuguaccuccuuuuaaaccucaaguaacaucugagacagauacuagauauuuugaugaagaauuuacagcucagacuauuacaauaacaccaccugaaaaaugucagcaaucagauuguggcaugcuggguaacuggaaaaaauaauaaaaaucggcuuccuacagccagcagcacagucacccauggaacuguuggcuuuggauuaaauguggaauugaacgacuacccagaaguguucuggaaagaagcgagauguguggccugccucaccguccucacccaucaaaagcaccagcaggcacguuaacucgaauucucacaaggaaaaggccauuaaagcucaaggugcauuucaaacuccaggcuac

SEQ ID NO: 54271 - RNA, 19 nt, Artificial Sequence
  Description of Artificial Sequence: Synthetic oligonucleotide
gcagcagcagagaauccaa

SEQ ID NO: 54272 - RNA, 19 nt, Artificial Sequence
  Description of Artificial Sequence: Synthetic oligonucleotide
aacccuaaagcugauauca

SEQ ID NO: 54273 - RNA, 19 nt, Artificial Sequence
  Description of Artificial Sequence: Synthetic oligonucleotide
acaaaguaccauuucucca

SEQ ID NO: 54274 - RNA, 19 nt, Artificial Sequence
  Description of Artificial Sequence: Synthetic oligonucleotide
aaguugggggcucagaggg

SEQ ID NO: 54275 - RNA, 19 nt, Artificial Sequence
  Description of Artificial Sequence: Synthetic oligonucleotide
ggagucaucaugagcgaug

SEQ ID NO: 54276 - RNA, 19 nt, Artificial Sequence
  Description of Artificial Sequence: Synthetic oligonucleotide
guuaccauugugaaagaag

SEQ ID NO: 54277 - RNA, 19 nt, Artificial Sequence
  Description of Artificial Sequence: Synthetic oligonucleotide
gguuggguucagaagaggg

SEQ ID NO: 54278 - RNA, 19 nt, Artificial Sequence
  Description of Artificial Sequence: Synthetic oligonucleotide
ggagaauauauaaaaaacu

SEQ ID NO: 54279 - RNA, 19 nt, Artificial Sequence
  Description of Artificial Sequence: Synthetic oligonucleotide
uggaggccaagauacuucc

SEQ ID NO: 54280 - RNA, 19 nt, Artificial Sequence
  Description of Artificial Sequence: Synthetic oligonucleotide
cuuuugaagacagauggcu

SEQ ID NO: 54281 - RNA, 19 nt, Artificial Sequence
  Description of Artificial Sequence: Synthetic oligonucleotide
ucauucauaggauauaaag

SEQ ID NO: 54282 - RNA, 19 nt, Artificial Sequence
  Description of Artificial Sequence: Synthetic oligonucleotide
gagaaaccucaagaugugg

SEQ ID NO: 54283 - RNA, 19 nt, Artificial Sequence
  Description of Artificial Sequence: Synthetic oligonucleotide
gauuuaccuuauccccuca

SEQ ID NO: 54284 - RNA, 19 nt, Artificial Sequence
  Description of Artificial Sequence: Synthetic oligonucleotide
aacaacuuuucaguggcaa

SEQ ID NO: 54285 - RNA, 19 nt, Artificial Sequence
  Description of Artificial Sequence: Synthetic oligonucleotide
aaaugccaguuaaugaaaa

SEQ ID NO: 54286 - RNA, 19 nt, Artificial Sequence
  Description of Artificial Sequence: Synthetic oligonucleotide
acagaacgaccaaagccaa

SEQ ID NO: 54287 - RNA, 19 nt, Artificial Sequence
  Description of Artificial Sequence: Synthetic oligonucleotide
aacacauuuauaaucagau

SEQ ID NO: 54288 - RNA, 19 nt, Artificial Sequence
  Description of Artificial Sequence: Synthetic oligonucleotide
ugucuccaguggacuacug

SEQ ID NO: 54289 - RNA, 19 nt, Artificial Sequence
  Description of Artificial Sequence: Synthetic oligonucleotide
guuauagagagaacauuuc

SEQ ID NO: 54290 - RNA, 19 nt, Artificial Sequence
  Description of Artificial Sequence: Synthetic oligonucleotide
cauguagauacuccagagg

SEQ ID NO: 54291 - RNA, 19 nt, Artificial Sequence
  Description of Artificial Sequence: Synthetic oligonucleotide
gaaagggaagaauggacag

SEQ ID NO: 54292 - RNA, 19 nt, Artificial Sequence
  Description of Artificial Sequence: Synthetic oligonucleotide
gaagcuauccaggcuguag

SEQ ID NO: 54293 - RNA, 19 nt, Artificial Sequence
  Description of Artificial Sequence: Synthetic oligonucleotide
gcagacagacugcagaggc

SEQ ID NO: 54294 - RNA, 19 nt, Artificial Sequence
  Description of Artificial Sequence: Synthetic oligonucleotide
caagaagaggagagaauga

SEQ ID NO: 54295 - RNA, 19 nt, Artificial Sequence
  Description of Artificial Sequence: Synthetic oligonucleotide
aauuguaguccaacuucac

SEQ ID NO: 54296 - RNA, 19 nt, Artificial Sequence
  Description of Artificial Sequence: Synthetic oligonucleotide
caaauugauaauauaggag

SEQ ID NO: 54297 - RNA, 19 nt, Artificial Sequence
  Description of Artificial Sequence: Synthetic oligonucleotide
gaggaagagauggaugccu

SEQ ID NO: 54298 - RNA, 19 nt, Artificial Sequence
  Description of Artificial Sequence: Synthetic oligonucleotide
ucuacaacccaucauaaaa

SEQ ID NO: 54299 - RNA, 19 nt, Artificial Sequence
  Description of Artificial Sequence: Synthetic oligonucleotide
agaaagacaaugaaugauu

SEQ ID NO: 54300 - RNA, 19 nt, Artificial Sequence
  Description of Artificial Sequence: Synthetic oligonucleotide
uuugacuauuugaaacuac

SEQ ID NO: 54301 - RNA, 19 nt, Artificial Sequence
  Description of Artificial Sequence: Synthetic oligonucleotide
cuagguaaaggcacuuuug

SEQ ID NO: 54302 - RNA, 19 nt, Artificial Sequence
  Description of Artificial Sequence: Synthetic oligonucleotide
gggaaaguuauuuugguuc

SEQ ID NO: 54303 - RNA, 19 nt, Artificial Sequence
  Description of Artificial Sequence: Synthetic oligonucleotide
cgagagaaggcaaguggaa

SEQ ID NO: 54304 - RNA, 19 nt, Artificial Sequence
  Description of Artificial Sequence: Synthetic oligonucleotide
aaauacuaugcuaugaaga

SEQ ID NO: 54305 - RNA, 19 nt, Artificial Sequence
  Description of Artificial Sequence: Synthetic oligonucleotide
auucugaagaaagaaguca

SEQ ID NO: 54306 - RNA, 19 nt, Artificial Sequence
  Description of Artificial Sequence: Synthetic oligonucleotide
auuauugcaaaggaugaag

SEQ ID NO: 54307 - RNA, 19 nt, Artificial Sequence
  Description of Artificial Sequence: Synthetic oligonucleotide
guggcacacacucuaacug

SEQ ID NO: 54308 - RNA, 19 nt, Artificial Sequence
  Description of Artificial Sequence: Synthetic oligonucleotide
gaaagcagaguauuaaaga

SEQ ID NO: 54309 - RNA, 19 nt, Artificial Sequence
  Description of Artificial Sequence: Synthetic oligonucleotide
aacacuagacaucccuuuu

SEQ ID NO: 54310 - RNA, 19 nt, Artificial Sequence
  Description of Artificial Sequence: Synthetic oligonucleotide
uuaacauccuugaaauauu

SEQ ID NO: 54311 - RNA, 19 nt, Artificial Sequence
  Description of Artificial Sequence: Synthetic oligonucleotide
uccuuccagacaaaagacc

SEQ ID NO: 54312 - RNA, 19 nt, Artificial Sequence
  Description of Artificial Sequence: Synthetic oligonucleotide
cguuuguguuuugugaugg

SEQ ID NO: 54313 - RNA, 19 nt, Artificial Sequence
  Description of Artificial Sequence: Synthetic oligonucleotide
gaauauguuaaugggggcg

SEQ ID NO: 54314 - RNA, 19 nt, Artificial Sequence
  Description of Artificial Sequence: Synthetic oligonucleotide
gagcuguuuuuccauuugu

SEQ ID NO: 54315 - RNA, 19 nt, Artificial Sequence
  Description of Artificial Sequence: Synthetic oligonucleotide
ucgagagagcggguguucu

SEQ ID NO: 54316 - RNA, 19 nt, Artificial Sequence
  Description of Artificial Sequence: Synthetic oligonucleotide
ucugaggaccgcacacguu

SEQ ID NO: 54317 - RNA, 19 nt, Artificial Sequence
  Description of Artificial Sequence: Synthetic oligonucleotide
uucuauggugcagaaauug

SEQ ID NO: 54318 - RNA, 19 nt, Artificial Sequence
  Description of Artificial Sequence: Synthetic oligonucleotide
gucucugccuuggacuauc

SEQ ID NO: 54319 - RNA, 19 nt, Artificial Sequence
  Description of Artificial Sequence: Synthetic oligonucleotide
cuacauuccggaaagauug

SEQ ID NO: 54320 - RNA, 19 nt, Artificial Sequence
  Description of Artificial Sequence: Synthetic oligonucleotide
guguaccgugaucucaagu

SEQ ID NO: 54321 - RNA, 19 nt, Artificial Sequence
  Description of Artificial Sequence: Synthetic oligonucleotide
uuggagaaucuaaugcugg

SEQ ID NO: 54322 - RNA, 19 nt, Artificial Sequence
  Description of Artificial Sequence: Synthetic oligonucleotide
gacaaagauggccacauaa

SEQ ID NO: 54323 - RNA, 19 nt, Artificial Sequence
  Description of Artificial Sequence: Synthetic oligonucleotide
aaaauuacagauuuuggac

SEQ ID NO: 54324 - RNA, 19 nt, Artificial Sequence
  Description of Artificial Sequence: Synthetic oligonucleotide
cuuugcaaagaagggauca

SEQ ID NO: 54325 - RNA, 19 nt, Artificial Sequence
  Description of Artificial Sequence: Synthetic oligonucleotide
acagaugcagccaccauga

SEQ ID NO: 54326 - RNA, 19 nt, Artificial Sequence
  Description of Artificial Sequence: Synthetic oligonucleotide
aagacauucuguggcacuc

SEQ ID NO: 54327 - RNA, 19 nt, Artificial Sequence
  Description of Artificial Sequence: Synthetic oligonucleotide
ccagaauaucuggcaccag

SEQ ID NO: 54328 - RNA, 19 nt, Artificial Sequence
  Description of Artificial Sequence: Synthetic oligonucleotide
gagguguuagaagauaaug

SEQ ID NO: 54329 - RNA, 19 nt, Artificial Sequence
  Description of Artificial Sequence: Synthetic oligonucleotide
gacuauggccgagcaguag

SEQ ID NO: 54330 - RNA, 19 nt, Artificial Sequence
  Description of Artificial Sequence: Synthetic oligonucleotide
gacugguggggccuagggg

SEQ ID NO: 54331 - RNA, 19 nt, Artificial Sequence
  Description of Artificial Sequence: Synthetic oligonucleotide
guugucauguaugaaauga

SEQ ID NO: 54332 - RNA, 19 nt, Artificial Sequence
  Description of Artificial Sequence: Synthetic oligonucleotide
augugugggagguuaccuu

SEQ ID NO: 54333 - RNA, 19 nt, Artificial Sequence
  Description of Artificial Sequence: Synthetic oligonucleotide
uucuacaaccaggaccaug

SEQ ID NO: 54334 - RNA, 19 nt, Artificial Sequence
  Description of Artificial Sequence: Synthetic oligonucleotide
gagaaacuuuuugaauuaa

SEQ ID NO: 54335 - RNA, 19 nt, Artificial Sequence
  Description of Artificial Sequence: Synthetic oligonucleotide
auauuaauggaagacauua

SEQ ID NO: 54336 - RNA, 19 nt, Artificial Sequence
  Description of Artificial Sequence: Synthetic oligonucleotide
aaauuuccucgaacacucu

SEQ ID NO: 54337 - RNA, 19 nt, Artificial Sequence
  Description of Artificial Sequence: Synthetic oligonucleotide
ucuucagaugcaaaaucau

SEQ ID NO: 54338 - RNA, 19 nt, Artificial Sequence
  Description of Artificial Sequence: Synthetic oligonucleotide
uugcuuucagggcucuuga

SEQ ID NO: 54339 - RNA, 19 nt, Artificial Sequence
  Description of Artificial Sequence: Synthetic oligonucleotide
auaaaggauccaaauaaac

SEQ ID NO: 54340 - RNA, 19 nt, Artificial Sequence
  Description of Artificial Sequence: Synthetic oligonucleotide
cgccuugguggaggaccag

SEQ ID NO: 54341 - RNA, 19 nt, Artificial Sequence
  Description of Artificial Sequence: Synthetic oligonucleotide
gaugaugcaaaagaaauua

SEQ ID NO: 54342 - RNA, 19 nt, Artificial Sequence
  Description of Artificial Sequence: Synthetic oligonucleotide
augagacacaguuucuucu

SEQ ID NO: 54343 - RNA, 19 nt, Artificial Sequence
  Description of Artificial Sequence: Synthetic oligonucleotide
ucuggaguaaacuggcaag

SEQ ID NO: 54344 - RNA, 19 nt, Artificial Sequence
  Description of Artificial Sequence: Synthetic oligonucleotide
gauguauaugauaaaaagc

SEQ ID NO: 54345 - RNA, 19 nt, Artificial Sequence
  Description of Artificial Sequence: Synthetic oligonucleotide
cuuguaccuccuuuuaaac

SEQ ID NO: 54346 - RNA, 19 nt, Artificial Sequence
  Description of Artificial Sequence: Synthetic oligonucleotide
ccucaaguaacaucugaga

SEQ ID NO: 54347 - RNA, 19 nt, Artificial Sequence
  Description of Artificial Sequence: Synthetic oligonucleotide
acagauacuagauauuuug

SEQ ID NO: 54348 - RNA, 19 nt, Artificial Sequence
  Description of Artificial Sequence: Synthetic oligonucleotide
gaugaagaauuuacagcuc

SEQ ID NO: 54349 - RNA, 19 nt, Artificial Sequence
  Description of Artificial Sequence: Synthetic oligonucleotide
cagacuauuacaauaacac

SEQ ID NO: 54350 - RNA, 19 nt, Artificial Sequence
  Description of Artificial Sequence: Synthetic oligonucleotide
ccaccugaaaaauaugaug

SEQ ID NO: 54351 - RNA, 19 nt, Artificial Sequence
  Description of Artificial Sequence: Synthetic oligonucleotide
gaggaugguauggacugca

SEQ ID NO: 54352 - RNA, 19 nt, Artificial Sequence
  Description of Artificial Sequence: Synthetic oligonucleotide
auggacaaugagaggcggc

SEQ ID NO: 54353 - RNA, 19 nt, Artificial Sequence
  Description of Artificial Sequence: Synthetic oligonucleotide
ccgcauuucccucaauuuu

SEQ ID NO: 54354 - RNA, 19 nt, Artificial Sequence
  Description of Artificial Sequence: Synthetic oligonucleotide
uccuacucugcaaguggac

SEQ ID NO: 54355 - RNA, 19 nt, Artificial Sequence
  Description of Artificial Sequence: Synthetic oligonucleotide
cgagaauaagucucuuuca

SEQ ID NO: 54356 - RNA, 19 nt, Artificial Sequence
  Description of Artificial Sequence: Synthetic oligonucleotide
auucugcuacuucacuguc

SEQ ID NO: 54357 - RNA, 19 nt, Artificial Sequence
  Description of Artificial Sequence: Synthetic oligonucleotide
caucuucaauuuauuacug

SEQ ID NO: 54358 - RNA, 19 nt, Artificial Sequence
  Description of Artificial Sequence: Synthetic oligonucleotide
gaaaaugauuccuggacau

SEQ ID NO: 54359 - RNA, 19 nt, Artificial Sequence
  Description of Artificial Sequence: Synthetic oligonucleotide
ucaccaguccuagcucuua

SEQ ID NO: 54360 - RNA, 19 nt, Artificial Sequence
  Description of Artificial Sequence: Synthetic oligonucleotide
acacauagcaggggcaccu

SEQ ID NO: 54361 - RNA, 19 nt, Artificial Sequence
  Description of Artificial Sequence: Synthetic oligonucleotide
uuccgacaucccagaccag

SEQ ID NO: 54362 - RNA, 19 nt, Artificial Sequence
  Description of Artificial Sequence: Synthetic oligonucleotide
gccaaggguccucaccccu

SEQ ID NO: 54363 - RNA, 19 nt, Artificial Sequence
  Description of Artificial Sequence: Synthetic oligonucleotide
ucgccaccuuucacccuca

SEQ ID NO: 54364 - RNA, 19 nt, Artificial Sequence
  Description of Artificial Sequence: Synthetic oligonucleotide
augaaaacacacauacacg

SEQ ID NO: 54365 - RNA, 19 nt, Artificial Sequence
  Description of Artificial Sequence: Synthetic oligonucleotide
gcaaauacacuccaguuuu

SEQ ID NO: 54366 - RNA, 19 nt, Artificial Sequence
  Description of Artificial Sequence: Synthetic oligonucleotide
uuguuuuugcaugaaauug

SEQ ID NO: 54367 - RNA, 19 nt, Artificial Sequence
  Description of Artificial Sequence: Synthetic oligonucleotide
guaucucagucuaaggucu

SEQ ID NO: 54368 - RNA, 19 nt, Artificial Sequence
  Description of Artificial Sequence: Synthetic oligonucleotide
ucaugcuguugcugcuacu

SEQ ID NO: 54369 - RNA, 19 nt, Artificial Sequence
  Description of Artificial Sequence: Synthetic oligonucleotide
ugucuuacuauuauagcaa

SEQ ID NO: 54370 - RNA, 19 nt, Artificial Sequence
  Description of Artificial Sequence: Synthetic oligonucleotide
acuuuaagaaguaauuuuc

SEQ ID NO: 54371 - RNA, 19 nt, Artificial Sequence
  Description of Artificial Sequence: Synthetic oligonucleotide
ccaaccuuuggaagucaug

SEQ ID NO: 54372 - RNA, 19 nt, Artificial Sequence
  Description of Artificial Sequence: Synthetic oligonucleotide
gagcccaccauuguucauu

SEQ ID NO: 54373 - RNA, 19 nt, Artificial Sequence
  Description of Artificial Sequence: Synthetic oligonucleotide
uugugcaccaauuaucauc

SEQ ID NO: 54374 - RNA, 19 nt, Artificial Sequence
  Description of Artificial Sequence: Synthetic oligonucleotide
cuuuugaucuuuuaguuuu

SEQ ID NO: 54375 - RNA, 19 nt, Artificial Sequence
  Description of Artificial Sequence: Synthetic oligonucleotide
uucccucagugaaggcuaa

SEQ ID NO: 54376 - RNA, 19 nt, Artificial Sequence
  Description of Artificial Sequence: Synthetic oligonucleotide
aaugagauacacugauucu

SEQ ID NO: 54377 - RNA, 19 nt, Artificial Sequence
  Description of Artificial Sequence: Synthetic oligonucleotide
uagguacauuuuuuaacuu

SEQ ID NO: 54378 - RNA, 19 nt, Artificial Sequence
  Description of Artificial Sequence: Synthetic oligonucleotide
uucuagaagagaaaaacua

SEQ ID NO: 54379 - RNA, 19 nt, Artificial Sequence
  Description of Artificial Sequence: Synthetic oligonucleotide
aacuagacuaagaagauuu

SEQ ID NO: 54380 - RNA, 19 nt, Artificial Sequence
  Description of Artificial Sequence: Synthetic oligonucleotide
uaguuuauaaauucagaac

SEQ ID NO: 54381 - RNA, 19 nt, Artificial Sequence
  Description of Artificial Sequence: Synthetic oligonucleotide
caagcaauuguggaagggu

SEQ ID NO: 54382 - RNA, 19 nt, Artificial Sequence
  Description of Artificial Sequence: Synthetic oligonucleotide
ugguggcgugcauauguaa

SEQ ID NO: 54383 - RNA, 19 nt, Artificial Sequence
  Description of Artificial Sequence: Synthetic oligonucleotide
aagcacaucagauccgugc

SEQ ID NO: 54384 - RNA, 19 nt, Artificial Sequence
  Description of Artificial Sequence: Synthetic oligonucleotide
cgugaaguaggcauauauc

SEQ ID NO: 54385 - RNA, 19 nt, Artificial Sequence
  Description of Artificial Sequence: Synthetic oligonucleotide
cacuaagcuguggcuggaa

SEQ ID NO: 54386 - RNA, 19 nt, Artificial Sequence
  Description of Artificial Sequence: Synthetic oligonucleotide
auugauuaggaagcauuug

SEQ ID NO: 54387 - RNA, 19 nt, Artificial Sequence
  Description of Artificial Sequence: Synthetic oligonucleotide
gguagaaggacugaacaac

SEQ ID NO: 54388 - RNA, 19 nt, Artificial Sequence
  Description of Artificial Sequence: Synthetic oligonucleotide
cuguugggauauauauaua

SEQ ID NO: 54389 - RNA, 19 nt, Artificial Sequence
  Description of Artificial Sequence: Synthetic oligonucleotide
auauauauaauuuuuuuuu

SEQ ID NO: 54390 - RNA, 19 nt, Artificial Sequence
  Description of Artificial Sequence: Synthetic oligonucleotide
uuuuaaauuccugguggau

SEQ ID NO: 54391 - RNA, 19 nt, Artificial Sequence
  Description of Artificial Sequence: Synthetic oligonucleotide
uacuguagaagaagcccau

SEQ ID NO: 54392 - RNA, 19 nt, Artificial Sequence
  Description of Artificial Sequence: Synthetic oligonucleotide
uaucacauguggaugucga

SEQ ID NO: 54393 - RNA, 19 nt, Artificial Sequence
  Description of Artificial Sequence: Synthetic oligonucleotide
agacuucacgggcaaucau

SEQ ID NO: 54394 - RNA, 19 nt, Artificial Sequence
  Description of Artificial Sequence: Synthetic oligonucleotide
ugagcaagugaacacuguu

SEQ ID NO: 54395 - RNA, 19 nt, Artificial Sequence
  Description of Artificial Sequence: Synthetic oligonucleotide
ucuaccaagaacugaaggc

SEQ ID NO: 54396 - RNA, 19 nt, Artificial Sequence
  Description of Artificial Sequence: Synthetic oligonucleotide
cauaugcacagucaagguc

SEQ ID NO: 54397 - RNA, 19 nt, Artificial Sequence
  Description of Artificial Sequence: Synthetic oligonucleotide
cacuuaaagggucuuauga

SEQ ID NO: 54398 - RNA, 19 nt, Artificial Sequence
  Description of Artificial Sequence: Synthetic oligonucleotide
aaacaauuugagccagaga

SEQ ID NO: 54399 - RNA, 19 nt, Artificial Sequence
  Description of Artificial Sequence: Synthetic oligonucleotide
agcaucuuuccccugugcu

SEQ ID NO: 54400 - RNA, 19 nt, Artificial Sequence
  Description of Artificial Sequence: Synthetic oligonucleotide
uuggaaaccuuuuuuccuu

SEQ ID NO: 54401 - RNA, 19 nt, Artificial Sequence
  Description of Artificial Sequence: Synthetic oligonucleotide
ucuugacauuuaucaccuc

SEQ ID NO: 54402 - RNA, 19 nt, Artificial Sequence
  Description of Artificial Sequence: Synthetic oligonucleotide
cugauggcugaagaaugua

SEQ ID NO: 54403 - RNA, 19 nt, Artificial Sequence
  Description of Artificial Sequence: Synthetic oligonucleotide
agacagguauaaugauacu

SEQ ID NO: 54404 - RNA, 19 nt, Artificial Sequence
  Description of Artificial Sequence: Synthetic oligonucleotide
ugcuuuucaccaaaauuuc

SEQ ID NO: 54405 - RNA, 19 nt, Artificial Sequence
  Description of Artificial Sequence: Synthetic oligonucleotide
cuacaccaagguaaacagg

SEQ ID NO: 54406 - RNA, 19 nt, Artificial Sequence
  Description of Artificial Sequence: Synthetic oligonucleotide
guguuugccuuauuuaauu

SEQ ID NO: 54407 - RNA, 19 nt, Artificial Sequence
  Description of Artificial Sequence: Synthetic oligonucleotide
uuuuuacuuucaguucuac

SEQ ID NO: 54408 - RNA, 19 nt, Artificial Sequence
  Description of Artificial Sequence: Synthetic oligonucleotide
cgugaauuagcuuuuucuc

SEQ ID NO: 54409 - RNA, 19 nt, Artificial Sequence
  Description of Artificial Sequence: Synthetic oligonucleotide
cagauguugaaacuuugaa

SEQ ID NO: 54410 - RNA, 19 nt, Artificial Sequence
  Description of Artificial Sequence: Synthetic oligonucleotide
auguccuuuuaugauuuug

SEQ ID NO: 54411 - RNA, 19 nt, Artificial Sequence
  Description of Artificial Sequence: Synthetic oligonucleotide
guuuauauugcaguaguau

SEQ ID NO: 54412 - RNA, 19 nt, Artificial Sequence
  Description of Artificial Sequence: Synthetic oligonucleotide
uuuauuuuuuagugaugag

SEQ ID NO: 54413 - RNA, 19 nt, Artificial Sequence
  Description of Artificial Sequence: Synthetic oligonucleotide
gaauuguaugucauguuag

SEQ ID NO: 54414 - RNA, 19 nt, Artificial Sequence
  Description of Artificial Sequence: Synthetic oligonucleotide
gcaaacgcagcuccaacuu

SEQ ID NO: 54415 - RNA, 19 nt, Artificial Sequence
  Description of Artificial Sequence: Synthetic oligonucleotide
uauauaaaauagacuuacu

SEQ ID NO: 54416 - RNA, 19 nt, Artificial Sequence
  Description of Artificial Sequence: Synthetic oligonucleotide
ugcaguuacuuuugaccca

SEQ ID NO: 54417 - RNA, 19 nt, Artificial Sequence
  Description of Artificial Sequence: Synthetic oligonucleotide
augugcaaggauuguacac

SEQ ID NO: 54418 - RNA, 19 nt, Artificial Sequence
  Description of Artificial Sequence: Synthetic oligonucleotide
cgcugaugagaaucaugca

SEQ ID NO: 54419 - RNA, 19 nt, Artificial Sequence
  Description of Artificial Sequence: Synthetic oligonucleotide
acuuuuucuccucuguuaa

SEQ ID NO: 54420 - RNA, 19 nt, Artificial Sequence
  Description of Artificial Sequence: Synthetic oligonucleotide
aaaaaaaugauaaggcucu

SEQ ID NO: 54421 - RNA, 19 nt, Artificial Sequence
  Description of Artificial Sequence: Synthetic oligonucleotide
ugaaauggaauauauuggu

SEQ ID NO: 54422 - RNA, 19 nt, Artificial Sequence
  Description of Artificial Sequence: Synthetic oligonucleotide
uuagaauuuggcuuuggga

SEQ ID NO: 54423 - RNA, 19 nt, Artificial Sequence
  Description of Artificial Sequence: Synthetic oligonucleotide
agaagagaugcugccauuu

SEQ ID NO: 54424 - RNA, 19 nt, Artificial Sequence
  Description of Artificial Sequence: Synthetic oligonucleotide
uaaccccuugguacugaaa

SEQ ID NO: 54425 - RNA, 19 nt, Artificial Sequence
  Description of Artificial Sequence: Synthetic oligonucleotide
aaugagaaaauccccaacu

SEQ ID NO: 54426 - RNA, 19 nt, Artificial Sequence
  Description of Artificial Sequence: Synthetic oligonucleotide
uaugcaugccaagggguua

SEQ ID NO: 54427 - RNA, 19 nt, Artificial Sequence
  Description of Artificial Sequence: Synthetic oligonucleotide
aaugaaacaaauagcuguu

SEQ ID NO: 54428 - RNA, 19 nt, Artificial Sequence
  Description of Artificial Sequence: Synthetic oligonucleotide
ugacguuugcucauuuaag

SEQ ID NO: 54429 - RNA, 19 nt, Artificial Sequence
  Description of Artificial Sequence: Synthetic oligonucleotide
gaauuugaaacguuaugau

SEQ ID NO: 54430 - RNA, 19 nt, Artificial Sequence
  Description of Artificial Sequence: Synthetic oligonucleotide
ugaccuggcaacaaaaagu

SEQ ID NO: 54431 - RNA, 19 nt, Artificial Sequence
  Description of Artificial Sequence: Synthetic oligonucleotide
uaaugaagaaaauugagac

SEQ ID NO: 54432 - RNA, 19 nt, Artificial Sequence
  Description of Artificial Sequence: Synthetic oligonucleotide
ccugagugaagauaagaaa

SEQ ID NO: 54433 - RNA, 19 nt, Artificial Sequence
  Description of Artificial Sequence: Synthetic oligonucleotide
augaucuuuacguggcaaa

SEQ ID NO: 54434 - RNA, 19 nt, Artificial Sequence
  Description of Artificial Sequence: Synthetic oligonucleotide
aaugaacacaucuugagua

SEQ ID NO: 54435 - RNA, 19 nt, Artificial Sequence
  Description of Artificial Sequence: Synthetic oligonucleotide
auuuaggaaaugggcagug

SEQ ID NO: 54436 - RNA, 19 nt, Artificial Sequence
  Description of Artificial Sequence: Synthetic oligonucleotide
gaaggcuaagaaccuggug

SEQ ID NO: 54437 - RNA, 19 nt, Artificial Sequence
  Description of Artificial Sequence: Synthetic oligonucleotide
guguuucuugggaucaugg

SEQ ID NO: 54438 - RNA, 19 nt, Artificial Sequence
  Description of Artificial Sequence: Synthetic oligonucleotide
guacauuuaucacugaauu

SEQ ID NO: 54439 - RNA, 19 nt, Artificial Sequence
  Description of Artificial Sequence: Synthetic oligonucleotide
uaagccaucagggaaaaaa

SEQ ID NO: 54440 - RNA, 19 nt, Artificial Sequence
  Description of Artificial Sequence: Synthetic oligonucleotide
acaacaaaaaaagagaaca

SEQ ID NO: 54441 - RNA, 19 nt, Artificial Sequence
  Description of Artificial Sequence: Synthetic oligonucleotide
accuccagcuuuucuuuuu

SEQ ID NO: 54442 - RNA, 19 nt, Artificial Sequence
  Description of Artificial Sequence: Synthetic oligonucleotide
ucuguauauacucaugucc

SEQ ID NO: 54443 - RNA, 19 nt, Artificial Sequence
  Description of Artificial Sequence: Synthetic oligonucleotide
ccccagauuccaacauuuc

SEQ ID NO: 54444 - RNA, 19 nt, Artificial Sequence
  Description of Artificial Sequence: Synthetic oligonucleotide
cucacugaaagggggcaug

SEQ ID NO: 54445 - RNA, 19 nt, Artificial Sequence
  Description of Artificial Sequence: Synthetic oligonucleotide
guaugcaaaccucaucuuu

SEQ ID NO: 54446 - RNA, 19 nt, Artificial Sequence
  Description of Artificial Sequence: Synthetic oligonucleotide
ucuccuucauuaaugauga

SEQ ID NO: 54447 - RNA, 19 nt, Artificial Sequence
  Description of Artificial Sequence: Synthetic oligonucleotide
aucuucagauuaaacccuu

SEQ ID NO: 54448 - RNA, 19 nt, Artificial Sequence
  Description of Artificial Sequence: Synthetic oligonucleotide
uuggugcuaggagcugaca

SEQ ID NO: 54449 - RNA, 19 nt, Artificial Sequence
  Description of Artificial Sequence: Synthetic oligonucleotide
aauuuccaaagcagccugu

SEQ ID NO: 54450 - RNA, 19 nt, Artificial Sequence
  Description of Artificial Sequence: Synthetic oligonucleotide
ugaaguccuaggggcuggg

SEQ ID NO: 54451 - RNA, 19 nt, Artificial Sequence
  Description of Artificial Sequence: Synthetic oligonucleotide
gggccacucuugcggcaag

SEQ ID NO: 54452 - RNA, 19 nt, Artificial Sequence
  Description of Artificial Sequence: Synthetic oligonucleotide
gcagaaggccauccuacuc

SEQ ID NO: 54453 - RNA, 19 nt, Artificial Sequence
  Description of Artificial Sequence: Synthetic oligonucleotide
ccgcggagugaucauggaa

SEQ ID NO: 54454 - RNA, 19 nt, Artificial Sequence
  Description of Artificial Sequence: Synthetic oligonucleotide
aauguauuuuaguuaaacu

SEQ ID NO: 54455 - RNA, 19 nt, Artificial Sequence
  Description of Artificial Sequence: Synthetic oligonucleotide
ucugacagcucccaaacgg

SEQ ID NO: 54456 - RNA, 19 nt, Artificial Sequence
  Description of Artificial Sequence: Synthetic oligonucleotide
gaagacuacagcaugacgu

SEQ ID NO: 54457 - RNA, 19 nt, Artificial Sequence
  Description of Artificial Sequence: Synthetic oligonucleotide
uaguauuaugauugcauug

SEQ ID NO: 54458 - RNA, 19 nt, Artificial Sequence
  Description of Artificial Sequence: Synthetic oligonucleotide
guaugaaagagcaagugac

SEQ ID NO: 54459 - RNA, 19 nt, Artificial Sequence
  Description of Artificial Sequence: Synthetic oligonucleotide
cuuucuaaguaggaugaau

SEQ ID NO: 54460 - RNA, 19 nt, Artificial Sequence
  Description of Artificial Sequence: Synthetic oligonucleotide
ucauauucauaugcagaug

SEQ ID NO: 54461 - RNA, 19 nt, Artificial Sequence
  Description of Artificial Sequence: Synthetic oligonucleotide
gucuuagccucuugacgcu

SEQ ID NO: 54462 - RNA, 19 nt, Artificial Sequence
  Description of Artificial Sequence: Synthetic oligonucleotide
uggaaguguggauuuauag

SEQ ID NO: 54463 - RNA, 19 nt, Artificial Sequence
  Description of Artificial Sequence: Synthetic oligonucleotide
gcuaugaaaccacugcugg

SEQ ID NO: 54464 - RNA, 19 nt, Artificial Sequence
  Description of Artificial Sequence: Synthetic oligonucleotide
gcagugggugggccacugg

SEQ ID NO: 54465 - RNA, 19 nt, Artificial Sequence
  Description of Artificial Sequence: Synthetic oligonucleotide
ggacugacggggguuaaag

SEQ ID NO: 54466 - RNA, 19 nt, Artificial Sequence
  Description of Artificial Sequence: Synthetic oligonucleotide
gggcauuuuacuaaggcag

SEQ ID NO: 54467 - RNA, 19 nt, Artificial Sequence
  Description of Artificial Sequence: Synthetic oligonucleotide
gcuaagacauauucagaca

SEQ ID NO: 54468 - RNA, 19 nt, Artificial Sequence
  Description of Artificial Sequence: Synthetic oligonucleotide
aucaacguuauccuucuuu

SEQ ID NO: 54469 - RNA, 19 nt, Artificial Sequence
  Description of Artificial Sequence: Synthetic oligonucleotide
uuucauauuucuaccugag

SEQ ID NO: 54470 - RNA, 19 nt, Artificial Sequence
  Description of Artificial Sequence: Synthetic oligonucleotide
uauuucuaccugagugaag

SEQ ID NO: 54471 - RNA, 19 nt, Artificial Sequence
  Description of Artificial Sequence: Synthetic oligonucleotide
ccaccugaaaaaugucagc

SEQ ID NO: 54472 - RNA, 19 nt, Artificial Sequence
  Description of Artificial Sequence: Synthetic oligonucleotide
caaucagauuguggcaugc

SEQ ID NO: 54473 - RNA, 19 nt, Artificial Sequence
  Description of Artificial Sequence: Synthetic oligonucleotide
cuggguaacuggaaaaaau

SEQ ID NO: 54474 - RNA, 19 nt, Artificial Sequence
  Description of Artificial Sequence: Synthetic oligonucleotide
uaauaaaaaucggcuuccu

SEQ ID NO: 54475 - RNA, 19 nt, Artificial Sequence
  Description of Artificial Sequence: Synthetic oligonucleotide
uacagccagcagcacaguc

SEQ ID NO: 54476 - RNA, 19 nt, Artificial Sequence
  Description of Artificial Sequence: Synthetic oligonucleotide
cacccauggaacuguuggc

SEQ ID NO: 54477 - RNA, 19 nt, Artificial Sequence
  Description of Artificial Sequence: Synthetic oligonucleotide
cuuuggauuaaauguggaa

SEQ ID NO: 54478 - RNA, 19 nt, Artificial Sequence
  Description of Artificial Sequence: Synthetic oligonucleotide
auugaacgacuacccagaa

SEQ ID NO: 54479 - RNA, 19 nt, Artificial Sequence
  Description of Artificial Sequence: Synthetic oligonucleotide
aguguucuggaaagaagcg

SEQ ID NO: 54480 - RNA, 19 nt, Artificial Sequence
  Description of Artificial Sequence: Synthetic oligonucleotide
gagauguguggccugccuc

SEQ ID NO: 54481 - RNA, 19 nt, Artificial Sequence
  Description of Artificial Sequence: Synthetic oligonucleotide
caccguccucacccaucaa

SEQ ID NO: 54482 - RNA, 19 nt, Artificial Sequence
  Description of Artificial Sequence: Synthetic oligonucleotide
aaagcaccagcaggcacgu

SEQ ID NO: 54483 - RNA, 19 nt, Artificial Sequence
  Description of Artificial Sequence: Synthetic oligonucleotide
uuaacucgaauucucacaa

SEQ ID NO: 54484 - RNA, 19 nt, Artificial Sequence
  Description of Artificial Sequence: Synthetic oligonucleotide
aggaaaaggccauuaaagc

SEQ ID NO: 54485 - RNA, 19 nt, Artificial Sequence
  Description of Artificial Sequence: Synthetic oligonucleotide
cucaaggugcauuucaaac

SEQ ID NO: 54486 - RNA, 19 nt, Artificial Sequence
  Description of Artificial Sequence: Synthetic oligonucleotide
auuucaaacuccaggcuac

SEQ ID NO: 54487 - RNA, 25 nt, Artificial Sequence
  Description of Artificial Sequence: Synthetic oligonucleotide
gcagcagcagagaauccaaacccua

SEQ ID NO: 54488 - RNA, 25 nt, Artificial Sequence
  Description of Artificial Sequence: Synthetic oligonucleotide
aaagcugauaucacaaaguaccauu

SEQ ID NO: 54489 - RNA, 25 nt, Artificial Sequence
  Description of Artificial Sequence: Synthetic oligonucleotide
uucuccaaguugggggcucagaggg

SEQ ID NO: 54490 - RNA, 25 nt, Artificial Sequence
  Description of Artificial Sequence: Synthetic oligonucleotide
ggagucaucaugagcgauguuacca

SEQ ID NO: 54491 - RNA, 25 nt, Artificial Sequence
  Description of Artificial Sequence: Synthetic oligonucleotide
auugugaaagaagguuggguucaga

SEQ ID NO: 54492 - RNA, 25 nt, Artificial Sequence
  Description of Artificial Sequence: Synthetic oligonucleotide
aagaggggagaauauauaaaaaacu

SEQ ID NO: 54493 - RNA, 25 nt, Artificial Sequence
  Description of Artificial Sequence: Synthetic oligonucleotide
uggaggccaagauacuuccuuuuga

SEQ ID NO: 54494 - RNA, 25 nt, Artificial Sequence
  Description of Artificial Sequence: Synthetic oligonucleotide
aagacagauggcucauucauaggau

SEQ ID NO: 54495 - RNA, 25 nt, Artificial Sequence
  Description of Artificial Sequence: Synthetic oligonucleotide
uauaaagagaaaccucaagaugugg

SEQ ID NO: 54496 - RNA, 25 nt, Artificial Sequence
  Description of Artificial Sequence: Synthetic oligonucleotide
gauuuaccuuauccccucaacaacu

SEQ ID NO: 54497 - RNA, 25 nt, Artificial Sequence
  Description of Artificial Sequence: Synthetic oligonucleotide
uuuucaguggcaaaaugccaguuaa

SEQ ID NO: 54498 - RNA, 25 nt, Artificial Sequence
  Description of Artificial Sequence: Synthetic oligonucleotide
augaaaacagaacgaccaaagccaa

SEQ ID NO: 54499 - RNA, 25 nt, Artificial Sequence
  Description of Artificial Sequence: Synthetic oligonucleotide
aacacauuuauaaucagaugucucc

SEQ ID NO: 54500 - RNA, 25 nt, Artificial Sequence
  Description of Artificial Sequence: Synthetic oligonucleotide
caguggacuacuguuauagagagaa

SEQ ID NO: 54501 - RNA, 25 nt, Artificial Sequence
  Description of Artificial Sequence: Synthetic oligonucleotide
acauuucauguagauacuccagagg

SEQ ID NO: 54502 - RNA, 25 nt, Artificial Sequence
  Description of Artificial Sequence: Synthetic oligonucleotide
gaaagggaagaauggacagaagcua

SEQ ID NO: 54503 - RNA, 25 nt, Artificial Sequence
  Description of Artificial Sequence: Synthetic oligonucleotide
auccaggcuguagcagacagacugc

SEQ ID NO: 54504 - RNA, 25 nt, Artificial Sequence
  Description of Artificial Sequence: Synthetic oligonucleotide
cagaggcaagaagaggagagaauga

SEQ ID NO: 54505 - RNA, 25 nt, Artificial Sequence
  Description of Artificial Sequence: Synthetic oligonucleotide
aauuguaguccaacuucacaaauug

SEQ ID NO: 54506 - RNA, 25 nt, Artificial Sequence
  Description of Artificial Sequence: Synthetic oligonucleotide
gauaauauaggagaggaagagaugg

SEQ ID NO: 54507 - RNA, 25 nt, Artificial Sequence
  Description of Artificial Sequence: Synthetic oligonucleotide
gaugccucuacaacccaucauaaaa

SEQ ID NO: 54508 - RNA, 25 nt, Artificial Sequence
  Description of Artificial Sequence: Synthetic oligonucleotide
agaaagacaaugaaugauuuugacu

SEQ ID NO: 54509 - RNA, 25 nt, Artificial Sequence
  Description of Artificial Sequence: Synthetic oligonucleotide
uauuugaaacuacuagguaaaggca

SEQ ID NO: 54510 - RNA, 25 nt, Artificial Sequence
  Description of Artificial Sequence: Synthetic oligonucleotide
acuuuugggaaaguuauuuugguuc

SEQ ID NO: 54511 - RNA, 25 nt, Artificial Sequence
  Description of Artificial Sequence: Synthetic oligonucleotide
cgagagaaggcaaguggaaaauacu

SEQ ID NO: 54512 - RNA, 25 nt, Artificial Sequence
  Description of Artificial Sequence: Synthetic oligonucleotide
uaugcuaugaagauucugaagaaag

SEQ ID NO: 54513 - RNA, 25 nt, Artificial Sequence
  Description of Artificial Sequence: Synthetic oligonucleotide
gaagucauuauugcaaaggaugaag

SEQ ID NO: 54514 - RNA, 25 nt, Artificial Sequence
  Description of Artificial Sequence: Synthetic oligonucleotide
guggcacacacucuaacugaaagca

SEQ ID NO: 54515 - RNA, 25 nt, Artificial Sequence
  Description of Artificial Sequence: Synthetic oligonucleotide
agaguauuaaagaacacuagacauc

SEQ ID NO: 54516 - RNA, 25 nt, Artificial Sequence
  Description of Artificial Sequence: Synthetic oligonucleotide
cccuuuuuaacauccuugaaauauu

SEQ ID NO: 54517 - RNA, 25 nt, Artificial Sequence
  Description of Artificial Sequence: Synthetic oligonucleotide
uccuuccagacaaaagaccguuugu

SEQ ID NO: 54518 - RNA, 25 nt, Artificial Sequence
  Description of Artificial Sequence: Synthetic oligonucleotide
uguuuugugauggaauauguuaaug

SEQ ID NO: 54519 - RNA, 25 nt, Artificial Sequence
  Description of Artificial Sequence: Synthetic oligonucleotide
gggggcgagcuguuuuuccauuugu

SEQ ID NO: 54520 - RNA, 25 nt, Artificial Sequence
  Description of Artificial Sequence: Synthetic oligonucleotide
ucgagagagcggguguucucugagg

SEQ ID NO: 54521 - RNA, 25 nt, Artificial Sequence
  Description of Artificial Sequence: Synthetic oligonucleotide
gaccgcacacguuucuauggugcag

SEQ ID NO: 54522 - RNA, 25 nt, Artificial Sequence
  Description of Artificial Sequence: Synthetic oligonucleotide
gaaauugucucugccuuggacuauc

SEQ ID NO: 54523 - RNA, 25 nt, Artificial Sequence
  Description of Artificial Sequence: Synthetic oligonucleotide
cuacauuccggaaagauuguguacc

SEQ ID NO: 54524 - RNA, 25 nt, Artificial Sequence
  Description of Artificial Sequence: Synthetic oligonucleotide
cgugaucucaaguuggagaaucuaa

SEQ ID NO: 54525 - RNA, 25 nt, Artificial Sequence
  Description of Artificial Sequence: Synthetic oligonucleotide
augcuggacaaagauggccacauaa

SEQ ID NO: 54526 - RNA, 25 nt, Artificial Sequence
  Description of Artificial Sequence: Synthetic oligonucleotide
aaaauuacagauuuuggacuuugca

SEQ ID NO: 54527 - RNA, 25 nt, Artificial Sequence
  Description of Artificial Sequence: Synthetic oligonucleotide
aaagaagggaucacagaugcagcca

SEQ ID NO: 54528 - RNA, 25 nt, Artificial Sequence
  Description of Artificial Sequence: Synthetic oligonucleotide
accaugaagacauucuguggcacuc

SEQ ID NO: 54529 - RNA, 25 nt, Artificial Sequence
  Description of Artificial Sequence: Synthetic oligonucleotide
ccagaauaucuggcaccagaggugu

SEQ ID NO: 54530 - RNA, 25 nt, Artificial Sequence
  Description of Artificial Sequence: Synthetic oligonucleotide
uuagaagauaaugacuauggccgag

SEQ ID NO: 54531 - RNA, 25 nt, Artificial Sequence
  Description of Artificial Sequence: Synthetic oligonucleotide
gcaguagacugguggggccuagggg

SEQ ID NO: 54532 - RNA, 25 nt, Artificial Sequence
  Description of Artificial Sequence: Synthetic oligonucleotide
guugucauguaugaaaugaugugug

SEQ ID NO: 54533 - RNA, 25 nt, Artificial Sequence
  Description of Artificial Sequence: Synthetic oligonucleotide
gggagguuaccuuucuacaaccagg

SEQ ID NO: 54534 - RNA, 25 nt, Artificial Sequence
  Description of Artificial Sequence: Synthetic oligonucleotide
gaccaugagaaacuuuuugaauuaa

SEQ ID NO: 54535 - RNA, 25 nt, Artificial Sequence
  Description of Artificial Sequence: Synthetic oligonucleotide
auauuaauggaagacauuaaauuuc

SEQ ID NO: 54536 - RNA, 25 nt, Artificial Sequence
  Description of Artificial Sequence: Synthetic oligonucleotide
ccucgaacacucucuucagaugcaa

SEQ ID NO: 54537 - RNA, 25 nt, Artificial Sequence
  Description of Artificial Sequence: Synthetic oligonucleotide
aaaucauugcuuucagggcucuuga

SEQ ID NO: 54538 - RNA, 25 nt, Artificial Sequence
  Description of Artificial Sequence: Synthetic oligonucleotide
auaaaggauccaaauaaacgccuug

SEQ ID NO: 54539 - RNA, 25 nt, Artificial Sequence
  Description of Artificial Sequence: Synthetic oligonucleotide
gguggaggaccagaugaugcaaaag

SEQ ID NO: 54540 - RNA, 25 nt, Artificial Sequence
  Description of Artificial Sequence: Synthetic oligonucleotide
gaaauuaugagacacaguuucuucu

SEQ ID NO: 54541 - RNA, 25 nt, Artificial Sequence
  Description of Artificial Sequence: Synthetic oligonucleotide
ucuggaguaaacuggcaagauguau

SEQ ID NO: 54542 - RNA, 25 nt, Artificial Sequence
  Description of Artificial Sequence: Synthetic oligonucleotide
uaugauaaaaagcuuguaccuccuu

SEQ ID NO: 54543 - RNA, 25 nt, Artificial Sequence
  Description of Artificial Sequence: Synthetic oligonucleotide
uuuaaaccucaaguaacaucugaga

SEQ ID NO: 54544 - RNA, 25 nt, Artificial Sequence
  Description of Artificial Sequence: Synthetic oligonucleotide
acagauacuagauauuuugaugaag

SEQ ID NO: 54545 - RNA, 25 nt, Artificial Sequence
  Description of Artificial Sequence: Synthetic oligonucleotide
gaauuuacagcucagacuauuacaa

SEQ ID NO: 54546 - RNA, 25 nt, Artificial Sequence
  Description of Artificial Sequence: Synthetic oligonucleotide
auaacaccaccugaaaaauaugaug

SEQ ID NO: 54547 - RNA, 25 nt, Artificial Sequence
  Description of Artificial Sequence: Synthetic oligonucleotide
gaggaugguauggacugcauggaca

SEQ ID NO: 54548 - RNA, 25 nt, Artificial Sequence
  Description of Artificial Sequence: Synthetic oligonucleotide
aaugagaggcggccgcauuucccuc

SEQ ID NO: 54549 - RNA, 25 nt, Artificial Sequence
  Description of Artificial Sequence: Synthetic oligonucleotide
caauuuuccuacucugcaaguggac

SEQ ID NO: 54550 - RNA, 25 nt, Artificial Sequence
  Description of Artificial Sequence: Synthetic oligonucleotide
cgagaauaagucucuuucauucugc

SEQ ID NO: 54551 - RNA, 25 nt, Artificial Sequence
  Description of Artificial Sequence: Synthetic oligonucleotide
cuacuucacugucaucuucaauuua

SEQ ID NO: 54552 - RNA, 25 nt, Artificial Sequence
  Description of Artificial Sequence: Synthetic oligonucleotide
auuacugaaaaugauuccuggacau

SEQ ID NO: 54553 - RNA, 25 nt, Artificial Sequence
  Description of Artificial Sequence: Synthetic oligonucleotide
ucaccaguccuagcucuuacacaua

SEQ ID NO: 54554 - RNA, 25 nt, Artificial Sequence
  Description of Artificial Sequence: Synthetic oligonucleotide
agcaggggcaccuuccgacauccca

SEQ ID NO: 54555 - RNA, 25 nt, Artificial Sequence
  Description of Artificial Sequence: Synthetic oligonucleotide
agaccagccaaggguccucaccccu

SEQ ID NO: 54556 - RNA, 25 nt, Artificial Sequence
  Description of Artificial Sequence: Synthetic oligonucleotide
ucgccaccuuucacccucaugaaaa

SEQ ID NO: 54557 - RNA, 25 nt, Artificial Sequence
  Description of Artificial Sequence: Synthetic oligonucleotide
acacacauacacgcaaauacacucc

SEQ ID NO: 54558 - RNA, 25 nt, Artificial Sequence
  Description of Artificial Sequence: Synthetic oligonucleotide
caguuuuuguuuuugcaugaaauug

SEQ ID NO: 54559 - RNA, 25 nt, Artificial Sequence
  Description of Artificial Sequence: Synthetic oligonucleotide
guaucucagucuaaggucucaugcu

SEQ ID NO: 54560 - RNA, 25 nt, Artificial Sequence
  Description of Artificial Sequence: Synthetic oligonucleotide
uguugcugcuacugucuuacuauua

SEQ ID NO: 54561 - RNA, 25 nt, Artificial Sequence
  Description of Artificial Sequence: Synthetic oligonucleotide
auagcaacuuuaagaaguaauuuuc

SEQ ID NO: 54562 - RNA, 25 nt, Artificial Sequence
  Description of Artificial Sequence: Synthetic oligonucleotide
ccaaccuuuggaagucaugagccca

SEQ ID NO: 54563 - RNA, 25 nt, Artificial Sequence
  Description of Artificial Sequence: Synthetic oligonucleotide
accauuguucauuugugcaccaauu

SEQ ID NO: 54564 - RNA, 25 nt, Artificial Sequence
  Description of Artificial Sequence: Synthetic oligonucleotide
uaucaucuuuugaucuuuuaguuuu

SEQ ID NO: 54565 - RNA, 25 nt, Artificial Sequence
  Description of Artificial Sequence: Synthetic oligonucleotide
uucccucagugaaggcuaaaugaga

SEQ ID NO: 54566 - RNA, 25 nt, Artificial Sequence
  Description of Artificial Sequence: Synthetic oligonucleotide
auacacugauucuagguacauuuuu

SEQ ID NO: 54567 - RNA, 25 nt, Artificial Sequence
  Description of Artificial Sequence: Synthetic oligonucleotide
uuaacuuucuagaagagaaaaacua

SEQ ID NO: 54568 - RNA, 25 nt, Artificial Sequence
  Description of Artificial Sequence: Synthetic oligonucleotide
aacuagacuaagaagauuuaguuua

SEQ ID NO: 54569 - RNA, 25 nt, Artificial Sequence
  Description of Artificial Sequence: Synthetic oligonucleotide
auaaauucagaacaagcaauugugg

SEQ ID NO: 54570 - RNA, 25 nt, Artificial Sequence
  Description of Artificial Sequence: Synthetic oligonucleotide
gaagggugguggcgugcauauguaa

SEQ ID NO: 54571 - RNA, 25 nt, Artificial Sequence
  Description of Artificial Sequence: Synthetic oligonucleotide
aagcacaucagauccgugcgugaag

SEQ ID NO: 54572 - RNA, 25 nt, Artificial Sequence
  Description of Artificial Sequence: Synthetic oligonucleotide
guaggcauauaucacuaagcugugg

SEQ ID NO: 54573 - RNA, 25 nt, Artificial Sequence
  Description of Artificial Sequence: Synthetic oligonucleotide
gcuggaauugauuaggaagcauuug

SEQ ID NO: 54574 - RNA, 25 nt, Artificial Sequence
  Description of Artificial Sequence: Synthetic oligonucleotide
gguagaaggacugaacaacuguugg

SEQ ID NO: 54575 - RNA, 25 nt, Artificial Sequence
  Description of Artificial Sequence: Synthetic oligonucleotide
ggauauauauauauauauauaauuu

SEQ ID NO: 54576 - RNA, 25 nt, Artificial Sequence
  Description of Artificial Sequence: Synthetic oligonucleotide
uacuguagaagaagcccauaucaca

SEQ ID NO: 54577 - RNA, 25 nt, Artificial Sequence
  Description of Artificial Sequence: Synthetic oligonucleotide
auguggaugucgagacuucacgggc

SEQ ID NO: 54578 - RNA, 25 nt, Artificial Sequence
  Description of Artificial Sequence: Synthetic oligonucleotide
caaucaugagcaagugaacacuguu

SEQ ID NO: 54579 - RNA, 25 nt, Artificial Sequence
  Description of Artificial Sequence: Synthetic oligonucleotide
ucuaccaagaacugaaggcauaugc

SEQ ID NO: 54580 - RNA, 25 nt, Artificial Sequence
  Description of Artificial Sequence: Synthetic oligonucleotide
cacagucaaggucacuuaaaggguc

SEQ ID NO: 54581 - RNA, 25 nt, Artificial Sequence
  Description of Artificial Sequence: Synthetic oligonucleotide
cuuaugaaacaauuugagccagaga

SEQ ID NO: 54582 - RNA, 25 nt, Artificial Sequence
  Description of Artificial Sequence: Synthetic oligonucleotide
agcaucuuuccccugugcuuggaaa

SEQ ID NO: 54583 - RNA, 25 nt, Artificial Sequence
  Description of Artificial Sequence: Synthetic oligonucleotide
accuuuuuuccuucuugacauuuau

SEQ ID NO: 54584 - RNA, 25 nt, Artificial Sequence
  Description of Artificial Sequence: Synthetic oligonucleotide
ucaccucugauggcugaagaaugua

SEQ ID NO: 54585 - RNA, 25 nt, Artificial Sequence
  Description of Artificial Sequence: Synthetic oligonucleotide
agacagguauaaugauacugcuuuu

SEQ ID NO: 54586 - RNA, 25 nt, Artificial Sequence
  Description of Artificial Sequence: Synthetic oligonucleotide
ucaccaaaauuucuacaccaaggua

SEQ ID NO: 54587 - RNA, 25 nt, Artificial Sequence
  Description of Artificial Sequence: Synthetic oligonucleotide
aaacagguguuugccuuauuuaauu

SEQ ID NO: 54588 - RNA, 25 nt, Artificial Sequence
  Description of Artificial Sequence: Synthetic oligonucleotide
uuuuuacuuucaguucuacgugaau

SEQ ID NO: 54589 - RNA, 25 nt, Artificial Sequence
  Description of Artificial Sequence: Synthetic oligonucleotide
uuagcuuuuucucagauguugaaac

SEQ ID NO: 54590 - RNA, 25 nt, Artificial Sequence
  Description of Artificial Sequence: Synthetic oligonucleotide
cuuugaauguccuuuuaugauuuug

SEQ ID NO: 54591 - RNA, 25 nt, Artificial Sequence
  Description of Artificial Sequence: Synthetic oligonucleotide
guuuauauugcaguaguauuuauuu

SEQ ID NO: 54592 - RNA, 25 nt, Artificial Sequence
  Description of Artificial Sequence: Synthetic oligonucleotide
uuuuagugaugagaauuguauguca

SEQ ID NO: 54593 - RNA, 25 nt, Artificial Sequence
  Description of Artificial Sequence: Synthetic oligonucleotide
auguuagcaaacgcagcuccaacuu

SEQ ID NO: 54594 - RNA, 25 nt, Artificial Sequence
  Description of Artificial Sequence: Synthetic oligonucleotide
uauauaaaauagacuuacugcaguu

SEQ ID NO: 54595 - RNA, 25 nt, Artificial Sequence
  Description of Artificial Sequence: Synthetic oligonucleotide
uacuuuugacccaugugcaaggauu

SEQ ID NO: 54596 - RNA, 25 nt, Artificial Sequence
  Description of Artificial Sequence: Synthetic oligonucleotide
uguacacgcugaugagaaucaugca

SEQ ID NO: 54597 - RNA, 25 nt, Artificial Sequence
  Description of Artificial Sequence: Synthetic oligonucleotide
acuuuuucuccucuguuaaaaaaaa

SEQ ID NO: 54598 - RNA, 25 nt, Artificial Sequence
  Description of Artificial Sequence: Synthetic oligonucleotide
augauaaggcucugaaauggaauau

SEQ ID NO: 54599 - RNA, 25 nt, Artificial Sequence
  Description of Artificial Sequence: Synthetic oligonucleotide
uauugguuagaauuuggcuuuggga

SEQ ID NO: 54600 - RNA, 25 nt, Artificial Sequence
  Description of Artificial Sequence: Synthetic oligonucleotide
agaagagaugcugccauuuaacccc

SEQ ID NO: 54601 - RNA, 25 nt, Artificial Sequence
  Description of Artificial Sequence: Synthetic oligonucleotide
cuugguacugaaaaugagaaaaucc

SEQ ID NO: 54602 - RNA, 25 nt, Artificial Sequence
  Description of Artificial Sequence: Synthetic oligonucleotide
cccaacuaugcaugccaagggguua

SEQ ID NO: 54603 - RNA, 25 nt, Artificial Sequence
  Description of Artificial Sequence: Synthetic oligonucleotide
aaugaaacaaauagcuguugacguu

SEQ ID NO: 54604 - RNA, 25 nt, Artificial Sequence
  Description of Artificial Sequence: Synthetic oligonucleotide
uugcucauuuaagaauuugaaacgu

SEQ ID NO: 54605 - RNA, 25 nt, Artificial Sequence
  Description of Artificial Sequence: Synthetic oligonucleotide
uuaugaugaccuggcaacaaaaagu

SEQ ID NO: 54606 - RNA, 25 nt, Artificial Sequence
  Description of Artificial Sequence: Synthetic oligonucleotide
uaaugaagaaaauugagaccugagu

SEQ ID NO: 54607 - RNA, 25 nt, Artificial Sequence
  Description of Artificial Sequence: Synthetic oligonucleotide
ugaagauaagaaaugaucuuuacgu

SEQ ID NO: 54608 - RNA, 25 nt, Artificial Sequence
  Description of Artificial Sequence: Synthetic oligonucleotide
uggcaaaaugaacacaucuugagua

SEQ ID NO: 54609 - RNA, 25 nt, Artificial Sequence
  Description of Artificial Sequence: Synthetic oligonucleotide
auuuaggaaaugggcagugaaggcu

SEQ ID NO: 54610 - RNA, 25 nt, Artificial Sequence
  Description of Artificial Sequence: Synthetic oligonucleotide
uaagaaccugguguguuucuuggga

SEQ ID NO: 54611 - RNA, 25 nt, Artificial Sequence
  Description of Artificial Sequence: Synthetic oligonucleotide
aucaugguacauuuaucacugaauu

SEQ ID NO: 54612 - RNA, 25 nt, Artificial Sequence
  Description of Artificial Sequence: Synthetic oligonucleotide
uaagccaucagggaaaaaacaacaa

SEQ ID NO: 54613 - RNA, 25 nt, Artificial Sequence
  Description of Artificial Sequence: Synthetic oligonucleotide
aaaaaagagaacaccuccagcuuuu

SEQ ID NO: 54614 - RNA, 25 nt, Artificial Sequence
  Description of Artificial Sequence: Synthetic oligonucleotide
ucuuuuucuguauauacucaugucc

SEQ ID NO: 54615 - RNA, 25 nt, Artificial Sequence
  Description of Artificial Sequence: Synthetic oligonucleotide
ccccagauuccaacauuucucacug

SEQ ID NO: 54616 - RNA, 25 nt, Artificial Sequence
  Description of Artificial Sequence: Synthetic oligonucleotide
gaaagggggcauguaugcaaaccuc

SEQ ID NO: 54617 - RNA, 25 nt, Artificial Sequence
  Description of Artificial Sequence: Synthetic oligonucleotide
caucuuucuccuucauuaaugauga

SEQ ID NO: 54618 - RNA, 25 nt, Artificial Sequence
  Description of Artificial Sequence: Synthetic oligonucleotide
aucuucagauuaaacccuuuggugc

SEQ ID NO: 54619 - RNA, 25 nt, Artificial Sequence
  Description of Artificial Sequence: Synthetic oligonucleotide
cuaggagcugacaauuuccaaagca

SEQ ID NO: 54620 - RNA, 25 nt, Artificial Sequence
  Description of Artificial Sequence: Synthetic oligonucleotide
agccugugaaguccuaggggcuggg

SEQ ID NO: 54621 - RNA, 25 nt, Artificial Sequence
  Description of Artificial Sequence: Synthetic oligonucleotide
gggccacucuugcggcaagcagaag

SEQ ID NO: 54622 - RNA, 25 nt, Artificial Sequence
  Description of Artificial Sequence: Synthetic oligonucleotide
ggccauccuacuccgcggagugauc

SEQ ID NO: 54623 - RNA, 25 nt, Artificial Sequence
  Description of Artificial Sequence: Synthetic oligonucleotide
cauggaaauguauuuuaguuaaacu

SEQ ID NO: 54624 - RNA, 25 nt, Artificial Sequence
  Description of Artificial Sequence: Synthetic oligonucleotide
ucugacagcucccaaacggaagacu

SEQ ID NO: 54625 - RNA, 25 nt, Artificial Sequence
  Description of Artificial Sequence: Synthetic oligonucleotide
uacagcaugacguaguauuaugauu

SEQ ID NO: 54626 - RNA, 25 nt, Artificial Sequence
  Description of Artificial Sequence: Synthetic oligonucleotide
ugcauuguaugaaagagcaagugac

SEQ ID NO: 54627 - RNA, 25 nt, Artificial Sequence
  Description of Artificial Sequence: Synthetic oligonucleotide
cuuucuaaguaggaugaaucauauu

SEQ ID NO: 54628 - RNA, 25 nt, Artificial Sequence
  Description of Artificial Sequence: Synthetic oligonucleotide
ucauaugcagaugucuuagccucuu

SEQ ID NO: 54629 - RNA, 25 nt, Artificial Sequence
  Description of Artificial Sequence: Synthetic oligonucleotide
ugacgcuggaaguguggauuuauag

SEQ ID NO: 54630 - RNA, 25 nt, Artificial Sequence
  Description of Artificial Sequence: Synthetic oligonucleotide
gcuaugaaaccacugcuggcagugg

SEQ ID NO: 54631 - RNA, 25 nt, Artificial Sequence
  Description of Artificial Sequence: Synthetic oligonucleotide
ggugggccacugggacugacggggg

SEQ ID NO: 54632 - RNA, 25 nt, Artificial Sequence
  Description of Artificial Sequence: Synthetic oligonucleotide
guuaaagggcauuuuacuaaggcag

SEQ ID NO: 54633 - RNA, 25 nt, Artificial Sequence
  Description of Artificial Sequence: Synthetic oligonucleotide
gcuaagacauauucagacaucaacg

SEQ ID NO: 54634 - RNA, 25 nt, Artificial Sequence
  Description of Artificial Sequence: Synthetic oligonucleotide
guuauccuucuuuuucauauuucua

SEQ ID NO: 54635 - RNA, 25 nt, Artificial Sequence
  Description of Artificial Sequence: Synthetic oligonucleotide
uuuucauauuucuaccugagugaag

SEQ ID NO: 54636 - RNA, 25 nt, Artificial Sequence
  Description of Artificial Sequence: Synthetic oligonucleotide
auaacaccaccugaaaaaugucagc

SEQ ID NO: 54637 - RNA, 25 nt, Artificial Sequence
  Description of Artificial Sequence: Synthetic oligonucleotide
caaucagauuguggcaugcugggua

SEQ ID NO: 54638 - RNA, 25 nt, Artificial Sequence
  Description of Artificial Sequence: Synthetic oligonucleotide
aacuggaaaaaauaauaaaaaucgg

SEQ ID NO: 54639 - RNA, 25 nt, Artificial Sequence
  Description of Artificial Sequence: Synthetic oligonucleotide
gcuuccuacagccagcagcacaguc

SEQ ID NO: 54640 - RNA, 25 nt, Artificial Sequence
  Description of Artificial Sequence: Synthetic oligonucleotide
cacccauggaacuguuggcuuugga

SEQ ID NO: 54641 - RNA, 25 nt, Artificial Sequence
  Description of Artificial Sequence: Synthetic oligonucleotide
auuaaauguggaauugaacgacuac

SEQ ID NO: 54642 - RNA, 25 nt, Artificial Sequence
  Description of Artificial Sequence: Synthetic oligonucleotide
cccagaaguguucuggaaagaagcg

SEQ ID NO: 54643 - RNA, 25 nt, Artificial Sequence
  Description of Artificial Sequence: Synthetic oligonucleotide
gagauguguggccugccucaccguc

SEQ ID NO: 54644 - RNA, 25 nt, Artificial Sequence
  Description of Artificial Sequence: Synthetic oligonucleotide
ccucacccaucaaaagcaccagcag

SEQ ID NO: 54645 - RNA, 25 nt, Artificial Sequence
  Description of Artificial Sequence: Synthetic oligonucleotide
ggcacguuaacucgaauucucacaa

SEQ ID NO: 54646 - RNA, 25 nt, Artificial Sequence
  Description of Artificial Sequence: Synthetic oligonucleotide
aggaaaaggccauuaaagcucaagg

SEQ ID NO: 54647 - RNA, 25 nt, Artificial Sequence
  Description of Artificial Sequence: Synthetic oligonucleotide
aggugcauuucaaacuccaggcuac

SEQ ID NO: 54648 - RNA, 19 nt, Artificial Sequence
  Description of Artificial Sequence: Synthetic oligonucleotide
aagaaggaccccaagcaga

SEQ ID NO: 54649 - RNA, 19 nt, Artificial Sequence
  Description of Artificial Sequence: Synthetic oligonucleotide
aaggaccccaagcagaggc

SEQ ID NO: 54650 - RNA, 19 nt, Artificial Sequence
  Description of Artificial Sequence: Synthetic oligonucleotide
accccaagcagaggcuugg

SEQ ID NO: 54651 - RNA, 19 nt, Artificial Sequence
  Description of Artificial Sequence: Synthetic oligonucleotide
accugucccgggagcgugu

SEQ ID NO: 54652 - RNA, 19 nt, Artificial Sequence
  Description of Artificial Sequence: Synthetic oligonucleotide
acuacgccaugaagauccu

SEQ ID NO: 54653 - RNA, 19 nt, Artificial Sequence
  Description of Artificial Sequence: Synthetic oligonucleotide
acuucccccaguucuccua

SEQ ID NO: 54654 - RNA, 19 nt, Artificial Sequence
  Description of Artificial Sequence: Synthetic oligonucleotide
agaaggaccccaagcagag

SEQ ID NO: 54655 - RNA, 19 nt, Artificial Sequence
  Description of Artificial Sequence: Synthetic oligonucleotide
agauccgcuucccgcgcac

SEQ ID NO: 54656 - RNA, 19 nt, Artificial Sequence
  Description of Artificial Sequence: Synthetic oligonucleotide
agcuguucuuccaccuguc

SEQ ID NO: 54657 - RNA, 19 nt, Artificial Sequence
  Description of Artificial Sequence: Synthetic oligonucleotide
aggugcuggaggacaauga

SEQ ID NO: 54658 - RNA, 19 nt, Artificial Sequence
  Description of Artificial Sequence: Synthetic oligonucleotide
aguucuccuacucggccag

SEQ ID NO: 54659 - RNA, 19 nt, Artificial Sequence
  Description of Artificial Sequence: Synthetic oligonucleotide
auccgcuucccgcgcacgc

SEQ ID NO: 54660 - RNA, 19 nt, Artificial Sequence
  Description of Artificial Sequence: Synthetic oligonucleotide
auguacgagaugaugugcg

SEQ ID NO: 54661 - RNA, 19 nt, Artificial Sequence
  Description of Artificial Sequence: Synthetic oligonucleotide
caccugucccgggagcgug

SEQ ID NO: 54662 - RNA, 19 nt, Artificial Sequence
  Description of Artificial Sequence: Synthetic oligonucleotide
cacuucccccaguucuccu

SEQ ID NO: 54663 - RNA, 19 nt, Artificial Sequence
  Description of Artificial Sequence: Synthetic oligonucleotide
caguucuccuacucggcca

SEQ ID NO: 54664 - RNA, 19 nt, Artificial Sequence
  Description of Artificial Sequence: Synthetic oligonucleotide
ccacuucccccaguucucc

SEQ ID NO: 54665 - RNA, 19 nt, Artificial Sequence
  Description of Artificial Sequence: Synthetic oligonucleotide
cccacuucccccaguucuc

SEQ ID NO: 54666 - RNA, 19 nt, Artificial Sequence
  Description of Artificial Sequence: Synthetic oligonucleotide
ccccaguucuccuacucgg

SEQ ID NO: 54667 - RNA, 19 nt, Artificial Sequence
  Description of Artificial Sequence: Synthetic oligonucleotide
cccuucuacaaccaggacc

SEQ ID NO: 54668 - RNA, 19 nt, Artificial Sequence
  Description of Artificial Sequence: Synthetic oligonucleotide
ccgcuacuacgccaugaag

SEQ ID NO: 54669 - RNA, 19 nt, Artificial Sequence
  Description of Artificial Sequence: Synthetic oligonucleotide
ccugcccuucuacaaccag

SEQ ID NO: 54670 - RNA, 19 nt, Artificial Sequence
  Description of Artificial Sequence: Synthetic oligonucleotide
ccuucuacaaccaggacca

SEQ ID NO: 54671 - RNA, 19 nt, Artificial Sequence
  Description of Artificial Sequence: Synthetic oligonucleotide
cgccugcccuucuacaacc

SEQ ID NO: 54672 - RNA, 19 nt, Artificial Sequence
  Description of Artificial Sequence: Synthetic oligonucleotide
cgcuacuacgccaugaaga

SEQ ID NO: 54673 - RNA, 19 nt, Artificial Sequence
  Description of Artificial Sequence: Synthetic oligonucleotide
cgcugccugcaguggacca

SEQ ID NO: 54674 - RNA, 19 nt, Artificial Sequence
  Description of Artificial Sequence: Synthetic oligonucleotide
cuacuacgccaugaagauc

SEQ ID NO: 54675 - RNA, 19 nt, Artificial Sequence
  Description of Artificial Sequence: Synthetic oligonucleotide
cugcccuucuacaaccagg

SEQ ID NO: 54676 - RNA, 19 nt, Artificial Sequence
  Description of Artificial Sequence: Synthetic oligonucleotide
cuguucuuccaccuguccc

SEQ ID NO: 54677 - RNA, 19 nt, Artificial Sequence
  Description of Artificial Sequence: Synthetic oligonucleotide
cuuccaccugucccgggag

SEQ ID NO: 54678 - RNA, 19 nt, Artificial Sequence
  Description of Artificial Sequence: Synthetic oligonucleotide
cuucccccaguucuccuac

SEQ ID NO: 54679 - RNA, 19 nt, Artificial Sequence
  Description of Artificial Sequence: Synthetic oligonucleotide
gaccccaagcagaggcuug

SEQ ID NO: 54680 - RNA, 19 nt, Artificial Sequence
  Description of Artificial Sequence: Synthetic oligonucleotide
gagauccgcuucccgcgca

SEQ ID NO: 54681 - RNA, 19 nt, Artificial Sequence
  Description of Artificial Sequence: Synthetic oligonucleotide
gagcuguucuuccaccugu

SEQ ID NO: 54682 - RNA, 19 nt, Artificial Sequence
  Description of Artificial Sequence: Synthetic oligonucleotide
gaggugcuggaggacaaug

SEQ ID NO: 54683 - RNA, 19 nt, Artificial Sequence
  Description of Artificial Sequence: Synthetic oligonucleotide
gauccgcuucccgcgcacg

SEQ ID NO: 54684 - RNA, 19 nt, Artificial Sequence
  Description of Artificial Sequence: Synthetic oligonucleotide
gcccuucuacaaccaggac

SEQ ID NO: 54685 - RNA, 19 nt, Artificial Sequence
  Description of Artificial Sequence: Synthetic oligonucleotide
gccgcuacuacgccaugaa

SEQ ID NO: 54686 - RNA, 19 nt, Artificial Sequence
  Description of Artificial Sequence: Synthetic oligonucleotide
gccugcccuucuacaacca

SEQ ID NO: 54687 - RNA, 19 nt, Artificial Sequence
  Description of Artificial Sequence: Synthetic oligonucleotide
gcuacuacgccaugaagau

SEQ ID NO: 54688 - RNA, 19 nt, Artificial Sequence
  Description of Artificial Sequence: Synthetic oligonucleotide
gcugccugcaguggaccac

SEQ ID NO: 54689 - RNA, 19 nt, Artificial Sequence
  Description of Artificial Sequence: Synthetic oligonucleotide
gcuguucuuccaccugucc

SEQ ID NO: 54690 - RNA, 19 nt, Artificial Sequence
  Description of Artificial Sequence: Synthetic oligonucleotide
ggccgcuacuacgccauga

SEQ ID NO: 54691 - RNA, 19 nt, Artificial Sequence
  Description of Artificial Sequence: Synthetic oligonucleotide
gucauguacgagaugaugu

SEQ ID NO: 54692 - RNA, 19 nt, Artificial Sequence
  Description of Artificial Sequence: Synthetic oligonucleotide
gugcuggaggacaaugacu

SEQ ID NO: 54693 - RNA, 19 nt, Artificial Sequence
  Description of Artificial Sequence: Synthetic oligonucleotide
guggacuggugggggcugg

SEQ ID NO: 54694 - RNA, 19 nt, Artificial Sequence
  Description of Artificial Sequence: Synthetic oligonucleotide
guggucauguacgagauga

SEQ ID NO: 54695 - RNA, 19 nt, Artificial Sequence
  Description of Artificial Sequence: Synthetic oligonucleotide
uacuacgccaugaagaucc

SEQ ID NO: 54696 - RNA, 19 nt, Artificial Sequence
  Description of Artificial Sequence: Synthetic oligonucleotide
uccaccugucccgggagcg

SEQ ID NO: 54697 - RNA, 19 nt, Artificial Sequence
  Description of Artificial Sequence: Synthetic oligonucleotide
uccagacccacgaccgccu

SEQ ID NO: 54698 - RNA, 19 nt, Artificial Sequence
  Description of Artificial Sequence: Synthetic oligonucleotide
ucccccaguucuccuacuc

SEQ ID NO: 54699 - RNA, 19 nt, Artificial Sequence
  Description of Artificial Sequence: Synthetic oligonucleotide
uccgcuucccgcgcacgcu

SEQ ID NO: 54700 - RNA, 19 nt, Artificial Sequence
  Description of Artificial Sequence: Synthetic oligonucleotide
ugcccuucuacaaccagga

SEQ ID NO: 54701 - RNA, 19 nt, Artificial Sequence
  Description of Artificial Sequence: Synthetic oligonucleotide
uggacuggugggggcuggg

SEQ ID NO: 54702 - RNA, 19 nt, Artificial Sequence
  Description of Artificial Sequence: Synthetic oligonucleotide
uggucauguacgagaugau

SEQ ID NO: 54703 - RNA, 19 nt, Artificial Sequence
  Description of Artificial Sequence: Synthetic oligonucleotide
uguacgagaugaugugcgg

SEQ ID NO: 54704 - RNA, 19 nt, Artificial Sequence
  Description of Artificial Sequence: Synthetic oligonucleotide
uguucuuccaccugucccg

SEQ ID NO: 54705 - RNA, 19 nt, Artificial Sequence
  Description of Artificial Sequence: Synthetic oligonucleotide
uuccaccugucccgggagc

SEQ ID NO: 54706 - RNA, 19 nt, Artificial Sequence
  Description of Artificial Sequence: Synthetic oligonucleotide
uuccagacccacgaccgcc

SEQ ID NO: 54707 - RNA, 19 nt, Artificial Sequence
  Description of Artificial Sequence: Synthetic oligonucleotide
uucccccaguucuccuacu

SEQ ID NO: 54708 - RNA, 19 nt, Artificial Sequence
  Description of Artificial Sequence: Synthetic oligonucleotide
uucuuccaccugucccggg

SEQ ID NO: 54709 - RNA, 19 nt, Artificial Sequence
  Description of Artificial Sequence: Synthetic oligonucleotide
uacaaccaggaccaugaga

SEQ ID NO: 54710 - RNA, 19 nt, Artificial Sequence
  Description of Artificial Sequence: Synthetic oligonucleotide
ucuacaaccaggaccauga

SEQ ID NO: 54711 - RNA, 19 nt, Artificial Sequence
  Description of Artificial Sequence: Synthetic oligonucleotide
augcuggacaaagauggcc

SEQ ID NO: 54712 - RNA, 19 nt, Artificial Sequence
  Description of Artificial Sequence: Synthetic oligonucleotide
cuggacaaagauggccaca

SEQ ID NO: 54713 - RNA, 19 nt, Artificial Sequence
  Description of Artificial Sequence: Synthetic oligonucleotide
gcuggacaaagauggccac

SEQ ID NO: 54714 - RNA, 19 nt, Artificial Sequence
  Description of Artificial Sequence: Synthetic oligonucleotide
ugcuggacaaagauggcca

SEQ ID NO: 54715 - RNA, 19 nt, Artificial Sequence
  Description of Artificial Sequence: Synthetic oligonucleotide
uggacaaagauggccacau

SEQ ID NO: 54716 - RNA, 19 nt, Artificial Sequence
  Description of Artificial Sequence: Synthetic oligonucleotide
aacgggggcgagcuguucu

SEQ ID NO: 54717 - RNA, 19 nt, Artificial Sequence
  Description of Artificial Sequence: Synthetic oligonucleotide
aagcagaggcuuggcgggg

SEQ ID NO: 54718 - RNA, 19 nt, Artificial Sequence
  Description of Artificial Sequence: Synthetic oligonucleotide
acgggggcgagcuguucuu

SEQ ID NO: 54719 - RNA, 19 nt, Artificial Sequence
  Description of Artificial Sequence: Synthetic oligonucleotide
acuggugggggcugggcgu

SEQ ID NO: 54720 - RNA, 19 nt, Artificial Sequence
  Description of Artificial Sequence: Synthetic oligonucleotide
agcagaggcuuggcggggg

SEQ ID NO: 54721 - RNA, 19 nt, Artificial Sequence
  Description of Artificial Sequence: Synthetic oligonucleotide
aggacaaugacuacggccg

SEQ ID NO: 54722 - RNA, 19 nt, Artificial Sequence
  Description of Artificial Sequence: Synthetic oligonucleotide
auggaguacgccaacgggg

SEQ ID NO: 54723 - RNA, 19 nt, Artificial Sequence
  Description of Artificial Sequence: Synthetic oligonucleotide
caacgggggcgagcuguuc

SEQ ID NO: 54724 - RNA, 19 nt, Artificial Sequence
  Description of Artificial Sequence: Synthetic oligonucleotide
caagaaggaccccaagcag

SEQ ID NO: 54725 - RNA, 19 nt, Artificial Sequence
  Description of Artificial Sequence: Synthetic oligonucleotide
caagcagaggcuuggcggg

SEQ ID NO: 54726 - RNA, 19 nt, Artificial Sequence
  Description of Artificial Sequence: Synthetic oligonucleotide
ccaagcagaggcuuggcgg

SEQ ID NO: 54727 - RNA, 19 nt, Artificial Sequence
  Description of Artificial Sequence: Synthetic oligonucleotide
cccaagcagaggcuuggcg

SEQ ID NO: 54728 - RNA, 19 nt, Artificial Sequence
  Description of Artificial Sequence: Synthetic oligonucleotide
cccgaggugcuggaggaca

SEQ ID NO: 54729 - RNA, 19 nt, Artificial Sequence
  Description of Artificial Sequence: Synthetic oligonucleotide
ccgaggugcuggaggacaa

SEQ ID NO: 54730 - RNA, 19 nt, Artificial Sequence
  Description of Artificial Sequence: Synthetic oligonucleotide
cgagcuguucuuccaccug

SEQ ID NO: 54731 - RNA, 19 nt, Artificial Sequence
  Description of Artificial Sequence: Synthetic oligonucleotide
cgaggugcuggaggacaau

SEQ ID NO: 54732 - RNA, 19 nt, Artificial Sequence
  Description of Artificial Sequence: Synthetic oligonucleotide
cguggucauguacgagaug

SEQ ID NO: 54733 - RNA, 19 nt, Artificial Sequence
  Description of Artificial Sequence: Synthetic oligonucleotide
cucaagaaggaccccaagc

SEQ ID NO: 54734 - RNA, 19 nt, Artificial Sequence
  Description of Artificial Sequence: Synthetic oligonucleotide
cugcucaagaaggacccca

SEQ ID NO: 54735 - RNA, 19 nt, Artificial Sequence
  Description of Artificial Sequence: Synthetic oligonucleotide
cuggaggacaaugacuacg

SEQ ID NO: 54736 - RNA, 19 nt, Artificial Sequence
  Description of Artificial Sequence: Synthetic oligonucleotide
cugggcguggucauguacg

SEQ ID NO: 54737 - RNA, 19 nt, Artificial Sequence
  Description of Artificial Sequence: Synthetic oligonucleotide
gacuggugggggcugggcg

SEQ ID NO: 54738 - RNA, 19 nt, Artificial Sequence
  Description of Artificial Sequence: Synthetic oligonucleotide
gaggacaaugacuacggcc

SEQ ID NO: 54739 - RNA, 19 nt, Artificial Sequence
  Description of Artificial Sequence: Synthetic oligonucleotide
gccaacgggggcgagcugu

SEQ ID NO: 54740 - RNA, 19 nt, Artificial Sequence
  Description of Artificial Sequence: Synthetic oligonucleotide
gcgagcuguucuuccaccu

SEQ ID NO: 54741 - RNA, 19 nt, Artificial Sequence
  Description of Artificial Sequence: Synthetic oligonucleotide
gcguggucauguacgagau

SEQ ID NO: 54742 - RNA, 19 nt, Artificial Sequence
  Description of Artificial Sequence: Synthetic oligonucleotide
gcucaagaaggaccccaag

SEQ ID NO: 54743 - RNA, 19 nt, Artificial Sequence
  Description of Artificial Sequence: Synthetic oligonucleotide
gcugcucaagaaggacccc

SEQ ID NO: 54744 - RNA, 19 nt, Artificial Sequence
  Description of Artificial Sequence: Synthetic oligonucleotide
gcuggaggacaaugacuac

SEQ ID NO: 54745 - RNA, 19 nt, Artificial Sequence
  Description of Artificial Sequence: Synthetic oligonucleotide
gcugggcguggucauguac

SEQ ID NO: 54746 - RNA, 19 nt, Artificial Sequence
  Description of Artificial Sequence: Synthetic oligonucleotide
ggacuggugggggcugggc

SEQ ID NO: 54747 - RNA, 19 nt, Artificial Sequence
  Description of Artificial Sequence: Synthetic oligonucleotide
ggcgagcuguucuuccacc

SEQ ID NO: 54748 - RNA, 19 nt, Artificial Sequence
  Description of Artificial Sequence: Synthetic oligonucleotide
ggcguggucauguacgaga

SEQ ID NO: 54749 - RNA, 19 nt, Artificial Sequence
  Description of Artificial Sequence: Synthetic oligonucleotide
ggcugcucaagaaggaccc

SEQ ID NO: 54750 - RNA, 19 nt, Artificial Sequence
  Description of Artificial Sequence: Synthetic oligonucleotide
ggcugggcguggucaugua

SEQ ID NO: 54751 - RNA, 19 nt, Artificial Sequence
  Description of Artificial Sequence: Synthetic oligonucleotide
gggcgagcuguucuuccac

SEQ ID NO: 54752 - RNA, 19 nt, Artificial Sequence
  Description of Artificial Sequence: Synthetic oligonucleotide
gggcguggucauguacgag

SEQ ID NO: 54753 - RNA, 19 nt, Artificial Sequence
  Description of Artificial Sequence: Synthetic oligonucleotide
gggcugcucaagaaggacc

SEQ ID NO: 54754 - RNA, 19 nt, Artificial Sequence
  Description of Artificial Sequence: Synthetic oligonucleotide
gggcugggcguggucaugu

SEQ ID NO: 54755 - RNA, 19 nt, Artificial Sequence
  Description of Artificial Sequence: Synthetic oligonucleotide
ggggcgagcuguucuucca

SEQ ID NO: 54756 - RNA, 19 nt, Artificial Sequence
  Description of Artificial Sequence: Synthetic oligonucleotide
gggggcgagcuguucuucc

SEQ ID NO: 54757 - RNA, 19 nt, Artificial Sequence
  Description of Artificial Sequence: Synthetic oligonucleotide
gggggcugggcguggucau

SEQ ID NO: 54758 - RNA, 19 nt, Artificial Sequence
  Description of Artificial Sequence: Synthetic oligonucleotide
gugggggcugggcgugguc

SEQ ID NO: 54759 - RNA, 19 nt, Artificial Sequence
  Description of Artificial Sequence: Synthetic oligonucleotide
ucaagaaggaccccaagca

SEQ ID NO: 54760 - RNA, 19 nt, Artificial Sequence
  Description of Artificial Sequence: Synthetic oligonucleotide
ugcucaagaaggaccccaa

SEQ ID NO: 54761 - RNA, 19 nt, Artificial Sequence
  Description of Artificial Sequence: Synthetic oligonucleotide
uggaggacaaugacuacgg

SEQ ID NO: 54762 - RNA, 19 nt, Artificial Sequence
  Description of Artificial Sequence: Synthetic oligonucleotide
uggaguacgccaacggggg

SEQ ID NO: 54763 - RNA, 19 nt, Artificial Sequence
  Description of Artificial Sequence: Synthetic oligonucleotide
ugggcguggucauguacga

SEQ ID NO: 54764 - RNA, 19 nt, Artificial Sequence
  Description of Artificial Sequence: Synthetic oligonucleotide
ugggggcugggcgugguca

SEQ ID NO: 54765 - RNA, 19 nt, Artificial Sequence
  Description of Artificial Sequence: Synthetic oligonucleotide
uggugggggcugggcgugg

SEQ ID NO: 54766 - RNA, 19 nt, Artificial Sequence
  Description of Artificial Sequence: Synthetic oligonucleotide
cuucuacaaccaggaccau

SEQ ID NO: 54767 - RNA, 19 nt, Artificial Sequence
  Description of Artificial Sequence: Synthetic oligonucleotide
aaccucaugcuggacaaag

SEQ ID NO: 54768 - RNA, 19 nt, Artificial Sequence
  Description of Artificial Sequence: Synthetic oligonucleotide
aagcuggaaaaccucaugc

SEQ ID NO: 54769 - RNA, 19 nt, Artificial Sequence
  Description of Artificial Sequence: Synthetic oligonucleotide
accucaugcuggacaaaga

SEQ ID NO: 54770 - RNA, 19 nt, Artificial Sequence
  Description of Artificial Sequence: Synthetic oligonucleotide
acgagaugaugugcggccg

SEQ ID NO: 54771 - RNA, 19 nt, Artificial Sequence
  Description of Artificial Sequence: Synthetic oligonucleotide
aaaaccucaugcuggacaa

SEQ ID NO: 54772 - RNA, 19 nt, Artificial Sequence
  Description of Artificial Sequence: Synthetic oligonucleotide
agaugaugugcggccgccu

SEQ ID NO: 54773 - RNA, 19 nt, Artificial Sequence
  Description of Artificial Sequence: Synthetic oligonucleotide
agcucauccucauggaaga

SEQ ID NO: 54774 - RNA, 19 nt, Artificial Sequence
  Description of Artificial Sequence: Synthetic oligonucleotide
agcuggaaaaccucaugcu

SEQ ID NO: 54775 - RNA, 19 nt, Artificial Sequence
  Description of Artificial Sequence: Synthetic oligonucleotide
aagagauccgcuucccgcg

SEQ ID NO: 54776 - RNA, 19 nt, Artificial Sequence
  Description of Artificial Sequence: Synthetic oligonucleotide
aaugccagcugaugaagac

SEQ ID NO: 54777 - RNA, 19 nt, Artificial Sequence
  Description of Artificial Sequence: Synthetic oligonucleotide
auccucauggaagagaucc

SEQ ID NO: 54778 - RNA, 19 nt, Artificial Sequence
  Description of Artificial Sequence: Synthetic oligonucleotide
augaugugcggccgccugc

SEQ ID NO: 54779 - RNA, 19 nt, Artificial Sequence
  Description of Artificial Sequence: Synthetic oligonucleotide
auggaagagauccgcuucc

SEQ ID NO: 54780 - RNA, 19 nt, Artificial Sequence
  Description of Artificial Sequence: Synthetic oligonucleotide
augugcggccgccugcccu

SEQ ID NO: 54781 - RNA, 19 nt, Artificial Sequence
  Description of Artificial Sequence: Synthetic oligonucleotide
caagcuggaaaaccucaug

SEQ ID NO: 54782 - RNA, 19 nt, Artificial Sequence
  Description of Artificial Sequence: Synthetic oligonucleotide
cauccucauggaagagauc

SEQ ID NO: 54783 - RNA, 19 nt, Artificial Sequence
  Description of Artificial Sequence: Synthetic oligonucleotide
cccgaggccaagucccugc

SEQ ID NO: 54784 - RNA, 19 nt, Artificial Sequence
  Description of Artificial Sequence: Synthetic oligonucleotide
ccgaggccaagucccugcu

SEQ ID NO: 54785 - RNA, 19 nt, Artificial Sequence
  Description of Artificial Sequence: Synthetic oligonucleotide
ccgcuucccgcgcacgcuc

SEQ ID NO: 54786 - RNA, 19 nt, Artificial Sequence
  Description of Artificial Sequence: Synthetic oligonucleotide
ccucauggaagagauccgc

SEQ ID NO: 54787 - RNA, 19 nt, Artificial Sequence
  Description of Artificial Sequence: Synthetic oligonucleotide
cgagaugaugugcggccgc

SEQ ID NO: 54788 - RNA, 19 nt, Artificial Sequence
  Description of Artificial Sequence: Synthetic oligonucleotide
cuacaaccaggaccacgag

SEQ ID NO: 54789 - RNA, 19 nt, Artificial Sequence
  Description of Artificial Sequence: Synthetic oligonucleotide
cucauccucauggaagaga

SEQ ID NO: 54790 - RNA, 19 nt, Artificial Sequence
  Description of Artificial Sequence: Synthetic oligonucleotide
cucauggaagagauccgcu

SEQ ID NO: 54791 - RNA, 19 nt, Artificial Sequence
  Description of Artificial Sequence: Synthetic oligonucleotide
cuggaaaaccucaugcugg

SEQ ID NO: 54792 - RNA, 19 nt, Artificial Sequence
  Description of Artificial Sequence: Synthetic oligonucleotide
cuucuacaaccaggaccac

SEQ ID NO: 54793 - RNA, 19 nt, Artificial Sequence
  Description of Artificial Sequence: Synthetic oligonucleotide
ccuuccagacccacgaccg

SEQ ID NO: 54794 - RNA, 19 nt, Artificial Sequence
  Description of Artificial Sequence: Synthetic oligonucleotide
gaaaaccucaugcuggaca

SEQ ID NO: 54795 - RNA, 19 nt, Artificial Sequence
  Description of Artificial Sequence: Synthetic oligonucleotide
gagaugaugugcggccgcc

SEQ ID NO: 54796 - RNA, 19 nt, Artificial Sequence
  Description of Artificial Sequence: Synthetic oligonucleotide
gagcucauccucauggaag

SEQ ID NO: 54797 - RNA, 19 nt, Artificial Sequence
  Description of Artificial Sequence: Synthetic oligonucleotide
gaagagauccgcuucccgc

SEQ ID NO: 54798 - RNA, 19 nt, Artificial Sequence
  Description of Artificial Sequence: Synthetic oligonucleotide
gaugaugugcggccgccug

SEQ ID NO: 54799 - RNA, 19 nt, Artificial Sequence
  Description of Artificial Sequence: Synthetic oligonucleotide
gaugugcggccgccugccc

SEQ ID NO: 54800 - RNA, 19 nt, Artificial Sequence
  Description of Artificial Sequence: Synthetic oligonucleotide
gcggccgccugcccuucua

SEQ ID NO: 54801 - RNA, 19 nt, Artificial Sequence
  Description of Artificial Sequence: Synthetic oligonucleotide
gcucauccucauggaagag

SEQ ID NO: 54802 - RNA, 19 nt, Artificial Sequence
  Description of Artificial Sequence: Synthetic oligonucleotide
gcuggaaaaccucaugcug

SEQ ID NO: 54803 - RNA, 19 nt, Artificial Sequence
  Description of Artificial Sequence: Synthetic oligonucleotide
ggaaaaccucaugcuggac

SEQ ID NO: 54804 - RNA, 19 nt, Artificial Sequence
  Description of Artificial Sequence: Synthetic oligonucleotide
agagauccgcuucccgcgc

SEQ ID NO: 54805 - RNA, 19 nt, Artificial Sequence
  Description of Artificial Sequence: Synthetic oligonucleotide
ggaagagauccgcuucccg

SEQ ID NO: 54806 - RNA, 19 nt, Artificial Sequence
  Description of Artificial Sequence: Synthetic oligonucleotide
ggccgccugcccuucuaca

SEQ ID NO: 54807 - RNA, 19 nt, Artificial Sequence
  Description of Artificial Sequence: Synthetic oligonucleotide
guacgagaugaugugcggc

SEQ ID NO: 54808 - RNA, 19 nt, Artificial Sequence
  Description of Artificial Sequence: Synthetic oligonucleotide
gccgccugcccuucuacaa

SEQ ID NO: 54809 - RNA, 19 nt, Artificial Sequence
  Description of Artificial Sequence: Synthetic oligonucleotide
gugcggccgccugcccuuc

SEQ ID NO: 54810 - RNA, 19 nt, Artificial Sequence
  Description of Artificial Sequence: Synthetic oligonucleotide
uacgagaugaugugcggcc

SEQ ID NO: 54811 - RNA, 19 nt, Artificial Sequence
  Description of Artificial Sequence: Synthetic oligonucleotide
ucaagcuggaaaaccucau

SEQ ID NO: 54812 - RNA, 19 nt, Artificial Sequence
  Description of Artificial Sequence: Synthetic oligonucleotide
ucauccucauggaagagau

SEQ ID NO: 54813 - RNA, 19 nt, Artificial Sequence
  Description of Artificial Sequence: Synthetic oligonucleotide
ucauggaagagauccgcuu

SEQ ID NO: 54814 - RNA, 19 nt, Artificial Sequence
  Description of Artificial Sequence: Synthetic oligonucleotide
uccucauggaagagauccg

SEQ ID NO: 54815 - RNA, 19 nt, Artificial Sequence
  Description of Artificial Sequence: Synthetic oligonucleotide
ccgccugcccuucuacaac

SEQ ID NO: 54816 - RNA, 19 nt, Artificial Sequence
  Description of Artificial Sequence: Synthetic oligonucleotide
ucuacaaccaggaccacga

SEQ ID NO: 54817 - RNA, 19 nt, Artificial Sequence
  Description of Artificial Sequence: Synthetic oligonucleotide
ugaugugcggccgccugcc

SEQ ID NO: 54818 - RNA, 19 nt, Artificial Sequence
  Description of Artificial Sequence: Synthetic oligonucleotide
ugcggccgccugcccuucu

SEQ ID NO: 54819 - RNA, 19 nt, Artificial Sequence
  Description of Artificial Sequence: Synthetic oligonucleotide
uggaaaaccucaugcugga

SEQ ID NO: 54820 - RNA, 19 nt, Artificial Sequence
  Description of Artificial Sequence: Synthetic oligonucleotide
uggaagagauccgcuuccc

SEQ ID NO: 54821 - RNA, 19 nt, Artificial Sequence
  Description of Artificial Sequence: Synthetic oligonucleotide
ugugcggccgccugcccuu

SEQ ID NO: 54822 - RNA, 19 nt, Artificial Sequence
  Description of Artificial Sequence: Synthetic oligonucleotide
uucuacaaccaggaccacg

SEQ ID NO: 54823 - RNA, 19 nt, Artificial Sequence
  Description of Artificial Sequence: Synthetic oligonucleotide
uucuccuacucggccagca

SEQ ID NO: 54824 - RNA, 19 nt, Artificial Sequence
  Description of Artificial Sequence: Synthetic oligonucleotide
ucgagcucauccucaugga

SEQ ID NO: 54825 - RNA, 19 nt, Artificial Sequence
  Description of Artificial Sequence: Synthetic oligonucleotide
cuuccagacccacgaccgc

SEQ ID NO: 54826 - RNA, 19 nt, Artificial Sequence
  Description of Artificial Sequence: Synthetic oligonucleotide
uucgagcucauccucaugg

SEQ ID NO: 54827 - RNA, 19 nt, Artificial Sequence
  Description of Artificial Sequence: Synthetic oligonucleotide
aaccaggaccaugagaaac

SEQ ID NO: 54828 - RNA, 19 nt, Artificial Sequence
  Description of Artificial Sequence: Synthetic oligonucleotide
accaggaccaugagaaacu

SEQ ID NO: 54829 - RNA, 19 nt, Artificial Sequence
  Description of Artificial Sequence: Synthetic oligonucleotide
accaugagaaacuuuuuga

SEQ ID NO: 54830 - RNA, 19 nt, Artificial Sequence
  Description of Artificial Sequence: Synthetic oligonucleotide
aggaccaugagaaacuuuu

SEQ ID NO: 54831 - RNA, 19 nt, Artificial Sequence
  Description of Artificial Sequence: Synthetic oligonucleotide
caaccaggaccaugagaaa

SEQ ID NO: 54832 - RNA, 19 nt, Artificial Sequence
  Description of Artificial Sequence: Synthetic oligonucleotide
caggaccaugagaaacuuu

SEQ ID NO: 54833 - RNA, 19 nt, Artificial Sequence
  Description of Artificial Sequence: Synthetic oligonucleotide
ccaggaccaugagaaacuu

SEQ ID NO: 54834 - RNA, 19 nt, Artificial Sequence
  Description of Artificial Sequence: Synthetic oligonucleotide
gaccaugagaaacuuuuug

SEQ ID NO: 54835 - RNA, 19 nt, Artificial Sequence
  Description of Artificial Sequence: Synthetic oligonucleotide
ggaccaugagaaacuuuuu

SEQ ID NO: 54836 - RNA, 19 nt, Artificial Sequence
  Description of Artificial Sequence: Synthetic oligonucleotide
auggugcagaaauugucuc

SEQ ID NO: 54837 - RNA, 19 nt, Artificial Sequence
  Description of Artificial Sequence: Synthetic oligonucleotide
uauggugcagaaauugucu

SEQ ID NO: 54838 - RNA, 19 nt, Artificial Sequence
  Description of Artificial Sequence: Synthetic oligonucleotide
aaccucaugcuggacaagg

SEQ ID NO: 54839 - RNA, 19 nt, Artificial Sequence
  Description of Artificial Sequence: Synthetic oligonucleotide
aagcuggagaaccucaugc

SEQ ID NO: 54840 - RNA, 19 nt, Artificial Sequence
  Description of Artificial Sequence: Synthetic oligonucleotide
aaggccacaggccgcuacu

SEQ ID NO: 54841 - RNA, 19 nt, Artificial Sequence
  Description of Artificial Sequence: Synthetic oligonucleotide
acaggccgcuacuacgcca

SEQ ID NO: 54842 - RNA, 19 nt, Artificial Sequence
  Description of Artificial Sequence: Synthetic oligonucleotide
acaucaagaccuggcggcc

SEQ ID NO: 54843 - RNA, 19 nt, Artificial Sequence
  Description of Artificial Sequence: Synthetic oligonucleotide
acccacgaccgccucugcu

SEQ ID NO: 54844 - RNA, 19 nt, Artificial Sequence
  Description of Artificial Sequence: Synthetic oligonucleotide
accucaugcuggacaagga

SEQ ID NO: 54845 - RNA, 19 nt, Artificial Sequence
  Description of Artificial Sequence: Synthetic oligonucleotide
acgaccgccucugcuuugu

SEQ ID NO: 54846 - RNA, 19 nt, Artificial Sequence
  Description of Artificial Sequence: Synthetic oligonucleotide
acgagaugaugugcggucg

SEQ ID NO: 54847 - RNA, 19 nt, Artificial Sequence
  Description of Artificial Sequence: Synthetic oligonucleotide
agaaggccacaggccgcua

SEQ ID NO: 54848 - RNA, 19 nt, Artificial Sequence
  Description of Artificial Sequence: Synthetic oligonucleotide
agaugaugugcggucgccu

SEQ ID NO: 54849 - RNA, 19 nt, Artificial Sequence
  Description of Artificial Sequence: Synthetic oligonucleotide
agcucauccucauggagga

SEQ ID NO: 54850 - RNA, 19 nt, Artificial Sequence
  Description of Artificial Sequence: Synthetic oligonucleotide
agcuggagaaccucaugcu

SEQ ID NO: 54851 - RNA, 19 nt, Artificial Sequence
  Description of Artificial Sequence: Synthetic oligonucleotide
aggagauccgcuucccgcg

SEQ ID NO: 54852 - RNA, 19 nt, Artificial Sequence
  Description of Artificial Sequence: Synthetic oligonucleotide
aggccgcuacuacgccaug

SEQ ID NO: 54853 - RNA, 19 nt, Artificial Sequence
  Description of Artificial Sequence: Synthetic oligonucleotide
agugccagcugaugaagac

SEQ ID NO: 54854 - RNA, 19 nt, Artificial Sequence
  Description of Artificial Sequence: Synthetic oligonucleotide
aguggaccacugucaucga

SEQ ID NO: 54855 - RNA, 19 nt, Artificial Sequence
  Description of Artificial Sequence: Synthetic oligonucleotide
aguggacuggugggggcug

SEQ ID NO: 54856 - RNA, 19 nt, Artificial Sequence
  Description of Artificial Sequence: Synthetic oligonucleotide
aucaagaccuggcggccac

SEQ ID NO: 54857 - RNA, 19 nt, Artificial Sequence
  Description of Artificial Sequence: Synthetic oligonucleotide
auccgcugccugcagugga

SEQ ID NO: 54858 - RNA, 19 nt, Artificial Sequence
  Description of Artificial Sequence: Synthetic oligonucleotide
auccucauggaggagaucc

SEQ ID NO: 54859 - RNA, 19 nt, Artificial Sequence
  Description of Artificial Sequence: Synthetic oligonucleotide
augaugugcggucgccugc

SEQ ID NO: 54860 - RNA, 19 nt, Artificial Sequence
  Description of Artificial Sequence: Synthetic oligonucleotide
auggaggagauccgcuucc

SEQ ID NO: 54861 - RNA, 19 nt, Artificial Sequence
  Description of Artificial Sequence: Synthetic oligonucleotide
augugcggucgccugcccu

SEQ ID NO: 54862 - RNA, 19 nt, Artificial Sequence
  Description of Artificial Sequence: Synthetic oligonucleotide
caagcuggagaaccucaug

SEQ ID NO: 54863 - RNA, 19 nt, Artificial Sequence
  Description of Artificial Sequence: Synthetic oligonucleotide
cacgaccgccucugcuuug

SEQ ID NO: 54864 - RNA, 19 nt, Artificial Sequence
  Description of Artificial Sequence: Synthetic oligonucleotide
cagacccacgaccgccucu

SEQ ID NO: 54865 - RNA, 19 nt, Artificial Sequence
  Description of Artificial Sequence: Synthetic oligonucleotide
caggccgcuacuacgccau

SEQ ID NO: 54866 - RNA, 19 nt, Artificial Sequence
  Description of Artificial Sequence: Synthetic oligonucleotide
caguggaccacugucaucg

SEQ ID NO: 54867 - RNA, 19 nt, Artificial Sequence
  Description of Artificial Sequence: Synthetic oligonucleotide
caguggacuggugggggcu

SEQ ID NO: 54868 - RNA, 19 nt, Artificial Sequence
  Description of Artificial Sequence: Synthetic oligonucleotide
caucaagaccuggcggcca

SEQ ID NO: 54869 - RNA, 19 nt, Artificial Sequence
  Description of Artificial Sequence: Synthetic oligonucleotide
cauccgcugccugcagugg

SEQ ID NO: 54870 - RNA, 19 nt, Artificial Sequence
  Description of Artificial Sequence: Synthetic oligonucleotide
cauccucauggaggagauc

SEQ ID NO: 54871 - RNA, 19 nt, Artificial Sequence
  Description of Artificial Sequence: Synthetic oligonucleotide
cauggaggagauccgcuuc

SEQ ID NO: 54872 - RNA, 19 nt, Artificial Sequence
  Description of Artificial Sequence: Synthetic oligonucleotide
ccacaggccgcuacuacgc

SEQ ID NO: 54873 - RNA, 19 nt, Artificial Sequence
  Description of Artificial Sequence: Synthetic oligonucleotide
ccagcugaugaagacggag

SEQ ID NO: 54874 - RNA, 19 nt, Artificial Sequence
  Description of Artificial Sequence: Synthetic oligonucleotide
ccaggcaccccuuccucac

SEQ ID NO: 54875 - RNA, 19 nt, Artificial Sequence
  Description of Artificial Sequence: Synthetic oligonucleotide
cccacgaccgccucugcuu

SEQ ID NO: 54876 - RNA, 19 nt, Artificial Sequence
  Description of Artificial Sequence: Synthetic oligonucleotide
ccccacuucccccaguucu

SEQ ID NO: 54877 - RNA, 19 nt, Artificial Sequence
  Description of Artificial Sequence: Synthetic oligonucleotide
cccgaggccaaguccuugc

SEQ ID NO: 54878 - RNA, 19 nt, Artificial Sequence
  Description of Artificial Sequence: Synthetic oligonucleotide
ccgcuucccgcgcacgcuu

SEQ ID NO: 54879 - RNA, 19 nt, Artificial Sequence
  Description of Artificial Sequence: Synthetic oligonucleotide
ccugcaguggaccacuguc

SEQ ID NO: 54880 - RNA, 19 nt, Artificial Sequence
  Description of Artificial Sequence: Synthetic oligonucleotide
ccugucccgggagcgugug

SEQ ID NO: 54881 - RNA, 19 nt, Artificial Sequence
  Description of Artificial Sequence: Synthetic oligonucleotide
ccuucauuggcuacaagga

SEQ ID NO: 54882 - RNA, 19 nt, Artificial Sequence
  Description of Artificial Sequence: Synthetic oligonucleotide
cgagaugaugugcggucgc

SEQ ID NO: 54883 - RNA, 19 nt, Artificial Sequence
  Description of Artificial Sequence: Synthetic oligonucleotide
cgaggccaaguccuugcuu

SEQ ID NO: 54884 - RNA, 19 nt, Artificial Sequence
  Description of Artificial Sequence: Synthetic oligonucleotide
cggucgccugcccuucuac

SEQ ID NO: 54885 - RNA, 19 nt, Artificial Sequence
  Description of Artificial Sequence: Synthetic oligonucleotide
cucauccucauggaggaga

SEQ ID NO: 54886 - RNA, 19 nt, Artificial Sequence
  Description of Artificial Sequence: Synthetic oligonucleotide
cucauggaggagauccgcu

SEQ ID NO: 54887 - RNA, 19 nt, Artificial Sequence
  Description of Artificial Sequence: Synthetic oligonucleotide
cugcaguggaccacuguca

SEQ ID NO: 54888 - RNA, 19 nt, Artificial Sequence
  Description of Artificial Sequence: Synthetic oligonucleotide
cugccugcaguggaccacu

SEQ ID NO: 54889 - RNA, 19 nt, Artificial Sequence
  Description of Artificial Sequence: Synthetic oligonucleotide
cuggagaaccucaugcugg

SEQ ID NO: 54890 - RNA, 19 nt, Artificial Sequence
  Description of Artificial Sequence: Synthetic oligonucleotide
cugucccgggagcgugugu

SEQ ID NO: 54891 - RNA, 19 nt, Artificial Sequence
  Description of Artificial Sequence: Synthetic oligonucleotide
cuucauuggcuacaaggag

SEQ ID NO: 54892 - RNA, 19 nt, Artificial Sequence
  Description of Artificial Sequence: Synthetic oligonucleotide
cuuuccagacccacgaccg

SEQ ID NO: 54893 - RNA, 19 nt, Artificial Sequence
  Description of Artificial Sequence: Synthetic oligonucleotide
gacccacgaccgccucugc

SEQ ID NO: 54894 - RNA, 19 nt, Artificial Sequence
  Description of Artificial Sequence: Synthetic oligonucleotide
gagaaccucaugcuggaca

SEQ ID NO: 54895 - RNA, 19 nt, Artificial Sequence
  Description of Artificial Sequence: Synthetic oligonucleotide
gagaaggccacaggccgcu

SEQ ID NO: 54896 - RNA, 19 nt, Artificial Sequence
  Description of Artificial Sequence: Synthetic oligonucleotide
gagaugaugugcggucgcc

SEQ ID NO: 54897 - RNA, 19 nt, Artificial Sequence
  Description of Artificial Sequence: Synthetic oligonucleotide
gagcucauccucauggagg

SEQ ID NO: 54898 - RNA, 19 nt, Artificial Sequence
  Description of Artificial Sequence: Synthetic oligonucleotide
gaggagauccgcuucccgc

SEQ ID NO: 54899 - RNA, 19 nt, Artificial Sequence
  Description of Artificial Sequence: Synthetic oligonucleotide
gaugaugugcggucgccug

SEQ ID NO: 54900 - RNA, 19 nt, Artificial Sequence
  Description of Artificial Sequence: Synthetic oligonucleotide
gaugugcggucgccugccc

SEQ ID NO: 54901 - RNA, 19 nt, Artificial Sequence
  Description of Artificial Sequence: Synthetic oligonucleotide
gcaguggaccacugucauc

SEQ ID NO: 54902 - RNA, 19 nt, Artificial Sequence
  Description of Artificial Sequence: Synthetic oligonucleotide
gcaguggacuggugggggc

SEQ ID NO: 54903 - RNA, 19 nt, Artificial Sequence
  Description of Artificial Sequence: Synthetic oligonucleotide
gccacaggccgcuacuacg

SEQ ID NO: 54904 - RNA, 19 nt, Artificial Sequence
  Description of Artificial Sequence: Synthetic oligonucleotide
gccagcugaugaagacgga

SEQ ID NO: 54905 - RNA, 19 nt, Artificial Sequence
  Description of Artificial Sequence: Synthetic oligonucleotide
gccccacuucccccaguuc

SEQ ID NO: 54906 - RNA, 19 nt, Artificial Sequence
  Description of Artificial Sequence: Synthetic oligonucleotide
gccugcaguggaccacugu

SEQ ID NO: 54907 - RNA, 19 nt, Artificial Sequence
  Description of Artificial Sequence: Synthetic oligonucleotide
gcucauccucauggaggag

SEQ ID NO: 54908 - RNA, 19 nt, Artificial Sequence
  Description of Artificial Sequence: Synthetic oligonucleotide
gcuggagaaccucaugcug

SEQ ID NO: 54909 - RNA, 19 nt, Artificial Sequence
  Description of Artificial Sequence: Synthetic oligonucleotide
ggagaaggccacaggccgc

SEQ ID NO: 54910 - RNA, 19 nt, Artificial Sequence
  Description of Artificial Sequence: Synthetic oligonucleotide
ggagauccgcuucccgcgc

SEQ ID NO: 54911 - RNA, 19 nt, Artificial Sequence
  Description of Artificial Sequence: Synthetic oligonucleotide
ggccacaggccgcuacuac

SEQ ID NO: 54912 - RNA, 19 nt, Artificial Sequence
  Description of Artificial Sequence: Synthetic oligonucleotide
ggccccacuucccccaguu

SEQ ID NO: 54913 - RNA, 19 nt, Artificial Sequence
  Description of Artificial Sequence: Synthetic oligonucleotide
ggucgccugcccuucuaca

SEQ ID NO: 54914 - RNA, 19 nt, Artificial Sequence
  Description of Artificial Sequence: Synthetic oligonucleotide
gucccgggagcguguguuc

SEQ ID NO: 54915 - RNA, 19 nt, Artificial Sequence
  Description of Artificial Sequence: Synthetic oligonucleotide
gucgccugcccuucuacaa

SEQ ID NO: 54916 - RNA, 19 nt, Artificial Sequence
  Description of Artificial Sequence: Synthetic oligonucleotide
uacaucaagaccuggcggc

SEQ ID NO: 54917 - RNA, 19 nt, Artificial Sequence
  Description of Artificial Sequence: Synthetic oligonucleotide
uacgagaugaugugcgguc

SEQ ID NO: 54918 - RNA, 19 nt, Artificial Sequence
  Description of Artificial Sequence: Synthetic oligonucleotide
ucaagaccuggcggccacg

SEQ ID NO: 54919 - RNA, 19 nt, Artificial Sequence
  Description of Artificial Sequence: Synthetic oligonucleotide
ucaagcuggagaaccucau

SEQ ID NO: 54920 - RNA, 19 nt, Artificial Sequence
  Description of Artificial Sequence: Synthetic oligonucleotide
ucauccucauggaggagau

SEQ ID NO: 54921 - RNA, 19 nt, Artificial Sequence
  Description of Artificial Sequence: Synthetic oligonucleotide
uccgcugccugcaguggac

SEQ ID NO: 54922 - RNA, 19 nt, Artificial Sequence
  Description of Artificial Sequence: Synthetic oligonucleotide
uccucauggaggagauccg

SEQ ID NO: 54923 - RNA, 19 nt, Artificial Sequence
  Description of Artificial Sequence: Synthetic oligonucleotide
ugaugugcggucgccugcc

SEQ ID NO: 54924 - RNA, 19 nt, Artificial Sequence
  Description of Artificial Sequence: Synthetic oligonucleotide
ugcaguggaccacugucau

SEQ ID NO: 54925 - RNA, 19 nt, Artificial Sequence
  Description of Artificial Sequence: Synthetic oligonucleotide
ugccagcugaugaagacgg

SEQ ID NO: 54926 - RNA, 19 nt, Artificial Sequence
  Description of Artificial Sequence: Synthetic oligonucleotide
ugccugcaguggaccacug

SEQ ID NO: 54927 - RNA, 19 nt, Artificial Sequence
  Description of Artificial Sequence: Synthetic oligonucleotide
ugcggucgccugcccuucu

SEQ ID NO: 54928 - RNA, 19 nt, Artificial Sequence
  Description of Artificial Sequence: Synthetic oligonucleotide
uggagaaccucaugcugga

SEQ ID NO: 54929 - RNA, 19 nt, Artificial Sequence
  Description of Artificial Sequence: Synthetic oligonucleotide
uggaggagauccgcuuccc

SEQ ID NO: 54930 - RNA, 19 nt, Artificial Sequence
  Description of Artificial Sequence: Synthetic oligonucleotide
ugucccgggagcguguguu

SEQ ID NO: 54931 - RNA, 19 nt, Artificial Sequence
  Description of Artificial Sequence: Synthetic oligonucleotide
ugugcggucgccugcccuu

SEQ ID NO: 54932 - RNA, 19 nt, Artificial Sequence
  Description of Artificial Sequence: Synthetic oligonucleotide
uucuccuacucggccagcg

SEQ ID NO: 54933 - RNA, 19 nt, Artificial Sequence
  Description of Artificial Sequence: Synthetic oligonucleotide
uugagcucauccucaugga

SEQ ID NO: 54934 - RNA, 19 nt, Artificial Sequence
  Description of Artificial Sequence: Synthetic oligonucleotide
uuuccagacccacgaccgc

SEQ ID NO: 54935 - RNA, 19 nt, Artificial Sequence
  Description of Artificial Sequence: Synthetic oligonucleotide
uuugagcucauccucaugg

SEQ ID NO: 54936 - RNA, 19 nt, Artificial Sequence
  Description of Artificial Sequence: Synthetic oligonucleotide
aaccaggaccaugagaagc

SEQ ID NO: 54937 - RNA, 19 nt, Artificial Sequence
  Description of Artificial Sequence: Synthetic oligonucleotide
accaggaccaugagaagcu

SEQ ID NO: 54938 - RNA, 19 nt, Artificial Sequence
  Description of Artificial Sequence: Synthetic oligonucleotide
accaugagaagcuuuuuga

SEQ ID NO: 54939 - RNA, 19 nt, Artificial Sequence
  Description of Artificial Sequence: Synthetic oligonucleotide
aggaccaugagaagcuuuu

SEQ ID NO: 54940 - RNA, 19 nt, Artificial Sequence
  Description of Artificial Sequence: Synthetic oligonucleotide
caaccaggaccaugagaag

SEQ ID NO: 54941 - RNA, 19 nt, Artificial Sequence
  Description of Artificial Sequence: Synthetic oligonucleotide
caggaccaugagaagcuuu

SEQ ID NO: 54942 - RNA, 19 nt, Artificial Sequence
  Description of Artificial Sequence: Synthetic oligonucleotide
gaccaugagaagcuuuuug

SEQ ID NO: 54943 - RNA, 19 nt, Artificial Sequence
  Description of Artificial Sequence: Synthetic oligonucleotide
ggaccaugagaagcuuuuu

SEQ ID NO: 54944 - RNA, 19 nt, Artificial Sequence
  Description of Artificial Sequence: Synthetic oligonucleotide
aacgggggugagcuguucu

SEQ ID NO: 54945 - RNA, 19 nt, Artificial Sequence
  Description of Artificial Sequence: Synthetic oligonucleotide
aagcagaggcuuggugggg

SEQ ID NO: 54946 - RNA, 19 nt, Artificial Sequence
  Description of Artificial Sequence: Synthetic oligonucleotide
aaggccacuggccgcuacu

SEQ ID NO: 54947 - RNA, 19 nt, Artificial Sequence
  Description of Artificial Sequence: Synthetic oligonucleotide
acuggccgcuacuacgcca

SEQ ID NO: 54948 - RNA, 19 nt, Artificial Sequence
  Description of Artificial Sequence: Synthetic oligonucleotide
acaucaagaccuggaggcc

SEQ ID NO: 54949 - RNA, 19 nt, Artificial Sequence
  Description of Artificial Sequence: Synthetic oligonucleotide
acccacgaccgccugugcu

SEQ ID NO: 54950 - RNA, 19 nt, Artificial Sequence
  Description of Artificial Sequence: Synthetic oligonucleotide
acgaccgccugugcuuugu

SEQ ID NO: 54951 - RNA, 19 nt, Artificial Sequence
  Description of Artificial Sequence: Synthetic oligonucleotide
acgggggugagcuguucuu

SEQ ID NO: 54952 - RNA, 19 nt, Artificial Sequence
  Description of Artificial Sequence: Synthetic oligonucleotide
acuggugggggcugggugu

SEQ ID NO: 54953 - RNA, 19 nt, Artificial Sequence
  Description of Artificial Sequence: Synthetic oligonucleotide
agaaggccacuggccgcua

SEQ ID NO: 54954 - RNA, 19 nt, Artificial Sequence
  Description of Artificial Sequence: Synthetic oligonucleotide
agacccacgaccgccugug

SEQ ID NO: 54955 - RNA, 19 nt, Artificial Sequence
  Description of Artificial Sequence: Synthetic oligonucleotide
agcagaggcuugguggggg

SEQ ID NO: 54956 - RNA, 19 nt, Artificial Sequence
  Description of Artificial Sequence: Synthetic oligonucleotide
aggacaaugacuauggccg

SEQ ID NO: 54957 - RNA, 19 nt, Artificial Sequence
  Description of Artificial Sequence: Synthetic oligonucleotide
aggccacuggccgcuacua

SEQ ID NO: 54958 - RNA, 19 nt, Artificial Sequence
  Description of Artificial Sequence: Synthetic oligonucleotide
uggccgcuacuacgccaug

SEQ ID NO: 54959 - RNA, 19 nt, Artificial Sequence
  Description of Artificial Sequence: Synthetic oligonucleotide
aguggaccacagucaucga

SEQ ID NO: 54960 - RNA, 19 nt, Artificial Sequence
  Description of Artificial Sequence: Synthetic oligonucleotide
cguggacuggugggggcug

SEQ ID NO: 54961 - RNA, 19 nt, Artificial Sequence
  Description of Artificial Sequence: Synthetic oligonucleotide
aucaagaccuggaggccac

SEQ ID NO: 54962 - RNA, 19 nt, Artificial Sequence
  Description of Artificial Sequence: Synthetic oligonucleotide
auacgcugccugcagugga

SEQ ID NO: 54963 - RNA, 19 nt, Artificial Sequence
  Description of Artificial Sequence: Synthetic oligonucleotide
auggaguaugccaacgggg

SEQ ID NO: 54964 - RNA, 19 nt, Artificial Sequence
  Description of Artificial Sequence: Synthetic oligonucleotide
caacgggggugagcuguuc

SEQ ID NO: 54965 - RNA, 19 nt, Artificial Sequence
  Description of Artificial Sequence: Synthetic oligonucleotide
uaagaaggaccccaagcag

SEQ ID NO: 54966 - RNA, 19 nt, Artificial Sequence
  Description of Artificial Sequence: Synthetic oligonucleotide
caagcagaggcuugguggg

SEQ ID NO: 54967 - RNA, 19 nt, Artificial Sequence
  Description of Artificial Sequence: Synthetic oligonucleotide
cacuggccgcuacuacgcc

SEQ ID NO: 54968 - RNA, 19 nt, Artificial Sequence
  Description of Artificial Sequence: Synthetic oligonucleotide
cacgaccgccugugcuuug

SEQ ID NO: 54969 - RNA, 19 nt, Artificial Sequence
  Description of Artificial Sequence: Synthetic oligonucleotide
cagacccacgaccgccugu

SEQ ID NO: 54970 - RNA, 19 nt, Artificial Sequence
  Description of Artificial Sequence: Synthetic oligonucleotide
cuggccgcuacuacgccau

SEQ ID NO: 54971 - RNA, 19 nt, Artificial Sequence
  Description of Artificial Sequence: Synthetic oligonucleotide
caguggaccacagucaucg

SEQ ID NO: 54972 - RNA, 19 nt, Artificial Sequence
  Description of Artificial Sequence: Synthetic oligonucleotide
ccguggacuggugggggcu

SEQ ID NO: 54973 - RNA, 19 nt, Artificial Sequence
  Description of Artificial Sequence: Synthetic oligonucleotide
caucaagaccuggaggcca

SEQ ID NO: 54974 - RNA, 19 nt, Artificial Sequence
  Description of Artificial Sequence: Synthetic oligonucleotide
cauacgcugccugcagugg

SEQ ID NO: 54975 - RNA, 19 nt, Artificial Sequence
  Description of Artificial Sequence: Synthetic oligonucleotide
ccaacgggggugagcuguu

SEQ ID NO: 54976 - RNA, 19 nt, Artificial Sequence
  Description of Artificial Sequence: Synthetic oligonucleotide
ccaagcagaggcuuggugg

SEQ ID NO: 54977 - RNA, 19 nt, Artificial Sequence
  Description of Artificial Sequence: Synthetic oligonucleotide
ccacuggccgcuacuacgc

SEQ ID NO: 54978 - RNA, 19 nt, Artificial Sequence
  Description of Artificial Sequence: Synthetic oligonucleotide
ccacgaccgccugugcuuu

SEQ ID NO: 54979 - RNA, 19 nt, Artificial Sequence
  Description of Artificial Sequence: Synthetic oligonucleotide
ccagcugaugaagaccgag

SEQ ID NO: 54980 - RNA, 19 nt, Artificial Sequence
  Description of Artificial Sequence: Synthetic oligonucleotide
ccaggcacccguuccucac

SEQ ID NO: 54981 - RNA, 19 nt, Artificial Sequence
  Description of Artificial Sequence: Synthetic oligonucleotide
cccaagcagaggcuuggug

SEQ ID NO: 54982 - RNA, 19 nt, Artificial Sequence
  Description of Artificial Sequence: Synthetic oligonucleotide
cccacgaccgccugugcuu

SEQ ID NO: 54983 - RNA, 19 nt, Artificial Sequence
  Description of Artificial Sequence: Synthetic oligonucleotide
ccccaagcagaggcuuggu

SEQ ID NO: 54984 - RNA, 19 nt, Artificial Sequence
  Description of Artificial Sequence: Synthetic oligonucleotide
acccacuucccccaguucu

SEQ ID NO: 54985 - RNA, 19 nt, Artificial Sequence
  Description of Artificial Sequence: Synthetic oligonucleotide
ccugaggugcuggaggaca

SEQ ID NO: 54986 - RNA, 19 nt, Artificial Sequence
  Description of Artificial Sequence: Synthetic oligonucleotide
cugaggugcuggaggacaa

SEQ ID NO: 54987 - RNA, 19 nt, Artificial Sequence
  Description of Artificial Sequence: Synthetic oligonucleotide
ccugcaguggaccacaguc

SEQ ID NO: 54988 - RNA, 19 nt, Artificial Sequence
  Description of Artificial Sequence: Synthetic oligonucleotide
ccugucccgggagcguguc

SEQ ID NO: 54989 - RNA, 19 nt, Artificial Sequence
  Description of Artificial Sequence: Synthetic oligonucleotide
ccuucauuggguacaagga

SEQ ID NO: 54990 - RNA, 19 nt, Artificial Sequence
  Description of Artificial Sequence: Synthetic oligonucleotide
ugagcuguucuuccaccug

SEQ ID NO: 54991 - RNA, 19 nt, Artificial Sequence
  Description of Artificial Sequence: Synthetic oligonucleotide
ugaggugcuggaggacaau

SEQ ID NO: 54992 - RNA, 19 nt, Artificial Sequence
  Description of Artificial Sequence: Synthetic oligonucleotide
cgggggugagcuguucuuc

SEQ ID NO: 54993 - RNA, 19 nt, Artificial Sequence
  Description of Artificial Sequence: Synthetic oligonucleotide
uguggucauguacgagaug

SEQ ID NO: 54994 - RNA, 19 nt, Artificial Sequence
  Description of Artificial Sequence: Synthetic oligonucleotide
cuuaagaaggaccccaagc

SEQ ID NO: 54995 - RNA, 19 nt, Artificial Sequence
  Description of Artificial Sequence: Synthetic oligonucleotide
cugcaguggaccacaguca

SEQ ID NO: 54996 - RNA, 19 nt, Artificial Sequence
  Description of Artificial Sequence: Synthetic oligonucleotide
cugccugcaguggaccaca

SEQ ID NO: 54997 - RNA, 19 nt, Artificial Sequence
  Description of Artificial Sequence: Synthetic oligonucleotide
cugcuuaagaaggacccca

SEQ ID NO: 54998 - RNA, 19 nt, Artificial Sequence
  Description of Artificial Sequence: Synthetic oligonucleotide
cuggaggacaaugacuaug

SEQ ID NO: 54999 - RNA, 19 nt, Artificial Sequence
  Description of Artificial Sequence: Synthetic oligonucleotide
cuggguguggucauguacg

SEQ ID NO: 55000 - RNA, 19 nt, Artificial Sequence
  Description of Artificial Sequence: Synthetic oligonucleotide
cuggugggggcugggugug

SEQ ID NO: 55001 - RNA, 19 nt, Artificial Sequence
  Description of Artificial Sequence: Synthetic oligonucleotide
cugucccgggagcgugucu

SEQ ID NO: 55002 - RNA, 19 nt, Artificial Sequence
  Description of Artificial Sequence: Synthetic oligonucleotide
cuucauuggguacaaggag

SEQ ID NO: 55003 - RNA, 19 nt, Artificial Sequence
  Description of Artificial Sequence: Synthetic oligonucleotide
gacccacgaccgccugugc

SEQ ID NO: 55004 - RNA, 19 nt, Artificial Sequence
  Description of Artificial Sequence: Synthetic oligonucleotide
gacuggugggggcugggug

SEQ ID NO: 55005 - RNA, 19 nt, Artificial Sequence
  Description of Artificial Sequence: Synthetic oligonucleotide
gagaaggccacuggccgcu

SEQ ID NO: 55006 - RNA, 19 nt, Artificial Sequence
  Description of Artificial Sequence: Synthetic oligonucleotide
gaggacaaugacuauggcc

SEQ ID NO: 55007 - RNA, 19 nt, Artificial Sequence
  Description of Artificial Sequence: Synthetic oligonucleotide
gcaguggaccacagucauc

SEQ ID NO: 55008 - RNA, 19 nt, Artificial Sequence
  Description of Artificial Sequence: Synthetic oligonucleotide
gccguggacuggugggggc

SEQ ID NO: 55009 - RNA, 19 nt, Artificial Sequence
  Description of Artificial Sequence: Synthetic oligonucleotide
gccaacgggggugagcugu

SEQ ID NO: 55010 - RNA, 19 nt, Artificial Sequence
  Description of Artificial Sequence: Synthetic oligonucleotide
gccacuggccgcuacuacg

SEQ ID NO: 55011 - RNA, 19 nt, Artificial Sequence
  Description of Artificial Sequence: Synthetic oligonucleotide
gccagcugaugaagaccga

SEQ ID NO: 55012 - RNA, 19 nt, Artificial Sequence
  Description of Artificial Sequence: Synthetic oligonucleotide
gacccacuucccccaguuc

SEQ ID NO: 55013 - RNA, 19 nt, Artificial Sequence
  Description of Artificial Sequence: Synthetic oligonucleotide
gccugcaguggaccacagu

SEQ ID NO: 55014 - RNA, 19 nt, Artificial Sequence
  Description of Artificial Sequence: Synthetic oligonucleotide
gugagcuguucuuccaccu

SEQ ID NO: 55015 - RNA, 19 nt, Artificial Sequence
  Description of Artificial Sequence: Synthetic oligonucleotide
guguggucauguacgagau

SEQ ID NO: 55016 - RNA, 19 nt, Artificial Sequence
  Description of Artificial Sequence: Synthetic oligonucleotide
gcuuaagaaggaccccaag

SEQ ID NO: 55017 - RNA, 19 nt, Artificial Sequence
  Description of Artificial Sequence: Synthetic oligonucleotide
gcugcuuaagaaggacccc

SEQ ID NO: 55018 - RNA, 19 nt, Artificial Sequence
  Description of Artificial Sequence: Synthetic oligonucleotide
gcuggguguggucauguac

SEQ ID NO: 55019 - RNA, 19 nt, Artificial Sequence
  Description of Artificial Sequence: Synthetic oligonucleotide
ggacuggugggggcugggu

SEQ ID NO: 55020 - RNA, 19 nt, Artificial Sequence
  Description of Artificial Sequence: Synthetic oligonucleotide
ggagaaggccacuggccgc

SEQ ID NO: 55021 - RNA, 19 nt, Artificial Sequence
  Description of Artificial Sequence: Synthetic oligonucleotide
ggaggacaaugacuauggc

SEQ ID NO: 55022 - RNA, 19 nt, Artificial Sequence
  Description of Artificial Sequence: Synthetic oligonucleotide
ggccacuggccgcuacuac

SEQ ID NO: 55023 - RNA, 19 nt, Artificial Sequence
  Description of Artificial Sequence: Synthetic oligonucleotide
ggacccacuucccccaguu

SEQ ID NO: 55024 - RNA, 19 nt, Artificial Sequence
  Description of Artificial Sequence: Synthetic oligonucleotide
ggugagcuguucuuccacc

SEQ ID NO: 55025 - RNA, 19 nt, Artificial Sequence
  Description of Artificial Sequence: Synthetic oligonucleotide
gguguggucauguacgaga

SEQ ID NO: 55026 - RNA, 19 nt, Artificial Sequence
  Description of Artificial Sequence: Synthetic oligonucleotide
ggcugcuuaagaaggaccc

SEQ ID NO: 55027 - RNA, 19 nt, Artificial Sequence
  Description of Artificial Sequence: Synthetic oligonucleotide
ggcuggguguggucaugua

SEQ ID NO: 55028 - RNA, 19 nt, Artificial Sequence
  Description of Artificial Sequence: Synthetic oligonucleotide
gggugagcuguucuuccac

SEQ ID NO: 55029 - RNA, 19 nt, Artificial Sequence
  Description of Artificial Sequence: Synthetic oligonucleotide
ggguguggucauguacgag

SEQ ID NO: 55030 - RNA, 19 nt, Artificial Sequence
  Description of Artificial Sequence: Synthetic oligonucleotide
gggcugcuuaagaaggacc

SEQ ID NO: 55031 - RNA, 19 nt, Artificial Sequence
  Description of Artificial Sequence: Synthetic oligonucleotide
gggcuggguguggucaugu

SEQ ID NO: 55032 - RNA, 19 nt, Artificial Sequence
  Description of Artificial Sequence: Synthetic oligonucleotide
ggggugagcuguucuucca

SEQ ID NO: 55033 - RNA, 19 nt, Artificial Sequence
  Description of Artificial Sequence: Synthetic oligonucleotide
ggggcuggguguggucaug

SEQ ID NO: 55034 - RNA, 19 nt, Artificial Sequence
  Description of Artificial Sequence: Synthetic oligonucleotide
gggggugagcuguucuucc

SEQ ID NO: 55035 - RNA, 19 nt, Artificial Sequence
  Description of Artificial Sequence: Synthetic oligonucleotide
gggggcuggguguggucau

SEQ ID NO: 55036 - RNA, 19 nt, Artificial Sequence
  Description of Artificial Sequence: Synthetic oligonucleotide
ggugggggcuggguguggu

SEQ ID NO: 55037 - RNA, 19 nt, Artificial Sequence
  Description of Artificial Sequence: Synthetic oligonucleotide
gucccgggagcgugucuuc

SEQ ID NO: 55038 - RNA, 19 nt, Artificial Sequence
  Description of Artificial Sequence: Synthetic oligonucleotide
uacaucaagaccuggaggc

SEQ ID NO: 55039 - RNA, 19 nt, Artificial Sequence
  Description of Artificial Sequence: Synthetic oligonucleotide
uuaagaaggaccccaagca

SEQ ID NO: 55040 - RNA, 19 nt, Artificial Sequence
  Description of Artificial Sequence: Synthetic oligonucleotide
ucaagaccuggaggccacg

SEQ ID NO: 55041 - RNA, 19 nt, Artificial Sequence
  Description of Artificial Sequence: Synthetic oligonucleotide
ucauacgcugccugcagug

SEQ ID NO: 55042 - RNA, 19 nt, Artificial Sequence
  Description of Artificial Sequence: Synthetic oligonucleotide
uacgcugccugcaguggac

SEQ ID NO: 55043 - RNA, 19 nt, Artificial Sequence
  Description of Artificial Sequence: Synthetic oligonucleotide
ugcaguggaccacagucau

SEQ ID NO: 55044 - RNA, 19 nt, Artificial Sequence
  Description of Artificial Sequence: Synthetic oligonucleotide
ugccagcugaugaagaccg

SEQ ID NO: 55045 - RNA, 19 nt, Artificial Sequence
  Description of Artificial Sequence: Synthetic oligonucleotide
ugccugcaguggaccacag

SEQ ID NO: 55046 - RNA, 19 nt, Artificial Sequence
  Description of Artificial Sequence: Synthetic oligonucleotide
ugcuuaagaaggaccccaa

SEQ ID NO: 55047 - RNA, 19 nt, Artificial Sequence
  Description of Artificial Sequence: Synthetic oligonucleotide
uggaggacaaugacuaugg

SEQ ID NO: 55048 - RNA, 19 nt, Artificial Sequence
  Description of Artificial Sequence: Synthetic oligonucleotide
uggaguaugccaacggggg

SEQ ID NO: 55049 - RNA, 19 nt, Artificial Sequence
  Description of Artificial Sequence: Synthetic oligonucleotide
uggguguggucauguacga

SEQ ID NO: 55050 - RNA, 19 nt, Artificial Sequence
  Description of Artificial Sequence: Synthetic oligonucleotide
ugggggcugggugugguca

SEQ ID NO: 55051 - RNA, 19 nt, Artificial Sequence
  Description of Artificial Sequence: Synthetic oligonucleotide
uggugggggcugggugugg

SEQ ID NO: 55052 - RNA, 19 nt, Artificial Sequence
  Description of Artificial Sequence: Synthetic oligonucleotide
ugucccgggagcgugucuu

SEQ ID NO: 55053 - RNA, 19 nt, Artificial Sequence
  Description of Artificial Sequence: Synthetic oligonucleotide
acaaagauggccacaucaa

SEQ ID NO: 55054 - RNA, 19 nt, Artificial Sequence
  Description of Artificial Sequence: Synthetic oligonucleotide
auggugcagagauugucuc

SEQ ID NO: 55055 - RNA, 19 nt, Artificial Sequence
  Description of Artificial Sequence: Synthetic oligonucleotide
caugcuggacaaagauggc

SEQ ID NO: 55056 - RNA, 19 nt, Artificial Sequence
  Description of Artificial Sequence: Synthetic oligonucleotide
cucaugcuggacaaagaug

SEQ ID NO: 55057 - RNA, 19 nt, Artificial Sequence
  Description of Artificial Sequence: Synthetic oligonucleotide
gacaaagauggccacauca

SEQ ID NO: 55058 - RNA, 19 nt, Artificial Sequence
  Description of Artificial Sequence: Synthetic oligonucleotide
ggacaaagauggccacauc

SEQ ID NO: 55059 - RNA, 19 nt, Artificial Sequence
  Description of Artificial Sequence: Synthetic oligonucleotide
uauggugcagagauugucu

SEQ ID NO: 55060 - RNA, 19 nt, Artificial Sequence
  Description of Artificial Sequence: Synthetic oligonucleotide
ucaugcuggacaaagaugg

SEQ ID NO: 55061 - RNA, 19 nt, Artificial Sequence
  Description of Artificial Sequence: Synthetic oligonucleotide
ccuuucuacaaccaggacc

SEQ ID NO: 55062 - RNA, 19 nt, Artificial Sequence
  Description of Artificial Sequence: Synthetic oligonucleotide
cuuucuacaaccaggacca

SEQ ID NO: 55063 - RNA, 19 nt, Artificial Sequence
  Description of Artificial Sequence: Synthetic oligonucleotide
uuucuacaaccaggaccau

SEQ ID NO: 55064 - RNA, 19 nt, Artificial Sequence
  Description of Artificial Sequence: Synthetic oligonucleotide
ggggcgagcuguuuuucca

SEQ ID NO: 55065 - RNA, 19 nt, Artificial Sequence
  Description of Artificial Sequence: Synthetic oligonucleotide
gggggcgagcuguuuuucc

SEQ ID NO: 55066 - RNA, 19 nt, Artificial Sequence
  Description of Artificial Sequence: Synthetic oligonucleotide
acaaagauggccacauaaa

SEQ ID NO: 55067 - RNA, 19 nt, Artificial Sequence
  Description of Artificial Sequence: Synthetic oligonucleotide
aaugcuggacaaagauggc

SEQ ID NO: 55068 - RNA, 19 nt, Artificial Sequence
  Description of Artificial Sequence: Synthetic oligonucleotide
cuaaugcuggacaaagaug

SEQ ID NO: 55069 - RNA, 19 nt, Artificial Sequence
  Description of Artificial Sequence: Synthetic oligonucleotide
ggacaaagauggccacaua

SEQ ID NO: 55070 - RNA, 19 nt, Artificial Sequence
  Description of Artificial Sequence: Synthetic oligonucleotide
uaaugcuggacaaagaugg

SEQ ID NO: 55071 - RNA, 19 nt, Artificial Sequence
  Description of Artificial Sequence: Synthetic oligonucleotide
acgccaacgggggcgagcu

SEQ ID NO: 55072 - RNA, 19 nt, Artificial Sequence
  Description of Artificial Sequence: Synthetic oligonucleotide
aguacgccaacgggggcga

SEQ ID NO: 55073 - RNA, 19 nt, Artificial Sequence
  Description of Artificial Sequence: Synthetic oligonucleotide
gaguacgccaacgggggcg

SEQ ID NO: 55074 - RNA, 19 nt, Artificial Sequence
  Description of Artificial Sequence: Synthetic oligonucleotide
ggaguacgccaacgggggc

SEQ ID NO: 55075 - RNA, 19 nt, Artificial Sequence
  Description of Artificial Sequence: Synthetic oligonucleotide
guacgccaacgggggcgag

SEQ ID NO: 55076 - RNA, 19 nt, Artificial Sequence
  Description of Artificial Sequence: Synthetic oligonucleotide
uacgccaacgggggcgagc

SEQ ID NO: 55077 - RNA, 19 nt, Artificial Sequence
  Description of Artificial Sequence: Synthetic oligonucleotide
ccaccaugaaaaccuucug

SEQ ID NO: 55078 - RNA, 19 nt, Artificial Sequence
  Description of Artificial Sequence: Synthetic oligonucleotide
cgcuucccgcgcacgcuca

SEQ ID NO: 55079 - RNA, 19 nt, Artificial Sequence
  Description of Artificial Sequence: Synthetic oligonucleotide
cucuucgagcucauccuca

SEQ ID NO: 55080 - RNA, 19 nt, Artificial Sequence
  Description of Artificial Sequence: Synthetic oligonucleotide
gccaccaugaaaaccuucu

SEQ ID NO: 55081 - RNA, 19 nt, Artificial Sequence
  Description of Artificial Sequence: Synthetic oligonucleotide
gcuucccgcgcacgcucag

SEQ ID NO: 55082 - RNA, 19 nt, Artificial Sequence
  Description of Artificial Sequence: Synthetic oligonucleotide
gccccgaggccaagucccu

SEQ ID NO: 55083 - RNA, 19 nt, Artificial Sequence
  Description of Artificial Sequence: Synthetic oligonucleotide
ccccgaggccaagucccug

SEQ ID NO: 55084 - RNA, 19 nt, Artificial Sequence
  Description of Artificial Sequence: Synthetic oligonucleotide
cgagcucauccucauggaa

SEQ ID NO: 55085 - RNA, 19 nt, Artificial Sequence
  Description of Artificial Sequence: Synthetic oligonucleotide
cuucgagcucauccucaug

SEQ ID NO: 55086 - RNA, 19 nt, Artificial Sequence
  Description of Artificial Sequence: Synthetic oligonucleotide
ucuucgagcucauccucau

SEQ ID NO: 55087 - RNA, 19 nt, Artificial Sequence
  Description of Artificial Sequence: Synthetic oligonucleotide
ccaugagaaacuuuuugaa

SEQ ID NO: 55088 - RNA, 19 nt, Artificial Sequence
  Description of Artificial Sequence: Synthetic oligonucleotide
cuauggugcagaaauuguc

SEQ ID NO: 55089 - RNA, 19 nt, Artificial Sequence
  Description of Artificial Sequence: Synthetic oligonucleotide
ucuauggugcagaaauugu

SEQ ID NO: 55090 - RNA, 19 nt, Artificial Sequence
  Description of Artificial Sequence: Synthetic oligonucleotide
acaaugacuacggccgugc

SEQ ID NO: 55091 - RNA, 19 nt, Artificial Sequence
  Description of Artificial Sequence: Synthetic oligonucleotide
accuggcccccgaggugcu

SEQ ID NO: 55092 - RNA, 19 nt, Artificial Sequence
  Description of Artificial Sequence: Synthetic oligonucleotide
aggagaaggccacaggccg

SEQ ID NO: 55093 - RNA, 19 nt, Artificial Sequence
  Description of Artificial Sequence: Synthetic oligonucleotide
aucauccgcugccugcagu

SEQ ID NO: 55094 - RNA, 19 nt, Artificial Sequence
  Description of Artificial Sequence: Synthetic oligonucleotide
auccuggugaaggagaagg

SEQ ID NO: 55095 - RNA, 19 nt, Artificial Sequence
  Description of Artificial Sequence: Synthetic oligonucleotide
caaaaaaaaaaaaaaaaaa

SEQ ID NO: 55096 - RNA, 19 nt, Artificial Sequence
  Description of Artificial Sequence: Synthetic oligonucleotide
cacacacucaccgagaacc

SEQ ID NO: 55097 - RNA, 19 nt, Artificial Sequence
  Description of Artificial Sequence: Synthetic oligonucleotide
cacccuucaagccccaggu

SEQ ID NO: 55098 - RNA, 19 nt, Artificial Sequence
  Description of Artificial Sequence: Synthetic oligonucleotide
cagggcugcucaagaagga

SEQ ID NO: 55099 - RNA, 19 nt, Artificial Sequence
  Description of Artificial Sequence: Synthetic oligonucleotide
cauggaguacgccaacggg

SEQ ID NO: 55100 - RNA, 19 nt, Artificial Sequence
  Description of Artificial Sequence: Synthetic oligonucleotide
ccaaggagaucaugcagca

SEQ ID NO: 55101 - RNA, 19 nt, Artificial Sequence
  Description of Artificial Sequence: Synthetic oligonucleotide
ccacccuucaagccccagg

SEQ ID NO: 55102 - RNA, 19 nt, Artificial Sequence
  Description of Artificial Sequence: Synthetic oligonucleotide
cccccgaggugcuggagga

SEQ ID NO: 55103 - RNA, 19 nt, Artificial Sequence
  Description of Artificial Sequence: Synthetic oligonucleotide
ccccgaggugcuggaggac

SEQ ID NO: 55104 - RNA, 19 nt, Artificial Sequence
  Description of Artificial Sequence: Synthetic oligonucleotide
cccuucaagccccagguca

SEQ ID NO: 55105 - RNA, 19 nt, Artificial Sequence
  Description of Artificial Sequence: Synthetic oligonucleotide
ccuucaagccccaggucac

SEQ ID NO: 55106 - RNA, 19 nt, Artificial Sequence
  Description of Artificial Sequence: Synthetic oligonucleotide
cucaugcuggacaaggacg

SEQ ID NO: 55107 - RNA, 19 nt, Artificial Sequence
  Description of Artificial Sequence: Synthetic oligonucleotide
cuggcccccgaggugcugg

SEQ ID NO: 55108 - RNA, 19 nt, Artificial Sequence
  Description of Artificial Sequence: Synthetic oligonucleotide
cuggugaaggagaaggcca

SEQ ID NO: 55109 - RNA, 19 nt, Artificial Sequence
  Description of Artificial Sequence: Synthetic oligonucleotide
cuucaagccccaggucacg

SEQ ID NO: 55110 - RNA, 19 nt, Artificial Sequence
  Description of Artificial Sequence: Synthetic oligonucleotide
cuuugucauggaguacgcc

SEQ ID NO: 55111 - RNA, 19 nt, Artificial Sequence
  Description of Artificial Sequence: Synthetic oligonucleotide
gacaaugacuacggccgug

SEQ ID NO: 55112 - RNA, 19 nt, Artificial Sequence
  Description of Artificial Sequence: Synthetic oligonucleotide
gaguaccuggcccccgagg

SEQ ID NO: 55113 - RNA, 19 nt, Artificial Sequence
  Description of Artificial Sequence: Synthetic oligonucleotide
gcagaggcuuggcgggggc

SEQ ID NO: 55114 - RNA, 19 nt, Artificial Sequence
  Description of Artificial Sequence: Synthetic oligonucleotide
gccaaggagaucaugcagc

SEQ ID NO: 55115 - RNA, 19 nt, Artificial Sequence
  Description of Artificial Sequence: Synthetic oligonucleotide
gcccacacacucaccgaga

SEQ ID NO: 55116 - RNA, 19 nt, Artificial Sequence
  Description of Artificial Sequence: Synthetic oligonucleotide
gcccccgaggugcuggagg

SEQ ID NO: 55117 - RNA, 19 nt, Artificial Sequence
  Description of Artificial Sequence: Synthetic oligonucleotide
ggacaaugacuacggccgu

SEQ ID NO: 55118 - RNA, 19 nt, Artificial Sequence
  Description of Artificial Sequence: Synthetic oligonucleotide
ggcccccgaggugcuggag

SEQ ID NO: 55119 - RNA, 19 nt, Artificial Sequence
  Description of Artificial Sequence: Synthetic oligonucleotide
guaccuggcccccgaggug

SEQ ID NO: 55120 - RNA, 19 nt, Artificial Sequence
  Description of Artificial Sequence: Synthetic oligonucleotide
gucauggaguacgccaacg

SEQ ID NO: 55121 - RNA, 19 nt, Artificial Sequence
  Description of Artificial Sequence: Synthetic oligonucleotide
uaccuggcccccgaggugc

SEQ ID NO: 55122 - RNA, 19 nt, Artificial Sequence
  Description of Artificial Sequence: Synthetic oligonucleotide
ucaagccccaggucacguc

SEQ ID NO: 55123 - RNA, 19 nt, Artificial Sequence
  Description of Artificial Sequence: Synthetic oligonucleotide
ucaccgagaaccgcguccu

SEQ ID NO: 55124 - RNA, 19 nt, Artificial Sequence
  Description of Artificial Sequence: Synthetic oligonucleotide
ucaugcuggacaaggacgg

SEQ ID NO: 55125 - RNA, 19 nt, Artificial Sequence
  Description of Artificial Sequence: Synthetic oligonucleotide
ucauggaguacgccaacgg

SEQ ID NO: 55126 - RNA, 19 nt, Artificial Sequence
  Description of Artificial Sequence: Synthetic oligonucleotide
uccuggugaaggagaaggc

SEQ ID NO: 55127 - RNA, 19 nt, Artificial Sequence
  Description of Artificial Sequence: Synthetic oligonucleotide
ugcuuugucauggaguacg

SEQ ID NO: 55128 - RNA, 19 nt, Artificial Sequence
  Description of Artificial Sequence: Synthetic oligonucleotide
uggcccccgaggugcugga

SEQ ID NO: 55129 - RNA, 19 nt, Artificial Sequence
  Description of Artificial Sequence: Synthetic oligonucleotide
uggggguggccaucccugg

SEQ ID NO: 55130 - RNA, 19 nt, Artificial Sequence
  Description of Artificial Sequence: Synthetic oligonucleotide
uggugaaggagaaggccac

SEQ ID NO: 55131 - RNA, 19 nt, Artificial Sequence
  Description of Artificial Sequence: Synthetic oligonucleotide
uucaagccccaggucacgu

SEQ ID NO: 55132 - RNA, 19 nt, Artificial Sequence
  Description of Artificial Sequence: Synthetic oligonucleotide
uugucauggaguacgccaa

SEQ ID NO: 55133 - RNA, 19 nt, Artificial Sequence
  Description of Artificial Sequence: Synthetic oligonucleotide
uuugucauggaguacgcca

SEQ ID NO: 55134 - RNA, 19 nt, Artificial Sequence
  Description of Artificial Sequence: Synthetic oligonucleotide
aaugacuacggccgugcag

SEQ ID NO: 55135 - RNA, 19 nt, Artificial Sequence
  Description of Artificial Sequence: Synthetic oligonucleotide
augacuacggccgugcagu

SEQ ID NO: 55136 - RNA, 19 nt, Artificial Sequence
  Description of Artificial Sequence: Synthetic oligonucleotide
ccccucaacaacuucucug

SEQ ID NO: 55137 - RNA, 19 nt, Artificial Sequence
  Description of Artificial Sequence: Synthetic oligonucleotide
cccucaacaacuucucugu

SEQ ID NO: 55138 - RNA, 19 nt, Artificial Sequence
  Description of Artificial Sequence: Synthetic oligonucleotide
cguguguucuccgaggacc

SEQ ID NO: 55139 - RNA, 19 nt, Artificial Sequence
  Description of Artificial Sequence: Synthetic oligonucleotide
cucaacaacuucucugugg

SEQ ID NO: 55140 - RNA, 19 nt, Artificial Sequence
  Description of Artificial Sequence: Synthetic oligonucleotide
gagcguguguucuccgagg

SEQ ID NO: 55141 - RNA, 19 nt, Artificial Sequence
  Description of Artificial Sequence: Synthetic oligonucleotide
gcguguguucuccgaggac

SEQ ID NO: 55142 - RNA, 19 nt, Artificial Sequence
  Description of Artificial Sequence: Synthetic oligonucleotide
guguguucuccgaggaccg

SEQ ID NO: 55143 - RNA, 19 nt, Artificial Sequence
  Description of Artificial Sequence: Synthetic oligonucleotide
ucaacaacuucucuguggc

SEQ ID NO: 55144 - RNA, 19 nt, Artificial Sequence
  Description of Artificial Sequence: Synthetic oligonucleotide
uccccucaacaacuucucu

SEQ ID NO: 55145 - RNA, 19 nt, Artificial Sequence
  Description of Artificial Sequence: Synthetic oligonucleotide
aaggaagucaucauugcca

SEQ ID NO: 55146 - RNA, 19 nt, Artificial Sequence
  Description of Artificial Sequence: Synthetic oligonucleotide
aagucaucauugccaagga

SEQ ID NO: 55147 - RNA, 19 nt, Artificial Sequence
  Description of Artificial Sequence: Synthetic oligonucleotide
acaucaagaucacugacuu

SEQ ID NO: 55148 - RNA, 19 nt, Artificial Sequence
  Description of Artificial Sequence: Synthetic oligonucleotide
acccuucaaaccucagguc

SEQ ID NO: 55149 - RNA, 19 nt, Artificial Sequence
  Description of Artificial Sequence: Synthetic oligonucleotide
acaucaagcuggaaaaccu

SEQ ID NO: 55150 - RNA, 19 nt, Artificial Sequence
  Description of Artificial Sequence: Synthetic oligonucleotide
ccgccgccgcugccgcugc

SEQ ID NO: 55151 - RNA, 19 nt, Artificial Sequence
  Description of Artificial Sequence: Synthetic oligonucleotide
acggggccaccaugaaaac

SEQ ID NO: 55152 - RNA, 19 nt, Artificial Sequence
  Description of Artificial Sequence: Synthetic oligonucleotide
aggaagucaucauugccaa

SEQ ID NO: 55153 - RNA, 19 nt, Artificial Sequence
  Description of Artificial Sequence: Synthetic oligonucleotide
aggccaagucccugcuugc

SEQ ID NO: 55154 - RNA, 19 nt, Artificial Sequence
  Description of Artificial Sequence: Synthetic oligonucleotide
aauacaucaagaccuggag

SEQ ID NO: 55155 - RNA, 19 nt, Artificial Sequence
  Description of Artificial Sequence: Synthetic oligonucleotide
cacaucaagaucacugacu

SEQ ID NO: 55156 - RNA, 19 nt, Artificial Sequence
  Description of Artificial Sequence: Synthetic oligonucleotide
cacccuucaaaccucaggu

SEQ ID NO: 55157 - RNA, 19 nt, Artificial Sequence
  Description of Artificial Sequence: Synthetic oligonucleotide
gaaugccagcugaugaaga

SEQ ID NO: 55158 - RNA, 19 nt, Artificial Sequence
  Description of Artificial Sequence: Synthetic oligonucleotide
ccacccuucaaaccucagg

SEQ ID NO: 55159 - RNA, 19 nt, Artificial Sequence
  Description of Artificial Sequence: Synthetic oligonucleotide
cccuucaaaccucagguca

SEQ ID NO: 55160 - RNA, 19 nt, Artificial Sequence
  Description of Artificial Sequence: Synthetic oligonucleotide
caucaagcuggaaaaccuc

SEQ ID NO: 55161 - RNA, 19 nt, Artificial Sequence
  Description of Artificial Sequence: Synthetic oligonucleotide
ccucaugcuggacaaagau

SEQ ID NO: 55162 - RNA, 19 nt, Artificial Sequence
  Description of Artificial Sequence: Synthetic oligonucleotide
ccuucaaaccucaggucac

SEQ ID NO: 55163 - RNA, 19 nt, Artificial Sequence
  Description of Artificial Sequence: Synthetic oligonucleotide
cgccgccgcugccgcugcc

SEQ ID NO: 55164 - RNA, 19 nt, Artificial Sequence
  Description of Artificial Sequence: Synthetic oligonucleotide
aucaagcuggaaaaccuca

SEQ ID NO: 55165 - RNA, 19 nt, Artificial Sequence
  Description of Artificial Sequence: Synthetic oligonucleotide
cuccuacucggccagcauc

SEQ ID NO: 55166 - RNA, 19 nt, Artificial Sequence
  Description of Artificial Sequence: Synthetic oligonucleotide
cuucaaaccucaggucacg

SEQ ID NO: 55167 - RNA, 19 nt, Artificial Sequence
  Description of Artificial Sequence: Synthetic oligonucleotide
gaaggaagucaucauugcc

SEQ ID NO: 55168 - RNA, 19 nt, Artificial Sequence
  Description of Artificial Sequence: Synthetic oligonucleotide
gaagucaucauugccaagg

SEQ ID NO: 55169 - RNA, 19 nt, Artificial Sequence
  Description of Artificial Sequence: Synthetic oligonucleotide
gacaucaagcuggaaaacc

SEQ ID NO: 55170 - RNA, 19 nt, Artificial Sequence
  Description of Artificial Sequence: Synthetic oligonucleotide
gccgccgccgcugccgcug

SEQ ID NO: 55171 - RNA, 19 nt, Artificial Sequence
  Description of Artificial Sequence: Synthetic oligonucleotide
gacggggccaccaugaaaa

SEQ ID NO: 55172 - RNA, 19 nt, Artificial Sequence
  Description of Artificial Sequence: Synthetic oligonucleotide
gaggccaagucccugcuug

SEQ ID NO: 55173 - RNA, 19 nt, Artificial Sequence
  Description of Artificial Sequence: Synthetic oligonucleotide
gaauacaucaagaccugga

SEQ ID NO: 55174 - RNA, 19 nt, Artificial Sequence
  Description of Artificial Sequence: Synthetic oligonucleotide
ggaagucaucauugccaag

SEQ ID NO: 55175 - RNA, 19 nt, Artificial Sequence
  Description of Artificial Sequence: Synthetic oligonucleotide
ugaauacaucaagaccugg

SEQ ID NO: 55176 - RNA, 19 nt, Artificial Sequence
  Description of Artificial Sequence: Synthetic oligonucleotide
ggccgcgacccaacaccuu

SEQ ID NO: 55177 - RNA, 19 nt, Artificial Sequence
  Description of Artificial Sequence: Synthetic oligonucleotide
gugaauacaucaagaccug

SEQ ID NO: 55178 - RNA, 19 nt, Artificial Sequence
  Description of Artificial Sequence: Synthetic oligonucleotide
ggugaauacaucaagaccu

SEQ ID NO: 55179 - RNA, 19 nt, Artificial Sequence
  Description of Artificial Sequence: Synthetic oligonucleotide
ggggccaccaugaaaaccu

SEQ ID NO: 55180 - RNA, 19 nt, Artificial Sequence
  Description of Artificial Sequence: Synthetic oligonucleotide
auacaucaagaccuggagg

SEQ ID NO: 55181 - RNA, 19 nt, Artificial Sequence
  Description of Artificial Sequence: Synthetic oligonucleotide
gggccaccaugaaaaccuu

SEQ ID NO: 55182 - RNA, 19 nt, Artificial Sequence
  Description of Artificial Sequence: Synthetic oligonucleotide
augccagcugaugaagacc

SEQ ID NO: 55183 - RNA, 19 nt, Artificial Sequence
  Description of Artificial Sequence: Synthetic oligonucleotide
uacaaccaggaccacgagc

SEQ ID NO: 55184 - RNA, 19 nt, Artificial Sequence
  Description of Artificial Sequence: Synthetic oligonucleotide
ucaaaccucaggucacguc

SEQ ID NO: 55185 - RNA, 19 nt, Artificial Sequence
  Description of Artificial Sequence: Synthetic oligonucleotide
ucuccuacucggccagcau

SEQ ID NO: 55186 - RNA, 19 nt, Artificial Sequence
  Description of Artificial Sequence: Synthetic oligonucleotide
gccuuccagacccacgacc

SEQ ID NO: 55187 - RNA, 19 nt, Artificial Sequence
  Description of Artificial Sequence: Synthetic oligonucleotide
uucaaaccucaggucacgu

SEQ ID NO: 55188 - RNA, 19 nt, Artificial Sequence
  Description of Artificial Sequence: Synthetic oligonucleotide
acaaugacuauggccgggc

SEQ ID NO: 55189 - RNA, 19 nt, Artificial Sequence
  Description of Artificial Sequence: Synthetic oligonucleotide
accaugaaaaccuucugug

SEQ ID NO: 55190 - RNA, 19 nt, Artificial Sequence
  Description of Artificial Sequence: Synthetic oligonucleotide
agucaucauugccaaggau

SEQ ID NO: 55191 - RNA, 19 nt, Artificial Sequence
  Description of Artificial Sequence: Synthetic oligonucleotide
aucauugccaaggaugaag

SEQ ID NO: 55192 - RNA, 19 nt, Artificial Sequence
  Description of Artificial Sequence: Synthetic oligonucleotide
caccaugaaaaccuucugu

SEQ ID NO: 55193 - RNA, 19 nt, Artificial Sequence
  Description of Artificial Sequence: Synthetic oligonucleotide
caucauugccaaggaugaa

SEQ ID NO: 55194 - RNA, 19 nt, Artificial Sequence
  Description of Artificial Sequence: Synthetic oligonucleotide
ccaugaaaaccuucugugg

SEQ ID NO: 55195 - RNA, 19 nt, Artificial Sequence
  Description of Artificial Sequence: Synthetic oligonucleotide
gacaaugacuauggccggg

SEQ ID NO: 55196 - RNA, 19 nt, Artificial Sequence
  Description of Artificial Sequence: Synthetic oligonucleotide
gucaucauugccaaggaug

SEQ ID NO: 55197 - RNA, 19 nt, Artificial Sequence
  Description of Artificial Sequence: Synthetic oligonucleotide
ucaucauugccaaggauga

SEQ ID NO: 55198 - RNA, 19 nt, Artificial Sequence
  Description of Artificial Sequence: Synthetic oligonucleotide
ucauugccaaggaugaagu

SEQ ID NO: 55199 - RNA, 19 nt, Artificial Sequence
  Description of Artificial Sequence: Synthetic oligonucleotide
ugcuuugugauggaguaug

SEQ ID NO: 55200 - RNA, 19 nt, Artificial Sequence
  Description of Artificial Sequence: Synthetic oligonucleotide
ugugcuuugugauggagua

SEQ ID NO: 55201 - RNA, 19 nt, Artificial Sequence
  Description of Artificial Sequence: Synthetic oligonucleotide
aaaucauugcuuucagggc

SEQ ID NO: 55202 - RNA, 19 nt, Artificial Sequence
  Description of Artificial Sequence: Synthetic oligonucleotide
aaucauugcuuucagggcu

SEQ ID NO: 55203 - RNA, 19 nt, Artificial Sequence
  Description of Artificial Sequence: Synthetic oligonucleotide
caguagacugguggggccu

SEQ ID NO: 55204 - RNA, 19 nt, Artificial Sequence
  Description of Artificial Sequence: Synthetic oligonucleotide
ccaccaugaagacauucug

SEQ ID NO: 55205 - RNA, 19 nt, Artificial Sequence
  Description of Artificial Sequence: Synthetic oligonucleotide
ccgagcaguagacuggugg

SEQ ID NO: 55206 - RNA, 19 nt, Artificial Sequence
  Description of Artificial Sequence: Synthetic oligonucleotide
cgagcaguagacugguggg

SEQ ID NO: 55207 - RNA, 19 nt, Artificial Sequence
  Description of Artificial Sequence: Synthetic oligonucleotide
gcaguagacugguggggcc

SEQ ID NO: 55208 - RNA, 19 nt, Artificial Sequence
  Description of Artificial Sequence: Synthetic oligonucleotide
gccaccaugaagacauucu

SEQ ID NO: 55209 - RNA, 19 nt, Artificial Sequence
  Description of Artificial Sequence: Synthetic oligonucleotide
accuuucuacaaccaggac

SEQ ID NO: 55210 - RNA, 19 nt, Artificial Sequence
  Description of Artificial Sequence: Synthetic oligonucleotide
gccgagcaguagacuggug

SEQ ID NO: 55211 - RNA, 19 nt, Artificial Sequence
  Description of Artificial Sequence: Synthetic oligonucleotide
ggccgagcaguagacuggu

SEQ ID NO: 55212 - RNA, 19 nt, Artificial Sequence
  Description of Artificial Sequence: Synthetic oligonucleotide
gucauguaugaaaugaugu

SEQ ID NO: 55213 - RNA, 19 nt, Artificial Sequence
  Description of Artificial Sequence: Synthetic oligonucleotide
gagcaguagacuggugggg

SEQ ID NO: 55214 - RNA, 19 nt, Artificial Sequence
  Description of Artificial Sequence: Synthetic oligonucleotide
ucauguaugaaaugaugug

SEQ ID NO: 55215 - RNA, 19 nt, Artificial Sequence
  Description of Artificial Sequence: Synthetic oligonucleotide
uaccuuucuacaaccagga

SEQ ID NO: 55216 - RNA, 19 nt, Artificial Sequence
  Description of Artificial Sequence: Synthetic oligonucleotide
aaagauggccacauaaaaa

SEQ ID NO: 55217 - RNA, 19 nt, Artificial Sequence
  Description of Artificial Sequence: Synthetic oligonucleotide
aagauggccacauaaaaau

SEQ ID NO: 55218 - RNA, 19 nt, Artificial Sequence
  Description of Artificial Sequence: Synthetic oligonucleotide
aaugacuauggccgagcag

SEQ ID NO: 55219 - RNA, 19 nt, Artificial Sequence
  Description of Artificial Sequence: Synthetic oligonucleotide
auaaugacuauggccgagc

SEQ ID NO: 55220 - RNA, 19 nt, Artificial Sequence
  Description of Artificial Sequence: Synthetic oligonucleotide
aagauaaugacuauggccg

SEQ ID NO: 55221 - RNA, 19 nt, Artificial Sequence
  Description of Artificial Sequence: Synthetic oligonucleotide
augacuauggccgagcagu

SEQ ID NO: 55222 - RNA, 19 nt, Artificial Sequence
  Description of Artificial Sequence: Synthetic oligonucleotide
caaagauggccacauaaaa

SEQ ID NO: 55223 - RNA, 19 nt, Artificial Sequence
  Description of Artificial Sequence: Synthetic oligonucleotide
cuggaggccaagauacuuc

SEQ ID NO: 55224 - RNA, 19 nt, Artificial Sequence
  Description of Artificial Sequence: Synthetic oligonucleotide
gauaaugacuauggccgag

SEQ ID NO: 55225 - RNA, 19 nt, Artificial Sequence
  Description of Artificial Sequence: Synthetic oligonucleotide
gaagauaaugacuauggcc

SEQ ID NO: 55226 - RNA, 19 nt, Artificial Sequence
  Description of Artificial Sequence: Synthetic oligonucleotide
ggaggccaagauacuuccu

SEQ ID NO: 55227 - RNA, 19 nt, Artificial Sequence
  Description of Artificial Sequence: Synthetic oligonucleotide
ggugcagaaauugucucug

SEQ ID NO: 55228 - RNA, 19 nt, Artificial Sequence
  Description of Artificial Sequence: Synthetic oligonucleotide
gugcagaaauugucucugc

SEQ ID NO: 55229 - RNA, 19 nt, Artificial Sequence
  Description of Artificial Sequence: Synthetic oligonucleotide
guguuuugugauggaauau

SEQ ID NO: 55230 - RNA, 19 nt, Artificial Sequence
  Description of Artificial Sequence: Synthetic oligonucleotide
ugaaauauuccuuccagac

SEQ ID NO: 55231 - RNA, 19 nt, Artificial Sequence
  Description of Artificial Sequence: Synthetic oligonucleotide
uguuuugugauggaauaug

SEQ ID NO: 55232 - RNA, 19 nt, Artificial Sequence
  Description of Artificial Sequence: Synthetic oligonucleotide
uggugcagaaauugucucu

SEQ ID NO: 55233 - RNA, 19 nt, Artificial Sequence
  Description of Artificial Sequence: Synthetic oligonucleotide
uguguuuugugauggaaua

SEQ ID NO: 55234 - RNA, 19 nt, Artificial Sequence
  Description of Artificial Sequence: Synthetic oligonucleotide
aacuccaggcaccccuucc

SEQ ID NO: 55235 - RNA, 19 nt, Artificial Sequence
  Description of Artificial Sequence: Synthetic oligonucleotide
aagaccuggcggccacgcu

SEQ ID NO: 55236 - RNA, 19 nt, Artificial Sequence
  Description of Artificial Sequence: Synthetic oligonucleotide
aaggaagucaucguggcca

SEQ ID NO: 55237 - RNA, 19 nt, Artificial Sequence
  Description of Artificial Sequence: Synthetic oligonucleotide
aagucaucguggccaagga

SEQ ID NO: 55238 - RNA, 19 nt, Artificial Sequence
  Description of Artificial Sequence: Synthetic oligonucleotide
acauuaagaucacagacuu

SEQ ID NO: 55239 - RNA, 19 nt, Artificial Sequence
  Description of Artificial Sequence: Synthetic oligonucleotide
accaucacaccaccugacc

SEQ ID NO: 55240 - RNA, 19 nt, Artificial Sequence
  Description of Artificial Sequence: Synthetic oligonucleotide
accgccucugcuuugucau

SEQ ID NO: 55241 - RNA, 19 nt, Artificial Sequence
  Description of Artificial Sequence: Synthetic oligonucleotide
accucaagcuggagaaccu

SEQ ID NO: 55242 - RNA, 19 nt, Artificial Sequence
  Description of Artificial Sequence: Synthetic oligonucleotide
accuggcggccacgcuacu

SEQ ID NO: 55243 - RNA, 19 nt, Artificial Sequence
  Description of Artificial Sequence: Synthetic oligonucleotide
accuucauuggcuacaagg

SEQ ID NO: 55244 - RNA, 19 nt, Artificial Sequence
  Description of Artificial Sequence: Synthetic oligonucleotide
acgcugccgcugccgcugc

SEQ ID NO: 55245 - RNA, 19 nt, Artificial Sequence
  Description of Artificial Sequence: Synthetic oligonucleotide
acuccaggcaccccuuccu

SEQ ID NO: 55246 - RNA, 19 nt, Artificial Sequence
  Description of Artificial Sequence: Synthetic oligonucleotide
agaacuccaggcaccccuu

SEQ ID NO: 55247 - RNA, 19 nt, Artificial Sequence
  Description of Artificial Sequence: Synthetic oligonucleotide
agcugaugaagacggagcg

SEQ ID NO: 55248 - RNA, 19 nt, Artificial Sequence
  Description of Artificial Sequence: Synthetic oligonucleotide
aggaagucaucguggccaa

SEQ ID NO: 55249 - RNA, 19 nt, Artificial Sequence
  Description of Artificial Sequence: Synthetic oligonucleotide
aggcaccccuuccucacag

SEQ ID NO: 55250 - RNA, 19 nt, Artificial Sequence
  Description of Artificial Sequence: Synthetic oligonucleotide
aggccaaguccuugcuuuc

SEQ ID NO: 55251 - RNA, 19 nt, Artificial Sequence
  Description of Artificial Sequence: Synthetic oligonucleotide
aggccccacuucccccagu

SEQ ID NO: 55252 - RNA, 19 nt, Artificial Sequence
  Description of Artificial Sequence: Synthetic oligonucleotide
aguacaucaagaccuggcg

SEQ ID NO: 55253 - RNA, 19 nt, Artificial Sequence
  Description of Artificial Sequence: Synthetic oligonucleotide
aucaccaucacaccaccug

SEQ ID NO: 55254 - RNA, 19 nt, Artificial Sequence
  Description of Artificial Sequence: Synthetic oligonucleotide
auuggcuacaaggagcggc

SEQ ID NO: 55255 - RNA, 19 nt, Artificial Sequence
  Description of Artificial Sequence: Synthetic oligonucleotide
cacauuaagaucacagacu

SEQ ID NO: 55256 - RNA, 19 nt, Artificial Sequence
  Description of Artificial Sequence: Synthetic oligonucleotide
cagaacuccaggcaccccu

SEQ ID NO: 55257 - RNA, 19 nt, Artificial Sequence
  Description of Artificial Sequence: Synthetic oligonucleotide
cagcugaugaagacggagc

SEQ ID NO: 55258 - RNA, 19 nt, Artificial Sequence
  Description of Artificial Sequence: Synthetic oligonucleotide
cagugccagcugaugaaga

SEQ ID NO: 55259 - RNA, 19 nt, Artificial Sequence
  Description of Artificial Sequence: Synthetic oligonucleotide
cauuggcuacaaggagcgg

SEQ ID NO: 55260 - RNA, 19 nt, Artificial Sequence
  Description of Artificial Sequence: Synthetic oligonucleotide
ccaccaugaagaccuuuug

SEQ ID NO: 55261 - RNA, 19 nt, Artificial Sequence
  Description of Artificial Sequence: Synthetic oligonucleotide
cccgggagcguguguucuc

SEQ ID NO: 55262 - RNA, 19 nt, Artificial Sequence
  Description of Artificial Sequence: Synthetic oligonucleotide
ccgccucugcuuugucaug

SEQ ID NO: 55263 - RNA, 19 nt, Artificial Sequence
  Description of Artificial Sequence: Synthetic oligonucleotide
ccucaagcuggagaaccuc

SEQ ID NO: 55264 - RNA, 19 nt, Artificial Sequence
  Description of Artificial Sequence: Synthetic oligonucleotide
ccucugcuuugucauggag

SEQ ID NO: 55265 - RNA, 19 nt, Artificial Sequence
  Description of Artificial Sequence: Synthetic oligonucleotide
ccuggcggccacgcuacuu

SEQ ID NO: 55266 - RNA, 19 nt, Artificial Sequence
  Description of Artificial Sequence: Synthetic oligonucleotide
cgaccgccucugcuuuguc

SEQ ID NO: 55267 - RNA, 19 nt, Artificial Sequence
  Description of Artificial Sequence: Synthetic oligonucleotide
cgccucugcuuugucaugg

SEQ ID NO: 55268 - RNA, 19 nt, Artificial Sequence
  Description of Artificial Sequence: Synthetic oligonucleotide
cgcugccgcugccgcugca

SEQ ID NO: 55269 - RNA, 19 nt, Artificial Sequence
  Description of Artificial Sequence: Synthetic oligonucleotide
cgcuucccgcgcacgcuug

SEQ ID NO: 55270 - RNA, 19 nt, Artificial Sequence
  Description of Artificial Sequence: Synthetic oligonucleotide
cggugccaccaugaagacc

SEQ ID NO: 55271 - RNA, 19 nt, Artificial Sequence
  Description of Artificial Sequence: Synthetic oligonucleotide
cgugcaguggacugguggg

SEQ ID NO: 55272 - RNA, 19 nt, Artificial Sequence
  Description of Artificial Sequence: Synthetic oligonucleotide
cucaagcuggagaaccuca

SEQ ID NO: 55273 - RNA, 19 nt, Artificial Sequence
  Description of Artificial Sequence: Synthetic oligonucleotide
cuccaggcaccccuuccuc

SEQ ID NO: 55274 - RNA, 19 nt, Artificial Sequence
  Description of Artificial Sequence: Synthetic oligonucleotide
cuccuacucggccagcggc

SEQ ID NO: 55275 - RNA, 19 nt, Artificial Sequence
  Description of Artificial Sequence: Synthetic oligonucleotide
cucugcuuugucauggagu

SEQ ID NO: 55276 - RNA, 19 nt, Artificial Sequence
  Description of Artificial Sequence: Synthetic oligonucleotide
cugaugaagacggagcggc

SEQ ID NO: 55277 - RNA, 19 nt, Artificial Sequence
  Description of Artificial Sequence: Synthetic oligonucleotide
cugcagaacuccaggcacc

SEQ ID NO: 55278 - RNA, 19 nt, Artificial Sequence
  Description of Artificial Sequence: Synthetic oligonucleotide
cuuuuugagcucauccuca

SEQ ID NO: 55279 - RNA, 19 nt, Artificial Sequence
  Description of Artificial Sequence: Synthetic oligonucleotide
gaaccucaugcuggacaag

SEQ ID NO: 55280 - RNA, 19 nt, Artificial Sequence
  Description of Artificial Sequence: Synthetic oligonucleotide
gaacuccaggcaccccuuc

SEQ ID NO: 55281 - RNA, 19 nt, Artificial Sequence
  Description of Artificial Sequence: Synthetic oligonucleotide
gaaggaagucaucguggcc

SEQ ID NO: 55282 - RNA, 19 nt, Artificial Sequence
  Description of Artificial Sequence: Synthetic oligonucleotide
gaagucaucguggccaagg

SEQ ID NO: 55283 - RNA, 19 nt, Artificial Sequence
  Description of Artificial Sequence: Synthetic oligonucleotide
gaccgccucugcuuuguca

SEQ ID NO: 55284 - RNA, 19 nt, Artificial Sequence
  Description of Artificial Sequence: Synthetic oligonucleotide
gaccucaagcuggagaacc

SEQ ID NO: 55285 - RNA, 19 nt, Artificial Sequence
  Description of Artificial Sequence: Synthetic oligonucleotide
gaccuggcggccacgcuac

SEQ ID NO: 55286 - RNA, 19 nt, Artificial Sequence
  Description of Artificial Sequence: Synthetic oligonucleotide
gacgcugccgcugccgcug

SEQ ID NO: 55287 - RNA, 19 nt, Artificial Sequence
  Description of Artificial Sequence: Synthetic oligonucleotide
gacggugccaccaugaaga

SEQ ID NO: 55288 - RNA, 19 nt, Artificial Sequence
  Description of Artificial Sequence: Synthetic oligonucleotide
gaggagcgggaggagugga

SEQ ID NO: 55289 - RNA, 19 nt, Artificial Sequence
  Description of Artificial Sequence: Synthetic oligonucleotide
gaggccaaguccuugcuuu

SEQ ID NO: 55290 - RNA, 19 nt, Artificial Sequence
  Description of Artificial Sequence: Synthetic oligonucleotide
gaguacaucaagaccuggc

SEQ ID NO: 55291 - RNA, 19 nt, Artificial Sequence
  Description of Artificial Sequence: Synthetic oligonucleotide
gcaccuucauuggcuacaa

SEQ ID NO: 55292 - RNA, 19 nt, Artificial Sequence
  Description of Artificial Sequence: Synthetic oligonucleotide
gccaccaugaagaccuuuu

SEQ ID NO: 55293 - RNA, 19 nt, Artificial Sequence
  Description of Artificial Sequence: Synthetic oligonucleotide
gccgugcaguggacuggug

SEQ ID NO: 55294 - RNA, 19 nt, Artificial Sequence
  Description of Artificial Sequence: Synthetic oligonucleotide
gccucugcuuugucaugga

SEQ ID NO: 55295 - RNA, 19 nt, Artificial Sequence
  Description of Artificial Sequence: Synthetic oligonucleotide
gcuucccgcgcacgcuugg

SEQ ID NO: 55296 - RNA, 19 nt, Artificial Sequence
  Description of Artificial Sequence: Synthetic oligonucleotide
ggaguacaucaagaccugg

SEQ ID NO: 55297 - RNA, 19 nt, Artificial Sequence
  Description of Artificial Sequence: Synthetic oligonucleotide
ggcaccuucauuggcuaca

SEQ ID NO: 55298 - RNA, 19 nt, Artificial Sequence
  Description of Artificial Sequence: Synthetic oligonucleotide
ggccacgcuacuuccuccu

SEQ ID NO: 55299 - RNA, 19 nt, Artificial Sequence
  Description of Artificial Sequence: Synthetic oligonucleotide
ggccccggcccaacaccuu

SEQ ID NO: 55300 - RNA, 19 nt, Artificial Sequence
  Description of Artificial Sequence: Synthetic oligonucleotide
ggccgugcaguggacuggu

SEQ ID NO: 55301 - RNA, 19 nt, Artificial Sequence
  Description of Artificial Sequence: Synthetic oligonucleotide
ggcggccacgcuacuuccu

SEQ ID NO: 55302 - RNA, 19 nt, Artificial Sequence
  Description of Artificial Sequence: Synthetic oligonucleotide
gggaguacaucaagaccug

SEQ ID NO: 55303 - RNA, 19 nt, Artificial Sequence
  Description of Artificial Sequence: Synthetic oligonucleotide
ggggaguacaucaagaccu

SEQ ID NO: 55304 - RNA, 19 nt, Artificial Sequence
  Description of Artificial Sequence: Synthetic oligonucleotide
ggugccaccaugaagaccu

SEQ ID NO: 55305 - RNA, 19 nt, Artificial Sequence
  Description of Artificial Sequence: Synthetic oligonucleotide
guacaucaagaccuggcgg

SEQ ID NO: 55306 - RNA, 19 nt, Artificial Sequence
  Description of Artificial Sequence: Synthetic oligonucleotide
gucccgaggccaaguccuu

SEQ ID NO: 55307 - RNA, 19 nt, Artificial Sequence
  Description of Artificial Sequence: Synthetic oligonucleotide
guccugcagaacuccaggc

SEQ ID NO: 55308 - RNA, 19 nt, Artificial Sequence
  Description of Artificial Sequence: Synthetic oligonucleotide
gugcaguggacuggugggg

SEQ ID NO: 55309 - RNA, 19 nt, Artificial Sequence
  Description of Artificial Sequence: Synthetic oligonucleotide
gugccaccaugaagaccuu

SEQ ID NO: 55310 - RNA, 19 nt, Artificial Sequence
  Description of Artificial Sequence: Synthetic oligonucleotide
gugccagcugaugaagacg

SEQ ID NO: 55311 - RNA, 19 nt, Artificial Sequence
  Description of Artificial Sequence: Synthetic oligonucleotide
uaccgggaccucaagcugg

SEQ ID NO: 55312 - RNA, 19 nt, Artificial Sequence
  Description of Artificial Sequence: Synthetic oligonucleotide
uacgccaugaagauccuca

SEQ ID NO: 55313 - RNA, 19 nt, Artificial Sequence
  Description of Artificial Sequence: Synthetic oligonucleotide
ucaaaaaaaaaaaaaaaaa

SEQ ID NO: 55314 - RNA, 19 nt, Artificial Sequence
  Description of Artificial Sequence: Synthetic oligonucleotide
ucaccaucacaccaccuga

SEQ ID NO: 55315 - RNA, 19 nt, Artificial Sequence
  Description of Artificial Sequence: Synthetic oligonucleotide
ucauuggcuacaaggagcg

SEQ ID NO: 55316 - RNA, 19 nt, Artificial Sequence
  Description of Artificial Sequence: Synthetic oligonucleotide
uccaggcaccccuuccuca

SEQ ID NO: 55317 - RNA, 19 nt, Artificial Sequence
  Description of Artificial Sequence: Synthetic oligonucleotide
ucccgggagcguguguucu

SEQ ID NO: 55318 - RNA, 19 nt, Artificial Sequence
  Description of Artificial Sequence: Synthetic oligonucleotide
uccucacagcccugaagua

SEQ ID NO: 55319 - RNA, 19 nt, Artificial Sequence
  Description of Artificial Sequence: Synthetic oligonucleotide
uccugcagaacuccaggca

SEQ ID NO: 55320 - RNA, 19 nt, Artificial Sequence
  Description of Artificial Sequence: Synthetic oligonucleotide
ucuccuacucggccagcgg

SEQ ID NO: 55321 - RNA, 19 nt, Artificial Sequence
  Description of Artificial Sequence: Synthetic oligonucleotide
ucugcuuugucauggagua

SEQ ID NO: 55322 - RNA, 19 nt, Artificial Sequence
  Description of Artificial Sequence: Synthetic oligonucleotide
ucuuuccagacccacgacc

SEQ ID NO: 55323 - RNA, 19 nt, Artificial Sequence
  Description of Artificial Sequence: Synthetic oligonucleotide
ugagcucauccucauggag

SEQ ID NO: 55324 - RNA, 19 nt, Artificial Sequence
  Description of Artificial Sequence: Synthetic oligonucleotide
ugcagaacuccaggcaccc

SEQ ID NO: 55325 - RNA, 19 nt, Artificial Sequence
  Description of Artificial Sequence: Synthetic oligonucleotide
ugcaguggacugguggggg

SEQ ID NO: 55326 - RNA, 19 nt, Artificial Sequence
  Description of Artificial Sequence: Synthetic oligonucleotide
uggcggccacgcuacuucc

SEQ ID NO: 55327 - RNA, 19 nt, Artificial Sequence
  Description of Artificial Sequence: Synthetic oligonucleotide
uucauuggcuacaaggagc

SEQ ID NO: 55328 - RNA, 19 nt, Artificial Sequence
  Description of Artificial Sequence: Synthetic oligonucleotide
uuccucacagcccugaagu

SEQ ID NO: 55329 - RNA, 19 nt, Artificial Sequence
  Description of Artificial Sequence: Synthetic oligonucleotide
uuggcuacaaggagcggcc

SEQ ID NO: 55330 - RNA, 19 nt, Artificial Sequence
  Description of Artificial Sequence: Synthetic oligonucleotide
uuuuugagcucauccucau

SEQ ID NO: 55331 - RNA, 19 nt, Artificial Sequence
  Description of Artificial Sequence: Synthetic oligonucleotide
aaguccuugcuuucagggc

SEQ ID NO: 55332 - RNA, 19 nt, Artificial Sequence
  Description of Artificial Sequence: Synthetic oligonucleotide
aguccuugcuuucagggcu

SEQ ID NO: 55333 - RNA, 19 nt, Artificial Sequence
  Description of Artificial Sequence: Synthetic oligonucleotide
ccaugagaagcuuuuugag

SEQ ID NO: 55334 - RNA, 19 nt, Artificial Sequence
  Description of Artificial Sequence: Synthetic oligonucleotide
aacaccaggcacccguucc

SEQ ID NO: 55335 - RNA, 19 nt, Artificial Sequence
  Description of Artificial Sequence: Synthetic oligonucleotide
aagaccuggaggccacggu

SEQ ID NO: 55336 - RNA, 19 nt, Artificial Sequence
  Description of Artificial Sequence: Synthetic oligonucleotide
acacagucaccgagagccg

SEQ ID NO: 55337 - RNA, 19 nt, Artificial Sequence
  Description of Artificial Sequence: Synthetic oligonucleotide
acaaucacacccccugacc

SEQ ID NO: 55338 - RNA, 19 nt, Artificial Sequence
  Description of Artificial Sequence: Synthetic oligonucleotide
accgccugugcuuugugau

SEQ ID NO: 55339 - RNA, 19 nt, Artificial Sequence
  Description of Artificial Sequence: Synthetic oligonucleotide
accgcgacaucaagcugga

SEQ ID NO: 55340 - RNA, 19 nt, Artificial Sequence
  Description of Artificial Sequence: Synthetic oligonucleotide
accuggcgccugaggugcu

SEQ ID NO: 55341 - RNA, 19 nt, Artificial Sequence
  Description of Artificial Sequence: Synthetic oligonucleotide
accuggaggccacgguacu

SEQ ID NO: 55342 - RNA, 19 nt, Artificial Sequence
  Description of Artificial Sequence: Synthetic oligonucleotide
uccuucauuggguacaagg

SEQ ID NO: 55343 - RNA, 19 nt, Artificial Sequence
  Description of Artificial Sequence: Synthetic oligonucleotide
augccaacgggggugagcu

SEQ ID NO: 55344 - RNA, 19 nt, Artificial Sequence
  Description of Artificial Sequence: Synthetic oligonucleotide
acaccaggcacccguuccu

SEQ ID NO: 55345 - RNA, 19 nt, Artificial Sequence
  Description of Artificial Sequence: Synthetic oligonucleotide
agaacaccaggcacccguu

SEQ ID NO: 55346 - RNA, 19 nt, Artificial Sequence
  Description of Artificial Sequence: Synthetic oligonucleotide
agaccuggaggccacggua

SEQ ID NO: 55347 - RNA, 19 nt, Artificial Sequence
  Description of Artificial Sequence: Synthetic oligonucleotide
agcugaugaagaccgagag

SEQ ID NO: 55348 - RNA, 19 nt, Artificial Sequence
  Description of Artificial Sequence: Synthetic oligonucleotide
gggagaaggccacuggccg

SEQ ID NO: 55349 - RNA, 19 nt, Artificial Sequence
  Description of Artificial Sequence: Synthetic oligonucleotide
aggcacccguuccucacug

SEQ ID NO: 55350 - RNA, 19 nt, Artificial Sequence
  Description of Artificial Sequence: Synthetic oligonucleotide
cggacccacuucccccagu

SEQ ID NO: 55351 - RNA, 19 nt, Artificial Sequence
  Description of Artificial Sequence: Synthetic oligonucleotide
ugggcugcuuaagaaggac

SEQ ID NO: 55352 - RNA, 19 nt, Artificial Sequence
  Description of Artificial Sequence: Synthetic oligonucleotide
aguaccuggcgccugaggu

SEQ ID NO: 55353 - RNA, 19 nt, Artificial Sequence
  Description of Artificial Sequence: Synthetic oligonucleotide
aguaugccaacggggguga

SEQ ID NO: 55354 - RNA, 19 nt, Artificial Sequence
  Description of Artificial Sequence: Synthetic oligonucleotide
aucacaaucacacccccug

SEQ ID NO: 55355 - RNA, 19 nt, Artificial Sequence
  Description of Artificial Sequence: Synthetic oligonucleotide
gucauacgcugccugcagu

SEQ ID NO: 55356 - RNA, 19 nt, Artificial Sequence
  Description of Artificial Sequence: Synthetic oligonucleotide
auccuggugcgggagaagg

SEQ ID NO: 55357 - RNA, 19 nt, Artificial Sequence
  Description of Artificial Sequence: Synthetic oligonucleotide
auuggguacaaggagaggc

SEQ ID NO: 55358 - RNA, 19 nt, Artificial Sequence
  Description of Artificial Sequence: Synthetic oligonucleotide
cuaaaaauaaaaaaaaaaa

SEQ ID NO: 55359 - RNA, 19 nt, Artificial Sequence
  Description of Artificial Sequence: Synthetic oligonucleotide
caagaccuggaggccacgg

SEQ ID NO: 55360 - RNA, 19 nt, Artificial Sequence
  Description of Artificial Sequence: Synthetic oligonucleotide
cacacagucaccgagagcc

SEQ ID NO: 55361 - RNA, 19 nt, Artificial Sequence
  Description of Artificial Sequence: Synthetic oligonucleotide
cacaaucacacccccugac

SEQ ID NO: 55362 - RNA, 19 nt, Artificial Sequence
  Description of Artificial Sequence: Synthetic oligonucleotide
cagaacaccaggcacccgu

SEQ ID NO: 55363 - RNA, 19 nt, Artificial Sequence
  Description of Artificial Sequence: Synthetic oligonucleotide
cagcugaugaagaccgaga

SEQ ID NO: 55364 - RNA, 19 nt, Artificial Sequence
  Description of Artificial Sequence: Synthetic oligonucleotide
cugggcugcuuaagaagga

SEQ ID NO: 55365 - RNA, 19 nt, Artificial Sequence
  Description of Artificial Sequence: Synthetic oligonucleotide
gauggaguaugccaacggg

SEQ ID NO: 55366 - RNA, 19 nt, Artificial Sequence
  Description of Artificial Sequence: Synthetic oligonucleotide
cauuggguacaaggagagg

SEQ ID NO: 55367 - RNA, 19 nt, Artificial Sequence
  Description of Artificial Sequence: Synthetic oligonucleotide
ccaaggaggucauggagca

SEQ ID NO: 55368 - RNA, 19 nt, Artificial Sequence
  Description of Artificial Sequence: Synthetic oligonucleotide
cgccugaggugcuggagga

SEQ ID NO: 55369 - RNA, 19 nt, Artificial Sequence
  Description of Artificial Sequence: Synthetic oligonucleotide
gccugaggugcuggaggac

SEQ ID NO: 55370 - RNA, 19 nt, Artificial Sequence
  Description of Artificial Sequence: Synthetic oligonucleotide
cccgggagcgugucuucac

SEQ ID NO: 55371 - RNA, 19 nt, Artificial Sequence
  Description of Artificial Sequence: Synthetic oligonucleotide
ccgccugugcuuugugaug

SEQ ID NO: 55372 - RNA, 19 nt, Artificial Sequence
  Description of Artificial Sequence: Synthetic oligonucleotide
ccgggccguggacuggugg

SEQ ID NO: 55373 - RNA, 19 nt, Artificial Sequence
  Description of Artificial Sequence: Synthetic oligonucleotide
ccugugcuuugugauggag

SEQ ID NO: 55374 - RNA, 19 nt, Artificial Sequence
  Description of Artificial Sequence: Synthetic oligonucleotide
ccuccagaacaccaggcac

SEQ ID NO: 55375 - RNA, 19 nt, Artificial Sequence
  Description of Artificial Sequence: Synthetic oligonucleotide
ccuggcgccugaggugcug

SEQ ID NO: 55376 - RNA, 19 nt, Artificial Sequence
  Description of Artificial Sequence: Synthetic oligonucleotide
ccuggaggccacgguacuu

SEQ ID NO: 55377 - RNA, 19 nt, Artificial Sequence
  Description of Artificial Sequence: Synthetic oligonucleotide
ccuggugcgggagaaggcc

SEQ ID NO: 55378 - RNA, 19 nt, Artificial Sequence
  Description of Artificial Sequence: Synthetic oligonucleotide
cgaccgccugugcuuugug

SEQ ID NO: 55379 - RNA, 19 nt, Artificial Sequence
  Description of Artificial Sequence: Synthetic oligonucleotide
cgccugugcuuugugaugg

SEQ ID NO: 55380 - RNA, 19 nt, Artificial Sequence
  Description of Artificial Sequence: Synthetic oligonucleotide
cgggccguggacugguggg

SEQ ID NO: 55381 - RNA, 19 nt, Artificial Sequence
  Description of Artificial Sequence: Synthetic oligonucleotide
caccaggcacccguuccuc

SEQ ID NO: 55382 - RNA, 19 nt, Artificial Sequence
  Description of Artificial Sequence: Synthetic oligonucleotide
cugugcuuugugauggagu

SEQ ID NO: 55383 - RNA, 19 nt, Artificial Sequence
  Description of Artificial Sequence: Synthetic oligonucleotide
cugaugaagaccgagaggc

SEQ ID NO: 55384 - RNA, 19 nt, Artificial Sequence
  Description of Artificial Sequence: Synthetic oligonucleotide
cuccagaacaccaggcacc

SEQ ID NO: 55385 - RNA, 19 nt, Artificial Sequence
  Description of Artificial Sequence: Synthetic oligonucleotide
cuggcgccugaggugcugg

SEQ ID NO: 55386 - RNA, 19 nt, Artificial Sequence
  Description of Artificial Sequence: Synthetic oligonucleotide
cuggugcgggagaaggcca

SEQ ID NO: 55387 - RNA, 19 nt, Artificial Sequence
  Description of Artificial Sequence: Synthetic oligonucleotide
cuuugugauggaguaugcc

SEQ ID NO: 55388 - RNA, 19 nt, Artificial Sequence
  Description of Artificial Sequence: Synthetic oligonucleotide
gaacaccaggcacccguuc

SEQ ID NO: 55389 - RNA, 19 nt, Artificial Sequence
  Description of Artificial Sequence: Synthetic oligonucleotide
gaccgccugugcuuuguga

SEQ ID NO: 55390 - RNA, 19 nt, Artificial Sequence
  Description of Artificial Sequence: Synthetic oligonucleotide
gaccuggaggccacgguac

SEQ ID NO: 55391 - RNA, 19 nt, Artificial Sequence
  Description of Artificial Sequence: Synthetic oligonucleotide
gacgagagggaggagugga

SEQ ID NO: 55392 - RNA, 19 nt, Artificial Sequence
  Description of Artificial Sequence: Synthetic oligonucleotide
gaguaccuggcgccugagg

SEQ ID NO: 55393 - RNA, 19 nt, Artificial Sequence
  Description of Artificial Sequence: Synthetic oligonucleotide
gaguaugccaacgggggug

SEQ ID NO: 55394 - RNA, 19 nt, Artificial Sequence
  Description of Artificial Sequence: Synthetic oligonucleotide
gcuccuucauuggguacaa

SEQ ID NO: 55395 - RNA, 19 nt, Artificial Sequence
  Description of Artificial Sequence: Synthetic oligonucleotide
gcagaggcuuggugggggg

SEQ ID NO: 55396 - RNA, 19 nt, Artificial Sequence
  Description of Artificial Sequence: Synthetic oligonucleotide
gccaaggaggucauggagc

SEQ ID NO: 55397 - RNA, 19 nt, Artificial Sequence
  Description of Artificial Sequence: Synthetic oligonucleotide
gcucacacagucaccgaga

SEQ ID NO: 55398 - RNA, 19 nt, Artificial Sequence
  Description of Artificial Sequence: Synthetic oligonucleotide
gcgccugaggugcuggagg

SEQ ID NO: 55399 - RNA, 19 nt, Artificial Sequence
  Description of Artificial Sequence: Synthetic oligonucleotide
gccgggccguggacuggug

SEQ ID NO: 55400 - RNA, 19 nt, Artificial Sequence
  Description of Artificial Sequence: Synthetic oligonucleotide
gccugugcuuugugaugga

SEQ ID NO: 55401 - RNA, 19 nt, Artificial Sequence
  Description of Artificial Sequence: Synthetic oligonucleotide
gcugaugaagaccgagagg

SEQ ID NO: 55402 - RNA, 19 nt, Artificial Sequence
  Description of Artificial Sequence: Synthetic oligonucleotide
gcuuugugauggaguaugc

SEQ ID NO: 55403 - RNA, 19 nt, Artificial Sequence
  Description of Artificial Sequence: Synthetic oligonucleotide
ggacaaugacuauggccgg

SEQ ID NO: 55404 - RNA, 19 nt, Artificial Sequence
  Description of Artificial Sequence: Synthetic oligonucleotide
ggaguaugccaacgggggu

SEQ ID NO: 55405 - RNA, 19 nt, Artificial Sequence
  Description of Artificial Sequence: Synthetic oligonucleotide
ggcacccguuccucacugc

SEQ ID NO: 55406 - RNA, 19 nt, Artificial Sequence
  Description of Artificial Sequence: Synthetic oligonucleotide
ggcuccuucauuggguaca

SEQ ID NO: 55407 - RNA, 19 nt, Artificial Sequence
  Description of Artificial Sequence: Synthetic oligonucleotide
ggccacgguacuuccugcu

SEQ ID NO: 55408 - RNA, 19 nt, Artificial Sequence
  Description of Artificial Sequence: Synthetic oligonucleotide
ggcgccugaggugcuggag

SEQ ID NO: 55409 - RNA, 19 nt, Artificial Sequence
  Description of Artificial Sequence: Synthetic oligonucleotide
ggccgggccguggacuggu

SEQ ID NO: 55410 - RNA, 19 nt, Artificial Sequence
  Description of Artificial Sequence: Synthetic oligonucleotide
ggaggccacgguacuuccu

SEQ ID NO: 55411 - RNA, 19 nt, Artificial Sequence
  Description of Artificial Sequence: Synthetic oligonucleotide
guaugccaacgggggugag

SEQ ID NO: 55412 - RNA, 19 nt, Artificial Sequence
  Description of Artificial Sequence: Synthetic oligonucleotide
gugauggaguaugccaacg

SEQ ID NO: 55413 - RNA, 19 nt, Artificial Sequence
  Description of Artificial Sequence: Synthetic oligonucleotide
guccuccagaacaccaggc

SEQ ID NO: 55414 - RNA, 19 nt, Artificial Sequence
  Description of Artificial Sequence: Synthetic oligonucleotide
gggccguggacuggugggg

SEQ ID NO: 55415 - RNA, 19 nt, Artificial Sequence
  Description of Artificial Sequence: Synthetic oligonucleotide
guggaccacagucaucgag

SEQ ID NO: 55416 - RNA, 19 nt, Artificial Sequence
  Description of Artificial Sequence: Synthetic oligonucleotide
gugggggugggcaucucug

SEQ ID NO: 55417 - RNA, 19 nt, Artificial Sequence
  Description of Artificial Sequence: Synthetic oligonucleotide
uaccgcgacaucaagcugg

SEQ ID NO: 55418 - RNA, 19 nt, Artificial Sequence
  Description of Artificial Sequence: Synthetic oligonucleotide
uaccuggcgccugaggugc

SEQ ID NO: 55419 - RNA, 19 nt, Artificial Sequence
  Description of Artificial Sequence: Synthetic oligonucleotide
uaugccaacgggggugagc

SEQ ID NO: 55420 - RNA, 19 nt, Artificial Sequence
  Description of Artificial Sequence: Synthetic oligonucleotide
uacgccaugaagauccugc

SEQ ID NO: 55421 - RNA, 19 nt, Artificial Sequence
  Description of Artificial Sequence: Synthetic oligonucleotide
uaaaaauaaaaaaaaaaaa

SEQ ID NO: 55422 - RNA, 19 nt, Artificial Sequence
  Description of Artificial Sequence: Synthetic oligonucleotide
ucuaaaaauaaaaaaaaaa

SEQ ID NO: 55423 - RNA, 19 nt, Artificial Sequence
  Description of Artificial Sequence: Synthetic oligonucleotide
ucacaaucacacccccuga

SEQ ID NO: 55424 - RNA, 19 nt, Artificial Sequence
  Description of Artificial Sequence: Synthetic oligonucleotide
ucaccgagagccggguccu

SEQ ID NO: 55425 - RNA, 19 nt, Artificial Sequence
  Description of Artificial Sequence: Synthetic oligonucleotide
ugauggaguaugccaacgg

SEQ ID NO: 55426 - RNA, 19 nt, Artificial Sequence
  Description of Artificial Sequence: Synthetic oligonucleotide
ucauuggguacaaggagag

SEQ ID NO: 55427 - RNA, 19 nt, Artificial Sequence
  Description of Artificial Sequence: Synthetic oligonucleotide
accaggcacccguuccuca

SEQ ID NO: 55428 - RNA, 19 nt, Artificial Sequence
  Description of Artificial Sequence: Synthetic oligonucleotide
ucccgggagcgugucuuca

SEQ ID NO: 55429 - RNA, 19 nt, Artificial Sequence
  Description of Artificial Sequence: Synthetic oligonucleotide
uccucacugcgcugaagua

SEQ ID NO: 55430 - RNA, 19 nt, Artificial Sequence
  Description of Artificial Sequence: Synthetic oligonucleotide
uccuccagaacaccaggca

SEQ ID NO: 55431 - RNA, 19 nt, Artificial Sequence
  Description of Artificial Sequence: Synthetic oligonucleotide
uccuggugcgggagaaggc

SEQ ID NO: 55432 - RNA, 19 nt, Artificial Sequence
  Description of Artificial Sequence: Synthetic oligonucleotide
ugaugaagaccgagaggcc

SEQ ID NO: 55433 - RNA, 19 nt, Artificial Sequence
  Description of Artificial Sequence: Synthetic oligonucleotide
uccagaacaccaggcaccc

SEQ ID NO: 55434 - RNA, 19 nt, Artificial Sequence
  Description of Artificial Sequence: Synthetic oligonucleotide
ggccguggacugguggggg

SEQ ID NO: 55435 - RNA, 19 nt, Artificial Sequence
  Description of Artificial Sequence: Synthetic oligonucleotide
uggcgccugaggugcugga

SEQ ID NO: 55436 - RNA, 19 nt, Artificial Sequence
  Description of Artificial Sequence: Synthetic oligonucleotide
uggaggccacgguacuucc

SEQ ID NO: 55437 - RNA, 19 nt, Artificial Sequence
  Description of Artificial Sequence: Synthetic oligonucleotide
ugggggugggcaucucugg

SEQ ID NO: 55438 - RNA, 19 nt, Artificial Sequence
  Description of Artificial Sequence: Synthetic oligonucleotide
uggugcgggagaaggccac

SEQ ID NO: 55439 - RNA, 19 nt, Artificial Sequence
  Description of Artificial Sequence: Synthetic oligonucleotide
ugugauggaguaugccaac

SEQ ID NO: 55440 - RNA, 19 nt, Artificial Sequence
  Description of Artificial Sequence: Synthetic oligonucleotide
uucauuggguacaaggaga

SEQ ID NO: 55441 - RNA, 19 nt, Artificial Sequence
  Description of Artificial Sequence: Synthetic oligonucleotide
uuccucacugcgcugaagu

SEQ ID NO: 55442 - RNA, 19 nt, Artificial Sequence
  Description of Artificial Sequence: Synthetic oligonucleotide
uuggguacaaggagaggcc

SEQ ID NO: 55443 - RNA, 19 nt, Artificial Sequence
  Description of Artificial Sequence: Synthetic oligonucleotide
uugugauggaguaugccaa

SEQ ID NO: 55444 - RNA, 19 nt, Artificial Sequence
  Description of Artificial Sequence: Synthetic oligonucleotide
uuugugauggaguaugcca

SEQ ID NO: 55445 - RNA, 19 nt, Artificial Sequence
  Description of Artificial Sequence: Synthetic oligonucleotide
aaagauggccacaucaaga

SEQ ID NO: 55446 - RNA, 19 nt, Artificial Sequence
  Description of Artificial Sequence: Synthetic oligonucleotide
aagauggccacaucaagau

SEQ ID NO: 55447 - RNA, 19 nt, Artificial Sequence
  Description of Artificial Sequence: Synthetic oligonucleotide
aaggaugaagucgcucaca

SEQ ID NO: 55448 - RNA, 19 nt, Artificial Sequence
  Description of Artificial Sequence: Synthetic oligonucleotide
aaugacuauggccgggccg

SEQ ID NO: 55449 - RNA, 19 nt, Artificial Sequence
  Description of Artificial Sequence: Synthetic oligonucleotide
aggaugaagucgcucacac

SEQ ID NO: 55450 - RNA, 19 nt, Artificial Sequence
  Description of Artificial Sequence: Synthetic oligonucleotide
augacuauggccgggccgu

SEQ ID NO: 55451 - RNA, 19 nt, Artificial Sequence
  Description of Artificial Sequence: Synthetic oligonucleotide
auugccaaggaugaagucg

SEQ ID NO: 55452 - RNA, 19 nt, Artificial Sequence
  Description of Artificial Sequence: Synthetic oligonucleotide
caaagauggccacaucaag

SEQ ID NO: 55453 - RNA, 19 nt, Artificial Sequence
  Description of Artificial Sequence: Synthetic oligonucleotide
ggugcagagauugucucgg

SEQ ID NO: 55454 - RNA, 19 nt, Artificial Sequence
  Description of Artificial Sequence: Synthetic oligonucleotide
gugcagagauugucucggc

SEQ ID NO: 55455 - RNA, 19 nt, Artificial Sequence
  Description of Artificial Sequence: Synthetic oligonucleotide
ugaaguaugccuuccagac

SEQ ID NO: 55456 - RNA, 19 nt, Artificial Sequence
  Description of Artificial Sequence: Synthetic oligonucleotide
uuauggugcagagauuguc

SEQ ID NO: 55457 - RNA, 19 nt, Artificial Sequence
  Description of Artificial Sequence: Synthetic oligonucleotide
uugccaaggaugaagucgc

SEQ ID NO: 55458 - RNA, 19 nt, Artificial Sequence
  Description of Artificial Sequence: Synthetic oligonucleotide
uuuauggugcagagauugu

SEQ ID NO: 55459 - RNA, 19 nt, Artificial Sequence
  Description of Artificial Sequence: Synthetic oligonucleotide
uuuuauggugcagagauug

SEQ ID NO: 55460 - RNA, 19 nt, Artificial Sequence
  Description of Artificial Sequence: Synthetic oligonucleotide
aaugggggcgagcuguuuu

SEQ ID NO: 55461 - RNA, 19 nt, Artificial Sequence
  Description of Artificial Sequence: Synthetic oligonucleotide
augggggcgagcuguuuuu

SEQ ID NO: 55462 - RNA, 19 nt, Artificial Sequence
  Description of Artificial Sequence: Synthetic oligonucleotide
agaaucuaaugcuggacaa

SEQ ID NO: 55463 - RNA, 19 nt, Artificial Sequence
  Description of Artificial Sequence: Synthetic oligonucleotide
agcggguguucucugagga

SEQ ID NO: 55464 - RNA, 19 nt, Artificial Sequence
  Description of Artificial Sequence: Synthetic oligonucleotide
ccccucaacaacuuuucag

SEQ ID NO: 55465 - RNA, 19 nt, Artificial Sequence
  Description of Artificial Sequence: Synthetic oligonucleotide
cccucaacaacuuuucagu

SEQ ID NO: 55466 - RNA, 19 nt, Artificial Sequence
  Description of Artificial Sequence: Synthetic oligonucleotide
ccucaacaacuuuucagug

SEQ ID NO: 55467 - RNA, 19 nt, Artificial Sequence
  Description of Artificial Sequence: Synthetic oligonucleotide
ugggggcgagcuguuuuuc

SEQ ID NO: 55468 - RNA, 19 nt, Artificial Sequence
  Description of Artificial Sequence: Synthetic oligonucleotide
cggguguucucugaggacc

SEQ ID NO: 55469 - RNA, 19 nt, Artificial Sequence
  Description of Artificial Sequence: Synthetic oligonucleotide
cucaacaacuuuucagugg

SEQ ID NO: 55470 - RNA, 19 nt, Artificial Sequence
  Description of Artificial Sequence: Synthetic oligonucleotide
auccccucaacaacuuuuc

SEQ ID NO: 55471 - RNA, 19 nt, Artificial Sequence
  Description of Artificial Sequence: Synthetic oligonucleotide
gagaaucuaaugcuggaca

SEQ ID NO: 55472 - RNA, 19 nt, Artificial Sequence
  Description of Artificial Sequence: Synthetic oligonucleotide
gagcggguguucucugagg

SEQ ID NO: 55473 - RNA, 19 nt, Artificial Sequence
  Description of Artificial Sequence: Synthetic oligonucleotide
gcggguguucucugaggac

SEQ ID NO: 55474 - RNA, 19 nt, Artificial Sequence
  Description of Artificial Sequence: Synthetic oligonucleotide
ggagaaucuaaugcuggac

SEQ ID NO: 55475 - RNA, 19 nt, Artificial Sequence
  Description of Artificial Sequence: Synthetic oligonucleotide
gggcgagcuguuuuuccau

SEQ ID NO: 55476 - RNA, 19 nt, Artificial Sequence
  Description of Artificial Sequence: Synthetic oligonucleotide
ggguguucucugaggaccg

SEQ ID NO: 55477 - RNA, 19 nt, Artificial Sequence
  Description of Artificial Sequence: Synthetic oligonucleotide
ucaacaacuuuucaguggc

SEQ ID NO: 55478 - RNA, 19 nt, Artificial Sequence
  Description of Artificial Sequence: Synthetic oligonucleotide
uccccucaacaacuuuuca

SEQ ID NO: 55479 - RNA, 19 nt, Artificial Sequence
  Description of Artificial Sequence: Synthetic oligonucleotide
uggagaaucuaaugcugga

SEQ ID NO: 55480 - RNA, 19 nt, Artificial Sequence
  Description of Artificial Sequence: Synthetic oligonucleotide
aaucuaaugcuggacaaag

SEQ ID NO: 55481 - RNA, 19 nt, Artificial Sequence
  Description of Artificial Sequence: Synthetic oligonucleotide
aaggaugaaguggcacaca

SEQ ID NO: 55482 - RNA, 19 nt, Artificial Sequence
  Description of Artificial Sequence: Synthetic oligonucleotide
aagucauuauugcaaagga

SEQ ID NO: 55483 - RNA, 19 nt, Artificial Sequence
  Description of Artificial Sequence: Synthetic oligonucleotide
accaugaagacauucugug

SEQ ID NO: 55484 - RNA, 19 nt, Artificial Sequence
  Description of Artificial Sequence: Synthetic oligonucleotide
aucuaaugcuggacaaaga

SEQ ID NO: 55485 - RNA, 19 nt, Artificial Sequence
  Description of Artificial Sequence: Synthetic oligonucleotide
aggaugaaguggcacacac

SEQ ID NO: 55486 - RNA, 19 nt, Artificial Sequence
  Description of Artificial Sequence: Synthetic oligonucleotide
agucauuauugcaaaggau

SEQ ID NO: 55487 - RNA, 19 nt, Artificial Sequence
  Description of Artificial Sequence: Synthetic oligonucleotide
auugcaaaggaugaagugg

SEQ ID NO: 55488 - RNA, 19 nt, Artificial Sequence
  Description of Artificial Sequence: Synthetic oligonucleotide
caccaugaagacauucugu

SEQ ID NO: 55489 - RNA, 19 nt, Artificial Sequence
  Description of Artificial Sequence: Synthetic oligonucleotide
cauuauugcaaaggaugaa

SEQ ID NO: 55490 - RNA, 19 nt, Artificial Sequence
  Description of Artificial Sequence: Synthetic oligonucleotide
ccaugaagacauucugugg

SEQ ID NO: 55491 - RNA, 19 nt, Artificial Sequence
  Description of Artificial Sequence: Synthetic oligonucleotide
ucuaaugcuggacaaagau

SEQ ID NO: 55492 - RNA, 19 nt, Artificial Sequence
  Description of Artificial Sequence: Synthetic oligonucleotide
gaagucauuauugcaaagg

SEQ ID NO: 55493 - RNA, 19 nt, Artificial Sequence
  Description of Artificial Sequence: Synthetic oligonucleotide
gucauuauugcaaaggaug

SEQ ID NO: 55494 - RNA, 19 nt, Artificial Sequence
  Description of Artificial Sequence: Synthetic oligonucleotide
ucauuauugcaaaggauga

SEQ ID NO: 55495 - RNA, 19 nt, Artificial Sequence
  Description of Artificial Sequence: Synthetic oligonucleotide
uuauugcaaaggaugaagu

SEQ ID NO: 55496 - RNA, 19 nt, Artificial Sequence
  Description of Artificial Sequence: Synthetic oligonucleotide
uugcaaaggaugaaguggc

SEQ ID NO: 55497 - RNA, 19 nt, Artificial Sequence
  Description of Artificial Sequence: Synthetic oligonucleotide
acgcucagccccgaggcca

SEQ ID NO: 55498 - RNA, 19 nt, Artificial Sequence
  Description of Artificial Sequence: Synthetic oligonucleotide
cacgcucagccccgaggcc

SEQ ID NO: 55499 - RNA, 19 nt, Artificial Sequence
  Description of Artificial Sequence: Synthetic oligonucleotide
ccgcgcacgcucagccccg

SEQ ID NO: 55500 - RNA, 19 nt, Artificial Sequence
  Description of Artificial Sequence: Synthetic oligonucleotide
cgcacgcucagccccgagg

SEQ ID NO: 55501 - RNA, 19 nt, Artificial Sequence
  Description of Artificial Sequence: Synthetic oligonucleotide
cgcgcacgcucagccccga

SEQ ID NO: 55502 - RNA, 19 nt, Artificial Sequence
  Description of Artificial Sequence: Synthetic oligonucleotide
cgcucagccccgaggccaa

SEQ ID NO: 55503 - RNA, 19 nt, Artificial Sequence
  Description of Artificial Sequence: Synthetic oligonucleotide
cuucccgcgcacgcucagc

SEQ ID NO: 55504 - RNA, 19 nt, Artificial Sequence
  Description of Artificial Sequence: Synthetic oligonucleotide
cucagccccgaggccaagu

SEQ ID NO: 55505 - RNA, 19 nt, Artificial Sequence
  Description of Artificial Sequence: Synthetic oligonucleotide
gcacgcucagccccgaggc

SEQ ID NO: 55506 - RNA, 19 nt, Artificial Sequence
  Description of Artificial Sequence: Synthetic oligonucleotide
gcgcacgcucagccccgag

SEQ ID NO: 55507 - RNA, 19 nt, Artificial Sequence
  Description of Artificial Sequence: Synthetic oligonucleotide
gcucagccccgaggccaag

SEQ ID NO: 55508 - RNA, 19 nt, Artificial Sequence
  Description of Artificial Sequence: Synthetic oligonucleotide
agccccgaggccaaguccc

SEQ ID NO: 55509 - RNA, 19 nt, Artificial Sequence
  Description of Artificial Sequence: Synthetic oligonucleotide
ucccgcgcacgcucagccc

SEQ ID NO: 55510 - RNA, 19 nt, Artificial Sequence
  Description of Artificial Sequence: Synthetic oligonucleotide
cagccccgaggccaagucc

SEQ ID NO: 55511 - RNA, 19 nt, Artificial Sequence
  Description of Artificial Sequence: Synthetic oligonucleotide
uucccgcgcacgcucagcc

SEQ ID NO: 55512 - RNA, 19 nt, Artificial Sequence
  Description of Artificial Sequence: Synthetic oligonucleotide
ucagccccgaggccaaguc

SEQ ID NO: 55513 - RNA, 19 nt, Artificial Sequence
  Description of Artificial Sequence: Synthetic oligonucleotide
augaaugacuucgacuauc

SEQ ID NO: 55514 - RNA, 19 nt, Artificial Sequence
  Description of Artificial Sequence: Synthetic oligonucleotide
ugaaugacuucgacuaucu

SEQ ID NO: 55515 - RNA, 19 nt, Artificial Sequence
  Description of Artificial Sequence: Synthetic oligonucleotide
agauauuuugaugaagaau

SEQ ID NO: 55516 - RNA, 19 nt, Artificial Sequence
  Description of Artificial Sequence: Synthetic oligonucleotide
ccauugugaaagaagguug

SEQ ID NO: 55517 - RNA, 19 nt, Artificial Sequence
  Description of Artificial Sequence: Synthetic oligonucleotide
gauauuuugaugaagaauu

SEQ ID NO: 55518 - RNA, 19 nt, Artificial Sequence
  Description of Artificial Sequence: Synthetic oligonucleotide
cauugugaaagaagguugg

SEQ ID NO: 55519 - RNA, 19 nt, Artificial Sequence
  Description of Artificial Sequence: Synthetic oligonucleotide
aacaccuucaucauccgcu

SEQ ID NO: 55520 - RNA, 19 nt, Artificial Sequence
  Description of Artificial Sequence: Synthetic oligonucleotide
acaccuucaucauccgcug

SEQ ID NO: 55521 - RNA, 19 nt, Artificial Sequence
  Description of Artificial Sequence: Synthetic oligonucleotide
accuucaucauccgcugcc

SEQ ID NO: 55522 - RNA, 19 nt, Artificial Sequence
  Description of Artificial Sequence: Synthetic oligonucleotide
caacaccuucaucauccgc

SEQ ID NO: 55523 - RNA, 19 nt, Artificial Sequence
  Description of Artificial Sequence: Synthetic oligonucleotide
caccuucaucauccgcugc

SEQ ID NO: 55524 - RNA, 19 nt, Artificial Sequence
  Description of Artificial Sequence: Synthetic oligonucleotide
ccaacaccuucaucauccg

SEQ ID NO: 55525 - RNA, 19 nt, Artificial Sequence
  Description of Artificial Sequence: Synthetic oligonucleotide
cccaacaccuucaucaucc

SEQ ID NO: 55526 - RNA, 19 nt, Artificial Sequence
  Description of Artificial Sequence: Synthetic oligonucleotide
cccacacacucaccgagaa

SEQ ID NO: 55527 - RNA, 19 nt, Artificial Sequence
  Description of Artificial Sequence: Synthetic oligonucleotide
ccccaggucacgucggaga

SEQ ID NO: 55528 - RNA, 19 nt, Artificial Sequence
  Description of Artificial Sequence: Synthetic oligonucleotide
ccuucaucauccgcugccu

SEQ ID NO: 55529 - RNA, 19 nt, Artificial Sequence
  Description of Artificial Sequence: Synthetic oligonucleotide
cgccaaggagaucaugcag

SEQ ID NO: 55530 - RNA, 19 nt, Artificial Sequence
  Description of Artificial Sequence: Synthetic oligonucleotide
cggcccaacaccuucauca

SEQ ID NO: 55531 - RNA, 19 nt, Artificial Sequence
  Description of Artificial Sequence: Synthetic oligonucleotide
cgggcccgcuucuauggcg

SEQ ID NO: 55532 - RNA, 19 nt, Artificial Sequence
  Description of Artificial Sequence: Synthetic oligonucleotide
cuucaucauccgcugccug

SEQ ID NO: 55533 - RNA, 19 nt, Artificial Sequence
  Description of Artificial Sequence: Synthetic oligonucleotide
gacgccaaggagaucaugc

SEQ ID NO: 55534 - RNA, 19 nt, Artificial Sequence
  Description of Artificial Sequence: Synthetic oligonucleotide
ggcccaacaccuucaucau

SEQ ID NO: 55535 - RNA, 19 nt, Artificial Sequence
  Description of Artificial Sequence: Synthetic oligonucleotide
gggcccgcuucuauggcgc

SEQ ID NO: 55536 - RNA, 19 nt, Artificial Sequence
  Description of Artificial Sequence: Synthetic oligonucleotide
ucaucauccgcugccugca

SEQ ID NO: 55537 - RNA, 19 nt, Artificial Sequence
  Description of Artificial Sequence: Synthetic oligonucleotide
ucuauggcgcugagauugu

SEQ ID NO: 55538 - RNA, 19 nt, Artificial Sequence
  Description of Artificial Sequence: Synthetic oligonucleotide
uucaucauccgcugccugc

SEQ ID NO: 55539 - RNA, 19 nt, Artificial Sequence
  Description of Artificial Sequence: Synthetic oligonucleotide
uucuauggcgcugagauug

SEQ ID NO: 55540 - RNA, 19 nt, Artificial Sequence
  Description of Artificial Sequence: Synthetic oligonucleotide
caaugacuacggccgugca

SEQ ID NO: 55541 - RNA, 19 nt, Artificial Sequence
  Description of Artificial Sequence: Synthetic oligonucleotide
ccaugaagauccucaagaa

SEQ ID NO: 55542 - RNA, 19 nt, Artificial Sequence
  Description of Artificial Sequence: Synthetic oligonucleotide
ccgggaccucaagcuggag

SEQ ID NO: 55543 - RNA, 19 nt, Artificial Sequence
  Description of Artificial Sequence: Synthetic oligonucleotide
cgggaccucaagcuggaga

SEQ ID NO: 55544 - RNA, 19 nt, Artificial Sequence
  Description of Artificial Sequence: Synthetic oligonucleotide
gacaccagguauuuugaug

SEQ ID NO: 55545 - RNA, 19 nt, Artificial Sequence
  Description of Artificial Sequence: Synthetic oligonucleotide
gccaugaagauccucaaga

SEQ ID NO: 55546 - RNA, 19 nt, Artificial Sequence
  Description of Artificial Sequence: Synthetic oligonucleotide
gggaccucaagcuggagaa

SEQ ID NO: 55547 - RNA, 19 nt, Artificial Sequence
  Description of Artificial Sequence: Synthetic oligonucleotide
guguaccgggaccucaagc

SEQ ID NO: 55548 - RNA, 19 nt, Artificial Sequence
  Description of Artificial Sequence: Synthetic oligonucleotide
uguaccgggaccucaagcu

SEQ ID NO: 55549 - RNA, 19 nt, Artificial Sequence
  Description of Artificial Sequence: Synthetic oligonucleotide
acacaagguacuucgauga

SEQ ID NO: 55550 - RNA, 19 nt, Artificial Sequence
  Description of Artificial Sequence: Synthetic oligonucleotide
ccugcccacgccuccccuc

SEQ ID NO: 55551 - RNA, 19 nt, Artificial Sequence
  Description of Artificial Sequence: Synthetic oligonucleotide
cagaaugccagcugaugaa

SEQ ID NO: 55552 - RNA, 19 nt, Artificial Sequence
  Description of Artificial Sequence: Synthetic oligonucleotide
gacacaagguacuucgaug

SEQ ID NO: 55553 - RNA, 19 nt, Artificial Sequence
  Description of Artificial Sequence: Synthetic oligonucleotide
agaaugccagcugaugaag

SEQ ID NO: 55554 - RNA, 19 nt, Artificial Sequence
  Description of Artificial Sequence: Synthetic oligonucleotide
gcagaaugccagcugauga

SEQ ID NO: 55555 - RNA, 19 nt, Artificial Sequence
  Description of Artificial Sequence: Synthetic oligonucleotide
gacugaggagauggaagug

SEQ ID NO: 55556 - RNA, 19 nt, Artificial Sequence
  Description of Artificial Sequence: Synthetic oligonucleotide
uaaacaacuucuccguagc

SEQ ID NO: 55557 - RNA, 19 nt, Artificial Sequence
  Description of Artificial Sequence: Synthetic oligonucleotide
ggccaccaugaaaaccuuc

SEQ ID NO: 55558 - RNA, 19 nt, Artificial Sequence
  Description of Artificial Sequence: Synthetic oligonucleotide
accaugaaugacuucgacu

SEQ ID NO: 55559 - RNA, 19 nt, Artificial Sequence
  Description of Artificial Sequence: Synthetic oligonucleotide
acuucgaugaugaauuuac

SEQ ID NO: 55560 - RNA, 19 nt, Artificial Sequence
  Description of Artificial Sequence: Synthetic oligonucleotide
acuuuggccucugcaaaga

SEQ ID NO: 55561 - RNA, 19 nt, Artificial Sequence
  Description of Artificial Sequence: Synthetic oligonucleotide
caugaaugacuucgacuau

SEQ ID NO: 55562 - RNA, 19 nt, Artificial Sequence
  Description of Artificial Sequence: Synthetic oligonucleotide
ccaugaaugacuucgacua

SEQ ID NO: 55563 - RNA, 19 nt, Artificial Sequence
  Description of Artificial Sequence: Synthetic oligonucleotide
gacuuuggccucugcaaag

SEQ ID NO: 55564 - RNA, 19 nt, Artificial Sequence
  Description of Artificial Sequence: Synthetic oligonucleotide
uacuucgaugaugaauuua

SEQ ID NO: 55565 - RNA, 19 nt, Artificial Sequence
  Description of Artificial Sequence: Synthetic oligonucleotide
acuagauauuuugaugaag

SEQ ID NO: 55566 - RNA, 19 nt, Artificial Sequence
  Description of Artificial Sequence: Synthetic oligonucleotide
aguagacugguggggccua

SEQ ID NO: 55567 - RNA, 19 nt, Artificial Sequence
  Description of Artificial Sequence: Synthetic oligonucleotide
augagaaacuuuuugaauu

SEQ ID NO: 55568 - RNA, 19 nt, Artificial Sequence
  Description of Artificial Sequence: Synthetic oligonucleotide
auugugaaagaagguuggg

SEQ ID NO: 55569 - RNA, 19 nt, Artificial Sequence
  Description of Artificial Sequence: Synthetic oligonucleotide
auuuugaugaagaauuuac

SEQ ID NO: 55570 - RNA, 19 nt, Artificial Sequence
  Description of Artificial Sequence: Synthetic oligonucleotide
caugagaaacuuuuugaau

SEQ ID NO: 55571 - RNA, 19 nt, Artificial Sequence
  Description of Artificial Sequence: Synthetic oligonucleotide
cuagauauuuugaugaaga

SEQ ID NO: 55572 - RNA, 19 nt, Artificial Sequence
  Description of Artificial Sequence: Synthetic oligonucleotide
guagacugguggggccuag

SEQ ID NO: 55573 - RNA, 19 nt, Artificial Sequence
  Description of Artificial Sequence: Synthetic oligonucleotide
uauuuugaugaagaauuua

SEQ ID NO: 55574 - RNA, 19 nt, Artificial Sequence
  Description of Artificial Sequence: Synthetic oligonucleotide
uagacugguggggccuagg

SEQ ID NO: 55575 - RNA, 19 nt, Artificial Sequence
  Description of Artificial Sequence: Synthetic oligonucleotide
uugugaaagaagguugggu

SEQ ID NO: 55576 - RNA, 19 nt, Artificial Sequence
  Description of Artificial Sequence: Synthetic oligonucleotide
aaugccaguuaaugaaaac

SEQ ID NO: 55577 - RNA, 19 nt, Artificial Sequence
  Description of Artificial Sequence: Synthetic oligonucleotide
acuauggccgagcaguaga

SEQ ID NO: 55578 - RNA, 19 nt, Artificial Sequence
  Description of Artificial Sequence: Synthetic oligonucleotide
auggccgagcaguagacug

SEQ ID NO: 55579 - RNA, 19 nt, Artificial Sequence
  Description of Artificial Sequence: Synthetic oligonucleotide
caaaaugccaguuaaugaa

SEQ ID NO: 55580 - RNA, 19 nt, Artificial Sequence
  Description of Artificial Sequence: Synthetic oligonucleotide
cguuucuauggugcagaaa

SEQ ID NO: 55581 - RNA, 19 nt, Artificial Sequence
  Description of Artificial Sequence: Synthetic oligonucleotide
cuauggccgagcaguagac

SEQ ID NO: 55582 - RNA, 19 nt, Artificial Sequence
  Description of Artificial Sequence: Synthetic oligonucleotide
cuccagaggaaagggaaga

SEQ ID NO: 55583 - RNA, 19 nt, Artificial Sequence
  Description of Artificial Sequence: Synthetic oligonucleotide
gcaaaaugccaguuaauga

SEQ ID NO: 55584 - RNA, 19 nt, Artificial Sequence
  Description of Artificial Sequence: Synthetic oligonucleotide
agaaagaagucauuauugc

SEQ ID NO: 55585 - RNA, 19 nt, Artificial Sequence
  Description of Artificial Sequence: Synthetic oligonucleotide
agauaaugacuauggccga

SEQ ID NO: 55586 - RNA, 19 nt, Artificial Sequence
  Description of Artificial Sequence: Synthetic oligonucleotide
agaagauaaugacuauggc

SEQ ID NO: 55587 - RNA, 19 nt, Artificial Sequence
  Description of Artificial Sequence: Synthetic oligonucleotide
guuucuauggugcagaaau

SEQ ID NO: 55588 - RNA, 19 nt, Artificial Sequence
  Description of Artificial Sequence: Synthetic oligonucleotide
uuucuauggugcagaaauu

SEQ ID NO: 55589 - RNA, 19 nt, Artificial Sequence
  Description of Artificial Sequence: Synthetic oligonucleotide
uauggccgagcaguagacu

SEQ ID NO: 55590 - RNA, 19 nt, Artificial Sequence
  Description of Artificial Sequence: Synthetic oligonucleotide
ugacuauggccgagcagua

SEQ ID NO: 55591 - RNA, 19 nt, Artificial Sequence
  Description of Artificial Sequence: Synthetic oligonucleotide
ugcagaaauugucucugcc

SEQ ID NO: 55592 - RNA, 19 nt, Artificial Sequence
  Description of Artificial Sequence: Synthetic oligonucleotide
uagaagauaaugacuaugg

SEQ ID NO: 55593 - RNA, 19 nt, Artificial Sequence
  Description of Artificial Sequence: Synthetic oligonucleotide
uggccgagcaguagacugg

SEQ ID NO: 55594 - RNA, 19 nt, Artificial Sequence
  Description of Artificial Sequence: Synthetic oligonucleotide
aagaucacagacuucgggc

SEQ ID NO: 55595 - RNA, 19 nt, Artificial Sequence
  Description of Artificial Sequence: Synthetic oligonucleotide
aagauccucaagaaggaag

SEQ ID NO: 55596 - RNA, 19 nt, Artificial Sequence
  Description of Artificial Sequence: Synthetic oligonucleotide
aagccccaggucacgucgg

SEQ ID NO: 55597 - RNA, 19 nt, Artificial Sequence
  Description of Artificial Sequence: Synthetic oligonucleotide
aaggacggugccaccauga

SEQ ID NO: 55598 - RNA, 19 nt, Artificial Sequence
  Description of Artificial Sequence: Synthetic oligonucleotide
aaggagaaggccacaggcc

SEQ ID NO: 55599 - RNA, 19 nt, Artificial Sequence
  Description of Artificial Sequence: Synthetic oligonucleotide
aaguacucuuuccagaccc

SEQ ID NO: 55600 - RNA, 19 nt, Artificial Sequence
  Description of Artificial Sequence: Synthetic oligonucleotide
acacucaccgagaaccgcg

SEQ ID NO: 55601 - RNA, 19 nt, Artificial Sequence
  Description of Artificial Sequence: Synthetic oligonucleotide
accaugaagaccuuuugcg

SEQ ID NO: 55602 - RNA, 19 nt, Artificial Sequence
  Description of Artificial Sequence: Synthetic oligonucleotide
accgagaaccgcguccugc

SEQ ID NO: 55603 - RNA, 19 nt, Artificial Sequence
  Description of Artificial Sequence: Synthetic oligonucleotide
acgggcacauuaagaucac

SEQ ID NO: 55604 - RNA, 19 nt, Artificial Sequence
  Description of Artificial Sequence: Synthetic oligonucleotide
acuacggccgugcagugga

SEQ ID NO: 55605 - RNA, 19 nt, Artificial Sequence
  Description of Artificial Sequence: Synthetic oligonucleotide
acucuuuccagacccacga

SEQ ID NO: 55606 - RNA, 19 nt, Artificial Sequence
  Description of Artificial Sequence: Synthetic oligonucleotide
agaaccgcguccugcagaa

SEQ ID NO: 55607 - RNA, 19 nt, Artificial Sequence
  Description of Artificial Sequence: Synthetic oligonucleotide
agaggcuuggcgggggcuc

SEQ ID NO: 55608 - RNA, 19 nt, Artificial Sequence
  Description of Artificial Sequence: Synthetic oligonucleotide
agaucacagacuucgggcu

SEQ ID NO: 55609 - RNA, 19 nt, Artificial Sequence
  Description of Artificial Sequence: Synthetic oligonucleotide
agauccucaagaaggaagu

SEQ ID NO: 55610 - RNA, 19 nt, Artificial Sequence
  Description of Artificial Sequence: Synthetic oligonucleotide
agccccaggucacgucgga

SEQ ID NO: 55611 - RNA, 19 nt, Artificial Sequence
  Description of Artificial Sequence: Synthetic oligonucleotide
aggaccgggcccgcuucua

SEQ ID NO: 55612 - RNA, 19 nt, Artificial Sequence
  Description of Artificial Sequence: Synthetic oligonucleotide
aggacggugccaccaugaa

SEQ ID NO: 55613 - RNA, 19 nt, Artificial Sequence
  Description of Artificial Sequence: Synthetic oligonucleotide
aggagcgggaggaguggac

SEQ ID NO: 55614 - RNA, 19 nt, Artificial Sequence
  Description of Artificial Sequence: Synthetic oligonucleotide
aguacucuuuccagaccca

SEQ ID NO: 55615 - RNA, 19 nt, Artificial Sequence
  Description of Artificial Sequence: Synthetic oligonucleotide
agucaucguggccaaggac

SEQ ID NO: 55616 - RNA, 19 nt, Artificial Sequence
  Description of Artificial Sequence: Synthetic oligonucleotide
aucaaggacggugccacca

SEQ ID NO: 55617 - RNA, 19 nt, Artificial Sequence
  Description of Artificial Sequence: Synthetic oligonucleotide
auccucaagaaggaaguca

SEQ ID NO: 55618 - RNA, 19 nt, Artificial Sequence
  Description of Artificial Sequence: Synthetic oligonucleotide
augaagauccucaagaagg

SEQ ID NO: 55619 - RNA, 19 nt, Artificial Sequence
  Description of Artificial Sequence: Synthetic oligonucleotide
augcuggacaaggacgggc

SEQ ID NO: 55620 - RNA, 19 nt, Artificial Sequence
  Description of Artificial Sequence: Synthetic oligonucleotide
auggcgcugagauuguguc

SEQ ID NO: 55621 - RNA, 19 nt, Artificial Sequence
  Description of Artificial Sequence: Synthetic oligonucleotide
auuaagaucacagacuucg

SEQ ID NO: 55622 - RNA, 19 nt, Artificial Sequence
  Description of Artificial Sequence: Synthetic oligonucleotide
caagccccaggucacgucg

SEQ ID NO: 55623 - RNA, 19 nt, Artificial Sequence
  Description of Artificial Sequence: Synthetic oligonucleotide
caaggacggugccaccaug

SEQ ID NO: 55624 - RNA, 19 nt, Artificial Sequence
  Description of Artificial Sequence: Synthetic oligonucleotide
cacacucaccgagaaccgc

SEQ ID NO: 55625 - RNA, 19 nt, Artificial Sequence
  Description of Artificial Sequence: Synthetic oligonucleotide
caccaugaagaccuuuugc

SEQ ID NO: 55626 - RNA, 19 nt, Artificial Sequence
  Description of Artificial Sequence: Synthetic oligonucleotide
caccgagaaccgcguccug

SEQ ID NO: 55627 - RNA, 19 nt, Artificial Sequence
  Description of Artificial Sequence: Synthetic oligonucleotide
cacucaccgagaaccgcgu

SEQ ID NO: 55628 - RNA, 19 nt, Artificial Sequence
  Description of Artificial Sequence: Synthetic oligonucleotide
cagaggcuuggcgggggcu

SEQ ID NO: 55629 - RNA, 19 nt, Artificial Sequence
  Description of Artificial Sequence: Synthetic oligonucleotide
caugcuggacaaggacggg

SEQ ID NO: 55630 - RNA, 19 nt, Artificial Sequence
  Description of Artificial Sequence: Synthetic oligonucleotide
cauuaagaucacagacuuc

SEQ ID NO: 55631 - RNA, 19 nt, Artificial Sequence
  Description of Artificial Sequence: Synthetic oligonucleotide
ccaucacaccaccugacca

SEQ ID NO: 55632 - RNA, 19 nt, Artificial Sequence
  Description of Artificial Sequence: Synthetic oligonucleotide
ccaugaagaccuuuugcgg

SEQ ID NO: 55633 - RNA, 19 nt, Artificial Sequence
  Description of Artificial Sequence: Synthetic oligonucleotide
cccacccuucaagccccag

SEQ ID NO: 55634 - RNA, 19 nt, Artificial Sequence
  Description of Artificial Sequence: Synthetic oligonucleotide
ccgagaaccgcguccugca

SEQ ID NO: 55635 - RNA, 19 nt, Artificial Sequence
  Description of Artificial Sequence: Synthetic oligonucleotide
ccucaagaaggaagucauc

SEQ ID NO: 55636 - RNA, 19 nt, Artificial Sequence
  Description of Artificial Sequence: Synthetic oligonucleotide
ccucacagcccugaaguac

SEQ ID NO: 55637 - RNA, 19 nt, Artificial Sequence
  Description of Artificial Sequence: Synthetic oligonucleotide
ccugaguaccuggcccccg

SEQ ID NO: 55638 - RNA, 19 nt, Artificial Sequence
  Description of Artificial Sequence: Synthetic oligonucleotide
cgagaaccgcguccugcag

SEQ ID NO: 55639 - RNA, 19 nt, Artificial Sequence
  Description of Artificial Sequence: Synthetic oligonucleotide
cgccaugaagauccucaag

SEQ ID NO: 55640 - RNA, 19 nt, Artificial Sequence
  Description of Artificial Sequence: Synthetic oligonucleotide
cggcaaggugauccuggug

SEQ ID NO: 55641 - RNA, 19 nt, Artificial Sequence
  Description of Artificial Sequence: Synthetic oligonucleotide
cggccgugcaguggacugg

SEQ ID NO: 55642 - RNA, 19 nt, Artificial Sequence
  Description of Artificial Sequence: Synthetic oligonucleotide
cucaccgagaaccgcgucc

SEQ ID NO: 55643 - RNA, 19 nt, Artificial Sequence
  Description of Artificial Sequence: Synthetic oligonucleotide
cucuuuccagacccacgac

SEQ ID NO: 55644 - RNA, 19 nt, Artificial Sequence
  Description of Artificial Sequence: Synthetic oligonucleotide
cugaagagauggagguguc

SEQ ID NO: 55645 - RNA, 19 nt, Artificial Sequence
  Description of Artificial Sequence: Synthetic oligonucleotide
cugaaguacucuuuccaga

SEQ ID NO: 55646 - RNA, 19 nt, Artificial Sequence
  Description of Artificial Sequence: Synthetic oligonucleotide
cugaguaccuggcccccga

SEQ ID NO: 55647 - RNA, 19 nt, Artificial Sequence
  Description of Artificial Sequence: Synthetic oligonucleotide
cuggacaaggacgggcaca

SEQ ID NO: 55648 - RNA, 19 nt, Artificial Sequence
  Description of Artificial Sequence: Synthetic oligonucleotide
cuuucagggcugcucaaga

SEQ ID NO: 55649 - RNA, 19 nt, Artificial Sequence
  Description of Artificial Sequence: Synthetic oligonucleotide
gaaccgcguccugcagaac

SEQ ID NO: 55650 - RNA, 19 nt, Artificial Sequence
  Description of Artificial Sequence: Synthetic oligonucleotide
gaacgugguguaccgggac

SEQ ID NO: 55651 - RNA, 19 nt, Artificial Sequence
  Description of Artificial Sequence: Synthetic oligonucleotide
gaagauccucaagaaggaa

SEQ ID NO: 55652 - RNA, 19 nt, Artificial Sequence
  Description of Artificial Sequence: Synthetic oligonucleotide
gaaggagaaggccacaggc

SEQ ID NO: 55653 - RNA, 19 nt, Artificial Sequence
  Description of Artificial Sequence: Synthetic oligonucleotide
gaccgggcccgcuucuaug

SEQ ID NO: 55654 - RNA, 19 nt, Artificial Sequence
  Description of Artificial Sequence: Synthetic oligonucleotide
gacgggcacauuaagauca

SEQ ID NO: 55655 - RNA, 19 nt, Artificial Sequence
  Description of Artificial Sequence: Synthetic oligonucleotide
gacuacggccgugcagugg

SEQ ID NO: 55656 - RNA, 19 nt, Artificial Sequence
  Description of Artificial Sequence: Synthetic oligonucleotide
gagaaccgcguccugcaga

SEQ ID NO: 55657 - RNA, 19 nt, Artificial Sequence
  Description of Artificial Sequence: Synthetic oligonucleotide
gaggaccgggcccgcuucu

SEQ ID NO: 55658 - RNA, 19 nt, Artificial Sequence
  Description of Artificial Sequence: Synthetic oligonucleotide
gaggcuuggcgggggcucc

SEQ ID NO: 55659 - RNA, 19 nt, Artificial Sequence
  Description of Artificial Sequence: Synthetic oligonucleotide
gauccucaagaaggaaguc

SEQ ID NO: 55660 - RNA, 19 nt, Artificial Sequence
  Description of Artificial Sequence: Synthetic oligonucleotide
gauccuggugaaggagaag

SEQ ID NO: 55661 - RNA, 19 nt, Artificial Sequence
  Description of Artificial Sequence: Synthetic oligonucleotide
gcaagggcacuuucggcaa

SEQ ID NO: 55662 - RNA, 19 nt, Artificial Sequence
  Description of Artificial Sequence: Synthetic oligonucleotide
gccccaggucacgucggag

SEQ ID NO: 55663 - RNA, 19 nt, Artificial Sequence
  Description of Artificial Sequence: Synthetic oligonucleotide
gcuggacaaggacgggcac

SEQ ID NO: 55664 - RNA, 19 nt, Artificial Sequence
  Description of Artificial Sequence: Synthetic oligonucleotide
ggcaagggcacuuucggca

SEQ ID NO: 55665 - RNA, 19 nt, Artificial Sequence
  Description of Artificial Sequence: Synthetic oligonucleotide
ggcccacacacucaccgag

SEQ ID NO: 55666 - RNA, 19 nt, Artificial Sequence
  Description of Artificial Sequence: Synthetic oligonucleotide
ggcugaagagauggaggug

SEQ ID NO: 55667 - RNA, 19 nt, Artificial Sequence
  Description of Artificial Sequence: Synthetic oligonucleotide
ggggguggccaucccuggg

SEQ ID NO: 55668 - RNA, 19 nt, Artificial Sequence
  Description of Artificial Sequence: Synthetic oligonucleotide
ggugaaggagaaggccaca

SEQ ID NO: 55669 - RNA, 19 nt, Artificial Sequence
  Description of Artificial Sequence: Synthetic oligonucleotide
guacucuuuccagacccac

SEQ ID NO: 55670 - RNA, 19 nt, Artificial Sequence
  Description of Artificial Sequence: Synthetic oligonucleotide
gucaucgaacgcaccuucc

SEQ ID NO: 55671 - RNA, 19 nt, Artificial Sequence
  Description of Artificial Sequence: Synthetic oligonucleotide
gucaucguggccaaggacg

SEQ ID NO: 55672 - RNA, 19 nt, Artificial Sequence
  Description of Artificial Sequence: Synthetic oligonucleotide
gugaaggagaaggccacag

SEQ ID NO: 55673 - RNA, 19 nt, Artificial Sequence
  Description of Artificial Sequence: Synthetic oligonucleotide
gugaccaugaacgaguuug

SEQ ID NO: 55674 - RNA, 19 nt, Artificial Sequence
  Description of Artificial Sequence: Synthetic oligonucleotide
gugauccuggugaaggaga

SEQ ID NO: 55675 - RNA, 19 nt, Artificial Sequence
  Description of Artificial Sequence: Synthetic oligonucleotide
guggcccacacacucaccg

SEQ ID NO: 55676 - RNA, 19 nt, Artificial Sequence
  Description of Artificial Sequence: Synthetic oligonucleotide
uacggccgugcaguggacu

SEQ ID NO: 55677 - RNA, 19 nt, Artificial Sequence
  Description of Artificial Sequence: Synthetic oligonucleotide
uacucuuuccagacccacg

SEQ ID NO: 55678 - RNA, 19 nt, Artificial Sequence
  Description of Artificial Sequence: Synthetic oligonucleotide
uauggcgcugagauugugu

SEQ ID NO: 55679 - RNA, 19 nt, Artificial Sequence
  Description of Artificial Sequence: Synthetic oligonucleotide
ucaaggacggugccaccau

SEQ ID NO: 55680 - RNA, 19 nt, Artificial Sequence
  Description of Artificial Sequence: Synthetic oligonucleotide
ucagggcugcucaagaagg

SEQ ID NO: 55681 - RNA, 19 nt, Artificial Sequence
  Description of Artificial Sequence: Synthetic oligonucleotide
ucaucgaacgcaccuucca

SEQ ID NO: 55682 - RNA, 19 nt, Artificial Sequence
  Description of Artificial Sequence: Synthetic oligonucleotide
ucaucguggccaaggacga

SEQ ID NO: 55683 - RNA, 19 nt, Artificial Sequence
  Description of Artificial Sequence: Synthetic oligonucleotide
uccucaagaaggaagucau

SEQ ID NO: 55684 - RNA, 19 nt, Artificial Sequence
  Description of Artificial Sequence: Synthetic oligonucleotide
ucggcaaggugauccuggu

SEQ ID NO: 55685 - RNA, 19 nt, Artificial Sequence
  Description of Artificial Sequence: Synthetic oligonucleotide
ugaagauccucaagaagga

SEQ ID NO: 55686 - RNA, 19 nt, Artificial Sequence
  Description of Artificial Sequence: Synthetic oligonucleotide
ugaaggagaaggccacagg

SEQ ID NO: 55687 - RNA, 19 nt, Artificial Sequence
  Description of Artificial Sequence: Synthetic oligonucleotide
ugaaguacucuuuccagac

SEQ ID NO: 55688 - RNA, 19 nt, Artificial Sequence
  Description of Artificial Sequence: Synthetic oligonucleotide
ugaccaugaacgaguuuga

SEQ ID NO: 55689 - RNA, 19 nt, Artificial Sequence
  Description of Artificial Sequence: Synthetic oligonucleotide
ugacuacggccgugcagug

SEQ ID NO: 55690 - RNA, 19 nt, Artificial Sequence
  Description of Artificial Sequence: Synthetic oligonucleotide
ugcuggacaaggacgggca

SEQ ID NO: 55691 - RNA, 19 nt, Artificial Sequence
  Description of Artificial Sequence: Synthetic oligonucleotide
ugcuuucagggcugcucaa

SEQ ID NO: 55692 - RNA, 19 nt, Artificial Sequence
  Description of Artificial Sequence: Synthetic oligonucleotide
uggacaaggacgggcacau

SEQ ID NO: 55693 - RNA, 19 nt, Artificial Sequence
  Description of Artificial Sequence: Synthetic oligonucleotide
uggaccacugucaucgaac

SEQ ID NO: 55694 - RNA, 19 nt, Artificial Sequence
  Description of Artificial Sequence: Synthetic oligonucleotide
uggcccacacacucaccga

SEQ ID NO: 55695 - RNA, 19 nt, Artificial Sequence
  Description of Artificial Sequence: Synthetic oligonucleotide
uguggggguggccaucccu

SEQ ID NO: 55696 - RNA, 19 nt, Artificial Sequence
  Description of Artificial Sequence: Synthetic oligonucleotide
uuaagaucacagacuucgg

SEQ ID NO: 55697 - RNA, 19 nt, Artificial Sequence
  Description of Artificial Sequence: Synthetic oligonucleotide
uucaaaaaaaaaaaaaaaa

SEQ ID NO: 55698 - RNA, 19 nt, Artificial Sequence
  Description of Artificial Sequence: Synthetic oligonucleotide
uucagggcugcucaagaag

SEQ ID NO: 55699 - RNA, 19 nt, Artificial Sequence
  Description of Artificial Sequence: Synthetic oligonucleotide
uucggcaaggugauccugg

SEQ ID NO: 55700 - RNA, 19 nt, Artificial Sequence
  Description of Artificial Sequence: Synthetic oligonucleotide
aaggacgagguggcccaca

SEQ ID NO: 55701 - RNA, 19 nt, Artificial Sequence
  Description of Artificial Sequence: Synthetic oligonucleotide
accagguauuuugaugagg

SEQ ID NO: 55702 - RNA, 19 nt, Artificial Sequence
  Description of Artificial Sequence: Synthetic oligonucleotide
aggacgagguggcccacac

SEQ ID NO: 55703 - RNA, 19 nt, Artificial Sequence
  Description of Artificial Sequence: Synthetic oligonucleotide
augaagaccuuuugcggca

SEQ ID NO: 55704 - RNA, 19 nt, Artificial Sequence
  Description of Artificial Sequence: Synthetic oligonucleotide
augagaagcuuuuugagcu

SEQ ID NO: 55705 - RNA, 19 nt, Artificial Sequence
  Description of Artificial Sequence: Synthetic oligonucleotide
auugugucagcccuggacu

SEQ ID NO: 55706 - RNA, 19 nt, Artificial Sequence
  Description of Artificial Sequence: Synthetic oligonucleotide
auuuugaugaggaguucac

SEQ ID NO: 55707 - RNA, 19 nt, Artificial Sequence
  Description of Artificial Sequence: Synthetic oligonucleotide
caacaacuucucuguggcg

SEQ ID NO: 55708 - RNA, 19 nt, Artificial Sequence
  Description of Artificial Sequence: Synthetic oligonucleotide
caugaagaccuuuugcggc

SEQ ID NO: 55709 - RNA, 19 nt, Artificial Sequence
  Description of Artificial Sequence: Synthetic oligonucleotide
caugagaagcuuuuugagc

SEQ ID NO: 55710 - RNA, 19 nt, Artificial Sequence
  Description of Artificial Sequence: Synthetic oligonucleotide
ccagguauuuugaugagga

SEQ ID NO: 55711 - RNA, 19 nt, Artificial Sequence
  Description of Artificial Sequence: Synthetic oligonucleotide
ccuugcuuucagggcugcu

SEQ ID NO: 55712 - RNA, 19 nt, Artificial Sequence
  Description of Artificial Sequence: Synthetic oligonucleotide
gcuccccucaacaacuucu

SEQ ID NO: 55713 - RNA, 19 nt, Artificial Sequence
  Description of Artificial Sequence: Synthetic oligonucleotide
gggagcguguguucuccga

SEQ ID NO: 55714 - RNA, 19 nt, Artificial Sequence
  Description of Artificial Sequence: Synthetic oligonucleotide
gguguaccgggaccucaag

SEQ ID NO: 55715 - RNA, 19 nt, Artificial Sequence
  Description of Artificial Sequence: Synthetic oligonucleotide
guguucuccgaggaccggg

SEQ ID NO: 55716 - RNA, 19 nt, Artificial Sequence
  Description of Artificial Sequence: Synthetic oligonucleotide
uauuuugaugaggaguuca

SEQ ID NO: 55717 - RNA, 19 nt, Artificial Sequence
  Description of Artificial Sequence: Synthetic oligonucleotide
uccuugcuuucagggcugc

SEQ ID NO: 55718 - RNA, 19 nt, Artificial Sequence
  Description of Artificial Sequence: Synthetic oligonucleotide
ugaagaccuuuugcggcac

SEQ ID NO: 55719 - RNA, 19 nt, Artificial Sequence
  Description of Artificial Sequence: Synthetic oligonucleotide
ugguguaccgggaccucaa

SEQ ID NO: 55720 - RNA, 19 nt, Artificial Sequence
  Description of Artificial Sequence: Synthetic oligonucleotide
uguucuccgaggaccgggc

SEQ ID NO: 55721 - RNA, 19 nt, Artificial Sequence
  Description of Artificial Sequence: Synthetic oligonucleotide
uugcuuucagggcugcuca

SEQ ID NO: 55722 - RNA, 19 nt, Artificial Sequence
  Description of Artificial Sequence: Synthetic oligonucleotide
uugugucagcccuggacua

SEQ ID NO: 55723 - RNA, 19 nt, Artificial Sequence
  Description of Artificial Sequence: Synthetic oligonucleotide
aaaccucaggucacguccg

SEQ ID NO: 55724 - RNA, 19 nt, Artificial Sequence
  Description of Artificial Sequence: Synthetic oligonucleotide
aaguaugccuuccagaccc

SEQ ID NO: 55725 - RNA, 19 nt, Artificial Sequence
  Description of Artificial Sequence: Synthetic oligonucleotide
aagucccugcuugcugggc

SEQ ID NO: 55726 - RNA, 19 nt, Artificial Sequence
  Description of Artificial Sequence: Synthetic oligonucleotide
acaaccaggaccacgagcg

SEQ ID NO: 55727 - RNA, 19 nt, Artificial Sequence
  Description of Artificial Sequence: Synthetic oligonucleotide
accuuccacguggauucuc

SEQ ID NO: 55728 - RNA, 19 nt, Artificial Sequence
  Description of Artificial Sequence: Synthetic oligonucleotide
ccgcugccgcugccggcgc

SEQ ID NO: 55729 - RNA, 19 nt, Artificial Sequence
  Description of Artificial Sequence: Synthetic oligonucleotide
auggccacaucaagaucac

SEQ ID NO: 55730 - RNA, 19 nt, Artificial Sequence
  Description of Artificial Sequence: Synthetic oligonucleotide
acgugguauaccgcgacau

SEQ ID NO: 55731 - RNA, 19 nt, Artificial Sequence
  Description of Artificial Sequence: Synthetic oligonucleotide
augccuuccagacccacga

SEQ ID NO: 55732 - RNA, 19 nt, Artificial Sequence
  Description of Artificial Sequence: Synthetic oligonucleotide
ggaaggaagucaucauugc

SEQ ID NO: 55733 - RNA, 19 nt, Artificial Sequence
  Description of Artificial Sequence: Synthetic oligonucleotide
cgccgccgccgcugccgcu

SEQ ID NO: 55734 - RNA, 19 nt, Artificial Sequence
  Description of Artificial Sequence: Synthetic oligonucleotide
agaggcuugguggggggcc

SEQ ID NO: 55735 - RNA, 19 nt, Artificial Sequence
  Description of Artificial Sequence: Synthetic oligonucleotide
aaccucaggucacguccga

SEQ ID NO: 55736 - RNA, 19 nt, Artificial Sequence
  Description of Artificial Sequence: Synthetic oligonucleotide
agaggccgcgacccaacac

SEQ ID NO: 55737 - RNA, 19 nt, Artificial Sequence
  Description of Artificial Sequence: Synthetic oligonucleotide
aguaugccuuccagaccca

SEQ ID NO: 55738 - RNA, 19 nt, Artificial Sequence
  Description of Artificial Sequence: Synthetic oligonucleotide
agucccugcuugcugggcu

SEQ ID NO: 55739 - RNA, 19 nt, Artificial Sequence
  Description of Artificial Sequence: Synthetic oligonucleotide
acggcuccuucauugggua

SEQ ID NO: 55740 - RNA, 19 nt, Artificial Sequence
  Description of Artificial Sequence: Synthetic oligonucleotide
aucaagaucacugacuuug

SEQ ID NO: 55741 - RNA, 19 nt, Artificial Sequence
  Description of Artificial Sequence: Synthetic oligonucleotide
caaaccucaggucacgucc

SEQ ID NO: 55742 - RNA, 19 nt, Artificial Sequence
  Description of Artificial Sequence: Synthetic oligonucleotide
caaggaggucauggagcac

SEQ ID NO: 55743 - RNA, 19 nt, Artificial Sequence
  Description of Artificial Sequence: Synthetic oligonucleotide
caagucccugcuugcuggg

SEQ ID NO: 55744 - RNA, 19 nt, Artificial Sequence
  Description of Artificial Sequence: Synthetic oligonucleotide
cagaggcuugguggggggc

SEQ ID NO: 55745 - RNA, 19 nt, Artificial Sequence
  Description of Artificial Sequence: Synthetic oligonucleotide
caucaagaucacugacuuu

SEQ ID NO: 55746 - RNA, 19 nt, Artificial Sequence
  Description of Artificial Sequence: Synthetic oligonucleotide
ccaagucccugcuugcugg

SEQ ID NO: 55747 - RNA, 19 nt, Artificial Sequence
  Description of Artificial Sequence: Synthetic oligonucleotide
ccugcugcccugagcuguc

SEQ ID NO: 55748 - RNA, 19 nt, Artificial Sequence
  Description of Artificial Sequence: Synthetic oligonucleotide
cccuuaaacaacuucuccg

SEQ ID NO: 55749 - RNA, 19 nt, Artificial Sequence
  Description of Artificial Sequence: Synthetic oligonucleotide
ccuuaaacaacuucuccgu

SEQ ID NO: 55750 - RNA, 19 nt, Artificial Sequence
  Description of Artificial Sequence: Synthetic oligonucleotide
ccuuccacguggauucucc

SEQ ID NO: 55751 - RNA, 19 nt, Artificial Sequence
  Description of Artificial Sequence: Synthetic oligonucleotide
cccugcuugcugggcugcu

SEQ ID NO: 55752 - RNA, 19 nt, Artificial Sequence
  Description of Artificial Sequence: Synthetic oligonucleotide
cguggugaauacaucaaga

SEQ ID NO: 55753 - RNA, 19 nt, Artificial Sequence
  Description of Artificial Sequence: Synthetic oligonucleotide
cgcugccgcugccggcgcc

SEQ ID NO: 55754 - RNA, 19 nt, Artificial Sequence
  Description of Artificial Sequence: Synthetic oligonucleotide
uggcaaagucauccuggug

SEQ ID NO: 55755 - RNA, 19 nt, Artificial Sequence
  Description of Artificial Sequence: Synthetic oligonucleotide
cgacccaacaccuuuguca

SEQ ID NO: 55756 - RNA, 19 nt, Artificial Sequence
  Description of Artificial Sequence: Synthetic oligonucleotide
aggccgcgacccaacaccu

SEQ ID NO: 55757 - RNA, 19 nt, Artificial Sequence
  Description of Artificial Sequence: Synthetic oligonucleotide
caggagcucaggcuggaga

SEQ ID NO: 55758 - RNA, 19 nt, Artificial Sequence
  Description of Artificial Sequence: Synthetic oligonucleotide
cgcgacaucaagcuggaaa

SEQ ID NO: 55759 - RNA, 19 nt, Artificial Sequence
  Description of Artificial Sequence: Synthetic oligonucleotide
cgugguauaccgcgacauc

SEQ ID NO: 55760 - RNA, 19 nt, Artificial Sequence
  Description of Artificial Sequence: Synthetic oligonucleotide
cccccuuaaacaacuucuc

SEQ ID NO: 55761 - RNA, 19 nt, Artificial Sequence
  Description of Artificial Sequence: Synthetic oligonucleotide
ugccuuccagacccacgac

SEQ ID NO: 55762 - RNA, 19 nt, Artificial Sequence
  Description of Artificial Sequence: Synthetic oligonucleotide
cugaggagauggaaguggc

SEQ ID NO: 55763 - RNA, 19 nt, Artificial Sequence
  Description of Artificial Sequence: Synthetic oligonucleotide
cugaaguaugccuuccaga

SEQ ID NO: 55764 - RNA, 19 nt, Artificial Sequence
  Description of Artificial Sequence: Synthetic oligonucleotide
cucugcaaagagggcauca

SEQ ID NO: 55765 - RNA, 19 nt, Artificial Sequence
  Description of Artificial Sequence: Synthetic oligonucleotide
ggacgugguauaccgcgac

SEQ ID NO: 55766 - RNA, 19 nt, Artificial Sequence
  Description of Artificial Sequence: Synthetic oligonucleotide
gaaguaugccuuccagacc

SEQ ID NO: 55767 - RNA, 19 nt, Artificial Sequence
  Description of Artificial Sequence: Synthetic oligonucleotide
gccgcugccgcugccggcg

SEQ ID NO: 55768 - RNA, 19 nt, Artificial Sequence
  Description of Artificial Sequence: Synthetic oligonucleotide
gauggccacaucaagauca

SEQ ID NO: 55769 - RNA, 19 nt, Artificial Sequence
  Description of Artificial Sequence: Synthetic oligonucleotide
gagaggccgcgacccaaca

SEQ ID NO: 55770 - RNA, 19 nt, Artificial Sequence
  Description of Artificial Sequence: Synthetic oligonucleotide
gaggcuugguggggggccc

SEQ ID NO: 55771 - RNA, 19 nt, Artificial Sequence
  Description of Artificial Sequence: Synthetic oligonucleotide
guggugaauacaucaagac

SEQ ID NO: 55772 - RNA, 19 nt, Artificial Sequence
  Description of Artificial Sequence: Synthetic oligonucleotide
gacggcuccuucauugggu

SEQ ID NO: 55773 - RNA, 19 nt, Artificial Sequence
  Description of Artificial Sequence: Synthetic oligonucleotide
gcaagggaaccuuuggcaa

SEQ ID NO: 55774 - RNA, 19 nt, Artificial Sequence
  Description of Artificial Sequence: Synthetic oligonucleotide
ccacaucaagaucacugac

SEQ ID NO: 55775 - RNA, 19 nt, Artificial Sequence
  Description of Artificial Sequence: Synthetic oligonucleotide
gccaagucccugcuugcug

SEQ ID NO: 55776 - RNA, 19 nt, Artificial Sequence
  Description of Artificial Sequence: Synthetic oligonucleotide
accucaggucacguccgag

SEQ ID NO: 55777 - RNA, 19 nt, Artificial Sequence
  Description of Artificial Sequence: Synthetic oligonucleotide
gccgcgacccaacaccuuu

SEQ ID NO: 55778 - RNA, 19 nt, Artificial Sequence
  Description of Artificial Sequence: Synthetic oligonucleotide
gaggccgcgacccaacacc

SEQ ID NO: 55779 - RNA, 19 nt, Artificial Sequence
  Description of Artificial Sequence: Synthetic oligonucleotide
cgacaucaagcuggaaaac

SEQ ID NO: 55780 - RNA, 19 nt, Artificial Sequence
  Description of Artificial Sequence: Synthetic oligonucleotide
ugacggggccaccaugaaa

SEQ ID NO: 55781 - RNA, 19 nt, Artificial Sequence
  Description of Artificial Sequence: Synthetic oligonucleotide
ggcaagggaaccuuuggca

SEQ ID NO: 55782 - RNA, 19 nt, Artificial Sequence
  Description of Artificial Sequence: Synthetic oligonucleotide
ggcaaagucauccuggugc

SEQ ID NO: 55783 - RNA, 19 nt, Artificial Sequence
  Description of Artificial Sequence: Synthetic oligonucleotide
gccacaucaagaucacuga

SEQ ID NO: 55784 - RNA, 19 nt, Artificial Sequence
  Description of Artificial Sequence: Synthetic oligonucleotide
ggccaagucccugcuugcu

SEQ ID NO: 55785 - RNA, 19 nt, Artificial Sequence
  Description of Artificial Sequence: Synthetic oligonucleotide
gacccaacaccuuugucau

SEQ ID NO: 55786 - RNA, 19 nt, Artificial Sequence
  Description of Artificial Sequence: Synthetic oligonucleotide
gcgacaucaagcuggaaaa

SEQ ID NO: 55787 - RNA, 19 nt, Artificial Sequence
  Description of Artificial Sequence: Synthetic oligonucleotide
ggccacaucaagaucacug

SEQ ID NO: 55788 - RNA, 19 nt, Artificial Sequence
  Description of Artificial Sequence: Synthetic oligonucleotide
gguauaccgcgacaucaag

SEQ ID NO: 55789 - RNA, 19 nt, Artificial Sequence
  Description of Artificial Sequence: Synthetic oligonucleotide
auaccgcgacaucaagcug

SEQ ID NO: 55790 - RNA, 19 nt, Artificial Sequence
  Description of Artificial Sequence: Synthetic oligonucleotide
guaugccuuccagacccac

SEQ ID NO: 55791 - RNA, 19 nt, Artificial Sequence
  Description of Artificial Sequence: Synthetic oligonucleotide
gucccugcuugcugggcug

SEQ ID NO: 55792 - RNA, 19 nt, Artificial Sequence
  Description of Artificial Sequence: Synthetic oligonucleotide
gugaccaugaaugacuucg

SEQ ID NO: 55793 - RNA, 19 nt, Artificial Sequence
  Description of Artificial Sequence: Synthetic oligonucleotide
gugguauaccgcgacauca

SEQ ID NO: 55794 - RNA, 19 nt, Artificial Sequence
  Description of Artificial Sequence: Synthetic oligonucleotide
guauaccgcgacaucaagc

SEQ ID NO: 55795 - RNA, 19 nt, Artificial Sequence
  Description of Artificial Sequence: Synthetic oligonucleotide
uaugccuuccagacccacg

SEQ ID NO: 55796 - RNA, 19 nt, Artificial Sequence
  Description of Artificial Sequence: Synthetic oligonucleotide
uccuacucggccagcaucc

SEQ ID NO: 55797 - RNA, 19 nt, Artificial Sequence
  Description of Artificial Sequence: Synthetic oligonucleotide
ucccugcuugcugggcugc

SEQ ID NO: 55798 - RNA, 19 nt, Artificial Sequence
  Description of Artificial Sequence: Synthetic oligonucleotide
uuggcaaagucauccuggu

SEQ ID NO: 55799 - RNA, 19 nt, Artificial Sequence
  Description of Artificial Sequence: Synthetic oligonucleotide
ugaccaugaaugacuucga

SEQ ID NO: 55800 - RNA, 19 nt, Artificial Sequence
  Description of Artificial Sequence: Synthetic oligonucleotide
cggcuccuucauuggguac

SEQ ID NO: 55801 - RNA, 19 nt, Artificial Sequence
  Description of Artificial Sequence: Synthetic oligonucleotide
ugguauaccgcgacaucaa

SEQ ID NO: 55802 - RNA, 19 nt, Artificial Sequence
  Description of Artificial Sequence: Synthetic oligonucleotide
uauaccgcgacaucaagcu

SEQ ID NO: 55803 - RNA, 19 nt, Artificial Sequence
  Description of Artificial Sequence: Synthetic oligonucleotide
ucaagaucacugacuuugg

SEQ ID NO: 55804 - RNA, 19 nt, Artificial Sequence
  Description of Artificial Sequence: Synthetic oligonucleotide
cucuaaaaauaaaaaaaaa

SEQ ID NO: 55805 - RNA, 19 nt, Artificial Sequence
  Description of Artificial Sequence: Synthetic oligonucleotide
uuuggcaaagucauccugg

SEQ ID NO: 55806 - RNA, 19 nt, Artificial Sequence
  Description of Artificial Sequence: Synthetic oligonucleotide
ucucuaaaaauaaaaaaaa

SEQ ID NO: 55807 - RNA, 19 nt, Artificial Sequence
  Description of Artificial Sequence: Synthetic oligonucleotide
augaaaaccuucuguggga

SEQ ID NO: 55808 - RNA, 19 nt, Artificial Sequence
  Description of Artificial Sequence: Synthetic oligonucleotide
augaugaauuuaccgccca

SEQ ID NO: 55809 - RNA, 19 nt, Artificial Sequence
  Description of Artificial Sequence: Synthetic oligonucleotide
caaugacuauggccgggcc

SEQ ID NO: 55810 - RNA, 19 nt, Artificial Sequence
  Description of Artificial Sequence: Synthetic oligonucleotide
caugaaaaccuucuguggg

SEQ ID NO: 55811 - RNA, 19 nt, Artificial Sequence
  Description of Artificial Sequence: Synthetic oligonucleotide
cauugccaaggaugaaguc

SEQ ID NO: 55812 - RNA, 19 nt, Artificial Sequence
  Description of Artificial Sequence: Synthetic oligonucleotide
gaugaugaauuuaccgccc

SEQ ID NO: 55813 - RNA, 19 nt, Artificial Sequence
  Description of Artificial Sequence: Synthetic oligonucleotide
ucgaugaugaauuuaccgc

SEQ ID NO: 55814 - RNA, 19 nt, Artificial Sequence
  Description of Artificial Sequence: Synthetic oligonucleotide
ugaaaaccuucugugggac

SEQ ID NO: 55815 - RNA, 19 nt, Artificial Sequence
  Description of Artificial Sequence: Synthetic oligonucleotide
ugaugaauuuaccgcccag

SEQ ID NO: 55816 - RNA, 19 nt, Artificial Sequence
  Description of Artificial Sequence: Synthetic oligonucleotide
uucgaugaugaauuuaccg

SEQ ID NO: 55817 - RNA, 19 nt, Artificial Sequence
  Description of Artificial Sequence: Synthetic oligonucleotide
uuggccucugcaaagaggg

SEQ ID NO: 55818 - RNA, 19 nt, Artificial Sequence
  Description of Artificial Sequence: Synthetic oligonucleotide
uuuggccucugcaaagagg

SEQ ID NO: 55819 - RNA, 19 nt, Artificial Sequence
  Description of Artificial Sequence: Synthetic oligonucleotide
aagauucugaagaaagaag

SEQ ID NO: 55820 - RNA, 19 nt, Artificial Sequence
  Description of Artificial Sequence: Synthetic oligonucleotide
auacuagauauuuugauga

SEQ ID NO: 55821 - RNA, 19 nt, Artificial Sequence
  Description of Artificial Sequence: Synthetic oligonucleotide
acugguggggccuaggggu

SEQ ID NO: 55822 - RNA, 19 nt, Artificial Sequence
  Description of Artificial Sequence: Synthetic oligonucleotide
agauucugaagaaagaagu

SEQ ID NO: 55823 - RNA, 19 nt, Artificial Sequence
  Description of Artificial Sequence: Synthetic oligonucleotide
augaagacauucuguggca

SEQ ID NO: 55824 - RNA, 19 nt, Artificial Sequence
  Description of Artificial Sequence: Synthetic oligonucleotide
augaagauucugaagaaag

SEQ ID NO: 55825 - RNA, 19 nt, Artificial Sequence
  Description of Artificial Sequence: Synthetic oligonucleotide
auguaugaaaugaugugug

SEQ ID NO: 55826 - RNA, 19 nt, Artificial Sequence
  Description of Artificial Sequence: Synthetic oligonucleotide
auguagauacuccagagga

SEQ ID NO: 55827 - RNA, 19 nt, Artificial Sequence
  Description of Artificial Sequence: Synthetic oligonucleotide
caacaacuuuucaguggca

SEQ ID NO: 55828 - RNA, 19 nt, Artificial Sequence
  Description of Artificial Sequence: Synthetic oligonucleotide
aaaaucauugcuuucaggg

SEQ ID NO: 55829 - RNA, 19 nt, Artificial Sequence
  Description of Artificial Sequence: Synthetic oligonucleotide
caugaagacauucuguggc

SEQ ID NO: 55830 - RNA, 19 nt, Artificial Sequence
  Description of Artificial Sequence: Synthetic oligonucleotide
cauguaugaaaugaugugu

SEQ ID NO: 55831 - RNA, 19 nt, Artificial Sequence
  Description of Artificial Sequence: Synthetic oligonucleotide
caaaaucauugcuuucagg

SEQ ID NO: 55832 - RNA, 19 nt, Artificial Sequence
  Description of Artificial Sequence: Synthetic oligonucleotide
uuaccuuucuacaaccagg

SEQ ID NO: 55833 - RNA, 19 nt, Artificial Sequence
  Description of Artificial Sequence: Synthetic oligonucleotide
gaaucuaaugcuggacaaa

SEQ ID NO: 55834 - RNA, 19 nt, Artificial Sequence
  Description of Artificial Sequence: Synthetic oligonucleotide
gaagauucugaagaaagaa

SEQ ID NO: 55835 - RNA, 19 nt, Artificial Sequence
  Description of Artificial Sequence: Synthetic oligonucleotide
gauacuagauauuuugaug

SEQ ID NO: 55836 - RNA, 19 nt, Artificial Sequence
  Description of Artificial Sequence: Synthetic oligonucleotide
gauucugaagaaagaaguc

SEQ ID NO: 55837 - RNA, 19 nt, Artificial Sequence
  Description of Artificial Sequence: Synthetic oligonucleotide
gcaaaaucauugcuuucag

SEQ ID NO: 55838 - RNA, 19 nt, Artificial Sequence
  Description of Artificial Sequence: Synthetic oligonucleotide
agagcggguguucucugag

SEQ ID NO: 55839 - RNA, 19 nt, Artificial Sequence
  Description of Artificial Sequence: Synthetic oligonucleotide
gagagcggguguucucuga

SEQ ID NO: 55840 - RNA, 19 nt, Artificial Sequence
  Description of Artificial Sequence: Synthetic oligonucleotide
ugucauguaugaaaugaug

SEQ ID NO: 55841 - RNA, 19 nt, Artificial Sequence
  Description of Artificial Sequence: Synthetic oligonucleotide
aucauugcuuucagggcuc

SEQ ID NO: 55842 - RNA, 19 nt, Artificial Sequence
  Description of Artificial Sequence: Synthetic oligonucleotide
guguucucugaggaccgca

SEQ ID NO: 55843 - RNA, 19 nt, Artificial Sequence
  Description of Artificial Sequence: Synthetic oligonucleotide
ucccucaauuuuccuacuc

SEQ ID NO: 55844 - RNA, 19 nt, Artificial Sequence
  Description of Artificial Sequence: Synthetic oligonucleotide
uucugaagaaagaagucau

SEQ ID NO: 55845 - RNA, 19 nt, Artificial Sequence
  Description of Artificial Sequence: Synthetic oligonucleotide
ugaagacauucuguggcac

SEQ ID NO: 55846 - RNA, 19 nt, Artificial Sequence
  Description of Artificial Sequence: Synthetic oligonucleotide
ugaagauucugaagaaaga

SEQ ID NO: 55847 - RNA, 19 nt, Artificial Sequence
  Description of Artificial Sequence: Synthetic oligonucleotide
agcaguagacugguggggc

SEQ ID NO: 55848 - RNA, 19 nt, Artificial Sequence
  Description of Artificial Sequence: Synthetic oligonucleotide
agccaccaugaagacauuc

SEQ ID NO: 55849 - RNA, 19 nt, Artificial Sequence
  Description of Artificial Sequence: Synthetic oligonucleotide
uugucauguaugaaaugau

SEQ ID NO: 55850 - RNA, 19 nt, Artificial Sequence
  Description of Artificial Sequence: Synthetic oligonucleotide
uguaugaaaugaugugugg

SEQ ID NO: 55851 - RNA, 19 nt, Artificial Sequence
  Description of Artificial Sequence: Synthetic oligonucleotide
uguucucugaggaccgcac

SEQ ID NO: 55852 - RNA, 19 nt, Artificial Sequence
  Description of Artificial Sequence: Synthetic oligonucleotide
uucccucaauuuuccuacu

SEQ ID NO: 55853 - RNA, 19 nt, Artificial Sequence
  Description of Artificial Sequence: Synthetic oligonucleotide
aaagaagucauuauugcaa

SEQ ID NO: 55854 - RNA, 19 nt, Artificial Sequence
  Description of Artificial Sequence: Synthetic oligonucleotide
aacuggaggccaagauacu

SEQ ID NO: 55855 - RNA, 19 nt, Artificial Sequence
  Description of Artificial Sequence: Synthetic oligonucleotide
agauggccacauaaaaauu

SEQ ID NO: 55856 - RNA, 19 nt, Artificial Sequence
  Description of Artificial Sequence: Synthetic oligonucleotide
aagaagucauuauugcaaa

SEQ ID NO: 55857 - RNA, 19 nt, Artificial Sequence
  Description of Artificial Sequence: Synthetic oligonucleotide
auggccacauaaaaauuac

SEQ ID NO: 55858 - RNA, 19 nt, Artificial Sequence
  Description of Artificial Sequence: Synthetic oligonucleotide
auacuccagaggaaaggga

SEQ ID NO: 55859 - RNA, 19 nt, Artificial Sequence
  Description of Artificial Sequence: Synthetic oligonucleotide
uaaugacuauggccgagca

SEQ ID NO: 55860 - RNA, 19 nt, Artificial Sequence
  Description of Artificial Sequence: Synthetic oligonucleotide
cacguuucuauggugcaga

SEQ ID NO: 55861 - RNA, 19 nt, Artificial Sequence
  Description of Artificial Sequence: Synthetic oligonucleotide
acuggaggccaagauacuu

SEQ ID NO: 55862 - RNA, 19 nt, Artificial Sequence
  Description of Artificial Sequence: Synthetic oligonucleotide
uugaaauauuccuuccaga

SEQ ID NO: 55863 - RNA, 19 nt, Artificial Sequence
  Description of Artificial Sequence: Synthetic oligonucleotide
uuguguuuugugauggaau

SEQ ID NO: 55864 - RNA, 19 nt, Artificial Sequence
  Description of Artificial Sequence: Synthetic oligonucleotide
gaaagaagucauuauugca

SEQ ID NO: 55865 - RNA, 19 nt, Artificial Sequence
  Description of Artificial Sequence: Synthetic oligonucleotide
gaaauauuccuuccagaca

SEQ ID NO: 55866 - RNA, 19 nt, Artificial Sequence
  Description of Artificial Sequence: Synthetic oligonucleotide
gaggccaagauacuuccuu

SEQ ID NO: 55867 - RNA, 19 nt, Artificial Sequence
  Description of Artificial Sequence: Synthetic oligonucleotide
gauggccacauaaaaauua

SEQ ID NO: 55868 - RNA, 19 nt, Artificial Sequence
  Description of Artificial Sequence: Synthetic oligonucleotide
gauacuccagaggaaaggg

SEQ ID NO: 55869 - RNA, 19 nt, Artificial Sequence
  Description of Artificial Sequence: Synthetic oligonucleotide
guuuugugauggaauaugu

SEQ ID NO: 55870 - RNA, 19 nt, Artificial Sequence
  Description of Artificial Sequence: Synthetic oligonucleotide
agaagucauuauugcaaag

SEQ ID NO: 55871 - RNA, 19 nt, Artificial Sequence
  Description of Artificial Sequence: Synthetic oligonucleotide
uuggacuuugcaaagaagg

SEQ ID NO: 55872 - RNA, 19 nt, Artificial Sequence
  Description of Artificial Sequence: Synthetic oligonucleotide
uugugauggaauauguuaa

SEQ ID NO: 55873 - RNA, 19 nt, Artificial Sequence
  Description of Artificial Sequence: Synthetic oligonucleotide
uuuggacuuugcaaagaag

SEQ ID NO: 55874 - RNA, 19 nt, Artificial Sequence
  Description of Artificial Sequence: Synthetic oligonucleotide
uuugugauggaauauguua

SEQ ID NO: 55875 - RNA, 19 nt, Artificial Sequence
  Description of Artificial Sequence: Synthetic oligonucleotide
aagaagcucagcccacccu

SEQ ID NO: 55876 - RNA, 19 nt, Artificial Sequence
  Description of Artificial Sequence: Synthetic oligonucleotide
aagcucagcccacccuuca

SEQ ID NO: 55877 - RNA, 19 nt, Artificial Sequence
  Description of Artificial Sequence: Synthetic oligonucleotide
accccuuccucacagcccu

SEQ ID NO: 55878 - RNA, 19 nt, Artificial Sequence
  Description of Artificial Sequence: Synthetic oligonucleotide
accuuccauguggagacuc

SEQ ID NO: 55879 - RNA, 19 nt, Artificial Sequence
  Description of Artificial Sequence: Synthetic oligonucleotide
acgcuacuuccuccucaag

SEQ ID NO: 55880 - RNA, 19 nt, Artificial Sequence
  Description of Artificial Sequence: Synthetic oligonucleotide
acgcuuggucccgaggcca

SEQ ID NO: 55881 - RNA, 19 nt, Artificial Sequence
  Description of Artificial Sequence: Synthetic oligonucleotide
acgugguguaccgggaccu

SEQ ID NO: 55882 - RNA, 19 nt, Artificial Sequence
  Description of Artificial Sequence: Synthetic oligonucleotide
acguguacgagaagaagcu

SEQ ID NO: 55883 - RNA, 19 nt, Artificial Sequence
  Description of Artificial Sequence: Synthetic oligonucleotide
agaagcucagcccacccuu

SEQ ID NO: 55884 - RNA, 19 nt, Artificial Sequence
  Description of Artificial Sequence: Synthetic oligonucleotide
agcggccccggcccaacac

SEQ ID NO: 55885 - RNA, 19 nt, Artificial Sequence
  Description of Artificial Sequence: Synthetic oligonucleotide
agcucagcccacccuucaa

SEQ ID NO: 55886 - RNA, 19 nt, Artificial Sequence
  Description of Artificial Sequence: Synthetic oligonucleotide
augaagacggagcggcccc

SEQ ID NO: 55887 - RNA, 19 nt, Artificial Sequence
  Description of Artificial Sequence: Synthetic oligonucleotide
caaguccuugcuuucaggg

SEQ ID NO: 55888 - RNA, 19 nt, Artificial Sequence
  Description of Artificial Sequence: Synthetic oligonucleotide
caccccuuccucacagccc

SEQ ID NO: 55889 - RNA, 19 nt, Artificial Sequence
  Description of Artificial Sequence: Synthetic oligonucleotide
cacgcuacuuccuccucaa

SEQ ID NO: 55890 - RNA, 19 nt, Artificial Sequence
  Description of Artificial Sequence: Synthetic oligonucleotide
cacgcuuggucccgaggcc

SEQ ID NO: 55891 - RNA, 19 nt, Artificial Sequence
  Description of Artificial Sequence: Synthetic oligonucleotide
ccaaguccuugcuuucagg

SEQ ID NO: 55892 - RNA, 19 nt, Artificial Sequence
  Description of Artificial Sequence: Synthetic oligonucleotide
ccacgcuacuuccuccuca

SEQ ID NO: 55893 - RNA, 19 nt, Artificial Sequence
  Description of Artificial Sequence: Synthetic oligonucleotide
ccagacgcugccgcugccg

SEQ ID NO: 55894 - RNA, 19 nt, Artificial Sequence
  Description of Artificial Sequence: Synthetic oligonucleotide
cccgcgcacgcuugguccc

SEQ ID NO: 55895 - RNA, 19 nt, Artificial Sequence
  Description of Artificial Sequence: Synthetic oligonucleotide
cccuuccucacagcccuga

SEQ ID NO: 55896 - RNA, 19 nt, Artificial Sequence
  Description of Artificial Sequence: Synthetic oligonucleotide
ccgaggaccgggcccgcuu

SEQ ID NO: 55897 - RNA, 19 nt, Artificial Sequence
  Description of Artificial Sequence: Synthetic oligonucleotide
ccgcgcacgcuuggucccg

SEQ ID NO: 55898 - RNA, 19 nt, Artificial Sequence
  Description of Artificial Sequence: Synthetic oligonucleotide
ccgggagcguguguucucc

SEQ ID NO: 55899 - RNA, 19 nt, Artificial Sequence
  Description of Artificial Sequence: Synthetic oligonucleotide
ccugaggagcgggaggagu

SEQ ID NO: 55900 - RNA, 19 nt, Artificial Sequence
  Description of Artificial Sequence: Synthetic oligonucleotide
ccugcccauguguccccuc

SEQ ID NO: 55901 - RNA, 19 nt, Artificial Sequence
  Description of Artificial Sequence: Synthetic oligonucleotide
ccuuccauguggagacucc

SEQ ID NO: 55902 - RNA, 19 nt, Artificial Sequence
  Description of Artificial Sequence: Synthetic oligonucleotide
ccuuccucacagcccugaa

SEQ ID NO: 55903 - RNA, 19 nt, Artificial Sequence
  Description of Artificial Sequence: Synthetic oligonucleotide
cgaggggaguacaucaaga

SEQ ID NO: 55904 - RNA, 19 nt, Artificial Sequence
  Description of Artificial Sequence: Synthetic oligonucleotide
cgcacgcuuggucccgagg

SEQ ID NO: 55905 - RNA, 19 nt, Artificial Sequence
  Description of Artificial Sequence: Synthetic oligonucleotide
cgcagugccagcugaugaa

SEQ ID NO: 55906 - RNA, 19 nt, Artificial Sequence
  Description of Artificial Sequence: Synthetic oligonucleotide
cgcgcacgcuuggucccga

SEQ ID NO: 55907 - RNA, 19 nt, Artificial Sequence
  Description of Artificial Sequence: Synthetic oligonucleotide
cgcguccugcagaacucca

SEQ ID NO: 55908 - RNA, 19 nt, Artificial Sequence
  Description of Artificial Sequence: Synthetic oligonucleotide
cgcuacuuccuccucaaga

SEQ ID NO: 55909 - RNA, 19 nt, Artificial Sequence
  Description of Artificial Sequence: Synthetic oligonucleotide
cgcuuggucccgaggccaa

SEQ ID NO: 55910 - RNA, 19 nt, Artificial Sequence
  Description of Artificial Sequence: Synthetic oligonucleotide
cggccacgcuacuuccucc

SEQ ID NO: 55911 - RNA, 19 nt, Artificial Sequence
  Description of Artificial Sequence: Synthetic oligonucleotide
cggccccggcccaacaccu

SEQ ID NO: 55912 - RNA, 19 nt, Artificial Sequence
  Description of Artificial Sequence: Synthetic oligonucleotide
cgggagcguguguucuccg

SEQ ID NO: 55913 - RNA, 19 nt, Artificial Sequence
  Description of Artificial Sequence: Synthetic oligonucleotide
cguccugcagaacuccagg

SEQ ID NO: 55914 - RNA, 19 nt, Artificial Sequence
  Description of Artificial Sequence: Synthetic oligonucleotide
cgugguguaccgggaccuc

SEQ ID NO: 55915 - RNA, 19 nt, Artificial Sequence
  Description of Artificial Sequence: Synthetic oligonucleotide
cugaggagcgggaggagug

SEQ ID NO: 55916 - RNA, 19 nt, Artificial Sequence
  Description of Artificial Sequence: Synthetic oligonucleotide
cugugcaaggaggggauca

SEQ ID NO: 55917 - RNA, 19 nt, Artificial Sequence
  Description of Artificial Sequence: Synthetic oligonucleotide
cuuccucacagcccugaag

SEQ ID NO: 55918 - RNA, 19 nt, Artificial Sequence
  Description of Artificial Sequence: Synthetic oligonucleotide
cuuggucccgaggccaagu

SEQ ID NO: 55919 - RNA, 19 nt, Artificial Sequence
  Description of Artificial Sequence: Synthetic oligonucleotide
gaagcucagcccacccuuc

SEQ ID NO: 55920 - RNA, 19 nt, Artificial Sequence
  Description of Artificial Sequence: Synthetic oligonucleotide
gaggggaguacaucaagac

SEQ ID NO: 55921 - RNA, 19 nt, Artificial Sequence
  Description of Artificial Sequence: Synthetic oligonucleotide
gaucaccaucacaccaccu

SEQ ID NO: 55922 - RNA, 19 nt, Artificial Sequence
  Description of Artificial Sequence: Synthetic oligonucleotide
gaugaagacggagcggccc

SEQ ID NO: 55923 - RNA, 19 nt, Artificial Sequence
  Description of Artificial Sequence: Synthetic oligonucleotide
gauggcaccuucauuggcu

SEQ ID NO: 55924 - RNA, 19 nt, Artificial Sequence
  Description of Artificial Sequence: Synthetic oligonucleotide
gcacauuaagaucacagac

SEQ ID NO: 55925 - RNA, 19 nt, Artificial Sequence
  Description of Artificial Sequence: Synthetic oligonucleotide
gcaccccuuccucacagcc

SEQ ID NO: 55926 - RNA, 19 nt, Artificial Sequence
  Description of Artificial Sequence: Synthetic oligonucleotide
gcacgcuuggucccgaggc

SEQ ID NO: 55927 - RNA, 19 nt, Artificial Sequence
  Description of Artificial Sequence: Synthetic oligonucleotide
gcagaacuccaggcacccc

SEQ ID NO: 55928 - RNA, 19 nt, Artificial Sequence
  Description of Artificial Sequence: Synthetic oligonucleotide
gcagugccagcugaugaag

SEQ ID NO: 55929 - RNA, 19 nt, Artificial Sequence
  Description of Artificial Sequence: Synthetic oligonucleotide
gccaaguccuugcuuucag

SEQ ID NO: 55930 - RNA, 19 nt, Artificial Sequence
  Description of Artificial Sequence: Synthetic oligonucleotide
gccacgcuacuuccuccuc

SEQ ID NO: 55931 - RNA, 19 nt, Artificial Sequence
  Description of Artificial Sequence: Synthetic oligonucleotide
gcgcagugccagcugauga

SEQ ID NO: 55932 - RNA, 19 nt, Artificial Sequence
  Description of Artificial Sequence: Synthetic oligonucleotide
gcggccacgcuacuuccuc

SEQ ID NO: 55933 - RNA, 19 nt, Artificial Sequence
  Description of Artificial Sequence: Synthetic oligonucleotide
gcggccccggcccaacacc

SEQ ID NO: 55934 - RNA, 19 nt, Artificial Sequence
  Description of Artificial Sequence: Synthetic oligonucleotide
gcucacccagugacaacuc

SEQ ID NO: 55935 - RNA, 19 nt, Artificial Sequence
  Description of Artificial Sequence: Synthetic oligonucleotide
gcugccgcugccgcugcac

SEQ ID NO: 55936 - RNA, 19 nt, Artificial Sequence
  Description of Artificial Sequence: Synthetic oligonucleotide
gcuuggucccgaggccaag

SEQ ID NO: 55937 - RNA, 19 nt, Artificial Sequence
  Description of Artificial Sequence: Synthetic oligonucleotide
ggcaaggugauccugguga

SEQ ID NO: 55938 - RNA, 19 nt, Artificial Sequence
  Description of Artificial Sequence: Synthetic oligonucleotide
ggcacauuaagaucacaga

SEQ ID NO: 55939 - RNA, 19 nt, Artificial Sequence
  Description of Artificial Sequence: Synthetic oligonucleotide
ggcucacccagugacaacu

SEQ ID NO: 55940 - RNA, 19 nt, Artificial Sequence
  Description of Artificial Sequence: Synthetic oligonucleotide
gggcacauuaagaucacag

SEQ ID NO: 55941 - RNA, 19 nt, Artificial Sequence
  Description of Artificial Sequence: Synthetic oligonucleotide
ggucccgaggccaaguccu

SEQ ID NO: 55942 - RNA, 19 nt, Artificial Sequence
  Description of Artificial Sequence: Synthetic oligonucleotide
guccuugcuuucagggcug

SEQ ID NO: 55943 - RNA, 19 nt, Artificial Sequence
  Description of Artificial Sequence: Synthetic oligonucleotide
gugguguaccgggaccuca

SEQ ID NO: 55944 - RNA, 19 nt, Artificial Sequence
  Description of Artificial Sequence: Synthetic oligonucleotide
uacaaggagcggccgcagg

SEQ ID NO: 55945 - RNA, 19 nt, Artificial Sequence
  Description of Artificial Sequence: Synthetic oligonucleotide
uccuacucggccagcggca

SEQ ID NO: 55946 - RNA, 19 nt, Artificial Sequence
  Description of Artificial Sequence: Synthetic oligonucleotide
uccugaggagcgggaggag

SEQ ID NO: 55947 - RNA, 19 nt, Artificial Sequence
  Description of Artificial Sequence: Synthetic oligonucleotide
ucuccgaggaccgggcccg

SEQ ID NO: 55948 - RNA, 19 nt, Artificial Sequence
  Description of Artificial Sequence: Synthetic oligonucleotide
ugaagacggagcggccccg

SEQ ID NO: 55949 - RNA, 19 nt, Artificial Sequence
  Description of Artificial Sequence: Synthetic oligonucleotide
uggcaccuucauuggcuac

SEQ ID NO: 55950 - RNA, 19 nt, Artificial Sequence
  Description of Artificial Sequence: Synthetic oligonucleotide
uggcuacaaggagcggccg

SEQ ID NO: 55951 - RNA, 19 nt, Artificial Sequence
  Description of Artificial Sequence: Synthetic oligonucleotide
uggucccgaggccaagucc

SEQ ID NO: 55952 - RNA, 19 nt, Artificial Sequence
  Description of Artificial Sequence: Synthetic oligonucleotide
uucccgcgcacgcuugguc

SEQ ID NO: 55953 - RNA, 19 nt, Artificial Sequence
  Description of Artificial Sequence: Synthetic oligonucleotide
uucuccgaggaccgggccc

SEQ ID NO: 55954 - RNA, 19 nt, Artificial Sequence
  Description of Artificial Sequence: Synthetic oligonucleotide
uuggucccgaggccaaguc

SEQ ID NO: 55955 - RNA, 19 nt, Artificial Sequence
  Description of Artificial Sequence: Synthetic oligonucleotide
acaccaccugaccaagaug

SEQ ID NO: 55956 - RNA, 19 nt, Artificial Sequence
  Description of Artificial Sequence: Synthetic oligonucleotide
agguauuuugaugaggagu

SEQ ID NO: 55957 - RNA, 19 nt, Artificial Sequence
  Description of Artificial Sequence: Synthetic oligonucleotide
auguggagacuccugagga

SEQ ID NO: 55958 - RNA, 19 nt, Artificial Sequence
  Description of Artificial Sequence: Synthetic oligonucleotide
auugugaaggaggguuggc

SEQ ID NO: 55959 - RNA, 19 nt, Artificial Sequence
  Description of Artificial Sequence: Synthetic oligonucleotide
caccaccugaccaagauga

SEQ ID NO: 55960 - RNA, 19 nt, Artificial Sequence
  Description of Artificial Sequence: Synthetic oligonucleotide
cauguggagacuccugagg

SEQ ID NO: 55961 - RNA, 19 nt, Artificial Sequence
  Description of Artificial Sequence: Synthetic oligonucleotide
cuauugugaaggaggguug

SEQ ID NO: 55962 - RNA, 19 nt, Artificial Sequence
  Description of Artificial Sequence: Synthetic oligonucleotide
gcacguguacgagaagaag

SEQ ID NO: 55963 - RNA, 19 nt, Artificial Sequence
  Description of Artificial Sequence: Synthetic oligonucleotide
gguauuuugaugaggaguu

SEQ ID NO: 55964 - RNA, 19 nt, Artificial Sequence
  Description of Artificial Sequence: Synthetic oligonucleotide
uauugugaaggaggguugg

SEQ ID NO: 55965 - RNA, 19 nt, Artificial Sequence
  Description of Artificial Sequence: Synthetic oligonucleotide
uugugaaggaggguuggcu

SEQ ID NO: 55966 - RNA, 19 nt, Artificial Sequence
  Description of Artificial Sequence: Synthetic oligonucleotide
aacaccuuugucauacgcu

SEQ ID NO: 55967 - RNA, 19 nt, Artificial Sequence
  Description of Artificial Sequence: Synthetic oligonucleotide
aagaagcuccugccacccu

SEQ ID NO: 55968 - RNA, 19 nt, Artificial Sequence
  Description of Artificial Sequence: Synthetic oligonucleotide
aagaucacugacuuuggcc

SEQ ID NO: 55969 - RNA, 19 nt, Artificial Sequence
  Description of Artificial Sequence: Synthetic oligonucleotide
aagauccugcggaaggaag

SEQ ID NO: 55970 - RNA, 19 nt, Artificial Sequence
  Description of Artificial Sequence: Synthetic oligonucleotide
aagcuccugccacccuuca

SEQ ID NO: 55971 - RNA, 19 nt, Artificial Sequence
  Description of Artificial Sequence: Synthetic oligonucleotide
cgggagaaggccacuggcc

SEQ ID NO: 55972 - RNA, 19 nt, Artificial Sequence
  Description of Artificial Sequence: Synthetic oligonucleotide
accccggaguaccuggcgc

SEQ ID NO: 55973 - RNA, 19 nt, Artificial Sequence
  Description of Artificial Sequence: Synthetic oligonucleotide
acaccuuugucauacgcug

SEQ ID NO: 55974 - RNA, 19 nt, Artificial Sequence
  Description of Artificial Sequence: Synthetic oligonucleotide
acagucaccgagagccggg

SEQ ID NO: 55975 - RNA, 19 nt, Artificial Sequence
  Description of Artificial Sequence: Synthetic oligonucleotide
acccguuccucacugcgcu

SEQ ID NO: 55976 - RNA, 19 nt, Artificial Sequence
  Description of Artificial Sequence: Synthetic oligonucleotide
accgagagccggguccucc

SEQ ID NO: 55977 - RNA, 19 nt, Artificial Sequence
  Description of Artificial Sequence: Synthetic oligonucleotide
agcgggcccgguuuuaugg

SEQ ID NO: 55978 - RNA, 19 nt, Artificial Sequence
  Description of Artificial Sequence: Synthetic oligonucleotide
accuuugucauacgcugcc

SEQ ID NO: 55979 - RNA, 19 nt, Artificial Sequence
  Description of Artificial Sequence: Synthetic oligonucleotide
augccaaggaggucaugga

SEQ ID NO: 55980 - RNA, 19 nt, Artificial Sequence
  Description of Artificial Sequence: Synthetic oligonucleotide
acgccaugaagauccugcg

SEQ ID NO: 55981 - RNA, 19 nt, Artificial Sequence
  Description of Artificial Sequence: Synthetic oligonucleotide
acgguacuuccugcugaag

SEQ ID NO: 55982 - RNA, 19 nt, Artificial Sequence
  Description of Artificial Sequence: Synthetic oligonucleotide
auggccgggccguggacug

SEQ ID NO: 55983 - RNA, 19 nt, Artificial Sequence
  Description of Artificial Sequence: Synthetic oligonucleotide
acgugguccagaagaagcu

SEQ ID NO: 55984 - RNA, 19 nt, Artificial Sequence
  Description of Artificial Sequence: Synthetic oligonucleotide
acuauggccgggccgugga

SEQ ID NO: 55985 - RNA, 19 nt, Artificial Sequence
  Description of Artificial Sequence: Synthetic oligonucleotide
agucaccgagagccggguc

SEQ ID NO: 55986 - RNA, 19 nt, Artificial Sequence
  Description of Artificial Sequence: Synthetic oligonucleotide
agagccggguccuccagaa

SEQ ID NO: 55987 - RNA, 19 nt, Artificial Sequence
  Description of Artificial Sequence: Synthetic oligonucleotide
agaagaagcuccugccacc

SEQ ID NO: 55988 - RNA, 19 nt, Artificial Sequence
  Description of Artificial Sequence: Synthetic oligonucleotide
agaagcuccugccacccuu

SEQ ID NO: 55989 - RNA, 19 nt, Artificial Sequence
  Description of Artificial Sequence: Synthetic oligonucleotide
agaucacugacuuuggccu

SEQ ID NO: 55990 - RNA, 19 nt, Artificial Sequence
  Description of Artificial Sequence: Synthetic oligonucleotide
agauccugcggaaggaagu

SEQ ID NO: 55991 - RNA, 19 nt, Artificial Sequence
  Description of Artificial Sequence: Synthetic oligonucleotide
agcgugucuucacagagga

SEQ ID NO: 55992 - RNA, 19 nt, Artificial Sequence
  Description of Artificial Sequence: Synthetic oligonucleotide
agcuccugccacccuucaa

SEQ ID NO: 55993 - RNA, 19 nt, Artificial Sequence
  Description of Artificial Sequence: Synthetic oligonucleotide
aggagcgggcccgguuuua

SEQ ID NO: 55994 - RNA, 19 nt, Artificial Sequence
  Description of Artificial Sequence: Synthetic oligonucleotide
acgagagggaggaguggau

SEQ ID NO: 55995 - RNA, 19 nt, Artificial Sequence
  Description of Artificial Sequence: Synthetic oligonucleotide
aucagugacggggccacca

SEQ ID NO: 55996 - RNA, 19 nt, Artificial Sequence
  Description of Artificial Sequence: Synthetic oligonucleotide
auccugcggaaggaaguca

SEQ ID NO: 55997 - RNA, 19 nt, Artificial Sequence
  Description of Artificial Sequence: Synthetic oligonucleotide
augaagaccgagaggccgc

SEQ ID NO: 55998 - RNA, 19 nt, Artificial Sequence
  Description of Artificial Sequence: Synthetic oligonucleotide
augaagauccugcggaagg

SEQ ID NO: 55999 - RNA, 19 nt, Artificial Sequence
  Description of Artificial Sequence: Synthetic oligonucleotide
caacaccuuugucauacgc

SEQ ID NO: 56000 - RNA, 19 nt, Artificial Sequence
  Description of Artificial Sequence: Synthetic oligonucleotide
cagugacggggccaccaug

SEQ ID NO: 56001 - RNA, 19 nt, Artificial Sequence
  Description of Artificial Sequence: Synthetic oligonucleotide
cacagucaccgagagccgg

SEQ ID NO: 56002 - RNA, 19 nt, Artificial Sequence
  Description of Artificial Sequence: Synthetic oligonucleotide
cacccguuccucacugcgc

SEQ ID NO: 56003 - RNA, 19 nt, Artificial Sequence
  Description of Artificial Sequence: Synthetic oligonucleotide
caccgagagccggguccuc

SEQ ID NO: 56004 - RNA, 19 nt, Artificial Sequence
  Description of Artificial Sequence: Synthetic oligonucleotide
ccccggaguaccuggcgcc

SEQ ID NO: 56005 - RNA, 19 nt, Artificial Sequence
  Description of Artificial Sequence: Synthetic oligonucleotide
caccuuugucauacgcugc

SEQ ID NO: 56006 - RNA, 19 nt, Artificial Sequence
  Description of Artificial Sequence: Synthetic oligonucleotide
cacgguacuuccugcugaa

SEQ ID NO: 56007 - RNA, 19 nt, Artificial Sequence
  Description of Artificial Sequence: Synthetic oligonucleotide
cagucaccgagagccgggu

SEQ ID NO: 56008 - RNA, 19 nt, Artificial Sequence
  Description of Artificial Sequence: Synthetic oligonucleotide
caggaccacgagcgccucu

SEQ ID NO: 56009 - RNA, 19 nt, Artificial Sequence
  Description of Artificial Sequence: Synthetic oligonucleotide
ccgccgcugccgcugccgg

SEQ ID NO: 56010 - RNA, 19 nt, Artificial Sequence
  Description of Artificial Sequence: Synthetic oligonucleotide
gcggacccacuucccccag

SEQ ID NO: 56011 - RNA, 19 nt, Artificial Sequence
  Description of Artificial Sequence: Synthetic oligonucleotide
ugucauacgcugccugcag

SEQ ID NO: 56012 - RNA, 19 nt, Artificial Sequence
  Description of Artificial Sequence: Synthetic oligonucleotide
caugaagauccugcggaag

SEQ ID NO: 56013 - RNA, 19 nt, Artificial Sequence
  Description of Artificial Sequence: Synthetic oligonucleotide
ccaacaccuuugucauacg

SEQ ID NO: 56014 - RNA, 19 nt, Artificial Sequence
  Description of Artificial Sequence: Synthetic oligonucleotide
ccacgguacuuccugcuga

SEQ ID NO: 56015 - RNA, 19 nt, Artificial Sequence
  Description of Artificial Sequence: Synthetic oligonucleotide
ccaggaccacgagcgccuc

SEQ ID NO: 56016 - RNA, 19 nt, Artificial Sequence
  Description of Artificial Sequence: Synthetic oligonucleotide
caaucacacccccugaccg

SEQ ID NO: 56017 - RNA, 19 nt, Artificial Sequence
  Description of Artificial Sequence: Synthetic oligonucleotide
ccaugaagauccugcggaa

SEQ ID NO: 56018 - RNA, 19 nt, Artificial Sequence
  Description of Artificial Sequence: Synthetic oligonucleotide
cccaacaccuuugucauac

SEQ ID NO: 56019 - RNA, 19 nt, Artificial Sequence
  Description of Artificial Sequence: Synthetic oligonucleotide
cucacacagucaccgagag

SEQ ID NO: 56020 - RNA, 19 nt, Artificial Sequence
  Description of Artificial Sequence: Synthetic oligonucleotide
ccucaggucacguccgagg

SEQ ID NO: 56021 - RNA, 19 nt, Artificial Sequence
  Description of Artificial Sequence: Synthetic oligonucleotide
cccguuccucacugcgcug

SEQ ID NO: 56022 - RNA, 19 nt, Artificial Sequence
  Description of Artificial Sequence: Synthetic oligonucleotide
ccguuccucacugcgcuga

SEQ ID NO: 56023 - RNA, 19 nt, Artificial Sequence
  Description of Artificial Sequence: Synthetic oligonucleotide
ccgagagccggguccucca

SEQ ID NO: 56024 - RNA, 19 nt, Artificial Sequence
  Description of Artificial Sequence: Synthetic oligonucleotide
cagaggagcgggcccgguu

SEQ ID NO: 56025 - RNA, 19 nt, Artificial Sequence
  Description of Artificial Sequence: Synthetic oligonucleotide
ccgggagcgugucuucaca

SEQ ID NO: 56026 - RNA, 19 nt, Artificial Sequence
  Description of Artificial Sequence: Synthetic oligonucleotide
ccugcggaaggaagucauc

SEQ ID NO: 56027 - RNA, 19 nt, Artificial Sequence
  Description of Artificial Sequence: Synthetic oligonucleotide
ccucacugcgcugaaguau

SEQ ID NO: 56028 - RNA, 19 nt, Artificial Sequence
  Description of Artificial Sequence: Synthetic oligonucleotide
ccagacgagagggaggagu

SEQ ID NO: 56029 - RNA, 19 nt, Artificial Sequence
  Description of Artificial Sequence: Synthetic oligonucleotide
ccggaguaccuggcgccug

SEQ ID NO: 56030 - RNA, 19 nt, Artificial Sequence
  Description of Artificial Sequence: Synthetic oligonucleotide
ccuuugucauacgcugccu

SEQ ID NO: 56031 - RNA, 19 nt, Artificial Sequence
  Description of Artificial Sequence: Synthetic oligonucleotide
cguuccucacugcgcugaa

SEQ ID NO: 56032 - RNA, 19 nt, Artificial Sequence
  Description of Artificial Sequence: Synthetic oligonucleotide
cgagagccggguccuccag

SEQ ID NO: 56033 - RNA, 19 nt, Artificial Sequence
  Description of Artificial Sequence: Synthetic oligonucleotide
cgccaugaagauccugcgg

SEQ ID NO: 56034 - RNA, 19 nt, Artificial Sequence
  Description of Artificial Sequence: Synthetic oligonucleotide
cggguccuccagaacacca

SEQ ID NO: 56035 - RNA, 19 nt, Artificial Sequence
  Description of Artificial Sequence: Synthetic oligonucleotide
cgguacuuccugcugaaga

SEQ ID NO: 56036 - RNA, 19 nt, Artificial Sequence
  Description of Artificial Sequence: Synthetic oligonucleotide
aggccacgguacuuccugc

SEQ ID NO: 56037 - RNA, 19 nt, Artificial Sequence
  Description of Artificial Sequence: Synthetic oligonucleotide
cgggagcgugucuucacag

SEQ ID NO: 56038 - RNA, 19 nt, Artificial Sequence
  Description of Artificial Sequence: Synthetic oligonucleotide
cgggcccgguuuuauggug

SEQ ID NO: 56039 - RNA, 19 nt, Artificial Sequence
  Description of Artificial Sequence: Synthetic oligonucleotide
gguccuccagaacaccagg

SEQ ID NO: 56040 - RNA, 19 nt, Artificial Sequence
  Description of Artificial Sequence: Synthetic oligonucleotide
cgugguccagaagaagcuc

SEQ ID NO: 56041 - RNA, 19 nt, Artificial Sequence
  Description of Artificial Sequence: Synthetic oligonucleotide
cuauggccgggccguggac

SEQ ID NO: 56042 - RNA, 19 nt, Artificial Sequence
  Description of Artificial Sequence: Synthetic oligonucleotide
cuccagacgagagggagga

SEQ ID NO: 56043 - RNA, 19 nt, Artificial Sequence
  Description of Artificial Sequence: Synthetic oligonucleotide
cagacgagagggaggagug

SEQ ID NO: 56044 - RNA, 19 nt, Artificial Sequence
  Description of Artificial Sequence: Synthetic oligonucleotide
cggaguaccuggcgccuga

SEQ ID NO: 56045 - RNA, 19 nt, Artificial Sequence
  Description of Artificial Sequence: Synthetic oligonucleotide
cuuugucauacgcugccug

SEQ ID NO: 56046 - RNA, 19 nt, Artificial Sequence
  Description of Artificial Sequence: Synthetic oligonucleotide
guuccucacugcgcugaag

SEQ ID NO: 56047 - RNA, 19 nt, Artificial Sequence
  Description of Artificial Sequence: Synthetic oligonucleotide
cuugcugggcugcuuaaga

SEQ ID NO: 56048 - RNA, 19 nt, Artificial Sequence
  Description of Artificial Sequence: Synthetic oligonucleotide
gagccggguccuccagaac

SEQ ID NO: 56049 - RNA, 19 nt, Artificial Sequence
  Description of Artificial Sequence: Synthetic oligonucleotide
gaagaagcuccugccaccc

SEQ ID NO: 56050 - RNA, 19 nt, Artificial Sequence
  Description of Artificial Sequence: Synthetic oligonucleotide
gaagauccugcggaaggaa

SEQ ID NO: 56051 - RNA, 19 nt, Artificial Sequence
  Description of Artificial Sequence: Synthetic oligonucleotide
gaagcuccugccacccuuc

SEQ ID NO: 56052 - RNA, 19 nt, Artificial Sequence
  Description of Artificial Sequence: Synthetic oligonucleotide
gcgggagaaggccacuggc

SEQ ID NO: 56053 - RNA, 19 nt, Artificial Sequence
  Description of Artificial Sequence: Synthetic oligonucleotide
gagcgggcccgguuuuaug

SEQ ID NO: 56054 - RNA, 19 nt, Artificial Sequence
  Description of Artificial Sequence: Synthetic oligonucleotide
gaugccaaggaggucaugg

SEQ ID NO: 56055 - RNA, 19 nt, Artificial Sequence
  Description of Artificial Sequence: Synthetic oligonucleotide
gacuauggccgggccgugg

SEQ ID NO: 56056 - RNA, 19 nt, Artificial Sequence
  Description of Artificial Sequence: Synthetic oligonucleotide
gagagccggguccuccaga

SEQ ID NO: 56057 - RNA, 19 nt, Artificial Sequence
  Description of Artificial Sequence: Synthetic oligonucleotide
gagcgugucuucacagagg

SEQ ID NO: 56058 - RNA, 19 nt, Artificial Sequence
  Description of Artificial Sequence: Synthetic oligonucleotide
gaggagcgggcccgguuuu

SEQ ID NO: 56059 - RNA, 19 nt, Artificial Sequence
  Description of Artificial Sequence: Synthetic oligonucleotide
gauccugcggaaggaaguc

SEQ ID NO: 56060 - RNA, 19 nt, Artificial Sequence
  Description of Artificial Sequence: Synthetic oligonucleotide
cauccuggugcgggagaag

SEQ ID NO: 56061 - RNA, 19 nt, Artificial Sequence
  Description of Artificial Sequence: Synthetic oligonucleotide
gaugaagaccgagaggccg

SEQ ID NO: 56062 - RNA, 19 nt, Artificial Sequence
  Description of Artificial Sequence: Synthetic oligonucleotide
ggaccccggaguaccuggc

SEQ ID NO: 56063 - RNA, 19 nt, Artificial Sequence
  Description of Artificial Sequence: Synthetic oligonucleotide
gcacccguuccucacugcg

SEQ ID NO: 56064 - RNA, 19 nt, Artificial Sequence
  Description of Artificial Sequence: Synthetic oligonucleotide
ccagaacaccaggcacccg

SEQ ID NO: 56065 - RNA, 19 nt, Artificial Sequence
  Description of Artificial Sequence: Synthetic oligonucleotide
gccacgguacuuccugcug

SEQ ID NO: 56066 - RNA, 19 nt, Artificial Sequence
  Description of Artificial Sequence: Synthetic oligonucleotide
gccaugaagauccugcgga

SEQ ID NO: 56067 - RNA, 19 nt, Artificial Sequence
  Description of Artificial Sequence: Synthetic oligonucleotide
gaggccacgguacuuccug

SEQ ID NO: 56068 - RNA, 19 nt, Artificial Sequence
  Description of Artificial Sequence: Synthetic oligonucleotide
ggguccuccagaacaccag

SEQ ID NO: 56069 - RNA, 19 nt, Artificial Sequence
  Description of Artificial Sequence: Synthetic oligonucleotide
gcucccccagugacuccuc

SEQ ID NO: 56070 - RNA, 19 nt, Artificial Sequence
  Description of Artificial Sequence: Synthetic oligonucleotide
gcuugcugggcugcuuaag

SEQ ID NO: 56071 - RNA, 19 nt, Artificial Sequence
  Description of Artificial Sequence: Synthetic oligonucleotide
ggaccacagucaucgagag

SEQ ID NO: 56072 - RNA, 19 nt, Artificial Sequence
  Description of Artificial Sequence: Synthetic oligonucleotide
cgaugccaaggaggucaug

SEQ ID NO: 56073 - RNA, 19 nt, Artificial Sequence
  Description of Artificial Sequence: Synthetic oligonucleotide
gggaccccggaguaccugg

SEQ ID NO: 56074 - RNA, 19 nt, Artificial Sequence
  Description of Artificial Sequence: Synthetic oligonucleotide
cgcucacacagucaccgag

SEQ ID NO: 56075 - RNA, 19 nt, Artificial Sequence
  Description of Artificial Sequence: Synthetic oligonucleotide
ggcucccccagugacuccu

SEQ ID NO: 56076 - RNA, 19 nt, Artificial Sequence
  Description of Artificial Sequence: Synthetic oligonucleotide
gggagcgugucuucacaga

SEQ ID NO: 56077 - RNA, 19 nt, Artificial Sequence
  Description of Artificial Sequence: Synthetic oligonucleotide
gggcccgguuuuauggugc

SEQ ID NO: 56078 - RNA, 19 nt, Artificial Sequence
  Description of Artificial Sequence: Synthetic oligonucleotide
gggggugggcaucucuggu

SEQ ID NO: 56079 - RNA, 19 nt, Artificial Sequence
  Description of Artificial Sequence: Synthetic oligonucleotide
ggugcgggagaaggccacu

SEQ ID NO: 56080 - RNA, 19 nt, Artificial Sequence
  Description of Artificial Sequence: Synthetic oligonucleotide
gucaucgagaggaccuucc

SEQ ID NO: 56081 - RNA, 19 nt, Artificial Sequence
  Description of Artificial Sequence: Synthetic oligonucleotide
gugcgggagaaggccacug

SEQ ID NO: 56082 - RNA, 19 nt, Artificial Sequence
  Description of Artificial Sequence: Synthetic oligonucleotide
gucauccuggugcgggaga

SEQ ID NO: 56083 - RNA, 19 nt, Artificial Sequence
  Description of Artificial Sequence: Synthetic oligonucleotide
gucgcucacacagucaccg

SEQ ID NO: 56084 - RNA, 19 nt, Artificial Sequence
  Description of Artificial Sequence: Synthetic oligonucleotide
uauggccgggccguggacu

SEQ ID NO: 56085 - RNA, 19 nt, Artificial Sequence
  Description of Artificial Sequence: Synthetic oligonucleotide
ucagugacggggccaccau

SEQ ID NO: 56086 - RNA, 19 nt, Artificial Sequence
  Description of Artificial Sequence: Synthetic oligonucleotide
gcugggcugcuuaagaagg

SEQ ID NO: 56087 - RNA, 19 nt, Artificial Sequence
  Description of Artificial Sequence: Synthetic oligonucleotide
uugucauacgcugccugca

SEQ ID NO: 56088 - RNA, 19 nt, Artificial Sequence
  Description of Artificial Sequence: Synthetic oligonucleotide
ucaucgagaggaccuucca

SEQ ID NO: 56089 - RNA, 19 nt, Artificial Sequence
  Description of Artificial Sequence: Synthetic oligonucleotide
uccugcggaaggaagucau

SEQ ID NO: 56090 - RNA, 19 nt, Artificial Sequence
  Description of Artificial Sequence: Synthetic oligonucleotide
uccagacgagagggaggag

SEQ ID NO: 56091 - RNA, 19 nt, Artificial Sequence
  Description of Artificial Sequence: Synthetic oligonucleotide
ucacagaggagcgggcccg

SEQ ID NO: 56092 - RNA, 19 nt, Artificial Sequence
  Description of Artificial Sequence: Synthetic oligonucleotide
ugaagaccgagaggccgcg

SEQ ID NO: 56093 - RNA, 19 nt, Artificial Sequence
  Description of Artificial Sequence: Synthetic oligonucleotide
ugaagauccugcggaagga

SEQ ID NO: 56094 - RNA, 19 nt, Artificial Sequence
  Description of Artificial Sequence: Synthetic oligonucleotide
ugcgggagaaggccacugg

SEQ ID NO: 56095 - RNA, 19 nt, Artificial Sequence
  Description of Artificial Sequence: Synthetic oligonucleotide
ugacuauggccgggccgug

SEQ ID NO: 56096 - RNA, 19 nt, Artificial Sequence
  Description of Artificial Sequence: Synthetic oligonucleotide
ggaguaccuggcgccugag

SEQ ID NO: 56097 - RNA, 19 nt, Artificial Sequence
  Description of Artificial Sequence: Synthetic oligonucleotide
ucauccuggugcgggagaa

SEQ ID NO: 56098 - RNA, 19 nt, Artificial Sequence
  Description of Artificial Sequence: Synthetic oligonucleotide
ugcuugcugggcugcuuaa

SEQ ID NO: 56099 - RNA, 19 nt, Artificial Sequence
  Description of Artificial Sequence: Synthetic oligonucleotide
uggaccacagucaucgaga

SEQ ID NO: 56100 - RNA, 19 nt, Artificial Sequence
  Description of Artificial Sequence: Synthetic oligonucleotide
ucgcucacacagucaccga

SEQ ID NO: 56101 - RNA, 19 nt, Artificial Sequence
  Description of Artificial Sequence: Synthetic oligonucleotide
uggguacaaggagaggccc

SEQ ID NO: 56102 - RNA, 19 nt, Artificial Sequence
  Description of Artificial Sequence: Synthetic oligonucleotide
ggugggggugggcaucucu

SEQ ID NO: 56103 - RNA, 19 nt, Artificial Sequence
  Description of Artificial Sequence: Synthetic oligonucleotide
uuugucauacgcugccugc

SEQ ID NO: 56104 - RNA, 19 nt, Artificial Sequence
  Description of Artificial Sequence: Synthetic oligonucleotide
uucacagaggagcgggccc

SEQ ID NO: 56105 - RNA, 19 nt, Artificial Sequence
  Description of Artificial Sequence: Synthetic oligonucleotide
uugcugggcugcuuaagaa

SEQ ID NO: 56106 - RNA, 19 nt, Artificial Sequence
  Description of Artificial Sequence: Synthetic oligonucleotide
auucuccagacgagaggga

SEQ ID NO: 56107 - RNA, 19 nt, Artificial Sequence
  Description of Artificial Sequence: Synthetic oligonucleotide
caaggaugaagucgcucac

SEQ ID NO: 56108 - RNA, 19 nt, Artificial Sequence
  Description of Artificial Sequence: Synthetic oligonucleotide
ccaaggaugaagucgcuca

SEQ ID NO: 56109 - RNA, 19 nt, Artificial Sequence
  Description of Artificial Sequence: Synthetic oligonucleotide
cccgguuuuauggugcaga

SEQ ID NO: 56110 - RNA, 19 nt, Artificial Sequence
  Description of Artificial Sequence: Synthetic oligonucleotide
cgguuuuauggugcagaga

SEQ ID NO: 56111 - RNA, 19 nt, Artificial Sequence
  Description of Artificial Sequence: Synthetic oligonucleotide
gauucuccagacgagaggg

SEQ ID NO: 56112 - RNA, 19 nt, Artificial Sequence
  Description of Artificial Sequence: Synthetic oligonucleotide
gccaaggaugaagucgcuc

SEQ ID NO: 56113 - RNA, 19 nt, Artificial Sequence
  Description of Artificial Sequence: Synthetic oligonucleotide
ggaugaagucgcucacaca

SEQ ID NO: 56114 - RNA, 19 nt, Artificial Sequence
  Description of Artificial Sequence: Synthetic oligonucleotide
gguuuuauggugcagagau

SEQ ID NO: 56115 - RNA, 19 nt, Artificial Sequence
  Description of Artificial Sequence: Synthetic oligonucleotide
guuuuauggugcagagauu

SEQ ID NO: 56116 - RNA, 19 nt, Artificial Sequence
  Description of Artificial Sequence: Synthetic oligonucleotide
ugcagagauugucucggcu

SEQ ID NO: 56117 - RNA, 19 nt, Artificial Sequence
  Description of Artificial Sequence: Synthetic oligonucleotide
aaguuggagaaucuaaugc

SEQ ID NO: 56118 - RNA, 19 nt, Artificial Sequence
  Description of Artificial Sequence: Synthetic oligonucleotide
acaccaccugaaaaauaug

SEQ ID NO: 56119 - RNA, 19 nt, Artificial Sequence
  Description of Artificial Sequence: Synthetic oligonucleotide
accgugaucucaaguugga

SEQ ID NO: 56120 - RNA, 19 nt, Artificial Sequence
  Description of Artificial Sequence: Synthetic oligonucleotide
aucucaaguuggagaaucu

SEQ ID NO: 56121 - RNA, 19 nt, Artificial Sequence
  Description of Artificial Sequence: Synthetic oligonucleotide
acuaugcuaugaagauucu

SEQ ID NO: 56122 - RNA, 19 nt, Artificial Sequence
  Description of Artificial Sequence: Synthetic oligonucleotide
aguuggagaaucuaaugcu

SEQ ID NO: 56123 - RNA, 19 nt, Artificial Sequence
  Description of Artificial Sequence: Synthetic oligonucleotide
agcuguuuuuccauuuguc

SEQ ID NO: 56124 - RNA, 19 nt, Artificial Sequence
  Description of Artificial Sequence: Synthetic oligonucleotide
aguggacuacuguuauaga

SEQ ID NO: 56125 - RNA, 19 nt, Artificial Sequence
  Description of Artificial Sequence: Synthetic oligonucleotide
auuacaauaacaccaccug

SEQ ID NO: 56126 - RNA, 19 nt, Artificial Sequence
  Description of Artificial Sequence: Synthetic oligonucleotide
auugucucugccuuggacu

SEQ ID NO: 56127 - RNA, 19 nt, Artificial Sequence
  Description of Artificial Sequence: Synthetic oligonucleotide
uaaugggggcgagcuguuu

SEQ ID NO: 56128 - RNA, 19 nt, Artificial Sequence
  Description of Artificial Sequence: Synthetic oligonucleotide
caaguuggagaaucuaaug

SEQ ID NO: 56129 - RNA, 19 nt, Artificial Sequence
  Description of Artificial Sequence: Synthetic oligonucleotide
caccaccugaaaaauauga

SEQ ID NO: 56130 - RNA, 19 nt, Artificial Sequence
  Description of Artificial Sequence: Synthetic oligonucleotide
caguggacuacuguuauag

SEQ ID NO: 56131 - RNA, 19 nt, Artificial Sequence
  Description of Artificial Sequence: Synthetic oligonucleotide
uuaaugggggcgagcuguu

SEQ ID NO: 56132 - RNA, 19 nt, Artificial Sequence
  Description of Artificial Sequence: Synthetic oligonucleotide
cuaugaagauucugaagaa

SEQ ID NO: 56133 - RNA, 19 nt, Artificial Sequence
  Description of Artificial Sequence: Synthetic oligonucleotide
ccgugaucucaaguuggag

SEQ ID NO: 56134 - RNA, 19 nt, Artificial Sequence
  Description of Artificial Sequence: Synthetic oligonucleotide
cauugcuuucagggcucuu

SEQ ID NO: 56135 - RNA, 19 nt, Artificial Sequence
  Description of Artificial Sequence: Synthetic oligonucleotide
cgagcuguuuuuccauuug

SEQ ID NO: 56136 - RNA, 19 nt, Artificial Sequence
  Description of Artificial Sequence: Synthetic oligonucleotide
cgugaucucaaguuggaga

SEQ ID NO: 56137 - RNA, 19 nt, Artificial Sequence
  Description of Artificial Sequence: Synthetic oligonucleotide
cucaaguuggagaaucuaa

SEQ ID NO: 56138 - RNA, 19 nt, Artificial Sequence
  Description of Artificial Sequence: Synthetic oligonucleotide
cuccaguggacuacuguua

SEQ ID NO: 56139 - RNA, 19 nt, Artificial Sequence
  Description of Artificial Sequence: Synthetic oligonucleotide
gaucucaaguuggagaauc

SEQ ID NO: 56140 - RNA, 19 nt, Artificial Sequence
  Description of Artificial Sequence: Synthetic oligonucleotide
gcaaguggacgagaauaag

SEQ ID NO: 56141 - RNA, 19 nt, Artificial Sequence
  Description of Artificial Sequence: Synthetic oligonucleotide
guuaaugggggcgagcugu

SEQ ID NO: 56142 - RNA, 19 nt, Artificial Sequence
  Description of Artificial Sequence: Synthetic oligonucleotide
gcuaugaagauucugaaga

SEQ ID NO: 56143 - RNA, 19 nt, Artificial Sequence
  Description of Artificial Sequence: Synthetic oligonucleotide
gucuccaguggacuacugu

SEQ ID NO: 56144 - RNA, 19 nt, Artificial Sequence
  Description of Artificial Sequence: Synthetic oligonucleotide
gcgagcuguuuuuccauuu

SEQ ID NO: 56145 - RNA, 19 nt, Artificial Sequence
  Description of Artificial Sequence: Synthetic oligonucleotide
uauccccucaacaacuuuu

SEQ ID NO: 56146 - RNA, 19 nt, Artificial Sequence
  Description of Artificial Sequence: Synthetic oligonucleotide
guuggagaaucuaaugcug

SEQ ID NO: 56147 - RNA, 19 nt, Artificial Sequence
  Description of Artificial Sequence: Synthetic oligonucleotide
ggcgagcuguuuuuccauu

SEQ ID NO: 56148 - RNA, 19 nt, Artificial Sequence
  Description of Artificial Sequence: Synthetic oligonucleotide
gugaucucaaguuggagaa

SEQ ID NO: 56149 - RNA, 19 nt, Artificial Sequence
  Description of Artificial Sequence: Synthetic oligonucleotide
uguguaccgugaucucaag

SEQ ID NO: 56150 - RNA, 19 nt, Artificial Sequence
  Description of Artificial Sequence: Synthetic oligonucleotide
guaccgugaucucaaguug

SEQ ID NO: 56151 - RNA, 19 nt, Artificial Sequence
  Description of Artificial Sequence: Synthetic oligonucleotide
cagccaccaugaagacauu

SEQ ID NO: 56152 - RNA, 19 nt, Artificial Sequence
  Description of Artificial Sequence: Synthetic oligonucleotide
uaccgugaucucaaguugg

SEQ ID NO: 56153 - RNA, 19 nt, Artificial Sequence
  Description of Artificial Sequence: Synthetic oligonucleotide
uacuaugcuaugaagauuc

SEQ ID NO: 56154 - RNA, 19 nt, Artificial Sequence
  Description of Artificial Sequence: Synthetic oligonucleotide
ucaaguuggagaaucuaau

SEQ ID NO: 56155 - RNA, 19 nt, Artificial Sequence
  Description of Artificial Sequence: Synthetic oligonucleotide
uuacaauaacaccaccuga

SEQ ID NO: 56156 - RNA, 19 nt, Artificial Sequence
  Description of Artificial Sequence: Synthetic oligonucleotide
ucauugcuuucagggcucu

SEQ ID NO: 56157 - RNA, 19 nt, Artificial Sequence
  Description of Artificial Sequence: Synthetic oligonucleotide
uccaguggacuacuguuau

SEQ ID NO: 56158 - RNA, 19 nt, Artificial Sequence
  Description of Artificial Sequence: Synthetic oligonucleotide
uuguguaccgugaucucaa

SEQ ID NO: 56159 - RNA, 19 nt, Artificial Sequence
  Description of Artificial Sequence: Synthetic oligonucleotide
uguaccgugaucucaaguu

SEQ ID NO: 56160 - RNA, 19 nt, Artificial Sequence
  Description of Artificial Sequence: Synthetic oligonucleotide
gguguucucugaggaccgc

SEQ ID NO: 56161 - RNA, 19 nt, Artificial Sequence
  Description of Artificial Sequence: Synthetic oligonucleotide
uugucucugccuuggacua

SEQ ID NO: 56162 - RNA, 19 nt, Artificial Sequence
  Description of Artificial Sequence: Synthetic oligonucleotide
acaaugaaugauuuugacu

SEQ ID NO: 56163 - RNA, 19 nt, Artificial Sequence
  Description of Artificial Sequence: Synthetic oligonucleotide
accguuuguguuuugugau

SEQ ID NO: 56164 - RNA, 19 nt, Artificial Sequence
  Description of Artificial Sequence: Synthetic oligonucleotide
auuuuggacuuugcaaaga

SEQ ID NO: 56165 - RNA, 19 nt, Artificial Sequence
  Description of Artificial Sequence: Synthetic oligonucleotide
augaaugauuuugacuauu

SEQ ID NO: 56166 - RNA, 19 nt, Artificial Sequence
  Description of Artificial Sequence: Synthetic oligonucleotide
augaagaauuuacagcuca

SEQ ID NO: 56167 - RNA, 19 nt, Artificial Sequence
  Description of Artificial Sequence: Synthetic oligonucleotide
aaaggaugaaguggcacac

SEQ ID NO: 56168 - RNA, 19 nt, Artificial Sequence
  Description of Artificial Sequence: Synthetic oligonucleotide
aaugaaugauuuugacuau

SEQ ID NO: 56169 - RNA, 19 nt, Artificial Sequence
  Description of Artificial Sequence: Synthetic oligonucleotide
uauugcaaaggaugaagug

SEQ ID NO: 56170 - RNA, 19 nt, Artificial Sequence
  Description of Artificial Sequence: Synthetic oligonucleotide
caaaggaugaaguggcaca

SEQ ID NO: 56171 - RNA, 19 nt, Artificial Sequence
  Description of Artificial Sequence: Synthetic oligonucleotide
caaugaaugauuuugacua

SEQ ID NO: 56172 - RNA, 19 nt, Artificial Sequence
  Description of Artificial Sequence: Synthetic oligonucleotide
ccguuuguguuuugugaug

SEQ ID NO: 56173 - RNA, 19 nt, Artificial Sequence
  Description of Artificial Sequence: Synthetic oligonucleotide
ccuuccagacaaaagaccg

SEQ ID NO: 56174 - RNA, 19 nt, Artificial Sequence
  Description of Artificial Sequence: Synthetic oligonucleotide
cuaugcuaugaagauucug

SEQ ID NO: 56175 - RNA, 19 nt, Artificial Sequence
  Description of Artificial Sequence: Synthetic oligonucleotide
gacaaugaaugauuuugac

SEQ ID NO: 56176 - RNA, 19 nt, Artificial Sequence
  Description of Artificial Sequence: Synthetic oligonucleotide
gaccguuuguguuuuguga

SEQ ID NO: 56177 - RNA, 19 nt, Artificial Sequence
  Description of Artificial Sequence: Synthetic oligonucleotide
gauuuuggacuuugcaaag

SEQ ID NO: 56178 - RNA, 19 nt, Artificial Sequence
  Description of Artificial Sequence: Synthetic oligonucleotide
gcaaaggaugaaguggcac

SEQ ID NO: 56179 - RNA, 19 nt, Artificial Sequence
  Description of Artificial Sequence: Synthetic oligonucleotide
guuuguguuuugugaugga

SEQ ID NO: 56180 - RNA, 19 nt, Artificial Sequence
  Description of Artificial Sequence: Synthetic oligonucleotide
ggaugaaguggcacacacu

SEQ ID NO: 56181 - RNA, 19 nt, Artificial Sequence
  Description of Artificial Sequence: Synthetic oligonucleotide
uugaugaagaauuuacagc

SEQ ID NO: 56182 - RNA, 19 nt, Artificial Sequence
  Description of Artificial Sequence: Synthetic oligonucleotide
ugaaugauuuugacuauuu

SEQ ID NO: 56183 - RNA, 19 nt, Artificial Sequence
  Description of Artificial Sequence: Synthetic oligonucleotide
ugaagaauuuacagcucag

SEQ ID NO: 56184 - RNA, 19 nt, Artificial Sequence
  Description of Artificial Sequence: Synthetic oligonucleotide
ugcaaaggaugaaguggca

SEQ ID NO: 56185 - RNA, 19 nt, Artificial Sequence
  Description of Artificial Sequence: Synthetic oligonucleotide
uuugaugaagaauuuacag

SEQ ID NO: 56186 - RNA, 19 nt, Artificial Sequence
  Description of Artificial Sequence: Synthetic oligonucleotide
gcuuuuugagcucauccuc

SEQ ID NO: 56187 - RNA, 19 nt, Artificial Sequence
  Description of Artificial Sequence: Synthetic oligonucleotide
cuccagaauaucuggcacc

SEQ ID NO: 56188 - RNA, 19 nt, Artificial Sequence
  Description of Artificial Sequence: Synthetic oligonucleotide
agugacggggccaccauga

SEQ ID NO: 56189 - RNA, 19 nt, Artificial Sequence
  Description of Artificial Sequence: Synthetic oligonucleotide
gugacggggccaccaugaa

SEQ ID NO: 56190 - RNA, 19 nt, Artificial Sequence
  Description of Artificial Sequence: Synthetic oligonucleotide
gucaccgagagccgggucc

SEQ ID NO: 56191 - RNA, 19 nt, Artificial Sequence
  Description of Artificial Sequence: Synthetic oligonucleotide
augcagccaccaugaagac

SEQ ID NO: 56192 - RNA, 19 nt, Artificial Sequence
  Description of Artificial Sequence: Synthetic oligonucleotide
gaugcagccaccaugaaga

SEQ ID NO: 56193 - RNA, 19 nt, Artificial Sequence
  Description of Artificial Sequence: Synthetic oligonucleotide
agacgcugccgcugccgcu

SEQ ID NO: 56194 - RNA, 19 nt, Artificial Sequence
  Description of Artificial Sequence: Synthetic oligonucleotide
gagcggccccggcccaaca

SEQ ID NO: 56195 - RNA, 19 nt, Artificial Sequence
  Description of Artificial Sequence: Synthetic oligonucleotide
uuucaaaaaaaaaaaaaaa

SEQ ID NO: 56196 - RNA, 19 nt, Artificial Sequence
  Description of Artificial Sequence: Synthetic oligonucleotide
uacaaggagaggcccgagg

SEQ ID NO: 56197 - RNA, 19 nt, Artificial Sequence
  Description of Artificial Sequence: Synthetic oligonucleotide
gcagccaccaugaagacau

SEQ ID NO: 56198 - RNA, 19 nt, Artificial Sequence
  Description of Artificial Sequence: Synthetic oligonucleotide
acaccugaguaccuggccc

SEQ ID NO: 56199 - RNA, 19 nt, Artificial Sequence
  Description of Artificial Sequence: Synthetic oligonucleotide
agaagaagcucagcccacc

SEQ ID NO: 56200 - RNA, 19 nt, Artificial Sequence
  Description of Artificial Sequence: Synthetic oligonucleotide
caccugaguaccuggcccc

SEQ ID NO: 56201 - RNA, 19 nt, Artificial Sequence
  Description of Artificial Sequence: Synthetic oligonucleotide
gaagaagcucagcccaccc

SEQ ID NO: 56202 - RNA, 19 nt, Artificial Sequence
  Description of Artificial Sequence: Synthetic oligonucleotide
gcacaccugaguaccuggc

SEQ ID NO: 56203 - RNA, 19 nt, Artificial Sequence
  Description of Artificial Sequence: Synthetic oligonucleotide
ggcacaccugaguaccugg

SEQ ID NO: 56204 - DNA, 21 bp, Artificial Sequence
  Description of Artificial Sequence: Synthetic oligonucleotide
  Description of Combined DNA/RNA Molecule: Synthetic oligonucleotide
cuacacaaaucagcgauuutt

SEQ ID NO: 56205 - DNA, 21 bp, Artificial Sequence
  Description of Artificial Sequence: Synthetic oligonucleotide
  Description of Combined DNA/RNA Molecule: Synthetic oligonucleotide
aaaucgcugauuuguguagtt

SEQ ID NO: 56206 - DNA, 25 bp, Artificial Sequence
  Description of Artificial Sequence: Synthetic oligonucleotide
  Description of Combined DNA/RNA Molecule: Synthetic oligonucleotide
cuacacaaaucagcgauuuccaugt

SEQ ID NO: 56207 - RNA, 27 nt, Artificial Sequence
  Description of Artificial Sequence: Synthetic oligonucleotide
acauggaaaucgcugauuuguguaguc

SEQ ID NO: 56208 - RNA, 13 nt, Artificial Sequence
  Description of Artificial Sequence: Synthetic oligonucleotide
cuacacaaaucag

SEQ ID NO: 56209 - DNA, 11 bp, Artificial Sequence
  Description of Artificial Sequence: Synthetic oligonucleotide
  Description of Combined DNA/RNA Molecule: Synthetic oligonucleotide
gauuuccaugt

SEQ ID NO: 56210 - DNA, 21 bp, Artificial Sequence
  Description of Artificial Sequence: Synthetic oligonucleotide
  Description of Combined DNA/RNA Molecule: Synthetic oligonucleotide
ggaucuuauuucuucggagtt

SEQ ID NO: 56211 - DNA, 21 bp, Artificial Sequence
  Description of Artificial Sequence: Synthetic oligonucleotide
  Description of Combined DNA/RNA Molecule: Synthetic oligonucleotide
cuccgaagaaauaagaucctt

SEQ ID NO: 56212 - RNA, 11 nt, Artificial Sequence
  Description of Artificial Sequence: Synthetic oligonucleotide
ggaucuuauuu

SEQ ID NO: 56213 - DNA, 10 bp, Artificial Sequence
  Description of Artificial Sequence: Synthetic oligonucleotide
  Description of Combined DNA/RNA Molecule: Synthetic oligonucleotide
cuucggagtt

SEQ ID NO: 56214 - RNA, 27 nt, Artificial Sequence
  Description of Artificial Sequence: Synthetic oligonucleotide
cauugucuccgaagaaauaagauccuu

SEQ ID NO: 56215 - RNA, 8 nt, Artificial Sequence
  Description of Artificial Sequence: Synthetic oligonucleotide
  modified_base (2): LNA-G
ggaucuua

SEQ ID NO: 56216 - DNA, 17 bp, Artificial Sequence
  Description of Artificial Sequence: Synthetic oligonucleotide
  Description of Combined DNA/RNA Molecule: Synthetic oligonucleotide
uuucuucggagacaatg

SEQ ID NO: 56217 - DNA, 16 bp, Artificial Sequence
  Description of Artificial Sequence: Synthetic oligonucleotide
  Description of Combined DNA/RNA Molecule: Synthetic oligonucleotide
uucuucggagacaatg

SEQ ID NO: 56218 - DNA, 15 bp, Artificial Sequence
  Description of Artificial Sequence: Synthetic oligonucleotide
  Description of Combined DNA/RNA Molecule: Synthetic oligonucleotide
ucuucggagacaatg

SEQ ID NO: 56219 - DNA, 14 bp, Artificial Sequence
  Description of Artificial Sequence: Synthetic oligonucleotide
  Description of Combined DNA/RNA Molecule: Synthetic oligonucleotide
cuucggagacaatg

SEQ ID NO: 56220 - DNA, 13 bp, Artificial Sequence
  Description of Artificial Sequence: Synthetic oligonucleotide
  Description of Combined DNA/RNA Molecule: Synthetic oligonucleotide
uucggagacaatg

SEQ ID NO: 56221 - DNA, 12 bp, Artificial Sequence
  Description of Artificial Sequence: Synthetic oligonucleotide
  Description of Combined DNA/RNA Molecule: Synthetic oligonucleotide
ucggagacaatg

SEQ ID NO: 56222 - DNA, 11 bp, Artificial Sequence
  Description of Artificial Sequence: Synthetic oligonucleotide
  Description of Combined DNA/RNA Molecule: Synthetic oligonucleotide
cggagacaatg

SEQ ID NO: 56223 - RNA, 9 nt, Artificial Sequence
  Description of Artificial Sequence: Synthetic oligonucleotide
  modified_base (2): LNA-G
ggaucuuau

SEQ ID NO: 56224 - RNA, 10 nt, Artificial Sequence
  Description of Artificial Sequence: Synthetic oligonucleotide
  modified_base (2): LNA-G
ggaucuuauu

SEQ ID NO: 56225 - RNA, 11 nt, Artificial Sequence
  Description of Artificial Sequence: Synthetic oligonucleotide
  modified_base (2): LNA-G
ggaucuuauuu

SEQ ID NO: 56226 - RNA, 12 nt, Artificial Sequence
  Description of Artificial Sequence: Synthetic oligonucleotide
  modified_base (2): LNA-G
ggaucuuauuuc

SEQ ID NO: 56227 - RNA, 8 nt, Artificial Sequence
  Description of Artificial Sequence: Synthetic oligonucleotide
  modified_base (3): LNA-A
cuacacaa

SEQ ID NO: 56228 - DNA, 13 bp, Artificial Sequence
  Description of Artificial Sequence: Synthetic oligonucleotide
  Description of Combined DNA/RNA Molecule: Synthetic oligonucleotide
  modified_base (8): LNA-A
aucagcgauuutt

SEQ ID NO: 56229 - DNA, 12 bp, Artificial Sequence
  Description of Artificial Sequence: Synthetic oligonucleotide
  Description of Combined DNA/RNA Molecule: Synthetic oligonucleotide
  modified_base (7): LNA-A
ucagcgauuutt

SEQ ID NO: 56230 - DNA, 11 bp, Artificial Sequence
  Description of Artificial Sequence: Synthetic oligonucleotide
  Description of Combined DNA/RNA Molecule: Synthetic oligonucleotide
  modified_base (6): LNA-A
cagcgauuutt

SEQ ID NO: 56231 - DNA, 10 bp, Artificial Sequence
  Description of Artificial Sequence: Synthetic oligonucleotide
  Description of Combined DNA/RNA Molecule: Synthetic oligonucleotide
  modified_base (5): LNA-A
agcgauuutt

SEQ ID NO: 56232 - DNA, 9 bp, Artificial Sequence
  Description of Artificial Sequence: Synthetic oligonucleotide
  Description of Combined DNA/RNA Molecule: Synthetic oligonucleotide
  modified_base (4): LNA-A
gcgauuutt

SEQ ID NO: 56233 - DNA, 8 bp, Artificial Sequence
  Description of Artificial Sequence: Synthetic oligonucleotide
  Description of Combined DNA/RNA Molecule: Synthetic oligonucleotide
  modified_base (3): LNA-A
cgauuutt

SEQ ID NO: 56234 - DNA, 7 bp, Artificial Sequence
  Description of Artificial Sequence: Synthetic oligonucleotide
  Description of Combined DNA/RNA Molecule: Synthetic oligonucleotide
  modified_base (2): LNA-A
gauuutt

SEQ ID NO: 56235 - RNA, 9 nt, Artificial Sequence
  Description of Artificial Sequence: Synthetic oligonucleotide
  modified_base (3): LNA-A
cuacacaaa

SEQ ID NO: 56236 - RNA, 10 nt, Artificial Sequence
  Description of Artificial Sequence: Synthetic oligonucleotide
  modified_base (3): LNA-A
cuacacaaau

SEQ ID NO: 56237 - RNA, 11 nt, Artificial Sequence
  Description of Artificial Sequence: Synthetic oligonucleotide
  modified_base (3): LNA-A
cuacacaaauc

SEQ ID NO: 56238 - RNA, 12 nt, Artificial Sequence
  Description of Artificial Sequence: Synthetic oligonucleotide
  modified_base (3): LNA-A
cuacacaaauca

SEQ ID NO: 56239 - RNA, 13 nt, Artificial Sequence
  Description of Artificial Sequence: Synthetic oligonucleotide
  modified_base (3): LNA-A
cuacacaaaucag

SEQ ID NO: 56240 - RNA, 14 nt, Artificial Sequence
  Description of Artificial Sequence: Synthetic oligonucleotide
  modified_base (3): LNA-A
cuacacaaaucagc

SEQ ID NO: 56241 - RNA, 13 nt, Artificial Sequence
  Description of Artificial Sequence: Synthetic oligonucleotide
  modified_base (2): LNA-G
ggaucuuauuucu

SEQ ID NO: 56242 - RNA, 14 nt, Artificial Sequence
  Description of Artificial Sequence: Synthetic oligonucleotide
  modified_base (2): LNA-G
ggaucuuauuucuu

SEQ ID NO: 56243 - RNA, 8 nt, Artificial Sequence
  Description of Artificial Sequence: Synthetic oligonucleotide
  modified_base (2): LNA-G
  modified_base (8): LNA-A
ggaucuua

SEQ ID NO: 56244 - RNA, 9 nt, Artificial Sequence
  Description of Artificial Sequence: Synthetic oligonucleotide
  modified_base (2): LNA-G
  modified_base (9): LNA-U
ggaucuuau

SEQ ID NO: 56245 - RNA, 10 nt, Artificial Sequence
  Description of Artificial Sequence: Synthetic oligonucleotide
  modified_base (2): LNA-G
  modified_base (10): LNA-U
ggaucuuauu

SEQ ID NO: 56246 - RNA, 11 nt, Artificial Sequence
  Description of Artificial Sequence: Synthetic oligonucleotide
  modified_base (2): LNA-G
  modified_base (11): LNA-U
ggaucuuauuu

SEQ ID NO: 56247 - RNA, 12 nt, Artificial Sequence
  Description of Artificial Sequence: Synthetic oligonucleotide
  modified_base (2): LNA-G
  modified_base (12): LNA-C
ggaucuuauuuc

SEQ ID NO: 56248 - RNA, 13 nt, Artificial Sequence
  Description of Artificial Sequence: Synthetic oligonucleotide
  modified_base (2): LNA-G
  modified_base (13): LNA-U
ggaucuuauuucu

SEQ ID NO: 56249 - RNA, 14 nt, Artificial Sequence
  Description of Artificial Sequence: Synthetic oligonucleotide
  modified_base (2): LNA-G
  modified_base (14): LNA-U
ggaucuuauuucuu

SEQ ID NO: 56250 - DNA, 13 bp, Artificial Sequence
  Description of Artificial Sequence: Synthetic oligonucleotide
  Description of Combined DNA/RNA Molecule: Synthetic oligonucleotide
  modified_base (8): LNA-G
uuucuucggagtt

SEQ ID NO: 56251 - DNA, 12 bp, Artificial Sequence
  Description of Artificial Sequence: Synthetic oligonucleotide
  Description of Combined DNA/RNA Molecule: Synthetic oligonucleotide
  modified_base (7): LNA-G
uucuucggagtt

SEQ ID NO: 56252 - DNA, 11 bp, Artificial Sequence
  Description of Artificial Sequence: Synthetic oligonucleotide
  Description of Combined DNA/RNA Molecule: Synthetic oligonucleotide
  modified_base (6): LNA-G
ucuucggagtt

SEQ ID NO: 56253 - DNA, 10 bp, Artificial Sequence
  Description of Artificial Sequence: Synthetic oligonucleotide
  Description of Combined DNA/RNA Molecule: Synthetic oligonucleotide
  modified_base (5): LNA-G
cuucggagtt

SEQ ID NO: 56254 - DNA, 9 bp, Artificial Sequence
  Description of Artificial Sequence: Synthetic oligonucleotide
  Description of Combined DNA/RNA Molecule: Synthetic oligonucleotide
  modified_base (4): LNA-G
uucggagtt

SEQ ID NO: 56255 - DNA, 8 bp, Artificial Sequence
  Description of Artificial Sequence: Synthetic oligonucleotide
  Description of Combined DNA/RNA Molecule: Synthetic oligonucleotide
  modified_base (3): LNA-G
ucggagtt

SEQ ID NO: 56256 - DNA, 7 bp, Artificial Sequence
  Description of Artificial Sequence: Synthetic oligonucleotide
  Description of Combined DNA/RNA Molecule: Synthetic oligonucleotide
  modified_base (2): LNA-G
cggagtt

SEQ ID NO: 56257 - DNA, 13 bp, Artificial Sequence
  Description of Artificial Sequence: Synthetic oligonucleotide
  Description of Combined DNA/RNA Molecule: Synthetic oligonucleotide
  modified_base (1): LNA-U
  modified_base (8): LNA-G
uuucuucggagtt

SEQ ID NO: 56258 - DNA, 12 bp, Artificial Sequence
  Description of Artificial Sequence: Synthetic oligonucleotide
  Description of Combined DNA/RNA Molecule: Synthetic oligonucleotide
  modified_base (1): LNA-U
  modified_base (7): LNA-G
uucuucggagtt

SEQ ID NO: 56259 - DNA, 11 bp, Artificial Sequence
  Description of Artificial Sequence: Synthetic oligonucleotide
  Description of Combined DNA/RNA Molecule: Synthetic oligonucleotide
  modified_base (1): LNA-U
  modified_base (6): LNA-G
ucuucggagtt

SEQ ID NO: 56260 - DNA, 10 bp, Artificial Sequence
  Description of Artificial Sequence: Synthetic oligonucleotide
  Description of Combined DNA/RNA Molecule: Synthetic oligonucleotide
  modified_base (1): LNA-C
  modified_base (5): LNA-G
cuucggagtt

SEQ ID NO: 56261 - DNA, 9 bp, Artificial Sequence
  Description of Artificial Sequence: Synthetic oligonucleotide
  Description of Combined DNA/RNA Molecule: Synthetic oligonucleotide
  modified_base (1): LNA-U
  modified_base (4): LNA-G
uucggagtt

SEQ ID NO: 56262 - DNA, 8 bp, Artificial Sequence
  Description of Artificial Sequence: Synthetic oligonucleotide
  Description of Combined DNA/RNA Molecule: Synthetic oligonucleotide
  modified_base (1): LNA-U
  modified_base (3): LNA-G
ucggagtt

SEQ ID NO: 56263 - DNA, 7 bp, Artificial Sequence
  Description of Artificial Sequence: Synthetic oligonucleotide
  Description of Combined DNA/RNA Molecule: Synthetic oligonucleotide
  modified_base (1): LNA-C
  modified_base (2): LNA-G
cggagtt

SEQ ID NO: 56264 - DNA, 21 bp, Artificial Sequence
  Description of Artificial Sequence: Synthetic oligonucleotide
  Description of Combined DNA/RNA Molecule: Synthetic oligonucleotide
  modified_base (2): LNA-G
  modified_base (16): LNA-G
ggaucuuauuucuucggagtt

SEQ ID NO: 56265 - DNA, 25 bp, Artificial Sequence
  Description of Artificial Sequence: Synthetic oligonucleotide
  Description of Combined DNA/RNA Molecule: Synthetic oligonucleotide
ggaucuuauuucuucggagacaatg

SEQ ID NO: 56266 - RNA, 25 nt, Artificial Sequence
  Description of Artificial Sequence: Synthetic oligonucleotide
uuaagcagaguucaaaagcccuuca

SEQ ID NO: 56267 - RNA, 25 nt, Artificial Sequence
  Description of Artificial Sequence: Synthetic oligonucleotide
uaagcagaguucaaaagcccuucag

SEQ ID NO: 56268 - RNA, 25 nt, Artificial Sequence
  Description of Artificial Sequence: Synthetic oligonucleotide
agcagaguucaaaagcccuucagcg

SEQ ID NO: 56269 - RNA, 25 nt, Artificial Sequence
  Description of Artificial Sequence: Synthetic oligonucleotide
cucagggucugagugaagccgcucg

SEQ ID NO: 56270 - RNA, 25 nt, Artificial Sequence
  Description of Artificial Sequence: Synthetic oligonucleotide
caagcaacuacaucacgccagucaa

SEQ ID NO: 56271 - RNA, 25 nt, Artificial Sequence
  Description of Artificial Sequence: Synthetic oligonucleotide
aucaauggcagcuucuuggugcgug

SEQ ID NO: 56272 - RNA, 25 nt, Artificial Sequence
  Description of Artificial Sequence: Synthetic oligonucleotide
uuccagcccacauuggauucaucag

SEQ ID NO: 56273 - RNA, 25 nt, Artificial Sequence
  Description of Artificial Sequence: Synthetic oligonucleotide
cagcugagaauguggaauaccuaag

SEQ ID NO: 56274 - RNA, 25 nt, Artificial Sequence
  Description of Artificial Sequence: Synthetic oligonucleotide
aacguaucuccuaauuugaggcuca

SEQ ID NO: 56275 - RNA, 25 nt, Artificial Sequence
  Description of Artificial Sequence: Synthetic oligonucleotide
ccuaaaauaauuucucuacaauugg

SEQ ID NO: 56276 - RNA, 25 nt, Artificial Sequence
  Description of Artificial Sequence: Synthetic oligonucleotide
uggaagauucagcuaguuaggagcc

SEQ ID NO: 56277 - RNA, 25 nt, Artificial Sequence
  Description of Artificial Sequence: Synthetic oligonucleotide
uuaaacucuccuagucaauauccac

SEQ ID NO: 56278 - RNA, 25 nt, Artificial Sequence
  Description of Artificial Sequence: Synthetic oligonucleotide
cagccuacaguuauguucagucaca

SEQ ID NO: 56279 - RNA, 25 nt, Artificial Sequence
  Description of Artificial Sequence: Synthetic oligonucleotide
guuauguucagucacacacacauac

SEQ ID NO: 56280 - RNA, 25 nt, Artificial Sequence
  Description of Artificial Sequence: Synthetic oligonucleotide
cacauacaaaauguuccuuuugcuu

SEQ ID NO: 56281 - RNA, 25 nt, Artificial Sequence
  Description of Artificial Sequence: Synthetic oligonucleotide
uccuuuugcuuuuaaaguaauuuuu

SEQ ID NO: 56282 - RNA, 25 nt, Artificial Sequence
  Description of Artificial Sequence: Synthetic oligonucleotide
ugaccugugaagcaacagucaaugg

SEQ ID NO: 56283 - RNA, 25 nt, Artificial Sequence
  Description of Artificial Sequence: Synthetic oligonucleotide
cuaucucacacaucgacaaaccaau

SEQ ID NO: 56284 - RNA, 25 nt, Artificial Sequence
  Description of Artificial Sequence: Synthetic oligonucleotide
uguccucaauuguacugcuaccacu

SEQ ID NO: 56285 - RNA, 25 nt, Artificial Sequence
  Description of Artificial Sequence: Synthetic oligonucleotide
aaaccguagcuggcaagcggucuua

SEQ ID NO: 56286 - RNA, 25 nt, Artificial Sequence
  Description of Artificial Sequence: Synthetic oligonucleotide
uagcuggcaagcggucuuaccggcu

SEQ ID NO: 56287 - RNA, 25 nt, Artificial Sequence
  Description of Artificial Sequence: Synthetic oligonucleotide
uuguaugguuaaaagauggguuacc

SEQ ID NO: 56288 - RNA, 25 nt, Artificial Sequence
  Description of Artificial Sequence: Synthetic oligonucleotide
ugguuaaaagauggguuaccugcga

SEQ ID NO: 56289 - RNA, 25 nt, Artificial Sequence
  Description of Artificial Sequence: Synthetic oligonucleotide
cagggaauuauacaaucuugcugag

SEQ ID NO: 56290 - RNA, 25 nt, Artificial Sequence
  Description of Artificial Sequence: Synthetic oligonucleotide
acaaucuugcugagcauaaaacagu

SEQ ID NO: 56291 - RNA, 25 nt, Artificial Sequence
  Description of Artificial Sequence: Synthetic oligonucleotide
ccaauaaugaagaguccuuuauccu

SEQ ID NO: 56292 - RNA, 25 nt, Artificial Sequence
  Description of Artificial Sequence: Synthetic oligonucleotide
acuuuggauguuccaacgcaaguug

SEQ ID NO: 56293 - RNA, 25 nt, Artificial Sequence
  Description of Artificial Sequence: Synthetic oligonucleotide
aaugcuuccacuaaacugaaaccau

SEQ ID NO: 56294 - RNA, 25 nt, Artificial Sequence
  Description of Artificial Sequence: Synthetic oligonucleotide
gagaaaguuugacuuuguuaaauau

SEQ ID NO: 56295 - RNA, 25 nt, Artificial Sequence
  Description of Artificial Sequence: Synthetic oligonucleotide
aaagaacuacuguauauuaaaaguu

SEQ ID NO: 56296 - RNA, 25 nt, Artificial Sequence
  Description of Artificial Sequence: Synthetic oligonucleotide
uuagaaauacggguuuugacuuaac

SEQ ID NO: 56297 - RNA, 25 nt, Artificial Sequence
  Description of Artificial Sequence: Synthetic oligonucleotide
aacauggguacagcaaacucagcac

SEQ ID NO: 56298 - RNA, 25 nt, Artificial Sequence
  Description of Artificial Sequence: Synthetic oligonucleotide
aaagacacagaagaugcugaccuca

SEQ ID NO: 56299 - RNA, 25 nt, Artificial Sequence
  Description of Artificial Sequence: Synthetic oligonucleotide
uaguagggagguuuauucagaucgc

SEQ ID NO: 56300 - RNA, 25 nt, Artificial Sequence
  Description of Artificial Sequence: Synthetic oligonucleotide
gccuucugcagcaggguucugggau

SEQ ID NO: 56301 - RNA, 25 nt, Artificial Sequence
  Description of Artificial Sequence: Synthetic oligonucleotide
ggucugguacauauuggaaauuaug

SEQ ID NO: 56302 - RNA, 25 nt, Artificial Sequence
  Description of Artificial Sequence: Synthetic oligonucleotide
cuaguccuuccgauggaagcacuag

SEQ ID NO: 56303 - RNA, 25 nt, Artificial Sequence
  Description of Artificial Sequence: Synthetic oligonucleotide
ccagugaauauuguuuuuaugugga

SEQ ID NO: 56304 - RNA, 25 nt, Artificial Sequence
  Description of Artificial Sequence: Synthetic oligonucleotide
augaauucaaguuggaauugguaga

SEQ ID NO: 56305 - RNA, 25 nt, Artificial Sequence
  Description of Artificial Sequence: Synthetic oligonucleotide
caggacacagauuuagacuuggaga

SEQ ID NO: 56306 - RNA, 25 nt, Artificial Sequence
  Description of Artificial Sequence: Synthetic oligonucleotide
cucaaagcacaguuacaguauucca

SEQ ID NO: 56307 - RNA, 25 nt, Artificial Sequence
  Description of Artificial Sequence: Synthetic oligonucleotide
accacugccaccacugaugaauuaa

SEQ ID NO: 56308 - RNA, 25 nt, Artificial Sequence
  Description of Artificial Sequence: Synthetic oligonucleotide
gaaacuacuagugccacaucaucac

SEQ ID NO: 56309 - RNA, 25 nt, Artificial Sequence
  Description of Artificial Sequence: Synthetic oligonucleotide
aagucggacagccucaccaaacaga

SEQ ID NO: 56310 - RNA, 25 nt, Artificial Sequence
  Description of Artificial Sequence: Synthetic oligonucleotide
gaaagcgaaaaauggaacaugaugg

SEQ ID NO: 56311 - RNA, 25 nt, Artificial Sequence
  Description of Artificial Sequence: Synthetic oligonucleotide
cccucugauuuagcauguagacugc

SEQ ID NO: 56312 - RNA, 25 nt, Artificial Sequence
  Description of Artificial Sequence: Synthetic oligonucleotide
ugagcuauuuaaggaucuauuuaug

SEQ ID NO: 56313 - RNA, 25 nt, Artificial Sequence
  Description of Artificial Sequence: Synthetic oligonucleotide
aaaaggugaaaaagcacuauuauca

SEQ ID NO: 56314 - RNA, 25 nt, Artificial Sequence
  Description of Artificial Sequence: Synthetic oligonucleotide
gaaaaagcacuauuaucaguucugc

SEQ ID NO: 56315 - RNA, 25 nt, Artificial Sequence
  Description of Artificial Sequence: Synthetic oligonucleotide
ggcugaaaagaaagauuaaaccuac

SEQ ID NO: 56316 - RNA, 25 nt, Artificial Sequence
  Description of Artificial Sequence: Synthetic oligonucleotide
uaaacccuuauaauaaaauccuucu

SEQ ID NO: 56317 - RNA, 25 nt, Artificial Sequence
  Description of Artificial Sequence: Synthetic oligonucleotide
cauacuauuagccaaugcuguagac

SEQ ID NO: 56318 - RNA, 25 nt, Artificial Sequence
  Description of Artificial Sequence: Synthetic oligonucleotide
gacagaagcauuuugauaggaauag

SEQ ID NO: 56319 - RNA, 25 nt, Artificial Sequence
  Description of Artificial Sequence: Synthetic oligonucleotide
agagcaaauaagauaauggcccuga

SEQ ID NO: 56320 - RNA, 25 nt, Artificial Sequence
  Description of Artificial Sequence: Synthetic oligonucleotide
ccaacauuuuucucuuccucaagca

SEQ ID NO: 56321 - RNA, 25 nt, Artificial Sequence
  Description of Artificial Sequence: Synthetic oligonucleotide
uuaaguaugagaaaaguucagccca

SEQ ID NO: 56322 - RNA, 25 nt, Artificial Sequence
  Description of Artificial Sequence: Synthetic oligonucleotide
caggaauaaagauggcugcugaacc

SEQ ID NO: 56323 - RNA, 25 nt, Artificial Sequence
  Description of Artificial Sequence: Synthetic oligonucleotide
aauuugaaugaccaaguucucuuca

SEQ ID NO: 56324 - RNA, 25 nt, Artificial Sequence
  Description of Artificial Sequence: Synthetic oligonucleotide
auguauaaagauagccagccuagag

SEQ ID NO: 56325 - RNA, 25 nt, Artificial Sequence
  Description of Artificial Sequence: Synthetic oligonucleotide
ggcuguaacuaucucugugaagugu

SEQ ID NO: 56326 - RNA, 25 nt, Artificial Sequence
  Description of Artificial Sequence: Synthetic oligonucleotide
ucugugaagugugagaaaauuucaa

SEQ ID NO: 56327 - RNA, 25 nt, Artificial Sequence
  Description of Artificial Sequence: Synthetic oligonucleotide
ccuuuaaggaaaugaauccuccuga

SEQ ID NO: 56328 - RNA, 25 nt, Artificial Sequence
  Description of Artificial Sequence: Synthetic oligonucleotide
aaggauacaaaaagugacaucauau

SEQ ID NO: 56329 - RNA, 25 nt, Artificial Sequence
  Description of Artificial Sequence: Synthetic oligonucleotide
agaugcaauuugaaucuucaucaua

SEQ ID NO: 56330 - RNA, 25 nt, Artificial Sequence
  Description of Artificial Sequence: Synthetic oligonucleotide
guucaaaacgaagacuagcuauuaa

SEQ ID NO: 56331 - RNA, 25 nt, Artificial Sequence
  Description of Artificial Sequence: Synthetic oligonucleotide
gugaaaccucaucucuacuaaaaau

SEQ ID NO: 56332 - RNA, 25 nt, Artificial Sequence
  Description of Artificial Sequence: Synthetic oligonucleotide
acgaaagagaagcucuaucucgccu

SEQ ID NO: 56333 - RNA, 25 nt, Artificial Sequence
  Description of Artificial Sequence: Synthetic oligonucleotide
cuccacaagcgccuucgguccaguu

SEQ ID NO: 56334 - RNA, 25 nt, Artificial Sequence
  Description of Artificial Sequence: Synthetic oligonucleotide
gagaagauuccaaagauguagccgc

SEQ ID NO: 56335 - RNA, 25 nt, Artificial Sequence
  Description of Artificial Sequence: Synthetic oligonucleotide
aaucuggauucaaugaggagacuug

SEQ ID NO: 56336 - RNA, 25 nt, Artificial Sequence
  Description of Artificial Sequence: Synthetic oligonucleotide
agaacagauuugagaguagugagga

SEQ ID NO: 56337 - RNA, 25 nt, Artificial Sequence
  Description of Artificial Sequence: Synthetic oligonucleotide
ccagagcugugcagaugaguacaaa

SEQ ID NO: 56338 - RNA, 25 nt, Artificial Sequence
  Description of Artificial Sequence: Synthetic oligonucleotide
ccucagauuguuguuguuaaugggc

SEQ ID NO: 56339 - RNA, 25 nt, Artificial Sequence
  Description of Artificial Sequence: Synthetic oligonucleotide
cuauuuuaauuauuuuuaauuuauu

SEQ ID NO: 56340 - RNA, 25 nt, Artificial Sequence
  Description of Artificial Sequence: Synthetic oligonucleotide
uuuaauuuauuaauauuuaaauaug

SEQ ID NO: 56341 - RNA, 25 nt, Artificial Sequence
  Description of Artificial Sequence: Synthetic oligonucleotide
augcaguuugaauauccuuuguuuc

SEQ ID NO: 56342 - RNA, 25 nt, Artificial Sequence
  Description of Artificial Sequence: Synthetic oligonucleotide
caugcugcuggcgucuaaguguuug

SEQ ID NO: 56343 - RNA, 25 nt, Artificial Sequence
  Description of Artificial Sequence: Synthetic oligonucleotide
agaugugcauuucaccugugacaaa

SEQ ID NO: 56344 - RNA, 25 nt, Artificial Sequence
  Description of Artificial Sequence: Synthetic oligonucleotide
ucaaaaccugugccaggcugaauua

SEQ ID NO: 56345 - RNA, 25 nt, Artificial Sequence
  Description of Artificial Sequence: Synthetic oligonucleotide
gaauguggguagucauucuuacaau

SEQ ID NO: 56346 - RNA, 25 nt, Artificial Sequence
  Description of Artificial Sequence: Synthetic oligonucleotide
auguggguagucauucuuacaauug

SEQ ID NO: 56347 - RNA, 25 nt, Artificial Sequence
  Description of Artificial Sequence: Synthetic oligonucleotide
ugaaaaugagcaucagagaguguac

SEQ ID NO: 56348 - RNA, 25 nt, Artificial Sequence
  Description of Artificial Sequence: Synthetic oligonucleotide
uugcuuuucauguagaacucagcag

SEQ ID NO: 56349 - RNA, 25 nt, Artificial Sequence
  Description of Artificial Sequence: Synthetic oligonucleotide
uguauuucuauauuuauuuucagua

SEQ ID NO: 56350 - RNA, 25 nt, Artificial Sequence
  Description of Artificial Sequence: Synthetic oligonucleotide
uuugauuaauguuucuuaaauggaa

SEQ ID NO: 56351 - RNA, 25 nt, Artificial Sequence
  Description of Artificial Sequence: Synthetic oligonucleotide
caacguguauagugccuaaaauugu

SEQ ID NO: 56352 - RNA, 25 nt, Artificial Sequence
  Description of Artificial Sequence: Synthetic oligonucleotide
cauauccuuggcuacuaacaucugg

SEQ ID NO: 56353 - RNA, 25 nt, Artificial Sequence
  Description of Artificial Sequence: Synthetic oligonucleotide
uacuaacaucuggagacugugagcu

SEQ ID NO: 56354 - RNA, 25 nt, Artificial Sequence
  Description of Artificial Sequence: Synthetic oligonucleotide
cauaaguugugugcuuuuuauuaau

SEQ ID NO: 56355 - RNA, 25 nt, Artificial Sequence
  Description of Artificial Sequence: Synthetic oligonucleotide
gcaucauuuuggcucuucuuacauu

SEQ ID NO: 56356 - RNA, 25 nt, Artificial Sequence
  Description of Artificial Sequence: Synthetic oligonucleotide
gcucuucuuacauuuguaaaaaugu

SEQ ID NO: 56357 - RNA, 25 nt, Artificial Sequence
  Description of Artificial Sequence: Synthetic oligonucleotide
agauuaggucaucuuaauucauauu

SEQ ID NO: 56358 - RNA, 25 nt, Artificial Sequence
  Description of Artificial Sequence: Synthetic oligonucleotide
auggaauugaaagaacuaaucauga

SEQ ID NO: 56359 - RNA, 25 nt, Artificial Sequence
  Description of Artificial Sequence: Synthetic oligonucleotide
cacacucauuccuucugcucuuggg

SEQ ID NO: 56360 - RNA, 25 nt, Artificial Sequence
  Description of Artificial Sequence: Synthetic oligonucleotide
uguagagguaaccaguagcuuugag

SEQ ID NO: 56361 - RNA, 25 nt, Artificial Sequence
  Description of Artificial Sequence: Synthetic oligonucleotide
caaccacaugccacguaauauuuca

SEQ ID NO: 56362 - RNA, 25 nt, Artificial Sequence
  Description of Artificial Sequence: Synthetic oligonucleotide
ucggaaacaaguuauucucuucacu

SEQ ID NO: 56363 - RNA, 25 nt, Artificial Sequence
  Description of Artificial Sequence: Synthetic oligonucleotide
acucccaauaacuaaugcuaagaaa

SEQ ID NO: 56364 - RNA, 25 nt, Artificial Sequence
  Description of Artificial Sequence: Synthetic oligonucleotide
aaugcuaagaaaugcugaaaaucaa

SEQ ID NO: 56365 - RNA, 25 nt, Artificial Sequence
  Description of Artificial Sequence: Synthetic oligonucleotide
gucuuucucuaaauaugauuacuuu

SEQ ID NO: 56366 - RNA, 25 nt, Artificial Sequence
  Description of Artificial Sequence: Synthetic oligonucleotide
ugaauuucaggcauuuuguucuaca

SEQ ID NO: 56367 - RNA, 25 nt, Artificial Sequence
  Description of Artificial Sequence: Synthetic oligonucleotide
cgauucccucucacccgggacucuc

SEQ ID NO: 56368 - RNA, 25 nt, Artificial Sequence
  Description of Artificial Sequence: Synthetic oligonucleotide
aggaaagugaaccuuuaaaguaaag

SEQ ID NO: 56369 - RNA, 25 nt, Artificial Sequence
  Description of Artificial Sequence: Synthetic oligonucleotide
gaggcugcaugcucuggaagccugg

SEQ ID NO: 56370 - RNA, 25 nt, Artificial Sequence
  Description of Artificial Sequence: Synthetic oligonucleotide
ucucugaacagaaaacaaaagagag

SEQ ID NO: 56371 - RNA, 25 nt, Artificial Sequence
  Description of Artificial Sequence: Synthetic oligonucleotide
aacuuggcuguaaucaguuaugccg

SEQ ID NO: 56372 - RNA, 25 nt, Artificial Sequence
  Description of Artificial Sequence: Synthetic oligonucleotide
agaagccaaaauuaaaagaagucca

SEQ ID NO: 56373 - RNA, 25 nt, Artificial Sequence
  Description of Artificial Sequence: Synthetic oligonucleotide
auuaaaagaaguccaggugagguua

SEQ ID NO: 56374 - RNA, 25 nt, Artificial Sequence
  Description of Artificial Sequence: Synthetic oligonucleotide
gaauccggauuaucgggaagaggac

SEQ ID NO: 56375 - RNA, 25 nt, Artificial Sequence
  Description of Artificial Sequence: Synthetic oligonucleotide
aaugugacaucaaagcaaguauugu

SEQ ID NO: 56376 - RNA, 25 nt, Artificial Sequence
  Description of Artificial Sequence: Synthetic oligonucleotide
caucaaagcaaguauuguagcacuc

SEQ ID NO: 56377 - RNA, 25 nt, Artificial Sequence
  Description of Artificial Sequence: Synthetic oligonucleotide
agagagagaaaacaaaaccacaaau

SEQ ID NO: 56378 - RNA, 25 nt, Artificial Sequence
  Description of Artificial Sequence: Synthetic oligonucleotide
ucgcuguaguauuuaagcccauaca

SEQ ID NO: 56379 - RNA, 25 nt, Artificial Sequence
  Description of Artificial Sequence: Synthetic oligonucleotide
cgcuguaguauuuaagcccauacag

SEQ ID NO: 56380 - RNA, 25 nt, Artificial Sequence
  Description of Artificial Sequence: Synthetic oligonucleotide
auuuaagcccauacagaaaccuucc

SEQ ID NO: 56381 - RNA, 25 nt, Artificial Sequence
  Description of Artificial Sequence: Synthetic oligonucleotide
auuaaaauaaacaugguauaccuac

SEQ ID NO: 56382 - RNA, 25 nt, Artificial Sequence
  Description of Artificial Sequence: Synthetic oligonucleotide
cuguucugaucggccaguuuucgga

SEQ ID NO: 56383 - RNA, 25 nt, Artificial Sequence
  Description of Artificial Sequence: Synthetic oligonucleotide
aaauaauuugaacuuuggaacaggg

SEQ ID NO: 56384 - RNA, 25 nt, Artificial Sequence
  Description of Artificial Sequence: Synthetic oligonucleotide
ugcgaccuuaauuuaacuuuccagu

SEQ ID NO: 56385 - RNA, 25 nt, Artificial Sequence
  Description of Artificial Sequence: Synthetic oligonucleotide
cugagaaagcuaaaguuugguuuug

SEQ ID NO: 56386 - RNA, 25 nt, Artificial Sequence
  Description of Artificial Sequence: Synthetic oligonucleotide
aguaaagaugcuacuucccacugua

SEQ ID NO: 56387 - RNA, 25 nt, Artificial Sequence
  Description of Artificial Sequence: Synthetic oligonucleotide
cugcuuaauugcugauaccauauga

SEQ ID NO: 56388 - RNA, 25 nt, Artificial Sequence
  Description of Artificial Sequence: Synthetic oligonucleotide
uaccauaugaaugaaacaugggcug

SEQ ID NO: 56389 - RNA, 25 nt, Artificial Sequence
  Description of Artificial Sequence: Synthetic oligonucleotide
aacuuucuuauccaacuuuuucaua

SEQ ID NO: 56390 - RNA, 25 nt, Artificial Sequence
  Description of Artificial Sequence: Synthetic oligonucleotide
ccuugcaugacaucaugaggccgga

SEQ ID NO: 56391 - RNA, 25 nt, Artificial Sequence
  Description of Artificial Sequence: Synthetic oligonucleotide
ugaauuuguauaugacugcauuugu

SEQ ID NO: 56392 - RNA, 25 nt, Artificial Sequence
  Description of Artificial Sequence: Synthetic oligonucleotide
gaauccuaguagaauguuuacuacc

SEQ ID NO: 56393 - RNA, 25 nt, Artificial Sequence
  Description of Artificial Sequence: Synthetic oligonucleotide
gaaagggaagaauuuuuugaugaaa

SEQ ID NO: 56394 - RNA, 25 nt, Artificial Sequence
  Description of Artificial Sequence: Synthetic oligonucleotide
uaucggcaugccagugugugaauuu

SEQ ID NO: 56395 - RNA, 25 nt, Artificial Sequence
  Description of Artificial Sequence: Synthetic oligonucleotide
caccucauaguagagcaauguaugu

SEQ ID NO: 56396 - RNA, 25 nt, Artificial Sequence
  Description of Artificial Sequence: Synthetic oligonucleotide
ccagaauugccaaagcacauauaua

SEQ ID NO: 56397 - RNA, 25 nt, Artificial Sequence
  Description of Artificial Sequence: Synthetic oligonucleotide
uggugaucuggguaauaguuucucc

SEQ ID NO: 56398 - RNA, 25 nt, Artificial Sequence
  Description of Artificial Sequence: Synthetic oligonucleotide
gaucuggguaauaguuucuccaaau

SEQ ID NO: 56399 - RNA, 25 nt, Artificial Sequence
  Description of Artificial Sequence: Synthetic oligonucleotide
ggaugugaugaauacuuccuagaaa

SEQ ID NO: 56400 - RNA, 25 nt, Artificial Sequence
  Description of Artificial Sequence: Synthetic oligonucleotide
cauuuccacagcuacaccauauaug

SEQ ID NO: 56401 - RNA, 25 nt, Artificial Sequence
  Description of Artificial Sequence: Synthetic oligonucleotide
acagcuacaccauauaugaauggag

SEQ ID NO: 56402 - RNA, 25 nt, Artificial Sequence
  Description of Artificial Sequence: Synthetic oligonucleotide
ugcaguucuuacacgagaagaagau

SEQ ID NO: 56403 - RNA, 25 nt, Artificial Sequence
  Description of Artificial Sequence: Synthetic oligonucleotide
acgagaagaagaucauuuacaggga

SEQ ID NO: 56404 - RNA, 25 nt, Artificial Sequence
  Description of Artificial Sequence: Synthetic oligonucleotide
cgagaagaagaucauuuacagggac

SEQ ID NO: 56405 - RNA, 25 nt, Artificial Sequence
  Description of Artificial Sequence: Synthetic oligonucleotide
aagaagaucauuuacagggaccuga

SEQ ID NO: 56406 - RNA, 25 nt, Artificial Sequence
  Description of Artificial Sequence: Synthetic oligonucleotide
agaggaagagguguuugacugcauc

SEQ ID NO: 56407 - RNA, 25 nt, Artificial Sequence
  Description of Artificial Sequence: Synthetic oligonucleotide
gaggaagagguguuugacugcaucg

SEQ ID NO: 56408 - RNA, 25 nt, Artificial Sequence
  Description of Artificial Sequence: Synthetic oligonucleotide
cuacuuugagggcgaguucacaggg

SEQ ID NO: 56409 - RNA, 25 nt, Artificial Sequence
  Description of Artificial Sequence: Synthetic oligonucleotide
agggcaucuccuggcaccucugucc

SEQ ID NO: 56410 - RNA, 25 nt, Artificial Sequence
  Description of Artificial Sequence: Synthetic oligonucleotide
ggagugauaugguuugucuuuuuaa

SEQ ID NO: 56411 - RNA, 25 nt, Artificial Sequence
  Description of Artificial Sequence: Synthetic oligonucleotide
gagugauaugguuugucuuuuuaag

SEQ ID NO: 56412 - RNA, 25 nt, Artificial Sequence
  Description of Artificial Sequence: Synthetic oligonucleotide
ugcaguaaagauccuaaagguuguc

SEQ ID NO: 56413 - RNA, 25 nt, Artificial Sequence
  Description of Artificial Sequence: Synthetic oligonucleotide
aguaaagauccuaaagguugucgac

SEQ ID NO: 56414 - RNA, 25 nt, Artificial Sequence
  Description of Artificial Sequence: Synthetic oligonucleotide
ugacaaaggacaaccuggcaauugu

SEQ ID NO: 56415 - RNA, 25 nt, Artificial Sequence
  Description of Artificial Sequence: Synthetic oligonucleotide
gcaauugugacccaguggugcgagg

SEQ ID NO: 56416 - RNA, 25 nt, Artificial Sequence
  Description of Artificial Sequence: Synthetic oligonucleotide
aacaucauccauagagacaugaaau

SEQ ID NO: 56417 - RNA, 25 nt, Artificial Sequence
  Description of Artificial Sequence: Synthetic oligonucleotide
ugaaauccaacaauauauuucucca

SEQ ID NO: 56418 - RNA, 25 nt, Artificial Sequence
  Description of Artificial Sequence: Synthetic oligonucleotide
aacaauauauuucuccaugaaggcu

SEQ ID NO: 56419 - RNA, 25 nt, Artificial Sequence
  Description of Artificial Sequence: Synthetic oligonucleotide
aacaguaaagucacgcuggaguggu

SEQ ID NO: 56420 - RNA, 25 nt, Artificial Sequence
  Description of Artificial Sequence: Synthetic oligonucleotide
ugugaagaaaguaaaggaagagagg

SEQ ID NO: 56421 - RNA, 25 nt, Artificial Sequence
  Description of Artificial Sequence: Synthetic oligonucleotide
cuuccgagccauccuugcaucgggc

SEQ ID NO: 56422 - RNA, 25 nt, Artificial Sequence
  Description of Artificial Sequence: Synthetic oligonucleotide
aauggagguugaauauccuacugug

SEQ ID NO: 56423 - RNA, 25 nt, Artificial Sequence
  Description of Artificial Sequence: Synthetic oligonucleotide
ggagguugaauauccuacuguguaa

SEQ ID NO: 56424 - RNA, 25 nt, Artificial Sequence
  Description of Artificial Sequence: Synthetic oligonucleotide
auuuugaguuuucccuuguagugua

SEQ ID NO: 56425 - RNA, 25 nt, Artificial Sequence
  Description of Artificial Sequence: Synthetic oligonucleotide
uauccuguuuguucuuuguugauug

SEQ ID NO: 56426 - RNA, 25 nt, Artificial Sequence
  Description of Artificial Sequence: Synthetic oligonucleotide
ccuguuuguucuuuguugauugaaa

SEQ ID NO: 56427 - RNA, 25 nt, Artificial Sequence
  Description of Artificial Sequence: Synthetic oligonucleotide
cucuacagccuucuuuuucuuccau

SEQ ID NO: 56428 - RNA, 25 nt, Artificial Sequence
  Description of Artificial Sequence: Synthetic oligonucleotide
ucuuccauagcuaaucuuccuucua

SEQ ID NO: 56429 - RNA, 25 nt, Artificial Sequence
  Description of Artificial Sequence: Synthetic oligonucleotide
auaaucuuccuguugaaugcuucau

SEQ ID NO: 56430 - RNA, 25 nt, Artificial Sequence
  Description of Artificial Sequence: Synthetic oligonucleotide
uaaucuuccuguugaaugcuucaug

SEQ ID NO: 56431 - RNA, 25 nt, Artificial Sequence
  Description of Artificial Sequence: Synthetic oligonucleotide
cuucaugacuugaauucuacuuuga

SEQ ID NO: 56432 - RNA, 25 nt, Artificial Sequence
  Description of Artificial Sequence: Synthetic oligonucleotide
aagagggagagaagcaacuacagac

SEQ ID NO: 56433 - RNA, 25 nt, Artificial Sequence
  Description of Artificial Sequence: Synthetic oligonucleotide
cgucuccuaccagaccaaggucaac

SEQ ID NO: 56434 - RNA, 25 nt, Artificial Sequence
  Description of Artificial Sequence: Synthetic oligonucleotide
gaucaaucggcccgacuaucucgac

SEQ ID NO: 56435 - RNA, 25 nt, Artificial Sequence
  Description of Artificial Sequence: Synthetic oligonucleotide
ggacgaacauccaaccuucccaaac

SEQ ID NO: 56436 - RNA, 25 nt, Artificial Sequence
  Description of Artificial Sequence: Synthetic oligonucleotide
agggucggaacccaagcuuagaacu

SEQ ID NO: 56437 - RNA, 25 nt, Artificial Sequence
  Description of Artificial Sequence: Synthetic oligonucleotide
ucggaacccaagcuuagaacuuuaa

SEQ ID NO: 56438 - RNA, 25 nt, Artificial Sequence
  Description of Artificial Sequence: Synthetic oligonucleotide
acccaagcuuagaacuuuaagcaac

SEQ ID NO: 56439 - RNA, 25 nt, Artificial Sequence
  Description of Artificial Sequence: Synthetic oligonucleotide
gaacuuuaagcaacaagaccaccac

SEQ ID NO: 56440 - RNA, 25 nt, Artificial Sequence
  Description of Artificial Sequence: Synthetic oligonucleotide
acuauucaguggcgagaaauaaagu

SEQ ID NO: 56441 - RNA, 25 nt, Artificial Sequence
  Description of Artificial Sequence: Synthetic oligonucleotide
cuauucaguggcgagaaauaaaguu

SEQ ID NO: 56442 - RNA, 25 nt, Artificial Sequence
  Description of Artificial Sequence: Synthetic oligonucleotide
aaacacagauaacaggaaaugaucc

SEQ ID NO: 56443 - RNA, 25 nt, Artificial Sequence
  Description of Artificial Sequence: Synthetic oligonucleotide
cuuaagaaaagagaagaaaugaaac

SEQ ID NO: 56444 - RNA, 25 nt, Artificial Sequence
  Description of Artificial Sequence: Synthetic oligonucleotide
cugaaggaguguguuuccauccucc

SEQ ID NO: 56445 - RNA, 25 nt, Artificial Sequence
  Description of Artificial Sequence: Synthetic oligonucleotide
ucaccgcgggacugaaaaucuuuga

SEQ ID NO: 56446 - RNA, 25 nt, Artificial Sequence
  Description of Artificial Sequence: Synthetic oligonucleotide
agcagaaauaagcgugccguucagg

SEQ ID NO: 56447 - RNA, 25 nt, Artificial Sequence
  Description of Artificial Sequence: Synthetic oligonucleotide
aagcgugccguucaggguccagaag

SEQ ID NO: 56448 - RNA, 25 nt, Artificial Sequence
  Description of Artificial Sequence: Synthetic oligonucleotide
agaaacagucacucaagacugcuug

SEQ ID NO: 56449 - RNA, 25 nt, Artificial Sequence
  Description of Artificial Sequence: Synthetic oligonucleotide
agaggaagaagguccaugucuuugg

SEQ ID NO: 56450 - RNA, 25 nt, Artificial Sequence
  Description of Artificial Sequence: Synthetic oligonucleotide
uguauucaaaauaugccugaaacac

SEQ ID NO: 56451 - RNA, 25 nt, Artificial Sequence
  Description of Artificial Sequence: Synthetic oligonucleotide
auuuuccucccuuucucuguaccuc

SEQ ID NO: 56452 - RNA, 25 nt, Artificial Sequence
  Description of Artificial Sequence: Synthetic oligonucleotide
caaagaaagauagagcaagacaaga

SEQ ID NO: 56453 - RNA, 25 nt, Artificial Sequence
  Description of Artificial Sequence: Synthetic oligonucleotide
aagaaagauagagcaagacaagaaa

SEQ ID NO: 56454 - RNA, 25 nt, Artificial Sequence
  Description of Artificial Sequence: Synthetic oligonucleotide
gaaagcauuuguuuguacaagaucc

SEQ ID NO: 56455 - RNA, 25 nt, Artificial Sequence
  Description of Artificial Sequence: Synthetic oligonucleotide
ugaguuaaacgaacguacuugcaga

SEQ ID NO: 56456 - RNA, 25 nt, Artificial Sequence
  Description of Artificial Sequence: Synthetic oligonucleotide
acugauacagaacgaucgauacaga

SEQ ID NO: 56457 - RNA, 25 nt, Artificial Sequence
  Description of Artificial Sequence: Synthetic oligonucleotide
auauuauauauauauaaaaauaaau

SEQ ID NO: 56458 - RNA, 25 nt, Artificial Sequence
  Description of Artificial Sequence: Synthetic oligonucleotide
auuauauauauauaaaaauaaauau

SEQ ID NO: 56459 - RNA, 25 nt, Artificial Sequence
  Description of Artificial Sequence: Synthetic oligonucleotide
ucacuggauguauuugacugcugug

SEQ ID NO: 56460 - RNA, 25 nt, Artificial Sequence
  Description of Artificial Sequence: Synthetic oligonucleotide
cagggaagaggaggagaugagagac

SEQ ID NO: 56461 - RNA, 25 nt, Artificial Sequence
  Description of Artificial Sequence: Synthetic oligonucleotide
augaucuuuuuuuugucccacuugg

SEQ ID NO: 56462 - RNA, 27 nt, Artificial Sequence
  Description of Artificial Sequence: Synthetic oligonucleotide
ggccgugaacuccucaucaaaauaccu

SEQ ID NO: 56463 - RNA, 27 nt, Artificial Sequence
  Description of Artificial Sequence: Synthetic oligonucleotide
uggugugauggugaucaucugggccgu

SEQ ID NO: 56464 - RNA, 27 nt, Artificial Sequence
  Description of Artificial Sequence: Synthetic oligonucleotide
aaacccgcaggauaguuuucuucccua

SEQ ID NO: 56465 - RNA, 27 nt, Artificial Sequence
  Description of Artificial Sequence: Synthetic oligonucleotide
caaacuggaugaaauaaauuaaaaccc

SEQ ID NO: 56466 - RNA, 27 nt, Artificial Sequence
  Description of Artificial Sequence: Synthetic oligonucleotide
agaaguccuuaacauuucccuacguga

SEQ ID NO: 56467 - RNA, 27 nt, Artificial Sequence
  Description of Artificial Sequence: Synthetic oligonucleotide
cucugucccacuggguaaacccuggcc

SEQ ID NO: 56468 - RNA, 27 nt, Artificial Sequence
  Description of Artificial Sequence: Synthetic oligonucleotide
cacaauaacaaauuuaaaccuugcucc

SEQ ID NO: 56469 - RNA, 27 nt, Artificial Sequence
  Description of Artificial Sequence: Synthetic oligonucleotide
aaaugcauuugaacaacauaauacaca

SEQ ID NO: 56470 - RNA, 27 nt, Artificial Sequence
  Description of Artificial Sequence: Synthetic oligonucleotide
ggcuuuccugucacaaagauuaaaaac

SEQ ID NO: 56471 - RNA, 27 nt, Artificial Sequence
  Description of Artificial Sequence: Synthetic oligonucleotide
agggcuuuccugucacaaagauuaaaa

SEQ ID NO: 56472 - RNA, 27 nt, Artificial Sequence
  Description of Artificial Sequence: Synthetic oligonucleotide
ggccaugcugggagacauaagcagcag

SEQ ID NO: 56473 - RNA, 27 nt, Artificial Sequence
  Description of Artificial Sequence: Synthetic oligonucleotide
ucagggagaagcuucugaaacacuucu

SEQ ID NO: 56474 - RNA, 27 nt, Artificial Sequence
  Description of Artificial Sequence: Synthetic oligonucleotide
aagggcuucuuccuuauugauggucag

SEQ ID NO: 56475 - RNA, 27 nt, Artificial Sequence
  Description of Artificial Sequence: Synthetic oligonucleotide
ugaagggcuucuuccuuauugaugguc

SEQ ID NO: 56476 - RNA, 27 nt, Artificial Sequence
  Description of Artificial Sequence: Synthetic oligonucleotide
cgcugaagggcuucuuccuuauugaug

SEQ ID NO: 56477 - RNA, 27 nt, Artificial Sequence
  Description of Artificial Sequence: Synthetic oligonucleotide
gccgcugaagggcuucuuccuuauuga

SEQ ID NO: 56478 - RNA, 27 nt, Artificial Sequence
  Description of Artificial Sequence: Synthetic oligonucleotide
acuggccgcugaagggcuucuuccuua

SEQ ID NO: 56479 - RNA, 27 nt, Artificial Sequence
  Description of Artificial Sequence: Synthetic oligonucleotide
cggagcuuuucaccuuuaguuaugcuu

SEQ ID NO: 56480 - RNA, 27 nt, Artificial Sequence
  Description of Artificial Sequence: Synthetic oligonucleotide
ccggagcuuuucaccuuuaguuaugcu

SEQ ID NO: 56481 - RNA, 27 nt, Artificial Sequence
  Description of Artificial Sequence: Synthetic oligonucleotide
cagacuguugacuggcgugauguaguu

SEQ ID NO: 56482 - RNA, 27 nt, Artificial Sequence
  Description of Artificial Sequence: Synthetic oligonucleotide
cuuuugaacucugcuuaaauccagugg

SEQ ID NO: 56483 - RNA, 27 nt, Artificial Sequence
  Description of Artificial Sequence: Synthetic oligonucleotide
gcuuuugaacucugcuuaaauccagug

SEQ ID NO: 56484 - RNA, 27 nt, Artificial Sequence
  Description of Artificial Sequence: Synthetic oligonucleotide
agggcuuuugaacucugcuuaaaucca

SEQ ID NO: 56485 - RNA, 27 nt, Artificial Sequence
  Description of Artificial Sequence: Synthetic oligonucleotide
aagggcuuuugaacucugcuuaaaucc

SEQ ID NO: 56486 - RNA, 27 nt, Artificial Sequence
  Description of Artificial Sequence: Synthetic oligonucleotide
ugaagggcuuuugaacucugcuuaaau

SEQ ID NO: 56487 - RNA, 27 nt, Artificial Sequence
  Description of Artificial Sequence: Synthetic oligonucleotide
cugaagggcuuuugaacucugcuuaaa

SEQ ID NO: 56488 - RNA, 27 nt, Artificial Sequence
  Description of Artificial Sequence: Synthetic oligonucleotide
cgcugaagggcuuuugaacucugcuua

SEQ ID NO: 56489 - RNA, 27 nt, Artificial Sequence
  Description of Artificial Sequence: Synthetic oligonucleotide
cgagcggcuucacucagacccugaggc

SEQ ID NO: 56490 - RNA, 27 nt, Artificial Sequence
  Description of Artificial Sequence: Synthetic oligonucleotide
uugacuggcgugauguaguugcuuggg

SEQ ID NO: 56491 - RNA, 27 nt, Artificial Sequence
  Description of Artificial Sequence: Synthetic oligonucleotide
cacgcaccaagaagcugccauugaucc

SEQ ID NO: 56492 - RNA, 27 nt, Artificial Sequence
  Description of Artificial Sequence: Synthetic oligonucleotide
cugaugaauccaaugugggcuggaauc

SEQ ID NO: 56493 - RNA, 27 nt, Artificial Sequence
  Description of Artificial Sequence: Synthetic oligonucleotide
cuuagguauuccacauucucagcugug

SEQ ID NO: 56494 - RNA, 27 nt, Artificial Sequence
  Description of Artificial Sequence: Synthetic oligonucleotide
ugagccucaaauuaggagauacguuuu

SEQ ID NO: 56495 - RNA, 27 nt, Artificial Sequence
  Description of Artificial Sequence: Synthetic oligonucleotide
ccaauuguagagaaauuauuuuaggaa

SEQ ID NO: 56496 - RNA, 27 nt, Artificial Sequence
  Description of Artificial Sequence: Synthetic oligonucleotide
ggcuccuaacuagcugaaucuuccaau

SEQ ID NO: 56497 - RNA, 27 nt, Artificial Sequence
  Description of Artificial Sequence: Synthetic oligonucleotide
guggauauugacuaggagaguuuaaaa

SEQ ID NO: 56498 - RNA, 27 nt, Artificial Sequence
  Description of Artificial Sequence: Synthetic oligonucleotide
ugugacugaacauaacuguaggcugaa

SEQ ID NO: 56499 - RNA, 27 nt, Artificial Sequence
  Description of Artificial Sequence: Synthetic oligonucleotide
guaugugugugugacugaacauaacug

SEQ ID NO: 56500 - RNA, 27 nt, Artificial Sequence
  Description of Artificial Sequence: Synthetic oligonucleotide
aagcaaaaggaacauuuuguaugugug

SEQ ID NO: 56501 - RNA, 27 nt, Artificial Sequence
  Description of Artificial Sequence: Synthetic oligonucleotide
aaaaauuacuuuaaaagcaaaaggaac

SEQ ID NO: 56502 - RNA, 27 nt, Artificial Sequence
  Description of Artificial Sequence: Synthetic oligonucleotide
ccauugacuguugcuucacaggucaga

SEQ ID NO: 56503 - RNA, 27 nt, Artificial Sequence
  Description of Artificial Sequence: Synthetic oligonucleotide
auugguuugucgaugugugagauaguu

SEQ ID NO: 56504 - RNA, 27 nt, Artificial Sequence
  Description of Artificial Sequence: Synthetic oligonucleotide
agugguagcaguacaauugaggacaag

SEQ ID NO: 56505 - RNA, 27 nt, Artificial Sequence
  Description of Artificial Sequence: Synthetic oligonucleotide
uaagaccgcuugccagcuacgguuuca

SEQ ID NO: 56506 - RNA, 27 nt, Artificial Sequence
  Description of Artificial Sequence: Synthetic oligonucleotide
agccgguaagaccgcuugccagcuacg

SEQ ID NO: 56507 - RNA, 27 nt, Artificial Sequence
  Description of Artificial Sequence: Synthetic oligonucleotide
gguaacccaucuuuuaaccauacaacu

SEQ ID NO: 56508 - RNA, 27 nt, Artificial Sequence
  Description of Artificial Sequence: Synthetic oligonucleotide
ucgcagguaacccaucuuuuaaccaua

SEQ ID NO: 56509 - RNA, 27 nt, Artificial Sequence
  Description of Artificial Sequence: Synthetic oligonucleotide
cucagcaagauuguauaauucccugca

SEQ ID NO: 56510 - RNA, 27 nt, Artificial Sequence
  Description of Artificial Sequence: Synthetic oligonucleotide
acuguuuuaugcucagcaagauuguau

SEQ ID NO: 56511 - RNA, 27 nt, Artificial Sequence
  Description of Artificial Sequence: Synthetic oligonucleotide
aggauaaaggacucuucauuauuggaa

SEQ ID NO: 56512 - RNA, 27 nt, Artificial Sequence
  Description of Artificial Sequence: Synthetic oligonucleotide
caacuugcguuggaacauccaaagugu

SEQ ID NO: 56513 - RNA, 27 nt, Artificial Sequence
  Description of Artificial Sequence: Synthetic oligonucleotide
augguuucaguuuaguggaagcauuua

SEQ ID NO: 56514 - RNA, 27 nt, Artificial Sequence
  Description of Artificial Sequence: Synthetic oligonucleotide
auauuuaacaaagucaaacuuucucac

SEQ ID NO: 56515 - RNA, 27 nt, Artificial Sequence
  Description of Artificial Sequence: Synthetic oligonucleotide
aacuuuuaauauacaguaguucuuuuc

SEQ ID NO: 56516 - RNA, 27 nt, Artificial Sequence
  Description of Artificial Sequence: Synthetic oligonucleotide
guuaagucaaaacccguauuucuaaag

SEQ ID NO: 56517 - RNA, 27 nt, Artificial Sequence
  Description of Artificial Sequence: Synthetic oligonucleotide
gugcugaguuugcuguacccauguuga

SEQ ID NO: 56518 - RNA, 27 nt, Artificial Sequence
  Description of Artificial Sequence: Synthetic oligonucleotide
ugaggucagcaucuucugugucuuuac

SEQ ID NO: 56519 - RNA, 27 nt, Artificial Sequence
  Description of Artificial Sequence: Synthetic oligonucleotide
gcgaucugaauaaaccucccuacuagc

SEQ ID NO: 56520 - RNA, 27 nt, Artificial Sequence
  Description of Artificial Sequence: Synthetic oligonucleotide
aucccagaacccugcugcagaaggcca

SEQ ID NO: 56521 - RNA, 27 nt, Artificial Sequence
  Description of Artificial Sequence: Synthetic oligonucleotide
cauaauuuccaauauguaccagaccuu

SEQ ID NO: 56522 - RNA, 27 nt, Artificial Sequence
  Description of Artificial Sequence: Synthetic oligonucleotide
cuagugcuuccaucggaaggacuaggu

SEQ ID NO: 56523 - RNA, 27 nt, Artificial Sequence
  Description of Artificial Sequence: Synthetic oligonucleotide
uccacauaaaaacaauauucacuggga

SEQ ID NO: 56524 - RNA, 27 nt, Artificial Sequence
  Description of Artificial Sequence: Synthetic oligonucleotide
ucuaccaauuccaacuugaauucauug

SEQ ID NO: 56525 - RNA, 27 nt, Artificial Sequence
  Description of Artificial Sequence: Synthetic oligonucleotide
ucuccaagucuaaaucuguguccugag

SEQ ID NO: 56526 - RNA, 27 nt, Artificial Sequence
  Description of Artificial Sequence: Synthetic oligonucleotide
uggaauacuguaacugugcuuugagga

SEQ ID NO: 56527 - RNA, 27 nt, Artificial Sequence
  Description of Artificial Sequence: Synthetic oligonucleotide
uuaauucaucagugguggcagugguag

SEQ ID NO: 56528 - RNA, 27 nt, Artificial Sequence
  Description of Artificial Sequence: Synthetic oligonucleotide
gugaugauguggcacuaguaguuucuu

SEQ ID NO: 56529 - RNA, 27 nt, Artificial Sequence
  Description of Artificial Sequence: Synthetic oligonucleotide
ucuguuuggugaggcuguccgacuuug

SEQ ID NO: 56530 - RNA, 27 nt, Artificial Sequence
  Description of Artificial Sequence: Synthetic oligonucleotide
ccaucauguuccauuuuucgcuuucuc

SEQ ID NO: 56531 - RNA, 27 nt, Artificial Sequence
  Description of Artificial Sequence: Synthetic oligonucleotide
gcagucuacaugcuaaaucagagggua

SEQ ID NO: 56532 - RNA, 27 nt, Artificial Sequence
  Description of Artificial Sequence: Synthetic oligonucleotide
cauaaauagauccuuaaauagcucaaa

SEQ ID NO: 56533 - RNA, 27 nt, Artificial Sequence
  Description of Artificial Sequence: Synthetic oligonucleotide
ugauaauagugcuuuuucaccuuuuuc

SEQ ID NO: 56534 - RNA, 27 nt, Artificial Sequence
  Description of Artificial Sequence: Synthetic oligonucleotide
gcagaacugauaauagugcuuuuucac

SEQ ID NO: 56535 - RNA, 27 nt, Artificial Sequence
  Description of Artificial Sequence: Synthetic oligonucleotide
guagguuuaaucuuucuuuucagccau

SEQ ID NO: 56536 - RNA, 27 nt, Artificial Sequence
  Description of Artificial Sequence: Synthetic oligonucleotide
agaaggauuuuauuauaaggguuuaau

SEQ ID NO: 56537 - RNA, 27 nt, Artificial Sequence
  Description of Artificial Sequence: Synthetic oligonucleotide
gucuacagcauuggcuaauaguaugaa

SEQ ID NO: 56538 - RNA, 27 nt, Artificial Sequence
  Description of Artificial Sequence: Synthetic oligonucleotide
cuauuccuaucaaaaugcuucugucua

SEQ ID NO: 56539 - RNA, 27 nt, Artificial Sequence
  Description of Artificial Sequence: Synthetic oligonucleotide
ucagggccauuaucuuauuugcucuau

SEQ ID NO: 56540 - RNA, 27 nt, Artificial Sequence
  Description of Artificial Sequence: Synthetic oligonucleotide
ugcuugaggaagagaaaaauguugguc

SEQ ID NO: 56541 - RNA, 27 nt, Artificial Sequence
  Description of Artificial Sequence: Synthetic oligonucleotide
ugggcugaacuuuucucauacuuaaag

SEQ ID NO: 56542 - RNA, 27 nt, Artificial Sequence
  Description of Artificial Sequence: Synthetic oligonucleotide
gguucagcagccaucuuuauuccugcg

SEQ ID NO: 56543 - RNA, 27 nt, Artificial Sequence
  Description of Artificial Sequence: Synthetic oligonucleotide
ugaagagaacuuggucauucaaauuuc

SEQ ID NO: 56544 - RNA, 27 nt, Artificial Sequence
  Description of Artificial Sequence: Synthetic oligonucleotide
cucuaggcuggcuaucuuuauacauac

SEQ ID NO: 56545 - RNA, 27 nt, Artificial Sequence
  Description of Artificial Sequence: Synthetic oligonucleotide
acacuucacagagauaguuacagccau

SEQ ID NO: 56546 - RNA, 27 nt, Artificial Sequence
  Description of Artificial Sequence: Synthetic oligonucleotide
uugaaauuuucucacacuucacagaga

SEQ ID NO: 56547 - RNA, 27 nt, Artificial Sequence
  Description of Artificial Sequence: Synthetic oligonucleotide
ucaggaggauucauuuccuuaaaggaa

SEQ ID NO: 56548 - RNA, 27 nt, Artificial Sequence
  Description of Artificial Sequence: Synthetic oligonucleotide
auaugaugucacuuuuuguauccuuga

SEQ ID NO: 56549 - RNA, 27 nt, Artificial Sequence
  Description of Artificial Sequence: Synthetic oligonucleotide
uaugaugaagauucaaauugcaucuua

SEQ ID NO: 56550 - RNA, 27 nt, Artificial Sequence
  Description of Artificial Sequence: Synthetic oligonucleotide
uuaauagcuagucuucguuuugaacag

SEQ ID NO: 56551 - RNA, 27 nt, Artificial Sequence
  Description of Artificial Sequence: Synthetic oligonucleotide
auuuuuaguagagaugagguuucacca

SEQ ID NO: 56552 - RNA, 27 nt, Artificial Sequence
  Description of Artificial Sequence: Synthetic oligonucleotide
aggcgagauagagcuucucuuucguuc

SEQ ID NO: 56553 - RNA, 27 nt, Artificial Sequence
  Description of Artificial Sequence: Synthetic oligonucleotide
aacuggaccgaaggcgcuuguggagaa

SEQ ID NO: 56554 - RNA, 27 nt, Artificial Sequence
  Description of Artificial Sequence: Synthetic oligonucleotide
gcggcuacaucuuuggaaucuucuccu

SEQ ID NO: 56555 - RNA, 27 nt, Artificial Sequence
  Description of Artificial Sequence: Synthetic oligonucleotide
caagucuccucauugaauccagauugg

SEQ ID NO: 56556 - RNA, 27 nt, Artificial Sequence
  Description of Artificial Sequence: Synthetic oligonucleotide
uccucacuacucucaaaucuguucugg

SEQ ID NO: 56557 - RNA, 27 nt, Artificial Sequence
  Description of Artificial Sequence: Synthetic oligonucleotide
uuuguacucaucugcacagcucuggcu

SEQ ID NO: 56558 - RNA, 27 nt, Artificial Sequence
  Description of Artificial Sequence: Synthetic oligonucleotide
gcccauuaacaacaacaaucugaggug

SEQ ID NO: 56559 - RNA, 27 nt, Artificial Sequence
  Description of Artificial Sequence: Synthetic oligonucleotide
aauaaauuaaaaauaauuaaaauagug

SEQ ID NO: 56560 - RNA, 27 nt, Artificial Sequence
  Description of Artificial Sequence: Synthetic oligonucleotide
cauauuuaaauauuaauaaauuaaaaa

SEQ ID NO: 56561 - RNA, 27 nt, Artificial Sequence
  Description of Artificial Sequence: Synthetic oligonucleotide
gaaacaaaggauauucaaacugcauag

SEQ ID NO: 56562 - RNA, 27 nt, Artificial Sequence
  Description of Artificial Sequence: Synthetic oligonucleotide
caaacacuuagacgccagcagcauggg

SEQ ID NO: 56563 - RNA, 27 nt, Artificial Sequence
  Description of Artificial Sequence: Synthetic oligonucleotide
uuugucacaggugaaaugcacaucuga

SEQ ID NO: 56564 - RNA, 27 nt, Artificial Sequence
  Description of Artificial Sequence: Synthetic oligonucleotide
uaauucagccuggcacagguuuugauc

SEQ ID NO: 56565 - RNA, 27 nt, Artificial Sequence
  Description of Artificial Sequence: Synthetic oligonucleotide
auuguaagaaugacuacccacauucac

SEQ ID NO: 56566 - RNA, 27 nt, Artificial Sequence
  Description of Artificial Sequence: Synthetic oligonucleotide
caauuguaagaaugacuacccacauuc

SEQ ID NO: 56567 - RNA, 27 nt, Artificial Sequence
  Description of Artificial Sequence: Synthetic oligonucleotide
guacacucucugaugcucauuuucaua

SEQ ID NO: 56568 - RNA, 27 nt, Artificial Sequence
  Description of Artificial Sequence: Synthetic oligonucleotide
cugcugaguucuacaugaaaagcaaau

SEQ ID NO: 56569 - RNA, 27 nt, Artificial Sequence
  Description of Artificial Sequence: Synthetic oligonucleotide
uacugaaaauaaauauagaaauacaac

SEQ ID NO: 56570 - RNA, 27 nt, Artificial Sequence
  Description of Artificial Sequence: Synthetic oligonucleotide
uuccauuuaagaaacauuaaucaaaac

SEQ ID NO: 56571 - RNA, 27 nt, Artificial Sequence
  Description of Artificial Sequence: Synthetic oligonucleotide
acaauuuuaggcacuauacacguuguu

SEQ ID NO: 56572 - RNA, 27 nt, Artificial Sequence
  Description of Artificial Sequence: Synthetic oligonucleotide
ccagauguuaguagccaaggauauggu

SEQ ID NO: 56573 - RNA, 27 nt, Artificial Sequence
  Description of Artificial Sequence: Synthetic oligonucleotide
agcucacagucuccagauguuaguagc

SEQ ID NO: 56574 - RNA, 27 nt, Artificial Sequence
  Description of Artificial Sequence: Synthetic oligonucleotide
auuaauaaaaagcacacaacuuauggc

SEQ ID NO: 56575 - RNA, 27 nt, Artificial Sequence
  Description of Artificial Sequence: Synthetic oligonucleotide
aauguaagaagagccaaaaugaugcau

SEQ ID NO: 56576 - RNA, 27 nt, Artificial Sequence
  Description of Artificial Sequence: Synthetic oligonucleotide
acauuuuuacaaauguaagaagagcca

SEQ ID NO: 56577 - RNA, 27 nt, Artificial Sequence
  Description of Artificial Sequence: Synthetic oligonucleotide
aauaugaauuaagaugaccuaaucugu

SEQ ID NO: 56578 - RNA, 27 nt, Artificial Sequence
  Description of Artificial Sequence: Synthetic oligonucleotide
ucaugauuaguucuuucaauuccaucc

SEQ ID NO: 56579 - RNA, 27 nt, Artificial Sequence
  Description of Artificial Sequence: Synthetic oligonucleotide
cccaagagcagaaggaaugagugugca

SEQ ID NO: 56580 - RNA, 27 nt, Artificial Sequence
  Description of Artificial Sequence: Synthetic oligonucleotide
cucaaagcuacugguuaccucuacacc

SEQ ID NO: 56581 - RNA, 27 nt, Artificial Sequence
  Description of Artificial Sequence: Synthetic oligonucleotide
ugaaauauuacguggcaugugguuggg

SEQ ID NO: 56582 - RNA, 27 nt, Artificial Sequence
  Description of Artificial Sequence: Synthetic oligonucleotide
agugaagagaauaacuuguuuccgaag

SEQ ID NO: 56583 - RNA, 27 nt, Artificial Sequence
  Description of Artificial Sequence: Synthetic oligonucleotide
uuucuuagcauuaguuauugggaguga

SEQ ID NO: 56584 - RNA, 27 nt, Artificial Sequence
  Description of Artificial Sequence: Synthetic oligonucleotide
uugauuuucagcauuucuuagcauuag

SEQ ID NO: 56585 - RNA, 27 nt, Artificial Sequence
  Description of Artificial Sequence: Synthetic oligonucleotide
aaaguaaucauauuuagagaaagacag

SEQ ID NO: 56586 - RNA, 27 nt, Artificial Sequence
  Description of Artificial Sequence: Synthetic oligonucleotide
uguagaacaaaaugccugaaauucagc

SEQ ID NO: 56587 - RNA, 27 nt, Artificial Sequence
  Description of Artificial Sequence: Synthetic oligonucleotide
gagagucccgggugagagggaaucgcc

SEQ ID NO: 56588 - RNA, 27 nt, Artificial Sequence
  Description of Artificial Sequence: Synthetic oligonucleotide
cuuuacuuuaaagguucacuuuccuug

SEQ ID NO: 56589 - RNA, 27 nt, Artificial Sequence
  Description of Artificial Sequence: Synthetic oligonucleotide
ccaggcuuccagagcaugcagccuccu

SEQ ID NO: 56590 - RNA, 27 nt, Artificial Sequence
  Description of Artificial Sequence: Synthetic oligonucleotide
cucucuuuuguuuucuguucagagaaa

SEQ ID NO: 56591 - RNA, 27 nt, Artificial Sequence
  Description of Artificial Sequence: Synthetic oligonucleotide
cggcauaacugauuacagccaaguuca

SEQ ID NO: 56592 - RNA, 27 nt, Artificial Sequence
  Description of Artificial Sequence: Synthetic oligonucleotide
uggacuucuuuuaauuuuggcuucuuc

SEQ ID NO: 56593 - RNA, 27 nt, Artificial Sequence
  Description of Artificial Sequence: Synthetic oligonucleotide
uaaccucaccuggacuucuuuuaauuu

SEQ ID NO: 56594 - RNA, 27 nt, Artificial Sequence
  Description of Artificial Sequence: Synthetic oligonucleotide
guccucuucccgauaauccggauucag

SEQ ID NO: 56595 - RNA, 27 nt, Artificial Sequence
  Description of Artificial Sequence: Synthetic oligonucleotide
acaauacuugcuuugaugucacauuaa

SEQ ID NO: 56596 - RNA, 27 nt, Artificial Sequence
  Description of Artificial Sequence: Synthetic oligonucleotide
gagugcuacaauacuugcuuugauguc

SEQ ID NO: 56597 - RNA, 27 nt, Artificial Sequence
  Description of Artificial Sequence: Synthetic oligonucleotide
auuugugguuuuguuuucucucucucu

SEQ ID NO: 56598 - RNA, 27 nt, Artificial Sequence
  Description of Artificial Sequence: Synthetic oligonucleotide
uguaugggcuuaaauacuacagcgagg

SEQ ID NO: 56599 - RNA, 27 nt, Artificial Sequence
  Description of Artificial Sequence: Synthetic oligonucleotide
cuguaugggcuuaaauacuacagcgag

SEQ ID NO: 56600 - RNA, 27 nt, Artificial Sequence
  Description of Artificial Sequence: Synthetic oligonucleotide
ggaagguuucuguaugggcuuaaauac

SEQ ID NO: 56601 - RNA, 27 nt, Artificial Sequence
  Description of Artificial Sequence: Synthetic oligonucleotide
guagguauaccauguuuauuuuaauac

SEQ ID NO: 56602 - RNA, 27 nt, Artificial Sequence
  Description of Artificial Sequence: Synthetic oligonucleotide
uccgaaaacuggccgaucagaacagcc

SEQ ID NO: 56603 - RNA, 27 nt, Artificial Sequence
  Description of Artificial Sequence: Synthetic oligonucleotide
cccuguuccaaaguucaaauuauuugu

SEQ ID NO: 56604 - RNA, 27 nt, Artificial Sequence
  Description of Artificial Sequence: Synthetic oligonucleotide
acuggaaaguuaaauuaaggucgcaau

SEQ ID NO: 56605 - RNA, 27 nt, Artificial Sequence
  Description of Artificial Sequence: Synthetic oligonucleotide
caaaaccaaacuuuagcuuucucagcc

SEQ ID NO: 56606 - RNA, 27 nt, Artificial Sequence
  Description of Artificial Sequence: Synthetic oligonucleotide
uacagugggaaguagcaucuuuacuuu

SEQ ID NO: 56607 - RNA, 27 nt, Artificial Sequence
  Description of Artificial Sequence: Synthetic oligonucleotide
ucauaugguaucagcaauuaagcagua

SEQ ID NO: 56608 - RNA, 27 nt, Artificial Sequence
  Description of Artificial Sequence: Synthetic oligonucleotide
cagcccauguuucauucauaugguauc

SEQ ID NO: 56609 - RNA, 27 nt, Artificial Sequence
  Description of Artificial Sequence: Synthetic oligonucleotide
uaugaaaaaguuggauaagaaaguugg

SEQ ID NO: 56610 - RNA, 27 nt, Artificial Sequence
  Description of Artificial Sequence: Synthetic oligonucleotide
uccggccucaugaugucaugcaaggcu

SEQ ID NO: 56611 - RNA, 27 nt, Artificial Sequence
  Description of Artificial Sequence: Synthetic oligonucleotide
acaaaugcagucauauacaaauucagg

SEQ ID NO: 56612 - RNA, 27 nt, Artificial Sequence
  Description of Artificial Sequence: Synthetic oligonucleotide
gguaguaaacauucuacuaggauucuu

SEQ ID NO: 56613 - RNA, 27 nt, Artificial Sequence
  Description of Artificial Sequence: Synthetic oligonucleotide
uuucaucaaaaaauucuucccuuucug

SEQ ID NO: 56614 - RNA, 27 nt, Artificial Sequence
  Description of Artificial Sequence: Synthetic oligonucleotide
aaauucacacacuggcaugccgauagc

SEQ ID NO: 56615 - RNA, 27 nt, Artificial Sequence
  Description of Artificial Sequence: Synthetic oligonucleotide
acauacauugcucuacuaugaggugaa

SEQ ID NO: 56616 - RNA, 27 nt, Artificial Sequence
  Description of Artificial Sequence: Synthetic oligonucleotide
uauauaugugcuuuggcaauucuggug

SEQ ID NO: 56617 - RNA, 27 nt, Artificial Sequence
  Description of Artificial Sequence: Synthetic oligonucleotide
ggagaaacuauuacccagaucaccacu

SEQ ID NO: 56618 - RNA, 27 nt, Artificial Sequence
  Description of Artificial Sequence: Synthetic oligonucleotide
auuuggagaaacuauuacccagaucac

SEQ ID NO: 56619 - RNA, 27 nt, Artificial Sequence
  Description of Artificial Sequence: Synthetic oligonucleotide
uuucuaggaaguauucaucacauccac

SEQ ID NO: 56620 - RNA, 27 nt, Artificial Sequence
  Description of Artificial Sequence: Synthetic oligonucleotide
cauauaugguguagcuguggaaaugcg

SEQ ID NO: 56621 - RNA, 27 nt, Artificial Sequence
  Description of Artificial Sequence: Synthetic oligonucleotide
cuccauucauauaugguguagcugugg

SEQ ID NO: 56622 - RNA, 27 nt, Artificial Sequence
  Description of Artificial Sequence: Synthetic oligonucleotide
aucuucuucucguguaagaacugcagc

SEQ ID NO: 56623 - RNA, 27 nt, Artificial Sequence
  Description of Artificial Sequence: Synthetic oligonucleotide
ucccuguaaaugaucuucuucucgugu

SEQ ID NO: 56624 - RNA, 27 nt, Artificial Sequence
  Description of Artificial Sequence: Synthetic oligonucleotide
gucccuguaaaugaucuucuucucgug

SEQ ID NO: 56625 - RNA, 27 nt, Artificial Sequence
  Description of Artificial Sequence: Synthetic oligonucleotide
ucaggucccuguaaaugaucuucuucu

SEQ ID NO: 56626 - RNA, 27 nt, Artificial Sequence
  Description of Artificial Sequence: Synthetic oligonucleotide
gaugcagucaaacaccucuuccucugu

SEQ ID NO: 56627 - RNA, 27 nt, Artificial Sequence
  Description of Artificial Sequence: Synthetic oligonucleotide
cgaugcagucaaacaccucuuccucug

SEQ ID NO: 56628 - RNA, 27 nt, Artificial Sequence
  Description of Artificial Sequence: Synthetic oligonucleotide
cccugugaacucgcccucaaaguagcg

SEQ ID NO: 56629 - RNA, 27 nt, Artificial Sequence
  Description of Artificial Sequence: Synthetic oligonucleotide
ggacagaggugccaggagaugcccuca

SEQ ID NO: 56630 - RNA, 27 nt, Artificial Sequence
  Description of Artificial Sequence: Synthetic oligonucleotide
uuaaaaagacaaaccauaucacuccuu

SEQ ID NO: 56631 - RNA, 27 nt, Artificial Sequence
  Description of Artificial Sequence: Synthetic oligonucleotide
cuuaaaaagacaaaccauaucacuccu

SEQ ID NO: 56632 - RNA, 27 nt, Artificial Sequence
  Description of Artificial Sequence: Synthetic oligonucleotide
gacaaccuuuaggaucuuuacugcaac

SEQ ID NO: 56633 - RNA, 27 nt, Artificial Sequence
  Description of Artificial Sequence: Synthetic oligonucleotide
gucgacaaccuuuaggaucuuuacugc

SEQ ID NO: 56634 - RNA, 27 nt, Artificial Sequence
  Description of Artificial Sequence: Synthetic oligonucleotide
acaauugccagguuguccuuugucaug

SEQ ID NO: 56635 - RNA, 27 nt, Artificial Sequence
  Description of Artificial Sequence: Synthetic oligonucleotide
ccucgcaccacugggucacaauugcca

SEQ ID NO: 56636 - RNA, 27 nt, Artificial Sequence
  Description of Artificial Sequence: Synthetic oligonucleotide
auuucaugucucuauggaugauguucu

SEQ ID NO: 56637 - RNA, 27 nt, Artificial Sequence
  Description of Artificial Sequence: Synthetic oligonucleotide
uggagaaauauauuguuggauuucaug

SEQ ID NO: 56638 - RNA, 27 nt, Artificial Sequence
  Description of Artificial Sequence: Synthetic oligonucleotide
agccuucauggagaaauauauuguugg

SEQ ID NO: 56639 - RNA, 27 nt, Artificial Sequence
  Description of Artificial Sequence: Synthetic oligonucleotide
accacuccagcgugacuuuacuguugc

SEQ ID NO: 56640 - RNA, 27 nt, Artificial Sequence
  Description of Artificial Sequence: Synthetic oligonucleotide
ccucucuuccuuuacuuucuucacaca

SEQ ID NO: 56641 - RNA, 27 nt, Artificial Sequence
  Description of Artificial Sequence: Synthetic oligonucleotide
gcccgaugcaaggauggcucggaagcg

SEQ ID NO: 56642 - RNA, 27 nt, Artificial Sequence
  Description of Artificial Sequence: Synthetic oligonucleotide
cacaguaggauauucaaccuccauuuc

SEQ ID NO: 56643 - RNA, 27 nt, Artificial Sequence
  Description of Artificial Sequence: Synthetic oligonucleotide
uuacacaguaggauauucaaccuccau

SEQ ID NO: 56644 - RNA, 27 nt, Artificial Sequence
  Description of Artificial Sequence: Synthetic oligonucleotide
uacacuacaagggaaaacucaaaaucu

SEQ ID NO: 56645 - RNA, 27 nt, Artificial Sequence
  Description of Artificial Sequence: Synthetic oligonucleotide
caaucaacaaagaacaaacaggauaaa

SEQ ID NO: 56646 - RNA, 27 nt, Artificial Sequence
  Description of Artificial Sequence: Synthetic oligonucleotide
uuucaaucaacaaagaacaaacaggau

SEQ ID NO: 56647 - RNA, 27 nt, Artificial Sequence
  Description of Artificial Sequence: Synthetic oligonucleotide
auggaagaaaaagaaggcuguagagaa

SEQ ID NO: 56648 - RNA, 27 nt, Artificial Sequence
  Description of Artificial Sequence: Synthetic oligonucleotide
uagaaggaagauuagcuauggaagaaa

SEQ ID NO: 56649 - RNA, 27 nt, Artificial Sequence
  Description of Artificial Sequence: Synthetic oligonucleotide
augaagcauucaacaggaagauuauuu

SEQ ID NO: 56650 - RNA, 27 nt, Artificial Sequence
  Description of Artificial Sequence: Synthetic oligonucleotide
caugaagcauucaacaggaagauuauu

SEQ ID NO: 56651 - RNA, 27 nt, Artificial Sequence
  Description of Artificial Sequence: Synthetic oligonucleotide
ucaaaguagaauucaagucaugaagca

SEQ ID NO: 56652 - RNA, 27 nt, Artificial Sequence
  Description of Artificial Sequence: Synthetic oligonucleotide
gucuguaguugcuucucucccucuuag

SEQ ID NO: 56653 - RNA, 27 nt, Artificial Sequence
  Description of Artificial Sequence: Synthetic oligonucleotide
guugaccuuggucugguaggagacggc

SEQ ID NO: 56654 - RNA, 27 nt, Artificial Sequence
  Description of Artificial Sequence: Synthetic oligonucleotide
gucgagauagucgggccgauugaucuc

SEQ ID NO: 56655 - RNA, 27 nt, Artificial Sequence
  Description of Artificial Sequence: Synthetic oligonucleotide
guuugggaagguuggauguucguccuc

SEQ ID NO: 56656 - RNA, 27 nt, Artificial Sequence
  Description of Artificial Sequence: Synthetic oligonucleotide
aguucuaagcuuggguuccgacccuaa

SEQ ID NO: 56657 - RNA, 27 nt, Artificial Sequence
  Description of Artificial Sequence: Synthetic oligonucleotide
uuaaaguucuaagcuuggguuccgacc

SEQ ID NO: 56658 - RNA, 27 nt, Artificial Sequence
  Description of Artificial Sequence: Synthetic oligonucleotide
guugcuuaaaguucuaagcuuggguuc

SEQ ID NO: 56659 - RNA, 27 nt, Artificial Sequence
  Description of Artificial Sequence: Synthetic oligonucleotide
gugguggucuuguugcuuaaaguucua

SEQ ID NO: 56660 - RNA, 27 nt, Artificial Sequence
  Description of Artificial Sequence: Synthetic oligonucleotide
acuuuauuucucgccacugaauaguag

SEQ ID NO: 56661 - RNA, 27 nt, Artificial Sequence
  Description of Artificial Sequence: Synthetic oligonucleotide
aacuuuauuucucgccacugaauagua

SEQ ID NO: 56662 - RNA, 27 nt, Artificial Sequence
  Description of Artificial Sequence: Synthetic oligonucleotide
ggaucauuuccuguuaucuguguuugu

SEQ ID NO: 56663 - RNA, 27 nt, Artificial Sequence
  Description of Artificial Sequence: Synthetic oligonucleotide
guuucauuucuucucuuuucuuaaggc

SEQ ID NO: 56664 - RNA, 27 nt, Artificial Sequence
  Description of Artificial Sequence: Synthetic oligonucleotide
ggaggauggaaacacacuccuucaguu

SEQ ID NO: 56665 - RNA, 27 nt, Artificial Sequence
  Description of Artificial Sequence: Synthetic oligonucleotide
ucaaagauuuucagucccgcggugaca

SEQ ID NO: 56666 - RNA, 27 nt, Artificial Sequence
  Description of Artificial Sequence: Synthetic oligonucleotide
ccugaacggcacgcuuauuucugcugu

SEQ ID NO: 56667 - RNA, 27 nt, Artificial Sequence
  Description of Artificial Sequence: Synthetic oligonucleotide
cuucuggacccugaacggcacgcuuau

SEQ ID NO: 56668 - RNA, 27 nt, Artificial Sequence
  Description of Artificial Sequence: Synthetic oligonucleotide
caagcagucuugagugacuguuucuuc

SEQ ID NO: 56669 - RNA, 27 nt, Artificial Sequence
  Description of Artificial Sequence: Synthetic oligonucleotide
ccaaagacauggaccuucuuccucuga

SEQ ID NO: 56670 - RNA, 27 nt, Artificial Sequence
  Description of Artificial Sequence: Synthetic oligonucleotide
guguuucaggcauauuuugaauacauc

SEQ ID NO: 56671 - RNA, 27 nt, Artificial Sequence
  Description of Artificial Sequence: Synthetic oligonucleotide
gagguacagagaaagggaggaaaauag

SEQ ID NO: 56672 - RNA, 27 nt, Artificial Sequence
  Description of Artificial Sequence: Synthetic oligonucleotide
ucuugucuugcucuaucuuucuuuggu

SEQ ID NO: 56673 - RNA, 27 nt, Artificial Sequence
  Description of Artificial Sequence: Synthetic oligonucleotide
uuucuugucuugcucuaucuuucuuug

SEQ ID NO: 56674 - RNA, 27 nt, Artificial Sequence
  Description of Artificial Sequence: Synthetic oligonucleotide
ggaucuuguacaaacaaaugcuuucuc

SEQ ID NO: 56675 - RNA, 27 nt, Artificial Sequence
  Description of Artificial Sequence: Synthetic oligonucleotide
ucugcaaguacguucguuuaacucaag

SEQ ID NO: 56676 - RNA, 27 nt, Artificial Sequence
  Description of Artificial Sequence: Synthetic oligonucleotide
ucuguaucgaucguucuguaucagucu

SEQ ID NO: 56677 - RNA, 27 nt, Artificial Sequence
  Description of Artificial Sequence: Synthetic oligonucleotide
auuuauuuuuauauauauauaauauau

SEQ ID NO: 56678 - RNA, 27 nt, Artificial Sequence
  Description of Artificial Sequence: Synthetic oligonucleotide
auauuuauuuuuauauauauauaauau

SEQ ID NO: 56679 - RNA, 27 nt, Artificial Sequence
  Description of Artificial Sequence: Synthetic oligonucleotide
cacagcagucaaauacauccagugaag

SEQ ID NO: 56680 - RNA, 27 nt, Artificial Sequence
  Description of Artificial Sequence: Synthetic oligonucleotide
gucucucaucuccuccucuucccuguc

SEQ ID NO: 56681 - RNA, 27 nt, Artificial Sequence
  Description of Artificial Sequence: Synthetic oligonucleotide
ccaagugggacaaaaaaaagaucaugc

SEQ ID NO: 56682 - RNA, 14 nt, Artificial Sequence
  Description of Artificial Sequence: Synthetic oligonucleotide
guauuuugaugagg

SEQ ID NO: 56683 - RNA, 12 nt, Artificial Sequence
  Description of Artificial Sequence: Synthetic oligonucleotide
ggcccagaugau

SEQ ID NO: 56684 - RNA, 14 nt, Artificial Sequence
  Description of Artificial Sequence: Synthetic oligonucleotide
gggaagaaaacuau

SEQ ID NO: 56685 - RNA, 15 nt, Artificial Sequence
  Description of Artificial Sequence: Synthetic oligonucleotide
guuuuaauuuauuuc

SEQ ID NO: 56686 - RNA, 12 nt, Artificial Sequence
  Description of Artificial Sequence: Synthetic oligonucleotide
acguagggaaau

SEQ ID NO: 56687 - RNA, 12 nt, Artificial Sequence
  Description of Artificial Sequence: Synthetic oligonucleotide
ccaggguuuacc

SEQ ID NO: 56688 - RNA, 11 nt, Artificial Sequence
  Description of Artificial Sequence: Synthetic oligonucleotide
agcaagguuua

SEQ ID NO: 56689 - RNA, 12 nt, Artificial Sequence
  Description of Artificial Sequence: Synthetic oligonucleotide
uguauuauguug

SEQ ID NO: 56690 - RNA, 15 nt, Artificial Sequence
  Description of Artificial Sequence: Synthetic oligonucleotide
uuuuaaucuuuguga

SEQ ID NO: 56691 - RNA, 14 nt, Artificial Sequence
  Description of Artificial Sequence: Synthetic oligonucleotide
uuaaucuuugugac

SEQ ID NO: 56692 - RNA, 13 nt, Artificial Sequence
  Description of Artificial Sequence: Synthetic oligonucleotide
gcugcuuaugucu

SEQ ID NO: 56693 - RNA, 14 nt, Artificial Sequence
  Description of Artificial Sequence: Synthetic oligonucleotide
aaguguuucagaag

SEQ ID NO: 56694 - RNA, 13 nt, Artificial Sequence
  Description of Artificial Sequence: Synthetic oligonucleotide
gaccaucaauaag

SEQ ID NO: 56695 - RNA, 13 nt, Artificial Sequence
  Description of Artificial Sequence: Synthetic oligonucleotide
ccaucaauaagga

SEQ ID NO: 56696 - RNA, 14 nt, Artificial Sequence
  Description of Artificial Sequence: Synthetic oligonucleotide
ucaauaaggaagaa

SEQ ID NO: 56697 - RNA, 14 nt, Artificial Sequence
  Description of Artificial Sequence: Synthetic oligonucleotide
aauaaggaagaagc

SEQ ID NO: 56698 - RNA, 13 nt, Artificial Sequence
  Description of Artificial Sequence: Synthetic oligonucleotide
aggaagaagcccu

SEQ ID NO: 56699 - RNA, 13 nt, Artificial Sequence
  Description of Artificial Sequence: Synthetic oligonucleotide
gcauaacuaaagg

SEQ ID NO: 56700 - RNA, 14 nt, Artificial Sequence
  Description of Artificial Sequence: Synthetic oligonucleotide
cauaacuaaaggug

SEQ ID NO: 56701 - RNA, 12 nt, Artificial Sequence
  Description of Artificial Sequence: Synthetic oligonucleotide
cuacaucacgcc

SEQ ID NO: 56702 - RNA, 12 nt, Artificial Sequence
  Description of Artificial Sequence: Synthetic oligonucleotide
acuggauuuaag

SEQ ID NO: 56703 - RNA, 12 nt, Artificial Sequence
  Description of Artificial Sequence: Synthetic oligonucleotide
cuggauuuaagc

SEQ ID NO: 56704 - RNA, 13 nt, Artificial Sequence
  Description of Artificial Sequence: Synthetic oligonucleotide
gauuuaagcagag

SEQ ID NO: 56705 - RNA, 13 nt, Artificial Sequence
  Description of Artificial Sequence: Synthetic oligonucleotide
auuuaagcagagu

SEQ ID NO: 56706 - RNA, 13 nt, Artificial Sequence
  Description of Artificial Sequence: Synthetic oligonucleotide
uuaagcagaguuc

SEQ ID NO: 56707 - RNA, 13 nt, Artificial Sequence
  Description of Artificial Sequence: Synthetic oligonucleotide
uaagcagaguuca

SEQ ID NO: 56708 - RNA, 14 nt, Artificial Sequence
  Description of Artificial Sequence: Synthetic oligonucleotide
agcagaguucaaaa

SEQ ID NO: 56709 - RNA, 12 nt, Artificial Sequence
  Description of Artificial Sequence: Synthetic oligonucleotide
cucagggucuga

SEQ ID NO: 56710 - RNA, 13 nt, Artificial Sequence
  Description of Artificial Sequence: Synthetic oligonucleotide
caagcaacuacau

SEQ ID NO: 56711 - RNA, 12 nt, Artificial Sequence
  Description of Artificial Sequence: Synthetic oligonucleotide
aucaauggcagc

SEQ ID NO: 56712 - RNA, 11 nt, Artificial Sequence
  Description of Artificial Sequence: Synthetic oligonucleotide
uuccagcccac

SEQ ID NO: 56713 - RNA, 12 nt, Artificial Sequence
  Description of Artificial Sequence: Synthetic oligonucleotide
cagcugagaaug

SEQ ID NO: 56714 - RNA, 13 nt, Artificial Sequence
  Description of Artificial Sequence: Synthetic oligonucleotide
aacguaucuccua

SEQ ID NO: 56715 - RNA, 14 nt, Artificial Sequence
  Description of Artificial Sequence: Synthetic oligonucleotide
ccuaaaauaauuuc

SEQ ID NO: 56716 - RNA, 13 nt, Artificial Sequence
  Description of Artificial Sequence: Synthetic oligonucleotide
uggaagauucagc

SEQ ID NO: 56717 - RNA, 12 nt, Artificial Sequence
  Description of Artificial Sequence: Synthetic oligonucleotide
uuaaacucuccu

SEQ ID NO: 56718 - RNA, 12 nt, Artificial Sequence
  Description of Artificial Sequence: Synthetic oligonucleotide
cagccuacaguu

SEQ ID NO: 56719 - RNA, 13 nt, Artificial Sequence
  Description of Artificial Sequence: Synthetic oligonucleotide
guuauguucaguc

SEQ ID NO: 56720 - RNA, 13 nt, Artificial Sequence
  Description of Artificial Sequence: Synthetic oligonucleotide
cacauacaaaaug

SEQ ID NO: 56721 - RNA, 9 nt, Artificial Sequence
  Description of Artificial Sequence: Synthetic oligonucleotide
uccuuuugc

SEQ ID NO: 56722 - RNA, 12 nt, Artificial Sequence
  Description of Artificial Sequence: Synthetic oligonucleotide
ugaccugugaag

SEQ ID NO: 56723 - RNA, 12 nt, Artificial Sequence
  Description of Artificial Sequence: Synthetic oligonucleotide
cuaucucacaca

SEQ ID NO: 56724 - RNA, 13 nt, Artificial Sequence
  Description of Artificial Sequence: Synthetic oligonucleotide
uguccucaauugu

SEQ ID NO: 56725 - RNA, 12 nt, Artificial Sequence
  Description of Artificial Sequence: Synthetic oligonucleotide
aaaccguagcug

SEQ ID NO: 56726 - RNA, 12 nt, Artificial Sequence
  Description of Artificial Sequence: Synthetic oligonucleotide
uagcuggcaagc

SEQ ID NO: 56727 - RNA, 14 nt, Artificial Sequence
  Description of Artificial Sequence: Synthetic oligonucleotide
uuguaugguuaaaa

SEQ ID NO: 56728 - RNA, 14 nt, Artificial Sequence
  Description of Artificial Sequence: Synthetic oligonucleotide
ugguuaaaagaugg

SEQ ID NO: 56729 - RNA, 13 nt, Artificial Sequence
  Description of Artificial Sequence: Synthetic oligonucleotide
cagggaauuauac

SEQ ID NO: 56730 - RNA, 12 nt, Artificial Sequence
  Description of Artificial Sequence: Synthetic oligonucleotide
acaaucuugcug

SEQ ID NO: 56731 - RNA, 13 nt, Artificial Sequence
  Description of Artificial Sequence: Synthetic oligonucleotide
ccaauaaugaaga

SEQ ID NO: 56732 - RNA, 13 nt, Artificial Sequence
  Description of Artificial Sequence: Synthetic oligonucleotide
acuuuggauguuc

SEQ ID NO: 56733 - RNA, 12 nt, Artificial Sequence
  Description of Artificial Sequence: Synthetic oligonucleotide
aaugcuuccacu

SEQ ID NO: 56734 - RNA, 11 nt, Artificial Sequence
  Description of Artificial Sequence: Synthetic oligonucleotide
gagaaaguuug

SEQ ID NO: 56735 - RNA, 11 nt, Artificial Sequence
  Description of Artificial Sequence: Synthetic oligonucleotide
aaagaacuacu

SEQ ID NO: 56736 - RNA, 12 nt, Artificial Sequence
  Description of Artificial Sequence: Synthetic oligonucleotide
uuagaaauacgg

SEQ ID NO: 56737 - RNA, 12 nt, Artificial Sequence
  Description of Artificial Sequence: Synthetic oligonucleotide
aacauggguaca

SEQ ID NO: 56738 - RNA, 14 nt, Artificial Sequence
  Description of Artificial Sequence: Synthetic oligonucleotide
aaagacacagaaga

SEQ ID NO: 56739 - RNA, 11 nt, Artificial Sequence
  Description of Artificial Sequence: Synthetic oligonucleotide
uaguagggagg

SEQ ID NO: 56740 - RNA, 12 nt, Artificial Sequence
  Description of Artificial Sequence: Synthetic oligonucleotide
gccuucugcagc

SEQ ID NO: 56741 - RNA, 10 nt, Artificial Sequence
  Description of Artificial Sequence: Synthetic oligonucleotide
ggucugguac

SEQ ID NO: 56742 - RNA, 12 nt, Artificial Sequence
  Description of Artificial Sequence: Synthetic oligonucleotide
cuaguccuuccg

SEQ ID NO: 56743 - RNA, 12 nt, Artificial Sequence
  Description of Artificial Sequence: Synthetic oligonucleotide
ccagugaauauu

SEQ ID NO: 56744 - RNA, 13 nt, Artificial Sequence
  Description of Artificial Sequence: Synthetic oligonucleotide
augaauucaaguu

SEQ ID NO: 56745 - RNA, 12 nt, Artificial Sequence
  Description of Artificial Sequence: Synthetic oligonucleotide
caggacacagau

SEQ ID NO: 56746 - RNA, 12 nt, Artificial Sequence
  Description of Artificial Sequence: Synthetic oligonucleotide
cucaaagcacag

SEQ ID NO: 56747 - RNA, 10 nt, Artificial Sequence
  Description of Artificial Sequence: Synthetic oligonucleotide
accacugcca

SEQ ID NO: 56748 - RNA, 13 nt, Artificial Sequence
  Description of Artificial Sequence: Synthetic oligonucleotide
gaaacuacuagug

SEQ ID NO: 56749 - RNA, 12 nt, Artificial Sequence
  Description of Artificial Sequence: Synthetic oligonucleotide
aagucggacagc

SEQ ID NO: 56750 - RNA, 13 nt, Artificial Sequence
  Description of Artificial Sequence: Synthetic oligonucleotide
gaaagcgaaaaau

SEQ ID NO: 56751 - RNA, 13 nt, Artificial Sequence
  Description of Artificial Sequence: Synthetic oligonucleotide
cccucugauuuag

SEQ ID NO: 56752 - RNA, 12 nt, Artificial Sequence
  Description of Artificial Sequence: Synthetic oligonucleotide
ugagcuauuuaa

SEQ ID NO: 56753 - RNA, 13 nt, Artificial Sequence
  Description of Artificial Sequence: Synthetic oligonucleotide
aaaaggugaaaaa

SEQ ID NO: 56754 - RNA, 14 nt, Artificial Sequence
  Description of Artificial Sequence: Synthetic oligonucleotide
gaaaaagcacuauu

SEQ ID NO: 56755 - RNA, 12 nt, Artificial Sequence
  Description of Artificial Sequence: Synthetic oligonucleotide
ggcugaaaagaa

SEQ ID NO: 56756 - RNA, 12 nt, Artificial Sequence
  Description of Artificial Sequence: Synthetic oligonucleotide
uaaacccuuaua

SEQ ID NO: 56757 - RNA, 13 nt, Artificial Sequence
  Description of Artificial Sequence: Synthetic oligonucleotide
cauacuauuagcc

SEQ ID NO: 56758 - RNA, 12 nt, Artificial Sequence
  Description of Artificial Sequence: Synthetic oligonucleotide
gacagaagcauu

SEQ ID NO: 56759 - RNA, 14 nt, Artificial Sequence
  Description of Artificial Sequence: Synthetic oligonucleotide
agagcaaauaagau

SEQ ID NO: 56760 - RNA, 14 nt, Artificial Sequence
  Description of Artificial Sequence: Synthetic oligonucleotide
ccaacauuuuucuc

SEQ ID NO: 56761 - RNA, 15 nt, Artificial Sequence
  Description of Artificial Sequence: Synthetic oligonucleotide
uuaaguaugagaaaa

SEQ ID NO: 56762 - RNA, 14 nt, Artificial Sequence
  Description of Artificial Sequence: Synthetic oligonucleotide
caggaauaaagaug

SEQ ID NO: 56763 - RNA, 13 nt, Artificial Sequence
  Description of Artificial Sequence: Synthetic oligonucleotide
aauuugaaugacc

SEQ ID NO: 56764 - RNA, 14 nt, Artificial Sequence
  Description of Artificial Sequence: Synthetic oligonucleotide
auguauaaagauag

SEQ ID NO: 56765 - RNA, 12 nt, Artificial Sequence
  Description of Artificial Sequence: Synthetic oligonucleotide
ggcuguaacuau

SEQ ID NO: 56766 - RNA, 11 nt, Artificial Sequence
  Description of Artificial Sequence: Synthetic oligonucleotide
ucugugaagug

SEQ ID NO: 56767 - RNA, 14 nt, Artificial Sequence
  Description of Artificial Sequence: Synthetic oligonucleotide
ccuuuaaggaaaug

SEQ ID NO: 56768 - RNA, 13 nt, Artificial Sequence
  Description of Artificial Sequence: Synthetic oligonucleotide
aaggauacaaaaa

SEQ ID NO: 56769 - RNA, 12 nt, Artificial Sequence
  Description of Artificial Sequence: Synthetic oligonucleotide
agaugcaauuug

SEQ ID NO: 56770 - RNA, 12 nt, Artificial Sequence
  Description of Artificial Sequence: Synthetic oligonucleotide
guucaaaacgaa

SEQ ID NO: 56771 - RNA, 11 nt, Artificial Sequence
  Description of Artificial Sequence: Synthetic oligonucleotide
gugaaaccuca

SEQ ID NO: 56772 - RNA, 13 nt, Artificial Sequence
  Description of Artificial Sequence: Synthetic oligonucleotide
acgaaagagaagc

SEQ ID NO: 56773 - RNA, 12 nt, Artificial Sequence
  Description of Artificial Sequence: Synthetic oligonucleotide
cuccacaagcgc

SEQ ID NO: 56774 - RNA, 14 nt, Artificial Sequence
  Description of Artificial Sequence: Synthetic oligonucleotide
gagaagauuccaaa

SEQ ID NO: 56775 - RNA, 13 nt, Artificial Sequence
  Description of Artificial Sequence: Synthetic oligonucleotide
aaucuggauucaa

SEQ ID NO: 56776 - RNA, 13 nt, Artificial Sequence
  Description of Artificial Sequence: Synthetic oligonucleotide
agaacagauuuga

SEQ ID NO: 56777 - RNA, 11 nt, Artificial Sequence
  Description of Artificial Sequence: Synthetic oligonucleotide
ccagagcugug

SEQ ID NO: 56778 - RNA, 12 nt, Artificial Sequence
  Description of Artificial Sequence: Synthetic oligonucleotide
ccucagauuguu

SEQ ID NO: 56779 - RNA, 12 nt, Artificial Sequence
  Description of Artificial Sequence: Synthetic oligonucleotide
cuauuuuaauua

SEQ ID NO: 56780 - RNA, 13 nt, Artificial Sequence
  Description of Artificial Sequence: Synthetic oligonucleotide
uuuaauuuauuaa

SEQ ID NO: 56781 - RNA, 12 nt, Artificial Sequence
  Description of Artificial Sequence: Synthetic oligonucleotide
augcaguuugaa

SEQ ID NO: 56782 - RNA, 11 nt, Artificial Sequence
  Description of Artificial Sequence: Synthetic oligonucleotide
caugcugcugg

SEQ ID NO: 56783 - RNA, 13 nt, Artificial Sequence
  Description of Artificial Sequence: Synthetic oligonucleotide
agaugugcauuuc

SEQ ID NO: 56784 - RNA, 12 nt, Artificial Sequence
  Description of Artificial Sequence: Synthetic oligonucleotide
ucaaaaccugug

SEQ ID NO: 56785 - RNA, 11 nt, Artificial Sequence
  Description of Artificial Sequence: Synthetic oligonucleotide
gaaugugggua

SEQ ID NO: 56786 - RNA, 10 nt, Artificial Sequence
  Description of Artificial Sequence: Synthetic oligonucleotide
auguggguag

SEQ ID NO: 56787 - RNA, 13 nt, Artificial Sequence
  Description of Artificial Sequence: Synthetic oligonucleotide
ugaaaaugagcau

SEQ ID NO: 56788 - RNA, 13 nt, Artificial Sequence
  Description of Artificial Sequence: Synthetic oligonucleotide
uugcuuuucaugu

SEQ ID NO: 56789 - RNA, 12 nt, Artificial Sequence
  Description of Artificial Sequence: Synthetic oligonucleotide
uguauuucuaua

SEQ ID NO: 56790 - RNA, 13 nt, Artificial Sequence
  Description of Artificial Sequence: Synthetic oligonucleotide
uuugauuaauguu

SEQ ID NO: 56791 - RNA, 12 nt, Artificial Sequence
  Description of Artificial Sequence: Synthetic oligonucleotide
caacguguauag

SEQ ID NO: 56792 - RNA, 12 nt, Artificial Sequence
  Description of Artificial Sequence: Synthetic oligonucleotide
cauauccuuggc

SEQ ID NO: 56793 - RNA, 13 nt, Artificial Sequence
  Description of Artificial Sequence: Synthetic oligonucleotide
uacuaacaucugg

SEQ ID NO: 56794 - RNA, 11 nt, Artificial Sequence
  Description of Artificial Sequence: Synthetic oligonucleotide
cauaaguugug

SEQ ID NO: 56795 - RNA, 12 nt, Artificial Sequence
  Description of Artificial Sequence: Synthetic oligonucleotide
gcaucauuuugg

SEQ ID NO: 56796 - RNA, 10 nt, Artificial Sequence
  Description of Artificial Sequence: Synthetic oligonucleotide
gcucuucuua

SEQ ID NO: 56797 - RNA, 10 nt, Artificial Sequence
  Description of Artificial Sequence: Synthetic oligonucleotide
agauuagguc

SEQ ID NO: 56798 - RNA, 12 nt, Artificial Sequence
  Description of Artificial Sequence: Synthetic oligonucleotide
auggaauugaaa

SEQ ID NO: 56799 - RNA, 13 nt, Artificial Sequence
  Description of Artificial Sequence: Synthetic oligonucleotide
cacacucauuccu

SEQ ID NO: 56800 - RNA, 12 nt, Artificial Sequence
  Description of Artificial Sequence: Synthetic oligonucleotide
uguagagguaac

SEQ ID NO: 56801 - RNA, 11 nt, Artificial Sequence
  Description of Artificial Sequence: Synthetic oligonucleotide
caaccacaugc

SEQ ID NO: 56802 - RNA, 12 nt, Artificial Sequence
  Description of Artificial Sequence: Synthetic oligonucleotide
ucggaaacaagu

SEQ ID NO: 56803 - RNA, 11 nt, Artificial Sequence
  Description of Artificial Sequence: Synthetic oligonucleotide
acucccaauaa

SEQ ID NO: 56804 - RNA, 13 nt, Artificial Sequence
  Description of Artificial Sequence: Synthetic oligonucleotide
aaugcuaagaaau

SEQ ID NO: 56805 - RNA, 11 nt, Artificial Sequence
  Description of Artificial Sequence: Synthetic oligonucleotide
gucuuucucua

SEQ ID NO: 56806 - RNA, 11 nt, Artificial Sequence
  Description of Artificial Sequence: Synthetic oligonucleotide
ugaauuucagg

SEQ ID NO: 56807 - RNA, 13 nt, Artificial Sequence
  Description of Artificial Sequence: Synthetic oligonucleotide
cgauucccucuca

SEQ ID NO: 56808 - RNA, 11 nt, Artificial Sequence
  Description of Artificial Sequence: Synthetic oligonucleotide
aggaaagugaa

SEQ ID NO: 56809 - RNA, 12 nt, Artificial Sequence
  Description of Artificial Sequence: Synthetic oligonucleotide
gaggcugcaugc

SEQ ID NO: 56810 - RNA, 11 nt, Artificial Sequence
  Description of Artificial Sequence: Synthetic oligonucleotide
ucucugaacag

SEQ ID NO: 56811 - RNA, 12 nt, Artificial Sequence
  Description of Artificial Sequence: Synthetic oligonucleotide
aacuuggcugua

SEQ ID NO: 56812 - RNA, 12 nt, Artificial Sequence
  Description of Artificial Sequence: Synthetic oligonucleotide
agaagccaaaau

SEQ ID NO: 56813 - RNA, 14 nt, Artificial Sequence
  Description of Artificial Sequence: Synthetic oligonucleotide
auuaaaagaagucc

SEQ ID NO: 56814 - RNA, 14 nt, Artificial Sequence
  Description of Artificial Sequence: Synthetic oligonucleotide
gaauccggauuauc

SEQ ID NO: 56815 - RNA, 12 nt, Artificial Sequence
  Description of Artificial Sequence: Synthetic oligonucleotide
aaugugacauca

SEQ ID NO: 56816 - RNA, 13 nt, Artificial Sequence
  Description of Artificial Sequence: Synthetic oligonucleotide
caucaaagcaagu

SEQ ID NO: 56817 - RNA, 11 nt, Artificial Sequence
  Description of Artificial Sequence: Synthetic oligonucleotide
agagagagaaa

SEQ ID NO: 56818 - RNA, 13 nt, Artificial Sequence
  Description of Artificial Sequence: Synthetic oligonucleotide
ucgcuguaguauu

SEQ ID NO: 56819 - RNA, 14 nt, Artificial Sequence
  Description of Artificial Sequence: Synthetic oligonucleotide
cgcuguaguauuua

SEQ ID NO: 56820 - RNA, 13 nt, Artificial Sequence
  Description of Artificial Sequence: Synthetic oligonucleotide
auuuaagcccaua

SEQ ID NO: 56821 - RNA, 15 nt, Artificial Sequence
  Description of Artificial Sequence: Synthetic oligonucleotide
auuaaaauaaacaug

SEQ ID NO: 56822 - RNA, 12 nt, Artificial Sequence
  Description of Artificial Sequence: Synthetic oligonucleotide
cuguucugaucg

SEQ ID NO: 56823 - RNA, 16 nt, Artificial Sequence
  Description of Artificial Sequence: Synthetic oligonucleotide
aaauaauuugaacuuu

SEQ ID NO: 56824 - RNA, 12 nt, Artificial Sequence
  Description of Artificial Sequence: Synthetic oligonucleotide
ugcgaccuuaau

SEQ ID NO: 56825 - RNA, 11 nt, Artificial Sequence
  Description of Artificial Sequence: Synthetic oligonucleotide
cugagaaagcu

SEQ ID NO: 56826 - RNA, 13 nt, Artificial Sequence
  Description of Artificial Sequence: Synthetic oligonucleotide
aguaaagaugcua

SEQ ID NO: 56827 - RNA, 12 nt, Artificial Sequence
  Description of Artificial Sequence: Synthetic oligonucleotide
cugcuuaauugc

SEQ ID NO: 56828 - RNA, 14 nt, Artificial Sequence
  Description of Artificial Sequence: Synthetic oligonucleotide
uaccauaugaauga

SEQ ID NO: 56829 - RNA, 12 nt, Artificial Sequence
  Description of Artificial Sequence: Synthetic oligonucleotide
aacuuucuuauc

SEQ ID NO: 56830 - RNA, 13 nt, Artificial Sequence
  Description of Artificial Sequence: Synthetic oligonucleotide
ccuugcaugacau

SEQ ID NO: 56831 - RNA, 14 nt, Artificial Sequence
  Description of Artificial Sequence: Synthetic oligonucleotide
ugaauuuguauaug

SEQ ID NO: 56832 - RNA, 12 nt, Artificial Sequence
  Description of Artificial Sequence: Synthetic oligonucleotide
gaauccuaguag

SEQ ID NO: 56833 - RNA, 10 nt, Artificial Sequence
  Description of Artificial Sequence: Synthetic oligonucleotide
gaaagggaag

SEQ ID NO: 56834 - RNA, 11 nt, Artificial Sequence
  Description of Artificial Sequence: Synthetic oligonucleotide
uaucggcaugc

SEQ ID NO: 56835 - RNA, 12 nt, Artificial Sequence
  Description of Artificial Sequence: Synthetic oligonucleotide
caccucauagua

SEQ ID NO: 56836 - RNA, 11 nt, Artificial Sequence
  Description of Artificial Sequence: Synthetic oligonucleotide
ccagaauugcc

SEQ ID NO: 56837 - RNA, 11 nt, Artificial Sequence
  Description of Artificial Sequence: Synthetic oligonucleotide
uggugaucugg

SEQ ID NO: 56838 - RNA, 12 nt, Artificial Sequence
  Description of Artificial Sequence: Synthetic oligonucleotide
gaucuggguaau

SEQ ID NO: 56839 - RNA, 12 nt, Artificial Sequence
  Description of Artificial Sequence: Synthetic oligonucleotide
ggaugugaugaa

SEQ ID NO: 56840 - RNA, 12 nt, Artificial Sequence
  Description of Artificial Sequence: Synthetic oligonucleotide
cauuuccacagc

SEQ ID NO: 56841 - RNA, 11 nt, Artificial Sequence
  Description of Artificial Sequence: Synthetic oligonucleotide
acagcuacacc

SEQ ID NO: 56842 - RNA, 12 nt, Artificial Sequence
  Description of Artificial Sequence: Synthetic oligonucleotide
ugcaguucuuac

SEQ ID NO: 56843 - RNA, 12 nt, Artificial Sequence
  Description of Artificial Sequence: Synthetic oligonucleotide
acgagaagaaga

SEQ ID NO: 56844 - RNA, 12 nt, Artificial Sequence
  Description of Artificial Sequence: Synthetic oligonucleotide
cgagaagaagau

SEQ ID NO: 56845 - RNA, 15 nt, Artificial Sequence
  Description of Artificial Sequence: Synthetic oligonucleotide
aagaagaucauuuac

SEQ ID NO: 56846 - RNA, 11 nt, Artificial Sequence
  Description of Artificial Sequence: Synthetic oligonucleotide
agaggaagagg

SEQ ID NO: 56847 - RNA, 12 nt, Artificial Sequence
  Description of Artificial Sequence: Synthetic oligonucleotide
gaggaagaggug

SEQ ID NO: 56848 - RNA, 13 nt, Artificial Sequence
  Description of Artificial Sequence: Synthetic oligonucleotide
cuacuuugagggc

SEQ ID NO: 56849 - RNA, 12 nt, Artificial Sequence
  Description of Artificial Sequence: Synthetic oligonucleotide
agggcaucuccu

SEQ ID NO: 56850 - RNA, 10 nt, Artificial Sequence
  Description of Artificial Sequence: Synthetic oligonucleotide
ggagugauau

SEQ ID NO: 56851 - RNA, 11 nt, Artificial Sequence
  Description of Artificial Sequence: Synthetic oligonucleotide
gagugauaugg

SEQ ID NO: 56852 - RNA, 12 nt, Artificial Sequence
  Description of Artificial Sequence: Synthetic oligonucleotide
ugcaguaaagau

SEQ ID NO: 56853 - RNA, 13 nt, Artificial Sequence
  Description of Artificial Sequence: Synthetic oligonucleotide
aguaaagauccua

SEQ ID NO: 56854 - RNA, 12 nt, Artificial Sequence
  Description of Artificial Sequence: Synthetic oligonucleotide
ugacaaaggaca

SEQ ID NO: 56855 - RNA, 13 nt, Artificial Sequence
  Description of Artificial Sequence: Synthetic oligonucleotide
gcaauugugaccc

SEQ ID NO: 56856 - RNA, 12 nt, Artificial Sequence
  Description of Artificial Sequence: Synthetic oligonucleotide
aacaucauccau

SEQ ID NO: 56857 - RNA, 12 nt, Artificial Sequence
  Description of Artificial Sequence: Synthetic oligonucleotide
ugaaauccaaca

SEQ ID NO: 56858 - RNA, 15 nt, Artificial Sequence
  Description of Artificial Sequence: Synthetic oligonucleotide
aacaauauauuucuc

SEQ ID NO: 56859 - RNA, 14 nt, Artificial Sequence
  Description of Artificial Sequence: Synthetic oligonucleotide
aacaguaaagucac

SEQ ID NO: 56860 - RNA, 14 nt, Artificial Sequence
  Description of Artificial Sequence: Synthetic oligonucleotide
ugugaagaaaguaa

SEQ ID NO: 56861 - RNA, 13 nt, Artificial Sequence
  Description of Artificial Sequence: Synthetic oligonucleotide
cuuccgagccauc

SEQ ID NO: 56862 - RNA, 12 nt, Artificial Sequence
  Description of Artificial Sequence: Synthetic oligonucleotide
aauggagguuga

SEQ ID NO: 56863 - RNA, 12 nt, Artificial Sequence
  Description of Artificial Sequence: Synthetic oligonucleotide
ggagguugaaua

SEQ ID NO: 56864 - RNA, 13 nt, Artificial Sequence
  Description of Artificial Sequence: Synthetic oligonucleotide
auuuugaguuuuc

SEQ ID NO: 56865 - RNA, 12 nt, Artificial Sequence
  Description of Artificial Sequence: Synthetic oligonucleotide
uauccuguuugu

SEQ ID NO: 56866 - RNA, 11 nt, Artificial Sequence
  Description of Artificial Sequence: Synthetic oligonucleotide
ccuguuuguuc

SEQ ID NO: 56867 - RNA, 10 nt, Artificial Sequence
  Description of Artificial Sequence: Synthetic oligonucleotide
cucuacagcc

SEQ ID NO: 56868 - RNA, 12 nt, Artificial Sequence
  Description of Artificial Sequence: Synthetic oligonucleotide
ucuuccauagcu

SEQ ID NO: 56869 - RNA, 12 nt, Artificial Sequence
  Description of Artificial Sequence: Synthetic oligonucleotide
auaaucuuccug

SEQ ID NO: 56870 - RNA, 12 nt, Artificial Sequence
  Description of Artificial Sequence: Synthetic oligonucleotide
uaaucuuccugu

SEQ ID NO: 56871 - RNA, 12 nt, Artificial Sequence
  Description of Artificial Sequence: Synthetic oligonucleotide
cuucaugacuug

SEQ ID NO: 56872 - RNA, 12 nt, Artificial Sequence
  Description of Artificial Sequence: Synthetic oligonucleotide
aagagggagaga

SEQ ID NO: 56873 - RNA, 12 nt, Artificial Sequence
  Description of Artificial Sequence: Synthetic oligonucleotide
cgucuccuacca

SEQ ID NO: 56874 - RNA, 12 nt, Artificial Sequence
  Description of Artificial Sequence: Synthetic oligonucleotide
gaucaaucggcc

SEQ ID NO: 56875 - RNA, 12 nt, Artificial Sequence
  Description of Artificial Sequence: Synthetic oligonucleotide
ggacgaacaucc

SEQ ID NO: 56876 - RNA, 11 nt, Artificial Sequence
  Description of Artificial Sequence: Synthetic oligonucleotide
agggucggaac

SEQ ID NO: 56877 - RNA, 10 nt, Artificial Sequence
  Description of Artificial Sequence: Synthetic oligonucleotide
ucggaaccca

SEQ ID NO: 56878 - RNA, 11 nt, Artificial Sequence
  Description of Artificial Sequence: Synthetic oligonucleotide
acccaagcuua

SEQ ID NO: 56879 - RNA, 14 nt, Artificial Sequence
  Description of Artificial Sequence: Synthetic oligonucleotide
gaacuuuaagcaac

SEQ ID NO: 56880 - RNA, 11 nt, Artificial Sequence
  Description of Artificial Sequence: Synthetic oligonucleotide
acuauucagug

SEQ ID NO: 56881 - RNA, 11 nt, Artificial Sequence
  Description of Artificial Sequence: Synthetic oligonucleotide
cuauucagugg

SEQ ID NO: 56882 - RNA, 13 nt, Artificial Sequence
  Description of Artificial Sequence: Synthetic oligonucleotide
aaacacagauaac

SEQ ID NO: 56883 - RNA, 12 nt, Artificial Sequence
  Description of Artificial Sequence: Synthetic oligonucleotide
cuuaagaaaaga

SEQ ID NO: 56884 - RNA, 12 nt, Artificial Sequence
  Description of Artificial Sequence: Synthetic oligonucleotide
cugaaggagugu

SEQ ID NO: 56885 - RNA, 10 nt, Artificial Sequence
  Description of Artificial Sequence: Synthetic oligonucleotide
ucaccgcggg

SEQ ID NO: 56886 - RNA, 14 nt, Artificial Sequence
  Description of Artificial Sequence: Synthetic oligonucleotide
agcagaaauaagcg

SEQ ID NO: 56887 - RNA, 12 nt, Artificial Sequence
  Description of Artificial Sequence: Synthetic oligonucleotide
aagcgugccguu

SEQ ID NO: 56888 - RNA, 12 nt, Artificial Sequence
  Description of Artificial Sequence: Synthetic oligonucleotide
agaaacagucac

SEQ ID NO: 56889 - RNA, 12 nt, Artificial Sequence
  Description of Artificial Sequence: Synthetic oligonucleotide
agaggaagaagg

SEQ ID NO: 56890 - RNA, 14 nt, Artificial Sequence
  Description of Artificial Sequence: Synthetic oligonucleotide
uguauucaaaauau

SEQ ID NO: 56891 - RNA, 13 nt, Artificial Sequence
  Description of Artificial Sequence: Synthetic oligonucleotide
auuuuccucccuu

SEQ ID NO: 56892 - RNA, 13 nt, Artificial Sequence
  Description of Artificial Sequence: Synthetic oligonucleotide
caaagaaagauag

SEQ ID NO: 56893 - RNA, 12 nt, Artificial Sequence
  Description of Artificial Sequence: Synthetic oligonucleotide
aagaaagauaga

SEQ ID NO: 56894 - RNA, 13 nt, Artificial Sequence
  Description of Artificial Sequence: Synthetic oligonucleotide
gaaagcauuuguu

SEQ ID NO: 56895 - RNA, 13 nt, Artificial Sequence
  Description of Artificial Sequence: Synthetic oligonucleotide
ugaguuaaacgaa

SEQ ID NO: 56896 - RNA, 12 nt, Artificial Sequence
  Description of Artificial Sequence: Synthetic oligonucleotide
acugauacagaa

SEQ ID NO: 56897 - RNA, 12 nt, Artificial Sequence
  Description of Artificial Sequence: Synthetic oligonucleotide
auauuauauaua

SEQ ID NO: 56898 - RNA, 12 nt, Artificial Sequence
  Description of Artificial Sequence: Synthetic oligonucleotide
auuauauauaua

SEQ ID NO: 56899 - RNA, 12 nt, Artificial Sequence
  Description of Artificial Sequence: Synthetic oligonucleotide
ucacuggaugua

SEQ ID NO: 56900 - RNA, 12 nt, Artificial Sequence
  Description of Artificial Sequence: Synthetic oligonucleotide
cagggaagagga

SEQ ID NO: 56901 - RNA, 15 nt, Artificial Sequence
  Description of Artificial Sequence: Synthetic oligonucleotide
augaucuuuuuuuug

SEQ ID NO: 56902 - RNA, 11 nt, Artificial Sequence
  Description of Artificial Sequence: Synthetic oligonucleotide
aguucacggcc

SEQ ID NO: 56903 - RNA, 13 nt, Artificial Sequence
  Description of Artificial Sequence: Synthetic oligonucleotide
caccaucacacca

SEQ ID NO: 56904 - RNA, 11 nt, Artificial Sequence
  Description of Artificial Sequence: Synthetic oligonucleotide
ccugcggguuu

SEQ ID NO: 56905 - RNA, 10 nt, Artificial Sequence
  Description of Artificial Sequence: Synthetic oligonucleotide
auccaguuug

SEQ ID NO: 56906 - RNA, 13 nt, Artificial Sequence
  Description of Artificial Sequence: Synthetic oligonucleotide
guuaaggacuucu

SEQ ID NO: 56907 - RNA, 13 nt, Artificial Sequence
  Description of Artificial Sequence: Synthetic oligonucleotide
cagugggacagag

SEQ ID NO: 56908 - RNA, 14 nt, Artificial Sequence
  Description of Artificial Sequence: Synthetic oligonucleotide
aauuuguuauugug

SEQ ID NO: 56909 - RNA, 13 nt, Artificial Sequence
  Description of Artificial Sequence: Synthetic oligonucleotide
uucaaaugcauuu

SEQ ID NO: 56910 - RNA, 10 nt, Artificial Sequence
  Description of Artificial Sequence: Synthetic oligonucleotide
caggaaagcc

SEQ ID NO: 56911 - RNA, 11 nt, Artificial Sequence
  Description of Artificial Sequence: Synthetic oligonucleotide
aggaaagcccu

SEQ ID NO: 56912 - RNA, 12 nt, Artificial Sequence
  Description of Artificial Sequence: Synthetic oligonucleotide
cccagcauggcc

SEQ ID NO: 56913 - RNA, 11 nt, Artificial Sequence
  Description of Artificial Sequence: Synthetic oligonucleotide
cuucucccuga

SEQ ID NO: 56914 - RNA, 12 nt, Artificial Sequence
  Description of Artificial Sequence: Synthetic oligonucleotide
gaagaagcccuu

SEQ ID NO: 56915 - RNA, 12 nt, Artificial Sequence
  Description of Artificial Sequence: Synthetic oligonucleotide
agaagcccuuca

SEQ ID NO: 56916 - RNA, 11 nt, Artificial Sequence
  Description of Artificial Sequence: Synthetic oligonucleotide
gcccuucagcg

SEQ ID NO: 56917 - RNA, 11 nt, Artificial Sequence
  Description of Artificial Sequence: Synthetic oligonucleotide
ccuucagcggc

SEQ ID NO: 56918 - RNA, 12 nt, Artificial Sequence
  Description of Artificial Sequence: Synthetic oligonucleotide
ucagcggccagu

SEQ ID NO: 56919 - RNA, 12 nt, Artificial Sequence
  Description of Artificial Sequence: Synthetic oligonucleotide
ugaaaagcuccg

SEQ ID NO: 56920 - RNA, 11 nt, Artificial Sequence
  Description of Artificial Sequence: Synthetic oligonucleotide
aaaagcuccgg

SEQ ID NO: 56921 - RNA, 13 nt, Artificial Sequence
  Description of Artificial Sequence: Synthetic oligonucleotide
agucaacagucug

SEQ ID NO: 56922 - RNA, 13 nt, Artificial Sequence
  Description of Artificial Sequence: Synthetic oligonucleotide
cagaguucaaaag

SEQ ID NO: 56923 - RNA, 13 nt, Artificial Sequence
  Description of Artificial Sequence: Synthetic oligonucleotide
agaguucaaaagc

SEQ ID NO: 56924 - RNA, 12 nt, Artificial Sequence
  Description of Artificial Sequence: Synthetic oligonucleotide
uucaaaagcccu

SEQ ID NO: 56925 - RNA, 12 nt, Artificial Sequence
  Description of Artificial Sequence: Synthetic oligonucleotide
ucaaaagcccuu

SEQ ID NO: 56926 - RNA, 12 nt, Artificial Sequence
  Description of Artificial Sequence: Synthetic oligonucleotide
aaaagcccuuca

SEQ ID NO: 56927 - RNA, 12 nt, Artificial Sequence
  Description of Artificial Sequence: Synthetic oligonucleotide
aaagcccuucag

SEQ ID NO: 56928 - RNA, 13 nt, Artificial Sequence
  Description of Artificial Sequence: Synthetic oligonucleotide
gugaagccgcucg

SEQ ID NO: 56929 - RNA, 12 nt, Artificial Sequence
  Description of Artificial Sequence: Synthetic oligonucleotide
cacgccagucaa

SEQ ID NO: 56930 - RNA, 13 nt, Artificial Sequence
  Description of Artificial Sequence: Synthetic oligonucleotide
uucuuggugcgug

SEQ ID NO: 56931 - RNA, 14 nt, Artificial Sequence
  Description of Artificial Sequence: Synthetic oligonucleotide
auuggauucaucag

SEQ ID NO: 56932 - RNA, 13 nt, Artificial Sequence
  Description of Artificial Sequence: Synthetic oligonucleotide
uggaauaccuaag

SEQ ID NO: 56933 - RNA, 12 nt, Artificial Sequence
  Description of Artificial Sequence: Synthetic oligonucleotide
auuugaggcuca

SEQ ID NO: 56934 - RNA, 11 nt, Artificial Sequence
  Description of Artificial Sequence: Synthetic oligonucleotide
ucuacaauugg

SEQ ID NO: 56935 - RNA, 12 nt, Artificial Sequence
  Description of Artificial Sequence: Synthetic oligonucleotide
uaguuaggagcc

SEQ ID NO: 56936 - RNA, 13 nt, Artificial Sequence
  Description of Artificial Sequence: Synthetic oligonucleotide
agucaauauccac

SEQ ID NO: 56937 - RNA, 13 nt, Artificial Sequence
  Description of Artificial Sequence: Synthetic oligonucleotide
auguucagucaca

SEQ ID NO: 56938 - RNA, 12 nt, Artificial Sequence
  Description of Artificial Sequence: Synthetic oligonucleotide
acacacacauac

SEQ ID NO: 56939 - RNA, 12 nt, Artificial Sequence
  Description of Artificial Sequence: Synthetic oligonucleotide
uuccuuuugcuu

SEQ ID NO: 56940 - RNA, 16 nt, Artificial Sequence
  Description of Artificial Sequence: Synthetic oligonucleotide
uuuuaaaguaauuuuu

SEQ ID NO: 56941 - RNA, 13 nt, Artificial Sequence
  Description of Artificial Sequence: Synthetic oligonucleotide
caacagucaaugg

SEQ ID NO: 56942 - RNA, 13 nt, Artificial Sequence
  Description of Artificial Sequence: Synthetic oligonucleotide
ucgacaaaccaau

SEQ ID NO: 56943 - RNA, 12 nt, Artificial Sequence
  Description of Artificial Sequence: Synthetic oligonucleotide
acugcuaccacu

SEQ ID NO: 56944 - RNA, 13 nt, Artificial Sequence
  Description of Artificial Sequence: Synthetic oligonucleotide
gcaagcggucuua

SEQ ID NO: 56945 - RNA, 13 nt, Artificial Sequence
  Description of Artificial Sequence: Synthetic oligonucleotide
ggucuuaccggcu

SEQ ID NO: 56946 - RNA, 11 nt, Artificial Sequence
  Description of Artificial Sequence: Synthetic oligonucleotide
gauggguuacc

SEQ ID NO: 56947 - RNA, 11 nt, Artificial Sequence
  Description of Artificial Sequence: Synthetic oligonucleotide
guuaccugcga

SEQ ID NO: 56948 - RNA, 12 nt, Artificial Sequence
  Description of Artificial Sequence: Synthetic oligonucleotide
aaucuugcugag

SEQ ID NO: 56949 - RNA, 13 nt, Artificial Sequence
  Description of Artificial Sequence: Synthetic oligonucleotide
agcauaaaacagu

SEQ ID NO: 56950 - RNA, 12 nt, Artificial Sequence
  Description of Artificial Sequence: Synthetic oligonucleotide
guccuuuauccu

SEQ ID NO: 56951 - RNA, 12 nt, Artificial Sequence
  Description of Artificial Sequence: Synthetic oligonucleotide
caacgcaaguug

SEQ ID NO: 56952 - RNA, 13 nt, Artificial Sequence
  Description of Artificial Sequence: Synthetic oligonucleotide
aaacugaaaccau

SEQ ID NO: 56953 - RNA, 14 nt, Artificial Sequence
  Description of Artificial Sequence: Synthetic oligonucleotide
acuuuguuaaauau

SEQ ID NO: 56954 - RNA, 14 nt, Artificial Sequence
  Description of Artificial Sequence: Synthetic oligonucleotide
guauauuaaaaguu

SEQ ID NO: 56955 - RNA, 13 nt, Artificial Sequence
  Description of Artificial Sequence: Synthetic oligonucleotide
guuuugacuuaac

SEQ ID NO: 56956 - RNA, 13 nt, Artificial Sequence
  Description of Artificial Sequence: Synthetic oligonucleotide
gcaaacucagcac

SEQ ID NO: 56957 - RNA, 11 nt, Artificial Sequence
  Description of Artificial Sequence: Synthetic oligonucleotide
ugcugaccuca

SEQ ID NO: 56958 - RNA, 14 nt, Artificial Sequence
  Description of Artificial Sequence: Synthetic oligonucleotide
uuuauucagaucgc

SEQ ID NO: 56959 - RNA, 13 nt, Artificial Sequence
  Description of Artificial Sequence: Synthetic oligonucleotide
aggguucugggau

SEQ ID NO: 56960 - RNA, 15 nt, Artificial Sequence
  Description of Artificial Sequence: Synthetic oligonucleotide
auauuggaaauuaug

SEQ ID NO: 56961 - RNA, 13 nt, Artificial Sequence
  Description of Artificial Sequence: Synthetic oligonucleotide
auggaagcacuag

SEQ ID NO: 56962 - RNA, 13 nt, Artificial Sequence
  Description of Artificial Sequence: Synthetic oligonucleotide
guuuuuaugugga

SEQ ID NO: 56963 - RNA, 12 nt, Artificial Sequence
  Description of Artificial Sequence: Synthetic oligonucleotide
ggaauugguaga

SEQ ID NO: 56964 - RNA, 13 nt, Artificial Sequence
  Description of Artificial Sequence: Synthetic oligonucleotide
uuagacuuggaga

SEQ ID NO: 56965 - RNA, 13 nt, Artificial Sequence
  Description of Artificial Sequence: Synthetic oligonucleotide
uuacaguauucca

SEQ ID NO: 56966 - RNA, 15 nt, Artificial Sequence
  Description of Artificial Sequence: Synthetic oligonucleotide
ccacugaugaauuaa

SEQ ID NO: 56967 - RNA, 12 nt, Artificial Sequence
  Description of Artificial Sequence: Synthetic oligonucleotide
ccacaucaucac

SEQ ID NO: 56968 - RNA, 13 nt, Artificial Sequence
  Description of Artificial Sequence: Synthetic oligonucleotide
cucaccaaacaga

SEQ ID NO: 56969 - RNA, 12 nt, Artificial Sequence
  Description of Artificial Sequence: Synthetic oligonucleotide
ggaacaugaugg

SEQ ID NO: 56970 - RNA, 12 nt, Artificial Sequence
  Description of Artificial Sequence: Synthetic oligonucleotide
cauguagacugc

SEQ ID NO: 56971 - RNA, 13 nt, Artificial Sequence
  Description of Artificial Sequence: Synthetic oligonucleotide
ggaucuauuuaug

SEQ ID NO: 56972 - RNA, 12 nt, Artificial Sequence
  Description of Artificial Sequence: Synthetic oligonucleotide
gcacuauuauca

SEQ ID NO: 56973 - RNA, 11 nt, Artificial Sequence
  Description of Artificial Sequence: Synthetic oligonucleotide
aucaguucugc

SEQ ID NO: 56974 - RNA, 13 nt, Artificial Sequence
  Description of Artificial Sequence: Synthetic oligonucleotide
agauuaaaccuac

SEQ ID NO: 56975 - RNA, 13 nt, Artificial Sequence
  Description of Artificial Sequence: Synthetic oligonucleotide
auaaaauccuucu

SEQ ID NO: 56976 - RNA, 12 nt, Artificial Sequence
  Description of Artificial Sequence: Synthetic oligonucleotide
aaugcuguagac

SEQ ID NO: 56977 - RNA, 13 nt, Artificial Sequence
  Description of Artificial Sequence: Synthetic oligonucleotide
uugauaggaauag

SEQ ID NO: 56978 - RNA, 11 nt, Artificial Sequence
  Description of Artificial Sequence: Synthetic oligonucleotide
aauggcccuga

SEQ ID NO: 56979 - RNA, 11 nt, Artificial Sequence
  Description of Artificial Sequence: Synthetic oligonucleotide
uuccucaagca

SEQ ID NO: 56980 - RNA, 10 nt, Artificial Sequence
  Description of Artificial Sequence: Synthetic oligonucleotide
guucagccca

SEQ ID NO: 56981 - RNA, 11 nt, Artificial Sequence
  Description of Artificial Sequence: Synthetic oligonucleotide
gcugcugaacc

SEQ ID NO: 56982 - RNA, 12 nt, Artificial Sequence
  Description of Artificial Sequence: Synthetic oligonucleotide
aaguucucuuca

SEQ ID NO: 56983 - RNA, 11 nt, Artificial Sequence
  Description of Artificial Sequence: Synthetic oligonucleotide
ccagccuagag

SEQ ID NO: 56984 - RNA, 13 nt, Artificial Sequence
  Description of Artificial Sequence: Synthetic oligonucleotide
cucugugaagugu

SEQ ID NO: 56985 - RNA, 14 nt, Artificial Sequence
  Description of Artificial Sequence: Synthetic oligonucleotide
ugagaaaauuucaa

SEQ ID NO: 56986 - RNA, 11 nt, Artificial Sequence
  Description of Artificial Sequence: Synthetic oligonucleotide
aauccuccuga

SEQ ID NO: 56987 - RNA, 12 nt, Artificial Sequence
  Description of Artificial Sequence: Synthetic oligonucleotide
gugacaucauau

SEQ ID NO: 56988 - RNA, 13 nt, Artificial Sequence
  Description of Artificial Sequence: Synthetic oligonucleotide
aaucuucaucaua

SEQ ID NO: 56989 - RNA, 13 nt, Artificial Sequence
  Description of Artificial Sequence: Synthetic oligonucleotide
gacuagcuauuaa

SEQ ID NO: 56990 - RNA, 14 nt, Artificial Sequence
  Description of Artificial Sequence: Synthetic oligonucleotide
ucucuacuaaaaau

SEQ ID NO: 56991 - RNA, 12 nt, Artificial Sequence
  Description of Artificial Sequence: Synthetic oligonucleotide
ucuaucucgccu

SEQ ID NO: 56992 - RNA, 13 nt, Artificial Sequence
  Description of Artificial Sequence: Synthetic oligonucleotide
cuucgguccaguu

SEQ ID NO: 56993 - RNA, 11 nt, Artificial Sequence
  Description of Artificial Sequence: Synthetic oligonucleotide
gauguagccgc

SEQ ID NO: 56994 - RNA, 12 nt, Artificial Sequence
  Description of Artificial Sequence: Synthetic oligonucleotide
ugaggagacuug

SEQ ID NO: 56995 - RNA, 12 nt, Artificial Sequence
  Description of Artificial Sequence: Synthetic oligonucleotide
gaguagugagga

SEQ ID NO: 56996 - RNA, 14 nt, Artificial Sequence
  Description of Artificial Sequence: Synthetic oligonucleotide
cagaugaguacaaa

SEQ ID NO: 56997 - RNA, 13 nt, Artificial Sequence
  Description of Artificial Sequence: Synthetic oligonucleotide
guuguuaaugggc

SEQ ID NO: 56998 - RNA, 13 nt, Artificial Sequence
  Description of Artificial Sequence: Synthetic oligonucleotide
uuuuuaauuuauu

SEQ ID NO: 56999 - RNA, 12 nt, Artificial Sequence
  Description of Artificial Sequence: Synthetic oligonucleotide
uauuuaaauaug

SEQ ID NO: 57000 - RNA, 13 nt, Artificial Sequence
  Description of Artificial Sequence: Synthetic oligonucleotide
uauccuuuguuuc

SEQ ID NO: 57001 - RNA, 14 nt, Artificial Sequence
  Description of Artificial Sequence: Synthetic oligonucleotide
cgucuaaguguuug

SEQ ID NO: 57002 - RNA, 12 nt, Artificial Sequence
  Description of Artificial Sequence: Synthetic oligonucleotide
accugugacaaa

SEQ ID NO: 57003 - RNA, 13 nt, Artificial Sequence
  Description of Artificial Sequence: Synthetic oligonucleotide
ccaggcugaauua

SEQ ID NO: 57004 - RNA, 14 nt, Artificial Sequence
  Description of Artificial Sequence: Synthetic oligonucleotide
gucauucuuacaau

SEQ ID NO: 57005 - RNA, 15 nt, Artificial Sequence
  Description of Artificial Sequence: Synthetic oligonucleotide
ucauucuuacaauug

SEQ ID NO: 57006 - RNA, 12 nt, Artificial Sequence
  Description of Artificial Sequence: Synthetic oligonucleotide
cagagaguguac

SEQ ID NO: 57007 - RNA, 12 nt, Artificial Sequence
  Description of Artificial Sequence: Synthetic oligonucleotide
agaacucagcag

SEQ ID NO: 57008 - RNA, 13 nt, Artificial Sequence
  Description of Artificial Sequence: Synthetic oligonucleotide
uuuauuuucagua

SEQ ID NO: 57009 - RNA, 12 nt, Artificial Sequence
  Description of Artificial Sequence: Synthetic oligonucleotide
ucuuaaauggaa

SEQ ID NO: 57010 - RNA, 13 nt, Artificial Sequence
  Description of Artificial Sequence: Synthetic oligonucleotide
ugccuaaaauugu

SEQ ID NO: 57011 - RNA, 12 nt, Artificial Sequence
  Description of Artificial Sequence: Synthetic oligonucleotide
agacugugagcu

SEQ ID NO: 57012 - RNA, 14 nt, Artificial Sequence
  Description of Artificial Sequence: Synthetic oligonucleotide
ugcuuuuuauuaau

SEQ ID NO: 57013 - RNA, 13 nt, Artificial Sequence
  Description of Artificial Sequence: Synthetic oligonucleotide
cucuucuuacauu

SEQ ID NO: 57014 - RNA, 15 nt, Artificial Sequence
  Description of Artificial Sequence: Synthetic oligonucleotide
cauuuguaaaaaugu

SEQ ID NO: 57015 - RNA, 15 nt, Artificial Sequence
  Description of Artificial Sequence: Synthetic oligonucleotide
aucuuaauucauauu

SEQ ID NO: 57016 - RNA, 13 nt, Artificial Sequence
  Description of Artificial Sequence: Synthetic oligonucleotide
gaacuaaucauga

SEQ ID NO: 57017 - RNA, 12 nt, Artificial Sequence
  Description of Artificial Sequence: Synthetic oligonucleotide
ucugcucuuggg

SEQ ID NO: 57018 - RNA, 13 nt, Artificial Sequence
  Description of Artificial Sequence: Synthetic oligonucleotide
caguagcuuugag

SEQ ID NO: 57019 - RNA, 14 nt, Artificial Sequence
  Description of Artificial Sequence: Synthetic oligonucleotide
cacguaauauuuca

SEQ ID NO: 57020 - RNA, 13 nt, Artificial Sequence
  Description of Artificial Sequence: Synthetic oligonucleotide
uauucucuucacu

SEQ ID NO: 57021 - RNA, 14 nt, Artificial Sequence
  Description of Artificial Sequence: Synthetic oligonucleotide
cuaaugcuaagaaa

SEQ ID NO: 57022 - RNA, 12 nt, Artificial Sequence
  Description of Artificial Sequence: Synthetic oligonucleotide
gcugaaaaucaa

SEQ ID NO: 57023 - RNA, 14 nt, Artificial Sequence
  Description of Artificial Sequence: Synthetic oligonucleotide
aauaugauuacuuu

SEQ ID NO: 57024 - RNA, 14 nt, Artificial Sequence
  Description of Artificial Sequence: Synthetic oligonucleotide
cauuuuguucuaca

SEQ ID NO: 57025 - RNA, 12 nt, Artificial Sequence
  Description of Artificial Sequence: Synthetic oligonucleotide
cccgggacucuc

SEQ ID NO: 57026 - RNA, 14 nt, Artificial Sequence
  Description of Artificial Sequence: Synthetic oligonucleotide
ccuuuaaaguaaag

SEQ ID NO: 57027 - RNA, 13 nt, Artificial Sequence
  Description of Artificial Sequence: Synthetic oligonucleotide
ucuggaagccugg

SEQ ID NO: 57028 - RNA, 14 nt, Artificial Sequence
  Description of Artificial Sequence: Synthetic oligonucleotide
aaaacaaaagagag

SEQ ID NO: 57029 - RNA, 13 nt, Artificial Sequence
  Description of Artificial Sequence: Synthetic oligonucleotide
aucaguuaugccg

SEQ ID NO: 57030 - RNA, 13 nt, Artificial Sequence
  Description of Artificial Sequence: Synthetic oligonucleotide
uaaaagaagucca

SEQ ID NO: 57031 - RNA, 11 nt, Artificial Sequence
  Description of Artificial Sequence: Synthetic oligonucleotide
aggugagguua

SEQ ID NO: 57032 - RNA, 11 nt, Artificial Sequence
  Description of Artificial Sequence: Synthetic oligonucleotide
gggaagaggac

SEQ ID NO: 57033 - RNA, 13 nt, Artificial Sequence
  Description of Artificial Sequence: Synthetic oligonucleotide
aagcaaguauugu

SEQ ID NO: 57034 - RNA, 12 nt, Artificial Sequence
  Description of Artificial Sequence: Synthetic oligonucleotide
auuguagcacuc

SEQ ID NO: 57035 - RNA, 14 nt, Artificial Sequence
  Description of Artificial Sequence: Synthetic oligonucleotide
acaaaaccacaaau

SEQ ID NO: 57036 - RNA, 12 nt, Artificial Sequence
  Description of Artificial Sequence: Synthetic oligonucleotide
uaagcccauaca

SEQ ID NO: 57037 - RNA, 11 nt, Artificial Sequence
  Description of Artificial Sequence: Synthetic oligonucleotide
agcccauacag

SEQ ID NO: 57038 - RNA, 12 nt, Artificial Sequence
  Description of Artificial Sequence: Synthetic oligonucleotide
cagaaaccuucc

SEQ ID NO: 57039 - RNA, 10 nt, Artificial Sequence
  Description of Artificial Sequence: Synthetic oligonucleotide
guauaccuac

SEQ ID NO: 57040 - RNA, 13 nt, Artificial Sequence
  Description of Artificial Sequence: Synthetic oligonucleotide
gccaguuuucgga

SEQ ID NO: 57041 - RNA, 9 nt, Artificial Sequence
  Description of Artificial Sequence: Synthetic oligonucleotide
ggaacaggg

SEQ ID NO: 57042 - RNA, 13 nt, Artificial Sequence
  Description of Artificial Sequence: Synthetic oligonucleotide
uuaacuuuccagu

SEQ ID NO: 57043 - RNA, 14 nt, Artificial Sequence
  Description of Artificial Sequence: Synthetic oligonucleotide
aaaguuugguuuug

SEQ ID NO: 57044 - RNA, 12 nt, Artificial Sequence
  Description of Artificial Sequence: Synthetic oligonucleotide
cuucccacugua

SEQ ID NO: 57045 - RNA, 13 nt, Artificial Sequence
  Description of Artificial Sequence: Synthetic oligonucleotide
ugauaccauauga

SEQ ID NO: 57046 - RNA, 11 nt, Artificial Sequence
  Description of Artificial Sequence: Synthetic oligonucleotide
aacaugggcug

SEQ ID NO: 57047 - RNA, 13 nt, Artificial Sequence
  Description of Artificial Sequence: Synthetic oligonucleotide
caacuuuuucaua

SEQ ID NO: 57048 - RNA, 12 nt, Artificial Sequence
  Description of Artificial Sequence: Synthetic oligonucleotide
caugaggccgga

SEQ ID NO: 57049 - RNA, 11 nt, Artificial Sequence
  Description of Artificial Sequence: Synthetic oligonucleotide
acugcauuugu

SEQ ID NO: 57050 - RNA, 13 nt, Artificial Sequence
  Description of Artificial Sequence: Synthetic oligonucleotide
aauguuuacuacc

SEQ ID NO: 57051 - RNA, 15 nt, Artificial Sequence
  Description of Artificial Sequence: Synthetic oligonucleotide
aauuuuuugaugaaa

SEQ ID NO: 57052 - RNA, 14 nt, Artificial Sequence
  Description of Artificial Sequence: Synthetic oligonucleotide
cagugugugaauuu

SEQ ID NO: 57053 - RNA, 13 nt, Artificial Sequence
  Description of Artificial Sequence: Synthetic oligonucleotide
gagcaauguaugu

SEQ ID NO: 57054 - RNA, 14 nt, Artificial Sequence
  Description of Artificial Sequence: Synthetic oligonucleotide
aaagcacauauaua

SEQ ID NO: 57055 - RNA, 14 nt, Artificial Sequence
  Description of Artificial Sequence: Synthetic oligonucleotide
guaauaguuucucc

SEQ ID NO: 57056 - RNA, 13 nt, Artificial Sequence
  Description of Artificial Sequence: Synthetic oligonucleotide
aguuucuccaaau

SEQ ID NO: 57057 - RNA, 13 nt, Artificial Sequence
  Description of Artificial Sequence: Synthetic oligonucleotide
uacuuccuagaaa

SEQ ID NO: 57058 - RNA, 13 nt, Artificial Sequence
  Description of Artificial Sequence: Synthetic oligonucleotide
uacaccauauaug

SEQ ID NO: 57059 - RNA, 14 nt, Artificial Sequence
  Description of Artificial Sequence: Synthetic oligonucleotide
auauaugaauggag

SEQ ID NO: 57060 - RNA, 13 nt, Artificial Sequence
  Description of Artificial Sequence: Synthetic oligonucleotide
acgagaagaagau

SEQ ID NO: 57061 - RNA, 13 nt, Artificial Sequence
  Description of Artificial Sequence: Synthetic oligonucleotide
ucauuuacaggga

SEQ ID NO: 57062 - RNA, 13 nt, Artificial Sequence
  Description of Artificial Sequence: Synthetic oligonucleotide
cauuuacagggac

SEQ ID NO: 57063 - RNA, 10 nt, Artificial Sequence
  Description of Artificial Sequence: Synthetic oligonucleotide
agggaccuga

SEQ ID NO: 57064 - RNA, 14 nt, Artificial Sequence
  Description of Artificial Sequence: Synthetic oligonucleotide
uguuugacugcauc

SEQ ID NO: 57065 - RNA, 13 nt, Artificial Sequence
  Description of Artificial Sequence: Synthetic oligonucleotide
uuugacugcaucg

SEQ ID NO: 57066 - RNA, 12 nt, Artificial Sequence
  Description of Artificial Sequence: Synthetic oligonucleotide
gaguucacaggg

SEQ ID NO: 57067 - RNA, 13 nt, Artificial Sequence
  Description of Artificial Sequence: Synthetic oligonucleotide
ggcaccucugucc

SEQ ID NO: 57068 - RNA, 15 nt, Artificial Sequence
  Description of Artificial Sequence: Synthetic oligonucleotide
gguuugucuuuuuaa

SEQ ID NO: 57069 - RNA, 14 nt, Artificial Sequence
  Description of Artificial Sequence: Synthetic oligonucleotide
uuugucuuuuuaag

SEQ ID NO: 57070 - RNA, 13 nt, Artificial Sequence
  Description of Artificial Sequence: Synthetic oligonucleotide
ccuaaagguuguc

SEQ ID NO: 57071 - RNA, 12 nt, Artificial Sequence
  Description of Artificial Sequence: Synthetic oligonucleotide
aagguugucgac

SEQ ID NO: 57072 - RNA, 13 nt, Artificial Sequence
  Description of Artificial Sequence: Synthetic oligonucleotide
accuggcaauugu

SEQ ID NO: 57073 - RNA, 12 nt, Artificial Sequence
  Description of Artificial Sequence: Synthetic oligonucleotide
aguggugcgagg

SEQ ID NO: 57074 - RNA, 13 nt, Artificial Sequence
  Description of Artificial Sequence: Synthetic oligonucleotide
agagacaugaaau

SEQ ID NO: 57075 - RNA, 13 nt, Artificial Sequence
  Description of Artificial Sequence: Synthetic oligonucleotide
auauauuucucca

SEQ ID NO: 57076 - RNA, 10 nt, Artificial Sequence
  Description of Artificial Sequence: Synthetic oligonucleotide
caugaaggcu

SEQ ID NO: 57077 - RNA, 11 nt, Artificial Sequence
  Description of Artificial Sequence: Synthetic oligonucleotide
gcuggaguggu

SEQ ID NO: 57078 - RNA, 11 nt, Artificial Sequence
  Description of Artificial Sequence: Synthetic oligonucleotide
aggaagagagg

SEQ ID NO: 57079 - RNA, 12 nt, Artificial Sequence
  Description of Artificial Sequence: Synthetic oligonucleotide
cuugcaucgggc

SEQ ID NO: 57080 - RNA, 13 nt, Artificial Sequence
  Description of Artificial Sequence: Synthetic oligonucleotide
auauccuacugug

SEQ ID NO: 57081 - RNA, 13 nt, Artificial Sequence
  Description of Artificial Sequence: Synthetic oligonucleotide
uccuacuguguaa

SEQ ID NO: 57082 - RNA, 12 nt, Artificial Sequence
  Description of Artificial Sequence: Synthetic oligonucleotide
ccuuguagugua

SEQ ID NO: 57083 - RNA, 13 nt, Artificial Sequence
  Description of Artificial Sequence: Synthetic oligonucleotide
ucuuuguugauug

SEQ ID NO: 57084 - RNA, 14 nt, Artificial Sequence
  Description of Artificial Sequence: Synthetic oligonucleotide
uuuguugauugaaa

SEQ ID NO: 57085 - RNA, 15 nt, Artificial Sequence
  Description of Artificial Sequence: Synthetic oligonucleotide
uucuuuuucuuccau

SEQ ID NO: 57086 - RNA, 13 nt, Artificial Sequence
  Description of Artificial Sequence: Synthetic oligonucleotide
aaucuuccuucua

SEQ ID NO: 57087 - RNA, 13 nt, Artificial Sequence
  Description of Artificial Sequence: Synthetic oligonucleotide
uugaaugcuucau

SEQ ID NO: 57088 - RNA, 13 nt, Artificial Sequence
  Description of Artificial Sequence: Synthetic oligonucleotide
ugaaugcuucaug

SEQ ID NO: 57089 - RNA, 13 nt, Artificial Sequence
  Description of Artificial Sequence: Synthetic oligonucleotide
aauucuacuuuga

SEQ ID NO: 57090 - RNA, 13 nt, Artificial Sequence
  Description of Artificial Sequence: Synthetic oligonucleotide
agcaacuacagac

SEQ ID NO: 57091 - RNA, 13 nt, Artificial Sequence
  Description of Artificial Sequence: Synthetic oligonucleotide
gaccaaggucaac

SEQ ID NO: 57092 - RNA, 13 nt, Artificial Sequence
  Description of Artificial Sequence: Synthetic oligonucleotide
cgacuaucucgac

SEQ ID NO: 57093 - RNA, 13 nt, Artificial Sequence
  Description of Artificial Sequence: Synthetic oligonucleotide
aaccuucccaaac

SEQ ID NO: 57094 - RNA, 14 nt, Artificial Sequence
  Description of Artificial Sequence: Synthetic oligonucleotide
ccaagcuuagaacu

SEQ ID NO: 57095 - RNA, 15 nt, Artificial Sequence
  Description of Artificial Sequence: Synthetic oligonucleotide
agcuuagaacuuuaa

SEQ ID NO: 57096 - RNA, 11 nt, Artificial Sequence
  Description of Artificial Sequence: Synthetic oligonucleotide
aagaccaccac

SEQ ID NO: 57097 - RNA, 14 nt, Artificial Sequence
  Description of Artificial Sequence: Synthetic oligonucleotide
gcgagaaauaaagu

SEQ ID NO: 57098 - RNA, 14 nt, Artificial Sequence
  Description of Artificial Sequence: Synthetic oligonucleotide
cgagaaauaaaguu

SEQ ID NO: 57099 - RNA, 12 nt, Artificial Sequence
  Description of Artificial Sequence: Synthetic oligonucleotide
aggaaaugaucc

SEQ ID NO: 57100 - RNA, 13 nt, Artificial Sequence
  Description of Artificial Sequence: Synthetic oligonucleotide
gaagaaaugaaac

SEQ ID NO: 57101 - RNA, 13 nt, Artificial Sequence
  Description of Artificial Sequence: Synthetic oligonucleotide
guuuccauccucc

SEQ ID NO: 57102 - RNA, 15 nt, Artificial Sequence
  Description of Artificial Sequence: Synthetic oligonucleotide
acugaaaaucuuuga

SEQ ID NO: 57103 - RNA, 11 nt, Artificial Sequence
  Description of Artificial Sequence: Synthetic oligonucleotide
ugccguucagg

SEQ ID NO: 57104 - RNA, 13 nt, Artificial Sequence
  Description of Artificial Sequence: Synthetic oligonucleotide
caggguccagaag

SEQ ID NO: 57105 - RNA, 13 nt, Artificial Sequence
  Description of Artificial Sequence: Synthetic oligonucleotide
ucaagacugcuug

SEQ ID NO: 57106 - RNA, 13 nt, Artificial Sequence
  Description of Artificial Sequence: Synthetic oligonucleotide
uccaugucuuugg

SEQ ID NO: 57107 - RNA, 11 nt, Artificial Sequence
  Description of Artificial Sequence: Synthetic oligonucleotide
gccugaaacac

SEQ ID NO: 57108 - RNA, 12 nt, Artificial Sequence
  Description of Artificial Sequence: Synthetic oligonucleotide
ucucuguaccuc

SEQ ID NO: 57109 - RNA, 12 nt, Artificial Sequence
  Description of Artificial Sequence: Synthetic oligonucleotide
agcaagacaaga

SEQ ID NO: 57110 - RNA, 13 nt, Artificial Sequence
  Description of Artificial Sequence: Synthetic oligonucleotide
gcaagacaagaaa

SEQ ID NO: 57111 - RNA, 12 nt, Artificial Sequence
  Description of Artificial Sequence: Synthetic oligonucleotide
uguacaagaucc

SEQ ID NO: 57112 - RNA, 12 nt, Artificial Sequence
  Description of Artificial Sequence: Synthetic oligonucleotide
cguacuugcaga

SEQ ID NO: 57113 - RNA, 13 nt, Artificial Sequence
  Description of Artificial Sequence: Synthetic oligonucleotide
cgaucgauacaga

SEQ ID NO: 57114 - RNA, 13 nt, Artificial Sequence
  Description of Artificial Sequence: Synthetic oligonucleotide
uauaaaaauaaau

SEQ ID NO: 57115 - RNA, 13 nt, Artificial Sequence
  Description of Artificial Sequence: Synthetic oligonucleotide
uaaaaauaaauau

SEQ ID NO: 57116 - RNA, 13 nt, Artificial Sequence
  Description of Artificial Sequence: Synthetic oligonucleotide
uuugacugcugug

SEQ ID NO: 57117 - RNA, 13 nt, Artificial Sequence
  Description of Artificial Sequence: Synthetic oligonucleotide
ggagaugagagac

SEQ ID NO: 57118 - RNA, 10 nt, Artificial Sequence
  Description of Artificial Sequence: Synthetic oligonucleotide
ucccacuugg

SEQ ID NO: 57119 - RNA, 10 nt, Artificial Sequence
  Description of Artificial Sequence: Synthetic oligonucleotide
guucacggcc

SEQ ID NO: 57120 - RNA, 12 nt, Artificial Sequence
  Description of Artificial Sequence: Synthetic oligonucleotide
accaucacacca

SEQ ID NO: 57121 - RNA, 10 nt, Artificial Sequence
  Description of Artificial Sequence: Synthetic oligonucleotide
cugcggguuu

SEQ ID NO: 57122 - RNA, 9 nt, Artificial Sequence
  Description of Artificial Sequence: Synthetic oligonucleotide
uccaguuug

SEQ ID NO: 57123 - RNA, 12 nt, Artificial Sequence
  Description of Artificial Sequence: Synthetic oligonucleotide
uuaaggacuucu

SEQ ID NO: 57124 - RNA, 12 nt, Artificial Sequence
  Description of Artificial Sequence: Synthetic oligonucleotide
agugggacagag

SEQ ID NO: 57125 - RNA, 13 nt, Artificial Sequence
  Description of Artificial Sequence: Synthetic oligonucleotide
auuuguuauugug

SEQ ID NO: 57126 - RNA, 12 nt, Artificial Sequence
  Description of Artificial Sequence: Synthetic oligonucleotide
ucaaaugcauuu

SEQ ID NO: 57127 - RNA, 9 nt, Artificial Sequence
  Description of Artificial Sequence: Synthetic oligonucleotide
aggaaagcc

SEQ ID NO: 57128 - RNA, 10 nt, Artificial Sequence
  Description of Artificial Sequence: Synthetic oligonucleotide
ggaaagcccu

SEQ ID NO: 57129 - RNA, 11 nt, Artificial Sequence
  Description of Artificial Sequence: Synthetic oligonucleotide
ccagcauggcc

SEQ ID NO: 57130 - RNA, 10 nt, Artificial Sequence
  Description of Artificial Sequence: Synthetic oligonucleotide
uucucccuga

SEQ ID NO: 57131 - RNA, 11 nt, Artificial Sequence
  Description of Artificial Sequence: Synthetic oligonucleotide
aagaagcccuu

SEQ ID NO: 57132 - RNA, 11 nt, Artificial Sequence
  Description of Artificial Sequence: Synthetic oligonucleotide
gaagcccuuca

SEQ ID NO: 57133 - RNA, 10 nt, Artificial Sequence
  Description of Artificial Sequence: Synthetic oligonucleotide
cccuucagcg

SEQ ID NO: 57134 - RNA, 10 nt, Artificial Sequence
  Description of Artificial Sequence: Synthetic oligonucleotide
cuucagcggc

SEQ ID NO: 57135 - RNA, 11 nt, Artificial Sequence
  Description of Artificial Sequence: Synthetic oligonucleotide
cagcggccagu

SEQ ID NO: 57136 - RNA, 11 nt, Artificial Sequence
  Description of Artificial Sequence: Synthetic oligonucleotide
gaaaagcuccg

SEQ ID NO: 57137 - RNA, 10 nt, Artificial Sequence
  Description of Artificial Sequence: Synthetic oligonucleotide
aaagcuccgg

SEQ ID NO: 57138 - RNA, 12 nt, Artificial Sequence
  Description of Artificial Sequence: Synthetic oligonucleotide
gucaacagucug

SEQ ID NO: 57139 - RNA, 12 nt, Artificial Sequence
  Description of Artificial Sequence: Synthetic oligonucleotide
agaguucaaaag

SEQ ID NO: 57140 - RNA, 12 nt, Artificial Sequence
  Description of Artificial Sequence: Synthetic oligonucleotide
gaguucaaaagc

SEQ ID NO: 57141 - RNA, 11 nt, Artificial Sequence
  Description of Artificial Sequence: Synthetic oligonucleotide
ucaaaagcccu

SEQ ID NO: 57142 - RNA, 11 nt, Artificial Sequence
  Description of Artificial Sequence: Synthetic oligonucleotide
caaaagcccuu

SEQ ID NO: 57143 - RNA, 11 nt, Artificial Sequence
  Description of Artificial Sequence: Synthetic oligonucleotide
aaagcccuuca

SEQ ID NO: 57144 - RNA, 11 nt, Artificial Sequence
  Description of Artificial Sequence: Synthetic oligonucleotide
aagcccuucag

SEQ ID NO: 57145 - RNA, 12 nt, Artificial Sequence
  Description of Artificial Sequence: Synthetic oligonucleotide
ugaagccgcucg

SEQ ID NO: 57146 - RNA, 11 nt, Artificial Sequence
  Description of Artificial Sequence: Synthetic oligonucleotide
acgccagucaa

SEQ ID NO: 57147 - RNA, 12 nt, Artificial Sequence
  Description of Artificial Sequence: Synthetic oligonucleotide
ucuuggugcgug

SEQ ID NO: 57148 - RNA, 13 nt, Artificial Sequence
  Description of Artificial Sequence: Synthetic oligonucleotide
uuggauucaucag

SEQ ID NO: 57149 - RNA, 12 nt, Artificial Sequence
  Description of Artificial Sequence: Synthetic oligonucleotide
ggaauaccuaag

SEQ ID NO: 57150 - RNA, 11 nt, Artificial Sequence
  Description of Artificial Sequence: Synthetic oligonucleotide
uuugaggcuca

SEQ ID NO: 57151 - RNA, 10 nt, Artificial Sequence
  Description of Artificial Sequence: Synthetic oligonucleotide
cuacaauugg

SEQ ID NO: 57152 - RNA, 11 nt, Artificial Sequence
  Description of Artificial Sequence: Synthetic oligonucleotide
aguuaggagcc

SEQ ID NO: 57153 - RNA, 12 nt, Artificial Sequence
  Description of Artificial Sequence: Synthetic oligonucleotide
gucaauauccac

SEQ ID NO: 57154 - RNA, 12 nt, Artificial Sequence
  Description of Artificial Sequence: Synthetic oligonucleotide
uguucagucaca

SEQ ID NO: 57155 - RNA, 11 nt, Artificial Sequence
  Description of Artificial Sequence: Synthetic oligonucleotide
cacacacauac

SEQ ID NO: 57156 - RNA, 11 nt, Artificial Sequence
  Description of Artificial Sequence: Synthetic oligonucleotide
uccuuuugcuu

SEQ ID NO: 57157 - RNA, 15 nt, Artificial Sequence
  Description of Artificial Sequence: Synthetic oligonucleotide
uuuaaaguaauuuuu

SEQ ID NO: 57158 - RNA, 12 nt, Artificial Sequence
  Description of Artificial Sequence: Synthetic oligonucleotide
aacagucaaugg

SEQ ID NO: 57159 - RNA, 12 nt, Artificial Sequence
  Description of Artificial Sequence: Synthetic oligonucleotide
cgacaaaccaau

SEQ ID NO: 57160 - RNA, 11 nt, Artificial Sequence
  Description of Artificial Sequence: Synthetic oligonucleotide
cugcuaccacu

SEQ ID NO: 57161 - RNA, 12 nt, Artificial Sequence
  Description of Artificial Sequence: Synthetic oligonucleotide
caagcggucuua

SEQ ID NO: 57162 - RNA, 12 nt, Artificial Sequence
  Description of Artificial Sequence: Synthetic oligonucleotide
gucuuaccggcu

SEQ ID NO: 57163 - RNA, 10 nt, Artificial Sequence
  Description of Artificial Sequence: Synthetic oligonucleotide
auggguuacc

SEQ ID NO: 57164 - RNA, 10 nt, Artificial Sequence
  Description of Artificial Sequence: Synthetic oligonucleotide
uuaccugcga

SEQ ID NO: 57165 - RNA, 11 nt, Artificial Sequence
  Description of Artificial Sequence: Synthetic oligonucleotide
aucuugcugag

SEQ ID NO: 57166 - RNA, 12 nt, Artificial Sequence
  Description of Artificial Sequence: Synthetic oligonucleotide
gcauaaaacagu

SEQ ID NO: 57167 - RNA, 11 nt, Artificial Sequence
  Description of Artificial Sequence: Synthetic oligonucleotide
uccuuuauccu

SEQ ID NO: 57168 - RNA, 11 nt, Artificial Sequence
  Description of Artificial Sequence: Synthetic oligonucleotide
aacgcaaguug

SEQ ID NO: 57169 - RNA, 12 nt, Artificial Sequence
  Description of Artificial Sequence: Synthetic oligonucleotide
aacugaaaccau

SEQ ID NO: 57170 - RNA, 13 nt, Artificial Sequence
  Description of Artificial Sequence: Synthetic oligonucleotide
cuuuguuaaauau

SEQ ID NO: 57171 - RNA, 13 nt, Artificial Sequence
  Description of Artificial Sequence: Synthetic oligonucleotide
uauauuaaaaguu

SEQ ID NO: 57172 - RNA, 12 nt, Artificial Sequence
  Description of Artificial Sequence: Synthetic oligonucleotide
uuuugacuuaac

SEQ ID NO: 57173 - RNA, 12 nt, Artificial Sequence
  Description of Artificial Sequence: Synthetic oligonucleotide
caaacucagcac

SEQ ID NO: 57174 - RNA, 10 nt, Artificial Sequence
  Description of Artificial Sequence: Synthetic oligonucleotide
gcugaccuca

SEQ ID NO: 57175 - RNA, 13 nt, Artificial Sequence
  Description of Artificial Sequence: Synthetic oligonucleotide
uuauucagaucgc

SEQ ID NO: 57176 - RNA, 12 nt, Artificial Sequence
  Description of Artificial Sequence: Synthetic oligonucleotide
ggguucugggau

SEQ ID NO: 57177 - RNA, 14 nt, Artificial Sequence
  Description of Artificial Sequence: Synthetic oligonucleotide
uauuggaaauuaug

SEQ ID NO: 57178 - RNA, 12 nt, Artificial Sequence
  Description of Artificial Sequence: Synthetic oligonucleotide
uggaagcacuag

SEQ ID NO: 57179 - RNA, 12 nt, Artificial Sequence
  Description of Artificial Sequence: Synthetic oligonucleotide
uuuuuaugugga

SEQ ID NO: 57180 - RNA, 11 nt, Artificial Sequence
  Description of Artificial Sequence: Synthetic oligonucleotide
gaauugguaga

SEQ ID NO: 57181 - RNA, 12 nt, Artificial Sequence
  Description of Artificial Sequence: Synthetic oligonucleotide
uagacuuggaga

SEQ ID NO: 57182 - RNA, 12 nt, Artificial Sequence
  Description of Artificial Sequence: Synthetic oligonucleotide
uacaguauucca

SEQ ID NO: 57183 - RNA, 14 nt, Artificial Sequence
  Description of Artificial Sequence: Synthetic oligonucleotide
cacugaugaauuaa

SEQ ID NO: 57184 - RNA, 11 nt, Artificial Sequence
  Description of Artificial Sequence: Synthetic oligonucleotide
cacaucaucac

SEQ ID NO: 57185 - RNA, 12 nt, Artificial Sequence
  Description of Artificial Sequence: Synthetic oligonucleotide
ucaccaaacaga

SEQ ID NO: 57186 - RNA, 11 nt, Artificial Sequence
  Description of Artificial Sequence: Synthetic oligonucleotide
gaacaugaugg

SEQ ID NO: 57187 - RNA, 11 nt, Artificial Sequence
  Description of Artificial Sequence: Synthetic oligonucleotide
auguagacugc

SEQ ID NO: 57188 - RNA, 12 nt, Artificial Sequence
  Description of Artificial Sequence: Synthetic oligonucleotide
gaucuauuuaug

SEQ ID NO: 57189 - RNA, 11 nt, Artificial Sequence
  Description of Artificial Sequence: Synthetic oligonucleotide
cacuauuauca

SEQ ID NO: 57190 - RNA, 10 nt, Artificial Sequence
  Description of Artificial Sequence: Synthetic oligonucleotide
ucaguucugc

SEQ ID NO: 57191 - RNA, 12 nt, Artificial Sequence
  Description of Artificial Sequence: Synthetic oligonucleotide
gauuaaaccuac

SEQ ID NO: 57192 - RNA, 12 nt, Artificial Sequence
  Description of Artificial Sequence: Synthetic oligonucleotide
uaaaauccuucu

SEQ ID NO: 57193 - RNA, 11 nt, Artificial Sequence
  Description of Artificial Sequence: Synthetic oligonucleotide
augcuguagac

SEQ ID NO: 57194 - RNA, 12 nt, Artificial Sequence
  Description of Artificial Sequence: Synthetic oligonucleotide
ugauaggaauag

SEQ ID NO: 57195 - RNA, 10 nt, Artificial Sequence
  Description of Artificial Sequence: Synthetic oligonucleotide
auggcccuga

SEQ ID NO: 57196 - RNA, 10 nt, Artificial Sequence
  Description of Artificial Sequence: Synthetic oligonucleotide
uccucaagca

SEQ ID NO: 57197 - RNA, 9 nt, Artificial Sequence
  Description of Artificial Sequence: Synthetic oligonucleotide
uucagccca

SEQ ID NO: 57198 - RNA, 10 nt, Artificial Sequence
  Description of Artificial Sequence: Synthetic oligonucleotide
cugcugaacc

SEQ ID NO: 57199 - RNA, 11 nt, Artificial Sequence
  Description of Artificial Sequence: Synthetic oligonucleotide
aguucucuuca

SEQ ID NO: 57200 - RNA, 10 nt, Artificial Sequence
  Description of Artificial Sequence: Synthetic oligonucleotide
cagccuagag

SEQ ID NO: 57201 - RNA, 12 nt, Artificial Sequence
  Description of Artificial Sequence: Synthetic oligonucleotide
ucugugaagugu

SEQ ID NO: 57202 - RNA, 13 nt, Artificial Sequence
  Description of Artificial Sequence: Synthetic oligonucleotide
gagaaaauuucaa

SEQ ID NO: 57203 - RNA, 10 nt, Artificial Sequence
  Description of Artificial Sequence: Synthetic oligonucleotide
auccuccuga

SEQ ID NO: 57204 - RNA, 11 nt, Artificial Sequence
  Description of Artificial Sequence: Synthetic oligonucleotide
ugacaucauau

SEQ ID NO: 57205 - RNA, 12 nt, Artificial Sequence
  Description of Artificial Sequence: Synthetic oligonucleotide
aucuucaucaua

SEQ ID NO: 57206 - RNA, 12 nt, Artificial Sequence
  Description of Artificial Sequence: Synthetic oligonucleotide
acuagcuauuaa

SEQ ID NO: 57207 - RNA, 13 nt, Artificial Sequence
  Description of Artificial Sequence: Synthetic oligonucleotide
cucuacuaaaaau

SEQ ID NO: 57208 - RNA, 11 nt, Artificial Sequence
  Description of Artificial Sequence: Synthetic oligonucleotide
cuaucucgccu

SEQ ID NO: 57209 - RNA, 12 nt, Artificial Sequence
  Description of Artificial Sequence: Synthetic oligonucleotide
uucgguccaguu

SEQ ID NO: 57210 - RNA, 10 nt, Artificial Sequence
  Description of Artificial Sequence: Synthetic oligonucleotide
auguagccgc

SEQ ID NO: 57211 - RNA, 11 nt, Artificial Sequence
  Description of Artificial Sequence: Synthetic oligonucleotide
gaggagacuug

SEQ ID NO: 57212 - RNA, 11 nt, Artificial Sequence
  Description of Artificial Sequence: Synthetic oligonucleotide
aguagugagga

SEQ ID NO: 57213 - RNA, 13 nt, Artificial Sequence
  Description of Artificial Sequence: Synthetic oligonucleotide
agaugaguacaaa

SEQ ID NO: 57214 - RNA, 12 nt, Artificial Sequence
  Description of Artificial Sequence: Synthetic oligonucleotide
uuguuaaugggc

SEQ ID NO: 57215 - RNA, 12 nt, Artificial Sequence
  Description of Artificial Sequence: Synthetic oligonucleotide
uuuuaauuuauu

SEQ ID NO: 57216 - RNA, 11 nt, Artificial Sequence
  Description of Artificial Sequence: Synthetic oligonucleotide
auuuaaauaug

SEQ ID NO: 57217 - RNA, 12 nt, Artificial Sequence
  Description of Artificial Sequence: Synthetic oligonucleotide
auccuuuguuuc

SEQ ID NO: 57218 - RNA, 13 nt, Artificial Sequence
  Description of Artificial Sequence: Synthetic oligonucleotide
gucuaaguguuug

SEQ ID NO: 57219 - RNA, 11 nt, Artificial Sequence
  Description of Artificial Sequence: Synthetic oligonucleotide
ccugugacaaa

SEQ ID NO: 57220 - RNA, 12 nt, Artificial Sequence
  Description of Artificial Sequence: Synthetic oligonucleotide
caggcugaauua

SEQ ID NO: 57221 - RNA, 13 nt, Artificial Sequence
  Description of Artificial Sequence: Synthetic oligonucleotide
ucauucuuacaau

SEQ ID NO: 57222 - RNA, 14 nt, Artificial Sequence
  Description of Artificial Sequence: Synthetic oligonucleotide
cauucuuacaauug

SEQ ID NO: 57223 - RNA, 11 nt, Artificial Sequence
  Description of Artificial Sequence: Synthetic oligonucleotide
agagaguguac

SEQ ID NO: 57224 - RNA, 11 nt, Artificial Sequence
  Description of Artificial Sequence: Synthetic oligonucleotide
gaacucagcag

SEQ ID NO: 57225 - RNA, 12 nt, Artificial Sequence
  Description of Artificial Sequence: Synthetic oligonucleotide
uuauuuucagua

SEQ ID NO: 57226 - RNA, 11 nt, Artificial Sequence
  Description of Artificial Sequence: Synthetic oligonucleotide
cuuaaauggaa

SEQ ID NO: 57227 - RNA, 12 nt, Artificial Sequence
  Description of Artificial Sequence: Synthetic oligonucleotide
gccuaaaauugu

SEQ ID NO: 57228 - RNA, 12 nt, Artificial Sequence
  Description of Artificial Sequence: Synthetic oligonucleotide
acuaacaucugg

SEQ ID NO: 57229 - RNA, 11 nt, Artificial Sequence
  Description of Artificial Sequence: Synthetic oligonucleotide
gacugugagcu

SEQ ID NO: 57230 - RNA, 13 nt, Artificial Sequence
  Description of Artificial Sequence: Synthetic oligonucleotide
gcuuuuuauuaau

SEQ ID NO: 57231 - RNA, 12 nt, Artificial Sequence
  Description of Artificial Sequence: Synthetic oligonucleotide
ucuucuuacauu

SEQ ID NO: 57232 - RNA, 14 nt, Artificial Sequence
  Description of Artificial Sequence: Synthetic oligonucleotide
auuuguaaaaaugu

SEQ ID NO: 57233 - RNA, 14 nt, Artificial Sequence
  Description of Artificial Sequence: Synthetic oligonucleotide
ucuuaauucauauu

SEQ ID NO: 57234 - RNA, 12 nt, Artificial Sequence
  Description of Artificial Sequence: Synthetic oligonucleotide
aacuaaucauga

SEQ ID NO: 57235 - RNA, 11 nt, Artificial Sequence
  Description of Artificial Sequence: Synthetic oligonucleotide
cugcucuuggg

SEQ ID NO: 57236 - RNA, 12 nt, Artificial Sequence
  Description of Artificial Sequence: Synthetic oligonucleotide
aguagcuuugag

SEQ ID NO: 57237 - RNA, 13 nt, Artificial Sequence
  Description of Artificial Sequence: Synthetic oligonucleotide
acguaauauuuca

SEQ ID NO: 57238 - RNA, 12 nt, Artificial Sequence
  Description of Artificial Sequence: Synthetic oligonucleotide
auucucuucacu

SEQ ID NO: 57239 - RNA, 13 nt, Artificial Sequence
  Description of Artificial Sequence: Synthetic oligonucleotide
uaaugcuaagaaa

SEQ ID NO: 57240 - RNA, 11 nt, Artificial Sequence
  Description of Artificial Sequence: Synthetic oligonucleotide
cugaaaaucaa

SEQ ID NO: 57241 - RNA, 13 nt, Artificial Sequence
  Description of Artificial Sequence: Synthetic oligonucleotide
auaugauuacuuu

SEQ ID NO: 57242 - RNA, 13 nt, Artificial Sequence
  Description of Artificial Sequence: Synthetic oligonucleotide
auuuuguucuaca

SEQ ID NO: 57243 - RNA, 11 nt, Artificial Sequence
  Description of Artificial Sequence: Synthetic oligonucleotide
ccgggacucuc

SEQ ID NO: 57244 - RNA, 13 nt, Artificial Sequence
  Description of Artificial Sequence: Synthetic oligonucleotide
cuuuaaaguaaag

SEQ ID NO: 57245 - RNA, 12 nt, Artificial Sequence
  Description of Artificial Sequence: Synthetic oligonucleotide
cuggaagccugg

SEQ ID NO: 57246 - RNA, 13 nt, Artificial Sequence
  Description of Artificial Sequence: Synthetic oligonucleotide
aaacaaaagagag

SEQ ID NO: 57247 - RNA, 12 nt, Artificial Sequence
  Description of Artificial Sequence: Synthetic oligonucleotide
ucaguuaugccg

SEQ ID NO: 57248 - RNA, 12 nt, Artificial Sequence
  Description of Artificial Sequence: Synthetic oligonucleotide
aaaagaagucca

SEQ ID NO: 57249 - RNA, 10 nt, Artificial Sequence
  Description of Artificial Sequence: Synthetic oligonucleotide
ggugagguua

SEQ ID NO: 57250 - RNA, 10 nt, Artificial Sequence
  Description of Artificial Sequence: Synthetic oligonucleotide
ggaagaggac

SEQ ID NO: 57251 - RNA, 12 nt, Artificial Sequence
  Description of Artificial Sequence: Synthetic oligonucleotide
agcaaguauugu

SEQ ID NO: 57252 - RNA, 11 nt, Artificial Sequence
  Description of Artificial Sequence: Synthetic oligonucleotide
uuguagcacuc

SEQ ID NO: 57253 - RNA, 13 nt, Artificial Sequence
  Description of Artificial Sequence: Synthetic oligonucleotide
caaaaccacaaau

SEQ ID NO: 57254 - RNA, 11 nt, Artificial Sequence
  Description of Artificial Sequence: Synthetic oligonucleotide
aagcccauaca

SEQ ID NO: 57255 - RNA, 10 nt, Artificial Sequence
  Description of Artificial Sequence: Synthetic oligonucleotide
gcccauacag

SEQ ID NO: 57256 - RNA, 11 nt, Artificial Sequence
  Description of Artificial Sequence: Synthetic oligonucleotide
agaaaccuucc

SEQ ID NO: 57257 - RNA, 9 nt, Artificial Sequence
  Description of Artificial Sequence: Synthetic oligonucleotide
uauaccuac

SEQ ID NO: 57258 - RNA, 12 nt, Artificial Sequence
  Description of Artificial Sequence: Synthetic oligonucleotide
ccaguuuucgga

SEQ ID NO: 57259 - RNA, 8 nt, Artificial Sequence
  Description of Artificial Sequence: Synthetic oligonucleotide
gaacaggg

SEQ ID NO: 57260 - RNA, 12 nt, Artificial Sequence
  Description of Artificial Sequence: Synthetic oligonucleotide
uaacuuuccagu

SEQ ID NO: 57261 - RNA, 13 nt, Artificial Sequence
  Description of Artificial Sequence: Synthetic oligonucleotide
aaguuugguuuug

SEQ ID NO: 57262 - RNA, 11 nt, Artificial Sequence
  Description of Artificial Sequence: Synthetic oligonucleotide
uucccacugua

SEQ ID NO: 57263 - RNA, 12 nt, Artificial Sequence
  Description of Artificial Sequence: Synthetic oligonucleotide
gauaccauauga

SEQ ID NO: 57264 - RNA, 10 nt, Artificial Sequence
  Description of Artificial Sequence: Synthetic oligonucleotide
acaugggcug

SEQ ID NO: 57265 - RNA, 12 nt, Artificial Sequence
  Description of Artificial Sequence: Synthetic oligonucleotide
aacuuuuucaua

SEQ ID NO: 57266 - RNA, 11 nt, Artificial Sequence
  Description of Artificial Sequence: Synthetic oligonucleotide
augaggccgga

SEQ ID NO: 57267 - RNA, 10 nt, Artificial Sequence
  Description of Artificial Sequence: Synthetic oligonucleotide
cugcauuugu

SEQ ID NO: 57268 - RNA, 12 nt, Artificial Sequence
  Description of Artificial Sequence: Synthetic oligonucleotide
auguuuacuacc

SEQ ID NO: 57269 - RNA, 14 nt, Artificial Sequence
  Description of Artificial Sequence: Synthetic oligonucleotide
auuuuuugaugaaa

SEQ ID NO: 57270 - RNA, 13 nt, Artificial Sequence
  Description of Artificial Sequence: Synthetic oligonucleotide
agugugugaauuu

SEQ ID NO: 57271 - RNA, 12 nt, Artificial Sequence
  Description of Artificial Sequence: Synthetic oligonucleotide
agcaauguaugu

SEQ ID NO: 57272 - RNA, 13 nt, Artificial Sequence
  Description of Artificial Sequence: Synthetic oligonucleotide
aagcacauauaua

SEQ ID NO: 57273 - RNA, 13 nt, Artificial Sequence
  Description of Artificial Sequence: Synthetic oligonucleotide
uaauaguuucucc

SEQ ID NO: 57274 - RNA, 12 nt, Artificial Sequence
  Description of Artificial Sequence: Synthetic oligonucleotide
guuucuccaaau

SEQ ID NO: 57275 - RNA, 12 nt, Artificial Sequence
  Description of Artificial Sequence: Synthetic oligonucleotide
acuuccuagaaa

SEQ ID NO: 57276 - RNA, 12 nt, Artificial Sequence
  Description of Artificial Sequence: Synthetic oligonucleotide
acaccauauaug

SEQ ID NO: 57277 - RNA, 13 nt, Artificial Sequence
  Description of Artificial Sequence: Synthetic oligonucleotide
uauaugaauggag

SEQ ID NO: 57278 - RNA, 12 nt, Artificial Sequence
  Description of Artificial Sequence: Synthetic oligonucleotide
cauuuacaggga

SEQ ID NO: 57279 - RNA, 12 nt, Artificial Sequence
  Description of Artificial Sequence: Synthetic oligonucleotide
auuuacagggac

SEQ ID NO: 57280 - RNA, 9 nt, Artificial Sequence
  Description of Artificial Sequence: Synthetic oligonucleotide
gggaccuga

SEQ ID NO: 57281 - RNA, 13 nt, Artificial Sequence
  Description of Artificial Sequence: Synthetic oligonucleotide
guuugacugcauc

SEQ ID NO: 57282 - RNA, 12 nt, Artificial Sequence
  Description of Artificial Sequence: Synthetic oligonucleotide
uugacugcaucg

SEQ ID NO: 57283 - RNA, 11 nt, Artificial Sequence
  Description of Artificial Sequence: Synthetic oligonucleotide
aguucacaggg

SEQ ID NO: 57284 - RNA, 12 nt, Artificial Sequence
  Description of Artificial Sequence: Synthetic oligonucleotide
gcaccucugucc

SEQ ID NO: 57285 - RNA, 14 nt, Artificial Sequence
  Description of Artificial Sequence: Synthetic oligonucleotide
guuugucuuuuuaa

SEQ ID NO: 57286 - RNA, 13 nt, Artificial Sequence
  Description of Artificial Sequence: Synthetic oligonucleotide
uugucuuuuuaag

SEQ ID NO: 57287 - RNA, 12 nt, Artificial Sequence
  Description of Artificial Sequence: Synthetic oligonucleotide
cuaaagguuguc

SEQ ID NO: 57288 - RNA, 11 nt, Artificial Sequence
  Description of Artificial Sequence: Synthetic oligonucleotide
agguugucgac

SEQ ID NO: 57289 - RNA, 12 nt, Artificial Sequence
  Description of Artificial Sequence: Synthetic oligonucleotide
ccuggcaauugu

SEQ ID NO: 57290 - RNA, 11 nt, Artificial Sequence
  Description of Artificial Sequence: Synthetic oligonucleotide
guggugcgagg

SEQ ID NO: 57291 - RNA, 12 nt, Artificial Sequence
  Description of Artificial Sequence: Synthetic oligonucleotide
gagacaugaaau

SEQ ID NO: 57292 - RNA, 12 nt, Artificial Sequence
  Description of Artificial Sequence: Synthetic oligonucleotide
uauauuucucca

SEQ ID NO: 57293 - RNA, 9 nt, Artificial Sequence
  Description of Artificial Sequence: Synthetic oligonucleotide
augaaggcu

SEQ ID NO: 57294 - RNA, 10 nt, Artificial Sequence
  Description of Artificial Sequence: Synthetic oligonucleotide
cuggaguggu

SEQ ID NO: 57295 - RNA, 10 nt, Artificial Sequence
  Description of Artificial Sequence: Synthetic oligonucleotide
ggaagagagg

SEQ ID NO: 57296 - RNA, 11 nt, Artificial Sequence
  Description of Artificial Sequence: Synthetic oligonucleotide
uugcaucgggc

SEQ ID NO: 57297 - RNA, 12 nt, Artificial Sequence
  Description of Artificial Sequence: Synthetic oligonucleotide
uauccuacugug

SEQ ID NO: 57298 - RNA, 12 nt, Artificial Sequence
  Description of Artificial Sequence: Synthetic oligonucleotide
ccuacuguguaa

SEQ ID NO: 57299 - RNA, 11 nt, Artificial Sequence
  Description of Artificial Sequence: Synthetic oligonucleotide
cuuguagugua

SEQ ID NO: 57300 - RNA, 12 nt, Artificial Sequence
  Description of Artificial Sequence: Synthetic oligonucleotide
cuuuguugauug

SEQ ID NO: 57301 - RNA, 13 nt, Artificial Sequence
  Description of Artificial Sequence: Synthetic oligonucleotide
uuguugauugaaa

SEQ ID NO: 57302 - RNA, 14 nt, Artificial Sequence
  Description of Artificial Sequence: Synthetic oligonucleotide
ucuuuuucuuccau

SEQ ID NO: 57303 - RNA, 12 nt, Artificial Sequence
  Description of Artificial Sequence: Synthetic oligonucleotide
aucuuccuucua

SEQ ID NO: 57304 - RNA, 12 nt, Artificial Sequence
  Description of Artificial Sequence: Synthetic oligonucleotide
ugaaugcuucau

SEQ ID NO: 57305 - RNA, 12 nt, Artificial Sequence
  Description of Artificial Sequence: Synthetic oligonucleotide
gaaugcuucaug

SEQ ID NO: 57306 - RNA, 12 nt, Artificial Sequence
  Description of Artificial Sequence: Synthetic oligonucleotide
auucuacuuuga

SEQ ID NO: 57307 - RNA, 12 nt, Artificial Sequence
  Description of Artificial Sequence: Synthetic oligonucleotide
gcaacuacagac

SEQ ID NO: 57308 - RNA, 12 nt, Artificial Sequence
  Description of Artificial Sequence: Synthetic oligonucleotide
accaaggucaac

SEQ ID NO: 57309 - RNA, 12 nt, Artificial Sequence
  Description of Artificial Sequence: Synthetic oligonucleotide
gacuaucucgac

SEQ ID NO: 57310 - RNA, 12 nt, Artificial Sequence
  Description of Artificial Sequence: Synthetic oligonucleotide
accuucccaaac

SEQ ID NO: 57311 - RNA, 13 nt, Artificial Sequence
  Description of Artificial Sequence: Synthetic oligonucleotide
caagcuuagaacu

SEQ ID NO: 57312 - RNA, 14 nt, Artificial Sequence
  Description of Artificial Sequence: Synthetic oligonucleotide
gcuuagaacuuuaa

SEQ ID NO: 57313 - RNA, 13 nt, Artificial Sequence
  Description of Artificial Sequence: Synthetic oligonucleotide
aacuuuaagcaac

SEQ ID NO: 57314 - RNA, 10 nt, Artificial Sequence
  Description of Artificial Sequence: Synthetic oligonucleotide
agaccaccac

SEQ ID NO: 57315 - RNA, 13 nt, Artificial Sequence
  Description of Artificial Sequence: Synthetic oligonucleotide
cgagaaauaaagu

SEQ ID NO: 57316 - RNA, 13 nt, Artificial Sequence
  Description of Artificial Sequence: Synthetic oligonucleotide
gagaaauaaaguu

SEQ ID NO: 57317 - RNA, 11 nt, Artificial Sequence
  Description of Artificial Sequence: Synthetic oligonucleotide
ggaaaugaucc

SEQ ID NO: 57318 - RNA, 12 nt, Artificial Sequence
  Description of Artificial Sequence: Synthetic oligonucleotide
aagaaaugaaac

SEQ ID NO: 57319 - RNA, 12 nt, Artificial Sequence
  Description of Artificial Sequence: Synthetic oligonucleotide
uuuccauccucc

SEQ ID NO: 57320 - RNA, 14 nt, Artificial Sequence
  Description of Artificial Sequence: Synthetic oligonucleotide
cugaaaaucuuuga

SEQ ID NO: 57321 - RNA, 10 nt, Artificial Sequence
  Description of Artificial Sequence: Synthetic oligonucleotide
gccguucagg

SEQ ID NO: 57322 - RNA, 12 nt, Artificial Sequence
  Description of Artificial Sequence: Synthetic oligonucleotide
aggguccagaag

SEQ ID NO: 57323 - RNA, 12 nt, Artificial Sequence
  Description of Artificial Sequence: Synthetic oligonucleotide
caagacugcuug

SEQ ID NO: 57324 - RNA, 12 nt, Artificial Sequence
  Description of Artificial Sequence: Synthetic oligonucleotide
ccaugucuuugg

SEQ ID NO: 57325 - RNA, 10 nt, Artificial Sequence
  Description of Artificial Sequence: Synthetic oligonucleotide
ccugaaacac

SEQ ID NO: 57326 - RNA, 11 nt, Artificial Sequence
  Description of Artificial Sequence: Synthetic oligonucleotide
cucuguaccuc

SEQ ID NO: 57327 - RNA, 11 nt, Artificial Sequence
  Description of Artificial Sequence: Synthetic oligonucleotide
gcaagacaaga

SEQ ID NO: 57328 - RNA, 12 nt, Artificial Sequence
  Description of Artificial Sequence: Synthetic oligonucleotide
caagacaagaaa

SEQ ID NO: 57329 - RNA, 11 nt, Artificial Sequence
  Description of Artificial Sequence: Synthetic oligonucleotide
guacaagaucc

SEQ ID NO: 57330 - RNA, 11 nt, Artificial Sequence
  Description of Artificial Sequence: Synthetic oligonucleotide
guacuugcaga

SEQ ID NO: 57331 - RNA, 12 nt, Artificial Sequence
  Description of Artificial Sequence: Synthetic oligonucleotide
gaucgauacaga

SEQ ID NO: 57332 - RNA, 12 nt, Artificial Sequence
  Description of Artificial Sequence: Synthetic oligonucleotide
auaaaaauaaau

SEQ ID NO: 57333 - RNA, 12 nt, Artificial Sequence
  Description of Artificial Sequence: Synthetic oligonucleotide
aaaaauaaauau

SEQ ID NO: 57334 - RNA, 12 nt, Artificial Sequence
  Description of Artificial Sequence: Synthetic oligonucleotide
uugacugcugug

SEQ ID NO: 57335 - RNA, 12 nt, Artificial Sequence
  Description of Artificial Sequence: Synthetic oligonucleotide
gagaugagagac

SEQ ID NO: 57336 - RNA, 9 nt, Artificial Sequence
  Description of Artificial Sequence: Synthetic oligonucleotide
cccacuugg

SEQ ID NO: 57337 - RNA, 8680 nt, Homo sapiens
acggggccugaagcggcgguaccggugcuggcggcggcagcugaggccuuggccgaagccgcgcgaaccucagggcaagaugcuuggaaccggaccugccgccgccaccaccgcugccaccacaucuagcaaugugagcguccugcagcaguuugccaguggccuaaagagccggaaugaggaaaccagggccaaagccgccaaggagcuccagcacuaugucaccauggaacuccgagagaugagucaagaggagucuacucgcuucuaugaccaacugaaccaucacauuuuugaauugguuuccagcucagaugccaaugagaggaaagguggcaucuuggccauagcuagccucauaggaguggaaggugggaaugccacccgaauuggcagauuugccaacuaucuucggaaccuccuccccuccaaugacccaguugucauggaaauggcauccaaggccauuggccgucuugccauggcaggggacacuuuuaccgcugaguacguggaauuugaggugaagcgagcccuggaauggcugggugcugaccgcaaugagggccggagacaugcagcuguccugguucuccgugagcuggccaucagcgucccuaccuucuucuuccagcaagugcaacccuucuuugacaacauuuuuguggccgugugggaccccaaacaggccauccgugagggagcuguagccgcccuucgugccugucugauucucacaacccagcgugagccgaaggagaugcagaagccucagugguacaggcacacauuugaagaagcagagaagggauuugaugagaccuuggccaaagagaagggcaugaaucgggaugaucggauccauggagccuuguugauccuuaacgagcugguccgaaucagcagcauggagggagagcgucugagagaagaaauggaagaaaucacacagcagcagcugguacacgacaaguacugcaaagaucucaugggcuucggaacaaaaccucgucacauuacccccuucaccaguuuccaggcuguacagccccagcagucaaaugccuugguggggcugcugggguacagcucucaccaaggccucaugggauuugggaccucccccaguccagcuaaguccacccugguggagagccgguguugcagagacuugauggaggagaaauuugaucaggugugccagugggugcugaaaugcaggaauagcaagaacucgcugauccaaaugacaauccuuaauuuguugccccgcuuggcugcauuccgaccuucugccuucacagauacccaguaucuccaagauaccaugaaccauguccuaagcugugucaagaaggagaaggaacguacagcggccuuccaagcccuggggcuacuuucuguggcugugaggucugaguuuaaggucuauuugccucgcgugcuggacaucauccgagcggcccugcccccaaaggacuucgcccauaagaggcagaaggcaaugcagguggaugccacagucuucacuugcaucagcaugcuggcucgagcaauggggccaggcauccagcaggauaucaaggagcugcuggagcccaugcuggcagugggacuaagcccugcccucacugcagugcucuacgaccugagccgucagauuccacagcuaaagaaggacauucaagaugggcuacugaaaaugcugucccugguccuuaugcacaaaccccuucgccacccaggcaugcccaagggccuggcccaucagcuggccucuccuggccucacgacccucccugaggccagcgaugugggcagcaucacucuugcccuccgaacgcuuggcagcuuugaauuugaaggccacucucugacccaauuuguucgccacugugcggaucauuuccugaacagugagcacaaggagauccgcauggaggcugcccgcaccugcucccgccugcucacacccuccauccaccucaucaguggccaugcucaugugguuagccagaccgcagugcaagugguggcagaugugcuuagcaaacugcucguaguugggauaacagauccugacccugacauucgcuacugugucuuggcgucccuggacgagcgcuuugaugcacaccuggcccaggcggagaacuugcaggccuuguuuguggcucugaaugaccagguguuugagauccgggagcuggccaucugcacugugggccgacucaguagcaugaacccugccuuugucaugccuuuccugcgcaagaugcucauccagauuuugacagaguuggagcacagugggauuggaagaaucaaagagcagagugcccgcaugcuggggcaccuggucuccaaugccccccgacucauccgccccuacauggagccuauucugaaggcauuaauuuugaaacugaaagauccagacccugauccaaacccaggugugaucaauaauguccuggcaacaauaggagaauuggcacagguuaguggccuggaaaugaggaaauggguugaugaacuuuuuauuaucaucauggacaugcuccaggauuccucuuuguuggccaaaaggcagguggcucuguggacccugggacaguugguggccagcacuggcuauguaguagagcccuacaggaaguacccuacuuugcuugaggugcuacugaauuuucugaagacugagcagaaccaggguacacgcagagaggccauccguguguuagggcuuuuaggggcuuuggauccuuacaagcacaaagugaacauuggcaugauagaccagucccgggaugccucugcugucagccugucagaauccaagucaagucaggauuccucugacuauagcacuagugaaaugcuggucaacaugggaaacuugccucuggaugaguucuacccagcuguguccaugguggcccugaugcggaucuuccgagaccagucacucucucaucaucacaccaugguuguccaggccaucaccuucaucuucaagucccugggacucaaaugugugcaguuccugccccaggucaugcccacguuccuuaacgucauucgagucugugauggggccauccgggaauuuuuguuccagcagcugggaauguugguguccuuugugaagagccacaucagaccuuauauggaugaaauagucacccucaugagagaauucugggucaugaacaccucaauucagagcacgaucauucuucucauugagcaaauugugguagcucuugggggugaauuuaagcucuaccugccccagcugaucccacacaugcugcgugucuucaugcaugacaacagcccaggccgcauugucucuaucaaguuacuggcugcaauccagcuguuuggcgccaaccuggaugacuaccugcauuuacugcugccuccuauuguuaaguuguuugaugccccugaagcuccacugccaucucgaaaggcagcgcuagagacuguggaccgccugacggagucccuggauuucacugacuaugccucccggaucauucacccuauuguucgaacacuggaccagagcccagaacugcgcuccacagccauggacacgcugucuucacuuguuuuucagcuggggaagaaguaccaaauuuucauuccaauggugaauaaaguucuggugcgacaccgaaucaaucaucagcgcuaugaugugcucaucugcagaauugucaagggauacacacuugcugaugaagaggaggauccuuugauuuaccagcaucggaugcuuaggaguggccaaggggaugcauuggcuaguggaccaguggaaacaggacccaugaagaaacugcacgucagcaccaucaaccuccaaaaggccuggggcgcugccaggagggucuccaaagaugacuggcuggaauggcugagacggcugagccuggagcugcugaaggacucaucaucgcccucccugcgcuccugcugggcccuggcacaggccuacaacccgauggccagggaucucuucaaugcugcauuuguguccugcuggucugaacugaaugaagaucaacaggaugagcucaucagaagcaucgaguuggcccucaccucacaagacaucgcugaagucacacagacccucuuaaacuuggcugaauucauggaacacagugacaagggcccccugccacugagagaugacaauggcauuguucugcugggugagagagcugccaagugccgagcauaugccaaagcacuacacuacaaagaacuggaguuccagaaaggccccaccccugccauucuagaaucucucaucagcauuaauaauaagcuacagcagccggaggcagcggccggaguguuagaauaugccaugaaacacuuuggagagcuggagauccaggcuaccugguaugagaaacugcacgagugggaggaugcccuuguggccuaugacaagaaaauggacaccaacaaggacgacccagagcugaugcugggccgcaugcgcugccucgaggccuugggggaauggggucaacuccaccagcagugcugugaaaaguggacccugguuaaugaugagacccaagccaagauggcccggauggcugcugcagcugcaugggguuuaggucagugggacagcauggaagaauacaccuguaugaucccucgggacacccaugauggggcauuuuauagagcugugcuggcacugcaucaggaccucuucuccuuggcacaacagugcauugacaaggccagggaccugcuggaugcugaauuaacugcgauggcaggagagaguuacagucgggcauauggggccaugguuucuugccacaugcuguccgagcuggaggagguuauccaguacaaacuuguccccgagcgacgagagaucauccgccagaucuggugggagagacugcagggcugccagcguaucguagaggacuggcagaaaauccuuauggugcggucccuuguggucagcccucaugaagacaugagaaccuggcucaaguaugcaagccugugcggcaagaguggcaggcuggcucuugcucauaaaacuuuaguguugcuccugggaguugauccgucucggcaacuugaccauccucugccaacaguucacccucaggugaccuaugccuacaugaaaaacauguggaagagugcccgcaagaucgaugccuuccagcacaugcagcauuuuguccagaccaugcagcaacaggcccagcaugccaucgcuacugaggaccagcagcauaagcaggaacugcacaagcucauggcccgaugcuuccugaaacuuggagaguggcagcugaaucuacagggcaucaaugagagcacaauccccaaagugcugcaguacuacagcgccgccacagagcacgaccgcagcugguacaaggccuggcaugcgugggcagugaugaacuucgaagcugugcuacacuacaaacaucagaaccaagcccgcgaugagaagaagaaacugcgucaugccagcggggccaacaucaccaacgccaccacugccgccaccacggccgccacugccaccaccacugccagcaccgagggcagcaacagugagagcgaggccgagagcaccgagaacagccccaccccaucgccgcugcagaagaaggucacugaggaucuguccaaaacccuccugauguacacggugccugccguccagggcuucuuccguuccaucuccuugucacgaggcaacaaccuccaggauacacucagaguucucaccuuaugguuugauuauggucacuggccagaugucaaugaggccuuaguggagggggugaaagccauccagauugauaccuggcuacagguuauaccucagcucauugcaagaauugauacgcccagacccuuggugggacgucucauucaccagcuucucacagacauuggucgguaccacccccaggcccucaucuacccacugacaguggcuucuaagucuaccacgacagcccggcacaaugcagccaacaagauucugaagaacaugugugagcacagcaacacccugguccagcaggccaugauggugagcgaggagcugauccgaguggccauccucuggcaugagauguggcaugaaggccuggaagaggcaucucguuuguacuuuggggaaaggaacgugaaaggcauguuugaggugcuggagcccuugcaugcuaugauggaacggggcccccagacucugaaggaaacauccuuuaaucaggccuauggucgagauuuaauggaggcccaagaguggugcaggaaguacaugaaaucagggaaugucaaggaccucacccaagccugggaccucuauuaucauguguuccgacgaaucucaaagcagcugccucagcucacauccuuagagcugcaauauguuuccccaaaacuucugaugugccgggaccuugaauuggcugugccaggaacauaugaccccaaccagccaaucauucgcauucaguccauagcaccgucuuugcaagucaucacauccaagcagaggccccggaaauugacacuuaugggcagcaacggacaugaguuuguuuuccuucuaaaaggccaugaagaucugcgccaggaugagcgugugaugcagcucuucggccugguuaacacccuucuggccaaugacccaacaucucuucggaaaaaccucagcauccagagauacgcugucaucccuuuaucgaccaacucgggccucauuggcuggguuccccacugugacacacugcacgcccucauccgggacuacagggagaagaagaagauccuucucaacaucgagcaucgcaucauguugcggauggcuccggacuaugaccacuugacucugaugcagaagguggagguguuugagcaugccgucaauaauacagcuggggacgaccuggccaagcugcuguggcugaaaagccccagcuccgaggugugguuugaccgaagaaccaauuauacccguucuuuagcggucaugucaaugguuggguauauuuuaggccugggagauagacacccauccaaccugaugcuggaccgucugagugggaagauccugcacauugacuuuggggacugcuuugagguugcuaugacccgagagaaguuuccagagaagauuccauuuagacuaacaagaauguugaccaaugcuauggagguuacaggccuggauggcaacuacagaaucacaugccacacagugauggaggugcugcgagagcacaaggacagugucauggccgugcuggaagccuuugucuaugaccccuugcugaacuggaggcugauggacacaaauaccaaaggcaacaagcgaucccgaacgaggacggauuccuacucugcuggccagucagucgaaauuuuggacgguguggaacuuggagagccagcccauaagaaaacggggaccacagugccagaaucuauucauucuuucauuggagacgguuuggugaaaccagaggcccuaaauaagaaagcuauccagauuauuaacaggguucgagauaagcucacuggucgggacuucucucaugaugacacuuuggauguuccaacgcaaguugagcugcucaucaaacaagcgacaucccaugaaaaccucugccagugcuauauuggcuggugcccuuucugguaacuggaggcccagaugugcccaucacguuuuuucugaggcuuuuguacuuuaguaaaugcuuccacuaaacugaaaccauggugagaaaguuugacuuuguuaaauauuuugaaauguaaaugaaaagaacuacuguauauuaaaaguugguuugaaccaacuuucuagcugcuguugaagaauauauugucagaaacacaaggcuugauuugguucccaggacagugaaacaauaguaauaccacguaaaucaagccauucauuuuggggaacagaagauccauaacuuuagaaauacggguuuugacuuaacucacaagagaacucaucauaaguacuugcugauggaagaaugaccuaguugcuccucucaacauggguacagcaaacucagcacagccaagaagccucaggucguggagaacauggauuaggauccuagacuguaaagacacagaagaugcugaccucaccccugccaccuaucccaagaccucacuggucuguggacagcagcagaaauguuugcaagauaggccaaaaugaguacaaaaggucugucuuccaucagacccagugaugcugcgacucacacgcuucaauucaagaccugaccgcuaguagggagguuuauucagaucgcuggcagccucggcugagcagaugcacagaggggaucacugugcagugggaccacccucacuggccuucugcagcaggguucugggauguuuucaguggucaaaauacucuguuuagagcaagggcucagaaaacagaaauacugucauggaggugcugaacacagggaaggucugguacauauuggaaauuaugagcagaacaaauacucaacuaaaugcacaaaguauaaaguguagccaugucuagacaccauguuguaucagaauaauuuuugugccaauaaaugacaucagaauuuuaaacaua

SEQ ID NO: 57338 - RNA, 19 nt, Artificial Sequence
  Description of Artificial Sequence: Synthetic oligonucleotide
acggggccugaagcggcgg

SEQ ID NO: 57339 - RNA, 19 nt, Artificial Sequence
  Description of Artificial Sequence: Synthetic oligonucleotide
guaccggugcuggcggcgg

SEQ ID NO: 57340 - RNA, 19 nt, Artificial Sequence
  Description of Artificial Sequence: Synthetic oligonucleotide
gcagcugaggccuuggccg

SEQ ID NO: 57341 - RNA, 19 nt, Artificial Sequence
  Description of Artificial Sequence: Synthetic oligonucleotide
gaagccgcgcgaaccucag

SEQ ID NO: 57342 - RNA, 19 nt, Artificial Sequence
  Description of Artificial Sequence: Synthetic oligonucleotide
gggcaagaugcuuggaacc

SEQ ID NO: 57343 - RNA, 19 nt, Artificial Sequence
  Description of Artificial Sequence: Synthetic oligonucleotide
cggaccugccgccgccacc

SEQ ID NO: 57344 - RNA, 19 nt, Artificial Sequence
  Description of Artificial Sequence: Synthetic oligonucleotide
caccgcugccaccacaucu

SEQ ID NO: 57345 - RNA, 19 nt, Artificial Sequence
  Description of Artificial Sequence: Synthetic oligonucleotide
uagcaaugugagcguccug

SEQ ID NO: 57346 - RNA, 19 nt, Artificial Sequence
  Description of Artificial Sequence: Synthetic oligonucleotide
gcagcaguuugccaguggc

SEQ ID NO: 57347 - RNA, 19 nt, Artificial Sequence
  Description of Artificial Sequence: Synthetic oligonucleotide
ccuaaagagccggaaugag

SEQ ID NO: 57348 - RNA, 19 nt, Artificial Sequence
  Description of Artificial Sequence: Synthetic oligonucleotide
ggaaaccagggccaaagcc

SEQ ID NO: 57349 - RNA, 19 nt, Artificial Sequence
  Description of Artificial Sequence: Synthetic oligonucleotide
cgccaaggagcuccagcac

SEQ ID NO: 57350 - RNA, 19 nt, Artificial Sequence
  Description of Artificial Sequence: Synthetic oligonucleotide
cuaugucaccauggaacuc

SEQ ID NO: 57351 - RNA, 19 nt, Artificial Sequence
  Description of Artificial Sequence: Synthetic oligonucleotide
ccgagagaugagucaagag

SEQ ID NO: 57352 - RNA, 19 nt, Artificial Sequence
  Description of Artificial Sequence: Synthetic oligonucleotide
ggagucuacucgcuucuau

SEQ ID NO: 57353 - RNA, 19 nt, Artificial Sequence
  Description of Artificial Sequence: Synthetic oligonucleotide
ugaccaacugaaccaucac

SEQ ID NO: 57354 - RNA, 19 nt, Artificial Sequence
  Description of Artificial Sequence: Synthetic oligonucleotide
cauuuuugaauugguuucc

SEQ ID NO: 57355 - RNA, 19 nt, Artificial Sequence
  Description of Artificial Sequence: Synthetic oligonucleotide
cagcucagaugccaaugag

SEQ ID NO: 57356 - RNA, 19 nt, Artificial Sequence
  Description of Artificial Sequence: Synthetic oligonucleotide
gaggaaagguggcaucuug

SEQ ID NO: 57357 - RNA, 19 nt, Artificial Sequence
  Description of Artificial Sequence: Synthetic oligonucleotide
ggccauagcuagccucaua

SEQ ID NO: 57358 - RNA, 19 nt, Artificial Sequence
  Description of Artificial Sequence: Synthetic oligonucleotide
aggaguggaaggugggaau

SEQ ID NO: 57359 - RNA, 19 nt, Artificial Sequence
  Description of Artificial Sequence: Synthetic oligonucleotide
ugccacccgaauuggcaga

SEQ ID NO: 57360 - RNA, 19 nt, Artificial Sequence
  Description of Artificial Sequence: Synthetic oligonucleotide
auuugccaacuaucuucgg

SEQ ID NO: 57361 - RNA, 19 nt, Artificial Sequence
  Description of Artificial Sequence: Synthetic oligonucleotide
gaaccuccuccccuccaau

SEQ ID NO: 57362 - RNA, 19 nt, Artificial Sequence
  Description of Artificial Sequence: Synthetic oligonucleotide
ugacccaguugucauggaa

SEQ ID NO: 57363 - RNA, 19 nt, Artificial Sequence
  Description of Artificial Sequence: Synthetic oligonucleotide
aauggcauccaaggccauu

SEQ ID NO: 57364 - RNA, 19 nt, Artificial Sequence
  Description of Artificial Sequence: Synthetic oligonucleotide
uggccgucuugccauggca

SEQ ID NO: 57365 - RNA, 19 nt, Artificial Sequence
  Description of Artificial Sequence: Synthetic oligonucleotide
aggggacacuuuuaccgcu

SEQ ID NO: 57366 - RNA, 19 nt, Artificial Sequence
  Description of Artificial Sequence: Synthetic oligonucleotide
ugaguacguggaauuugag

SEQ ID NO: 57367 - RNA, 19 nt, Artificial Sequence
  Description of Artificial Sequence: Synthetic oligonucleotide
ggugaagcgagcccuggaa

SEQ ID NO: 57368 - RNA, 19 nt, Artificial Sequence
  Description of Artificial Sequence: Synthetic oligonucleotide
auggcugggugcugaccgc

SEQ ID NO: 57369 - RNA, 19 nt, Artificial Sequence
  Description of Artificial Sequence: Synthetic oligonucleotide
caaugagggccggagacau

SEQ ID NO: 57370 - RNA, 19 nt, Artificial Sequence
  Description of Artificial Sequence: Synthetic oligonucleotide
ugcagcuguccugguucuc

SEQ ID NO: 57371 - RNA, 19 nt, Artificial Sequence
  Description of Artificial Sequence: Synthetic oligonucleotide
ccgugagcuggccaucagc

SEQ ID NO: 57372 - RNA, 19 nt, Artificial Sequence
  Description of Artificial Sequence: Synthetic oligonucleotide
cgucccuaccuucuucuuc

SEQ ID NO: 57373 - RNA, 19 nt, Artificial Sequence
  Description of Artificial Sequence: Synthetic oligonucleotide
ccagcaagugcaacccuuc

SEQ ID NO: 57374 - RNA, 19 nt, Artificial Sequence
  Description of Artificial Sequence: Synthetic oligonucleotide
cuuugacaacauuuuugug

SEQ ID NO: 57375 - RNA, 19 nt, Artificial Sequence
  Description of Artificial Sequence: Synthetic oligonucleotide
ggccgugugggaccccaaa

SEQ ID NO: 57376 - RNA, 19 nt, Artificial Sequence
  Description of Artificial Sequence: Synthetic oligonucleotide
acaggccauccgugaggga

SEQ ID NO: 57377 - RNA, 19 nt, Artificial Sequence
  Description of Artificial Sequence: Synthetic oligonucleotide
agcuguagccgcccuucgu

SEQ ID NO: 57378 - RNA, 19 nt, Artificial Sequence
  Description of Artificial Sequence: Synthetic oligonucleotide
ugccugucugauucucaca

SEQ ID NO: 57379 - RNA, 19 nt, Artificial Sequence
  Description of Artificial Sequence: Synthetic oligonucleotide
aacccagcgugagccgaag

SEQ ID NO: 57380 - RNA, 19 nt, Artificial Sequence
  Description of Artificial Sequence: Synthetic oligonucleotide
ggagaugcagaagccucag

SEQ ID NO: 57381 - RNA, 19 nt, Artificial Sequence
  Description of Artificial Sequence: Synthetic oligonucleotide
gugguacaggcacacauuu

SEQ ID NO: 57382 - RNA, 19 nt, Artificial Sequence
  Description of Artificial Sequence: Synthetic oligonucleotide
ugaagaagcagagaaggga

SEQ ID NO: 57383 - RNA, 19 nt, Artificial Sequence
  Description of Artificial Sequence: Synthetic oligonucleotide
auuugaugagaccuuggcc

SEQ ID NO: 57384 - RNA, 19 nt, Artificial Sequence
  Description of Artificial Sequence: Synthetic oligonucleotide
caaagagaagggcaugaau

SEQ ID NO: 57385 - RNA, 19 nt, Artificial Sequence
  Description of Artificial Sequence: Synthetic oligonucleotide
ucgggaugaucggauccau

SEQ ID NO: 57386 - RNA, 19 nt, Artificial Sequence
  Description of Artificial Sequence: Synthetic oligonucleotide
uggagccuuguugauccuu

SEQ ID NO: 57387 - RNA, 19 nt, Artificial Sequence
  Description of Artificial Sequence: Synthetic oligonucleotide
uaacgagcugguccgaauc

SEQ ID NO: 57388 - RNA, 19 nt, Artificial Sequence
  Description of Artificial Sequence: Synthetic oligonucleotide
cagcagcauggagggagag

SEQ ID NO: 57389 - RNA, 19 nt, Artificial Sequence
  Description of Artificial Sequence: Synthetic oligonucleotide
gcgucugagagaagaaaug

SEQ ID NO: 57390 - RNA, 19 nt, Artificial Sequence
  Description of Artificial Sequence: Synthetic oligonucleotide
ggaagaaaucacacagcag

SEQ ID NO: 57391 - RNA, 19 nt, Artificial Sequence
  Description of Artificial Sequence: Synthetic oligonucleotide
gcagcugguacacgacaag

SEQ ID NO: 57392 - RNA, 19 nt, Artificial Sequence
  Description of Artificial Sequence: Synthetic oligonucleotide
guacugcaaagaucucaug

SEQ ID NO: 57393 - RNA, 19 nt, Artificial Sequence
  Description of Artificial Sequence: Synthetic oligonucleotide
gggcuucggaacaaaaccu

SEQ ID NO: 57394 - RNA, 19 nt, Artificial Sequence
  Description of Artificial Sequence: Synthetic oligonucleotide
ucgucacauuacccccuuc

SEQ ID NO: 57395 - RNA, 19 nt, Artificial Sequence
  Description of Artificial Sequence: Synthetic oligonucleotide
caccaguuuccaggcugua

SEQ ID NO: 57396 - RNA, 19 nt, Artificial Sequence
  Description of Artificial Sequence: Synthetic oligonucleotide
acagccccagcagucaaau

SEQ ID NO: 57397 - RNA, 19 nt, Artificial Sequence
  Description of Artificial Sequence: Synthetic oligonucleotide
ugccuugguggggcugcug

SEQ ID NO: 57398 - RNA, 19 nt, Artificial Sequence
  Description of Artificial Sequence: Synthetic oligonucleotide
gggguacagcucucaccaa

SEQ ID NO: 57399 - RNA, 19 nt, Artificial Sequence
  Description of Artificial Sequence: Synthetic oligonucleotide
aggccucaugggauuuggg

SEQ ID NO: 57400 - RNA, 19 nt, Artificial Sequence
  Description of Artificial Sequence: Synthetic oligonucleotide
gaccucccccaguccagcu

SEQ ID NO: 57401 - RNA, 19 nt, Artificial Sequence
  Description of Artificial Sequence: Synthetic oligonucleotide
uaaguccacccugguggag

SEQ ID NO: 57402 - RNA, 19 nt, Artificial Sequence
  Description of Artificial Sequence: Synthetic oligonucleotide
gagccgguguugcagagac

SEQ ID NO: 57403 - RNA, 19 nt, Artificial Sequence
  Description of Artificial Sequence: Synthetic oligonucleotide
cuugauggaggagaaauuu

SEQ ID NO: 57404 - RNA, 19 nt, Artificial Sequence
  Description of Artificial Sequence: Synthetic oligonucleotide
ugaucaggugugccagugg

SEQ ID NO: 57405 - RNA, 19 nt, Artificial Sequence
  Description of Artificial Sequence: Synthetic oligonucleotide
ggugcugaaaugcaggaau

SEQ ID NO: 57406 - RNA, 19 nt, Artificial Sequence
  Description of Artificial Sequence: Synthetic oligonucleotide
uagcaagaacucgcugauc

SEQ ID NO: 57407 - RNA, 19 nt, Artificial Sequence
  Description of Artificial Sequence: Synthetic oligonucleotide
ccaaaugacaauccuuaau

SEQ ID NO: 57408 - RNA, 19 nt, Artificial Sequence
  Description of Artificial Sequence: Synthetic oligonucleotide
uuuguugccccgcuuggcu

SEQ ID NO: 57409 - RNA, 19 nt, Artificial Sequence
  Description of Artificial Sequence: Synthetic oligonucleotide
ugcauuccgaccuucugcc

SEQ ID NO: 57410 - RNA, 19 nt, Artificial Sequence
  Description of Artificial Sequence: Synthetic oligonucleotide
cuucacagauacccaguau

SEQ ID NO: 57411 - RNA, 19 nt, Artificial Sequence
  Description of Artificial Sequence: Synthetic oligonucleotide
ucuccaagauaccaugaac

SEQ ID NO: 57412 - RNA, 19 nt, Artificial Sequence
  Description of Artificial Sequence: Synthetic oligonucleotide
ccauguccuaagcuguguc

SEQ ID NO: 57413 - RNA, 19 nt, Artificial Sequence
  Description of Artificial Sequence: Synthetic oligonucleotide
caagaaggagaaggaacgu

SEQ ID NO: 57414 - RNA, 19 nt, Artificial Sequence
  Description of Artificial Sequence: Synthetic oligonucleotide
uacagcggccuuccaagcc

SEQ ID NO: 57415 - RNA, 19 nt, Artificial Sequence
  Description of Artificial Sequence: Synthetic oligonucleotide
ccuggggcuacuuucugug

SEQ ID NO: 57416 - RNA, 19 nt, Artificial Sequence
  Description of Artificial Sequence: Synthetic oligonucleotide
ggcugugaggucugaguuu

SEQ ID NO: 57417 - RNA, 19 nt, Artificial Sequence
  Description of Artificial Sequence: Synthetic oligonucleotide
uaaggucuauuugccucgc

SEQ ID NO: 57418 - RNA, 19 nt, Artificial Sequence
  Description of Artificial Sequence: Synthetic oligonucleotide
cgugcuggacaucauccga

SEQ ID NO: 57419 - RNA, 19 nt, Artificial Sequence
  Description of Artificial Sequence: Synthetic oligonucleotide
agcggcccugcccccaaag

SEQ ID NO: 57420 - RNA, 19 nt, Artificial Sequence
  Description of Artificial Sequence: Synthetic oligonucleotide
ggacuucgcccauaagagg

SEQ ID NO: 57421 - RNA, 19 nt, Artificial Sequence
  Description of Artificial Sequence: Synthetic oligonucleotide
gcagaaggcaaugcaggug

SEQ ID NO: 57422 - RNA, 19 nt, Artificial Sequence
  Description of Artificial Sequence: Synthetic oligonucleotide
ggaugccacagucuucacu

SEQ ID NO: 57423 - RNA, 19 nt, Artificial Sequence
  Description of Artificial Sequence: Synthetic oligonucleotide
uugcaucagcaugcuggcu

SEQ ID NO: 57424 - RNA, 19 nt, Artificial Sequence
  Description of Artificial Sequence: Synthetic oligonucleotide
ucgagcaauggggccaggc

SEQ ID NO: 57425 - RNA, 19 nt, Artificial Sequence
  Description of Artificial Sequence: Synthetic oligonucleotide
cauccagcaggauaucaag

SEQ ID NO: 57426 - RNA, 19 nt, Artificial Sequence
  Description of Artificial Sequence: Synthetic oligonucleotide
ggagcugcuggagcccaug

SEQ ID NO: 57427 - RNA, 19 nt, Artificial Sequence
  Description of Artificial Sequence: Synthetic oligonucleotide
gcuggcagugggacuaagc

SEQ ID NO: 57428 - RNA, 19 nt, Artificial Sequence
  Description of Artificial Sequence: Synthetic oligonucleotide
cccugcccucacugcagug

SEQ ID NO: 57429 - RNA, 19 nt, Artificial Sequence
  Description of Artificial Sequence: Synthetic oligonucleotide
gcucuacgaccugagccgu

SEQ ID NO: 57430 - RNA, 19 nt, Artificial Sequence
  Description of Artificial Sequence: Synthetic oligonucleotide
ucagauuccacagcuaaag

SEQ ID NO: 57431 - RNA, 19 nt, Artificial Sequence
  Description of Artificial Sequence: Synthetic oligonucleotide
gaaggacauucaagauggg

SEQ ID NO: 57432 - RNA, 19 nt, Artificial Sequence
  Description of Artificial Sequence: Synthetic oligonucleotide
gcuacugaaaaugcugucc

SEQ ID NO: 57433 - RNA, 19 nt, Artificial Sequence
  Description of Artificial Sequence: Synthetic oligonucleotide
ccugguccuuaugcacaaa

SEQ ID NO: 57434 - RNA, 19 nt, Artificial Sequence
  Description of Artificial Sequence: Synthetic oligonucleotide
accccuucgccacccaggc

SEQ ID NO: 57435 - RNA, 19 nt, Artificial Sequence
  Description of Artificial Sequence: Synthetic oligonucleotide
caugcccaagggccuggcc

SEQ ID NO: 57436 - RNA, 19 nt, Artificial Sequence
  Description of Artificial Sequence: Synthetic oligonucleotide
ccaucagcuggccucuccu

SEQ ID NO: 57437 - RNA, 19 nt, Artificial Sequence
  Description of Artificial Sequence: Synthetic oligonucleotide
uggccucacgacccucccu

SEQ ID NO: 57438 - RNA, 19 nt, Artificial Sequence
  Description of Artificial Sequence: Synthetic oligonucleotide
ugaggccagcgaugugggc

SEQ ID NO: 57439 - RNA, 19 nt, Artificial Sequence
  Description of Artificial Sequence: Synthetic oligonucleotide
cagcaucacucuugcccuc

SEQ ID NO: 57440 - RNA, 19 nt, Artificial Sequence
  Description of Artificial Sequence: Synthetic oligonucleotide
ccgaacgcuuggcagcuuu

SEQ ID NO: 57441 - RNA, 19 nt, Artificial Sequence
  Description of Artificial Sequence: Synthetic oligonucleotide
ugaauuugaaggccacucu

SEQ ID NO: 57442 - RNA, 19 nt, Artificial Sequence
  Description of Artificial Sequence: Synthetic oligonucleotide
ucugacccaauuuguucgc

SEQ ID NO: 57443 - RNA, 19 nt, Artificial Sequence
  Description of Artificial Sequence: Synthetic oligonucleotide
ccacugugcggaucauuuc

SEQ ID NO: 57444 - RNA, 19 nt, Artificial Sequence
  Description of Artificial Sequence: Synthetic oligonucleotide
ccugaacagugagcacaag

SEQ ID NO: 57445 - RNA, 19 nt, Artificial Sequence
  Description of Artificial Sequence: Synthetic oligonucleotide
ggagauccgcauggaggcu

SEQ ID NO: 57446 - RNA, 19 nt, Artificial Sequence
  Description of Artificial Sequence: Synthetic oligonucleotide
ugcccgcaccugcucccgc

SEQ ID NO: 57447 - RNA, 19 nt, Artificial Sequence
  Description of Artificial Sequence: Synthetic oligonucleotide
ccugcucacacccuccauc

SEQ ID NO: 57448 - RNA, 19 nt, Artificial Sequence
  Description of Artificial Sequence: Synthetic oligonucleotide
ccaccucaucaguggccau

SEQ ID NO: 57449 - RNA, 19 nt, Artificial Sequence
  Description of Artificial Sequence: Synthetic oligonucleotide
ugcucaugugguuagccag

SEQ ID NO: 57450 - RNA, 19 nt, Artificial Sequence
  Description of Artificial Sequence: Synthetic oligonucleotide
gaccgcagugcaaguggug

SEQ ID NO: 57451 - RNA, 19 nt, Artificial Sequence
  Description of Artificial Sequence: Synthetic oligonucleotide
ggcagaugugcuuagcaaa

SEQ ID NO: 57452 - RNA, 19 nt, Artificial Sequence
  Description of Artificial Sequence: Synthetic oligonucleotide
acugcucguaguugggaua

SEQ ID NO: 57453 - RNA, 19 nt, Artificial Sequence
  Description of Artificial Sequence: Synthetic oligonucleotide
aacagauccugacccugac

SEQ ID NO: 57454 - RNA, 19 nt, Artificial Sequence
  Description of Artificial Sequence: Synthetic oligonucleotide
cauucgcuacugugucuug

SEQ ID NO: 57455 - RNA, 19 nt, Artificial Sequence
  Description of Artificial Sequence: Synthetic oligonucleotide
ggcgucccuggacgagcgc

SEQ ID NO: 57456 - RNA, 19 nt, Artificial Sequence
  Description of Artificial Sequence: Synthetic oligonucleotide
cuuugaugcacaccuggcc

SEQ ID NO: 57457 - RNA, 19 nt, Artificial Sequence
  Description of Artificial Sequence: Synthetic oligonucleotide
ccaggcggagaacuugcag

SEQ ID NO: 57458 - RNA, 19 nt, Artificial Sequence
  Description of Artificial Sequence: Synthetic oligonucleotide
ggccuuguuuguggcucug

SEQ ID NO: 57459 - RNA, 19 nt, Artificial Sequence
  Description of Artificial Sequence: Synthetic oligonucleotide
gaaugaccagguguuugag

SEQ ID NO: 57460 - RNA, 19 nt, Artificial Sequence
  Description of Artificial Sequence: Synthetic oligonucleotide
gauccgggagcuggccauc

SEQ ID NO: 57461 - RNA, 19 nt, Artificial Sequence
  Description of Artificial Sequence: Synthetic oligonucleotide
cugcacugugggccgacuc

SEQ ID NO: 57462 - RNA, 19 nt, Artificial Sequence
  Description of Artificial Sequence: Synthetic oligonucleotide
caguagcaugaacccugcc

SEQ ID NO: 57463 - RNA, 19 nt, Artificial Sequence
  Description of Artificial Sequence: Synthetic oligonucleotide
cuuugucaugccuuuccug

SEQ ID NO: 57464 - RNA, 19 nt, Artificial Sequence
  Description of Artificial Sequence: Synthetic oligonucleotide
gcgcaagaugcucauccag

SEQ ID NO: 57465 - RNA, 19 nt, Artificial Sequence
  Description of Artificial Sequence: Synthetic oligonucleotide
gauuuugacagaguuggag

SEQ ID NO: 57466 - RNA, 19 nt, Artificial Sequence
  Description of Artificial Sequence: Synthetic oligonucleotide
gcacagugggauuggaaga

SEQ ID NO: 57467 - RNA, 19 nt, Artificial Sequence
  Description of Artificial Sequence: Synthetic oligonucleotide
aaucaaagagcagagugcc

SEQ ID NO: 57468 - RNA, 19 nt, Artificial Sequence
  Description of Artificial Sequence: Synthetic oligonucleotide
ccgcaugcuggggcaccug

SEQ ID NO: 57469 - RNA, 19 nt, Artificial Sequence
  Description of Artificial Sequence: Synthetic oligonucleotide
ggucuccaaugccccccga

SEQ ID NO: 57470 - RNA, 19 nt, Artificial Sequence
  Description of Artificial Sequence: Synthetic oligonucleotide
acucauccgccccuacaug

SEQ ID NO: 57471 - RNA, 19 nt, Artificial Sequence
  Description of Artificial Sequence: Synthetic oligonucleotide
ggagccuauucugaaggca

SEQ ID NO: 57472 - RNA, 19 nt, Artificial Sequence
  Description of Artificial Sequence: Synthetic oligonucleotide
auuaauuuugaaacugaaa

SEQ ID NO: 57473 - RNA, 19 nt, Artificial Sequence
  Description of Artificial Sequence: Synthetic oligonucleotide
agauccagacccugaucca

SEQ ID NO: 57474 - RNA, 19 nt, Artificial Sequence
  Description of Artificial Sequence: Synthetic oligonucleotide
aaacccaggugugaucaau

SEQ ID NO: 57475 - RNA, 19 nt, Artificial Sequence
  Description of Artificial Sequence: Synthetic oligonucleotide
uaauguccuggcaacaaua

SEQ ID NO: 57476 - RNA, 19 nt, Artificial Sequence
  Description of Artificial Sequence: Synthetic oligonucleotide
aggagaauuggcacagguu

SEQ ID NO: 57477 - RNA, 19 nt, Artificial Sequence
  Description of Artificial Sequence: Synthetic oligonucleotide
uaguggccuggaaaugagg

SEQ ID NO: 57478 - RNA, 19 nt, Artificial Sequence
  Description of Artificial Sequence: Synthetic oligonucleotide
gaaauggguugaugaacuu

SEQ ID NO: 57479 - RNA, 19 nt, Artificial Sequence
  Description of Artificial Sequence: Synthetic oligonucleotide
uuuuauuaucaucauggac

SEQ ID NO: 57480 - RNA, 19 nt, Artificial Sequence
  Description of Artificial Sequence: Synthetic oligonucleotide
caugcuccaggauuccucu

SEQ ID NO: 57481 - RNA, 19 nt, Artificial Sequence
  Description of Artificial Sequence: Synthetic oligonucleotide
uuuguuggccaaaaggcag

SEQ ID NO: 57482 - RNA, 19 nt, Artificial Sequence
  Description of Artificial Sequence: Synthetic oligonucleotide
gguggcucuguggacccug

SEQ ID NO: 57483 - RNA, 19 nt, Artificial Sequence
  Description of Artificial Sequence: Synthetic oligonucleotide
gggacaguugguggccagc

SEQ ID NO: 57484 - RNA, 19 nt, Artificial Sequence
  Description of Artificial Sequence: Synthetic oligonucleotide
cacuggcuauguaguagag

SEQ ID NO: 57485 - RNA, 19 nt, Artificial Sequence
  Description of Artificial Sequence: Synthetic oligonucleotide
gcccuacaggaaguacccu

SEQ ID NO: 57486 - RNA, 19 nt, Artificial Sequence
  Description of Artificial Sequence: Synthetic oligonucleotide
uacuuugcuugaggugcua

SEQ ID NO: 57487 - RNA, 19 nt, Artificial Sequence
  Description of Artificial Sequence: Synthetic oligonucleotide
acugaauuuucugaagacu

SEQ ID NO: 57488 - RNA, 19 nt, Artificial Sequence
  Description of Artificial Sequence: Synthetic oligonucleotide
ugagcagaaccaggguaca

SEQ ID NO: 57489 - RNA, 19 nt, Artificial Sequence
  Description of Artificial Sequence: Synthetic oligonucleotide
acgcagagaggccauccgu

SEQ ID NO: 57490 - RNA, 19 nt, Artificial Sequence
  Description of Artificial Sequence: Synthetic oligonucleotide
uguguuagggcuuuuaggg

SEQ ID NO: 57491 - RNA, 19 nt, Artificial Sequence
  Description of Artificial Sequence: Synthetic oligonucleotide
ggcuuuggauccuuacaag

SEQ ID NO: 57492 - RNA, 19 nt, Artificial Sequence
  Description of Artificial Sequence: Synthetic oligonucleotide
gcacaaagugaacauuggc

SEQ ID NO: 57493 - RNA, 19 nt, Artificial Sequence
  Description of Artificial Sequence: Synthetic oligonucleotide
caugauagaccagucccgg

SEQ ID NO: 57494 - RNA, 19 nt, Artificial Sequence
  Description of Artificial Sequence: Synthetic oligonucleotide
ggaugccucugcugucagc

SEQ ID NO: 57495 - RNA, 19 nt, Artificial Sequence
  Description of Artificial Sequence: Synthetic oligonucleotide
ccugucagaauccaaguca

SEQ ID NO: 57496 - RNA, 19 nt, Artificial Sequence
  Description of Artificial Sequence: Synthetic oligonucleotide
aagucaggauuccucugac

SEQ ID NO: 57497 - RNA, 19 nt, Artificial Sequence
  Description of Artificial Sequence: Synthetic oligonucleotide
cuauagcacuagugaaaug

SEQ ID NO: 57498 - RNA, 19 nt, Artificial Sequence
  Description of Artificial Sequence: Synthetic oligonucleotide
gcuggucaacaugggaaac

SEQ ID NO: 57499 - RNA, 19 nt, Artificial Sequence
  Description of Artificial Sequence: Synthetic oligonucleotide
cuugccucuggaugaguuc

SEQ ID NO: 57500 - RNA, 19 nt, Artificial Sequence
  Description of Artificial Sequence: Synthetic oligonucleotide
cuacccagcuguguccaug

SEQ ID NO: 57501 - RNA, 19 nt, Artificial Sequence
  Description of Artificial Sequence: Synthetic oligonucleotide
gguggcccugaugcggauc

SEQ ID NO: 57502 - RNA, 19 nt, Artificial Sequence
  Description of Artificial Sequence: Synthetic oligonucleotide
cuuccgagaccagucacuc

SEQ ID NO: 57503 - RNA, 19 nt, Artificial Sequence
  Description of Artificial Sequence: Synthetic oligonucleotide
cucucaucaucacaccaug

SEQ ID NO: 57504 - RNA, 19 nt, Artificial Sequence
  Description of Artificial Sequence: Synthetic oligonucleotide
gguuguccaggccaucacc

SEQ ID NO: 57505 - RNA, 19 nt, Artificial Sequence
  Description of Artificial Sequence: Synthetic oligonucleotide
cuucaucuucaagucccug

SEQ ID NO: 57506 - RNA, 19 nt, Artificial Sequence
  Description of Artificial Sequence: Synthetic oligonucleotide
gggacucaaaugugugcag

SEQ ID NO: 57507 - RNA, 19 nt, Artificial Sequence
  Description of Artificial Sequence: Synthetic oligonucleotide
guuccugccccaggucaug

SEQ ID NO: 57508 - RNA, 19 nt, Artificial Sequence
  Description of Artificial Sequence: Synthetic oligonucleotide
gcccacguuccuuaacguc

SEQ ID NO: 57509 - RNA, 19 nt, Artificial Sequence
  Description of Artificial Sequence: Synthetic oligonucleotide
cauucgagucugugauggg

SEQ ID NO: 57510 - RNA, 19 nt, Artificial Sequence
  Description of Artificial Sequence: Synthetic oligonucleotide
ggccauccgggaauuuuug

SEQ ID NO: 57511 - RNA, 19 nt, Artificial Sequence
  Description of Artificial Sequence: Synthetic oligonucleotide
guuccagcagcugggaaug

SEQ ID NO: 57512 - RNA, 19 nt, Artificial Sequence
  Description of Artificial Sequence: Synthetic oligonucleotide
guugguguccuuugugaag

SEQ ID NO: 57513 - RNA, 19 nt, Artificial Sequence
  Description of Artificial Sequence: Synthetic oligonucleotide
gagccacaucagaccuuau

SEQ ID NO: 57514 - RNA, 19 nt, Artificial Sequence
  Description of Artificial Sequence: Synthetic oligonucleotide
uauggaugaaauagucacc

SEQ ID NO: 57515 - RNA, 19 nt, Artificial Sequence
  Description of Artificial Sequence: Synthetic oligonucleotide
ccucaugagagaauucugg

SEQ ID NO: 57516 - RNA, 19 nt, Artificial Sequence
  Description of Artificial Sequence: Synthetic oligonucleotide
ggucaugaacaccucaauu

SEQ ID NO: 57517 - RNA, 19 nt, Artificial Sequence
  Description of Artificial Sequence: Synthetic oligonucleotide
ucagagcacgaucauucuu

SEQ ID NO: 57518 - RNA, 19 nt, Artificial Sequence
  Description of Artificial Sequence: Synthetic oligonucleotide
ucucauugagcaaauugug

SEQ ID NO: 57519 - RNA, 19 nt, Artificial Sequence
  Description of Artificial Sequence: Synthetic oligonucleotide
gguagcucuugggggugaa

SEQ ID NO: 57520 - RNA, 19 nt, Artificial Sequence
  Description of Artificial Sequence: Synthetic oligonucleotide
auuuaagcucuaccugccc

SEQ ID NO: 57521 - RNA, 19 nt, Artificial Sequence
  Description of Artificial Sequence: Synthetic oligonucleotide
ccagcugaucccacacaug

SEQ ID NO: 57522 - RNA, 19 nt, Artificial Sequence
  Description of Artificial Sequence: Synthetic oligonucleotide
gcugcgugucuucaugcau

SEQ ID NO: 57523 - RNA, 19 nt, Artificial Sequence
  Description of Artificial Sequence: Synthetic oligonucleotide
ugacaacagcccaggccgc

SEQ ID NO: 57524 - RNA, 19 nt, Artificial Sequence
  Description of Artificial Sequence: Synthetic oligonucleotide
cauugucucuaucaaguua

SEQ ID NO: 57525 - RNA, 19 nt, Artificial Sequence
  Description of Artificial Sequence: Synthetic oligonucleotide
acuggcugcaauccagcug

SEQ ID NO: 57526 - RNA, 19 nt, Artificial Sequence
  Description of Artificial Sequence: Synthetic oligonucleotide
guuuggcgccaaccuggau

SEQ ID NO: 57527 - RNA, 19 nt, Artificial Sequence
  Description of Artificial Sequence: Synthetic oligonucleotide
ugacuaccugcauuuacug

SEQ ID NO: 57528 - RNA, 19 nt, Artificial Sequence
  Description of Artificial Sequence: Synthetic oligonucleotide
gcugccuccuauuguuaag

SEQ ID NO: 57529 - RNA, 19 nt, Artificial Sequence
  Description of Artificial Sequence: Synthetic oligonucleotide
guuguuugaugccccugaa

SEQ ID NO: 57530 - RNA, 19 nt, Artificial Sequence
  Description of Artificial Sequence: Synthetic oligonucleotide
agcuccacugccaucucga

SEQ ID NO: 57531 - RNA, 19 nt, Artificial Sequence
  Description of Artificial Sequence: Synthetic oligonucleotide
aaaggcagcgcuagagacu

SEQ ID NO: 57532 - RNA, 19 nt, Artificial Sequence
  Description of Artificial Sequence: Synthetic oligonucleotide
uguggaccgccugacggag

SEQ ID NO: 57533 - RNA, 19 nt, Artificial Sequence
  Description of Artificial Sequence: Synthetic oligonucleotide
gucccuggauuucacugac

SEQ ID NO: 57534 - RNA, 19 nt, Artificial Sequence
  Description of Artificial Sequence: Synthetic oligonucleotide
cuaugccucccggaucauu

SEQ ID NO: 57535 - RNA, 19 nt, Artificial Sequence
  Description of Artificial Sequence: Synthetic oligonucleotide
ucacccuauuguucgaaca

SEQ ID NO: 57536 - RNA, 19 nt, Artificial Sequence
  Description of Artificial Sequence: Synthetic oligonucleotide
acuggaccagagcccagaa

SEQ ID NO: 57537 - RNA, 19 nt, Artificial Sequence
  Description of Artificial Sequence: Synthetic oligonucleotide
acugcgcuccacagccaug

SEQ ID NO: 57538 - RNA, 19 nt, Artificial Sequence
  Description of Artificial Sequence: Synthetic oligonucleotide
ggacacgcugucuucacuu

SEQ ID NO: 57539 - RNA, 19 nt, Artificial Sequence
  Description of Artificial Sequence: Synthetic oligonucleotide
uguuuuucagcuggggaag

SEQ ID NO: 57540 - RNA, 19 nt, Artificial Sequence
  Description of Artificial Sequence: Synthetic oligonucleotide
gaaguaccaaauuuucauu

SEQ ID NO: 57541 - RNA, 19 nt, Artificial Sequence
  Description of Artificial Sequence: Synthetic oligonucleotide
uccaauggugaauaaaguu

SEQ ID NO: 57542 - RNA, 19 nt, Artificial Sequence
  Description of Artificial Sequence: Synthetic oligonucleotide
ucuggugcgacaccgaauc

SEQ ID NO: 57543 - RNA, 19 nt, Artificial Sequence
  Description of Artificial Sequence: Synthetic oligonucleotide
caaucaucagcgcuaugau

SEQ ID NO: 57544 - RNA, 19 nt, Artificial Sequence
  Description of Artificial Sequence: Synthetic oligonucleotide
ugugcucaucugcagaauu

SEQ ID NO: 57545 - RNA, 19 nt, Artificial Sequence
  Description of Artificial Sequence: Synthetic oligonucleotide
ugucaagggauacacacuu

SEQ ID NO: 57546 - RNA, 19 nt, Artificial Sequence
  Description of Artificial Sequence: Synthetic oligonucleotide
ugcugaugaagaggaggau

SEQ ID NO: 57547 - RNA, 19 nt, Artificial Sequence
  Description of Artificial Sequence: Synthetic oligonucleotide
uccuuugauuuaccagcau

SEQ ID NO: 57548 - RNA, 19 nt, Artificial Sequence
  Description of Artificial Sequence: Synthetic oligonucleotide
ucggaugcuuaggaguggc

SEQ ID NO: 57549 - RNA, 19 nt, Artificial Sequence
  Description of Artificial Sequence: Synthetic oligonucleotide
ccaaggggaugcauuggcu

SEQ ID NO: 57550 - RNA, 19 nt, Artificial Sequence
  Description of Artificial Sequence: Synthetic oligonucleotide
uaguggaccaguggaaaca

SEQ ID NO: 57551 - RNA, 19 nt, Artificial Sequence
  Description of Artificial Sequence: Synthetic oligonucleotide
aggacccaugaagaaacug

SEQ ID NO: 57552 - RNA, 19 nt, Artificial Sequence
  Description of Artificial Sequence: Synthetic oligonucleotide
gcacgucagcaccaucaac

SEQ ID NO: 57553 - RNA, 19 nt, Artificial Sequence
  Description of Artificial Sequence: Synthetic oligonucleotide
ccuccaaaaggccuggggc

SEQ ID NO: 57554 - RNA, 19 nt, Artificial Sequence
  Description of Artificial Sequence: Synthetic oligonucleotide
cgcugccaggagggucucc

SEQ ID NO: 57555 - RNA, 19 nt, Artificial Sequence
  Description of Artificial Sequence: Synthetic oligonucleotide
caaagaugacuggcuggaa

SEQ ID NO: 57556 - RNA, 19 nt, Artificial Sequence
  Description of Artificial Sequence: Synthetic oligonucleotide
auggcugagacggcugagc

SEQ ID NO: 57557 - RNA, 19 nt, Artificial Sequence
  Description of Artificial Sequence: Synthetic oligonucleotide
ccuggagcugcugaaggac

SEQ ID NO: 57558 - RNA, 19 nt, Artificial Sequence
  Description of Artificial Sequence: Synthetic oligonucleotide
cucaucaucgcccucccug

SEQ ID NO: 57559 - RNA, 19 nt, Artificial Sequence
  Description of Artificial Sequence: Synthetic oligonucleotide
gcgcuccugcugggcccug

SEQ ID NO: 57560 - RNA, 19 nt, Artificial Sequence
  Description of Artificial Sequence: Synthetic oligonucleotide
ggcacaggccuacaacccg

SEQ ID NO: 57561 - RNA, 19 nt, Artificial Sequence
  Description of Artificial Sequence: Synthetic oligonucleotide
gauggccagggaucucuuc

SEQ ID NO: 57562 - RNA, 19 nt, Artificial Sequence
  Description of Artificial Sequence: Synthetic oligonucleotide
caaugcugcauuugugucc

SEQ ID NO: 57563 - RNA, 19 nt, Artificial Sequence
  Description of Artificial Sequence: Synthetic oligonucleotide
cugcuggucugaacugaau

SEQ ID NO: 57564 - RNA, 19 nt, Artificial Sequence
  Description of Artificial Sequence: Synthetic oligonucleotide
ugaagaucaacaggaugag

SEQ ID NO: 57565 - RNA, 19 nt, Artificial Sequence
  Description of Artificial Sequence: Synthetic oligonucleotide
gcucaucagaagcaucgag

SEQ ID NO: 57566 - RNA, 19 nt, Artificial Sequence
  Description of Artificial Sequence: Synthetic oligonucleotide
guuggcccucaccucacaa

SEQ ID NO: 57567 - RNA, 19 nt, Artificial Sequence
  Description of Artificial Sequence: Synthetic oligonucleotide
agacaucgcugaagucaca

SEQ ID NO: 57568 - RNA, 19 nt, Artificial Sequence
  Description of Artificial Sequence: Synthetic oligonucleotide
acagacccucuuaaacuug

SEQ ID NO: 57569 - RNA, 19 nt, Artificial Sequence
  Description of Artificial Sequence: Synthetic oligonucleotide
ggcugaauucauggaacac

SEQ ID NO: 57570 - RNA, 19 nt, Artificial Sequence
  Description of Artificial Sequence: Synthetic oligonucleotide
cagugacaagggcccccug

SEQ ID NO: 57571 - RNA, 19 nt, Artificial Sequence
  Description of Artificial Sequence: Synthetic oligonucleotide
gccacugagagaugacaau

SEQ ID NO: 57572 - RNA, 19 nt, Artificial Sequence
  Description of Artificial Sequence: Synthetic oligonucleotide
uggcauuguucugcugggu

SEQ ID NO: 57573 - RNA, 19 nt, Artificial Sequence
  Description of Artificial Sequence: Synthetic oligonucleotide
ugagagagcugccaagugc

SEQ ID NO: 57574 - RNA, 19 nt, Artificial Sequence
  Description of Artificial Sequence: Synthetic oligonucleotide
ccgagcauaugccaaagca

SEQ ID NO: 57575 - RNA, 19 nt, Artificial Sequence
  Description of Artificial Sequence: Synthetic oligonucleotide
acuacacuacaaagaacug

SEQ ID NO: 57576 - RNA, 19 nt, Artificial Sequence
  Description of Artificial Sequence: Synthetic oligonucleotide
ggaguuccagaaaggcccc

SEQ ID NO: 57577 - RNA, 19 nt, Artificial Sequence
  Description of Artificial Sequence: Synthetic oligonucleotide
caccccugccauucuagaa

SEQ ID NO: 57578 - RNA, 19 nt, Artificial Sequence
  Description of Artificial Sequence: Synthetic oligonucleotide
aucucucaucagcauuaau

SEQ ID NO: 57579 - RNA, 19 nt, Artificial Sequence
  Description of Artificial Sequence: Synthetic oligonucleotide
uaauaagcuacagcagccg

SEQ ID NO: 57580 - RNA, 19 nt, Artificial Sequence
  Description of Artificial Sequence: Synthetic oligonucleotide
ggaggcagcggccggagug

SEQ ID NO: 57581 - RNA, 19 nt, Artificial Sequence
  Description of Artificial Sequence: Synthetic oligonucleotide
guuagaauaugccaugaaa

SEQ ID NO: 57582 - RNA, 19 nt, Artificial Sequence
  Description of Artificial Sequence: Synthetic oligonucleotide
acacuuuggagagcuggag

SEQ ID NO: 57583 - RNA, 19 nt, Artificial Sequence
  Description of Artificial Sequence: Synthetic oligonucleotide
gauccaggcuaccugguau

SEQ ID NO: 57584 - RNA, 19 nt, Artificial Sequence
  Description of Artificial Sequence: Synthetic oligonucleotide
ugagaaacugcacgagugg

SEQ ID NO: 57585 - RNA, 19 nt, Artificial Sequence
  Description of Artificial Sequence: Synthetic oligonucleotide
ggaggaugcccuuguggcc

SEQ ID NO: 57586 - RNA, 19 nt, Artificial Sequence
  Description of Artificial Sequence: Synthetic oligonucleotide
cuaugacaagaaaauggac

SEQ ID NO: 57587 - RNA, 19 nt, Artificial Sequence
  Description of Artificial Sequence: Synthetic oligonucleotide
caccaacaaggacgaccca

SEQ ID NO: 57588 - RNA, 19 nt, Artificial Sequence
  Description of Artificial Sequence: Synthetic oligonucleotide
agagcugaugcugggccgc

SEQ ID NO: 57589 - RNA, 19 nt, Artificial Sequence
  Description of Artificial Sequence: Synthetic oligonucleotide
caugcgcugccucgaggcc

SEQ ID NO: 57590 - RNA, 19 nt, Artificial Sequence
  Description of Artificial Sequence: Synthetic oligonucleotide
cuugggggaauggggucaa

SEQ ID NO: 57591 - RNA, 19 nt, Artificial Sequence
  Description of Artificial Sequence: Synthetic oligonucleotide
acuccaccagcagugcugu

SEQ ID NO: 57592 - RNA, 19 nt, Artificial Sequence
  Description of Artificial Sequence: Synthetic oligonucleotide
ugaaaaguggacccugguu

SEQ ID NO: 57593 - RNA, 19 nt, Artificial Sequence
  Description of Artificial Sequence: Synthetic oligonucleotide
uaaugaugagacccaagcc

SEQ ID NO: 57594 - RNA, 19 nt, Artificial Sequence
  Description of Artificial Sequence: Synthetic oligonucleotide
caagauggcccggauggcu

SEQ ID NO: 57595 - RNA, 19 nt, Artificial Sequence
  Description of Artificial Sequence: Synthetic oligonucleotide
ugcugcagcugcauggggu

SEQ ID NO: 57596 - RNA, 19 nt, Artificial Sequence
  Description of Artificial Sequence: Synthetic oligonucleotide
uuuaggucagugggacagc

SEQ ID NO: 57597 - RNA, 19 nt, Artificial Sequence
  Description of Artificial Sequence: Synthetic oligonucleotide
cauggaagaauacaccugu

SEQ ID NO: 57598 - RNA, 19 nt, Artificial Sequence
  Description of Artificial Sequence: Synthetic oligonucleotide
uaugaucccucgggacacc

SEQ ID NO: 57599 - RNA, 19 nt, Artificial Sequence
  Description of Artificial Sequence: Synthetic oligonucleotide
ccaugauggggcauuuuau

SEQ ID NO: 57600 - RNA, 19 nt, Artificial Sequence
  Description of Artificial Sequence: Synthetic oligonucleotide
uagagcugugcuggcacug

SEQ ID NO: 57601 - RNA, 19 nt, Artificial Sequence
  Description of Artificial Sequence: Synthetic oligonucleotide
gcaucaggaccucuucucc

SEQ ID NO: 57602 - RNA, 19 nt, Artificial Sequence
  Description of Artificial Sequence: Synthetic oligonucleotide
cuuggcacaacagugcauu

SEQ ID NO: 57603 - RNA, 19 nt, Artificial Sequence
  Description of Artificial Sequence: Synthetic oligonucleotide
ugacaaggccagggaccug

SEQ ID NO: 57604 - RNA, 19 nt, Artificial Sequence
  Description of Artificial Sequence: Synthetic oligonucleotide
gcuggaugcugaauuaacu

SEQ ID NO: 57605 - RNA, 19 nt, Artificial Sequence
  Description of Artificial Sequence: Synthetic oligonucleotide
ugcgauggcaggagagagu

SEQ ID NO: 57606 - RNA, 19 nt, Artificial Sequence
  Description of Artificial Sequence: Synthetic oligonucleotide
uuacagucgggcauauggg

SEQ ID NO: 57607 - RNA, 19 nt, Artificial Sequence
  Description of Artificial Sequence: Synthetic oligonucleotide
ggccaugguuucuugccac

SEQ ID NO: 57608 - RNA, 19 nt, Artificial Sequence
  Description of Artificial Sequence: Synthetic oligonucleotide
caugcuguccgagcuggag

SEQ ID NO: 57609 - RNA, 19 nt, Artificial Sequence
  Description of Artificial Sequence: Synthetic oligonucleotide
ggagguuauccaguacaaa

SEQ ID NO: 57610 - RNA, 19 nt, Artificial Sequence
  Description of Artificial Sequence: Synthetic oligonucleotide
acuuguccccgagcgacga

SEQ ID NO: 57611 - RNA, 19 nt, Artificial Sequence
  Description of Artificial Sequence: Synthetic oligonucleotide
agagaucauccgccagauc

SEQ ID NO: 57612 - RNA, 19 nt, Artificial Sequence
  Description of Artificial Sequence: Synthetic oligonucleotide
cuggugggagagacugcag

SEQ ID NO: 57613 - RNA, 19 nt, Artificial Sequence
  Description of Artificial Sequence: Synthetic oligonucleotide
gggcugccagcguaucgua

SEQ ID NO: 57614 - RNA, 19 nt, Artificial Sequence
  Description of Artificial Sequence: Synthetic oligonucleotide
agaggacuggcagaaaauc

SEQ ID NO: 57615 - RNA, 19 nt, Artificial Sequence
  Description of Artificial Sequence: Synthetic oligonucleotide
ccuuauggugcggucccuu

SEQ ID NO: 57616 - RNA, 19 nt, Artificial Sequence
  Description of Artificial Sequence: Synthetic oligonucleotide
uguggucagcccucaugaa

SEQ ID NO: 57617 - RNA, 19 nt, Artificial Sequence
  Description of Artificial Sequence: Synthetic oligonucleotide
agacaugagaaccuggcuc

SEQ ID NO: 57618 - RNA, 19 nt, Artificial Sequence
  Description of Artificial Sequence: Synthetic oligonucleotide
caaguaugcaagccugugc

SEQ ID NO: 57619 - RNA, 19 nt, Artificial Sequence
  Description of Artificial Sequence: Synthetic oligonucleotide
cggcaagaguggcaggcug

SEQ ID NO: 57620 - RNA, 19 nt, Artificial Sequence
  Description of Artificial Sequence: Synthetic oligonucleotide
ggcucuugcucauaaaacu

SEQ ID NO: 57621 - RNA, 19 nt, Artificial Sequence
  Description of Artificial Sequence: Synthetic oligonucleotide
uuuaguguugcuccuggga

SEQ ID NO: 57622 - RNA, 19 nt, Artificial Sequence
  Description of Artificial Sequence: Synthetic oligonucleotide
aguugauccgucucggcaa

SEQ ID NO: 57623 - RNA, 19 nt, Artificial Sequence
  Description of Artificial Sequence: Synthetic oligonucleotide
acuugaccauccucugcca

SEQ ID NO: 57624 - RNA, 19 nt, Artificial Sequence
  Description of Artificial Sequence: Synthetic oligonucleotide
aacaguucacccucaggug

SEQ ID NO: 57625 - RNA, 19 nt, Artificial Sequence
  Description of Artificial Sequence: Synthetic oligonucleotide
gaccuaugccuacaugaaa

SEQ ID NO: 57626 - RNA, 19 nt, Artificial Sequence
  Description of Artificial Sequence: Synthetic oligonucleotide
aaacauguggaagagugcc

SEQ ID NO: 57627 - RNA, 19 nt, Artificial Sequence
  Description of Artificial Sequence: Synthetic oligonucleotide
ccgcaagaucgaugccuuc

SEQ ID NO: 57628 - RNA, 19 nt, Artificial Sequence
  Description of Artificial Sequence: Synthetic oligonucleotide
ccagcacaugcagcauuuu

SEQ ID NO: 57629 - RNA, 19 nt, Artificial Sequence
  Description of Artificial Sequence: Synthetic oligonucleotide
uguccagaccaugcagcaa

SEQ ID NO: 57630 - RNA, 19 nt, Artificial Sequence
  Description of Artificial Sequence: Synthetic oligonucleotide
acaggcccagcaugccauc

SEQ ID NO: 57631 - RNA, 19 nt, Artificial Sequence
  Description of Artificial Sequence: Synthetic oligonucleotide
cgcuacugaggaccagcag

SEQ ID NO: 57632 - RNA, 19 nt, Artificial Sequence
  Description of Artificial Sequence: Synthetic oligonucleotide
gcauaagcaggaacugcac

SEQ ID NO: 57633 - RNA, 19 nt, Artificial Sequence
  Description of Artificial Sequence: Synthetic oligonucleotide
caagcucauggcccgaugc

SEQ ID NO: 57634 - RNA, 19 nt, Artificial Sequence
  Description of Artificial Sequence: Synthetic oligonucleotide
cuuccugaaacuuggagag

SEQ ID NO: 57635 - RNA, 19 nt, Artificial Sequence
  Description of Artificial Sequence: Synthetic oligonucleotide
guggcagcugaaucuacag

SEQ ID NO: 57636 - RNA, 19 nt, Artificial Sequence
  Description of Artificial Sequence: Synthetic oligonucleotide
gggcaucaaugagagcaca

SEQ ID NO: 57637 - RNA, 19 nt, Artificial Sequence
  Description of Artificial Sequence: Synthetic oligonucleotide
aauccccaaagugcugcag

SEQ ID NO: 57638 - RNA, 19 nt, Artificial Sequence
  Description of Artificial Sequence: Synthetic oligonucleotide
guacuacagcgccgccaca

SEQ ID NO: 57639 - RNA, 19 nt, Artificial Sequence
  Description of Artificial Sequence: Synthetic oligonucleotide
agagcacgaccgcagcugg

SEQ ID NO: 57640 - RNA, 19 nt, Artificial Sequence
  Description of Artificial Sequence: Synthetic oligonucleotide
guacaaggccuggcaugcg

SEQ ID NO: 57641 - RNA, 19 nt, Artificial Sequence
  Description of Artificial Sequence: Synthetic oligonucleotide
gugggcagugaugaacuuc

SEQ ID NO: 57642 - RNA, 19 nt, Artificial Sequence
  Description of Artificial Sequence: Synthetic oligonucleotide
cgaagcugugcuacacuac

SEQ ID NO: 57643 - RNA, 19 nt, Artificial Sequence
  Description of Artificial Sequence: Synthetic oligonucleotide
caaacaucagaaccaagcc

SEQ ID NO: 57644 - RNA, 19 nt, Artificial Sequence
  Description of Artificial Sequence: Synthetic oligonucleotide
ccgcgaugagaagaagaaa

SEQ ID NO: 57645 - RNA, 19 nt, Artificial Sequence
  Description of Artificial Sequence: Synthetic oligonucleotide
acugcgucaugccagcggg

SEQ ID NO: 57646 - RNA, 19 nt, Artificial Sequence
  Description of Artificial Sequence: Synthetic oligonucleotide
ggccaacaucaccaacgcc

SEQ ID NO: 57647 - RNA, 19 nt, Artificial Sequence
  Description of Artificial Sequence: Synthetic oligonucleotide
caccacugccgccaccacg

SEQ ID NO: 57648 - RNA, 19 nt, Artificial Sequence
  Description of Artificial Sequence: Synthetic oligonucleotide
ggccgccacugccaccacc

SEQ ID NO: 57649 - RNA, 19 nt, Artificial Sequence
  Description of Artificial Sequence: Synthetic oligonucleotide
cacugccagcaccgagggc

SEQ ID NO: 57650 - RNA, 19 nt, Artificial Sequence
  Description of Artificial Sequence: Synthetic oligonucleotide
cagcaacagugagagcgag

SEQ ID NO: 57651 - RNA, 19 nt, Artificial Sequence
  Description of Artificial Sequence: Synthetic oligonucleotide
ggccgagagcaccgagaac

SEQ ID NO: 57652 - RNA, 19 nt, Artificial Sequence
  Description of Artificial Sequence: Synthetic oligonucleotide
cagccccaccccaucgccg

SEQ ID NO: 57653 - RNA, 19 nt, Artificial Sequence
  Description of Artificial Sequence: Synthetic oligonucleotide
gcugcagaagaaggucacu

SEQ ID NO: 57654 - RNA, 19 nt, Artificial Sequence
  Description of Artificial Sequence: Synthetic oligonucleotide
ugaggaucuguccaaaacc

SEQ ID NO: 57655 - RNA, 19 nt, Artificial Sequence
  Description of Artificial Sequence: Synthetic oligonucleotide
ccuccugauguacacggug

SEQ ID NO: 57656 - RNA, 19 nt, Artificial Sequence
  Description of Artificial Sequence: Synthetic oligonucleotide
gccugccguccagggcuuc

SEQ ID NO: 57657 - RNA, 19 nt, Artificial Sequence
  Description of Artificial Sequence: Synthetic oligonucleotide
cuuccguuccaucuccuug

SEQ ID NO: 57658 - RNA, 19 nt, Artificial Sequence
  Description of Artificial Sequence: Synthetic oligonucleotide
gucacgaggcaacaaccuc

SEQ ID NO: 57659 - RNA, 19 nt, Artificial Sequence
  Description of Artificial Sequence: Synthetic oligonucleotide
ccaggauacacucagaguu

SEQ ID NO: 57660 - RNA, 19 nt, Artificial Sequence
  Description of Artificial Sequence: Synthetic oligonucleotide
ucucaccuuaugguuugau

SEQ ID NO: 57661 - RNA, 19 nt, Artificial Sequence
  Description of Artificial Sequence: Synthetic oligonucleotide
uuauggucacuggccagau

SEQ ID NO: 57662 - RNA, 19 nt, Artificial Sequence
  Description of Artificial Sequence: Synthetic oligonucleotide
ugucaaugaggccuuagug

SEQ ID NO: 57663 - RNA, 19 nt, Artificial Sequence
  Description of Artificial Sequence: Synthetic oligonucleotide
ggagggggugaaagccauc

SEQ ID NO: 57664 - RNA, 19 nt, Artificial Sequence
  Description of Artificial Sequence: Synthetic oligonucleotide
ccagauugauaccuggcua

SEQ ID NO: 57665 - RNA, 19 nt, Artificial Sequence
  Description of Artificial Sequence: Synthetic oligonucleotide
acagguuauaccucagcuc

SEQ ID NO: 57666 - RNA, 19 nt, Artificial Sequence
  Description of Artificial Sequence: Synthetic oligonucleotide
cauugcaagaauugauacg

SEQ ID NO: 57667 - RNA, 19 nt, Artificial Sequence
  Description of Artificial Sequence: Synthetic oligonucleotide
gcccagacccuugguggga

SEQ ID NO: 57668 - RNA, 19 nt, Artificial Sequence
  Description of Artificial Sequence: Synthetic oligonucleotide
acgucucauucaccagcuu

SEQ ID NO: 57669 - RNA, 19 nt, Artificial Sequence
  Description of Artificial Sequence: Synthetic oligonucleotide
ucucacagacauuggucgg

SEQ ID NO: 57670 - RNA, 19 nt, Artificial Sequence
  Description of Artificial Sequence: Synthetic oligonucleotide
guaccacccccaggcccuc

SEQ ID NO: 57671 - RNA, 19 nt, Artificial Sequence
  Description of Artificial Sequence: Synthetic oligonucleotide
caucuacccacugacagug

SEQ ID NO: 57672 - RNA, 19 nt, Artificial Sequence
  Description of Artificial Sequence: Synthetic oligonucleotide
ggcuucuaagucuaccacg

SEQ ID NO: 57673 - RNA, 19 nt, Artificial Sequence
  Description of Artificial Sequence: Synthetic oligonucleotide
gacagcccggcacaaugca

SEQ ID NO: 57674 - RNA, 19 nt, Artificial Sequence
  Description of Artificial Sequence: Synthetic oligonucleotide
agccaacaagauucugaag

SEQ ID NO: 57675 - RNA, 19 nt, Artificial Sequence
  Description of Artificial Sequence: Synthetic oligonucleotide
gaacaugugugagcacagc

SEQ ID NO: 57676 - RNA, 19 nt, Artificial Sequence
  Description of Artificial Sequence: Synthetic oligonucleotide
caacacccugguccagcag

SEQ ID NO: 57677 - RNA, 19 nt, Artificial Sequence
  Description of Artificial Sequence: Synthetic oligonucleotide
ggccaugauggugagcgag

SEQ ID NO: 57678 - RNA, 19 nt, Artificial Sequence
  Description of Artificial Sequence: Synthetic oligonucleotide
ggagcugauccgaguggcc

SEQ ID NO: 57679 - RNA, 19 nt, Artificial Sequence
  Description of Artificial Sequence: Synthetic oligonucleotide
cauccucuggcaugagaug

SEQ ID NO: 57680 - RNA, 19 nt, Artificial Sequence
  Description of Artificial Sequence: Synthetic oligonucleotide
guggcaugaaggccuggaa

SEQ ID NO: 57681 - RNA, 19 nt, Artificial Sequence
  Description of Artificial Sequence: Synthetic oligonucleotide
agaggcaucucguuuguac

SEQ ID NO: 57682 - RNA, 19 nt, Artificial Sequence
  Description of Artificial Sequence: Synthetic oligonucleotide
cuuuggggaaaggaacgug

SEQ ID NO: 57683 - RNA, 19 nt, Artificial Sequence
  Description of Artificial Sequence: Synthetic oligonucleotide
gaaaggcauguuugaggug

SEQ ID NO: 57684 - RNA, 19 nt, Artificial Sequence
  Description of Artificial Sequence: Synthetic oligonucleotide
gcuggagcccuugcaugcu

SEQ ID NO: 57685 - RNA, 19 nt, Artificial Sequence
  Description of Artificial Sequence: Synthetic oligonucleotide
uaugauggaacggggcccc

SEQ ID NO: 57686 - RNA, 19 nt, Artificial Sequence
  Description of Artificial Sequence: Synthetic oligonucleotide
ccagacucugaaggaaaca

SEQ ID NO: 57687 - RNA, 19 nt, Artificial Sequence
  Description of Artificial Sequence: Synthetic oligonucleotide
auccuuuaaucaggccuau

SEQ ID NO: 57688 - RNA, 19 nt, Artificial Sequence
  Description of Artificial Sequence: Synthetic oligonucleotide
uggucgagauuuaauggag

SEQ ID NO: 57689 - RNA, 19 nt, Artificial Sequence
  Description of Artificial Sequence: Synthetic oligonucleotide
ggcccaagaguggugcagg

SEQ ID NO: 57690 - RNA, 19 nt, Artificial Sequence
  Description of Artificial Sequence: Synthetic oligonucleotide
gaaguacaugaaaucaggg

SEQ ID NO: 57691 - RNA, 19 nt, Artificial Sequence
  Description of Artificial Sequence: Synthetic oligonucleotide
gaaugucaaggaccucacc

SEQ ID NO: 57692 - RNA, 19 nt, Artificial Sequence
  Description of Artificial Sequence: Synthetic oligonucleotide
ccaagccugggaccucuau

SEQ ID NO: 57693 - RNA, 19 nt, Artificial Sequence
  Description of Artificial Sequence: Synthetic oligonucleotide
uuaucauguguuccgacga

SEQ ID NO: 57694 - RNA, 19 nt, Artificial Sequence
  Description of Artificial Sequence: Synthetic oligonucleotide
aaucucaaagcagcugccu

SEQ ID NO: 57695 - RNA, 19 nt, Artificial Sequence
  Description of Artificial Sequence: Synthetic oligonucleotide
ucagcucacauccuuagag

SEQ ID NO: 57696 - RNA, 19 nt, Artificial Sequence
  Description of Artificial Sequence: Synthetic oligonucleotide
gcugcaauauguuucccca

SEQ ID NO: 57697 - RNA, 19 nt, Artificial Sequence
  Description of Artificial Sequence: Synthetic oligonucleotide
aaaacuucugaugugccgg

SEQ ID NO: 57698 - RNA, 19 nt, Artificial Sequence
  Description of Artificial Sequence: Synthetic oligonucleotide
ggaccuugaauuggcugug

SEQ ID NO: 57699 - RNA, 19 nt, Artificial Sequence
  Description of Artificial Sequence: Synthetic oligonucleotide
gccaggaacauaugacccc

SEQ ID NO: 57700 - RNA, 19 nt, Artificial Sequence
  Description of Artificial Sequence: Synthetic oligonucleotide
caaccagccaaucauucgc

SEQ ID NO: 57701 - RNA, 19 nt, Artificial Sequence
  Description of Artificial Sequence: Synthetic oligonucleotide
cauucaguccauagcaccg

SEQ ID NO: 57702 - RNA, 19 nt, Artificial Sequence
  Description of Artificial Sequence: Synthetic oligonucleotide
gucuuugcaagucaucaca

SEQ ID NO: 57703 - RNA, 19 nt, Artificial Sequence
  Description of Artificial Sequence: Synthetic oligonucleotide
auccaagcagaggccccgg

SEQ ID NO: 57704 - RNA, 19 nt, Artificial Sequence
  Description of Artificial Sequence: Synthetic oligonucleotide
gaaauugacacuuaugggc

SEQ ID NO: 57705 - RNA, 19 nt, Artificial Sequence
  Description of Artificial Sequence: Synthetic oligonucleotide
cagcaacggacaugaguuu

SEQ ID NO: 57706 - RNA, 19 nt, Artificial Sequence
  Description of Artificial Sequence: Synthetic oligonucleotide
uguuuuccuucuaaaaggc

SEQ ID NO: 57707 - RNA, 19 nt, Artificial Sequence
  Description of Artificial Sequence: Synthetic oligonucleotide
ccaugaagaucugcgccag

SEQ ID NO: 57708 - RNA, 19 nt, Artificial Sequence
  Description of Artificial Sequence: Synthetic oligonucleotide
ggaugagcgugugaugcag

SEQ ID NO: 57709 - RNA, 19 nt, Artificial Sequence
  Description of Artificial Sequence: Synthetic oligonucleotide
gcucuucggccugguuaac

SEQ ID NO: 57710 - RNA, 19 nt, Artificial Sequence
  Description of Artificial Sequence: Synthetic oligonucleotide
cacccuucuggccaaugac

SEQ ID NO: 57711 - RNA, 19 nt, Artificial Sequence
  Description of Artificial Sequence: Synthetic oligonucleotide
cccaacaucucuucggaaa

SEQ ID NO: 57712 - RNA, 19 nt, Artificial Sequence
  Description of Artificial Sequence: Synthetic oligonucleotide
aaaccucagcauccagaga

SEQ ID NO: 57713 - RNA, 19 nt, Artificial Sequence
  Description of Artificial Sequence: Synthetic oligonucleotide
auacgcugucaucccuuua

SEQ ID NO: 57714 - RNA, 19 nt, Artificial Sequence
  Description of Artificial Sequence: Synthetic oligonucleotide
aucgaccaacucgggccuc

SEQ ID NO: 57715 - RNA, 19 nt, Artificial Sequence
  Description of Artificial Sequence: Synthetic oligonucleotide
cauuggcuggguuccccac

SEQ ID NO: 57716 - RNA, 19 nt, Artificial Sequence
  Description of Artificial Sequence: Synthetic oligonucleotide
cugugacacacugcacgcc

SEQ ID NO: 57717 - RNA, 19 nt, Artificial Sequence
  Description of Artificial Sequence: Synthetic oligonucleotide
ccucauccgggacuacagg

SEQ ID NO: 57718 - RNA, 19 nt, Artificial Sequence
  Description of Artificial Sequence: Synthetic oligonucleotide
ggagaagaagaagauccuu

SEQ ID NO: 57719 - RNA, 19 nt, Artificial Sequence
  Description of Artificial Sequence: Synthetic oligonucleotide
ucucaacaucgagcaucgc

SEQ ID NO: 57720 - RNA, 19 nt, Artificial Sequence
  Description of Artificial Sequence: Synthetic oligonucleotide
caucauguugcggauggcu

SEQ ID NO: 57721 - RNA, 19 nt, Artificial Sequence
  Description of Artificial Sequence: Synthetic oligonucleotide
uccggacuaugaccacuug

SEQ ID NO: 57722 - RNA, 19 nt, Artificial Sequence
  Description of Artificial Sequence: Synthetic oligonucleotide
gacucugaugcagaaggug

SEQ ID NO: 57723 - RNA, 19 nt, Artificial Sequence
  Description of Artificial Sequence: Synthetic oligonucleotide
ggagguguuugagcaugcc

SEQ ID NO: 57724 - RNA, 19 nt, Artificial Sequence
  Description of Artificial Sequence: Synthetic oligonucleotide
cgucaauaauacagcuggg

SEQ ID NO: 57725 - RNA, 19 nt, Artificial Sequence
  Description of Artificial Sequence: Synthetic oligonucleotide
ggacgaccuggccaagcug

SEQ ID NO: 57726 - RNA, 19 nt, Artificial Sequence
  Description of Artificial Sequence: Synthetic oligonucleotide
gcuguggcugaaaagcccc

SEQ ID NO: 57727 - RNA, 19 nt, Artificial Sequence
  Description of Artificial Sequence: Synthetic oligonucleotide
cagcuccgaggugugguuu

SEQ ID NO: 57728 - RNA, 19 nt, Artificial Sequence
  Description of Artificial Sequence: Synthetic oligonucleotide
ugaccgaagaaccaauuau

SEQ ID NO: 57729 - RNA, 19 nt, Artificial Sequence
  Description of Artificial Sequence: Synthetic oligonucleotide
uacccguucuuuagcgguc

SEQ ID NO: 57730 - RNA, 19 nt, Artificial Sequence
  Description of Artificial Sequence: Synthetic oligonucleotide
caugucaaugguuggguau

SEQ ID NO: 57731 - RNA, 19 nt, Artificial Sequence
  Description of Artificial Sequence: Synthetic oligonucleotide
uauuuuaggccugggagau

SEQ ID NO: 57732 - RNA, 19 nt, Artificial Sequence
  Description of Artificial Sequence: Synthetic oligonucleotide
uagacacccauccaaccug

SEQ ID NO: 57733 - RNA, 19 nt, Artificial Sequence
  Description of Artificial Sequence: Synthetic oligonucleotide
gaugcuggaccgucugagu

SEQ ID NO: 57734 - RNA, 19 nt, Artificial Sequence
  Description of Artificial Sequence: Synthetic oligonucleotide
ugggaagauccugcacauu

SEQ ID NO: 57735 - RNA, 19 nt, Artificial Sequence
  Description of Artificial Sequence: Synthetic oligonucleotide
ugacuuuggggacugcuuu

SEQ ID NO: 57736 - RNA, 19 nt, Artificial Sequence
  Description of Artificial Sequence: Synthetic oligonucleotide
ugagguugcuaugacccga

SEQ ID NO: 57737 - RNA, 19 nt, Artificial Sequence
  Description of Artificial Sequence: Synthetic oligonucleotide
agagaaguuuccagagaag

SEQ ID NO: 57738 - RNA, 19 nt, Artificial Sequence
  Description of Artificial Sequence: Synthetic oligonucleotide
gauuccauuuagacuaaca

SEQ ID NO: 57739 - RNA, 19 nt, Artificial Sequence
  Description of Artificial Sequence: Synthetic oligonucleotide
aagaauguugaccaaugcu

SEQ ID NO: 57740 - RNA, 19 nt, Artificial Sequence
  Description of Artificial Sequence: Synthetic oligonucleotide
uauggagguuacaggccug

SEQ ID NO: 57741 - RNA, 19 nt, Artificial Sequence
  Description of Artificial Sequence: Synthetic oligonucleotide
ggauggcaacuacagaauc

SEQ ID NO: 57742 - RNA, 19 nt, Artificial Sequence
  Description of Artificial Sequence: Synthetic oligonucleotide
cacaugccacacagugaug

SEQ ID NO: 57743 - RNA, 19 nt, Artificial Sequence
  Description of Artificial Sequence: Synthetic oligonucleotide
ggaggugcugcgagagcac

SEQ ID NO: 57744 - RNA, 19 nt, Artificial Sequence
  Description of Artificial Sequence: Synthetic oligonucleotide
caaggacagugucauggcc

SEQ ID NO: 57745 - RNA, 19 nt, Artificial Sequence
  Description of Artificial Sequence: Synthetic oligonucleotide
cgugcuggaagccuuuguc

SEQ ID NO: 57746 - RNA, 19 nt, Artificial Sequence
  Description of Artificial Sequence: Synthetic oligonucleotide
cuaugaccccuugcugaac

SEQ ID NO: 57747 - RNA, 19 nt, Artificial Sequence
  Description of Artificial Sequence: Synthetic oligonucleotide
cuggaggcugauggacaca

SEQ ID NO: 57748 - RNA, 19 nt, Artificial Sequence
  Description of Artificial Sequence: Synthetic oligonucleotide
aaauaccaaaggcaacaag

SEQ ID NO: 57749 - RNA, 19 nt, Artificial Sequence
  Description of Artificial Sequence: Synthetic oligonucleotide
gcgaucccgaacgaggacg

SEQ ID NO: 57750 - RNA, 19 nt, Artificial Sequence
  Description of Artificial Sequence: Synthetic oligonucleotide
ggauuccuacucugcuggc

SEQ ID NO: 57751 - RNA, 19 nt, Artificial Sequence
  Description of Artificial Sequence: Synthetic oligonucleotide
ccagucagucgaaauuuug

SEQ ID NO: 57752 - RNA, 19 nt, Artificial Sequence
  Description of Artificial Sequence: Synthetic oligonucleotide
ggacgguguggaacuugga

SEQ ID NO: 57753 - RNA, 19 nt, Artificial Sequence
  Description of Artificial Sequence: Synthetic oligonucleotide
agagccagcccauaagaaa

SEQ ID NO: 57754 - RNA, 19 nt, Artificial Sequence
  Description of Artificial Sequence: Synthetic oligonucleotide
aacggggaccacagugcca

SEQ ID NO: 57755 - RNA, 19 nt, Artificial Sequence
  Description of Artificial Sequence: Synthetic oligonucleotide
agaaucuauucauucuuuc

SEQ ID NO: 57756 - RNA, 19 nt, Artificial Sequence
  Description of Artificial Sequence: Synthetic oligonucleotide
cauuggagacgguuuggug

SEQ ID NO: 57757 - RNA, 19 nt, Artificial Sequence
  Description of Artificial Sequence: Synthetic oligonucleotide
gaaaccagaggcccuaaau

SEQ ID NO: 57758 - RNA, 19 nt, Artificial Sequence
  Description of Artificial Sequence: Synthetic oligonucleotide
uaagaaagcuauccagauu

SEQ ID NO: 57759 - RNA, 19 nt, Artificial Sequence
  Description of Artificial Sequence: Synthetic oligonucleotide
uauuaacaggguucgagau

SEQ ID NO: 57760 - RNA, 19 nt, Artificial Sequence
  Description of Artificial Sequence: Synthetic oligonucleotide
uaagcucacuggucgggac

SEQ ID NO: 57761 - RNA, 19 nt, Artificial Sequence
  Description of Artificial Sequence: Synthetic oligonucleotide
cuucucucaugaugacacu

SEQ ID NO: 57762 - RNA, 19 nt, Artificial Sequence
  Description of Artificial Sequence: Synthetic oligonucleotide
uuuggauguuccaacgcaa

SEQ ID NO: 57763 - RNA, 19 nt, Artificial Sequence
  Description of Artificial Sequence: Synthetic oligonucleotide
aguugagcugcucaucaaa

SEQ ID NO: 57764 - RNA, 19 nt, Artificial Sequence
  Description of Artificial Sequence: Synthetic oligonucleotide
acaagcgacaucccaugaa

SEQ ID NO: 57765 - RNA, 19 nt, Artificial Sequence
  Description of Artificial Sequence: Synthetic oligonucleotide
aaaccucugccagugcuau

SEQ ID NO: 57766 - RNA, 19 nt, Artificial Sequence
  Description of Artificial Sequence: Synthetic oligonucleotide
uauuggcuggugcccuuuc

SEQ ID NO: 57767 - RNA, 19 nt, Artificial Sequence
  Description of Artificial Sequence: Synthetic oligonucleotide
cugguaacuggaggcccag

SEQ ID NO: 57768 - RNA, 19 nt, Artificial Sequence
  Description of Artificial Sequence: Synthetic oligonucleotide
gaugugcccaucacguuuu

SEQ ID NO: 57769 - RNA, 19 nt, Artificial Sequence
  Description of Artificial Sequence: Synthetic oligonucleotide
uuucugaggcuuuuguacu

SEQ ID NO: 57770 - RNA, 19 nt, Artificial Sequence
  Description of Artificial Sequence: Synthetic oligonucleotide
uuuaguaaaugcuuccacu

SEQ ID NO: 57771 - RNA, 19 nt, Artificial Sequence
  Description of Artificial Sequence: Synthetic oligonucleotide
uaaacugaaaccaugguga

SEQ ID NO: 57772 - RNA, 19 nt, Artificial Sequence
  Description of Artificial Sequence: Synthetic oligonucleotide
agaaaguuugacuuuguua

SEQ ID NO: 57773 - RNA, 19 nt, Artificial Sequence
  Description of Artificial Sequence: Synthetic oligonucleotide
aaauauuuugaaauguaaa

SEQ ID NO: 57774 - RNA, 19 nt, Artificial Sequence
  Description of Artificial Sequence: Synthetic oligonucleotide
augaaaagaacuacuguau

SEQ ID NO: 57775 - RNA, 19 nt, Artificial Sequence
  Description of Artificial Sequence: Synthetic oligonucleotide
uauuaaaaguugguuugaa

SEQ ID NO: 57776 - RNA, 19 nt, Artificial Sequence
  Description of Artificial Sequence: Synthetic oligonucleotide
accaacuuucuagcugcug

SEQ ID NO: 57777 - RNA, 19 nt, Artificial Sequence
  Description of Artificial Sequence: Synthetic oligonucleotide
guugaagaauauauuguca

SEQ ID NO: 57778 - RNA, 19 nt, Artificial Sequence
  Description of Artificial Sequence: Synthetic oligonucleotide
agaaacacaaggcuugauu

SEQ ID NO: 57779 - RNA, 19 nt, Artificial Sequence
  Description of Artificial Sequence: Synthetic oligonucleotide
uugguucccaggacaguga

SEQ ID NO: 57780 - RNA, 19 nt, Artificial Sequence
  Description of Artificial Sequence: Synthetic oligonucleotide
aaacaauaguaauaccacg

SEQ ID NO: 57781 - RNA, 19 nt, Artificial Sequence
  Description of Artificial Sequence: Synthetic oligonucleotide
guaaaucaagccauucauu

SEQ ID NO: 57782 - RNA, 19 nt, Artificial Sequence
  Description of Artificial Sequence: Synthetic oligonucleotide
uuuggggaacagaagaucc

SEQ ID NO: 57783 - RNA, 19 nt, Artificial Sequence
  Description of Artificial Sequence: Synthetic oligonucleotide
cauaacuuuagaaauacgg

SEQ ID NO: 57784 - RNA, 19 nt, Artificial Sequence
  Description of Artificial Sequence: Synthetic oligonucleotide
gguuuugacuuaacucaca

SEQ ID NO: 57785 - RNA, 19 nt, Artificial Sequence
  Description of Artificial Sequence: Synthetic oligonucleotide
aagagaacucaucauaagu

SEQ ID NO: 57786 - RNA, 19 nt, Artificial Sequence
  Description of Artificial Sequence: Synthetic oligonucleotide
uacuugcugauggaagaau

SEQ ID NO: 57787 - RNA, 19 nt, Artificial Sequence
  Description of Artificial Sequence: Synthetic oligonucleotide
ugaccuaguugcuccucuc

SEQ ID NO: 57788 - RNA, 19 nt, Artificial Sequence
  Description of Artificial Sequence: Synthetic oligonucleotide
caacauggguacagcaaac

SEQ ID NO: 57789 - RNA, 19 nt, Artificial Sequence
  Description of Artificial Sequence: Synthetic oligonucleotide
cucagcacagccaagaagc

SEQ ID NO: 57790 - RNA, 19 nt, Artificial Sequence
  Description of Artificial Sequence: Synthetic oligonucleotide
ccucaggucguggagaaca

SEQ ID NO: 57791 - RNA, 19 nt, Artificial Sequence
  Description of Artificial Sequence: Synthetic oligonucleotide
auggauuaggauccuagac

SEQ ID NO: 57792 - RNA, 19 nt, Artificial Sequence
  Description of Artificial Sequence: Synthetic oligonucleotide
cuguaaagacacagaagau

SEQ ID NO: 57793 - RNA, 19 nt, Artificial Sequence
  Description of Artificial Sequence: Synthetic oligonucleotide
ugcugaccucaccccugcc

SEQ ID NO: 57794 - RNA, 19 nt, Artificial Sequence
  Description of Artificial Sequence: Synthetic oligonucleotide
caccuaucccaagaccuca

SEQ ID NO: 57795 - RNA, 19 nt, Artificial Sequence
  Description of Artificial Sequence: Synthetic oligonucleotide
acuggucuguggacagcag

SEQ ID NO: 57796 - RNA, 19 nt, Artificial Sequence
  Description of Artificial Sequence: Synthetic oligonucleotide
gcagaaauguuugcaagau

SEQ ID NO: 57797 - RNA, 19 nt, Artificial Sequence
  Description of Artificial Sequence: Synthetic oligonucleotide
uaggccaaaaugaguacaa

SEQ ID NO: 57798 - RNA, 19 nt, Artificial Sequence
  Description of Artificial Sequence: Synthetic oligonucleotide
aaaggucugucuuccauca

SEQ ID NO: 57799 - RNA, 19 nt, Artificial Sequence
  Description of Artificial Sequence: Synthetic oligonucleotide
agacccagugaugcugcga

SEQ ID NO: 57800 - RNA, 19 nt, Artificial Sequence
  Description of Artificial Sequence: Synthetic oligonucleotide
acucacacgcuucaauuca

SEQ ID NO: 57801 - RNA, 19 nt, Artificial Sequence
  Description of Artificial Sequence: Synthetic oligonucleotide
aagaccugaccgcuaguag

SEQ ID NO: 57802 - RNA, 19 nt, Artificial Sequence
  Description of Artificial Sequence: Synthetic oligonucleotide
gggagguuuauucagaucg

SEQ ID NO: 57803 - RNA, 19 nt, Artificial Sequence
  Description of Artificial Sequence: Synthetic oligonucleotide
gcuggcagccucggcugag

SEQ ID NO: 57804 - RNA, 19 nt, Artificial Sequence
  Description of Artificial Sequence: Synthetic oligonucleotide
gcagaugcacagaggggau

SEQ ID NO: 57805 - RNA, 19 nt, Artificial Sequence
  Description of Artificial Sequence: Synthetic oligonucleotide
ucacugugcagugggacca

SEQ ID NO: 57806 - RNA, 19 nt, Artificial Sequence
  Description of Artificial Sequence: Synthetic oligonucleotide
acccucacuggccuucugc

SEQ ID NO: 57807 - RNA, 19 nt, Artificial Sequence
  Description of Artificial Sequence: Synthetic oligonucleotide
cagcaggguucugggaugu

SEQ ID NO: 57808 - RNA, 19 nt, Artificial Sequence
  Description of Artificial Sequence: Synthetic oligonucleotide
uuuucaguggucaaaauac

SEQ ID NO: 57809 - RNA, 19 nt, Artificial Sequence
  Description of Artificial Sequence: Synthetic oligonucleotide
cucuguuuagagcaagggc

SEQ ID NO: 57810 - RNA, 19 nt, Artificial Sequence
  Description of Artificial Sequence: Synthetic oligonucleotide
cucagaaaacagaaauacu

SEQ ID NO: 57811 - RNA, 19 nt, Artificial Sequence
  Description of Artificial Sequence: Synthetic oligonucleotide
ugucauggaggugcugaac

SEQ ID NO: 57812 - RNA, 19 nt, Artificial Sequence
  Description of Artificial Sequence: Synthetic oligonucleotide
cacagggaaggucugguac

SEQ ID NO: 57813 - RNA, 19 nt, Artificial Sequence
  Description of Artificial Sequence: Synthetic oligonucleotide
cauauuggaaauuaugagc

SEQ ID NO: 57814 - RNA, 19 nt, Artificial Sequence
  Description of Artificial Sequence: Synthetic oligonucleotide
cagaacaaauacucaacua

SEQ ID NO: 57815 - RNA, 19 nt, Artificial Sequence
  Description of Artificial Sequence: Synthetic oligonucleotide
aaaugcacaaaguauaaag

SEQ ID NO: 57816 - RNA, 19 nt, Artificial Sequence
  Description of Artificial Sequence: Synthetic oligonucleotide
guguagccaugucuagaca

SEQ ID NO: 57817 - RNA, 19 nt, Artificial Sequence
  Description of Artificial Sequence: Synthetic oligonucleotide
accauguuguaucagaaua

SEQ ID NO: 57818 - RNA, 19 nt, Artificial Sequence
  Description of Artificial Sequence: Synthetic oligonucleotide
aauuuuugugccaauaaau

SEQ ID NO: 57819 - RNA, 19 nt, Artificial Sequence
  Description of Artificial Sequence: Synthetic oligonucleotide
ugacaucagaauuuuaaac

SEQ ID NO: 57820 - RNA, 19 nt, Artificial Sequence
  Description of Artificial Sequence: Synthetic oligonucleotide
caucagaauuuuaaacaua

SEQ ID NO: 57821 - RNA, 25 nt, Artificial Sequence
  Description of Artificial Sequence: Synthetic oligonucleotide
acggggccugaagcggcgguaccgg

SEQ ID NO: 57822 - RNA, 25 nt, Artificial Sequence
  Description of Artificial Sequence: Synthetic oligonucleotide
gugcuggcggcggcagcugaggccu

SEQ ID NO: 57823 - RNA, 25 nt, Artificial Sequence
  Description of Artificial Sequence: Synthetic oligonucleotide
uuggccgaagccgcgcgaaccucag

SEQ ID NO: 57824 - RNA, 25 nt, Artificial Sequence
  Description of Artificial Sequence: Synthetic oligonucleotide
gggcaagaugcuuggaaccggaccu

SEQ ID NO: 57825 - RNA, 25 nt, Artificial Sequence
  Description of Artificial Sequence: Synthetic oligonucleotide
ugccgccgccaccaccgcugccacc

SEQ ID NO: 57826 - RNA, 25 nt, Artificial Sequence
  Description of Artificial Sequence: Synthetic oligonucleotide
cacaucuagcaaugugagcguccug

SEQ ID NO: 57827 - RNA, 25 nt, Artificial Sequence
  Description of Artificial Sequence: Synthetic oligonucleotide
gcagcaguuugccaguggccuaaag

SEQ ID NO: 57828 - RNA, 25 nt, Artificial Sequence
  Description of Artificial Sequence: Synthetic oligonucleotide
gagccggaaugaggaaaccagggcc

SEQ ID NO: 57829 - RNA, 25 nt, Artificial Sequence
  Description of Artificial Sequence: Synthetic oligonucleotide
caaagccgccaaggagcuccagcac

SEQ ID NO: 57830 - RNA, 25 nt, Artificial Sequence
  Description of Artificial Sequence: Synthetic oligonucleotide
cuaugucaccauggaacuccgagag

SEQ ID NO: 57831 - RNA, 25 nt, Artificial Sequence
  Description of Artificial Sequence: Synthetic oligonucleotide
gaugagucaagaggagucuacucgc

SEQ ID NO: 57832 - RNA, 25 nt, Artificial Sequence
  Description of Artificial Sequence: Synthetic oligonucleotide
cuucuaugaccaacugaaccaucac

SEQ ID NO: 57833 - RNA, 25 nt, Artificial Sequence
  Description of Artificial Sequence: Synthetic oligonucleotide
cauuuuugaauugguuuccagcuca

SEQ ID NO: 57834 - RNA, 25 nt, Artificial Sequence
  Description of Artificial Sequence: Synthetic oligonucleotide
agaugccaaugagaggaaagguggc

SEQ ID NO: 57835 - RNA, 25 nt, Artificial Sequence
  Description of Artificial Sequence: Synthetic oligonucleotide
caucuuggccauagcuagccucaua

SEQ ID NO: 57836 - RNA, 25 nt, Artificial Sequence
  Description of Artificial Sequence: Synthetic oligonucleotide
aggaguggaaggugggaaugccacc

SEQ ID NO: 57837 - RNA, 25 nt, Artificial Sequence
  Description of Artificial Sequence: Synthetic oligonucleotide
ccgaauuggcagauuugccaacuau

SEQ ID NO: 57838 - RNA, 25 nt, Artificial Sequence
  Description of Artificial Sequence: Synthetic oligonucleotide
ucuucggaaccuccuccccuccaau

SEQ ID NO: 57839 - RNA, 25 nt, Artificial Sequence
  Description of Artificial Sequence: Synthetic oligonucleotide
ugacccaguugucauggaaauggca

SEQ ID NO: 57840 - RNA, 25 nt, Artificial Sequence
  Description of Artificial Sequence: Synthetic oligonucleotide
auccaaggccauuggccgucuugcc

SEQ ID NO: 57841 - RNA, 25 nt, Artificial Sequence
  Description of Artificial Sequence: Synthetic oligonucleotide
cauggcaggggacacuuuuaccgcu

SEQ ID NO: 57842 - RNA, 25 nt, Artificial Sequence
  Description of Artificial Sequence: Synthetic oligonucleotide
ugaguacguggaauuugaggugaag

SEQ ID NO: 57843 - RNA, 25 nt, Artificial Sequence
  Description of Artificial Sequence: Synthetic oligonucleotide
gcgagcccuggaauggcugggugcu

SEQ ID NO: 57844 - RNA, 25 nt, Artificial Sequence
  Description of Artificial Sequence: Synthetic oligonucleotide
ugaccgcaaugagggccggagacau

SEQ ID NO: 57845 - RNA, 25 nt, Artificial Sequence
  Description of Artificial Sequence: Synthetic oligonucleotide
ugcagcuguccugguucuccgugag

SEQ ID NO: 57846 - RNA, 25 nt, Artificial Sequence
  Description of Artificial Sequence: Synthetic oligonucleotide
gcuggccaucagcgucccuaccuuc

SEQ ID NO: 57847 - RNA, 25 nt, Artificial Sequence
  Description of Artificial Sequence: Synthetic oligonucleotide
cuucuuccagcaagugcaacccuuc

SEQ ID NO: 57848 - RNA, 25 nt, Artificial Sequence
  Description of Artificial Sequence: Synthetic oligonucleotide
cuuugacaacauuuuuguggccgug

SEQ ID NO: 57849 - RNA, 25 nt, Artificial Sequence
  Description of Artificial Sequence: Synthetic oligonucleotide
gugggaccccaaacaggccauccgu

SEQ ID NO: 57850 - RNA, 25 nt, Artificial Sequence
  Description of Artificial Sequence: Synthetic oligonucleotide
ugagggagcuguagccgcccuucgu

SEQ ID NO: 57851 - RNA, 25 nt, Artificial Sequence
  Description of Artificial Sequence: Synthetic oligonucleotide
ugccugucugauucucacaacccag

SEQ ID NO: 57852 - RNA, 25 nt, Artificial Sequence
  Description of Artificial Sequence: Synthetic oligonucleotide
gcgugagccgaaggagaugcagaag

SEQ ID NO: 57853 - RNA, 25 nt, Artificial Sequence
  Description of Artificial Sequence: Synthetic oligonucleotide
gccucagugguacaggcacacauuu

SEQ ID NO: 57854 - RNA, 25 nt, Artificial Sequence
  Description of Artificial Sequence: Synthetic oligonucleotide
ugaagaagcagagaagggauuugau

SEQ ID NO: 57855 - RNA, 25 nt, Artificial Sequence
  Description of Artificial Sequence: Synthetic oligonucleotide
ugagaccuuggccaaagagaagggc

SEQ ID NO: 57856 - RNA, 25 nt, Artificial Sequence
  Description of Artificial Sequence: Synthetic oligonucleotide
caugaaucgggaugaucggauccau

SEQ ID NO: 57857 - RNA, 25 nt, Artificial Sequence
  Description of Artificial Sequence: Synthetic oligonucleotide
uggagccuuguugauccuuaacgag

SEQ ID NO: 57858 - RNA, 25 nt, Artificial Sequence
  Description of Artificial Sequence: Synthetic oligonucleotide
gcugguccgaaucagcagcauggag

SEQ ID NO: 57859 - RNA, 25 nt, Artificial Sequence
  Description of Artificial Sequence: Synthetic oligonucleotide
gggagagcgucugagagaagaaaug

SEQ ID NO: 57860 - RNA, 25 nt, Artificial Sequence
  Description of Artificial Sequence: Synthetic oligonucleotide
ggaagaaaucacacagcagcagcug

SEQ ID NO: 57861 - RNA, 25 nt, Artificial Sequence
  Description of Artificial Sequence: Synthetic oligonucleotide
gguacacgacaaguacugcaaagau

SEQ ID NO: 57862 - RNA, 25 nt, Artificial Sequence
  Description of Artificial Sequence: Synthetic oligonucleotide
ucucaugggcuucggaacaaaaccu

SEQ ID NO: 57863 - RNA, 25 nt, Artificial Sequence
  Description of Artificial Sequence: Synthetic oligonucleotide
ucgucacauuacccccuucaccagu

SEQ ID NO: 57864 - RNA, 25 nt, Artificial Sequence
  Description of Artificial Sequence: Synthetic oligonucleotide
uuuccaggcuguacagccccagcag

SEQ ID NO: 57865 - RNA, 25 nt, Artificial Sequence
  Description of Artificial Sequence: Synthetic oligonucleotide
gucaaaugccuugguggggcugcug

SEQ ID NO: 57866 - RNA, 25 nt, Artificial Sequence
  Description of Artificial Sequence: Synthetic oligonucleotide
gggguacagcucucaccaaggccuc

SEQ ID NO: 57867 - RNA, 25 nt, Artificial Sequence
  Description of Artificial Sequence: Synthetic oligonucleotide
caugggauuugggaccucccccagu

SEQ ID NO: 57868 - RNA, 25 nt, Artificial Sequence
  Description of Artificial Sequence: Synthetic oligonucleotide
uccagcuaaguccacccugguggag

SEQ ID NO: 57869 - RNA, 25 nt, Artificial Sequence
  Description of Artificial Sequence: Synthetic oligonucleotide
gagccgguguugcagagacuugaug

SEQ ID NO: 57870 - RNA, 25 nt, Artificial Sequence
  Description of Artificial Sequence: Synthetic oligonucleotide
ggaggagaaauuugaucaggugugc

SEQ ID NO: 57871 - RNA, 25 nt, Artificial Sequence
  Description of Artificial Sequence: Synthetic oligonucleotide
ccagugggugcugaaaugcaggaau

SEQ ID NO: 57872 - RNA, 25 nt, Artificial Sequence
  Description of Artificial Sequence: Synthetic oligonucleotide
uagcaagaacucgcugauccaaaug

SEQ ID NO: 57873 - RNA, 25 nt, Artificial Sequence
  Description of Artificial Sequence: Synthetic oligonucleotide
gacaauccuuaauuuguugccccgc

SEQ ID NO: 57874 - RNA, 25 nt, Artificial Sequence
  Description of Artificial Sequence: Synthetic oligonucleotide
cuuggcugcauuccgaccuucugcc

SEQ ID NO: 57875 - RNA, 25 nt, Artificial Sequence
  Description of Artificial Sequence: Synthetic oligonucleotide
cuucacagauacccaguaucuccaa

SEQ ID NO: 57876 - RNA, 25 nt, Artificial Sequence
  Description of Artificial Sequence: Synthetic oligonucleotide
agauaccaugaaccauguccuaagc

SEQ ID NO: 57877 - RNA, 25 nt, Artificial Sequence
  Description of Artificial Sequence: Synthetic oligonucleotide
cugugucaagaaggagaaggaacgu

SEQ ID NO: 57878 - RNA, 25 nt, Artificial Sequence
  Description of Artificial Sequence: Synthetic oligonucleotide
uacagcggccuuccaagcccugggg

SEQ ID NO: 57879 - RNA, 25 nt, Artificial Sequence
  Description of Artificial Sequence: Synthetic oligonucleotide
gcuacuuucuguggcugugaggucu

SEQ ID NO: 57880 - RNA, 25 nt, Artificial Sequence
  Description of Artificial Sequence: Synthetic oligonucleotide
ugaguuuaaggucuauuugccucgc

SEQ ID NO: 57881 - RNA, 25 nt, Artificial Sequence
  Description of Artificial Sequence: Synthetic oligonucleotide
cgugcuggacaucauccgagcggcc

SEQ ID NO: 57882 - RNA, 25 nt, Artificial Sequence
  Description of Artificial Sequence: Synthetic oligonucleotide
ccugcccccaaaggacuucgcccau

SEQ ID NO: 57883 - RNA, 25 nt, Artificial Sequence
  Description of Artificial Sequence: Synthetic oligonucleotide
uaagaggcagaaggcaaugcaggug

SEQ ID NO: 57884 - RNA, 25 nt, Artificial Sequence
  Description of Artificial Sequence: Synthetic oligonucleotide
ggaugccacagucuucacuugcauc

SEQ ID NO: 57885 - RNA, 25 nt, Artificial Sequence
  Description of Artificial Sequence: Synthetic oligonucleotide
cagcaugcuggcucgagcaaugggg

SEQ ID NO: 57886 - RNA, 25 nt, Artificial Sequence
  Description of Artificial Sequence: Synthetic oligonucleotide
gccaggcauccagcaggauaucaag

SEQ ID NO: 57887 - RNA, 25 nt, Artificial Sequence
  Description of Artificial Sequence: Synthetic oligonucleotide
ggagcugcuggagcccaugcuggca

SEQ ID NO: 57888 - RNA, 25 nt, Artificial Sequence
  Description of Artificial Sequence: Synthetic oligonucleotide
agugggacuaagcccugcccucacu

SEQ ID NO: 57889 - RNA, 25 nt, Artificial Sequence
  Description of Artificial Sequence: Synthetic oligonucleotide
ugcagugcucuacgaccugagccgu

SEQ ID NO: 57890 - RNA, 25 nt, Artificial Sequence
  Description of Artificial Sequence: Synthetic oligonucleotide
ucagauuccacagcuaaagaaggac

SEQ ID NO: 57891 - RNA, 25 nt, Artificial Sequence
  Description of Artificial Sequence: Synthetic oligonucleotide
cauucaagaugggcuacugaaaaug

SEQ ID NO: 57892 - RNA, 25 nt, Artificial Sequence
  Description of Artificial Sequence: Synthetic oligonucleotide
gcugucccugguccuuaugcacaaa

SEQ ID NO: 57893 - RNA, 25 nt, Artificial Sequence
  Description of Artificial Sequence: Synthetic oligonucleotide
accccuucgccacccaggcaugccc

SEQ ID NO: 57894 - RNA, 25 nt, Artificial Sequence
  Description of Artificial Sequence: Synthetic oligonucleotide
caagggccuggcccaucagcuggcc

SEQ ID NO: 57895 - RNA, 25 nt, Artificial Sequence
  Description of Artificial Sequence: Synthetic oligonucleotide
cucuccuggccucacgacccucccu

SEQ ID NO: 57896 - RNA, 25 nt, Artificial Sequence
  Description of Artificial Sequence: Synthetic oligonucleotide
ugaggccagcgaugugggcagcauc

SEQ ID NO: 57897 - RNA, 25 nt, Artificial Sequence
  Description of Artificial Sequence: Synthetic oligonucleotide
cacucuugcccuccgaacgcuuggc

SEQ ID NO: 57898 - RNA, 25 nt, Artificial Sequence
  Description of Artificial Sequence: Synthetic oligonucleotide
cagcuuugaauuugaaggccacucu

SEQ ID NO: 57899 - RNA, 25 nt, Artificial Sequence
  Description of Artificial Sequence: Synthetic oligonucleotide
ucugacccaauuuguucgccacugu

SEQ ID NO: 57900 - RNA, 25 nt, Artificial Sequence
  Description of Artificial Sequence: Synthetic oligonucleotide
ugcggaucauuuccugaacagugag

SEQ ID NO: 57901 - RNA, 25 nt, Artificial Sequence
  Description of Artificial Sequence: Synthetic oligonucleotide
gcacaaggagauccgcauggaggcu

SEQ ID NO: 57902 - RNA, 25 nt, Artificial Sequence
  Description of Artificial Sequence: Synthetic oligonucleotide
ugcccgcaccugcucccgccugcuc

SEQ ID NO: 57903 - RNA, 25 nt, Artificial Sequence
  Description of Artificial Sequence: Synthetic oligonucleotide
cacacccuccauccaccucaucagu

SEQ ID NO: 57904 - RNA, 25 nt, Artificial Sequence
  Description of Artificial Sequence: Synthetic oligonucleotide
uggccaugcucaugugguuagccag

SEQ ID NO: 57905 - RNA, 25 nt, Artificial Sequence
  Description of Artificial Sequence: Synthetic oligonucleotide
gaccgcagugcaagugguggcagau

SEQ ID NO: 57906 - RNA, 25 nt, Artificial Sequence
  Description of Artificial Sequence: Synthetic oligonucleotide
ugugcuuagcaaacugcucguaguu

SEQ ID NO: 57907 - RNA, 25 nt, Artificial Sequence
  Description of Artificial Sequence: Synthetic oligonucleotide
ugggauaacagauccugacccugac

SEQ ID NO: 57908 - RNA, 25 nt, Artificial Sequence
  Description of Artificial Sequence: Synthetic oligonucleotide
cauucgcuacugugucuuggcgucc

SEQ ID NO: 57909 - RNA, 25 nt, Artificial Sequence
  Description of Artificial Sequence: Synthetic oligonucleotide
ccuggacgagcgcuuugaugcacac

SEQ ID NO: 57910 - RNA, 25 nt, Artificial Sequence
  Description of Artificial Sequence: Synthetic oligonucleotide
ccuggcccaggcggagaacuugcag

SEQ ID NO: 57911 - RNA, 25 nt, Artificial Sequence
  Description of Artificial Sequence: Synthetic oligonucleotide
ggccuuguuuguggcucugaaugac

SEQ ID NO: 57912 - RNA, 25 nt, Artificial Sequence
  Description of Artificial Sequence: Synthetic oligonucleotide
ccagguguuugagauccgggagcug

SEQ ID NO: 57913 - RNA, 25 nt, Artificial Sequence
  Description of Artificial Sequence: Synthetic oligonucleotide
ggccaucugcacugugggccgacuc

SEQ ID NO: 57914 - RNA, 25 nt, Artificial Sequence
  Description of Artificial Sequence: Synthetic oligonucleotide
caguagcaugaacccugccuuuguc

SEQ ID NO: 57915 - RNA, 25 nt, Artificial Sequence
  Description of Artificial Sequence: Synthetic oligonucleotide
caugccuuuccugcgcaagaugcuc

SEQ ID NO: 57916 - RNA, 25 nt, Artificial Sequence
  Description of Artificial Sequence: Synthetic oligonucleotide
cauccagauuuugacagaguuggag

SEQ ID NO: 57917 - RNA, 25 nt, Artificial Sequence
  Description of Artificial Sequence: Synthetic oligonucleotide
gcacagugggauuggaagaaucaaa

SEQ ID NO: 57918 - RNA, 25 nt, Artificial Sequence
  Description of Artificial Sequence: Synthetic oligonucleotide
agagcagagugcccgcaugcugggg

SEQ ID NO: 57919 - RNA, 25 nt, Artificial Sequence
  Description of Artificial Sequence: Synthetic oligonucleotide
gcaccuggucuccaaugccccccga

SEQ ID NO: 57920 - RNA, 25 nt, Artificial Sequence
  Description of Artificial Sequence: Synthetic oligonucleotide
acucauccgccccuacauggagccu

SEQ ID NO: 57921 - RNA, 25 nt, Artificial Sequence
  Description of Artificial Sequence: Synthetic oligonucleotide
uauucugaaggcauuaauuuugaaa

SEQ ID NO: 57922 - RNA, 25 nt, Artificial Sequence
  Description of Artificial Sequence: Synthetic oligonucleotide
acugaaagauccagacccugaucca

SEQ ID NO: 57923 - RNA, 25 nt, Artificial Sequence
  Description of Artificial Sequence: Synthetic oligonucleotide
aaacccaggugugaucaauaauguc

SEQ ID NO: 57924 - RNA, 25 nt, Artificial Sequence
  Description of Artificial Sequence: Synthetic oligonucleotide
ccuggcaacaauaggagaauuggca

SEQ ID NO: 57925 - RNA, 25 nt, Artificial Sequence
  Description of Artificial Sequence: Synthetic oligonucleotide
acagguuaguggccuggaaaugagg

SEQ ID NO: 57926 - RNA, 25 nt, Artificial Sequence
  Description of Artificial Sequence: Synthetic oligonucleotide
gaaauggguugaugaacuuuuuauu

SEQ ID NO: 57927 - RNA, 25 nt, Artificial Sequence
  Description of Artificial Sequence: Synthetic oligonucleotide
uaucaucauggacaugcuccaggau

SEQ ID NO: 57928 - RNA, 25 nt, Artificial Sequence
  Description of Artificial Sequence: Synthetic oligonucleotide
uuccucuuuguuggccaaaaggcag

SEQ ID NO: 57929 - RNA, 25 nt, Artificial Sequence
  Description of Artificial Sequence: Synthetic oligonucleotide
gguggcucuguggacccugggacag

SEQ ID NO: 57930 - RNA, 25 nt, Artificial Sequence
  Description of Artificial Sequence: Synthetic oligonucleotide
guugguggccagcacuggcuaugua

SEQ ID NO: 57931 - RNA, 25 nt, Artificial Sequence
  Description of Artificial Sequence: Synthetic oligonucleotide
aguagagcccuacaggaaguacccu

SEQ ID NO: 57932 - RNA, 25 nt, Artificial Sequence
  Description of Artificial Sequence: Synthetic oligonucleotide
uacuuugcuugaggugcuacugaau

SEQ ID NO: 57933 - RNA, 25 nt, Artificial Sequence
  Description of Artificial Sequence: Synthetic oligonucleotide
uuuucugaagacugagcagaaccag

SEQ ID NO: 57934 - RNA, 25 nt, Artificial Sequence
  Description of Artificial Sequence: Synthetic oligonucleotide
ggguacacgcagagaggccauccgu

SEQ ID NO: 57935 - RNA, 25 nt, Artificial Sequence
  Description of Artificial Sequence: Synthetic oligonucleotide
uguguuagggcuuuuaggggcuuug

SEQ ID NO: 57936 - RNA, 25 nt, Artificial Sequence
  Description of Artificial Sequence: Synthetic oligonucleotide
ggauccuuacaagcacaaagugaac

SEQ ID NO: 57937 - RNA, 25 nt, Artificial Sequence
  Description of Artificial Sequence: Synthetic oligonucleotide
cauuggcaugauagaccagucccgg

SEQ ID NO: 57938 - RNA, 25 nt, Artificial Sequence
  Description of Artificial Sequence: Synthetic oligonucleotide
ggaugccucugcugucagccuguca

SEQ ID NO: 57939 - RNA, 25 nt, Artificial Sequence
  Description of Artificial Sequence: Synthetic oligonucleotide
agaauccaagucaagucaggauucc

SEQ ID NO: 57940 - RNA, 25 nt, Artificial Sequence
  Description of Artificial Sequence: Synthetic oligonucleotide
cucugacuauagcacuagugaaaug

SEQ ID NO: 57941 - RNA, 25 nt, Artificial Sequence
  Description of Artificial Sequence: Synthetic oligonucleotide
gcuggucaacaugggaaacuugccu

SEQ ID NO: 57942 - RNA, 25 nt, Artificial Sequence
  Description of Artificial Sequence: Synthetic oligonucleotide
ucuggaugaguucuacccagcugug

SEQ ID NO: 57943 - RNA, 25 nt, Artificial Sequence
  Description of Artificial Sequence: Synthetic oligonucleotide
guccaugguggcccugaugcggauc

SEQ ID NO: 57944 - RNA, 25 nt, Artificial Sequence
  Description of Artificial Sequence: Synthetic oligonucleotide
cuuccgagaccagucacucucucau

SEQ ID NO: 57945 - RNA, 25 nt, Artificial Sequence
  Description of Artificial Sequence: Synthetic oligonucleotide
ucaucacaccaugguuguccaggcc

SEQ ID NO: 57946 - RNA, 25 nt, Artificial Sequence
  Description of Artificial Sequence: Synthetic oligonucleotide
caucaccuucaucuucaagucccug

SEQ ID NO: 57947 - RNA, 25 nt, Artificial Sequence
  Description of Artificial Sequence: Synthetic oligonucleotide
gggacucaaaugugugcaguuccug

SEQ ID NO: 57948 - RNA, 25 nt, Artificial Sequence
  Description of Artificial Sequence: Synthetic oligonucleotide
gccccaggucaugcccacguuccuu

SEQ ID NO: 57949 - RNA, 25 nt, Artificial Sequence
  Description of Artificial Sequence: Synthetic oligonucleotide
uaacgucauucgagucugugauggg

SEQ ID NO: 57950 - RNA, 25 nt, Artificial Sequence
  Description of Artificial Sequence: Synthetic oligonucleotide
ggccauccgggaauuuuuguuccag

SEQ ID NO: 57951 - RNA, 25 nt, Artificial Sequence
  Description of Artificial Sequence: Synthetic oligonucleotide
gcagcugggaauguugguguccuuu

SEQ ID NO: 57952 - RNA, 25 nt, Artificial Sequence
  Description of Artificial Sequence: Synthetic oligonucleotide
ugugaagagccacaucagaccuuau

SEQ ID NO: 57953 - RNA, 25 nt, Artificial Sequence
  Description of Artificial Sequence: Synthetic oligonucleotide
uauggaugaaauagucacccucaug

SEQ ID NO: 57954 - RNA, 25 nt, Artificial Sequence
  Description of Artificial Sequence: Synthetic oligonucleotide
gagagaauucugggucaugaacacc

SEQ ID NO: 57955 - RNA, 25 nt, Artificial Sequence
  Description of Artificial Sequence: Synthetic oligonucleotide
cucaauucagagcacgaucauucuu

SEQ ID NO: 57956 - RNA, 25 nt, Artificial Sequence
  Description of Artificial Sequence: Synthetic oligonucleotide
ucucauugagcaaauugugguagcu

SEQ ID NO: 57957 - RNA, 25 nt, Artificial Sequence
  Description of Artificial Sequence: Synthetic oligonucleotide
ucuugggggugaauuuaagcucuac

SEQ ID NO: 57958 - RNA, 25 nt, Artificial Sequence
  Description of Artificial Sequence: Synthetic oligonucleotide
ccugccccagcugaucccacacaug

SEQ ID NO: 57959 - RNA, 25 nt, Artificial Sequence
  Description of Artificial Sequence: Synthetic oligonucleotide
gcugcgugucuucaugcaugacaac

SEQ ID NO: 57960 - RNA, 25 nt, Artificial Sequence
  Description of Artificial Sequence: Synthetic oligonucleotide
cagcccaggccgcauugucucuauc

SEQ ID NO: 57961 - RNA, 25 nt, Artificial Sequence
  Description of Artificial Sequence: Synthetic oligonucleotide
caaguuacuggcugcaauccagcug

SEQ ID NO: 57962 - RNA, 25 nt, Artificial Sequence
  Description of Artificial Sequence: Synthetic oligonucleotide
guuuggcgccaaccuggaugacuac

SEQ ID NO: 57963 - RNA, 25 nt, Artificial Sequence
  Description of Artificial Sequence: Synthetic oligonucleotide
ccugcauuuacugcugccuccuauu

SEQ ID NO: 57964 - RNA, 25 nt, Artificial Sequence
  Description of Artificial Sequence: Synthetic oligonucleotide
uguuaaguuguuugaugccccugaa

SEQ ID NO: 57965 - RNA, 25 nt, Artificial Sequence
  Description of Artificial Sequence: Synthetic oligonucleotide
agcuccacugccaucucgaaaggca

SEQ ID NO: 57966 - RNA, 25 nt, Artificial Sequence
  Description of Artificial Sequence: Synthetic oligonucleotide
agcgcuagagacuguggaccgccug

SEQ ID NO: 57967 - RNA, 25 nt, Artificial Sequence
  Description of Artificial Sequence: Synthetic oligonucleotide
gacggagucccuggauuucacugac

SEQ ID NO: 57968 - RNA, 25 nt, Artificial Sequence
  Description of Artificial Sequence: Synthetic oligonucleotide
cuaugccucccggaucauucacccu

SEQ ID NO: 57969 - RNA, 25 nt, Artificial Sequence
  Description of Artificial Sequence: Synthetic oligonucleotide
uauuguucgaacacuggaccagagc

SEQ ID NO: 57970 - RNA, 25 nt, Artificial Sequence
  Description of Artificial Sequence: Synthetic oligonucleotide
cccagaacugcgcuccacagccaug

SEQ ID NO: 57971 - RNA, 25 nt, Artificial Sequence
  Description of Artificial Sequence: Synthetic oligonucleotide
ggacacgcugucuucacuuguuuuu

SEQ ID NO: 57972 - RNA, 25 nt, Artificial Sequence
  Description of Artificial Sequence: Synthetic oligonucleotide
ucagcuggggaagaaguaccaaauu

SEQ ID NO: 57973 - RNA, 25 nt, Artificial Sequence
  Description of Artificial Sequence: Synthetic oligonucleotide
uuucauuccaauggugaauaaaguu

SEQ ID NO: 57974 - RNA, 25 nt, Artificial Sequence
  Description of Artificial Sequence: Synthetic oligonucleotide
ucuggugcgacaccgaaucaaucau

SEQ ID NO: 57975 - RNA, 25 nt, Artificial Sequence
  Description of Artificial Sequence: Synthetic oligonucleotide
ucagcgcuaugaugugcucaucugc

SEQ ID NO: 57976 - RNA, 25 nt, Artificial Sequence
  Description of Artificial Sequence: Synthetic oligonucleotide
cagaauugucaagggauacacacuu

SEQ ID NO: 57977 - RNA, 25 nt, Artificial Sequence
  Description of Artificial Sequence: Synthetic oligonucleotide
ugcugaugaagaggaggauccuuug

SEQ ID NO: 57978 - RNA, 25 nt, Artificial Sequence
  Description of Artificial Sequence: Synthetic oligonucleotide
gauuuaccagcaucggaugcuuagg

SEQ ID NO: 57979 - RNA, 25 nt, Artificial Sequence
  Description of Artificial Sequence: Synthetic oligonucleotide
gaguggccaaggggaugcauuggcu

SEQ ID NO: 57980 - RNA, 25 nt, Artificial Sequence
  Description of Artificial Sequence: Synthetic oligonucleotide
uaguggaccaguggaaacaggaccc

SEQ ID NO: 57981 - RNA, 25 nt, Artificial Sequence
  Description of Artificial Sequence: Synthetic oligonucleotide
caugaagaaacugcacgucagcacc

SEQ ID NO: 57982 - RNA, 25 nt, Artificial Sequence
  Description of Artificial Sequence: Synthetic oligonucleotide
caucaaccuccaaaaggccuggggc

SEQ ID NO: 57983 - RNA, 25 nt, Artificial Sequence
  Description of Artificial Sequence: Synthetic oligonucleotide
cgcugccaggagggucuccaaagau

SEQ ID NO: 57984 - RNA, 25 nt, Artificial Sequence
  Description of Artificial Sequence: Synthetic oligonucleotide
ugacuggcuggaauggcugagacgg

SEQ ID NO: 57985 - RNA, 25 nt, Artificial Sequence
  Description of Artificial Sequence: Synthetic oligonucleotide
gcugagccuggagcugcugaaggac

SEQ ID NO: 57986 - RNA, 25 nt, Artificial Sequence
  Description of Artificial Sequence: Synthetic oligonucleotide
cucaucaucgcccucccugcgcucc

SEQ ID NO: 57987 - RNA, 25 nt, Artificial Sequence
  Description of Artificial Sequence: Synthetic oligonucleotide
cugcugggcccuggcacaggccuac

SEQ ID NO: 57988 - RNA, 25 nt, Artificial Sequence
  Description of Artificial Sequence: Synthetic oligonucleotide
caacccgauggccagggaucucuuc

SEQ ID NO: 57989 - RNA, 25 nt, Artificial Sequence
  Description of Artificial Sequence: Synthetic oligonucleotide
caaugcugcauuuguguccugcugg

SEQ ID NO: 57990 - RNA, 25 nt, Artificial Sequence
  Description of Artificial Sequence: Synthetic oligonucleotide
gucugaacugaaugaagaucaacag

SEQ ID NO: 57991 - RNA, 25 nt, Artificial Sequence
  Description of Artificial Sequence: Synthetic oligonucleotide
ggaugagcucaucagaagcaucgag

SEQ ID NO: 57992 - RNA, 25 nt, Artificial Sequence
  Description of Artificial Sequence: Synthetic oligonucleotide
guuggcccucaccucacaagacauc

SEQ ID NO: 57993 - RNA, 25 nt, Artificial Sequence
  Description of Artificial Sequence: Synthetic oligonucleotide
cgcugaagucacacagacccucuua

SEQ ID NO: 57994 - RNA, 25 nt, Artificial Sequence
  Description of Artificial Sequence: Synthetic oligonucleotide
aaacuuggcugaauucauggaacac

SEQ ID NO: 57995 - RNA, 25 nt, Artificial Sequence
  Description of Artificial Sequence: Synthetic oligonucleotide
cagugacaagggcccccugccacug

SEQ ID NO: 57996 - RNA, 25 nt, Artificial Sequence
  Description of Artificial Sequence: Synthetic oligonucleotide
gagagaugacaauggcauuguucug

SEQ ID NO: 57997 - RNA, 25 nt, Artificial Sequence
  Description of Artificial Sequence: Synthetic oligonucleotide
gcugggugagagagcugccaagugc

SEQ ID NO: 57998 - RNA, 25 nt, Artificial Sequence
  Description of Artificial Sequence: Synthetic oligonucleotide
ccgagcauaugccaaagcacuacac

SEQ ID NO: 57999 - RNA, 25 nt, Artificial Sequence
  Description of Artificial Sequence: Synthetic oligonucleotide
cuacaaagaacuggaguuccagaaa

SEQ ID NO: 58000 - RNA, 25 nt, Artificial Sequence
  Description of Artificial Sequence: Synthetic oligonucleotide
aggccccaccccugccauucuagaa

SEQ ID NO: 58001 - RNA, 25 nt, Artificial Sequence
  Description of Artificial Sequence: Synthetic oligonucleotide
aucucucaucagcauuaauaauaag

SEQ ID NO: 58002 - RNA, 25 nt, Artificial Sequence
  Description of Artificial Sequence: Synthetic oligonucleotide
gcuacagcagccggaggcagcggcc

SEQ ID NO: 58003 - RNA, 25 nt, Artificial Sequence
  Description of Artificial Sequence: Synthetic oligonucleotide
cggaguguuagaauaugccaugaaa

SEQ ID NO: 58004 - RNA, 25 nt, Artificial Sequence
  Description of Artificial Sequence: Synthetic oligonucleotide
acacuuuggagagcuggagauccag

SEQ ID NO: 58005 - RNA, 25 nt, Artificial Sequence
  Description of Artificial Sequence: Synthetic oligonucleotide
ggcuaccugguaugagaaacugcac

SEQ ID NO: 58006 - RNA, 25 nt, Artificial Sequence
  Description of Artificial Sequence: Synthetic oligonucleotide
cgagugggaggaugcccuuguggcc

SEQ ID NO: 58007 - RNA, 25 nt, Artificial Sequence
  Description of Artificial Sequence: Synthetic oligonucleotide
cuaugacaagaaaauggacaccaac

SEQ ID NO: 58008 - RNA, 25 nt, Artificial Sequence
  Description of Artificial Sequence: Synthetic oligonucleotide
caaggacgacccagagcugaugcug

SEQ ID NO: 58009 - RNA, 25 nt, Artificial Sequence
  Description of Artificial Sequence: Synthetic oligonucleotide
gggccgcaugcgcugccucgaggcc

SEQ ID NO: 58010 - RNA, 25 nt, Artificial Sequence
  Description of Artificial Sequence: Synthetic oligonucleotide
cuugggggaauggggucaacuccac

SEQ ID NO: 58011 - RNA, 25 nt, Artificial Sequence
  Description of Artificial Sequence: Synthetic oligonucleotide
ccagcagugcugugaaaaguggacc

SEQ ID NO: 58012 - RNA, 25 nt, Artificial Sequence
  Description of Artificial Sequence: Synthetic oligonucleotide
ccugguuaaugaugagacccaagcc

SEQ ID NO: 58013 - RNA, 25 nt, Artificial Sequence
  Description of Artificial Sequence: Synthetic oligonucleotide
caagauggcccggauggcugcugca

SEQ ID NO: 58014 - RNA, 25 nt, Artificial Sequence
  Description of Artificial Sequence: Synthetic oligonucleotide
agcugcaugggguuuaggucagugg

SEQ ID NO: 58015 - RNA, 25 nt, Artificial Sequence
  Description of Artificial Sequence: Synthetic oligonucleotide
ggacagcauggaagaauacaccugu

SEQ ID NO: 58016 - RNA, 25 nt, Artificial Sequence
  Description of Artificial Sequence: Synthetic oligonucleotide
uaugaucccucgggacacccaugau

SEQ ID NO: 58017 - RNA, 25 nt, Artificial Sequence
  Description of Artificial Sequence: Synthetic oligonucleotide
uggggcauuuuauagagcugugcug

SEQ ID NO: 58018 - RNA, 25 nt, Artificial Sequence
  Description of Artificial Sequence: Synthetic oligonucleotide
ggcacugcaucaggaccucuucucc

SEQ ID NO: 58019 - RNA, 25 nt, Artificial Sequence
  Description of Artificial Sequence: Synthetic oligonucleotide
cuuggcacaacagugcauugacaag

SEQ ID NO: 58020 - RNA, 25 nt, Artificial Sequence
  Description of Artificial Sequence: Synthetic oligonucleotide
ggccagggaccugcuggaugcugaa

SEQ ID NO: 58021 - RNA, 25 nt, Artificial Sequence
  Description of Artificial Sequence: Synthetic oligonucleotide
auuaacugcgauggcaggagagagu

SEQ ID NO: 58022 - RNA, 25 nt, Artificial Sequence
  Description of Artificial Sequence: Synthetic oligonucleotide
uuacagucgggcauauggggccaug

SEQ ID NO: 58023 - RNA, 25 nt, Artificial Sequence
  Description of Artificial Sequence: Synthetic oligonucleotide
gguuucuugccacaugcuguccgag

SEQ ID NO: 58024 - RNA, 25 nt, Artificial Sequence
  Description of Artificial Sequence: Synthetic oligonucleotide
gcuggaggagguuauccaguacaaa

SEQ ID NO: 58025 - RNA, 25 nt, Artificial Sequence
  Description of Artificial Sequence: Synthetic oligonucleotide
acuuguccccgagcgacgagagauc

SEQ ID NO: 58026 - RNA, 25 nt, Artificial Sequence
  Description of Artificial Sequence: Synthetic oligonucleotide
cauccgccagaucuggugggagaga

SEQ ID NO: 58027 - RNA, 25 nt, Artificial Sequence
  Description of Artificial Sequence: Synthetic oligonucleotide
acugcagggcugccagcguaucgua

SEQ ID NO: 58028 - RNA, 25 nt, Artificial Sequence
  Description of Artificial Sequence: Synthetic oligonucleotide
agaggacuggcagaaaauccuuaug

SEQ ID NO: 58029 - RNA, 25 nt, Artificial Sequence
  Description of Artificial Sequence: Synthetic oligonucleotide
ggugcggucccuuguggucagcccu

SEQ ID NO: 58030 - RNA, 25 nt, Artificial Sequence
  Description of Artificial Sequence: Synthetic oligonucleotide
ucaugaagacaugagaaccuggcuc

SEQ ID NO: 58031 - RNA, 25 nt, Artificial Sequence
  Description of Artificial Sequence: Synthetic oligonucleotide
caaguaugcaagccugugcggcaag

SEQ ID NO: 58032 - RNA, 25 nt, Artificial Sequence
  Description of Artificial Sequence: Synthetic oligonucleotide
gaguggcaggcuggcucuugcucau

SEQ ID NO: 58033 - RNA, 25 nt, Artificial Sequence
  Description of Artificial Sequence: Synthetic oligonucleotide
uaaaacuuuaguguugcuccuggga

SEQ ID NO: 58034 - RNA, 25 nt, Artificial Sequence
  Description of Artificial Sequence: Synthetic oligonucleotide
aguugauccgucucggcaacuugac

SEQ ID NO: 58035 - RNA, 25 nt, Artificial Sequence
  Description of Artificial Sequence: Synthetic oligonucleotide
ccauccucugccaacaguucacccu

SEQ ID NO: 58036 - RNA, 25 nt, Artificial Sequence
  Description of Artificial Sequence: Synthetic oligonucleotide
ucaggugaccuaugccuacaugaaa

SEQ ID NO: 58037 - RNA, 25 nt, Artificial Sequence
  Description of Artificial Sequence: Synthetic oligonucleotide
aaacauguggaagagugcccgcaag

SEQ ID NO: 58038 - RNA, 25 nt, Artificial Sequence
  Description of Artificial Sequence: Synthetic oligonucleotide
gaucgaugccuuccagcacaugcag

SEQ ID NO: 58039 - RNA, 25 nt, Artificial Sequence
  Description of Artificial Sequence: Synthetic oligonucleotide
gcauuuuguccagaccaugcagcaa

SEQ ID NO: 58040 - RNA, 25 nt, Artificial Sequence
  Description of Artificial Sequence: Synthetic oligonucleotide
acaggcccagcaugccaucgcuacu

SEQ ID NO: 58041 - RNA, 25 nt, Artificial Sequence
  Description of Artificial Sequence: Synthetic oligonucleotide
ugaggaccagcagcauaagcaggaa

SEQ ID NO: 58042 - RNA, 25 nt, Artificial Sequence
  Description of Artificial Sequence: Synthetic oligonucleotide
acugcacaagcucauggcccgaugc

SEQ ID NO: 58043 - RNA, 25 nt, Artificial Sequence
  Description of Artificial Sequence: Synthetic oligonucleotide
cuuccugaaacuuggagaguggcag

SEQ ID NO: 58044 - RNA, 25 nt, Artificial Sequence
  Description of Artificial Sequence: Synthetic oligonucleotide
gcugaaucuacagggcaucaaugag

SEQ ID NO: 58045 - RNA, 25 nt, Artificial Sequence
  Description of Artificial Sequence: Synthetic oligonucleotide
gagcacaauccccaaagugcugcag

SEQ ID NO: 58046 - RNA, 25 nt, Artificial Sequence
  Description of Artificial Sequence: Synthetic oligonucleotide
guacuacagcgccgccacagagcac

SEQ ID NO: 58047 - RNA, 25 nt, Artificial Sequence
  Description of Artificial Sequence: Synthetic oligonucleotide
cgaccgcagcugguacaaggccugg

SEQ ID NO: 58048 - RNA, 25 nt, Artificial Sequence
  Description of Artificial Sequence: Synthetic oligonucleotide
gcaugcgugggcagugaugaacuuc

SEQ ID NO: 58049 - RNA, 25 nt, Artificial Sequence
  Description of Artificial Sequence: Synthetic oligonucleotide
cgaagcugugcuacacuacaaacau

SEQ ID NO: 58050 - RNA, 25 nt, Artificial Sequence
  Description of Artificial Sequence: Synthetic oligonucleotide
ucagaaccaagcccgcgaugagaag

SEQ ID NO: 58051 - RNA, 25 nt, Artificial Sequence
  Description of Artificial Sequence: Synthetic oligonucleotide
gaagaaacugcgucaugccagcggg

SEQ ID NO: 58052 - RNA, 25 nt, Artificial Sequence
  Description of Artificial Sequence: Synthetic oligonucleotide
ggccaacaucaccaacgccaccacu

SEQ ID NO: 58053 - RNA, 25 nt, Artificial Sequence
  Description of Artificial Sequence: Synthetic oligonucleotide
ugccgccaccacggccgccacugcc

SEQ ID NO: 58054 - RNA, 25 nt, Artificial Sequence
  Description of Artificial Sequence: Synthetic oligonucleotide
caccaccacugccagcaccgagggc

SEQ ID NO: 58055 - RNA, 25 nt, Artificial Sequence
  Description of Artificial Sequence: Synthetic oligonucleotide
cagcaacagugagagcgaggccgag

SEQ ID NO: 58056 - RNA, 25 nt, Artificial Sequence
  Description of Artificial Sequence: Synthetic oligonucleotide
gagcaccgagaacagccccacccca

SEQ ID NO: 58057 - RNA, 25 nt, Artificial Sequence
  Description of Artificial Sequence: Synthetic oligonucleotide
aucgccgcugcagaagaaggucacu

SEQ ID NO: 58058 - RNA, 25 nt, Artificial Sequence
  Description of Artificial Sequence: Synthetic oligonucleotide
ugaggaucuguccaaaacccuccug

SEQ ID NO: 58059 - RNA, 25 nt, Artificial Sequence
  Description of Artificial Sequence: Synthetic oligonucleotide
gauguacacggugccugccguccag

SEQ ID NO: 58060 - RNA, 25 nt, Artificial Sequence
  Description of Artificial Sequence: Synthetic oligonucleotide
gggcuucuuccguuccaucuccuug

SEQ ID NO: 58061 - RNA, 25 nt, Artificial Sequence
  Description of Artificial Sequence: Synthetic oligonucleotide
gucacgaggcaacaaccuccaggau

SEQ ID NO: 58062 - RNA, 25 nt, Artificial Sequence
  Description of Artificial Sequence: Synthetic oligonucleotide
uacacucagaguucucaccuuaugg

SEQ ID NO: 58063 - RNA, 25 nt, Artificial Sequence
  Description of Artificial Sequence: Synthetic oligonucleotide
guuugauuauggucacuggccagau

SEQ ID NO: 58064 - RNA, 25 nt, Artificial Sequence
  Description of Artificial Sequence: Synthetic oligonucleotide
ugucaaugaggccuuaguggagggg

SEQ ID NO: 58065 - RNA, 25 nt, Artificial Sequence
  Description of Artificial Sequence: Synthetic oligonucleotide
ggugaaagccauccagauugauacc

SEQ ID NO: 58066 - RNA, 25 nt, Artificial Sequence
  Description of Artificial Sequence: Synthetic oligonucleotide
cuggcuacagguuauaccucagcuc

SEQ ID NO: 58067 - RNA, 25 nt, Artificial Sequence
  Description of Artificial Sequence: Synthetic oligonucleotide
cauugcaagaauugauacgcccaga

SEQ ID NO: 58068 - RNA, 25 nt, Artificial Sequence
  Description of Artificial Sequence: Synthetic oligonucleotide
acccuuggugggacgucucauucac

SEQ ID NO: 58069 - RNA, 25 nt, Artificial Sequence
  Description of Artificial Sequence: Synthetic oligonucleotide
ccagcuucucacagacauuggucgg

SEQ ID NO: 58070 - RNA, 25 nt, Artificial Sequence
  Description of Artificial Sequence: Synthetic oligonucleotide
guaccacccccaggcccucaucuac

SEQ ID NO: 58071 - RNA, 25 nt, Artificial Sequence
  Description of Artificial Sequence: Synthetic oligonucleotide
cccacugacaguggcuucuaagucu

SEQ ID NO: 58072 - RNA, 25 nt, Artificial Sequence
  Description of Artificial Sequence: Synthetic oligonucleotide
uaccacgacagcccggcacaaugca

SEQ ID NO: 58073 - RNA, 25 nt, Artificial Sequence
  Description of Artificial Sequence: Synthetic oligonucleotide
agccaacaagauucugaagaacaug

SEQ ID NO: 58074 - RNA, 25 nt, Artificial Sequence
  Description of Artificial Sequence: Synthetic oligonucleotide
gugugagcacagcaacacccugguc

SEQ ID NO: 58075 - RNA, 25 nt, Artificial Sequence
  Description of Artificial Sequence: Synthetic oligonucleotide
ccagcaggccaugauggugagcgag

SEQ ID NO: 58076 - RNA, 25 nt, Artificial Sequence
  Description of Artificial Sequence: Synthetic oligonucleotide
ggagcugauccgaguggccauccuc

SEQ ID NO: 58077 - RNA, 25 nt, Artificial Sequence
  Description of Artificial Sequence: Synthetic oligonucleotide
cuggcaugagauguggcaugaaggc

SEQ ID NO: 58078 - RNA, 25 nt, Artificial Sequence
  Description of Artificial Sequence: Synthetic oligonucleotide
ccuggaagaggcaucucguuuguac

SEQ ID NO: 58079 - RNA, 25 nt, Artificial Sequence
  Description of Artificial Sequence: Synthetic oligonucleotide
cuuuggggaaaggaacgugaaaggc

SEQ ID NO: 58080 - RNA, 25 nt, Artificial Sequence
  Description of Artificial Sequence: Synthetic oligonucleotide
cauguuugaggugcuggagcccuug

SEQ ID NO: 58081 - RNA, 25 nt, Artificial Sequence
  Description of Artificial Sequence: Synthetic oligonucleotide
gcaugcuaugauggaacggggcccc

SEQ ID NO: 58082 - RNA, 25 nt, Artificial Sequence
  Description of Artificial Sequence: Synthetic oligonucleotide
ccagacucugaaggaaacauccuuu

SEQ ID NO: 58083 - RNA, 25 nt, Artificial Sequence
  Description of Artificial Sequence: Synthetic oligonucleotide
uaaucaggccuauggucgagauuua

SEQ ID NO: 58084 - RNA, 25 nt, Artificial Sequence
  Description of Artificial Sequence: Synthetic oligonucleotide
aauggaggcccaagaguggugcagg

SEQ ID NO: 58085 - RNA, 25 nt, Artificial Sequence
  Description of Artificial Sequence: Synthetic oligonucleotide
gaaguacaugaaaucagggaauguc

SEQ ID NO: 58086 - RNA, 25 nt, Artificial Sequence
  Description of Artificial Sequence: Synthetic oligonucleotide
caaggaccucacccaagccugggac

SEQ ID NO: 58087 - RNA, 25 nt, Artificial Sequence
  Description of Artificial Sequence: Synthetic oligonucleotide
ccucuauuaucauguguuccgacga

SEQ ID NO: 58088 - RNA, 25 nt, Artificial Sequence
  Description of Artificial Sequence: Synthetic oligonucleotide
aaucucaaagcagcugccucagcuc

SEQ ID NO: 58089 - RNA, 25 nt, Artificial Sequence
  Description of Artificial Sequence: Synthetic oligonucleotide
cacauccuuagagcugcaauauguu

SEQ ID NO: 58090 - RNA, 25 nt, Artificial Sequence
  Description of Artificial Sequence: Synthetic oligonucleotide
uuccccaaaacuucugaugugccgg

SEQ ID NO: 58091 - RNA, 25 nt, Artificial Sequence
  Description of Artificial Sequence: Synthetic oligonucleotide
ggaccuugaauuggcugugccagga

SEQ ID NO: 58092 - RNA, 25 nt, Artificial Sequence
  Description of Artificial Sequence: Synthetic oligonucleotide
aacauaugaccccaaccagccaauc

SEQ ID NO: 58093 - RNA, 25 nt, Artificial Sequence
  Description of Artificial Sequence: Synthetic oligonucleotide
cauucgcauucaguccauagcaccg

SEQ ID NO: 58094 - RNA, 25 nt, Artificial Sequence
  Description of Artificial Sequence: Synthetic oligonucleotide
gucuuugcaagucaucacauccaag

SEQ ID NO: 58095 - RNA, 25 nt, Artificial Sequence
  Description of Artificial Sequence: Synthetic oligonucleotide
gcagaggccccggaaauugacacuu

SEQ ID NO: 58096 - RNA, 25 nt, Artificial Sequence
  Description of Artificial Sequence: Synthetic oligonucleotide
uaugggcagcaacggacaugaguuu

SEQ ID NO: 58097 - RNA, 25 nt, Artificial Sequence
  Description of Artificial Sequence: Synthetic oligonucleotide
uguuuuccuucuaaaaggccaugaa

SEQ ID NO: 58098 - RNA, 25 nt, Artificial Sequence
  Description of Artificial Sequence: Synthetic oligonucleotide
agaucugcgccaggaugagcgugug

SEQ ID NO: 58099 - RNA, 25 nt, Artificial Sequence
  Description of Artificial Sequence: Synthetic oligonucleotide
gaugcagcucuucggccugguuaac

SEQ ID NO: 58100 - RNA, 25 nt, Artificial Sequence
  Description of Artificial Sequence: Synthetic oligonucleotide
cacccuucuggccaaugacccaaca

SEQ ID NO: 58101 - RNA, 25 nt, Artificial Sequence
  Description of Artificial Sequence: Synthetic oligonucleotide
aucucuucggaaaaaccucagcauc

SEQ ID NO: 58102 - RNA, 25 nt, Artificial Sequence
  Description of Artificial Sequence: Synthetic oligonucleotide
ccagagauacgcugucaucccuuua

SEQ ID NO: 58103 - RNA, 25 nt, Artificial Sequence
  Description of Artificial Sequence: Synthetic oligonucleotide
aucgaccaacucgggccucauuggc

SEQ ID NO: 58104 - RNA, 25 nt, Artificial Sequence
  Description of Artificial Sequence: Synthetic oligonucleotide
cuggguuccccacugugacacacug

SEQ ID NO: 58105 - RNA, 25 nt, Artificial Sequence
  Description of Artificial Sequence: Synthetic oligonucleotide
gcacgcccucauccgggacuacagg

SEQ ID NO: 58106 - RNA, 25 nt, Artificial Sequence
  Description of Artificial Sequence: Synthetic oligonucleotide
ggagaagaagaagauccuucucaac

SEQ ID NO: 58107 - RNA, 25 nt, Artificial Sequence
  Description of Artificial Sequence: Synthetic oligonucleotide
caucgagcaucgcaucauguugcgg

SEQ ID NO: 58108 - RNA, 25 nt, Artificial Sequence
  Description of Artificial Sequence: Synthetic oligonucleotide
gauggcuccggacuaugaccacuug

SEQ ID NO: 58109 - RNA, 25 nt, Artificial Sequence
  Description of Artificial Sequence: Synthetic oligonucleotide
gacucugaugcagaagguggaggug

SEQ ID NO: 58110 - RNA, 25 nt, Artificial Sequence
  Description of Artificial Sequence: Synthetic oligonucleotide
guuugagcaugccgucaauaauaca

SEQ ID NO: 58111 - RNA, 25 nt, Artificial Sequence
  Description of Artificial Sequence: Synthetic oligonucleotide
agcuggggacgaccuggccaagcug

SEQ ID NO: 58112 - RNA, 25 nt, Artificial Sequence
  Description of Artificial Sequence: Synthetic oligonucleotide
gcuguggcugaaaagccccagcucc

SEQ ID NO: 58113 - RNA, 25 nt, Artificial Sequence
  Description of Artificial Sequence: Synthetic oligonucleotide
cgaggugugguuugaccgaagaacc

SEQ ID NO: 58114 - RNA, 25 nt, Artificial Sequence
  Description of Artificial Sequence: Synthetic oligonucleotide
caauuauacccguucuuuagcgguc

SEQ ID NO: 58115 - RNA, 25 nt, Artificial Sequence
  Description of Artificial Sequence: Synthetic oligonucleotide
caugucaaugguuggguauauuuua

SEQ ID NO: 58116 - RNA, 25 nt, Artificial Sequence
  Description of Artificial Sequence: Synthetic oligonucleotide
aggccugggagauagacacccaucc

SEQ ID NO: 58117 - RNA, 25 nt, Artificial Sequence
  Description of Artificial Sequence: Synthetic oligonucleotide
caaccugaugcuggaccgucugagu

SEQ ID NO: 58118 - RNA, 25 nt, Artificial Sequence
  Description of Artificial Sequence: Synthetic oligonucleotide
ugggaagauccugcacauugacuuu

SEQ ID NO: 58119 - RNA, 25 nt, Artificial Sequence
  Description of Artificial Sequence: Synthetic oligonucleotide
uggggacugcuuugagguugcuaug

SEQ ID NO: 58120 - RNA, 25 nt, Artificial Sequence
  Description of Artificial Sequence: Synthetic oligonucleotide
gacccgagagaaguuuccagagaag

SEQ ID NO: 58121 - RNA, 25 nt, Artificial Sequence
  Description of Artificial Sequence: Synthetic oligonucleotide
gauuccauuuagacuaacaagaaug

SEQ ID NO: 58122 - RNA, 25 nt, Artificial Sequence
  Description of Artificial Sequence: Synthetic oligonucleotide
guugaccaaugcuauggagguuaca

SEQ ID NO: 58123 - RNA, 25 nt, Artificial Sequence
  Description of Artificial Sequence: Synthetic oligonucleotide
aggccuggauggcaacuacagaauc

SEQ ID NO: 58124 - RNA, 25 nt, Artificial Sequence
  Description of Artificial Sequence: Synthetic oligonucleotide
cacaugccacacagugauggaggug

SEQ ID NO: 58125 - RNA, 25 nt, Artificial Sequence
  Description of Artificial Sequence: Synthetic oligonucleotide
gcugcgagagcacaaggacaguguc

SEQ ID NO: 58126 - RNA, 25 nt, Artificial Sequence
  Description of Artificial Sequence: Synthetic oligonucleotide
cauggccgugcuggaagccuuuguc

SEQ ID NO: 58127 - RNA, 25 nt, Artificial Sequence
  Description of Artificial Sequence: Synthetic oligonucleotide
cuaugaccccuugcugaacuggagg

SEQ ID NO: 58128 - RNA, 25 nt, Artificial Sequence
  Description of Artificial Sequence: Synthetic oligonucleotide
gcugauggacacaaauaccaaaggc

SEQ ID NO: 58129 - RNA, 25 nt, Artificial Sequence
  Description of Artificial Sequence: Synthetic oligonucleotide
caacaagcgaucccgaacgaggacg

SEQ ID NO: 58130 - RNA, 25 nt, Artificial Sequence
  Description of Artificial Sequence: Synthetic oligonucleotide
ggauuccuacucugcuggccaguca

SEQ ID NO: 58131 - RNA, 25 nt, Artificial Sequence
  Description of Artificial Sequence: Synthetic oligonucleotide
agucgaaauuuuggacgguguggaa

SEQ ID NO: 58132 - RNA, 25 nt, Artificial Sequence
  Description of Artificial Sequence: Synthetic oligonucleotide
acuuggagagccagcccauaagaaa

SEQ ID NO: 58133 - RNA, 25 nt, Artificial Sequence
  Description of Artificial Sequence: Synthetic oligonucleotide
aacggggaccacagugccagaaucu

SEQ ID NO: 58134 - RNA, 25 nt, Artificial Sequence
  Description of Artificial Sequence: Synthetic oligonucleotide
uauucauucuuucauuggagacggu

SEQ ID NO: 58135 - RNA, 25 nt, Artificial Sequence
  Description of Artificial Sequence: Synthetic oligonucleotide
uuuggugaaaccagaggcccuaaau

SEQ ID NO: 58136 - RNA, 25 nt, Artificial Sequence
  Description of Artificial Sequence: Synthetic oligonucleotide
uaagaaagcuauccagauuauuaac

SEQ ID NO: 58137 - RNA, 25 nt, Artificial Sequence
  Description of Artificial Sequence: Synthetic oligonucleotide
caggguucgagauaagcucacuggu

SEQ ID NO: 58138 - RNA, 25 nt, Artificial Sequence
  Description of Artificial Sequence: Synthetic oligonucleotide
ucgggacuucucucaugaugacacu

SEQ ID NO: 58139 - RNA, 25 nt, Artificial Sequence
  Description of Artificial Sequence: Synthetic oligonucleotide
uuuggauguuccaacgcaaguugag

SEQ ID NO: 58140 - RNA, 25 nt, Artificial Sequence
  Description of Artificial Sequence: Synthetic oligonucleotide
gcugcucaucaaacaagcgacaucc

SEQ ID NO: 58141 - RNA, 25 nt, Artificial Sequence
  Description of Artificial Sequence: Synthetic oligonucleotide
ccaugaaaaccucugccagugcuau

SEQ ID NO: 58142 - RNA, 25 nt, Artificial Sequence
  Description of Artificial Sequence: Synthetic oligonucleotide
uauuggcuggugcccuuucugguaa

SEQ ID NO: 58143 - RNA, 25 nt, Artificial Sequence
  Description of Artificial Sequence: Synthetic oligonucleotide
acuggaggcccagaugugcccauca

SEQ ID NO: 58144 - RNA, 25 nt, Artificial Sequence
  Description of Artificial Sequence: Synthetic oligonucleotide
acguuuuuucugaggcuuuuguacu

SEQ ID NO: 58145 - RNA, 25 nt, Artificial Sequence
  Description of Artificial Sequence: Synthetic oligonucleotide
uuuaguaaaugcuuccacuaaacug

SEQ ID NO: 58146 - RNA, 25 nt, Artificial Sequence
  Description of Artificial Sequence: Synthetic oligonucleotide
gaaaccauggugagaaaguuugacu

SEQ ID NO: 58147 - RNA, 25 nt, Artificial Sequence
  Description of Artificial Sequence: Synthetic oligonucleotide
uuuguuaaauauuuugaaauguaaa

SEQ ID NO: 58148 - RNA, 25 nt, Artificial Sequence
  Description of Artificial Sequence: Synthetic oligonucleotide
augaaaagaacuacuguauauuaaa

SEQ ID NO: 58149 - RNA, 25 nt, Artificial Sequence
  Description of Artificial Sequence: Synthetic oligonucleotide
aaguugguuugaaccaacuuucuag

SEQ ID NO: 58150 - RNA, 25 nt, Artificial Sequence
  Description of Artificial Sequence: Synthetic oligonucleotide
gcugcuguugaagaauauauuguca

SEQ ID NO: 58151 - RNA, 25 nt, Artificial Sequence
  Description of Artificial Sequence: Synthetic oligonucleotide
agaaacacaaggcuugauuugguuc

SEQ ID NO: 58152 - RNA, 25 nt, Artificial Sequence
  Description of Artificial Sequence: Synthetic oligonucleotide
cccaggacagugaaacaauaguaau

SEQ ID NO: 58153 - RNA, 25 nt, Artificial Sequence
  Description of Artificial Sequence: Synthetic oligonucleotide
uaccacguaaaucaagccauucauu

SEQ ID NO: 58154 - RNA, 25 nt, Artificial Sequence
  Description of Artificial Sequence: Synthetic oligonucleotide
uuuggggaacagaagauccauaacu

SEQ ID NO: 58155 - RNA, 25 nt, Artificial Sequence
  Description of Artificial Sequence: Synthetic oligonucleotide
uuuagaaauacggguuuugacuuaa

SEQ ID NO: 58156 - RNA, 25 nt, Artificial Sequence
  Description of Artificial Sequence: Synthetic oligonucleotide
acucacaagagaacucaucauaagu

SEQ ID NO: 58157 - RNA, 25 nt, Artificial Sequence
  Description of Artificial Sequence: Synthetic oligonucleotide
uacuugcugauggaagaaugaccua

SEQ ID NO: 58158 - RNA, 25 nt, Artificial Sequence
  Description of Artificial Sequence: Synthetic oligonucleotide
aguugcuccucucaacauggguaca

SEQ ID NO: 58159 - RNA, 25 nt, Artificial Sequence
  Description of Artificial Sequence: Synthetic oligonucleotide
agcaaacucagcacagccaagaagc

SEQ ID NO: 58160 - RNA, 25 nt, Artificial Sequence
  Description of Artificial Sequence: Synthetic oligonucleotide
ccucaggucguggagaacauggauu

SEQ ID NO: 58161 - RNA, 25 nt, Artificial Sequence
  Description of Artificial Sequence: Synthetic oligonucleotide
uaggauccuagacuguaaagacaca

SEQ ID NO: 58162 - RNA, 25 nt, Artificial Sequence
  Description of Artificial Sequence: Synthetic oligonucleotide
agaagaugcugaccucaccccugcc

SEQ ID NO: 58163 - RNA, 25 nt, Artificial Sequence
  Description of Artificial Sequence: Synthetic oligonucleotide
caccuaucccaagaccucacugguc

SEQ ID NO: 58164 - RNA, 25 nt, Artificial Sequence
  Description of Artificial Sequence: Synthetic oligonucleotide
cuguggacagcagcagaaauguuug

SEQ ID NO: 58165 - RNA, 25 nt, Artificial Sequence
  Description of Artificial Sequence: Synthetic oligonucleotide
gcaagauaggccaaaaugaguacaa

SEQ ID NO: 58166 - RNA, 25 nt, Artificial Sequence
  Description of Artificial Sequence: Synthetic oligonucleotide
aaaggucugucuuccaucagaccca

SEQ ID NO: 58167 - RNA, 25 nt, Artificial Sequence
  Description of Artificial Sequence: Synthetic oligonucleotide
agugaugcugcgacucacacgcuuc

SEQ ID NO: 58168 - RNA, 25 nt, Artificial Sequence
  Description of Artificial Sequence: Synthetic oligonucleotide
caauucaagaccugaccgcuaguag

SEQ ID NO: 58169 - RNA, 25 nt, Artificial Sequence
  Description of Artificial Sequence: Synthetic oligonucleotide
gggagguuuauucagaucgcuggca

SEQ ID NO: 58170 - RNA, 25 nt, Artificial Sequence
  Description of Artificial Sequence: Synthetic oligonucleotide
agccucggcugagcagaugcacaga

SEQ ID NO: 58171 - RNA, 25 nt, Artificial Sequence
  Description of Artificial Sequence: Synthetic oligonucleotide
aggggaucacugugcagugggacca

SEQ ID NO: 58172 - RNA, 25 nt, Artificial Sequence
  Description of Artificial Sequence: Synthetic oligonucleotide
acccucacuggccuucugcagcagg

SEQ ID NO: 58173 - RNA, 25 nt, Artificial Sequence
  Description of Artificial Sequence: Synthetic oligonucleotide
gguucugggauguuuucagugguca

SEQ ID NO: 58174 - RNA, 25 nt, Artificial Sequence
  Description of Artificial Sequence: Synthetic oligonucleotide
aaaauacucuguuuagagcaagggc

SEQ ID NO: 58175 - RNA, 25 nt, Artificial Sequence
  Description of Artificial Sequence: Synthetic oligonucleotide
cucagaaaacagaaauacugucaug

SEQ ID NO: 58176 - RNA, 25 nt, Artificial Sequence
  Description of Artificial Sequence: Synthetic oligonucleotide
ggaggugcugaacacagggaagguc

SEQ ID NO: 58177 - RNA, 25 nt, Artificial Sequence
  Description of Artificial Sequence: Synthetic oligonucleotide
cugguacauauuggaaauuaugagc

SEQ ID NO: 58178 - RNA, 25 nt, Artificial Sequence
  Description of Artificial Sequence: Synthetic oligonucleotide
cagaacaaauacucaacuaaaugca

SEQ ID NO: 58179 - RNA, 25 nt, Artificial Sequence
  Description of Artificial Sequence: Synthetic oligonucleotide
acaaaguauaaaguguagccauguc

SEQ ID NO: 58180 - RNA, 25 nt, Artificial Sequence
  Description of Artificial Sequence: Synthetic oligonucleotide
cuagacaccauguuguaucagaaua

SEQ ID NO: 58181 - RNA, 25 nt, Artificial Sequence
  Description of Artificial Sequence: Synthetic oligonucleotide
aauuuuugugccaauaaaugacauc

SEQ ID NO: 58182 - RNA, 25 nt, Artificial Sequence
  Description of Artificial Sequence: Synthetic oligonucleotide
aaaugacaucagaauuuuaaacaua

SEQ ID NO: 58183 - DNA, 21 bp, Artificial Sequence
  Description of Artificial Sequence: Synthetic oligonucleotide
  Description of Combined DNA/RNA Molecule: Synthetic oligonucleotide
cuacacaaaucagcgauuutt

SEQ ID NO: 58184 - DNA, 21 bp, Artificial Sequence
  Description of Artificial Sequence: Synthetic oligonucleotide
  Description of Combined DNA/RNA Molecule: Synthetic oligonucleotide
aaaucgcugauuuguguagtt

SEQ ID NO: 58185 - DNA, 25 bp, Artificial Sequence
  Description of Artificial Sequence: Synthetic oligonucleotide
  Description of Combined DNA/RNA Molecule: Synthetic oligonucleotide
cuacacaaaucagcgauuuccaugt

SEQ ID NO: 58186 - RNA, 27 nt, Artificial Sequence
  Description of Artificial Sequence: Synthetic oligonucleotide
acauggaaaucgcugauuuguguaguc

SEQ ID NO: 58187 - RNA, 13 nt, Artificial Sequence
  Description of Artificial Sequence: Synthetic oligonucleotide
cuacacaaaucag

SEQ ID NO: 58188 - DNA, 11 bp, Artificial Sequence
  Description of Artificial Sequence: Synthetic oligonucleotide
  Description of Combined DNA/RNA Molecule: Synthetic oligonucleotide
gauuuccaugt

SEQ ID NO: 58189 - DNA, 21 bp, Artificial Sequence
  Description of Artificial Sequence: Synthetic oligonucleotide
  Description of Combined DNA/RNA Molecule: Synthetic oligonucleotide
ggaucuuauuucuucggagtt

SEQ ID NO: 58190 - DNA, 21 bp, Artificial Sequence
  Description of Artificial Sequence: Synthetic oligonucleotide
  Description of Combined DNA/RNA Molecule: Synthetic oligonucleotide
cuccgaagaaauaagaucctt

SEQ ID NO: 58191 - RNA, 11 nt, Artificial Sequence
  Description of Artificial Sequence: Synthetic oligonucleotide
ggaucuuauuu

SEQ ID NO: 58192 - DNA, 10 bp, Artificial Sequence
  Description of Artificial Sequence: Synthetic oligonucleotide
  Description of Combined DNA/RNA Molecule: Synthetic oligonucleotide
cuucggagtt

SEQ ID NO: 58193 - RNA, 27 nt, Artificial Sequence
  Description of Artificial Sequence: Synthetic oligonucleotide
cauugucuccgaagaaauaagauccuu

SEQ ID NO: 58194 - RNA, 8 nt, Artificial Sequence
  Description of Artificial Sequence: Synthetic oligonucleotide
  modified_base (2): LNA-G
ggaucuua

SEQ ID NO: 58195 - DNA, 17 bp, Artificial Sequence
  Description of Artificial Sequence: Synthetic oligonucleotide
  Description of Combined DNA/RNA Molecule: Synthetic oligonucleotide
uuucuucggagacaatg

SEQ ID NO: 58196 - DNA, 16 bp, Artificial Sequence
  Description of Artificial Sequence: Synthetic oligonucleotide
  Description of Combined DNA/RNA Molecule: Synthetic oligonucleotide
uucuucggagacaatg

SEQ ID NO: 58197 - DNA, 15 bp, Artificial Sequence
  Description of Artificial Sequence: Synthetic oligonucleotide
  Description of Combined DNA/RNA Molecule: Synthetic oligonucleotide
ucuucggagacaatg

SEQ ID NO: 58198 - DNA, 14 bp, Artificial Sequence
  Description of Artificial Sequence: Synthetic oligonucleotide
  Description of Combined DNA/RNA Molecule: Synthetic oligonucleotide
cuucggagacaatg

SEQ ID NO: 58199 - DNA, 13 bp, Artificial Sequence
  Description of Artificial Sequence: Synthetic oligonucleotide
  Description of Combined DNA/RNA Molecule: Synthetic oligonucleotide
uucggagacaatg

SEQ ID NO: 58200 - DNA, 12 bp, Artificial Sequence
  Description of Artificial Sequence: Synthetic oligonucleotide
  Description of Combined DNA/RNA Molecule: Synthetic oligonucleotide
ucggagacaatg

SEQ ID NO: 58201 - DNA, 11 bp, Artificial Sequence
  Description of Artificial Sequence: Synthetic oligonucleotide
  Description of Combined DNA/RNA Molecule: Synthetic oligonucleotide
cggagacaatg

SEQ ID NO: 58202 - RNA, 9 nt, Artificial Sequence
  Description of Artificial Sequence: Synthetic oligonucleotide
  modified_base (2): LNA-G
ggaucuuau

SEQ ID NO: 58203 - RNA, 10 nt, Artificial Sequence
  Description of Artificial Sequence: Synthetic oligonucleotide
  modified_base (2): LNA-G
ggaucuuauu

SEQ ID NO: 58204 - RNA, 11 nt, Artificial Sequence
  Description of Artificial Sequence: Synthetic oligonucleotide
  modified_base (2): LNA-G
ggaucuuauuu

SEQ ID NO: 58205 - RNA, 12 nt, Artificial Sequence
  Description of Artificial Sequence: Synthetic oligonucleotide
  modified_base (2): LNA-G
ggaucuuauuuc

SEQ ID NO: 58206 - RNA, 8 nt, Artificial Sequence
  Description of Artificial Sequence: Synthetic oligonucleotide
  modified_base (3): LNA-A
cuacacaa

SEQ ID NO: 58207 - DNA, 13 bp, Artificial Sequence
  Description of Artificial Sequence: Synthetic oligonucleotide
  Description of Combined DNA/RNA Molecule: Synthetic oligonucleotide
  modified_base (8): LNA-A
aucagcgauuutt

SEQ ID NO: 58208 - DNA, 12 bp, Artificial Sequence
  Description of Artificial Sequence: Synthetic oligonucleotide
  Description of Combined DNA/RNA Molecule: Synthetic oligonucleotide
  modified_base (7): LNA-A
ucagcgauuutt

SEQ ID NO: 58209 - DNA, 11 bp, Artificial Sequence
  Description of Artificial Sequence: Synthetic oligonucleotide
  Description of Combined DNA/RNA Molecule: Synthetic oligonucleotide
  modified_base (6): LNA-A
cagcgauuutt

SEQ ID NO: 58210 - DNA, 10 bp, Artificial Sequence
  Description of Artificial Sequence: Synthetic oligonucleotide
  Description of Combined DNA/RNA Molecule: Synthetic oligonucleotide
  modified_base (5): LNA-A
agcgauuutt

SEQ ID NO: 58211 - DNA, 9 bp, Artificial Sequence
  Description of Artificial Sequence: Synthetic oligonucleotide
  Description of Combined DNA/RNA Molecule: Synthetic oligonucleotide
  modified_base (4): LNA-A
gcgauuutt

SEQ ID NO: 58212 - DNA, 8 bp, Artificial Sequence
  Description of Artificial Sequence: Synthetic oligonucleotide
  Description of Combined DNA/RNA Molecule: Synthetic oligonucleotide
  modified_base (3): LNA-A
cgauuutt

SEQ ID NO: 58213 - DNA, 7 bp, Artificial Sequence
  Description of Artificial Sequence: Synthetic oligonucleotide
  Description of Combined DNA/RNA Molecule: Synthetic oligonucleotide
  modified_base (2): LNA-A
gauuutt

SEQ ID NO: 58214 - RNA, 9 nt, Artificial Sequence
  Description of Artificial Sequence: Synthetic oligonucleotide
  modified_base (3): LNA-A
cuacacaaa

SEQ ID NO: 58215 - RNA, 10 nt, Artificial Sequence
  Description of Artificial Sequence: Synthetic oligonucleotide
  modified_base (3): LNA-A
cuacacaaau

SEQ ID NO: 58216 - RNA, 11 nt, Artificial Sequence
  Description of Artificial Sequence: Synthetic oligonucleotide
  modified_base (3): LNA-A
cuacacaaauc

SEQ ID NO: 58217 - RNA, 12 nt, Artificial Sequence
  Description of Artificial Sequence: Synthetic oligonucleotide
  modified_base (3): LNA-A
cuacacaaauca

SEQ ID NO: 58218 - RNA, 13 nt, Artificial Sequence
  Description of Artificial Sequence: Synthetic oligonucleotide
  modified_base (3): LNA-A
cuacacaaaucag

SEQ ID NO: 58219 - RNA, 14 nt, Artificial Sequence
  Description of Artificial Sequence: Synthetic oligonucleotide
  modified_base (3): LNA-A
cuacacaaaucagc

SEQ ID NO: 58220 - RNA, 13 nt, Artificial Sequence
  Description of Artificial Sequence: Synthetic oligonucleotide
  modified_base (2): LNA-G
ggaucuuauuucu

SEQ ID NO: 58221 - RNA, 14 nt, Artificial Sequence
  Description of Artificial Sequence: Synthetic oligonucleotide
  modified_base (2): LNA-G
ggaucuuauuucuu

SEQ ID NO: 58222 - RNA, 8 nt, Artificial Sequence
  Description of Artificial Sequence: Synthetic oligonucleotide
  modified_base (2): LNA-G
  modified_base (8): LNA-A
ggaucuua

SEQ ID NO: 58223 - RNA, 9 nt, Artificial Sequence
  Description of Artificial Sequence: Synthetic oligonucleotide
  modified_base (2): LNA-G
  modified_base (9): LNA-U
ggaucuuau

SEQ ID NO: 58224 - RNA, 10 nt, Artificial Sequence
  Description of Artificial Sequence: Synthetic oligonucleotide
  modified_base (2): LNA-G
  modified_base (10): LNA-U
ggaucuuauu

SEQ ID NO: 58225 - RNA, 11 nt, Artificial Sequence
  Description of Artificial Sequence: Synthetic oligonucleotide
  modified_base (2): LNA-G
  modified_base (11): LNA-U
ggaucuuauuu

SEQ ID NO: 58226 - RNA, 12 nt, Artificial Sequence
  Description of Artificial Sequence: Synthetic oligonucleotide
  modified_base (2): LNA-G
  modified_base (12): LNA-C
ggaucuuauuuc

SEQ ID NO: 58227 - RNA, 13 nt, Artificial Sequence
  Description of Artificial Sequence: Synthetic oligonucleotide
  modified_base (2): LNA-G
  modified_base (13): LNA-U
ggaucuuauuucu

SEQ ID NO: 58228 - RNA, 14 nt, Artificial Sequence
  Description of Artificial Sequence: Synthetic oligonucleotide
  modified_base (2): LNA-G
  modified_base (14): LNA-U
ggaucuuauuucuu

SEQ ID NO: 58229 - DNA, 13 bp, Artificial Sequence
  Description of Artificial Sequence: Synthetic oligonucleotide
  Description of Combined DNA/RNA Molecule: Synthetic oligonucleotide
  modified_base (8): LNA-G
uuucuucggagtt

SEQ ID NO: 58230 - DNA, 12 bp, Artificial Sequence
  Description of Artificial Sequence: Synthetic oligonucleotide
  Description of Combined DNA/RNA Molecule: Synthetic oligonucleotide
  modified_base (7): LNA-G
uucuucggagtt

SEQ ID NO: 58231 - DNA, 11 bp, Artificial Sequence
  Description of Artificial Sequence: Synthetic oligonucleotide
  Description of Combined DNA/RNA Molecule: Synthetic oligonucleotide
  modified_base (6): LNA-G
ucuucggagtt

SEQ ID NO: 58232 - DNA, 10 bp, Artificial Sequence
  Description of Artificial Sequence: Synthetic oligonucleotide
  Description of Combined DNA/RNA Molecule: Synthetic oligonucleotide
  modified_base (5): LNA-G
cuucggagtt

SEQ ID NO: 58233 - DNA, 9 bp, Artificial Sequence
  Description of Artificial Sequence: Synthetic oligonucleotide
  Description of Combined DNA/RNA Molecule: Synthetic oligonucleotide
  modified_base (4): LNA-G
uucggagtt

SEQ ID NO: 58234 - DNA, 8 bp, Artificial Sequence
  Description of Artificial Sequence: Synthetic oligonucleotide
  Description of Combined DNA/RNA Molecule: Synthetic oligonucleotide
  modified_base (3): LNA-G
ucggagtt

SEQ ID NO: 58235 - DNA, 7 bp, Artificial Sequence
  Description of Artificial Sequence: Synthetic oligonucleotide
  Description of Combined DNA/RNA Molecule: Synthetic oligonucleotide
  modified_base (2): LNA-G
cggagtt

SEQ ID NO: 58236 - DNA, 13 bp, Artificial Sequence
  Description of Artificial Sequence: Synthetic oligonucleotide
  Description of Combined DNA/RNA Molecule: Synthetic oligonucleotide
  modified_base (1): LNA-U
  modified_base (8): LNA-G
uuucuucggagtt

SEQ ID NO: 58237 - DNA, 12 bp, Artificial Sequence
  Description of Artificial Sequence: Synthetic oligonucleotide
  Description of Combined DNA/RNA Molecule: Synthetic oligonucleotide
  modified_base (1): LNA-U
  modified_base (7): LNA-G
uucuucggagtt

SEQ ID NO: 58238 - DNA, 11 bp, Artificial Sequence
  Description of Artificial Sequence: Synthetic oligonucleotide
  Description of Combined DNA/RNA Molecule: Synthetic oligonucleotide
  modified_base (1): LNA-U
  modified_base (6): LNA-G
ucuucggagtt

SEQ ID NO: 58239 - DNA, 10 bp, Artificial Sequence
  Description of Artificial Sequence: Synthetic oligonucleotide
  Description of Combined DNA/RNA Molecule: Synthetic oligonucleotide
  modified_base (1): LNA-C
  modified_base (5): LNA-G
cuucggagtt

SEQ ID NO: 58240 - DNA, 9 bp, Artificial Sequence
  Description of Artificial Sequence: Synthetic oligonucleotide
  Description of Combined DNA/RNA Molecule: Synthetic oligonucleotide
  modified_base (1): LNA-U
  modified_base (4): LNA-G
uucggagtt

SEQ ID NO: 58241 - DNA, 8 bp, Artificial Sequence
  Description of Artificial Sequence: Synthetic oligonucleotide
  Description of Combined DNA/RNA Molecule: Synthetic oligonucleotide
  modified_base (1): LNA-U
  modified_base (3): LNA-G
ucggagtt

SEQ ID NO: 58242 - DNA, 7 bp, Artificial Sequence
  Description of Artificial Sequence: Synthetic oligonucleotide
  Description of Combined DNA/RNA Molecule: Synthetic oligonucleotide
  modified_base (1): LNA-C
  modified_base (2): LNA-G
cggagtt

SEQ ID NO: 58243 - DNA, 21 bp, Artificial Sequence
  Description of Artificial Sequence: Synthetic oligonucleotide
  Description of Combined DNA/RNA Molecule: Synthetic oligonucleotide
  modified_base (2): LNA-G
  modified_base (16): LNA-G
ggaucuuauuucuucggagtt

SEQ ID NO: 58244 - DNA, 25 bp, Artificial Sequence
  Description of Artificial Sequence: Synthetic oligonucleotide
  Description of Combined DNA/RNA Molecule: Synthetic oligonucleotide
ggaucuuauuucuucggagacaatg

SEQ ID NO: 58245 - RNA, 25 nt, Artificial Sequence
  Description of Artificial Sequence: Synthetic oligonucleotide
uuaagcagaguucaaaagcccuuca

SEQ ID NO: 58246 - RNA, 25 nt, Artificial Sequence
  Description of Artificial Sequence: Synthetic oligonucleotide
uaagcagaguucaaaagcccuucag

SEQ ID NO: 58247 - RNA, 25 nt, Artificial Sequence
  Description of Artificial Sequence: Synthetic oligonucleotide
agcagaguucaaaagcccuucagcg

SEQ ID NO: 58248 - RNA, 25 nt, Artificial Sequence
  Description of Artificial Sequence: Synthetic oligonucleotide
cucagggucugagugaagccgcucg

SEQ ID NO: 58249 - RNA, 25 nt, Artificial Sequence
  Description of Artificial Sequence: Synthetic oligonucleotide
caagcaacuacaucacgccagucaa

SEQ ID NO: 58250 - RNA, 25 nt, Artificial Sequence
  Description of Artificial Sequence: Synthetic oligonucleotide
aucaauggcagcuucuuggugcgug

SEQ ID NO: 58251 - RNA, 25 nt, Artificial Sequence
  Description of Artificial Sequence: Synthetic oligonucleotide
uuccagcccacauuggauucaucag

SEQ ID NO: 58252 - RNA, 25 nt, Artificial Sequence
  Description of Artificial Sequence: Synthetic oligonucleotide
cagcugagaauguggaauaccuaag

SEQ ID NO: 58253 - RNA, 25 nt, Artificial Sequence
  Description of Artificial Sequence: Synthetic oligonucleotide
aacguaucuccuaauuugaggcuca

SEQ ID NO: 58254 - RNA, 25 nt, Artificial Sequence
  Description of Artificial Sequence: Synthetic oligonucleotide
ccuaaaauaauuucucuacaauugg

SEQ ID NO: 58255 - RNA, 25 nt, Artificial Sequence
  Description of Artificial Sequence: Synthetic oligonucleotide
uggaagauucagcuaguuaggagcc

SEQ ID NO: 58256 - RNA, 25 nt, Artificial Sequence
  Description of Artificial Sequence: Synthetic oligonucleotide
uuaaacucuccuagucaauauccac

SEQ ID NO: 58257 - RNA, 25 nt, Artificial Sequence
  Description of Artificial Sequence: Synthetic oligonucleotide
cagccuacaguuauguucagucaca

SEQ ID NO: 58258 - RNA, 25 nt, Artificial Sequence
  Description of Artificial Sequence: Synthetic oligonucleotide
guuauguucagucacacacacauac

SEQ ID NO: 58259 - RNA, 25 nt, Artificial Sequence
  Description of Artificial Sequence: Synthetic oligonucleotide
cacauacaaaauguuccuuuugcuu

SEQ ID NO: 58260 - RNA, 25 nt, Artificial Sequence
  Description of Artificial Sequence: Synthetic oligonucleotide
uccuuuugcuuuuaaaguaauuuuu

SEQ ID NO: 58261 - RNA, 25 nt, Artificial Sequence
  Description of Artificial Sequence: Synthetic oligonucleotide
ugaccugugaagcaacagucaaugg

SEQ ID NO: 58262 - RNA, 25 nt, Artificial Sequence
  Description of Artificial Sequence: Synthetic oligonucleotide
cuaucucacacaucgacaaaccaau

SEQ ID NO: 58263 - RNA, 25 nt, Artificial Sequence
  Description of Artificial Sequence: Synthetic oligonucleotide
uguccucaauuguacugcuaccacu

SEQ ID NO: 58264 - RNA, 25 nt, Artificial Sequence
  Description of Artificial Sequence: Synthetic oligonucleotide
aaaccguagcuggcaagcggucuua

SEQ ID NO: 58265 - RNA, 25 nt, Artificial Sequence
  Description of Artificial Sequence: Synthetic oligonucleotide
uagcuggcaagcggucuuaccggcu

SEQ ID NO: 58266 - RNA, 25 nt, Artificial Sequence
  Description of Artificial Sequence: Synthetic oligonucleotide
uuguaugguuaaaagauggguuacc

SEQ ID NO: 58267 - RNA, 25 nt, Artificial Sequence
  Description of Artificial Sequence: Synthetic oligonucleotide
ugguuaaaagauggguuaccugcga

SEQ ID NO: 58268 - RNA, 25 nt, Artificial Sequence
  Description of Artificial Sequence: Synthetic oligonucleotide
cagggaauuauacaaucuugcugag

SEQ ID NO: 58269 - RNA, 25 nt, Artificial Sequence
  Description of Artificial Sequence: Synthetic oligonucleotide
acaaucuugcugagcauaaaacagu

SEQ ID NO: 58270 - RNA, 25 nt, Artificial Sequence
  Description of Artificial Sequence: Synthetic oligonucleotide
ccaauaaugaagaguccuuuauccu

SEQ ID NO: 58271 - RNA, 25 nt, Artificial Sequence
  Description of Artificial Sequence: Synthetic oligonucleotide
acuuuggauguuccaacgcaaguug

SEQ ID NO: 58272 - RNA, 25 nt, Artificial Sequence
  Description of Artificial Sequence: Synthetic oligonucleotide
aaugcuuccacuaaacugaaaccau

SEQ ID NO: 58273 - RNA, 25 nt, Artificial Sequence
  Description of Artificial Sequence: Synthetic oligonucleotide
gagaaaguuugacuuuguuaaauau

SEQ ID NO: 58274 - RNA, 25 nt, Artificial Sequence
  Description of Artificial Sequence: Synthetic oligonucleotide
aaagaacuacuguauauuaaaaguu

SEQ ID NO: 58275 - RNA, 25 nt, Artificial Sequence
  Description of Artificial Sequence: Synthetic oligonucleotide
uuagaaauacggguuuugacuuaac

SEQ ID NO: 58276 - RNA, 25 nt, Artificial Sequence
  Description of Artificial Sequence: Synthetic oligonucleotide
aacauggguacagcaaacucagcac

SEQ ID NO: 58277 - RNA, 25 nt, Artificial Sequence
  Description of Artificial Sequence: Synthetic oligonucleotide
aaagacacagaagaugcugaccuca

SEQ ID NO: 58278 - RNA, 25 nt, Artificial Sequence
  Description of Artificial Sequence: Synthetic oligonucleotide
uaguagggagguuuauucagaucgc

SEQ ID NO: 58279 - RNA, 25 nt, Artificial Sequence
  Description of Artificial Sequence: Synthetic oligonucleotide
gccuucugcagcaggguucugggau

SEQ ID NO: 58280 - RNA, 25 nt, Artificial Sequence
  Description of Artificial Sequence: Synthetic oligonucleotide
ggucugguacauauuggaaauuaug

SEQ ID NO: 58281 - RNA, 25 nt, Artificial Sequence
  Description of Artificial Sequence: Synthetic oligonucleotide
cuaguccuuccgauggaagcacuag

SEQ ID NO: 58282 - RNA, 25 nt, Artificial Sequence
  Description of Artificial Sequence: Synthetic oligonucleotide
ccagugaauauuguuuuuaugugga

SEQ ID NO: 58283 - RNA, 25 nt, Artificial Sequence
  Description of Artificial Sequence: Synthetic oligonucleotide
augaauucaaguuggaauugguaga

SEQ ID NO: 58284 - RNA, 25 nt, Artificial Sequence
  Description of Artificial Sequence: Synthetic oligonucleotide
caggacacagauuuagacuuggaga

SEQ ID NO: 58285 - RNA, 25 nt, Artificial Sequence
  Description of Artificial Sequence: Synthetic oligonucleotide
cucaaagcacaguuacaguauucca

SEQ ID NO: 58286 - RNA, 25 nt, Artificial Sequence
  Description of Artificial Sequence: Synthetic oligonucleotide
accacugccaccacugaugaauuaa

SEQ ID NO: 58287 - RNA, 25 nt, Artificial Sequence
  Description of Artificial Sequence: Synthetic oligonucleotide
gaaacuacuagugccacaucaucac

SEQ ID NO: 58288 - RNA, 25 nt, Artificial Sequence
  Description of Artificial Sequence: Synthetic oligonucleotide
aagucggacagccucaccaaacaga

SEQ ID NO: 58289 - RNA, 25 nt, Artificial Sequence
  Description of Artificial Sequence: Synthetic oligonucleotide
gaaagcgaaaaauggaacaugaugg

SEQ ID NO: 58290 - RNA, 25 nt, Artificial Sequence
  Description of Artificial Sequence: Synthetic oligonucleotide
cccucugauuuagcauguagacugc

SEQ ID NO: 58291 - RNA, 25 nt, Artificial Sequence
  Description of Artificial Sequence: Synthetic oligonucleotide
ugagcuauuuaaggaucuauuuaug

SEQ ID NO: 58292 - RNA, 25 nt, Artificial Sequence
  Description of Artificial Sequence: Synthetic oligonucleotide
aaaaggugaaaaagcacuauuauca

SEQ ID NO: 58293 - RNA, 25 nt, Artificial Sequence
  Description of Artificial Sequence: Synthetic oligonucleotide
gaaaaagcacuauuaucaguucugc

SEQ ID NO: 58294 - RNA, 25 nt, Artificial Sequence
  Description of Artificial Sequence: Synthetic oligonucleotide
ggcugaaaagaaagauuaaaccuac

SEQ ID NO: 58295 - RNA, 25 nt, Artificial Sequence
  Description of Artificial Sequence: Synthetic oligonucleotide
uaaacccuuauaauaaaauccuucu

SEQ ID NO: 58296 - RNA, 25 nt, Artificial Sequence
  Description of Artificial Sequence: Synthetic oligonucleotide
cauacuauuagccaaugcuguagac

SEQ ID NO: 58297 - RNA, 25 nt, Artificial Sequence
  Description of Artificial Sequence: Synthetic oligonucleotide
gacagaagcauuuugauaggaauag

SEQ ID NO: 58298 - RNA, 25 nt, Artificial Sequence
  Description of Artificial Sequence: Synthetic oligonucleotide
agagcaaauaagauaauggcccuga

SEQ ID NO: 58299 - RNA, 25 nt, Artificial Sequence
  Description of Artificial Sequence: Synthetic oligonucleotide
ccaacauuuuucucuuccucaagca

SEQ ID NO: 58300 - RNA, 25 nt, Artificial Sequence
  Description of Artificial Sequence: Synthetic oligonucleotide
uuaaguaugagaaaaguucagccca

SEQ ID NO: 58301 - RNA, 25 nt, Artificial Sequence
  Description of Artificial Sequence: Synthetic oligonucleotide
caggaauaaagauggcugcugaacc

SEQ ID NO: 58302 - RNA, 25 nt, Artificial Sequence
  Description of Artificial Sequence: Synthetic oligonucleotide
aauuugaaugaccaaguucucuuca

SEQ ID NO: 58303 - RNA, 25 nt, Artificial Sequence
  Description of Artificial Sequence: Synthetic oligonucleotide
auguauaaagauagccagccuagag

SEQ ID NO: 58304 - RNA, 25 nt, Artificial Sequence
  Description of Artificial Sequence: Synthetic oligonucleotide
ggcuguaacuaucucugugaagugu

SEQ ID NO: 58305 - RNA, 25 nt, Artificial Sequence
  Description of Artificial Sequence: Synthetic oligonucleotide
ucugugaagugugagaaaauuucaa

SEQ ID NO: 58306 - RNA, 25 nt, Artificial Sequence
  Description of Artificial Sequence: Synthetic oligonucleotide
ccuuuaaggaaaugaauccuccuga

SEQ ID NO: 58307 - RNA, 25 nt, Artificial Sequence
  Description of Artificial Sequence: Synthetic oligonucleotide
aaggauacaaaaagugacaucauau

SEQ ID NO: 58308 - RNA, 25 nt, Artificial Sequence
  Description of Artificial Sequence: Synthetic oligonucleotide
agaugcaauuugaaucuucaucaua

SEQ ID NO: 58309 - RNA, 25 nt, Artificial Sequence
  Description of Artificial Sequence: Synthetic oligonucleotide
guucaaaacgaagacuagcuauuaa

SEQ ID NO: 58310 - RNA, 25 nt, Artificial Sequence
  Description of Artificial Sequence: Synthetic oligonucleotide
gugaaaccucaucucuacuaaaaau

SEQ ID NO: 58311 - RNA, 25 nt, Artificial Sequence
  Description of Artificial Sequence: Synthetic oligonucleotide
acgaaagagaagcucuaucucgccu

SEQ ID NO: 58312 - RNA, 25 nt, Artificial Sequence
  Description of Artificial Sequence: Synthetic oligonucleotide
cuccacaagcgccuucgguccaguu

SEQ ID NO: 58313 - RNA, 25 nt, Artificial Sequence
  Description of Artificial Sequence: Synthetic oligonucleotide
gagaagauuccaaagauguagccgc

SEQ ID NO: 58314 - RNA, 25 nt, Artificial Sequence
  Description of Artificial Sequence: Synthetic oligonucleotide
aaucuggauucaaugaggagacuug

SEQ ID NO: 58315 - RNA, 25 nt, Artificial Sequence
  Description of Artificial Sequence: Synthetic oligonucleotide
agaacagauuugagaguagugagga

SEQ ID NO: 58316 - RNA, 25 nt, Artificial Sequence
  Description of Artificial Sequence: Synthetic oligonucleotide
ccagagcugugcagaugaguacaaa

SEQ ID NO: 58317 - RNA, 25 nt, Artificial Sequence
  Description of Artificial Sequence: Synthetic oligonucleotide
ccucagauuguuguuguuaaugggc

SEQ ID NO: 58318 - RNA, 25 nt, Artificial Sequence
  Description of Artificial Sequence: Synthetic oligonucleotide
cuauuuuaauuauuuuuaauuuauu

SEQ ID NO: 58319 - RNA, 25 nt, Artificial Sequence
  Description of Artificial Sequence: Synthetic oligonucleotide
uuuaauuuauuaauauuuaaauaug

SEQ ID NO: 58320 - RNA, 25 nt, Artificial Sequence
  Description of Artificial Sequence: Synthetic oligonucleotide
augcaguuugaauauccuuuguuuc

SEQ ID NO: 58321 - RNA, 25 nt, Artificial Sequence
  Description of Artificial Sequence: Synthetic oligonucleotide
caugcugcuggcgucuaaguguuug

SEQ ID NO: 58322 - RNA, 25 nt, Artificial Sequence
  Description of Artificial Sequence: Synthetic oligonucleotide
agaugugcauuucaccugugacaaa

SEQ ID NO: 58323 - RNA, 25 nt, Artificial Sequence
  Description of Artificial Sequence: Synthetic oligonucleotide
ucaaaaccugugccaggcugaauua

SEQ ID NO: 58324 - RNA, 25 nt, Artificial Sequence
  Description of Artificial Sequence: Synthetic oligonucleotide
gaauguggguagucauucuuacaau

SEQ ID NO: 58325 - RNA, 25 nt, Artificial Sequence
  Description of Artificial Sequence: Synthetic oligonucleotide
auguggguagucauucuuacaauug

SEQ ID NO: 58326 - RNA, 25 nt, Artificial Sequence
  Description of Artificial Sequence: Synthetic oligonucleotide
ugaaaaugagcaucagagaguguac

SEQ ID NO: 58327 - RNA, 25 nt, Artificial Sequence
  Description of Artificial Sequence: Synthetic oligonucleotide
uugcuuuucauguagaacucagcag

SEQ ID NO: 58328 - RNA, 25 nt, Artificial Sequence
  Description of Artificial Sequence: Synthetic oligonucleotide
uguauuucuauauuuauuuucagua

SEQ ID NO: 58329 - RNA, 25 nt, Artificial Sequence
  Description of Artificial Sequence: Synthetic oligonucleotide
uuugauuaauguuucuuaaauggaa

SEQ ID NO: 58330 - RNA, 25 nt, Artificial Sequence
  Description of Artificial Sequence: Synthetic oligonucleotide
caacguguauagugccuaaaauugu

SEQ ID NO: 58331 - RNA, 25 nt, Artificial Sequence
  Description of Artificial Sequence: Synthetic oligonucleotide
cauauccuuggcuacuaacaucugg

SEQ ID NO: 58332 - RNA, 25 nt, Artificial Sequence
  Description of Artificial Sequence: Synthetic oligonucleotide
uacuaacaucuggagacugugagcu

SEQ ID NO: 58333 - RNA, 25 nt, Artificial Sequence
  Description of Artificial Sequence: Synthetic oligonucleotide
cauaaguugugugcuuuuuauuaau

SEQ ID NO: 58334 - RNA, 25 nt, Artificial Sequence
  Description of Artificial Sequence: Synthetic oligonucleotide
gcaucauuuuggcucuucuuacauu

SEQ ID NO: 58335 - RNA, 25 nt, Artificial Sequence
  Description of Artificial Sequence: Synthetic oligonucleotide
gcucuucuuacauuuguaaaaaugu

SEQ ID NO: 58336 - RNA, 25 nt, Artificial Sequence
  Description of Artificial Sequence: Synthetic oligonucleotide
agauuaggucaucuuaauucauauu

SEQ ID NO: 58337 - RNA, 25 nt, Artificial Sequence
  Description of Artificial Sequence: Synthetic oligonucleotide
auggaauugaaagaacuaaucauga

SEQ ID NO: 58338 - RNA, 25 nt, Artificial Sequence
  Description of Artificial Sequence: Synthetic oligonucleotide
cacacucauuccuucugcucuuggg

SEQ ID NO: 58339 - RNA, 25 nt, Artificial Sequence
  Description of Artificial Sequence: Synthetic oligonucleotide
uguagagguaaccaguagcuuugag

SEQ ID NO: 58340 - RNA, 25 nt, Artificial Sequence
  Description of Artificial Sequence: Synthetic oligonucleotide
caaccacaugccacguaauauuuca

SEQ ID NO: 58341 - RNA, 25 nt, Artificial Sequence
  Description of Artificial Sequence: Synthetic oligonucleotide
ucggaaacaaguuauucucuucacu

SEQ ID NO: 58342 - RNA, 25 nt, Artificial Sequence
  Description of Artificial Sequence: Synthetic oligonucleotide
acucccaauaacuaaugcuaagaaa

SEQ ID NO: 58343 - RNA, 25 nt, Artificial Sequence
  Description of Artificial Sequence: Synthetic oligonucleotide
aaugcuaagaaaugcugaaaaucaa

SEQ ID NO: 58344 - RNA, 25 nt, Artificial Sequence
  Description of Artificial Sequence: Synthetic oligonucleotide
gucuuucucuaaauaugauuacuuu

SEQ ID NO: 58345 - RNA, 25 nt, Artificial Sequence
  Description of Artificial Sequence: Synthetic oligonucleotide
ugaauuucaggcauuuuguucuaca

SEQ ID NO: 58346 - RNA, 25 nt, Artificial Sequence
  Description of Artificial Sequence: Synthetic oligonucleotide
cgauucccucucacccgggacucuc

SEQ ID NO: 58347 - RNA, 25 nt, Artificial Sequence
  Description of Artificial Sequence: Synthetic oligonucleotide
aggaaagugaaccuuuaaaguaaag

SEQ ID NO: 58348 - RNA, 25 nt, Artificial Sequence
  Description of Artificial Sequence: Synthetic oligonucleotide
gaggcugcaugcucuggaagccugg

SEQ ID NO: 58349 - RNA, 25 nt, Artificial Sequence
  Description of Artificial Sequence: Synthetic oligonucleotide
ucucugaacagaaaacaaaagagag

SEQ ID NO: 58350 - RNA, 25 nt, Artificial Sequence
  Description of Artificial Sequence: Synthetic oligonucleotide
aacuuggcuguaaucaguuaugccg

SEQ ID NO: 58351 - RNA, 25 nt, Artificial Sequence
  Description of Artificial Sequence: Synthetic oligonucleotide
agaagccaaaauuaaaagaagucca

SEQ ID NO: 58352 - RNA, 25 nt, Artificial Sequence
  Description of Artificial Sequence: Synthetic oligonucleotide
auuaaaagaaguccaggugagguua

SEQ ID NO: 58353 - RNA, 25 nt, Artificial Sequence
  Description of Artificial Sequence: Synthetic oligonucleotide
gaauccggauuaucgggaagaggac

SEQ ID NO: 58354 - RNA, 25 nt, Artificial Sequence
  Description of Artificial Sequence: Synthetic oligonucleotide
aaugugacaucaaagcaaguauugu

SEQ ID NO: 58355 - RNA, 25 nt, Artificial Sequence
  Description of Artificial Sequence: Synthetic oligonucleotide
caucaaagcaaguauuguagcacuc

SEQ ID NO: 58356 - RNA, 25 nt, Artificial Sequence
  Description of Artificial Sequence: Synthetic oligonucleotide
agagagagaaaacaaaaccacaaau

SEQ ID NO: 58357 - RNA, 25 nt, Artificial Sequence
  Description of Artificial Sequence: Synthetic oligonucleotide
ucgcuguaguauuuaagcccauaca

SEQ ID NO: 58358 - RNA, 25 nt, Artificial Sequence
  Description of Artificial Sequence: Synthetic oligonucleotide
cgcuguaguauuuaagcccauacag

SEQ ID NO: 58359 - RNA, 25 nt, Artificial Sequence
  Description of Artificial Sequence: Synthetic oligonucleotide
auuuaagcccauacagaaaccuucc

SEQ ID NO: 58360 - RNA, 25 nt, Artificial Sequence
  Description of Artificial Sequence: Synthetic oligonucleotide
auuaaaauaaacaugguauaccuac

SEQ ID NO: 58361 - RNA, 25 nt, Artificial Sequence
  Description of Artificial Sequence: Synthetic oligonucleotide
cuguucugaucggccaguuuucgga

SEQ ID NO: 58362 - RNA, 25 nt, Artificial Sequence
  Description of Artificial Sequence: Synthetic oligonucleotide
aaauaauuugaacuuuggaacaggg

SEQ ID NO: 58363 - RNA, 25 nt, Artificial Sequence
  Description of Artificial Sequence: Synthetic oligonucleotide
ugcgaccuuaauuuaacuuuccagu

SEQ ID NO: 58364 - RNA, 25 nt, Artificial Sequence
  Description of Artificial Sequence: Synthetic oligonucleotide
cugagaaagcuaaaguuugguuuug

SEQ ID NO: 58365 - RNA, 25 nt, Artificial Sequence
  Description of Artificial Sequence: Synthetic oligonucleotide
aguaaagaugcuacuucccacugua

SEQ ID NO: 58366 - RNA, 25 nt, Artificial Sequence
  Description of Artificial Sequence: Synthetic oligonucleotide
cugcuuaauugcugauaccauauga

SEQ ID NO: 58367 - RNA, 25 nt, Artificial Sequence
  Description of Artificial Sequence: Synthetic oligonucleotide
uaccauaugaaugaaacaugggcug

SEQ ID NO: 58368 - RNA, 25 nt, Artificial Sequence
  Description of Artificial Sequence: Synthetic oligonucleotide
aacuuucuuauccaacuuuuucaua

SEQ ID NO: 58369 - RNA, 25 nt, Artificial Sequence
  Description of Artificial Sequence: Synthetic oligonucleotide
ccuugcaugacaucaugaggccgga

SEQ ID NO: 58370 - RNA, 25 nt, Artificial Sequence
  Description of Artificial Sequence: Synthetic oligonucleotide
ugaauuuguauaugacugcauuugu

SEQ ID NO: 58371 - RNA, 25 nt, Artificial Sequence
  Description of Artificial Sequence: Synthetic oligonucleotide
gaauccuaguagaauguuuacuacc

SEQ ID NO: 58372 - RNA, 25 nt, Artificial Sequence
  Description of Artificial Sequence: Synthetic oligonucleotide
gaaagggaagaauuuuuugaugaaa

SEQ ID NO: 58373 - RNA, 25 nt, Artificial Sequence
  Description of Artificial Sequence: Synthetic oligonucleotide
uaucggcaugccagugugugaauuu

SEQ ID NO: 58374 - RNA, 25 nt, Artificial Sequence
  Description of Artificial Sequence: Synthetic oligonucleotide
caccucauaguagagcaauguaugu

SEQ ID NO: 58375 - RNA, 25 nt, Artificial Sequence
  Description of Artificial Sequence: Synthetic oligonucleotide
ccagaauugccaaagcacauauaua

SEQ ID NO: 58376 - RNA, 25 nt, Artificial Sequence
  Description of Artificial Sequence: Synthetic oligonucleotide
uggugaucuggguaauaguuucucc

SEQ ID NO: 58377 - RNA, 25 nt, Artificial Sequence
  Description of Artificial Sequence: Synthetic oligonucleotide
gaucuggguaauaguuucuccaaau

SEQ ID NO: 58378 - RNA, 25 nt, Artificial Sequence
  Description of Artificial Sequence: Synthetic oligonucleotide
ggaugugaugaauacuuccuagaaa

SEQ ID NO: 58379 - RNA, 25 nt, Artificial Sequence
  Description of Artificial Sequence: Synthetic oligonucleotide
cauuuccacagcuacaccauauaug

SEQ ID NO: 58380 - RNA, 25 nt, Artificial Sequence
  Description of Artificial Sequence: Synthetic oligonucleotide
acagcuacaccauauaugaauggag

SEQ ID NO: 58381 - RNA, 25 nt, Artificial Sequence
  Description of Artificial Sequence: Synthetic oligonucleotide
ugcaguucuuacacgagaagaagau

SEQ ID NO: 58382 - RNA, 25 nt, Artificial Sequence
  Description of Artificial Sequence: Synthetic oligonucleotide
acgagaagaagaucauuuacaggga

SEQ ID NO: 58383 - RNA, 25 nt, Artificial Sequence
  Description of Artificial Sequence: Synthetic oligonucleotide
cgagaagaagaucauuuacagggac

SEQ ID NO: 58384 - RNA, 25 nt, Artificial Sequence
  Description of Artificial Sequence: Synthetic oligonucleotide
aagaagaucauuuacagggaccuga

SEQ ID NO: 58385 - RNA, 25 nt, Artificial Sequence
  Description of Artificial Sequence: Synthetic oligonucleotide
agaggaagagguguuugacugcauc

SEQ ID NO: 58386 - RNA, 25 nt, Artificial Sequence
  Description of Artificial Sequence: Synthetic oligonucleotide
gaggaagagguguuugacugcaucg

SEQ ID NO: 58387 - RNA, 25 nt, Artificial Sequence
  Description of Artificial Sequence: Synthetic oligonucleotide
cuacuuugagggcgaguucacaggg

SEQ ID NO: 58388 - RNA, 25 nt, Artificial Sequence
  Description of Artificial Sequence: Synthetic oligonucleotide
agggcaucuccuggcaccucugucc

SEQ ID NO: 58389 - RNA, 25 nt, Artificial Sequence
  Description of Artificial Sequence: Synthetic oligonucleotide
ggagugauaugguuugucuuuuuaa

SEQ ID NO: 58390 - RNA, 25 nt, Artificial Sequence
  Description of Artificial Sequence: Synthetic oligonucleotide
gagugauaugguuugucuuuuuaag

SEQ ID NO: 58391 - RNA, 25 nt, Artificial Sequence
  Description of Artificial Sequence: Synthetic oligonucleotide
ugcaguaaagauccuaaagguuguc

SEQ ID NO: 58392 - RNA, 25 nt, Artificial Sequence
  Description of Artificial Sequence: Synthetic oligonucleotide
aguaaagauccuaaagguugucgac

SEQ ID NO: 58393 - RNA, 25 nt, Artificial Sequence
  Description of Artificial Sequence: Synthetic oligonucleotide
ugacaaaggacaaccuggcaauugu

SEQ ID NO: 58394 - RNA, 25 nt, Artificial Sequence
  Description of Artificial Sequence: Synthetic oligonucleotide
gcaauugugacccaguggugcgagg

SEQ ID NO: 58395 - RNA, 25 nt, Artificial Sequence
  Description of Artificial Sequence: Synthetic oligonucleotide
aacaucauccauagagacaugaaau

SEQ ID NO: 58396 - RNA, 25 nt, Artificial Sequence
  Description of Artificial Sequence: Synthetic oligonucleotide
ugaaauccaacaauauauuucucca

SEQ ID NO: 58397 - RNA, 25 nt, Artificial Sequence
  Description of Artificial Sequence: Synthetic oligonucleotide
aacaauauauuucuccaugaaggcu

SEQ ID NO: 58398 - RNA, 25 nt, Artificial Sequence
  Description of Artificial Sequence: Synthetic oligonucleotide
aacaguaaagucacgcuggaguggu

SEQ ID NO: 58399 - RNA, 25 nt, Artificial Sequence
  Description of Artificial Sequence: Synthetic oligonucleotide
ugugaagaaaguaaaggaagagagg

SEQ ID NO: 58400 - RNA, 25 nt, Artificial Sequence
  Description of Artificial Sequence: Synthetic oligonucleotide
cuuccgagccauccuugcaucgggc

SEQ ID NO: 58401 - RNA, 25 nt, Artificial Sequence
  Description of Artificial Sequence: Synthetic oligonucleotide
aauggagguugaauauccuacugug

SEQ ID NO: 58402 - RNA, 25 nt, Artificial Sequence
  Description of Artificial Sequence: Synthetic oligonucleotide
ggagguugaauauccuacuguguaa

SEQ ID NO: 58403 - RNA, 25 nt, Artificial Sequence
  Description of Artificial Sequence: Synthetic oligonucleotide
auuuugaguuuucccuuguagugua

SEQ ID NO: 58404 - RNA, 25 nt, Artificial Sequence
  Description of Artificial Sequence: Synthetic oligonucleotide
uauccuguuuguucuuuguugauug

SEQ ID NO: 58405 - RNA, 25 nt, Artificial Sequence
  Description of Artificial Sequence: Synthetic oligonucleotide
ccuguuuguucuuuguugauugaaa

SEQ ID NO: 58406 - RNA, 25 nt, Artificial Sequence
  Description of Artificial Sequence: Synthetic oligonucleotide
cucuacagccuucuuuuucuuccau

SEQ ID NO: 58407 - RNA, 25 nt, Artificial Sequence
  Description of Artificial Sequence: Synthetic oligonucleotide
ucuuccauagcuaaucuuccuucua

SEQ ID NO: 58408 - RNA, 25 nt, Artificial Sequence
  Description of Artificial Sequence: Synthetic oligonucleotide
auaaucuuccuguugaaugcuucau

SEQ ID NO: 58409 - RNA, 25 nt, Artificial Sequence
  Description of Artificial Sequence: Synthetic oligonucleotide
uaaucuuccuguugaaugcuucaug

SEQ ID NO: 58410 - RNA, 25 nt, Artificial Sequence
  Description of Artificial Sequence: Synthetic oligonucleotide
cuucaugacuugaauucuacuuuga

SEQ ID NO: 58411 - RNA, 25 nt, Artificial Sequence
  Description of Artificial Sequence: Synthetic oligonucleotide
aagagggagagaagcaacuacagac

SEQ ID NO: 58412 - RNA, 25 nt, Artificial Sequence
  Description of Artificial Sequence: Synthetic oligonucleotide
cgucuccuaccagaccaaggucaac

SEQ ID NO: 58413 - RNA, 25 nt, Artificial Sequence
  Description of Artificial Sequence: Synthetic oligonucleotide
gaucaaucggcccgacuaucucgac

SEQ ID NO: 58414 - RNA, 25 nt, Artificial Sequence
  Description of Artificial Sequence: Synthetic oligonucleotide
ggacgaacauccaaccuucccaaac

SEQ ID NO: 58415 - RNA, 25 nt, Artificial Sequence
  Description of Artificial Sequence: Synthetic oligonucleotide
agggucggaacccaagcuuagaacu

SEQ ID NO: 58416 - RNA, 25 nt, Artificial Sequence
  Description of Artificial Sequence: Synthetic oligonucleotide
ucggaacccaagcuuagaacuuuaa

SEQ ID NO: 58417 - RNA, 25 nt, Artificial Sequence
  Description of Artificial Sequence: Synthetic oligonucleotide
acccaagcuuagaacuuuaagcaac

SEQ ID NO: 58418 - RNA, 25 nt, Artificial Sequence
  Description of Artificial Sequence: Synthetic oligonucleotide
gaacuuuaagcaacaagaccaccac

SEQ ID NO: 58419 - RNA, 25 nt, Artificial Sequence
  Description of Artificial Sequence: Synthetic oligonucleotide
acuauucaguggcgagaaauaaagu

SEQ ID NO: 58420 - RNA, 25 nt, Artificial Sequence
  Description of Artificial Sequence: Synthetic oligonucleotide
cuauucaguggcgagaaauaaaguu

SEQ ID NO: 58421 - RNA, 25 nt, Artificial Sequence
  Description of Artificial Sequence: Synthetic oligonucleotide
aaacacagauaacaggaaaugaucc

SEQ ID NO: 58422 - RNA, 25 nt, Artificial Sequence
  Description of Artificial Sequence: Synthetic oligonucleotide
cuuaagaaaagagaagaaaugaaac

SEQ ID NO: 58423 - RNA, 25 nt, Artificial Sequence
  Description of Artificial Sequence: Synthetic oligonucleotide
cugaaggaguguguuuccauccucc

SEQ ID NO: 58424 - RNA, 25 nt, Artificial Sequence
  Description of Artificial Sequence: Synthetic oligonucleotide
ucaccgcgggacugaaaaucuuuga

SEQ ID NO: 58425 - RNA, 25 nt, Artificial Sequence
  Description of Artificial Sequence: Synthetic oligonucleotide
agcagaaauaagcgugccguucagg

SEQ ID NO: 58426 - RNA, 25 nt, Artificial Sequence
  Description of Artificial Sequence: Synthetic oligonucleotide
aagcgugccguucaggguccagaag

SEQ ID NO: 58427 - RNA, 25 nt, Artificial Sequence
  Description of Artificial Sequence: Synthetic oligonucleotide
agaaacagucacucaagacugcuug

SEQ ID NO: 58428 - RNA, 25 nt, Artificial Sequence
  Description of Artificial Sequence: Synthetic oligonucleotide
agaggaagaagguccaugucuuugg

SEQ ID NO: 58429 - RNA, 25 nt, Artificial Sequence
  Description of Artificial Sequence: Synthetic oligonucleotide
uguauucaaaauaugccugaaacac

SEQ ID NO: 58430 - RNA, 25 nt, Artificial Sequence
  Description of Artificial Sequence: Synthetic oligonucleotide
auuuuccucccuuucucuguaccuc

SEQ ID NO: 58431 - RNA, 25 nt, Artificial Sequence
  Description of Artificial Sequence: Synthetic oligonucleotide
caaagaaagauagagcaagacaaga

SEQ ID NO: 58432 - RNA, 25 nt, Artificial Sequence
  Description of Artificial Sequence: Synthetic oligonucleotide
aagaaagauagagcaagacaagaaa

SEQ ID NO: 58433 - RNA, 25 nt, Artificial Sequence
  Description of Artificial Sequence: Synthetic oligonucleotide
gaaagcauuuguuuguacaagaucc

SEQ ID NO: 58434 - RNA, 25 nt, Artificial Sequence
  Description of Artificial Sequence: Synthetic oligonucleotide
ugaguuaaacgaacguacuugcaga

SEQ ID NO: 58435 - RNA, 25 nt, Artificial Sequence
  Description of Artificial Sequence: Synthetic oligonucleotide
acugauacagaacgaucgauacaga

SEQ ID NO: 58436 - RNA, 25 nt, Artificial Sequence
  Description of Artificial Sequence: Synthetic oligonucleotide
auauuauauauauauaaaaauaaau

SEQ ID NO: 58437 - RNA, 25 nt, Artificial Sequence
  Description of Artificial Sequence: Synthetic oligonucleotide
auuauauauauauaaaaauaaauau

SEQ ID NO: 58438 - RNA, 25 nt, Artificial Sequence
  Description of Artificial Sequence: Synthetic oligonucleotide
ucacuggauguauuugacugcugug

SEQ ID NO: 58439 - RNA, 25 nt, Artificial Sequence
  Description of Artificial Sequence: Synthetic oligonucleotide
cagggaagaggaggagaugagagac

SEQ ID NO: 58440 - RNA, 25 nt, Artificial Sequence
  Description of Artificial Sequence: Synthetic oligonucleotide
augaucuuuuuuuugucccacuugg

SEQ ID NO: 58441 - RNA, 27 nt, Artificial Sequence
  Description of Artificial Sequence: Synthetic oligonucleotide
ggccgugaacuccucaucaaaauaccu

SEQ ID NO: 58442 - RNA, 27 nt, Artificial Sequence
  Description of Artificial Sequence: Synthetic oligonucleotide
uggugugauggugaucaucugggccgu

SEQ ID NO: 58443 - RNA, 27 nt, Artificial Sequence
  Description of Artificial Sequence: Synthetic oligonucleotide
aaacccgcaggauaguuuucuucccua

SEQ ID NO: 58444 - RNA, 27 nt, Artificial Sequence
  Description of Artificial Sequence: Synthetic oligonucleotide
caaacuggaugaaauaaauuaaaaccc

SEQ ID NO: 58445 - RNA, 27 nt, Artificial Sequence
  Description of Artificial Sequence: Synthetic oligonucleotide
agaaguccuuaacauuucccuacguga

SEQ ID NO: 58446 - RNA, 27 nt, Artificial Sequence
  Description of Artificial Sequence: Synthetic oligonucleotide
cucugucccacuggguaaacccuggcc

SEQ ID NO: 58447 - RNA, 27 nt, Artificial Sequence
  Description of Artificial Sequence: Synthetic oligonucleotide
cacaauaacaaauuuaaaccuugcucc

SEQ ID NO: 58448 - RNA, 27 nt, Artificial Sequence
  Description of Artificial Sequence: Synthetic oligonucleotide
aaaugcauuugaacaacauaauacaca

SEQ ID NO: 58449 - RNA, 27 nt, Artificial Sequence
  Description of Artificial Sequence: Synthetic oligonucleotide
ggcuuuccugucacaaagauuaaaaac

SEQ ID NO: 58450 - RNA, 27 nt, Artificial Sequence
  Description of Artificial Sequence: Synthetic oligonucleotide
agggcuuuccugucacaaagauuaaaa

SEQ ID NO: 58451 - RNA, 27 nt, Artificial Sequence
  Description of Artificial Sequence: Synthetic oligonucleotide
ggccaugcugggagacauaagcagcag

SEQ ID NO: 58452 - RNA, 27 nt, Artificial Sequence
  Description of Artificial Sequence: Synthetic oligonucleotide
ucagggagaagcuucugaaacacuucu

SEQ ID NO: 58453 - RNA, 27 nt, Artificial Sequence
  Description of Artificial Sequence: Synthetic oligonucleotide
aagggcuucuuccuuauugauggucag

SEQ ID NO: 58454 - RNA, 27 nt, Artificial Sequence
  Description of Artificial Sequence: Synthetic oligonucleotide
ugaagggcuucuuccuuauugaugguc

SEQ ID NO: 58455 - RNA, 27 nt, Artificial Sequence
  Description of Artificial Sequence: Synthetic oligonucleotide
cgcugaagggcuucuuccuuauugaug

SEQ ID NO: 58456 - RNA, 27 nt, Artificial Sequence
  Description of Artificial Sequence: Synthetic oligonucleotide
gccgcugaagggcuucuuccuuauuga

SEQ ID NO: 58457 - RNA, 27 nt, Artificial Sequence
  Description of Artificial Sequence: Synthetic oligonucleotide
acuggccgcugaagggcuucuuccuua

SEQ ID NO: 58458 - RNA, 27 nt, Artificial Sequence
  Description of Artificial Sequence: Synthetic oligonucleotide
cggagcuuuucaccuuuaguuaugcuu

SEQ ID NO: 58459 - RNA, 27 nt, Artificial Sequence
  Description of Artificial Sequence: Synthetic oligonucleotide
ccggagcuuuucaccuuuaguuaugcu

SEQ ID NO: 58460 - RNA, 27 nt, Artificial Sequence
  Description of Artificial Sequence: Synthetic oligonucleotide
cagacuguugacuggcgugauguaguu

SEQ ID NO: 58461 - RNA, 27 nt, Artificial Sequence
  Description of Artificial Sequence: Synthetic oligonucleotide
cuuuugaacucugcuuaaauccagugg

SEQ ID NO: 58462 - RNA, 27 nt, Artificial Sequence
  Description of Artificial Sequence: Synthetic oligonucleotide
gcuuuugaacucugcuuaaauccagug

SEQ ID NO: 58463 - RNA, 27 nt, Artificial Sequence
  Description of Artificial Sequence: Synthetic oligonucleotide
agggcuuuugaacucugcuuaaaucca

SEQ ID NO: 58464 - RNA, 27 nt, Artificial Sequence
  Description of Artificial Sequence: Synthetic oligonucleotide
aagggcuuuugaacucugcuuaaaucc

SEQ ID NO: 58465 - RNA, 27 nt, Artificial Sequence
  Description of Artificial Sequence: Synthetic oligonucleotide
ugaagggcuuuugaacucugcuuaaau

SEQ ID NO: 58466 - RNA, 27 nt, Artificial Sequence
  Description of Artificial Sequence: Synthetic oligonucleotide
cugaagggcuuuugaacucugcuuaaa

SEQ ID NO: 58467 - RNA, 27 nt, Artificial Sequence
  Description of Artificial Sequence: Synthetic oligonucleotide
cgcugaagggcuuuugaacucugcuua

SEQ ID NO: 58468 - RNA, 27 nt, Artificial Sequence
  Description of Artificial Sequence: Synthetic oligonucleotide
cgagcggcuucacucagacccugaggc

SEQ ID NO: 58469 - RNA, 27 nt, Artificial Sequence
  Description of Artificial Sequence: Synthetic oligonucleotide
uugacuggcgugauguaguugcuuggg

SEQ ID NO: 58470 - RNA, 27 nt, Artificial Sequence
  Description of Artificial Sequence: Synthetic oligonucleotide
cacgcaccaagaagcugccauugaucc

SEQ ID NO: 58471 - RNA, 27 nt, Artificial Sequence
  Description of Artificial Sequence: Synthetic oligonucleotide
cugaugaauccaaugugggcuggaauc

SEQ ID NO: 58472 - RNA, 27 nt, Artificial Sequence
  Description of Artificial Sequence: Synthetic oligonucleotide
cuuagguauuccacauucucagcugug

SEQ ID NO: 58473 - RNA, 27 nt, Artificial Sequence
  Description of Artificial Sequence: Synthetic oligonucleotide
ugagccucaaauuaggagauacguuuu

SEQ ID NO: 58474 - RNA, 27 nt, Artificial Sequence
  Description of Artificial Sequence: Synthetic oligonucleotide
ccaauuguagagaaauuauuuuaggaa

SEQ ID NO: 58475 - RNA, 27 nt, Artificial Sequence
  Description of Artificial Sequence: Synthetic oligonucleotide
ggcuccuaacuagcugaaucuuccaau

SEQ ID NO: 58476 - RNA, 27 nt, Artificial Sequence
  Description of Artificial Sequence: Synthetic oligonucleotide
guggauauugacuaggagaguuuaaaa

SEQ ID NO: 58477 - RNA, 27 nt, Artificial Sequence
  Description of Artificial Sequence: Synthetic oligonucleotide
ugugacugaacauaacuguaggcugaa

SEQ ID NO: 58478 - RNA, 27 nt, Artificial Sequence
  Description of Artificial Sequence: Synthetic oligonucleotide
guaugugugugugacugaacauaacug

SEQ ID NO: 58479 - RNA, 27 nt, Artificial Sequence
  Description of Artificial Sequence: Synthetic oligonucleotide
aagcaaaaggaacauuuuguaugugug

SEQ ID NO: 58480 - RNA, 27 nt, Artificial Sequence
  Description of Artificial Sequence: Synthetic oligonucleotide
aaaaauuacuuuaaaagcaaaaggaac

SEQ ID NO: 58481 - RNA, 27 nt, Artificial Sequence
  Description of Artificial Sequence: Synthetic oligonucleotide
ccauugacuguugcuucacaggucaga

SEQ ID NO: 58482 - RNA, 27 nt, Artificial Sequence
  Description of Artificial Sequence: Synthetic oligonucleotide
auugguuugucgaugugugagauaguu

SEQ ID NO: 58483 - RNA, 27 nt, Artificial Sequence
  Description of Artificial Sequence: Synthetic oligonucleotide
agugguagcaguacaauugaggacaag

SEQ ID NO: 58484 - RNA, 27 nt, Artificial Sequence
  Description of Artificial Sequence: Synthetic oligonucleotide
uaagaccgcuugccagcuacgguuuca

SEQ ID NO: 58485 - RNA, 27 nt, Artificial Sequence
  Description of Artificial Sequence: Synthetic oligonucleotide
agccgguaagaccgcuugccagcuacg

SEQ ID NO: 58486 - RNA, 27 nt, Artificial Sequence
  Description of Artificial Sequence: Synthetic oligonucleotide
gguaacccaucuuuuaaccauacaacu

SEQ ID NO: 58487 - RNA, 27 nt, Artificial Sequence
  Description of Artificial Sequence: Synthetic oligonucleotide
ucgcagguaacccaucuuuuaaccaua

SEQ ID NO: 58488 - RNA, 27 nt, Artificial Sequence
  Description of Artificial Sequence: Synthetic oligonucleotide
cucagcaagauuguauaauucccugca

SEQ ID NO: 58489 - RNA, 27 nt, Artificial Sequence
  Description of Artificial Sequence: Synthetic oligonucleotide
acuguuuuaugcucagcaagauuguau

SEQ ID NO: 58490 - RNA, 27 nt, Artificial Sequence
  Description of Artificial Sequence: Synthetic oligonucleotide
aggauaaaggacucuucauuauuggaa

SEQ ID NO: 58491 - RNA, 27 nt, Artificial Sequence
  Description of Artificial Sequence: Synthetic oligonucleotide
caacuugcguuggaacauccaaagugu

SEQ ID NO: 58492 - RNA, 27 nt, Artificial Sequence
  Description of Artificial Sequence: Synthetic oligonucleotide
augguuucaguuuaguggaagcauuua

SEQ ID NO: 58493 - RNA, 27 nt, Artificial Sequence
  Description of Artificial Sequence: Synthetic oligonucleotide
auauuuaacaaagucaaacuuucucac

SEQ ID NO: 58494 - RNA, 27 nt, Artificial Sequence
  Description of Artificial Sequence: Synthetic oligonucleotide
aacuuuuaauauacaguaguucuuuuc

SEQ ID NO: 58495 - RNA, 27 nt, Artificial Sequence
  Description of Artificial Sequence: Synthetic oligonucleotide
guuaagucaaaacccguauuucuaaag

SEQ ID NO: 58496 - RNA, 27 nt, Artificial Sequence
  Description of Artificial Sequence: Synthetic oligonucleotide
gugcugaguuugcuguacccauguuga

SEQ ID NO: 58497 - RNA, 27 nt, Artificial Sequence
  Description of Artificial Sequence: Synthetic oligonucleotide
ugaggucagcaucuucugugucuuuac

SEQ ID NO: 58498 - RNA, 27 nt, Artificial Sequence
  Description of Artificial Sequence: Synthetic oligonucleotide
gcgaucugaauaaaccucccuacuagc

SEQ ID NO: 58499 - RNA, 27 nt, Artificial Sequence
  Description of Artificial Sequence: Synthetic oligonucleotide
aucccagaacccugcugcagaaggcca

SEQ ID NO: 58500 - RNA, 27 nt, Artificial Sequence
  Description of Artificial Sequence: Synthetic oligonucleotide
cauaauuuccaauauguaccagaccuu

SEQ ID NO: 58501 - RNA, 27 nt, Artificial Sequence
  Description of Artificial Sequence: Synthetic oligonucleotide
cuagugcuuccaucggaaggacuaggu

SEQ ID NO: 58502 - RNA, 27 nt, Artificial Sequence
  Description of Artificial Sequence: Synthetic oligonucleotide
uccacauaaaaacaauauucacuggga

SEQ ID NO: 58503 - RNA, 27 nt, Artificial Sequence
  Description of Artificial Sequence: Synthetic oligonucleotide
ucuaccaauuccaacuugaauucauug

SEQ ID NO: 58504 - RNA, 27 nt, Artificial Sequence
  Description of Artificial Sequence: Synthetic oligonucleotide
ucuccaagucuaaaucuguguccugag

SEQ ID NO: 58505 - RNA, 27 nt, Artificial Sequence
  Description of Artificial Sequence: Synthetic oligonucleotide
uggaauacuguaacugugcuuugagga

SEQ ID NO: 58506 - RNA, 27 nt, Artificial Sequence
  Description of Artificial Sequence: Synthetic oligonucleotide
uuaauucaucagugguggcagugguag

SEQ ID NO: 58507 - RNA, 27 nt, Artificial Sequence
  Description of Artificial Sequence: Synthetic oligonucleotide
gugaugauguggcacuaguaguuucuu

SEQ ID NO: 58508 - RNA, 27 nt, Artificial Sequence
  Description of Artificial Sequence: Synthetic oligonucleotide
ucuguuuggugaggcuguccgacuuug

SEQ ID NO: 58509 - RNA, 27 nt, Artificial Sequence
  Description of Artificial Sequence: Synthetic oligonucleotide
ccaucauguuccauuuuucgcuuucuc

SEQ ID NO: 58510 - RNA, 27 nt, Artificial Sequence
  Description of Artificial Sequence: Synthetic oligonucleotide
gcagucuacaugcuaaaucagagggua

SEQ ID NO: 58511 - RNA, 27 nt, Artificial Sequence
  Description of Artificial Sequence: Synthetic oligonucleotide
cauaaauagauccuuaaauagcucaaa

SEQ ID NO: 58512 - RNA, 27 nt, Artificial Sequence
  Description of Artificial Sequence: Synthetic oligonucleotide
ugauaauagugcuuuuucaccuuuuuc

SEQ ID NO: 58513 - RNA, 27 nt, Artificial Sequence
  Description of Artificial Sequence: Synthetic oligonucleotide
gcagaacugauaauagugcuuuuucac

SEQ ID NO: 58514 - RNA, 27 nt, Artificial Sequence
  Description of Artificial Sequence: Synthetic oligonucleotide
guagguuuaaucuuucuuuucagccau

SEQ ID NO: 58515 - RNA, 27 nt, Artificial Sequence
  Description of Artificial Sequence: Synthetic oligonucleotide
agaaggauuuuauuauaaggguuuaau

SEQ ID NO: 58516 - RNA, 27 nt, Artificial Sequence
  Description of Artificial Sequence: Synthetic oligonucleotide
gucuacagcauuggcuaauaguaugaa

SEQ ID NO: 58517 - RNA, 27 nt, Artificial Sequence
  Description of Artificial Sequence: Synthetic oligonucleotide
cuauuccuaucaaaaugcuucugucua

SEQ ID NO: 58518 - RNA, 27 nt, Artificial Sequence
  Description of Artificial Sequence: Synthetic oligonucleotide
ucagggccauuaucuuauuugcucuau

SEQ ID NO: 58519 - RNA, 27 nt, Artificial Sequence
  Description of Artificial Sequence: Synthetic oligonucleotide
ugcuugaggaagagaaaaauguugguc

SEQ ID NO: 58520 - RNA, 27 nt, Artificial Sequence
  Description of Artificial Sequence: Synthetic oligonucleotide
ugggcugaacuuuucucauacuuaaag

SEQ ID NO: 58521 - RNA, 27 nt, Artificial Sequence
  Description of Artificial Sequence: Synthetic oligonucleotide
gguucagcagccaucuuuauuccugcg

SEQ ID NO: 58522 - RNA, 27 nt, Artificial Sequence
  Description of Artificial Sequence: Synthetic oligonucleotide
ugaagagaacuuggucauucaaauuuc

SEQ ID NO: 58523 - RNA, 27 nt, Artificial Sequence
  Description of Artificial Sequence: Synthetic oligonucleotide
cucuaggcuggcuaucuuuauacauac

SEQ ID NO: 58524 - RNA, 27 nt, Artificial Sequence
  Description of Artificial Sequence: Synthetic oligonucleotide
acacuucacagagauaguuacagccau

SEQ ID NO: 58525 - RNA, 27 nt, Artificial Sequence
  Description of Artificial Sequence: Synthetic oligonucleotide
uugaaauuuucucacacuucacagaga

SEQ ID NO: 58526 - RNA, 27 nt, Artificial Sequence
  Description of Artificial Sequence: Synthetic oligonucleotide
ucaggaggauucauuuccuuaaaggaa

SEQ ID NO: 58527 - RNA, 27 nt, Artificial Sequence
  Description of Artificial Sequence: Synthetic oligonucleotide
auaugaugucacuuuuuguauccuuga

SEQ ID NO: 58528 - RNA, 27 nt, Artificial Sequence
  Description of Artificial Sequence: Synthetic oligonucleotide
uaugaugaagauucaaauugcaucuua

SEQ ID NO: 58529 - RNA, 27 nt, Artificial Sequence
  Description of Artificial Sequence: Synthetic oligonucleotide
uuaauagcuagucuucguuuugaacag

SEQ ID NO: 58530 - RNA, 27 nt, Artificial Sequence
  Description of Artificial Sequence: Synthetic oligonucleotide
auuuuuaguagagaugagguuucacca

SEQ ID NO: 58531 - RNA, 27 nt, Artificial Sequence
  Description of Artificial Sequence: Synthetic oligonucleotide
aggcgagauagagcuucucuuucguuc

SEQ ID NO: 58532 - RNA, 27 nt, Artificial Sequence
  Description of Artificial Sequence: Synthetic oligonucleotide
aacuggaccgaaggcgcuuguggagaa

SEQ ID NO: 58533 - RNA, 27 nt, Artificial Sequence
  Description of Artificial Sequence: Synthetic oligonucleotide
gcggcuacaucuuuggaaucuucuccu

SEQ ID NO: 58534 - RNA, 27 nt, Artificial Sequence
  Description of Artificial Sequence: Synthetic oligonucleotide
caagucuccucauugaauccagauugg

SEQ ID NO: 58535 - RNA, 27 nt, Artificial Sequence
  Description of Artificial Sequence: Synthetic oligonucleotide
uccucacuacucucaaaucuguucugg

SEQ ID NO: 58536 - RNA, 27 nt, Artificial Sequence
  Description of Artificial Sequence: Synthetic oligonucleotide
uuuguacucaucugcacagcucuggcu

SEQ ID NO: 58537 - RNA, 27 nt, Artificial Sequence
  Description of Artificial Sequence: Synthetic oligonucleotide
gcccauuaacaacaacaaucugaggug

SEQ ID NO: 58538 - RNA, 27 nt, Artificial Sequence
  Description of Artificial Sequence: Synthetic oligonucleotide
aauaaauuaaaaauaauuaaaauagug

SEQ ID NO: 58539 - RNA, 27 nt, Artificial Sequence
  Description of Artificial Sequence: Synthetic oligonucleotide
cauauuuaaauauuaauaaauuaaaaa

SEQ ID NO: 58540 - RNA, 27 nt, Artificial Sequence
  Description of Artificial Sequence: Synthetic oligonucleotide
gaaacaaaggauauucaaacugcauag

SEQ ID NO: 58541 - RNA, 27 nt, Artificial Sequence
  Description of Artificial Sequence: Synthetic oligonucleotide
caaacacuuagacgccagcagcauggg

SEQ ID NO: 58542 - RNA, 27 nt, Artificial Sequence
  Description of Artificial Sequence: Synthetic oligonucleotide
uuugucacaggugaaaugcacaucuga

SEQ ID NO: 58543 - RNA, 27 nt, Artificial Sequence
  Description of Artificial Sequence: Synthetic oligonucleotide
uaauucagccuggcacagguuuugauc

SEQ ID NO: 58544 - RNA, 27 nt, Artificial Sequence
  Description of Artificial Sequence: Synthetic oligonucleotide
auuguaagaaugacuacccacauucac

SEQ ID NO: 58545 - RNA, 27 nt, Artificial Sequence
  Description of Artificial Sequence: Synthetic oligonucleotide
caauuguaagaaugacuacccacauuc

SEQ ID NO: 58546 - RNA, 27 nt, Artificial Sequence
  Description of Artificial Sequence: Synthetic oligonucleotide
guacacucucugaugcucauuuucaua

SEQ ID NO: 58547 - RNA, 27 nt, Artificial Sequence
  Description of Artificial Sequence: Synthetic oligonucleotide
cugcugaguucuacaugaaaagcaaau

SEQ ID NO: 58548 - RNA, 27 nt, Artificial Sequence
  Description of Artificial Sequence: Synthetic oligonucleotide
uacugaaaauaaauauagaaauacaac

SEQ ID NO: 58549 - RNA, 27 nt, Artificial Sequence
  Description of Artificial Sequence: Synthetic oligonucleotide
uuccauuuaagaaacauuaaucaaaac

SEQ ID NO: 58550 - RNA, 27 nt, Artificial Sequence
  Description of Artificial Sequence: Synthetic oligonucleotide
acaauuuuaggcacuauacacguuguu

SEQ ID NO: 58551 - RNA, 27 nt, Artificial Sequence
  Description of Artificial Sequence: Synthetic oligonucleotide
ccagauguuaguagccaaggauauggu

SEQ ID NO: 58552 - RNA, 27 nt, Artificial Sequence
  Description of Artificial Sequence: Synthetic oligonucleotide
agcucacagucuccagauguuaguagc

SEQ ID NO: 58553 - RNA, 27 nt, Artificial Sequence
  Description of Artificial Sequence: Synthetic oligonucleotide
auuaauaaaaagcacacaacuuauggc

SEQ ID NO: 58554 - RNA, 27 nt, Artificial Sequence
  Description of Artificial Sequence: Synthetic oligonucleotide
aauguaagaagagccaaaaugaugcau

SEQ ID NO: 58555 - RNA, 27 nt, Artificial Sequence
  Description of Artificial Sequence: Synthetic oligonucleotide
acauuuuuacaaauguaagaagagcca

SEQ ID NO: 58556 - RNA, 27 nt, Artificial Sequence
  Description of Artificial Sequence: Synthetic oligonucleotide
aauaugaauuaagaugaccuaaucugu

SEQ ID NO: 58557 - RNA, 27 nt, Artificial Sequence
  Description of Artificial Sequence: Synthetic oligonucleotide
ucaugauuaguucuuucaauuccaucc

SEQ ID NO: 58558 - RNA, 27 nt, Artificial Sequence
  Description of Artificial Sequence: Synthetic oligonucleotide
cccaagagcagaaggaaugagugugca

SEQ ID NO: 58559 - RNA, 27 nt, Artificial Sequence
  Description of Artificial Sequence: Synthetic oligonucleotide
cucaaagcuacugguuaccucuacacc

SEQ ID NO: 58560 - RNA, 27 nt, Artificial Sequence
  Description of Artificial Sequence: Synthetic oligonucleotide
ugaaauauuacguggcaugugguuggg

SEQ ID NO: 58561 - RNA, 27 nt, Artificial Sequence
  Description of Artificial Sequence: Synthetic oligonucleotide
agugaagagaauaacuuguuuccgaag

SEQ ID NO: 58562 - RNA, 27 nt, Artificial Sequence
  Description of Artificial Sequence: Synthetic oligonucleotide
uuucuuagcauuaguuauugggaguga

SEQ ID NO: 58563 - RNA, 27 nt, Artificial Sequence
  Description of Artificial Sequence: Synthetic oligonucleotide
uugauuuucagcauuucuuagcauuag

SEQ ID NO: 58564 - RNA, 27 nt, Artificial Sequence
  Description of Artificial Sequence: Synthetic oligonucleotide
aaaguaaucauauuuagagaaagacag

SEQ ID NO: 58565 - RNA, 27 nt, Artificial Sequence
  Description of Artificial Sequence: Synthetic oligonucleotide
uguagaacaaaaugccugaaauucagc

SEQ ID NO: 58566 - RNA, 27 nt, Artificial Sequence
  Description of Artificial Sequence: Synthetic oligonucleotide
gagagucccgggugagagggaaucgcc

SEQ ID NO: 58567 - RNA, 27 nt, Artificial Sequence
  Description of Artificial Sequence: Synthetic oligonucleotide
cuuuacuuuaaagguucacuuuccuug

SEQ ID NO: 58568 - RNA, 27 nt, Artificial Sequence
  Description of Artificial Sequence: Synthetic oligonucleotide
ccaggcuuccagagcaugcagccuccu

SEQ ID NO: 58569 - RNA, 27 nt, Artificial Sequence
  Description of Artificial Sequence: Synthetic oligonucleotide
cucucuuuuguuuucuguucagagaaa

SEQ ID NO: 58570 - RNA, 27 nt, Artificial Sequence
  Description of Artificial Sequence: Synthetic oligonucleotide
cggcauaacugauuacagccaaguuca

SEQ ID NO: 58571 - RNA, 27 nt, Artificial Sequence
  Description of Artificial Sequence: Synthetic oligonucleotide
uggacuucuuuuaauuuuggcuucuuc

SEQ ID NO: 58572 - RNA, 27 nt, Artificial Sequence
  Description of Artificial Sequence: Synthetic oligonucleotide
uaaccucaccuggacuucuuuuaauuu

SEQ ID NO: 58573 - RNA, 27 nt, Artificial Sequence
  Description of Artificial Sequence: Synthetic oligonucleotide
guccucuucccgauaauccggauucag

SEQ ID NO: 58574 - RNA, 27 nt, Artificial Sequence
  Description of Artificial Sequence: Synthetic oligonucleotide
acaauacuugcuuugaugucacauuaa

SEQ ID NO: 58575 - RNA, 27 nt, Artificial Sequence
  Description of Artificial Sequence: Synthetic oligonucleotide
gagugcuacaauacuugcuuugauguc

SEQ ID NO: 58576 - RNA, 27 nt, Artificial Sequence
  Description of Artificial Sequence: Synthetic oligonucleotide
auuugugguuuuguuuucucucucucu

SEQ ID NO: 58577 - RNA, 27 nt, Artificial Sequence
  Description of Artificial Sequence: Synthetic oligonucleotide
uguaugggcuuaaauacuacagcgagg

SEQ ID NO: 58578 - RNA, 27 nt, Artificial Sequence
  Description of Artificial Sequence: Synthetic oligonucleotide
cuguaugggcuuaaauacuacagcgag

SEQ ID NO: 58579 - RNA, 27 nt, Artificial Sequence
  Description of Artificial Sequence: Synthetic oligonucleotide
ggaagguuucuguaugggcuuaaauac

SEQ ID NO: 58580 - RNA, 27 nt, Artificial Sequence
  Description of Artificial Sequence: Synthetic oligonucleotide
guagguauaccauguuuauuuuaauac

SEQ ID NO: 58581 - RNA, 27 nt, Artificial Sequence
  Description of Artificial Sequence: Synthetic oligonucleotide
uccgaaaacuggccgaucagaacagcc

SEQ ID NO: 58582 - RNA, 27 nt, Artificial Sequence
  Description of Artificial Sequence: Synthetic oligonucleotide
cccuguuccaaaguucaaauuauuugu

SEQ ID NO: 58583 - RNA, 27 nt, Artificial Sequence
  Description of Artificial Sequence: Synthetic oligonucleotide
acuggaaaguuaaauuaaggucgcaau

SEQ ID NO: 58584 - RNA, 27 nt, Artificial Sequence
  Description of Artificial Sequence: Synthetic oligonucleotide
caaaaccaaacuuuagcuuucucagcc

SEQ ID NO: 58585 - RNA, 27 nt, Artificial Sequence
  Description of Artificial Sequence: Synthetic oligonucleotide
uacagugggaaguagcaucuuuacuuu

SEQ ID NO: 58586 - RNA, 27 nt, Artificial Sequence
  Description of Artificial Sequence: Synthetic oligonucleotide
ucauaugguaucagcaauuaagcagua

SEQ ID NO: 58587 - RNA, 27 nt, Artificial Sequence
  Description of Artificial Sequence: Synthetic oligonucleotide
cagcccauguuucauucauaugguauc

SEQ ID NO: 58588 - RNA, 27 nt, Artificial Sequence
  Description of Artificial Sequence: Synthetic oligonucleotide
uaugaaaaaguuggauaagaaaguugg

SEQ ID NO: 58589 - RNA, 27 nt, Artificial Sequence
  Description of Artificial Sequence: Synthetic oligonucleotide
uccggccucaugaugucaugcaaggcu

SEQ ID NO: 58590 - RNA, 27 nt, Artificial Sequence
  Description of Artificial Sequence: Synthetic oligonucleotide
acaaaugcagucauauacaaauucagg

SEQ ID NO: 58591 - RNA, 27 nt, Artificial Sequence
  Description of Artificial Sequence: Synthetic oligonucleotide
gguaguaaacauucuacuaggauucuu

SEQ ID NO: 58592 - RNA, 27 nt, Artificial Sequence
  Description of Artificial Sequence: Synthetic oligonucleotide
uuucaucaaaaaauucuucccuuucug

SEQ ID NO: 58593 - RNA, 27 nt, Artificial Sequence
  Description of Artificial Sequence: Synthetic oligonucleotide
aaauucacacacuggcaugccgauagc

SEQ ID NO: 58594 - RNA, 27 nt, Artificial Sequence
  Description of Artificial Sequence: Synthetic oligonucleotide
acauacauugcucuacuaugaggugaa

SEQ ID NO: 58595 - RNA, 27 nt, Artificial Sequence
  Description of Artificial Sequence: Synthetic oligonucleotide
uauauaugugcuuuggcaauucuggug

SEQ ID NO: 58596 - RNA, 27 nt, Artificial Sequence
  Description of Artificial Sequence: Synthetic oligonucleotide
ggagaaacuauuacccagaucaccacu

SEQ ID NO: 58597 - RNA, 27 nt, Artificial Sequence
  Description of Artificial Sequence: Synthetic oligonucleotide
auuuggagaaacuauuacccagaucac

SEQ ID NO: 58598 - RNA, 27 nt, Artificial Sequence
  Description of Artificial Sequence: Synthetic oligonucleotide
uuucuaggaaguauucaucacauccac

SEQ ID NO: 58599 - RNA, 27 nt, Artificial Sequence
  Description of Artificial Sequence: Synthetic oligonucleotide
cauauaugguguagcuguggaaaugcg

SEQ ID NO: 58600 - RNA, 27 nt, Artificial Sequence
  Description of Artificial Sequence: Synthetic oligonucleotide
cuccauucauauaugguguagcugugg

SEQ ID NO: 58601 - RNA, 27 nt, Artificial Sequence
  Description of Artificial Sequence: Synthetic oligonucleotide
aucuucuucucguguaagaacugcagc

SEQ ID NO: 58602 - RNA, 27 nt, Artificial Sequence
  Description of Artificial Sequence: Synthetic oligonucleotide
ucccuguaaaugaucuucuucucgugu

SEQ ID NO: 58603 - RNA, 27 nt, Artificial Sequence
  Description of Artificial Sequence: Synthetic oligonucleotide
gucccuguaaaugaucuucuucucgug

SEQ ID NO: 58604 - RNA, 27 nt, Artificial Sequence
  Description of Artificial Sequence: Synthetic oligonucleotide
ucaggucccuguaaaugaucuucuucu

SEQ ID NO: 58605 - RNA, 27 nt, Artificial Sequence
  Description of Artificial Sequence: Synthetic oligonucleotide
gaugcagucaaacaccucuuccucugu

SEQ ID NO: 58606 - RNA, 27 nt, Artificial Sequence
  Description of Artificial Sequence: Synthetic oligonucleotide
cgaugcagucaaacaccucuuccucug

SEQ ID NO: 58607 - RNA, 27 nt, Artificial Sequence
  Description of Artificial Sequence: Synthetic oligonucleotide
cccugugaacucgcccucaaaguagcg

SEQ ID NO: 58608 - RNA, 27 nt, Artificial Sequence
  Description of Artificial Sequence: Synthetic oligonucleotide
ggacagaggugccaggagaugcccuca

SEQ ID NO: 58609 - RNA, 27 nt, Artificial Sequence
  Description of Artificial Sequence: Synthetic oligonucleotide
uuaaaaagacaaaccauaucacuccuu

SEQ ID NO: 58610 - RNA, 27 nt, Artificial Sequence
  Description of Artificial Sequence: Synthetic oligonucleotide
cuuaaaaagacaaaccauaucacuccu

SEQ ID NO: 58611 - RNA, 27 nt, Artificial Sequence
  Description of Artificial Sequence: Synthetic oligonucleotide
gacaaccuuuaggaucuuuacugcaac

SEQ ID NO: 58612 - RNA, 27 nt, Artificial Sequence
  Description of Artificial Sequence: Synthetic oligonucleotide
gucgacaaccuuuaggaucuuuacugc

SEQ ID NO: 58613 - RNA, 27 nt, Artificial Sequence
  Description of Artificial Sequence: Synthetic oligonucleotide
acaauugccagguuguccuuugucaug

SEQ ID NO: 58614 - RNA, 27 nt, Artificial Sequence
  Description of Artificial Sequence: Synthetic oligonucleotide
ccucgcaccacugggucacaauugcca

SEQ ID NO: 58615 - RNA, 27 nt, Artificial Sequence
  Description of Artificial Sequence: Synthetic oligonucleotide
auuucaugucucuauggaugauguucu

SEQ ID NO: 58616 - RNA, 27 nt, Artificial Sequence
  Description of Artificial Sequence: Synthetic oligonucleotide
uggagaaauauauuguuggauuucaug

SEQ ID NO: 58617 - RNA, 27 nt, Artificial Sequence
  Description of Artificial Sequence: Synthetic oligonucleotide
agccuucauggagaaauauauuguugg

SEQ ID NO: 58618 - RNA, 27 nt, Artificial Sequence
  Description of Artificial Sequence: Synthetic oligonucleotide
accacuccagcgugacuuuacuguugc

SEQ ID NO: 58619 - RNA, 27 nt, Artificial Sequence
  Description of Artificial Sequence: Synthetic oligonucleotide
ccucucuuccuuuacuuucuucacaca

SEQ ID NO: 58620 - RNA, 27 nt, Artificial Sequence
  Description of Artificial Sequence: Synthetic oligonucleotide
gcccgaugcaaggauggcucggaagcg

SEQ ID NO: 58621 - RNA, 27 nt, Artificial Sequence
  Description of Artificial Sequence: Synthetic oligonucleotide
cacaguaggauauucaaccuccauuuc

SEQ ID NO: 58622 - RNA, 27 nt, Artificial Sequence
  Description of Artificial Sequence: Synthetic oligonucleotide
uuacacaguaggauauucaaccuccau

SEQ ID NO: 58623 - RNA, 27 nt, Artificial Sequence
  Description of Artificial Sequence: Synthetic oligonucleotide
uacacuacaagggaaaacucaaaaucu

SEQ ID NO: 58624 - RNA, 27 nt, Artificial Sequence
  Description of Artificial Sequence: Synthetic oligonucleotide
caaucaacaaagaacaaacaggauaaa

SEQ ID NO: 58625 - RNA, 27 nt, Artificial Sequence
  Description of Artificial Sequence: Synthetic oligonucleotide
uuucaaucaacaaagaacaaacaggau

SEQ ID NO: 58626 - RNA, 27 nt, Artificial Sequence
  Description of Artificial Sequence: Synthetic oligonucleotide
auggaagaaaaagaaggcuguagagaa

SEQ ID NO: 58627 - RNA, 27 nt, Artificial Sequence
  Description of Artificial Sequence: Synthetic oligonucleotide
uagaaggaagauuagcuauggaagaaa

SEQ ID NO: 58628 - RNA, 27 nt, Artificial Sequence
  Description of Artificial Sequence: Synthetic oligonucleotide
augaagcauucaacaggaagauuauuu

SEQ ID NO: 58629 - RNA, 27 nt, Artificial Sequence
  Description of Artificial Sequence: Synthetic oligonucleotide
caugaagcauucaacaggaagauuauu

SEQ ID NO: 58630 - RNA, 27 nt, Artificial Sequence
  Description of Artificial Sequence: Synthetic oligonucleotide
ucaaaguagaauucaagucaugaagca

SEQ ID NO: 58631 - RNA, 27 nt, Artificial Sequence
  Description of Artificial Sequence: Synthetic oligonucleotide
gucuguaguugcuucucucccucuuag

SEQ ID NO: 58632 - RNA, 27 nt, Artificial Sequence
  Description of Artificial Sequence: Synthetic oligonucleotide
guugaccuuggucugguaggagacggc

SEQ ID NO: 58633 - RNA, 27 nt, Artificial Sequence
  Description of Artificial Sequence: Synthetic oligonucleotide
gucgagauagucgggccgauugaucuc

SEQ ID NO: 58634 - RNA, 27 nt, Artificial Sequence
  Description of Artificial Sequence: Synthetic oligonucleotide
guuugggaagguuggauguucguccuc

SEQ ID NO: 58635 - RNA, 27 nt, Artificial Sequence
  Description of Artificial Sequence: Synthetic oligonucleotide
aguucuaagcuuggguuccgacccuaa

SEQ ID NO: 58636 - RNA, 27 nt, Artificial Sequence
  Description of Artificial Sequence: Synthetic oligonucleotide
uuaaaguucuaagcuuggguuccgacc

SEQ ID NO: 58637 - RNA, 27 nt, Artificial Sequence
  Description of Artificial Sequence: Synthetic oligonucleotide
guugcuuaaaguucuaagcuuggguuc

SEQ ID NO: 58638 - RNA, 27 nt, Artificial Sequence
  Description of Artificial Sequence: Synthetic oligonucleotide
gugguggucuuguugcuuaaaguucua

SEQ ID NO: 58639 - RNA, 27 nt, Artificial Sequence
  Description of Artificial Sequence: Synthetic oligonucleotide
acuuuauuucucgccacugaauaguag

SEQ ID NO: 58640 - RNA, 27 nt, Artificial Sequence
  Description of Artificial Sequence: Synthetic oligonucleotide
aacuuuauuucucgccacugaauagua

SEQ ID NO: 58641 - RNA, 27 nt, Artificial Sequence
  Description of Artificial Sequence: Synthetic oligonucleotide
ggaucauuuccuguuaucuguguuugu

SEQ ID NO: 58642 - RNA, 27 nt, Artificial Sequence
  Description of Artificial Sequence: Synthetic oligonucleotide
guuucauuucuucucuuuucuuaaggc

SEQ ID NO: 58643 - RNA, 27 nt, Artificial Sequence
  Description of Artificial Sequence: Synthetic oligonucleotide
ggaggauggaaacacacuccuucaguu

SEQ ID NO: 58644 - RNA, 27 nt, Artificial Sequence
  Description of Artificial Sequence: Synthetic oligonucleotide
ucaaagauuuucagucccgcggugaca

SEQ ID NO: 58645 - RNA, 27 nt, Artificial Sequence
  Description of Artificial Sequence: Synthetic oligonucleotide
ccugaacggcacgcuuauuucugcugu

SEQ ID NO: 58646 - RNA, 27 nt, Artificial Sequence
  Description of Artificial Sequence: Synthetic oligonucleotide
cuucuggacccugaacggcacgcuuau

SEQ ID NO: 58647 - RNA, 27 nt, Artificial Sequence
  Description of Artificial Sequence: Synthetic oligonucleotide
caagcagucuugagugacuguuucuuc

SEQ ID NO: 58648 - RNA, 27 nt, Artificial Sequence
  Description of Artificial Sequence: Synthetic oligonucleotide
ccaaagacauggaccuucuuccucuga

SEQ ID NO: 58649 - RNA, 27 nt, Artificial Sequence
  Description of Artificial Sequence: Synthetic oligonucleotide
guguuucaggcauauuuugaauacauc

SEQ ID NO: 58650 - RNA, 27 nt, Artificial Sequence
  Description of Artificial Sequence: Synthetic oligonucleotide
gagguacagagaaagggaggaaaauag

SEQ ID NO: 58651 - RNA, 27 nt, Artificial Sequence
  Description of Artificial Sequence: Synthetic oligonucleotide
ucuugucuugcucuaucuuucuuuggu

SEQ ID NO: 58652 - RNA, 27 nt, Artificial Sequence
  Description of Artificial Sequence: Synthetic oligonucleotide
uuucuugucuugcucuaucuuucuuug

SEQ ID NO: 58653 - RNA, 27 nt, Artificial Sequence
  Description of Artificial Sequence: Synthetic oligonucleotide
ggaucuuguacaaacaaaugcuuucuc

SEQ ID NO: 58654 - RNA, 27 nt, Artificial Sequence
  Description of Artificial Sequence: Synthetic oligonucleotide
ucugcaaguacguucguuuaacucaag

SEQ ID NO: 58655 - RNA, 27 nt, Artificial Sequence
  Description of Artificial Sequence: Synthetic oligonucleotide
ucuguaucgaucguucuguaucagucu

SEQ ID NO: 58656 - RNA, 27 nt, Artificial Sequence
  Description of Artificial Sequence: Synthetic oligonucleotide
auuuauuuuuauauauauauaauauau

SEQ ID NO: 58657 - RNA, 27 nt, Artificial Sequence
  Description of Artificial Sequence: Synthetic oligonucleotide
auauuuauuuuuauauauauauaauau

SEQ ID NO: 58658 - RNA, 27 nt, Artificial Sequence
  Description of Artificial Sequence: Synthetic oligonucleotide
cacagcagucaaauacauccagugaag

SEQ ID NO: 58659 - RNA, 27 nt, Artificial Sequence
  Description of Artificial Sequence: Synthetic oligonucleotide
gucucucaucuccuccucuucccuguc

SEQ ID NO: 58660 - RNA, 27 nt, Artificial Sequence
  Description of Artificial Sequence: Synthetic oligonucleotide
ccaagugggacaaaaaaaagaucaugc

SEQ ID NO: 58661 - RNA, 14 nt, Artificial Sequence
  Description of Artificial Sequence: Synthetic oligonucleotide
guauuuugaugagg

SEQ ID NO: 58662 - RNA, 12 nt, Artificial Sequence
  Description of Artificial Sequence: Synthetic oligonucleotide
ggcccagaugau

SEQ ID NO: 58663 - RNA, 14 nt, Artificial Sequence
  Description of Artificial Sequence: Synthetic oligonucleotide
gggaagaaaacuau

SEQ ID NO: 58664 - RNA, 15 nt, Artificial Sequence
  Description of Artificial Sequence: Synthetic oligonucleotide
guuuuaauuuauuuc

SEQ ID NO: 58665 - RNA, 12 nt, Artificial Sequence
  Description of Artificial Sequence: Synthetic oligonucleotide
acguagggaaau

SEQ ID NO: 58666 - RNA, 12 nt, Artificial Sequence
  Description of Artificial Sequence: Synthetic oligonucleotide
ccaggguuuacc

SEQ ID NO: 58667 - RNA, 11 nt, Artificial Sequence
  Description of Artificial Sequence: Synthetic oligonucleotide
agcaagguuua

SEQ ID NO: 58668 - RNA, 12 nt, Artificial Sequence
  Description of Artificial Sequence: Synthetic oligonucleotide
uguauuauguug

SEQ ID NO: 58669 - RNA, 15 nt, Artificial Sequence
  Description of Artificial Sequence: Synthetic oligonucleotide
uuuuaaucuuuguga

SEQ ID NO: 58670 - RNA, 14 nt, Artificial Sequence
  Description of Artificial Sequence: Synthetic oligonucleotide
uuaaucuuugugac

SEQ ID NO: 58671 - RNA, 13 nt, Artificial Sequence
  Description of Artificial Sequence: Synthetic oligonucleotide
gcugcuuaugucu

SEQ ID NO: 58672 - RNA, 14 nt, Artificial Sequence
  Description of Artificial Sequence: Synthetic oligonucleotide
aaguguuucagaag

SEQ ID NO: 58673 - RNA, 13 nt, Artificial Sequence
  Description of Artificial Sequence: Synthetic oligonucleotide
gaccaucaauaag

SEQ ID NO: 58674 - RNA, 13 nt, Artificial Sequence
  Description of Artificial Sequence: Synthetic oligonucleotide
ccaucaauaagga

SEQ ID NO: 58675 - RNA, 14 nt, Artificial Sequence
  Description of Artificial Sequence: Synthetic oligonucleotide
ucaauaaggaagaa

SEQ ID NO: 58676 - RNA, 14 nt, Artificial Sequence
  Description of Artificial Sequence: Synthetic oligonucleotide
aauaaggaagaagc

SEQ ID NO: 58677 - RNA, 13 nt, Artificial Sequence
  Description of Artificial Sequence: Synthetic oligonucleotide
aggaagaagcccu

SEQ ID NO: 58678 - RNA, 13 nt, Artificial Sequence
  Description of Artificial Sequence: Synthetic oligonucleotide
gcauaacuaaagg

SEQ ID NO: 58679 - RNA, 14 nt, Artificial Sequence
  Description of Artificial Sequence: Synthetic oligonucleotide
cauaacuaaaggug

SEQ ID NO: 58680 - RNA, 12 nt, Artificial Sequence
  Description of Artificial Sequence: Synthetic oligonucleotide
cuacaucacgcc

SEQ ID NO: 58681 - RNA, 12 nt, Artificial Sequence
  Description of Artificial Sequence: Synthetic oligonucleotide
acuggauuuaag

SEQ ID NO: 58682 - RNA, 12 nt, Artificial Sequence
  Description of Artificial Sequence: Synthetic oligonucleotide
cuggauuuaagc

SEQ ID NO: 58683 - RNA, 13 nt, Artificial Sequence
  Description of Artificial Sequence: Synthetic oligonucleotide
gauuuaagcagag

SEQ ID NO: 58684 - RNA, 13 nt, Artificial Sequence
  Description of Artificial Sequence: Synthetic oligonucleotide
auuuaagcagagu

SEQ ID NO: 58685 - RNA, 13 nt, Artificial Sequence
  Description of Artificial Sequence: Synthetic oligonucleotide
uuaagcagaguuc

SEQ ID NO: 58686 - RNA, 13 nt, Artificial Sequence
  Description of Artificial Sequence: Synthetic oligonucleotide
uaagcagaguuca

SEQ ID NO: 58687 - RNA, 14 nt, Artificial Sequence
  Description of Artificial Sequence: Synthetic oligonucleotide
agcagaguucaaaa

SEQ ID NO: 58688 - RNA, 12 nt, Artificial Sequence
  Description of Artificial Sequence: Synthetic oligonucleotide
cucagggucuga

SEQ ID NO: 58689 - RNA, 13 nt, Artificial Sequence
  Description of Artificial Sequence: Synthetic oligonucleotide
caagcaacuacau

SEQ ID NO: 58690 - RNA, 12 nt, Artificial Sequence
  Description of Artificial Sequence: Synthetic oligonucleotide
aucaauggcagc

SEQ ID NO: 58691 - RNA, 11 nt, Artificial Sequence
  Description of Artificial Sequence: Synthetic oligonucleotide
uuccagcccac

SEQ ID NO: 58692 - RNA, 12 nt, Artificial Sequence
  Description of Artificial Sequence: Synthetic oligonucleotide
cagcugagaaug

SEQ ID NO: 58693 - RNA, 13 nt, Artificial Sequence
  Description of Artificial Sequence: Synthetic oligonucleotide
aacguaucuccua

SEQ ID NO: 58694 - RNA, 14 nt, Artificial Sequence
  Description of Artificial Sequence: Synthetic oligonucleotide
ccuaaaauaauuuc

SEQ ID NO: 58695 - RNA, 13 nt, Artificial Sequence
  Description of Artificial Sequence: Synthetic oligonucleotide
uggaagauucagc

SEQ ID NO: 58696 - RNA, 12 nt, Artificial Sequence
  Description of Artificial Sequence: Synthetic oligonucleotide
uuaaacucuccu

SEQ ID NO: 58697 - RNA, 12 nt, Artificial Sequence
  Description of Artificial Sequence: Synthetic oligonucleotide
cagccuacaguu

SEQ ID NO: 58698 - RNA, 13 nt, Artificial Sequence
  Description of Artificial Sequence: Synthetic oligonucleotide
guuauguucaguc

SEQ ID NO: 58699 - RNA, 13 nt, Artificial Sequence
  Description of Artificial Sequence: Synthetic oligonucleotide
cacauacaaaaug

SEQ ID NO: 58700 - RNA, 9 nt, Artificial Sequence
  Description of Artificial Sequence: Synthetic oligonucleotide
uccuuuugc

SEQ ID NO: 58701 - RNA, 12 nt, Artificial Sequence
  Description of Artificial Sequence: Synthetic oligonucleotide
ugaccugugaag

SEQ ID NO: 58702 - RNA, 12 nt, Artificial Sequence
  Description of Artificial Sequence: Synthetic oligonucleotide
cuaucucacaca

SEQ ID NO: 58703 - RNA, 13 nt, Artificial Sequence
  Description of Artificial Sequence: Synthetic oligonucleotide
uguccucaauugu

SEQ ID NO: 58704 - RNA, 12 nt, Artificial Sequence
  Description of Artificial Sequence: Synthetic oligonucleotide
aaaccguagcug

SEQ ID NO: 58705 - RNA, 12 nt, Artificial Sequence
  Description of Artificial Sequence: Synthetic oligonucleotide
uagcuggcaagc

SEQ ID NO: 58706 - RNA, 14 nt, Artificial Sequence
  Description of Artificial Sequence: Synthetic oligonucleotide
uuguaugguuaaaa

SEQ ID NO: 58707 - RNA, 14 nt, Artificial Sequence
  Description of Artificial Sequence: Synthetic oligonucleotide
ugguuaaaagaugg

SEQ ID NO: 58708 - RNA, 13 nt, Artificial Sequence
  Description of Artificial Sequence: Synthetic oligonucleotide
cagggaauuauac

SEQ ID NO: 58709 - RNA, 12 nt, Artificial Sequence
  Description of Artificial Sequence: Synthetic oligonucleotide
acaaucuugcug

SEQ ID NO: 58710 - RNA, 13 nt, Artificial Sequence
  Description of Artificial Sequence: Synthetic oligonucleotide
ccaauaaugaaga

SEQ ID NO: 58711 - RNA, 13 nt, Artificial Sequence
  Description of Artificial Sequence: Synthetic oligonucleotide
acuuuggauguuc

SEQ ID NO: 58712 - RNA, 12 nt, Artificial Sequence
  Description of Artificial Sequence: Synthetic oligonucleotide
aaugcuuccacu

SEQ ID NO: 58713 - RNA, 11 nt, Artificial Sequence
  Description of Artificial Sequence: Synthetic oligonucleotide
gagaaaguuug

SEQ ID NO: 58714 - RNA, 11 nt, Artificial Sequence
  Description of Artificial Sequence: Synthetic oligonucleotide
aaagaacuacu

SEQ ID NO: 58715 - RNA, 12 nt, Artificial Sequence
  Description of Artificial Sequence: Synthetic oligonucleotide
uuagaaauacgg

SEQ ID NO: 58716 - RNA, 12 nt, Artificial Sequence
  Description of Artificial Sequence: Synthetic oligonucleotide
aacauggguaca

SEQ ID NO: 58717 - RNA, 14 nt, Artificial Sequence
  Description of Artificial Sequence: Synthetic oligonucleotide
aaagacacagaaga

SEQ ID NO: 58718 - RNA, 11 nt, Artificial Sequence
  Description of Artificial Sequence: Synthetic oligonucleotide
uaguagggagg

SEQ ID NO: 58719 - RNA, 12 nt, Artificial Sequence
  Description of Artificial Sequence: Synthetic oligonucleotide
gccuucugcagc

SEQ ID NO: 58720 - RNA, 10 nt, Artificial Sequence
  Description of Artificial Sequence: Synthetic oligonucleotide
ggucugguac

SEQ ID NO: 58721 - RNA, 12 nt, Artificial Sequence
  Description of Artificial Sequence: Synthetic oligonucleotide
cuaguccuuccg

SEQ ID NO: 58722 - RNA, 12 nt, Artificial Sequence
  Description of Artificial Sequence: Synthetic oligonucleotide
ccagugaauauu

SEQ ID NO: 58723 - RNA, 13 nt, Artificial Sequence
  Description of Artificial Sequence: Synthetic oligonucleotide
augaauucaaguu

SEQ ID NO: 58724 - RNA, 12 nt, Artificial Sequence
  Description of Artificial Sequence: Synthetic oligonucleotide
caggacacagau

SEQ ID NO: 58725 - RNA, 12 nt, Artificial Sequence
  Description of Artificial Sequence: Synthetic oligonucleotide
cucaaagcacag

SEQ ID NO: 58726 - RNA, 10 nt, Artificial Sequence
  Description of Artificial Sequence: Synthetic oligonucleotide
accacugcca

SEQ ID NO: 58727 - RNA, 13 nt, Artificial Sequence
  Description of Artificial Sequence: Synthetic oligonucleotide
gaaacuacuagug

SEQ ID NO: 58728 - RNA, 12 nt, Artificial Sequence
  Description of Artificial Sequence: Synthetic oligonucleotide
aagucggacagc

SEQ ID NO: 58729 - RNA, 13 nt, Artificial Sequence
  Description of Artificial Sequence: Synthetic oligonucleotide
gaaagcgaaaaau

SEQ ID NO: 58730 - RNA, 13 nt, Artificial Sequence
  Description of Artificial Sequence: Synthetic oligonucleotide
cccucugauuuag

SEQ ID NO: 58731 - RNA, 12 nt, Artificial Sequence
  Description of Artificial Sequence: Synthetic oligonucleotide
ugagcuauuuaa

SEQ ID NO: 58732 - RNA, 13 nt, Artificial Sequence
  Description of Artificial Sequence: Synthetic oligonucleotide
aaaaggugaaaaa

SEQ ID NO: 58733 - RNA, 14 nt, Artificial Sequence
  Description of Artificial Sequence: Synthetic oligonucleotide
gaaaaagcacuauu

SEQ ID NO: 58734 - RNA, 12 nt, Artificial Sequence
  Description of Artificial Sequence: Synthetic oligonucleotide
ggcugaaaagaa

SEQ ID NO: 58735 - RNA, 12 nt, Artificial Sequence
  Description of Artificial Sequence: Synthetic oligonucleotide
uaaacccuuaua

SEQ ID NO: 58736 - RNA, 13 nt, Artificial Sequence
  Description of Artificial Sequence: Synthetic oligonucleotide
cauacuauuagcc

SEQ ID NO: 58737 - RNA, 12 nt, Artificial Sequence
  Description of Artificial Sequence: Synthetic oligonucleotide
gacagaagcauu

SEQ ID NO: 58738 - RNA, 14 nt, Artificial Sequence
  Description of Artificial Sequence: Synthetic oligonucleotide
agagcaaauaagau

SEQ ID NO: 58739 - RNA, 14 nt, Artificial Sequence
  Description of Artificial Sequence: Synthetic oligonucleotide
ccaacauuuuucuc

SEQ ID NO: 58740 - RNA, 15 nt, Artificial Sequence
  Description of Artificial Sequence: Synthetic oligonucleotide
uuaaguaugagaaaa

SEQ ID NO: 58741 - RNA, 14 nt, Artificial Sequence
  Description of Artificial Sequence: Synthetic oligonucleotide
caggaauaaagaug

SEQ ID NO: 58742 - RNA, 13 nt, Artificial Sequence
  Description of Artificial Sequence: Synthetic oligonucleotide
aauuugaaugacc

SEQ ID NO: 58743 - RNA, 14 nt, Artificial Sequence
  Description of Artificial Sequence: Synthetic oligonucleotide
auguauaaagauag

SEQ ID NO: 58744 - RNA, 12 nt, Artificial Sequence
  Description of Artificial Sequence: Synthetic oligonucleotide
ggcuguaacuau

SEQ ID NO: 58745 - RNA, 11 nt, Artificial Sequence
  Description of Artificial Sequence: Synthetic oligonucleotide
ucugugaagug

SEQ ID NO: 58746 - RNA, 14 nt, Artificial Sequence
  Description of Artificial Sequence: Synthetic oligonucleotide
ccuuuaaggaaaug

SEQ ID NO: 58747 - RNA, 13 nt, Artificial Sequence
  Description of Artificial Sequence: Synthetic oligonucleotide
aaggauacaaaaa

SEQ ID NO: 58748 - RNA, 12 nt, Artificial Sequence
  Description of Artificial Sequence: Synthetic oligonucleotide
agaugcaauuug

SEQ ID NO: 58749 - RNA, 12 nt, Artificial Sequence
  Description of Artificial Sequence: Synthetic oligonucleotide
guucaaaacgaa

SEQ ID NO: 58750 - RNA, 11 nt, Artificial Sequence
  Description of Artificial Sequence: Synthetic oligonucleotide
gugaaaccuca

SEQ ID NO: 58751 - RNA, 13 nt, Artificial Sequence
  Description of Artificial Sequence: Synthetic oligonucleotide
acgaaagagaagc

SEQ ID NO: 58752 - RNA, 12 nt, Artificial Sequence
  Description of Artificial Sequence: Synthetic oligonucleotide
cuccacaagcgc

SEQ ID NO: 58753 - RNA, 14 nt, Artificial Sequence
  Description of Artificial Sequence: Synthetic oligonucleotide
gagaagauuccaaa

SEQ ID NO: 58754 - RNA, 13 nt, Artificial Sequence
  Description of Artificial Sequence: Synthetic oligonucleotide
aaucuggauucaa

SEQ ID NO: 58755 - RNA, 13 nt, Artificial Sequence
  Description of Artificial Sequence: Synthetic oligonucleotide
agaacagauuuga

SEQ ID NO: 58756 - RNA, 11 nt, Artificial Sequence
  Description of Artificial Sequence: Synthetic oligonucleotide
ccagagcugug

SEQ ID NO: 58757 - RNA, 12 nt, Artificial Sequence
  Description of Artificial Sequence: Synthetic oligonucleotide
ccucagauuguu

SEQ ID NO: 58758 - RNA, 12 nt, Artificial Sequence
  Description of Artificial Sequence: Synthetic oligonucleotide
cuauuuuaauua

SEQ ID NO: 58759 - RNA, 13 nt, Artificial Sequence
  Description of Artificial Sequence: Synthetic oligonucleotide
uuuaauuuauuaa

SEQ ID NO: 58760 - RNA, 12 nt, Artificial Sequence
  Description of Artificial Sequence: Synthetic oligonucleotide
augcaguuugaa

SEQ ID NO: 58761 - RNA, 11 nt, Artificial Sequence
  Description of Artificial Sequence: Synthetic oligonucleotide
caugcugcugg

SEQ ID NO: 58762 - RNA, 13 nt, Artificial Sequence
  Description of Artificial Sequence: Synthetic oligonucleotide
agaugugcauuuc

SEQ ID NO: 58763 - RNA, 12 nt, Artificial Sequence
  Description of Artificial Sequence: Synthetic oligonucleotide
ucaaaaccugug

SEQ ID NO: 58764 - RNA, 11 nt, Artificial Sequence
  Description of Artificial Sequence: Synthetic oligonucleotide
gaaugugggua

SEQ ID NO: 58765 - RNA, 10 nt, Artificial Sequence
  Description of Artificial Sequence: Synthetic oligonucleotide
auguggguag

SEQ ID NO: 58766 - RNA, 13 nt, Artificial Sequence
  Description of Artificial Sequence: Synthetic oligonucleotide
ugaaaaugagcau

SEQ ID NO: 58767 - RNA, 13 nt, Artificial Sequence
  Description of Artificial Sequence: Synthetic oligonucleotide
uugcuuuucaugu

SEQ ID NO: 58768 - RNA, 12 nt, Artificial Sequence
  Description of Artificial Sequence: Synthetic oligonucleotide
uguauuucuaua

SEQ ID NO: 58769 - RNA, 13 nt, Artificial Sequence
  Description of Artificial Sequence: Synthetic oligonucleotide
uuugauuaauguu

SEQ ID NO: 58770 - RNA, 12 nt, Artificial Sequence
  Description of Artificial Sequence: Synthetic oligonucleotide
caacguguauag

SEQ ID NO: 58771 - RNA, 12 nt, Artificial Sequence
  Description of Artificial Sequence: Synthetic oligonucleotide
cauauccuuggc

SEQ ID NO: 58772 - RNA, 13 nt, Artificial Sequence
  Description of Artificial Sequence: Synthetic oligonucleotide
uacuaacaucugg

SEQ ID NO: 58773 - RNA, 11 nt, Artificial Sequence
  Description of Artificial Sequence: Synthetic oligonucleotide
cauaaguugug

SEQ ID NO: 58774 - RNA, 12 nt, Artificial Sequence
  Description of Artificial Sequence: Synthetic oligonucleotide
gcaucauuuugg

SEQ ID NO: 58775 - RNA, 10 nt, Artificial Sequence
  Description of Artificial Sequence: Synthetic oligonucleotide
gcucuucuua

SEQ ID NO: 58776 - RNA, 10 nt, Artificial Sequence
  Description of Artificial Sequence: Synthetic oligonucleotide
agauuagguc

SEQ ID NO: 58777 - RNA, 12 nt, Artificial Sequence
  Description of Artificial Sequence: Synthetic oligonucleotide
auggaauugaaa

SEQ ID NO: 58778 - RNA, 13 nt, Artificial Sequence
  Description of Artificial Sequence: Synthetic oligonucleotide
cacacucauuccu

SEQ ID NO: 58779 - RNA, 12 nt, Artificial Sequence
  Description of Artificial Sequence: Synthetic oligonucleotide
uguagagguaac

SEQ ID NO: 58780 - RNA, 11 nt, Artificial Sequence
  Description of Artificial Sequence: Synthetic oligonucleotide
caaccacaugc

SEQ ID NO: 58781 - RNA, 12 nt, Artificial Sequence
  Description of Artificial Sequence: Synthetic oligonucleotide
ucggaaacaagu

SEQ ID NO: 58782 - RNA, 11 nt, Artificial Sequence
  Description of Artificial Sequence: Synthetic oligonucleotide
acucccaauaa

SEQ ID NO: 58783 - RNA, 13 nt, Artificial Sequence
  Description of Artificial Sequence: Synthetic oligonucleotide
aaugcuaagaaau

SEQ ID NO: 58784 - RNA, 11 nt, Artificial Sequence
  Description of Artificial Sequence: Synthetic oligonucleotide
gucuuucucua

SEQ ID NO: 58785 - RNA, 11 nt, Artificial Sequence
  Description of Artificial Sequence: Synthetic oligonucleotide
ugaauuucagg

SEQ ID NO: 58786 - RNA, 13 nt, Artificial Sequence
  Description of Artificial Sequence: Synthetic oligonucleotide
cgauucccucuca

SEQ ID NO: 58787 - RNA, 11 nt, Artificial Sequence
  Description of Artificial Sequence: Synthetic oligonucleotide
aggaaagugaa

SEQ ID NO: 58788 - RNA, 12 nt, Artificial Sequence
  Description of Artificial Sequence: Synthetic oligonucleotide
gaggcugcaugc

SEQ ID NO: 58789 - RNA, 11 nt, Artificial Sequence
  Description of Artificial Sequence: Synthetic oligonucleotide
ucucugaacag

SEQ ID NO: 58790 - RNA, 12 nt, Artificial Sequence
  Description of Artificial Sequence: Synthetic oligonucleotide
aacuuggcugua

SEQ ID NO: 58791 - RNA, 12 nt, Artificial Sequence
  Description of Artificial Sequence: Synthetic oligonucleotide
agaagccaaaau

SEQ ID NO: 58792 - RNA, 14 nt, Artificial Sequence
  Description of Artificial Sequence: Synthetic oligonucleotide
auuaaaagaagucc

SEQ ID NO: 58793 - RNA, 14 nt, Artificial Sequence
  Description of Artificial Sequence: Synthetic oligonucleotide
gaauccggauuauc

SEQ ID NO: 58794 - RNA, 12 nt, Artificial Sequence
  Description of Artificial Sequence: Synthetic oligonucleotide
aaugugacauca

SEQ ID NO: 58795 - RNA, 13 nt, Artificial Sequence
  Description of Artificial Sequence: Synthetic oligonucleotide
caucaaagcaagu

SEQ ID NO: 58796 - RNA, 11 nt, Artificial Sequence
  Description of Artificial Sequence: Synthetic oligonucleotide
agagagagaaa

SEQ ID NO: 58797 - RNA, 13 nt, Artificial Sequence
  Description of Artificial Sequence: Synthetic oligonucleotide
ucgcuguaguauu

SEQ ID NO: 58798 - RNA, 14 nt, Artificial Sequence
  Description of Artificial Sequence: Synthetic oligonucleotide
cgcuguaguauuua

SEQ ID NO: 58799 - RNA, 13 nt, Artificial Sequence
  Description of Artificial Sequence: Synthetic oligonucleotide
auuuaagcccaua

SEQ ID NO: 58800 - RNA, 15 nt, Artificial Sequence
  Description of Artificial Sequence: Synthetic oligonucleotide
auuaaaauaaacaug

SEQ ID NO: 58801 - RNA, 12 nt, Artificial Sequence
  Description of Artificial Sequence: Synthetic oligonucleotide
cuguucugaucg

SEQ ID NO: 58802 - RNA, 16 nt, Artificial Sequence
  Description of Artificial Sequence: Synthetic oligonucleotide
aaauaauuugaacuuu

SEQ ID NO: 58803 - RNA, 12 nt, Artificial Sequence
  Description of Artificial Sequence: Synthetic oligonucleotide
ugcgaccuuaau

SEQ ID NO: 58804 - RNA, 11 nt, Artificial Sequence
  Description of Artificial Sequence: Synthetic oligonucleotide
cugagaaagcu

SEQ ID NO: 58805 - RNA, 13 nt, Artificial Sequence
  Description of Artificial Sequence: Synthetic oligonucleotide
aguaaagaugcua

SEQ ID NO: 58806 - RNA, 12 nt, Artificial Sequence
  Description of Artificial Sequence: Synthetic oligonucleotide
cugcuuaauugc

SEQ ID NO: 58807 - RNA, 14 nt, Artificial Sequence
  Description of Artificial Sequence: Synthetic oligonucleotide
uaccauaugaauga

SEQ ID NO: 58808 - RNA, 12 nt, Artificial Sequence
  Description of Artificial Sequence: Synthetic oligonucleotide
aacuuucuuauc

SEQ ID NO: 58809 - RNA, 13 nt, Artificial Sequence
  Description of Artificial Sequence: Synthetic oligonucleotide
ccuugcaugacau

SEQ ID NO: 58810 - RNA, 14 nt, Artificial Sequence
  Description of Artificial Sequence: Synthetic oligonucleotide
ugaauuuguauaug

SEQ ID NO: 58811 - RNA, 12 nt, Artificial Sequence
  Description of Artificial Sequence: Synthetic oligonucleotide
gaauccuaguag

SEQ ID NO: 58812 - RNA, 10 nt, Artificial Sequence
  Description of Artificial Sequence: Synthetic oligonucleotide
gaaagggaag

SEQ ID NO: 58813 - RNA, 11 nt, Artificial Sequence
  Description of Artificial Sequence: Synthetic oligonucleotide
uaucggcaugc

SEQ ID NO: 58814 - RNA, 12 nt, Artificial Sequence
  Description of Artificial Sequence: Synthetic oligonucleotide
caccucauagua

SEQ ID NO: 58815 - RNA, 11 nt, Artificial Sequence
  Description of Artificial Sequence: Synthetic oligonucleotide
ccagaauugcc

SEQ ID NO: 58816 - RNA, 11 nt, Artificial Sequence
  Description of Artificial Sequence: Synthetic oligonucleotide
uggugaucugg

SEQ ID NO: 58817 - RNA, 12 nt, Artificial Sequence
  Description of Artificial Sequence: Synthetic oligonucleotide
gaucuggguaau

SEQ ID NO: 58818 - RNA, 12 nt, Artificial Sequence
  Description of Artificial Sequence: Synthetic oligonucleotide
ggaugugaugaa

SEQ ID NO: 58819 - RNA, 12 nt, Artificial Sequence
  Description of Artificial Sequence: Synthetic oligonucleotide
cauuuccacagc

SEQ ID NO: 58820 - RNA, 11 nt, Artificial Sequence
  Description of Artificial Sequence: Synthetic oligonucleotide
acagcuacacc

SEQ ID NO: 58821 - RNA, 12 nt, Artificial Sequence
  Description of Artificial Sequence: Synthetic oligonucleotide
ugcaguucuuac

SEQ ID NO: 58822 - RNA, 12 nt, Artificial Sequence
  Description of Artificial Sequence: Synthetic oligonucleotide
acgagaagaaga

SEQ ID NO: 58823 - RNA, 12 nt, Artificial Sequence
  Description of Artificial Sequence: Synthetic oligonucleotide
cgagaagaagau

SEQ ID NO: 58824 - RNA, 15 nt, Artificial Sequence
  Description of Artificial Sequence: Synthetic oligonucleotide
aagaagaucauuuac

SEQ ID NO: 58825 - RNA, 11 nt, Artificial Sequence
  Description of Artificial Sequence: Synthetic oligonucleotide
agaggaagagg

SEQ ID NO: 58826 - RNA, 12 nt, Artificial Sequence
  Description of Artificial Sequence: Synthetic oligonucleotide
gaggaagaggug

SEQ ID NO: 58827 - RNA, 13 nt, Artificial Sequence
  Description of Artificial Sequence: Synthetic oligonucleotide
cuacuuugagggc

SEQ ID NO: 58828 - RNA, 12 nt, Artificial Sequence
  Description of Artificial Sequence: Synthetic oligonucleotide
agggcaucuccu

SEQ ID NO: 58829 - RNA, 10 nt, Artificial Sequence
  Description of Artificial Sequence: Synthetic oligonucleotide
ggagugauau

SEQ ID NO: 58830 - RNA, 11 nt, Artificial Sequence
  Description of Artificial Sequence: Synthetic oligonucleotide
gagugauaugg

SEQ ID NO: 58831 - RNA, 12 nt, Artificial Sequence
  Description of Artificial Sequence: Synthetic oligonucleotide
ugcaguaaagau

SEQ ID NO: 58832 - RNA, 13 nt, Artificial Sequence
  Description of Artificial Sequence: Synthetic oligonucleotide
aguaaagauccua

SEQ ID NO: 58833 - RNA, 12 nt, Artificial Sequence
  Description of Artificial Sequence: Synthetic oligonucleotide
ugacaaaggaca

SEQ ID NO: 58834 - RNA, 13 nt, Artificial Sequence
  Description of Artificial Sequence: Synthetic oligonucleotide
gcaauugugaccc

SEQ ID NO: 58835 - RNA, 12 nt, Artificial Sequence
  Description of Artificial Sequence: Synthetic oligonucleotide
aacaucauccau

SEQ ID NO: 58836 - RNA, 12 nt, Artificial Sequence
  Description of Artificial Sequence: Synthetic oligonucleotide
ugaaauccaaca

SEQ ID NO: 58837 - RNA, 15 nt, Artificial Sequence
  Description of Artificial Sequence: Synthetic oligonucleotide
aacaauauauuucuc

SEQ ID NO: 58838 - RNA, 14 nt, Artificial Sequence
  Description of Artificial Sequence: Synthetic oligonucleotide
aacaguaaagucac

SEQ ID NO: 58839 - RNA, 14 nt, Artificial Sequence
  Description of Artificial Sequence: Synthetic oligonucleotide
ugugaagaaaguaa

SEQ ID NO: 58840 - RNA, 13 nt, Artificial Sequence
  Description of Artificial Sequence: Synthetic oligonucleotide
cuuccgagccauc

SEQ ID NO: 58841 - RNA, 12 nt, Artificial Sequence
  Description of Artificial Sequence: Synthetic oligonucleotide
aauggagguuga

SEQ ID NO: 58842 - RNA, 12 nt, Artificial Sequence
  Description of Artificial Sequence: Synthetic oligonucleotide
ggagguugaaua

SEQ ID NO: 58843 - RNA, 13 nt, Artificial Sequence
  Description of Artificial Sequence: Synthetic oligonucleotide
auuuugaguuuuc

SEQ ID NO: 58844 - RNA, 12 nt, Artificial Sequence
  Description of Artificial Sequence: Synthetic oligonucleotide
uauccuguuugu

SEQ ID NO: 58845 - RNA, 11 nt, Artificial Sequence
  Description of Artificial Sequence: Synthetic oligonucleotide
ccuguuuguuc

SEQ ID NO: 58846 - RNA, 10 nt, Artificial Sequence
  Description of Artificial Sequence: Synthetic oligonucleotide
cucuacagcc

SEQ ID NO: 58847 - RNA, 12 nt, Artificial Sequence
  Description of Artificial Sequence: Synthetic oligonucleotide
ucuuccauagcu

SEQ ID NO: 58848 - RNA, 12 nt, Artificial Sequence
  Description of Artificial Sequence: Synthetic oligonucleotide
auaaucuuccug

SEQ ID NO: 58849 - RNA, 12 nt, Artificial Sequence
  Description of Artificial Sequence: Synthetic oligonucleotide
uaaucuuccugu

SEQ ID NO: 58850 - RNA, 12 nt, Artificial Sequence
  Description of Artificial Sequence: Synthetic oligonucleotide
cuucaugacuug

SEQ ID NO: 58851 - RNA, 12 nt, Artificial Sequence
  Description of Artificial Sequence: Synthetic oligonucleotide
aagagggagaga

SEQ ID NO: 58852 - RNA, 12 nt, Artificial Sequence
  Description of Artificial Sequence: Synthetic oligonucleotide
cgucuccuacca

SEQ ID NO: 58853 - RNA, 12 nt, Artificial Sequence
  Description of Artificial Sequence: Synthetic oligonucleotide
gaucaaucggcc

SEQ ID NO: 58854 - RNA, 12 nt, Artificial Sequence
  Description of Artificial Sequence: Synthetic oligonucleotide
ggacgaacaucc

SEQ ID NO: 58855 - RNA, 11 nt, Artificial Sequence
  Description of Artificial Sequence: Synthetic oligonucleotide
agggucggaac

SEQ ID NO: 58856 - RNA, 10 nt, Artificial Sequence
  Description of Artificial Sequence: Synthetic oligonucleotide
ucggaaccca

SEQ ID NO: 58857 - RNA, 11 nt, Artificial Sequence
  Description of Artificial Sequence: Synthetic oligonucleotide
acccaagcuua

SEQ ID NO: 58858 - RNA, 14 nt, Artificial Sequence
  Description of Artificial Sequence: Synthetic oligonucleotide
gaacuuuaagcaac

SEQ ID NO: 58859 - RNA, 11 nt, Artificial Sequence
  Description of Artificial Sequence: Synthetic oligonucleotide
acuauucagug

SEQ ID NO: 58860 - RNA, 11 nt, Artificial Sequence
  Description of Artificial Sequence: Synthetic oligonucleotide
cuauucagugg

SEQ ID NO: 58861 - RNA, 13 nt, Artificial Sequence
  Description of Artificial Sequence: Synthetic oligonucleotide
aaacacagauaac

SEQ ID NO: 58862 - RNA, 12 nt, Artificial Sequence
  Description of Artificial Sequence: Synthetic oligonucleotide
cuuaagaaaaga

SEQ ID NO: 58863 - RNA, 12 nt, Artificial Sequence
  Description of Artificial Sequence: Synthetic oligonucleotide
cugaaggagugu

SEQ ID NO: 58864 - RNA, 10 nt, Artificial Sequence
  Description of Artificial Sequence: Synthetic oligonucleotide
ucaccgcggg

SEQ ID NO: 58865 - RNA, 14 nt, Artificial Sequence
  Description of Artificial Sequence: Synthetic oligonucleotide
agcagaaauaagcg

SEQ ID NO: 58866 - RNA, 12 nt, Artificial Sequence
  Description of Artificial Sequence: Synthetic oligonucleotide
aagcgugccguu

SEQ ID NO: 58867 - RNA, 12 nt, Artificial Sequence
  Description of Artificial Sequence: Synthetic oligonucleotide
agaaacagucac

SEQ ID NO: 58868 - RNA, 12 nt, Artificial Sequence
  Description of Artificial Sequence: Synthetic oligonucleotide
agaggaagaagg

SEQ ID NO: 58869 - RNA, 14 nt, Artificial Sequence
  Description of Artificial Sequence: Synthetic oligonucleotide
uguauucaaaauau

SEQ ID NO: 58870 - RNA, 13 nt, Artificial Sequence
  Description of Artificial Sequence: Synthetic oligonucleotide
auuuuccucccuu

SEQ ID NO: 58871 - RNA, 13 nt, Artificial Sequence
  Description of Artificial Sequence: Synthetic oligonucleotide
caaagaaagauag

SEQ ID NO: 58872 - RNA, 12 nt, Artificial Sequence
  Description of Artificial Sequence: Synthetic oligonucleotide
aagaaagauaga

SEQ ID NO: 58873 - RNA, 13 nt, Artificial Sequence
  Description of Artificial Sequence: Synthetic oligonucleotide
gaaagcauuuguu

SEQ ID NO: 58874 - RNA, 13 nt, Artificial Sequence
  Description of Artificial Sequence: Synthetic oligonucleotide
ugaguuaaacgaa

SEQ ID NO: 58875 - RNA, 12 nt, Artificial Sequence
  Description of Artificial Sequence: Synthetic oligonucleotide
acugauacagaa

SEQ ID NO: 58876 - RNA, 12 nt, Artificial Sequence
  Description of Artificial Sequence: Synthetic oligonucleotide
auauuauauaua

SEQ ID NO: 58877 - RNA, 12 nt, Artificial Sequence
  Description of Artificial Sequence: Synthetic oligonucleotide
auuauauauaua

SEQ ID NO: 58878 - RNA, 12 nt, Artificial Sequence
  Description of Artificial Sequence: Synthetic oligonucleotide
ucacuggaugua

SEQ ID NO: 58879 - RNA, 12 nt, Artificial Sequence
  Description of Artificial Sequence: Synthetic oligonucleotide
cagggaagagga

SEQ ID NO: 58880 - RNA, 15 nt, Artificial Sequence
  Description of Artificial Sequence: Synthetic oligonucleotide
augaucuuuuuuuug

SEQ ID NO: 58881 - RNA, 11 nt, Artificial Sequence
  Description of Artificial Sequence: Synthetic oligonucleotide
aguucacggcc

SEQ ID NO: 58882 - RNA, 13 nt, Artificial Sequence
  Description of Artificial Sequence: Synthetic oligonucleotide
caccaucacacca

SEQ ID NO: 58883 - RNA, 11 nt, Artificial Sequence
  Description of Artificial Sequence: Synthetic oligonucleotide
ccugcggguuu

SEQ ID NO: 58884 - RNA, 10 nt, Artificial Sequence
  Description of Artificial Sequence: Synthetic oligonucleotide
auccaguuug

SEQ ID NO: 58885 - RNA, 13 nt, Artificial Sequence
  Description of Artificial Sequence: Synthetic oligonucleotide
guuaaggacuucu

SEQ ID NO: 58886 - RNA, 13 nt, Artificial Sequence
  Description of Artificial Sequence: Synthetic oligonucleotide
cagugggacagag

SEQ ID NO: 58887 - RNA, 14 nt, Artificial Sequence
  Description of Artificial Sequence: Synthetic oligonucleotide
aauuuguuauugug

SEQ ID NO: 58888 - RNA, 13 nt, Artificial Sequence
  Description of Artificial Sequence: Synthetic oligonucleotide
uucaaaugcauuu

SEQ ID NO: 58889 - RNA, 10 nt, Artificial Sequence
  Description of Artificial Sequence: Synthetic oligonucleotide
caggaaagcc

SEQ ID NO: 58890 - RNA, 11 nt, Artificial Sequence
  Description of Artificial Sequence: Synthetic oligonucleotide
aggaaagcccu

SEQ ID NO: 58891 - RNA, 12 nt, Artificial Sequence
  Description of Artificial Sequence: Synthetic oligonucleotide
cccagcauggcc

SEQ ID NO: 58892 - RNA, 11 nt, Artificial Sequence
  Description of Artificial Sequence: Synthetic oligonucleotide
cuucucccuga

SEQ ID NO: 58893 - RNA, 12 nt, Artificial Sequence
  Description of Artificial Sequence: Synthetic oligonucleotide
gaagaagcccuu

SEQ ID NO: 58894 - RNA, 12 nt, Artificial Sequence
  Description of Artificial Sequence: Synthetic oligonucleotide
agaagcccuuca

SEQ ID NO: 58895 - RNA, 11 nt, Artificial Sequence
  Description of Artificial Sequence: Synthetic oligonucleotide
gcccuucagcg

SEQ ID NO: 58896 - RNA, 11 nt, Artificial Sequence
  Description of Artificial Sequence: Synthetic oligonucleotide
ccuucagcggc

SEQ ID NO: 58897 - RNA, 12 nt, Artificial Sequence
  Description of Artificial Sequence: Synthetic oligonucleotide
ucagcggccagu

SEQ ID NO: 58898 - RNA, 12 nt, Artificial Sequence
  Description of Artificial Sequence: Synthetic oligonucleotide
ugaaaagcuccg

SEQ ID NO: 58899 - RNA, 11 nt, Artificial Sequence
  Description of Artificial Sequence: Synthetic oligonucleotide
aaaagcuccgg

SEQ ID NO: 58900 - RNA, 13 nt, Artificial Sequence
  Description of Artificial Sequence: Synthetic oligonucleotide
agucaacagucug

SEQ ID NO: 58901 - RNA, 13 nt, Artificial Sequence
  Description of Artificial Sequence: Synthetic oligonucleotide
cagaguucaaaag

SEQ ID NO: 58902 - RNA, 13 nt, Artificial Sequence
  Description of Artificial Sequence: Synthetic oligonucleotide
agaguucaaaagc

SEQ ID NO: 58903 - RNA, 12 nt, Artificial Sequence
  Description of Artificial Sequence: Synthetic oligonucleotide
uucaaaagcccu

SEQ ID NO: 58904 - RNA, 12 nt, Artificial Sequence
  Description of Artificial Sequence: Synthetic oligonucleotide
ucaaaagcccuu

SEQ ID NO: 58905 - RNA, 12 nt, Artificial Sequence
  Description of Artificial Sequence: Synthetic oligonucleotide
aaaagcccuuca

SEQ ID NO: 58906 - RNA, 12 nt, Artificial Sequence
  Description of Artificial Sequence: Synthetic oligonucleotide
aaagcccuucag

SEQ ID NO: 58907 - RNA, 13 nt, Artificial Sequence
  Description of Artificial Sequence: Synthetic oligonucleotide
gugaagccgcucg

SEQ ID NO: 58908 - RNA, 12 nt, Artificial Sequence
  Description of Artificial Sequence: Synthetic oligonucleotide
cacgccagucaa

SEQ ID NO: 58909 - RNA, 13 nt, Artificial Sequence
  Description of Artificial Sequence: Synthetic oligonucleotide
uucuuggugcgug

SEQ ID NO: 58910 - RNA, 14 nt, Artificial Sequence
  Description of Artificial Sequence: Synthetic oligonucleotide
auuggauucaucag

SEQ ID NO: 58911 - RNA, 13 nt, Artificial Sequence
  Description of Artificial Sequence: Synthetic oligonucleotide
uggaauaccuaag

SEQ ID NO: 58912 - RNA, 12 nt, Artificial Sequence
  Description of Artificial Sequence: Synthetic oligonucleotide
auuugaggcuca

SEQ ID NO: 58913 - RNA, 11 nt, Artificial Sequence
  Description of Artificial Sequence: Synthetic oligonucleotide
ucuacaauugg

SEQ ID NO: 58914 - RNA, 12 nt, Artificial Sequence
  Description of Artificial Sequence: Synthetic oligonucleotide
uaguuaggagcc

SEQ ID NO: 58915 - RNA, 13 nt, Artificial Sequence
  Description of Artificial Sequence: Synthetic oligonucleotide
agucaauauccac

SEQ ID NO: 58916 - RNA, 13 nt, Artificial Sequence
  Description of Artificial Sequence: Synthetic oligonucleotide
auguucagucaca

SEQ ID NO: 58917 - RNA, 12 nt, Artificial Sequence
  Description of Artificial Sequence: Synthetic oligonucleotide
acacacacauac

SEQ ID NO: 58918 - RNA, 12 nt, Artificial Sequence
  Description of Artificial Sequence: Synthetic oligonucleotide
uuccuuuugcuu

SEQ ID NO: 58919 - RNA, 16 nt, Artificial Sequence
  Description of Artificial Sequence: Synthetic oligonucleotide
uuuuaaaguaauuuuu

SEQ ID NO: 58920 - RNA, 13 nt, Artificial Sequence
  Description of Artificial Sequence: Synthetic oligonucleotide
caacagucaaugg

SEQ ID NO: 58921 - RNA, 13 nt, Artificial Sequence
  Description of Artificial Sequence: Synthetic oligonucleotide
ucgacaaaccaau

SEQ ID NO: 58922 - RNA, 12 nt, Artificial Sequence
  Description of Artificial Sequence: Synthetic oligonucleotide
acugcuaccacu

SEQ ID NO: 58923 - RNA, 13 nt, Artificial Sequence
  Description of Artificial Sequence: Synthetic oligonucleotide
gcaagcggucuua

SEQ ID NO: 58924 - RNA, 13 nt, Artificial Sequence
  Description of Artificial Sequence: Synthetic oligonucleotide
ggucuuaccggcu

SEQ ID NO: 58925 - RNA, 11 nt, Artificial Sequence
  Description of Artificial Sequence: Synthetic oligonucleotide
gauggguuacc

SEQ ID NO: 58926 - RNA, 11 nt, Artificial Sequence
  Description of Artificial Sequence: Synthetic oligonucleotide
guuaccugcga

SEQ ID NO: 58927 - RNA, 12 nt, Artificial Sequence
  Description of Artificial Sequence: Synthetic oligonucleotide
aaucuugcugag

SEQ ID NO: 58928 - RNA, 13 nt, Artificial Sequence
  Description of Artificial Sequence: Synthetic oligonucleotide
agcauaaaacagu

SEQ ID NO: 58929 - RNA, 12 nt, Artificial Sequence
  Description of Artificial Sequence: Synthetic oligonucleotide
guccuuuauccu

SEQ ID NO: 58930 - RNA, 12 nt, Artificial Sequence
  Description of Artificial Sequence: Synthetic oligonucleotide
caacgcaaguug

SEQ ID NO: 58931 - RNA, 13 nt, Artificial Sequence
  Description of Artificial Sequence: Synthetic oligonucleotide
aaacugaaaccau

SEQ ID NO: 58932 - RNA, 14 nt, Artificial Sequence
  Description of Artificial Sequence: Synthetic oligonucleotide
acuuuguuaaauau

SEQ ID NO: 58933 - RNA, 14 nt, Artificial Sequence
  Description of Artificial Sequence: Synthetic oligonucleotide
guauauuaaaaguu

SEQ ID NO: 58934 - RNA, 13 nt, Artificial Sequence
  Description of Artificial Sequence: Synthetic oligonucleotide
guuuugacuuaac

SEQ ID NO: 58935 - RNA, 13 nt, Artificial Sequence
  Description of Artificial Sequence: Synthetic oligonucleotide
gcaaacucagcac

SEQ ID NO: 58936 - RNA, 11 nt, Artificial Sequence
  Description of Artificial Sequence: Synthetic oligonucleotide
ugcugaccuca

SEQ ID NO: 58937 - RNA, 14 nt, Artificial Sequence
  Description of Artificial Sequence: Synthetic oligonucleotide
uuuauucagaucgc

SEQ ID NO: 58938 - RNA, 13 nt, Artificial Sequence
  Description of Artificial Sequence: Synthetic oligonucleotide
aggguucugggau

SEQ ID NO: 58939 - RNA, 15 nt, Artificial Sequence
  Description of Artificial Sequence: Synthetic oligonucleotide
auauuggaaauuaug

SEQ ID NO: 58940 - RNA, 13 nt, Artificial Sequence
  Description of Artificial Sequence: Synthetic oligonucleotide
auggaagcacuag

SEQ ID NO: 58941 - RNA, 13 nt, Artificial Sequence
  Description of Artificial Sequence: Synthetic oligonucleotide
guuuuuaugugga

SEQ ID NO: 58942 - RNA, 12 nt, Artificial Sequence
  Description of Artificial Sequence: Synthetic oligonucleotide
ggaauugguaga

SEQ ID NO: 58943 - RNA, 13 nt, Artificial Sequence
  Description of Artificial Sequence: Synthetic oligonucleotide
uuagacuuggaga

SEQ ID NO: 58944 - RNA, 13 nt, Artificial Sequence
  Description of Artificial Sequence: Synthetic oligonucleotide
uuacaguauucca

SEQ ID NO: 58945 - RNA, 15 nt, Artificial Sequence
  Description of Artificial Sequence: Synthetic oligonucleotide
ccacugaugaauuaa

SEQ ID NO: 58946 - RNA, 12 nt, Artificial Sequence
  Description of Artificial Sequence: Synthetic oligonucleotide
ccacaucaucac

SEQ ID NO: 58947 - RNA, 13 nt, Artificial Sequence
  Description of Artificial Sequence: Synthetic oligonucleotide
cucaccaaacaga

SEQ ID NO: 58948 - RNA, 12 nt, Artificial Sequence
  Description of Artificial Sequence: Synthetic oligonucleotide
ggaacaugaugg

SEQ ID NO: 58949 - RNA, 12 nt, Artificial Sequence
  Description of Artificial Sequence: Synthetic oligonucleotide
cauguagacugc

SEQ ID NO: 58950 - RNA, 13 nt, Artificial Sequence
  Description of Artificial Sequence: Synthetic oligonucleotide
ggaucuauuuaug

SEQ ID NO: 58951 - RNA, 12 nt, Artificial Sequence
  Description of Artificial Sequence: Synthetic oligonucleotide
gcacuauuauca

SEQ ID NO: 58952 - RNA, 11 nt, Artificial Sequence
  Description of Artificial Sequence: Synthetic oligonucleotide
aucaguucugc

SEQ ID NO: 58953 - RNA, 13 nt, Artificial Sequence
  Description of Artificial Sequence: Synthetic oligonucleotide
agauuaaaccuac

SEQ ID NO: 58954 - RNA, 13 nt, Artificial Sequence
  Description of Artificial Sequence: Synthetic oligonucleotide
auaaaauccuucu

SEQ ID NO: 58955 - RNA, 12 nt, Artificial Sequence
  Description of Artificial Sequence: Synthetic oligonucleotide
aaugcuguagac

SEQ ID NO: 58956 - RNA, 13 nt, Artificial Sequence
  Description of Artificial Sequence: Synthetic oligonucleotide
uugauaggaauag

SEQ ID NO: 58957 - RNA, 11 nt, Artificial Sequence
  Description of Artificial Sequence: Synthetic oligonucleotide
aauggcccuga

SEQ ID NO: 58958 - RNA, 11 nt, Artificial Sequence
  Description of Artificial Sequence: Synthetic oligonucleotide
uuccucaagca

SEQ ID NO: 58959 - RNA, 10 nt, Artificial Sequence
  Description of Artificial Sequence: Synthetic oligonucleotide
guucagccca

SEQ ID NO: 58960 - RNA, 11 nt, Artificial Sequence
  Description of Artificial Sequence: Synthetic oligonucleotide
gcugcugaacc

SEQ ID NO: 58961 - RNA, 12 nt, Artificial Sequence
  Description of Artificial Sequence: Synthetic oligonucleotide
aaguucucuuca

SEQ ID NO: 58962 - RNA, 11 nt, Artificial Sequence
  Description of Artificial Sequence: Synthetic oligonucleotide
ccagccuagag

SEQ ID NO: 58963 - RNA, 13 nt, Artificial Sequence
  Description of Artificial Sequence: Synthetic oligonucleotide
cucugugaagugu

SEQ ID NO: 58964 - RNA, 14 nt, Artificial Sequence
  Description of Artificial Sequence: Synthetic oligonucleotide
ugagaaaauuucaa

SEQ ID NO: 58965 - RNA, 11 nt, Artificial Sequence
  Description of Artificial Sequence: Synthetic oligonucleotide
aauccuccuga

SEQ ID NO: 58966 - RNA, 12 nt, Artificial Sequence
  Description of Artificial Sequence: Synthetic oligonucleotide
gugacaucauau

SEQ ID NO: 58967 - RNA, 13 nt, Artificial Sequence
  Description of Artificial Sequence: Synthetic oligonucleotide
aaucuucaucaua

SEQ ID NO: 58968 - RNA, 13 nt, Artificial Sequence
  Description of Artificial Sequence: Synthetic oligonucleotide
gacuagcuauuaa

SEQ ID NO: 58969 - RNA, 14 nt, Artificial Sequence
  Description of Artificial Sequence: Synthetic oligonucleotide
ucucuacuaaaaau

SEQ ID NO: 58970 - RNA, 12 nt, Artificial Sequence
  Description of Artificial Sequence: Synthetic oligonucleotide
ucuaucucgccu

SEQ ID NO: 58971 - RNA, 13 nt, Artificial Sequence
  Description of Artificial Sequence: Synthetic oligonucleotide
cuucgguccaguu

SEQ ID NO: 58972 - RNA, 11 nt, Artificial Sequence
  Description of Artificial Sequence: Synthetic oligonucleotide
gauguagccgc

SEQ ID NO: 58973 - RNA, 12 nt, Artificial Sequence
  Description of Artificial Sequence: Synthetic oligonucleotide
ugaggagacuug

SEQ ID NO: 58974 - RNA, 12 nt, Artificial Sequence
  Description of Artificial Sequence: Synthetic oligonucleotide
gaguagugagga

SEQ ID NO: 58975 - RNA, 14 nt, Artificial Sequence
  Description of Artificial Sequence: Synthetic oligonucleotide
cagaugaguacaaa

SEQ ID NO: 58976 - RNA, 13 nt, Artificial Sequence
  Description of Artificial Sequence: Synthetic oligonucleotide
guuguuaaugggc

SEQ ID NO: 58977 - RNA, 13 nt, Artificial Sequence
  Description of Artificial Sequence: Synthetic oligonucleotide
uuuuuaauuuauu

SEQ ID NO: 58978 - RNA, 12 nt, Artificial Sequence
  Description of Artificial Sequence: Synthetic oligonucleotide
uauuuaaauaug

SEQ ID NO: 58979 - RNA, 13 nt, Artificial Sequence
  Description of Artificial Sequence: Synthetic oligonucleotide
uauccuuuguuuc

SEQ ID NO: 58980 - RNA, 14 nt, Artificial Sequence
  Description of Artificial Sequence: Synthetic oligonucleotide
cgucuaaguguuug

SEQ ID NO: 58981 - RNA, 12 nt, Artificial Sequence
  Description of Artificial Sequence: Synthetic oligonucleotide
accugugacaaa

SEQ ID NO: 58982 - RNA, 13 nt, Artificial Sequence
  Description of Artificial Sequence: Synthetic oligonucleotide
ccaggcugaauua

SEQ ID NO: 58983 - RNA, 14 nt, Artificial Sequence
  Description of Artificial Sequence: Synthetic oligonucleotide
gucauucuuacaau

SEQ ID NO: 58984 - RNA, 15 nt, Artificial Sequence
  Description of Artificial Sequence: Synthetic oligonucleotide
ucauucuuacaauug

SEQ ID NO: 58985 - RNA, 12 nt, Artificial Sequence
  Description of Artificial Sequence: Synthetic oligonucleotide
cagagaguguac

SEQ ID NO: 58986 - RNA, 12 nt, Artificial Sequence
  Description of Artificial Sequence: Synthetic oligonucleotide
agaacucagcag

SEQ ID NO: 58987 - RNA, 13 nt, Artificial Sequence
  Description of Artificial Sequence: Synthetic oligonucleotide
uuuauuuucagua

SEQ ID NO: 58988 - RNA, 12 nt, Artificial Sequence
  Description of Artificial Sequence: Synthetic oligonucleotide
ucuuaaauggaa

SEQ ID NO: 58989 - RNA, 13 nt, Artificial Sequence
  Description of Artificial Sequence: Synthetic oligonucleotide
ugccuaaaauugu

SEQ ID NO: 58990 - RNA, 12 nt, Artificial Sequence
  Description of Artificial Sequence: Synthetic oligonucleotide
agacugugagcu

SEQ ID NO: 58991 - RNA, 14 nt, Artificial Sequence
  Description of Artificial Sequence: Synthetic oligonucleotide
ugcuuuuuauuaau

SEQ ID NO: 58992 - RNA, 13 nt, Artificial Sequence
  Description of Artificial Sequence: Synthetic oligonucleotide
cucuucuuacauu

SEQ ID NO: 58993 - RNA, 15 nt, Artificial Sequence
  Description of Artificial Sequence: Synthetic oligonucleotide
cauuuguaaaaaugu

SEQ ID NO: 58994 - RNA, 15 nt, Artificial Sequence
  Description of Artificial Sequence: Synthetic oligonucleotide
aucuuaauucauauu

SEQ ID NO: 58995 - RNA, 13 nt, Artificial Sequence
  Description of Artificial Sequence: Synthetic oligonucleotide
gaacuaaucauga

SEQ ID NO: 58996 - RNA, 12 nt, Artificial Sequence
  Description of Artificial Sequence: Synthetic oligonucleotide
ucugcucuuggg

SEQ ID NO: 58997 - RNA, 13 nt, Artificial Sequence
  Description of Artificial Sequence: Synthetic oligonucleotide
caguagcuuugag

SEQ ID NO: 58998 - RNA, 14 nt, Artificial Sequence
  Description of Artificial Sequence: Synthetic oligonucleotide
cacguaauauuuca

SEQ ID NO: 58999 - RNA, 13 nt, Artificial Sequence
  Description of Artificial Sequence: Synthetic oligonucleotide
uauucucuucacu

SEQ ID NO: 59000 - RNA, 14 nt, Artificial Sequence
  Description of Artificial Sequence: Synthetic oligonucleotide
cuaaugcuaagaaa

SEQ ID NO: 59001 - RNA, 12 nt, Artificial Sequence
  Description of Artificial Sequence: Synthetic oligonucleotide
gcugaaaaucaa

SEQ ID NO: 59002 - RNA, 14 nt, Artificial Sequence
  Description of Artificial Sequence: Synthetic oligonucleotide
aauaugauuacuuu

SEQ ID NO: 59003 - RNA, 14 nt, Artificial Sequence
  Description of Artificial Sequence: Synthetic oligonucleotide
cauuuuguucuaca

SEQ ID NO: 59004 - RNA, 12 nt, Artificial Sequence
  Description of Artificial Sequence: Synthetic oligonucleotide
cccgggacucuc

SEQ ID NO: 59005 - RNA, 14 nt, Artificial Sequence
  Description of Artificial Sequence: Synthetic oligonucleotide
ccuuuaaaguaaag

SEQ ID NO: 59006 - RNA, 13 nt, Artificial Sequence
  Description of Artificial Sequence: Synthetic oligonucleotide
ucuggaagccugg

SEQ ID NO: 59007 - RNA, 14 nt, Artificial Sequence
  Description of Artificial Sequence: Synthetic oligonucleotide
aaaacaaaagagag

SEQ ID NO: 59008 - RNA, 13 nt, Artificial Sequence
  Description of Artificial Sequence: Synthetic oligonucleotide
aucaguuaugccg

SEQ ID NO: 59009 - RNA, 13 nt, Artificial Sequence
  Description of Artificial Sequence: Synthetic oligonucleotide
uaaaagaagucca

SEQ ID NO: 59010 - RNA, 11 nt, Artificial Sequence
  Description of Artificial Sequence: Synthetic oligonucleotide
aggugagguua

SEQ ID NO: 59011 - RNA, 11 nt, Artificial Sequence
  Description of Artificial Sequence: Synthetic oligonucleotide
gggaagaggac

SEQ ID NO: 59012 - RNA, 13 nt, Artificial Sequence
  Description of Artificial Sequence: Synthetic oligonucleotide
aagcaaguauugu

SEQ ID NO: 59013 - RNA, 12 nt, Artificial Sequence
  Description of Artificial Sequence: Synthetic oligonucleotide
auuguagcacuc

SEQ ID NO: 59014 - RNA, 14 nt, Artificial Sequence
  Description of Artificial Sequence: Synthetic oligonucleotide
acaaaaccacaaau

SEQ ID NO: 59015 - RNA, 12 nt, Artificial Sequence
  Description of Artificial Sequence: Synthetic oligonucleotide
uaagcccauaca

SEQ ID NO: 59016 - RNA, 11 nt, Artificial Sequence
  Description of Artificial Sequence: Synthetic oligonucleotide
agcccauacag

SEQ ID NO: 59017 - RNA, 12 nt, Artificial Sequence
  Description of Artificial Sequence: Synthetic oligonucleotide
cagaaaccuucc

SEQ ID NO: 59018 - RNA, 10 nt, Artificial Sequence
  Description of Artificial Sequence: Synthetic oligonucleotide
guauaccuac

SEQ ID NO: 59019 - RNA, 13 nt, Artificial Sequence
  Description of Artificial Sequence: Synthetic oligonucleotide
gccaguuuucgga

SEQ ID NO: 59020 - RNA, 9 nt, Artificial Sequence
  Description of Artificial Sequence: Synthetic oligonucleotide
ggaacaggg

SEQ ID NO: 59021 - RNA, 13 nt, Artificial Sequence
  Description of Artificial Sequence: Synthetic oligonucleotide
uuaacuuuccagu

SEQ ID NO: 59022 - RNA, 14 nt, Artificial Sequence
  Description of Artificial Sequence: Synthetic oligonucleotide
aaaguuugguuuug

SEQ ID NO: 59023 - RNA, 12 nt, Artificial Sequence
  Description of Artificial Sequence: Synthetic oligonucleotide
cuucccacugua

SEQ ID NO: 59024 - RNA, 13 nt, Artificial Sequence
  Description of Artificial Sequence: Synthetic oligonucleotide
ugauaccauauga

SEQ ID NO: 59025 - RNA, 11 nt, Artificial Sequence
  Description of Artificial Sequence: Synthetic oligonucleotide
aacaugggcug

SEQ ID NO: 59026 - RNA, 13 nt, Artificial Sequence
  Description of Artificial Sequence: Synthetic oligonucleotide
caacuuuuucaua

SEQ ID NO: 59027 - RNA, 12 nt, Artificial Sequence
  Description of Artificial Sequence: Synthetic oligonucleotide
caugaggccgga

SEQ ID NO: 59028 - RNA, 11 nt, Artificial Sequence
  Description of Artificial Sequence: Synthetic oligonucleotide
acugcauuugu

SEQ ID NO: 59029 - RNA, 13 nt, Artificial Sequence
  Description of Artificial Sequence: Synthetic oligonucleotide
aauguuuacuacc

SEQ ID NO: 59030 - RNA, 15 nt, Artificial Sequence
  Description of Artificial Sequence: Synthetic oligonucleotide
aauuuuuugaugaaa

SEQ ID NO: 59031 - RNA, 14 nt, Artificial Sequence
  Description of Artificial Sequence: Synthetic oligonucleotide
cagugugugaauuu

SEQ ID NO: 59032 - RNA, 13 nt, Artificial Sequence
  Description of Artificial Sequence: Synthetic oligonucleotide
gagcaauguaugu

SEQ ID NO: 59033 - RNA, 14 nt, Artificial Sequence
  Description of Artificial Sequence: Synthetic oligonucleotide
aaagcacauauaua

SEQ ID NO: 59034 - RNA, 14 nt, Artificial Sequence
  Description of Artificial Sequence: Synthetic oligonucleotide
guaauaguuucucc

SEQ ID NO: 59035 - RNA, 13 nt, Artificial Sequence
  Description of Artificial Sequence: Synthetic oligonucleotide
aguuucuccaaau

SEQ ID NO: 59036 - RNA, 13 nt, Artificial Sequence
  Description of Artificial Sequence: Synthetic oligonucleotide
uacuuccuagaaa

SEQ ID NO: 59037 - RNA, 13 nt, Artificial Sequence
  Description of Artificial Sequence: Synthetic oligonucleotide
uacaccauauaug

SEQ ID NO: 59038 - RNA, 14 nt, Artificial Sequence
  Description of Artificial Sequence: Synthetic oligonucleotide
auauaugaauggag

SEQ ID NO: 59039 - RNA, 13 nt, Artificial Sequence
  Description of Artificial Sequence: Synthetic oligonucleotide
acgagaagaagau

SEQ ID NO: 59040 - RNA, 13 nt, Artificial Sequence
  Description of Artificial Sequence: Synthetic oligonucleotide
ucauuuacaggga

SEQ ID NO: 59041 - RNA, 13 nt, Artificial Sequence
  Description of Artificial Sequence: Synthetic oligonucleotide
cauuuacagggac

SEQ ID NO: 59042 - RNA, 10 nt, Artificial Sequence
  Description of Artificial Sequence: Synthetic oligonucleotide
agggaccuga

SEQ ID NO: 59043 - RNA, 14 nt, Artificial Sequence
  Description of Artificial Sequence: Synthetic oligonucleotide
uguuugacugcauc

SEQ ID NO: 59044 - RNA, 13 nt, Artificial Sequence
  Description of Artificial Sequence: Synthetic oligonucleotide
uuugacugcaucg

SEQ ID NO: 59045 - RNA, 12 nt, Artificial Sequence
  Description of Artificial Sequence: Synthetic oligonucleotide
gaguucacaggg

SEQ ID NO: 59046 - RNA, 13 nt, Artificial Sequence
  Description of Artificial Sequence: Synthetic oligonucleotide
ggcaccucugucc

SEQ ID NO: 59047 - RNA, 15 nt, Artificial Sequence
  Description of Artificial Sequence: Synthetic oligonucleotide
gguuugucuuuuuaa

SEQ ID NO: 59048 - RNA, 14 nt, Artificial Sequence
  Description of Artificial Sequence: Synthetic oligonucleotide
uuugucuuuuuaag

SEQ ID NO: 59049 - RNA, 13 nt, Artificial Sequence
  Description of Artificial Sequence: Synthetic oligonucleotide
ccuaaagguuguc

SEQ ID NO: 59050 - RNA, 12 nt, Artificial Sequence
  Description of Artificial Sequence: Synthetic oligonucleotide
aagguugucgac

SEQ ID NO: 59051 - RNA, 13 nt, Artificial Sequence
  Description of Artificial Sequence: Synthetic oligonucleotide
accuggcaauugu

SEQ ID NO: 59052 - RNA, 12 nt, Artificial Sequence
  Description of Artificial Sequence: Synthetic oligonucleotide
aguggugcgagg

SEQ ID NO: 59053 - RNA, 13 nt, Artificial Sequence
  Description of Artificial Sequence: Synthetic oligonucleotide
agagacaugaaau

SEQ ID NO: 59054 - RNA, 13 nt, Artificial Sequence
  Description of Artificial Sequence: Synthetic oligonucleotide
auauauuucucca

SEQ ID NO: 59055 - RNA, 10 nt, Artificial Sequence
  Description of Artificial Sequence: Synthetic oligonucleotide
caugaaggcu

SEQ ID NO: 59056 - RNA, 11 nt, Artificial Sequence
  Description of Artificial Sequence: Synthetic oligonucleotide
gcuggaguggu

SEQ ID NO: 59057 - RNA, 11 nt, Artificial Sequence
  Description of Artificial Sequence: Synthetic oligonucleotide
aggaagagagg

SEQ ID NO: 59058 - RNA, 12 nt, Artificial Sequence
  Description of Artificial Sequence: Synthetic oligonucleotide
cuugcaucgggc

SEQ ID NO: 59059 - RNA, 13 nt, Artificial Sequence
  Description of Artificial Sequence: Synthetic oligonucleotide
auauccuacugug

SEQ ID NO: 59060 - RNA, 13 nt, Artificial Sequence
  Description of Artificial Sequence: Synthetic oligonucleotide
uccuacuguguaa

SEQ ID NO: 59061 - RNA, 12 nt, Artificial Sequence
  Description of Artificial Sequence: Synthetic oligonucleotide
ccuuguagugua

SEQ ID NO: 59062 - RNA, 13 nt, Artificial Sequence
  Description of Artificial Sequence: Synthetic oligonucleotide
ucuuuguugauug

SEQ ID NO: 59063 - RNA, 14 nt, Artificial Sequence
  Description of Artificial Sequence: Synthetic oligonucleotide
uuuguugauugaaa

SEQ ID NO: 59064 - RNA, 15 nt, Artificial Sequence
  Description of Artificial Sequence: Synthetic oligonucleotide
uucuuuuucuuccau

SEQ ID NO: 59065 - RNA, 13 nt, Artificial Sequence
  Description of Artificial Sequence: Synthetic oligonucleotide
aaucuuccuucua

SEQ ID NO: 59066 - RNA, 13 nt, Artificial Sequence
  Description of Artificial Sequence: Synthetic oligonucleotide
uugaaugcuucau

SEQ ID NO: 59067 - RNA, 13 nt, Artificial Sequence
  Description of Artificial Sequence: Synthetic oligonucleotide
ugaaugcuucaug

SEQ ID NO: 59068 - RNA, 13 nt, Artificial Sequence
  Description of Artificial Sequence: Synthetic oligonucleotide
aauucuacuuuga

SEQ ID NO: 59069 - RNA, 13 nt, Artificial Sequence
  Description of Artificial Sequence: Synthetic oligonucleotide
agcaacuacagac

SEQ ID NO: 59070 - RNA, 13 nt, Artificial Sequence
  Description of Artificial Sequence: Synthetic oligonucleotide
gaccaaggucaac

SEQ ID NO: 59071 - RNA, 13 nt, Artificial Sequence
  Description of Artificial Sequence: Synthetic oligonucleotide
cgacuaucucgac

SEQ ID NO: 59072 - RNA, 13 nt, Artificial Sequence
  Description of Artificial Sequence: Synthetic oligonucleotide
aaccuucccaaac

SEQ ID NO: 59073 - RNA, 14 nt, Artificial Sequence
  Description of Artificial Sequence: Synthetic oligonucleotide
ccaagcuuagaacu

SEQ ID NO: 59074 - RNA, 15 nt, Artificial Sequence
  Description of Artificial Sequence: Synthetic oligonucleotide
agcuuagaacuuuaa

SEQ ID NO: 59075 - RNA, 11 nt, Artificial Sequence
  Description of Artificial Sequence: Synthetic oligonucleotide
aagaccaccac

SEQ ID NO: 59076 - RNA, 14 nt, Artificial Sequence
  Description of Artificial Sequence: Synthetic oligonucleotide
gcgagaaauaaagu

SEQ ID NO: 59077 - RNA, 14 nt, Artificial Sequence
  Description of Artificial Sequence: Synthetic oligonucleotide
cgagaaauaaaguu

SEQ ID NO: 59078 - RNA, 12 nt, Artificial Sequence
  Description of Artificial Sequence: Synthetic oligonucleotide
aggaaaugaucc

SEQ ID NO: 59079 - RNA, 13 nt, Artificial Sequence
  Description of Artificial Sequence: Synthetic oligonucleotide
gaagaaaugaaac

SEQ ID NO: 59080 - RNA, 13 nt, Artificial Sequence
  Description of Artificial Sequence: Synthetic oligonucleotide
guuuccauccucc

SEQ ID NO: 59081 - RNA, 15 nt, Artificial Sequence
  Description of Artificial Sequence: Synthetic oligonucleotide
acugaaaaucuuuga

SEQ ID NO: 59082 - RNA, 11 nt, Artificial Sequence
  Description of Artificial Sequence: Synthetic oligonucleotide
ugccguucagg

SEQ ID NO: 59083 - RNA, 13 nt, Artificial Sequence
  Description of Artificial Sequence: Synthetic oligonucleotide
caggguccagaag

SEQ ID NO: 59084 - RNA, 13 nt, Artificial Sequence
  Description of Artificial Sequence: Synthetic oligonucleotide
ucaagacugcuug

SEQ ID NO: 59085 - RNA, 13 nt, Artificial Sequence
  Description of Artificial Sequence: Synthetic oligonucleotide
uccaugucuuugg

SEQ ID NO: 59086 - RNA, 11 nt, Artificial Sequence
  Description of Artificial Sequence: Synthetic oligonucleotide
gccugaaacac

SEQ ID NO: 59087 - RNA, 12 nt, Artificial Sequence
  Description of Artificial Sequence: Synthetic oligonucleotide
ucucuguaccuc

SEQ ID NO: 59088 - RNA, 12 nt, Artificial Sequence
  Description of Artificial Sequence: Synthetic oligonucleotide
agcaagacaaga

SEQ ID NO: 59089 - RNA, 13 nt, Artificial Sequence
  Description of Artificial Sequence: Synthetic oligonucleotide
gcaagacaagaaa

SEQ ID NO: 59090 - RNA, 12 nt, Artificial Sequence
  Description of Artificial Sequence: Synthetic oligonucleotide
uguacaagaucc

SEQ ID NO: 59091 - RNA, 12 nt, Artificial Sequence
  Description of Artificial Sequence: Synthetic oligonucleotide
cguacuugcaga

SEQ ID NO: 59092 - RNA, 13 nt, Artificial Sequence
  Description of Artificial Sequence: Synthetic oligonucleotide
cgaucgauacaga

SEQ ID NO: 59093 - RNA, 13 nt, Artificial Sequence
  Description of Artificial Sequence: Synthetic oligonucleotide
uauaaaaauaaau

SEQ ID NO: 59094 - RNA, 13 nt, Artificial Sequence
  Description of Artificial Sequence: Synthetic oligonucleotide
uaaaaauaaauau

SEQ ID NO: 59095 - RNA, 13 nt, Artificial Sequence
  Description of Artificial Sequence: Synthetic oligonucleotide
uuugacugcugug

SEQ ID NO: 59096 - RNA, 13 nt, Artificial Sequence
  Description of Artificial Sequence: Synthetic oligonucleotide
ggagaugagagac

SEQ ID NO: 59097 - RNA, 10 nt, Artificial Sequence
  Description of Artificial Sequence: Synthetic oligonucleotide
ucccacuugg

SEQ ID NO: 59098 - RNA, 10 nt, Artificial Sequence
  Description of Artificial Sequence: Synthetic oligonucleotide
guucacggcc

SEQ ID NO: 59099 - RNA, 12 nt, Artificial Sequence
  Description of Artificial Sequence: Synthetic oligonucleotide
accaucacacca

SEQ ID NO: 59100 - RNA, 10 nt, Artificial Sequence
  Description of Artificial Sequence: Synthetic oligonucleotide
cugcggguuu

SEQ ID NO: 59101 - RNA, 9 nt, Artificial Sequence
  Description of Artificial Sequence: Synthetic oligonucleotide
uccaguuug

SEQ ID NO: 59102 - RNA, 12 nt, Artificial Sequence
  Description of Artificial Sequence: Synthetic oligonucleotide
uuaaggacuucu

SEQ ID NO: 59103 - RNA, 12 nt, Artificial Sequence
  Description of Artificial Sequence: Synthetic oligonucleotide
agugggacagag

SEQ ID NO: 59104 - RNA, 13 nt, Artificial Sequence
  Description of Artificial Sequence: Synthetic oligonucleotide
auuuguuauugug

SEQ ID NO: 59105 - RNA, 12 nt, Artificial Sequence
  Description of Artificial Sequence: Synthetic oligonucleotide
ucaaaugcauuu

SEQ ID NO: 59106 - RNA, 9 nt, Artificial Sequence
  Description of Artificial Sequence: Synthetic oligonucleotide
aggaaagcc

SEQ ID NO: 59107 - RNA, 10 nt, Artificial Sequence
  Description of Artificial Sequence: Synthetic oligonucleotide
ggaaagcccu

SEQ ID NO: 59108 - RNA, 11 nt, Artificial Sequence
  Description of Artificial Sequence: Synthetic oligonucleotide
ccagcauggcc

SEQ ID NO: 59109 - RNA, 10 nt, Artificial Sequence
  Description of Artificial Sequence: Synthetic oligonucleotide
uucucccuga

SEQ ID NO: 59110 - RNA, 11 nt, Artificial Sequence
  Description of Artificial Sequence: Synthetic oligonucleotide
aagaagcccuu

SEQ ID NO: 59111 - RNA, 11 nt, Artificial Sequence
  Description of Artificial Sequence: Synthetic oligonucleotide
gaagcccuuca

SEQ ID NO: 59112 - RNA, 10 nt, Artificial Sequence
  Description of Artificial Sequence: Synthetic oligonucleotide
cccuucagcg

SEQ ID NO: 59113 - RNA, 10 nt, Artificial Sequence
  Description of Artificial Sequence: Synthetic oligonucleotide
cuucagcggc

SEQ ID NO: 59114 - RNA, 11 nt, Artificial Sequence
  Description of Artificial Sequence: Synthetic oligonucleotide
cagcggccagu

SEQ ID NO: 59115 - RNA, 11 nt, Artificial Sequence
  Description of Artificial Sequence: Synthetic oligonucleotide
gaaaagcuccg

SEQ ID NO: 59116 - RNA, 10 nt, Artificial Sequence
  Description of Artificial Sequence: Synthetic oligonucleotide
aaagcuccgg

SEQ ID NO: 59117 - RNA, 12 nt, Artificial Sequence
  Description of Artificial Sequence: Synthetic oligonucleotide
gucaacagucug

SEQ ID NO: 59118 - RNA, 12 nt, Artificial Sequence
  Description of Artificial Sequence: Synthetic oligonucleotide
agaguucaaaag

SEQ ID NO: 59119 - RNA, 12 nt, Artificial Sequence
  Description of Artificial Sequence: Synthetic oligonucleotide
gaguucaaaagc

SEQ ID NO: 59120 - RNA, 11 nt, Artificial Sequence
  Description of Artificial Sequence: Synthetic oligonucleotide
ucaaaagcccu

SEQ ID NO: 59121 - RNA, 11 nt, Artificial Sequence
  Description of Artificial Sequence: Synthetic oligonucleotide
caaaagcccuu

SEQ ID NO: 59122 - RNA, 11 nt, Artificial Sequence
  Description of Artificial Sequence: Synthetic oligonucleotide
aaagcccuuca

SEQ ID NO: 59123 - RNA, 11 nt, Artificial Sequence
  Description of Artificial Sequence: Synthetic oligonucleotide
aagcccuucag

SEQ ID NO: 59124 - RNA, 12 nt, Artificial Sequence
  Description of Artificial Sequence: Synthetic oligonucleotide
ugaagccgcucg

SEQ ID NO: 59125 - RNA, 11 nt, Artificial Sequence
  Description of Artificial Sequence: Synthetic oligonucleotide
acgccagucaa

SEQ ID NO: 59126 - RNA, 12 nt, Artificial Sequence
  Description of Artificial Sequence: Synthetic oligonucleotide
ucuuggugcgug

SEQ ID NO: 59127 - RNA, 13 nt, Artificial Sequence
  Description of Artificial Sequence: Synthetic oligonucleotide
uuggauucaucag

SEQ ID NO: 59128 - RNA, 12 nt, Artificial Sequence
  Description of Artificial Sequence: Synthetic oligonucleotide
ggaauaccuaag

SEQ ID NO: 59129 - RNA, 11 nt, Artificial Sequence
  Description of Artificial Sequence: Synthetic oligonucleotide
uuugaggcuca

SEQ ID NO: 59130 - RNA, 10 nt, Artificial Sequence
  Description of Artificial Sequence: Synthetic oligonucleotide
cuacaauugg

SEQ ID NO: 59131 - RNA, 11 nt, Artificial Sequence
  Description of Artificial Sequence: Synthetic oligonucleotide
aguuaggagcc

SEQ ID NO: 59132 - RNA, 12 nt, Artificial Sequence
  Description of Artificial Sequence: Synthetic oligonucleotide
gucaauauccac

SEQ ID NO: 59133 - RNA, 12 nt, Artificial Sequence
  Description of Artificial Sequence: Synthetic oligonucleotide
uguucagucaca

SEQ ID NO: 59134 - RNA, 11 nt, Artificial Sequence
  Description of Artificial Sequence: Synthetic oligonucleotide
cacacacauac

SEQ ID NO: 59135 - RNA, 11 nt, Artificial Sequence
  Description of Artificial Sequence: Synthetic oligonucleotide
uccuuuugcuu

SEQ ID NO: 59136 - RNA, 15 nt, Artificial Sequence
  Description of Artificial Sequence: Synthetic oligonucleotide
uuuaaaguaauuuuu

SEQ ID NO: 59137 - RNA, 12 nt, Artificial Sequence
  Description of Artificial Sequence: Synthetic oligonucleotide
aacagucaaugg

SEQ ID NO: 59138 - RNA, 12 nt, Artificial Sequence
  Description of Artificial Sequence: Synthetic oligonucleotide
cgacaaaccaau

SEQ ID NO: 59139 - RNA, 11 nt, Artificial Sequence
  Description of Artificial Sequence: Synthetic oligonucleotide
cugcuaccacu

SEQ ID NO: 59140 - RNA, 12 nt, Artificial Sequence
  Description of Artificial Sequence: Synthetic oligonucleotide
caagcggucuua

SEQ ID NO: 59141 - RNA, 12 nt, Artificial Sequence
  Description of Artificial Sequence: Synthetic oligonucleotide
gucuuaccggcu

SEQ ID NO: 59142 - RNA, 10 nt, Artificial Sequence
  Description of Artificial Sequence: Synthetic oligonucleotide
auggguuacc

SEQ ID NO: 59143 - RNA, 10 nt, Artificial Sequence
  Description of Artificial Sequence: Synthetic oligonucleotide
uuaccugcga

SEQ ID NO: 59144 - RNA, 11 nt, Artificial Sequence
  Description of Artificial Sequence: Synthetic oligonucleotide
aucuugcugag

SEQ ID NO: 59145 - RNA, 12 nt, Artificial Sequence
  Description of Artificial Sequence: Synthetic oligonucleotide
gcauaaaacagu

SEQ ID NO: 59146 - RNA, 11 nt, Artificial Sequence
  Description of Artificial Sequence: Synthetic oligonucleotide
uccuuuauccu

SEQ ID NO: 59147 - RNA, 11 nt, Artificial Sequence
  Description of Artificial Sequence: Synthetic oligonucleotide
aacgcaaguug

SEQ ID NO: 59148 - RNA, 12 nt, Artificial Sequence
  Description of Artificial Sequence: Synthetic oligonucleotide
aacugaaaccau

SEQ ID NO: 59149 - RNA, 13 nt, Artificial Sequence
  Description of Artificial Sequence: Synthetic oligonucleotide
cuuuguuaaauau

SEQ ID NO: 59150 - RNA, 13 nt, Artificial Sequence
  Description of Artificial Sequence: Synthetic oligonucleotide
uauauuaaaaguu

SEQ ID NO: 59151 - RNA, 12 nt, Artificial Sequence
  Description of Artificial Sequence: Synthetic oligonucleotide
uuuugacuuaac

SEQ ID NO: 59152 - RNA, 12 nt, Artificial Sequence
  Description of Artificial Sequence: Synthetic oligonucleotide
caaacucagcac

SEQ ID NO: 59153 - RNA, 10 nt, Artificial Sequence
  Description of Artificial Sequence: Synthetic oligonucleotide
gcugaccuca

SEQ ID NO: 59154 - RNA, 13 nt, Artificial Sequence
  Description of Artificial Sequence: Synthetic oligonucleotide
uuauucagaucgc

SEQ ID NO: 59155 - RNA, 12 nt, Artificial Sequence
  Description of Artificial Sequence: Synthetic oligonucleotide
ggguucugggau

SEQ ID NO: 59156 - RNA, 14 nt, Artificial Sequence
  Description of Artificial Sequence: Synthetic oligonucleotide
uauuggaaauuaug

SEQ ID NO: 59157 - RNA, 12 nt, Artificial Sequence
  Description of Artificial Sequence: Synthetic oligonucleotide
uggaagcacuag

SEQ ID NO: 59158 - RNA, 12 nt, Artificial Sequence
  Description of Artificial Sequence: Synthetic oligonucleotide
uuuuuaugugga

SEQ ID NO: 59159 - RNA, 11 nt, Artificial Sequence
  Description of Artificial Sequence: Synthetic oligonucleotide
gaauugguaga

SEQ ID NO: 59160 - RNA, 12 nt, Artificial Sequence
  Description of Artificial Sequence: Synthetic oligonucleotide
uagacuuggaga

SEQ ID NO: 59161 - RNA, 12 nt, Artificial Sequence
  Description of Artificial Sequence: Synthetic oligonucleotide
uacaguauucca

SEQ ID NO: 59162 - RNA, 14 nt, Artificial Sequence
  Description of Artificial Sequence: Synthetic oligonucleotide
cacugaugaauuaa

SEQ ID NO: 59163 - RNA, 11 nt, Artificial Sequence
  Description of Artificial Sequence: Synthetic oligonucleotide
cacaucaucac

SEQ ID NO: 59164 - RNA, 12 nt, Artificial Sequence
  Description of Artificial Sequence: Synthetic oligonucleotide
ucaccaaacaga

SEQ ID NO: 59165 - RNA, 11 nt, Artificial Sequence
  Description of Artificial Sequence: Synthetic oligonucleotide
gaacaugaugg

SEQ ID NO: 59166 - RNA, 11 nt, Artificial Sequence
  Description of Artificial Sequence: Synthetic oligonucleotide
auguagacugc

SEQ ID NO: 59167 - RNA, 12 nt, Artificial Sequence
  Description of Artificial Sequence: Synthetic oligonucleotide
gaucuauuuaug

SEQ ID NO: 59168 - RNA, 11 nt, Artificial Sequence
  Description of Artificial Sequence: Synthetic oligonucleotide
cacuauuauca

SEQ ID NO: 59169 - RNA, 10 nt, Artificial Sequence
  Description of Artificial Sequence: Synthetic oligonucleotide
ucaguucugc

SEQ ID NO: 59170 - RNA, 12 nt, Artificial Sequence
  Description of Artificial Sequence: Synthetic oligonucleotide
gauuaaaccuac

SEQ ID NO: 59171 - RNA, 12 nt, Artificial Sequence
  Description of Artificial Sequence: Synthetic oligonucleotide
uaaaauccuucu

SEQ ID NO: 59172 - RNA, 11 nt, Artificial Sequence
  Description of Artificial Sequence: Synthetic oligonucleotide
augcuguagac

SEQ ID NO: 59173 - RNA, 12 nt, Artificial Sequence
  Description of Artificial Sequence: Synthetic oligonucleotide
ugauaggaauag

SEQ ID NO: 59174 - RNA, 10 nt, Artificial Sequence
  Description of Artificial Sequence: Synthetic oligonucleotide
auggcccuga

SEQ ID NO: 59175 - RNA, 10 nt, Artificial Sequence
  Description of Artificial Sequence: Synthetic oligonucleotide
uccucaagca

SEQ ID NO: 59176 - RNA, 9 nt, Artificial Sequence
  Description of Artificial Sequence: Synthetic oligonucleotide
uucagccca

SEQ ID NO: 59177 - RNA, 10 nt, Artificial Sequence
  Description of Artificial Sequence: Synthetic oligonucleotide
cugcugaacc

SEQ ID NO: 59178 - RNA, 11 nt, Artificial Sequence
  Description of Artificial Sequence: Synthetic oligonucleotide
aguucucuuca

SEQ ID NO: 59179 - RNA, 10 nt, Artificial Sequence
  Description of Artificial Sequence: Synthetic oligonucleotide
cagccuagag

SEQ ID NO: 59180 - RNA, 12 nt, Artificial Sequence
  Description of Artificial Sequence: Synthetic oligonucleotide
ucugugaagugu

SEQ ID NO: 59181 - RNA, 13 nt, Artificial Sequence
  Description of Artificial Sequence: Synthetic oligonucleotide
gagaaaauuucaa

SEQ ID NO: 59182 - RNA, 10 nt, Artificial Sequence
  Description of Artificial Sequence: Synthetic oligonucleotide
auccuccuga

SEQ ID NO: 59183 - RNA, 11 nt, Artificial Sequence
  Description of Artificial Sequence: Synthetic oligonucleotide
ugacaucauau

SEQ ID NO: 59184 - RNA, 12 nt, Artificial Sequence
  Description of Artificial Sequence: Synthetic oligonucleotide
aucuucaucaua

SEQ ID NO: 59185 - RNA, 12 nt, Artificial Sequence
  Description of Artificial Sequence: Synthetic oligonucleotide
acuagcuauuaa

SEQ ID NO: 59186 - RNA, 13 nt, Artificial Sequence
  Description of Artificial Sequence: Synthetic oligonucleotide
cucuacuaaaaau

SEQ ID NO: 59187 - RNA, 11 nt, Artificial Sequence
  Description of Artificial Sequence: Synthetic oligonucleotide
cuaucucgccu

SEQ ID NO: 59188 - RNA, 12 nt, Artificial Sequence
  Description of Artificial Sequence: Synthetic oligonucleotide
uucgguccaguu

SEQ ID NO: 59189 - RNA, 10 nt, Artificial Sequence
  Description of Artificial Sequence: Synthetic oligonucleotide
auguagccgc

SEQ ID NO: 59190 - RNA, 11 nt, Artificial Sequence
  Description of Artificial Sequence: Synthetic oligonucleotide
gaggagacuug

SEQ ID NO: 59191 - RNA, 11 nt, Artificial Sequence
  Description of Artificial Sequence: Synthetic oligonucleotide
aguagugagga

SEQ ID NO: 59192 - RNA, 13 nt, Artificial Sequence
  Description of Artificial Sequence: Synthetic oligonucleotide
agaugaguacaaa

SEQ ID NO: 59193 - RNA, 12 nt, Artificial Sequence
  Description of Artificial Sequence: Synthetic oligonucleotide
uuguuaaugggc

SEQ ID NO: 59194 - RNA, 12 nt, Artificial Sequence
  Description of Artificial Sequence: Synthetic oligonucleotide
uuuuaauuuauu

SEQ ID NO: 59195 - RNA, 11 nt, Artificial Sequence
  Description of Artificial Sequence: Synthetic oligonucleotide
auuuaaauaug

SEQ ID NO: 59196 - RNA, 12 nt, Artificial Sequence
  Description of Artificial Sequence: Synthetic oligonucleotide
auccuuuguuuc

SEQ ID NO: 59197 - RNA, 13 nt, Artificial Sequence
  Description of Artificial Sequence: Synthetic oligonucleotide
gucuaaguguuug

SEQ ID NO: 59198 - RNA, 11 nt, Artificial Sequence
  Description of Artificial Sequence: Synthetic oligonucleotide
ccugugacaaa

SEQ ID NO: 59199 - RNA, 12 nt, Artificial Sequence
  Description of Artificial Sequence: Synthetic oligonucleotide
caggcugaauua

SEQ ID NO: 59200 - RNA, 13 nt, Artificial Sequence
  Description of Artificial Sequence: Synthetic oligonucleotide
ucauucuuacaau

SEQ ID NO: 59201 - RNA, 14 nt, Artificial Sequence
  Description of Artificial Sequence: Synthetic oligonucleotide
cauucuuacaauug

SEQ ID NO: 59202 - RNA, 11 nt, Artificial Sequence
  Description of Artificial Sequence: Synthetic oligonucleotide
agagaguguac

SEQ ID NO: 59203 - RNA, 11 nt, Artificial Sequence
  Description of Artificial Sequence: Synthetic oligonucleotide
gaacucagcag

SEQ ID NO: 59204 - RNA, 12 nt, Artificial Sequence
  Description of Artificial Sequence: Synthetic oligonucleotide
uuauuuucagua

SEQ ID NO: 59205 - RNA, 11 nt, Artificial Sequence
  Description of Artificial Sequence: Synthetic oligonucleotide
cuuaaauggaa

SEQ ID NO: 59206 - RNA, 12 nt, Artificial Sequence
  Description of Artificial Sequence: Synthetic oligonucleotide
gccuaaaauugu

SEQ ID NO: 59207 - RNA, 12 nt, Artificial Sequence
  Description of Artificial Sequence: Synthetic oligonucleotide
acuaacaucugg

SEQ ID NO: 59208 - RNA, 11 nt, Artificial Sequence
  Description of Artificial Sequence: Synthetic oligonucleotide
gacugugagcu

SEQ ID NO: 59209 - RNA, 13 nt, Artificial Sequence
  Description of Artificial Sequence: Synthetic oligonucleotide
gcuuuuuauuaau

SEQ ID NO: 59210 - RNA, 12 nt, Artificial Sequence
  Description of Artificial Sequence: Synthetic oligonucleotide
ucuucuuacauu

SEQ ID NO: 59211 - RNA, 14 nt, Artificial Sequence
  Description of Artificial Sequence: Synthetic oligonucleotide
auuuguaaaaaugu

SEQ ID NO: 59212 - RNA, 14 nt, Artificial Sequence
  Description of Artificial Sequence: Synthetic oligonucleotide
ucuuaauucauauu

SEQ ID NO: 59213 - RNA, 12 nt, Artificial Sequence
  Description of Artificial Sequence: Synthetic oligonucleotide
aacuaaucauga

SEQ ID NO: 59214 - RNA, 11 nt, Artificial Sequence
  Description of Artificial Sequence: Synthetic oligonucleotide
cugcucuuggg

SEQ ID NO: 59215 - RNA, 12 nt, Artificial Sequence
  Description of Artificial Sequence: Synthetic oligonucleotide
aguagcuuugag

SEQ ID NO: 59216 - RNA, 13 nt, Artificial Sequence
  Description of Artificial Sequence: Synthetic oligonucleotide
acguaauauuuca

SEQ ID NO: 59217 - RNA, 12 nt, Artificial Sequence
  Description of Artificial Sequence: Synthetic oligonucleotide
auucucuucacu

SEQ ID NO: 59218 - RNA, 13 nt, Artificial Sequence
  Description of Artificial Sequence: Synthetic oligonucleotide
uaaugcuaagaaa

SEQ ID NO: 59219 - RNA, 11 nt, Artificial Sequence
  Description of Artificial Sequence: Synthetic oligonucleotide
cugaaaaucaa

SEQ ID NO: 59220 - RNA, 13 nt, Artificial Sequence
  Description of Artificial Sequence: Synthetic oligonucleotide
auaugauuacuuu

SEQ ID NO: 59221 - RNA, 13 nt, Artificial Sequence
  Description of Artificial Sequence: Synthetic oligonucleotide
auuuuguucuaca

SEQ ID NO: 59222 - RNA, 11 nt, Artificial Sequence
  Description of Artificial Sequence: Synthetic oligonucleotide
ccgggacucuc

SEQ ID NO: 59223 - RNA, 13 nt, Artificial Sequence
  Description of Artificial Sequence: Synthetic oligonucleotide
cuuuaaaguaaag

SEQ ID NO: 59224 - RNA, 12 nt, Artificial Sequence
  Description of Artificial Sequence: Synthetic oligonucleotide
cuggaagccugg

SEQ ID NO: 59225 - RNA, 13 nt, Artificial Sequence
  Description of Artificial Sequence: Synthetic oligonucleotide
aaacaaaagagag

SEQ ID NO: 59226 - RNA, 12 nt, Artificial Sequence
  Description of Artificial Sequence: Synthetic oligonucleotide
ucaguuaugccg

SEQ ID NO: 59227 - RNA, 12 nt, Artificial Sequence
  Description of Artificial Sequence: Synthetic oligonucleotide
aaaagaagucca

SEQ ID NO: 59228 - RNA, 10 nt, Artificial Sequence
  Description of Artificial Sequence: Synthetic oligonucleotide
ggugagguua

SEQ ID NO: 59229 - RNA, 10 nt, Artificial Sequence
  Description of Artificial Sequence: Synthetic oligonucleotide
ggaagaggac

SEQ ID NO: 59230 - RNA, 12 nt, Artificial Sequence
  Description of Artificial Sequence: Synthetic oligonucleotide
agcaaguauugu

SEQ ID NO: 59231 - RNA, 11 nt, Artificial Sequence
  Description of Artificial Sequence: Synthetic oligonucleotide
uuguagcacuc

SEQ ID NO: 59232 - RNA, 13 nt, Artificial Sequence
  Description of Artificial Sequence: Synthetic oligonucleotide
caaaaccacaaau

SEQ ID NO: 59233 - RNA, 11 nt, Artificial Sequence
  Description of Artificial Sequence: Synthetic oligonucleotide
aagcccauaca

SEQ ID NO: 59234 - RNA, 10 nt, Artificial Sequence
  Description of Artificial Sequence: Synthetic oligonucleotide
gcccauacag

SEQ ID NO: 59235 - RNA, 11 nt, Artificial Sequence
  Description of Artificial Sequence: Synthetic oligonucleotide
agaaaccuucc

SEQ ID NO: 59236 - RNA, 9 nt, Artificial Sequence
  Description of Artificial Sequence: Synthetic oligonucleotide
uauaccuac

SEQ ID NO: 59237 - RNA, 12 nt, Artificial Sequence
  Description of Artificial Sequence: Synthetic oligonucleotide
ccaguuuucgga

SEQ ID NO: 59238 - RNA, 8 nt, Artificial Sequence
  Description of Artificial Sequence: Synthetic oligonucleotide
gaacaggg

SEQ ID NO: 59239 - RNA, 12 nt, Artificial Sequence
  Description of Artificial Sequence: Synthetic oligonucleotide
uaacuuuccagu

SEQ ID NO: 59240 - RNA, 13 nt, Artificial Sequence
  Description of Artificial Sequence: Synthetic oligonucleotide
aaguuugguuuug

SEQ ID NO: 59241 - RNA, 11 nt, Artificial Sequence
  Description of Artificial Sequence: Synthetic oligonucleotide
uucccacugua

SEQ ID NO: 59242 - RNA, 12 nt, Artificial Sequence
  Description of Artificial Sequence: Synthetic oligonucleotide
gauaccauauga

SEQ ID NO: 59243 - RNA, 10 nt, Artificial Sequence
  Description of Artificial Sequence: Synthetic oligonucleotide
acaugggcug

SEQ ID NO: 59244 - RNA, 12 nt, Artificial Sequence
  Description of Artificial Sequence: Synthetic oligonucleotide
aacuuuuucaua

SEQ ID NO: 59245 - RNA, 11 nt, Artificial Sequence
  Description of Artificial Sequence: Synthetic oligonucleotide
augaggccgga

SEQ ID NO: 59246 - RNA, 10 nt, Artificial Sequence
  Description of Artificial Sequence: Synthetic oligonucleotide
cugcauuugu

SEQ ID NO: 59247 - RNA, 12 nt, Artificial Sequence
  Description of Artificial Sequence: Synthetic oligonucleotide
auguuuacuacc

SEQ ID NO: 59248 - RNA, 14 nt, Artificial Sequence
  Description of Artificial Sequence: Synthetic oligonucleotide
auuuuuugaugaaa

SEQ ID NO: 59249 - RNA, 13 nt, Artificial Sequence
  Description of Artificial Sequence: Synthetic oligonucleotide
agugugugaauuu

SEQ ID NO: 59250 - RNA, 12 nt, Artificial Sequence
  Description of Artificial Sequence: Synthetic oligonucleotide
agcaauguaugu

SEQ ID NO: 59251 - RNA, 13 nt, Artificial Sequence
  Description of Artificial Sequence: Synthetic oligonucleotide
aagcacauauaua

SEQ ID NO: 59252 - RNA, 13 nt, Artificial Sequence
  Description of Artificial Sequence: Synthetic oligonucleotide
uaauaguuucucc

SEQ ID NO: 59253 - RNA, 12 nt, Artificial Sequence
  Description of Artificial Sequence: Synthetic oligonucleotide
guuucuccaaau

SEQ ID NO: 59254 - RNA, 12 nt, Artificial Sequence
  Description of Artificial Sequence: Synthetic oligonucleotide
acuuccuagaaa

SEQ ID NO: 59255 - RNA, 12 nt, Artificial Sequence
  Description of Artificial Sequence: Synthetic oligonucleotide
acaccauauaug

SEQ ID NO: 59256 - RNA, 13 nt, Artificial Sequence
  Description of Artificial Sequence: Synthetic oligonucleotide
uauaugaauggag

SEQ ID NO: 59257 - RNA, 12 nt, Artificial Sequence
  Description of Artificial Sequence: Synthetic oligonucleotide
cauuuacaggga

SEQ ID NO: 59258 - RNA, 12 nt, Artificial Sequence
  Description of Artificial Sequence: Synthetic oligonucleotide
auuuacagggac

SEQ ID NO: 59259 - RNA, 9 nt, Artificial Sequence
  Description of Artificial Sequence: Synthetic oligonucleotide
gggaccuga

SEQ ID NO: 59260 - RNA, 13 nt, Artificial Sequence
  Description of Artificial Sequence: Synthetic oligonucleotide
guuugacugcauc

SEQ ID NO: 59261 - RNA, 12 nt, Artificial Sequence
  Description of Artificial Sequence: Synthetic oligonucleotide
uugacugcaucg

SEQ ID NO: 59262 - RNA, 11 nt, Artificial Sequence
  Description of Artificial Sequence: Synthetic oligonucleotide
aguucacaggg

SEQ ID NO: 59263 - RNA, 12 nt, Artificial Sequence
  Description of Artificial Sequence: Synthetic oligonucleotide
gcaccucugucc

SEQ ID NO: 59264 - RNA, 14 nt, Artificial Sequence
  Description of Artificial Sequence: Synthetic oligonucleotide
guuugucuuuuuaa

SEQ ID NO: 59265 - RNA, 13 nt, Artificial Sequence
  Description of Artificial Sequence: Synthetic oligonucleotide
uugucuuuuuaag

SEQ ID NO: 59266 - RNA, 12 nt, Artificial Sequence
  Description of Artificial Sequence: Synthetic oligonucleotide
cuaaagguuguc

SEQ ID NO: 59267 - RNA, 11 nt, Artificial Sequence
  Description of Artificial Sequence: Synthetic oligonucleotide
agguugucgac

SEQ ID NO: 59268 - RNA, 12 nt, Artificial Sequence
  Description of Artificial Sequence: Synthetic oligonucleotide
ccuggcaauugu

SEQ ID NO: 59269 - RNA, 11 nt, Artificial Sequence
  Description of Artificial Sequence: Synthetic oligonucleotide
guggugcgagg

SEQ ID NO: 59270 - RNA, 12 nt, Artificial Sequence
  Description of Artificial Sequence: Synthetic oligonucleotide
gagacaugaaau

SEQ ID NO: 59271 - RNA, 12 nt, Artificial Sequence
  Description of Artificial Sequence: Synthetic oligonucleotide
uauauuucucca

SEQ ID NO: 59272 - RNA, 9 nt, Artificial Sequence
  Description of Artificial Sequence: Synthetic oligonucleotide
augaaggcu

SEQ ID NO: 59273 - RNA, 10 nt, Artificial Sequence
  Description of Artificial Sequence: Synthetic oligonucleotide
cuggaguggu

SEQ ID NO: 59274 - RNA, 10 nt, Artificial Sequence
  Description of Artificial Sequence: Synthetic oligonucleotide
ggaagagagg

SEQ ID NO: 59275 - RNA, 11 nt, Artificial Sequence
  Description of Artificial Sequence: Synthetic oligonucleotide
uugcaucgggc

SEQ ID NO: 59276 - RNA, 12 nt, Artificial Sequence
  Description of Artificial Sequence: Synthetic oligonucleotide
uauccuacugug

SEQ ID NO: 59277 - RNA, 12 nt, Artificial Sequence
  Description of Artificial Sequence: Synthetic oligonucleotide
ccuacuguguaa

SEQ ID NO: 59278 - RNA, 11 nt, Artificial Sequence
  Description of Artificial Sequence: Synthetic oligonucleotide
cuuguagugua

SEQ ID NO: 59279 - RNA, 12 nt, Artificial Sequence
  Description of Artificial Sequence: Synthetic oligonucleotide
cuuuguugauug

SEQ ID NO: 59280 - RNA, 13 nt, Artificial Sequence
  Description of Artificial Sequence: Synthetic oligonucleotide
uuguugauugaaa

SEQ ID NO: 59281 - RNA, 14 nt, Artificial Sequence
  Description of Artificial Sequence: Synthetic oligonucleotide
ucuuuuucuuccau

SEQ ID NO: 59282 - RNA, 12 nt, Artificial Sequence
  Description of Artificial Sequence: Synthetic oligonucleotide
aucuuccuucua

SEQ ID NO: 59283 - RNA, 12 nt, Artificial Sequence
  Description of Artificial Sequence: Synthetic oligonucleotide
ugaaugcuucau

SEQ ID NO: 59284 - RNA, 12 nt, Artificial Sequence
  Description of Artificial Sequence: Synthetic oligonucleotide
gaaugcuucaug

SEQ ID NO: 59285 - RNA, 12 nt, Artificial Sequence
  Description of Artificial Sequence: Synthetic oligonucleotide
auucuacuuuga

SEQ ID NO: 59286 - RNA, 12 nt, Artificial Sequence
  Description of Artificial Sequence: Synthetic oligonucleotide
gcaacuacagac

SEQ ID NO: 59287 - RNA, 12 nt, Artificial Sequence
  Description of Artificial Sequence: Synthetic oligonucleotide
accaaggucaac

SEQ ID NO: 59288 - RNA, 12 nt, Artificial Sequence
  Description of Artificial Sequence: Synthetic oligonucleotide
gacuaucucgac

SEQ ID NO: 59289 - RNA, 12 nt, Artificial Sequence
  Description of Artificial Sequence: Synthetic oligonucleotide
accuucccaaac

SEQ ID NO: 59290 - RNA, 13 nt, Artificial Sequence
  Description of Artificial Sequence: Synthetic oligonucleotide
caagcuuagaacu

SEQ ID NO: 59291 - RNA, 14 nt, Artificial Sequence
  Description of Artificial Sequence: Synthetic oligonucleotide
gcuuagaacuuuaa

SEQ ID NO: 59292 - RNA, 13 nt, Artificial Sequence
  Description of Artificial Sequence: Synthetic oligonucleotide
aacuuuaagcaac

SEQ ID NO: 59293 - RNA, 10 nt, Artificial Sequence
  Description of Artificial Sequence: Synthetic oligonucleotide
agaccaccac

SEQ ID NO: 59294 - RNA, 13 nt, Artificial Sequence
  Description of Artificial Sequence: Synthetic oligonucleotide
cgagaaauaaagu

SEQ ID NO: 59295 - RNA, 13 nt, Artificial Sequence
  Description of Artificial Sequence: Synthetic oligonucleotide
gagaaauaaaguu

SEQ ID NO: 59296 - RNA, 11 nt, Artificial Sequence
  Description of Artificial Sequence: Synthetic oligonucleotide
ggaaaugaucc

SEQ ID NO: 59297 - RNA, 12 nt, Artificial Sequence
  Description of Artificial Sequence: Synthetic oligonucleotide
aagaaaugaaac

SEQ ID NO: 59298 - RNA, 12 nt, Artificial Sequence
  Description of Artificial Sequence: Synthetic oligonucleotide
uuuccauccucc

SEQ ID NO: 59299 - RNA, 14 nt, Artificial Sequence
  Description of Artificial Sequence: Synthetic oligonucleotide
cugaaaaucuuuga

SEQ ID NO: 59300 - RNA, 10 nt, Artificial Sequence
  Description of Artificial Sequence: Synthetic oligonucleotide
gccguucagg

SEQ ID NO: 59301 - RNA, 12 nt, Artificial Sequence
  Description of Artificial Sequence: Synthetic oligonucleotide
aggguccagaag

SEQ ID NO: 59302 - RNA, 12 nt, Artificial Sequence
  Description of Artificial Sequence: Synthetic oligonucleotide
caagacugcuug

SEQ ID NO: 59303 - RNA, 12 nt, Artificial Sequence
  Description of Artificial Sequence: Synthetic oligonucleotide
ccaugucuuugg

SEQ ID NO: 59304 - RNA, 10 nt, Artificial Sequence
  Description of Artificial Sequence: Synthetic oligonucleotide
ccugaaacac

SEQ ID NO: 59305 - RNA, 11 nt, Artificial Sequence
  Description of Artificial Sequence: Synthetic oligonucleotide
cucuguaccuc

SEQ ID NO: 59306 - RNA, 11 nt, Artificial Sequence
  Description of Artificial Sequence: Synthetic oligonucleotide
gcaagacaaga

SEQ ID NO: 59307 - RNA, 12 nt, Artificial Sequence
  Description of Artificial Sequence: Synthetic oligonucleotide
caagacaagaaa

SEQ ID NO: 59308 - RNA, 11 nt, Artificial Sequence
  Description of Artificial Sequence: Synthetic oligonucleotide
guacaagaucc

SEQ ID NO: 59309 - RNA, 11 nt, Artificial Sequence
  Description of Artificial Sequence: Synthetic oligonucleotide
guacuugcaga

SEQ ID NO: 59310 - RNA, 12 nt, Artificial Sequence
  Description of Artificial Sequence: Synthetic oligonucleotide
gaucgauacaga

SEQ ID NO: 59311 - RNA, 12 nt, Artificial Sequence
  Description of Artificial Sequence: Synthetic oligonucleotide
auaaaaauaaau

SEQ ID NO: 59312 - RNA, 12 nt, Artificial Sequence
  Description of Artificial Sequence: Synthetic oligonucleotide
aaaaauaaauau

SEQ ID NO: 59313 - RNA, 12 nt, Artificial Sequence
  Description of Artificial Sequence: Synthetic oligonucleotide
uugacugcugug

SEQ ID NO: 59314 - RNA, 12 nt, Artificial Sequence
  Description of Artificial Sequence: Synthetic oligonucleotide
gagaugagagac

SEQ ID NO: 59315 - RNA, 9 nt, Artificial Sequence
  Description of Artificial Sequence: Synthetic oligonucleotide
cccacuugg

SEQ ID NO: 59316 - RNA, 2222 nt, Homo sapiens
auucggcacgagggaggaagcgagaggugcugcccuccccccggaguuggaagcgcguuacccggguccaaaaugcccaagaagaagccgacgcccauccagcugaacccggcccccgacggcucugcaguuaacgggaccagcucugcggagaccaacuuggaggccuugcagaagaagcuggaggagcuagagcuugaugagcagcagcgaaagcgccuugaggccuuucuuacccagaagcagaaggugggagaacugaaggaugacgacuuugagaagaucagugagcugggggcuggcaauggcggugugguguucaaggucucccacaagccuucuggccuggucauggccagaaagcuaauucaucuggagaucaaacccgcaauccggaaccagaucauaagggagcugcagguucugcaugagugcaacucuccguacaucgugggcuucuauggugcguucuacagcgauggcgagaucaguaucugcauggagcacauggauggagguucucuggaucaaguccugaagaaagcuggaagaauuccugaacaaauuuuaggaaaaguuagcauugcuguaauaaaaggccugacauaucugagggagaagcacaagaucaugcacagagaugucaagcccuccaacauccuagucaacucccguggggagaucaagcucugugacuuuggggucagcgggcagcucaucgacuccauggccaacuccuucgugggcacaagguccuacaugucgccagaaagacuccaggggacucauuacucugugcagucagacaucuggagcaugggacugucucugguagagauggcgguugggagguaucccaucccuccuccagaugccaaggagcuggagcugauguuugggugccagguggaaggagaugcggcugagaccccacccaggccaaggacccccgggaggccccuuagcucauacggaauggacagccgaccucccauggcaauuuuugaguuguuggauuacauagucaacgagccuccuccaaaacugcccaguggaguguucagucuggaauuucaagauuuugugaauaaaugcuuaauaaaaaaccccgcagagagagcagauuugaagcaacucaugguucaugcuuuuaucaagagaucugaugcugaggaaguggauuuugcagguuggcucugcuccaccaucggccuuaaccagcccagcacaccaacccaugcugcuggcgucuaaguguuugggaagcaacaaagagcgaguccccugcccggugguuugccaugucgcuuuugggccuccuucccaugccugucucuguucagaugugcauuucaccugugacaaaggaugaagaacacagcaugugccaagauucuacucuugucauuuuuaauauuacugucuuuauucuuauuacuauuauuguuccccuaaguggauuggcuuugugcuuggggcuauuuguguguaugcugaugaucaaaaccugugccaggcugaauuacagugaaauuuuuggugaauguggguagucauucuuacaauugcacugcuguuccugcuccaugacuggcugucugccuguauuuucggacuuugacauuugacauuugguggacuuuaucuugcugggcauacuuucucucuaggagggagccuugugagauccuucacaggcagugcaugugaagcaugcuuugcugcuaugaaaaugagcaucagagaguguacaucauguuauuuuauuauuauuauuugcuuuucauguagaacucagcaguugacauccaaaucuagccagagcccuucacugccaugauagcuggggcuucaccagucugucuacuguggugaucuguagacuucugguuguauuucuauauuuauuuucaguauacugugugggauacuuagugguaugucucuuuaaguuuugauuaauguuucuuaaauggaauuauuugaaugucacaaauugaucaagauauuaaaaugucggauuuaucuuuccccauauccaaguaccaaugcuguuguaaacaacguguauagugccuaaaauuguaugaaaauccuuuuaaccauuuuaaccuagauguuuaacaaaucuaaucucuuauucuaauaaauauacuaugaaauaaaaaaaaaaggagaaagcuaaaaaaaaaaaaaaaaaaaaaaaaaaaaaaaaaaaaaaa

SEQ ID NO: 59317 - RNA, 19 nt, Artificial Sequence
  Description of Artificial Sequence: Synthetic oligonucleotide
auucggcacgagggaggaa

SEQ ID NO: 59318 - RNA, 19 nt, Artificial Sequence
  Description of Artificial Sequence: Synthetic oligonucleotide
agcgagaggugcugcccuc

SEQ ID NO: 59319 - RNA, 19 nt, Artificial Sequence
  Description of Artificial Sequence: Synthetic oligonucleotide
ccccccggaguuggaagcg

SEQ ID NO: 59320 - RNA, 19 nt, Artificial Sequence
  Description of Artificial Sequence: Synthetic oligonucleotide
gcguuacccggguccaaaa

SEQ ID NO: 59321 - RNA, 19 nt, Artificial Sequence
  Description of Artificial Sequence: Synthetic oligonucleotide
augcccaagaagaagccga

SEQ ID NO: 59322 - RNA, 19 nt, Artificial Sequence
  Description of Artificial Sequence: Synthetic oligonucleotide
acgcccauccagcugaacc

SEQ ID NO: 59323 - RNA, 19 nt, Artificial Sequence
  Description of Artificial Sequence: Synthetic oligonucleotide
ccggcccccgacggcucug

SEQ ID NO: 59324 - RNA, 19 nt, Artificial Sequence
  Description of Artificial Sequence: Synthetic oligonucleotide
gcaguuaacgggaccagcu

SEQ ID NO: 59325 - RNA, 19 nt, Artificial Sequence
  Description of Artificial Sequence: Synthetic oligonucleotide
ucugcggagaccaacuugg

SEQ ID NO: 59326 - RNA, 19 nt, Artificial Sequence
  Description of Artificial Sequence: Synthetic oligonucleotide
gaggccuugcagaagaagc

SEQ ID NO: 59327 - RNA, 19 nt, Artificial Sequence
  Description of Artificial Sequence: Synthetic oligonucleotide
cuggaggagcuagagcuug

SEQ ID NO: 59328 - RNA, 19 nt, Artificial Sequence
  Description of Artificial Sequence: Synthetic oligonucleotide
gaugagcagcagcgaaagc

SEQ ID NO: 59329 - RNA, 19 nt, Artificial Sequence
  Description of Artificial Sequence: Synthetic oligonucleotide
cgccuugaggccuuucuua

SEQ ID NO: 59330 - RNA, 19 nt, Artificial Sequence
  Description of Artificial Sequence: Synthetic oligonucleotide
acccagaagcagaaggugg

SEQ ID NO: 59331 - RNA, 19 nt, Artificial Sequence
  Description of Artificial Sequence: Synthetic oligonucleotide
ggagaacugaaggaugacg

SEQ ID NO: 59332 - RNA, 19 nt, Artificial Sequence
  Description of Artificial Sequence: Synthetic oligonucleotide
gacuuugagaagaucagug

SEQ ID NO: 59333 - RNA, 19 nt, Artificial Sequence
  Description of Artificial Sequence: Synthetic oligonucleotide
gagcugggggcuggcaaug

SEQ ID NO: 59334 - RNA, 19 nt, Artificial Sequence
  Description of Artificial Sequence: Synthetic oligonucleotide
ggcggugugguguucaagg

SEQ ID NO: 59335 - RNA, 19 nt, Artificial Sequence
  Description of Artificial Sequence: Synthetic oligonucleotide
gucucccacaagccuucug

SEQ ID NO: 59336 - RNA, 19 nt, Artificial Sequence
  Description of Artificial Sequence: Synthetic oligonucleotide
ggccuggucauggccagaa

SEQ ID NO: 59337 - RNA, 19 nt, Artificial Sequence
  Description of Artificial Sequence: Synthetic oligonucleotide
aagcuaauucaucuggaga

SEQ ID NO: 59338 - RNA, 19 nt, Artificial Sequence
  Description of Artificial Sequence: Synthetic oligonucleotide
aucaaacccgcaauccgga

SEQ ID NO: 59339 - RNA, 19 nt, Artificial Sequence
  Description of Artificial Sequence: Synthetic oligonucleotide
aaccagaucauaagggagc

SEQ ID NO: 59340 - RNA, 19 nt, Artificial Sequence
  Description of Artificial Sequence: Synthetic oligonucleotide
cugcagguucugcaugagu

SEQ ID NO: 59341 - RNA, 19 nt, Artificial Sequence
  Description of Artificial Sequence: Synthetic oligonucleotide
ugcaacucuccguacaucg

SEQ ID NO: 59342 - RNA, 19 nt, Artificial Sequence
  Description of Artificial Sequence: Synthetic oligonucleotide
gugggcuucuauggugcgu

SEQ ID NO: 59343 - RNA, 19 nt, Artificial Sequence
  Description of Artificial Sequence: Synthetic oligonucleotide
uucuacagcgauggcgaga

SEQ ID NO: 59344 - RNA, 19 nt, Artificial Sequence
  Description of Artificial Sequence: Synthetic oligonucleotide
aucaguaucugcauggagc

SEQ ID NO: 59345 - RNA, 19 nt, Artificial Sequence
  Description of Artificial Sequence: Synthetic oligonucleotide
cacauggauggagguucuc

SEQ ID NO: 59346 - RNA, 19 nt, Artificial Sequence
  Description of Artificial Sequence: Synthetic oligonucleotide
cuggaucaaguccugaaga

SEQ ID NO: 59347 - RNA, 19 nt, Artificial Sequence
  Description of Artificial Sequence: Synthetic oligonucleotide
aaagcuggaagaauuccug

SEQ ID NO: 59348 - RNA, 19 nt, Artificial Sequence
  Description of Artificial Sequence: Synthetic oligonucleotide
gaacaaauuuuaggaaaag

SEQ ID NO: 59349 - RNA, 19 nt, Artificial Sequence
  Description of Artificial Sequence: Synthetic oligonucleotide
guuagcauugcuguaauaa

SEQ ID NO: 59350 - RNA, 19 nt, Artificial Sequence
  Description of Artificial Sequence: Synthetic oligonucleotide
aaaggccugacauaucuga

SEQ ID NO: 59351 - RNA, 19 nt, Artificial Sequence
  Description of Artificial Sequence: Synthetic oligonucleotide
agggagaagcacaagauca

SEQ ID NO: 59352 - RNA, 19 nt, Artificial Sequence
  Description of Artificial Sequence: Synthetic oligonucleotide
augcacagagaugucaagc

SEQ ID NO: 59353 - RNA, 19 nt, Artificial Sequence
  Description of Artificial Sequence: Synthetic oligonucleotide
cccuccaacauccuaguca

SEQ ID NO: 59354 - RNA, 19 nt, Artificial Sequence
  Description of Artificial Sequence: Synthetic oligonucleotide
aacucccguggggagauca

SEQ ID NO: 59355 - RNA, 19 nt, Artificial Sequence
  Description of Artificial Sequence: Synthetic oligonucleotide
aagcucugugacuuugggg

SEQ ID NO: 59356 - RNA, 19 nt, Artificial Sequence
  Description of Artificial Sequence: Synthetic oligonucleotide
gucagcgggcagcucaucg

SEQ ID NO: 59357 - RNA, 19 nt, Artificial Sequence
  Description of Artificial Sequence: Synthetic oligonucleotide
gacuccauggccaacuccu

SEQ ID NO: 59358 - RNA, 19 nt, Artificial Sequence
  Description of Artificial Sequence: Synthetic oligonucleotide
uucgugggcacaagguccu

SEQ ID NO: 59359 - RNA, 19 nt, Artificial Sequence
  Description of Artificial Sequence: Synthetic oligonucleotide
uacaugucgccagaaagac

SEQ ID NO: 59360 - RNA, 19 nt, Artificial Sequence
  Description of Artificial Sequence: Synthetic oligonucleotide
cuccaggggacucauuacu

SEQ ID NO: 59361 - RNA, 19 nt, Artificial Sequence
  Description of Artificial Sequence: Synthetic oligonucleotide
ucugugcagucagacaucu

SEQ ID NO: 59362 - RNA, 19 nt, Artificial Sequence
  Description of Artificial Sequence: Synthetic oligonucleotide
uggagcaugggacugucuc

SEQ ID NO: 59363 - RNA, 19 nt, Artificial Sequence
  Description of Artificial Sequence: Synthetic oligonucleotide
cugguagagauggcgguug

SEQ ID NO: 59364 - RNA, 19 nt, Artificial Sequence
  Description of Artificial Sequence: Synthetic oligonucleotide
gggagguaucccaucccuc

SEQ ID NO: 59365 - RNA, 19 nt, Artificial Sequence
  Description of Artificial Sequence: Synthetic oligonucleotide
ccuccagaugccaaggagc

SEQ ID NO: 59366 - RNA, 19 nt, Artificial Sequence
  Description of Artificial Sequence: Synthetic oligonucleotide
cuggagcugauguuugggu

SEQ ID NO: 59367 - RNA, 19 nt, Artificial Sequence
  Description of Artificial Sequence: Synthetic oligonucleotide
ugccagguggaaggagaug

SEQ ID NO: 59368 - RNA, 19 nt, Artificial Sequence
  Description of Artificial Sequence: Synthetic oligonucleotide
gcggcugagaccccaccca

SEQ ID NO: 59369 - RNA, 19 nt, Artificial Sequence
  Description of Artificial Sequence: Synthetic oligonucleotide
aggccaaggacccccggga

SEQ ID NO: 59370 - RNA, 19 nt, Artificial Sequence
  Description of Artificial Sequence: Synthetic oligonucleotide
aggccccuuagcucauacg

SEQ ID NO: 59371 - RNA, 19 nt, Artificial Sequence
  Description of Artificial Sequence: Synthetic oligonucleotide
ggaauggacagccgaccuc

SEQ ID NO: 59372 - RNA, 19 nt, Artificial Sequence
  Description of Artificial Sequence: Synthetic oligonucleotide
cccauggcaauuuuugagu

SEQ ID NO: 59373 - RNA, 19 nt, Artificial Sequence
  Description of Artificial Sequence: Synthetic oligonucleotide
uuguuggauuacauaguca

SEQ ID NO: 59374 - RNA, 19 nt, Artificial Sequence
  Description of Artificial Sequence: Synthetic oligonucleotide
aacgagccuccuccaaaac

SEQ ID NO: 59375 - RNA, 19 nt, Artificial Sequence
  Description of Artificial Sequence: Synthetic oligonucleotide
cugcccaguggaguguuca

SEQ ID NO: 59376 - RNA, 19 nt, Artificial Sequence
  Description of Artificial Sequence: Synthetic oligonucleotide
agucuggaauuucaagauu

SEQ ID NO: 59377 - RNA, 19 nt, Artificial Sequence
  Description of Artificial Sequence: Synthetic oligonucleotide
uuugugaauaaaugcuuaa

SEQ ID NO: 59378 - RNA, 19 nt, Artificial Sequence
  Description of Artificial Sequence: Synthetic oligonucleotide
auaaaaaaccccgcagaga

SEQ ID NO: 59379 - RNA, 19 nt, Artificial Sequence
  Description of Artificial Sequence: Synthetic oligonucleotide
agagcagauuugaagcaac

SEQ ID NO: 59380 - RNA, 19 nt, Artificial Sequence
  Description of Artificial Sequence: Synthetic oligonucleotide
cucaugguucaugcuuuua

SEQ ID NO: 59381 - RNA, 19 nt, Artificial Sequence
  Description of Artificial Sequence: Synthetic oligonucleotide
aucaagagaucugaugcug

SEQ ID NO: 59382 - RNA, 19 nt, Artificial Sequence
  Description of Artificial Sequence: Synthetic oligonucleotide
gaggaaguggauuuugcag

SEQ ID NO: 59383 - RNA, 19 nt, Artificial Sequence
  Description of Artificial Sequence: Synthetic oligonucleotide
gguuggcucugcuccacca

SEQ ID NO: 59384 - RNA, 19 nt, Artificial Sequence
  Description of Artificial Sequence: Synthetic oligonucleotide
aucggccuuaaccagccca

SEQ ID NO: 59385 - RNA, 19 nt, Artificial Sequence
  Description of Artificial Sequence: Synthetic oligonucleotide
agcacaccaacccaugcug

SEQ ID NO: 59386 - RNA, 19 nt, Artificial Sequence
  Description of Artificial Sequence: Synthetic oligonucleotide
gcuggcgucuaaguguuug

SEQ ID NO: 59387 - RNA, 19 nt, Artificial Sequence
  Description of Artificial Sequence: Synthetic oligonucleotide
gggaagcaacaaagagcga

SEQ ID NO: 59388 - RNA, 19 nt, Artificial Sequence
  Description of Artificial Sequence: Synthetic oligonucleotide
aguccccugcccggugguu

SEQ ID NO: 59389 - RNA, 19 nt, Artificial Sequence
  Description of Artificial Sequence: Synthetic oligonucleotide
uugccaugucgcuuuuggg

SEQ ID NO: 59390 - RNA, 19 nt, Artificial Sequence
  Description of Artificial Sequence: Synthetic oligonucleotide
gccuccuucccaugccugu

SEQ ID NO: 59391 - RNA, 19 nt, Artificial Sequence
  Description of Artificial Sequence: Synthetic oligonucleotide
ucucuguucagaugugcau

SEQ ID NO: 59392 - RNA, 19 nt, Artificial Sequence
  Description of Artificial Sequence: Synthetic oligonucleotide
uuucaccugugacaaagga

SEQ ID NO: 59393 - RNA, 19 nt, Artificial Sequence
  Description of Artificial Sequence: Synthetic oligonucleotide
augaagaacacagcaugug

SEQ ID NO: 59394 - RNA, 19 nt, Artificial Sequence
  Description of Artificial Sequence: Synthetic oligonucleotide
gccaagauucuacucuugu

SEQ ID NO: 59395 - RNA, 19 nt, Artificial Sequence
  Description of Artificial Sequence: Synthetic oligonucleotide
ucauuuuuaauauuacugu

SEQ ID NO: 59396 - RNA, 19 nt, Artificial Sequence
  Description of Artificial Sequence: Synthetic oligonucleotide
ucuuuauucuuauuacuau

SEQ ID NO: 59397 - RNA, 19 nt, Artificial Sequence
  Description of Artificial Sequence: Synthetic oligonucleotide
uuauuguuccccuaagugg

SEQ ID NO: 59398 - RNA, 19 nt, Artificial Sequence
  Description of Artificial Sequence: Synthetic oligonucleotide
gauuggcuuugugcuuggg

SEQ ID NO: 59399 - RNA, 19 nt, Artificial Sequence
  Description of Artificial Sequence: Synthetic oligonucleotide
ggcuauuuguguguaugcu

SEQ ID NO: 59400 - RNA, 19 nt, Artificial Sequence
  Description of Artificial Sequence: Synthetic oligonucleotide
ugaugaucaaaaccugugc

SEQ ID NO: 59401 - RNA, 19 nt, Artificial Sequence
  Description of Artificial Sequence: Synthetic oligonucleotide
ccaggcugaauuacaguga

SEQ ID NO: 59402 - RNA, 19 nt, Artificial Sequence
  Description of Artificial Sequence: Synthetic oligonucleotide
aaauuuuuggugaaugugg

SEQ ID NO: 59403 - RNA, 19 nt, Artificial Sequence
  Description of Artificial Sequence: Synthetic oligonucleotide
gguagucauucuuacaauu

SEQ ID NO: 59404 - RNA, 19 nt, Artificial Sequence
  Description of Artificial Sequence: Synthetic oligonucleotide
ugcacugcuguuccugcuc

SEQ ID NO: 59405 - RNA, 19 nt, Artificial Sequence
  Description of Artificial Sequence: Synthetic oligonucleotide
ccaugacuggcugucugcc

SEQ ID NO: 59406 - RNA, 19 nt, Artificial Sequence
  Description of Artificial Sequence: Synthetic oligonucleotide
cuguauuuucggacuuuga

SEQ ID NO: 59407 - RNA, 19 nt, Artificial Sequence
  Description of Artificial Sequence: Synthetic oligonucleotide
acauuugacauuuggugga

SEQ ID NO: 59408 - RNA, 19 nt, Artificial Sequence
  Description of Artificial Sequence: Synthetic oligonucleotide
acuuuaucuugcugggcau

SEQ ID NO: 59409 - RNA, 19 nt, Artificial Sequence
  Description of Artificial Sequence: Synthetic oligonucleotide
uacuuucucucuaggaggg

SEQ ID NO: 59410 - RNA, 19 nt, Artificial Sequence
  Description of Artificial Sequence: Synthetic oligonucleotide
gagccuugugagauccuuc

SEQ ID NO: 59411 - RNA, 19 nt, Artificial Sequence
  Description of Artificial Sequence: Synthetic oligonucleotide
cacaggcagugcaugugaa

SEQ ID NO: 59412 - RNA, 19 nt, Artificial Sequence
  Description of Artificial Sequence: Synthetic oligonucleotide
agcaugcuuugcugcuaug

SEQ ID NO: 59413 - RNA, 19 nt, Artificial Sequence
  Description of Artificial Sequence: Synthetic oligonucleotide
gaaaaugagcaucagagag

SEQ ID NO: 59414 - RNA, 19 nt, Artificial Sequence
  Description of Artificial Sequence: Synthetic oligonucleotide
guguacaucauguuauuuu

SEQ ID NO: 59415 - RNA, 19 nt, Artificial Sequence
  Description of Artificial Sequence: Synthetic oligonucleotide
uauuauuauuauuugcuuu

SEQ ID NO: 59416 - RNA, 19 nt, Artificial Sequence
  Description of Artificial Sequence: Synthetic oligonucleotide
uucauguagaacucagcag

SEQ ID NO: 59417 - RNA, 19 nt, Artificial Sequence
  Description of Artificial Sequence: Synthetic oligonucleotide
guugacauccaaaucuagc

SEQ ID NO: 59418 - RNA, 19 nt, Artificial Sequence
  Description of Artificial Sequence: Synthetic oligonucleotide
ccagagcccuucacugcca

SEQ ID NO: 59419 - RNA, 19 nt, Artificial Sequence
  Description of Artificial Sequence: Synthetic oligonucleotide
augauagcuggggcuucac

SEQ ID NO: 59420 - RNA, 19 nt, Artificial Sequence
  Description of Artificial Sequence: Synthetic oligonucleotide
ccagucugucuacuguggu

SEQ ID NO: 59421 - RNA, 19 nt, Artificial Sequence
  Description of Artificial Sequence: Synthetic oligonucleotide
ugaucuguagacuucuggu

SEQ ID NO: 59422 - RNA, 19 nt, Artificial Sequence
  Description of Artificial Sequence: Synthetic oligonucleotide
uuguauuucuauauuuauu

SEQ ID NO: 59423 - RNA, 19 nt, Artificial Sequence
  Description of Artificial Sequence: Synthetic oligonucleotide
uuucaguauacuguguggg

SEQ ID NO: 59424 - RNA, 19 nt, Artificial Sequence
  Description of Artificial Sequence: Synthetic oligonucleotide
gauacuuagugguaugucu

SEQ ID NO: 59425 - RNA, 19 nt, Artificial Sequence
  Description of Artificial Sequence: Synthetic oligonucleotide
ucuuuaaguuuugauuaau

SEQ ID NO: 59426 - RNA, 19 nt, Artificial Sequence
  Description of Artificial Sequence: Synthetic oligonucleotide
uguuucuuaaauggaauua

SEQ ID NO: 59427 - RNA, 19 nt, Artificial Sequence
  Description of Artificial Sequence: Synthetic oligonucleotide
auuugaaugucacaaauug

SEQ ID NO: 59428 - RNA, 19 nt, Artificial Sequence
  Description of Artificial Sequence: Synthetic oligonucleotide
gaucaagauauuaaaaugu

SEQ ID NO: 59429 - RNA, 19 nt, Artificial Sequence
  Description of Artificial Sequence: Synthetic oligonucleotide
ucggauuuaucuuucccca

SEQ ID NO: 59430 - RNA, 19 nt, Artificial Sequence
  Description of Artificial Sequence: Synthetic oligonucleotide
auauccaaguaccaaugcu

SEQ ID NO: 59431 - RNA, 19 nt, Artificial Sequence
  Description of Artificial Sequence: Synthetic oligonucleotide
uguuguaaacaacguguau

SEQ ID NO: 59432 - RNA, 19 nt, Artificial Sequence
  Description of Artificial Sequence: Synthetic oligonucleotide
uagugccuaaaauuguaug

SEQ ID NO: 59433 - RNA, 19 nt, Artificial Sequence
  Description of Artificial Sequence: Synthetic oligonucleotide
gaaaauccuuuuaaccauu

SEQ ID NO: 59434 - RNA, 19 nt, Artificial Sequence
  Description of Artificial Sequence: Synthetic oligonucleotide
uuuaaccuagauguuuaac

SEQ ID NO: 59435 - RNA, 19 nt, Artificial Sequence
  Description of Artificial Sequence: Synthetic oligonucleotide
caaaucuaaucucuuauuc

SEQ ID NO: 59436 - RNA, 19 nt, Artificial Sequence
  Description of Artificial Sequence: Synthetic oligonucleotide
cuaauaaauauacuaugaa

SEQ ID NO: 59437 - RNA, 25 nt, Artificial Sequence
  Description of Artificial Sequence: Synthetic oligonucleotide
auucggcacgagggaggaagcgaga

SEQ ID NO: 59438 - RNA, 25 nt, Artificial Sequence
  Description of Artificial Sequence: Synthetic oligonucleotide
aggugcugcccuccccccggaguug

SEQ ID NO: 59439 - RNA, 25 nt, Artificial Sequence
  Description of Artificial Sequence: Synthetic oligonucleotide
ggaagcgcguuacccggguccaaaa

SEQ ID NO: 59440 - RNA, 25 nt, Artificial Sequence
  Description of Artificial Sequence: Synthetic oligonucleotide
augcccaagaagaagccgacgccca

SEQ ID NO: 59441 - RNA, 25 nt, Artificial Sequence
  Description of Artificial Sequence: Synthetic oligonucleotide
auccagcugaacccggcccccgacg

SEQ ID NO: 59442 - RNA, 25 nt, Artificial Sequence
  Description of Artificial Sequence: Synthetic oligonucleotide
ggcucugcaguuaacgggaccagcu

SEQ ID NO: 59443 - RNA, 25 nt, Artificial Sequence
  Description of Artificial Sequence: Synthetic oligonucleotide
ucugcggagaccaacuuggaggccu

SEQ ID NO: 59444 - RNA, 25 nt, Artificial Sequence
  Description of Artificial Sequence: Synthetic oligonucleotide
uugcagaagaagcuggaggagcuag

SEQ ID NO: 59445 - RNA, 25 nt, Artificial Sequence
  Description of Artificial Sequence: Synthetic oligonucleotide
gagcuugaugagcagcagcgaaagc

SEQ ID NO: 59446 - RNA, 25 nt, Artificial Sequence
  Description of Artificial Sequence: Synthetic oligonucleotide
cgccuugaggccuuucuuacccaga

SEQ ID NO: 59447 - RNA, 25 nt, Artificial Sequence
  Description of Artificial Sequence: Synthetic oligonucleotide
aagcagaaggugggagaacugaagg

SEQ ID NO: 59448 - RNA, 25 nt, Artificial Sequence
  Description of Artificial Sequence: Synthetic oligonucleotide
gaugacgacuuugagaagaucagug

SEQ ID NO: 59449 - RNA, 25 nt, Artificial Sequence
  Description of Artificial Sequence: Synthetic oligonucleotide
gagcugggggcuggcaauggcggug

SEQ ID NO: 59450 - RNA, 25 nt, Artificial Sequence
  Description of Artificial Sequence: Synthetic oligonucleotide
gugguguucaaggucucccacaagc

SEQ ID NO: 59451 - RNA, 25 nt, Artificial Sequence
  Description of Artificial Sequence: Synthetic oligonucleotide
ccuucuggccuggucauggccagaa

SEQ ID NO: 59452 - RNA, 25 nt, Artificial Sequence
  Description of Artificial Sequence: Synthetic oligonucleotide
aagcuaauucaucuggagaucaaac

SEQ ID NO: 59453 - RNA, 25 nt, Artificial Sequence
  Description of Artificial Sequence: Synthetic oligonucleotide
cccgcaauccggaaccagaucauaa

SEQ ID NO: 59454 - RNA, 25 nt, Artificial Sequence
  Description of Artificial Sequence: Synthetic oligonucleotide
agggagcugcagguucugcaugagu

SEQ ID NO: 59455 - RNA, 25 nt, Artificial Sequence
  Description of Artificial Sequence: Synthetic oligonucleotide
ugcaacucuccguacaucgugggcu

SEQ ID NO: 59456 - RNA, 25 nt, Artificial Sequence
  Description of Artificial Sequence: Synthetic oligonucleotide
uucuauggugcguucuacagcgaug

SEQ ID NO: 59457 - RNA, 25 nt, Artificial Sequence
  Description of Artificial Sequence: Synthetic oligonucleotide
ggcgagaucaguaucugcauggagc

SEQ ID NO: 59458 - RNA, 25 nt, Artificial Sequence
  Description of Artificial Sequence: Synthetic oligonucleotide
cacauggauggagguucucuggauc

SEQ ID NO: 59459 - RNA, 25 nt, Artificial Sequence
  Description of Artificial Sequence: Synthetic oligonucleotide
caaguccugaagaaagcuggaagaa

SEQ ID NO: 59460 - RNA, 25 nt, Artificial Sequence
  Description of Artificial Sequence: Synthetic oligonucleotide
auuccugaacaaauuuuaggaaaag

SEQ ID NO: 59461 - RNA, 25 nt, Artificial Sequence
  Description of Artificial Sequence: Synthetic oligonucleotide
guuagcauugcuguaauaaaaggcc

SEQ ID NO: 59462 - RNA, 25 nt, Artificial Sequence
  Description of Artificial Sequence: Synthetic oligonucleotide
cugacauaucugagggagaagcaca

SEQ ID NO: 59463 - RNA, 25 nt, Artificial Sequence
  Description of Artificial Sequence: Synthetic oligonucleotide
aagaucaugcacagagaugucaagc

SEQ ID NO: 59464 - RNA, 25 nt, Artificial Sequence
  Description of Artificial Sequence: Synthetic oligonucleotide
cccuccaacauccuagucaacuccc

SEQ ID NO: 59465 - RNA, 25 nt, Artificial Sequence
  Description of Artificial Sequence: Synthetic oligonucleotide
cguggggagaucaagcucugugacu

SEQ ID NO: 59466 - RNA, 25 nt, Artificial Sequence
  Description of Artificial Sequence: Synthetic oligonucleotide
uuuggggucagcgggcagcucaucg

SEQ ID NO: 59467 - RNA, 25 nt, Artificial Sequence
  Description of Artificial Sequence: Synthetic oligonucleotide
gacuccauggccaacuccuucgugg

SEQ ID NO: 59468 - RNA, 25 nt, Artificial Sequence
  Description of Artificial Sequence: Synthetic oligonucleotide
ggcacaagguccuacaugucgccag

SEQ ID NO: 59469 - RNA, 25 nt, Artificial Sequence
  Description of Artificial Sequence: Synthetic oligonucleotide
gaaagacuccaggggacucauuacu

SEQ ID NO: 59470 - RNA, 25 nt, Artificial Sequence
  Description of Artificial Sequence: Synthetic oligonucleotide
ucugugcagucagacaucuggagca

SEQ ID NO: 59471 - RNA, 25 nt, Artificial Sequence
  Description of Artificial Sequence: Synthetic oligonucleotide
augggacugucucugguagagaugg

SEQ ID NO: 59472 - RNA, 25 nt, Artificial Sequence
  Description of Artificial Sequence: Synthetic oligonucleotide
gcgguugggagguaucccaucccuc

SEQ ID NO: 59473 - RNA, 25 nt, Artificial Sequence
  Description of Artificial Sequence: Synthetic oligonucleotide
ccuccagaugccaaggagcuggagc

SEQ ID NO: 59474 - RNA, 25 nt, Artificial Sequence
  Description of Artificial Sequence: Synthetic oligonucleotide
cugauguuugggugccagguggaag

SEQ ID NO: 59475 - RNA, 25 nt, Artificial Sequence
  Description of Artificial Sequence: Synthetic oligonucleotide
ggagaugcggcugagaccccaccca

SEQ ID NO: 59476 - RNA, 25 nt, Artificial Sequence
  Description of Artificial Sequence: Synthetic oligonucleotide
aggccaaggacccccgggaggcccc

SEQ ID NO: 59477 - RNA, 25 nt, Artificial Sequence
  Description of Artificial Sequence: Synthetic oligonucleotide
cuuagcucauacggaauggacagcc

SEQ ID NO: 59478 - RNA, 25 nt, Artificial Sequence
  Description of Artificial Sequence: Synthetic oligonucleotide
cgaccucccauggcaauuuuugagu

SEQ ID NO: 59479 - RNA, 25 nt, Artificial Sequence
  Description of Artificial Sequence: Synthetic oligonucleotide
uuguuggauuacauagucaacgagc

SEQ ID NO: 59480 - RNA, 25 nt, Artificial Sequence
  Description of Artificial Sequence: Synthetic oligonucleotide
ccuccuccaaaacugcccaguggag

SEQ ID NO: 59481 - RNA, 25 nt, Artificial Sequence
  Description of Artificial Sequence: Synthetic oligonucleotide
guguucagucuggaauuucaagauu

SEQ ID NO: 59482 - RNA, 25 nt, Artificial Sequence
  Description of Artificial Sequence: Synthetic oligonucleotide
uuugugaauaaaugcuuaauaaaaa

SEQ ID NO: 59483 - RNA, 25 nt, Artificial Sequence
  Description of Artificial Sequence: Synthetic oligonucleotide
aaccccgcagagagagcagauuuga

SEQ ID NO: 59484 - RNA, 25 nt, Artificial Sequence
  Description of Artificial Sequence: Synthetic oligonucleotide
aagcaacucaugguucaugcuuuua

SEQ ID NO: 59485 - RNA, 25 nt, Artificial Sequence
  Description of Artificial Sequence: Synthetic oligonucleotide
aucaagagaucugaugcugaggaag

SEQ ID NO: 59486 - RNA, 25 nt, Artificial Sequence
  Description of Artificial Sequence: Synthetic oligonucleotide
guggauuuugcagguuggcucugcu

SEQ ID NO: 59487 - RNA, 25 nt, Artificial Sequence
  Description of Artificial Sequence: Synthetic oligonucleotide
uccaccaucggccuuaaccagccca

SEQ ID NO: 59488 - RNA, 25 nt, Artificial Sequence
  Description of Artificial Sequence: Synthetic oligonucleotide
agcacaccaacccaugcugcuggcg

SEQ ID NO: 59489 - RNA, 25 nt, Artificial Sequence
  Description of Artificial Sequence: Synthetic oligonucleotide
gucuaaguguuugggaagcaacaaa

SEQ ID NO: 59490 - RNA, 25 nt, Artificial Sequence
  Description of Artificial Sequence: Synthetic oligonucleotide
agagcgaguccccugcccggugguu

SEQ ID NO: 59491 - RNA, 25 nt, Artificial Sequence
  Description of Artificial Sequence: Synthetic oligonucleotide
uugccaugucgcuuuugggccuccu

SEQ ID NO: 59492 - RNA, 25 nt, Artificial Sequence
  Description of Artificial Sequence: Synthetic oligonucleotide
uucccaugccugucucuguucagau

SEQ ID NO: 59493 - RNA, 25 nt, Artificial Sequence
  Description of Artificial Sequence: Synthetic oligonucleotide
ugugcauuucaccugugacaaagga

SEQ ID NO: 59494 - RNA, 25 nt, Artificial Sequence
  Description of Artificial Sequence: Synthetic oligonucleotide
augaagaacacagcaugugccaaga

SEQ ID NO: 59495 - RNA, 25 nt, Artificial Sequence
  Description of Artificial Sequence: Synthetic oligonucleotide
auucuacucuugucauuuuuaauau

SEQ ID NO: 59496 - RNA, 25 nt, Artificial Sequence
  Description of Artificial Sequence: Synthetic oligonucleotide
uuacugucuuuauucuuauuacuau

SEQ ID NO: 59497 - RNA, 25 nt, Artificial Sequence
  Description of Artificial Sequence: Synthetic oligonucleotide
uuauuguuccccuaaguggauuggc

SEQ ID NO: 59498 - RNA, 25 nt, Artificial Sequence
  Description of Artificial Sequence: Synthetic oligonucleotide
cuuugugcuuggggcuauuugugug

SEQ ID NO: 59499 - RNA, 25 nt, Artificial Sequence
  Description of Artificial Sequence: Synthetic oligonucleotide
guaugcugaugaucaaaaccugugc

SEQ ID NO: 59500 - RNA, 25 nt, Artificial Sequence
  Description of Artificial Sequence: Synthetic oligonucleotide
ccaggcugaauuacagugaaauuuu

SEQ ID NO: 59501 - RNA, 25 nt, Artificial Sequence
  Description of Artificial Sequence: Synthetic oligonucleotide
uuggugaauguggguagucauucuu

SEQ ID NO: 59502 - RNA, 25 nt, Artificial Sequence
  Description of Artificial Sequence: Synthetic oligonucleotide
uacaauugcacugcuguuccugcuc

SEQ ID NO: 59503 - RNA, 25 nt, Artificial Sequence
  Description of Artificial Sequence: Synthetic oligonucleotide
ccaugacuggcugucugccuguauu

SEQ ID NO: 59504 - RNA, 25 nt, Artificial Sequence
  Description of Artificial Sequence: Synthetic oligonucleotide
uuucggacuuugacauuugacauuu

SEQ ID NO: 59505 - RNA, 25 nt, Artificial Sequence
  Description of Artificial Sequence: Synthetic oligonucleotide
ugguggacuuuaucuugcugggcau

SEQ ID NO: 59506 - RNA, 25 nt, Artificial Sequence
  Description of Artificial Sequence: Synthetic oligonucleotide
uacuuucucucuaggagggagccuu

SEQ ID NO: 59507 - RNA, 25 nt, Artificial Sequence
  Description of Artificial Sequence: Synthetic oligonucleotide
ugugagauccuucacaggcagugca

SEQ ID NO: 59508 - RNA, 25 nt, Artificial Sequence
  Description of Artificial Sequence: Synthetic oligonucleotide
augugaagcaugcuuugcugcuaug

SEQ ID NO: 59509 - RNA, 25 nt, Artificial Sequence
  Description of Artificial Sequence: Synthetic oligonucleotide
gaaaaugagcaucagagaguguaca

SEQ ID NO: 59510 - RNA, 25 nt, Artificial Sequence
  Description of Artificial Sequence: Synthetic oligonucleotide
aucauguuauuuuauuauuauuauu

SEQ ID NO: 59511 - RNA, 25 nt, Artificial Sequence
  Description of Artificial Sequence: Synthetic oligonucleotide
guugacauccaaaucuagccagagc

SEQ ID NO: 59512 - RNA, 25 nt, Artificial Sequence
  Description of Artificial Sequence: Synthetic oligonucleotide
cccuucacugccaugauagcugggg

SEQ ID NO: 59513 - RNA, 25 nt, Artificial Sequence
  Description of Artificial Sequence: Synthetic oligonucleotide
gcuucaccagucugucuacuguggu

SEQ ID NO: 59514 - RNA, 25 nt, Artificial Sequence
  Description of Artificial Sequence: Synthetic oligonucleotide
ugaucuguagacuucugguuguauu

SEQ ID NO: 59515 - RNA, 25 nt, Artificial Sequence
  Description of Artificial Sequence: Synthetic oligonucleotide
uucuauauuuauuuucaguauacug

SEQ ID NO: 59516 - RNA, 25 nt, Artificial Sequence
  Description of Artificial Sequence: Synthetic oligonucleotide
gugugggauacuuagugguaugucu

SEQ ID NO: 59517 - RNA, 25 nt, Artificial Sequence
  Description of Artificial Sequence: Synthetic oligonucleotide
ucuuuaaguuuugauuaauguuucu

SEQ ID NO: 59518 - RNA, 25 nt, Artificial Sequence
  Description of Artificial Sequence: Synthetic oligonucleotide
uuaaauggaauuauuugaaugucac

SEQ ID NO: 59519 - RNA, 25 nt, Artificial Sequence
  Description of Artificial Sequence: Synthetic oligonucleotide
caaauugaucaagauauuaaaaugu

SEQ ID NO: 59520 - RNA, 25 nt, Artificial Sequence
  Description of Artificial Sequence: Synthetic oligonucleotide
ucggauuuaucuuuccccauaucca

SEQ ID NO: 59521 - RNA, 25 nt, Artificial Sequence
  Description of Artificial Sequence: Synthetic oligonucleotide
aaguaccaaugcuguuguaaacaac

SEQ ID NO: 59522 - RNA, 25 nt, Artificial Sequence
  Description of Artificial Sequence: Synthetic oligonucleotide
cguguauagugccuaaaauuguaug

SEQ ID NO: 59523 - RNA, 25 nt, Artificial Sequence
  Description of Artificial Sequence: Synthetic oligonucleotide
gaaaauccuuuuaaccauuuuaacc

SEQ ID NO: 59524 - RNA, 25 nt, Artificial Sequence
  Description of Artificial Sequence: Synthetic oligonucleotide
cuagauguuuaacaaaucuaaucuc

SEQ ID NO: 59525 - RNA, 25 nt, Artificial Sequence
  Description of Artificial Sequence: Synthetic oligonucleotide
cuuauucuaauaaauauacuaugaa

SEQ ID NO: 59526 - RNA, 1759 nt, Homo sapiens
ccccugccucucggacucgggcugcggcgucagccuucuucgggccucggcagcgguagcggcucgcucgccucagccccagcgccccucggcuacccucggcccaggcccgcagcgccgcccgcccucggccgccccgacgccggccugggccgcggccgcagccccgggcucgcguaggcgccgaccgcucccggcccgcccccuaugggccccggcuagaggcgccgccgccgccggcccgcggagccccgaugcuggcccggaggaagccggugcugccggcgcucaccaucaacccuaccaucgccgagggcccauccccuaccagcgagggcgccuccgaggcaaaccugguggaccugcagaagaagcuggaggagcuggaacuugacgagcagcagaagaagcggcuggaagccuuucucacccagaaagccaaggucggcgaacucaaagacgaugacuucgaaaggaucucagagcugggcgcgggcaacggcgggguggucaccaaaguccagcacagacccucgggccucaucauggccaggaagcugauccaccuugagaucaagccggccauccggaaccagaucauccgcgagcugcagguccugcacgaaugcaacucgccguacaucgugggcuucuacggggccuucuacagugacggggagaucagcauuugcauggaacacauggacggcggcucccuggaccaggugcugaaagaggccaagaggauucccgaggagauccuggggaaagucagcaucgcgguucuccggggcuuggcguaccuccgagagaagcaccagaucaugcaccgagaugugaagcccuccaacauccucgugaacucuagaggggagaucaagcugugugacuucggggugagcggccagcucauagacuccauggccaacuccuucgugggcacgcgcuccuacauggcuccggagcgguugcagggcacacauuacucggugcagucggacaucuggagcaugggccugucccugguggagcuggccgucggaagguaccccauccccccgcccgacgccaaagagcuggaggccaucuuuggccggcccguggucgacggggaagaaggagagccucacagcaucucgccucggccgaggccccccgggcgccccgucagcggucacgggauggauagccggccugccauggccaucuuugaacuccuggacuauauugugaacgagccaccuccuaagcugcccaacgguguguucacccccgacuuccaggaguuugucaauaaaugccucaucaagaacccagcggagcgggcggaccugaagaugcucacaaaccacaccuucaucaagcgguccgagguggaagaaguggauuuugccggcugguuguguaaaacccugcggcugaaccagcccggcacacccacgcgcaccgccgugugacaguggccgggcucccugcgucccgcuggugaccugcccaccgucccuguccaugccccgcccuuccagcugaggacaggcuggcgccuccacccacccuccugccucaccccugcggagagcaccguggcggggcgacagcgcaugcaggaacgggggucuccucuccugcccguccuggccggggugccucuggggacgggcgacgcugcuguguguggucucagaggcucugcuuccuuagguuacaaaacaaaacagggagagaaaaagcaaaaaaaaaaaaaaaaaaaaaaaaaaaa

SEQ ID NO: 59527 - RNA, 19 nt, Artificial Sequence
  Description of Artificial Sequence: Synthetic oligonucleotide
ccccugccucucggacucg

SEQ ID NO: 59528 - RNA, 19 nt, Artificial Sequence
  Description of Artificial Sequence: Synthetic oligonucleotide
gggcugcggcgucagccuu

SEQ ID NO: 59529 - RNA, 19 nt, Artificial Sequence
  Description of Artificial Sequence: Synthetic oligonucleotide
ucuucgggccucggcagcg

SEQ ID NO: 59530 - RNA, 19 nt, Artificial Sequence
  Description of Artificial Sequence: Synthetic oligonucleotide
gguagcggcucgcucgccu

SEQ ID NO: 59531 - RNA, 19 nt, Artificial Sequence
  Description of Artificial Sequence: Synthetic oligonucleotide
ucagccccagcgccccucg

SEQ ID NO: 59532 - RNA, 19 nt, Artificial Sequence
  Description of Artificial Sequence: Synthetic oligonucleotide
ggcuacccucggcccaggc

SEQ ID NO: 59533 - RNA, 19 nt, Artificial Sequence
  Description of Artificial Sequence: Synthetic oligonucleotide
cccgcagcgccgcccgccc

SEQ ID NO: 59534 - RNA, 19 nt, Artificial Sequence
  Description of Artificial Sequence: Synthetic oligonucleotide
cucggccgccccgacgccg

SEQ ID NO: 59535 - RNA, 19 nt, Artificial Sequence
  Description of Artificial Sequence: Synthetic oligonucleotide
ggccugggccgcggccgca

SEQ ID NO: 59536 - RNA, 19 nt, Artificial Sequence
  Description of Artificial Sequence: Synthetic oligonucleotide
agccccgggcucgcguagg

SEQ ID NO: 59537 - RNA, 19 nt, Artificial Sequence
  Description of Artificial Sequence: Synthetic oligonucleotide
gcgccgaccgcucccggcc

SEQ ID NO: 59538 - RNA, 19 nt, Artificial Sequence
  Description of Artificial Sequence: Synthetic oligonucleotide
ccgcccccuaugggccccg

SEQ ID NO: 59539 - RNA, 19 nt, Artificial Sequence
  Description of Artificial Sequence: Synthetic oligonucleotide
ggcuagaggcgccgccgcc

SEQ ID NO: 59540 - RNA, 19 nt, Artificial Sequence
  Description of Artificial Sequence: Synthetic oligonucleotide
cgccggcccgcggagcccc

SEQ ID NO: 59541 - RNA, 19 nt, Artificial Sequence
  Description of Artificial Sequence: Synthetic oligonucleotide
cgaugcuggcccggaggaa

SEQ ID NO: 59542 - RNA, 19 nt, Artificial Sequence
  Description of Artificial Sequence: Synthetic oligonucleotide
agccggugcugccggcgcu

SEQ ID NO: 59543 - RNA, 19 nt, Artificial Sequence
  Description of Artificial Sequence: Synthetic oligonucleotide
ucaccaucaacccuaccau

SEQ ID NO: 59544 - RNA, 19 nt, Artificial Sequence
  Description of Artificial Sequence: Synthetic oligonucleotide
ucgccgagggcccaucccc

SEQ ID NO: 59545 - RNA, 19 nt, Artificial Sequence
  Description of Artificial Sequence: Synthetic oligonucleotide
cuaccagcgagggcgccuc

SEQ ID NO: 59546 - RNA, 19 nt, Artificial Sequence
  Description of Artificial Sequence: Synthetic oligonucleotide
ccgaggcaaaccuggugga

SEQ ID NO: 59547 - RNA, 19 nt, Artificial Sequence
  Description of Artificial Sequence: Synthetic oligonucleotide
accugcagaagaagcugga

SEQ ID NO: 59548 - RNA, 19 nt, Artificial Sequence
  Description of Artificial Sequence: Synthetic oligonucleotide
aggagcuggaacuugacga

SEQ ID NO: 59549 - RNA, 19 nt, Artificial Sequence
  Description of Artificial Sequence: Synthetic oligonucleotide
agcagcagaagaagcggcu

SEQ ID NO: 59550 - RNA, 19 nt, Artificial Sequence
  Description of Artificial Sequence: Synthetic oligonucleotide
uggaagccuuucucaccca

SEQ ID NO: 59551 - RNA, 19 nt, Artificial Sequence
  Description of Artificial Sequence: Synthetic oligonucleotide
agaaagccaaggucggcga

SEQ ID NO: 59552 - RNA, 19 nt, Artificial Sequence
  Description of Artificial Sequence: Synthetic oligonucleotide
aacucaaagacgaugacuu

SEQ ID NO: 59553 - RNA, 19 nt, Artificial Sequence
  Description of Artificial Sequence: Synthetic oligonucleotide
ucgaaaggaucucagagcu

SEQ ID NO: 59554 - RNA, 19 nt, Artificial Sequence
  Description of Artificial Sequence: Synthetic oligonucleotide
ugggcgcgggcaacggcgg

SEQ ID NO: 59555 - RNA, 19 nt, Artificial Sequence
  Description of Artificial Sequence: Synthetic oligonucleotide
ggguggucaccaaagucca

SEQ ID NO: 59556 - RNA, 19 nt, Artificial Sequence
  Description of Artificial Sequence: Synthetic oligonucleotide
agcacagacccucgggccu

SEQ ID NO: 59557 - RNA, 19 nt, Artificial Sequence
  Description of Artificial Sequence: Synthetic oligonucleotide
ucaucauggccaggaagcu

SEQ ID NO: 59558 - RNA, 19 nt, Artificial Sequence
  Description of Artificial Sequence: Synthetic oligonucleotide
ugauccaccuugagaucaa

SEQ ID NO: 59559 - RNA, 19 nt, Artificial Sequence
  Description of Artificial Sequence: Synthetic oligonucleotide
agccggccauccggaacca

SEQ ID NO: 59560 - RNA, 19 nt, Artificial Sequence
  Description of Artificial Sequence: Synthetic oligonucleotide
agaucauccgcgagcugca

SEQ ID NO: 59561 - RNA, 19 nt, Artificial Sequence
  Description of Artificial Sequence: Synthetic oligonucleotide
agguccugcacgaaugcaa

SEQ ID NO: 59562 - RNA, 19 nt, Artificial Sequence
  Description of Artificial Sequence: Synthetic oligonucleotide
acucgccguacaucguggg

SEQ ID NO: 59563 - RNA, 19 nt, Artificial Sequence
  Description of Artificial Sequence: Synthetic oligonucleotide
gcuucuacggggccuucua

SEQ ID NO: 59564 - RNA, 19 nt, Artificial Sequence
  Description of Artificial Sequence: Synthetic oligonucleotide
acagugacggggagaucag

SEQ ID NO: 59565 - RNA, 19 nt, Artificial Sequence
  Description of Artificial Sequence: Synthetic oligonucleotide
gcauuugcauggaacacau

SEQ ID NO: 59566 - RNA, 19 nt, Artificial Sequence
  Description of Artificial Sequence: Synthetic oligonucleotide
uggacggcggcucccugga

SEQ ID NO: 59567 - RNA, 19 nt, Artificial Sequence
  Description of Artificial Sequence: Synthetic oligonucleotide
accaggugcugaaagaggc

SEQ ID NO: 59568 - RNA, 19 nt, Artificial Sequence
  Description of Artificial Sequence: Synthetic oligonucleotide
ccaagaggauucccgagga

SEQ ID NO: 59569 - RNA, 19 nt, Artificial Sequence
  Description of Artificial Sequence: Synthetic oligonucleotide
agauccuggggaaagucag

SEQ ID NO: 59570 - RNA, 19 nt, Artificial Sequence
  Description of Artificial Sequence: Synthetic oligonucleotide
gcaucgcgguucuccgggg

SEQ ID NO: 59571 - RNA, 19 nt, Artificial Sequence
  Description of Artificial Sequence: Synthetic oligonucleotide
gcuuggcguaccuccgaga

SEQ ID NO: 59572 - RNA, 19 nt, Artificial Sequence
  Description of Artificial Sequence: Synthetic oligonucleotide
agaagcaccagaucaugca

SEQ ID NO: 59573 - RNA, 19 nt, Artificial Sequence
  Description of Artificial Sequence: Synthetic oligonucleotide
accgagaugugaagcccuc

SEQ ID NO: 59574 - RNA, 19 nt, Artificial Sequence
  Description of Artificial Sequence: Synthetic oligonucleotide
ccaacauccucgugaacuc

SEQ ID NO: 59575 - RNA, 19 nt, Artificial Sequence
  Description of Artificial Sequence: Synthetic oligonucleotide
cuagaggggagaucaagcu

SEQ ID NO: 59576 - RNA, 19 nt, Artificial Sequence
  Description of Artificial Sequence: Synthetic oligonucleotide
ugugugacuucggggugag

SEQ ID NO: 59577 - RNA, 19 nt, Artificial Sequence
  Description of Artificial Sequence: Synthetic oligonucleotide
gcggccagcucauagacuc

SEQ ID NO: 59578 - RNA, 19 nt, Artificial Sequence
  Description of Artificial Sequence: Synthetic oligonucleotide
ccauggccaacuccuucgu

SEQ ID NO: 59579 - RNA, 19 nt, Artificial Sequence
  Description of Artificial Sequence: Synthetic oligonucleotide
ugggcacgcgcuccuacau

SEQ ID NO: 59580 - RNA, 19 nt, Artificial Sequence
  Description of Artificial Sequence: Synthetic oligonucleotide
uggcuccggagcgguugca

SEQ ID NO: 59581 - RNA, 19 nt, Artificial Sequence
  Description of Artificial Sequence: Synthetic oligonucleotide
agggcacacauuacucggu

SEQ ID NO: 59582 - RNA, 19 nt, Artificial Sequence
  Description of Artificial Sequence: Synthetic oligonucleotide
ugcagucggacaucuggag

SEQ ID NO: 59583 - RNA, 19 nt, Artificial Sequence
  Description of Artificial Sequence: Synthetic oligonucleotide
gcaugggccugucccuggu

SEQ ID NO: 59584 - RNA, 19 nt, Artificial Sequence
  Description of Artificial Sequence: Synthetic oligonucleotide
uggagcuggccgucggaag

SEQ ID NO: 59585 - RNA, 19 nt, Artificial Sequence
  Description of Artificial Sequence: Synthetic oligonucleotide
gguaccccauccccccgcc

SEQ ID NO: 59586 - RNA, 19 nt, Artificial Sequence
  Description of Artificial Sequence: Synthetic oligonucleotide
ccgacgccaaagagcugga

SEQ ID NO: 59587 - RNA, 19 nt, Artificial Sequence
  Description of Artificial Sequence: Synthetic oligonucleotide
aggccaucuuuggccggcc

SEQ ID NO: 59588 - RNA, 19 nt, Artificial Sequence
  Description of Artificial Sequence: Synthetic oligonucleotide
ccguggucgacggggaaga

SEQ ID NO: 59589 - RNA, 19 nt, Artificial Sequence
  Description of Artificial Sequence: Synthetic oligonucleotide
aaggagagccucacagcau

SEQ ID NO: 59590 - RNA, 19 nt, Artificial Sequence
  Description of Artificial Sequence: Synthetic oligonucleotide
ucucgccucggccgaggcc

SEQ ID NO: 59591 - RNA, 19 nt, Artificial Sequence
  Description of Artificial Sequence: Synthetic oligonucleotide
cccccgggcgccccgucag

SEQ ID NO: 59592 - RNA, 19 nt, Artificial Sequence
  Description of Artificial Sequence: Synthetic oligonucleotide
gcggucacgggauggauag

SEQ ID NO: 59593 - RNA, 19 nt, Artificial Sequence
  Description of Artificial Sequence: Synthetic oligonucleotide
gccggccugccauggccau

SEQ ID NO: 59594 - RNA, 19 nt, Artificial Sequence
  Description of Artificial Sequence: Synthetic oligonucleotide
ucuuugaacuccuggacua

SEQ ID NO: 59595 - RNA, 19 nt, Artificial Sequence
  Description of Artificial Sequence: Synthetic oligonucleotide
auauugugaacgagccacc

SEQ ID NO: 59596 - RNA, 19 nt, Artificial Sequence
  Description of Artificial Sequence: Synthetic oligonucleotide
cuccuaagcugcccaacgg

SEQ ID NO: 59597 - RNA, 19 nt, Artificial Sequence
  Description of Artificial Sequence: Synthetic oligonucleotide
guguguucacccccgacuu

SEQ ID NO: 59598 - RNA, 19 nt, Artificial Sequence
  Description of Artificial Sequence: Synthetic oligonucleotide
uccaggaguuugucaauaa

SEQ ID NO: 59599 - RNA, 19 nt, Artificial Sequence
  Description of Artificial Sequence: Synthetic oligonucleotide
aaugccucaucaagaaccc

SEQ ID NO: 59600 - RNA, 19 nt, Artificial Sequence
  Description of Artificial Sequence: Synthetic oligonucleotide
cagcggagcgggcggaccu

SEQ ID NO: 59601 - RNA, 19 nt, Artificial Sequence
  Description of Artificial Sequence: Synthetic oligonucleotide
ugaagaugcucacaaacca

SEQ ID NO: 59602 - RNA, 19 nt, Artificial Sequence
  Description of Artificial Sequence: Synthetic oligonucleotide
acaccuucaucaagcgguc

SEQ ID NO: 59603 - RNA, 19 nt, Artificial Sequence
  Description of Artificial Sequence: Synthetic oligonucleotide
ccgagguggaagaagugga

SEQ ID NO: 59604 - RNA, 19 nt, Artificial Sequence
  Description of Artificial Sequence: Synthetic oligonucleotide
auuuugccggcugguugug

SEQ ID NO: 59605 - RNA, 19 nt, Artificial Sequence
  Description of Artificial Sequence: Synthetic oligonucleotide
guaaaacccugcggcugaa

SEQ ID NO: 59606 - RNA, 19 nt, Artificial Sequence
  Description of Artificial Sequence: Synthetic oligonucleotide
accagcccggcacacccac

SEQ ID NO: 59607 - RNA, 19 nt, Artificial Sequence
  Description of Artificial Sequence: Synthetic oligonucleotide
cgcgcaccgccgugugaca

SEQ ID NO: 59608 - RNA, 19 nt, Artificial Sequence
  Description of Artificial Sequence: Synthetic oligonucleotide
aguggccgggcucccugcg

SEQ ID NO: 59609 - RNA, 19 nt, Artificial Sequence
  Description of Artificial Sequence: Synthetic oligonucleotide
gucccgcuggugaccugcc

SEQ ID NO: 59610 - RNA, 19 nt, Artificial Sequence
  Description of Artificial Sequence: Synthetic oligonucleotide
ccaccgucccuguccaugc

SEQ ID NO: 59611 - RNA, 19 nt, Artificial Sequence
  Description of Artificial Sequence: Synthetic oligonucleotide
ccccgcccuuccagcugag

SEQ ID NO: 59612 - RNA, 19 nt, Artificial Sequence
  Description of Artificial Sequence: Synthetic oligonucleotide
ggacaggcuggcgccucca

SEQ ID NO: 59613 - RNA, 19 nt, Artificial Sequence
  Description of Artificial Sequence: Synthetic oligonucleotide
acccacccuccugccucac

SEQ ID NO: 59614 - RNA, 19 nt, Artificial Sequence
  Description of Artificial Sequence: Synthetic oligonucleotide
ccccugcggagagcaccgu

SEQ ID NO: 59615 - RNA, 19 nt, Artificial Sequence
  Description of Artificial Sequence: Synthetic oligonucleotide
uggcggggcgacagcgcau

SEQ ID NO: 59616 - RNA, 19 nt, Artificial Sequence
  Description of Artificial Sequence: Synthetic oligonucleotide
ugcaggaacgggggucucc

SEQ ID NO: 59617 - RNA, 19 nt, Artificial Sequence
  Description of Artificial Sequence: Synthetic oligonucleotide
cucuccugcccguccuggc

SEQ ID NO: 59618 - RNA, 19 nt, Artificial Sequence
  Description of Artificial Sequence: Synthetic oligonucleotide
ccggggugccucuggggac

SEQ ID NO: 59619 - RNA, 19 nt, Artificial Sequence
  Description of Artificial Sequence: Synthetic oligonucleotide
cgggcgacgcugcugugug

SEQ ID NO: 59620 - RNA, 19 nt, Artificial Sequence
  Description of Artificial Sequence: Synthetic oligonucleotide
guggucucagaggcucugc

SEQ ID NO: 59621 - RNA, 19 nt, Artificial Sequence
  Description of Artificial Sequence: Synthetic oligonucleotide
cuuccuuagguuacaaaac

SEQ ID NO: 59622 - RNA, 19 nt, Artificial Sequence
  Description of Artificial Sequence: Synthetic oligonucleotide
caaaacagggagagaaaaa

SEQ ID NO: 59623 - RNA, 25 nt, Artificial Sequence
  Description of Artificial Sequence: Synthetic oligonucleotide
ccccugccucucggacucgggcugc

SEQ ID NO: 59624 - RNA, 25 nt, Artificial Sequence
  Description of Artificial Sequence: Synthetic oligonucleotide
cggcgucagccuucuucgggccucg

SEQ ID NO: 59625 - RNA, 25 nt, Artificial Sequence
  Description of Artificial Sequence: Synthetic oligonucleotide
ggcagcgguagcggcucgcucgccu

SEQ ID NO: 59626 - RNA, 25 nt, Artificial Sequence
  Description of Artificial Sequence: Synthetic oligonucleotide
ucagccccagcgccccucggcuacc

SEQ ID NO: 59627 - RNA, 25 nt, Artificial Sequence
  Description of Artificial Sequence: Synthetic oligonucleotide
ccucggcccaggcccgcagcgccgc

SEQ ID NO: 59628 - RNA, 25 nt, Artificial Sequence
  Description of Artificial Sequence: Synthetic oligonucleotide
cccgcccucggccgccccgacgccg

SEQ ID NO: 59629 - RNA, 25 nt, Artificial Sequence
  Description of Artificial Sequence: Synthetic oligonucleotide
ggccugggccgcggccgcagccccg

SEQ ID NO: 59630 - RNA, 25 nt, Artificial Sequence
  Description of Artificial Sequence: Synthetic oligonucleotide
gggcucgcguaggcgccgaccgcuc

SEQ ID NO: 59631 - RNA, 25 nt, Artificial Sequence
  Description of Artificial Sequence: Synthetic oligonucleotide
cccggcccgcccccuaugggccccg

SEQ ID NO: 59632 - RNA, 25 nt, Artificial Sequence
  Description of Artificial Sequence: Synthetic oligonucleotide
ggcuagaggcgccgccgccgccggc

SEQ ID NO: 59633 - RNA, 25 nt, Artificial Sequence
  Description of Artificial Sequence: Synthetic oligonucleotide
cccgcggagccccgaugcuggcccg

SEQ ID NO: 59634 - RNA, 25 nt, Artificial Sequence
  Description of Artificial Sequence: Synthetic oligonucleotide
ggaggaagccggugcugccggcgcu

SEQ ID NO: 59635 - RNA, 25 nt, Artificial Sequence
  Description of Artificial Sequence: Synthetic oligonucleotide
ucaccaucaacccuaccaucgccga

SEQ ID NO: 59636 - RNA, 25 nt, Artificial Sequence
  Description of Artificial Sequence: Synthetic oligonucleotide
agggcccauccccuaccagcgaggg

SEQ ID NO: 59637 - RNA, 25 nt, Artificial Sequence
  Description of Artificial Sequence: Synthetic oligonucleotide
gcgccuccgaggcaaaccuggugga

SEQ ID NO: 59638 - RNA, 25 nt, Artificial Sequence
  Description of Artificial Sequence: Synthetic oligonucleotide
accugcagaagaagcuggaggagcu

SEQ ID NO: 59639 - RNA, 25 nt, Artificial Sequence
  Description of Artificial Sequence: Synthetic oligonucleotide
uggaacuugacgagcagcagaagaa

SEQ ID NO: 59640 - RNA, 25 nt, Artificial Sequence
  Description of Artificial Sequence: Synthetic oligonucleotide
agcggcuggaagccuuucucaccca

SEQ ID NO: 59641 - RNA, 25 nt, Artificial Sequence
  Description of Artificial Sequence: Synthetic oligonucleotide
agaaagccaaggucggcgaacucaa

SEQ ID NO: 59642 - RNA, 25 nt, Artificial Sequence
  Description of Artificial Sequence: Synthetic oligonucleotide
aagacgaugacuucgaaaggaucuc

SEQ ID NO: 59643 - RNA, 25 nt, Artificial Sequence
  Description of Artificial Sequence: Synthetic oligonucleotide
cagagcugggcgcgggcaacggcgg

SEQ ID NO: 59644 - RNA, 25 nt, Artificial Sequence
  Description of Artificial Sequence: Synthetic oligonucleotide
ggguggucaccaaaguccagcacag

SEQ ID NO: 59645 - RNA, 25 nt, Artificial Sequence
  Description of Artificial Sequence: Synthetic oligonucleotide
gacccucgggccucaucauggccag

SEQ ID NO: 59646 - RNA, 25 nt, Artificial Sequence
  Description of Artificial Sequence: Synthetic oligonucleotide
ggaagcugauccaccuugagaucaa

SEQ ID NO: 59647 - RNA, 25 nt, Artificial Sequence
  Description of Artificial Sequence: Synthetic oligonucleotide
agccggccauccggaaccagaucau

SEQ ID NO: 59648 - RNA, 25 nt, Artificial Sequence
  Description of Artificial Sequence: Synthetic oligonucleotide
uccgcgagcugcagguccugcacga

SEQ ID NO: 59649 - RNA, 25 nt, Artificial Sequence
  Description of Artificial Sequence: Synthetic oligonucleotide
aaugcaacucgccguacaucguggg

SEQ ID NO: 59650 - RNA, 25 nt, Artificial Sequence
  Description of Artificial Sequence: Synthetic oligonucleotide
gcuucuacggggccuucuacaguga

SEQ ID NO: 59651 - RNA, 25 nt, Artificial Sequence
  Description of Artificial Sequence: Synthetic oligonucleotide
acggggagaucagcauuugcaugga

SEQ ID NO: 59652 - RNA, 25 nt, Artificial Sequence
  Description of Artificial Sequence: Synthetic oligonucleotide
aacacauggacggcggcucccugga

SEQ ID NO: 59653 - RNA, 25 nt, Artificial Sequence
  Description of Artificial Sequence: Synthetic oligonucleotide
accaggugcugaaagaggccaagag

SEQ ID NO: 59654 - RNA, 25 nt, Artificial Sequence
  Description of Artificial Sequence: Synthetic oligonucleotide
ggauucccgaggagauccuggggaa

SEQ ID NO: 59655 - RNA, 25 nt, Artificial Sequence
  Description of Artificial Sequence: Synthetic oligonucleotide
aagucagcaucgcgguucuccgggg

SEQ ID NO: 59656 - RNA, 25 nt, Artificial Sequence
  Description of Artificial Sequence: Synthetic oligonucleotide
gcuuggcguaccuccgagagaagca

SEQ ID NO: 59657 - RNA, 25 nt, Artificial Sequence
  Description of Artificial Sequence: Synthetic oligonucleotide
accagaucaugcaccgagaugugaa

SEQ ID NO: 59658 - RNA, 25 nt, Artificial Sequence
  Description of Artificial Sequence: Synthetic oligonucleotide
agcccuccaacauccucgugaacuc

SEQ ID NO: 59659 - RNA, 25 nt, Artificial Sequence
  Description of Artificial Sequence: Synthetic oligonucleotide
cuagaggggagaucaagcuguguga

SEQ ID NO: 59660 - RNA, 25 nt, Artificial Sequence
  Description of Artificial Sequence: Synthetic oligonucleotide
acuucggggugagcggccagcucau

SEQ ID NO: 59661 - RNA, 25 nt, Artificial Sequence
  Description of Artificial Sequence: Synthetic oligonucleotide
uagacuccauggccaacuccuucgu

SEQ ID NO: 59662 - RNA, 25 nt, Artificial Sequence
  Description of Artificial Sequence: Synthetic oligonucleotide
ugggcacgcgcuccuacauggcucc

SEQ ID NO: 59663 - RNA, 25 nt, Artificial Sequence
  Description of Artificial Sequence: Synthetic oligonucleotide
cggagcgguugcagggcacacauua

SEQ ID NO: 59664 - RNA, 25 nt, Artificial Sequence
  Description of Artificial Sequence: Synthetic oligonucleotide
acucggugcagucggacaucuggag

SEQ ID NO: 59665 - RNA, 25 nt, Artificial Sequence
  Description of Artificial Sequence: Synthetic oligonucleotide
gcaugggccugucccugguggagcu

SEQ ID NO: 59666 - RNA, 25 nt, Artificial Sequence
  Description of Artificial Sequence: Synthetic oligonucleotide
uggccgucggaagguaccccauccc

SEQ ID NO: 59667 - RNA, 25 nt, Artificial Sequence
  Description of Artificial Sequence: Synthetic oligonucleotide
ccccgcccgacgccaaagagcugga

SEQ ID NO: 59668 - RNA, 25 nt, Artificial Sequence
  Description of Artificial Sequence: Synthetic oligonucleotide
aggccaucuuuggccggcccguggu

SEQ ID NO: 59669 - RNA, 25 nt, Artificial Sequence
  Description of Artificial Sequence: Synthetic oligonucleotide
ucgacggggaagaaggagagccuca

SEQ ID NO: 59670 - RNA, 25 nt, Artificial Sequence
  Description of Artificial Sequence: Synthetic oligonucleotide
acagcaucucgccucggccgaggcc

SEQ ID NO: 59671 - RNA, 25 nt, Artificial Sequence
  Description of Artificial Sequence: Synthetic oligonucleotide
cccccgggcgccccgucagcgguca

SEQ ID NO: 59672 - RNA, 25 nt, Artificial Sequence
  Description of Artificial Sequence: Synthetic oligonucleotide
acgggauggauagccggccugccau

SEQ ID NO: 59673 - RNA, 25 nt, Artificial Sequence
  Description of Artificial Sequence: Synthetic oligonucleotide
uggccaucuuugaacuccuggacua

SEQ ID NO: 59674 - RNA, 25 nt, Artificial Sequence
  Description of Artificial Sequence: Synthetic oligonucleotide
auauugugaacgagccaccuccuaa

SEQ ID NO: 59675 - RNA, 25 nt, Artificial Sequence
  Description of Artificial Sequence: Synthetic oligonucleotide
agcugcccaacgguguguucacccc

SEQ ID NO: 59676 - RNA, 25 nt, Artificial Sequence
  Description of Artificial Sequence: Synthetic oligonucleotide
ccgacuuccaggaguuugucaauaa

SEQ ID NO: 59677 - RNA, 25 nt, Artificial Sequence
  Description of Artificial Sequence: Synthetic oligonucleotide
aaugccucaucaagaacccagcgga

SEQ ID NO: 59678 - RNA, 25 nt, Artificial Sequence
  Description of Artificial Sequence: Synthetic oligonucleotide
agcgggcggaccugaagaugcucac

SEQ ID NO: 59679 - RNA, 25 nt, Artificial Sequence
  Description of Artificial Sequence: Synthetic oligonucleotide
caaaccacaccuucaucaagcgguc

SEQ ID NO: 59680 - RNA, 25 nt, Artificial Sequence
  Description of Artificial Sequence: Synthetic oligonucleotide
ccgagguggaagaaguggauuuugc

SEQ ID NO: 59681 - RNA, 25 nt, Artificial Sequence
  Description of Artificial Sequence: Synthetic oligonucleotide
ccggcugguuguguaaaacccugcg

SEQ ID NO: 59682 - RNA, 25 nt, Artificial Sequence
  Description of Artificial Sequence: Synthetic oligonucleotide
ggcugaaccagcccggcacacccac

SEQ ID NO: 59683 - RNA, 25 nt, Artificial Sequence
  Description of Artificial Sequence: Synthetic oligonucleotide
cgcgcaccgccgugugacaguggcc

SEQ ID NO: 59684 - RNA, 25 nt, Artificial Sequence
  Description of Artificial Sequence: Synthetic oligonucleotide
cgggcucccugcgucccgcugguga

SEQ ID NO: 59685 - RNA, 25 nt, Artificial Sequence
  Description of Artificial Sequence: Synthetic oligonucleotide
accugcccaccgucccuguccaugc

SEQ ID NO: 59686 - RNA, 25 nt, Artificial Sequence
  Description of Artificial Sequence: Synthetic oligonucleotide
ccccgcccuuccagcugaggacagg

SEQ ID NO: 59687 - RNA, 25 nt, Artificial Sequence
  Description of Artificial Sequence: Synthetic oligonucleotide
gcuggcgccuccacccacccuccug

SEQ ID NO: 59688 - RNA, 25 nt, Artificial Sequence
  Description of Artificial Sequence: Synthetic oligonucleotide
gccucaccccugcggagagcaccgu

SEQ ID NO: 59689 - RNA, 25 nt, Artificial Sequence
  Description of Artificial Sequence: Synthetic oligonucleotide
uggcggggcgacagcgcaugcagga

SEQ ID NO: 59690 - RNA, 25 nt, Artificial Sequence
  Description of Artificial Sequence: Synthetic oligonucleotide
aacgggggucuccucuccugcccgu

SEQ ID NO: 59691 - RNA, 25 nt, Artificial Sequence
  Description of Artificial Sequence: Synthetic oligonucleotide
uccuggccggggugccucuggggac

SEQ ID NO: 59692 - RNA, 25 nt, Artificial Sequence
  Description of Artificial Sequence: Synthetic oligonucleotide
cgggcgacgcugcuguguguggucu

SEQ ID NO: 59693 - RNA, 25 nt, Artificial Sequence
  Description of Artificial Sequence: Synthetic oligonucleotide
ucagaggcucugcuuccuuagguua

SEQ ID NO: 59694 - RNA, 25 nt, Artificial Sequence
  Description of Artificial Sequence: Synthetic oligonucleotide
acaaaacaaaacagggagagaaaaa

SEQ ID NO: 59695 - RNA, 2304 nt, Homo sapiens
uggcuggcaauggccuugcugaccucgagccgggcccacguggggaccuuuggagcacagccuacgauccuggugcaaggccgguggaugcagaggccaguccauauaccacccaggccugcgaggagcgugguccccacccauccagcccauaugugcaagugcccuugacagagaggcuggucauauccauggugaccauuuaugggccacaacagguccccaucugcgcagugaacccugugcugagcaccuugcagacgugaucuugcuucguccugcagcacugugcggggcaggaaaauccaagaggaagaaggaucuacggauauccugcauguccaagccacccgcacccaaccccacacccccccggaaccuggacucccggaccuucaucaccauuggagacagaaacuuugagguggaggcugaugacuuggugaccaucucagaacugggccguggagccuauggggugguagagaaggugcggcacgcccagagcggcaccaucauggccgugaagcggauccgggccaccgugaacucacaggagcagaagcggcugcucauggaccuggacaucaacaugcgcacggucgacuguuucuacacugucaccuucuacggggcacuauucagagagggagacguguggaucugcauggagcucauggacacauccuuggacaaguucuaccggaaggugcuggauaaaaacaugacaauuccagaggacauccuuggggagauugcugugucuaucgugcgggcccuggagcaucugcacagcaagcugucggugauccacagagaugugaagcccuccaauguccuuaucaacaaggagggccaugugaagaugugugacuuuggcaucaguggcuacuugguggacucuguggccaagacgauggaugccggcugcaagcccuacauggccccugagaggaucaacccagagcugaaccagaagggcuacaaugucaaguccgacgucuggagccugggcaucaccaugauugagauggccauccugcgguucccuuacgaguccugggggaccccguuccagcagcugaagcaggugguggaggagccguccccccagcucccagccgaccguuucucccccgaguuuguggacuucacugcucagugccugaggaagaaccccgcagagcguaugagcuaccuggagcugauggagcaccccuucuucaccuugcacaaaaccaagaagacggacauugcugccuucgugaaggagauccugggagaagacucauaggggcugggccucggaccccacuccggcccuccagagccccacagccccaucugcgggggcagugcucacccacaccauaagcuacugccauccuggcccagggcaucugggaggaaccgagggggcugcucccaccuggcucuguggcgagccauuugucccaagugccaaagaagcagaccauuggggcucccagccaggcccuugucggccccaccagugccucucccugcugcuccuaggacccgucuccagcugcugagauccuggacugagggggccuggaugcccccuguggaugcugcugccccugcacagcaggcugccagugccuggguggaugggccaccgccuugcccagccuggaugccauccaaguuguauauuuuuuuaaucucucgacugaauggacuuugcacacuuuggcccaggguggccacaccucuaucccggcuuuggugcgggguacacaagaggggaugaguugugugaauaccccaagacucccaugagggagaugccaugagccgcccaaggccuuccccuggcacuggcaaacagggccucugcggagcacacuggcucacccaguccugcccgccaccguuaucggugucauucaccuuucguguuuuuuuuaauuuauccucuguugauuuuuucuuuugcuuuauggguuuggcuuguuuuucuugcaugguuuggagcugaucgcuucucccccacccccuaggguaccagcaggcagagccuugcccucugcucaggcugggguccagugggaggggcccaagaucucugcucagagaagugcagggggagccuuccagcucacucucccugaggacuggcuugacaggggcuauggguuugcuuugguguuguuuuuaaaaaaagaaaauauauuuuuuugaaaaaacgacugcccaucccggguccuuucccugauggguuggggcaguuaccugguugcuguuuuaauuaaaaaaaaaaaaaaaaaaaggacuaaa

SEQ ID NO: 59696 - RNA, 2319 nt, Homo sapiens
gcaggggcggggccugagucagcgcaguucggccggggucuccccggcgcugcccagucugucuccggcgccgcccgucgcggacucguccuugcugcagucgccgccgcaguccucgccgcagucgccgccgccgccgccgccgccgccgcugcuccuccgccuggccugggccgucugcccgcagccaugagcgugcucggccccgguggagcccgcaguccucuagauuagucuccaccgccguccaggacccacuugcagcauggagucgcccgccucgagccagcccgccagcaugccccaguccaaaggaaaauccaagaggaagaaggaucuacggauauccugcauguccaagccacccgcacccaaccccacacccccccggaaccuggacucccggaccuucaucaccauuggagacagaaacuuugagguggaggcugaugacuuggugaccaucucagaacugggccguggagccuauggggugguagagaaggugcggcacgcccagagcggcaccaucauggccgugaagcggauccgggccaccgugaacucacaggagcagaagcggcugcucauggaccuggacaucaacaugcgcacggucgacuguuucuacacugucaccuucuacggggcacuauucagagagggagacguguggaucugcauggagcucauggacacauccuuggacaaguucuaccggaaggugcuggauaaaaacaugacaauuccagaggacauccuuggggagauugcugugucuaucgugcgggcccuggagcaucugcacagcaagcugucggugauccacagagaugugaagcccuccaauguccuuaucaacaaggagggccaugugaagaugugugacuuuggcaucaguggcuacuugguggacucuguggccaagacgauggaugccggcugcaagcccuacauggccccugagaggaucaacccagagcugaaccagaagggcuacaaugucaaguccgacgucuggagccugggcaucaccaugauugagauggccauccugcgguucccuuacgaguccugggggaccccguuccagcagcugaagcaggugguggaggagccguccccccagcucccagccgaccguuucucccccgaguuuguggacuucacugcucagugccugaggaagaaccccgcagagcguaugagcuaccuggagcugauggagcaccccuucuucaccuugcacaaaaccaagaagacggacauugcugccuucgugaaggagauccugggagaagacucauaggggcugggccucggaccccacuccggcccuccagagccccacagccccaucugcgggggcagugcucacccacaccauaagcuacugccauccuggcccagggcaucugggaggaaccgagggggcugcucccaccuggcucuguggcgagccauuugucccaagugccaaagaagcagaccauuggggcucccagccaggcccuugucggccccaccagugccucucccugcugcuccuaggacccgucuccagcugcugagauccuggacugagggggccuggaugcccccuguggaugcugcugccccugcacagcaggcugccagugccuggguggaugggccaccgccuugcccagccuggaugccauccaaguuguauauuuuuuuaaucucucgacugaauggacuuugcacacuuuggcccaggguggccacaccucuaucccggcuuuggugcgggguacacaagaggggaugaguugugugaauaccccaagacucccaugagggagaugccaugagccgcccaaggccuuccccuggcacuggcaaacagggccucugcggagcacacuggcucacccaguccugcccgccaccguuaucggugucauucaccuuucguguuuuuuuuaauuuauccucuguugauuuuuucuuuugcuuuauggguuuggcuuguuuuucuugcaugguuuggagcugaucgcuucucccccacccccuaggguaccagcaggcagagccuugcccucugcucaggcugggguccagugggaggggcccaagaucucugcucagagaagugcagggggagccuuccagcucacucucccugaggacuggcuugacaggggcuauggguuugcuuugguguuguuuuuaaaaaaagaaaauauauuuuuuugaaaaaacgacugcccaucccggguccuuucccugauggguuggggcaguuaccugguugcuguuuuaauuaaaaaaaaaaaaaaaaaaaggacuaaa

SEQ ID NO: 59697 - RNA, 19 nt, Artificial Sequence
  Description of Artificial Sequence: Synthetic oligonucleotide
gcaggggcggggccugagu

SEQ ID NO: 59698 - RNA, 19 nt, Artificial Sequence
  Description of Artificial Sequence: Synthetic oligonucleotide
ucagcgcaguucggccggg

SEQ ID NO: 59699 - RNA, 19 nt, Artificial Sequence
  Description of Artificial Sequence: Synthetic oligonucleotide
ggucuccccggcgcugccc

SEQ ID NO: 59700 - RNA, 19 nt, Artificial Sequence
  Description of Artificial Sequence: Synthetic oligonucleotide
cagucugucuccggcgccg

SEQ ID NO: 59701 - RNA, 19 nt, Artificial Sequence
  Description of Artificial Sequence: Synthetic oligonucleotide
gcccgucgcggacucgucc

SEQ ID NO: 59702 - RNA, 19 nt, Artificial Sequence
  Description of Artificial Sequence: Synthetic oligonucleotide
cuugcugcagucgccgccg

SEQ ID NO: 59703 - RNA, 19 nt, Artificial Sequence
  Description of Artificial Sequence: Synthetic oligonucleotide
gcaguccucgccgcagucg

SEQ ID NO: 59704 - RNA, 19 nt, Artificial Sequence
  Description of Artificial Sequence: Synthetic oligonucleotide
gccgccgccgccgccgccg

SEQ ID NO: 59705 - RNA, 19 nt, Artificial Sequence
  Description of Artificial Sequence: Synthetic oligonucleotide
gccgccgcugcuccuccgc

SEQ ID NO: 59706 - RNA, 19 nt, Artificial Sequence
  Description of Artificial Sequence: Synthetic oligonucleotide
ccuggccugggccgucugc

SEQ ID NO: 59707 - RNA, 19 nt, Artificial Sequence
  Description of Artificial Sequence: Synthetic oligonucleotide
cccgcagccaugagcgugc

SEQ ID NO: 59708 - RNA, 19 nt, Artificial Sequence
  Description of Artificial Sequence: Synthetic oligonucleotide
cucggccccgguggagccc

SEQ ID NO: 59709 - RNA, 19 nt, Artificial Sequence
  Description of Artificial Sequence: Synthetic oligonucleotide
cgcaguccucuagauuagu

SEQ ID NO: 59710 - RNA, 19 nt, Artificial Sequence
  Description of Artificial Sequence: Synthetic oligonucleotide
ucuccaccgccguccagga

SEQ ID NO: 59711 - RNA, 19 nt, Artificial Sequence
  Description of Artificial Sequence: Synthetic oligonucleotide
acccacuugcagcauggag

SEQ ID NO: 59712 - RNA, 19 nt, Artificial Sequence
  Description of Artificial Sequence: Synthetic oligonucleotide
gucgcccgccucgagccag

SEQ ID NO: 59713 - RNA, 19 nt, Artificial Sequence
  Description of Artificial Sequence: Synthetic oligonucleotide
gcccgccagcaugccccag

SEQ ID NO: 59714 - RNA, 19 nt, Artificial Sequence
  Description of Artificial Sequence: Synthetic oligonucleotide
guccaaaggaaaauccaag

SEQ ID NO: 59715 - RNA, 19 nt, Artificial Sequence
  Description of Artificial Sequence: Synthetic oligonucleotide
gaggaagaaggaucuacgg

SEQ ID NO: 59716 - RNA, 19 nt, Artificial Sequence
  Description of Artificial Sequence: Synthetic oligonucleotide
gauauccugcauguccaag

SEQ ID NO: 59717 - RNA, 19 nt, Artificial Sequence
  Description of Artificial Sequence: Synthetic oligonucleotide
gccacccgcacccaacccc

SEQ ID NO: 59718 - RNA, 19 nt, Artificial Sequence
  Description of Artificial Sequence: Synthetic oligonucleotide
cacacccccccggaaccug

SEQ ID NO: 59719 - RNA, 19 nt, Artificial Sequence
  Description of Artificial Sequence: Synthetic oligonucleotide
ggacucccggaccuucauc

SEQ ID NO: 59720 - RNA, 19 nt, Artificial Sequence
  Description of Artificial Sequence: Synthetic oligonucleotide
caccauuggagacagaaac

SEQ ID NO: 59721 - RNA, 19 nt, Artificial Sequence
  Description of Artificial Sequence: Synthetic oligonucleotide
cuuugagguggaggcugau

SEQ ID NO: 59722 - RNA, 19 nt, Artificial Sequence
  Description of Artificial Sequence: Synthetic oligonucleotide
ugacuuggugaccaucuca

SEQ ID NO: 59723 - RNA, 19 nt, Artificial Sequence
  Description of Artificial Sequence: Synthetic oligonucleotide
agaacugggccguggagcc

SEQ ID NO: 59724 - RNA, 19 nt, Artificial Sequence
  Description of Artificial Sequence: Synthetic oligonucleotide
cuauggggugguagagaag

SEQ ID NO: 59725 - RNA, 19 nt, Artificial Sequence
  Description of Artificial Sequence: Synthetic oligonucleotide
ggugcggcacgcccagagc

SEQ ID NO: 59726 - RNA, 19 nt, Artificial Sequence
  Description of Artificial Sequence: Synthetic oligonucleotide
cggcaccaucauggccgug

SEQ ID NO: 59727 - RNA, 19 nt, Artificial Sequence
  Description of Artificial Sequence: Synthetic oligonucleotide
gaagcggauccgggccacc

SEQ ID NO: 59728 - RNA, 19 nt, Artificial Sequence
  Description of Artificial Sequence: Synthetic oligonucleotide
cgugaacucacaggagcag

SEQ ID NO: 59729 - RNA, 19 nt, Artificial Sequence
  Description of Artificial Sequence: Synthetic oligonucleotide
gaagcggcugcucauggac

SEQ ID NO: 59730 - RNA, 19 nt, Artificial Sequence
  Description of Artificial Sequence: Synthetic oligonucleotide
ccuggacaucaacaugcgc

SEQ ID NO: 59731 - RNA, 19 nt, Artificial Sequence
  Description of Artificial Sequence: Synthetic oligonucleotide
cacggucgacuguuucuac

SEQ ID NO: 59732 - RNA, 19 nt, Artificial Sequence
  Description of Artificial Sequence: Synthetic oligonucleotide
cacugucaccuucuacggg

SEQ ID NO: 59733 - RNA, 19 nt, Artificial Sequence
  Description of Artificial Sequence: Synthetic oligonucleotide
ggcacuauucagagaggga

SEQ ID NO: 59734 - RNA, 19 nt, Artificial Sequence
  Description of Artificial Sequence: Synthetic oligonucleotide
agacguguggaucugcaug

SEQ ID NO: 59735 - RNA, 19 nt, Artificial Sequence
  Description of Artificial Sequence: Synthetic oligonucleotide
ggagcucauggacacaucc

SEQ ID NO: 59736 - RNA, 19 nt, Artificial Sequence
  Description of Artificial Sequence: Synthetic oligonucleotide
cuuggacaaguucuaccgg

SEQ ID NO: 59737 - RNA, 19 nt, Artificial Sequence
  Description of Artificial Sequence: Synthetic oligonucleotide
gaaggugcuggauaaaaac

SEQ ID NO: 59738 - RNA, 19 nt, Artificial Sequence
  Description of Artificial Sequence: Synthetic oligonucleotide
caugacaauuccagaggac

SEQ ID NO: 59739 - RNA, 19 nt, Artificial Sequence
  Description of Artificial Sequence: Synthetic oligonucleotide
cauccuuggggagauugcu

SEQ ID NO: 59740 - RNA, 19 nt, Artificial Sequence
  Description of Artificial Sequence: Synthetic oligonucleotide
ugugucuaucgugcgggcc

SEQ ID NO: 59741 - RNA, 19 nt, Artificial Sequence
  Description of Artificial Sequence: Synthetic oligonucleotide
ccuggagcaucugcacagc

SEQ ID NO: 59742 - RNA, 19 nt, Artificial Sequence
  Description of Artificial Sequence: Synthetic oligonucleotide
caagcugucggugauccac

SEQ ID NO: 59743 - RNA, 19 nt, Artificial Sequence
  Description of Artificial Sequence: Synthetic oligonucleotide
cagagaugugaagcccucc

SEQ ID NO: 59744 - RNA, 19 nt, Artificial Sequence
  Description of Artificial Sequence: Synthetic oligonucleotide
caauguccuuaucaacaag

SEQ ID NO: 59745 - RNA, 19 nt, Artificial Sequence
  Description of Artificial Sequence: Synthetic oligonucleotide
ggagggccaugugaagaug

SEQ ID NO: 59746 - RNA, 19 nt, Artificial Sequence
  Description of Artificial Sequence: Synthetic oligonucleotide
gugugacuuuggcaucagu

SEQ ID NO: 59747 - RNA, 19 nt, Artificial Sequence
  Description of Artificial Sequence: Synthetic oligonucleotide
uggcuacuugguggacucu

SEQ ID NO: 59748 - RNA, 19 nt, Artificial Sequence
  Description of Artificial Sequence: Synthetic oligonucleotide
uguggccaagacgauggau

SEQ ID NO: 59749 - RNA, 19 nt, Artificial Sequence
  Description of Artificial Sequence: Synthetic oligonucleotide
ugccggcugcaagcccuac

SEQ ID NO: 59750 - RNA, 19 nt, Artificial Sequence
  Description of Artificial Sequence: Synthetic oligonucleotide
cauggccccugagaggauc

SEQ ID NO: 59751 - RNA, 19 nt, Artificial Sequence
  Description of Artificial Sequence: Synthetic oligonucleotide
caacccagagcugaaccag

SEQ ID NO: 59752 - RNA, 19 nt, Artificial Sequence
  Description of Artificial Sequence: Synthetic oligonucleotide
gaagggcuacaaugucaag

SEQ ID NO: 59753 - RNA, 19 nt, Artificial Sequence
  Description of Artificial Sequence: Synthetic oligonucleotide
guccgacgucuggagccug

SEQ ID NO: 59754 - RNA, 19 nt, Artificial Sequence
  Description of Artificial Sequence: Synthetic oligonucleotide
gggcaucaccaugauugag

SEQ ID NO: 59755 - RNA, 19 nt, Artificial Sequence
  Description of Artificial Sequence: Synthetic oligonucleotide
gauggccauccugcgguuc

SEQ ID NO: 59756 - RNA, 19 nt, Artificial Sequence
  Description of Artificial Sequence: Synthetic oligonucleotide
cccuuacgaguccuggggg

SEQ ID NO: 59757 - RNA, 19 nt, Artificial Sequence
  Description of Artificial Sequence: Synthetic oligonucleotide
gaccccguuccagcagcug

SEQ ID NO: 59758 - RNA, 19 nt, Artificial Sequence
  Description of Artificial Sequence: Synthetic oligonucleotide
gaagcaggugguggaggag

SEQ ID NO: 59759 - RNA, 19 nt, Artificial Sequence
  Description of Artificial Sequence: Synthetic oligonucleotide
gccguccccccagcuccca

SEQ ID NO: 59760 - RNA, 19 nt, Artificial Sequence
  Description of Artificial Sequence: Synthetic oligonucleotide
agccgaccguuucuccccc

SEQ ID NO: 59761 - RNA, 19 nt, Artificial Sequence
  Description of Artificial Sequence: Synthetic oligonucleotide
cgaguuuguggacuucacu

SEQ ID NO: 59762 - RNA, 19 nt, Artificial Sequence
  Description of Artificial Sequence: Synthetic oligonucleotide
ugcucagugccugaggaag

SEQ ID NO: 59763 - RNA, 19 nt, Artificial Sequence
  Description of Artificial Sequence: Synthetic oligonucleotide
gaaccccgcagagcguaug

SEQ ID NO: 59764 - RNA, 19 nt, Artificial Sequence
  Description of Artificial Sequence: Synthetic oligonucleotide
gagcuaccuggagcugaug

SEQ ID NO: 59765 - RNA, 19 nt, Artificial Sequence
  Description of Artificial Sequence: Synthetic oligonucleotide
ggagcaccccuucuucacc

SEQ ID NO: 59766 - RNA, 19 nt, Artificial Sequence
  Description of Artificial Sequence: Synthetic oligonucleotide
cuugcacaaaaccaagaag

SEQ ID NO: 59767 - RNA, 19 nt, Artificial Sequence
  Description of Artificial Sequence: Synthetic oligonucleotide
gacggacauugcugccuuc

SEQ ID NO: 59768 - RNA, 19 nt, Artificial Sequence
  Description of Artificial Sequence: Synthetic oligonucleotide
cgugaaggagauccuggga

SEQ ID NO: 59769 - RNA, 19 nt, Artificial Sequence
  Description of Artificial Sequence: Synthetic oligonucleotide
agaagacucauaggggcug

SEQ ID NO: 59770 - RNA, 19 nt, Artificial Sequence
  Description of Artificial Sequence: Synthetic oligonucleotide
gggccucggaccccacucc

SEQ ID NO: 59771 - RNA, 19 nt, Artificial Sequence
  Description of Artificial Sequence: Synthetic oligonucleotide
cggcccuccagagccccac

SEQ ID NO: 59772 - RNA, 19 nt, Artificial Sequence
  Description of Artificial Sequence: Synthetic oligonucleotide
cagccccaucugcgggggc

SEQ ID NO: 59773 - RNA, 19 nt, Artificial Sequence
  Description of Artificial Sequence: Synthetic oligonucleotide
cagugcucacccacaccau

SEQ ID NO: 59774 - RNA, 19 nt, Artificial Sequence
  Description of Artificial Sequence: Synthetic oligonucleotide
uaagcuacugccauccugg

SEQ ID NO: 59775 - RNA, 19 nt, Artificial Sequence
  Description of Artificial Sequence: Synthetic oligonucleotide
gcccagggcaucugggagg

SEQ ID NO: 59776 - RNA, 19 nt, Artificial Sequence
  Description of Artificial Sequence: Synthetic oligonucleotide
gaaccgagggggcugcucc

SEQ ID NO: 59777 - RNA, 19 nt, Artificial Sequence
  Description of Artificial Sequence: Synthetic oligonucleotide
ccaccuggcucuguggcga

SEQ ID NO: 59778 - RNA, 19 nt, Artificial Sequence
  Description of Artificial Sequence: Synthetic oligonucleotide
agccauuugucccaagugc

SEQ ID NO: 59779 - RNA, 19 nt, Artificial Sequence
  Description of Artificial Sequence: Synthetic oligonucleotide
ccaaagaagcagaccauug

SEQ ID NO: 59780 - RNA, 19 nt, Artificial Sequence
  Description of Artificial Sequence: Synthetic oligonucleotide
ggggcucccagccaggccc

SEQ ID NO: 59781 - RNA, 19 nt, Artificial Sequence
  Description of Artificial Sequence: Synthetic oligonucleotide
cuugucggccccaccagug

SEQ ID NO: 59782 - RNA, 19 nt, Artificial Sequence
  Description of Artificial Sequence: Synthetic oligonucleotide
gccucucccugcugcuccu

SEQ ID NO: 59783 - RNA, 19 nt, Artificial Sequence
  Description of Artificial Sequence: Synthetic oligonucleotide
uaggacccgucuccagcug

SEQ ID NO: 59784 - RNA, 19 nt, Artificial Sequence
  Description of Artificial Sequence: Synthetic oligonucleotide
gcugagauccuggacugag

SEQ ID NO: 59785 - RNA, 19 nt, Artificial Sequence
  Description of Artificial Sequence: Synthetic oligonucleotide
gggggccuggaugcccccu

SEQ ID NO: 59786 - RNA, 19 nt, Artificial Sequence
  Description of Artificial Sequence: Synthetic oligonucleotide
uguggaugcugcugccccu

SEQ ID NO: 59787 - RNA, 19 nt, Artificial Sequence
  Description of Artificial Sequence: Synthetic oligonucleotide
ugcacagcaggcugccagu

SEQ ID NO: 59788 - RNA, 19 nt, Artificial Sequence
  Description of Artificial Sequence: Synthetic oligonucleotide
ugccuggguggaugggcca

SEQ ID NO: 59789 - RNA, 19 nt, Artificial Sequence
  Description of Artificial Sequence: Synthetic oligonucleotide
accgccuugcccagccugg

SEQ ID NO: 59790 - RNA, 19 nt, Artificial Sequence
  Description of Artificial Sequence: Synthetic oligonucleotide
gaugccauccaaguuguau

SEQ ID NO: 59791 - RNA, 19 nt, Artificial Sequence
  Description of Artificial Sequence: Synthetic oligonucleotide
uauuuuuuuaaucucucga

SEQ ID NO: 59792 - RNA, 19 nt, Artificial Sequence
  Description of Artificial Sequence: Synthetic oligonucleotide
acugaauggacuuugcaca

SEQ ID NO: 59793 - RNA, 19 nt, Artificial Sequence
  Description of Artificial Sequence: Synthetic oligonucleotide
acuuuggcccaggguggcc

SEQ ID NO: 59794 - RNA, 19 nt, Artificial Sequence
  Description of Artificial Sequence: Synthetic oligonucleotide
cacaccucuaucccggcuu

SEQ ID NO: 59795 - RNA, 19 nt, Artificial Sequence
  Description of Artificial Sequence: Synthetic oligonucleotide
uuggugcgggguacacaag

SEQ ID NO: 59796 - RNA, 19 nt, Artificial Sequence
  Description of Artificial Sequence: Synthetic oligonucleotide
gaggggaugaguuguguga

SEQ ID NO: 59797 - RNA, 19 nt, Artificial Sequence
  Description of Artificial Sequence: Synthetic oligonucleotide
aauaccccaagacucccau

SEQ ID NO: 59798 - RNA, 19 nt, Artificial Sequence
  Description of Artificial Sequence: Synthetic oligonucleotide
ugagggagaugccaugagc

SEQ ID NO: 59799 - RNA, 19 nt, Artificial Sequence
  Description of Artificial Sequence: Synthetic oligonucleotide
ccgcccaaggccuuccccu

SEQ ID NO: 59800 - RNA, 19 nt, Artificial Sequence
  Description of Artificial Sequence: Synthetic oligonucleotide
uggcacuggcaaacagggc

SEQ ID NO: 59801 - RNA, 19 nt, Artificial Sequence
  Description of Artificial Sequence: Synthetic oligonucleotide
ccucugcggagcacacugg

SEQ ID NO: 59802 - RNA, 19 nt, Artificial Sequence
  Description of Artificial Sequence: Synthetic oligonucleotide
gcucacccaguccugcccg

SEQ ID NO: 59803 - RNA, 19 nt, Artificial Sequence
  Description of Artificial Sequence: Synthetic oligonucleotide
gccaccguuaucgguguca

SEQ ID NO: 59804 - RNA, 19 nt, Artificial Sequence
  Description of Artificial Sequence: Synthetic oligonucleotide
auucaccuuucguguuuuu

SEQ ID NO: 59805 - RNA, 19 nt, Artificial Sequence
  Description of Artificial Sequence: Synthetic oligonucleotide
uuuuaauuuauccucuguu

SEQ ID NO: 59806 - RNA, 19 nt, Artificial Sequence
  Description of Artificial Sequence: Synthetic oligonucleotide
ugauuuuuucuuuugcuuu

SEQ ID NO: 59807 - RNA, 19 nt, Artificial Sequence
  Description of Artificial Sequence: Synthetic oligonucleotide
uauggguuuggcuuguuuu

SEQ ID NO: 59808 - RNA, 19 nt, Artificial Sequence
  Description of Artificial Sequence: Synthetic oligonucleotide
uucuugcaugguuuggagc

SEQ ID NO: 59809 - RNA, 19 nt, Artificial Sequence
  Description of Artificial Sequence: Synthetic oligonucleotide
cugaucgcuucucccccac

SEQ ID NO: 59810 - RNA, 19 nt, Artificial Sequence
  Description of Artificial Sequence: Synthetic oligonucleotide
cccccuaggguaccagcag

SEQ ID NO: 59811 - RNA, 19 nt, Artificial Sequence
  Description of Artificial Sequence: Synthetic oligonucleotide
ggcagagccuugcccucug

SEQ ID NO: 59812 - RNA, 19 nt, Artificial Sequence
  Description of Artificial Sequence: Synthetic oligonucleotide
gcucaggcugggguccagu

SEQ ID NO: 59813 - RNA, 19 nt, Artificial Sequence
  Description of Artificial Sequence: Synthetic oligonucleotide
ugggaggggcccaagaucu

SEQ ID NO: 59814 - RNA, 19 nt, Artificial Sequence
  Description of Artificial Sequence: Synthetic oligonucleotide
ucugcucagagaagugcag

SEQ ID NO: 59815 - RNA, 19 nt, Artificial Sequence
  Description of Artificial Sequence: Synthetic oligonucleotide
gggggagccuuccagcuca

SEQ ID NO: 59816 - RNA, 19 nt, Artificial Sequence
  Description of Artificial Sequence: Synthetic oligonucleotide
acucucccugaggacuggc

SEQ ID NO: 59817 - RNA, 19 nt, Artificial Sequence
  Description of Artificial Sequence: Synthetic oligonucleotide
cuugacaggggcuaugggu

SEQ ID NO: 59818 - RNA, 19 nt, Artificial Sequence
  Description of Artificial Sequence: Synthetic oligonucleotide
uuugcuuugguguuguuuu

SEQ ID NO: 59819 - RNA, 19 nt, Artificial Sequence
  Description of Artificial Sequence: Synthetic oligonucleotide
uuaaaaaaagaaaauauau

SEQ ID NO: 59820 - RNA, 19 nt, Artificial Sequence
  Description of Artificial Sequence: Synthetic oligonucleotide
uuuuuuugaaaaaacgacu

SEQ ID NO: 59821 - RNA, 19 nt, Artificial Sequence
  Description of Artificial Sequence: Synthetic oligonucleotide
ugcccaucccggguccuuu

SEQ ID NO: 59822 - RNA, 19 nt, Artificial Sequence
  Description of Artificial Sequence: Synthetic oligonucleotide
ucccugauggguuggggca

SEQ ID NO: 59823 - RNA, 19 nt, Artificial Sequence
  Description of Artificial Sequence: Synthetic oligonucleotide
aguuaccugguugcuguuu

SEQ ID NO: 59824 - RNA, 19 nt, Artificial Sequence
  Description of Artificial Sequence: Synthetic oligonucleotide
uggcuggcaauggccuugc

SEQ ID NO: 59825 - RNA, 19 nt, Artificial Sequence
  Description of Artificial Sequence: Synthetic oligonucleotide
cugaccucgagccgggccc

SEQ ID NO: 59826 - RNA, 19 nt, Artificial Sequence
  Description of Artificial Sequence: Synthetic oligonucleotide
cacguggggaccuuuggag

SEQ ID NO: 59827 - RNA, 19 nt, Artificial Sequence
  Description of Artificial Sequence: Synthetic oligonucleotide
gcacagccuacgauccugg

SEQ ID NO: 59828 - RNA, 19 nt, Artificial Sequence
  Description of Artificial Sequence: Synthetic oligonucleotide
gugcaaggccgguggaugc

SEQ ID NO: 59829 - RNA, 19 nt, Artificial Sequence
  Description of Artificial Sequence: Synthetic oligonucleotide
cagaggccaguccauauac

SEQ ID NO: 59830 - RNA, 19 nt, Artificial Sequence
  Description of Artificial Sequence: Synthetic oligonucleotide
ccacccaggccugcgagga

SEQ ID NO: 59831 - RNA, 19 nt, Artificial Sequence
  Description of Artificial Sequence: Synthetic oligonucleotide
agcgugguccccacccauc

SEQ ID NO: 59832 - RNA, 19 nt, Artificial Sequence
  Description of Artificial Sequence: Synthetic oligonucleotide
ccagcccauaugugcaagu

SEQ ID NO: 59833 - RNA, 19 nt, Artificial Sequence
  Description of Artificial Sequence: Synthetic oligonucleotide
ugcccuugacagagaggcu

SEQ ID NO: 59834 - RNA, 19 nt, Artificial Sequence
  Description of Artificial Sequence: Synthetic oligonucleotide
uggucauauccauggugac

SEQ ID NO: 59835 - RNA, 19 nt, Artificial Sequence
  Description of Artificial Sequence: Synthetic oligonucleotide
ccauuuaugggccacaaca

SEQ ID NO: 59836 - RNA, 19 nt, Artificial Sequence
  Description of Artificial Sequence: Synthetic oligonucleotide
agguccccaucugcgcagu

SEQ ID NO: 59837 - RNA, 19 nt, Artificial Sequence
  Description of Artificial Sequence: Synthetic oligonucleotide
ugaacccugugcugagcac

SEQ ID NO: 59838 - RNA, 19 nt, Artificial Sequence
  Description of Artificial Sequence: Synthetic oligonucleotide
ccuugcagacgugaucuug

SEQ ID NO: 59839 - RNA, 19 nt, Artificial Sequence
  Description of Artificial Sequence: Synthetic oligonucleotide
gcuucguccugcagcacug

SEQ ID NO: 59840 - RNA, 19 nt, Artificial Sequence
  Description of Artificial Sequence: Synthetic oligonucleotide
gugcggggcaggaaaaucc

SEQ ID NO: 59841 - RNA, 19 nt, Artificial Sequence
  Description of Artificial Sequence: Synthetic oligonucleotide
caagaggaagaaggaucua

SEQ ID NO: 59842 - RNA, 19 nt, Artificial Sequence
  Description of Artificial Sequence: Synthetic oligonucleotide
acggauauccugcaugucc

SEQ ID NO: 59843 - RNA, 19 nt, Artificial Sequence
  Description of Artificial Sequence: Synthetic oligonucleotide
caagccacccgcacccaac

SEQ ID NO: 59844 - RNA, 19 nt, Artificial Sequence
  Description of Artificial Sequence: Synthetic oligonucleotide
ccccacacccccccggaac

SEQ ID NO: 59845 - RNA, 19 nt, Artificial Sequence
  Description of Artificial Sequence: Synthetic oligonucleotide
ccuggacucccggaccuuc

SEQ ID NO: 59846 - RNA, 19 nt, Artificial Sequence
  Description of Artificial Sequence: Synthetic oligonucleotide
caucaccauuggagacaga

SEQ ID NO: 59847 - RNA, 19 nt, Artificial Sequence
  Description of Artificial Sequence: Synthetic oligonucleotide
aaacuuugagguggaggcu

SEQ ID NO: 59848 - RNA, 19 nt, Artificial Sequence
  Description of Artificial Sequence: Synthetic oligonucleotide
ugaugacuuggugaccauc

SEQ ID NO: 59849 - RNA, 19 nt, Artificial Sequence
  Description of Artificial Sequence: Synthetic oligonucleotide
cucagaacugggccgugga

SEQ ID NO: 59850 - RNA, 19 nt, Artificial Sequence
  Description of Artificial Sequence: Synthetic oligonucleotide
agccuauggggugguagag

SEQ ID NO: 59851 - RNA, 19 nt, Artificial Sequence
  Description of Artificial Sequence: Synthetic oligonucleotide
gaaggugcggcacgcccag

SEQ ID NO: 59852 - RNA, 19 nt, Artificial Sequence
  Description of Artificial Sequence: Synthetic oligonucleotide
gagcggcaccaucauggcc

SEQ ID NO: 59853 - RNA, 19 nt, Artificial Sequence
  Description of Artificial Sequence: Synthetic oligonucleotide
cgugaagcggauccgggcc

SEQ ID NO: 59854 - RNA, 19 nt, Artificial Sequence
  Description of Artificial Sequence: Synthetic oligonucleotide
caccgugaacucacaggag

SEQ ID NO: 59855 - RNA, 19 nt, Artificial Sequence
  Description of Artificial Sequence: Synthetic oligonucleotide
gcagaagcggcugcucaug

SEQ ID NO: 59856 - RNA, 19 nt, Artificial Sequence
  Description of Artificial Sequence: Synthetic oligonucleotide
ggaccuggacaucaacaug

SEQ ID NO: 59857 - RNA, 19 nt, Artificial Sequence
  Description of Artificial Sequence: Synthetic oligonucleotide
gcgcacggucgacuguuuc

SEQ ID NO: 59858 - RNA, 19 nt, Artificial Sequence
  Description of Artificial Sequence: Synthetic oligonucleotide
cuacacugucaccuucuac

SEQ ID NO: 59859 - RNA, 19 nt, Artificial Sequence
  Description of Artificial Sequence: Synthetic oligonucleotide
cggggcacuauucagagag

SEQ ID NO: 59860 - RNA, 19 nt, Artificial Sequence
  Description of Artificial Sequence: Synthetic oligonucleotide
gggagacguguggaucugc

SEQ ID NO: 59861 - RNA, 19 nt, Artificial Sequence
  Description of Artificial Sequence: Synthetic oligonucleotide
cauggagcucauggacaca

SEQ ID NO: 59862 - RNA, 19 nt, Artificial Sequence
  Description of Artificial Sequence: Synthetic oligonucleotide
auccuuggacaaguucuac

SEQ ID NO: 59863 - RNA, 19 nt, Artificial Sequence
  Description of Artificial Sequence: Synthetic oligonucleotide
ccggaaggugcuggauaaa

SEQ ID NO: 59864 - RNA, 19 nt, Artificial Sequence
  Description of Artificial Sequence: Synthetic oligonucleotide
aaacaugacaauuccagag

SEQ ID NO: 59865 - RNA, 19 nt, Artificial Sequence
  Description of Artificial Sequence: Synthetic oligonucleotide
ggacauccuuggggagauu

SEQ ID NO: 59866 - RNA, 19 nt, Artificial Sequence
  Description of Artificial Sequence: Synthetic oligonucleotide
ugcugugucuaucgugcgg

SEQ ID NO: 59867 - RNA, 19 nt, Artificial Sequence
  Description of Artificial Sequence: Synthetic oligonucleotide
ggcccuggagcaucugcac

SEQ ID NO: 59868 - RNA, 19 nt, Artificial Sequence
  Description of Artificial Sequence: Synthetic oligonucleotide
cagcaagcugucggugauc

SEQ ID NO: 59869 - RNA, 19 nt, Artificial Sequence
  Description of Artificial Sequence: Synthetic oligonucleotide
ccacagagaugugaagccc

SEQ ID NO: 59870 - RNA, 19 nt, Artificial Sequence
  Description of Artificial Sequence: Synthetic oligonucleotide
cuccaauguccuuaucaac

SEQ ID NO: 59871 - RNA, 19 nt, Artificial Sequence
  Description of Artificial Sequence: Synthetic oligonucleotide
caaggagggccaugugaag

SEQ ID NO: 59872 - RNA, 19 nt, Artificial Sequence
  Description of Artificial Sequence: Synthetic oligonucleotide
gaugugugacuuuggcauc

SEQ ID NO: 59873 - RNA, 19 nt, Artificial Sequence
  Description of Artificial Sequence: Synthetic oligonucleotide
caguggcuacuugguggac

SEQ ID NO: 59874 - RNA, 19 nt, Artificial Sequence
  Description of Artificial Sequence: Synthetic oligonucleotide
cucuguggccaagacgaug

SEQ ID NO: 59875 - RNA, 19 nt, Artificial Sequence
  Description of Artificial Sequence: Synthetic oligonucleotide
ggaugccggcugcaagccc

SEQ ID NO: 59876 - RNA, 19 nt, Artificial Sequence
  Description of Artificial Sequence: Synthetic oligonucleotide
cuacauggccccugagagg

SEQ ID NO: 59877 - RNA, 19 nt, Artificial Sequence
  Description of Artificial Sequence: Synthetic oligonucleotide
gaucaacccagagcugaac

SEQ ID NO: 59878 - RNA, 19 nt, Artificial Sequence
  Description of Artificial Sequence: Synthetic oligonucleotide
ccagaagggcuacaauguc

SEQ ID NO: 59879 - RNA, 19 nt, Artificial Sequence
  Description of Artificial Sequence: Synthetic oligonucleotide
caaguccgacgucuggagc

SEQ ID NO: 59880 - RNA, 19 nt, Artificial Sequence
  Description of Artificial Sequence: Synthetic oligonucleotide
ccugggcaucaccaugauu

SEQ ID NO: 59881 - RNA, 19 nt, Artificial Sequence
  Description of Artificial Sequence: Synthetic oligonucleotide
ugagauggccauccugcgg

SEQ ID NO: 59882 - RNA, 19 nt, Artificial Sequence
  Description of Artificial Sequence: Synthetic oligonucleotide
guucccuuacgaguccugg

SEQ ID NO: 59883 - RNA, 19 nt, Artificial Sequence
  Description of Artificial Sequence: Synthetic oligonucleotide
ggggaccccguuccagcag

SEQ ID NO: 59884 - RNA, 19 nt, Artificial Sequence
  Description of Artificial Sequence: Synthetic oligonucleotide
gcugaagcaggugguggag

SEQ ID NO: 59885 - RNA, 19 nt, Artificial Sequence
  Description of Artificial Sequence: Synthetic oligonucleotide
ggagccguccccccagcuc

SEQ ID NO: 59886 - RNA, 19 nt, Artificial Sequence
  Description of Artificial Sequence: Synthetic oligonucleotide
cccagccgaccguuucucc

SEQ ID NO: 59887 - RNA, 19 nt, Artificial Sequence
  Description of Artificial Sequence: Synthetic oligonucleotide
ccccgaguuuguggacuuc

SEQ ID NO: 59888 - RNA, 19 nt, Artificial Sequence
  Description of Artificial Sequence: Synthetic oligonucleotide
cacugcucagugccugagg

SEQ ID NO: 59889 - RNA, 19 nt, Artificial Sequence
  Description of Artificial Sequence: Synthetic oligonucleotide
gaagaaccccgcagagcgu

SEQ ID NO: 59890 - RNA, 19 nt, Artificial Sequence
  Description of Artificial Sequence: Synthetic oligonucleotide
uaugagcuaccuggagcug

SEQ ID NO: 59891 - RNA, 19 nt, Artificial Sequence
  Description of Artificial Sequence: Synthetic oligonucleotide
gauggagcaccccuucuuc

SEQ ID NO: 59892 - RNA, 19 nt, Artificial Sequence
  Description of Artificial Sequence: Synthetic oligonucleotide
caccuugcacaaaaccaag

SEQ ID NO: 59893 - RNA, 19 nt, Artificial Sequence
  Description of Artificial Sequence: Synthetic oligonucleotide
gaagacggacauugcugcc

SEQ ID NO: 59894 - RNA, 19 nt, Artificial Sequence
  Description of Artificial Sequence: Synthetic oligonucleotide
cuucgugaaggagauccug

SEQ ID NO: 59895 - RNA, 19 nt, Artificial Sequence
  Description of Artificial Sequence: Synthetic oligonucleotide
gggagaagacucauagggg

SEQ ID NO: 59896 - RNA, 19 nt, Artificial Sequence
  Description of Artificial Sequence: Synthetic oligonucleotide
gcugggccucggaccccac

SEQ ID NO: 59897 - RNA, 19 nt, Artificial Sequence
  Description of Artificial Sequence: Synthetic oligonucleotide
cuccggcccuccagagccc

SEQ ID NO: 59898 - RNA, 19 nt, Artificial Sequence
  Description of Artificial Sequence: Synthetic oligonucleotide
ccacagccccaucugcggg

SEQ ID NO: 59899 - RNA, 19 nt, Artificial Sequence
  Description of Artificial Sequence: Synthetic oligonucleotide
gggcagugcucacccacac

SEQ ID NO: 59900 - RNA, 19 nt, Artificial Sequence
  Description of Artificial Sequence: Synthetic oligonucleotide
ccauaagcuacugccaucc

SEQ ID NO: 59901 - RNA, 19 nt, Artificial Sequence
  Description of Artificial Sequence: Synthetic oligonucleotide
cuggcccagggcaucuggg

SEQ ID NO: 59902 - RNA, 19 nt, Artificial Sequence
  Description of Artificial Sequence: Synthetic oligonucleotide
gaggaaccgagggggcugc

SEQ ID NO: 59903 - RNA, 19 nt, Artificial Sequence
  Description of Artificial Sequence: Synthetic oligonucleotide
cucccaccuggcucugugg

SEQ ID NO: 59904 - RNA, 19 nt, Artificial Sequence
  Description of Artificial Sequence: Synthetic oligonucleotide
gcgagccauuugucccaag

SEQ ID NO: 59905 - RNA, 19 nt, Artificial Sequence
  Description of Artificial Sequence: Synthetic oligonucleotide
gugccaaagaagcagacca

SEQ ID NO: 59906 - RNA, 19 nt, Artificial Sequence
  Description of Artificial Sequence: Synthetic oligonucleotide
auuggggcucccagccagg

SEQ ID NO: 59907 - RNA, 19 nt, Artificial Sequence
  Description of Artificial Sequence: Synthetic oligonucleotide
gcccuugucggccccacca

SEQ ID NO: 59908 - RNA, 19 nt, Artificial Sequence
  Description of Artificial Sequence: Synthetic oligonucleotide
agugccucucccugcugcu

SEQ ID NO: 59909 - RNA, 19 nt, Artificial Sequence
  Description of Artificial Sequence: Synthetic oligonucleotide
uccuaggacccgucuccag

SEQ ID NO: 59910 - RNA, 19 nt, Artificial Sequence
  Description of Artificial Sequence: Synthetic oligonucleotide
gcugcugagauccuggacu

SEQ ID NO: 59911 - RNA, 19 nt, Artificial Sequence
  Description of Artificial Sequence: Synthetic oligonucleotide
ugagggggccuggaugccc

SEQ ID NO: 59912 - RNA, 19 nt, Artificial Sequence
  Description of Artificial Sequence: Synthetic oligonucleotide
cccuguggaugcugcugcc

SEQ ID NO: 59913 - RNA, 19 nt, Artificial Sequence
  Description of Artificial Sequence: Synthetic oligonucleotide
cccugcacagcaggcugcc

SEQ ID NO: 59914 - RNA, 19 nt, Artificial Sequence
  Description of Artificial Sequence: Synthetic oligonucleotide
cagugccuggguggauggg

SEQ ID NO: 59915 - RNA, 19 nt, Artificial Sequence
  Description of Artificial Sequence: Synthetic oligonucleotide
gccaccgccuugcccagcc

SEQ ID NO: 59916 - RNA, 19 nt, Artificial Sequence
  Description of Artificial Sequence: Synthetic oligonucleotide
cuggaugccauccaaguug

SEQ ID NO: 59917 - RNA, 19 nt, Artificial Sequence
  Description of Artificial Sequence: Synthetic oligonucleotide
guauauuuuuuuaaucucu

SEQ ID NO: 59918 - RNA, 19 nt, Artificial Sequence
  Description of Artificial Sequence: Synthetic oligonucleotide
ucgacugaauggacuuugc

SEQ ID NO: 59919 - RNA, 19 nt, Artificial Sequence
  Description of Artificial Sequence: Synthetic oligonucleotide
cacacuuuggcccagggug

SEQ ID NO: 59920 - RNA, 19 nt, Artificial Sequence
  Description of Artificial Sequence: Synthetic oligonucleotide
ggccacaccucuaucccgg

SEQ ID NO: 59921 - RNA, 19 nt, Artificial Sequence
  Description of Artificial Sequence: Synthetic oligonucleotide
gcuuuggugcgggguacac

SEQ ID NO: 59922 - RNA, 19 nt, Artificial Sequence
  Description of Artificial Sequence: Synthetic oligonucleotide
caagaggggaugaguugug

SEQ ID NO: 59923 - RNA, 19 nt, Artificial Sequence
  Description of Artificial Sequence: Synthetic oligonucleotide
gugaauaccccaagacucc

SEQ ID NO: 59924 - RNA, 19 nt, Artificial Sequence
  Description of Artificial Sequence: Synthetic oligonucleotide
ccaugagggagaugccaug

SEQ ID NO: 59925 - RNA, 19 nt, Artificial Sequence
  Description of Artificial Sequence: Synthetic oligonucleotide
gagccgcccaaggccuucc

SEQ ID NO: 59926 - RNA, 19 nt, Artificial Sequence
  Description of Artificial Sequence: Synthetic oligonucleotide
cccuggcacuggcaaacag

SEQ ID NO: 59927 - RNA, 19 nt, Artificial Sequence
  Description of Artificial Sequence: Synthetic oligonucleotide
gggccucugcggagcacac

SEQ ID NO: 59928 - RNA, 19 nt, Artificial Sequence
  Description of Artificial Sequence: Synthetic oligonucleotide
cuggcucacccaguccugc

SEQ ID NO: 59929 - RNA, 19 nt, Artificial Sequence
  Description of Artificial Sequence: Synthetic oligonucleotide
cccgccaccguuaucggug

SEQ ID NO: 59930 - RNA, 19 nt, Artificial Sequence
  Description of Artificial Sequence: Synthetic oligonucleotide
gucauucaccuuucguguu

SEQ ID NO: 59931 - RNA, 19 nt, Artificial Sequence
  Description of Artificial Sequence: Synthetic oligonucleotide
uuuuuuuaauuuauccucu

SEQ ID NO: 59932 - RNA, 19 nt, Artificial Sequence
  Description of Artificial Sequence: Synthetic oligonucleotide
uguugauuuuuucuuuugc

SEQ ID NO: 59933 - RNA, 19 nt, Artificial Sequence
  Description of Artificial Sequence: Synthetic oligonucleotide
cuuuauggguuuggcuugu

SEQ ID NO: 59934 - RNA, 19 nt, Artificial Sequence
  Description of Artificial Sequence: Synthetic oligonucleotide
uuuuucuugcaugguuugg

SEQ ID NO: 59935 - RNA, 19 nt, Artificial Sequence
  Description of Artificial Sequence: Synthetic oligonucleotide
gagcugaucgcuucucccc

SEQ ID NO: 59936 - RNA, 19 nt, Artificial Sequence
  Description of Artificial Sequence: Synthetic oligonucleotide
ccacccccuaggguaccag

SEQ ID NO: 59937 - RNA, 19 nt, Artificial Sequence
  Description of Artificial Sequence: Synthetic oligonucleotide
gcaggcagagccuugcccu

SEQ ID NO: 59938 - RNA, 19 nt, Artificial Sequence
  Description of Artificial Sequence: Synthetic oligonucleotide
ucugcucaggcuggggucc

SEQ ID NO: 59939 - RNA, 19 nt, Artificial Sequence
  Description of Artificial Sequence: Synthetic oligonucleotide
cagugggaggggcccaaga

SEQ ID NO: 59940 - RNA, 19 nt, Artificial Sequence
  Description of Artificial Sequence: Synthetic oligonucleotide
aucucugcucagagaagug

SEQ ID NO: 59941 - RNA, 19 nt, Artificial Sequence
  Description of Artificial Sequence: Synthetic oligonucleotide
gcagggggagccuuccagc

SEQ ID NO: 59942 - RNA, 19 nt, Artificial Sequence
  Description of Artificial Sequence: Synthetic oligonucleotide
cucacucucccugaggacu

SEQ ID NO: 59943 - RNA, 19 nt, Artificial Sequence
  Description of Artificial Sequence: Synthetic oligonucleotide
uggcuugacaggggcuaug

SEQ ID NO: 59944 - RNA, 19 nt, Artificial Sequence
  Description of Artificial Sequence: Synthetic oligonucleotide
ggguuugcuuugguguugu

SEQ ID NO: 59945 - RNA, 19 nt, Artificial Sequence
  Description of Artificial Sequence: Synthetic oligonucleotide
uuuuuaaaaaaagaaaaua

SEQ ID NO: 59946 - RNA, 19 nt, Artificial Sequence
  Description of Artificial Sequence: Synthetic oligonucleotide
auauuuuuuugaaaaaacg

SEQ ID NO: 59947 - RNA, 19 nt, Artificial Sequence
  Description of Artificial Sequence: Synthetic oligonucleotide
gacugcccaucccgggucc

SEQ ID NO: 59948 - RNA, 19 nt, Artificial Sequence
  Description of Artificial Sequence: Synthetic oligonucleotide
cuuucccugauggguuggg

SEQ ID NO: 59949 - RNA, 19 nt, Artificial Sequence
  Description of Artificial Sequence: Synthetic oligonucleotide
ggcaguuaccugguugcug

SEQ ID NO: 59950 - RNA, 25 nt, Artificial Sequence
  Description of Artificial Sequence: Synthetic oligonucleotide
gcaggggcggggccugagucagcgc

SEQ ID NO: 59951 - RNA, 25 nt, Artificial Sequence
  Description of Artificial Sequence: Synthetic oligonucleotide
caguucggccggggucuccccggcg

SEQ ID NO: 59952 - RNA, 25 nt, Artificial Sequence
  Description of Artificial Sequence: Synthetic oligonucleotide
gcugcccagucugucuccggcgccg

SEQ ID NO: 59953 - RNA, 25 nt, Artificial Sequence
  Description of Artificial Sequence: Synthetic oligonucleotide
gcccgucgcggacucguccuugcug

SEQ ID NO: 59954 - RNA, 25 nt, Artificial Sequence
  Description of Artificial Sequence: Synthetic oligonucleotide
gcagucgccgccgcaguccucgccg

SEQ ID NO: 59955 - RNA, 25 nt, Artificial Sequence
  Description of Artificial Sequence: Synthetic oligonucleotide
gcagucgccgccgccgccgccgccg

SEQ ID NO: 59956 - RNA, 25 nt, Artificial Sequence
  Description of Artificial Sequence: Synthetic oligonucleotide
gccgccgcugcuccuccgccuggcc

SEQ ID NO: 59957 - RNA, 25 nt, Artificial Sequence
  Description of Artificial Sequence: Synthetic oligonucleotide
cugggccgucugcccgcagccauga

SEQ ID NO: 59958 - RNA, 25 nt, Artificial Sequence
  Description of Artificial Sequence: Synthetic oligonucleotide
agcgugcucggccccgguggagccc

SEQ ID NO: 59959 - RNA, 25 nt, Artificial Sequence
  Description of Artificial Sequence: Synthetic oligonucleotide
cgcaguccucuagauuagucuccac

SEQ ID NO: 59960 - RNA, 25 nt, Artificial Sequence
  Description of Artificial Sequence: Synthetic oligonucleotide
ccgccguccaggacccacuugcagc

SEQ ID NO: 59961 - RNA, 25 nt, Artificial Sequence
  Description of Artificial Sequence: Synthetic oligonucleotide
cauggagucgcccgccucgagccag

SEQ ID NO: 59962 - RNA, 25 nt, Artificial Sequence
  Description of Artificial Sequence: Synthetic oligonucleotide
gcccgccagcaugccccaguccaaa

SEQ ID NO: 59963 - RNA, 25 nt, Artificial Sequence
  Description of Artificial Sequence: Synthetic oligonucleotide
aggaaaauccaagaggaagaaggau

SEQ ID NO: 59964 - RNA, 25 nt, Artificial Sequence
  Description of Artificial Sequence: Synthetic oligonucleotide
ucuacggauauccugcauguccaag

SEQ ID NO: 59965 - RNA, 25 nt, Artificial Sequence
  Description of Artificial Sequence: Synthetic oligonucleotide
gccacccgcacccaaccccacaccc

SEQ ID NO: 59966 - RNA, 25 nt, Artificial Sequence
  Description of Artificial Sequence: Synthetic oligonucleotide
cccccggaaccuggacucccggacc

SEQ ID NO: 59967 - RNA, 25 nt, Artificial Sequence
  Description of Artificial Sequence: Synthetic oligonucleotide
cuucaucaccauuggagacagaaac

SEQ ID NO: 59968 - RNA, 25 nt, Artificial Sequence
  Description of Artificial Sequence: Synthetic oligonucleotide
cuuugagguggaggcugaugacuug

SEQ ID NO: 59969 - RNA, 25 nt, Artificial Sequence
  Description of Artificial Sequence: Synthetic oligonucleotide
ggugaccaucucagaacugggccgu

SEQ ID NO: 59970 - RNA, 25 nt, Artificial Sequence
  Description of Artificial Sequence: Synthetic oligonucleotide
uggagccuauggggugguagagaag

SEQ ID NO: 59971 - RNA, 25 nt, Artificial Sequence
  Description of Artificial Sequence: Synthetic oligonucleotide
ggugcggcacgcccagagcggcacc

SEQ ID NO: 59972 - RNA, 25 nt, Artificial Sequence
  Description of Artificial Sequence: Synthetic oligonucleotide
caucauggccgugaagcggauccgg

SEQ ID NO: 59973 - RNA, 25 nt, Artificial Sequence
  Description of Artificial Sequence: Synthetic oligonucleotide
ggccaccgugaacucacaggagcag

SEQ ID NO: 59974 - RNA, 25 nt, Artificial Sequence
  Description of Artificial Sequence: Synthetic oligonucleotide
gaagcggcugcucauggaccuggac

SEQ ID NO: 59975 - RNA, 25 nt, Artificial Sequence
  Description of Artificial Sequence: Synthetic oligonucleotide
caucaacaugcgcacggucgacugu

SEQ ID NO: 59976 - RNA, 25 nt, Artificial Sequence
  Description of Artificial Sequence: Synthetic oligonucleotide
uuucuacacugucaccuucuacggg

SEQ ID NO: 59977 - RNA, 25 nt, Artificial Sequence
  Description of Artificial Sequence: Synthetic oligonucleotide
ggcacuauucagagagggagacgug

SEQ ID NO: 59978 - RNA, 25 nt, Artificial Sequence
  Description of Artificial Sequence: Synthetic oligonucleotide
guggaucugcauggagcucauggac

SEQ ID NO: 59979 - RNA, 25 nt, Artificial Sequence
  Description of Artificial Sequence: Synthetic oligonucleotide
cacauccuuggacaaguucuaccgg

SEQ ID NO: 59980 - RNA, 25 nt, Artificial Sequence
  Description of Artificial Sequence: Synthetic oligonucleotide
gaaggugcuggauaaaaacaugaca

SEQ ID NO: 59981 - RNA, 25 nt, Artificial Sequence
  Description of Artificial Sequence: Synthetic oligonucleotide
aauuccagaggacauccuuggggag

SEQ ID NO: 59982 - RNA, 25 nt, Artificial Sequence
  Description of Artificial Sequence: Synthetic oligonucleotide
gauugcugugucuaucgugcgggcc

SEQ ID NO: 59983 - RNA, 25 nt, Artificial Sequence
  Description of Artificial Sequence: Synthetic oligonucleotide
ccuggagcaucugcacagcaagcug

SEQ ID NO: 59984 - RNA, 25 nt, Artificial Sequence
  Description of Artificial Sequence: Synthetic oligonucleotide
gucggugauccacagagaugugaag

SEQ ID NO: 59985 - RNA, 25 nt, Artificial Sequence
  Description of Artificial Sequence: Synthetic oligonucleotide
gcccuccaauguccuuaucaacaag

SEQ ID NO: 59986 - RNA, 25 nt, Artificial Sequence
  Description of Artificial Sequence: Synthetic oligonucleotide
ggagggccaugugaagaugugugac

SEQ ID NO: 59987 - RNA, 25 nt, Artificial Sequence
  Description of Artificial Sequence: Synthetic oligonucleotide
cuuuggcaucaguggcuacuuggug

SEQ ID NO: 59988 - RNA, 25 nt, Artificial Sequence
  Description of Artificial Sequence: Synthetic oligonucleotide
ggacucuguggccaagacgauggau

SEQ ID NO: 59989 - RNA, 25 nt, Artificial Sequence
  Description of Artificial Sequence: Synthetic oligonucleotide
ugccggcugcaagcccuacauggcc

SEQ ID NO: 59990 - RNA, 25 nt, Artificial Sequence
  Description of Artificial Sequence: Synthetic oligonucleotide
cccugagaggaucaacccagagcug

SEQ ID NO: 59991 - RNA, 25 nt, Artificial Sequence
  Description of Artificial Sequence: Synthetic oligonucleotide
gaaccagaagggcuacaaugucaag

SEQ ID NO: 59992 - RNA, 25 nt, Artificial Sequence
  Description of Artificial Sequence: Synthetic oligonucleotide
guccgacgucuggagccugggcauc

SEQ ID NO: 59993 - RNA, 25 nt, Artificial Sequence
  Description of Artificial Sequence: Synthetic oligonucleotide
caccaugauugagauggccauccug

SEQ ID NO: 59994 - RNA, 25 nt, Artificial Sequence
  Description of Artificial Sequence: Synthetic oligonucleotide
gcgguucccuuacgaguccuggggg

SEQ ID NO: 59995 - RNA, 25 nt, Artificial Sequence
  Description of Artificial Sequence: Synthetic oligonucleotide
gaccccguuccagcagcugaagcag

SEQ ID NO: 59996 - RNA, 25 nt, Artificial Sequence
  Description of Artificial Sequence: Synthetic oligonucleotide
ggugguggaggagccguccccccag

SEQ ID NO: 59997 - RNA, 25 nt, Artificial Sequence
  Description of Artificial Sequence: Synthetic oligonucleotide
gcucccagccgaccguuucuccccc

SEQ ID NO: 59998 - RNA, 25 nt, Artificial Sequence
  Description of Artificial Sequence: Synthetic oligonucleotide
cgaguuuguggacuucacugcucag

SEQ ID NO: 59999 - RNA, 25 nt, Artificial Sequence
  Description of Artificial Sequence: Synthetic oligonucleotide
gugccugaggaagaaccccgcagag

SEQ ID NO: 60000 - RNA, 25 nt, Artificial Sequence
  Description of Artificial Sequence: Synthetic oligonucleotide
gcguaugagcuaccuggagcugaug

SEQ ID NO: 60001 - RNA, 25 nt, Artificial Sequence
  Description of Artificial Sequence: Synthetic oligonucleotide
ggagcaccccuucuucaccuugcac

SEQ ID NO: 60002 - RNA, 25 nt, Artificial Sequence
  Description of Artificial Sequence: Synthetic oligonucleotide
caaaaccaagaagacggacauugcu

SEQ ID NO: 60003 - RNA, 25 nt, Artificial Sequence
  Description of Artificial Sequence: Synthetic oligonucleotide
ugccuucgugaaggagauccuggga

SEQ ID NO: 60004 - RNA, 25 nt, Artificial Sequence
  Description of Artificial Sequence: Synthetic oligonucleotide
agaagacucauaggggcugggccuc

SEQ ID NO: 60005 - RNA, 25 nt, Artificial Sequence
  Description of Artificial Sequence: Synthetic oligonucleotide
cggaccccacuccggcccuccagag

SEQ ID NO: 60006 - RNA, 25 nt, Artificial Sequence
  Description of Artificial Sequence: Synthetic oligonucleotide
gccccacagccccaucugcgggggc

SEQ ID NO: 60007 - RNA, 25 nt, Artificial Sequence
  Description of Artificial Sequence: Synthetic oligonucleotide
cagugcucacccacaccauaagcua

SEQ ID NO: 60008 - RNA, 25 nt, Artificial Sequence
  Description of Artificial Sequence: Synthetic oligonucleotide
acugccauccuggcccagggcaucu

SEQ ID NO: 60009 - RNA, 25 nt, Artificial Sequence
  Description of Artificial Sequence: Synthetic oligonucleotide
ugggaggaaccgagggggcugcucc

SEQ ID NO: 60010 - RNA, 25 nt, Artificial Sequence
  Description of Artificial Sequence: Synthetic oligonucleotide
ccaccuggcucuguggcgagccauu

SEQ ID NO: 60011 - RNA, 25 nt, Artificial Sequence
  Description of Artificial Sequence: Synthetic oligonucleotide
uugucccaagugccaaagaagcaga

SEQ ID NO: 60012 - RNA, 25 nt, Artificial Sequence
  Description of Artificial Sequence: Synthetic oligonucleotide
accauuggggcucccagccaggccc

SEQ ID NO: 60013 - RNA, 25 nt, Artificial Sequence
  Description of Artificial Sequence: Synthetic oligonucleotide
cuugucggccccaccagugccucuc

SEQ ID NO: 60014 - RNA, 25 nt, Artificial Sequence
  Description of Artificial Sequence: Synthetic oligonucleotide
cccugcugcuccuaggacccgucuc

SEQ ID NO: 60015 - RNA, 25 nt, Artificial Sequence
  Description of Artificial Sequence: Synthetic oligonucleotide
ccagcugcugagauccuggacugag

SEQ ID NO: 60016 - RNA, 25 nt, Artificial Sequence
  Description of Artificial Sequence: Synthetic oligonucleotide
gggggccuggaugcccccuguggau

SEQ ID NO: 60017 - RNA, 25 nt, Artificial Sequence
  Description of Artificial Sequence: Synthetic oligonucleotide
ugcugcugccccugcacagcaggcu

SEQ ID NO: 60018 - RNA, 25 nt, Artificial Sequence
  Description of Artificial Sequence: Synthetic oligonucleotide
ugccagugccuggguggaugggcca

SEQ ID NO: 60019 - RNA, 25 nt, Artificial Sequence
  Description of Artificial Sequence: Synthetic oligonucleotide
accgccuugcccagccuggaugcca

SEQ ID NO: 60020 - RNA, 25 nt, Artificial Sequence
  Description of Artificial Sequence: Synthetic oligonucleotide
auccaaguuguauauuuuuuuaauc

SEQ ID NO: 60021 - RNA, 25 nt, Artificial Sequence
  Description of Artificial Sequence: Synthetic oligonucleotide
cucucgacugaauggacuuugcaca

SEQ ID NO: 60022 - RNA, 25 nt, Artificial Sequence
  Description of Artificial Sequence: Synthetic oligonucleotide
acuuuggcccaggguggccacaccu

SEQ ID NO: 60023 - RNA, 25 nt, Artificial Sequence
  Description of Artificial Sequence: Synthetic oligonucleotide
ucuaucccggcuuuggugcggggua

SEQ ID NO: 60024 - RNA, 25 nt, Artificial Sequence
  Description of Artificial Sequence: Synthetic oligonucleotide
acacaagaggggaugaguuguguga

SEQ ID NO: 60025 - RNA, 25 nt, Artificial Sequence
  Description of Artificial Sequence: Synthetic oligonucleotide
aauaccccaagacucccaugaggga

SEQ ID NO: 60026 - RNA, 25 nt, Artificial Sequence
  Description of Artificial Sequence: Synthetic oligonucleotide
agaugccaugagccgcccaaggccu

SEQ ID NO: 60027 - RNA, 25 nt, Artificial Sequence
  Description of Artificial Sequence: Synthetic oligonucleotide
uuccccuggcacuggcaaacagggc

SEQ ID NO: 60028 - RNA, 25 nt, Artificial Sequence
  Description of Artificial Sequence: Synthetic oligonucleotide
ccucugcggagcacacuggcucacc

SEQ ID NO: 60029 - RNA, 25 nt, Artificial Sequence
  Description of Artificial Sequence: Synthetic oligonucleotide
ccaguccugcccgccaccguuaucg

SEQ ID NO: 60030 - RNA, 25 nt, Artificial Sequence
  Description of Artificial Sequence: Synthetic oligonucleotide
ggugucauucaccuuucguguuuuu

SEQ ID NO: 60031 - RNA, 25 nt, Artificial Sequence
  Description of Artificial Sequence: Synthetic oligonucleotide
uuuuaauuuauccucuguugauuuu

SEQ ID NO: 60032 - RNA, 25 nt, Artificial Sequence
  Description of Artificial Sequence: Synthetic oligonucleotide
uuucuuuugcuuuauggguuuggcu

SEQ ID NO: 60033 - RNA, 25 nt, Artificial Sequence
  Description of Artificial Sequence: Synthetic oligonucleotide
uuguuuuucuugcaugguuuggagc

SEQ ID NO: 60034 - RNA, 25 nt, Artificial Sequence
  Description of Artificial Sequence: Synthetic oligonucleotide
cugaucgcuucucccccacccccua

SEQ ID NO: 60035 - RNA, 25 nt, Artificial Sequence
  Description of Artificial Sequence: Synthetic oligonucleotide
aggguaccagcaggcagagccuugc

SEQ ID NO: 60036 - RNA, 25 nt, Artificial Sequence
  Description of Artificial Sequence: Synthetic oligonucleotide
cccucugcucaggcugggguccagu

SEQ ID NO: 60037 - RNA, 25 nt, Artificial Sequence
  Description of Artificial Sequence: Synthetic oligonucleotide
ugggaggggcccaagaucucugcuc

SEQ ID NO: 60038 - RNA, 25 nt, Artificial Sequence
  Description of Artificial Sequence: Synthetic oligonucleotide
cagagaagugcagggggagccuucc

SEQ ID NO: 60039 - RNA, 25 nt, Artificial Sequence
  Description of Artificial Sequence: Synthetic oligonucleotide
cagcucacucucccugaggacuggc

SEQ ID NO: 60040 - RNA, 25 nt, Artificial Sequence
  Description of Artificial Sequence: Synthetic oligonucleotide
cuugacaggggcuauggguuugcuu

SEQ ID NO: 60041 - RNA, 25 nt, Artificial Sequence
  Description of Artificial Sequence: Synthetic oligonucleotide
uugguguuguuuuuaaaaaaagaaa

SEQ ID NO: 60042 - RNA, 25 nt, Artificial Sequence
  Description of Artificial Sequence: Synthetic oligonucleotide
aauauauuuuuuugaaaaaacgacu

SEQ ID NO: 60043 - RNA, 25 nt, Artificial Sequence
  Description of Artificial Sequence: Synthetic oligonucleotide
ugcccaucccggguccuuucccuga

SEQ ID NO: 60044 - RNA, 25 nt, Artificial Sequence
  Description of Artificial Sequence: Synthetic oligonucleotide
auggguuggggcaguuaccugguug

SEQ ID NO: 60045 - RNA, 25 nt, Artificial Sequence
  Description of Artificial Sequence: Synthetic oligonucleotide
uggcuggcaauggccuugcugaccu

SEQ ID NO: 60046 - RNA, 25 nt, Artificial Sequence
  Description of Artificial Sequence: Synthetic oligonucleotide
ucgagccgggcccacguggggaccu

SEQ ID NO: 60047 - RNA, 25 nt, Artificial Sequence
  Description of Artificial Sequence: Synthetic oligonucleotide
uuuggagcacagccuacgauccugg

SEQ ID NO: 60048 - RNA, 25 nt, Artificial Sequence
  Description of Artificial Sequence: Synthetic oligonucleotide
gugcaaggccgguggaugcagaggc

SEQ ID NO: 60049 - RNA, 25 nt, Artificial Sequence
  Description of Artificial Sequence: Synthetic oligonucleotide
ccaguccauauaccacccaggccug

SEQ ID NO: 60050 - RNA, 25 nt, Artificial Sequence
  Description of Artificial Sequence: Synthetic oligonucleotide
gcgaggagcgugguccccacccauc

SEQ ID NO: 60051 - RNA, 25 nt, Artificial Sequence
  Description of Artificial Sequence: Synthetic oligonucleotide
ccagcccauaugugcaagugcccuu

SEQ ID NO: 60052 - RNA, 25 nt, Artificial Sequence
  Description of Artificial Sequence: Synthetic oligonucleotide
ugacagagaggcuggucauauccau

SEQ ID NO: 60053 - RNA, 25 nt, Artificial Sequence
  Description of Artificial Sequence: Synthetic oligonucleotide
uggugaccauuuaugggccacaaca

SEQ ID NO: 60054 - RNA, 25 nt, Artificial Sequence
  Description of Artificial Sequence: Synthetic oligonucleotide
agguccccaucugcgcagugaaccc

SEQ ID NO: 60055 - RNA, 25 nt, Artificial Sequence
  Description of Artificial Sequence: Synthetic oligonucleotide
cugugcugagcaccuugcagacgug

SEQ ID NO: 60056 - RNA, 25 nt, Artificial Sequence
  Description of Artificial Sequence: Synthetic oligonucleotide
gaucuugcuucguccugcagcacug

SEQ ID NO: 60057 - RNA, 25 nt, Artificial Sequence
  Description of Artificial Sequence: Synthetic oligonucleotide
gugcggggcaggaaaauccaagagg

SEQ ID NO: 60058 - RNA, 25 nt, Artificial Sequence
  Description of Artificial Sequence: Synthetic oligonucleotide
gaagaaggaucuacggauauccugc

SEQ ID NO: 60059 - RNA, 25 nt, Artificial Sequence
  Description of Artificial Sequence: Synthetic oligonucleotide
cauguccaagccacccgcacccaac

SEQ ID NO: 60060 - RNA, 25 nt, Artificial Sequence
  Description of Artificial Sequence: Synthetic oligonucleotide
ccccacacccccccggaaccuggac

SEQ ID NO: 60061 - RNA, 25 nt, Artificial Sequence
  Description of Artificial Sequence: Synthetic oligonucleotide
cucccggaccuucaucaccauugga

SEQ ID NO: 60062 - RNA, 25 nt, Artificial Sequence
  Description of Artificial Sequence: Synthetic oligonucleotide
agacagaaacuuugagguggaggcu

SEQ ID NO: 60063 - RNA, 25 nt, Artificial Sequence
  Description of Artificial Sequence: Synthetic oligonucleotide
ugaugacuuggugaccaucucagaa

SEQ ID NO: 60064 - RNA, 25 nt, Artificial Sequence
  Description of Artificial Sequence: Synthetic oligonucleotide
acugggccguggagccuauggggug

SEQ ID NO: 60065 - RNA, 25 nt, Artificial Sequence
  Description of Artificial Sequence: Synthetic oligonucleotide
gguagagaaggugcggcacgcccag

SEQ ID NO: 60066 - RNA, 25 nt, Artificial Sequence
  Description of Artificial Sequence: Synthetic oligonucleotide
gagcggcaccaucauggccgugaag

SEQ ID NO: 60067 - RNA, 25 nt, Artificial Sequence
  Description of Artificial Sequence: Synthetic oligonucleotide
gcggauccgggccaccgugaacuca

SEQ ID NO: 60068 - RNA, 25 nt, Artificial Sequence
  Description of Artificial Sequence: Synthetic oligonucleotide
acaggagcagaagcggcugcucaug

SEQ ID NO: 60069 - RNA, 25 nt, Artificial Sequence
  Description of Artificial Sequence: Synthetic oligonucleotide
ggaccuggacaucaacaugcgcacg

SEQ ID NO: 60070 - RNA, 25 nt, Artificial Sequence
  Description of Artificial Sequence: Synthetic oligonucleotide
ggucgacuguuucuacacugucacc

SEQ ID NO: 60071 - RNA, 25 nt, Artificial Sequence
  Description of Artificial Sequence: Synthetic oligonucleotide
cuucuacggggcacuauucagagag

SEQ ID NO: 60072 - RNA, 25 nt, Artificial Sequence
  Description of Artificial Sequence: Synthetic oligonucleotide
gggagacguguggaucugcauggag

SEQ ID NO: 60073 - RNA, 25 nt, Artificial Sequence
  Description of Artificial Sequence: Synthetic oligonucleotide
gcucauggacacauccuuggacaag

SEQ ID NO: 60074 - RNA, 25 nt, Artificial Sequence
  Description of Artificial Sequence: Synthetic oligonucleotide
guucuaccggaaggugcuggauaaa

SEQ ID NO: 60075 - RNA, 25 nt, Artificial Sequence
  Description of Artificial Sequence: Synthetic oligonucleotide
aaacaugacaauuccagaggacauc

SEQ ID NO: 60076 - RNA, 25 nt, Artificial Sequence
  Description of Artificial Sequence: Synthetic oligonucleotide
ccuuggggagauugcugugucuauc

SEQ ID NO: 60077 - RNA, 25 nt, Artificial Sequence
  Description of Artificial Sequence: Synthetic oligonucleotide
cgugcgggcccuggagcaucugcac

SEQ ID NO: 60078 - RNA, 25 nt, Artificial Sequence
  Description of Artificial Sequence: Synthetic oligonucleotide
cagcaagcugucggugauccacaga

SEQ ID NO: 60079 - RNA, 25 nt, Artificial Sequence
  Description of Artificial Sequence: Synthetic oligonucleotide
agaugugaagcccuccaauguccuu

SEQ ID NO: 60080 - RNA, 25 nt, Artificial Sequence
  Description of Artificial Sequence: Synthetic oligonucleotide
uaucaacaaggagggccaugugaag

SEQ ID NO: 60081 - RNA, 25 nt, Artificial Sequence
  Description of Artificial Sequence: Synthetic oligonucleotide
gaugugugacuuuggcaucaguggc

SEQ ID NO: 60082 - RNA, 25 nt, Artificial Sequence
  Description of Artificial Sequence: Synthetic oligonucleotide
cuacuugguggacucuguggccaag

SEQ ID NO: 60083 - RNA, 25 nt, Artificial Sequence
  Description of Artificial Sequence: Synthetic oligonucleotide
gacgauggaugccggcugcaagccc

SEQ ID NO: 60084 - RNA, 25 nt, Artificial Sequence
  Description of Artificial Sequence: Synthetic oligonucleotide
cuacauggccccugagaggaucaac

SEQ ID NO: 60085 - RNA, 25 nt, Artificial Sequence
  Description of Artificial Sequence: Synthetic oligonucleotide
cccagagcugaaccagaagggcuac

SEQ ID NO: 60086 - RNA, 25 nt, Artificial Sequence
  Description of Artificial Sequence: Synthetic oligonucleotide
caaugucaaguccgacgucuggagc

SEQ ID NO: 60087 - RNA, 25 nt, Artificial Sequence
  Description of Artificial Sequence: Synthetic oligonucleotide
ccugggcaucaccaugauugagaug

SEQ ID NO: 60088 - RNA, 25 nt, Artificial Sequence
  Description of Artificial Sequence: Synthetic oligonucleotide
ggccauccugcgguucccuuacgag

SEQ ID NO: 60089 - RNA, 25 nt, Artificial Sequence
  Description of Artificial Sequence: Synthetic oligonucleotide
guccugggggaccccguuccagcag

SEQ ID NO: 60090 - RNA, 25 nt, Artificial Sequence
  Description of Artificial Sequence: Synthetic oligonucleotide
gcugaagcaggugguggaggagccg

SEQ ID NO: 60091 - RNA, 25 nt, Artificial Sequence
  Description of Artificial Sequence: Synthetic oligonucleotide
guccccccagcucccagccgaccgu

SEQ ID NO: 60092 - RNA, 25 nt, Artificial Sequence
  Description of Artificial Sequence: Synthetic oligonucleotide
uuucucccccgaguuuguggacuuc

SEQ ID NO: 60093 - RNA, 25 nt, Artificial Sequence
  Description of Artificial Sequence: Synthetic oligonucleotide
cacugcucagugccugaggaagaac

SEQ ID NO: 60094 - RNA, 25 nt, Artificial Sequence
  Description of Artificial Sequence: Synthetic oligonucleotide
ccccgcagagcguaugagcuaccug

SEQ ID NO: 60095 - RNA, 25 nt, Artificial Sequence
  Description of Artificial Sequence: Synthetic oligonucleotide
ggagcugauggagcaccccuucuuc

SEQ ID NO: 60096 - RNA, 25 nt, Artificial Sequence
  Description of Artificial Sequence: Synthetic oligonucleotide
caccuugcacaaaaccaagaagacg

SEQ ID NO: 60097 - RNA, 25 nt, Artificial Sequence
  Description of Artificial Sequence: Synthetic oligonucleotide
ggacauugcugccuucgugaaggag

SEQ ID NO: 60098 - RNA, 25 nt, Artificial Sequence
  Description of Artificial Sequence: Synthetic oligonucleotide
gauccugggagaagacucauagggg

SEQ ID NO: 60099 - RNA, 25 nt, Artificial Sequence
  Description of Artificial Sequence: Synthetic oligonucleotide
gcugggccucggaccccacuccggc

SEQ ID NO: 60100 - RNA, 25 nt, Artificial Sequence
  Description of Artificial Sequence: Synthetic oligonucleotide
cccuccagagccccacagccccauc

SEQ ID NO: 60101 - RNA, 25 nt, Artificial Sequence
  Description of Artificial Sequence: Synthetic oligonucleotide
cugcgggggcagugcucacccacac

SEQ ID NO: 60102 - RNA, 25 nt, Artificial Sequence
  Description of Artificial Sequence: Synthetic oligonucleotide
ccauaagcuacugccauccuggccc

SEQ ID NO: 60103 - RNA, 25 nt, Artificial Sequence
  Description of Artificial Sequence: Synthetic oligonucleotide
cagggcaucugggaggaaccgaggg

SEQ ID NO: 60104 - RNA, 25 nt, Artificial Sequence
  Description of Artificial Sequence: Synthetic oligonucleotide
gggcugcucccaccuggcucugugg

SEQ ID NO: 60105 - RNA, 25 nt, Artificial Sequence
  Description of Artificial Sequence: Synthetic oligonucleotide
gcgagccauuugucccaagugccaa

SEQ ID NO: 60106 - RNA, 25 nt, Artificial Sequence
  Description of Artificial Sequence: Synthetic oligonucleotide
aagaagcagaccauuggggcuccca

SEQ ID NO: 60107 - RNA, 25 nt, Artificial Sequence
  Description of Artificial Sequence: Synthetic oligonucleotide
agccaggcccuugucggccccacca

SEQ ID NO: 60108 - RNA, 25 nt, Artificial Sequence
  Description of Artificial Sequence: Synthetic oligonucleotide
agugccucucccugcugcuccuagg

SEQ ID NO: 60109 - RNA, 25 nt, Artificial Sequence
  Description of Artificial Sequence: Synthetic oligonucleotide
gacccgucuccagcugcugagaucc

SEQ ID NO: 60110 - RNA, 25 nt, Artificial Sequence
  Description of Artificial Sequence: Synthetic oligonucleotide
cuggacugagggggccuggaugccc

SEQ ID NO: 60111 - RNA, 25 nt, Artificial Sequence
  Description of Artificial Sequence: Synthetic oligonucleotide
cccuguggaugcugcugccccugca

SEQ ID NO: 60112 - RNA, 25 nt, Artificial Sequence
  Description of Artificial Sequence: Synthetic oligonucleotide
acagcaggcugccagugccugggug

SEQ ID NO: 60113 - RNA, 25 nt, Artificial Sequence
  Description of Artificial Sequence: Synthetic oligonucleotide
ggaugggccaccgccuugcccagcc

SEQ ID NO: 60114 - RNA, 25 nt, Artificial Sequence
  Description of Artificial Sequence: Synthetic oligonucleotide
cuggaugccauccaaguuguauauu

SEQ ID NO: 60115 - RNA, 25 nt, Artificial Sequence
  Description of Artificial Sequence: Synthetic oligonucleotide
uuuuuuaaucucucgacugaaugga

SEQ ID NO: 60116 - RNA, 25 nt, Artificial Sequence
  Description of Artificial Sequence: Synthetic oligonucleotide
acuuugcacacuuuggcccagggug

SEQ ID NO: 60117 - RNA, 25 nt, Artificial Sequence
  Description of Artificial Sequence: Synthetic oligonucleotide
ggccacaccucuaucccggcuuugg

SEQ ID NO: 60118 - RNA, 25 nt, Artificial Sequence
  Description of Artificial Sequence: Synthetic oligonucleotide
gugcgggguacacaagaggggauga

SEQ ID NO: 60119 - RNA, 25 nt, Artificial Sequence
  Description of Artificial Sequence: Synthetic oligonucleotide
aguugugugaauaccccaagacucc

SEQ ID NO: 60120 - RNA, 25 nt, Artificial Sequence
  Description of Artificial Sequence: Synthetic oligonucleotide
ccaugagggagaugccaugagccgc

SEQ ID NO: 60121 - RNA, 25 nt, Artificial Sequence
  Description of Artificial Sequence: Synthetic oligonucleotide
cccaaggccuuccccuggcacuggc

SEQ ID NO: 60122 - RNA, 25 nt, Artificial Sequence
  Description of Artificial Sequence: Synthetic oligonucleotide
caaacagggccucugcggagcacac

SEQ ID NO: 60123 - RNA, 25 nt, Artificial Sequence
  Description of Artificial Sequence: Synthetic oligonucleotide
cuggcucacccaguccugcccgcca

SEQ ID NO: 60124 - RNA, 25 nt, Artificial Sequence
  Description of Artificial Sequence: Synthetic oligonucleotide
accguuaucggugucauucaccuuu

SEQ ID NO: 60125 - RNA, 25 nt, Artificial Sequence
  Description of Artificial Sequence: Synthetic oligonucleotide
ucguguuuuuuuuaauuuauccucu

SEQ ID NO: 60126 - RNA, 25 nt, Artificial Sequence
  Description of Artificial Sequence: Synthetic oligonucleotide
uguugauuuuuucuuuugcuuuaug

SEQ ID NO: 60127 - RNA, 25 nt, Artificial Sequence
  Description of Artificial Sequence: Synthetic oligonucleotide
ggguuuggcuuguuuuucuugcaug

SEQ ID NO: 60128 - RNA, 25 nt, Artificial Sequence
  Description of Artificial Sequence: Synthetic oligonucleotide
gguuuggagcugaucgcuucucccc

SEQ ID NO: 60129 - RNA, 25 nt, Artificial Sequence
  Description of Artificial Sequence: Synthetic oligonucleotide
ccacccccuaggguaccagcaggca

SEQ ID NO: 60130 - RNA, 25 nt, Artificial Sequence
  Description of Artificial Sequence: Synthetic oligonucleotide
agagccuugcccucugcucaggcug

SEQ ID NO: 60131 - RNA, 25 nt, Artificial Sequence
  Description of Artificial Sequence: Synthetic oligonucleotide
gggguccagugggaggggcccaaga

SEQ ID NO: 60132 - RNA, 25 nt, Artificial Sequence
  Description of Artificial Sequence: Synthetic oligonucleotide
aucucugcucagagaagugcagggg

SEQ ID NO: 60133 - RNA, 25 nt, Artificial Sequence
  Description of Artificial Sequence: Synthetic oligonucleotide
ggagccuuccagcucacucucccug

SEQ ID NO: 60134 - RNA, 25 nt, Artificial Sequence
  Description of Artificial Sequence: Synthetic oligonucleotide
gaggacuggcuugacaggggcuaug

SEQ ID NO: 60135 - RNA, 25 nt, Artificial Sequence
  Description of Artificial Sequence: Synthetic oligonucleotide
ggguuugcuuugguguuguuuuuaa

SEQ ID NO: 60136 - RNA, 25 nt, Artificial Sequence
  Description of Artificial Sequence: Synthetic oligonucleotide
aaaaaagaaaauauauuuuuuugaa

SEQ ID NO: 60137 - RNA, 25 nt, Artificial Sequence
  Description of Artificial Sequence: Synthetic oligonucleotide
aaaaacgacugcccaucccgggucc

SEQ ID NO: 60138 - RNA, 25 nt, Artificial Sequence
  Description of Artificial Sequence: Synthetic oligonucleotide
cuuucccugauggguuggggcaguu

SEQ ID NO: 60139 - RNA, 25 nt, Artificial Sequence
  Description of Artificial Sequence: Synthetic oligonucleotide
uaccugguugcuguuuuaauuaaaa

SEQ ID NO: 60140 - RNA, 3752 nt, Homo sapiens
ggccgugcgagaggccgagcuugcugcauugcagccgccgcggcgccgcucggcucuucacucccaacaauggcggcuccgagcccgagcggcggcggcggcuccgggggcggcagcggcagcggcacccccggccccguaggguccccggcgccaggccacccggccgucagcagcaugcaggguaaacgcaaagcacugaaguugaauuuugcaaauccaccuuucaaaucuacagcaagguuuacucugaaucccaauccuacaggaguucaaaacccacacauagagagacugagaacacacagcauugagucaucaggaaaacugaagaucuccccugaacaacacugggauuucacugcagaggacuugaaagaccuuggagaaauuggacgaggagcuuaugguucugucaacaaaaugguccacaaaccaagugggcaaauaauggcaguuaaaagaauucggucaacaguggaugaaaaagaacaaaaacaacuucuuauggauuuggauguaguaaugcggaguagugauugcccauacauuguucaguuuuauggugcacucuucagagagggugacuguuggaucuguauggaacucaugucuaccucguuugauaaguuuuacaaauauguauauaguguauuagaugauguuauuccagaagaaauuuuaggcaaaaucacuuuagcaacugugaaagcacuaaaccacuuaaaagaaaacuugaaaauuauucacagagauaucaaaccuuccaauauucuucuggacagaaguggaaauauuaagcucugugacuucggcaucaguggacagcuuguggacucuauugccaagacaagagaugcuggcuguaggccauacauggcaccugaaagaauagacccaagcgcaucacgacaaggauaugauguccgcucugaugucuggaguuuggggaucacauuguaugaguuggccacaggccgauuuccuuauccaaaguggaauaguguauuugaucaacuaacacaagucgugaaaggagauccuccgcagcugaguaauucugaggaaagggaauucuccccgaguuucaucaacuuugucaacuugugccuuacgaaggaugaauccaaaaggccaaaguauaaagagcuucugaaacaucccuuuauuuugauguaugaagaacgugccguugaggucgcaugcuauguuuguaaaauccuggaucaaaugccagcuacucccagcucucccauguaugucgauugauaucgcugcuacaucagacucuagaaaaaagggcugagaggaagcaagacguaaagaauuuucaucccguaucacaguguuuuuauugcucgcccagacaccaugugcaauaagauugguguucguuuccaucaugucuguauacuccugucaccuagaacgugcauccuuguaauaccugauugaucacacaguguuagugcuggucagagagaccucauccugcucuuuugugaugaacauauucaugaaauguggaagucaguacgaucaaguuguugacugugauuagaucacaucuuaaauucauuucuagacucaaaaccuggagaugcagcuacuggaaugguguuuugucagacuuccaaauccuggaaggacacagugaugaauguacuaugucugaacauagaaacucgggcuugagugagaagagcuugcacagccaacgagacacauugccuucuggagcugggagacaaaggaggaauuuacuuucuucaccaagugcaauagauuacugaugugauauucuguugcuuuacaguuacaguugauguuuggggaucgaugugcucagccaaauuuccuguuugaaauaucauguuaaauuagaaugaauuuaucuuuaccaaaaaccauguugcguucaaagaggugaacauuaaaauauagagacaggacagaauguguucuuuucuccuuuaccaguccuauuuuucaaugggaagacucaggagucugccacuugucaaagaaggugcugauccuaagaauuuuucauucucagaauucggugugcugccaacuugauguuccaccugccacaaaccaccaggacugaaagaagaaaacaguacagaaggcaaaguuuacagauguuuuuaauucuaguauuuuaucuggaacaacuuguagcagcuauauauuuccccuuggucccaagccugauacuuuagccaucauaacucacuaacagggagaaguagcuaguagcaaugugccuugauugauuagauaaagauuucuaguaggcagcaaaagaccaaaucucaguuguuugcuucuugccaucacugguccaggucuucaguuuccgaaucucuuucccuuccccuguggucuauugucgcuaugugacuugcgcuuaauccaauauuuugccuuuuuucuauaucaaaaaaccuuuacaguuagcagggauguuccuuaccaaggauuuuuagccccaaaucucucauauucgcuaguguuuaaaaggcuaagaauaguggggcccagccgaugugguaggugauaaagaggcaucuuuucuagagacacauuggaccagaugaggauccgaaacggcagccuuuacguucaucaccugcuagaaccucucguaguccaucaccauuucuuggcauuggaauucuacuggaaaaaaauacaaaaagcaaaacaaaacccucagcacuguuacaagaggccauuuaaguaucuugugcuucuucacuuacccauuagccagguucucauuagguuuugcuugggccucccuggcacugaaccuuaggcuuuguaugacagugaagcagcacugugagugguucaagcacacuggaauauaaaacagucauggccugagaugcaggugaugccauuacagaaccaaaucguggcacguauugcugugucuccucucagagugacagucauaaauacugucaaacaauaaagggagaauggugcuguuuaaagucacaucccuguaaauugcagaauucaaaagugauuaucucuuugaucuacuugccucauuucccuaucuucucccccacgguauccuaaacuuuagacuucccacuguucugaaaggagacauugcucuaugucugccuucgaccacagcaagccaucauccuccauugcucccggggacucaagaggaaucuguuucucugcugucaacuucccaucuggcucagcauagggucacuuugccauuaugcaaauggagauaaaagcaauucugacuguccaggagcuaaucugaccguucuauuguguggaugaccacauaagaaggcaauuuuaguguauuaaucauagauuauuauaaacuauaaacuuaagggcaaggaguuuauuacaauguaucuuuauuaaaacaaaaggguguauaguguucacaaacugugaaaauaguguaagaacuguacauugugagcucugguuauuuuucucuuguaccauagaaaaauguauaaaaauuaucaaaaagcuaaugugcagggauauugccuuauuugucuguaaaaaauggagcucaguaacauaacugcuucuuggagcuuuggaauauuuuauccuguauucuuguuugaauuccuccucuauuuaagauauauacauggaaucgaaguguuuauguaauaguucuauccuuuugccugcaggucaguuguaauaaaucuaggaugugaugaugaaaaaaaaaa

SEQ ID NO: 60141 - RNA, 19 nt, Artificial Sequence
  Description of Artificial Sequence: Synthetic oligonucleotide
ggccgugcgagaggccgag

SEQ ID NO: 60142 - RNA, 19 nt, Artificial Sequence
  Description of Artificial Sequence: Synthetic oligonucleotide
gcuugcugcauugcagccg

SEQ ID NO: 60143 - RNA, 19 nt, Artificial Sequence
  Description of Artificial Sequence: Synthetic oligonucleotide
gccgcggcgccgcucggcu

SEQ ID NO: 60144 - RNA, 19 nt, Artificial Sequence
  Description of Artificial Sequence: Synthetic oligonucleotide
ucuucacucccaacaaugg

SEQ ID NO: 60145 - RNA, 19 nt, Artificial Sequence
  Description of Artificial Sequence: Synthetic oligonucleotide
gcggcuccgagcccgagcg

SEQ ID NO: 60146 - RNA, 19 nt, Artificial Sequence
  Description of Artificial Sequence: Synthetic oligonucleotide
ggcggcggcggcuccgggg

SEQ ID NO: 60147 - RNA, 19 nt, Artificial Sequence
  Description of Artificial Sequence: Synthetic oligonucleotide
ggcggcagcggcagcggca

SEQ ID NO: 60148 - RNA, 19 nt, Artificial Sequence
  Description of Artificial Sequence: Synthetic oligonucleotide
acccccggccccguagggu

SEQ ID NO: 60149 - RNA, 19 nt, Artificial Sequence
  Description of Artificial Sequence: Synthetic oligonucleotide
uccccggcgccaggccacc

SEQ ID NO: 60150 - RNA, 19 nt, Artificial Sequence
  Description of Artificial Sequence: Synthetic oligonucleotide
ccggccgucagcagcaugc

SEQ ID NO: 60151 - RNA, 19 nt, Artificial Sequence
  Description of Artificial Sequence: Synthetic oligonucleotide
caggguaaacgcaaagcac

SEQ ID NO: 60152 - RNA, 19 nt, Artificial Sequence
  Description of Artificial Sequence: Synthetic oligonucleotide
cugaaguugaauuuugcaa

SEQ ID NO: 60153 - RNA, 19 nt, Artificial Sequence
  Description of Artificial Sequence: Synthetic oligonucleotide
aauccaccuuucaaaucua

SEQ ID NO: 60154 - RNA, 19 nt, Artificial Sequence
  Description of Artificial Sequence: Synthetic oligonucleotide
acagcaagguuuacucuga

SEQ ID NO: 60155 - RNA, 19 nt, Artificial Sequence
  Description of Artificial Sequence: Synthetic oligonucleotide
aaucccaauccuacaggag

SEQ ID NO: 60156 - RNA, 19 nt, Artificial Sequence
  Description of Artificial Sequence: Synthetic oligonucleotide
guucaaaacccacacauag

SEQ ID NO: 60157 - RNA, 19 nt, Artificial Sequence
  Description of Artificial Sequence: Synthetic oligonucleotide
gagagacugagaacacaca

SEQ ID NO: 60158 - RNA, 19 nt, Artificial Sequence
  Description of Artificial Sequence: Synthetic oligonucleotide
agcauugagucaucaggaa

SEQ ID NO: 60159 - RNA, 19 nt, Artificial Sequence
  Description of Artificial Sequence: Synthetic oligonucleotide
aaacugaagaucuccccug

SEQ ID NO: 60160 - RNA, 19 nt, Artificial Sequence
  Description of Artificial Sequence: Synthetic oligonucleotide
gaacaacacugggauuuca

SEQ ID NO: 60161 - RNA, 19 nt, Artificial Sequence
  Description of Artificial Sequence: Synthetic oligonucleotide
acugcagaggacuugaaag

SEQ ID NO: 60162 - RNA, 19 nt, Artificial Sequence
  Description of Artificial Sequence: Synthetic oligonucleotide
gaccuuggagaaauuggac

SEQ ID NO: 60163 - RNA, 19 nt, Artificial Sequence
  Description of Artificial Sequence: Synthetic oligonucleotide
cgaggagcuuaugguucug

SEQ ID NO: 60164 - RNA, 19 nt, Artificial Sequence
  Description of Artificial Sequence: Synthetic oligonucleotide
gucaacaaaaugguccaca

SEQ ID NO: 60165 - RNA, 19 nt, Artificial Sequence
  Description of Artificial Sequence: Synthetic oligonucleotide
aaaccaagugggcaaauaa

SEQ ID NO: 60166 - RNA, 19 nt, Artificial Sequence
  Description of Artificial Sequence: Synthetic oligonucleotide
auggcaguuaaaagaauuc

SEQ ID NO: 60167 - RNA, 19 nt, Artificial Sequence
  Description of Artificial Sequence: Synthetic oligonucleotide
cggucaacaguggaugaaa

SEQ ID NO: 60168 - RNA, 19 nt, Artificial Sequence
  Description of Artificial Sequence: Synthetic oligonucleotide
aaagaacaaaaacaacuuc

SEQ ID NO: 60169 - RNA, 19 nt, Artificial Sequence
  Description of Artificial Sequence: Synthetic oligonucleotide
cuuauggauuuggauguag

SEQ ID NO: 60170 - RNA, 19 nt, Artificial Sequence
  Description of Artificial Sequence: Synthetic oligonucleotide
guaaugcggaguagugauu

SEQ ID NO: 60171 - RNA, 19 nt, Artificial Sequence
  Description of Artificial Sequence: Synthetic oligonucleotide
ugcccauacauuguucagu

SEQ ID NO: 60172 - RNA, 19 nt, Artificial Sequence
  Description of Artificial Sequence: Synthetic oligonucleotide
uuuuauggugcacucuuca

SEQ ID NO: 60173 - RNA, 19 nt, Artificial Sequence
  Description of Artificial Sequence: Synthetic oligonucleotide
agagagggugacuguugga

SEQ ID NO: 60174 - RNA, 19 nt, Artificial Sequence
  Description of Artificial Sequence: Synthetic oligonucleotide
aucuguauggaacucaugu

SEQ ID NO: 60175 - RNA, 19 nt, Artificial Sequence
  Description of Artificial Sequence: Synthetic oligonucleotide
ucuaccucguuugauaagu

SEQ ID NO: 60176 - RNA, 19 nt, Artificial Sequence
  Description of Artificial Sequence: Synthetic oligonucleotide
uuuuacaaauauguauaua

SEQ ID NO: 60177 - RNA, 19 nt, Artificial Sequence
  Description of Artificial Sequence: Synthetic oligonucleotide
aguguauuagaugauguua

SEQ ID NO: 60178 - RNA, 19 nt, Artificial Sequence
  Description of Artificial Sequence: Synthetic oligonucleotide
auuccagaagaaauuuuag

SEQ ID NO: 60179 - RNA, 19 nt, Artificial Sequence
  Description of Artificial Sequence: Synthetic oligonucleotide
ggcaaaaucacuuuagcaa

SEQ ID NO: 60180 - RNA, 19 nt, Artificial Sequence
  Description of Artificial Sequence: Synthetic oligonucleotide
acugugaaagcacuaaacc

SEQ ID NO: 60181 - RNA, 19 nt, Artificial Sequence
  Description of Artificial Sequence: Synthetic oligonucleotide
cacuuaaaagaaaacuuga

SEQ ID NO: 60182 - RNA, 19 nt, Artificial Sequence
  Description of Artificial Sequence: Synthetic oligonucleotide
aaaauuauucacagagaua

SEQ ID NO: 60183 - RNA, 19 nt, Artificial Sequence
  Description of Artificial Sequence: Synthetic oligonucleotide
aucaaaccuuccaauauuc

SEQ ID NO: 60184 - RNA, 19 nt, Artificial Sequence
  Description of Artificial Sequence: Synthetic oligonucleotide
cuucuggacagaaguggaa

SEQ ID NO: 60185 - RNA, 19 nt, Artificial Sequence
  Description of Artificial Sequence: Synthetic oligonucleotide
aauauuaagcucugugacu

SEQ ID NO: 60186 - RNA, 19 nt, Artificial Sequence
  Description of Artificial Sequence: Synthetic oligonucleotide
uucggcaucaguggacagc

SEQ ID NO: 60187 - RNA, 19 nt, Artificial Sequence
  Description of Artificial Sequence: Synthetic oligonucleotide
cuuguggacucuauugcca

SEQ ID NO: 60188 - RNA, 19 nt, Artificial Sequence
  Description of Artificial Sequence: Synthetic oligonucleotide
aagacaagagaugcuggcu

SEQ ID NO: 60189 - RNA, 19 nt, Artificial Sequence
  Description of Artificial Sequence: Synthetic oligonucleotide
uguaggccauacauggcac

SEQ ID NO: 60190 - RNA, 19 nt, Artificial Sequence
  Description of Artificial Sequence: Synthetic oligonucleotide
ccugaaagaauagacccaa

SEQ ID NO: 60191 - RNA, 19 nt, Artificial Sequence
  Description of Artificial Sequence: Synthetic oligonucleotide
agcgcaucacgacaaggau

SEQ ID NO: 60192 - RNA, 19 nt, Artificial Sequence
  Description of Artificial Sequence: Synthetic oligonucleotide
uaugauguccgcucugaug

SEQ ID NO: 60193 - RNA, 19 nt, Artificial Sequence
  Description of Artificial Sequence: Synthetic oligonucleotide
gucuggaguuuggggauca

SEQ ID NO: 60194 - RNA, 19 nt, Artificial Sequence
  Description of Artificial Sequence: Synthetic oligonucleotide
acauuguaugaguuggcca

SEQ ID NO: 60195 - RNA, 19 nt, Artificial Sequence
  Description of Artificial Sequence: Synthetic oligonucleotide
acaggccgauuuccuuauc

SEQ ID NO: 60196 - RNA, 19 nt, Artificial Sequence
  Description of Artificial Sequence: Synthetic oligonucleotide
ccaaaguggaauaguguau

SEQ ID NO: 60197 - RNA, 19 nt, Artificial Sequence
  Description of Artificial Sequence: Synthetic oligonucleotide
uuugaucaacuaacacaag

SEQ ID NO: 60198 - RNA, 19 nt, Artificial Sequence
  Description of Artificial Sequence: Synthetic oligonucleotide
gucgugaaaggagauccuc

SEQ ID NO: 60199 - RNA, 19 nt, Artificial Sequence
  Description of Artificial Sequence: Synthetic oligonucleotide
ccgcagcugaguaauucug

SEQ ID NO: 60200 - RNA, 19 nt, Artificial Sequence
  Description of Artificial Sequence: Synthetic oligonucleotide
gaggaaagggaauucuccc

SEQ ID NO: 60201 - RNA, 19 nt, Artificial Sequence
  Description of Artificial Sequence: Synthetic oligonucleotide
ccgaguuucaucaacuuug

SEQ ID NO: 60202 - RNA, 19 nt, Artificial Sequence
  Description of Artificial Sequence: Synthetic oligonucleotide
gucaacuugugccuuacga

SEQ ID NO: 60203 - RNA, 19 nt, Artificial Sequence
  Description of Artificial Sequence: Synthetic oligonucleotide
aaggaugaauccaaaaggc

SEQ ID NO: 60204 - RNA, 19 nt, Artificial Sequence
  Description of Artificial Sequence: Synthetic oligonucleotide
ccaaaguauaaagagcuuc

SEQ ID NO: 60205 - RNA, 19 nt, Artificial Sequence
  Description of Artificial Sequence: Synthetic oligonucleotide
cugaaacaucccuuuauuu

SEQ ID NO: 60206 - RNA, 19 nt, Artificial Sequence
  Description of Artificial Sequence: Synthetic oligonucleotide
uugauguaugaagaacgug

SEQ ID NO: 60207 - RNA, 19 nt, Artificial Sequence
  Description of Artificial Sequence: Synthetic oligonucleotide
gccguugaggucgcaugcu

SEQ ID NO: 60208 - RNA, 19 nt, Artificial Sequence
  Description of Artificial Sequence: Synthetic oligonucleotide
uauguuuguaaaauccugg

SEQ ID NO: 60209 - RNA, 19 nt, Artificial Sequence
  Description of Artificial Sequence: Synthetic oligonucleotide
gaucaaaugccagcuacuc

SEQ ID NO: 60210 - RNA, 19 nt, Artificial Sequence
  Description of Artificial Sequence: Synthetic oligonucleotide
cccagcucucccauguaug

SEQ ID NO: 60211 - RNA, 19 nt, Artificial Sequence
  Description of Artificial Sequence: Synthetic oligonucleotide
gucgauugauaucgcugcu

SEQ ID NO: 60212 - RNA, 19 nt, Artificial Sequence
  Description of Artificial Sequence: Synthetic oligonucleotide
uacaucagacucuagaaaa

SEQ ID NO: 60213 - RNA, 19 nt, Artificial Sequence
  Description of Artificial Sequence: Synthetic oligonucleotide
aaagggcugagaggaagca

SEQ ID NO: 60214 - RNA, 19 nt, Artificial Sequence
  Description of Artificial Sequence: Synthetic oligonucleotide
aagacguaaagaauuuuca

SEQ ID NO: 60215 - RNA, 19 nt, Artificial Sequence
  Description of Artificial Sequence: Synthetic oligonucleotide
aucccguaucacaguguuu

SEQ ID NO: 60216 - RNA, 19 nt, Artificial Sequence
  Description of Artificial Sequence: Synthetic oligonucleotide
uuuauugcucgcccagaca

SEQ ID NO: 60217 - RNA, 19 nt, Artificial Sequence
  Description of Artificial Sequence: Synthetic oligonucleotide
accaugugcaauaagauug

SEQ ID NO: 60218 - RNA, 19 nt, Artificial Sequence
  Description of Artificial Sequence: Synthetic oligonucleotide
gguguucguuuccaucaug

SEQ ID NO: 60219 - RNA, 19 nt, Artificial Sequence
  Description of Artificial Sequence: Synthetic oligonucleotide
gucuguauacuccugucac

SEQ ID NO: 60220 - RNA, 19 nt, Artificial Sequence
  Description of Artificial Sequence: Synthetic oligonucleotide
ccuagaacgugcauccuug

SEQ ID NO: 60221 - RNA, 19 nt, Artificial Sequence
  Description of Artificial Sequence: Synthetic oligonucleotide
guaauaccugauugaucac

SEQ ID NO: 60222 - RNA, 19 nt, Artificial Sequence
  Description of Artificial Sequence: Synthetic oligonucleotide
cacaguguuagugcugguc

SEQ ID NO: 60223 - RNA, 19 nt, Artificial Sequence
  Description of Artificial Sequence: Synthetic oligonucleotide
cagagagaccucauccugc

SEQ ID NO: 60224 - RNA, 19 nt, Artificial Sequence
  Description of Artificial Sequence: Synthetic oligonucleotide
cucuuuugugaugaacaua

SEQ ID NO: 60225 - RNA, 19 nt, Artificial Sequence
  Description of Artificial Sequence: Synthetic oligonucleotide
auucaugaaauguggaagu

SEQ ID NO: 60226 - RNA, 19 nt, Artificial Sequence
  Description of Artificial Sequence: Synthetic oligonucleotide
ucaguacgaucaaguuguu

SEQ ID NO: 60227 - RNA, 19 nt, Artificial Sequence
  Description of Artificial Sequence: Synthetic oligonucleotide
ugacugugauuagaucaca

SEQ ID NO: 60228 - RNA, 19 nt, Artificial Sequence
  Description of Artificial Sequence: Synthetic oligonucleotide
aucuuaaauucauuucuag

SEQ ID NO: 60229 - RNA, 19 nt, Artificial Sequence
  Description of Artificial Sequence: Synthetic oligonucleotide
gacucaaaaccuggagaug

SEQ ID NO: 60230 - RNA, 19 nt, Artificial Sequence
  Description of Artificial Sequence: Synthetic oligonucleotide
gcagcuacuggaauggugu

SEQ ID NO: 60231 - RNA, 19 nt, Artificial Sequence
  Description of Artificial Sequence: Synthetic oligonucleotide
uuuugucagacuuccaaau

SEQ ID NO: 60232 - RNA, 19 nt, Artificial Sequence
  Description of Artificial Sequence: Synthetic oligonucleotide
uccuggaaggacacaguga

SEQ ID NO: 60233 - RNA, 19 nt, Artificial Sequence
  Description of Artificial Sequence: Synthetic oligonucleotide
augaauguacuaugucuga

SEQ ID NO: 60234 - RNA, 19 nt, Artificial Sequence
  Description of Artificial Sequence: Synthetic oligonucleotide
aacauagaaacucgggcuu

SEQ ID NO: 60235 - RNA, 19 nt, Artificial Sequence
  Description of Artificial Sequence: Synthetic oligonucleotide
ugagugagaagagcuugca

SEQ ID NO: 60236 - RNA, 19 nt, Artificial Sequence
  Description of Artificial Sequence: Synthetic oligonucleotide
acagccaacgagacacauu

SEQ ID NO: 60237 - RNA, 19 nt, Artificial Sequence
  Description of Artificial Sequence: Synthetic oligonucleotide
ugccuucuggagcugggag

SEQ ID NO: 60238 - RNA, 19 nt, Artificial Sequence
  Description of Artificial Sequence: Synthetic oligonucleotide
gacaaaggaggaauuuacu

SEQ ID NO: 60239 - RNA, 19 nt, Artificial Sequence
  Description of Artificial Sequence: Synthetic oligonucleotide
uuucuucaccaagugcaau

SEQ ID NO: 60240 - RNA, 19 nt, Artificial Sequence
  Description of Artificial Sequence: Synthetic oligonucleotide
uagauuacugaugugauau

SEQ ID NO: 60241 - RNA, 19 nt, Artificial Sequence
  Description of Artificial Sequence: Synthetic oligonucleotide
uucuguugcuuuacaguua

SEQ ID NO: 60242 - RNA, 19 nt, Artificial Sequence
  Description of Artificial Sequence: Synthetic oligonucleotide
acaguugauguuuggggau

SEQ ID NO: 60243 - RNA, 19 nt, Artificial Sequence
  Description of Artificial Sequence: Synthetic oligonucleotide
ucgaugugcucagccaaau

SEQ ID NO: 60244 - RNA, 19 nt, Artificial Sequence
  Description of Artificial Sequence: Synthetic oligonucleotide
uuuccuguuugaaauauca

SEQ ID NO: 60245 - RNA, 19 nt, Artificial Sequence
  Description of Artificial Sequence: Synthetic oligonucleotide
auguuaaauuagaaugaau

SEQ ID NO: 60246 - RNA, 19 nt, Artificial Sequence
  Description of Artificial Sequence: Synthetic oligonucleotide
uuuaucuuuaccaaaaacc

SEQ ID NO: 60247 - RNA, 19 nt, Artificial Sequence
  Description of Artificial Sequence: Synthetic oligonucleotide
cauguugcguucaaagagg

SEQ ID NO: 60248 - RNA, 19 nt, Artificial Sequence
  Description of Artificial Sequence: Synthetic oligonucleotide
gugaacauuaaaauauaga

SEQ ID NO: 60249 - RNA, 19 nt, Artificial Sequence
  Description of Artificial Sequence: Synthetic oligonucleotide
agacaggacagaauguguu

SEQ ID NO: 60250 - RNA, 19 nt, Artificial Sequence
  Description of Artificial Sequence: Synthetic oligonucleotide
ucuuuucuccuuuaccagu

SEQ ID NO: 60251 - RNA, 19 nt, Artificial Sequence
  Description of Artificial Sequence: Synthetic oligonucleotide
uccuauuuuucaaugggaa

SEQ ID NO: 60252 - RNA, 19 nt, Artificial Sequence
  Description of Artificial Sequence: Synthetic oligonucleotide
agacucaggagucugccac

SEQ ID NO: 60253 - RNA, 19 nt, Artificial Sequence
  Description of Artificial Sequence: Synthetic oligonucleotide
cuugucaaagaaggugcug

SEQ ID NO: 60254 - RNA, 19 nt, Artificial Sequence
  Description of Artificial Sequence: Synthetic oligonucleotide
gauccuaagaauuuuucau

SEQ ID NO: 60255 - RNA, 19 nt, Artificial Sequence
  Description of Artificial Sequence: Synthetic oligonucleotide
uucucagaauucggugugc

SEQ ID NO: 60256 - RNA, 19 nt, Artificial Sequence
  Description of Artificial Sequence: Synthetic oligonucleotide
cugccaacuugauguucca

SEQ ID NO: 60257 - RNA, 19 nt, Artificial Sequence
  Description of Artificial Sequence: Synthetic oligonucleotide
accugccacaaaccaccag

SEQ ID NO: 60258 - RNA, 19 nt, Artificial Sequence
  Description of Artificial Sequence: Synthetic oligonucleotide
ggacugaaagaagaaaaca

SEQ ID NO: 60259 - RNA, 19 nt, Artificial Sequence
  Description of Artificial Sequence: Synthetic oligonucleotide
aguacagaaggcaaaguuu

SEQ ID NO: 60260 - RNA, 19 nt, Artificial Sequence
  Description of Artificial Sequence: Synthetic oligonucleotide
uacagauguuuuuaauucu

SEQ ID NO: 60261 - RNA, 19 nt, Artificial Sequence
  Description of Artificial Sequence: Synthetic oligonucleotide
uaguauuuuaucuggaaca

SEQ ID NO: 60262 - RNA, 19 nt, Artificial Sequence
  Description of Artificial Sequence: Synthetic oligonucleotide
aacuuguagcagcuauaua

SEQ ID NO: 60263 - RNA, 19 nt, Artificial Sequence
  Description of Artificial Sequence: Synthetic oligonucleotide
auuuccccuuggucccaag

SEQ ID NO: 60264 - RNA, 19 nt, Artificial Sequence
  Description of Artificial Sequence: Synthetic oligonucleotide
gccugauacuuuagccauc

SEQ ID NO: 60265 - RNA, 19 nt, Artificial Sequence
  Description of Artificial Sequence: Synthetic oligonucleotide
cauaacucacuaacaggga

SEQ ID NO: 60266 - RNA, 19 nt, Artificial Sequence
  Description of Artificial Sequence: Synthetic oligonucleotide
agaaguagcuaguagcaau

SEQ ID NO: 60267 - RNA, 19 nt, Artificial Sequence
  Description of Artificial Sequence: Synthetic oligonucleotide
ugugccuugauugauuaga

SEQ ID NO: 60268 - RNA, 19 nt, Artificial Sequence
  Description of Artificial Sequence: Synthetic oligonucleotide
auaaagauuucuaguaggc

SEQ ID NO: 60269 - RNA, 19 nt, Artificial Sequence
  Description of Artificial Sequence: Synthetic oligonucleotide
cagcaaaagaccaaaucuc

SEQ ID NO: 60270 - RNA, 19 nt, Artificial Sequence
  Description of Artificial Sequence: Synthetic oligonucleotide
caguuguuugcuucuugcc

SEQ ID NO: 60271 - RNA, 19 nt, Artificial Sequence
  Description of Artificial Sequence: Synthetic oligonucleotide
caucacugguccaggucuu

SEQ ID NO: 60272 - RNA, 19 nt, Artificial Sequence
  Description of Artificial Sequence: Synthetic oligonucleotide
ucaguuuccgaaucucuuu

SEQ ID NO: 60273 - RNA, 19 nt, Artificial Sequence
  Description of Artificial Sequence: Synthetic oligonucleotide
ucccuuccccuguggucua

SEQ ID NO: 60274 - RNA, 19 nt, Artificial Sequence
  Description of Artificial Sequence: Synthetic oligonucleotide
auugucgcuaugugacuug

SEQ ID NO: 60275 - RNA, 19 nt, Artificial Sequence
  Description of Artificial Sequence: Synthetic oligonucleotide
gcgcuuaauccaauauuuu

SEQ ID NO: 60276 - RNA, 19 nt, Artificial Sequence
  Description of Artificial Sequence: Synthetic oligonucleotide
ugccuuuuuucuauaucaa

SEQ ID NO: 60277 - RNA, 19 nt, Artificial Sequence
  Description of Artificial Sequence: Synthetic oligonucleotide
aaaaaccuuuacaguuagc

SEQ ID NO: 60278 - RNA, 19 nt, Artificial Sequence
  Description of Artificial Sequence: Synthetic oligonucleotide
cagggauguuccuuaccaa

SEQ ID NO: 60279 - RNA, 19 nt, Artificial Sequence
  Description of Artificial Sequence: Synthetic oligonucleotide
aggauuuuuagccccaaau

SEQ ID NO: 60280 - RNA, 19 nt, Artificial Sequence
  Description of Artificial Sequence: Synthetic oligonucleotide
ucucucauauucgcuagug

SEQ ID NO: 60281 - RNA, 19 nt, Artificial Sequence
  Description of Artificial Sequence: Synthetic oligonucleotide
guuuaaaaggcuaagaaua

SEQ ID NO: 60282 - RNA, 19 nt, Artificial Sequence
  Description of Artificial Sequence: Synthetic oligonucleotide
aguggggcccagccgaugu

SEQ ID NO: 60283 - RNA, 19 nt, Artificial Sequence
  Description of Artificial Sequence: Synthetic oligonucleotide
ugguaggugauaaagaggc

SEQ ID NO: 60284 - RNA, 19 nt, Artificial Sequence
  Description of Artificial Sequence: Synthetic oligonucleotide
caucuuuucuagagacaca

SEQ ID NO: 60285 - RNA, 19 nt, Artificial Sequence
  Description of Artificial Sequence: Synthetic oligonucleotide
auuggaccagaugaggauc

SEQ ID NO: 60286 - RNA, 19 nt, Artificial Sequence
  Description of Artificial Sequence: Synthetic oligonucleotide
ccgaaacggcagccuuuac

SEQ ID NO: 60287 - RNA, 19 nt, Artificial Sequence
  Description of Artificial Sequence: Synthetic oligonucleotide
cguucaucaccugcuagaa

SEQ ID NO: 60288 - RNA, 19 nt, Artificial Sequence
  Description of Artificial Sequence: Synthetic oligonucleotide
accucucguaguccaucac

SEQ ID NO: 60289 - RNA, 19 nt, Artificial Sequence
  Description of Artificial Sequence: Synthetic oligonucleotide
ccauuucuuggcauuggaa

SEQ ID NO: 60290 - RNA, 19 nt, Artificial Sequence
  Description of Artificial Sequence: Synthetic oligonucleotide
auucuacuggaaaaaaaua

SEQ ID NO: 60291 - RNA, 19 nt, Artificial Sequence
  Description of Artificial Sequence: Synthetic oligonucleotide
acaaaaagcaaaacaaaac

SEQ ID NO: 60292 - RNA, 19 nt, Artificial Sequence
  Description of Artificial Sequence: Synthetic oligonucleotide
cccucagcacuguuacaag

SEQ ID NO: 60293 - RNA, 19 nt, Artificial Sequence
  Description of Artificial Sequence: Synthetic oligonucleotide
gaggccauuuaaguaucuu

SEQ ID NO: 60294 - RNA, 19 nt, Artificial Sequence
  Description of Artificial Sequence: Synthetic oligonucleotide
ugugcuucuucacuuaccc

SEQ ID NO: 60295 - RNA, 19 nt, Artificial Sequence
  Description of Artificial Sequence: Synthetic oligonucleotide
cauuagccagguucucauu

SEQ ID NO: 60296 - RNA, 19 nt, Artificial Sequence
  Description of Artificial Sequence: Synthetic oligonucleotide
uagguuuugcuugggccuc

SEQ ID NO: 60297 - RNA, 19 nt, Artificial Sequence
  Description of Artificial Sequence: Synthetic oligonucleotide
cccuggcacugaaccuuag

SEQ ID NO: 60298 - RNA, 19 nt, Artificial Sequence
  Description of Artificial Sequence: Synthetic oligonucleotide
ggcuuuguaugacagugaa

SEQ ID NO: 60299 - RNA, 19 nt, Artificial Sequence
  Description of Artificial Sequence: Synthetic oligonucleotide
agcagcacugugagugguu

SEQ ID NO: 60300 - RNA, 19 nt, Artificial Sequence
  Description of Artificial Sequence: Synthetic oligonucleotide
ucaagcacacuggaauaua

SEQ ID NO: 60301 - RNA, 19 nt, Artificial Sequence
  Description of Artificial Sequence: Synthetic oligonucleotide
aaaacagucauggccugag

SEQ ID NO: 60302 - RNA, 19 nt, Artificial Sequence
  Description of Artificial Sequence: Synthetic oligonucleotide
gaugcaggugaugccauua

SEQ ID NO: 60303 - RNA, 19 nt, Artificial Sequence
  Description of Artificial Sequence: Synthetic oligonucleotide
acagaaccaaaucguggca

SEQ ID NO: 60304 - RNA, 19 nt, Artificial Sequence
  Description of Artificial Sequence: Synthetic oligonucleotide
acguauugcugugucuccu

SEQ ID NO: 60305 - RNA, 19 nt, Artificial Sequence
  Description of Artificial Sequence: Synthetic oligonucleotide
ucucagagugacagucaua

SEQ ID NO: 60306 - RNA, 19 nt, Artificial Sequence
  Description of Artificial Sequence: Synthetic oligonucleotide
aaauacugucaaacaauaa

SEQ ID NO: 60307 - RNA, 19 nt, Artificial Sequence
  Description of Artificial Sequence: Synthetic oligonucleotide
aagggagaauggugcuguu

SEQ ID NO: 60308 - RNA, 19 nt, Artificial Sequence
  Description of Artificial Sequence: Synthetic oligonucleotide
uuaaagucacaucccugua

SEQ ID NO: 60309 - RNA, 19 nt, Artificial Sequence
  Description of Artificial Sequence: Synthetic oligonucleotide
aaauugcagaauucaaaag

SEQ ID NO: 60310 - RNA, 19 nt, Artificial Sequence
  Description of Artificial Sequence: Synthetic oligonucleotide
gugauuaucucuuugaucu

SEQ ID NO: 60311 - RNA, 19 nt, Artificial Sequence
  Description of Artificial Sequence: Synthetic oligonucleotide
uacuugccucauuucccua

SEQ ID NO: 60312 - RNA, 19 nt, Artificial Sequence
  Description of Artificial Sequence: Synthetic oligonucleotide
aucuucucccccacgguau

SEQ ID NO: 60313 - RNA, 19 nt, Artificial Sequence
  Description of Artificial Sequence: Synthetic oligonucleotide
uccuaaacuuuagacuucc

SEQ ID NO: 60314 - RNA, 19 nt, Artificial Sequence
  Description of Artificial Sequence: Synthetic oligonucleotide
ccacuguucugaaaggaga

SEQ ID NO: 60315 - RNA, 19 nt, Artificial Sequence
  Description of Artificial Sequence: Synthetic oligonucleotide
acauugcucuaugucugcc

SEQ ID NO: 60316 - RNA, 19 nt, Artificial Sequence
  Description of Artificial Sequence: Synthetic oligonucleotide
cuucgaccacagcaagcca

SEQ ID NO: 60317 - RNA, 19 nt, Artificial Sequence
  Description of Artificial Sequence: Synthetic oligonucleotide
aucauccuccauugcuccc

SEQ ID NO: 60318 - RNA, 19 nt, Artificial Sequence
  Description of Artificial Sequence: Synthetic oligonucleotide
cggggacucaagaggaauc

SEQ ID NO: 60319 - RNA, 19 nt, Artificial Sequence
  Description of Artificial Sequence: Synthetic oligonucleotide
cuguuucucugcugucaac

SEQ ID NO: 60320 - RNA, 19 nt, Artificial Sequence
  Description of Artificial Sequence: Synthetic oligonucleotide
cuucccaucuggcucagca

SEQ ID NO: 60321 - RNA, 19 nt, Artificial Sequence
  Description of Artificial Sequence: Synthetic oligonucleotide
auagggucacuuugccauu

SEQ ID NO: 60322 - RNA, 19 nt, Artificial Sequence
  Description of Artificial Sequence: Synthetic oligonucleotide
uaugcaaauggagauaaaa

SEQ ID NO: 60323 - RNA, 19 nt, Artificial Sequence
  Description of Artificial Sequence: Synthetic oligonucleotide
agcaauucugacuguccag

SEQ ID NO: 60324 - RNA, 19 nt, Artificial Sequence
  Description of Artificial Sequence: Synthetic oligonucleotide
ggagcuaaucugaccguuc

SEQ ID NO: 60325 - RNA, 19 nt, Artificial Sequence
  Description of Artificial Sequence: Synthetic oligonucleotide
cuauuguguggaugaccac

SEQ ID NO: 60326 - RNA, 19 nt, Artificial Sequence
  Description of Artificial Sequence: Synthetic oligonucleotide
cauaagaaggcaauuuuag

SEQ ID NO: 60327 - RNA, 19 nt, Artificial Sequence
  Description of Artificial Sequence: Synthetic oligonucleotide
guguauuaaucauagauua

SEQ ID NO: 60328 - RNA, 19 nt, Artificial Sequence
  Description of Artificial Sequence: Synthetic oligonucleotide
auuauaaacuauaaacuua

SEQ ID NO: 60329 - RNA, 19 nt, Artificial Sequence
  Description of Artificial Sequence: Synthetic oligonucleotide
aagggcaaggaguuuauua

SEQ ID NO: 60330 - RNA, 19 nt, Artificial Sequence
  Description of Artificial Sequence: Synthetic oligonucleotide
acaauguaucuuuauuaaa

SEQ ID NO: 60331 - RNA, 19 nt, Artificial Sequence
  Description of Artificial Sequence: Synthetic oligonucleotide
aacaaaaggguguauagug

SEQ ID NO: 60332 - RNA, 19 nt, Artificial Sequence
  Description of Artificial Sequence: Synthetic oligonucleotide
guucacaaacugugaaaau

SEQ ID NO: 60333 - RNA, 19 nt, Artificial Sequence
  Description of Artificial Sequence: Synthetic oligonucleotide
uaguguaagaacuguacau

SEQ ID NO: 60334 - RNA, 19 nt, Artificial Sequence
  Description of Artificial Sequence: Synthetic oligonucleotide
uugugagcucugguuauuu

SEQ ID NO: 60335 - RNA, 19 nt, Artificial Sequence
  Description of Artificial Sequence: Synthetic oligonucleotide
uuucucuuguaccauagaa

SEQ ID NO: 60336 - RNA, 19 nt, Artificial Sequence
  Description of Artificial Sequence: Synthetic oligonucleotide
aaaauguauaaaaauuauc

SEQ ID NO: 60337 - RNA, 19 nt, Artificial Sequence
  Description of Artificial Sequence: Synthetic oligonucleotide
caaaaagcuaaugugcagg

SEQ ID NO: 60338 - RNA, 19 nt, Artificial Sequence
  Description of Artificial Sequence: Synthetic oligonucleotide
ggauauugccuuauuuguc

SEQ ID NO: 60339 - RNA, 19 nt, Artificial Sequence
  Description of Artificial Sequence: Synthetic oligonucleotide
cuguaaaaaauggagcuca

SEQ ID NO: 60340 - RNA, 19 nt, Artificial Sequence
  Description of Artificial Sequence: Synthetic oligonucleotide
aguaacauaacugcuucuu

SEQ ID NO: 60341 - RNA, 19 nt, Artificial Sequence
  Description of Artificial Sequence: Synthetic oligonucleotide
uggagcuuuggaauauuuu

SEQ ID NO: 60342 - RNA, 19 nt, Artificial Sequence
  Description of Artificial Sequence: Synthetic oligonucleotide
uauccuguauucuuguuug

SEQ ID NO: 60343 - RNA, 19 nt, Artificial Sequence
  Description of Artificial Sequence: Synthetic oligonucleotide
gaauuccuccucuauuuaa

SEQ ID NO: 60344 - RNA, 19 nt, Artificial Sequence
  Description of Artificial Sequence: Synthetic oligonucleotide
agauauauacauggaaucg

SEQ ID NO: 60345 - RNA, 19 nt, Artificial Sequence
  Description of Artificial Sequence: Synthetic oligonucleotide
gaaguguuuauguaauagu

SEQ ID NO: 60346 - RNA, 19 nt, Artificial Sequence
  Description of Artificial Sequence: Synthetic oligonucleotide
uucuauccuuuugccugca

SEQ ID NO: 60347 - RNA, 19 nt, Artificial Sequence
  Description of Artificial Sequence: Synthetic oligonucleotide
aggucaguuguaauaaauc

SEQ ID NO: 60348 - RNA, 19 nt, Artificial Sequence
  Description of Artificial Sequence: Synthetic oligonucleotide
cuaggaugugaugaugaaa

SEQ ID NO: 60349 - RNA, 25 nt, Artificial Sequence
  Description of Artificial Sequence: Synthetic oligonucleotide
ggccgugcgagaggccgagcuugcu

SEQ ID NO: 60350 - RNA, 25 nt, Artificial Sequence
  Description of Artificial Sequence: Synthetic oligonucleotide
ugcauugcagccgccgcggcgccgc

SEQ ID NO: 60351 - RNA, 25 nt, Artificial Sequence
  Description of Artificial Sequence: Synthetic oligonucleotide
cucggcucuucacucccaacaaugg

SEQ ID NO: 60352 - RNA, 25 nt, Artificial Sequence
  Description of Artificial Sequence: Synthetic oligonucleotide
gcggcuccgagcccgagcggcggcg

SEQ ID NO: 60353 - RNA, 25 nt, Artificial Sequence
  Description of Artificial Sequence: Synthetic oligonucleotide
ggcggcuccgggggcggcagcggca

SEQ ID NO: 60354 - RNA, 25 nt, Artificial Sequence
  Description of Artificial Sequence: Synthetic oligonucleotide
agcggcacccccggccccguagggu

SEQ ID NO: 60355 - RNA, 25 nt, Artificial Sequence
  Description of Artificial Sequence: Synthetic oligonucleotide
uccccggcgccaggccacccggccg

SEQ ID NO: 60356 - RNA, 25 nt, Artificial Sequence
  Description of Artificial Sequence: Synthetic oligonucleotide
gucagcagcaugcaggguaaacgca

SEQ ID NO: 60357 - RNA, 25 nt, Artificial Sequence
  Description of Artificial Sequence: Synthetic oligonucleotide
aaagcacugaaguugaauuuugcaa

SEQ ID NO: 60358 - RNA, 25 nt, Artificial Sequence
  Description of Artificial Sequence: Synthetic oligonucleotide
aauccaccuuucaaaucuacagcaa

SEQ ID NO: 60359 - RNA, 25 nt, Artificial Sequence
  Description of Artificial Sequence: Synthetic oligonucleotide
agguuuacucugaaucccaauccua

SEQ ID NO: 60360 - RNA, 25 nt, Artificial Sequence
  Description of Artificial Sequence: Synthetic oligonucleotide
acaggaguucaaaacccacacauag

SEQ ID NO: 60361 - RNA, 25 nt, Artificial Sequence
  Description of Artificial Sequence: Synthetic oligonucleotide
gagagacugagaacacacagcauug

SEQ ID NO: 60362 - RNA, 25 nt, Artificial Sequence
  Description of Artificial Sequence: Synthetic oligonucleotide
gagucaucaggaaaacugaagaucu

SEQ ID NO: 60363 - RNA, 25 nt, Artificial Sequence
  Description of Artificial Sequence: Synthetic oligonucleotide
uccccugaacaacacugggauuuca

SEQ ID NO: 60364 - RNA, 25 nt, Artificial Sequence
  Description of Artificial Sequence: Synthetic oligonucleotide
acugcagaggacuugaaagaccuug

SEQ ID NO: 60365 - RNA, 25 nt, Artificial Sequence
  Description of Artificial Sequence: Synthetic oligonucleotide
ggagaaauuggacgaggagcuuaug

SEQ ID NO: 60366 - RNA, 25 nt, Artificial Sequence
  Description of Artificial Sequence: Synthetic oligonucleotide
gguucugucaacaaaaugguccaca

SEQ ID NO: 60367 - RNA, 25 nt, Artificial Sequence
  Description of Artificial Sequence: Synthetic oligonucleotide
aaaccaagugggcaaauaauggcag

SEQ ID NO: 60368 - RNA, 25 nt, Artificial Sequence
  Description of Artificial Sequence: Synthetic oligonucleotide
guuaaaagaauucggucaacagugg

SEQ ID NO: 60369 - RNA, 25 nt, Artificial Sequence
  Description of Artificial Sequence: Synthetic oligonucleotide
gaugaaaaagaacaaaaacaacuuc

SEQ ID NO: 60370 - RNA, 25 nt, Artificial Sequence
  Description of Artificial Sequence: Synthetic oligonucleotide
cuuauggauuuggauguaguaaugc

SEQ ID NO: 60371 - RNA, 25 nt, Artificial Sequence
  Description of Artificial Sequence: Synthetic oligonucleotide
cggaguagugauugcccauacauug

SEQ ID NO: 60372 - RNA, 25 nt, Artificial Sequence
  Description of Artificial Sequence: Synthetic oligonucleotide
guucaguuuuauggugcacucuuca

SEQ ID NO: 60373 - RNA, 25 nt, Artificial Sequence
  Description of Artificial Sequence: Synthetic oligonucleotide
agagagggugacuguuggaucugua

SEQ ID NO: 60374 - RNA, 25 nt, Artificial Sequence
  Description of Artificial Sequence: Synthetic oligonucleotide
auggaacucaugucuaccucguuug

SEQ ID NO: 60375 - RNA, 25 nt, Artificial Sequence
  Description of Artificial Sequence: Synthetic oligonucleotide
gauaaguuuuacaaauauguauaua

SEQ ID NO: 60376 - RNA, 25 nt, Artificial Sequence
  Description of Artificial Sequence: Synthetic oligonucleotide
aguguauuagaugauguuauuccag

SEQ ID NO: 60377 - RNA, 25 nt, Artificial Sequence
  Description of Artificial Sequence: Synthetic oligonucleotide
gaagaaauuuuaggcaaaaucacuu

SEQ ID NO: 60378 - RNA, 25 nt, Artificial Sequence
  Description of Artificial Sequence: Synthetic oligonucleotide
uuagcaacugugaaagcacuaaacc

SEQ ID NO: 60379 - RNA, 25 nt, Artificial Sequence
  Description of Artificial Sequence: Synthetic oligonucleotide
cacuuaaaagaaaacuugaaaauua

SEQ ID NO: 60380 - RNA, 25 nt, Artificial Sequence
  Description of Artificial Sequence: Synthetic oligonucleotide
auucacagagauaucaaaccuucca

SEQ ID NO: 60381 - RNA, 25 nt, Artificial Sequence
  Description of Artificial Sequence: Synthetic oligonucleotide
aauauucuucuggacagaaguggaa

SEQ ID NO: 60382 - RNA, 25 nt, Artificial Sequence
  Description of Artificial Sequence: Synthetic oligonucleotide
aauauuaagcucugugacuucggca

SEQ ID NO: 60383 - RNA, 25 nt, Artificial Sequence
  Description of Artificial Sequence: Synthetic oligonucleotide
aucaguggacagcuuguggacucua

SEQ ID NO: 60384 - RNA, 25 nt, Artificial Sequence
  Description of Artificial Sequence: Synthetic oligonucleotide
auugccaagacaagagaugcuggcu

SEQ ID NO: 60385 - RNA, 25 nt, Artificial Sequence
  Description of Artificial Sequence: Synthetic oligonucleotide
uguaggccauacauggcaccugaaa

SEQ ID NO: 60386 - RNA, 25 nt, Artificial Sequence
  Description of Artificial Sequence: Synthetic oligonucleotide
agaauagacccaagcgcaucacgac

SEQ ID NO: 60387 - RNA, 25 nt, Artificial Sequence
  Description of Artificial Sequence: Synthetic oligonucleotide
caaggauaugauguccgcucugaug

SEQ ID NO: 60388 - RNA, 25 nt, Artificial Sequence
  Description of Artificial Sequence: Synthetic oligonucleotide
gucuggaguuuggggaucacauugu

SEQ ID NO: 60389 - RNA, 25 nt, Artificial Sequence
  Description of Artificial Sequence: Synthetic oligonucleotide
uaugaguuggccacaggccgauuuc

SEQ ID NO: 60390 - RNA, 25 nt, Artificial Sequence
  Description of Artificial Sequence: Synthetic oligonucleotide
ccuuauccaaaguggaauaguguau

SEQ ID NO: 60391 - RNA, 25 nt, Artificial Sequence
  Description of Artificial Sequence: Synthetic oligonucleotide
uuugaucaacuaacacaagucguga

SEQ ID NO: 60392 - RNA, 25 nt, Artificial Sequence
  Description of Artificial Sequence: Synthetic oligonucleotide
aaaggagauccuccgcagcugagua

SEQ ID NO: 60393 - RNA, 25 nt, Artificial Sequence
  Description of Artificial Sequence: Synthetic oligonucleotide
aauucugaggaaagggaauucuccc

SEQ ID NO: 60394 - RNA, 25 nt, Artificial Sequence
  Description of Artificial Sequence: Synthetic oligonucleotide
ccgaguuucaucaacuuugucaacu

SEQ ID NO: 60395 - RNA, 25 nt, Artificial Sequence
  Description of Artificial Sequence: Synthetic oligonucleotide
uugugccuuacgaaggaugaaucca

SEQ ID NO: 60396 - RNA, 25 nt, Artificial Sequence
  Description of Artificial Sequence: Synthetic oligonucleotide
aaaaggccaaaguauaaagagcuuc

SEQ ID NO: 60397 - RNA, 25 nt, Artificial Sequence
  Description of Artificial Sequence: Synthetic oligonucleotide
cugaaacaucccuuuauuuugaugu

SEQ ID NO: 60398 - RNA, 25 nt, Artificial Sequence
  Description of Artificial Sequence: Synthetic oligonucleotide
uaugaagaacgugccguugaggucg

SEQ ID NO: 60399 - RNA, 25 nt, Artificial Sequence
  Description of Artificial Sequence: Synthetic oligonucleotide
gcaugcuauguuuguaaaauccugg

SEQ ID NO: 60400 - RNA, 25 nt, Artificial Sequence
  Description of Artificial Sequence: Synthetic oligonucleotide
gaucaaaugccagcuacucccagcu

SEQ ID NO: 60401 - RNA, 25 nt, Artificial Sequence
  Description of Artificial Sequence: Synthetic oligonucleotide
ucucccauguaugucgauugauauc

SEQ ID NO: 60402 - RNA, 25 nt, Artificial Sequence
  Description of Artificial Sequence: Synthetic oligonucleotide
cgcugcuacaucagacucuagaaaa

SEQ ID NO: 60403 - RNA, 25 nt, Artificial Sequence
  Description of Artificial Sequence: Synthetic oligonucleotide
aaagggcugagaggaagcaagacgu

SEQ ID NO: 60404 - RNA, 25 nt, Artificial Sequence
  Description of Artificial Sequence: Synthetic oligonucleotide
uaaagaauuuucaucccguaucaca

SEQ ID NO: 60405 - RNA, 25 nt, Artificial Sequence
  Description of Artificial Sequence: Synthetic oligonucleotide
aguguuuuuauugcucgcccagaca

SEQ ID NO: 60406 - RNA, 25 nt, Artificial Sequence
  Description of Artificial Sequence: Synthetic oligonucleotide
accaugugcaauaagauugguguuc

SEQ ID NO: 60407 - RNA, 25 nt, Artificial Sequence
  Description of Artificial Sequence: Synthetic oligonucleotide
cguuuccaucaugucuguauacucc

SEQ ID NO: 60408 - RNA, 25 nt, Artificial Sequence
  Description of Artificial Sequence: Synthetic oligonucleotide
cugucaccuagaacgugcauccuug

SEQ ID NO: 60409 - RNA, 25 nt, Artificial Sequence
  Description of Artificial Sequence: Synthetic oligonucleotide
guaauaccugauugaucacacagug

SEQ ID NO: 60410 - RNA, 25 nt, Artificial Sequence
  Description of Artificial Sequence: Synthetic oligonucleotide
guuagugcuggucagagagaccuca

SEQ ID NO: 60411 - RNA, 25 nt, Artificial Sequence
  Description of Artificial Sequence: Synthetic oligonucleotide
auccugcucuuuugugaugaacaua

SEQ ID NO: 60412 - RNA, 25 nt, Artificial Sequence
  Description of Artificial Sequence: Synthetic oligonucleotide
auucaugaaauguggaagucaguac

SEQ ID NO: 60413 - RNA, 25 nt, Artificial Sequence
  Description of Artificial Sequence: Synthetic oligonucleotide
cgaucaaguuguugacugugauuag

SEQ ID NO: 60414 - RNA, 25 nt, Artificial Sequence
  Description of Artificial Sequence: Synthetic oligonucleotide
gaucacaucuuaaauucauuucuag

SEQ ID NO: 60415 - RNA, 25 nt, Artificial Sequence
  Description of Artificial Sequence: Synthetic oligonucleotide
gacucaaaaccuggagaugcagcua

SEQ ID NO: 60416 - RNA, 25 nt, Artificial Sequence
  Description of Artificial Sequence: Synthetic oligonucleotide
acuggaaugguguuuugucagacuu

SEQ ID NO: 60417 - RNA, 25 nt, Artificial Sequence
  Description of Artificial Sequence: Synthetic oligonucleotide
uccaaauccuggaaggacacaguga

SEQ ID NO: 60418 - RNA, 25 nt, Artificial Sequence
  Description of Artificial Sequence: Synthetic oligonucleotide
augaauguacuaugucugaacauag

SEQ ID NO: 60419 - RNA, 25 nt, Artificial Sequence
  Description of Artificial Sequence: Synthetic oligonucleotide
gaaacucgggcuugagugagaagag

SEQ ID NO: 60420 - RNA, 25 nt, Artificial Sequence
  Description of Artificial Sequence: Synthetic oligonucleotide
gcuugcacagccaacgagacacauu

SEQ ID NO: 60421 - RNA, 25 nt, Artificial Sequence
  Description of Artificial Sequence: Synthetic oligonucleotide
ugccuucuggagcugggagacaaag

SEQ ID NO: 60422 - RNA, 25 nt, Artificial Sequence
  Description of Artificial Sequence: Synthetic oligonucleotide
ggaggaauuuacuuucuucaccaag

SEQ ID NO: 60423 - RNA, 25 nt, Artificial Sequence
  Description of Artificial Sequence: Synthetic oligonucleotide
gugcaauagauuacugaugugauau

SEQ ID NO: 60424 - RNA, 25 nt, Artificial Sequence
  Description of Artificial Sequence: Synthetic oligonucleotide
uucuguugcuuuacaguuacaguug

SEQ ID NO: 60425 - RNA, 25 nt, Artificial Sequence
  Description of Artificial Sequence: Synthetic oligonucleotide
gauguuuggggaucgaugugcucag

SEQ ID NO: 60426 - RNA, 25 nt, Artificial Sequence
  Description of Artificial Sequence: Synthetic oligonucleotide
gccaaauuuccuguuugaaauauca

SEQ ID NO: 60427 - RNA, 25 nt, Artificial Sequence
  Description of Artificial Sequence: Synthetic oligonucleotide
auguuaaauuagaaugaauuuaucu

SEQ ID NO: 60428 - RNA, 25 nt, Artificial Sequence
  Description of Artificial Sequence: Synthetic oligonucleotide
uuuaccaaaaaccauguugcguuca

SEQ ID NO: 60429 - RNA, 25 nt, Artificial Sequence
  Description of Artificial Sequence: Synthetic oligonucleotide
aaagaggugaacauuaaaauauaga

SEQ ID NO: 60430 - RNA, 25 nt, Artificial Sequence
  Description of Artificial Sequence: Synthetic oligonucleotide
agacaggacagaauguguucuuuuc

SEQ ID NO: 60431 - RNA, 25 nt, Artificial Sequence
  Description of Artificial Sequence: Synthetic oligonucleotide
cuccuuuaccaguccuauuuuucaa

SEQ ID NO: 60432 - RNA, 25 nt, Artificial Sequence
  Description of Artificial Sequence: Synthetic oligonucleotide
augggaagacucaggagucugccac

SEQ ID NO: 60433 - RNA, 25 nt, Artificial Sequence
  Description of Artificial Sequence: Synthetic oligonucleotide
cuugucaaagaaggugcugauccua

SEQ ID NO: 60434 - RNA, 25 nt, Artificial Sequence
  Description of Artificial Sequence: Synthetic oligonucleotide
aagaauuuuucauucucagaauucg

SEQ ID NO: 60435 - RNA, 25 nt, Artificial Sequence
  Description of Artificial Sequence: Synthetic oligonucleotide
ggugugcugccaacuugauguucca

SEQ ID NO: 60436 - RNA, 25 nt, Artificial Sequence
  Description of Artificial Sequence: Synthetic oligonucleotide
accugccacaaaccaccaggacuga

SEQ ID NO: 60437 - RNA, 25 nt, Artificial Sequence
  Description of Artificial Sequence: Synthetic oligonucleotide
aaagaagaaaacaguacagaaggca

SEQ ID NO: 60438 - RNA, 25 nt, Artificial Sequence
  Description of Artificial Sequence: Synthetic oligonucleotide
aaaguuuacagauguuuuuaauucu

SEQ ID NO: 60439 - RNA, 25 nt, Artificial Sequence
  Description of Artificial Sequence: Synthetic oligonucleotide
uaguauuuuaucuggaacaacuugu

SEQ ID NO: 60440 - RNA, 25 nt, Artificial Sequence
  Description of Artificial Sequence: Synthetic oligonucleotide
uagcagcuauauauuuccccuuggu

SEQ ID NO: 60441 - RNA, 25 nt, Artificial Sequence
  Description of Artificial Sequence: Synthetic oligonucleotide
ucccaagccugauacuuuagccauc

SEQ ID NO: 60442 - RNA, 25 nt, Artificial Sequence
  Description of Artificial Sequence: Synthetic oligonucleotide
cauaacucacuaacagggagaagua

SEQ ID NO: 60443 - RNA, 25 nt, Artificial Sequence
  Description of Artificial Sequence: Synthetic oligonucleotide
agcuaguagcaaugugccuugauug

SEQ ID NO: 60444 - RNA, 25 nt, Artificial Sequence
  Description of Artificial Sequence: Synthetic oligonucleotide
gauuagauaaagauuucuaguaggc

SEQ ID NO: 60445 - RNA, 25 nt, Artificial Sequence
  Description of Artificial Sequence: Synthetic oligonucleotide
cagcaaaagaccaaaucucaguugu

SEQ ID NO: 60446 - RNA, 25 nt, Artificial Sequence
  Description of Artificial Sequence: Synthetic oligonucleotide
uuugcuucuugccaucacuggucca

SEQ ID NO: 60447 - RNA, 25 nt, Artificial Sequence
  Description of Artificial Sequence: Synthetic oligonucleotide
aggucuucaguuuccgaaucucuuu

SEQ ID NO: 60448 - RNA, 25 nt, Artificial Sequence
  Description of Artificial Sequence: Synthetic oligonucleotide
ucccuuccccuguggucuauugucg

SEQ ID NO: 60449 - RNA, 25 nt, Artificial Sequence
  Description of Artificial Sequence: Synthetic oligonucleotide
gcuaugugacuugcgcuuaauccaa

SEQ ID NO: 60450 - RNA, 25 nt, Artificial Sequence
  Description of Artificial Sequence: Synthetic oligonucleotide
auauuuugccuuuuuucuauaucaa

SEQ ID NO: 60451 - RNA, 25 nt, Artificial Sequence
  Description of Artificial Sequence: Synthetic oligonucleotide
aaaaaccuuuacaguuagcagggau

SEQ ID NO: 60452 - RNA, 25 nt, Artificial Sequence
  Description of Artificial Sequence: Synthetic oligonucleotide
uguuccuuaccaaggauuuuuagcc

SEQ ID NO: 60453 - RNA, 25 nt, Artificial Sequence
  Description of Artificial Sequence: Synthetic oligonucleotide
cccaaaucucucauauucgcuagug

SEQ ID NO: 60454 - RNA, 25 nt, Artificial Sequence
  Description of Artificial Sequence: Synthetic oligonucleotide
guuuaaaaggcuaagaauagugggg

SEQ ID NO: 60455 - RNA, 25 nt, Artificial Sequence
  Description of Artificial Sequence: Synthetic oligonucleotide
gcccagccgaugugguaggugauaa

SEQ ID NO: 60456 - RNA, 25 nt, Artificial Sequence
  Description of Artificial Sequence: Synthetic oligonucleotide
aagaggcaucuuuucuagagacaca

SEQ ID NO: 60457 - RNA, 25 nt, Artificial Sequence
  Description of Artificial Sequence: Synthetic oligonucleotide
auuggaccagaugaggauccgaaac

SEQ ID NO: 60458 - RNA, 25 nt, Artificial Sequence
  Description of Artificial Sequence: Synthetic oligonucleotide
cggcagccuuuacguucaucaccug

SEQ ID NO: 60459 - RNA, 25 nt, Artificial Sequence
  Description of Artificial Sequence: Synthetic oligonucleotide
gcuagaaccucucguaguccaucac

SEQ ID NO: 60460 - RNA, 25 nt, Artificial Sequence
  Description of Artificial Sequence: Synthetic oligonucleotide
ccauuucuuggcauuggaauucuac

SEQ ID NO: 60461 - RNA, 25 nt, Artificial Sequence
  Description of Artificial Sequence: Synthetic oligonucleotide
cuggaaaaaaauacaaaaagcaaaa

SEQ ID NO: 60462 - RNA, 25 nt, Artificial Sequence
  Description of Artificial Sequence: Synthetic oligonucleotide
acaaaacccucagcacuguuacaag

SEQ ID NO: 60463 - RNA, 25 nt, Artificial Sequence
  Description of Artificial Sequence: Synthetic oligonucleotide
gaggccauuuaaguaucuugugcuu

SEQ ID NO: 60464 - RNA, 25 nt, Artificial Sequence
  Description of Artificial Sequence: Synthetic oligonucleotide
ucuucacuuacccauuagccagguu

SEQ ID NO: 60465 - RNA, 25 nt, Artificial Sequence
  Description of Artificial Sequence: Synthetic oligonucleotide
ucucauuagguuuugcuugggccuc

SEQ ID NO: 60466 - RNA, 25 nt, Artificial Sequence
  Description of Artificial Sequence: Synthetic oligonucleotide
cccuggcacugaaccuuaggcuuug

SEQ ID NO: 60467 - RNA, 25 nt, Artificial Sequence
  Description of Artificial Sequence: Synthetic oligonucleotide
guaugacagugaagcagcacuguga

SEQ ID NO: 60468 - RNA, 25 nt, Artificial Sequence
  Description of Artificial Sequence: Synthetic oligonucleotide
agugguucaagcacacuggaauaua

SEQ ID NO: 60469 - RNA, 25 nt, Artificial Sequence
  Description of Artificial Sequence: Synthetic oligonucleotide
aaaacagucauggccugagaugcag

SEQ ID NO: 60470 - RNA, 25 nt, Artificial Sequence
  Description of Artificial Sequence: Synthetic oligonucleotide
ggugaugccauuacagaaccaaauc

SEQ ID NO: 60471 - RNA, 25 nt, Artificial Sequence
  Description of Artificial Sequence: Synthetic oligonucleotide
cguggcacguauugcugugucuccu

SEQ ID NO: 60472 - RNA, 25 nt, Artificial Sequence
  Description of Artificial Sequence: Synthetic oligonucleotide
ucucagagugacagucauaaauacu

SEQ ID NO: 60473 - RNA, 25 nt, Artificial Sequence
  Description of Artificial Sequence: Synthetic oligonucleotide
ugucaaacaauaaagggagaauggu

SEQ ID NO: 60474 - RNA, 25 nt, Artificial Sequence
  Description of Artificial Sequence: Synthetic oligonucleotide
ugcuguuuaaagucacaucccugua

SEQ ID NO: 60475 - RNA, 25 nt, Artificial Sequence
  Description of Artificial Sequence: Synthetic oligonucleotide
aaauugcagaauucaaaagugauua

SEQ ID NO: 60476 - RNA, 25 nt, Artificial Sequence
  Description of Artificial Sequence: Synthetic oligonucleotide
aucucuuugaucuacuugccucauu

SEQ ID NO: 60477 - RNA, 25 nt, Artificial Sequence
  Description of Artificial Sequence: Synthetic oligonucleotide
uucccuaucuucucccccacgguau

SEQ ID NO: 60478 - RNA, 25 nt, Artificial Sequence
  Description of Artificial Sequence: Synthetic oligonucleotide
uccuaaacuuuagacuucccacugu

SEQ ID NO: 60479 - RNA, 25 nt, Artificial Sequence
  Description of Artificial Sequence: Synthetic oligonucleotide
uucugaaaggagacauugcucuaug

SEQ ID NO: 60480 - RNA, 25 nt, Artificial Sequence
  Description of Artificial Sequence: Synthetic oligonucleotide
gucugccuucgaccacagcaagcca

SEQ ID NO: 60481 - RNA, 25 nt, Artificial Sequence
  Description of Artificial Sequence: Synthetic oligonucleotide
aucauccuccauugcucccggggac

SEQ ID NO: 60482 - RNA, 25 nt, Artificial Sequence
  Description of Artificial Sequence: Synthetic oligonucleotide
cucaagaggaaucuguuucucugcu

SEQ ID NO: 60483 - RNA, 25 nt, Artificial Sequence
  Description of Artificial Sequence: Synthetic oligonucleotide
ugucaacuucccaucuggcucagca

SEQ ID NO: 60484 - RNA, 25 nt, Artificial Sequence
  Description of Artificial Sequence: Synthetic oligonucleotide
auagggucacuuugccauuaugcaa

SEQ ID NO: 60485 - RNA, 25 nt, Artificial Sequence
  Description of Artificial Sequence: Synthetic oligonucleotide
aauggagauaaaagcaauucugacu

SEQ ID NO: 60486 - RNA, 25 nt, Artificial Sequence
  Description of Artificial Sequence: Synthetic oligonucleotide
uguccaggagcuaaucugaccguuc

SEQ ID NO: 60487 - RNA, 25 nt, Artificial Sequence
  Description of Artificial Sequence: Synthetic oligonucleotide
cuauuguguggaugaccacauaaga

SEQ ID NO: 60488 - RNA, 25 nt, Artificial Sequence
  Description of Artificial Sequence: Synthetic oligonucleotide
aaggcaauuuuaguguauuaaucau

SEQ ID NO: 60489 - RNA, 25 nt, Artificial Sequence
  Description of Artificial Sequence: Synthetic oligonucleotide
uagauuauuauaaacuauaaacuua

SEQ ID NO: 60490 - RNA, 25 nt, Artificial Sequence
  Description of Artificial Sequence: Synthetic oligonucleotide
aagggcaaggaguuuauuacaaugu

SEQ ID NO: 60491 - RNA, 25 nt, Artificial Sequence
  Description of Artificial Sequence: Synthetic oligonucleotide
uaucuuuauuaaaacaaaagggugu

SEQ ID NO: 60492 - RNA, 25 nt, Artificial Sequence
  Description of Artificial Sequence: Synthetic oligonucleotide
uauaguguucacaaacugugaaaau

SEQ ID NO: 60493 - RNA, 25 nt, Artificial Sequence
  Description of Artificial Sequence: Synthetic oligonucleotide
uaguguaagaacuguacauugugag

SEQ ID NO: 60494 - RNA, 25 nt, Artificial Sequence
  Description of Artificial Sequence: Synthetic oligonucleotide
gcucugguuauuuuucucuuguacc

SEQ ID NO: 60495 - RNA, 25 nt, Artificial Sequence
  Description of Artificial Sequence: Synthetic oligonucleotide
cauagaaaaauguauaaaaauuauc

SEQ ID NO: 60496 - RNA, 25 nt, Artificial Sequence
  Description of Artificial Sequence: Synthetic oligonucleotide
caaaaagcuaaugugcagggauauu

SEQ ID NO: 60497 - RNA, 25 nt, Artificial Sequence
  Description of Artificial Sequence: Synthetic oligonucleotide
ugccuuauuugucuguaaaaaaugg

SEQ ID NO: 60498 - RNA, 25 nt, Artificial Sequence
  Description of Artificial Sequence: Synthetic oligonucleotide
gagcucaguaacauaacugcuucuu

SEQ ID NO: 60499 - RNA, 25 nt, Artificial Sequence
  Description of Artificial Sequence: Synthetic oligonucleotide
uggagcuuuggaauauuuuauccug

SEQ ID NO: 60500 - RNA, 25 nt, Artificial Sequence
  Description of Artificial Sequence: Synthetic oligonucleotide
guauucuuguuugaauuccuccucu

SEQ ID NO: 60501 - RNA, 25 nt, Artificial Sequence
  Description of Artificial Sequence: Synthetic oligonucleotide
uauuuaagauauauacauggaaucg

SEQ ID NO: 60502 - RNA, 25 nt, Artificial Sequence
  Description of Artificial Sequence: Synthetic oligonucleotide
gaaguguuuauguaauaguucuauc

SEQ ID NO: 60503 - RNA, 25 nt, Artificial Sequence
  Description of Artificial Sequence: Synthetic oligonucleotide
ccuuuugccugcaggucaguuguaa

SEQ ID NO: 60504 - RNA, 25 nt, Artificial Sequence
  Description of Artificial Sequence: Synthetic oligonucleotide
auaaaucuaggaugugaugaugaaa

SEQ ID NO: 60505 - RNA, 2381 nt, Homo sapiens
ggaguaacagugucgccgccgccuuccuccuccuccucucgccgcuaccgccgucgccgccgccgcagccgccgccgguccgcgcggccucggguggccggagcucagccugcgcgcgccgcgcccugugucuccggguggggcagaagacucgccccuugaaccucccgcggggacucuccgugguguggcggcccuggggcucuuucuuaauagccccggacugaguccccuccagucgaggacccucuccuaguccacugacgagcgguggacaccugccgcuguaucucccccaaaccgaguccuugcccugcugccuccucauacccacacggcggcagagaccuucaccauagcguucgcucaacuccagaaccuuccgaccuccgcuaguuccugcgggccuuugcccgcuucccggugcacccuccccgggagacaccucagacccccgacagccugggcaggcucggugccugcgggugcguuccugaucaccccuccccucuucccucccccucauccuccauucccuuguuuucacccucuguccucugcccgucacuccccuugucaccucuuggagcccccuccuaaccagcggccaguggguuucccauaccccaggaugugagccucuuuaaccuguaaugcuguggcuagcccuuggccccuuuccugccauggagaaccaggugcugguaauucgcaucaagaucccaaauaguggcgcgguggacuggacagugcacuccgggccgcaguuacucuucagggaugugcuggaugugauaggccagguucugccugaagcaacaacuacagcauuugaauaugaagaugaagauggugaucgaauuacagugagaagugaugaggaaaugaaggcaaugcugucauauuauuauuccacaguaauggaacagcaaguaaauggacaguuaauagagccucugcagauauuuccaagagccugcaagccuccuggggaacggaacauacauggccugaaggugaauacucgggccggacccucucaacacagcagcccagcagucucagauucacuuccaagcaauagcuuaaagaagucuucugcugaacugaaaaaaauacuagccaauggccagaugaaugaacaagacauacgauaucgggacacucuuggucauggcaacggaggcacagucuacaaagcauaucaugucccgagugggaaaauauuagcuguaaaggucauacuacuagauauuacacuggaacuucagaagcaaauuaugucugaauuggaaauucuuuauaagugcgauucaucauauaucauuggauuuuauggagcauuuuuuguagaaaacaggauuucaauauguacagaauucauggaugggggaucuuuggauguauauaggaaaaugccagaacauguccuuggaagaauugcaguagcaguuguuaaaggccuuacuuauuuguggaguuuaaagauuuuacauagagacgugaagcccuccaauaugcuaguaaacacaagaggacagguuaagcugugugauuuuggaguuagcacucagcuggugaauucuauagccaagacguauguuggaacaaaugcuuauauggcgccugaaaggauuucaggggagcaguauggaauucauucugaugucuggagcuuaggaaucucuuuuauggagcuugcucuugggagguuuccauauccucagauucagaaaaaccagggaucuuuaaugccucuccagcuucugcagugcauuguugaugaggauucgcccguccuuccaguuggagaguucucggagccauuuguacauuucaucacucaguguaugcgaaaacagccaaaagaaaggccagcaccugaagaauugaugggccacccguucaucgugcaguucaaugauggaaaugccgccgugguguccaugugggugugccgggcgcuggaggagaggcggagccagcaggggcccccgugaggcugccgcagggcacugaaagcccaggaccaguaaccaaggagaacaacccacccgucgcccuucuccguaugcugccugcgccagaagagcuuugcugggcccuggcuucccugcccucgccuucaccucugucagcagguggccuugccuggggagccccauguguggcccaccccaccaggccauccccauaccuucugguuugaaggcgcugacacuggcagagagguaaaggguggggcauugagaauggaggcucccagggucccugcccacuucuguuuuccuaauguuuuucucuauaaagggucaggcccgucagcaucacugaugggaauaaaaguauuaaugcuuugugacaaaaaaaaaaaaaaaaaa

SEQ ID NO: 60506 - RNA, 2334 nt, Homo sapiens
ggaguaacagugucgccgccgccuuccuccuccuccucucgccgcuaccgccgucgccgccgccgcagccgccgccgguccgcgcggccucggguggccggagcucagccugcgcgcgccgcgcccugugucuccggguggggcagaagacucgccccuugaaccucccgcggggacucuccgugguguggcggcccuggggcucuuucuuaauagccccggacugaguccccuccagucgaggacccucuccuaguccacugacgagcgguggacaccugccgcuguaucucccccaaaccgaguccuugcccugcugccuccucauacccacacggcggcagagaccuucaccauagcguucgcucaacuccagaaccuuccgaccuccgcuaguuccugcgggccuuugcccgcuucccggugcacccuccccgggagacaccucagacccccgacagccugggcaggcucggugccugcgggugcguuccugaucaccccuccccucuucccucccccucauccuccauucccuuguuuucacccucuguccucugcccgucacuccccuugucaccucuuggagcccccuccuaaccagcggccaguggguuucccauaccccaggaugugagccucuuuaaccuguaaugcuguggcuagcccuuggccccuuuccugccauggagaaccaggugcugguaauucgcaucaagaucccaaauaguggcgcgguggacuggacagugcacuccgggccgcaguuacucuucagggaugugcuggaugugauaggccagguucugccugaagcaacaacuacagcauuugaauaugaagaugaagauggugaucgaauuacagugagaagugaugaggaaaugaaggcaaugcugucauauuauuauuccacaguaauggaacagcaaguaaauggacaguuaauagagccucugcagauauuuccaagagccugcaagccuccuggggaacggaacauacauggccugaaggugaauacucgggccggacccucucaacacagcagcccagcagucucagauucacuuccaagcaauagcuuaaagaagucuucugcugaacugaaaaaaauacuagccaauggccagaugaaugaacaagacauacgauaucgggacacucuuggucauggcaacggaggcacagucuacaaagcauaucaugucccgagugggaaaauauuagcuguaaaggucauacuacuagauauuacacuggaacuucagaagcaaauuaugucugaauuggaaauucuuuauaagugcgauucaucauauaucauuggauuuuauggagcauuuuuuguagaaaacaggauuucaauauguacagaauucauggaugggggaucuuuggauguauauaggaaaaugccagaacauguccuuggaagaauugcaguagcaguuguuaaaggccuuacuuauuuguggaguuuaaagauuuuacauagagacgugaagcccuccaauaugcuaguaaacacaagaggacagguuaagcugugugauuuuggaguuagcacucagcuggugaauucuauagccaagacguauguuggaacaaaugcuuauauggcgccugaaaggauuucaggggagcaguauggaauucauucugaugucuggagcuuaggaaucucuuuuauggagauucagaaaaaccagggaucuuuaaugccucuccagcuucugcagugcauuguugaugaggauucgcccguccuuccaguuggagaguucucggagccauuuguacauuucaucacucaguguaugcgaaaacagccaaaagaaaggccagcaccugaagaauugaugggccacccguucaucgugcaguucaaugauggaaaugccgccgugguguccaugugggugugccgggcgcuggaggagaggcggagccagcaggggcccccgugaggcugccgcagggcacugaaagcccaggaccaguaaccaaggagaacaacccacccgucgcccuucuccguaugcugccugcgccagaagagcuuugcugggcccuggcuucccugcccucgccuucaccucugucagcagguggccuugccuggggagccccauguguggcccaccccaccaggccauccccauaccuucugguuugaaggcgcugacacuggcagagagguaaaggguggggcauugagaauggaggcucccagggucccugcccacuucuguuuuccuaauguuuuucucuauaaagggucaggcccgucagcaucacugaugggaauaaaaguauuaaugcuuugugaca

SEQ ID NO: 60507 - RNA, 19 nt, Artificial Sequence
  Description of Artificial Sequence: Synthetic oligonucleotide
ggaguaacagugucgccgc

SEQ ID NO: 60508 - RNA, 19 nt, Artificial Sequence
  Description of Artificial Sequence: Synthetic oligonucleotide
ccgccuuccuccuccuccu

SEQ ID NO: 60509 - RNA, 19 nt, Artificial Sequence
  Description of Artificial Sequence: Synthetic oligonucleotide
ucucgccgcuaccgccguc

SEQ ID NO: 60510 - RNA, 19 nt, Artificial Sequence
  Description of Artificial Sequence: Synthetic oligonucleotide
cgccgccgccgcagccgcc

SEQ ID NO: 60511 - RNA, 19 nt, Artificial Sequence
  Description of Artificial Sequence: Synthetic oligonucleotide
cgccgguccgcgcggccuc

SEQ ID NO: 60512 - RNA, 19 nt, Artificial Sequence
  Description of Artificial Sequence: Synthetic oligonucleotide
cggguggccggagcucagc

SEQ ID NO: 60513 - RNA, 19 nt, Artificial Sequence
  Description of Artificial Sequence: Synthetic oligonucleotide
ccugcgcgcgccgcgcccu

SEQ ID NO: 60514 - RNA, 19 nt, Artificial Sequence
  Description of Artificial Sequence: Synthetic oligonucleotide
ugugucuccggguggggca

SEQ ID NO: 60515 - RNA, 19 nt, Artificial Sequence
  Description of Artificial Sequence: Synthetic oligonucleotide
agaagacucgccccuugaa

SEQ ID NO: 60516 - RNA, 19 nt, Artificial Sequence
  Description of Artificial Sequence: Synthetic oligonucleotide
accucccgcggggacucuc

SEQ ID NO: 60517 - RNA, 19 nt, Artificial Sequence
  Description of Artificial Sequence: Synthetic oligonucleotide
ccgugguguggcggcccug

SEQ ID NO: 60518 - RNA, 19 nt, Artificial Sequence
  Description of Artificial Sequence: Synthetic oligonucleotide
ggggcucuuucuuaauagc

SEQ ID NO: 60519 - RNA, 19 nt, Artificial Sequence
  Description of Artificial Sequence: Synthetic oligonucleotide
ccccggacugaguccccuc

SEQ ID NO: 60520 - RNA, 19 nt, Artificial Sequence
  Description of Artificial Sequence: Synthetic oligonucleotide
ccagucgaggacccucucc

SEQ ID NO: 60521 - RNA, 19 nt, Artificial Sequence
  Description of Artificial Sequence: Synthetic oligonucleotide
cuaguccacugacgagcgg

SEQ ID NO: 60522 - RNA, 19 nt, Artificial Sequence
  Description of Artificial Sequence: Synthetic oligonucleotide
guggacaccugccgcugua

SEQ ID NO: 60523 - RNA, 19 nt, Artificial Sequence
  Description of Artificial Sequence: Synthetic oligonucleotide
aucucccccaaaccgaguc

SEQ ID NO: 60524 - RNA, 19 nt, Artificial Sequence
  Description of Artificial Sequence: Synthetic oligonucleotide
ccuugcccugcugccuccu

SEQ ID NO: 60525 - RNA, 19 nt, Artificial Sequence
  Description of Artificial Sequence: Synthetic oligonucleotide
ucauacccacacggcggca

SEQ ID NO: 60526 - RNA, 19 nt, Artificial Sequence
  Description of Artificial Sequence: Synthetic oligonucleotide
agagaccuucaccauagcg

SEQ ID NO: 60527 - RNA, 19 nt, Artificial Sequence
  Description of Artificial Sequence: Synthetic oligonucleotide
guucgcucaacuccagaac

SEQ ID NO: 60528 - RNA, 19 nt, Artificial Sequence
  Description of Artificial Sequence: Synthetic oligonucleotide
ccuuccgaccuccgcuagu

SEQ ID NO: 60529 - RNA, 19 nt, Artificial Sequence
  Description of Artificial Sequence: Synthetic oligonucleotide
uuccugcgggccuuugccc

SEQ ID NO: 60530 - RNA, 19 nt, Artificial Sequence
  Description of Artificial Sequence: Synthetic oligonucleotide
cgcuucccggugcacccuc

SEQ ID NO: 60531 - RNA, 19 nt, Artificial Sequence
  Description of Artificial Sequence: Synthetic oligonucleotide
ccccgggagacaccucaga

SEQ ID NO: 60532 - RNA, 19 nt, Artificial Sequence
  Description of Artificial Sequence: Synthetic oligonucleotide
acccccgacagccugggca

SEQ ID NO: 60533 - RNA, 19 nt, Artificial Sequence
  Description of Artificial Sequence: Synthetic oligonucleotide
aggcucggugccugcgggu

SEQ ID NO: 60534 - RNA, 19 nt, Artificial Sequence
  Description of Artificial Sequence: Synthetic oligonucleotide
ugcguuccugaucaccccu

SEQ ID NO: 60535 - RNA, 19 nt, Artificial Sequence
  Description of Artificial Sequence: Synthetic oligonucleotide
uccccucuucccucccccu

SEQ ID NO: 60536 - RNA, 19 nt, Artificial Sequence
  Description of Artificial Sequence: Synthetic oligonucleotide
ucauccuccauucccuugu

SEQ ID NO: 60537 - RNA, 19 nt, Artificial Sequence
  Description of Artificial Sequence: Synthetic oligonucleotide
uuuucacccucuguccucu

SEQ ID NO: 60538 - RNA, 19 nt, Artificial Sequence
  Description of Artificial Sequence: Synthetic oligonucleotide
ugcccgucacuccccuugu

SEQ ID NO: 60539 - RNA, 19 nt, Artificial Sequence
  Description of Artificial Sequence: Synthetic oligonucleotide
ucaccucuuggagcccccu

SEQ ID NO: 60540 - RNA, 19 nt, Artificial Sequence
  Description of Artificial Sequence: Synthetic oligonucleotide
uccuaaccagcggccagug

SEQ ID NO: 60541 - RNA, 19 nt, Artificial Sequence
  Description of Artificial Sequence: Synthetic oligonucleotide
ggguuucccauaccccagg

SEQ ID NO: 60542 - RNA, 19 nt, Artificial Sequence
  Description of Artificial Sequence: Synthetic oligonucleotide
gaugugagccucuuuaacc

SEQ ID NO: 60543 - RNA, 19 nt, Artificial Sequence
  Description of Artificial Sequence: Synthetic oligonucleotide
cuguaaugcuguggcuagc

SEQ ID NO: 60544 - RNA, 19 nt, Artificial Sequence
  Description of Artificial Sequence: Synthetic oligonucleotide
cccuuggccccuuuccugc

SEQ ID NO: 60545 - RNA, 19 nt, Artificial Sequence
  Description of Artificial Sequence: Synthetic oligonucleotide
ccauggagaaccaggugcu

SEQ ID NO: 60546 - RNA, 19 nt, Artificial Sequence
  Description of Artificial Sequence: Synthetic oligonucleotide
ugguaauucgcaucaagau

SEQ ID NO: 60547 - RNA, 19 nt, Artificial Sequence
  Description of Artificial Sequence: Synthetic oligonucleotide
ucccaaauaguggcgcggu

SEQ ID NO: 60548 - RNA, 19 nt, Artificial Sequence
  Description of Artificial Sequence: Synthetic oligonucleotide
uggacuggacagugcacuc

SEQ ID NO: 60549 - RNA, 19 nt, Artificial Sequence
  Description of Artificial Sequence: Synthetic oligonucleotide
ccgggccgcaguuacucuu

SEQ ID NO: 60550 - RNA, 19 nt, Artificial Sequence
  Description of Artificial Sequence: Synthetic oligonucleotide
ucagggaugugcuggaugu

SEQ ID NO: 60551 - RNA, 19 nt, Artificial Sequence
  Description of Artificial Sequence: Synthetic oligonucleotide
ugauaggccagguucugcc

SEQ ID NO: 60552 - RNA, 19 nt, Artificial Sequence
  Description of Artificial Sequence: Synthetic oligonucleotide
cugaagcaacaacuacagc

SEQ ID NO: 60553 - RNA, 19 nt, Artificial Sequence
  Description of Artificial Sequence: Synthetic oligonucleotide
cauuugaauaugaagauga

SEQ ID NO: 60554 - RNA, 19 nt, Artificial Sequence
  Description of Artificial Sequence: Synthetic oligonucleotide
aagauggugaucgaauuac

SEQ ID NO: 60555 - RNA, 19 nt, Artificial Sequence
  Description of Artificial Sequence: Synthetic oligonucleotide
cagugagaagugaugagga

SEQ ID NO: 60556 - RNA, 19 nt, Artificial Sequence
  Description of Artificial Sequence: Synthetic oligonucleotide
aaaugaaggcaaugcuguc

SEQ ID NO: 60557 - RNA, 19 nt, Artificial Sequence
  Description of Artificial Sequence: Synthetic oligonucleotide
cauauuauuauuccacagu

SEQ ID NO: 60558 - RNA, 19 nt, Artificial Sequence
  Description of Artificial Sequence: Synthetic oligonucleotide
uaauggaacagcaaguaaa

SEQ ID NO: 60559 - RNA, 19 nt, Artificial Sequence
  Description of Artificial Sequence: Synthetic oligonucleotide
auggacaguuaauagagcc

SEQ ID NO: 60560 - RNA, 19 nt, Artificial Sequence
  Description of Artificial Sequence: Synthetic oligonucleotide
cucugcagauauuuccaag

SEQ ID NO: 60561 - RNA, 19 nt, Artificial Sequence
  Description of Artificial Sequence: Synthetic oligonucleotide
gagccugcaagccuccugg

SEQ ID NO: 60562 - RNA, 19 nt, Artificial Sequence
  Description of Artificial Sequence: Synthetic oligonucleotide
gggaacggaacauacaugg

SEQ ID NO: 60563 - RNA, 19 nt, Artificial Sequence
  Description of Artificial Sequence: Synthetic oligonucleotide
gccugaaggugaauacucg

SEQ ID NO: 60564 - RNA, 19 nt, Artificial Sequence
  Description of Artificial Sequence: Synthetic oligonucleotide
gggccggacccucucaaca

SEQ ID NO: 60565 - RNA, 19 nt, Artificial Sequence
  Description of Artificial Sequence: Synthetic oligonucleotide
acagcagcccagcagucuc

SEQ ID NO: 60566 - RNA, 19 nt, Artificial Sequence
  Description of Artificial Sequence: Synthetic oligonucleotide
cagauucacuuccaagcaa

SEQ ID NO: 60567 - RNA, 19 nt, Artificial Sequence
  Description of Artificial Sequence: Synthetic oligonucleotide
auagcuuaaagaagucuuc

SEQ ID NO: 60568 - RNA, 19 nt, Artificial Sequence
  Description of Artificial Sequence: Synthetic oligonucleotide
cugcugaacugaaaaaaau

SEQ ID NO: 60569 - RNA, 19 nt, Artificial Sequence
  Description of Artificial Sequence: Synthetic oligonucleotide
uacuagccaauggccagau

SEQ ID NO: 60570 - RNA, 19 nt, Artificial Sequence
  Description of Artificial Sequence: Synthetic oligonucleotide
ugaaugaacaagacauacg

SEQ ID NO: 60571 - RNA, 19 nt, Artificial Sequence
  Description of Artificial Sequence: Synthetic oligonucleotide
gauaucgggacacucuugg

SEQ ID NO: 60572 - RNA, 19 nt, Artificial Sequence
  Description of Artificial Sequence: Synthetic oligonucleotide
gucauggcaacggaggcac

SEQ ID NO: 60573 - RNA, 19 nt, Artificial Sequence
  Description of Artificial Sequence: Synthetic oligonucleotide
cagucuacaaagcauauca

SEQ ID NO: 60574 - RNA, 19 nt, Artificial Sequence
  Description of Artificial Sequence: Synthetic oligonucleotide
augucccgagugggaaaau

SEQ ID NO: 60575 - RNA, 19 nt, Artificial Sequence
  Description of Artificial Sequence: Synthetic oligonucleotide
uauuagcuguaaaggucau

SEQ ID NO: 60576 - RNA, 19 nt, Artificial Sequence
  Description of Artificial Sequence: Synthetic oligonucleotide
uacuacuagauauuacacu

SEQ ID NO: 60577 - RNA, 19 nt, Artificial Sequence
  Description of Artificial Sequence: Synthetic oligonucleotide
uggaacuucagaagcaaau

SEQ ID NO: 60578 - RNA, 19 nt, Artificial Sequence
  Description of Artificial Sequence: Synthetic oligonucleotide
uuaugucugaauuggaaau

SEQ ID NO: 60579 - RNA, 19 nt, Artificial Sequence
  Description of Artificial Sequence: Synthetic oligonucleotide
uucuuuauaagugcgauuc

SEQ ID NO: 60580 - RNA, 19 nt, Artificial Sequence
  Description of Artificial Sequence: Synthetic oligonucleotide
caucauauaucauuggauu

SEQ ID NO: 60581 - RNA, 19 nt, Artificial Sequence
  Description of Artificial Sequence: Synthetic oligonucleotide
uuuauggagcauuuuuugu

SEQ ID NO: 60582 - RNA, 19 nt, Artificial Sequence
  Description of Artificial Sequence: Synthetic oligonucleotide
uagaaaacaggauuucaau

SEQ ID NO: 60583 - RNA, 19 nt, Artificial Sequence
  Description of Artificial Sequence: Synthetic oligonucleotide
uauguacagaauucaugga

SEQ ID NO: 60584 - RNA, 19 nt, Artificial Sequence
  Description of Artificial Sequence: Synthetic oligonucleotide
augggggaucuuuggaugu

SEQ ID NO: 60585 - RNA, 19 nt, Artificial Sequence
  Description of Artificial Sequence: Synthetic oligonucleotide
uauauaggaaaaugccaga

SEQ ID NO: 60586 - RNA, 19 nt, Artificial Sequence
  Description of Artificial Sequence: Synthetic oligonucleotide
aacauguccuuggaagaau

SEQ ID NO: 60587 - RNA, 19 nt, Artificial Sequence
  Description of Artificial Sequence: Synthetic oligonucleotide
uugcaguagcaguuguuaa

SEQ ID NO: 60588 - RNA, 19 nt, Artificial Sequence
  Description of Artificial Sequence: Synthetic oligonucleotide
aaggccuuacuuauuugug

SEQ ID NO: 60589 - RNA, 19 nt, Artificial Sequence
  Description of Artificial Sequence: Synthetic oligonucleotide
ggaguuuaaagauuuuaca

SEQ ID NO: 60590 - RNA, 19 nt, Artificial Sequence
  Description of Artificial Sequence: Synthetic oligonucleotide
auagagacgugaagcccuc

SEQ ID NO: 60591 - RNA, 19 nt, Artificial Sequence
  Description of Artificial Sequence: Synthetic oligonucleotide
ccaauaugcuaguaaacac

SEQ ID NO: 60592 - RNA, 19 nt, Artificial Sequence
  Description of Artificial Sequence: Synthetic oligonucleotide
caagaggacagguuaagcu

SEQ ID NO: 60593 - RNA, 19 nt, Artificial Sequence
  Description of Artificial Sequence: Synthetic oligonucleotide
ugugugauuuuggaguuag

SEQ ID NO: 60594 - RNA, 19 nt, Artificial Sequence
  Description of Artificial Sequence: Synthetic oligonucleotide
gcacucagcuggugaauuc

SEQ ID NO: 60595 - RNA, 19 nt, Artificial Sequence
  Description of Artificial Sequence: Synthetic oligonucleotide
cuauagccaagacguaugu

SEQ ID NO: 60596 - RNA, 19 nt, Artificial Sequence
  Description of Artificial Sequence: Synthetic oligonucleotide
uuggaacaaaugcuuauau

SEQ ID NO: 60597 - RNA, 19 nt, Artificial Sequence
  Description of Artificial Sequence: Synthetic oligonucleotide
uggcgccugaaaggauuuc

SEQ ID NO: 60598 - RNA, 19 nt, Artificial Sequence
  Description of Artificial Sequence: Synthetic oligonucleotide
caggggagcaguauggaau

SEQ ID NO: 60599 - RNA, 19 nt, Artificial Sequence
  Description of Artificial Sequence: Synthetic oligonucleotide
uucauucugaugucuggag

SEQ ID NO: 60600 - RNA, 19 nt, Artificial Sequence
  Description of Artificial Sequence: Synthetic oligonucleotide
gcuuaggaaucucuuuuau

SEQ ID NO: 60601 - RNA, 19 nt, Artificial Sequence
  Description of Artificial Sequence: Synthetic oligonucleotide
uggagcuugcucuugggag

SEQ ID NO: 60602 - RNA, 19 nt, Artificial Sequence
  Description of Artificial Sequence: Synthetic oligonucleotide
gguuuccauauccucagau

SEQ ID NO: 60603 - RNA, 19 nt, Artificial Sequence
  Description of Artificial Sequence: Synthetic oligonucleotide
uucagaaaaaccagggauc

SEQ ID NO: 60604 - RNA, 19 nt, Artificial Sequence
  Description of Artificial Sequence: Synthetic oligonucleotide
cuuuaaugccucuccagcu

SEQ ID NO: 60605 - RNA, 19 nt, Artificial Sequence
  Description of Artificial Sequence: Synthetic oligonucleotide
uucugcagugcauuguuga

SEQ ID NO: 60606 - RNA, 19 nt, Artificial Sequence
  Description of Artificial Sequence: Synthetic oligonucleotide
augaggauucgcccguccu

SEQ ID NO: 60607 - RNA, 19 nt, Artificial Sequence
  Description of Artificial Sequence: Synthetic oligonucleotide
uuccaguuggagaguucuc

SEQ ID NO: 60608 - RNA, 19 nt, Artificial Sequence
  Description of Artificial Sequence: Synthetic oligonucleotide
cggagccauuuguacauuu

SEQ ID NO: 60609 - RNA, 19 nt, Artificial Sequence
  Description of Artificial Sequence: Synthetic oligonucleotide
ucaucacucaguguaugcg

SEQ ID NO: 60610 - RNA, 19 nt, Artificial Sequence
  Description of Artificial Sequence: Synthetic oligonucleotide
gaaaacagccaaaagaaag

SEQ ID NO: 60611 - RNA, 19 nt, Artificial Sequence
  Description of Artificial Sequence: Synthetic oligonucleotide
ggccagcaccugaagaauu

SEQ ID NO: 60612 - RNA, 19 nt, Artificial Sequence
  Description of Artificial Sequence: Synthetic oligonucleotide
ugaugggccacccguucau

SEQ ID NO: 60613 - RNA, 19 nt, Artificial Sequence
  Description of Artificial Sequence: Synthetic oligonucleotide
ucgugcaguucaaugaugg

SEQ ID NO: 60614 - RNA, 19 nt, Artificial Sequence
  Description of Artificial Sequence: Synthetic oligonucleotide
gaaaugccgccgugguguc

SEQ ID NO: 60615 - RNA, 19 nt, Artificial Sequence
  Description of Artificial Sequence: Synthetic oligonucleotide
ccaugugggugugccgggc

SEQ ID NO: 60616 - RNA, 19 nt, Artificial Sequence
  Description of Artificial Sequence: Synthetic oligonucleotide
cgcuggaggagaggcggag

SEQ ID NO: 60617 - RNA, 19 nt, Artificial Sequence
  Description of Artificial Sequence: Synthetic oligonucleotide
gccagcaggggcccccgug

SEQ ID NO: 60618 - RNA, 19 nt, Artificial Sequence
  Description of Artificial Sequence: Synthetic oligonucleotide
gaggcugccgcagggcacu

SEQ ID NO: 60619 - RNA, 19 nt, Artificial Sequence
  Description of Artificial Sequence: Synthetic oligonucleotide
ugaaagcccaggaccagua

SEQ ID NO: 60620 - RNA, 19 nt, Artificial Sequence
  Description of Artificial Sequence: Synthetic oligonucleotide
aaccaaggagaacaaccca

SEQ ID NO: 60621 - RNA, 19 nt, Artificial Sequence
  Description of Artificial Sequence: Synthetic oligonucleotide
acccgucgcccuucuccgu

SEQ ID NO: 60622 - RNA, 19 nt, Artificial Sequence
  Description of Artificial Sequence: Synthetic oligonucleotide
uaugcugccugcgccagaa

SEQ ID NO: 60623 - RNA, 19 nt, Artificial Sequence
  Description of Artificial Sequence: Synthetic oligonucleotide
agagcuuugcugggcccug

SEQ ID NO: 60624 - RNA, 19 nt, Artificial Sequence
  Description of Artificial Sequence: Synthetic oligonucleotide
ggcuucccugcccucgccu

SEQ ID NO: 60625 - RNA, 19 nt, Artificial Sequence
  Description of Artificial Sequence: Synthetic oligonucleotide
uucaccucugucagcaggu

SEQ ID NO: 60626 - RNA, 19 nt, Artificial Sequence
  Description of Artificial Sequence: Synthetic oligonucleotide
uggccuugccuggggagcc

SEQ ID NO: 60627 - RNA, 19 nt, Artificial Sequence
  Description of Artificial Sequence: Synthetic oligonucleotide
cccauguguggcccacccc

SEQ ID NO: 60628 - RNA, 19 nt, Artificial Sequence
  Description of Artificial Sequence: Synthetic oligonucleotide
caccaggccauccccauac

SEQ ID NO: 60629 - RNA, 19 nt, Artificial Sequence
  Description of Artificial Sequence: Synthetic oligonucleotide
ccuucugguuugaaggcgc

SEQ ID NO: 60630 - RNA, 19 nt, Artificial Sequence
  Description of Artificial Sequence: Synthetic oligonucleotide
cugacacuggcagagaggu

SEQ ID NO: 60631 - RNA, 19 nt, Artificial Sequence
  Description of Artificial Sequence: Synthetic oligonucleotide
uaaaggguggggcauugag

SEQ ID NO: 60632 - RNA, 19 nt, Artificial Sequence
  Description of Artificial Sequence: Synthetic oligonucleotide
gaauggaggcucccagggu

SEQ ID NO: 60633 - RNA, 19 nt, Artificial Sequence
  Description of Artificial Sequence: Synthetic oligonucleotide
ucccugcccacuucuguuu

SEQ ID NO: 60634 - RNA, 19 nt, Artificial Sequence
  Description of Artificial Sequence: Synthetic oligonucleotide
uuccuaauguuuuucucua

SEQ ID NO: 60635 - RNA, 19 nt, Artificial Sequence
  Description of Artificial Sequence: Synthetic oligonucleotide
auaaagggucaggcccguc

SEQ ID NO: 60636 - RNA, 19 nt, Artificial Sequence
  Description of Artificial Sequence: Synthetic oligonucleotide
cagcaucacugaugggaau

SEQ ID NO: 60637 - RNA, 19 nt, Artificial Sequence
  Description of Artificial Sequence: Synthetic oligonucleotide
uaaaaguauuaaugcuuug

SEQ ID NO: 60638 - RNA, 19 nt, Artificial Sequence
  Description of Artificial Sequence: Synthetic oligonucleotide
uggagauucagaaaaacca

SEQ ID NO: 60639 - RNA, 19 nt, Artificial Sequence
  Description of Artificial Sequence: Synthetic oligonucleotide
agggaucuuuaaugccucu

SEQ ID NO: 60640 - RNA, 19 nt, Artificial Sequence
  Description of Artificial Sequence: Synthetic oligonucleotide
uccagcuucugcagugcau

SEQ ID NO: 60641 - RNA, 19 nt, Artificial Sequence
  Description of Artificial Sequence: Synthetic oligonucleotide
uuguugaugaggauucgcc

SEQ ID NO: 60642 - RNA, 19 nt, Artificial Sequence
  Description of Artificial Sequence: Synthetic oligonucleotide
ccguccuuccaguuggaga

SEQ ID NO: 60643 - RNA, 19 nt, Artificial Sequence
  Description of Artificial Sequence: Synthetic oligonucleotide
aguucucggagccauuugu

SEQ ID NO: 60644 - RNA, 19 nt, Artificial Sequence
  Description of Artificial Sequence: Synthetic oligonucleotide
uacauuucaucacucagug

SEQ ID NO: 60645 - RNA, 19 nt, Artificial Sequence
  Description of Artificial Sequence: Synthetic oligonucleotide
guaugcgaaaacagccaaa

SEQ ID NO: 60646 - RNA, 19 nt, Artificial Sequence
  Description of Artificial Sequence: Synthetic oligonucleotide
aagaaaggccagcaccuga

SEQ ID NO: 60647 - RNA, 19 nt, Artificial Sequence
  Description of Artificial Sequence: Synthetic oligonucleotide
aagaauugaugggccaccc

SEQ ID NO: 60648 - RNA, 19 nt, Artificial Sequence
  Description of Artificial Sequence: Synthetic oligonucleotide
cguucaucgugcaguucaa

SEQ ID NO: 60649 - RNA, 19 nt, Artificial Sequence
  Description of Artificial Sequence: Synthetic oligonucleotide
augauggaaaugccgccgu

SEQ ID NO: 60650 - RNA, 19 nt, Artificial Sequence
  Description of Artificial Sequence: Synthetic oligonucleotide
ugguguccaugugggugug

SEQ ID NO: 60651 - RNA, 19 nt, Artificial Sequence
  Description of Artificial Sequence: Synthetic oligonucleotide
gccgggcgcuggaggagag

SEQ ID NO: 60652 - RNA, 19 nt, Artificial Sequence
  Description of Artificial Sequence: Synthetic oligonucleotide
ggcggagccagcaggggcc

SEQ ID NO: 60653 - RNA, 19 nt, Artificial Sequence
  Description of Artificial Sequence: Synthetic oligonucleotide
ccccgugaggcugccgcag

SEQ ID NO: 60654 - RNA, 19 nt, Artificial Sequence
  Description of Artificial Sequence: Synthetic oligonucleotide
gggcacugaaagcccagga

SEQ ID NO: 60655 - RNA, 19 nt, Artificial Sequence
  Description of Artificial Sequence: Synthetic oligonucleotide
accaguaaccaaggagaac

SEQ ID NO: 60656 - RNA, 19 nt, Artificial Sequence
  Description of Artificial Sequence: Synthetic oligonucleotide
caacccacccgucgcccuu

SEQ ID NO: 60657 - RNA, 19 nt, Artificial Sequence
  Description of Artificial Sequence: Synthetic oligonucleotide
ucuccguaugcugccugcg

SEQ ID NO: 60658 - RNA, 19 nt, Artificial Sequence
  Description of Artificial Sequence: Synthetic oligonucleotide
gccagaagagcuuugcugg

SEQ ID NO: 60659 - RNA, 19 nt, Artificial Sequence
  Description of Artificial Sequence: Synthetic oligonucleotide
ggcccuggcuucccugccc

SEQ ID NO: 60660 - RNA, 19 nt, Artificial Sequence
  Description of Artificial Sequence: Synthetic oligonucleotide
cucgccuucaccucuguca

SEQ ID NO: 60661 - RNA, 19 nt, Artificial Sequence
  Description of Artificial Sequence: Synthetic oligonucleotide
agcagguggccuugccugg

SEQ ID NO: 60662 - RNA, 19 nt, Artificial Sequence
  Description of Artificial Sequence: Synthetic oligonucleotide
gggagccccauguguggcc

SEQ ID NO: 60663 - RNA, 19 nt, Artificial Sequence
  Description of Artificial Sequence: Synthetic oligonucleotide
ccaccccaccaggccaucc

SEQ ID NO: 60664 - RNA, 19 nt, Artificial Sequence
  Description of Artificial Sequence: Synthetic oligonucleotide
cccauaccuucugguuuga

SEQ ID NO: 60665 - RNA, 19 nt, Artificial Sequence
  Description of Artificial Sequence: Synthetic oligonucleotide
aaggcgcugacacuggcag

SEQ ID NO: 60666 - RNA, 19 nt, Artificial Sequence
  Description of Artificial Sequence: Synthetic oligonucleotide
gagagguaaaggguggggc

SEQ ID NO: 60667 - RNA, 19 nt, Artificial Sequence
  Description of Artificial Sequence: Synthetic oligonucleotide
cauugagaauggaggcucc

SEQ ID NO: 60668 - RNA, 19 nt, Artificial Sequence
  Description of Artificial Sequence: Synthetic oligonucleotide
ccagggucccugcccacuu

SEQ ID NO: 60669 - RNA, 19 nt, Artificial Sequence
  Description of Artificial Sequence: Synthetic oligonucleotide
ucuguuuuccuaauguuuu

SEQ ID NO: 60670 - RNA, 19 nt, Artificial Sequence
  Description of Artificial Sequence: Synthetic oligonucleotide
uucucuauaaagggucagg

SEQ ID NO: 60671 - RNA, 19 nt, Artificial Sequence
  Description of Artificial Sequence: Synthetic oligonucleotide
gcccgucagcaucacugau

SEQ ID NO: 60672 - RNA, 19 nt, Artificial Sequence
  Description of Artificial Sequence: Synthetic oligonucleotide
ugggaauaaaaguauuaau

SEQ ID NO: 60673 - RNA, 19 nt, Artificial Sequence
  Description of Artificial Sequence: Synthetic oligonucleotide
guauuaaugcuuugugaca

SEQ ID NO: 60674 - RNA, 25 nt, Artificial Sequence
  Description of Artificial Sequence: Synthetic oligonucleotide
ggaguaacagugucgccgccgccuu

SEQ ID NO: 60675 - RNA, 25 nt, Artificial Sequence
  Description of Artificial Sequence: Synthetic oligonucleotide
uccuccuccuccucucgccgcuacc

SEQ ID NO: 60676 - RNA, 25 nt, Artificial Sequence
  Description of Artificial Sequence: Synthetic oligonucleotide
cgccgucgccgccgccgcagccgcc

SEQ ID NO: 60677 - RNA, 25 nt, Artificial Sequence
  Description of Artificial Sequence: Synthetic oligonucleotide
cgccgguccgcgcggccucgggugg

SEQ ID NO: 60678 - RNA, 25 nt, Artificial Sequence
  Description of Artificial Sequence: Synthetic oligonucleotide
gccggagcucagccugcgcgcgccg

SEQ ID NO: 60679 - RNA, 25 nt, Artificial Sequence
  Description of Artificial Sequence: Synthetic oligonucleotide
gcgcccugugucuccggguggggca

SEQ ID NO: 60680 - RNA, 25 nt, Artificial Sequence
  Description of Artificial Sequence: Synthetic oligonucleotide
agaagacucgccccuugaaccuccc

SEQ ID NO: 60681 - RNA, 25 nt, Artificial Sequence
  Description of Artificial Sequence: Synthetic oligonucleotide
cgcggggacucuccgugguguggcg

SEQ ID NO: 60682 - RNA, 25 nt, Artificial Sequence
  Description of Artificial Sequence: Synthetic oligonucleotide
ggcccuggggcucuuucuuaauagc

SEQ ID NO: 60683 - RNA, 25 nt, Artificial Sequence
  Description of Artificial Sequence: Synthetic oligonucleotide
ccccggacugaguccccuccagucg

SEQ ID NO: 60684 - RNA, 25 nt, Artificial Sequence
  Description of Artificial Sequence: Synthetic oligonucleotide
gaggacccucuccuaguccacugac

SEQ ID NO: 60685 - RNA, 25 nt, Artificial Sequence
  Description of Artificial Sequence: Synthetic oligonucleotide
cgagcgguggacaccugccgcugua

SEQ ID NO: 60686 - RNA, 25 nt, Artificial Sequence
  Description of Artificial Sequence: Synthetic oligonucleotide
aucucccccaaaccgaguccuugcc

SEQ ID NO: 60687 - RNA, 25 nt, Artificial Sequence
  Description of Artificial Sequence: Synthetic oligonucleotide
ccugcugccuccucauacccacacg

SEQ ID NO: 60688 - RNA, 25 nt, Artificial Sequence
  Description of Artificial Sequence: Synthetic oligonucleotide
ggcggcagagaccuucaccauagcg

SEQ ID NO: 60689 - RNA, 25 nt, Artificial Sequence
  Description of Artificial Sequence: Synthetic oligonucleotide
guucgcucaacuccagaaccuuccg

SEQ ID NO: 60690 - RNA, 25 nt, Artificial Sequence
  Description of Artificial Sequence: Synthetic oligonucleotide
gaccuccgcuaguuccugcgggccu

SEQ ID NO: 60691 - RNA, 25 nt, Artificial Sequence
  Description of Artificial Sequence: Synthetic oligonucleotide
uuugcccgcuucccggugcacccuc

SEQ ID NO: 60692 - RNA, 25 nt, Artificial Sequence
  Description of Artificial Sequence: Synthetic oligonucleotide
ccccgggagacaccucagacccccg

SEQ ID NO: 60693 - RNA, 25 nt, Artificial Sequence
  Description of Artificial Sequence: Synthetic oligonucleotide
gacagccugggcaggcucggugccu

SEQ ID NO: 60694 - RNA, 25 nt, Artificial Sequence
  Description of Artificial Sequence: Synthetic oligonucleotide
ugcgggugcguuccugaucaccccu

SEQ ID NO: 60695 - RNA, 25 nt, Artificial Sequence
  Description of Artificial Sequence: Synthetic oligonucleotide
uccccucuucccucccccucauccu

SEQ ID NO: 60696 - RNA, 25 nt, Artificial Sequence
  Description of Artificial Sequence: Synthetic oligonucleotide
uccauucccuuguuuucacccucug

SEQ ID NO: 60697 - RNA, 25 nt, Artificial Sequence
  Description of Artificial Sequence: Synthetic oligonucleotide
guccucugcccgucacuccccuugu

SEQ ID NO: 60698 - RNA, 25 nt, Artificial Sequence
  Description of Artificial Sequence: Synthetic oligonucleotide
ucaccucuuggagcccccuccuaac

SEQ ID NO: 60699 - RNA, 25 nt, Artificial Sequence
  Description of Artificial Sequence: Synthetic oligonucleotide
ccagcggccaguggguuucccauac

SEQ ID NO: 60700 - RNA, 25 nt, Artificial Sequence
  Description of Artificial Sequence: Synthetic oligonucleotide
ccccaggaugugagccucuuuaacc

SEQ ID NO: 60701 - RNA, 25 nt, Artificial Sequence
  Description of Artificial Sequence: Synthetic oligonucleotide
cuguaaugcuguggcuagcccuugg

SEQ ID NO: 60702 - RNA, 25 nt, Artificial Sequence
  Description of Artificial Sequence: Synthetic oligonucleotide
gccccuuuccugccauggagaacca

SEQ ID NO: 60703 - RNA, 25 nt, Artificial Sequence
  Description of Artificial Sequence: Synthetic oligonucleotide
aggugcugguaauucgcaucaagau

SEQ ID NO: 60704 - RNA, 25 nt, Artificial Sequence
  Description of Artificial Sequence: Synthetic oligonucleotide
ucccaaauaguggcgcgguggacug

SEQ ID NO: 60705 - RNA, 25 nt, Artificial Sequence
  Description of Artificial Sequence: Synthetic oligonucleotide
ggacagugcacuccgggccgcaguu

SEQ ID NO: 60706 - RNA, 25 nt, Artificial Sequence
  Description of Artificial Sequence: Synthetic oligonucleotide
uacucuucagggaugugcuggaugu

SEQ ID NO: 60707 - RNA, 25 nt, Artificial Sequence
  Description of Artificial Sequence: Synthetic oligonucleotide
ugauaggccagguucugccugaagc

SEQ ID NO: 60708 - RNA, 25 nt, Artificial Sequence
  Description of Artificial Sequence: Synthetic oligonucleotide
caacaacuacagcauuugaauauga

SEQ ID NO: 60709 - RNA, 25 nt, Artificial Sequence
  Description of Artificial Sequence: Synthetic oligonucleotide
aagaugaagauggugaucgaauuac

SEQ ID NO: 60710 - RNA, 25 nt, Artificial Sequence
  Description of Artificial Sequence: Synthetic oligonucleotide
cagugagaagugaugaggaaaugaa

SEQ ID NO: 60711 - RNA, 25 nt, Artificial Sequence
  Description of Artificial Sequence: Synthetic oligonucleotide
aggcaaugcugucauauuauuauuc

SEQ ID NO: 60712 - RNA, 25 nt, Artificial Sequence
  Description of Artificial Sequence: Synthetic oligonucleotide
ccacaguaauggaacagcaaguaaa

SEQ ID NO: 60713 - RNA, 25 nt, Artificial Sequence
  Description of Artificial Sequence: Synthetic oligonucleotide
auggacaguuaauagagccucugca

SEQ ID NO: 60714 - RNA, 25 nt, Artificial Sequence
  Description of Artificial Sequence: Synthetic oligonucleotide
agauauuuccaagagccugcaagcc

SEQ ID NO: 60715 - RNA, 25 nt, Artificial Sequence
  Description of Artificial Sequence: Synthetic oligonucleotide
cuccuggggaacggaacauacaugg

SEQ ID NO: 60716 - RNA, 25 nt, Artificial Sequence
  Description of Artificial Sequence: Synthetic oligonucleotide
gccugaaggugaauacucgggccgg

SEQ ID NO: 60717 - RNA, 25 nt, Artificial Sequence
  Description of Artificial Sequence: Synthetic oligonucleotide
gacccucucaacacagcagcccagc

SEQ ID NO: 60718 - RNA, 25 nt, Artificial Sequence
  Description of Artificial Sequence: Synthetic oligonucleotide
cagucucagauucacuuccaagcaa

SEQ ID NO: 60719 - RNA, 25 nt, Artificial Sequence
  Description of Artificial Sequence: Synthetic oligonucleotide
auagcuuaaagaagucuucugcuga

SEQ ID NO: 60720 - RNA, 25 nt, Artificial Sequence
  Description of Artificial Sequence: Synthetic oligonucleotide
aacugaaaaaaauacuagccaaugg

SEQ ID NO: 60721 - RNA, 25 nt, Artificial Sequence
  Description of Artificial Sequence: Synthetic oligonucleotide
gccagaugaaugaacaagacauacg

SEQ ID NO: 60722 - RNA, 25 nt, Artificial Sequence
  Description of Artificial Sequence: Synthetic oligonucleotide
gauaucgggacacucuuggucaugg

SEQ ID NO: 60723 - RNA, 25 nt, Artificial Sequence
  Description of Artificial Sequence: Synthetic oligonucleotide
gcaacggaggcacagucuacaaagc

SEQ ID NO: 60724 - RNA, 25 nt, Artificial Sequence
  Description of Artificial Sequence: Synthetic oligonucleotide
cauaucaugucccgagugggaaaau

SEQ ID NO: 60725 - RNA, 25 nt, Artificial Sequence
  Description of Artificial Sequence: Synthetic oligonucleotide
uauuagcuguaaaggucauacuacu

SEQ ID NO: 60726 - RNA, 25 nt, Artificial Sequence
  Description of Artificial Sequence: Synthetic oligonucleotide
uagauauuacacuggaacuucagaa

SEQ ID NO: 60727 - RNA, 25 nt, Artificial Sequence
  Description of Artificial Sequence: Synthetic oligonucleotide
agcaaauuaugucugaauuggaaau

SEQ ID NO: 60728 - RNA, 25 nt, Artificial Sequence
  Description of Artificial Sequence: Synthetic oligonucleotide
uucuuuauaagugcgauucaucaua

SEQ ID NO: 60729 - RNA, 25 nt, Artificial Sequence
  Description of Artificial Sequence: Synthetic oligonucleotide
auaucauuggauuuuauggagcauu

SEQ ID NO: 60730 - RNA, 25 nt, Artificial Sequence
  Description of Artificial Sequence: Synthetic oligonucleotide
uuuuuguagaaaacaggauuucaau

SEQ ID NO: 60731 - RNA, 25 nt, Artificial Sequence
  Description of Artificial Sequence: Synthetic oligonucleotide
uauguacagaauucauggauggggg

SEQ ID NO: 60732 - RNA, 25 nt, Artificial Sequence
  Description of Artificial Sequence: Synthetic oligonucleotide
gaucuuuggauguauauaggaaaau

SEQ ID NO: 60733 - RNA, 25 nt, Artificial Sequence
  Description of Artificial Sequence: Synthetic oligonucleotide
ugccagaacauguccuuggaagaau

SEQ ID NO: 60734 - RNA, 25 nt, Artificial Sequence
  Description of Artificial Sequence: Synthetic oligonucleotide
uugcaguagcaguuguuaaaggccu

SEQ ID NO: 60735 - RNA, 25 nt, Artificial Sequence
  Description of Artificial Sequence: Synthetic oligonucleotide
uuacuuauuuguggaguuuaaagau

SEQ ID NO: 60736 - RNA, 25 nt, Artificial Sequence
  Description of Artificial Sequence: Synthetic oligonucleotide
uuuuacauagagacgugaagcccuc

SEQ ID NO: 60737 - RNA, 25 nt, Artificial Sequence
  Description of Artificial Sequence: Synthetic oligonucleotide
ccaauaugcuaguaaacacaagagg

SEQ ID NO: 60738 - RNA, 25 nt, Artificial Sequence
  Description of Artificial Sequence: Synthetic oligonucleotide
gacagguuaagcugugugauuuugg

SEQ ID NO: 60739 - RNA, 25 nt, Artificial Sequence
  Description of Artificial Sequence: Synthetic oligonucleotide
gaguuagcacucagcuggugaauuc

SEQ ID NO: 60740 - RNA, 25 nt, Artificial Sequence
  Description of Artificial Sequence: Synthetic oligonucleotide
cuauagccaagacguauguuggaac

SEQ ID NO: 60741 - RNA, 25 nt, Artificial Sequence
  Description of Artificial Sequence: Synthetic oligonucleotide
caaaugcuuauauggcgccugaaag

SEQ ID NO: 60742 - RNA, 25 nt, Artificial Sequence
  Description of Artificial Sequence: Synthetic oligonucleotide
ggauuucaggggagcaguauggaau

SEQ ID NO: 60743 - RNA, 25 nt, Artificial Sequence
  Description of Artificial Sequence: Synthetic oligonucleotide
uucauucugaugucuggagcuuagg

SEQ ID NO: 60744 - RNA, 25 nt, Artificial Sequence
  Description of Artificial Sequence: Synthetic oligonucleotide
gaaucucuuuuauggagcuugcucu

SEQ ID NO: 60745 - RNA, 25 nt, Artificial Sequence
  Description of Artificial Sequence: Synthetic oligonucleotide
uugggagguuuccauauccucagau

SEQ ID NO: 60746 - RNA, 25 nt, Artificial Sequence
  Description of Artificial Sequence: Synthetic oligonucleotide
uucagaaaaaccagggaucuuuaau

SEQ ID NO: 60747 - RNA, 25 nt, Artificial Sequence
  Description of Artificial Sequence: Synthetic oligonucleotide
ugccucuccagcuucugcagugcau

SEQ ID NO: 60748 - RNA, 25 nt, Artificial Sequence
  Description of Artificial Sequence: Synthetic oligonucleotide
uuguugaugaggauucgcccguccu

SEQ ID NO: 60749 - RNA, 25 nt, Artificial Sequence
  Description of Artificial Sequence: Synthetic oligonucleotide
uuccaguuggagaguucucggagcc

SEQ ID NO: 60750 - RNA, 25 nt, Artificial Sequence
  Description of Artificial Sequence: Synthetic oligonucleotide
cauuuguacauuucaucacucagug

SEQ ID NO: 60751 - RNA, 25 nt, Artificial Sequence
  Description of Artificial Sequence: Synthetic oligonucleotide
guaugcgaaaacagccaaaagaaag

SEQ ID NO: 60752 - RNA, 25 nt, Artificial Sequence
  Description of Artificial Sequence: Synthetic oligonucleotide
ggccagcaccugaagaauugauggg

SEQ ID NO: 60753 - RNA, 25 nt, Artificial Sequence
  Description of Artificial Sequence: Synthetic oligonucleotide
gccacccguucaucgugcaguucaa

SEQ ID NO: 60754 - RNA, 25 nt, Artificial Sequence
  Description of Artificial Sequence: Synthetic oligonucleotide
augauggaaaugccgccgugguguc

SEQ ID NO: 60755 - RNA, 25 nt, Artificial Sequence
  Description of Artificial Sequence: Synthetic oligonucleotide
ccaugugggugugccgggcgcugga

SEQ ID NO: 60756 - RNA, 25 nt, Artificial Sequence
  Description of Artificial Sequence: Synthetic oligonucleotide
aggagaggcggagccagcaggggcc

SEQ ID NO: 60757 - RNA, 25 nt, Artificial Sequence
  Description of Artificial Sequence: Synthetic oligonucleotide
ccccgugaggcugccgcagggcacu

SEQ ID NO: 60758 - RNA, 25 nt, Artificial Sequence
  Description of Artificial Sequence: Synthetic oligonucleotide
ugaaagcccaggaccaguaaccaag

SEQ ID NO: 60759 - RNA, 25 nt, Artificial Sequence
  Description of Artificial Sequence: Synthetic oligonucleotide
ggagaacaacccacccgucgcccuu

SEQ ID NO: 60760 - RNA, 25 nt, Artificial Sequence
  Description of Artificial Sequence: Synthetic oligonucleotide
ucuccguaugcugccugcgccagaa

SEQ ID NO: 60761 - RNA, 25 nt, Artificial Sequence
  Description of Artificial Sequence: Synthetic oligonucleotide
agagcuuugcugggcccuggcuucc

SEQ ID NO: 60762 - RNA, 25 nt, Artificial Sequence
  Description of Artificial Sequence: Synthetic oligonucleotide
ccugcccucgccuucaccucuguca

SEQ ID NO: 60763 - RNA, 25 nt, Artificial Sequence
  Description of Artificial Sequence: Synthetic oligonucleotide
agcagguggccuugccuggggagcc

SEQ ID NO: 60764 - RNA, 25 nt, Artificial Sequence
  Description of Artificial Sequence: Synthetic oligonucleotide
cccauguguggcccaccccaccagg

SEQ ID NO: 60765 - RNA, 25 nt, Artificial Sequence
  Description of Artificial Sequence: Synthetic oligonucleotide
gccauccccauaccuucugguuuga

SEQ ID NO: 60766 - RNA, 25 nt, Artificial Sequence
  Description of Artificial Sequence: Synthetic oligonucleotide
aaggcgcugacacuggcagagaggu

SEQ ID NO: 60767 - RNA, 25 nt, Artificial Sequence
  Description of Artificial Sequence: Synthetic oligonucleotide
uaaaggguggggcauugagaaugga

SEQ ID NO: 60768 - RNA, 25 nt, Artificial Sequence
  Description of Artificial Sequence: Synthetic oligonucleotide
aggcucccagggucccugcccacuu

SEQ ID NO: 60769 - RNA, 25 nt, Artificial Sequence
  Description of Artificial Sequence: Synthetic oligonucleotide
ucuguuuuccuaauguuuuucucua

SEQ ID NO: 60770 - RNA, 25 nt, Artificial Sequence
  Description of Artificial Sequence: Synthetic oligonucleotide
auaaagggucaggcccgucagcauc

SEQ ID NO: 60771 - RNA, 25 nt, Artificial Sequence
  Description of Artificial Sequence: Synthetic oligonucleotide
cacugaugggaauaaaaguauuaau

SEQ ID NO: 60772 - RNA, 25 nt, Artificial Sequence
  Description of Artificial Sequence: Synthetic oligonucleotide
gaaucucuuuuauggagauucagaa

SEQ ID NO: 60773 - RNA, 25 nt, Artificial Sequence
  Description of Artificial Sequence: Synthetic oligonucleotide
aaaaccagggaucuuuaaugccucu

SEQ ID NO: 60774 - RNA, 25 nt, Artificial Sequence
  Description of Artificial Sequence: Synthetic oligonucleotide
uccagcuucugcagugcauuguuga

SEQ ID NO: 60775 - RNA, 25 nt, Artificial Sequence
  Description of Artificial Sequence: Synthetic oligonucleotide
augaggauucgcccguccuuccagu

SEQ ID NO: 60776 - RNA, 25 nt, Artificial Sequence
  Description of Artificial Sequence: Synthetic oligonucleotide
uuggagaguucucggagccauuugu

SEQ ID NO: 60777 - RNA, 25 nt, Artificial Sequence
  Description of Artificial Sequence: Synthetic oligonucleotide
uacauuucaucacucaguguaugcg

SEQ ID NO: 60778 - RNA, 25 nt, Artificial Sequence
  Description of Artificial Sequence: Synthetic oligonucleotide
gaaaacagccaaaagaaaggccagc

SEQ ID NO: 60779 - RNA, 25 nt, Artificial Sequence
  Description of Artificial Sequence: Synthetic oligonucleotide
caccugaagaauugaugggccaccc

SEQ ID NO: 60780 - RNA, 25 nt, Artificial Sequence
  Description of Artificial Sequence: Synthetic oligonucleotide
cguucaucgugcaguucaaugaugg

SEQ ID NO: 60781 - RNA, 25 nt, Artificial Sequence
  Description of Artificial Sequence: Synthetic oligonucleotide
gaaaugccgccgugguguccaugug

SEQ ID NO: 60782 - RNA, 25 nt, Artificial Sequence
  Description of Artificial Sequence: Synthetic oligonucleotide
gggugugccgggcgcuggaggagag

SEQ ID NO: 60783 - RNA, 25 nt, Artificial Sequence
  Description of Artificial Sequence: Synthetic oligonucleotide
ggcggagccagcaggggcccccgug

SEQ ID NO: 60784 - RNA, 25 nt, Artificial Sequence
  Description of Artificial Sequence: Synthetic oligonucleotide
gaggcugccgcagggcacugaaagc

SEQ ID NO: 60785 - RNA, 25 nt, Artificial Sequence
  Description of Artificial Sequence: Synthetic oligonucleotide
cccaggaccaguaaccaaggagaac

SEQ ID NO: 60786 - RNA, 25 nt, Artificial Sequence
  Description of Artificial Sequence: Synthetic oligonucleotide
caacccacccgucgcccuucuccgu

SEQ ID NO: 60787 - RNA, 25 nt, Artificial Sequence
  Description of Artificial Sequence: Synthetic oligonucleotide
uaugcugccugcgccagaagagcuu

SEQ ID NO: 60788 - RNA, 25 nt, Artificial Sequence
  Description of Artificial Sequence: Synthetic oligonucleotide
uugcugggcccuggcuucccugccc

SEQ ID NO: 60789 - RNA, 25 nt, Artificial Sequence
  Description of Artificial Sequence: Synthetic oligonucleotide
cucgccuucaccucugucagcaggu

SEQ ID NO: 60790 - RNA, 25 nt, Artificial Sequence
  Description of Artificial Sequence: Synthetic oligonucleotide
uggccuugccuggggagccccaugu

SEQ ID NO: 60791 - RNA, 25 nt, Artificial Sequence
  Description of Artificial Sequence: Synthetic oligonucleotide
uguggcccaccccaccaggccaucc

SEQ ID NO: 60792 - RNA, 25 nt, Artificial Sequence
  Description of Artificial Sequence: Synthetic oligonucleotide
cccauaccuucugguuugaaggcgc

SEQ ID NO: 60793 - RNA, 25 nt, Artificial Sequence
  Description of Artificial Sequence: Synthetic oligonucleotide
cugacacuggcagagagguaaaggg

SEQ ID NO: 60794 - RNA, 25 nt, Artificial Sequence
  Description of Artificial Sequence: Synthetic oligonucleotide
guggggcauugagaauggaggcucc

SEQ ID NO: 60795 - RNA, 25 nt, Artificial Sequence
  Description of Artificial Sequence: Synthetic oligonucleotide
ccagggucccugcccacuucuguuu

SEQ ID NO: 60796 - RNA, 25 nt, Artificial Sequence
  Description of Artificial Sequence: Synthetic oligonucleotide
uuccuaauguuuuucucuauaaagg

SEQ ID NO: 60797 - RNA, 25 nt, Artificial Sequence
  Description of Artificial Sequence: Synthetic oligonucleotide
ggucaggcccgucagcaucacugau

SEQ ID NO: 60798 - RNA, 25 nt, Artificial Sequence
  Description of Artificial Sequence: Synthetic oligonucleotide
ugggaauaaaaguauuaaugcuuug

SEQ ID NO: 60799 - RNA, 25 nt, Artificial Sequence
  Description of Artificial Sequence: Synthetic oligonucleotide
auaaaaguauuaaugcuuugugaca

SEQ ID NO: 60800 - RNA, 1879 nt, Homo sapiens
aguuccaaguuuggagcuuuuagcugccagcccuggcccaucauguagcugcagcacagccuucccuaacguugcaacugggggaaaaaucacuuuccagucuguuuugcaaggugugcauuuccaucuugauucccugaaaguccaucugcugcaucggucaagagaaacuccacuugcaugaagauugcacgccugcagcuugcaucuuuguugcaaaacuagcuacagaagagaagcaaggcaaagucuuuugugcuccccucccccaucaaaggaaaggggaaaaugucucagucgaaaggcaagaagcgaaacccuggccuuaaaauuccaaaagaagcauuugaacaaccucagaccaguuccacaccaccucgagauuuagacuccaaggcuugcauuucuauuggaaaucagaacuuugaggugaaggcagaugaccuggagccuauaauggaacugggacgaggugcguacggggugguggagaagaugcggcacgugcccagcgggcagaucauggcagugaagcggauccgagccacaguaaauagccaggaacagaaacggcuacugauggauuuggauauuuccaugaggacgguggacuguccauucacugucaccuuuuauggcgcacuguuucgggagggugauguguggaucugcauggagcucauggauacaucacuagauaaauucuacaaacaaguuauugauaaaggccagacaauuccagaggacaucuuagggaaaauagcaguuucuauuguaaaagcauuagaacauuuacauaguaagcugucugucauucacagagacgucaagccuucuaauguacucaucaaugcucucggucaagugaagaugugcgauuuuggaaucaguggcuacuugguggacucuguugcuaaaacaauugaugcagguugcaaaccauacauggccccugaaagaauaaacccagagcucaaccagaagggauacagugugaagucugacauuuggagucugggcaucacgaugauugaguuggccauccuucgauuucccuaugauucauggggaacuccauuucagcagcucaaacaggugguagaggagccaucgccacaacucccagcagacaaguucucugcagaguuuguugacuuuaccucacagugcuuaaagaagaauuccaaagaacggccuacauacccagagcuaaugcaacauccauuuuucacccuacaugaauccaaaggaacagauguggcaucuuuuguaaaacugauucuuggagacuaaaaagcaguggacuuaaucgguugacccuacuguggauugguggguuucggggugaagcaaguucacuacagcaucaauagaaagucaucuuugagauaauuuaacccugccucucagaggguuuucucucccaauuuucuuuuuacucccccucuuaagggggccuuggaaucuauaguauagaaugaacugucuagauggaugaauuaugauaaaggcuuaggacuucaaaaggugauuaaauauuuaaugaugugucauaugaguccucaagcuucucagacuucucuuauucuuuacaaaaugaaugcauuggcccugacaaaaaggugcuacgguagugaugaaauuauaaguagauuuguaguuugucccauuuauuauuuuaauauuuauguuuaagugcuugguugaaaagauuccauuuuauacaagaagggagauucaaaaaaaaaauauaagguuggguuagcaauauuuauagggcuuuuauuuuuuaaguucaauugugucugugguccagaagaaauuauuuaauaugcaucuuugagaauauuauaaaaauaucaaaaaggaaaaaaaaaaa

SEQ ID NO: 60801 - RNA, 19 nt, Artificial Sequence
  Description of Artificial Sequence: Synthetic oligonucleotide
aguuccaaguuuggagcuu

SEQ ID NO: 60802 - RNA, 19 nt, Artificial Sequence
  Description of Artificial Sequence: Synthetic oligonucleotide
uuuagcugccagcccuggc

SEQ ID NO: 60803 - RNA, 19 nt, Artificial Sequence
  Description of Artificial Sequence: Synthetic oligonucleotide
cccaucauguagcugcagc

SEQ ID NO: 60804 - RNA, 19 nt, Artificial Sequence
  Description of Artificial Sequence: Synthetic oligonucleotide
cacagccuucccuaacguu

SEQ ID NO: 60805 - RNA, 19 nt, Artificial Sequence
  Description of Artificial Sequence: Synthetic oligonucleotide
ugcaacugggggaaaaauc

SEQ ID NO: 60806 - RNA, 19 nt, Artificial Sequence
  Description of Artificial Sequence: Synthetic oligonucleotide
cacuuuccagucuguuuug

SEQ ID NO: 60807 - RNA, 19 nt, Artificial Sequence
  Description of Artificial Sequence: Synthetic oligonucleotide
gcaaggugugcauuuccau

SEQ ID NO: 60808 - RNA, 19 nt, Artificial Sequence
  Description of Artificial Sequence: Synthetic oligonucleotide
ucuugauucccugaaaguc

SEQ ID NO: 60809 - RNA, 19 nt, Artificial Sequence
  Description of Artificial Sequence: Synthetic oligonucleotide
ccaucugcugcaucgguca

SEQ ID NO: 60810 - RNA, 19 nt, Artificial Sequence
  Description of Artificial Sequence: Synthetic oligonucleotide
aagagaaacuccacuugca

SEQ ID NO: 60811 - RNA, 19 nt, Artificial Sequence
  Description of Artificial Sequence: Synthetic oligonucleotide
augaagauugcacgccugc

SEQ ID NO: 60812 - RNA, 19 nt, Artificial Sequence
  Description of Artificial Sequence: Synthetic oligonucleotide
cagcuugcaucuuuguugc

SEQ ID NO: 60813 - RNA, 19 nt, Artificial Sequence
  Description of Artificial Sequence: Synthetic oligonucleotide
caaaacuagcuacagaaga

SEQ ID NO: 60814 - RNA, 19 nt, Artificial Sequence
  Description of Artificial Sequence: Synthetic oligonucleotide
agaagcaaggcaaagucuu

SEQ ID NO: 60815 - RNA, 19 nt, Artificial Sequence
  Description of Artificial Sequence: Synthetic oligonucleotide
uuugugcuccccuccccca

SEQ ID NO: 60816 - RNA, 19 nt, Artificial Sequence
  Description of Artificial Sequence: Synthetic oligonucleotide
aucaaaggaaaggggaaaa

SEQ ID NO: 60817 - RNA, 19 nt, Artificial Sequence
  Description of Artificial Sequence: Synthetic oligonucleotide
augucucagucgaaaggca

SEQ ID NO: 60818 - RNA, 19 nt, Artificial Sequence
  Description of Artificial Sequence: Synthetic oligonucleotide
aagaagcgaaacccuggcc

SEQ ID NO: 60819 - RNA, 19 nt, Artificial Sequence
  Description of Artificial Sequence: Synthetic oligonucleotide
cuuaaaauuccaaaagaag

SEQ ID NO: 60820 - RNA, 19 nt, Artificial Sequence
  Description of Artificial Sequence: Synthetic oligonucleotide
gcauuugaacaaccucaga

SEQ ID NO: 60821 - RNA, 19 nt, Artificial Sequence
  Description of Artificial Sequence: Synthetic oligonucleotide
accaguuccacaccaccuc

SEQ ID NO: 60822 - RNA, 19 nt, Artificial Sequence
  Description of Artificial Sequence: Synthetic oligonucleotide
cgagauuuagacuccaagg

SEQ ID NO: 60823 - RNA, 19 nt, Artificial Sequence
  Description of Artificial Sequence: Synthetic oligonucleotide
gcuugcauuucuauuggaa

SEQ ID NO: 60824 - RNA, 19 nt, Artificial Sequence
  Description of Artificial Sequence: Synthetic oligonucleotide
aaucagaacuuugagguga

SEQ ID NO: 60825 - RNA, 19 nt, Artificial Sequence
  Description of Artificial Sequence: Synthetic oligonucleotide
aaggcagaugaccuggagc

SEQ ID NO: 60826 - RNA, 19 nt, Artificial Sequence
  Description of Artificial Sequence: Synthetic oligonucleotide
ccuauaauggaacugggac

SEQ ID NO: 60827 - RNA, 19 nt, Artificial Sequence
  Description of Artificial Sequence: Synthetic oligonucleotide
cgaggugcguacggggugg

SEQ ID NO: 60828 - RNA, 19 nt, Artificial Sequence
  Description of Artificial Sequence: Synthetic oligonucleotide
guggagaagaugcggcacg

SEQ ID NO: 60829 - RNA, 19 nt, Artificial Sequence
  Description of Artificial Sequence: Synthetic oligonucleotide
gugcccagcgggcagauca

SEQ ID NO: 60830 - RNA, 19 nt, Artificial Sequence
  Description of Artificial Sequence: Synthetic oligonucleotide
auggcagugaagcggaucc

SEQ ID NO: 60831 - RNA, 19 nt, Artificial Sequence
  Description of Artificial Sequence: Synthetic oligonucleotide
cgagccacaguaaauagcc

SEQ ID NO: 60832 - RNA, 19 nt, Artificial Sequence
  Description of Artificial Sequence: Synthetic oligonucleotide
caggaacagaaacggcuac

SEQ ID NO: 60833 - RNA, 19 nt, Artificial Sequence
  Description of Artificial Sequence: Synthetic oligonucleotide
cugauggauuuggauauuu

SEQ ID NO: 60834 - RNA, 19 nt, Artificial Sequence
  Description of Artificial Sequence: Synthetic oligonucleotide
uccaugaggacgguggacu

SEQ ID NO: 60835 - RNA, 19 nt, Artificial Sequence
  Description of Artificial Sequence: Synthetic oligonucleotide
uguccauucacugucaccu

SEQ ID NO: 60836 - RNA, 19 nt, Artificial Sequence
  Description of Artificial Sequence: Synthetic oligonucleotide
uuuuauggcgcacuguuuc

SEQ ID NO: 60837 - RNA, 19 nt, Artificial Sequence
  Description of Artificial Sequence: Synthetic oligonucleotide
cgggagggugaugugugga

SEQ ID NO: 60838 - RNA, 19 nt, Artificial Sequence
  Description of Artificial Sequence: Synthetic oligonucleotide
aucugcauggagcucaugg

SEQ ID NO: 60839 - RNA, 19 nt, Artificial Sequence
  Description of Artificial Sequence: Synthetic oligonucleotide
gauacaucacuagauaaau

SEQ ID NO: 60840 - RNA, 19 nt, Artificial Sequence
  Description of Artificial Sequence: Synthetic oligonucleotide
uucuacaaacaaguuauug

SEQ ID NO: 60841 - RNA, 19 nt, Artificial Sequence
  Description of Artificial Sequence: Synthetic oligonucleotide
gauaaaggccagacaauuc

SEQ ID NO: 60842 - RNA, 19 nt, Artificial Sequence
  Description of Artificial Sequence: Synthetic oligonucleotide
ccagaggacaucuuaggga

SEQ ID NO: 60843 - RNA, 19 nt, Artificial Sequence
  Description of Artificial Sequence: Synthetic oligonucleotide
aaaauagcaguuucuauug

SEQ ID NO: 60844 - RNA, 19 nt, Artificial Sequence
  Description of Artificial Sequence: Synthetic oligonucleotide
guaaaagcauuagaacauu

SEQ ID NO: 60845 - RNA, 19 nt, Artificial Sequence
  Description of Artificial Sequence: Synthetic oligonucleotide
uuacauaguaagcugucug

SEQ ID NO: 60846 - RNA, 19 nt, Artificial Sequence
  Description of Artificial Sequence: Synthetic oligonucleotide
gucauucacagagacguca

SEQ ID NO: 60847 - RNA, 19 nt, Artificial Sequence
  Description of Artificial Sequence: Synthetic oligonucleotide
aagccuucuaauguacuca

SEQ ID NO: 60848 - RNA, 19 nt, Artificial Sequence
  Description of Artificial Sequence: Synthetic oligonucleotide
aucaaugcucucggucaag

SEQ ID NO: 60849 - RNA, 19 nt, Artificial Sequence
  Description of Artificial Sequence: Synthetic oligonucleotide
gugaagaugugcgauuuug

SEQ ID NO: 60850 - RNA, 19 nt, Artificial Sequence
  Description of Artificial Sequence: Synthetic oligonucleotide
ggaaucaguggcuacuugg

SEQ ID NO: 60851 - RNA, 19 nt, Artificial Sequence
  Description of Artificial Sequence: Synthetic oligonucleotide
guggacucuguugcuaaaa

SEQ ID NO: 60852 - RNA, 19 nt, Artificial Sequence
  Description of Artificial Sequence: Synthetic oligonucleotide
acaauugaugcagguugca

SEQ ID NO: 60853 - RNA, 19 nt, Artificial Sequence
  Description of Artificial Sequence: Synthetic oligonucleotide
aaaccauacauggccccug

SEQ ID NO: 60854 - RNA, 19 nt, Artificial Sequence
  Description of Artificial Sequence: Synthetic oligonucleotide
gaaagaauaaacccagagc

SEQ ID NO: 60855 - RNA, 19 nt, Artificial Sequence
  Description of Artificial Sequence: Synthetic oligonucleotide
cucaaccagaagggauaca

SEQ ID NO: 60856 - RNA, 19 nt, Artificial Sequence
  Description of Artificial Sequence: Synthetic oligonucleotide
agugugaagucugacauuu

SEQ ID NO: 60857 - RNA, 19 nt, Artificial Sequence
  Description of Artificial Sequence: Synthetic oligonucleotide
uggagucugggcaucacga

SEQ ID NO: 60858 - RNA, 19 nt, Artificial Sequence
  Description of Artificial Sequence: Synthetic oligonucleotide
augauugaguuggccaucc

SEQ ID NO: 60859 - RNA, 19 nt, Artificial Sequence
  Description of Artificial Sequence: Synthetic oligonucleotide
cuucgauuucccuaugauu

SEQ ID NO: 60860 - RNA, 19 nt, Artificial Sequence
  Description of Artificial Sequence: Synthetic oligonucleotide
ucauggggaacuccauuuc

SEQ ID NO: 60861 - RNA, 19 nt, Artificial Sequence
  Description of Artificial Sequence: Synthetic oligonucleotide
cagcagcucaaacaggugg

SEQ ID NO: 60862 - RNA, 19 nt, Artificial Sequence
  Description of Artificial Sequence: Synthetic oligonucleotide
guagaggagccaucgccac

SEQ ID NO: 60863 - RNA, 19 nt, Artificial Sequence
  Description of Artificial Sequence: Synthetic oligonucleotide
caacucccagcagacaagu

SEQ ID NO: 60864 - RNA, 19 nt, Artificial Sequence
  Description of Artificial Sequence: Synthetic oligonucleotide
uucucugcagaguuuguug

SEQ ID NO: 60865 - RNA, 19 nt, Artificial Sequence
  Description of Artificial Sequence: Synthetic oligonucleotide
gacuuuaccucacagugcu

SEQ ID NO: 60866 - RNA, 19 nt, Artificial Sequence
  Description of Artificial Sequence: Synthetic oligonucleotide
uuaaagaagaauuccaaag

SEQ ID NO: 60867 - RNA, 19 nt, Artificial Sequence
  Description of Artificial Sequence: Synthetic oligonucleotide
gaacggccuacauacccag

SEQ ID NO: 60868 - RNA, 19 nt, Artificial Sequence
  Description of Artificial Sequence: Synthetic oligonucleotide
gagcuaaugcaacauccau

SEQ ID NO: 60869 - RNA, 19 nt, Artificial Sequence
  Description of Artificial Sequence: Synthetic oligonucleotide
uuuuucacccuacaugaau

SEQ ID NO: 60870 - RNA, 19 nt, Artificial Sequence
  Description of Artificial Sequence: Synthetic oligonucleotide
uccaaaggaacagaugugg

SEQ ID NO: 60871 - RNA, 19 nt, Artificial Sequence
  Description of Artificial Sequence: Synthetic oligonucleotide
gcaucuuuuguaaaacuga

SEQ ID NO: 60872 - RNA, 19 nt, Artificial Sequence
  Description of Artificial Sequence: Synthetic oligonucleotide
auucuuggagacuaaaaag

SEQ ID NO: 60873 - RNA, 19 nt, Artificial Sequence
  Description of Artificial Sequence: Synthetic oligonucleotide
gcaguggacuuaaucgguu

SEQ ID NO: 60874 - RNA, 19 nt, Artificial Sequence
  Description of Artificial Sequence: Synthetic oligonucleotide
ugacccuacuguggauugg

SEQ ID NO: 60875 - RNA, 19 nt, Artificial Sequence
  Description of Artificial Sequence: Synthetic oligonucleotide
guggguuucggggugaagc

SEQ ID NO: 60876 - RNA, 19 nt, Artificial Sequence
  Description of Artificial Sequence: Synthetic oligonucleotide
caaguucacuacagcauca

SEQ ID NO: 60877 - RNA, 19 nt, Artificial Sequence
  Description of Artificial Sequence: Synthetic oligonucleotide
aauagaaagucaucuuuga

SEQ ID NO: 60878 - RNA, 19 nt, Artificial Sequence
  Description of Artificial Sequence: Synthetic oligonucleotide
agauaauuuaacccugccu

SEQ ID NO: 60879 - RNA, 19 nt, Artificial Sequence
  Description of Artificial Sequence: Synthetic oligonucleotide
ucucagaggguuuucucuc

SEQ ID NO: 60880 - RNA, 19 nt, Artificial Sequence
  Description of Artificial Sequence: Synthetic oligonucleotide
cccaauuuucuuuuuacuc

SEQ ID NO: 60881 - RNA, 19 nt, Artificial Sequence
  Description of Artificial Sequence: Synthetic oligonucleotide
cccccucuuaagggggccu

SEQ ID NO: 60882 - RNA, 19 nt, Artificial Sequence
  Description of Artificial Sequence: Synthetic oligonucleotide
uuggaaucuauaguauaga

SEQ ID NO: 60883 - RNA, 19 nt, Artificial Sequence
  Description of Artificial Sequence: Synthetic oligonucleotide
aaugaacugucuagaugga

SEQ ID NO: 60884 - RNA, 19 nt, Artificial Sequence
  Description of Artificial Sequence: Synthetic oligonucleotide
augaauuaugauaaaggcu

SEQ ID NO: 60885 - RNA, 19 nt, Artificial Sequence
  Description of Artificial Sequence: Synthetic oligonucleotide
uuaggacuucaaaagguga

SEQ ID NO: 60886 - RNA, 19 nt, Artificial Sequence
  Description of Artificial Sequence: Synthetic oligonucleotide
auuaaauauuuaaugaugu

SEQ ID NO: 60887 - RNA, 19 nt, Artificial Sequence
  Description of Artificial Sequence: Synthetic oligonucleotide
ugucauaugaguccucaag

SEQ ID NO: 60888 - RNA, 19 nt, Artificial Sequence
  Description of Artificial Sequence: Synthetic oligonucleotide
gcuucucagacuucucuua

SEQ ID NO: 60889 - RNA, 19 nt, Artificial Sequence
  Description of Artificial Sequence: Synthetic oligonucleotide
auucuuuacaaaaugaaug

SEQ ID NO: 60890 - RNA, 19 nt, Artificial Sequence
  Description of Artificial Sequence: Synthetic oligonucleotide
gcauuggcccugacaaaaa

SEQ ID NO: 60891 - RNA, 19 nt, Artificial Sequence
  Description of Artificial Sequence: Synthetic oligonucleotide
aggugcuacgguagugaug

SEQ ID NO: 60892 - RNA, 19 nt, Artificial Sequence
  Description of Artificial Sequence: Synthetic oligonucleotide
gaaauuauaaguagauuug

SEQ ID NO: 60893 - RNA, 19 nt, Artificial Sequence
  Description of Artificial Sequence: Synthetic oligonucleotide
guaguuugucccauuuauu

SEQ ID NO: 60894 - RNA, 19 nt, Artificial Sequence
  Description of Artificial Sequence: Synthetic oligonucleotide
uauuuuaauauuuauguuu

SEQ ID NO: 60895 - RNA, 19 nt, Artificial Sequence
  Description of Artificial Sequence: Synthetic oligonucleotide
uaagugcuugguugaaaag

SEQ ID NO: 60896 - RNA, 19 nt, Artificial Sequence
  Description of Artificial Sequence: Synthetic oligonucleotide
gauuccauuuuauacaaga

SEQ ID NO: 60897 - RNA, 19 nt, Artificial Sequence
  Description of Artificial Sequence: Synthetic oligonucleotide
aagggagauucaaaaaaaa

SEQ ID NO: 60898 - RNA, 19 nt, Artificial Sequence
  Description of Artificial Sequence: Synthetic oligonucleotide
aaauauaagguuggguuag

SEQ ID NO: 60899 - RNA, 19 nt, Artificial Sequence
  Description of Artificial Sequence: Synthetic oligonucleotide
gcaauauuuauagggcuuu

SEQ ID NO: 60900 - RNA, 19 nt, Artificial Sequence
  Description of Artificial Sequence: Synthetic oligonucleotide
uuauuuuuuaaguucaauu

SEQ ID NO: 60901 - RNA, 19 nt, Artificial Sequence
  Description of Artificial Sequence: Synthetic oligonucleotide
ugugucugugguccagaag

SEQ ID NO: 60902 - RNA, 19 nt, Artificial Sequence
  Description of Artificial Sequence: Synthetic oligonucleotide
gaaauuauuuaauaugcau

SEQ ID NO: 60903 - RNA, 19 nt, Artificial Sequence
  Description of Artificial Sequence: Synthetic oligonucleotide
ucuuugagaauauuauaaa

SEQ ID NO: 60904 - RNA, 19 nt, Artificial Sequence
  Description of Artificial Sequence: Synthetic oligonucleotide
aaauaucaaaaaggaaaaa

SEQ ID NO: 60905 - RNA, 25 nt, Artificial Sequence
  Description of Artificial Sequence: Synthetic oligonucleotide
aguuccaaguuuggagcuuuuagcu

SEQ ID NO: 60906 - RNA, 25 nt, Artificial Sequence
  Description of Artificial Sequence: Synthetic oligonucleotide
ugccagcccuggcccaucauguagc

SEQ ID NO: 60907 - RNA, 25 nt, Artificial Sequence
  Description of Artificial Sequence: Synthetic oligonucleotide
cugcagcacagccuucccuaacguu

SEQ ID NO: 60908 - RNA, 25 nt, Artificial Sequence
  Description of Artificial Sequence: Synthetic oligonucleotide
ugcaacugggggaaaaaucacuuuc

SEQ ID NO: 60909 - RNA, 25 nt, Artificial Sequence
  Description of Artificial Sequence: Synthetic oligonucleotide
ccagucuguuuugcaaggugugcau

SEQ ID NO: 60910 - RNA, 25 nt, Artificial Sequence
  Description of Artificial Sequence: Synthetic oligonucleotide
uuuccaucuugauucccugaaaguc

SEQ ID NO: 60911 - RNA, 25 nt, Artificial Sequence
  Description of Artificial Sequence: Synthetic oligonucleotide
ccaucugcugcaucggucaagagaa

SEQ ID NO: 60912 - RNA, 25 nt, Artificial Sequence
  Description of Artificial Sequence: Synthetic oligonucleotide
aacuccacuugcaugaagauugcac

SEQ ID NO: 60913 - RNA, 25 nt, Artificial Sequence
  Description of Artificial Sequence: Synthetic oligonucleotide
cgccugcagcuugcaucuuuguugc

SEQ ID NO: 60914 - RNA, 25 nt, Artificial Sequence
  Description of Artificial Sequence: Synthetic oligonucleotide
caaaacuagcuacagaagagaagca

SEQ ID NO: 60915 - RNA, 25 nt, Artificial Sequence
  Description of Artificial Sequence: Synthetic oligonucleotide
aaggcaaagucuuuugugcuccccu

SEQ ID NO: 60916 - RNA, 25 nt, Artificial Sequence
  Description of Artificial Sequence: Synthetic oligonucleotide
ucccccaucaaaggaaaggggaaaa

SEQ ID NO: 60917 - RNA, 25 nt, Artificial Sequence
  Description of Artificial Sequence: Synthetic oligonucleotide
augucucagucgaaaggcaagaagc

SEQ ID NO: 60918 - RNA, 25 nt, Artificial Sequence
  Description of Artificial Sequence: Synthetic oligonucleotide
cgaaacccuggccuuaaaauuccaa

SEQ ID NO: 60919 - RNA, 25 nt, Artificial Sequence
  Description of Artificial Sequence: Synthetic oligonucleotide
aaagaagcauuugaacaaccucaga

SEQ ID NO: 60920 - RNA, 25 nt, Artificial Sequence
  Description of Artificial Sequence: Synthetic oligonucleotide
accaguuccacaccaccucgagauu

SEQ ID NO: 60921 - RNA, 25 nt, Artificial Sequence
  Description of Artificial Sequence: Synthetic oligonucleotide
uuagacuccaaggcuugcauuucua

SEQ ID NO: 60922 - RNA, 25 nt, Artificial Sequence
  Description of Artificial Sequence: Synthetic oligonucleotide
auuggaaaucagaacuuugagguga

SEQ ID NO: 60923 - RNA, 25 nt, Artificial Sequence
  Description of Artificial Sequence: Synthetic oligonucleotide
aaggcagaugaccuggagccuauaa

SEQ ID NO: 60924 - RNA, 25 nt, Artificial Sequence
  Description of Artificial Sequence: Synthetic oligonucleotide
auggaacugggacgaggugcguacg

SEQ ID NO: 60925 - RNA, 25 nt, Artificial Sequence
  Description of Artificial Sequence: Synthetic oligonucleotide
ggggugguggagaagaugcggcacg

SEQ ID NO: 60926 - RNA, 25 nt, Artificial Sequence
  Description of Artificial Sequence: Synthetic oligonucleotide
gugcccagcgggcagaucauggcag

SEQ ID NO: 60927 - RNA, 25 nt, Artificial Sequence
  Description of Artificial Sequence: Synthetic oligonucleotide
gugaagcggauccgagccacaguaa

SEQ ID NO: 60928 - RNA, 25 nt, Artificial Sequence
  Description of Artificial Sequence: Synthetic oligonucleotide
aauagccaggaacagaaacggcuac

SEQ ID NO: 60929 - RNA, 25 nt, Artificial Sequence
  Description of Artificial Sequence: Synthetic oligonucleotide
cugauggauuuggauauuuccauga

SEQ ID NO: 60930 - RNA, 25 nt, Artificial Sequence
  Description of Artificial Sequence: Synthetic oligonucleotide
aggacgguggacuguccauucacug

SEQ ID NO: 60931 - RNA, 25 nt, Artificial Sequence
  Description of Artificial Sequence: Synthetic oligonucleotide
gucaccuuuuauggcgcacuguuuc

SEQ ID NO: 60932 - RNA, 25 nt, Artificial Sequence
  Description of Artificial Sequence: Synthetic oligonucleotide
cgggagggugauguguggaucugca

SEQ ID NO: 60933 - RNA, 25 nt, Artificial Sequence
  Description of Artificial Sequence: Synthetic oligonucleotide
auggagcucauggauacaucacuag

SEQ ID NO: 60934 - RNA, 25 nt, Artificial Sequence
  Description of Artificial Sequence: Synthetic oligonucleotide
gauaaauucuacaaacaaguuauug

SEQ ID NO: 60935 - RNA, 25 nt, Artificial Sequence
  Description of Artificial Sequence: Synthetic oligonucleotide
gauaaaggccagacaauuccagagg

SEQ ID NO: 60936 - RNA, 25 nt, Artificial Sequence
  Description of Artificial Sequence: Synthetic oligonucleotide
gacaucuuagggaaaauagcaguuu

SEQ ID NO: 60937 - RNA, 25 nt, Artificial Sequence
  Description of Artificial Sequence: Synthetic oligonucleotide
ucuauuguaaaagcauuagaacauu

SEQ ID NO: 60938 - RNA, 25 nt, Artificial Sequence
  Description of Artificial Sequence: Synthetic oligonucleotide
uuacauaguaagcugucugucauuc

SEQ ID NO: 60939 - RNA, 25 nt, Artificial Sequence
  Description of Artificial Sequence: Synthetic oligonucleotide
cacagagacgucaagccuucuaaug

SEQ ID NO: 60940 - RNA, 25 nt, Artificial Sequence
  Description of Artificial Sequence: Synthetic oligonucleotide
guacucaucaaugcucucggucaag

SEQ ID NO: 60941 - RNA, 25 nt, Artificial Sequence
  Description of Artificial Sequence: Synthetic oligonucleotide
gugaagaugugcgauuuuggaauca

SEQ ID NO: 60942 - RNA, 25 nt, Artificial Sequence
  Description of Artificial Sequence: Synthetic oligonucleotide
aguggcuacuugguggacucuguug

SEQ ID NO: 60943 - RNA, 25 nt, Artificial Sequence
  Description of Artificial Sequence: Synthetic oligonucleotide
gcuaaaacaauugaugcagguugca

SEQ ID NO: 60944 - RNA, 25 nt, Artificial Sequence
  Description of Artificial Sequence: Synthetic oligonucleotide
aaaccauacauggccccugaaagaa

SEQ ID NO: 60945 - RNA, 25 nt, Artificial Sequence
  Description of Artificial Sequence: Synthetic oligonucleotide
auaaacccagagcucaaccagaagg

SEQ ID NO: 60946 - RNA, 25 nt, Artificial Sequence
  Description of Artificial Sequence: Synthetic oligonucleotide
ggauacagugugaagucugacauuu

SEQ ID NO: 60947 - RNA, 25 nt, Artificial Sequence
  Description of Artificial Sequence: Synthetic oligonucleotide
uggagucugggcaucacgaugauug

SEQ ID NO: 60948 - RNA, 25 nt, Artificial Sequence
  Description of Artificial Sequence: Synthetic oligonucleotide
gaguuggccauccuucgauuucccu

SEQ ID NO: 60949 - RNA, 25 nt, Artificial Sequence
  Description of Artificial Sequence: Synthetic oligonucleotide
uaugauucauggggaacuccauuuc

SEQ ID NO: 60950 - RNA, 25 nt, Artificial Sequence
  Description of Artificial Sequence: Synthetic oligonucleotide
cagcagcucaaacaggugguagagg

SEQ ID NO: 60951 - RNA, 25 nt, Artificial Sequence
  Description of Artificial Sequence: Synthetic oligonucleotide
gagccaucgccacaacucccagcag

SEQ ID NO: 60952 - RNA, 25 nt, Artificial Sequence
  Description of Artificial Sequence: Synthetic oligonucleotide
gacaaguucucugcagaguuuguug

SEQ ID NO: 60953 - RNA, 25 nt, Artificial Sequence
  Description of Artificial Sequence: Synthetic oligonucleotide
gacuuuaccucacagugcuuaaaga

SEQ ID NO: 60954 - RNA, 25 nt, Artificial Sequence
  Description of Artificial Sequence: Synthetic oligonucleotide
aagaauuccaaagaacggccuacau

SEQ ID NO: 60955 - RNA, 25 nt, Artificial Sequence
  Description of Artificial Sequence: Synthetic oligonucleotide
uacccagagcuaaugcaacauccau

SEQ ID NO: 60956 - RNA, 25 nt, Artificial Sequence
  Description of Artificial Sequence: Synthetic oligonucleotide
uuuuucacccuacaugaauccaaag

SEQ ID NO: 60957 - RNA, 25 nt, Artificial Sequence
  Description of Artificial Sequence: Synthetic oligonucleotide
ggaacagauguggcaucuuuuguaa

SEQ ID NO: 60958 - RNA, 25 nt, Artificial Sequence
  Description of Artificial Sequence: Synthetic oligonucleotide
aaacugauucuuggagacuaaaaag

SEQ ID NO: 60959 - RNA, 25 nt, Artificial Sequence
  Description of Artificial Sequence: Synthetic oligonucleotide
gcaguggacuuaaucgguugacccu

SEQ ID NO: 60960 - RNA, 25 nt, Artificial Sequence
  Description of Artificial Sequence: Synthetic oligonucleotide
uacuguggauugguggguuucgggg

SEQ ID NO: 60961 - RNA, 25 nt, Artificial Sequence
  Description of Artificial Sequence: Synthetic oligonucleotide
gugaagcaaguucacuacagcauca

SEQ ID NO: 60962 - RNA, 25 nt, Artificial Sequence
  Description of Artificial Sequence: Synthetic oligonucleotide
aauagaaagucaucuuugagauaau

SEQ ID NO: 60963 - RNA, 25 nt, Artificial Sequence
  Description of Artificial Sequence: Synthetic oligonucleotide
uuuaacccugccucucagaggguuu

SEQ ID NO: 60964 - RNA, 25 nt, Artificial Sequence
  Description of Artificial Sequence: Synthetic oligonucleotide
uucucucccaauuuucuuuuuacuc

SEQ ID NO: 60965 - RNA, 25 nt, Artificial Sequence
  Description of Artificial Sequence: Synthetic oligonucleotide
cccccucuuaagggggccuuggaau

SEQ ID NO: 60966 - RNA, 25 nt, Artificial Sequence
  Description of Artificial Sequence: Synthetic oligonucleotide
ucuauaguauagaaugaacugucua

SEQ ID NO: 60967 - RNA, 25 nt, Artificial Sequence
  Description of Artificial Sequence: Synthetic oligonucleotide
agauggaugaauuaugauaaaggcu

SEQ ID NO: 60968 - RNA, 25 nt, Artificial Sequence
  Description of Artificial Sequence: Synthetic oligonucleotide
uuaggacuucaaaaggugauuaaau

SEQ ID NO: 60969 - RNA, 25 nt, Artificial Sequence
  Description of Artificial Sequence: Synthetic oligonucleotide
uauuuaaugaugugucauaugaguc

SEQ ID NO: 60970 - RNA, 25 nt, Artificial Sequence
  Description of Artificial Sequence: Synthetic oligonucleotide
ccucaagcuucucagacuucucuua

SEQ ID NO: 60971 - RNA, 25 nt, Artificial Sequence
  Description of Artificial Sequence: Synthetic oligonucleotide
auucuuuacaaaaugaaugcauugg

SEQ ID NO: 60972 - RNA, 25 nt, Artificial Sequence
  Description of Artificial Sequence: Synthetic oligonucleotide
gcccugacaaaaaggugcuacggua

SEQ ID NO: 60973 - RNA, 25 nt, Artificial Sequence
  Description of Artificial Sequence: Synthetic oligonucleotide
agugaugaaauuauaaguagauuug

SEQ ID NO: 60974 - RNA, 25 nt, Artificial Sequence
  Description of Artificial Sequence: Synthetic oligonucleotide
guaguuugucccauuuauuauuuua

SEQ ID NO: 60975 - RNA, 25 nt, Artificial Sequence
  Description of Artificial Sequence: Synthetic oligonucleotide
aauauuuauguuuaagugcuugguu

SEQ ID NO: 60976 - RNA, 25 nt, Artificial Sequence
  Description of Artificial Sequence: Synthetic oligonucleotide
ugaaaagauuccauuuuauacaaga

SEQ ID NO: 60977 - RNA, 25 nt, Artificial Sequence
  Description of Artificial Sequence: Synthetic oligonucleotide
aagguuggguuagcaauauuuauag

SEQ ID NO: 60978 - RNA, 25 nt, Artificial Sequence
  Description of Artificial Sequence: Synthetic oligonucleotide
gggcuuuuauuuuuuaaguucaauu

SEQ ID NO: 60979 - RNA, 25 nt, Artificial Sequence
  Description of Artificial Sequence: Synthetic oligonucleotide
ugugucugugguccagaagaaauua

SEQ ID NO: 60980 - RNA, 25 nt, Artificial Sequence
  Description of Artificial Sequence: Synthetic oligonucleotide
auuuaauaugcaucuuugagaauau

SEQ ID NO: 60981 - RNA, 25 nt, Artificial Sequence
  Description of Artificial Sequence: Synthetic oligonucleotide
uuauaaaaauaucaaaaaggaaaaa

SEQ ID NO: 60982 - RNA, 3386 nt, Homo sapiens
gcgguguuugucugccggacugacgggcggccgggcggugcgcggcggcgguggcggcggggaagauggcggcguccucccuggaacagaagcugucccgccuggaagcaaagcugaagcaggagaaccgggaggcccggcggaggaucgaccucaaccuggauaucagcccccagcggcccaggcccacccugcagcucccgcuggccaacgaugggggcagccgcucgccauccucagagagcuccccgcagcaccccacgccccccgcccggccccgccacaugcuggggcucccgucaacccuguucacaccccgcagcauggagagcauugagauugaccagaagcugcaggagaucaugaagcagacgggcuaccugaccaucgggggccagcgcuaccaggcagaaaucaacgaccuggagaacuugggcgagaugggcagcggcaccugcggccagguguggaagaugcgcuuccggaagaccggccacgucauugccguuaagcaaaugcggcgcuccgggaacaaggaggagaacaagcgcauccucauggaccuggauguggugcugaagagccacgacugccccuacaucgugcagugcuuugggacguucaucaccaacacggacgucuucaucgccauggagcucaugggcaccugcgcugagaagcucaagaagcggaugcagggccccauccccgagcgcauucugggcaagaugacaguggcgauugugaaggcgcuguacuaccugaaggagaagcacggugucauccaccgcgacgucaagcccuccaacauccugcuggacgagcggggccagaucaagcucugcgacuucggcaucagcggccgccugguggacuccaaagccaagacgcggagcgccggcugugccgccuacauggcacccgagcgcauugaccccccagaccccaccaagccggacuaugacauccgggccgacguauggagccugggcaucucguugguggagcuggcaacaggacaguuucccuacaagaacugcaagacggacuuugagguccucaccaaaguccuacaggaagagcccccgcuucugcccggacacaugggcuucucgggggacuuccaguccuucgucaaagacugccuuacuaaagaucacaggaagagaccaaaguauaauaagcuacuugaacacagcuucaucaagcgcuacgagacgcuggagguggacguggcguccugguucaaggaugucauggcgaagacugagucaccgcggacuagcggcguccugagccagccccaccugcccuucuucagguagcugcuuggcggcggccagccccacagggggccaggggcauggccacaggccccccuccccacuuggccacccagcugccugccaggggagaccugggaccuggacggccaccuaggacugaggacagagaguggggggugcccacccaccccccccgccccgggccuaccaagcccccgcccuucccaccccggggucagccggccgugugcgucccccgacagacacugugaacggaagacagcaggccgcgaucagagucgcuguucauucagccgcagccucugggccggggcggcccccaggggccaggagagagcccuggagucccgcagccaccaugcacgcucccagcgugcuguguccuucgccacucccacgcgcccguuccucuuccgucgcccucuguccccugcucuaccucucuguccuugucuggcucucccgucacccucccugccucugucucucuucuggccugagccugggcccagccaccuccugacggguccccugggucugcauaggucucccauggcgcaaugagucaguggcccccagccaggcagugugggcauugccacugcggcuggacggggcugcgcgcucgcgcucucucucucucucucucucucucuuugaucucaggggguccuuuuuggaguuuauuguauuuuauuguacuuggugggguguuuggggugggggcggaggagagcuuguucucgugggguugucgguaccuucagaaacuuuuaccaaagucacgauuagcugcuugugguggggccccaaccgcccucgggcacuggggagcugggcuggggcugcugcucuggggucuccgggggccacagcuuggggugaguugaagaccucaggggauguggaggggucugcggggcccuggccgcacaggauggccuucagggaagguggucuuggggcauggugcagagcaggugaccggagggaaucggugacggagcggggccaagggagggguccggagggagucagggauggagggcagagggaguggauguggggguuugaggacgugugacaagcuccagcaggggugggggccgggcugagggugggggugcgagguggucacucccaucgugccccuggccgucccuccacucacccacaccuggcccaguccacguugagguccaggacugggaaggaccgggugagugcaccggggacccaggccaggugccccccggagccugcugggguggccagagcaggaggggguguguuuccuuuuuguggguguugcaugcaaaucaaguggacaagaaaaaauaacaaaacaaaaaacaagaaaaaaaaaacacaaaaccccguaaaaucacaaagaaaauccaacaccaaaggcgcagaagccggcuggccguggugggggcagcguaggcguagcaucccucuccucucacuuagccuguugacucuuguuauuaucaugauauucacaaaacgccgcauguuuaaaaagucauagaugucaucuucucucugcccccagggaggaaagccaccuucucuugccccuuggccccuuugucaggggccaggggucugccgggugggggugccaacaggccuggcccuuuccuccccugcauccagccaugggggccucugcgauugccggaagguugcauggcuggucccagggccagcacaggcccgaggccgggcugccugguuuuauuuuuauuuaacuuuauuuucuguuuuaugaguguguguccgcccacccccacccccuucaguguuaaguggggagcccugggggagucucuccugccucccagccucucccaagaccuccccccucgucaccagccaucccucuggaccaggcagagggcggaccgggugggcaggggccugaggguggcucgggccagcccaccagccaauggaccccuccucaggccgccagugucgcccugccccuuuuuaaaacaaaaugcccucguuuguaaacccuuagacgcuugagaauaaaccccuuccuuuucuuccaaaaaaaaaaaaaaa

SEQ ID NO: 60983 - RNA, 19 nt, Artificial Sequence
  Description of Artificial Sequence: Synthetic oligonucleotide
gcgguguuugucugccgga

SEQ ID NO: 60984 - RNA, 19 nt, Artificial Sequence
  Description of Artificial Sequence: Synthetic oligonucleotide
acugacgggcggccgggcg

SEQ ID NO: 60985 - RNA, 19 nt, Artificial Sequence
  Description of Artificial Sequence: Synthetic oligonucleotide
ggugcgcggcggcgguggc

SEQ ID NO: 60986 - RNA, 19 nt, Artificial Sequence
  Description of Artificial Sequence: Synthetic oligonucleotide
cggcggggaagauggcggc

SEQ ID NO: 60987 - RNA, 19 nt, Artificial Sequence
  Description of Artificial Sequence: Synthetic oligonucleotide
cguccucccuggaacagaa

SEQ ID NO: 60988 - RNA, 19 nt, Artificial Sequence
  Description of Artificial Sequence: Synthetic oligonucleotide
agcugucccgccuggaagc

SEQ ID NO: 60989 - RNA, 19 nt, Artificial Sequence
  Description of Artificial Sequence: Synthetic oligonucleotide
caaagcugaagcaggagaa

SEQ ID NO: 60990 - RNA, 19 nt, Artificial Sequence
  Description of Artificial Sequence: Synthetic oligonucleotide
accgggaggcccggcggag

SEQ ID NO: 60991 - RNA, 19 nt, Artificial Sequence
  Description of Artificial Sequence: Synthetic oligonucleotide
ggaucgaccucaaccugga

SEQ ID NO: 60992 - RNA, 19 nt, Artificial Sequence
  Description of Artificial Sequence: Synthetic oligonucleotide
auaucagcccccagcggcc

SEQ ID NO: 60993 - RNA, 19 nt, Artificial Sequence
  Description of Artificial Sequence: Synthetic oligonucleotide
ccaggcccacccugcagcu

SEQ ID NO: 60994 - RNA, 19 nt, Artificial Sequence
  Description of Artificial Sequence: Synthetic oligonucleotide
ucccgcuggccaacgaugg

SEQ ID NO: 60995 - RNA, 19 nt, Artificial Sequence
  Description of Artificial Sequence: Synthetic oligonucleotide
ggggcagccgcucgccauc

SEQ ID NO: 60996 - RNA, 19 nt, Artificial Sequence
  Description of Artificial Sequence: Synthetic oligonucleotide
ccucagagagcuccccgca

SEQ ID NO: 60997 - RNA, 19 nt, Artificial Sequence
  Description of Artificial Sequence: Synthetic oligonucleotide
agcaccccacgccccccgc

SEQ ID NO: 60998 - RNA, 19 nt, Artificial Sequence
  Description of Artificial Sequence: Synthetic oligonucleotide
cccggccccgccacaugcu

SEQ ID NO: 60999 - RNA, 19 nt, Artificial Sequence
  Description of Artificial Sequence: Synthetic oligonucleotide
uggggcucccgucaacccu

SEQ ID NO: 61000 - RNA, 19 nt, Artificial Sequence
  Description of Artificial Sequence: Synthetic oligonucleotide
uguucacaccccgcagcau

SEQ ID NO: 61001 - RNA, 19 nt, Artificial Sequence
  Description of Artificial Sequence: Synthetic oligonucleotide
uggagagcauugagauuga

SEQ ID NO: 61002 - RNA, 19 nt, Artificial Sequence
  Description of Artificial Sequence: Synthetic oligonucleotide
accagaagcugcaggagau

SEQ ID NO: 61003 - RNA, 19 nt, Artificial Sequence
  Description of Artificial Sequence: Synthetic oligonucleotide
ucaugaagcagacgggcua

SEQ ID NO: 61004 - RNA, 19 nt, Artificial Sequence
  Description of Artificial Sequence: Synthetic oligonucleotide
accugaccaucgggggcca

SEQ ID NO: 61005 - RNA, 19 nt, Artificial Sequence
  Description of Artificial Sequence: Synthetic oligonucleotide
agcgcuaccaggcagaaau

SEQ ID NO: 61006 - RNA, 19 nt, Artificial Sequence
  Description of Artificial Sequence: Synthetic oligonucleotide
ucaacgaccuggagaacuu

SEQ ID NO: 61007 - RNA, 19 nt, Artificial Sequence
  Description of Artificial Sequence: Synthetic oligonucleotide
ugggcgagaugggcagcgg

SEQ ID NO: 61008 - RNA, 19 nt, Artificial Sequence
  Description of Artificial Sequence: Synthetic oligonucleotide
gcaccugcggccaggugug

SEQ ID NO: 61009 - RNA, 19 nt, Artificial Sequence
  Description of Artificial Sequence: Synthetic oligonucleotide
ggaagaugcgcuuccggaa

SEQ ID NO: 61010 - RNA, 19 nt, Artificial Sequence
  Description of Artificial Sequence: Synthetic oligonucleotide
agaccggccacgucauugc

SEQ ID NO: 61011 - RNA, 19 nt, Artificial Sequence
  Description of Artificial Sequence: Synthetic oligonucleotide
ccguuaagcaaaugcggcg

SEQ ID NO: 61012 - RNA, 19 nt, Artificial Sequence
  Description of Artificial Sequence: Synthetic oligonucleotide
gcuccgggaacaaggagga

SEQ ID NO: 61013 - RNA, 19 nt, Artificial Sequence
  Description of Artificial Sequence: Synthetic oligonucleotide
agaacaagcgcauccucau

SEQ ID NO: 61014 - RNA, 19 nt, Artificial Sequence
  Description of Artificial Sequence: Synthetic oligonucleotide
uggaccuggauguggugcu

SEQ ID NO: 61015 - RNA, 19 nt, Artificial Sequence
  Description of Artificial Sequence: Synthetic oligonucleotide
ugaagagccacgacugccc

SEQ ID NO: 61016 - RNA, 19 nt, Artificial Sequence
  Description of Artificial Sequence: Synthetic oligonucleotide
ccuacaucgugcagugcuu

SEQ ID NO: 61017 - RNA, 19 nt, Artificial Sequence
  Description of Artificial Sequence: Synthetic oligonucleotide
uugggacguucaucaccaa

SEQ ID NO: 61018 - RNA, 19 nt, Artificial Sequence
  Description of Artificial Sequence: Synthetic oligonucleotide
acacggacgucuucaucgc

SEQ ID NO: 61019 - RNA, 19 nt, Artificial Sequence
  Description of Artificial Sequence: Synthetic oligonucleotide
ccauggagcucaugggcac

SEQ ID NO: 61020 - RNA, 19 nt, Artificial Sequence
  Description of Artificial Sequence: Synthetic oligonucleotide
ccugcgcugagaagcucaa

SEQ ID NO: 61021 - RNA, 19 nt, Artificial Sequence
  Description of Artificial Sequence: Synthetic oligonucleotide
agaagcggaugcagggccc

SEQ ID NO: 61022 - RNA, 19 nt, Artificial Sequence
  Description of Artificial Sequence: Synthetic oligonucleotide
ccauccccgagcgcauucu

SEQ ID NO: 61023 - RNA, 19 nt, Artificial Sequence
  Description of Artificial Sequence: Synthetic oligonucleotide
ugggcaagaugacaguggc

SEQ ID NO: 61024 - RNA, 19 nt, Artificial Sequence
  Description of Artificial Sequence: Synthetic oligonucleotide
cgauugugaaggcgcugua

SEQ ID NO: 61025 - RNA, 19 nt, Artificial Sequence
  Description of Artificial Sequence: Synthetic oligonucleotide
acuaccugaaggagaagca

SEQ ID NO: 61026 - RNA, 19 nt, Artificial Sequence
  Description of Artificial Sequence: Synthetic oligonucleotide
acggugucauccaccgcga

SEQ ID NO: 61027 - RNA, 19 nt, Artificial Sequence
  Description of Artificial Sequence: Synthetic oligonucleotide
acgucaagcccuccaacau

SEQ ID NO: 61028 - RNA, 19 nt, Artificial Sequence
  Description of Artificial Sequence: Synthetic oligonucleotide
uccugcuggacgagcgggg

SEQ ID NO: 61029 - RNA, 19 nt, Artificial Sequence
  Description of Artificial Sequence: Synthetic oligonucleotide
gccagaucaagcucugcga

SEQ ID NO: 61030 - RNA, 19 nt, Artificial Sequence
  Description of Artificial Sequence: Synthetic oligonucleotide
acuucggcaucagcggccg

SEQ ID NO: 61031 - RNA, 19 nt, Artificial Sequence
  Description of Artificial Sequence: Synthetic oligonucleotide
gccugguggacuccaaagc

SEQ ID NO: 61032 - RNA, 19 nt, Artificial Sequence
  Description of Artificial Sequence: Synthetic oligonucleotide
ccaagacgcggagcgccgg

SEQ ID NO: 61033 - RNA, 19 nt, Artificial Sequence
  Description of Artificial Sequence: Synthetic oligonucleotide
gcugugccgccuacauggc

SEQ ID NO: 61034 - RNA, 19 nt, Artificial Sequence
  Description of Artificial Sequence: Synthetic oligonucleotide
cacccgagcgcauugaccc

SEQ ID NO: 61035 - RNA, 19 nt, Artificial Sequence
  Description of Artificial Sequence: Synthetic oligonucleotide
ccccagaccccaccaagcc

SEQ ID NO: 61036 - RNA, 19 nt, Artificial Sequence
  Description of Artificial Sequence: Synthetic oligonucleotide
cggacuaugacauccgggc

SEQ ID NO: 61037 - RNA, 19 nt, Artificial Sequence
  Description of Artificial Sequence: Synthetic oligonucleotide
ccgacguauggagccuggg

SEQ ID NO: 61038 - RNA, 19 nt, Artificial Sequence
  Description of Artificial Sequence: Synthetic oligonucleotide
gcaucucguugguggagcu

SEQ ID NO: 61039 - RNA, 19 nt, Artificial Sequence
  Description of Artificial Sequence: Synthetic oligonucleotide
uggcaacaggacaguuucc

SEQ ID NO: 61040 - RNA, 19 nt, Artificial Sequence
  Description of Artificial Sequence: Synthetic oligonucleotide
ccuacaagaacugcaagac

SEQ ID NO: 61041 - RNA, 19 nt, Artificial Sequence
  Description of Artificial Sequence: Synthetic oligonucleotide
cggacuuugagguccucac

SEQ ID NO: 61042 - RNA, 19 nt, Artificial Sequence
  Description of Artificial Sequence: Synthetic oligonucleotide
ccaaaguccuacaggaaga

SEQ ID NO: 61043 - RNA, 19 nt, Artificial Sequence
  Description of Artificial Sequence: Synthetic oligonucleotide
agcccccgcuucugcccgg

SEQ ID NO: 61044 - RNA, 19 nt, Artificial Sequence
  Description of Artificial Sequence: Synthetic oligonucleotide
gacacaugggcuucucggg

SEQ ID NO: 61045 - RNA, 19 nt, Artificial Sequence
  Description of Artificial Sequence: Synthetic oligonucleotide
gggacuuccaguccuucgu

SEQ ID NO: 61046 - RNA, 19 nt, Artificial Sequence
  Description of Artificial Sequence: Synthetic oligonucleotide
ucaaagacugccuuacuaa

SEQ ID NO: 61047 - RNA, 19 nt, Artificial Sequence
  Description of Artificial Sequence: Synthetic oligonucleotide
aagaucacaggaagagacc

SEQ ID NO: 61048 - RNA, 19 nt, Artificial Sequence
  Description of Artificial Sequence: Synthetic oligonucleotide
caaaguauaauaagcuacu

SEQ ID NO: 61049 - RNA, 19 nt, Artificial Sequence
  Description of Artificial Sequence: Synthetic oligonucleotide
uugaacacagcuucaucaa

SEQ ID NO: 61050 - RNA, 19 nt, Artificial Sequence
  Description of Artificial Sequence: Synthetic oligonucleotide
agcgcuacgagacgcugga

SEQ ID NO: 61051 - RNA, 19 nt, Artificial Sequence
  Description of Artificial Sequence: Synthetic oligonucleotide
agguggacguggcguccug

SEQ ID NO: 61052 - RNA, 19 nt, Artificial Sequence
  Description of Artificial Sequence: Synthetic oligonucleotide
gguucaaggaugucauggc

SEQ ID NO: 61053 - RNA, 19 nt, Artificial Sequence
  Description of Artificial Sequence: Synthetic oligonucleotide
cgaagacugagucaccgcg

SEQ ID NO: 61054 - RNA, 19 nt, Artificial Sequence
  Description of Artificial Sequence: Synthetic oligonucleotide
ggacuagcggcguccugag

SEQ ID NO: 61055 - RNA, 19 nt, Artificial Sequence
  Description of Artificial Sequence: Synthetic oligonucleotide
gccagccccaccugcccuu

SEQ ID NO: 61056 - RNA, 19 nt, Artificial Sequence
  Description of Artificial Sequence: Synthetic oligonucleotide
ucuucagguagcugcuugg

SEQ ID NO: 61057 - RNA, 19 nt, Artificial Sequence
  Description of Artificial Sequence: Synthetic oligonucleotide
gcggcggccagccccacag

SEQ ID NO: 61058 - RNA, 19 nt, Artificial Sequence
  Description of Artificial Sequence: Synthetic oligonucleotide
gggggccaggggcauggcc

SEQ ID NO: 61059 - RNA, 19 nt, Artificial Sequence
  Description of Artificial Sequence: Synthetic oligonucleotide
cacaggccccccuccccac

SEQ ID NO: 61060 - RNA, 19 nt, Artificial Sequence
  Description of Artificial Sequence: Synthetic oligonucleotide
cuuggccacccagcugccu

SEQ ID NO: 61061 - RNA, 19 nt, Artificial Sequence
  Description of Artificial Sequence: Synthetic oligonucleotide
ugccaggggagaccuggga

SEQ ID NO: 61062 - RNA, 19 nt, Artificial Sequence
  Description of Artificial Sequence: Synthetic oligonucleotide
accuggacggccaccuagg

SEQ ID NO: 61063 - RNA, 19 nt, Artificial Sequence
  Description of Artificial Sequence: Synthetic oligonucleotide
gacugaggacagagagugg

SEQ ID NO: 61064 - RNA, 19 nt, Artificial Sequence
  Description of Artificial Sequence: Synthetic oligonucleotide
gggggugcccacccacccc

SEQ ID NO: 61065 - RNA, 19 nt, Artificial Sequence
  Description of Artificial Sequence: Synthetic oligonucleotide
cccccgccccgggccuacc

SEQ ID NO: 61066 - RNA, 19 nt, Artificial Sequence
  Description of Artificial Sequence: Synthetic oligonucleotide
caagcccccgcccuuccca

SEQ ID NO: 61067 - RNA, 19 nt, Artificial Sequence
  Description of Artificial Sequence: Synthetic oligonucleotide
accccggggucagccggcc

SEQ ID NO: 61068 - RNA, 19 nt, Artificial Sequence
  Description of Artificial Sequence: Synthetic oligonucleotide
cgugugcgucccccgacag

SEQ ID NO: 61069 - RNA, 19 nt, Artificial Sequence
  Description of Artificial Sequence: Synthetic oligonucleotide
gacacugugaacggaagac

SEQ ID NO: 61070 - RNA, 19 nt, Artificial Sequence
  Description of Artificial Sequence: Synthetic oligonucleotide
cagcaggccgcgaucagag

SEQ ID NO: 61071 - RNA, 19 nt, Artificial Sequence
  Description of Artificial Sequence: Synthetic oligonucleotide
gucgcuguucauucagccg

SEQ ID NO: 61072 - RNA, 19 nt, Artificial Sequence
  Description of Artificial Sequence: Synthetic oligonucleotide
gcagccucugggccggggc

SEQ ID NO: 61073 - RNA, 19 nt, Artificial Sequence
  Description of Artificial Sequence: Synthetic oligonucleotide
cggcccccaggggccagga

SEQ ID NO: 61074 - RNA, 19 nt, Artificial Sequence
  Description of Artificial Sequence: Synthetic oligonucleotide
agagagcccuggagucccg

SEQ ID NO: 61075 - RNA, 19 nt, Artificial Sequence
  Description of Artificial Sequence: Synthetic oligonucleotide
gcagccaccaugcacgcuc

SEQ ID NO: 61076 - RNA, 19 nt, Artificial Sequence
  Description of Artificial Sequence: Synthetic oligonucleotide
cccagcgugcuguguccuu

SEQ ID NO: 61077 - RNA, 19 nt, Artificial Sequence
  Description of Artificial Sequence: Synthetic oligonucleotide
ucgccacucccacgcgccc

SEQ ID NO: 61078 - RNA, 19 nt, Artificial Sequence
  Description of Artificial Sequence: Synthetic oligonucleotide
cguuccucuuccgucgccc

SEQ ID NO: 61079 - RNA, 19 nt, Artificial Sequence
  Description of Artificial Sequence: Synthetic oligonucleotide
cucuguccccugcucuacc

SEQ ID NO: 61080 - RNA, 19 nt, Artificial Sequence
  Description of Artificial Sequence: Synthetic oligonucleotide
cucucuguccuugucuggc

SEQ ID NO: 61081 - RNA, 19 nt, Artificial Sequence
  Description of Artificial Sequence: Synthetic oligonucleotide
cucucccgucacccucccu

SEQ ID NO: 61082 - RNA, 19 nt, Artificial Sequence
  Description of Artificial Sequence: Synthetic oligonucleotide
ugccucugucucucuucug

SEQ ID NO: 61083 - RNA, 19 nt, Artificial Sequence
  Description of Artificial Sequence: Synthetic oligonucleotide
ggccugagccugggcccag

SEQ ID NO: 61084 - RNA, 19 nt, Artificial Sequence
  Description of Artificial Sequence: Synthetic oligonucleotide
gccaccuccugacgggucc

SEQ ID NO: 61085 - RNA, 19 nt, Artificial Sequence
  Description of Artificial Sequence: Synthetic oligonucleotide
cccugggucugcauagguc

SEQ ID NO: 61086 - RNA, 19 nt, Artificial Sequence
  Description of Artificial Sequence: Synthetic oligonucleotide
cucccauggcgcaaugagu

SEQ ID NO: 61087 - RNA, 19 nt, Artificial Sequence
  Description of Artificial Sequence: Synthetic oligonucleotide
ucaguggcccccagccagg

SEQ ID NO: 61088 - RNA, 19 nt, Artificial Sequence
  Description of Artificial Sequence: Synthetic oligonucleotide
gcagugugggcauugccac

SEQ ID NO: 61089 - RNA, 19 nt, Artificial Sequence
  Description of Artificial Sequence: Synthetic oligonucleotide
cugcggcuggacggggcug

SEQ ID NO: 61090 - RNA, 19 nt, Artificial Sequence
  Description of Artificial Sequence: Synthetic oligonucleotide
gcgcgcucgcgcucucucu

SEQ ID NO: 61091 - RNA, 19 nt, Artificial Sequence
  Description of Artificial Sequence: Synthetic oligonucleotide
ucucucucucucucucucu

SEQ ID NO: 61092 - RNA, 19 nt, Artificial Sequence
  Description of Artificial Sequence: Synthetic oligonucleotide
uuugaucucaggggguccu

SEQ ID NO: 61093 - RNA, 19 nt, Artificial Sequence
  Description of Artificial Sequence: Synthetic oligonucleotide
uuuuuggaguuuauuguau

SEQ ID NO: 61094 - RNA, 19 nt, Artificial Sequence
  Description of Artificial Sequence: Synthetic oligonucleotide
uuuuauuguacuugguggg

SEQ ID NO: 61095 - RNA, 19 nt, Artificial Sequence
  Description of Artificial Sequence: Synthetic oligonucleotide
gguguuuggggugggggcg

SEQ ID NO: 61096 - RNA, 19 nt, Artificial Sequence
  Description of Artificial Sequence: Synthetic oligonucleotide
ggaggagagcuuguucucg

SEQ ID NO: 61097 - RNA, 19 nt, Artificial Sequence
  Description of Artificial Sequence: Synthetic oligonucleotide
gugggguugucgguaccuu

SEQ ID NO: 61098 - RNA, 19 nt, Artificial Sequence
  Description of Artificial Sequence: Synthetic oligonucleotide
ucagaaacuuuuaccaaag

SEQ ID NO: 61099 - RNA, 19 nt, Artificial Sequence
  Description of Artificial Sequence: Synthetic oligonucleotide
gucacgauuagcugcuugu

SEQ ID NO: 61100 - RNA, 19 nt, Artificial Sequence
  Description of Artificial Sequence: Synthetic oligonucleotide
ugguggggccccaaccgcc

SEQ ID NO: 61101 - RNA, 19 nt, Artificial Sequence
  Description of Artificial Sequence: Synthetic oligonucleotide
ccucgggcacuggggagcu

SEQ ID NO: 61102 - RNA, 19 nt, Artificial Sequence
  Description of Artificial Sequence: Synthetic oligonucleotide
ugggcuggggcugcugcuc

SEQ ID NO: 61103 - RNA, 19 nt, Artificial Sequence
  Description of Artificial Sequence: Synthetic oligonucleotide
cuggggucuccgggggcca

SEQ ID NO: 61104 - RNA, 19 nt, Artificial Sequence
  Description of Artificial Sequence: Synthetic oligonucleotide
acagcuuggggugaguuga

SEQ ID NO: 61105 - RNA, 19 nt, Artificial Sequence
  Description of Artificial Sequence: Synthetic oligonucleotide
aagaccucaggggaugugg

SEQ ID NO: 61106 - RNA, 19 nt, Artificial Sequence
  Description of Artificial Sequence: Synthetic oligonucleotide
gaggggucugcggggcccu

SEQ ID NO: 61107 - RNA, 19 nt, Artificial Sequence
  Description of Artificial Sequence: Synthetic oligonucleotide
uggccgcacaggauggccu

SEQ ID NO: 61108 - RNA, 19 nt, Artificial Sequence
  Description of Artificial Sequence: Synthetic oligonucleotide
uucagggaagguggucuug

SEQ ID NO: 61109 - RNA, 19 nt, Artificial Sequence
  Description of Artificial Sequence: Synthetic oligonucleotide
ggggcauggugcagagcag

SEQ ID NO: 61110 - RNA, 19 nt, Artificial Sequence
  Description of Artificial Sequence: Synthetic oligonucleotide
ggugaccggagggaaucgg

SEQ ID NO: 61111 - RNA, 19 nt, Artificial Sequence
  Description of Artificial Sequence: Synthetic oligonucleotide
gugacggagcggggccaag

SEQ ID NO: 61112 - RNA, 19 nt, Artificial Sequence
  Description of Artificial Sequence: Synthetic oligonucleotide
gggagggguccggagggag

SEQ ID NO: 61113 - RNA, 19 nt, Artificial Sequence
  Description of Artificial Sequence: Synthetic oligonucleotide
gucagggauggagggcaga

SEQ ID NO: 61114 - RNA, 19 nt, Artificial Sequence
  Description of Artificial Sequence: Synthetic oligonucleotide
agggaguggaugugggggu

SEQ ID NO: 61115 - RNA, 19 nt, Artificial Sequence
  Description of Artificial Sequence: Synthetic oligonucleotide
uuugaggacgugugacaag

SEQ ID NO: 61116 - RNA, 19 nt, Artificial Sequence
  Description of Artificial Sequence: Synthetic oligonucleotide
gcuccagcagggguggggg

SEQ ID NO: 61117 - RNA, 19 nt, Artificial Sequence
  Description of Artificial Sequence: Synthetic oligonucleotide
gccgggcugaggguggggg

SEQ ID NO: 61118 - RNA, 19 nt, Artificial Sequence
  Description of Artificial Sequence: Synthetic oligonucleotide
gugcgagguggucacuccc

SEQ ID NO: 61119 - RNA, 19 nt, Artificial Sequence
  Description of Artificial Sequence: Synthetic oligonucleotide
caucgugccccuggccguc

SEQ ID NO: 61120 - RNA, 19 nt, Artificial Sequence
  Description of Artificial Sequence: Synthetic oligonucleotide
cccuccacucacccacacc

SEQ ID NO: 61121 - RNA, 19 nt, Artificial Sequence
  Description of Artificial Sequence: Synthetic oligonucleotide
cuggcccaguccacguuga

SEQ ID NO: 61122 - RNA, 19 nt, Artificial Sequence
  Description of Artificial Sequence: Synthetic oligonucleotide
agguccaggacugggaagg

SEQ ID NO: 61123 - RNA, 19 nt, Artificial Sequence
  Description of Artificial Sequence: Synthetic oligonucleotide
gaccgggugagugcaccgg

SEQ ID NO: 61124 - RNA, 19 nt, Artificial Sequence
  Description of Artificial Sequence: Synthetic oligonucleotide
gggacccaggccaggugcc

SEQ ID NO: 61125 - RNA, 19 nt, Artificial Sequence
  Description of Artificial Sequence: Synthetic oligonucleotide
cccccggagccugcugggg

SEQ ID NO: 61126 - RNA, 19 nt, Artificial Sequence
  Description of Artificial Sequence: Synthetic oligonucleotide
guggccagagcaggagggg

SEQ ID NO: 61127 - RNA, 19 nt, Artificial Sequence
  Description of Artificial Sequence: Synthetic oligonucleotide
gguguguuuccuuuuugug

SEQ ID NO: 61128 - RNA, 19 nt, Artificial Sequence
  Description of Artificial Sequence: Synthetic oligonucleotide
ggguguugcaugcaaauca

SEQ ID NO: 61129 - RNA, 19 nt, Artificial Sequence
  Description of Artificial Sequence: Synthetic oligonucleotide
aaguggacaagaaaaaaua

SEQ ID NO: 61130 - RNA, 19 nt, Artificial Sequence
  Description of Artificial Sequence: Synthetic oligonucleotide
aacaaaacaaaaaacaaga

SEQ ID NO: 61131 - RNA, 19 nt, Artificial Sequence
  Description of Artificial Sequence: Synthetic oligonucleotide
cccguaaaaucacaaagaa

SEQ ID NO: 61132 - RNA, 19 nt, Artificial Sequence
  Description of Artificial Sequence: Synthetic oligonucleotide
aaauccaacaccaaaggcg

SEQ ID NO: 61133 - RNA, 19 nt, Artificial Sequence
  Description of Artificial Sequence: Synthetic oligonucleotide
gcagaagccggcuggccgu

SEQ ID NO: 61134 - RNA, 19 nt, Artificial Sequence
  Description of Artificial Sequence: Synthetic oligonucleotide
uggugggggcagcguaggc

SEQ ID NO: 61135 - RNA, 19 nt, Artificial Sequence
  Description of Artificial Sequence: Synthetic oligonucleotide
cguagcaucccucuccucu

SEQ ID NO: 61136 - RNA, 19 nt, Artificial Sequence
  Description of Artificial Sequence: Synthetic oligonucleotide
ucacuuagccuguugacuc

SEQ ID NO: 61137 - RNA, 19 nt, Artificial Sequence
  Description of Artificial Sequence: Synthetic oligonucleotide
cuuguuauuaucaugauau

SEQ ID NO: 61138 - RNA, 19 nt, Artificial Sequence
  Description of Artificial Sequence: Synthetic oligonucleotide
uucacaaaacgccgcaugu

SEQ ID NO: 61139 - RNA, 19 nt, Artificial Sequence
  Description of Artificial Sequence: Synthetic oligonucleotide
uuuaaaaagucauagaugu

SEQ ID NO: 61140 - RNA, 19 nt, Artificial Sequence
  Description of Artificial Sequence: Synthetic oligonucleotide
ucaucuucucucugccccc

SEQ ID NO: 61141 - RNA, 19 nt, Artificial Sequence
  Description of Artificial Sequence: Synthetic oligonucleotide
cagggaggaaagccaccuu

SEQ ID NO: 61142 - RNA, 19 nt, Artificial Sequence
  Description of Artificial Sequence: Synthetic oligonucleotide
ucucuugccccuuggcccc

SEQ ID NO: 61143 - RNA, 19 nt, Artificial Sequence
  Description of Artificial Sequence: Synthetic oligonucleotide
cuuugucaggggccagggg

SEQ ID NO: 61144 - RNA, 19 nt, Artificial Sequence
  Description of Artificial Sequence: Synthetic oligonucleotide
gucugccgggugggggugc

SEQ ID NO: 61145 - RNA, 19 nt, Artificial Sequence
  Description of Artificial Sequence: Synthetic oligonucleotide
ccaacaggccuggcccuuu

SEQ ID NO: 61146 - RNA, 19 nt, Artificial Sequence
  Description of Artificial Sequence: Synthetic oligonucleotide
uccuccccugcauccagcc

SEQ ID NO: 61147 - RNA, 19 nt, Artificial Sequence
  Description of Artificial Sequence: Synthetic oligonucleotide
caugggggccucugcgauu

SEQ ID NO: 61148 - RNA, 19 nt, Artificial Sequence
  Description of Artificial Sequence: Synthetic oligonucleotide
ugccggaagguugcauggc

SEQ ID NO: 61149 - RNA, 19 nt, Artificial Sequence
  Description of Artificial Sequence: Synthetic oligonucleotide
cuggucccagggccagcac

SEQ ID NO: 61150 - RNA, 19 nt, Artificial Sequence
  Description of Artificial Sequence: Synthetic oligonucleotide
caggcccgaggccgggcug

SEQ ID NO: 61151 - RNA, 19 nt, Artificial Sequence
  Description of Artificial Sequence: Synthetic oligonucleotide
gccugguuuuauuuuuauu

SEQ ID NO: 61152 - RNA, 19 nt, Artificial Sequence
  Description of Artificial Sequence: Synthetic oligonucleotide
uuaacuuuauuuucuguuu

SEQ ID NO: 61153 - RNA, 19 nt, Artificial Sequence
  Description of Artificial Sequence: Synthetic oligonucleotide
uuaugaguguguguccgcc

SEQ ID NO: 61154 - RNA, 19 nt, Artificial Sequence
  Description of Artificial Sequence: Synthetic oligonucleotide
ccacccccacccccuucag

SEQ ID NO: 61155 - RNA, 19 nt, Artificial Sequence
  Description of Artificial Sequence: Synthetic oligonucleotide
guguuaaguggggagcccu

SEQ ID NO: 61156 - RNA, 19 nt, Artificial Sequence
  Description of Artificial Sequence: Synthetic oligonucleotide
ugggggagucucuccugcc

SEQ ID NO: 61157 - RNA, 19 nt, Artificial Sequence
  Description of Artificial Sequence: Synthetic oligonucleotide
cucccagccucucccaaga

SEQ ID NO: 61158 - RNA, 19 nt, Artificial Sequence
  Description of Artificial Sequence: Synthetic oligonucleotide
accuccccccucgucacca

SEQ ID NO: 61159 - RNA, 19 nt, Artificial Sequence
  Description of Artificial Sequence: Synthetic oligonucleotide
agccaucccucuggaccag

SEQ ID NO: 61160 - RNA, 19 nt, Artificial Sequence
  Description of Artificial Sequence: Synthetic oligonucleotide
ggcagagggcggaccgggu

SEQ ID NO: 61161 - RNA, 19 nt, Artificial Sequence
  Description of Artificial Sequence: Synthetic oligonucleotide
ugggcaggggccugagggu

SEQ ID NO: 61162 - RNA, 19 nt, Artificial Sequence
  Description of Artificial Sequence: Synthetic oligonucleotide
uggcucgggccagcccacc

SEQ ID NO: 61163 - RNA, 19 nt, Artificial Sequence
  Description of Artificial Sequence: Synthetic oligonucleotide
cagccaauggaccccuccu

SEQ ID NO: 61164 - RNA, 19 nt, Artificial Sequence
  Description of Artificial Sequence: Synthetic oligonucleotide
ucaggccgccagugucgcc

SEQ ID NO: 61165 - RNA, 19 nt, Artificial Sequence
  Description of Artificial Sequence: Synthetic oligonucleotide
ccugccccuuuuuaaaaca

SEQ ID NO: 61166 - RNA, 19 nt, Artificial Sequence
  Description of Artificial Sequence: Synthetic oligonucleotide
aaaaugcccucguuuguaa

SEQ ID NO: 61167 - RNA, 19 nt, Artificial Sequence
  Description of Artificial Sequence: Synthetic oligonucleotide
aacccuuagacgcuugaga

SEQ ID NO: 61168 - RNA, 19 nt, Artificial Sequence
  Description of Artificial Sequence: Synthetic oligonucleotide
aauaaaccccuuccuuuuc

SEQ ID NO: 61169 - RNA, 25 nt, Artificial Sequence
  Description of Artificial Sequence: Synthetic oligonucleotide
gcgguguuugucugccggacugacg

SEQ ID NO: 61170 - RNA, 25 nt, Artificial Sequence
  Description of Artificial Sequence: Synthetic oligonucleotide
gggcggccgggcggugcgcggcggc

SEQ ID NO: 61171 - RNA, 25 nt, Artificial Sequence
  Description of Artificial Sequence: Synthetic oligonucleotide
cgguggcggcggggaagauggcggc

SEQ ID NO: 61172 - RNA, 25 nt, Artificial Sequence
  Description of Artificial Sequence: Synthetic oligonucleotide
cguccucccuggaacagaagcuguc

SEQ ID NO: 61173 - RNA, 25 nt, Artificial Sequence
  Description of Artificial Sequence: Synthetic oligonucleotide
cccgccuggaagcaaagcugaagca

SEQ ID NO: 61174 - RNA, 25 nt, Artificial Sequence
  Description of Artificial Sequence: Synthetic oligonucleotide
aggagaaccgggaggcccggcggag

SEQ ID NO: 61175 - RNA, 25 nt, Artificial Sequence
  Description of Artificial Sequence: Synthetic oligonucleotide
ggaucgaccucaaccuggauaucag

SEQ ID NO: 61176 - RNA, 25 nt, Artificial Sequence
  Description of Artificial Sequence: Synthetic oligonucleotide
gcccccagcggcccaggcccacccu

SEQ ID NO: 61177 - RNA, 25 nt, Artificial Sequence
  Description of Artificial Sequence: Synthetic oligonucleotide
ugcagcucccgcuggccaacgaugg

SEQ ID NO: 61178 - RNA, 25 nt, Artificial Sequence
  Description of Artificial Sequence: Synthetic oligonucleotide
ggggcagccgcucgccauccucaga

SEQ ID NO: 61179 - RNA, 25 nt, Artificial Sequence
  Description of Artificial Sequence: Synthetic oligonucleotide
agagcuccccgcagcaccccacgcc

SEQ ID NO: 61180 - RNA, 25 nt, Artificial Sequence
  Description of Artificial Sequence: Synthetic oligonucleotide
cccccgcccggccccgccacaugcu

SEQ ID NO: 61181 - RNA, 25 nt, Artificial Sequence
  Description of Artificial Sequence: Synthetic oligonucleotide
uggggcucccgucaacccuguucac

SEQ ID NO: 61182 - RNA, 25 nt, Artificial Sequence
  Description of Artificial Sequence: Synthetic oligonucleotide
caccccgcagcauggagagcauuga

SEQ ID NO: 61183 - RNA, 25 nt, Artificial Sequence
  Description of Artificial Sequence: Synthetic oligonucleotide
agauugaccagaagcugcaggagau

SEQ ID NO: 61184 - RNA, 25 nt, Artificial Sequence
  Description of Artificial Sequence: Synthetic oligonucleotide
ucaugaagcagacgggcuaccugac

SEQ ID NO: 61185 - RNA, 25 nt, Artificial Sequence
  Description of Artificial Sequence: Synthetic oligonucleotide
ccaucgggggccagcgcuaccaggc

SEQ ID NO: 61186 - RNA, 25 nt, Artificial Sequence
  Description of Artificial Sequence: Synthetic oligonucleotide
cagaaaucaacgaccuggagaacuu

SEQ ID NO: 61187 - RNA, 25 nt, Artificial Sequence
  Description of Artificial Sequence: Synthetic oligonucleotide
ugggcgagaugggcagcggcaccug

SEQ ID NO: 61188 - RNA, 25 nt, Artificial Sequence
  Description of Artificial Sequence: Synthetic oligonucleotide
gcggccagguguggaagaugcgcuu

SEQ ID NO: 61189 - RNA, 25 nt, Artificial Sequence
  Description of Artificial Sequence: Synthetic oligonucleotide
uccggaagaccggccacgucauugc

SEQ ID NO: 61190 - RNA, 25 nt, Artificial Sequence
  Description of Artificial Sequence: Synthetic oligonucleotide
ccguuaagcaaaugcggcgcuccgg

SEQ ID NO: 61191 - RNA, 25 nt, Artificial Sequence
  Description of Artificial Sequence: Synthetic oligonucleotide
ggaacaaggaggagaacaagcgcau

SEQ ID NO: 61192 - RNA, 25 nt, Artificial Sequence
  Description of Artificial Sequence: Synthetic oligonucleotide
uccucauggaccuggauguggugcu

SEQ ID NO: 61193 - RNA, 25 nt, Artificial Sequence
  Description of Artificial Sequence: Synthetic oligonucleotide
ugaagagccacgacugccccuacau

SEQ ID NO: 61194 - RNA, 25 nt, Artificial Sequence
  Description of Artificial Sequence: Synthetic oligonucleotide
ucgugcagugcuuugggacguucau

SEQ ID NO: 61195 - RNA, 25 nt, Artificial Sequence
  Description of Artificial Sequence: Synthetic oligonucleotide
ucaccaacacggacgucuucaucgc

SEQ ID NO: 61196 - RNA, 25 nt, Artificial Sequence
  Description of Artificial Sequence: Synthetic oligonucleotide
ccauggagcucaugggcaccugcgc

SEQ ID NO: 61197 - RNA, 25 nt, Artificial Sequence
  Description of Artificial Sequence: Synthetic oligonucleotide
cugagaagcucaagaagcggaugca

SEQ ID NO: 61198 - RNA, 25 nt, Artificial Sequence
  Description of Artificial Sequence: Synthetic oligonucleotide
agggccccauccccgagcgcauucu

SEQ ID NO: 61199 - RNA, 25 nt, Artificial Sequence
  Description of Artificial Sequence: Synthetic oligonucleotide
ugggcaagaugacaguggcgauugu

SEQ ID NO: 61200 - RNA, 25 nt, Artificial Sequence
  Description of Artificial Sequence: Synthetic oligonucleotide
ugaaggcgcuguacuaccugaagga

SEQ ID NO: 61201 - RNA, 25 nt, Artificial Sequence
  Description of Artificial Sequence: Synthetic oligonucleotide
agaagcacggugucauccaccgcga

SEQ ID NO: 61202 - RNA, 25 nt, Artificial Sequence
  Description of Artificial Sequence: Synthetic oligonucleotide
acgucaagcccuccaacauccugcu

SEQ ID NO: 61203 - RNA, 25 nt, Artificial Sequence
  Description of Artificial Sequence: Synthetic oligonucleotide
uggacgagcggggccagaucaagcu

SEQ ID NO: 61204 - RNA, 25 nt, Artificial Sequence
  Description of Artificial Sequence: Synthetic oligonucleotide
ucugcgacuucggcaucagcggccg

SEQ ID NO: 61205 - RNA, 25 nt, Artificial Sequence
  Description of Artificial Sequence: Synthetic oligonucleotide
gccugguggacuccaaagccaagac

SEQ ID NO: 61206 - RNA, 25 nt, Artificial Sequence
  Description of Artificial Sequence: Synthetic oligonucleotide
cgcggagcgccggcugugccgccua

SEQ ID NO: 61207 - RNA, 25 nt, Artificial Sequence
  Description of Artificial Sequence: Synthetic oligonucleotide
acauggcacccgagcgcauugaccc

SEQ ID NO: 61208 - RNA, 25 nt, Artificial Sequence
  Description of Artificial Sequence: Synthetic oligonucleotide
ccccagaccccaccaagccggacua

SEQ ID NO: 61209 - RNA, 25 nt, Artificial Sequence
  Description of Artificial Sequence: Synthetic oligonucleotide
augacauccgggccgacguauggag

SEQ ID NO: 61210 - RNA, 25 nt, Artificial Sequence
  Description of Artificial Sequence: Synthetic oligonucleotide
gccugggcaucucguugguggagcu

SEQ ID NO: 61211 - RNA, 25 nt, Artificial Sequence
  Description of Artificial Sequence: Synthetic oligonucleotide
uggcaacaggacaguuucccuacaa

SEQ ID NO: 61212 - RNA, 25 nt, Artificial Sequence
  Description of Artificial Sequence: Synthetic oligonucleotide
agaacugcaagacggacuuugaggu

SEQ ID NO: 61213 - RNA, 25 nt, Artificial Sequence
  Description of Artificial Sequence: Synthetic oligonucleotide
uccucaccaaaguccuacaggaaga

SEQ ID NO: 61214 - RNA, 25 nt, Artificial Sequence
  Description of Artificial Sequence: Synthetic oligonucleotide
agcccccgcuucugcccggacacau

SEQ ID NO: 61215 - RNA, 25 nt, Artificial Sequence
  Description of Artificial Sequence: Synthetic oligonucleotide
ugggcuucucgggggacuuccaguc

SEQ ID NO: 61216 - RNA, 25 nt, Artificial Sequence
  Description of Artificial Sequence: Synthetic oligonucleotide
ccuucgucaaagacugccuuacuaa

SEQ ID NO: 61217 - RNA, 25 nt, Artificial Sequence
  Description of Artificial Sequence: Synthetic oligonucleotide
aagaucacaggaagagaccaaagua

SEQ ID NO: 61218 - RNA, 25 nt, Artificial Sequence
  Description of Artificial Sequence: Synthetic oligonucleotide
auaauaagcuacuugaacacagcuu

SEQ ID NO: 61219 - RNA, 25 nt, Artificial Sequence
  Description of Artificial Sequence: Synthetic oligonucleotide
ucaucaagcgcuacgagacgcugga

SEQ ID NO: 61220 - RNA, 25 nt, Artificial Sequence
  Description of Artificial Sequence: Synthetic oligonucleotide
agguggacguggcguccugguucaa

SEQ ID NO: 61221 - RNA, 25 nt, Artificial Sequence
  Description of Artificial Sequence: Synthetic oligonucleotide
aggaugucauggcgaagacugaguc

SEQ ID NO: 61222 - RNA, 25 nt, Artificial Sequence
  Description of Artificial Sequence: Synthetic oligonucleotide
caccgcggacuagcggcguccugag

SEQ ID NO: 61223 - RNA, 25 nt, Artificial Sequence
  Description of Artificial Sequence: Synthetic oligonucleotide
gccagccccaccugcccuucuucag

SEQ ID NO: 61224 - RNA, 25 nt, Artificial Sequence
  Description of Artificial Sequence: Synthetic oligonucleotide
gguagcugcuuggcggcggccagcc

SEQ ID NO: 61225 - RNA, 25 nt, Artificial Sequence
  Description of Artificial Sequence: Synthetic oligonucleotide
cccacagggggccaggggcauggcc

SEQ ID NO: 61226 - RNA, 25 nt, Artificial Sequence
  Description of Artificial Sequence: Synthetic oligonucleotide
cacaggccccccuccccacuuggcc

SEQ ID NO: 61227 - RNA, 25 nt, Artificial Sequence
  Description of Artificial Sequence: Synthetic oligonucleotide
cacccagcugccugccaggggagac

SEQ ID NO: 61228 - RNA, 25 nt, Artificial Sequence
  Description of Artificial Sequence: Synthetic oligonucleotide
ccugggaccuggacggccaccuagg

SEQ ID NO: 61229 - RNA, 25 nt, Artificial Sequence
  Description of Artificial Sequence: Synthetic oligonucleotide
gacugaggacagagaguggggggug

SEQ ID NO: 61230 - RNA, 25 nt, Artificial Sequence
  Description of Artificial Sequence: Synthetic oligonucleotide
gcccacccaccccccccgccccggg

SEQ ID NO: 61231 - RNA, 25 nt, Artificial Sequence
  Description of Artificial Sequence: Synthetic oligonucleotide
gccuaccaagcccccgcccuuccca

SEQ ID NO: 61232 - RNA, 25 nt, Artificial Sequence
  Description of Artificial Sequence: Synthetic oligonucleotide
accccggggucagccggccgugugc

SEQ ID NO: 61233 - RNA, 25 nt, Artificial Sequence
  Description of Artificial Sequence: Synthetic oligonucleotide
cgucccccgacagacacugugaacg

SEQ ID NO: 61234 - RNA, 25 nt, Artificial Sequence
  Description of Artificial Sequence: Synthetic oligonucleotide
ggaagacagcaggccgcgaucagag

SEQ ID NO: 61235 - RNA, 25 nt, Artificial Sequence
  Description of Artificial Sequence: Synthetic oligonucleotide
gucgcuguucauucagccgcagccu

SEQ ID NO: 61236 - RNA, 25 nt, Artificial Sequence
  Description of Artificial Sequence: Synthetic oligonucleotide
ucugggccggggcggcccccagggg

SEQ ID NO: 61237 - RNA, 25 nt, Artificial Sequence
  Description of Artificial Sequence: Synthetic oligonucleotide
gccaggagagagcccuggagucccg

SEQ ID NO: 61238 - RNA, 25 nt, Artificial Sequence
  Description of Artificial Sequence: Synthetic oligonucleotide
gcagccaccaugcacgcucccagcg

SEQ ID NO: 61239 - RNA, 25 nt, Artificial Sequence
  Description of Artificial Sequence: Synthetic oligonucleotide
gugcuguguccuucgccacucccac

SEQ ID NO: 61240 - RNA, 25 nt, Artificial Sequence
  Description of Artificial Sequence: Synthetic oligonucleotide
cgcgcccguuccucuuccgucgccc

SEQ ID NO: 61241 - RNA, 25 nt, Artificial Sequence
  Description of Artificial Sequence: Synthetic oligonucleotide
cucuguccccugcucuaccucucug

SEQ ID NO: 61242 - RNA, 25 nt, Artificial Sequence
  Description of Artificial Sequence: Synthetic oligonucleotide
guccuugucuggcucucccgucacc

SEQ ID NO: 61243 - RNA, 25 nt, Artificial Sequence
  Description of Artificial Sequence: Synthetic oligonucleotide
ccucccugccucugucucucuucug

SEQ ID NO: 61244 - RNA, 25 nt, Artificial Sequence
  Description of Artificial Sequence: Synthetic oligonucleotide
ggccugagccugggcccagccaccu

SEQ ID NO: 61245 - RNA, 25 nt, Artificial Sequence
  Description of Artificial Sequence: Synthetic oligonucleotide
uccugacggguccccugggucugca

SEQ ID NO: 61246 - RNA, 25 nt, Artificial Sequence
  Description of Artificial Sequence: Synthetic oligonucleotide
auaggucucccauggcgcaaugagu

SEQ ID NO: 61247 - RNA, 25 nt, Artificial Sequence
  Description of Artificial Sequence: Synthetic oligonucleotide
ucaguggcccccagccaggcagugu

SEQ ID NO: 61248 - RNA, 25 nt, Artificial Sequence
  Description of Artificial Sequence: Synthetic oligonucleotide
ugggcauugccacugcggcuggacg

SEQ ID NO: 61249 - RNA, 25 nt, Artificial Sequence
  Description of Artificial Sequence: Synthetic oligonucleotide
ggggcugcgcgcucgcgcucucucu

SEQ ID NO: 61250 - RNA, 25 nt, Artificial Sequence
  Description of Artificial Sequence: Synthetic oligonucleotide
ucucucucucucucucucuuugauc

SEQ ID NO: 61251 - RNA, 25 nt, Artificial Sequence
  Description of Artificial Sequence: Synthetic oligonucleotide
cucaggggguccuuuuuggaguuua

SEQ ID NO: 61252 - RNA, 25 nt, Artificial Sequence
  Description of Artificial Sequence: Synthetic oligonucleotide
auuguauuuuauuguacuugguggg

SEQ ID NO: 61253 - RNA, 25 nt, Artificial Sequence
  Description of Artificial Sequence: Synthetic oligonucleotide
gguguuuggggugggggcggaggag

SEQ ID NO: 61254 - RNA, 25 nt, Artificial Sequence
  Description of Artificial Sequence: Synthetic oligonucleotide
gagcuuguucucgugggguugucgg

SEQ ID NO: 61255 - RNA, 25 nt, Artificial Sequence
  Description of Artificial Sequence: Synthetic oligonucleotide
guaccuucagaaacuuuuaccaaag

SEQ ID NO: 61256 - RNA, 25 nt, Artificial Sequence
  Description of Artificial Sequence: Synthetic oligonucleotide
gucacgauuagcugcuugugguggg

SEQ ID NO: 61257 - RNA, 25 nt, Artificial Sequence
  Description of Artificial Sequence: Synthetic oligonucleotide
ggccccaaccgcccucgggcacugg

SEQ ID NO: 61258 - RNA, 25 nt, Artificial Sequence
  Description of Artificial Sequence: Synthetic oligonucleotide
gggagcugggcuggggcugcugcuc

SEQ ID NO: 61259 - RNA, 25 nt, Artificial Sequence
  Description of Artificial Sequence: Synthetic oligonucleotide
cuggggucuccgggggccacagcuu

SEQ ID NO: 61260 - RNA, 25 nt, Artificial Sequence
  Description of Artificial Sequence: Synthetic oligonucleotide
uggggugaguugaagaccucagggg

SEQ ID NO: 61261 - RNA, 25 nt, Artificial Sequence
  Description of Artificial Sequence: Synthetic oligonucleotide
gauguggaggggucugcggggcccu

SEQ ID NO: 61262 - RNA, 25 nt, Artificial Sequence
  Description of Artificial Sequence: Synthetic oligonucleotide
uggccgcacaggauggccuucaggg

SEQ ID NO: 61263 - RNA, 25 nt, Artificial Sequence
  Description of Artificial Sequence: Synthetic oligonucleotide
gaagguggucuuggggcauggugca

SEQ ID NO: 61264 - RNA, 25 nt, Artificial Sequence
  Description of Artificial Sequence: Synthetic oligonucleotide
agagcaggugaccggagggaaucgg

SEQ ID NO: 61265 - RNA, 25 nt, Artificial Sequence
  Description of Artificial Sequence: Synthetic oligonucleotide
gugacggagcggggccaagggaggg

SEQ ID NO: 61266 - RNA, 25 nt, Artificial Sequence
  Description of Artificial Sequence: Synthetic oligonucleotide
gguccggagggagucagggauggag

SEQ ID NO: 61267 - RNA, 25 nt, Artificial Sequence
  Description of Artificial Sequence: Synthetic oligonucleotide
gggcagagggaguggaugugggggu

SEQ ID NO: 61268 - RNA, 25 nt, Artificial Sequence
  Description of Artificial Sequence: Synthetic oligonucleotide
uuugaggacgugugacaagcuccag

SEQ ID NO: 61269 - RNA, 25 nt, Artificial Sequence
  Description of Artificial Sequence: Synthetic oligonucleotide
gcaggggugggggccgggcugaggg

SEQ ID NO: 61270 - RNA, 25 nt, Artificial Sequence
  Description of Artificial Sequence: Synthetic oligonucleotide
gugggggugcgagguggucacuccc

SEQ ID NO: 61271 - RNA, 25 nt, Artificial Sequence
  Description of Artificial Sequence: Synthetic oligonucleotide
caucgugccccuggccgucccucca

SEQ ID NO: 61272 - RNA, 25 nt, Artificial Sequence
  Description of Artificial Sequence: Synthetic oligonucleotide
acucacccacaccuggcccagucca

SEQ ID NO: 61273 - RNA, 25 nt, Artificial Sequence
  Description of Artificial Sequence: Synthetic oligonucleotide
acguugagguccaggacugggaagg

SEQ ID NO: 61274 - RNA, 25 nt, Artificial Sequence
  Description of Artificial Sequence: Synthetic oligonucleotide
gaccgggugagugcaccggggaccc

SEQ ID NO: 61275 - RNA, 25 nt, Artificial Sequence
  Description of Artificial Sequence: Synthetic oligonucleotide
caggccaggugccccccggagccug

SEQ ID NO: 61276 - RNA, 25 nt, Artificial Sequence
  Description of Artificial Sequence: Synthetic oligonucleotide
gcugggguggccagagcaggagggg

SEQ ID NO: 61277 - RNA, 25 nt, Artificial Sequence
  Description of Artificial Sequence: Synthetic oligonucleotide
gguguguuuccuuuuuguggguguu

SEQ ID NO: 61278 - RNA, 25 nt, Artificial Sequence
  Description of Artificial Sequence: Synthetic oligonucleotide
ugcaugcaaaucaaguggacaagaa

SEQ ID NO: 61279 - RNA, 25 nt, Artificial Sequence
  Description of Artificial Sequence: Synthetic oligonucleotide
aaaaauaacaaaacaaaaaacaaga

SEQ ID NO: 61280 - RNA, 25 nt, Artificial Sequence
  Description of Artificial Sequence: Synthetic oligonucleotide
aaaucacaaagaaaauccaacacca

SEQ ID NO: 61281 - RNA, 25 nt, Artificial Sequence
  Description of Artificial Sequence: Synthetic oligonucleotide
aaaggcgcagaagccggcuggccgu

SEQ ID NO: 61282 - RNA, 25 nt, Artificial Sequence
  Description of Artificial Sequence: Synthetic oligonucleotide
uggugggggcagcguaggcguagca

SEQ ID NO: 61283 - RNA, 25 nt, Artificial Sequence
  Description of Artificial Sequence: Synthetic oligonucleotide
aucccucuccucucacuuagccugu

SEQ ID NO: 61284 - RNA, 25 nt, Artificial Sequence
  Description of Artificial Sequence: Synthetic oligonucleotide
uugacucuuguuauuaucaugauau

SEQ ID NO: 61285 - RNA, 25 nt, Artificial Sequence
  Description of Artificial Sequence: Synthetic oligonucleotide
uucacaaaacgccgcauguuuaaaa

SEQ ID NO: 61286 - RNA, 25 nt, Artificial Sequence
  Description of Artificial Sequence: Synthetic oligonucleotide
aagucauagaugucaucuucucucu

SEQ ID NO: 61287 - RNA, 25 nt, Artificial Sequence
  Description of Artificial Sequence: Synthetic oligonucleotide
ugcccccagggaggaaagccaccuu

SEQ ID NO: 61288 - RNA, 25 nt, Artificial Sequence
  Description of Artificial Sequence: Synthetic oligonucleotide
ucucuugccccuuggccccuuuguc

SEQ ID NO: 61289 - RNA, 25 nt, Artificial Sequence
  Description of Artificial Sequence: Synthetic oligonucleotide
caggggccaggggucugccgggugg

SEQ ID NO: 61290 - RNA, 25 nt, Artificial Sequence
  Description of Artificial Sequence: Synthetic oligonucleotide
ggggugccaacaggccuggcccuuu

SEQ ID NO: 61291 - RNA, 25 nt, Artificial Sequence
  Description of Artificial Sequence: Synthetic oligonucleotide
uccuccccugcauccagccaugggg

SEQ ID NO: 61292 - RNA, 25 nt, Artificial Sequence
  Description of Artificial Sequence: Synthetic oligonucleotide
ggccucugcgauugccggaagguug

SEQ ID NO: 61293 - RNA, 25 nt, Artificial Sequence
  Description of Artificial Sequence: Synthetic oligonucleotide
gcauggcuggucccagggccagcac

SEQ ID NO: 61294 - RNA, 25 nt, Artificial Sequence
  Description of Artificial Sequence: Synthetic oligonucleotide
caggcccgaggccgggcugccuggu

SEQ ID NO: 61295 - RNA, 25 nt, Artificial Sequence
  Description of Artificial Sequence: Synthetic oligonucleotide
uuuuauuuuuauuuaacuuuauuuu

SEQ ID NO: 61296 - RNA, 25 nt, Artificial Sequence
  Description of Artificial Sequence: Synthetic oligonucleotide
ucuguuuuaugaguguguguccgcc

SEQ ID NO: 61297 - RNA, 25 nt, Artificial Sequence
  Description of Artificial Sequence: Synthetic oligonucleotide
ccacccccacccccuucaguguuaa

SEQ ID NO: 61298 - RNA, 25 nt, Artificial Sequence
  Description of Artificial Sequence: Synthetic oligonucleotide
aguggggagcccugggggagucucu

SEQ ID NO: 61299 - RNA, 25 nt, Artificial Sequence
  Description of Artificial Sequence: Synthetic oligonucleotide
uccugccucccagccucucccaaga

SEQ ID NO: 61300 - RNA, 25 nt, Artificial Sequence
  Description of Artificial Sequence: Synthetic oligonucleotide
accuccccccucgucaccagccauc

SEQ ID NO: 61301 - RNA, 25 nt, Artificial Sequence
  Description of Artificial Sequence: Synthetic oligonucleotide
cccucuggaccaggcagagggcgga

SEQ ID NO: 61302 - RNA, 25 nt, Artificial Sequence
  Description of Artificial Sequence: Synthetic oligonucleotide
accgggugggcaggggccugagggu

SEQ ID NO: 61303 - RNA, 25 nt, Artificial Sequence
  Description of Artificial Sequence: Synthetic oligonucleotide
uggcucgggccagcccaccagccaa

SEQ ID NO: 61304 - RNA, 25 nt, Artificial Sequence
  Description of Artificial Sequence: Synthetic oligonucleotide
auggaccccuccucaggccgccagu

SEQ ID NO: 61305 - RNA, 25 nt, Artificial Sequence
  Description of Artificial Sequence: Synthetic oligonucleotide
ugucgcccugccccuuuuuaaaaca

SEQ ID NO: 61306 - RNA, 25 nt, Artificial Sequence
  Description of Artificial Sequence: Synthetic oligonucleotide
aaaaugcccucguuuguaaacccuu

SEQ ID NO: 61307 - RNA, 25 nt, Artificial Sequence
  Description of Artificial Sequence: Synthetic oligonucleotide
uagacgcuugagaauaaaccccuuc

SEQ ID NO: 61308 - RNA, 19 nt, Artificial Sequence
  Description of Artificial Sequence: Synthetic oligonucleotide
ccaacuccuucgugggcac

SEQ ID NO: 61309 - RNA, 19 nt, Artificial Sequence
  Description of Artificial Sequence: Synthetic oligonucleotide
uccauggccaacuccuucg

SEQ ID NO: 61310 - RNA, 19 nt, Artificial Sequence
  Description of Artificial Sequence: Synthetic oligonucleotide
gccaacuccuucgugggca

SEQ ID NO: 61311 - RNA, 19 nt, Artificial Sequence
  Description of Artificial Sequence: Synthetic oligonucleotide
cagaagaagcuggaggagc

SEQ ID NO: 61312 - RNA, 19 nt, Artificial Sequence
  Description of Artificial Sequence: Synthetic oligonucleotide
uggccaacuccuucguggg

SEQ ID NO: 61313 - RNA, 19 nt, Artificial Sequence
  Description of Artificial Sequence: Synthetic oligonucleotide
ccguacaucgugggcuucu

SEQ ID NO: 61314 - RNA, 19 nt, Artificial Sequence
  Description of Artificial Sequence: Synthetic oligonucleotide
gcagaagaagcuggaggag

SEQ ID NO: 61315 - RNA, 19 nt, Artificial Sequence
  Description of Artificial Sequence: Synthetic oligonucleotide
auggccaacuccuucgugg

SEQ ID NO: 61316 - RNA, 19 nt, Artificial Sequence
  Description of Artificial Sequence: Synthetic oligonucleotide
ggccaacuccuucgugggc

SEQ ID NO: 61317 - RNA, 19 nt, Artificial Sequence
  Description of Artificial Sequence: Synthetic oligonucleotide
ugcagaagaagcuggagga

SEQ ID NO: 61318 - RNA, 19 nt, Artificial Sequence
  Description of Artificial Sequence: Synthetic oligonucleotide
agaagaagcuggaggagcu

SEQ ID NO: 61319 - RNA, 19 nt, Artificial Sequence
  Description of Artificial Sequence: Synthetic oligonucleotide
cguacaucgugggcuucua

SEQ ID NO: 61320 - RNA, 19 nt, Artificial Sequence
  Description of Artificial Sequence: Synthetic oligonucleotide
cuccauggccaacuccuuc

SEQ ID NO: 61321 - RNA, 19 nt, Artificial Sequence
  Description of Artificial Sequence: Synthetic oligonucleotide
acuccauggccaacuccuu

SEQ ID NO: 61322 - RNA, 19 nt, Artificial Sequence
  Description of Artificial Sequence: Synthetic oligonucleotide
cauggccaacuccuucgug

SEQ ID NO: 61323 - RNA, 19 nt, Artificial Sequence
  Description of Artificial Sequence: Synthetic oligonucleotide
gucaagcccuccaacaucc

SEQ ID NO: 61324 - RNA, 19 nt, Artificial Sequence
  Description of Artificial Sequence: Synthetic oligonucleotide
ucaagcccuccaacauccu

SEQ ID NO: 61325 - RNA, 19 nt, Artificial Sequence
  Description of Artificial Sequence: Synthetic oligonucleotide
gagaugugaagcccuccaa

SEQ ID NO: 61326 - RNA, 19 nt, Artificial Sequence
  Description of Artificial Sequence: Synthetic oligonucleotide
guguggaucugcauggagc

SEQ ID NO: 61327 - RNA, 19 nt, Artificial Sequence
  Description of Artificial Sequence: Synthetic oligonucleotide
ggcuacuugguggacucug

SEQ ID NO: 61328 - RNA, 19 nt, Artificial Sequence
  Description of Artificial Sequence: Synthetic oligonucleotide
aucaguggcuacuuggugg

SEQ ID NO: 61329 - RNA, 19 nt, Artificial Sequence
  Description of Artificial Sequence: Synthetic oligonucleotide
guggaucugcauggagcuc

SEQ ID NO: 61330 - RNA, 19 nt, Artificial Sequence
  Description of Artificial Sequence: Synthetic oligonucleotide
ucugcauggagcucaugga

SEQ ID NO: 61331 - RNA, 19 nt, Artificial Sequence
  Description of Artificial Sequence: Synthetic oligonucleotide
guggcuacuugguggacuc

SEQ ID NO: 61332 - RNA, 19 nt, Artificial Sequence
  Description of Artificial Sequence: Synthetic oligonucleotide
ggaucugcauggagcucau

SEQ ID NO: 61333 - RNA, 19 nt, Artificial Sequence
  Description of Artificial Sequence: Synthetic oligonucleotide
gaucugcauggagcucaug

SEQ ID NO: 61334 - RNA, 19 nt, Artificial Sequence
  Description of Artificial Sequence: Synthetic oligonucleotide
uguggaucugcauggagcu

SEQ ID NO: 61335 - RNA, 19 nt, Artificial Sequence
  Description of Artificial Sequence: Synthetic oligonucleotide
aguggcuacuugguggacu

SEQ ID NO: 61336 - RNA, 19 nt, Artificial Sequence
  Description of Artificial Sequence: Synthetic oligonucleotide
ucaguggcuacuuggugga

SEQ ID NO: 61337 - RNA, 19 nt, Artificial Sequence
  Description of Artificial Sequence: Synthetic oligonucleotide
gacaauuccagaggacauc

SEQ ID NO: 61338 - RNA, 19 nt, Artificial Sequence
  Description of Artificial Sequence: Synthetic oligonucleotide
gcuacuugguggacucugu

SEQ ID NO: 61339 - RNA, 19 nt, Artificial Sequence
  Description of Artificial Sequence: Synthetic oligonucleotide
uggaucugcauggagcuca

SEQ ID NO: 61340 - RNA, 19 nt, Artificial Sequence
  Description of Artificial Sequence: Synthetic oligonucleotide
ugcagucagacaucuggag

SEQ ID NO: 61341 - RNA, 19 nt, Artificial Sequence
  Description of Artificial Sequence: Synthetic oligonucleotide
agucagacaucuggagcau

SEQ ID NO: 61342 - RNA, 19 nt, Artificial Sequence
  Description of Artificial Sequence: Synthetic oligonucleotide
ucagacaucuggagcaugg

SEQ ID NO: 61343 - RNA, 19 nt, Artificial Sequence
  Description of Artificial Sequence: Synthetic oligonucleotide
aagaagcuggaggagcuag

SEQ ID NO: 61344 - RNA, 19 nt, Artificial Sequence
  Description of Artificial Sequence: Synthetic oligonucleotide
cagucagacaucuggagca

SEQ ID NO: 61345 - RNA, 19 nt, Artificial Sequence
  Description of Artificial Sequence: Synthetic oligonucleotide
cagacaucuggagcauggg

SEQ ID NO: 61346 - RNA, 19 nt, Artificial Sequence
  Description of Artificial Sequence: Synthetic oligonucleotide
gucagacaucuggagcaug

SEQ ID NO: 61347 - RNA, 19 nt, Artificial Sequence
  Description of Artificial Sequence: Synthetic oligonucleotide
agaagcuggaggagcuaga

SEQ ID NO: 61348 - RNA, 19 nt, Artificial Sequence
  Description of Artificial Sequence: Synthetic oligonucleotide
gaagaagcuggaggagcua

SEQ ID NO: 61349 - RNA, 19 nt, Artificial Sequence
  Description of Artificial Sequence: Synthetic oligonucleotide
gugcagucagacaucugga

SEQ ID NO: 61350 - RNA, 19 nt, Artificial Sequence
  Description of Artificial Sequence: Synthetic oligonucleotide
gcagucagacaucuggagc

SEQ ID NO: 61351 - RNA, 19 nt, Artificial Sequence
  Description of Artificial Sequence: Synthetic oligonucleotide
caacuccuucgugggcaca

SEQ ID NO: 61352 - RNA, 19 nt, Artificial Sequence
  Description of Artificial Sequence: Synthetic oligonucleotide
caagcccuccaacauccua

SEQ ID NO: 61353 - RNA, 19 nt, Artificial Sequence
  Description of Artificial Sequence: Synthetic oligonucleotide
guacaucgugggcuucuac

SEQ ID NO: 61354 - RNA, 19 nt, Artificial Sequence
  Description of Artificial Sequence: Synthetic oligonucleotide
ccugcagaagaagcuggag

SEQ ID NO: 61355 - RNA, 19 nt, Artificial Sequence
  Description of Artificial Sequence: Synthetic oligonucleotide
uacaucgugggcuucuacg

SEQ ID NO: 61356 - RNA, 19 nt, Artificial Sequence
  Description of Artificial Sequence: Synthetic oligonucleotide
cugcagaagaagcuggagg

SEQ ID NO: 61357 - RNA, 19 nt, Artificial Sequence
  Description of Artificial Sequence: Synthetic oligonucleotide
acaucgugggcuucuacgg

SEQ ID NO: 61358 - RNA, 19 nt, Artificial Sequence
  Description of Artificial Sequence: Synthetic oligonucleotide
agaugugaagcccuccaac

SEQ ID NO: 61359 - RNA, 19 nt, Artificial Sequence
  Description of Artificial Sequence: Synthetic oligonucleotide
ccgccgccgccgccgccgc

SEQ ID NO: 61360 - RNA, 19 nt, Artificial Sequence
  Description of Artificial Sequence: Synthetic oligonucleotide
gacguguggaucugcaugg

SEQ ID NO: 61361 - RNA, 19 nt, Artificial Sequence
  Description of Artificial Sequence: Synthetic oligonucleotide
gcauggagcucauggacac

SEQ ID NO: 61362 - RNA, 19 nt, Artificial Sequence
  Description of Artificial Sequence: Synthetic oligonucleotide
cugcauggagcucauggac

SEQ ID NO: 61363 - RNA, 19 nt, Artificial Sequence
  Description of Artificial Sequence: Synthetic oligonucleotide
acguguggaucugcaugga

SEQ ID NO: 61364 - RNA, 19 nt, Artificial Sequence
  Description of Artificial Sequence: Synthetic oligonucleotide
uggagcucauggacacauc

SEQ ID NO: 61365 - RNA, 19 nt, Artificial Sequence
  Description of Artificial Sequence: Synthetic oligonucleotide
cguguggaucugcauggag

SEQ ID NO: 61366 - RNA, 19 nt, Artificial Sequence
  Description of Artificial Sequence: Synthetic oligonucleotide
caauuccagaggacauccu

SEQ ID NO: 61367 - RNA, 19 nt, Artificial Sequence
  Description of Artificial Sequence: Synthetic oligonucleotide
ugcauggagcucauggaca

SEQ ID NO: 61368 - RNA, 19 nt, Artificial Sequence
  Description of Artificial Sequence: Synthetic oligonucleotide
auggagcucauggacacau

SEQ ID NO: 61369 - RNA, 19 nt, Artificial Sequence
  Description of Artificial Sequence: Synthetic oligonucleotide
acaauuccagaggacaucc

SEQ ID NO: 61370 - RNA, 19 nt, Artificial Sequence
  Description of Artificial Sequence: Synthetic oligonucleotide
gugacuucggcaucagugg

SEQ ID NO: 61371 - RNA, 19 nt, Artificial Sequence
  Description of Artificial Sequence: Synthetic oligonucleotide
ugugacuucggcaucagug

SEQ ID NO: 61372 - RNA, 19 nt, Artificial Sequence
  Description of Artificial Sequence: Synthetic oligonucleotide
gagacgugaagcccuccaa

SEQ ID NO: 61373 - RNA, 19 nt, Artificial Sequence
  Description of Artificial Sequence: Synthetic oligonucleotide
agagacgugaagcccucca

SEQ ID NO: 61374 - RNA, 19 nt, Artificial Sequence
  Description of Artificial Sequence: Synthetic oligonucleotide
agacgugaagcccuccaau

SEQ ID NO: 61375 - RNA, 19 nt, Artificial Sequence
  Description of Artificial Sequence: Synthetic oligonucleotide
gugaagcggauccgagcca

SEQ ID NO: 61376 - RNA, 19 nt, Artificial Sequence
  Description of Artificial Sequence: Synthetic oligonucleotide
ugaagcggauccgagccac

SEQ ID NO: 61377 - RNA, 19 nt, Artificial Sequence
  Description of Artificial Sequence: Synthetic oligonucleotide
cgucaagcccuccaacauc

SEQ ID NO: 61378 - RNA, 19 nt, Artificial Sequence
  Description of Artificial Sequence: Synthetic oligonucleotide
gacgucaagcccuccaaca

SEQ ID NO: 61379 - RNA, 19 nt, Artificial Sequence
  Description of Artificial Sequence: Synthetic oligonucleotide
agaucaagcucugcgacuu

SEQ ID NO: 61380 - RNA, 19 nt, Artificial Sequence
  Description of Artificial Sequence: Synthetic oligonucleotide
aagcucugcgacuucggca

SEQ ID NO: 61381 - RNA, 19 nt, Artificial Sequence
  Description of Artificial Sequence: Synthetic oligonucleotide
cucugcgacuucggcauca

SEQ ID NO: 61382 - RNA, 19 nt, Artificial Sequence
  Description of Artificial Sequence: Synthetic oligonucleotide
gcucugcgacuucggcauc

SEQ ID NO: 61383 - RNA, 19 nt, Artificial Sequence
  Description of Artificial Sequence: Synthetic oligonucleotide
ucugcgacuucggcaucag

SEQ ID NO: 61384 - RNA, 19 nt, Artificial Sequence
  Description of Artificial Sequence: Synthetic oligonucleotide
agcucugcgacuucggcau

SEQ ID NO: 61385 - RNA, 19 nt, Artificial Sequence
  Description of Artificial Sequence: Synthetic oligonucleotide
gaugucaagcccuccaaca

SEQ ID NO: 61386 - RNA, 19 nt, Artificial Sequence
  Description of Artificial Sequence: Synthetic oligonucleotide
agcccuccaacauccuagu

SEQ ID NO: 61387 - RNA, 19 nt, Artificial Sequence
  Description of Artificial Sequence: Synthetic oligonucleotide
aacucuccguacaucgugg

SEQ ID NO: 61388 - RNA, 19 nt, Artificial Sequence
  Description of Artificial Sequence: Synthetic oligonucleotide
gcucaucgacuccauggcc

SEQ ID NO: 61389 - RNA, 19 nt, Artificial Sequence
  Description of Artificial Sequence: Synthetic oligonucleotide
agaucaugcacagagaugu

SEQ ID NO: 61390 - RNA, 19 nt, Artificial Sequence
  Description of Artificial Sequence: Synthetic oligonucleotide
cuugcagaagaagcuggag

SEQ ID NO: 61391 - RNA, 19 nt, Artificial Sequence
  Description of Artificial Sequence: Synthetic oligonucleotide
gcaauccggaaccagauca

SEQ ID NO: 61392 - RNA, 19 nt, Artificial Sequence
  Description of Artificial Sequence: Synthetic oligonucleotide
ugucaagcccuccaacauc

SEQ ID NO: 61393 - RNA, 19 nt, Artificial Sequence
  Description of Artificial Sequence: Synthetic oligonucleotide
gcaacucuccguacaucgu

SEQ ID NO: 61394 - RNA, 19 nt, Artificial Sequence
  Description of Artificial Sequence: Synthetic oligonucleotide
agaucaagcucugugacuu

SEQ ID NO: 61395 - RNA, 19 nt, Artificial Sequence
  Description of Artificial Sequence: Synthetic oligonucleotide
gagaagcacaagaucaugc

SEQ ID NO: 61396 - RNA, 19 nt, Artificial Sequence
  Description of Artificial Sequence: Synthetic oligonucleotide
gggagaucaagcucuguga

SEQ ID NO: 61397 - RNA, 19 nt, Artificial Sequence
  Description of Artificial Sequence: Synthetic oligonucleotide
agaagcacaagaucaugca

SEQ ID NO: 61398 - RNA, 19 nt, Artificial Sequence
  Description of Artificial Sequence: Synthetic oligonucleotide
gagaucaagcucugugacu

SEQ ID NO: 61399 - RNA, 19 nt, Artificial Sequence
  Description of Artificial Sequence: Synthetic oligonucleotide
acaucuggagcaugggacu

SEQ ID NO: 61400 - RNA, 19 nt, Artificial Sequence
  Description of Artificial Sequence: Synthetic oligonucleotide
caacucuccguacaucgug

SEQ ID NO: 61401 - RNA, 19 nt, Artificial Sequence
  Description of Artificial Sequence: Synthetic oligonucleotide
augucaagcccuccaacau

SEQ ID NO: 61402 - RNA, 19 nt, Artificial Sequence
  Description of Artificial Sequence: Synthetic oligonucleotide
agaugucaagcccuccaac

SEQ ID NO: 61403 - RNA, 19 nt, Artificial Sequence
  Description of Artificial Sequence: Synthetic oligonucleotide
gaagcacaagaucaugcac

SEQ ID NO: 61404 - RNA, 19 nt, Artificial Sequence
  Description of Artificial Sequence: Synthetic oligonucleotide
caucuggagcaugggacug

SEQ ID NO: 61405 - RNA, 19 nt, Artificial Sequence
  Description of Artificial Sequence: Synthetic oligonucleotide
cucuccguacaucgugggc

SEQ ID NO: 61406 - RNA, 19 nt, Artificial Sequence
  Description of Artificial Sequence: Synthetic oligonucleotide
gacaucuggagcaugggac

SEQ ID NO: 61407 - RNA, 19 nt, Artificial Sequence
  Description of Artificial Sequence: Synthetic oligonucleotide
aagcccuccaacauccuag

SEQ ID NO: 61408 - RNA, 19 nt, Artificial Sequence
  Description of Artificial Sequence: Synthetic oligonucleotide
guacaucgugggcuucuau

SEQ ID NO: 61409 - RNA, 19 nt, Artificial Sequence
  Description of Artificial Sequence: Synthetic oligonucleotide
aucgacuccauggccaacu

SEQ ID NO: 61410 - RNA, 19 nt, Artificial Sequence
  Description of Artificial Sequence: Synthetic oligonucleotide
cgacuccauggccaacucc

SEQ ID NO: 61411 - RNA, 19 nt, Artificial Sequence
  Description of Artificial Sequence: Synthetic oligonucleotide
acaucgugggcuucuaugg

SEQ ID NO: 61412 - RNA, 19 nt, Artificial Sequence
  Description of Artificial Sequence: Synthetic oligonucleotide
uugcagaagaagcuggagg

SEQ ID NO: 61413 - RNA, 19 nt, Artificial Sequence
  Description of Artificial Sequence: Synthetic oligonucleotide
cucaucgacuccauggcca

SEQ ID NO: 61414 - RNA, 19 nt, Artificial Sequence
  Description of Artificial Sequence: Synthetic oligonucleotide
caauccggaaccagaucau

SEQ ID NO: 61415 - RNA, 19 nt, Artificial Sequence
  Description of Artificial Sequence: Synthetic oligonucleotide
ucuccguacaucgugggcu

SEQ ID NO: 61416 - RNA, 19 nt, Artificial Sequence
  Description of Artificial Sequence: Synthetic oligonucleotide
ucuggagcaugggacuguc

SEQ ID NO: 61417 - RNA, 19 nt, Artificial Sequence
  Description of Artificial Sequence: Synthetic oligonucleotide
ucgacuccauggccaacuc

SEQ ID NO: 61418 - RNA, 19 nt, Artificial Sequence
  Description of Artificial Sequence: Synthetic oligonucleotide
uccguacaucgugggcuuc

SEQ ID NO: 61419 - RNA, 19 nt, Artificial Sequence
  Description of Artificial Sequence: Synthetic oligonucleotide
cuccguacaucgugggcuu

SEQ ID NO: 61420 - RNA, 19 nt, Artificial Sequence
  Description of Artificial Sequence: Synthetic oligonucleotide
agcucaucgacuccauggc

SEQ ID NO: 61421 - RNA, 19 nt, Artificial Sequence
  Description of Artificial Sequence: Synthetic oligonucleotide
acucuccguacaucguggg

SEQ ID NO: 61422 - RNA, 19 nt, Artificial Sequence
  Description of Artificial Sequence: Synthetic oligonucleotide
gagaugucaagcccuccaa

SEQ ID NO: 61423 - RNA, 19 nt, Artificial Sequence
  Description of Artificial Sequence: Synthetic oligonucleotide
ucaucgacuccauggccaa

SEQ ID NO: 61424 - RNA, 19 nt, Artificial Sequence
  Description of Artificial Sequence: Synthetic oligonucleotide
uacaucgugggcuucuaug

SEQ ID NO: 61425 - RNA, 19 nt, Artificial Sequence
  Description of Artificial Sequence: Synthetic oligonucleotide
aucuggagcaugggacugu

SEQ ID NO: 61426 - RNA, 19 nt, Artificial Sequence
  Description of Artificial Sequence: Synthetic oligonucleotide
ggggagaucaagcucugug

SEQ ID NO: 61427 - RNA, 19 nt, Artificial Sequence
  Description of Artificial Sequence: Synthetic oligonucleotide
ggagaucaagcucugugac

SEQ ID NO: 61428 - RNA, 19 nt, Artificial Sequence
  Description of Artificial Sequence: Synthetic oligonucleotide
cagcucaucgacuccaugg

SEQ ID NO: 61429 - RNA, 19 nt, Artificial Sequence
  Description of Artificial Sequence: Synthetic oligonucleotide
caucgacuccauggccaac

SEQ ID NO: 61430 - RNA, 19 nt, Artificial Sequence
  Description of Artificial Sequence: Synthetic oligonucleotide
aucugcauggagcacaugg

SEQ ID NO: 61431 - RNA, 19 nt, Artificial Sequence
  Description of Artificial Sequence: Synthetic oligonucleotide
cacagagaugucaagcccu

SEQ ID NO: 61432 - RNA, 19 nt, Artificial Sequence
  Description of Artificial Sequence: Synthetic oligonucleotide
acagagaugucaagcccuc

SEQ ID NO: 61433 - RNA, 19 nt, Artificial Sequence
  Description of Artificial Sequence: Synthetic oligonucleotide
agagaugucaagcccucca

SEQ ID NO: 61434 - RNA, 19 nt, Artificial Sequence
  Description of Artificial Sequence: Synthetic oligonucleotide
cagagaugucaagcccucc

SEQ ID NO: 61435 - RNA, 19 nt, Artificial Sequence
  Description of Artificial Sequence: Synthetic oligonucleotide
ucugcauggagcacaugga

SEQ ID NO: 61436 - RNA, 19 nt, Artificial Sequence
  Description of Artificial Sequence: Synthetic oligonucleotide
cugcauggagcacauggau

SEQ ID NO: 61437 - RNA, 19 nt, Artificial Sequence
  Description of Artificial Sequence: Synthetic oligonucleotide
acaucuggagcaugggccu

SEQ ID NO: 61438 - RNA, 19 nt, Artificial Sequence
  Description of Artificial Sequence: Synthetic oligonucleotide
cucgccguacaucgugggc

SEQ ID NO: 61439 - RNA, 19 nt, Artificial Sequence
  Description of Artificial Sequence: Synthetic oligonucleotide
agacuccauggccaacucc

SEQ ID NO: 61440 - RNA, 19 nt, Artificial Sequence
  Description of Artificial Sequence: Synthetic oligonucleotide
aagcccuccaacauccucg

SEQ ID NO: 61441 - RNA, 19 nt, Artificial Sequence
  Description of Artificial Sequence: Synthetic oligonucleotide
gccauccggaaccagauca

SEQ ID NO: 61442 - RNA, 19 nt, Artificial Sequence
  Description of Artificial Sequence: Synthetic oligonucleotide
augugaagcccuccaacau

SEQ ID NO: 61443 - RNA, 19 nt, Artificial Sequence
  Description of Artificial Sequence: Synthetic oligonucleotide
gcagucggacaucuggagc

SEQ ID NO: 61444 - RNA, 19 nt, Artificial Sequence
  Description of Artificial Sequence: Synthetic oligonucleotide
gucggacaucuggagcaug

SEQ ID NO: 61445 - RNA, 19 nt, Artificial Sequence
  Description of Artificial Sequence: Synthetic oligonucleotide
gacaucuggagcaugggcc

SEQ ID NO: 61446 - RNA, 19 nt, Artificial Sequence
  Description of Artificial Sequence: Synthetic oligonucleotide
agaucaagcugugugacuu

SEQ ID NO: 61447 - RNA, 19 nt, Artificial Sequence
  Description of Artificial Sequence: Synthetic oligonucleotide
ggggagaucaagcugugug

SEQ ID NO: 61448 - RNA, 19 nt, Artificial Sequence
  Description of Artificial Sequence: Synthetic oligonucleotide
ucggacaucuggagcaugg

SEQ ID NO: 61449 - RNA, 19 nt, Artificial Sequence
  Description of Artificial Sequence: Synthetic oligonucleotide
gaugugaagcccuccaaca

SEQ ID NO: 61450 - RNA, 19 nt, Artificial Sequence
  Description of Artificial Sequence: Synthetic oligonucleotide
cauagacuccauggccaac

SEQ ID NO: 61451 - RNA, 19 nt, Artificial Sequence
  Description of Artificial Sequence: Synthetic oligonucleotide
agaucaugcaccgagaugu

SEQ ID NO: 61452 - RNA, 19 nt, Artificial Sequence
  Description of Artificial Sequence: Synthetic oligonucleotide
ucuggagcaugggccuguc

SEQ ID NO: 61453 - RNA, 19 nt, Artificial Sequence
  Description of Artificial Sequence: Synthetic oligonucleotide
gagaagcaccagaucaugc

SEQ ID NO: 61454 - RNA, 19 nt, Artificial Sequence
  Description of Artificial Sequence: Synthetic oligonucleotide
cucauagacuccauggcca

SEQ ID NO: 61455 - RNA, 19 nt, Artificial Sequence
  Description of Artificial Sequence: Synthetic oligonucleotide
ucgccguacaucgugggcu

SEQ ID NO: 61456 - RNA, 19 nt, Artificial Sequence
  Description of Artificial Sequence: Synthetic oligonucleotide
cggacaucuggagcauggg

SEQ ID NO: 61457 - RNA, 19 nt, Artificial Sequence
  Description of Artificial Sequence: Synthetic oligonucleotide
cgccguacaucgugggcuu

SEQ ID NO: 61458 - RNA, 19 nt, Artificial Sequence
  Description of Artificial Sequence: Synthetic oligonucleotide
ugugaagcccuccaacauc

SEQ ID NO: 61459 - RNA, 19 nt, Artificial Sequence
  Description of Artificial Sequence: Synthetic oligonucleotide
cagucggacaucuggagca

SEQ ID NO: 61460 - RNA, 19 nt, Artificial Sequence
  Description of Artificial Sequence: Synthetic oligonucleotide
gugaagcccuccaacaucc

SEQ ID NO: 61461 - RNA, 19 nt, Artificial Sequence
  Description of Artificial Sequence: Synthetic oligonucleotide
gccguacaucgugggcuuc

SEQ ID NO: 61462 - RNA, 19 nt, Artificial Sequence
  Description of Artificial Sequence: Synthetic oligonucleotide
ccauccggaaccagaucau

SEQ ID NO: 61463 - RNA, 19 nt, Artificial Sequence
  Description of Artificial Sequence: Synthetic oligonucleotide
agcccuccaacauccucgu

SEQ ID NO: 61464 - RNA, 19 nt, Artificial Sequence
  Description of Artificial Sequence: Synthetic oligonucleotide
ucauagacuccauggccaa

SEQ ID NO: 61465 - RNA, 19 nt, Artificial Sequence
  Description of Artificial Sequence: Synthetic oligonucleotide
ugcaacucgccguacaucg

SEQ ID NO: 61466 - RNA, 19 nt, Artificial Sequence
  Description of Artificial Sequence: Synthetic oligonucleotide
auagacuccauggccaacu

SEQ ID NO: 61467 - RNA, 19 nt, Artificial Sequence
  Description of Artificial Sequence: Synthetic oligonucleotide
gcucauagacuccauggcc

SEQ ID NO: 61468 - RNA, 19 nt, Artificial Sequence
  Description of Artificial Sequence: Synthetic oligonucleotide
caucuggagcaugggccug

SEQ ID NO: 61469 - RNA, 19 nt, Artificial Sequence
  Description of Artificial Sequence: Synthetic oligonucleotide
caacuccuucgugggcacg

SEQ ID NO: 61470 - RNA, 19 nt, Artificial Sequence
  Description of Artificial Sequence: Synthetic oligonucleotide
aagaagcuggaggagcugg

SEQ ID NO: 61471 - RNA, 19 nt, Artificial Sequence
  Description of Artificial Sequence: Synthetic oligonucleotide
agucggacaucuggagcau

SEQ ID NO: 61472 - RNA, 19 nt, Artificial Sequence
  Description of Artificial Sequence: Synthetic oligonucleotide
aacucgccguacaucgugg

SEQ ID NO: 61473 - RNA, 19 nt, Artificial Sequence
  Description of Artificial Sequence: Synthetic oligonucleotide
agcucauagacuccauggc

SEQ ID NO: 61474 - RNA, 19 nt, Artificial Sequence
  Description of Artificial Sequence: Synthetic oligonucleotide
aucuggagcaugggccugu

SEQ ID NO: 61475 - RNA, 19 nt, Artificial Sequence
  Description of Artificial Sequence: Synthetic oligonucleotide
gaagaagcuggaggagcug

SEQ ID NO: 61476 - RNA, 19 nt, Artificial Sequence
  Description of Artificial Sequence: Synthetic oligonucleotide
uagacuccauggccaacuc

SEQ ID NO: 61477 - RNA, 19 nt, Artificial Sequence
  Description of Artificial Sequence: Synthetic oligonucleotide
gagaucaagcugugugacu

SEQ ID NO: 61478 - RNA, 19 nt, Artificial Sequence
  Description of Artificial Sequence: Synthetic oligonucleotide
ugaagcccuccaacauccu

SEQ ID NO: 61479 - RNA, 19 nt, Artificial Sequence
  Description of Artificial Sequence: Synthetic oligonucleotide
gugcagucggacaucugga

SEQ ID NO: 61480 - RNA, 19 nt, Artificial Sequence
  Description of Artificial Sequence: Synthetic oligonucleotide
gaagcaccagaucaugcac

SEQ ID NO: 61481 - RNA, 19 nt, Artificial Sequence
  Description of Artificial Sequence: Synthetic oligonucleotide
gggagaucaagcuguguga

SEQ ID NO: 61482 - RNA, 19 nt, Artificial Sequence
  Description of Artificial Sequence: Synthetic oligonucleotide
agaagcuggaggagcugga

SEQ ID NO: 61483 - RNA, 19 nt, Artificial Sequence
  Description of Artificial Sequence: Synthetic oligonucleotide
cagcucauagacuccaugg

SEQ ID NO: 61484 - RNA, 19 nt, Artificial Sequence
  Description of Artificial Sequence: Synthetic oligonucleotide
ggagaucaagcugugugac

SEQ ID NO: 61485 - RNA, 19 nt, Artificial Sequence
  Description of Artificial Sequence: Synthetic oligonucleotide
gcaacucgccguacaucgu

SEQ ID NO: 61486 - RNA, 19 nt, Artificial Sequence
  Description of Artificial Sequence: Synthetic oligonucleotide
caacucgccguacaucgug

SEQ ID NO: 61487 - RNA, 19 nt, Artificial Sequence
  Description of Artificial Sequence: Synthetic oligonucleotide
caccgagaugugaagcccu

SEQ ID NO: 61488 - RNA, 19 nt, Artificial Sequence
  Description of Artificial Sequence: Synthetic oligonucleotide
cgagaugugaagcccucca

SEQ ID NO: 61489 - RNA, 19 nt, Artificial Sequence
  Description of Artificial Sequence: Synthetic oligonucleotide
ccgagaugugaagcccucc

SEQ ID NO: 61490 - RNA, 19 nt, Artificial Sequence
  Description of Artificial Sequence: Synthetic oligonucleotide
agagaugugaagcccucca

SEQ ID NO: 61491 - RNA, 19 nt, Artificial Sequence
  Description of Artificial Sequence: Synthetic oligonucleotide
cacagagaugugaagcccu

SEQ ID NO: 61492 - RNA, 19 nt, Artificial Sequence
  Description of Artificial Sequence: Synthetic oligonucleotide
acagagaugugaagcccuc

SEQ ID NO: 61493 - RNA, 19 nt, Artificial Sequence
  Description of Artificial Sequence: Synthetic oligonucleotide
agaugugaagcccuccaau

SEQ ID NO: 61494 - RNA, 19 nt, Artificial Sequence
  Description of Artificial Sequence: Synthetic oligonucleotide
gugacuuuggcaucagugg

SEQ ID NO: 61495 - RNA, 19 nt, Artificial Sequence
  Description of Artificial Sequence: Synthetic oligonucleotide
ugugacuuuggcaucagug

SEQ ID NO: 61496 - RNA, 19 nt, Artificial Sequence
  Description of Artificial Sequence: Synthetic oligonucleotide
cgccgccgccgccgccgcc

SEQ ID NO: 61497 - RNA, 19 nt, Artificial Sequence
  Description of Artificial Sequence: Synthetic oligonucleotide
ucgccgccgccgccgccgc

SEQ ID NO: 61498 - RNA, 19 nt, Artificial Sequence
  Description of Artificial Sequence: Synthetic oligonucleotide
ccgcagucgccgccgccgc

SEQ ID NO: 61499 - RNA, 19 nt, Artificial Sequence
  Description of Artificial Sequence: Synthetic oligonucleotide
gucgccgccgccgccgccg

SEQ ID NO: 61500 - RNA, 19 nt, Artificial Sequence
  Description of Artificial Sequence: Synthetic oligonucleotide
ugacaauuccagaggacau

SEQ ID NO: 61501 - RNA, 19 nt, Artificial Sequence
  Description of Artificial Sequence: Synthetic oligonucleotide
ggcaucaguggcuacuugg

SEQ ID NO: 61502 - RNA, 19 nt, Artificial Sequence
  Description of Artificial Sequence: Synthetic oligonucleotide
uuuggcaucaguggcuacu

SEQ ID NO: 61503 - RNA, 19 nt, Artificial Sequence
  Description of Artificial Sequence: Synthetic oligonucleotide
ugggcaucaccaugauuga

SEQ ID NO: 61504 - RNA, 19 nt, Artificial Sequence
  Description of Artificial Sequence: Synthetic oligonucleotide
augauugagauggccaucc

SEQ ID NO: 61505 - RNA, 19 nt, Artificial Sequence
  Description of Artificial Sequence: Synthetic oligonucleotide
cugggcaucaccaugauug

SEQ ID NO: 61506 - RNA, 19 nt, Artificial Sequence
  Description of Artificial Sequence: Synthetic oligonucleotide
auggccgugaagcggaucc

SEQ ID NO: 61507 - RNA, 19 nt, Artificial Sequence
  Description of Artificial Sequence: Synthetic oligonucleotide
uggccgugaagcggauccg

SEQ ID NO: 61508 - RNA, 19 nt, Artificial Sequence
  Description of Artificial Sequence: Synthetic oligonucleotide
aacccagagcugaaccaga

SEQ ID NO: 61509 - RNA, 19 nt, Artificial Sequence
  Description of Artificial Sequence: Synthetic oligonucleotide
cccagagcugaaccagaag

SEQ ID NO: 61510 - RNA, 19 nt, Artificial Sequence
  Description of Artificial Sequence: Synthetic oligonucleotide
caucaguggcuacuuggug

SEQ ID NO: 61511 - RNA, 19 nt, Artificial Sequence
  Description of Artificial Sequence: Synthetic oligonucleotide
uacuugguggacucugugg

SEQ ID NO: 61512 - RNA, 19 nt, Artificial Sequence
  Description of Artificial Sequence: Synthetic oligonucleotide
gugaagcggauccgggcca

SEQ ID NO: 61513 - RNA, 19 nt, Artificial Sequence
  Description of Artificial Sequence: Synthetic oligonucleotide
ccagagcugaaccagaagg

SEQ ID NO: 61514 - RNA, 19 nt, Artificial Sequence
  Description of Artificial Sequence: Synthetic oligonucleotide
acccagagcugaaccagaa

SEQ ID NO: 61515 - RNA, 19 nt, Artificial Sequence
  Description of Artificial Sequence: Synthetic oligonucleotide
cagagcugaaccagaaggg

SEQ ID NO: 61516 - RNA, 19 nt, Artificial Sequence
  Description of Artificial Sequence: Synthetic oligonucleotide
acuugguggacucuguggc

SEQ ID NO: 61517 - RNA, 19 nt, Artificial Sequence
  Description of Artificial Sequence: Synthetic oligonucleotide
uuggcaucaguggcuacuu

SEQ ID NO: 61518 - RNA, 19 nt, Artificial Sequence
  Description of Artificial Sequence: Synthetic oligonucleotide
aucauggccgugaagcgga

SEQ ID NO: 61519 - RNA, 19 nt, Artificial Sequence
  Description of Artificial Sequence: Synthetic oligonucleotide
uggcaucaguggcuacuug

SEQ ID NO: 61520 - RNA, 19 nt, Artificial Sequence
  Description of Artificial Sequence: Synthetic oligonucleotide
cauggccgugaagcggauc

SEQ ID NO: 61521 - RNA, 19 nt, Artificial Sequence
  Description of Artificial Sequence: Synthetic oligonucleotide
ugaagcggauccgggccac

SEQ ID NO: 61522 - RNA, 19 nt, Artificial Sequence
  Description of Artificial Sequence: Synthetic oligonucleotide
ucauggccgugaagcggau

SEQ ID NO: 61523 - RNA, 19 nt, Artificial Sequence
  Description of Artificial Sequence: Synthetic oligonucleotide
cuacuugguggacucugug

SEQ ID NO: 61524 - RNA, 19 nt, Artificial Sequence
  Description of Artificial Sequence: Synthetic oligonucleotide
ugauugagauggccauccu

SEQ ID NO: 61525 - RNA, 19 nt, Artificial Sequence
  Description of Artificial Sequence: Synthetic oligonucleotide
gcaucaguggcuacuuggu

SEQ ID NO: 61526 - RNA, 19 nt, Artificial Sequence
  Description of Artificial Sequence: Synthetic oligonucleotide
acgucuggagccugggcau

SEQ ID NO: 61527 - RNA, 19 nt, Artificial Sequence
  Description of Artificial Sequence: Synthetic oligonucleotide
gacgucuggagccugggca

SEQ ID NO: 61528 - RNA, 19 nt, Artificial Sequence
  Description of Artificial Sequence: Synthetic oligonucleotide
cgacgucuggagccugggc

SEQ ID NO: 61529 - RNA, 19 nt, Artificial Sequence
  Description of Artificial Sequence: Synthetic oligonucleotide
ccgacgucuggagccuggg

SEQ ID NO: 61530 - RNA, 19 nt, Artificial Sequence
  Description of Artificial Sequence: Synthetic oligonucleotide
cgucuggagccugggcauc

SEQ ID NO: 61531 - RNA, 19 nt, Artificial Sequence
  Description of Artificial Sequence: Synthetic oligonucleotide
cauacauggcaccugaaag

SEQ ID NO: 61532 - RNA, 19 nt, Artificial Sequence
  Description of Artificial Sequence: Synthetic oligonucleotide
acauggcaccugaaagaau

SEQ ID NO: 61533 - RNA, 19 nt, Artificial Sequence
  Description of Artificial Sequence: Synthetic oligonucleotide
cauggcaccugaaagaaua

SEQ ID NO: 61534 - RNA, 19 nt, Artificial Sequence
  Description of Artificial Sequence: Synthetic oligonucleotide
uacauggcaccugaaagaa

SEQ ID NO: 61535 - RNA, 19 nt, Artificial Sequence
  Description of Artificial Sequence: Synthetic oligonucleotide
auacauggcaccugaaaga

SEQ ID NO: 61536 - RNA, 19 nt, Artificial Sequence
  Description of Artificial Sequence: Synthetic oligonucleotide
ccauacauggcaccugaaa

SEQ ID NO: 61537 - RNA, 19 nt, Artificial Sequence
  Description of Artificial Sequence: Synthetic oligonucleotide
ucugugacuucggcaucag

SEQ ID NO: 61538 - RNA, 19 nt, Artificial Sequence
  Description of Artificial Sequence: Synthetic oligonucleotide
aagcucugugacuucggca

SEQ ID NO: 61539 - RNA, 19 nt, Artificial Sequence
  Description of Artificial Sequence: Synthetic oligonucleotide
agcucugugacuucggcau

SEQ ID NO: 61540 - RNA, 19 nt, Artificial Sequence
  Description of Artificial Sequence: Synthetic oligonucleotide
gcucugugacuucggcauc

SEQ ID NO: 61541 - RNA, 19 nt, Artificial Sequence
  Description of Artificial Sequence: Synthetic oligonucleotide
cucugugacuucggcauca

SEQ ID NO: 61542 - RNA, 19 nt, Artificial Sequence
  Description of Artificial Sequence: Synthetic oligonucleotide
cgccgccgcagccgccgcc

SEQ ID NO: 61543 - RNA, 19 nt, Artificial Sequence
  Description of Artificial Sequence: Synthetic oligonucleotide
gucgccgccgccgcagccg

SEQ ID NO: 61544 - RNA, 19 nt, Artificial Sequence
  Description of Artificial Sequence: Synthetic oligonucleotide
ccgccgucgccgccgccgc

SEQ ID NO: 61545 - RNA, 19 nt, Artificial Sequence
  Description of Artificial Sequence: Synthetic oligonucleotide
gccgccgcagccgccgccg

SEQ ID NO: 61546 - RNA, 19 nt, Artificial Sequence
  Description of Artificial Sequence: Synthetic oligonucleotide
ccgccgccgcagccgccgc

SEQ ID NO: 61547 - RNA, 19 nt, Artificial Sequence
  Description of Artificial Sequence: Synthetic oligonucleotide
gccgccgccgcagccgccg

SEQ ID NO: 61548 - RNA, 19 nt, Artificial Sequence
  Description of Artificial Sequence: Synthetic oligonucleotide
ucgccgccgccgcagccgc

SEQ ID NO: 61549 - RNA, 19 nt, Artificial Sequence
  Description of Artificial Sequence: Synthetic oligonucleotide
cugcauggagcucauggau

SEQ ID NO: 61550 - RNA, 19 nt, Artificial Sequence
  Description of Artificial Sequence: Synthetic oligonucleotide
uacuugguggacucuguug

SEQ ID NO: 61551 - RNA, 19 nt, Artificial Sequence
  Description of Artificial Sequence: Synthetic oligonucleotide
acuugguggacucuguugc

SEQ ID NO: 61552 - RNA, 19 nt, Artificial Sequence
  Description of Artificial Sequence: Synthetic oligonucleotide
auggagcucauggauacau

SEQ ID NO: 61553 - RNA, 19 nt, Artificial Sequence
  Description of Artificial Sequence: Synthetic oligonucleotide
cauggcagugaagcggauc

SEQ ID NO: 61554 - RNA, 19 nt, Artificial Sequence
  Description of Artificial Sequence: Synthetic oligonucleotide
aaucaguggcuacuuggug

SEQ ID NO: 61555 - RNA, 19 nt, Artificial Sequence
  Description of Artificial Sequence: Synthetic oligonucleotide
cuacuugguggacucuguu

SEQ ID NO: 61556 - RNA, 19 nt, Artificial Sequence
  Description of Artificial Sequence: Synthetic oligonucleotide
gauguguggaucugcaugg

SEQ ID NO: 61557 - RNA, 19 nt, Artificial Sequence
  Description of Artificial Sequence: Synthetic oligonucleotide
gcauggagcucauggauac

SEQ ID NO: 61558 - RNA, 19 nt, Artificial Sequence
  Description of Artificial Sequence: Synthetic oligonucleotide
cugggcaucacgaugauug

SEQ ID NO: 61559 - RNA, 19 nt, Artificial Sequence
  Description of Artificial Sequence: Synthetic oligonucleotide
cauggagcucauggauaca

SEQ ID NO: 61560 - RNA, 19 nt, Artificial Sequence
  Description of Artificial Sequence: Synthetic oligonucleotide
ugggcaucacgaugauuga

SEQ ID NO: 61561 - RNA, 19 nt, Artificial Sequence
  Description of Artificial Sequence: Synthetic oligonucleotide
auguguggaucugcaugga

SEQ ID NO: 61562 - RNA, 19 nt, Artificial Sequence
  Description of Artificial Sequence: Synthetic oligonucleotide
cagagcucaaccagaaggg

SEQ ID NO: 61563 - RNA, 19 nt, Artificial Sequence
  Description of Artificial Sequence: Synthetic oligonucleotide
uggaaucaguggcuacuug

SEQ ID NO: 61564 - RNA, 19 nt, Artificial Sequence
  Description of Artificial Sequence: Synthetic oligonucleotide
ugcauggagcucauggaua

SEQ ID NO: 61565 - RNA, 19 nt, Artificial Sequence
  Description of Artificial Sequence: Synthetic oligonucleotide
aacccagagcucaaccaga

SEQ ID NO: 61566 - RNA, 19 nt, Artificial Sequence
  Description of Artificial Sequence: Synthetic oligonucleotide
uggagcucauggauacauc

SEQ ID NO: 61567 - RNA, 19 nt, Artificial Sequence
  Description of Artificial Sequence: Synthetic oligonucleotide
uggcagugaagcggauccg

SEQ ID NO: 61568 - RNA, 19 nt, Artificial Sequence
  Description of Artificial Sequence: Synthetic oligonucleotide
acaauuccagaggacaucu

SEQ ID NO: 61569 - RNA, 19 nt, Artificial Sequence
  Description of Artificial Sequence: Synthetic oligonucleotide
caauuccagaggacaucuu

SEQ ID NO: 61570 - RNA, 19 nt, Artificial Sequence
  Description of Artificial Sequence: Synthetic oligonucleotide
agacaauuccagaggacau

SEQ ID NO: 61571 - RNA, 19 nt, Artificial Sequence
  Description of Artificial Sequence: Synthetic oligonucleotide
ucauggcagugaagcggau

SEQ ID NO: 61572 - RNA, 19 nt, Artificial Sequence
  Description of Artificial Sequence: Synthetic oligonucleotide
ugauugaguuggccauccu

SEQ ID NO: 61573 - RNA, 19 nt, Artificial Sequence
  Description of Artificial Sequence: Synthetic oligonucleotide
cccagagcucaaccagaag

SEQ ID NO: 61574 - RNA, 19 nt, Artificial Sequence
  Description of Artificial Sequence: Synthetic oligonucleotide
gggcaucacgaugauugag

SEQ ID NO: 61575 - RNA, 19 nt, Artificial Sequence
  Description of Artificial Sequence: Synthetic oligonucleotide
ccagagcucaaccagaagg

SEQ ID NO: 61576 - RNA, 19 nt, Artificial Sequence
  Description of Artificial Sequence: Synthetic oligonucleotide
uuggaaucaguggcuacuu

SEQ ID NO: 61577 - RNA, 19 nt, Artificial Sequence
  Description of Artificial Sequence: Synthetic oligonucleotide
gaaucaguggcuacuuggu

SEQ ID NO: 61578 - RNA, 19 nt, Artificial Sequence
  Description of Artificial Sequence: Synthetic oligonucleotide
uguguggaucugcauggag

SEQ ID NO: 61579 - RNA, 19 nt, Artificial Sequence
  Description of Artificial Sequence: Synthetic oligonucleotide
aucauggcagugaagcgga

SEQ ID NO: 61580 - RNA, 19 nt, Artificial Sequence
  Description of Artificial Sequence: Synthetic oligonucleotide
uuuggaaucaguggcuacu

SEQ ID NO: 61581 - RNA, 19 nt, Artificial Sequence
  Description of Artificial Sequence: Synthetic oligonucleotide
acccagagcucaaccagaa

SEQ ID NO: 61582 - RNA, 19 nt, Artificial Sequence
  Description of Artificial Sequence: Synthetic oligonucleotide
acauggccccugaaagaau

SEQ ID NO: 61583 - RNA, 19 nt, Artificial Sequence
  Description of Artificial Sequence: Synthetic oligonucleotide
ccauacauggccccugaaa

SEQ ID NO: 61584 - RNA, 19 nt, Artificial Sequence
  Description of Artificial Sequence: Synthetic oligonucleotide
auacauggccccugaaaga

SEQ ID NO: 61585 - RNA, 19 nt, Artificial Sequence
  Description of Artificial Sequence: Synthetic oligonucleotide
cauggccccugaaagaaua

SEQ ID NO: 61586 - RNA, 19 nt, Artificial Sequence
  Description of Artificial Sequence: Synthetic oligonucleotide
cauacauggccccugaaag

SEQ ID NO: 61587 - RNA, 19 nt, Artificial Sequence
  Description of Artificial Sequence: Synthetic oligonucleotide
uacauggccccugaaagaa

SEQ ID NO: 61588 - RNA, 19 nt, Artificial Sequence
  Description of Artificial Sequence: Synthetic oligonucleotide
caagcccuccaacauccug

SEQ ID NO: 61589 - RNA, 19 nt, Artificial Sequence
  Description of Artificial Sequence: Synthetic oligonucleotide
cgacguauggagccugggc

SEQ ID NO: 61590 - RNA, 19 nt, Artificial Sequence
  Description of Artificial Sequence: Synthetic oligonucleotide
gacguauggagccugggca

SEQ ID NO: 61591 - RNA, 19 nt, Artificial Sequence
  Description of Artificial Sequence: Synthetic oligonucleotide
cguauggagccugggcauc

SEQ ID NO: 61592 - RNA, 19 nt, Artificial Sequence
  Description of Artificial Sequence: Synthetic oligonucleotide
acguauggagccugggcau

SEQ ID NO: 61593 - RNA, 19 nt, Artificial Sequence
  Description of Artificial Sequence: Synthetic oligonucleotide
ucauggccagaaagcuaau

SEQ ID NO: 61594 - RNA, 19 nt, Artificial Sequence
  Description of Artificial Sequence: Synthetic oligonucleotide
aagccuuucucacccagaa

SEQ ID NO: 61595 - RNA, 19 nt, Artificial Sequence
  Description of Artificial Sequence: Synthetic oligonucleotide
gaagccuuucucacccaga

SEQ ID NO: 61596 - RNA, 19 nt, Artificial Sequence
  Description of Artificial Sequence: Synthetic oligonucleotide
ugcauggaacacauggacg

SEQ ID NO: 61597 - RNA, 19 nt, Artificial Sequence
  Description of Artificial Sequence: Synthetic oligonucleotide
gagcugcagguccugcacg

SEQ ID NO: 61598 - RNA, 19 nt, Artificial Sequence
  Description of Artificial Sequence: Synthetic oligonucleotide
gcauggaacacauggacgg

SEQ ID NO: 61599 - RNA, 19 nt, Artificial Sequence
  Description of Artificial Sequence: Synthetic oligonucleotide
agcugcagguccugcacga

SEQ ID NO: 61600 - RNA, 19 nt, Artificial Sequence
  Description of Artificial Sequence: Synthetic oligonucleotide
ucuggagccugggcaucac

SEQ ID NO: 61601 - RNA, 19 nt, Artificial Sequence
  Description of Artificial Sequence: Synthetic oligonucleotide
gacgugaagcccuccaaua

SEQ ID NO: 61602 - RNA, 19 nt, Artificial Sequence
  Description of Artificial Sequence: Synthetic oligonucleotide
acgugaagcccuccaauau

SEQ ID NO: 61603 - RNA, 19 nt, Artificial Sequence
  Description of Artificial Sequence: Synthetic oligonucleotide
ucugaugucuggagcuuag

SEQ ID NO: 61604 - RNA, 19 nt, Artificial Sequence
  Description of Artificial Sequence: Synthetic oligonucleotide
cugaugucuggagcuuagg

SEQ ID NO: 61605 - RNA, 19 nt, Artificial Sequence
  Description of Artificial Sequence: Synthetic oligonucleotide
caggugguagaggagccau

SEQ ID NO: 61606 - RNA, 19 nt, Artificial Sequence
  Description of Artificial Sequence: Synthetic oligonucleotide
aacaggugguagaggagcc

SEQ ID NO: 61607 - RNA, 19 nt, Artificial Sequence
  Description of Artificial Sequence: Synthetic oligonucleotide
aggugguagaggagccauc

SEQ ID NO: 61608 - RNA, 19 nt, Artificial Sequence
  Description of Artificial Sequence: Synthetic oligonucleotide
aaacaggugguagaggagc

SEQ ID NO: 61609 - RNA, 19 nt, Artificial Sequence
  Description of Artificial Sequence: Synthetic oligonucleotide
aucaagcucugcgacuucg

SEQ ID NO: 61610 - RNA, 19 nt, Artificial Sequence
  Description of Artificial Sequence: Synthetic oligonucleotide
ucaagcucugcgacuucgg

SEQ ID NO: 61611 - RNA, 19 nt, Artificial Sequence
  Description of Artificial Sequence: Synthetic oligonucleotide
gaucaagcucugcgacuuc

SEQ ID NO: 61612 - RNA, 19 nt, Artificial Sequence
  Description of Artificial Sequence: Synthetic oligonucleotide
caagcucugcgacuucggc

SEQ ID NO: 61613 - RNA, 19 nt, Artificial Sequence
  Description of Artificial Sequence: Synthetic oligonucleotide
cugcgacuucggcaucagc

SEQ ID NO: 61614 - RNA, 19 nt, Artificial Sequence
  Description of Artificial Sequence: Synthetic oligonucleotide
ugcgacuucggcaucagcg

SEQ ID NO: 61615 - RNA, 19 nt, Artificial Sequence
  Description of Artificial Sequence: Synthetic oligonucleotide
gcgacuucggcaucagcgg

SEQ ID NO: 61616 - RNA, 19 nt, Artificial Sequence
  Description of Artificial Sequence: Synthetic oligonucleotide
agaucaguaucugcaugga

SEQ ID NO: 61617 - RNA, 19 nt, Artificial Sequence
  Description of Artificial Sequence: Synthetic oligonucleotide
gagaucaguaucugcaugg

SEQ ID NO: 61618 - RNA, 19 nt, Artificial Sequence
  Description of Artificial Sequence: Synthetic oligonucleotide
uuacucugugcagucagac

SEQ ID NO: 61619 - RNA, 19 nt, Artificial Sequence
  Description of Artificial Sequence: Synthetic oligonucleotide
gaagcuggaggagcuagag

SEQ ID NO: 61620 - RNA, 19 nt, Artificial Sequence
  Description of Artificial Sequence: Synthetic oligonucleotide
gcuggaggagcuagagcuu

SEQ ID NO: 61621 - RNA, 19 nt, Artificial Sequence
  Description of Artificial Sequence: Synthetic oligonucleotide
uacucugugcagucagaca

SEQ ID NO: 61622 - RNA, 19 nt, Artificial Sequence
  Description of Artificial Sequence: Synthetic oligonucleotide
agcuggaggagcuagagcu

SEQ ID NO: 61623 - RNA, 19 nt, Artificial Sequence
  Description of Artificial Sequence: Synthetic oligonucleotide
agacaucuggagcauggga

SEQ ID NO: 61624 - RNA, 19 nt, Artificial Sequence
  Description of Artificial Sequence: Synthetic oligonucleotide
acucugugcagucagacau

SEQ ID NO: 61625 - RNA, 19 nt, Artificial Sequence
  Description of Artificial Sequence: Synthetic oligonucleotide
auuacucugugcagucaga

SEQ ID NO: 61626 - RNA, 19 nt, Artificial Sequence
  Description of Artificial Sequence: Synthetic oligonucleotide
aacuccuucgugggcacaa

SEQ ID NO: 61627 - RNA, 19 nt, Artificial Sequence
  Description of Artificial Sequence: Synthetic oligonucleotide
cugugcagucagacaucug

SEQ ID NO: 61628 - RNA, 19 nt, Artificial Sequence
  Description of Artificial Sequence: Synthetic oligonucleotide
accagcccagcacaccaac

SEQ ID NO: 61629 - RNA, 19 nt, Artificial Sequence
  Description of Artificial Sequence: Synthetic oligonucleotide
uuaaccagcccagcacacc

SEQ ID NO: 61630 - RNA, 19 nt, Artificial Sequence
  Description of Artificial Sequence: Synthetic oligonucleotide
acuccuucgugggcacaag

SEQ ID NO: 61631 - RNA, 19 nt, Artificial Sequence
  Description of Artificial Sequence: Synthetic oligonucleotide
ugugcagucagacaucugg

SEQ ID NO: 61632 - RNA, 19 nt, Artificial Sequence
  Description of Artificial Sequence: Synthetic oligonucleotide
cauuacucugugcagucag

SEQ ID NO: 61633 - RNA, 19 nt, Artificial Sequence
  Description of Artificial Sequence: Synthetic oligonucleotide
cuuaaccagcccagcacac

SEQ ID NO: 61634 - RNA, 19 nt, Artificial Sequence
  Description of Artificial Sequence: Synthetic oligonucleotide
cucugugcagucagacauc

SEQ ID NO: 61635 - RNA, 19 nt, Artificial Sequence
  Description of Artificial Sequence: Synthetic oligonucleotide
aaccagcccagcacaccaa

SEQ ID NO: 61636 - RNA, 19 nt, Artificial Sequence
  Description of Artificial Sequence: Synthetic oligonucleotide
uggaggagcuagagcuuga

SEQ ID NO: 61637 - RNA, 19 nt, Artificial Sequence
  Description of Artificial Sequence: Synthetic oligonucleotide
aagcuggaggagcuagagc

SEQ ID NO: 61638 - RNA, 19 nt, Artificial Sequence
  Description of Artificial Sequence: Synthetic oligonucleotide
aucaagcucugugacuuug

SEQ ID NO: 61639 - RNA, 19 nt, Artificial Sequence
  Description of Artificial Sequence: Synthetic oligonucleotide
ucaagcucugugacuuugg

SEQ ID NO: 61640 - RNA, 19 nt, Artificial Sequence
  Description of Artificial Sequence: Synthetic oligonucleotide
aucaagcugugugacuucg

SEQ ID NO: 61641 - RNA, 19 nt, Artificial Sequence
  Description of Artificial Sequence: Synthetic oligonucleotide
aaguggauuuugccggcug

SEQ ID NO: 61642 - RNA, 19 nt, Artificial Sequence
  Description of Artificial Sequence: Synthetic oligonucleotide
uggagcaugggccuguccc

SEQ ID NO: 61643 - RNA, 19 nt, Artificial Sequence
  Description of Artificial Sequence: Synthetic oligonucleotide
agcuggaggagcuggaacu

SEQ ID NO: 61644 - RNA, 19 nt, Artificial Sequence
  Description of Artificial Sequence: Synthetic oligonucleotide
gaagcuggaggagcuggaa

SEQ ID NO: 61645 - RNA, 19 nt, Artificial Sequence
  Description of Artificial Sequence: Synthetic oligonucleotide
agcaugggccugucccugg

SEQ ID NO: 61646 - RNA, 19 nt, Artificial Sequence
  Description of Artificial Sequence: Synthetic oligonucleotide
ggaccugcagaagaagcug

SEQ ID NO: 61647 - RNA, 19 nt, Artificial Sequence
  Description of Artificial Sequence: Synthetic oligonucleotide
cuggagcaugggccugucc

SEQ ID NO: 61648 - RNA, 19 nt, Artificial Sequence
  Description of Artificial Sequence: Synthetic oligonucleotide
gagagaagcaccagaucau

SEQ ID NO: 61649 - RNA, 19 nt, Artificial Sequence
  Description of Artificial Sequence: Synthetic oligonucleotide
gcuggaggagcuggaacuu

SEQ ID NO: 61650 - RNA, 19 nt, Artificial Sequence
  Description of Artificial Sequence: Synthetic oligonucleotide
aaugcaacucgccguacau

SEQ ID NO: 61651 - RNA, 19 nt, Artificial Sequence
  Description of Artificial Sequence: Synthetic oligonucleotide
augcaacucgccguacauc

SEQ ID NO: 61652 - RNA, 19 nt, Artificial Sequence
  Description of Artificial Sequence: Synthetic oligonucleotide
uggaggagcuggaacuuga

SEQ ID NO: 61653 - RNA, 19 nt, Artificial Sequence
  Description of Artificial Sequence: Synthetic oligonucleotide
auuugcauggaacacaugg

SEQ ID NO: 61654 - RNA, 19 nt, Artificial Sequence
  Description of Artificial Sequence: Synthetic oligonucleotide
agaucagcauuugcaugga

SEQ ID NO: 61655 - RNA, 19 nt, Artificial Sequence
  Description of Artificial Sequence: Synthetic oligonucleotide
caagcugugugacuucggg

SEQ ID NO: 61656 - RNA, 19 nt, Artificial Sequence
  Description of Artificial Sequence: Synthetic oligonucleotide
gugacuucggggugagcgg

SEQ ID NO: 61657 - RNA, 19 nt, Artificial Sequence
  Description of Artificial Sequence: Synthetic oligonucleotide
aucgugggcuucuacgggg

SEQ ID NO: 61658 - RNA, 19 nt, Artificial Sequence
  Description of Artificial Sequence: Synthetic oligonucleotide
gagcaugggccugucccug

SEQ ID NO: 61659 - RNA, 19 nt, Artificial Sequence
  Description of Artificial Sequence: Synthetic oligonucleotide
gaagaaguggauuuugccg

SEQ ID NO: 61660 - RNA, 19 nt, Artificial Sequence
  Description of Artificial Sequence: Synthetic oligonucleotide
aagaaguggauuuugccgg

SEQ ID NO: 61661 - RNA, 19 nt, Artificial Sequence
  Description of Artificial Sequence: Synthetic oligonucleotide
gaaguggauuuugccggcu

SEQ ID NO: 61662 - RNA, 19 nt, Artificial Sequence
  Description of Artificial Sequence: Synthetic oligonucleotide
gcgagcugcagguccugca

SEQ ID NO: 61663 - RNA, 19 nt, Artificial Sequence
  Description of Artificial Sequence: Synthetic oligonucleotide
ucaagcugugugacuucgg

SEQ ID NO: 61664 - RNA, 19 nt, Artificial Sequence
  Description of Artificial Sequence: Synthetic oligonucleotide
aagcugugugacuucgggg

SEQ ID NO: 61665 - RNA, 19 nt, Artificial Sequence
  Description of Artificial Sequence: Synthetic oligonucleotide
agagaagcaccagaucaug

SEQ ID NO: 61666 - RNA, 19 nt, Artificial Sequence
  Description of Artificial Sequence: Synthetic oligonucleotide
cuggaggagcuggaacuug

SEQ ID NO: 61667 - RNA, 19 nt, Artificial Sequence
  Description of Artificial Sequence: Synthetic oligonucleotide
uuugcauggaacacaugga

SEQ ID NO: 61668 - RNA, 19 nt, Artificial Sequence
  Description of Artificial Sequence: Synthetic oligonucleotide
ggagcaugggccugucccu

SEQ ID NO: 61669 - RNA, 19 nt, Artificial Sequence
  Description of Artificial Sequence: Synthetic oligonucleotide
aagcuggaggagcuggaac

SEQ ID NO: 61670 - RNA, 19 nt, Artificial Sequence
  Description of Artificial Sequence: Synthetic oligonucleotide
ugugacuucggggugagcg

SEQ ID NO: 61671 - RNA, 19 nt, Artificial Sequence
  Description of Artificial Sequence: Synthetic oligonucleotide
gaaugcaacucgccguaca

SEQ ID NO: 61672 - RNA, 19 nt, Artificial Sequence
  Description of Artificial Sequence: Synthetic oligonucleotide
gaccugcagaagaagcugg

SEQ ID NO: 61673 - RNA, 19 nt, Artificial Sequence
  Description of Artificial Sequence: Synthetic oligonucleotide
caucgugggcuucuacggg

SEQ ID NO: 61674 - RNA, 19 nt, Artificial Sequence
  Description of Artificial Sequence: Synthetic oligonucleotide
aguggauuuugccggcugg

SEQ ID NO: 61675 - RNA, 19 nt, Artificial Sequence
  Description of Artificial Sequence: Synthetic oligonucleotide
gagaucagcauuugcaugg

SEQ ID NO: 61676 - RNA, 19 nt, Artificial Sequence
  Description of Artificial Sequence: Synthetic oligonucleotide
ucgugggcuucuacggggc

SEQ ID NO: 61677 - RNA, 19 nt, Artificial Sequence
  Description of Artificial Sequence: Synthetic oligonucleotide
gaucaagcugugugacuuc

SEQ ID NO: 61678 - RNA, 19 nt, Artificial Sequence
  Description of Artificial Sequence: Synthetic oligonucleotide
agcugugugacuucggggu

SEQ ID NO: 61679 - RNA, 19 nt, Artificial Sequence
  Description of Artificial Sequence: Synthetic oligonucleotide
ccgccgccgccggcccgcg

SEQ ID NO: 61680 - RNA, 19 nt, Artificial Sequence
  Description of Artificial Sequence: Synthetic oligonucleotide
gccgccgccgccggcccgc

SEQ ID NO: 61681 - RNA, 19 nt, Artificial Sequence
  Description of Artificial Sequence: Synthetic oligonucleotide
cgccgccgccgccggcccg

SEQ ID NO: 61682 - RNA, 19 nt, Artificial Sequence
  Description of Artificial Sequence: Synthetic oligonucleotide
ccgccgccgccgccgcugc

SEQ ID NO: 61683 - RNA, 19 nt, Artificial Sequence
  Description of Artificial Sequence: Synthetic oligonucleotide
gccgccgccgccgccgcug

SEQ ID NO: 61684 - RNA, 19 nt, Artificial Sequence
  Description of Artificial Sequence: Synthetic oligonucleotide
cgccgccgccgccgccgcu

SEQ ID NO: 61685 - RNA, 19 nt, Artificial Sequence
  Description of Artificial Sequence: Synthetic oligonucleotide
gguagagaaggugcggcac

SEQ ID NO: 61686 - RNA, 19 nt, Artificial Sequence
  Description of Artificial Sequence: Synthetic oligonucleotide
ggagacguguggaucugca

SEQ ID NO: 61687 - RNA, 19 nt, Artificial Sequence
  Description of Artificial Sequence: Synthetic oligonucleotide
ggugguagagaaggugcgg

SEQ ID NO: 61688 - RNA, 19 nt, Artificial Sequence
  Description of Artificial Sequence: Synthetic oligonucleotide
ggggugguagagaaggugc

SEQ ID NO: 61689 - RNA, 19 nt, Artificial Sequence
  Description of Artificial Sequence: Synthetic oligonucleotide
accagaagggcuacaaugu

SEQ ID NO: 61690 - RNA, 19 nt, Artificial Sequence
  Description of Artificial Sequence: Synthetic oligonucleotide
uccagaggacauccuuggg

SEQ ID NO: 61691 - RNA, 19 nt, Artificial Sequence
  Description of Artificial Sequence: Synthetic oligonucleotide
gagccugggcaucaccaug

SEQ ID NO: 61692 - RNA, 19 nt, Artificial Sequence
  Description of Artificial Sequence: Synthetic oligonucleotide
gagggagacguguggaucu

SEQ ID NO: 61693 - RNA, 19 nt, Artificial Sequence
  Description of Artificial Sequence: Synthetic oligonucleotide
ggagccugggcaucaccau

SEQ ID NO: 61694 - RNA, 19 nt, Artificial Sequence
  Description of Artificial Sequence: Synthetic oligonucleotide
gugaagaugugugacuuug

SEQ ID NO: 61695 - RNA, 19 nt, Artificial Sequence
  Description of Artificial Sequence: Synthetic oligonucleotide
auuccagaggacauccuug

SEQ ID NO: 61696 - RNA, 19 nt, Artificial Sequence
  Description of Artificial Sequence: Synthetic oligonucleotide
gacuuuggcaucaguggcu

SEQ ID NO: 61697 - RNA, 19 nt, Artificial Sequence
  Description of Artificial Sequence: Synthetic oligonucleotide
aauuccagaggacauccuu

SEQ ID NO: 61698 - RNA, 19 nt, Artificial Sequence
  Description of Artificial Sequence: Synthetic oligonucleotide
cuugguggacucuguggcc

SEQ ID NO: 61699 - RNA, 19 nt, Artificial Sequence
  Description of Artificial Sequence: Synthetic oligonucleotide
aaccagaagggcuacaaug

SEQ ID NO: 61700 - RNA, 19 nt, Artificial Sequence
  Description of Artificial Sequence: Synthetic oligonucleotide
ugguggacucuguggccaa

SEQ ID NO: 61701 - RNA, 19 nt, Artificial Sequence
  Description of Artificial Sequence: Synthetic oligonucleotide
agggagacguguggaucug

SEQ ID NO: 61702 - RNA, 19 nt, Artificial Sequence
  Description of Artificial Sequence: Synthetic oligonucleotide
gccugggcaucaccaugau

SEQ ID NO: 61703 - RNA, 19 nt, Artificial Sequence
  Description of Artificial Sequence: Synthetic oligonucleotide
acuuuggcaucaguggcua

SEQ ID NO: 61704 - RNA, 19 nt, Artificial Sequence
  Description of Artificial Sequence: Synthetic oligonucleotide
uggagccugggcaucacca

SEQ ID NO: 61705 - RNA, 19 nt, Artificial Sequence
  Description of Artificial Sequence: Synthetic oligonucleotide
agccugggcaucaccauga

SEQ ID NO: 61706 - RNA, 19 nt, Artificial Sequence
  Description of Artificial Sequence: Synthetic oligonucleotide
ugguagagaaggugcggca

SEQ ID NO: 61707 - RNA, 19 nt, Artificial Sequence
  Description of Artificial Sequence: Synthetic oligonucleotide
uuccagaggacauccuugg

SEQ ID NO: 61708 - RNA, 19 nt, Artificial Sequence
  Description of Artificial Sequence: Synthetic oligonucleotide
guagagaaggugcggcacg

SEQ ID NO: 61709 - RNA, 19 nt, Artificial Sequence
  Description of Artificial Sequence: Synthetic oligonucleotide
gugguagagaaggugcggc

SEQ ID NO: 61710 - RNA, 19 nt, Artificial Sequence
  Description of Artificial Sequence: Synthetic oligonucleotide
ugaagaugugugacuuugg

SEQ ID NO: 61711 - RNA, 19 nt, Artificial Sequence
  Description of Artificial Sequence: Synthetic oligonucleotide
uugguggacucuguggcca

SEQ ID NO: 61712 - RNA, 19 nt, Artificial Sequence
  Description of Artificial Sequence: Synthetic oligonucleotide
gggugguagagaaggugcg

SEQ ID NO: 61713 - RNA, 19 nt, Artificial Sequence
  Description of Artificial Sequence: Synthetic oligonucleotide
gagacguguggaucugcau

SEQ ID NO: 61714 - RNA, 19 nt, Artificial Sequence
  Description of Artificial Sequence: Synthetic oligonucleotide
cuuuggcaucaguggcuac

SEQ ID NO: 61715 - RNA, 19 nt, Artificial Sequence
  Description of Artificial Sequence: Synthetic oligonucleotide
cucgagccagcccgccagc

SEQ ID NO: 61716 - RNA, 19 nt, Artificial Sequence
  Description of Artificial Sequence: Synthetic oligonucleotide
auuaagcucugugacuucg

SEQ ID NO: 61717 - RNA, 19 nt, Artificial Sequence
  Description of Artificial Sequence: Synthetic oligonucleotide
uuaagcucugugacuucgg

SEQ ID NO: 61718 - RNA, 19 nt, Artificial Sequence
  Description of Artificial Sequence: Synthetic oligonucleotide
uggacucuauugccaagac

SEQ ID NO: 61719 - RNA, 19 nt, Artificial Sequence
  Description of Artificial Sequence: Synthetic oligonucleotide
uggaucuguauggaacuca

SEQ ID NO: 61720 - RNA, 19 nt, Artificial Sequence
  Description of Artificial Sequence: Synthetic oligonucleotide
ugacuucggcaucagugga

SEQ ID NO: 61721 - RNA, 19 nt, Artificial Sequence
  Description of Artificial Sequence: Synthetic oligonucleotide
guggacucuauugccaaga

SEQ ID NO: 61722 - RNA, 19 nt, Artificial Sequence
  Description of Artificial Sequence: Synthetic oligonucleotide
ggaucuguauggaacucau

SEQ ID NO: 61723 - RNA, 19 nt, Artificial Sequence
  Description of Artificial Sequence: Synthetic oligonucleotide
gaucuguauggaacucaug

SEQ ID NO: 61724 - RNA, 19 nt, Artificial Sequence
  Description of Artificial Sequence: Synthetic oligonucleotide
cugugacuucggcaucagu

SEQ ID NO: 61725 - RNA, 19 nt, Artificial Sequence
  Description of Artificial Sequence: Synthetic oligonucleotide
ggcagcggcacccccggcc

SEQ ID NO: 61726 - RNA, 19 nt, Artificial Sequence
  Description of Artificial Sequence: Synthetic oligonucleotide
gugaagcccuccaauaugc

SEQ ID NO: 61727 - RNA, 19 nt, Artificial Sequence
  Description of Artificial Sequence: Synthetic oligonucleotide
ugaagcccuccaauaugcu

SEQ ID NO: 61728 - RNA, 19 nt, Artificial Sequence
  Description of Artificial Sequence: Synthetic oligonucleotide
uagagacgugaagcccucc

SEQ ID NO: 61729 - RNA, 19 nt, Artificial Sequence
  Description of Artificial Sequence: Synthetic oligonucleotide
cauagagacgugaagcccu

SEQ ID NO: 61730 - RNA, 19 nt, Artificial Sequence
  Description of Artificial Sequence: Synthetic oligonucleotide
accgccgucgccgccgccg

SEQ ID NO: 61731 - RNA, 19 nt, Artificial Sequence
  Description of Artificial Sequence: Synthetic oligonucleotide
auucacagagacgucaagc

SEQ ID NO: 61732 - RNA, 19 nt, Artificial Sequence
  Description of Artificial Sequence: Synthetic oligonucleotide
cacagagacgucaagccuu

SEQ ID NO: 61733 - RNA, 19 nt, Artificial Sequence
  Description of Artificial Sequence: Synthetic oligonucleotide
cauucacagagacgucaag

SEQ ID NO: 61734 - RNA, 19 nt, Artificial Sequence
  Description of Artificial Sequence: Synthetic oligonucleotide
acagagacgucaagccuuc

SEQ ID NO: 61735 - RNA, 19 nt, Artificial Sequence
  Description of Artificial Sequence: Synthetic oligonucleotide
ucauucacagagacgucaa

SEQ ID NO: 61736 - RNA, 19 nt, Artificial Sequence
  Description of Artificial Sequence: Synthetic oligonucleotide
uucacagagacgucaagcc

SEQ ID NO: 61737 - RNA, 19 nt, Artificial Sequence
  Description of Artificial Sequence: Synthetic oligonucleotide
ugcaaaccauacauggccc

SEQ ID NO: 61738 - RNA, 19 nt, Artificial Sequence
  Description of Artificial Sequence: Synthetic oligonucleotide
ggggugguggagaagaugc

SEQ ID NO: 61739 - RNA, 19 nt, Artificial Sequence
  Description of Artificial Sequence: Synthetic oligonucleotide
ggugguggagaagaugcgg

SEQ ID NO: 61740 - RNA, 19 nt, Artificial Sequence
  Description of Artificial Sequence: Synthetic oligonucleotide
gguggagaagaugcggcac

SEQ ID NO: 61741 - RNA, 19 nt, Artificial Sequence
  Description of Artificial Sequence: Synthetic oligonucleotide
gcagugaagcggauccgag

SEQ ID NO: 61742 - RNA, 19 nt, Artificial Sequence
  Description of Artificial Sequence: Synthetic oligonucleotide
ugguggagaagaugcggca

SEQ ID NO: 61743 - RNA, 19 nt, Artificial Sequence
  Description of Artificial Sequence: Synthetic oligonucleotide
gcaaaccauacauggcccc

SEQ ID NO: 61744 - RNA, 19 nt, Artificial Sequence
  Description of Artificial Sequence: Synthetic oligonucleotide
cagugaagcggauccgagc

SEQ ID NO: 61745 - RNA, 19 nt, Artificial Sequence
  Description of Artificial Sequence: Synthetic oligonucleotide
aagcggauccgagccacag

SEQ ID NO: 61746 - RNA, 19 nt, Artificial Sequence
  Description of Artificial Sequence: Synthetic oligonucleotide
agcagcucaaacagguggu

SEQ ID NO: 61747 - RNA, 19 nt, Artificial Sequence
  Description of Artificial Sequence: Synthetic oligonucleotide
gggugguggagaagaugcg

SEQ ID NO: 61748 - RNA, 19 nt, Artificial Sequence
  Description of Artificial Sequence: Synthetic oligonucleotide
caaaccauacauggccccu

SEQ ID NO: 61749 - RNA, 19 nt, Artificial Sequence
  Description of Artificial Sequence: Synthetic oligonucleotide
uuugaggugaaggcagaug

SEQ ID NO: 61750 - RNA, 19 nt, Artificial Sequence
  Description of Artificial Sequence: Synthetic oligonucleotide
aaccauacauggccccuga

SEQ ID NO: 61751 - RNA, 19 nt, Artificial Sequence
  Description of Artificial Sequence: Synthetic oligonucleotide
ugaggugaaggcagaugac

SEQ ID NO: 61752 - RNA, 19 nt, Artificial Sequence
  Description of Artificial Sequence: Synthetic oligonucleotide
ggcagugaagcggauccga

SEQ ID NO: 61753 - RNA, 19 nt, Artificial Sequence
  Description of Artificial Sequence: Synthetic oligonucleotide
gugguggagaagaugcggc

SEQ ID NO: 61754 - RNA, 19 nt, Artificial Sequence
  Description of Artificial Sequence: Synthetic oligonucleotide
agcggauccgagccacagu

SEQ ID NO: 61755 - RNA, 19 nt, Artificial Sequence
  Description of Artificial Sequence: Synthetic oligonucleotide
ugaagaugugcgauuuugg

SEQ ID NO: 61756 - RNA, 19 nt, Artificial Sequence
  Description of Artificial Sequence: Synthetic oligonucleotide
acuuugaggugaaggcaga

SEQ ID NO: 61757 - RNA, 19 nt, Artificial Sequence
  Description of Artificial Sequence: Synthetic oligonucleotide
cuuugaggugaaggcagau

SEQ ID NO: 61758 - RNA, 19 nt, Artificial Sequence
  Description of Artificial Sequence: Synthetic oligonucleotide
agugaagcggauccgagcc

SEQ ID NO: 61759 - RNA, 19 nt, Artificial Sequence
  Description of Artificial Sequence: Synthetic oligonucleotide
gaagcggauccgagccaca

SEQ ID NO: 61760 - RNA, 19 nt, Artificial Sequence
  Description of Artificial Sequence: Synthetic oligonucleotide
aacuuugaggugaaggcag

SEQ ID NO: 61761 - RNA, 19 nt, Artificial Sequence
  Description of Artificial Sequence: Synthetic oligonucleotide
uugaggugaaggcagauga

SEQ ID NO: 61762 - RNA, 19 nt, Artificial Sequence
  Description of Artificial Sequence: Synthetic oligonucleotide
ggccccugaaagaauaaac

SEQ ID NO: 61763 - RNA, 19 nt, Artificial Sequence
  Description of Artificial Sequence: Synthetic oligonucleotide
ccccugaaagaauaaaccc

SEQ ID NO: 61764 - RNA, 19 nt, Artificial Sequence
  Description of Artificial Sequence: Synthetic oligonucleotide
ccugaaagaauaaacccag

SEQ ID NO: 61765 - RNA, 19 nt, Artificial Sequence
  Description of Artificial Sequence: Synthetic oligonucleotide
uggccccugaaagaauaaa

SEQ ID NO: 61766 - RNA, 19 nt, Artificial Sequence
  Description of Artificial Sequence: Synthetic oligonucleotide
gccccugaaagaauaaacc

SEQ ID NO: 61767 - RNA, 19 nt, Artificial Sequence
  Description of Artificial Sequence: Synthetic oligonucleotide
cccugaaagaauaaaccca

SEQ ID NO: 61768 - RNA, 19 nt, Artificial Sequence
  Description of Artificial Sequence: Synthetic oligonucleotide
auggccccugaaagaauaa

SEQ ID NO: 61769 - RNA, 19 nt, Artificial Sequence
  Description of Artificial Sequence: Synthetic oligonucleotide
accauacauggccccugaa

SEQ ID NO: 61770 - RNA, 19 nt, Artificial Sequence
  Description of Artificial Sequence: Synthetic oligonucleotide
cagaucaagcucugcgacu

SEQ ID NO: 61771 - RNA, 19 nt, Artificial Sequence
  Description of Artificial Sequence: Synthetic oligonucleotide
gcgacgucaagcccuccaa

SEQ ID NO: 61772 - RNA, 19 nt, Artificial Sequence
  Description of Artificial Sequence: Synthetic oligonucleotide
cgacgucaagcccuccaac

SEQ ID NO: 61773 - RNA, 19 nt, Artificial Sequence
  Description of Artificial Sequence: Synthetic oligonucleotide
cucgggccagcccaccagc

SEQ ID NO: 61774 - RNA, 19 nt, Artificial Sequence
  Description of Artificial Sequence: Synthetic oligonucleotide
gacuucggcaucagcggcc

SEQ ID NO: 61775 - RNA, 19 nt, Artificial Sequence
  Description of Artificial Sequence: Synthetic oligonucleotide
aucaugcacagagauguca

SEQ ID NO: 61776 - RNA, 19 nt, Artificial Sequence
  Description of Artificial Sequence: Synthetic oligonucleotide
agcugcagguucugcauga

SEQ ID NO: 61777 - RNA, 19 nt, Artificial Sequence
  Description of Artificial Sequence: Synthetic oligonucleotide
ggccuugcagaagaagcug

SEQ ID NO: 61778 - RNA, 19 nt, Artificial Sequence
  Description of Artificial Sequence: Synthetic oligonucleotide
gugcaacucuccguacauc

SEQ ID NO: 61779 - RNA, 19 nt, Artificial Sequence
  Description of Artificial Sequence: Synthetic oligonucleotide
agcaugggacugucucugg

SEQ ID NO: 61780 - RNA, 19 nt, Artificial Sequence
  Description of Artificial Sequence: Synthetic oligonucleotide
aaguggauuuugcagguug

SEQ ID NO: 61781 - RNA, 19 nt, Artificial Sequence
  Description of Artificial Sequence: Synthetic oligonucleotide
ccuccaacauccuagucaa

SEQ ID NO: 61782 - RNA, 19 nt, Artificial Sequence
  Description of Artificial Sequence: Synthetic oligonucleotide
gcaugggacugucucuggu

SEQ ID NO: 61783 - RNA, 19 nt, Artificial Sequence
  Description of Artificial Sequence: Synthetic oligonucleotide
agcucugugacuuuggggu

SEQ ID NO: 61784 - RNA, 19 nt, Artificial Sequence
  Description of Artificial Sequence: Synthetic oligonucleotide
gaggccuuucuuacccaga

SEQ ID NO: 61785 - RNA, 19 nt, Artificial Sequence
  Description of Artificial Sequence: Synthetic oligonucleotide
ggagaagcacaagaucaug

SEQ ID NO: 61786 - RNA, 19 nt, Artificial Sequence
  Description of Artificial Sequence: Synthetic oligonucleotide
ggcagcucaucgacuccau

SEQ ID NO: 61787 - RNA, 19 nt, Artificial Sequence
  Description of Artificial Sequence: Synthetic oligonucleotide
cgggcagcucaucgacucc

SEQ ID NO: 61788 - RNA, 19 nt, Artificial Sequence
  Description of Artificial Sequence: Synthetic oligonucleotide
gagaaagcuaaaaaaaaaa

SEQ ID NO: 61789 - RNA, 19 nt, Artificial Sequence
  Description of Artificial Sequence: Synthetic oligonucleotide
agugcaacucuccguacau

SEQ ID NO: 61790 - RNA, 19 nt, Artificial Sequence
  Description of Artificial Sequence: Synthetic oligonucleotide
aucgugggcuucuauggug

SEQ ID NO: 61791 - RNA, 19 nt, Artificial Sequence
  Description of Artificial Sequence: Synthetic oligonucleotide
cacaagaucaugcacagag

SEQ ID NO: 61792 - RNA, 19 nt, Artificial Sequence
  Description of Artificial Sequence: Synthetic oligonucleotide
gaaguggauuuugcagguu

SEQ ID NO: 61793 - RNA, 19 nt, Artificial Sequence
  Description of Artificial Sequence: Synthetic oligonucleotide
gccuugcagaagaagcugg

SEQ ID NO: 61794 - RNA, 19 nt, Artificial Sequence
  Description of Artificial Sequence: Synthetic oligonucleotide
gagcugcagguucugcaug

SEQ ID NO: 61795 - RNA, 19 nt, Artificial Sequence
  Description of Artificial Sequence: Synthetic oligonucleotide
cuggagcaugggacugucu

SEQ ID NO: 61796 - RNA, 19 nt, Artificial Sequence
  Description of Artificial Sequence: Synthetic oligonucleotide
aauccggaaccagaucaua

SEQ ID NO: 61797 - RNA, 19 nt, Artificial Sequence
  Description of Artificial Sequence: Synthetic oligonucleotide
uccggaaccagaucauaag

SEQ ID NO: 61798 - RNA, 19 nt, Artificial Sequence
  Description of Artificial Sequence: Synthetic oligonucleotide
aagcacaagaucaugcaca

SEQ ID NO: 61799 - RNA, 19 nt, Artificial Sequence
  Description of Artificial Sequence: Synthetic oligonucleotide
acaagaucaugcacagaga

SEQ ID NO: 61800 - RNA, 19 nt, Artificial Sequence
  Description of Artificial Sequence: Synthetic oligonucleotide
caagaucaugcacagagau

SEQ ID NO: 61801 - RNA, 19 nt, Artificial Sequence
  Description of Artificial Sequence: Synthetic oligonucleotide
caucgugggcuucuauggu

SEQ ID NO: 61802 - RNA, 19 nt, Artificial Sequence
  Description of Artificial Sequence: Synthetic oligonucleotide
cuccaacauccuagucaac

SEQ ID NO: 61803 - RNA, 19 nt, Artificial Sequence
  Description of Artificial Sequence: Synthetic oligonucleotide
caugcacagagaugucaag

SEQ ID NO: 61804 - RNA, 19 nt, Artificial Sequence
  Description of Artificial Sequence: Synthetic oligonucleotide
cccgcaauccggaaccaga

SEQ ID NO: 61805 - RNA, 19 nt, Artificial Sequence
  Description of Artificial Sequence: Synthetic oligonucleotide
ucaugcacagagaugucaa

SEQ ID NO: 61806 - RNA, 19 nt, Artificial Sequence
  Description of Artificial Sequence: Synthetic oligonucleotide
aggaaguggauuuugcagg

SEQ ID NO: 61807 - RNA, 19 nt, Artificial Sequence
  Description of Artificial Sequence: Synthetic oligonucleotide
guggggagaucaagcucug

SEQ ID NO: 61808 - RNA, 19 nt, Artificial Sequence
  Description of Artificial Sequence: Synthetic oligonucleotide
gggagaagcacaagaucau

SEQ ID NO: 61809 - RNA, 19 nt, Artificial Sequence
  Description of Artificial Sequence: Synthetic oligonucleotide
ccgcaauccggaaccagau

SEQ ID NO: 61810 - RNA, 19 nt, Artificial Sequence
  Description of Artificial Sequence: Synthetic oligonucleotide
gcagcucaucgacuccaug

SEQ ID NO: 61811 - RNA, 19 nt, Artificial Sequence
  Description of Artificial Sequence: Synthetic oligonucleotide
uccaacauccuagucaacu

SEQ ID NO: 61812 - RNA, 19 nt, Artificial Sequence
  Description of Artificial Sequence: Synthetic oligonucleotide
gcccuccaacauccuaguc

SEQ ID NO: 61813 - RNA, 19 nt, Artificial Sequence
  Description of Artificial Sequence: Synthetic oligonucleotide
gggucagcgggcagcucau

SEQ ID NO: 61814 - RNA, 19 nt, Artificial Sequence
  Description of Artificial Sequence: Synthetic oligonucleotide
gugacuuuggggucagcgg

SEQ ID NO: 61815 - RNA, 19 nt, Artificial Sequence
  Description of Artificial Sequence: Synthetic oligonucleotide
ugcauggagcacauggaug

SEQ ID NO: 61816 - RNA, 19 nt, Artificial Sequence
  Description of Artificial Sequence: Synthetic oligonucleotide
ucgugggcuucuauggugc

SEQ ID NO: 61817 - RNA, 19 nt, Artificial Sequence
  Description of Artificial Sequence: Synthetic oligonucleotide
gggagcugcagguucugca

SEQ ID NO: 61818 - RNA, 19 nt, Artificial Sequence
  Description of Artificial Sequence: Synthetic oligonucleotide
ccaacauccuagucaacuc

SEQ ID NO: 61819 - RNA, 19 nt, Artificial Sequence
  Description of Artificial Sequence: Synthetic oligonucleotide
cucauuacucugugcaguc

SEQ ID NO: 61820 - RNA, 19 nt, Artificial Sequence
  Description of Artificial Sequence: Synthetic oligonucleotide
auccggaaccagaucauaa

SEQ ID NO: 61821 - RNA, 19 nt, Artificial Sequence
  Description of Artificial Sequence: Synthetic oligonucleotide
aguggauuuugcagguugg

SEQ ID NO: 61822 - RNA, 19 nt, Artificial Sequence
  Description of Artificial Sequence: Synthetic oligonucleotide
caagcucugugacuuuggg

SEQ ID NO: 61823 - RNA, 19 nt, Artificial Sequence
  Description of Artificial Sequence: Synthetic oligonucleotide
gaucaugcacagagauguc

SEQ ID NO: 61824 - RNA, 19 nt, Artificial Sequence
  Description of Artificial Sequence: Synthetic oligonucleotide
gagugcaacucuccguaca

SEQ ID NO: 61825 - RNA, 19 nt, Artificial Sequence
  Description of Artificial Sequence: Synthetic oligonucleotide
gcgggcagcucaucgacuc

SEQ ID NO: 61826 - RNA, 19 nt, Artificial Sequence
  Description of Artificial Sequence: Synthetic oligonucleotide
ugcacagagaugucaagcc

SEQ ID NO: 61827 - RNA, 19 nt, Artificial Sequence
  Description of Artificial Sequence: Synthetic oligonucleotide
agcacaagaucaugcacag

SEQ ID NO: 61828 - RNA, 19 nt, Artificial Sequence
  Description of Artificial Sequence: Synthetic oligonucleotide
gcacagagaugucaagccc

SEQ ID NO: 61829 - RNA, 19 nt, Artificial Sequence
  Description of Artificial Sequence: Synthetic oligonucleotide
aagaucaugcacagagaug

SEQ ID NO: 61830 - RNA, 19 nt, Artificial Sequence
  Description of Artificial Sequence: Synthetic oligonucleotide
gaucaagcucugugacuuu

SEQ ID NO: 61831 - RNA, 19 nt, Artificial Sequence
  Description of Artificial Sequence: Synthetic oligonucleotide
ggggucagcgggcagcuca

SEQ ID NO: 61832 - RNA, 19 nt, Artificial Sequence
  Description of Artificial Sequence: Synthetic oligonucleotide
cgcaauccggaaccagauc

SEQ ID NO: 61833 - RNA, 19 nt, Artificial Sequence
  Description of Artificial Sequence: Synthetic oligonucleotide
gcacaagaucaugcacaga

SEQ ID NO: 61834 - RNA, 19 nt, Artificial Sequence
  Description of Artificial Sequence: Synthetic oligonucleotide
agcgggcagcucaucgacu

SEQ ID NO: 61835 - RNA, 19 nt, Artificial Sequence
  Description of Artificial Sequence: Synthetic oligonucleotide
aggccuuucuuacccagaa

SEQ ID NO: 61836 - RNA, 19 nt, Artificial Sequence
  Description of Artificial Sequence: Synthetic oligonucleotide
acucauuacucugugcagu

SEQ ID NO: 61837 - RNA, 19 nt, Artificial Sequence
  Description of Artificial Sequence: Synthetic oligonucleotide
ggagcaugggacugucucu

SEQ ID NO: 61838 - RNA, 19 nt, Artificial Sequence
  Description of Artificial Sequence: Synthetic oligonucleotide
gcauggagcacauggaugg

SEQ ID NO: 61839 - RNA, 19 nt, Artificial Sequence
  Description of Artificial Sequence: Synthetic oligonucleotide
ccuugcagaagaagcugga

SEQ ID NO: 61840 - RNA, 19 nt, Artificial Sequence
  Description of Artificial Sequence: Synthetic oligonucleotide
gggcagcucaucgacucca

SEQ ID NO: 61841 - RNA, 19 nt, Artificial Sequence
  Description of Artificial Sequence: Synthetic oligonucleotide
ugugacuuuggggucagcg

SEQ ID NO: 61842 - RNA, 19 nt, Artificial Sequence
  Description of Artificial Sequence: Synthetic oligonucleotide
gagcaugggacugucucug

SEQ ID NO: 61843 - RNA, 19 nt, Artificial Sequence
  Description of Artificial Sequence: Synthetic oligonucleotide
uggggagaucaagcucugu

SEQ ID NO: 61844 - RNA, 19 nt, Artificial Sequence
  Description of Artificial Sequence: Synthetic oligonucleotide
uaucugcauggagcacaug

SEQ ID NO: 61845 - RNA, 19 nt, Artificial Sequence
  Description of Artificial Sequence: Synthetic oligonucleotide
guaucugcauggagcacau

SEQ ID NO: 61846 - RNA, 19 nt, Artificial Sequence
  Description of Artificial Sequence: Synthetic oligonucleotide
auuccugaacaaauuuuag

SEQ ID NO: 61847 - RNA, 19 nt, Artificial Sequence
  Description of Artificial Sequence: Synthetic oligonucleotide
uuccugaacaaauuuuagg

SEQ ID NO: 61848 - RNA, 19 nt, Artificial Sequence
  Description of Artificial Sequence: Synthetic oligonucleotide
ccagaucaugcaccgagau

SEQ ID NO: 61849 - RNA, 19 nt, Artificial Sequence
  Description of Artificial Sequence: Synthetic oligonucleotide
ucauggccaggaagcugau

SEQ ID NO: 61850 - RNA, 19 nt, Artificial Sequence
  Description of Artificial Sequence: Synthetic oligonucleotide
cggugcagucggacaucug

SEQ ID NO: 61851 - RNA, 19 nt, Artificial Sequence
  Description of Artificial Sequence: Synthetic oligonucleotide
acuccuucgugggcacgcg

SEQ ID NO: 61852 - RNA, 19 nt, Artificial Sequence
  Description of Artificial Sequence: Synthetic oligonucleotide
gggugagcggccagcucau

SEQ ID NO: 61853 - RNA, 19 nt, Artificial Sequence
  Description of Artificial Sequence: Synthetic oligonucleotide
accagaucaugcaccgaga

SEQ ID NO: 61854 - RNA, 19 nt, Artificial Sequence
  Description of Artificial Sequence: Synthetic oligonucleotide
ugcaccgagaugugaagcc

SEQ ID NO: 61855 - RNA, 19 nt, Artificial Sequence
  Description of Artificial Sequence: Synthetic oligonucleotide
cugaaccagcccggcacac

SEQ ID NO: 61856 - RNA, 19 nt, Artificial Sequence
  Description of Artificial Sequence: Synthetic oligonucleotide
ggacaucuggagcaugggc

SEQ ID NO: 61857 - RNA, 19 nt, Artificial Sequence
  Description of Artificial Sequence: Synthetic oligonucleotide
agcaccagaucaugcaccg

SEQ ID NO: 61858 - RNA, 19 nt, Artificial Sequence
  Description of Artificial Sequence: Synthetic oligonucleotide
agcggccagcucauagacu

SEQ ID NO: 61859 - RNA, 19 nt, Artificial Sequence
  Description of Artificial Sequence: Synthetic oligonucleotide
ccggccauccggaaccaga

SEQ ID NO: 61860 - RNA, 19 nt, Artificial Sequence
  Description of Artificial Sequence: Synthetic oligonucleotide
cagaucaugcaccgagaug

SEQ ID NO: 61861 - RNA, 19 nt, Artificial Sequence
  Description of Artificial Sequence: Synthetic oligonucleotide
ggccagcucauagacucca

SEQ ID NO: 61862 - RNA, 19 nt, Artificial Sequence
  Description of Artificial Sequence: Synthetic oligonucleotide
cauccggaaccagaucauc

SEQ ID NO: 61863 - RNA, 19 nt, Artificial Sequence
  Description of Artificial Sequence: Synthetic oligonucleotide
uuacucggugcagucggac

SEQ ID NO: 61864 - RNA, 19 nt, Artificial Sequence
  Description of Artificial Sequence: Synthetic oligonucleotide
caccagaucaugcaccgag

SEQ ID NO: 61865 - RNA, 19 nt, Artificial Sequence
  Description of Artificial Sequence: Synthetic oligonucleotide
gaagcccuccaacauccuc

SEQ ID NO: 61866 - RNA, 19 nt, Artificial Sequence
  Description of Artificial Sequence: Synthetic oligonucleotide
aggggagaucaagcugugu

SEQ ID NO: 61867 - RNA, 19 nt, Artificial Sequence
  Description of Artificial Sequence: Synthetic oligonucleotide
cggccauccggaaccagau

SEQ ID NO: 61868 - RNA, 19 nt, Artificial Sequence
  Description of Artificial Sequence: Synthetic oligonucleotide
gcaccagaucaugcaccga

SEQ ID NO: 61869 - RNA, 19 nt, Artificial Sequence
  Description of Artificial Sequence: Synthetic oligonucleotide
ggccauccggaaccagauc

SEQ ID NO: 61870 - RNA, 19 nt, Artificial Sequence
  Description of Artificial Sequence: Synthetic oligonucleotide
ggugcagucggacaucugg

SEQ ID NO: 61871 - RNA, 19 nt, Artificial Sequence
  Description of Artificial Sequence: Synthetic oligonucleotide
cccuccaacauccucguga

SEQ ID NO: 61872 - RNA, 19 nt, Artificial Sequence
  Description of Artificial Sequence: Synthetic oligonucleotide
gccagcucauagacuccau

SEQ ID NO: 61873 - RNA, 19 nt, Artificial Sequence
  Description of Artificial Sequence: Synthetic oligonucleotide
auuacucggugcagucgga

SEQ ID NO: 61874 - RNA, 19 nt, Artificial Sequence
  Description of Artificial Sequence: Synthetic oligonucleotide
ucaugcaccgagaugugaa

SEQ ID NO: 61875 - RNA, 19 nt, Artificial Sequence
  Description of Artificial Sequence: Synthetic oligonucleotide
caugcaccgagaugugaag

SEQ ID NO: 61876 - RNA, 19 nt, Artificial Sequence
  Description of Artificial Sequence: Synthetic oligonucleotide
gcccuccaacauccucgug

SEQ ID NO: 61877 - RNA, 19 nt, Artificial Sequence
  Description of Artificial Sequence: Synthetic oligonucleotide
aacuccuucgugggcacgc

SEQ ID NO: 61878 - RNA, 19 nt, Artificial Sequence
  Description of Artificial Sequence: Synthetic oligonucleotide
cggccagcucauagacucc

SEQ ID NO: 61879 - RNA, 19 nt, Artificial Sequence
  Description of Artificial Sequence: Synthetic oligonucleotide
ccagcucauagacuccaug

SEQ ID NO: 61880 - RNA, 19 nt, Artificial Sequence
  Description of Artificial Sequence: Synthetic oligonucleotide
gaggggagaucaagcugug

SEQ ID NO: 61881 - RNA, 19 nt, Artificial Sequence
  Description of Artificial Sequence: Synthetic oligonucleotide
aucaugcaccgagauguga

SEQ ID NO: 61882 - RNA, 19 nt, Artificial Sequence
  Description of Artificial Sequence: Synthetic oligonucleotide
ugaaccagcccggcacacc

SEQ ID NO: 61883 - RNA, 19 nt, Artificial Sequence
  Description of Artificial Sequence: Synthetic oligonucleotide
aagcaccagaucaugcacc

SEQ ID NO: 61884 - RNA, 19 nt, Artificial Sequence
  Description of Artificial Sequence: Synthetic oligonucleotide
aaccagcccggcacaccca

SEQ ID NO: 61885 - RNA, 19 nt, Artificial Sequence
  Description of Artificial Sequence: Synthetic oligonucleotide
cauuacucggugcagucgg

SEQ ID NO: 61886 - RNA, 19 nt, Artificial Sequence
  Description of Artificial Sequence: Synthetic oligonucleotide
ccuccaacauccucgugaa

SEQ ID NO: 61887 - RNA, 19 nt, Artificial Sequence
  Description of Artificial Sequence: Synthetic oligonucleotide
gaucaugcaccgagaugug

SEQ ID NO: 61888 - RNA, 19 nt, Artificial Sequence
  Description of Artificial Sequence: Synthetic oligonucleotide
cuccaacauccucgugaac

SEQ ID NO: 61889 - RNA, 19 nt, Artificial Sequence
  Description of Artificial Sequence: Synthetic oligonucleotide
augcaccgagaugugaagc

SEQ ID NO: 61890 - RNA, 19 nt, Artificial Sequence
  Description of Artificial Sequence: Synthetic oligonucleotide
cucggugcagucggacauc

SEQ ID NO: 61891 - RNA, 19 nt, Artificial Sequence
  Description of Artificial Sequence: Synthetic oligonucleotide
acucggugcagucggacau

SEQ ID NO: 61892 - RNA, 19 nt, Artificial Sequence
  Description of Artificial Sequence: Synthetic oligonucleotide
cacauuacucggugcaguc

SEQ ID NO: 61893 - RNA, 19 nt, Artificial Sequence
  Description of Artificial Sequence: Synthetic oligonucleotide
uccggaaccagaucauccg

SEQ ID NO: 61894 - RNA, 19 nt, Artificial Sequence
  Description of Artificial Sequence: Synthetic oligonucleotide
ggggugagcggccagcuca

SEQ ID NO: 61895 - RNA, 19 nt, Artificial Sequence
  Description of Artificial Sequence: Synthetic oligonucleotide
gcaccgagaugugaagccc

SEQ ID NO: 61896 - RNA, 19 nt, Artificial Sequence
  Description of Artificial Sequence: Synthetic oligonucleotide
uacucggugcagucggaca

SEQ ID NO: 61897 - RNA, 19 nt, Artificial Sequence
  Description of Artificial Sequence: Synthetic oligonucleotide
acacauuacucggugcagu

SEQ ID NO: 61898 - RNA, 19 nt, Artificial Sequence
  Description of Artificial Sequence: Synthetic oligonucleotide
auccggaaccagaucaucc

SEQ ID NO: 61899 - RNA, 19 nt, Artificial Sequence
  Description of Artificial Sequence: Synthetic oligonucleotide
ucggugcagucggacaucu

SEQ ID NO: 61900 - RNA, 19 nt, Artificial Sequence
  Description of Artificial Sequence: Synthetic oligonucleotide
uccaacauccucgugaacu

SEQ ID NO: 61901 - RNA, 19 nt, Artificial Sequence
  Description of Artificial Sequence: Synthetic oligonucleotide
aggcgccgccgccgccggc

SEQ ID NO: 61902 - RNA, 19 nt, Artificial Sequence
  Description of Artificial Sequence: Synthetic oligonucleotide
cuucaucaagcgguccgag

SEQ ID NO: 61903 - RNA, 19 nt, Artificial Sequence
  Description of Artificial Sequence: Synthetic oligonucleotide
accacaccuucaucaagcg

SEQ ID NO: 61904 - RNA, 19 nt, Artificial Sequence
  Description of Artificial Sequence: Synthetic oligonucleotide
ccuacauggcuccggagcg

SEQ ID NO: 61905 - RNA, 19 nt, Artificial Sequence
  Description of Artificial Sequence: Synthetic oligonucleotide
cacaccuucaucaagcggu

SEQ ID NO: 61906 - RNA, 19 nt, Artificial Sequence
  Description of Artificial Sequence: Synthetic oligonucleotide
uccacagagaugugaagcc

SEQ ID NO: 61907 - RNA, 19 nt, Artificial Sequence
  Description of Artificial Sequence: Synthetic oligonucleotide
auccacagagaugugaagc

SEQ ID NO: 61908 - RNA, 19 nt, Artificial Sequence
  Description of Artificial Sequence: Synthetic oligonucleotide
ugaagcccuccaauguccu

SEQ ID NO: 61909 - RNA, 19 nt, Artificial Sequence
  Description of Artificial Sequence: Synthetic oligonucleotide
agucgccgccgccgccgcc

SEQ ID NO: 61910 - RNA, 19 nt, Artificial Sequence
  Description of Artificial Sequence: Synthetic oligonucleotide
gaugugaagcccuccaaug

SEQ ID NO: 61911 - RNA, 19 nt, Artificial Sequence
  Description of Artificial Sequence: Synthetic oligonucleotide
gugaagcccuccaaugucc

SEQ ID NO: 61912 - RNA, 19 nt, Artificial Sequence
  Description of Artificial Sequence: Synthetic oligonucleotide
augugaagcccuccaaugu

SEQ ID NO: 61913 - RNA, 19 nt, Artificial Sequence
  Description of Artificial Sequence: Synthetic oligonucleotide
ugugaagcccuccaauguc

SEQ ID NO: 61914 - RNA, 19 nt, Artificial Sequence
  Description of Artificial Sequence: Synthetic oligonucleotide
guggacucuguggccaaga

SEQ ID NO: 61915 - RNA, 19 nt, Artificial Sequence
  Description of Artificial Sequence: Synthetic oligonucleotide
ugacuuuggcaucaguggc

SEQ ID NO: 61916 - RNA, 19 nt, Artificial Sequence
  Description of Artificial Sequence: Synthetic oligonucleotide
gcacuauucagagagggag

SEQ ID NO: 61917 - RNA, 19 nt, Artificial Sequence
  Description of Artificial Sequence: Synthetic oligonucleotide
ugugugacuuuggcaucag

SEQ ID NO: 61918 - RNA, 19 nt, Artificial Sequence
  Description of Artificial Sequence: Synthetic oligonucleotide
cacuauucagagagggaga

SEQ ID NO: 61919 - RNA, 19 nt, Artificial Sequence
  Description of Artificial Sequence: Synthetic oligonucleotide
gggcacuauucagagaggg

SEQ ID NO: 61920 - RNA, 19 nt, Artificial Sequence
  Description of Artificial Sequence: Synthetic oligonucleotide
ggggcacuauucagagagg

SEQ ID NO: 61921 - RNA, 19 nt, Artificial Sequence
  Description of Artificial Sequence: Synthetic oligonucleotide
acuauucagagagggagac

SEQ ID NO: 61922 - RNA, 19 nt, Artificial Sequence
  Description of Artificial Sequence: Synthetic oligonucleotide
uggacucuguggccaagac

SEQ ID NO: 61923 - RNA, 19 nt, Artificial Sequence
  Description of Artificial Sequence: Synthetic oligonucleotide
cgcagucgccgccgccgcc

SEQ ID NO: 61924 - RNA, 19 nt, Artificial Sequence
  Description of Artificial Sequence: Synthetic oligonucleotide
cagucgccgccgccgccgc

SEQ ID NO: 61925 - RNA, 19 nt, Artificial Sequence
  Description of Artificial Sequence: Synthetic oligonucleotide
gccgcagucgccgccgccg

SEQ ID NO: 61926 - RNA, 19 nt, Artificial Sequence
  Description of Artificial Sequence: Synthetic oligonucleotide
gcagucgccgccgccgccg

SEQ ID NO: 61927 - RNA, 19 nt, Artificial Sequence
  Description of Artificial Sequence: Synthetic oligonucleotide
ucaccaugauugagauggc

SEQ ID NO: 61928 - RNA, 19 nt, Artificial Sequence
  Description of Artificial Sequence: Synthetic oligonucleotide
ccaugauugagauggccau

SEQ ID NO: 61929 - RNA, 19 nt, Artificial Sequence
  Description of Artificial Sequence: Synthetic oligonucleotide
ccuacauggccccugagag

SEQ ID NO: 61930 - RNA, 19 nt, Artificial Sequence
  Description of Artificial Sequence: Synthetic oligonucleotide
caggugguggaggagccgu

SEQ ID NO: 61931 - RNA, 19 nt, Artificial Sequence
  Description of Artificial Sequence: Synthetic oligonucleotide
gccgugaagcggauccggg

SEQ ID NO: 61932 - RNA, 19 nt, Artificial Sequence
  Description of Artificial Sequence: Synthetic oligonucleotide
aggugguggaggagccguc

SEQ ID NO: 61933 - RNA, 19 nt, Artificial Sequence
  Description of Artificial Sequence: Synthetic oligonucleotide
cccuacauggccccugaga

SEQ ID NO: 61934 - RNA, 19 nt, Artificial Sequence
  Description of Artificial Sequence: Synthetic oligonucleotide
caugauugagauggccauc

SEQ ID NO: 61935 - RNA, 19 nt, Artificial Sequence
  Description of Artificial Sequence: Synthetic oligonucleotide
uugagauggccauccugcg

SEQ ID NO: 61936 - RNA, 19 nt, Artificial Sequence
  Description of Artificial Sequence: Synthetic oligonucleotide
aacuuugagguggaggcug

SEQ ID NO: 61937 - RNA, 19 nt, Artificial Sequence
  Description of Artificial Sequence: Synthetic oligonucleotide
cugaaccagaagggcuaca

SEQ ID NO: 61938 - RNA, 19 nt, Artificial Sequence
  Description of Artificial Sequence: Synthetic oligonucleotide
gagcugaaccagaagggcu

SEQ ID NO: 61939 - RNA, 19 nt, Artificial Sequence
  Description of Artificial Sequence: Synthetic oligonucleotide
cagcagcugaagcaggugg

SEQ ID NO: 61940 - RNA, 19 nt, Artificial Sequence
  Description of Artificial Sequence: Synthetic oligonucleotide
ugcaagcccuacauggccc

SEQ ID NO: 61941 - RNA, 19 nt, Artificial Sequence
  Description of Artificial Sequence: Synthetic oligonucleotide
agcggauccgggccaccgu

SEQ ID NO: 61942 - RNA, 19 nt, Artificial Sequence
  Description of Artificial Sequence: Synthetic oligonucleotide
aucaacccagagcugaacc

SEQ ID NO: 61943 - RNA, 19 nt, Artificial Sequence
  Description of Artificial Sequence: Synthetic oligonucleotide
aucaccaugauugagaugg

SEQ ID NO: 61944 - RNA, 19 nt, Artificial Sequence
  Description of Artificial Sequence: Synthetic oligonucleotide
ccgugaagcggauccgggc

SEQ ID NO: 61945 - RNA, 19 nt, Artificial Sequence
  Description of Artificial Sequence: Synthetic oligonucleotide
ggcaucaccaugauugaga

SEQ ID NO: 61946 - RNA, 19 nt, Artificial Sequence
  Description of Artificial Sequence: Synthetic oligonucleotide
acuuugagguggaggcuga

SEQ ID NO: 61947 - RNA, 19 nt, Artificial Sequence
  Description of Artificial Sequence: Synthetic oligonucleotide
ggccgugaagcggauccgg

SEQ ID NO: 61948 - RNA, 19 nt, Artificial Sequence
  Description of Artificial Sequence: Synthetic oligonucleotide
gcaagcccuacauggcccc

SEQ ID NO: 61949 - RNA, 19 nt, Artificial Sequence
  Description of Artificial Sequence: Synthetic oligonucleotide
gcaucaccaugauugagau

SEQ ID NO: 61950 - RNA, 19 nt, Artificial Sequence
  Description of Artificial Sequence: Synthetic oligonucleotide
gcugaaccagaagggcuac

SEQ ID NO: 61951 - RNA, 19 nt, Artificial Sequence
  Description of Artificial Sequence: Synthetic oligonucleotide
uacauggccccugagagga

SEQ ID NO: 61952 - RNA, 19 nt, Artificial Sequence
  Description of Artificial Sequence: Synthetic oligonucleotide
accaugauugagauggcca

SEQ ID NO: 61953 - RNA, 19 nt, Artificial Sequence
  Description of Artificial Sequence: Synthetic oligonucleotide
caucaccaugauugagaug

SEQ ID NO: 61954 - RNA, 19 nt, Artificial Sequence
  Description of Artificial Sequence: Synthetic oligonucleotide
caagcccuacauggccccu

SEQ ID NO: 61955 - RNA, 19 nt, Artificial Sequence
  Description of Artificial Sequence: Synthetic oligonucleotide
agcaggugguggaggagcc

SEQ ID NO: 61956 - RNA, 19 nt, Artificial Sequence
  Description of Artificial Sequence: Synthetic oligonucleotide
augacaauuccagaggaca

SEQ ID NO: 61957 - RNA, 19 nt, Artificial Sequence
  Description of Artificial Sequence: Synthetic oligonucleotide
gauugagauggccauccug

SEQ ID NO: 61958 - RNA, 19 nt, Artificial Sequence
  Description of Artificial Sequence: Synthetic oligonucleotide
ucaacccagagcugaacca

SEQ ID NO: 61959 - RNA, 19 nt, Artificial Sequence
  Description of Artificial Sequence: Synthetic oligonucleotide
agcagcugaagcagguggu

SEQ ID NO: 61960 - RNA, 19 nt, Artificial Sequence
  Description of Artificial Sequence: Synthetic oligonucleotide
uugagguggaggcugauga

SEQ ID NO: 61961 - RNA, 19 nt, Artificial Sequence
  Description of Artificial Sequence: Synthetic oligonucleotide
caucauggccgugaagcgg

SEQ ID NO: 61962 - RNA, 19 nt, Artificial Sequence
  Description of Artificial Sequence: Synthetic oligonucleotide
aagcaggugguggaggagc

SEQ ID NO: 61963 - RNA, 19 nt, Artificial Sequence
  Description of Artificial Sequence: Synthetic oligonucleotide
agcugaaccagaagggcua

SEQ ID NO: 61964 - RNA, 19 nt, Artificial Sequence
  Description of Artificial Sequence: Synthetic oligonucleotide
uuugagguggaggcugaug

SEQ ID NO: 61965 - RNA, 19 nt, Artificial Sequence
  Description of Artificial Sequence: Synthetic oligonucleotide
aagcccuacauggccccug

SEQ ID NO: 61966 - RNA, 19 nt, Artificial Sequence
  Description of Artificial Sequence: Synthetic oligonucleotide
caccaugauugagauggcc

SEQ ID NO: 61967 - RNA, 19 nt, Artificial Sequence
  Description of Artificial Sequence: Synthetic oligonucleotide
acauggccccugagaggau

SEQ ID NO: 61968 - RNA, 19 nt, Artificial Sequence
  Description of Artificial Sequence: Synthetic oligonucleotide
auugagauggccauccugc

SEQ ID NO: 61969 - RNA, 19 nt, Artificial Sequence
  Description of Artificial Sequence: Synthetic oligonucleotide
aagcggauccgggccaccg

SEQ ID NO: 61970 - RNA, 19 nt, Artificial Sequence
  Description of Artificial Sequence: Synthetic oligonucleotide
agcccuacauggccccuga

SEQ ID NO: 61971 - RNA, 19 nt, Artificial Sequence
  Description of Artificial Sequence: Synthetic oligonucleotide
agagcugaaccagaagggc

SEQ ID NO: 61972 - RNA, 19 nt, Artificial Sequence
  Description of Artificial Sequence: Synthetic oligonucleotide
ugagguggaggcugaugac

SEQ ID NO: 61973 - RNA, 19 nt, Artificial Sequence
  Description of Artificial Sequence: Synthetic oligonucleotide
gucuggagccugggcauca

SEQ ID NO: 61974 - RNA, 19 nt, Artificial Sequence
  Description of Artificial Sequence: Synthetic oligonucleotide
uccgacgucuggagccugg

SEQ ID NO: 61975 - RNA, 19 nt, Artificial Sequence
  Description of Artificial Sequence: Synthetic oligonucleotide
auauuaagcucugugacuu

SEQ ID NO: 61976 - RNA, 19 nt, Artificial Sequence
  Description of Artificial Sequence: Synthetic oligonucleotide
uuccagaagaaauuuuagg

SEQ ID NO: 61977 - RNA, 19 nt, Artificial Sequence
  Description of Artificial Sequence: Synthetic oligonucleotide
gugcacucuucagagaggg

SEQ ID NO: 61978 - RNA, 19 nt, Artificial Sequence
  Description of Artificial Sequence: Synthetic oligonucleotide
gcacucuucagagagggug

SEQ ID NO: 61979 - RNA, 19 nt, Artificial Sequence
  Description of Artificial Sequence: Synthetic oligonucleotide
acucuucagagagggugac

SEQ ID NO: 61980 - RNA, 19 nt, Artificial Sequence
  Description of Artificial Sequence: Synthetic oligonucleotide
ggugcacucuucagagagg

SEQ ID NO: 61981 - RNA, 19 nt, Artificial Sequence
  Description of Artificial Sequence: Synthetic oligonucleotide
cacucuucagagaggguga

SEQ ID NO: 61982 - RNA, 19 nt, Artificial Sequence
  Description of Artificial Sequence: Synthetic oligonucleotide
cugaugucuggaguuuggg

SEQ ID NO: 61983 - RNA, 19 nt, Artificial Sequence
  Description of Artificial Sequence: Synthetic oligonucleotide
ucugaugucuggaguuugg

SEQ ID NO: 61984 - RNA, 19 nt, Artificial Sequence
  Description of Artificial Sequence: Synthetic oligonucleotide
accugaaagaauagaccca

SEQ ID NO: 61985 - RNA, 19 nt, Artificial Sequence
  Description of Artificial Sequence: Synthetic oligonucleotide
auggcaccugaaagaauag

SEQ ID NO: 61986 - RNA, 19 nt, Artificial Sequence
  Description of Artificial Sequence: Synthetic oligonucleotide
gcaccugaaagaauagacc

SEQ ID NO: 61987 - RNA, 19 nt, Artificial Sequence
  Description of Artificial Sequence: Synthetic oligonucleotide
caccugaaagaauagaccc

SEQ ID NO: 61988 - RNA, 19 nt, Artificial Sequence
  Description of Artificial Sequence: Synthetic oligonucleotide
gccauacauggcaccugaa

SEQ ID NO: 61989 - RNA, 19 nt, Artificial Sequence
  Description of Artificial Sequence: Synthetic oligonucleotide
uggcaccugaaagaauaga

SEQ ID NO: 61990 - RNA, 19 nt, Artificial Sequence
  Description of Artificial Sequence: Synthetic oligonucleotide
ggcaccugaaagaauagac

SEQ ID NO: 61991 - RNA, 19 nt, Artificial Sequence
  Description of Artificial Sequence: Synthetic oligonucleotide
gacuucggcaucaguggac

SEQ ID NO: 61992 - RNA, 19 nt, Artificial Sequence
  Description of Artificial Sequence: Synthetic oligonucleotide
uaagcucugugacuucggc

SEQ ID NO: 61993 - RNA, 19 nt, Artificial Sequence
  Description of Artificial Sequence: Synthetic oligonucleotide
aagcccuccaauaugcuag

SEQ ID NO: 61994 - RNA, 19 nt, Artificial Sequence
  Description of Artificial Sequence: Synthetic oligonucleotide
agcccuccaauaugcuagu

SEQ ID NO: 61995 - RNA, 19 nt, Artificial Sequence
  Description of Artificial Sequence: Synthetic oligonucleotide
gcagccgccgccgguccgc

SEQ ID NO: 61996 - RNA, 19 nt, Artificial Sequence
  Description of Artificial Sequence: Synthetic oligonucleotide
cagccgccgccgguccgcg

SEQ ID NO: 61997 - RNA, 19 nt, Artificial Sequence
  Description of Artificial Sequence: Synthetic oligonucleotide
cgcagccgccgccgguccg

SEQ ID NO: 61998 - RNA, 19 nt, Artificial Sequence
  Description of Artificial Sequence: Synthetic oligonucleotide
gccgucgccgccgccgcag

SEQ ID NO: 61999 - RNA, 19 nt, Artificial Sequence
  Description of Artificial Sequence: Synthetic oligonucleotide
ccgucgccgccgccgcagc

SEQ ID NO: 62000 - RNA, 19 nt, Artificial Sequence
  Description of Artificial Sequence: Synthetic oligonucleotide
cgccgucgccgccgccgca

SEQ ID NO: 62001 - RNA, 19 nt, Artificial Sequence
  Description of Artificial Sequence: Synthetic oligonucleotide
cgccgcagccgccgccggu

SEQ ID NO: 62002 - RNA, 19 nt, Artificial Sequence
  Description of Artificial Sequence: Synthetic oligonucleotide
cgucgccgccgccgcagcc

SEQ ID NO: 62003 - RNA, 19 nt, Artificial Sequence
  Description of Artificial Sequence: Synthetic oligonucleotide
accagaagggauacagugu

SEQ ID NO: 62004 - RNA, 19 nt, Artificial Sequence
  Description of Artificial Sequence: Synthetic oligonucleotide
gcaucacgaugauugaguu

SEQ ID NO: 62005 - RNA, 19 nt, Artificial Sequence
  Description of Artificial Sequence: Synthetic oligonucleotide
gagggugauguguggaucu

SEQ ID NO: 62006 - RNA, 19 nt, Artificial Sequence
  Description of Artificial Sequence: Synthetic oligonucleotide
uugaguuggccauccuucg

SEQ ID NO: 62007 - RNA, 19 nt, Artificial Sequence
  Description of Artificial Sequence: Synthetic oligonucleotide
caucacgaugauugaguug

SEQ ID NO: 62008 - RNA, 19 nt, Artificial Sequence
  Description of Artificial Sequence: Synthetic oligonucleotide
ggagcucauggauacauca

SEQ ID NO: 62009 - RNA, 19 nt, Artificial Sequence
  Description of Artificial Sequence: Synthetic oligonucleotide
agucugggcaucacgauga

SEQ ID NO: 62010 - RNA, 19 nt, Artificial Sequence
  Description of Artificial Sequence: Synthetic oligonucleotide
ggugauguguggaucugca

SEQ ID NO: 62011 - RNA, 19 nt, Artificial Sequence
  Description of Artificial Sequence: Synthetic oligonucleotide
auugaguuggccauccuuc

SEQ ID NO: 62012 - RNA, 19 nt, Artificial Sequence
  Description of Artificial Sequence: Synthetic oligonucleotide
cuugguggacucuguugcu

SEQ ID NO: 62013 - RNA, 19 nt, Artificial Sequence
  Description of Artificial Sequence: Synthetic oligonucleotide
ucugggcaucacgaugauu

SEQ ID NO: 62014 - RNA, 19 nt, Artificial Sequence
  Description of Artificial Sequence: Synthetic oligonucleotide
aauuccagaggacaucuua

SEQ ID NO: 62015 - RNA, 19 nt, Artificial Sequence
  Description of Artificial Sequence: Synthetic oligonucleotide
aaacccagagcucaaccag

SEQ ID NO: 62016 - RNA, 19 nt, Artificial Sequence
  Description of Artificial Sequence: Synthetic oligonucleotide
uuuuggaaucaguggcuac

SEQ ID NO: 62017 - RNA, 19 nt, Artificial Sequence
  Description of Artificial Sequence: Synthetic oligonucleotide
cgaugauugaguuggccau

SEQ ID NO: 62018 - RNA, 19 nt, Artificial Sequence
  Description of Artificial Sequence: Synthetic oligonucleotide
gagucugggcaucacgaug

SEQ ID NO: 62019 - RNA, 19 nt, Artificial Sequence
  Description of Artificial Sequence: Synthetic oligonucleotide
gauugaguuggccauccuu

SEQ ID NO: 62020 - RNA, 19 nt, Artificial Sequence
  Description of Artificial Sequence: Synthetic oligonucleotide
aucacgaugauugaguugg

SEQ ID NO: 62021 - RNA, 19 nt, Artificial Sequence
  Description of Artificial Sequence: Synthetic oligonucleotide
uccagaggacaucuuaggg

SEQ ID NO: 62022 - RNA, 19 nt, Artificial Sequence
  Description of Artificial Sequence: Synthetic oligonucleotide
auuccagaggacaucuuag

SEQ ID NO: 62023 - RNA, 19 nt, Artificial Sequence
  Description of Artificial Sequence: Synthetic oligonucleotide
uugguggacucuguugcua

SEQ ID NO: 62024 - RNA, 19 nt, Artificial Sequence
  Description of Artificial Sequence: Synthetic oligonucleotide
uuccagaggacaucuuagg

SEQ ID NO: 62025 - RNA, 19 nt, Artificial Sequence
  Description of Artificial Sequence: Synthetic oligonucleotide
gcucaaccagaagggauac

SEQ ID NO: 62026 - RNA, 19 nt, Artificial Sequence
  Description of Artificial Sequence: Synthetic oligonucleotide
agggugauguguggaucug

SEQ ID NO: 62027 - RNA, 19 nt, Artificial Sequence
  Description of Artificial Sequence: Synthetic oligonucleotide
ucacgaugauugaguuggc

SEQ ID NO: 62028 - RNA, 19 nt, Artificial Sequence
  Description of Artificial Sequence: Synthetic oligonucleotide
ugauguguggaucugcaug

SEQ ID NO: 62029 - RNA, 19 nt, Artificial Sequence
  Description of Artificial Sequence: Synthetic oligonucleotide
agagcucaaccagaaggga

SEQ ID NO: 62030 - RNA, 19 nt, Artificial Sequence
  Description of Artificial Sequence: Synthetic oligonucleotide
ggcaucacgaugauugagu

SEQ ID NO: 62031 - RNA, 19 nt, Artificial Sequence
  Description of Artificial Sequence: Synthetic oligonucleotide
cagacaauuccagaggaca

SEQ ID NO: 62032 - RNA, 19 nt, Artificial Sequence
  Description of Artificial Sequence: Synthetic oligonucleotide
acgaugauugaguuggcca

SEQ ID NO: 62033 - RNA, 19 nt, Artificial Sequence
  Description of Artificial Sequence: Synthetic oligonucleotide
gugauguguggaucugcau

SEQ ID NO: 62034 - RNA, 19 nt, Artificial Sequence
  Description of Artificial Sequence: Synthetic oligonucleotide
gagcucaaccagaagggau

SEQ ID NO: 62035 - RNA, 19 nt, Artificial Sequence
  Description of Artificial Sequence: Synthetic oligonucleotide
gggugauguguggaucugc

SEQ ID NO: 62036 - RNA, 19 nt, Artificial Sequence
  Description of Artificial Sequence: Synthetic oligonucleotide
uuuggagucugggcaucac

SEQ ID NO: 62037 - RNA, 19 nt, Artificial Sequence
  Description of Artificial Sequence: Synthetic oligonucleotide
gucugggcaucacgaugau

SEQ ID NO: 62038 - RNA, 19 nt, Artificial Sequence
  Description of Artificial Sequence: Synthetic oligonucleotide
uaaacccagagcucaacca

SEQ ID NO: 62039 - RNA, 19 nt, Artificial Sequence
  Description of Artificial Sequence: Synthetic oligonucleotide
ugguggacucuguugcuaa

SEQ ID NO: 62040 - RNA, 19 nt, Artificial Sequence
  Description of Artificial Sequence: Synthetic oligonucleotide
gauuuuggaaucaguggcu

SEQ ID NO: 62041 - RNA, 19 nt, Artificial Sequence
  Description of Artificial Sequence: Synthetic oligonucleotide
auaaacccagagcucaacc

SEQ ID NO: 62042 - RNA, 19 nt, Artificial Sequence
  Description of Artificial Sequence: Synthetic oligonucleotide
ggagucugggcaucacgau

SEQ ID NO: 62043 - RNA, 19 nt, Artificial Sequence
  Description of Artificial Sequence: Synthetic oligonucleotide
agcucaaccagaagggaua

SEQ ID NO: 62044 - RNA, 19 nt, Artificial Sequence
  Description of Artificial Sequence: Synthetic oligonucleotide
cacgaugauugaguuggcc

SEQ ID NO: 62045 - RNA, 19 nt, Artificial Sequence
  Description of Artificial Sequence: Synthetic oligonucleotide
auuuuggaaucaguggcua

SEQ ID NO: 62046 - RNA, 19 nt, Artificial Sequence
  Description of Artificial Sequence: Synthetic oligonucleotide
ccagacaauuccagaggac

SEQ ID NO: 62047 - RNA, 19 nt, Artificial Sequence
  Description of Artificial Sequence: Synthetic oligonucleotide
gaugauugaguuggccauc

SEQ ID NO: 62048 - RNA, 19 nt, Artificial Sequence
  Description of Artificial Sequence: Synthetic oligonucleotide
gaucauggcagugaagcgg

SEQ ID NO: 62049 - RNA, 19 nt, Artificial Sequence
  Description of Artificial Sequence: Synthetic oligonucleotide
aaccagaagggauacagug

SEQ ID NO: 62050 - RNA, 19 nt, Artificial Sequence
  Description of Artificial Sequence: Synthetic oligonucleotide
aagcccuccaacauccugc

SEQ ID NO: 62051 - RNA, 19 nt, Artificial Sequence
  Description of Artificial Sequence: Synthetic oligonucleotide
agcccuccaacauccugcu

SEQ ID NO: 62052 - RNA, 19 nt, Artificial Sequence
  Description of Artificial Sequence: Synthetic oligonucleotide
aacacagcuucaucaagcg

SEQ ID NO: 62053 - RNA, 19 nt, Artificial Sequence
  Description of Artificial Sequence: Synthetic oligonucleotide
ccuacauggcacccgagcg

SEQ ID NO: 62054 - RNA, 19 nt, Artificial Sequence
  Description of Artificial Sequence: Synthetic oligonucleotide
gcccuccaacauccugcug

SEQ ID NO: 62055 - RNA, 19 nt, Artificial Sequence
  Description of Artificial Sequence: Synthetic oligonucleotide
cuucaucaagcgcuacgag

SEQ ID NO: 62056 - RNA, 19 nt, Artificial Sequence
  Description of Artificial Sequence: Synthetic oligonucleotide
cacagcuucaucaagcgcu

SEQ ID NO: 62057 - RNA, 19 nt, Artificial Sequence
  Description of Artificial Sequence: Synthetic oligonucleotide
uauggagccugggcaucuc

SEQ ID NO: 62058 - RNA, 19 nt, Artificial Sequence
  Description of Artificial Sequence: Synthetic oligonucleotide
auggagcucaugggcaccu

SEQ ID NO: 62059 - RNA, 19 nt, Artificial Sequence
  Description of Artificial Sequence: Synthetic oligonucleotide
ggccgacguauggagccug

SEQ ID NO: 62060 - RNA, 19 nt, Artificial Sequence
  Description of Artificial Sequence: Synthetic oligonucleotide
guauggagccugggcaucu

SEQ ID NO: 62061 - RNA, 19 nt, Artificial Sequence
  Description of Artificial Sequence: Synthetic oligonucleotide
cauggagcucaugggcacc

SEQ ID NO: 62062 - RNA, 19 nt, Artificial Sequence
  Description of Artificial Sequence: Synthetic oligonucleotide
gccgacguauggagccugg

SEQ ID NO: 62063 - RNA, 19 nt, Artificial Sequence
  Description of Artificial Sequence: Synthetic oligonucleotide
aucgccauggagcucaugg

SEQ ID NO: 62064 - RNA, 19 nt, Artificial Sequence
  Description of Artificial Sequence: Synthetic oligonucleotide
ggcagcggcaccugcggcc

SEQ ID NO: 62065 - RNA, 19 nt, Artificial Sequence
  Description of Artificial Sequence: Synthetic oligonucleotide
acggaauggacagccgacc

SEQ ID NO: 62066 - RNA, 19 nt, Artificial Sequence
  Description of Artificial Sequence: Synthetic oligonucleotide
cggaauggacagccgaccu

SEQ ID NO: 62067 - RNA, 19 nt, Artificial Sequence
  Description of Artificial Sequence: Synthetic oligonucleotide
cugcagguccugcacgaau

SEQ ID NO: 62068 - RNA, 19 nt, Artificial Sequence
  Description of Artificial Sequence: Synthetic oligonucleotide
uccugcacgaaugcaacuc

SEQ ID NO: 62069 - RNA, 19 nt, Artificial Sequence
  Description of Artificial Sequence: Synthetic oligonucleotide
agccuuucucacccagaaa

SEQ ID NO: 62070 - RNA, 19 nt, Artificial Sequence
  Description of Artificial Sequence: Synthetic oligonucleotide
gcugcagguccugcacgaa

SEQ ID NO: 62071 - RNA, 19 nt, Artificial Sequence
  Description of Artificial Sequence: Synthetic oligonucleotide
cagguccugcacgaaugca

SEQ ID NO: 62072 - RNA, 19 nt, Artificial Sequence
  Description of Artificial Sequence: Synthetic oligonucleotide
gguccugcacgaaugcaac

SEQ ID NO: 62073 - RNA, 19 nt, Artificial Sequence
  Description of Artificial Sequence: Synthetic oligonucleotide
guccugcacgaaugcaacu

SEQ ID NO: 62074 - RNA, 19 nt, Artificial Sequence
  Description of Artificial Sequence: Synthetic oligonucleotide
gcagguccugcacgaaugc

SEQ ID NO: 62075 - RNA, 19 nt, Artificial Sequence
  Description of Artificial Sequence: Synthetic oligonucleotide
ugcagguccugcacgaaug

SEQ ID NO: 62076 - RNA, 19 nt, Artificial Sequence
  Description of Artificial Sequence: Synthetic oligonucleotide
ggaagguaccccauccccc

SEQ ID NO: 62077 - RNA, 19 nt, Artificial Sequence
  Description of Artificial Sequence: Synthetic oligonucleotide
gaagguaccccaucccccc

SEQ ID NO: 62078 - RNA, 19 nt, Artificial Sequence
  Description of Artificial Sequence: Synthetic oligonucleotide
ucggaagguaccccauccc

SEQ ID NO: 62079 - RNA, 19 nt, Artificial Sequence
  Description of Artificial Sequence: Synthetic oligonucleotide
gucggaagguaccccaucc

SEQ ID NO: 62080 - RNA, 19 nt, Artificial Sequence
  Description of Artificial Sequence: Synthetic oligonucleotide
ugaugucuggagcuuagga

SEQ ID NO: 62081 - RNA, 19 nt, Artificial Sequence
  Description of Artificial Sequence: Synthetic oligonucleotide
ugucuggagcuuaggaauc

SEQ ID NO: 62082 - RNA, 19 nt, Artificial Sequence
  Description of Artificial Sequence: Synthetic oligonucleotide
augucuggagcuuaggaau

SEQ ID NO: 62083 - RNA, 19 nt, Artificial Sequence
  Description of Artificial Sequence: Synthetic oligonucleotide
gaugucuggagcuuaggaa

SEQ ID NO: 62084 - RNA, 19 nt, Artificial Sequence
  Description of Artificial Sequence: Synthetic oligonucleotide
acaggugguagaggagcca

SEQ ID NO: 62085 - RNA, 19 nt, Artificial Sequence
  Description of Artificial Sequence: Synthetic oligonucleotide
aggaacagaaacggcuacu

SEQ ID NO: 62086 - RNA, 19 nt, Artificial Sequence
  Description of Artificial Sequence: Synthetic oligonucleotide
ugugcgauuuuggaaucag

SEQ ID NO: 62087 - RNA, 19 nt, Artificial Sequence
  Description of Artificial Sequence: Synthetic oligonucleotide
cgacuucggcaucagcggc

SEQ ID NO: 62088 - RNA, 19 nt, Artificial Sequence
  Description of Artificial Sequence: Synthetic oligonucleotide
ggacagccgaccucccaug

SEQ ID NO: 62089 - RNA, 19 nt, Artificial Sequence
  Description of Artificial Sequence: Synthetic oligonucleotide
cauggccagaaagcuaauu

SEQ ID NO: 62090 - RNA, 19 nt, Artificial Sequence
  Description of Artificial Sequence: Synthetic oligonucleotide
acagccgaccucccauggc

SEQ ID NO: 62091 - RNA, 19 nt, Artificial Sequence
  Description of Artificial Sequence: Synthetic oligonucleotide
gacagccgaccucccaugg

SEQ ID NO: 62092 - RNA, 19 nt, Artificial Sequence
  Description of Artificial Sequence: Synthetic oligonucleotide
uggccagaaagcuaauuca

SEQ ID NO: 62093 - RNA, 19 nt, Artificial Sequence
  Description of Artificial Sequence: Synthetic oligonucleotide
auggacagccgaccuccca

SEQ ID NO: 62094 - RNA, 19 nt, Artificial Sequence
  Description of Artificial Sequence: Synthetic oligonucleotide
auggccagaaagcuaauuc

SEQ ID NO: 62095 - RNA, 19 nt, Artificial Sequence
  Description of Artificial Sequence: Synthetic oligonucleotide
uggacagccgaccucccau

SEQ ID NO: 62096 - RNA, 19 nt, Artificial Sequence
  Description of Artificial Sequence: Synthetic oligonucleotide
gucauggccagaaagcuaa

SEQ ID NO: 62097 - RNA, 19 nt, Artificial Sequence
  Description of Artificial Sequence: Synthetic oligonucleotide
auggauggagguucucugg

SEQ ID NO: 62098 - RNA, 19 nt, Artificial Sequence
  Description of Artificial Sequence: Synthetic oligonucleotide
uggauggagguucucugga

SEQ ID NO: 62099 - RNA, 19 nt, Artificial Sequence
  Description of Artificial Sequence: Synthetic oligonucleotide
ggauggagguucucuggau

SEQ ID NO: 62100 - RNA, 19 nt, Artificial Sequence
  Description of Artificial Sequence: Synthetic oligonucleotide
cauggauggagguucucug

SEQ ID NO: 62101 - RNA, 19 nt, Artificial Sequence
  Description of Artificial Sequence: Synthetic oligonucleotide
acccaggccaaggaccccc

SEQ ID NO: 62102 - RNA, 19 nt, Artificial Sequence
  Description of Artificial Sequence: Synthetic oligonucleotide
gcuggaacuugacgagcag

SEQ ID NO: 62103 - RNA, 19 nt, Artificial Sequence
  Description of Artificial Sequence: Synthetic oligonucleotide
ggagcuggaacuugacgag

SEQ ID NO: 62104 - RNA, 19 nt, Artificial Sequence
  Description of Artificial Sequence: Synthetic oligonucleotide
auggaacacauggacggcg

SEQ ID NO: 62105 - RNA, 19 nt, Artificial Sequence
  Description of Artificial Sequence: Synthetic oligonucleotide
cugcacgaaugcaacucgc

SEQ ID NO: 62106 - RNA, 19 nt, Artificial Sequence
  Description of Artificial Sequence: Synthetic oligonucleotide
cagcauuugcauggaacac

SEQ ID NO: 62107 - RNA, 19 nt, Artificial Sequence
  Description of Artificial Sequence: Synthetic oligonucleotide
cacgaaugcaacucgccgu

SEQ ID NO: 62108 - RNA, 19 nt, Artificial Sequence
  Description of Artificial Sequence: Synthetic oligonucleotide
ggaggagcuggaacuugac

SEQ ID NO: 62109 - RNA, 19 nt, Artificial Sequence
  Description of Artificial Sequence: Synthetic oligonucleotide
cauuugcauggaacacaug

SEQ ID NO: 62110 - RNA, 19 nt, Artificial Sequence
  Description of Artificial Sequence: Synthetic oligonucleotide
cuggaacuugacgagcagc

SEQ ID NO: 62111 - RNA, 19 nt, Artificial Sequence
  Description of Artificial Sequence: Synthetic oligonucleotide
gacgccaaagagcuggagg

SEQ ID NO: 62112 - RNA, 19 nt, Artificial Sequence
  Description of Artificial Sequence: Synthetic oligonucleotide
cccgacgccaaagagcugg

SEQ ID NO: 62113 - RNA, 19 nt, Artificial Sequence
  Description of Artificial Sequence: Synthetic oligonucleotide
gagcuggaacuugacgagc

SEQ ID NO: 62114 - RNA, 19 nt, Artificial Sequence
  Description of Artificial Sequence: Synthetic oligonucleotide
agaaguggauuuugccggc

SEQ ID NO: 62115 - RNA, 19 nt, Artificial Sequence
  Description of Artificial Sequence: Synthetic oligonucleotide
uggaacacauggacggcgg

SEQ ID NO: 62116 - RNA, 19 nt, Artificial Sequence
  Description of Artificial Sequence: Synthetic oligonucleotide
gaacuugacgagcagcaga

SEQ ID NO: 62117 - RNA, 19 nt, Artificial Sequence
  Description of Artificial Sequence: Synthetic oligonucleotide
agcuggaacuugacgagca

SEQ ID NO: 62118 - RNA, 19 nt, Artificial Sequence
  Description of Artificial Sequence: Synthetic oligonucleotide
ucagcauuugcauggaaca

SEQ ID NO: 62119 - RNA, 19 nt, Artificial Sequence
  Description of Artificial Sequence: Synthetic oligonucleotide
cgacgccaaagagcuggag

SEQ ID NO: 62120 - RNA, 19 nt, Artificial Sequence
  Description of Artificial Sequence: Synthetic oligonucleotide
cugcccaacgguguguuca

SEQ ID NO: 62121 - RNA, 19 nt, Artificial Sequence
  Description of Artificial Sequence: Synthetic oligonucleotide
cgaaugcaacucgccguac

SEQ ID NO: 62122 - RNA, 19 nt, Artificial Sequence
  Description of Artificial Sequence: Synthetic oligonucleotide
uggaacuugacgagcagca

SEQ ID NO: 62123 - RNA, 19 nt, Artificial Sequence
  Description of Artificial Sequence: Synthetic oligonucleotide
agguaccccauccccccgc

SEQ ID NO: 62124 - RNA, 19 nt, Artificial Sequence
  Description of Artificial Sequence: Synthetic oligonucleotide
gcacgaaugcaacucgccg

SEQ ID NO: 62125 - RNA, 19 nt, Artificial Sequence
  Description of Artificial Sequence: Synthetic oligonucleotide
ggaacuugacgagcagcag

SEQ ID NO: 62126 - RNA, 19 nt, Artificial Sequence
  Description of Artificial Sequence: Synthetic oligonucleotide
gaggagcuggaacuugacg

SEQ ID NO: 62127 - RNA, 19 nt, Artificial Sequence
  Description of Artificial Sequence: Synthetic oligonucleotide
cuggaagccuuucucaccc

SEQ ID NO: 62128 - RNA, 19 nt, Artificial Sequence
  Description of Artificial Sequence: Synthetic oligonucleotide
acgaaugcaacucgccgua

SEQ ID NO: 62129 - RNA, 19 nt, Artificial Sequence
  Description of Artificial Sequence: Synthetic oligonucleotide
cauggaacacauggacggc

SEQ ID NO: 62130 - RNA, 19 nt, Artificial Sequence
  Description of Artificial Sequence: Synthetic oligonucleotide
gaucagcauuugcauggaa

SEQ ID NO: 62131 - RNA, 19 nt, Artificial Sequence
  Description of Artificial Sequence: Synthetic oligonucleotide
agcauuugcauggaacaca

SEQ ID NO: 62132 - RNA, 19 nt, Artificial Sequence
  Description of Artificial Sequence: Synthetic oligonucleotide
agaaaaagcaaaaaaaaaa

SEQ ID NO: 62133 - RNA, 19 nt, Artificial Sequence
  Description of Artificial Sequence: Synthetic oligonucleotide
gccuuucucacccagaaag

SEQ ID NO: 62134 - RNA, 19 nt, Artificial Sequence
  Description of Artificial Sequence: Synthetic oligonucleotide
uugcauggaacacauggac

SEQ ID NO: 62135 - RNA, 19 nt, Artificial Sequence
  Description of Artificial Sequence: Synthetic oligonucleotide
ggaagccuuucucacccag

SEQ ID NO: 62136 - RNA, 19 nt, Artificial Sequence
  Description of Artificial Sequence: Synthetic oligonucleotide
cgagcugcagguccugcac

SEQ ID NO: 62137 - RNA, 19 nt, Artificial Sequence
  Description of Artificial Sequence: Synthetic oligonucleotide
aucagcauuugcauggaac

SEQ ID NO: 62138 - RNA, 19 nt, Artificial Sequence
  Description of Artificial Sequence: Synthetic oligonucleotide
ugcacgaaugcaacucgcc

SEQ ID NO: 62139 - RNA, 19 nt, Artificial Sequence
  Description of Artificial Sequence: Synthetic oligonucleotide
gccgccggcccgcggagcc

SEQ ID NO: 62140 - RNA, 19 nt, Artificial Sequence
  Description of Artificial Sequence: Synthetic oligonucleotide
cgccgccggcccgcggagc

SEQ ID NO: 62141 - RNA, 19 nt, Artificial Sequence
  Description of Artificial Sequence: Synthetic oligonucleotide
gccgccgccggcccgcgga

SEQ ID NO: 62142 - RNA, 19 nt, Artificial Sequence
  Description of Artificial Sequence: Synthetic oligonucleotide
ccgccgccggcccgcggag

SEQ ID NO: 62143 - RNA, 19 nt, Artificial Sequence
  Description of Artificial Sequence: Synthetic oligonucleotide
aaggagauccugggagaag

SEQ ID NO: 62144 - RNA, 19 nt, Artificial Sequence
  Description of Artificial Sequence: Synthetic oligonucleotide
ggcugcaagcccuacaugg

SEQ ID NO: 62145 - RNA, 19 nt, Artificial Sequence
  Description of Artificial Sequence: Synthetic oligonucleotide
gcugcaagcccuacauggc

SEQ ID NO: 62146 - RNA, 19 nt, Artificial Sequence
  Description of Artificial Sequence: Synthetic oligonucleotide
ugucaccuucuacggggca

SEQ ID NO: 62147 - RNA, 19 nt, Artificial Sequence
  Description of Artificial Sequence: Synthetic oligonucleotide
cuggagccugggcaucacc

SEQ ID NO: 62148 - RNA, 19 nt, Artificial Sequence
  Description of Artificial Sequence: Synthetic oligonucleotide
uacacugucaccuucuacg

SEQ ID NO: 62149 - RNA, 19 nt, Artificial Sequence
  Description of Artificial Sequence: Synthetic oligonucleotide
cugucaccuucuacggggc

SEQ ID NO: 62150 - RNA, 19 nt, Artificial Sequence
  Description of Artificial Sequence: Synthetic oligonucleotide
acacugucaccuucuacgg

SEQ ID NO: 62151 - RNA, 19 nt, Artificial Sequence
  Description of Artificial Sequence: Synthetic oligonucleotide
ucaccuucuacggggcacu

SEQ ID NO: 62152 - RNA, 19 nt, Artificial Sequence
  Description of Artificial Sequence: Synthetic oligonucleotide
gagagggagacguguggau

SEQ ID NO: 62153 - RNA, 19 nt, Artificial Sequence
  Description of Artificial Sequence: Synthetic oligonucleotide
gucaccuucuacggggcac

SEQ ID NO: 62154 - RNA, 19 nt, Artificial Sequence
  Description of Artificial Sequence: Synthetic oligonucleotide
uagagaaggugcggcacgc

SEQ ID NO: 62155 - RNA, 19 nt, Artificial Sequence
  Description of Artificial Sequence: Synthetic oligonucleotide
agagggagacguguggauc

SEQ ID NO: 62156 - RNA, 19 nt, Artificial Sequence
  Description of Artificial Sequence: Synthetic oligonucleotide
acugucaccuucuacgggg

SEQ ID NO: 62157 - RNA, 19 nt, Artificial Sequence
  Description of Artificial Sequence: Synthetic oligonucleotide
ugcucauggaccuggacau

SEQ ID NO: 62158 - RNA, 19 nt, Artificial Sequence
  Description of Artificial Sequence: Synthetic oligonucleotide
auucacagagauaucaaac

SEQ ID NO: 62159 - RNA, 19 nt, Artificial Sequence
  Description of Artificial Sequence: Synthetic oligonucleotide
gagauaucaaaccuuccaa

SEQ ID NO: 62160 - RNA, 19 nt, Artificial Sequence
  Description of Artificial Sequence: Synthetic oligonucleotide
cacagagauaucaaaccuu

SEQ ID NO: 62161 - RNA, 19 nt, Artificial Sequence
  Description of Artificial Sequence: Synthetic oligonucleotide
agagauaucaaaccuucca

SEQ ID NO: 62162 - RNA, 19 nt, Artificial Sequence
  Description of Artificial Sequence: Synthetic oligonucleotide
cagagauaucaaaccuucc

SEQ ID NO: 62163 - RNA, 19 nt, Artificial Sequence
  Description of Artificial Sequence: Synthetic oligonucleotide
uucacagagauaucaaacc

SEQ ID NO: 62164 - RNA, 19 nt, Artificial Sequence
  Description of Artificial Sequence: Synthetic oligonucleotide
acagagauaucaaaccuuc

SEQ ID NO: 62165 - RNA, 19 nt, Artificial Sequence
  Description of Artificial Sequence: Synthetic oligonucleotide
gacucuauugccaagacaa

SEQ ID NO: 62166 - RNA, 19 nt, Artificial Sequence
  Description of Artificial Sequence: Synthetic oligonucleotide
acuucggcaucaguggaca

SEQ ID NO: 62167 - RNA, 19 nt, Artificial Sequence
  Description of Artificial Sequence: Synthetic oligonucleotide
ggacucuauugccaagaca

SEQ ID NO: 62168 - RNA, 19 nt, Artificial Sequence
  Description of Artificial Sequence: Synthetic oligonucleotide
uccgcucugaugucuggag

SEQ ID NO: 62169 - RNA, 19 nt, Artificial Sequence
  Description of Artificial Sequence: Synthetic oligonucleotide
uuguggacucuauugccaa

SEQ ID NO: 62170 - RNA, 19 nt, Artificial Sequence
  Description of Artificial Sequence: Synthetic oligonucleotide
ucacagagauaucaaaccu

SEQ ID NO: 62171 - RNA, 19 nt, Artificial Sequence
  Description of Artificial Sequence: Synthetic oligonucleotide
ccgccgcagccgccgccgg

SEQ ID NO: 62172 - RNA, 19 nt, Artificial Sequence
  Description of Artificial Sequence: Synthetic oligonucleotide
cgugaagcccuccaauaug

SEQ ID NO: 62173 - RNA, 19 nt, Artificial Sequence
  Description of Artificial Sequence: Synthetic oligonucleotide
cauucugaugucuggagcu

SEQ ID NO: 62174 - RNA, 19 nt, Artificial Sequence
  Description of Artificial Sequence: Synthetic oligonucleotide
auucugaugucuggagcuu

SEQ ID NO: 62175 - RNA, 19 nt, Artificial Sequence
  Description of Artificial Sequence: Synthetic oligonucleotide
uucugaugucuggagcuua

SEQ ID NO: 62176 - RNA, 19 nt, Artificial Sequence
  Description of Artificial Sequence: Synthetic oligonucleotide
ucacccucuguccucugcc

SEQ ID NO: 62177 - RNA, 19 nt, Artificial Sequence
  Description of Artificial Sequence: Synthetic oligonucleotide
cacccucuguccucugccc

SEQ ID NO: 62178 - RNA, 19 nt, Artificial Sequence
  Description of Artificial Sequence: Synthetic oligonucleotide
ggauccgagccacaguaaa

SEQ ID NO: 62179 - RNA, 19 nt, Artificial Sequence
  Description of Artificial Sequence: Synthetic oligonucleotide
uacggggugguggagaaga

SEQ ID NO: 62180 - RNA, 19 nt, Artificial Sequence
  Description of Artificial Sequence: Synthetic oligonucleotide
cggggugguggagaagaug

SEQ ID NO: 62181 - RNA, 19 nt, Artificial Sequence
  Description of Artificial Sequence: Synthetic oligonucleotide
aggugaaggcagaugaccu

SEQ ID NO: 62182 - RNA, 19 nt, Artificial Sequence
  Description of Artificial Sequence: Synthetic oligonucleotide
cucaaacaggugguagagg

SEQ ID NO: 62183 - RNA, 19 nt, Artificial Sequence
  Description of Artificial Sequence: Synthetic oligonucleotide
ugguagaggagccaucgcc

SEQ ID NO: 62184 - RNA, 19 nt, Artificial Sequence
  Description of Artificial Sequence: Synthetic oligonucleotide
agaacuuugaggugaaggc

SEQ ID NO: 62185 - RNA, 19 nt, Artificial Sequence
  Description of Artificial Sequence: Synthetic oligonucleotide
gugguagaggagccaucgc

SEQ ID NO: 62186 - RNA, 19 nt, Artificial Sequence
  Description of Artificial Sequence: Synthetic oligonucleotide
gaggugaaggcagaugacc

SEQ ID NO: 62187 - RNA, 19 nt, Artificial Sequence
  Description of Artificial Sequence: Synthetic oligonucleotide
agaaacggcuacugaugga

SEQ ID NO: 62188 - RNA, 19 nt, Artificial Sequence
  Description of Artificial Sequence: Synthetic oligonucleotide
ucaaacaggugguagagga

SEQ ID NO: 62189 - RNA, 19 nt, Artificial Sequence
  Description of Artificial Sequence: Synthetic oligonucleotide
ggugaaggcagaugaccug

SEQ ID NO: 62190 - RNA, 19 nt, Artificial Sequence
  Description of Artificial Sequence: Synthetic oligonucleotide
agcucaaacaggugguaga

SEQ ID NO: 62191 - RNA, 19 nt, Artificial Sequence
  Description of Artificial Sequence: Synthetic oligonucleotide
cggauccgagccacaguaa

SEQ ID NO: 62192 - RNA, 19 nt, Artificial Sequence
  Description of Artificial Sequence: Synthetic oligonucleotide
aaagaauaaacccagagcu

SEQ ID NO: 62193 - RNA, 19 nt, Artificial Sequence
  Description of Artificial Sequence: Synthetic oligonucleotide
cagcucaaacaggugguag

SEQ ID NO: 62194 - RNA, 19 nt, Artificial Sequence
  Description of Artificial Sequence: Synthetic oligonucleotide
cugaaagaauaaacccaga

SEQ ID NO: 62195 - RNA, 19 nt, Artificial Sequence
  Description of Artificial Sequence: Synthetic oligonucleotide
gugaaggcagaugaccugg

SEQ ID NO: 62196 - RNA, 19 nt, Artificial Sequence
  Description of Artificial Sequence: Synthetic oligonucleotide
caaacaggugguagaggag

SEQ ID NO: 62197 - RNA, 19 nt, Artificial Sequence
  Description of Artificial Sequence: Synthetic oligonucleotide
ggugguagaggagccaucg

SEQ ID NO: 62198 - RNA, 19 nt, Artificial Sequence
  Description of Artificial Sequence: Synthetic oligonucleotide
gcucaaacaggugguagag

SEQ ID NO: 62199 - RNA, 19 nt, Artificial Sequence
  Description of Artificial Sequence: Synthetic oligonucleotide
cagaaacggcuacugaugg

SEQ ID NO: 62200 - RNA, 19 nt, Artificial Sequence
  Description of Artificial Sequence: Synthetic oligonucleotide
ugaaagaauaaacccagag

SEQ ID NO: 62201 - RNA, 19 nt, Artificial Sequence
  Description of Artificial Sequence: Synthetic oligonucleotide
gcagcucaaacagguggua

SEQ ID NO: 62202 - RNA, 19 nt, Artificial Sequence
  Description of Artificial Sequence: Synthetic oligonucleotide
gcggauccgagccacagua

SEQ ID NO: 62203 - RNA, 19 nt, Artificial Sequence
  Description of Artificial Sequence: Synthetic oligonucleotide
acggggugguggagaagau

SEQ ID NO: 62204 - RNA, 19 nt, Artificial Sequence
  Description of Artificial Sequence: Synthetic oligonucleotide
agaugugcgauuuuggaau

SEQ ID NO: 62205 - RNA, 19 nt, Artificial Sequence
  Description of Artificial Sequence: Synthetic oligonucleotide
aagaugugcgauuuuggaa

SEQ ID NO: 62206 - RNA, 19 nt, Artificial Sequence
  Description of Artificial Sequence: Synthetic oligonucleotide
cuaccugaaggagaagcac

SEQ ID NO: 62207 - RNA, 19 nt, Artificial Sequence
  Description of Artificial Sequence: Synthetic oligonucleotide
uaccugaaggagaagcacg

SEQ ID NO: 62208 - RNA, 19 nt, Artificial Sequence
  Description of Artificial Sequence: Synthetic oligonucleotide
agaccaaaguauaauaagc

SEQ ID NO: 62209 - RNA, 19 nt, Artificial Sequence
  Description of Artificial Sequence: Synthetic oligonucleotide
gaccaaaguauaauaagcu

SEQ ID NO: 62210 - RNA, 19 nt, Artificial Sequence
  Description of Artificial Sequence: Synthetic oligonucleotide
uggauuuugcagguuggcu

SEQ ID NO: 62211 - RNA, 19 nt, Artificial Sequence
  Description of Artificial Sequence: Synthetic oligonucleotide
gaggagcuagagcuugaug

SEQ ID NO: 62212 - RNA, 19 nt, Artificial Sequence
  Description of Artificial Sequence: Synthetic oligonucleotide
ggaggagcuagagcuugau

SEQ ID NO: 62213 - RNA, 19 nt, Artificial Sequence
  Description of Artificial Sequence: Synthetic oligonucleotide
uaaccagcccagcacacca

SEQ ID NO: 62214 - RNA, 19 nt, Artificial Sequence
  Description of Artificial Sequence: Synthetic oligonucleotide
cuucgugggcacaaggucc

SEQ ID NO: 62215 - RNA, 19 nt, Artificial Sequence
  Description of Artificial Sequence: Synthetic oligonucleotide
gagcuagagcuugaugagc

SEQ ID NO: 62216 - RNA, 19 nt, Artificial Sequence
  Description of Artificial Sequence: Synthetic oligonucleotide
guggauuuugcagguuggc

SEQ ID NO: 62217 - RNA, 19 nt, Artificial Sequence
  Description of Artificial Sequence: Synthetic oligonucleotide
augggacugucucugguag

SEQ ID NO: 62218 - RNA, 19 nt, Artificial Sequence
  Description of Artificial Sequence: Synthetic oligonucleotide
caagauuuugugaauaaau

SEQ ID NO: 62219 - RNA, 19 nt, Artificial Sequence
  Description of Artificial Sequence: Synthetic oligonucleotide
caaacccgcaauccggaac

SEQ ID NO: 62220 - RNA, 19 nt, Artificial Sequence
  Description of Artificial Sequence: Synthetic oligonucleotide
cgagccuccuccaaaacug

SEQ ID NO: 62221 - RNA, 19 nt, Artificial Sequence
  Description of Artificial Sequence: Synthetic oligonucleotide
cgagaucaguaucugcaug

SEQ ID NO: 62222 - RNA, 19 nt, Artificial Sequence
  Description of Artificial Sequence: Synthetic oligonucleotide
ugggcacaagguccuacau

SEQ ID NO: 62223 - RNA, 19 nt, Artificial Sequence
  Description of Artificial Sequence: Synthetic oligonucleotide
aagauuuugugaauaaaug

SEQ ID NO: 62224 - RNA, 19 nt, Artificial Sequence
  Description of Artificial Sequence: Synthetic oligonucleotide
gcugaggaaguggauuuug

SEQ ID NO: 62225 - RNA, 19 nt, Artificial Sequence
  Description of Artificial Sequence: Synthetic oligonucleotide
ucccguggggagaucaagc

SEQ ID NO: 62226 - RNA, 19 nt, Artificial Sequence
  Description of Artificial Sequence: Synthetic oligonucleotide
cugaggaaguggauuuugc

SEQ ID NO: 62227 - RNA, 19 nt, Artificial Sequence
  Description of Artificial Sequence: Synthetic oligonucleotide
cuggucauggccagaaagc

SEQ ID NO: 62228 - RNA, 19 nt, Artificial Sequence
  Description of Artificial Sequence: Synthetic oligonucleotide
aguaucugcauggagcaca

SEQ ID NO: 62229 - RNA, 19 nt, Artificial Sequence
  Description of Artificial Sequence: Synthetic oligonucleotide
acagcgauggcgagaucag

SEQ ID NO: 62230 - RNA, 19 nt, Artificial Sequence
  Description of Artificial Sequence: Synthetic oligonucleotide
aggagcuagagcuugauga

SEQ ID NO: 62231 - RNA, 19 nt, Artificial Sequence
  Description of Artificial Sequence: Synthetic oligonucleotide
cuagagcuugaugagcagc

SEQ ID NO: 62232 - RNA, 19 nt, Artificial Sequence
  Description of Artificial Sequence: Synthetic oligonucleotide
agagcuugaugagcagcag

SEQ ID NO: 62233 - RNA, 19 nt, Artificial Sequence
  Description of Artificial Sequence: Synthetic oligonucleotide
caacauccuagucaacucc

SEQ ID NO: 62234 - RNA, 19 nt, Artificial Sequence
  Description of Artificial Sequence: Synthetic oligonucleotide
agauuuugugaauaaaugc

SEQ ID NO: 62235 - RNA, 19 nt, Artificial Sequence
  Description of Artificial Sequence: Synthetic oligonucleotide
gccuggucauggccagaaa

SEQ ID NO: 62236 - RNA, 19 nt, Artificial Sequence
  Description of Artificial Sequence: Synthetic oligonucleotide
gagaucaaacccgcaaucc

SEQ ID NO: 62237 - RNA, 19 nt, Artificial Sequence
  Description of Artificial Sequence: Synthetic oligonucleotide
ccagcccagcacaccaacc

SEQ ID NO: 62238 - RNA, 19 nt, Artificial Sequence
  Description of Artificial Sequence: Synthetic oligonucleotide
uccuucgugggcacaaggu

SEQ ID NO: 62239 - RNA, 19 nt, Artificial Sequence
  Description of Artificial Sequence: Synthetic oligonucleotide
ucgugggcacaagguccua

SEQ ID NO: 62240 - RNA, 19 nt, Artificial Sequence
  Description of Artificial Sequence: Synthetic oligonucleotide
gccuccuccaaaacugccc

SEQ ID NO: 62241 - RNA, 19 nt, Artificial Sequence
  Description of Artificial Sequence: Synthetic oligonucleotide
ccuuaaccagcccagcaca

SEQ ID NO: 62242 - RNA, 19 nt, Artificial Sequence
  Description of Artificial Sequence: Synthetic oligonucleotide
ucaguaucugcauggagca

SEQ ID NO: 62243 - RNA, 19 nt, Artificial Sequence
  Description of Artificial Sequence: Synthetic oligonucleotide
acucccguggggagaucaa

SEQ ID NO: 62244 - RNA, 19 nt, Artificial Sequence
  Description of Artificial Sequence: Synthetic oligonucleotide
gggacugucucugguagag

SEQ ID NO: 62245 - RNA, 19 nt, Artificial Sequence
  Description of Artificial Sequence: Synthetic oligonucleotide
aacccgcaauccggaacca

SEQ ID NO: 62246 - RNA, 19 nt, Artificial Sequence
  Description of Artificial Sequence: Synthetic oligonucleotide
gccuuaaccagcccagcac

SEQ ID NO: 62247 - RNA, 19 nt, Artificial Sequence
  Description of Artificial Sequence: Synthetic oligonucleotide
gaucaguaucugcauggag

SEQ ID NO: 62248 - RNA, 19 nt, Artificial Sequence
  Description of Artificial Sequence: Synthetic oligonucleotide
ugggacugucucugguaga

SEQ ID NO: 62249 - RNA, 19 nt, Artificial Sequence
  Description of Artificial Sequence: Synthetic oligonucleotide
agaucaaacccgcaauccg

SEQ ID NO: 62250 - RNA, 19 nt, Artificial Sequence
  Description of Artificial Sequence: Synthetic oligonucleotide
ccuggucauggccagaaag

SEQ ID NO: 62251 - RNA, 19 nt, Artificial Sequence
  Description of Artificial Sequence: Synthetic oligonucleotide
ucuacagcgauggcgagau

SEQ ID NO: 62252 - RNA, 19 nt, Artificial Sequence
  Description of Artificial Sequence: Synthetic oligonucleotide
agcuagagcuugaugagca

SEQ ID NO: 62253 - RNA, 19 nt, Artificial Sequence
  Description of Artificial Sequence: Synthetic oligonucleotide
cuccuucgugggcacaagg

SEQ ID NO: 62254 - RNA, 19 nt, Artificial Sequence
  Description of Artificial Sequence: Synthetic oligonucleotide
agccgaccucccauggcaa

SEQ ID NO: 62255 - RNA, 19 nt, Artificial Sequence
  Description of Artificial Sequence: Synthetic oligonucleotide
uggucauggccagaaagcu

SEQ ID NO: 62256 - RNA, 19 nt, Artificial Sequence
  Description of Artificial Sequence: Synthetic oligonucleotide
gcgagaucaguaucugcau

SEQ ID NO: 62257 - RNA, 19 nt, Artificial Sequence
  Description of Artificial Sequence: Synthetic oligonucleotide
gaucaaacccgcaauccgg

SEQ ID NO: 62258 - RNA, 19 nt, Artificial Sequence
  Description of Artificial Sequence: Synthetic oligonucleotide
acgagccuccuccaaaacu

SEQ ID NO: 62259 - RNA, 19 nt, Artificial Sequence
  Description of Artificial Sequence: Synthetic oligonucleotide
gccgaccucccauggcaau

SEQ ID NO: 62260 - RNA, 19 nt, Artificial Sequence
  Description of Artificial Sequence: Synthetic oligonucleotide
ggcgagaucaguaucugca

SEQ ID NO: 62261 - RNA, 19 nt, Artificial Sequence
  Description of Artificial Sequence: Synthetic oligonucleotide
ucauuacucugugcaguca

SEQ ID NO: 62262 - RNA, 19 nt, Artificial Sequence
  Description of Artificial Sequence: Synthetic oligonucleotide
gagccuccuccaaaacugc

SEQ ID NO: 62263 - RNA, 19 nt, Artificial Sequence
  Description of Artificial Sequence: Synthetic oligonucleotide
gcuagagcuugaugagcag

SEQ ID NO: 62264 - RNA, 19 nt, Artificial Sequence
  Description of Artificial Sequence: Synthetic oligonucleotide
cuacagcgauggcgagauc

SEQ ID NO: 62265 - RNA, 19 nt, Artificial Sequence
  Description of Artificial Sequence: Synthetic oligonucleotide
caugggacugucucuggua

SEQ ID NO: 62266 - RNA, 19 nt, Artificial Sequence
  Description of Artificial Sequence: Synthetic oligonucleotide
cgugggcacaagguccuac

SEQ ID NO: 62267 - RNA, 19 nt, Artificial Sequence
  Description of Artificial Sequence: Synthetic oligonucleotide
cugucucugguagagaugg

SEQ ID NO: 62268 - RNA, 19 nt, Artificial Sequence
  Description of Artificial Sequence: Synthetic oligonucleotide
acccgcaauccggaaccag

SEQ ID NO: 62269 - RNA, 19 nt, Artificial Sequence
  Description of Artificial Sequence: Synthetic oligonucleotide
ugucucugguagagauggc

SEQ ID NO: 62270 - RNA, 19 nt, Artificial Sequence
  Description of Artificial Sequence: Synthetic oligonucleotide
gggcacaagguccuacaug

SEQ ID NO: 62271 - RNA, 19 nt, Artificial Sequence
  Description of Artificial Sequence: Synthetic oligonucleotide
cagcccagcacaccaaccc

SEQ ID NO: 62272 - RNA, 19 nt, Artificial Sequence
  Description of Artificial Sequence: Synthetic oligonucleotide
ccuccuccaaaacugccca

SEQ ID NO: 62273 - RNA, 19 nt, Artificial Sequence
  Description of Artificial Sequence: Synthetic oligonucleotide
aaacccgcaauccggaacc

SEQ ID NO: 62274 - RNA, 19 nt, Artificial Sequence
  Description of Artificial Sequence: Synthetic oligonucleotide
gugggcacaagguccuaca

SEQ ID NO: 62275 - RNA, 19 nt, Artificial Sequence
  Description of Artificial Sequence: Synthetic oligonucleotide
ccuucgugggcacaagguc

SEQ ID NO: 62276 - RNA, 19 nt, Artificial Sequence
  Description of Artificial Sequence: Synthetic oligonucleotide
caguaucugcauggagcac

SEQ ID NO: 62277 - RNA, 19 nt, Artificial Sequence
  Description of Artificial Sequence: Synthetic oligonucleotide
agccuccuccaaaacugcc

SEQ ID NO: 62278 - RNA, 19 nt, Artificial Sequence
  Description of Artificial Sequence: Synthetic oligonucleotide
uagagcuugaugagcagca

SEQ ID NO: 62279 - RNA, 19 nt, Artificial Sequence
  Description of Artificial Sequence: Synthetic oligonucleotide
ggccaaggacccccgggag

SEQ ID NO: 62280 - RNA, 19 nt, Artificial Sequence
  Description of Artificial Sequence: Synthetic oligonucleotide
cccguggggagaucaagcu

SEQ ID NO: 62281 - RNA, 19 nt, Artificial Sequence
  Description of Artificial Sequence: Synthetic oligonucleotide
ucaaacccgcaauccggaa

SEQ ID NO: 62282 - RNA, 19 nt, Artificial Sequence
  Description of Artificial Sequence: Synthetic oligonucleotide
uacagcgauggcgagauca

SEQ ID NO: 62283 - RNA, 19 nt, Artificial Sequence
  Description of Artificial Sequence: Synthetic oligonucleotide
ggagcuagagcuugaugag

SEQ ID NO: 62284 - RNA, 19 nt, Artificial Sequence
  Description of Artificial Sequence: Synthetic oligonucleotide
cucccguggggagaucaag

SEQ ID NO: 62285 - RNA, 19 nt, Artificial Sequence
  Description of Artificial Sequence: Synthetic oligonucleotide
guccaaaaugcccaagaag

SEQ ID NO: 62286 - RNA, 19 nt, Artificial Sequence
  Description of Artificial Sequence: Synthetic oligonucleotide
ucuggaauuucaagauuuu

SEQ ID NO: 62287 - RNA, 19 nt, Artificial Sequence
  Description of Artificial Sequence: Synthetic oligonucleotide
uaucugagggagaagcaca

SEQ ID NO: 62288 - RNA, 19 nt, Artificial Sequence
  Description of Artificial Sequence: Synthetic oligonucleotide
cgggccucaucauggccag

SEQ ID NO: 62289 - RNA, 19 nt, Artificial Sequence
  Description of Artificial Sequence: Synthetic oligonucleotide
cugugugacuucgggguga

SEQ ID NO: 62290 - RNA, 19 nt, Artificial Sequence
  Description of Artificial Sequence: Synthetic oligonucleotide
gcgggcaacggcggggugg

SEQ ID NO: 62291 - RNA, 19 nt, Artificial Sequence
  Description of Artificial Sequence: Synthetic oligonucleotide
ggaagaaguggauuuugcc

SEQ ID NO: 62292 - RNA, 19 nt, Artificial Sequence
  Description of Artificial Sequence: Synthetic oligonucleotide
acuucggggugagcggcca

SEQ ID NO: 62293 - RNA, 19 nt, Artificial Sequence
  Description of Artificial Sequence: Synthetic oligonucleotide
ucuacagugacggggagau

SEQ ID NO: 62294 - RNA, 19 nt, Artificial Sequence
  Description of Artificial Sequence: Synthetic oligonucleotide
cgagagaagcaccagauca

SEQ ID NO: 62295 - RNA, 19 nt, Artificial Sequence
  Description of Artificial Sequence: Synthetic oligonucleotide
cugucccugguggagcugg

SEQ ID NO: 62296 - RNA, 19 nt, Artificial Sequence
  Description of Artificial Sequence: Synthetic oligonucleotide
ucgggccucaucauggcca

SEQ ID NO: 62297 - RNA, 19 nt, Artificial Sequence
  Description of Artificial Sequence: Synthetic oligonucleotide
gguggaccugcagaagaag

SEQ ID NO: 62298 - RNA, 19 nt, Artificial Sequence
  Description of Artificial Sequence: Synthetic oligonucleotide
guggaccugcagaagaagc

SEQ ID NO: 62299 - RNA, 19 nt, Artificial Sequence
  Description of Artificial Sequence: Synthetic oligonucleotide
gacuucggggugagcggcc

SEQ ID NO: 62300 - RNA, 19 nt, Artificial Sequence
  Description of Artificial Sequence: Synthetic oligonucleotide
gggcuucuacggggccuuc

SEQ ID NO: 62301 - RNA, 19 nt, Artificial Sequence
  Description of Artificial Sequence: Synthetic oligonucleotide
gggagaucagcauuugcau

SEQ ID NO: 62302 - RNA, 19 nt, Artificial Sequence
  Description of Artificial Sequence: Synthetic oligonucleotide
cggggugagcggccagcuc

SEQ ID NO: 62303 - RNA, 19 nt, Artificial Sequence
  Description of Artificial Sequence: Synthetic oligonucleotide
cucaucauggccaggaagc

SEQ ID NO: 62304 - RNA, 19 nt, Artificial Sequence
  Description of Artificial Sequence: Synthetic oligonucleotide
cugccauggccaucuuuga

SEQ ID NO: 62305 - RNA, 19 nt, Artificial Sequence
  Description of Artificial Sequence: Synthetic oligonucleotide
gaguuugucaauaaaugcc

SEQ ID NO: 62306 - RNA, 19 nt, Artificial Sequence
  Description of Artificial Sequence: Synthetic oligonucleotide
ucuacggggccuucuacag

SEQ ID NO: 62307 - RNA, 19 nt, Artificial Sequence
  Description of Artificial Sequence: Synthetic oligonucleotide
ccugccauggccaucuuug

SEQ ID NO: 62308 - RNA, 19 nt, Artificial Sequence
  Description of Artificial Sequence: Synthetic oligonucleotide
cuucggggugagcggccag

SEQ ID NO: 62309 - RNA, 19 nt, Artificial Sequence
  Description of Artificial Sequence: Synthetic oligonucleotide
ggccucaucauggccagga

SEQ ID NO: 62310 - RNA, 19 nt, Artificial Sequence
  Description of Artificial Sequence: Synthetic oligonucleotide
gcugugugacuucggggug

SEQ ID NO: 62311 - RNA, 19 nt, Artificial Sequence
  Description of Artificial Sequence: Synthetic oligonucleotide
ggcuucuacggggccuucu

SEQ ID NO: 62312 - RNA, 19 nt, Artificial Sequence
  Description of Artificial Sequence: Synthetic oligonucleotide
aguuugucaauaaaugccu

SEQ ID NO: 62313 - RNA, 19 nt, Artificial Sequence
  Description of Artificial Sequence: Synthetic oligonucleotide
cgugggcuucuacggggcc

SEQ ID NO: 62314 - RNA, 19 nt, Artificial Sequence
  Description of Artificial Sequence: Synthetic oligonucleotide
uucggggugagcggccagc

SEQ ID NO: 62315 - RNA, 19 nt, Artificial Sequence
  Description of Artificial Sequence: Synthetic oligonucleotide
agcugggcgcgggcaacgg

SEQ ID NO: 62316 - RNA, 19 nt, Artificial Sequence
  Description of Artificial Sequence: Synthetic oligonucleotide
uggaccugcagaagaagcu

SEQ ID NO: 62317 - RNA, 19 nt, Artificial Sequence
  Description of Artificial Sequence: Synthetic oligonucleotide
aucauggccaggaagcuga

SEQ ID NO: 62318 - RNA, 19 nt, Artificial Sequence
  Description of Artificial Sequence: Synthetic oligonucleotide
guggaagaaguggauuuug

SEQ ID NO: 62319 - RNA, 19 nt, Artificial Sequence
  Description of Artificial Sequence: Synthetic oligonucleotide
ugucccugguggagcuggc

SEQ ID NO: 62320 - RNA, 19 nt, Artificial Sequence
  Description of Artificial Sequence: Synthetic oligonucleotide
gccucaucauggccaggaa

SEQ ID NO: 62321 - RNA, 19 nt, Artificial Sequence
  Description of Artificial Sequence: Synthetic oligonucleotide
ggagaucagcauuugcaug

SEQ ID NO: 62322 - RNA, 19 nt, Artificial Sequence
  Description of Artificial Sequence: Synthetic oligonucleotide
uucuacggggccuucuaca

SEQ ID NO: 62323 - RNA, 19 nt, Artificial Sequence
  Description of Artificial Sequence: Synthetic oligonucleotide
uucuacagugacggggaga

SEQ ID NO: 62324 - RNA, 19 nt, Artificial Sequence
  Description of Artificial Sequence: Synthetic oligonucleotide
ugggcuucuacggggccuu

SEQ ID NO: 62325 - RNA, 19 nt, Artificial Sequence
  Description of Artificial Sequence: Synthetic oligonucleotide
cgcgagcugcagguccugc

SEQ ID NO: 62326 - RNA, 19 nt, Artificial Sequence
  Description of Artificial Sequence: Synthetic oligonucleotide
cugggcgcgggcaacggcg

SEQ ID NO: 62327 - RNA, 19 nt, Artificial Sequence
  Description of Artificial Sequence: Synthetic oligonucleotide
agcggcuggaagccuuucu

SEQ ID NO: 62328 - RNA, 19 nt, Artificial Sequence
  Description of Artificial Sequence: Synthetic oligonucleotide
guggauuuugccggcuggu

SEQ ID NO: 62329 - RNA, 19 nt, Artificial Sequence
  Description of Artificial Sequence: Synthetic oligonucleotide
cuucuacggggccuucuac

SEQ ID NO: 62330 - RNA, 19 nt, Artificial Sequence
  Description of Artificial Sequence: Synthetic oligonucleotide
gugugacuucggggugagc

SEQ ID NO: 62331 - RNA, 19 nt, Artificial Sequence
  Description of Artificial Sequence: Synthetic oligonucleotide
caugggccugucccuggug

SEQ ID NO: 62332 - RNA, 19 nt, Artificial Sequence
  Description of Artificial Sequence: Synthetic oligonucleotide
uggauuuugccggcugguu

SEQ ID NO: 62333 - RNA, 19 nt, Artificial Sequence
  Description of Artificial Sequence: Synthetic oligonucleotide
ugguggaccugcagaagaa

SEQ ID NO: 62334 - RNA, 19 nt, Artificial Sequence
  Description of Artificial Sequence: Synthetic oligonucleotide
gagcugggcgcgggcaacg

SEQ ID NO: 62335 - RNA, 19 nt, Artificial Sequence
  Description of Artificial Sequence: Synthetic oligonucleotide
augggccugucccuggugg

SEQ ID NO: 62336 - RNA, 19 nt, Artificial Sequence
  Description of Artificial Sequence: Synthetic oligonucleotide
auggccaggaagcugaucc

SEQ ID NO: 62337 - RNA, 19 nt, Artificial Sequence
  Description of Artificial Sequence: Synthetic oligonucleotide
uugucaauaaaugccucau

SEQ ID NO: 62338 - RNA, 19 nt, Artificial Sequence
  Description of Artificial Sequence: Synthetic oligonucleotide
uacagugacggggagauca

SEQ ID NO: 62339 - RNA, 19 nt, Artificial Sequence
  Description of Artificial Sequence: Synthetic oligonucleotide
gggccugucccugguggag

SEQ ID NO: 62340 - RNA, 19 nt, Artificial Sequence
  Description of Artificial Sequence: Synthetic oligonucleotide
ccucaucauggccaggaag

SEQ ID NO: 62341 - RNA, 19 nt, Artificial Sequence
  Description of Artificial Sequence: Synthetic oligonucleotide
aagcggcuggaagccuuuc

SEQ ID NO: 62342 - RNA, 19 nt, Artificial Sequence
  Description of Artificial Sequence: Synthetic oligonucleotide
gcugggcgcgggcaacggc

SEQ ID NO: 62343 - RNA, 19 nt, Artificial Sequence
  Description of Artificial Sequence: Synthetic oligonucleotide
cauggccaggaagcugauc

SEQ ID NO: 62344 - RNA, 19 nt, Artificial Sequence
  Description of Artificial Sequence: Synthetic oligonucleotide
uggaagaaguggauuuugc

SEQ ID NO: 62345 - RNA, 19 nt, Artificial Sequence
  Description of Artificial Sequence: Synthetic oligonucleotide
uggccaggaagcugaucca

SEQ ID NO: 62346 - RNA, 19 nt, Artificial Sequence
  Description of Artificial Sequence: Synthetic oligonucleotide
ugggccugucccuggugga

SEQ ID NO: 62347 - RNA, 19 nt, Artificial Sequence
  Description of Artificial Sequence: Synthetic oligonucleotide
gugggcuucuacggggccu

SEQ ID NO: 62348 - RNA, 19 nt, Artificial Sequence
  Description of Artificial Sequence: Synthetic oligonucleotide
cuacagugacggggagauc

SEQ ID NO: 62349 - RNA, 19 nt, Artificial Sequence
  Description of Artificial Sequence: Synthetic oligonucleotide
cgggcaacggcgggguggu

SEQ ID NO: 62350 - RNA, 19 nt, Artificial Sequence
  Description of Artificial Sequence: Synthetic oligonucleotide
ggggagaucagcauuugca

SEQ ID NO: 62351 - RNA, 19 nt, Artificial Sequence
  Description of Artificial Sequence: Synthetic oligonucleotide
ucggggugagcggccagcu

SEQ ID NO: 62352 - RNA, 19 nt, Artificial Sequence
  Description of Artificial Sequence: Synthetic oligonucleotide
uuugucaauaaaugccuca

SEQ ID NO: 62353 - RNA, 19 nt, Artificial Sequence
  Description of Artificial Sequence: Synthetic oligonucleotide
ugacuucggggugagcggc

SEQ ID NO: 62354 - RNA, 19 nt, Artificial Sequence
  Description of Artificial Sequence: Synthetic oligonucleotide
agaggcgccgccgccgccg

SEQ ID NO: 62355 - RNA, 19 nt, Artificial Sequence
  Description of Artificial Sequence: Synthetic oligonucleotide
gaggagauccuggggaaag

SEQ ID NO: 62356 - RNA, 19 nt, Artificial Sequence
  Description of Artificial Sequence: Synthetic oligonucleotide
caucauggccaggaagcug

SEQ ID NO: 62357 - RNA, 19 nt, Artificial Sequence
  Description of Artificial Sequence: Synthetic oligonucleotide
aggagauccuggggaaagu

SEQ ID NO: 62358 - RNA, 19 nt, Artificial Sequence
  Description of Artificial Sequence: Synthetic oligonucleotide
ggagauccuggggaaaguc

SEQ ID NO: 62359 - RNA, 19 nt, Artificial Sequence
  Description of Artificial Sequence: Synthetic oligonucleotide
gccccagcgccccucggcu

SEQ ID NO: 62360 - RNA, 19 nt, Artificial Sequence
  Description of Artificial Sequence: Synthetic oligonucleotide
cgccgccgccggcccgcgg

SEQ ID NO: 62361 - RNA, 19 nt, Artificial Sequence
  Description of Artificial Sequence: Synthetic oligonucleotide
ggcgccgccgccgccggcc

SEQ ID NO: 62362 - RNA, 19 nt, Artificial Sequence
  Description of Artificial Sequence: Synthetic oligonucleotide
gcgccgccgccgccggccc

SEQ ID NO: 62363 - RNA, 19 nt, Artificial Sequence
  Description of Artificial Sequence: Synthetic oligonucleotide
aaccacaccuucaucaagc

SEQ ID NO: 62364 - RNA, 19 nt, Artificial Sequence
  Description of Artificial Sequence: Synthetic oligonucleotide
ggagauccugggagaagac

SEQ ID NO: 62365 - RNA, 19 nt, Artificial Sequence
  Description of Artificial Sequence: Synthetic oligonucleotide
acaggagcagaagcggcug

SEQ ID NO: 62366 - RNA, 19 nt, Artificial Sequence
  Description of Artificial Sequence: Synthetic oligonucleotide
aggagauccugggagaaga

SEQ ID NO: 62367 - RNA, 19 nt, Artificial Sequence
  Description of Artificial Sequence: Synthetic oligonucleotide
acggggcacuauucagaga

SEQ ID NO: 62368 - RNA, 19 nt, Artificial Sequence
  Description of Artificial Sequence: Synthetic oligonucleotide
uacggggcacuauucagag

SEQ ID NO: 62369 - RNA, 19 nt, Artificial Sequence
  Description of Artificial Sequence: Synthetic oligonucleotide
cgccgccgccgccgcugcu

SEQ ID NO: 62370 - RNA, 19 nt, Artificial Sequence
  Description of Artificial Sequence: Synthetic oligonucleotide
cgccgcagucgccgccgcc

SEQ ID NO: 62371 - RNA, 19 nt, Artificial Sequence
  Description of Artificial Sequence: Synthetic oligonucleotide
aagaugugugacuuuggca

SEQ ID NO: 62372 - RNA, 19 nt, Artificial Sequence
  Description of Artificial Sequence: Synthetic oligonucleotide
auggggugguagagaaggu

SEQ ID NO: 62373 - RNA, 19 nt, Artificial Sequence
  Description of Artificial Sequence: Synthetic oligonucleotide
uggggugguagagaaggug

SEQ ID NO: 62374 - RNA, 19 nt, Artificial Sequence
  Description of Artificial Sequence: Synthetic oligonucleotide
agaugugugacuuuggcau

SEQ ID NO: 62375 - RNA, 19 nt, Artificial Sequence
  Description of Artificial Sequence: Synthetic oligonucleotide
ccuauggggugguagagaa

SEQ ID NO: 62376 - RNA, 19 nt, Artificial Sequence
  Description of Artificial Sequence: Synthetic oligonucleotide
ugaaccagaagggcuacaa

SEQ ID NO: 62377 - RNA, 19 nt, Artificial Sequence
  Description of Artificial Sequence: Synthetic oligonucleotide
augugugacuuuggcauca

SEQ ID NO: 62378 - RNA, 19 nt, Artificial Sequence
  Description of Artificial Sequence: Synthetic oligonucleotide
aagcugucggugauccaca

SEQ ID NO: 62379 - RNA, 19 nt, Artificial Sequence
  Description of Artificial Sequence: Synthetic oligonucleotide
ccagcagcugaagcaggug

SEQ ID NO: 62380 - RNA, 19 nt, Artificial Sequence
  Description of Artificial Sequence: Synthetic oligonucleotide
cugucggugauccacagag

SEQ ID NO: 62381 - RNA, 19 nt, Artificial Sequence
  Description of Artificial Sequence: Synthetic oligonucleotide
uuccagcagcugaagcagg

SEQ ID NO: 62382 - RNA, 19 nt, Artificial Sequence
  Description of Artificial Sequence: Synthetic oligonucleotide
agaagggcuacaaugucaa

SEQ ID NO: 62383 - RNA, 19 nt, Artificial Sequence
  Description of Artificial Sequence: Synthetic oligonucleotide
acaugacaauuccagagga

SEQ ID NO: 62384 - RNA, 19 nt, Artificial Sequence
  Description of Artificial Sequence: Synthetic oligonucleotide
cagaggacauccuugggga

SEQ ID NO: 62385 - RNA, 19 nt, Artificial Sequence
  Description of Artificial Sequence: Synthetic oligonucleotide
gccaugugaagauguguga

SEQ ID NO: 62386 - RNA, 19 nt, Artificial Sequence
  Description of Artificial Sequence: Synthetic oligonucleotide
agcugucggugauccacag

SEQ ID NO: 62387 - RNA, 19 nt, Artificial Sequence
  Description of Artificial Sequence: Synthetic oligonucleotide
augugaagaugugugacuu

SEQ ID NO: 62388 - RNA, 19 nt, Artificial Sequence
  Description of Artificial Sequence: Synthetic oligonucleotide
cugcaagcccuacauggcc

SEQ ID NO: 62389 - RNA, 19 nt, Artificial Sequence
  Description of Artificial Sequence: Synthetic oligonucleotide
uccagcagcugaagcaggu

SEQ ID NO: 62390 - RNA, 19 nt, Artificial Sequence
  Description of Artificial Sequence: Synthetic oligonucleotide
gagaaggugcggcacgccc

SEQ ID NO: 62391 - RNA, 19 nt, Artificial Sequence
  Description of Artificial Sequence: Synthetic oligonucleotide
gcugucggugauccacaga

SEQ ID NO: 62392 - RNA, 19 nt, Artificial Sequence
  Description of Artificial Sequence: Synthetic oligonucleotide
gaaacuuugagguggaggc

SEQ ID NO: 62393 - RNA, 19 nt, Artificial Sequence
  Description of Artificial Sequence: Synthetic oligonucleotide
aagggcuacaaugucaagu

SEQ ID NO: 62394 - RNA, 19 nt, Artificial Sequence
  Description of Artificial Sequence: Synthetic oligonucleotide
agcucauggacacauccuu

SEQ ID NO: 62395 - RNA, 19 nt, Artificial Sequence
  Description of Artificial Sequence: Synthetic oligonucleotide
ugucggugauccacagaga

SEQ ID NO: 62396 - RNA, 19 nt, Artificial Sequence
  Description of Artificial Sequence: Synthetic oligonucleotide
ccgaguuuguggacuucac

SEQ ID NO: 62397 - RNA, 19 nt, Artificial Sequence
  Description of Artificial Sequence: Synthetic oligonucleotide
gguggacucuguggccaag

SEQ ID NO: 62398 - RNA, 19 nt, Artificial Sequence
  Description of Artificial Sequence: Synthetic oligonucleotide
gaaccagaagggcuacaau

SEQ ID NO: 62399 - RNA, 19 nt, Artificial Sequence
  Description of Artificial Sequence: Synthetic oligonucleotide
uauggggugguagagaagg

SEQ ID NO: 62400 - RNA, 19 nt, Artificial Sequence
  Description of Artificial Sequence: Synthetic oligonucleotide
ggccaugugaagaugugug

SEQ ID NO: 62401 - RNA, 19 nt, Artificial Sequence
  Description of Artificial Sequence: Synthetic oligonucleotide
cagaagggcuacaauguca

SEQ ID NO: 62402 - RNA, 19 nt, Artificial Sequence
  Description of Artificial Sequence: Synthetic oligonucleotide
gaagaugugugacuuuggc

SEQ ID NO: 62403 - RNA, 19 nt, Artificial Sequence
  Description of Artificial Sequence: Synthetic oligonucleotide
gccuauggggugguagaga

SEQ ID NO: 62404 - RNA, 19 nt, Artificial Sequence
  Description of Artificial Sequence: Synthetic oligonucleotide
gagcucauggacacauccu

SEQ ID NO: 62405 - RNA, 19 nt, Artificial Sequence
  Description of Artificial Sequence: Synthetic oligonucleotide
ugugaagaugugugacuuu

SEQ ID NO: 62406 - RNA, 19 nt, Artificial Sequence
  Description of Artificial Sequence: Synthetic oligonucleotide
uggccauccugcgguuccc

SEQ ID NO: 62407 - RNA, 19 nt, Artificial Sequence
  Description of Artificial Sequence: Synthetic oligonucleotide
agggcuacaaugucaaguc

SEQ ID NO: 62408 - RNA, 19 nt, Artificial Sequence
  Description of Artificial Sequence: Synthetic oligonucleotide
ccagaggacauccuugggg

SEQ ID NO: 62409 - RNA, 19 nt, Artificial Sequence
  Description of Artificial Sequence: Synthetic oligonucleotide
caugugaagaugugugacu

SEQ ID NO: 62410 - RNA, 19 nt, Artificial Sequence
  Description of Artificial Sequence: Synthetic oligonucleotide
ccucgagccagcccgccag

SEQ ID NO: 62411 - RNA, 19 nt, Artificial Sequence
  Description of Artificial Sequence: Synthetic oligonucleotide
ucgagccagcccgccagca

SEQ ID NO: 62412 - RNA, 19 nt, Artificial Sequence
  Description of Artificial Sequence: Synthetic oligonucleotide
gccucgagccagcccgcca

SEQ ID NO: 62413 - RNA, 19 nt, Artificial Sequence
  Description of Artificial Sequence: Synthetic oligonucleotide
aguccgacgucuggagccu

SEQ ID NO: 62414 - RNA, 19 nt, Artificial Sequence
  Description of Artificial Sequence: Synthetic oligonucleotide
auuauucacagagauauca

SEQ ID NO: 62415 - RNA, 19 nt, Artificial Sequence
  Description of Artificial Sequence: Synthetic oligonucleotide
uuauucacagagauaucaa

SEQ ID NO: 62416 - RNA, 19 nt, Artificial Sequence
  Description of Artificial Sequence: Synthetic oligonucleotide
uauuaagcucugugacuuc

SEQ ID NO: 62417 - RNA, 19 nt, Artificial Sequence
  Description of Artificial Sequence: Synthetic oligonucleotide
gaagaaauuuuaggcaaaa

SEQ ID NO: 62418 - RNA, 19 nt, Artificial Sequence
  Description of Artificial Sequence: Synthetic oligonucleotide
aagaaauuuuaggcaaaau

SEQ ID NO: 62419 - RNA, 19 nt, Artificial Sequence
  Description of Artificial Sequence: Synthetic oligonucleotide
ggcagcggcagcggcaccc

SEQ ID NO: 62420 - RNA, 19 nt, Artificial Sequence
  Description of Artificial Sequence: Synthetic oligonucleotide
gcggcagcggcagcggcac

SEQ ID NO: 62421 - RNA, 19 nt, Artificial Sequence
  Description of Artificial Sequence: Synthetic oligonucleotide
cggcagcggcagcggcacc

SEQ ID NO: 62422 - RNA, 19 nt, Artificial Sequence
  Description of Artificial Sequence: Synthetic oligonucleotide
uguggacucuauugccaag

SEQ ID NO: 62423 - RNA, 19 nt, Artificial Sequence
  Description of Artificial Sequence: Synthetic oligonucleotide
uuggaucuguauggaacuc

SEQ ID NO: 62424 - RNA, 19 nt, Artificial Sequence
  Description of Artificial Sequence: Synthetic oligonucleotide
gcucugaugucuggaguuu

SEQ ID NO: 62425 - RNA, 19 nt, Artificial Sequence
  Description of Artificial Sequence: Synthetic oligonucleotide
cucugaugucuggaguuug

SEQ ID NO: 62426 - RNA, 19 nt, Artificial Sequence
  Description of Artificial Sequence: Synthetic oligonucleotide
cgcucugaugucuggaguu

SEQ ID NO: 62427 - RNA, 19 nt, Artificial Sequence
  Description of Artificial Sequence: Synthetic oligonucleotide
cugaaagaauagacccaag

SEQ ID NO: 62428 - RNA, 19 nt, Artificial Sequence
  Description of Artificial Sequence: Synthetic oligonucleotide
gugggcaaauaauggcagu

SEQ ID NO: 62429 - RNA, 19 nt, Artificial Sequence
  Description of Artificial Sequence: Synthetic oligonucleotide
acuucuuauggauuuggau

SEQ ID NO: 62430 - RNA, 19 nt, Artificial Sequence
  Description of Artificial Sequence: Synthetic oligonucleotide
ucuggaguuuggggaucac

SEQ ID NO: 62431 - RNA, 19 nt, Artificial Sequence
  Description of Artificial Sequence: Synthetic oligonucleotide
agugggcaaauaauggcag

SEQ ID NO: 62432 - RNA, 19 nt, Artificial Sequence
  Description of Artificial Sequence: Synthetic oligonucleotide
gggcaaauaauggcaguua

SEQ ID NO: 62433 - RNA, 19 nt, Artificial Sequence
  Description of Artificial Sequence: Synthetic oligonucleotide
ggcaaauaauggcaguuaa

SEQ ID NO: 62434 - RNA, 19 nt, Artificial Sequence
  Description of Artificial Sequence: Synthetic oligonucleotide
gcggcggcggcggcuccgg

SEQ ID NO: 62435 - RNA, 19 nt, Artificial Sequence
  Description of Artificial Sequence: Synthetic oligonucleotide
cggcggcggcggcuccggg

SEQ ID NO: 62436 - RNA, 19 nt, Artificial Sequence
  Description of Artificial Sequence: Synthetic oligonucleotide
cuuugccauuaugcaaaug

SEQ ID NO: 62437 - RNA, 19 nt, Artificial Sequence
  Description of Artificial Sequence: Synthetic oligonucleotide
cuuggagaaauuggacgag

SEQ ID NO: 62438 - RNA, 19 nt, Artificial Sequence
  Description of Artificial Sequence: Synthetic oligonucleotide
cggcagcggcacccccggc

SEQ ID NO: 62439 - RNA, 19 nt, Artificial Sequence
  Description of Artificial Sequence: Synthetic oligonucleotide
gcagcggcacccccggccc

SEQ ID NO: 62440 - RNA, 19 nt, Artificial Sequence
  Description of Artificial Sequence: Synthetic oligonucleotide
agcugugugauuuuggagu

SEQ ID NO: 62441 - RNA, 19 nt, Artificial Sequence
  Description of Artificial Sequence: Synthetic oligonucleotide
aagcugugugauuuuggag

SEQ ID NO: 62442 - RNA, 19 nt, Artificial Sequence
  Description of Artificial Sequence: Synthetic oligonucleotide
acauagagacgugaagccc

SEQ ID NO: 62443 - RNA, 19 nt, Artificial Sequence
  Description of Artificial Sequence: Synthetic oligonucleotide
ccgcuaccgccgucgccgc

SEQ ID NO: 62444 - RNA, 19 nt, Artificial Sequence
  Description of Artificial Sequence: Synthetic oligonucleotide
gaagcccuccaauaugcua

SEQ ID NO: 62445 - RNA, 19 nt, Artificial Sequence
  Description of Artificial Sequence: Synthetic oligonucleotide
ccgcagccgccgccggucc

SEQ ID NO: 62446 - RNA, 19 nt, Artificial Sequence
  Description of Artificial Sequence: Synthetic oligonucleotide
cgccgcuaccgccgucgcc

SEQ ID NO: 62447 - RNA, 19 nt, Artificial Sequence
  Description of Artificial Sequence: Synthetic oligonucleotide
gccgcuaccgccgucgccg

SEQ ID NO: 62448 - RNA, 19 nt, Artificial Sequence
  Description of Artificial Sequence: Synthetic oligonucleotide
gccgcagccgccgccgguc

SEQ ID NO: 62449 - RNA, 19 nt, Artificial Sequence
  Description of Artificial Sequence: Synthetic oligonucleotide
ucgccgcuaccgccgucgc

SEQ ID NO: 62450 - RNA, 19 nt, Artificial Sequence
  Description of Artificial Sequence: Synthetic oligonucleotide
gcuaccgccgucgccgccg

SEQ ID NO: 62451 - RNA, 19 nt, Artificial Sequence
  Description of Artificial Sequence: Synthetic oligonucleotide
auauggcgccugaaaggau

SEQ ID NO: 62452 - RNA, 19 nt, Artificial Sequence
  Description of Artificial Sequence: Synthetic oligonucleotide
cgcuaccgccgucgccgcc

SEQ ID NO: 62453 - RNA, 19 nt, Artificial Sequence
  Description of Artificial Sequence: Synthetic oligonucleotide
ccgaguccuugcccugcug

SEQ ID NO: 62454 - RNA, 19 nt, Artificial Sequence
  Description of Artificial Sequence: Synthetic oligonucleotide
uauauggcgccugaaagga

SEQ ID NO: 62455 - RNA, 19 nt, Artificial Sequence
  Description of Artificial Sequence: Synthetic oligonucleotide
uaccgccgucgccgccgcc

SEQ ID NO: 62456 - RNA, 19 nt, Artificial Sequence
  Description of Artificial Sequence: Synthetic oligonucleotide
uacauagagacgugaagcc

SEQ ID NO: 62457 - RNA, 19 nt, Artificial Sequence
  Description of Artificial Sequence: Synthetic oligonucleotide
uggagcuuaggaaucucuu

SEQ ID NO: 62458 - RNA, 19 nt, Artificial Sequence
  Description of Artificial Sequence: Synthetic oligonucleotide
ugaauucuauagccaagac

SEQ ID NO: 62459 - RNA, 19 nt, Artificial Sequence
  Description of Artificial Sequence: Synthetic oligonucleotide
gugaauucuauagccaaga

SEQ ID NO: 62460 - RNA, 19 nt, Artificial Sequence
  Description of Artificial Sequence: Synthetic oligonucleotide
uucacccucuguccucugc

SEQ ID NO: 62461 - RNA, 19 nt, Artificial Sequence
  Description of Artificial Sequence: Synthetic oligonucleotide
agagacgucaagccuucua

SEQ ID NO: 62462 - RNA, 19 nt, Artificial Sequence
  Description of Artificial Sequence: Synthetic oligonucleotide
ucacagagacgucaagccu

SEQ ID NO: 62463 - RNA, 19 nt, Artificial Sequence
  Description of Artificial Sequence: Synthetic oligonucleotide
cagagacgucaagccuucu

SEQ ID NO: 62464 - RNA, 19 nt, Artificial Sequence
  Description of Artificial Sequence: Synthetic oligonucleotide
gagacgucaagccuucuaa

SEQ ID NO: 62465 - RNA, 19 nt, Artificial Sequence
  Description of Artificial Sequence: Synthetic oligonucleotide
gcguacggggugguggaga

SEQ ID NO: 62466 - RNA, 19 nt, Artificial Sequence
  Description of Artificial Sequence: Synthetic oligonucleotide
uggagaagaugcggcacgu

SEQ ID NO: 62467 - RNA, 19 nt, Artificial Sequence
  Description of Artificial Sequence: Synthetic oligonucleotide
aauaaacccagagcucaac

SEQ ID NO: 62468 - RNA, 19 nt, Artificial Sequence
  Description of Artificial Sequence: Synthetic oligonucleotide
gaguuggccauccuucgau

SEQ ID NO: 62469 - RNA, 19 nt, Artificial Sequence
  Description of Artificial Sequence: Synthetic oligonucleotide
gaauaaacccagagcucaa

SEQ ID NO: 62470 - RNA, 19 nt, Artificial Sequence
  Description of Artificial Sequence: Synthetic oligonucleotide
guugcaaaccauacauggc

SEQ ID NO: 62471 - RNA, 19 nt, Artificial Sequence
  Description of Artificial Sequence: Synthetic oligonucleotide
ggucaagugaagaugugcg

SEQ ID NO: 62472 - RNA, 19 nt, Artificial Sequence
  Description of Artificial Sequence: Synthetic oligonucleotide
gcgauuuuggaaucagugg

SEQ ID NO: 62473 - RNA, 19 nt, Artificial Sequence
  Description of Artificial Sequence: Synthetic oligonucleotide
uggacucuguugcuaaaac

SEQ ID NO: 62474 - RNA, 19 nt, Artificial Sequence
  Description of Artificial Sequence: Synthetic oligonucleotide
gaagaugugcgauuuugga

SEQ ID NO: 62475 - RNA, 19 nt, Artificial Sequence
  Description of Artificial Sequence: Synthetic oligonucleotide
gugcgauuuuggaaucagu

SEQ ID NO: 62476 - RNA, 19 nt, Artificial Sequence
  Description of Artificial Sequence: Synthetic oligonucleotide
acauuuggagucugggcau

SEQ ID NO: 62477 - RNA, 19 nt, Artificial Sequence
  Description of Artificial Sequence: Synthetic oligonucleotide
cguacggggugguggagaa

SEQ ID NO: 62478 - RNA, 19 nt, Artificial Sequence
  Description of Artificial Sequence: Synthetic oligonucleotide
augugcgauuuuggaauca

SEQ ID NO: 62479 - RNA, 19 nt, Artificial Sequence
  Description of Artificial Sequence: Synthetic oligonucleotide
gagcucauggauacaucac

SEQ ID NO: 62480 - RNA, 19 nt, Artificial Sequence
  Description of Artificial Sequence: Synthetic oligonucleotide
uuucagcagcucaaacagg

SEQ ID NO: 62481 - RNA, 19 nt, Artificial Sequence
  Description of Artificial Sequence: Synthetic oligonucleotide
uggccauccuucgauuucc

SEQ ID NO: 62482 - RNA, 19 nt, Artificial Sequence
  Description of Artificial Sequence: Synthetic oligonucleotide
gguggacucuguugcuaaa

SEQ ID NO: 62483 - RNA, 19 nt, Artificial Sequence
  Description of Artificial Sequence: Synthetic oligonucleotide
aagugaagaugugcgauuu

SEQ ID NO: 62484 - RNA, 19 nt, Artificial Sequence
  Description of Artificial Sequence: Synthetic oligonucleotide
guacggggugguggagaag

SEQ ID NO: 62485 - RNA, 19 nt, Artificial Sequence
  Description of Artificial Sequence: Synthetic oligonucleotide
gaacuuugaggugaaggca

SEQ ID NO: 62486 - RNA, 19 nt, Artificial Sequence
  Description of Artificial Sequence: Synthetic oligonucleotide
gaugugcgauuuuggaauc

SEQ ID NO: 62487 - RNA, 19 nt, Artificial Sequence
  Description of Artificial Sequence: Synthetic oligonucleotide
ugaguuggccauccuucga

SEQ ID NO: 62488 - RNA, 19 nt, Artificial Sequence
  Description of Artificial Sequence: Synthetic oligonucleotide
cgauuuuggaaucaguggc

SEQ ID NO: 62489 - RNA, 19 nt, Artificial Sequence
  Description of Artificial Sequence: Synthetic oligonucleotide
gucaagugaagaugugcga

SEQ ID NO: 62490 - RNA, 19 nt, Artificial Sequence
  Description of Artificial Sequence: Synthetic oligonucleotide
aguuggccauccuucgauu

SEQ ID NO: 62491 - RNA, 19 nt, Artificial Sequence
  Description of Artificial Sequence: Synthetic oligonucleotide
ucagcagcucaaacaggug

SEQ ID NO: 62492 - RNA, 19 nt, Artificial Sequence
  Description of Artificial Sequence: Synthetic oligonucleotide
uugcaaaccauacauggcc

SEQ ID NO: 62493 - RNA, 19 nt, Artificial Sequence
  Description of Artificial Sequence: Synthetic oligonucleotide
gacauuuggagucugggca

SEQ ID NO: 62494 - RNA, 19 nt, Artificial Sequence
  Description of Artificial Sequence: Synthetic oligonucleotide
cagaggacaucuuagggaa

SEQ ID NO: 62495 - RNA, 19 nt, Artificial Sequence
  Description of Artificial Sequence: Synthetic oligonucleotide
uucagcagcucaaacaggu

SEQ ID NO: 62496 - RNA, 19 nt, Artificial Sequence
  Description of Artificial Sequence: Synthetic oligonucleotide
caagugaagaugugcgauu

SEQ ID NO: 62497 - RNA, 19 nt, Artificial Sequence
  Description of Artificial Sequence: Synthetic oligonucleotide
ugcgauuuuggaaucagug

SEQ ID NO: 62498 - RNA, 19 nt, Artificial Sequence
  Description of Artificial Sequence: Synthetic oligonucleotide
auuuggagucugggcauca

SEQ ID NO: 62499 - RNA, 19 nt, Artificial Sequence
  Description of Artificial Sequence: Synthetic oligonucleotide
agaauaaacccagagcuca

SEQ ID NO: 62500 - RNA, 19 nt, Artificial Sequence
  Description of Artificial Sequence: Synthetic oligonucleotide
agugaagaugugcgauuuu

SEQ ID NO: 62501 - RNA, 19 nt, Artificial Sequence
  Description of Artificial Sequence: Synthetic oligonucleotide
cauuuggagucugggcauc

SEQ ID NO: 62502 - RNA, 19 nt, Artificial Sequence
  Description of Artificial Sequence: Synthetic oligonucleotide
agcucauggauacaucacu

SEQ ID NO: 62503 - RNA, 19 nt, Artificial Sequence
  Description of Artificial Sequence: Synthetic oligonucleotide
gagaagaugcggcacgugc

SEQ ID NO: 62504 - RNA, 19 nt, Artificial Sequence
  Description of Artificial Sequence: Synthetic oligonucleotide
gguugcaaaccauacaugg

SEQ ID NO: 62505 - RNA, 19 nt, Artificial Sequence
  Description of Artificial Sequence: Synthetic oligonucleotide
gacucuguugcuaaaacaa

SEQ ID NO: 62506 - RNA, 19 nt, Artificial Sequence
  Description of Artificial Sequence: Synthetic oligonucleotide
ggacucuguugcuaaaaca

SEQ ID NO: 62507 - RNA, 19 nt, Artificial Sequence
  Description of Artificial Sequence: Synthetic oligonucleotide
cuacugauggauuuggaua

SEQ ID NO: 62508 - RNA, 19 nt, Artificial Sequence
  Description of Artificial Sequence: Synthetic oligonucleotide
ggugugcauuuccaucuug

SEQ ID NO: 62509 - RNA, 19 nt, Artificial Sequence
  Description of Artificial Sequence: Synthetic oligonucleotide
gcgggcagaucauggcagu

SEQ ID NO: 62510 - RNA, 19 nt, Artificial Sequence
  Description of Artificial Sequence: Synthetic oligonucleotide
agcgggcagaucauggcag

SEQ ID NO: 62511 - RNA, 19 nt, Artificial Sequence
  Description of Artificial Sequence: Synthetic oligonucleotide
uacugauggauuuggauau

SEQ ID NO: 62512 - RNA, 19 nt, Artificial Sequence
  Description of Artificial Sequence: Synthetic oligonucleotide
caccgcgacgucaagcccu

SEQ ID NO: 62513 - RNA, 19 nt, Artificial Sequence
  Description of Artificial Sequence: Synthetic oligonucleotide
ccgcgacgucaagcccucc

SEQ ID NO: 62514 - RNA, 19 nt, Artificial Sequence
  Description of Artificial Sequence: Synthetic oligonucleotide
cgcgacgucaagcccucca

SEQ ID NO: 62515 - RNA, 19 nt, Artificial Sequence
  Description of Artificial Sequence: Synthetic oligonucleotide
ccagaucaagcucugcgac

SEQ ID NO: 62516 - RNA, 19 nt, Artificial Sequence
  Description of Artificial Sequence: Synthetic oligonucleotide
ggccagaucaagcucugcg

SEQ ID NO: 62517 - RNA, 19 nt, Artificial Sequence
  Description of Artificial Sequence: Synthetic oligonucleotide
accgcgacgucaagcccuc

SEQ ID NO: 62518 - RNA, 19 nt, Artificial Sequence
  Description of Artificial Sequence: Synthetic oligonucleotide
gagguccucaccaaagucc

SEQ ID NO: 62519 - RNA, 19 nt, Artificial Sequence
  Description of Artificial Sequence: Synthetic oligonucleotide
cccgcagcaccccacgccc

SEQ ID NO: 62520 - RNA, 19 nt, Artificial Sequence
  Description of Artificial Sequence: Synthetic oligonucleotide
uucaucaagcgcuacgaga

SEQ ID NO: 62521 - RNA, 19 nt, Artificial Sequence
  Description of Artificial Sequence: Synthetic oligonucleotide
cucccuggaacagaagcug

SEQ ID NO: 62522 - RNA, 19 nt, Artificial Sequence
  Description of Artificial Sequence: Synthetic oligonucleotide
ucgggccagcccaccagcc

SEQ ID NO: 62523 - RNA, 19 nt, Artificial Sequence
  Description of Artificial Sequence: Synthetic oligonucleotide
ggcucgggccagcccacca

SEQ ID NO: 62524 - RNA, 19 nt, Artificial Sequence
  Description of Artificial Sequence: Synthetic oligonucleotide
gcucgggccagcccaccag

SEQ ID NO: 62525 - RNA, 19 nt, Artificial Sequence
  Description of Artificial Sequence: Synthetic oligonucleotide
uggacuccaaagccaagac

SEQ ID NO: 62526 - RNA, 19 nt, Artificial Sequence
  Description of Artificial Sequence: Synthetic oligonucleotide
guggacuccaaagccaaga

SEQ ID NO: 62527 - RNA, 19 nt, Artificial Sequence
  Description of Artificial Sequence: Synthetic oligonucleotide
ccaaaguauaauaagcuac

SEQ ID NO: 62528 - RNA, 19 nt, Artificial Sequence
  Description of Artificial Sequence: Synthetic oligonucleotide
ugccccuacaucgugcagu

SEQ ID NO: 62529 - RNA, 19 nt, Artificial Sequence
  Description of Artificial Sequence: Synthetic oligonucleotide
ccuggagaacuugggcgag

SEQ ID NO: 62530 - RNA, 19 nt, Artificial Sequence
  Description of Artificial Sequence: Synthetic oligonucleotide
ucgcccucuguccccugcu

SEQ ID NO: 62531 - RNA, 19 nt, Artificial Sequence
  Description of Artificial Sequence: Synthetic oligonucleotide
gucgcccucuguccccugc

SEQ ID NO: 62532 - RNA, 19 nt, Artificial Sequence
  Description of Artificial Sequence: Synthetic oligonucleotide
cgcccucuguccccugcuc

SEQ ID NO: 62533 - RNA, 19 nt, Artificial Sequence
  Description of Artificial Sequence: Synthetic oligonucleotide
gucauccaccgcgacguca

SEQ ID NO: 62534 - RNA, 19 nt, Artificial Sequence
  Description of Artificial Sequence: Synthetic oligonucleotide
uggagccugggcaucucgu

SEQ ID NO: 62535 - RNA, 19 nt, Artificial Sequence
  Description of Artificial Sequence: Synthetic oligonucleotide
ggagccugggcaucucguu

SEQ ID NO: 62536 - RNA, 19 nt, Artificial Sequence
  Description of Artificial Sequence: Synthetic oligonucleotide
gagccugggcaucucguug

SEQ ID NO: 62537 - RNA, 19 nt, Artificial Sequence
  Description of Artificial Sequence: Synthetic oligonucleotide
uccaccgcgacgucaagcc

SEQ ID NO: 62538 - RNA, 19 nt, Artificial Sequence
  Description of Artificial Sequence: Synthetic oligonucleotide
ugucauccaccgcgacguc

SEQ ID NO: 62539 - RNA, 19 nt, Artificial Sequence
  Description of Artificial Sequence: Synthetic oligonucleotide
auggagccugggcaucucg

SEQ ID NO: 62540 - RNA, 19 nt, Artificial Sequence
  Description of Artificial Sequence: Synthetic oligonucleotide
ucauccaccgcgacgucaa

SEQ ID NO: 62541 - RNA, 19 nt, Artificial Sequence
  Description of Artificial Sequence: Synthetic oligonucleotide
auccaccgcgacgucaagc

SEQ ID NO: 62542 - RNA, 19 nt, Artificial Sequence
  Description of Artificial Sequence: Synthetic oligonucleotide
cauccaccgcgacgucaag

SEQ ID NO: 62543 - RNA, 19 nt, Artificial Sequence
  Description of Artificial Sequence: Synthetic oligonucleotide
gcuggcaauggcggugugg

SEQ ID NO: 62544 - RNA, 19 nt, Artificial Sequence
  Description of Artificial Sequence: Synthetic oligonucleotide
ucauaagggagcugcaggu

SEQ ID NO: 62545 - RNA, 19 nt, Artificial Sequence
  Description of Artificial Sequence: Synthetic oligonucleotide
uuggggucagcgggcagcu

SEQ ID NO: 62546 - RNA, 19 nt, Artificial Sequence
  Description of Artificial Sequence: Synthetic oligonucleotide
gcagguucugcaugagugc

SEQ ID NO: 62547 - RNA, 19 nt, Artificial Sequence
  Description of Artificial Sequence: Synthetic oligonucleotide
cuugaggccuuucuuaccc

SEQ ID NO: 62548 - RNA, 19 nt, Artificial Sequence
  Description of Artificial Sequence: Synthetic oligonucleotide
gauuuugugaauaaaugcu

SEQ ID NO: 62549 - RNA, 19 nt, Artificial Sequence
  Description of Artificial Sequence: Synthetic oligonucleotide
aggggacucauuacucugu

SEQ ID NO: 62550 - RNA, 19 nt, Artificial Sequence
  Description of Artificial Sequence: Synthetic oligonucleotide
uccaggggacucauuacuc

SEQ ID NO: 62551 - RNA, 19 nt, Artificial Sequence
  Description of Artificial Sequence: Synthetic oligonucleotide
ccggaaccagaucauaagg

SEQ ID NO: 62552 - RNA, 19 nt, Artificial Sequence
  Description of Artificial Sequence: Synthetic oligonucleotide
ucagcgggcagcucaucga

SEQ ID NO: 62553 - RNA, 19 nt, Artificial Sequence
  Description of Artificial Sequence: Synthetic oligonucleotide
cauggagcacauggaugga

SEQ ID NO: 62554 - RNA, 19 nt, Artificial Sequence
  Description of Artificial Sequence: Synthetic oligonucleotide
cugcaugagugcaacucuc

SEQ ID NO: 62555 - RNA, 19 nt, Artificial Sequence
  Description of Artificial Sequence: Synthetic oligonucleotide
gacuuuggggucagcgggc

SEQ ID NO: 62556 - RNA, 19 nt, Artificial Sequence
  Description of Artificial Sequence: Synthetic oligonucleotide
uucugcaugagugcaacuc

SEQ ID NO: 62557 - RNA, 19 nt, Artificial Sequence
  Description of Artificial Sequence: Synthetic oligonucleotide
agcugggggcuggcaaugg

SEQ ID NO: 62558 - RNA, 19 nt, Artificial Sequence
  Description of Artificial Sequence: Synthetic oligonucleotide
gaaccagaucauaagggag

SEQ ID NO: 62559 - RNA, 19 nt, Artificial Sequence
  Description of Artificial Sequence: Synthetic oligonucleotide
gcucugugacuuugggguc

SEQ ID NO: 62560 - RNA, 19 nt, Artificial Sequence
  Description of Artificial Sequence: Synthetic oligonucleotide
ccagaucauaagggagcug

SEQ ID NO: 62561 - RNA, 19 nt, Artificial Sequence
  Description of Artificial Sequence: Synthetic oligonucleotide
cucccauggcaauuuuuga

SEQ ID NO: 62562 - RNA, 19 nt, Artificial Sequence
  Description of Artificial Sequence: Synthetic oligonucleotide
cguggggagaucaagcucu

SEQ ID NO: 62563 - RNA, 19 nt, Artificial Sequence
  Description of Artificial Sequence: Synthetic oligonucleotide
uugaggccuuucuuaccca

SEQ ID NO: 62564 - RNA, 19 nt, Artificial Sequence
  Description of Artificial Sequence: Synthetic oligonucleotide
gucaacgagccuccuccaa

SEQ ID NO: 62565 - RNA, 19 nt, Artificial Sequence
  Description of Artificial Sequence: Synthetic oligonucleotide
uggggucagcgggcagcuc

SEQ ID NO: 62566 - RNA, 19 nt, Artificial Sequence
  Description of Artificial Sequence: Synthetic oligonucleotide
aucauaagggagcugcagg

SEQ ID NO: 62567 - RNA, 19 nt, Artificial Sequence
  Description of Artificial Sequence: Synthetic oligonucleotide
gaucauaagggagcugcag

SEQ ID NO: 62568 - RNA, 19 nt, Artificial Sequence
  Description of Artificial Sequence: Synthetic oligonucleotide
gguucugcaugagugcaac

SEQ ID NO: 62569 - RNA, 19 nt, Artificial Sequence
  Description of Artificial Sequence: Synthetic oligonucleotide
cuggccuggucauggccag

SEQ ID NO: 62570 - RNA, 19 nt, Artificial Sequence
  Description of Artificial Sequence: Synthetic oligonucleotide
uagucaacgagccuccucc

SEQ ID NO: 62571 - RNA, 19 nt, Artificial Sequence
  Description of Artificial Sequence: Synthetic oligonucleotide
cagaucauaagggagcugc

SEQ ID NO: 62572 - RNA, 19 nt, Artificial Sequence
  Description of Artificial Sequence: Synthetic oligonucleotide
agaucauaagggagcugca

SEQ ID NO: 62573 - RNA, 19 nt, Artificial Sequence
  Description of Artificial Sequence: Synthetic oligonucleotide
cucugugacuuugggguca

SEQ ID NO: 62574 - RNA, 19 nt, Artificial Sequence
  Description of Artificial Sequence: Synthetic oligonucleotide
gggcuucuauggugcguuc

SEQ ID NO: 62575 - RNA, 19 nt, Artificial Sequence
  Description of Artificial Sequence: Synthetic oligonucleotide
agaugccaaggagcuggag

SEQ ID NO: 62576 - RNA, 19 nt, Artificial Sequence
  Description of Artificial Sequence: Synthetic oligonucleotide
gagcuugaugagcagcagc

SEQ ID NO: 62577 - RNA, 19 nt, Artificial Sequence
  Description of Artificial Sequence: Synthetic oligonucleotide
cagaugccaaggagcugga

SEQ ID NO: 62578 - RNA, 19 nt, Artificial Sequence
  Description of Artificial Sequence: Synthetic oligonucleotide
ugaggaaguggauuuugca

SEQ ID NO: 62579 - RNA, 19 nt, Artificial Sequence
  Description of Artificial Sequence: Synthetic oligonucleotide
ggggacucauuacucugug

SEQ ID NO: 62580 - RNA, 19 nt, Artificial Sequence
  Description of Artificial Sequence: Synthetic oligonucleotide
ccucccauggcaauuuuug

SEQ ID NO: 62581 - RNA, 19 nt, Artificial Sequence
  Description of Artificial Sequence: Synthetic oligonucleotide
cuuuggggucagcgggcag

SEQ ID NO: 62582 - RNA, 19 nt, Artificial Sequence
  Description of Artificial Sequence: Synthetic oligonucleotide
uugugaauaaaugcuuaau

SEQ ID NO: 62583 - RNA, 19 nt, Artificial Sequence
  Description of Artificial Sequence: Synthetic oligonucleotide
ucaacgagccuccuccaaa

SEQ ID NO: 62584 - RNA, 19 nt, Artificial Sequence
  Description of Artificial Sequence: Synthetic oligonucleotide
ugggcuucuauggugcguu

SEQ ID NO: 62585 - RNA, 19 nt, Artificial Sequence
  Description of Artificial Sequence: Synthetic oligonucleotide
cugugacuuuggggucagc

SEQ ID NO: 62586 - RNA, 19 nt, Artificial Sequence
  Description of Artificial Sequence: Synthetic oligonucleotide
ugaggccuuucuuacccag

SEQ ID NO: 62587 - RNA, 19 nt, Artificial Sequence
  Description of Artificial Sequence: Synthetic oligonucleotide
ggaaguggauuuugcaggu

SEQ ID NO: 62588 - RNA, 19 nt, Artificial Sequence
  Description of Artificial Sequence: Synthetic oligonucleotide
ugcaugagugcaacucucc

SEQ ID NO: 62589 - RNA, 19 nt, Artificial Sequence
  Description of Artificial Sequence: Synthetic oligonucleotide
ggagguaucccaucccucc

SEQ ID NO: 62590 - RNA, 19 nt, Artificial Sequence
  Description of Artificial Sequence: Synthetic oligonucleotide
gacucauuacucugugcag

SEQ ID NO: 62591 - RNA, 19 nt, Artificial Sequence
  Description of Artificial Sequence: Synthetic oligonucleotide
gcuucuauggugcguucua

SEQ ID NO: 62592 - RNA, 19 nt, Artificial Sequence
  Description of Artificial Sequence: Synthetic oligonucleotide
ucuauggugcguucuacag

SEQ ID NO: 62593 - RNA, 19 nt, Artificial Sequence
  Description of Artificial Sequence: Synthetic oligonucleotide
ccagaugccaaggagcugg

SEQ ID NO: 62594 - RNA, 19 nt, Artificial Sequence
  Description of Artificial Sequence: Synthetic oligonucleotide
ggucagcgggcagcucauc

SEQ ID NO: 62595 - RNA, 19 nt, Artificial Sequence
  Description of Artificial Sequence: Synthetic oligonucleotide
gcugcagguucugcaugag

SEQ ID NO: 62596 - RNA, 19 nt, Artificial Sequence
  Description of Artificial Sequence: Synthetic oligonucleotide
caggggacucauuacucug

SEQ ID NO: 62597 - RNA, 19 nt, Artificial Sequence
  Description of Artificial Sequence: Synthetic oligonucleotide
cagcgggcagcucaucgac

SEQ ID NO: 62598 - RNA, 19 nt, Artificial Sequence
  Description of Artificial Sequence: Synthetic oligonucleotide
uugggagguaucccauccc

SEQ ID NO: 62599 - RNA, 19 nt, Artificial Sequence
  Description of Artificial Sequence: Synthetic oligonucleotide
ugagugcaacucuccguac

SEQ ID NO: 62600 - RNA, 19 nt, Artificial Sequence
  Description of Artificial Sequence: Synthetic oligonucleotide
cuucuauggugcguucuac

SEQ ID NO: 62601 - RNA, 19 nt, Artificial Sequence
  Description of Artificial Sequence: Synthetic oligonucleotide
ugacuuuggggucagcggg

SEQ ID NO: 62602 - RNA, 19 nt, Artificial Sequence
  Description of Artificial Sequence: Synthetic oligonucleotide
gccuuucuuacccagaagc

SEQ ID NO: 62603 - RNA, 19 nt, Artificial Sequence
  Description of Artificial Sequence: Synthetic oligonucleotide
agcgccuugaggccuuucu

SEQ ID NO: 62604 - RNA, 19 nt, Artificial Sequence
  Description of Artificial Sequence: Synthetic oligonucleotide
agguaucccaucccuccuc

SEQ ID NO: 62605 - RNA, 19 nt, Artificial Sequence
  Description of Artificial Sequence: Synthetic oligonucleotide
accagaucauaagggagcu

SEQ ID NO: 62606 - RNA, 19 nt, Artificial Sequence
  Description of Artificial Sequence: Synthetic oligonucleotide
ggaggccuugcagaagaag

SEQ ID NO: 62607 - RNA, 19 nt, Artificial Sequence
  Description of Artificial Sequence: Synthetic oligonucleotide
cagguucugcaugagugca

SEQ ID NO: 62608 - RNA, 19 nt, Artificial Sequence
  Description of Artificial Sequence: Synthetic oligonucleotide
ggagcugcagguucugcau

SEQ ID NO: 62609 - RNA, 19 nt, Artificial Sequence
  Description of Artificial Sequence: Synthetic oligonucleotide
augagugcaacucuccgua

SEQ ID NO: 62610 - RNA, 19 nt, Artificial Sequence
  Description of Artificial Sequence: Synthetic oligonucleotide
guugggagguaucccaucc

SEQ ID NO: 62611 - RNA, 19 nt, Artificial Sequence
  Description of Artificial Sequence: Synthetic oligonucleotide
aagcgccuugaggccuuuc

SEQ ID NO: 62612 - RNA, 19 nt, Artificial Sequence
  Description of Artificial Sequence: Synthetic oligonucleotide
caugagugcaacucuccgu

SEQ ID NO: 62613 - RNA, 19 nt, Artificial Sequence
  Description of Artificial Sequence: Synthetic oligonucleotide
ggagaaagcuaaaaaaaaa

SEQ ID NO: 62614 - RNA, 19 nt, Artificial Sequence
  Description of Artificial Sequence: Synthetic oligonucleotide
ucuggccuggucauggcca

SEQ ID NO: 62615 - RNA, 19 nt, Artificial Sequence
  Description of Artificial Sequence: Synthetic oligonucleotide
guucugcaugagugcaacu

SEQ ID NO: 62616 - RNA, 19 nt, Artificial Sequence
  Description of Artificial Sequence: Synthetic oligonucleotide
auagucaacgagccuccuc

SEQ ID NO: 62617 - RNA, 19 nt, Artificial Sequence
  Description of Artificial Sequence: Synthetic oligonucleotide
ucugugacuuuggggucag

SEQ ID NO: 62618 - RNA, 19 nt, Artificial Sequence
  Description of Artificial Sequence: Synthetic oligonucleotide
ggaaccagaucauaaggga

SEQ ID NO: 62619 - RNA, 19 nt, Artificial Sequence
  Description of Artificial Sequence: Synthetic oligonucleotide
ugcagguucugcaugagug

SEQ ID NO: 62620 - RNA, 19 nt, Artificial Sequence
  Description of Artificial Sequence: Synthetic oligonucleotide
uggagcacauggauggagg

SEQ ID NO: 62621 - RNA, 19 nt, Artificial Sequence
  Description of Artificial Sequence: Synthetic oligonucleotide
cuggcaauggcgguguggu

SEQ ID NO: 62622 - RNA, 19 nt, Artificial Sequence
  Description of Artificial Sequence: Synthetic oligonucleotide
gcaugagugcaacucuccg

SEQ ID NO: 62623 - RNA, 19 nt, Artificial Sequence
  Description of Artificial Sequence: Synthetic oligonucleotide
ggccuuucuuacccagaag

SEQ ID NO: 62624 - RNA, 19 nt, Artificial Sequence
  Description of Artificial Sequence: Synthetic oligonucleotide
cugggggcuggcaauggcg

SEQ ID NO: 62625 - RNA, 19 nt, Artificial Sequence
  Description of Artificial Sequence: Synthetic oligonucleotide
gcugggggcuggcaauggc

SEQ ID NO: 62626 - RNA, 19 nt, Artificial Sequence
  Description of Artificial Sequence: Synthetic oligonucleotide
gggacucauuacucugugc

SEQ ID NO: 62627 - RNA, 19 nt, Artificial Sequence
  Description of Artificial Sequence: Synthetic oligonucleotide
acuuuggggucagcgggca

SEQ ID NO: 62628 - RNA, 19 nt, Artificial Sequence
  Description of Artificial Sequence: Synthetic oligonucleotide
auggagcacauggauggag

SEQ ID NO: 62629 - RNA, 19 nt, Artificial Sequence
  Description of Artificial Sequence: Synthetic oligonucleotide
ugggggcuggcaauggcgg

SEQ ID NO: 62630 - RNA, 19 nt, Artificial Sequence
  Description of Artificial Sequence: Synthetic oligonucleotide
uggaggccuugcagaagaa

SEQ ID NO: 62631 - RNA, 19 nt, Artificial Sequence
  Description of Artificial Sequence: Synthetic oligonucleotide
aggccuugcagaagaagcu

SEQ ID NO: 62632 - RNA, 19 nt, Artificial Sequence
  Description of Artificial Sequence: Synthetic oligonucleotide
uuuggggucagcgggcagc

SEQ ID NO: 62633 - RNA, 19 nt, Artificial Sequence
  Description of Artificial Sequence: Synthetic oligonucleotide
cggaaccagaucauaaggg

SEQ ID NO: 62634 - RNA, 19 nt, Artificial Sequence
  Description of Artificial Sequence: Synthetic oligonucleotide
gaugccaaggagcuggagc

SEQ ID NO: 62635 - RNA, 19 nt, Artificial Sequence
  Description of Artificial Sequence: Synthetic oligonucleotide
uucuauggugcguucuaca

SEQ ID NO: 62636 - RNA, 19 nt, Artificial Sequence
  Description of Artificial Sequence: Synthetic oligonucleotide
gguaucccaucccuccucc

SEQ ID NO: 62637 - RNA, 19 nt, Artificial Sequence
  Description of Artificial Sequence: Synthetic oligonucleotide
cgugggcuucuauggugcg

SEQ ID NO: 62638 - RNA, 19 nt, Artificial Sequence
  Description of Artificial Sequence: Synthetic oligonucleotide
agggagcugcagguucugc

SEQ ID NO: 62639 - RNA, 19 nt, Artificial Sequence
  Description of Artificial Sequence: Synthetic oligonucleotide
auuuugugaauaaaugcuu

SEQ ID NO: 62640 - RNA, 19 nt, Artificial Sequence
  Description of Artificial Sequence: Synthetic oligonucleotide
ggacucauuacucugugca

SEQ ID NO: 62641 - RNA, 19 nt, Artificial Sequence
  Description of Artificial Sequence: Synthetic oligonucleotide
agguucugcaugagugcaa

SEQ ID NO: 62642 - RNA, 19 nt, Artificial Sequence
  Description of Artificial Sequence: Synthetic oligonucleotide
ggcuucuauggugcguucu

SEQ ID NO: 62643 - RNA, 19 nt, Artificial Sequence
  Description of Artificial Sequence: Synthetic oligonucleotide
ugaacaaauuuuaggaaaa

SEQ ID NO: 62644 - RNA, 19 nt, Artificial Sequence
  Description of Artificial Sequence: Synthetic oligonucleotide
aauuccugaacaaauuuua

SEQ ID NO: 62645 - RNA, 19 nt, Artificial Sequence
  Description of Artificial Sequence: Synthetic oligonucleotide
aacaaauuuuaggaaaagu

SEQ ID NO: 62646 - RNA, 19 nt, Artificial Sequence
  Description of Artificial Sequence: Synthetic oligonucleotide
ccugaacaaauuuuaggaa

SEQ ID NO: 62647 - RNA, 19 nt, Artificial Sequence
  Description of Artificial Sequence: Synthetic oligonucleotide
uccugaacaaauuuuagga

SEQ ID NO: 62648 - RNA, 19 nt, Artificial Sequence
  Description of Artificial Sequence: Synthetic oligonucleotide
cugaacaaauuuuaggaaa

SEQ ID NO: 62649 - RNA, 19 nt, Artificial Sequence
  Description of Artificial Sequence: Synthetic oligonucleotide
ugagcggccagcucauaga

SEQ ID NO: 62650 - RNA, 19 nt, Artificial Sequence
  Description of Artificial Sequence: Synthetic oligonucleotide
gccaccuccuaagcugccc

SEQ ID NO: 62651 - RNA, 19 nt, Artificial Sequence
  Description of Artificial Sequence: Synthetic oligonucleotide
aagccggccauccggaacc

SEQ ID NO: 62652 - RNA, 19 nt, Artificial Sequence
  Description of Artificial Sequence: Synthetic oligonucleotide
gugggcacgcgcuccuaca

SEQ ID NO: 62653 - RNA, 19 nt, Artificial Sequence
  Description of Artificial Sequence: Synthetic oligonucleotide
cuucgugggcacgcgcucc

SEQ ID NO: 62654 - RNA, 19 nt, Artificial Sequence
  Description of Artificial Sequence: Synthetic oligonucleotide
ggcugaaccagcccggcac

SEQ ID NO: 62655 - RNA, 19 nt, Artificial Sequence
  Description of Artificial Sequence: Synthetic oligonucleotide
cacacauuacucggugcag

SEQ ID NO: 62656 - RNA, 19 nt, Artificial Sequence
  Description of Artificial Sequence: Synthetic oligonucleotide
gggcacacauuacucggug

SEQ ID NO: 62657 - RNA, 19 nt, Artificial Sequence
  Description of Artificial Sequence: Synthetic oligonucleotide
acgggauggauagccggcc

SEQ ID NO: 62658 - RNA, 19 nt, Artificial Sequence
  Description of Artificial Sequence: Synthetic oligonucleotide
agccggccugccauggcca

SEQ ID NO: 62659 - RNA, 19 nt, Artificial Sequence
  Description of Artificial Sequence: Synthetic oligonucleotide
gugagcggccagcucauag

SEQ ID NO: 62660 - RNA, 19 nt, Artificial Sequence
  Description of Artificial Sequence: Synthetic oligonucleotide
ugaacgagccaccuccuaa

SEQ ID NO: 62661 - RNA, 19 nt, Artificial Sequence
  Description of Artificial Sequence: Synthetic oligonucleotide
cgggauggauagccggccu

SEQ ID NO: 62662 - RNA, 19 nt, Artificial Sequence
  Description of Artificial Sequence: Synthetic oligonucleotide
cucuagaggggagaucaag

SEQ ID NO: 62663 - RNA, 19 nt, Artificial Sequence
  Description of Artificial Sequence: Synthetic oligonucleotide
gccggccauccggaaccag

SEQ ID NO: 62664 - RNA, 19 nt, Artificial Sequence
  Description of Artificial Sequence: Synthetic oligonucleotide
cagggcacacauuacucgg

SEQ ID NO: 62665 - RNA, 19 nt, Artificial Sequence
  Description of Artificial Sequence: Synthetic oligonucleotide
ccaccuccuaagcugccca

SEQ ID NO: 62666 - RNA, 19 nt, Artificial Sequence
  Description of Artificial Sequence: Synthetic oligonucleotide
cgugggcacgcgcuccuac

SEQ ID NO: 62667 - RNA, 19 nt, Artificial Sequence
  Description of Artificial Sequence: Synthetic oligonucleotide
aucauccgcgagcugcagg

SEQ ID NO: 62668 - RNA, 19 nt, Artificial Sequence
  Description of Artificial Sequence: Synthetic oligonucleotide
ggcacacauuacucggugc

SEQ ID NO: 62669 - RNA, 19 nt, Artificial Sequence
  Description of Artificial Sequence: Synthetic oligonucleotide
agaucaagccggccauccg

SEQ ID NO: 62670 - RNA, 19 nt, Artificial Sequence
  Description of Artificial Sequence: Synthetic oligonucleotide
ucauccgcgagcugcaggu

SEQ ID NO: 62671 - RNA, 19 nt, Artificial Sequence
  Description of Artificial Sequence: Synthetic oligonucleotide
acgagccaccuccuaagcu

SEQ ID NO: 62672 - RNA, 19 nt, Artificial Sequence
  Description of Artificial Sequence: Synthetic oligonucleotide
gaucaagccggccauccgg

SEQ ID NO: 62673 - RNA, 19 nt, Artificial Sequence
  Description of Artificial Sequence: Synthetic oligonucleotide
caagccggccauccggaac

SEQ ID NO: 62674 - RNA, 19 nt, Artificial Sequence
  Description of Artificial Sequence: Synthetic oligonucleotide
ucgugggcacgcgcuccua

SEQ ID NO: 62675 - RNA, 19 nt, Artificial Sequence
  Description of Artificial Sequence: Synthetic oligonucleotide
gcugaaccagcccggcaca

SEQ ID NO: 62676 - RNA, 19 nt, Artificial Sequence
  Description of Artificial Sequence: Synthetic oligonucleotide
ggaaccagaucauccgcga

SEQ ID NO: 62677 - RNA, 19 nt, Artificial Sequence
  Description of Artificial Sequence: Synthetic oligonucleotide
ggauagccggccugccaug

SEQ ID NO: 62678 - RNA, 19 nt, Artificial Sequence
  Description of Artificial Sequence: Synthetic oligonucleotide
agccaccuccuaagcugcc

SEQ ID NO: 62679 - RNA, 19 nt, Artificial Sequence
  Description of Artificial Sequence: Synthetic oligonucleotide
auggauagccggccugcca

SEQ ID NO: 62680 - RNA, 19 nt, Artificial Sequence
  Description of Artificial Sequence: Synthetic oligonucleotide
ugcagggcacacauuacuc

SEQ ID NO: 62681 - RNA, 19 nt, Artificial Sequence
  Description of Artificial Sequence: Synthetic oligonucleotide
gugaacgagccaccuccua

SEQ ID NO: 62682 - RNA, 19 nt, Artificial Sequence
  Description of Artificial Sequence: Synthetic oligonucleotide
agaggggagaucaagcugu

SEQ ID NO: 62683 - RNA, 19 nt, Artificial Sequence
  Description of Artificial Sequence: Synthetic oligonucleotide
gcacacauuacucggugca

SEQ ID NO: 62684 - RNA, 19 nt, Artificial Sequence
  Description of Artificial Sequence: Synthetic oligonucleotide
caggaguuugucaauaaau

SEQ ID NO: 62685 - RNA, 19 nt, Artificial Sequence
  Description of Artificial Sequence: Synthetic oligonucleotide
aucaagccggccauccgga

SEQ ID NO: 62686 - RNA, 19 nt, Artificial Sequence
  Description of Artificial Sequence: Synthetic oligonucleotide
gaaccagaucauccgcgag

SEQ ID NO: 62687 - RNA, 19 nt, Artificial Sequence
  Description of Artificial Sequence: Synthetic oligonucleotide
uugugaacgagccaccucc

SEQ ID NO: 62688 - RNA, 19 nt, Artificial Sequence
  Description of Artificial Sequence: Synthetic oligonucleotide
aacucuagaggggagauca

SEQ ID NO: 62689 - RNA, 19 nt, Artificial Sequence
  Description of Artificial Sequence: Synthetic oligonucleotide
ccggaaccagaucauccgc

SEQ ID NO: 62690 - RNA, 19 nt, Artificial Sequence
  Description of Artificial Sequence: Synthetic oligonucleotide
uccuucgugggcacgcgcu

SEQ ID NO: 62691 - RNA, 19 nt, Artificial Sequence
  Description of Artificial Sequence: Synthetic oligonucleotide
aggaguuugucaauaaaug

SEQ ID NO: 62692 - RNA, 19 nt, Artificial Sequence
  Description of Artificial Sequence: Synthetic oligonucleotide
gagcggccagcucauagac

SEQ ID NO: 62693 - RNA, 19 nt, Artificial Sequence
  Description of Artificial Sequence: Synthetic oligonucleotide
cuccuucgugggcacgcgc

SEQ ID NO: 62694 - RNA, 19 nt, Artificial Sequence
  Description of Artificial Sequence: Synthetic oligonucleotide
auugugaacgagccaccuc

SEQ ID NO: 62695 - RNA, 19 nt, Artificial Sequence
  Description of Artificial Sequence: Synthetic oligonucleotide
accagaucauccgcgagcu

SEQ ID NO: 62696 - RNA, 19 nt, Artificial Sequence
  Description of Artificial Sequence: Synthetic oligonucleotide
uggauagccggccugccau

SEQ ID NO: 62697 - RNA, 19 nt, Artificial Sequence
  Description of Artificial Sequence: Synthetic oligonucleotide
acauuacucggugcagucg

SEQ ID NO: 62698 - RNA, 19 nt, Artificial Sequence
  Description of Artificial Sequence: Synthetic oligonucleotide
ccuucgugggcacgcgcuc

SEQ ID NO: 62699 - RNA, 19 nt, Artificial Sequence
  Description of Artificial Sequence: Synthetic oligonucleotide
cggaaccagaucauccgcg

SEQ ID NO: 62700 - RNA, 19 nt, Artificial Sequence
  Description of Artificial Sequence: Synthetic oligonucleotide
cagaucauccgcgagcugc

SEQ ID NO: 62701 - RNA, 19 nt, Artificial Sequence
  Description of Artificial Sequence: Synthetic oligonucleotide
gagaucaagccggccaucc

SEQ ID NO: 62702 - RNA, 19 nt, Artificial Sequence
  Description of Artificial Sequence: Synthetic oligonucleotide
auagccggccugccauggc

SEQ ID NO: 62703 - RNA, 19 nt, Artificial Sequence
  Description of Artificial Sequence: Synthetic oligonucleotide
caacauccucgugaacucu

SEQ ID NO: 62704 - RNA, 19 nt, Artificial Sequence
  Description of Artificial Sequence: Synthetic oligonucleotide
aaccagaucauccgcgagc

SEQ ID NO: 62705 - RNA, 19 nt, Artificial Sequence
  Description of Artificial Sequence: Synthetic oligonucleotide
ucuagaggggagaucaagc

SEQ ID NO: 62706 - RNA, 19 nt, Artificial Sequence
  Description of Artificial Sequence: Synthetic oligonucleotide
gagccaccuccuaagcugc

SEQ ID NO: 62707 - RNA, 19 nt, Artificial Sequence
  Description of Artificial Sequence: Synthetic oligonucleotide
uucgugggcacgcgcuccu

SEQ ID NO: 62708 - RNA, 19 nt, Artificial Sequence
  Description of Artificial Sequence: Synthetic oligonucleotide
acucuagaggggagaucaa

SEQ ID NO: 62709 - RNA, 19 nt, Artificial Sequence
  Description of Artificial Sequence: Synthetic oligonucleotide
gggcacgcgcuccuacaug

SEQ ID NO: 62710 - RNA, 19 nt, Artificial Sequence
  Description of Artificial Sequence: Synthetic oligonucleotide
ccagaucauccgcgagcug

SEQ ID NO: 62711 - RNA, 19 nt, Artificial Sequence
  Description of Artificial Sequence: Synthetic oligonucleotide
ccagcccggcacacccacg

SEQ ID NO: 62712 - RNA, 19 nt, Artificial Sequence
  Description of Artificial Sequence: Synthetic oligonucleotide
ucaagccggccauccggaa

SEQ ID NO: 62713 - RNA, 19 nt, Artificial Sequence
  Description of Artificial Sequence: Synthetic oligonucleotide
gaucauccgcgagcugcag

SEQ ID NO: 62714 - RNA, 19 nt, Artificial Sequence
  Description of Artificial Sequence: Synthetic oligonucleotide
cagcccggcacacccacgc

SEQ ID NO: 62715 - RNA, 19 nt, Artificial Sequence
  Description of Artificial Sequence: Synthetic oligonucleotide
cgagccaccuccuaagcug

SEQ ID NO: 62716 - RNA, 19 nt, Artificial Sequence
  Description of Artificial Sequence: Synthetic oligonucleotide
ggccgaggccccccgggcg

SEQ ID NO: 62717 - RNA, 19 nt, Artificial Sequence
  Description of Artificial Sequence: Synthetic oligonucleotide
ggugagcggccagcucaua

SEQ ID NO: 62718 - RNA, 19 nt, Artificial Sequence
  Description of Artificial Sequence: Synthetic oligonucleotide
gaaccagcccggcacaccc

SEQ ID NO: 62719 - RNA, 19 nt, Artificial Sequence
  Description of Artificial Sequence: Synthetic oligonucleotide
aacgagccaccuccuaagc

SEQ ID NO: 62720 - RNA, 19 nt, Artificial Sequence
  Description of Artificial Sequence: Synthetic oligonucleotide
ggaguuugucaauaaaugc

SEQ ID NO: 62721 - RNA, 19 nt, Artificial Sequence
  Description of Artificial Sequence: Synthetic oligonucleotide
gauagccggccugccaugg

SEQ ID NO: 62722 - RNA, 19 nt, Artificial Sequence
  Description of Artificial Sequence: Synthetic oligonucleotide
cuacauggcuccggagcgg

SEQ ID NO: 62723 - RNA, 19 nt, Artificial Sequence
  Description of Artificial Sequence: Synthetic oligonucleotide
ggccggggugccucugggg

SEQ ID NO: 62724 - RNA, 19 nt, Artificial Sequence
  Description of Artificial Sequence: Synthetic oligonucleotide
cagcagaagaagcggcugg

SEQ ID NO: 62725 - RNA, 19 nt, Artificial Sequence
  Description of Artificial Sequence: Synthetic oligonucleotide
uucccgaggagauccuggg

SEQ ID NO: 62726 - RNA, 19 nt, Artificial Sequence
  Description of Artificial Sequence: Synthetic oligonucleotide
auucccgaggagauccugg

SEQ ID NO: 62727 - RNA, 19 nt, Artificial Sequence
  Description of Artificial Sequence: Synthetic oligonucleotide
gaggcgccgccgccgccgg

SEQ ID NO: 62728 - RNA, 19 nt, Artificial Sequence
  Description of Artificial Sequence: Synthetic oligonucleotide
ucccgaggagauccugggg

SEQ ID NO: 62729 - RNA, 19 nt, Artificial Sequence
  Description of Artificial Sequence: Synthetic oligonucleotide
gcagcagaagaagcggcug

SEQ ID NO: 62730 - RNA, 19 nt, Artificial Sequence
  Description of Artificial Sequence: Synthetic oligonucleotide
ugcuguguguggucucaga

SEQ ID NO: 62731 - RNA, 19 nt, Artificial Sequence
  Description of Artificial Sequence: Synthetic oligonucleotide
ucggcagcgguagcggcuc

SEQ ID NO: 62732 - RNA, 19 nt, Artificial Sequence
  Description of Artificial Sequence: Synthetic oligonucleotide
ggcagcgguagcggcucgc

SEQ ID NO: 62733 - RNA, 19 nt, Artificial Sequence
  Description of Artificial Sequence: Synthetic oligonucleotide
gcuguguguggucucagag

SEQ ID NO: 62734 - RNA, 19 nt, Artificial Sequence
  Description of Artificial Sequence: Synthetic oligonucleotide
cggcagcgguagcggcucg

SEQ ID NO: 62735 - RNA, 19 nt, Artificial Sequence
  Description of Artificial Sequence: Synthetic oligonucleotide
gcccccuaugggccccggc

SEQ ID NO: 62736 - RNA, 19 nt, Artificial Sequence
  Description of Artificial Sequence: Synthetic oligonucleotide
gccgcggccgcagccccgg

SEQ ID NO: 62737 - RNA, 19 nt, Artificial Sequence
  Description of Artificial Sequence: Synthetic oligonucleotide
cuccuacauggcuccggag

SEQ ID NO: 62738 - RNA, 19 nt, Artificial Sequence
  Description of Artificial Sequence: Synthetic oligonucleotide
cucccuggaccaggugcug

SEQ ID NO: 62739 - RNA, 19 nt, Artificial Sequence
  Description of Artificial Sequence: Synthetic oligonucleotide
ccacaccuucaucaagcgg

SEQ ID NO: 62740 - RNA, 19 nt, Artificial Sequence
  Description of Artificial Sequence: Synthetic oligonucleotide
gggguggucaccaaagucc

SEQ ID NO: 62741 - RNA, 19 nt, Artificial Sequence
  Description of Artificial Sequence: Synthetic oligonucleotide
uucaucaagcgguccgagg

SEQ ID NO: 62742 - RNA, 19 nt, Artificial Sequence
  Description of Artificial Sequence: Synthetic oligonucleotide
caccuucaucaagcggucc

SEQ ID NO: 62743 - RNA, 19 nt, Artificial Sequence
  Description of Artificial Sequence: Synthetic oligonucleotide
uccuacauggcuccggagc

SEQ ID NO: 62744 - RNA, 19 nt, Artificial Sequence
  Description of Artificial Sequence: Synthetic oligonucleotide
accuucaucaagcgguccg

SEQ ID NO: 62745 - RNA, 19 nt, Artificial Sequence
  Description of Artificial Sequence: Synthetic oligonucleotide
ccuucaucaagcgguccga

SEQ ID NO: 62746 - RNA, 19 nt, Artificial Sequence
  Description of Artificial Sequence: Synthetic oligonucleotide
gauccacagagaugugaag

SEQ ID NO: 62747 - RNA, 19 nt, Artificial Sequence
  Description of Artificial Sequence: Synthetic oligonucleotide
gucccaagugccaaagaag

SEQ ID NO: 62748 - RNA, 19 nt, Artificial Sequence
  Description of Artificial Sequence: Synthetic oligonucleotide
ugauccacagagaugugaa

SEQ ID NO: 62749 - RNA, 19 nt, Artificial Sequence
  Description of Artificial Sequence: Synthetic oligonucleotide
gaagcccuccaauguccuu

SEQ ID NO: 62750 - RNA, 19 nt, Artificial Sequence
  Description of Artificial Sequence: Synthetic oligonucleotide
caggagcagaagcggcugc

SEQ ID NO: 62751 - RNA, 19 nt, Artificial Sequence
  Description of Artificial Sequence: Synthetic oligonucleotide
ggccguggagccuaugggg

SEQ ID NO: 62752 - RNA, 19 nt, Artificial Sequence
  Description of Artificial Sequence: Synthetic oligonucleotide
gacucuguggccaagacga

SEQ ID NO: 62753 - RNA, 19 nt, Artificial Sequence
  Description of Artificial Sequence: Synthetic oligonucleotide
gcccuacauggccccugag

SEQ ID NO: 62754 - RNA, 19 nt, Artificial Sequence
  Description of Artificial Sequence: Synthetic oligonucleotide
ggacucuguggccaagacg

SEQ ID NO: 62755 - RNA, 19 nt, Artificial Sequence
  Description of Artificial Sequence: Synthetic oligonucleotide
cuauucagagagggagacg

SEQ ID NO: 62756 - RNA, 19 nt, Artificial Sequence
  Description of Artificial Sequence: Synthetic oligonucleotide
agucgccgccgcaguccuc

SEQ ID NO: 62757 - RNA, 19 nt, Artificial Sequence
  Description of Artificial Sequence: Synthetic oligonucleotide
cgccgccgcaguccucgcc

SEQ ID NO: 62758 - RNA, 19 nt, Artificial Sequence
  Description of Artificial Sequence: Synthetic oligonucleotide
cucgccgcagucgccgccg

SEQ ID NO: 62759 - RNA, 19 nt, Artificial Sequence
  Description of Artificial Sequence: Synthetic oligonucleotide
ccggguccuuucccugaug

SEQ ID NO: 62760 - RNA, 19 nt, Artificial Sequence
  Description of Artificial Sequence: Synthetic oligonucleotide
ucgccgcagucgccgccgc

SEQ ID NO: 62761 - RNA, 19 nt, Artificial Sequence
  Description of Artificial Sequence: Synthetic oligonucleotide
gccgccgcaguccucgccg

SEQ ID NO: 62762 - RNA, 19 nt, Artificial Sequence
  Description of Artificial Sequence: Synthetic oligonucleotide
gucgccgccgcaguccucg

SEQ ID NO: 62763 - RNA, 19 nt, Artificial Sequence
  Description of Artificial Sequence: Synthetic oligonucleotide
ccgccgccgccgcugcucc

SEQ ID NO: 62764 - RNA, 19 nt, Artificial Sequence
  Description of Artificial Sequence: Synthetic oligonucleotide
ccucgccgcagucgccgcc

SEQ ID NO: 62765 - RNA, 19 nt, Artificial Sequence
  Description of Artificial Sequence: Synthetic oligonucleotide
gccgccgccgccgcugcuc

SEQ ID NO: 62766 - RNA, 19 nt, Artificial Sequence
  Description of Artificial Sequence: Synthetic oligonucleotide
ugguggaggagccgucccc

SEQ ID NO: 62767 - RNA, 19 nt, Artificial Sequence
  Description of Artificial Sequence: Synthetic oligonucleotide
gccccugagaggaucaacc

SEQ ID NO: 62768 - RNA, 19 nt, Artificial Sequence
  Description of Artificial Sequence: Synthetic oligonucleotide
agaagcggcugcucaugga

SEQ ID NO: 62769 - RNA, 19 nt, Artificial Sequence
  Description of Artificial Sequence: Synthetic oligonucleotide
gguggaggcugaugacuug

SEQ ID NO: 62770 - RNA, 19 nt, Artificial Sequence
  Description of Artificial Sequence: Synthetic oligonucleotide
agcugaagcagguggugga

SEQ ID NO: 62771 - RNA, 19 nt, Artificial Sequence
  Description of Artificial Sequence: Synthetic oligonucleotide
gcggauccgggccaccgug

SEQ ID NO: 62772 - RNA, 19 nt, Artificial Sequence
  Description of Artificial Sequence: Synthetic oligonucleotide
ggugguggaggagccgucc

SEQ ID NO: 62773 - RNA, 19 nt, Artificial Sequence
  Description of Artificial Sequence: Synthetic oligonucleotide
auggccccugagaggauca

SEQ ID NO: 62774 - RNA, 19 nt, Artificial Sequence
  Description of Artificial Sequence: Synthetic oligonucleotide
gagaggaucaacccagagc

SEQ ID NO: 62775 - RNA, 19 nt, Artificial Sequence
  Description of Artificial Sequence: Synthetic oligonucleotide
ggccccugagaggaucaac

SEQ ID NO: 62776 - RNA, 19 nt, Artificial Sequence
  Description of Artificial Sequence: Synthetic oligonucleotide
ugagaggaucaacccagag

SEQ ID NO: 62777 - RNA, 19 nt, Artificial Sequence
  Description of Artificial Sequence: Synthetic oligonucleotide
ugaagcaggugguggagga

SEQ ID NO: 62778 - RNA, 19 nt, Artificial Sequence
  Description of Artificial Sequence: Synthetic oligonucleotide
ccugagaggaucaacccag

SEQ ID NO: 62779 - RNA, 19 nt, Artificial Sequence
  Description of Artificial Sequence: Synthetic oligonucleotide
agguggaggcugaugacuu

SEQ ID NO: 62780 - RNA, 19 nt, Artificial Sequence
  Description of Artificial Sequence: Synthetic oligonucleotide
uggccccugagaggaucaa

SEQ ID NO: 62781 - RNA, 19 nt, Artificial Sequence
  Description of Artificial Sequence: Synthetic oligonucleotide
gugguggaggagccguccc

SEQ ID NO: 62782 - RNA, 19 nt, Artificial Sequence
  Description of Artificial Sequence: Synthetic oligonucleotide
ggaucaacccagagcugaa

SEQ ID NO: 62783 - RNA, 19 nt, Artificial Sequence
  Description of Artificial Sequence: Synthetic oligonucleotide
agaggaucaacccagagcu

SEQ ID NO: 62784 - RNA, 19 nt, Artificial Sequence
  Description of Artificial Sequence: Synthetic oligonucleotide
agauggccauccugcgguu

SEQ ID NO: 62785 - RNA, 19 nt, Artificial Sequence
  Description of Artificial Sequence: Synthetic oligonucleotide
gagguggaggcugaugacu

SEQ ID NO: 62786 - RNA, 19 nt, Artificial Sequence
  Description of Artificial Sequence: Synthetic oligonucleotide
ccaucauggccgugaagcg

SEQ ID NO: 62787 - RNA, 19 nt, Artificial Sequence
  Description of Artificial Sequence: Synthetic oligonucleotide
gcagcugaagcagguggug

SEQ ID NO: 62788 - RNA, 19 nt, Artificial Sequence
  Description of Artificial Sequence: Synthetic oligonucleotide
cagcugaagcagguggugg

SEQ ID NO: 62789 - RNA, 19 nt, Artificial Sequence
  Description of Artificial Sequence: Synthetic oligonucleotide
aggagcagaagcggcugcu

SEQ ID NO: 62790 - RNA, 19 nt, Artificial Sequence
  Description of Artificial Sequence: Synthetic oligonucleotide
ccccugagaggaucaaccc

SEQ ID NO: 62791 - RNA, 19 nt, Artificial Sequence
  Description of Artificial Sequence: Synthetic oligonucleotide
guggaggcugaugacuugg

SEQ ID NO: 62792 - RNA, 19 nt, Artificial Sequence
  Description of Artificial Sequence: Synthetic oligonucleotide
cccugagaggaucaaccca

SEQ ID NO: 62793 - RNA, 19 nt, Artificial Sequence
  Description of Artificial Sequence: Synthetic oligonucleotide
cugaagcaggugguggagg

SEQ ID NO: 62794 - RNA, 19 nt, Artificial Sequence
  Description of Artificial Sequence: Synthetic oligonucleotide
cggauccgggccaccguga

SEQ ID NO: 62795 - RNA, 19 nt, Artificial Sequence
  Description of Artificial Sequence: Synthetic oligonucleotide
cagaagcggcugcucaugg

SEQ ID NO: 62796 - RNA, 19 nt, Artificial Sequence
  Description of Artificial Sequence: Synthetic oligonucleotide
gagauggccauccugcggu

SEQ ID NO: 62797 - RNA, 19 nt, Artificial Sequence
  Description of Artificial Sequence: Synthetic oligonucleotide
gcaggugguggaggagccg

SEQ ID NO: 62798 - RNA, 19 nt, Artificial Sequence
  Description of Artificial Sequence: Synthetic oligonucleotide
caugcgcacggucgacugu

SEQ ID NO: 62799 - RNA, 19 nt, Artificial Sequence
  Description of Artificial Sequence: Synthetic oligonucleotide
aggaucaacccagagcuga

SEQ ID NO: 62800 - RNA, 19 nt, Artificial Sequence
  Description of Artificial Sequence: Synthetic oligonucleotide
cugagaggaucaacccaga

SEQ ID NO: 62801 - RNA, 19 nt, Artificial Sequence
  Description of Artificial Sequence: Synthetic oligonucleotide
ggauccgggccaccgugaa

SEQ ID NO: 62802 - RNA, 19 nt, Artificial Sequence
  Description of Artificial Sequence: Synthetic oligonucleotide
agcggcugcucauggaccu

SEQ ID NO: 62803 - RNA, 19 nt, Artificial Sequence
  Description of Artificial Sequence: Synthetic oligonucleotide
aagcggcugcucauggacc

SEQ ID NO: 62804 - RNA, 19 nt, Artificial Sequence
  Description of Artificial Sequence: Synthetic oligonucleotide
ggcugcucauggaccugga

SEQ ID NO: 62805 - RNA, 19 nt, Artificial Sequence
  Description of Artificial Sequence: Synthetic oligonucleotide
gcggcugcucauggaccug

SEQ ID NO: 62806 - RNA, 19 nt, Artificial Sequence
  Description of Artificial Sequence: Synthetic oligonucleotide
cggcugcucauggaccugg

SEQ ID NO: 62807 - RNA, 19 nt, Artificial Sequence
  Description of Artificial Sequence: Synthetic oligonucleotide
cagaagaaauuuuaggcaa

SEQ ID NO: 62808 - RNA, 19 nt, Artificial Sequence
  Description of Artificial Sequence: Synthetic oligonucleotide
uauuccagaagaaauuuua

SEQ ID NO: 62809 - RNA, 19 nt, Artificial Sequence
  Description of Artificial Sequence: Synthetic oligonucleotide
agaagaaauuuuaggcaaa

SEQ ID NO: 62810 - RNA, 19 nt, Artificial Sequence
  Description of Artificial Sequence: Synthetic oligonucleotide
ccagaagaaauuuuaggca

SEQ ID NO: 62811 - RNA, 19 nt, Artificial Sequence
  Description of Artificial Sequence: Synthetic oligonucleotide
uccagaagaaauuuuaggc

SEQ ID NO: 62812 - RNA, 19 nt, Artificial Sequence
  Description of Artificial Sequence: Synthetic oligonucleotide
gccccguaggguccccggc

SEQ ID NO: 62813 - RNA, 19 nt, Artificial Sequence
  Description of Artificial Sequence: Synthetic oligonucleotide
gcugugucuccucucagag

SEQ ID NO: 62814 - RNA, 19 nt, Artificial Sequence
  Description of Artificial Sequence: Synthetic oligonucleotide
ugcugugucuccucucaga

SEQ ID NO: 62815 - RNA, 19 nt, Artificial Sequence
  Description of Artificial Sequence: Synthetic oligonucleotide
ugcacucuucagagagggu

SEQ ID NO: 62816 - RNA, 19 nt, Artificial Sequence
  Description of Artificial Sequence: Synthetic oligonucleotide
aggccauacauggcaccug

SEQ ID NO: 62817 - RNA, 19 nt, Artificial Sequence
  Description of Artificial Sequence: Synthetic oligonucleotide
gcuguaggccauacauggc

SEQ ID NO: 62818 - RNA, 19 nt, Artificial Sequence
  Description of Artificial Sequence: Synthetic oligonucleotide
uggugcacucuucagagag

SEQ ID NO: 62819 - RNA, 19 nt, Artificial Sequence
  Description of Artificial Sequence: Synthetic oligonucleotide
ggccauacauggcaccuga

SEQ ID NO: 62820 - RNA, 19 nt, Artificial Sequence
  Description of Artificial Sequence: Synthetic oligonucleotide
uauggugcacucuucagag

SEQ ID NO: 62821 - RNA, 19 nt, Artificial Sequence
  Description of Artificial Sequence: Synthetic oligonucleotide
ggcuguaggccauacaugg

SEQ ID NO: 62822 - RNA, 19 nt, Artificial Sequence
  Description of Artificial Sequence: Synthetic oligonucleotide
auggugcacucuucagaga

SEQ ID NO: 62823 - RNA, 19 nt, Artificial Sequence
  Description of Artificial Sequence: Synthetic oligonucleotide
cucuucagagagggugacu

SEQ ID NO: 62824 - RNA, 19 nt, Artificial Sequence
  Description of Artificial Sequence: Synthetic oligonucleotide
gcagccgccgcggcgccgc

SEQ ID NO: 62825 - RNA, 19 nt, Artificial Sequence
  Description of Artificial Sequence: Synthetic oligonucleotide
augucuggaguuuggggau

SEQ ID NO: 62826 - RNA, 19 nt, Artificial Sequence
  Description of Artificial Sequence: Synthetic oligonucleotide
ugaugucuggaguuugggg

SEQ ID NO: 62827 - RNA, 19 nt, Artificial Sequence
  Description of Artificial Sequence: Synthetic oligonucleotide
gaugucuggaguuugggga

SEQ ID NO: 62828 - RNA, 19 nt, Artificial Sequence
  Description of Artificial Sequence: Synthetic oligonucleotide
ugucuggaguuuggggauc

SEQ ID NO: 62829 - RNA, 19 nt, Artificial Sequence
  Description of Artificial Sequence: Synthetic oligonucleotide
aaaauuaucaaaaagcuaa

SEQ ID NO: 62830 - RNA, 19 nt, Artificial Sequence
  Description of Artificial Sequence: Synthetic oligonucleotide
cuucuuauggauuuggaug

SEQ ID NO: 62831 - RNA, 19 nt, Artificial Sequence
  Description of Artificial Sequence: Synthetic oligonucleotide
uucuuauggauuuggaugu

SEQ ID NO: 62832 - RNA, 19 nt, Artificial Sequence
  Description of Artificial Sequence: Synthetic oligonucleotide
caaaguauaaagagcuucu

SEQ ID NO: 62833 - RNA, 19 nt, Artificial Sequence
  Description of Artificial Sequence: Synthetic oligonucleotide
ggccaaaguauaaagagcu

SEQ ID NO: 62834 - RNA, 19 nt, Artificial Sequence
  Description of Artificial Sequence: Synthetic oligonucleotide
ccucccuggcacugaaccu

SEQ ID NO: 62835 - RNA, 19 nt, Artificial Sequence
  Description of Artificial Sequence: Synthetic oligonucleotide
uggaugggggaucuuugga

SEQ ID NO: 62836 - RNA, 19 nt, Artificial Sequence
  Description of Artificial Sequence: Synthetic oligonucleotide
uguggaguuuaaagauuuu

SEQ ID NO: 62837 - RNA, 19 nt, Artificial Sequence
  Description of Artificial Sequence: Synthetic oligonucleotide
auggaugggggaucuuugg

SEQ ID NO: 62838 - RNA, 19 nt, Artificial Sequence
  Description of Artificial Sequence: Synthetic oligonucleotide
ccuccaauaugcuaguaaa

SEQ ID NO: 62839 - RNA, 19 nt, Artificial Sequence
  Description of Artificial Sequence: Synthetic oligonucleotide
cuccaauaugcuaguaaac

SEQ ID NO: 62840 - RNA, 19 nt, Artificial Sequence
  Description of Artificial Sequence: Synthetic oligonucleotide
ggaugggggaucuuuggau

SEQ ID NO: 62841 - RNA, 19 nt, Artificial Sequence
  Description of Artificial Sequence: Synthetic oligonucleotide
cauggaugggggaucuuug

SEQ ID NO: 62842 - RNA, 19 nt, Artificial Sequence
  Description of Artificial Sequence: Synthetic oligonucleotide
gcccuccaauaugcuagua

SEQ ID NO: 62843 - RNA, 19 nt, Artificial Sequence
  Description of Artificial Sequence: Synthetic oligonucleotide
cccuccaauaugcuaguaa

SEQ ID NO: 62844 - RNA, 19 nt, Artificial Sequence
  Description of Artificial Sequence: Synthetic oligonucleotide
uuaagcugugugauuuugg

SEQ ID NO: 62845 - RNA, 19 nt, Artificial Sequence
  Description of Artificial Sequence: Synthetic oligonucleotide
agguuaagcugugugauuu

SEQ ID NO: 62846 - RNA, 19 nt, Artificial Sequence
  Description of Artificial Sequence: Synthetic oligonucleotide
gagcccccuccuaaccagc

SEQ ID NO: 62847 - RNA, 19 nt, Artificial Sequence
  Description of Artificial Sequence: Synthetic oligonucleotide
gccgccgguccgcgcggcc

SEQ ID NO: 62848 - RNA, 19 nt, Artificial Sequence
  Description of Artificial Sequence: Synthetic oligonucleotide
ccgccgccgguccgcgcgg

SEQ ID NO: 62849 - RNA, 19 nt, Artificial Sequence
  Description of Artificial Sequence: Synthetic oligonucleotide
gccgccgccgguccgcgcg

SEQ ID NO: 62850 - RNA, 19 nt, Artificial Sequence
  Description of Artificial Sequence: Synthetic oligonucleotide
agccgccgccgguccgcgc

SEQ ID NO: 62851 - RNA, 19 nt, Artificial Sequence
  Description of Artificial Sequence: Synthetic oligonucleotide
cgccgccgguccgcgcggc

SEQ ID NO: 62852 - RNA, 19 nt, Artificial Sequence
  Description of Artificial Sequence: Synthetic oligonucleotide
guuaagcugugugauuuug

SEQ ID NO: 62853 - RNA, 19 nt, Artificial Sequence
  Description of Artificial Sequence: Synthetic oligonucleotide
ugucgccgccgccuuccuc

SEQ ID NO: 62854 - RNA, 19 nt, Artificial Sequence
  Description of Artificial Sequence: Synthetic oligonucleotide
gucgccgccgccuuccucc

SEQ ID NO: 62855 - RNA, 19 nt, Artificial Sequence
  Description of Artificial Sequence: Synthetic oligonucleotide
cuuauauggcgccugaaag

SEQ ID NO: 62856 - RNA, 19 nt, Artificial Sequence
  Description of Artificial Sequence: Synthetic oligonucleotide
ggagcaguauggaauucau

SEQ ID NO: 62857 - RNA, 19 nt, Artificial Sequence
  Description of Artificial Sequence: Synthetic oligonucleotide
uaagcugugugauuuugga

SEQ ID NO: 62858 - RNA, 19 nt, Artificial Sequence
  Description of Artificial Sequence: Synthetic oligonucleotide
cccguucaucgugcaguuc

SEQ ID NO: 62859 - RNA, 19 nt, Artificial Sequence
  Description of Artificial Sequence: Synthetic oligonucleotide
ugaagucugacauuuggag

SEQ ID NO: 62860 - RNA, 19 nt, Artificial Sequence
  Description of Artificial Sequence: Synthetic oligonucleotide
gugaagucugacauuugga

SEQ ID NO: 62861 - RNA, 19 nt, Artificial Sequence
  Description of Artificial Sequence: Synthetic oligonucleotide
ugugaagucugacauuugg

SEQ ID NO: 62862 - RNA, 19 nt, Artificial Sequence
  Description of Artificial Sequence: Synthetic oligonucleotide
agggauacagugugaaguc

SEQ ID NO: 62863 - RNA, 19 nt, Artificial Sequence
  Description of Artificial Sequence: Synthetic oligonucleotide
acugucaccuuuuauggcg

SEQ ID NO: 62864 - RNA, 19 nt, Artificial Sequence
  Description of Artificial Sequence: Synthetic oligonucleotide
cugucugucauucacagag

SEQ ID NO: 62865 - RNA, 19 nt, Artificial Sequence
  Description of Artificial Sequence: Synthetic oligonucleotide
cagaguuuguugacuuuac

SEQ ID NO: 62866 - RNA, 19 nt, Artificial Sequence
  Description of Artificial Sequence: Synthetic oligonucleotide
cacugucaccuuuuauggc

SEQ ID NO: 62867 - RNA, 19 nt, Artificial Sequence
  Description of Artificial Sequence: Synthetic oligonucleotide
gcugucugucauucacaga

SEQ ID NO: 62868 - RNA, 19 nt, Artificial Sequence
  Description of Artificial Sequence: Synthetic oligonucleotide
caaccagaagggauacagu

SEQ ID NO: 62869 - RNA, 19 nt, Artificial Sequence
  Description of Artificial Sequence: Synthetic oligonucleotide
gggagggugauguguggau

SEQ ID NO: 62870 - RNA, 19 nt, Artificial Sequence
  Description of Artificial Sequence: Synthetic oligonucleotide
ugucaccuuuuauggcgca

SEQ ID NO: 62871 - RNA, 19 nt, Artificial Sequence
  Description of Artificial Sequence: Synthetic oligonucleotide
ccagaagggauacagugug

SEQ ID NO: 62872 - RNA, 19 nt, Artificial Sequence
  Description of Artificial Sequence: Synthetic oligonucleotide
aagggauacagugugaagu

SEQ ID NO: 62873 - RNA, 19 nt, Artificial Sequence
  Description of Artificial Sequence: Synthetic oligonucleotide
gucaccuuuuauggcgcac

SEQ ID NO: 62874 - RNA, 19 nt, Artificial Sequence
  Description of Artificial Sequence: Synthetic oligonucleotide
cugucaccuuuuauggcgc

SEQ ID NO: 62875 - RNA, 19 nt, Artificial Sequence
  Description of Artificial Sequence: Synthetic oligonucleotide
ggagggugauguguggauc

SEQ ID NO: 62876 - RNA, 19 nt, Artificial Sequence
  Description of Artificial Sequence: Synthetic oligonucleotide
auucaaaaaaaaaauauaa

SEQ ID NO: 62877 - RNA, 19 nt, Artificial Sequence
  Description of Artificial Sequence: Synthetic oligonucleotide
ucaaccagaagggauacag

SEQ ID NO: 62878 - RNA, 19 nt, Artificial Sequence
  Description of Artificial Sequence: Synthetic oligonucleotide
aagcugucugucauucaca

SEQ ID NO: 62879 - RNA, 19 nt, Artificial Sequence
  Description of Artificial Sequence: Synthetic oligonucleotide
caugaggacgguggacugu

SEQ ID NO: 62880 - RNA, 19 nt, Artificial Sequence
  Description of Artificial Sequence: Synthetic oligonucleotide
gccagacaauuccagagga

SEQ ID NO: 62881 - RNA, 19 nt, Artificial Sequence
  Description of Artificial Sequence: Synthetic oligonucleotide
cagaagggauacaguguga

SEQ ID NO: 62882 - RNA, 19 nt, Artificial Sequence
  Description of Artificial Sequence: Synthetic oligonucleotide
uucacugucaccuuuuaug

SEQ ID NO: 62883 - RNA, 19 nt, Artificial Sequence
  Description of Artificial Sequence: Synthetic oligonucleotide
agaagggauacagugugaa

SEQ ID NO: 62884 - RNA, 19 nt, Artificial Sequence
  Description of Artificial Sequence: Synthetic oligonucleotide
ucacugucaccuuuuaugg

SEQ ID NO: 62885 - RNA, 19 nt, Artificial Sequence
  Description of Artificial Sequence: Synthetic oligonucleotide
uuggagucugggcaucacg

SEQ ID NO: 62886 - RNA, 19 nt, Artificial Sequence
  Description of Artificial Sequence: Synthetic oligonucleotide
ucaccuuuuauggcgcacu

SEQ ID NO: 62887 - RNA, 19 nt, Artificial Sequence
  Description of Artificial Sequence: Synthetic oligonucleotide
agaucauggcagugaagcg

SEQ ID NO: 62888 - RNA, 19 nt, Artificial Sequence
  Description of Artificial Sequence: Synthetic oligonucleotide
gaagggauacagugugaag

SEQ ID NO: 62889 - RNA, 19 nt, Artificial Sequence
  Description of Artificial Sequence: Synthetic oligonucleotide
ugucugucauucacagaga

SEQ ID NO: 62890 - RNA, 19 nt, Artificial Sequence
  Description of Artificial Sequence: Synthetic oligonucleotide
agcugucugucauucacag

SEQ ID NO: 62891 - RNA, 19 nt, Artificial Sequence
  Description of Artificial Sequence: Synthetic oligonucleotide
ggcagaucauggcagugaa

SEQ ID NO: 62892 - RNA, 19 nt, Artificial Sequence
  Description of Artificial Sequence: Synthetic oligonucleotide
aaaaauaucaaaaaggaaa

SEQ ID NO: 62893 - RNA, 19 nt, Artificial Sequence
  Description of Artificial Sequence: Synthetic oligonucleotide
gcuacugauggauuuggau

SEQ ID NO: 62894 - RNA, 19 nt, Artificial Sequence
  Description of Artificial Sequence: Synthetic oligonucleotide
gggcagaucauggcaguga

SEQ ID NO: 62895 - RNA, 19 nt, Artificial Sequence
  Description of Artificial Sequence: Synthetic oligonucleotide
agacgucaagccuucuaau

SEQ ID NO: 62896 - RNA, 19 nt, Artificial Sequence
  Description of Artificial Sequence: Synthetic oligonucleotide
ugucauucacagagacguc

SEQ ID NO: 62897 - RNA, 19 nt, Artificial Sequence
  Description of Artificial Sequence: Synthetic oligonucleotide
acccaggccaggugccccc

SEQ ID NO: 62898 - RNA, 19 nt, Artificial Sequence
  Description of Artificial Sequence: Synthetic oligonucleotide
ggggccagaucaagcucug

SEQ ID NO: 62899 - RNA, 19 nt, Artificial Sequence
  Description of Artificial Sequence: Synthetic oligonucleotide
cggggccagaucaagcucu

SEQ ID NO: 62900 - RNA, 19 nt, Artificial Sequence
  Description of Artificial Sequence: Synthetic oligonucleotide
gggcuucucgggggacuuc

SEQ ID NO: 62901 - RNA, 19 nt, Artificial Sequence
  Description of Artificial Sequence: Synthetic oligonucleotide
ugggcuucucgggggacuu

SEQ ID NO: 62902 - RNA, 19 nt, Artificial Sequence
  Description of Artificial Sequence: Synthetic oligonucleotide
gaacacagcuucaucaagc

SEQ ID NO: 62903 - RNA, 19 nt, Artificial Sequence
  Description of Artificial Sequence: Synthetic oligonucleotide
acacagcuucaucaagcgc

SEQ ID NO: 62904 - RNA, 19 nt, Artificial Sequence
  Description of Artificial Sequence: Synthetic oligonucleotide
gccuacauggcacccgagc

SEQ ID NO: 62905 - RNA, 19 nt, Artificial Sequence
  Description of Artificial Sequence: Synthetic oligonucleotide
cuacauggcacccgagcgc

SEQ ID NO: 62906 - RNA, 19 nt, Artificial Sequence
  Description of Artificial Sequence: Synthetic oligonucleotide
agcuucaucaagcgcuacg

SEQ ID NO: 62907 - RNA, 19 nt, Artificial Sequence
  Description of Artificial Sequence: Synthetic oligonucleotide
cccuccaacauccugcugg

SEQ ID NO: 62908 - RNA, 19 nt, Artificial Sequence
  Description of Artificial Sequence: Synthetic oligonucleotide
acagcuucaucaagcgcua

SEQ ID NO: 62909 - RNA, 19 nt, Artificial Sequence
  Description of Artificial Sequence: Synthetic oligonucleotide
cgccuacauggcacccgag

SEQ ID NO: 62910 - RNA, 19 nt, Artificial Sequence
  Description of Artificial Sequence: Synthetic oligonucleotide
cagcuucaucaagcgcuac

SEQ ID NO: 62911 - RNA, 19 nt, Artificial Sequence
  Description of Artificial Sequence: Synthetic oligonucleotide
gcuucaucaagcgcuacga

SEQ ID NO: 62912 - RNA, 19 nt, Artificial Sequence
  Description of Artificial Sequence: Synthetic oligonucleotide
cuccaacauccugcuggac

SEQ ID NO: 62913 - RNA, 19 nt, Artificial Sequence
  Description of Artificial Sequence: Synthetic oligonucleotide
ccuccaacauccugcugga

SEQ ID NO: 62914 - RNA, 19 nt, Artificial Sequence
  Description of Artificial Sequence: Synthetic oligonucleotide
ucucguugguggagcuggc

SEQ ID NO: 62915 - RNA, 19 nt, Artificial Sequence
  Description of Artificial Sequence: Synthetic oligonucleotide
gggccgacguauggagccu

SEQ ID NO: 62916 - RNA, 19 nt, Artificial Sequence
  Description of Artificial Sequence: Synthetic oligonucleotide
cgccauggagcucaugggc

SEQ ID NO: 62917 - RNA, 19 nt, Artificial Sequence
  Description of Artificial Sequence: Synthetic oligonucleotide
caucgccauggagcucaug

SEQ ID NO: 62918 - RNA, 19 nt, Artificial Sequence
  Description of Artificial Sequence: Synthetic oligonucleotide
agcgcauccucauggaccu

SEQ ID NO: 62919 - RNA, 19 nt, Artificial Sequence
  Description of Artificial Sequence: Synthetic oligonucleotide
ucgccauggagcucauggg

SEQ ID NO: 62920 - RNA, 19 nt, Artificial Sequence
  Description of Artificial Sequence: Synthetic oligonucleotide
ggagcucaugggcaccugc

SEQ ID NO: 62921 - RNA, 19 nt, Artificial Sequence
  Description of Artificial Sequence: Synthetic oligonucleotide
gccauggagcucaugggca

SEQ ID NO: 62922 - RNA, 19 nt, Artificial Sequence
  Description of Artificial Sequence: Synthetic oligonucleotide
gcauccucauggaccugga

SEQ ID NO: 62923 - RNA, 19 nt, Artificial Sequence
  Description of Artificial Sequence: Synthetic oligonucleotide
uggagcucaugggcaccug

SEQ ID NO: 62924 - RNA, 19 nt, Artificial Sequence
  Description of Artificial Sequence: Synthetic oligonucleotide
cgcauccucauggaccugg

SEQ ID NO: 62925 - RNA, 19 nt, Artificial Sequence
  Description of Artificial Sequence: Synthetic oligonucleotide
gcgcauccucauggaccug

SEQ ID NO: 62926 - RNA, 19 nt, Artificial Sequence
  Description of Artificial Sequence: Synthetic oligonucleotide
uccucauggaccuggaugu

SEQ ID NO: 62927 - RNA, 19 nt, Artificial Sequence
  Description of Artificial Sequence: Synthetic oligonucleotide
aagcgcauccucauggacc

SEQ ID NO: 62928 - RNA, 19 nt, Artificial Sequence
  Description of Artificial Sequence: Synthetic oligonucleotide
gcggcggcgguggcggcgg

SEQ ID NO: 62929 - RNA, 19 nt, Artificial Sequence
  Description of Artificial Sequence: Synthetic oligonucleotide
gcagcggcaccugcggcca

SEQ ID NO: 62930 - RNA, 19 nt, Artificial Sequence
  Description of Artificial Sequence: Synthetic oligonucleotide
gggcagcggcaccugcggc

SEQ ID NO: 62931 - RNA, 19 nt, Artificial Sequence
  Description of Artificial Sequence: Synthetic oligonucleotide
cggcggcgguggcggcggg

SEQ ID NO: 62932 - RNA, 19 nt, Artificial Sequence
  Description of Artificial Sequence: Synthetic oligonucleotide
cauugccguuaagcaaaug

SEQ ID NO: 62933 - RNA, 19 nt, Artificial Sequence
  Description of Artificial Sequence: Synthetic oligonucleotide
ggcggcgguggcggcgggg

SEQ ID NO: 62934 - RNA, 19 nt, Artificial Sequence
  Description of Artificial Sequence: Synthetic oligonucleotide
ccucccuggaacagaagcu

SEQ ID NO: 62935 - RNA, 19 nt, Artificial Sequence
  Description of Artificial Sequence: Synthetic oligonucleotide
ccccuacaucgugcagugc

SEQ ID NO: 62936 - RNA, 19 nt, Artificial Sequence
  Description of Artificial Sequence: Synthetic oligonucleotide
acaaaacaaaaaacaagaa

SEQ ID NO: 62937 - RNA, 19 nt, Artificial Sequence
  Description of Artificial Sequence: Synthetic oligonucleotide
gaaaaagcaaaaaaaaaaa

SEQ ID NO: 62938 - RNA, 19 nt, Artificial Sequence
  Description of Artificial Sequence: Synthetic oligonucleotide
auaucugagggagaagcac

SEQ ID NO: 62939 - RNA, 19 nt, Artificial Sequence
  Description of Artificial Sequence: Synthetic oligonucleotide
aggccaaaguauaaagagc

SEQ ID NO: 62940 - RNA, 19 nt, Artificial Sequence
  Description of Artificial Sequence: Synthetic oligonucleotide
auuaaaaaaaaaaaaaaaa

SEQ ID NO: 62941 - RNA, 19 nt, Artificial Sequence
  Description of Artificial Sequence: Synthetic oligonucleotide
acaaaaaaaaaaaaaaaaa

SEQ ID NO: 62942 - DNA, 21 bp, Artificial Sequence
  Description of Artificial Sequence: Synthetic oligonucleotide
  Description of Combined DNA/RNA Molecule: Synthetic oligonucleotide
cuacacaaaucagcgauuutt

SEQ ID NO: 62943 - DNA, 21 bp, Artificial Sequence
  Description of Artificial Sequence: Synthetic oligonucleotide
  Description of Combined DNA/RNA Molecule: Synthetic oligonucleotide
aaaucgcugauuuguguagtt

SEQ ID NO: 62944 - DNA, 25 bp, Artificial Sequence
  Description of Artificial Sequence: Synthetic oligonucleotide
  Description of Combined DNA/RNA Molecule: Synthetic oligonucleotide
cuacacaaaucagcgauuuccaugt

SEQ ID NO: 62945 - RNA, 27 nt, Artificial Sequence
  Description of Artificial Sequence: Synthetic oligonucleotide
acauggaaaucgcugauuuguguaguc

SEQ ID NO: 62946 - RNA, 13 nt, Artificial Sequence
  Description of Artificial Sequence: Synthetic oligonucleotide
cuacacaaaucag

SEQ ID NO: 62947 - DNA, 11 bp, Artificial Sequence
  Description of Artificial Sequence: Synthetic oligonucleotide
  Description of Combined DNA/RNA Molecule: Synthetic oligonucleotide
gauuuccaugt

SEQ ID NO: 62948 - DNA, 21 bp, Artificial Sequence
  Description of Artificial Sequence: Synthetic oligonucleotide
  Description of Combined DNA/RNA Molecule: Synthetic oligonucleotide
ggaucuuauuucuucggagtt

SEQ ID NO: 62949 - DNA, 21 bp, Artificial Sequence
  Description of Artificial Sequence: Synthetic oligonucleotide
  Description of Combined DNA/RNA Molecule: Synthetic oligonucleotide
cuccgaagaaauaagaucctt

SEQ ID NO: 62950 - RNA, 11 nt, Artificial Sequence
  Description of Artificial Sequence: Synthetic oligonucleotide
ggaucuuauuu

SEQ ID NO: 62951 - DNA, 10 bp, Artificial Sequence
  Description of Artificial Sequence: Synthetic oligonucleotide
  Description of Combined DNA/RNA Molecule: Synthetic oligonucleotide
cuucggagtt

SEQ ID NO: 62952 - RNA, 27 nt, Artificial Sequence
  Description of Artificial Sequence: Synthetic oligonucleotide
cauugucuccgaagaaauaagauccuu

SEQ ID NO: 62953 - RNA, 8 nt, Artificial Sequence
  Description of Artificial Sequence: Synthetic oligonucleotide
  modified_base (2): LNA-G
ggaucuua

SEQ ID NO: 62954 - DNA, 17 bp, Artificial Sequence
  Description of Artificial Sequence: Synthetic oligonucleotide
  Description of Combined DNA/RNA Molecule: Synthetic oligonucleotide
uuucuucggagacaatg

SEQ ID NO: 62955 - DNA, 16 bp, Artificial Sequence
  Description of Artificial Sequence: Synthetic oligonucleotide
  Description of Combined DNA/RNA Molecule: Synthetic oligonucleotide
uucuucggagacaatg

SEQ ID NO: 62956 - DNA, 15 bp, Artificial Sequence
  Description of Artificial Sequence: Synthetic oligonucleotide
  Description of Combined DNA/RNA Molecule: Synthetic oligonucleotide
ucuucggagacaatg

SEQ ID NO: 62957 - DNA, 14 bp, Artificial Sequence
  Description of Artificial Sequence: Synthetic oligonucleotide
  Description of Combined DNA/RNA Molecule: Synthetic oligonucleotide
cuucggagacaatg

SEQ ID NO: 62958 - DNA, 13 bp, Artificial Sequence
  Description of Artificial Sequence: Synthetic oligonucleotide
  Description of Combined DNA/RNA Molecule: Synthetic oligonucleotide
uucggagacaatg

SEQ ID NO: 62959 - DNA, 12 bp, Artificial Sequence
  Description of Artificial Sequence: Synthetic oligonucleotide
  Description of Combined DNA/RNA Molecule: Synthetic oligonucleotide
ucggagacaatg

SEQ ID NO: 62960 - DNA, 11 bp, Artificial Sequence
  Description of Artificial Sequence: Synthetic oligonucleotide
  Description of Combined DNA/RNA Molecule: Synthetic oligonucleotide
cggagacaatg

SEQ ID NO: 62961 - RNA, 9 nt, Artificial Sequence
  Description of Artificial Sequence: Synthetic oligonucleotide
  modified_base (2): LNA-G
ggaucuuau

SEQ ID NO: 62962 - RNA, 10 nt, Artificial Sequence
  Description of Artificial Sequence: Synthetic oligonucleotide
  modified_base (2): LNA-G
ggaucuuauu

SEQ ID NO: 62963 - RNA, 11 nt, Artificial Sequence
  Description of Artificial Sequence: Synthetic oligonucleotide
  modified_base (2): LNA-G
ggaucuuauuu

SEQ ID NO: 62964 - RNA, 12 nt, Artificial Sequence
  Description of Artificial Sequence: Synthetic oligonucleotide
  modified_base (2): LNA-G
ggaucuuauuuc

SEQ ID NO: 62965 - RNA, 8 nt, Artificial Sequence
  Description of Artificial Sequence: Synthetic oligonucleotide
  modified_base (3): LNA-A
cuacacaa

SEQ ID NO: 62966 - DNA, 13 bp, Artificial Sequence
  Description of Artificial Sequence: Synthetic oligonucleotide
  Description of Combined DNA/RNA Molecule: Synthetic oligonucleotide
  modified_base (8): LNA-A
aucagcgauuutt

SEQ ID NO: 62967 - DNA, 12 bp, Artificial Sequence
  Description of Artificial Sequence: Synthetic oligonucleotide
  Description of Combined DNA/RNA Molecule: Synthetic oligonucleotide
  modified_base (7): LNA-A
ucagcgauuutt

SEQ ID NO: 62968 - DNA, 11 bp, Artificial Sequence
  Description of Artificial Sequence: Synthetic oligonucleotide
  Description of Combined DNA/RNA Molecule: Synthetic oligonucleotide
  modified_base (6): LNA-A
cagcgauuutt

SEQ ID NO: 62969 - DNA, 10 bp, Artificial Sequence
  Description of Artificial Sequence: Synthetic oligonucleotide
  Description of Combined DNA/RNA Molecule: Synthetic oligonucleotide
  modified_base (5): LNA-A
agcgauuutt

SEQ ID NO: 62970 - DNA, 9 bp, Artificial Sequence
  Description of Artificial Sequence: Synthetic oligonucleotide
  Description of Combined DNA/RNA Molecule: Synthetic oligonucleotide
  modified_base (4): LNA-A
gcgauuutt

SEQ ID NO: 62971 - DNA, 8 bp, Artificial Sequence
  Description of Artificial Sequence: Synthetic oligonucleotide
  Description of Combined DNA/RNA Molecule: Synthetic oligonucleotide
  modified_base (3): LNA-A
cgauuutt

SEQ ID NO: 62972 - DNA, 7 bp, Artificial Sequence
  Description of Artificial Sequence: Synthetic oligonucleotide
  Description of Combined DNA/RNA Molecule: Synthetic oligonucleotide
  modified_base (2): LNA-A
gauuutt

SEQ ID NO: 62973 - RNA, 9 nt, Artificial Sequence
  Description of Artificial Sequence: Synthetic oligonucleotide
  modified_base (3): LNA-A
cuacacaaa

SEQ ID NO: 62974 - RNA, 10 nt, Artificial Sequence
  Description of Artificial Sequence: Synthetic oligonucleotide
  modified_base (3): LNA-A
cuacacaaau

SEQ ID NO: 62975 - RNA, 11 nt, Artificial Sequence
  Description of Artificial Sequence: Synthetic oligonucleotide
  modified_base (3): LNA-A
cuacacaaauc

SEQ ID NO: 62976 - RNA, 12 nt, Artificial Sequence
  Description of Artificial Sequence: Synthetic oligonucleotide
  modified_base (3): LNA-A
cuacacaaauca

SEQ ID NO: 62977 - RNA, 13 nt, Artificial Sequence
  Description of Artificial Sequence: Synthetic oligonucleotide
  modified_base (3): LNA-A
cuacacaaaucag

SEQ ID NO: 62978 - RNA, 14 nt, Artificial Sequence
  Description of Artificial Sequence: Synthetic oligonucleotide
  modified_base (3): LNA-A
cuacacaaaucagc

SEQ ID NO: 62979 - RNA, 13 nt, Artificial Sequence
  Description of Artificial Sequence: Synthetic oligonucleotide
  modified_base (2): LNA-G
ggaucuuauuucu

SEQ ID NO: 62980 - RNA, 14 nt, Artificial Sequence
  Description of Artificial Sequence: Synthetic oligonucleotide
  modified_base (2): LNA-G
ggaucuuauuucuu

SEQ ID NO: 62981 - RNA, 8 nt, Artificial Sequence
  Description of Artificial Sequence: Synthetic oligonucleotide
  modified_base (2): LNA-G
  modified_base (8): LNA-A
ggaucuua

SEQ ID NO: 62982 - RNA, 9 nt, Artificial Sequence
  Description of Artificial Sequence: Synthetic oligonucleotide
  modified_base (2): LNA-G
  modified_base (9): LNA-U
ggaucuuau

SEQ ID NO: 62983 - RNA, 10 nt, Artificial Sequence
  Description of Artificial Sequence: Synthetic oligonucleotide
  modified_base (2): LNA-G
  modified_base (10): LNA-U
ggaucuuauu

SEQ ID NO: 62984 - RNA, 11 nt, Artificial Sequence
  Description of Artificial Sequence: Synthetic oligonucleotide
  modified_base (2): LNA-G
  modified_base (11): LNA-U
ggaucuuauuu

SEQ ID NO: 62985 - RNA, 12 nt, Artificial Sequence
  Description of Artificial Sequence: Synthetic oligonucleotide
  modified_base (2): LNA-G
  modified_base (12): LNA-C
ggaucuuauuuc

SEQ ID NO: 62986 - RNA, 13 nt, Artificial Sequence
  Description of Artificial Sequence: Synthetic oligonucleotide
  modified_base (2): LNA-G
  modified_base (13): LNA-U
ggaucuuauuucu

SEQ ID NO: 62987 - RNA, 14 nt, Artificial Sequence
  Description of Artificial Sequence: Synthetic oligonucleotide
  modified_base (2): LNA-G
  modified_base (14): LNA-U
ggaucuuauuucuu

SEQ ID NO: 62988 - DNA, 13 bp, Artificial Sequence
  Description of Artificial Sequence: Synthetic oligonucleotide
  Description of Combined DNA/RNA Molecule: Synthetic oligonucleotide
  modified_base (8): LNA-G
uuucuucggagtt

SEQ ID NO: 62989 - DNA, 12 bp, Artificial Sequence
  Description of Artificial Sequence: Synthetic oligonucleotide
  Description of Combined DNA/RNA Molecule: Synthetic oligonucleotide
  modified_base (7): LNA-G
uucuucggagtt

SEQ ID NO: 62990 - DNA, 11 bp, Artificial Sequence
  Description of Artificial Sequence: Synthetic oligonucleotide
  Description of Combined DNA/RNA Molecule: Synthetic oligonucleotide
  modified_base (6): LNA-G
ucuucggagtt

SEQ ID NO: 62991 - DNA, 10 bp, Artificial Sequence
  Description of Artificial Sequence: Synthetic oligonucleotide
  Description of Combined DNA/RNA Molecule: Synthetic oligonucleotide
  modified_base (5): LNA-G
cuucggagtt

SEQ ID NO: 62992 - DNA, 9 bp, Artificial Sequence
  Description of Artificial Sequence: Synthetic oligonucleotide
  Description of Combined DNA/RNA Molecule: Synthetic oligonucleotide
  modified_base (4): LNA-G
uucggagtt

SEQ ID NO: 62993 - DNA, 8 bp, Artificial Sequence
  Description of Artificial Sequence: Synthetic oligonucleotide
  Description of Combined DNA/RNA Molecule: Synthetic oligonucleotide
  modified_base (3): LNA-G
ucggagtt

SEQ ID NO: 62994 - DNA, 7 bp, Artificial Sequence
  Description of Artificial Sequence: Synthetic oligonucleotide
  Description of Combined DNA/RNA Molecule: Synthetic oligonucleotide
  modified_base (2): LNA-G
cggagtt

SEQ ID NO: 62995 - DNA, 13 bp, Artificial Sequence
  Description of Artificial Sequence: Synthetic oligonucleotide
  Description of Combined DNA/RNA Molecule: Synthetic oligonucleotide
  modified_base (1): LNA-U
  modified_base (8): LNA-G
uuucuucggagtt

SEQ ID NO: 62996 - DNA, 12 bp, Artificial Sequence
  Description of Artificial Sequence: Synthetic oligonucleotide
  Description of Combined DNA/RNA Molecule: Synthetic oligonucleotide
  modified_base (1): LNA-U
  modified_base (7): LNA-G
uucuucggagtt

SEQ ID NO: 62997 - DNA, 11 bp, Artificial Sequence
  Description of Artificial Sequence: Synthetic oligonucleotide
  Description of Combined DNA/RNA Molecule: Synthetic oligonucleotide
  modified_base (1): LNA-U
  modified_base (6): LNA-G
ucuucggagtt

SEQ ID NO: 62998 - DNA, 10 bp, Artificial Sequence
  Description of Artificial Sequence: Synthetic oligonucleotide
  Description of Combined DNA/RNA Molecule: Synthetic oligonucleotide
  modified_base (1): LNA-C
  modified_base (5): LNA-G
cuucggagtt

SEQ ID NO: 62999 - DNA, 9 bp, Artificial Sequence
  Description of Artificial Sequence: Synthetic oligonucleotide
  Description of Combined DNA/RNA Molecule: Synthetic oligonucleotide
  modified_base (1): LNA-U
  modified_base (4): LNA-G
uucggagtt

SEQ ID NO: 63000 - DNA, 8 bp, Artificial Sequence
  Description of Artificial Sequence: Synthetic oligonucleotide
  Description of Combined DNA/RNA Molecule: Synthetic oligonucleotide
  modified_base (1): LNA-U
  modified_base (3): LNA-G
ucggagtt

SEQ ID NO: 63001 - DNA, 7 bp, Artificial Sequence
  Description of Artificial Sequence: Synthetic oligonucleotide
  Description of Combined DNA/RNA Molecule: Synthetic oligonucleotide
  modified_base (1): LNA-C
  modified_base (2): LNA-G
cggagtt

SEQ ID NO: 63002 - DNA, 21 bp, Artificial Sequence
  Description of Artificial Sequence: Synthetic oligonucleotide
  Description of Combined DNA/RNA Molecule: Synthetic oligonucleotide
  modified_base (2): LNA-G
  modified_base (16): LNA-G
ggaucuuauuucuucggagtt

SEQ ID NO: 63003 - DNA, 25 bp, Artificial Sequence
  Description of Artificial Sequence: Synthetic oligonucleotide
  Description of Combined DNA/RNA Molecule: Synthetic oligonucleotide
ggaucuuauuucuucggagacaatg

SEQ ID NO: 63004 - RNA, 25 nt, Artificial Sequence
  Description of Artificial Sequence: Synthetic oligonucleotide
uuaagcagaguucaaaagcccuuca

SEQ ID NO: 63005 - RNA, 25 nt, Artificial Sequence
  Description of Artificial Sequence: Synthetic oligonucleotide
uaagcagaguucaaaagcccuucag

SEQ ID NO: 63006 - RNA, 25 nt, Artificial Sequence
  Description of Artificial Sequence: Synthetic oligonucleotide
agcagaguucaaaagcccuucagcg

SEQ ID NO: 63007 - RNA, 25 nt, Artificial Sequence
  Description of Artificial Sequence: Synthetic oligonucleotide
cucagggucugagugaagccgcucg

SEQ ID NO: 63008 - RNA, 25 nt, Artificial Sequence
  Description of Artificial Sequence: Synthetic oligonucleotide
caagcaacuacaucacgccagucaa

SEQ ID NO: 63009 - RNA, 25 nt, Artificial Sequence
  Description of Artificial Sequence: Synthetic oligonucleotide
aucaauggcagcuucuuggugcgug

SEQ ID NO: 63010 - RNA, 25 nt, Artificial Sequence
  Description of Artificial Sequence: Synthetic oligonucleotide
uuccagcccacauuggauucaucag

SEQ ID NO: 63011 - RNA, 25 nt, Artificial Sequence
  Description of Artificial Sequence: Synthetic oligonucleotide
cagcugagaauguggaauaccuaag

SEQ ID NO: 63012 - RNA, 25 nt, Artificial Sequence
  Description of Artificial Sequence: Synthetic oligonucleotide
aacguaucuccuaauuugaggcuca

SEQ ID NO: 63013 - RNA, 25 nt, Artificial Sequence
  Description of Artificial Sequence: Synthetic oligonucleotide
ccuaaaauaauuucucuacaauugg

SEQ ID NO: 63014 - RNA, 25 nt, Artificial Sequence
  Description of Artificial Sequence: Synthetic oligonucleotide
uggaagauucagcuaguuaggagcc

SEQ ID NO: 63015 - RNA, 25 nt, Artificial Sequence
  Description of Artificial Sequence: Synthetic oligonucleotide
uuaaacucuccuagucaauauccac

SEQ ID NO: 63016 - RNA, 25 nt, Artificial Sequence
  Description of Artificial Sequence: Synthetic oligonucleotide
cagccuacaguuauguucagucaca

SEQ ID NO: 63017 - RNA, 25 nt, Artificial Sequence
  Description of Artificial Sequence: Synthetic oligonucleotide
guuauguucagucacacacacauac

SEQ ID NO: 63018 - RNA, 25 nt, Artificial Sequence
  Description of Artificial Sequence: Synthetic oligonucleotide
cacauacaaaauguuccuuuugcuu

SEQ ID NO: 63019 - RNA, 25 nt, Artificial Sequence
  Description of Artificial Sequence: Synthetic oligonucleotide
uccuuuugcuuuuaaaguaauuuuu

SEQ ID NO: 63020 - RNA, 25 nt, Artificial Sequence
  Description of Artificial Sequence: Synthetic oligonucleotide
ugaccugugaagcaacagucaaugg

SEQ ID NO: 63021 - RNA, 25 nt, Artificial Sequence
  Description of Artificial Sequence: Synthetic oligonucleotide
cuaucucacacaucgacaaaccaau

SEQ ID NO: 63022 - RNA, 25 nt, Artificial Sequence
  Description of Artificial Sequence: Synthetic oligonucleotide
uguccucaauuguacugcuaccacu

SEQ ID NO: 63023 - RNA, 25 nt, Artificial Sequence
  Description of Artificial Sequence: Synthetic oligonucleotide
aaaccguagcuggcaagcggucuua

SEQ ID NO: 63024 - RNA, 25 nt, Artificial Sequence
  Description of Artificial Sequence: Synthetic oligonucleotide
uagcuggcaagcggucuuaccggcu

SEQ ID NO: 63025 - RNA, 25 nt, Artificial Sequence
  Description of Artificial Sequence: Synthetic oligonucleotide
uuguaugguuaaaagauggguuacc

SEQ ID NO: 63026 - RNA, 25 nt, Artificial Sequence
  Description of Artificial Sequence: Synthetic oligonucleotide
ugguuaaaagauggguuaccugcga

SEQ ID NO: 63027 - RNA, 25 nt, Artificial Sequence
  Description of Artificial Sequence: Synthetic oligonucleotide
cagggaauuauacaaucuugcugag

SEQ ID NO: 63028 - RNA, 25 nt, Artificial Sequence
  Description of Artificial Sequence: Synthetic oligonucleotide
acaaucuugcugagcauaaaacagu

SEQ ID NO: 63029 - RNA, 25 nt, Artificial Sequence
  Description of Artificial Sequence: Synthetic oligonucleotide
ccaauaaugaagaguccuuuauccu

SEQ ID NO: 63030 - RNA, 25 nt, Artificial Sequence
  Description of Artificial Sequence: Synthetic oligonucleotide
acuuuggauguuccaacgcaaguug

SEQ ID NO: 63031 - RNA, 25 nt, Artificial Sequence
  Description of Artificial Sequence: Synthetic oligonucleotide
aaugcuuccacuaaacugaaaccau

SEQ ID NO: 63032 - RNA, 25 nt, Artificial Sequence
  Description of Artificial Sequence: Synthetic oligonucleotide
gagaaaguuugacuuuguuaaauau

SEQ ID NO: 63033 - RNA, 25 nt, Artificial Sequence
  Description of Artificial Sequence: Synthetic oligonucleotide
aaagaacuacuguauauuaaaaguu

SEQ ID NO: 63034 - RNA, 25 nt, Artificial Sequence
  Description of Artificial Sequence: Synthetic oligonucleotide
uuagaaauacggguuuugacuuaac

SEQ ID NO: 63035 - RNA, 25 nt, Artificial Sequence
  Description of Artificial Sequence: Synthetic oligonucleotide
aacauggguacagcaaacucagcac

SEQ ID NO: 63036 - RNA, 25 nt, Artificial Sequence
  Description of Artificial Sequence: Synthetic oligonucleotide
aaagacacagaagaugcugaccuca

SEQ ID NO: 63037 - RNA, 25 nt, Artificial Sequence
  Description of Artificial Sequence: Synthetic oligonucleotide
uaguagggagguuuauucagaucgc

SEQ ID NO: 63038 - RNA, 25 nt, Artificial Sequence
  Description of Artificial Sequence: Synthetic oligonucleotide
gccuucugcagcaggguucugggau

SEQ ID NO: 63039 - RNA, 25 nt, Artificial Sequence
  Description of Artificial Sequence: Synthetic oligonucleotide
ggucugguacauauuggaaauuaug

SEQ ID NO: 63040 - RNA, 25 nt, Artificial Sequence
  Description of Artificial Sequence: Synthetic oligonucleotide
cuaguccuuccgauggaagcacuag

SEQ ID NO: 63041 - RNA, 25 nt, Artificial Sequence
  Description of Artificial Sequence: Synthetic oligonucleotide
ccagugaauauuguuuuuaugugga

SEQ ID NO: 63042 - RNA, 25 nt, Artificial Sequence
  Description of Artificial Sequence: Synthetic oligonucleotide
augaauucaaguuggaauugguaga

SEQ ID NO: 63043 - RNA, 25 nt, Artificial Sequence
  Description of Artificial Sequence: Synthetic oligonucleotide
caggacacagauuuagacuuggaga

SEQ ID NO: 63044 - RNA, 25 nt, Artificial Sequence
  Description of Artificial Sequence: Synthetic oligonucleotide
cucaaagcacaguuacaguauucca

SEQ ID NO: 63045 - RNA, 25 nt, Artificial Sequence
  Description of Artificial Sequence: Synthetic oligonucleotide
accacugccaccacugaugaauuaa

SEQ ID NO: 63046 - RNA, 25 nt, Artificial Sequence
  Description of Artificial Sequence: Synthetic oligonucleotide
gaaacuacuagugccacaucaucac

SEQ ID NO: 63047 - RNA, 25 nt, Artificial Sequence
  Description of Artificial Sequence: Synthetic oligonucleotide
aagucggacagccucaccaaacaga

SEQ ID NO: 63048 - RNA, 25 nt, Artificial Sequence
  Description of Artificial Sequence: Synthetic oligonucleotide
gaaagcgaaaaauggaacaugaugg

SEQ ID NO: 63049 - RNA, 25 nt, Artificial Sequence
  Description of Artificial Sequence: Synthetic oligonucleotide
cccucugauuuagcauguagacugc

SEQ ID NO: 63050 - RNA, 25 nt, Artificial Sequence
  Description of Artificial Sequence: Synthetic oligonucleotide
ugagcuauuuaaggaucuauuuaug

SEQ ID NO: 63051 - RNA, 25 nt, Artificial Sequence
  Description of Artificial Sequence: Synthetic oligonucleotide
aaaaggugaaaaagcacuauuauca

SEQ ID NO: 63052 - RNA, 25 nt, Artificial Sequence
  Description of Artificial Sequence: Synthetic oligonucleotide
gaaaaagcacuauuaucaguucugc

SEQ ID NO: 63053 - RNA, 25 nt, Artificial Sequence
  Description of Artificial Sequence: Synthetic oligonucleotide
ggcugaaaagaaagauuaaaccuac

SEQ ID NO: 63054 - RNA, 25 nt, Artificial Sequence
  Description of Artificial Sequence: Synthetic oligonucleotide
uaaacccuuauaauaaaauccuucu

SEQ ID NO: 63055 - RNA, 25 nt, Artificial Sequence
  Description of Artificial Sequence: Synthetic oligonucleotide
cauacuauuagccaaugcuguagac

SEQ ID NO: 63056 - RNA, 25 nt, Artificial Sequence
  Description of Artificial Sequence: Synthetic oligonucleotide
gacagaagcauuuugauaggaauag

SEQ ID NO: 63057 - RNA, 25 nt, Artificial Sequence
  Description of Artificial Sequence: Synthetic oligonucleotide
agagcaaauaagauaauggcccuga

SEQ ID NO: 63058 - RNA, 25 nt, Artificial Sequence
  Description of Artificial Sequence: Synthetic oligonucleotide
ccaacauuuuucucuuccucaagca

SEQ ID NO: 63059 - RNA, 25 nt, Artificial Sequence
  Description of Artificial Sequence: Synthetic oligonucleotide
uuaaguaugagaaaaguucagccca

SEQ ID NO: 63060 - RNA, 25 nt, Artificial Sequence
  Description of Artificial Sequence: Synthetic oligonucleotide
caggaauaaagauggcugcugaacc

SEQ ID NO: 63061 - RNA, 25 nt, Artificial Sequence
  Description of Artificial Sequence: Synthetic oligonucleotide
aauuugaaugaccaaguucucuuca

SEQ ID NO: 63062 - RNA, 25 nt, Artificial Sequence
  Description of Artificial Sequence: Synthetic oligonucleotide
auguauaaagauagccagccuagag

SEQ ID NO: 63063 - RNA, 25 nt, Artificial Sequence
  Description of Artificial Sequence: Synthetic oligonucleotide
ggcuguaacuaucucugugaagugu

SEQ ID NO: 63064 - RNA, 25 nt, Artificial Sequence
  Description of Artificial Sequence: Synthetic oligonucleotide
ucugugaagugugagaaaauuucaa

SEQ ID NO: 63065 - RNA, 25 nt, Artificial Sequence
  Description of Artificial Sequence: Synthetic oligonucleotide
ccuuuaaggaaaugaauccuccuga

SEQ ID NO: 63066 - RNA, 25 nt, Artificial Sequence
  Description of Artificial Sequence: Synthetic oligonucleotide
aaggauacaaaaagugacaucauau

SEQ ID NO: 63067 - RNA, 25 nt, Artificial Sequence
  Description of Artificial Sequence: Synthetic oligonucleotide
agaugcaauuugaaucuucaucaua

SEQ ID NO: 63068 - RNA, 25 nt, Artificial Sequence
  Description of Artificial Sequence: Synthetic oligonucleotide
guucaaaacgaagacuagcuauuaa

SEQ ID NO: 63069 - RNA, 25 nt, Artificial Sequence
  Description of Artificial Sequence: Synthetic oligonucleotide
gugaaaccucaucucuacuaaaaau

SEQ ID NO: 63070 - RNA, 25 nt, Artificial Sequence
  Description of Artificial Sequence: Synthetic oligonucleotide
acgaaagagaagcucuaucucgccu

SEQ ID NO: 63071 - RNA, 25 nt, Artificial Sequence
  Description of Artificial Sequence: Synthetic oligonucleotide
cuccacaagcgccuucgguccaguu

SEQ ID NO: 63072 - RNA, 25 nt, Artificial Sequence
  Description of Artificial Sequence: Synthetic oligonucleotide
gagaagauuccaaagauguagccgc

SEQ ID NO: 63073 - RNA, 25 nt, Artificial Sequence
  Description of Artificial Sequence: Synthetic oligonucleotide
aaucuggauucaaugaggagacuug

SEQ ID NO: 63074 - RNA, 25 nt, Artificial Sequence
  Description of Artificial Sequence: Synthetic oligonucleotide
agaacagauuugagaguagugagga

SEQ ID NO: 63075 - RNA, 25 nt, Artificial Sequence
  Description of Artificial Sequence: Synthetic oligonucleotide
ccagagcugugcagaugaguacaaa

SEQ ID NO: 63076 - RNA, 25 nt, Artificial Sequence
  Description of Artificial Sequence: Synthetic oligonucleotide
ccucagauuguuguuguuaaugggc

SEQ ID NO: 63077 - RNA, 25 nt, Artificial Sequence
  Description of Artificial Sequence: Synthetic oligonucleotide
cuauuuuaauuauuuuuaauuuauu

SEQ ID NO: 63078 - RNA, 25 nt, Artificial Sequence
  Description of Artificial Sequence: Synthetic oligonucleotide
uuuaauuuauuaauauuuaaauaug

SEQ ID NO: 63079 - RNA, 25 nt, Artificial Sequence
  Description of Artificial Sequence: Synthetic oligonucleotide
augcaguuugaauauccuuuguuuc

SEQ ID NO: 63080 - RNA, 25 nt, Artificial Sequence
  Description of Artificial Sequence: Synthetic oligonucleotide
caugcugcuggcgucuaaguguuug

SEQ ID NO: 63081 - RNA, 25 nt, Artificial Sequence
  Description of Artificial Sequence: Synthetic oligonucleotide
agaugugcauuucaccugugacaaa

SEQ ID NO: 63082 - RNA, 25 nt, Artificial Sequence
  Description of Artificial Sequence: Synthetic oligonucleotide
ucaaaaccugugccaggcugaauua

SEQ ID NO: 63083 - RNA, 25 nt, Artificial Sequence
  Description of Artificial Sequence: Synthetic oligonucleotide
gaauguggguagucauucuuacaau

SEQ ID NO: 63084 - RNA, 25 nt, Artificial Sequence
  Description of Artificial Sequence: Synthetic oligonucleotide
auguggguagucauucuuacaauug

SEQ ID NO: 63085 - RNA, 25 nt, Artificial Sequence
  Description of Artificial Sequence: Synthetic oligonucleotide
ugaaaaugagcaucagagaguguac

SEQ ID NO: 63086 - RNA, 25 nt, Artificial Sequence
  Description of Artificial Sequence: Synthetic oligonucleotide
uugcuuuucauguagaacucagcag

SEQ ID NO: 63087 - RNA, 25 nt, Artificial Sequence
  Description of Artificial Sequence: Synthetic oligonucleotide
uguauuucuauauuuauuuucagua

SEQ ID NO: 63088 - RNA, 25 nt, Artificial Sequence
  Description of Artificial Sequence: Synthetic oligonucleotide
uuugauuaauguuucuuaaauggaa

SEQ ID NO: 63089 - RNA, 25 nt, Artificial Sequence
  Description of Artificial Sequence: Synthetic oligonucleotide
caacguguauagugccuaaaauugu

SEQ ID NO: 63090 - RNA, 25 nt, Artificial Sequence
  Description of Artificial Sequence: Synthetic oligonucleotide
cauauccuuggcuacuaacaucugg

SEQ ID NO: 63091 - RNA, 25 nt, Artificial Sequence
  Description of Artificial Sequence: Synthetic oligonucleotide
uacuaacaucuggagacugugagcu

SEQ ID NO: 63092 - RNA, 25 nt, Artificial Sequence
  Description of Artificial Sequence: Synthetic oligonucleotide
cauaaguugugugcuuuuuauuaau

SEQ ID NO: 63093 - RNA, 25 nt, Artificial Sequence
  Description of Artificial Sequence: Synthetic oligonucleotide
gcaucauuuuggcucuucuuacauu

SEQ ID NO: 63094 - RNA, 25 nt, Artificial Sequence
  Description of Artificial Sequence: Synthetic oligonucleotide
gcucuucuuacauuuguaaaaaugu

SEQ ID NO: 63095 - RNA, 25 nt, Artificial Sequence
  Description of Artificial Sequence: Synthetic oligonucleotide
agauuaggucaucuuaauucauauu

SEQ ID NO: 63096 - RNA, 25 nt, Artificial Sequence
  Description of Artificial Sequence: Synthetic oligonucleotide
auggaauugaaagaacuaaucauga

SEQ ID NO: 63097 - RNA, 25 nt, Artificial Sequence
  Description of Artificial Sequence: Synthetic oligonucleotide
cacacucauuccuucugcucuuggg

SEQ ID NO: 63098 - RNA, 25 nt, Artificial Sequence
  Description of Artificial Sequence: Synthetic oligonucleotide
uguagagguaaccaguagcuuugag

SEQ ID NO: 63099 - RNA, 25 nt, Artificial Sequence
  Description of Artificial Sequence: Synthetic oligonucleotide
caaccacaugccacguaauauuuca

SEQ ID NO: 63100 - RNA, 25 nt, Artificial Sequence
  Description of Artificial Sequence: Synthetic oligonucleotide
ucggaaacaaguuauucucuucacu

SEQ ID NO: 63101 - RNA, 25 nt, Artificial Sequence
  Description of Artificial Sequence: Synthetic oligonucleotide
acucccaauaacuaaugcuaagaaa

SEQ ID NO: 63102 - RNA, 25 nt, Artificial Sequence
  Description of Artificial Sequence: Synthetic oligonucleotide
aaugcuaagaaaugcugaaaaucaa

SEQ ID NO: 63103 - RNA, 25 nt, Artificial Sequence
  Description of Artificial Sequence: Synthetic oligonucleotide
gucuuucucuaaauaugauuacuuu

SEQ ID NO: 63104 - RNA, 25 nt, Artificial Sequence
  Description of Artificial Sequence: Synthetic oligonucleotide
ugaauuucaggcauuuuguucuaca

SEQ ID NO: 63105 - RNA, 25 nt, Artificial Sequence
  Description of Artificial Sequence: Synthetic oligonucleotide
cgauucccucucacccgggacucuc

SEQ ID NO: 63106 - RNA, 25 nt, Artificial Sequence
  Description of Artificial Sequence: Synthetic oligonucleotide
aggaaagugaaccuuuaaaguaaag

SEQ ID NO: 63107 - RNA, 25 nt, Artificial Sequence
  Description of Artificial Sequence: Synthetic oligonucleotide
gaggcugcaugcucuggaagccugg

SEQ ID NO: 63108 - RNA, 25 nt, Artificial Sequence
  Description of Artificial Sequence: Synthetic oligonucleotide
ucucugaacagaaaacaaaagagag

SEQ ID NO: 63109 - RNA, 25 nt, Artificial Sequence
  Description of Artificial Sequence: Synthetic oligonucleotide
aacuuggcuguaaucaguuaugccg

SEQ ID NO: 63110 - RNA, 25 nt, Artificial Sequence
  Description of Artificial Sequence: Synthetic oligonucleotide
agaagccaaaauuaaaagaagucca

SEQ ID NO: 63111 - RNA, 25 nt, Artificial Sequence
  Description of Artificial Sequence: Synthetic oligonucleotide
auuaaaagaaguccaggugagguua

SEQ ID NO: 63112 - RNA, 25 nt, Artificial Sequence
  Description of Artificial Sequence: Synthetic oligonucleotide
gaauccggauuaucgggaagaggac

SEQ ID NO: 63113 - RNA, 25 nt, Artificial Sequence
  Description of Artificial Sequence: Synthetic oligonucleotide
aaugugacaucaaagcaaguauugu

SEQ ID NO: 63114 - RNA, 25 nt, Artificial Sequence
  Description of Artificial Sequence: Synthetic oligonucleotide
caucaaagcaaguauuguagcacuc

SEQ ID NO: 63115 - RNA, 25 nt, Artificial Sequence
  Description of Artificial Sequence: Synthetic oligonucleotide
agagagagaaaacaaaaccacaaau

SEQ ID NO: 63116 - RNA, 25 nt, Artificial Sequence
  Description of Artificial Sequence: Synthetic oligonucleotide
ucgcuguaguauuuaagcccauaca

SEQ ID NO: 63117 - RNA, 25 nt, Artificial Sequence
  Description of Artificial Sequence: Synthetic oligonucleotide
cgcuguaguauuuaagcccauacag

SEQ ID NO: 63118 - RNA, 25 nt, Artificial Sequence
  Description of Artificial Sequence: Synthetic oligonucleotide
auuuaagcccauacagaaaccuucc

SEQ ID NO: 63119 - RNA, 25 nt, Artificial Sequence
  Description of Artificial Sequence: Synthetic oligonucleotide
auuaaaauaaacaugguauaccuac

SEQ ID NO: 63120 - RNA, 25 nt, Artificial Sequence
  Description of Artificial Sequence: Synthetic oligonucleotide
cuguucugaucggccaguuuucgga

SEQ ID NO: 63121 - RNA, 25 nt, Artificial Sequence
  Description of Artificial Sequence: Synthetic oligonucleotide
aaauaauuugaacuuuggaacaggg

SEQ ID NO: 63122 - RNA, 25 nt, Artificial Sequence
  Description of Artificial Sequence: Synthetic oligonucleotide
ugcgaccuuaauuuaacuuuccagu

SEQ ID NO: 63123 - RNA, 25 nt, Artificial Sequence
  Description of Artificial Sequence: Synthetic oligonucleotide
cugagaaagcuaaaguuugguuuug

SEQ ID NO: 63124 - RNA, 25 nt, Artificial Sequence
  Description of Artificial Sequence: Synthetic oligonucleotide
aguaaagaugcuacuucccacugua

SEQ ID NO: 63125 - RNA, 25 nt, Artificial Sequence
  Description of Artificial Sequence: Synthetic oligonucleotide
cugcuuaauugcugauaccauauga

SEQ ID NO: 63126 - RNA, 25 nt, Artificial Sequence
  Description of Artificial Sequence: Synthetic oligonucleotide
uaccauaugaaugaaacaugggcug

SEQ ID NO: 63127 - RNA, 25 nt, Artificial Sequence
  Description of Artificial Sequence: Synthetic oligonucleotide
aacuuucuuauccaacuuuuucaua

SEQ ID NO: 63128 - RNA, 25 nt, Artificial Sequence
  Description of Artificial Sequence: Synthetic oligonucleotide
ccuugcaugacaucaugaggccgga

SEQ ID NO: 63129 - RNA, 25 nt, Artificial Sequence
  Description of Artificial Sequence: Synthetic oligonucleotide
ugaauuuguauaugacugcauuugu

SEQ ID NO: 63130 - RNA, 25 nt, Artificial Sequence
  Description of Artificial Sequence: Synthetic oligonucleotide
gaauccuaguagaauguuuacuacc

SEQ ID NO: 63131 - RNA, 25 nt, Artificial Sequence
  Description of Artificial Sequence: Synthetic oligonucleotide
gaaagggaagaauuuuuugaugaaa

SEQ ID NO: 63132 - RNA, 25 nt, Artificial Sequence
  Description of Artificial Sequence: Synthetic oligonucleotide
uaucggcaugccagugugugaauuu

SEQ ID NO: 63133 - RNA, 25 nt, Artificial Sequence
  Description of Artificial Sequence: Synthetic oligonucleotide
caccucauaguagagcaauguaugu

SEQ ID NO: 63134 - RNA, 25 nt, Artificial Sequence
  Description of Artificial Sequence: Synthetic oligonucleotide
ccagaauugccaaagcacauauaua

SEQ ID NO: 63135 - RNA, 25 nt, Artificial Sequence
  Description of Artificial Sequence: Synthetic oligonucleotide
uggugaucuggguaauaguuucucc

SEQ ID NO: 63136 - RNA, 25 nt, Artificial Sequence
  Description of Artificial Sequence: Synthetic oligonucleotide
gaucuggguaauaguuucuccaaau

SEQ ID NO: 63137 - RNA, 25 nt, Artificial Sequence
  Description of Artificial Sequence: Synthetic oligonucleotide
ggaugugaugaauacuuccuagaaa

SEQ ID NO: 63138 - RNA, 25 nt, Artificial Sequence
  Description of Artificial Sequence: Synthetic oligonucleotide
cauuuccacagcuacaccauauaug

SEQ ID NO: 63139 - RNA, 25 nt, Artificial Sequence
  Description of Artificial Sequence: Synthetic oligonucleotide
acagcuacaccauauaugaauggag

SEQ ID NO: 63140 - RNA, 25 nt, Artificial Sequence
  Description of Artificial Sequence: Synthetic oligonucleotide
ugcaguucuuacacgagaagaagau

SEQ ID NO: 63141 - RNA, 25 nt, Artificial Sequence
  Description of Artificial Sequence: Synthetic oligonucleotide
acgagaagaagaucauuuacaggga

SEQ ID NO: 63142 - RNA, 25 nt, Artificial Sequence
  Description of Artificial Sequence: Synthetic oligonucleotide
cgagaagaagaucauuuacagggac

SEQ ID NO: 63143 - RNA, 25 nt, Artificial Sequence
  Description of Artificial Sequence: Synthetic oligonucleotide
aagaagaucauuuacagggaccuga

SEQ ID NO: 63144 - RNA, 25 nt, Artificial Sequence
  Description of Artificial Sequence: Synthetic oligonucleotide
agaggaagagguguuugacugcauc

SEQ ID NO: 63145 - RNA, 25 nt, Artificial Sequence
  Description of Artificial Sequence: Synthetic oligonucleotide
gaggaagagguguuugacugcaucg

SEQ ID NO: 63146 - RNA, 25 nt, Artificial Sequence
  Description of Artificial Sequence: Synthetic oligonucleotide
cuacuuugagggcgaguucacaggg

SEQ ID NO: 63147 - RNA, 25 nt, Artificial Sequence
  Description of Artificial Sequence: Synthetic oligonucleotide
agggcaucuccuggcaccucugucc

SEQ ID NO: 63148 - RNA, 25 nt, Artificial Sequence
  Description of Artificial Sequence: Synthetic oligonucleotide
ggagugauaugguuugucuuuuuaa

SEQ ID NO: 63149 - RNA, 25 nt, Artificial Sequence
  Description of Artificial Sequence: Synthetic oligonucleotide
gagugauaugguuugucuuuuuaag

SEQ ID NO: 63150 - RNA, 25 nt, Artificial Sequence
  Description of Artificial Sequence: Synthetic oligonucleotide
ugcaguaaagauccuaaagguuguc

SEQ ID NO: 63151 - RNA, 25 nt, Artificial Sequence
  Description of Artificial Sequence: Synthetic oligonucleotide
aguaaagauccuaaagguugucgac

SEQ ID NO: 63152 - RNA, 25 nt, Artificial Sequence
  Description of Artificial Sequence: Synthetic oligonucleotide
ugacaaaggacaaccuggcaauugu

SEQ ID NO: 63153 - RNA, 25 nt, Artificial Sequence
  Description of Artificial Sequence: Synthetic oligonucleotide
gcaauugugacccaguggugcgagg

SEQ ID NO: 63154 - RNA, 25 nt, Artificial Sequence
  Description of Artificial Sequence: Synthetic oligonucleotide
aacaucauccauagagacaugaaau

SEQ ID NO: 63155 - RNA, 25 nt, Artificial Sequence
  Description of Artificial Sequence: Synthetic oligonucleotide
ugaaauccaacaauauauuucucca

SEQ ID NO: 63156 - RNA, 25 nt, Artificial Sequence
  Description of Artificial Sequence: Synthetic oligonucleotide
aacaauauauuucuccaugaaggcu

SEQ ID NO: 63157 - RNA, 25 nt, Artificial Sequence
  Description of Artificial Sequence: Synthetic oligonucleotide
aacaguaaagucacgcuggaguggu

SEQ ID NO: 63158 - RNA, 25 nt, Artificial Sequence
  Description of Artificial Sequence: Synthetic oligonucleotide
ugugaagaaaguaaaggaagagagg

SEQ ID NO: 63159 - RNA, 25 nt, Artificial Sequence
  Description of Artificial Sequence: Synthetic oligonucleotide
cuuccgagccauccuugcaucgggc

SEQ ID NO: 63160 - RNA, 25 nt, Artificial Sequence
  Description of Artificial Sequence: Synthetic oligonucleotide
aauggagguugaauauccuacugug

SEQ ID NO: 63161 - RNA, 25 nt, Artificial Sequence
  Description of Artificial Sequence: Synthetic oligonucleotide
ggagguugaauauccuacuguguaa

SEQ ID NO: 63162 - RNA, 25 nt, Artificial Sequence
  Description of Artificial Sequence: Synthetic oligonucleotide
auuuugaguuuucccuuguagugua

SEQ ID NO: 63163 - RNA, 25 nt, Artificial Sequence
  Description of Artificial Sequence: Synthetic oligonucleotide
uauccuguuuguucuuuguugauug

SEQ ID NO: 63164 - RNA, 25 nt, Artificial Sequence
  Description of Artificial Sequence: Synthetic oligonucleotide
ccuguuuguucuuuguugauugaaa

SEQ ID NO: 63165 - RNA, 25 nt, Artificial Sequence
  Description of Artificial Sequence: Synthetic oligonucleotide
cucuacagccuucuuuuucuuccau

SEQ ID NO: 63166 - RNA, 25 nt, Artificial Sequence
  Description of Artificial Sequence: Synthetic oligonucleotide
ucuuccauagcuaaucuuccuucua

SEQ ID NO: 63167 - RNA, 25 nt, Artificial Sequence
  Description of Artificial Sequence: Synthetic oligonucleotide
auaaucuuccuguugaaugcuucau

SEQ ID NO: 63168 - RNA, 25 nt, Artificial Sequence
  Description of Artificial Sequence: Synthetic oligonucleotide
uaaucuuccuguugaaugcuucaug

SEQ ID NO: 63169 - RNA, 25 nt, Artificial Sequence
  Description of Artificial Sequence: Synthetic oligonucleotide
cuucaugacuugaauucuacuuuga

SEQ ID NO: 63170 - RNA, 25 nt, Artificial Sequence
  Description of Artificial Sequence: Synthetic oligonucleotide
aagagggagagaagcaacuacagac

SEQ ID NO: 63171 - RNA, 25 nt, Artificial Sequence
  Description of Artificial Sequence: Synthetic oligonucleotide
cgucuccuaccagaccaaggucaac

SEQ ID NO: 63172 - RNA, 25 nt, Artificial Sequence
  Description of Artificial Sequence: Synthetic oligonucleotide
gaucaaucggcccgacuaucucgac

SEQ ID NO: 63173 - RNA, 25 nt, Artificial Sequence
  Description of Artificial Sequence: Synthetic oligonucleotide
ggacgaacauccaaccuucccaaac

SEQ ID NO: 63174 - RNA, 25 nt, Artificial Sequence
  Description of Artificial Sequence: Synthetic oligonucleotide
agggucggaacccaagcuuagaacu

SEQ ID NO: 63175 - RNA, 25 nt, Artificial Sequence
  Description of Artificial Sequence: Synthetic oligonucleotide
ucggaacccaagcuuagaacuuuaa

SEQ ID NO: 63176 - RNA, 25 nt, Artificial Sequence
  Description of Artificial Sequence: Synthetic oligonucleotide
acccaagcuuagaacuuuaagcaac

SEQ ID NO: 63177 - RNA, 25 nt, Artificial Sequence
  Description of Artificial Sequence: Synthetic oligonucleotide
gaacuuuaagcaacaagaccaccac

SEQ ID NO: 63178 - RNA, 25 nt, Artificial Sequence
  Description of Artificial Sequence: Synthetic oligonucleotide
acuauucaguggcgagaaauaaagu

SEQ ID NO: 63179 - RNA, 25 nt, Artificial Sequence
  Description of Artificial Sequence: Synthetic oligonucleotide
cuauucaguggcgagaaauaaaguu

SEQ ID NO: 63180 - RNA, 25 nt, Artificial Sequence
  Description of Artificial Sequence: Synthetic oligonucleotide
aaacacagauaacaggaaaugaucc

SEQ ID NO: 63181 - RNA, 25 nt, Artificial Sequence
  Description of Artificial Sequence: Synthetic oligonucleotide
cuuaagaaaagagaagaaaugaaac

SEQ ID NO: 63182 - RNA, 25 nt, Artificial Sequence
  Description of Artificial Sequence: Synthetic oligonucleotide
cugaaggaguguguuuccauccucc

SEQ ID NO: 63183 - RNA, 25 nt, Artificial Sequence
  Description of Artificial Sequence: Synthetic oligonucleotide
ucaccgcgggacugaaaaucuuuga

SEQ ID NO: 63184 - RNA, 25 nt, Artificial Sequence
  Description of Artificial Sequence: Synthetic oligonucleotide
agcagaaauaagcgugccguucagg

SEQ ID NO: 63185 - RNA, 25 nt, Artificial Sequence
  Description of Artificial Sequence: Synthetic oligonucleotide
aagcgugccguucaggguccagaag

SEQ ID NO: 63186 - RNA, 25 nt, Artificial Sequence
  Description of Artificial Sequence: Synthetic oligonucleotide
agaaacagucacucaagacugcuug

SEQ ID NO: 63187 - RNA, 25 nt, Artificial Sequence
  Description of Artificial Sequence: Synthetic oligonucleotide
agaggaagaagguccaugucuuugg

SEQ ID NO: 63188 - RNA, 25 nt, Artificial Sequence
  Description of Artificial Sequence: Synthetic oligonucleotide
uguauucaaaauaugccugaaacac

SEQ ID NO: 63189 - RNA, 25 nt, Artificial Sequence
  Description of Artificial Sequence: Synthetic oligonucleotide
auuuuccucccuuucucuguaccuc

SEQ ID NO: 63190 - RNA, 25 nt, Artificial Sequence
  Description of Artificial Sequence: Synthetic oligonucleotide
caaagaaagauagagcaagacaaga

SEQ ID NO: 63191 - RNA, 25 nt, Artificial Sequence
  Description of Artificial Sequence: Synthetic oligonucleotide
aagaaagauagagcaagacaagaaa

SEQ ID NO: 63192 - RNA, 25 nt, Artificial Sequence
  Description of Artificial Sequence: Synthetic oligonucleotide
gaaagcauuuguuuguacaagaucc

SEQ ID NO: 63193 - RNA, 25 nt, Artificial Sequence
  Description of Artificial Sequence: Synthetic oligonucleotide
ugaguuaaacgaacguacuugcaga

SEQ ID NO: 63194 - RNA, 25 nt, Artificial Sequence
  Description of Artificial Sequence: Synthetic oligonucleotide
acugauacagaacgaucgauacaga

SEQ ID NO: 63195 - RNA, 25 nt, Artificial Sequence
  Description of Artificial Sequence: Synthetic oligonucleotide
auauuauauauauauaaaaauaaau

SEQ ID NO: 63196 - RNA, 25 nt, Artificial Sequence
  Description of Artificial Sequence: Synthetic oligonucleotide
auuauauauauauaaaaauaaauau

SEQ ID NO: 63197 - RNA, 25 nt, Artificial Sequence
  Description of Artificial Sequence: Synthetic oligonucleotide
ucacuggauguauuugacugcugug

SEQ ID NO: 63198 - RNA, 25 nt, Artificial Sequence
  Description of Artificial Sequence: Synthetic oligonucleotide
cagggaagaggaggagaugagagac

SEQ ID NO: 63199 - RNA, 25 nt, Artificial Sequence
  Description of Artificial Sequence: Synthetic oligonucleotide
augaucuuuuuuuugucccacuugg

SEQ ID NO: 63200 - RNA, 27 nt, Artificial Sequence
  Description of Artificial Sequence: Synthetic oligonucleotide
ggccgugaacuccucaucaaaauaccu

SEQ ID NO: 63201 - RNA, 27 nt, Artificial Sequence
  Description of Artificial Sequence: Synthetic oligonucleotide
uggugugauggugaucaucugggccgu

SEQ ID NO: 63202 - RNA, 27 nt, Artificial Sequence
  Description of Artificial Sequence: Synthetic oligonucleotide
aaacccgcaggauaguuuucuucccua

SEQ ID NO: 63203 - RNA, 27 nt, Artificial Sequence
  Description of Artificial Sequence: Synthetic oligonucleotide
caaacuggaugaaauaaauuaaaaccc

SEQ ID NO: 63204 - RNA, 27 nt, Artificial Sequence
  Description of Artificial Sequence: Synthetic oligonucleotide
agaaguccuuaacauuucccuacguga

SEQ ID NO: 63205 - RNA, 27 nt, Artificial Sequence
  Description of Artificial Sequence: Synthetic oligonucleotide
cucugucccacuggguaaacccuggcc

SEQ ID NO: 63206 - RNA, 27 nt, Artificial Sequence
  Description of Artificial Sequence: Synthetic oligonucleotide
cacaauaacaaauuuaaaccuugcucc

SEQ ID NO: 63207 - RNA, 27 nt, Artificial Sequence
  Description of Artificial Sequence: Synthetic oligonucleotide
aaaugcauuugaacaacauaauacaca

SEQ ID NO: 63208 - RNA, 27 nt, Artificial Sequence
  Description of Artificial Sequence: Synthetic oligonucleotide
ggcuuuccugucacaaagauuaaaaac

SEQ ID NO: 63209 - RNA, 27 nt, Artificial Sequence
  Description of Artificial Sequence: Synthetic oligonucleotide
agggcuuuccugucacaaagauuaaaa

SEQ ID NO: 63210 - RNA, 27 nt, Artificial Sequence
  Description of Artificial Sequence: Synthetic oligonucleotide
ggccaugcugggagacauaagcagcag

SEQ ID NO: 63211 - RNA, 27 nt, Artificial Sequence
  Description of Artificial Sequence: Synthetic oligonucleotide
ucagggagaagcuucugaaacacuucu

SEQ ID NO: 63212 - RNA, 27 nt, Artificial Sequence
  Description of Artificial Sequence: Synthetic oligonucleotide
aagggcuucuuccuuauugauggucag

SEQ ID NO: 63213 - RNA, 27 nt, Artificial Sequence
  Description of Artificial Sequence: Synthetic oligonucleotide
ugaagggcuucuuccuuauugaugguc

SEQ ID NO: 63214 - RNA, 27 nt, Artificial Sequence
  Description of Artificial Sequence: Synthetic oligonucleotide
cgcugaagggcuucuuccuuauugaug

SEQ ID NO: 63215 - RNA, 27 nt, Artificial Sequence
  Description of Artificial Sequence: Synthetic oligonucleotide
gccgcugaagggcuucuuccuuauuga

SEQ ID NO: 63216 - RNA, 27 nt, Artificial Sequence
  Description of Artificial Sequence: Synthetic oligonucleotide
acuggccgcugaagggcuucuuccuua

SEQ ID NO: 63217 - RNA, 27 nt, Artificial Sequence
  Description of Artificial Sequence: Synthetic oligonucleotide
cggagcuuuucaccuuuaguuaugcuu

SEQ ID NO: 63218 - RNA, 27 nt, Artificial Sequence
  Description of Artificial Sequence: Synthetic oligonucleotide
ccggagcuuuucaccuuuaguuaugcu

SEQ ID NO: 63219 - RNA, 27 nt, Artificial Sequence
  Description of Artificial Sequence: Synthetic oligonucleotide
cagacuguugacuggcgugauguaguu

SEQ ID NO: 63220 - RNA, 27 nt, Artificial Sequence
  Description of Artificial Sequence: Synthetic oligonucleotide
cuuuugaacucugcuuaaauccagugg

SEQ ID NO: 63221 - RNA, 27 nt, Artificial Sequence
  Description of Artificial Sequence: Synthetic oligonucleotide
gcuuuugaacucugcuuaaauccagug

SEQ ID NO: 63222 - RNA, 27 nt, Artificial Sequence
  Description of Artificial Sequence: Synthetic oligonucleotide
agggcuuuugaacucugcuuaaaucca

SEQ ID NO: 63223 - RNA, 27 nt, Artificial Sequence
  Description of Artificial Sequence: Synthetic oligonucleotide
aagggcuuuugaacucugcuuaaaucc

SEQ ID NO: 63224 - RNA, 27 nt, Artificial Sequence
  Description of Artificial Sequence: Synthetic oligonucleotide
ugaagggcuuuugaacucugcuuaaau

SEQ ID NO: 63225 - RNA, 27 nt, Artificial Sequence
  Description of Artificial Sequence: Synthetic oligonucleotide
cugaagggcuuuugaacucugcuuaaa

SEQ ID NO: 63226 - RNA, 27 nt, Artificial Sequence
  Description of Artificial Sequence: Synthetic oligonucleotide
cgcugaagggcuuuugaacucugcuua

SEQ ID NO: 63227 - RNA, 27 nt, Artificial Sequence
  Description of Artificial Sequence: Synthetic oligonucleotide
cgagcggcuucacucagacccugaggc

SEQ ID NO: 63228 - RNA, 27 nt, Artificial Sequence
  Description of Artificial Sequence: Synthetic oligonucleotide
uugacuggcgugauguaguugcuuggg

SEQ ID NO: 63229 - RNA, 27 nt, Artificial Sequence
  Description of Artificial Sequence: Synthetic oligonucleotide
cacgcaccaagaagcugccauugaucc

SEQ ID NO: 63230 - RNA, 27 nt, Artificial Sequence
  Description of Artificial Sequence: Synthetic oligonucleotide
cugaugaauccaaugugggcuggaauc

SEQ ID NO: 63231 - RNA, 27 nt, Artificial Sequence
  Description of Artificial Sequence: Synthetic oligonucleotide
cuuagguauuccacauucucagcugug

SEQ ID NO: 63232 - RNA, 27 nt, Artificial Sequence
  Description of Artificial Sequence: Synthetic oligonucleotide
ugagccucaaauuaggagauacguuuu

SEQ ID NO: 63233 - RNA, 27 nt, Artificial Sequence
  Description of Artificial Sequence: Synthetic oligonucleotide
ccaauuguagagaaauuauuuuaggaa

SEQ ID NO: 63234 - RNA, 27 nt, Artificial Sequence
  Description of Artificial Sequence: Synthetic oligonucleotide
ggcuccuaacuagcugaaucuuccaau

SEQ ID NO: 63235 - RNA, 27 nt, Artificial Sequence
  Description of Artificial Sequence: Synthetic oligonucleotide
guggauauugacuaggagaguuuaaaa

SEQ ID NO: 63236 - RNA, 27 nt, Artificial Sequence
  Description of Artificial Sequence: Synthetic oligonucleotide
ugugacugaacauaacuguaggcugaa

SEQ ID NO: 63237 - RNA, 27 nt, Artificial Sequence
  Description of Artificial Sequence: Synthetic oligonucleotide
guaugugugugugacugaacauaacug

SEQ ID NO: 63238 - RNA, 27 nt, Artificial Sequence
  Description of Artificial Sequence: Synthetic oligonucleotide
aagcaaaaggaacauuuuguaugugug

SEQ ID NO: 63239 - RNA, 27 nt, Artificial Sequence
  Description of Artificial Sequence: Synthetic oligonucleotide
aaaaauuacuuuaaaagcaaaaggaac

SEQ ID NO: 63240 - RNA, 27 nt, Artificial Sequence
  Description of Artificial Sequence: Synthetic oligonucleotide
ccauugacuguugcuucacaggucaga

SEQ ID NO: 63241 - RNA, 27 nt, Artificial Sequence
  Description of Artificial Sequence: Synthetic oligonucleotide
auugguuugucgaugugugagauaguu

SEQ ID NO: 63242 - RNA, 27 nt, Artificial Sequence
  Description of Artificial Sequence: Synthetic oligonucleotide
agugguagcaguacaauugaggacaag

SEQ ID NO: 63243 - RNA, 27 nt, Artificial Sequence
  Description of Artificial Sequence: Synthetic oligonucleotide
uaagaccgcuugccagcuacgguuuca

SEQ ID NO: 63244 - RNA, 27 nt, Artificial Sequence
  Description of Artificial Sequence: Synthetic oligonucleotide
agccgguaagaccgcuugccagcuacg

SEQ ID NO: 63245 - RNA, 27 nt, Artificial Sequence
  Description of Artificial Sequence: Synthetic oligonucleotide
gguaacccaucuuuuaaccauacaacu

SEQ ID NO: 63246 - RNA, 27 nt, Artificial Sequence
  Description of Artificial Sequence: Synthetic oligonucleotide
ucgcagguaacccaucuuuuaaccaua

SEQ ID NO: 63247 - RNA, 27 nt, Artificial Sequence
  Description of Artificial Sequence: Synthetic oligonucleotide
cucagcaagauuguauaauucccugca

SEQ ID NO: 63248 - RNA, 27 nt, Artificial Sequence
  Description of Artificial Sequence: Synthetic oligonucleotide
acuguuuuaugcucagcaagauuguau

SEQ ID NO: 63249 - RNA, 27 nt, Artificial Sequence
  Description of Artificial Sequence: Synthetic oligonucleotide
aggauaaaggacucuucauuauuggaa

SEQ ID NO: 63250 - RNA, 27 nt, Artificial Sequence
  Description of Artificial Sequence: Synthetic oligonucleotide
caacuugcguuggaacauccaaagugu

SEQ ID NO: 63251 - RNA, 27 nt, Artificial Sequence
  Description of Artificial Sequence: Synthetic oligonucleotide
augguuucaguuuaguggaagcauuua

SEQ ID NO: 63252 - RNA, 27 nt, Artificial Sequence
  Description of Artificial Sequence: Synthetic oligonucleotide
auauuuaacaaagucaaacuuucucac

SEQ ID NO: 63253 - RNA, 27 nt, Artificial Sequence
  Description of Artificial Sequence: Synthetic oligonucleotide
aacuuuuaauauacaguaguucuuuuc

SEQ ID NO: 63254 - RNA, 27 nt, Artificial Sequence
  Description of Artificial Sequence: Synthetic oligonucleotide
guuaagucaaaacccguauuucuaaag

SEQ ID NO: 63255 - RNA, 27 nt, Artificial Sequence
  Description of Artificial Sequence: Synthetic oligonucleotide
gugcugaguuugcuguacccauguuga

SEQ ID NO: 63256 - RNA, 27 nt, Artificial Sequence
  Description of Artificial Sequence: Synthetic oligonucleotide
ugaggucagcaucuucugugucuuuac

SEQ ID NO: 63257 - RNA, 27 nt, Artificial Sequence
  Description of Artificial Sequence: Synthetic oligonucleotide
gcgaucugaauaaaccucccuacuagc

SEQ ID NO: 63258 - RNA, 27 nt, Artificial Sequence
  Description of Artificial Sequence: Synthetic oligonucleotide
aucccagaacccugcugcagaaggcca

SEQ ID NO: 63259 - RNA, 27 nt, Artificial Sequence
  Description of Artificial Sequence: Synthetic oligonucleotide
cauaauuuccaauauguaccagaccuu

SEQ ID NO: 63260 - RNA, 27 nt, Artificial Sequence
  Description of Artificial Sequence: Synthetic oligonucleotide
cuagugcuuccaucggaaggacuaggu

SEQ ID NO: 63261 - RNA, 27 nt, Artificial Sequence
  Description of Artificial Sequence: Synthetic oligonucleotide
uccacauaaaaacaauauucacuggga

SEQ ID NO: 63262 - RNA, 27 nt, Artificial Sequence
  Description of Artificial Sequence: Synthetic oligonucleotide
ucuaccaauuccaacuugaauucauug

SEQ ID NO: 63263 - RNA, 27 nt, Artificial Sequence
  Description of Artificial Sequence: Synthetic oligonucleotide
ucuccaagucuaaaucuguguccugag

SEQ ID NO: 63264 - RNA, 27 nt, Artificial Sequence
  Description of Artificial Sequence: Synthetic oligonucleotide
uggaauacuguaacugugcuuugagga

SEQ ID NO: 63265 - RNA, 27 nt, Artificial Sequence
  Description of Artificial Sequence: Synthetic oligonucleotide
uuaauucaucagugguggcagugguag

SEQ ID NO: 63266 - RNA, 27 nt, Artificial Sequence
  Description of Artificial Sequence: Synthetic oligonucleotide
gugaugauguggcacuaguaguuucuu

SEQ ID NO: 63267 - RNA, 27 nt, Artificial Sequence
  Description of Artificial Sequence: Synthetic oligonucleotide
ucuguuuggugaggcuguccgacuuug

SEQ ID NO: 63268 - RNA, 27 nt, Artificial Sequence
  Description of Artificial Sequence: Synthetic oligonucleotide
ccaucauguuccauuuuucgcuuucuc

SEQ ID NO: 63269 - RNA, 27 nt, Artificial Sequence
  Description of Artificial Sequence: Synthetic oligonucleotide
gcagucuacaugcuaaaucagagggua

SEQ ID NO: 63270 - RNA, 27 nt, Artificial Sequence
  Description of Artificial Sequence: Synthetic oligonucleotide
cauaaauagauccuuaaauagcucaaa

SEQ ID NO: 63271 - RNA, 27 nt, Artificial Sequence
  Description of Artificial Sequence: Synthetic oligonucleotide
ugauaauagugcuuuuucaccuuuuuc

SEQ ID NO: 63272 - RNA, 27 nt, Artificial Sequence
  Description of Artificial Sequence: Synthetic oligonucleotide
gcagaacugauaauagugcuuuuucac

SEQ ID NO: 63273 - RNA, 27 nt, Artificial Sequence
  Description of Artificial Sequence: Synthetic oligonucleotide
guagguuuaaucuuucuuuucagccau

SEQ ID NO: 63274 - RNA, 27 nt, Artificial Sequence
  Description of Artificial Sequence: Synthetic oligonucleotide
agaaggauuuuauuauaaggguuuaau

SEQ ID NO: 63275 - RNA, 27 nt, Artificial Sequence
  Description of Artificial Sequence: Synthetic oligonucleotide
gucuacagcauuggcuaauaguaugaa

SEQ ID NO: 63276 - RNA, 27 nt, Artificial Sequence
  Description of Artificial Sequence: Synthetic oligonucleotide
cuauuccuaucaaaaugcuucugucua

SEQ ID NO: 63277 - RNA, 27 nt, Artificial Sequence
  Description of Artificial Sequence: Synthetic oligonucleotide
ucagggccauuaucuuauuugcucuau

SEQ ID NO: 63278 - RNA, 27 nt, Artificial Sequence
  Description of Artificial Sequence: Synthetic oligonucleotide
ugcuugaggaagagaaaaauguugguc

SEQ ID NO: 63279 - RNA, 27 nt, Artificial Sequence
  Description of Artificial Sequence: Synthetic oligonucleotide
ugggcugaacuuuucucauacuuaaag

SEQ ID NO: 63280 - RNA, 27 nt, Artificial Sequence
  Description of Artificial Sequence: Synthetic oligonucleotide
gguucagcagccaucuuuauuccugcg

SEQ ID NO: 63281 - RNA, 27 nt, Artificial Sequence
  Description of Artificial Sequence: Synthetic oligonucleotide
ugaagagaacuuggucauucaaauuuc

SEQ ID NO: 63282 - RNA, 27 nt, Artificial Sequence
  Description of Artificial Sequence: Synthetic oligonucleotide
cucuaggcuggcuaucuuuauacauac

SEQ ID NO: 63283 - RNA, 27 nt, Artificial Sequence
  Description of Artificial Sequence: Synthetic oligonucleotide
acacuucacagagauaguuacagccau

SEQ ID NO: 63284 - RNA, 27 nt, Artificial Sequence
  Description of Artificial Sequence: Synthetic oligonucleotide
uugaaauuuucucacacuucacagaga

SEQ ID NO: 63285 - RNA, 27 nt, Artificial Sequence
  Description of Artificial Sequence: Synthetic oligonucleotide
ucaggaggauucauuuccuuaaaggaa

SEQ ID NO: 63286 - RNA, 27 nt, Artificial Sequence
  Description of Artificial Sequence: Synthetic oligonucleotide
auaugaugucacuuuuuguauccuuga

SEQ ID NO: 63287 - RNA, 27 nt, Artificial Sequence
  Description of Artificial Sequence: Synthetic oligonucleotide
uaugaugaagauucaaauugcaucuua

SEQ ID NO: 63288 - RNA, 27 nt, Artificial Sequence
  Description of Artificial Sequence: Synthetic oligonucleotide
uuaauagcuagucuucguuuugaacag

SEQ ID NO: 63289 - RNA, 27 nt, Artificial Sequence
  Description of Artificial Sequence: Synthetic oligonucleotide
auuuuuaguagagaugagguuucacca

SEQ ID NO: 63290 - RNA, 27 nt, Artificial Sequence
  Description of Artificial Sequence: Synthetic oligonucleotide
aggcgagauagagcuucucuuucguuc

SEQ ID NO: 63291 - RNA, 27 nt, Artificial Sequence
  Description of Artificial Sequence: Synthetic oligonucleotide
aacuggaccgaaggcgcuuguggagaa

SEQ ID NO: 63292 - RNA, 27 nt, Artificial Sequence
  Description of Artificial Sequence: Synthetic oligonucleotide
gcggcuacaucuuuggaaucuucuccu

SEQ ID NO: 63293 - RNA, 27 nt, Artificial Sequence
  Description of Artificial Sequence: Synthetic oligonucleotide
caagucuccucauugaauccagauugg

SEQ ID NO: 63294 - RNA, 27 nt, Artificial Sequence
  Description of Artificial Sequence: Synthetic oligonucleotide
uccucacuacucucaaaucuguucugg

SEQ ID NO: 63295 - RNA, 27 nt, Artificial Sequence
  Description of Artificial Sequence: Synthetic oligonucleotide
uuuguacucaucugcacagcucuggcu

SEQ ID NO: 63296 - RNA, 27 nt, Artificial Sequence
  Description of Artificial Sequence: Synthetic oligonucleotide
gcccauuaacaacaacaaucugaggug

SEQ ID NO: 63297 - RNA, 27 nt, Artificial Sequence
  Description of Artificial Sequence: Synthetic oligonucleotide
aauaaauuaaaaauaauuaaaauagug

SEQ ID NO: 63298 - RNA, 27 nt, Artificial Sequence
  Description of Artificial Sequence: Synthetic oligonucleotide
cauauuuaaauauuaauaaauuaaaaa

SEQ ID NO: 63299 - RNA, 27 nt, Artificial Sequence
  Description of Artificial Sequence: Synthetic oligonucleotide
gaaacaaaggauauucaaacugcauag

SEQ ID NO: 63300 - RNA, 27 nt, Artificial Sequence
  Description of Artificial Sequence: Synthetic oligonucleotide
caaacacuuagacgccagcagcauggg

SEQ ID NO: 63301 - RNA, 27 nt, Artificial Sequence
  Description of Artificial Sequence: Synthetic oligonucleotide
uuugucacaggugaaaugcacaucuga

SEQ ID NO: 63302 - RNA, 27 nt, Artificial Sequence
  Description of Artificial Sequence: Synthetic oligonucleotide
uaauucagccuggcacagguuuugauc

SEQ ID NO: 63303 - RNA, 27 nt, Artificial Sequence
  Description of Artificial Sequence: Synthetic oligonucleotide
auuguaagaaugacuacccacauucac

SEQ ID NO: 63304 - RNA, 27 nt, Artificial Sequence
  Description of Artificial Sequence: Synthetic oligonucleotide
caauuguaagaaugacuacccacauuc

SEQ ID NO: 63305 - RNA, 27 nt, Artificial Sequence
  Description of Artificial Sequence: Synthetic oligonucleotide
guacacucucugaugcucauuuucaua

SEQ ID NO: 63306 - RNA, 27 nt, Artificial Sequence
  Description of Artificial Sequence: Synthetic oligonucleotide
cugcugaguucuacaugaaaagcaaau

SEQ ID NO: 63307 - RNA, 27 nt, Artificial Sequence
  Description of Artificial Sequence: Synthetic oligonucleotide
uacugaaaauaaauauagaaauacaac

SEQ ID NO: 63308 - RNA, 27 nt, Artificial Sequence
  Description of Artificial Sequence: Synthetic oligonucleotide
uuccauuuaagaaacauuaaucaaaac

SEQ ID NO: 63309 - RNA, 27 nt, Artificial Sequence
  Description of Artificial Sequence: Synthetic oligonucleotide
acaauuuuaggcacuauacacguuguu

SEQ ID NO: 63310 - RNA, 27 nt, Artificial Sequence
  Description of Artificial Sequence: Synthetic oligonucleotide
ccagauguuaguagccaaggauauggu

SEQ ID NO: 63311 - RNA, 27 nt, Artificial Sequence
  Description of Artificial Sequence: Synthetic oligonucleotide
agcucacagucuccagauguuaguagc

SEQ ID NO: 63312 - RNA, 27 nt, Artificial Sequence
  Description of Artificial Sequence: Synthetic oligonucleotide
auuaauaaaaagcacacaacuuauggc

SEQ ID NO: 63313 - RNA, 27 nt, Artificial Sequence
  Description of Artificial Sequence: Synthetic oligonucleotide
aauguaagaagagccaaaaugaugcau

SEQ ID NO: 63314 - RNA, 27 nt, Artificial Sequence
  Description of Artificial Sequence: Synthetic oligonucleotide
acauuuuuacaaauguaagaagagcca

SEQ ID NO: 63315 - RNA, 27 nt, Artificial Sequence
  Description of Artificial Sequence: Synthetic oligonucleotide
aauaugaauuaagaugaccuaaucugu

SEQ ID NO: 63316 - RNA, 27 nt, Artificial Sequence
  Description of Artificial Sequence: Synthetic oligonucleotide
ucaugauuaguucuuucaauuccaucc

SEQ ID NO: 63317 - RNA, 27 nt, Artificial Sequence
  Description of Artificial Sequence: Synthetic oligonucleotide
cccaagagcagaaggaaugagugugca

SEQ ID NO: 63318 - RNA, 27 nt, Artificial Sequence
  Description of Artificial Sequence: Synthetic oligonucleotide
cucaaagcuacugguuaccucuacacc

SEQ ID NO: 63319 - RNA, 27 nt, Artificial Sequence
  Description of Artificial Sequence: Synthetic oligonucleotide
ugaaauauuacguggcaugugguuggg

SEQ ID NO: 63320 - RNA, 27 nt, Artificial Sequence
  Description of Artificial Sequence: Synthetic oligonucleotide
agugaagagaauaacuuguuuccgaag

SEQ ID NO: 63321 - RNA, 27 nt, Artificial Sequence
  Description of Artificial Sequence: Synthetic oligonucleotide
uuucuuagcauuaguuauugggaguga

SEQ ID NO: 63322 - RNA, 27 nt, Artificial Sequence
  Description of Artificial Sequence: Synthetic oligonucleotide
uugauuuucagcauuucuuagcauuag

SEQ ID NO: 63323 - RNA, 27 nt, Artificial Sequence
  Description of Artificial Sequence: Synthetic oligonucleotide
aaaguaaucauauuuagagaaagacag

SEQ ID NO: 63324 - RNA, 27 nt, Artificial Sequence
  Description of Artificial Sequence: Synthetic oligonucleotide
uguagaacaaaaugccugaaauucagc

SEQ ID NO: 63325 - RNA, 27 nt, Artificial Sequence
  Description of Artificial Sequence: Synthetic oligonucleotide
gagagucccgggugagagggaaucgcc

SEQ ID NO: 63326 - RNA, 27 nt, Artificial Sequence
  Description of Artificial Sequence: Synthetic oligonucleotide
cuuuacuuuaaagguucacuuuccuug

SEQ ID NO: 63327 - RNA, 27 nt, Artificial Sequence
  Description of Artificial Sequence: Synthetic oligonucleotide
ccaggcuuccagagcaugcagccuccu

SEQ ID NO: 63328 - RNA, 27 nt, Artificial Sequence
  Description of Artificial Sequence: Synthetic oligonucleotide
cucucuuuuguuuucuguucagagaaa

SEQ ID NO: 63329 - RNA, 27 nt, Artificial Sequence
  Description of Artificial Sequence: Synthetic oligonucleotide
cggcauaacugauuacagccaaguuca

SEQ ID NO: 63330 - RNA, 27 nt, Artificial Sequence
  Description of Artificial Sequence: Synthetic oligonucleotide
uggacuucuuuuaauuuuggcuucuuc

SEQ ID NO: 63331 - RNA, 27 nt, Artificial Sequence
  Description of Artificial Sequence: Synthetic oligonucleotide
uaaccucaccuggacuucuuuuaauuu

SEQ ID NO: 63332 - RNA, 27 nt, Artificial Sequence
  Description of Artificial Sequence: Synthetic oligonucleotide
guccucuucccgauaauccggauucag

SEQ ID NO: 63333 - RNA, 27 nt, Artificial Sequence
  Description of Artificial Sequence: Synthetic oligonucleotide
acaauacuugcuuugaugucacauuaa

SEQ ID NO: 63334 - RNA, 27 nt, Artificial Sequence
  Description of Artificial Sequence: Synthetic oligonucleotide
gagugcuacaauacuugcuuugauguc

SEQ ID NO: 63335 - RNA, 27 nt, Artificial Sequence
  Description of Artificial Sequence: Synthetic oligonucleotide
auuugugguuuuguuuucucucucucu

SEQ ID NO: 63336 - RNA, 27 nt, Artificial Sequence
  Description of Artificial Sequence: Synthetic oligonucleotide
uguaugggcuuaaauacuacagcgagg

SEQ ID NO: 63337 - RNA, 27 nt, Artificial Sequence
  Description of Artificial Sequence: Synthetic oligonucleotide
cuguaugggcuuaaauacuacagcgag

SEQ ID NO: 63338 - RNA, 27 nt, Artificial Sequence
  Description of Artificial Sequence: Synthetic oligonucleotide
ggaagguuucuguaugggcuuaaauac

SEQ ID NO: 63339 - RNA, 27 nt, Artificial Sequence
  Description of Artificial Sequence: Synthetic oligonucleotide
guagguauaccauguuuauuuuaauac

SEQ ID NO: 63340 - RNA, 27 nt, Artificial Sequence
  Description of Artificial Sequence: Synthetic oligonucleotide
uccgaaaacuggccgaucagaacagcc

SEQ ID NO: 63341 - RNA, 27 nt, Artificial Sequence
  Description of Artificial Sequence: Synthetic oligonucleotide
cccuguuccaaaguucaaauuauuugu

SEQ ID NO: 63342 - RNA, 27 nt, Artificial Sequence
  Description of Artificial Sequence: Synthetic oligonucleotide
acuggaaaguuaaauuaaggucgcaau

SEQ ID NO: 63343 - RNA, 27 nt, Artificial Sequence
  Description of Artificial Sequence: Synthetic oligonucleotide
caaaaccaaacuuuagcuuucucagcc

SEQ ID NO: 63344 - RNA, 27 nt, Artificial Sequence
  Description of Artificial Sequence: Synthetic oligonucleotide
uacagugggaaguagcaucuuuacuuu

SEQ ID NO: 63345 - RNA, 27 nt, Artificial Sequence
  Description of Artificial Sequence: Synthetic oligonucleotide
ucauaugguaucagcaauuaagcagua

SEQ ID NO: 63346 - RNA, 27 nt, Artificial Sequence
  Description of Artificial Sequence: Synthetic oligonucleotide
cagcccauguuucauucauaugguauc

SEQ ID NO: 63347 - RNA, 27 nt, Artificial Sequence
  Description of Artificial Sequence: Synthetic oligonucleotide
uaugaaaaaguuggauaagaaaguugg

SEQ ID NO: 63348 - RNA, 27 nt, Artificial Sequence
  Description of Artificial Sequence: Synthetic oligonucleotide
uccggccucaugaugucaugcaaggcu

SEQ ID NO: 63349 - RNA, 27 nt, Artificial Sequence
  Description of Artificial Sequence: Synthetic oligonucleotide
acaaaugcagucauauacaaauucagg

SEQ ID NO: 63350 - RNA, 27 nt, Artificial Sequence
  Description of Artificial Sequence: Synthetic oligonucleotide
gguaguaaacauucuacuaggauucuu

SEQ ID NO: 63351 - RNA, 27 nt, Artificial Sequence
  Description of Artificial Sequence: Synthetic oligonucleotide
uuucaucaaaaaauucuucccuuucug

SEQ ID NO: 63352 - RNA, 27 nt, Artificial Sequence
  Description of Artificial Sequence: Synthetic oligonucleotide
aaauucacacacuggcaugccgauagc

SEQ ID NO: 63353 - RNA, 27 nt, Artificial Sequence
  Description of Artificial Sequence: Synthetic oligonucleotide
acauacauugcucuacuaugaggugaa

SEQ ID NO: 63354 - RNA, 27 nt, Artificial Sequence
  Description of Artificial Sequence: Synthetic oligonucleotide
uauauaugugcuuuggcaauucuggug

SEQ ID NO: 63355 - RNA, 27 nt, Artificial Sequence
  Description of Artificial Sequence: Synthetic oligonucleotide
ggagaaacuauuacccagaucaccacu

SEQ ID NO: 63356 - RNA, 27 nt, Artificial Sequence
  Description of Artificial Sequence: Synthetic oligonucleotide
auuuggagaaacuauuacccagaucac

SEQ ID NO: 63357 - RNA, 27 nt, Artificial Sequence
  Description of Artificial Sequence: Synthetic oligonucleotide
uuucuaggaaguauucaucacauccac

SEQ ID NO: 63358 - RNA, 27 nt, Artificial Sequence
  Description of Artificial Sequence: Synthetic oligonucleotide
cauauaugguguagcuguggaaaugcg

SEQ ID NO: 63359 - RNA, 27 nt, Artificial Sequence
  Description of Artificial Sequence: Synthetic oligonucleotide
cuccauucauauaugguguagcugugg

SEQ ID NO: 63360 - RNA, 27 nt, Artificial Sequence
  Description of Artificial Sequence: Synthetic oligonucleotide
aucuucuucucguguaagaacugcagc

SEQ ID NO: 63361 - RNA, 27 nt, Artificial Sequence
  Description of Artificial Sequence: Synthetic oligonucleotide
ucccuguaaaugaucuucuucucgugu

SEQ ID NO: 63362 - RNA, 27 nt, Artificial Sequence
  Description of Artificial Sequence: Synthetic oligonucleotide
gucccuguaaaugaucuucuucucgug

SEQ ID NO: 63363 - RNA, 27 nt, Artificial Sequence
  Description of Artificial Sequence: Synthetic oligonucleotide
ucaggucccuguaaaugaucuucuucu

SEQ ID NO: 63364 - RNA, 27 nt, Artificial Sequence
  Description of Artificial Sequence: Synthetic oligonucleotide
gaugcagucaaacaccucuuccucugu

SEQ ID NO: 63365 - RNA, 27 nt, Artificial Sequence
  Description of Artificial Sequence: Synthetic oligonucleotide
cgaugcagucaaacaccucuuccucug

SEQ ID NO: 63366 - RNA, 27 nt, Artificial Sequence
  Description of Artificial Sequence: Synthetic oligonucleotide
cccugugaacucgcccucaaaguagcg

SEQ ID NO: 63367 - RNA, 27 nt, Artificial Sequence
  Description of Artificial Sequence: Synthetic oligonucleotide
ggacagaggugccaggagaugcccuca

SEQ ID NO: 63368 - RNA, 27 nt, Artificial Sequence
  Description of Artificial Sequence: Synthetic oligonucleotide
uuaaaaagacaaaccauaucacuccuu

SEQ ID NO: 63369 - RNA, 27 nt, Artificial Sequence
  Description of Artificial Sequence: Synthetic oligonucleotide
cuuaaaaagacaaaccauaucacuccu

SEQ ID NO: 63370 - RNA, 27 nt, Artificial Sequence
  Description of Artificial Sequence: Synthetic oligonucleotide
gacaaccuuuaggaucuuuacugcaac

SEQ ID NO: 63371 - RNA, 27 nt, Artificial Sequence
  Description of Artificial Sequence: Synthetic oligonucleotide
gucgacaaccuuuaggaucuuuacugc

SEQ ID NO: 63372 - RNA, 27 nt, Artificial Sequence
  Description of Artificial Sequence: Synthetic oligonucleotide
acaauugccagguuguccuuugucaug

SEQ ID NO: 63373 - RNA, 27 nt, Artificial Sequence
  Description of Artificial Sequence: Synthetic oligonucleotide
ccucgcaccacugggucacaauugcca

SEQ ID NO: 63374 - RNA, 27 nt, Artificial Sequence
  Description of Artificial Sequence: Synthetic oligonucleotide
auuucaugucucuauggaugauguucu

SEQ ID NO: 63375 - RNA, 27 nt, Artificial Sequence
  Description of Artificial Sequence: Synthetic oligonucleotide
uggagaaauauauuguuggauuucaug

SEQ ID NO: 63376 - RNA, 27 nt, Artificial Sequence
  Description of Artificial Sequence: Synthetic oligonucleotide
agccuucauggagaaauauauuguugg

SEQ ID NO: 63377 - RNA, 27 nt, Artificial Sequence
  Description of Artificial Sequence: Synthetic oligonucleotide
accacuccagcgugacuuuacuguugc

SEQ ID NO: 63378 - RNA, 27 nt, Artificial Sequence
  Description of Artificial Sequence: Synthetic oligonucleotide
ccucucuuccuuuacuuucuucacaca

SEQ ID NO: 63379 - RNA, 27 nt, Artificial Sequence
  Description of Artificial Sequence: Synthetic oligonucleotide
gcccgaugcaaggauggcucggaagcg

SEQ ID NO: 63380 - RNA, 27 nt, Artificial Sequence
  Description of Artificial Sequence: Synthetic oligonucleotide
cacaguaggauauucaaccuccauuuc

SEQ ID NO: 63381 - RNA, 27 nt, Artificial Sequence
  Description of Artificial Sequence: Synthetic oligonucleotide
uuacacaguaggauauucaaccuccau

SEQ ID NO: 63382 - RNA, 27 nt, Artificial Sequence
  Description of Artificial Sequence: Synthetic oligonucleotide
uacacuacaagggaaaacucaaaaucu

SEQ ID NO: 63383 - RNA, 27 nt, Artificial Sequence
  Description of Artificial Sequence: Synthetic oligonucleotide
caaucaacaaagaacaaacaggauaaa

SEQ ID NO: 63384 - RNA, 27 nt, Artificial Sequence
  Description of Artificial Sequence: Synthetic oligonucleotide
uuucaaucaacaaagaacaaacaggau

SEQ ID NO: 63385 - RNA, 27 nt, Artificial Sequence
  Description of Artificial Sequence: Synthetic oligonucleotide
auggaagaaaaagaaggcuguagagaa

SEQ ID NO: 63386 - RNA, 27 nt, Artificial Sequence
  Description of Artificial Sequence: Synthetic oligonucleotide
uagaaggaagauuagcuauggaagaaa

SEQ ID NO: 63387 - RNA, 27 nt, Artificial Sequence
  Description of Artificial Sequence: Synthetic oligonucleotide
augaagcauucaacaggaagauuauuu

SEQ ID NO: 63388 - RNA, 27 nt, Artificial Sequence
  Description of Artificial Sequence: Synthetic oligonucleotide
caugaagcauucaacaggaagauuauu

SEQ ID NO: 63389 - RNA, 27 nt, Artificial Sequence
  Description of Artificial Sequence: Synthetic oligonucleotide
ucaaaguagaauucaagucaugaagca

SEQ ID NO: 63390 - RNA, 27 nt, Artificial Sequence
  Description of Artificial Sequence: Synthetic oligonucleotide
gucuguaguugcuucucucccucuuag

SEQ ID NO: 63391 - RNA, 27 nt, Artificial Sequence
  Description of Artificial Sequence: Synthetic oligonucleotide
guugaccuuggucugguaggagacggc

SEQ ID NO: 63392 - RNA, 27 nt, Artificial Sequence
  Description of Artificial Sequence: Synthetic oligonucleotide
gucgagauagucgggccgauugaucuc

SEQ ID NO: 63393 - RNA, 27 nt, Artificial Sequence
  Description of Artificial Sequence: Synthetic oligonucleotide
guuugggaagguuggauguucguccuc

SEQ ID NO: 63394 - RNA, 27 nt, Artificial Sequence
  Description of Artificial Sequence: Synthetic oligonucleotide
aguucuaagcuuggguuccgacccuaa

SEQ ID NO: 63395 - RNA, 27 nt, Artificial Sequence
  Description of Artificial Sequence: Synthetic oligonucleotide
uuaaaguucuaagcuuggguuccgacc

SEQ ID NO: 63396 - RNA, 27 nt, Artificial Sequence
  Description of Artificial Sequence: Synthetic oligonucleotide
guugcuuaaaguucuaagcuuggguuc

SEQ ID NO: 63397 - RNA, 27 nt, Artificial Sequence
  Description of Artificial Sequence: Synthetic oligonucleotide
gugguggucuuguugcuuaaaguucua

SEQ ID NO: 63398 - RNA, 27 nt, Artificial Sequence
  Description of Artificial Sequence: Synthetic oligonucleotide
acuuuauuucucgccacugaauaguag

SEQ ID NO: 63399 - RNA, 27 nt, Artificial Sequence
  Description of Artificial Sequence: Synthetic oligonucleotide
aacuuuauuucucgccacugaauagua

SEQ ID NO: 63400 - RNA, 27 nt, Artificial Sequence
  Description of Artificial Sequence: Synthetic oligonucleotide
ggaucauuuccuguuaucuguguuugu

SEQ ID NO: 63401 - RNA, 27 nt, Artificial Sequence
  Description of Artificial Sequence: Synthetic oligonucleotide
guuucauuucuucucuuuucuuaaggc

SEQ ID NO: 63402 - RNA, 27 nt, Artificial Sequence
  Description of Artificial Sequence: Synthetic oligonucleotide
ggaggauggaaacacacuccuucaguu

SEQ ID NO: 63403 - RNA, 27 nt, Artificial Sequence
  Description of Artificial Sequence: Synthetic oligonucleotide
ucaaagauuuucagucccgcggugaca

SEQ ID NO: 63404 - RNA, 27 nt, Artificial Sequence
  Description of Artificial Sequence: Synthetic oligonucleotide
ccugaacggcacgcuuauuucugcugu

SEQ ID NO: 63405 - RNA, 27 nt, Artificial Sequence
  Description of Artificial Sequence: Synthetic oligonucleotide
cuucuggacccugaacggcacgcuuau

SEQ ID NO: 63406 - RNA, 27 nt, Artificial Sequence
  Description of Artificial Sequence: Synthetic oligonucleotide
caagcagucuugagugacuguuucuuc

SEQ ID NO: 63407 - RNA, 27 nt, Artificial Sequence
  Description of Artificial Sequence: Synthetic oligonucleotide
ccaaagacauggaccuucuuccucuga

SEQ ID NO: 63408 - RNA, 27 nt, Artificial Sequence
  Description of Artificial Sequence: Synthetic oligonucleotide
guguuucaggcauauuuugaauacauc

SEQ ID NO: 63409 - RNA, 27 nt, Artificial Sequence
  Description of Artificial Sequence: Synthetic oligonucleotide
gagguacagagaaagggaggaaaauag

SEQ ID NO: 63410 - RNA, 27 nt, Artificial Sequence
  Description of Artificial Sequence: Synthetic oligonucleotide
ucuugucuugcucuaucuuucuuuggu

SEQ ID NO: 63411 - RNA, 27 nt, Artificial Sequence
  Description of Artificial Sequence: Synthetic oligonucleotide
uuucuugucuugcucuaucuuucuuug

SEQ ID NO: 63412 - RNA, 27 nt, Artificial Sequence
  Description of Artificial Sequence: Synthetic oligonucleotide
ggaucuuguacaaacaaaugcuuucuc

SEQ ID NO: 63413 - RNA, 27 nt, Artificial Sequence
  Description of Artificial Sequence: Synthetic oligonucleotide
ucugcaaguacguucguuuaacucaag

SEQ ID NO: 63414 - RNA, 27 nt, Artificial Sequence
  Description of Artificial Sequence: Synthetic oligonucleotide
ucuguaucgaucguucuguaucagucu

SEQ ID NO: 63415 - RNA, 27 nt, Artificial Sequence
  Description of Artificial Sequence: Synthetic oligonucleotide
auuuauuuuuauauauauauaauauau

SEQ ID NO: 63416 - RNA, 27 nt, Artificial Sequence
  Description of Artificial Sequence: Synthetic oligonucleotide
auauuuauuuuuauauauauauaauau

SEQ ID NO: 63417 - RNA, 27 nt, Artificial Sequence
  Description of Artificial Sequence: Synthetic oligonucleotide
cacagcagucaaauacauccagugaag

SEQ ID NO: 63418 - RNA, 27 nt, Artificial Sequence
  Description of Artificial Sequence: Synthetic oligonucleotide
gucucucaucuccuccucuucccuguc

SEQ ID NO: 63419 - RNA, 27 nt, Artificial Sequence
  Description of Artificial Sequence: Synthetic oligonucleotide
ccaagugggacaaaaaaaagaucaugc

SEQ ID NO: 63420 - RNA, 14 nt, Artificial Sequence
  Description of Artificial Sequence: Synthetic oligonucleotide
guauuuugaugagg

SEQ ID NO: 63421 - RNA, 12 nt, Artificial Sequence
  Description of Artificial Sequence: Synthetic oligonucleotide
ggcccagaugau

SEQ ID NO: 63422 - RNA, 14 nt, Artificial Sequence
  Description of Artificial Sequence: Synthetic oligonucleotide
gggaagaaaacuau

SEQ ID NO: 63423 - RNA, 15 nt, Artificial Sequence
  Description of Artificial Sequence: Synthetic oligonucleotide
guuuuaauuuauuuc

SEQ ID NO: 63424 - RNA, 12 nt, Artificial Sequence
  Description of Artificial Sequence: Synthetic oligonucleotide
acguagggaaau

SEQ ID NO: 63425 - RNA, 12 nt, Artificial Sequence
  Description of Artificial Sequence: Synthetic oligonucleotide
ccaggguuuacc

SEQ ID NO: 63426 - RNA, 11 nt, Artificial Sequence
  Description of Artificial Sequence: Synthetic oligonucleotide
agcaagguuua

SEQ ID NO: 63427 - RNA, 12 nt, Artificial Sequence
  Description of Artificial Sequence: Synthetic oligonucleotide
uguauuauguug

SEQ ID NO: 63428 - RNA, 15 nt, Artificial Sequence
  Description of Artificial Sequence: Synthetic oligonucleotide
uuuuaaucuuuguga

SEQ ID NO: 63429 - RNA, 14 nt, Artificial Sequence
  Description of Artificial Sequence: Synthetic oligonucleotide
uuaaucuuugugac

SEQ ID NO: 63430 - RNA, 13 nt, Artificial Sequence
  Description of Artificial Sequence: Synthetic oligonucleotide
gcugcuuaugucu

SEQ ID NO: 63431 - RNA, 14 nt, Artificial Sequence
  Description of Artificial Sequence: Synthetic oligonucleotide
aaguguuucagaag

SEQ ID NO: 63432 - RNA, 13 nt, Artificial Sequence
  Description of Artificial Sequence: Synthetic oligonucleotide
gaccaucaauaag

SEQ ID NO: 63433 - RNA, 13 nt, Artificial Sequence
  Description of Artificial Sequence: Synthetic oligonucleotide
ccaucaauaagga

SEQ ID NO: 63434 - RNA, 14 nt, Artificial Sequence
  Description of Artificial Sequence: Synthetic oligonucleotide
ucaauaaggaagaa

SEQ ID NO: 63435 - RNA, 14 nt, Artificial Sequence
  Description of Artificial Sequence: Synthetic oligonucleotide
aauaaggaagaagc

SEQ ID NO: 63436 - RNA, 13 nt, Artificial Sequence
  Description of Artificial Sequence: Synthetic oligonucleotide
aggaagaagcccu

SEQ ID NO: 63437 - RNA, 13 nt, Artificial Sequence
  Description of Artificial Sequence: Synthetic oligonucleotide
gcauaacuaaagg

SEQ ID NO: 63438 - RNA, 14 nt, Artificial Sequence
  Description of Artificial Sequence: Synthetic oligonucleotide
cauaacuaaaggug

SEQ ID NO: 63439 - RNA, 12 nt, Artificial Sequence
  Description of Artificial Sequence: Synthetic oligonucleotide
cuacaucacgcc

SEQ ID NO: 63440 - RNA, 12 nt, Artificial Sequence
  Description of Artificial Sequence: Synthetic oligonucleotide
acuggauuuaag

SEQ ID NO: 63441 - RNA, 12 nt, Artificial Sequence
  Description of Artificial Sequence: Synthetic oligonucleotide
cuggauuuaagc

SEQ ID NO: 63442 - RNA, 13 nt, Artificial Sequence
  Description of Artificial Sequence: Synthetic oligonucleotide
gauuuaagcagag

SEQ ID NO: 63443 - RNA, 13 nt, Artificial Sequence
  Description of Artificial Sequence: Synthetic oligonucleotide
auuuaagcagagu

SEQ ID NO: 63444 - RNA, 13 nt, Artificial Sequence
  Description of Artificial Sequence: Synthetic oligonucleotide
uuaagcagaguuc

SEQ ID NO: 63445 - RNA, 13 nt, Artificial Sequence
  Description of Artificial Sequence: Synthetic oligonucleotide
uaagcagaguuca

SEQ ID NO: 63446 - RNA, 14 nt, Artificial Sequence
  Description of Artificial Sequence: Synthetic oligonucleotide
agcagaguucaaaa

SEQ ID NO: 63447 - RNA, 12 nt, Artificial Sequence
  Description of Artificial Sequence: Synthetic oligonucleotide
cucagggucuga

SEQ ID NO: 63448 - RNA, 13 nt, Artificial Sequence
  Description of Artificial Sequence: Synthetic oligonucleotide
caagcaacuacau

SEQ ID NO: 63449 - RNA, 12 nt, Artificial Sequence
  Description of Artificial Sequence: Synthetic oligonucleotide
aucaauggcagc

SEQ ID NO: 63450 - RNA, 11 nt, Artificial Sequence
  Description of Artificial Sequence: Synthetic oligonucleotide
uuccagcccac

SEQ ID NO: 63451 - RNA, 12 nt, Artificial Sequence
  Description of Artificial Sequence: Synthetic oligonucleotide
cagcugagaaug

SEQ ID NO: 63452 - RNA, 13 nt, Artificial Sequence
  Description of Artificial Sequence: Synthetic oligonucleotide
aacguaucuccua

SEQ ID NO: 63453 - RNA, 14 nt, Artificial Sequence
  Description of Artificial Sequence: Synthetic oligonucleotide
ccuaaaauaauuuc

SEQ ID NO: 63454 - RNA, 13 nt, Artificial Sequence
  Description of Artificial Sequence: Synthetic oligonucleotide
uggaagauucagc

SEQ ID NO: 63455 - RNA, 12 nt, Artificial Sequence
  Description of Artificial Sequence: Synthetic oligonucleotide
uuaaacucuccu

SEQ ID NO: 63456 - RNA, 12 nt, Artificial Sequence
  Description of Artificial Sequence: Synthetic oligonucleotide
cagccuacaguu

SEQ ID NO: 63457 - RNA, 13 nt, Artificial Sequence
  Description of Artificial Sequence: Synthetic oligonucleotide
guuauguucaguc

SEQ ID NO: 63458 - RNA, 13 nt, Artificial Sequence
  Description of Artificial Sequence: Synthetic oligonucleotide
cacauacaaaaug

SEQ ID NO: 63459 - RNA, 9 nt, Artificial Sequence
  Description of Artificial Sequence: Synthetic oligonucleotide
uccuuuugc

SEQ ID NO: 63460 - RNA, 12 nt, Artificial Sequence
  Description of Artificial Sequence: Synthetic oligonucleotide
ugaccugugaag

SEQ ID NO: 63461 - RNA, 12 nt, Artificial Sequence
  Description of Artificial Sequence: Synthetic oligonucleotide
cuaucucacaca

SEQ ID NO: 63462 - RNA, 13 nt, Artificial Sequence
  Description of Artificial Sequence: Synthetic oligonucleotide
uguccucaauugu

SEQ ID NO: 63463 - RNA, 12 nt, Artificial Sequence
  Description of Artificial Sequence: Synthetic oligonucleotide
aaaccguagcug

SEQ ID NO: 63464 - RNA, 12 nt, Artificial Sequence
  Description of Artificial Sequence: Synthetic oligonucleotide
uagcuggcaagc

SEQ ID NO: 63465 - RNA, 14 nt, Artificial Sequence
  Description of Artificial Sequence: Synthetic oligonucleotide
uuguaugguuaaaa

SEQ ID NO: 63466 - RNA, 14 nt, Artificial Sequence
  Description of Artificial Sequence: Synthetic oligonucleotide
ugguuaaaagaugg

SEQ ID NO: 63467 - RNA, 13 nt, Artificial Sequence
  Description of Artificial Sequence: Synthetic oligonucleotide
cagggaauuauac

SEQ ID NO: 63468 - RNA, 12 nt, Artificial Sequence
  Description of Artificial Sequence: Synthetic oligonucleotide
acaaucuugcug

SEQ ID NO: 63469 - RNA, 13 nt, Artificial Sequence
  Description of Artificial Sequence: Synthetic oligonucleotide
ccaauaaugaaga

SEQ ID NO: 63470 - RNA, 13 nt, Artificial Sequence
  Description of Artificial Sequence: Synthetic oligonucleotide
acuuuggauguuc

SEQ ID NO: 63471 - RNA, 12 nt, Artificial Sequence
  Description of Artificial Sequence: Synthetic oligonucleotide
aaugcuuccacu

SEQ ID NO: 63472 - RNA, 11 nt, Artificial Sequence
  Description of Artificial Sequence: Synthetic oligonucleotide
gagaaaguuug

SEQ ID NO: 63473 - RNA, 11 nt, Artificial Sequence
  Description of Artificial Sequence: Synthetic oligonucleotide
aaagaacuacu

SEQ ID NO: 63474 - RNA, 12 nt, Artificial Sequence
  Description of Artificial Sequence: Synthetic oligonucleotide
uuagaaauacgg

SEQ ID NO: 63475 - RNA, 12 nt, Artificial Sequence
  Description of Artificial Sequence: Synthetic oligonucleotide
aacauggguaca

SEQ ID NO: 63476 - RNA, 14 nt, Artificial Sequence
  Description of Artificial Sequence: Synthetic oligonucleotide
aaagacacagaaga

SEQ ID NO: 63477 - RNA, 11 nt, Artificial Sequence
  Description of Artificial Sequence: Synthetic oligonucleotide
uaguagggagg

SEQ ID NO: 63478 - RNA, 12 nt, Artificial Sequence
  Description of Artificial Sequence: Synthetic oligonucleotide
gccuucugcagc

SEQ ID NO: 63479 - RNA, 10 nt, Artificial Sequence
  Description of Artificial Sequence: Synthetic oligonucleotide
ggucugguac

SEQ ID NO: 63480 - RNA, 12 nt, Artificial Sequence
  Description of Artificial Sequence: Synthetic oligonucleotide
cuaguccuuccg

SEQ ID NO: 63481 - RNA, 12 nt, Artificial Sequence
  Description of Artificial Sequence: Synthetic oligonucleotide
ccagugaauauu

SEQ ID NO: 63482 - RNA, 13 nt, Artificial Sequence
  Description of Artificial Sequence: Synthetic oligonucleotide
augaauucaaguu

SEQ ID NO: 63483 - RNA, 12 nt, Artificial Sequence
  Description of Artificial Sequence: Synthetic oligonucleotide
caggacacagau

SEQ ID NO: 63484 - RNA, 12 nt, Artificial Sequence
  Description of Artificial Sequence: Synthetic oligonucleotide
cucaaagcacag

SEQ ID NO: 63485 - RNA, 10 nt, Artificial Sequence
  Description of Artificial Sequence: Synthetic oligonucleotide
accacugcca

SEQ ID NO: 63486 - RNA, 13 nt, Artificial Sequence
  Description of Artificial Sequence: Synthetic oligonucleotide
gaaacuacuagug

SEQ ID NO: 63487 - RNA, 12 nt, Artificial Sequence
  Description of Artificial Sequence: Synthetic oligonucleotide
aagucggacagc

SEQ ID NO: 63488 - RNA, 13 nt, Artificial Sequence
  Description of Artificial Sequence: Synthetic oligonucleotide
gaaagcgaaaaau

SEQ ID NO: 63489 - RNA, 13 nt, Artificial Sequence
  Description of Artificial Sequence: Synthetic oligonucleotide
cccucugauuuag

SEQ ID NO: 63490 - RNA, 12 nt, Artificial Sequence
  Description of Artificial Sequence: Synthetic oligonucleotide
ugagcuauuuaa

SEQ ID NO: 63491 - RNA, 13 nt, Artificial Sequence
  Description of Artificial Sequence: Synthetic oligonucleotide
aaaaggugaaaaa

SEQ ID NO: 63492 - RNA, 14 nt, Artificial Sequence
  Description of Artificial Sequence: Synthetic oligonucleotide
gaaaaagcacuauu

SEQ ID NO: 63493 - RNA, 12 nt, Artificial Sequence
  Description of Artificial Sequence: Synthetic oligonucleotide
ggcugaaaagaa

SEQ ID NO: 63494 - RNA, 12 nt, Artificial Sequence
  Description of Artificial Sequence: Synthetic oligonucleotide
uaaacccuuaua

SEQ ID NO: 63495 - RNA, 13 nt, Artificial Sequence
  Description of Artificial Sequence: Synthetic oligonucleotide
cauacuauuagcc

SEQ ID NO: 63496 - RNA, 12 nt, Artificial Sequence
  Description of Artificial Sequence: Synthetic oligonucleotide
gacagaagcauu

SEQ ID NO: 63497 - RNA, 14 nt, Artificial Sequence
  Description of Artificial Sequence: Synthetic oligonucleotide
agagcaaauaagau

SEQ ID NO: 63498 - RNA, 14 nt, Artificial Sequence
  Description of Artificial Sequence: Synthetic oligonucleotide
ccaacauuuuucuc

SEQ ID NO: 63499 - RNA, 15 nt, Artificial Sequence
  Description of Artificial Sequence: Synthetic oligonucleotide
uuaaguaugagaaaa

SEQ ID NO: 63500 - RNA, 14 nt, Artificial Sequence
  Description of Artificial Sequence: Synthetic oligonucleotide
caggaauaaagaug

SEQ ID NO: 63501 - RNA, 13 nt, Artificial Sequence
  Description of Artificial Sequence: Synthetic oligonucleotide
aauuugaaugacc

SEQ ID NO: 63502 - RNA, 14 nt, Artificial Sequence
  Description of Artificial Sequence: Synthetic oligonucleotide
auguauaaagauag

SEQ ID NO: 63503 - RNA, 12 nt, Artificial Sequence
  Description of Artificial Sequence: Synthetic oligonucleotide
ggcuguaacuau

SEQ ID NO: 63504 - RNA, 11 nt, Artificial Sequence
  Description of Artificial Sequence: Synthetic oligonucleotide
ucugugaagug

SEQ ID NO: 63505 - RNA, 14 nt, Artificial Sequence
  Description of Artificial Sequence: Synthetic oligonucleotide
ccuuuaaggaaaug

SEQ ID NO: 63506 - RNA, 13 nt, Artificial Sequence
  Description of Artificial Sequence: Synthetic oligonucleotide
aaggauacaaaaa

SEQ ID NO: 63507 - RNA, 12 nt, Artificial Sequence
  Description of Artificial Sequence: Synthetic oligonucleotide
agaugcaauuug

SEQ ID NO: 63508 - RNA, 12 nt, Artificial Sequence
  Description of Artificial Sequence: Synthetic oligonucleotide
guucaaaacgaa

SEQ ID NO: 63509 - RNA, 11 nt, Artificial Sequence
  Description of Artificial Sequence: Synthetic oligonucleotide
gugaaaccuca

SEQ ID NO: 63510 - RNA, 13 nt, Artificial Sequence
  Description of Artificial Sequence: Synthetic oligonucleotide
acgaaagagaagc

SEQ ID NO: 63511 - RNA, 12 nt, Artificial Sequence
  Description of Artificial Sequence: Synthetic oligonucleotide
cuccacaagcgc

SEQ ID NO: 63512 - RNA, 14 nt, Artificial Sequence
  Description of Artificial Sequence: Synthetic oligonucleotide
gagaagauuccaaa

SEQ ID NO: 63513 - RNA, 13 nt, Artificial Sequence
  Description of Artificial Sequence: Synthetic oligonucleotide
aaucuggauucaa

SEQ ID NO: 63514 - RNA, 13 nt, Artificial Sequence
  Description of Artificial Sequence: Synthetic oligonucleotide
agaacagauuuga

SEQ ID NO: 63515 - RNA, 11 nt, Artificial Sequence
  Description of Artificial Sequence: Synthetic oligonucleotide
ccagagcugug

SEQ ID NO: 63516 - RNA, 12 nt, Artificial Sequence
  Description of Artificial Sequence: Synthetic oligonucleotide
ccucagauuguu

SEQ ID NO: 63517 - RNA, 12 nt, Artificial Sequence
  Description of Artificial Sequence: Synthetic oligonucleotide
cuauuuuaauua

SEQ ID NO: 63518 - RNA, 13 nt, Artificial Sequence
  Description of Artificial Sequence: Synthetic oligonucleotide
uuuaauuuauuaa

SEQ ID NO: 63519 - RNA, 12 nt, Artificial Sequence
  Description of Artificial Sequence: Synthetic oligonucleotide
augcaguuugaa

SEQ ID NO: 63520 - RNA, 11 nt, Artificial Sequence
  Description of Artificial Sequence: Synthetic oligonucleotide
caugcugcugg

SEQ ID NO: 63521 - RNA, 13 nt, Artificial Sequence
  Description of Artificial Sequence: Synthetic oligonucleotide
agaugugcauuuc

SEQ ID NO: 63522 - RNA, 12 nt, Artificial Sequence
  Description of Artificial Sequence: Synthetic oligonucleotide
ucaaaaccugug

SEQ ID NO: 63523 - RNA, 11 nt, Artificial Sequence
  Description of Artificial Sequence: Synthetic oligonucleotide
gaaugugggua

SEQ ID NO: 63524 - RNA, 10 nt, Artificial Sequence
  Description of Artificial Sequence: Synthetic oligonucleotide
auguggguag

SEQ ID NO: 63525 - RNA, 13 nt, Artificial Sequence
  Description of Artificial Sequence: Synthetic oligonucleotide
ugaaaaugagcau

SEQ ID NO: 63526 - RNA, 13 nt, Artificial Sequence
  Description of Artificial Sequence: Synthetic oligonucleotide
uugcuuuucaugu

SEQ ID NO: 63527 - RNA, 12 nt, Artificial Sequence
  Description of Artificial Sequence: Synthetic oligonucleotide
uguauuucuaua

SEQ ID NO: 63528 - RNA, 13 nt, Artificial Sequence
  Description of Artificial Sequence: Synthetic oligonucleotide
uuugauuaauguu

SEQ ID NO: 63529 - RNA, 12 nt, Artificial Sequence
  Description of Artificial Sequence: Synthetic oligonucleotide
caacguguauag

SEQ ID NO: 63530 - RNA, 12 nt, Artificial Sequence
  Description of Artificial Sequence: Synthetic oligonucleotide
cauauccuuggc

SEQ ID NO: 63531 - RNA, 13 nt, Artificial Sequence
  Description of Artificial Sequence: Synthetic oligonucleotide
uacuaacaucugg

SEQ ID NO: 63532 - RNA, 11 nt, Artificial Sequence
  Description of Artificial Sequence: Synthetic oligonucleotide
cauaaguugug

SEQ ID NO: 63533 - RNA, 12 nt, Artificial Sequence
  Description of Artificial Sequence: Synthetic oligonucleotide
gcaucauuuugg

SEQ ID NO: 63534 - RNA, 10 nt, Artificial Sequence
  Description of Artificial Sequence: Synthetic oligonucleotide
gcucuucuua

SEQ ID NO: 63535 - RNA, 10 nt, Artificial Sequence
  Description of Artificial Sequence: Synthetic oligonucleotide
agauuagguc

SEQ ID NO: 63536 - RNA, 12 nt, Artificial Sequence
  Description of Artificial Sequence: Synthetic oligonucleotide
auggaauugaaa

SEQ ID NO: 63537 - RNA, 13 nt, Artificial Sequence
  Description of Artificial Sequence: Synthetic oligonucleotide
cacacucauuccu

SEQ ID NO: 63538 - RNA, 12 nt, Artificial Sequence
  Description of Artificial Sequence: Synthetic oligonucleotide
uguagagguaac

SEQ ID NO: 63539 - RNA, 11 nt, Artificial Sequence
  Description of Artificial Sequence: Synthetic oligonucleotide
caaccacaugc

SEQ ID NO: 63540 - RNA, 12 nt, Artificial Sequence
  Description of Artificial Sequence: Synthetic oligonucleotide
ucggaaacaagu

SEQ ID NO: 63541 - RNA, 11 nt, Artificial Sequence
  Description of Artificial Sequence: Synthetic oligonucleotide
acucccaauaa

SEQ ID NO: 63542 - RNA, 13 nt, Artificial Sequence
  Description of Artificial Sequence: Synthetic oligonucleotide
aaugcuaagaaau

SEQ ID NO: 63543 - RNA, 11 nt, Artificial Sequence
  Description of Artificial Sequence: Synthetic oligonucleotide
gucuuucucua

SEQ ID NO: 63544 - RNA, 11 nt, Artificial Sequence
  Description of Artificial Sequence: Synthetic oligonucleotide
ugaauuucagg

SEQ ID NO: 63545 - RNA, 13 nt, Artificial Sequence
  Description of Artificial Sequence: Synthetic oligonucleotide
cgauucccucuca

SEQ ID NO: 63546 - RNA, 11 nt, Artificial Sequence
  Description of Artificial Sequence: Synthetic oligonucleotide
aggaaagugaa

SEQ ID NO: 63547 - RNA, 12 nt, Artificial Sequence
  Description of Artificial Sequence: Synthetic oligonucleotide
gaggcugcaugc

SEQ ID NO: 63548 - RNA, 11 nt, Artificial Sequence
  Description of Artificial Sequence: Synthetic oligonucleotide
ucucugaacag

SEQ ID NO: 63549 - RNA, 12 nt, Artificial Sequence
  Description of Artificial Sequence: Synthetic oligonucleotide
aacuuggcugua

SEQ ID NO: 63550 - RNA, 12 nt, Artificial Sequence
  Description of Artificial Sequence: Synthetic oligonucleotide
agaagccaaaau

SEQ ID NO: 63551 - RNA, 14 nt, Artificial Sequence
  Description of Artificial Sequence: Synthetic oligonucleotide
auuaaaagaagucc

SEQ ID NO: 63552 - RNA, 14 nt, Artificial Sequence
  Description of Artificial Sequence: Synthetic oligonucleotide
gaauccggauuauc

SEQ ID NO: 63553 - RNA, 12 nt, Artificial Sequence
  Description of Artificial Sequence: Synthetic oligonucleotide
aaugugacauca

SEQ ID NO: 63554 - RNA, 13 nt, Artificial Sequence
  Description of Artificial Sequence: Synthetic oligonucleotide
caucaaagcaagu

SEQ ID NO: 63555 - RNA, 11 nt, Artificial Sequence
  Description of Artificial Sequence: Synthetic oligonucleotide
agagagagaaa

SEQ ID NO: 63556 - RNA, 13 nt, Artificial Sequence
  Description of Artificial Sequence: Synthetic oligonucleotide
ucgcuguaguauu

SEQ ID NO: 63557 - RNA, 14 nt, Artificial Sequence
  Description of Artificial Sequence: Synthetic oligonucleotide
cgcuguaguauuua

SEQ ID NO: 63558 - RNA, 13 nt, Artificial Sequence
  Description of Artificial Sequence: Synthetic oligonucleotide
auuuaagcccaua

SEQ ID NO: 63559 - RNA, 15 nt, Artificial Sequence
  Description of Artificial Sequence: Synthetic oligonucleotide
auuaaaauaaacaug

SEQ ID NO: 63560 - RNA, 12 nt, Artificial Sequence
  Description of Artificial Sequence: Synthetic oligonucleotide
cuguucugaucg

SEQ ID NO: 63561 - RNA, 16 nt, Artificial Sequence
  Description of Artificial Sequence: Synthetic oligonucleotide
aaauaauuugaacuuu

SEQ ID NO: 63562 - RNA, 12 nt, Artificial Sequence
  Description of Artificial Sequence: Synthetic oligonucleotide
ugcgaccuuaau

SEQ ID NO: 63563 - RNA, 11 nt, Artificial Sequence
  Description of Artificial Sequence: Synthetic oligonucleotide
cugagaaagcu

SEQ ID NO: 63564 - RNA, 13 nt, Artificial Sequence
  Description of Artificial Sequence: Synthetic oligonucleotide
aguaaagaugcua

SEQ ID NO: 63565 - RNA, 12 nt, Artificial Sequence
  Description of Artificial Sequence: Synthetic oligonucleotide
cugcuuaauugc

SEQ ID NO: 63566 - RNA, 14 nt, Artificial Sequence
  Description of Artificial Sequence: Synthetic oligonucleotide
uaccauaugaauga

SEQ ID NO: 63567 - RNA, 12 nt, Artificial Sequence
  Description of Artificial Sequence: Synthetic oligonucleotide
aacuuucuuauc

SEQ ID NO: 63568 - RNA, 13 nt, Artificial Sequence
  Description of Artificial Sequence: Synthetic oligonucleotide
ccuugcaugacau

SEQ ID NO: 63569 - RNA, 14 nt, Artificial Sequence
  Description of Artificial Sequence: Synthetic oligonucleotide
ugaauuuguauaug

SEQ ID NO: 63570 - RNA, 12 nt, Artificial Sequence
  Description of Artificial Sequence: Synthetic oligonucleotide
gaauccuaguag

SEQ ID NO: 63571 - RNA, 10 nt, Artificial Sequence
  Description of Artificial Sequence: Synthetic oligonucleotide
gaaagggaag

SEQ ID NO: 63572 - RNA, 11 nt, Artificial Sequence
  Description of Artificial Sequence: Synthetic oligonucleotide
uaucggcaugc

SEQ ID NO: 63573 - RNA, 12 nt, Artificial Sequence
  Description of Artificial Sequence: Synthetic oligonucleotide
caccucauagua

SEQ ID NO: 63574 - RNA, 11 nt, Artificial Sequence
  Description of Artificial Sequence: Synthetic oligonucleotide
ccagaauugcc

SEQ ID NO: 63575 - RNA, 11 nt, Artificial Sequence
  Description of Artificial Sequence: Synthetic oligonucleotide
uggugaucugg

SEQ ID NO: 63576 - RNA, 12 nt, Artificial Sequence
  Description of Artificial Sequence: Synthetic oligonucleotide
gaucuggguaau

SEQ ID NO: 63577 - RNA, 12 nt, Artificial Sequence
  Description of Artificial Sequence: Synthetic oligonucleotide
ggaugugaugaa

SEQ ID NO: 63578 - RNA, 12 nt, Artificial Sequence
  Description of Artificial Sequence: Synthetic oligonucleotide
cauuuccacagc

SEQ ID NO: 63579 - RNA, 11 nt, Artificial Sequence
  Description of Artificial Sequence: Synthetic oligonucleotide
acagcuacacc

SEQ ID NO: 63580 - RNA, 12 nt, Artificial Sequence
  Description of Artificial Sequence: Synthetic oligonucleotide
ugcaguucuuac

SEQ ID NO: 63581 - RNA, 12 nt, Artificial Sequence
  Description of Artificial Sequence: Synthetic oligonucleotide
acgagaagaaga

SEQ ID NO: 63582 - RNA, 12 nt, Artificial Sequence
  Description of Artificial Sequence: Synthetic oligonucleotide
cgagaagaagau

SEQ ID NO: 63583 - RNA, 15 nt, Artificial Sequence
  Description of Artificial Sequence: Synthetic oligonucleotide
aagaagaucauuuac

SEQ ID NO: 63584 - RNA, 11 nt, Artificial Sequence
  Description of Artificial Sequence: Synthetic oligonucleotide
agaggaagagg

SEQ ID NO: 63585 - RNA, 12 nt, Artificial Sequence
  Description of Artificial Sequence: Synthetic oligonucleotide
gaggaagaggug

SEQ ID NO: 63586 - RNA, 13 nt, Artificial Sequence
  Description of Artificial Sequence: Synthetic oligonucleotide
cuacuuugagggc

SEQ ID NO: 63587 - RNA, 12 nt, Artificial Sequence
  Description of Artificial Sequence: Synthetic oligonucleotide
agggcaucuccu

SEQ ID NO: 63588 - RNA, 10 nt, Artificial Sequence
  Description of Artificial Sequence: Synthetic oligonucleotide
ggagugauau

SEQ ID NO: 63589 - RNA, 11 nt, Artificial Sequence
  Description of Artificial Sequence: Synthetic oligonucleotide
gagugauaugg

SEQ ID NO: 63590 - RNA, 12 nt, Artificial Sequence
  Description of Artificial Sequence: Synthetic oligonucleotide
ugcaguaaagau

SEQ ID NO: 63591 - RNA, 13 nt, Artificial Sequence
  Description of Artificial Sequence: Synthetic oligonucleotide
aguaaagauccua

SEQ ID NO: 63592 - RNA, 12 nt, Artificial Sequence
  Description of Artificial Sequence: Synthetic oligonucleotide
ugacaaaggaca

SEQ ID NO: 63593 - RNA, 13 nt, Artificial Sequence
  Description of Artificial Sequence: Synthetic oligonucleotide
gcaauugugaccc

SEQ ID NO: 63594 - RNA, 12 nt, Artificial Sequence
  Description of Artificial Sequence: Synthetic oligonucleotide
aacaucauccau

SEQ ID NO: 63595 - RNA, 12 nt, Artificial Sequence
  Description of Artificial Sequence: Synthetic oligonucleotide
ugaaauccaaca

SEQ ID NO: 63596 - RNA, 15 nt, Artificial Sequence
  Description of Artificial Sequence: Synthetic oligonucleotide
aacaauauauuucuc

SEQ ID NO: 63597 - RNA, 14 nt, Artificial Sequence
  Description of Artificial Sequence: Synthetic oligonucleotide
aacaguaaagucac

SEQ ID NO: 63598 - RNA, 14 nt, Artificial Sequence
  Description of Artificial Sequence: Synthetic oligonucleotide
ugugaagaaaguaa

SEQ ID NO: 63599 - RNA, 13 nt, Artificial Sequence
  Description of Artificial Sequence: Synthetic oligonucleotide
cuuccgagccauc

SEQ ID NO: 63600 - RNA, 12 nt, Artificial Sequence
  Description of Artificial Sequence: Synthetic oligonucleotide
aauggagguuga

SEQ ID NO: 63601 - RNA, 12 nt, Artificial Sequence
  Description of Artificial Sequence: Synthetic oligonucleotide
ggagguugaaua

SEQ ID NO: 63602 - RNA, 13 nt, Artificial Sequence
  Description of Artificial Sequence: Synthetic oligonucleotide
auuuugaguuuuc

SEQ ID NO: 63603 - RNA, 12 nt, Artificial Sequence
  Description of Artificial Sequence: Synthetic oligonucleotide
uauccuguuugu

SEQ ID NO: 63604 - RNA, 11 nt, Artificial Sequence
  Description of Artificial Sequence: Synthetic oligonucleotide
ccuguuuguuc

SEQ ID NO: 63605 - RNA, 10 nt, Artificial Sequence
  Description of Artificial Sequence: Synthetic oligonucleotide
cucuacagcc

SEQ ID NO: 63606 - RNA, 12 nt, Artificial Sequence
  Description of Artificial Sequence: Synthetic oligonucleotide
ucuuccauagcu

SEQ ID NO: 63607 - RNA, 12 nt, Artificial Sequence
  Description of Artificial Sequence: Synthetic oligonucleotide
auaaucuuccug

SEQ ID NO: 63608 - RNA, 12 nt, Artificial Sequence
  Description of Artificial Sequence: Synthetic oligonucleotide
uaaucuuccugu

SEQ ID NO: 63609 - RNA, 12 nt, Artificial Sequence
  Description of Artificial Sequence: Synthetic oligonucleotide
cuucaugacuug

SEQ ID NO: 63610 - RNA, 12 nt, Artificial Sequence
  Description of Artificial Sequence: Synthetic oligonucleotide
aagagggagaga

SEQ ID NO: 63611 - RNA, 12 nt, Artificial Sequence
  Description of Artificial Sequence: Synthetic oligonucleotide
cgucuccuacca

SEQ ID NO: 63612 - RNA, 12 nt, Artificial Sequence
  Description of Artificial Sequence: Synthetic oligonucleotide
gaucaaucggcc

SEQ ID NO: 63613 - RNA, 12 nt, Artificial Sequence
  Description of Artificial Sequence: Synthetic oligonucleotide
ggacgaacaucc

SEQ ID NO: 63614 - RNA, 11 nt, Artificial Sequence
  Description of Artificial Sequence: Synthetic oligonucleotide
agggucggaac

SEQ ID NO: 63615 - RNA, 10 nt, Artificial Sequence
  Description of Artificial Sequence: Synthetic oligonucleotide
ucggaaccca

SEQ ID NO: 63616 - RNA, 11 nt, Artificial Sequence
  Description of Artificial Sequence: Synthetic oligonucleotide
acccaagcuua

SEQ ID NO: 63617 - RNA, 14 nt, Artificial Sequence
  Description of Artificial Sequence: Synthetic oligonucleotide
gaacuuuaagcaac

SEQ ID NO: 63618 - RNA, 11 nt, Artificial Sequence
  Description of Artificial Sequence: Synthetic oligonucleotide
acuauucagug

SEQ ID NO: 63619 - RNA, 11 nt, Artificial Sequence
  Description of Artificial Sequence: Synthetic oligonucleotide
cuauucagugg

SEQ ID NO: 63620 - RNA, 13 nt, Artificial Sequence
  Description of Artificial Sequence: Synthetic oligonucleotide
aaacacagauaac

SEQ ID NO: 63621 - RNA, 12 nt, Artificial Sequence
  Description of Artificial Sequence: Synthetic oligonucleotide
cuuaagaaaaga

SEQ ID NO: 63622 - RNA, 12 nt, Artificial Sequence
  Description of Artificial Sequence: Synthetic oligonucleotide
cugaaggagugu

SEQ ID NO: 63623 - RNA, 10 nt, Artificial Sequence
  Description of Artificial Sequence: Synthetic oligonucleotide
ucaccgcggg

SEQ ID NO: 63624 - RNA, 14 nt, Artificial Sequence
  Description of Artificial Sequence: Synthetic oligonucleotide
agcagaaauaagcg

SEQ ID NO: 63625 - RNA, 12 nt, Artificial Sequence
  Description of Artificial Sequence: Synthetic oligonucleotide
aagcgugccguu

SEQ ID NO: 63626 - RNA, 12 nt, Artificial Sequence
  Description of Artificial Sequence: Synthetic oligonucleotide
agaaacagucac

SEQ ID NO: 63627 - RNA, 12 nt, Artificial Sequence
  Description of Artificial Sequence: Synthetic oligonucleotide
agaggaagaagg

SEQ ID NO: 63628 - RNA, 14 nt, Artificial Sequence
  Description of Artificial Sequence: Synthetic oligonucleotide
uguauucaaaauau

SEQ ID NO: 63629 - RNA, 13 nt, Artificial Sequence
  Description of Artificial Sequence: Synthetic oligonucleotide
auuuuccucccuu

SEQ ID NO: 63630 - RNA, 13 nt, Artificial Sequence
  Description of Artificial Sequence: Synthetic oligonucleotide
caaagaaagauag

SEQ ID NO: 63631 - RNA, 12 nt, Artificial Sequence
  Description of Artificial Sequence: Synthetic oligonucleotide
aagaaagauaga

SEQ ID NO: 63632 - RNA, 13 nt, Artificial Sequence
  Description of Artificial Sequence: Synthetic oligonucleotide
gaaagcauuuguu

SEQ ID NO: 63633 - RNA, 13 nt, Artificial Sequence
  Description of Artificial Sequence: Synthetic oligonucleotide
ugaguuaaacgaa

SEQ ID NO: 63634 - RNA, 12 nt, Artificial Sequence
  Description of Artificial Sequence: Synthetic oligonucleotide
acugauacagaa

SEQ ID NO: 63635 - RNA, 12 nt, Artificial Sequence
  Description of Artificial Sequence: Synthetic oligonucleotide
auauuauauaua

SEQ ID NO: 63636 - RNA, 12 nt, Artificial Sequence
  Description of Artificial Sequence: Synthetic oligonucleotide
auuauauauaua

SEQ ID NO: 63637 - RNA, 12 nt, Artificial Sequence
  Description of Artificial Sequence: Synthetic oligonucleotide
ucacuggaugua

SEQ ID NO: 63638 - RNA, 12 nt, Artificial Sequence
  Description of Artificial Sequence: Synthetic oligonucleotide
cagggaagagga

SEQ ID NO: 63639 - RNA, 15 nt, Artificial Sequence
  Description of Artificial Sequence: Synthetic oligonucleotide
augaucuuuuuuuug

SEQ ID NO: 63640 - RNA, 11 nt, Artificial Sequence
  Description of Artificial Sequence: Synthetic oligonucleotide
aguucacggcc

SEQ ID NO: 63641 - RNA, 13 nt, Artificial Sequence
  Description of Artificial Sequence: Synthetic oligonucleotide
caccaucacacca

SEQ ID NO: 63642 - RNA, 11 nt, Artificial Sequence
  Description of Artificial Sequence: Synthetic oligonucleotide
ccugcggguuu

SEQ ID NO: 63643 - RNA, 10 nt, Artificial Sequence
  Description of Artificial Sequence: Synthetic oligonucleotide
auccaguuug

SEQ ID NO: 63644 - RNA, 13 nt, Artificial Sequence
  Description of Artificial Sequence: Synthetic oligonucleotide
guuaaggacuucu

SEQ ID NO: 63645 - RNA, 13 nt, Artificial Sequence
  Description of Artificial Sequence: Synthetic oligonucleotide
cagugggacagag

SEQ ID NO: 63646 - RNA, 14 nt, Artificial Sequence
  Description of Artificial Sequence: Synthetic oligonucleotide
aauuuguuauugug

SEQ ID NO: 63647 - RNA, 13 nt, Artificial Sequence
  Description of Artificial Sequence: Synthetic oligonucleotide
uucaaaugcauuu

SEQ ID NO: 63648 - RNA, 10 nt, Artificial Sequence
  Description of Artificial Sequence: Synthetic oligonucleotide
caggaaagcc

SEQ ID NO: 63649 - RNA, 11 nt, Artificial Sequence
  Description of Artificial Sequence: Synthetic oligonucleotide
aggaaagcccu

SEQ ID NO: 63650 - RNA, 12 nt, Artificial Sequence
  Description of Artificial Sequence: Synthetic oligonucleotide
cccagcauggcc

SEQ ID NO: 63651 - RNA, 11 nt, Artificial Sequence
  Description of Artificial Sequence: Synthetic oligonucleotide
cuucucccuga

SEQ ID NO: 63652 - RNA, 12 nt, Artificial Sequence
  Description of Artificial Sequence: Synthetic oligonucleotide
gaagaagcccuu

SEQ ID NO: 63653 - RNA, 12 nt, Artificial Sequence
  Description of Artificial Sequence: Synthetic oligonucleotide
agaagcccuuca

SEQ ID NO: 63654 - RNA, 11 nt, Artificial Sequence
  Description of Artificial Sequence: Synthetic oligonucleotide
gcccuucagcg

SEQ ID NO: 63655 - RNA, 11 nt, Artificial Sequence
  Description of Artificial Sequence: Synthetic oligonucleotide
ccuucagcggc

SEQ ID NO: 63656 - RNA, 12 nt, Artificial Sequence
  Description of Artificial Sequence: Synthetic oligonucleotide
ucagcggccagu

SEQ ID NO: 63657 - RNA, 12 nt, Artificial Sequence
  Description of Artificial Sequence: Synthetic oligonucleotide
ugaaaagcuccg

SEQ ID NO: 63658 - RNA, 11 nt, Artificial Sequence
  Description of Artificial Sequence: Synthetic oligonucleotide
aaaagcuccgg

SEQ ID NO: 63659 - RNA, 13 nt, Artificial Sequence
  Description of Artificial Sequence: Synthetic oligonucleotide
agucaacagucug

SEQ ID NO: 63660 - RNA, 13 nt, Artificial Sequence
  Description of Artificial Sequence: Synthetic oligonucleotide
cagaguucaaaag

SEQ ID NO: 63661 - RNA, 13 nt, Artificial Sequence
  Description of Artificial Sequence: Synthetic oligonucleotide
agaguucaaaagc

SEQ ID NO: 63662 - RNA, 12 nt, Artificial Sequence
  Description of Artificial Sequence: Synthetic oligonucleotide
uucaaaagcccu

SEQ ID NO: 63663 - RNA, 12 nt, Artificial Sequence
  Description of Artificial Sequence: Synthetic oligonucleotide
ucaaaagcccuu

SEQ ID NO: 63664 - RNA, 12 nt, Artificial Sequence
  Description of Artificial Sequence: Synthetic oligonucleotide
aaaagcccuuca

SEQ ID NO: 63665 - RNA, 12 nt, Artificial Sequence
  Description of Artificial Sequence: Synthetic oligonucleotide
aaagcccuucag

SEQ ID NO: 63666 - RNA, 13 nt, Artificial Sequence
  Description of Artificial Sequence: Synthetic oligonucleotide
gugaagccgcucg

SEQ ID NO: 63667 - RNA, 12 nt, Artificial Sequence
  Description of Artificial Sequence: Synthetic oligonucleotide
cacgccagucaa

SEQ ID NO: 63668 - RNA, 13 nt, Artificial Sequence
  Description of Artificial Sequence: Synthetic oligonucleotide
uucuuggugcgug

SEQ ID NO: 63669 - RNA, 14 nt, Artificial Sequence
  Description of Artificial Sequence: Synthetic oligonucleotide
auuggauucaucag

SEQ ID NO: 63670 - RNA, 13 nt, Artificial Sequence
  Description of Artificial Sequence: Synthetic oligonucleotide
uggaauaccuaag

SEQ ID NO: 63671 - RNA, 12 nt, Artificial Sequence
  Description of Artificial Sequence: Synthetic oligonucleotide
auuugaggcuca

SEQ ID NO: 63672 - RNA, 11 nt, Artificial Sequence
  Description of Artificial Sequence: Synthetic oligonucleotide
ucuacaauugg

SEQ ID NO: 63673 - RNA, 12 nt, Artificial Sequence
  Description of Artificial Sequence: Synthetic oligonucleotide
uaguuaggagcc

SEQ ID NO: 63674 - RNA, 13 nt, Artificial Sequence
  Description of Artificial Sequence: Synthetic oligonucleotide
agucaauauccac

SEQ ID NO: 63675 - RNA, 13 nt, Artificial Sequence
  Description of Artificial Sequence: Synthetic oligonucleotide
auguucagucaca

SEQ ID NO: 63676 - RNA, 12 nt, Artificial Sequence
  Description of Artificial Sequence: Synthetic oligonucleotide
acacacacauac

SEQ ID NO: 63677 - RNA, 12 nt, Artificial Sequence
  Description of Artificial Sequence: Synthetic oligonucleotide
uuccuuuugcuu

SEQ ID NO: 63678 - RNA, 16 nt, Artificial Sequence
  Description of Artificial Sequence: Synthetic oligonucleotide
uuuuaaaguaauuuuu

SEQ ID NO: 63679 - RNA, 13 nt, Artificial Sequence
  Description of Artificial Sequence: Synthetic oligonucleotide
caacagucaaugg

SEQ ID NO: 63680 - RNA, 13 nt, Artificial Sequence
  Description of Artificial Sequence: Synthetic oligonucleotide
ucgacaaaccaau

SEQ ID NO: 63681 - RNA, 12 nt, Artificial Sequence
  Description of Artificial Sequence: Synthetic oligonucleotide
acugcuaccacu

SEQ ID NO: 63682 - RNA, 13 nt, Artificial Sequence
  Description of Artificial Sequence: Synthetic oligonucleotide
gcaagcggucuua

SEQ ID NO: 63683 - RNA, 13 nt, Artificial Sequence
  Description of Artificial Sequence: Synthetic oligonucleotide
ggucuuaccggcu

SEQ ID NO: 63684 - RNA, 11 nt, Artificial Sequence
  Description of Artificial Sequence: Synthetic oligonucleotide
gauggguuacc

SEQ ID NO: 63685 - RNA, 11 nt, Artificial Sequence
  Description of Artificial Sequence: Synthetic oligonucleotide
guuaccugcga

SEQ ID NO: 63686 - RNA, 12 nt, Artificial Sequence
  Description of Artificial Sequence: Synthetic oligonucleotide
aaucuugcugag

SEQ ID NO: 63687 - RNA, 13 nt, Artificial Sequence
  Description of Artificial Sequence: Synthetic oligonucleotide
agcauaaaacagu

SEQ ID NO: 63688 - RNA, 12 nt, Artificial Sequence
  Description of Artificial Sequence: Synthetic oligonucleotide
guccuuuauccu

SEQ ID NO: 63689 - RNA, 12 nt, Artificial Sequence
  Description of Artificial Sequence: Synthetic oligonucleotide
caacgcaaguug

SEQ ID NO: 63690 - RNA, 13 nt, Artificial Sequence
  Description of Artificial Sequence: Synthetic oligonucleotide
aaacugaaaccau

SEQ ID NO: 63691 - RNA, 14 nt, Artificial Sequence
  Description of Artificial Sequence: Synthetic oligonucleotide
acuuuguuaaauau

SEQ ID NO: 63692 - RNA, 14 nt, Artificial Sequence
  Description of Artificial Sequence: Synthetic oligonucleotide
guauauuaaaaguu

SEQ ID NO: 63693 - RNA, 13 nt, Artificial Sequence
  Description of Artificial Sequence: Synthetic oligonucleotide
guuuugacuuaac

SEQ ID NO: 63694 - RNA, 13 nt, Artificial Sequence
  Description of Artificial Sequence: Synthetic oligonucleotide
gcaaacucagcac

SEQ ID NO: 63695 - RNA, 11 nt, Artificial Sequence
  Description of Artificial Sequence: Synthetic oligonucleotide
ugcugaccuca

SEQ ID NO: 63696 - RNA, 14 nt, Artificial Sequence
  Description of Artificial Sequence: Synthetic oligonucleotide
uuuauucagaucgc

SEQ ID NO: 63697 - RNA, 13 nt, Artificial Sequence
  Description of Artificial Sequence: Synthetic oligonucleotide
aggguucugggau

SEQ ID NO: 63698 - RNA, 15 nt, Artificial Sequence
  Description of Artificial Sequence: Synthetic oligonucleotide
auauuggaaauuaug

SEQ ID NO: 63699 - RNA, 13 nt, Artificial Sequence
  Description of Artificial Sequence: Synthetic oligonucleotide
auggaagcacuag

SEQ ID NO: 63700 - RNA, 13 nt, Artificial Sequence
  Description of Artificial Sequence: Synthetic oligonucleotide
guuuuuaugugga

SEQ ID NO: 63701 - RNA, 12 nt, Artificial Sequence
  Description of Artificial Sequence: Synthetic oligonucleotide
ggaauugguaga

SEQ ID NO: 63702 - RNA, 13 nt, Artificial Sequence
  Description of Artificial Sequence: Synthetic oligonucleotide
uuagacuuggaga

SEQ ID NO: 63703 - RNA, 13 nt, Artificial Sequence
  Description of Artificial Sequence: Synthetic oligonucleotide
uuacaguauucca

SEQ ID NO: 63704 - RNA, 15 nt, Artificial Sequence
  Description of Artificial Sequence: Synthetic oligonucleotide
ccacugaugaauuaa

SEQ ID NO: 63705 - RNA, 12 nt, Artificial Sequence
  Description of Artificial Sequence: Synthetic oligonucleotide
ccacaucaucac

SEQ ID NO: 63706 - RNA, 13 nt, Artificial Sequence
  Description of Artificial Sequence: Synthetic oligonucleotide
cucaccaaacaga

SEQ ID NO: 63707 - RNA, 12 nt, Artificial Sequence
  Description of Artificial Sequence: Synthetic oligonucleotide
ggaacaugaugg

SEQ ID NO: 63708 - RNA, 12 nt, Artificial Sequence
  Description of Artificial Sequence: Synthetic oligonucleotide
cauguagacugc

SEQ ID NO: 63709 - RNA, 13 nt, Artificial Sequence
  Description of Artificial Sequence: Synthetic oligonucleotide
ggaucuauuuaug

SEQ ID NO: 63710 - RNA, 12 nt, Artificial Sequence
  Description of Artificial Sequence: Synthetic oligonucleotide
gcacuauuauca

SEQ ID NO: 63711 - RNA, 11 nt, Artificial Sequence
  Description of Artificial Sequence: Synthetic oligonucleotide
aucaguucugc

SEQ ID NO: 63712 - RNA, 13 nt, Artificial Sequence
  Description of Artificial Sequence: Synthetic oligonucleotide
agauuaaaccuac

SEQ ID NO: 63713 - RNA, 13 nt, Artificial Sequence
  Description of Artificial Sequence: Synthetic oligonucleotide
auaaaauccuucu

SEQ ID NO: 63714 - RNA, 12 nt, Artificial Sequence
  Description of Artificial Sequence: Synthetic oligonucleotide
aaugcuguagac

SEQ ID NO: 63715 - RNA, 13 nt, Artificial Sequence
  Description of Artificial Sequence: Synthetic oligonucleotide
uugauaggaauag

SEQ ID NO: 63716 - RNA, 11 nt, Artificial Sequence
  Description of Artificial Sequence: Synthetic oligonucleotide
aauggcccuga

SEQ ID NO: 63717 - RNA, 11 nt, Artificial Sequence
  Description of Artificial Sequence: Synthetic oligonucleotide
uuccucaagca

SEQ ID NO: 63718 - RNA, 10 nt, Artificial Sequence
  Description of Artificial Sequence: Synthetic oligonucleotide
guucagccca

SEQ ID NO: 63719 - RNA, 11 nt, Artificial Sequence
  Description of Artificial Sequence: Synthetic oligonucleotide
gcugcugaacc

SEQ ID NO: 63720 - RNA, 12 nt, Artificial Sequence
  Description of Artificial Sequence: Synthetic oligonucleotide
aaguucucuuca

SEQ ID NO: 63721 - RNA, 11 nt, Artificial Sequence
  Description of Artificial Sequence: Synthetic oligonucleotide
ccagccuagag

SEQ ID NO: 63722 - RNA, 13 nt, Artificial Sequence
  Description of Artificial Sequence: Synthetic oligonucleotide
cucugugaagugu

SEQ ID NO: 63723 - RNA, 14 nt, Artificial Sequence
  Description of Artificial Sequence: Synthetic oligonucleotide
ugagaaaauuucaa

SEQ ID NO: 63724 - RNA, 11 nt, Artificial Sequence
  Description of Artificial Sequence: Synthetic oligonucleotide
aauccuccuga

SEQ ID NO: 63725 - RNA, 12 nt, Artificial Sequence
  Description of Artificial Sequence: Synthetic oligonucleotide
gugacaucauau

SEQ ID NO: 63726 - RNA, 13 nt, Artificial Sequence
  Description of Artificial Sequence: Synthetic oligonucleotide
aaucuucaucaua

SEQ ID NO: 63727 - RNA, 13 nt, Artificial Sequence
  Description of Artificial Sequence: Synthetic oligonucleotide
gacuagcuauuaa

SEQ ID NO: 63728 - RNA, 14 nt, Artificial Sequence
  Description of Artificial Sequence: Synthetic oligonucleotide
ucucuacuaaaaau

SEQ ID NO: 63729 - RNA, 12 nt, Artificial Sequence
  Description of Artificial Sequence: Synthetic oligonucleotide
ucuaucucgccu

SEQ ID NO: 63730 - RNA, 13 nt, Artificial Sequence
  Description of Artificial Sequence: Synthetic oligonucleotide
cuucgguccaguu

SEQ ID NO: 63731 - RNA, 11 nt, Artificial Sequence
  Description of Artificial Sequence: Synthetic oligonucleotide
gauguagccgc

SEQ ID NO: 63732 - RNA, 12 nt, Artificial Sequence
  Description of Artificial Sequence: Synthetic oligonucleotide
ugaggagacuug

SEQ ID NO: 63733 - RNA, 12 nt, Artificial Sequence
  Description of Artificial Sequence: Synthetic oligonucleotide
gaguagugagga

SEQ ID NO: 63734 - RNA, 14 nt, Artificial Sequence
  Description of Artificial Sequence: Synthetic oligonucleotide
cagaugaguacaaa

SEQ ID NO: 63735 - RNA, 13 nt, Artificial Sequence
  Description of Artificial Sequence: Synthetic oligonucleotide
guuguuaaugggc

SEQ ID NO: 63736 - RNA, 13 nt, Artificial Sequence
  Description of Artificial Sequence: Synthetic oligonucleotide
uuuuuaauuuauu

SEQ ID NO: 63737 - RNA, 12 nt, Artificial Sequence
  Description of Artificial Sequence: Synthetic oligonucleotide
uauuuaaauaug

SEQ ID NO: 63738 - RNA, 13 nt, Artificial Sequence
  Description of Artificial Sequence: Synthetic oligonucleotide
uauccuuuguuuc

SEQ ID NO: 63739 - RNA, 14 nt, Artificial Sequence
  Description of Artificial Sequence: Synthetic oligonucleotide
cgucuaaguguuug

SEQ ID NO: 63740 - RNA, 12 nt, Artificial Sequence
  Description of Artificial Sequence: Synthetic oligonucleotide
accugugacaaa

SEQ ID NO: 63741 - RNA, 13 nt, Artificial Sequence
  Description of Artificial Sequence: Synthetic oligonucleotide
ccaggcugaauua

SEQ ID NO: 63742 - RNA, 14 nt, Artificial Sequence
  Description of Artificial Sequence: Synthetic oligonucleotide
gucauucuuacaau

SEQ ID NO: 63743 - RNA, 15 nt, Artificial Sequence
  Description of Artificial Sequence: Synthetic oligonucleotide
ucauucuuacaauug

SEQ ID NO: 63744 - RNA, 12 nt, Artificial Sequence
  Description of Artificial Sequence: Synthetic oligonucleotide
cagagaguguac

SEQ ID NO: 63745 - RNA, 12 nt, Artificial Sequence
  Description of Artificial Sequence: Synthetic oligonucleotide
agaacucagcag

SEQ ID NO: 63746 - RNA, 13 nt, Artificial Sequence
  Description of Artificial Sequence: Synthetic oligonucleotide
uuuauuuucagua

SEQ ID NO: 63747 - RNA, 12 nt, Artificial Sequence
  Description of Artificial Sequence: Synthetic oligonucleotide
ucuuaaauggaa

SEQ ID NO: 63748 - RNA, 13 nt, Artificial Sequence
  Description of Artificial Sequence: Synthetic oligonucleotide
ugccuaaaauugu

SEQ ID NO: 63749 - RNA, 12 nt, Artificial Sequence
  Description of Artificial Sequence: Synthetic oligonucleotide
agacugugagcu

SEQ ID NO: 63750 - RNA, 14 nt, Artificial Sequence
  Description of Artificial Sequence: Synthetic oligonucleotide
ugcuuuuuauuaau

SEQ ID NO: 63751 - RNA, 13 nt, Artificial Sequence
  Description of Artificial Sequence: Synthetic oligonucleotide
cucuucuuacauu

SEQ ID NO: 63752 - RNA, 15 nt, Artificial Sequence
  Description of Artificial Sequence: Synthetic oligonucleotide
cauuuguaaaaaugu

SEQ ID NO: 63753 - RNA, 15 nt, Artificial Sequence
  Description of Artificial Sequence: Synthetic oligonucleotide
aucuuaauucauauu

SEQ ID NO: 63754 - RNA, 13 nt, Artificial Sequence
  Description of Artificial Sequence: Synthetic oligonucleotide
gaacuaaucauga

SEQ ID NO: 63755 - RNA, 12 nt, Artificial Sequence
  Description of Artificial Sequence: Synthetic oligonucleotide
ucugcucuuggg

SEQ ID NO: 63756 - RNA, 13 nt, Artificial Sequence
  Description of Artificial Sequence: Synthetic oligonucleotide
caguagcuuugag

SEQ ID NO: 63757 - RNA, 14 nt, Artificial Sequence
  Description of Artificial Sequence: Synthetic oligonucleotide
cacguaauauuuca

SEQ ID NO: 63758 - RNA, 13 nt, Artificial Sequence
  Description of Artificial Sequence: Synthetic oligonucleotide
uauucucuucacu

SEQ ID NO: 63759 - RNA, 14 nt, Artificial Sequence
  Description of Artificial Sequence: Synthetic oligonucleotide
cuaaugcuaagaaa

SEQ ID NO: 63760 - RNA, 12 nt, Artificial Sequence
  Description of Artificial Sequence: Synthetic oligonucleotide
gcugaaaaucaa

SEQ ID NO: 63761 - RNA, 14 nt, Artificial Sequence
  Description of Artificial Sequence: Synthetic oligonucleotide
aauaugauuacuuu

SEQ ID NO: 63762 - RNA, 14 nt, Artificial Sequence
  Description of Artificial Sequence: Synthetic oligonucleotide
cauuuuguucuaca

SEQ ID NO: 63763 - RNA, 12 nt, Artificial Sequence
  Description of Artificial Sequence: Synthetic oligonucleotide
cccgggacucuc

SEQ ID NO: 63764 - RNA, 14 nt, Artificial Sequence
  Description of Artificial Sequence: Synthetic oligonucleotide
ccuuuaaaguaaag

SEQ ID NO: 63765 - RNA, 13 nt, Artificial Sequence
  Description of Artificial Sequence: Synthetic oligonucleotide
ucuggaagccugg

SEQ ID NO: 63766 - RNA, 14 nt, Artificial Sequence
  Description of Artificial Sequence: Synthetic oligonucleotide
aaaacaaaagagag

SEQ ID NO: 63767 - RNA, 13 nt, Artificial Sequence
  Description of Artificial Sequence: Synthetic oligonucleotide
aucaguuaugccg

SEQ ID NO: 63768 - RNA, 13 nt, Artificial Sequence
  Description of Artificial Sequence: Synthetic oligonucleotide
uaaaagaagucca

SEQ ID NO: 63769 - RNA, 11 nt, Artificial Sequence
  Description of Artificial Sequence: Synthetic oligonucleotide
aggugagguua

SEQ ID NO: 63770 - RNA, 11 nt, Artificial Sequence
  Description of Artificial Sequence: Synthetic oligonucleotide
gggaagaggac

SEQ ID NO: 63771 - RNA, 13 nt, Artificial Sequence
  Description of Artificial Sequence: Synthetic oligonucleotide
aagcaaguauugu

SEQ ID NO: 63772 - RNA, 12 nt, Artificial Sequence
  Description of Artificial Sequence: Synthetic oligonucleotide
auuguagcacuc

SEQ ID NO: 63773 - RNA, 14 nt, Artificial Sequence
  Description of Artificial Sequence: Synthetic oligonucleotide
acaaaaccacaaau

SEQ ID NO: 63774 - RNA, 12 nt, Artificial Sequence
  Description of Artificial Sequence: Synthetic oligonucleotide
uaagcccauaca

SEQ ID NO: 63775 - RNA, 11 nt, Artificial Sequence
  Description of Artificial Sequence: Synthetic oligonucleotide
agcccauacag

SEQ ID NO: 63776 - RNA, 12 nt, Artificial Sequence
  Description of Artificial Sequence: Synthetic oligonucleotide
cagaaaccuucc

SEQ ID NO: 63777 - RNA, 10 nt, Artificial Sequence
  Description of Artificial Sequence: Synthetic oligonucleotide
guauaccuac

SEQ ID NO: 63778 - RNA, 13 nt, Artificial Sequence
  Description of Artificial Sequence: Synthetic oligonucleotide
gccaguuuucgga

SEQ ID NO: 63779 - RNA, 9 nt, Artificial Sequence
  Description of Artificial Sequence: Synthetic oligonucleotide
ggaacaggg

SEQ ID NO: 63780 - RNA, 13 nt, Artificial Sequence
  Description of Artificial Sequence: Synthetic oligonucleotide
uuaacuuuccagu

SEQ ID NO: 63781 - RNA, 14 nt, Artificial Sequence
  Description of Artificial Sequence: Synthetic oligonucleotide
aaaguuugguuuug

SEQ ID NO: 63782 - RNA, 12 nt, Artificial Sequence
  Description of Artificial Sequence: Synthetic oligonucleotide
cuucccacugua

SEQ ID NO: 63783 - RNA, 13 nt, Artificial Sequence
  Description of Artificial Sequence: Synthetic oligonucleotide
ugauaccauauga

SEQ ID NO: 63784 - RNA, 11 nt, Artificial Sequence
  Description of Artificial Sequence: Synthetic oligonucleotide
aacaugggcug

SEQ ID NO: 63785 - RNA, 13 nt, Artificial Sequence
  Description of Artificial Sequence: Synthetic oligonucleotide
caacuuuuucaua

SEQ ID NO: 63786 - RNA, 12 nt, Artificial Sequence
  Description of Artificial Sequence: Synthetic oligonucleotide
caugaggccgga

SEQ ID NO: 63787 - RNA, 11 nt, Artificial Sequence
  Description of Artificial Sequence: Synthetic oligonucleotide
acugcauuugu

SEQ ID NO: 63788 - RNA, 13 nt, Artificial Sequence
  Description of Artificial Sequence: Synthetic oligonucleotide
aauguuuacuacc

SEQ ID NO: 63789 - RNA, 15 nt, Artificial Sequence
  Description of Artificial Sequence: Synthetic oligonucleotide
aauuuuuugaugaaa

SEQ ID NO: 63790 - RNA, 14 nt, Artificial Sequence
  Description of Artificial Sequence: Synthetic oligonucleotide
cagugugugaauuu

SEQ ID NO: 63791 - RNA, 13 nt, Artificial Sequence
  Description of Artificial Sequence: Synthetic oligonucleotide
gagcaauguaugu

SEQ ID NO: 63792 - RNA, 14 nt, Artificial Sequence
  Description of Artificial Sequence: Synthetic oligonucleotide
aaagcacauauaua

SEQ ID NO: 63793 - RNA, 14 nt, Artificial Sequence
  Description of Artificial Sequence: Synthetic oligonucleotide
guaauaguuucucc

SEQ ID NO: 63794 - RNA, 13 nt, Artificial Sequence
  Description of Artificial Sequence: Synthetic oligonucleotide
aguuucuccaaau

SEQ ID NO: 63795 - RNA, 13 nt, Artificial Sequence
  Description of Artificial Sequence: Synthetic oligonucleotide
uacuuccuagaaa

SEQ ID NO: 63796 - RNA, 13 nt, Artificial Sequence
  Description of Artificial Sequence: Synthetic oligonucleotide
uacaccauauaug

SEQ ID NO: 63797 - RNA, 14 nt, Artificial Sequence
  Description of Artificial Sequence: Synthetic oligonucleotide
auauaugaauggag

SEQ ID NO: 63798 - RNA, 13 nt, Artificial Sequence
  Description of Artificial Sequence: Synthetic oligonucleotide
acgagaagaagau

SEQ ID NO: 63799 - RNA, 13 nt, Artificial Sequence
  Description of Artificial Sequence: Synthetic oligonucleotide
ucauuuacaggga

SEQ ID NO: 63800 - RNA, 13 nt, Artificial Sequence
  Description of Artificial Sequence: Synthetic oligonucleotide
cauuuacagggac

SEQ ID NO: 63801 - RNA, 10 nt, Artificial Sequence
  Description of Artificial Sequence: Synthetic oligonucleotide
agggaccuga

SEQ ID NO: 63802 - RNA, 14 nt, Artificial Sequence
  Description of Artificial Sequence: Synthetic oligonucleotide
uguuugacugcauc

SEQ ID NO: 63803 - RNA, 13 nt, Artificial Sequence
  Description of Artificial Sequence: Synthetic oligonucleotide
uuugacugcaucg

SEQ ID NO: 63804 - RNA, 12 nt, Artificial Sequence
  Description of Artificial Sequence: Synthetic oligonucleotide
gaguucacaggg

SEQ ID NO: 63805 - RNA, 13 nt, Artificial Sequence
  Description of Artificial Sequence: Synthetic oligonucleotide
ggcaccucugucc

SEQ ID NO: 63806 - RNA, 15 nt, Artificial Sequence
  Description of Artificial Sequence: Synthetic oligonucleotide
gguuugucuuuuuaa

SEQ ID NO: 63807 - RNA, 14 nt, Artificial Sequence
  Description of Artificial Sequence: Synthetic oligonucleotide
uuugucuuuuuaag

SEQ ID NO: 63808 - RNA, 13 nt, Artificial Sequence
  Description of Artificial Sequence: Synthetic oligonucleotide
ccuaaagguuguc

SEQ ID NO: 63809 - RNA, 12 nt, Artificial Sequence
  Description of Artificial Sequence: Synthetic oligonucleotide
aagguugucgac

SEQ ID NO: 63810 - RNA, 13 nt, Artificial Sequence
  Description of Artificial Sequence: Synthetic oligonucleotide
accuggcaauugu

SEQ ID NO: 63811 - RNA, 12 nt, Artificial Sequence
  Description of Artificial Sequence: Synthetic oligonucleotide
aguggugcgagg

SEQ ID NO: 63812 - RNA, 13 nt, Artificial Sequence
  Description of Artificial Sequence: Synthetic oligonucleotide
agagacaugaaau

SEQ ID NO: 63813 - RNA, 13 nt, Artificial Sequence
  Description of Artificial Sequence: Synthetic oligonucleotide
auauauuucucca

SEQ ID NO: 63814 - RNA, 10 nt, Artificial Sequence
  Description of Artificial Sequence: Synthetic oligonucleotide
caugaaggcu

SEQ ID NO: 63815 - RNA, 11 nt, Artificial Sequence
  Description of Artificial Sequence: Synthetic oligonucleotide
gcuggaguggu

SEQ ID NO: 63816 - RNA, 11 nt, Artificial Sequence
  Description of Artificial Sequence: Synthetic oligonucleotide
aggaagagagg

SEQ ID NO: 63817 - RNA, 12 nt, Artificial Sequence
  Description of Artificial Sequence: Synthetic oligonucleotide
cuugcaucgggc

SEQ ID NO: 63818 - RNA, 13 nt, Artificial Sequence
  Description of Artificial Sequence: Synthetic oligonucleotide
auauccuacugug

SEQ ID NO: 63819 - RNA, 13 nt, Artificial Sequence
  Description of Artificial Sequence: Synthetic oligonucleotide
uccuacuguguaa

SEQ ID NO: 63820 - RNA, 12 nt, Artificial Sequence
  Description of Artificial Sequence: Synthetic oligonucleotide
ccuuguagugua

SEQ ID NO: 63821 - RNA, 13 nt, Artificial Sequence
  Description of Artificial Sequence: Synthetic oligonucleotide
ucuuuguugauug

SEQ ID NO: 63822 - RNA, 14 nt, Artificial Sequence
  Description of Artificial Sequence: Synthetic oligonucleotide
uuuguugauugaaa

SEQ ID NO: 63823 - RNA, 15 nt, Artificial Sequence
  Description of Artificial Sequence: Synthetic oligonucleotide
uucuuuuucuuccau

SEQ ID NO: 63824 - RNA, 13 nt, Artificial Sequence
  Description of Artificial Sequence: Synthetic oligonucleotide
aaucuuccuucua

SEQ ID NO: 63825 - RNA, 13 nt, Artificial Sequence
  Description of Artificial Sequence: Synthetic oligonucleotide
uugaaugcuucau

SEQ ID NO: 63826 - RNA, 13 nt, Artificial Sequence
  Description of Artificial Sequence: Synthetic oligonucleotide
ugaaugcuucaug

SEQ ID NO: 63827 - RNA, 13 nt, Artificial Sequence
  Description of Artificial Sequence: Synthetic oligonucleotide
aauucuacuuuga

SEQ ID NO: 63828 - RNA, 13 nt, Artificial Sequence
  Description of Artificial Sequence: Synthetic oligonucleotide
agcaacuacagac

SEQ ID NO: 63829 - RNA, 13 nt, Artificial Sequence
  Description of Artificial Sequence: Synthetic oligonucleotide
gaccaaggucaac

SEQ ID NO: 63830 - RNA, 13 nt, Artificial Sequence
  Description of Artificial Sequence: Synthetic oligonucleotide
cgacuaucucgac

SEQ ID NO: 63831 - RNA, 13 nt, Artificial Sequence
  Description of Artificial Sequence: Synthetic oligonucleotide
aaccuucccaaac

SEQ ID NO: 63832 - RNA, 14 nt, Artificial Sequence
  Description of Artificial Sequence: Synthetic oligonucleotide
ccaagcuuagaacu

SEQ ID NO: 63833 - RNA, 15 nt, Artificial Sequence
  Description of Artificial Sequence: Synthetic oligonucleotide
agcuuagaacuuuaa

SEQ ID NO: 63834 - RNA, 11 nt, Artificial Sequence
  Description of Artificial Sequence: Synthetic oligonucleotide
aagaccaccac

SEQ ID NO: 63835 - RNA, 14 nt, Artificial Sequence
  Description of Artificial Sequence: Synthetic oligonucleotide
gcgagaaauaaagu

SEQ ID NO: 63836 - RNA, 14 nt, Artificial Sequence
  Description of Artificial Sequence: Synthetic oligonucleotide
cgagaaauaaaguu

SEQ ID NO: 63837 - RNA, 12 nt, Artificial Sequence
  Description of Artificial Sequence: Synthetic oligonucleotide
aggaaaugaucc

SEQ ID NO: 63838 - RNA, 13 nt, Artificial Sequence
  Description of Artificial Sequence: Synthetic oligonucleotide
gaagaaaugaaac

SEQ ID NO: 63839 - RNA, 13 nt, Artificial Sequence
  Description of Artificial Sequence: Synthetic oligonucleotide
guuuccauccucc

SEQ ID NO: 63840 - RNA, 15 nt, Artificial Sequence
  Description of Artificial Sequence: Synthetic oligonucleotide
acugaaaaucuuuga

SEQ ID NO: 63841 - RNA, 11 nt, Artificial Sequence
  Description of Artificial Sequence: Synthetic oligonucleotide
ugccguucagg

SEQ ID NO: 63842 - RNA, 13 nt, Artificial Sequence
  Description of Artificial Sequence: Synthetic oligonucleotide
caggguccagaag

SEQ ID NO: 63843 - RNA, 13 nt, Artificial Sequence
  Description of Artificial Sequence: Synthetic oligonucleotide
ucaagacugcuug

SEQ ID NO: 63844 - RNA, 13 nt, Artificial Sequence
  Description of Artificial Sequence: Synthetic oligonucleotide
uccaugucuuugg

SEQ ID NO: 63845 - RNA, 11 nt, Artificial Sequence
  Description of Artificial Sequence: Synthetic oligonucleotide
gccugaaacac

SEQ ID NO: 63846 - RNA, 12 nt, Artificial Sequence
  Description of Artificial Sequence: Synthetic oligonucleotide
ucucuguaccuc

SEQ ID NO: 63847 - RNA, 12 nt, Artificial Sequence
  Description of Artificial Sequence: Synthetic oligonucleotide
agcaagacaaga

SEQ ID NO: 63848 - RNA, 13 nt, Artificial Sequence
  Description of Artificial Sequence: Synthetic oligonucleotide
gcaagacaagaaa

SEQ ID NO: 63849 - RNA, 12 nt, Artificial Sequence
  Description of Artificial Sequence: Synthetic oligonucleotide
uguacaagaucc

SEQ ID NO: 63850 - RNA, 12 nt, Artificial Sequence
  Description of Artificial Sequence: Synthetic oligonucleotide
cguacuugcaga

SEQ ID NO: 63851 - RNA, 13 nt, Artificial Sequence
  Description of Artificial Sequence: Synthetic oligonucleotide
cgaucgauacaga

SEQ ID NO: 63852 - RNA, 13 nt, Artificial Sequence
  Description of Artificial Sequence: Synthetic oligonucleotide
uauaaaaauaaau

SEQ ID NO: 63853 - RNA, 13 nt, Artificial Sequence
  Description of Artificial Sequence: Synthetic oligonucleotide
uaaaaauaaauau

SEQ ID NO: 63854 - RNA, 13 nt, Artificial Sequence
  Description of Artificial Sequence: Synthetic oligonucleotide
uuugacugcugug

SEQ ID NO: 63855 - RNA, 13 nt, Artificial Sequence
  Description of Artificial Sequence: Synthetic oligonucleotide
ggagaugagagac

SEQ ID NO: 63856 - RNA, 10 nt, Artificial Sequence
  Description of Artificial Sequence: Synthetic oligonucleotide
ucccacuugg

SEQ ID NO: 63857 - RNA, 10 nt, Artificial Sequence
  Description of Artificial Sequence: Synthetic oligonucleotide
guucacggcc

SEQ ID NO: 63858 - RNA, 12 nt, Artificial Sequence
  Description of Artificial Sequence: Synthetic oligonucleotide
accaucacacca

SEQ ID NO: 63859 - RNA, 10 nt, Artificial Sequence
  Description of Artificial Sequence: Synthetic oligonucleotide
cugcggguuu

SEQ ID NO: 63860 - RNA, 9 nt, Artificial Sequence
  Description of Artificial Sequence: Synthetic oligonucleotide
uccaguuug

SEQ ID NO: 63861 - RNA, 12 nt, Artificial Sequence
  Description of Artificial Sequence: Synthetic oligonucleotide
uuaaggacuucu

SEQ ID NO: 63862 - RNA, 12 nt, Artificial Sequence
  Description of Artificial Sequence: Synthetic oligonucleotide
agugggacagag

SEQ ID NO: 63863 - RNA, 13 nt, Artificial Sequence
  Description of Artificial Sequence: Synthetic oligonucleotide
auuuguuauugug

SEQ ID NO: 63864 - RNA, 12 nt, Artificial Sequence
  Description of Artificial Sequence: Synthetic oligonucleotide
ucaaaugcauuu

SEQ ID NO: 63865 - RNA, 9 nt, Artificial Sequence
  Description of Artificial Sequence: Synthetic oligonucleotide
aggaaagcc

SEQ ID NO: 63866 - RNA, 10 nt, Artificial Sequence
  Description of Artificial Sequence: Synthetic oligonucleotide
ggaaagcccu

SEQ ID NO: 63867 - RNA, 11 nt, Artificial Sequence
  Description of Artificial Sequence: Synthetic oligonucleotide
ccagcauggcc

SEQ ID NO: 63868 - RNA, 10 nt, Artificial Sequence
  Description of Artificial Sequence: Synthetic oligonucleotide
uucucccuga

SEQ ID NO: 63869 - RNA, 11 nt, Artificial Sequence
  Description of Artificial Sequence: Synthetic oligonucleotide
aagaagcccuu

SEQ ID NO: 63870 - RNA, 11 nt, Artificial Sequence
  Description of Artificial Sequence: Synthetic oligonucleotide
gaagcccuuca

SEQ ID NO: 63871 - RNA, 10 nt, Artificial Sequence
  Description of Artificial Sequence: Synthetic oligonucleotide
cccuucagcg

SEQ ID NO: 63872 - RNA, 10 nt, Artificial Sequence
  Description of Artificial Sequence: Synthetic oligonucleotide
cuucagcggc

SEQ ID NO: 63873 - RNA, 11 nt, Artificial Sequence
  Description of Artificial Sequence: Synthetic oligonucleotide
cagcggccagu

SEQ ID NO: 63874 - RNA, 11 nt, Artificial Sequence
  Description of Artificial Sequence: Synthetic oligonucleotide
gaaaagcuccg

SEQ ID NO: 63875 - RNA, 10 nt, Artificial Sequence
  Description of Artificial Sequence: Synthetic oligonucleotide
aaagcuccgg

SEQ ID NO: 63876 - RNA, 12 nt, Artificial Sequence
  Description of Artificial Sequence: Synthetic oligonucleotide
gucaacagucug

SEQ ID NO: 63877 - RNA, 12 nt, Artificial Sequence
  Description of Artificial Sequence: Synthetic oligonucleotide
agaguucaaaag

SEQ ID NO: 63878 - RNA, 12 nt, Artificial Sequence
  Description of Artificial Sequence: Synthetic oligonucleotide
gaguucaaaagc

SEQ ID NO: 63879 - RNA, 11 nt, Artificial Sequence
  Description of Artificial Sequence: Synthetic oligonucleotide
ucaaaagcccu

SEQ ID NO: 63880 - RNA, 11 nt, Artificial Sequence
  Description of Artificial Sequence: Synthetic oligonucleotide
caaaagcccuu

SEQ ID NO: 63881 - RNA, 11 nt, Artificial Sequence
  Description of Artificial Sequence: Synthetic oligonucleotide
aaagcccuuca

SEQ ID NO: 63882 - RNA, 11 nt, Artificial Sequence
  Description of Artificial Sequence: Synthetic oligonucleotide
aagcccuucag

SEQ ID NO: 63883 - RNA, 12 nt, Artificial Sequence
  Description of Artificial Sequence: Synthetic oligonucleotide
ugaagccgcucg

SEQ ID NO: 63884 - RNA, 11 nt, Artificial Sequence
  Description of Artificial Sequence: Synthetic oligonucleotide
acgccagucaa

SEQ ID NO: 63885 - RNA, 12 nt, Artificial Sequence
  Description of Artificial Sequence: Synthetic oligonucleotide
ucuuggugcgug

SEQ ID NO: 63886 - RNA, 13 nt, Artificial Sequence
  Description of Artificial Sequence: Synthetic oligonucleotide
uuggauucaucag

SEQ ID NO: 63887 - RNA, 12 nt, Artificial Sequence
  Description of Artificial Sequence: Synthetic oligonucleotide
ggaauaccuaag

SEQ ID NO: 63888 - RNA, 11 nt, Artificial Sequence
  Description of Artificial Sequence: Synthetic oligonucleotide
uuugaggcuca

SEQ ID NO: 63889 - RNA, 10 nt, Artificial Sequence
  Description of Artificial Sequence: Synthetic oligonucleotide
cuacaauugg

SEQ ID NO: 63890 - RNA, 11 nt, Artificial Sequence
  Description of Artificial Sequence: Synthetic oligonucleotide
aguuaggagcc

SEQ ID NO: 63891 - RNA, 12 nt, Artificial Sequence
  Description of Artificial Sequence: Synthetic oligonucleotide
gucaauauccac

SEQ ID NO: 63892 - RNA, 12 nt, Artificial Sequence
  Description of Artificial Sequence: Synthetic oligonucleotide
uguucagucaca

SEQ ID NO: 63893 - RNA, 11 nt, Artificial Sequence
  Description of Artificial Sequence: Synthetic oligonucleotide
cacacacauac

SEQ ID NO: 63894 - RNA, 11 nt, Artificial Sequence
  Description of Artificial Sequence: Synthetic oligonucleotide
uccuuuugcuu

SEQ ID NO: 63895 - RNA, 15 nt, Artificial Sequence
  Description of Artificial Sequence: Synthetic oligonucleotide
uuuaaaguaauuuuu

SEQ ID NO: 63896 - RNA, 12 nt, Artificial Sequence
  Description of Artificial Sequence: Synthetic oligonucleotide
aacagucaaugg

SEQ ID NO: 63897 - RNA, 12 nt, Artificial Sequence
  Description of Artificial Sequence: Synthetic oligonucleotide
cgacaaaccaau

SEQ ID NO: 63898 - RNA, 11 nt, Artificial Sequence
  Description of Artificial Sequence: Synthetic oligonucleotide
cugcuaccacu

SEQ ID NO: 63899 - RNA, 12 nt, Artificial Sequence
  Description of Artificial Sequence: Synthetic oligonucleotide
caagcggucuua

SEQ ID NO: 63900 - RNA, 12 nt, Artificial Sequence
  Description of Artificial Sequence: Synthetic oligonucleotide
gucuuaccggcu

SEQ ID NO: 63901 - RNA, 10 nt, Artificial Sequence
  Description of Artificial Sequence: Synthetic oligonucleotide
auggguuacc

SEQ ID NO: 63902 - RNA, 10 nt, Artificial Sequence
  Description of Artificial Sequence: Synthetic oligonucleotide
uuaccugcga

SEQ ID NO: 63903 - RNA, 11 nt, Artificial Sequence
  Description of Artificial Sequence: Synthetic oligonucleotide
aucuugcugag

SEQ ID NO: 63904 - RNA, 12 nt, Artificial Sequence
  Description of Artificial Sequence: Synthetic oligonucleotide
gcauaaaacagu

SEQ ID NO: 63905 - RNA, 11 nt, Artificial Sequence
  Description of Artificial Sequence: Synthetic oligonucleotide
uccuuuauccu

SEQ ID NO: 63906 - RNA, 11 nt, Artificial Sequence
  Description of Artificial Sequence: Synthetic oligonucleotide
aacgcaaguug

SEQ ID NO: 63907 - RNA, 12 nt, Artificial Sequence
  Description of Artificial Sequence: Synthetic oligonucleotide
aacugaaaccau

SEQ ID NO: 63908 - RNA, 13 nt, Artificial Sequence
  Description of Artificial Sequence: Synthetic oligonucleotide
cuuuguuaaauau

SEQ ID NO: 63909 - RNA, 13 nt, Artificial Sequence
  Description of Artificial Sequence: Synthetic oligonucleotide
uauauuaaaaguu

SEQ ID NO: 63910 - RNA, 12 nt, Artificial Sequence
  Description of Artificial Sequence: Synthetic oligonucleotide
uuuugacuuaac

SEQ ID NO: 63911 - RNA, 12 nt, Artificial Sequence
  Description of Artificial Sequence: Synthetic oligonucleotide
caaacucagcac

SEQ ID NO: 63912 - RNA, 10 nt, Artificial Sequence
  Description of Artificial Sequence: Synthetic oligonucleotide
gcugaccuca

SEQ ID NO: 63913 - RNA, 13 nt, Artificial Sequence
  Description of Artificial Sequence: Synthetic oligonucleotide
uuauucagaucgc

SEQ ID NO: 63914 - RNA, 12 nt, Artificial Sequence
  Description of Artificial Sequence: Synthetic oligonucleotide
ggguucugggau

SEQ ID NO: 63915 - RNA, 14 nt, Artificial Sequence
  Description of Artificial Sequence: Synthetic oligonucleotide
uauuggaaauuaug

SEQ ID NO: 63916 - RNA, 12 nt, Artificial Sequence
  Description of Artificial Sequence: Synthetic oligonucleotide
uggaagcacuag

SEQ ID NO: 63917 - RNA, 12 nt, Artificial Sequence
  Description of Artificial Sequence: Synthetic oligonucleotide
uuuuuaugugga

SEQ ID NO: 63918 - RNA, 11 nt, Artificial Sequence
  Description of Artificial Sequence: Synthetic oligonucleotide
gaauugguaga

SEQ ID NO: 63919 - RNA, 12 nt, Artificial Sequence
  Description of Artificial Sequence: Synthetic oligonucleotide
uagacuuggaga

SEQ ID NO: 63920 - RNA, 12 nt, Artificial Sequence
  Description of Artificial Sequence: Synthetic oligonucleotide
uacaguauucca

SEQ ID NO: 63921 - RNA, 14 nt, Artificial Sequence
  Description of Artificial Sequence: Synthetic oligonucleotide
cacugaugaauuaa

SEQ ID NO: 63922 - RNA, 11 nt, Artificial Sequence
  Description of Artificial Sequence: Synthetic oligonucleotide
cacaucaucac

SEQ ID NO: 63923 - RNA, 12 nt, Artificial Sequence
  Description of Artificial Sequence: Synthetic oligonucleotide
ucaccaaacaga

SEQ ID NO: 63924 - RNA, 11 nt, Artificial Sequence
  Description of Artificial Sequence: Synthetic oligonucleotide
gaacaugaugg

SEQ ID NO: 63925 - RNA, 11 nt, Artificial Sequence
  Description of Artificial Sequence: Synthetic oligonucleotide
auguagacugc

SEQ ID NO: 63926 - RNA, 12 nt, Artificial Sequence
  Description of Artificial Sequence: Synthetic oligonucleotide
gaucuauuuaug

SEQ ID NO: 63927 - RNA, 11 nt, Artificial Sequence
  Description of Artificial Sequence: Synthetic oligonucleotide
cacuauuauca

SEQ ID NO: 63928 - RNA, 10 nt, Artificial Sequence
  Description of Artificial Sequence: Synthetic oligonucleotide
ucaguucugc

SEQ ID NO: 63929 - RNA, 12 nt, Artificial Sequence
  Description of Artificial Sequence: Synthetic oligonucleotide
gauuaaaccuac

SEQ ID NO: 63930 - RNA, 12 nt, Artificial Sequence
  Description of Artificial Sequence: Synthetic oligonucleotide
uaaaauccuucu

SEQ ID NO: 63931 - RNA, 11 nt, Artificial Sequence
  Description of Artificial Sequence: Synthetic oligonucleotide
augcuguagac

SEQ ID NO: 63932 - RNA, 12 nt, Artificial Sequence
  Description of Artificial Sequence: Synthetic oligonucleotide
ugauaggaauag

SEQ ID NO: 63933 - RNA, 10 nt, Artificial Sequence
  Description of Artificial Sequence: Synthetic oligonucleotide
auggcccuga

SEQ ID NO: 63934 - RNA, 10 nt, Artificial Sequence
  Description of Artificial Sequence: Synthetic oligonucleotide
uccucaagca

SEQ ID NO: 63935 - RNA, 9 nt, Artificial Sequence
  Description of Artificial Sequence: Synthetic oligonucleotide
uucagccca

SEQ ID NO: 63936 - RNA, 10 nt, Artificial Sequence
  Description of Artificial Sequence: Synthetic oligonucleotide
cugcugaacc

SEQ ID NO: 63937 - RNA, 11 nt, Artificial Sequence
  Description of Artificial Sequence: Synthetic oligonucleotide
aguucucuuca

SEQ ID NO: 63938 - RNA, 10 nt, Artificial Sequence
  Description of Artificial Sequence: Synthetic oligonucleotide
cagccuagag

SEQ ID NO: 63939 - RNA, 12 nt, Artificial Sequence
  Description of Artificial Sequence: Synthetic oligonucleotide
ucugugaagugu

SEQ ID NO: 63940 - RNA, 13 nt, Artificial Sequence
  Description of Artificial Sequence: Synthetic oligonucleotide
gagaaaauuucaa

SEQ ID NO: 63941 - RNA, 10 nt, Artificial Sequence
  Description of Artificial Sequence: Synthetic oligonucleotide
auccuccuga

SEQ ID NO: 63942 - RNA, 11 nt, Artificial Sequence
  Description of Artificial Sequence: Synthetic oligonucleotide
ugacaucauau

SEQ ID NO: 63943 - RNA, 12 nt, Artificial Sequence
  Description of Artificial Sequence: Synthetic oligonucleotide
aucuucaucaua

SEQ ID NO: 63944 - RNA, 12 nt, Artificial Sequence
  Description of Artificial Sequence: Synthetic oligonucleotide
acuagcuauuaa

SEQ ID NO: 63945 - RNA, 13 nt, Artificial Sequence
  Description of Artificial Sequence: Synthetic oligonucleotide
cucuacuaaaaau

SEQ ID NO: 63946 - RNA, 11 nt, Artificial Sequence
  Description of Artificial Sequence: Synthetic oligonucleotide
cuaucucgccu

SEQ ID NO: 63947 - RNA, 12 nt, Artificial Sequence
  Description of Artificial Sequence: Synthetic oligonucleotide
uucgguccaguu

SEQ ID NO: 63948 - RNA, 10 nt, Artificial Sequence
  Description of Artificial Sequence: Synthetic oligonucleotide
auguagccgc

SEQ ID NO: 63949 - RNA, 11 nt, Artificial Sequence
  Description of Artificial Sequence: Synthetic oligonucleotide
gaggagacuug

SEQ ID NO: 63950 - RNA, 11 nt, Artificial Sequence
  Description of Artificial Sequence: Synthetic oligonucleotide
aguagugagga

SEQ ID NO: 63951 - RNA, 13 nt, Artificial Sequence
  Description of Artificial Sequence: Synthetic oligonucleotide
agaugaguacaaa

SEQ ID NO: 63952 - RNA, 12 nt, Artificial Sequence
  Description of Artificial Sequence: Synthetic oligonucleotide
uuguuaaugggc

SEQ ID NO: 63953 - RNA, 12 nt, Artificial Sequence
  Description of Artificial Sequence: Synthetic oligonucleotide
uuuuaauuuauu

SEQ ID NO: 63954 - RNA, 11 nt, Artificial Sequence
  Description of Artificial Sequence: Synthetic oligonucleotide
auuuaaauaug

SEQ ID NO: 63955 - RNA, 12 nt, Artificial Sequence
  Description of Artificial Sequence: Synthetic oligonucleotide
auccuuuguuuc

SEQ ID NO: 63956 - RNA, 13 nt, Artificial Sequence
  Description of Artificial Sequence: Synthetic oligonucleotide
gucuaaguguuug

SEQ ID NO: 63957 - RNA, 11 nt, Artificial Sequence
  Description of Artificial Sequence: Synthetic oligonucleotide
ccugugacaaa

SEQ ID NO: 63958 - RNA, 12 nt, Artificial Sequence
  Description of Artificial Sequence: Synthetic oligonucleotide
caggcugaauua

SEQ ID NO: 63959 - RNA, 13 nt, Artificial Sequence
  Description of Artificial Sequence: Synthetic oligonucleotide
ucauucuuacaau

SEQ ID NO: 63960 - RNA, 14 nt, Artificial Sequence
  Description of Artificial Sequence: Synthetic oligonucleotide
cauucuuacaauug

SEQ ID NO: 63961 - RNA, 11 nt, Artificial Sequence
  Description of Artificial Sequence: Synthetic oligonucleotide
agagaguguac

SEQ ID NO: 63962 - RNA, 11 nt, Artificial Sequence
  Description of Artificial Sequence: Synthetic oligonucleotide
gaacucagcag

SEQ ID NO: 63963 - RNA, 12 nt, Artificial Sequence
  Description of Artificial Sequence: Synthetic oligonucleotide
uuauuuucagua

SEQ ID NO: 63964 - RNA, 11 nt, Artificial Sequence
  Description of Artificial Sequence: Synthetic oligonucleotide
cuuaaauggaa

SEQ ID NO: 63965 - RNA, 12 nt, Artificial Sequence
  Description of Artificial Sequence: Synthetic oligonucleotide
gccuaaaauugu

SEQ ID NO: 63966 - RNA, 12 nt, Artificial Sequence
  Description of Artificial Sequence: Synthetic oligonucleotide
acuaacaucugg

SEQ ID NO: 63967 - RNA, 11 nt, Artificial Sequence
  Description of Artificial Sequence: Synthetic oligonucleotide
gacugugagcu

SEQ ID NO: 63968 - RNA, 13 nt, Artificial Sequence
  Description of Artificial Sequence: Synthetic oligonucleotide
gcuuuuuauuaau

SEQ ID NO: 63969 - RNA, 12 nt, Artificial Sequence
  Description of Artificial Sequence: Synthetic oligonucleotide
ucuucuuacauu

SEQ ID NO: 63970 - RNA, 14 nt, Artificial Sequence
  Description of Artificial Sequence: Synthetic oligonucleotide
auuuguaaaaaugu

SEQ ID NO: 63971 - RNA, 14 nt, Artificial Sequence
  Description of Artificial Sequence: Synthetic oligonucleotide
ucuuaauucauauu

SEQ ID NO: 63972 - RNA, 12 nt, Artificial Sequence
  Description of Artificial Sequence: Synthetic oligonucleotide
aacuaaucauga

SEQ ID NO: 63973 - RNA, 11 nt, Artificial Sequence
  Description of Artificial Sequence: Synthetic oligonucleotide
cugcucuuggg

SEQ ID NO: 63974 - RNA, 12 nt, Artificial Sequence
  Description of Artificial Sequence: Synthetic oligonucleotide
aguagcuuugag

SEQ ID NO: 63975 - RNA, 13 nt, Artificial Sequence
  Description of Artificial Sequence: Synthetic oligonucleotide
acguaauauuuca

SEQ ID NO: 63976 - RNA, 12 nt, Artificial Sequence
  Description of Artificial Sequence: Synthetic oligonucleotide
auucucuucacu

SEQ ID NO: 63977 - RNA, 13 nt, Artificial Sequence
  Description of Artificial Sequence: Synthetic oligonucleotide
uaaugcuaagaaa

SEQ ID NO: 63978 - RNA, 11 nt, Artificial Sequence
  Description of Artificial Sequence: Synthetic oligonucleotide
cugaaaaucaa

SEQ ID NO: 63979 - RNA, 13 nt, Artificial Sequence
  Description of Artificial Sequence: Synthetic oligonucleotide
auaugauuacuuu

SEQ ID NO: 63980 - RNA, 13 nt, Artificial Sequence
  Description of Artificial Sequence: Synthetic oligonucleotide
auuuuguucuaca

SEQ ID NO: 63981 - RNA, 11 nt, Artificial Sequence
  Description of Artificial Sequence: Synthetic oligonucleotide
ccgggacucuc

SEQ ID NO: 63982 - RNA, 13 nt, Artificial Sequence
  Description of Artificial Sequence: Synthetic oligonucleotide
cuuuaaaguaaag

SEQ ID NO: 63983 - RNA, 12 nt, Artificial Sequence
  Description of Artificial Sequence: Synthetic oligonucleotide
cuggaagccugg

SEQ ID NO: 63984 - RNA, 13 nt, Artificial Sequence
  Description of Artificial Sequence: Synthetic oligonucleotide
aaacaaaagagag

SEQ ID NO: 63985 - RNA, 12 nt, Artificial Sequence
  Description of Artificial Sequence: Synthetic oligonucleotide
ucaguuaugccg

SEQ ID NO: 63986 - RNA, 12 nt, Artificial Sequence
  Description of Artificial Sequence: Synthetic oligonucleotide
aaaagaagucca

SEQ ID NO: 63987 - RNA, 10 nt, Artificial Sequence
  Description of Artificial Sequence: Synthetic oligonucleotide
ggugagguua

SEQ ID NO: 63988 - RNA, 10 nt, Artificial Sequence
  Description of Artificial Sequence: Synthetic oligonucleotide
ggaagaggac

SEQ ID NO: 63989 - RNA, 12 nt, Artificial Sequence
  Description of Artificial Sequence: Synthetic oligonucleotide
agcaaguauugu

SEQ ID NO: 63990 - RNA, 11 nt, Artificial Sequence
  Description of Artificial Sequence: Synthetic oligonucleotide
uuguagcacuc

SEQ ID NO: 63991 - RNA, 13 nt, Artificial Sequence
  Description of Artificial Sequence: Synthetic oligonucleotide
caaaaccacaaau

SEQ ID NO: 63992 - RNA, 11 nt, Artificial Sequence
  Description of Artificial Sequence: Synthetic oligonucleotide
aagcccauaca

SEQ ID NO: 63993 - RNA, 10 nt, Artificial Sequence
  Description of Artificial Sequence: Synthetic oligonucleotide
gcccauacag

SEQ ID NO: 63994 - RNA, 11 nt, Artificial Sequence
  Description of Artificial Sequence: Synthetic oligonucleotide
agaaaccuucc

SEQ ID NO: 63995 - RNA, 9 nt, Artificial Sequence
  Description of Artificial Sequence: Synthetic oligonucleotide
uauaccuac

SEQ ID NO: 63996 - RNA, 12 nt, Artificial Sequence
  Description of Artificial Sequence: Synthetic oligonucleotide
ccaguuuucgga

SEQ ID NO: 63997 - RNA, 8 nt, Artificial Sequence
  Description of Artificial Sequence: Synthetic oligonucleotide
gaacaggg

SEQ ID NO: 63998 - RNA, 12 nt, Artificial Sequence
  Description of Artificial Sequence: Synthetic oligonucleotide
uaacuuuccagu

SEQ ID NO: 63999 - RNA, 13 nt, Artificial Sequence
  Description of Artificial Sequence: Synthetic oligonucleotide
aaguuugguuuug

SEQ ID NO: 64000 - RNA, 11 nt, Artificial Sequence
  Description of Artificial Sequence: Synthetic oligonucleotide
uucccacugua

SEQ ID NO: 64001 - RNA, 12 nt, Artificial Sequence
  Description of Artificial Sequence: Synthetic oligonucleotide
gauaccauauga

SEQ ID NO: 64002 - RNA, 10 nt, Artificial Sequence
  Description of Artificial Sequence: Synthetic oligonucleotide
acaugggcug

SEQ ID NO: 64003 - RNA, 12 nt, Artificial Sequence
  Description of Artificial Sequence: Synthetic oligonucleotide
aacuuuuucaua

SEQ ID NO: 64004 - RNA, 11 nt, Artificial Sequence
  Description of Artificial Sequence: Synthetic oligonucleotide
augaggccgga

SEQ ID NO: 64005 - RNA, 10 nt, Artificial Sequence
  Description of Artificial Sequence: Synthetic oligonucleotide
cugcauuugu

SEQ ID NO: 64006 - RNA, 12 nt, Artificial Sequence
  Description of Artificial Sequence: Synthetic oligonucleotide
auguuuacuacc

SEQ ID NO: 64007 - RNA, 14 nt, Artificial Sequence
  Description of Artificial Sequence: Synthetic oligonucleotide
auuuuuugaugaaa

SEQ ID NO: 64008 - RNA, 13 nt, Artificial Sequence
  Description of Artificial Sequence: Synthetic oligonucleotide
agugugugaauuu

SEQ ID NO: 64009 - RNA, 12 nt, Artificial Sequence
  Description of Artificial Sequence: Synthetic oligonucleotide
agcaauguaugu

SEQ ID NO: 64010 - RNA, 13 nt, Artificial Sequence
  Description of Artificial Sequence: Synthetic oligonucleotide
aagcacauauaua

SEQ ID NO: 64011 - RNA, 13 nt, Artificial Sequence
  Description of Artificial Sequence: Synthetic oligonucleotide
uaauaguuucucc

SEQ ID NO: 64012 - RNA, 12 nt, Artificial Sequence
  Description of Artificial Sequence: Synthetic oligonucleotide
guuucuccaaau

SEQ ID NO: 64013 - RNA, 12 nt, Artificial Sequence
  Description of Artificial Sequence: Synthetic oligonucleotide
acuuccuagaaa

SEQ ID NO: 64014 - RNA, 12 nt, Artificial Sequence
  Description of Artificial Sequence: Synthetic oligonucleotide
acaccauauaug

SEQ ID NO: 64015 - RNA, 13 nt, Artificial Sequence
  Description of Artificial Sequence: Synthetic oligonucleotide
uauaugaauggag

SEQ ID NO: 64016 - RNA, 12 nt, Artificial Sequence
  Description of Artificial Sequence: Synthetic oligonucleotide
cauuuacaggga

SEQ ID NO: 64017 - RNA, 12 nt, Artificial Sequence
  Description of Artificial Sequence: Synthetic oligonucleotide
auuuacagggac

SEQ ID NO: 64018 - RNA, 9 nt, Artificial Sequence
  Description of Artificial Sequence: Synthetic oligonucleotide
gggaccuga

SEQ ID NO: 64019 - RNA, 13 nt, Artificial Sequence
  Description of Artificial Sequence: Synthetic oligonucleotide
guuugacugcauc

SEQ ID NO: 64020 - RNA, 12 nt, Artificial Sequence
  Description of Artificial Sequence: Synthetic oligonucleotide
uugacugcaucg

SEQ ID NO: 64021 - RNA, 11 nt, Artificial Sequence
  Description of Artificial Sequence: Synthetic oligonucleotide
aguucacaggg

SEQ ID NO: 64022 - RNA, 12 nt, Artificial Sequence
  Description of Artificial Sequence: Synthetic oligonucleotide
gcaccucugucc

SEQ ID NO: 64023 - RNA, 14 nt, Artificial Sequence
  Description of Artificial Sequence: Synthetic oligonucleotide
guuugucuuuuuaa

SEQ ID NO: 64024 - RNA, 13 nt, Artificial Sequence
  Description of Artificial Sequence: Synthetic oligonucleotide
uugucuuuuuaag

SEQ ID NO: 64025 - RNA, 12 nt, Artificial Sequence
  Description of Artificial Sequence: Synthetic oligonucleotide
cuaaagguuguc

SEQ ID NO: 64026 - RNA, 11 nt, Artificial Sequence
  Description of Artificial Sequence: Synthetic oligonucleotide
agguugucgac

SEQ ID NO: 64027 - RNA, 12 nt, Artificial Sequence
  Description of Artificial Sequence: Synthetic oligonucleotide
ccuggcaauugu

SEQ ID NO: 64028 - RNA, 11 nt, Artificial Sequence
  Description of Artificial Sequence: Synthetic oligonucleotide
guggugcgagg

SEQ ID NO: 64029 - RNA, 12 nt, Artificial Sequence
  Description of Artificial Sequence: Synthetic oligonucleotide
gagacaugaaau

SEQ ID NO: 64030 - RNA, 12 nt, Artificial Sequence
  Description of Artificial Sequence: Synthetic oligonucleotide
uauauuucucca

SEQ ID NO: 64031 - RNA, 9 nt, Artificial Sequence
  Description of Artificial Sequence: Synthetic oligonucleotide
augaaggcu

SEQ ID NO: 64032 - RNA, 10 nt, Artificial Sequence
  Description of Artificial Sequence: Synthetic oligonucleotide
cuggaguggu

SEQ ID NO: 64033 - RNA, 10 nt, Artificial Sequence
  Description of Artificial Sequence: Synthetic oligonucleotide
ggaagagagg

SEQ ID NO: 64034 - RNA, 11 nt, Artificial Sequence
  Description of Artificial Sequence: Synthetic oligonucleotide
uugcaucgggc

SEQ ID NO: 64035 - RNA, 12 nt, Artificial Sequence
  Description of Artificial Sequence: Synthetic oligonucleotide
uauccuacugug

SEQ ID NO: 64036 - RNA, 12 nt, Artificial Sequence
  Description of Artificial Sequence: Synthetic oligonucleotide
ccuacuguguaa

SEQ ID NO: 64037 - RNA, 11 nt, Artificial Sequence
  Description of Artificial Sequence: Synthetic oligonucleotide
cuuguagugua

SEQ ID NO: 64038 - RNA, 12 nt, Artificial Sequence
  Description of Artificial Sequence: Synthetic oligonucleotide
cuuuguugauug

SEQ ID NO: 64039 - RNA, 13 nt, Artificial Sequence
  Description of Artificial Sequence: Synthetic oligonucleotide
uuguugauugaaa

SEQ ID NO: 64040 - RNA, 14 nt, Artificial Sequence
  Description of Artificial Sequence: Synthetic oligonucleotide
ucuuuuucuuccau

SEQ ID NO: 64041 - RNA, 12 nt, Artificial Sequence
  Description of Artificial Sequence: Synthetic oligonucleotide
aucuuccuucua

SEQ ID NO: 64042 - RNA, 12 nt, Artificial Sequence
  Description of Artificial Sequence: Synthetic oligonucleotide
ugaaugcuucau

SEQ ID NO: 64043 - RNA, 12 nt, Artificial Sequence
  Description of Artificial Sequence: Synthetic oligonucleotide
gaaugcuucaug

SEQ ID NO: 64044 - RNA, 12 nt, Artificial Sequence
  Description of Artificial Sequence: Synthetic oligonucleotide
auucuacuuuga

SEQ ID NO: 64045 - RNA, 12 nt, Artificial Sequence
  Description of Artificial Sequence: Synthetic oligonucleotide
gcaacuacagac

SEQ ID NO: 64046 - RNA, 12 nt, Artificial Sequence
  Description of Artificial Sequence: Synthetic oligonucleotide
accaaggucaac

SEQ ID NO: 64047 - RNA, 12 nt, Artificial Sequence
  Description of Artificial Sequence: Synthetic oligonucleotide
gacuaucucgac

SEQ ID NO: 64048 - RNA, 12 nt, Artificial Sequence
  Description of Artificial Sequence: Synthetic oligonucleotide
accuucccaaac

SEQ ID NO: 64049 - RNA, 13 nt, Artificial Sequence
  Description of Artificial Sequence: Synthetic oligonucleotide
caagcuuagaacu

SEQ ID NO: 64050 - RNA, 14 nt, Artificial Sequence
  Description of Artificial Sequence: Synthetic oligonucleotide
gcuuagaacuuuaa

SEQ ID NO: 64051 - RNA, 13 nt, Artificial Sequence
  Description of Artificial Sequence: Synthetic oligonucleotide
aacuuuaagcaac

SEQ ID NO: 64052 - RNA, 10 nt, Artificial Sequence
  Description of Artificial Sequence: Synthetic oligonucleotide
agaccaccac

SEQ ID NO: 64053 - RNA, 13 nt, Artificial Sequence
  Description of Artificial Sequence: Synthetic oligonucleotide
cgagaaauaaagu

SEQ ID NO: 64054 - RNA, 13 nt, Artificial Sequence
  Description of Artificial Sequence: Synthetic oligonucleotide
gagaaauaaaguu

SEQ ID NO: 64055 - RNA, 11 nt, Artificial Sequence
  Description of Artificial Sequence: Synthetic oligonucleotide
ggaaaugaucc

SEQ ID NO: 64056 - RNA, 12 nt, Artificial Sequence
  Description of Artificial Sequence: Synthetic oligonucleotide
aagaaaugaaac

SEQ ID NO: 64057 - RNA, 12 nt, Artificial Sequence
  Description of Artificial Sequence: Synthetic oligonucleotide
uuuccauccucc

SEQ ID NO: 64058 - RNA, 14 nt, Artificial Sequence
  Description of Artificial Sequence: Synthetic oligonucleotide
cugaaaaucuuuga

SEQ ID NO: 64059 - RNA, 10 nt, Artificial Sequence
  Description of Artificial Sequence: Synthetic oligonucleotide
gccguucagg

SEQ ID NO: 64060 - RNA, 12 nt, Artificial Sequence
  Description of Artificial Sequence: Synthetic oligonucleotide
aggguccagaag

SEQ ID NO: 64061 - RNA, 12 nt, Artificial Sequence
  Description of Artificial Sequence: Synthetic oligonucleotide
caagacugcuug

SEQ ID NO: 64062 - RNA, 12 nt, Artificial Sequence
  Description of Artificial Sequence: Synthetic oligonucleotide
ccaugucuuugg

SEQ ID NO: 64063 - RNA, 10 nt, Artificial Sequence
  Description of Artificial Sequence: Synthetic oligonucleotide
ccugaaacac

SEQ ID NO: 64064 - RNA, 11 nt, Artificial Sequence
  Description of Artificial Sequence: Synthetic oligonucleotide
cucuguaccuc

SEQ ID NO: 64065 - RNA, 11 nt, Artificial Sequence
  Description of Artificial Sequence: Synthetic oligonucleotide
gcaagacaaga

SEQ ID NO: 64066 - RNA, 12 nt, Artificial Sequence
  Description of Artificial Sequence: Synthetic oligonucleotide
caagacaagaaa

SEQ ID NO: 64067 - RNA, 11 nt, Artificial Sequence
  Description of Artificial Sequence: Synthetic oligonucleotide
guacaagaucc

SEQ ID NO: 64068 - RNA, 11 nt, Artificial Sequence
  Description of Artificial Sequence: Synthetic oligonucleotide
guacuugcaga

SEQ ID NO: 64069 - RNA, 12 nt, Artificial Sequence
  Description of Artificial Sequence: Synthetic oligonucleotide
gaucgauacaga

SEQ ID NO: 64070 - RNA, 12 nt, Artificial Sequence
  Description of Artificial Sequence: Synthetic oligonucleotide
auaaaaauaaau

SEQ ID NO: 64071 - RNA, 12 nt, Artificial Sequence
  Description of Artificial Sequence: Synthetic oligonucleotide
aaaaauaaauau

SEQ ID NO: 64072 - RNA, 12 nt, Artificial Sequence
  Description of Artificial Sequence: Synthetic oligonucleotide
uugacugcugug

SEQ ID NO: 64073 - RNA, 12 nt, Artificial Sequence
  Description of Artificial Sequence: Synthetic oligonucleotide
gagaugagagac

SEQ ID NO: 64074 - RNA, 9 nt, Artificial Sequence
  Description of Artificial Sequence: Synthetic oligonucleotide
cccacuugg

SEQ ID NO: 64075 - RNA, 2328 nt, Homo sapiens
ggaagcagggcggggccucugguggcggucgggaacucggugggaggcggcaacauuguuucaaguuggccaaauugacaagagcgagagguauacugcguuccaucccgacccggggccacgguacugggcccuguuucccccuccucggcccccgagagccaggguccgccuucugcaggguucccaggcccccgcuccagggccgggcugacccgacucgcuggcgcuucauggagaacuuccaaaagguggaaaagaucggagagggcacguacggaguuguguacaaagccagaaacaaguugacgggagaggugguggcgcuuaagaaaauccgccuggacacugagacugagggugugcccaguacugccauccgagagaucucucugcuuaaggagcuuaaccauccuaauauugucaagcugcuggaugucauucacacagaaaauaaacucuaccugguuuuugaauuucugcaccaagaucucaagaaauucauggaugccucugcucucacuggcauuccucuuccccucaucaagagcuaucuguuccagcugcuccagggccuagcuuucugccauucucaucggguccuccaccgagaccuuaaaccucagaaucugcuuauuaacacagagggggccaucaagcuagcagacuuuggacuagccagagcuuuuggagucccuguucguacuuacacccaugagguggugacccugugguaccgagcuccugaaauccuccugggcugcaaauauuauuccacagcuguggacaucuggagccugggcugcaucuuugcugagauggugacucgccgggcccuauucccuggagauucugagauugaccagcucuuccggaucuuucggacucuggggaccccagaugaggugguguggccaggaguuacuucuaugccugauuacaagccaaguuuccccaagugggcccggcaagauuuuaguaaaguuguaccuccccuggaugaagauggacggagcuuguuaucgcaaaugcugcacuacgacccuaacaagcggauuucggccaaggcagcccuggcucacccuuucuuccaggaugugaccaagccaguaccccaucuucgacucugauagccuucuugaagcccccagcccuaaucucacccucuccuccagugugggcuugaccaggcuuggccuugggcuauuuggacucaggugggcccucugaacuugccuuaaacacucaccuucuagucuuggccagccaacucugggaauacaggggugaaaggggggaaccagugaaaaugaaaggaaguuucaguauuagaugcacuuaaguuagccuccaccacccuuucccccuucucuuaguuauugcugaagaggguugguauaaaaauaauuuuaaaaaagccuuccuacacguuagauuugccguaccaaucucugaaugccccauaauuauuauuuccaguguuugggaugaccaggaucccaagccuccugcugccacaauguuuauaaaggccaaaugauagcgggggcuaaguuggugcuuuugagaaccaaguaaaacaaaaccacugggaggagucuauuuuaaagaauucgguugaaaaaauagauccaaucaguuuauacccuaguuaguguuuugccucaccuaauaggcugggagacugaagacucagcccggguggggcugcagaaaaaugauuggccccaguccccuuguuugucccuucuacaggcaugaggaaucugggaggcccugagacagggauugugcuucauuccaaucuauugcuucaccauggccuuaugaggcaggugagagauguuugaauuuuucucuuccuuuuaguauucuuaguuguucaguugccaaggaucccugaucccauuuuccucugacguccaccuccuaccccauaggaguuagaaguuaggguuuaggcaucauuuugagaaugcugacacuuuuucagggcugugauugagugagggcauggguaaaaauauuucuuuaaaagaaggaugaacaauuauauuuauauuucagguuauauccaauaguagaguuggcuuuuuuuuuuuuuuuuuuggucauaguggguggauuuguugccaugugcaccuugggguuuuguaaugacagugcuaaaaaaaaaaaagcauuuuuuuuuaugauuugucucugucacccuuguccuugagugcucuugcuauuaacguuauuuguaauuuaguuuguagcucauuaaaaaaaugugccuaguuuuauaaaaaaaaaaaaaaaaaaaaaaaaaaaaaaaaaaaaaaa

SEQ ID NO: 64076 - RNA, 2226 nt, Homo sapiens
ggaagcagggcggggccucugguggcggucgggaacucggugggaggcggcaacauuguuucaaguuggccaaauugacaagagcgagagguauacugcguuccaucccgacccggggccacgguacugggcccuguuucccccuccucggcccccgagagccaggguccgccuucugcaggguucccaggcccccgcuccagggccgggcugacccgacucgcuggcgcuucauggagaacuuccaaaagguggaaaagaucggagagggcacguacggaguuguguacaaagccagaaacaaguugacgggagaggugguggcgcuuaagaaaauccgccuggacacugagacugagggugugcccaguacugccauccgagagaucucucugcuuaaggagcuuaaccauccuaauauugucaagcugcuggaugucauucacacagaaaauaaacucuaccugguuuuugaauuucugcaccaagaucucaagaaauucauggaugccucugcucucacuggcauuccucuuccccucaucaagagcuaucuguuccagcugcuccagggccuagcuuucugccauucucaucggguccuccaccgagaccuuaaaccucagaaucugcuuauuaacacagagggggccaucaagcuagcagacuuuggacuagccagagcuuuuggagucccuguucguacuuacacccaugaggugacucgccgggcccuauucccuggagauucugagauugaccagcucuuccggaucuuucggacucuggggaccccagaugaggugguguggccaggaguuacuucuaugccugauuacaagccaaguuuccccaagugggcccggcaagauuuuaguaaaguuguaccuccccuggaugaagauggacggagcuuguuaucgcaaaugcugcacuacgacccuuacaagaggauuucggccaaggcagcccuggcucacccuuucuuccaggaugugaccaagccaguaccccaucuucgacucugauagccuucuugaagcccccagcccuaaucucacccucuccuccagugugggcuugaccaggcuuggccuugggcuauuuggacucaggugggcccucugaacuugccuuaaacacucaccuucuagucuuggccagccaacucugggaauacaggggugaaaggggggaaccagugaaaaugaaaggaaguuucaguauuagaugcacuuaaguuagccuccaccacccuuucccccuucucuuaguuauugcugaagaggguugguauaaaaauaauuuuaaaaaagccuuccuacacguuagauuugccguaccaaucucugaaugccccauaauuauuauuuccaguguuugggaugaccaggaucccaagccuccugcugccacaauguuuauaaaggccaaaugauagcgggggcuaaguuggugcuuuugagaaccaaguaaaacaaaaccacugggaggagucuauuuuaaagaauucgguugaaaaaauagauccaaucaguuuauacccuaguuaguguuuugccucaccuaauaggcugggagacugaagacucagcccggguggggcugcagaaaaaugauuggccccaguccccuuguuugucccuucuacaggcaugaggaaucugggaggcccugagacagggauugugcuucauuccaaucuauugcuucaccauggccuuaugaggcaggugagagauguuugaauuuuucucuuccuuuuaguauucuuaguuguucaguugccaaggaucccugaucccauuuuccucugacguccaccuccuaccccauaggaguuagaaguuaggguuuaggcaucauuuugagaaugcugacacuuuuucagggcugugauugagugagggcauggguaaaaauauuucuuuaaaagaaggaugaacaauuauauuuauauuucagguuauauccaauaguagaguuggcuuuuuuuuuuuuuuuuuuggucauaguggguggauuuguugccaugugcaccuugggguuuuguaaugacagugcuaaaaaaaaaaaagcauuuuuuuuuaugauuugucucugucacccuuguccuugagugcucuugcuauuaacguuauuuguaauuuaguuuguagcucauuaaaaaaaugugccuaguuuuauaaaaaaaaaaaaaaaaaaaaaaaaaaaaaaaaaaaaaaa

SEQ ID NO: 64077 - RNA, 19 nt, Artificial Sequence
  Description of Artificial Sequence: Synthetic oligonucleotide
ggaagcagggcggggccuc

SEQ ID NO: 64078 - RNA, 19 nt, Artificial Sequence
  Description of Artificial Sequence: Synthetic oligonucleotide
cugguggcggucgggaacu

SEQ ID NO: 64079 - RNA, 19 nt, Artificial Sequence
  Description of Artificial Sequence: Synthetic oligonucleotide
ucggugggaggcggcaaca

SEQ ID NO: 64080 - RNA, 19 nt, Artificial Sequence
  Description of Artificial Sequence: Synthetic oligonucleotide
auuguuucaaguuggccaa

SEQ ID NO: 64081 - RNA, 19 nt, Artificial Sequence
  Description of Artificial Sequence: Synthetic oligonucleotide
aauugacaagagcgagagg

SEQ ID NO: 64082 - RNA, 19 nt, Artificial Sequence
  Description of Artificial Sequence: Synthetic oligonucleotide
guauacugcguuccauccc

SEQ ID NO: 64083 - RNA, 19 nt, Artificial Sequence
  Description of Artificial Sequence: Synthetic oligonucleotide
cgacccggggccacgguac

SEQ ID NO: 64084 - RNA, 19 nt, Artificial Sequence
  Description of Artificial Sequence: Synthetic oligonucleotide
cugggcccuguuucccccu

SEQ ID NO: 64085 - RNA, 19 nt, Artificial Sequence
  Description of Artificial Sequence: Synthetic oligonucleotide
uccucggcccccgagagcc

SEQ ID NO: 64086 - RNA, 19 nt, Artificial Sequence
  Description of Artificial Sequence: Synthetic oligonucleotide
caggguccgccuucugcag

SEQ ID NO: 64087 - RNA, 19 nt, Artificial Sequence
  Description of Artificial Sequence: Synthetic oligonucleotide
ggguucccaggcccccgcu

SEQ ID NO: 64088 - RNA, 19 nt, Artificial Sequence
  Description of Artificial Sequence: Synthetic oligonucleotide
uccagggccgggcugaccc

SEQ ID NO: 64089 - RNA, 19 nt, Artificial Sequence
  Description of Artificial Sequence: Synthetic oligonucleotide
cgacucgcuggcgcuucau

SEQ ID NO: 64090 - RNA, 19 nt, Artificial Sequence
  Description of Artificial Sequence: Synthetic oligonucleotide
uggagaacuuccaaaaggu

SEQ ID NO: 64091 - RNA, 19 nt, Artificial Sequence
  Description of Artificial Sequence: Synthetic oligonucleotide
uggaaaagaucggagaggg

SEQ ID NO: 64092 - RNA, 19 nt, Artificial Sequence
  Description of Artificial Sequence: Synthetic oligonucleotide
gcacguacggaguugugua

SEQ ID NO: 64093 - RNA, 19 nt, Artificial Sequence
  Description of Artificial Sequence: Synthetic oligonucleotide
acaaagccagaaacaaguu

SEQ ID NO: 64094 - RNA, 19 nt, Artificial Sequence
  Description of Artificial Sequence: Synthetic oligonucleotide
ugacgggagaggugguggc

SEQ ID NO: 64095 - RNA, 19 nt, Artificial Sequence
  Description of Artificial Sequence: Synthetic oligonucleotide
cgcuuaagaaaauccgccu

SEQ ID NO: 64096 - RNA, 19 nt, Artificial Sequence
  Description of Artificial Sequence: Synthetic oligonucleotide
uggacacugagacugaggg

SEQ ID NO: 64097 - RNA, 19 nt, Artificial Sequence
  Description of Artificial Sequence: Synthetic oligonucleotide
gugugcccaguacugccau

SEQ ID NO: 64098 - RNA, 19 nt, Artificial Sequence
  Description of Artificial Sequence: Synthetic oligonucleotide
uccgagagaucucucugcu

SEQ ID NO: 64099 - RNA, 19 nt, Artificial Sequence
  Description of Artificial Sequence: Synthetic oligonucleotide
uuaaggagcuuaaccaucc

SEQ ID NO: 64100 - RNA, 19 nt, Artificial Sequence
  Description of Artificial Sequence: Synthetic oligonucleotide
cuaauauugucaagcugcu

SEQ ID NO: 64101 - RNA, 19 nt, Artificial Sequence
  Description of Artificial Sequence: Synthetic oligonucleotide
uggaugucauucacacaga

SEQ ID NO: 64102 - RNA, 19 nt, Artificial Sequence
  Description of Artificial Sequence: Synthetic oligonucleotide
aaaauaaacucuaccuggu

SEQ ID NO: 64103 - RNA, 19 nt, Artificial Sequence
  Description of Artificial Sequence: Synthetic oligonucleotide
uuuuugaauuucugcacca

SEQ ID NO: 64104 - RNA, 19 nt, Artificial Sequence
  Description of Artificial Sequence: Synthetic oligonucleotide
aagaucucaagaaauucau

SEQ ID NO: 64105 - RNA, 19 nt, Artificial Sequence
  Description of Artificial Sequence: Synthetic oligonucleotide
uggaugccucugcucucac

SEQ ID NO: 64106 - RNA, 19 nt, Artificial Sequence
  Description of Artificial Sequence: Synthetic oligonucleotide
cuggcauuccucuuccccu

SEQ ID NO: 64107 - RNA, 19 nt, Artificial Sequence
  Description of Artificial Sequence: Synthetic oligonucleotide
ucaucaagagcuaucuguu

SEQ ID NO: 64108 - RNA, 19 nt, Artificial Sequence
  Description of Artificial Sequence: Synthetic oligonucleotide
uccagcugcuccagggccu

SEQ ID NO: 64109 - RNA, 19 nt, Artificial Sequence
  Description of Artificial Sequence: Synthetic oligonucleotide
uagcuuucugccauucuca

SEQ ID NO: 64110 - RNA, 19 nt, Artificial Sequence
  Description of Artificial Sequence: Synthetic oligonucleotide
aucggguccuccaccgaga

SEQ ID NO: 64111 - RNA, 19 nt, Artificial Sequence
  Description of Artificial Sequence: Synthetic oligonucleotide
accuuaaaccucagaaucu

SEQ ID NO: 64112 - RNA, 19 nt, Artificial Sequence
  Description of Artificial Sequence: Synthetic oligonucleotide
ugcuuauuaacacagaggg

SEQ ID NO: 64113 - RNA, 19 nt, Artificial Sequence
  Description of Artificial Sequence: Synthetic oligonucleotide
gggccaucaagcuagcaga

SEQ ID NO: 64114 - RNA, 19 nt, Artificial Sequence
  Description of Artificial Sequence: Synthetic oligonucleotide
acuuuggacuagccagagc

SEQ ID NO: 64115 - RNA, 19 nt, Artificial Sequence
  Description of Artificial Sequence: Synthetic oligonucleotide
cuuuuggagucccuguucg

SEQ ID NO: 64116 - RNA, 19 nt, Artificial Sequence
  Description of Artificial Sequence: Synthetic oligonucleotide
guacuuacacccaugaggu

SEQ ID NO: 64117 - RNA, 19 nt, Artificial Sequence
  Description of Artificial Sequence: Synthetic oligonucleotide
uggugacccugugguaccg

SEQ ID NO: 64118 - RNA, 19 nt, Artificial Sequence
  Description of Artificial Sequence: Synthetic oligonucleotide
gagcuccugaaauccuccu

SEQ ID NO: 64119 - RNA, 19 nt, Artificial Sequence
  Description of Artificial Sequence: Synthetic oligonucleotide
ugggcugcaaauauuauuc

SEQ ID NO: 64120 - RNA, 19 nt, Artificial Sequence
  Description of Artificial Sequence: Synthetic oligonucleotide
ccacagcuguggacaucug

SEQ ID NO: 64121 - RNA, 19 nt, Artificial Sequence
  Description of Artificial Sequence: Synthetic oligonucleotide
ggagccugggcugcaucuu

SEQ ID NO: 64122 - RNA, 19 nt, Artificial Sequence
  Description of Artificial Sequence: Synthetic oligonucleotide
uugcugagauggugacucg

SEQ ID NO: 64123 - RNA, 19 nt, Artificial Sequence
  Description of Artificial Sequence: Synthetic oligonucleotide
gccgggcccuauucccugg

SEQ ID NO: 64124 - RNA, 19 nt, Artificial Sequence
  Description of Artificial Sequence: Synthetic oligonucleotide
gagauucugagauugacca

SEQ ID NO: 64125 - RNA, 19 nt, Artificial Sequence
  Description of Artificial Sequence: Synthetic oligonucleotide
agcucuuccggaucuuucg

SEQ ID NO: 64126 - RNA, 19 nt, Artificial Sequence
  Description of Artificial Sequence: Synthetic oligonucleotide
ggacucuggggaccccaga

SEQ ID NO: 64127 - RNA, 19 nt, Artificial Sequence
  Description of Artificial Sequence: Synthetic oligonucleotide
augaggugguguggccagg

SEQ ID NO: 64128 - RNA, 19 nt, Artificial Sequence
  Description of Artificial Sequence: Synthetic oligonucleotide
gaguuacuucuaugccuga

SEQ ID NO: 64129 - RNA, 19 nt, Artificial Sequence
  Description of Artificial Sequence: Synthetic oligonucleotide
auuacaagccaaguuuccc

SEQ ID NO: 64130 - RNA, 19 nt, Artificial Sequence
  Description of Artificial Sequence: Synthetic oligonucleotide
ccaagugggcccggcaaga

SEQ ID NO: 64131 - RNA, 19 nt, Artificial Sequence
  Description of Artificial Sequence: Synthetic oligonucleotide
auuuuaguaaaguuguacc

SEQ ID NO: 64132 - RNA, 19 nt, Artificial Sequence
  Description of Artificial Sequence: Synthetic oligonucleotide
cuccccuggaugaagaugg

SEQ ID NO: 64133 - RNA, 19 nt, Artificial Sequence
  Description of Artificial Sequence: Synthetic oligonucleotide
gacggagcuuguuaucgca

SEQ ID NO: 64134 - RNA, 19 nt, Artificial Sequence
  Description of Artificial Sequence: Synthetic oligonucleotide
aaaugcugcacuacgaccc

SEQ ID NO: 64135 - RNA, 19 nt, Artificial Sequence
  Description of Artificial Sequence: Synthetic oligonucleotide
cuaacaagcggauuucggc

SEQ ID NO: 64136 - RNA, 19 nt, Artificial Sequence
  Description of Artificial Sequence: Synthetic oligonucleotide
ccaaggcagcccuggcuca

SEQ ID NO: 64137 - RNA, 19 nt, Artificial Sequence
  Description of Artificial Sequence: Synthetic oligonucleotide
acccuuucuuccaggaugu

SEQ ID NO: 64138 - RNA, 19 nt, Artificial Sequence
  Description of Artificial Sequence: Synthetic oligonucleotide
ugaccaagccaguacccca

SEQ ID NO: 64139 - RNA, 19 nt, Artificial Sequence
  Description of Artificial Sequence: Synthetic oligonucleotide
aucuucgacucugauagcc

SEQ ID NO: 64140 - RNA, 19 nt, Artificial Sequence
  Description of Artificial Sequence: Synthetic oligonucleotide
cuucuugaagcccccagcc

SEQ ID NO: 64141 - RNA, 19 nt, Artificial Sequence
  Description of Artificial Sequence: Synthetic oligonucleotide
ccuaaucucacccucuccu

SEQ ID NO: 64142 - RNA, 19 nt, Artificial Sequence
  Description of Artificial Sequence: Synthetic oligonucleotide
uccagugugggcuugacca

SEQ ID NO: 64143 - RNA, 19 nt, Artificial Sequence
  Description of Artificial Sequence: Synthetic oligonucleotide
aggcuuggccuugggcuau

SEQ ID NO: 64144 - RNA, 19 nt, Artificial Sequence
  Description of Artificial Sequence: Synthetic oligonucleotide
uuuggacucaggugggccc

SEQ ID NO: 64145 - RNA, 19 nt, Artificial Sequence
  Description of Artificial Sequence: Synthetic oligonucleotide
cucugaacuugccuuaaac

SEQ ID NO: 64146 - RNA, 19 nt, Artificial Sequence
  Description of Artificial Sequence: Synthetic oligonucleotide
cacucaccuucuagucuug

SEQ ID NO: 64147 - RNA, 19 nt, Artificial Sequence
  Description of Artificial Sequence: Synthetic oligonucleotide
ggccagccaacucugggaa

SEQ ID NO: 64148 - RNA, 19 nt, Artificial Sequence
  Description of Artificial Sequence: Synthetic oligonucleotide
auacaggggugaaaggggg

SEQ ID NO: 64149 - RNA, 19 nt, Artificial Sequence
  Description of Artificial Sequence: Synthetic oligonucleotide
ggaaccagugaaaaugaaa

SEQ ID NO: 64150 - RNA, 19 nt, Artificial Sequence
  Description of Artificial Sequence: Synthetic oligonucleotide
aggaaguuucaguauuaga

SEQ ID NO: 64151 - RNA, 19 nt, Artificial Sequence
  Description of Artificial Sequence: Synthetic oligonucleotide
augcacuuaaguuagccuc

SEQ ID NO: 64152 - RNA, 19 nt, Artificial Sequence
  Description of Artificial Sequence: Synthetic oligonucleotide
ccaccacccuuucccccuu

SEQ ID NO: 64153 - RNA, 19 nt, Artificial Sequence
  Description of Artificial Sequence: Synthetic oligonucleotide
ucucuuaguuauugcugaa

SEQ ID NO: 64154 - RNA, 19 nt, Artificial Sequence
  Description of Artificial Sequence: Synthetic oligonucleotide
agaggguugguauaaaaau

SEQ ID NO: 64155 - RNA, 19 nt, Artificial Sequence
  Description of Artificial Sequence: Synthetic oligonucleotide
uaauuuuaaaaaagccuuc

SEQ ID NO: 64156 - RNA, 19 nt, Artificial Sequence
  Description of Artificial Sequence: Synthetic oligonucleotide
ccuacacguuagauuugcc

SEQ ID NO: 64157 - RNA, 19 nt, Artificial Sequence
  Description of Artificial Sequence: Synthetic oligonucleotide
cguaccaaucucugaaugc

SEQ ID NO: 64158 - RNA, 19 nt, Artificial Sequence
  Description of Artificial Sequence: Synthetic oligonucleotide
ccccauaauuauuauuucc

SEQ ID NO: 64159 - RNA, 19 nt, Artificial Sequence
  Description of Artificial Sequence: Synthetic oligonucleotide
caguguuugggaugaccag

SEQ ID NO: 64160 - RNA, 19 nt, Artificial Sequence
  Description of Artificial Sequence: Synthetic oligonucleotide
ggaucccaagccuccugcu

SEQ ID NO: 64161 - RNA, 19 nt, Artificial Sequence
  Description of Artificial Sequence: Synthetic oligonucleotide
ugccacaauguuuauaaag

SEQ ID NO: 64162 - RNA, 19 nt, Artificial Sequence
  Description of Artificial Sequence: Synthetic oligonucleotide
ggccaaaugauagcggggg

SEQ ID NO: 64163 - RNA, 19 nt, Artificial Sequence
  Description of Artificial Sequence: Synthetic oligonucleotide
gcuaaguuggugcuuuuga

SEQ ID NO: 64164 - RNA, 19 nt, Artificial Sequence
  Description of Artificial Sequence: Synthetic oligonucleotide
agaaccaaguaaaacaaaa

SEQ ID NO: 64165 - RNA, 19 nt, Artificial Sequence
  Description of Artificial Sequence: Synthetic oligonucleotide
accacugggaggagucuau

SEQ ID NO: 64166 - RNA, 19 nt, Artificial Sequence
  Description of Artificial Sequence: Synthetic oligonucleotide
uuuuaaagaauucgguuga

SEQ ID NO: 64167 - RNA, 19 nt, Artificial Sequence
  Description of Artificial Sequence: Synthetic oligonucleotide
aaaaaauagauccaaucag

SEQ ID NO: 64168 - RNA, 19 nt, Artificial Sequence
  Description of Artificial Sequence: Synthetic oligonucleotide
guuuauacccuaguuagug

SEQ ID NO: 64169 - RNA, 19 nt, Artificial Sequence
  Description of Artificial Sequence: Synthetic oligonucleotide
guuuugccucaccuaauag

SEQ ID NO: 64170 - RNA, 19 nt, Artificial Sequence
  Description of Artificial Sequence: Synthetic oligonucleotide
ggcugggagacugaagacu

SEQ ID NO: 64171 - RNA, 19 nt, Artificial Sequence
  Description of Artificial Sequence: Synthetic oligonucleotide
ucagcccggguggggcugc

SEQ ID NO: 64172 - RNA, 19 nt, Artificial Sequence
  Description of Artificial Sequence: Synthetic oligonucleotide
cagaaaaaugauuggcccc

SEQ ID NO: 64173 - RNA, 19 nt, Artificial Sequence
  Description of Artificial Sequence: Synthetic oligonucleotide
caguccccuuguuuguccc

SEQ ID NO: 64174 - RNA, 19 nt, Artificial Sequence
  Description of Artificial Sequence: Synthetic oligonucleotide
cuucuacaggcaugaggaa

SEQ ID NO: 64175 - RNA, 19 nt, Artificial Sequence
  Description of Artificial Sequence: Synthetic oligonucleotide
aucugggaggcccugagac

SEQ ID NO: 64176 - RNA, 19 nt, Artificial Sequence
  Description of Artificial Sequence: Synthetic oligonucleotide
cagggauugugcuucauuc

SEQ ID NO: 64177 - RNA, 19 nt, Artificial Sequence
  Description of Artificial Sequence: Synthetic oligonucleotide
ccaaucuauugcuucacca

SEQ ID NO: 64178 - RNA, 19 nt, Artificial Sequence
  Description of Artificial Sequence: Synthetic oligonucleotide
auggccuuaugaggcaggu

SEQ ID NO: 64179 - RNA, 19 nt, Artificial Sequence
  Description of Artificial Sequence: Synthetic oligonucleotide
ugagagauguuugaauuuu

SEQ ID NO: 64180 - RNA, 19 nt, Artificial Sequence
  Description of Artificial Sequence: Synthetic oligonucleotide
uucucuuccuuuuaguauu

SEQ ID NO: 64181 - RNA, 19 nt, Artificial Sequence
  Description of Artificial Sequence: Synthetic oligonucleotide
ucuuaguuguucaguugcc

SEQ ID NO: 64182 - RNA, 19 nt, Artificial Sequence
  Description of Artificial Sequence: Synthetic oligonucleotide
caaggaucccugaucccau

SEQ ID NO: 64183 - RNA, 19 nt, Artificial Sequence
  Description of Artificial Sequence: Synthetic oligonucleotide
uuuuccucugacguccacc

SEQ ID NO: 64184 - RNA, 19 nt, Artificial Sequence
  Description of Artificial Sequence: Synthetic oligonucleotide
cuccuaccccauaggaguu

SEQ ID NO: 64185 - RNA, 19 nt, Artificial Sequence
  Description of Artificial Sequence: Synthetic oligonucleotide
uagaaguuaggguuuaggc

SEQ ID NO: 64186 - RNA, 19 nt, Artificial Sequence
  Description of Artificial Sequence: Synthetic oligonucleotide
caucauuuugagaaugcug

SEQ ID NO: 64187 - RNA, 19 nt, Artificial Sequence
  Description of Artificial Sequence: Synthetic oligonucleotide
gacacuuuuucagggcugu

SEQ ID NO: 64188 - RNA, 19 nt, Artificial Sequence
  Description of Artificial Sequence: Synthetic oligonucleotide
ugauugagugagggcaugg

SEQ ID NO: 64189 - RNA, 19 nt, Artificial Sequence
  Description of Artificial Sequence: Synthetic oligonucleotide
gguaaaaauauuucuuuaa

SEQ ID NO: 64190 - RNA, 19 nt, Artificial Sequence
  Description of Artificial Sequence: Synthetic oligonucleotide
aaagaaggaugaacaauua

SEQ ID NO: 64191 - RNA, 19 nt, Artificial Sequence
  Description of Artificial Sequence: Synthetic oligonucleotide
auauuuauauuucagguua

SEQ ID NO: 64192 - RNA, 19 nt, Artificial Sequence
  Description of Artificial Sequence: Synthetic oligonucleotide
auauccaauaguagaguug

SEQ ID NO: 64193 - RNA, 19 nt, Artificial Sequence
  Description of Artificial Sequence: Synthetic oligonucleotide
uuuggucauagugggugga

SEQ ID NO: 64194 - RNA, 19 nt, Artificial Sequence
  Description of Artificial Sequence: Synthetic oligonucleotide
auuuguugccaugugcacc

SEQ ID NO: 64195 - RNA, 19 nt, Artificial Sequence
  Description of Artificial Sequence: Synthetic oligonucleotide
cuugggguuuuguaaugac

SEQ ID NO: 64196 - RNA, 19 nt, Artificial Sequence
  Description of Artificial Sequence: Synthetic oligonucleotide
agcauuuuuuuuuaugauu

SEQ ID NO: 64197 - RNA, 19 nt, Artificial Sequence
  Description of Artificial Sequence: Synthetic oligonucleotide
uugucucugucacccuugu

SEQ ID NO: 64198 - RNA, 19 nt, Artificial Sequence
  Description of Artificial Sequence: Synthetic oligonucleotide
uccuugagugcucuugcua

SEQ ID NO: 64199 - RNA, 19 nt, Artificial Sequence
  Description of Artificial Sequence: Synthetic oligonucleotide
auuaacguuauuuguaauu

SEQ ID NO: 64200 - RNA, 19 nt, Artificial Sequence
  Description of Artificial Sequence: Synthetic oligonucleotide
uuaguuuguagcucauuaa

SEQ ID NO: 64201 - RNA, 19 nt, Artificial Sequence
  Description of Artificial Sequence: Synthetic oligonucleotide
aaaaaaugugccuaguuuu

SEQ ID NO: 64202 - RNA, 19 nt, Artificial Sequence
  Description of Artificial Sequence: Synthetic oligonucleotide
ugacucgccgggcccuauu

SEQ ID NO: 64203 - RNA, 19 nt, Artificial Sequence
  Description of Artificial Sequence: Synthetic oligonucleotide
ucccuggagauucugagau

SEQ ID NO: 64204 - RNA, 19 nt, Artificial Sequence
  Description of Artificial Sequence: Synthetic oligonucleotide
uugaccagcucuuccggau

SEQ ID NO: 64205 - RNA, 19 nt, Artificial Sequence
  Description of Artificial Sequence: Synthetic oligonucleotide
ucuuucggacucuggggac

SEQ ID NO: 64206 - RNA, 19 nt, Artificial Sequence
  Description of Artificial Sequence: Synthetic oligonucleotide
ccccagaugagguggugug

SEQ ID NO: 64207 - RNA, 19 nt, Artificial Sequence
  Description of Artificial Sequence: Synthetic oligonucleotide
ggccaggaguuacuucuau

SEQ ID NO: 64208 - RNA, 19 nt, Artificial Sequence
  Description of Artificial Sequence: Synthetic oligonucleotide
ugccugauuacaagccaag

SEQ ID NO: 64209 - RNA, 19 nt, Artificial Sequence
  Description of Artificial Sequence: Synthetic oligonucleotide
guuuccccaagugggcccg

SEQ ID NO: 64210 - RNA, 19 nt, Artificial Sequence
  Description of Artificial Sequence: Synthetic oligonucleotide
ggcaagauuuuaguaaagu

SEQ ID NO: 64211 - RNA, 19 nt, Artificial Sequence
  Description of Artificial Sequence: Synthetic oligonucleotide
uuguaccuccccuggauga

SEQ ID NO: 64212 - RNA, 19 nt, Artificial Sequence
  Description of Artificial Sequence: Synthetic oligonucleotide
aagauggacggagcuuguu

SEQ ID NO: 64213 - RNA, 19 nt, Artificial Sequence
  Description of Artificial Sequence: Synthetic oligonucleotide
uaucgcaaaugcugcacua

SEQ ID NO: 64214 - RNA, 19 nt, Artificial Sequence
  Description of Artificial Sequence: Synthetic oligonucleotide
acgacccuuacaagaggau

SEQ ID NO: 64215 - RNA, 19 nt, Artificial Sequence
  Description of Artificial Sequence: Synthetic oligonucleotide
uuucggccaaggcagcccu

SEQ ID NO: 64216 - RNA, 19 nt, Artificial Sequence
  Description of Artificial Sequence: Synthetic oligonucleotide
uggcucacccuuucuucca

SEQ ID NO: 64217 - RNA, 19 nt, Artificial Sequence
  Description of Artificial Sequence: Synthetic oligonucleotide
aggaugugaccaagccagu

SEQ ID NO: 64218 - RNA, 19 nt, Artificial Sequence
  Description of Artificial Sequence: Synthetic oligonucleotide
uaccccaucuucgacucug

SEQ ID NO: 64219 - RNA, 19 nt, Artificial Sequence
  Description of Artificial Sequence: Synthetic oligonucleotide
gauagccuucuugaagccc

SEQ ID NO: 64220 - RNA, 19 nt, Artificial Sequence
  Description of Artificial Sequence: Synthetic oligonucleotide
cccagcccuaaucucaccc

SEQ ID NO: 64221 - RNA, 19 nt, Artificial Sequence
  Description of Artificial Sequence: Synthetic oligonucleotide
cucuccuccagugugggcu

SEQ ID NO: 64222 - RNA, 19 nt, Artificial Sequence
  Description of Artificial Sequence: Synthetic oligonucleotide
uugaccaggcuuggccuug

SEQ ID NO: 64223 - RNA, 19 nt, Artificial Sequence
  Description of Artificial Sequence: Synthetic oligonucleotide
gggcuauuuggacucaggu

SEQ ID NO: 64224 - RNA, 19 nt, Artificial Sequence
  Description of Artificial Sequence: Synthetic oligonucleotide
ugggcccucugaacuugcc

SEQ ID NO: 64225 - RNA, 19 nt, Artificial Sequence
  Description of Artificial Sequence: Synthetic oligonucleotide
cuuaaacacucaccuucua

SEQ ID NO: 64226 - RNA, 19 nt, Artificial Sequence
  Description of Artificial Sequence: Synthetic oligonucleotide
agucuuggccagccaacuc

SEQ ID NO: 64227 - RNA, 19 nt, Artificial Sequence
  Description of Artificial Sequence: Synthetic oligonucleotide
cugggaauacaggggugaa

SEQ ID NO: 64228 - RNA, 19 nt, Artificial Sequence
  Description of Artificial Sequence: Synthetic oligonucleotide
aaggggggaaccagugaaa

SEQ ID NO: 64229 - RNA, 19 nt, Artificial Sequence
  Description of Artificial Sequence: Synthetic oligonucleotide
aaugaaaggaaguuucagu

SEQ ID NO: 64230 - RNA, 19 nt, Artificial Sequence
  Description of Artificial Sequence: Synthetic oligonucleotide
uauuagaugcacuuaaguu

SEQ ID NO: 64231 - RNA, 19 nt, Artificial Sequence
  Description of Artificial Sequence: Synthetic oligonucleotide
uagccuccaccacccuuuc

SEQ ID NO: 64232 - RNA, 19 nt, Artificial Sequence
  Description of Artificial Sequence: Synthetic oligonucleotide
cccccuucucuuaguuauu

SEQ ID NO: 64233 - RNA, 19 nt, Artificial Sequence
  Description of Artificial Sequence: Synthetic oligonucleotide
ugcugaagaggguugguau

SEQ ID NO: 64234 - RNA, 19 nt, Artificial Sequence
  Description of Artificial Sequence: Synthetic oligonucleotide
uaaaaauaauuuuaaaaaa

SEQ ID NO: 64235 - RNA, 19 nt, Artificial Sequence
  Description of Artificial Sequence: Synthetic oligonucleotide
agccuuccuacacguuaga

SEQ ID NO: 64236 - RNA, 19 nt, Artificial Sequence
  Description of Artificial Sequence: Synthetic oligonucleotide
auuugccguaccaaucucu

SEQ ID NO: 64237 - RNA, 19 nt, Artificial Sequence
  Description of Artificial Sequence: Synthetic oligonucleotide
ugaaugccccauaauuauu

SEQ ID NO: 64238 - RNA, 19 nt, Artificial Sequence
  Description of Artificial Sequence: Synthetic oligonucleotide
uauuuccaguguuugggau

SEQ ID NO: 64239 - RNA, 19 nt, Artificial Sequence
  Description of Artificial Sequence: Synthetic oligonucleotide
ugaccaggaucccaagccu

SEQ ID NO: 64240 - RNA, 19 nt, Artificial Sequence
  Description of Artificial Sequence: Synthetic oligonucleotide
uccugcugccacaauguuu

SEQ ID NO: 64241 - RNA, 19 nt, Artificial Sequence
  Description of Artificial Sequence: Synthetic oligonucleotide
uauaaaggccaaaugauag

SEQ ID NO: 64242 - RNA, 19 nt, Artificial Sequence
  Description of Artificial Sequence: Synthetic oligonucleotide
gcgggggcuaaguuggugc

SEQ ID NO: 64243 - RNA, 19 nt, Artificial Sequence
  Description of Artificial Sequence: Synthetic oligonucleotide
cuuuugagaaccaaguaaa

SEQ ID NO: 64244 - RNA, 19 nt, Artificial Sequence
  Description of Artificial Sequence: Synthetic oligonucleotide
aacaaaaccacugggagga

SEQ ID NO: 64245 - RNA, 19 nt, Artificial Sequence
  Description of Artificial Sequence: Synthetic oligonucleotide
agucuauuuuaaagaauuc

SEQ ID NO: 64246 - RNA, 19 nt, Artificial Sequence
  Description of Artificial Sequence: Synthetic oligonucleotide
cgguugaaaaaauagaucc

SEQ ID NO: 64247 - RNA, 19 nt, Artificial Sequence
  Description of Artificial Sequence: Synthetic oligonucleotide
caaucaguuuauacccuag

SEQ ID NO: 64248 - RNA, 19 nt, Artificial Sequence
  Description of Artificial Sequence: Synthetic oligonucleotide
guuaguguuuugccucacc

SEQ ID NO: 64249 - RNA, 19 nt, Artificial Sequence
  Description of Artificial Sequence: Synthetic oligonucleotide
cuaauaggcugggagacug

SEQ ID NO: 64250 - RNA, 19 nt, Artificial Sequence
  Description of Artificial Sequence: Synthetic oligonucleotide
gaagacucagcccgggugg

SEQ ID NO: 64251 - RNA, 19 nt, Artificial Sequence
  Description of Artificial Sequence: Synthetic oligonucleotide
gggcugcagaaaaaugauu

SEQ ID NO: 64252 - RNA, 19 nt, Artificial Sequence
  Description of Artificial Sequence: Synthetic oligonucleotide
uggccccaguccccuuguu

SEQ ID NO: 64253 - RNA, 19 nt, Artificial Sequence
  Description of Artificial Sequence: Synthetic oligonucleotide
uugucccuucuacaggcau

SEQ ID NO: 64254 - RNA, 19 nt, Artificial Sequence
  Description of Artificial Sequence: Synthetic oligonucleotide
ugaggaaucugggaggccc

SEQ ID NO: 64255 - RNA, 19 nt, Artificial Sequence
  Description of Artificial Sequence: Synthetic oligonucleotide
cugagacagggauugugcu

SEQ ID NO: 64256 - RNA, 19 nt, Artificial Sequence
  Description of Artificial Sequence: Synthetic oligonucleotide
uucauuccaaucuauugcu

SEQ ID NO: 64257 - RNA, 19 nt, Artificial Sequence
  Description of Artificial Sequence: Synthetic oligonucleotide
uucaccauggccuuaugag

SEQ ID NO: 64258 - RNA, 19 nt, Artificial Sequence
  Description of Artificial Sequence: Synthetic oligonucleotide
ggcaggugagagauguuug

SEQ ID NO: 64259 - RNA, 19 nt, Artificial Sequence
  Description of Artificial Sequence: Synthetic oligonucleotide
gaauuuuucucuuccuuuu

SEQ ID NO: 64260 - RNA, 19 nt, Artificial Sequence
  Description of Artificial Sequence: Synthetic oligonucleotide
uaguauucuuaguuguuca

SEQ ID NO: 64261 - RNA, 19 nt, Artificial Sequence
  Description of Artificial Sequence: Synthetic oligonucleotide
aguugccaaggaucccuga

SEQ ID NO: 64262 - RNA, 19 nt, Artificial Sequence
  Description of Artificial Sequence: Synthetic oligonucleotide
aucccauuuuccucugacg

SEQ ID NO: 64263 - RNA, 19 nt, Artificial Sequence
  Description of Artificial Sequence: Synthetic oligonucleotide
guccaccuccuaccccaua

SEQ ID NO: 64264 - RNA, 19 nt, Artificial Sequence
  Description of Artificial Sequence: Synthetic oligonucleotide
aggaguuagaaguuagggu

SEQ ID NO: 64265 - RNA, 19 nt, Artificial Sequence
  Description of Artificial Sequence: Synthetic oligonucleotide
uuuaggcaucauuuugaga

SEQ ID NO: 64266 - RNA, 19 nt, Artificial Sequence
  Description of Artificial Sequence: Synthetic oligonucleotide
aaugcugacacuuuuucag

SEQ ID NO: 64267 - RNA, 19 nt, Artificial Sequence
  Description of Artificial Sequence: Synthetic oligonucleotide
gggcugugauugagugagg

SEQ ID NO: 64268 - RNA, 19 nt, Artificial Sequence
  Description of Artificial Sequence: Synthetic oligonucleotide
ggcauggguaaaaauauuu

SEQ ID NO: 64269 - RNA, 19 nt, Artificial Sequence
  Description of Artificial Sequence: Synthetic oligonucleotide
ucuuuaaaagaaggaugaa

SEQ ID NO: 64270 - RNA, 19 nt, Artificial Sequence
  Description of Artificial Sequence: Synthetic oligonucleotide
acaauuauauuuauauuuc

SEQ ID NO: 64271 - RNA, 19 nt, Artificial Sequence
  Description of Artificial Sequence: Synthetic oligonucleotide
cagguuauauccaauagua

SEQ ID NO: 64272 - RNA, 19 nt, Artificial Sequence
  Description of Artificial Sequence: Synthetic oligonucleotide
uuuuuuuuuggucauagug

SEQ ID NO: 64273 - RNA, 19 nt, Artificial Sequence
  Description of Artificial Sequence: Synthetic oligonucleotide
ggguggauuuguugccaug

SEQ ID NO: 64274 - RNA, 19 nt, Artificial Sequence
  Description of Artificial Sequence: Synthetic oligonucleotide
gugcaccuugggguuuugu

SEQ ID NO: 64275 - RNA, 19 nt, Artificial Sequence
  Description of Artificial Sequence: Synthetic oligonucleotide
uaaugacagugcuaaaaaa

SEQ ID NO: 64276 - RNA, 19 nt, Artificial Sequence
  Description of Artificial Sequence: Synthetic oligonucleotide
aaaaaaagcauuuuuuuuu

SEQ ID NO: 64277 - RNA, 19 nt, Artificial Sequence
  Description of Artificial Sequence: Synthetic oligonucleotide
uaugauuugucucugucac

SEQ ID NO: 64278 - RNA, 19 nt, Artificial Sequence
  Description of Artificial Sequence: Synthetic oligonucleotide
cccuuguccuugagugcuc

SEQ ID NO: 64279 - RNA, 19 nt, Artificial Sequence
  Description of Artificial Sequence: Synthetic oligonucleotide
cuugcuauuaacguuauuu

SEQ ID NO: 64280 - RNA, 19 nt, Artificial Sequence
  Description of Artificial Sequence: Synthetic oligonucleotide
uguaauuuaguuuguagcu

SEQ ID NO: 64281 - RNA, 19 nt, Artificial Sequence
  Description of Artificial Sequence: Synthetic oligonucleotide
ucauuaaaaaaaugugccu

SEQ ID NO: 64282 - RNA, 25 nt, Artificial Sequence
  Description of Artificial Sequence: Synthetic oligonucleotide
ggaagcagggcggggccucuggugg

SEQ ID NO: 64283 - RNA, 25 nt, Artificial Sequence
  Description of Artificial Sequence: Synthetic oligonucleotide
gcggucgggaacucggugggaggcg

SEQ ID NO: 64284 - RNA, 25 nt, Artificial Sequence
  Description of Artificial Sequence: Synthetic oligonucleotide
ggcaacauuguuucaaguuggccaa

SEQ ID NO: 64285 - RNA, 25 nt, Artificial Sequence
  Description of Artificial Sequence: Synthetic oligonucleotide
aauugacaagagcgagagguauacu

SEQ ID NO: 64286 - RNA, 25 nt, Artificial Sequence
  Description of Artificial Sequence: Synthetic oligonucleotide
ugcguuccaucccgacccggggcca

SEQ ID NO: 64287 - RNA, 25 nt, Artificial Sequence
  Description of Artificial Sequence: Synthetic oligonucleotide
acgguacugggcccuguuucccccu

SEQ ID NO: 64288 - RNA, 25 nt, Artificial Sequence
  Description of Artificial Sequence: Synthetic oligonucleotide
uccucggcccccgagagccaggguc

SEQ ID NO: 64289 - RNA, 25 nt, Artificial Sequence
  Description of Artificial Sequence: Synthetic oligonucleotide
ccgccuucugcaggguucccaggcc

SEQ ID NO: 64290 - RNA, 25 nt, Artificial Sequence
  Description of Artificial Sequence: Synthetic oligonucleotide
ccccgcuccagggccgggcugaccc

SEQ ID NO: 64291 - RNA, 25 nt, Artificial Sequence
  Description of Artificial Sequence: Synthetic oligonucleotide
cgacucgcuggcgcuucauggagaa

SEQ ID NO: 64292 - RNA, 25 nt, Artificial Sequence
  Description of Artificial Sequence: Synthetic oligonucleotide
acuuccaaaagguggaaaagaucgg

SEQ ID NO: 64293 - RNA, 25 nt, Artificial Sequence
  Description of Artificial Sequence: Synthetic oligonucleotide
gagagggcacguacggaguugugua

SEQ ID NO: 64294 - RNA, 25 nt, Artificial Sequence
  Description of Artificial Sequence: Synthetic oligonucleotide
acaaagccagaaacaaguugacggg

SEQ ID NO: 64295 - RNA, 25 nt, Artificial Sequence
  Description of Artificial Sequence: Synthetic oligonucleotide
gagaggugguggcgcuuaagaaaau

SEQ ID NO: 64296 - RNA, 25 nt, Artificial Sequence
  Description of Artificial Sequence: Synthetic oligonucleotide
uccgccuggacacugagacugaggg

SEQ ID NO: 64297 - RNA, 25 nt, Artificial Sequence
  Description of Artificial Sequence: Synthetic oligonucleotide
gugugcccaguacugccauccgaga

SEQ ID NO: 64298 - RNA, 25 nt, Artificial Sequence
  Description of Artificial Sequence: Synthetic oligonucleotide
agaucucucugcuuaaggagcuuaa

SEQ ID NO: 64299 - RNA, 25 nt, Artificial Sequence
  Description of Artificial Sequence: Synthetic oligonucleotide
accauccuaauauugucaagcugcu

SEQ ID NO: 64300 - RNA, 25 nt, Artificial Sequence
  Description of Artificial Sequence: Synthetic oligonucleotide
uggaugucauucacacagaaaauaa

SEQ ID NO: 64301 - RNA, 25 nt, Artificial Sequence
  Description of Artificial Sequence: Synthetic oligonucleotide
aacucuaccugguuuuugaauuucu

SEQ ID NO: 64302 - RNA, 25 nt, Artificial Sequence
  Description of Artificial Sequence: Synthetic oligonucleotide
ugcaccaagaucucaagaaauucau

SEQ ID NO: 64303 - RNA, 25 nt, Artificial Sequence
  Description of Artificial Sequence: Synthetic oligonucleotide
uggaugccucugcucucacuggcau

SEQ ID NO: 64304 - RNA, 25 nt, Artificial Sequence
  Description of Artificial Sequence: Synthetic oligonucleotide
uuccucuuccccucaucaagagcua

SEQ ID NO: 64305 - RNA, 25 nt, Artificial Sequence
  Description of Artificial Sequence: Synthetic oligonucleotide
aucuguuccagcugcuccagggccu

SEQ ID NO: 64306 - RNA, 25 nt, Artificial Sequence
  Description of Artificial Sequence: Synthetic oligonucleotide
uagcuuucugccauucucaucgggu

SEQ ID NO: 64307 - RNA, 25 nt, Artificial Sequence
  Description of Artificial Sequence: Synthetic oligonucleotide
uccuccaccgagaccuuaaaccuca

SEQ ID NO: 64308 - RNA, 25 nt, Artificial Sequence
  Description of Artificial Sequence: Synthetic oligonucleotide
agaaucugcuuauuaacacagaggg

SEQ ID NO: 64309 - RNA, 25 nt, Artificial Sequence
  Description of Artificial Sequence: Synthetic oligonucleotide
gggccaucaagcuagcagacuuugg

SEQ ID NO: 64310 - RNA, 25 nt, Artificial Sequence
  Description of Artificial Sequence: Synthetic oligonucleotide
gacuagccagagcuuuuggaguccc

SEQ ID NO: 64311 - RNA, 25 nt, Artificial Sequence
  Description of Artificial Sequence: Synthetic oligonucleotide
cuguucguacuuacacccaugaggu

SEQ ID NO: 64312 - RNA, 25 nt, Artificial Sequence
  Description of Artificial Sequence: Synthetic oligonucleotide
uggugacccugugguaccgagcucc

SEQ ID NO: 64313 - RNA, 25 nt, Artificial Sequence
  Description of Artificial Sequence: Synthetic oligonucleotide
cugaaauccuccugggcugcaaaua

SEQ ID NO: 64314 - RNA, 25 nt, Artificial Sequence
  Description of Artificial Sequence: Synthetic oligonucleotide
auuauuccacagcuguggacaucug

SEQ ID NO: 64315 - RNA, 25 nt, Artificial Sequence
  Description of Artificial Sequence: Synthetic oligonucleotide
ggagccugggcugcaucuuugcuga

SEQ ID NO: 64316 - RNA, 25 nt, Artificial Sequence
  Description of Artificial Sequence: Synthetic oligonucleotide
agauggugacucgccgggcccuauu

SEQ ID NO: 64317 - RNA, 25 nt, Artificial Sequence
  Description of Artificial Sequence: Synthetic oligonucleotide
ucccuggagauucugagauugacca

SEQ ID NO: 64318 - RNA, 25 nt, Artificial Sequence
  Description of Artificial Sequence: Synthetic oligonucleotide
agcucuuccggaucuuucggacucu

SEQ ID NO: 64319 - RNA, 25 nt, Artificial Sequence
  Description of Artificial Sequence: Synthetic oligonucleotide
uggggaccccagaugagguggugug

SEQ ID NO: 64320 - RNA, 25 nt, Artificial Sequence
  Description of Artificial Sequence: Synthetic oligonucleotide
ggccaggaguuacuucuaugccuga

SEQ ID NO: 64321 - RNA, 25 nt, Artificial Sequence
  Description of Artificial Sequence: Synthetic oligonucleotide
auuacaagccaaguuuccccaagug

SEQ ID NO: 64322 - RNA, 25 nt, Artificial Sequence
  Description of Artificial Sequence: Synthetic oligonucleotide
gggcccggcaagauuuuaguaaagu

SEQ ID NO: 64323 - RNA, 25 nt, Artificial Sequence
  Description of Artificial Sequence: Synthetic oligonucleotide
uuguaccuccccuggaugaagaugg

SEQ ID NO: 64324 - RNA, 25 nt, Artificial Sequence
  Description of Artificial Sequence: Synthetic oligonucleotide
gacggagcuuguuaucgcaaaugcu

SEQ ID NO: 64325 - RNA, 25 nt, Artificial Sequence
  Description of Artificial Sequence: Synthetic oligonucleotide
ugcacuacgacccuaacaagcggau

SEQ ID NO: 64326 - RNA, 25 nt, Artificial Sequence
  Description of Artificial Sequence: Synthetic oligonucleotide
uuucggccaaggcagcccuggcuca

SEQ ID NO: 64327 - RNA, 25 nt, Artificial Sequence
  Description of Artificial Sequence: Synthetic oligonucleotide
acccuuucuuccaggaugugaccaa

SEQ ID NO: 64328 - RNA, 25 nt, Artificial Sequence
  Description of Artificial Sequence: Synthetic oligonucleotide
agccaguaccccaucuucgacucug

SEQ ID NO: 64329 - RNA, 25 nt, Artificial Sequence
  Description of Artificial Sequence: Synthetic oligonucleotide
gauagccuucuugaagcccccagcc

SEQ ID NO: 64330 - RNA, 25 nt, Artificial Sequence
  Description of Artificial Sequence: Synthetic oligonucleotide
ccuaaucucacccucuccuccagug

SEQ ID NO: 64331 - RNA, 25 nt, Artificial Sequence
  Description of Artificial Sequence: Synthetic oligonucleotide
gugggcuugaccaggcuuggccuug

SEQ ID NO: 64332 - RNA, 25 nt, Artificial Sequence
  Description of Artificial Sequence: Synthetic oligonucleotide
gggcuauuuggacucaggugggccc

SEQ ID NO: 64333 - RNA, 25 nt, Artificial Sequence
  Description of Artificial Sequence: Synthetic oligonucleotide
cucugaacuugccuuaaacacucac

SEQ ID NO: 64334 - RNA, 25 nt, Artificial Sequence
  Description of Artificial Sequence: Synthetic oligonucleotide
ccuucuagucuuggccagccaacuc

SEQ ID NO: 64335 - RNA, 25 nt, Artificial Sequence
  Description of Artificial Sequence: Synthetic oligonucleotide
cugggaauacaggggugaaaggggg

SEQ ID NO: 64336 - RNA, 25 nt, Artificial Sequence
  Description of Artificial Sequence: Synthetic oligonucleotide
ggaaccagugaaaaugaaaggaagu

SEQ ID NO: 64337 - RNA, 25 nt, Artificial Sequence
  Description of Artificial Sequence: Synthetic oligonucleotide
uuucaguauuagaugcacuuaaguu

SEQ ID NO: 64338 - RNA, 25 nt, Artificial Sequence
  Description of Artificial Sequence: Synthetic oligonucleotide
uagccuccaccacccuuucccccuu

SEQ ID NO: 64339 - RNA, 25 nt, Artificial Sequence
  Description of Artificial Sequence: Synthetic oligonucleotide
ucucuuaguuauugcugaagagggu

SEQ ID NO: 64340 - RNA, 25 nt, Artificial Sequence
  Description of Artificial Sequence: Synthetic oligonucleotide
uugguauaaaaauaauuuuaaaaaa

SEQ ID NO: 64341 - RNA, 25 nt, Artificial Sequence
  Description of Artificial Sequence: Synthetic oligonucleotide
agccuuccuacacguuagauuugcc

SEQ ID NO: 64342 - RNA, 25 nt, Artificial Sequence
  Description of Artificial Sequence: Synthetic oligonucleotide
cguaccaaucucugaaugccccaua

SEQ ID NO: 64343 - RNA, 25 nt, Artificial Sequence
  Description of Artificial Sequence: Synthetic oligonucleotide
aauuauuauuuccaguguuugggau

SEQ ID NO: 64344 - RNA, 25 nt, Artificial Sequence
  Description of Artificial Sequence: Synthetic oligonucleotide
ugaccaggaucccaagccuccugcu

SEQ ID NO: 64345 - RNA, 25 nt, Artificial Sequence
  Description of Artificial Sequence: Synthetic oligonucleotide
ugccacaauguuuauaaaggccaaa

SEQ ID NO: 64346 - RNA, 25 nt, Artificial Sequence
  Description of Artificial Sequence: Synthetic oligonucleotide
augauagcgggggcuaaguuggugc

SEQ ID NO: 64347 - RNA, 25 nt, Artificial Sequence
  Description of Artificial Sequence: Synthetic oligonucleotide
cuuuugagaaccaaguaaaacaaaa

SEQ ID NO: 64348 - RNA, 25 nt, Artificial Sequence
  Description of Artificial Sequence: Synthetic oligonucleotide
accacugggaggagucuauuuuaaa

SEQ ID NO: 64349 - RNA, 25 nt, Artificial Sequence
  Description of Artificial Sequence: Synthetic oligonucleotide
agaauucgguugaaaaaauagaucc

SEQ ID NO: 64350 - RNA, 25 nt, Artificial Sequence
  Description of Artificial Sequence: Synthetic oligonucleotide
caaucaguuuauacccuaguuagug

SEQ ID NO: 64351 - RNA, 25 nt, Artificial Sequence
  Description of Artificial Sequence: Synthetic oligonucleotide
guuuugccucaccuaauaggcuggg

SEQ ID NO: 64352 - RNA, 25 nt, Artificial Sequence
  Description of Artificial Sequence: Synthetic oligonucleotide
gagacugaagacucagcccgggugg

SEQ ID NO: 64353 - RNA, 25 nt, Artificial Sequence
  Description of Artificial Sequence: Synthetic oligonucleotide
gggcugcagaaaaaugauuggcccc

SEQ ID NO: 64354 - RNA, 25 nt, Artificial Sequence
  Description of Artificial Sequence: Synthetic oligonucleotide
caguccccuuguuugucccuucuac

SEQ ID NO: 64355 - RNA, 25 nt, Artificial Sequence
  Description of Artificial Sequence: Synthetic oligonucleotide
caggcaugaggaaucugggaggccc

SEQ ID NO: 64356 - RNA, 25 nt, Artificial Sequence
  Description of Artificial Sequence: Synthetic oligonucleotide
cugagacagggauugugcuucauuc

SEQ ID NO: 64357 - RNA, 25 nt, Artificial Sequence
  Description of Artificial Sequence: Synthetic oligonucleotide
ccaaucuauugcuucaccauggccu

SEQ ID NO: 64358 - RNA, 25 nt, Artificial Sequence
  Description of Artificial Sequence: Synthetic oligonucleotide
uuaugaggcaggugagagauguuug

SEQ ID NO: 64359 - RNA, 25 nt, Artificial Sequence
  Description of Artificial Sequence: Synthetic oligonucleotide
gaauuuuucucuuccuuuuaguauu

SEQ ID NO: 64360 - RNA, 25 nt, Artificial Sequence
  Description of Artificial Sequence: Synthetic oligonucleotide
ucuuaguuguucaguugccaaggau

SEQ ID NO: 64361 - RNA, 25 nt, Artificial Sequence
  Description of Artificial Sequence: Synthetic oligonucleotide
ucccugaucccauuuuccucugacg

SEQ ID NO: 64362 - RNA, 25 nt, Artificial Sequence
  Description of Artificial Sequence: Synthetic oligonucleotide
guccaccuccuaccccauaggaguu

SEQ ID NO: 64363 - RNA, 25 nt, Artificial Sequence
  Description of Artificial Sequence: Synthetic oligonucleotide
uagaaguuaggguuuaggcaucauu

SEQ ID NO: 64364 - RNA, 25 nt, Artificial Sequence
  Description of Artificial Sequence: Synthetic oligonucleotide
uuugagaaugcugacacuuuuucag

SEQ ID NO: 64365 - RNA, 25 nt, Artificial Sequence
  Description of Artificial Sequence: Synthetic oligonucleotide
gggcugugauugagugagggcaugg

SEQ ID NO: 64366 - RNA, 25 nt, Artificial Sequence
  Description of Artificial Sequence: Synthetic oligonucleotide
gguaaaaauauuucuuuaaaagaag

SEQ ID NO: 64367 - RNA, 25 nt, Artificial Sequence
  Description of Artificial Sequence: Synthetic oligonucleotide
ggaugaacaauuauauuuauauuuc

SEQ ID NO: 64368 - RNA, 25 nt, Artificial Sequence
  Description of Artificial Sequence: Synthetic oligonucleotide
cagguuauauccaauaguagaguug

SEQ ID NO: 64369 - RNA, 25 nt, Artificial Sequence
  Description of Artificial Sequence: Synthetic oligonucleotide
cauaguggguggauuuguugccaug

SEQ ID NO: 64370 - RNA, 25 nt, Artificial Sequence
  Description of Artificial Sequence: Synthetic oligonucleotide
gugcaccuugggguuuuguaaugac

SEQ ID NO: 64371 - RNA, 25 nt, Artificial Sequence
  Description of Artificial Sequence: Synthetic oligonucleotide
uuuuuuuaugauuugucucugucac

SEQ ID NO: 64372 - RNA, 25 nt, Artificial Sequence
  Description of Artificial Sequence: Synthetic oligonucleotide
cccuuguccuugagugcucuugcua

SEQ ID NO: 64373 - RNA, 25 nt, Artificial Sequence
  Description of Artificial Sequence: Synthetic oligonucleotide
auuaacguuauuuguaauuuaguuu

SEQ ID NO: 64374 - RNA, 25 nt, Artificial Sequence
  Description of Artificial Sequence: Synthetic oligonucleotide
uguagcucauuaaaaaaaugugccu

SEQ ID NO: 64375 - RNA, 25 nt, Artificial Sequence
  Description of Artificial Sequence: Synthetic oligonucleotide
ugacucgccgggcccuauucccugg

SEQ ID NO: 64376 - RNA, 25 nt, Artificial Sequence
  Description of Artificial Sequence: Synthetic oligonucleotide
gagauucugagauugaccagcucuu

SEQ ID NO: 64377 - RNA, 25 nt, Artificial Sequence
  Description of Artificial Sequence: Synthetic oligonucleotide
uccggaucuuucggacucuggggac

SEQ ID NO: 64378 - RNA, 25 nt, Artificial Sequence
  Description of Artificial Sequence: Synthetic oligonucleotide
ccccagaugaggugguguggccagg

SEQ ID NO: 64379 - RNA, 25 nt, Artificial Sequence
  Description of Artificial Sequence: Synthetic oligonucleotide
gaguuacuucuaugccugauuacaa

SEQ ID NO: 64380 - RNA, 25 nt, Artificial Sequence
  Description of Artificial Sequence: Synthetic oligonucleotide
agccaaguuuccccaagugggcccg

SEQ ID NO: 64381 - RNA, 25 nt, Artificial Sequence
  Description of Artificial Sequence: Synthetic oligonucleotide
ggcaagauuuuaguaaaguuguacc

SEQ ID NO: 64382 - RNA, 25 nt, Artificial Sequence
  Description of Artificial Sequence: Synthetic oligonucleotide
cuccccuggaugaagauggacggag

SEQ ID NO: 64383 - RNA, 25 nt, Artificial Sequence
  Description of Artificial Sequence: Synthetic oligonucleotide
gcuuguuaucgcaaaugcugcacua

SEQ ID NO: 64384 - RNA, 25 nt, Artificial Sequence
  Description of Artificial Sequence: Synthetic oligonucleotide
acgacccuuacaagaggauuucggc

SEQ ID NO: 64385 - RNA, 25 nt, Artificial Sequence
  Description of Artificial Sequence: Synthetic oligonucleotide
ccaaggcagcccuggcucacccuuu

SEQ ID NO: 64386 - RNA, 25 nt, Artificial Sequence
  Description of Artificial Sequence: Synthetic oligonucleotide
ucuuccaggaugugaccaagccagu

SEQ ID NO: 64387 - RNA, 25 nt, Artificial Sequence
  Description of Artificial Sequence: Synthetic oligonucleotide
uaccccaucuucgacucugauagcc

SEQ ID NO: 64388 - RNA, 25 nt, Artificial Sequence
  Description of Artificial Sequence: Synthetic oligonucleotide
cuucuugaagcccccagcccuaauc

SEQ ID NO: 64389 - RNA, 25 nt, Artificial Sequence
  Description of Artificial Sequence: Synthetic oligonucleotide
cucacccucuccuccagugugggcu

SEQ ID NO: 64390 - RNA, 25 nt, Artificial Sequence
  Description of Artificial Sequence: Synthetic oligonucleotide
uugaccaggcuuggccuugggcuau

SEQ ID NO: 64391 - RNA, 25 nt, Artificial Sequence
  Description of Artificial Sequence: Synthetic oligonucleotide
uuuggacucaggugggcccucugaa

SEQ ID NO: 64392 - RNA, 25 nt, Artificial Sequence
  Description of Artificial Sequence: Synthetic oligonucleotide
acuugccuuaaacacucaccuucua

SEQ ID NO: 64393 - RNA, 25 nt, Artificial Sequence
  Description of Artificial Sequence: Synthetic oligonucleotide
agucuuggccagccaacucugggaa

SEQ ID NO: 64394 - RNA, 25 nt, Artificial Sequence
  Description of Artificial Sequence: Synthetic oligonucleotide
auacaggggugaaaggggggaacca

SEQ ID NO: 64395 - RNA, 25 nt, Artificial Sequence
  Description of Artificial Sequence: Synthetic oligonucleotide
agugaaaaugaaaggaaguuucagu

SEQ ID NO: 64396 - RNA, 25 nt, Artificial Sequence
  Description of Artificial Sequence: Synthetic oligonucleotide
uauuagaugcacuuaaguuagccuc

SEQ ID NO: 64397 - RNA, 25 nt, Artificial Sequence
  Description of Artificial Sequence: Synthetic oligonucleotide
ccaccacccuuucccccuucucuua

SEQ ID NO: 64398 - RNA, 25 nt, Artificial Sequence
  Description of Artificial Sequence: Synthetic oligonucleotide
aguuauugcugaagaggguugguau

SEQ ID NO: 64399 - RNA, 25 nt, Artificial Sequence
  Description of Artificial Sequence: Synthetic oligonucleotide
uaaaaauaauuuuaaaaaagccuuc

SEQ ID NO: 64400 - RNA, 25 nt, Artificial Sequence
  Description of Artificial Sequence: Synthetic oligonucleotide
ccuacacguuagauuugccguacca

SEQ ID NO: 64401 - RNA, 25 nt, Artificial Sequence
  Description of Artificial Sequence: Synthetic oligonucleotide
aaucucugaaugccccauaauuauu

SEQ ID NO: 64402 - RNA, 25 nt, Artificial Sequence
  Description of Artificial Sequence: Synthetic oligonucleotide
uauuuccaguguuugggaugaccag

SEQ ID NO: 64403 - RNA, 25 nt, Artificial Sequence
  Description of Artificial Sequence: Synthetic oligonucleotide
ggaucccaagccuccugcugccaca

SEQ ID NO: 64404 - RNA, 25 nt, Artificial Sequence
  Description of Artificial Sequence: Synthetic oligonucleotide
aauguuuauaaaggccaaaugauag

SEQ ID NO: 64405 - RNA, 25 nt, Artificial Sequence
  Description of Artificial Sequence: Synthetic oligonucleotide
gcgggggcuaaguuggugcuuuuga

SEQ ID NO: 64406 - RNA, 25 nt, Artificial Sequence
  Description of Artificial Sequence: Synthetic oligonucleotide
agaaccaaguaaaacaaaaccacug

SEQ ID NO: 64407 - RNA, 25 nt, Artificial Sequence
  Description of Artificial Sequence: Synthetic oligonucleotide
gggaggagucuauuuuaaagaauuc

SEQ ID NO: 64408 - RNA, 25 nt, Artificial Sequence
  Description of Artificial Sequence: Synthetic oligonucleotide
cgguugaaaaaauagauccaaucag

SEQ ID NO: 64409 - RNA, 25 nt, Artificial Sequence
  Description of Artificial Sequence: Synthetic oligonucleotide
guuuauacccuaguuaguguuuugc

SEQ ID NO: 64410 - RNA, 25 nt, Artificial Sequence
  Description of Artificial Sequence: Synthetic oligonucleotide
ccucaccuaauaggcugggagacug

SEQ ID NO: 64411 - RNA, 25 nt, Artificial Sequence
  Description of Artificial Sequence: Synthetic oligonucleotide
gaagacucagcccggguggggcugc

SEQ ID NO: 64412 - RNA, 25 nt, Artificial Sequence
  Description of Artificial Sequence: Synthetic oligonucleotide
cagaaaaaugauuggccccaguccc

SEQ ID NO: 64413 - RNA, 25 nt, Artificial Sequence
  Description of Artificial Sequence: Synthetic oligonucleotide
ccuuguuugucccuucuacaggcau

SEQ ID NO: 64414 - RNA, 25 nt, Artificial Sequence
  Description of Artificial Sequence: Synthetic oligonucleotide
ugaggaaucugggaggcccugagac

SEQ ID NO: 64415 - RNA, 25 nt, Artificial Sequence
  Description of Artificial Sequence: Synthetic oligonucleotide
cagggauugugcuucauuccaaucu

SEQ ID NO: 64416 - RNA, 25 nt, Artificial Sequence
  Description of Artificial Sequence: Synthetic oligonucleotide
uauugcuucaccauggccuuaugag

SEQ ID NO: 64417 - RNA, 25 nt, Artificial Sequence
  Description of Artificial Sequence: Synthetic oligonucleotide
ggcaggugagagauguuugaauuuu

SEQ ID NO: 64418 - RNA, 25 nt, Artificial Sequence
  Description of Artificial Sequence: Synthetic oligonucleotide
uucucuuccuuuuaguauucuuagu

SEQ ID NO: 64419 - RNA, 25 nt, Artificial Sequence
  Description of Artificial Sequence: Synthetic oligonucleotide
uuguucaguugccaaggaucccuga

SEQ ID NO: 64420 - RNA, 25 nt, Artificial Sequence
  Description of Artificial Sequence: Synthetic oligonucleotide
aucccauuuuccucugacguccacc

SEQ ID NO: 64421 - RNA, 25 nt, Artificial Sequence
  Description of Artificial Sequence: Synthetic oligonucleotide
cuccuaccccauaggaguuagaagu

SEQ ID NO: 64422 - RNA, 25 nt, Artificial Sequence
  Description of Artificial Sequence: Synthetic oligonucleotide
uuaggguuuaggcaucauuuugaga

SEQ ID NO: 64423 - RNA, 25 nt, Artificial Sequence
  Description of Artificial Sequence: Synthetic oligonucleotide
aaugcugacacuuuuucagggcugu

SEQ ID NO: 64424 - RNA, 25 nt, Artificial Sequence
  Description of Artificial Sequence: Synthetic oligonucleotide
ugauugagugagggcauggguaaaa

SEQ ID NO: 64425 - RNA, 25 nt, Artificial Sequence
  Description of Artificial Sequence: Synthetic oligonucleotide
aauauuucuuuaaaagaaggaugaa

SEQ ID NO: 64426 - RNA, 25 nt, Artificial Sequence
  Description of Artificial Sequence: Synthetic oligonucleotide
acaauuauauuuauauuucagguua

SEQ ID NO: 64427 - RNA, 25 nt, Artificial Sequence
  Description of Artificial Sequence: Synthetic oligonucleotide
auauccaauaguagaguuggcuuuu

SEQ ID NO: 64428 - RNA, 25 nt, Artificial Sequence
  Description of Artificial Sequence: Synthetic oligonucleotide
ggguggauuuguugccaugugcacc

SEQ ID NO: 64429 - RNA, 25 nt, Artificial Sequence
  Description of Artificial Sequence: Synthetic oligonucleotide
cuugggguuuuguaaugacagugcu

SEQ ID NO: 64430 - RNA, 25 nt, Artificial Sequence
  Description of Artificial Sequence: Synthetic oligonucleotide
uaugauuugucucugucacccuugu

SEQ ID NO: 64431 - RNA, 25 nt, Artificial Sequence
  Description of Artificial Sequence: Synthetic oligonucleotide
uccuugagugcucuugcuauuaacg

SEQ ID NO: 64432 - RNA, 25 nt, Artificial Sequence
  Description of Artificial Sequence: Synthetic oligonucleotide
guuauuuguaauuuaguuuguagcu

SEQ ID NO: 64433 - RNA, 25 nt, Artificial Sequence
  Description of Artificial Sequence: Synthetic oligonucleotide
ucauuaaaaaaaugugccuaguuuu

SEQ ID NO: 64434 - DNA, 21 bp, Artificial Sequence
  Description of Artificial Sequence: Synthetic oligonucleotide
  Description of Combined DNA/RNA Molecule: Synthetic oligonucleotide
cuacacaaaucagcgauuutt

SEQ ID NO: 64435 - DNA, 21 bp, Artificial Sequence
  Description of Artificial Sequence: Synthetic oligonucleotide
  Description of Combined DNA/RNA Molecule: Synthetic oligonucleotide
aaaucgcugauuuguguagtt

SEQ ID NO: 64436 - DNA, 25 bp, Artificial Sequence
  Description of Artificial Sequence: Synthetic oligonucleotide
  Description of Combined DNA/RNA Molecule: Synthetic oligonucleotide
cuacacaaaucagcgauuuccaugt

SEQ ID NO: 64437 - RNA, 27 nt, Artificial Sequence
  Description of Artificial Sequence: Synthetic oligonucleotide
acauggaaaucgcugauuuguguaguc

SEQ ID NO: 64438 - RNA, 13 nt, Artificial Sequence
  Description of Artificial Sequence: Synthetic oligonucleotide
cuacacaaaucag

SEQ ID NO: 64439 - DNA, 11 bp, Artificial Sequence
  Description of Artificial Sequence: Synthetic oligonucleotide
  Description of Combined DNA/RNA Molecule: Synthetic oligonucleotide
gauuuccaugt

SEQ ID NO: 64440 - DNA, 21 bp, Artificial Sequence
  Description of Artificial Sequence: Synthetic oligonucleotide
  Description of Combined DNA/RNA Molecule: Synthetic oligonucleotide
ggaucuuauuucuucggagtt

SEQ ID NO: 64441 - DNA, 21 bp, Artificial Sequence
  Description of Artificial Sequence: Synthetic oligonucleotide
  Description of Combined DNA/RNA Molecule: Synthetic oligonucleotide
cuccgaagaaauaagaucctt

SEQ ID NO: 64442 - RNA, 11 nt, Artificial Sequence
  Description of Artificial Sequence: Synthetic oligonucleotide
ggaucuuauuu

SEQ ID NO: 64443 - DNA, 10 bp, Artificial Sequence
  Description of Artificial Sequence: Synthetic oligonucleotide
  Description of Combined DNA/RNA Molecule: Synthetic oligonucleotide
cuucggagtt

SEQ ID NO: 64444 - RNA, 27 nt, Artificial Sequence
  Description of Artificial Sequence: Synthetic oligonucleotide
cauugucuccgaagaaauaagauccuu

SEQ ID NO: 64445 - RNA, 8 nt, Artificial Sequence
  Description of Artificial Sequence: Synthetic oligonucleotide
  modified_base (2): LNA-G
ggaucuua

SEQ ID NO: 64446 - DNA, 17 bp, Artificial Sequence
  Description of Artificial Sequence: Synthetic oligonucleotide
  Description of Combined DNA/RNA Molecule: Synthetic oligonucleotide
uuucuucggagacaatg

SEQ ID NO: 64447 - DNA, 16 bp, Artificial Sequence
  Description of Artificial Sequence: Synthetic oligonucleotide
  Description of Combined DNA/RNA Molecule: Synthetic oligonucleotide
uucuucggagacaatg

SEQ ID NO: 64448 - DNA, 15 bp, Artificial Sequence
  Description of Artificial Sequence: Synthetic oligonucleotide
  Description of Combined DNA/RNA Molecule: Synthetic oligonucleotide
ucuucggagacaatg

SEQ ID NO: 64449 - DNA, 14 bp, Artificial Sequence
  Description of Artificial Sequence: Synthetic oligonucleotide
  Description of Combined DNA/RNA Molecule: Synthetic oligonucleotide
cuucggagacaatg

SEQ ID NO: 64450 - DNA, 13 bp, Artificial Sequence
  Description of Artificial Sequence: Synthetic oligonucleotide
  Description of Combined DNA/RNA Molecule: Synthetic oligonucleotide
uucggagacaatg

SEQ ID NO: 64451 - DNA, 12 bp, Artificial Sequence
  Description of Artificial Sequence: Synthetic oligonucleotide
  Description of Combined DNA/RNA Molecule: Synthetic oligonucleotide
ucggagacaatg

SEQ ID NO: 64452 - DNA, 11 bp, Artificial Sequence
  Description of Artificial Sequence: Synthetic oligonucleotide
  Description of Combined DNA/RNA Molecule: Synthetic oligonucleotide
cggagacaatg

SEQ ID NO: 64453 - RNA, 9 nt, Artificial Sequence
  Description of Artificial Sequence: Synthetic oligonucleotide
  modified_base (2): LNA-G
ggaucuuau

SEQ ID NO: 64454 - RNA, 10 nt, Artificial Sequence
  Description of Artificial Sequence: Synthetic oligonucleotide
  modified_base (2): LNA-G
ggaucuuauu

SEQ ID NO: 64455 - RNA, 11 nt, Artificial Sequence
  Description of Artificial Sequence: Synthetic oligonucleotide
  modified_base (2): LNA-G
ggaucuuauuu

SEQ ID NO: 64456 - RNA, 12 nt, Artificial Sequence
  Description of Artificial Sequence: Synthetic oligonucleotide
  modified_base (2): LNA-G
ggaucuuauuuc

SEQ ID NO: 64457 - RNA, 8 nt, Artificial Sequence
  Description of Artificial Sequence: Synthetic oligonucleotide
  modified_base (3): LNA-A
cuacacaa

SEQ ID NO: 64458 - DNA, 13 bp, Artificial Sequence
  Description of Artificial Sequence: Synthetic oligonucleotide
  Description of Combined DNA/RNA Molecule: Synthetic oligonucleotide
  modified_base (8): LNA-A
aucagcgauuutt

SEQ ID NO: 64459 - DNA, 12 bp, Artificial Sequence
  Description of Artificial Sequence: Synthetic oligonucleotide
  Description of Combined DNA/RNA Molecule: Synthetic oligonucleotide
  modified_base (7): LNA-A
ucagcgauuutt

SEQ ID NO: 64460 - DNA, 11 bp, Artificial Sequence
  Description of Artificial Sequence: Synthetic oligonucleotide
  Description of Combined DNA/RNA Molecule: Synthetic oligonucleotide
  modified_base (6): LNA-A
cagcgauuutt

SEQ ID NO: 64461 - DNA, 10 bp, Artificial Sequence
  Description of Artificial Sequence: Synthetic oligonucleotide
  Description of Combined DNA/RNA Molecule: Synthetic oligonucleotide
  modified_base (5): LNA-A
agcgauuutt

SEQ ID NO: 64462 - DNA, 9 bp, Artificial Sequence
  Description of Artificial Sequence: Synthetic oligonucleotide
  Description of Combined DNA/RNA Molecule: Synthetic oligonucleotide
  modified_base (4): LNA-A
gcgauuutt

SEQ ID NO: 64463 - DNA, 8 bp, Artificial Sequence
  Description of Artificial Sequence: Synthetic oligonucleotide
  Description of Combined DNA/RNA Molecule: Synthetic oligonucleotide
  modified_base (3): LNA-A
cgauuutt

SEQ ID NO: 64464 - DNA, 7 bp, Artificial Sequence
  Description of Artificial Sequence: Synthetic oligonucleotide
  Description of Combined DNA/RNA Molecule: Synthetic oligonucleotide
  modified_base (2): LNA-A
gauuutt

SEQ ID NO: 64465 - RNA, 9 nt, Artificial Sequence
  Description of Artificial Sequence: Synthetic oligonucleotide
  modified_base (3): LNA-A
cuacacaaa

SEQ ID NO: 64466 - RNA, 10 nt, Artificial Sequence
  Description of Artificial Sequence: Synthetic oligonucleotide
  modified_base (3): LNA-A
cuacacaaau

SEQ ID NO: 64467 - RNA, 11 nt, Artificial Sequence
  Description of Artificial Sequence: Synthetic oligonucleotide
  modified_base (3): LNA-A
cuacacaaauc

SEQ ID NO: 64468 - RNA, 12 nt, Artificial Sequence
  Description of Artificial Sequence: Synthetic oligonucleotide
  modified_base (3): LNA-A
cuacacaaauca

SEQ ID NO: 64469 - RNA, 13 nt, Artificial Sequence
  Description of Artificial Sequence: Synthetic oligonucleotide
  modified_base (3): LNA-A
cuacacaaaucag

SEQ ID NO: 64470 - RNA, 14 nt, Artificial Sequence
  Description of Artificial Sequence: Synthetic oligonucleotide
  modified_base (3): LNA-A
cuacacaaaucagc

SEQ ID NO: 64471 - RNA, 13 nt, Artificial Sequence
  Description of Artificial Sequence: Synthetic oligonucleotide
  modified_base (2): LNA-G
ggaucuuauuucu

SEQ ID NO: 64472 - RNA, 14 nt, Artificial Sequence
  Description of Artificial Sequence: Synthetic oligonucleotide
  modified_base (2): LNA-G
ggaucuuauuucuu

SEQ ID NO: 64473 - RNA, 8 nt, Artificial Sequence
  Description of Artificial Sequence: Synthetic oligonucleotide
  modified_base (2): LNA-G
  modified_base (8): LNA-A
ggaucuua

SEQ ID NO: 64474 - RNA, 9 nt, Artificial Sequence
  Description of Artificial Sequence: Synthetic oligonucleotide
  modified_base (2): LNA-G
  modified_base (9): LNA-U
ggaucuuau

SEQ ID NO: 64475 - RNA, 10 nt, Artificial Sequence
  Description of Artificial Sequence: Synthetic oligonucleotide
  modified_base (2): LNA-G
  modified_base (10): LNA-U
ggaucuuauu

SEQ ID NO: 64476 - RNA, 11 nt, Artificial Sequence
  Description of Artificial Sequence: Synthetic oligonucleotide
  modified_base (2): LNA-G
  modified_base (11): LNA-U
ggaucuuauuu

SEQ ID NO: 64477 - RNA, 12 nt, Artificial Sequence
  Description of Artificial Sequence: Synthetic oligonucleotide
  modified_base (2): LNA-G
  modified_base (12): LNA-C
ggaucuuauuuc

SEQ ID NO: 64478 - RNA, 13 nt, Artificial Sequence
  Description of Artificial Sequence: Synthetic oligonucleotide
  modified_base (2): LNA-G
  modified_base (13): LNA-U
ggaucuuauuucu

SEQ ID NO: 64479 - RNA, 14 nt, Artificial Sequence
  Description of Artificial Sequence: Synthetic oligonucleotide
  modified_base (2): LNA-G
  modified_base (14): LNA-U
ggaucuuauuucuu

SEQ ID NO: 64480 - DNA, 13 bp, Artificial Sequence
  Description of Artificial Sequence: Synthetic oligonucleotide
  Description of Combined DNA/RNA Molecule: Synthetic oligonucleotide
  modified_base (8): LNA-G
uuucuucggagtt

SEQ ID NO: 64481 - DNA, 12 bp, Artificial Sequence
  Description of Artificial Sequence: Synthetic oligonucleotide
  Description of Combined DNA/RNA Molecule: Synthetic oligonucleotide
  modified_base (7): LNA-G
uucuucggagtt

SEQ ID NO: 64482 - DNA, 11 bp, Artificial Sequence
  Description of Artificial Sequence: Synthetic oligonucleotide
  Description of Combined DNA/RNA Molecule: Synthetic oligonucleotide
  modified_base (6): LNA-G
ucuucggagtt

SEQ ID NO: 64483 - DNA, 10 bp, Artificial Sequence
  Description of Artificial Sequence: Synthetic oligonucleotide
  Description of Combined DNA/RNA Molecule: Synthetic oligonucleotide
  modified_base (5): LNA-G
cuucggagtt

SEQ ID NO: 64484 - DNA, 9 bp, Artificial Sequence
  Description of Artificial Sequence: Synthetic oligonucleotide
  Description of Combined DNA/RNA Molecule: Synthetic oligonucleotide
  modified_base (4): LNA-G
uucggagtt

SEQ ID NO: 64485 - DNA, 8 bp, Artificial Sequence
  Description of Artificial Sequence: Synthetic oligonucleotide
  Description of Combined DNA/RNA Molecule: Synthetic oligonucleotide
  modified_base (3): LNA-G
ucggagtt

SEQ ID NO: 64486 - DNA, 7 bp, Artificial Sequence
  Description of Artificial Sequence: Synthetic oligonucleotide
  Description of Combined DNA/RNA Molecule: Synthetic oligonucleotide
  modified_base (2): LNA-G
cggagtt

SEQ ID NO: 64487 - DNA, 13 bp, Artificial Sequence
  Description of Artificial Sequence: Synthetic oligonucleotide
  Description of Combined DNA/RNA Molecule: Synthetic oligonucleotide
  modified_base (1): LNA-U
  modified_base (8): LNA-G
uuucuucggagtt

SEQ ID NO: 64488 - DNA, 12 bp, Artificial Sequence
  Description of Artificial Sequence: Synthetic oligonucleotide
  Description of Combined DNA/RNA Molecule: Synthetic oligonucleotide
  modified_base (1): LNA-U
  modified_base (7): LNA-G
uucuucggagtt

SEQ ID NO: 64489 - DNA, 11 bp, Artificial Sequence
  Description of Artificial Sequence: Synthetic oligonucleotide
  Description of Combined DNA/RNA Molecule: Synthetic oligonucleotide
  modified_base (1): LNA-U
  modified_base (6): LNA-G
ucuucggagtt

SEQ ID NO: 64490 - DNA, 10 bp, Artificial Sequence
  Description of Artificial Sequence: Synthetic oligonucleotide
  Description of Combined DNA/RNA Molecule: Synthetic oligonucleotide
  modified_base (1): LNA-C
  modified_base (5): LNA-G
cuucggagtt

SEQ ID NO: 64491 - DNA, 9 bp, Artificial Sequence
  Description of Artificial Sequence: Synthetic oligonucleotide
  Description of Combined DNA/RNA Molecule: Synthetic oligonucleotide
  modified_base (1): LNA-U
  modified_base (4): LNA-G
uucggagtt

SEQ ID NO: 64492 - DNA, 8 bp, Artificial Sequence
  Description of Artificial Sequence: Synthetic oligonucleotide
  Description of Combined DNA/RNA Molecule: Synthetic oligonucleotide
  modified_base (1): LNA-U
  modified_base (3): LNA-G
ucggagtt

SEQ ID NO: 64493 - DNA, 7 bp, Artificial Sequence
  Description of Artificial Sequence: Synthetic oligonucleotide
  Description of Combined DNA/RNA Molecule: Synthetic oligonucleotide
  modified_base (1): LNA-C
  modified_base (2): LNA-G
cggagtt

SEQ ID NO: 64494 - DNA, 21 bp, Artificial Sequence
  Description of Artificial Sequence: Synthetic oligonucleotide
  Description of Combined DNA/RNA Molecule: Synthetic oligonucleotide
  modified_base (2): LNA-G
  modified_base (16): LNA-G
ggaucuuauuucuucggagtt

SEQ ID NO: 64495 - DNA, 25 bp, Artificial Sequence
  Description of Artificial Sequence: Synthetic oligonucleotide
  Description of Combined DNA/RNA Molecule: Synthetic oligonucleotide
ggaucuuauuucuucggagacaatg

SEQ ID NO: 64496 - RNA, 25 nt, Artificial Sequence
  Description of Artificial Sequence: Synthetic oligonucleotide
uuaagcagaguucaaaagcccuuca

SEQ ID NO: 64497 - RNA, 25 nt, Artificial Sequence
  Description of Artificial Sequence: Synthetic oligonucleotide
uaagcagaguucaaaagcccuucag

SEQ ID NO: 64498 - RNA, 25 nt, Artificial Sequence
  Description of Artificial Sequence: Synthetic oligonucleotide
agcagaguucaaaagcccuucagcg

SEQ ID NO: 64499 - RNA, 25 nt, Artificial Sequence
  Description of Artificial Sequence: Synthetic oligonucleotide
cucagggucugagugaagccgcucg

SEQ ID NO: 64500 - RNA, 25 nt, Artificial Sequence
  Description of Artificial Sequence: Synthetic oligonucleotide
caagcaacuacaucacgccagucaa

SEQ ID NO: 64501 - RNA, 25 nt, Artificial Sequence
  Description of Artificial Sequence: Synthetic oligonucleotide
aucaauggcagcuucuuggugcgug

SEQ ID NO: 64502 - RNA, 25 nt, Artificial Sequence
  Description of Artificial Sequence: Synthetic oligonucleotide
uuccagcccacauuggauucaucag

SEQ ID NO: 64503 - RNA, 25 nt, Artificial Sequence
  Description of Artificial Sequence: Synthetic oligonucleotide
cagcugagaauguggaauaccuaag

SEQ ID NO: 64504 - RNA, 25 nt, Artificial Sequence
  Description of Artificial Sequence: Synthetic oligonucleotide
aacguaucuccuaauuugaggcuca

SEQ ID NO: 64505 - RNA, 25 nt, Artificial Sequence
  Description of Artificial Sequence: Synthetic oligonucleotide
ccuaaaauaauuucucuacaauugg

SEQ ID NO: 64506 - RNA, 25 nt, Artificial Sequence
  Description of Artificial Sequence: Synthetic oligonucleotide
uggaagauucagcuaguuaggagcc

SEQ ID NO: 64507 - RNA, 25 nt, Artificial Sequence
  Description of Artificial Sequence: Synthetic oligonucleotide
uuaaacucuccuagucaauauccac

SEQ ID NO: 64508 - RNA, 25 nt, Artificial Sequence
  Description of Artificial Sequence: Synthetic oligonucleotide
cagccuacaguuauguucagucaca

SEQ ID NO: 64509 - RNA, 25 nt, Artificial Sequence
  Description of Artificial Sequence: Synthetic oligonucleotide
guuauguucagucacacacacauac

SEQ ID NO: 64510 - RNA, 25 nt, Artificial Sequence
  Description of Artificial Sequence: Synthetic oligonucleotide
cacauacaaaauguuccuuuugcuu

SEQ ID NO: 64511 - RNA, 25 nt, Artificial Sequence
  Description of Artificial Sequence: Synthetic oligonucleotide
uccuuuugcuuuuaaaguaauuuuu

SEQ ID NO: 64512 - RNA, 25 nt, Artificial Sequence
  Description of Artificial Sequence: Synthetic oligonucleotide
ugaccugugaagcaacagucaaugg

SEQ ID NO: 64513 - RNA, 25 nt, Artificial Sequence
  Description of Artificial Sequence: Synthetic oligonucleotide
cuaucucacacaucgacaaaccaau

SEQ ID NO: 64514 - RNA, 25 nt, Artificial Sequence
  Description of Artificial Sequence: Synthetic oligonucleotide
uguccucaauuguacugcuaccacu

SEQ ID NO: 64515 - RNA, 25 nt, Artificial Sequence
  Description of Artificial Sequence: Synthetic oligonucleotide
aaaccguagcuggcaagcggucuua

SEQ ID NO: 64516 - RNA, 25 nt, Artificial Sequence
  Description of Artificial Sequence: Synthetic oligonucleotide
uagcuggcaagcggucuuaccggcu

SEQ ID NO: 64517 - RNA, 25 nt, Artificial Sequence
  Description of Artificial Sequence: Synthetic oligonucleotide
uuguaugguuaaaagauggguuacc

SEQ ID NO: 64518 - RNA, 25 nt, Artificial Sequence
  Description of Artificial Sequence: Synthetic oligonucleotide
ugguuaaaagauggguuaccugcga

SEQ ID NO: 64519 - RNA, 25 nt, Artificial Sequence
  Description of Artificial Sequence: Synthetic oligonucleotide
cagggaauuauacaaucuugcugag

SEQ ID NO: 64520 - RNA, 25 nt, Artificial Sequence
  Description of Artificial Sequence: Synthetic oligonucleotide
acaaucuugcugagcauaaaacagu

SEQ ID NO: 64521 - RNA, 25 nt, Artificial Sequence
  Description of Artificial Sequence: Synthetic oligonucleotide
ccaauaaugaagaguccuuuauccu

SEQ ID NO: 64522 - RNA, 25 nt, Artificial Sequence
  Description of Artificial Sequence: Synthetic oligonucleotide
acuuuggauguuccaacgcaaguug

SEQ ID NO: 64523 - RNA, 25 nt, Artificial Sequence
  Description of Artificial Sequence: Synthetic oligonucleotide
aaugcuuccacuaaacugaaaccau

SEQ ID NO: 64524 - RNA, 25 nt, Artificial Sequence
  Description of Artificial Sequence: Synthetic oligonucleotide
gagaaaguuugacuuuguuaaauau

SEQ ID NO: 64525 - RNA, 25 nt, Artificial Sequence
  Description of Artificial Sequence: Synthetic oligonucleotide
aaagaacuacuguauauuaaaaguu

SEQ ID NO: 64526 - RNA, 25 nt, Artificial Sequence
  Description of Artificial Sequence: Synthetic oligonucleotide
uuagaaauacggguuuugacuuaac

SEQ ID NO: 64527 - RNA, 25 nt, Artificial Sequence
  Description of Artificial Sequence: Synthetic oligonucleotide
aacauggguacagcaaacucagcac

SEQ ID NO: 64528 - RNA, 25 nt, Artificial Sequence
  Description of Artificial Sequence: Synthetic oligonucleotide
aaagacacagaagaugcugaccuca

SEQ ID NO: 64529 - RNA, 25 nt, Artificial Sequence
  Description of Artificial Sequence: Synthetic oligonucleotide
uaguagggagguuuauucagaucgc

SEQ ID NO: 64530 - RNA, 25 nt, Artificial Sequence
  Description of Artificial Sequence: Synthetic oligonucleotide
gccuucugcagcaggguucugggau

SEQ ID NO: 64531 - RNA, 25 nt, Artificial Sequence
  Description of Artificial Sequence: Synthetic oligonucleotide
ggucugguacauauuggaaauuaug

SEQ ID NO: 64532 - RNA, 25 nt, Artificial Sequence
  Description of Artificial Sequence: Synthetic oligonucleotide
cuaguccuuccgauggaagcacuag

SEQ ID NO: 64533 - RNA, 25 nt, Artificial Sequence
  Description of Artificial Sequence: Synthetic oligonucleotide
ccagugaauauuguuuuuaugugga

SEQ ID NO: 64534 - RNA, 25 nt, Artificial Sequence
  Description of Artificial Sequence: Synthetic oligonucleotide
augaauucaaguuggaauugguaga

SEQ ID NO: 64535 - RNA, 25 nt, Artificial Sequence
  Description of Artificial Sequence: Synthetic oligonucleotide
caggacacagauuuagacuuggaga

SEQ ID NO: 64536 - RNA, 25 nt, Artificial Sequence
  Description of Artificial Sequence: Synthetic oligonucleotide
cucaaagcacaguuacaguauucca

SEQ ID NO: 64537 - RNA, 25 nt, Artificial Sequence
  Description of Artificial Sequence: Synthetic oligonucleotide
accacugccaccacugaugaauuaa

SEQ ID NO: 64538 - RNA, 25 nt, Artificial Sequence
  Description of Artificial Sequence: Synthetic oligonucleotide
gaaacuacuagugccacaucaucac

SEQ ID NO: 64539 - RNA, 25 nt, Artificial Sequence
  Description of Artificial Sequence: Synthetic oligonucleotide
aagucggacagccucaccaaacaga

SEQ ID NO: 64540 - RNA, 25 nt, Artificial Sequence
  Description of Artificial Sequence: Synthetic oligonucleotide
gaaagcgaaaaauggaacaugaugg

SEQ ID NO: 64541 - RNA, 25 nt, Artificial Sequence
  Description of Artificial Sequence: Synthetic oligonucleotide
cccucugauuuagcauguagacugc

SEQ ID NO: 64542 - RNA, 25 nt, Artificial Sequence
  Description of Artificial Sequence: Synthetic oligonucleotide
ugagcuauuuaaggaucuauuuaug

SEQ ID NO: 64543 - RNA, 25 nt, Artificial Sequence
  Description of Artificial Sequence: Synthetic oligonucleotide
aaaaggugaaaaagcacuauuauca

SEQ ID NO: 64544 - RNA, 25 nt, Artificial Sequence
  Description of Artificial Sequence: Synthetic oligonucleotide
gaaaaagcacuauuaucaguucugc

SEQ ID NO: 64545 - RNA, 25 nt, Artificial Sequence
  Description of Artificial Sequence: Synthetic oligonucleotide
ggcugaaaagaaagauuaaaccuac

SEQ ID NO: 64546 - RNA, 25 nt, Artificial Sequence
  Description of Artificial Sequence: Synthetic oligonucleotide
uaaacccuuauaauaaaauccuucu

SEQ ID NO: 64547 - RNA, 25 nt, Artificial Sequence
  Description of Artificial Sequence: Synthetic oligonucleotide
cauacuauuagccaaugcuguagac

SEQ ID NO: 64548 - RNA, 25 nt, Artificial Sequence
  Description of Artificial Sequence: Synthetic oligonucleotide
gacagaagcauuuugauaggaauag

SEQ ID NO: 64549 - RNA, 25 nt, Artificial Sequence
  Description of Artificial Sequence: Synthetic oligonucleotide
agagcaaauaagauaauggcccuga

SEQ ID NO: 64550 - RNA, 25 nt, Artificial Sequence
  Description of Artificial Sequence: Synthetic oligonucleotide
ccaacauuuuucucuuccucaagca

SEQ ID NO: 64551 - RNA, 25 nt, Artificial Sequence
  Description of Artificial Sequence: Synthetic oligonucleotide
uuaaguaugagaaaaguucagccca

SEQ ID NO: 64552 - RNA, 25 nt, Artificial Sequence
  Description of Artificial Sequence: Synthetic oligonucleotide
caggaauaaagauggcugcugaacc

SEQ ID NO: 64553 - RNA, 25 nt, Artificial Sequence
  Description of Artificial Sequence: Synthetic oligonucleotide
aauuugaaugaccaaguucucuuca

SEQ ID NO: 64554 - RNA, 25 nt, Artificial Sequence
  Description of Artificial Sequence: Synthetic oligonucleotide
auguauaaagauagccagccuagag

SEQ ID NO: 64555 - RNA, 25 nt, Artificial Sequence
  Description of Artificial Sequence: Synthetic oligonucleotide
ggcuguaacuaucucugugaagugu

SEQ ID NO: 64556 - RNA, 25 nt, Artificial Sequence
  Description of Artificial Sequence: Synthetic oligonucleotide
ucugugaagugugagaaaauuucaa

SEQ ID NO: 64557 - RNA, 25 nt, Artificial Sequence
  Description of Artificial Sequence: Synthetic oligonucleotide
ccuuuaaggaaaugaauccuccuga

SEQ ID NO: 64558 - RNA, 25 nt, Artificial Sequence
  Description of Artificial Sequence: Synthetic oligonucleotide
aaggauacaaaaagugacaucauau

SEQ ID NO: 64559 - RNA, 25 nt, Artificial Sequence
  Description of Artificial Sequence: Synthetic oligonucleotide
agaugcaauuugaaucuucaucaua

SEQ ID NO: 64560 - RNA, 25 nt, Artificial Sequence
  Description of Artificial Sequence: Synthetic oligonucleotide
guucaaaacgaagacuagcuauuaa

SEQ ID NO: 64561 - RNA, 25 nt, Artificial Sequence
  Description of Artificial Sequence: Synthetic oligonucleotide
gugaaaccucaucucuacuaaaaau

SEQ ID NO: 64562 - RNA, 25 nt, Artificial Sequence
  Description of Artificial Sequence: Synthetic oligonucleotide
acgaaagagaagcucuaucucgccu

SEQ ID NO: 64563 - RNA, 25 nt, Artificial Sequence
  Description of Artificial Sequence: Synthetic oligonucleotide
cuccacaagcgccuucgguccaguu

SEQ ID NO: 64564 - RNA, 25 nt, Artificial Sequence
  Description of Artificial Sequence: Synthetic oligonucleotide
gagaagauuccaaagauguagccgc

SEQ ID NO: 64565 - RNA, 25 nt, Artificial Sequence
  Description of Artificial Sequence: Synthetic oligonucleotide
aaucuggauucaaugaggagacuug

SEQ ID NO: 64566 - RNA, 25 nt, Artificial Sequence
  Description of Artificial Sequence: Synthetic oligonucleotide
agaacagauuugagaguagugagga

SEQ ID NO: 64567 - RNA, 25 nt, Artificial Sequence
  Description of Artificial Sequence: Synthetic oligonucleotide
ccagagcugugcagaugaguacaaa

SEQ ID NO: 64568 - RNA, 25 nt, Artificial Sequence
  Description of Artificial Sequence: Synthetic oligonucleotide
ccucagauuguuguuguuaaugggc

SEQ ID NO: 64569 - RNA, 25 nt, Artificial Sequence
  Description of Artificial Sequence: Synthetic oligonucleotide
cuauuuuaauuauuuuuaauuuauu

SEQ ID NO: 64570 - RNA, 25 nt, Artificial Sequence
  Description of Artificial Sequence: Synthetic oligonucleotide
uuuaauuuauuaauauuuaaauaug

SEQ ID NO: 64571 - RNA, 25 nt, Artificial Sequence
  Description of Artificial Sequence: Synthetic oligonucleotide
augcaguuugaauauccuuuguuuc

SEQ ID NO: 64572 - RNA, 25 nt, Artificial Sequence
  Description of Artificial Sequence: Synthetic oligonucleotide
caugcugcuggcgucuaaguguuug

SEQ ID NO: 64573 - RNA, 25 nt, Artificial Sequence
  Description of Artificial Sequence: Synthetic oligonucleotide
agaugugcauuucaccugugacaaa

SEQ ID NO: 64574 - RNA, 25 nt, Artificial Sequence
  Description of Artificial Sequence: Synthetic oligonucleotide
ucaaaaccugugccaggcugaauua

SEQ ID NO: 64575 - RNA, 25 nt, Artificial Sequence
  Description of Artificial Sequence: Synthetic oligonucleotide
gaauguggguagucauucuuacaau

SEQ ID NO: 64576 - RNA, 25 nt, Artificial Sequence
  Description of Artificial Sequence: Synthetic oligonucleotide
auguggguagucauucuuacaauug

SEQ ID NO: 64577 - RNA, 25 nt, Artificial Sequence
  Description of Artificial Sequence: Synthetic oligonucleotide
ugaaaaugagcaucagagaguguac

SEQ ID NO: 64578 - RNA, 25 nt, Artificial Sequence
  Description of Artificial Sequence: Synthetic oligonucleotide
uugcuuuucauguagaacucagcag

SEQ ID NO: 64579 - RNA, 25 nt, Artificial Sequence
  Description of Artificial Sequence: Synthetic oligonucleotide
uguauuucuauauuuauuuucagua

SEQ ID NO: 64580 - RNA, 25 nt, Artificial Sequence
  Description of Artificial Sequence: Synthetic oligonucleotide
uuugauuaauguuucuuaaauggaa

SEQ ID NO: 64581 - RNA, 25 nt, Artificial Sequence
  Description of Artificial Sequence: Synthetic oligonucleotide
caacguguauagugccuaaaauugu

SEQ ID NO: 64582 - RNA, 25 nt, Artificial Sequence
  Description of Artificial Sequence: Synthetic oligonucleotide
cauauccuuggcuacuaacaucugg

SEQ ID NO: 64583 - RNA, 25 nt, Artificial Sequence
  Description of Artificial Sequence: Synthetic oligonucleotide
uacuaacaucuggagacugugagcu

SEQ ID NO: 64584 - RNA, 25 nt, Artificial Sequence
  Description of Artificial Sequence: Synthetic oligonucleotide
cauaaguugugugcuuuuuauuaau

SEQ ID NO: 64585 - RNA, 25 nt, Artificial Sequence
  Description of Artificial Sequence: Synthetic oligonucleotide
gcaucauuuuggcucuucuuacauu

SEQ ID NO: 64586 - RNA, 25 nt, Artificial Sequence
  Description of Artificial Sequence: Synthetic oligonucleotide
gcucuucuuacauuuguaaaaaugu

SEQ ID NO: 64587 - RNA, 25 nt, Artificial Sequence
  Description of Artificial Sequence: Synthetic oligonucleotide
agauuaggucaucuuaauucauauu

SEQ ID NO: 64588 - RNA, 25 nt, Artificial Sequence
  Description of Artificial Sequence: Synthetic oligonucleotide
auggaauugaaagaacuaaucauga

SEQ ID NO: 64589 - RNA, 25 nt, Artificial Sequence
  Description of Artificial Sequence: Synthetic oligonucleotide
cacacucauuccuucugcucuuggg

SEQ ID NO: 64590 - RNA, 25 nt, Artificial Sequence
  Description of Artificial Sequence: Synthetic oligonucleotide
uguagagguaaccaguagcuuugag

SEQ ID NO: 64591 - RNA, 25 nt, Artificial Sequence
  Description of Artificial Sequence: Synthetic oligonucleotide
caaccacaugccacguaauauuuca

SEQ ID NO: 64592 - RNA, 25 nt, Artificial Sequence
  Description of Artificial Sequence: Synthetic oligonucleotide
ucggaaacaaguuauucucuucacu

SEQ ID NO: 64593 - RNA, 25 nt, Artificial Sequence
  Description of Artificial Sequence: Synthetic oligonucleotide
acucccaauaacuaaugcuaagaaa

SEQ ID NO: 64594 - RNA, 25 nt, Artificial Sequence
  Description of Artificial Sequence: Synthetic oligonucleotide
aaugcuaagaaaugcugaaaaucaa

SEQ ID NO: 64595 - RNA, 25 nt, Artificial Sequence
  Description of Artificial Sequence: Synthetic oligonucleotide
gucuuucucuaaauaugauuacuuu

SEQ ID NO: 64596 - RNA, 25 nt, Artificial Sequence
  Description of Artificial Sequence: Synthetic oligonucleotide
ugaauuucaggcauuuuguucuaca

SEQ ID NO: 64597 - RNA, 25 nt, Artificial Sequence
  Description of Artificial Sequence: Synthetic oligonucleotide
cgauucccucucacccgggacucuc

SEQ ID NO: 64598 - RNA, 25 nt, Artificial Sequence
  Description of Artificial Sequence: Synthetic oligonucleotide
aggaaagugaaccuuuaaaguaaag

SEQ ID NO: 64599 - RNA, 25 nt, Artificial Sequence
  Description of Artificial Sequence: Synthetic oligonucleotide
gaggcugcaugcucuggaagccugg

SEQ ID NO: 64600 - RNA, 25 nt, Artificial Sequence
  Description of Artificial Sequence: Synthetic oligonucleotide
ucucugaacagaaaacaaaagagag

SEQ ID NO: 64601 - RNA, 25 nt, Artificial Sequence
  Description of Artificial Sequence: Synthetic oligonucleotide
aacuuggcuguaaucaguuaugccg

SEQ ID NO: 64602 - RNA, 25 nt, Artificial Sequence
  Description of Artificial Sequence: Synthetic oligonucleotide
agaagccaaaauuaaaagaagucca

SEQ ID NO: 64603 - RNA, 25 nt, Artificial Sequence
  Description of Artificial Sequence: Synthetic oligonucleotide
auuaaaagaaguccaggugagguua

SEQ ID NO: 64604 - RNA, 25 nt, Artificial Sequence
  Description of Artificial Sequence: Synthetic oligonucleotide
gaauccggauuaucgggaagaggac

SEQ ID NO: 64605 - RNA, 25 nt, Artificial Sequence
  Description of Artificial Sequence: Synthetic oligonucleotide
aaugugacaucaaagcaaguauugu

SEQ ID NO: 64606 - RNA, 25 nt, Artificial Sequence
  Description of Artificial Sequence: Synthetic oligonucleotide
caucaaagcaaguauuguagcacuc

SEQ ID NO: 64607 - RNA, 25 nt, Artificial Sequence
  Description of Artificial Sequence: Synthetic oligonucleotide
agagagagaaaacaaaaccacaaau

SEQ ID NO: 64608 - RNA, 25 nt, Artificial Sequence
  Description of Artificial Sequence: Synthetic oligonucleotide
ucgcuguaguauuuaagcccauaca

SEQ ID NO: 64609 - RNA, 25 nt, Artificial Sequence
  Description of Artificial Sequence: Synthetic oligonucleotide
cgcuguaguauuuaagcccauacag

SEQ ID NO: 64610 - RNA, 25 nt, Artificial Sequence
  Description of Artificial Sequence: Synthetic oligonucleotide
auuuaagcccauacagaaaccuucc

SEQ ID NO: 64611 - RNA, 25 nt, Artificial Sequence
  Description of Artificial Sequence: Synthetic oligonucleotide
auuaaaauaaacaugguauaccuac

SEQ ID NO: 64612 - RNA, 25 nt, Artificial Sequence
  Description of Artificial Sequence: Synthetic oligonucleotide
cuguucugaucggccaguuuucgga

SEQ ID NO: 64613 - RNA, 25 nt, Artificial Sequence
  Description of Artificial Sequence: Synthetic oligonucleotide
aaauaauuugaacuuuggaacaggg

SEQ ID NO: 64614 - RNA, 25 nt, Artificial Sequence
  Description of Artificial Sequence: Synthetic oligonucleotide
ugcgaccuuaauuuaacuuuccagu

SEQ ID NO: 64615 - RNA, 25 nt, Artificial Sequence
  Description of Artificial Sequence: Synthetic oligonucleotide
cugagaaagcuaaaguuugguuuug

SEQ ID NO: 64616 - RNA, 25 nt, Artificial Sequence
  Description of Artificial Sequence: Synthetic oligonucleotide
aguaaagaugcuacuucccacugua

SEQ ID NO: 64617 - RNA, 25 nt, Artificial Sequence
  Description of Artificial Sequence: Synthetic oligonucleotide
cugcuuaauugcugauaccauauga

SEQ ID NO: 64618 - RNA, 25 nt, Artificial Sequence
  Description of Artificial Sequence: Synthetic oligonucleotide
uaccauaugaaugaaacaugggcug

SEQ ID NO: 64619 - RNA, 25 nt, Artificial Sequence
  Description of Artificial Sequence: Synthetic oligonucleotide
aacuuucuuauccaacuuuuucaua

SEQ ID NO: 64620 - RNA, 25 nt, Artificial Sequence
  Description of Artificial Sequence: Synthetic oligonucleotide
ccuugcaugacaucaugaggccgga

SEQ ID NO: 64621 - RNA, 25 nt, Artificial Sequence
  Description of Artificial Sequence: Synthetic oligonucleotide
ugaauuuguauaugacugcauuugu

SEQ ID NO: 64622 - RNA, 25 nt, Artificial Sequence
  Description of Artificial Sequence: Synthetic oligonucleotide
gaauccuaguagaauguuuacuacc

SEQ ID NO: 64623 - RNA, 25 nt, Artificial Sequence
  Description of Artificial Sequence: Synthetic oligonucleotide
gaaagggaagaauuuuuugaugaaa

SEQ ID NO: 64624 - RNA, 25 nt, Artificial Sequence
  Description of Artificial Sequence: Synthetic oligonucleotide
uaucggcaugccagugugugaauuu

SEQ ID NO: 64625 - RNA, 25 nt, Artificial Sequence
  Description of Artificial Sequence: Synthetic oligonucleotide
caccucauaguagagcaauguaugu

SEQ ID NO: 64626 - RNA, 25 nt, Artificial Sequence
  Description of Artificial Sequence: Synthetic oligonucleotide
ccagaauugccaaagcacauauaua

SEQ ID NO: 64627 - RNA, 25 nt, Artificial Sequence
  Description of Artificial Sequence: Synthetic oligonucleotide
uggugaucuggguaauaguuucucc

SEQ ID NO: 64628 - RNA, 25 nt, Artificial Sequence
  Description of Artificial Sequence: Synthetic oligonucleotide
gaucuggguaauaguuucuccaaau

SEQ ID NO: 64629 - RNA, 25 nt, Artificial Sequence
  Description of Artificial Sequence: Synthetic oligonucleotide
ggaugugaugaauacuuccuagaaa

SEQ ID NO: 64630 - RNA, 25 nt, Artificial Sequence
  Description of Artificial Sequence: Synthetic oligonucleotide
cauuuccacagcuacaccauauaug

SEQ ID NO: 64631 - RNA, 25 nt, Artificial Sequence
  Description of Artificial Sequence: Synthetic oligonucleotide
acagcuacaccauauaugaauggag

SEQ ID NO: 64632 - RNA, 25 nt, Artificial Sequence
  Description of Artificial Sequence: Synthetic oligonucleotide
ugcaguucuuacacgagaagaagau

SEQ ID NO: 64633 - RNA, 25 nt, Artificial Sequence
  Description of Artificial Sequence: Synthetic oligonucleotide
acgagaagaagaucauuuacaggga

SEQ ID NO: 64634 - RNA, 25 nt, Artificial Sequence
  Description of Artificial Sequence: Synthetic oligonucleotide
cgagaagaagaucauuuacagggac

SEQ ID NO: 64635 - RNA, 25 nt, Artificial Sequence
  Description of Artificial Sequence: Synthetic oligonucleotide
aagaagaucauuuacagggaccuga

SEQ ID NO: 64636 - RNA, 25 nt, Artificial Sequence
  Description of Artificial Sequence: Synthetic oligonucleotide
agaggaagagguguuugacugcauc

SEQ ID NO: 64637 - RNA, 25 nt, Artificial Sequence
  Description of Artificial Sequence: Synthetic oligonucleotide
gaggaagagguguuugacugcaucg

SEQ ID NO: 64638 - RNA, 25 nt, Artificial Sequence
  Description of Artificial Sequence: Synthetic oligonucleotide
cuacuuugagggcgaguucacaggg

SEQ ID NO: 64639 - RNA, 25 nt, Artificial Sequence
  Description of Artificial Sequence: Synthetic oligonucleotide
agggcaucuccuggcaccucugucc

SEQ ID NO: 64640 - RNA, 25 nt, Artificial Sequence
  Description of Artificial Sequence: Synthetic oligonucleotide
ggagugauaugguuugucuuuuuaa

SEQ ID NO: 64641 - RNA, 25 nt, Artificial Sequence
  Description of Artificial Sequence: Synthetic oligonucleotide
gagugauaugguuugucuuuuuaag

SEQ ID NO: 64642 - RNA, 25 nt, Artificial Sequence
  Description of Artificial Sequence: Synthetic oligonucleotide
ugcaguaaagauccuaaagguuguc

SEQ ID NO: 64643 - RNA, 25 nt, Artificial Sequence
  Description of Artificial Sequence: Synthetic oligonucleotide
aguaaagauccuaaagguugucgac

SEQ ID NO: 64644 - RNA, 25 nt, Artificial Sequence
  Description of Artificial Sequence: Synthetic oligonucleotide
ugacaaaggacaaccuggcaauugu

SEQ ID NO: 64645 - RNA, 25 nt, Artificial Sequence
  Description of Artificial Sequence: Synthetic oligonucleotide
gcaauugugacccaguggugcgagg

SEQ ID NO: 64646 - RNA, 25 nt, Artificial Sequence
  Description of Artificial Sequence: Synthetic oligonucleotide
aacaucauccauagagacaugaaau

SEQ ID NO: 64647 - RNA, 25 nt, Artificial Sequence
  Description of Artificial Sequence: Synthetic oligonucleotide
ugaaauccaacaauauauuucucca

SEQ ID NO: 64648 - RNA, 25 nt, Artificial Sequence
  Description of Artificial Sequence: Synthetic oligonucleotide
aacaauauauuucuccaugaaggcu

SEQ ID NO: 64649 - RNA, 25 nt, Artificial Sequence
  Description of Artificial Sequence: Synthetic oligonucleotide
aacaguaaagucacgcuggaguggu

SEQ ID NO: 64650 - RNA, 25 nt, Artificial Sequence
  Description of Artificial Sequence: Synthetic oligonucleotide
ugugaagaaaguaaaggaagagagg

SEQ ID NO: 64651 - RNA, 25 nt, Artificial Sequence
  Description of Artificial Sequence: Synthetic oligonucleotide
cuuccgagccauccuugcaucgggc

SEQ ID NO: 64652 - RNA, 25 nt, Artificial Sequence
  Description of Artificial Sequence: Synthetic oligonucleotide
aauggagguugaauauccuacugug

SEQ ID NO: 64653 - RNA, 25 nt, Artificial Sequence
  Description of Artificial Sequence: Synthetic oligonucleotide
ggagguugaauauccuacuguguaa

SEQ ID NO: 64654 - RNA, 25 nt, Artificial Sequence
  Description of Artificial Sequence: Synthetic oligonucleotide
auuuugaguuuucccuuguagugua

SEQ ID NO: 64655 - RNA, 25 nt, Artificial Sequence
  Description of Artificial Sequence: Synthetic oligonucleotide
uauccuguuuguucuuuguugauug

SEQ ID NO: 64656 - RNA, 25 nt, Artificial Sequence
  Description of Artificial Sequence: Synthetic oligonucleotide
ccuguuuguucuuuguugauugaaa

SEQ ID NO: 64657 - RNA, 25 nt, Artificial Sequence
  Description of Artificial Sequence: Synthetic oligonucleotide
cucuacagccuucuuuuucuuccau

SEQ ID NO: 64658 - RNA, 25 nt, Artificial Sequence
  Description of Artificial Sequence: Synthetic oligonucleotide
ucuuccauagcuaaucuuccuucua

SEQ ID NO: 64659 - RNA, 25 nt, Artificial Sequence
  Description of Artificial Sequence: Synthetic oligonucleotide
auaaucuuccuguugaaugcuucau

SEQ ID NO: 64660 - RNA, 25 nt, Artificial Sequence
  Description of Artificial Sequence: Synthetic oligonucleotide
uaaucuuccuguugaaugcuucaug

SEQ ID NO: 64661 - RNA, 25 nt, Artificial Sequence
  Description of Artificial Sequence: Synthetic oligonucleotide
cuucaugacuugaauucuacuuuga

SEQ ID NO: 64662 - RNA, 25 nt, Artificial Sequence
  Description of Artificial Sequence: Synthetic oligonucleotide
aagagggagagaagcaacuacagac

SEQ ID NO: 64663 - RNA, 25 nt, Artificial Sequence
  Description of Artificial Sequence: Synthetic oligonucleotide
cgucuccuaccagaccaaggucaac

SEQ ID NO: 64664 - RNA, 25 nt, Artificial Sequence
  Description of Artificial Sequence: Synthetic oligonucleotide
gaucaaucggcccgacuaucucgac

SEQ ID NO: 64665 - RNA, 25 nt, Artificial Sequence
  Description of Artificial Sequence: Synthetic oligonucleotide
ggacgaacauccaaccuucccaaac

SEQ ID NO: 64666 - RNA, 25 nt, Artificial Sequence
  Description of Artificial Sequence: Synthetic oligonucleotide
agggucggaacccaagcuuagaacu

SEQ ID NO: 64667 - RNA, 25 nt, Artificial Sequence
  Description of Artificial Sequence: Synthetic oligonucleotide
ucggaacccaagcuuagaacuuuaa

SEQ ID NO: 64668 - RNA, 25 nt, Artificial Sequence
  Description of Artificial Sequence: Synthetic oligonucleotide
acccaagcuuagaacuuuaagcaac

SEQ ID NO: 64669 - RNA, 25 nt, Artificial Sequence
  Description of Artificial Sequence: Synthetic oligonucleotide
gaacuuuaagcaacaagaccaccac

SEQ ID NO: 64670 - RNA, 25 nt, Artificial Sequence
  Description of Artificial Sequence: Synthetic oligonucleotide
acuauucaguggcgagaaauaaagu

SEQ ID NO: 64671 - RNA, 25 nt, Artificial Sequence
  Description of Artificial Sequence: Synthetic oligonucleotide
cuauucaguggcgagaaauaaaguu

SEQ ID NO: 64672 - RNA, 25 nt, Artificial Sequence
  Description of Artificial Sequence: Synthetic oligonucleotide
aaacacagauaacaggaaaugaucc

SEQ ID NO: 64673 - RNA, 25 nt, Artificial Sequence
  Description of Artificial Sequence: Synthetic oligonucleotide
cuuaagaaaagagaagaaaugaaac

SEQ ID NO: 64674 - RNA, 25 nt, Artificial Sequence
  Description of Artificial Sequence: Synthetic oligonucleotide
cugaaggaguguguuuccauccucc

SEQ ID NO: 64675 - RNA, 25 nt, Artificial Sequence
  Description of Artificial Sequence: Synthetic oligonucleotide
ucaccgcgggacugaaaaucuuuga

SEQ ID NO: 64676 - RNA, 25 nt, Artificial Sequence
  Description of Artificial Sequence: Synthetic oligonucleotide
agcagaaauaagcgugccguucagg

SEQ ID NO: 64677 - RNA, 25 nt, Artificial Sequence
  Description of Artificial Sequence: Synthetic oligonucleotide
aagcgugccguucaggguccagaag

SEQ ID NO: 64678 - RNA, 25 nt, Artificial Sequence
  Description of Artificial Sequence: Synthetic oligonucleotide
agaaacagucacucaagacugcuug

SEQ ID NO: 64679 - RNA, 25 nt, Artificial Sequence
  Description of Artificial Sequence: Synthetic oligonucleotide
agaggaagaagguccaugucuuugg

SEQ ID NO: 64680 - RNA, 25 nt, Artificial Sequence
  Description of Artificial Sequence: Synthetic oligonucleotide
uguauucaaaauaugccugaaacac

SEQ ID NO: 64681 - RNA, 25 nt, Artificial Sequence
  Description of Artificial Sequence: Synthetic oligonucleotide
auuuuccucccuuucucuguaccuc

SEQ ID NO: 64682 - RNA, 25 nt, Artificial Sequence
  Description of Artificial Sequence: Synthetic oligonucleotide
caaagaaagauagagcaagacaaga

SEQ ID NO: 64683 - RNA, 25 nt, Artificial Sequence
  Description of Artificial Sequence: Synthetic oligonucleotide
aagaaagauagagcaagacaagaaa

SEQ ID NO: 64684 - RNA, 25 nt, Artificial Sequence
  Description of Artificial Sequence: Synthetic oligonucleotide
gaaagcauuuguuuguacaagaucc

SEQ ID NO: 64685 - RNA, 25 nt, Artificial Sequence
  Description of Artificial Sequence: Synthetic oligonucleotide
ugaguuaaacgaacguacuugcaga

SEQ ID NO: 64686 - RNA, 25 nt, Artificial Sequence
  Description of Artificial Sequence: Synthetic oligonucleotide
acugauacagaacgaucgauacaga

SEQ ID NO: 64687 - RNA, 25 nt, Artificial Sequence
  Description of Artificial Sequence: Synthetic oligonucleotide
auauuauauauauauaaaaauaaau

SEQ ID NO: 64688 - RNA, 25 nt, Artificial Sequence
  Description of Artificial Sequence: Synthetic oligonucleotide
auuauauauauauaaaaauaaauau

SEQ ID NO: 64689 - RNA, 25 nt, Artificial Sequence
  Description of Artificial Sequence: Synthetic oligonucleotide
ucacuggauguauuugacugcugug

SEQ ID NO: 64690 - RNA, 25 nt, Artificial Sequence
  Description of Artificial Sequence: Synthetic oligonucleotide
cagggaagaggaggagaugagagac

SEQ ID NO: 64691 - RNA, 25 nt, Artificial Sequence
  Description of Artificial Sequence: Synthetic oligonucleotide
augaucuuuuuuuugucccacuugg

SEQ ID NO: 64692 - RNA, 27 nt, Artificial Sequence
  Description of Artificial Sequence: Synthetic oligonucleotide
ggccgugaacuccucaucaaaauaccu

SEQ ID NO: 64693 - RNA, 27 nt, Artificial Sequence
  Description of Artificial Sequence: Synthetic oligonucleotide
uggugugauggugaucaucugggccgu

SEQ ID NO: 64694 - RNA, 27 nt, Artificial Sequence
  Description of Artificial Sequence: Synthetic oligonucleotide
aaacccgcaggauaguuuucuucccua

SEQ ID NO: 64695 - RNA, 27 nt, Artificial Sequence
  Description of Artificial Sequence: Synthetic oligonucleotide
caaacuggaugaaauaaauuaaaaccc

SEQ ID NO: 64696 - RNA, 27 nt, Artificial Sequence
  Description of Artificial Sequence: Synthetic oligonucleotide
agaaguccuuaacauuucccuacguga

SEQ ID NO: 64697 - RNA, 27 nt, Artificial Sequence
  Description of Artificial Sequence: Synthetic oligonucleotide
cucugucccacuggguaaacccuggcc

SEQ ID NO: 64698 - RNA, 27 nt, Artificial Sequence
  Description of Artificial Sequence: Synthetic oligonucleotide
cacaauaacaaauuuaaaccuugcucc

SEQ ID NO: 64699 - RNA, 27 nt, Artificial Sequence
  Description of Artificial Sequence: Synthetic oligonucleotide
aaaugcauuugaacaacauaauacaca

SEQ ID NO: 64700 - RNA, 27 nt, Artificial Sequence
  Description of Artificial Sequence: Synthetic oligonucleotide
ggcuuuccugucacaaagauuaaaaac

SEQ ID NO: 64701 - RNA, 27 nt, Artificial Sequence
  Description of Artificial Sequence: Synthetic oligonucleotide
agggcuuuccugucacaaagauuaaaa

SEQ ID NO: 64702 - RNA, 27 nt, Artificial Sequence
  Description of Artificial Sequence: Synthetic oligonucleotide
ggccaugcugggagacauaagcagcag

SEQ ID NO: 64703 - RNA, 27 nt, Artificial Sequence
  Description of Artificial Sequence: Synthetic oligonucleotide
ucagggagaagcuucugaaacacuucu

SEQ ID NO: 64704 - RNA, 27 nt, Artificial Sequence
  Description of Artificial Sequence: Synthetic oligonucleotide
aagggcuucuuccuuauugauggucag

SEQ ID NO: 64705 - RNA, 27 nt, Artificial Sequence
  Description of Artificial Sequence: Synthetic oligonucleotide
ugaagggcuucuuccuuauugaugguc

SEQ ID NO: 64706 - RNA, 27 nt, Artificial Sequence
  Description of Artificial Sequence: Synthetic oligonucleotide
cgcugaagggcuucuuccuuauugaug

SEQ ID NO: 64707 - RNA, 27 nt, Artificial Sequence
  Description of Artificial Sequence: Synthetic oligonucleotide
gccgcugaagggcuucuuccuuauuga

SEQ ID NO: 64708 - RNA, 27 nt, Artificial Sequence
  Description of Artificial Sequence: Synthetic oligonucleotide
acuggccgcugaagggcuucuuccuua

SEQ ID NO: 64709 - RNA, 27 nt, Artificial Sequence
  Description of Artificial Sequence: Synthetic oligonucleotide
cggagcuuuucaccuuuaguuaugcuu

SEQ ID NO: 64710 - RNA, 27 nt, Artificial Sequence
  Description of Artificial Sequence: Synthetic oligonucleotide
ccggagcuuuucaccuuuaguuaugcu

SEQ ID NO: 64711 - RNA, 27 nt, Artificial Sequence
  Description of Artificial Sequence: Synthetic oligonucleotide
cagacuguugacuggcgugauguaguu

SEQ ID NO: 64712 - RNA, 27 nt, Artificial Sequence
  Description of Artificial Sequence: Synthetic oligonucleotide
cuuuugaacucugcuuaaauccagugg

SEQ ID NO: 64713 - RNA, 27 nt, Artificial Sequence
  Description of Artificial Sequence: Synthetic oligonucleotide
gcuuuugaacucugcuuaaauccagug

SEQ ID NO: 64714 - RNA, 27 nt, Artificial Sequence
  Description of Artificial Sequence: Synthetic oligonucleotide
agggcuuuugaacucugcuuaaaucca

SEQ ID NO: 64715 - RNA, 27 nt, Artificial Sequence
  Description of Artificial Sequence: Synthetic oligonucleotide
aagggcuuuugaacucugcuuaaaucc

SEQ ID NO: 64716 - RNA, 27 nt, Artificial Sequence
  Description of Artificial Sequence: Synthetic oligonucleotide
ugaagggcuuuugaacucugcuuaaau

SEQ ID NO: 64717 - RNA, 27 nt, Artificial Sequence
  Description of Artificial Sequence: Synthetic oligonucleotide
cugaagggcuuuugaacucugcuuaaa

SEQ ID NO: 64718 - RNA, 27 nt, Artificial Sequence
  Description of Artificial Sequence: Synthetic oligonucleotide
cgcugaagggcuuuugaacucugcuua

SEQ ID NO: 64719 - RNA, 27 nt, Artificial Sequence
  Description of Artificial Sequence: Synthetic oligonucleotide
cgagcggcuucacucagacccugaggc

SEQ ID NO: 64720 - RNA, 27 nt, Artificial Sequence
  Description of Artificial Sequence: Synthetic oligonucleotide
uugacuggcgugauguaguugcuuggg

SEQ ID NO: 64721 - RNA, 27 nt, Artificial Sequence
  Description of Artificial Sequence: Synthetic oligonucleotide
cacgcaccaagaagcugccauugaucc

SEQ ID NO: 64722 - RNA, 27 nt, Artificial Sequence
  Description of Artificial Sequence: Synthetic oligonucleotide
cugaugaauccaaugugggcuggaauc

SEQ ID NO: 64723 - RNA, 27 nt, Artificial Sequence
  Description of Artificial Sequence: Synthetic oligonucleotide
cuuagguauuccacauucucagcugug

SEQ ID NO: 64724 - RNA, 27 nt, Artificial Sequence
  Description of Artificial Sequence: Synthetic oligonucleotide
ugagccucaaauuaggagauacguuuu

SEQ ID NO: 64725 - RNA, 27 nt, Artificial Sequence
  Description of Artificial Sequence: Synthetic oligonucleotide
ccaauuguagagaaauuauuuuaggaa

SEQ ID NO: 64726 - RNA, 27 nt, Artificial Sequence
  Description of Artificial Sequence: Synthetic oligonucleotide
ggcuccuaacuagcugaaucuuccaau

SEQ ID NO: 64727 - RNA, 27 nt, Artificial Sequence
  Description of Artificial Sequence: Synthetic oligonucleotide
guggauauugacuaggagaguuuaaaa

SEQ ID NO: 64728 - RNA, 27 nt, Artificial Sequence
  Description of Artificial Sequence: Synthetic oligonucleotide
ugugacugaacauaacuguaggcugaa

SEQ ID NO: 64729 - RNA, 27 nt, Artificial Sequence
  Description of Artificial Sequence: Synthetic oligonucleotide
guaugugugugugacugaacauaacug

SEQ ID NO: 64730 - RNA, 27 nt, Artificial Sequence
  Description of Artificial Sequence: Synthetic oligonucleotide
aagcaaaaggaacauuuuguaugugug

SEQ ID NO: 64731 - RNA, 27 nt, Artificial Sequence
  Description of Artificial Sequence: Synthetic oligonucleotide
aaaaauuacuuuaaaagcaaaaggaac

SEQ ID NO: 64732 - RNA, 27 nt, Artificial Sequence
  Description of Artificial Sequence: Synthetic oligonucleotide
ccauugacuguugcuucacaggucaga

SEQ ID NO: 64733 - RNA, 27 nt, Artificial Sequence
  Description of Artificial Sequence: Synthetic oligonucleotide
auugguuugucgaugugugagauaguu

SEQ ID NO: 64734 - RNA, 27 nt, Artificial Sequence
  Description of Artificial Sequence: Synthetic oligonucleotide
agugguagcaguacaauugaggacaag

SEQ ID NO: 64735 - RNA, 27 nt, Artificial Sequence
  Description of Artificial Sequence: Synthetic oligonucleotide
uaagaccgcuugccagcuacgguuuca

SEQ ID NO: 64736 - RNA, 27 nt, Artificial Sequence
  Description of Artificial Sequence: Synthetic oligonucleotide
agccgguaagaccgcuugccagcuacg

SEQ ID NO: 64737 - RNA, 27 nt, Artificial Sequence
  Description of Artificial Sequence: Synthetic oligonucleotide
gguaacccaucuuuuaaccauacaacu

SEQ ID NO: 64738 - RNA, 27 nt, Artificial Sequence
  Description of Artificial Sequence: Synthetic oligonucleotide
ucgcagguaacccaucuuuuaaccaua

SEQ ID NO: 64739 - RNA, 27 nt, Artificial Sequence
  Description of Artificial Sequence: Synthetic oligonucleotide
cucagcaagauuguauaauucccugca

SEQ ID NO: 64740 - RNA, 27 nt, Artificial Sequence
  Description of Artificial Sequence: Synthetic oligonucleotide
acuguuuuaugcucagcaagauuguau

SEQ ID NO: 64741 - RNA, 27 nt, Artificial Sequence
  Description of Artificial Sequence: Synthetic oligonucleotide
aggauaaaggacucuucauuauuggaa

SEQ ID NO: 64742 - RNA, 27 nt, Artificial Sequence
  Description of Artificial Sequence: Synthetic oligonucleotide
caacuugcguuggaacauccaaagugu

SEQ ID NO: 64743 - RNA, 27 nt, Artificial Sequence
  Description of Artificial Sequence: Synthetic oligonucleotide
augguuucaguuuaguggaagcauuua

SEQ ID NO: 64744 - RNA, 27 nt, Artificial Sequence
  Description of Artificial Sequence: Synthetic oligonucleotide
auauuuaacaaagucaaacuuucucac

SEQ ID NO: 64745 - RNA, 27 nt, Artificial Sequence
  Description of Artificial Sequence: Synthetic oligonucleotide
aacuuuuaauauacaguaguucuuuuc

SEQ ID NO: 64746 - RNA, 27 nt, Artificial Sequence
  Description of Artificial Sequence: Synthetic oligonucleotide
guuaagucaaaacccguauuucuaaag

SEQ ID NO: 64747 - RNA, 27 nt, Artificial Sequence
  Description of Artificial Sequence: Synthetic oligonucleotide
gugcugaguuugcuguacccauguuga

SEQ ID NO: 64748 - RNA, 27 nt, Artificial Sequence
  Description of Artificial Sequence: Synthetic oligonucleotide
ugaggucagcaucuucugugucuuuac

SEQ ID NO: 64749 - RNA, 27 nt, Artificial Sequence
  Description of Artificial Sequence: Synthetic oligonucleotide
gcgaucugaauaaaccucccuacuagc

SEQ ID NO: 64750 - RNA, 27 nt, Artificial Sequence
  Description of Artificial Sequence: Synthetic oligonucleotide
aucccagaacccugcugcagaaggcca

SEQ ID NO: 64751 - RNA, 27 nt, Artificial Sequence
  Description of Artificial Sequence: Synthetic oligonucleotide
cauaauuuccaauauguaccagaccuu

SEQ ID NO: 64752 - RNA, 27 nt, Artificial Sequence
  Description of Artificial Sequence: Synthetic oligonucleotide
cuagugcuuccaucggaaggacuaggu

SEQ ID NO: 64753 - RNA, 27 nt, Artificial Sequence
  Description of Artificial Sequence: Synthetic oligonucleotide
uccacauaaaaacaauauucacuggga

SEQ ID NO: 64754 - RNA, 27 nt, Artificial Sequence
  Description of Artificial Sequence: Synthetic oligonucleotide
ucuaccaauuccaacuugaauucauug

SEQ ID NO: 64755 - RNA, 27 nt, Artificial Sequence
  Description of Artificial Sequence: Synthetic oligonucleotide
ucuccaagucuaaaucuguguccugag

SEQ ID NO: 64756 - RNA, 27 nt, Artificial Sequence
  Description of Artificial Sequence: Synthetic oligonucleotide
uggaauacuguaacugugcuuugagga

SEQ ID NO: 64757 - RNA, 27 nt, Artificial Sequence
  Description of Artificial Sequence: Synthetic oligonucleotide
uuaauucaucagugguggcagugguag

SEQ ID NO: 64758 - RNA, 27 nt, Artificial Sequence
  Description of Artificial Sequence: Synthetic oligonucleotide
gugaugauguggcacuaguaguuucuu

SEQ ID NO: 64759 - RNA, 27 nt, Artificial Sequence
  Description of Artificial Sequence: Synthetic oligonucleotide
ucuguuuggugaggcuguccgacuuug

SEQ ID NO: 64760 - RNA, 27 nt, Artificial Sequence
  Description of Artificial Sequence: Synthetic oligonucleotide
ccaucauguuccauuuuucgcuuucuc

SEQ ID NO: 64761 - RNA, 27 nt, Artificial Sequence
  Description of Artificial Sequence: Synthetic oligonucleotide
gcagucuacaugcuaaaucagagggua

SEQ ID NO: 64762 - RNA, 27 nt, Artificial Sequence
  Description of Artificial Sequence: Synthetic oligonucleotide
cauaaauagauccuuaaauagcucaaa

SEQ ID NO: 64763 - RNA, 27 nt, Artificial Sequence
  Description of Artificial Sequence: Synthetic oligonucleotide
ugauaauagugcuuuuucaccuuuuuc

SEQ ID NO: 64764 - RNA, 27 nt, Artificial Sequence
  Description of Artificial Sequence: Synthetic oligonucleotide
gcagaacugauaauagugcuuuuucac

SEQ ID NO: 64765 - RNA, 27 nt, Artificial Sequence
  Description of Artificial Sequence: Synthetic oligonucleotide
guagguuuaaucuuucuuuucagccau

SEQ ID NO: 64766 - RNA, 27 nt, Artificial Sequence
  Description of Artificial Sequence: Synthetic oligonucleotide
agaaggauuuuauuauaaggguuuaau

SEQ ID NO: 64767 - RNA, 27 nt, Artificial Sequence
  Description of Artificial Sequence: Synthetic oligonucleotide
gucuacagcauuggcuaauaguaugaa

SEQ ID NO: 64768 - RNA, 27 nt, Artificial Sequence
  Description of Artificial Sequence: Synthetic oligonucleotide
cuauuccuaucaaaaugcuucugucua

SEQ ID NO: 64769 - RNA, 27 nt, Artificial Sequence
  Description of Artificial Sequence: Synthetic oligonucleotide
ucagggccauuaucuuauuugcucuau

SEQ ID NO: 64770 - RNA, 27 nt, Artificial Sequence
  Description of Artificial Sequence: Synthetic oligonucleotide
ugcuugaggaagagaaaaauguugguc

SEQ ID NO: 64771 - RNA, 27 nt, Artificial Sequence
  Description of Artificial Sequence: Synthetic oligonucleotide
ugggcugaacuuuucucauacuuaaag

SEQ ID NO: 64772 - RNA, 27 nt, Artificial Sequence
  Description of Artificial Sequence: Synthetic oligonucleotide
gguucagcagccaucuuuauuccugcg

SEQ ID NO: 64773 - RNA, 27 nt, Artificial Sequence
  Description of Artificial Sequence: Synthetic oligonucleotide
ugaagagaacuuggucauucaaauuuc

SEQ ID NO: 64774 - RNA, 27 nt, Artificial Sequence
  Description of Artificial Sequence: Synthetic oligonucleotide
cucuaggcuggcuaucuuuauacauac

SEQ ID NO: 64775 - RNA, 27 nt, Artificial Sequence
  Description of Artificial Sequence: Synthetic oligonucleotide
acacuucacagagauaguuacagccau

SEQ ID NO: 64776 - RNA, 27 nt, Artificial Sequence
  Description of Artificial Sequence: Synthetic oligonucleotide
uugaaauuuucucacacuucacagaga

SEQ ID NO: 64777 - RNA, 27 nt, Artificial Sequence
  Description of Artificial Sequence: Synthetic oligonucleotide
ucaggaggauucauuuccuuaaaggaa

SEQ ID NO: 64778 - RNA, 27 nt, Artificial Sequence
  Description of Artificial Sequence: Synthetic oligonucleotide
auaugaugucacuuuuuguauccuuga

SEQ ID NO: 64779 - RNA, 27 nt, Artificial Sequence
  Description of Artificial Sequence: Synthetic oligonucleotide
uaugaugaagauucaaauugcaucuua

SEQ ID NO: 64780 - RNA, 27 nt, Artificial Sequence
  Description of Artificial Sequence: Synthetic oligonucleotide
uuaauagcuagucuucguuuugaacag

SEQ ID NO: 64781 - RNA, 27 nt, Artificial Sequence
  Description of Artificial Sequence: Synthetic oligonucleotide
auuuuuaguagagaugagguuucacca

SEQ ID NO: 64782 - RNA, 27 nt, Artificial Sequence
  Description of Artificial Sequence: Synthetic oligonucleotide
aggcgagauagagcuucucuuucguuc

SEQ ID NO: 64783 - RNA, 27 nt, Artificial Sequence
  Description of Artificial Sequence: Synthetic oligonucleotide
aacuggaccgaaggcgcuuguggagaa

SEQ ID NO: 64784 - RNA, 27 nt, Artificial Sequence
  Description of Artificial Sequence: Synthetic oligonucleotide
gcggcuacaucuuuggaaucuucuccu

SEQ ID NO: 64785 - RNA, 27 nt, Artificial Sequence
  Description of Artificial Sequence: Synthetic oligonucleotide
caagucuccucauugaauccagauugg

SEQ ID NO: 64786 - RNA, 27 nt, Artificial Sequence
  Description of Artificial Sequence: Synthetic oligonucleotide
uccucacuacucucaaaucuguucugg

SEQ ID NO: 64787 - RNA, 27 nt, Artificial Sequence
  Description of Artificial Sequence: Synthetic oligonucleotide
uuuguacucaucugcacagcucuggcu

SEQ ID NO: 64788 - RNA, 27 nt, Artificial Sequence
  Description of Artificial Sequence: Synthetic oligonucleotide
gcccauuaacaacaacaaucugaggug

SEQ ID NO: 64789 - RNA, 27 nt, Artificial Sequence
  Description of Artificial Sequence: Synthetic oligonucleotide
aauaaauuaaaaauaauuaaaauagug

SEQ ID NO: 64790 - RNA, 27 nt, Artificial Sequence
  Description of Artificial Sequence: Synthetic oligonucleotide
cauauuuaaauauuaauaaauuaaaaa

SEQ ID NO: 64791 - RNA, 27 nt, Artificial Sequence
  Description of Artificial Sequence: Synthetic oligonucleotide
gaaacaaaggauauucaaacugcauag

SEQ ID NO: 64792 - RNA, 27 nt, Artificial Sequence
  Description of Artificial Sequence: Synthetic oligonucleotide
caaacacuuagacgccagcagcauggg

SEQ ID NO: 64793 - RNA, 27 nt, Artificial Sequence
  Description of Artificial Sequence: Synthetic oligonucleotide
uuugucacaggugaaaugcacaucuga

SEQ ID NO: 64794 - RNA, 27 nt, Artificial Sequence
  Description of Artificial Sequence: Synthetic oligonucleotide
uaauucagccuggcacagguuuugauc

SEQ ID NO: 64795 - RNA, 27 nt, Artificial Sequence
  Description of Artificial Sequence: Synthetic oligonucleotide
auuguaagaaugacuacccacauucac

SEQ ID NO: 64796 - RNA, 27 nt, Artificial Sequence
  Description of Artificial Sequence: Synthetic oligonucleotide
caauuguaagaaugacuacccacauuc

SEQ ID NO: 64797 - RNA, 27 nt, Artificial Sequence
  Description of Artificial Sequence: Synthetic oligonucleotide
guacacucucugaugcucauuuucaua

SEQ ID NO: 64798 - RNA, 27 nt, Artificial Sequence
  Description of Artificial Sequence: Synthetic oligonucleotide
cugcugaguucuacaugaaaagcaaau

SEQ ID NO: 64799 - RNA, 27 nt, Artificial Sequence
  Description of Artificial Sequence: Synthetic oligonucleotide
uacugaaaauaaauauagaaauacaac

SEQ ID NO: 64800 - RNA, 27 nt, Artificial Sequence
  Description of Artificial Sequence: Synthetic oligonucleotide
uuccauuuaagaaacauuaaucaaaac

SEQ ID NO: 64801 - RNA, 27 nt, Artificial Sequence
  Description of Artificial Sequence: Synthetic oligonucleotide
acaauuuuaggcacuauacacguuguu

SEQ ID NO: 64802 - RNA, 27 nt, Artificial Sequence
  Description of Artificial Sequence: Synthetic oligonucleotide
ccagauguuaguagccaaggauauggu

SEQ ID NO: 64803 - RNA, 27 nt, Artificial Sequence
  Description of Artificial Sequence: Synthetic oligonucleotide
agcucacagucuccagauguuaguagc

SEQ ID NO: 64804 - RNA, 27 nt, Artificial Sequence
  Description of Artificial Sequence: Synthetic oligonucleotide
auuaauaaaaagcacacaacuuauggc

SEQ ID NO: 64805 - RNA, 27 nt, Artificial Sequence
  Description of Artificial Sequence: Synthetic oligonucleotide
aauguaagaagagccaaaaugaugcau

SEQ ID NO: 64806 - RNA, 27 nt, Artificial Sequence
  Description of Artificial Sequence: Synthetic oligonucleotide
acauuuuuacaaauguaagaagagcca

SEQ ID NO: 64807 - RNA, 27 nt, Artificial Sequence
  Description of Artificial Sequence: Synthetic oligonucleotide
aauaugaauuaagaugaccuaaucugu

SEQ ID NO: 64808 - RNA, 27 nt, Artificial Sequence
  Description of Artificial Sequence: Synthetic oligonucleotide
ucaugauuaguucuuucaauuccaucc

SEQ ID NO: 64809 - RNA, 27 nt, Artificial Sequence
  Description of Artificial Sequence: Synthetic oligonucleotide
cccaagagcagaaggaaugagugugca

SEQ ID NO: 64810 - RNA, 27 nt, Artificial Sequence
  Description of Artificial Sequence: Synthetic oligonucleotide
cucaaagcuacugguuaccucuacacc

SEQ ID NO: 64811 - RNA, 27 nt, Artificial Sequence
  Description of Artificial Sequence: Synthetic oligonucleotide
ugaaauauuacguggcaugugguuggg

SEQ ID NO: 64812 - RNA, 27 nt, Artificial Sequence
  Description of Artificial Sequence: Synthetic oligonucleotide
agugaagagaauaacuuguuuccgaag

SEQ ID NO: 64813 - RNA, 27 nt, Artificial Sequence
  Description of Artificial Sequence: Synthetic oligonucleotide
uuucuuagcauuaguuauugggaguga

SEQ ID NO: 64814 - RNA, 27 nt, Artificial Sequence
  Description of Artificial Sequence: Synthetic oligonucleotide
uugauuuucagcauuucuuagcauuag

SEQ ID NO: 64815 - RNA, 27 nt, Artificial Sequence
  Description of Artificial Sequence: Synthetic oligonucleotide
aaaguaaucauauuuagagaaagacag

SEQ ID NO: 64816 - RNA, 27 nt, Artificial Sequence
  Description of Artificial Sequence: Synthetic oligonucleotide
uguagaacaaaaugccugaaauucagc

SEQ ID NO: 64817 - RNA, 27 nt, Artificial Sequence
  Description of Artificial Sequence: Synthetic oligonucleotide
gagagucccgggugagagggaaucgcc

SEQ ID NO: 64818 - RNA, 27 nt, Artificial Sequence
  Description of Artificial Sequence: Synthetic oligonucleotide
cuuuacuuuaaagguucacuuuccuug

SEQ ID NO: 64819 - RNA, 27 nt, Artificial Sequence
  Description of Artificial Sequence: Synthetic oligonucleotide
ccaggcuuccagagcaugcagccuccu

SEQ ID NO: 64820 - RNA, 27 nt, Artificial Sequence
  Description of Artificial Sequence: Synthetic oligonucleotide
cucucuuuuguuuucuguucagagaaa

SEQ ID NO: 64821 - RNA, 27 nt, Artificial Sequence
  Description of Artificial Sequence: Synthetic oligonucleotide
cggcauaacugauuacagccaaguuca

SEQ ID NO: 64822 - RNA, 27 nt, Artificial Sequence
  Description of Artificial Sequence: Synthetic oligonucleotide
uggacuucuuuuaauuuuggcuucuuc

SEQ ID NO: 64823 - RNA, 27 nt, Artificial Sequence
  Description of Artificial Sequence: Synthetic oligonucleotide
uaaccucaccuggacuucuuuuaauuu

SEQ ID NO: 64824 - RNA, 27 nt, Artificial Sequence
  Description of Artificial Sequence: Synthetic oligonucleotide
guccucuucccgauaauccggauucag

SEQ ID NO: 64825 - RNA, 27 nt, Artificial Sequence
  Description of Artificial Sequence: Synthetic oligonucleotide
acaauacuugcuuugaugucacauuaa

SEQ ID NO: 64826 - RNA, 27 nt, Artificial Sequence
  Description of Artificial Sequence: Synthetic oligonucleotide
gagugcuacaauacuugcuuugauguc

SEQ ID NO: 64827 - RNA, 27 nt, Artificial Sequence
  Description of Artificial Sequence: Synthetic oligonucleotide
auuugugguuuuguuuucucucucucu

SEQ ID NO: 64828 - RNA, 27 nt, Artificial Sequence
  Description of Artificial Sequence: Synthetic oligonucleotide
uguaugggcuuaaauacuacagcgagg

SEQ ID NO: 64829 - RNA, 27 nt, Artificial Sequence
  Description of Artificial Sequence: Synthetic oligonucleotide
cuguaugggcuuaaauacuacagcgag

SEQ ID NO: 64830 - RNA, 27 nt, Artificial Sequence
  Description of Artificial Sequence: Synthetic oligonucleotide
ggaagguuucuguaugggcuuaaauac

SEQ ID NO: 64831 - RNA, 27 nt, Artificial Sequence
  Description of Artificial Sequence: Synthetic oligonucleotide
guagguauaccauguuuauuuuaauac

SEQ ID NO: 64832 - RNA, 27 nt, Artificial Sequence
  Description of Artificial Sequence: Synthetic oligonucleotide
uccgaaaacuggccgaucagaacagcc

SEQ ID NO: 64833 - RNA, 27 nt, Artificial Sequence
  Description of Artificial Sequence: Synthetic oligonucleotide
cccuguuccaaaguucaaauuauuugu

SEQ ID NO: 64834 - RNA, 27 nt, Artificial Sequence
  Description of Artificial Sequence: Synthetic oligonucleotide
acuggaaaguuaaauuaaggucgcaau

SEQ ID NO: 64835 - RNA, 27 nt, Artificial Sequence
  Description of Artificial Sequence: Synthetic oligonucleotide
caaaaccaaacuuuagcuuucucagcc

SEQ ID NO: 64836 - RNA, 27 nt, Artificial Sequence
  Description of Artificial Sequence: Synthetic oligonucleotide
uacagugggaaguagcaucuuuacuuu

SEQ ID NO: 64837 - RNA, 27 nt, Artificial Sequence
  Description of Artificial Sequence: Synthetic oligonucleotide
ucauaugguaucagcaauuaagcagua

SEQ ID NO: 64838 - RNA, 27 nt, Artificial Sequence
  Description of Artificial Sequence: Synthetic oligonucleotide
cagcccauguuucauucauaugguauc

SEQ ID NO: 64839 - RNA, 27 nt, Artificial Sequence
  Description of Artificial Sequence: Synthetic oligonucleotide
uaugaaaaaguuggauaagaaaguugg

SEQ ID NO: 64840 - RNA, 27 nt, Artificial Sequence
  Description of Artificial Sequence: Synthetic oligonucleotide
uccggccucaugaugucaugcaaggcu

SEQ ID NO: 64841 - RNA, 27 nt, Artificial Sequence
  Description of Artificial Sequence: Synthetic oligonucleotide
acaaaugcagucauauacaaauucagg

SEQ ID NO: 64842 - RNA, 27 nt, Artificial Sequence
  Description of Artificial Sequence: Synthetic oligonucleotide
gguaguaaacauucuacuaggauucuu

SEQ ID NO: 64843 - RNA, 27 nt, Artificial Sequence
  Description of Artificial Sequence: Synthetic oligonucleotide
uuucaucaaaaaauucuucccuuucug

SEQ ID NO: 64844 - RNA, 27 nt, Artificial Sequence
  Description of Artificial Sequence: Synthetic oligonucleotide
aaauucacacacuggcaugccgauagc

SEQ ID NO: 64845 - RNA, 27 nt, Artificial Sequence
  Description of Artificial Sequence: Synthetic oligonucleotide
acauacauugcucuacuaugaggugaa

SEQ ID NO: 64846 - RNA, 27 nt, Artificial Sequence
  Description of Artificial Sequence: Synthetic oligonucleotide
uauauaugugcuuuggcaauucuggug

SEQ ID NO: 64847 - RNA, 27 nt, Artificial Sequence
  Description of Artificial Sequence: Synthetic oligonucleotide
ggagaaacuauuacccagaucaccacu

SEQ ID NO: 64848 - RNA, 27 nt, Artificial Sequence
  Description of Artificial Sequence: Synthetic oligonucleotide
auuuggagaaacuauuacccagaucac

SEQ ID NO: 64849 - RNA, 27 nt, Artificial Sequence
  Description of Artificial Sequence: Synthetic oligonucleotide
uuucuaggaaguauucaucacauccac

SEQ ID NO: 64850 - RNA, 27 nt, Artificial Sequence
  Description of Artificial Sequence: Synthetic oligonucleotide
cauauaugguguagcuguggaaaugcg

SEQ ID NO: 64851 - RNA, 27 nt, Artificial Sequence
  Description of Artificial Sequence: Synthetic oligonucleotide
cuccauucauauaugguguagcugugg

SEQ ID NO: 64852 - RNA, 27 nt, Artificial Sequence
  Description of Artificial Sequence: Synthetic oligonucleotide
aucuucuucucguguaagaacugcagc

SEQ ID NO: 64853 - RNA, 27 nt, Artificial Sequence
  Description of Artificial Sequence: Synthetic oligonucleotide
ucccuguaaaugaucuucuucucgugu

SEQ ID NO: 64854 - RNA, 27 nt, Artificial Sequence
  Description of Artificial Sequence: Synthetic oligonucleotide
gucccuguaaaugaucuucuucucgug

SEQ ID NO: 64855 - RNA, 27 nt, Artificial Sequence
  Description of Artificial Sequence: Synthetic oligonucleotide
ucaggucccuguaaaugaucuucuucu

SEQ ID NO: 64856 - RNA, 27 nt, Artificial Sequence
  Description of Artificial Sequence: Synthetic oligonucleotide
gaugcagucaaacaccucuuccucugu

SEQ ID NO: 64857 - RNA, 27 nt, Artificial Sequence
  Description of Artificial Sequence: Synthetic oligonucleotide
cgaugcagucaaacaccucuuccucug

SEQ ID NO: 64858 - RNA, 27 nt, Artificial Sequence
  Description of Artificial Sequence: Synthetic oligonucleotide
cccugugaacucgcccucaaaguagcg

SEQ ID NO: 64859 - RNA, 27 nt, Artificial Sequence
  Description of Artificial Sequence: Synthetic oligonucleotide
ggacagaggugccaggagaugcccuca

SEQ ID NO: 64860 - RNA, 27 nt, Artificial Sequence
  Description of Artificial Sequence: Synthetic oligonucleotide
uuaaaaagacaaaccauaucacuccuu

SEQ ID NO: 64861 - RNA, 27 nt, Artificial Sequence
  Description of Artificial Sequence: Synthetic oligonucleotide
cuuaaaaagacaaaccauaucacuccu

SEQ ID NO: 64862 - RNA, 27 nt, Artificial Sequence
  Description of Artificial Sequence: Synthetic oligonucleotide
gacaaccuuuaggaucuuuacugcaac

SEQ ID NO: 64863 - RNA, 27 nt, Artificial Sequence
  Description of Artificial Sequence: Synthetic oligonucleotide
gucgacaaccuuuaggaucuuuacugc

SEQ ID NO: 64864 - RNA, 27 nt, Artificial Sequence
  Description of Artificial Sequence: Synthetic oligonucleotide
acaauugccagguuguccuuugucaug

SEQ ID NO: 64865 - RNA, 27 nt, Artificial Sequence
  Description of Artificial Sequence: Synthetic oligonucleotide
ccucgcaccacugggucacaauugcca

SEQ ID NO: 64866 - RNA, 27 nt, Artificial Sequence
  Description of Artificial Sequence: Synthetic oligonucleotide
auuucaugucucuauggaugauguucu

SEQ ID NO: 64867 - RNA, 27 nt, Artificial Sequence
  Description of Artificial Sequence: Synthetic oligonucleotide
uggagaaauauauuguuggauuucaug

SEQ ID NO: 64868 - RNA, 27 nt, Artificial Sequence
  Description of Artificial Sequence: Synthetic oligonucleotide
agccuucauggagaaauauauuguugg

SEQ ID NO: 64869 - RNA, 27 nt, Artificial Sequence
  Description of Artificial Sequence: Synthetic oligonucleotide
accacuccagcgugacuuuacuguugc

SEQ ID NO: 64870 - RNA, 27 nt, Artificial Sequence
  Description of Artificial Sequence: Synthetic oligonucleotide
ccucucuuccuuuacuuucuucacaca

SEQ ID NO: 64871 - RNA, 27 nt, Artificial Sequence
  Description of Artificial Sequence: Synthetic oligonucleotide
gcccgaugcaaggauggcucggaagcg

SEQ ID NO: 64872 - RNA, 27 nt, Artificial Sequence
  Description of Artificial Sequence: Synthetic oligonucleotide
cacaguaggauauucaaccuccauuuc

SEQ ID NO: 64873 - RNA, 27 nt, Artificial Sequence
  Description of Artificial Sequence: Synthetic oligonucleotide
uuacacaguaggauauucaaccuccau

SEQ ID NO: 64874 - RNA, 27 nt, Artificial Sequence
  Description of Artificial Sequence: Synthetic oligonucleotide
uacacuacaagggaaaacucaaaaucu

SEQ ID NO: 64875 - RNA, 27 nt, Artificial Sequence
  Description of Artificial Sequence: Synthetic oligonucleotide
caaucaacaaagaacaaacaggauaaa

SEQ ID NO: 64876 - RNA, 27 nt, Artificial Sequence
  Description of Artificial Sequence: Synthetic oligonucleotide
uuucaaucaacaaagaacaaacaggau

SEQ ID NO: 64877 - RNA, 27 nt, Artificial Sequence
  Description of Artificial Sequence: Synthetic oligonucleotide
auggaagaaaaagaaggcuguagagaa

SEQ ID NO: 64878 - RNA, 27 nt, Artificial Sequence
  Description of Artificial Sequence: Synthetic oligonucleotide
uagaaggaagauuagcuauggaagaaa

SEQ ID NO: 64879 - RNA, 27 nt, Artificial Sequence
  Description of Artificial Sequence: Synthetic oligonucleotide
augaagcauucaacaggaagauuauuu

SEQ ID NO: 64880 - RNA, 27 nt, Artificial Sequence
  Description of Artificial Sequence: Synthetic oligonucleotide
caugaagcauucaacaggaagauuauu

SEQ ID NO: 64881 - RNA, 27 nt, Artificial Sequence
  Description of Artificial Sequence: Synthetic oligonucleotide
ucaaaguagaauucaagucaugaagca

SEQ ID NO: 64882 - RNA, 27 nt, Artificial Sequence
  Description of Artificial Sequence: Synthetic oligonucleotide
gucuguaguugcuucucucccucuuag

SEQ ID NO: 64883 - RNA, 27 nt, Artificial Sequence
  Description of Artificial Sequence: Synthetic oligonucleotide
guugaccuuggucugguaggagacggc

SEQ ID NO: 64884 - RNA, 27 nt, Artificial Sequence
  Description of Artificial Sequence: Synthetic oligonucleotide
gucgagauagucgggccgauugaucuc

SEQ ID NO: 64885 - RNA, 27 nt, Artificial Sequence
  Description of Artificial Sequence: Synthetic oligonucleotide
guuugggaagguuggauguucguccuc

SEQ ID NO: 64886 - RNA, 27 nt, Artificial Sequence
  Description of Artificial Sequence: Synthetic oligonucleotide
aguucuaagcuuggguuccgacccuaa

SEQ ID NO: 64887 - RNA, 27 nt, Artificial Sequence
  Description of Artificial Sequence: Synthetic oligonucleotide
uuaaaguucuaagcuuggguuccgacc

SEQ ID NO: 64888 - RNA, 27 nt, Artificial Sequence
  Description of Artificial Sequence: Synthetic oligonucleotide
guugcuuaaaguucuaagcuuggguuc

SEQ ID NO: 64889 - RNA, 27 nt, Artificial Sequence
  Description of Artificial Sequence: Synthetic oligonucleotide
gugguggucuuguugcuuaaaguucua

SEQ ID NO: 64890 - RNA, 27 nt, Artificial Sequence
  Description of Artificial Sequence: Synthetic oligonucleotide
acuuuauuucucgccacugaauaguag

SEQ ID NO: 64891 - RNA, 27 nt, Artificial Sequence
  Description of Artificial Sequence: Synthetic oligonucleotide
aacuuuauuucucgccacugaauagua

SEQ ID NO: 64892 - RNA, 27 nt, Artificial Sequence
  Description of Artificial Sequence: Synthetic oligonucleotide
ggaucauuuccuguuaucuguguuugu

SEQ ID NO: 64893 - RNA, 27 nt, Artificial Sequence
  Description of Artificial Sequence: Synthetic oligonucleotide
guuucauuucuucucuuuucuuaaggc

SEQ ID NO: 64894 - RNA, 27 nt, Artificial Sequence
  Description of Artificial Sequence: Synthetic oligonucleotide
ggaggauggaaacacacuccuucaguu

SEQ ID NO: 64895 - RNA, 27 nt, Artificial Sequence
  Description of Artificial Sequence: Synthetic oligonucleotide
ucaaagauuuucagucccgcggugaca

SEQ ID NO: 64896 - RNA, 27 nt, Artificial Sequence
  Description of Artificial Sequence: Synthetic oligonucleotide
ccugaacggcacgcuuauuucugcugu

SEQ ID NO: 64897 - RNA, 27 nt, Artificial Sequence
  Description of Artificial Sequence: Synthetic oligonucleotide
cuucuggacccugaacggcacgcuuau

SEQ ID NO: 64898 - RNA, 27 nt, Artificial Sequence
  Description of Artificial Sequence: Synthetic oligonucleotide
caagcagucuugagugacuguuucuuc

SEQ ID NO: 64899 - RNA, 27 nt, Artificial Sequence
  Description of Artificial Sequence: Synthetic oligonucleotide
ccaaagacauggaccuucuuccucuga

SEQ ID NO: 64900 - RNA, 27 nt, Artificial Sequence
  Description of Artificial Sequence: Synthetic oligonucleotide
guguuucaggcauauuuugaauacauc

SEQ ID NO: 64901 - RNA, 27 nt, Artificial Sequence
  Description of Artificial Sequence: Synthetic oligonucleotide
gagguacagagaaagggaggaaaauag

SEQ ID NO: 64902 - RNA, 27 nt, Artificial Sequence
  Description of Artificial Sequence: Synthetic oligonucleotide
ucuugucuugcucuaucuuucuuuggu

SEQ ID NO: 64903 - RNA, 27 nt, Artificial Sequence
  Description of Artificial Sequence: Synthetic oligonucleotide
uuucuugucuugcucuaucuuucuuug

SEQ ID NO: 64904 - RNA, 27 nt, Artificial Sequence
  Description of Artificial Sequence: Synthetic oligonucleotide
ggaucuuguacaaacaaaugcuuucuc

SEQ ID NO: 64905 - RNA, 27 nt, Artificial Sequence
  Description of Artificial Sequence: Synthetic oligonucleotide
ucugcaaguacguucguuuaacucaag

SEQ ID NO: 64906 - RNA, 27 nt, Artificial Sequence
  Description of Artificial Sequence: Synthetic oligonucleotide
ucuguaucgaucguucuguaucagucu

SEQ ID NO: 64907 - RNA, 27 nt, Artificial Sequence
  Description of Artificial Sequence: Synthetic oligonucleotide
auuuauuuuuauauauauauaauauau

SEQ ID NO: 64908 - RNA, 27 nt, Artificial Sequence
  Description of Artificial Sequence: Synthetic oligonucleotide
auauuuauuuuuauauauauauaauau

SEQ ID NO: 64909 - RNA, 27 nt, Artificial Sequence
  Description of Artificial Sequence: Synthetic oligonucleotide
cacagcagucaaauacauccagugaag

SEQ ID NO: 64910 - RNA, 27 nt, Artificial Sequence
  Description of Artificial Sequence: Synthetic oligonucleotide
gucucucaucuccuccucuucccuguc

SEQ ID NO: 64911 - RNA, 27 nt, Artificial Sequence
  Description of Artificial Sequence: Synthetic oligonucleotide
ccaagugggacaaaaaaaagaucaugc

SEQ ID NO: 64912 - RNA, 14 nt, Artificial Sequence
  Description of Artificial Sequence: Synthetic oligonucleotide
guauuuugaugagg

SEQ ID NO: 64913 - RNA, 12 nt, Artificial Sequence
  Description of Artificial Sequence: Synthetic oligonucleotide
ggcccagaugau

SEQ ID NO: 64914 - RNA, 14 nt, Artificial Sequence
  Description of Artificial Sequence: Synthetic oligonucleotide
gggaagaaaacuau

SEQ ID NO: 64915 - RNA, 15 nt, Artificial Sequence
  Description of Artificial Sequence: Synthetic oligonucleotide
guuuuaauuuauuuc

SEQ ID NO: 64916 - RNA, 12 nt, Artificial Sequence
  Description of Artificial Sequence: Synthetic oligonucleotide
acguagggaaau

SEQ ID NO: 64917 - RNA, 12 nt, Artificial Sequence
  Description of Artificial Sequence: Synthetic oligonucleotide
ccaggguuuacc

SEQ ID NO: 64918 - RNA, 11 nt, Artificial Sequence
  Description of Artificial Sequence: Synthetic oligonucleotide
agcaagguuua

SEQ ID NO: 64919 - RNA, 12 nt, Artificial Sequence
  Description of Artificial Sequence: Synthetic oligonucleotide
uguauuauguug

SEQ ID NO: 64920 - RNA, 15 nt, Artificial Sequence
  Description of Artificial Sequence: Synthetic oligonucleotide
uuuuaaucuuuguga

SEQ ID NO: 64921 - RNA, 14 nt, Artificial Sequence
  Description of Artificial Sequence: Synthetic oligonucleotide
uuaaucuuugugac

SEQ ID NO: 64922 - RNA, 13 nt, Artificial Sequence
  Description of Artificial Sequence: Synthetic oligonucleotide
gcugcuuaugucu

SEQ ID NO: 64923 - RNA, 14 nt, Artificial Sequence
  Description of Artificial Sequence: Synthetic oligonucleotide
aaguguuucagaag

SEQ ID NO: 64924 - RNA, 13 nt, Artificial Sequence
  Description of Artificial Sequence: Synthetic oligonucleotide
gaccaucaauaag

SEQ ID NO: 64925 - RNA, 13 nt, Artificial Sequence
  Description of Artificial Sequence: Synthetic oligonucleotide
ccaucaauaagga

SEQ ID NO: 64926 - RNA, 14 nt, Artificial Sequence
  Description of Artificial Sequence: Synthetic oligonucleotide
ucaauaaggaagaa

SEQ ID NO: 64927 - RNA, 14 nt, Artificial Sequence
  Description of Artificial Sequence: Synthetic oligonucleotide
aauaaggaagaagc

SEQ ID NO: 64928 - RNA, 13 nt, Artificial Sequence
  Description of Artificial Sequence: Synthetic oligonucleotide
aggaagaagcccu

SEQ ID NO: 64929 - RNA, 13 nt, Artificial Sequence
  Description of Artificial Sequence: Synthetic oligonucleotide
gcauaacuaaagg

SEQ ID NO: 64930 - RNA, 14 nt, Artificial Sequence
  Description of Artificial Sequence: Synthetic oligonucleotide
cauaacuaaaggug

SEQ ID NO: 64931 - RNA, 12 nt, Artificial Sequence
  Description of Artificial Sequence: Synthetic oligonucleotide
cuacaucacgcc

SEQ ID NO: 64932 - RNA, 12 nt, Artificial Sequence
  Description of Artificial Sequence: Synthetic oligonucleotide
acuggauuuaag

SEQ ID NO: 64933 - RNA, 12 nt, Artificial Sequence
  Description of Artificial Sequence: Synthetic oligonucleotide
cuggauuuaagc

SEQ ID NO: 64934 - RNA, 13 nt, Artificial Sequence
  Description of Artificial Sequence: Synthetic oligonucleotide
gauuuaagcagag

SEQ ID NO: 64935 - RNA, 13 nt, Artificial Sequence
  Description of Artificial Sequence: Synthetic oligonucleotide
auuuaagcagagu

SEQ ID NO: 64936 - RNA, 13 nt, Artificial Sequence
  Description of Artificial Sequence: Synthetic oligonucleotide
uuaagcagaguuc

SEQ ID NO: 64937 - RNA, 13 nt, Artificial Sequence
  Description of Artificial Sequence: Synthetic oligonucleotide
uaagcagaguuca

SEQ ID NO: 64938 - RNA, 14 nt, Artificial Sequence
  Description of Artificial Sequence: Synthetic oligonucleotide
agcagaguucaaaa

SEQ ID NO: 64939 - RNA, 12 nt, Artificial Sequence
  Description of Artificial Sequence: Synthetic oligonucleotide
cucagggucuga

SEQ ID NO: 64940 - RNA, 13 nt, Artificial Sequence
  Description of Artificial Sequence: Synthetic oligonucleotide
caagcaacuacau

SEQ ID NO: 64941 - RNA, 12 nt, Artificial Sequence
  Description of Artificial Sequence: Synthetic oligonucleotide
aucaauggcagc

SEQ ID NO: 64942 - RNA, 11 nt, Artificial Sequence
  Description of Artificial Sequence: Synthetic oligonucleotide
uuccagcccac

SEQ ID NO: 64943 - RNA, 12 nt, Artificial Sequence
  Description of Artificial Sequence: Synthetic oligonucleotide
cagcugagaaug

SEQ ID NO: 64944 - RNA, 13 nt, Artificial Sequence
  Description of Artificial Sequence: Synthetic oligonucleotide
aacguaucuccua

SEQ ID NO: 64945 - RNA, 14 nt, Artificial Sequence
  Description of Artificial Sequence: Synthetic oligonucleotide
ccuaaaauaauuuc

SEQ ID NO: 64946 - RNA, 13 nt, Artificial Sequence
  Description of Artificial Sequence: Synthetic oligonucleotide
uggaagauucagc

SEQ ID NO: 64947 - RNA, 12 nt, Artificial Sequence
  Description of Artificial Sequence: Synthetic oligonucleotide
uuaaacucuccu

SEQ ID NO: 64948 - RNA, 12 nt, Artificial Sequence
  Description of Artificial Sequence: Synthetic oligonucleotide
cagccuacaguu

SEQ ID NO: 64949 - RNA, 13 nt, Artificial Sequence
  Description of Artificial Sequence: Synthetic oligonucleotide
guuauguucaguc

SEQ ID NO: 64950 - RNA, 13 nt, Artificial Sequence
  Description of Artificial Sequence: Synthetic oligonucleotide
cacauacaaaaug

SEQ ID NO: 64951 - RNA, 9 nt, Artificial Sequence
  Description of Artificial Sequence: Synthetic oligonucleotide
uccuuuugc

SEQ ID NO: 64952 - RNA, 12 nt, Artificial Sequence
  Description of Artificial Sequence: Synthetic oligonucleotide
ugaccugugaag

SEQ ID NO: 64953 - RNA, 12 nt, Artificial Sequence
  Description of Artificial Sequence: Synthetic oligonucleotide
cuaucucacaca

SEQ ID NO: 64954 - RNA, 13 nt, Artificial Sequence
  Description of Artificial Sequence: Synthetic oligonucleotide
uguccucaauugu

SEQ ID NO: 64955 - RNA, 12 nt, Artificial Sequence
  Description of Artificial Sequence: Synthetic oligonucleotide
aaaccguagcug

SEQ ID NO: 64956 - RNA, 12 nt, Artificial Sequence
  Description of Artificial Sequence: Synthetic oligonucleotide
uagcuggcaagc

SEQ ID NO: 64957 - RNA, 14 nt, Artificial Sequence
  Description of Artificial Sequence: Synthetic oligonucleotide
uuguaugguuaaaa

SEQ ID NO: 64958 - RNA, 14 nt, Artificial Sequence
  Description of Artificial Sequence: Synthetic oligonucleotide
ugguuaaaagaugg

SEQ ID NO: 64959 - RNA, 13 nt, Artificial Sequence
  Description of Artificial Sequence: Synthetic oligonucleotide
cagggaauuauac

SEQ ID NO: 64960 - RNA, 12 nt, Artificial Sequence
  Description of Artificial Sequence: Synthetic oligonucleotide
acaaucuugcug

SEQ ID NO: 64961 - RNA, 13 nt, Artificial Sequence
  Description of Artificial Sequence: Synthetic oligonucleotide
ccaauaaugaaga

SEQ ID NO: 64962 - RNA, 13 nt, Artificial Sequence
  Description of Artificial Sequence: Synthetic oligonucleotide
acuuuggauguuc

SEQ ID NO: 64963 - RNA, 12 nt, Artificial Sequence
  Description of Artificial Sequence: Synthetic oligonucleotide
aaugcuuccacu

SEQ ID NO: 64964 - RNA, 11 nt, Artificial Sequence
  Description of Artificial Sequence: Synthetic oligonucleotide
gagaaaguuug

SEQ ID NO: 64965 - RNA, 11 nt, Artificial Sequence
  Description of Artificial Sequence: Synthetic oligonucleotide
aaagaacuacu

SEQ ID NO: 64966 - RNA, 12 nt, Artificial Sequence
  Description of Artificial Sequence: Synthetic oligonucleotide
uuagaaauacgg

SEQ ID NO: 64967 - RNA, 12 nt, Artificial Sequence
  Description of Artificial Sequence: Synthetic oligonucleotide
aacauggguaca

SEQ ID NO: 64968 - RNA, 14 nt, Artificial Sequence
  Description of Artificial Sequence: Synthetic oligonucleotide
aaagacacagaaga

SEQ ID NO: 64969 - RNA, 11 nt, Artificial Sequence
  Description of Artificial Sequence: Synthetic oligonucleotide
uaguagggagg

SEQ ID NO: 64970 - RNA, 12 nt, Artificial Sequence
  Description of Artificial Sequence: Synthetic oligonucleotide
gccuucugcagc

SEQ ID NO: 64971 - RNA, 10 nt, Artificial Sequence
  Description of Artificial Sequence: Synthetic oligonucleotide
ggucugguac

SEQ ID NO: 64972 - RNA, 12 nt, Artificial Sequence
  Description of Artificial Sequence: Synthetic oligonucleotide
cuaguccuuccg

SEQ ID NO: 64973 - RNA, 12 nt, Artificial Sequence
  Description of Artificial Sequence: Synthetic oligonucleotide
ccagugaauauu

SEQ ID NO: 64974 - RNA, 13 nt, Artificial Sequence
  Description of Artificial Sequence: Synthetic oligonucleotide
augaauucaaguu

SEQ ID NO: 64975 - RNA, 12 nt, Artificial Sequence
  Description of Artificial Sequence: Synthetic oligonucleotide
caggacacagau

SEQ ID NO: 64976 - RNA, 12 nt, Artificial Sequence
  Description of Artificial Sequence: Synthetic oligonucleotide
cucaaagcacag

SEQ ID NO: 64977 - RNA, 10 nt, Artificial Sequence
  Description of Artificial Sequence: Synthetic oligonucleotide
accacugcca

SEQ ID NO: 64978 - RNA, 13 nt, Artificial Sequence
  Description of Artificial Sequence: Synthetic oligonucleotide
gaaacuacuagug

SEQ ID NO: 64979 - RNA, 12 nt, Artificial Sequence
  Description of Artificial Sequence: Synthetic oligonucleotide
aagucggacagc

SEQ ID NO: 64980 - RNA, 13 nt, Artificial Sequence
  Description of Artificial Sequence: Synthetic oligonucleotide
gaaagcgaaaaau

SEQ ID NO: 64981 - RNA, 13 nt, Artificial Sequence
  Description of Artificial Sequence: Synthetic oligonucleotide
cccucugauuuag

SEQ ID NO: 64982 - RNA, 12 nt, Artificial Sequence
  Description of Artificial Sequence: Synthetic oligonucleotide
ugagcuauuuaa

SEQ ID NO: 64983 - RNA, 13 nt, Artificial Sequence
  Description of Artificial Sequence: Synthetic oligonucleotide
aaaaggugaaaaa

SEQ ID NO: 64984 - RNA, 14 nt, Artificial Sequence
  Description of Artificial Sequence: Synthetic oligonucleotide
gaaaaagcacuauu

SEQ ID NO: 64985 - RNA, 12 nt, Artificial Sequence
  Description of Artificial Sequence: Synthetic oligonucleotide
ggcugaaaagaa

SEQ ID NO: 64986 - RNA, 12 nt, Artificial Sequence
  Description of Artificial Sequence: Synthetic oligonucleotide
uaaacccuuaua

SEQ ID NO: 64987 - RNA, 13 nt, Artificial Sequence
  Description of Artificial Sequence: Synthetic oligonucleotide
cauacuauuagcc

SEQ ID NO: 64988 - RNA, 12 nt, Artificial Sequence
  Description of Artificial Sequence: Synthetic oligonucleotide
gacagaagcauu

SEQ ID NO: 64989 - RNA, 14 nt, Artificial Sequence
  Description of Artificial Sequence: Synthetic oligonucleotide
agagcaaauaagau

SEQ ID NO: 64990 - RNA, 14 nt, Artificial Sequence
  Description of Artificial Sequence: Synthetic oligonucleotide
ccaacauuuuucuc

SEQ ID NO: 64991 - RNA, 15 nt, Artificial Sequence
  Description of Artificial Sequence: Synthetic oligonucleotide
uuaaguaugagaaaa

SEQ ID NO: 64992 - RNA, 14 nt, Artificial Sequence
  Description of Artificial Sequence: Synthetic oligonucleotide
caggaauaaagaug

SEQ ID NO: 64993 - RNA, 13 nt, Artificial Sequence
  Description of Artificial Sequence: Synthetic oligonucleotide
aauuugaaugacc

SEQ ID NO: 64994 - RNA, 14 nt, Artificial Sequence
  Description of Artificial Sequence: Synthetic oligonucleotide
auguauaaagauag

SEQ ID NO: 64995 - RNA, 12 nt, Artificial Sequence
  Description of Artificial Sequence: Synthetic oligonucleotide
ggcuguaacuau

SEQ ID NO: 64996 - RNA, 11 nt, Artificial Sequence
  Description of Artificial Sequence: Synthetic oligonucleotide
ucugugaagug

SEQ ID NO: 64997 - RNA, 14 nt, Artificial Sequence
  Description of Artificial Sequence: Synthetic oligonucleotide
ccuuuaaggaaaug

SEQ ID NO: 64998 - RNA, 13 nt, Artificial Sequence
  Description of Artificial Sequence: Synthetic oligonucleotide
aaggauacaaaaa

SEQ ID NO: 64999 - RNA, 12 nt, Artificial Sequence
  Description of Artificial Sequence: Synthetic oligonucleotide
agaugcaauuug

SEQ ID NO: 65000 - RNA, 12 nt, Artificial Sequence
  Description of Artificial Sequence: Synthetic oligonucleotide
guucaaaacgaa

SEQ ID NO: 65001 - RNA, 11 nt, Artificial Sequence
  Description of Artificial Sequence: Synthetic oligonucleotide
gugaaaccuca

SEQ ID NO: 65002 - RNA, 13 nt, Artificial Sequence
  Description of Artificial Sequence: Synthetic oligonucleotide
acgaaagagaagc

SEQ ID NO: 65003 - RNA, 12 nt, Artificial Sequence
  Description of Artificial Sequence: Synthetic oligonucleotide
cuccacaagcgc

SEQ ID NO: 65004 - RNA, 14 nt, Artificial Sequence
  Description of Artificial Sequence: Synthetic oligonucleotide
gagaagauuccaaa

SEQ ID NO: 65005 - RNA, 13 nt, Artificial Sequence
  Description of Artificial Sequence: Synthetic oligonucleotide
aaucuggauucaa

SEQ ID NO: 65006 - RNA, 13 nt, Artificial Sequence
  Description of Artificial Sequence: Synthetic oligonucleotide
agaacagauuuga

SEQ ID NO: 65007 - RNA, 11 nt, Artificial Sequence
  Description of Artificial Sequence: Synthetic oligonucleotide
ccagagcugug

SEQ ID NO: 65008 - RNA, 12 nt, Artificial Sequence
  Description of Artificial Sequence: Synthetic oligonucleotide
ccucagauuguu

SEQ ID NO: 65009 - RNA, 12 nt, Artificial Sequence
  Description of Artificial Sequence: Synthetic oligonucleotide
cuauuuuaauua

SEQ ID NO: 65010 - RNA, 13 nt, Artificial Sequence
  Description of Artificial Sequence: Synthetic oligonucleotide
uuuaauuuauuaa

SEQ ID NO: 65011 - RNA, 12 nt, Artificial Sequence
  Description of Artificial Sequence: Synthetic oligonucleotide
augcaguuugaa

SEQ ID NO: 65012 - RNA, 11 nt, Artificial Sequence
  Description of Artificial Sequence: Synthetic oligonucleotide
caugcugcugg

SEQ ID NO: 65013 - RNA, 13 nt, Artificial Sequence
  Description of Artificial Sequence: Synthetic oligonucleotide
agaugugcauuuc

SEQ ID NO: 65014 - RNA, 12 nt, Artificial Sequence
  Description of Artificial Sequence: Synthetic oligonucleotide
ucaaaaccugug

SEQ ID NO: 65015 - RNA, 11 nt, Artificial Sequence
  Description of Artificial Sequence: Synthetic oligonucleotide
gaaugugggua

SEQ ID NO: 65016 - RNA, 10 nt, Artificial Sequence
  Description of Artificial Sequence: Synthetic oligonucleotide
auguggguag

SEQ ID NO: 65017 - RNA, 13 nt, Artificial Sequence
  Description of Artificial Sequence: Synthetic oligonucleotide
ugaaaaugagcau

SEQ ID NO: 65018 - RNA, 13 nt, Artificial Sequence
  Description of Artificial Sequence: Synthetic oligonucleotide
uugcuuuucaugu

SEQ ID NO: 65019 - RNA, 12 nt, Artificial Sequence
  Description of Artificial Sequence: Synthetic oligonucleotide
uguauuucuaua

SEQ ID NO: 65020 - RNA, 13 nt, Artificial Sequence
  Description of Artificial Sequence: Synthetic oligonucleotide
uuugauuaauguu

SEQ ID NO: 65021 - RNA, 12 nt, Artificial Sequence
  Description of Artificial Sequence: Synthetic oligonucleotide
caacguguauag

SEQ ID NO: 65022 - RNA, 12 nt, Artificial Sequence
  Description of Artificial Sequence: Synthetic oligonucleotide
cauauccuuggc

SEQ ID NO: 65023 - RNA, 13 nt, Artificial Sequence
  Description of Artificial Sequence: Synthetic oligonucleotide
uacuaacaucugg

SEQ ID NO: 65024 - RNA, 11 nt, Artificial Sequence
  Description of Artificial Sequence: Synthetic oligonucleotide
cauaaguugug

SEQ ID NO: 65025 - RNA, 12 nt, Artificial Sequence
  Description of Artificial Sequence: Synthetic oligonucleotide
gcaucauuuugg

SEQ ID NO: 65026 - RNA, 10 nt, Artificial Sequence
  Description of Artificial Sequence: Synthetic oligonucleotide
gcucuucuua

SEQ ID NO: 65027 - RNA, 10 nt, Artificial Sequence
  Description of Artificial Sequence: Synthetic oligonucleotide
agauuagguc

SEQ ID NO: 65028 - RNA, 12 nt, Artificial Sequence
  Description of Artificial Sequence: Synthetic oligonucleotide
auggaauugaaa

SEQ ID NO: 65029 - RNA, 13 nt, Artificial Sequence
  Description of Artificial Sequence: Synthetic oligonucleotide
cacacucauuccu

SEQ ID NO: 65030 - RNA, 12 nt, Artificial Sequence
  Description of Artificial Sequence: Synthetic oligonucleotide
uguagagguaac

SEQ ID NO: 65031 - RNA, 11 nt, Artificial Sequence
  Description of Artificial Sequence: Synthetic oligonucleotide
caaccacaugc

SEQ ID NO: 65032 - RNA, 12 nt, Artificial Sequence
  Description of Artificial Sequence: Synthetic oligonucleotide
ucggaaacaagu

SEQ ID NO: 65033 - RNA, 11 nt, Artificial Sequence
  Description of Artificial Sequence: Synthetic oligonucleotide
acucccaauaa

SEQ ID NO: 65034 - RNA, 13 nt, Artificial Sequence
  Description of Artificial Sequence: Synthetic oligonucleotide
aaugcuaagaaau

SEQ ID NO: 65035 - RNA, 11 nt, Artificial Sequence
  Description of Artificial Sequence: Synthetic oligonucleotide
gucuuucucua

SEQ ID NO: 65036 - RNA, 11 nt, Artificial Sequence
  Description of Artificial Sequence: Synthetic oligonucleotide
ugaauuucagg

SEQ ID NO: 65037 - RNA, 13 nt, Artificial Sequence
  Description of Artificial Sequence: Synthetic oligonucleotide
cgauucccucuca

SEQ ID NO: 65038 - RNA, 11 nt, Artificial Sequence
  Description of Artificial Sequence: Synthetic oligonucleotide
aggaaagugaa

SEQ ID NO: 65039 - RNA, 12 nt, Artificial Sequence
  Description of Artificial Sequence: Synthetic oligonucleotide
gaggcugcaugc

SEQ ID NO: 65040 - RNA, 11 nt, Artificial Sequence
  Description of Artificial Sequence: Synthetic oligonucleotide
ucucugaacag

SEQ ID NO: 65041 - RNA, 12 nt, Artificial Sequence
  Description of Artificial Sequence: Synthetic oligonucleotide
aacuuggcugua

SEQ ID NO: 65042 - RNA, 12 nt, Artificial Sequence
  Description of Artificial Sequence: Synthetic oligonucleotide
agaagccaaaau

SEQ ID NO: 65043 - RNA, 14 nt, Artificial Sequence
  Description of Artificial Sequence: Synthetic oligonucleotide
auuaaaagaagucc

SEQ ID NO: 65044 - RNA, 14 nt, Artificial Sequence
  Description of Artificial Sequence: Synthetic oligonucleotide
gaauccggauuauc

SEQ ID NO: 65045 - RNA, 12 nt, Artificial Sequence
  Description of Artificial Sequence: Synthetic oligonucleotide
aaugugacauca

SEQ ID NO: 65046 - RNA, 13 nt, Artificial Sequence
  Description of Artificial Sequence: Synthetic oligonucleotide
caucaaagcaagu

SEQ ID NO: 65047 - RNA, 11 nt, Artificial Sequence
  Description of Artificial Sequence: Synthetic oligonucleotide
agagagagaaa

SEQ ID NO: 65048 - RNA, 13 nt, Artificial Sequence
  Description of Artificial Sequence: Synthetic oligonucleotide
ucgcuguaguauu

SEQ ID NO: 65049 - RNA, 14 nt, Artificial Sequence
  Description of Artificial Sequence: Synthetic oligonucleotide
cgcuguaguauuua

SEQ ID NO: 65050 - RNA, 13 nt, Artificial Sequence
  Description of Artificial Sequence: Synthetic oligonucleotide
auuuaagcccaua

SEQ ID NO: 65051 - RNA, 15 nt, Artificial Sequence
  Description of Artificial Sequence: Synthetic oligonucleotide
auuaaaauaaacaug

SEQ ID NO: 65052 - RNA, 12 nt, Artificial Sequence
  Description of Artificial Sequence: Synthetic oligonucleotide
cuguucugaucg

SEQ ID NO: 65053 - RNA, 16 nt, Artificial Sequence
  Description of Artificial Sequence: Synthetic oligonucleotide
aaauaauuugaacuuu

SEQ ID NO: 65054 - RNA, 12 nt, Artificial Sequence
  Description of Artificial Sequence: Synthetic oligonucleotide
ugcgaccuuaau

SEQ ID NO: 65055 - RNA, 11 nt, Artificial Sequence
  Description of Artificial Sequence: Synthetic oligonucleotide
cugagaaagcu

SEQ ID NO: 65056 - RNA, 13 nt, Artificial Sequence
  Description of Artificial Sequence: Synthetic oligonucleotide
aguaaagaugcua

SEQ ID NO: 65057 - RNA, 12 nt, Artificial Sequence
  Description of Artificial Sequence: Synthetic oligonucleotide
cugcuuaauugc

SEQ ID NO: 65058 - RNA, 14 nt, Artificial Sequence
  Description of Artificial Sequence: Synthetic oligonucleotide
uaccauaugaauga

SEQ ID NO: 65059 - RNA, 12 nt, Artificial Sequence
  Description of Artificial Sequence: Synthetic oligonucleotide
aacuuucuuauc

SEQ ID NO: 65060 - RNA, 13 nt, Artificial Sequence
  Description of Artificial Sequence: Synthetic oligonucleotide
ccuugcaugacau

SEQ ID NO: 65061 - RNA, 14 nt, Artificial Sequence
  Description of Artificial Sequence: Synthetic oligonucleotide
ugaauuuguauaug

SEQ ID NO: 65062 - RNA, 12 nt, Artificial Sequence
  Description of Artificial Sequence: Synthetic oligonucleotide
gaauccuaguag

SEQ ID NO: 65063 - RNA, 10 nt, Artificial Sequence
  Description of Artificial Sequence: Synthetic oligonucleotide
gaaagggaag

SEQ ID NO: 65064 - RNA, 11 nt, Artificial Sequence
  Description of Artificial Sequence: Synthetic oligonucleotide
uaucggcaugc

SEQ ID NO: 65065 - RNA, 12 nt, Artificial Sequence
  Description of Artificial Sequence: Synthetic oligonucleotide
caccucauagua

SEQ ID NO: 65066 - RNA, 11 nt, Artificial Sequence
  Description of Artificial Sequence: Synthetic oligonucleotide
ccagaauugcc

SEQ ID NO: 65067 - RNA, 11 nt, Artificial Sequence
  Description of Artificial Sequence: Synthetic oligonucleotide
uggugaucugg

SEQ ID NO: 65068 - RNA, 12 nt, Artificial Sequence
  Description of Artificial Sequence: Synthetic oligonucleotide
gaucuggguaau

SEQ ID NO: 65069 - RNA, 12 nt, Artificial Sequence
  Description of Artificial Sequence: Synthetic oligonucleotide
ggaugugaugaa

SEQ ID NO: 65070 - RNA, 12 nt, Artificial Sequence
  Description of Artificial Sequence: Synthetic oligonucleotide
cauuuccacagc

SEQ ID NO: 65071 - RNA, 11 nt, Artificial Sequence
  Description of Artificial Sequence: Synthetic oligonucleotide
acagcuacacc

SEQ ID NO: 65072 - RNA, 12 nt, Artificial Sequence
  Description of Artificial Sequence: Synthetic oligonucleotide
ugcaguucuuac

SEQ ID NO: 65073 - RNA, 12 nt, Artificial Sequence
  Description of Artificial Sequence: Synthetic oligonucleotide
acgagaagaaga

SEQ ID NO: 65074 - RNA, 12 nt, Artificial Sequence
  Description of Artificial Sequence: Synthetic oligonucleotide
cgagaagaagau

SEQ ID NO: 65075 - RNA, 15 nt, Artificial Sequence
  Description of Artificial Sequence: Synthetic oligonucleotide
aagaagaucauuuac

SEQ ID NO: 65076 - RNA, 11 nt, Artificial Sequence
  Description of Artificial Sequence: Synthetic oligonucleotide
agaggaagagg

SEQ ID NO: 65077 - RNA, 12 nt, Artificial Sequence
  Description of Artificial Sequence: Synthetic oligonucleotide
gaggaagaggug

SEQ ID NO: 65078 - RNA, 13 nt, Artificial Sequence
  Description of Artificial Sequence: Synthetic oligonucleotide
cuacuuugagggc

SEQ ID NO: 65079 - RNA, 12 nt, Artificial Sequence
  Description of Artificial Sequence: Synthetic oligonucleotide
agggcaucuccu

SEQ ID NO: 65080 - RNA, 10 nt, Artificial Sequence
  Description of Artificial Sequence: Synthetic oligonucleotide
ggagugauau

SEQ ID NO: 65081 - RNA, 11 nt, Artificial Sequence
  Description of Artificial Sequence: Synthetic oligonucleotide
gagugauaugg

SEQ ID NO: 65082 - RNA, 12 nt, Artificial Sequence
  Description of Artificial Sequence: Synthetic oligonucleotide
ugcaguaaagau

SEQ ID NO: 65083 - RNA, 13 nt, Artificial Sequence
  Description of Artificial Sequence: Synthetic oligonucleotide
aguaaagauccua

SEQ ID NO: 65084 - RNA, 12 nt, Artificial Sequence
  Description of Artificial Sequence: Synthetic oligonucleotide
ugacaaaggaca

SEQ ID NO: 65085 - RNA, 13 nt, Artificial Sequence
  Description of Artificial Sequence: Synthetic oligonucleotide
gcaauugugaccc

SEQ ID NO: 65086 - RNA, 12 nt, Artificial Sequence
  Description of Artificial Sequence: Synthetic oligonucleotide
aacaucauccau

SEQ ID NO: 65087 - RNA, 12 nt, Artificial Sequence
  Description of Artificial Sequence: Synthetic oligonucleotide
ugaaauccaaca

SEQ ID NO: 65088 - RNA, 15 nt, Artificial Sequence
  Description of Artificial Sequence: Synthetic oligonucleotide
aacaauauauuucuc

SEQ ID NO: 65089 - RNA, 14 nt, Artificial Sequence
  Description of Artificial Sequence: Synthetic oligonucleotide
aacaguaaagucac

SEQ ID NO: 65090 - RNA, 14 nt, Artificial Sequence
  Description of Artificial Sequence: Synthetic oligonucleotide
ugugaagaaaguaa

SEQ ID NO: 65091 - RNA, 13 nt, Artificial Sequence
  Description of Artificial Sequence: Synthetic oligonucleotide
cuuccgagccauc

SEQ ID NO: 65092 - RNA, 12 nt, Artificial Sequence
  Description of Artificial Sequence: Synthetic oligonucleotide
aauggagguuga

SEQ ID NO: 65093 - RNA, 12 nt, Artificial Sequence
  Description of Artificial Sequence: Synthetic oligonucleotide
ggagguugaaua

SEQ ID NO: 65094 - RNA, 13 nt, Artificial Sequence
  Description of Artificial Sequence: Synthetic oligonucleotide
auuuugaguuuuc

SEQ ID NO: 65095 - RNA, 12 nt, Artificial Sequence
  Description of Artificial Sequence: Synthetic oligonucleotide
uauccuguuugu

SEQ ID NO: 65096 - RNA, 11 nt, Artificial Sequence
  Description of Artificial Sequence: Synthetic oligonucleotide
ccuguuuguuc

SEQ ID NO: 65097 - RNA, 10 nt, Artificial Sequence
  Description of Artificial Sequence: Synthetic oligonucleotide
cucuacagcc

SEQ ID NO: 65098 - RNA, 12 nt, Artificial Sequence
  Description of Artificial Sequence: Synthetic oligonucleotide
ucuuccauagcu

SEQ ID NO: 65099 - RNA, 12 nt, Artificial Sequence
  Description of Artificial Sequence: Synthetic oligonucleotide
auaaucuuccug

SEQ ID NO: 65100 - RNA, 12 nt, Artificial Sequence
  Description of Artificial Sequence: Synthetic oligonucleotide
uaaucuuccugu

SEQ ID NO: 65101 - RNA, 12 nt, Artificial Sequence
  Description of Artificial Sequence: Synthetic oligonucleotide
cuucaugacuug

SEQ ID NO: 65102 - RNA, 12 nt, Artificial Sequence
  Description of Artificial Sequence: Synthetic oligonucleotide
aagagggagaga

SEQ ID NO: 65103 - RNA, 12 nt, Artificial Sequence
  Description of Artificial Sequence: Synthetic oligonucleotide
cgucuccuacca

SEQ ID NO: 65104 - RNA, 12 nt, Artificial Sequence
  Description of Artificial Sequence: Synthetic oligonucleotide
gaucaaucggcc

SEQ ID NO: 65105 - RNA, 12 nt, Artificial Sequence
  Description of Artificial Sequence: Synthetic oligonucleotide
ggacgaacaucc

SEQ ID NO: 65106 - RNA, 11 nt, Artificial Sequence
  Description of Artificial Sequence: Synthetic oligonucleotide
agggucggaac

SEQ ID NO: 65107 - RNA, 10 nt, Artificial Sequence
  Description of Artificial Sequence: Synthetic oligonucleotide
ucggaaccca

SEQ ID NO: 65108 - RNA, 11 nt, Artificial Sequence
  Description of Artificial Sequence: Synthetic oligonucleotide
acccaagcuua

SEQ ID NO: 65109 - RNA, 14 nt, Artificial Sequence
  Description of Artificial Sequence: Synthetic oligonucleotide
gaacuuuaagcaac

SEQ ID NO: 65110 - RNA, 11 nt, Artificial Sequence
  Description of Artificial Sequence: Synthetic oligonucleotide
acuauucagug

SEQ ID NO: 65111 - RNA, 11 nt, Artificial Sequence
  Description of Artificial Sequence: Synthetic oligonucleotide
cuauucagugg

SEQ ID NO: 65112 - RNA, 13 nt, Artificial Sequence
  Description of Artificial Sequence: Synthetic oligonucleotide
aaacacagauaac

SEQ ID NO: 65113 - RNA, 12 nt, Artificial Sequence
  Description of Artificial Sequence: Synthetic oligonucleotide
cuuaagaaaaga

SEQ ID NO: 65114 - RNA, 12 nt, Artificial Sequence
  Description of Artificial Sequence: Synthetic oligonucleotide
cugaaggagugu

SEQ ID NO: 65115 - RNA, 10 nt, Artificial Sequence
  Description of Artificial Sequence: Synthetic oligonucleotide
ucaccgcggg

SEQ ID NO: 65116 - RNA, 14 nt, Artificial Sequence
  Description of Artificial Sequence: Synthetic oligonucleotide
agcagaaauaagcg

SEQ ID NO: 65117 - RNA, 12 nt, Artificial Sequence
  Description of Artificial Sequence: Synthetic oligonucleotide
aagcgugccguu

SEQ ID NO: 65118 - RNA, 12 nt, Artificial Sequence
  Description of Artificial Sequence: Synthetic oligonucleotide
agaaacagucac

SEQ ID NO: 65119 - RNA, 12 nt, Artificial Sequence
  Description of Artificial Sequence: Synthetic oligonucleotide
agaggaagaagg

SEQ ID NO: 65120 - RNA, 14 nt, Artificial Sequence
  Description of Artificial Sequence: Synthetic oligonucleotide
uguauucaaaauau

SEQ ID NO: 65121 - RNA, 13 nt, Artificial Sequence
  Description of Artificial Sequence: Synthetic oligonucleotide
auuuuccucccuu

SEQ ID NO: 65122 - RNA, 13 nt, Artificial Sequence
  Description of Artificial Sequence: Synthetic oligonucleotide
caaagaaagauag

SEQ ID NO: 65123 - RNA, 12 nt, Artificial Sequence
  Description of Artificial Sequence: Synthetic oligonucleotide
aagaaagauaga

SEQ ID NO: 65124 - RNA, 13 nt, Artificial Sequence
  Description of Artificial Sequence: Synthetic oligonucleotide
gaaagcauuuguu

SEQ ID NO: 65125 - RNA, 13 nt, Artificial Sequence
  Description of Artificial Sequence: Synthetic oligonucleotide
ugaguuaaacgaa

SEQ ID NO: 65126 - RNA, 12 nt, Artificial Sequence
  Description of Artificial Sequence: Synthetic oligonucleotide
acugauacagaa

SEQ ID NO: 65127 - RNA, 12 nt, Artificial Sequence
  Description of Artificial Sequence: Synthetic oligonucleotide
auauuauauaua

SEQ ID NO: 65128 - RNA, 12 nt, Artificial Sequence
  Description of Artificial Sequence: Synthetic oligonucleotide
auuauauauaua

SEQ ID NO: 65129 - RNA, 12 nt, Artificial Sequence
  Description of Artificial Sequence: Synthetic oligonucleotide
ucacuggaugua

SEQ ID NO: 65130 - RNA, 12 nt, Artificial Sequence
  Description of Artificial Sequence: Synthetic oligonucleotide
cagggaagagga

SEQ ID NO: 65131 - RNA, 15 nt, Artificial Sequence
  Description of Artificial Sequence: Synthetic oligonucleotide
augaucuuuuuuuug

SEQ ID NO: 65132 - RNA, 11 nt, Artificial Sequence
  Description of Artificial Sequence: Synthetic oligonucleotide
aguucacggcc

SEQ ID NO: 65133 - RNA, 13 nt, Artificial Sequence
  Description of Artificial Sequence: Synthetic oligonucleotide
caccaucacacca

SEQ ID NO: 65134 - RNA, 11 nt, Artificial Sequence
  Description of Artificial Sequence: Synthetic oligonucleotide
ccugcggguuu

SEQ ID NO: 65135 - RNA, 10 nt, Artificial Sequence
  Description of Artificial Sequence: Synthetic oligonucleotide
auccaguuug

SEQ ID NO: 65136 - RNA, 13 nt, Artificial Sequence
  Description of Artificial Sequence: Synthetic oligonucleotide
guuaaggacuucu

SEQ ID NO: 65137 - RNA, 13 nt, Artificial Sequence
  Description of Artificial Sequence: Synthetic oligonucleotide
cagugggacagag

SEQ ID NO: 65138 - RNA, 14 nt, Artificial Sequence
  Description of Artificial Sequence: Synthetic oligonucleotide
aauuuguuauugug

SEQ ID NO: 65139 - RNA, 13 nt, Artificial Sequence
  Description of Artificial Sequence: Synthetic oligonucleotide
uucaaaugcauuu

SEQ ID NO: 65140 - RNA, 10 nt, Artificial Sequence
  Description of Artificial Sequence: Synthetic oligonucleotide
caggaaagcc

SEQ ID NO: 65141 - RNA, 11 nt, Artificial Sequence
  Description of Artificial Sequence: Synthetic oligonucleotide
aggaaagcccu

SEQ ID NO: 65142 - RNA, 12 nt, Artificial Sequence
  Description of Artificial Sequence: Synthetic oligonucleotide
cccagcauggcc

SEQ ID NO: 65143 - RNA, 11 nt, Artificial Sequence
  Description of Artificial Sequence: Synthetic oligonucleotide
cuucucccuga

SEQ ID NO: 65144 - RNA, 12 nt, Artificial Sequence
  Description of Artificial Sequence: Synthetic oligonucleotide
gaagaagcccuu

SEQ ID NO: 65145 - RNA, 12 nt, Artificial Sequence
  Description of Artificial Sequence: Synthetic oligonucleotide
agaagcccuuca

SEQ ID NO: 65146 - RNA, 11 nt, Artificial Sequence
  Description of Artificial Sequence: Synthetic oligonucleotide
gcccuucagcg

SEQ ID NO: 65147 - RNA, 11 nt, Artificial Sequence
  Description of Artificial Sequence: Synthetic oligonucleotide
ccuucagcggc

SEQ ID NO: 65148 - RNA, 12 nt, Artificial Sequence
  Description of Artificial Sequence: Synthetic oligonucleotide
ucagcggccagu

SEQ ID NO: 65149 - RNA, 12 nt, Artificial Sequence
  Description of Artificial Sequence: Synthetic oligonucleotide
ugaaaagcuccg

SEQ ID NO: 65150 - RNA, 11 nt, Artificial Sequence
  Description of Artificial Sequence: Synthetic oligonucleotide
aaaagcuccgg

SEQ ID NO: 65151 - RNA, 13 nt, Artificial Sequence
  Description of Artificial Sequence: Synthetic oligonucleotide
agucaacagucug

SEQ ID NO: 65152 - RNA, 13 nt, Artificial Sequence
  Description of Artificial Sequence: Synthetic oligonucleotide
cagaguucaaaag

SEQ ID NO: 65153 - RNA, 13 nt, Artificial Sequence
  Description of Artificial Sequence: Synthetic oligonucleotide
agaguucaaaagc

SEQ ID NO: 65154 - RNA, 12 nt, Artificial Sequence
  Description of Artificial Sequence: Synthetic oligonucleotide
uucaaaagcccu

SEQ ID NO: 65155 - RNA, 12 nt, Artificial Sequence
  Description of Artificial Sequence: Synthetic oligonucleotide
ucaaaagcccuu

SEQ ID NO: 65156 - RNA, 12 nt, Artificial Sequence
  Description of Artificial Sequence: Synthetic oligonucleotide
aaaagcccuuca

SEQ ID NO: 65157 - RNA, 12 nt, Artificial Sequence
  Description of Artificial Sequence: Synthetic oligonucleotide
aaagcccuucag

SEQ ID NO: 65158 - RNA, 13 nt, Artificial Sequence
  Description of Artificial Sequence: Synthetic oligonucleotide
gugaagccgcucg

SEQ ID NO: 65159 - RNA, 12 nt, Artificial Sequence
  Description of Artificial Sequence: Synthetic oligonucleotide
cacgccagucaa

SEQ ID NO: 65160 - RNA, 13 nt, Artificial Sequence
  Description of Artificial Sequence: Synthetic oligonucleotide
uucuuggugcgug

SEQ ID NO: 65161 - RNA, 14 nt, Artificial Sequence
  Description of Artificial Sequence: Synthetic oligonucleotide
auuggauucaucag

SEQ ID NO: 65162 - RNA, 13 nt, Artificial Sequence
  Description of Artificial Sequence: Synthetic oligonucleotide
uggaauaccuaag

SEQ ID NO: 65163 - RNA, 12 nt, Artificial Sequence
  Description of Artificial Sequence: Synthetic oligonucleotide
auuugaggcuca

SEQ ID NO: 65164 - RNA, 11 nt, Artificial Sequence
  Description of Artificial Sequence: Synthetic oligonucleotide
ucuacaauugg

SEQ ID NO: 65165 - RNA, 12 nt, Artificial Sequence
  Description of Artificial Sequence: Synthetic oligonucleotide
uaguuaggagcc

SEQ ID NO: 65166 - RNA, 13 nt, Artificial Sequence
  Description of Artificial Sequence: Synthetic oligonucleotide
agucaauauccac

SEQ ID NO: 65167 - RNA, 13 nt, Artificial Sequence
  Description of Artificial Sequence: Synthetic oligonucleotide
auguucagucaca

SEQ ID NO: 65168 - RNA, 12 nt, Artificial Sequence
  Description of Artificial Sequence: Synthetic oligonucleotide
acacacacauac

SEQ ID NO: 65169 - RNA, 12 nt, Artificial Sequence
  Description of Artificial Sequence: Synthetic oligonucleotide
uuccuuuugcuu

SEQ ID NO: 65170 - RNA, 16 nt, Artificial Sequence
  Description of Artificial Sequence: Synthetic oligonucleotide
uuuuaaaguaauuuuu

SEQ ID NO: 65171 - RNA, 13 nt, Artificial Sequence
  Description of Artificial Sequence: Synthetic oligonucleotide
caacagucaaugg

SEQ ID NO: 65172 - RNA, 13 nt, Artificial Sequence
  Description of Artificial Sequence: Synthetic oligonucleotide
ucgacaaaccaau

SEQ ID NO: 65173 - RNA, 12 nt, Artificial Sequence
  Description of Artificial Sequence: Synthetic oligonucleotide
acugcuaccacu

SEQ ID NO: 65174 - RNA, 13 nt, Artificial Sequence
  Description of Artificial Sequence: Synthetic oligonucleotide
gcaagcggucuua

SEQ ID NO: 65175 - RNA, 13 nt, Artificial Sequence
  Description of Artificial Sequence: Synthetic oligonucleotide
ggucuuaccggcu

SEQ ID NO: 65176 - RNA, 11 nt, Artificial Sequence
  Description of Artificial Sequence: Synthetic oligonucleotide
gauggguuacc

SEQ ID NO: 65177 - RNA, 11 nt, Artificial Sequence
  Description of Artificial Sequence: Synthetic oligonucleotide
guuaccugcga

SEQ ID NO: 65178 - RNA, 12 nt, Artificial Sequence
  Description of Artificial Sequence: Synthetic oligonucleotide
aaucuugcugag

SEQ ID NO: 65179 - RNA, 13 nt, Artificial Sequence
  Description of Artificial Sequence: Synthetic oligonucleotide
agcauaaaacagu

SEQ ID NO: 65180 - RNA, 12 nt, Artificial Sequence
  Description of Artificial Sequence: Synthetic oligonucleotide
guccuuuauccu

SEQ ID NO: 65181 - RNA, 12 nt, Artificial Sequence
  Description of Artificial Sequence: Synthetic oligonucleotide
caacgcaaguug

SEQ ID NO: 65182 - RNA, 13 nt, Artificial Sequence
  Description of Artificial Sequence: Synthetic oligonucleotide
aaacugaaaccau

SEQ ID NO: 65183 - RNA, 14 nt, Artificial Sequence
  Description of Artificial Sequence: Synthetic oligonucleotide
acuuuguuaaauau

SEQ ID NO: 65184 - RNA, 14 nt, Artificial Sequence
  Description of Artificial Sequence: Synthetic oligonucleotide
guauauuaaaaguu

SEQ ID NO: 65185 - RNA, 13 nt, Artificial Sequence
  Description of Artificial Sequence: Synthetic oligonucleotide
guuuugacuuaac

SEQ ID NO: 65186 - RNA, 13 nt, Artificial Sequence
  Description of Artificial Sequence: Synthetic oligonucleotide
gcaaacucagcac

SEQ ID NO: 65187 - RNA, 11 nt, Artificial Sequence
  Description of Artificial Sequence: Synthetic oligonucleotide
ugcugaccuca

SEQ ID NO: 65188 - RNA, 14 nt, Artificial Sequence
  Description of Artificial Sequence: Synthetic oligonucleotide
uuuauucagaucgc

SEQ ID NO: 65189 - RNA, 13 nt, Artificial Sequence
  Description of Artificial Sequence: Synthetic oligonucleotide
aggguucugggau

SEQ ID NO: 65190 - RNA, 15 nt, Artificial Sequence
  Description of Artificial Sequence: Synthetic oligonucleotide
auauuggaaauuaug

SEQ ID NO: 65191 - RNA, 13 nt, Artificial Sequence
  Description of Artificial Sequence: Synthetic oligonucleotide
auggaagcacuag

SEQ ID NO: 65192 - RNA, 13 nt, Artificial Sequence
  Description of Artificial Sequence: Synthetic oligonucleotide
guuuuuaugugga

SEQ ID NO: 65193 - RNA, 12 nt, Artificial Sequence
  Description of Artificial Sequence: Synthetic oligonucleotide
ggaauugguaga

SEQ ID NO: 65194 - RNA, 13 nt, Artificial Sequence
  Description of Artificial Sequence: Synthetic oligonucleotide
uuagacuuggaga

SEQ ID NO: 65195 - RNA, 13 nt, Artificial Sequence
  Description of Artificial Sequence: Synthetic oligonucleotide
uuacaguauucca

SEQ ID NO: 65196 - RNA, 15 nt, Artificial Sequence
  Description of Artificial Sequence: Synthetic oligonucleotide
ccacugaugaauuaa

SEQ ID NO: 65197 - RNA, 12 nt, Artificial Sequence
  Description of Artificial Sequence: Synthetic oligonucleotide
ccacaucaucac

SEQ ID NO: 65198 - RNA, 13 nt, Artificial Sequence
  Description of Artificial Sequence: Synthetic oligonucleotide
cucaccaaacaga

SEQ ID NO: 65199 - RNA, 12 nt, Artificial Sequence
  Description of Artificial Sequence: Synthetic oligonucleotide
ggaacaugaugg

SEQ ID NO: 65200 - RNA, 12 nt, Artificial Sequence
  Description of Artificial Sequence: Synthetic oligonucleotide
cauguagacugc

SEQ ID NO: 65201 - RNA, 13 nt, Artificial Sequence
  Description of Artificial Sequence: Synthetic oligonucleotide
ggaucuauuuaug

SEQ ID NO: 65202 - RNA, 12 nt, Artificial Sequence
  Description of Artificial Sequence: Synthetic oligonucleotide
gcacuauuauca

SEQ ID NO: 65203 - RNA, 11 nt, Artificial Sequence
  Description of Artificial Sequence: Synthetic oligonucleotide
aucaguucugc

SEQ ID NO: 65204 - RNA, 13 nt, Artificial Sequence
  Description of Artificial Sequence: Synthetic oligonucleotide
agauuaaaccuac

SEQ ID NO: 65205 - RNA, 13 nt, Artificial Sequence
  Description of Artificial Sequence: Synthetic oligonucleotide
auaaaauccuucu

SEQ ID NO: 65206 - RNA, 12 nt, Artificial Sequence
  Description of Artificial Sequence: Synthetic oligonucleotide
aaugcuguagac

SEQ ID NO: 65207 - RNA, 13 nt, Artificial Sequence
  Description of Artificial Sequence: Synthetic oligonucleotide
uugauaggaauag

SEQ ID NO: 65208 - RNA, 11 nt, Artificial Sequence
  Description of Artificial Sequence: Synthetic oligonucleotide
aauggcccuga

SEQ ID NO: 65209 - RNA, 11 nt, Artificial Sequence
  Description of Artificial Sequence: Synthetic oligonucleotide
uuccucaagca

SEQ ID NO: 65210 - RNA, 10 nt, Artificial Sequence
  Description of Artificial Sequence: Synthetic oligonucleotide
guucagccca

SEQ ID NO: 65211 - RNA, 11 nt, Artificial Sequence
  Description of Artificial Sequence: Synthetic oligonucleotide
gcugcugaacc

SEQ ID NO: 65212 - RNA, 12 nt, Artificial Sequence
  Description of Artificial Sequence: Synthetic oligonucleotide
aaguucucuuca

SEQ ID NO: 65213 - RNA, 11 nt, Artificial Sequence
  Description of Artificial Sequence: Synthetic oligonucleotide
ccagccuagag

SEQ ID NO: 65214 - RNA, 13 nt, Artificial Sequence
  Description of Artificial Sequence: Synthetic oligonucleotide
cucugugaagugu

SEQ ID NO: 65215 - RNA, 14 nt, Artificial Sequence
  Description of Artificial Sequence: Synthetic oligonucleotide
ugagaaaauuucaa

SEQ ID NO: 65216 - RNA, 11 nt, Artificial Sequence
  Description of Artificial Sequence: Synthetic oligonucleotide
aauccuccuga

SEQ ID NO: 65217 - RNA, 12 nt, Artificial Sequence
  Description of Artificial Sequence: Synthetic oligonucleotide
gugacaucauau

SEQ ID NO: 65218 - RNA, 13 nt, Artificial Sequence
  Description of Artificial Sequence: Synthetic oligonucleotide
aaucuucaucaua

SEQ ID NO: 65219 - RNA, 13 nt, Artificial Sequence
  Description of Artificial Sequence: Synthetic oligonucleotide
gacuagcuauuaa

SEQ ID NO: 65220 - RNA, 14 nt, Artificial Sequence
  Description of Artificial Sequence: Synthetic oligonucleotide
ucucuacuaaaaau

SEQ ID NO: 65221 - RNA, 12 nt, Artificial Sequence
  Description of Artificial Sequence: Synthetic oligonucleotide
ucuaucucgccu

SEQ ID NO: 65222 - RNA, 13 nt, Artificial Sequence
  Description of Artificial Sequence: Synthetic oligonucleotide
cuucgguccaguu

SEQ ID NO: 65223 - RNA, 11 nt, Artificial Sequence
  Description of Artificial Sequence: Synthetic oligonucleotide
gauguagccgc

SEQ ID NO: 65224 - RNA, 12 nt, Artificial Sequence
  Description of Artificial Sequence: Synthetic oligonucleotide
ugaggagacuug

SEQ ID NO: 65225 - RNA, 12 nt, Artificial Sequence
  Description of Artificial Sequence: Synthetic oligonucleotide
gaguagugagga

SEQ ID NO: 65226 - RNA, 14 nt, Artificial Sequence
  Description of Artificial Sequence: Synthetic oligonucleotide
cagaugaguacaaa

SEQ ID NO: 65227 - RNA, 13 nt, Artificial Sequence
  Description of Artificial Sequence: Synthetic oligonucleotide
guuguuaaugggc

SEQ ID NO: 65228 - RNA, 13 nt, Artificial Sequence
  Description of Artificial Sequence: Synthetic oligonucleotide
uuuuuaauuuauu

SEQ ID NO: 65229 - RNA, 12 nt, Artificial Sequence
  Description of Artificial Sequence: Synthetic oligonucleotide
uauuuaaauaug

SEQ ID NO: 65230 - RNA, 13 nt, Artificial Sequence
  Description of Artificial Sequence: Synthetic oligonucleotide
uauccuuuguuuc

SEQ ID NO: 65231 - RNA, 14 nt, Artificial Sequence
  Description of Artificial Sequence: Synthetic oligonucleotide
cgucuaaguguuug

SEQ ID NO: 65232 - RNA, 12 nt, Artificial Sequence
  Description of Artificial Sequence: Synthetic oligonucleotide
accugugacaaa

SEQ ID NO: 65233 - RNA, 13 nt, Artificial Sequence
  Description of Artificial Sequence: Synthetic oligonucleotide
ccaggcugaauua

SEQ ID NO: 65234 - RNA, 14 nt, Artificial Sequence
  Description of Artificial Sequence: Synthetic oligonucleotide
gucauucuuacaau

SEQ ID NO: 65235 - RNA, 15 nt, Artificial Sequence
  Description of Artificial Sequence: Synthetic oligonucleotide
ucauucuuacaauug

SEQ ID NO: 65236 - RNA, 12 nt, Artificial Sequence
  Description of Artificial Sequence: Synthetic oligonucleotide
cagagaguguac

SEQ ID NO: 65237 - RNA, 12 nt, Artificial Sequence
  Description of Artificial Sequence: Synthetic oligonucleotide
agaacucagcag

SEQ ID NO: 65238 - RNA, 13 nt, Artificial Sequence
  Description of Artificial Sequence: Synthetic oligonucleotide
uuuauuuucagua

SEQ ID NO: 65239 - RNA, 12 nt, Artificial Sequence
  Description of Artificial Sequence: Synthetic oligonucleotide
ucuuaaauggaa

SEQ ID NO: 65240 - RNA, 13 nt, Artificial Sequence
  Description of Artificial Sequence: Synthetic oligonucleotide
ugccuaaaauugu

SEQ ID NO: 65241 - RNA, 12 nt, Artificial Sequence
  Description of Artificial Sequence: Synthetic oligonucleotide
agacugugagcu

SEQ ID NO: 65242 - RNA, 14 nt, Artificial Sequence
  Description of Artificial Sequence: Synthetic oligonucleotide
ugcuuuuuauuaau

SEQ ID NO: 65243 - RNA, 13 nt, Artificial Sequence
  Description of Artificial Sequence: Synthetic oligonucleotide
cucuucuuacauu

SEQ ID NO: 65244 - RNA, 15 nt, Artificial Sequence
  Description of Artificial Sequence: Synthetic oligonucleotide
cauuuguaaaaaugu

SEQ ID NO: 65245 - RNA, 15 nt, Artificial Sequence
  Description of Artificial Sequence: Synthetic oligonucleotide
aucuuaauucauauu

SEQ ID NO: 65246 - RNA, 13 nt, Artificial Sequence
  Description of Artificial Sequence: Synthetic oligonucleotide
gaacuaaucauga

SEQ ID NO: 65247 - RNA, 12 nt, Artificial Sequence
  Description of Artificial Sequence: Synthetic oligonucleotide
ucugcucuuggg

SEQ ID NO: 65248 - RNA, 13 nt, Artificial Sequence
  Description of Artificial Sequence: Synthetic oligonucleotide
caguagcuuugag

SEQ ID NO: 65249 - RNA, 14 nt, Artificial Sequence
  Description of Artificial Sequence: Synthetic oligonucleotide
cacguaauauuuca

SEQ ID NO: 65250 - RNA, 13 nt, Artificial Sequence
  Description of Artificial Sequence: Synthetic oligonucleotide
uauucucuucacu

SEQ ID NO: 65251 - RNA, 14 nt, Artificial Sequence
  Description of Artificial Sequence: Synthetic oligonucleotide
cuaaugcuaagaaa

SEQ ID NO: 65252 - RNA, 12 nt, Artificial Sequence
  Description of Artificial Sequence: Synthetic oligonucleotide
gcugaaaaucaa

SEQ ID NO: 65253 - RNA, 14 nt, Artificial Sequence
  Description of Artificial Sequence: Synthetic oligonucleotide
aauaugauuacuuu

SEQ ID NO: 65254 - RNA, 14 nt, Artificial Sequence
  Description of Artificial Sequence: Synthetic oligonucleotide
cauuuuguucuaca

SEQ ID NO: 65255 - RNA, 12 nt, Artificial Sequence
  Description of Artificial Sequence: Synthetic oligonucleotide
cccgggacucuc

SEQ ID NO: 65256 - RNA, 14 nt, Artificial Sequence
  Description of Artificial Sequence: Synthetic oligonucleotide
ccuuuaaaguaaag

SEQ ID NO: 65257 - RNA, 13 nt, Artificial Sequence
  Description of Artificial Sequence: Synthetic oligonucleotide
ucuggaagccugg

SEQ ID NO: 65258 - RNA, 14 nt, Artificial Sequence
  Description of Artificial Sequence: Synthetic oligonucleotide
aaaacaaaagagag

SEQ ID NO: 65259 - RNA, 13 nt, Artificial Sequence
  Description of Artificial Sequence: Synthetic oligonucleotide
aucaguuaugccg

SEQ ID NO: 65260 - RNA, 13 nt, Artificial Sequence
  Description of Artificial Sequence: Synthetic oligonucleotide
uaaaagaagucca

SEQ ID NO: 65261 - RNA, 11 nt, Artificial Sequence
  Description of Artificial Sequence: Synthetic oligonucleotide
aggugagguua

SEQ ID NO: 65262 - RNA, 11 nt, Artificial Sequence
  Description of Artificial Sequence: Synthetic oligonucleotide
gggaagaggac

SEQ ID NO: 65263 - RNA, 13 nt, Artificial Sequence
  Description of Artificial Sequence: Synthetic oligonucleotide
aagcaaguauugu

SEQ ID NO: 65264 - RNA, 12 nt, Artificial Sequence
  Description of Artificial Sequence: Synthetic oligonucleotide
auuguagcacuc

SEQ ID NO: 65265 - RNA, 14 nt, Artificial Sequence
  Description of Artificial Sequence: Synthetic oligonucleotide
acaaaaccacaaau

SEQ ID NO: 65266 - RNA, 12 nt, Artificial Sequence
  Description of Artificial Sequence: Synthetic oligonucleotide
uaagcccauaca

SEQ ID NO: 65267 - RNA, 11 nt, Artificial Sequence
  Description of Artificial Sequence: Synthetic oligonucleotide
agcccauacag

SEQ ID NO: 65268 - RNA, 12 nt, Artificial Sequence
  Description of Artificial Sequence: Synthetic oligonucleotide
cagaaaccuucc

SEQ ID NO: 65269 - RNA, 10 nt, Artificial Sequence
  Description of Artificial Sequence: Synthetic oligonucleotide
guauaccuac

SEQ ID NO: 65270 - RNA, 13 nt, Artificial Sequence
  Description of Artificial Sequence: Synthetic oligonucleotide
gccaguuuucgga

SEQ ID NO: 65271 - RNA, 9 nt, Artificial Sequence
  Description of Artificial Sequence: Synthetic oligonucleotide
ggaacaggg

SEQ ID NO: 65272 - RNA, 13 nt, Artificial Sequence
  Description of Artificial Sequence: Synthetic oligonucleotide
uuaacuuuccagu

SEQ ID NO: 65273 - RNA, 14 nt, Artificial Sequence
  Description of Artificial Sequence: Synthetic oligonucleotide
aaaguuugguuuug

SEQ ID NO: 65274 - RNA, 12 nt, Artificial Sequence
  Description of Artificial Sequence: Synthetic oligonucleotide
cuucccacugua

SEQ ID NO: 65275 - RNA, 13 nt, Artificial Sequence
  Description of Artificial Sequence: Synthetic oligonucleotide
ugauaccauauga

SEQ ID NO: 65276 - RNA, 11 nt, Artificial Sequence
  Description of Artificial Sequence: Synthetic oligonucleotide
aacaugggcug

SEQ ID NO: 65277 - RNA, 13 nt, Artificial Sequence
  Description of Artificial Sequence: Synthetic oligonucleotide
caacuuuuucaua

SEQ ID NO: 65278 - RNA, 12 nt, Artificial Sequence
  Description of Artificial Sequence: Synthetic oligonucleotide
caugaggccgga

SEQ ID NO: 65279 - RNA, 11 nt, Artificial Sequence
  Description of Artificial Sequence: Synthetic oligonucleotide
acugcauuugu

SEQ ID NO: 65280 - RNA, 13 nt, Artificial Sequence
  Description of Artificial Sequence: Synthetic oligonucleotide
aauguuuacuacc

SEQ ID NO: 65281 - RNA, 15 nt, Artificial Sequence
  Description of Artificial Sequence: Synthetic oligonucleotide
aauuuuuugaugaaa

SEQ ID NO: 65282 - RNA, 14 nt, Artificial Sequence
  Description of Artificial Sequence: Synthetic oligonucleotide
cagugugugaauuu

SEQ ID NO: 65283 - RNA, 13 nt, Artificial Sequence
  Description of Artificial Sequence: Synthetic oligonucleotide
gagcaauguaugu

SEQ ID NO: 65284 - RNA, 14 nt, Artificial Sequence
  Description of Artificial Sequence: Synthetic oligonucleotide
aaagcacauauaua

SEQ ID NO: 65285 - RNA, 14 nt, Artificial Sequence
  Description of Artificial Sequence: Synthetic oligonucleotide
guaauaguuucucc

SEQ ID NO: 65286 - RNA, 13 nt, Artificial Sequence
  Description of Artificial Sequence: Synthetic oligonucleotide
aguuucuccaaau

SEQ ID NO: 65287 - RNA, 13 nt, Artificial Sequence
  Description of Artificial Sequence: Synthetic oligonucleotide
uacuuccuagaaa

SEQ ID NO: 65288 - RNA, 13 nt, Artificial Sequence
  Description of Artificial Sequence: Synthetic oligonucleotide
uacaccauauaug

SEQ ID NO: 65289 - RNA, 14 nt, Artificial Sequence
  Description of Artificial Sequence: Synthetic oligonucleotide
auauaugaauggag

SEQ ID NO: 65290 - RNA, 13 nt, Artificial Sequence
  Description of Artificial Sequence: Synthetic oligonucleotide
acgagaagaagau

SEQ ID NO: 65291 - RNA, 13 nt, Artificial Sequence
  Description of Artificial Sequence: Synthetic oligonucleotide
ucauuuacaggga

SEQ ID NO: 65292 - RNA, 13 nt, Artificial Sequence
  Description of Artificial Sequence: Synthetic oligonucleotide
cauuuacagggac

SEQ ID NO: 65293 - RNA, 10 nt, Artificial Sequence
  Description of Artificial Sequence: Synthetic oligonucleotide
agggaccuga

SEQ ID NO: 65294 - RNA, 14 nt, Artificial Sequence
  Description of Artificial Sequence: Synthetic oligonucleotide
uguuugacugcauc

SEQ ID NO: 65295 - RNA, 13 nt, Artificial Sequence
  Description of Artificial Sequence: Synthetic oligonucleotide
uuugacugcaucg

SEQ ID NO: 65296 - RNA, 12 nt, Artificial Sequence
  Description of Artificial Sequence: Synthetic oligonucleotide
gaguucacaggg

SEQ ID NO: 65297 - RNA, 13 nt, Artificial Sequence
  Description of Artificial Sequence: Synthetic oligonucleotide
ggcaccucugucc

SEQ ID NO: 65298 - RNA, 15 nt, Artificial Sequence
  Description of Artificial Sequence: Synthetic oligonucleotide
gguuugucuuuuuaa

SEQ ID NO: 65299 - RNA, 14 nt, Artificial Sequence
  Description of Artificial Sequence: Synthetic oligonucleotide
uuugucuuuuuaag

SEQ ID NO: 65300 - RNA, 13 nt, Artificial Sequence
  Description of Artificial Sequence: Synthetic oligonucleotide
ccuaaagguuguc

SEQ ID NO: 65301 - RNA, 12 nt, Artificial Sequence
  Description of Artificial Sequence: Synthetic oligonucleotide
aagguugucgac

SEQ ID NO: 65302 - RNA, 13 nt, Artificial Sequence
  Description of Artificial Sequence: Synthetic oligonucleotide
accuggcaauugu

SEQ ID NO: 65303 - RNA, 12 nt, Artificial Sequence
  Description of Artificial Sequence: Synthetic oligonucleotide
aguggugcgagg

SEQ ID NO: 65304 - RNA, 13 nt, Artificial Sequence
  Description of Artificial Sequence: Synthetic oligonucleotide
agagacaugaaau

SEQ ID NO: 65305 - RNA, 13 nt, Artificial Sequence
  Description of Artificial Sequence: Synthetic oligonucleotide
auauauuucucca

SEQ ID NO: 65306 - RNA, 10 nt, Artificial Sequence
  Description of Artificial Sequence: Synthetic oligonucleotide
caugaaggcu

SEQ ID NO: 65307 - RNA, 11 nt, Artificial Sequence
  Description of Artificial Sequence: Synthetic oligonucleotide
gcuggaguggu

SEQ ID NO: 65308 - RNA, 11 nt, Artificial Sequence
  Description of Artificial Sequence: Synthetic oligonucleotide
aggaagagagg

SEQ ID NO: 65309 - RNA, 12 nt, Artificial Sequence
  Description of Artificial Sequence: Synthetic oligonucleotide
cuugcaucgggc

SEQ ID NO: 65310 - RNA, 13 nt, Artificial Sequence
  Description of Artificial Sequence: Synthetic oligonucleotide
auauccuacugug

SEQ ID NO: 65311 - RNA, 13 nt, Artificial Sequence
  Description of Artificial Sequence: Synthetic oligonucleotide
uccuacuguguaa

SEQ ID NO: 65312 - RNA, 12 nt, Artificial Sequence
  Description of Artificial Sequence: Synthetic oligonucleotide
ccuuguagugua

SEQ ID NO: 65313 - RNA, 13 nt, Artificial Sequence
  Description of Artificial Sequence: Synthetic oligonucleotide
ucuuuguugauug

SEQ ID NO: 65314 - RNA, 14 nt, Artificial Sequence
  Description of Artificial Sequence: Synthetic oligonucleotide
uuuguugauugaaa

SEQ ID NO: 65315 - RNA, 15 nt, Artificial Sequence
  Description of Artificial Sequence: Synthetic oligonucleotide
uucuuuuucuuccau

SEQ ID NO: 65316 - RNA, 13 nt, Artificial Sequence
  Description of Artificial Sequence: Synthetic oligonucleotide
aaucuuccuucua

SEQ ID NO: 65317 - RNA, 13 nt, Artificial Sequence
  Description of Artificial Sequence: Synthetic oligonucleotide
uugaaugcuucau

SEQ ID NO: 65318 - RNA, 13 nt, Artificial Sequence
  Description of Artificial Sequence: Synthetic oligonucleotide
ugaaugcuucaug

SEQ ID NO: 65319 - RNA, 13 nt, Artificial Sequence
  Description of Artificial Sequence: Synthetic oligonucleotide
aauucuacuuuga

SEQ ID NO: 65320 - RNA, 13 nt, Artificial Sequence
  Description of Artificial Sequence: Synthetic oligonucleotide
agcaacuacagac

SEQ ID NO: 65321 - RNA, 13 nt, Artificial Sequence
  Description of Artificial Sequence: Synthetic oligonucleotide
gaccaaggucaac

SEQ ID NO: 65322 - RNA, 13 nt, Artificial Sequence
  Description of Artificial Sequence: Synthetic oligonucleotide
cgacuaucucgac

SEQ ID NO: 65323 - RNA, 13 nt, Artificial Sequence
  Description of Artificial Sequence: Synthetic oligonucleotide
aaccuucccaaac

SEQ ID NO: 65324 - RNA, 14 nt, Artificial Sequence
  Description of Artificial Sequence: Synthetic oligonucleotide
ccaagcuuagaacu

SEQ ID NO: 65325 - RNA, 15 nt, Artificial Sequence
  Description of Artificial Sequence: Synthetic oligonucleotide
agcuuagaacuuuaa

SEQ ID NO: 65326 - RNA, 11 nt, Artificial Sequence
  Description of Artificial Sequence: Synthetic oligonucleotide
aagaccaccac

SEQ ID NO: 65327 - RNA, 14 nt, Artificial Sequence
  Description of Artificial Sequence: Synthetic oligonucleotide
gcgagaaauaaagu

SEQ ID NO: 65328 - RNA, 14 nt, Artificial Sequence
  Description of Artificial Sequence: Synthetic oligonucleotide
cgagaaauaaaguu

SEQ ID NO: 65329 - RNA, 12 nt, Artificial Sequence
  Description of Artificial Sequence: Synthetic oligonucleotide
aggaaaugaucc

SEQ ID NO: 65330 - RNA, 13 nt, Artificial Sequence
  Description of Artificial Sequence: Synthetic oligonucleotide
gaagaaaugaaac

SEQ ID NO: 65331 - RNA, 13 nt, Artificial Sequence
  Description of Artificial Sequence: Synthetic oligonucleotide
guuuccauccucc

SEQ ID NO: 65332 - RNA, 15 nt, Artificial Sequence
  Description of Artificial Sequence: Synthetic oligonucleotide
acugaaaaucuuuga

SEQ ID NO: 65333 - RNA, 11 nt, Artificial Sequence
  Description of Artificial Sequence: Synthetic oligonucleotide
ugccguucagg

SEQ ID NO: 65334 - RNA, 13 nt, Artificial Sequence
  Description of Artificial Sequence: Synthetic oligonucleotide
caggguccagaag

SEQ ID NO: 65335 - RNA, 13 nt, Artificial Sequence
  Description of Artificial Sequence: Synthetic oligonucleotide
ucaagacugcuug

SEQ ID NO: 65336 - RNA, 13 nt, Artificial Sequence
  Description of Artificial Sequence: Synthetic oligonucleotide
uccaugucuuugg

SEQ ID NO: 65337 - RNA, 11 nt, Artificial Sequence
  Description of Artificial Sequence: Synthetic oligonucleotide
gccugaaacac

SEQ ID NO: 65338 - RNA, 12 nt, Artificial Sequence
  Description of Artificial Sequence: Synthetic oligonucleotide
ucucuguaccuc

SEQ ID NO: 65339 - RNA, 12 nt, Artificial Sequence
  Description of Artificial Sequence: Synthetic oligonucleotide
agcaagacaaga

SEQ ID NO: 65340 - RNA, 13 nt, Artificial Sequence
  Description of Artificial Sequence: Synthetic oligonucleotide
gcaagacaagaaa

SEQ ID NO: 65341 - RNA, 12 nt, Artificial Sequence
  Description of Artificial Sequence: Synthetic oligonucleotide
uguacaagaucc

SEQ ID NO: 65342 - RNA, 12 nt, Artificial Sequence
  Description of Artificial Sequence: Synthetic oligonucleotide
cguacuugcaga

SEQ ID NO: 65343 - RNA, 13 nt, Artificial Sequence
  Description of Artificial Sequence: Synthetic oligonucleotide
cgaucgauacaga

SEQ ID NO: 65344 - RNA, 13 nt, Artificial Sequence
  Description of Artificial Sequence: Synthetic oligonucleotide
uauaaaaauaaau

SEQ ID NO: 65345 - RNA, 13 nt, Artificial Sequence
  Description of Artificial Sequence: Synthetic oligonucleotide
uaaaaauaaauau

SEQ ID NO: 65346 - RNA, 13 nt, Artificial Sequence
  Description of Artificial Sequence: Synthetic oligonucleotide
uuugacugcugug

SEQ ID NO: 65347 - RNA, 13 nt, Artificial Sequence
  Description of Artificial Sequence: Synthetic oligonucleotide
ggagaugagagac

SEQ ID NO: 65348 - RNA, 10 nt, Artificial Sequence
  Description of Artificial Sequence: Synthetic oligonucleotide
ucccacuugg

SEQ ID NO: 65349 - RNA, 10 nt, Artificial Sequence
  Description of Artificial Sequence: Synthetic oligonucleotide
guucacggcc

SEQ ID NO: 65350 - RNA, 12 nt, Artificial Sequence
  Description of Artificial Sequence: Synthetic oligonucleotide
accaucacacca

SEQ ID NO: 65351 - RNA, 10 nt, Artificial Sequence
  Description of Artificial Sequence: Synthetic oligonucleotide
cugcggguuu

SEQ ID NO: 65352 - RNA, 9 nt, Artificial Sequence
  Description of Artificial Sequence: Synthetic oligonucleotide
uccaguuug

SEQ ID NO: 65353 - RNA, 12 nt, Artificial Sequence
  Description of Artificial Sequence: Synthetic oligonucleotide
uuaaggacuucu

SEQ ID NO: 65354 - RNA, 12 nt, Artificial Sequence
  Description of Artificial Sequence: Synthetic oligonucleotide
agugggacagag

SEQ ID NO: 65355 - RNA, 13 nt, Artificial Sequence
  Description of Artificial Sequence: Synthetic oligonucleotide
auuuguuauugug

SEQ ID NO: 65356 - RNA, 12 nt, Artificial Sequence
  Description of Artificial Sequence: Synthetic oligonucleotide
ucaaaugcauuu

SEQ ID NO: 65357 - RNA, 9 nt, Artificial Sequence
  Description of Artificial Sequence: Synthetic oligonucleotide
aggaaagcc

SEQ ID NO: 65358 - RNA, 10 nt, Artificial Sequence
  Description of Artificial Sequence: Synthetic oligonucleotide
ggaaagcccu

SEQ ID NO: 65359 - RNA, 11 nt, Artificial Sequence
  Description of Artificial Sequence: Synthetic oligonucleotide
ccagcauggcc

SEQ ID NO: 65360 - RNA, 10 nt, Artificial Sequence
  Description of Artificial Sequence: Synthetic oligonucleotide
uucucccuga

SEQ ID NO: 65361 - RNA, 11 nt, Artificial Sequence
  Description of Artificial Sequence: Synthetic oligonucleotide
aagaagcccuu

SEQ ID NO: 65362 - RNA, 11 nt, Artificial Sequence
  Description of Artificial Sequence: Synthetic oligonucleotide
gaagcccuuca

SEQ ID NO: 65363 - RNA, 10 nt, Artificial Sequence
  Description of Artificial Sequence: Synthetic oligonucleotide
cccuucagcg

SEQ ID NO: 65364 - RNA, 10 nt, Artificial Sequence
  Description of Artificial Sequence: Synthetic oligonucleotide
cuucagcggc

SEQ ID NO: 65365 - RNA, 11 nt, Artificial Sequence
  Description of Artificial Sequence: Synthetic oligonucleotide
cagcggccagu

SEQ ID NO: 65366 - RNA, 11 nt, Artificial Sequence
  Description of Artificial Sequence: Synthetic oligonucleotide
gaaaagcuccg

SEQ ID NO: 65367 - RNA, 10 nt, Artificial Sequence
  Description of Artificial Sequence: Synthetic oligonucleotide
aaagcuccgg

SEQ ID NO: 65368 - RNA, 12 nt, Artificial Sequence
  Description of Artificial Sequence: Synthetic oligonucleotide
gucaacagucug

SEQ ID NO: 65369 - RNA, 12 nt, Artificial Sequence
  Description of Artificial Sequence: Synthetic oligonucleotide
agaguucaaaag

SEQ ID NO: 65370 - RNA, 12 nt, Artificial Sequence
  Description of Artificial Sequence: Synthetic oligonucleotide
gaguucaaaagc

SEQ ID NO: 65371 - RNA, 11 nt, Artificial Sequence
  Description of Artificial Sequence: Synthetic oligonucleotide
ucaaaagcccu

SEQ ID NO: 65372 - RNA, 11 nt, Artificial Sequence
  Description of Artificial Sequence: Synthetic oligonucleotide
caaaagcccuu

SEQ ID NO: 65373 - RNA, 11 nt, Artificial Sequence
  Description of Artificial Sequence: Synthetic oligonucleotide
aaagcccuuca

SEQ ID NO: 65374 - RNA, 11 nt, Artificial Sequence
  Description of Artificial Sequence: Synthetic oligonucleotide
aagcccuucag

SEQ ID NO: 65375 - RNA, 12 nt, Artificial Sequence
  Description of Artificial Sequence: Synthetic oligonucleotide
ugaagccgcucg

SEQ ID NO: 65376 - RNA, 11 nt, Artificial Sequence
  Description of Artificial Sequence: Synthetic oligonucleotide
acgccagucaa

SEQ ID NO: 65377 - RNA, 12 nt, Artificial Sequence
  Description of Artificial Sequence: Synthetic oligonucleotide
ucuuggugcgug

SEQ ID NO: 65378 - RNA, 13 nt, Artificial Sequence
  Description of Artificial Sequence: Synthetic oligonucleotide
uuggauucaucag

SEQ ID NO: 65379 - RNA, 12 nt, Artificial Sequence
  Description of Artificial Sequence: Synthetic oligonucleotide
ggaauaccuaag

SEQ ID NO: 65380 - RNA, 11 nt, Artificial Sequence
  Description of Artificial Sequence: Synthetic oligonucleotide
uuugaggcuca

SEQ ID NO: 65381 - RNA, 10 nt, Artificial Sequence
  Description of Artificial Sequence: Synthetic oligonucleotide
cuacaauugg

SEQ ID NO: 65382 - RNA, 11 nt, Artificial Sequence
  Description of Artificial Sequence: Synthetic oligonucleotide
aguuaggagcc

SEQ ID NO: 65383 - RNA, 12 nt, Artificial Sequence
  Description of Artificial Sequence: Synthetic oligonucleotide
gucaauauccac

SEQ ID NO: 65384 - RNA, 12 nt, Artificial Sequence
  Description of Artificial Sequence: Synthetic oligonucleotide
uguucagucaca

SEQ ID NO: 65385 - RNA, 11 nt, Artificial Sequence
  Description of Artificial Sequence: Synthetic oligonucleotide
cacacacauac

SEQ ID NO: 65386 - RNA, 11 nt, Artificial Sequence
  Description of Artificial Sequence: Synthetic oligonucleotide
uccuuuugcuu

SEQ ID NO: 65387 - RNA, 15 nt, Artificial Sequence
  Description of Artificial Sequence: Synthetic oligonucleotide
uuuaaaguaauuuuu

SEQ ID NO: 65388 - RNA, 12 nt, Artificial Sequence
  Description of Artificial Sequence: Synthetic oligonucleotide
aacagucaaugg

SEQ ID NO: 65389 - RNA, 12 nt, Artificial Sequence
  Description of Artificial Sequence: Synthetic oligonucleotide
cgacaaaccaau

SEQ ID NO: 65390 - RNA, 11 nt, Artificial Sequence
  Description of Artificial Sequence: Synthetic oligonucleotide
cugcuaccacu

SEQ ID NO: 65391 - RNA, 12 nt, Artificial Sequence
  Description of Artificial Sequence: Synthetic oligonucleotide
caagcggucuua

SEQ ID NO: 65392 - RNA, 12 nt, Artificial Sequence
  Description of Artificial Sequence: Synthetic oligonucleotide
gucuuaccggcu

SEQ ID NO: 65393 - RNA, 10 nt, Artificial Sequence
  Description of Artificial Sequence: Synthetic oligonucleotide
auggguuacc

SEQ ID NO: 65394 - RNA, 10 nt, Artificial Sequence
  Description of Artificial Sequence: Synthetic oligonucleotide
uuaccugcga

SEQ ID NO: 65395 - RNA, 11 nt, Artificial Sequence
  Description of Artificial Sequence: Synthetic oligonucleotide
aucuugcugag

SEQ ID NO: 65396 - RNA, 12 nt, Artificial Sequence
  Description of Artificial Sequence: Synthetic oligonucleotide
gcauaaaacagu

SEQ ID NO: 65397 - RNA, 11 nt, Artificial Sequence
  Description of Artificial Sequence: Synthetic oligonucleotide
uccuuuauccu

SEQ ID NO: 65398 - RNA, 11 nt, Artificial Sequence
  Description of Artificial Sequence: Synthetic oligonucleotide
aacgcaaguug

SEQ ID NO: 65399 - RNA, 12 nt, Artificial Sequence
  Description of Artificial Sequence: Synthetic oligonucleotide
aacugaaaccau

SEQ ID NO: 65400 - RNA, 13 nt, Artificial Sequence
  Description of Artificial Sequence: Synthetic oligonucleotide
cuuuguuaaauau

SEQ ID NO: 65401 - RNA, 13 nt, Artificial Sequence
  Description of Artificial Sequence: Synthetic oligonucleotide
uauauuaaaaguu

SEQ ID NO: 65402 - RNA, 12 nt, Artificial Sequence
  Description of Artificial Sequence: Synthetic oligonucleotide
uuuugacuuaac

SEQ ID NO: 65403 - RNA, 12 nt, Artificial Sequence
  Description of Artificial Sequence: Synthetic oligonucleotide
caaacucagcac

SEQ ID NO: 65404 - RNA, 10 nt, Artificial Sequence
  Description of Artificial Sequence: Synthetic oligonucleotide
gcugaccuca

SEQ ID NO: 65405 - RNA, 13 nt, Artificial Sequence
  Description of Artificial Sequence: Synthetic oligonucleotide
uuauucagaucgc

SEQ ID NO: 65406 - RNA, 12 nt, Artificial Sequence
  Description of Artificial Sequence: Synthetic oligonucleotide
ggguucugggau

SEQ ID NO: 65407 - RNA, 14 nt, Artificial Sequence
  Description of Artificial Sequence: Synthetic oligonucleotide
uauuggaaauuaug

SEQ ID NO: 65408 - RNA, 12 nt, Artificial Sequence
  Description of Artificial Sequence: Synthetic oligonucleotide
uggaagcacuag

SEQ ID NO: 65409 - RNA, 12 nt, Artificial Sequence
  Description of Artificial Sequence: Synthetic oligonucleotide
uuuuuaugugga

SEQ ID NO: 65410 - RNA, 11 nt, Artificial Sequence
  Description of Artificial Sequence: Synthetic oligonucleotide
gaauugguaga

SEQ ID NO: 65411 - RNA, 12 nt, Artificial Sequence
  Description of Artificial Sequence: Synthetic oligonucleotide
uagacuuggaga

SEQ ID NO: 65412 - RNA, 12 nt, Artificial Sequence
  Description of Artificial Sequence: Synthetic oligonucleotide
uacaguauucca

SEQ ID NO: 65413 - RNA, 14 nt, Artificial Sequence
  Description of Artificial Sequence: Synthetic oligonucleotide
cacugaugaauuaa

SEQ ID NO: 65414 - RNA, 11 nt, Artificial Sequence
  Description of Artificial Sequence: Synthetic oligonucleotide
cacaucaucac

SEQ ID NO: 65415 - RNA, 12 nt, Artificial Sequence
  Description of Artificial Sequence: Synthetic oligonucleotide
ucaccaaacaga

SEQ ID NO: 65416 - RNA, 11 nt, Artificial Sequence
  Description of Artificial Sequence: Synthetic oligonucleotide
gaacaugaugg

SEQ ID NO: 65417 - RNA, 11 nt, Artificial Sequence
  Description of Artificial Sequence: Synthetic oligonucleotide
auguagacugc

SEQ ID NO: 65418 - RNA, 12 nt, Artificial Sequence
  Description of Artificial Sequence: Synthetic oligonucleotide
gaucuauuuaug

SEQ ID NO: 65419 - RNA, 11 nt, Artificial Sequence
  Description of Artificial Sequence: Synthetic oligonucleotide
cacuauuauca

SEQ ID NO: 65420 - RNA, 10 nt, Artificial Sequence
  Description of Artificial Sequence: Synthetic oligonucleotide
ucaguucugc

SEQ ID NO: 65421 - RNA, 12 nt, Artificial Sequence
  Description of Artificial Sequence: Synthetic oligonucleotide
gauuaaaccuac

SEQ ID NO: 65422 - RNA, 12 nt, Artificial Sequence
  Description of Artificial Sequence: Synthetic oligonucleotide
uaaaauccuucu

SEQ ID NO: 65423 - RNA, 11 nt, Artificial Sequence
  Description of Artificial Sequence: Synthetic oligonucleotide
augcuguagac

SEQ ID NO: 65424 - RNA, 12 nt, Artificial Sequence
  Description of Artificial Sequence: Synthetic oligonucleotide
ugauaggaauag

SEQ ID NO: 65425 - RNA, 10 nt, Artificial Sequence
  Description of Artificial Sequence: Synthetic oligonucleotide
auggcccuga

SEQ ID NO: 65426 - RNA, 10 nt, Artificial Sequence
  Description of Artificial Sequence: Synthetic oligonucleotide
uccucaagca

SEQ ID NO: 65427 - RNA, 9 nt, Artificial Sequence
  Description of Artificial Sequence: Synthetic oligonucleotide
uucagccca

SEQ ID NO: 65428 - RNA, 10 nt, Artificial Sequence
  Description of Artificial Sequence: Synthetic oligonucleotide
cugcugaacc

SEQ ID NO: 65429 - RNA, 11 nt, Artificial Sequence
  Description of Artificial Sequence: Synthetic oligonucleotide
aguucucuuca

SEQ ID NO: 65430 - RNA, 10 nt, Artificial Sequence
  Description of Artificial Sequence: Synthetic oligonucleotide
cagccuagag

SEQ ID NO: 65431 - RNA, 12 nt, Artificial Sequence
  Description of Artificial Sequence: Synthetic oligonucleotide
ucugugaagugu

SEQ ID NO: 65432 - RNA, 13 nt, Artificial Sequence
  Description of Artificial Sequence: Synthetic oligonucleotide
gagaaaauuucaa

SEQ ID NO: 65433 - RNA, 10 nt, Artificial Sequence
  Description of Artificial Sequence: Synthetic oligonucleotide
auccuccuga

SEQ ID NO: 65434 - RNA, 11 nt, Artificial Sequence
  Description of Artificial Sequence: Synthetic oligonucleotide
ugacaucauau

SEQ ID NO: 65435 - RNA, 12 nt, Artificial Sequence
  Description of Artificial Sequence: Synthetic oligonucleotide
aucuucaucaua

SEQ ID NO: 65436 - RNA, 12 nt, Artificial Sequence
  Description of Artificial Sequence: Synthetic oligonucleotide
acuagcuauuaa

SEQ ID NO: 65437 - RNA, 13 nt, Artificial Sequence
  Description of Artificial Sequence: Synthetic oligonucleotide
cucuacuaaaaau

SEQ ID NO: 65438 - RNA, 11 nt, Artificial Sequence
  Description of Artificial Sequence: Synthetic oligonucleotide
cuaucucgccu

SEQ ID NO: 65439 - RNA, 12 nt, Artificial Sequence
  Description of Artificial Sequence: Synthetic oligonucleotide
uucgguccaguu

SEQ ID NO: 65440 - RNA, 10 nt, Artificial Sequence
  Description of Artificial Sequence: Synthetic oligonucleotide
auguagccgc

SEQ ID NO: 65441 - RNA, 11 nt, Artificial Sequence
  Description of Artificial Sequence: Synthetic oligonucleotide
gaggagacuug

SEQ ID NO: 65442 - RNA, 11 nt, Artificial Sequence
  Description of Artificial Sequence: Synthetic oligonucleotide
aguagugagga

SEQ ID NO: 65443 - RNA, 13 nt, Artificial Sequence
  Description of Artificial Sequence: Synthetic oligonucleotide
agaugaguacaaa

SEQ ID NO: 65444 - RNA, 12 nt, Artificial Sequence
  Description of Artificial Sequence: Synthetic oligonucleotide
uuguuaaugggc

SEQ ID NO: 65445 - RNA, 12 nt, Artificial Sequence
  Description of Artificial Sequence: Synthetic oligonucleotide
uuuuaauuuauu

SEQ ID NO: 65446 - RNA, 11 nt, Artificial Sequence
  Description of Artificial Sequence: Synthetic oligonucleotide
auuuaaauaug

SEQ ID NO: 65447 - RNA, 12 nt, Artificial Sequence
  Description of Artificial Sequence: Synthetic oligonucleotide
auccuuuguuuc

SEQ ID NO: 65448 - RNA, 13 nt, Artificial Sequence
  Description of Artificial Sequence: Synthetic oligonucleotide
gucuaaguguuug

SEQ ID NO: 65449 - RNA, 11 nt, Artificial Sequence
  Description of Artificial Sequence: Synthetic oligonucleotide
ccugugacaaa

SEQ ID NO: 65450 - RNA, 12 nt, Artificial Sequence
  Description of Artificial Sequence: Synthetic oligonucleotide
caggcugaauua

SEQ ID NO: 65451 - RNA, 13 nt, Artificial Sequence
  Description of Artificial Sequence: Synthetic oligonucleotide
ucauucuuacaau

SEQ ID NO: 65452 - RNA, 14 nt, Artificial Sequence
  Description of Artificial Sequence: Synthetic oligonucleotide
cauucuuacaauug

SEQ ID NO: 65453 - RNA, 11 nt, Artificial Sequence
  Description of Artificial Sequence: Synthetic oligonucleotide
agagaguguac

SEQ ID NO: 65454 - RNA, 11 nt, Artificial Sequence
  Description of Artificial Sequence: Synthetic oligonucleotide
gaacucagcag

SEQ ID NO: 65455 - RNA, 12 nt, Artificial Sequence
  Description of Artificial Sequence: Synthetic oligonucleotide
uuauuuucagua

SEQ ID NO: 65456 - RNA, 11 nt, Artificial Sequence
  Description of Artificial Sequence: Synthetic oligonucleotide
cuuaaauggaa

SEQ ID NO: 65457 - RNA, 12 nt, Artificial Sequence
  Description of Artificial Sequence: Synthetic oligonucleotide
gccuaaaauugu

SEQ ID NO: 65458 - RNA, 12 nt, Artificial Sequence
  Description of Artificial Sequence: Synthetic oligonucleotide
acuaacaucugg

SEQ ID NO: 65459 - RNA, 11 nt, Artificial Sequence
  Description of Artificial Sequence: Synthetic oligonucleotide
gacugugagcu

SEQ ID NO: 65460 - RNA, 13 nt, Artificial Sequence
  Description of Artificial Sequence: Synthetic oligonucleotide
gcuuuuuauuaau

SEQ ID NO: 65461 - RNA, 12 nt, Artificial Sequence
  Description of Artificial Sequence: Synthetic oligonucleotide
ucuucuuacauu

SEQ ID NO: 65462 - RNA, 14 nt, Artificial Sequence
  Description of Artificial Sequence: Synthetic oligonucleotide
auuuguaaaaaugu

SEQ ID NO: 65463 - RNA, 14 nt, Artificial Sequence
  Description of Artificial Sequence: Synthetic oligonucleotide
ucuuaauucauauu

SEQ ID NO: 65464 - RNA, 12 nt, Artificial Sequence
  Description of Artificial Sequence: Synthetic oligonucleotide
aacuaaucauga

SEQ ID NO: 65465 - RNA, 11 nt, Artificial Sequence
  Description of Artificial Sequence: Synthetic oligonucleotide
cugcucuuggg

SEQ ID NO: 65466 - RNA, 12 nt, Artificial Sequence
  Description of Artificial Sequence: Synthetic oligonucleotide
aguagcuuugag

SEQ ID NO: 65467 - RNA, 13 nt, Artificial Sequence
  Description of Artificial Sequence: Synthetic oligonucleotide
acguaauauuuca

SEQ ID NO: 65468 - RNA, 12 nt, Artificial Sequence
  Description of Artificial Sequence: Synthetic oligonucleotide
auucucuucacu

SEQ ID NO: 65469 - RNA, 13 nt, Artificial Sequence
  Description of Artificial Sequence: Synthetic oligonucleotide
uaaugcuaagaaa

SEQ ID NO: 65470 - RNA, 11 nt, Artificial Sequence
  Description of Artificial Sequence: Synthetic oligonucleotide
cugaaaaucaa

SEQ ID NO: 65471 - RNA, 13 nt, Artificial Sequence
  Description of Artificial Sequence: Synthetic oligonucleotide
auaugauuacuuu

SEQ ID NO: 65472 - RNA, 13 nt, Artificial Sequence
  Description of Artificial Sequence: Synthetic oligonucleotide
auuuuguucuaca

SEQ ID NO: 65473 - RNA, 11 nt, Artificial Sequence
  Description of Artificial Sequence: Synthetic oligonucleotide
ccgggacucuc

SEQ ID NO: 65474 - RNA, 13 nt, Artificial Sequence
  Description of Artificial Sequence: Synthetic oligonucleotide
cuuuaaaguaaag

SEQ ID NO: 65475 - RNA, 12 nt, Artificial Sequence
  Description of Artificial Sequence: Synthetic oligonucleotide
cuggaagccugg

SEQ ID NO: 65476 - RNA, 13 nt, Artificial Sequence
  Description of Artificial Sequence: Synthetic oligonucleotide
aaacaaaagagag

SEQ ID NO: 65477 - RNA, 12 nt, Artificial Sequence
  Description of Artificial Sequence: Synthetic oligonucleotide
ucaguuaugccg

SEQ ID NO: 65478 - RNA, 12 nt, Artificial Sequence
  Description of Artificial Sequence: Synthetic oligonucleotide
aaaagaagucca

SEQ ID NO: 65479 - RNA, 10 nt, Artificial Sequence
  Description of Artificial Sequence: Synthetic oligonucleotide
ggugagguua

SEQ ID NO: 65480 - RNA, 10 nt, Artificial Sequence
  Description of Artificial Sequence: Synthetic oligonucleotide
ggaagaggac

SEQ ID NO: 65481 - RNA, 12 nt, Artificial Sequence
  Description of Artificial Sequence: Synthetic oligonucleotide
agcaaguauugu

SEQ ID NO: 65482 - RNA, 11 nt, Artificial Sequence
  Description of Artificial Sequence: Synthetic oligonucleotide
uuguagcacuc

SEQ ID NO: 65483 - RNA, 13 nt, Artificial Sequence
  Description of Artificial Sequence: Synthetic oligonucleotide
caaaaccacaaau

SEQ ID NO: 65484 - RNA, 11 nt, Artificial Sequence
  Description of Artificial Sequence: Synthetic oligonucleotide
aagcccauaca

SEQ ID NO: 65485 - RNA, 10 nt, Artificial Sequence
  Description of Artificial Sequence: Synthetic oligonucleotide
gcccauacag

SEQ ID NO: 65486 - RNA, 11 nt, Artificial Sequence
  Description of Artificial Sequence: Synthetic oligonucleotide
agaaaccuucc

SEQ ID NO: 65487 - RNA, 9 nt, Artificial Sequence
  Description of Artificial Sequence: Synthetic oligonucleotide
uauaccuac

SEQ ID NO: 65488 - RNA, 12 nt, Artificial Sequence
  Description of Artificial Sequence: Synthetic oligonucleotide
ccaguuuucgga

SEQ ID NO: 65489 - RNA, 8 nt, Artificial Sequence
  Description of Artificial Sequence: Synthetic oligonucleotide
gaacaggg

SEQ ID NO: 65490 - RNA, 12 nt, Artificial Sequence
  Description of Artificial Sequence: Synthetic oligonucleotide
uaacuuuccagu

SEQ ID NO: 65491 - RNA, 13 nt, Artificial Sequence
  Description of Artificial Sequence: Synthetic oligonucleotide
aaguuugguuuug

SEQ ID NO: 65492 - RNA, 11 nt, Artificial Sequence
  Description of Artificial Sequence: Synthetic oligonucleotide
uucccacugua

SEQ ID NO: 65493 - RNA, 12 nt, Artificial Sequence
  Description of Artificial Sequence: Synthetic oligonucleotide
gauaccauauga

SEQ ID NO: 65494 - RNA, 10 nt, Artificial Sequence
  Description of Artificial Sequence: Synthetic oligonucleotide
acaugggcug

SEQ ID NO: 65495 - RNA, 12 nt, Artificial Sequence
  Description of Artificial Sequence: Synthetic oligonucleotide
aacuuuuucaua

SEQ ID NO: 65496 - RNA, 11 nt, Artificial Sequence
  Description of Artificial Sequence: Synthetic oligonucleotide
augaggccgga

SEQ ID NO: 65497 - RNA, 10 nt, Artificial Sequence
  Description of Artificial Sequence: Synthetic oligonucleotide
cugcauuugu

SEQ ID NO: 65498 - RNA, 12 nt, Artificial Sequence
  Description of Artificial Sequence: Synthetic oligonucleotide
auguuuacuacc

SEQ ID NO: 65499 - RNA, 14 nt, Artificial Sequence
  Description of Artificial Sequence: Synthetic oligonucleotide
auuuuuugaugaaa

SEQ ID NO: 65500 - RNA, 13 nt, Artificial Sequence
  Description of Artificial Sequence: Synthetic oligonucleotide
agugugugaauuu

SEQ ID NO: 65501 - RNA, 12 nt, Artificial Sequence
  Description of Artificial Sequence: Synthetic oligonucleotide
agcaauguaugu

SEQ ID NO: 65502 - RNA, 13 nt, Artificial Sequence
  Description of Artificial Sequence: Synthetic oligonucleotide
aagcacauauaua

SEQ ID NO: 65503 - RNA, 13 nt, Artificial Sequence
  Description of Artificial Sequence: Synthetic oligonucleotide
uaauaguuucucc

SEQ ID NO: 65504 - RNA, 12 nt, Artificial Sequence
  Description of Artificial Sequence: Synthetic oligonucleotide
guuucuccaaau

SEQ ID NO: 65505 - RNA, 12 nt, Artificial Sequence
  Description of Artificial Sequence: Synthetic oligonucleotide
acuuccuagaaa

SEQ ID NO: 65506 - RNA, 12 nt, Artificial Sequence
  Description of Artificial Sequence: Synthetic oligonucleotide
acaccauauaug

SEQ ID NO: 65507 - RNA, 13 nt, Artificial Sequence
  Description of Artificial Sequence: Synthetic oligonucleotide
uauaugaauggag

SEQ ID NO: 65508 - RNA, 12 nt, Artificial Sequence
  Description of Artificial Sequence: Synthetic oligonucleotide
cauuuacaggga

SEQ ID NO: 65509 - RNA, 12 nt, Artificial Sequence
  Description of Artificial Sequence: Synthetic oligonucleotide
auuuacagggac

SEQ ID NO: 65510 - RNA, 9 nt, Artificial Sequence
  Description of Artificial Sequence: Synthetic oligonucleotide
gggaccuga

SEQ ID NO: 65511 - RNA, 13 nt, Artificial Sequence
  Description of Artificial Sequence: Synthetic oligonucleotide
guuugacugcauc

SEQ ID NO: 65512 - RNA, 12 nt, Artificial Sequence
  Description of Artificial Sequence: Synthetic oligonucleotide
uugacugcaucg

SEQ ID NO: 65513 - RNA, 11 nt, Artificial Sequence
  Description of Artificial Sequence: Synthetic oligonucleotide
aguucacaggg

SEQ ID NO: 65514 - RNA, 12 nt, Artificial Sequence
  Description of Artificial Sequence: Synthetic oligonucleotide
gcaccucugucc

SEQ ID NO: 65515 - RNA, 14 nt, Artificial Sequence
  Description of Artificial Sequence: Synthetic oligonucleotide
guuugucuuuuuaa

SEQ ID NO: 65516 - RNA, 13 nt, Artificial Sequence
  Description of Artificial Sequence: Synthetic oligonucleotide
uugucuuuuuaag

SEQ ID NO: 65517 - RNA, 12 nt, Artificial Sequence
  Description of Artificial Sequence: Synthetic oligonucleotide
cuaaagguuguc

SEQ ID NO: 65518 - RNA, 11 nt, Artificial Sequence
  Description of Artificial Sequence: Synthetic oligonucleotide
agguugucgac

SEQ ID NO: 65519 - RNA, 12 nt, Artificial Sequence
  Description of Artificial Sequence: Synthetic oligonucleotide
ccuggcaauugu

SEQ ID NO: 65520 - RNA, 11 nt, Artificial Sequence
  Description of Artificial Sequence: Synthetic oligonucleotide
guggugcgagg

SEQ ID NO: 65521 - RNA, 12 nt, Artificial Sequence
  Description of Artificial Sequence: Synthetic oligonucleotide
gagacaugaaau

SEQ ID NO: 65522 - RNA, 12 nt, Artificial Sequence
  Description of Artificial Sequence: Synthetic oligonucleotide
uauauuucucca

SEQ ID NO: 65523 - RNA, 9 nt, Artificial Sequence
  Description of Artificial Sequence: Synthetic oligonucleotide
augaaggcu

SEQ ID NO: 65524 - RNA, 10 nt, Artificial Sequence
  Description of Artificial Sequence: Synthetic oligonucleotide
cuggaguggu

SEQ ID NO: 65525 - RNA, 10 nt, Artificial Sequence
  Description of Artificial Sequence: Synthetic oligonucleotide
ggaagagagg

SEQ ID NO: 65526 - RNA, 11 nt, Artificial Sequence
  Description of Artificial Sequence: Synthetic oligonucleotide
uugcaucgggc

SEQ ID NO: 65527 - RNA, 12 nt, Artificial Sequence
  Description of Artificial Sequence: Synthetic oligonucleotide
uauccuacugug

SEQ ID NO: 65528 - RNA, 12 nt, Artificial Sequence
  Description of Artificial Sequence: Synthetic oligonucleotide
ccuacuguguaa

SEQ ID NO: 65529 - RNA, 11 nt, Artificial Sequence
  Description of Artificial Sequence: Synthetic oligonucleotide
cuuguagugua

SEQ ID NO: 65530 - RNA, 12 nt, Artificial Sequence
  Description of Artificial Sequence: Synthetic oligonucleotide
cuuuguugauug

SEQ ID NO: 65531 - RNA, 13 nt, Artificial Sequence
  Description of Artificial Sequence: Synthetic oligonucleotide
uuguugauugaaa

SEQ ID NO: 65532 - RNA, 14 nt, Artificial Sequence
  Description of Artificial Sequence: Synthetic oligonucleotide
ucuuuuucuuccau

SEQ ID NO: 65533 - RNA, 12 nt, Artificial Sequence
  Description of Artificial Sequence: Synthetic oligonucleotide
aucuuccuucua

SEQ ID NO: 65534 - RNA, 12 nt, Artificial Sequence
  Description of Artificial Sequence: Synthetic oligonucleotide
ugaaugcuucau

SEQ ID NO: 65535 - RNA, 12 nt, Artificial Sequence
  Description of Artificial Sequence: Synthetic oligonucleotide
gaaugcuucaug

SEQ ID NO: 65536 - RNA, 12 nt, Artificial Sequence
  Description of Artificial Sequence: Synthetic oligonucleotide
auucuacuuuga

SEQ ID NO: 65537 - RNA, 12 nt, Artificial Sequence
  Description of Artificial Sequence: Synthetic oligonucleotide
gcaacuacagac

SEQ ID NO: 65538 - RNA, 12 nt, Artificial Sequence
  Description of Artificial Sequence: Synthetic oligonucleotide
accaaggucaac

SEQ ID NO: 65539 - RNA, 12 nt, Artificial Sequence
  Description of Artificial Sequence: Synthetic oligonucleotide
gacuaucucgac

SEQ ID NO: 65540 - RNA, 12 nt, Artificial Sequence
  Description of Artificial Sequence: Synthetic oligonucleotide
accuucccaaac

SEQ ID NO: 65541 - RNA, 13 nt, Artificial Sequence
  Description of Artificial Sequence: Synthetic oligonucleotide
caagcuuagaacu

SEQ ID NO: 65542 - RNA, 14 nt, Artificial Sequence
  Description of Artificial Sequence: Synthetic oligonucleotide
gcuuagaacuuuaa

SEQ ID NO: 65543 - RNA, 13 nt, Artificial Sequence
  Description of Artificial Sequence: Synthetic oligonucleotide
aacuuuaagcaac

SEQ ID NO: 65544 - RNA, 10 nt, Artificial Sequence
  Description of Artificial Sequence: Synthetic oligonucleotide
agaccaccac

SEQ ID NO: 65545 - RNA, 13 nt, Artificial Sequence
  Description of Artificial Sequence: Synthetic oligonucleotide
cgagaaauaaagu

SEQ ID NO: 65546 - RNA, 13 nt, Artificial Sequence
  Description of Artificial Sequence: Synthetic oligonucleotide
gagaaauaaaguu

SEQ ID NO: 65547 - RNA, 11 nt, Artificial Sequence
  Description of Artificial Sequence: Synthetic oligonucleotide
ggaaaugaucc

SEQ ID NO: 65548 - RNA, 12 nt, Artificial Sequence
  Description of Artificial Sequence: Synthetic oligonucleotide
aagaaaugaaac

SEQ ID NO: 65549 - RNA, 12 nt, Artificial Sequence
  Description of Artificial Sequence: Synthetic oligonucleotide
uuuccauccucc

SEQ ID NO: 65550 - RNA, 14 nt, Artificial Sequence
  Description of Artificial Sequence: Synthetic oligonucleotide
cugaaaaucuuuga

SEQ ID NO: 65551 - RNA, 10 nt, Artificial Sequence
  Description of Artificial Sequence: Synthetic oligonucleotide
gccguucagg

SEQ ID NO: 65552 - RNA, 12 nt, Artificial Sequence
  Description of Artificial Sequence: Synthetic oligonucleotide
aggguccagaag

SEQ ID NO: 65553 - RNA, 12 nt, Artificial Sequence
  Description of Artificial Sequence: Synthetic oligonucleotide
caagacugcuug

SEQ ID NO: 65554 - RNA, 12 nt, Artificial Sequence
  Description of Artificial Sequence: Synthetic oligonucleotide
ccaugucuuugg

SEQ ID NO: 65555 - RNA, 10 nt, Artificial Sequence
  Description of Artificial Sequence: Synthetic oligonucleotide
ccugaaacac

SEQ ID NO: 65556 - RNA, 11 nt, Artificial Sequence
  Description of Artificial Sequence: Synthetic oligonucleotide
cucuguaccuc

SEQ ID NO: 65557 - RNA, 11 nt, Artificial Sequence
  Description of Artificial Sequence: Synthetic oligonucleotide
gcaagacaaga

SEQ ID NO: 65558 - RNA, 12 nt, Artificial Sequence
  Description of Artificial Sequence: Synthetic oligonucleotide
caagacaagaaa

SEQ ID NO: 65559 - RNA, 11 nt, Artificial Sequence
  Description of Artificial Sequence: Synthetic oligonucleotide
guacaagaucc

SEQ ID NO: 65560 - RNA, 11 nt, Artificial Sequence
  Description of Artificial Sequence: Synthetic oligonucleotide
guacuugcaga

SEQ ID NO: 65561 - RNA, 12 nt, Artificial Sequence
  Description of Artificial Sequence: Synthetic oligonucleotide
gaucgauacaga

SEQ ID NO: 65562 - RNA, 12 nt, Artificial Sequence
  Description of Artificial Sequence: Synthetic oligonucleotide
auaaaaauaaau

SEQ ID NO: 65563 - RNA, 12 nt, Artificial Sequence
  Description of Artificial Sequence: Synthetic oligonucleotide
aaaaauaaauau

SEQ ID NO: 65564 - RNA, 12 nt, Artificial Sequence
  Description of Artificial Sequence: Synthetic oligonucleotide
uugacugcugug

SEQ ID NO: 65565 - RNA, 12 nt, Artificial Sequence
  Description of Artificial Sequence: Synthetic oligonucleotide
gagaugagagac

SEQ ID NO: 65566 - RNA, 9 nt, Artificial Sequence
  Description of Artificial Sequence: Synthetic oligonucleotide
cccacuugg

SEQ ID NO: 65567 - RNA, 4872 nt, Homo sapiens
uauucagauauucuccagauuccuaaagauuagagaucauuucucauucuccuaggaguacucacuucaggaagcaaccagauaaaagagaggugcaacggaagccagaacauuccuccuggaaauucaaccuguuucgcaguuucucgaggaaucagcauucagucaauccgggccgggagcagucaucuguggugaggcugauuggcugggcaggaacagcgccggggcgugggcugagcacagccgcuucgcucucuuugccacaggaagccugagcucauucgaguagcggcucuuccaagcucaaagaagcagaggccgcuguucguuuccuuuaggucuuuccacuaaagucggaguaucuucuuccaaaauuucacgucuugguggccguuccaaggagcgcgaggucggaauggaucuugaaggggaccgcaauggaggagcaaagaagaagaacuuuuuuaaacugaacaauaaaagugaaaaagauaagaaggaaaagaaaccaacugucaguguauuuucaauguuucgcuauucaaauuggcuugacaaguuguauaugguggugggaacuuuggcugccaucauccauggggcuggacuuccucucaugaugcugguguuuggagaaaugacagauaucuuugcaaaugcaggaaauuuagaagaucugaugucaaacaucacuaauagaagugauaucaaugauacaggguucuucaugaaucuggaggaagacaugaccagguaugccuauuauuacaguggaauuggugcuggggugcugguugcugcuuacauucagguuucauuuuggugccuggcagcuggaagacaaauacacaaaauuagaaaacaguuuuuucaugcuauaaugcgacaggagauaggcugguuugaugugcacgauguuggggagcuuaacacccgacuuacagaugaugucuccaagauuaaugaaggaauuggugacaaaauuggaauguucuuucagucaauggcaacauuuuucacuggguuuauaguaggauuuacacgugguuggaagcuaacccuugugauuuuggccaucaguccuguucuuggacugucagcugcugucugggcaaagauacuaucuucauuuacugauaaagaacucuuagcguaugcaaaagcuggagcaguagcugaagaggucuuggcagcaauuagaacugugauugcauuuggaggacaaaagaaagaacuugaaagguacaacaaaaauuuagaagaagcuaaaagaauugggauaaagaaagcuauuacagccaauauuucuauaggugcugcuuuccugcugaucuaugcaucuuaugcucuggccuucugguaugggaccaccuugguccucucaggggaauauucuauuggacaaguacucacuguauucuuuucuguauuaauuggggcuuuuaguguuggacaggcaucuccaagcauugaagcauuugcaaaugcaagaggagcagcuuaugaaaucuucaagauaauugauaauaagccaaguauugacagcuauucgaagagugggcacaaaccagauaauauuaagggaaauuuggaauucagaaauguucacuucaguuacccaucucgaaaagaaguuaagaucuugaagggucugaaccugaaggugcagagugggcagacgguggcccugguuggaaacaguggcugugggaagagcacaacaguccagcugaugcagaggcucuaugaccccacagaggggauggucaguguugauggacaggauauuaggaccauaaauguaagguuucuacgggaaaucauugguguggugagucaggaaccuguauuguuugccaccacgauagcugaaaacauucgcuauggccgugaaaaugucaccauggaugagauugagaaagcugucaaggaagccaaugccuaugacuuuaucaugaaacugccucauaaauuugacacccugguuggagagagaggggcccaguugaguggugggcagaagcagaggaucgccauugcacgugcccugguucgcaaccccaagauccuccugcuggaugaggccacgucagccuuggacacagaaagcgaagcagugguucagguggcucuggauaaggccagaaaaggucggaccaccauugugauagcucaucguuugucuacaguucguaaugcugacgucaucgcugguuucgaugauggagucauuguggagaaaggaaaucaugaugaacucaugaaagagaaaggcauuuacuucaaacuugucacaaugcagacagcaggaaaugaaguugaauuagaaaaugcagcugaugaauccaaaagugaaauugaugccuuggaaaugucuucaaaugauucaagauccagucuaauaagaaaaagaucaacucguaggaguguccguggaucacaagcccaagacagaaagcuuaguaccaaagaggcucuggaugaaaguauaccuccaguuuccuuuuggaggauuaugaagcuaaauuuaacugaauggccuuauuuuguuguugguguauuuugugccauuauaaauggaggccugcaaccagcauuugcaauaauauuuucaaagauuauagggguuuuuacaagaauugaugauccugaaacaaaacgacagaauaguaacuuguuuucacuauuguuucuagcccuuggaauuauuucuuuuauuacauuuuuccuucaggguuucacauuuggcaaagcuggagagauccucaccaagcggcuccgauacaugguuuuccgauccaugcucagacaggaugugaguugguuugaugacccuaaaaacaccacuggagcauugacuaccaggcucgccaaugaugcugcucaaguuaaaggggcuauagguuccaggcuugcuguaauuacccagaauauagcaaaucuugggacaggaauaauuauauccuucaucuaugguuggcaacuaacacuguuacucuuagcaauuguacccaucauugcaauagcaggaguuguugaaaugaaaauguugucuggacaagcacugaaagauaagaaagaacuagaagguucugggaagaucgcuacugaagcaauagaaaacuuccgaaccguuguuucuuugacucaggagcagaaguuugaacauauguaugcucagaguuugcagguaccauacagaaacucuuugaggaaagcacacaucuuuggaauuacauuuuccuucacccaggcaaugauguauuuuuccuaugcuggauguuuccgguuuggagccuacuugguggcacauaaacucaugagcuuugaggauguucuguuaguauuuucagcuguugucuuuggugccauggccguggggcaagucaguucauuugcuccugacuaugccaaagccaaaauaucagcagcccacaucaucaugaucauugaaaaaaccccuuugauugacagcuacagcacggaaggccuaaugccgaacacauuggaaggaaaugucacauuuggugaaguuguauucaacuaucccacccgaccggacaucccagugcuucagggacugagccuggaggugaagaagggccagacgcuggcucuggugggcagcaguggcugugggaagagcacagugguccagcuccuggagcgguucuacgaccccuuggcagggaaagugcugcuugauggcaaagaaauaaagcgacugaauguucaguggcuccgagcacaccugggcaucgugucccaggagcccauccuguuugacugcagcauugcugagaacauugccuauggagacaacagccggguggugucacaggaagagauugugagggcagcaaaggaggccaacauacaugccuucaucgagucacugccuaauaaauauagcacuaaaguaggagacaaaggaacucagcucucugguggccagaaacaacgcauugccauagcucgugcccuuguuagacagccucauauuuugcuuuuggaugaagccacgucagcucuggauacagaaagugaaaagguuguccaagaagcccuggacaaagccagagaaggccgcaccugcauugugauugcucaccgccuguccaccauccagaaugcagacuuaauagugguguuucagaauggcagagucaaggagcauggcacgcaucagcagcugcuggcacagaaaggcaucuauuuuucaauggucaguguccaggcuggaacaaagcgccagugaacucugacuguaugagauguuaaauacuuuuuaauauuuguuuagauaugacauuuauucaaaguuaaaagcaaacacuuacagaauuaugaagagguaucuguuuaacauuuccucagucaaguucagagucuucagagacuucguaauuaaaggaacagagugagagacaucaucaaguggagagaaaucauaguuuaaacugcauuauaaauuuuauaacagaauuaaaguagauuuuaaaagauaaaauguguaauuuuguuuauauuuucccauuuggacuguaacugacugccuugcuaaaagauuauagaaguagcaaaaaguauugaaauguuugcauaaagugucuauaauaaaacuaaacuuucaugugacuggagucaucuuguccaaacugccugugaauauaucuucucucaauuggaauauuguagauaacuucugcuuuaaaaaaguuuucuuuaaauauaccuacucauuuuugugggaaugguuaagcaguuuaaauaauuccuguuguauaugucuauucacauugggucuuacagaaccaucuggcuucauucuucuuggacuugauccugcugauucuugcauuuccacau

SEQ ID NO: 65568 - RNA, 19 nt, Artificial Sequence
  Description of Artificial Sequence: Synthetic oligonucleotide
uauucagauauucuccaga

SEQ ID NO: 65569 - RNA, 19 nt, Artificial Sequence
  Description of Artificial Sequence: Synthetic oligonucleotide
auuccuaaagauuagagau

SEQ ID NO: 65570 - RNA, 19 nt, Artificial Sequence
  Description of Artificial Sequence: Synthetic oligonucleotide
ucauuucucauucuccuag

SEQ ID NO: 65571 - RNA, 19 nt, Artificial Sequence
  Description of Artificial Sequence: Synthetic oligonucleotide
ggaguacucacuucaggaa

SEQ ID NO: 65572 - RNA, 19 nt, Artificial Sequence
  Description of Artificial Sequence: Synthetic oligonucleotide
agcaaccagauaaaagaga

SEQ ID NO: 65573 - RNA, 19 nt, Artificial Sequence
  Description of Artificial Sequence: Synthetic oligonucleotide
aggugcaacggaagccaga

SEQ ID NO: 65574 - RNA, 19 nt, Artificial Sequence
  Description of Artificial Sequence: Synthetic oligonucleotide
aacauuccuccuggaaauu

SEQ ID NO: 65575 - RNA, 19 nt, Artificial Sequence
  Description of Artificial Sequence: Synthetic oligonucleotide
ucaaccuguuucgcaguuu

SEQ ID NO: 65576 - RNA, 19 nt, Artificial Sequence
  Description of Artificial Sequence: Synthetic oligonucleotide
ucucgaggaaucagcauuc

SEQ ID NO: 65577 - RNA, 19 nt, Artificial Sequence
  Description of Artificial Sequence: Synthetic oligonucleotide
cagucaauccgggccggga

SEQ ID NO: 65578 - RNA, 19 nt, Artificial Sequence
  Description of Artificial Sequence: Synthetic oligonucleotide
agcagucaucuguggugag

SEQ ID NO: 65579 - RNA, 19 nt, Artificial Sequence
  Description of Artificial Sequence: Synthetic oligonucleotide
ggcugauuggcugggcagg

SEQ ID NO: 65580 - RNA, 19 nt, Artificial Sequence
  Description of Artificial Sequence: Synthetic oligonucleotide
gaacagcgccggggcgugg

SEQ ID NO: 65581 - RNA, 19 nt, Artificial Sequence
  Description of Artificial Sequence: Synthetic oligonucleotide
ggcugagcacagccgcuuc

SEQ ID NO: 65582 - RNA, 19 nt, Artificial Sequence
  Description of Artificial Sequence: Synthetic oligonucleotide
cgcucucuuugccacagga

SEQ ID NO: 65583 - RNA, 19 nt, Artificial Sequence
  Description of Artificial Sequence: Synthetic oligonucleotide
aagccugagcucauucgag

SEQ ID NO: 65584 - RNA, 19 nt, Artificial Sequence
  Description of Artificial Sequence: Synthetic oligonucleotide
guagcggcucuuccaagcu

SEQ ID NO: 65585 - RNA, 19 nt, Artificial Sequence
  Description of Artificial Sequence: Synthetic oligonucleotide
ucaaagaagcagaggccgc

SEQ ID NO: 65586 - RNA, 19 nt, Artificial Sequence
  Description of Artificial Sequence: Synthetic oligonucleotide
cuguucguuuccuuuaggu

SEQ ID NO: 65587 - RNA, 19 nt, Artificial Sequence
  Description of Artificial Sequence: Synthetic oligonucleotide
ucuuuccacuaaagucgga

SEQ ID NO: 65588 - RNA, 19 nt, Artificial Sequence
  Description of Artificial Sequence: Synthetic oligonucleotide
aguaucuucuuccaaaauu

SEQ ID NO: 65589 - RNA, 19 nt, Artificial Sequence
  Description of Artificial Sequence: Synthetic oligonucleotide
uucacgucuugguggccgu

SEQ ID NO: 65590 - RNA, 19 nt, Artificial Sequence
  Description of Artificial Sequence: Synthetic oligonucleotide
uuccaaggagcgcgagguc

SEQ ID NO: 65591 - RNA, 19 nt, Artificial Sequence
  Description of Artificial Sequence: Synthetic oligonucleotide
cggaauggaucuugaaggg

SEQ ID NO: 65592 - RNA, 19 nt, Artificial Sequence
  Description of Artificial Sequence: Synthetic oligonucleotide
ggaccgcaauggaggagca

SEQ ID NO: 65593 - RNA, 19 nt, Artificial Sequence
  Description of Artificial Sequence: Synthetic oligonucleotide
aaagaagaagaacuuuuuu

SEQ ID NO: 65594 - RNA, 19 nt, Artificial Sequence
  Description of Artificial Sequence: Synthetic oligonucleotide
uaaacugaacaauaaaagu

SEQ ID NO: 65595 - RNA, 19 nt, Artificial Sequence
  Description of Artificial Sequence: Synthetic oligonucleotide
ugaaaaagauaagaaggaa

SEQ ID NO: 65596 - RNA, 19 nt, Artificial Sequence
  Description of Artificial Sequence: Synthetic oligonucleotide
aaagaaaccaacugucagu

SEQ ID NO: 65597 - RNA, 19 nt, Artificial Sequence
  Description of Artificial Sequence: Synthetic oligonucleotide
uguauuuucaauguuucgc

SEQ ID NO: 65598 - RNA, 19 nt, Artificial Sequence
  Description of Artificial Sequence: Synthetic oligonucleotide
cuauucaaauuggcuugac

SEQ ID NO: 65599 - RNA, 19 nt, Artificial Sequence
  Description of Artificial Sequence: Synthetic oligonucleotide
caaguuguauaugguggug

SEQ ID NO: 65600 - RNA, 19 nt, Artificial Sequence
  Description of Artificial Sequence: Synthetic oligonucleotide
gggaacuuuggcugccauc

SEQ ID NO: 65601 - RNA, 19 nt, Artificial Sequence
  Description of Artificial Sequence: Synthetic oligonucleotide
cauccauggggcuggacuu

SEQ ID NO: 65602 - RNA, 19 nt, Artificial Sequence
  Description of Artificial Sequence: Synthetic oligonucleotide
uccucucaugaugcuggug

SEQ ID NO: 65603 - RNA, 19 nt, Artificial Sequence
  Description of Artificial Sequence: Synthetic oligonucleotide
guuuggagaaaugacagau

SEQ ID NO: 65604 - RNA, 19 nt, Artificial Sequence
  Description of Artificial Sequence: Synthetic oligonucleotide
uaucuuugcaaaugcagga

SEQ ID NO: 65605 - RNA, 19 nt, Artificial Sequence
  Description of Artificial Sequence: Synthetic oligonucleotide
aaauuuagaagaucugaug

SEQ ID NO: 65606 - RNA, 19 nt, Artificial Sequence
  Description of Artificial Sequence: Synthetic oligonucleotide
gucaaacaucacuaauaga

SEQ ID NO: 65607 - RNA, 19 nt, Artificial Sequence
  Description of Artificial Sequence: Synthetic oligonucleotide
aagugauaucaaugauaca

SEQ ID NO: 65608 - RNA, 19 nt, Artificial Sequence
  Description of Artificial Sequence: Synthetic oligonucleotide
aggguucuucaugaaucug

SEQ ID NO: 65609 - RNA, 19 nt, Artificial Sequence
  Description of Artificial Sequence: Synthetic oligonucleotide
ggaggaagacaugaccagg

SEQ ID NO: 65610 - RNA, 19 nt, Artificial Sequence
  Description of Artificial Sequence: Synthetic oligonucleotide
guaugccuauuauuacagu

SEQ ID NO: 65611 - RNA, 19 nt, Artificial Sequence
  Description of Artificial Sequence: Synthetic oligonucleotide
uggaauuggugcuggggug

SEQ ID NO: 65612 - RNA, 19 nt, Artificial Sequence
  Description of Artificial Sequence: Synthetic oligonucleotide
gcugguugcugcuuacauu

SEQ ID NO: 65613 - RNA, 19 nt, Artificial Sequence
  Description of Artificial Sequence: Synthetic oligonucleotide
ucagguuucauuuuggugc

SEQ ID NO: 65614 - RNA, 19 nt, Artificial Sequence
  Description of Artificial Sequence: Synthetic oligonucleotide
ccuggcagcuggaagacaa

SEQ ID NO: 65615 - RNA, 19 nt, Artificial Sequence
  Description of Artificial Sequence: Synthetic oligonucleotide
aauacacaaaauuagaaaa

SEQ ID NO: 65616 - RNA, 19 nt, Artificial Sequence
  Description of Artificial Sequence: Synthetic oligonucleotide
acaguuuuuucaugcuaua

SEQ ID NO: 65617 - RNA, 19 nt, Artificial Sequence
  Description of Artificial Sequence: Synthetic oligonucleotide
aaugcgacaggagauaggc

SEQ ID NO: 65618 - RNA, 19 nt, Artificial Sequence
  Description of Artificial Sequence: Synthetic oligonucleotide
cugguuugaugugcacgau

SEQ ID NO: 65619 - RNA, 19 nt, Artificial Sequence
  Description of Artificial Sequence: Synthetic oligonucleotide
uguuggggagcuuaacacc

SEQ ID NO: 65620 - RNA, 19 nt, Artificial Sequence
  Description of Artificial Sequence: Synthetic oligonucleotide
ccgacuuacagaugauguc

SEQ ID NO: 65621 - RNA, 19 nt, Artificial Sequence
  Description of Artificial Sequence: Synthetic oligonucleotide
cuccaagauuaaugaagga

SEQ ID NO: 65622 - RNA, 19 nt, Artificial Sequence
  Description of Artificial Sequence: Synthetic oligonucleotide
aauuggugacaaaauugga

SEQ ID NO: 65623 - RNA, 19 nt, Artificial Sequence
  Description of Artificial Sequence: Synthetic oligonucleotide
aauguucuuucagucaaug

SEQ ID NO: 65624 - RNA, 19 nt, Artificial Sequence
  Description of Artificial Sequence: Synthetic oligonucleotide
ggcaacauuuuucacuggg

SEQ ID NO: 65625 - RNA, 19 nt, Artificial Sequence
  Description of Artificial Sequence: Synthetic oligonucleotide
guuuauaguaggauuuaca

SEQ ID NO: 65626 - RNA, 19 nt, Artificial Sequence
  Description of Artificial Sequence: Synthetic oligonucleotide
acgugguuggaagcuaacc

SEQ ID NO: 65627 - RNA, 19 nt, Artificial Sequence
  Description of Artificial Sequence: Synthetic oligonucleotide
ccuugugauuuuggccauc

SEQ ID NO: 65628 - RNA, 19 nt, Artificial Sequence
  Description of Artificial Sequence: Synthetic oligonucleotide
caguccuguucuuggacug

SEQ ID NO: 65629 - RNA, 19 nt, Artificial Sequence
  Description of Artificial Sequence: Synthetic oligonucleotide
gucagcugcugucugggca

SEQ ID NO: 65630 - RNA, 19 nt, Artificial Sequence
  Description of Artificial Sequence: Synthetic oligonucleotide
aaagauacuaucuucauuu

SEQ ID NO: 65631 - RNA, 19 nt, Artificial Sequence
  Description of Artificial Sequence: Synthetic oligonucleotide
uacugauaaagaacucuua

SEQ ID NO: 65632 - RNA, 19 nt, Artificial Sequence
  Description of Artificial Sequence: Synthetic oligonucleotide
agcguaugcaaaagcugga

SEQ ID NO: 65633 - RNA, 19 nt, Artificial Sequence
  Description of Artificial Sequence: Synthetic oligonucleotide
agcaguagcugaagagguc

SEQ ID NO: 65634 - RNA, 19 nt, Artificial Sequence
  Description of Artificial Sequence: Synthetic oligonucleotide
cuuggcagcaauuagaacu

SEQ ID NO: 65635 - RNA, 19 nt, Artificial Sequence
  Description of Artificial Sequence: Synthetic oligonucleotide
ugugauugcauuuggagga

SEQ ID NO: 65636 - RNA, 19 nt, Artificial Sequence
  Description of Artificial Sequence: Synthetic oligonucleotide
acaaaagaaagaacuugaa

SEQ ID NO: 65637 - RNA, 19 nt, Artificial Sequence
  Description of Artificial Sequence: Synthetic oligonucleotide
aagguacaacaaaaauuua

SEQ ID NO: 65638 - RNA, 19 nt, Artificial Sequence
  Description of Artificial Sequence: Synthetic oligonucleotide
agaagaagcuaaaagaauu

SEQ ID NO: 65639 - RNA, 19 nt, Artificial Sequence
  Description of Artificial Sequence: Synthetic oligonucleotide
ugggauaaagaaagcuauu

SEQ ID NO: 65640 - RNA, 19 nt, Artificial Sequence
  Description of Artificial Sequence: Synthetic oligonucleotide
uacagccaauauuucuaua

SEQ ID NO: 65641 - RNA, 19 nt, Artificial Sequence
  Description of Artificial Sequence: Synthetic oligonucleotide
aggugcugcuuuccugcug

SEQ ID NO: 65642 - RNA, 19 nt, Artificial Sequence
  Description of Artificial Sequence: Synthetic oligonucleotide
gaucuaugcaucuuaugcu

SEQ ID NO: 65643 - RNA, 19 nt, Artificial Sequence
  Description of Artificial Sequence: Synthetic oligonucleotide
ucuggccuucugguauggg

SEQ ID NO: 65644 - RNA, 19 nt, Artificial Sequence
  Description of Artificial Sequence: Synthetic oligonucleotide
gaccaccuugguccucuca

SEQ ID NO: 65645 - RNA, 19 nt, Artificial Sequence
  Description of Artificial Sequence: Synthetic oligonucleotide
aggggaauauucuauugga

SEQ ID NO: 65646 - RNA, 19 nt, Artificial Sequence
  Description of Artificial Sequence: Synthetic oligonucleotide
acaaguacucacuguauuc

SEQ ID NO: 65647 - RNA, 19 nt, Artificial Sequence
  Description of Artificial Sequence: Synthetic oligonucleotide
cuuuucuguauuaauuggg

SEQ ID NO: 65648 - RNA, 19 nt, Artificial Sequence
  Description of Artificial Sequence: Synthetic oligonucleotide
ggcuuuuaguguuggacag

SEQ ID NO: 65649 - RNA, 19 nt, Artificial Sequence
  Description of Artificial Sequence: Synthetic oligonucleotide
ggcaucuccaagcauugaa

SEQ ID NO: 65650 - RNA, 19 nt, Artificial Sequence
  Description of Artificial Sequence: Synthetic oligonucleotide
agcauuugcaaaugcaaga

SEQ ID NO: 65651 - RNA, 19 nt, Artificial Sequence
  Description of Artificial Sequence: Synthetic oligonucleotide
aggagcagcuuaugaaauc

SEQ ID NO: 65652 - RNA, 19 nt, Artificial Sequence
  Description of Artificial Sequence: Synthetic oligonucleotide
cuucaagauaauugauaau

SEQ ID NO: 65653 - RNA, 19 nt, Artificial Sequence
  Description of Artificial Sequence: Synthetic oligonucleotide
uaagccaaguauugacagc

SEQ ID NO: 65654 - RNA, 19 nt, Artificial Sequence
  Description of Artificial Sequence: Synthetic oligonucleotide
cuauucgaagagugggcac

SEQ ID NO: 65655 - RNA, 19 nt, Artificial Sequence
  Description of Artificial Sequence: Synthetic oligonucleotide
caaaccagauaauauuaag

SEQ ID NO: 65656 - RNA, 19 nt, Artificial Sequence
  Description of Artificial Sequence: Synthetic oligonucleotide
gggaaauuuggaauucaga

SEQ ID NO: 65657 - RNA, 19 nt, Artificial Sequence
  Description of Artificial Sequence: Synthetic oligonucleotide
aaauguucacuucaguuac

SEQ ID NO: 65658 - RNA, 19 nt, Artificial Sequence
  Description of Artificial Sequence: Synthetic oligonucleotide
cccaucucgaaaagaaguu

SEQ ID NO: 65659 - RNA, 19 nt, Artificial Sequence
  Description of Artificial Sequence: Synthetic oligonucleotide
uaagaucuugaagggucug

SEQ ID NO: 65660 - RNA, 19 nt, Artificial Sequence
  Description of Artificial Sequence: Synthetic oligonucleotide
gaaccugaaggugcagagu

SEQ ID NO: 65661 - RNA, 19 nt, Artificial Sequence
  Description of Artificial Sequence: Synthetic oligonucleotide
ugggcagacgguggcccug

SEQ ID NO: 65662 - RNA, 19 nt, Artificial Sequence
  Description of Artificial Sequence: Synthetic oligonucleotide
gguuggaaacaguggcugu

SEQ ID NO: 65663 - RNA, 19 nt, Artificial Sequence
  Description of Artificial Sequence: Synthetic oligonucleotide
ugggaagagcacaacaguc

SEQ ID NO: 65664 - RNA, 19 nt, Artificial Sequence
  Description of Artificial Sequence: Synthetic oligonucleotide
ccagcugaugcagaggcuc

SEQ ID NO: 65665 - RNA, 19 nt, Artificial Sequence
  Description of Artificial Sequence: Synthetic oligonucleotide
cuaugaccccacagagggg

SEQ ID NO: 65666 - RNA, 19 nt, Artificial Sequence
  Description of Artificial Sequence: Synthetic oligonucleotide
gauggucaguguugaugga

SEQ ID NO: 65667 - RNA, 19 nt, Artificial Sequence
  Description of Artificial Sequence: Synthetic oligonucleotide
acaggauauuaggaccaua

SEQ ID NO: 65668 - RNA, 19 nt, Artificial Sequence
  Description of Artificial Sequence: Synthetic oligonucleotide
aaauguaagguuucuacgg

SEQ ID NO: 65669 - RNA, 19 nt, Artificial Sequence
  Description of Artificial Sequence: Synthetic oligonucleotide
ggaaaucauugguguggug

SEQ ID NO: 65670 - RNA, 19 nt, Artificial Sequence
  Description of Artificial Sequence: Synthetic oligonucleotide
gagucaggaaccuguauug

SEQ ID NO: 65671 - RNA, 19 nt, Artificial Sequence
  Description of Artificial Sequence: Synthetic oligonucleotide
guuugccaccacgauagcu

SEQ ID NO: 65672 - RNA, 19 nt, Artificial Sequence
  Description of Artificial Sequence: Synthetic oligonucleotide
ugaaaacauucgcuauggc

SEQ ID NO: 65673 - RNA, 19 nt, Artificial Sequence
  Description of Artificial Sequence: Synthetic oligonucleotide
ccgugaaaaugucaccaug

SEQ ID NO: 65674 - RNA, 19 nt, Artificial Sequence
  Description of Artificial Sequence: Synthetic oligonucleotide
ggaugagauugagaaagcu

SEQ ID NO: 65675 - RNA, 19 nt, Artificial Sequence
  Description of Artificial Sequence: Synthetic oligonucleotide
ugucaaggaagccaaugcc

SEQ ID NO: 65676 - RNA, 19 nt, Artificial Sequence
  Description of Artificial Sequence: Synthetic oligonucleotide
cuaugacuuuaucaugaaa

SEQ ID NO: 65677 - RNA, 19 nt, Artificial Sequence
  Description of Artificial Sequence: Synthetic oligonucleotide
acugccucauaaauuugac

SEQ ID NO: 65678 - RNA, 19 nt, Artificial Sequence
  Description of Artificial Sequence: Synthetic oligonucleotide
cacccugguuggagagaga

SEQ ID NO: 65679 - RNA, 19 nt, Artificial Sequence
  Description of Artificial Sequence: Synthetic oligonucleotide
aggggcccaguugaguggu

SEQ ID NO: 65680 - RNA, 19 nt, Artificial Sequence
  Description of Artificial Sequence: Synthetic oligonucleotide
ugggcagaagcagaggauc

SEQ ID NO: 65681 - RNA, 19 nt, Artificial Sequence
  Description of Artificial Sequence: Synthetic oligonucleotide
cgccauugcacgugcccug

SEQ ID NO: 65682 - RNA, 19 nt, Artificial Sequence
  Description of Artificial Sequence: Synthetic oligonucleotide
gguucgcaaccccaagauc

SEQ ID NO: 65683 - RNA, 19 nt, Artificial Sequence
  Description of Artificial Sequence: Synthetic oligonucleotide
ccuccugcuggaugaggcc

SEQ ID NO: 65684 - RNA, 19 nt, Artificial Sequence
  Description of Artificial Sequence: Synthetic oligonucleotide
cacgucagccuuggacaca

SEQ ID NO: 65685 - RNA, 19 nt, Artificial Sequence
  Description of Artificial Sequence: Synthetic oligonucleotide
agaaagcgaagcagugguu

SEQ ID NO: 65686 - RNA, 19 nt, Artificial Sequence
  Description of Artificial Sequence: Synthetic oligonucleotide
ucagguggcucuggauaag

SEQ ID NO: 65687 - RNA, 19 nt, Artificial Sequence
  Description of Artificial Sequence: Synthetic oligonucleotide
ggccagaaaaggucggacc

SEQ ID NO: 65688 - RNA, 19 nt, Artificial Sequence
  Description of Artificial Sequence: Synthetic oligonucleotide
caccauugugauagcucau

SEQ ID NO: 65689 - RNA, 19 nt, Artificial Sequence
  Description of Artificial Sequence: Synthetic oligonucleotide
ucguuugucuacaguucgu

SEQ ID NO: 65690 - RNA, 19 nt, Artificial Sequence
  Description of Artificial Sequence: Synthetic oligonucleotide
uaaugcugacgucaucgcu

SEQ ID NO: 65691 - RNA, 19 nt, Artificial Sequence
  Description of Artificial Sequence: Synthetic oligonucleotide
ugguuucgaugauggaguc

SEQ ID NO: 65692 - RNA, 19 nt, Artificial Sequence
  Description of Artificial Sequence: Synthetic oligonucleotide
cauuguggagaaaggaaau

SEQ ID NO: 65693 - RNA, 19 nt, Artificial Sequence
  Description of Artificial Sequence: Synthetic oligonucleotide
ucaugaugaacucaugaaa

SEQ ID NO: 65694 - RNA, 19 nt, Artificial Sequence
  Description of Artificial Sequence: Synthetic oligonucleotide
agagaaaggcauuuacuuc

SEQ ID NO: 65695 - RNA, 19 nt, Artificial Sequence
  Description of Artificial Sequence: Synthetic oligonucleotide
caaacuugucacaaugcag

SEQ ID NO: 65696 - RNA, 19 nt, Artificial Sequence
  Description of Artificial Sequence: Synthetic oligonucleotide
gacagcaggaaaugaaguu

SEQ ID NO: 65697 - RNA, 19 nt, Artificial Sequence
  Description of Artificial Sequence: Synthetic oligonucleotide
ugaauuagaaaaugcagcu

SEQ ID NO: 65698 - RNA, 19 nt, Artificial Sequence
  Description of Artificial Sequence: Synthetic oligonucleotide
ugaugaauccaaaagugaa

SEQ ID NO: 65699 - RNA, 19 nt, Artificial Sequence
  Description of Artificial Sequence: Synthetic oligonucleotide
aauugaugccuuggaaaug

SEQ ID NO: 65700 - RNA, 19 nt, Artificial Sequence
  Description of Artificial Sequence: Synthetic oligonucleotide
gucuucaaaugauucaaga

SEQ ID NO: 65701 - RNA, 19 nt, Artificial Sequence
  Description of Artificial Sequence: Synthetic oligonucleotide
auccagucuaauaagaaaa

SEQ ID NO: 65702 - RNA, 19 nt, Artificial Sequence
  Description of Artificial Sequence: Synthetic oligonucleotide
aagaucaacucguaggagu

SEQ ID NO: 65703 - RNA, 19 nt, Artificial Sequence
  Description of Artificial Sequence: Synthetic oligonucleotide
uguccguggaucacaagcc

SEQ ID NO: 65704 - RNA, 19 nt, Artificial Sequence
  Description of Artificial Sequence: Synthetic oligonucleotide
ccaagacagaaagcuuagu

SEQ ID NO: 65705 - RNA, 19 nt, Artificial Sequence
  Description of Artificial Sequence: Synthetic oligonucleotide
uaccaaagaggcucuggau

SEQ ID NO: 65706 - RNA, 19 nt, Artificial Sequence
  Description of Artificial Sequence: Synthetic oligonucleotide
ugaaaguauaccuccaguu

SEQ ID NO: 65707 - RNA, 19 nt, Artificial Sequence
  Description of Artificial Sequence: Synthetic oligonucleotide
uuccuuuuggaggauuaug

SEQ ID NO: 65708 - RNA, 19 nt, Artificial Sequence
  Description of Artificial Sequence: Synthetic oligonucleotide
gaagcuaaauuuaacugaa

SEQ ID NO: 65709 - RNA, 19 nt, Artificial Sequence
  Description of Artificial Sequence: Synthetic oligonucleotide
auggccuuauuuuguuguu

SEQ ID NO: 65710 - RNA, 19 nt, Artificial Sequence
  Description of Artificial Sequence: Synthetic oligonucleotide
ugguguauuuugugccauu

SEQ ID NO: 65711 - RNA, 19 nt, Artificial Sequence
  Description of Artificial Sequence: Synthetic oligonucleotide
uauaaauggaggccugcaa

SEQ ID NO: 65712 - RNA, 19 nt, Artificial Sequence
  Description of Artificial Sequence: Synthetic oligonucleotide
accagcauuugcaauaaua

SEQ ID NO: 65713 - RNA, 19 nt, Artificial Sequence
  Description of Artificial Sequence: Synthetic oligonucleotide
auuuucaaagauuauaggg

SEQ ID NO: 65714 - RNA, 19 nt, Artificial Sequence
  Description of Artificial Sequence: Synthetic oligonucleotide
gguuuuuacaagaauugau

SEQ ID NO: 65715 - RNA, 19 nt, Artificial Sequence
  Description of Artificial Sequence: Synthetic oligonucleotide
ugauccugaaacaaaacga

SEQ ID NO: 65716 - RNA, 19 nt, Artificial Sequence
  Description of Artificial Sequence: Synthetic oligonucleotide
acagaauaguaacuuguuu

SEQ ID NO: 65717 - RNA, 19 nt, Artificial Sequence
  Description of Artificial Sequence: Synthetic oligonucleotide
uucacuauuguuucuagcc

SEQ ID NO: 65718 - RNA, 19 nt, Artificial Sequence
  Description of Artificial Sequence: Synthetic oligonucleotide
ccuuggaauuauuucuuuu

SEQ ID NO: 65719 - RNA, 19 nt, Artificial Sequence
  Description of Artificial Sequence: Synthetic oligonucleotide
uauuacauuuuuccuucag

SEQ ID NO: 65720 - RNA, 19 nt, Artificial Sequence
  Description of Artificial Sequence: Synthetic oligonucleotide
ggguuucacauuuggcaaa

SEQ ID NO: 65721 - RNA, 19 nt, Artificial Sequence
  Description of Artificial Sequence: Synthetic oligonucleotide
agcuggagagauccucacc

SEQ ID NO: 65722 - RNA, 19 nt, Artificial Sequence
  Description of Artificial Sequence: Synthetic oligonucleotide
caagcggcuccgauacaug

SEQ ID NO: 65723 - RNA, 19 nt, Artificial Sequence
  Description of Artificial Sequence: Synthetic oligonucleotide
gguuuuccgauccaugcuc

SEQ ID NO: 65724 - RNA, 19 nt, Artificial Sequence
  Description of Artificial Sequence: Synthetic oligonucleotide
cagacaggaugugaguugg

SEQ ID NO: 65725 - RNA, 19 nt, Artificial Sequence
  Description of Artificial Sequence: Synthetic oligonucleotide
guuugaugacccuaaaaac

SEQ ID NO: 65726 - RNA, 19 nt, Artificial Sequence
  Description of Artificial Sequence: Synthetic oligonucleotide
caccacuggagcauugacu

SEQ ID NO: 65727 - RNA, 19 nt, Artificial Sequence
  Description of Artificial Sequence: Synthetic oligonucleotide
uaccaggcucgccaaugau

SEQ ID NO: 65728 - RNA, 19 nt, Artificial Sequence
  Description of Artificial Sequence: Synthetic oligonucleotide
ugcugcucaaguuaaaggg

SEQ ID NO: 65729 - RNA, 19 nt, Artificial Sequence
  Description of Artificial Sequence: Synthetic oligonucleotide
ggcuauagguuccaggcuu

SEQ ID NO: 65730 - RNA, 19 nt, Artificial Sequence
  Description of Artificial Sequence: Synthetic oligonucleotide
ugcuguaauuacccagaau

SEQ ID NO: 65731 - RNA, 19 nt, Artificial Sequence
  Description of Artificial Sequence: Synthetic oligonucleotide
uauagcaaaucuugggaca

SEQ ID NO: 65732 - RNA, 19 nt, Artificial Sequence
  Description of Artificial Sequence: Synthetic oligonucleotide
aggaauaauuauauccuuc

SEQ ID NO: 65733 - RNA, 19 nt, Artificial Sequence
  Description of Artificial Sequence: Synthetic oligonucleotide
caucuaugguuggcaacua

SEQ ID NO: 65734 - RNA, 19 nt, Artificial Sequence
  Description of Artificial Sequence: Synthetic oligonucleotide
aacacuguuacucuuagca

SEQ ID NO: 65735 - RNA, 19 nt, Artificial Sequence
  Description of Artificial Sequence: Synthetic oligonucleotide
aauuguacccaucauugca

SEQ ID NO: 65736 - RNA, 19 nt, Artificial Sequence
  Description of Artificial Sequence: Synthetic oligonucleotide
aauagcaggaguuguugaa

SEQ ID NO: 65737 - RNA, 19 nt, Artificial Sequence
  Description of Artificial Sequence: Synthetic oligonucleotide
aaugaaaauguugucugga

SEQ ID NO: 65738 - RNA, 19 nt, Artificial Sequence
  Description of Artificial Sequence: Synthetic oligonucleotide
acaagcacugaaagauaag

SEQ ID NO: 65739 - RNA, 19 nt, Artificial Sequence
  Description of Artificial Sequence: Synthetic oligonucleotide
gaaagaacuagaagguucu

SEQ ID NO: 65740 - RNA, 19 nt, Artificial Sequence
  Description of Artificial Sequence: Synthetic oligonucleotide
ugggaagaucgcuacugaa

SEQ ID NO: 65741 - RNA, 19 nt, Artificial Sequence
  Description of Artificial Sequence: Synthetic oligonucleotide
agcaauagaaaacuuccga

SEQ ID NO: 65742 - RNA, 19 nt, Artificial Sequence
  Description of Artificial Sequence: Synthetic oligonucleotide
aaccguuguuucuuugacu

SEQ ID NO: 65743 - RNA, 19 nt, Artificial Sequence
  Description of Artificial Sequence: Synthetic oligonucleotide
ucaggagcagaaguuugaa

SEQ ID NO: 65744 - RNA, 19 nt, Artificial Sequence
  Description of Artificial Sequence: Synthetic oligonucleotide
acauauguaugcucagagu

SEQ ID NO: 65745 - RNA, 19 nt, Artificial Sequence
  Description of Artificial Sequence: Synthetic oligonucleotide
uuugcagguaccauacaga

SEQ ID NO: 65746 - RNA, 19 nt, Artificial Sequence
  Description of Artificial Sequence: Synthetic oligonucleotide
aaacucuuugaggaaagca

SEQ ID NO: 65747 - RNA, 19 nt, Artificial Sequence
  Description of Artificial Sequence: Synthetic oligonucleotide
acacaucuuuggaauuaca

SEQ ID NO: 65748 - RNA, 19 nt, Artificial Sequence
  Description of Artificial Sequence: Synthetic oligonucleotide
auuuuccuucacccaggca

SEQ ID NO: 65749 - RNA, 19 nt, Artificial Sequence
  Description of Artificial Sequence: Synthetic oligonucleotide
aaugauguauuuuuccuau

SEQ ID NO: 65750 - RNA, 19 nt, Artificial Sequence
  Description of Artificial Sequence: Synthetic oligonucleotide
ugcuggauguuuccgguuu

SEQ ID NO: 65751 - RNA, 19 nt, Artificial Sequence
  Description of Artificial Sequence: Synthetic oligonucleotide
uggagccuacuugguggca

SEQ ID NO: 65752 - RNA, 19 nt, Artificial Sequence
  Description of Artificial Sequence: Synthetic oligonucleotide
acauaaacucaugagcuuu

SEQ ID NO: 65753 - RNA, 19 nt, Artificial Sequence
  Description of Artificial Sequence: Synthetic oligonucleotide
ugaggauguucuguuagua

SEQ ID NO: 65754 - RNA, 19 nt, Artificial Sequence
  Description of Artificial Sequence: Synthetic oligonucleotide
auuuucagcuguugucuuu

SEQ ID NO: 65755 - RNA, 19 nt, Artificial Sequence
  Description of Artificial Sequence: Synthetic oligonucleotide
uggugccauggccgugggg

SEQ ID NO: 65756 - RNA, 19 nt, Artificial Sequence
  Description of Artificial Sequence: Synthetic oligonucleotide
gcaagucaguucauuugcu

SEQ ID NO: 65757 - RNA, 19 nt, Artificial Sequence
  Description of Artificial Sequence: Synthetic oligonucleotide
uccugacuaugccaaagcc

SEQ ID NO: 65758 - RNA, 19 nt, Artificial Sequence
  Description of Artificial Sequence: Synthetic oligonucleotide
caaaauaucagcagcccac

SEQ ID NO: 65759 - RNA, 19 nt, Artificial Sequence
  Description of Artificial Sequence: Synthetic oligonucleotide
caucaucaugaucauugaa

SEQ ID NO: 65760 - RNA, 19 nt, Artificial Sequence
  Description of Artificial Sequence: Synthetic oligonucleotide
aaaaaccccuuugauugac

SEQ ID NO: 65761 - RNA, 19 nt, Artificial Sequence
  Description of Artificial Sequence: Synthetic oligonucleotide
cagcuacagcacggaaggc

SEQ ID NO: 65762 - RNA, 19 nt, Artificial Sequence
  Description of Artificial Sequence: Synthetic oligonucleotide
ccuaaugccgaacacauug

SEQ ID NO: 65763 - RNA, 19 nt, Artificial Sequence
  Description of Artificial Sequence: Synthetic oligonucleotide
ggaaggaaaugucacauuu

SEQ ID NO: 65764 - RNA, 19 nt, Artificial Sequence
  Description of Artificial Sequence: Synthetic oligonucleotide
uggugaaguuguauucaac

SEQ ID NO: 65765 - RNA, 19 nt, Artificial Sequence
  Description of Artificial Sequence: Synthetic oligonucleotide
cuaucccacccgaccggac

SEQ ID NO: 65766 - RNA, 19 nt, Artificial Sequence
  Description of Artificial Sequence: Synthetic oligonucleotide
caucccagugcuucaggga

SEQ ID NO: 65767 - RNA, 19 nt, Artificial Sequence
  Description of Artificial Sequence: Synthetic oligonucleotide
acugagccuggaggugaag

SEQ ID NO: 65768 - RNA, 19 nt, Artificial Sequence
  Description of Artificial Sequence: Synthetic oligonucleotide
gaagggccagacgcuggcu

SEQ ID NO: 65769 - RNA, 19 nt, Artificial Sequence
  Description of Artificial Sequence: Synthetic oligonucleotide
ucuggugggcagcaguggc

SEQ ID NO: 65770 - RNA, 19 nt, Artificial Sequence
  Description of Artificial Sequence: Synthetic oligonucleotide
cugugggaagagcacagug

SEQ ID NO: 65771 - RNA, 19 nt, Artificial Sequence
  Description of Artificial Sequence: Synthetic oligonucleotide
gguccagcuccuggagcgg

SEQ ID NO: 65772 - RNA, 19 nt, Artificial Sequence
  Description of Artificial Sequence: Synthetic oligonucleotide
guucuacgaccccuuggca

SEQ ID NO: 65773 - RNA, 19 nt, Artificial Sequence
  Description of Artificial Sequence: Synthetic oligonucleotide
agggaaagugcugcuugau

SEQ ID NO: 65774 - RNA, 19 nt, Artificial Sequence
  Description of Artificial Sequence: Synthetic oligonucleotide
uggcaaagaaauaaagcga

SEQ ID NO: 65775 - RNA, 19 nt, Artificial Sequence
  Description of Artificial Sequence: Synthetic oligonucleotide
acugaauguucaguggcuc

SEQ ID NO: 65776 - RNA, 19 nt, Artificial Sequence
  Description of Artificial Sequence: Synthetic oligonucleotide
ccgagcacaccugggcauc

SEQ ID NO: 65777 - RNA, 19 nt, Artificial Sequence
  Description of Artificial Sequence: Synthetic oligonucleotide
cgugucccaggagcccauc

SEQ ID NO: 65778 - RNA, 19 nt, Artificial Sequence
  Description of Artificial Sequence: Synthetic oligonucleotide
ccuguuugacugcagcauu

SEQ ID NO: 65779 - RNA, 19 nt, Artificial Sequence
  Description of Artificial Sequence: Synthetic oligonucleotide
ugcugagaacauugccuau

SEQ ID NO: 65780 - RNA, 19 nt, Artificial Sequence
  Description of Artificial Sequence: Synthetic oligonucleotide
uggagacaacagccgggug

SEQ ID NO: 65781 - RNA, 19 nt, Artificial Sequence
  Description of Artificial Sequence: Synthetic oligonucleotide
ggugucacaggaagagauu

SEQ ID NO: 65782 - RNA, 19 nt, Artificial Sequence
  Description of Artificial Sequence: Synthetic oligonucleotide
ugugagggcagcaaaggag

SEQ ID NO: 65783 - RNA, 19 nt, Artificial Sequence
  Description of Artificial Sequence: Synthetic oligonucleotide
ggccaacauacaugccuuc

SEQ ID NO: 65784 - RNA, 19 nt, Artificial Sequence
  Description of Artificial Sequence: Synthetic oligonucleotide
caucgagucacugccuaau

SEQ ID NO: 65785 - RNA, 19 nt, Artificial Sequence
  Description of Artificial Sequence: Synthetic oligonucleotide
uaaauauagcacuaaagua

SEQ ID NO: 65786 - RNA, 19 nt, Artificial Sequence
  Description of Artificial Sequence: Synthetic oligonucleotide
aggagacaaaggaacucag

SEQ ID NO: 65787 - RNA, 19 nt, Artificial Sequence
  Description of Artificial Sequence: Synthetic oligonucleotide
gcucucugguggccagaaa

SEQ ID NO: 65788 - RNA, 19 nt, Artificial Sequence
  Description of Artificial Sequence: Synthetic oligonucleotide
acaacgcauugccauagcu

SEQ ID NO: 65789 - RNA, 19 nt, Artificial Sequence
  Description of Artificial Sequence: Synthetic oligonucleotide
ucgugcccuuguuagacag

SEQ ID NO: 65790 - RNA, 19 nt, Artificial Sequence
  Description of Artificial Sequence: Synthetic oligonucleotide
gccucauauuuugcuuuug

SEQ ID NO: 65791 - RNA, 19 nt, Artificial Sequence
  Description of Artificial Sequence: Synthetic oligonucleotide
ggaugaagccacgucagcu

SEQ ID NO: 65792 - RNA, 19 nt, Artificial Sequence
  Description of Artificial Sequence: Synthetic oligonucleotide
ucuggauacagaaagugaa

SEQ ID NO: 65793 - RNA, 19 nt, Artificial Sequence
  Description of Artificial Sequence: Synthetic oligonucleotide
aaagguuguccaagaagcc

SEQ ID NO: 65794 - RNA, 19 nt, Artificial Sequence
  Description of Artificial Sequence: Synthetic oligonucleotide
ccuggacaaagccagagaa

SEQ ID NO: 65795 - RNA, 19 nt, Artificial Sequence
  Description of Artificial Sequence: Synthetic oligonucleotide
aggccgcaccugcauugug

SEQ ID NO: 65796 - RNA, 19 nt, Artificial Sequence
  Description of Artificial Sequence: Synthetic oligonucleotide
gauugcucaccgccugucc

SEQ ID NO: 65797 - RNA, 19 nt, Artificial Sequence
  Description of Artificial Sequence: Synthetic oligonucleotide
caccauccagaaugcagac

SEQ ID NO: 65798 - RNA, 19 nt, Artificial Sequence
  Description of Artificial Sequence: Synthetic oligonucleotide
cuuaauagugguguuucag

SEQ ID NO: 65799 - RNA, 19 nt, Artificial Sequence
  Description of Artificial Sequence: Synthetic oligonucleotide
gaauggcagagucaaggag

SEQ ID NO: 65800 - RNA, 19 nt, Artificial Sequence
  Description of Artificial Sequence: Synthetic oligonucleotide
gcauggcacgcaucagcag

SEQ ID NO: 65801 - RNA, 19 nt, Artificial Sequence
  Description of Artificial Sequence: Synthetic oligonucleotide
gcugcuggcacagaaaggc

SEQ ID NO: 65802 - RNA, 19 nt, Artificial Sequence
  Description of Artificial Sequence: Synthetic oligonucleotide
caucuauuuuucaaugguc

SEQ ID NO: 65803 - RNA, 19 nt, Artificial Sequence
  Description of Artificial Sequence: Synthetic oligonucleotide
caguguccaggcuggaaca

SEQ ID NO: 65804 - RNA, 19 nt, Artificial Sequence
  Description of Artificial Sequence: Synthetic oligonucleotide
aaagcgccagugaacucug

SEQ ID NO: 65805 - RNA, 19 nt, Artificial Sequence
  Description of Artificial Sequence: Synthetic oligonucleotide
gacuguaugagauguuaaa

SEQ ID NO: 65806 - RNA, 19 nt, Artificial Sequence
  Description of Artificial Sequence: Synthetic oligonucleotide
auacuuuuuaauauuuguu

SEQ ID NO: 65807 - RNA, 19 nt, Artificial Sequence
  Description of Artificial Sequence: Synthetic oligonucleotide
uuagauaugacauuuauuc

SEQ ID NO: 65808 - RNA, 19 nt, Artificial Sequence
  Description of Artificial Sequence: Synthetic oligonucleotide
caaaguuaaaagcaaacac

SEQ ID NO: 65809 - RNA, 19 nt, Artificial Sequence
  Description of Artificial Sequence: Synthetic oligonucleotide
cuuacagaauuaugaagag

SEQ ID NO: 65810 - RNA, 19 nt, Artificial Sequence
  Description of Artificial Sequence: Synthetic oligonucleotide
gguaucuguuuaacauuuc

SEQ ID NO: 65811 - RNA, 19 nt, Artificial Sequence
  Description of Artificial Sequence: Synthetic oligonucleotide
ccucagucaaguucagagu

SEQ ID NO: 65812 - RNA, 19 nt, Artificial Sequence
  Description of Artificial Sequence: Synthetic oligonucleotide
ucuucagagacuucguaau

SEQ ID NO: 65813 - RNA, 19 nt, Artificial Sequence
  Description of Artificial Sequence: Synthetic oligonucleotide
uuaaaggaacagagugaga

SEQ ID NO: 65814 - RNA, 19 nt, Artificial Sequence
  Description of Artificial Sequence: Synthetic oligonucleotide
agacaucaucaaguggaga

SEQ ID NO: 65815 - RNA, 19 nt, Artificial Sequence
  Description of Artificial Sequence: Synthetic oligonucleotide
agaaaucauaguuuaaacu

SEQ ID NO: 65816 - RNA, 19 nt, Artificial Sequence
  Description of Artificial Sequence: Synthetic oligonucleotide
ugcauuauaaauuuuauaa

SEQ ID NO: 65817 - RNA, 19 nt, Artificial Sequence
  Description of Artificial Sequence: Synthetic oligonucleotide
acagaauuaaaguagauuu

SEQ ID NO: 65818 - RNA, 19 nt, Artificial Sequence
  Description of Artificial Sequence: Synthetic oligonucleotide
uuaaaagauaaaaugugua

SEQ ID NO: 65819 - RNA, 19 nt, Artificial Sequence
  Description of Artificial Sequence: Synthetic oligonucleotide
aauuuuguuuauauuuucc

SEQ ID NO: 65820 - RNA, 19 nt, Artificial Sequence
  Description of Artificial Sequence: Synthetic oligonucleotide
ccauuuggacuguaacuga

SEQ ID NO: 65821 - RNA, 19 nt, Artificial Sequence
  Description of Artificial Sequence: Synthetic oligonucleotide
acugccuugcuaaaagauu

SEQ ID NO: 65822 - RNA, 19 nt, Artificial Sequence
  Description of Artificial Sequence: Synthetic oligonucleotide
uauagaaguagcaaaaagu

SEQ ID NO: 65823 - RNA, 19 nt, Artificial Sequence
  Description of Artificial Sequence: Synthetic oligonucleotide
uauugaaauguuugcauaa

SEQ ID NO: 65824 - RNA, 19 nt, Artificial Sequence
  Description of Artificial Sequence: Synthetic oligonucleotide
aagugucuauaauaaaacu

SEQ ID NO: 65825 - RNA, 19 nt, Artificial Sequence
  Description of Artificial Sequence: Synthetic oligonucleotide
uaaacuuucaugugacugg

SEQ ID NO: 65826 - RNA, 19 nt, Artificial Sequence
  Description of Artificial Sequence: Synthetic oligonucleotide
gagucaucuuguccaaacu

SEQ ID NO: 65827 - RNA, 19 nt, Artificial Sequence
  Description of Artificial Sequence: Synthetic oligonucleotide
ugccugugaauauaucuuc

SEQ ID NO: 65828 - RNA, 19 nt, Artificial Sequence
  Description of Artificial Sequence: Synthetic oligonucleotide
cucucaauuggaauauugu

SEQ ID NO: 65829 - RNA, 19 nt, Artificial Sequence
  Description of Artificial Sequence: Synthetic oligonucleotide
uagauaacuucugcuuuaa

SEQ ID NO: 65830 - RNA, 19 nt, Artificial Sequence
  Description of Artificial Sequence: Synthetic oligonucleotide
aaaaaguuuucuuuaaaua

SEQ ID NO: 65831 - RNA, 19 nt, Artificial Sequence
  Description of Artificial Sequence: Synthetic oligonucleotide
auaccuacucauuuuugug

SEQ ID NO: 65832 - RNA, 19 nt, Artificial Sequence
  Description of Artificial Sequence: Synthetic oligonucleotide
gggaaugguuaagcaguuu

SEQ ID NO: 65833 - RNA, 19 nt, Artificial Sequence
  Description of Artificial Sequence: Synthetic oligonucleotide
uaaauaauuccuguuguau

SEQ ID NO: 65834 - RNA, 19 nt, Artificial Sequence
  Description of Artificial Sequence: Synthetic oligonucleotide
uaugucuauucacauuggg

SEQ ID NO: 65835 - RNA, 19 nt, Artificial Sequence
  Description of Artificial Sequence: Synthetic oligonucleotide
gucuuacagaaccaucugg

SEQ ID NO: 65836 - RNA, 19 nt, Artificial Sequence
  Description of Artificial Sequence: Synthetic oligonucleotide
gcuucauucuucuuggacu

SEQ ID NO: 65837 - RNA, 19 nt, Artificial Sequence
  Description of Artificial Sequence: Synthetic oligonucleotide
uugauccugcugauucuug

SEQ ID NO: 65838 - RNA, 19 nt, Artificial Sequence
  Description of Artificial Sequence: Synthetic oligonucleotide
gauucuugcauuuccacau

SEQ ID NO: 65839 - RNA, 25 nt, Artificial Sequence
  Description of Artificial Sequence: Synthetic oligonucleotide
uauucagauauucuccagauuccua

SEQ ID NO: 65840 - RNA, 25 nt, Artificial Sequence
  Description of Artificial Sequence: Synthetic oligonucleotide
aaagauuagagaucauuucucauuc

SEQ ID NO: 65841 - RNA, 25 nt, Artificial Sequence
  Description of Artificial Sequence: Synthetic oligonucleotide
cuccuaggaguacucacuucaggaa

SEQ ID NO: 65842 - RNA, 25 nt, Artificial Sequence
  Description of Artificial Sequence: Synthetic oligonucleotide
agcaaccagauaaaagagaggugca

SEQ ID NO: 65843 - RNA, 25 nt, Artificial Sequence
  Description of Artificial Sequence: Synthetic oligonucleotide
aacggaagccagaacauuccuccug

SEQ ID NO: 65844 - RNA, 25 nt, Artificial Sequence
  Description of Artificial Sequence: Synthetic oligonucleotide
ggaaauucaaccuguuucgcaguuu

SEQ ID NO: 65845 - RNA, 25 nt, Artificial Sequence
  Description of Artificial Sequence: Synthetic oligonucleotide
ucucgaggaaucagcauucagucaa

SEQ ID NO: 65846 - RNA, 25 nt, Artificial Sequence
  Description of Artificial Sequence: Synthetic oligonucleotide
auccgggccgggagcagucaucugu

SEQ ID NO: 65847 - RNA, 25 nt, Artificial Sequence
  Description of Artificial Sequence: Synthetic oligonucleotide
uggugaggcugauuggcugggcagg

SEQ ID NO: 65848 - RNA, 25 nt, Artificial Sequence
  Description of Artificial Sequence: Synthetic oligonucleotide
gaacagcgccggggcgugggcugag

SEQ ID NO: 65849 - RNA, 25 nt, Artificial Sequence
  Description of Artificial Sequence: Synthetic oligonucleotide
gcacagccgcuucgcucucuuugcc

SEQ ID NO: 65850 - RNA, 25 nt, Artificial Sequence
  Description of Artificial Sequence: Synthetic oligonucleotide
cacaggaagccugagcucauucgag

SEQ ID NO: 65851 - RNA, 25 nt, Artificial Sequence
  Description of Artificial Sequence: Synthetic oligonucleotide
guagcggcucuuccaagcucaaaga

SEQ ID NO: 65852 - RNA, 25 nt, Artificial Sequence
  Description of Artificial Sequence: Synthetic oligonucleotide
aagcagaggccgcuguucguuuccu

SEQ ID NO: 65853 - RNA, 25 nt, Artificial Sequence
  Description of Artificial Sequence: Synthetic oligonucleotide
uuuaggucuuuccacuaaagucgga

SEQ ID NO: 65854 - RNA, 25 nt, Artificial Sequence
  Description of Artificial Sequence: Synthetic oligonucleotide
aguaucuucuuccaaaauuucacgu

SEQ ID NO: 65855 - RNA, 25 nt, Artificial Sequence
  Description of Artificial Sequence: Synthetic oligonucleotide
ucuugguggccguuccaaggagcgc

SEQ ID NO: 65856 - RNA, 25 nt, Artificial Sequence
  Description of Artificial Sequence: Synthetic oligonucleotide
cgaggucggaauggaucuugaaggg

SEQ ID NO: 65857 - RNA, 25 nt, Artificial Sequence
  Description of Artificial Sequence: Synthetic oligonucleotide
ggaccgcaauggaggagcaaagaag

SEQ ID NO: 65858 - RNA, 25 nt, Artificial Sequence
  Description of Artificial Sequence: Synthetic oligonucleotide
gaagaacuuuuuuaaacugaacaau

SEQ ID NO: 65859 - RNA, 25 nt, Artificial Sequence
  Description of Artificial Sequence: Synthetic oligonucleotide
uaaaagugaaaaagauaagaaggaa

SEQ ID NO: 65860 - RNA, 25 nt, Artificial Sequence
  Description of Artificial Sequence: Synthetic oligonucleotide
aaagaaaccaacugucaguguauuu

SEQ ID NO: 65861 - RNA, 25 nt, Artificial Sequence
  Description of Artificial Sequence: Synthetic oligonucleotide
uucaauguuucgcuauucaaauugg

SEQ ID NO: 65862 - RNA, 25 nt, Artificial Sequence
  Description of Artificial Sequence: Synthetic oligonucleotide
gcuugacaaguuguauaugguggug

SEQ ID NO: 65863 - RNA, 25 nt, Artificial Sequence
  Description of Artificial Sequence: Synthetic oligonucleotide
gggaacuuuggcugccaucauccau

SEQ ID NO: 65864 - RNA, 25 nt, Artificial Sequence
  Description of Artificial Sequence: Synthetic oligonucleotide
uggggcuggacuuccucucaugaug

SEQ ID NO: 65865 - RNA, 25 nt, Artificial Sequence
  Description of Artificial Sequence: Synthetic oligonucleotide
gcugguguuuggagaaaugacagau

SEQ ID NO: 65866 - RNA, 25 nt, Artificial Sequence
  Description of Artificial Sequence: Synthetic oligonucleotide
uaucuuugcaaaugcaggaaauuua

SEQ ID NO: 65867 - RNA, 25 nt, Artificial Sequence
  Description of Artificial Sequence: Synthetic oligonucleotide
agaagaucugaugucaaacaucacu

SEQ ID NO: 65868 - RNA, 25 nt, Artificial Sequence
  Description of Artificial Sequence: Synthetic oligonucleotide
uaauagaagugauaucaaugauaca

SEQ ID NO: 65869 - RNA, 25 nt, Artificial Sequence
  Description of Artificial Sequence: Synthetic oligonucleotide
aggguucuucaugaaucuggaggaa

SEQ ID NO: 65870 - RNA, 25 nt, Artificial Sequence
  Description of Artificial Sequence: Synthetic oligonucleotide
agacaugaccagguaugccuauuau

SEQ ID NO: 65871 - RNA, 25 nt, Artificial Sequence
  Description of Artificial Sequence: Synthetic oligonucleotide
uuacaguggaauuggugcuggggug

SEQ ID NO: 65872 - RNA, 25 nt, Artificial Sequence
  Description of Artificial Sequence: Synthetic oligonucleotide
gcugguugcugcuuacauucagguu

SEQ ID NO: 65873 - RNA, 25 nt, Artificial Sequence
  Description of Artificial Sequence: Synthetic oligonucleotide
uucauuuuggugccuggcagcugga

SEQ ID NO: 65874 - RNA, 25 nt, Artificial Sequence
  Description of Artificial Sequence: Synthetic oligonucleotide
aagacaaauacacaaaauuagaaaa

SEQ ID NO: 65875 - RNA, 25 nt, Artificial Sequence
  Description of Artificial Sequence: Synthetic oligonucleotide
acaguuuuuucaugcuauaaugcga

SEQ ID NO: 65876 - RNA, 25 nt, Artificial Sequence
  Description of Artificial Sequence: Synthetic oligonucleotide
acaggagauaggcugguuugaugug

SEQ ID NO: 65877 - RNA, 25 nt, Artificial Sequence
  Description of Artificial Sequence: Synthetic oligonucleotide
gcacgauguuggggagcuuaacacc

SEQ ID NO: 65878 - RNA, 25 nt, Artificial Sequence
  Description of Artificial Sequence: Synthetic oligonucleotide
ccgacuuacagaugaugucuccaag

SEQ ID NO: 65879 - RNA, 25 nt, Artificial Sequence
  Description of Artificial Sequence: Synthetic oligonucleotide
gauuaaugaaggaauuggugacaaa

SEQ ID NO: 65880 - RNA, 25 nt, Artificial Sequence
  Description of Artificial Sequence: Synthetic oligonucleotide
aauuggaauguucuuucagucaaug

SEQ ID NO: 65881 - RNA, 25 nt, Artificial Sequence
  Description of Artificial Sequence: Synthetic oligonucleotide
ggcaacauuuuucacuggguuuaua

SEQ ID NO: 65882 - RNA, 25 nt, Artificial Sequence
  Description of Artificial Sequence: Synthetic oligonucleotide
aguaggauuuacacgugguuggaag

SEQ ID NO: 65883 - RNA, 25 nt, Artificial Sequence
  Description of Artificial Sequence: Synthetic oligonucleotide
gcuaacccuugugauuuuggccauc

SEQ ID NO: 65884 - RNA, 25 nt, Artificial Sequence
  Description of Artificial Sequence: Synthetic oligonucleotide
caguccuguucuuggacugucagcu

SEQ ID NO: 65885 - RNA, 25 nt, Artificial Sequence
  Description of Artificial Sequence: Synthetic oligonucleotide
ugcugucugggcaaagauacuaucu

SEQ ID NO: 65886 - RNA, 25 nt, Artificial Sequence
  Description of Artificial Sequence: Synthetic oligonucleotide
uucauuuacugauaaagaacucuua

SEQ ID NO: 65887 - RNA, 25 nt, Artificial Sequence
  Description of Artificial Sequence: Synthetic oligonucleotide
agcguaugcaaaagcuggagcagua

SEQ ID NO: 65888 - RNA, 25 nt, Artificial Sequence
  Description of Artificial Sequence: Synthetic oligonucleotide
agcugaagaggucuuggcagcaauu

SEQ ID NO: 65889 - RNA, 25 nt, Artificial Sequence
  Description of Artificial Sequence: Synthetic oligonucleotide
uagaacugugauugcauuuggagga

SEQ ID NO: 65890 - RNA, 25 nt, Artificial Sequence
  Description of Artificial Sequence: Synthetic oligonucleotide
acaaaagaaagaacuugaaagguac

SEQ ID NO: 65891 - RNA, 25 nt, Artificial Sequence
  Description of Artificial Sequence: Synthetic oligonucleotide
caacaaaaauuuagaagaagcuaaa

SEQ ID NO: 65892 - RNA, 25 nt, Artificial Sequence
  Description of Artificial Sequence: Synthetic oligonucleotide
aagaauugggauaaagaaagcuauu

SEQ ID NO: 65893 - RNA, 25 nt, Artificial Sequence
  Description of Artificial Sequence: Synthetic oligonucleotide
uacagccaauauuucuauaggugcu

SEQ ID NO: 65894 - RNA, 25 nt, Artificial Sequence
  Description of Artificial Sequence: Synthetic oligonucleotide
ugcuuuccugcugaucuaugcaucu

SEQ ID NO: 65895 - RNA, 25 nt, Artificial Sequence
  Description of Artificial Sequence: Synthetic oligonucleotide
uuaugcucuggccuucugguauggg

SEQ ID NO: 65896 - RNA, 25 nt, Artificial Sequence
  Description of Artificial Sequence: Synthetic oligonucleotide
gaccaccuugguccucucaggggaa

SEQ ID NO: 65897 - RNA, 25 nt, Artificial Sequence
  Description of Artificial Sequence: Synthetic oligonucleotide
auauucuauuggacaaguacucacu

SEQ ID NO: 65898 - RNA, 25 nt, Artificial Sequence
  Description of Artificial Sequence: Synthetic oligonucleotide
uguauucuuuucuguauuaauuggg

SEQ ID NO: 65899 - RNA, 25 nt, Artificial Sequence
  Description of Artificial Sequence: Synthetic oligonucleotide
ggcuuuuaguguuggacaggcaucu

SEQ ID NO: 65900 - RNA, 25 nt, Artificial Sequence
  Description of Artificial Sequence: Synthetic oligonucleotide
uccaagcauugaagcauuugcaaau

SEQ ID NO: 65901 - RNA, 25 nt, Artificial Sequence
  Description of Artificial Sequence: Synthetic oligonucleotide
ugcaagaggagcagcuuaugaaauc

SEQ ID NO: 65902 - RNA, 25 nt, Artificial Sequence
  Description of Artificial Sequence: Synthetic oligonucleotide
cuucaagauaauugauaauaagcca

SEQ ID NO: 65903 - RNA, 25 nt, Artificial Sequence
  Description of Artificial Sequence: Synthetic oligonucleotide
aaguauugacagcuauucgaagagu

SEQ ID NO: 65904 - RNA, 25 nt, Artificial Sequence
  Description of Artificial Sequence: Synthetic oligonucleotide
ugggcacaaaccagauaauauuaag

SEQ ID NO: 65905 - RNA, 25 nt, Artificial Sequence
  Description of Artificial Sequence: Synthetic oligonucleotide
gggaaauuuggaauucagaaauguu

SEQ ID NO: 65906 - RNA, 25 nt, Artificial Sequence
  Description of Artificial Sequence: Synthetic oligonucleotide
ucacuucaguuacccaucucgaaaa

SEQ ID NO: 65907 - RNA, 25 nt, Artificial Sequence
  Description of Artificial Sequence: Synthetic oligonucleotide
agaaguuaagaucuugaagggucug

SEQ ID NO: 65908 - RNA, 25 nt, Artificial Sequence
  Description of Artificial Sequence: Synthetic oligonucleotide
gaaccugaaggugcagagugggcag

SEQ ID NO: 65909 - RNA, 25 nt, Artificial Sequence
  Description of Artificial Sequence: Synthetic oligonucleotide
gacgguggcccugguuggaaacagu

SEQ ID NO: 65910 - RNA, 25 nt, Artificial Sequence
  Description of Artificial Sequence: Synthetic oligonucleotide
uggcugugggaagagcacaacaguc

SEQ ID NO: 65911 - RNA, 25 nt, Artificial Sequence
  Description of Artificial Sequence: Synthetic oligonucleotide
ccagcugaugcagaggcucuaugac

SEQ ID NO: 65912 - RNA, 25 nt, Artificial Sequence
  Description of Artificial Sequence: Synthetic oligonucleotide
ccccacagaggggauggucaguguu

SEQ ID NO: 65913 - RNA, 25 nt, Artificial Sequence
  Description of Artificial Sequence: Synthetic oligonucleotide
ugauggacaggauauuaggaccaua

SEQ ID NO: 65914 - RNA, 25 nt, Artificial Sequence
  Description of Artificial Sequence: Synthetic oligonucleotide
aaauguaagguuucuacgggaaauc

SEQ ID NO: 65915 - RNA, 25 nt, Artificial Sequence
  Description of Artificial Sequence: Synthetic oligonucleotide
cauugguguggugagucaggaaccu

SEQ ID NO: 65916 - RNA, 25 nt, Artificial Sequence
  Description of Artificial Sequence: Synthetic oligonucleotide
uguauuguuugccaccacgauagcu

SEQ ID NO: 65917 - RNA, 25 nt, Artificial Sequence
  Description of Artificial Sequence: Synthetic oligonucleotide
ugaaaacauucgcuauggccgugaa

SEQ ID NO: 65918 - RNA, 25 nt, Artificial Sequence
  Description of Artificial Sequence: Synthetic oligonucleotide
aaaugucaccauggaugagauugag

SEQ ID NO: 65919 - RNA, 25 nt, Artificial Sequence
  Description of Artificial Sequence: Synthetic oligonucleotide
gaaagcugucaaggaagccaaugcc

SEQ ID NO: 65920 - RNA, 25 nt, Artificial Sequence
  Description of Artificial Sequence: Synthetic oligonucleotide
cuaugacuuuaucaugaaacugccu

SEQ ID NO: 65921 - RNA, 25 nt, Artificial Sequence
  Description of Artificial Sequence: Synthetic oligonucleotide
ucauaaauuugacacccugguugga

SEQ ID NO: 65922 - RNA, 25 nt, Artificial Sequence
  Description of Artificial Sequence: Synthetic oligonucleotide
agagagaggggcccaguugaguggu

SEQ ID NO: 65923 - RNA, 25 nt, Artificial Sequence
  Description of Artificial Sequence: Synthetic oligonucleotide
ugggcagaagcagaggaucgccauu

SEQ ID NO: 65924 - RNA, 25 nt, Artificial Sequence
  Description of Artificial Sequence: Synthetic oligonucleotide
ugcacgugcccugguucgcaacccc

SEQ ID NO: 65925 - RNA, 25 nt, Artificial Sequence
  Description of Artificial Sequence: Synthetic oligonucleotide
caagauccuccugcuggaugaggcc

SEQ ID NO: 65926 - RNA, 25 nt, Artificial Sequence
  Description of Artificial Sequence: Synthetic oligonucleotide
cacgucagccuuggacacagaaagc

SEQ ID NO: 65927 - RNA, 25 nt, Artificial Sequence
  Description of Artificial Sequence: Synthetic oligonucleotide
cgaagcagugguucagguggcucug

SEQ ID NO: 65928 - RNA, 25 nt, Artificial Sequence
  Description of Artificial Sequence: Synthetic oligonucleotide
ggauaaggccagaaaaggucggacc

SEQ ID NO: 65929 - RNA, 25 nt, Artificial Sequence
  Description of Artificial Sequence: Synthetic oligonucleotide
caccauugugauagcucaucguuug

SEQ ID NO: 65930 - RNA, 25 nt, Artificial Sequence
  Description of Artificial Sequence: Synthetic oligonucleotide
gucuacaguucguaaugcugacguc

SEQ ID NO: 65931 - RNA, 25 nt, Artificial Sequence
  Description of Artificial Sequence: Synthetic oligonucleotide
caucgcugguuucgaugauggaguc

SEQ ID NO: 65932 - RNA, 25 nt, Artificial Sequence
  Description of Artificial Sequence: Synthetic oligonucleotide
cauuguggagaaaggaaaucaugau

SEQ ID NO: 65933 - RNA, 25 nt, Artificial Sequence
  Description of Artificial Sequence: Synthetic oligonucleotide
ugaacucaugaaagagaaaggcauu

SEQ ID NO: 65934 - RNA, 25 nt, Artificial Sequence
  Description of Artificial Sequence: Synthetic oligonucleotide
uuacuucaaacuugucacaaugcag

SEQ ID NO: 65935 - RNA, 25 nt, Artificial Sequence
  Description of Artificial Sequence: Synthetic oligonucleotide
gacagcaggaaaugaaguugaauua

SEQ ID NO: 65936 - RNA, 25 nt, Artificial Sequence
  Description of Artificial Sequence: Synthetic oligonucleotide
agaaaaugcagcugaugaauccaaa

SEQ ID NO: 65937 - RNA, 25 nt, Artificial Sequence
  Description of Artificial Sequence: Synthetic oligonucleotide
aagugaaauugaugccuuggaaaug

SEQ ID NO: 65938 - RNA, 25 nt, Artificial Sequence
  Description of Artificial Sequence: Synthetic oligonucleotide
gucuucaaaugauucaagauccagu

SEQ ID NO: 65939 - RNA, 25 nt, Artificial Sequence
  Description of Artificial Sequence: Synthetic oligonucleotide
ucuaauaagaaaaagaucaacucgu

SEQ ID NO: 65940 - RNA, 25 nt, Artificial Sequence
  Description of Artificial Sequence: Synthetic oligonucleotide
uaggaguguccguggaucacaagcc

SEQ ID NO: 65941 - RNA, 25 nt, Artificial Sequence
  Description of Artificial Sequence: Synthetic oligonucleotide
ccaagacagaaagcuuaguaccaaa

SEQ ID NO: 65942 - RNA, 25 nt, Artificial Sequence
  Description of Artificial Sequence: Synthetic oligonucleotide
agaggcucuggaugaaaguauaccu

SEQ ID NO: 65943 - RNA, 25 nt, Artificial Sequence
  Description of Artificial Sequence: Synthetic oligonucleotide
uccaguuuccuuuuggaggauuaug

SEQ ID NO: 65944 - RNA, 25 nt, Artificial Sequence
  Description of Artificial Sequence: Synthetic oligonucleotide
gaagcuaaauuuaacugaauggccu

SEQ ID NO: 65945 - RNA, 25 nt, Artificial Sequence
  Description of Artificial Sequence: Synthetic oligonucleotide
uuauuuuguuguugguguauuuugu

SEQ ID NO: 65946 - RNA, 25 nt, Artificial Sequence
  Description of Artificial Sequence: Synthetic oligonucleotide
ugccauuauaaauggaggccugcaa

SEQ ID NO: 65947 - RNA, 25 nt, Artificial Sequence
  Description of Artificial Sequence: Synthetic oligonucleotide
accagcauuugcaauaauauuuuca

SEQ ID NO: 65948 - RNA, 25 nt, Artificial Sequence
  Description of Artificial Sequence: Synthetic oligonucleotide
aaagauuauagggguuuuuacaaga

SEQ ID NO: 65949 - RNA, 25 nt, Artificial Sequence
  Description of Artificial Sequence: Synthetic oligonucleotide
aauugaugauccugaaacaaaacga

SEQ ID NO: 65950 - RNA, 25 nt, Artificial Sequence
  Description of Artificial Sequence: Synthetic oligonucleotide
acagaauaguaacuuguuuucacua

SEQ ID NO: 65951 - RNA, 25 nt, Artificial Sequence
  Description of Artificial Sequence: Synthetic oligonucleotide
auuguuucuagcccuuggaauuauu

SEQ ID NO: 65952 - RNA, 25 nt, Artificial Sequence
  Description of Artificial Sequence: Synthetic oligonucleotide
uucuuuuauuacauuuuuccuucag

SEQ ID NO: 65953 - RNA, 25 nt, Artificial Sequence
  Description of Artificial Sequence: Synthetic oligonucleotide
ggguuucacauuuggcaaagcugga

SEQ ID NO: 65954 - RNA, 25 nt, Artificial Sequence
  Description of Artificial Sequence: Synthetic oligonucleotide
agagauccucaccaagcggcuccga

SEQ ID NO: 65955 - RNA, 25 nt, Artificial Sequence
  Description of Artificial Sequence: Synthetic oligonucleotide
auacaugguuuuccgauccaugcuc

SEQ ID NO: 65956 - RNA, 25 nt, Artificial Sequence
  Description of Artificial Sequence: Synthetic oligonucleotide
cagacaggaugugaguugguuugau

SEQ ID NO: 65957 - RNA, 25 nt, Artificial Sequence
  Description of Artificial Sequence: Synthetic oligonucleotide
ugacccuaaaaacaccacuggagca

SEQ ID NO: 65958 - RNA, 25 nt, Artificial Sequence
  Description of Artificial Sequence: Synthetic oligonucleotide
auugacuaccaggcucgccaaugau

SEQ ID NO: 65959 - RNA, 25 nt, Artificial Sequence
  Description of Artificial Sequence: Synthetic oligonucleotide
ugcugcucaaguuaaaggggcuaua

SEQ ID NO: 65960 - RNA, 25 nt, Artificial Sequence
  Description of Artificial Sequence: Synthetic oligonucleotide
agguuccaggcuugcuguaauuacc

SEQ ID NO: 65961 - RNA, 25 nt, Artificial Sequence
  Description of Artificial Sequence: Synthetic oligonucleotide
ccagaauauagcaaaucuugggaca

SEQ ID NO: 65962 - RNA, 25 nt, Artificial Sequence
  Description of Artificial Sequence: Synthetic oligonucleotide
aggaauaauuauauccuucaucuau

SEQ ID NO: 65963 - RNA, 25 nt, Artificial Sequence
  Description of Artificial Sequence: Synthetic oligonucleotide
ugguuggcaacuaacacuguuacuc

SEQ ID NO: 65964 - RNA, 25 nt, Artificial Sequence
  Description of Artificial Sequence: Synthetic oligonucleotide
cuuagcaauuguacccaucauugca

SEQ ID NO: 65965 - RNA, 25 nt, Artificial Sequence
  Description of Artificial Sequence: Synthetic oligonucleotide
aauagcaggaguuguugaaaugaaa

SEQ ID NO: 65966 - RNA, 25 nt, Artificial Sequence
  Description of Artificial Sequence: Synthetic oligonucleotide
aauguugucuggacaagcacugaaa

SEQ ID NO: 65967 - RNA, 25 nt, Artificial Sequence
  Description of Artificial Sequence: Synthetic oligonucleotide
agauaagaaagaacuagaagguucu

SEQ ID NO: 65968 - RNA, 25 nt, Artificial Sequence
  Description of Artificial Sequence: Synthetic oligonucleotide
ugggaagaucgcuacugaagcaaua

SEQ ID NO: 65969 - RNA, 25 nt, Artificial Sequence
  Description of Artificial Sequence: Synthetic oligonucleotide
agaaaacuuccgaaccguuguuucu

SEQ ID NO: 65970 - RNA, 25 nt, Artificial Sequence
  Description of Artificial Sequence: Synthetic oligonucleotide
uuugacucaggagcagaaguuugaa

SEQ ID NO: 65971 - RNA, 25 nt, Artificial Sequence
  Description of Artificial Sequence: Synthetic oligonucleotide
acauauguaugcucagaguuugcag

SEQ ID NO: 65972 - RNA, 25 nt, Artificial Sequence
  Description of Artificial Sequence: Synthetic oligonucleotide
gguaccauacagaaacucuuugagg

SEQ ID NO: 65973 - RNA, 25 nt, Artificial Sequence
  Description of Artificial Sequence: Synthetic oligonucleotide
gaaagcacacaucuuuggaauuaca

SEQ ID NO: 65974 - RNA, 25 nt, Artificial Sequence
  Description of Artificial Sequence: Synthetic oligonucleotide
auuuuccuucacccaggcaaugaug

SEQ ID NO: 65975 - RNA, 25 nt, Artificial Sequence
  Description of Artificial Sequence: Synthetic oligonucleotide
guauuuuuccuaugcuggauguuuc

SEQ ID NO: 65976 - RNA, 25 nt, Artificial Sequence
  Description of Artificial Sequence: Synthetic oligonucleotide
ccgguuuggagccuacuugguggca

SEQ ID NO: 65977 - RNA, 25 nt, Artificial Sequence
  Description of Artificial Sequence: Synthetic oligonucleotide
acauaaacucaugagcuuugaggau

SEQ ID NO: 65978 - RNA, 25 nt, Artificial Sequence
  Description of Artificial Sequence: Synthetic oligonucleotide
uguucuguuaguauuuucagcuguu

SEQ ID NO: 65979 - RNA, 25 nt, Artificial Sequence
  Description of Artificial Sequence: Synthetic oligonucleotide
ugucuuuggugccauggccgugggg

SEQ ID NO: 65980 - RNA, 25 nt, Artificial Sequence
  Description of Artificial Sequence: Synthetic oligonucleotide
gcaagucaguucauuugcuccugac

SEQ ID NO: 65981 - RNA, 25 nt, Artificial Sequence
  Description of Artificial Sequence: Synthetic oligonucleotide
cuaugccaaagccaaaauaucagca

SEQ ID NO: 65982 - RNA, 25 nt, Artificial Sequence
  Description of Artificial Sequence: Synthetic oligonucleotide
agcccacaucaucaugaucauugaa

SEQ ID NO: 65983 - RNA, 25 nt, Artificial Sequence
  Description of Artificial Sequence: Synthetic oligonucleotide
aaaaaccccuuugauugacagcuac

SEQ ID NO: 65984 - RNA, 25 nt, Artificial Sequence
  Description of Artificial Sequence: Synthetic oligonucleotide
cagcacggaaggccuaaugccgaac

SEQ ID NO: 65985 - RNA, 25 nt, Artificial Sequence
  Description of Artificial Sequence: Synthetic oligonucleotide
cacauuggaaggaaaugucacauuu

SEQ ID NO: 65986 - RNA, 25 nt, Artificial Sequence
  Description of Artificial Sequence: Synthetic oligonucleotide
uggugaaguuguauucaacuauccc

SEQ ID NO: 65987 - RNA, 25 nt, Artificial Sequence
  Description of Artificial Sequence: Synthetic oligonucleotide
cacccgaccggacaucccagugcuu

SEQ ID NO: 65988 - RNA, 25 nt, Artificial Sequence
  Description of Artificial Sequence: Synthetic oligonucleotide
ucagggacugagccuggaggugaag

SEQ ID NO: 65989 - RNA, 25 nt, Artificial Sequence
  Description of Artificial Sequence: Synthetic oligonucleotide
gaagggccagacgcuggcucuggug

SEQ ID NO: 65990 - RNA, 25 nt, Artificial Sequence
  Description of Artificial Sequence: Synthetic oligonucleotide
gggcagcaguggcugugggaagagc

SEQ ID NO: 65991 - RNA, 25 nt, Artificial Sequence
  Description of Artificial Sequence: Synthetic oligonucleotide
cacagugguccagcuccuggagcgg

SEQ ID NO: 65992 - RNA, 25 nt, Artificial Sequence
  Description of Artificial Sequence: Synthetic oligonucleotide
guucuacgaccccuuggcagggaaa

SEQ ID NO: 65993 - RNA, 25 nt, Artificial Sequence
  Description of Artificial Sequence: Synthetic oligonucleotide
agugcugcuugauggcaaagaaaua

SEQ ID NO: 65994 - RNA, 25 nt, Artificial Sequence
  Description of Artificial Sequence: Synthetic oligonucleotide
aaagcgacugaauguucaguggcuc

SEQ ID NO: 65995 - RNA, 25 nt, Artificial Sequence
  Description of Artificial Sequence: Synthetic oligonucleotide
ccgagcacaccugggcaucgugucc

SEQ ID NO: 65996 - RNA, 25 nt, Artificial Sequence
  Description of Artificial Sequence: Synthetic oligonucleotide
ccaggagcccauccuguuugacugc

SEQ ID NO: 65997 - RNA, 25 nt, Artificial Sequence
  Description of Artificial Sequence: Synthetic oligonucleotide
cagcauugcugagaacauugccuau

SEQ ID NO: 65998 - RNA, 25 nt, Artificial Sequence
  Description of Artificial Sequence: Synthetic oligonucleotide
uggagacaacagccgggugguguca

SEQ ID NO: 65999 - RNA, 25 nt, Artificial Sequence
  Description of Artificial Sequence: Synthetic oligonucleotide
acaggaagagauugugagggcagca

SEQ ID NO: 66000 - RNA, 25 nt, Artificial Sequence
  Description of Artificial Sequence: Synthetic oligonucleotide
aaaggaggccaacauacaugccuuc

SEQ ID NO: 66001 - RNA, 25 nt, Artificial Sequence
  Description of Artificial Sequence: Synthetic oligonucleotide
caucgagucacugccuaauaaauau

SEQ ID NO: 66002 - RNA, 25 nt, Artificial Sequence
  Description of Artificial Sequence: Synthetic oligonucleotide
uagcacuaaaguaggagacaaagga

SEQ ID NO: 66003 - RNA, 25 nt, Artificial Sequence
  Description of Artificial Sequence: Synthetic oligonucleotide
aacucagcucucugguggccagaaa

SEQ ID NO: 66004 - RNA, 25 nt, Artificial Sequence
  Description of Artificial Sequence: Synthetic oligonucleotide
acaacgcauugccauagcucgugcc

SEQ ID NO: 66005 - RNA, 25 nt, Artificial Sequence
  Description of Artificial Sequence: Synthetic oligonucleotide
ccuuguuagacagccucauauuuug

SEQ ID NO: 66006 - RNA, 25 nt, Artificial Sequence
  Description of Artificial Sequence: Synthetic oligonucleotide
gcuuuuggaugaagccacgucagcu

SEQ ID NO: 66007 - RNA, 25 nt, Artificial Sequence
  Description of Artificial Sequence: Synthetic oligonucleotide
ucuggauacagaaagugaaaagguu

SEQ ID NO: 66008 - RNA, 25 nt, Artificial Sequence
  Description of Artificial Sequence: Synthetic oligonucleotide
uguccaagaagcccuggacaaagcc

SEQ ID NO: 66009 - RNA, 25 nt, Artificial Sequence
  Description of Artificial Sequence: Synthetic oligonucleotide
cagagaaggccgcaccugcauugug

SEQ ID NO: 66010 - RNA, 25 nt, Artificial Sequence
  Description of Artificial Sequence: Synthetic oligonucleotide
gauugcucaccgccuguccaccauc

SEQ ID NO: 66011 - RNA, 25 nt, Artificial Sequence
  Description of Artificial Sequence: Synthetic oligonucleotide
ccagaaugcagacuuaauaguggug

SEQ ID NO: 66012 - RNA, 25 nt, Artificial Sequence
  Description of Artificial Sequence: Synthetic oligonucleotide
guuucagaauggcagagucaaggag

SEQ ID NO: 66013 - RNA, 25 nt, Artificial Sequence
  Description of Artificial Sequence: Synthetic oligonucleotide
gcauggcacgcaucagcagcugcug

SEQ ID NO: 66014 - RNA, 25 nt, Artificial Sequence
  Description of Artificial Sequence: Synthetic oligonucleotide
ggcacagaaaggcaucuauuuuuca

SEQ ID NO: 66015 - RNA, 25 nt, Artificial Sequence
  Description of Artificial Sequence: Synthetic oligonucleotide
aauggucaguguccaggcuggaaca

SEQ ID NO: 66016 - RNA, 25 nt, Artificial Sequence
  Description of Artificial Sequence: Synthetic oligonucleotide
aaagcgccagugaacucugacugua

SEQ ID NO: 66017 - RNA, 25 nt, Artificial Sequence
  Description of Artificial Sequence: Synthetic oligonucleotide
augagauguuaaauacuuuuuaaua

SEQ ID NO: 66018 - RNA, 25 nt, Artificial Sequence
  Description of Artificial Sequence: Synthetic oligonucleotide
auuuguuuagauaugacauuuauuc

SEQ ID NO: 66019 - RNA, 25 nt, Artificial Sequence
  Description of Artificial Sequence: Synthetic oligonucleotide
caaaguuaaaagcaaacacuuacag

SEQ ID NO: 66020 - RNA, 25 nt, Artificial Sequence
  Description of Artificial Sequence: Synthetic oligonucleotide
gaauuaugaagagguaucuguuuaa

SEQ ID NO: 66021 - RNA, 25 nt, Artificial Sequence
  Description of Artificial Sequence: Synthetic oligonucleotide
acauuuccucagucaaguucagagu

SEQ ID NO: 66022 - RNA, 25 nt, Artificial Sequence
  Description of Artificial Sequence: Synthetic oligonucleotide
ucuucagagacuucguaauuaaagg

SEQ ID NO: 66023 - RNA, 25 nt, Artificial Sequence
  Description of Artificial Sequence: Synthetic oligonucleotide
gaacagagugagagacaucaucaag

SEQ ID NO: 66024 - RNA, 25 nt, Artificial Sequence
  Description of Artificial Sequence: Synthetic oligonucleotide
guggagagaaaucauaguuuaaacu

SEQ ID NO: 66025 - RNA, 25 nt, Artificial Sequence
  Description of Artificial Sequence: Synthetic oligonucleotide
ugcauuauaaauuuuauaacagaau

SEQ ID NO: 66026 - RNA, 25 nt, Artificial Sequence
  Description of Artificial Sequence: Synthetic oligonucleotide
uuaaaguagauuuuaaaagauaaaa

SEQ ID NO: 66027 - RNA, 25 nt, Artificial Sequence
  Description of Artificial Sequence: Synthetic oligonucleotide
auguguaauuuuguuuauauuuucc

SEQ ID NO: 66028 - RNA, 25 nt, Artificial Sequence
  Description of Artificial Sequence: Synthetic oligonucleotide
ccauuuggacuguaacugacugccu

SEQ ID NO: 66029 - RNA, 25 nt, Artificial Sequence
  Description of Artificial Sequence: Synthetic oligonucleotide
uugcuaaaagauuauagaaguagca

SEQ ID NO: 66030 - RNA, 25 nt, Artificial Sequence
  Description of Artificial Sequence: Synthetic oligonucleotide
aaaaaguauugaaauguuugcauaa

SEQ ID NO: 66031 - RNA, 25 nt, Artificial Sequence
  Description of Artificial Sequence: Synthetic oligonucleotide
aagugucuauaauaaaacuaaacuu

SEQ ID NO: 66032 - RNA, 25 nt, Artificial Sequence
  Description of Artificial Sequence: Synthetic oligonucleotide
uucaugugacuggagucaucuuguc

SEQ ID NO: 66033 - RNA, 25 nt, Artificial Sequence
  Description of Artificial Sequence: Synthetic oligonucleotide
ccaaacugccugugaauauaucuuc

SEQ ID NO: 66034 - RNA, 25 nt, Artificial Sequence
  Description of Artificial Sequence: Synthetic oligonucleotide
cucucaauuggaauauuguagauaa

SEQ ID NO: 66035 - RNA, 25 nt, Artificial Sequence
  Description of Artificial Sequence: Synthetic oligonucleotide
acuucugcuuuaaaaaaguuuucuu

SEQ ID NO: 66036 - RNA, 25 nt, Artificial Sequence
  Description of Artificial Sequence: Synthetic oligonucleotide
uuaaauauaccuacucauuuuugug

SEQ ID NO: 66037 - RNA, 25 nt, Artificial Sequence
  Description of Artificial Sequence: Synthetic oligonucleotide
gggaaugguuaagcaguuuaaauaa

SEQ ID NO: 66038 - RNA, 25 nt, Artificial Sequence
  Description of Artificial Sequence: Synthetic oligonucleotide
auuccuguuguauaugucuauucac

SEQ ID NO: 66039 - RNA, 25 nt, Artificial Sequence
  Description of Artificial Sequence: Synthetic oligonucleotide
cauugggucuuacagaaccaucugg

SEQ ID NO: 66040 - RNA, 25 nt, Artificial Sequence
  Description of Artificial Sequence: Synthetic oligonucleotide
gcuucauucuucuuggacuugaucc

SEQ ID NO: 66041 - RNA, 25 nt, Artificial Sequence
  Description of Artificial Sequence: Synthetic oligonucleotide
ccugcugauucuugcauuuccacau

SEQ ID NO: 66042 - DNA, 21 bp, Artificial Sequence
  Description of Artificial Sequence: Synthetic oligonucleotide
  Description of Combined DNA/RNA Molecule: Synthetic oligonucleotide
cuacacaaaucagcgauuutt

SEQ ID NO: 66043 - DNA, 21 bp, Artificial Sequence
  Description of Artificial Sequence: Synthetic oligonucleotide
  Description of Combined DNA/RNA Molecule: Synthetic oligonucleotide
aaaucgcugauuuguguagtt

SEQ ID NO: 66044 - DNA, 25 bp, Artificial Sequence
  Description of Artificial Sequence: Synthetic oligonucleotide
  Description of Combined DNA/RNA Molecule: Synthetic oligonucleotide
cuacacaaaucagcgauuuccaugt

SEQ ID NO: 66045 - RNA, 27 nt, Artificial Sequence
  Description of Artificial Sequence: Synthetic oligonucleotide
acauggaaaucgcugauuuguguaguc

SEQ ID NO: 66046 - RNA, 13 nt, Artificial Sequence
  Description of Artificial Sequence: Synthetic oligonucleotide
cuacacaaaucag

SEQ ID NO: 66047 - DNA, 11 bp, Artificial Sequence
  Description of Artificial Sequence: Synthetic oligonucleotide
  Description of Combined DNA/RNA Molecule: Synthetic oligonucleotide
gauuuccaugt

SEQ ID NO: 66048 - DNA, 21 bp, Artificial Sequence
  Description of Artificial Sequence: Synthetic oligonucleotide
  Description of Combined DNA/RNA Molecule: Synthetic oligonucleotide
ggaucuuauuucuucggagtt

SEQ ID NO: 66049 - DNA, 21 bp, Artificial Sequence
  Description of Artificial Sequence: Synthetic oligonucleotide
  Description of Combined DNA/RNA Molecule: Synthetic oligonucleotide
cuccgaagaaauaagaucctt

SEQ ID NO: 66050 - RNA, 11 nt, Artificial Sequence
  Description of Artificial Sequence: Synthetic oligonucleotide
ggaucuuauuu

SEQ ID NO: 66051 - DNA, 10 bp, Artificial Sequence
  Description of Artificial Sequence: Synthetic oligonucleotide
  Description of Combined DNA/RNA Molecule: Synthetic oligonucleotide
cuucggagtt

SEQ ID NO: 66052 - RNA, 27 nt, Artificial Sequence
  Description of Artificial Sequence: Synthetic oligonucleotide
cauugucuccgaagaaauaagauccuu

SEQ ID NO: 66053 - RNA, 8 nt, Artificial Sequence
  Description of Artificial Sequence: Synthetic oligonucleotide
  modified_base (2): LNA-G
ggaucuua

SEQ ID NO: 66054 - DNA, 17 bp, Artificial Sequence
  Description of Artificial Sequence: Synthetic oligonucleotide
  Description of Combined DNA/RNA Molecule: Synthetic oligonucleotide
uuucuucggagacaatg

SEQ ID NO: 66055 - DNA, 16 bp, Artificial Sequence
  Description of Artificial Sequence: Synthetic oligonucleotide
  Description of Combined DNA/RNA Molecule: Synthetic oligonucleotide
uucuucggagacaatg

SEQ ID NO: 66056 - DNA, 15 bp, Artificial Sequence
  Description of Artificial Sequence: Synthetic oligonucleotide
  Description of Combined DNA/RNA Molecule: Synthetic oligonucleotide
ucuucggagacaatg

SEQ ID NO: 66057 - DNA, 14 bp, Artificial Sequence
  Description of Artificial Sequence: Synthetic oligonucleotide
  Description of Combined DNA/RNA Molecule: Synthetic oligonucleotide
cuucggagacaatg

SEQ ID NO: 66058 - DNA, 13 bp, Artificial Sequence
  Description of Artificial Sequence: Synthetic oligonucleotide
  Description of Combined DNA/RNA Molecule: Synthetic oligonucleotide
uucggagacaatg

SEQ ID NO: 66059 - DNA, 12 bp, Artificial Sequence
  Description of Artificial Sequence: Synthetic oligonucleotide
  Description of Combined DNA/RNA Molecule: Synthetic oligonucleotide
ucggagacaatg

SEQ ID NO: 66060 - DNA, 11 bp, Artificial Sequence
  Description of Artificial Sequence: Synthetic oligonucleotide
  Description of Combined DNA/RNA Molecule: Synthetic oligonucleotide
cggagacaatg

SEQ ID NO: 66061 - RNA, 9 nt, Artificial Sequence
  Description of Artificial Sequence: Synthetic oligonucleotide
  modified_base (2): LNA-G
ggaucuuau

SEQ ID NO: 66062 - RNA, 10 nt, Artificial Sequence
  Description of Artificial Sequence: Synthetic oligonucleotide
  modified_base (2): LNA-G
ggaucuuauu

SEQ ID NO: 66063 - RNA, 11 nt, Artificial Sequence
  Description of Artificial Sequence: Synthetic oligonucleotide
  modified_base (2): LNA-G
ggaucuuauuu

SEQ ID NO: 66064 - RNA, 12 nt, Artificial Sequence
  Description of Artificial Sequence: Synthetic oligonucleotide
  modified_base (2): LNA-G
ggaucuuauuuc

SEQ ID NO: 66065 - RNA, 8 nt, Artificial Sequence
  Description of Artificial Sequence: Synthetic oligonucleotide
  modified_base (3): LNA-A
cuacacaa

SEQ ID NO: 66066 - DNA, 13 bp, Artificial Sequence
  Description of Artificial Sequence: Synthetic oligonucleotide
  Description of Combined DNA/RNA Molecule: Synthetic oligonucleotide
  modified_base (8): LNA-A
aucagcgauuutt

SEQ ID NO: 66067 - DNA, 12 bp, Artificial Sequence
  Description of Artificial Sequence: Synthetic oligonucleotide
  Description of Combined DNA/RNA Molecule: Synthetic oligonucleotide
  modified_base (7): LNA-A
ucagcgauuutt

SEQ ID NO: 66068 - DNA, 11 bp, Artificial Sequence
  Description of Artificial Sequence: Synthetic oligonucleotide
  Description of Combined DNA/RNA Molecule: Synthetic oligonucleotide
  modified_base (6): LNA-A
cagcgauuutt

SEQ ID NO: 66069 - DNA, 10 bp, Artificial Sequence
  Description of Artificial Sequence: Synthetic oligonucleotide
  Description of Combined DNA/RNA Molecule: Synthetic oligonucleotide
  modified_base (5): LNA-A
agcgauuutt

SEQ ID NO: 66070 - DNA, 9 bp, Artificial Sequence
  Description of Artificial Sequence: Synthetic oligonucleotide
  Description of Combined DNA/RNA Molecule: Synthetic oligonucleotide
  modified_base (4): LNA-A
gcgauuutt

SEQ ID NO: 66071 - DNA, 8 bp, Artificial Sequence
  Description of Artificial Sequence: Synthetic oligonucleotide
  Description of Combined DNA/RNA Molecule: Synthetic oligonucleotide
  modified_base (3): LNA-A
cgauuutt

SEQ ID NO: 66072 - DNA, 7 bp, Artificial Sequence
  Description of Artificial Sequence: Synthetic oligonucleotide
  Description of Combined DNA/RNA Molecule: Synthetic oligonucleotide
  modified_base (2): LNA-A
gauuutt

SEQ ID NO: 66073 - RNA, 9 nt, Artificial Sequence
  Description of Artificial Sequence: Synthetic oligonucleotide
  modified_base (3): LNA-A
cuacacaaa

SEQ ID NO: 66074 - RNA, 10 nt, Artificial Sequence
  Description of Artificial Sequence: Synthetic oligonucleotide
  modified_base (3): LNA-A
cuacacaaau

SEQ ID NO: 66075 - RNA, 11 nt, Artificial Sequence
  Description of Artificial Sequence: Synthetic oligonucleotide
  modified_base (3): LNA-A
cuacacaaauc

SEQ ID NO: 66076 - RNA, 12 nt, Artificial Sequence
  Description of Artificial Sequence: Synthetic oligonucleotide
  modified_base (3): LNA-A
cuacacaaauca

SEQ ID NO: 66077 - RNA, 13 nt, Artificial Sequence
  Description of Artificial Sequence: Synthetic oligonucleotide
  modified_base (3): LNA-A
cuacacaaaucag

SEQ ID NO: 66078 - RNA, 14 nt, Artificial Sequence
  Description of Artificial Sequence: Synthetic oligonucleotide
  modified_base (3): LNA-A
cuacacaaaucagc

SEQ ID NO: 66079 - RNA, 13 nt, Artificial Sequence
  Description of Artificial Sequence: Synthetic oligonucleotide
  modified_base (2): LNA-G
ggaucuuauuucu

SEQ ID NO: 66080 - RNA, 14 nt, Artificial Sequence
  Description of Artificial Sequence: Synthetic oligonucleotide
  modified_base (2): LNA-G
ggaucuuauuucuu

SEQ ID NO: 66081 - RNA, 8 nt, Artificial Sequence
  Description of Artificial Sequence: Synthetic oligonucleotide
  modified_base (2): LNA-G
  modified_base (8): LNA-A
ggaucuua

SEQ ID NO: 66082 - RNA, 9 nt, Artificial Sequence
  Description of Artificial Sequence: Synthetic oligonucleotide
  modified_base (2): LNA-G
  modified_base (9): LNA-U
ggaucuuau

SEQ ID NO: 66083 - RNA, 10 nt, Artificial Sequence
  Description of Artificial Sequence: Synthetic oligonucleotide
  modified_base (2): LNA-G
  modified_base (10): LNA-U
ggaucuuauu

SEQ ID NO: 66084 - RNA, 11 nt, Artificial Sequence
  Description of Artificial Sequence: Synthetic oligonucleotide
  modified_base (2): LNA-G
  modified_base (11): LNA-U
ggaucuuauuu

SEQ ID NO: 66085 - RNA, 12 nt, Artificial Sequence
  Description of Artificial Sequence: Synthetic oligonucleotide
  modified_base (2): LNA-G
  modified_base (12): LNA-C
ggaucuuauuuc

SEQ ID NO: 66086 - RNA, 13 nt, Artificial Sequence
  Description of Artificial Sequence: Synthetic oligonucleotide
  modified_base (2): LNA-G
  modified_base (13): LNA-U
ggaucuuauuucu

SEQ ID NO: 66087 - RNA, 14 nt, Artificial Sequence
  Description of Artificial Sequence: Synthetic oligonucleotide
  modified_base (2): LNA-G
  modified_base (14): LNA-U
ggaucuuauuucuu

SEQ ID NO: 66088 - DNA, 13 bp, Artificial Sequence
  Description of Artificial Sequence: Synthetic oligonucleotide
  Description of Combined DNA/RNA Molecule: Synthetic oligonucleotide
  modified_base (8): LNA-G
uuucuucggagtt

SEQ ID NO: 66089 - DNA, 12 bp, Artificial Sequence
  Description of Artificial Sequence: Synthetic oligonucleotide
  Description of Combined DNA/RNA Molecule: Synthetic oligonucleotide
  modified_base (7): LNA-G
uucuucggagtt

SEQ ID NO: 66090 - DNA, 11 bp, Artificial Sequence
  Description of Artificial Sequence: Synthetic oligonucleotide
  Description of Combined DNA/RNA Molecule: Synthetic oligonucleotide
  modified_base (6): LNA-G
ucuucggagtt

SEQ ID NO: 66091 - DNA, 10 bp, Artificial Sequence
  Description of Artificial Sequence: Synthetic oligonucleotide
  Description of Combined DNA/RNA Molecule: Synthetic oligonucleotide
  modified_base (5): LNA-G
cuucggagtt

SEQ ID NO: 66092 - DNA, 9 bp, Artificial Sequence
  Description of Artificial Sequence: Synthetic oligonucleotide
  Description of Combined DNA/RNA Molecule: Synthetic oligonucleotide
  modified_base (4): LNA-G
uucggagtt

SEQ ID NO: 66093 - DNA, 8 bp, Artificial Sequence
  Description of Artificial Sequence: Synthetic oligonucleotide
  Description of Combined DNA/RNA Molecule: Synthetic oligonucleotide
  modified_base (3): LNA-G
ucggagtt

SEQ ID NO: 66094 - DNA, 7 bp, Artificial Sequence
  Description of Artificial Sequence: Synthetic oligonucleotide
  Description of Combined DNA/RNA Molecule: Synthetic oligonucleotide
  modified_base (2): LNA-G
cggagtt

SEQ ID NO: 66095 - DNA, 13 bp, Artificial Sequence
  Description of Artificial Sequence: Synthetic oligonucleotide
  Description of Combined DNA/RNA Molecule: Synthetic oligonucleotide
  modified_base (1): LNA-U
  modified_base (8): LNA-G
uuucuucggagtt

SEQ ID NO: 66096 - DNA, 12 bp, Artificial Sequence
  Description of Artificial Sequence: Synthetic oligonucleotide
  Description of Combined DNA/RNA Molecule: Synthetic oligonucleotide
  modified_base (1): LNA-U
  modified_base (7): LNA-G
uucuucggagtt

SEQ ID NO: 66097 - DNA, 11 bp, Artificial Sequence
  Description of Artificial Sequence: Synthetic oligonucleotide
  Description of Combined DNA/RNA Molecule: Synthetic oligonucleotide
  modified_base (1): LNA-U
  modified_base (6): LNA-G
ucuucggagtt

SEQ ID NO: 66098 - DNA, 10 bp, Artificial Sequence
  Description of Artificial Sequence: Synthetic oligonucleotide
  Description of Combined DNA/RNA Molecule: Synthetic oligonucleotide
  modified_base (1): LNA-C
  modified_base (5): LNA-G
cuucggagtt

SEQ ID NO: 66099 - DNA, 9 bp, Artificial Sequence
  Description of Artificial Sequence: Synthetic oligonucleotide
  Description of Combined DNA/RNA Molecule: Synthetic oligonucleotide
  modified_base (1): LNA-U
  modified_base (4): LNA-G
uucggagtt

SEQ ID NO: 66100 - DNA, 8 bp, Artificial Sequence
  Description of Artificial Sequence: Synthetic oligonucleotide
  Description of Combined DNA/RNA Molecule: Synthetic oligonucleotide
  modified_base (1): LNA-U
  modified_base (3): LNA-G
ucggagtt

SEQ ID NO: 66101 - DNA, 7 bp, Artificial Sequence
  Description of Artificial Sequence: Synthetic oligonucleotide
  Description of Combined DNA/RNA Molecule: Synthetic oligonucleotide
  modified_base (1): LNA-C
  modified_base (2): LNA-G
cggagtt

SEQ ID NO: 66102 - DNA, 21 bp, Artificial Sequence
  Description of Artificial Sequence: Synthetic oligonucleotide
  Description of Combined DNA/RNA Molecule: Synthetic oligonucleotide
  modified_base (2): LNA-G
  modified_base (16): LNA-G
ggaucuuauuucuucggagtt

SEQ ID NO: 66103 - DNA, 25 bp, Artificial Sequence
  Description of Artificial Sequence: Synthetic oligonucleotide
  Description of Combined DNA/RNA Molecule: Synthetic oligonucleotide
ggaucuuauuucuucggagacaatg

SEQ ID NO: 66104 - RNA, 25 nt, Artificial Sequence
  Description of Artificial Sequence: Synthetic oligonucleotide
uuaagcagaguucaaaagcccuuca

SEQ ID NO: 66105 - RNA, 25 nt, Artificial Sequence
  Description of Artificial Sequence: Synthetic oligonucleotide
uaagcagaguucaaaagcccuucag

SEQ ID NO: 66106 - RNA, 25 nt, Artificial Sequence
  Description of Artificial Sequence: Synthetic oligonucleotide
agcagaguucaaaagcccuucagcg

SEQ ID NO: 66107 - RNA, 25 nt, Artificial Sequence
  Description of Artificial Sequence: Synthetic oligonucleotide
cucagggucugagugaagccgcucg

SEQ ID NO: 66108 - RNA, 25 nt, Artificial Sequence
  Description of Artificial Sequence: Synthetic oligonucleotide
caagcaacuacaucacgccagucaa

SEQ ID NO: 66109 - RNA, 25 nt, Artificial Sequence
  Description of Artificial Sequence: Synthetic oligonucleotide
aucaauggcagcuucuuggugcgug

SEQ ID NO: 66110 - RNA, 25 nt, Artificial Sequence
  Description of Artificial Sequence: Synthetic oligonucleotide
uuccagcccacauuggauucaucag

SEQ ID NO: 66111 - RNA, 25 nt, Artificial Sequence
  Description of Artificial Sequence: Synthetic oligonucleotide
cagcugagaauguggaauaccuaag

SEQ ID NO: 66112 - RNA, 25 nt, Artificial Sequence
  Description of Artificial Sequence: Synthetic oligonucleotide
aacguaucuccuaauuugaggcuca

SEQ ID NO: 66113 - RNA, 25 nt, Artificial Sequence
  Description of Artificial Sequence: Synthetic oligonucleotide
ccuaaaauaauuucucuacaauugg

SEQ ID NO: 66114 - RNA, 25 nt, Artificial Sequence
  Description of Artificial Sequence: Synthetic oligonucleotide
uggaagauucagcuaguuaggagcc

SEQ ID NO: 66115 - RNA, 25 nt, Artificial Sequence
  Description of Artificial Sequence: Synthetic oligonucleotide
uuaaacucuccuagucaauauccac

SEQ ID NO: 66116 - RNA, 25 nt, Artificial Sequence
  Description of Artificial Sequence: Synthetic oligonucleotide
cagccuacaguuauguucagucaca

SEQ ID NO: 66117 - RNA, 25 nt, Artificial Sequence
  Description of Artificial Sequence: Synthetic oligonucleotide
guuauguucagucacacacacauac

SEQ ID NO: 66118 - RNA, 25 nt, Artificial Sequence
  Description of Artificial Sequence: Synthetic oligonucleotide
cacauacaaaauguuccuuuugcuu

SEQ ID NO: 66119 - RNA, 25 nt, Artificial Sequence
  Description of Artificial Sequence: Synthetic oligonucleotide
uccuuuugcuuuuaaaguaauuuuu

SEQ ID NO: 66120 - RNA, 25 nt, Artificial Sequence
  Description of Artificial Sequence: Synthetic oligonucleotide
ugaccugugaagcaacagucaaugg

SEQ ID NO: 66121 - RNA, 25 nt, Artificial Sequence
  Description of Artificial Sequence: Synthetic oligonucleotide
cuaucucacacaucgacaaaccaau

SEQ ID NO: 66122 - RNA, 25 nt, Artificial Sequence
  Description of Artificial Sequence: Synthetic oligonucleotide
uguccucaauuguacugcuaccacu

SEQ ID NO: 66123 - RNA, 25 nt, Artificial Sequence
  Description of Artificial Sequence: Synthetic oligonucleotide
aaaccguagcuggcaagcggucuua

SEQ ID NO: 66124 - RNA, 25 nt, Artificial Sequence
  Description of Artificial Sequence: Synthetic oligonucleotide
uagcuggcaagcggucuuaccggcu

SEQ ID NO: 66125 - RNA, 25 nt, Artificial Sequence
  Description of Artificial Sequence: Synthetic oligonucleotide
uuguaugguuaaaagauggguuacc

SEQ ID NO: 66126 - RNA, 25 nt, Artificial Sequence
  Description of Artificial Sequence: Synthetic oligonucleotide
ugguuaaaagauggguuaccugcga

SEQ ID NO: 66127 - RNA, 25 nt, Artificial Sequence
  Description of Artificial Sequence: Synthetic oligonucleotide
cagggaauuauacaaucuugcugag

SEQ ID NO: 66128 - RNA, 25 nt, Artificial Sequence
  Description of Artificial Sequence: Synthetic oligonucleotide
acaaucuugcugagcauaaaacagu

SEQ ID NO: 66129 - RNA, 25 nt, Artificial Sequence
  Description of Artificial Sequence: Synthetic oligonucleotide
ccaauaaugaagaguccuuuauccu

SEQ ID NO: 66130 - RNA, 25 nt, Artificial Sequence
  Description of Artificial Sequence: Synthetic oligonucleotide
acuuuggauguuccaacgcaaguug

SEQ ID NO: 66131 - RNA, 25 nt, Artificial Sequence
  Description of Artificial Sequence: Synthetic oligonucleotide
aaugcuuccacuaaacugaaaccau

SEQ ID NO: 66132 - RNA, 25 nt, Artificial Sequence
  Description of Artificial Sequence: Synthetic oligonucleotide
gagaaaguuugacuuuguuaaauau

SEQ ID NO: 66133 - RNA, 25 nt, Artificial Sequence
  Description of Artificial Sequence: Synthetic oligonucleotide
aaagaacuacuguauauuaaaaguu

SEQ ID NO: 66134 - RNA, 25 nt, Artificial Sequence
  Description of Artificial Sequence: Synthetic oligonucleotide
uuagaaauacggguuuugacuuaac

SEQ ID NO: 66135 - RNA, 25 nt, Artificial Sequence
  Description of Artificial Sequence: Synthetic oligonucleotide
aacauggguacagcaaacucagcac

SEQ ID NO: 66136 - RNA, 25 nt, Artificial Sequence
  Description of Artificial Sequence: Synthetic oligonucleotide
aaagacacagaagaugcugaccuca

SEQ ID NO: 66137 - RNA, 25 nt, Artificial Sequence
  Description of Artificial Sequence: Synthetic oligonucleotide
uaguagggagguuuauucagaucgc

SEQ ID NO: 66138 - RNA, 25 nt, Artificial Sequence
  Description of Artificial Sequence: Synthetic oligonucleotide
gccuucugcagcaggguucugggau

SEQ ID NO: 66139 - RNA, 25 nt, Artificial Sequence
  Description of Artificial Sequence: Synthetic oligonucleotide
ggucugguacauauuggaaauuaug

SEQ ID NO: 66140 - RNA, 25 nt, Artificial Sequence
  Description of Artificial Sequence: Synthetic oligonucleotide
cuaguccuuccgauggaagcacuag

SEQ ID NO: 66141 - RNA, 25 nt, Artificial Sequence
  Description of Artificial Sequence: Synthetic oligonucleotide
ccagugaauauuguuuuuaugugga

SEQ ID NO: 66142 - RNA, 25 nt, Artificial Sequence
  Description of Artificial Sequence: Synthetic oligonucleotide
augaauucaaguuggaauugguaga

SEQ ID NO: 66143 - RNA, 25 nt, Artificial Sequence
  Description of Artificial Sequence: Synthetic oligonucleotide
caggacacagauuuagacuuggaga

SEQ ID NO: 66144 - RNA, 25 nt, Artificial Sequence
  Description of Artificial Sequence: Synthetic oligonucleotide
cucaaagcacaguuacaguauucca

SEQ ID NO: 66145 - RNA, 25 nt, Artificial Sequence
  Description of Artificial Sequence: Synthetic oligonucleotide
accacugccaccacugaugaauuaa

SEQ ID NO: 66146 - RNA, 25 nt, Artificial Sequence
  Description of Artificial Sequence: Synthetic oligonucleotide
gaaacuacuagugccacaucaucac

SEQ ID NO: 66147 - RNA, 25 nt, Artificial Sequence
  Description of Artificial Sequence: Synthetic oligonucleotide
aagucggacagccucaccaaacaga

SEQ ID NO: 66148 - RNA, 25 nt, Artificial Sequence
  Description of Artificial Sequence: Synthetic oligonucleotide
gaaagcgaaaaauggaacaugaugg

SEQ ID NO: 66149 - RNA, 25 nt, Artificial Sequence
  Description of Artificial Sequence: Synthetic oligonucleotide
cccucugauuuagcauguagacugc

SEQ ID NO: 66150 - RNA, 25 nt, Artificial Sequence
  Description of Artificial Sequence: Synthetic oligonucleotide
ugagcuauuuaaggaucuauuuaug

SEQ ID NO: 66151 - RNA, 25 nt, Artificial Sequence
  Description of Artificial Sequence: Synthetic oligonucleotide
aaaaggugaaaaagcacuauuauca

SEQ ID NO: 66152 - RNA, 25 nt, Artificial Sequence
  Description of Artificial Sequence: Synthetic oligonucleotide
gaaaaagcacuauuaucaguucugc

SEQ ID NO: 66153 - RNA, 25 nt, Artificial Sequence
  Description of Artificial Sequence: Synthetic oligonucleotide
ggcugaaaagaaagauuaaaccuac

SEQ ID NO: 66154 - RNA, 25 nt, Artificial Sequence
  Description of Artificial Sequence: Synthetic oligonucleotide
uaaacccuuauaauaaaauccuucu

SEQ ID NO: 66155 - RNA, 25 nt, Artificial Sequence
  Description of Artificial Sequence: Synthetic oligonucleotide
cauacuauuagccaaugcuguagac

SEQ ID NO: 66156 - RNA, 25 nt, Artificial Sequence
  Description of Artificial Sequence: Synthetic oligonucleotide
gacagaagcauuuugauaggaauag

SEQ ID NO: 66157 - RNA, 25 nt, Artificial Sequence
  Description of Artificial Sequence: Synthetic oligonucleotide
agagcaaauaagauaauggcccuga

SEQ ID NO: 66158 - RNA, 25 nt, Artificial Sequence
  Description of Artificial Sequence: Synthetic oligonucleotide
ccaacauuuuucucuuccucaagca

SEQ ID NO: 66159 - RNA, 25 nt, Artificial Sequence
  Description of Artificial Sequence: Synthetic oligonucleotide
uuaaguaugagaaaaguucagccca

SEQ ID NO: 66160 - RNA, 25 nt, Artificial Sequence
  Description of Artificial Sequence: Synthetic oligonucleotide
caggaauaaagauggcugcugaacc

SEQ ID NO: 66161 - RNA, 25 nt, Artificial Sequence
  Description of Artificial Sequence: Synthetic oligonucleotide
aauuugaaugaccaaguucucuuca

SEQ ID NO: 66162 - RNA, 25 nt, Artificial Sequence
  Description of Artificial Sequence: Synthetic oligonucleotide
auguauaaagauagccagccuagag

SEQ ID NO: 66163 - RNA, 25 nt, Artificial Sequence
  Description of Artificial Sequence: Synthetic oligonucleotide
ggcuguaacuaucucugugaagugu

SEQ ID NO: 66164 - RNA, 25 nt, Artificial Sequence
  Description of Artificial Sequence: Synthetic oligonucleotide
ucugugaagugugagaaaauuucaa

SEQ ID NO: 66165 - RNA, 25 nt, Artificial Sequence
  Description of Artificial Sequence: Synthetic oligonucleotide
ccuuuaaggaaaugaauccuccuga

SEQ ID NO: 66166 - RNA, 25 nt, Artificial Sequence
  Description of Artificial Sequence: Synthetic oligonucleotide
aaggauacaaaaagugacaucauau

SEQ ID NO: 66167 - RNA, 25 nt, Artificial Sequence
  Description of Artificial Sequence: Synthetic oligonucleotide
agaugcaauuugaaucuucaucaua

SEQ ID NO: 66168 - RNA, 25 nt, Artificial Sequence
  Description of Artificial Sequence: Synthetic oligonucleotide
guucaaaacgaagacuagcuauuaa

SEQ ID NO: 66169 - RNA, 25 nt, Artificial Sequence
  Description of Artificial Sequence: Synthetic oligonucleotide
gugaaaccucaucucuacuaaaaau

SEQ ID NO: 66170 - RNA, 25 nt, Artificial Sequence
  Description of Artificial Sequence: Synthetic oligonucleotide
acgaaagagaagcucuaucucgccu

SEQ ID NO: 66171 - RNA, 25 nt, Artificial Sequence
  Description of Artificial Sequence: Synthetic oligonucleotide
cuccacaagcgccuucgguccaguu

SEQ ID NO: 66172 - RNA, 25 nt, Artificial Sequence
  Description of Artificial Sequence: Synthetic oligonucleotide
gagaagauuccaaagauguagccgc

SEQ ID NO: 66173 - RNA, 25 nt, Artificial Sequence
  Description of Artificial Sequence: Synthetic oligonucleotide
aaucuggauucaaugaggagacuug

SEQ ID NO: 66174 - RNA, 25 nt, Artificial Sequence
  Description of Artificial Sequence: Synthetic oligonucleotide
agaacagauuugagaguagugagga

SEQ ID NO: 66175 - RNA, 25 nt, Artificial Sequence
  Description of Artificial Sequence: Synthetic oligonucleotide
ccagagcugugcagaugaguacaaa

SEQ ID NO: 66176 - RNA, 25 nt, Artificial Sequence
  Description of Artificial Sequence: Synthetic oligonucleotide
ccucagauuguuguuguuaaugggc

SEQ ID NO: 66177 - RNA, 25 nt, Artificial Sequence
  Description of Artificial Sequence: Synthetic oligonucleotide
cuauuuuaauuauuuuuaauuuauu

SEQ ID NO: 66178 - RNA, 25 nt, Artificial Sequence
  Description of Artificial Sequence: Synthetic oligonucleotide
uuuaauuuauuaauauuuaaauaug

SEQ ID NO: 66179 - RNA, 25 nt, Artificial Sequence
  Description of Artificial Sequence: Synthetic oligonucleotide
augcaguuugaauauccuuuguuuc

SEQ ID NO: 66180 - RNA, 25 nt, Artificial Sequence
  Description of Artificial Sequence: Synthetic oligonucleotide
caugcugcuggcgucuaaguguuug

SEQ ID NO: 66181 - RNA, 25 nt, Artificial Sequence
  Description of Artificial Sequence: Synthetic oligonucleotide
agaugugcauuucaccugugacaaa

SEQ ID NO: 66182 - RNA, 25 nt, Artificial Sequence
  Description of Artificial Sequence: Synthetic oligonucleotide
ucaaaaccugugccaggcugaauua

SEQ ID NO: 66183 - RNA, 25 nt, Artificial Sequence
  Description of Artificial Sequence: Synthetic oligonucleotide
gaauguggguagucauucuuacaau

SEQ ID NO: 66184 - RNA, 25 nt, Artificial Sequence
  Description of Artificial Sequence: Synthetic oligonucleotide
auguggguagucauucuuacaauug

SEQ ID NO: 66185 - RNA, 25 nt, Artificial Sequence
  Description of Artificial Sequence: Synthetic oligonucleotide
ugaaaaugagcaucagagaguguac

SEQ ID NO: 66186 - RNA, 25 nt, Artificial Sequence
  Description of Artificial Sequence: Synthetic oligonucleotide
uugcuuuucauguagaacucagcag

SEQ ID NO: 66187 - RNA, 25 nt, Artificial Sequence
  Description of Artificial Sequence: Synthetic oligonucleotide
uguauuucuauauuuauuuucagua

SEQ ID NO: 66188 - RNA, 25 nt, Artificial Sequence
  Description of Artificial Sequence: Synthetic oligonucleotide
uuugauuaauguuucuuaaauggaa

SEQ ID NO: 66189 - RNA, 25 nt, Artificial Sequence
  Description of Artificial Sequence: Synthetic oligonucleotide
caacguguauagugccuaaaauugu

SEQ ID NO: 66190 - RNA, 25 nt, Artificial Sequence
  Description of Artificial Sequence: Synthetic oligonucleotide
cauauccuuggcuacuaacaucugg

SEQ ID NO: 66191 - RNA, 25 nt, Artificial Sequence
  Description of Artificial Sequence: Synthetic oligonucleotide
uacuaacaucuggagacugugagcu

SEQ ID NO: 66192 - RNA, 25 nt, Artificial Sequence
  Description of Artificial Sequence: Synthetic oligonucleotide
cauaaguugugugcuuuuuauuaau

SEQ ID NO: 66193 - RNA, 25 nt, Artificial Sequence
  Description of Artificial Sequence: Synthetic oligonucleotide
gcaucauuuuggcucuucuuacauu

SEQ ID NO: 66194 - RNA, 25 nt, Artificial Sequence
  Description of Artificial Sequence: Synthetic oligonucleotide
gcucuucuuacauuuguaaaaaugu

SEQ ID NO: 66195 - RNA, 25 nt, Artificial Sequence
  Description of Artificial Sequence: Synthetic oligonucleotide
agauuaggucaucuuaauucauauu

SEQ ID NO: 66196 - RNA, 25 nt, Artificial Sequence
  Description of Artificial Sequence: Synthetic oligonucleotide
auggaauugaaagaacuaaucauga

SEQ ID NO: 66197 - RNA, 25 nt, Artificial Sequence
  Description of Artificial Sequence: Synthetic oligonucleotide
cacacucauuccuucugcucuuggg

SEQ ID NO: 66198 - RNA, 25 nt, Artificial Sequence
  Description of Artificial Sequence: Synthetic oligonucleotide
uguagagguaaccaguagcuuugag

SEQ ID NO: 66199 - RNA, 25 nt, Artificial Sequence
  Description of Artificial Sequence: Synthetic oligonucleotide
caaccacaugccacguaauauuuca

SEQ ID NO: 66200 - RNA, 25 nt, Artificial Sequence
  Description of Artificial Sequence: Synthetic oligonucleotide
ucggaaacaaguuauucucuucacu

SEQ ID NO: 66201 - RNA, 25 nt, Artificial Sequence
  Description of Artificial Sequence: Synthetic oligonucleotide
acucccaauaacuaaugcuaagaaa

SEQ ID NO: 66202 - RNA, 25 nt, Artificial Sequence
  Description of Artificial Sequence: Synthetic oligonucleotide
aaugcuaagaaaugcugaaaaucaa

SEQ ID NO: 66203 - RNA, 25 nt, Artificial Sequence
  Description of Artificial Sequence: Synthetic oligonucleotide
gucuuucucuaaauaugauuacuuu

SEQ ID NO: 66204 - RNA, 25 nt, Artificial Sequence
  Description of Artificial Sequence: Synthetic oligonucleotide
ugaauuucaggcauuuuguucuaca

SEQ ID NO: 66205 - RNA, 25 nt, Artificial Sequence
  Description of Artificial Sequence: Synthetic oligonucleotide
cgauucccucucacccgggacucuc

SEQ ID NO: 66206 - RNA, 25 nt, Artificial Sequence
  Description of Artificial Sequence: Synthetic oligonucleotide
aggaaagugaaccuuuaaaguaaag

SEQ ID NO: 66207 - RNA, 25 nt, Artificial Sequence
  Description of Artificial Sequence: Synthetic oligonucleotide
gaggcugcaugcucuggaagccugg

SEQ ID NO: 66208 - RNA, 25 nt, Artificial Sequence
  Description of Artificial Sequence: Synthetic oligonucleotide
ucucugaacagaaaacaaaagagag

SEQ ID NO: 66209 - RNA, 25 nt, Artificial Sequence
  Description of Artificial Sequence: Synthetic oligonucleotide
aacuuggcuguaaucaguuaugccg

SEQ ID NO: 66210 - RNA, 25 nt, Artificial Sequence
  Description of Artificial Sequence: Synthetic oligonucleotide
agaagccaaaauuaaaagaagucca

SEQ ID NO: 66211 - RNA, 25 nt, Artificial Sequence
  Description of Artificial Sequence: Synthetic oligonucleotide
auuaaaagaaguccaggugagguua

SEQ ID NO: 66212 - RNA, 25 nt, Artificial Sequence
  Description of Artificial Sequence: Synthetic oligonucleotide
gaauccggauuaucgggaagaggac

SEQ ID NO: 66213 - RNA, 25 nt, Artificial Sequence
  Description of Artificial Sequence: Synthetic oligonucleotide
aaugugacaucaaagcaaguauugu

SEQ ID NO: 66214 - RNA, 25 nt, Artificial Sequence
  Description of Artificial Sequence: Synthetic oligonucleotide
caucaaagcaaguauuguagcacuc

SEQ ID NO: 66215 - RNA, 25 nt, Artificial Sequence
  Description of Artificial Sequence: Synthetic oligonucleotide
agagagagaaaacaaaaccacaaau

SEQ ID NO: 66216 - RNA, 25 nt, Artificial Sequence
  Description of Artificial Sequence: Synthetic oligonucleotide
ucgcuguaguauuuaagcccauaca

SEQ ID NO: 66217 - RNA, 25 nt, Artificial Sequence
  Description of Artificial Sequence: Synthetic oligonucleotide
cgcuguaguauuuaagcccauacag

SEQ ID NO: 66218 - RNA, 25 nt, Artificial Sequence
  Description of Artificial Sequence: Synthetic oligonucleotide
auuuaagcccauacagaaaccuucc

SEQ ID NO: 66219 - RNA, 25 nt, Artificial Sequence
  Description of Artificial Sequence: Synthetic oligonucleotide
auuaaaauaaacaugguauaccuac

SEQ ID NO: 66220 - RNA, 25 nt, Artificial Sequence
  Description of Artificial Sequence: Synthetic oligonucleotide
cuguucugaucggccaguuuucgga

SEQ ID NO: 66221 - RNA, 25 nt, Artificial Sequence
  Description of Artificial Sequence: Synthetic oligonucleotide
aaauaauuugaacuuuggaacaggg

SEQ ID NO: 66222 - RNA, 25 nt, Artificial Sequence
  Description of Artificial Sequence: Synthetic oligonucleotide
ugcgaccuuaauuuaacuuuccagu

SEQ ID NO: 66223 - RNA, 25 nt, Artificial Sequence
  Description of Artificial Sequence: Synthetic oligonucleotide
cugagaaagcuaaaguuugguuuug

SEQ ID NO: 66224 - RNA, 25 nt, Artificial Sequence
  Description of Artificial Sequence: Synthetic oligonucleotide
aguaaagaugcuacuucccacugua

SEQ ID NO: 66225 - RNA, 25 nt, Artificial Sequence
  Description of Artificial Sequence: Synthetic oligonucleotide
cugcuuaauugcugauaccauauga

SEQ ID NO: 66226 - RNA, 25 nt, Artificial Sequence
  Description of Artificial Sequence: Synthetic oligonucleotide
uaccauaugaaugaaacaugggcug

SEQ ID NO: 66227 - RNA, 25 nt, Artificial Sequence
  Description of Artificial Sequence: Synthetic oligonucleotide
aacuuucuuauccaacuuuuucaua

SEQ ID NO: 66228 - RNA, 25 nt, Artificial Sequence
  Description of Artificial Sequence: Synthetic oligonucleotide
ccuugcaugacaucaugaggccgga

SEQ ID NO: 66229 - RNA, 25 nt, Artificial Sequence
  Description of Artificial Sequence: Synthetic oligonucleotide
ugaauuuguauaugacugcauuugu

SEQ ID NO: 66230 - RNA, 25 nt, Artificial Sequence
  Description of Artificial Sequence: Synthetic oligonucleotide
gaauccuaguagaauguuuacuacc

SEQ ID NO: 66231 - RNA, 25 nt, Artificial Sequence
  Description of Artificial Sequence: Synthetic oligonucleotide
gaaagggaagaauuuuuugaugaaa

SEQ ID NO: 66232 - RNA, 25 nt, Artificial Sequence
  Description of Artificial Sequence: Synthetic oligonucleotide
uaucggcaugccagugugugaauuu

SEQ ID NO: 66233 - RNA, 25 nt, Artificial Sequence
  Description of Artificial Sequence: Synthetic oligonucleotide
caccucauaguagagcaauguaugu

SEQ ID NO: 66234 - RNA, 25 nt, Artificial Sequence
  Description of Artificial Sequence: Synthetic oligonucleotide
ccagaauugccaaagcacauauaua

SEQ ID NO: 66235 - RNA, 25 nt, Artificial Sequence
  Description of Artificial Sequence: Synthetic oligonucleotide
uggugaucuggguaauaguuucucc

SEQ ID NO: 66236 - RNA, 25 nt, Artificial Sequence
  Description of Artificial Sequence: Synthetic oligonucleotide
gaucuggguaauaguuucuccaaau

SEQ ID NO: 66237 - RNA, 25 nt, Artificial Sequence
  Description of Artificial Sequence: Synthetic oligonucleotide
ggaugugaugaauacuuccuagaaa

SEQ ID NO: 66238 - RNA, 25 nt, Artificial Sequence
  Description of Artificial Sequence: Synthetic oligonucleotide
cauuuccacagcuacaccauauaug

SEQ ID NO: 66239 - RNA, 25 nt, Artificial Sequence
  Description of Artificial Sequence: Synthetic oligonucleotide
acagcuacaccauauaugaauggag

SEQ ID NO: 66240 - RNA, 25 nt, Artificial Sequence
  Description of Artificial Sequence: Synthetic oligonucleotide
ugcaguucuuacacgagaagaagau

SEQ ID NO: 66241 - RNA, 25 nt, Artificial Sequence
  Description of Artificial Sequence: Synthetic oligonucleotide
acgagaagaagaucauuuacaggga

SEQ ID NO: 66242 - RNA, 25 nt, Artificial Sequence
  Description of Artificial Sequence: Synthetic oligonucleotide
cgagaagaagaucauuuacagggac

SEQ ID NO: 66243 - RNA, 25 nt, Artificial Sequence
  Description of Artificial Sequence: Synthetic oligonucleotide
aagaagaucauuuacagggaccuga

SEQ ID NO: 66244 - RNA, 25 nt, Artificial Sequence
  Description of Artificial Sequence: Synthetic oligonucleotide
agaggaagagguguuugacugcauc

SEQ ID NO: 66245 - RNA, 25 nt, Artificial Sequence
  Description of Artificial Sequence: Synthetic oligonucleotide
gaggaagagguguuugacugcaucg

SEQ ID NO: 66246 - RNA, 25 nt, Artificial Sequence
  Description of Artificial Sequence: Synthetic oligonucleotide
cuacuuugagggcgaguucacaggg

SEQ ID NO: 66247 - RNA, 25 nt, Artificial Sequence
  Description of Artificial Sequence: Synthetic oligonucleotide
agggcaucuccuggcaccucugucc

SEQ ID NO: 66248 - RNA, 25 nt, Artificial Sequence
  Description of Artificial Sequence: Synthetic oligonucleotide
ggagugauaugguuugucuuuuuaa

SEQ ID NO: 66249 - RNA, 25 nt, Artificial Sequence
  Description of Artificial Sequence: Synthetic oligonucleotide
gagugauaugguuugucuuuuuaag

SEQ ID NO: 66250 - RNA, 25 nt, Artificial Sequence
  Description of Artificial Sequence: Synthetic oligonucleotide
ugcaguaaagauccuaaagguuguc

SEQ ID NO: 66251 - RNA, 25 nt, Artificial Sequence
  Description of Artificial Sequence: Synthetic oligonucleotide
aguaaagauccuaaagguugucgac

SEQ ID NO: 66252 - RNA, 25 nt, Artificial Sequence
  Description of Artificial Sequence: Synthetic oligonucleotide
ugacaaaggacaaccuggcaauugu

SEQ ID NO: 66253 - RNA, 25 nt, Artificial Sequence
  Description of Artificial Sequence: Synthetic oligonucleotide
gcaauugugacccaguggugcgagg

SEQ ID NO: 66254 - RNA, 25 nt, Artificial Sequence
  Description of Artificial Sequence: Synthetic oligonucleotide
aacaucauccauagagacaugaaau

SEQ ID NO: 66255 - RNA, 25 nt, Artificial Sequence
  Description of Artificial Sequence: Synthetic oligonucleotide
ugaaauccaacaauauauuucucca

SEQ ID NO: 66256 - RNA, 25 nt, Artificial Sequence
  Description of Artificial Sequence: Synthetic oligonucleotide
aacaauauauuucuccaugaaggcu

SEQ ID NO: 66257 - RNA, 25 nt, Artificial Sequence
  Description of Artificial Sequence: Synthetic oligonucleotide
aacaguaaagucacgcuggaguggu

SEQ ID NO: 66258 - RNA, 25 nt, Artificial Sequence
  Description of Artificial Sequence: Synthetic oligonucleotide
ugugaagaaaguaaaggaagagagg

SEQ ID NO: 66259 - RNA, 25 nt, Artificial Sequence
  Description of Artificial Sequence: Synthetic oligonucleotide
cuuccgagccauccuugcaucgggc

SEQ ID NO: 66260 - RNA, 25 nt, Artificial Sequence
  Description of Artificial Sequence: Synthetic oligonucleotide
aauggagguugaauauccuacugug

SEQ ID NO: 66261 - RNA, 25 nt, Artificial Sequence
  Description of Artificial Sequence: Synthetic oligonucleotide
ggagguugaauauccuacuguguaa

SEQ ID NO: 66262 - RNA, 25 nt, Artificial Sequence
  Description of Artificial Sequence: Synthetic oligonucleotide
auuuugaguuuucccuuguagugua

SEQ ID NO: 66263 - RNA, 25 nt, Artificial Sequence
  Description of Artificial Sequence: Synthetic oligonucleotide
uauccuguuuguucuuuguugauug

SEQ ID NO: 66264 - RNA, 25 nt, Artificial Sequence
  Description of Artificial Sequence: Synthetic oligonucleotide
ccuguuuguucuuuguugauugaaa

SEQ ID NO: 66265 - RNA, 25 nt, Artificial Sequence
  Description of Artificial Sequence: Synthetic oligonucleotide
cucuacagccuucuuuuucuuccau

SEQ ID NO: 66266 - RNA, 25 nt, Artificial Sequence
  Description of Artificial Sequence: Synthetic oligonucleotide
ucuuccauagcuaaucuuccuucua

SEQ ID NO: 66267 - RNA, 25 nt, Artificial Sequence
  Description of Artificial Sequence: Synthetic oligonucleotide
auaaucuuccuguugaaugcuucau

SEQ ID NO: 66268 - RNA, 25 nt, Artificial Sequence
  Description of Artificial Sequence: Synthetic oligonucleotide
uaaucuuccuguugaaugcuucaug

SEQ ID NO: 66269 - RNA, 25 nt, Artificial Sequence
  Description of Artificial Sequence: Synthetic oligonucleotide
cuucaugacuugaauucuacuuuga

SEQ ID NO: 66270 - RNA, 25 nt, Artificial Sequence
  Description of Artificial Sequence: Synthetic oligonucleotide
aagagggagagaagcaacuacagac

SEQ ID NO: 66271 - RNA, 25 nt, Artificial Sequence
  Description of Artificial Sequence: Synthetic oligonucleotide
cgucuccuaccagaccaaggucaac

SEQ ID NO: 66272 - RNA, 25 nt, Artificial Sequence
  Description of Artificial Sequence: Synthetic oligonucleotide
gaucaaucggcccgacuaucucgac

SEQ ID NO: 66273 - RNA, 25 nt, Artificial Sequence
  Description of Artificial Sequence: Synthetic oligonucleotide
ggacgaacauccaaccuucccaaac

SEQ ID NO: 66274 - RNA, 25 nt, Artificial Sequence
  Description of Artificial Sequence: Synthetic oligonucleotide
agggucggaacccaagcuuagaacu

SEQ ID NO: 66275 - RNA, 25 nt, Artificial Sequence
  Description of Artificial Sequence: Synthetic oligonucleotide
ucggaacccaagcuuagaacuuuaa

SEQ ID NO: 66276 - RNA, 25 nt, Artificial Sequence
  Description of Artificial Sequence: Synthetic oligonucleotide
acccaagcuuagaacuuuaagcaac

SEQ ID NO: 66277 - RNA, 25 nt, Artificial Sequence
  Description of Artificial Sequence: Synthetic oligonucleotide
gaacuuuaagcaacaagaccaccac

SEQ ID NO: 66278 - RNA, 25 nt, Artificial Sequence
  Description of Artificial Sequence: Synthetic oligonucleotide
acuauucaguggcgagaaauaaagu

SEQ ID NO: 66279 - RNA, 25 nt, Artificial Sequence
  Description of Artificial Sequence: Synthetic oligonucleotide
cuauucaguggcgagaaauaaaguu

SEQ ID NO: 66280 - RNA, 25 nt, Artificial Sequence
  Description of Artificial Sequence: Synthetic oligonucleotide
aaacacagauaacaggaaaugaucc

SEQ ID NO: 66281 - RNA, 25 nt, Artificial Sequence
  Description of Artificial Sequence: Synthetic oligonucleotide
cuuaagaaaagagaagaaaugaaac

SEQ ID NO: 66282 - RNA, 25 nt, Artificial Sequence
  Description of Artificial Sequence: Synthetic oligonucleotide
cugaaggaguguguuuccauccucc

SEQ ID NO: 66283 - RNA, 25 nt, Artificial Sequence
  Description of Artificial Sequence: Synthetic oligonucleotide
ucaccgcgggacugaaaaucuuuga

SEQ ID NO: 66284 - RNA, 25 nt, Artificial Sequence
  Description of Artificial Sequence: Synthetic oligonucleotide
agcagaaauaagcgugccguucagg

SEQ ID NO: 66285 - RNA, 25 nt, Artificial Sequence
  Description of Artificial Sequence: Synthetic oligonucleotide
aagcgugccguucaggguccagaag

SEQ ID NO: 66286 - RNA, 25 nt, Artificial Sequence
  Description of Artificial Sequence: Synthetic oligonucleotide
agaaacagucacucaagacugcuug

SEQ ID NO: 66287 - RNA, 25 nt, Artificial Sequence
  Description of Artificial Sequence: Synthetic oligonucleotide
agaggaagaagguccaugucuuugg

SEQ ID NO: 66288 - RNA, 25 nt, Artificial Sequence
  Description of Artificial Sequence: Synthetic oligonucleotide
uguauucaaaauaugccugaaacac

SEQ ID NO: 66289 - RNA, 25 nt, Artificial Sequence
  Description of Artificial Sequence: Synthetic oligonucleotide
auuuuccucccuuucucuguaccuc

SEQ ID NO: 66290 - RNA, 25 nt, Artificial Sequence
  Description of Artificial Sequence: Synthetic oligonucleotide
caaagaaagauagagcaagacaaga

SEQ ID NO: 66291 - RNA, 25 nt, Artificial Sequence
  Description of Artificial Sequence: Synthetic oligonucleotide
aagaaagauagagcaagacaagaaa

SEQ ID NO: 66292 - RNA, 25 nt, Artificial Sequence
  Description of Artificial Sequence: Synthetic oligonucleotide
gaaagcauuuguuuguacaagaucc

SEQ ID NO: 66293 - RNA, 25 nt, Artificial Sequence
  Description of Artificial Sequence: Synthetic oligonucleotide
ugaguuaaacgaacguacuugcaga

SEQ ID NO: 66294 - RNA, 25 nt, Artificial Sequence
  Description of Artificial Sequence: Synthetic oligonucleotide
acugauacagaacgaucgauacaga

SEQ ID NO: 66295 - RNA, 25 nt, Artificial Sequence
  Description of Artificial Sequence: Synthetic oligonucleotide
auauuauauauauauaaaaauaaau

SEQ ID NO: 66296 - RNA, 25 nt, Artificial Sequence
  Description of Artificial Sequence: Synthetic oligonucleotide
auuauauauauauaaaaauaaauau

SEQ ID NO: 66297 - RNA, 25 nt, Artificial Sequence
  Description of Artificial Sequence: Synthetic oligonucleotide
ucacuggauguauuugacugcugug

SEQ ID NO: 66298 - RNA, 25 nt, Artificial Sequence
  Description of Artificial Sequence: Synthetic oligonucleotide
cagggaagaggaggagaugagagac

SEQ ID NO: 66299 - RNA, 25 nt, Artificial Sequence
  Description of Artificial Sequence: Synthetic oligonucleotide
augaucuuuuuuuugucccacuugg

SEQ ID NO: 66300 - RNA, 27 nt, Artificial Sequence
  Description of Artificial Sequence: Synthetic oligonucleotide
ggccgugaacuccucaucaaaauaccu

SEQ ID NO: 66301 - RNA, 27 nt, Artificial Sequence
  Description of Artificial Sequence: Synthetic oligonucleotide
uggugugauggugaucaucugggccgu

SEQ ID NO: 66302 - RNA, 27 nt, Artificial Sequence
  Description of Artificial Sequence: Synthetic oligonucleotide
aaacccgcaggauaguuuucuucccua

SEQ ID NO: 66303 - RNA, 27 nt, Artificial Sequence
  Description of Artificial Sequence: Synthetic oligonucleotide
caaacuggaugaaauaaauuaaaaccc

SEQ ID NO: 66304 - RNA, 27 nt, Artificial Sequence
  Description of Artificial Sequence: Synthetic oligonucleotide
agaaguccuuaacauuucccuacguga

SEQ ID NO: 66305 - RNA, 27 nt, Artificial Sequence
  Description of Artificial Sequence: Synthetic oligonucleotide
cucugucccacuggguaaacccuggcc

SEQ ID NO: 66306 - RNA, 27 nt, Artificial Sequence
  Description of Artificial Sequence: Synthetic oligonucleotide
cacaauaacaaauuuaaaccuugcucc

SEQ ID NO: 66307 - RNA, 27 nt, Artificial Sequence
  Description of Artificial Sequence: Synthetic oligonucleotide
aaaugcauuugaacaacauaauacaca

SEQ ID NO: 66308 - RNA, 27 nt, Artificial Sequence
  Description of Artificial Sequence: Synthetic oligonucleotide
ggcuuuccugucacaaagauuaaaaac

SEQ ID NO: 66309 - RNA, 27 nt, Artificial Sequence
  Description of Artificial Sequence: Synthetic oligonucleotide
agggcuuuccugucacaaagauuaaaa

SEQ ID NO: 66310 - RNA, 27 nt, Artificial Sequence
  Description of Artificial Sequence: Synthetic oligonucleotide
ggccaugcugggagacauaagcagcag

SEQ ID NO: 66311 - RNA, 27 nt, Artificial Sequence
  Description of Artificial Sequence: Synthetic oligonucleotide
ucagggagaagcuucugaaacacuucu

SEQ ID NO: 66312 - RNA, 27 nt, Artificial Sequence
  Description of Artificial Sequence: Synthetic oligonucleotide
aagggcuucuuccuuauugauggucag

SEQ ID NO: 66313 - RNA, 27 nt, Artificial Sequence
  Description of Artificial Sequence: Synthetic oligonucleotide
ugaagggcuucuuccuuauugaugguc

SEQ ID NO: 66314 - RNA, 27 nt, Artificial Sequence
  Description of Artificial Sequence: Synthetic oligonucleotide
cgcugaagggcuucuuccuuauugaug

SEQ ID NO: 66315 - RNA, 27 nt, Artificial Sequence
  Description of Artificial Sequence: Synthetic oligonucleotide
gccgcugaagggcuucuuccuuauuga

SEQ ID NO: 66316 - RNA, 27 nt, Artificial Sequence
  Description of Artificial Sequence: Synthetic oligonucleotide
acuggccgcugaagggcuucuuccuua

SEQ ID NO: 66317 - RNA, 27 nt, Artificial Sequence
  Description of Artificial Sequence: Synthetic oligonucleotide
cggagcuuuucaccuuuaguuaugcuu

SEQ ID NO: 66318 - RNA, 27 nt, Artificial Sequence
  Description of Artificial Sequence: Synthetic oligonucleotide
ccggagcuuuucaccuuuaguuaugcu

SEQ ID NO: 66319 - RNA, 27 nt, Artificial Sequence
  Description of Artificial Sequence: Synthetic oligonucleotide
cagacuguugacuggcgugauguaguu

SEQ ID NO: 66320 - RNA, 27 nt, Artificial Sequence
  Description of Artificial Sequence: Synthetic oligonucleotide
cuuuugaacucugcuuaaauccagugg

SEQ ID NO: 66321 - RNA, 27 nt, Artificial Sequence
  Description of Artificial Sequence: Synthetic oligonucleotide
gcuuuugaacucugcuuaaauccagug

SEQ ID NO: 66322 - RNA, 27 nt, Artificial Sequence
  Description of Artificial Sequence: Synthetic oligonucleotide
agggcuuuugaacucugcuuaaaucca

SEQ ID NO: 66323 - RNA, 27 nt, Artificial Sequence
  Description of Artificial Sequence: Synthetic oligonucleotide
aagggcuuuugaacucugcuuaaaucc

SEQ ID NO: 66324 - RNA, 27 nt, Artificial Sequence
  Description of Artificial Sequence: Synthetic oligonucleotide
ugaagggcuuuugaacucugcuuaaau

SEQ ID NO: 66325 - RNA, 27 nt, Artificial Sequence
  Description of Artificial Sequence: Synthetic oligonucleotide
cugaagggcuuuugaacucugcuuaaa

SEQ ID NO: 66326 - RNA, 27 nt, Artificial Sequence
  Description of Artificial Sequence: Synthetic oligonucleotide
cgcugaagggcuuuugaacucugcuua

SEQ ID NO: 66327 - RNA, 27 nt, Artificial Sequence
  Description of Artificial Sequence: Synthetic oligonucleotide
cgagcggcuucacucagacccugaggc

SEQ ID NO: 66328 - RNA, 27 nt, Artificial Sequence
  Description of Artificial Sequence: Synthetic oligonucleotide
uugacuggcgugauguaguugcuuggg

SEQ ID NO: 66329 - RNA, 27 nt, Artificial Sequence
  Description of Artificial Sequence: Synthetic oligonucleotide
cacgcaccaagaagcugccauugaucc

SEQ ID NO: 66330 - RNA, 27 nt, Artificial Sequence
  Description of Artificial Sequence: Synthetic oligonucleotide
cugaugaauccaaugugggcuggaauc

SEQ ID NO: 66331 - RNA, 27 nt, Artificial Sequence
  Description of Artificial Sequence: Synthetic oligonucleotide
cuuagguauuccacauucucagcugug

SEQ ID NO: 66332 - RNA, 27 nt, Artificial Sequence
  Description of Artificial Sequence: Synthetic oligonucleotide
ugagccucaaauuaggagauacguuuu

SEQ ID NO: 66333 - RNA, 27 nt, Artificial Sequence
  Description of Artificial Sequence: Synthetic oligonucleotide
ccaauuguagagaaauuauuuuaggaa

SEQ ID NO: 66334 - RNA, 27 nt, Artificial Sequence
  Description of Artificial Sequence: Synthetic oligonucleotide
ggcuccuaacuagcugaaucuuccaau

SEQ ID NO: 66335 - RNA, 27 nt, Artificial Sequence
  Description of Artificial Sequence: Synthetic oligonucleotide
guggauauugacuaggagaguuuaaaa

SEQ ID NO: 66336 - RNA, 27 nt, Artificial Sequence
  Description of Artificial Sequence: Synthetic oligonucleotide
ugugacugaacauaacuguaggcugaa

SEQ ID NO: 66337 - RNA, 27 nt, Artificial Sequence
  Description of Artificial Sequence: Synthetic oligonucleotide
guaugugugugugacugaacauaacug

SEQ ID NO: 66338 - RNA, 27 nt, Artificial Sequence
  Description of Artificial Sequence: Synthetic oligonucleotide
aagcaaaaggaacauuuuguaugugug

SEQ ID NO: 66339 - RNA, 27 nt, Artificial Sequence
  Description of Artificial Sequence: Synthetic oligonucleotide
aaaaauuacuuuaaaagcaaaaggaac

SEQ ID NO: 66340 - RNA, 27 nt, Artificial Sequence
  Description of Artificial Sequence: Synthetic oligonucleotide
ccauugacuguugcuucacaggucaga

SEQ ID NO: 66341 - RNA, 27 nt, Artificial Sequence
  Description of Artificial Sequence: Synthetic oligonucleotide
auugguuugucgaugugugagauaguu

SEQ ID NO: 66342 - RNA, 27 nt, Artificial Sequence
  Description of Artificial Sequence: Synthetic oligonucleotide
agugguagcaguacaauugaggacaag

SEQ ID NO: 66343 - RNA, 27 nt, Artificial Sequence
  Description of Artificial Sequence: Synthetic oligonucleotide
uaagaccgcuugccagcuacgguuuca

SEQ ID NO: 66344 - RNA, 27 nt, Artificial Sequence
  Description of Artificial Sequence: Synthetic oligonucleotide
agccgguaagaccgcuugccagcuacg

SEQ ID NO: 66345 - RNA, 27 nt, Artificial Sequence
  Description of Artificial Sequence: Synthetic oligonucleotide
gguaacccaucuuuuaaccauacaacu

SEQ ID NO: 66346 - RNA, 27 nt, Artificial Sequence
  Description of Artificial Sequence: Synthetic oligonucleotide
ucgcagguaacccaucuuuuaaccaua

SEQ ID NO: 66347 - RNA, 27 nt, Artificial Sequence
  Description of Artificial Sequence: Synthetic oligonucleotide
cucagcaagauuguauaauucccugca

SEQ ID NO: 66348 - RNA, 27 nt, Artificial Sequence
  Description of Artificial Sequence: Synthetic oligonucleotide
acuguuuuaugcucagcaagauuguau

SEQ ID NO: 66349 - RNA, 27 nt, Artificial Sequence
  Description of Artificial Sequence: Synthetic oligonucleotide
aggauaaaggacucuucauuauuggaa

SEQ ID NO: 66350 - RNA, 27 nt, Artificial Sequence
  Description of Artificial Sequence: Synthetic oligonucleotide
caacuugcguuggaacauccaaagugu

SEQ ID NO: 66351 - RNA, 27 nt, Artificial Sequence
  Description of Artificial Sequence: Synthetic oligonucleotide
augguuucaguuuaguggaagcauuua

SEQ ID NO: 66352 - RNA, 27 nt, Artificial Sequence
  Description of Artificial Sequence: Synthetic oligonucleotide
auauuuaacaaagucaaacuuucucac

SEQ ID NO: 66353 - RNA, 27 nt, Artificial Sequence
  Description of Artificial Sequence: Synthetic oligonucleotide
aacuuuuaauauacaguaguucuuuuc

SEQ ID NO: 66354 - RNA, 27 nt, Artificial Sequence
  Description of Artificial Sequence: Synthetic oligonucleotide
guuaagucaaaacccguauuucuaaag

SEQ ID NO: 66355 - RNA, 27 nt, Artificial Sequence
  Description of Artificial Sequence: Synthetic oligonucleotide
gugcugaguuugcuguacccauguuga

SEQ ID NO: 66356 - RNA, 27 nt, Artificial Sequence
  Description of Artificial Sequence: Synthetic oligonucleotide
ugaggucagcaucuucugugucuuuac

SEQ ID NO: 66357 - RNA, 27 nt, Artificial Sequence
  Description of Artificial Sequence: Synthetic oligonucleotide
gcgaucugaauaaaccucccuacuagc

SEQ ID NO: 66358 - RNA, 27 nt, Artificial Sequence
  Description of Artificial Sequence: Synthetic oligonucleotide
aucccagaacccugcugcagaaggcca

SEQ ID NO: 66359 - RNA, 27 nt, Artificial Sequence
  Description of Artificial Sequence: Synthetic oligonucleotide
cauaauuuccaauauguaccagaccuu

SEQ ID NO: 66360 - RNA, 27 nt, Artificial Sequence
  Description of Artificial Sequence: Synthetic oligonucleotide
cuagugcuuccaucggaaggacuaggu

SEQ ID NO: 66361 - RNA, 27 nt, Artificial Sequence
  Description of Artificial Sequence: Synthetic oligonucleotide
uccacauaaaaacaauauucacuggga

SEQ ID NO: 66362 - RNA, 27 nt, Artificial Sequence
  Description of Artificial Sequence: Synthetic oligonucleotide
ucuaccaauuccaacuugaauucauug

SEQ ID NO: 66363 - RNA, 27 nt, Artificial Sequence
  Description of Artificial Sequence: Synthetic oligonucleotide
ucuccaagucuaaaucuguguccugag

SEQ ID NO: 66364 - RNA, 27 nt, Artificial Sequence
  Description of Artificial Sequence: Synthetic oligonucleotide
uggaauacuguaacugugcuuugagga

SEQ ID NO: 66365 - RNA, 27 nt, Artificial Sequence
  Description of Artificial Sequence: Synthetic oligonucleotide
uuaauucaucagugguggcagugguag

SEQ ID NO: 66366 - RNA, 27 nt, Artificial Sequence
  Description of Artificial Sequence: Synthetic oligonucleotide
gugaugauguggcacuaguaguuucuu

SEQ ID NO: 66367 - RNA, 27 nt, Artificial Sequence
  Description of Artificial Sequence: Synthetic oligonucleotide
ucuguuuggugaggcuguccgacuuug

SEQ ID NO: 66368 - RNA, 27 nt, Artificial Sequence
  Description of Artificial Sequence: Synthetic oligonucleotide
ccaucauguuccauuuuucgcuuucuc

SEQ ID NO: 66369 - RNA, 27 nt, Artificial Sequence
  Description of Artificial Sequence: Synthetic oligonucleotide
gcagucuacaugcuaaaucagagggua

SEQ ID NO: 66370 - RNA, 27 nt, Artificial Sequence
  Description of Artificial Sequence: Synthetic oligonucleotide
cauaaauagauccuuaaauagcucaaa

SEQ ID NO: 66371 - RNA, 27 nt, Artificial Sequence
  Description of Artificial Sequence: Synthetic oligonucleotide
ugauaauagugcuuuuucaccuuuuuc

SEQ ID NO: 66372 - RNA, 27 nt, Artificial Sequence
  Description of Artificial Sequence: Synthetic oligonucleotide
gcagaacugauaauagugcuuuuucac

SEQ ID NO: 66373 - RNA, 27 nt, Artificial Sequence
  Description of Artificial Sequence: Synthetic oligonucleotide
guagguuuaaucuuucuuuucagccau

SEQ ID NO: 66374 - RNA, 27 nt, Artificial Sequence
  Description of Artificial Sequence: Synthetic oligonucleotide
agaaggauuuuauuauaaggguuuaau

SEQ ID NO: 66375 - RNA, 27 nt, Artificial Sequence
  Description of Artificial Sequence: Synthetic oligonucleotide
gucuacagcauuggcuaauaguaugaa

SEQ ID NO: 66376 - RNA, 27 nt, Artificial Sequence
  Description of Artificial Sequence: Synthetic oligonucleotide
cuauuccuaucaaaaugcuucugucua

SEQ ID NO: 66377 - RNA, 27 nt, Artificial Sequence
  Description of Artificial Sequence: Synthetic oligonucleotide
ucagggccauuaucuuauuugcucuau

SEQ ID NO: 66378 - RNA, 27 nt, Artificial Sequence
  Description of Artificial Sequence: Synthetic oligonucleotide
ugcuugaggaagagaaaaauguugguc

SEQ ID NO: 66379 - RNA, 27 nt, Artificial Sequence
  Description of Artificial Sequence: Synthetic oligonucleotide
ugggcugaacuuuucucauacuuaaag

SEQ ID NO: 66380 - RNA, 27 nt, Artificial Sequence
  Description of Artificial Sequence: Synthetic oligonucleotide
gguucagcagccaucuuuauuccugcg

SEQ ID NO: 66381 - RNA, 27 nt, Artificial Sequence
  Description of Artificial Sequence: Synthetic oligonucleotide
ugaagagaacuuggucauucaaauuuc

SEQ ID NO: 66382 - RNA, 27 nt, Artificial Sequence
  Description of Artificial Sequence: Synthetic oligonucleotide
cucuaggcuggcuaucuuuauacauac

SEQ ID NO: 66383 - RNA, 27 nt, Artificial Sequence
  Description of Artificial Sequence: Synthetic oligonucleotide
acacuucacagagauaguuacagccau

SEQ ID NO: 66384 - RNA, 27 nt, Artificial Sequence
  Description of Artificial Sequence: Synthetic oligonucleotide
uugaaauuuucucacacuucacagaga

SEQ ID NO: 66385 - RNA, 27 nt, Artificial Sequence
  Description of Artificial Sequence: Synthetic oligonucleotide
ucaggaggauucauuuccuuaaaggaa

SEQ ID NO: 66386 - RNA, 27 nt, Artificial Sequence
  Description of Artificial Sequence: Synthetic oligonucleotide
auaugaugucacuuuuuguauccuuga

SEQ ID NO: 66387 - RNA, 27 nt, Artificial Sequence
  Description of Artificial Sequence: Synthetic oligonucleotide
uaugaugaagauucaaauugcaucuua

SEQ ID NO: 66388 - RNA, 27 nt, Artificial Sequence
  Description of Artificial Sequence: Synthetic oligonucleotide
uuaauagcuagucuucguuuugaacag

SEQ ID NO: 66389 - RNA, 27 nt, Artificial Sequence
  Description of Artificial Sequence: Synthetic oligonucleotide
auuuuuaguagagaugagguuucacca

SEQ ID NO: 66390 - RNA, 27 nt, Artificial Sequence
  Description of Artificial Sequence: Synthetic oligonucleotide
aggcgagauagagcuucucuuucguuc

SEQ ID NO: 66391 - RNA, 27 nt, Artificial Sequence
  Description of Artificial Sequence: Synthetic oligonucleotide
aacuggaccgaaggcgcuuguggagaa

SEQ ID NO: 66392 - RNA, 27 nt, Artificial Sequence
  Description of Artificial Sequence: Synthetic oligonucleotide
gcggcuacaucuuuggaaucuucuccu

SEQ ID NO: 66393 - RNA, 27 nt, Artificial Sequence
  Description of Artificial Sequence: Synthetic oligonucleotide
caagucuccucauugaauccagauugg

SEQ ID NO: 66394 - RNA, 27 nt, Artificial Sequence
  Description of Artificial Sequence: Synthetic oligonucleotide
uccucacuacucucaaaucuguucugg

SEQ ID NO: 66395 - RNA, 27 nt, Artificial Sequence
  Description of Artificial Sequence: Synthetic oligonucleotide
uuuguacucaucugcacagcucuggcu

SEQ ID NO: 66396 - RNA, 27 nt, Artificial Sequence
  Description of Artificial Sequence: Synthetic oligonucleotide
gcccauuaacaacaacaaucugaggug

SEQ ID NO: 66397 - RNA, 27 nt, Artificial Sequence
  Description of Artificial Sequence: Synthetic oligonucleotide
aauaaauuaaaaauaauuaaaauagug

SEQ ID NO: 66398 - RNA, 27 nt, Artificial Sequence
  Description of Artificial Sequence: Synthetic oligonucleotide
cauauuuaaauauuaauaaauuaaaaa

SEQ ID NO: 66399 - RNA, 27 nt, Artificial Sequence
  Description of Artificial Sequence: Synthetic oligonucleotide
gaaacaaaggauauucaaacugcauag

SEQ ID NO: 66400 - RNA, 27 nt, Artificial Sequence
  Description of Artificial Sequence: Synthetic oligonucleotide
caaacacuuagacgccagcagcauggg

SEQ ID NO: 66401 - RNA, 27 nt, Artificial Sequence
  Description of Artificial Sequence: Synthetic oligonucleotide
uuugucacaggugaaaugcacaucuga

SEQ ID NO: 66402 - RNA, 27 nt, Artificial Sequence
  Description of Artificial Sequence: Synthetic oligonucleotide
uaauucagccuggcacagguuuugauc

SEQ ID NO: 66403 - RNA, 27 nt, Artificial Sequence
  Description of Artificial Sequence: Synthetic oligonucleotide
auuguaagaaugacuacccacauucac

SEQ ID NO: 66404 - RNA, 27 nt, Artificial Sequence
  Description of Artificial Sequence: Synthetic oligonucleotide
caauuguaagaaugacuacccacauuc

SEQ ID NO: 66405 - RNA, 27 nt, Artificial Sequence
  Description of Artificial Sequence: Synthetic oligonucleotide
guacacucucugaugcucauuuucaua

SEQ ID NO: 66406 - RNA, 27 nt, Artificial Sequence
  Description of Artificial Sequence: Synthetic oligonucleotide
cugcugaguucuacaugaaaagcaaau

SEQ ID NO: 66407 - RNA, 27 nt, Artificial Sequence
  Description of Artificial Sequence: Synthetic oligonucleotide
uacugaaaauaaauauagaaauacaac

SEQ ID NO: 66408 - RNA, 27 nt, Artificial Sequence
  Description of Artificial Sequence: Synthetic oligonucleotide
uuccauuuaagaaacauuaaucaaaac

SEQ ID NO: 66409 - RNA, 27 nt, Artificial Sequence
  Description of Artificial Sequence: Synthetic oligonucleotide
acaauuuuaggcacuauacacguuguu

SEQ ID NO: 66410 - RNA, 27 nt, Artificial Sequence
  Description of Artificial Sequence: Synthetic oligonucleotide
ccagauguuaguagccaaggauauggu

SEQ ID NO: 66411 - RNA, 27 nt, Artificial Sequence
  Description of Artificial Sequence: Synthetic oligonucleotide
agcucacagucuccagauguuaguagc

SEQ ID NO: 66412 - RNA, 27 nt, Artificial Sequence
  Description of Artificial Sequence: Synthetic oligonucleotide
auuaauaaaaagcacacaacuuauggc

SEQ ID NO: 66413 - RNA, 27 nt, Artificial Sequence
  Description of Artificial Sequence: Synthetic oligonucleotide
aauguaagaagagccaaaaugaugcau

SEQ ID NO: 66414 - RNA, 27 nt, Artificial Sequence
  Description of Artificial Sequence: Synthetic oligonucleotide
acauuuuuacaaauguaagaagagcca

SEQ ID NO: 66415 - RNA, 27 nt, Artificial Sequence
  Description of Artificial Sequence: Synthetic oligonucleotide
aauaugaauuaagaugaccuaaucugu

SEQ ID NO: 66416 - RNA, 27 nt, Artificial Sequence
  Description of Artificial Sequence: Synthetic oligonucleotide
ucaugauuaguucuuucaauuccaucc

SEQ ID NO: 66417 - RNA, 27 nt, Artificial Sequence
  Description of Artificial Sequence: Synthetic oligonucleotide
cccaagagcagaaggaaugagugugca

SEQ ID NO: 66418 - RNA, 27 nt, Artificial Sequence
  Description of Artificial Sequence: Synthetic oligonucleotide
cucaaagcuacugguuaccucuacacc

SEQ ID NO: 66419 - RNA, 27 nt, Artificial Sequence
  Description of Artificial Sequence: Synthetic oligonucleotide
ugaaauauuacguggcaugugguuggg

SEQ ID NO: 66420 - RNA, 27 nt, Artificial Sequence
  Description of Artificial Sequence: Synthetic oligonucleotide
agugaagagaauaacuuguuuccgaag

SEQ ID NO: 66421 - RNA, 27 nt, Artificial Sequence
  Description of Artificial Sequence: Synthetic oligonucleotide
uuucuuagcauuaguuauugggaguga

SEQ ID NO: 66422 - RNA, 27 nt, Artificial Sequence
  Description of Artificial Sequence: Synthetic oligonucleotide
uugauuuucagcauuucuuagcauuag

SEQ ID NO: 66423 - RNA, 27 nt, Artificial Sequence
  Description of Artificial Sequence: Synthetic oligonucleotide
aaaguaaucauauuuagagaaagacag

SEQ ID NO: 66424 - RNA, 27 nt, Artificial Sequence
  Description of Artificial Sequence: Synthetic oligonucleotide
uguagaacaaaaugccugaaauucagc

SEQ ID NO: 66425 - RNA, 27 nt, Artificial Sequence
  Description of Artificial Sequence: Synthetic oligonucleotide
gagagucccgggugagagggaaucgcc

SEQ ID NO: 66426 - RNA, 27 nt, Artificial Sequence
  Description of Artificial Sequence: Synthetic oligonucleotide
cuuuacuuuaaagguucacuuuccuug

SEQ ID NO: 66427 - RNA, 27 nt, Artificial Sequence
  Description of Artificial Sequence: Synthetic oligonucleotide
ccaggcuuccagagcaugcagccuccu

SEQ ID NO: 66428 - RNA, 27 nt, Artificial Sequence
  Description of Artificial Sequence: Synthetic oligonucleotide
cucucuuuuguuuucuguucagagaaa

SEQ ID NO: 66429 - RNA, 27 nt, Artificial Sequence
  Description of Artificial Sequence: Synthetic oligonucleotide
cggcauaacugauuacagccaaguuca

SEQ ID NO: 66430 - RNA, 27 nt, Artificial Sequence
  Description of Artificial Sequence: Synthetic oligonucleotide
uggacuucuuuuaauuuuggcuucuuc

SEQ ID NO: 66431 - RNA, 27 nt, Artificial Sequence
  Description of Artificial Sequence: Synthetic oligonucleotide
uaaccucaccuggacuucuuuuaauuu

SEQ ID NO: 66432 - RNA, 27 nt, Artificial Sequence
  Description of Artificial Sequence: Synthetic oligonucleotide
guccucuucccgauaauccggauucag

SEQ ID NO: 66433 - RNA, 27 nt, Artificial Sequence
  Description of Artificial Sequence: Synthetic oligonucleotide
acaauacuugcuuugaugucacauuaa

SEQ ID NO: 66434 - RNA, 27 nt, Artificial Sequence
  Description of Artificial Sequence: Synthetic oligonucleotide
gagugcuacaauacuugcuuugauguc

SEQ ID NO: 66435 - RNA, 27 nt, Artificial Sequence
  Description of Artificial Sequence: Synthetic oligonucleotide
auuugugguuuuguuuucucucucucu

SEQ ID NO: 66436 - RNA, 27 nt, Artificial Sequence
  Description of Artificial Sequence: Synthetic oligonucleotide
uguaugggcuuaaauacuacagcgagg

SEQ ID NO: 66437 - RNA, 27 nt, Artificial Sequence
  Description of Artificial Sequence: Synthetic oligonucleotide
cuguaugggcuuaaauacuacagcgag

SEQ ID NO: 66438 - RNA, 27 nt, Artificial Sequence
  Description of Artificial Sequence: Synthetic oligonucleotide
ggaagguuucuguaugggcuuaaauac

SEQ ID NO: 66439 - RNA, 27 nt, Artificial Sequence
  Description of Artificial Sequence: Synthetic oligonucleotide
guagguauaccauguuuauuuuaauac

SEQ ID NO: 66440 - RNA, 27 nt, Artificial Sequence
  Description of Artificial Sequence: Synthetic oligonucleotide
uccgaaaacuggccgaucagaacagcc

SEQ ID NO: 66441 - RNA, 27 nt, Artificial Sequence
  Description of Artificial Sequence: Synthetic oligonucleotide
cccuguuccaaaguucaaauuauuugu

SEQ ID NO: 66442 - RNA, 27 nt, Artificial Sequence
  Description of Artificial Sequence: Synthetic oligonucleotide
acuggaaaguuaaauuaaggucgcaau

SEQ ID NO: 66443 - RNA, 27 nt, Artificial Sequence
  Description of Artificial Sequence: Synthetic oligonucleotide
caaaaccaaacuuuagcuuucucagcc

SEQ ID NO: 66444 - RNA, 27 nt, Artificial Sequence
  Description of Artificial Sequence: Synthetic oligonucleotide
uacagugggaaguagcaucuuuacuuu

SEQ ID NO: 66445 - RNA, 27 nt, Artificial Sequence
  Description of Artificial Sequence: Synthetic oligonucleotide
ucauaugguaucagcaauuaagcagua

SEQ ID NO: 66446 - RNA, 27 nt, Artificial Sequence
  Description of Artificial Sequence: Synthetic oligonucleotide
cagcccauguuucauucauaugguauc

SEQ ID NO: 66447 - RNA, 27 nt, Artificial Sequence
  Description of Artificial Sequence: Synthetic oligonucleotide
uaugaaaaaguuggauaagaaaguugg

SEQ ID NO: 66448 - RNA, 27 nt, Artificial Sequence
  Description of Artificial Sequence: Synthetic oligonucleotide
uccggccucaugaugucaugcaaggcu

SEQ ID NO: 66449 - RNA, 27 nt, Artificial Sequence
  Description of Artificial Sequence: Synthetic oligonucleotide
acaaaugcagucauauacaaauucagg

SEQ ID NO: 66450 - RNA, 27 nt, Artificial Sequence
  Description of Artificial Sequence: Synthetic oligonucleotide
gguaguaaacauucuacuaggauucuu

SEQ ID NO: 66451 - RNA, 27 nt, Artificial Sequence
  Description of Artificial Sequence: Synthetic oligonucleotide
uuucaucaaaaaauucuucccuuucug

SEQ ID NO: 66452 - RNA, 27 nt, Artificial Sequence
  Description of Artificial Sequence: Synthetic oligonucleotide
aaauucacacacuggcaugccgauagc

SEQ ID NO: 66453 - RNA, 27 nt, Artificial Sequence
  Description of Artificial Sequence: Synthetic oligonucleotide
acauacauugcucuacuaugaggugaa

SEQ ID NO: 66454 - RNA, 27 nt, Artificial Sequence
  Description of Artificial Sequence: Synthetic oligonucleotide
uauauaugugcuuuggcaauucuggug

SEQ ID NO: 66455 - RNA, 27 nt, Artificial Sequence
  Description of Artificial Sequence: Synthetic oligonucleotide
ggagaaacuauuacccagaucaccacu

SEQ ID NO: 66456 - RNA, 27 nt, Artificial Sequence
  Description of Artificial Sequence: Synthetic oligonucleotide
auuuggagaaacuauuacccagaucac

SEQ ID NO: 66457 - RNA, 27 nt, Artificial Sequence
  Description of Artificial Sequence: Synthetic oligonucleotide
uuucuaggaaguauucaucacauccac

SEQ ID NO: 66458 - RNA, 27 nt, Artificial Sequence
  Description of Artificial Sequence: Synthetic oligonucleotide
cauauaugguguagcuguggaaaugcg

SEQ ID NO: 66459 - RNA, 27 nt, Artificial Sequence
  Description of Artificial Sequence: Synthetic oligonucleotide
cuccauucauauaugguguagcugugg

SEQ ID NO: 66460 - RNA, 27 nt, Artificial Sequence
  Description of Artificial Sequence: Synthetic oligonucleotide
aucuucuucucguguaagaacugcagc

SEQ ID NO: 66461 - RNA, 27 nt, Artificial Sequence
  Description of Artificial Sequence: Synthetic oligonucleotide
ucccuguaaaugaucuucuucucgugu

SEQ ID NO: 66462 - RNA, 27 nt, Artificial Sequence
  Description of Artificial Sequence: Synthetic oligonucleotide
gucccuguaaaugaucuucuucucgug

SEQ ID NO: 66463 - RNA, 27 nt, Artificial Sequence
  Description of Artificial Sequence: Synthetic oligonucleotide
ucaggucccuguaaaugaucuucuucu

SEQ ID NO: 66464 - RNA, 27 nt, Artificial Sequence
  Description of Artificial Sequence: Synthetic oligonucleotide
gaugcagucaaacaccucuuccucugu

SEQ ID NO: 66465 - RNA, 27 nt, Artificial Sequence
  Description of Artificial Sequence: Synthetic oligonucleotide
cgaugcagucaaacaccucuuccucug

SEQ ID NO: 66466 - RNA, 27 nt, Artificial Sequence
  Description of Artificial Sequence: Synthetic oligonucleotide
cccugugaacucgcccucaaaguagcg

SEQ ID NO: 66467 - RNA, 27 nt, Artificial Sequence
  Description of Artificial Sequence: Synthetic oligonucleotide
ggacagaggugccaggagaugcccuca

SEQ ID NO: 66468 - RNA, 27 nt, Artificial Sequence
  Description of Artificial Sequence: Synthetic oligonucleotide
uuaaaaagacaaaccauaucacuccuu

SEQ ID NO: 66469 - RNA, 27 nt, Artificial Sequence
  Description of Artificial Sequence: Synthetic oligonucleotide
cuuaaaaagacaaaccauaucacuccu

SEQ ID NO: 66470 - RNA, 27 nt, Artificial Sequence
  Description of Artificial Sequence: Synthetic oligonucleotide
gacaaccuuuaggaucuuuacugcaac

SEQ ID NO: 66471 - RNA, 27 nt, Artificial Sequence
  Description of Artificial Sequence: Synthetic oligonucleotide
gucgacaaccuuuaggaucuuuacugc

SEQ ID NO: 66472 - RNA, 27 nt, Artificial Sequence
  Description of Artificial Sequence: Synthetic oligonucleotide
acaauugccagguuguccuuugucaug

SEQ ID NO: 66473 - RNA, 27 nt, Artificial Sequence
  Description of Artificial Sequence: Synthetic oligonucleotide
ccucgcaccacugggucacaauugcca

SEQ ID NO: 66474 - RNA, 27 nt, Artificial Sequence
  Description of Artificial Sequence: Synthetic oligonucleotide
auuucaugucucuauggaugauguucu

SEQ ID NO: 66475 - RNA, 27 nt, Artificial Sequence
  Description of Artificial Sequence: Synthetic oligonucleotide
uggagaaauauauuguuggauuucaug

SEQ ID NO: 66476 - RNA, 27 nt, Artificial Sequence
  Description of Artificial Sequence: Synthetic oligonucleotide
agccuucauggagaaauauauuguugg

SEQ ID NO: 66477 - RNA, 27 nt, Artificial Sequence
  Description of Artificial Sequence: Synthetic oligonucleotide
accacuccagcgugacuuuacuguugc

SEQ ID NO: 66478 - RNA, 27 nt, Artificial Sequence
  Description of Artificial Sequence: Synthetic oligonucleotide
ccucucuuccuuuacuuucuucacaca

SEQ ID NO: 66479 - RNA, 27 nt, Artificial Sequence
  Description of Artificial Sequence: Synthetic oligonucleotide
gcccgaugcaaggauggcucggaagcg

SEQ ID NO: 66480 - RNA, 27 nt, Artificial Sequence
  Description of Artificial Sequence: Synthetic oligonucleotide
cacaguaggauauucaaccuccauuuc

SEQ ID NO: 66481 - RNA, 27 nt, Artificial Sequence
  Description of Artificial Sequence: Synthetic oligonucleotide
uuacacaguaggauauucaaccuccau

SEQ ID NO: 66482 - RNA, 27 nt, Artificial Sequence
  Description of Artificial Sequence: Synthetic oligonucleotide
uacacuacaagggaaaacucaaaaucu

SEQ ID NO: 66483 - RNA, 27 nt, Artificial Sequence
  Description of Artificial Sequence: Synthetic oligonucleotide
caaucaacaaagaacaaacaggauaaa

SEQ ID NO: 66484 - RNA, 27 nt, Artificial Sequence
  Description of Artificial Sequence: Synthetic oligonucleotide
uuucaaucaacaaagaacaaacaggau

SEQ ID NO: 66485 - RNA, 27 nt, Artificial Sequence
  Description of Artificial Sequence: Synthetic oligonucleotide
auggaagaaaaagaaggcuguagagaa

SEQ ID NO: 66486 - RNA, 27 nt, Artificial Sequence
  Description of Artificial Sequence: Synthetic oligonucleotide
uagaaggaagauuagcuauggaagaaa

SEQ ID NO: 66487 - RNA, 27 nt, Artificial Sequence
  Description of Artificial Sequence: Synthetic oligonucleotide
augaagcauucaacaggaagauuauuu

SEQ ID NO: 66488 - RNA, 27 nt, Artificial Sequence
  Description of Artificial Sequence: Synthetic oligonucleotide
caugaagcauucaacaggaagauuauu

SEQ ID NO: 66489 - RNA, 27 nt, Artificial Sequence
  Description of Artificial Sequence: Synthetic oligonucleotide
ucaaaguagaauucaagucaugaagca

SEQ ID NO: 66490 - RNA, 27 nt, Artificial Sequence
  Description of Artificial Sequence: Synthetic oligonucleotide
gucuguaguugcuucucucccucuuag

SEQ ID NO: 66491 - RNA, 27 nt, Artificial Sequence
  Description of Artificial Sequence: Synthetic oligonucleotide
guugaccuuggucugguaggagacggc

SEQ ID NO: 66492 - RNA, 27 nt, Artificial Sequence
  Description of Artificial Sequence: Synthetic oligonucleotide
gucgagauagucgggccgauugaucuc

SEQ ID NO: 66493 - RNA, 27 nt, Artificial Sequence
  Description of Artificial Sequence: Synthetic oligonucleotide
guuugggaagguuggauguucguccuc

SEQ ID NO: 66494 - RNA, 27 nt, Artificial Sequence
  Description of Artificial Sequence: Synthetic oligonucleotide
aguucuaagcuuggguuccgacccuaa

SEQ ID NO: 66495 - RNA, 27 nt, Artificial Sequence
  Description of Artificial Sequence: Synthetic oligonucleotide
uuaaaguucuaagcuuggguuccgacc

SEQ ID NO: 66496 - RNA, 27 nt, Artificial Sequence
  Description of Artificial Sequence: Synthetic oligonucleotide
guugcuuaaaguucuaagcuuggguuc

SEQ ID NO: 66497 - RNA, 27 nt, Artificial Sequence
  Description of Artificial Sequence: Synthetic oligonucleotide
gugguggucuuguugcuuaaaguucua

SEQ ID NO: 66498 - RNA, 27 nt, Artificial Sequence
  Description of Artificial Sequence: Synthetic oligonucleotide
acuuuauuucucgccacugaauaguag

SEQ ID NO: 66499 - RNA, 27 nt, Artificial Sequence
  Description of Artificial Sequence: Synthetic oligonucleotide
aacuuuauuucucgccacugaauagua

SEQ ID NO: 66500 - RNA, 27 nt, Artificial Sequence
  Description of Artificial Sequence: Synthetic oligonucleotide
ggaucauuuccuguuaucuguguuugu

SEQ ID NO: 66501 - RNA, 27 nt, Artificial Sequence
  Description of Artificial Sequence: Synthetic oligonucleotide
guuucauuucuucucuuuucuuaaggc

SEQ ID NO: 66502 - RNA, 27 nt, Artificial Sequence
  Description of Artificial Sequence: Synthetic oligonucleotide
ggaggauggaaacacacuccuucaguu

SEQ ID NO: 66503 - RNA, 27 nt, Artificial Sequence
  Description of Artificial Sequence: Synthetic oligonucleotide
ucaaagauuuucagucccgcggugaca

SEQ ID NO: 66504 - RNA, 27 nt, Artificial Sequence
  Description of Artificial Sequence: Synthetic oligonucleotide
ccugaacggcacgcuuauuucugcugu

SEQ ID NO: 66505 - RNA, 27 nt, Artificial Sequence
  Description of Artificial Sequence: Synthetic oligonucleotide
cuucuggacccugaacggcacgcuuau

SEQ ID NO: 66506 - RNA, 27 nt, Artificial Sequence
  Description of Artificial Sequence: Synthetic oligonucleotide
caagcagucuugagugacuguuucuuc

SEQ ID NO: 66507 - RNA, 27 nt, Artificial Sequence
  Description of Artificial Sequence: Synthetic oligonucleotide
ccaaagacauggaccuucuuccucuga

SEQ ID NO: 66508 - RNA, 27 nt, Artificial Sequence
  Description of Artificial Sequence: Synthetic oligonucleotide
guguuucaggcauauuuugaauacauc

SEQ ID NO: 66509 - RNA, 27 nt, Artificial Sequence
  Description of Artificial Sequence: Synthetic oligonucleotide
gagguacagagaaagggaggaaaauag

SEQ ID NO: 66510 - RNA, 27 nt, Artificial Sequence
  Description of Artificial Sequence: Synthetic oligonucleotide
ucuugucuugcucuaucuuucuuuggu

SEQ ID NO: 66511 - RNA, 27 nt, Artificial Sequence
  Description of Artificial Sequence: Synthetic oligonucleotide
uuucuugucuugcucuaucuuucuuug

SEQ ID NO: 66512 - RNA, 27 nt, Artificial Sequence
  Description of Artificial Sequence: Synthetic oligonucleotide
ggaucuuguacaaacaaaugcuuucuc

SEQ ID NO: 66513 - RNA, 27 nt, Artificial Sequence
  Description of Artificial Sequence: Synthetic oligonucleotide
ucugcaaguacguucguuuaacucaag

SEQ ID NO: 66514 - RNA, 27 nt, Artificial Sequence
  Description of Artificial Sequence: Synthetic oligonucleotide
ucuguaucgaucguucuguaucagucu

SEQ ID NO: 66515 - RNA, 27 nt, Artificial Sequence
  Description of Artificial Sequence: Synthetic oligonucleotide
auuuauuuuuauauauauauaauauau

SEQ ID NO: 66516 - RNA, 27 nt, Artificial Sequence
  Description of Artificial Sequence: Synthetic oligonucleotide
auauuuauuuuuauauauauauaauau

SEQ ID NO: 66517 - RNA, 27 nt, Artificial Sequence
  Description of Artificial Sequence: Synthetic oligonucleotide
cacagcagucaaauacauccagugaag

SEQ ID NO: 66518 - RNA, 27 nt, Artificial Sequence
  Description of Artificial Sequence: Synthetic oligonucleotide
gucucucaucuccuccucuucccuguc

SEQ ID NO: 66519 - RNA, 27 nt, Artificial Sequence
  Description of Artificial Sequence: Synthetic oligonucleotide
ccaagugggacaaaaaaaagaucaugc

SEQ ID NO: 66520 - RNA, 14 nt, Artificial Sequence
  Description of Artificial Sequence: Synthetic oligonucleotide
guauuuugaugagg

SEQ ID NO: 66521 - RNA, 12 nt, Artificial Sequence
  Description of Artificial Sequence: Synthetic oligonucleotide
ggcccagaugau

SEQ ID NO: 66522 - RNA, 14 nt, Artificial Sequence
  Description of Artificial Sequence: Synthetic oligonucleotide
gggaagaaaacuau

SEQ ID NO: 66523 - RNA, 15 nt, Artificial Sequence
  Description of Artificial Sequence: Synthetic oligonucleotide
guuuuaauuuauuuc

SEQ ID NO: 66524 - RNA, 12 nt, Artificial Sequence
  Description of Artificial Sequence: Synthetic oligonucleotide
acguagggaaau

SEQ ID NO: 66525 - RNA, 12 nt, Artificial Sequence
  Description of Artificial Sequence: Synthetic oligonucleotide
ccaggguuuacc

SEQ ID NO: 66526 - RNA, 11 nt, Artificial Sequence
  Description of Artificial Sequence: Synthetic oligonucleotide
agcaagguuua

SEQ ID NO: 66527 - RNA, 12 nt, Artificial Sequence
  Description of Artificial Sequence: Synthetic oligonucleotide
uguauuauguug

SEQ ID NO: 66528 - RNA, 15 nt, Artificial Sequence
  Description of Artificial Sequence: Synthetic oligonucleotide
uuuuaaucuuuguga

SEQ ID NO: 66529 - RNA, 14 nt, Artificial Sequence
  Description of Artificial Sequence: Synthetic oligonucleotide
uuaaucuuugugac

SEQ ID NO: 66530 - RNA, 13 nt, Artificial Sequence
  Description of Artificial Sequence: Synthetic oligonucleotide
gcugcuuaugucu

SEQ ID NO: 66531 - RNA, 14 nt, Artificial Sequence
  Description of Artificial Sequence: Synthetic oligonucleotide
aaguguuucagaag

SEQ ID NO: 66532 - RNA, 13 nt, Artificial Sequence
  Description of Artificial Sequence: Synthetic oligonucleotide
gaccaucaauaag

SEQ ID NO: 66533 - RNA, 13 nt, Artificial Sequence
  Description of Artificial Sequence: Synthetic oligonucleotide
ccaucaauaagga

SEQ ID NO: 66534 - RNA, 14 nt, Artificial Sequence
  Description of Artificial Sequence: Synthetic oligonucleotide
ucaauaaggaagaa

SEQ ID NO: 66535 - RNA, 14 nt, Artificial Sequence
  Description of Artificial Sequence: Synthetic oligonucleotide
aauaaggaagaagc

SEQ ID NO: 66536 - RNA, 13 nt, Artificial Sequence
  Description of Artificial Sequence: Synthetic oligonucleotide
aggaagaagcccu

SEQ ID NO: 66537 - RNA, 13 nt, Artificial Sequence
  Description of Artificial Sequence: Synthetic oligonucleotide
gcauaacuaaagg

SEQ ID NO: 66538 - RNA, 14 nt, Artificial Sequence
  Description of Artificial Sequence: Synthetic oligonucleotide
cauaacuaaaggug

SEQ ID NO: 66539 - RNA, 12 nt, Artificial Sequence
  Description of Artificial Sequence: Synthetic oligonucleotide
cuacaucacgcc

SEQ ID NO: 66540 - RNA, 12 nt, Artificial Sequence
  Description of Artificial Sequence: Synthetic oligonucleotide
acuggauuuaag

SEQ ID NO: 66541 - RNA, 12 nt, Artificial Sequence
  Description of Artificial Sequence: Synthetic oligonucleotide
cuggauuuaagc

SEQ ID NO: 66542 - RNA, 13 nt, Artificial Sequence
  Description of Artificial Sequence: Synthetic oligonucleotide
gauuuaagcagag

SEQ ID NO: 66543 - RNA, 13 nt, Artificial Sequence
  Description of Artificial Sequence: Synthetic oligonucleotide
auuuaagcagagu

SEQ ID NO: 66544 - RNA, 13 nt, Artificial Sequence
  Description of Artificial Sequence: Synthetic oligonucleotide
uuaagcagaguuc

SEQ ID NO: 66545 - RNA, 13 nt, Artificial Sequence
  Description of Artificial Sequence: Synthetic oligonucleotide
uaagcagaguuca

SEQ ID NO: 66546 - RNA, 14 nt, Artificial Sequence
  Description of Artificial Sequence: Synthetic oligonucleotide
agcagaguucaaaa

SEQ ID NO: 66547 - RNA, 12 nt, Artificial Sequence
  Description of Artificial Sequence: Synthetic oligonucleotide
cucagggucuga

SEQ ID NO: 66548 - RNA, 13 nt, Artificial Sequence
  Description of Artificial Sequence: Synthetic oligonucleotide
caagcaacuacau

SEQ ID NO: 66549 - RNA, 12 nt, Artificial Sequence
  Description of Artificial Sequence: Synthetic oligonucleotide
aucaauggcagc

SEQ ID NO: 66550 - RNA, 11 nt, Artificial Sequence
  Description of Artificial Sequence: Synthetic oligonucleotide
uuccagcccac

SEQ ID NO: 66551 - RNA, 12 nt, Artificial Sequence
  Description of Artificial Sequence: Synthetic oligonucleotide
cagcugagaaug

SEQ ID NO: 66552 - RNA, 13 nt, Artificial Sequence
  Description of Artificial Sequence: Synthetic oligonucleotide
aacguaucuccua

SEQ ID NO: 66553 - RNA, 14 nt, Artificial Sequence
  Description of Artificial Sequence: Synthetic oligonucleotide
ccuaaaauaauuuc

SEQ ID NO: 66554 - RNA, 13 nt, Artificial Sequence
  Description of Artificial Sequence: Synthetic oligonucleotide
uggaagauucagc

SEQ ID NO: 66555 - RNA, 12 nt, Artificial Sequence
  Description of Artificial Sequence: Synthetic oligonucleotide
uuaaacucuccu

SEQ ID NO: 66556 - RNA, 12 nt, Artificial Sequence
  Description of Artificial Sequence: Synthetic oligonucleotide
cagccuacaguu

SEQ ID NO: 66557 - RNA, 13 nt, Artificial Sequence
  Description of Artificial Sequence: Synthetic oligonucleotide
guuauguucaguc

SEQ ID NO: 66558 - RNA, 13 nt, Artificial Sequence
  Description of Artificial Sequence: Synthetic oligonucleotide
cacauacaaaaug

SEQ ID NO: 66559 - RNA, 9 nt, Artificial Sequence
  Description of Artificial Sequence: Synthetic oligonucleotide
uccuuuugc

SEQ ID NO: 66560 - RNA, 12 nt, Artificial Sequence
  Description of Artificial Sequence: Synthetic oligonucleotide
ugaccugugaag

SEQ ID NO: 66561 - RNA, 12 nt, Artificial Sequence
  Description of Artificial Sequence: Synthetic oligonucleotide
cuaucucacaca

SEQ ID NO: 66562 - RNA, 13 nt, Artificial Sequence
  Description of Artificial Sequence: Synthetic oligonucleotide
uguccucaauugu

SEQ ID NO: 66563 - RNA, 12 nt, Artificial Sequence
  Description of Artificial Sequence: Synthetic oligonucleotide
aaaccguagcug

SEQ ID NO: 66564 - RNA, 12 nt, Artificial Sequence
  Description of Artificial Sequence: Synthetic oligonucleotide
uagcuggcaagc

SEQ ID NO: 66565 - RNA, 14 nt, Artificial Sequence
  Description of Artificial Sequence: Synthetic oligonucleotide
uuguaugguuaaaa

SEQ ID NO: 66566 - RNA, 14 nt, Artificial Sequence
  Description of Artificial Sequence: Synthetic oligonucleotide
ugguuaaaagaugg

SEQ ID NO: 66567 - RNA, 13 nt, Artificial Sequence
  Description of Artificial Sequence: Synthetic oligonucleotide
cagggaauuauac

SEQ ID NO: 66568 - RNA, 12 nt, Artificial Sequence
  Description of Artificial Sequence: Synthetic oligonucleotide
acaaucuugcug

SEQ ID NO: 66569 - RNA, 13 nt, Artificial Sequence
  Description of Artificial Sequence: Synthetic oligonucleotide
ccaauaaugaaga

SEQ ID NO: 66570 - RNA, 13 nt, Artificial Sequence
  Description of Artificial Sequence: Synthetic oligonucleotide
acuuuggauguuc

SEQ ID NO: 66571 - RNA, 12 nt, Artificial Sequence
  Description of Artificial Sequence: Synthetic oligonucleotide
aaugcuuccacu

SEQ ID NO: 66572 - RNA, 11 nt, Artificial Sequence
  Description of Artificial Sequence: Synthetic oligonucleotide
gagaaaguuug

SEQ ID NO: 66573 - RNA, 11 nt, Artificial Sequence
  Description of Artificial Sequence: Synthetic oligonucleotide
aaagaacuacu

SEQ ID NO: 66574 - RNA, 12 nt, Artificial Sequence
  Description of Artificial Sequence: Synthetic oligonucleotide
uuagaaauacgg

SEQ ID NO: 66575 - RNA, 12 nt, Artificial Sequence
  Description of Artificial Sequence: Synthetic oligonucleotide
aacauggguaca

SEQ ID NO: 66576 - RNA, 14 nt, Artificial Sequence
  Description of Artificial Sequence: Synthetic oligonucleotide
aaagacacagaaga

SEQ ID NO: 66577 - RNA, 11 nt, Artificial Sequence
  Description of Artificial Sequence: Synthetic oligonucleotide
uaguagggagg

SEQ ID NO: 66578 - RNA, 12 nt, Artificial Sequence
  Description of Artificial Sequence: Synthetic oligonucleotide
gccuucugcagc

SEQ ID NO: 66579 - RNA, 10 nt, Artificial Sequence
  Description of Artificial Sequence: Synthetic oligonucleotide
ggucugguac

SEQ ID NO: 66580 - RNA, 12 nt, Artificial Sequence
  Description of Artificial Sequence: Synthetic oligonucleotide
cuaguccuuccg

SEQ ID NO: 66581 - RNA, 12 nt, Artificial Sequence
  Description of Artificial Sequence: Synthetic oligonucleotide
ccagugaauauu

SEQ ID NO: 66582 - RNA, 13 nt, Artificial Sequence
  Description of Artificial Sequence: Synthetic oligonucleotide
augaauucaaguu

SEQ ID NO: 66583 - RNA, 12 nt, Artificial Sequence
  Description of Artificial Sequence: Synthetic oligonucleotide
caggacacagau

SEQ ID NO: 66584 - RNA, 12 nt, Artificial Sequence
  Description of Artificial Sequence: Synthetic oligonucleotide
cucaaagcacag

SEQ ID NO: 66585 - RNA, 10 nt, Artificial Sequence
  Description of Artificial Sequence: Synthetic oligonucleotide
accacugcca

SEQ ID NO: 66586 - RNA, 13 nt, Artificial Sequence
  Description of Artificial Sequence: Synthetic oligonucleotide
gaaacuacuagug

SEQ ID NO: 66587 - RNA, 12 nt, Artificial Sequence
  Description of Artificial Sequence: Synthetic oligonucleotide
aagucggacagc

SEQ ID NO: 66588 - RNA, 13 nt, Artificial Sequence
  Description of Artificial Sequence: Synthetic oligonucleotide
gaaagcgaaaaau

SEQ ID NO: 66589 - RNA, 13 nt, Artificial Sequence
  Description of Artificial Sequence: Synthetic oligonucleotide
cccucugauuuag

SEQ ID NO: 66590 - RNA, 12 nt, Artificial Sequence
  Description of Artificial Sequence: Synthetic oligonucleotide
ugagcuauuuaa

SEQ ID NO: 66591 - RNA, 13 nt, Artificial Sequence
  Description of Artificial Sequence: Synthetic oligonucleotide
aaaaggugaaaaa

SEQ ID NO: 66592 - RNA, 14 nt, Artificial Sequence
  Description of Artificial Sequence: Synthetic oligonucleotide
gaaaaagcacuauu

SEQ ID NO: 66593 - RNA, 12 nt, Artificial Sequence
  Description of Artificial Sequence: Synthetic oligonucleotide
ggcugaaaagaa

SEQ ID NO: 66594 - RNA, 12 nt, Artificial Sequence
  Description of Artificial Sequence: Synthetic oligonucleotide
uaaacccuuaua

SEQ ID NO: 66595 - RNA, 13 nt, Artificial Sequence
  Description of Artificial Sequence: Synthetic oligonucleotide
cauacuauuagcc

SEQ ID NO: 66596 - RNA, 12 nt, Artificial Sequence
  Description of Artificial Sequence: Synthetic oligonucleotide
gacagaagcauu

SEQ ID NO: 66597 - RNA, 14 nt, Artificial Sequence
  Description of Artificial Sequence: Synthetic oligonucleotide
agagcaaauaagau

SEQ ID NO: 66598 - RNA, 14 nt, Artificial Sequence
  Description of Artificial Sequence: Synthetic oligonucleotide
ccaacauuuuucuc

SEQ ID NO: 66599 - RNA, 15 nt, Artificial Sequence
  Description of Artificial Sequence: Synthetic oligonucleotide
uuaaguaugagaaaa

SEQ ID NO: 66600 - RNA, 14 nt, Artificial Sequence
  Description of Artificial Sequence: Synthetic oligonucleotide
caggaauaaagaug

SEQ ID NO: 66601 - RNA, 13 nt, Artificial Sequence
  Description of Artificial Sequence: Synthetic oligonucleotide
aauuugaaugacc

SEQ ID NO: 66602 - RNA, 14 nt, Artificial Sequence
  Description of Artificial Sequence: Synthetic oligonucleotide
auguauaaagauag

SEQ ID NO: 66603 - RNA, 12 nt, Artificial Sequence
  Description of Artificial Sequence: Synthetic oligonucleotide
ggcuguaacuau

SEQ ID NO: 66604 - RNA, 11 nt, Artificial Sequence
  Description of Artificial Sequence: Synthetic oligonucleotide
ucugugaagug

SEQ ID NO: 66605 - RNA, 14 nt, Artificial Sequence
  Description of Artificial Sequence: Synthetic oligonucleotide
ccuuuaaggaaaug

SEQ ID NO: 66606 - RNA, 13 nt, Artificial Sequence
  Description of Artificial Sequence: Synthetic oligonucleotide
aaggauacaaaaa

SEQ ID NO: 66607 - RNA, 12 nt, Artificial Sequence
  Description of Artificial Sequence: Synthetic oligonucleotide
agaugcaauuug

SEQ ID NO: 66608 - RNA, 12 nt, Artificial Sequence
  Description of Artificial Sequence: Synthetic oligonucleotide
guucaaaacgaa

SEQ ID NO: 66609 - RNA, 11 nt, Artificial Sequence
  Description of Artificial Sequence: Synthetic oligonucleotide
gugaaaccuca

SEQ ID NO: 66610 - RNA, 13 nt, Artificial Sequence
  Description of Artificial Sequence: Synthetic oligonucleotide
acgaaagagaagc

SEQ ID NO: 66611 - RNA, 12 nt, Artificial Sequence
  Description of Artificial Sequence: Synthetic oligonucleotide
cuccacaagcgc

SEQ ID NO: 66612 - RNA, 14 nt, Artificial Sequence
  Description of Artificial Sequence: Synthetic oligonucleotide
gagaagauuccaaa

SEQ ID NO: 66613 - RNA, 13 nt, Artificial Sequence
  Description of Artificial Sequence: Synthetic oligonucleotide
aaucuggauucaa

SEQ ID NO: 66614 - RNA, 13 nt, Artificial Sequence
  Description of Artificial Sequence: Synthetic oligonucleotide
agaacagauuuga

SEQ ID NO: 66615 - RNA, 11 nt, Artificial Sequence
  Description of Artificial Sequence: Synthetic oligonucleotide
ccagagcugug

SEQ ID NO: 66616 - RNA, 12 nt, Artificial Sequence
  Description of Artificial Sequence: Synthetic oligonucleotide
ccucagauuguu

SEQ ID NO: 66617 - RNA, 12 nt, Artificial Sequence
  Description of Artificial Sequence: Synthetic oligonucleotide
cuauuuuaauua

SEQ ID NO: 66618 - RNA, 13 nt, Artificial Sequence
  Description of Artificial Sequence: Synthetic oligonucleotide
uuuaauuuauuaa

SEQ ID NO: 66619 - RNA, 12 nt, Artificial Sequence
  Description of Artificial Sequence: Synthetic oligonucleotide
augcaguuugaa

SEQ ID NO: 66620 - RNA, 11 nt, Artificial Sequence
  Description of Artificial Sequence: Synthetic oligonucleotide
caugcugcugg

SEQ ID NO: 66621 - RNA, 13 nt, Artificial Sequence
  Description of Artificial Sequence: Synthetic oligonucleotide
agaugugcauuuc

SEQ ID NO: 66622 - RNA, 12 nt, Artificial Sequence
  Description of Artificial Sequence: Synthetic oligonucleotide
ucaaaaccugug

SEQ ID NO: 66623 - RNA, 11 nt, Artificial Sequence
  Description of Artificial Sequence: Synthetic oligonucleotide
gaaugugggua

SEQ ID NO: 66624 - RNA, 10 nt, Artificial Sequence
  Description of Artificial Sequence: Synthetic oligonucleotide
auguggguag

SEQ ID NO: 66625 - RNA, 13 nt, Artificial Sequence
  Description of Artificial Sequence: Synthetic oligonucleotide
ugaaaaugagcau

SEQ ID NO: 66626 - RNA, 13 nt, Artificial Sequence
  Description of Artificial Sequence: Synthetic oligonucleotide
uugcuuuucaugu

SEQ ID NO: 66627 - RNA, 12 nt, Artificial Sequence
  Description of Artificial Sequence: Synthetic oligonucleotide
uguauuucuaua

SEQ ID NO: 66628 - RNA, 13 nt, Artificial Sequence
  Description of Artificial Sequence: Synthetic oligonucleotide
uuugauuaauguu

SEQ ID NO: 66629 - RNA, 12 nt, Artificial Sequence
  Description of Artificial Sequence: Synthetic oligonucleotide
caacguguauag

SEQ ID NO: 66630 - RNA, 12 nt, Artificial Sequence
  Description of Artificial Sequence: Synthetic oligonucleotide
cauauccuuggc

SEQ ID NO: 66631 - RNA, 13 nt, Artificial Sequence
  Description of Artificial Sequence: Synthetic oligonucleotide
uacuaacaucugg

SEQ ID NO: 66632 - RNA, 11 nt, Artificial Sequence
  Description of Artificial Sequence: Synthetic oligonucleotide
cauaaguugug

SEQ ID NO: 66633 - RNA, 12 nt, Artificial Sequence
  Description of Artificial Sequence: Synthetic oligonucleotide
gcaucauuuugg

SEQ ID NO: 66634 - RNA, 10 nt, Artificial Sequence
  Description of Artificial Sequence: Synthetic oligonucleotide
gcucuucuua

SEQ ID NO: 66635 - RNA, 10 nt, Artificial Sequence
  Description of Artificial Sequence: Synthetic oligonucleotide
agauuagguc

SEQ ID NO: 66636 - RNA, 12 nt, Artificial Sequence
  Description of Artificial Sequence: Synthetic oligonucleotide
auggaauugaaa

SEQ ID NO: 66637 - RNA, 13 nt, Artificial Sequence
  Description of Artificial Sequence: Synthetic oligonucleotide
cacacucauuccu

SEQ ID NO: 66638 - RNA, 12 nt, Artificial Sequence
  Description of Artificial Sequence: Synthetic oligonucleotide
uguagagguaac

SEQ ID NO: 66639 - RNA, 11 nt, Artificial Sequence
  Description of Artificial Sequence: Synthetic oligonucleotide
caaccacaugc

SEQ ID NO: 66640 - RNA, 12 nt, Artificial Sequence
  Description of Artificial Sequence: Synthetic oligonucleotide
ucggaaacaagu

SEQ ID NO: 66641 - RNA, 11 nt, Artificial Sequence
  Description of Artificial Sequence: Synthetic oligonucleotide
acucccaauaa

SEQ ID NO: 66642 - RNA, 13 nt, Artificial Sequence
  Description of Artificial Sequence: Synthetic oligonucleotide
aaugcuaagaaau

SEQ ID NO: 66643 - RNA, 11 nt, Artificial Sequence
  Description of Artificial Sequence: Synthetic oligonucleotide
gucuuucucua

SEQ ID NO: 66644 - RNA, 11 nt, Artificial Sequence
  Description of Artificial Sequence: Synthetic oligonucleotide
ugaauuucagg

SEQ ID NO: 66645 - RNA, 13 nt, Artificial Sequence
  Description of Artificial Sequence: Synthetic oligonucleotide
cgauucccucuca

SEQ ID NO: 66646 - RNA, 11 nt, Artificial Sequence
  Description of Artificial Sequence: Synthetic oligonucleotide
aggaaagugaa

SEQ ID NO: 66647 - RNA, 12 nt, Artificial Sequence
  Description of Artificial Sequence: Synthetic oligonucleotide
gaggcugcaugc

SEQ ID NO: 66648 - RNA, 11 nt, Artificial Sequence
  Description of Artificial Sequence: Synthetic oligonucleotide
ucucugaacag

SEQ ID NO: 66649 - RNA, 12 nt, Artificial Sequence
  Description of Artificial Sequence: Synthetic oligonucleotide
aacuuggcugua

SEQ ID NO: 66650 - RNA, 12 nt, Artificial Sequence
  Description of Artificial Sequence: Synthetic oligonucleotide
agaagccaaaau

SEQ ID NO: 66651 - RNA, 14 nt, Artificial Sequence
  Description of Artificial Sequence: Synthetic oligonucleotide
auuaaaagaagucc

SEQ ID NO: 66652 - RNA, 14 nt, Artificial Sequence
  Description of Artificial Sequence: Synthetic oligonucleotide
gaauccggauuauc

SEQ ID NO: 66653 - RNA, 12 nt, Artificial Sequence
  Description of Artificial Sequence: Synthetic oligonucleotide
aaugugacauca

SEQ ID NO: 66654 - RNA, 13 nt, Artificial Sequence
  Description of Artificial Sequence: Synthetic oligonucleotide
caucaaagcaagu

SEQ ID NO: 66655 - RNA, 11 nt, Artificial Sequence
  Description of Artificial Sequence: Synthetic oligonucleotide
agagagagaaa

SEQ ID NO: 66656 - RNA, 13 nt, Artificial Sequence
  Description of Artificial Sequence: Synthetic oligonucleotide
ucgcuguaguauu

SEQ ID NO: 66657 - RNA, 14 nt, Artificial Sequence
  Description of Artificial Sequence: Synthetic oligonucleotide
cgcuguaguauuua

SEQ ID NO: 66658 - RNA, 13 nt, Artificial Sequence
  Description of Artificial Sequence: Synthetic oligonucleotide
auuuaagcccaua

SEQ ID NO: 66659 - RNA, 15 nt, Artificial Sequence
  Description of Artificial Sequence: Synthetic oligonucleotide
auuaaaauaaacaug

SEQ ID NO: 66660 - RNA, 12 nt, Artificial Sequence
  Description of Artificial Sequence: Synthetic oligonucleotide
cuguucugaucg

SEQ ID NO: 66661 - RNA, 16 nt, Artificial Sequence
  Description of Artificial Sequence: Synthetic oligonucleotide
aaauaauuugaacuuu

SEQ ID NO: 66662 - RNA, 12 nt, Artificial Sequence
  Description of Artificial Sequence: Synthetic oligonucleotide
ugcgaccuuaau

SEQ ID NO: 66663 - RNA, 11 nt, Artificial Sequence
  Description of Artificial Sequence: Synthetic oligonucleotide
cugagaaagcu

SEQ ID NO: 66664 - RNA, 13 nt, Artificial Sequence
  Description of Artificial Sequence: Synthetic oligonucleotide
aguaaagaugcua

SEQ ID NO: 66665 - RNA, 12 nt, Artificial Sequence
  Description of Artificial Sequence: Synthetic oligonucleotide
cugcuuaauugc

SEQ ID NO: 66666 - RNA, 14 nt, Artificial Sequence
  Description of Artificial Sequence: Synthetic oligonucleotide
uaccauaugaauga

SEQ ID NO: 66667 - RNA, 12 nt, Artificial Sequence
  Description of Artificial Sequence: Synthetic oligonucleotide
aacuuucuuauc

SEQ ID NO: 66668 - RNA, 13 nt, Artificial Sequence
  Description of Artificial Sequence: Synthetic oligonucleotide
ccuugcaugacau

SEQ ID NO: 66669 - RNA, 14 nt, Artificial Sequence
  Description of Artificial Sequence: Synthetic oligonucleotide
ugaauuuguauaug

SEQ ID NO: 66670 - RNA, 12 nt, Artificial Sequence
  Description of Artificial Sequence: Synthetic oligonucleotide
gaauccuaguag

SEQ ID NO: 66671 - RNA, 10 nt, Artificial Sequence
  Description of Artificial Sequence: Synthetic oligonucleotide
gaaagggaag

SEQ ID NO: 66672 - RNA, 11 nt, Artificial Sequence
  Description of Artificial Sequence: Synthetic oligonucleotide
uaucggcaugc

SEQ ID NO: 66673 - RNA, 12 nt, Artificial Sequence
  Description of Artificial Sequence: Synthetic oligonucleotide
caccucauagua

SEQ ID NO: 66674 - RNA, 11 nt, Artificial Sequence
  Description of Artificial Sequence: Synthetic oligonucleotide
ccagaauugcc

SEQ ID NO: 66675 - RNA, 11 nt, Artificial Sequence
  Description of Artificial Sequence: Synthetic oligonucleotide
uggugaucugg

SEQ ID NO: 66676 - RNA, 12 nt, Artificial Sequence
  Description of Artificial Sequence: Synthetic oligonucleotide
gaucuggguaau

SEQ ID NO: 66677 - RNA, 12 nt, Artificial Sequence
  Description of Artificial Sequence: Synthetic oligonucleotide
ggaugugaugaa

SEQ ID NO: 66678 - RNA, 12 nt, Artificial Sequence
  Description of Artificial Sequence: Synthetic oligonucleotide
cauuuccacagc

SEQ ID NO: 66679 - RNA, 11 nt, Artificial Sequence
  Description of Artificial Sequence: Synthetic oligonucleotide
acagcuacacc

SEQ ID NO: 66680 - RNA, 12 nt, Artificial Sequence
  Description of Artificial Sequence: Synthetic oligonucleotide
ugcaguucuuac

SEQ ID NO: 66681 - RNA, 12 nt, Artificial Sequence
  Description of Artificial Sequence: Synthetic oligonucleotide
acgagaagaaga

SEQ ID NO: 66682 - RNA, 12 nt, Artificial Sequence
  Description of Artificial Sequence: Synthetic oligonucleotide
cgagaagaagau

SEQ ID NO: 66683 - RNA, 15 nt, Artificial Sequence
  Description of Artificial Sequence: Synthetic oligonucleotide
aagaagaucauuuac

SEQ ID NO: 66684 - RNA, 11 nt, Artificial Sequence
  Description of Artificial Sequence: Synthetic oligonucleotide
agaggaagagg

SEQ ID NO: 66685 - RNA, 12 nt, Artificial Sequence
  Description of Artificial Sequence: Synthetic oligonucleotide
gaggaagaggug

SEQ ID NO: 66686 - RNA, 13 nt, Artificial Sequence
  Description of Artificial Sequence: Synthetic oligonucleotide
cuacuuugagggc

SEQ ID NO: 66687 - RNA, 12 nt, Artificial Sequence
  Description of Artificial Sequence: Synthetic oligonucleotide
agggcaucuccu

SEQ ID NO: 66688 - RNA, 10 nt, Artificial Sequence
  Description of Artificial Sequence: Synthetic oligonucleotide
ggagugauau

SEQ ID NO: 66689 - RNA, 11 nt, Artificial Sequence
  Description of Artificial Sequence: Synthetic oligonucleotide
gagugauaugg

SEQ ID NO: 66690 - RNA, 12 nt, Artificial Sequence
  Description of Artificial Sequence: Synthetic oligonucleotide
ugcaguaaagau

SEQ ID NO: 66691 - RNA, 13 nt, Artificial Sequence
  Description of Artificial Sequence: Synthetic oligonucleotide
aguaaagauccua

SEQ ID NO: 66692 - RNA, 12 nt, Artificial Sequence
  Description of Artificial Sequence: Synthetic oligonucleotide
ugacaaaggaca

SEQ ID NO: 66693 - RNA, 13 nt, Artificial Sequence
  Description of Artificial Sequence: Synthetic oligonucleotide
gcaauugugaccc

SEQ ID NO: 66694 - RNA, 12 nt, Artificial Sequence
  Description of Artificial Sequence: Synthetic oligonucleotide
aacaucauccau

SEQ ID NO: 66695 - RNA, 12 nt, Artificial Sequence
  Description of Artificial Sequence: Synthetic oligonucleotide
ugaaauccaaca

SEQ ID NO: 66696 - RNA, 15 nt, Artificial Sequence
  Description of Artificial Sequence: Synthetic oligonucleotide
aacaauauauuucuc

SEQ ID NO: 66697 - RNA, 14 nt, Artificial Sequence
  Description of Artificial Sequence: Synthetic oligonucleotide
aacaguaaagucac

SEQ ID NO: 66698 - RNA, 14 nt, Artificial Sequence
  Description of Artificial Sequence: Synthetic oligonucleotide
ugugaagaaaguaa

SEQ ID NO: 66699 - RNA, 13 nt, Artificial Sequence
  Description of Artificial Sequence: Synthetic oligonucleotide
cuuccgagccauc

SEQ ID NO: 66700 - RNA, 12 nt, Artificial Sequence
  Description of Artificial Sequence: Synthetic oligonucleotide
aauggagguuga

SEQ ID NO: 66701 - RNA, 12 nt, Artificial Sequence
  Description of Artificial Sequence: Synthetic oligonucleotide
ggagguugaaua

SEQ ID NO: 66702 - RNA, 13 nt, Artificial Sequence
  Description of Artificial Sequence: Synthetic oligonucleotide
auuuugaguuuuc

SEQ ID NO: 66703 - RNA, 12 nt, Artificial Sequence
  Description of Artificial Sequence: Synthetic oligonucleotide
uauccuguuugu

SEQ ID NO: 66704 - RNA, 11 nt, Artificial Sequence
  Description of Artificial Sequence: Synthetic oligonucleotide
ccuguuuguuc

SEQ ID NO: 66705 - RNA, 10 nt, Artificial Sequence
  Description of Artificial Sequence: Synthetic oligonucleotide
cucuacagcc

SEQ ID NO: 66706 - RNA, 12 nt, Artificial Sequence
  Description of Artificial Sequence: Synthetic oligonucleotide
ucuuccauagcu

SEQ ID NO: 66707 - RNA, 12 nt, Artificial Sequence
  Description of Artificial Sequence: Synthetic oligonucleotide
auaaucuuccug

SEQ ID NO: 66708 - RNA, 12 nt, Artificial Sequence
  Description of Artificial Sequence: Synthetic oligonucleotide
uaaucuuccugu

SEQ ID NO: 66709 - RNA, 12 nt, Artificial Sequence
  Description of Artificial Sequence: Synthetic oligonucleotide
cuucaugacuug

SEQ ID NO: 66710 - RNA, 12 nt, Artificial Sequence
  Description of Artificial Sequence: Synthetic oligonucleotide
aagagggagaga

SEQ ID NO: 66711 - RNA, 12 nt, Artificial Sequence
  Description of Artificial Sequence: Synthetic oligonucleotide
cgucuccuacca

SEQ ID NO: 66712 - RNA, 12 nt, Artificial Sequence
  Description of Artificial Sequence: Synthetic oligonucleotide
gaucaaucggcc

SEQ ID NO: 66713 - RNA, 12 nt, Artificial Sequence
  Description of Artificial Sequence: Synthetic oligonucleotide
ggacgaacaucc

SEQ ID NO: 66714 - RNA, 11 nt, Artificial Sequence
  Description of Artificial Sequence: Synthetic oligonucleotide
agggucggaac

SEQ ID NO: 66715 - RNA, 10 nt, Artificial Sequence
  Description of Artificial Sequence: Synthetic oligonucleotide
ucggaaccca

SEQ ID NO: 66716 - RNA, 11 nt, Artificial Sequence
  Description of Artificial Sequence: Synthetic oligonucleotide
acccaagcuua

SEQ ID NO: 66717 - RNA, 14 nt, Artificial Sequence
  Description of Artificial Sequence: Synthetic oligonucleotide
gaacuuuaagcaac

SEQ ID NO: 66718 - RNA, 11 nt, Artificial Sequence
  Description of Artificial Sequence: Synthetic oligonucleotide
acuauucagug

SEQ ID NO: 66719 - RNA, 11 nt, Artificial Sequence
  Description of Artificial Sequence: Synthetic oligonucleotide
cuauucagugg

SEQ ID NO: 66720 - RNA, 13 nt, Artificial Sequence
  Description of Artificial Sequence: Synthetic oligonucleotide
aaacacagauaac

SEQ ID NO: 66721 - RNA, 12 nt, Artificial Sequence
  Description of Artificial Sequence: Synthetic oligonucleotide
cuuaagaaaaga

SEQ ID NO: 66722 - RNA, 12 nt, Artificial Sequence
  Description of Artificial Sequence: Synthetic oligonucleotide
cugaaggagugu

SEQ ID NO: 66723 - RNA, 10 nt, Artificial Sequence
  Description of Artificial Sequence: Synthetic oligonucleotide
ucaccgcggg

SEQ ID NO: 66724 - RNA, 14 nt, Artificial Sequence
  Description of Artificial Sequence: Synthetic oligonucleotide
agcagaaauaagcg

SEQ ID NO: 66725 - RNA, 12 nt, Artificial Sequence
  Description of Artificial Sequence: Synthetic oligonucleotide
aagcgugccguu

SEQ ID NO: 66726 - RNA, 12 nt, Artificial Sequence
  Description of Artificial Sequence: Synthetic oligonucleotide
agaaacagucac

SEQ ID NO: 66727 - RNA, 12 nt, Artificial Sequence
  Description of Artificial Sequence: Synthetic oligonucleotide
agaggaagaagg

SEQ ID NO: 66728 - RNA, 14 nt, Artificial Sequence
  Description of Artificial Sequence: Synthetic oligonucleotide
uguauucaaaauau

SEQ ID NO: 66729 - RNA, 13 nt, Artificial Sequence
  Description of Artificial Sequence: Synthetic oligonucleotide
auuuuccucccuu

SEQ ID NO: 66730 - RNA, 13 nt, Artificial Sequence
  Description of Artificial Sequence: Synthetic oligonucleotide
caaagaaagauag

SEQ ID NO: 66731 - RNA, 12 nt, Artificial Sequence
  Description of Artificial Sequence: Synthetic oligonucleotide
aagaaagauaga

SEQ ID NO: 66732 - RNA, 13 nt, Artificial Sequence
  Description of Artificial Sequence: Synthetic oligonucleotide
gaaagcauuuguu

SEQ ID NO: 66733 - RNA, 13 nt, Artificial Sequence
  Description of Artificial Sequence: Synthetic oligonucleotide
ugaguuaaacgaa

SEQ ID NO: 66734 - RNA, 12 nt, Artificial Sequence
  Description of Artificial Sequence: Synthetic oligonucleotide
acugauacagaa

SEQ ID NO: 66735 - RNA, 12 nt, Artificial Sequence
  Description of Artificial Sequence: Synthetic oligonucleotide
auauuauauaua

SEQ ID NO: 66736 - RNA, 12 nt, Artificial Sequence
  Description of Artificial Sequence: Synthetic oligonucleotide
auuauauauaua

SEQ ID NO: 66737 - RNA, 12 nt, Artificial Sequence
  Description of Artificial Sequence: Synthetic oligonucleotide
ucacuggaugua

SEQ ID NO: 66738 - RNA, 12 nt, Artificial Sequence
  Description of Artificial Sequence: Synthetic oligonucleotide
cagggaagagga

SEQ ID NO: 66739 - RNA, 15 nt, Artificial Sequence
  Description of Artificial Sequence: Synthetic oligonucleotide
augaucuuuuuuuug

SEQ ID NO: 66740 - RNA, 11 nt, Artificial Sequence
  Description of Artificial Sequence: Synthetic oligonucleotide
aguucacggcc

SEQ ID NO: 66741 - RNA, 13 nt, Artificial Sequence
  Description of Artificial Sequence: Synthetic oligonucleotide
caccaucacacca

SEQ ID NO: 66742 - RNA, 11 nt, Artificial Sequence
  Description of Artificial Sequence: Synthetic oligonucleotide
ccugcggguuu

SEQ ID NO: 66743 - RNA, 10 nt, Artificial Sequence
  Description of Artificial Sequence: Synthetic oligonucleotide
auccaguuug

SEQ ID NO: 66744 - RNA, 13 nt, Artificial Sequence
  Description of Artificial Sequence: Synthetic oligonucleotide
guuaaggacuucu

SEQ ID NO: 66745 - RNA, 13 nt, Artificial Sequence
  Description of Artificial Sequence: Synthetic oligonucleotide
cagugggacagag

SEQ ID NO: 66746 - RNA, 14 nt, Artificial Sequence
  Description of Artificial Sequence: Synthetic oligonucleotide
aauuuguuauugug

SEQ ID NO: 66747 - RNA, 13 nt, Artificial Sequence
  Description of Artificial Sequence: Synthetic oligonucleotide
uucaaaugcauuu

SEQ ID NO: 66748 - RNA, 10 nt, Artificial Sequence
  Description of Artificial Sequence: Synthetic oligonucleotide
caggaaagcc

SEQ ID NO: 66749 - RNA, 11 nt, Artificial Sequence
  Description of Artificial Sequence: Synthetic oligonucleotide
aggaaagcccu

SEQ ID NO: 66750 - RNA, 12 nt, Artificial Sequence
  Description of Artificial Sequence: Synthetic oligonucleotide
cccagcauggcc

SEQ ID NO: 66751 - RNA, 11 nt, Artificial Sequence
  Description of Artificial Sequence: Synthetic oligonucleotide
cuucucccuga

SEQ ID NO: 66752 - RNA, 12 nt, Artificial Sequence
  Description of Artificial Sequence: Synthetic oligonucleotide
gaagaagcccuu

SEQ ID NO: 66753 - RNA, 12 nt, Artificial Sequence
  Description of Artificial Sequence: Synthetic oligonucleotide
agaagcccuuca

SEQ ID NO: 66754 - RNA, 11 nt, Artificial Sequence
  Description of Artificial Sequence: Synthetic oligonucleotide
gcccuucagcg

SEQ ID NO: 66755 - RNA, 11 nt, Artificial Sequence
  Description of Artificial Sequence: Synthetic oligonucleotide
ccuucagcggc

SEQ ID NO: 66756 - RNA, 12 nt, Artificial Sequence
  Description of Artificial Sequence: Synthetic oligonucleotide
ucagcggccagu

SEQ ID NO: 66757 - RNA, 12 nt, Artificial Sequence
  Description of Artificial Sequence: Synthetic oligonucleotide
ugaaaagcuccg

SEQ ID NO: 66758 - RNA, 11 nt, Artificial Sequence
  Description of Artificial Sequence: Synthetic oligonucleotide
aaaagcuccgg

SEQ ID NO: 66759 - RNA, 13 nt, Artificial Sequence
  Description of Artificial Sequence: Synthetic oligonucleotide
agucaacagucug

SEQ ID NO: 66760 - RNA, 13 nt, Artificial Sequence
  Description of Artificial Sequence: Synthetic oligonucleotide
cagaguucaaaag

SEQ ID NO: 66761 - RNA, 13 nt, Artificial Sequence
  Description of Artificial Sequence: Synthetic oligonucleotide
agaguucaaaagc

SEQ ID NO: 66762 - RNA, 12 nt, Artificial Sequence
  Description of Artificial Sequence: Synthetic oligonucleotide
uucaaaagcccu

SEQ ID NO: 66763 - RNA, 12 nt, Artificial Sequence
  Description of Artificial Sequence: Synthetic oligonucleotide
ucaaaagcccuu

SEQ ID NO: 66764 - RNA, 12 nt, Artificial Sequence
  Description of Artificial Sequence: Synthetic oligonucleotide
aaaagcccuuca

SEQ ID NO: 66765 - RNA, 12 nt, Artificial Sequence
  Description of Artificial Sequence: Synthetic oligonucleotide
aaagcccuucag

SEQ ID NO: 66766 - RNA, 13 nt, Artificial Sequence
  Description of Artificial Sequence: Synthetic oligonucleotide
gugaagccgcucg

SEQ ID NO: 66767 - RNA, 12 nt, Artificial Sequence
  Description of Artificial Sequence: Synthetic oligonucleotide
cacgccagucaa

SEQ ID NO: 66768 - RNA, 13 nt, Artificial Sequence
  Description of Artificial Sequence: Synthetic oligonucleotide
uucuuggugcgug

SEQ ID NO: 66769 - RNA, 14 nt, Artificial Sequence
  Description of Artificial Sequence: Synthetic oligonucleotide
auuggauucaucag

SEQ ID NO: 66770 - RNA, 13 nt, Artificial Sequence
  Description of Artificial Sequence: Synthetic oligonucleotide
uggaauaccuaag

SEQ ID NO: 66771 - RNA, 12 nt, Artificial Sequence
  Description of Artificial Sequence: Synthetic oligonucleotide
auuugaggcuca

SEQ ID NO: 66772 - RNA, 11 nt, Artificial Sequence
  Description of Artificial Sequence: Synthetic oligonucleotide
ucuacaauugg

SEQ ID NO: 66773 - RNA, 12 nt, Artificial Sequence
  Description of Artificial Sequence: Synthetic oligonucleotide
uaguuaggagcc

SEQ ID NO: 66774 - RNA, 13 nt, Artificial Sequence
  Description of Artificial Sequence: Synthetic oligonucleotide
agucaauauccac

SEQ ID NO: 66775 - RNA, 13 nt, Artificial Sequence
  Description of Artificial Sequence: Synthetic oligonucleotide
auguucagucaca

SEQ ID NO: 66776 - RNA, 12 nt, Artificial Sequence
  Description of Artificial Sequence: Synthetic oligonucleotide
acacacacauac

SEQ ID NO: 66777 - RNA, 12 nt, Artificial Sequence
  Description of Artificial Sequence: Synthetic oligonucleotide
uuccuuuugcuu

SEQ ID NO: 66778 - RNA, 16 nt, Artificial Sequence
  Description of Artificial Sequence: Synthetic oligonucleotide
uuuuaaaguaauuuuu

SEQ ID NO: 66779 - RNA, 13 nt, Artificial Sequence
  Description of Artificial Sequence: Synthetic oligonucleotide
caacagucaaugg

SEQ ID NO: 66780 - RNA, 13 nt, Artificial Sequence
  Description of Artificial Sequence: Synthetic oligonucleotide
ucgacaaaccaau

SEQ ID NO: 66781 - RNA, 12 nt, Artificial Sequence
  Description of Artificial Sequence: Synthetic oligonucleotide
acugcuaccacu

SEQ ID NO: 66782 - RNA, 13 nt, Artificial Sequence
  Description of Artificial Sequence: Synthetic oligonucleotide
gcaagcggucuua

SEQ ID NO: 66783 - RNA, 13 nt, Artificial Sequence
  Description of Artificial Sequence: Synthetic oligonucleotide
ggucuuaccggcu

SEQ ID NO: 66784 - RNA, 11 nt, Artificial Sequence
  Description of Artificial Sequence: Synthetic oligonucleotide
gauggguuacc

SEQ ID NO: 66785 - RNA, 11 nt, Artificial Sequence
  Description of Artificial Sequence: Synthetic oligonucleotide
guuaccugcga

SEQ ID NO: 66786 - RNA, 12 nt, Artificial Sequence
  Description of Artificial Sequence: Synthetic oligonucleotide
aaucuugcugag

SEQ ID NO: 66787 - RNA, 13 nt, Artificial Sequence
  Description of Artificial Sequence: Synthetic oligonucleotide
agcauaaaacagu

SEQ ID NO: 66788 - RNA, 12 nt, Artificial Sequence
  Description of Artificial Sequence: Synthetic oligonucleotide
guccuuuauccu

SEQ ID NO: 66789 - RNA, 12 nt, Artificial Sequence
  Description of Artificial Sequence: Synthetic oligonucleotide
caacgcaaguug

SEQ ID NO: 66790 - RNA, 13 nt, Artificial Sequence
  Description of Artificial Sequence: Synthetic oligonucleotide
aaacugaaaccau

SEQ ID NO: 66791 - RNA, 14 nt, Artificial Sequence
  Description of Artificial Sequence: Synthetic oligonucleotide
acuuuguuaaauau

SEQ ID NO: 66792 - RNA, 14 nt, Artificial Sequence
  Description of Artificial Sequence: Synthetic oligonucleotide
guauauuaaaaguu

SEQ ID NO: 66793 - RNA, 13 nt, Artificial Sequence
  Description of Artificial Sequence: Synthetic oligonucleotide
guuuugacuuaac

SEQ ID NO: 66794 - RNA, 13 nt, Artificial Sequence
  Description of Artificial Sequence: Synthetic oligonucleotide
gcaaacucagcac

SEQ ID NO: 66795 - RNA, 11 nt, Artificial Sequence
  Description of Artificial Sequence: Synthetic oligonucleotide
ugcugaccuca

SEQ ID NO: 66796 - RNA, 14 nt, Artificial Sequence
  Description of Artificial Sequence: Synthetic oligonucleotide
uuuauucagaucgc

SEQ ID NO: 66797 - RNA, 13 nt, Artificial Sequence
  Description of Artificial Sequence: Synthetic oligonucleotide
aggguucugggau

SEQ ID NO: 66798 - RNA, 15 nt, Artificial Sequence
  Description of Artificial Sequence: Synthetic oligonucleotide
auauuggaaauuaug

SEQ ID NO: 66799 - RNA, 13 nt, Artificial Sequence
  Description of Artificial Sequence: Synthetic oligonucleotide
auggaagcacuag

SEQ ID NO: 66800 - RNA, 13 nt, Artificial Sequence
  Description of Artificial Sequence: Synthetic oligonucleotide
guuuuuaugugga

SEQ ID NO: 66801 - RNA, 12 nt, Artificial Sequence
  Description of Artificial Sequence: Synthetic oligonucleotide
ggaauugguaga

SEQ ID NO: 66802 - RNA, 13 nt, Artificial Sequence
  Description of Artificial Sequence: Synthetic oligonucleotide
uuagacuuggaga

SEQ ID NO: 66803 - RNA, 13 nt, Artificial Sequence
  Description of Artificial Sequence: Synthetic oligonucleotide
uuacaguauucca

SEQ ID NO: 66804 - RNA, 15 nt, Artificial Sequence
  Description of Artificial Sequence: Synthetic oligonucleotide
ccacugaugaauuaa

SEQ ID NO: 66805 - RNA, 12 nt, Artificial Sequence
  Description of Artificial Sequence: Synthetic oligonucleotide
ccacaucaucac

SEQ ID NO: 66806 - RNA, 13 nt, Artificial Sequence
  Description of Artificial Sequence: Synthetic oligonucleotide
cucaccaaacaga

SEQ ID NO: 66807 - RNA, 12 nt, Artificial Sequence
  Description of Artificial Sequence: Synthetic oligonucleotide
ggaacaugaugg

SEQ ID NO: 66808 - RNA, 12 nt, Artificial Sequence
  Description of Artificial Sequence: Synthetic oligonucleotide
cauguagacugc

SEQ ID NO: 66809 - RNA, 13 nt, Artificial Sequence
  Description of Artificial Sequence: Synthetic oligonucleotide
ggaucuauuuaug

SEQ ID NO: 66810 - RNA, 12 nt, Artificial Sequence
  Description of Artificial Sequence: Synthetic oligonucleotide
gcacuauuauca

SEQ ID NO: 66811 - RNA, 11 nt, Artificial Sequence
  Description of Artificial Sequence: Synthetic oligonucleotide
aucaguucugc

SEQ ID NO: 66812 - RNA, 13 nt, Artificial Sequence
  Description of Artificial Sequence: Synthetic oligonucleotide
agauuaaaccuac

SEQ ID NO: 66813 - RNA, 13 nt, Artificial Sequence
  Description of Artificial Sequence: Synthetic oligonucleotide
auaaaauccuucu

SEQ ID NO: 66814 - RNA, 12 nt, Artificial Sequence
  Description of Artificial Sequence: Synthetic oligonucleotide
aaugcuguagac

SEQ ID NO: 66815 - RNA, 13 nt, Artificial Sequence
  Description of Artificial Sequence: Synthetic oligonucleotide
uugauaggaauag

SEQ ID NO: 66816 - RNA, 11 nt, Artificial Sequence
  Description of Artificial Sequence: Synthetic oligonucleotide
aauggcccuga

SEQ ID NO: 66817 - RNA, 11 nt, Artificial Sequence
  Description of Artificial Sequence: Synthetic oligonucleotide
uuccucaagca

SEQ ID NO: 66818 - RNA, 10 nt, Artificial Sequence
  Description of Artificial Sequence: Synthetic oligonucleotide
guucagccca

SEQ ID NO: 66819 - RNA, 11 nt, Artificial Sequence
  Description of Artificial Sequence: Synthetic oligonucleotide
gcugcugaacc

SEQ ID NO: 66820 - RNA, 12 nt, Artificial Sequence
  Description of Artificial Sequence: Synthetic oligonucleotide
aaguucucuuca

SEQ ID NO: 66821 - RNA, 11 nt, Artificial Sequence
  Description of Artificial Sequence: Synthetic oligonucleotide
ccagccuagag

SEQ ID NO: 66822 - RNA, 13 nt, Artificial Sequence
  Description of Artificial Sequence: Synthetic oligonucleotide
cucugugaagugu

SEQ ID NO: 66823 - RNA, 14 nt, Artificial Sequence
  Description of Artificial Sequence: Synthetic oligonucleotide
ugagaaaauuucaa

SEQ ID NO: 66824 - RNA, 11 nt, Artificial Sequence
  Description of Artificial Sequence: Synthetic oligonucleotide
aauccuccuga

SEQ ID NO: 66825 - RNA, 12 nt, Artificial Sequence
  Description of Artificial Sequence: Synthetic oligonucleotide
gugacaucauau

SEQ ID NO: 66826 - RNA, 13 nt, Artificial Sequence
  Description of Artificial Sequence: Synthetic oligonucleotide
aaucuucaucaua

SEQ ID NO: 66827 - RNA, 13 nt, Artificial Sequence
  Description of Artificial Sequence: Synthetic oligonucleotide
gacuagcuauuaa

SEQ ID NO: 66828 - RNA, 14 nt, Artificial Sequence
  Description of Artificial Sequence: Synthetic oligonucleotide
ucucuacuaaaaau

SEQ ID NO: 66829 - RNA, 12 nt, Artificial Sequence
  Description of Artificial Sequence: Synthetic oligonucleotide
ucuaucucgccu

SEQ ID NO: 66830 - RNA, 13 nt, Artificial Sequence
  Description of Artificial Sequence: Synthetic oligonucleotide
cuucgguccaguu

SEQ ID NO: 66831 - RNA, 11 nt, Artificial Sequence
  Description of Artificial Sequence: Synthetic oligonucleotide
gauguagccgc

SEQ ID NO: 66832 - RNA, 12 nt, Artificial Sequence
  Description of Artificial Sequence: Synthetic oligonucleotide
ugaggagacuug

SEQ ID NO: 66833 - RNA, 12 nt, Artificial Sequence
  Description of Artificial Sequence: Synthetic oligonucleotide
gaguagugagga

SEQ ID NO: 66834 - RNA, 14 nt, Artificial Sequence
  Description of Artificial Sequence: Synthetic oligonucleotide
cagaugaguacaaa

SEQ ID NO: 66835 - RNA, 13 nt, Artificial Sequence
  Description of Artificial Sequence: Synthetic oligonucleotide
guuguuaaugggc

SEQ ID NO: 66836 - RNA, 13 nt, Artificial Sequence
  Description of Artificial Sequence: Synthetic oligonucleotide
uuuuuaauuuauu

SEQ ID NO: 66837 - RNA, 12 nt, Artificial Sequence
  Description of Artificial Sequence: Synthetic oligonucleotide
uauuuaaauaug

SEQ ID NO: 66838 - RNA, 13 nt, Artificial Sequence
  Description of Artificial Sequence: Synthetic oligonucleotide
uauccuuuguuuc

SEQ ID NO: 66839 - RNA, 14 nt, Artificial Sequence
  Description of Artificial Sequence: Synthetic oligonucleotide
cgucuaaguguuug

SEQ ID NO: 66840 - RNA, 12 nt, Artificial Sequence
  Description of Artificial Sequence: Synthetic oligonucleotide
accugugacaaa

SEQ ID NO: 66841 - RNA, 13 nt, Artificial Sequence
  Description of Artificial Sequence: Synthetic oligonucleotide
ccaggcugaauua

SEQ ID NO: 66842 - RNA, 14 nt, Artificial Sequence
  Description of Artificial Sequence: Synthetic oligonucleotide
gucauucuuacaau

SEQ ID NO: 66843 - RNA, 15 nt, Artificial Sequence
  Description of Artificial Sequence: Synthetic oligonucleotide
ucauucuuacaauug

SEQ ID NO: 66844 - RNA, 12 nt, Artificial Sequence
  Description of Artificial Sequence: Synthetic oligonucleotide
cagagaguguac

SEQ ID NO: 66845 - RNA, 12 nt, Artificial Sequence
  Description of Artificial Sequence: Synthetic oligonucleotide
agaacucagcag

SEQ ID NO: 66846 - RNA, 13 nt, Artificial Sequence
  Description of Artificial Sequence: Synthetic oligonucleotide
uuuauuuucagua

SEQ ID NO: 66847 - RNA, 12 nt, Artificial Sequence
  Description of Artificial Sequence: Synthetic oligonucleotide
ucuuaaauggaa

SEQ ID NO: 66848 - RNA, 13 nt, Artificial Sequence
  Description of Artificial Sequence: Synthetic oligonucleotide
ugccuaaaauugu

SEQ ID NO: 66849 - RNA, 12 nt, Artificial Sequence
  Description of Artificial Sequence: Synthetic oligonucleotide
agacugugagcu

SEQ ID NO: 66850 - RNA, 14 nt, Artificial Sequence
  Description of Artificial Sequence: Synthetic oligonucleotide
ugcuuuuuauuaau

SEQ ID NO: 66851 - RNA, 13 nt, Artificial Sequence
  Description of Artificial Sequence: Synthetic oligonucleotide
cucuucuuacauu

SEQ ID NO: 66852 - RNA, 15 nt, Artificial Sequence
  Description of Artificial Sequence: Synthetic oligonucleotide
cauuuguaaaaaugu

SEQ ID NO: 66853 - RNA, 15 nt, Artificial Sequence
  Description of Artificial Sequence: Synthetic oligonucleotide
aucuuaauucauauu

SEQ ID NO: 66854 - RNA, 13 nt, Artificial Sequence
  Description of Artificial Sequence: Synthetic oligonucleotide
gaacuaaucauga

SEQ ID NO: 66855 - RNA, 12 nt, Artificial Sequence
  Description of Artificial Sequence: Synthetic oligonucleotide
ucugcucuuggg

SEQ ID NO: 66856 - RNA, 13 nt, Artificial Sequence
  Description of Artificial Sequence: Synthetic oligonucleotide
caguagcuuugag

SEQ ID NO: 66857 - RNA, 14 nt, Artificial Sequence
  Description of Artificial Sequence: Synthetic oligonucleotide
cacguaauauuuca

SEQ ID NO: 66858 - RNA, 13 nt, Artificial Sequence
  Description of Artificial Sequence: Synthetic oligonucleotide
uauucucuucacu

SEQ ID NO: 66859 - RNA, 14 nt, Artificial Sequence
  Description of Artificial Sequence: Synthetic oligonucleotide
cuaaugcuaagaaa

SEQ ID NO: 66860 - RNA, 12 nt, Artificial Sequence
  Description of Artificial Sequence: Synthetic oligonucleotide
gcugaaaaucaa

SEQ ID NO: 66861 - RNA, 14 nt, Artificial Sequence
  Description of Artificial Sequence: Synthetic oligonucleotide
aauaugauuacuuu

SEQ ID NO: 66862 - RNA, 14 nt, Artificial Sequence
  Description of Artificial Sequence: Synthetic oligonucleotide
cauuuuguucuaca

SEQ ID NO: 66863 - RNA, 12 nt, Artificial Sequence
  Description of Artificial Sequence: Synthetic oligonucleotide
cccgggacucuc

SEQ ID NO: 66864 - RNA, 14 nt, Artificial Sequence
  Description of Artificial Sequence: Synthetic oligonucleotide
ccuuuaaaguaaag

SEQ ID NO: 66865 - RNA, 13 nt, Artificial Sequence
  Description of Artificial Sequence: Synthetic oligonucleotide
ucuggaagccugg

SEQ ID NO: 66866 - RNA, 14 nt, Artificial Sequence
  Description of Artificial Sequence: Synthetic oligonucleotide
aaaacaaaagagag

SEQ ID NO: 66867 - RNA, 13 nt, Artificial Sequence
  Description of Artificial Sequence: Synthetic oligonucleotide
aucaguuaugccg

SEQ ID NO: 66868 - RNA, 13 nt, Artificial Sequence
  Description of Artificial Sequence: Synthetic oligonucleotide
uaaaagaagucca

SEQ ID NO: 66869 - RNA, 11 nt, Artificial Sequence
  Description of Artificial Sequence: Synthetic oligonucleotide
aggugagguua

SEQ ID NO: 66870 - RNA, 11 nt, Artificial Sequence
  Description of Artificial Sequence: Synthetic oligonucleotide
gggaagaggac

SEQ ID NO: 66871 - RNA, 13 nt, Artificial Sequence
  Description of Artificial Sequence: Synthetic oligonucleotide
aagcaaguauugu

SEQ ID NO: 66872 - RNA, 12 nt, Artificial Sequence
  Description of Artificial Sequence: Synthetic oligonucleotide
auuguagcacuc

SEQ ID NO: 66873 - RNA, 14 nt, Artificial Sequence
  Description of Artificial Sequence: Synthetic oligonucleotide
acaaaaccacaaau

SEQ ID NO: 66874 - RNA, 12 nt, Artificial Sequence
  Description of Artificial Sequence: Synthetic oligonucleotide
uaagcccauaca

SEQ ID NO: 66875 - RNA, 11 nt, Artificial Sequence
  Description of Artificial Sequence: Synthetic oligonucleotide
agcccauacag

SEQ ID NO: 66876 - RNA, 12 nt, Artificial Sequence
  Description of Artificial Sequence: Synthetic oligonucleotide
cagaaaccuucc

SEQ ID NO: 66877 - RNA, 10 nt, Artificial Sequence
  Description of Artificial Sequence: Synthetic oligonucleotide
guauaccuac

SEQ ID NO: 66878 - RNA, 13 nt, Artificial Sequence
  Description of Artificial Sequence: Synthetic oligonucleotide
gccaguuuucgga

SEQ ID NO: 66879 - RNA, 9 nt, Artificial Sequence
  Description of Artificial Sequence: Synthetic oligonucleotide
ggaacaggg

SEQ ID NO: 66880 - RNA, 13 nt, Artificial Sequence
  Description of Artificial Sequence: Synthetic oligonucleotide
uuaacuuuccagu

SEQ ID NO: 66881 - RNA, 14 nt, Artificial Sequence
  Description of Artificial Sequence: Synthetic oligonucleotide
aaaguuugguuuug

SEQ ID NO: 66882 - RNA, 12 nt, Artificial Sequence
  Description of Artificial Sequence: Synthetic oligonucleotide
cuucccacugua

SEQ ID NO: 66883 - RNA, 13 nt, Artificial Sequence
  Description of Artificial Sequence: Synthetic oligonucleotide
ugauaccauauga

SEQ ID NO: 66884 - RNA, 11 nt, Artificial Sequence
  Description of Artificial Sequence: Synthetic oligonucleotide
aacaugggcug

SEQ ID NO: 66885 - RNA, 13 nt, Artificial Sequence
  Description of Artificial Sequence: Synthetic oligonucleotide
caacuuuuucaua

SEQ ID NO: 66886 - RNA, 12 nt, Artificial Sequence
  Description of Artificial Sequence: Synthetic oligonucleotide
caugaggccgga

SEQ ID NO: 66887 - RNA, 11 nt, Artificial Sequence
  Description of Artificial Sequence: Synthetic oligonucleotide
acugcauuugu

SEQ ID NO: 66888 - RNA, 13 nt, Artificial Sequence
  Description of Artificial Sequence: Synthetic oligonucleotide
aauguuuacuacc

SEQ ID NO: 66889 - RNA, 15 nt, Artificial Sequence
  Description of Artificial Sequence: Synthetic oligonucleotide
aauuuuuugaugaaa

SEQ ID NO: 66890 - RNA, 14 nt, Artificial Sequence
  Description of Artificial Sequence: Synthetic oligonucleotide
cagugugugaauuu

SEQ ID NO: 66891 - RNA, 13 nt, Artificial Sequence
  Description of Artificial Sequence: Synthetic oligonucleotide
gagcaauguaugu

SEQ ID NO: 66892 - RNA, 14 nt, Artificial Sequence
  Description of Artificial Sequence: Synthetic oligonucleotide
aaagcacauauaua

SEQ ID NO: 66893 - RNA, 14 nt, Artificial Sequence
  Description of Artificial Sequence: Synthetic oligonucleotide
guaauaguuucucc

SEQ ID NO: 66894 - RNA, 13 nt, Artificial Sequence
  Description of Artificial Sequence: Synthetic oligonucleotide
aguuucuccaaau

SEQ ID NO: 66895 - RNA, 13 nt, Artificial Sequence
  Description of Artificial Sequence: Synthetic oligonucleotide
uacuuccuagaaa

SEQ ID NO: 66896 - RNA, 13 nt, Artificial Sequence
  Description of Artificial Sequence: Synthetic oligonucleotide
uacaccauauaug

SEQ ID NO: 66897 - RNA, 14 nt, Artificial Sequence
  Description of Artificial Sequence: Synthetic oligonucleotide
auauaugaauggag

SEQ ID NO: 66898 - RNA, 13 nt, Artificial Sequence
  Description of Artificial Sequence: Synthetic oligonucleotide
acgagaagaagau

SEQ ID NO: 66899 - RNA, 13 nt, Artificial Sequence
  Description of Artificial Sequence: Synthetic oligonucleotide
ucauuuacaggga

SEQ ID NO: 66900 - RNA, 13 nt, Artificial Sequence
  Description of Artificial Sequence: Synthetic oligonucleotide
cauuuacagggac

SEQ ID NO: 66901 - RNA, 10 nt, Artificial Sequence
  Description of Artificial Sequence: Synthetic oligonucleotide
agggaccuga

SEQ ID NO: 66902 - RNA, 14 nt, Artificial Sequence
  Description of Artificial Sequence: Synthetic oligonucleotide
uguuugacugcauc

SEQ ID NO: 66903 - RNA, 13 nt, Artificial Sequence
  Description of Artificial Sequence: Synthetic oligonucleotide
uuugacugcaucg

SEQ ID NO: 66904 - RNA, 12 nt, Artificial Sequence
  Description of Artificial Sequence: Synthetic oligonucleotide
gaguucacaggg

SEQ ID NO: 66905 - RNA, 13 nt, Artificial Sequence
  Description of Artificial Sequence: Synthetic oligonucleotide
ggcaccucugucc

SEQ ID NO: 66906 - RNA, 15 nt, Artificial Sequence
  Description of Artificial Sequence: Synthetic oligonucleotide
gguuugucuuuuuaa

SEQ ID NO: 66907 - RNA, 14 nt, Artificial Sequence
  Description of Artificial Sequence: Synthetic oligonucleotide
uuugucuuuuuaag

SEQ ID NO: 66908 - RNA, 13 nt, Artificial Sequence
  Description of Artificial Sequence: Synthetic oligonucleotide
ccuaaagguuguc

SEQ ID NO: 66909 - RNA, 12 nt, Artificial Sequence
  Description of Artificial Sequence: Synthetic oligonucleotide
aagguugucgac

SEQ ID NO: 66910 - RNA, 13 nt, Artificial Sequence
  Description of Artificial Sequence: Synthetic oligonucleotide
accuggcaauugu

SEQ ID NO: 66911 - RNA, 12 nt, Artificial Sequence
  Description of Artificial Sequence: Synthetic oligonucleotide
aguggugcgagg

SEQ ID NO: 66912 - RNA, 13 nt, Artificial Sequence
  Description of Artificial Sequence: Synthetic oligonucleotide
agagacaugaaau

SEQ ID NO: 66913 - RNA, 13 nt, Artificial Sequence
  Description of Artificial Sequence: Synthetic oligonucleotide
auauauuucucca

SEQ ID NO: 66914 - RNA, 10 nt, Artificial Sequence
  Description of Artificial Sequence: Synthetic oligonucleotide
caugaaggcu

SEQ ID NO: 66915 - RNA, 11 nt, Artificial Sequence
  Description of Artificial Sequence: Synthetic oligonucleotide
gcuggaguggu

SEQ ID NO: 66916 - RNA, 11 nt, Artificial Sequence
  Description of Artificial Sequence: Synthetic oligonucleotide
aggaagagagg

SEQ ID NO: 66917 - RNA, 12 nt, Artificial Sequence
  Description of Artificial Sequence: Synthetic oligonucleotide
cuugcaucgggc

SEQ ID NO: 66918 - RNA, 13 nt, Artificial Sequence
  Description of Artificial Sequence: Synthetic oligonucleotide
auauccuacugug

SEQ ID NO: 66919 - RNA, 13 nt, Artificial Sequence
  Description of Artificial Sequence: Synthetic oligonucleotide
uccuacuguguaa

SEQ ID NO: 66920 - RNA, 12 nt, Artificial Sequence
  Description of Artificial Sequence: Synthetic oligonucleotide
ccuuguagugua

SEQ ID NO: 66921 - RNA, 13 nt, Artificial Sequence
  Description of Artificial Sequence: Synthetic oligonucleotide
ucuuuguugauug

SEQ ID NO: 66922 - RNA, 14 nt, Artificial Sequence
  Description of Artificial Sequence: Synthetic oligonucleotide
uuuguugauugaaa

SEQ ID NO: 66923 - RNA, 15 nt, Artificial Sequence
  Description of Artificial Sequence: Synthetic oligonucleotide
uucuuuuucuuccau

SEQ ID NO: 66924 - RNA, 13 nt, Artificial Sequence
  Description of Artificial Sequence: Synthetic oligonucleotide
aaucuuccuucua

SEQ ID NO: 66925 - RNA, 13 nt, Artificial Sequence
  Description of Artificial Sequence: Synthetic oligonucleotide
uugaaugcuucau

SEQ ID NO: 66926 - RNA, 13 nt, Artificial Sequence
  Description of Artificial Sequence: Synthetic oligonucleotide
ugaaugcuucaug

SEQ ID NO: 66927 - RNA, 13 nt, Artificial Sequence
  Description of Artificial Sequence: Synthetic oligonucleotide
aauucuacuuuga

SEQ ID NO: 66928 - RNA, 13 nt, Artificial Sequence
  Description of Artificial Sequence: Synthetic oligonucleotide
agcaacuacagac

SEQ ID NO: 66929 - RNA, 13 nt, Artificial Sequence
  Description of Artificial Sequence: Synthetic oligonucleotide
gaccaaggucaac

SEQ ID NO: 66930 - RNA, 13 nt, Artificial Sequence
  Description of Artificial Sequence: Synthetic oligonucleotide
cgacuaucucgac

SEQ ID NO: 66931 - RNA, 13 nt, Artificial Sequence
  Description of Artificial Sequence: Synthetic oligonucleotide
aaccuucccaaac

SEQ ID NO: 66932 - RNA, 14 nt, Artificial Sequence
  Description of Artificial Sequence: Synthetic oligonucleotide
ccaagcuuagaacu

SEQ ID NO: 66933 - RNA, 15 nt, Artificial Sequence
  Description of Artificial Sequence: Synthetic oligonucleotide
agcuuagaacuuuaa

SEQ ID NO: 66934 - RNA, 11 nt, Artificial Sequence
  Description of Artificial Sequence: Synthetic oligonucleotide
aagaccaccac

SEQ ID NO: 66935 - RNA, 14 nt, Artificial Sequence
  Description of Artificial Sequence: Synthetic oligonucleotide
gcgagaaauaaagu

SEQ ID NO: 66936 - RNA, 14 nt, Artificial Sequence
  Description of Artificial Sequence: Synthetic oligonucleotide
cgagaaauaaaguu

SEQ ID NO: 66937 - RNA, 12 nt, Artificial Sequence
  Description of Artificial Sequence: Synthetic oligonucleotide
aggaaaugaucc

SEQ ID NO: 66938 - RNA, 13 nt, Artificial Sequence
  Description of Artificial Sequence: Synthetic oligonucleotide
gaagaaaugaaac

SEQ ID NO: 66939 - RNA, 13 nt, Artificial Sequence
  Description of Artificial Sequence: Synthetic oligonucleotide
guuuccauccucc

SEQ ID NO: 66940 - RNA, 15 nt, Artificial Sequence
  Description of Artificial Sequence: Synthetic oligonucleotide
acugaaaaucuuuga

SEQ ID NO: 66941 - RNA, 11 nt, Artificial Sequence
  Description of Artificial Sequence: Synthetic oligonucleotide
ugccguucagg

SEQ ID NO: 66942 - RNA, 13 nt, Artificial Sequence
  Description of Artificial Sequence: Synthetic oligonucleotide
caggguccagaag

SEQ ID NO: 66943 - RNA, 13 nt, Artificial Sequence
  Description of Artificial Sequence: Synthetic oligonucleotide
ucaagacugcuug

SEQ ID NO: 66944 - RNA, 13 nt, Artificial Sequence
  Description of Artificial Sequence: Synthetic oligonucleotide
uccaugucuuugg

SEQ ID NO: 66945 - RNA, 11 nt, Artificial Sequence
  Description of Artificial Sequence: Synthetic oligonucleotide
gccugaaacac

SEQ ID NO: 66946 - RNA, 12 nt, Artificial Sequence
  Description of Artificial Sequence: Synthetic oligonucleotide
ucucuguaccuc

SEQ ID NO: 66947 - RNA, 12 nt, Artificial Sequence
  Description of Artificial Sequence: Synthetic oligonucleotide
agcaagacaaga

SEQ ID NO: 66948 - RNA, 13 nt, Artificial Sequence
  Description of Artificial Sequence: Synthetic oligonucleotide
gcaagacaagaaa

SEQ ID NO: 66949 - RNA, 12 nt, Artificial Sequence
  Description of Artificial Sequence: Synthetic oligonucleotide
uguacaagaucc

SEQ ID NO: 66950 - RNA, 12 nt, Artificial Sequence
  Description of Artificial Sequence: Synthetic oligonucleotide
cguacuugcaga

SEQ ID NO: 66951 - RNA, 13 nt, Artificial Sequence
  Description of Artificial Sequence: Synthetic oligonucleotide
cgaucgauacaga

SEQ ID NO: 66952 - RNA, 13 nt, Artificial Sequence
  Description of Artificial Sequence: Synthetic oligonucleotide
uauaaaaauaaau

SEQ ID NO: 66953 - RNA, 13 nt, Artificial Sequence
  Description of Artificial Sequence: Synthetic oligonucleotide
uaaaaauaaauau

SEQ ID NO: 66954 - RNA, 13 nt, Artificial Sequence
  Description of Artificial Sequence: Synthetic oligonucleotide
uuugacugcugug

SEQ ID NO: 66955 - RNA, 13 nt, Artificial Sequence
  Description of Artificial Sequence: Synthetic oligonucleotide
ggagaugagagac

SEQ ID NO: 66956 - RNA, 10 nt, Artificial Sequence
  Description of Artificial Sequence: Synthetic oligonucleotide
ucccacuugg

SEQ ID NO: 66957 - RNA, 10 nt, Artificial Sequence
  Description of Artificial Sequence: Synthetic oligonucleotide
guucacggcc

SEQ ID NO: 66958 - RNA, 12 nt, Artificial Sequence
  Description of Artificial Sequence: Synthetic oligonucleotide
accaucacacca

SEQ ID NO: 66959 - RNA, 10 nt, Artificial Sequence
  Description of Artificial Sequence: Synthetic oligonucleotide
cugcggguuu

SEQ ID NO: 66960 - RNA, 9 nt, Artificial Sequence
  Description of Artificial Sequence: Synthetic oligonucleotide
uccaguuug

SEQ ID NO: 66961 - RNA, 12 nt, Artificial Sequence
  Description of Artificial Sequence: Synthetic oligonucleotide
uuaaggacuucu

SEQ ID NO: 66962 - RNA, 12 nt, Artificial Sequence
  Description of Artificial Sequence: Synthetic oligonucleotide
agugggacagag

SEQ ID NO: 66963 - RNA, 13 nt, Artificial Sequence
  Description of Artificial Sequence: Synthetic oligonucleotide
auuuguuauugug

SEQ ID NO: 66964 - RNA, 12 nt, Artificial Sequence
  Description of Artificial Sequence: Synthetic oligonucleotide
ucaaaugcauuu

SEQ ID NO: 66965 - RNA, 9 nt, Artificial Sequence
  Description of Artificial Sequence: Synthetic oligonucleotide
aggaaagcc

SEQ ID NO: 66966 - RNA, 10 nt, Artificial Sequence
  Description of Artificial Sequence: Synthetic oligonucleotide
ggaaagcccu

SEQ ID NO: 66967 - RNA, 11 nt, Artificial Sequence
  Description of Artificial Sequence: Synthetic oligonucleotide
ccagcauggcc

SEQ ID NO: 66968 - RNA, 10 nt, Artificial Sequence
  Description of Artificial Sequence: Synthetic oligonucleotide
uucucccuga

SEQ ID NO: 66969 - RNA, 11 nt, Artificial Sequence
  Description of Artificial Sequence: Synthetic oligonucleotide
aagaagcccuu

SEQ ID NO: 66970 - RNA, 11 nt, Artificial Sequence
  Description of Artificial Sequence: Synthetic oligonucleotide
gaagcccuuca

SEQ ID NO: 66971 - RNA, 10 nt, Artificial Sequence
  Description of Artificial Sequence: Synthetic oligonucleotide
cccuucagcg

SEQ ID NO: 66972 - RNA, 10 nt, Artificial Sequence
  Description of Artificial Sequence: Synthetic oligonucleotide
cuucagcggc

SEQ ID NO: 66973 - RNA, 11 nt, Artificial Sequence
  Description of Artificial Sequence: Synthetic oligonucleotide
cagcggccagu

SEQ ID NO: 66974 - RNA, 11 nt, Artificial Sequence
  Description of Artificial Sequence: Synthetic oligonucleotide
gaaaagcuccg

SEQ ID NO: 66975 - RNA, 10 nt, Artificial Sequence
  Description of Artificial Sequence: Synthetic oligonucleotide
aaagcuccgg

SEQ ID NO: 66976 - RNA, 12 nt, Artificial Sequence
  Description of Artificial Sequence: Synthetic oligonucleotide
gucaacagucug

SEQ ID NO: 66977 - RNA, 12 nt, Artificial Sequence
  Description of Artificial Sequence: Synthetic oligonucleotide
agaguucaaaag

SEQ ID NO: 66978 - RNA, 12 nt, Artificial Sequence
  Description of Artificial Sequence: Synthetic oligonucleotide
gaguucaaaagc

SEQ ID NO: 66979 - RNA, 11 nt, Artificial Sequence
  Description of Artificial Sequence: Synthetic oligonucleotide
ucaaaagcccu

SEQ ID NO: 66980 - RNA, 11 nt, Artificial Sequence
  Description of Artificial Sequence: Synthetic oligonucleotide
caaaagcccuu

SEQ ID NO: 66981 - RNA, 11 nt, Artificial Sequence
  Description of Artificial Sequence: Synthetic oligonucleotide
aaagcccuuca

SEQ ID NO: 66982 - RNA, 11 nt, Artificial Sequence
  Description of Artificial Sequence: Synthetic oligonucleotide
aagcccuucag

SEQ ID NO: 66983 - RNA, 12 nt, Artificial Sequence
  Description of Artificial Sequence: Synthetic oligonucleotide
ugaagccgcucg

SEQ ID NO: 66984 - RNA, 11 nt, Artificial Sequence
  Description of Artificial Sequence: Synthetic oligonucleotide
acgccagucaa

SEQ ID NO: 66985 - RNA, 12 nt, Artificial Sequence
  Description of Artificial Sequence: Synthetic oligonucleotide
ucuuggugcgug

SEQ ID NO: 66986 - RNA, 13 nt, Artificial Sequence
  Description of Artificial Sequence: Synthetic oligonucleotide
uuggauucaucag

SEQ ID NO: 66987 - RNA, 12 nt, Artificial Sequence
  Description of Artificial Sequence: Synthetic oligonucleotide
ggaauaccuaag

SEQ ID NO: 66988 - RNA, 11 nt, Artificial Sequence
  Description of Artificial Sequence: Synthetic oligonucleotide
uuugaggcuca

SEQ ID NO: 66989 - RNA, 10 nt, Artificial Sequence
  Description of Artificial Sequence: Synthetic oligonucleotide
cuacaauugg

SEQ ID NO: 66990 - RNA, 11 nt, Artificial Sequence
  Description of Artificial Sequence: Synthetic oligonucleotide
aguuaggagcc

SEQ ID NO: 66991 - RNA, 12 nt, Artificial Sequence
  Description of Artificial Sequence: Synthetic oligonucleotide
gucaauauccac

SEQ ID NO: 66992 - RNA, 12 nt, Artificial Sequence
  Description of Artificial Sequence: Synthetic oligonucleotide
uguucagucaca

SEQ ID NO: 66993 - RNA, 11 nt, Artificial Sequence
  Description of Artificial Sequence: Synthetic oligonucleotide
cacacacauac

SEQ ID NO: 66994 - RNA, 11 nt, Artificial Sequence
  Description of Artificial Sequence: Synthetic oligonucleotide
uccuuuugcuu

SEQ ID NO: 66995 - RNA, 15 nt, Artificial Sequence
  Description of Artificial Sequence: Synthetic oligonucleotide
uuuaaaguaauuuuu

SEQ ID NO: 66996 - RNA, 12 nt, Artificial Sequence
  Description of Artificial Sequence: Synthetic oligonucleotide
aacagucaaugg

SEQ ID NO: 66997 - RNA, 12 nt, Artificial Sequence
  Description of Artificial Sequence: Synthetic oligonucleotide
cgacaaaccaau

SEQ ID NO: 66998 - RNA, 11 nt, Artificial Sequence
  Description of Artificial Sequence: Synthetic oligonucleotide
cugcuaccacu

SEQ ID NO: 66999 - RNA, 12 nt, Artificial Sequence
  Description of Artificial Sequence: Synthetic oligonucleotide
caagcggucuua

SEQ ID NO: 67000 - RNA, 12 nt, Artificial Sequence
  Description of Artificial Sequence: Synthetic oligonucleotide
gucuuaccggcu

SEQ ID NO: 67001 - RNA, 10 nt, Artificial Sequence
  Description of Artificial Sequence: Synthetic oligonucleotide
auggguuacc

SEQ ID NO: 67002 - RNA, 10 nt, Artificial Sequence
  Description of Artificial Sequence: Synthetic oligonucleotide
uuaccugcga

SEQ ID NO: 67003 - RNA, 11 nt, Artificial Sequence
  Description of Artificial Sequence: Synthetic oligonucleotide
aucuugcugag

SEQ ID NO: 67004 - RNA, 12 nt, Artificial Sequence
  Description of Artificial Sequence: Synthetic oligonucleotide
gcauaaaacagu

SEQ ID NO: 67005 - RNA, 11 nt, Artificial Sequence
  Description of Artificial Sequence: Synthetic oligonucleotide
uccuuuauccu

SEQ ID NO: 67006 - RNA, 11 nt, Artificial Sequence
  Description of Artificial Sequence: Synthetic oligonucleotide
aacgcaaguug

SEQ ID NO: 67007 - RNA, 12 nt, Artificial Sequence
  Description of Artificial Sequence: Synthetic oligonucleotide
aacugaaaccau

SEQ ID NO: 67008 - RNA, 13 nt, Artificial Sequence
  Description of Artificial Sequence: Synthetic oligonucleotide
cuuuguuaaauau

SEQ ID NO: 67009 - RNA, 13 nt, Artificial Sequence
  Description of Artificial Sequence: Synthetic oligonucleotide
uauauuaaaaguu

SEQ ID NO: 67010 - RNA, 12 nt, Artificial Sequence
  Description of Artificial Sequence: Synthetic oligonucleotide
uuuugacuuaac

SEQ ID NO: 67011 - RNA, 12 nt, Artificial Sequence
  Description of Artificial Sequence: Synthetic oligonucleotide
caaacucagcac

SEQ ID NO: 67012 - RNA, 10 nt, Artificial Sequence
  Description of Artificial Sequence: Synthetic oligonucleotide
gcugaccuca

SEQ ID NO: 67013 - RNA, 13 nt, Artificial Sequence
  Description of Artificial Sequence: Synthetic oligonucleotide
uuauucagaucgc

SEQ ID NO: 67014 - RNA, 12 nt, Artificial Sequence
  Description of Artificial Sequence: Synthetic oligonucleotide
ggguucugggau

SEQ ID NO: 67015 - RNA, 14 nt, Artificial Sequence
  Description of Artificial Sequence: Synthetic oligonucleotide
uauuggaaauuaug

SEQ ID NO: 67016 - RNA, 12 nt, Artificial Sequence
  Description of Artificial Sequence: Synthetic oligonucleotide
uggaagcacuag

SEQ ID NO: 67017 - RNA, 12 nt, Artificial Sequence
  Description of Artificial Sequence: Synthetic oligonucleotide
uuuuuaugugga

SEQ ID NO: 67018 - RNA, 11 nt, Artificial Sequence
  Description of Artificial Sequence: Synthetic oligonucleotide
gaauugguaga

SEQ ID NO: 67019 - RNA, 12 nt, Artificial Sequence
  Description of Artificial Sequence: Synthetic oligonucleotide
uagacuuggaga

SEQ ID NO: 67020 - RNA, 12 nt, Artificial Sequence
  Description of Artificial Sequence: Synthetic oligonucleotide
uacaguauucca

SEQ ID NO: 67021 - RNA, 14 nt, Artificial Sequence
  Description of Artificial Sequence: Synthetic oligonucleotide
cacugaugaauuaa

SEQ ID NO: 67022 - RNA, 11 nt, Artificial Sequence
  Description of Artificial Sequence: Synthetic oligonucleotide
cacaucaucac

SEQ ID NO: 67023 - RNA, 12 nt, Artificial Sequence
  Description of Artificial Sequence: Synthetic oligonucleotide
ucaccaaacaga

SEQ ID NO: 67024 - RNA, 11 nt, Artificial Sequence
  Description of Artificial Sequence: Synthetic oligonucleotide
gaacaugaugg

SEQ ID NO: 67025 - RNA, 11 nt, Artificial Sequence
  Description of Artificial Sequence: Synthetic oligonucleotide
auguagacugc

SEQ ID NO: 67026 - RNA, 12 nt, Artificial Sequence
  Description of Artificial Sequence: Synthetic oligonucleotide
gaucuauuuaug

SEQ ID NO: 67027 - RNA, 11 nt, Artificial Sequence
  Description of Artificial Sequence: Synthetic oligonucleotide
cacuauuauca

SEQ ID NO: 67028 - RNA, 10 nt, Artificial Sequence
  Description of Artificial Sequence: Synthetic oligonucleotide
ucaguucugc

SEQ ID NO: 67029 - RNA, 12 nt, Artificial Sequence
  Description of Artificial Sequence: Synthetic oligonucleotide
gauuaaaccuac

SEQ ID NO: 67030 - RNA, 12 nt, Artificial Sequence
  Description of Artificial Sequence: Synthetic oligonucleotide
uaaaauccuucu

SEQ ID NO: 67031 - RNA, 11 nt, Artificial Sequence
  Description of Artificial Sequence: Synthetic oligonucleotide
augcuguagac

SEQ ID NO: 67032 - RNA, 12 nt, Artificial Sequence
  Description of Artificial Sequence: Synthetic oligonucleotide
ugauaggaauag

SEQ ID NO: 67033 - RNA, 10 nt, Artificial Sequence
  Description of Artificial Sequence: Synthetic oligonucleotide
auggcccuga

SEQ ID NO: 67034 - RNA, 10 nt, Artificial Sequence
  Description of Artificial Sequence: Synthetic oligonucleotide
uccucaagca

SEQ ID NO: 67035 - RNA, 9 nt, Artificial Sequence
  Description of Artificial Sequence: Synthetic oligonucleotide
uucagccca

SEQ ID NO: 67036 - RNA, 10 nt, Artificial Sequence
  Description of Artificial Sequence: Synthetic oligonucleotide
cugcugaacc

SEQ ID NO: 67037 - RNA, 11 nt, Artificial Sequence
  Description of Artificial Sequence: Synthetic oligonucleotide
aguucucuuca

SEQ ID NO: 67038 - RNA, 10 nt, Artificial Sequence
  Description of Artificial Sequence: Synthetic oligonucleotide
cagccuagag

SEQ ID NO: 67039 - RNA, 12 nt, Artificial Sequence
  Description of Artificial Sequence: Synthetic oligonucleotide
ucugugaagugu

SEQ ID NO: 67040 - RNA, 13 nt, Artificial Sequence
  Description of Artificial Sequence: Synthetic oligonucleotide
gagaaaauuucaa

SEQ ID NO: 67041 - RNA, 10 nt, Artificial Sequence
  Description of Artificial Sequence: Synthetic oligonucleotide
auccuccuga

SEQ ID NO: 67042 - RNA, 11 nt, Artificial Sequence
  Description of Artificial Sequence: Synthetic oligonucleotide
ugacaucauau

SEQ ID NO: 67043 - RNA, 12 nt, Artificial Sequence
  Description of Artificial Sequence: Synthetic oligonucleotide
aucuucaucaua

SEQ ID NO: 67044 - RNA, 12 nt, Artificial Sequence
  Description of Artificial Sequence: Synthetic oligonucleotide
acuagcuauuaa

SEQ ID NO: 67045 - RNA, 13 nt, Artificial Sequence
  Description of Artificial Sequence: Synthetic oligonucleotide
cucuacuaaaaau

SEQ ID NO: 67046 - RNA, 11 nt, Artificial Sequence
  Description of Artificial Sequence: Synthetic oligonucleotide
cuaucucgccu

SEQ ID NO: 67047 - RNA, 12 nt, Artificial Sequence
  Description of Artificial Sequence: Synthetic oligonucleotide
uucgguccaguu

SEQ ID NO: 67048 - RNA, 10 nt, Artificial Sequence
  Description of Artificial Sequence: Synthetic oligonucleotide
auguagccgc

SEQ ID NO: 67049 - RNA, 11 nt, Artificial Sequence
  Description of Artificial Sequence: Synthetic oligonucleotide
gaggagacuug

SEQ ID NO: 67050 - RNA, 11 nt, Artificial Sequence
  Description of Artificial Sequence: Synthetic oligonucleotide
aguagugagga

SEQ ID NO: 67051 - RNA, 13 nt, Artificial Sequence
  Description of Artificial Sequence: Synthetic oligonucleotide
agaugaguacaaa

SEQ ID NO: 67052 - RNA, 12 nt, Artificial Sequence
  Description of Artificial Sequence: Synthetic oligonucleotide
uuguuaaugggc

SEQ ID NO: 67053 - RNA, 12 nt, Artificial Sequence
  Description of Artificial Sequence: Synthetic oligonucleotide
uuuuaauuuauu

SEQ ID NO: 67054 - RNA, 11 nt, Artificial Sequence
  Description of Artificial Sequence: Synthetic oligonucleotide
auuuaaauaug

SEQ ID NO: 67055 - RNA, 12 nt, Artificial Sequence
  Description of Artificial Sequence: Synthetic oligonucleotide
auccuuuguuuc

SEQ ID NO: 67056 - RNA, 13 nt, Artificial Sequence
  Description of Artificial Sequence: Synthetic oligonucleotide
gucuaaguguuug

SEQ ID NO: 67057 - RNA, 11 nt, Artificial Sequence
  Description of Artificial Sequence: Synthetic oligonucleotide
ccugugacaaa

SEQ ID NO: 67058 - RNA, 12 nt, Artificial Sequence
  Description of Artificial Sequence: Synthetic oligonucleotide
caggcugaauua

SEQ ID NO: 67059 - RNA, 13 nt, Artificial Sequence
  Description of Artificial Sequence: Synthetic oligonucleotide
ucauucuuacaau

SEQ ID NO: 67060 - RNA, 14 nt, Artificial Sequence
  Description of Artificial Sequence: Synthetic oligonucleotide
cauucuuacaauug

SEQ ID NO: 67061 - RNA, 11 nt, Artificial Sequence
  Description of Artificial Sequence: Synthetic oligonucleotide
agagaguguac

SEQ ID NO: 67062 - RNA, 11 nt, Artificial Sequence
  Description of Artificial Sequence: Synthetic oligonucleotide
gaacucagcag

SEQ ID NO: 67063 - RNA, 12 nt, Artificial Sequence
  Description of Artificial Sequence: Synthetic oligonucleotide
uuauuuucagua

SEQ ID NO: 67064 - RNA, 11 nt, Artificial Sequence
  Description of Artificial Sequence: Synthetic oligonucleotide
cuuaaauggaa

SEQ ID NO: 67065 - RNA, 12 nt, Artificial Sequence
  Description of Artificial Sequence: Synthetic oligonucleotide
gccuaaaauugu

SEQ ID NO: 67066 - RNA, 12 nt, Artificial Sequence
  Description of Artificial Sequence: Synthetic oligonucleotide
acuaacaucugg

SEQ ID NO: 67067 - RNA, 11 nt, Artificial Sequence
  Description of Artificial Sequence: Synthetic oligonucleotide
gacugugagcu

SEQ ID NO: 67068 - RNA, 13 nt, Artificial Sequence
  Description of Artificial Sequence: Synthetic oligonucleotide
gcuuuuuauuaau

SEQ ID NO: 67069 - RNA, 12 nt, Artificial Sequence
  Description of Artificial Sequence: Synthetic oligonucleotide
ucuucuuacauu

SEQ ID NO: 67070 - RNA, 14 nt, Artificial Sequence
  Description of Artificial Sequence: Synthetic oligonucleotide
auuuguaaaaaugu

SEQ ID NO: 67071 - RNA, 14 nt, Artificial Sequence
  Description of Artificial Sequence: Synthetic oligonucleotide
ucuuaauucauauu

SEQ ID NO: 67072 - RNA, 12 nt, Artificial Sequence
  Description of Artificial Sequence: Synthetic oligonucleotide
aacuaaucauga

SEQ ID NO: 67073 - RNA, 11 nt, Artificial Sequence
  Description of Artificial Sequence: Synthetic oligonucleotide
cugcucuuggg

SEQ ID NO: 67074 - RNA, 12 nt, Artificial Sequence
  Description of Artificial Sequence: Synthetic oligonucleotide
aguagcuuugag

SEQ ID NO: 67075 - RNA, 13 nt, Artificial Sequence
  Description of Artificial Sequence: Synthetic oligonucleotide
acguaauauuuca

SEQ ID NO: 67076 - RNA, 12 nt, Artificial Sequence
  Description of Artificial Sequence: Synthetic oligonucleotide
auucucuucacu

SEQ ID NO: 67077 - RNA, 13 nt, Artificial Sequence
  Description of Artificial Sequence: Synthetic oligonucleotide
uaaugcuaagaaa

SEQ ID NO: 67078 - RNA, 11 nt, Artificial Sequence
  Description of Artificial Sequence: Synthetic oligonucleotide
cugaaaaucaa

SEQ ID NO: 67079 - RNA, 13 nt, Artificial Sequence
  Description of Artificial Sequence: Synthetic oligonucleotide
auaugauuacuuu

SEQ ID NO: 67080 - RNA, 13 nt, Artificial Sequence
  Description of Artificial Sequence: Synthetic oligonucleotide
auuuuguucuaca

SEQ ID NO: 67081 - RNA, 11 nt, Artificial Sequence
  Description of Artificial Sequence: Synthetic oligonucleotide
ccgggacucuc

SEQ ID NO: 67082 - RNA, 13 nt, Artificial Sequence
  Description of Artificial Sequence: Synthetic oligonucleotide
cuuuaaaguaaag

SEQ ID NO: 67083 - RNA, 12 nt, Artificial Sequence
  Description of Artificial Sequence: Synthetic oligonucleotide
cuggaagccugg

SEQ ID NO: 67084 - RNA, 13 nt, Artificial Sequence
  Description of Artificial Sequence: Synthetic oligonucleotide
aaacaaaagagag

SEQ ID NO: 67085 - RNA, 12 nt, Artificial Sequence
  Description of Artificial Sequence: Synthetic oligonucleotide
ucaguuaugccg

SEQ ID NO: 67086 - RNA, 12 nt, Artificial Sequence
  Description of Artificial Sequence: Synthetic oligonucleotide
aaaagaagucca

SEQ ID NO: 67087 - RNA, 10 nt, Artificial Sequence
  Description of Artificial Sequence: Synthetic oligonucleotide
ggugagguua

SEQ ID NO: 67088 - RNA, 10 nt, Artificial Sequence
  Description of Artificial Sequence: Synthetic oligonucleotide
ggaagaggac

SEQ ID NO: 67089 - RNA, 12 nt, Artificial Sequence
  Description of Artificial Sequence: Synthetic oligonucleotide
agcaaguauugu

SEQ ID NO: 67090 - RNA, 11 nt, Artificial Sequence
  Description of Artificial Sequence: Synthetic oligonucleotide
uuguagcacuc

SEQ ID NO: 67091 - RNA, 13 nt, Artificial Sequence
  Description of Artificial Sequence: Synthetic oligonucleotide
caaaaccacaaau

SEQ ID NO: 67092 - RNA, 11 nt, Artificial Sequence
  Description of Artificial Sequence: Synthetic oligonucleotide
aagcccauaca

SEQ ID NO: 67093 - RNA, 10 nt, Artificial Sequence
  Description of Artificial Sequence: Synthetic oligonucleotide
gcccauacag

SEQ ID NO: 67094 - RNA, 11 nt, Artificial Sequence
  Description of Artificial Sequence: Synthetic oligonucleotide
agaaaccuucc

SEQ ID NO: 67095 - RNA, 9 nt, Artificial Sequence
  Description of Artificial Sequence: Synthetic oligonucleotide
uauaccuac

SEQ ID NO: 67096 - RNA, 12 nt, Artificial Sequence
  Description of Artificial Sequence: Synthetic oligonucleotide
ccaguuuucgga

SEQ ID NO: 67097 - RNA, 8 nt, Artificial Sequence
  Description of Artificial Sequence: Synthetic oligonucleotide
gaacaggg

SEQ ID NO: 67098 - RNA, 12 nt, Artificial Sequence
  Description of Artificial Sequence: Synthetic oligonucleotide
uaacuuuccagu

SEQ ID NO: 67099 - RNA, 13 nt, Artificial Sequence
  Description of Artificial Sequence: Synthetic oligonucleotide
aaguuugguuuug

SEQ ID NO: 67100 - RNA, 11 nt, Artificial Sequence
  Description of Artificial Sequence: Synthetic oligonucleotide
uucccacugua

SEQ ID NO: 67101 - RNA, 12 nt, Artificial Sequence
  Description of Artificial Sequence: Synthetic oligonucleotide
gauaccauauga

SEQ ID NO: 67102 - RNA, 10 nt, Artificial Sequence
  Description of Artificial Sequence: Synthetic oligonucleotide
acaugggcug

SEQ ID NO: 67103 - RNA, 12 nt, Artificial Sequence
  Description of Artificial Sequence: Synthetic oligonucleotide
aacuuuuucaua

SEQ ID NO: 67104 - RNA, 11 nt, Artificial Sequence
  Description of Artificial Sequence: Synthetic oligonucleotide
augaggccgga

SEQ ID NO: 67105 - RNA, 10 nt, Artificial Sequence
  Description of Artificial Sequence: Synthetic oligonucleotide
cugcauuugu

SEQ ID NO: 67106 - RNA, 12 nt, Artificial Sequence
  Description of Artificial Sequence: Synthetic oligonucleotide
auguuuacuacc

SEQ ID NO: 67107 - RNA, 14 nt, Artificial Sequence
  Description of Artificial Sequence: Synthetic oligonucleotide
auuuuuugaugaaa

SEQ ID NO: 67108 - RNA, 13 nt, Artificial Sequence
  Description of Artificial Sequence: Synthetic oligonucleotide
agugugugaauuu

SEQ ID NO: 67109 - RNA, 12 nt, Artificial Sequence
  Description of Artificial Sequence: Synthetic oligonucleotide
agcaauguaugu

SEQ ID NO: 67110 - RNA, 13 nt, Artificial Sequence
  Description of Artificial Sequence: Synthetic oligonucleotide
aagcacauauaua

SEQ ID NO: 67111 - RNA, 13 nt, Artificial Sequence
  Description of Artificial Sequence: Synthetic oligonucleotide
uaauaguuucucc

SEQ ID NO: 67112 - RNA, 12 nt, Artificial Sequence
  Description of Artificial Sequence: Synthetic oligonucleotide
guuucuccaaau

SEQ ID NO: 67113 - RNA, 12 nt, Artificial Sequence
  Description of Artificial Sequence: Synthetic oligonucleotide
acuuccuagaaa

SEQ ID NO: 67114 - RNA, 12 nt, Artificial Sequence
  Description of Artificial Sequence: Synthetic oligonucleotide
acaccauauaug

SEQ ID NO: 67115 - RNA, 13 nt, Artificial Sequence
  Description of Artificial Sequence: Synthetic oligonucleotide
uauaugaauggag

SEQ ID NO: 67116 - RNA, 12 nt, Artificial Sequence
  Description of Artificial Sequence: Synthetic oligonucleotide
cauuuacaggga

SEQ ID NO: 67117 - RNA, 12 nt, Artificial Sequence
  Description of Artificial Sequence: Synthetic oligonucleotide
auuuacagggac

SEQ ID NO: 67118 - RNA, 9 nt, Artificial Sequence
  Description of Artificial Sequence: Synthetic oligonucleotide
gggaccuga

SEQ ID NO: 67119 - RNA, 13 nt, Artificial Sequence
  Description of Artificial Sequence: Synthetic oligonucleotide
guuugacugcauc

SEQ ID NO: 67120 - RNA, 12 nt, Artificial Sequence
  Description of Artificial Sequence: Synthetic oligonucleotide
uugacugcaucg

SEQ ID NO: 67121 - RNA, 11 nt, Artificial Sequence
  Description of Artificial Sequence: Synthetic oligonucleotide
aguucacaggg

SEQ ID NO: 67122 - RNA, 12 nt, Artificial Sequence
  Description of Artificial Sequence: Synthetic oligonucleotide
gcaccucugucc

SEQ ID NO: 67123 - RNA, 14 nt, Artificial Sequence
  Description of Artificial Sequence: Synthetic oligonucleotide
guuugucuuuuuaa

SEQ ID NO: 67124 - RNA, 13 nt, Artificial Sequence
  Description of Artificial Sequence: Synthetic oligonucleotide
uugucuuuuuaag

SEQ ID NO: 67125 - RNA, 12 nt, Artificial Sequence
  Description of Artificial Sequence: Synthetic oligonucleotide
cuaaagguuguc

SEQ ID NO: 67126 - RNA, 11 nt, Artificial Sequence
  Description of Artificial Sequence: Synthetic oligonucleotide
agguugucgac

SEQ ID NO: 67127 - RNA, 12 nt, Artificial Sequence
  Description of Artificial Sequence: Synthetic oligonucleotide
ccuggcaauugu

SEQ ID NO: 67128 - RNA, 11 nt, Artificial Sequence
  Description of Artificial Sequence: Synthetic oligonucleotide
guggugcgagg

SEQ ID NO: 67129 - RNA, 12 nt, Artificial Sequence
  Description of Artificial Sequence: Synthetic oligonucleotide
gagacaugaaau

SEQ ID NO: 67130 - RNA, 12 nt, Artificial Sequence
  Description of Artificial Sequence: Synthetic oligonucleotide
uauauuucucca

SEQ ID NO: 67131 - RNA, 9 nt, Artificial Sequence
  Description of Artificial Sequence: Synthetic oligonucleotide
augaaggcu

SEQ ID NO: 67132 - RNA, 10 nt, Artificial Sequence
  Description of Artificial Sequence: Synthetic oligonucleotide
cuggaguggu

SEQ ID NO: 67133 - RNA, 10 nt, Artificial Sequence
  Description of Artificial Sequence: Synthetic oligonucleotide
ggaagagagg

SEQ ID NO: 67134 - RNA, 11 nt, Artificial Sequence
  Description of Artificial Sequence: Synthetic oligonucleotide
uugcaucgggc

SEQ ID NO: 67135 - RNA, 12 nt, Artificial Sequence
  Description of Artificial Sequence: Synthetic oligonucleotide
uauccuacugug

SEQ ID NO: 67136 - RNA, 12 nt, Artificial Sequence
  Description of Artificial Sequence: Synthetic oligonucleotide
ccuacuguguaa

SEQ ID NO: 67137 - RNA, 11 nt, Artificial Sequence
  Description of Artificial Sequence: Synthetic oligonucleotide
cuuguagugua

SEQ ID NO: 67138 - RNA, 12 nt, Artificial Sequence
  Description of Artificial Sequence: Synthetic oligonucleotide
cuuuguugauug

SEQ ID NO: 67139 - RNA, 13 nt, Artificial Sequence
  Description of Artificial Sequence: Synthetic oligonucleotide
uuguugauugaaa

SEQ ID NO: 67140 - RNA, 14 nt, Artificial Sequence
  Description of Artificial Sequence: Synthetic oligonucleotide
ucuuuuucuuccau

SEQ ID NO: 67141 - RNA, 12 nt, Artificial Sequence
  Description of Artificial Sequence: Synthetic oligonucleotide
aucuuccuucua

SEQ ID NO: 67142 - RNA, 12 nt, Artificial Sequence
  Description of Artificial Sequence: Synthetic oligonucleotide
ugaaugcuucau

SEQ ID NO: 67143 - RNA, 12 nt, Artificial Sequence
  Description of Artificial Sequence: Synthetic oligonucleotide
gaaugcuucaug

SEQ ID NO: 67144 - RNA, 12 nt, Artificial Sequence
  Description of Artificial Sequence: Synthetic oligonucleotide
auucuacuuuga

SEQ ID NO: 67145 - RNA, 12 nt, Artificial Sequence
  Description of Artificial Sequence: Synthetic oligonucleotide
gcaacuacagac

SEQ ID NO: 67146 - RNA, 12 nt, Artificial Sequence
  Description of Artificial Sequence: Synthetic oligonucleotide
accaaggucaac

SEQ ID NO: 67147 - RNA, 12 nt, Artificial Sequence
  Description of Artificial Sequence: Synthetic oligonucleotide
gacuaucucgac

SEQ ID NO: 67148 - RNA, 12 nt, Artificial Sequence
  Description of Artificial Sequence: Synthetic oligonucleotide
accuucccaaac

SEQ ID NO: 67149 - RNA, 13 nt, Artificial Sequence
  Description of Artificial Sequence: Synthetic oligonucleotide
caagcuuagaacu

SEQ ID NO: 67150 - RNA, 14 nt, Artificial Sequence
  Description of Artificial Sequence: Synthetic oligonucleotide
gcuuagaacuuuaa

SEQ ID NO: 67151 - RNA, 13 nt, Artificial Sequence
  Description of Artificial Sequence: Synthetic oligonucleotide
aacuuuaagcaac

SEQ ID NO: 67152 - RNA, 10 nt, Artificial Sequence
  Description of Artificial Sequence: Synthetic oligonucleotide
agaccaccac

SEQ ID NO: 67153 - RNA, 13 nt, Artificial Sequence
  Description of Artificial Sequence: Synthetic oligonucleotide
cgagaaauaaagu

SEQ ID NO: 67154 - RNA, 13 nt, Artificial Sequence
  Description of Artificial Sequence: Synthetic oligonucleotide
gagaaauaaaguu

SEQ ID NO: 67155 - RNA, 11 nt, Artificial Sequence
  Description of Artificial Sequence: Synthetic oligonucleotide
ggaaaugaucc

SEQ ID NO: 67156 - RNA, 12 nt, Artificial Sequence
  Description of Artificial Sequence: Synthetic oligonucleotide
aagaaaugaaac

SEQ ID NO: 67157 - RNA, 12 nt, Artificial Sequence
  Description of Artificial Sequence: Synthetic oligonucleotide
uuuccauccucc

SEQ ID NO: 67158 - RNA, 14 nt, Artificial Sequence
  Description of Artificial Sequence: Synthetic oligonucleotide
cugaaaaucuuuga

SEQ ID NO: 67159 - RNA, 10 nt, Artificial Sequence
  Description of Artificial Sequence: Synthetic oligonucleotide
gccguucagg

SEQ ID NO: 67160 - RNA, 12 nt, Artificial Sequence
  Description of Artificial Sequence: Synthetic oligonucleotide
aggguccagaag

SEQ ID NO: 67161 - RNA, 12 nt, Artificial Sequence
  Description of Artificial Sequence: Synthetic oligonucleotide
caagacugcuug

SEQ ID NO: 67162 - RNA, 12 nt, Artificial Sequence
  Description of Artificial Sequence: Synthetic oligonucleotide
ccaugucuuugg

SEQ ID NO: 67163 - RNA, 10 nt, Artificial Sequence
  Description of Artificial Sequence: Synthetic oligonucleotide
ccugaaacac

SEQ ID NO: 67164 - RNA, 11 nt, Artificial Sequence
  Description of Artificial Sequence: Synthetic oligonucleotide
cucuguaccuc

SEQ ID NO: 67165 - RNA, 11 nt, Artificial Sequence
  Description of Artificial Sequence: Synthetic oligonucleotide
gcaagacaaga

SEQ ID NO: 67166 - RNA, 12 nt, Artificial Sequence
  Description of Artificial Sequence: Synthetic oligonucleotide
caagacaagaaa

SEQ ID NO: 67167 - RNA, 11 nt, Artificial Sequence
  Description of Artificial Sequence: Synthetic oligonucleotide
guacaagaucc

SEQ ID NO: 67168 - RNA, 11 nt, Artificial Sequence
  Description of Artificial Sequence: Synthetic oligonucleotide
guacuugcaga

SEQ ID NO: 67169 - RNA, 12 nt, Artificial Sequence
  Description of Artificial Sequence: Synthetic oligonucleotide
gaucgauacaga

SEQ ID NO: 67170 - RNA, 12 nt, Artificial Sequence
  Description of Artificial Sequence: Synthetic oligonucleotide
auaaaaauaaau

SEQ ID NO: 67171 - RNA, 12 nt, Artificial Sequence
  Description of Artificial Sequence: Synthetic oligonucleotide
aaaaauaaauau

SEQ ID NO: 67172 - RNA, 12 nt, Artificial Sequence
  Description of Artificial Sequence: Synthetic oligonucleotide
uugacugcugug

SEQ ID NO: 67173 - RNA, 12 nt, Artificial Sequence
  Description of Artificial Sequence: Synthetic oligonucleotide
gagaugagagac

SEQ ID NO: 67174 - RNA, 9 nt, Artificial Sequence
  Description of Artificial Sequence: Synthetic oligonucleotide
cccacuugg

SEQ ID NO: 67175 - RNA, 6492 nt, Homo sapiens
uuucugugaagcagaagucugggaaucgaucuggaaauccuccuaauuuuuacucccucuccccgcgacuccugauucauugggaaguuucaaaucagcuauaacuggagagugcugaagauugaugggaucguugccuuaugcauuuguuuugguuuuacaaaaaggaaacuugacagaggaucaugcuguacuuaaaaaauacaacaucacagaggaaguagacugauauuaacaauacuuacuaauaauaacgugccucaugaaauaaagauccgaaaggaauuggaauaaaaauuuccugcaucucaugccaagggggaaacaccagaaucaaguguuccgcgugauugaagacacccccucguccaagaaugcaaagcacauccaauaaaauagcuggauuauaacuccucuucuuucucugggggccguggggugggagcuggggcgagaggugccguuggcccccguugcuuuuccucugggaaggauggcgcacgcugggagaacaggguacgauaaccgggagauagugaugaaguacauccauuauaagcugucgcagaggggcuacgagugggaugcgggagaugugggcgccgcgcccccgggggccgcccccgcaccgggcaucuucuccucccagcccgggcacacgccccauccagccgcaucccgggacccggucgccaggaccucgccgcugcagaccccggcugcccccggcgccgccgcggggccugcgcucagcccggugccaccugugguccaccugacccuccgccaggccggcgacgacuucucccgccgcuaccgccgcgacuucgccgagauguccagccagcugcaccugacgcccuucaccgcgcggggacgcuuugccacggugguggaggagcucuucagggacggggugaacugggggaggauuguggccuucuuugaguucgguggggucauguguguggagagcgucaaccgggagaugucgccccugguggacaacaucgcccuguggaugacugaguaccugaaccggcaccugcacaccuggauccaggauaacggaggcugggaugccuuuguggaacuguacggccccagcaugcggccucuguuugauuucuccuggcugucucugaagacucugcucaguuuggcccuggugggagcuugcaucacccugggugccuaucugggccacaagugaagucaacaugccugccccaaacaaauaugcaaaagguucacuaaagcaguagaaauaauaugcauugucagugauguaccaugaaacaaagcugcaggcuguuuaagaaaaaauaacacacauauaaacaucacacacacagacagacacacacacacacaacaauuaacagucuucaggcaaaacgucgaaucagcuauuuacugccaaagggaaauaucauuuauuuuuuacauuauuaagaaaaaaagauuuauuuauuuaagacagucccaucaaaacuccugucuuuggaaauccgaccacuaauugccaagcaccgcuucguguggcuccaccuggauguucugugccuguaaacauagauucgcuuuccauguuguuggccggaucaccaucugaagagcagacggauggaaaaaggaccugaucauuggggaagcuggcuuucuggcugcuggaggcuggggagaagguguucauucacuugcauuucuuugcccugggggcugugauauuaacagagggaggguuccuguggggggaaguccaugccucccuggccugaagaagagacucuuugcauaugacucacaugaugcauaccuggugggaggaaaagaguugggaacuucagauggaccuaguacccacugagauuuccacgccgaaggacagcgaugggaaaaaugcccuuaaaucauaggaaaguauuuuuuuaagcuaccaauugugccgagaaaagcauuuuagcaauuuauacaauaucauccaguaccuuaagcccugauuguguauauucauauauuuuggauacgcaccccccaacucccaauacuggcucugucugaguaagaaacagaauccucuggaacuugaggaagugaacauuucggugacuuccgcaucaggaaggcuagaguuacccagagcaucaggccgccacaagugccugcuuuuaggagaccgaaguccgcagaaccugccugugucccagcuuggaggccugguccuggaacugagccggggcccucacuggccuccuccagggaugaucaacagggcaguguggucuccgaaugucuggaagcugauggagcucagaauuccacugucaagaaagagcaguagagggguguggcugggccugucacccuggggcccuccagguaggcccguuuucacguggagcaugggagccacgacccuucuuaagacauguaucacuguagagggaaggaacagaggcccugggcccuuccuaucagaaggacauggugaaggcugggaacgugaggagaggcaauggccacggcccauuuuggcuguagcacauggcacguuggcuguguggccuuggcccaccugugaguuuaaagcaaggcuuuaaaugacuuuggagagggucacaaauccuaaaagaagcauugaagugaggugucauggauuaauugaccccugucuauggaauuacauguaaaacauuaucuugucacuguaguuugguuuuauuugaaaaccugacaaaaaaaaaguuccagguguggaauauggggguuaucuguacauccuggggcauuaaaaaaaaaaucaaugguggggaacuauaaagaaguaacaaaagaagugacaucuucagcaaauaaacuaggaaauuuuuuuuucuuccaguuuagaaucagccuugaaacauugauggaauaacucuguggcauuauugcauuauauaccauuuaucuguauuaacuuuggaauguacucuguucaauguuuaaugcugugguugauauuucgaaagcugcuuuaaaaaaauacaugcaucucagcguuuuuuuguuuuuaauuguauuuaguuauggccuauacacuauuugugagcaaaggugaucguuuucuguuugagauuuuuaucucuugauucuucaaaagcauucugagaaggugagauaagcccugagucucagcuaccuaagaaaaaccuggaugucacuggccacugaggagcuuuguuucaaccaagucaugugcauuuccacgucaacagaauuguuuauugugacaguuauaucuguugucccuuugaccuuguuucuugaagguuuccucgucccugggcaauuccgcauuuaauucaugguauucaggauuacaugcauguuugguuaaacccaugagauucauucaguuaaaaauccagauggcaaaugaccagcagauucaaaucuauggugguuugaccuuuagagaguugcuuuacguggccuguuucaacacagacccacccagagcccuccugcccuccuuccgcgggggcuuucucauggcuguccuucagggucuuccugaaaugcaguggugcuuacgcuccaccaagaaagcaggaaaccugugguaugaagccagaccuccccggcgggccucagggaacagaaugaucagaccuuugaaugauucuaauuuuuaagcaaaauauuauuuuaugaaagguuuacauugucaaagugaugaauauggaauauccaauccugugcugcuauccugccaaaaucauuuuaauggagucaguuugcaguaugcuccacgugguaagauccuccaagcugcuuuagaaguaacaaugaagaacguggacguuuuuaauauaaagccuguuuugucuuuuguuguuguucaaacgggauucacagaguauuugaaaaauguauauauauuaagaggucacgggggcuaauugcuggcuggcugccuuuugcugugggguuuuguuaccugguuuuaauaacaguaaaugugcccagccucuuggccccagaacuguacaguauuguggcugcacuugcucuaagaguaguugauguugcauuuuccuuauuguuaaaaacauguuagaagcaaugaauguauauaaaagccucaacuagucauuuuuuucuccucuucuuuuuuuucauuauaucuaauuauuuugcaguugggcaacagagaaccaucccuauuuuguauugaagagggauucacaucugcaucuuaacugcucuuuaugaaugaaaaaacaguccucuguauguacuccucuuuacacuggccagggucagaguuaaauagaguauaugcacuuuccaaauuggggacaagggcucuaaaaaaagccccaaaaggagaagaacaucugagaaccuccucggcccucccagucccucgcugcacaaauacuccgcaagagaggccagaaugacagcugacagggucuauggccaucgggucgucuccgaagauuuggcaggggcagaaaacucuggcaggcuuaagauuuggaauaaagucacagaauuaaggaagcaccucaauuuaguucaaacaagacgccaacauucucuccacagcucacuuaccucucuguguucagauguggccuuccauuuauaugugaucuuuguuuuauuaguaaaugcuuaucaucuaaagauguagcucuggcccagugggaaaaauuaggaagugauuauaaaucgagaggaguuauaauaaucaagauuaaauguaaauaaucagggcaaucccaacacaugucuagcuuucaccuccaggaucuauugagugaacagaauugcaaauagucucuauuuguaauugaacuuauccuaaaacaaauaguuuauaaaugugaacuuaaacucuaauuaauuccaacuguacuuuuaaggcaguggcuguuuuuagacuuucuuaucacuuauaguuaguaauguacaccuacucuaucagagaaaaacaggaaaggcucgaaauacaagccauucuaaggaaauuagggagucaguugaaauucuauucugaucuuauucuguggugucuuuugcagcccagacaaaugugguuacacacuuuuuaagaaauacaauucuacauugucaagcuuaugaagguuccaaucagaucuuuauuguuauucaauuuggaucuuucagggauuuuuuuuuuaaauuauuaugggacaaaggacauuuguuggaggggugggagggaggaagaauuuuuaaauguaaaacauucccaaguuuggaucagggaguuggaaguuuucagaauaaccagaacuaaggguaugaaggaccuguauuggggucgaugugaugccucugcgaagaaccuugugugacaaaugagaaacauuuugaaguuugugguacgaccuuuagauuccagagacaucagcauggcucaaagugcagcuccguuuggcagugcaaugguauaaauuucaagcuggauaugucuaauggguauuuaaacaauaaaugugcaguuuuaacuaacaggauauuuaaugacaaccuucugguugguagggacaucuguuucuaaauguuuauuauguacaauacagaaaaaaauuuuauaaaauuaagcaaugugaaacugaauuggagagugauaauacaaguccuuuagucuuacccagugaaucauucuguuccaugucuuuggacaaccaugaccuuggacaaucaugaaauaugcaucucacuggaugcaaagaaaaucagauggagcaugaaugguacuguaccgguucaucuggacugccccagaaaaauaacuucaagcaaacauccuaucaacaacaagguuguucugcauaccaagcugagcacagaagaugggaacacugguggaggauggaaaggcucgcucaaucaagaaaauucugagacuauuaauaaauaagacuguaguguagauacugaguaaauccaugcaccuaaaccuuuuggaaaaucugccgugggcccuccagauagcucauuucauuaaguuuuucccuccaagguagaauuugcaagagugacaguggauugcauuucuuuuggggaagcuuucuuuuggugguuuuguuuauuauaccuucuuaaguuuucaaccaagguuugcuuuuguuuugaguuacugggguuauuuuuguuuuaaauaaaaauaaguguacaauaaguguuuuuguauugaaagcuuuuguuaucaagauuuucauacuuuuaccuuccauggcucuuuuuaagauugauacuuuuaagagguggcugauauucugcaacacuguacacauaaaaaauacgguaaggauacuuuacaugguuaagguaaaguaagucuccaguuggccaccauuagcuauaauggcacuuuguuuguguuguuggaaaaagucacauugccauuaaacuuuccuugucugucuaguuaauauugugaagaaaaauaaaguacagugugagauacug

SEQ ID NO: 67176 - RNA, 1207 nt, Homo sapiens
uuucugugaagcagaagucugggaaucgaucuggaaauccuccuaauuuuuacucccucuccccgcgacuccugauucauugggaaguuucaaaucagcuauaacuggagagugcugaagauugaugggaucguugccuuaugcauuuguuuugguuuuacaaaaaggaaacuugacagaggaucaugcuguacuuaaaaaauacaacaucacagaggaaguagacugauauuaacaauacuuacuaauaauaacgugccucaugaaauaaagauccgaaaggaauuggaauaaaaauuuccugcaucucaugccaagggggaaacaccagaaucaaguguuccgcgugauugaagacacccccucguccaagaaugcaaagcacauccaauaaaauagcuggauuauaacuccucuucuuucucugggggccguggggugggagcuggggcgagaggugccguuggcccccguugcuuuuccucugggaaggauggcgcacgcugggagaacaggguacgauaaccgggagauagugaugaaguacauccauuauaagcugucgcagaggggcuacgagugggaugcgggagaugugggcgccgcgcccccgggggccgcccccgcaccgggcaucuucuccucccagcccgggcacacgccccauccagccgcaucccgggacccggucgccaggaccucgccgcugcagaccccggcugcccccggcgccgccgcggggccugcgcucagcccggugccaccugugguccaccugacccuccgccaggccggcgacgacuucucccgccgcuaccgccgcgacuucgccgagauguccagccagcugcaccugacgcccuucaccgcgcggggacgcuuugccacggugguggaggagcucuucagggacggggugaacugggggaggauuguggccuucuuugaguucgguggggucauguguguggagagcgucaaccgggagaugucgccccugguggacaacaucgcccuguggaugacugaguaccugaaccggcaccugcacaccuggauccaggauaacggaggcuggguaggugcacuuggugaugugagucugggcugaggccacagguccgagaugcggggguuggagugcgggugggcuccuggggcaaugggaggcuguggagccggcgaaauaaaaucagaguuguugcua

SEQ ID NO: 67177 - RNA, 19 nt, Artificial Sequence
  Description of Artificial Sequence: Synthetic oligonucleotide
uuucugugaagcagaaguc

SEQ ID NO: 67178 - RNA, 19 nt, Artificial Sequence
  Description of Artificial Sequence: Synthetic oligonucleotide
cugggaaucgaucuggaaa

SEQ ID NO: 67179 - RNA, 19 nt, Artificial Sequence
  Description of Artificial Sequence: Synthetic oligonucleotide
auccuccuaauuuuuacuc

SEQ ID NO: 67180 - RNA, 19 nt, Artificial Sequence
  Description of Artificial Sequence: Synthetic oligonucleotide
cccucuccccgcgacuccu

SEQ ID NO: 67181 - RNA, 19 nt, Artificial Sequence
  Description of Artificial Sequence: Synthetic oligonucleotide
ugauucauugggaaguuuc

SEQ ID NO: 67182 - RNA, 19 nt, Artificial Sequence
  Description of Artificial Sequence: Synthetic oligonucleotide
caaaucagcuauaacugga

SEQ ID NO: 67183 - RNA, 19 nt, Artificial Sequence
  Description of Artificial Sequence: Synthetic oligonucleotide
agagugcugaagauugaug

SEQ ID NO: 67184 - RNA, 19 nt, Artificial Sequence
  Description of Artificial Sequence: Synthetic oligonucleotide
gggaucguugccuuaugca

SEQ ID NO: 67185 - RNA, 19 nt, Artificial Sequence
  Description of Artificial Sequence: Synthetic oligonucleotide
auuuguuuugguuuuacaa

SEQ ID NO: 67186 - RNA, 19 nt, Artificial Sequence
  Description of Artificial Sequence: Synthetic oligonucleotide
aaaaggaaacuugacagag

SEQ ID NO: 67187 - RNA, 19 nt, Artificial Sequence
  Description of Artificial Sequence: Synthetic oligonucleotide
ggaucaugcuguacuuaaa

SEQ ID NO: 67188 - RNA, 19 nt, Artificial Sequence
  Description of Artificial Sequence: Synthetic oligonucleotide
aaaauacaacaucacagag

SEQ ID NO: 67189 - RNA, 19 nt, Artificial Sequence
  Description of Artificial Sequence: Synthetic oligonucleotide
ggaaguagacugauauuaa

SEQ ID NO: 67190 - RNA, 19 nt, Artificial Sequence
  Description of Artificial Sequence: Synthetic oligonucleotide
acaauacuuacuaauaaua

SEQ ID NO: 67191 - RNA, 19 nt, Artificial Sequence
  Description of Artificial Sequence: Synthetic oligonucleotide
aacgugccucaugaaauaa

SEQ ID NO: 67192 - RNA, 19 nt, Artificial Sequence
  Description of Artificial Sequence: Synthetic oligonucleotide
aagauccgaaaggaauugg

SEQ ID NO: 67193 - RNA, 19 nt, Artificial Sequence
  Description of Artificial Sequence: Synthetic oligonucleotide
gaauaaaaauuuccugcau

SEQ ID NO: 67194 - RNA, 19 nt, Artificial Sequence
  Description of Artificial Sequence: Synthetic oligonucleotide
ucucaugccaagggggaaa

SEQ ID NO: 67195 - RNA, 19 nt, Artificial Sequence
  Description of Artificial Sequence: Synthetic oligonucleotide
acaccagaaucaaguguuc

SEQ ID NO: 67196 - RNA, 19 nt, Artificial Sequence
  Description of Artificial Sequence: Synthetic oligonucleotide
ccgcgugauugaagacacc

SEQ ID NO: 67197 - RNA, 19 nt, Artificial Sequence
  Description of Artificial Sequence: Synthetic oligonucleotide
ccccucguccaagaaugca

SEQ ID NO: 67198 - RNA, 19 nt, Artificial Sequence
  Description of Artificial Sequence: Synthetic oligonucleotide
aaagcacauccaauaaaau

SEQ ID NO: 67199 - RNA, 19 nt, Artificial Sequence
  Description of Artificial Sequence: Synthetic oligonucleotide
uagcuggauuauaacuccu

SEQ ID NO: 67200 - RNA, 19 nt, Artificial Sequence
  Description of Artificial Sequence: Synthetic oligonucleotide
ucuucuuucucugggggcc

SEQ ID NO: 67201 - RNA, 19 nt, Artificial Sequence
  Description of Artificial Sequence: Synthetic oligonucleotide
cguggggugggagcugggg

SEQ ID NO: 67202 - RNA, 19 nt, Artificial Sequence
  Description of Artificial Sequence: Synthetic oligonucleotide
gcgagaggugccguuggcc

SEQ ID NO: 67203 - RNA, 19 nt, Artificial Sequence
  Description of Artificial Sequence: Synthetic oligonucleotide
ccccguugcuuuuccucug

SEQ ID NO: 67204 - RNA, 19 nt, Artificial Sequence
  Description of Artificial Sequence: Synthetic oligonucleotide
gggaaggauggcgcacgcu

SEQ ID NO: 67205 - RNA, 19 nt, Artificial Sequence
  Description of Artificial Sequence: Synthetic oligonucleotide
ugggagaacaggguacgau

SEQ ID NO: 67206 - RNA, 19 nt, Artificial Sequence
  Description of Artificial Sequence: Synthetic oligonucleotide
uaaccgggagauagugaug

SEQ ID NO: 67207 - RNA, 19 nt, Artificial Sequence
  Description of Artificial Sequence: Synthetic oligonucleotide
gaaguacauccauuauaag

SEQ ID NO: 67208 - RNA, 19 nt, Artificial Sequence
  Description of Artificial Sequence: Synthetic oligonucleotide
gcugucgcagaggggcuac

SEQ ID NO: 67209 - RNA, 19 nt, Artificial Sequence
  Description of Artificial Sequence: Synthetic oligonucleotide
cgagugggaugcgggagau

SEQ ID NO: 67210 - RNA, 19 nt, Artificial Sequence
  Description of Artificial Sequence: Synthetic oligonucleotide
ugugggcgccgcgcccccg

SEQ ID NO: 67211 - RNA, 19 nt, Artificial Sequence
  Description of Artificial Sequence: Synthetic oligonucleotide
gggggccgcccccgcaccg

SEQ ID NO: 67212 - RNA, 19 nt, Artificial Sequence
  Description of Artificial Sequence: Synthetic oligonucleotide
gggcaucuucuccucccag

SEQ ID NO: 67213 - RNA, 19 nt, Artificial Sequence
  Description of Artificial Sequence: Synthetic oligonucleotide
gcccgggcacacgccccau

SEQ ID NO: 67214 - RNA, 19 nt, Artificial Sequence
  Description of Artificial Sequence: Synthetic oligonucleotide
uccagccgcaucccgggac

SEQ ID NO: 67215 - RNA, 19 nt, Artificial Sequence
  Description of Artificial Sequence: Synthetic oligonucleotide
cccggucgccaggaccucg

SEQ ID NO: 67216 - RNA, 19 nt, Artificial Sequence
  Description of Artificial Sequence: Synthetic oligonucleotide
gccgcugcagaccccggcu

SEQ ID NO: 67217 - RNA, 19 nt, Artificial Sequence
  Description of Artificial Sequence: Synthetic oligonucleotide
ugcccccggcgccgccgcg

SEQ ID NO: 67218 - RNA, 19 nt, Artificial Sequence
  Description of Artificial Sequence: Synthetic oligonucleotide
ggggccugcgcucagcccg

SEQ ID NO: 67219 - RNA, 19 nt, Artificial Sequence
  Description of Artificial Sequence: Synthetic oligonucleotide
ggugccaccugugguccac

SEQ ID NO: 67220 - RNA, 19 nt, Artificial Sequence
  Description of Artificial Sequence: Synthetic oligonucleotide
ccugacccuccgccaggcc

SEQ ID NO: 67221 - RNA, 19 nt, Artificial Sequence
  Description of Artificial Sequence: Synthetic oligonucleotide
cggcgacgacuucucccgc

SEQ ID NO: 67222 - RNA, 19 nt, Artificial Sequence
  Description of Artificial Sequence: Synthetic oligonucleotide
ccgcuaccgccgcgacuuc

SEQ ID NO: 67223 - RNA, 19 nt, Artificial Sequence
  Description of Artificial Sequence: Synthetic oligonucleotide
cgccgagauguccagccag

SEQ ID NO: 67224 - RNA, 19 nt, Artificial Sequence
  Description of Artificial Sequence: Synthetic oligonucleotide
gcugcaccugacgcccuuc

SEQ ID NO: 67225 - RNA, 19 nt, Artificial Sequence
  Description of Artificial Sequence: Synthetic oligonucleotide
caccgcgcggggacgcuuu

SEQ ID NO: 67226 - RNA, 19 nt, Artificial Sequence
  Description of Artificial Sequence: Synthetic oligonucleotide
ugccacggugguggaggag

SEQ ID NO: 67227 - RNA, 19 nt, Artificial Sequence
  Description of Artificial Sequence: Synthetic oligonucleotide
gcucuucagggacggggug

SEQ ID NO: 67228 - RNA, 19 nt, Artificial Sequence
  Description of Artificial Sequence: Synthetic oligonucleotide
gaacugggggaggauugug

SEQ ID NO: 67229 - RNA, 19 nt, Artificial Sequence
  Description of Artificial Sequence: Synthetic oligonucleotide
ggccuucuuugaguucggu

SEQ ID NO: 67230 - RNA, 19 nt, Artificial Sequence
  Description of Artificial Sequence: Synthetic oligonucleotide
uggggucauguguguggag

SEQ ID NO: 67231 - RNA, 19 nt, Artificial Sequence
  Description of Artificial Sequence: Synthetic oligonucleotide
gagcgucaaccgggagaug

SEQ ID NO: 67232 - RNA, 19 nt, Artificial Sequence
  Description of Artificial Sequence: Synthetic oligonucleotide
gucgccccugguggacaac

SEQ ID NO: 67233 - RNA, 19 nt, Artificial Sequence
  Description of Artificial Sequence: Synthetic oligonucleotide
caucgcccuguggaugacu

SEQ ID NO: 67234 - RNA, 19 nt, Artificial Sequence
  Description of Artificial Sequence: Synthetic oligonucleotide
ugaguaccugaaccggcac

SEQ ID NO: 67235 - RNA, 19 nt, Artificial Sequence
  Description of Artificial Sequence: Synthetic oligonucleotide
ccugcacaccuggauccag

SEQ ID NO: 67236 - RNA, 19 nt, Artificial Sequence
  Description of Artificial Sequence: Synthetic oligonucleotide
ggauaacggaggcugggua

SEQ ID NO: 67237 - RNA, 19 nt, Artificial Sequence
  Description of Artificial Sequence: Synthetic oligonucleotide
aggugcacuuggugaugug

SEQ ID NO: 67238 - RNA, 19 nt, Artificial Sequence
  Description of Artificial Sequence: Synthetic oligonucleotide
gagucugggcugaggccac

SEQ ID NO: 67239 - RNA, 19 nt, Artificial Sequence
  Description of Artificial Sequence: Synthetic oligonucleotide
cagguccgagaugcggggg

SEQ ID NO: 67240 - RNA, 19 nt, Artificial Sequence
  Description of Artificial Sequence: Synthetic oligonucleotide
guuggagugcgggugggcu

SEQ ID NO: 67241 - RNA, 19 nt, Artificial Sequence
  Description of Artificial Sequence: Synthetic oligonucleotide
uccuggggcaaugggaggc

SEQ ID NO: 67242 - RNA, 19 nt, Artificial Sequence
  Description of Artificial Sequence: Synthetic oligonucleotide
cuguggagccggcgaaaua

SEQ ID NO: 67243 - RNA, 19 nt, Artificial Sequence
  Description of Artificial Sequence: Synthetic oligonucleotide
aaaaucagaguuguugcua

SEQ ID NO: 67244 - RNA, 19 nt, Artificial Sequence
  Description of Artificial Sequence: Synthetic oligonucleotide
ggauaacggaggcugggau

SEQ ID NO: 67245 - RNA, 19 nt, Artificial Sequence
  Description of Artificial Sequence: Synthetic oligonucleotide
ugccuuuguggaacuguac

SEQ ID NO: 67246 - RNA, 19 nt, Artificial Sequence
  Description of Artificial Sequence: Synthetic oligonucleotide
cggccccagcaugcggccu

SEQ ID NO: 67247 - RNA, 19 nt, Artificial Sequence
  Description of Artificial Sequence: Synthetic oligonucleotide
ucuguuugauuucuccugg

SEQ ID NO: 67248 - RNA, 19 nt, Artificial Sequence
  Description of Artificial Sequence: Synthetic oligonucleotide
gcugucucugaagacucug

SEQ ID NO: 67249 - RNA, 19 nt, Artificial Sequence
  Description of Artificial Sequence: Synthetic oligonucleotide
gcucaguuuggcccuggug

SEQ ID NO: 67250 - RNA, 19 nt, Artificial Sequence
  Description of Artificial Sequence: Synthetic oligonucleotide
gggagcuugcaucacccug

SEQ ID NO: 67251 - RNA, 19 nt, Artificial Sequence
  Description of Artificial Sequence: Synthetic oligonucleotide
gggugccuaucugggccac

SEQ ID NO: 67252 - RNA, 19 nt, Artificial Sequence
  Description of Artificial Sequence: Synthetic oligonucleotide
caagugaagucaacaugcc

SEQ ID NO: 67253 - RNA, 19 nt, Artificial Sequence
  Description of Artificial Sequence: Synthetic oligonucleotide
cugccccaaacaaauaugc

SEQ ID NO: 67254 - RNA, 19 nt, Artificial Sequence
  Description of Artificial Sequence: Synthetic oligonucleotide
caaaagguucacuaaagca

SEQ ID NO: 67255 - RNA, 19 nt, Artificial Sequence
  Description of Artificial Sequence: Synthetic oligonucleotide
aguagaaauaauaugcauu

SEQ ID NO: 67256 - RNA, 19 nt, Artificial Sequence
  Description of Artificial Sequence: Synthetic oligonucleotide
ugucagugauguaccauga

SEQ ID NO: 67257 - RNA, 19 nt, Artificial Sequence
  Description of Artificial Sequence: Synthetic oligonucleotide
aaacaaagcugcaggcugu

SEQ ID NO: 67258 - RNA, 19 nt, Artificial Sequence
  Description of Artificial Sequence: Synthetic oligonucleotide
uuuaagaaaaaauaacaca

SEQ ID NO: 67259 - RNA, 19 nt, Artificial Sequence
  Description of Artificial Sequence: Synthetic oligonucleotide
acauauaaacaucacacac

SEQ ID NO: 67260 - RNA, 19 nt, Artificial Sequence
  Description of Artificial Sequence: Synthetic oligonucleotide
cacagacagacacacacac

SEQ ID NO: 67261 - RNA, 19 nt, Artificial Sequence
  Description of Artificial Sequence: Synthetic oligonucleotide
cacacaacaauuaacaguc

SEQ ID NO: 67262 - RNA, 19 nt, Artificial Sequence
  Description of Artificial Sequence: Synthetic oligonucleotide
cuucaggcaaaacgucgaa

SEQ ID NO: 67263 - RNA, 19 nt, Artificial Sequence
  Description of Artificial Sequence: Synthetic oligonucleotide
aucagcuauuuacugccaa

SEQ ID NO: 67264 - RNA, 19 nt, Artificial Sequence
  Description of Artificial Sequence: Synthetic oligonucleotide
aagggaaauaucauuuauu

SEQ ID NO: 67265 - RNA, 19 nt, Artificial Sequence
  Description of Artificial Sequence: Synthetic oligonucleotide
uuuuuacauuauuaagaaa

SEQ ID NO: 67266 - RNA, 19 nt, Artificial Sequence
  Description of Artificial Sequence: Synthetic oligonucleotide
aaaaagauuuauuuauuua

SEQ ID NO: 67267 - RNA, 19 nt, Artificial Sequence
  Description of Artificial Sequence: Synthetic oligonucleotide
aagacagucccaucaaaac

SEQ ID NO: 67268 - RNA, 19 nt, Artificial Sequence
  Description of Artificial Sequence: Synthetic oligonucleotide
cuccugucuuuggaaaucc

SEQ ID NO: 67269 - RNA, 19 nt, Artificial Sequence
  Description of Artificial Sequence: Synthetic oligonucleotide
cgaccacuaauugccaagc

SEQ ID NO: 67270 - RNA, 19 nt, Artificial Sequence
  Description of Artificial Sequence: Synthetic oligonucleotide
caccgcuucguguggcucc

SEQ ID NO: 67271 - RNA, 19 nt, Artificial Sequence
  Description of Artificial Sequence: Synthetic oligonucleotide
caccuggauguucugugcc

SEQ ID NO: 67272 - RNA, 19 nt, Artificial Sequence
  Description of Artificial Sequence: Synthetic oligonucleotide
cuguaaacauagauucgcu

SEQ ID NO: 67273 - RNA, 19 nt, Artificial Sequence
  Description of Artificial Sequence: Synthetic oligonucleotide
uuuccauguuguuggccgg

SEQ ID NO: 67274 - RNA, 19 nt, Artificial Sequence
  Description of Artificial Sequence: Synthetic oligonucleotide
gaucaccaucugaagagca

SEQ ID NO: 67275 - RNA, 19 nt, Artificial Sequence
  Description of Artificial Sequence: Synthetic oligonucleotide
agacggauggaaaaaggac

SEQ ID NO: 67276 - RNA, 19 nt, Artificial Sequence
  Description of Artificial Sequence: Synthetic oligonucleotide
ccugaucauuggggaagcu

SEQ ID NO: 67277 - RNA, 19 nt, Artificial Sequence
  Description of Artificial Sequence: Synthetic oligonucleotide
uggcuuucuggcugcugga

SEQ ID NO: 67278 - RNA, 19 nt, Artificial Sequence
  Description of Artificial Sequence: Synthetic oligonucleotide
aggcuggggagaagguguu

SEQ ID NO: 67279 - RNA, 19 nt, Artificial Sequence
  Description of Artificial Sequence: Synthetic oligonucleotide
ucauucacuugcauuucuu

SEQ ID NO: 67280 - RNA, 19 nt, Artificial Sequence
  Description of Artificial Sequence: Synthetic oligonucleotide
uugcccugggggcugugau

SEQ ID NO: 67281 - RNA, 19 nt, Artificial Sequence
  Description of Artificial Sequence: Synthetic oligonucleotide
uauuaacagagggaggguu

SEQ ID NO: 67282 - RNA, 19 nt, Artificial Sequence
  Description of Artificial Sequence: Synthetic oligonucleotide
uccuguggggggaagucca

SEQ ID NO: 67283 - RNA, 19 nt, Artificial Sequence
  Description of Artificial Sequence: Synthetic oligonucleotide
augccucccuggccugaag

SEQ ID NO: 67284 - RNA, 19 nt, Artificial Sequence
  Description of Artificial Sequence: Synthetic oligonucleotide
gaagagacucuuugcauau

SEQ ID NO: 67285 - RNA, 19 nt, Artificial Sequence
  Description of Artificial Sequence: Synthetic oligonucleotide
ugacucacaugaugcauac

SEQ ID NO: 67286 - RNA, 19 nt, Artificial Sequence
  Description of Artificial Sequence: Synthetic oligonucleotide
ccuggugggaggaaaagag

SEQ ID NO: 67287 - RNA, 19 nt, Artificial Sequence
  Description of Artificial Sequence: Synthetic oligonucleotide
guugggaacuucagaugga

SEQ ID NO: 67288 - RNA, 19 nt, Artificial Sequence
  Description of Artificial Sequence: Synthetic oligonucleotide
accuaguacccacugagau

SEQ ID NO: 67289 - RNA, 19 nt, Artificial Sequence
  Description of Artificial Sequence: Synthetic oligonucleotide
uuuccacgccgaaggacag

SEQ ID NO: 67290 - RNA, 19 nt, Artificial Sequence
  Description of Artificial Sequence: Synthetic oligonucleotide
gcgaugggaaaaaugcccu

SEQ ID NO: 67291 - RNA, 19 nt, Artificial Sequence
  Description of Artificial Sequence: Synthetic oligonucleotide
uuaaaucauaggaaaguau

SEQ ID NO: 67292 - RNA, 19 nt, Artificial Sequence
  Description of Artificial Sequence: Synthetic oligonucleotide
uuuuuuuaagcuaccaauu

SEQ ID NO: 67293 - RNA, 19 nt, Artificial Sequence
  Description of Artificial Sequence: Synthetic oligonucleotide
ugugccgagaaaagcauuu

SEQ ID NO: 67294 - RNA, 19 nt, Artificial Sequence
  Description of Artificial Sequence: Synthetic oligonucleotide
uuagcaauuuauacaauau

SEQ ID NO: 67295 - RNA, 19 nt, Artificial Sequence
  Description of Artificial Sequence: Synthetic oligonucleotide
ucauccaguaccuuaagcc

SEQ ID NO: 67296 - RNA, 19 nt, Artificial Sequence
  Description of Artificial Sequence: Synthetic oligonucleotide
ccugauuguguauauucau

SEQ ID NO: 67297 - RNA, 19 nt, Artificial Sequence
  Description of Artificial Sequence: Synthetic oligonucleotide
uauauuuuggauacgcacc

SEQ ID NO: 67298 - RNA, 19 nt, Artificial Sequence
  Description of Artificial Sequence: Synthetic oligonucleotide
cccccaacucccaauacug

SEQ ID NO: 67299 - RNA, 19 nt, Artificial Sequence
  Description of Artificial Sequence: Synthetic oligonucleotide
ggcucugucugaguaagaa

SEQ ID NO: 67300 - RNA, 19 nt, Artificial Sequence
  Description of Artificial Sequence: Synthetic oligonucleotide
aacagaauccucuggaacu

SEQ ID NO: 67301 - RNA, 19 nt, Artificial Sequence
  Description of Artificial Sequence: Synthetic oligonucleotide
uugaggaagugaacauuuc

SEQ ID NO: 67302 - RNA, 19 nt, Artificial Sequence
  Description of Artificial Sequence: Synthetic oligonucleotide
cggugacuuccgcaucagg

SEQ ID NO: 67303 - RNA, 19 nt, Artificial Sequence
  Description of Artificial Sequence: Synthetic oligonucleotide
gaaggcuagaguuacccag

SEQ ID NO: 67304 - RNA, 19 nt, Artificial Sequence
  Description of Artificial Sequence: Synthetic oligonucleotide
gagcaucaggccgccacaa

SEQ ID NO: 67305 - RNA, 19 nt, Artificial Sequence
  Description of Artificial Sequence: Synthetic oligonucleotide
agugccugcuuuuaggaga

SEQ ID NO: 67306 - RNA, 19 nt, Artificial Sequence
  Description of Artificial Sequence: Synthetic oligonucleotide
accgaaguccgcagaaccu

SEQ ID NO: 67307 - RNA, 19 nt, Artificial Sequence
  Description of Artificial Sequence: Synthetic oligonucleotide
ugccugugucccagcuugg

SEQ ID NO: 67308 - RNA, 19 nt, Artificial Sequence
  Description of Artificial Sequence: Synthetic oligonucleotide
gaggccugguccuggaacu

SEQ ID NO: 67309 - RNA, 19 nt, Artificial Sequence
  Description of Artificial Sequence: Synthetic oligonucleotide
ugagccggggcccucacug

SEQ ID NO: 67310 - RNA, 19 nt, Artificial Sequence
  Description of Artificial Sequence: Synthetic oligonucleotide
ggccuccuccagggaugau

SEQ ID NO: 67311 - RNA, 19 nt, Artificial Sequence
  Description of Artificial Sequence: Synthetic oligonucleotide
ucaacagggcagugugguc

SEQ ID NO: 67312 - RNA, 19 nt, Artificial Sequence
  Description of Artificial Sequence: Synthetic oligonucleotide
cuccgaaugucuggaagcu

SEQ ID NO: 67313 - RNA, 19 nt, Artificial Sequence
  Description of Artificial Sequence: Synthetic oligonucleotide
ugauggagcucagaauucc

SEQ ID NO: 67314 - RNA, 19 nt, Artificial Sequence
  Description of Artificial Sequence: Synthetic oligonucleotide
cacugucaagaaagagcag

SEQ ID NO: 67315 - RNA, 19 nt, Artificial Sequence
  Description of Artificial Sequence: Synthetic oligonucleotide
guagagggguguggcuggg

SEQ ID NO: 67316 - RNA, 19 nt, Artificial Sequence
  Description of Artificial Sequence: Synthetic oligonucleotide
gccugucacccuggggccc

SEQ ID NO: 67317 - RNA, 19 nt, Artificial Sequence
  Description of Artificial Sequence: Synthetic oligonucleotide
cuccagguaggcccguuuu

SEQ ID NO: 67318 - RNA, 19 nt, Artificial Sequence
  Description of Artificial Sequence: Synthetic oligonucleotide
ucacguggagcaugggagc

SEQ ID NO: 67319 - RNA, 19 nt, Artificial Sequence
  Description of Artificial Sequence: Synthetic oligonucleotide
ccacgacccuucuuaagac

SEQ ID NO: 67320 - RNA, 19 nt, Artificial Sequence
  Description of Artificial Sequence: Synthetic oligonucleotide
cauguaucacuguagaggg

SEQ ID NO: 67321 - RNA, 19 nt, Artificial Sequence
  Description of Artificial Sequence: Synthetic oligonucleotide
gaaggaacagaggcccugg

SEQ ID NO: 67322 - RNA, 19 nt, Artificial Sequence
  Description of Artificial Sequence: Synthetic oligonucleotide
ggcccuuccuaucagaagg

SEQ ID NO: 67323 - RNA, 19 nt, Artificial Sequence
  Description of Artificial Sequence: Synthetic oligonucleotide
gacauggugaaggcuggga

SEQ ID NO: 67324 - RNA, 19 nt, Artificial Sequence
  Description of Artificial Sequence: Synthetic oligonucleotide
aacgugaggagaggcaaug

SEQ ID NO: 67325 - RNA, 19 nt, Artificial Sequence
  Description of Artificial Sequence: Synthetic oligonucleotide
ggccacggcccauuuuggc

SEQ ID NO: 67326 - RNA, 19 nt, Artificial Sequence
  Description of Artificial Sequence: Synthetic oligonucleotide
cuguagcacauggcacguu

SEQ ID NO: 67327 - RNA, 19 nt, Artificial Sequence
  Description of Artificial Sequence: Synthetic oligonucleotide
uggcuguguggccuuggcc

SEQ ID NO: 67328 - RNA, 19 nt, Artificial Sequence
  Description of Artificial Sequence: Synthetic oligonucleotide
ccaccugugaguuuaaagc

SEQ ID NO: 67329 - RNA, 19 nt, Artificial Sequence
  Description of Artificial Sequence: Synthetic oligonucleotide
caaggcuuuaaaugacuuu

SEQ ID NO: 67330 - RNA, 19 nt, Artificial Sequence
  Description of Artificial Sequence: Synthetic oligonucleotide
uggagagggucacaaaucc

SEQ ID NO: 67331 - RNA, 19 nt, Artificial Sequence
  Description of Artificial Sequence: Synthetic oligonucleotide
cuaaaagaagcauugaagu

SEQ ID NO: 67332 - RNA, 19 nt, Artificial Sequence
  Description of Artificial Sequence: Synthetic oligonucleotide
ugaggugucauggauuaau

SEQ ID NO: 67333 - RNA, 19 nt, Artificial Sequence
  Description of Artificial Sequence: Synthetic oligonucleotide
uugaccccugucuauggaa

SEQ ID NO: 67334 - RNA, 19 nt, Artificial Sequence
  Description of Artificial Sequence: Synthetic oligonucleotide
auuacauguaaaacauuau

SEQ ID NO: 67335 - RNA, 19 nt, Artificial Sequence
  Description of Artificial Sequence: Synthetic oligonucleotide
ucuugucacuguaguuugg

SEQ ID NO: 67336 - RNA, 19 nt, Artificial Sequence
  Description of Artificial Sequence: Synthetic oligonucleotide
guuuuauuugaaaaccuga

SEQ ID NO: 67337 - RNA, 19 nt, Artificial Sequence
  Description of Artificial Sequence: Synthetic oligonucleotide
acaaaaaaaaaguuccagg

SEQ ID NO: 67338 - RNA, 19 nt, Artificial Sequence
  Description of Artificial Sequence: Synthetic oligonucleotide
guguggaauauggggguua

SEQ ID NO: 67339 - RNA, 19 nt, Artificial Sequence
  Description of Artificial Sequence: Synthetic oligonucleotide
aucuguacauccuggggca

SEQ ID NO: 67340 - RNA, 19 nt, Artificial Sequence
  Description of Artificial Sequence: Synthetic oligonucleotide
gguggggaacuauaaagaa

SEQ ID NO: 67341 - RNA, 19 nt, Artificial Sequence
  Description of Artificial Sequence: Synthetic oligonucleotide
aguaacaaaagaagugaca

SEQ ID NO: 67342 - RNA, 19 nt, Artificial Sequence
  Description of Artificial Sequence: Synthetic oligonucleotide
aucuucagcaaauaaacua

SEQ ID NO: 67343 - RNA, 19 nt, Artificial Sequence
  Description of Artificial Sequence: Synthetic oligonucleotide
aggaaauuuuuuuuucuuc

SEQ ID NO: 67344 - RNA, 19 nt, Artificial Sequence
  Description of Artificial Sequence: Synthetic oligonucleotide
ccaguuuagaaucagccuu

SEQ ID NO: 67345 - RNA, 19 nt, Artificial Sequence
  Description of Artificial Sequence: Synthetic oligonucleotide
ugaaacauugauggaauaa

SEQ ID NO: 67346 - RNA, 19 nt, Artificial Sequence
  Description of Artificial Sequence: Synthetic oligonucleotide
acucuguggcauuauugca

SEQ ID NO: 67347 - RNA, 19 nt, Artificial Sequence
  Description of Artificial Sequence: Synthetic oligonucleotide
auuauauaccauuuaucug

SEQ ID NO: 67348 - RNA, 19 nt, Artificial Sequence
  Description of Artificial Sequence: Synthetic oligonucleotide
guauuaacuuuggaaugua

SEQ ID NO: 67349 - RNA, 19 nt, Artificial Sequence
  Description of Artificial Sequence: Synthetic oligonucleotide
acucuguucaauguuuaau

SEQ ID NO: 67350 - RNA, 19 nt, Artificial Sequence
  Description of Artificial Sequence: Synthetic oligonucleotide
ugcugugguugauauuucg

SEQ ID NO: 67351 - RNA, 19 nt, Artificial Sequence
  Description of Artificial Sequence: Synthetic oligonucleotide
gaaagcugcuuuaaaaaaa

SEQ ID NO: 67352 - RNA, 19 nt, Artificial Sequence
  Description of Artificial Sequence: Synthetic oligonucleotide
auacaugcaucucagcguu

SEQ ID NO: 67353 - RNA, 19 nt, Artificial Sequence
  Description of Artificial Sequence: Synthetic oligonucleotide
uuuuuuguuuuuaauugua

SEQ ID NO: 67354 - RNA, 19 nt, Artificial Sequence
  Description of Artificial Sequence: Synthetic oligonucleotide
auuuaguuauggccuauac

SEQ ID NO: 67355 - RNA, 19 nt, Artificial Sequence
  Description of Artificial Sequence: Synthetic oligonucleotide
cacuauuugugagcaaagg

SEQ ID NO: 67356 - RNA, 19 nt, Artificial Sequence
  Description of Artificial Sequence: Synthetic oligonucleotide
gugaucguuuucuguuuga

SEQ ID NO: 67357 - RNA, 19 nt, Artificial Sequence
  Description of Artificial Sequence: Synthetic oligonucleotide
agauuuuuaucucuugauu

SEQ ID NO: 67358 - RNA, 19 nt, Artificial Sequence
  Description of Artificial Sequence: Synthetic oligonucleotide
ucuucaaaagcauucugag

SEQ ID NO: 67359 - RNA, 19 nt, Artificial Sequence
  Description of Artificial Sequence: Synthetic oligonucleotide
gaaggugagauaagcccug

SEQ ID NO: 67360 - RNA, 19 nt, Artificial Sequence
  Description of Artificial Sequence: Synthetic oligonucleotide
gagucucagcuaccuaaga

SEQ ID NO: 67361 - RNA, 19 nt, Artificial Sequence
  Description of Artificial Sequence: Synthetic oligonucleotide
aaaaaccuggaugucacug

SEQ ID NO: 67362 - RNA, 19 nt, Artificial Sequence
  Description of Artificial Sequence: Synthetic oligonucleotide
ggccacugaggagcuuugu

SEQ ID NO: 67363 - RNA, 19 nt, Artificial Sequence
  Description of Artificial Sequence: Synthetic oligonucleotide
uuucaaccaagucaugugc

SEQ ID NO: 67364 - RNA, 19 nt, Artificial Sequence
  Description of Artificial Sequence: Synthetic oligonucleotide
cauuuccacgucaacagaa

SEQ ID NO: 67365 - RNA, 19 nt, Artificial Sequence
  Description of Artificial Sequence: Synthetic oligonucleotide
auuguuuauugugacaguu

SEQ ID NO: 67366 - RNA, 19 nt, Artificial Sequence
  Description of Artificial Sequence: Synthetic oligonucleotide
uauaucuguugucccuuug

SEQ ID NO: 67367 - RNA, 19 nt, Artificial Sequence
  Description of Artificial Sequence: Synthetic oligonucleotide
gaccuuguuucuugaaggu

SEQ ID NO: 67368 - RNA, 19 nt, Artificial Sequence
  Description of Artificial Sequence: Synthetic oligonucleotide
uuuccucgucccugggcaa

SEQ ID NO: 67369 - RNA, 19 nt, Artificial Sequence
  Description of Artificial Sequence: Synthetic oligonucleotide
auuccgcauuuaauucaug

SEQ ID NO: 67370 - RNA, 19 nt, Artificial Sequence
  Description of Artificial Sequence: Synthetic oligonucleotide
gguauucaggauuacaugc

SEQ ID NO: 67371 - RNA, 19 nt, Artificial Sequence
  Description of Artificial Sequence: Synthetic oligonucleotide
cauguuugguuaaacccau

SEQ ID NO: 67372 - RNA, 19 nt, Artificial Sequence
  Description of Artificial Sequence: Synthetic oligonucleotide
ugagauucauucaguuaaa

SEQ ID NO: 67373 - RNA, 19 nt, Artificial Sequence
  Description of Artificial Sequence: Synthetic oligonucleotide
aaauccagauggcaaauga

SEQ ID NO: 67374 - RNA, 19 nt, Artificial Sequence
  Description of Artificial Sequence: Synthetic oligonucleotide
accagcagauucaaaucua

SEQ ID NO: 67375 - RNA, 19 nt, Artificial Sequence
  Description of Artificial Sequence: Synthetic oligonucleotide
auggugguuugaccuuuag

SEQ ID NO: 67376 - RNA, 19 nt, Artificial Sequence
  Description of Artificial Sequence: Synthetic oligonucleotide
gagaguugcuuuacguggc

SEQ ID NO: 67377 - RNA, 19 nt, Artificial Sequence
  Description of Artificial Sequence: Synthetic oligonucleotide
ccuguuucaacacagaccc

SEQ ID NO: 67378 - RNA, 19 nt, Artificial Sequence
  Description of Artificial Sequence: Synthetic oligonucleotide
cacccagagcccuccugcc

SEQ ID NO: 67379 - RNA, 19 nt, Artificial Sequence
  Description of Artificial Sequence: Synthetic oligonucleotide
ccuccuuccgcgggggcuu

SEQ ID NO: 67380 - RNA, 19 nt, Artificial Sequence
  Description of Artificial Sequence: Synthetic oligonucleotide
uucucauggcuguccuuca

SEQ ID NO: 67381 - RNA, 19 nt, Artificial Sequence
  Description of Artificial Sequence: Synthetic oligonucleotide
agggucuuccugaaaugca

SEQ ID NO: 67382 - RNA, 19 nt, Artificial Sequence
  Description of Artificial Sequence: Synthetic oligonucleotide
aguggugcuuacgcuccac

SEQ ID NO: 67383 - RNA, 19 nt, Artificial Sequence
  Description of Artificial Sequence: Synthetic oligonucleotide
ccaagaaagcaggaaaccu

SEQ ID NO: 67384 - RNA, 19 nt, Artificial Sequence
  Description of Artificial Sequence: Synthetic oligonucleotide
ugugguaugaagccagacc

SEQ ID NO: 67385 - RNA, 19 nt, Artificial Sequence
  Description of Artificial Sequence: Synthetic oligonucleotide
cuccccggcgggccucagg

SEQ ID NO: 67386 - RNA, 19 nt, Artificial Sequence
  Description of Artificial Sequence: Synthetic oligonucleotide
ggaacagaaugaucagacc

SEQ ID NO: 67387 - RNA, 19 nt, Artificial Sequence
  Description of Artificial Sequence: Synthetic oligonucleotide
cuuugaaugauucuaauuu

SEQ ID NO: 67388 - RNA, 19 nt, Artificial Sequence
  Description of Artificial Sequence: Synthetic oligonucleotide
uuuaagcaaaauauuauuu

SEQ ID NO: 67389 - RNA, 19 nt, Artificial Sequence
  Description of Artificial Sequence: Synthetic oligonucleotide
uuaugaaagguuuacauug

SEQ ID NO: 67390 - RNA, 19 nt, Artificial Sequence
  Description of Artificial Sequence: Synthetic oligonucleotide
gucaaagugaugaauaugg

SEQ ID NO: 67391 - RNA, 19 nt, Artificial Sequence
  Description of Artificial Sequence: Synthetic oligonucleotide
gaauauccaauccugugcu

SEQ ID NO: 67392 - RNA, 19 nt, Artificial Sequence
  Description of Artificial Sequence: Synthetic oligonucleotide
ugcuauccugccaaaauca

SEQ ID NO: 67393 - RNA, 19 nt, Artificial Sequence
  Description of Artificial Sequence: Synthetic oligonucleotide
auuuuaauggagucaguuu

SEQ ID NO: 67394 - RNA, 19 nt, Artificial Sequence
  Description of Artificial Sequence: Synthetic oligonucleotide
ugcaguaugcuccacgugg

SEQ ID NO: 67395 - RNA, 19 nt, Artificial Sequence
  Description of Artificial Sequence: Synthetic oligonucleotide
guaagauccuccaagcugc

SEQ ID NO: 67396 - RNA, 19 nt, Artificial Sequence
  Description of Artificial Sequence: Synthetic oligonucleotide
cuuuagaaguaacaaugaa

SEQ ID NO: 67397 - RNA, 19 nt, Artificial Sequence
  Description of Artificial Sequence: Synthetic oligonucleotide
agaacguggacguuuuuaa

SEQ ID NO: 67398 - RNA, 19 nt, Artificial Sequence
  Description of Artificial Sequence: Synthetic oligonucleotide
auauaaagccuguuuuguc

SEQ ID NO: 67399 - RNA, 19 nt, Artificial Sequence
  Description of Artificial Sequence: Synthetic oligonucleotide
cuuuuguuguuguucaaac

SEQ ID NO: 67400 - RNA, 19 nt, Artificial Sequence
  Description of Artificial Sequence: Synthetic oligonucleotide
cgggauucacagaguauuu

SEQ ID NO: 67401 - RNA, 19 nt, Artificial Sequence
  Description of Artificial Sequence: Synthetic oligonucleotide
ugaaaaauguauauauauu

SEQ ID NO: 67402 - RNA, 19 nt, Artificial Sequence
  Description of Artificial Sequence: Synthetic oligonucleotide
uaagaggucacgggggcua

SEQ ID NO: 67403 - RNA, 19 nt, Artificial Sequence
  Description of Artificial Sequence: Synthetic oligonucleotide
aauugcuggcuggcugccu

SEQ ID NO: 67404 - RNA, 19 nt, Artificial Sequence
  Description of Artificial Sequence: Synthetic oligonucleotide
uuuugcugugggguuuugu

SEQ ID NO: 67405 - RNA, 19 nt, Artificial Sequence
  Description of Artificial Sequence: Synthetic oligonucleotide
uuaccugguuuuaauaaca

SEQ ID NO: 67406 - RNA, 19 nt, Artificial Sequence
  Description of Artificial Sequence: Synthetic oligonucleotide
aguaaaugugcccagccuc

SEQ ID NO: 67407 - RNA, 19 nt, Artificial Sequence
  Description of Artificial Sequence: Synthetic oligonucleotide
cuuggccccagaacuguac

SEQ ID NO: 67408 - RNA, 19 nt, Artificial Sequence
  Description of Artificial Sequence: Synthetic oligonucleotide
caguauuguggcugcacuu

SEQ ID NO: 67409 - RNA, 19 nt, Artificial Sequence
  Description of Artificial Sequence: Synthetic oligonucleotide
ugcucuaagaguaguugau

SEQ ID NO: 67410 - RNA, 19 nt, Artificial Sequence
  Description of Artificial Sequence: Synthetic oligonucleotide
uguugcauuuuccuuauug

SEQ ID NO: 67411 - RNA, 19 nt, Artificial Sequence
  Description of Artificial Sequence: Synthetic oligonucleotide
guuaaaaacauguuagaag

SEQ ID NO: 67412 - RNA, 19 nt, Artificial Sequence
  Description of Artificial Sequence: Synthetic oligonucleotide
gcaaugaauguauauaaaa

SEQ ID NO: 67413 - RNA, 19 nt, Artificial Sequence
  Description of Artificial Sequence: Synthetic oligonucleotide
agccucaacuagucauuuu

SEQ ID NO: 67414 - RNA, 19 nt, Artificial Sequence
  Description of Artificial Sequence: Synthetic oligonucleotide
uuuucuccucuucuuuuuu

SEQ ID NO: 67415 - RNA, 19 nt, Artificial Sequence
  Description of Artificial Sequence: Synthetic oligonucleotide
uuucauuauaucuaauuau

SEQ ID NO: 67416 - RNA, 19 nt, Artificial Sequence
  Description of Artificial Sequence: Synthetic oligonucleotide
uuuugcaguugggcaacag

SEQ ID NO: 67417 - RNA, 19 nt, Artificial Sequence
  Description of Artificial Sequence: Synthetic oligonucleotide
gagaaccaucccuauuuug

SEQ ID NO: 67418 - RNA, 19 nt, Artificial Sequence
  Description of Artificial Sequence: Synthetic oligonucleotide
guauugaagagggauucac

SEQ ID NO: 67419 - RNA, 19 nt, Artificial Sequence
  Description of Artificial Sequence: Synthetic oligonucleotide
caucugcaucuuaacugcu

SEQ ID NO: 67420 - RNA, 19 nt, Artificial Sequence
  Description of Artificial Sequence: Synthetic oligonucleotide
ucuuuaugaaugaaaaaac

SEQ ID NO: 67421 - RNA, 19 nt, Artificial Sequence
  Description of Artificial Sequence: Synthetic oligonucleotide
caguccucuguauguacuc

SEQ ID NO: 67422 - RNA, 19 nt, Artificial Sequence
  Description of Artificial Sequence: Synthetic oligonucleotide
ccucuuuacacuggccagg

SEQ ID NO: 67423 - RNA, 19 nt, Artificial Sequence
  Description of Artificial Sequence: Synthetic oligonucleotide
ggucagaguuaaauagagu

SEQ ID NO: 67424 - RNA, 19 nt, Artificial Sequence
  Description of Artificial Sequence: Synthetic oligonucleotide
uauaugcacuuuccaaauu

SEQ ID NO: 67425 - RNA, 19 nt, Artificial Sequence
  Description of Artificial Sequence: Synthetic oligonucleotide
uggggacaagggcucuaaa

SEQ ID NO: 67426 - RNA, 19 nt, Artificial Sequence
  Description of Artificial Sequence: Synthetic oligonucleotide
aaaaagccccaaaaggaga

SEQ ID NO: 67427 - RNA, 19 nt, Artificial Sequence
  Description of Artificial Sequence: Synthetic oligonucleotide
aagaacaucugagaaccuc

SEQ ID NO: 67428 - RNA, 19 nt, Artificial Sequence
  Description of Artificial Sequence: Synthetic oligonucleotide
ccucggcccucccaguccc

SEQ ID NO: 67429 - RNA, 19 nt, Artificial Sequence
  Description of Artificial Sequence: Synthetic oligonucleotide
cucgcugcacaaauacucc

SEQ ID NO: 67430 - RNA, 19 nt, Artificial Sequence
  Description of Artificial Sequence: Synthetic oligonucleotide
cgcaagagaggccagaaug

SEQ ID NO: 67431 - RNA, 19 nt, Artificial Sequence
  Description of Artificial Sequence: Synthetic oligonucleotide
gacagcugacagggucuau

SEQ ID NO: 67432 - RNA, 19 nt, Artificial Sequence
  Description of Artificial Sequence: Synthetic oligonucleotide
uggccaucgggucgucucc

SEQ ID NO: 67433 - RNA, 19 nt, Artificial Sequence
  Description of Artificial Sequence: Synthetic oligonucleotide
cgaagauuuggcaggggca

SEQ ID NO: 67434 - RNA, 19 nt, Artificial Sequence
  Description of Artificial Sequence: Synthetic oligonucleotide
agaaaacucuggcaggcuu

SEQ ID NO: 67435 - RNA, 19 nt, Artificial Sequence
  Description of Artificial Sequence: Synthetic oligonucleotide
uaagauuuggaauaaaguc

SEQ ID NO: 67436 - RNA, 19 nt, Artificial Sequence
  Description of Artificial Sequence: Synthetic oligonucleotide
cacagaauuaaggaagcac

SEQ ID NO: 67437 - RNA, 19 nt, Artificial Sequence
  Description of Artificial Sequence: Synthetic oligonucleotide
ccucaauuuaguucaaaca

SEQ ID NO: 67438 - RNA, 19 nt, Artificial Sequence
  Description of Artificial Sequence: Synthetic oligonucleotide
aagacgccaacauucucuc

SEQ ID NO: 67439 - RNA, 19 nt, Artificial Sequence
  Description of Artificial Sequence: Synthetic oligonucleotide
ccacagcucacuuaccucu

SEQ ID NO: 67440 - RNA, 19 nt, Artificial Sequence
  Description of Artificial Sequence: Synthetic oligonucleotide
ucuguguucagauguggcc

SEQ ID NO: 67441 - RNA, 19 nt, Artificial Sequence
  Description of Artificial Sequence: Synthetic oligonucleotide
cuuccauuuauaugugauc

SEQ ID NO: 67442 - RNA, 19 nt, Artificial Sequence
  Description of Artificial Sequence: Synthetic oligonucleotide
cuuuguuuuauuaguaaau

SEQ ID NO: 67443 - RNA, 19 nt, Artificial Sequence
  Description of Artificial Sequence: Synthetic oligonucleotide
ugcuuaucaucuaaagaug

SEQ ID NO: 67444 - RNA, 19 nt, Artificial Sequence
  Description of Artificial Sequence: Synthetic oligonucleotide
guagcucuggcccaguggg

SEQ ID NO: 67445 - RNA, 19 nt, Artificial Sequence
  Description of Artificial Sequence: Synthetic oligonucleotide
gaaaaauuaggaagugauu

SEQ ID NO: 67446 - RNA, 19 nt, Artificial Sequence
  Description of Artificial Sequence: Synthetic oligonucleotide
uauaaaucgagaggaguua

SEQ ID NO: 67447 - RNA, 19 nt, Artificial Sequence
  Description of Artificial Sequence: Synthetic oligonucleotide
auaauaaucaagauuaaau

SEQ ID NO: 67448 - RNA, 19 nt, Artificial Sequence
  Description of Artificial Sequence: Synthetic oligonucleotide
uguaaauaaucagggcaau

SEQ ID NO: 67449 - RNA, 19 nt, Artificial Sequence
  Description of Artificial Sequence: Synthetic oligonucleotide
ucccaacacaugucuagcu

SEQ ID NO: 67450 - RNA, 19 nt, Artificial Sequence
  Description of Artificial Sequence: Synthetic oligonucleotide
uuucaccuccaggaucuau

SEQ ID NO: 67451 - RNA, 19 nt, Artificial Sequence
  Description of Artificial Sequence: Synthetic oligonucleotide
uugagugaacagaauugca

SEQ ID NO: 67452 - RNA, 19 nt, Artificial Sequence
  Description of Artificial Sequence: Synthetic oligonucleotide
aaauagucucuauuuguaa

SEQ ID NO: 67453 - RNA, 19 nt, Artificial Sequence
  Description of Artificial Sequence: Synthetic oligonucleotide
auugaacuuauccuaaaac

SEQ ID NO: 67454 - RNA, 19 nt, Artificial Sequence
  Description of Artificial Sequence: Synthetic oligonucleotide
caaauaguuuauaaaugug

SEQ ID NO: 67455 - RNA, 19 nt, Artificial Sequence
  Description of Artificial Sequence: Synthetic oligonucleotide
gaacuuaaacucuaauuaa

SEQ ID NO: 67456 - RNA, 19 nt, Artificial Sequence
  Description of Artificial Sequence: Synthetic oligonucleotide
auuccaacuguacuuuuaa

SEQ ID NO: 67457 - RNA, 19 nt, Artificial Sequence
  Description of Artificial Sequence: Synthetic oligonucleotide
aggcaguggcuguuuuuag

SEQ ID NO: 67458 - RNA, 19 nt, Artificial Sequence
  Description of Artificial Sequence: Synthetic oligonucleotide
gacuuucuuaucacuuaua

SEQ ID NO: 67459 - RNA, 19 nt, Artificial Sequence
  Description of Artificial Sequence: Synthetic oligonucleotide
aguuaguaauguacaccua

SEQ ID NO: 67460 - RNA, 19 nt, Artificial Sequence
  Description of Artificial Sequence: Synthetic oligonucleotide
acucuaucagagaaaaaca

SEQ ID NO: 67461 - RNA, 19 nt, Artificial Sequence
  Description of Artificial Sequence: Synthetic oligonucleotide
aggaaaggcucgaaauaca

SEQ ID NO: 67462 - RNA, 19 nt, Artificial Sequence
  Description of Artificial Sequence: Synthetic oligonucleotide
aagccauucuaaggaaauu

SEQ ID NO: 67463 - RNA, 19 nt, Artificial Sequence
  Description of Artificial Sequence: Synthetic oligonucleotide
uagggagucaguugaaauu

SEQ ID NO: 67464 - RNA, 19 nt, Artificial Sequence
  Description of Artificial Sequence: Synthetic oligonucleotide
ucuauucugaucuuauucu

SEQ ID NO: 67465 - RNA, 19 nt, Artificial Sequence
  Description of Artificial Sequence: Synthetic oligonucleotide
uguggugucuuuugcagcc

SEQ ID NO: 67466 - RNA, 19 nt, Artificial Sequence
  Description of Artificial Sequence: Synthetic oligonucleotide
ccagacaaaugugguuaca

SEQ ID NO: 67467 - RNA, 19 nt, Artificial Sequence
  Description of Artificial Sequence: Synthetic oligonucleotide
acacuuuuuaagaaauaca

SEQ ID NO: 67468 - RNA, 19 nt, Artificial Sequence
  Description of Artificial Sequence: Synthetic oligonucleotide
aauucuacauugucaagcu

SEQ ID NO: 67469 - RNA, 19 nt, Artificial Sequence
  Description of Artificial Sequence: Synthetic oligonucleotide
uuaugaagguuccaaucag

SEQ ID NO: 67470 - RNA, 19 nt, Artificial Sequence
  Description of Artificial Sequence: Synthetic oligonucleotide
gaucuuuauuguuauucaa

SEQ ID NO: 67471 - RNA, 19 nt, Artificial Sequence
  Description of Artificial Sequence: Synthetic oligonucleotide
auuuggaucuuucagggau

SEQ ID NO: 67472 - RNA, 19 nt, Artificial Sequence
  Description of Artificial Sequence: Synthetic oligonucleotide
augggacaaaggacauuug

SEQ ID NO: 67473 - RNA, 19 nt, Artificial Sequence
  Description of Artificial Sequence: Synthetic oligonucleotide
guuggaggggugggaggga

SEQ ID NO: 67474 - RNA, 19 nt, Artificial Sequence
  Description of Artificial Sequence: Synthetic oligonucleotide
aggaagaauuuuuaaaugu

SEQ ID NO: 67475 - RNA, 19 nt, Artificial Sequence
  Description of Artificial Sequence: Synthetic oligonucleotide
uaaaacauucccaaguuug

SEQ ID NO: 67476 - RNA, 19 nt, Artificial Sequence
  Description of Artificial Sequence: Synthetic oligonucleotide
ggaucagggaguuggaagu

SEQ ID NO: 67477 - RNA, 19 nt, Artificial Sequence
  Description of Artificial Sequence: Synthetic oligonucleotide
uuuucagaauaaccagaac

SEQ ID NO: 67478 - RNA, 19 nt, Artificial Sequence
  Description of Artificial Sequence: Synthetic oligonucleotide
cuaaggguaugaaggaccu

SEQ ID NO: 67479 - RNA, 19 nt, Artificial Sequence
  Description of Artificial Sequence: Synthetic oligonucleotide
uguauuggggucgauguga

SEQ ID NO: 67480 - RNA, 19 nt, Artificial Sequence
  Description of Artificial Sequence: Synthetic oligonucleotide
augccucugcgaagaaccu

SEQ ID NO: 67481 - RNA, 19 nt, Artificial Sequence
  Description of Artificial Sequence: Synthetic oligonucleotide
uugugugacaaaugagaaa

SEQ ID NO: 67482 - RNA, 19 nt, Artificial Sequence
  Description of Artificial Sequence: Synthetic oligonucleotide
acauuuugaaguuuguggu

SEQ ID NO: 67483 - RNA, 19 nt, Artificial Sequence
  Description of Artificial Sequence: Synthetic oligonucleotide
uacgaccuuuagauuccag

SEQ ID NO: 67484 - RNA, 19 nt, Artificial Sequence
  Description of Artificial Sequence: Synthetic oligonucleotide
gagacaucagcauggcuca

SEQ ID NO: 67485 - RNA, 19 nt, Artificial Sequence
  Description of Artificial Sequence: Synthetic oligonucleotide
aaagugcagcuccguuugg

SEQ ID NO: 67486 - RNA, 19 nt, Artificial Sequence
  Description of Artificial Sequence: Synthetic oligonucleotide
gcagugcaaugguauaaau

SEQ ID NO: 67487 - RNA, 19 nt, Artificial Sequence
  Description of Artificial Sequence: Synthetic oligonucleotide
uuucaagcuggauaugucu

SEQ ID NO: 67488 - RNA, 19 nt, Artificial Sequence
  Description of Artificial Sequence: Synthetic oligonucleotide
uaauggguauuuaaacaau

SEQ ID NO: 67489 - RNA, 19 nt, Artificial Sequence
  Description of Artificial Sequence: Synthetic oligonucleotide
uaaaugugcaguuuuaacu

SEQ ID NO: 67490 - RNA, 19 nt, Artificial Sequence
  Description of Artificial Sequence: Synthetic oligonucleotide
uaacaggauauuuaaugac

SEQ ID NO: 67491 - RNA, 19 nt, Artificial Sequence
  Description of Artificial Sequence: Synthetic oligonucleotide
caaccuucugguugguagg

SEQ ID NO: 67492 - RNA, 19 nt, Artificial Sequence
  Description of Artificial Sequence: Synthetic oligonucleotide
ggacaucuguuucuaaaug

SEQ ID NO: 67493 - RNA, 19 nt, Artificial Sequence
  Description of Artificial Sequence: Synthetic oligonucleotide
guuuauuauguacaauaca

SEQ ID NO: 67494 - RNA, 19 nt, Artificial Sequence
  Description of Artificial Sequence: Synthetic oligonucleotide
agaaaaaaauuuuauaaaa

SEQ ID NO: 67495 - RNA, 19 nt, Artificial Sequence
  Description of Artificial Sequence: Synthetic oligonucleotide
auuaagcaaugugaaacug

SEQ ID NO: 67496 - RNA, 19 nt, Artificial Sequence
  Description of Artificial Sequence: Synthetic oligonucleotide
gaauuggagagugauaaua

SEQ ID NO: 67497 - RNA, 19 nt, Artificial Sequence
  Description of Artificial Sequence: Synthetic oligonucleotide
acaaguccuuuagucuuac

SEQ ID NO: 67498 - RNA, 19 nt, Artificial Sequence
  Description of Artificial Sequence: Synthetic oligonucleotide
cccagugaaucauucuguu

SEQ ID NO: 67499 - RNA, 19 nt, Artificial Sequence
  Description of Artificial Sequence: Synthetic oligonucleotide
uccaugucuuuggacaacc

SEQ ID NO: 67500 - RNA, 19 nt, Artificial Sequence
  Description of Artificial Sequence: Synthetic oligonucleotide
caugaccuuggacaaucau

SEQ ID NO: 67501 - RNA, 19 nt, Artificial Sequence
  Description of Artificial Sequence: Synthetic oligonucleotide
ugaaauaugcaucucacug

SEQ ID NO: 67502 - RNA, 19 nt, Artificial Sequence
  Description of Artificial Sequence: Synthetic oligonucleotide
ggaugcaaagaaaaucaga

SEQ ID NO: 67503 - RNA, 19 nt, Artificial Sequence
  Description of Artificial Sequence: Synthetic oligonucleotide
auggagcaugaaugguacu

SEQ ID NO: 67504 - RNA, 19 nt, Artificial Sequence
  Description of Artificial Sequence: Synthetic oligonucleotide
uguaccgguucaucuggac

SEQ ID NO: 67505 - RNA, 19 nt, Artificial Sequence
  Description of Artificial Sequence: Synthetic oligonucleotide
cugccccagaaaaauaacu

SEQ ID NO: 67506 - RNA, 19 nt, Artificial Sequence
  Description of Artificial Sequence: Synthetic oligonucleotide
uucaagcaaacauccuauc

SEQ ID NO: 67507 - RNA, 19 nt, Artificial Sequence
  Description of Artificial Sequence: Synthetic oligonucleotide
caacaacaagguuguucug

SEQ ID NO: 67508 - RNA, 19 nt, Artificial Sequence
  Description of Artificial Sequence: Synthetic oligonucleotide
gcauaccaagcugagcaca

SEQ ID NO: 67509 - RNA, 19 nt, Artificial Sequence
  Description of Artificial Sequence: Synthetic oligonucleotide
agaagaugggaacacuggu

SEQ ID NO: 67510 - RNA, 19 nt, Artificial Sequence
  Description of Artificial Sequence: Synthetic oligonucleotide
uggaggauggaaaggcucg

SEQ ID NO: 67511 - RNA, 19 nt, Artificial Sequence
  Description of Artificial Sequence: Synthetic oligonucleotide
gcucaaucaagaaaauucu

SEQ ID NO: 67512 - RNA, 19 nt, Artificial Sequence
  Description of Artificial Sequence: Synthetic oligonucleotide
ugagacuauuaauaaauaa

SEQ ID NO: 67513 - RNA, 19 nt, Artificial Sequence
  Description of Artificial Sequence: Synthetic oligonucleotide
agacuguaguguagauacu

SEQ ID NO: 67514 - RNA, 19 nt, Artificial Sequence
  Description of Artificial Sequence: Synthetic oligonucleotide
ugaguaaauccaugcaccu

SEQ ID NO: 67515 - RNA, 19 nt, Artificial Sequence
  Description of Artificial Sequence: Synthetic oligonucleotide
uaaaccuuuuggaaaaucu

SEQ ID NO: 67516 - RNA, 19 nt, Artificial Sequence
  Description of Artificial Sequence: Synthetic oligonucleotide
ugccgugggcccuccagau

SEQ ID NO: 67517 - RNA, 19 nt, Artificial Sequence
  Description of Artificial Sequence: Synthetic oligonucleotide
uagcucauuucauuaaguu

SEQ ID NO: 67518 - RNA, 19 nt, Artificial Sequence
  Description of Artificial Sequence: Synthetic oligonucleotide
uuuucccuccaagguagaa

SEQ ID NO: 67519 - RNA, 19 nt, Artificial Sequence
  Description of Artificial Sequence: Synthetic oligonucleotide
auuugcaagagugacagug

SEQ ID NO: 67520 - RNA, 19 nt, Artificial Sequence
  Description of Artificial Sequence: Synthetic oligonucleotide
ggauugcauuucuuuuggg

SEQ ID NO: 67521 - RNA, 19 nt, Artificial Sequence
  Description of Artificial Sequence: Synthetic oligonucleotide
ggaagcuuucuuuuggugg

SEQ ID NO: 67522 - RNA, 19 nt, Artificial Sequence
  Description of Artificial Sequence: Synthetic oligonucleotide
guuuuguuuauuauaccuu

SEQ ID NO: 67523 - RNA, 19 nt, Artificial Sequence
  Description of Artificial Sequence: Synthetic oligonucleotide
ucuuaaguuuucaaccaag

SEQ ID NO: 67524 - RNA, 19 nt, Artificial Sequence
  Description of Artificial Sequence: Synthetic oligonucleotide
gguuugcuuuuguuuugag

SEQ ID NO: 67525 - RNA, 19 nt, Artificial Sequence
  Description of Artificial Sequence: Synthetic oligonucleotide
guuacugggguuauuuuug

SEQ ID NO: 67526 - RNA, 19 nt, Artificial Sequence
  Description of Artificial Sequence: Synthetic oligonucleotide
guuuuaaauaaaaauaagu

SEQ ID NO: 67527 - RNA, 19 nt, Artificial Sequence
  Description of Artificial Sequence: Synthetic oligonucleotide
uguacaauaaguguuuuug

SEQ ID NO: 67528 - RNA, 19 nt, Artificial Sequence
  Description of Artificial Sequence: Synthetic oligonucleotide
guauugaaagcuuuuguua

SEQ ID NO: 67529 - RNA, 19 nt, Artificial Sequence
  Description of Artificial Sequence: Synthetic oligonucleotide
aucaagauuuucauacuuu

SEQ ID NO: 67530 - RNA, 19 nt, Artificial Sequence
  Description of Artificial Sequence: Synthetic oligonucleotide
uuaccuuccauggcucuuu

SEQ ID NO: 67531 - RNA, 19 nt, Artificial Sequence
  Description of Artificial Sequence: Synthetic oligonucleotide
uuuaagauugauacuuuua

SEQ ID NO: 67532 - RNA, 19 nt, Artificial Sequence
  Description of Artificial Sequence: Synthetic oligonucleotide
aagagguggcugauauucu

SEQ ID NO: 67533 - RNA, 19 nt, Artificial Sequence
  Description of Artificial Sequence: Synthetic oligonucleotide
ugcaacacuguacacauaa

SEQ ID NO: 67534 - RNA, 19 nt, Artificial Sequence
  Description of Artificial Sequence: Synthetic oligonucleotide
aaaaauacgguaaggauac

SEQ ID NO: 67535 - RNA, 19 nt, Artificial Sequence
  Description of Artificial Sequence: Synthetic oligonucleotide
cuuuacaugguuaagguaa

SEQ ID NO: 67536 - RNA, 19 nt, Artificial Sequence
  Description of Artificial Sequence: Synthetic oligonucleotide
aaguaagucuccaguuggc

SEQ ID NO: 67537 - RNA, 19 nt, Artificial Sequence
  Description of Artificial Sequence: Synthetic oligonucleotide
ccaccauuagcuauaaugg

SEQ ID NO: 67538 - RNA, 19 nt, Artificial Sequence
  Description of Artificial Sequence: Synthetic oligonucleotide
gcacuuuguuuguguuguu

SEQ ID NO: 67539 - RNA, 19 nt, Artificial Sequence
  Description of Artificial Sequence: Synthetic oligonucleotide
uggaaaaagucacauugcc

SEQ ID NO: 67540 - RNA, 19 nt, Artificial Sequence
  Description of Artificial Sequence: Synthetic oligonucleotide
cauuaaacuuuccuugucu

SEQ ID NO: 67541 - RNA, 19 nt, Artificial Sequence
  Description of Artificial Sequence: Synthetic oligonucleotide
ugucuaguuaauauuguga

SEQ ID NO: 67542 - RNA, 19 nt, Artificial Sequence
  Description of Artificial Sequence: Synthetic oligonucleotide
aagaaaaauaaaguacagu

SEQ ID NO: 67543 - RNA, 19 nt, Artificial Sequence
  Description of Artificial Sequence: Synthetic oligonucleotide
aguacagugugagauacug

SEQ ID NO: 67544 - RNA, 25 nt, Artificial Sequence
  Description of Artificial Sequence: Synthetic oligonucleotide
uuucugugaagcagaagucugggaa

SEQ ID NO: 67545 - RNA, 25 nt, Artificial Sequence
  Description of Artificial Sequence: Synthetic oligonucleotide
aucgaucuggaaauccuccuaauuu

SEQ ID NO: 67546 - RNA, 25 nt, Artificial Sequence
  Description of Artificial Sequence: Synthetic oligonucleotide
uuuacucccucuccccgcgacuccu

SEQ ID NO: 67547 - RNA, 25 nt, Artificial Sequence
  Description of Artificial Sequence: Synthetic oligonucleotide
ugauucauugggaaguuucaaauca

SEQ ID NO: 67548 - RNA, 25 nt, Artificial Sequence
  Description of Artificial Sequence: Synthetic oligonucleotide
agcuauaacuggagagugcugaaga

SEQ ID NO: 67549 - RNA, 25 nt, Artificial Sequence
  Description of Artificial Sequence: Synthetic oligonucleotide
auugaugggaucguugccuuaugca

SEQ ID NO: 67550 - RNA, 25 nt, Artificial Sequence
  Description of Artificial Sequence: Synthetic oligonucleotide
auuuguuuugguuuuacaaaaagga

SEQ ID NO: 67551 - RNA, 25 nt, Artificial Sequence
  Description of Artificial Sequence: Synthetic oligonucleotide
aaacuugacagaggaucaugcugua

SEQ ID NO: 67552 - RNA, 25 nt, Artificial Sequence
  Description of Artificial Sequence: Synthetic oligonucleotide
acuuaaaaaauacaacaucacagag

SEQ ID NO: 67553 - RNA, 25 nt, Artificial Sequence
  Description of Artificial Sequence: Synthetic oligonucleotide
ggaaguagacugauauuaacaauac

SEQ ID NO: 67554 - RNA, 25 nt, Artificial Sequence
  Description of Artificial Sequence: Synthetic oligonucleotide
cuuacuaauaauaacgugccucaug

SEQ ID NO: 67555 - RNA, 25 nt, Artificial Sequence
  Description of Artificial Sequence: Synthetic oligonucleotide
gaaauaaagauccgaaaggaauugg

SEQ ID NO: 67556 - RNA, 25 nt, Artificial Sequence
  Description of Artificial Sequence: Synthetic oligonucleotide
gaauaaaaauuuccugcaucucaug

SEQ ID NO: 67557 - RNA, 25 nt, Artificial Sequence
  Description of Artificial Sequence: Synthetic oligonucleotide
gccaagggggaaacaccagaaucaa

SEQ ID NO: 67558 - RNA, 25 nt, Artificial Sequence
  Description of Artificial Sequence: Synthetic oligonucleotide
aguguuccgcgugauugaagacacc

SEQ ID NO: 67559 - RNA, 25 nt, Artificial Sequence
  Description of Artificial Sequence: Synthetic oligonucleotide
ccccucguccaagaaugcaaagcac

SEQ ID NO: 67560 - RNA, 25 nt, Artificial Sequence
  Description of Artificial Sequence: Synthetic oligonucleotide
cauccaauaaaauagcuggauuaua

SEQ ID NO: 67561 - RNA, 25 nt, Artificial Sequence
  Description of Artificial Sequence: Synthetic oligonucleotide
aacuccucuucuuucucugggggcc

SEQ ID NO: 67562 - RNA, 25 nt, Artificial Sequence
  Description of Artificial Sequence: Synthetic oligonucleotide
cguggggugggagcuggggcgagag

SEQ ID NO: 67563 - RNA, 25 nt, Artificial Sequence
  Description of Artificial Sequence: Synthetic oligonucleotide
ggugccguuggcccccguugcuuuu

SEQ ID NO: 67564 - RNA, 25 nt, Artificial Sequence
  Description of Artificial Sequence: Synthetic oligonucleotide
uccucugggaaggauggcgcacgcu

SEQ ID NO: 67565 - RNA, 25 nt, Artificial Sequence
  Description of Artificial Sequence: Synthetic oligonucleotide
ugggagaacaggguacgauaaccgg

SEQ ID NO: 67566 - RNA, 25 nt, Artificial Sequence
  Description of Artificial Sequence: Synthetic oligonucleotide
ggagauagugaugaaguacauccau

SEQ ID NO: 67567 - RNA, 25 nt, Artificial Sequence
  Description of Artificial Sequence: Synthetic oligonucleotide
uuauaagcugucgcagaggggcuac

SEQ ID NO: 67568 - RNA, 25 nt, Artificial Sequence
  Description of Artificial Sequence: Synthetic oligonucleotide
cgagugggaugcgggagaugugggc

SEQ ID NO: 67569 - RNA, 25 nt, Artificial Sequence
  Description of Artificial Sequence: Synthetic oligonucleotide
cgccgcgcccccgggggccgccccc

SEQ ID NO: 67570 - RNA, 25 nt, Artificial Sequence
  Description of Artificial Sequence: Synthetic oligonucleotide
cgcaccgggcaucuucuccucccag

SEQ ID NO: 67571 - RNA, 25 nt, Artificial Sequence
  Description of Artificial Sequence: Synthetic oligonucleotide
gcccgggcacacgccccauccagcc

SEQ ID NO: 67572 - RNA, 25 nt, Artificial Sequence
  Description of Artificial Sequence: Synthetic oligonucleotide
cgcaucccgggacccggucgccagg

SEQ ID NO: 67573 - RNA, 25 nt, Artificial Sequence
  Description of Artificial Sequence: Synthetic oligonucleotide
gaccucgccgcugcagaccccggcu

SEQ ID NO: 67574 - RNA, 25 nt, Artificial Sequence
  Description of Artificial Sequence: Synthetic oligonucleotide
ugcccccggcgccgccgcggggccu

SEQ ID NO: 67575 - RNA, 25 nt, Artificial Sequence
  Description of Artificial Sequence: Synthetic oligonucleotide
ugcgcucagcccggugccaccugug

SEQ ID NO: 67576 - RNA, 25 nt, Artificial Sequence
  Description of Artificial Sequence: Synthetic oligonucleotide
gguccaccugacccuccgccaggcc

SEQ ID NO: 67577 - RNA, 25 nt, Artificial Sequence
  Description of Artificial Sequence: Synthetic oligonucleotide
cggcgacgacuucucccgccgcuac

SEQ ID NO: 67578 - RNA, 25 nt, Artificial Sequence
  Description of Artificial Sequence: Synthetic oligonucleotide
ccgccgcgacuucgccgagaugucc

SEQ ID NO: 67579 - RNA, 25 nt, Artificial Sequence
  Description of Artificial Sequence: Synthetic oligonucleotide
cagccagcugcaccugacgcccuuc

SEQ ID NO: 67580 - RNA, 25 nt, Artificial Sequence
  Description of Artificial Sequence: Synthetic oligonucleotide
caccgcgcggggacgcuuugccacg

SEQ ID NO: 67581 - RNA, 25 nt, Artificial Sequence
  Description of Artificial Sequence: Synthetic oligonucleotide
ggugguggaggagcucuucagggac

SEQ ID NO: 67582 - RNA, 25 nt, Artificial Sequence
  Description of Artificial Sequence: Synthetic oligonucleotide
cggggugaacugggggaggauugug

SEQ ID NO: 67583 - RNA, 25 nt, Artificial Sequence
  Description of Artificial Sequence: Synthetic oligonucleotide
ggccuucuuugaguucggugggguc

SEQ ID NO: 67584 - RNA, 25 nt, Artificial Sequence
  Description of Artificial Sequence: Synthetic oligonucleotide
cauguguguggagagcgucaaccgg

SEQ ID NO: 67585 - RNA, 25 nt, Artificial Sequence
  Description of Artificial Sequence: Synthetic oligonucleotide
ggagaugucgccccugguggacaac

SEQ ID NO: 67586 - RNA, 25 nt, Artificial Sequence
  Description of Artificial Sequence: Synthetic oligonucleotide
caucgcccuguggaugacugaguac

SEQ ID NO: 67587 - RNA, 25 nt, Artificial Sequence
  Description of Artificial Sequence: Synthetic oligonucleotide
ccugaaccggcaccugcacaccugg

SEQ ID NO: 67588 - RNA, 25 nt, Artificial Sequence
  Description of Artificial Sequence: Synthetic oligonucleotide
gauccaggauaacggaggcugggua

SEQ ID NO: 67589 - RNA, 25 nt, Artificial Sequence
  Description of Artificial Sequence: Synthetic oligonucleotide
aggugcacuuggugaugugagucug

SEQ ID NO: 67590 - RNA, 25 nt, Artificial Sequence
  Description of Artificial Sequence: Synthetic oligonucleotide
gggcugaggccacagguccgagaug

SEQ ID NO: 67591 - RNA, 25 nt, Artificial Sequence
  Description of Artificial Sequence: Synthetic oligonucleotide
gcggggguuggagugcgggugggcu

SEQ ID NO: 67592 - RNA, 25 nt, Artificial Sequence
  Description of Artificial Sequence: Synthetic oligonucleotide
uccuggggcaaugggaggcugugga

SEQ ID NO: 67593 - RNA, 25 nt, Artificial Sequence
  Description of Artificial Sequence: Synthetic oligonucleotide
agccggcgaaauaaaaucagaguug

SEQ ID NO: 67594 - RNA, 25 nt, Artificial Sequence
  Description of Artificial Sequence: Synthetic oligonucleotide
cgaaauaaaaucagaguuguugcua

SEQ ID NO: 67595 - RNA, 25 nt, Artificial Sequence
  Description of Artificial Sequence: Synthetic oligonucleotide
gauccaggauaacggaggcugggau

SEQ ID NO: 67596 - RNA, 25 nt, Artificial Sequence
  Description of Artificial Sequence: Synthetic oligonucleotide
ugccuuuguggaacuguacggcccc

SEQ ID NO: 67597 - RNA, 25 nt, Artificial Sequence
  Description of Artificial Sequence: Synthetic oligonucleotide
cagcaugcggccucuguuugauuuc

SEQ ID NO: 67598 - RNA, 25 nt, Artificial Sequence
  Description of Artificial Sequence: Synthetic oligonucleotide
cuccuggcugucucugaagacucug

SEQ ID NO: 67599 - RNA, 25 nt, Artificial Sequence
  Description of Artificial Sequence: Synthetic oligonucleotide
gcucaguuuggcccuggugggagcu

SEQ ID NO: 67600 - RNA, 25 nt, Artificial Sequence
  Description of Artificial Sequence: Synthetic oligonucleotide
uugcaucacccugggugccuaucug

SEQ ID NO: 67601 - RNA, 25 nt, Artificial Sequence
  Description of Artificial Sequence: Synthetic oligonucleotide
gggccacaagugaagucaacaugcc

SEQ ID NO: 67602 - RNA, 25 nt, Artificial Sequence
  Description of Artificial Sequence: Synthetic oligonucleotide
cugccccaaacaaauaugcaaaagg

SEQ ID NO: 67603 - RNA, 25 nt, Artificial Sequence
  Description of Artificial Sequence: Synthetic oligonucleotide
guucacuaaagcaguagaaauaaua

SEQ ID NO: 67604 - RNA, 25 nt, Artificial Sequence
  Description of Artificial Sequence: Synthetic oligonucleotide
augcauugucagugauguaccauga

SEQ ID NO: 67605 - RNA, 25 nt, Artificial Sequence
  Description of Artificial Sequence: Synthetic oligonucleotide
aaacaaagcugcaggcuguuuaaga

SEQ ID NO: 67606 - RNA, 25 nt, Artificial Sequence
  Description of Artificial Sequence: Synthetic oligonucleotide
aaaaaauaacacacauauaaacauc

SEQ ID NO: 67607 - RNA, 25 nt, Artificial Sequence
  Description of Artificial Sequence: Synthetic oligonucleotide
cacacacacagacagacacacacac

SEQ ID NO: 67608 - RNA, 25 nt, Artificial Sequence
  Description of Artificial Sequence: Synthetic oligonucleotide
cacacaacaauuaacagucuucagg

SEQ ID NO: 67609 - RNA, 25 nt, Artificial Sequence
  Description of Artificial Sequence: Synthetic oligonucleotide
gcaaaacgucgaaucagcuauuuac

SEQ ID NO: 67610 - RNA, 25 nt, Artificial Sequence
  Description of Artificial Sequence: Synthetic oligonucleotide
cugccaaagggaaauaucauuuauu

SEQ ID NO: 67611 - RNA, 25 nt, Artificial Sequence
  Description of Artificial Sequence: Synthetic oligonucleotide
uuuuuacauuauuaagaaaaaaaga

SEQ ID NO: 67612 - RNA, 25 nt, Artificial Sequence
  Description of Artificial Sequence: Synthetic oligonucleotide
auuuauuuauuuaagacagucccau

SEQ ID NO: 67613 - RNA, 25 nt, Artificial Sequence
  Description of Artificial Sequence: Synthetic oligonucleotide
ucaaaacuccugucuuuggaaaucc

SEQ ID NO: 67614 - RNA, 25 nt, Artificial Sequence
  Description of Artificial Sequence: Synthetic oligonucleotide
cgaccacuaauugccaagcaccgcu

SEQ ID NO: 67615 - RNA, 25 nt, Artificial Sequence
  Description of Artificial Sequence: Synthetic oligonucleotide
uucguguggcuccaccuggauguuc

SEQ ID NO: 67616 - RNA, 25 nt, Artificial Sequence
  Description of Artificial Sequence: Synthetic oligonucleotide
cugugccuguaaacauagauucgcu

SEQ ID NO: 67617 - RNA, 25 nt, Artificial Sequence
  Description of Artificial Sequence: Synthetic oligonucleotide
uuuccauguuguuggccggaucacc

SEQ ID NO: 67618 - RNA, 25 nt, Artificial Sequence
  Description of Artificial Sequence: Synthetic oligonucleotide
caucugaagagcagacggauggaaa

SEQ ID NO: 67619 - RNA, 25 nt, Artificial Sequence
  Description of Artificial Sequence: Synthetic oligonucleotide
aaaggaccugaucauuggggaagcu

SEQ ID NO: 67620 - RNA, 25 nt, Artificial Sequence
  Description of Artificial Sequence: Synthetic oligonucleotide
uggcuuucuggcugcuggaggcugg

SEQ ID NO: 67621 - RNA, 25 nt, Artificial Sequence
  Description of Artificial Sequence: Synthetic oligonucleotide
gggagaagguguucauucacuugca

SEQ ID NO: 67622 - RNA, 25 nt, Artificial Sequence
  Description of Artificial Sequence: Synthetic oligonucleotide
auuucuuugcccugggggcugugau

SEQ ID NO: 67623 - RNA, 25 nt, Artificial Sequence
  Description of Artificial Sequence: Synthetic oligonucleotide
uauuaacagagggaggguuccugug

SEQ ID NO: 67624 - RNA, 25 nt, Artificial Sequence
  Description of Artificial Sequence: Synthetic oligonucleotide
ggggggaaguccaugccucccuggc

SEQ ID NO: 67625 - RNA, 25 nt, Artificial Sequence
  Description of Artificial Sequence: Synthetic oligonucleotide
ccugaagaagagacucuuugcauau

SEQ ID NO: 67626 - RNA, 25 nt, Artificial Sequence
  Description of Artificial Sequence: Synthetic oligonucleotide
ugacucacaugaugcauaccuggug

SEQ ID NO: 67627 - RNA, 25 nt, Artificial Sequence
  Description of Artificial Sequence: Synthetic oligonucleotide
gggaggaaaagaguugggaacuuca

SEQ ID NO: 67628 - RNA, 25 nt, Artificial Sequence
  Description of Artificial Sequence: Synthetic oligonucleotide
agauggaccuaguacccacugagau

SEQ ID NO: 67629 - RNA, 25 nt, Artificial Sequence
  Description of Artificial Sequence: Synthetic oligonucleotide
uuuccacgccgaaggacagcgaugg

SEQ ID NO: 67630 - RNA, 25 nt, Artificial Sequence
  Description of Artificial Sequence: Synthetic oligonucleotide
ggaaaaaugcccuuaaaucauagga

SEQ ID NO: 67631 - RNA, 25 nt, Artificial Sequence
  Description of Artificial Sequence: Synthetic oligonucleotide
aaaguauuuuuuuaagcuaccaauu

SEQ ID NO: 67632 - RNA, 25 nt, Artificial Sequence
  Description of Artificial Sequence: Synthetic oligonucleotide
ugugccgagaaaagcauuuuagcaa

SEQ ID NO: 67633 - RNA, 25 nt, Artificial Sequence
  Description of Artificial Sequence: Synthetic oligonucleotide
auuuauacaauaucauccaguaccu

SEQ ID NO: 67634 - RNA, 25 nt, Artificial Sequence
  Description of Artificial Sequence: Synthetic oligonucleotide
uuaagcccugauuguguauauucau

SEQ ID NO: 67635 - RNA, 25 nt, Artificial Sequence
  Description of Artificial Sequence: Synthetic oligonucleotide
uauauuuuggauacgcaccccccaa

SEQ ID NO: 67636 - RNA, 25 nt, Artificial Sequence
  Description of Artificial Sequence: Synthetic oligonucleotide
acucccaauacuggcucugucugag

SEQ ID NO: 67637 - RNA, 25 nt, Artificial Sequence
  Description of Artificial Sequence: Synthetic oligonucleotide
guaagaaacagaauccucuggaacu

SEQ ID NO: 67638 - RNA, 25 nt, Artificial Sequence
  Description of Artificial Sequence: Synthetic oligonucleotide
uugaggaagugaacauuucggugac

SEQ ID NO: 67639 - RNA, 25 nt, Artificial Sequence
  Description of Artificial Sequence: Synthetic oligonucleotide
cuuccgcaucaggaaggcuagaguu

SEQ ID NO: 67640 - RNA, 25 nt, Artificial Sequence
  Description of Artificial Sequence: Synthetic oligonucleotide
uacccagagcaucaggccgccacaa

SEQ ID NO: 67641 - RNA, 25 nt, Artificial Sequence
  Description of Artificial Sequence: Synthetic oligonucleotide
agugccugcuuuuaggagaccgaag

SEQ ID NO: 67642 - RNA, 25 nt, Artificial Sequence
  Description of Artificial Sequence: Synthetic oligonucleotide
guccgcagaaccugccuguguccca

SEQ ID NO: 67643 - RNA, 25 nt, Artificial Sequence
  Description of Artificial Sequence: Synthetic oligonucleotide
agcuuggaggccugguccuggaacu

SEQ ID NO: 67644 - RNA, 25 nt, Artificial Sequence
  Description of Artificial Sequence: Synthetic oligonucleotide
ugagccggggcccucacuggccucc

SEQ ID NO: 67645 - RNA, 25 nt, Artificial Sequence
  Description of Artificial Sequence: Synthetic oligonucleotide
cuccagggaugaucaacagggcagu

SEQ ID NO: 67646 - RNA, 25 nt, Artificial Sequence
  Description of Artificial Sequence: Synthetic oligonucleotide
uguggucuccgaaugucuggaagcu

SEQ ID NO: 67647 - RNA, 25 nt, Artificial Sequence
  Description of Artificial Sequence: Synthetic oligonucleotide
ugauggagcucagaauuccacuguc

SEQ ID NO: 67648 - RNA, 25 nt, Artificial Sequence
  Description of Artificial Sequence: Synthetic oligonucleotide
caagaaagagcaguagaggggugug

SEQ ID NO: 67649 - RNA, 25 nt, Artificial Sequence
  Description of Artificial Sequence: Synthetic oligonucleotide
ggcugggccugucacccuggggccc

SEQ ID NO: 67650 - RNA, 25 nt, Artificial Sequence
  Description of Artificial Sequence: Synthetic oligonucleotide
cuccagguaggcccguuuucacgug

SEQ ID NO: 67651 - RNA, 25 nt, Artificial Sequence
  Description of Artificial Sequence: Synthetic oligonucleotide
ggagcaugggagccacgacccuucu

SEQ ID NO: 67652 - RNA, 25 nt, Artificial Sequence
  Description of Artificial Sequence: Synthetic oligonucleotide
uuaagacauguaucacuguagaggg

SEQ ID NO: 67653 - RNA, 25 nt, Artificial Sequence
  Description of Artificial Sequence: Synthetic oligonucleotide
gaaggaacagaggcccugggcccuu

SEQ ID NO: 67654 - RNA, 25 nt, Artificial Sequence
  Description of Artificial Sequence: Synthetic oligonucleotide
uccuaucagaaggacauggugaagg

SEQ ID NO: 67655 - RNA, 25 nt, Artificial Sequence
  Description of Artificial Sequence: Synthetic oligonucleotide
gcugggaacgugaggagaggcaaug

SEQ ID NO: 67656 - RNA, 25 nt, Artificial Sequence
  Description of Artificial Sequence: Synthetic oligonucleotide
ggccacggcccauuuuggcuguagc

SEQ ID NO: 67657 - RNA, 25 nt, Artificial Sequence
  Description of Artificial Sequence: Synthetic oligonucleotide
cacauggcacguuggcuguguggcc

SEQ ID NO: 67658 - RNA, 25 nt, Artificial Sequence
  Description of Artificial Sequence: Synthetic oligonucleotide
cuuggcccaccugugaguuuaaagc

SEQ ID NO: 67659 - RNA, 25 nt, Artificial Sequence
  Description of Artificial Sequence: Synthetic oligonucleotide
caaggcuuuaaaugacuuuggagag

SEQ ID NO: 67660 - RNA, 25 nt, Artificial Sequence
  Description of Artificial Sequence: Synthetic oligonucleotide
gggucacaaauccuaaaagaagcau

SEQ ID NO: 67661 - RNA, 25 nt, Artificial Sequence
  Description of Artificial Sequence: Synthetic oligonucleotide
uugaagugaggugucauggauuaau

SEQ ID NO: 67662 - RNA, 25 nt, Artificial Sequence
  Description of Artificial Sequence: Synthetic oligonucleotide
uugaccccugucuauggaauuacau

SEQ ID NO: 67663 - RNA, 25 nt, Artificial Sequence
  Description of Artificial Sequence: Synthetic oligonucleotide
uguaaaacauuaucuugucacugua

SEQ ID NO: 67664 - RNA, 25 nt, Artificial Sequence
  Description of Artificial Sequence: Synthetic oligonucleotide
aguuugguuuuauuugaaaaccuga

SEQ ID NO: 67665 - RNA, 25 nt, Artificial Sequence
  Description of Artificial Sequence: Synthetic oligonucleotide
acaaaaaaaaaguuccaggugugga

SEQ ID NO: 67666 - RNA, 25 nt, Artificial Sequence
  Description of Artificial Sequence: Synthetic oligonucleotide
aauauggggguuaucuguacauccu

SEQ ID NO: 67667 - RNA, 25 nt, Artificial Sequence
  Description of Artificial Sequence: Synthetic oligonucleotide
gguggggaacuauaaagaaguaaca

SEQ ID NO: 67668 - RNA, 25 nt, Artificial Sequence
  Description of Artificial Sequence: Synthetic oligonucleotide
aaaagaagugacaucuucagcaaau

SEQ ID NO: 67669 - RNA, 25 nt, Artificial Sequence
  Description of Artificial Sequence: Synthetic oligonucleotide
uaaacuaggaaauuuuuuuuucuuc

SEQ ID NO: 67670 - RNA, 25 nt, Artificial Sequence
  Description of Artificial Sequence: Synthetic oligonucleotide
ccaguuuagaaucagccuugaaaca

SEQ ID NO: 67671 - RNA, 25 nt, Artificial Sequence
  Description of Artificial Sequence: Synthetic oligonucleotide
auugauggaauaacucuguggcauu

SEQ ID NO: 67672 - RNA, 25 nt, Artificial Sequence
  Description of Artificial Sequence: Synthetic oligonucleotide
uauugcauuauauaccauuuaucug

SEQ ID NO: 67673 - RNA, 25 nt, Artificial Sequence
  Description of Artificial Sequence: Synthetic oligonucleotide
guauuaacuuuggaauguacucugu

SEQ ID NO: 67674 - RNA, 25 nt, Artificial Sequence
  Description of Artificial Sequence: Synthetic oligonucleotide
uucaauguuuaaugcugugguugau

SEQ ID NO: 67675 - RNA, 25 nt, Artificial Sequence
  Description of Artificial Sequence: Synthetic oligonucleotide
uauuucgaaagcugcuuuaaaaaaa

SEQ ID NO: 67676 - RNA, 25 nt, Artificial Sequence
  Description of Artificial Sequence: Synthetic oligonucleotide
auacaugcaucucagcguuuuuuug

SEQ ID NO: 67677 - RNA, 25 nt, Artificial Sequence
  Description of Artificial Sequence: Synthetic oligonucleotide
guuuuuaauuguauuuaguuauggc

SEQ ID NO: 67678 - RNA, 25 nt, Artificial Sequence
  Description of Artificial Sequence: Synthetic oligonucleotide
ccuauacacuauuugugagcaaagg

SEQ ID NO: 67679 - RNA, 25 nt, Artificial Sequence
  Description of Artificial Sequence: Synthetic oligonucleotide
gugaucguuuucuguuugagauuuu

SEQ ID NO: 67680 - RNA, 25 nt, Artificial Sequence
  Description of Artificial Sequence: Synthetic oligonucleotide
uuaucucuugauucuucaaaagcau

SEQ ID NO: 67681 - RNA, 25 nt, Artificial Sequence
  Description of Artificial Sequence: Synthetic oligonucleotide
uucugagaaggugagauaagcccug

SEQ ID NO: 67682 - RNA, 25 nt, Artificial Sequence
  Description of Artificial Sequence: Synthetic oligonucleotide
gagucucagcuaccuaagaaaaacc

SEQ ID NO: 67683 - RNA, 25 nt, Artificial Sequence
  Description of Artificial Sequence: Synthetic oligonucleotide
cuggaugucacuggccacugaggag

SEQ ID NO: 67684 - RNA, 25 nt, Artificial Sequence
  Description of Artificial Sequence: Synthetic oligonucleotide
gcuuuguuucaaccaagucaugugc

SEQ ID NO: 67685 - RNA, 25 nt, Artificial Sequence
  Description of Artificial Sequence: Synthetic oligonucleotide
cauuuccacgucaacagaauuguuu

SEQ ID NO: 67686 - RNA, 25 nt, Artificial Sequence
  Description of Artificial Sequence: Synthetic oligonucleotide
uauugugacaguuauaucuguuguc

SEQ ID NO: 67687 - RNA, 25 nt, Artificial Sequence
  Description of Artificial Sequence: Synthetic oligonucleotide
cccuuugaccuuguuucuugaaggu

SEQ ID NO: 67688 - RNA, 25 nt, Artificial Sequence
  Description of Artificial Sequence: Synthetic oligonucleotide
uuuccucgucccugggcaauuccgc

SEQ ID NO: 67689 - RNA, 25 nt, Artificial Sequence
  Description of Artificial Sequence: Synthetic oligonucleotide
cauuuaauucaugguauucaggauu

SEQ ID NO: 67690 - RNA, 25 nt, Artificial Sequence
  Description of Artificial Sequence: Synthetic oligonucleotide
uacaugcauguuugguuaaacccau

SEQ ID NO: 67691 - RNA, 25 nt, Artificial Sequence
  Description of Artificial Sequence: Synthetic oligonucleotide
ugagauucauucaguuaaaaaucca

SEQ ID NO: 67692 - RNA, 25 nt, Artificial Sequence
  Description of Artificial Sequence: Synthetic oligonucleotide
agauggcaaaugaccagcagauuca

SEQ ID NO: 67693 - RNA, 25 nt, Artificial Sequence
  Description of Artificial Sequence: Synthetic oligonucleotide
aaaucuauggugguuugaccuuuag

SEQ ID NO: 67694 - RNA, 25 nt, Artificial Sequence
  Description of Artificial Sequence: Synthetic oligonucleotide
gagaguugcuuuacguggccuguuu

SEQ ID NO: 67695 - RNA, 25 nt, Artificial Sequence
  Description of Artificial Sequence: Synthetic oligonucleotide
ucaacacagacccacccagagcccu

SEQ ID NO: 67696 - RNA, 25 nt, Artificial Sequence
  Description of Artificial Sequence: Synthetic oligonucleotide
uccugcccuccuuccgcgggggcuu

SEQ ID NO: 67697 - RNA, 25 nt, Artificial Sequence
  Description of Artificial Sequence: Synthetic oligonucleotide
uucucauggcuguccuucagggucu

SEQ ID NO: 67698 - RNA, 25 nt, Artificial Sequence
  Description of Artificial Sequence: Synthetic oligonucleotide
uuccugaaaugcaguggugcuuacg

SEQ ID NO: 67699 - RNA, 25 nt, Artificial Sequence
  Description of Artificial Sequence: Synthetic oligonucleotide
gcuccaccaagaaagcaggaaaccu

SEQ ID NO: 67700 - RNA, 25 nt, Artificial Sequence
  Description of Artificial Sequence: Synthetic oligonucleotide
ugugguaugaagccagaccuccccg

SEQ ID NO: 67701 - RNA, 25 nt, Artificial Sequence
  Description of Artificial Sequence: Synthetic oligonucleotide
ggcgggccucagggaacagaaugau

SEQ ID NO: 67702 - RNA, 25 nt, Artificial Sequence
  Description of Artificial Sequence: Synthetic oligonucleotide
ucagaccuuugaaugauucuaauuu

SEQ ID NO: 67703 - RNA, 25 nt, Artificial Sequence
  Description of Artificial Sequence: Synthetic oligonucleotide
uuuaagcaaaauauuauuuuaugaa

SEQ ID NO: 67704 - RNA, 25 nt, Artificial Sequence
  Description of Artificial Sequence: Synthetic oligonucleotide
aagguuuacauugucaaagugauga

SEQ ID NO: 67705 - RNA, 25 nt, Artificial Sequence
  Description of Artificial Sequence: Synthetic oligonucleotide
aauauggaauauccaauccugugcu

SEQ ID NO: 67706 - RNA, 25 nt, Artificial Sequence
  Description of Artificial Sequence: Synthetic oligonucleotide
ugcuauccugccaaaaucauuuuaa

SEQ ID NO: 67707 - RNA, 25 nt, Artificial Sequence
  Description of Artificial Sequence: Synthetic oligonucleotide
auggagucaguuugcaguaugcucc

SEQ ID NO: 67708 - RNA, 25 nt, Artificial Sequence
  Description of Artificial Sequence: Synthetic oligonucleotide
cacgugguaagauccuccaagcugc

SEQ ID NO: 67709 - RNA, 25 nt, Artificial Sequence
  Description of Artificial Sequence: Synthetic oligonucleotide
cuuuagaaguaacaaugaagaacgu

SEQ ID NO: 67710 - RNA, 25 nt, Artificial Sequence
  Description of Artificial Sequence: Synthetic oligonucleotide
uggacguuuuuaauauaaagccugu

SEQ ID NO: 67711 - RNA, 25 nt, Artificial Sequence
  Description of Artificial Sequence: Synthetic oligonucleotide
uuuugucuuuuguuguuguucaaac

SEQ ID NO: 67712 - RNA, 25 nt, Artificial Sequence
  Description of Artificial Sequence: Synthetic oligonucleotide
cgggauucacagaguauuugaaaaa

SEQ ID NO: 67713 - RNA, 25 nt, Artificial Sequence
  Description of Artificial Sequence: Synthetic oligonucleotide
auguauauauauuaagaggucacgg

SEQ ID NO: 67714 - RNA, 25 nt, Artificial Sequence
  Description of Artificial Sequence: Synthetic oligonucleotide
ggggcuaauugcuggcuggcugccu

SEQ ID NO: 67715 - RNA, 25 nt, Artificial Sequence
  Description of Artificial Sequence: Synthetic oligonucleotide
uuuugcugugggguuuuguuaccug

SEQ ID NO: 67716 - RNA, 25 nt, Artificial Sequence
  Description of Artificial Sequence: Synthetic oligonucleotide
gguuuuaauaacaguaaaugugccc

SEQ ID NO: 67717 - RNA, 25 nt, Artificial Sequence
  Description of Artificial Sequence: Synthetic oligonucleotide
cagccucuuggccccagaacuguac

SEQ ID NO: 67718 - RNA, 25 nt, Artificial Sequence
  Description of Artificial Sequence: Synthetic oligonucleotide
caguauuguggcugcacuugcucua

SEQ ID NO: 67719 - RNA, 25 nt, Artificial Sequence
  Description of Artificial Sequence: Synthetic oligonucleotide
aagaguaguugauguugcauuuucc

SEQ ID NO: 67720 - RNA, 25 nt, Artificial Sequence
  Description of Artificial Sequence: Synthetic oligonucleotide
cuuauuguuaaaaacauguuagaag

SEQ ID NO: 67721 - RNA, 25 nt, Artificial Sequence
  Description of Artificial Sequence: Synthetic oligonucleotide
gcaaugaauguauauaaaagccuca

SEQ ID NO: 67722 - RNA, 25 nt, Artificial Sequence
  Description of Artificial Sequence: Synthetic oligonucleotide
aacuagucauuuuuuucuccucuuc

SEQ ID NO: 67723 - RNA, 25 nt, Artificial Sequence
  Description of Artificial Sequence: Synthetic oligonucleotide
cuuuuuuuucauuauaucuaauuau

SEQ ID NO: 67724 - RNA, 25 nt, Artificial Sequence
  Description of Artificial Sequence: Synthetic oligonucleotide
uuuugcaguugggcaacagagaacc

SEQ ID NO: 67725 - RNA, 25 nt, Artificial Sequence
  Description of Artificial Sequence: Synthetic oligonucleotide
caucccuauuuuguauugaagaggg

SEQ ID NO: 67726 - RNA, 25 nt, Artificial Sequence
  Description of Artificial Sequence: Synthetic oligonucleotide
gauucacaucugcaucuuaacugcu

SEQ ID NO: 67727 - RNA, 25 nt, Artificial Sequence
  Description of Artificial Sequence: Synthetic oligonucleotide
ucuuuaugaaugaaaaaacaguccu

SEQ ID NO: 67728 - RNA, 25 nt, Artificial Sequence
  Description of Artificial Sequence: Synthetic oligonucleotide
ucuguauguacuccucuuuacacug

SEQ ID NO: 67729 - RNA, 25 nt, Artificial Sequence
  Description of Artificial Sequence: Synthetic oligonucleotide
ggccagggucagaguuaaauagagu

SEQ ID NO: 67730 - RNA, 25 nt, Artificial Sequence
  Description of Artificial Sequence: Synthetic oligonucleotide
uauaugcacuuuccaaauuggggac

SEQ ID NO: 67731 - RNA, 25 nt, Artificial Sequence
  Description of Artificial Sequence: Synthetic oligonucleotide
caagggcucuaaaaaaagccccaaa

SEQ ID NO: 67732 - RNA, 25 nt, Artificial Sequence
  Description of Artificial Sequence: Synthetic oligonucleotide
aaggagaagaacaucugagaaccuc

SEQ ID NO: 67733 - RNA, 25 nt, Artificial Sequence
  Description of Artificial Sequence: Synthetic oligonucleotide
ccucggcccucccagucccucgcug

SEQ ID NO: 67734 - RNA, 25 nt, Artificial Sequence
  Description of Artificial Sequence: Synthetic oligonucleotide
gcacaaauacuccgcaagagaggcc

SEQ ID NO: 67735 - RNA, 25 nt, Artificial Sequence
  Description of Artificial Sequence: Synthetic oligonucleotide
cagaaugacagcugacagggucuau

SEQ ID NO: 67736 - RNA, 25 nt, Artificial Sequence
  Description of Artificial Sequence: Synthetic oligonucleotide
uggccaucgggucgucuccgaagau

SEQ ID NO: 67737 - RNA, 25 nt, Artificial Sequence
  Description of Artificial Sequence: Synthetic oligonucleotide
uuuggcaggggcagaaaacucuggc

SEQ ID NO: 67738 - RNA, 25 nt, Artificial Sequence
  Description of Artificial Sequence: Synthetic oligonucleotide
caggcuuaagauuuggaauaaaguc

SEQ ID NO: 67739 - RNA, 25 nt, Artificial Sequence
  Description of Artificial Sequence: Synthetic oligonucleotide
cacagaauuaaggaagcaccucaau

SEQ ID NO: 67740 - RNA, 25 nt, Artificial Sequence
  Description of Artificial Sequence: Synthetic oligonucleotide
uuuaguucaaacaagacgccaacau

SEQ ID NO: 67741 - RNA, 25 nt, Artificial Sequence
  Description of Artificial Sequence: Synthetic oligonucleotide
uucucuccacagcucacuuaccucu

SEQ ID NO: 67742 - RNA, 25 nt, Artificial Sequence
  Description of Artificial Sequence: Synthetic oligonucleotide
ucuguguucagauguggccuuccau

SEQ ID NO: 67743 - RNA, 25 nt, Artificial Sequence
  Description of Artificial Sequence: Synthetic oligonucleotide
uuuauaugugaucuuuguuuuauua

SEQ ID NO: 67744 - RNA, 25 nt, Artificial Sequence
  Description of Artificial Sequence: Synthetic oligonucleotide
aguaaaugcuuaucaucuaaagaug

SEQ ID NO: 67745 - RNA, 25 nt, Artificial Sequence
  Description of Artificial Sequence: Synthetic oligonucleotide
guagcucuggcccagugggaaaaau

SEQ ID NO: 67746 - RNA, 25 nt, Artificial Sequence
  Description of Artificial Sequence: Synthetic oligonucleotide
uuaggaagugauuauaaaucgagag

SEQ ID NO: 67747 - RNA, 25 nt, Artificial Sequence
  Description of Artificial Sequence: Synthetic oligonucleotide
ggaguuauaauaaucaagauuaaau

SEQ ID NO: 67748 - RNA, 25 nt, Artificial Sequence
  Description of Artificial Sequence: Synthetic oligonucleotide
uguaaauaaucagggcaaucccaac

SEQ ID NO: 67749 - RNA, 25 nt, Artificial Sequence
  Description of Artificial Sequence: Synthetic oligonucleotide
cacaugucuagcuuucaccuccagg

SEQ ID NO: 67750 - RNA, 25 nt, Artificial Sequence
  Description of Artificial Sequence: Synthetic oligonucleotide
gaucuauugagugaacagaauugca

SEQ ID NO: 67751 - RNA, 25 nt, Artificial Sequence
  Description of Artificial Sequence: Synthetic oligonucleotide
aaauagucucuauuuguaauugaac

SEQ ID NO: 67752 - RNA, 25 nt, Artificial Sequence
  Description of Artificial Sequence: Synthetic oligonucleotide
cuuauccuaaaacaaauaguuuaua

SEQ ID NO: 67753 - RNA, 25 nt, Artificial Sequence
  Description of Artificial Sequence: Synthetic oligonucleotide
aaaugugaacuuaaacucuaauuaa

SEQ ID NO: 67754 - RNA, 25 nt, Artificial Sequence
  Description of Artificial Sequence: Synthetic oligonucleotide
auuccaacuguacuuuuaaggcagu

SEQ ID NO: 67755 - RNA, 25 nt, Artificial Sequence
  Description of Artificial Sequence: Synthetic oligonucleotide
uggcuguuuuuagacuuucuuauca

SEQ ID NO: 67756 - RNA, 25 nt, Artificial Sequence
  Description of Artificial Sequence: Synthetic oligonucleotide
acuuauaguuaguaauguacaccua

SEQ ID NO: 67757 - RNA, 25 nt, Artificial Sequence
  Description of Artificial Sequence: Synthetic oligonucleotide
acucuaucagagaaaaacaggaaag

SEQ ID NO: 67758 - RNA, 25 nt, Artificial Sequence
  Description of Artificial Sequence: Synthetic oligonucleotide
ggcucgaaauacaagccauucuaag

SEQ ID NO: 67759 - RNA, 25 nt, Artificial Sequence
  Description of Artificial Sequence: Synthetic oligonucleotide
ggaaauuagggagucaguugaaauu

SEQ ID NO: 67760 - RNA, 25 nt, Artificial Sequence
  Description of Artificial Sequence: Synthetic oligonucleotide
ucuauucugaucuuauucuguggug

SEQ ID NO: 67761 - RNA, 25 nt, Artificial Sequence
  Description of Artificial Sequence: Synthetic oligonucleotide
gucuuuugcagcccagacaaaugug

SEQ ID NO: 67762 - RNA, 25 nt, Artificial Sequence
  Description of Artificial Sequence: Synthetic oligonucleotide
gguuacacacuuuuuaagaaauaca

SEQ ID NO: 67763 - RNA, 25 nt, Artificial Sequence
  Description of Artificial Sequence: Synthetic oligonucleotide
aauucuacauugucaagcuuaugaa

SEQ ID NO: 67764 - RNA, 25 nt, Artificial Sequence
  Description of Artificial Sequence: Synthetic oligonucleotide
agguuccaaucagaucuuuauuguu

SEQ ID NO: 67765 - RNA, 25 nt, Artificial Sequence
  Description of Artificial Sequence: Synthetic oligonucleotide
uauucaauuuggaucuuucagggau

SEQ ID NO: 67766 - RNA, 25 nt, Artificial Sequence
  Description of Artificial Sequence: Synthetic oligonucleotide
caaaggacauuuguuggaggggugg

SEQ ID NO: 67767 - RNA, 25 nt, Artificial Sequence
  Description of Artificial Sequence: Synthetic oligonucleotide
ggagggaggaagaauuuuuaaaugu

SEQ ID NO: 67768 - RNA, 25 nt, Artificial Sequence
  Description of Artificial Sequence: Synthetic oligonucleotide
uaaaacauucccaaguuuggaucag

SEQ ID NO: 67769 - RNA, 25 nt, Artificial Sequence
  Description of Artificial Sequence: Synthetic oligonucleotide
gggaguuggaaguuuucagaauaac

SEQ ID NO: 67770 - RNA, 25 nt, Artificial Sequence
  Description of Artificial Sequence: Synthetic oligonucleotide
ccagaacuaaggguaugaaggaccu

SEQ ID NO: 67771 - RNA, 25 nt, Artificial Sequence
  Description of Artificial Sequence: Synthetic oligonucleotide
uguauuggggucgaugugaugccuc

SEQ ID NO: 67772 - RNA, 25 nt, Artificial Sequence
  Description of Artificial Sequence: Synthetic oligonucleotide
cugcgaagaaccuugugugacaaau

SEQ ID NO: 67773 - RNA, 25 nt, Artificial Sequence
  Description of Artificial Sequence: Synthetic oligonucleotide
ugagaaacauuuugaaguuuguggu

SEQ ID NO: 67774 - RNA, 25 nt, Artificial Sequence
  Description of Artificial Sequence: Synthetic oligonucleotide
uacgaccuuuagauuccagagacau

SEQ ID NO: 67775 - RNA, 25 nt, Artificial Sequence
  Description of Artificial Sequence: Synthetic oligonucleotide
ucagcauggcucaaagugcagcucc

SEQ ID NO: 67776 - RNA, 25 nt, Artificial Sequence
  Description of Artificial Sequence: Synthetic oligonucleotide
cguuuggcagugcaaugguauaaau

SEQ ID NO: 67777 - RNA, 25 nt, Artificial Sequence
  Description of Artificial Sequence: Synthetic oligonucleotide
uuucaagcuggauaugucuaauggg

SEQ ID NO: 67778 - RNA, 25 nt, Artificial Sequence
  Description of Artificial Sequence: Synthetic oligonucleotide
guauuuaaacaauaaaugugcaguu

SEQ ID NO: 67779 - RNA, 25 nt, Artificial Sequence
  Description of Artificial Sequence: Synthetic oligonucleotide
uuuaacuaacaggauauuuaaugac

SEQ ID NO: 67780 - RNA, 25 nt, Artificial Sequence
  Description of Artificial Sequence: Synthetic oligonucleotide
caaccuucugguugguagggacauc

SEQ ID NO: 67781 - RNA, 25 nt, Artificial Sequence
  Description of Artificial Sequence: Synthetic oligonucleotide
cuguuucuaaauguuuauuauguac

SEQ ID NO: 67782 - RNA, 25 nt, Artificial Sequence
  Description of Artificial Sequence: Synthetic oligonucleotide
caauacagaaaaaaauuuuauaaaa

SEQ ID NO: 67783 - RNA, 25 nt, Artificial Sequence
  Description of Artificial Sequence: Synthetic oligonucleotide
auuaagcaaugugaaacugaauugg

SEQ ID NO: 67784 - RNA, 25 nt, Artificial Sequence
  Description of Artificial Sequence: Synthetic oligonucleotide
gagagugauaauacaaguccuuuag

SEQ ID NO: 67785 - RNA, 25 nt, Artificial Sequence
  Description of Artificial Sequence: Synthetic oligonucleotide
gucuuacccagugaaucauucuguu

SEQ ID NO: 67786 - RNA, 25 nt, Artificial Sequence
  Description of Artificial Sequence: Synthetic oligonucleotide
uccaugucuuuggacaaccaugacc

SEQ ID NO: 67787 - RNA, 25 nt, Artificial Sequence
  Description of Artificial Sequence: Synthetic oligonucleotide
cuuggacaaucaugaaauaugcauc

SEQ ID NO: 67788 - RNA, 25 nt, Artificial Sequence
  Description of Artificial Sequence: Synthetic oligonucleotide
cucacuggaugcaaagaaaaucaga

SEQ ID NO: 67789 - RNA, 25 nt, Artificial Sequence
  Description of Artificial Sequence: Synthetic oligonucleotide
auggagcaugaaugguacuguaccg

SEQ ID NO: 67790 - RNA, 25 nt, Artificial Sequence
  Description of Artificial Sequence: Synthetic oligonucleotide
gguucaucuggacugccccagaaaa

SEQ ID NO: 67791 - RNA, 25 nt, Artificial Sequence
  Description of Artificial Sequence: Synthetic oligonucleotide
aauaacuucaagcaaacauccuauc

SEQ ID NO: 67792 - RNA, 25 nt, Artificial Sequence
  Description of Artificial Sequence: Synthetic oligonucleotide
caacaacaagguuguucugcauacc

SEQ ID NO: 67793 - RNA, 25 nt, Artificial Sequence
  Description of Artificial Sequence: Synthetic oligonucleotide
caagcugagcacagaagaugggaac

SEQ ID NO: 67794 - RNA, 25 nt, Artificial Sequence
  Description of Artificial Sequence: Synthetic oligonucleotide
cacugguggaggauggaaaggcucg

SEQ ID NO: 67795 - RNA, 25 nt, Artificial Sequence
  Description of Artificial Sequence: Synthetic oligonucleotide
gcucaaucaagaaaauucugagacu

SEQ ID NO: 67796 - RNA, 25 nt, Artificial Sequence
  Description of Artificial Sequence: Synthetic oligonucleotide
uauuaauaaauaagacuguagugua

SEQ ID NO: 67797 - RNA, 25 nt, Artificial Sequence
  Description of Artificial Sequence: Synthetic oligonucleotide
agauacugaguaaauccaugcaccu

SEQ ID NO: 67798 - RNA, 25 nt, Artificial Sequence
  Description of Artificial Sequence: Synthetic oligonucleotide
uaaaccuuuuggaaaaucugccgug

SEQ ID NO: 67799 - RNA, 25 nt, Artificial Sequence
  Description of Artificial Sequence: Synthetic oligonucleotide
gggcccuccagauagcucauuucau

SEQ ID NO: 67800 - RNA, 25 nt, Artificial Sequence
  Description of Artificial Sequence: Synthetic oligonucleotide
uuaaguuuuucccuccaagguagaa

SEQ ID NO: 67801 - RNA, 25 nt, Artificial Sequence
  Description of Artificial Sequence: Synthetic oligonucleotide
auuugcaagagugacaguggauugc

SEQ ID NO: 67802 - RNA, 25 nt, Artificial Sequence
  Description of Artificial Sequence: Synthetic oligonucleotide
cauuucuuuuggggaagcuuucuuu

SEQ ID NO: 67803 - RNA, 25 nt, Artificial Sequence
  Description of Artificial Sequence: Synthetic oligonucleotide
uuggugguuuuguuuauuauaccuu

SEQ ID NO: 67804 - RNA, 25 nt, Artificial Sequence
  Description of Artificial Sequence: Synthetic oligonucleotide
ucuuaaguuuucaaccaagguuugc

SEQ ID NO: 67805 - RNA, 25 nt, Artificial Sequence
  Description of Artificial Sequence: Synthetic oligonucleotide
cuuuuguuuugaguuacugggguua

SEQ ID NO: 67806 - RNA, 25 nt, Artificial Sequence
  Description of Artificial Sequence: Synthetic oligonucleotide
auuuuuguuuuaaauaaaaauaagu

SEQ ID NO: 67807 - RNA, 25 nt, Artificial Sequence
  Description of Artificial Sequence: Synthetic oligonucleotide
uguacaauaaguguuuuuguauuga

SEQ ID NO: 67808 - RNA, 25 nt, Artificial Sequence
  Description of Artificial Sequence: Synthetic oligonucleotide
aaagcuuuuguuaucaagauuuuca

SEQ ID NO: 67809 - RNA, 25 nt, Artificial Sequence
  Description of Artificial Sequence: Synthetic oligonucleotide
auacuuuuaccuuccauggcucuuu

SEQ ID NO: 67810 - RNA, 25 nt, Artificial Sequence
  Description of Artificial Sequence: Synthetic oligonucleotide
uuuaagauugauacuuuuaagaggu

SEQ ID NO: 67811 - RNA, 25 nt, Artificial Sequence
  Description of Artificial Sequence: Synthetic oligonucleotide
uggcugauauucugcaacacuguac

SEQ ID NO: 67812 - RNA, 25 nt, Artificial Sequence
  Description of Artificial Sequence: Synthetic oligonucleotide
cacauaaaaaauacgguaaggauac

SEQ ID NO: 67813 - RNA, 25 nt, Artificial Sequence
  Description of Artificial Sequence: Synthetic oligonucleotide
cuuuacaugguuaagguaaaguaag

SEQ ID NO: 67814 - RNA, 25 nt, Artificial Sequence
  Description of Artificial Sequence: Synthetic oligonucleotide
gucuccaguuggccaccauuagcua

SEQ ID NO: 67815 - RNA, 25 nt, Artificial Sequence
  Description of Artificial Sequence: Synthetic oligonucleotide
auaauggcacuuuguuuguguuguu

SEQ ID NO: 67816 - RNA, 25 nt, Artificial Sequence
  Description of Artificial Sequence: Synthetic oligonucleotide
uggaaaaagucacauugccauuaaa

SEQ ID NO: 67817 - RNA, 25 nt, Artificial Sequence
  Description of Artificial Sequence: Synthetic oligonucleotide
acuuuccuugucugucuaguuaaua

SEQ ID NO: 67818 - RNA, 25 nt, Artificial Sequence
  Description of Artificial Sequence: Synthetic oligonucleotide
auugugaagaaaaauaaaguacagu

SEQ ID NO: 67819 - RNA, 25 nt, Artificial Sequence
  Description of Artificial Sequence: Synthetic oligonucleotide
aaauaaaguacagugugagauacug

SEQ ID NO: 67820 - DNA, 21 bp, Artificial Sequence
  Description of Artificial Sequence: Synthetic oligonucleotide
  Description of Combined DNA/RNA Molecule: Synthetic oligonucleotide
cuacacaaaucagcgauuutt

SEQ ID NO: 67821 - DNA, 21 bp, Artificial Sequence
  Description of Artificial Sequence: Synthetic oligonucleotide
  Description of Combined DNA/RNA Molecule: Synthetic oligonucleotide
aaaucgcugauuuguguagtt

SEQ ID NO: 67822 - DNA, 25 bp, Artificial Sequence
  Description of Artificial Sequence: Synthetic oligonucleotide
  Description of Combined DNA/RNA Molecule: Synthetic oligonucleotide
cuacacaaaucagcgauuuccaugt

SEQ ID NO: 67823 - RNA, 27 nt, Artificial Sequence
  Description of Artificial Sequence: Synthetic oligonucleotide
acauggaaaucgcugauuuguguaguc

SEQ ID NO: 67824 - RNA, 13 nt, Artificial Sequence
  Description of Artificial Sequence: Synthetic oligonucleotide
cuacacaaaucag

SEQ ID NO: 67825 - DNA, 11 bp, Artificial Sequence
  Description of Artificial Sequence: Synthetic oligonucleotide
  Description of Combined DNA/RNA Molecule: Synthetic oligonucleotide
gauuuccaugt

SEQ ID NO: 67826 - DNA, 21 bp, Artificial Sequence
  Description of Artificial Sequence: Synthetic oligonucleotide
  Description of Combined DNA/RNA Molecule: Synthetic oligonucleotide
ggaucuuauuucuucggagtt

SEQ ID NO: 67827 - DNA, 21 bp, Artificial Sequence
  Description of Artificial Sequence: Synthetic oligonucleotide
  Description of Combined DNA/RNA Molecule: Synthetic oligonucleotide
cuccgaagaaauaagaucctt

SEQ ID NO: 67828 - RNA, 11 nt, Artificial Sequence
  Description of Artificial Sequence: Synthetic oligonucleotide
ggaucuuauuu

SEQ ID NO: 67829 - DNA, 10 bp, Artificial Sequence
  Description of Artificial Sequence: Synthetic oligonucleotide
  Description of Combined DNA/RNA Molecule: Synthetic oligonucleotide
cuucggagtt

SEQ ID NO: 67830 - RNA, 27 nt, Artificial Sequence
  Description of Artificial Sequence: Synthetic oligonucleotide
cauugucuccgaagaaauaagauccuu

SEQ ID NO: 67831 - RNA, 8 nt, Artificial Sequence
  Description of Artificial Sequence: Synthetic oligonucleotide
  modified_base (2): LNA-G
ggaucuua

SEQ ID NO: 67832 - DNA, 17 bp, Artificial Sequence
  Description of Artificial Sequence: Synthetic oligonucleotide
  Description of Combined DNA/RNA Molecule: Synthetic oligonucleotide
uuucuucggagacaatg

SEQ ID NO: 67833 - DNA, 16 bp, Artificial Sequence
  Description of Artificial Sequence: Synthetic oligonucleotide
  Description of Combined DNA/RNA Molecule: Synthetic oligonucleotide
uucuucggagacaatg

SEQ ID NO: 67834 - DNA, 15 bp, Artificial Sequence
  Description of Artificial Sequence: Synthetic oligonucleotide
  Description of Combined DNA/RNA Molecule: Synthetic oligonucleotide
ucuucggagacaatg

SEQ ID NO: 67835 - DNA, 14 bp, Artificial Sequence
  Description of Artificial Sequence: Synthetic oligonucleotide
  Description of Combined DNA/RNA Molecule: Synthetic oligonucleotide
cuucggagacaatg

SEQ ID NO: 67836 - DNA, 13 bp, Artificial Sequence
  Description of Artificial Sequence: Synthetic oligonucleotide
  Description of Combined DNA/RNA Molecule: Synthetic oligonucleotide
uucggagacaatg

SEQ ID NO: 67837 - DNA, 12 bp, Artificial Sequence
  Description of Artificial Sequence: Synthetic oligonucleotide
  Description of Combined DNA/RNA Molecule: Synthetic oligonucleotide
ucggagacaatg

SEQ ID NO: 67838 - DNA, 11 bp, Artificial Sequence
  Description of Artificial Sequence: Synthetic oligonucleotide
  Description of Combined DNA/RNA Molecule: Synthetic oligonucleotide
cggagacaatg

SEQ ID NO: 67839 - RNA, 9 nt, Artificial Sequence
  Description of Artificial Sequence: Synthetic oligonucleotide
  modified_base (2): LNA-G
ggaucuuau

SEQ ID NO: 67840 - RNA, 10 nt, Artificial Sequence
  Description of Artificial Sequence: Synthetic oligonucleotide
  modified_base (2): LNA-G
ggaucuuauu

SEQ ID NO: 67841 - RNA, 11 nt, Artificial Sequence
  Description of Artificial Sequence: Synthetic oligonucleotide
  modified_base (2): LNA-G
ggaucuuauuu

SEQ ID NO: 67842 - RNA, 12 nt, Artificial Sequence
  Description of Artificial Sequence: Synthetic oligonucleotide
  modified_base (2): LNA-G
ggaucuuauuuc

SEQ ID NO: 67843 - RNA, 8 nt, Artificial Sequence
  Description of Artificial Sequence: Synthetic oligonucleotide
  modified_base (3): LNA-A
cuacacaa

SEQ ID NO: 67844 - DNA, 13 bp, Artificial Sequence
  Description of Artificial Sequence: Synthetic oligonucleotide
  Description of Combined DNA/RNA Molecule: Synthetic oligonucleotide
  modified_base (8): LNA-A
aucagcgauuutt

SEQ ID NO: 67845 - DNA, 12 bp, Artificial Sequence
  Description of Artificial Sequence: Synthetic oligonucleotide
  Description of Combined DNA/RNA Molecule: Synthetic oligonucleotide
  modified_base (7): LNA-A
ucagcgauuutt

SEQ ID NO: 67846 - DNA, 11 bp, Artificial Sequence
  Description of Artificial Sequence: Synthetic oligonucleotide
  Description of Combined DNA/RNA Molecule: Synthetic oligonucleotide
  modified_base (6): LNA-A
cagcgauuutt

SEQ ID NO: 67847 - DNA, 10 bp, Artificial Sequence
  Description of Artificial Sequence: Synthetic oligonucleotide
  Description of Combined DNA/RNA Molecule: Synthetic oligonucleotide
  modified_base (5): LNA-A
agcgauuutt

SEQ ID NO: 67848 - DNA, 9 bp, Artificial Sequence
  Description of Artificial Sequence: Synthetic oligonucleotide
  Description of Combined DNA/RNA Molecule: Synthetic oligonucleotide
  modified_base (4): LNA-A
gcgauuutt

SEQ ID NO: 67849 - DNA, 8 bp, Artificial Sequence
  Description of Artificial Sequence: Synthetic oligonucleotide
  Description of Combined DNA/RNA Molecule: Synthetic oligonucleotide
  modified_base (3): LNA-A
cgauuutt

SEQ ID NO: 67850 - DNA, 7 bp, Artificial Sequence
  Description of Artificial Sequence: Synthetic oligonucleotide
  Description of Combined DNA/RNA Molecule: Synthetic oligonucleotide
  modified_base (2): LNA-A
gauuutt

SEQ ID NO: 67851 - RNA, 9 nt, Artificial Sequence
  Description of Artificial Sequence: Synthetic oligonucleotide
  modified_base (3): LNA-A
cuacacaaa

SEQ ID NO: 67852 - RNA, 10 nt, Artificial Sequence
  Description of Artificial Sequence: Synthetic oligonucleotide
  modified_base (3): LNA-A
cuacacaaau

SEQ ID NO: 67853 - RNA, 11 nt, Artificial Sequence
  Description of Artificial Sequence: Synthetic oligonucleotide
  modified_base (3): LNA-A
cuacacaaauc

SEQ ID NO: 67854 - RNA, 12 nt, Artificial Sequence
  Description of Artificial Sequence: Synthetic oligonucleotide
  modified_base (3): LNA-A
cuacacaaauca

SEQ ID NO: 67855 - RNA, 13 nt, Artificial Sequence
  Description of Artificial Sequence: Synthetic oligonucleotide
  modified_base (3): LNA-A
cuacacaaaucag

SEQ ID NO: 67856 - RNA, 14 nt, Artificial Sequence
  Description of Artificial Sequence: Synthetic oligonucleotide
  modified_base (3): LNA-A
cuacacaaaucagc

SEQ ID NO: 67857 - RNA, 13 nt, Artificial Sequence
  Description of Artificial Sequence: Synthetic oligonucleotide
  modified_base (2): LNA-G
ggaucuuauuucu

SEQ ID NO: 67858 - RNA, 14 nt, Artificial Sequence
  Description of Artificial Sequence: Synthetic oligonucleotide
  modified_base (2): LNA-G
ggaucuuauuucuu

SEQ ID NO: 67859 - RNA, 8 nt, Artificial Sequence
  Description of Artificial Sequence: Synthetic oligonucleotide
  modified_base (2): LNA-G
  modified_base (8): LNA-A
ggaucuua

SEQ ID NO: 67860 - RNA, 9 nt, Artificial Sequence
  Description of Artificial Sequence: Synthetic oligonucleotide
  modified_base (2): LNA-G
  modified_base (9): LNA-U
ggaucuuau

SEQ ID NO: 67861 - RNA, 10 nt, Artificial Sequence
  Description of Artificial Sequence: Synthetic oligonucleotide
  modified_base (2): LNA-G
  modified_base (10): LNA-U
ggaucuuauu

SEQ ID NO: 67862 - RNA, 11 nt, Artificial Sequence
  Description of Artificial Sequence: Synthetic oligonucleotide
  modified_base (2): LNA-G
  modified_base (11): LNA-U
ggaucuuauuu

SEQ ID NO: 67863 - RNA, 12 nt, Artificial Sequence
  Description of Artificial Sequence: Synthetic oligonucleotide
  modified_base (2): LNA-G
  modified_base (12): LNA-C
ggaucuuauuuc

SEQ ID NO: 67864 - RNA, 13 nt, Artificial Sequence
  Description of Artificial Sequence: Synthetic oligonucleotide
  modified_base (2): LNA-G
  modified_base (13): LNA-U
ggaucuuauuucu

SEQ ID NO: 67865 - RNA, 14 nt, Artificial Sequence
  Description of Artificial Sequence: Synthetic oligonucleotide
  modified_base (2): LNA-G
  modified_base (14): LNA-U
ggaucuuauuucuu

SEQ ID NO: 67866 - DNA, 13 bp, Artificial Sequence
  Description of Artificial Sequence: Synthetic oligonucleotide
  Description of Combined DNA/RNA Molecule: Synthetic oligonucleotide
  modified_base (8): LNA-G
uuucuucggagtt

SEQ ID NO: 67867 - DNA, 12 bp, Artificial Sequence
  Description of Artificial Sequence: Synthetic oligonucleotide
  Description of Combined DNA/RNA Molecule: Synthetic oligonucleotide
  modified_base (7): LNA-G
uucuucggagtt

SEQ ID NO: 67868 - DNA, 11 bp, Artificial Sequence
  Description of Artificial Sequence: Synthetic oligonucleotide
  Description of Combined DNA/RNA Molecule: Synthetic oligonucleotide
  modified_base (6): LNA-G
ucuucggagtt

SEQ ID NO: 67869 - DNA, 10 bp, Artificial Sequence
  Description of Artificial Sequence: Synthetic oligonucleotide
  Description of Combined DNA/RNA Molecule: Synthetic oligonucleotide
  modified_base (5): LNA-G
cuucggagtt

SEQ ID NO: 67870 - DNA, 9 bp, Artificial Sequence
  Description of Artificial Sequence: Synthetic oligonucleotide
  Description of Combined DNA/RNA Molecule: Synthetic oligonucleotide
  modified_base (4): LNA-G
uucggagtt

SEQ ID NO: 67871 - DNA, 8 bp, Artificial Sequence
  Description of Artificial Sequence: Synthetic oligonucleotide
  Description of Combined DNA/RNA Molecule: Synthetic oligonucleotide
  modified_base (3): LNA-G
ucggagtt

SEQ ID NO: 67872 - DNA, 7 bp, Artificial Sequence
  Description of Artificial Sequence: Synthetic oligonucleotide
  Description of Combined DNA/RNA Molecule: Synthetic oligonucleotide
  modified_base (2): LNA-G
cggagtt

SEQ ID NO: 67873 - DNA, 13 bp, Artificial Sequence
  Description of Artificial Sequence: Synthetic oligonucleotide
  Description of Combined DNA/RNA Molecule: Synthetic oligonucleotide
  modified_base (1): LNA-U
  modified_base (8): LNA-G
uuucuucggagtt

SEQ ID NO: 67874 - DNA, 12 bp, Artificial Sequence
  Description of Artificial Sequence: Synthetic oligonucleotide
  Description of Combined DNA/RNA Molecule: Synthetic oligonucleotide
  modified_base (1): LNA-U
  modified_base (7): LNA-G
uucuucggagtt

SEQ ID NO: 67875 - DNA, 11 bp, Artificial Sequence
  Description of Artificial Sequence: Synthetic oligonucleotide
  Description of Combined DNA/RNA Molecule: Synthetic oligonucleotide
  modified_base (1): LNA-U
  modified_base (6): LNA-G
ucuucggagtt

SEQ ID NO: 67876 - DNA, 10 bp, Artificial Sequence
  Description of Artificial Sequence: Synthetic oligonucleotide
  Description of Combined DNA/RNA Molecule: Synthetic oligonucleotide
  modified_base (1): LNA-C
  modified_base (5): LNA-G
cuucggagtt

SEQ ID NO: 67877 - DNA, 9 bp, Artificial Sequence
  Description of Artificial Sequence: Synthetic oligonucleotide
  Description of Combined DNA/RNA Molecule: Synthetic oligonucleotide
  modified_base (1): LNA-U
  modified_base (4): LNA-G
uucggagtt

SEQ ID NO: 67878 - DNA, 8 bp, Artificial Sequence
  Description of Artificial Sequence: Synthetic oligonucleotide
  Description of Combined DNA/RNA Molecule: Synthetic oligonucleotide
  modified_base (1): LNA-U
  modified_base (3): LNA-G
ucggagtt

SEQ ID NO: 67879 - DNA, 7 bp, Artificial Sequence
  Description of Artificial Sequence: Synthetic oligonucleotide
  Description of Combined DNA/RNA Molecule: Synthetic oligonucleotide
  modified_base (1): LNA-C
  modified_base (2): LNA-G
cggagtt

SEQ ID NO: 67880 - DNA, 21 bp, Artificial Sequence
  Description of Artificial Sequence: Synthetic oligonucleotide
  Description of Combined DNA/RNA Molecule: Synthetic oligonucleotide
  modified_base (2): LNA-G
  modified_base (16): LNA-G
ggaucuuauuucuucggagtt

SEQ ID NO: 67881 - DNA, 25 bp, Artificial Sequence
  Description of Artificial Sequence: Synthetic oligonucleotide
  Description of Combined DNA/RNA Molecule: Synthetic oligonucleotide
ggaucuuauuucuucggagacaatg

SEQ ID NO: 67882 - RNA, 25 nt, Artificial Sequence
  Description of Artificial Sequence: Synthetic oligonucleotide
uuaagcagaguucaaaagcccuuca

SEQ ID NO: 67883 - RNA, 25 nt, Artificial Sequence
  Description of Artificial Sequence: Synthetic oligonucleotide
uaagcagaguucaaaagcccuucag

SEQ ID NO: 67884 - RNA, 25 nt, Artificial Sequence
  Description of Artificial Sequence: Synthetic oligonucleotide
agcagaguucaaaagcccuucagcg

SEQ ID NO: 67885 - RNA, 25 nt, Artificial Sequence
  Description of Artificial Sequence: Synthetic oligonucleotide
cucagggucugagugaagccgcucg

SEQ ID NO: 67886 - RNA, 25 nt, Artificial Sequence
  Description of Artificial Sequence: Synthetic oligonucleotide
caagcaacuacaucacgccagucaa

SEQ ID NO: 67887 - RNA, 25 nt, Artificial Sequence
  Description of Artificial Sequence: Synthetic oligonucleotide
aucaauggcagcuucuuggugcgug

SEQ ID NO: 67888 - RNA, 25 nt, Artificial Sequence
  Description of Artificial Sequence: Synthetic oligonucleotide
uuccagcccacauuggauucaucag

SEQ ID NO: 67889 - RNA, 25 nt, Artificial Sequence
  Description of Artificial Sequence: Synthetic oligonucleotide
cagcugagaauguggaauaccuaag

SEQ ID NO: 67890 - RNA, 25 nt, Artificial Sequence
  Description of Artificial Sequence: Synthetic oligonucleotide
aacguaucuccuaauuugaggcuca

SEQ ID NO: 67891 - RNA, 25 nt, Artificial Sequence
  Description of Artificial Sequence: Synthetic oligonucleotide
ccuaaaauaauuucucuacaauugg

SEQ ID NO: 67892 - RNA, 25 nt, Artificial Sequence
  Description of Artificial Sequence: Synthetic oligonucleotide
uggaagauucagcuaguuaggagcc

SEQ ID NO: 67893 - RNA, 25 nt, Artificial Sequence
  Description of Artificial Sequence: Synthetic oligonucleotide
uuaaacucuccuagucaauauccac

SEQ ID NO: 67894 - RNA, 25 nt, Artificial Sequence
  Description of Artificial Sequence: Synthetic oligonucleotide
cagccuacaguuauguucagucaca

SEQ ID NO: 67895 - RNA, 25 nt, Artificial Sequence
  Description of Artificial Sequence: Synthetic oligonucleotide
guuauguucagucacacacacauac

SEQ ID NO: 67896 - RNA, 25 nt, Artificial Sequence
  Description of Artificial Sequence: Synthetic oligonucleotide
cacauacaaaauguuccuuuugcuu

SEQ ID NO: 67897 - RNA, 25 nt, Artificial Sequence
  Description of Artificial Sequence: Synthetic oligonucleotide
uccuuuugcuuuuaaaguaauuuuu

SEQ ID NO: 67898 - RNA, 25 nt, Artificial Sequence
  Description of Artificial Sequence: Synthetic oligonucleotide
ugaccugugaagcaacagucaaugg

SEQ ID NO: 67899 - RNA, 25 nt, Artificial Sequence
  Description of Artificial Sequence: Synthetic oligonucleotide
cuaucucacacaucgacaaaccaau

SEQ ID NO: 67900 - RNA, 25 nt, Artificial Sequence
  Description of Artificial Sequence: Synthetic oligonucleotide
uguccucaauuguacugcuaccacu

SEQ ID NO: 67901 - RNA, 25 nt, Artificial Sequence
  Description of Artificial Sequence: Synthetic oligonucleotide
aaaccguagcuggcaagcggucuua

SEQ ID NO: 67902 - RNA, 25 nt, Artificial Sequence
  Description of Artificial Sequence: Synthetic oligonucleotide
uagcuggcaagcggucuuaccggcu

SEQ ID NO: 67903 - RNA, 25 nt, Artificial Sequence
  Description of Artificial Sequence: Synthetic oligonucleotide
uuguaugguuaaaagauggguuacc

SEQ ID NO: 67904 - RNA, 25 nt, Artificial Sequence
  Description of Artificial Sequence: Synthetic oligonucleotide
ugguuaaaagauggguuaccugcga

SEQ ID NO: 67905 - RNA, 25 nt, Artificial Sequence
  Description of Artificial Sequence: Synthetic oligonucleotide
cagggaauuauacaaucuugcugag

SEQ ID NO: 67906 - RNA, 25 nt, Artificial Sequence
  Description of Artificial Sequence: Synthetic oligonucleotide
acaaucuugcugagcauaaaacagu

SEQ ID NO: 67907 - RNA, 25 nt, Artificial Sequence
  Description of Artificial Sequence: Synthetic oligonucleotide
ccaauaaugaagaguccuuuauccu

SEQ ID NO: 67908 - RNA, 25 nt, Artificial Sequence
  Description of Artificial Sequence: Synthetic oligonucleotide
acuuuggauguuccaacgcaaguug

SEQ ID NO: 67909 - RNA, 25 nt, Artificial Sequence
  Description of Artificial Sequence: Synthetic oligonucleotide
aaugcuuccacuaaacugaaaccau

SEQ ID NO: 67910 - RNA, 25 nt, Artificial Sequence
  Description of Artificial Sequence: Synthetic oligonucleotide
gagaaaguuugacuuuguuaaauau

SEQ ID NO: 67911 - RNA, 25 nt, Artificial Sequence
  Description of Artificial Sequence: Synthetic oligonucleotide
aaagaacuacuguauauuaaaaguu

SEQ ID NO: 67912 - RNA, 25 nt, Artificial Sequence
  Description of Artificial Sequence: Synthetic oligonucleotide
uuagaaauacggguuuugacuuaac

SEQ ID NO: 67913 - RNA, 25 nt, Artificial Sequence
  Description of Artificial Sequence: Synthetic oligonucleotide
aacauggguacagcaaacucagcac

SEQ ID NO: 67914 - RNA, 25 nt, Artificial Sequence
  Description of Artificial Sequence: Synthetic oligonucleotide
aaagacacagaagaugcugaccuca

SEQ ID NO: 67915 - RNA, 25 nt, Artificial Sequence
  Description of Artificial Sequence: Synthetic oligonucleotide
uaguagggagguuuauucagaucgc

SEQ ID NO: 67916 - RNA, 25 nt, Artificial Sequence
  Description of Artificial Sequence: Synthetic oligonucleotide
gccuucugcagcaggguucugggau

SEQ ID NO: 67917 - RNA, 25 nt, Artificial Sequence
  Description of Artificial Sequence: Synthetic oligonucleotide
ggucugguacauauuggaaauuaug

SEQ ID NO: 67918 - RNA, 25 nt, Artificial Sequence
  Description of Artificial Sequence: Synthetic oligonucleotide
cuaguccuuccgauggaagcacuag

SEQ ID NO: 67919 - RNA, 25 nt, Artificial Sequence
  Description of Artificial Sequence: Synthetic oligonucleotide
ccagugaauauuguuuuuaugugga

SEQ ID NO: 67920 - RNA, 25 nt, Artificial Sequence
  Description of Artificial Sequence: Synthetic oligonucleotide
augaauucaaguuggaauugguaga

SEQ ID NO: 67921 - RNA, 25 nt, Artificial Sequence
  Description of Artificial Sequence: Synthetic oligonucleotide
caggacacagauuuagacuuggaga

SEQ ID NO: 67922 - RNA, 25 nt, Artificial Sequence
  Description of Artificial Sequence: Synthetic oligonucleotide
cucaaagcacaguuacaguauucca

SEQ ID NO: 67923 - RNA, 25 nt, Artificial Sequence
  Description of Artificial Sequence: Synthetic oligonucleotide
accacugccaccacugaugaauuaa

SEQ ID NO: 67924 - RNA, 25 nt, Artificial Sequence
  Description of Artificial Sequence: Synthetic oligonucleotide
gaaacuacuagugccacaucaucac

SEQ ID NO: 67925 - RNA, 25 nt, Artificial Sequence
  Description of Artificial Sequence: Synthetic oligonucleotide
aagucggacagccucaccaaacaga

SEQ ID NO: 67926 - RNA, 25 nt, Artificial Sequence
  Description of Artificial Sequence: Synthetic oligonucleotide
gaaagcgaaaaauggaacaugaugg

SEQ ID NO: 67927 - RNA, 25 nt, Artificial Sequence
  Description of Artificial Sequence: Synthetic oligonucleotide
cccucugauuuagcauguagacugc

SEQ ID NO: 67928 - RNA, 25 nt, Artificial Sequence
  Description of Artificial Sequence: Synthetic oligonucleotide
ugagcuauuuaaggaucuauuuaug

SEQ ID NO: 67929 - RNA, 25 nt, Artificial Sequence
  Description of Artificial Sequence: Synthetic oligonucleotide
aaaaggugaaaaagcacuauuauca

SEQ ID NO: 67930 - RNA, 25 nt, Artificial Sequence
  Description of Artificial Sequence: Synthetic oligonucleotide
gaaaaagcacuauuaucaguucugc

SEQ ID NO: 67931 - RNA, 25 nt, Artificial Sequence
  Description of Artificial Sequence: Synthetic oligonucleotide
ggcugaaaagaaagauuaaaccuac

SEQ ID NO: 67932 - RNA, 25 nt, Artificial Sequence
  Description of Artificial Sequence: Synthetic oligonucleotide
uaaacccuuauaauaaaauccuucu

SEQ ID NO: 67933 - RNA, 25 nt, Artificial Sequence
  Description of Artificial Sequence: Synthetic oligonucleotide
cauacuauuagccaaugcuguagac

SEQ ID NO: 67934 - RNA, 25 nt, Artificial Sequence
  Description of Artificial Sequence: Synthetic oligonucleotide
gacagaagcauuuugauaggaauag

SEQ ID NO: 67935 - RNA, 25 nt, Artificial Sequence
  Description of Artificial Sequence: Synthetic oligonucleotide
agagcaaauaagauaauggcccuga

SEQ ID NO: 67936 - RNA, 25 nt, Artificial Sequence
  Description of Artificial Sequence: Synthetic oligonucleotide
ccaacauuuuucucuuccucaagca

SEQ ID NO: 67937 - RNA, 25 nt, Artificial Sequence
  Description of Artificial Sequence: Synthetic oligonucleotide
uuaaguaugagaaaaguucagccca

SEQ ID NO: 67938 - RNA, 25 nt, Artificial Sequence
  Description of Artificial Sequence: Synthetic oligonucleotide
caggaauaaagauggcugcugaacc

SEQ ID NO: 67939 - RNA, 25 nt, Artificial Sequence
  Description of Artificial Sequence: Synthetic oligonucleotide
aauuugaaugaccaaguucucuuca

SEQ ID NO: 67940 - RNA, 25 nt, Artificial Sequence
  Description of Artificial Sequence: Synthetic oligonucleotide
auguauaaagauagccagccuagag

SEQ ID NO: 67941 - RNA, 25 nt, Artificial Sequence
  Description of Artificial Sequence: Synthetic oligonucleotide
ggcuguaacuaucucugugaagugu

SEQ ID NO: 67942 - RNA, 25 nt, Artificial Sequence
  Description of Artificial Sequence: Synthetic oligonucleotide
ucugugaagugugagaaaauuucaa

SEQ ID NO: 67943 - RNA, 25 nt, Artificial Sequence
  Description of Artificial Sequence: Synthetic oligonucleotide
ccuuuaaggaaaugaauccuccuga

SEQ ID NO: 67944 - RNA, 25 nt, Artificial Sequence
  Description of Artificial Sequence: Synthetic oligonucleotide
aaggauacaaaaagugacaucauau

SEQ ID NO: 67945 - RNA, 25 nt, Artificial Sequence
  Description of Artificial Sequence: Synthetic oligonucleotide
agaugcaauuugaaucuucaucaua

SEQ ID NO: 67946 - RNA, 25 nt, Artificial Sequence
  Description of Artificial Sequence: Synthetic oligonucleotide
guucaaaacgaagacuagcuauuaa

SEQ ID NO: 67947 - RNA, 25 nt, Artificial Sequence
  Description of Artificial Sequence: Synthetic oligonucleotide
gugaaaccucaucucuacuaaaaau

SEQ ID NO: 67948 - RNA, 25 nt, Artificial Sequence
  Description of Artificial Sequence: Synthetic oligonucleotide
acgaaagagaagcucuaucucgccu

SEQ ID NO: 67949 - RNA, 25 nt, Artificial Sequence
  Description of Artificial Sequence: Synthetic oligonucleotide
cuccacaagcgccuucgguccaguu

SEQ ID NO: 67950 - RNA, 25 nt, Artificial Sequence
  Description of Artificial Sequence: Synthetic oligonucleotide
gagaagauuccaaagauguagccgc

SEQ ID NO: 67951 - RNA, 25 nt, Artificial Sequence
  Description of Artificial Sequence: Synthetic oligonucleotide
aaucuggauucaaugaggagacuug

SEQ ID NO: 67952 - RNA, 25 nt, Artificial Sequence
  Description of Artificial Sequence: Synthetic oligonucleotide
agaacagauuugagaguagugagga

SEQ ID NO: 67953 - RNA, 25 nt, Artificial Sequence
  Description of Artificial Sequence: Synthetic oligonucleotide
ccagagcugugcagaugaguacaaa

SEQ ID NO: 67954 - RNA, 25 nt, Artificial Sequence
  Description of Artificial Sequence: Synthetic oligonucleotide
ccucagauuguuguuguuaaugggc

SEQ ID NO: 67955 - RNA, 25 nt, Artificial Sequence
  Description of Artificial Sequence: Synthetic oligonucleotide
cuauuuuaauuauuuuuaauuuauu

SEQ ID NO: 67956 - RNA, 25 nt, Artificial Sequence
  Description of Artificial Sequence: Synthetic oligonucleotide
uuuaauuuauuaauauuuaaauaug

SEQ ID NO: 67957 - RNA, 25 nt, Artificial Sequence
  Description of Artificial Sequence: Synthetic oligonucleotide
augcaguuugaauauccuuuguuuc

SEQ ID NO: 67958 - RNA, 25 nt, Artificial Sequence
  Description of Artificial Sequence: Synthetic oligonucleotide
caugcugcuggcgucuaaguguuug

SEQ ID NO: 67959 - RNA, 25 nt, Artificial Sequence
  Description of Artificial Sequence: Synthetic oligonucleotide
agaugugcauuucaccugugacaaa

SEQ ID NO: 67960 - RNA, 25 nt, Artificial Sequence
  Description of Artificial Sequence: Synthetic oligonucleotide
ucaaaaccugugccaggcugaauua

SEQ ID NO: 67961 - RNA, 25 nt, Artificial Sequence
  Description of Artificial Sequence: Synthetic oligonucleotide
gaauguggguagucauucuuacaau

SEQ ID NO: 67962 - RNA, 25 nt, Artificial Sequence
  Description of Artificial Sequence: Synthetic oligonucleotide
auguggguagucauucuuacaauug

SEQ ID NO: 67963 - RNA, 25 nt, Artificial Sequence
  Description of Artificial Sequence: Synthetic oligonucleotide
ugaaaaugagcaucagagaguguac

SEQ ID NO: 67964 - RNA, 25 nt, Artificial Sequence
  Description of Artificial Sequence: Synthetic oligonucleotide
uugcuuuucauguagaacucagcag

SEQ ID NO: 67965 - RNA, 25 nt, Artificial Sequence
  Description of Artificial Sequence: Synthetic oligonucleotide
uguauuucuauauuuauuuucagua

SEQ ID NO: 67966 - RNA, 25 nt, Artificial Sequence
  Description of Artificial Sequence: Synthetic oligonucleotide
uuugauuaauguuucuuaaauggaa

SEQ ID NO: 67967 - RNA, 25 nt, Artificial Sequence
  Description of Artificial Sequence: Synthetic oligonucleotide
caacguguauagugccuaaaauugu

SEQ ID NO: 67968 - RNA, 25 nt, Artificial Sequence
  Description of Artificial Sequence: Synthetic oligonucleotide
cauauccuuggcuacuaacaucugg

SEQ ID NO: 67969 - RNA, 25 nt, Artificial Sequence
  Description of Artificial Sequence: Synthetic oligonucleotide
uacuaacaucuggagacugugagcu

SEQ ID NO: 67970 - RNA, 25 nt, Artificial Sequence
  Description of Artificial Sequence: Synthetic oligonucleotide
cauaaguugugugcuuuuuauuaau

SEQ ID NO: 67971 - RNA, 25 nt, Artificial Sequence
  Description of Artificial Sequence: Synthetic oligonucleotide
gcaucauuuuggcucuucuuacauu

SEQ ID NO: 67972 - RNA, 25 nt, Artificial Sequence
  Description of Artificial Sequence: Synthetic oligonucleotide
gcucuucuuacauuuguaaaaaugu

SEQ ID NO: 67973 - RNA, 25 nt, Artificial Sequence
  Description of Artificial Sequence: Synthetic oligonucleotide
agauuaggucaucuuaauucauauu

SEQ ID NO: 67974 - RNA, 25 nt, Artificial Sequence
  Description of Artificial Sequence: Synthetic oligonucleotide
auggaauugaaagaacuaaucauga

SEQ ID NO: 67975 - RNA, 25 nt, Artificial Sequence
  Description of Artificial Sequence: Synthetic oligonucleotide
cacacucauuccuucugcucuuggg

SEQ ID NO: 67976 - RNA, 25 nt, Artificial Sequence
  Description of Artificial Sequence: Synthetic oligonucleotide
uguagagguaaccaguagcuuugag

SEQ ID NO: 67977 - RNA, 25 nt, Artificial Sequence
  Description of Artificial Sequence: Synthetic oligonucleotide
caaccacaugccacguaauauuuca

SEQ ID NO: 67978 - RNA, 25 nt, Artificial Sequence
  Description of Artificial Sequence: Synthetic oligonucleotide
ucggaaacaaguuauucucuucacu

SEQ ID NO: 67979 - RNA, 25 nt, Artificial Sequence
  Description of Artificial Sequence: Synthetic oligonucleotide
acucccaauaacuaaugcuaagaaa

SEQ ID NO: 67980 - RNA, 25 nt, Artificial Sequence
  Description of Artificial Sequence: Synthetic oligonucleotide
aaugcuaagaaaugcugaaaaucaa

SEQ ID NO: 67981 - RNA, 25 nt, Artificial Sequence
  Description of Artificial Sequence: Synthetic oligonucleotide
gucuuucucuaaauaugauuacuuu

SEQ ID NO: 67982 - RNA, 25 nt, Artificial Sequence
  Description of Artificial Sequence: Synthetic oligonucleotide
ugaauuucaggcauuuuguucuaca

SEQ ID NO: 67983 - RNA, 25 nt, Artificial Sequence
  Description of Artificial Sequence: Synthetic oligonucleotide
cgauucccucucacccgggacucuc

SEQ ID NO: 67984 - RNA, 25 nt, Artificial Sequence
  Description of Artificial Sequence: Synthetic oligonucleotide
aggaaagugaaccuuuaaaguaaag

SEQ ID NO: 67985 - RNA, 25 nt, Artificial Sequence
  Description of Artificial Sequence: Synthetic oligonucleotide
gaggcugcaugcucuggaagccugg

SEQ ID NO: 67986 - RNA, 25 nt, Artificial Sequence
  Description of Artificial Sequence: Synthetic oligonucleotide
ucucugaacagaaaacaaaagagag

SEQ ID NO: 67987 - RNA, 25 nt, Artificial Sequence
  Description of Artificial Sequence: Synthetic oligonucleotide
aacuuggcuguaaucaguuaugccg

SEQ ID NO: 67988 - RNA, 25 nt, Artificial Sequence
  Description of Artificial Sequence: Synthetic oligonucleotide
agaagccaaaauuaaaagaagucca

SEQ ID NO: 67989 - RNA, 25 nt, Artificial Sequence
  Description of Artificial Sequence: Synthetic oligonucleotide
auuaaaagaaguccaggugagguua

SEQ ID NO: 67990 - RNA, 25 nt, Artificial Sequence
  Description of Artificial Sequence: Synthetic oligonucleotide
gaauccggauuaucgggaagaggac

SEQ ID NO: 67991 - RNA, 25 nt, Artificial Sequence
  Description of Artificial Sequence: Synthetic oligonucleotide
aaugugacaucaaagcaaguauugu

SEQ ID NO: 67992 - RNA, 25 nt, Artificial Sequence
  Description of Artificial Sequence: Synthetic oligonucleotide
caucaaagcaaguauuguagcacuc

SEQ ID NO: 67993 - RNA, 25 nt, Artificial Sequence
  Description of Artificial Sequence: Synthetic oligonucleotide
agagagagaaaacaaaaccacaaau

SEQ ID NO: 67994 - RNA, 25 nt, Artificial Sequence
  Description of Artificial Sequence: Synthetic oligonucleotide
ucgcuguaguauuuaagcccauaca

SEQ ID NO: 67995 - RNA, 25 nt, Artificial Sequence
  Description of Artificial Sequence: Synthetic oligonucleotide
cgcuguaguauuuaagcccauacag

SEQ ID NO: 67996 - RNA, 25 nt, Artificial Sequence
  Description of Artificial Sequence: Synthetic oligonucleotide
auuuaagcccauacagaaaccuucc

SEQ ID NO: 67997 - RNA, 25 nt, Artificial Sequence
  Description of Artificial Sequence: Synthetic oligonucleotide
auuaaaauaaacaugguauaccuac

SEQ ID NO: 67998 - RNA, 25 nt, Artificial Sequence
  Description of Artificial Sequence: Synthetic oligonucleotide
cuguucugaucggccaguuuucgga

SEQ ID NO: 67999 - RNA, 25 nt, Artificial Sequence
  Description of Artificial Sequence: Synthetic oligonucleotide
aaauaauuugaacuuuggaacaggg

SEQ ID NO: 68000 - RNA, 25 nt, Artificial Sequence
  Description of Artificial Sequence: Synthetic oligonucleotide
ugcgaccuuaauuuaacuuuccagu

SEQ ID NO: 68001 - RNA, 25 nt, Artificial Sequence
  Description of Artificial Sequence: Synthetic oligonucleotide
cugagaaagcuaaaguuugguuuug

SEQ ID NO: 68002 - RNA, 25 nt, Artificial Sequence
  Description of Artificial Sequence: Synthetic oligonucleotide
aguaaagaugcuacuucccacugua

SEQ ID NO: 68003 - RNA, 25 nt, Artificial Sequence
  Description of Artificial Sequence: Synthetic oligonucleotide
cugcuuaauugcugauaccauauga

SEQ ID NO: 68004 - RNA, 25 nt, Artificial Sequence
  Description of Artificial Sequence: Synthetic oligonucleotide
uaccauaugaaugaaacaugggcug

SEQ ID NO: 68005 - RNA, 25 nt, Artificial Sequence
  Description of Artificial Sequence: Synthetic oligonucleotide
aacuuucuuauccaacuuuuucaua

SEQ ID NO: 68006 - RNA, 25 nt, Artificial Sequence
  Description of Artificial Sequence: Synthetic oligonucleotide
ccuugcaugacaucaugaggccgga

SEQ ID NO: 68007 - RNA, 25 nt, Artificial Sequence
  Description of Artificial Sequence: Synthetic oligonucleotide
ugaauuuguauaugacugcauuugu

SEQ ID NO: 68008 - RNA, 25 nt, Artificial Sequence
  Description of Artificial Sequence: Synthetic oligonucleotide
gaauccuaguagaauguuuacuacc

SEQ ID NO: 68009 - RNA, 25 nt, Artificial Sequence
  Description of Artificial Sequence: Synthetic oligonucleotide
gaaagggaagaauuuuuugaugaaa

SEQ ID NO: 68010 - RNA, 25 nt, Artificial Sequence
  Description of Artificial Sequence: Synthetic oligonucleotide
uaucggcaugccagugugugaauuu

SEQ ID NO: 68011 - RNA, 25 nt, Artificial Sequence
  Description of Artificial Sequence: Synthetic oligonucleotide
caccucauaguagagcaauguaugu

SEQ ID NO: 68012 - RNA, 25 nt, Artificial Sequence
  Description of Artificial Sequence: Synthetic oligonucleotide
ccagaauugccaaagcacauauaua

SEQ ID NO: 68013 - RNA, 25 nt, Artificial Sequence
  Description of Artificial Sequence: Synthetic oligonucleotide
uggugaucuggguaauaguuucucc

SEQ ID NO: 68014 - RNA, 25 nt, Artificial Sequence
  Description of Artificial Sequence: Synthetic oligonucleotide
gaucuggguaauaguuucuccaaau

SEQ ID NO: 68015 - RNA, 25 nt, Artificial Sequence
  Description of Artificial Sequence: Synthetic oligonucleotide
ggaugugaugaauacuuccuagaaa

SEQ ID NO: 68016 - RNA, 25 nt, Artificial Sequence
  Description of Artificial Sequence: Synthetic oligonucleotide
cauuuccacagcuacaccauauaug

SEQ ID NO: 68017 - RNA, 25 nt, Artificial Sequence
  Description of Artificial Sequence: Synthetic oligonucleotide
acagcuacaccauauaugaauggag

SEQ ID NO: 68018 - RNA, 25 nt, Artificial Sequence
  Description of Artificial Sequence: Synthetic oligonucleotide
ugcaguucuuacacgagaagaagau

SEQ ID NO: 68019 - RNA, 25 nt, Artificial Sequence
  Description of Artificial Sequence: Synthetic oligonucleotide
acgagaagaagaucauuuacaggga

SEQ ID NO: 68020 - RNA, 25 nt, Artificial Sequence
  Description of Artificial Sequence: Synthetic oligonucleotide
cgagaagaagaucauuuacagggac

SEQ ID NO: 68021 - RNA, 25 nt, Artificial Sequence
  Description of Artificial Sequence: Synthetic oligonucleotide
aagaagaucauuuacagggaccuga

SEQ ID NO: 68022 - RNA, 25 nt, Artificial Sequence
  Description of Artificial Sequence: Synthetic oligonucleotide
agaggaagagguguuugacugcauc

SEQ ID NO: 68023 - RNA, 25 nt, Artificial Sequence
  Description of Artificial Sequence: Synthetic oligonucleotide
gaggaagagguguuugacugcaucg

SEQ ID NO: 68024 - RNA, 25 nt, Artificial Sequence
  Description of Artificial Sequence: Synthetic oligonucleotide
cuacuuugagggcgaguucacaggg

SEQ ID NO: 68025 - RNA, 25 nt, Artificial Sequence
  Description of Artificial Sequence: Synthetic oligonucleotide
agggcaucuccuggcaccucugucc

SEQ ID NO: 68026 - RNA, 25 nt, Artificial Sequence
  Description of Artificial Sequence: Synthetic oligonucleotide
ggagugauaugguuugucuuuuuaa

SEQ ID NO: 68027 - RNA, 25 nt, Artificial Sequence
  Description of Artificial Sequence: Synthetic oligonucleotide
gagugauaugguuugucuuuuuaag

SEQ ID NO: 68028 - RNA, 25 nt, Artificial Sequence
  Description of Artificial Sequence: Synthetic oligonucleotide
ugcaguaaagauccuaaagguuguc

SEQ ID NO: 68029 - RNA, 25 nt, Artificial Sequence
  Description of Artificial Sequence: Synthetic oligonucleotide
aguaaagauccuaaagguugucgac

SEQ ID NO: 68030 - RNA, 25 nt, Artificial Sequence
  Description of Artificial Sequence: Synthetic oligonucleotide
ugacaaaggacaaccuggcaauugu

SEQ ID NO: 68031 - RNA, 25 nt, Artificial Sequence
  Description of Artificial Sequence: Synthetic oligonucleotide
gcaauugugacccaguggugcgagg

SEQ ID NO: 68032 - RNA, 25 nt, Artificial Sequence
  Description of Artificial Sequence: Synthetic oligonucleotide
aacaucauccauagagacaugaaau

SEQ ID NO: 68033 - RNA, 25 nt, Artificial Sequence
  Description of Artificial Sequence: Synthetic oligonucleotide
ugaaauccaacaauauauuucucca

SEQ ID NO: 68034 - RNA, 25 nt, Artificial Sequence
  Description of Artificial Sequence: Synthetic oligonucleotide
aacaauauauuucuccaugaaggcu

SEQ ID NO: 68035 - RNA, 25 nt, Artificial Sequence
  Description of Artificial Sequence: Synthetic oligonucleotide
aacaguaaagucacgcuggaguggu

SEQ ID NO: 68036 - RNA, 25 nt, Artificial Sequence
  Description of Artificial Sequence: Synthetic oligonucleotide
ugugaagaaaguaaaggaagagagg

SEQ ID NO: 68037 - RNA, 25 nt, Artificial Sequence
  Description of Artificial Sequence: Synthetic oligonucleotide
cuuccgagccauccuugcaucgggc

SEQ ID NO: 68038 - RNA, 25 nt, Artificial Sequence
  Description of Artificial Sequence: Synthetic oligonucleotide
aauggagguugaauauccuacugug

SEQ ID NO: 68039 - RNA, 25 nt, Artificial Sequence
  Description of Artificial Sequence: Synthetic oligonucleotide
ggagguugaauauccuacuguguaa

SEQ ID NO: 68040 - RNA, 25 nt, Artificial Sequence
  Description of Artificial Sequence: Synthetic oligonucleotide
auuuugaguuuucccuuguagugua

SEQ ID NO: 68041 - RNA, 25 nt, Artificial Sequence
  Description of Artificial Sequence: Synthetic oligonucleotide
uauccuguuuguucuuuguugauug

SEQ ID NO: 68042 - RNA, 25 nt, Artificial Sequence
  Description of Artificial Sequence: Synthetic oligonucleotide
ccuguuuguucuuuguugauugaaa

SEQ ID NO: 68043 - RNA, 25 nt, Artificial Sequence
  Description of Artificial Sequence: Synthetic oligonucleotide
cucuacagccuucuuuuucuuccau

SEQ ID NO: 68044 - RNA, 25 nt, Artificial Sequence
  Description of Artificial Sequence: Synthetic oligonucleotide
ucuuccauagcuaaucuuccuucua

SEQ ID NO: 68045 - RNA, 25 nt, Artificial Sequence
  Description of Artificial Sequence: Synthetic oligonucleotide
auaaucuuccuguugaaugcuucau

SEQ ID NO: 68046 - RNA, 25 nt, Artificial Sequence
  Description of Artificial Sequence: Synthetic oligonucleotide
uaaucuuccuguugaaugcuucaug

SEQ ID NO: 68047 - RNA, 25 nt, Artificial Sequence
  Description of Artificial Sequence: Synthetic oligonucleotide
cuucaugacuugaauucuacuuuga

SEQ ID NO: 68048 - RNA, 25 nt, Artificial Sequence
  Description of Artificial Sequence: Synthetic oligonucleotide
aagagggagagaagcaacuacagac

SEQ ID NO: 68049 - RNA, 25 nt, Artificial Sequence
  Description of Artificial Sequence: Synthetic oligonucleotide
cgucuccuaccagaccaaggucaac

SEQ ID NO: 68050 - RNA, 25 nt, Artificial Sequence
  Description of Artificial Sequence: Synthetic oligonucleotide
gaucaaucggcccgacuaucucgac

SEQ ID NO: 68051 - RNA, 25 nt, Artificial Sequence
  Description of Artificial Sequence: Synthetic oligonucleotide
ggacgaacauccaaccuucccaaac

SEQ ID NO: 68052 - RNA, 25 nt, Artificial Sequence
  Description of Artificial Sequence: Synthetic oligonucleotide
agggucggaacccaagcuuagaacu

SEQ ID NO: 68053 - RNA, 25 nt, Artificial Sequence
  Description of Artificial Sequence: Synthetic oligonucleotide
ucggaacccaagcuuagaacuuuaa

SEQ ID NO: 68054 - RNA, 25 nt, Artificial Sequence
  Description of Artificial Sequence: Synthetic oligonucleotide
acccaagcuuagaacuuuaagcaac

SEQ ID NO: 68055 - RNA, 25 nt, Artificial Sequence
  Description of Artificial Sequence: Synthetic oligonucleotide
gaacuuuaagcaacaagaccaccac

SEQ ID NO: 68056 - RNA, 25 nt, Artificial Sequence
  Description of Artificial Sequence: Synthetic oligonucleotide
acuauucaguggcgagaaauaaagu

SEQ ID NO: 68057 - RNA, 25 nt, Artificial Sequence
  Description of Artificial Sequence: Synthetic oligonucleotide
cuauucaguggcgagaaauaaaguu

SEQ ID NO: 68058 - RNA, 25 nt, Artificial Sequence
  Description of Artificial Sequence: Synthetic oligonucleotide
aaacacagauaacaggaaaugaucc

SEQ ID NO: 68059 - RNA, 25 nt, Artificial Sequence
  Description of Artificial Sequence: Synthetic oligonucleotide
cuuaagaaaagagaagaaaugaaac

SEQ ID NO: 68060 - RNA, 25 nt, Artificial Sequence
  Description of Artificial Sequence: Synthetic oligonucleotide
cugaaggaguguguuuccauccucc

SEQ ID NO: 68061 - RNA, 25 nt, Artificial Sequence
  Description of Artificial Sequence: Synthetic oligonucleotide
ucaccgcgggacugaaaaucuuuga

SEQ ID NO: 68062 - RNA, 25 nt, Artificial Sequence
  Description of Artificial Sequence: Synthetic oligonucleotide
agcagaaauaagcgugccguucagg

SEQ ID NO: 68063 - RNA, 25 nt, Artificial Sequence
  Description of Artificial Sequence: Synthetic oligonucleotide
aagcgugccguucaggguccagaag

SEQ ID NO: 68064 - RNA, 25 nt, Artificial Sequence
  Description of Artificial Sequence: Synthetic oligonucleotide
agaaacagucacucaagacugcuug

SEQ ID NO: 68065 - RNA, 25 nt, Artificial Sequence
  Description of Artificial Sequence: Synthetic oligonucleotide
agaggaagaagguccaugucuuugg

SEQ ID NO: 68066 - RNA, 25 nt, Artificial Sequence
  Description of Artificial Sequence: Synthetic oligonucleotide
uguauucaaaauaugccugaaacac

SEQ ID NO: 68067 - RNA, 25 nt, Artificial Sequence
  Description of Artificial Sequence: Synthetic oligonucleotide
auuuuccucccuuucucuguaccuc

SEQ ID NO: 68068 - RNA, 25 nt, Artificial Sequence
  Description of Artificial Sequence: Synthetic oligonucleotide
caaagaaagauagagcaagacaaga

SEQ ID NO: 68069 - RNA, 25 nt, Artificial Sequence
  Description of Artificial Sequence: Synthetic oligonucleotide
aagaaagauagagcaagacaagaaa

SEQ ID NO: 68070 - RNA, 25 nt, Artificial Sequence
  Description of Artificial Sequence: Synthetic oligonucleotide
gaaagcauuuguuuguacaagaucc

SEQ ID NO: 68071 - RNA, 25 nt, Artificial Sequence
  Description of Artificial Sequence: Synthetic oligonucleotide
ugaguuaaacgaacguacuugcaga

SEQ ID NO: 68072 - RNA, 25 nt, Artificial Sequence
  Description of Artificial Sequence: Synthetic oligonucleotide
acugauacagaacgaucgauacaga

SEQ ID NO: 68073 - RNA, 25 nt, Artificial Sequence
  Description of Artificial Sequence: Synthetic oligonucleotide
auauuauauauauauaaaaauaaau

SEQ ID NO: 68074 - RNA, 25 nt, Artificial Sequence
  Description of Artificial Sequence: Synthetic oligonucleotide
auuauauauauauaaaaauaaauau

SEQ ID NO: 68075 - RNA, 25 nt, Artificial Sequence
  Description of Artificial Sequence: Synthetic oligonucleotide
ucacuggauguauuugacugcugug

SEQ ID NO: 68076 - RNA, 25 nt, Artificial Sequence
  Description of Artificial Sequence: Synthetic oligonucleotide
cagggaagaggaggagaugagagac

SEQ ID NO: 68077 - RNA, 25 nt, Artificial Sequence
  Description of Artificial Sequence: Synthetic oligonucleotide
augaucuuuuuuuugucccacuugg

SEQ ID NO: 68078 - RNA, 27 nt, Artificial Sequence
  Description of Artificial Sequence: Synthetic oligonucleotide
ggccgugaacuccucaucaaaauaccu

SEQ ID NO: 68079 - RNA, 27 nt, Artificial Sequence
  Description of Artificial Sequence: Synthetic oligonucleotide
uggugugauggugaucaucugggccgu

SEQ ID NO: 68080 - RNA, 27 nt, Artificial Sequence
  Description of Artificial Sequence: Synthetic oligonucleotide
aaacccgcaggauaguuuucuucccua

SEQ ID NO: 68081 - RNA, 27 nt, Artificial Sequence
  Description of Artificial Sequence: Synthetic oligonucleotide
caaacuggaugaaauaaauuaaaaccc

SEQ ID NO: 68082 - RNA, 27 nt, Artificial Sequence
  Description of Artificial Sequence: Synthetic oligonucleotide
agaaguccuuaacauuucccuacguga

SEQ ID NO: 68083 - RNA, 27 nt, Artificial Sequence
  Description of Artificial Sequence: Synthetic oligonucleotide
cucugucccacuggguaaacccuggcc

SEQ ID NO: 68084 - RNA, 27 nt, Artificial Sequence
  Description of Artificial Sequence: Synthetic oligonucleotide
cacaauaacaaauuuaaaccuugcucc

SEQ ID NO: 68085 - RNA, 27 nt, Artificial Sequence
  Description of Artificial Sequence: Synthetic oligonucleotide
aaaugcauuugaacaacauaauacaca

SEQ ID NO: 68086 - RNA, 27 nt, Artificial Sequence
  Description of Artificial Sequence: Synthetic oligonucleotide
ggcuuuccugucacaaagauuaaaaac

SEQ ID NO: 68087 - RNA, 27 nt, Artificial Sequence
  Description of Artificial Sequence: Synthetic oligonucleotide
agggcuuuccugucacaaagauuaaaa

SEQ ID NO: 68088 - RNA, 27 nt, Artificial Sequence
  Description of Artificial Sequence: Synthetic oligonucleotide
ggccaugcugggagacauaagcagcag

SEQ ID NO: 68089 - RNA, 27 nt, Artificial Sequence
  Description of Artificial Sequence: Synthetic oligonucleotide
ucagggagaagcuucugaaacacuucu

SEQ ID NO: 68090 - RNA, 27 nt, Artificial Sequence
  Description of Artificial Sequence: Synthetic oligonucleotide
aagggcuucuuccuuauugauggucag

SEQ ID NO: 68091 - RNA, 27 nt, Artificial Sequence
  Description of Artificial Sequence: Synthetic oligonucleotide
ugaagggcuucuuccuuauugaugguc

SEQ ID NO: 68092 - RNA, 27 nt, Artificial Sequence
  Description of Artificial Sequence: Synthetic oligonucleotide
cgcugaagggcuucuuccuuauugaug

SEQ ID NO: 68093 - RNA, 27 nt, Artificial Sequence
  Description of Artificial Sequence: Synthetic oligonucleotide
gccgcugaagggcuucuuccuuauuga

SEQ ID NO: 68094 - RNA, 27 nt, Artificial Sequence
  Description of Artificial Sequence: Synthetic oligonucleotide
acuggccgcugaagggcuucuuccuua

SEQ ID NO: 68095 - RNA, 27 nt, Artificial Sequence
  Description of Artificial Sequence: Synthetic oligonucleotide
cggagcuuuucaccuuuaguuaugcuu

SEQ ID NO: 68096 - RNA, 27 nt, Artificial Sequence
  Description of Artificial Sequence: Synthetic oligonucleotide
ccggagcuuuucaccuuuaguuaugcu

SEQ ID NO: 68097 - RNA, 27 nt, Artificial Sequence
  Description of Artificial Sequence: Synthetic oligonucleotide
cagacuguugacuggcgugauguaguu

SEQ ID NO: 68098 - RNA, 27 nt, Artificial Sequence
  Description of Artificial Sequence: Synthetic oligonucleotide
cuuuugaacucugcuuaaauccagugg

SEQ ID NO: 68099 - RNA, 27 nt, Artificial Sequence
  Description of Artificial Sequence: Synthetic oligonucleotide
gcuuuugaacucugcuuaaauccagug

SEQ ID NO: 68100 - RNA, 27 nt, Artificial Sequence
  Description of Artificial Sequence: Synthetic oligonucleotide
agggcuuuugaacucugcuuaaaucca

SEQ ID NO: 68101 - RNA, 27 nt, Artificial Sequence
  Description of Artificial Sequence: Synthetic oligonucleotide
aagggcuuuugaacucugcuuaaaucc

SEQ ID NO: 68102 - RNA, 27 nt, Artificial Sequence
  Description of Artificial Sequence: Synthetic oligonucleotide
ugaagggcuuuugaacucugcuuaaau

SEQ ID NO: 68103 - RNA, 27 nt, Artificial Sequence
  Description of Artificial Sequence: Synthetic oligonucleotide
cugaagggcuuuugaacucugcuuaaa

SEQ ID NO: 68104 - RNA, 27 nt, Artificial Sequence
  Description of Artificial Sequence: Synthetic oligonucleotide
cgcugaagggcuuuugaacucugcuua

SEQ ID NO: 68105 - RNA, 27 nt, Artificial Sequence
  Description of Artificial Sequence: Synthetic oligonucleotide
cgagcggcuucacucagacccugaggc

SEQ ID NO: 68106 - RNA, 27 nt, Artificial Sequence
  Description of Artificial Sequence: Synthetic oligonucleotide
uugacuggcgugauguaguugcuuggg

SEQ ID NO: 68107 - RNA, 27 nt, Artificial Sequence
  Description of Artificial Sequence: Synthetic oligonucleotide
cacgcaccaagaagcugccauugaucc

SEQ ID NO: 68108 - RNA, 27 nt, Artificial Sequence
  Description of Artificial Sequence: Synthetic oligonucleotide
cugaugaauccaaugugggcuggaauc

SEQ ID NO: 68109 - RNA, 27 nt, Artificial Sequence
  Description of Artificial Sequence: Synthetic oligonucleotide
cuuagguauuccacauucucagcugug

SEQ ID NO: 68110 - RNA, 27 nt, Artificial Sequence
  Description of Artificial Sequence: Synthetic oligonucleotide
ugagccucaaauuaggagauacguuuu

SEQ ID NO: 68111 - RNA, 27 nt, Artificial Sequence
  Description of Artificial Sequence: Synthetic oligonucleotide
ccaauuguagagaaauuauuuuaggaa

SEQ ID NO: 68112 - RNA, 27 nt, Artificial Sequence
  Description of Artificial Sequence: Synthetic oligonucleotide
ggcuccuaacuagcugaaucuuccaau

SEQ ID NO: 68113 - RNA, 27 nt, Artificial Sequence
  Description of Artificial Sequence: Synthetic oligonucleotide
guggauauugacuaggagaguuuaaaa

SEQ ID NO: 68114 - RNA, 27 nt, Artificial Sequence
  Description of Artificial Sequence: Synthetic oligonucleotide
ugugacugaacauaacuguaggcugaa

SEQ ID NO: 68115 - RNA, 27 nt, Artificial Sequence
  Description of Artificial Sequence: Synthetic oligonucleotide
guaugugugugugacugaacauaacug

SEQ ID NO: 68116 - RNA, 27 nt, Artificial Sequence
  Description of Artificial Sequence: Synthetic oligonucleotide
aagcaaaaggaacauuuuguaugugug

SEQ ID NO: 68117 - RNA, 27 nt, Artificial Sequence
  Description of Artificial Sequence: Synthetic oligonucleotide
aaaaauuacuuuaaaagcaaaaggaac

SEQ ID NO: 68118 - RNA, 27 nt, Artificial Sequence
  Description of Artificial Sequence: Synthetic oligonucleotide
ccauugacuguugcuucacaggucaga

SEQ ID NO: 68119 - RNA, 27 nt, Artificial Sequence
  Description of Artificial Sequence: Synthetic oligonucleotide
auugguuugucgaugugugagauaguu

SEQ ID NO: 68120 - RNA, 27 nt, Artificial Sequence
  Description of Artificial Sequence: Synthetic oligonucleotide
agugguagcaguacaauugaggacaag

SEQ ID NO: 68121 - RNA, 27 nt, Artificial Sequence
  Description of Artificial Sequence: Synthetic oligonucleotide
uaagaccgcuugccagcuacgguuuca

SEQ ID NO: 68122 - RNA, 27 nt, Artificial Sequence
  Description of Artificial Sequence: Synthetic oligonucleotide
agccgguaagaccgcuugccagcuacg

SEQ ID NO: 68123 - RNA, 27 nt, Artificial Sequence
  Description of Artificial Sequence: Synthetic oligonucleotide
gguaacccaucuuuuaaccauacaacu

SEQ ID NO: 68124 - RNA, 27 nt, Artificial Sequence
  Description of Artificial Sequence: Synthetic oligonucleotide
ucgcagguaacccaucuuuuaaccaua

SEQ ID NO: 68125 - RNA, 27 nt, Artificial Sequence
  Description of Artificial Sequence: Synthetic oligonucleotide
cucagcaagauuguauaauucccugca

SEQ ID NO: 68126 - RNA, 27 nt, Artificial Sequence
  Description of Artificial Sequence: Synthetic oligonucleotide
acuguuuuaugcucagcaagauuguau

SEQ ID NO: 68127 - RNA, 27 nt, Artificial Sequence
  Description of Artificial Sequence: Synthetic oligonucleotide
aggauaaaggacucuucauuauuggaa

SEQ ID NO: 68128 - RNA, 27 nt, Artificial Sequence
  Description of Artificial Sequence: Synthetic oligonucleotide
caacuugcguuggaacauccaaagugu

SEQ ID NO: 68129 - RNA, 27 nt, Artificial Sequence
  Description of Artificial Sequence: Synthetic oligonucleotide
augguuucaguuuaguggaagcauuua

SEQ ID NO: 68130 - RNA, 27 nt, Artificial Sequence
  Description of Artificial Sequence: Synthetic oligonucleotide
auauuuaacaaagucaaacuuucucac

SEQ ID NO: 68131 - RNA, 27 nt, Artificial Sequence
  Description of Artificial Sequence: Synthetic oligonucleotide
aacuuuuaauauacaguaguucuuuuc

SEQ ID NO: 68132 - RNA, 27 nt, Artificial Sequence
  Description of Artificial Sequence: Synthetic oligonucleotide
guuaagucaaaacccguauuucuaaag

SEQ ID NO: 68133 - RNA, 27 nt, Artificial Sequence
  Description of Artificial Sequence: Synthetic oligonucleotide
gugcugaguuugcuguacccauguuga

SEQ ID NO: 68134 - RNA, 27 nt, Artificial Sequence
  Description of Artificial Sequence: Synthetic oligonucleotide
ugaggucagcaucuucugugucuuuac

SEQ ID NO: 68135 - RNA, 27 nt, Artificial Sequence
  Description of Artificial Sequence: Synthetic oligonucleotide
gcgaucugaauaaaccucccuacuagc

SEQ ID NO: 68136 - RNA, 27 nt, Artificial Sequence
  Description of Artificial Sequence: Synthetic oligonucleotide
aucccagaacccugcugcagaaggcca

SEQ ID NO: 68137 - RNA, 27 nt, Artificial Sequence
  Description of Artificial Sequence: Synthetic oligonucleotide
cauaauuuccaauauguaccagaccuu

SEQ ID NO: 68138 - RNA, 27 nt, Artificial Sequence
  Description of Artificial Sequence: Synthetic oligonucleotide
cuagugcuuccaucggaaggacuaggu

SEQ ID NO: 68139 - RNA, 27 nt, Artificial Sequence
  Description of Artificial Sequence: Synthetic oligonucleotide
uccacauaaaaacaauauucacuggga

SEQ ID NO: 68140 - RNA, 27 nt, Artificial Sequence
  Description of Artificial Sequence: Synthetic oligonucleotide
ucuaccaauuccaacuugaauucauug

SEQ ID NO: 68141 - RNA, 27 nt, Artificial Sequence
  Description of Artificial Sequence: Synthetic oligonucleotide
ucuccaagucuaaaucuguguccugag

SEQ ID NO: 68142 - RNA, 27 nt, Artificial Sequence
  Description of Artificial Sequence: Synthetic oligonucleotide
uggaauacuguaacugugcuuugagga

SEQ ID NO: 68143 - RNA, 27 nt, Artificial Sequence
  Description of Artificial Sequence: Synthetic oligonucleotide
uuaauucaucagugguggcagugguag

SEQ ID NO: 68144 - RNA, 27 nt, Artificial Sequence
  Description of Artificial Sequence: Synthetic oligonucleotide
gugaugauguggcacuaguaguuucuu

SEQ ID NO: 68145 - RNA, 27 nt, Artificial Sequence
  Description of Artificial Sequence: Synthetic oligonucleotide
ucuguuuggugaggcuguccgacuuug

SEQ ID NO: 68146 - RNA, 27 nt, Artificial Sequence
  Description of Artificial Sequence: Synthetic oligonucleotide
ccaucauguuccauuuuucgcuuucuc

SEQ ID NO: 68147 - RNA, 27 nt, Artificial Sequence
  Description of Artificial Sequence: Synthetic oligonucleotide
gcagucuacaugcuaaaucagagggua

SEQ ID NO: 68148 - RNA, 27 nt, Artificial Sequence
  Description of Artificial Sequence: Synthetic oligonucleotide
cauaaauagauccuuaaauagcucaaa

SEQ ID NO: 68149 - RNA, 27 nt, Artificial Sequence
  Description of Artificial Sequence: Synthetic oligonucleotide
ugauaauagugcuuuuucaccuuuuuc

SEQ ID NO: 68150 - RNA, 27 nt, Artificial Sequence
  Description of Artificial Sequence: Synthetic oligonucleotide
gcagaacugauaauagugcuuuuucac

SEQ ID NO: 68151 - RNA, 27 nt, Artificial Sequence
  Description of Artificial Sequence: Synthetic oligonucleotide
guagguuuaaucuuucuuuucagccau

SEQ ID NO: 68152 - RNA, 27 nt, Artificial Sequence
  Description of Artificial Sequence: Synthetic oligonucleotide
agaaggauuuuauuauaaggguuuaau

SEQ ID NO: 68153 - RNA, 27 nt, Artificial Sequence
  Description of Artificial Sequence: Synthetic oligonucleotide
gucuacagcauuggcuaauaguaugaa

SEQ ID NO: 68154 - RNA, 27 nt, Artificial Sequence
  Description of Artificial Sequence: Synthetic oligonucleotide
cuauuccuaucaaaaugcuucugucua

SEQ ID NO: 68155 - RNA, 27 nt, Artificial Sequence
  Description of Artificial Sequence: Synthetic oligonucleotide
ucagggccauuaucuuauuugcucuau

SEQ ID NO: 68156 - RNA, 27 nt, Artificial Sequence
  Description of Artificial Sequence: Synthetic oligonucleotide
ugcuugaggaagagaaaaauguugguc

SEQ ID NO: 68157 - RNA, 27 nt, Artificial Sequence
  Description of Artificial Sequence: Synthetic oligonucleotide
ugggcugaacuuuucucauacuuaaag

SEQ ID NO: 68158 - RNA, 27 nt, Artificial Sequence
  Description of Artificial Sequence: Synthetic oligonucleotide
gguucagcagccaucuuuauuccugcg

SEQ ID NO: 68159 - RNA, 27 nt, Artificial Sequence
  Description of Artificial Sequence: Synthetic oligonucleotide
ugaagagaacuuggucauucaaauuuc

SEQ ID NO: 68160 - RNA, 27 nt, Artificial Sequence
  Description of Artificial Sequence: Synthetic oligonucleotide
cucuaggcuggcuaucuuuauacauac

SEQ ID NO: 68161 - RNA, 27 nt, Artificial Sequence
  Description of Artificial Sequence: Synthetic oligonucleotide
acacuucacagagauaguuacagccau

SEQ ID NO: 68162 - RNA, 27 nt, Artificial Sequence
  Description of Artificial Sequence: Synthetic oligonucleotide
uugaaauuuucucacacuucacagaga

SEQ ID NO: 68163 - RNA, 27 nt, Artificial Sequence
  Description of Artificial Sequence: Synthetic oligonucleotide
ucaggaggauucauuuccuuaaaggaa

SEQ ID NO: 68164 - RNA, 27 nt, Artificial Sequence
  Description of Artificial Sequence: Synthetic oligonucleotide
auaugaugucacuuuuuguauccuuga

SEQ ID NO: 68165 - RNA, 27 nt, Artificial Sequence
  Description of Artificial Sequence: Synthetic oligonucleotide
uaugaugaagauucaaauugcaucuua

SEQ ID NO: 68166 - RNA, 27 nt, Artificial Sequence
  Description of Artificial Sequence: Synthetic oligonucleotide
uuaauagcuagucuucguuuugaacag

SEQ ID NO: 68167 - RNA, 27 nt, Artificial Sequence
  Description of Artificial Sequence: Synthetic oligonucleotide
auuuuuaguagagaugagguuucacca

SEQ ID NO: 68168 - RNA, 27 nt, Artificial Sequence
  Description of Artificial Sequence: Synthetic oligonucleotide
aggcgagauagagcuucucuuucguuc

SEQ ID NO: 68169 - RNA, 27 nt, Artificial Sequence
  Description of Artificial Sequence: Synthetic oligonucleotide
aacuggaccgaaggcgcuuguggagaa

SEQ ID NO: 68170 - RNA, 27 nt, Artificial Sequence
  Description of Artificial Sequence: Synthetic oligonucleotide
gcggcuacaucuuuggaaucuucuccu

SEQ ID NO: 68171 - RNA, 27 nt, Artificial Sequence
  Description of Artificial Sequence: Synthetic oligonucleotide
caagucuccucauugaauccagauugg

SEQ ID NO: 68172 - RNA, 27 nt, Artificial Sequence
  Description of Artificial Sequence: Synthetic oligonucleotide
uccucacuacucucaaaucuguucugg

SEQ ID NO: 68173 - RNA, 27 nt, Artificial Sequence
  Description of Artificial Sequence: Synthetic oligonucleotide
uuuguacucaucugcacagcucuggcu

SEQ ID NO: 68174 - RNA, 27 nt, Artificial Sequence
  Description of Artificial Sequence: Synthetic oligonucleotide
gcccauuaacaacaacaaucugaggug

SEQ ID NO: 68175 - RNA, 27 nt, Artificial Sequence
  Description of Artificial Sequence: Synthetic oligonucleotide
aauaaauuaaaaauaauuaaaauagug

SEQ ID NO: 68176 - RNA, 27 nt, Artificial Sequence
  Description of Artificial Sequence: Synthetic oligonucleotide
cauauuuaaauauuaauaaauuaaaaa

SEQ ID NO: 68177 - RNA, 27 nt, Artificial Sequence
  Description of Artificial Sequence: Synthetic oligonucleotide
gaaacaaaggauauucaaacugcauag

SEQ ID NO: 68178 - RNA, 27 nt, Artificial Sequence
  Description of Artificial Sequence: Synthetic oligonucleotide
caaacacuuagacgccagcagcauggg

SEQ ID NO: 68179 - RNA, 27 nt, Artificial Sequence
  Description of Artificial Sequence: Synthetic oligonucleotide
uuugucacaggugaaaugcacaucuga

SEQ ID NO: 68180 - RNA, 27 nt, Artificial Sequence
  Description of Artificial Sequence: Synthetic oligonucleotide
uaauucagccuggcacagguuuugauc

SEQ ID NO: 68181 - RNA, 27 nt, Artificial Sequence
  Description of Artificial Sequence: Synthetic oligonucleotide
auuguaagaaugacuacccacauucac

SEQ ID NO: 68182 - RNA, 27 nt, Artificial Sequence
  Description of Artificial Sequence: Synthetic oligonucleotide
caauuguaagaaugacuacccacauuc

SEQ ID NO: 68183 - RNA, 27 nt, Artificial Sequence
  Description of Artificial Sequence: Synthetic oligonucleotide
guacacucucugaugcucauuuucaua

SEQ ID NO: 68184 - RNA, 27 nt, Artificial Sequence
  Description of Artificial Sequence: Synthetic oligonucleotide
cugcugaguucuacaugaaaagcaaau

SEQ ID NO: 68185 - RNA, 27 nt, Artificial Sequence
  Description of Artificial Sequence: Synthetic oligonucleotide
uacugaaaauaaauauagaaauacaac

SEQ ID NO: 68186 - RNA, 27 nt, Artificial Sequence
  Description of Artificial Sequence: Synthetic oligonucleotide
uuccauuuaagaaacauuaaucaaaac

SEQ ID NO: 68187 - RNA, 27 nt, Artificial Sequence
  Description of Artificial Sequence: Synthetic oligonucleotide
acaauuuuaggcacuauacacguuguu

SEQ ID NO: 68188 - RNA, 27 nt, Artificial Sequence
  Description of Artificial Sequence: Synthetic oligonucleotide
ccagauguuaguagccaaggauauggu

SEQ ID NO: 68189 - RNA, 27 nt, Artificial Sequence
  Description of Artificial Sequence: Synthetic oligonucleotide
agcucacagucuccagauguuaguagc

SEQ ID NO: 68190 - RNA, 27 nt, Artificial Sequence
  Description of Artificial Sequence: Synthetic oligonucleotide
auuaauaaaaagcacacaacuuauggc

SEQ ID NO: 68191 - RNA, 27 nt, Artificial Sequence
  Description of Artificial Sequence: Synthetic oligonucleotide
aauguaagaagagccaaaaugaugcau

SEQ ID NO: 68192 - RNA, 27 nt, Artificial Sequence
  Description of Artificial Sequence: Synthetic oligonucleotide
acauuuuuacaaauguaagaagagcca

SEQ ID NO: 68193 - RNA, 27 nt, Artificial Sequence
  Description of Artificial Sequence: Synthetic oligonucleotide
aauaugaauuaagaugaccuaaucugu

SEQ ID NO: 68194 - RNA, 27 nt, Artificial Sequence
  Description of Artificial Sequence: Synthetic oligonucleotide
ucaugauuaguucuuucaauuccaucc

SEQ ID NO: 68195 - RNA, 27 nt, Artificial Sequence
  Description of Artificial Sequence: Synthetic oligonucleotide
cccaagagcagaaggaaugagugugca

SEQ ID NO: 68196 - RNA, 27 nt, Artificial Sequence
  Description of Artificial Sequence: Synthetic oligonucleotide
cucaaagcuacugguuaccucuacacc

SEQ ID NO: 68197 - RNA, 27 nt, Artificial Sequence
  Description of Artificial Sequence: Synthetic oligonucleotide
ugaaauauuacguggcaugugguuggg

SEQ ID NO: 68198 - RNA, 27 nt, Artificial Sequence
  Description of Artificial Sequence: Synthetic oligonucleotide
agugaagagaauaacuuguuuccgaag

SEQ ID NO: 68199 - RNA, 27 nt, Artificial Sequence
  Description of Artificial Sequence: Synthetic oligonucleotide
uuucuuagcauuaguuauugggaguga

SEQ ID NO: 68200 - RNA, 27 nt, Artificial Sequence
  Description of Artificial Sequence: Synthetic oligonucleotide
uugauuuucagcauuucuuagcauuag

SEQ ID NO: 68201 - RNA, 27 nt, Artificial Sequence
  Description of Artificial Sequence: Synthetic oligonucleotide
aaaguaaucauauuuagagaaagacag

SEQ ID NO: 68202 - RNA, 27 nt, Artificial Sequence
  Description of Artificial Sequence: Synthetic oligonucleotide
uguagaacaaaaugccugaaauucagc

SEQ ID NO: 68203 - RNA, 27 nt, Artificial Sequence
  Description of Artificial Sequence: Synthetic oligonucleotide
gagagucccgggugagagggaaucgcc

SEQ ID NO: 68204 - RNA, 27 nt, Artificial Sequence
  Description of Artificial Sequence: Synthetic oligonucleotide
cuuuacuuuaaagguucacuuuccuug

SEQ ID NO: 68205 - RNA, 27 nt, Artificial Sequence
  Description of Artificial Sequence: Synthetic oligonucleotide
ccaggcuuccagagcaugcagccuccu

SEQ ID NO: 68206 - RNA, 27 nt, Artificial Sequence
  Description of Artificial Sequence: Synthetic oligonucleotide
cucucuuuuguuuucuguucagagaaa

SEQ ID NO: 68207 - RNA, 27 nt, Artificial Sequence
  Description of Artificial Sequence: Synthetic oligonucleotide
cggcauaacugauuacagccaaguuca

SEQ ID NO: 68208 - RNA, 27 nt, Artificial Sequence
  Description of Artificial Sequence: Synthetic oligonucleotide
uggacuucuuuuaauuuuggcuucuuc

SEQ ID NO: 68209 - RNA, 27 nt, Artificial Sequence
  Description of Artificial Sequence: Synthetic oligonucleotide
uaaccucaccuggacuucuuuuaauuu

SEQ ID NO: 68210 - RNA, 27 nt, Artificial Sequence
  Description of Artificial Sequence: Synthetic oligonucleotide
guccucuucccgauaauccggauucag

SEQ ID NO: 68211 - RNA, 27 nt, Artificial Sequence
  Description of Artificial Sequence: Synthetic oligonucleotide
acaauacuugcuuugaugucacauuaa

SEQ ID NO: 68212 - RNA, 27 nt, Artificial Sequence
  Description of Artificial Sequence: Synthetic oligonucleotide
gagugcuacaauacuugcuuugauguc

SEQ ID NO: 68213 - RNA, 27 nt, Artificial Sequence
  Description of Artificial Sequence: Synthetic oligonucleotide
auuugugguuuuguuuucucucucucu

SEQ ID NO: 68214 - RNA, 27 nt, Artificial Sequence
  Description of Artificial Sequence: Synthetic oligonucleotide
uguaugggcuuaaauacuacagcgagg

SEQ ID NO: 68215 - RNA, 27 nt, Artificial Sequence
  Description of Artificial Sequence: Synthetic oligonucleotide
cuguaugggcuuaaauacuacagcgag

SEQ ID NO: 68216 - RNA, 27 nt, Artificial Sequence
  Description of Artificial Sequence: Synthetic oligonucleotide
ggaagguuucuguaugggcuuaaauac

SEQ ID NO: 68217 - RNA, 27 nt, Artificial Sequence
  Description of Artificial Sequence: Synthetic oligonucleotide
guagguauaccauguuuauuuuaauac

SEQ ID NO: 68218 - RNA, 27 nt, Artificial Sequence
  Description of Artificial Sequence: Synthetic oligonucleotide
uccgaaaacuggccgaucagaacagcc

SEQ ID NO: 68219 - RNA, 27 nt, Artificial Sequence
  Description of Artificial Sequence: Synthetic oligonucleotide
cccuguuccaaaguucaaauuauuugu

SEQ ID NO: 68220 - RNA, 27 nt, Artificial Sequence
  Description of Artificial Sequence: Synthetic oligonucleotide
acuggaaaguuaaauuaaggucgcaau

SEQ ID NO: 68221 - RNA, 27 nt, Artificial Sequence
  Description of Artificial Sequence: Synthetic oligonucleotide
caaaaccaaacuuuagcuuucucagcc

SEQ ID NO: 68222 - RNA, 27 nt, Artificial Sequence
  Description of Artificial Sequence: Synthetic oligonucleotide
uacagugggaaguagcaucuuuacuuu

SEQ ID NO: 68223 - RNA, 27 nt, Artificial Sequence
  Description of Artificial Sequence: Synthetic oligonucleotide
ucauaugguaucagcaauuaagcagua

SEQ ID NO: 68224 - RNA, 27 nt, Artificial Sequence
  Description of Artificial Sequence: Synthetic oligonucleotide
cagcccauguuucauucauaugguauc

SEQ ID NO: 68225 - RNA, 27 nt, Artificial Sequence
  Description of Artificial Sequence: Synthetic oligonucleotide
uaugaaaaaguuggauaagaaaguugg

SEQ ID NO: 68226 - RNA, 27 nt, Artificial Sequence
  Description of Artificial Sequence: Synthetic oligonucleotide
uccggccucaugaugucaugcaaggcu

SEQ ID NO: 68227 - RNA, 27 nt, Artificial Sequence
  Description of Artificial Sequence: Synthetic oligonucleotide
acaaaugcagucauauacaaauucagg

SEQ ID NO: 68228 - RNA, 27 nt, Artificial Sequence
  Description of Artificial Sequence: Synthetic oligonucleotide
gguaguaaacauucuacuaggauucuu

SEQ ID NO: 68229 - RNA, 27 nt, Artificial Sequence
  Description of Artificial Sequence: Synthetic oligonucleotide
uuucaucaaaaaauucuucccuuucug

SEQ ID NO: 68230 - RNA, 27 nt, Artificial Sequence
  Description of Artificial Sequence: Synthetic oligonucleotide
aaauucacacacuggcaugccgauagc

SEQ ID NO: 68231 - RNA, 27 nt, Artificial Sequence
  Description of Artificial Sequence: Synthetic oligonucleotide
acauacauugcucuacuaugaggugaa

SEQ ID NO: 68232 - RNA, 27 nt, Artificial Sequence
  Description of Artificial Sequence: Synthetic oligonucleotide
uauauaugugcuuuggcaauucuggug

SEQ ID NO: 68233 - RNA, 27 nt, Artificial Sequence
  Description of Artificial Sequence: Synthetic oligonucleotide
ggagaaacuauuacccagaucaccacu

SEQ ID NO: 68234 - RNA, 27 nt, Artificial Sequence
  Description of Artificial Sequence: Synthetic oligonucleotide
auuuggagaaacuauuacccagaucac

SEQ ID NO: 68235 - RNA, 27 nt, Artificial Sequence
  Description of Artificial Sequence: Synthetic oligonucleotide
uuucuaggaaguauucaucacauccac

SEQ ID NO: 68236 - RNA, 27 nt, Artificial Sequence
  Description of Artificial Sequence: Synthetic oligonucleotide
cauauaugguguagcuguggaaaugcg

SEQ ID NO: 68237 - RNA, 27 nt, Artificial Sequence
  Description of Artificial Sequence: Synthetic oligonucleotide
cuccauucauauaugguguagcugugg

SEQ ID NO: 68238 - RNA, 27 nt, Artificial Sequence
  Description of Artificial Sequence: Synthetic oligonucleotide
aucuucuucucguguaagaacugcagc

SEQ ID NO: 68239 - RNA, 27 nt, Artificial Sequence
  Description of Artificial Sequence: Synthetic oligonucleotide
ucccuguaaaugaucuucuucucgugu

SEQ ID NO: 68240 - RNA, 27 nt, Artificial Sequence
  Description of Artificial Sequence: Synthetic oligonucleotide
gucccuguaaaugaucuucuucucgug

SEQ ID NO: 68241 - RNA, 27 nt, Artificial Sequence
  Description of Artificial Sequence: Synthetic oligonucleotide
ucaggucccuguaaaugaucuucuucu

SEQ ID NO: 68242 - RNA, 27 nt, Artificial Sequence
  Description of Artificial Sequence: Synthetic oligonucleotide
gaugcagucaaacaccucuuccucugu

SEQ ID NO: 68243 - RNA, 27 nt, Artificial Sequence
  Description of Artificial Sequence: Synthetic oligonucleotide
cgaugcagucaaacaccucuuccucug

SEQ ID NO: 68244 - RNA, 27 nt, Artificial Sequence
  Description of Artificial Sequence: Synthetic oligonucleotide
cccugugaacucgcccucaaaguagcg

SEQ ID NO: 68245 - RNA, 27 nt, Artificial Sequence
  Description of Artificial Sequence: Synthetic oligonucleotide
ggacagaggugccaggagaugcccuca

SEQ ID NO: 68246 - RNA, 27 nt, Artificial Sequence
  Description of Artificial Sequence: Synthetic oligonucleotide
uuaaaaagacaaaccauaucacuccuu

SEQ ID NO: 68247 - RNA, 27 nt, Artificial Sequence
  Description of Artificial Sequence: Synthetic oligonucleotide
cuuaaaaagacaaaccauaucacuccu

SEQ ID NO: 68248 - RNA, 27 nt, Artificial Sequence
  Description of Artificial Sequence: Synthetic oligonucleotide
gacaaccuuuaggaucuuuacugcaac

SEQ ID NO: 68249 - RNA, 27 nt, Artificial Sequence
  Description of Artificial Sequence: Synthetic oligonucleotide
gucgacaaccuuuaggaucuuuacugc

SEQ ID NO: 68250 - RNA, 27 nt, Artificial Sequence
  Description of Artificial Sequence: Synthetic oligonucleotide
acaauugccagguuguccuuugucaug

SEQ ID NO: 68251 - RNA, 27 nt, Artificial Sequence
  Description of Artificial Sequence: Synthetic oligonucleotide
ccucgcaccacugggucacaauugcca

SEQ ID NO: 68252 - RNA, 27 nt, Artificial Sequence
  Description of Artificial Sequence: Synthetic oligonucleotide
auuucaugucucuauggaugauguucu

SEQ ID NO: 68253 - RNA, 27 nt, Artificial Sequence
  Description of Artificial Sequence: Synthetic oligonucleotide
uggagaaauauauuguuggauuucaug

SEQ ID NO: 68254 - RNA, 27 nt, Artificial Sequence
  Description of Artificial Sequence: Synthetic oligonucleotide
agccuucauggagaaauauauuguugg

SEQ ID NO: 68255 - RNA, 27 nt, Artificial Sequence
  Description of Artificial Sequence: Synthetic oligonucleotide
accacuccagcgugacuuuacuguugc

SEQ ID NO: 68256 - RNA, 27 nt, Artificial Sequence
  Description of Artificial Sequence: Synthetic oligonucleotide
ccucucuuccuuuacuuucuucacaca

SEQ ID NO: 68257 - RNA, 27 nt, Artificial Sequence
  Description of Artificial Sequence: Synthetic oligonucleotide
gcccgaugcaaggauggcucggaagcg

SEQ ID NO: 68258 - RNA, 27 nt, Artificial Sequence
  Description of Artificial Sequence: Synthetic oligonucleotide
cacaguaggauauucaaccuccauuuc

SEQ ID NO: 68259 - RNA, 27 nt, Artificial Sequence
  Description of Artificial Sequence: Synthetic oligonucleotide
uuacacaguaggauauucaaccuccau

SEQ ID NO: 68260 - RNA, 27 nt, Artificial Sequence
  Description of Artificial Sequence: Synthetic oligonucleotide
uacacuacaagggaaaacucaaaaucu

SEQ ID NO: 68261 - RNA, 27 nt, Artificial Sequence
  Description of Artificial Sequence: Synthetic oligonucleotide
caaucaacaaagaacaaacaggauaaa

SEQ ID NO: 68262 - RNA, 27 nt, Artificial Sequence
  Description of Artificial Sequence: Synthetic oligonucleotide
uuucaaucaacaaagaacaaacaggau

SEQ ID NO: 68263 - RNA, 27 nt, Artificial Sequence
  Description of Artificial Sequence: Synthetic oligonucleotide
auggaagaaaaagaaggcuguagagaa

SEQ ID NO: 68264 - RNA, 27 nt, Artificial Sequence
  Description of Artificial Sequence: Synthetic oligonucleotide
uagaaggaagauuagcuauggaagaaa

SEQ ID NO: 68265 - RNA, 27 nt, Artificial Sequence
  Description of Artificial Sequence: Synthetic oligonucleotide
augaagcauucaacaggaagauuauuu

SEQ ID NO: 68266 - RNA, 27 nt, Artificial Sequence
  Description of Artificial Sequence: Synthetic oligonucleotide
caugaagcauucaacaggaagauuauu

SEQ ID NO: 68267 - RNA, 27 nt, Artificial Sequence
  Description of Artificial Sequence: Synthetic oligonucleotide
ucaaaguagaauucaagucaugaagca

SEQ ID NO: 68268 - RNA, 27 nt, Artificial Sequence
  Description of Artificial Sequence: Synthetic oligonucleotide
gucuguaguugcuucucucccucuuag

SEQ ID NO: 68269 - RNA, 27 nt, Artificial Sequence
  Description of Artificial Sequence: Synthetic oligonucleotide
guugaccuuggucugguaggagacggc

SEQ ID NO: 68270 - RNA, 27 nt, Artificial Sequence
  Description of Artificial Sequence: Synthetic oligonucleotide
gucgagauagucgggccgauugaucuc

SEQ ID NO: 68271 - RNA, 27 nt, Artificial Sequence
  Description of Artificial Sequence: Synthetic oligonucleotide
guuugggaagguuggauguucguccuc

SEQ ID NO: 68272 - RNA, 27 nt, Artificial Sequence
  Description of Artificial Sequence: Synthetic oligonucleotide
aguucuaagcuuggguuccgacccuaa

SEQ ID NO: 68273 - RNA, 27 nt, Artificial Sequence
  Description of Artificial Sequence: Synthetic oligonucleotide
uuaaaguucuaagcuuggguuccgacc

SEQ ID NO: 68274 - RNA, 27 nt, Artificial Sequence
  Description of Artificial Sequence: Synthetic oligonucleotide
guugcuuaaaguucuaagcuuggguuc

SEQ ID NO: 68275 - RNA, 27 nt, Artificial Sequence
  Description of Artificial Sequence: Synthetic oligonucleotide
gugguggucuuguugcuuaaaguucua

SEQ ID NO: 68276 - RNA, 27 nt, Artificial Sequence
  Description of Artificial Sequence: Synthetic oligonucleotide
acuuuauuucucgccacugaauaguag

SEQ ID NO: 68277 - RNA, 27 nt, Artificial Sequence
  Description of Artificial Sequence: Synthetic oligonucleotide
aacuuuauuucucgccacugaauagua

SEQ ID NO: 68278 - RNA, 27 nt, Artificial Sequence
  Description of Artificial Sequence: Synthetic oligonucleotide
ggaucauuuccuguuaucuguguuugu

SEQ ID NO: 68279 - RNA, 27 nt, Artificial Sequence
  Description of Artificial Sequence: Synthetic oligonucleotide
guuucauuucuucucuuuucuuaaggc

SEQ ID NO: 68280 - RNA, 27 nt, Artificial Sequence
  Description of Artificial Sequence: Synthetic oligonucleotide
ggaggauggaaacacacuccuucaguu

SEQ ID NO: 68281 - RNA, 27 nt, Artificial Sequence
  Description of Artificial Sequence: Synthetic oligonucleotide
ucaaagauuuucagucccgcggugaca

SEQ ID NO: 68282 - RNA, 27 nt, Artificial Sequence
  Description of Artificial Sequence: Synthetic oligonucleotide
ccugaacggcacgcuuauuucugcugu

SEQ ID NO: 68283 - RNA, 27 nt, Artificial Sequence
  Description of Artificial Sequence: Synthetic oligonucleotide
cuucuggacccugaacggcacgcuuau

SEQ ID NO: 68284 - RNA, 27 nt, Artificial Sequence
  Description of Artificial Sequence: Synthetic oligonucleotide
caagcagucuugagugacuguuucuuc

SEQ ID NO: 68285 - RNA, 27 nt, Artificial Sequence
  Description of Artificial Sequence: Synthetic oligonucleotide
ccaaagacauggaccuucuuccucuga

SEQ ID NO: 68286 - RNA, 27 nt, Artificial Sequence
  Description of Artificial Sequence: Synthetic oligonucleotide
guguuucaggcauauuuugaauacauc

SEQ ID NO: 68287 - RNA, 27 nt, Artificial Sequence
  Description of Artificial Sequence: Synthetic oligonucleotide
gagguacagagaaagggaggaaaauag

SEQ ID NO: 68288 - RNA, 27 nt, Artificial Sequence
  Description of Artificial Sequence: Synthetic oligonucleotide
ucuugucuugcucuaucuuucuuuggu

SEQ ID NO: 68289 - RNA, 27 nt, Artificial Sequence
  Description of Artificial Sequence: Synthetic oligonucleotide
uuucuugucuugcucuaucuuucuuug

SEQ ID NO: 68290 - RNA, 27 nt, Artificial Sequence
  Description of Artificial Sequence: Synthetic oligonucleotide
ggaucuuguacaaacaaaugcuuucuc

SEQ ID NO: 68291 - RNA, 27 nt, Artificial Sequence
  Description of Artificial Sequence: Synthetic oligonucleotide
ucugcaaguacguucguuuaacucaag

SEQ ID NO: 68292 - RNA, 27 nt, Artificial Sequence
  Description of Artificial Sequence: Synthetic oligonucleotide
ucuguaucgaucguucuguaucagucu

SEQ ID NO: 68293 - RNA, 27 nt, Artificial Sequence
  Description of Artificial Sequence: Synthetic oligonucleotide
auuuauuuuuauauauauauaauauau

SEQ ID NO: 68294 - RNA, 27 nt, Artificial Sequence
  Description of Artificial Sequence: Synthetic oligonucleotide
auauuuauuuuuauauauauauaauau

SEQ ID NO: 68295 - RNA, 27 nt, Artificial Sequence
  Description of Artificial Sequence: Synthetic oligonucleotide
cacagcagucaaauacauccagugaag

SEQ ID NO: 68296 - RNA, 27 nt, Artificial Sequence
  Description of Artificial Sequence: Synthetic oligonucleotide
gucucucaucuccuccucuucccuguc

SEQ ID NO: 68297 - RNA, 27 nt, Artificial Sequence
  Description of Artificial Sequence: Synthetic oligonucleotide
ccaagugggacaaaaaaaagaucaugc

SEQ ID NO: 68298 - RNA, 14 nt, Artificial Sequence
  Description of Artificial Sequence: Synthetic oligonucleotide
guauuuugaugagg

SEQ ID NO: 68299 - RNA, 12 nt, Artificial Sequence
  Description of Artificial Sequence: Synthetic oligonucleotide
ggcccagaugau

SEQ ID NO: 68300 - RNA, 14 nt, Artificial Sequence
  Description of Artificial Sequence: Synthetic oligonucleotide
gggaagaaaacuau

SEQ ID NO: 68301 - RNA, 15 nt, Artificial Sequence
  Description of Artificial Sequence: Synthetic oligonucleotide
guuuuaauuuauuuc

SEQ ID NO: 68302 - RNA, 12 nt, Artificial Sequence
  Description of Artificial Sequence: Synthetic oligonucleotide
acguagggaaau

SEQ ID NO: 68303 - RNA, 12 nt, Artificial Sequence
  Description of Artificial Sequence: Synthetic oligonucleotide
ccaggguuuacc

SEQ ID NO: 68304 - RNA, 11 nt, Artificial Sequence
  Description of Artificial Sequence: Synthetic oligonucleotide
agcaagguuua

SEQ ID NO: 68305 - RNA, 12 nt, Artificial Sequence
  Description of Artificial Sequence: Synthetic oligonucleotide
uguauuauguug

SEQ ID NO: 68306 - RNA, 15 nt, Artificial Sequence
  Description of Artificial Sequence: Synthetic oligonucleotide
uuuuaaucuuuguga

SEQ ID NO: 68307 - RNA, 14 nt, Artificial Sequence
  Description of Artificial Sequence: Synthetic oligonucleotide
uuaaucuuugugac

SEQ ID NO: 68308 - RNA, 13 nt, Artificial Sequence
  Description of Artificial Sequence: Synthetic oligonucleotide
gcugcuuaugucu

SEQ ID NO: 68309 - RNA, 14 nt, Artificial Sequence
  Description of Artificial Sequence: Synthetic oligonucleotide
aaguguuucagaag

SEQ ID NO: 68310 - RNA, 13 nt, Artificial Sequence
  Description of Artificial Sequence: Synthetic oligonucleotide
gaccaucaauaag

SEQ ID NO: 68311 - RNA, 13 nt, Artificial Sequence
  Description of Artificial Sequence: Synthetic oligonucleotide
ccaucaauaagga

SEQ ID NO: 68312 - RNA, 14 nt, Artificial Sequence
  Description of Artificial Sequence: Synthetic oligonucleotide
ucaauaaggaagaa

SEQ ID NO: 68313 - RNA, 14 nt, Artificial Sequence
  Description of Artificial Sequence: Synthetic oligonucleotide
aauaaggaagaagc

SEQ ID NO: 68314 - RNA, 13 nt, Artificial Sequence
  Description of Artificial Sequence: Synthetic oligonucleotide
aggaagaagcccu

SEQ ID NO: 68315 - RNA, 13 nt, Artificial Sequence
  Description of Artificial Sequence: Synthetic oligonucleotide
gcauaacuaaagg

SEQ ID NO: 68316 - RNA, 14 nt, Artificial Sequence
  Description of Artificial Sequence: Synthetic oligonucleotide
cauaacuaaaggug

SEQ ID NO: 68317 - RNA, 12 nt, Artificial Sequence
  Description of Artificial Sequence: Synthetic oligonucleotide
cuacaucacgcc

SEQ ID NO: 68318 - RNA, 12 nt, Artificial Sequence
  Description of Artificial Sequence: Synthetic oligonucleotide
acuggauuuaag

SEQ ID NO: 68319 - RNA, 12 nt, Artificial Sequence
  Description of Artificial Sequence: Synthetic oligonucleotide
cuggauuuaagc

SEQ ID NO: 68320 - RNA, 13 nt, Artificial Sequence
  Description of Artificial Sequence: Synthetic oligonucleotide
gauuuaagcagag

SEQ ID NO: 68321 - RNA, 13 nt, Artificial Sequence
  Description of Artificial Sequence: Synthetic oligonucleotide
auuuaagcagagu

SEQ ID NO: 68322 - RNA, 13 nt, Artificial Sequence
  Description of Artificial Sequence: Synthetic oligonucleotide
uuaagcagaguuc

SEQ ID NO: 68323 - RNA, 13 nt, Artificial Sequence
  Description of Artificial Sequence: Synthetic oligonucleotide
uaagcagaguuca

SEQ ID NO: 68324 - RNA, 14 nt, Artificial Sequence
  Description of Artificial Sequence: Synthetic oligonucleotide
agcagaguucaaaa

SEQ ID NO: 68325 - RNA, 12 nt, Artificial Sequence
  Description of Artificial Sequence: Synthetic oligonucleotide
cucagggucuga

SEQ ID NO: 68326 - RNA, 13 nt, Artificial Sequence
  Description of Artificial Sequence: Synthetic oligonucleotide
caagcaacuacau

SEQ ID NO: 68327 - RNA, 12 nt, Artificial Sequence
  Description of Artificial Sequence: Synthetic oligonucleotide
aucaauggcagc

SEQ ID NO: 68328 - RNA, 11 nt, Artificial Sequence
  Description of Artificial Sequence: Synthetic oligonucleotide
uuccagcccac

SEQ ID NO: 68329 - RNA, 12 nt, Artificial Sequence
  Description of Artificial Sequence: Synthetic oligonucleotide
cagcugagaaug

SEQ ID NO: 68330 - RNA, 13 nt, Artificial Sequence
  Description of Artificial Sequence: Synthetic oligonucleotide
aacguaucuccua

SEQ ID NO: 68331 - RNA, 14 nt, Artificial Sequence
  Description of Artificial Sequence: Synthetic oligonucleotide
ccuaaaauaauuuc

SEQ ID NO: 68332 - RNA, 13 nt, Artificial Sequence
  Description of Artificial Sequence: Synthetic oligonucleotide
uggaagauucagc

SEQ ID NO: 68333 - RNA, 12 nt, Artificial Sequence
  Description of Artificial Sequence: Synthetic oligonucleotide
uuaaacucuccu

SEQ ID NO: 68334 - RNA, 12 nt, Artificial Sequence
  Description of Artificial Sequence: Synthetic oligonucleotide
cagccuacaguu

SEQ ID NO: 68335 - RNA, 13 nt, Artificial Sequence
  Description of Artificial Sequence: Synthetic oligonucleotide
guuauguucaguc

SEQ ID NO: 68336 - RNA, 13 nt, Artificial Sequence
  Description of Artificial Sequence: Synthetic oligonucleotide
cacauacaaaaug

SEQ ID NO: 68337 - RNA, 9 nt, Artificial Sequence
  Description of Artificial Sequence: Synthetic oligonucleotide
uccuuuugc

SEQ ID NO: 68338 - RNA, 12 nt, Artificial Sequence
  Description of Artificial Sequence: Synthetic oligonucleotide
ugaccugugaag

SEQ ID NO: 68339 - RNA, 12 nt, Artificial Sequence
  Description of Artificial Sequence: Synthetic oligonucleotide
cuaucucacaca

SEQ ID NO: 68340 - RNA, 13 nt, Artificial Sequence
  Description of Artificial Sequence: Synthetic oligonucleotide
uguccucaauugu

SEQ ID NO: 68341 - RNA, 12 nt, Artificial Sequence
  Description of Artificial Sequence: Synthetic oligonucleotide
aaaccguagcug

SEQ ID NO: 68342 - RNA, 12 nt, Artificial Sequence
  Description of Artificial Sequence: Synthetic oligonucleotide
uagcuggcaagc

SEQ ID NO: 68343 - RNA, 14 nt, Artificial Sequence
  Description of Artificial Sequence: Synthetic oligonucleotide
uuguaugguuaaaa

SEQ ID NO: 68344 - RNA, 14 nt, Artificial Sequence
  Description of Artificial Sequence: Synthetic oligonucleotide
ugguuaaaagaugg

SEQ ID NO: 68345 - RNA, 13 nt, Artificial Sequence
  Description of Artificial Sequence: Synthetic oligonucleotide
cagggaauuauac

SEQ ID NO: 68346 - RNA, 12 nt, Artificial Sequence
  Description of Artificial Sequence: Synthetic oligonucleotide
acaaucuugcug

SEQ ID NO: 68347 - RNA, 13 nt, Artificial Sequence
  Description of Artificial Sequence: Synthetic oligonucleotide
ccaauaaugaaga

SEQ ID NO: 68348 - RNA, 13 nt, Artificial Sequence
  Description of Artificial Sequence: Synthetic oligonucleotide
acuuuggauguuc

SEQ ID NO: 68349 - RNA, 12 nt, Artificial Sequence
  Description of Artificial Sequence: Synthetic oligonucleotide
aaugcuuccacu

SEQ ID NO: 68350 - RNA, 11 nt, Artificial Sequence
  Description of Artificial Sequence: Synthetic oligonucleotide
gagaaaguuug

SEQ ID NO: 68351 - RNA, 11 nt, Artificial Sequence
  Description of Artificial Sequence: Synthetic oligonucleotide
aaagaacuacu

SEQ ID NO: 68352 - RNA, 12 nt, Artificial Sequence
  Description of Artificial Sequence: Synthetic oligonucleotide
uuagaaauacgg

SEQ ID NO: 68353 - RNA, 12 nt, Artificial Sequence
  Description of Artificial Sequence: Synthetic oligonucleotide
aacauggguaca

SEQ ID NO: 68354 - RNA, 14 nt, Artificial Sequence
  Description of Artificial Sequence: Synthetic oligonucleotide
aaagacacagaaga

SEQ ID NO: 68355 - RNA, 11 nt, Artificial Sequence
  Description of Artificial Sequence: Synthetic oligonucleotide
uaguagggagg

SEQ ID NO: 68356 - RNA, 12 nt, Artificial Sequence
  Description of Artificial Sequence: Synthetic oligonucleotide
gccuucugcagc

SEQ ID NO: 68357 - RNA, 10 nt, Artificial Sequence
  Description of Artificial Sequence: Synthetic oligonucleotide
ggucugguac

SEQ ID NO: 68358 - RNA, 12 nt, Artificial Sequence
  Description of Artificial Sequence: Synthetic oligonucleotide
cuaguccuuccg

SEQ ID NO: 68359 - RNA, 12 nt, Artificial Sequence
  Description of Artificial Sequence: Synthetic oligonucleotide
ccagugaauauu

SEQ ID NO: 68360 - RNA, 13 nt, Artificial Sequence
  Description of Artificial Sequence: Synthetic oligonucleotide
augaauucaaguu

SEQ ID NO: 68361 - RNA, 12 nt, Artificial Sequence
  Description of Artificial Sequence: Synthetic oligonucleotide
caggacacagau

SEQ ID NO: 68362 - RNA, 12 nt, Artificial Sequence
  Description of Artificial Sequence: Synthetic oligonucleotide
cucaaagcacag

SEQ ID NO: 68363 - RNA, 10 nt, Artificial Sequence
  Description of Artificial Sequence: Synthetic oligonucleotide
accacugcca

SEQ ID NO: 68364 - RNA, 13 nt, Artificial Sequence
  Description of Artificial Sequence: Synthetic oligonucleotide
gaaacuacuagug

SEQ ID NO: 68365 - RNA, 12 nt, Artificial Sequence
  Description of Artificial Sequence: Synthetic oligonucleotide
aagucggacagc

SEQ ID NO: 68366 - RNA, 13 nt, Artificial Sequence
  Description of Artificial Sequence: Synthetic oligonucleotide
gaaagcgaaaaau

SEQ ID NO: 68367 - RNA, 13 nt, Artificial Sequence
  Description of Artificial Sequence: Synthetic oligonucleotide
cccucugauuuag

SEQ ID NO: 68368 - RNA, 12 nt, Artificial Sequence
  Description of Artificial Sequence: Synthetic oligonucleotide
ugagcuauuuaa

SEQ ID NO: 68369 - RNA, 13 nt, Artificial Sequence
  Description of Artificial Sequence: Synthetic oligonucleotide
aaaaggugaaaaa

SEQ ID NO: 68370 - RNA, 14 nt, Artificial Sequence
  Description of Artificial Sequence: Synthetic oligonucleotide
gaaaaagcacuauu

SEQ ID NO: 68371 - RNA, 12 nt, Artificial Sequence
  Description of Artificial Sequence: Synthetic oligonucleotide
ggcugaaaagaa

SEQ ID NO: 68372 - RNA, 12 nt, Artificial Sequence
  Description of Artificial Sequence: Synthetic oligonucleotide
uaaacccuuaua

SEQ ID NO: 68373 - RNA, 13 nt, Artificial Sequence
  Description of Artificial Sequence: Synthetic oligonucleotide
cauacuauuagcc

SEQ ID NO: 68374 - RNA, 12 nt, Artificial Sequence
  Description of Artificial Sequence: Synthetic oligonucleotide
gacagaagcauu

SEQ ID NO: 68375 - RNA, 14 nt, Artificial Sequence
  Description of Artificial Sequence: Synthetic oligonucleotide
agagcaaauaagau

SEQ ID NO: 68376 - RNA, 14 nt, Artificial Sequence
  Description of Artificial Sequence: Synthetic oligonucleotide
ccaacauuuuucuc

SEQ ID NO: 68377 - RNA, 15 nt, Artificial Sequence
  Description of Artificial Sequence: Synthetic oligonucleotide
uuaaguaugagaaaa

SEQ ID NO: 68378 - RNA, 14 nt, Artificial Sequence
  Description of Artificial Sequence: Synthetic oligonucleotide
caggaauaaagaug

SEQ ID NO: 68379 - RNA, 13 nt, Artificial Sequence
  Description of Artificial Sequence: Synthetic oligonucleotide
aauuugaaugacc

SEQ ID NO: 68380 - RNA, 14 nt, Artificial Sequence
  Description of Artificial Sequence: Synthetic oligonucleotide
auguauaaagauag

SEQ ID NO: 68381 - RNA, 12 nt, Artificial Sequence
  Description of Artificial Sequence: Synthetic oligonucleotide
ggcuguaacuau

SEQ ID NO: 68382 - RNA, 11 nt, Artificial Sequence
  Description of Artificial Sequence: Synthetic oligonucleotide
ucugugaagug

SEQ ID NO: 68383 - RNA, 14 nt, Artificial Sequence
  Description of Artificial Sequence: Synthetic oligonucleotide
ccuuuaaggaaaug

SEQ ID NO: 68384 - RNA, 13 nt, Artificial Sequence
  Description of Artificial Sequence: Synthetic oligonucleotide
aaggauacaaaaa

SEQ ID NO: 68385 - RNA, 12 nt, Artificial Sequence
  Description of Artificial Sequence: Synthetic oligonucleotide
agaugcaauuug

SEQ ID NO: 68386 - RNA, 12 nt, Artificial Sequence
  Description of Artificial Sequence: Synthetic oligonucleotide
guucaaaacgaa

SEQ ID NO: 68387 - RNA, 11 nt, Artificial Sequence
  Description of Artificial Sequence: Synthetic oligonucleotide
gugaaaccuca

SEQ ID NO: 68388 - RNA, 13 nt, Artificial Sequence
  Description of Artificial Sequence: Synthetic oligonucleotide
acgaaagagaagc

SEQ ID NO: 68389 - RNA, 12 nt, Artificial Sequence
  Description of Artificial Sequence: Synthetic oligonucleotide
cuccacaagcgc

SEQ ID NO: 68390 - RNA, 14 nt, Artificial Sequence
  Description of Artificial Sequence: Synthetic oligonucleotide
gagaagauuccaaa

SEQ ID NO: 68391 - RNA, 13 nt, Artificial Sequence
  Description of Artificial Sequence: Synthetic oligonucleotide
aaucuggauucaa

SEQ ID NO: 68392 - RNA, 13 nt, Artificial Sequence
  Description of Artificial Sequence: Synthetic oligonucleotide
agaacagauuuga

SEQ ID NO: 68393 - RNA, 11 nt, Artificial Sequence
  Description of Artificial Sequence: Synthetic oligonucleotide
ccagagcugug

SEQ ID NO: 68394 - RNA, 12 nt, Artificial Sequence
  Description of Artificial Sequence: Synthetic oligonucleotide
ccucagauuguu

SEQ ID NO: 68395 - RNA, 12 nt, Artificial Sequence
  Description of Artificial Sequence: Synthetic oligonucleotide
cuauuuuaauua

SEQ ID NO: 68396 - RNA, 13 nt, Artificial Sequence
  Description of Artificial Sequence: Synthetic oligonucleotide
uuuaauuuauuaa

SEQ ID NO: 68397 - RNA, 12 nt, Artificial Sequence
  Description of Artificial Sequence: Synthetic oligonucleotide
augcaguuugaa

SEQ ID NO: 68398 - RNA, 11 nt, Artificial Sequence
  Description of Artificial Sequence: Synthetic oligonucleotide
caugcugcugg

SEQ ID NO: 68399 - RNA, 13 nt, Artificial Sequence
  Description of Artificial Sequence: Synthetic oligonucleotide
agaugugcauuuc

SEQ ID NO: 68400 - RNA, 12 nt, Artificial Sequence
  Description of Artificial Sequence: Synthetic oligonucleotide
ucaaaaccugug

SEQ ID NO: 68401 - RNA, 11 nt, Artificial Sequence
  Description of Artificial Sequence: Synthetic oligonucleotide
gaaugugggua

SEQ ID NO: 68402 - RNA, 10 nt, Artificial Sequence
  Description of Artificial Sequence: Synthetic oligonucleotide
auguggguag

SEQ ID NO: 68403 - RNA, 13 nt, Artificial Sequence
  Description of Artificial Sequence: Synthetic oligonucleotide
ugaaaaugagcau

SEQ ID NO: 68404 - RNA, 13 nt, Artificial Sequence
  Description of Artificial Sequence: Synthetic oligonucleotide
uugcuuuucaugu

SEQ ID NO: 68405 - RNA, 12 nt, Artificial Sequence
  Description of Artificial Sequence: Synthetic oligonucleotide
uguauuucuaua

SEQ ID NO: 68406 - RNA, 13 nt, Artificial Sequence
  Description of Artificial Sequence: Synthetic oligonucleotide
uuugauuaauguu

SEQ ID NO: 68407 - RNA, 12 nt, Artificial Sequence
  Description of Artificial Sequence: Synthetic oligonucleotide
caacguguauag

SEQ ID NO: 68408 - RNA, 12 nt, Artificial Sequence
  Description of Artificial Sequence: Synthetic oligonucleotide
cauauccuuggc

SEQ ID NO: 68409 - RNA, 13 nt, Artificial Sequence
  Description of Artificial Sequence: Synthetic oligonucleotide
uacuaacaucugg

SEQ ID NO: 68410 - RNA, 11 nt, Artificial Sequence
  Description of Artificial Sequence: Synthetic oligonucleotide
cauaaguugug

SEQ ID NO: 68411 - RNA, 12 nt, Artificial Sequence
  Description of Artificial Sequence: Synthetic oligonucleotide
gcaucauuuugg

SEQ ID NO: 68412 - RNA, 10 nt, Artificial Sequence
  Description of Artificial Sequence: Synthetic oligonucleotide
gcucuucuua

SEQ ID NO: 68413 - RNA, 10 nt, Artificial Sequence
  Description of Artificial Sequence: Synthetic oligonucleotide
agauuagguc

SEQ ID NO: 68414 - RNA, 12 nt, Artificial Sequence
  Description of Artificial Sequence: Synthetic oligonucleotide
auggaauugaaa

SEQ ID NO: 68415 - RNA, 13 nt, Artificial Sequence
  Description of Artificial Sequence: Synthetic oligonucleotide
cacacucauuccu

SEQ ID NO: 68416 - RNA, 12 nt, Artificial Sequence
  Description of Artificial Sequence: Synthetic oligonucleotide
uguagagguaac

SEQ ID NO: 68417 - RNA, 11 nt, Artificial Sequence
  Description of Artificial Sequence: Synthetic oligonucleotide
caaccacaugc

SEQ ID NO: 68418 - RNA, 12 nt, Artificial Sequence
  Description of Artificial Sequence: Synthetic oligonucleotide
ucggaaacaagu

SEQ ID NO: 68419 - RNA, 11 nt, Artificial Sequence
  Description of Artificial Sequence: Synthetic oligonucleotide
acucccaauaa

SEQ ID NO: 68420 - RNA, 13 nt, Artificial Sequence
  Description of Artificial Sequence: Synthetic oligonucleotide
aaugcuaagaaau

SEQ ID NO: 68421 - RNA, 11 nt, Artificial Sequence
  Description of Artificial Sequence: Synthetic oligonucleotide
gucuuucucua

SEQ ID NO: 68422 - RNA, 11 nt, Artificial Sequence
  Description of Artificial Sequence: Synthetic oligonucleotide
ugaauuucagg

SEQ ID NO: 68423 - RNA, 13 nt, Artificial Sequence
  Description of Artificial Sequence: Synthetic oligonucleotide
cgauucccucuca

SEQ ID NO: 68424 - RNA, 11 nt, Artificial Sequence
  Description of Artificial Sequence: Synthetic oligonucleotide
aggaaagugaa

SEQ ID NO: 68425 - RNA, 12 nt, Artificial Sequence
  Description of Artificial Sequence: Synthetic oligonucleotide
gaggcugcaugc

SEQ ID NO: 68426 - RNA, 11 nt, Artificial Sequence
  Description of Artificial Sequence: Synthetic oligonucleotide
ucucugaacag

SEQ ID NO: 68427 - RNA, 12 nt, Artificial Sequence
  Description of Artificial Sequence: Synthetic oligonucleotide
aacuuggcugua

SEQ ID NO: 68428 - RNA, 12 nt, Artificial Sequence
  Description of Artificial Sequence: Synthetic oligonucleotide
agaagccaaaau

SEQ ID NO: 68429 - RNA, 14 nt, Artificial Sequence
  Description of Artificial Sequence: Synthetic oligonucleotide
auuaaaagaagucc

SEQ ID NO: 68430 - RNA, 14 nt, Artificial Sequence
  Description of Artificial Sequence: Synthetic oligonucleotide
gaauccggauuauc

SEQ ID NO: 68431 - RNA, 12 nt, Artificial Sequence
  Description of Artificial Sequence: Synthetic oligonucleotide
aaugugacauca

SEQ ID NO: 68432 - RNA, 13 nt, Artificial Sequence
  Description of Artificial Sequence: Synthetic oligonucleotide
caucaaagcaagu

SEQ ID NO: 68433 - RNA, 11 nt, Artificial Sequence
  Description of Artificial Sequence: Synthetic oligonucleotide
agagagagaaa

SEQ ID NO: 68434 - RNA, 13 nt, Artificial Sequence
  Description of Artificial Sequence: Synthetic oligonucleotide
ucgcuguaguauu

SEQ ID NO: 68435 - RNA, 14 nt, Artificial Sequence
  Description of Artificial Sequence: Synthetic oligonucleotide
cgcuguaguauuua

SEQ ID NO: 68436 - RNA, 13 nt, Artificial Sequence
  Description of Artificial Sequence: Synthetic oligonucleotide
auuuaagcccaua

SEQ ID NO: 68437 - RNA, 15 nt, Artificial Sequence
  Description of Artificial Sequence: Synthetic oligonucleotide
auuaaaauaaacaug

SEQ ID NO: 68438 - RNA, 12 nt, Artificial Sequence
  Description of Artificial Sequence: Synthetic oligonucleotide
cuguucugaucg

SEQ ID NO: 68439 - RNA, 16 nt, Artificial Sequence
  Description of Artificial Sequence: Synthetic oligonucleotide
aaauaauuugaacuuu

SEQ ID NO: 68440 - RNA, 12 nt, Artificial Sequence
  Description of Artificial Sequence: Synthetic oligonucleotide
ugcgaccuuaau

SEQ ID NO: 68441 - RNA, 11 nt, Artificial Sequence
  Description of Artificial Sequence: Synthetic oligonucleotide
cugagaaagcu

SEQ ID NO: 68442 - RNA, 13 nt, Artificial Sequence
  Description of Artificial Sequence: Synthetic oligonucleotide
aguaaagaugcua

SEQ ID NO: 68443 - RNA, 12 nt, Artificial Sequence
  Description of Artificial Sequence: Synthetic oligonucleotide
cugcuuaauugc

SEQ ID NO: 68444 - RNA, 14 nt, Artificial Sequence
  Description of Artificial Sequence: Synthetic oligonucleotide
uaccauaugaauga

SEQ ID NO: 68445 - RNA, 12 nt, Artificial Sequence
  Description of Artificial Sequence: Synthetic oligonucleotide
aacuuucuuauc

SEQ ID NO: 68446 - RNA, 13 nt, Artificial Sequence
  Description of Artificial Sequence: Synthetic oligonucleotide
ccuugcaugacau

SEQ ID NO: 68447 - RNA, 14 nt, Artificial Sequence
  Description of Artificial Sequence: Synthetic oligonucleotide
ugaauuuguauaug

SEQ ID NO: 68448 - RNA, 12 nt, Artificial Sequence
  Description of Artificial Sequence: Synthetic oligonucleotide
gaauccuaguag

SEQ ID NO: 68449 - RNA, 10 nt, Artificial Sequence
  Description of Artificial Sequence: Synthetic oligonucleotide
gaaagggaag

SEQ ID NO: 68450 - RNA, 11 nt, Artificial Sequence
  Description of Artificial Sequence: Synthetic oligonucleotide
uaucggcaugc

SEQ ID NO: 68451 - RNA, 12 nt, Artificial Sequence
  Description of Artificial Sequence: Synthetic oligonucleotide
caccucauagua

SEQ ID NO: 68452 - RNA, 11 nt, Artificial Sequence
  Description of Artificial Sequence: Synthetic oligonucleotide
ccagaauugcc

SEQ ID NO: 68453 - RNA, 11 nt, Artificial Sequence
  Description of Artificial Sequence: Synthetic oligonucleotide
uggugaucugg

SEQ ID NO: 68454 - RNA, 12 nt, Artificial Sequence
  Description of Artificial Sequence: Synthetic oligonucleotide
gaucuggguaau

SEQ ID NO: 68455 - RNA, 12 nt, Artificial Sequence
  Description of Artificial Sequence: Synthetic oligonucleotide
ggaugugaugaa

SEQ ID NO: 68456 - RNA, 12 nt, Artificial Sequence
  Description of Artificial Sequence: Synthetic oligonucleotide
cauuuccacagc

SEQ ID NO: 68457 - RNA, 11 nt, Artificial Sequence
  Description of Artificial Sequence: Synthetic oligonucleotide
acagcuacacc

SEQ ID NO: 68458 - RNA, 12 nt, Artificial Sequence
  Description of Artificial Sequence: Synthetic oligonucleotide
ugcaguucuuac

SEQ ID NO: 68459 - RNA, 12 nt, Artificial Sequence
  Description of Artificial Sequence: Synthetic oligonucleotide
acgagaagaaga

SEQ ID NO: 68460 - RNA, 12 nt, Artificial Sequence
  Description of Artificial Sequence: Synthetic oligonucleotide
cgagaagaagau

SEQ ID NO: 68461 - RNA, 15 nt, Artificial Sequence
  Description of Artificial Sequence: Synthetic oligonucleotide
aagaagaucauuuac

SEQ ID NO: 68462 - RNA, 11 nt, Artificial Sequence
  Description of Artificial Sequence: Synthetic oligonucleotide
agaggaagagg

SEQ ID NO: 68463 - RNA, 12 nt, Artificial Sequence
  Description of Artificial Sequence: Synthetic oligonucleotide
gaggaagaggug

SEQ ID NO: 68464 - RNA, 13 nt, Artificial Sequence
  Description of Artificial Sequence: Synthetic oligonucleotide
cuacuuugagggc

SEQ ID NO: 68465 - RNA, 12 nt, Artificial Sequence
  Description of Artificial Sequence: Synthetic oligonucleotide
agggcaucuccu

SEQ ID NO: 68466 - RNA, 10 nt, Artificial Sequence
  Description of Artificial Sequence: Synthetic oligonucleotide
ggagugauau

SEQ ID NO: 68467 - RNA, 11 nt, Artificial Sequence
  Description of Artificial Sequence: Synthetic oligonucleotide
gagugauaugg

SEQ ID NO: 68468 - RNA, 12 nt, Artificial Sequence
  Description of Artificial Sequence: Synthetic oligonucleotide
ugcaguaaagau

SEQ ID NO: 68469 - RNA, 13 nt, Artificial Sequence
  Description of Artificial Sequence: Synthetic oligonucleotide
aguaaagauccua

SEQ ID NO: 68470 - RNA, 12 nt, Artificial Sequence
  Description of Artificial Sequence: Synthetic oligonucleotide
ugacaaaggaca

SEQ ID NO: 68471 - RNA, 13 nt, Artificial Sequence
  Description of Artificial Sequence: Synthetic oligonucleotide
gcaauugugaccc

SEQ ID NO: 68472 - RNA, 12 nt, Artificial Sequence
  Description of Artificial Sequence: Synthetic oligonucleotide
aacaucauccau

SEQ ID NO: 68473 - RNA, 12 nt, Artificial Sequence
  Description of Artificial Sequence: Synthetic oligonucleotide
ugaaauccaaca

SEQ ID NO: 68474 - RNA, 15 nt, Artificial Sequence
  Description of Artificial Sequence: Synthetic oligonucleotide
aacaauauauuucuc

SEQ ID NO: 68475 - RNA, 14 nt, Artificial Sequence
  Description of Artificial Sequence: Synthetic oligonucleotide
aacaguaaagucac

SEQ ID NO: 68476 - RNA, 14 nt, Artificial Sequence
  Description of Artificial Sequence: Synthetic oligonucleotide
ugugaagaaaguaa

SEQ ID NO: 68477 - RNA, 13 nt, Artificial Sequence
  Description of Artificial Sequence: Synthetic oligonucleotide
cuuccgagccauc

SEQ ID NO: 68478 - RNA, 12 nt, Artificial Sequence
  Description of Artificial Sequence: Synthetic oligonucleotide
aauggagguuga

SEQ ID NO: 68479 - RNA, 12 nt, Artificial Sequence
  Description of Artificial Sequence: Synthetic oligonucleotide
ggagguugaaua

SEQ ID NO: 68480 - RNA, 13 nt, Artificial Sequence
  Description of Artificial Sequence: Synthetic oligonucleotide
auuuugaguuuuc

SEQ ID NO: 68481 - RNA, 12 nt, Artificial Sequence
  Description of Artificial Sequence: Synthetic oligonucleotide
uauccuguuugu

SEQ ID NO: 68482 - RNA, 11 nt, Artificial Sequence
  Description of Artificial Sequence: Synthetic oligonucleotide
ccuguuuguuc

SEQ ID NO: 68483 - RNA, 10 nt, Artificial Sequence
  Description of Artificial Sequence: Synthetic oligonucleotide
cucuacagcc

SEQ ID NO: 68484 - RNA, 12 nt, Artificial Sequence
  Description of Artificial Sequence: Synthetic oligonucleotide
ucuuccauagcu

SEQ ID NO: 68485 - RNA, 12 nt, Artificial Sequence
  Description of Artificial Sequence: Synthetic oligonucleotide
auaaucuuccug

SEQ ID NO: 68486 - RNA, 12 nt, Artificial Sequence
  Description of Artificial Sequence: Synthetic oligonucleotide
uaaucuuccugu

SEQ ID NO: 68487 - RNA, 12 nt, Artificial Sequence
  Description of Artificial Sequence: Synthetic oligonucleotide
cuucaugacuug

SEQ ID NO: 68488 - RNA, 12 nt, Artificial Sequence
  Description of Artificial Sequence: Synthetic oligonucleotide
aagagggagaga

SEQ ID NO: 68489 - RNA, 12 nt, Artificial Sequence
  Description of Artificial Sequence: Synthetic oligonucleotide
cgucuccuacca

SEQ ID NO: 68490 - RNA, 12 nt, Artificial Sequence
  Description of Artificial Sequence: Synthetic oligonucleotide
gaucaaucggcc

SEQ ID NO: 68491 - RNA, 12 nt, Artificial Sequence
  Description of Artificial Sequence: Synthetic oligonucleotide
ggacgaacaucc

SEQ ID NO: 68492 - RNA, 11 nt, Artificial Sequence
  Description of Artificial Sequence: Synthetic oligonucleotide
agggucggaac

SEQ ID NO: 68493 - RNA, 10 nt, Artificial Sequence
  Description of Artificial Sequence: Synthetic oligonucleotide
ucggaaccca

SEQ ID NO: 68494 - RNA, 11 nt, Artificial Sequence
  Description of Artificial Sequence: Synthetic oligonucleotide
acccaagcuua

SEQ ID NO: 68495 - RNA, 14 nt, Artificial Sequence
  Description of Artificial Sequence: Synthetic oligonucleotide
gaacuuuaagcaac

SEQ ID NO: 68496 - RNA, 11 nt, Artificial Sequence
  Description of Artificial Sequence: Synthetic oligonucleotide
acuauucagug

SEQ ID NO: 68497 - RNA, 11 nt, Artificial Sequence
  Description of Artificial Sequence: Synthetic oligonucleotide
cuauucagugg

SEQ ID NO: 68498 - RNA, 13 nt, Artificial Sequence
  Description of Artificial Sequence: Synthetic oligonucleotide
aaacacagauaac

SEQ ID NO: 68499 - RNA, 12 nt, Artificial Sequence
  Description of Artificial Sequence: Synthetic oligonucleotide
cuuaagaaaaga

SEQ ID NO: 68500 - RNA, 12 nt, Artificial Sequence
  Description of Artificial Sequence: Synthetic oligonucleotide
cugaaggagugu

SEQ ID NO: 68501 - RNA, 10 nt, Artificial Sequence
  Description of Artificial Sequence: Synthetic oligonucleotide
ucaccgcggg

SEQ ID NO: 68502 - RNA, 14 nt, Artificial Sequence
  Description of Artificial Sequence: Synthetic oligonucleotide
agcagaaauaagcg

SEQ ID NO: 68503 - RNA, 12 nt, Artificial Sequence
  Description of Artificial Sequence: Synthetic oligonucleotide
aagcgugccguu

SEQ ID NO: 68504 - RNA, 12 nt, Artificial Sequence
  Description of Artificial Sequence: Synthetic oligonucleotide
agaaacagucac

SEQ ID NO: 68505 - RNA, 12 nt, Artificial Sequence
  Description of Artificial Sequence: Synthetic oligonucleotide
agaggaagaagg

SEQ ID NO: 68506 - RNA, 14 nt, Artificial Sequence
  Description of Artificial Sequence: Synthetic oligonucleotide
uguauucaaaauau

SEQ ID NO: 68507 - RNA, 13 nt, Artificial Sequence
  Description of Artificial Sequence: Synthetic oligonucleotide
auuuuccucccuu

SEQ ID NO: 68508 - RNA, 13 nt, Artificial Sequence
  Description of Artificial Sequence: Synthetic oligonucleotide
caaagaaagauag

SEQ ID NO: 68509 - RNA, 12 nt, Artificial Sequence
  Description of Artificial Sequence: Synthetic oligonucleotide
aagaaagauaga

SEQ ID NO: 68510 - RNA, 13 nt, Artificial Sequence
  Description of Artificial Sequence: Synthetic oligonucleotide
gaaagcauuuguu

SEQ ID NO: 68511 - RNA, 13 nt, Artificial Sequence
  Description of Artificial Sequence: Synthetic oligonucleotide
ugaguuaaacgaa

SEQ ID NO: 68512 - RNA, 12 nt, Artificial Sequence
  Description of Artificial Sequence: Synthetic oligonucleotide
acugauacagaa

SEQ ID NO: 68513 - RNA, 12 nt, Artificial Sequence
  Description of Artificial Sequence: Synthetic oligonucleotide
auauuauauaua

SEQ ID NO: 68514 - RNA, 12 nt, Artificial Sequence
  Description of Artificial Sequence: Synthetic oligonucleotide
auuauauauaua

SEQ ID NO: 68515 - RNA, 12 nt, Artificial Sequence
  Description of Artificial Sequence: Synthetic oligonucleotide
ucacuggaugua

SEQ ID NO: 68516 - RNA, 12 nt, Artificial Sequence
  Description of Artificial Sequence: Synthetic oligonucleotide
cagggaagagga

SEQ ID NO: 68517 - RNA, 15 nt, Artificial Sequence
  Description of Artificial Sequence: Synthetic oligonucleotide
augaucuuuuuuuug

SEQ ID NO: 68518 - RNA, 11 nt, Artificial Sequence
  Description of Artificial Sequence: Synthetic oligonucleotide
aguucacggcc

SEQ ID NO: 68519 - RNA, 13 nt, Artificial Sequence
  Description of Artificial Sequence: Synthetic oligonucleotide
caccaucacacca

SEQ ID NO: 68520 - RNA, 11 nt, Artificial Sequence
  Description of Artificial Sequence: Synthetic oligonucleotide
ccugcggguuu

SEQ ID NO: 68521 - RNA, 10 nt, Artificial Sequence
  Description of Artificial Sequence: Synthetic oligonucleotide
auccaguuug

SEQ ID NO: 68522 - RNA, 13 nt, Artificial Sequence
  Description of Artificial Sequence: Synthetic oligonucleotide
guuaaggacuucu

SEQ ID NO: 68523 - RNA, 13 nt, Artificial Sequence
  Description of Artificial Sequence: Synthetic oligonucleotide
cagugggacagag

SEQ ID NO: 68524 - RNA, 14 nt, Artificial Sequence
  Description of Artificial Sequence: Synthetic oligonucleotide
aauuuguuauugug

SEQ ID NO: 68525 - RNA, 13 nt, Artificial Sequence
  Description of Artificial Sequence: Synthetic oligonucleotide
uucaaaugcauuu

SEQ ID NO: 68526 - RNA, 10 nt, Artificial Sequence
  Description of Artificial Sequence: Synthetic oligonucleotide
caggaaagcc

SEQ ID NO: 68527 - RNA, 11 nt, Artificial Sequence
  Description of Artificial Sequence: Synthetic oligonucleotide
aggaaagcccu

SEQ ID NO: 68528 - RNA, 12 nt, Artificial Sequence
  Description of Artificial Sequence: Synthetic oligonucleotide
cccagcauggcc

SEQ ID NO: 68529 - RNA, 11 nt, Artificial Sequence
  Description of Artificial Sequence: Synthetic oligonucleotide
cuucucccuga

SEQ ID NO: 68530 - RNA, 12 nt, Artificial Sequence
  Description of Artificial Sequence: Synthetic oligonucleotide
gaagaagcccuu

SEQ ID NO: 68531 - RNA, 12 nt, Artificial Sequence
  Description of Artificial Sequence: Synthetic oligonucleotide
agaagcccuuca

SEQ ID NO: 68532 - RNA, 11 nt, Artificial Sequence
  Description of Artificial Sequence: Synthetic oligonucleotide
gcccuucagcg

SEQ ID NO: 68533 - RNA, 11 nt, Artificial Sequence
  Description of Artificial Sequence: Synthetic oligonucleotide
ccuucagcggc

SEQ ID NO: 68534 - RNA, 12 nt, Artificial Sequence
  Description of Artificial Sequence: Synthetic oligonucleotide
ucagcggccagu

SEQ ID NO: 68535 - RNA, 12 nt, Artificial Sequence
  Description of Artificial Sequence: Synthetic oligonucleotide
ugaaaagcuccg

SEQ ID NO: 68536 - RNA, 11 nt, Artificial Sequence
  Description of Artificial Sequence: Synthetic oligonucleotide
aaaagcuccgg

SEQ ID NO: 68537 - RNA, 13 nt, Artificial Sequence
  Description of Artificial Sequence: Synthetic oligonucleotide
agucaacagucug

SEQ ID NO: 68538 - RNA, 13 nt, Artificial Sequence
  Description of Artificial Sequence: Synthetic oligonucleotide
cagaguucaaaag

SEQ ID NO: 68539 - RNA, 13 nt, Artificial Sequence
  Description of Artificial Sequence: Synthetic oligonucleotide
agaguucaaaagc

SEQ ID NO: 68540 - RNA, 12 nt, Artificial Sequence
  Description of Artificial Sequence: Synthetic oligonucleotide
uucaaaagcccu

SEQ ID NO: 68541 - RNA, 12 nt, Artificial Sequence
  Description of Artificial Sequence: Synthetic oligonucleotide
ucaaaagcccuu

SEQ ID NO: 68542 - RNA, 12 nt, Artificial Sequence
  Description of Artificial Sequence: Synthetic oligonucleotide
aaaagcccuuca

SEQ ID NO: 68543 - RNA, 12 nt, Artificial Sequence
  Description of Artificial Sequence: Synthetic oligonucleotide
aaagcccuucag

SEQ ID NO: 68544 - RNA, 13 nt, Artificial Sequence
  Description of Artificial Sequence: Synthetic oligonucleotide
gugaagccgcucg

SEQ ID NO: 68545 - RNA, 12 nt, Artificial Sequence
  Description of Artificial Sequence: Synthetic oligonucleotide
cacgccagucaa

SEQ ID NO: 68546 - RNA, 13 nt, Artificial Sequence
  Description of Artificial Sequence: Synthetic oligonucleotide
uucuuggugcgug

SEQ ID NO: 68547 - RNA, 14 nt, Artificial Sequence
  Description of Artificial Sequence: Synthetic oligonucleotide
auuggauucaucag

SEQ ID NO: 68548 - RNA, 13 nt, Artificial Sequence
  Description of Artificial Sequence: Synthetic oligonucleotide
uggaauaccuaag

SEQ ID NO: 68549 - RNA, 12 nt, Artificial Sequence
  Description of Artificial Sequence: Synthetic oligonucleotide
auuugaggcuca

SEQ ID NO: 68550 - RNA, 11 nt, Artificial Sequence
  Description of Artificial Sequence: Synthetic oligonucleotide
ucuacaauugg

SEQ ID NO: 68551 - RNA, 12 nt, Artificial Sequence
  Description of Artificial Sequence: Synthetic oligonucleotide
uaguuaggagcc

SEQ ID NO: 68552 - RNA, 13 nt, Artificial Sequence
  Description of Artificial Sequence: Synthetic oligonucleotide
agucaauauccac

SEQ ID NO: 68553 - RNA, 13 nt, Artificial Sequence
  Description of Artificial Sequence: Synthetic oligonucleotide
auguucagucaca

SEQ ID NO: 68554 - RNA, 12 nt, Artificial Sequence
  Description of Artificial Sequence: Synthetic oligonucleotide
acacacacauac

SEQ ID NO: 68555 - RNA, 12 nt, Artificial Sequence
  Description of Artificial Sequence: Synthetic oligonucleotide
uuccuuuugcuu

SEQ ID NO: 68556 - RNA, 16 nt, Artificial Sequence
  Description of Artificial Sequence: Synthetic oligonucleotide
uuuuaaaguaauuuuu

SEQ ID NO: 68557 - RNA, 13 nt, Artificial Sequence
  Description of Artificial Sequence: Synthetic oligonucleotide
caacagucaaugg

SEQ ID NO: 68558 - RNA, 13 nt, Artificial Sequence
  Description of Artificial Sequence: Synthetic oligonucleotide
ucgacaaaccaau

SEQ ID NO: 68559 - RNA, 12 nt, Artificial Sequence
  Description of Artificial Sequence: Synthetic oligonucleotide
acugcuaccacu

SEQ ID NO: 68560 - RNA, 13 nt, Artificial Sequence
  Description of Artificial Sequence: Synthetic oligonucleotide
gcaagcggucuua

SEQ ID NO: 68561 - RNA, 13 nt, Artificial Sequence
  Description of Artificial Sequence: Synthetic oligonucleotide
ggucuuaccggcu

SEQ ID NO: 68562 - RNA, 11 nt, Artificial Sequence
  Description of Artificial Sequence: Synthetic oligonucleotide
gauggguuacc

SEQ ID NO: 68563 - RNA, 11 nt, Artificial Sequence
  Description of Artificial Sequence: Synthetic oligonucleotide
guuaccugcga

SEQ ID NO: 68564 - RNA, 12 nt, Artificial Sequence
  Description of Artificial Sequence: Synthetic oligonucleotide
aaucuugcugag

SEQ ID NO: 68565 - RNA, 13 nt, Artificial Sequence
  Description of Artificial Sequence: Synthetic oligonucleotide
agcauaaaacagu

SEQ ID NO: 68566 - RNA, 12 nt, Artificial Sequence
  Description of Artificial Sequence: Synthetic oligonucleotide
guccuuuauccu

SEQ ID NO: 68567 - RNA, 12 nt, Artificial Sequence
  Description of Artificial Sequence: Synthetic oligonucleotide
caacgcaaguug

SEQ ID NO: 68568 - RNA, 13 nt, Artificial Sequence
  Description of Artificial Sequence: Synthetic oligonucleotide
aaacugaaaccau

SEQ ID NO: 68569 - RNA, 14 nt, Artificial Sequence
  Description of Artificial Sequence: Synthetic oligonucleotide
acuuuguuaaauau

SEQ ID NO: 68570 - RNA, 14 nt, Artificial Sequence
  Description of Artificial Sequence: Synthetic oligonucleotide
guauauuaaaaguu

SEQ ID NO: 68571 - RNA, 13 nt, Artificial Sequence
  Description of Artificial Sequence: Synthetic oligonucleotide
guuuugacuuaac

SEQ ID NO: 68572 - RNA, 13 nt, Artificial Sequence
  Description of Artificial Sequence: Synthetic oligonucleotide
gcaaacucagcac

SEQ ID NO: 68573 - RNA, 11 nt, Artificial Sequence
  Description of Artificial Sequence: Synthetic oligonucleotide
ugcugaccuca

SEQ ID NO: 68574 - RNA, 14 nt, Artificial Sequence
  Description of Artificial Sequence: Synthetic oligonucleotide
uuuauucagaucgc

SEQ ID NO: 68575 - RNA, 13 nt, Artificial Sequence
  Description of Artificial Sequence: Synthetic oligonucleotide
aggguucugggau

SEQ ID NO: 68576 - RNA, 15 nt, Artificial Sequence
  Description of Artificial Sequence: Synthetic oligonucleotide
auauuggaaauuaug

SEQ ID NO: 68577 - RNA, 13 nt, Artificial Sequence
  Description of Artificial Sequence: Synthetic oligonucleotide
auggaagcacuag

SEQ ID NO: 68578 - RNA, 13 nt, Artificial Sequence
  Description of Artificial Sequence: Synthetic oligonucleotide
guuuuuaugugga

SEQ ID NO: 68579 - RNA, 12 nt, Artificial Sequence
  Description of Artificial Sequence: Synthetic oligonucleotide
ggaauugguaga

SEQ ID NO: 68580 - RNA, 13 nt, Artificial Sequence
  Description of Artificial Sequence: Synthetic oligonucleotide
uuagacuuggaga

SEQ ID NO: 68581 - RNA, 13 nt, Artificial Sequence
  Description of Artificial Sequence: Synthetic oligonucleotide
uuacaguauucca

SEQ ID NO: 68582 - RNA, 15 nt, Artificial Sequence
  Description of Artificial Sequence: Synthetic oligonucleotide
ccacugaugaauuaa

SEQ ID NO: 68583 - RNA, 12 nt, Artificial Sequence
  Description of Artificial Sequence: Synthetic oligonucleotide
ccacaucaucac

SEQ ID NO: 68584 - RNA, 13 nt, Artificial Sequence
  Description of Artificial Sequence: Synthetic oligonucleotide
cucaccaaacaga

SEQ ID NO: 68585 - RNA, 12 nt, Artificial Sequence
  Description of Artificial Sequence: Synthetic oligonucleotide
ggaacaugaugg

SEQ ID NO: 68586 - RNA, 12 nt, Artificial Sequence
  Description of Artificial Sequence: Synthetic oligonucleotide
cauguagacugc

SEQ ID NO: 68587 - RNA, 13 nt, Artificial Sequence
  Description of Artificial Sequence: Synthetic oligonucleotide
ggaucuauuuaug

SEQ ID NO: 68588 - RNA, 12 nt, Artificial Sequence
  Description of Artificial Sequence: Synthetic oligonucleotide
gcacuauuauca

SEQ ID NO: 68589 - RNA, 11 nt, Artificial Sequence
  Description of Artificial Sequence: Synthetic oligonucleotide
aucaguucugc

SEQ ID NO: 68590 - RNA, 13 nt, Artificial Sequence
  Description of Artificial Sequence: Synthetic oligonucleotide
agauuaaaccuac

SEQ ID NO: 68591 - RNA, 13 nt, Artificial Sequence
  Description of Artificial Sequence: Synthetic oligonucleotide
auaaaauccuucu

SEQ ID NO: 68592 - RNA, 12 nt, Artificial Sequence
  Description of Artificial Sequence: Synthetic oligonucleotide
aaugcuguagac

SEQ ID NO: 68593 - RNA, 13 nt, Artificial Sequence
  Description of Artificial Sequence: Synthetic oligonucleotide
uugauaggaauag

SEQ ID NO: 68594 - RNA, 11 nt, Artificial Sequence
  Description of Artificial Sequence: Synthetic oligonucleotide
aauggcccuga

SEQ ID NO: 68595 - RNA, 11 nt, Artificial Sequence
  Description of Artificial Sequence: Synthetic oligonucleotide
uuccucaagca

SEQ ID NO: 68596 - RNA, 10 nt, Artificial Sequence
  Description of Artificial Sequence: Synthetic oligonucleotide
guucagccca

SEQ ID NO: 68597 - RNA, 11 nt, Artificial Sequence
  Description of Artificial Sequence: Synthetic oligonucleotide
gcugcugaacc

SEQ ID NO: 68598 - RNA, 12 nt, Artificial Sequence
  Description of Artificial Sequence: Synthetic oligonucleotide
aaguucucuuca

SEQ ID NO: 68599 - RNA, 11 nt, Artificial Sequence
  Description of Artificial Sequence: Synthetic oligonucleotide
ccagccuagag

SEQ ID NO: 68600 - RNA, 13 nt, Artificial Sequence
  Description of Artificial Sequence: Synthetic oligonucleotide
cucugugaagugu

SEQ ID NO: 68601 - RNA, 14 nt, Artificial Sequence
  Description of Artificial Sequence: Synthetic oligonucleotide
ugagaaaauuucaa

SEQ ID NO: 68602 - RNA, 11 nt, Artificial Sequence
  Description of Artificial Sequence: Synthetic oligonucleotide
aauccuccuga

SEQ ID NO: 68603 - RNA, 12 nt, Artificial Sequence
  Description of Artificial Sequence: Synthetic oligonucleotide
gugacaucauau

SEQ ID NO: 68604 - RNA, 13 nt, Artificial Sequence
  Description of Artificial Sequence: Synthetic oligonucleotide
aaucuucaucaua

SEQ ID NO: 68605 - RNA, 13 nt, Artificial Sequence
  Description of Artificial Sequence: Synthetic oligonucleotide
gacuagcuauuaa

SEQ ID NO: 68606 - RNA, 14 nt, Artificial Sequence
  Description of Artificial Sequence: Synthetic oligonucleotide
ucucuacuaaaaau

SEQ ID NO: 68607 - RNA, 12 nt, Artificial Sequence
  Description of Artificial Sequence: Synthetic oligonucleotide
ucuaucucgccu

SEQ ID NO: 68608 - RNA, 13 nt, Artificial Sequence
  Description of Artificial Sequence: Synthetic oligonucleotide
cuucgguccaguu

SEQ ID NO: 68609 - RNA, 11 nt, Artificial Sequence
  Description of Artificial Sequence: Synthetic oligonucleotide
gauguagccgc

SEQ ID NO: 68610 - RNA, 12 nt, Artificial Sequence
  Description of Artificial Sequence: Synthetic oligonucleotide
ugaggagacuug

SEQ ID NO: 68611 - RNA, 12 nt, Artificial Sequence
  Description of Artificial Sequence: Synthetic oligonucleotide
gaguagugagga

SEQ ID NO: 68612 - RNA, 14 nt, Artificial Sequence
  Description of Artificial Sequence: Synthetic oligonucleotide
cagaugaguacaaa

SEQ ID NO: 68613 - RNA, 13 nt, Artificial Sequence
  Description of Artificial Sequence: Synthetic oligonucleotide
guuguuaaugggc

SEQ ID NO: 68614 - RNA, 13 nt, Artificial Sequence
  Description of Artificial Sequence: Synthetic oligonucleotide
uuuuuaauuuauu

SEQ ID NO: 68615 - RNA, 12 nt, Artificial Sequence
  Description of Artificial Sequence: Synthetic oligonucleotide
uauuuaaauaug

SEQ ID NO: 68616 - RNA, 13 nt, Artificial Sequence
  Description of Artificial Sequence: Synthetic oligonucleotide
uauccuuuguuuc

SEQ ID NO: 68617 - RNA, 14 nt, Artificial Sequence
  Description of Artificial Sequence: Synthetic oligonucleotide
cgucuaaguguuug

SEQ ID NO: 68618 - RNA, 12 nt, Artificial Sequence
  Description of Artificial Sequence: Synthetic oligonucleotide
accugugacaaa

SEQ ID NO: 68619 - RNA, 13 nt, Artificial Sequence
  Description of Artificial Sequence: Synthetic oligonucleotide
ccaggcugaauua

SEQ ID NO: 68620 - RNA, 14 nt, Artificial Sequence
  Description of Artificial Sequence: Synthetic oligonucleotide
gucauucuuacaau

SEQ ID NO: 68621 - RNA, 15 nt, Artificial Sequence
  Description of Artificial Sequence: Synthetic oligonucleotide
ucauucuuacaauug

SEQ ID NO: 68622 - RNA, 12 nt, Artificial Sequence
  Description of Artificial Sequence: Synthetic oligonucleotide
cagagaguguac

SEQ ID NO: 68623 - RNA, 12 nt, Artificial Sequence
  Description of Artificial Sequence: Synthetic oligonucleotide
agaacucagcag

SEQ ID NO: 68624 - RNA, 13 nt, Artificial Sequence
  Description of Artificial Sequence: Synthetic oligonucleotide
uuuauuuucagua

SEQ ID NO: 68625 - RNA, 12 nt, Artificial Sequence
  Description of Artificial Sequence: Synthetic oligonucleotide
ucuuaaauggaa

SEQ ID NO: 68626 - RNA, 13 nt, Artificial Sequence
  Description of Artificial Sequence: Synthetic oligonucleotide
ugccuaaaauugu

SEQ ID NO: 68627 - RNA, 12 nt, Artificial Sequence
  Description of Artificial Sequence: Synthetic oligonucleotide
agacugugagcu

SEQ ID NO: 68628 - RNA, 14 nt, Artificial Sequence
  Description of Artificial Sequence: Synthetic oligonucleotide
ugcuuuuuauuaau

SEQ ID NO: 68629 - RNA, 13 nt, Artificial Sequence
  Description of Artificial Sequence: Synthetic oligonucleotide
cucuucuuacauu

SEQ ID NO: 68630 - RNA, 15 nt, Artificial Sequence
  Description of Artificial Sequence: Synthetic oligonucleotide
cauuuguaaaaaugu

SEQ ID NO: 68631 - RNA, 15 nt, Artificial Sequence
  Description of Artificial Sequence: Synthetic oligonucleotide
aucuuaauucauauu

SEQ ID NO: 68632 - RNA, 13 nt, Artificial Sequence
  Description of Artificial Sequence: Synthetic oligonucleotide
gaacuaaucauga

SEQ ID NO: 68633 - RNA, 12 nt, Artificial Sequence
  Description of Artificial Sequence: Synthetic oligonucleotide
ucugcucuuggg

SEQ ID NO: 68634 - RNA, 13 nt, Artificial Sequence
  Description of Artificial Sequence: Synthetic oligonucleotide
caguagcuuugag

SEQ ID NO: 68635 - RNA, 14 nt, Artificial Sequence
  Description of Artificial Sequence: Synthetic oligonucleotide
cacguaauauuuca

SEQ ID NO: 68636 - RNA, 13 nt, Artificial Sequence
  Description of Artificial Sequence: Synthetic oligonucleotide
uauucucuucacu

SEQ ID NO: 68637 - RNA, 14 nt, Artificial Sequence
  Description of Artificial Sequence: Synthetic oligonucleotide
cuaaugcuaagaaa

SEQ ID NO: 68638 - RNA, 12 nt, Artificial Sequence
  Description of Artificial Sequence: Synthetic oligonucleotide
gcugaaaaucaa

SEQ ID NO: 68639 - RNA, 14 nt, Artificial Sequence
  Description of Artificial Sequence: Synthetic oligonucleotide
aauaugauuacuuu

SEQ ID NO: 68640 - RNA, 14 nt, Artificial Sequence
  Description of Artificial Sequence: Synthetic oligonucleotide
cauuuuguucuaca

SEQ ID NO: 68641 - RNA, 12 nt, Artificial Sequence
  Description of Artificial Sequence: Synthetic oligonucleotide
cccgggacucuc

SEQ ID NO: 68642 - RNA, 14 nt, Artificial Sequence
  Description of Artificial Sequence: Synthetic oligonucleotide
ccuuuaaaguaaag

SEQ ID NO: 68643 - RNA, 13 nt, Artificial Sequence
  Description of Artificial Sequence: Synthetic oligonucleotide
ucuggaagccugg

SEQ ID NO: 68644 - RNA, 14 nt, Artificial Sequence
  Description of Artificial Sequence: Synthetic oligonucleotide
aaaacaaaagagag

SEQ ID NO: 68645 - RNA, 13 nt, Artificial Sequence
  Description of Artificial Sequence: Synthetic oligonucleotide
aucaguuaugccg

SEQ ID NO: 68646 - RNA, 13 nt, Artificial Sequence
  Description of Artificial Sequence: Synthetic oligonucleotide
uaaaagaagucca

SEQ ID NO: 68647 - RNA, 11 nt, Artificial Sequence
  Description of Artificial Sequence: Synthetic oligonucleotide
aggugagguua

SEQ ID NO: 68648 - RNA, 11 nt, Artificial Sequence
  Description of Artificial Sequence: Synthetic oligonucleotide
gggaagaggac

SEQ ID NO: 68649 - RNA, 13 nt, Artificial Sequence
  Description of Artificial Sequence: Synthetic oligonucleotide
aagcaaguauugu

SEQ ID NO: 68650 - RNA, 12 nt, Artificial Sequence
  Description of Artificial Sequence: Synthetic oligonucleotide
auuguagcacuc

SEQ ID NO: 68651 - RNA, 14 nt, Artificial Sequence
  Description of Artificial Sequence: Synthetic oligonucleotide
acaaaaccacaaau

SEQ ID NO: 68652 - RNA, 12 nt, Artificial Sequence
  Description of Artificial Sequence: Synthetic oligonucleotide
uaagcccauaca

SEQ ID NO: 68653 - RNA, 11 nt, Artificial Sequence
  Description of Artificial Sequence: Synthetic oligonucleotide
agcccauacag

SEQ ID NO: 68654 - RNA, 12 nt, Artificial Sequence
  Description of Artificial Sequence: Synthetic oligonucleotide
cagaaaccuucc

SEQ ID NO: 68655 - RNA, 10 nt, Artificial Sequence
  Description of Artificial Sequence: Synthetic oligonucleotide
guauaccuac

SEQ ID NO: 68656 - RNA, 13 nt, Artificial Sequence
  Description of Artificial Sequence: Synthetic oligonucleotide
gccaguuuucgga

SEQ ID NO: 68657 - RNA, 9 nt, Artificial Sequence
  Description of Artificial Sequence: Synthetic oligonucleotide
ggaacaggg

SEQ ID NO: 68658 - RNA, 13 nt, Artificial Sequence
  Description of Artificial Sequence: Synthetic oligonucleotide
uuaacuuuccagu

SEQ ID NO: 68659 - RNA, 14 nt, Artificial Sequence
  Description of Artificial Sequence: Synthetic oligonucleotide
aaaguuugguuuug

SEQ ID NO: 68660 - RNA, 12 nt, Artificial Sequence
  Description of Artificial Sequence: Synthetic oligonucleotide
cuucccacugua

SEQ ID NO: 68661 - RNA, 13 nt, Artificial Sequence
  Description of Artificial Sequence: Synthetic oligonucleotide
ugauaccauauga

SEQ ID NO: 68662 - RNA, 11 nt, Artificial Sequence
  Description of Artificial Sequence: Synthetic oligonucleotide
aacaugggcug

SEQ ID NO: 68663 - RNA, 13 nt, Artificial Sequence
  Description of Artificial Sequence: Synthetic oligonucleotide
caacuuuuucaua

SEQ ID NO: 68664 - RNA, 12 nt, Artificial Sequence
  Description of Artificial Sequence: Synthetic oligonucleotide
caugaggccgga

SEQ ID NO: 68665 - RNA, 11 nt, Artificial Sequence
  Description of Artificial Sequence: Synthetic oligonucleotide
acugcauuugu

SEQ ID NO: 68666 - RNA, 13 nt, Artificial Sequence
  Description of Artificial Sequence: Synthetic oligonucleotide
aauguuuacuacc

SEQ ID NO: 68667 - RNA, 15 nt, Artificial Sequence
  Description of Artificial Sequence: Synthetic oligonucleotide
aauuuuuugaugaaa

SEQ ID NO: 68668 - RNA, 14 nt, Artificial Sequence
  Description of Artificial Sequence: Synthetic oligonucleotide
cagugugugaauuu

SEQ ID NO: 68669 - RNA, 13 nt, Artificial Sequence
  Description of Artificial Sequence: Synthetic oligonucleotide
gagcaauguaugu

SEQ ID NO: 68670 - RNA, 14 nt, Artificial Sequence
  Description of Artificial Sequence: Synthetic oligonucleotide
aaagcacauauaua

SEQ ID NO: 68671 - RNA, 14 nt, Artificial Sequence
  Description of Artificial Sequence: Synthetic oligonucleotide
guaauaguuucucc

SEQ ID NO: 68672 - RNA, 13 nt, Artificial Sequence
  Description of Artificial Sequence: Synthetic oligonucleotide
aguuucuccaaau

SEQ ID NO: 68673 - RNA, 13 nt, Artificial Sequence
  Description of Artificial Sequence: Synthetic oligonucleotide
uacuuccuagaaa

SEQ ID NO: 68674 - RNA, 13 nt, Artificial Sequence
  Description of Artificial Sequence: Synthetic oligonucleotide
uacaccauauaug

SEQ ID NO: 68675 - RNA, 14 nt, Artificial Sequence
  Description of Artificial Sequence: Synthetic oligonucleotide
auauaugaauggag

SEQ ID NO: 68676 - RNA, 13 nt, Artificial Sequence
  Description of Artificial Sequence: Synthetic oligonucleotide
acgagaagaagau

SEQ ID NO: 68677 - RNA, 13 nt, Artificial Sequence
  Description of Artificial Sequence: Synthetic oligonucleotide
ucauuuacaggga

SEQ ID NO: 68678 - RNA, 13 nt, Artificial Sequence
  Description of Artificial Sequence: Synthetic oligonucleotide
cauuuacagggac

SEQ ID NO: 68679 - RNA, 10 nt, Artificial Sequence
  Description of Artificial Sequence: Synthetic oligonucleotide
agggaccuga

SEQ ID NO: 68680 - RNA, 14 nt, Artificial Sequence
  Description of Artificial Sequence: Synthetic oligonucleotide
uguuugacugcauc

SEQ ID NO: 68681 - RNA, 13 nt, Artificial Sequence
  Description of Artificial Sequence: Synthetic oligonucleotide
uuugacugcaucg

SEQ ID NO: 68682 - RNA, 12 nt, Artificial Sequence
  Description of Artificial Sequence: Synthetic oligonucleotide
gaguucacaggg

SEQ ID NO: 68683 - RNA, 13 nt, Artificial Sequence
  Description of Artificial Sequence: Synthetic oligonucleotide
ggcaccucugucc

SEQ ID NO: 68684 - RNA, 15 nt, Artificial Sequence
  Description of Artificial Sequence: Synthetic oligonucleotide
gguuugucuuuuuaa

SEQ ID NO: 68685 - RNA, 14 nt, Artificial Sequence
  Description of Artificial Sequence: Synthetic oligonucleotide
uuugucuuuuuaag

SEQ ID NO: 68686 - RNA, 13 nt, Artificial Sequence
  Description of Artificial Sequence: Synthetic oligonucleotide
ccuaaagguuguc

SEQ ID NO: 68687 - RNA, 12 nt, Artificial Sequence
  Description of Artificial Sequence: Synthetic oligonucleotide
aagguugucgac

SEQ ID NO: 68688 - RNA, 13 nt, Artificial Sequence
  Description of Artificial Sequence: Synthetic oligonucleotide
accuggcaauugu

SEQ ID NO: 68689 - RNA, 12 nt, Artificial Sequence
  Description of Artificial Sequence: Synthetic oligonucleotide
aguggugcgagg

SEQ ID NO: 68690 - RNA, 13 nt, Artificial Sequence
  Description of Artificial Sequence: Synthetic oligonucleotide
agagacaugaaau

SEQ ID NO: 68691 - RNA, 13 nt, Artificial Sequence
  Description of Artificial Sequence: Synthetic oligonucleotide
auauauuucucca

SEQ ID NO: 68692 - RNA, 10 nt, Artificial Sequence
  Description of Artificial Sequence: Synthetic oligonucleotide
caugaaggcu

SEQ ID NO: 68693 - RNA, 11 nt, Artificial Sequence
  Description of Artificial Sequence: Synthetic oligonucleotide
gcuggaguggu

SEQ ID NO: 68694 - RNA, 11 nt, Artificial Sequence
  Description of Artificial Sequence: Synthetic oligonucleotide
aggaagagagg

SEQ ID NO: 68695 - RNA, 12 nt, Artificial Sequence
  Description of Artificial Sequence: Synthetic oligonucleotide
cuugcaucgggc

SEQ ID NO: 68696 - RNA, 13 nt, Artificial Sequence
  Description of Artificial Sequence: Synthetic oligonucleotide
auauccuacugug

SEQ ID NO: 68697 - RNA, 13 nt, Artificial Sequence
  Description of Artificial Sequence: Synthetic oligonucleotide
uccuacuguguaa

SEQ ID NO: 68698 - RNA, 12 nt, Artificial Sequence
  Description of Artificial Sequence: Synthetic oligonucleotide
ccuuguagugua

SEQ ID NO: 68699 - RNA, 13 nt, Artificial Sequence
  Description of Artificial Sequence: Synthetic oligonucleotide
ucuuuguugauug

SEQ ID NO: 68700 - RNA, 14 nt, Artificial Sequence
  Description of Artificial Sequence: Synthetic oligonucleotide
uuuguugauugaaa

SEQ ID NO: 68701 - RNA, 15 nt, Artificial Sequence
  Description of Artificial Sequence: Synthetic oligonucleotide
uucuuuuucuuccau

SEQ ID NO: 68702 - RNA, 13 nt, Artificial Sequence
  Description of Artificial Sequence: Synthetic oligonucleotide
aaucuuccuucua

SEQ ID NO: 68703 - RNA, 13 nt, Artificial Sequence
  Description of Artificial Sequence: Synthetic oligonucleotide
uugaaugcuucau

SEQ ID NO: 68704 - RNA, 13 nt, Artificial Sequence
  Description of Artificial Sequence: Synthetic oligonucleotide
ugaaugcuucaug

SEQ ID NO: 68705 - RNA, 13 nt, Artificial Sequence
  Description of Artificial Sequence: Synthetic oligonucleotide
aauucuacuuuga

SEQ ID NO: 68706 - RNA, 13 nt, Artificial Sequence
  Description of Artificial Sequence: Synthetic oligonucleotide
agcaacuacagac

SEQ ID NO: 68707 - RNA, 13 nt, Artificial Sequence
  Description of Artificial Sequence: Synthetic oligonucleotide
gaccaaggucaac

SEQ ID NO: 68708 - RNA, 13 nt, Artificial Sequence
  Description of Artificial Sequence: Synthetic oligonucleotide
cgacuaucucgac

SEQ ID NO: 68709 - RNA, 13 nt, Artificial Sequence
  Description of Artificial Sequence: Synthetic oligonucleotide
aaccuucccaaac

SEQ ID NO: 68710 - RNA, 14 nt, Artificial Sequence
  Description of Artificial Sequence: Synthetic oligonucleotide
ccaagcuuagaacu

SEQ ID NO: 68711 - RNA, 15 nt, Artificial Sequence
  Description of Artificial Sequence: Synthetic oligonucleotide
agcuuagaacuuuaa

SEQ ID NO: 68712 - RNA, 11 nt, Artificial Sequence
  Description of Artificial Sequence: Synthetic oligonucleotide
aagaccaccac

SEQ ID NO: 68713 - RNA, 14 nt, Artificial Sequence
  Description of Artificial Sequence: Synthetic oligonucleotide
gcgagaaauaaagu

SEQ ID NO: 68714 - RNA, 14 nt, Artificial Sequence
  Description of Artificial Sequence: Synthetic oligonucleotide
cgagaaauaaaguu

SEQ ID NO: 68715 - RNA, 12 nt, Artificial Sequence
  Description of Artificial Sequence: Synthetic oligonucleotide
aggaaaugaucc

SEQ ID NO: 68716 - RNA, 13 nt, Artificial Sequence
  Description of Artificial Sequence: Synthetic oligonucleotide
gaagaaaugaaac

SEQ ID NO: 68717 - RNA, 13 nt, Artificial Sequence
  Description of Artificial Sequence: Synthetic oligonucleotide
guuuccauccucc

SEQ ID NO: 68718 - RNA, 15 nt, Artificial Sequence
  Description of Artificial Sequence: Synthetic oligonucleotide
acugaaaaucuuuga

SEQ ID NO: 68719 - RNA, 11 nt, Artificial Sequence
  Description of Artificial Sequence: Synthetic oligonucleotide
ugccguucagg

SEQ ID NO: 68720 - RNA, 13 nt, Artificial Sequence
  Description of Artificial Sequence: Synthetic oligonucleotide
caggguccagaag

SEQ ID NO: 68721 - RNA, 13 nt, Artificial Sequence
  Description of Artificial Sequence: Synthetic oligonucleotide
ucaagacugcuug

SEQ ID NO: 68722 - RNA, 13 nt, Artificial Sequence
  Description of Artificial Sequence: Synthetic oligonucleotide
uccaugucuuugg

SEQ ID NO: 68723 - RNA, 11 nt, Artificial Sequence
  Description of Artificial Sequence: Synthetic oligonucleotide
gccugaaacac

SEQ ID NO: 68724 - RNA, 12 nt, Artificial Sequence
  Description of Artificial Sequence: Synthetic oligonucleotide
ucucuguaccuc

SEQ ID NO: 68725 - RNA, 12 nt, Artificial Sequence
  Description of Artificial Sequence: Synthetic oligonucleotide
agcaagacaaga

SEQ ID NO: 68726 - RNA, 13 nt, Artificial Sequence
  Description of Artificial Sequence: Synthetic oligonucleotide
gcaagacaagaaa

SEQ ID NO: 68727 - RNA, 12 nt, Artificial Sequence
  Description of Artificial Sequence: Synthetic oligonucleotide
uguacaagaucc

SEQ ID NO: 68728 - RNA, 12 nt, Artificial Sequence
  Description of Artificial Sequence: Synthetic oligonucleotide
cguacuugcaga

SEQ ID NO: 68729 - RNA, 13 nt, Artificial Sequence
  Description of Artificial Sequence: Synthetic oligonucleotide
cgaucgauacaga

SEQ ID NO: 68730 - RNA, 13 nt, Artificial Sequence
  Description of Artificial Sequence: Synthetic oligonucleotide
uauaaaaauaaau

SEQ ID NO: 68731 - RNA, 13 nt, Artificial Sequence
  Description of Artificial Sequence: Synthetic oligonucleotide
uaaaaauaaauau

SEQ ID NO: 68732 - RNA, 13 nt, Artificial Sequence
  Description of Artificial Sequence: Synthetic oligonucleotide
uuugacugcugug

SEQ ID NO: 68733 - RNA, 13 nt, Artificial Sequence
  Description of Artificial Sequence: Synthetic oligonucleotide
ggagaugagagac

SEQ ID NO: 68734 - RNA, 10 nt, Artificial Sequence
  Description of Artificial Sequence: Synthetic oligonucleotide
ucccacuugg

SEQ ID NO: 68735 - RNA, 10 nt, Artificial Sequence
  Description of Artificial Sequence: Synthetic oligonucleotide
guucacggcc

SEQ ID NO: 68736 - RNA, 12 nt, Artificial Sequence
  Description of Artificial Sequence: Synthetic oligonucleotide
accaucacacca

SEQ ID NO: 68737 - RNA, 10 nt, Artificial Sequence
  Description of Artificial Sequence: Synthetic oligonucleotide
cugcggguuu

SEQ ID NO: 68738 - RNA, 9 nt, Artificial Sequence
  Description of Artificial Sequence: Synthetic oligonucleotide
uccaguuug

SEQ ID NO: 68739 - RNA, 12 nt, Artificial Sequence
  Description of Artificial Sequence: Synthetic oligonucleotide
uuaaggacuucu

SEQ ID NO: 68740 - RNA, 12 nt, Artificial Sequence
  Description of Artificial Sequence: Synthetic oligonucleotide
agugggacagag

SEQ ID NO: 68741 - RNA, 13 nt, Artificial Sequence
  Description of Artificial Sequence: Synthetic oligonucleotide
auuuguuauugug

SEQ ID NO: 68742 - RNA, 12 nt, Artificial Sequence
  Description of Artificial Sequence: Synthetic oligonucleotide
ucaaaugcauuu

SEQ ID NO: 68743 - RNA, 9 nt, Artificial Sequence
  Description of Artificial Sequence: Synthetic oligonucleotide
aggaaagcc

SEQ ID NO: 68744 - RNA, 10 nt, Artificial Sequence
  Description of Artificial Sequence: Synthetic oligonucleotide
ggaaagcccu

SEQ ID NO: 68745 - RNA, 11 nt, Artificial Sequence
  Description of Artificial Sequence: Synthetic oligonucleotide
ccagcauggcc

SEQ ID NO: 68746 - RNA, 10 nt, Artificial Sequence
  Description of Artificial Sequence: Synthetic oligonucleotide
uucucccuga

SEQ ID NO: 68747 - RNA, 11 nt, Artificial Sequence
  Description of Artificial Sequence: Synthetic oligonucleotide
aagaagcccuu

SEQ ID NO: 68748 - RNA, 11 nt, Artificial Sequence
  Description of Artificial Sequence: Synthetic oligonucleotide
gaagcccuuca

SEQ ID NO: 68749 - RNA, 10 nt, Artificial Sequence
  Description of Artificial Sequence: Synthetic oligonucleotide
cccuucagcg

SEQ ID NO: 68750 - RNA, 10 nt, Artificial Sequence
  Description of Artificial Sequence: Synthetic oligonucleotide
cuucagcggc

SEQ ID NO: 68751 - RNA, 11 nt, Artificial Sequence
  Description of Artificial Sequence: Synthetic oligonucleotide
cagcggccagu

SEQ ID NO: 68752 - RNA, 11 nt, Artificial Sequence
  Description of Artificial Sequence: Synthetic oligonucleotide
gaaaagcuccg

SEQ ID NO: 68753 - RNA, 10 nt, Artificial Sequence
  Description of Artificial Sequence: Synthetic oligonucleotide
aaagcuccgg

SEQ ID NO: 68754 - RNA, 12 nt, Artificial Sequence
  Description of Artificial Sequence: Synthetic oligonucleotide
gucaacagucug

SEQ ID NO: 68755 - RNA, 12 nt, Artificial Sequence
  Description of Artificial Sequence: Synthetic oligonucleotide
agaguucaaaag

SEQ ID NO: 68756 - RNA, 12 nt, Artificial Sequence
  Description of Artificial Sequence: Synthetic oligonucleotide
gaguucaaaagc

SEQ ID NO: 68757 - RNA, 11 nt, Artificial Sequence
  Description of Artificial Sequence: Synthetic oligonucleotide
ucaaaagcccu

SEQ ID NO: 68758 - RNA, 11 nt, Artificial Sequence
  Description of Artificial Sequence: Synthetic oligonucleotide
caaaagcccuu

SEQ ID NO: 68759 - RNA, 11 nt, Artificial Sequence
  Description of Artificial Sequence: Synthetic oligonucleotide
aaagcccuuca

SEQ ID NO: 68760 - RNA, 11 nt, Artificial Sequence
  Description of Artificial Sequence: Synthetic oligonucleotide
aagcccuucag

SEQ ID NO: 68761 - RNA, 12 nt, Artificial Sequence
  Description of Artificial Sequence: Synthetic oligonucleotide
ugaagccgcucg

SEQ ID NO: 68762 - RNA, 11 nt, Artificial Sequence
  Description of Artificial Sequence: Synthetic oligonucleotide
acgccagucaa

SEQ ID NO: 68763 - RNA, 12 nt, Artificial Sequence
  Description of Artificial Sequence: Synthetic oligonucleotide
ucuuggugcgug

SEQ ID NO: 68764 - RNA, 13 nt, Artificial Sequence
  Description of Artificial Sequence: Synthetic oligonucleotide
uuggauucaucag

SEQ ID NO: 68765 - RNA, 12 nt, Artificial Sequence
  Description of Artificial Sequence: Synthetic oligonucleotide
ggaauaccuaag

SEQ ID NO: 68766 - RNA, 11 nt, Artificial Sequence
  Description of Artificial Sequence: Synthetic oligonucleotide
uuugaggcuca

SEQ ID NO: 68767 - RNA, 10 nt, Artificial Sequence
  Description of Artificial Sequence: Synthetic oligonucleotide
cuacaauugg

SEQ ID NO: 68768 - RNA, 11 nt, Artificial Sequence
  Description of Artificial Sequence: Synthetic oligonucleotide
aguuaggagcc

SEQ ID NO: 68769 - RNA, 12 nt, Artificial Sequence
  Description of Artificial Sequence: Synthetic oligonucleotide
gucaauauccac

SEQ ID NO: 68770 - RNA, 12 nt, Artificial Sequence
  Description of Artificial Sequence: Synthetic oligonucleotide
uguucagucaca

SEQ ID NO: 68771 - RNA, 11 nt, Artificial Sequence
  Description of Artificial Sequence: Synthetic oligonucleotide
cacacacauac

SEQ ID NO: 68772 - RNA, 11 nt, Artificial Sequence
  Description of Artificial Sequence: Synthetic oligonucleotide
uccuuuugcuu

SEQ ID NO: 68773 - RNA, 15 nt, Artificial Sequence
  Description of Artificial Sequence: Synthetic oligonucleotide
uuuaaaguaauuuuu

SEQ ID NO: 68774 - RNA, 12 nt, Artificial Sequence
  Description of Artificial Sequence: Synthetic oligonucleotide
aacagucaaugg

SEQ ID NO: 68775 - RNA, 12 nt, Artificial Sequence
  Description of Artificial Sequence: Synthetic oligonucleotide
cgacaaaccaau

SEQ ID NO: 68776 - RNA, 11 nt, Artificial Sequence
  Description of Artificial Sequence: Synthetic oligonucleotide
cugcuaccacu

SEQ ID NO: 68777 - RNA, 12 nt, Artificial Sequence
  Description of Artificial Sequence: Synthetic oligonucleotide
caagcggucuua

SEQ ID NO: 68778 - RNA, 12 nt, Artificial Sequence
  Description of Artificial Sequence: Synthetic oligonucleotide
gucuuaccggcu

SEQ ID NO: 68779 - RNA, 10 nt, Artificial Sequence
  Description of Artificial Sequence: Synthetic oligonucleotide
auggguuacc

SEQ ID NO: 68780 - RNA, 10 nt, Artificial Sequence
  Description of Artificial Sequence: Synthetic oligonucleotide
uuaccugcga

SEQ ID NO: 68781 - RNA, 11 nt, Artificial Sequence
  Description of Artificial Sequence: Synthetic oligonucleotide
aucuugcugag

SEQ ID NO: 68782 - RNA, 12 nt, Artificial Sequence
  Description of Artificial Sequence: Synthetic oligonucleotide
gcauaaaacagu

SEQ ID NO: 68783 - RNA, 11 nt, Artificial Sequence
  Description of Artificial Sequence: Synthetic oligonucleotide
uccuuuauccu

SEQ ID NO: 68784 - RNA, 11 nt, Artificial Sequence
  Description of Artificial Sequence: Synthetic oligonucleotide
aacgcaaguug

SEQ ID NO: 68785 - RNA, 12 nt, Artificial Sequence
  Description of Artificial Sequence: Synthetic oligonucleotide
aacugaaaccau

SEQ ID NO: 68786 - RNA, 13 nt, Artificial Sequence
  Description of Artificial Sequence: Synthetic oligonucleotide
cuuuguuaaauau

SEQ ID NO: 68787 - RNA, 13 nt, Artificial Sequence
  Description of Artificial Sequence: Synthetic oligonucleotide
uauauuaaaaguu

SEQ ID NO: 68788 - RNA, 12 nt, Artificial Sequence
  Description of Artificial Sequence: Synthetic oligonucleotide
uuuugacuuaac

SEQ ID NO: 68789 - RNA, 12 nt, Artificial Sequence
  Description of Artificial Sequence: Synthetic oligonucleotide
caaacucagcac

SEQ ID NO: 68790 - RNA, 10 nt, Artificial Sequence
  Description of Artificial Sequence: Synthetic oligonucleotide
gcugaccuca

SEQ ID NO: 68791 - RNA, 13 nt, Artificial Sequence
  Description of Artificial Sequence: Synthetic oligonucleotide
uuauucagaucgc

SEQ ID NO: 68792 - RNA, 12 nt, Artificial Sequence
  Description of Artificial Sequence: Synthetic oligonucleotide
ggguucugggau

SEQ ID NO: 68793 - RNA, 14 nt, Artificial Sequence
  Description of Artificial Sequence: Synthetic oligonucleotide
uauuggaaauuaug

SEQ ID NO: 68794 - RNA, 12 nt, Artificial Sequence
  Description of Artificial Sequence: Synthetic oligonucleotide
uggaagcacuag

SEQ ID NO: 68795 - RNA, 12 nt, Artificial Sequence
  Description of Artificial Sequence: Synthetic oligonucleotide
uuuuuaugugga

SEQ ID NO: 68796 - RNA, 11 nt, Artificial Sequence
  Description of Artificial Sequence: Synthetic oligonucleotide
gaauugguaga

SEQ ID NO: 68797 - RNA, 12 nt, Artificial Sequence
  Description of Artificial Sequence: Synthetic oligonucleotide
uagacuuggaga

SEQ ID NO: 68798 - RNA, 12 nt, Artificial Sequence
  Description of Artificial Sequence: Synthetic oligonucleotide
uacaguauucca

SEQ ID NO: 68799 - RNA, 14 nt, Artificial Sequence
  Description of Artificial Sequence: Synthetic oligonucleotide
cacugaugaauuaa

SEQ ID NO: 68800 - RNA, 11 nt, Artificial Sequence
  Description of Artificial Sequence: Synthetic oligonucleotide
cacaucaucac

SEQ ID NO: 68801 - RNA, 12 nt, Artificial Sequence
  Description of Artificial Sequence: Synthetic oligonucleotide
ucaccaaacaga

SEQ ID NO: 68802 - RNA, 11 nt, Artificial Sequence
  Description of Artificial Sequence: Synthetic oligonucleotide
gaacaugaugg

SEQ ID NO: 68803 - RNA, 11 nt, Artificial Sequence
  Description of Artificial Sequence: Synthetic oligonucleotide
auguagacugc

SEQ ID NO: 68804 - RNA, 12 nt, Artificial Sequence
  Description of Artificial Sequence: Synthetic oligonucleotide
gaucuauuuaug

SEQ ID NO: 68805 - RNA, 11 nt, Artificial Sequence
  Description of Artificial Sequence: Synthetic oligonucleotide
cacuauuauca

SEQ ID NO: 68806 - RNA, 10 nt, Artificial Sequence
  Description of Artificial Sequence: Synthetic oligonucleotide
ucaguucugc

SEQ ID NO: 68807 - RNA, 12 nt, Artificial Sequence
  Description of Artificial Sequence: Synthetic oligonucleotide
gauuaaaccuac

SEQ ID NO: 68808 - RNA, 12 nt, Artificial Sequence
  Description of Artificial Sequence: Synthetic oligonucleotide
uaaaauccuucu

SEQ ID NO: 68809 - RNA, 11 nt, Artificial Sequence
  Description of Artificial Sequence: Synthetic oligonucleotide
augcuguagac

SEQ ID NO: 68810 - RNA, 12 nt, Artificial Sequence
  Description of Artificial Sequence: Synthetic oligonucleotide
ugauaggaauag

SEQ ID NO: 68811 - RNA, 10 nt, Artificial Sequence
  Description of Artificial Sequence: Synthetic oligonucleotide
auggcccuga

SEQ ID NO: 68812 - RNA, 10 nt, Artificial Sequence
  Description of Artificial Sequence: Synthetic oligonucleotide
uccucaagca

SEQ ID NO: 68813 - RNA, 9 nt, Artificial Sequence
  Description of Artificial Sequence: Synthetic oligonucleotide
uucagccca

SEQ ID NO: 68814 - RNA, 10 nt, Artificial Sequence
  Description of Artificial Sequence: Synthetic oligonucleotide
cugcugaacc

SEQ ID NO: 68815 - RNA, 11 nt, Artificial Sequence
  Description of Artificial Sequence: Synthetic oligonucleotide
aguucucuuca

SEQ ID NO: 68816 - RNA, 10 nt, Artificial Sequence
  Description of Artificial Sequence: Synthetic oligonucleotide
cagccuagag

SEQ ID NO: 68817 - RNA, 12 nt, Artificial Sequence
  Description of Artificial Sequence: Synthetic oligonucleotide
ucugugaagugu

SEQ ID NO: 68818 - RNA, 13 nt, Artificial Sequence
  Description of Artificial Sequence: Synthetic oligonucleotide
gagaaaauuucaa

SEQ ID NO: 68819 - RNA, 10 nt, Artificial Sequence
  Description of Artificial Sequence: Synthetic oligonucleotide
auccuccuga

SEQ ID NO: 68820 - RNA, 11 nt, Artificial Sequence
  Description of Artificial Sequence: Synthetic oligonucleotide
ugacaucauau

SEQ ID NO: 68821 - RNA, 12 nt, Artificial Sequence
  Description of Artificial Sequence: Synthetic oligonucleotide
aucuucaucaua

SEQ ID NO: 68822 - RNA, 12 nt, Artificial Sequence
  Description of Artificial Sequence: Synthetic oligonucleotide
acuagcuauuaa

SEQ ID NO: 68823 - RNA, 13 nt, Artificial Sequence
  Description of Artificial Sequence: Synthetic oligonucleotide
cucuacuaaaaau

SEQ ID NO: 68824 - RNA, 11 nt, Artificial Sequence
  Description of Artificial Sequence: Synthetic oligonucleotide
cuaucucgccu

SEQ ID NO: 68825 - RNA, 12 nt, Artificial Sequence
  Description of Artificial Sequence: Synthetic oligonucleotide
uucgguccaguu

SEQ ID NO: 68826 - RNA, 10 nt, Artificial Sequence
  Description of Artificial Sequence: Synthetic oligonucleotide
auguagccgc

SEQ ID NO: 68827 - RNA, 11 nt, Artificial Sequence
  Description of Artificial Sequence: Synthetic oligonucleotide
gaggagacuug

SEQ ID NO: 68828 - RNA, 11 nt, Artificial Sequence
  Description of Artificial Sequence: Synthetic oligonucleotide
aguagugagga

SEQ ID NO: 68829 - RNA, 13 nt, Artificial Sequence
  Description of Artificial Sequence: Synthetic oligonucleotide
agaugaguacaaa

SEQ ID NO: 68830 - RNA, 12 nt, Artificial Sequence
  Description of Artificial Sequence: Synthetic oligonucleotide
uuguuaaugggc

SEQ ID NO: 68831 - RNA, 12 nt, Artificial Sequence
  Description of Artificial Sequence: Synthetic oligonucleotide
uuuuaauuuauu

SEQ ID NO: 68832 - RNA, 11 nt, Artificial Sequence
  Description of Artificial Sequence: Synthetic oligonucleotide
auuuaaauaug

SEQ ID NO: 68833 - RNA, 12 nt, Artificial Sequence
  Description of Artificial Sequence: Synthetic oligonucleotide
auccuuuguuuc

SEQ ID NO: 68834 - RNA, 13 nt, Artificial Sequence
  Description of Artificial Sequence: Synthetic oligonucleotide
gucuaaguguuug

SEQ ID NO: 68835 - RNA, 11 nt, Artificial Sequence
  Description of Artificial Sequence: Synthetic oligonucleotide
ccugugacaaa

SEQ ID NO: 68836 - RNA, 12 nt, Artificial Sequence
  Description of Artificial Sequence: Synthetic oligonucleotide
caggcugaauua

SEQ ID NO: 68837 - RNA, 13 nt, Artificial Sequence
  Description of Artificial Sequence: Synthetic oligonucleotide
ucauucuuacaau

SEQ ID NO: 68838 - RNA, 14 nt, Artificial Sequence
  Description of Artificial Sequence: Synthetic oligonucleotide
cauucuuacaauug

SEQ ID NO: 68839 - RNA, 11 nt, Artificial Sequence
  Description of Artificial Sequence: Synthetic oligonucleotide
agagaguguac

SEQ ID NO: 68840 - RNA, 11 nt, Artificial Sequence
  Description of Artificial Sequence: Synthetic oligonucleotide
gaacucagcag

SEQ ID NO: 68841 - RNA, 12 nt, Artificial Sequence
  Description of Artificial Sequence: Synthetic oligonucleotide
uuauuuucagua

SEQ ID NO: 68842 - RNA, 11 nt, Artificial Sequence
  Description of Artificial Sequence: Synthetic oligonucleotide
cuuaaauggaa

SEQ ID NO: 68843 - RNA, 12 nt, Artificial Sequence
  Description of Artificial Sequence: Synthetic oligonucleotide
gccuaaaauugu

SEQ ID NO: 68844 - RNA, 12 nt, Artificial Sequence
  Description of Artificial Sequence: Synthetic oligonucleotide
acuaacaucugg

SEQ ID NO: 68845 - RNA, 11 nt, Artificial Sequence
  Description of Artificial Sequence: Synthetic oligonucleotide
gacugugagcu

SEQ ID NO: 68846 - RNA, 13 nt, Artificial Sequence
  Description of Artificial Sequence: Synthetic oligonucleotide
gcuuuuuauuaau

SEQ ID NO: 68847 - RNA, 12 nt, Artificial Sequence
  Description of Artificial Sequence: Synthetic oligonucleotide
ucuucuuacauu

SEQ ID NO: 68848 - RNA, 14 nt, Artificial Sequence
  Description of Artificial Sequence: Synthetic oligonucleotide
auuuguaaaaaugu

SEQ ID NO: 68849 - RNA, 14 nt, Artificial Sequence
  Description of Artificial Sequence: Synthetic oligonucleotide
ucuuaauucauauu

SEQ ID NO: 68850 - RNA, 12 nt, Artificial Sequence
  Description of Artificial Sequence: Synthetic oligonucleotide
aacuaaucauga

SEQ ID NO: 68851 - RNA, 11 nt, Artificial Sequence
  Description of Artificial Sequence: Synthetic oligonucleotide
cugcucuuggg

SEQ ID NO: 68852 - RNA, 12 nt, Artificial Sequence
  Description of Artificial Sequence: Synthetic oligonucleotide
aguagcuuugag

SEQ ID NO: 68853 - RNA, 13 nt, Artificial Sequence
  Description of Artificial Sequence: Synthetic oligonucleotide
acguaauauuuca

SEQ ID NO: 68854 - RNA, 12 nt, Artificial Sequence
  Description of Artificial Sequence: Synthetic oligonucleotide
auucucuucacu

SEQ ID NO: 68855 - RNA, 13 nt, Artificial Sequence
  Description of Artificial Sequence: Synthetic oligonucleotide
uaaugcuaagaaa

SEQ ID NO: 68856 - RNA, 11 nt, Artificial Sequence
  Description of Artificial Sequence: Synthetic oligonucleotide
cugaaaaucaa

SEQ ID NO: 68857 - RNA, 13 nt, Artificial Sequence
  Description of Artificial Sequence: Synthetic oligonucleotide
auaugauuacuuu

SEQ ID NO: 68858 - RNA, 13 nt, Artificial Sequence
  Description of Artificial Sequence: Synthetic oligonucleotide
auuuuguucuaca

SEQ ID NO: 68859 - RNA, 11 nt, Artificial Sequence
  Description of Artificial Sequence: Synthetic oligonucleotide
ccgggacucuc

SEQ ID NO: 68860 - RNA, 13 nt, Artificial Sequence
  Description of Artificial Sequence: Synthetic oligonucleotide
cuuuaaaguaaag

SEQ ID NO: 68861 - RNA, 12 nt, Artificial Sequence
  Description of Artificial Sequence: Synthetic oligonucleotide
cuggaagccugg

SEQ ID NO: 68862 - RNA, 13 nt, Artificial Sequence
  Description of Artificial Sequence: Synthetic oligonucleotide
aaacaaaagagag

SEQ ID NO: 68863 - RNA, 12 nt, Artificial Sequence
  Description of Artificial Sequence: Synthetic oligonucleotide
ucaguuaugccg

SEQ ID NO: 68864 - RNA, 12 nt, Artificial Sequence
  Description of Artificial Sequence: Synthetic oligonucleotide
aaaagaagucca

SEQ ID NO: 68865 - RNA, 10 nt, Artificial Sequence
  Description of Artificial Sequence: Synthetic oligonucleotide
ggugagguua

SEQ ID NO: 68866 - RNA, 10 nt, Artificial Sequence
  Description of Artificial Sequence: Synthetic oligonucleotide
ggaagaggac

SEQ ID NO: 68867 - RNA, 12 nt, Artificial Sequence
  Description of Artificial Sequence: Synthetic oligonucleotide
agcaaguauugu

SEQ ID NO: 68868 - RNA, 11 nt, Artificial Sequence
  Description of Artificial Sequence: Synthetic oligonucleotide
uuguagcacuc

SEQ ID NO: 68869 - RNA, 13 nt, Artificial Sequence
  Description of Artificial Sequence: Synthetic oligonucleotide
caaaaccacaaau

SEQ ID NO: 68870 - RNA, 11 nt, Artificial Sequence
  Description of Artificial Sequence: Synthetic oligonucleotide
aagcccauaca

SEQ ID NO: 68871 - RNA, 10 nt, Artificial Sequence
  Description of Artificial Sequence: Synthetic oligonucleotide
gcccauacag

SEQ ID NO: 68872 - RNA, 11 nt, Artificial Sequence
  Description of Artificial Sequence: Synthetic oligonucleotide
agaaaccuucc

SEQ ID NO: 68873 - RNA, 9 nt, Artificial Sequence
  Description of Artificial Sequence: Synthetic oligonucleotide
uauaccuac

SEQ ID NO: 68874 - RNA, 12 nt, Artificial Sequence
  Description of Artificial Sequence: Synthetic oligonucleotide
ccaguuuucgga

SEQ ID NO: 68875 - RNA, 8 nt, Artificial Sequence
  Description of Artificial Sequence: Synthetic oligonucleotide
gaacaggg

SEQ ID NO: 68876 - RNA, 12 nt, Artificial Sequence
  Description of Artificial Sequence: Synthetic oligonucleotide
uaacuuuccagu

SEQ ID NO: 68877 - RNA, 13 nt, Artificial Sequence
  Description of Artificial Sequence: Synthetic oligonucleotide
aaguuugguuuug

SEQ ID NO: 68878 - RNA, 11 nt, Artificial Sequence
  Description of Artificial Sequence: Synthetic oligonucleotide
uucccacugua

SEQ ID NO: 68879 - RNA, 12 nt, Artificial Sequence
  Description of Artificial Sequence: Synthetic oligonucleotide
gauaccauauga

SEQ ID NO: 68880 - RNA, 10 nt, Artificial Sequence
  Description of Artificial Sequence: Synthetic oligonucleotide
acaugggcug

SEQ ID NO: 68881 - RNA, 12 nt, Artificial Sequence
  Description of Artificial Sequence: Synthetic oligonucleotide
aacuuuuucaua

SEQ ID NO: 68882 - RNA, 11 nt, Artificial Sequence
  Description of Artificial Sequence: Synthetic oligonucleotide
augaggccgga

SEQ ID NO: 68883 - RNA, 10 nt, Artificial Sequence
  Description of Artificial Sequence: Synthetic oligonucleotide
cugcauuugu

SEQ ID NO: 68884 - RNA, 12 nt, Artificial Sequence
  Description of Artificial Sequence: Synthetic oligonucleotide
auguuuacuacc

SEQ ID NO: 68885 - RNA, 14 nt, Artificial Sequence
  Description of Artificial Sequence: Synthetic oligonucleotide
auuuuuugaugaaa

SEQ ID NO: 68886 - RNA, 13 nt, Artificial Sequence
  Description of Artificial Sequence: Synthetic oligonucleotide
agugugugaauuu

SEQ ID NO: 68887 - RNA, 12 nt, Artificial Sequence
  Description of Artificial Sequence: Synthetic oligonucleotide
agcaauguaugu

SEQ ID NO: 68888 - RNA, 13 nt, Artificial Sequence
  Description of Artificial Sequence: Synthetic oligonucleotide
aagcacauauaua

SEQ ID NO: 68889 - RNA, 13 nt, Artificial Sequence
  Description of Artificial Sequence: Synthetic oligonucleotide
uaauaguuucucc

SEQ ID NO: 68890 - RNA, 12 nt, Artificial Sequence
  Description of Artificial Sequence: Synthetic oligonucleotide
guuucuccaaau

SEQ ID NO: 68891 - RNA, 12 nt, Artificial Sequence
  Description of Artificial Sequence: Synthetic oligonucleotide
acuuccuagaaa

SEQ ID NO: 68892 - RNA, 12 nt, Artificial Sequence
  Description of Artificial Sequence: Synthetic oligonucleotide
acaccauauaug

SEQ ID NO: 68893 - RNA, 13 nt, Artificial Sequence
  Description of Artificial Sequence: Synthetic oligonucleotide
uauaugaauggag

SEQ ID NO: 68894 - RNA, 12 nt, Artificial Sequence
  Description of Artificial Sequence: Synthetic oligonucleotide
cauuuacaggga

SEQ ID NO: 68895 - RNA, 12 nt, Artificial Sequence
  Description of Artificial Sequence: Synthetic oligonucleotide
auuuacagggac

SEQ ID NO: 68896 - RNA, 9 nt, Artificial Sequence
  Description of Artificial Sequence: Synthetic oligonucleotide
gggaccuga

SEQ ID NO: 68897 - RNA, 13 nt, Artificial Sequence
  Description of Artificial Sequence: Synthetic oligonucleotide
guuugacugcauc

SEQ ID NO: 68898 - RNA, 12 nt, Artificial Sequence
  Description of Artificial Sequence: Synthetic oligonucleotide
uugacugcaucg

SEQ ID NO: 68899 - RNA, 11 nt, Artificial Sequence
  Description of Artificial Sequence: Synthetic oligonucleotide
aguucacaggg

SEQ ID NO: 68900 - RNA, 12 nt, Artificial Sequence
  Description of Artificial Sequence: Synthetic oligonucleotide
gcaccucugucc

SEQ ID NO: 68901 - RNA, 14 nt, Artificial Sequence
  Description of Artificial Sequence: Synthetic oligonucleotide
guuugucuuuuuaa

SEQ ID NO: 68902 - RNA, 13 nt, Artificial Sequence
  Description of Artificial Sequence: Synthetic oligonucleotide
uugucuuuuuaag

SEQ ID NO: 68903 - RNA, 12 nt, Artificial Sequence
  Description of Artificial Sequence: Synthetic oligonucleotide
cuaaagguuguc

SEQ ID NO: 68904 - RNA, 11 nt, Artificial Sequence
  Description of Artificial Sequence: Synthetic oligonucleotide
agguugucgac

SEQ ID NO: 68905 - RNA, 12 nt, Artificial Sequence
  Description of Artificial Sequence: Synthetic oligonucleotide
ccuggcaauugu

SEQ ID NO: 68906 - RNA, 11 nt, Artificial Sequence
  Description of Artificial Sequence: Synthetic oligonucleotide
guggugcgagg

SEQ ID NO: 68907 - RNA, 12 nt, Artificial Sequence
  Description of Artificial Sequence: Synthetic oligonucleotide
gagacaugaaau

SEQ ID NO: 68908 - RNA, 12 nt, Artificial Sequence
  Description of Artificial Sequence: Synthetic oligonucleotide
uauauuucucca

SEQ ID NO: 68909 - RNA, 9 nt, Artificial Sequence
  Description of Artificial Sequence: Synthetic oligonucleotide
augaaggcu

SEQ ID NO: 68910 - RNA, 10 nt, Artificial Sequence
  Description of Artificial Sequence: Synthetic oligonucleotide
cuggaguggu

SEQ ID NO: 68911 - RNA, 10 nt, Artificial Sequence
  Description of Artificial Sequence: Synthetic oligonucleotide
ggaagagagg

SEQ ID NO: 68912 - RNA, 11 nt, Artificial Sequence
  Description of Artificial Sequence: Synthetic oligonucleotide
uugcaucgggc

SEQ ID NO: 68913 - RNA, 12 nt, Artificial Sequence
  Description of Artificial Sequence: Synthetic oligonucleotide
uauccuacugug

SEQ ID NO: 68914 - RNA, 12 nt, Artificial Sequence
  Description of Artificial Sequence: Synthetic oligonucleotide
ccuacuguguaa

SEQ ID NO: 68915 - RNA, 11 nt, Artificial Sequence
  Description of Artificial Sequence: Synthetic oligonucleotide
cuuguagugua

SEQ ID NO: 68916 - RNA, 12 nt, Artificial Sequence
  Description of Artificial Sequence: Synthetic oligonucleotide
cuuuguugauug

SEQ ID NO: 68917 - RNA, 13 nt, Artificial Sequence
  Description of Artificial Sequence: Synthetic oligonucleotide
uuguugauugaaa

SEQ ID NO: 68918 - RNA, 14 nt, Artificial Sequence
  Description of Artificial Sequence: Synthetic oligonucleotide
ucuuuuucuuccau

SEQ ID NO: 68919 - RNA, 12 nt, Artificial Sequence
  Description of Artificial Sequence: Synthetic oligonucleotide
aucuuccuucua

SEQ ID NO: 68920 - RNA, 12 nt, Artificial Sequence
  Description of Artificial Sequence: Synthetic oligonucleotide
ugaaugcuucau

SEQ ID NO: 68921 - RNA, 12 nt, Artificial Sequence
  Description of Artificial Sequence: Synthetic oligonucleotide
gaaugcuucaug

SEQ ID NO: 68922 - RNA, 12 nt, Artificial Sequence
  Description of Artificial Sequence: Synthetic oligonucleotide
auucuacuuuga

SEQ ID NO: 68923 - RNA, 12 nt, Artificial Sequence
  Description of Artificial Sequence: Synthetic oligonucleotide
gcaacuacagac

SEQ ID NO: 68924 - RNA, 12 nt, Artificial Sequence
  Description of Artificial Sequence: Synthetic oligonucleotide
accaaggucaac

SEQ ID NO: 68925 - RNA, 12 nt, Artificial Sequence
  Description of Artificial Sequence: Synthetic oligonucleotide
gacuaucucgac

SEQ ID NO: 68926 - RNA, 12 nt, Artificial Sequence
  Description of Artificial Sequence: Synthetic oligonucleotide
accuucccaaac

SEQ ID NO: 68927 - RNA, 13 nt, Artificial Sequence
  Description of Artificial Sequence: Synthetic oligonucleotide
caagcuuagaacu

SEQ ID NO: 68928 - RNA, 14 nt, Artificial Sequence
  Description of Artificial Sequence: Synthetic oligonucleotide
gcuuagaacuuuaa

SEQ ID NO: 68929 - RNA, 13 nt, Artificial Sequence
  Description of Artificial Sequence: Synthetic oligonucleotide
aacuuuaagcaac

SEQ ID NO: 68930 - RNA, 10 nt, Artificial Sequence
  Description of Artificial Sequence: Synthetic oligonucleotide
agaccaccac

SEQ ID NO: 68931 - RNA, 13 nt, Artificial Sequence
  Description of Artificial Sequence: Synthetic oligonucleotide
cgagaaauaaagu

SEQ ID NO: 68932 - RNA, 13 nt, Artificial Sequence
  Description of Artificial Sequence: Synthetic oligonucleotide
gagaaauaaaguu

SEQ ID NO: 68933 - RNA, 11 nt, Artificial Sequence
  Description of Artificial Sequence: Synthetic oligonucleotide
ggaaaugaucc

SEQ ID NO: 68934 - RNA, 12 nt, Artificial Sequence
  Description of Artificial Sequence: Synthetic oligonucleotide
aagaaaugaaac

SEQ ID NO: 68935 - RNA, 12 nt, Artificial Sequence
  Description of Artificial Sequence: Synthetic oligonucleotide
uuuccauccucc

SEQ ID NO: 68936 - RNA, 14 nt, Artificial Sequence
  Description of Artificial Sequence: Synthetic oligonucleotide
cugaaaaucuuuga

SEQ ID NO: 68937 - RNA, 10 nt, Artificial Sequence
  Description of Artificial Sequence: Synthetic oligonucleotide
gccguucagg

SEQ ID NO: 68938 - RNA, 12 nt, Artificial Sequence
  Description of Artificial Sequence: Synthetic oligonucleotide
aggguccagaag

SEQ ID NO: 68939 - RNA, 12 nt, Artificial Sequence
  Description of Artificial Sequence: Synthetic oligonucleotide
caagacugcuug

SEQ ID NO: 68940 - RNA, 12 nt, Artificial Sequence
  Description of Artificial Sequence: Synthetic oligonucleotide
ccaugucuuugg

SEQ ID NO: 68941 - RNA, 10 nt, Artificial Sequence
  Description of Artificial Sequence: Synthetic oligonucleotide
ccugaaacac

SEQ ID NO: 68942 - RNA, 11 nt, Artificial Sequence
  Description of Artificial Sequence: Synthetic oligonucleotide
cucuguaccuc

SEQ ID NO: 68943 - RNA, 11 nt, Artificial Sequence
  Description of Artificial Sequence: Synthetic oligonucleotide
gcaagacaaga

SEQ ID NO: 68944 - RNA, 12 nt, Artificial Sequence
  Description of Artificial Sequence: Synthetic oligonucleotide
caagacaagaaa

SEQ ID NO: 68945 - RNA, 11 nt, Artificial Sequence
  Description of Artificial Sequence: Synthetic oligonucleotide
guacaagaucc

SEQ ID NO: 68946 - RNA, 11 nt, Artificial Sequence
  Description of Artificial Sequence: Synthetic oligonucleotide
guacuugcaga

SEQ ID NO: 68947 - RNA, 12 nt, Artificial Sequence
  Description of Artificial Sequence: Synthetic oligonucleotide
gaucgauacaga

SEQ ID NO: 68948 - RNA, 12 nt, Artificial Sequence
  Description of Artificial Sequence: Synthetic oligonucleotide
auaaaaauaaau

SEQ ID NO: 68949 - RNA, 12 nt, Artificial Sequence
  Description of Artificial Sequence: Synthetic oligonucleotide
aaaaauaaauau

SEQ ID NO: 68950 - RNA, 12 nt, Artificial Sequence
  Description of Artificial Sequence: Synthetic oligonucleotide
uugacugcugug

SEQ ID NO: 68951 - RNA, 12 nt, Artificial Sequence
  Description of Artificial Sequence: Synthetic oligonucleotide
gagaugagagac

SEQ ID NO: 68952 - RNA, 9 nt, Artificial Sequence
  Description of Artificial Sequence: Synthetic oligonucleotide
cccacuugg

SEQ ID NO: 68953 - RNA, 2269 nt, Homo sapiens
uggguugguguuuaucuccucccagccuugagggagggaacaacacuguaggaucuggggagagaggaacaaaggaccgugaaagcugcucuguaaaagcugacacagcccucccaagugagcaggacuguucuucccacugcaaucugacaguuuacugcaugccuggagagaacacagcaguaaaaaccagguuugcuacuggaaaaagaggaaagagaagacuuucauugacggacccagccauggcagcguagcagcccugcguuucagacggcagcagcucgggacucuggacguguguuugcccucaaguuugcuaagcugcugguuuauuacugaagaaagaauguggcagauuguuuucuuuacucugagcugugaucuugucuuggccgcagccuauaacaacuuucggaagagcauggacagcauaggaaagaagcaauaucagguccagcauggguccugcagcuacacuuuccuccugccagagauggacaacugccgcucuuccuccagccccuacguguccaaugcugugcagagggacgcgccgcucgaauacgaugacucggugcagaggcugcaagugcuggagaacaucauggaaaacaacacucaguggcuaaugaagcuugagaauuauauccaggacaacaugaagaaagaaaugguagagauacagcagaaugcaguacagaaccagacggcugugaugauagaaauagggacaaaccuguugaaccaaacagcugagcaaacgcggaaguuaacugauguggaagcccaaguauuaaaucagaccacgagacuugaacuucagcucuuggaacacucccucucgacaaacaaauuggaaaaacagauuuuggaccagaccagugaaauaaacaaauugcaagauaagaacaguuuccuagaaaagaaggugcuagcuauggaagacaagcacaucauccaacuacagucaauaaaagaagagaaagaucagcuacagguguuaguauccaagcaaaauuccaucauugaagaacuagaaaaaaaaauagugacugccacggugaauaauucaguucuucaaaagcagcaacaugaucucauggagacaguuaauaacuuacugacuaugauguccacaucaaacucagcuaaggaccccacuguugcuaaagaagaacaaaucagcuucagagacugugcugaaguauucaaaucaggacacaccacaaauggcaucuacacguuaacauucccuaauucuacagaagagaucaaggccuacugugacauggaagcuggaggaggcggguggacaauuauucagcgacgugaggauggcagcguugauuuucagaggacuuggaaagaauauaaagugggauuugguaacccuucaggagaauauuggcugggaaaugaguuuguuucgcaacugacuaaucagcaacgcuaugugcuuaaaauacaccuuaaagacugggaagggaaugaggcuuacucauuguaugaacauuucuaucucucaagugaagaacucaauuauaggauucaccuuaaaggacuuacagggacagccggcaaaauaagcagcaucagccaaccaggaaaugauuuuagcacaaaggauggagacaacgacaaauguauuugcaaauguucacaaaugcuaacaggaggcuggugguuugaugcaugugguccuuccaacuugaacggaauguacuauccacagaggcagaacacaaauaaguucaacggcauuaaaugguacuacuggaaaggcucaggcuauucgcucaaggccacaaccaugaugauccgaccagcagauuucuaaacaucccaguccaccugaggaacugucucgaacuauuuucaaagacuuaagcccagugcacugaaagucacggcugcgcacuguguccucuuccaccacagagggcgugugcucggugcugacgggacccacaugcuccagauuagagccuguaaacuuuaucacuuaaacuugcaucacuuaacggaccaaagcaagacccuaaacauccauaauugugauuagacagaacaccuaugcaaagaugaacccgaggcugagaaucagacugacaguuuacagacgcugcugucacaaccaagaauguuaugugcaaguuuaucaguaaauaacuggaaaacagaacacuuauguuauacaauacagaucaucuuggaacugcauucuucugagcacuguuuauacacuguguaaauacccauauguccu

SEQ ID NO: 68954 - RNA, 19 nt, Artificial Sequence
  Description of Artificial Sequence: Synthetic oligonucleotide
uggguugguguuuaucucc

SEQ ID NO: 68955 - RNA, 19 nt, Artificial Sequence
  Description of Artificial Sequence: Synthetic oligonucleotide
cucccagccuugagggagg

SEQ ID NO: 68956 - RNA, 19 nt, Artificial Sequence
  Description of Artificial Sequence: Synthetic oligonucleotide
ggaacaacacuguaggauc

SEQ ID NO: 68957 - RNA, 19 nt, Artificial Sequence
  Description of Artificial Sequence: Synthetic oligonucleotide
cuggggagagaggaacaaa

SEQ ID NO: 68958 - RNA, 19 nt, Artificial Sequence
  Description of Artificial Sequence: Synthetic oligonucleotide
aggaccgugaaagcugcuc

SEQ ID NO: 68959 - RNA, 19 nt, Artificial Sequence
  Description of Artificial Sequence: Synthetic oligonucleotide
cuguaaaagcugacacagc

SEQ ID NO: 68960 - RNA, 19 nt, Artificial Sequence
  Description of Artificial Sequence: Synthetic oligonucleotide
cccucccaagugagcagga

SEQ ID NO: 68961 - RNA, 19 nt, Artificial Sequence
  Description of Artificial Sequence: Synthetic oligonucleotide
acuguucuucccacugcaa

SEQ ID NO: 68962 - RNA, 19 nt, Artificial Sequence
  Description of Artificial Sequence: Synthetic oligonucleotide
aucugacaguuuacugcau

SEQ ID NO: 68963 - RNA, 19 nt, Artificial Sequence
  Description of Artificial Sequence: Synthetic oligonucleotide
ugccuggagagaacacagc

SEQ ID NO: 68964 - RNA, 19 nt, Artificial Sequence
  Description of Artificial Sequence: Synthetic oligonucleotide
caguaaaaaccagguuugc

SEQ ID NO: 68965 - RNA, 19 nt, Artificial Sequence
  Description of Artificial Sequence: Synthetic oligonucleotide
cuacuggaaaaagaggaaa

SEQ ID NO: 68966 - RNA, 19 nt, Artificial Sequence
  Description of Artificial Sequence: Synthetic oligonucleotide
agagaagacuuucauugac

SEQ ID NO: 68967 - RNA, 19 nt, Artificial Sequence
  Description of Artificial Sequence: Synthetic oligonucleotide
cggacccagccauggcagc

SEQ ID NO: 68968 - RNA, 19 nt, Artificial Sequence
  Description of Artificial Sequence: Synthetic oligonucleotide
cguagcagcccugcguuuc

SEQ ID NO: 68969 - RNA, 19 nt, Artificial Sequence
  Description of Artificial Sequence: Synthetic oligonucleotide
cagacggcagcagcucggg

SEQ ID NO: 68970 - RNA, 19 nt, Artificial Sequence
  Description of Artificial Sequence: Synthetic oligonucleotide
gacucuggacguguguuug

SEQ ID NO: 68971 - RNA, 19 nt, Artificial Sequence
  Description of Artificial Sequence: Synthetic oligonucleotide
gcccucaaguuugcuaagc

SEQ ID NO: 68972 - RNA, 19 nt, Artificial Sequence
  Description of Artificial Sequence: Synthetic oligonucleotide
cugcugguuuauuacugaa

SEQ ID NO: 68973 - RNA, 19 nt, Artificial Sequence
  Description of Artificial Sequence: Synthetic oligonucleotide
agaaagaauguggcagauu

SEQ ID NO: 68974 - RNA, 19 nt, Artificial Sequence
  Description of Artificial Sequence: Synthetic oligonucleotide
uguuuucuuuacucugagc

SEQ ID NO: 68975 - RNA, 19 nt, Artificial Sequence
  Description of Artificial Sequence: Synthetic oligonucleotide
cugugaucuugucuuggcc

SEQ ID NO: 68976 - RNA, 19 nt, Artificial Sequence
  Description of Artificial Sequence: Synthetic oligonucleotide
cgcagccuauaacaacuuu

SEQ ID NO: 68977 - RNA, 19 nt, Artificial Sequence
  Description of Artificial Sequence: Synthetic oligonucleotide
ucggaagagcauggacagc

SEQ ID NO: 68978 - RNA, 19 nt, Artificial Sequence
  Description of Artificial Sequence: Synthetic oligonucleotide
cauaggaaagaagcaauau

SEQ ID NO: 68979 - RNA, 19 nt, Artificial Sequence
  Description of Artificial Sequence: Synthetic oligonucleotide
ucagguccagcaugggucc

SEQ ID NO: 68980 - RNA, 19 nt, Artificial Sequence
  Description of Artificial Sequence: Synthetic oligonucleotide
cugcagcuacacuuuccuc

SEQ ID NO: 68981 - RNA, 19 nt, Artificial Sequence
  Description of Artificial Sequence: Synthetic oligonucleotide
ccugccagagauggacaac

SEQ ID NO: 68982 - RNA, 19 nt, Artificial Sequence
  Description of Artificial Sequence: Synthetic oligonucleotide
cugccgcucuuccuccagc

SEQ ID NO: 68983 - RNA, 19 nt, Artificial Sequence
  Description of Artificial Sequence: Synthetic oligonucleotide
ccccuacguguccaaugcu

SEQ ID NO: 68984 - RNA, 19 nt, Artificial Sequence
  Description of Artificial Sequence: Synthetic oligonucleotide
ugugcagagggacgcgccg

SEQ ID NO: 68985 - RNA, 19 nt, Artificial Sequence
  Description of Artificial Sequence: Synthetic oligonucleotide
gcucgaauacgaugacucg

SEQ ID NO: 68986 - RNA, 19 nt, Artificial Sequence
  Description of Artificial Sequence: Synthetic oligonucleotide
ggugcagaggcugcaagug

SEQ ID NO: 68987 - RNA, 19 nt, Artificial Sequence
  Description of Artificial Sequence: Synthetic oligonucleotide
gcuggagaacaucauggaa

SEQ ID NO: 68988 - RNA, 19 nt, Artificial Sequence
  Description of Artificial Sequence: Synthetic oligonucleotide
aaacaacacucaguggcua

SEQ ID NO: 68989 - RNA, 19 nt, Artificial Sequence
  Description of Artificial Sequence: Synthetic oligonucleotide
aaugaagcuugagaauuau

SEQ ID NO: 68990 - RNA, 19 nt, Artificial Sequence
  Description of Artificial Sequence: Synthetic oligonucleotide
uauccaggacaacaugaag

SEQ ID NO: 68991 - RNA, 19 nt, Artificial Sequence
  Description of Artificial Sequence: Synthetic oligonucleotide
gaaagaaaugguagagaua

SEQ ID NO: 68992 - RNA, 19 nt, Artificial Sequence
  Description of Artificial Sequence: Synthetic oligonucleotide
acagcagaaugcaguacag

SEQ ID NO: 68993 - RNA, 19 nt, Artificial Sequence
  Description of Artificial Sequence: Synthetic oligonucleotide
gaaccagacggcugugaug

SEQ ID NO: 68994 - RNA, 19 nt, Artificial Sequence
  Description of Artificial Sequence: Synthetic oligonucleotide
gauagaaauagggacaaac

SEQ ID NO: 68995 - RNA, 19 nt, Artificial Sequence
  Description of Artificial Sequence: Synthetic oligonucleotide
ccuguugaaccaaacagcu

SEQ ID NO: 68996 - RNA, 19 nt, Artificial Sequence
  Description of Artificial Sequence: Synthetic oligonucleotide
ugagcaaacgcggaaguua

SEQ ID NO: 68997 - RNA, 19 nt, Artificial Sequence
  Description of Artificial Sequence: Synthetic oligonucleotide
aacugauguggaagcccaa

SEQ ID NO: 68998 - RNA, 19 nt, Artificial Sequence
  Description of Artificial Sequence: Synthetic oligonucleotide
aguauuaaaucagaccacg

SEQ ID NO: 68999 - RNA, 19 nt, Artificial Sequence
  Description of Artificial Sequence: Synthetic oligonucleotide
gagacuugaacuucagcuc

SEQ ID NO: 69000 - RNA, 19 nt, Artificial Sequence
  Description of Artificial Sequence: Synthetic oligonucleotide
cuuggaacacucccucucg

SEQ ID NO: 69001 - RNA, 19 nt, Artificial Sequence
  Description of Artificial Sequence: Synthetic oligonucleotide
gacaaacaaauuggaaaaa

SEQ ID NO: 69002 - RNA, 19 nt, Artificial Sequence
  Description of Artificial Sequence: Synthetic oligonucleotide
acagauuuuggaccagacc

SEQ ID NO: 69003 - RNA, 19 nt, Artificial Sequence
  Description of Artificial Sequence: Synthetic oligonucleotide
cagugaaauaaacaaauug

SEQ ID NO: 69004 - RNA, 19 nt, Artificial Sequence
  Description of Artificial Sequence: Synthetic oligonucleotide
gcaagauaagaacaguuuc

SEQ ID NO: 69005 - RNA, 19 nt, Artificial Sequence
  Description of Artificial Sequence: Synthetic oligonucleotide
ccuagaaaagaaggugcua

SEQ ID NO: 69006 - RNA, 19 nt, Artificial Sequence
  Description of Artificial Sequence: Synthetic oligonucleotide
agcuauggaagacaagcac

SEQ ID NO: 69007 - RNA, 19 nt, Artificial Sequence
  Description of Artificial Sequence: Synthetic oligonucleotide
caucauccaacuacaguca

SEQ ID NO: 69008 - RNA, 19 nt, Artificial Sequence
  Description of Artificial Sequence: Synthetic oligonucleotide
aauaaaagaagagaaagau

SEQ ID NO: 69009 - RNA, 19 nt, Artificial Sequence
  Description of Artificial Sequence: Synthetic oligonucleotide
ucagcuacagguguuagua

SEQ ID NO: 69010 - RNA, 19 nt, Artificial Sequence
  Description of Artificial Sequence: Synthetic oligonucleotide
auccaagcaaaauuccauc

SEQ ID NO: 69011 - RNA, 19 nt, Artificial Sequence
  Description of Artificial Sequence: Synthetic oligonucleotide
cauugaagaacuagaaaaa

SEQ ID NO: 69012 - RNA, 19 nt, Artificial Sequence
  Description of Artificial Sequence: Synthetic oligonucleotide
aaaaauagugacugccacg

SEQ ID NO: 69013 - RNA, 19 nt, Artificial Sequence
  Description of Artificial Sequence: Synthetic oligonucleotide
ggugaauaauucaguucuu

SEQ ID NO: 69014 - RNA, 19 nt, Artificial Sequence
  Description of Artificial Sequence: Synthetic oligonucleotide
ucaaaagcagcaacaugau

SEQ ID NO: 69015 - RNA, 19 nt, Artificial Sequence
  Description of Artificial Sequence: Synthetic oligonucleotide
ucucauggagacaguuaau

SEQ ID NO: 69016 - RNA, 19 nt, Artificial Sequence
  Description of Artificial Sequence: Synthetic oligonucleotide
uaacuuacugacuaugaug

SEQ ID NO: 69017 - RNA, 19 nt, Artificial Sequence
  Description of Artificial Sequence: Synthetic oligonucleotide
guccacaucaaacucagcu

SEQ ID NO: 69018 - RNA, 19 nt, Artificial Sequence
  Description of Artificial Sequence: Synthetic oligonucleotide
uaaggaccccacuguugcu

SEQ ID NO: 69019 - RNA, 19 nt, Artificial Sequence
  Description of Artificial Sequence: Synthetic oligonucleotide
uaaagaagaacaaaucagc

SEQ ID NO: 69020 - RNA, 19 nt, Artificial Sequence
  Description of Artificial Sequence: Synthetic oligonucleotide
cuucagagacugugcugaa

SEQ ID NO: 69021 - RNA, 19 nt, Artificial Sequence
  Description of Artificial Sequence: Synthetic oligonucleotide
aguauucaaaucaggacac

SEQ ID NO: 69022 - RNA, 19 nt, Artificial Sequence
  Description of Artificial Sequence: Synthetic oligonucleotide
caccacaaauggcaucuac

SEQ ID NO: 69023 - RNA, 19 nt, Artificial Sequence
  Description of Artificial Sequence: Synthetic oligonucleotide
cacguuaacauucccuaau

SEQ ID NO: 69024 - RNA, 19 nt, Artificial Sequence
  Description of Artificial Sequence: Synthetic oligonucleotide
uucuacagaagagaucaag

SEQ ID NO: 69025 - RNA, 19 nt, Artificial Sequence
  Description of Artificial Sequence: Synthetic oligonucleotide
ggccuacugugacauggaa

SEQ ID NO: 69026 - RNA, 19 nt, Artificial Sequence
  Description of Artificial Sequence: Synthetic oligonucleotide
agcuggaggaggcgggugg

SEQ ID NO: 69027 - RNA, 19 nt, Artificial Sequence
  Description of Artificial Sequence: Synthetic oligonucleotide
gacaauuauucagcgacgu

SEQ ID NO: 69028 - RNA, 19 nt, Artificial Sequence
  Description of Artificial Sequence: Synthetic oligonucleotide
ugaggauggcagcguugau

SEQ ID NO: 69029 - RNA, 19 nt, Artificial Sequence
  Description of Artificial Sequence: Synthetic oligonucleotide
uuuucagaggacuuggaaa

SEQ ID NO: 69030 - RNA, 19 nt, Artificial Sequence
  Description of Artificial Sequence: Synthetic oligonucleotide
agaauauaaagugggauuu

SEQ ID NO: 69031 - RNA, 19 nt, Artificial Sequence
  Description of Artificial Sequence: Synthetic oligonucleotide
ugguaacccuucaggagaa

SEQ ID NO: 69032 - RNA, 19 nt, Artificial Sequence
  Description of Artificial Sequence: Synthetic oligonucleotide
auauuggcugggaaaugag

SEQ ID NO: 69033 - RNA, 19 nt, Artificial Sequence
  Description of Artificial Sequence: Synthetic oligonucleotide
guuuguuucgcaacugacu

SEQ ID NO: 69034 - RNA, 19 nt, Artificial Sequence
  Description of Artificial Sequence: Synthetic oligonucleotide
uaaucagcaacgcuaugug

SEQ ID NO: 69035 - RNA, 19 nt, Artificial Sequence
  Description of Artificial Sequence: Synthetic oligonucleotide
gcuuaaaauacaccuuaaa

SEQ ID NO: 69036 - RNA, 19 nt, Artificial Sequence
  Description of Artificial Sequence: Synthetic oligonucleotide
agacugggaagggaaugag

SEQ ID NO: 69037 - RNA, 19 nt, Artificial Sequence
  Description of Artificial Sequence: Synthetic oligonucleotide
ggcuuacucauuguaugaa

SEQ ID NO: 69038 - RNA, 19 nt, Artificial Sequence
  Description of Artificial Sequence: Synthetic oligonucleotide
acauuucuaucucucaagu

SEQ ID NO: 69039 - RNA, 19 nt, Artificial Sequence
  Description of Artificial Sequence: Synthetic oligonucleotide
ugaagaacucaauuauagg

SEQ ID NO: 69040 - RNA, 19 nt, Artificial Sequence
  Description of Artificial Sequence: Synthetic oligonucleotide
gauucaccuuaaaggacuu

SEQ ID NO: 69041 - RNA, 19 nt, Artificial Sequence
  Description of Artificial Sequence: Synthetic oligonucleotide
uacagggacagccggcaaa

SEQ ID NO: 69042 - RNA, 19 nt, Artificial Sequence
  Description of Artificial Sequence: Synthetic oligonucleotide
aauaagcagcaucagccaa

SEQ ID NO: 69043 - RNA, 19 nt, Artificial Sequence
  Description of Artificial Sequence: Synthetic oligonucleotide
accaggaaaugauuuuagc

SEQ ID NO: 69044 - RNA, 19 nt, Artificial Sequence
  Description of Artificial Sequence: Synthetic oligonucleotide
cacaaaggauggagacaac

SEQ ID NO: 69045 - RNA, 19 nt, Artificial Sequence
  Description of Artificial Sequence: Synthetic oligonucleotide
cgacaaauguauuugcaaa

SEQ ID NO: 69046 - RNA, 19 nt, Artificial Sequence
  Description of Artificial Sequence: Synthetic oligonucleotide
auguucacaaaugcuaaca

SEQ ID NO: 69047 - RNA, 19 nt, Artificial Sequence
  Description of Artificial Sequence: Synthetic oligonucleotide
aggaggcuggugguuugau

SEQ ID NO: 69048 - RNA, 19 nt, Artificial Sequence
  Description of Artificial Sequence: Synthetic oligonucleotide
ugcaugugguccuuccaac

SEQ ID NO: 69049 - RNA, 19 nt, Artificial Sequence
  Description of Artificial Sequence: Synthetic oligonucleotide
cuugaacggaauguacuau

SEQ ID NO: 69050 - RNA, 19 nt, Artificial Sequence
  Description of Artificial Sequence: Synthetic oligonucleotide
uccacagaggcagaacaca

SEQ ID NO: 69051 - RNA, 19 nt, Artificial Sequence
  Description of Artificial Sequence: Synthetic oligonucleotide
aaauaaguucaacggcauu

SEQ ID NO: 69052 - RNA, 19 nt, Artificial Sequence
  Description of Artificial Sequence: Synthetic oligonucleotide
uaaaugguacuacuggaaa

SEQ ID NO: 69053 - RNA, 19 nt, Artificial Sequence
  Description of Artificial Sequence: Synthetic oligonucleotide
aggcucaggcuauucgcuc

SEQ ID NO: 69054 - RNA, 19 nt, Artificial Sequence
  Description of Artificial Sequence: Synthetic oligonucleotide
caaggccacaaccaugaug

SEQ ID NO: 69055 - RNA, 19 nt, Artificial Sequence
  Description of Artificial Sequence: Synthetic oligonucleotide
gauccgaccagcagauuuc

SEQ ID NO: 69056 - RNA, 19 nt, Artificial Sequence
  Description of Artificial Sequence: Synthetic oligonucleotide
cuaaacaucccaguccacc

SEQ ID NO: 69057 - RNA, 19 nt, Artificial Sequence
  Description of Artificial Sequence: Synthetic oligonucleotide
cugaggaacugucucgaac

SEQ ID NO: 69058 - RNA, 19 nt, Artificial Sequence
  Description of Artificial Sequence: Synthetic oligonucleotide
cuauuuucaaagacuuaag

SEQ ID NO: 69059 - RNA, 19 nt, Artificial Sequence
  Description of Artificial Sequence: Synthetic oligonucleotide
gcccagugcacugaaaguc

SEQ ID NO: 69060 - RNA, 19 nt, Artificial Sequence
  Description of Artificial Sequence: Synthetic oligonucleotide
cacggcugcgcacuguguc

SEQ ID NO: 69061 - RNA, 19 nt, Artificial Sequence
  Description of Artificial Sequence: Synthetic oligonucleotide
ccucuuccaccacagaggg

SEQ ID NO: 69062 - RNA, 19 nt, Artificial Sequence
  Description of Artificial Sequence: Synthetic oligonucleotide
gcgugugcucggugcugac

SEQ ID NO: 69063 - RNA, 19 nt, Artificial Sequence
  Description of Artificial Sequence: Synthetic oligonucleotide
cgggacccacaugcuccag

SEQ ID NO: 69064 - RNA, 19 nt, Artificial Sequence
  Description of Artificial Sequence: Synthetic oligonucleotide
gauuagagccuguaaacuu

SEQ ID NO: 69065 - RNA, 19 nt, Artificial Sequence
  Description of Artificial Sequence: Synthetic oligonucleotide
uuaucacuuaaacuugcau

SEQ ID NO: 69066 - RNA, 19 nt, Artificial Sequence
  Description of Artificial Sequence: Synthetic oligonucleotide
ucacuuaacggaccaaagc

SEQ ID NO: 69067 - RNA, 19 nt, Artificial Sequence
  Description of Artificial Sequence: Synthetic oligonucleotide
caagacccuaaacauccau

SEQ ID NO: 69068 - RNA, 19 nt, Artificial Sequence
  Description of Artificial Sequence: Synthetic oligonucleotide
uaauugugauuagacagaa

SEQ ID NO: 69069 - RNA, 19 nt, Artificial Sequence
  Description of Artificial Sequence: Synthetic oligonucleotide
acaccuaugcaaagaugaa

SEQ ID NO: 69070 - RNA, 19 nt, Artificial Sequence
  Description of Artificial Sequence: Synthetic oligonucleotide
acccgaggcugagaaucag

SEQ ID NO: 69071 - RNA, 19 nt, Artificial Sequence
  Description of Artificial Sequence: Synthetic oligonucleotide
gacugacaguuuacagacg

SEQ ID NO: 69072 - RNA, 19 nt, Artificial Sequence
  Description of Artificial Sequence: Synthetic oligonucleotide
gcugcugucacaaccaaga

SEQ ID NO: 69073 - RNA, 19 nt, Artificial Sequence
  Description of Artificial Sequence: Synthetic oligonucleotide
aauguuaugugcaaguuua

SEQ ID NO: 69074 - RNA, 19 nt, Artificial Sequence
  Description of Artificial Sequence: Synthetic oligonucleotide
aucaguaaauaacuggaaa

SEQ ID NO: 69075 - RNA, 19 nt, Artificial Sequence
  Description of Artificial Sequence: Synthetic oligonucleotide
aacagaacacuuauguuau

SEQ ID NO: 69076 - RNA, 19 nt, Artificial Sequence
  Description of Artificial Sequence: Synthetic oligonucleotide
uacaauacagaucaucuug

SEQ ID NO: 69077 - RNA, 19 nt, Artificial Sequence
  Description of Artificial Sequence: Synthetic oligonucleotide
ggaacugcauucuucugag

SEQ ID NO: 69078 - RNA, 19 nt, Artificial Sequence
  Description of Artificial Sequence: Synthetic oligonucleotide
gcacuguuuauacacugug

SEQ ID NO: 69079 - RNA, 19 nt, Artificial Sequence
  Description of Artificial Sequence: Synthetic oligonucleotide
guaaauacccauauguccu

SEQ ID NO: 69080 - RNA, 25 nt, Artificial Sequence
  Description of Artificial Sequence: Synthetic oligonucleotide
uggguugguguuuaucuccucccag

SEQ ID NO: 69081 - RNA, 25 nt, Artificial Sequence
  Description of Artificial Sequence: Synthetic oligonucleotide
gccuugagggagggaacaacacugu

SEQ ID NO: 69082 - RNA, 25 nt, Artificial Sequence
  Description of Artificial Sequence: Synthetic oligonucleotide
uaggaucuggggagagaggaacaaa

SEQ ID NO: 69083 - RNA, 25 nt, Artificial Sequence
  Description of Artificial Sequence: Synthetic oligonucleotide
aggaccgugaaagcugcucuguaaa

SEQ ID NO: 69084 - RNA, 25 nt, Artificial Sequence
  Description of Artificial Sequence: Synthetic oligonucleotide
aagcugacacagcccucccaaguga

SEQ ID NO: 69085 - RNA, 25 nt, Artificial Sequence
  Description of Artificial Sequence: Synthetic oligonucleotide
agcaggacuguucuucccacugcaa

SEQ ID NO: 69086 - RNA, 25 nt, Artificial Sequence
  Description of Artificial Sequence: Synthetic oligonucleotide
aucugacaguuuacugcaugccugg

SEQ ID NO: 69087 - RNA, 25 nt, Artificial Sequence
  Description of Artificial Sequence: Synthetic oligonucleotide
gagagaacacagcaguaaaaaccag

SEQ ID NO: 69088 - RNA, 25 nt, Artificial Sequence
  Description of Artificial Sequence: Synthetic oligonucleotide
gguuugcuacuggaaaaagaggaaa

SEQ ID NO: 69089 - RNA, 25 nt, Artificial Sequence
  Description of Artificial Sequence: Synthetic oligonucleotide
agagaagacuuucauugacggaccc

SEQ ID NO: 69090 - RNA, 25 nt, Artificial Sequence
  Description of Artificial Sequence: Synthetic oligonucleotide
cagccauggcagcguagcagcccug

SEQ ID NO: 69091 - RNA, 25 nt, Artificial Sequence
  Description of Artificial Sequence: Synthetic oligonucleotide
gcguuucagacggcagcagcucggg

SEQ ID NO: 69092 - RNA, 25 nt, Artificial Sequence
  Description of Artificial Sequence: Synthetic oligonucleotide
gacucuggacguguguuugcccuca

SEQ ID NO: 69093 - RNA, 25 nt, Artificial Sequence
  Description of Artificial Sequence: Synthetic oligonucleotide
aaguuugcuaagcugcugguuuauu

SEQ ID NO: 69094 - RNA, 25 nt, Artificial Sequence
  Description of Artificial Sequence: Synthetic oligonucleotide
uacugaagaaagaauguggcagauu

SEQ ID NO: 69095 - RNA, 25 nt, Artificial Sequence
  Description of Artificial Sequence: Synthetic oligonucleotide
uguuuucuuuacucugagcugugau

SEQ ID NO: 69096 - RNA, 25 nt, Artificial Sequence
  Description of Artificial Sequence: Synthetic oligonucleotide
ucuugucuuggccgcagccuauaac

SEQ ID NO: 69097 - RNA, 25 nt, Artificial Sequence
  Description of Artificial Sequence: Synthetic oligonucleotide
caacuuucggaagagcauggacagc

SEQ ID NO: 69098 - RNA, 25 nt, Artificial Sequence
  Description of Artificial Sequence: Synthetic oligonucleotide
cauaggaaagaagcaauaucagguc

SEQ ID NO: 69099 - RNA, 25 nt, Artificial Sequence
  Description of Artificial Sequence: Synthetic oligonucleotide
ccagcauggguccugcagcuacacu

SEQ ID NO: 69100 - RNA, 25 nt, Artificial Sequence
  Description of Artificial Sequence: Synthetic oligonucleotide
uuuccuccugccagagauggacaac

SEQ ID NO: 69101 - RNA, 25 nt, Artificial Sequence
  Description of Artificial Sequence: Synthetic oligonucleotide
cugccgcucuuccuccagccccuac

SEQ ID NO: 69102 - RNA, 25 nt, Artificial Sequence
  Description of Artificial Sequence: Synthetic oligonucleotide
cguguccaaugcugugcagagggac

SEQ ID NO: 69103 - RNA, 25 nt, Artificial Sequence
  Description of Artificial Sequence: Synthetic oligonucleotide
cgcgccgcucgaauacgaugacucg

SEQ ID NO: 69104 - RNA, 25 nt, Artificial Sequence
  Description of Artificial Sequence: Synthetic oligonucleotide
ggugcagaggcugcaagugcuggag

SEQ ID NO: 69105 - RNA, 25 nt, Artificial Sequence
  Description of Artificial Sequence: Synthetic oligonucleotide
gaacaucauggaaaacaacacucag

SEQ ID NO: 69106 - RNA, 25 nt, Artificial Sequence
  Description of Artificial Sequence: Synthetic oligonucleotide
guggcuaaugaagcuugagaauuau

SEQ ID NO: 69107 - RNA, 25 nt, Artificial Sequence
  Description of Artificial Sequence: Synthetic oligonucleotide
uauccaggacaacaugaagaaagaa

SEQ ID NO: 69108 - RNA, 25 nt, Artificial Sequence
  Description of Artificial Sequence: Synthetic oligonucleotide
aaugguagagauacagcagaaugca

SEQ ID NO: 69109 - RNA, 25 nt, Artificial Sequence
  Description of Artificial Sequence: Synthetic oligonucleotide
aguacagaaccagacggcugugaug

SEQ ID NO: 69110 - RNA, 25 nt, Artificial Sequence
  Description of Artificial Sequence: Synthetic oligonucleotide
gauagaaauagggacaaaccuguug

SEQ ID NO: 69111 - RNA, 25 nt, Artificial Sequence
  Description of Artificial Sequence: Synthetic oligonucleotide
gaaccaaacagcugagcaaacgcgg

SEQ ID NO: 69112 - RNA, 25 nt, Artificial Sequence
  Description of Artificial Sequence: Synthetic oligonucleotide
gaaguuaacugauguggaagcccaa

SEQ ID NO: 69113 - RNA, 25 nt, Artificial Sequence
  Description of Artificial Sequence: Synthetic oligonucleotide
aguauuaaaucagaccacgagacuu

SEQ ID NO: 69114 - RNA, 25 nt, Artificial Sequence
  Description of Artificial Sequence: Synthetic oligonucleotide
ugaacuucagcucuuggaacacucc

SEQ ID NO: 69115 - RNA, 25 nt, Artificial Sequence
  Description of Artificial Sequence: Synthetic oligonucleotide
ccucucgacaaacaaauuggaaaaa

SEQ ID NO: 69116 - RNA, 25 nt, Artificial Sequence
  Description of Artificial Sequence: Synthetic oligonucleotide
acagauuuuggaccagaccagugaa

SEQ ID NO: 69117 - RNA, 25 nt, Artificial Sequence
  Description of Artificial Sequence: Synthetic oligonucleotide
aauaaacaaauugcaagauaagaac

SEQ ID NO: 69118 - RNA, 25 nt, Artificial Sequence
  Description of Artificial Sequence: Synthetic oligonucleotide
caguuuccuagaaaagaaggugcua

SEQ ID NO: 69119 - RNA, 25 nt, Artificial Sequence
  Description of Artificial Sequence: Synthetic oligonucleotide
agcuauggaagacaagcacaucauc

SEQ ID NO: 69120 - RNA, 25 nt, Artificial Sequence
  Description of Artificial Sequence: Synthetic oligonucleotide
ccaacuacagucaauaaaagaagag

SEQ ID NO: 69121 - RNA, 25 nt, Artificial Sequence
  Description of Artificial Sequence: Synthetic oligonucleotide
gaaagaucagcuacagguguuagua

SEQ ID NO: 69122 - RNA, 25 nt, Artificial Sequence
  Description of Artificial Sequence: Synthetic oligonucleotide
auccaagcaaaauuccaucauugaa

SEQ ID NO: 69123 - RNA, 25 nt, Artificial Sequence
  Description of Artificial Sequence: Synthetic oligonucleotide
agaacuagaaaaaaaaauagugacu

SEQ ID NO: 69124 - RNA, 25 nt, Artificial Sequence
  Description of Artificial Sequence: Synthetic oligonucleotide
ugccacggugaauaauucaguucuu

SEQ ID NO: 69125 - RNA, 25 nt, Artificial Sequence
  Description of Artificial Sequence: Synthetic oligonucleotide
ucaaaagcagcaacaugaucucaug

SEQ ID NO: 69126 - RNA, 25 nt, Artificial Sequence
  Description of Artificial Sequence: Synthetic oligonucleotide
ggagacaguuaauaacuuacugacu

SEQ ID NO: 69127 - RNA, 25 nt, Artificial Sequence
  Description of Artificial Sequence: Synthetic oligonucleotide
uaugauguccacaucaaacucagcu

SEQ ID NO: 69128 - RNA, 25 nt, Artificial Sequence
  Description of Artificial Sequence: Synthetic oligonucleotide
uaaggaccccacuguugcuaaagaa

SEQ ID NO: 69129 - RNA, 25 nt, Artificial Sequence
  Description of Artificial Sequence: Synthetic oligonucleotide
agaacaaaucagcuucagagacugu

SEQ ID NO: 69130 - RNA, 25 nt, Artificial Sequence
  Description of Artificial Sequence: Synthetic oligonucleotide
ugcugaaguauucaaaucaggacac

SEQ ID NO: 69131 - RNA, 25 nt, Artificial Sequence
  Description of Artificial Sequence: Synthetic oligonucleotide
caccacaaauggcaucuacacguua

SEQ ID NO: 69132 - RNA, 25 nt, Artificial Sequence
  Description of Artificial Sequence: Synthetic oligonucleotide
aacauucccuaauucuacagaagag

SEQ ID NO: 69133 - RNA, 25 nt, Artificial Sequence
  Description of Artificial Sequence: Synthetic oligonucleotide
gaucaaggccuacugugacauggaa

SEQ ID NO: 69134 - RNA, 25 nt, Artificial Sequence
  Description of Artificial Sequence: Synthetic oligonucleotide
agcuggaggaggcggguggacaauu

SEQ ID NO: 69135 - RNA, 25 nt, Artificial Sequence
  Description of Artificial Sequence: Synthetic oligonucleotide
uauucagcgacgugaggauggcagc

SEQ ID NO: 69136 - RNA, 25 nt, Artificial Sequence
  Description of Artificial Sequence: Synthetic oligonucleotide
cguugauuuucagaggacuuggaaa

SEQ ID NO: 69137 - RNA, 25 nt, Artificial Sequence
  Description of Artificial Sequence: Synthetic oligonucleotide
agaauauaaagugggauuugguaac

SEQ ID NO: 69138 - RNA, 25 nt, Artificial Sequence
  Description of Artificial Sequence: Synthetic oligonucleotide
cccuucaggagaauauuggcuggga

SEQ ID NO: 69139 - RNA, 25 nt, Artificial Sequence
  Description of Artificial Sequence: Synthetic oligonucleotide
aaaugaguuuguuucgcaacugacu

SEQ ID NO: 69140 - RNA, 25 nt, Artificial Sequence
  Description of Artificial Sequence: Synthetic oligonucleotide
uaaucagcaacgcuaugugcuuaaa

SEQ ID NO: 69141 - RNA, 25 nt, Artificial Sequence
  Description of Artificial Sequence: Synthetic oligonucleotide
aauacaccuuaaagacugggaaggg

SEQ ID NO: 69142 - RNA, 25 nt, Artificial Sequence
  Description of Artificial Sequence: Synthetic oligonucleotide
gaaugaggcuuacucauuguaugaa

SEQ ID NO: 69143 - RNA, 25 nt, Artificial Sequence
  Description of Artificial Sequence: Synthetic oligonucleotide
acauuucuaucucucaagugaagaa

SEQ ID NO: 69144 - RNA, 25 nt, Artificial Sequence
  Description of Artificial Sequence: Synthetic oligonucleotide
acucaauuauaggauucaccuuaaa

SEQ ID NO: 69145 - RNA, 25 nt, Artificial Sequence
  Description of Artificial Sequence: Synthetic oligonucleotide
aggacuuacagggacagccggcaaa

SEQ ID NO: 69146 - RNA, 25 nt, Artificial Sequence
  Description of Artificial Sequence: Synthetic oligonucleotide
aauaagcagcaucagccaaccagga

SEQ ID NO: 69147 - RNA, 25 nt, Artificial Sequence
  Description of Artificial Sequence: Synthetic oligonucleotide
aaaugauuuuagcacaaaggaugga

SEQ ID NO: 69148 - RNA, 25 nt, Artificial Sequence
  Description of Artificial Sequence: Synthetic oligonucleotide
agacaacgacaaauguauuugcaaa

SEQ ID NO: 69149 - RNA, 25 nt, Artificial Sequence
  Description of Artificial Sequence: Synthetic oligonucleotide
auguucacaaaugcuaacaggaggc

SEQ ID NO: 69150 - RNA, 25 nt, Artificial Sequence
  Description of Artificial Sequence: Synthetic oligonucleotide
cuggugguuugaugcaugugguccu

SEQ ID NO: 69151 - RNA, 25 nt, Artificial Sequence
  Description of Artificial Sequence: Synthetic oligonucleotide
uuccaacuugaacggaauguacuau

SEQ ID NO: 69152 - RNA, 25 nt, Artificial Sequence
  Description of Artificial Sequence: Synthetic oligonucleotide
uccacagaggcagaacacaaauaag

SEQ ID NO: 69153 - RNA, 25 nt, Artificial Sequence
  Description of Artificial Sequence: Synthetic oligonucleotide
guucaacggcauuaaaugguacuac

SEQ ID NO: 69154 - RNA, 25 nt, Artificial Sequence
  Description of Artificial Sequence: Synthetic oligonucleotide
cuggaaaggcucaggcuauucgcuc

SEQ ID NO: 69155 - RNA, 25 nt, Artificial Sequence
  Description of Artificial Sequence: Synthetic oligonucleotide
caaggccacaaccaugaugauccga

SEQ ID NO: 69156 - RNA, 25 nt, Artificial Sequence
  Description of Artificial Sequence: Synthetic oligonucleotide
accagcagauuucuaaacaucccag

SEQ ID NO: 69157 - RNA, 25 nt, Artificial Sequence
  Description of Artificial Sequence: Synthetic oligonucleotide
guccaccugaggaacugucucgaac

SEQ ID NO: 69158 - RNA, 25 nt, Artificial Sequence
  Description of Artificial Sequence: Synthetic oligonucleotide
cuauuuucaaagacuuaagcccagu

SEQ ID NO: 69159 - RNA, 25 nt, Artificial Sequence
  Description of Artificial Sequence: Synthetic oligonucleotide
ugcacugaaagucacggcugcgcac

SEQ ID NO: 69160 - RNA, 25 nt, Artificial Sequence
  Description of Artificial Sequence: Synthetic oligonucleotide
cuguguccucuuccaccacagaggg

SEQ ID NO: 69161 - RNA, 25 nt, Artificial Sequence
  Description of Artificial Sequence: Synthetic oligonucleotide
gcgugugcucggugcugacgggacc

SEQ ID NO: 69162 - RNA, 25 nt, Artificial Sequence
  Description of Artificial Sequence: Synthetic oligonucleotide
ccacaugcuccagauuagagccugu

SEQ ID NO: 69163 - RNA, 25 nt, Artificial Sequence
  Description of Artificial Sequence: Synthetic oligonucleotide
uaaacuuuaucacuuaaacuugcau

SEQ ID NO: 69164 - RNA, 25 nt, Artificial Sequence
  Description of Artificial Sequence: Synthetic oligonucleotide
ucacuuaacggaccaaagcaagacc

SEQ ID NO: 69165 - RNA, 25 nt, Artificial Sequence
  Description of Artificial Sequence: Synthetic oligonucleotide
ccuaaacauccauaauugugauuag

SEQ ID NO: 69166 - RNA, 25 nt, Artificial Sequence
  Description of Artificial Sequence: Synthetic oligonucleotide
gacagaacaccuaugcaaagaugaa

SEQ ID NO: 69167 - RNA, 25 nt, Artificial Sequence
  Description of Artificial Sequence: Synthetic oligonucleotide
acccgaggcugagaaucagacugac

SEQ ID NO: 69168 - RNA, 25 nt, Artificial Sequence
  Description of Artificial Sequence: Synthetic oligonucleotide
caguuuacagacgcugcugucacaa

SEQ ID NO: 69169 - RNA, 25 nt, Artificial Sequence
  Description of Artificial Sequence: Synthetic oligonucleotide
accaagaauguuaugugcaaguuua

SEQ ID NO: 69170 - RNA, 25 nt, Artificial Sequence
  Description of Artificial Sequence: Synthetic oligonucleotide
aucaguaaauaacuggaaaacagaa

SEQ ID NO: 69171 - RNA, 25 nt, Artificial Sequence
  Description of Artificial Sequence: Synthetic oligonucleotide
acacuuauguuauacaauacagauc

SEQ ID NO: 69172 - RNA, 25 nt, Artificial Sequence
  Description of Artificial Sequence: Synthetic oligonucleotide
caucuuggaacugcauucuucugag

SEQ ID NO: 69173 - RNA, 25 nt, Artificial Sequence
  Description of Artificial Sequence: Synthetic oligonucleotide
gcacuguuuauacacuguguaaaua

SEQ ID NO: 69174 - RNA, 25 nt, Artificial Sequence
  Description of Artificial Sequence: Synthetic oligonucleotide
cacuguguaaauacccauauguccu

SEQ ID NO: 69175 - DNA, 21 bp, Artificial Sequence
  Description of Artificial Sequence: Synthetic oligonucleotide
  Description of Combined DNA/RNA Molecule: Synthetic oligonucleotide
cuacacaaaucagcgauuutt

SEQ ID NO: 69176 - DNA, 21 bp, Artificial Sequence
  Description of Artificial Sequence: Synthetic oligonucleotide
  Description of Combined DNA/RNA Molecule: Synthetic oligonucleotide
aaaucgcugauuuguguagtt

SEQ ID NO: 69177 - DNA, 25 bp, Artificial Sequence
  Description of Artificial Sequence: Synthetic oligonucleotide
  Description of Combined DNA/RNA Molecule: Synthetic oligonucleotide
cuacacaaaucagcgauuuccaugt

SEQ ID NO: 69178 - RNA, 27 nt, Artificial Sequence
  Description of Artificial Sequence: Synthetic oligonucleotide
acauggaaaucgcugauuuguguaguc

SEQ ID NO: 69179 - RNA, 13 nt, Artificial Sequence
  Description of Artificial Sequence: Synthetic oligonucleotide
cuacacaaaucag

SEQ ID NO: 69180 - DNA, 11 bp, Artificial Sequence
  Description of Artificial Sequence: Synthetic oligonucleotide
  Description of Combined DNA/RNA Molecule: Synthetic oligonucleotide
gauuuccaugt

SEQ ID NO: 69181 - DNA, 21 bp, Artificial Sequence
  Description of Artificial Sequence: Synthetic oligonucleotide
  Description of Combined DNA/RNA Molecule: Synthetic oligonucleotide
ggaucuuauuucuucggagtt

SEQ ID NO: 69182 - DNA, 21 bp, Artificial Sequence
  Description of Artificial Sequence: Synthetic oligonucleotide
  Description of Combined DNA/RNA Molecule: Synthetic oligonucleotide
cuccgaagaaauaagaucctt

SEQ ID NO: 69183 - RNA, 11 nt, Artificial Sequence
  Description of Artificial Sequence: Synthetic oligonucleotide
ggaucuuauuu

SEQ ID NO: 69184 - DNA, 10 bp, Artificial Sequence
  Description of Artificial Sequence: Synthetic oligonucleotide
  Description of Combined DNA/RNA Molecule: Synthetic oligonucleotide
cuucggagtt

SEQ ID NO: 69185 - RNA, 27 nt, Artificial Sequence
  Description of Artificial Sequence: Synthetic oligonucleotide
cauugucuccgaagaaauaagauccuu

SEQ ID NO: 69186 - RNA, 8 nt, Artificial Sequence
  Description of Artificial Sequence: Synthetic oligonucleotide
  modified_base (2): LNA-G
ggaucuua

SEQ ID NO: 69187 - DNA, 17 bp, Artificial Sequence
  Description of Artificial Sequence: Synthetic oligonucleotide
  Description of Combined DNA/RNA Molecule: Synthetic oligonucleotide
uuucuucggagacaatg

SEQ ID NO: 69188 - DNA, 16 bp, Artificial Sequence
  Description of Artificial Sequence: Synthetic oligonucleotide
  Description of Combined DNA/RNA Molecule: Synthetic oligonucleotide
uucuucggagacaatg

SEQ ID NO: 69189 - DNA, 15 bp, Artificial Sequence
  Description of Artificial Sequence: Synthetic oligonucleotide
  Description of Combined DNA/RNA Molecule: Synthetic oligonucleotide
ucuucggagacaatg

SEQ ID NO: 69190 - DNA, 14 bp, Artificial Sequence
  Description of Artificial Sequence: Synthetic oligonucleotide
  Description of Combined DNA/RNA Molecule: Synthetic oligonucleotide
cuucggagacaatg

SEQ ID NO: 69191 - DNA, 13 bp, Artificial Sequence
  Description of Artificial Sequence: Synthetic oligonucleotide
  Description of Combined DNA/RNA Molecule: Synthetic oligonucleotide
uucggagacaatg

SEQ ID NO: 69192 - DNA, 12 bp, Artificial Sequence
  Description of Artificial Sequence: Synthetic oligonucleotide
  Description of Combined DNA/RNA Molecule: Synthetic oligonucleotide
ucggagacaatg

SEQ ID NO: 69193 - DNA, 11 bp, Artificial Sequence
  Description of Artificial Sequence: Synthetic oligonucleotide
  Description of Combined DNA/RNA Molecule: Synthetic oligonucleotide
cggagacaatg

SEQ ID NO: 69194 - RNA, 9 nt, Artificial Sequence
  Description of Artificial Sequence: Synthetic oligonucleotide
  modified_base (2): LNA-G
ggaucuuau

SEQ ID NO: 69195 - RNA, 10 nt, Artificial Sequence
  Description of Artificial Sequence: Synthetic oligonucleotide
  modified_base (2): LNA-G
ggaucuuauu

SEQ ID NO: 69196 - RNA, 11 nt, Artificial Sequence
  Description of Artificial Sequence: Synthetic oligonucleotide
  modified_base (2): LNA-G
ggaucuuauuu

SEQ ID NO: 69197 - RNA, 12 nt, Artificial Sequence
  Description of Artificial Sequence: Synthetic oligonucleotide
  modified_base (2): LNA-G
ggaucuuauuuc

SEQ ID NO: 69198 - RNA, 8 nt, Artificial Sequence
  Description of Artificial Sequence: Synthetic oligonucleotide
  modified_base (3): LNA-A
cuacacaa

SEQ ID NO: 69199 - DNA, 13 bp, Artificial Sequence
  Description of Artificial Sequence: Synthetic oligonucleotide
  Description of Combined DNA/RNA Molecule: Synthetic oligonucleotide
  modified_base (8): LNA-A
aucagcgauuutt

SEQ ID NO: 69200 - DNA, 12 bp, Artificial Sequence
  Description of Artificial Sequence: Synthetic oligonucleotide
  Description of Combined DNA/RNA Molecule: Synthetic oligonucleotide
  modified_base (7): LNA-A
ucagcgauuutt

SEQ ID NO: 69201 - DNA, 11 bp, Artificial Sequence
  Description of Artificial Sequence: Synthetic oligonucleotide
  Description of Combined DNA/RNA Molecule: Synthetic oligonucleotide
  modified_base (6): LNA-A
cagcgauuutt

SEQ ID NO: 69202 - DNA, 10 bp, Artificial Sequence
  Description of Artificial Sequence: Synthetic oligonucleotide
  Description of Combined DNA/RNA Molecule: Synthetic oligonucleotide
  modified_base (5): LNA-A
agcgauuutt

SEQ ID NO: 69203 - DNA, 9 bp, Artificial Sequence
  Description of Artificial Sequence: Synthetic oligonucleotide
  Description of Combined DNA/RNA Molecule: Synthetic oligonucleotide
  modified_base (4): LNA-A
gcgauuutt

SEQ ID NO: 69204 - DNA, 8 bp, Artificial Sequence
  Description of Artificial Sequence: Synthetic oligonucleotide
  Description of Combined DNA/RNA Molecule: Synthetic oligonucleotide
  modified_base (3): LNA-A
cgauuutt

SEQ ID NO: 69205 - DNA, 7 bp, Artificial Sequence
  Description of Artificial Sequence: Synthetic oligonucleotide
  Description of Combined DNA/RNA Molecule: Synthetic oligonucleotide
  modified_base (2): LNA-A
gauuutt

SEQ ID NO: 69206 - RNA, 9 nt, Artificial Sequence
  Description of Artificial Sequence: Synthetic oligonucleotide
  modified_base (3): LNA-A
cuacacaaa

SEQ ID NO: 69207 - RNA, 10 nt, Artificial Sequence
  Description of Artificial Sequence: Synthetic oligonucleotide
  modified_base (3): LNA-A
cuacacaaau

SEQ ID NO: 69208 - RNA, 11 nt, Artificial Sequence
  Description of Artificial Sequence: Synthetic oligonucleotide
  modified_base (3): LNA-A
cuacacaaauc

SEQ ID NO: 69209 - RNA, 12 nt, Artificial Sequence
  Description of Artificial Sequence: Synthetic oligonucleotide
  modified_base (3): LNA-A
cuacacaaauca

SEQ ID NO: 69210 - RNA, 13 nt, Artificial Sequence
  Description of Artificial Sequence: Synthetic oligonucleotide
  modified_base (3): LNA-A
cuacacaaaucag

SEQ ID NO: 69211 - RNA, 14 nt, Artificial Sequence
  Description of Artificial Sequence: Synthetic oligonucleotide
  modified_base (3): LNA-A
cuacacaaaucagc

SEQ ID NO: 69212 - RNA, 13 nt, Artificial Sequence
  Description of Artificial Sequence: Synthetic oligonucleotide
  modified_base (2): LNA-G
ggaucuuauuucu

SEQ ID NO: 69213 - RNA, 14 nt, Artificial Sequence
  Description of Artificial Sequence: Synthetic oligonucleotide
  modified_base (2): LNA-G
ggaucuuauuucuu

SEQ ID NO: 69214 - RNA, 8 nt, Artificial Sequence
  Description of Artificial Sequence: Synthetic oligonucleotide
  modified_base (2): LNA-G
  modified_base (8): LNA-A
ggaucuua

SEQ ID NO: 69215 - RNA, 9 nt, Artificial Sequence
  Description of Artificial Sequence: Synthetic oligonucleotide
  modified_base (2): LNA-G
  modified_base (9): LNA-U
ggaucuuau

SEQ ID NO: 69216 - RNA, 10 nt, Artificial Sequence
  Description of Artificial Sequence: Synthetic oligonucleotide
  modified_base (2): LNA-G
  modified_base (10): LNA-U
ggaucuuauu

SEQ ID NO: 69217 - RNA, 11 nt, Artificial Sequence
  Description of Artificial Sequence: Synthetic oligonucleotide
  modified_base (2): LNA-G
  modified_base (11): LNA-U
ggaucuuauuu

SEQ ID NO: 69218 - RNA, 12 nt, Artificial Sequence
  Description of Artificial Sequence: Synthetic oligonucleotide
  modified_base (2): LNA-G
  modified_base (12): LNA-C
ggaucuuauuuc

SEQ ID NO: 69219 - RNA, 13 nt, Artificial Sequence
  Description of Artificial Sequence: Synthetic oligonucleotide
  modified_base (2): LNA-G
  modified_base (13): LNA-U
ggaucuuauuucu

SEQ ID NO: 69220 - RNA, 14 nt, Artificial Sequence
  Description of Artificial Sequence: Synthetic oligonucleotide
  modified_base (2): LNA-G
  modified_base (14): LNA-U
ggaucuuauuucuu

SEQ ID NO: 69221 - DNA, 13 bp, Artificial Sequence
  Description of Artificial Sequence: Synthetic oligonucleotide
  Description of Combined DNA/RNA Molecule: Synthetic oligonucleotide
  modified_base (8): LNA-G
uuucuucggagtt

SEQ ID NO: 69222 - DNA, 12 bp, Artificial Sequence
  Description of Artificial Sequence: Synthetic oligonucleotide
  Description of Combined DNA/RNA Molecule: Synthetic oligonucleotide
  modified_base (7): LNA-G
uucuucggagtt

SEQ ID NO: 69223 - DNA, 11 bp, Artificial Sequence
  Description of Artificial Sequence: Synthetic oligonucleotide
  Description of Combined DNA/RNA Molecule: Synthetic oligonucleotide
  modified_base (6): LNA-G
ucuucggagtt

SEQ ID NO: 69224 - DNA, 10 bp, Artificial Sequence
  Description of Artificial Sequence: Synthetic oligonucleotide
  Description of Combined DNA/RNA Molecule: Synthetic oligonucleotide
  modified_base (5): LNA-G
cuucggagtt

SEQ ID NO: 69225 - DNA, 9 bp, Artificial Sequence
  Description of Artificial Sequence: Synthetic oligonucleotide
  Description of Combined DNA/RNA Molecule: Synthetic oligonucleotide
  modified_base (4): LNA-G
uucggagtt

SEQ ID NO: 69226 - DNA, 8 bp, Artificial Sequence
  Description of Artificial Sequence: Synthetic oligonucleotide
  Description of Combined DNA/RNA Molecule: Synthetic oligonucleotide
  modified_base (3): LNA-G
ucggagtt

SEQ ID NO: 69227 - DNA, 7 bp, Artificial Sequence
  Description of Artificial Sequence: Synthetic oligonucleotide
  Description of Combined DNA/RNA Molecule: Synthetic oligonucleotide
  modified_base (2): LNA-G
cggagtt

SEQ ID NO: 69228 - DNA, 13 bp, Artificial Sequence
  Description of Artificial Sequence: Synthetic oligonucleotide
  Description of Combined DNA/RNA Molecule: Synthetic oligonucleotide
  modified_base (1): LNA-U
  modified_base (8): LNA-G
uuucuucggagtt

SEQ ID NO: 69229 - DNA, 12 bp, Artificial Sequence
  Description of Artificial Sequence: Synthetic oligonucleotide
  Description of Combined DNA/RNA Molecule: Synthetic oligonucleotide
  modified_base (1): LNA-U
  modified_base (7): LNA-G
uucuucggagtt

SEQ ID NO: 69230 - DNA, 11 bp, Artificial Sequence
  Description of Artificial Sequence: Synthetic oligonucleotide
  Description of Combined DNA/RNA Molecule: Synthetic oligonucleotide
  modified_base (1): LNA-U
  modified_base (6): LNA-G
ucuucggagtt

SEQ ID NO: 69231 - DNA, 10 bp, Artificial Sequence
  Description of Artificial Sequence: Synthetic oligonucleotide
  Description of Combined DNA/RNA Molecule: Synthetic oligonucleotide
  modified_base (1): LNA-C
  modified_base (5): LNA-G
cuucggagtt

SEQ ID NO: 69232 - DNA, 9 bp, Artificial Sequence
  Description of Artificial Sequence: Synthetic oligonucleotide
  Description of Combined DNA/RNA Molecule: Synthetic oligonucleotide
  modified_base (1): LNA-U
  modified_base (4): LNA-G
uucggagtt

SEQ ID NO: 69233 - DNA, 8 bp, Artificial Sequence
  Description of Artificial Sequence: Synthetic oligonucleotide
  Description of Combined DNA/RNA Molecule: Synthetic oligonucleotide
  modified_base (1): LNA-U
  modified_base (3): LNA-G
ucggagtt

SEQ ID NO: 69234 - DNA, 7 bp, Artificial Sequence
  Description of Artificial Sequence: Synthetic oligonucleotide
  Description of Combined DNA/RNA Molecule: Synthetic oligonucleotide
  modified_base (1): LNA-C
  modified_base (2): LNA-G
cggagtt

SEQ ID NO: 69235 - DNA, 21 bp, Artificial Sequence
  Description of Artificial Sequence: Synthetic oligonucleotide
  Description of Combined DNA/RNA Molecule: Synthetic oligonucleotide
  modified_base (2): LNA-G
  modified_base (16): LNA-G
ggaucuuauuucuucggagtt

SEQ ID NO: 69236 - DNA, 25 bp, Artificial Sequence
  Description of Artificial Sequence: Synthetic oligonucleotide
  Description of Combined DNA/RNA Molecule: Synthetic oligonucleotide
ggaucuuauuucuucggagacaatg

SEQ ID NO: 69237 - RNA, 25 nt, Artificial Sequence
  Description of Artificial Sequence: Synthetic oligonucleotide
uuaagcagaguucaaaagcccuuca

SEQ ID NO: 69238 - RNA, 25 nt, Artificial Sequence
  Description of Artificial Sequence: Synthetic oligonucleotide
uaagcagaguucaaaagcccuucag

SEQ ID NO: 69239 - RNA, 25 nt, Artificial Sequence
  Description of Artificial Sequence: Synthetic oligonucleotide
agcagaguucaaaagcccuucagcg

SEQ ID NO: 69240 - RNA, 25 nt, Artificial Sequence
  Description of Artificial Sequence: Synthetic oligonucleotide
cucagggucugagugaagccgcucg

SEQ ID NO: 69241 - RNA, 25 nt, Artificial Sequence
  Description of Artificial Sequence: Synthetic oligonucleotide
caagcaacuacaucacgccagucaa

SEQ ID NO: 69242 - RNA, 25 nt, Artificial Sequence
  Description of Artificial Sequence: Synthetic oligonucleotide
aucaauggcagcuucuuggugcgug

SEQ ID NO: 69243 - RNA, 25 nt, Artificial Sequence
  Description of Artificial Sequence: Synthetic oligonucleotide
uuccagcccacauuggauucaucag

SEQ ID NO: 69244 - RNA, 25 nt, Artificial Sequence
  Description of Artificial Sequence: Synthetic oligonucleotide
cagcugagaauguggaauaccuaag

SEQ ID NO: 69245 - RNA, 25 nt, Artificial Sequence
  Description of Artificial Sequence: Synthetic oligonucleotide
aacguaucuccuaauuugaggcuca

SEQ ID NO: 69246 - RNA, 25 nt, Artificial Sequence
  Description of Artificial Sequence: Synthetic oligonucleotide
ccuaaaauaauuucucuacaauugg

SEQ ID NO: 69247 - RNA, 25 nt, Artificial Sequence
  Description of Artificial Sequence: Synthetic oligonucleotide
uggaagauucagcuaguuaggagcc

SEQ ID NO: 69248 - RNA, 25 nt, Artificial Sequence
  Description of Artificial Sequence: Synthetic oligonucleotide
uuaaacucuccuagucaauauccac

SEQ ID NO: 69249 - RNA, 25 nt, Artificial Sequence
  Description of Artificial Sequence: Synthetic oligonucleotide
cagccuacaguuauguucagucaca

SEQ ID NO: 69250 - RNA, 25 nt, Artificial Sequence
  Description of Artificial Sequence: Synthetic oligonucleotide
guuauguucagucacacacacauac

SEQ ID NO: 69251 - RNA, 25 nt, Artificial Sequence
  Description of Artificial Sequence: Synthetic oligonucleotide
cacauacaaaauguuccuuuugcuu

SEQ ID NO: 69252 - RNA, 25 nt, Artificial Sequence
  Description of Artificial Sequence: Synthetic oligonucleotide
uccuuuugcuuuuaaaguaauuuuu

SEQ ID NO: 69253 - RNA, 25 nt, Artificial Sequence
  Description of Artificial Sequence: Synthetic oligonucleotide
ugaccugugaagcaacagucaaugg

SEQ ID NO: 69254 - RNA, 25 nt, Artificial Sequence
  Description of Artificial Sequence: Synthetic oligonucleotide
cuaucucacacaucgacaaaccaau

SEQ ID NO: 69255 - RNA, 25 nt, Artificial Sequence
  Description of Artificial Sequence: Synthetic oligonucleotide
uguccucaauuguacugcuaccacu

SEQ ID NO: 69256 - RNA, 25 nt, Artificial Sequence
  Description of Artificial Sequence: Synthetic oligonucleotide
aaaccguagcuggcaagcggucuua

SEQ ID NO: 69257 - RNA, 25 nt, Artificial Sequence
  Description of Artificial Sequence: Synthetic oligonucleotide
uagcuggcaagcggucuuaccggcu

SEQ ID NO: 69258 - RNA, 25 nt, Artificial Sequence
  Description of Artificial Sequence: Synthetic oligonucleotide
uuguaugguuaaaagauggguuacc

SEQ ID NO: 69259 - RNA, 25 nt, Artificial Sequence
  Description of Artificial Sequence: Synthetic oligonucleotide
ugguuaaaagauggguuaccugcga

SEQ ID NO: 69260 - RNA, 25 nt, Artificial Sequence
  Description of Artificial Sequence: Synthetic oligonucleotide
cagggaauuauacaaucuugcugag

SEQ ID NO: 69261 - RNA, 25 nt, Artificial Sequence
  Description of Artificial Sequence: Synthetic oligonucleotide
acaaucuugcugagcauaaaacagu

SEQ ID NO: 69262 - RNA, 25 nt, Artificial Sequence
  Description of Artificial Sequence: Synthetic oligonucleotide
ccaauaaugaagaguccuuuauccu

SEQ ID NO: 69263 - RNA, 25 nt, Artificial Sequence
  Description of Artificial Sequence: Synthetic oligonucleotide
acuuuggauguuccaacgcaaguug

SEQ ID NO: 69264 - RNA, 25 nt, Artificial Sequence
  Description of Artificial Sequence: Synthetic oligonucleotide
aaugcuuccacuaaacugaaaccau

SEQ ID NO: 69265 - RNA, 25 nt, Artificial Sequence
  Description of Artificial Sequence: Synthetic oligonucleotide
gagaaaguuugacuuuguuaaauau

SEQ ID NO: 69266 - RNA, 25 nt, Artificial Sequence
  Description of Artificial Sequence: Synthetic oligonucleotide
aaagaacuacuguauauuaaaaguu

SEQ ID NO: 69267 - RNA, 25 nt, Artificial Sequence
  Description of Artificial Sequence: Synthetic oligonucleotide
uuagaaauacggguuuugacuuaac

SEQ ID NO: 69268 - RNA, 25 nt, Artificial Sequence
  Description of Artificial Sequence: Synthetic oligonucleotide
aacauggguacagcaaacucagcac

SEQ ID NO: 69269 - RNA, 25 nt, Artificial Sequence
  Description of Artificial Sequence: Synthetic oligonucleotide
aaagacacagaagaugcugaccuca

SEQ ID NO: 69270 - RNA, 25 nt, Artificial Sequence
  Description of Artificial Sequence: Synthetic oligonucleotide
uaguagggagguuuauucagaucgc

SEQ ID NO: 69271 - RNA, 25 nt, Artificial Sequence
  Description of Artificial Sequence: Synthetic oligonucleotide
gccuucugcagcaggguucugggau

SEQ ID NO: 69272 - RNA, 25 nt, Artificial Sequence
  Description of Artificial Sequence: Synthetic oligonucleotide
ggucugguacauauuggaaauuaug

SEQ ID NO: 69273 - RNA, 25 nt, Artificial Sequence
  Description of Artificial Sequence: Synthetic oligonucleotide
cuaguccuuccgauggaagcacuag

SEQ ID NO: 69274 - RNA, 25 nt, Artificial Sequence
  Description of Artificial Sequence: Synthetic oligonucleotide
ccagugaauauuguuuuuaugugga

SEQ ID NO: 69275 - RNA, 25 nt, Artificial Sequence
  Description of Artificial Sequence: Synthetic oligonucleotide
augaauucaaguuggaauugguaga

SEQ ID NO: 69276 - RNA, 25 nt, Artificial Sequence
  Description of Artificial Sequence: Synthetic oligonucleotide
caggacacagauuuagacuuggaga

SEQ ID NO: 69277 - RNA, 25 nt, Artificial Sequence
  Description of Artificial Sequence: Synthetic oligonucleotide
cucaaagcacaguuacaguauucca

SEQ ID NO: 69278 - RNA, 25 nt, Artificial Sequence
  Description of Artificial Sequence: Synthetic oligonucleotide
accacugccaccacugaugaauuaa

SEQ ID NO: 69279 - RNA, 25 nt, Artificial Sequence
  Description of Artificial Sequence: Synthetic oligonucleotide
gaaacuacuagugccacaucaucac

SEQ ID NO: 69280 - RNA, 25 nt, Artificial Sequence
  Description of Artificial Sequence: Synthetic oligonucleotide
aagucggacagccucaccaaacaga

SEQ ID NO: 69281 - RNA, 25 nt, Artificial Sequence
  Description of Artificial Sequence: Synthetic oligonucleotide
gaaagcgaaaaauggaacaugaugg

SEQ ID NO: 69282 - RNA, 25 nt, Artificial Sequence
  Description of Artificial Sequence: Synthetic oligonucleotide
cccucugauuuagcauguagacugc

SEQ ID NO: 69283 - RNA, 25 nt, Artificial Sequence
  Description of Artificial Sequence: Synthetic oligonucleotide
ugagcuauuuaaggaucuauuuaug

SEQ ID NO: 69284 - RNA, 25 nt, Artificial Sequence
  Description of Artificial Sequence: Synthetic oligonucleotide
aaaaggugaaaaagcacuauuauca

SEQ ID NO: 69285 - RNA, 25 nt, Artificial Sequence
  Description of Artificial Sequence: Synthetic oligonucleotide
gaaaaagcacuauuaucaguucugc

SEQ ID NO: 69286 - RNA, 25 nt, Artificial Sequence
  Description of Artificial Sequence: Synthetic oligonucleotide
ggcugaaaagaaagauuaaaccuac

SEQ ID NO: 69287 - RNA, 25 nt, Artificial Sequence
  Description of Artificial Sequence: Synthetic oligonucleotide
uaaacccuuauaauaaaauccuucu

SEQ ID NO: 69288 - RNA, 25 nt, Artificial Sequence
  Description of Artificial Sequence: Synthetic oligonucleotide
cauacuauuagccaaugcuguagac

SEQ ID NO: 69289 - RNA, 25 nt, Artificial Sequence
  Description of Artificial Sequence: Synthetic oligonucleotide
gacagaagcauuuugauaggaauag

SEQ ID NO: 69290 - RNA, 25 nt, Artificial Sequence
  Description of Artificial Sequence: Synthetic oligonucleotide
agagcaaauaagauaauggcccuga

SEQ ID NO: 69291 - RNA, 25 nt, Artificial Sequence
  Description of Artificial Sequence: Synthetic oligonucleotide
ccaacauuuuucucuuccucaagca

SEQ ID NO: 69292 - RNA, 25 nt, Artificial Sequence
  Description of Artificial Sequence: Synthetic oligonucleotide
uuaaguaugagaaaaguucagccca

SEQ ID NO: 69293 - RNA, 25 nt, Artificial Sequence
  Description of Artificial Sequence: Synthetic oligonucleotide
caggaauaaagauggcugcugaacc

SEQ ID NO: 69294 - RNA, 25 nt, Artificial Sequence
  Description of Artificial Sequence: Synthetic oligonucleotide
aauuugaaugaccaaguucucuuca

SEQ ID NO: 69295 - RNA, 25 nt, Artificial Sequence
  Description of Artificial Sequence: Synthetic oligonucleotide
auguauaaagauagccagccuagag

SEQ ID NO: 69296 - RNA, 25 nt, Artificial Sequence
  Description of Artificial Sequence: Synthetic oligonucleotide
ggcuguaacuaucucugugaagugu

SEQ ID NO: 69297 - RNA, 25 nt, Artificial Sequence
  Description of Artificial Sequence: Synthetic oligonucleotide
ucugugaagugugagaaaauuucaa

SEQ ID NO: 69298 - RNA, 25 nt, Artificial Sequence
  Description of Artificial Sequence: Synthetic oligonucleotide
ccuuuaaggaaaugaauccuccuga

SEQ ID NO: 69299 - RNA, 25 nt, Artificial Sequence
  Description of Artificial Sequence: Synthetic oligonucleotide
aaggauacaaaaagugacaucauau

SEQ ID NO: 69300 - RNA, 25 nt, Artificial Sequence
  Description of Artificial Sequence: Synthetic oligonucleotide
agaugcaauuugaaucuucaucaua

SEQ ID NO: 69301 - RNA, 25 nt, Artificial Sequence
  Description of Artificial Sequence: Synthetic oligonucleotide
guucaaaacgaagacuagcuauuaa

SEQ ID NO: 69302 - RNA, 25 nt, Artificial Sequence
  Description of Artificial Sequence: Synthetic oligonucleotide
gugaaaccucaucucuacuaaaaau

SEQ ID NO: 69303 - RNA, 25 nt, Artificial Sequence
  Description of Artificial Sequence: Synthetic oligonucleotide
acgaaagagaagcucuaucucgccu

SEQ ID NO: 69304 - RNA, 25 nt, Artificial Sequence
  Description of Artificial Sequence: Synthetic oligonucleotide
cuccacaagcgccuucgguccaguu

SEQ ID NO: 69305 - RNA, 25 nt, Artificial Sequence
  Description of Artificial Sequence: Synthetic oligonucleotide
gagaagauuccaaagauguagccgc

SEQ ID NO: 69306 - RNA, 25 nt, Artificial Sequence
  Description of Artificial Sequence: Synthetic oligonucleotide
aaucuggauucaaugaggagacuug

SEQ ID NO: 69307 - RNA, 25 nt, Artificial Sequence
  Description of Artificial Sequence: Synthetic oligonucleotide
agaacagauuugagaguagugagga

SEQ ID NO: 69308 - RNA, 25 nt, Artificial Sequence
  Description of Artificial Sequence: Synthetic oligonucleotide
ccagagcugugcagaugaguacaaa

SEQ ID NO: 69309 - RNA, 25 nt, Artificial Sequence
  Description of Artificial Sequence: Synthetic oligonucleotide
ccucagauuguuguuguuaaugggc

SEQ ID NO: 69310 - RNA, 25 nt, Artificial Sequence
  Description of Artificial Sequence: Synthetic oligonucleotide
cuauuuuaauuauuuuuaauuuauu

SEQ ID NO: 69311 - RNA, 25 nt, Artificial Sequence
  Description of Artificial Sequence: Synthetic oligonucleotide
uuuaauuuauuaauauuuaaauaug

SEQ ID NO: 69312 - RNA, 25 nt, Artificial Sequence
  Description of Artificial Sequence: Synthetic oligonucleotide
augcaguuugaauauccuuuguuuc

SEQ ID NO: 69313 - RNA, 25 nt, Artificial Sequence
  Description of Artificial Sequence: Synthetic oligonucleotide
caugcugcuggcgucuaaguguuug

SEQ ID NO: 69314 - RNA, 25 nt, Artificial Sequence
  Description of Artificial Sequence: Synthetic oligonucleotide
agaugugcauuucaccugugacaaa

SEQ ID NO: 69315 - RNA, 25 nt, Artificial Sequence
  Description of Artificial Sequence: Synthetic oligonucleotide
ucaaaaccugugccaggcugaauua

SEQ ID NO: 69316 - RNA, 25 nt, Artificial Sequence
  Description of Artificial Sequence: Synthetic oligonucleotide
gaauguggguagucauucuuacaau

SEQ ID NO: 69317 - RNA, 25 nt, Artificial Sequence
  Description of Artificial Sequence: Synthetic oligonucleotide
auguggguagucauucuuacaauug

SEQ ID NO: 69318 - RNA, 25 nt, Artificial Sequence
  Description of Artificial Sequence: Synthetic oligonucleotide
ugaaaaugagcaucagagaguguac

SEQ ID NO: 69319 - RNA, 25 nt, Artificial Sequence
  Description of Artificial Sequence: Synthetic oligonucleotide
uugcuuuucauguagaacucagcag

SEQ ID NO: 69320 - RNA, 25 nt, Artificial Sequence
  Description of Artificial Sequence: Synthetic oligonucleotide
uguauuucuauauuuauuuucagua

SEQ ID NO: 69321 - RNA, 25 nt, Artificial Sequence
  Description of Artificial Sequence: Synthetic oligonucleotide
uuugauuaauguuucuuaaauggaa

SEQ ID NO: 69322 - RNA, 25 nt, Artificial Sequence
  Description of Artificial Sequence: Synthetic oligonucleotide
caacguguauagugccuaaaauugu

SEQ ID NO: 69323 - RNA, 25 nt, Artificial Sequence
  Description of Artificial Sequence: Synthetic oligonucleotide
cauauccuuggcuacuaacaucugg

SEQ ID NO: 69324 - RNA, 25 nt, Artificial Sequence
  Description of Artificial Sequence: Synthetic oligonucleotide
uacuaacaucuggagacugugagcu

SEQ ID NO: 69325 - RNA, 25 nt, Artificial Sequence
  Description of Artificial Sequence: Synthetic oligonucleotide
cauaaguugugugcuuuuuauuaau

SEQ ID NO: 69326 - RNA, 25 nt, Artificial Sequence
  Description of Artificial Sequence: Synthetic oligonucleotide
gcaucauuuuggcucuucuuacauu

SEQ ID NO: 69327 - RNA, 25 nt, Artificial Sequence
  Description of Artificial Sequence: Synthetic oligonucleotide
gcucuucuuacauuuguaaaaaugu

SEQ ID NO: 69328 - RNA, 25 nt, Artificial Sequence
  Description of Artificial Sequence: Synthetic oligonucleotide
agauuaggucaucuuaauucauauu

SEQ ID NO: 69329 - RNA, 25 nt, Artificial Sequence
  Description of Artificial Sequence: Synthetic oligonucleotide
auggaauugaaagaacuaaucauga

SEQ ID NO: 69330 - RNA, 25 nt, Artificial Sequence
  Description of Artificial Sequence: Synthetic oligonucleotide
cacacucauuccuucugcucuuggg

SEQ ID NO: 69331 - RNA, 25 nt, Artificial Sequence
  Description of Artificial Sequence: Synthetic oligonucleotide
uguagagguaaccaguagcuuugag

SEQ ID NO: 69332 - RNA, 25 nt, Artificial Sequence
  Description of Artificial Sequence: Synthetic oligonucleotide
caaccacaugccacguaauauuuca

SEQ ID NO: 69333 - RNA, 25 nt, Artificial Sequence
  Description of Artificial Sequence: Synthetic oligonucleotide
ucggaaacaaguuauucucuucacu

SEQ ID NO: 69334 - RNA, 25 nt, Artificial Sequence
  Description of Artificial Sequence: Synthetic oligonucleotide
acucccaauaacuaaugcuaagaaa

SEQ ID NO: 69335 - RNA, 25 nt, Artificial Sequence
  Description of Artificial Sequence: Synthetic oligonucleotide
aaugcuaagaaaugcugaaaaucaa

SEQ ID NO: 69336 - RNA, 25 nt, Artificial Sequence
  Description of Artificial Sequence: Synthetic oligonucleotide
gucuuucucuaaauaugauuacuuu

SEQ ID NO: 69337 - RNA, 25 nt, Artificial Sequence
  Description of Artificial Sequence: Synthetic oligonucleotide
ugaauuucaggcauuuuguucuaca

SEQ ID NO: 69338 - RNA, 25 nt, Artificial Sequence
  Description of Artificial Sequence: Synthetic oligonucleotide
cgauucccucucacccgggacucuc

SEQ ID NO: 69339 - RNA, 25 nt, Artificial Sequence
  Description of Artificial Sequence: Synthetic oligonucleotide
aggaaagugaaccuuuaaaguaaag

SEQ ID NO: 69340 - RNA, 25 nt, Artificial Sequence
  Description of Artificial Sequence: Synthetic oligonucleotide
gaggcugcaugcucuggaagccugg

SEQ ID NO: 69341 - RNA, 25 nt, Artificial Sequence
  Description of Artificial Sequence: Synthetic oligonucleotide
ucucugaacagaaaacaaaagagag

SEQ ID NO: 69342 - RNA, 25 nt, Artificial Sequence
  Description of Artificial Sequence: Synthetic oligonucleotide
aacuuggcuguaaucaguuaugccg

SEQ ID NO: 69343 - RNA, 25 nt, Artificial Sequence
  Description of Artificial Sequence: Synthetic oligonucleotide
agaagccaaaauuaaaagaagucca

SEQ ID NO: 69344 - RNA, 25 nt, Artificial Sequence
  Description of Artificial Sequence: Synthetic oligonucleotide
auuaaaagaaguccaggugagguua

SEQ ID NO: 69345 - RNA, 25 nt, Artificial Sequence
  Description of Artificial Sequence: Synthetic oligonucleotide
gaauccggauuaucgggaagaggac

SEQ ID NO: 69346 - RNA, 25 nt, Artificial Sequence
  Description of Artificial Sequence: Synthetic oligonucleotide
aaugugacaucaaagcaaguauugu

SEQ ID NO: 69347 - RNA, 25 nt, Artificial Sequence
  Description of Artificial Sequence: Synthetic oligonucleotide
caucaaagcaaguauuguagcacuc

SEQ ID NO: 69348 - RNA, 25 nt, Artificial Sequence
  Description of Artificial Sequence: Synthetic oligonucleotide
agagagagaaaacaaaaccacaaau

SEQ ID NO: 69349 - RNA, 25 nt, Artificial Sequence
  Description of Artificial Sequence: Synthetic oligonucleotide
ucgcuguaguauuuaagcccauaca

SEQ ID NO: 69350 - RNA, 25 nt, Artificial Sequence
  Description of Artificial Sequence: Synthetic oligonucleotide
cgcuguaguauuuaagcccauacag

SEQ ID NO: 69351 - RNA, 25 nt, Artificial Sequence
  Description of Artificial Sequence: Synthetic oligonucleotide
auuuaagcccauacagaaaccuucc

SEQ ID NO: 69352 - RNA, 25 nt, Artificial Sequence
  Description of Artificial Sequence: Synthetic oligonucleotide
auuaaaauaaacaugguauaccuac

SEQ ID NO: 69353 - RNA, 25 nt, Artificial Sequence
  Description of Artificial Sequence: Synthetic oligonucleotide
cuguucugaucggccaguuuucgga

SEQ ID NO: 69354 - RNA, 25 nt, Artificial Sequence
  Description of Artificial Sequence: Synthetic oligonucleotide
aaauaauuugaacuuuggaacaggg

SEQ ID NO: 69355 - RNA, 25 nt, Artificial Sequence
  Description of Artificial Sequence: Synthetic oligonucleotide
ugcgaccuuaauuuaacuuuccagu

SEQ ID NO: 69356 - RNA, 25 nt, Artificial Sequence
  Description of Artificial Sequence: Synthetic oligonucleotide
cugagaaagcuaaaguuugguuuug

SEQ ID NO: 69357 - RNA, 25 nt, Artificial Sequence
  Description of Artificial Sequence: Synthetic oligonucleotide
aguaaagaugcuacuucccacugua

SEQ ID NO: 69358 - RNA, 25 nt, Artificial Sequence
  Description of Artificial Sequence: Synthetic oligonucleotide
cugcuuaauugcugauaccauauga

SEQ ID NO: 69359 - RNA, 25 nt, Artificial Sequence
  Description of Artificial Sequence: Synthetic oligonucleotide
uaccauaugaaugaaacaugggcug

SEQ ID NO: 69360 - RNA, 25 nt, Artificial Sequence
  Description of Artificial Sequence: Synthetic oligonucleotide
aacuuucuuauccaacuuuuucaua

SEQ ID NO: 69361 - RNA, 25 nt, Artificial Sequence
  Description of Artificial Sequence: Synthetic oligonucleotide
ccuugcaugacaucaugaggccgga

SEQ ID NO: 69362 - RNA, 25 nt, Artificial Sequence
  Description of Artificial Sequence: Synthetic oligonucleotide
ugaauuuguauaugacugcauuugu

SEQ ID NO: 69363 - RNA, 25 nt, Artificial Sequence
  Description of Artificial Sequence: Synthetic oligonucleotide
gaauccuaguagaauguuuacuacc

SEQ ID NO: 69364 - RNA, 25 nt, Artificial Sequence
  Description of Artificial Sequence: Synthetic oligonucleotide
gaaagggaagaauuuuuugaugaaa

SEQ ID NO: 69365 - RNA, 25 nt, Artificial Sequence
  Description of Artificial Sequence: Synthetic oligonucleotide
uaucggcaugccagugugugaauuu

SEQ ID NO: 69366 - RNA, 25 nt, Artificial Sequence
  Description of Artificial Sequence: Synthetic oligonucleotide
caccucauaguagagcaauguaugu

SEQ ID NO: 69367 - RNA, 25 nt, Artificial Sequence
  Description of Artificial Sequence: Synthetic oligonucleotide
ccagaauugccaaagcacauauaua

SEQ ID NO: 69368 - RNA, 25 nt, Artificial Sequence
  Description of Artificial Sequence: Synthetic oligonucleotide
uggugaucuggguaauaguuucucc

SEQ ID NO: 69369 - RNA, 25 nt, Artificial Sequence
  Description of Artificial Sequence: Synthetic oligonucleotide
gaucuggguaauaguuucuccaaau

SEQ ID NO: 69370 - RNA, 25 nt, Artificial Sequence
  Description of Artificial Sequence: Synthetic oligonucleotide
ggaugugaugaauacuuccuagaaa

SEQ ID NO: 69371 - RNA, 25 nt, Artificial Sequence
  Description of Artificial Sequence: Synthetic oligonucleotide
cauuuccacagcuacaccauauaug

SEQ ID NO: 69372 - RNA, 25 nt, Artificial Sequence
  Description of Artificial Sequence: Synthetic oligonucleotide
acagcuacaccauauaugaauggag

SEQ ID NO: 69373 - RNA, 25 nt, Artificial Sequence
  Description of Artificial Sequence: Synthetic oligonucleotide
ugcaguucuuacacgagaagaagau

SEQ ID NO: 69374 - RNA, 25 nt, Artificial Sequence
  Description of Artificial Sequence: Synthetic oligonucleotide
acgagaagaagaucauuuacaggga

SEQ ID NO: 69375 - RNA, 25 nt, Artificial Sequence
  Description of Artificial Sequence: Synthetic oligonucleotide
cgagaagaagaucauuuacagggac

SEQ ID NO: 69376 - RNA, 25 nt, Artificial Sequence
  Description of Artificial Sequence: Synthetic oligonucleotide
aagaagaucauuuacagggaccuga

SEQ ID NO: 69377 - RNA, 25 nt, Artificial Sequence
  Description of Artificial Sequence: Synthetic oligonucleotide
agaggaagagguguuugacugcauc

SEQ ID NO: 69378 - RNA, 25 nt, Artificial Sequence
  Description of Artificial Sequence: Synthetic oligonucleotide
gaggaagagguguuugacugcaucg

SEQ ID NO: 69379 - RNA, 25 nt, Artificial Sequence
  Description of Artificial Sequence: Synthetic oligonucleotide
cuacuuugagggcgaguucacaggg

SEQ ID NO: 69380 - RNA, 25 nt, Artificial Sequence
  Description of Artificial Sequence: Synthetic oligonucleotide
agggcaucuccuggcaccucugucc

SEQ ID NO: 69381 - RNA, 25 nt, Artificial Sequence
  Description of Artificial Sequence: Synthetic oligonucleotide
ggagugauaugguuugucuuuuuaa

SEQ ID NO: 69382 - RNA, 25 nt, Artificial Sequence
  Description of Artificial Sequence: Synthetic oligonucleotide
gagugauaugguuugucuuuuuaag

SEQ ID NO: 69383 - RNA, 25 nt, Artificial Sequence
  Description of Artificial Sequence: Synthetic oligonucleotide
ugcaguaaagauccuaaagguuguc

SEQ ID NO: 69384 - RNA, 25 nt, Artificial Sequence
  Description of Artificial Sequence: Synthetic oligonucleotide
aguaaagauccuaaagguugucgac

SEQ ID NO: 69385 - RNA, 25 nt, Artificial Sequence
  Description of Artificial Sequence: Synthetic oligonucleotide
ugacaaaggacaaccuggcaauugu

SEQ ID NO: 69386 - RNA, 25 nt, Artificial Sequence
  Description of Artificial Sequence: Synthetic oligonucleotide
gcaauugugacccaguggugcgagg

SEQ ID NO: 69387 - RNA, 25 nt, Artificial Sequence
  Description of Artificial Sequence: Synthetic oligonucleotide
aacaucauccauagagacaugaaau

SEQ ID NO: 69388 - RNA, 25 nt, Artificial Sequence
  Description of Artificial Sequence: Synthetic oligonucleotide
ugaaauccaacaauauauuucucca

SEQ ID NO: 69389 - RNA, 25 nt, Artificial Sequence
  Description of Artificial Sequence: Synthetic oligonucleotide
aacaauauauuucuccaugaaggcu

SEQ ID NO: 69390 - RNA, 25 nt, Artificial Sequence
  Description of Artificial Sequence: Synthetic oligonucleotide
aacaguaaagucacgcuggaguggu

SEQ ID NO: 69391 - RNA, 25 nt, Artificial Sequence
  Description of Artificial Sequence: Synthetic oligonucleotide
ugugaagaaaguaaaggaagagagg

SEQ ID NO: 69392 - RNA, 25 nt, Artificial Sequence
  Description of Artificial Sequence: Synthetic oligonucleotide
cuuccgagccauccuugcaucgggc

SEQ ID NO: 69393 - RNA, 25 nt, Artificial Sequence
  Description of Artificial Sequence: Synthetic oligonucleotide
aauggagguugaauauccuacugug

SEQ ID NO: 69394 - RNA, 25 nt, Artificial Sequence
  Description of Artificial Sequence: Synthetic oligonucleotide
ggagguugaauauccuacuguguaa

SEQ ID NO: 69395 - RNA, 25 nt, Artificial Sequence
  Description of Artificial Sequence: Synthetic oligonucleotide
auuuugaguuuucccuuguagugua

SEQ ID NO: 69396 - RNA, 25 nt, Artificial Sequence
  Description of Artificial Sequence: Synthetic oligonucleotide
uauccuguuuguucuuuguugauug

SEQ ID NO: 69397 - RNA, 25 nt, Artificial Sequence
  Description of Artificial Sequence: Synthetic oligonucleotide
ccuguuuguucuuuguugauugaaa

SEQ ID NO: 69398 - RNA, 25 nt, Artificial Sequence
  Description of Artificial Sequence: Synthetic oligonucleotide
cucuacagccuucuuuuucuuccau

SEQ ID NO: 69399 - RNA, 25 nt, Artificial Sequence
  Description of Artificial Sequence: Synthetic oligonucleotide
ucuuccauagcuaaucuuccuucua

SEQ ID NO: 69400 - RNA, 25 nt, Artificial Sequence
  Description of Artificial Sequence: Synthetic oligonucleotide
auaaucuuccuguugaaugcuucau

SEQ ID NO: 69401 - RNA, 25 nt, Artificial Sequence
  Description of Artificial Sequence: Synthetic oligonucleotide
uaaucuuccuguugaaugcuucaug

SEQ ID NO: 69402 - RNA, 25 nt, Artificial Sequence
  Description of Artificial Sequence: Synthetic oligonucleotide
cuucaugacuugaauucuacuuuga

SEQ ID NO: 69403 - RNA, 25 nt, Artificial Sequence
  Description of Artificial Sequence: Synthetic oligonucleotide
aagagggagagaagcaacuacagac

SEQ ID NO: 69404 - RNA, 25 nt, Artificial Sequence
  Description of Artificial Sequence: Synthetic oligonucleotide
cgucuccuaccagaccaaggucaac

SEQ ID NO: 69405 - RNA, 25 nt, Artificial Sequence
  Description of Artificial Sequence: Synthetic oligonucleotide
gaucaaucggcccgacuaucucgac

SEQ ID NO: 69406 - RNA, 25 nt, Artificial Sequence
  Description of Artificial Sequence: Synthetic oligonucleotide
ggacgaacauccaaccuucccaaac

SEQ ID NO: 69407 - RNA, 25 nt, Artificial Sequence
  Description of Artificial Sequence: Synthetic oligonucleotide
agggucggaacccaagcuuagaacu

SEQ ID NO: 69408 - RNA, 25 nt, Artificial Sequence
  Description of Artificial Sequence: Synthetic oligonucleotide
ucggaacccaagcuuagaacuuuaa

SEQ ID NO: 69409 - RNA, 25 nt, Artificial Sequence
  Description of Artificial Sequence: Synthetic oligonucleotide
acccaagcuuagaacuuuaagcaac

SEQ ID NO: 69410 - RNA, 25 nt, Artificial Sequence
  Description of Artificial Sequence: Synthetic oligonucleotide
gaacuuuaagcaacaagaccaccac

SEQ ID NO: 69411 - RNA, 25 nt, Artificial Sequence
  Description of Artificial Sequence: Synthetic oligonucleotide
acuauucaguggcgagaaauaaagu

SEQ ID NO: 69412 - RNA, 25 nt, Artificial Sequence
  Description of Artificial Sequence: Synthetic oligonucleotide
cuauucaguggcgagaaauaaaguu

SEQ ID NO: 69413 - RNA, 25 nt, Artificial Sequence
  Description of Artificial Sequence: Synthetic oligonucleotide
aaacacagauaacaggaaaugaucc

SEQ ID NO: 69414 - RNA, 25 nt, Artificial Sequence
  Description of Artificial Sequence: Synthetic oligonucleotide
cuuaagaaaagagaagaaaugaaac

SEQ ID NO: 69415 - RNA, 25 nt, Artificial Sequence
  Description of Artificial Sequence: Synthetic oligonucleotide
cugaaggaguguguuuccauccucc

SEQ ID NO: 69416 - RNA, 25 nt, Artificial Sequence
  Description of Artificial Sequence: Synthetic oligonucleotide
ucaccgcgggacugaaaaucuuuga

SEQ ID NO: 69417 - RNA, 25 nt, Artificial Sequence
  Description of Artificial Sequence: Synthetic oligonucleotide
agcagaaauaagcgugccguucagg

SEQ ID NO: 69418 - RNA, 25 nt, Artificial Sequence
  Description of Artificial Sequence: Synthetic oligonucleotide
aagcgugccguucaggguccagaag

SEQ ID NO: 69419 - RNA, 25 nt, Artificial Sequence
  Description of Artificial Sequence: Synthetic oligonucleotide
agaaacagucacucaagacugcuug

SEQ ID NO: 69420 - RNA, 25 nt, Artificial Sequence
  Description of Artificial Sequence: Synthetic oligonucleotide
agaggaagaagguccaugucuuugg

SEQ ID NO: 69421 - RNA, 25 nt, Artificial Sequence
  Description of Artificial Sequence: Synthetic oligonucleotide
uguauucaaaauaugccugaaacac

SEQ ID NO: 69422 - RNA, 25 nt, Artificial Sequence
  Description of Artificial Sequence: Synthetic oligonucleotide
auuuuccucccuuucucuguaccuc

SEQ ID NO: 69423 - RNA, 25 nt, Artificial Sequence
  Description of Artificial Sequence: Synthetic oligonucleotide
caaagaaagauagagcaagacaaga

SEQ ID NO: 69424 - RNA, 25 nt, Artificial Sequence
  Description of Artificial Sequence: Synthetic oligonucleotide
aagaaagauagagcaagacaagaaa

SEQ ID NO: 69425 - RNA, 25 nt, Artificial Sequence
  Description of Artificial Sequence: Synthetic oligonucleotide
gaaagcauuuguuuguacaagaucc

SEQ ID NO: 69426 - RNA, 25 nt, Artificial Sequence
  Description of Artificial Sequence: Synthetic oligonucleotide
ugaguuaaacgaacguacuugcaga

SEQ ID NO: 69427 - RNA, 25 nt, Artificial Sequence
  Description of Artificial Sequence: Synthetic oligonucleotide
acugauacagaacgaucgauacaga

SEQ ID NO: 69428 - RNA, 25 nt, Artificial Sequence
  Description of Artificial Sequence: Synthetic oligonucleotide
auauuauauauauauaaaaauaaau

SEQ ID NO: 69429 - RNA, 25 nt, Artificial Sequence
  Description of Artificial Sequence: Synthetic oligonucleotide
auuauauauauauaaaaauaaauau

SEQ ID NO: 69430 - RNA, 25 nt, Artificial Sequence
  Description of Artificial Sequence: Synthetic oligonucleotide
ucacuggauguauuugacugcugug

SEQ ID NO: 69431 - RNA, 25 nt, Artificial Sequence
  Description of Artificial Sequence: Synthetic oligonucleotide
cagggaagaggaggagaugagagac

SEQ ID NO: 69432 - RNA, 25 nt, Artificial Sequence
  Description of Artificial Sequence: Synthetic oligonucleotide
augaucuuuuuuuugucccacuugg

SEQ ID NO: 69433 - RNA, 27 nt, Artificial Sequence
  Description of Artificial Sequence: Synthetic oligonucleotide
ggccgugaacuccucaucaaaauaccu

SEQ ID NO: 69434 - RNA, 27 nt, Artificial Sequence
  Description of Artificial Sequence: Synthetic oligonucleotide
uggugugauggugaucaucugggccgu

SEQ ID NO: 69435 - RNA, 27 nt, Artificial Sequence
  Description of Artificial Sequence: Synthetic oligonucleotide
aaacccgcaggauaguuuucuucccua

SEQ ID NO: 69436 - RNA, 27 nt, Artificial Sequence
  Description of Artificial Sequence: Synthetic oligonucleotide
caaacuggaugaaauaaauuaaaaccc

SEQ ID NO: 69437 - RNA, 27 nt, Artificial Sequence
  Description of Artificial Sequence: Synthetic oligonucleotide
agaaguccuuaacauuucccuacguga

SEQ ID NO: 69438 - RNA, 27 nt, Artificial Sequence
  Description of Artificial Sequence: Synthetic oligonucleotide
cucugucccacuggguaaacccuggcc

SEQ ID NO: 69439 - RNA, 27 nt, Artificial Sequence
  Description of Artificial Sequence: Synthetic oligonucleotide
cacaauaacaaauuuaaaccuugcucc

SEQ ID NO: 69440 - RNA, 27 nt, Artificial Sequence
  Description of Artificial Sequence: Synthetic oligonucleotide
aaaugcauuugaacaacauaauacaca

SEQ ID NO: 69441 - RNA, 27 nt, Artificial Sequence
  Description of Artificial Sequence: Synthetic oligonucleotide
ggcuuuccugucacaaagauuaaaaac

SEQ ID NO: 69442 - RNA, 27 nt, Artificial Sequence
  Description of Artificial Sequence: Synthetic oligonucleotide
agggcuuuccugucacaaagauuaaaa

SEQ ID NO: 69443 - RNA, 27 nt, Artificial Sequence
  Description of Artificial Sequence: Synthetic oligonucleotide
ggccaugcugggagacauaagcagcag

SEQ ID NO: 69444 - RNA, 27 nt, Artificial Sequence
  Description of Artificial Sequence: Synthetic oligonucleotide
ucagggagaagcuucugaaacacuucu

SEQ ID NO: 69445 - RNA, 27 nt, Artificial Sequence
  Description of Artificial Sequence: Synthetic oligonucleotide
aagggcuucuuccuuauugauggucag

SEQ ID NO: 69446 - RNA, 27 nt, Artificial Sequence
  Description of Artificial Sequence: Synthetic oligonucleotide
ugaagggcuucuuccuuauugaugguc

SEQ ID NO: 69447 - RNA, 27 nt, Artificial Sequence
  Description of Artificial Sequence: Synthetic oligonucleotide
cgcugaagggcuucuuccuuauugaug

SEQ ID NO: 69448 - RNA, 27 nt, Artificial Sequence
  Description of Artificial Sequence: Synthetic oligonucleotide
gccgcugaagggcuucuuccuuauuga

SEQ ID NO: 69449 - RNA, 27 nt, Artificial Sequence
  Description of Artificial Sequence: Synthetic oligonucleotide
acuggccgcugaagggcuucuuccuua

SEQ ID NO: 69450 - RNA, 27 nt, Artificial Sequence
  Description of Artificial Sequence: Synthetic oligonucleotide
cggagcuuuucaccuuuaguuaugcuu

SEQ ID NO: 69451 - RNA, 27 nt, Artificial Sequence
  Description of Artificial Sequence: Synthetic oligonucleotide
ccggagcuuuucaccuuuaguuaugcu

SEQ ID NO: 69452 - RNA, 27 nt, Artificial Sequence
  Description of Artificial Sequence: Synthetic oligonucleotide
cagacuguugacuggcgugauguaguu

SEQ ID NO: 69453 - RNA, 27 nt, Artificial Sequence
  Description of Artificial Sequence: Synthetic oligonucleotide
cuuuugaacucugcuuaaauccagugg

SEQ ID NO: 69454 - RNA, 27 nt, Artificial Sequence
  Description of Artificial Sequence: Synthetic oligonucleotide
gcuuuugaacucugcuuaaauccagug

SEQ ID NO: 69455 - RNA, 27 nt, Artificial Sequence
  Description of Artificial Sequence: Synthetic oligonucleotide
agggcuuuugaacucugcuuaaaucca

SEQ ID NO: 69456 - RNA, 27 nt, Artificial Sequence
  Description of Artificial Sequence: Synthetic oligonucleotide
aagggcuuuugaacucugcuuaaaucc

SEQ ID NO: 69457 - RNA, 27 nt, Artificial Sequence
  Description of Artificial Sequence: Synthetic oligonucleotide
ugaagggcuuuugaacucugcuuaaau

SEQ ID NO: 69458 - RNA, 27 nt, Artificial Sequence
  Description of Artificial Sequence: Synthetic oligonucleotide
cugaagggcuuuugaacucugcuuaaa

SEQ ID NO: 69459 - RNA, 27 nt, Artificial Sequence
  Description of Artificial Sequence: Synthetic oligonucleotide
cgcugaagggcuuuugaacucugcuua

SEQ ID NO: 69460 - RNA, 27 nt, Artificial Sequence
  Description of Artificial Sequence: Synthetic oligonucleotide
cgagcggcuucacucagacccugaggc

SEQ ID NO: 69461 - RNA, 27 nt, Artificial Sequence
  Description of Artificial Sequence: Synthetic oligonucleotide
uugacuggcgugauguaguugcuuggg

SEQ ID NO: 69462 - RNA, 27 nt, Artificial Sequence
  Description of Artificial Sequence: Synthetic oligonucleotide
cacgcaccaagaagcugccauugaucc

SEQ ID NO: 69463 - RNA, 27 nt, Artificial Sequence
  Description of Artificial Sequence: Synthetic oligonucleotide
cugaugaauccaaugugggcuggaauc

SEQ ID NO: 69464 - RNA, 27 nt, Artificial Sequence
  Description of Artificial Sequence: Synthetic oligonucleotide
cuuagguauuccacauucucagcugug

SEQ ID NO: 69465 - RNA, 27 nt, Artificial Sequence
  Description of Artificial Sequence: Synthetic oligonucleotide
ugagccucaaauuaggagauacguuuu

SEQ ID NO: 69466 - RNA, 27 nt, Artificial Sequence
  Description of Artificial Sequence: Synthetic oligonucleotide
ccaauuguagagaaauuauuuuaggaa

SEQ ID NO: 69467 - RNA, 27 nt, Artificial Sequence
  Description of Artificial Sequence: Synthetic oligonucleotide
ggcuccuaacuagcugaaucuuccaau

SEQ ID NO: 69468 - RNA, 27 nt, Artificial Sequence
  Description of Artificial Sequence: Synthetic oligonucleotide
guggauauugacuaggagaguuuaaaa

SEQ ID NO: 69469 - RNA, 27 nt, Artificial Sequence
  Description of Artificial Sequence: Synthetic oligonucleotide
ugugacugaacauaacuguaggcugaa

SEQ ID NO: 69470 - RNA, 27 nt, Artificial Sequence
  Description of Artificial Sequence: Synthetic oligonucleotide
guaugugugugugacugaacauaacug

SEQ ID NO: 69471 - RNA, 27 nt, Artificial Sequence
  Description of Artificial Sequence: Synthetic oligonucleotide
aagcaaaaggaacauuuuguaugugug

SEQ ID NO: 69472 - RNA, 27 nt, Artificial Sequence
  Description of Artificial Sequence: Synthetic oligonucleotide
aaaaauuacuuuaaaagcaaaaggaac

SEQ ID NO: 69473 - RNA, 27 nt, Artificial Sequence
  Description of Artificial Sequence: Synthetic oligonucleotide
ccauugacuguugcuucacaggucaga

SEQ ID NO: 69474 - RNA, 27 nt, Artificial Sequence
  Description of Artificial Sequence: Synthetic oligonucleotide
auugguuugucgaugugugagauaguu

SEQ ID NO: 69475 - RNA, 27 nt, Artificial Sequence
  Description of Artificial Sequence: Synthetic oligonucleotide
agugguagcaguacaauugaggacaag

SEQ ID NO: 69476 - RNA, 27 nt, Artificial Sequence
  Description of Artificial Sequence: Synthetic oligonucleotide
uaagaccgcuugccagcuacgguuuca

SEQ ID NO: 69477 - RNA, 27 nt, Artificial Sequence
  Description of Artificial Sequence: Synthetic oligonucleotide
agccgguaagaccgcuugccagcuacg

SEQ ID NO: 69478 - RNA, 27 nt, Artificial Sequence
  Description of Artificial Sequence: Synthetic oligonucleotide
gguaacccaucuuuuaaccauacaacu

SEQ ID NO: 69479 - RNA, 27 nt, Artificial Sequence
  Description of Artificial Sequence: Synthetic oligonucleotide
ucgcagguaacccaucuuuuaaccaua

SEQ ID NO: 69480 - RNA, 27 nt, Artificial Sequence
  Description of Artificial Sequence: Synthetic oligonucleotide
cucagcaagauuguauaauucccugca

SEQ ID NO: 69481 - RNA, 27 nt, Artificial Sequence
  Description of Artificial Sequence: Synthetic oligonucleotide
acuguuuuaugcucagcaagauuguau

SEQ ID NO: 69482 - RNA, 27 nt, Artificial Sequence
  Description of Artificial Sequence: Synthetic oligonucleotide
aggauaaaggacucuucauuauuggaa

SEQ ID NO: 69483 - RNA, 27 nt, Artificial Sequence
  Description of Artificial Sequence: Synthetic oligonucleotide
caacuugcguuggaacauccaaagugu

SEQ ID NO: 69484 - RNA, 27 nt, Artificial Sequence
  Description of Artificial Sequence: Synthetic oligonucleotide
augguuucaguuuaguggaagcauuua

SEQ ID NO: 69485 - RNA, 27 nt, Artificial Sequence
  Description of Artificial Sequence: Synthetic oligonucleotide
auauuuaacaaagucaaacuuucucac

SEQ ID NO: 69486 - RNA, 27 nt, Artificial Sequence
  Description of Artificial Sequence: Synthetic oligonucleotide
aacuuuuaauauacaguaguucuuuuc

SEQ ID NO: 69487 - RNA, 27 nt, Artificial Sequence
  Description of Artificial Sequence: Synthetic oligonucleotide
guuaagucaaaacccguauuucuaaag

SEQ ID NO: 69488 - RNA, 27 nt, Artificial Sequence
  Description of Artificial Sequence: Synthetic oligonucleotide
gugcugaguuugcuguacccauguuga

SEQ ID NO: 69489 - RNA, 27 nt, Artificial Sequence
  Description of Artificial Sequence: Synthetic oligonucleotide
ugaggucagcaucuucugugucuuuac

SEQ ID NO: 69490 - RNA, 27 nt, Artificial Sequence
  Description of Artificial Sequence: Synthetic oligonucleotide
gcgaucugaauaaaccucccuacuagc

SEQ ID NO: 69491 - RNA, 27 nt, Artificial Sequence
  Description of Artificial Sequence: Synthetic oligonucleotide
aucccagaacccugcugcagaaggcca

SEQ ID NO: 69492 - RNA, 27 nt, Artificial Sequence
  Description of Artificial Sequence: Synthetic oligonucleotide
cauaauuuccaauauguaccagaccuu

SEQ ID NO: 69493 - RNA, 27 nt, Artificial Sequence
  Description of Artificial Sequence: Synthetic oligonucleotide
cuagugcuuccaucggaaggacuaggu

SEQ ID NO: 69494 - RNA, 27 nt, Artificial Sequence
  Description of Artificial Sequence: Synthetic oligonucleotide
uccacauaaaaacaauauucacuggga

SEQ ID NO: 69495 - RNA, 27 nt, Artificial Sequence
  Description of Artificial Sequence: Synthetic oligonucleotide
ucuaccaauuccaacuugaauucauug

SEQ ID NO: 69496 - RNA, 27 nt, Artificial Sequence
  Description of Artificial Sequence: Synthetic oligonucleotide
ucuccaagucuaaaucuguguccugag

SEQ ID NO: 69497 - RNA, 27 nt, Artificial Sequence
  Description of Artificial Sequence: Synthetic oligonucleotide
uggaauacuguaacugugcuuugagga

SEQ ID NO: 69498 - RNA, 27 nt, Artificial Sequence
  Description of Artificial Sequence: Synthetic oligonucleotide
uuaauucaucagugguggcagugguag

SEQ ID NO: 69499 - RNA, 27 nt, Artificial Sequence
  Description of Artificial Sequence: Synthetic oligonucleotide
gugaugauguggcacuaguaguuucuu

SEQ ID NO: 69500 - RNA, 27 nt, Artificial Sequence
  Description of Artificial Sequence: Synthetic oligonucleotide
ucuguuuggugaggcuguccgacuuug

SEQ ID NO: 69501 - RNA, 27 nt, Artificial Sequence
  Description of Artificial Sequence: Synthetic oligonucleotide
ccaucauguuccauuuuucgcuuucuc

SEQ ID NO: 69502 - RNA, 27 nt, Artificial Sequence
  Description of Artificial Sequence: Synthetic oligonucleotide
gcagucuacaugcuaaaucagagggua

SEQ ID NO: 69503 - RNA, 27 nt, Artificial Sequence
  Description of Artificial Sequence: Synthetic oligonucleotide
cauaaauagauccuuaaauagcucaaa

SEQ ID NO: 69504 - RNA, 27 nt, Artificial Sequence
  Description of Artificial Sequence: Synthetic oligonucleotide
ugauaauagugcuuuuucaccuuuuuc

SEQ ID NO: 69505 - RNA, 27 nt, Artificial Sequence
  Description of Artificial Sequence: Synthetic oligonucleotide
gcagaacugauaauagugcuuuuucac

SEQ ID NO: 69506 - RNA, 27 nt, Artificial Sequence
  Description of Artificial Sequence: Synthetic oligonucleotide
guagguuuaaucuuucuuuucagccau

SEQ ID NO: 69507 - RNA, 27 nt, Artificial Sequence
  Description of Artificial Sequence: Synthetic oligonucleotide
agaaggauuuuauuauaaggguuuaau

SEQ ID NO: 69508 - RNA, 27 nt, Artificial Sequence
  Description of Artificial Sequence: Synthetic oligonucleotide
gucuacagcauuggcuaauaguaugaa

SEQ ID NO: 69509 - RNA, 27 nt, Artificial Sequence
  Description of Artificial Sequence: Synthetic oligonucleotide
cuauuccuaucaaaaugcuucugucua

SEQ ID NO: 69510 - RNA, 27 nt, Artificial Sequence
  Description of Artificial Sequence: Synthetic oligonucleotide
ucagggccauuaucuuauuugcucuau

SEQ ID NO: 69511 - RNA, 27 nt, Artificial Sequence
  Description of Artificial Sequence: Synthetic oligonucleotide
ugcuugaggaagagaaaaauguugguc

SEQ ID NO: 69512 - RNA, 27 nt, Artificial Sequence
  Description of Artificial Sequence: Synthetic oligonucleotide
ugggcugaacuuuucucauacuuaaag

SEQ ID NO: 69513 - RNA, 27 nt, Artificial Sequence
  Description of Artificial Sequence: Synthetic oligonucleotide
gguucagcagccaucuuuauuccugcg

SEQ ID NO: 69514 - RNA, 27 nt, Artificial Sequence
  Description of Artificial Sequence: Synthetic oligonucleotide
ugaagagaacuuggucauucaaauuuc

SEQ ID NO: 69515 - RNA, 27 nt, Artificial Sequence
  Description of Artificial Sequence: Synthetic oligonucleotide
cucuaggcuggcuaucuuuauacauac

SEQ ID NO: 69516 - RNA, 27 nt, Artificial Sequence
  Description of Artificial Sequence: Synthetic oligonucleotide
acacuucacagagauaguuacagccau

SEQ ID NO: 69517 - RNA, 27 nt, Artificial Sequence
  Description of Artificial Sequence: Synthetic oligonucleotide
uugaaauuuucucacacuucacagaga

SEQ ID NO: 69518 - RNA, 27 nt, Artificial Sequence
  Description of Artificial Sequence: Synthetic oligonucleotide
ucaggaggauucauuuccuuaaaggaa

SEQ ID NO: 69519 - RNA, 27 nt, Artificial Sequence
  Description of Artificial Sequence: Synthetic oligonucleotide
auaugaugucacuuuuuguauccuuga

SEQ ID NO: 69520 - RNA, 27 nt, Artificial Sequence
  Description of Artificial Sequence: Synthetic oligonucleotide
uaugaugaagauucaaauugcaucuua

SEQ ID NO: 69521 - RNA, 27 nt, Artificial Sequence
  Description of Artificial Sequence: Synthetic oligonucleotide
uuaauagcuagucuucguuuugaacag

SEQ ID NO: 69522 - RNA, 27 nt, Artificial Sequence
  Description of Artificial Sequence: Synthetic oligonucleotide
auuuuuaguagagaugagguuucacca

SEQ ID NO: 69523 - RNA, 27 nt, Artificial Sequence
  Description of Artificial Sequence: Synthetic oligonucleotide
aggcgagauagagcuucucuuucguuc

SEQ ID NO: 69524 - RNA, 27 nt, Artificial Sequence
  Description of Artificial Sequence: Synthetic oligonucleotide
aacuggaccgaaggcgcuuguggagaa

SEQ ID NO: 69525 - RNA, 27 nt, Artificial Sequence
  Description of Artificial Sequence: Synthetic oligonucleotide
gcggcuacaucuuuggaaucuucuccu

SEQ ID NO: 69526 - RNA, 27 nt, Artificial Sequence
  Description of Artificial Sequence: Synthetic oligonucleotide
caagucuccucauugaauccagauugg

SEQ ID NO: 69527 - RNA, 27 nt, Artificial Sequence
  Description of Artificial Sequence: Synthetic oligonucleotide
uccucacuacucucaaaucuguucugg

SEQ ID NO: 69528 - RNA, 27 nt, Artificial Sequence
  Description of Artificial Sequence: Synthetic oligonucleotide
uuuguacucaucugcacagcucuggcu

SEQ ID NO: 69529 - RNA, 27 nt, Artificial Sequence
  Description of Artificial Sequence: Synthetic oligonucleotide
gcccauuaacaacaacaaucugaggug

SEQ ID NO: 69530 - RNA, 27 nt, Artificial Sequence
  Description of Artificial Sequence: Synthetic oligonucleotide
aauaaauuaaaaauaauuaaaauagug

SEQ ID NO: 69531 - RNA, 27 nt, Artificial Sequence
  Description of Artificial Sequence: Synthetic oligonucleotide
cauauuuaaauauuaauaaauuaaaaa

SEQ ID NO: 69532 - RNA, 27 nt, Artificial Sequence
  Description of Artificial Sequence: Synthetic oligonucleotide
gaaacaaaggauauucaaacugcauag

SEQ ID NO: 69533 - RNA, 27 nt, Artificial Sequence
  Description of Artificial Sequence: Synthetic oligonucleotide
caaacacuuagacgccagcagcauggg

SEQ ID NO: 69534 - RNA, 27 nt, Artificial Sequence
  Description of Artificial Sequence: Synthetic oligonucleotide
uuugucacaggugaaaugcacaucuga

SEQ ID NO: 69535 - RNA, 27 nt, Artificial Sequence
  Description of Artificial Sequence: Synthetic oligonucleotide
uaauucagccuggcacagguuuugauc

SEQ ID NO: 69536 - RNA, 27 nt, Artificial Sequence
  Description of Artificial Sequence: Synthetic oligonucleotide
auuguaagaaugacuacccacauucac

SEQ ID NO: 69537 - RNA, 27 nt, Artificial Sequence
  Description of Artificial Sequence: Synthetic oligonucleotide
caauuguaagaaugacuacccacauuc

SEQ ID NO: 69538 - RNA, 27 nt, Artificial Sequence
  Description of Artificial Sequence: Synthetic oligonucleotide
guacacucucugaugcucauuuucaua

SEQ ID NO: 69539 - RNA, 27 nt, Artificial Sequence
  Description of Artificial Sequence: Synthetic oligonucleotide
cugcugaguucuacaugaaaagcaaau

SEQ ID NO: 69540 - RNA, 27 nt, Artificial Sequence
  Description of Artificial Sequence: Synthetic oligonucleotide
uacugaaaauaaauauagaaauacaac

SEQ ID NO: 69541 - RNA, 27 nt, Artificial Sequence
  Description of Artificial Sequence: Synthetic oligonucleotide
uuccauuuaagaaacauuaaucaaaac

SEQ ID NO: 69542 - RNA, 27 nt, Artificial Sequence
  Description of Artificial Sequence: Synthetic oligonucleotide
acaauuuuaggcacuauacacguuguu

SEQ ID NO: 69543 - RNA, 27 nt, Artificial Sequence
  Description of Artificial Sequence: Synthetic oligonucleotide
ccagauguuaguagccaaggauauggu

SEQ ID NO: 69544 - RNA, 27 nt, Artificial Sequence
  Description of Artificial Sequence: Synthetic oligonucleotide
agcucacagucuccagauguuaguagc

SEQ ID NO: 69545 - RNA, 27 nt, Artificial Sequence
  Description of Artificial Sequence: Synthetic oligonucleotide
auuaauaaaaagcacacaacuuauggc

SEQ ID NO: 69546 - RNA, 27 nt, Artificial Sequence
  Description of Artificial Sequence: Synthetic oligonucleotide
aauguaagaagagccaaaaugaugcau

SEQ ID NO: 69547 - RNA, 27 nt, Artificial Sequence
  Description of Artificial Sequence: Synthetic oligonucleotide
acauuuuuacaaauguaagaagagcca

SEQ ID NO: 69548 - RNA, 27 nt, Artificial Sequence
  Description of Artificial Sequence: Synthetic oligonucleotide
aauaugaauuaagaugaccuaaucugu

SEQ ID NO: 69549 - RNA, 27 nt, Artificial Sequence
  Description of Artificial Sequence: Synthetic oligonucleotide
ucaugauuaguucuuucaauuccaucc

SEQ ID NO: 69550 - RNA, 27 nt, Artificial Sequence
  Description of Artificial Sequence: Synthetic oligonucleotide
cccaagagcagaaggaaugagugugca

SEQ ID NO: 69551 - RNA, 27 nt, Artificial Sequence
  Description of Artificial Sequence: Synthetic oligonucleotide
cucaaagcuacugguuaccucuacacc

SEQ ID NO: 69552 - RNA, 27 nt, Artificial Sequence
  Description of Artificial Sequence: Synthetic oligonucleotide
ugaaauauuacguggcaugugguuggg

SEQ ID NO: 69553 - RNA, 27 nt, Artificial Sequence
  Description of Artificial Sequence: Synthetic oligonucleotide
agugaagagaauaacuuguuuccgaag

SEQ ID NO: 69554 - RNA, 27 nt, Artificial Sequence
  Description of Artificial Sequence: Synthetic oligonucleotide
uuucuuagcauuaguuauugggaguga

SEQ ID NO: 69555 - RNA, 27 nt, Artificial Sequence
  Description of Artificial Sequence: Synthetic oligonucleotide
uugauuuucagcauuucuuagcauuag

SEQ ID NO: 69556 - RNA, 27 nt, Artificial Sequence
  Description of Artificial Sequence: Synthetic oligonucleotide
aaaguaaucauauuuagagaaagacag

SEQ ID NO: 69557 - RNA, 27 nt, Artificial Sequence
  Description of Artificial Sequence: Synthetic oligonucleotide
uguagaacaaaaugccugaaauucagc

SEQ ID NO: 69558 - RNA, 27 nt, Artificial Sequence
  Description of Artificial Sequence: Synthetic oligonucleotide
gagagucccgggugagagggaaucgcc

SEQ ID NO: 69559 - RNA, 27 nt, Artificial Sequence
  Description of Artificial Sequence: Synthetic oligonucleotide
cuuuacuuuaaagguucacuuuccuug

SEQ ID NO: 69560 - RNA, 27 nt, Artificial Sequence
  Description of Artificial Sequence: Synthetic oligonucleotide
ccaggcuuccagagcaugcagccuccu

SEQ ID NO: 69561 - RNA, 27 nt, Artificial Sequence
  Description of Artificial Sequence: Synthetic oligonucleotide
cucucuuuuguuuucuguucagagaaa

SEQ ID NO: 69562 - RNA, 27 nt, Artificial Sequence
  Description of Artificial Sequence: Synthetic oligonucleotide
cggcauaacugauuacagccaaguuca

SEQ ID NO: 69563 - RNA, 27 nt, Artificial Sequence
  Description of Artificial Sequence: Synthetic oligonucleotide
uggacuucuuuuaauuuuggcuucuuc

SEQ ID NO: 69564 - RNA, 27 nt, Artificial Sequence
  Description of Artificial Sequence: Synthetic oligonucleotide
uaaccucaccuggacuucuuuuaauuu

SEQ ID NO: 69565 - RNA, 27 nt, Artificial Sequence
  Description of Artificial Sequence: Synthetic oligonucleotide
guccucuucccgauaauccggauucag

SEQ ID NO: 69566 - RNA, 27 nt, Artificial Sequence
  Description of Artificial Sequence: Synthetic oligonucleotide
acaauacuugcuuugaugucacauuaa

SEQ ID NO: 69567 - RNA, 27 nt, Artificial Sequence
  Description of Artificial Sequence: Synthetic oligonucleotide
gagugcuacaauacuugcuuugauguc

SEQ ID NO: 69568 - RNA, 27 nt, Artificial Sequence
  Description of Artificial Sequence: Synthetic oligonucleotide
auuugugguuuuguuuucucucucucu

SEQ ID NO: 69569 - RNA, 27 nt, Artificial Sequence
  Description of Artificial Sequence: Synthetic oligonucleotide
uguaugggcuuaaauacuacagcgagg

SEQ ID NO: 69570 - RNA, 27 nt, Artificial Sequence
  Description of Artificial Sequence: Synthetic oligonucleotide
cuguaugggcuuaaauacuacagcgag

SEQ ID NO: 69571 - RNA, 27 nt, Artificial Sequence
  Description of Artificial Sequence: Synthetic oligonucleotide
ggaagguuucuguaugggcuuaaauac

SEQ ID NO: 69572 - RNA, 27 nt, Artificial Sequence
  Description of Artificial Sequence: Synthetic oligonucleotide
guagguauaccauguuuauuuuaauac

SEQ ID NO: 69573 - RNA, 27 nt, Artificial Sequence
  Description of Artificial Sequence: Synthetic oligonucleotide
uccgaaaacuggccgaucagaacagcc

SEQ ID NO: 69574 - RNA, 27 nt, Artificial Sequence
  Description of Artificial Sequence: Synthetic oligonucleotide
cccuguuccaaaguucaaauuauuugu

SEQ ID NO: 69575 - RNA, 27 nt, Artificial Sequence
  Description of Artificial Sequence: Synthetic oligonucleotide
acuggaaaguuaaauuaaggucgcaau

SEQ ID NO: 69576 - RNA, 27 nt, Artificial Sequence
  Description of Artificial Sequence: Synthetic oligonucleotide
caaaaccaaacuuuagcuuucucagcc

SEQ ID NO: 69577 - RNA, 27 nt, Artificial Sequence
  Description of Artificial Sequence: Synthetic oligonucleotide
uacagugggaaguagcaucuuuacuuu

SEQ ID NO: 69578 - RNA, 27 nt, Artificial Sequence
  Description of Artificial Sequence: Synthetic oligonucleotide
ucauaugguaucagcaauuaagcagua

SEQ ID NO: 69579 - RNA, 27 nt, Artificial Sequence
  Description of Artificial Sequence: Synthetic oligonucleotide
cagcccauguuucauucauaugguauc

SEQ ID NO: 69580 - RNA, 27 nt, Artificial Sequence
  Description of Artificial Sequence: Synthetic oligonucleotide
uaugaaaaaguuggauaagaaaguugg

SEQ ID NO: 69581 - RNA, 27 nt, Artificial Sequence
  Description of Artificial Sequence: Synthetic oligonucleotide
uccggccucaugaugucaugcaaggcu

SEQ ID NO: 69582 - RNA, 27 nt, Artificial Sequence
  Description of Artificial Sequence: Synthetic oligonucleotide
acaaaugcagucauauacaaauucagg

SEQ ID NO: 69583 - RNA, 27 nt, Artificial Sequence
  Description of Artificial Sequence: Synthetic oligonucleotide
gguaguaaacauucuacuaggauucuu

SEQ ID NO: 69584 - RNA, 27 nt, Artificial Sequence
  Description of Artificial Sequence: Synthetic oligonucleotide
uuucaucaaaaaauucuucccuuucug

SEQ ID NO: 69585 - RNA, 27 nt, Artificial Sequence
  Description of Artificial Sequence: Synthetic oligonucleotide
aaauucacacacuggcaugccgauagc

SEQ ID NO: 69586 - RNA, 27 nt, Artificial Sequence
  Description of Artificial Sequence: Synthetic oligonucleotide
acauacauugcucuacuaugaggugaa

SEQ ID NO: 69587 - RNA, 27 nt, Artificial Sequence
  Description of Artificial Sequence: Synthetic oligonucleotide
uauauaugugcuuuggcaauucuggug

SEQ ID NO: 69588 - RNA, 27 nt, Artificial Sequence
  Description of Artificial Sequence: Synthetic oligonucleotide
ggagaaacuauuacccagaucaccacu

SEQ ID NO: 69589 - RNA, 27 nt, Artificial Sequence
  Description of Artificial Sequence: Synthetic oligonucleotide
auuuggagaaacuauuacccagaucac

SEQ ID NO: 69590 - RNA, 27 nt, Artificial Sequence
  Description of Artificial Sequence: Synthetic oligonucleotide
uuucuaggaaguauucaucacauccac

SEQ ID NO: 69591 - RNA, 27 nt, Artificial Sequence
  Description of Artificial Sequence: Synthetic oligonucleotide
cauauaugguguagcuguggaaaugcg

SEQ ID NO: 69592 - RNA, 27 nt, Artificial Sequence
  Description of Artificial Sequence: Synthetic oligonucleotide
cuccauucauauaugguguagcugugg

SEQ ID NO: 69593 - RNA, 27 nt, Artificial Sequence
  Description of Artificial Sequence: Synthetic oligonucleotide
aucuucuucucguguaagaacugcagc

SEQ ID NO: 69594 - RNA, 27 nt, Artificial Sequence
  Description of Artificial Sequence: Synthetic oligonucleotide
ucccuguaaaugaucuucuucucgugu

SEQ ID NO: 69595 - RNA, 27 nt, Artificial Sequence
  Description of Artificial Sequence: Synthetic oligonucleotide
gucccuguaaaugaucuucuucucgug

SEQ ID NO: 69596 - RNA, 27 nt, Artificial Sequence
  Description of Artificial Sequence: Synthetic oligonucleotide
ucaggucccuguaaaugaucuucuucu

SEQ ID NO: 69597 - RNA, 27 nt, Artificial Sequence
  Description of Artificial Sequence: Synthetic oligonucleotide
gaugcagucaaacaccucuuccucugu

SEQ ID NO: 69598 - RNA, 27 nt, Artificial Sequence
  Description of Artificial Sequence: Synthetic oligonucleotide
cgaugcagucaaacaccucuuccucug

SEQ ID NO: 69599 - RNA, 27 nt, Artificial Sequence
  Description of Artificial Sequence: Synthetic oligonucleotide
cccugugaacucgcccucaaaguagcg

SEQ ID NO: 69600 - RNA, 27 nt, Artificial Sequence
  Description of Artificial Sequence: Synthetic oligonucleotide
ggacagaggugccaggagaugcccuca

SEQ ID NO: 69601 - RNA, 27 nt, Artificial Sequence
  Description of Artificial Sequence: Synthetic oligonucleotide
uuaaaaagacaaaccauaucacuccuu

SEQ ID NO: 69602 - RNA, 27 nt, Artificial Sequence
  Description of Artificial Sequence: Synthetic oligonucleotide
cuuaaaaagacaaaccauaucacuccu

SEQ ID NO: 69603 - RNA, 27 nt, Artificial Sequence
  Description of Artificial Sequence: Synthetic oligonucleotide
gacaaccuuuaggaucuuuacugcaac

SEQ ID NO: 69604 - RNA, 27 nt, Artificial Sequence
  Description of Artificial Sequence: Synthetic oligonucleotide
gucgacaaccuuuaggaucuuuacugc

SEQ ID NO: 69605 - RNA, 27 nt, Artificial Sequence
  Description of Artificial Sequence: Synthetic oligonucleotide
acaauugccagguuguccuuugucaug

SEQ ID NO: 69606 - RNA, 27 nt, Artificial Sequence
  Description of Artificial Sequence: Synthetic oligonucleotide
ccucgcaccacugggucacaauugcca

SEQ ID NO: 69607 - RNA, 27 nt, Artificial Sequence
  Description of Artificial Sequence: Synthetic oligonucleotide
auuucaugucucuauggaugauguucu

SEQ ID NO: 69608 - RNA, 27 nt, Artificial Sequence
  Description of Artificial Sequence: Synthetic oligonucleotide
uggagaaauauauuguuggauuucaug

SEQ ID NO: 69609 - RNA, 27 nt, Artificial Sequence
  Description of Artificial Sequence: Synthetic oligonucleotide
agccuucauggagaaauauauuguugg

SEQ ID NO: 69610 - RNA, 27 nt, Artificial Sequence
  Description of Artificial Sequence: Synthetic oligonucleotide
accacuccagcgugacuuuacuguugc

SEQ ID NO: 69611 - RNA, 27 nt, Artificial Sequence
  Description of Artificial Sequence: Synthetic oligonucleotide
ccucucuuccuuuacuuucuucacaca

SEQ ID NO: 69612 - RNA, 27 nt, Artificial Sequence
  Description of Artificial Sequence: Synthetic oligonucleotide
gcccgaugcaaggauggcucggaagcg

SEQ ID NO: 69613 - RNA, 27 nt, Artificial Sequence
  Description of Artificial Sequence: Synthetic oligonucleotide
cacaguaggauauucaaccuccauuuc

SEQ ID NO: 69614 - RNA, 27 nt, Artificial Sequence
  Description of Artificial Sequence: Synthetic oligonucleotide
uuacacaguaggauauucaaccuccau

SEQ ID NO: 69615 - RNA, 27 nt, Artificial Sequence
  Description of Artificial Sequence: Synthetic oligonucleotide
uacacuacaagggaaaacucaaaaucu

SEQ ID NO: 69616 - RNA, 27 nt, Artificial Sequence
  Description of Artificial Sequence: Synthetic oligonucleotide
caaucaacaaagaacaaacaggauaaa

SEQ ID NO: 69617 - RNA, 27 nt, Artificial Sequence
  Description of Artificial Sequence: Synthetic oligonucleotide
uuucaaucaacaaagaacaaacaggau

SEQ ID NO: 69618 - RNA, 27 nt, Artificial Sequence
  Description of Artificial Sequence: Synthetic oligonucleotide
auggaagaaaaagaaggcuguagagaa

SEQ ID NO: 69619 - RNA, 27 nt, Artificial Sequence
  Description of Artificial Sequence: Synthetic oligonucleotide
uagaaggaagauuagcuauggaagaaa

SEQ ID NO: 69620 - RNA, 27 nt, Artificial Sequence
  Description of Artificial Sequence: Synthetic oligonucleotide
augaagcauucaacaggaagauuauuu

SEQ ID NO: 69621 - RNA, 27 nt, Artificial Sequence
  Description of Artificial Sequence: Synthetic oligonucleotide
caugaagcauucaacaggaagauuauu

SEQ ID NO: 69622 - RNA, 27 nt, Artificial Sequence
  Description of Artificial Sequence: Synthetic oligonucleotide
ucaaaguagaauucaagucaugaagca

SEQ ID NO: 69623 - RNA, 27 nt, Artificial Sequence
  Description of Artificial Sequence: Synthetic oligonucleotide
gucuguaguugcuucucucccucuuag

SEQ ID NO: 69624 - RNA, 27 nt, Artificial Sequence
  Description of Artificial Sequence: Synthetic oligonucleotide
guugaccuuggucugguaggagacggc

SEQ ID NO: 69625 - RNA, 27 nt, Artificial Sequence
  Description of Artificial Sequence: Synthetic oligonucleotide
gucgagauagucgggccgauugaucuc

SEQ ID NO: 69626 - RNA, 27 nt, Artificial Sequence
  Description of Artificial Sequence: Synthetic oligonucleotide
guuugggaagguuggauguucguccuc

SEQ ID NO: 69627 - RNA, 27 nt, Artificial Sequence
  Description of Artificial Sequence: Synthetic oligonucleotide
aguucuaagcuuggguuccgacccuaa

SEQ ID NO: 69628 - RNA, 27 nt, Artificial Sequence
  Description of Artificial Sequence: Synthetic oligonucleotide
uuaaaguucuaagcuuggguuccgacc

SEQ ID NO: 69629 - RNA, 27 nt, Artificial Sequence
  Description of Artificial Sequence: Synthetic oligonucleotide
guugcuuaaaguucuaagcuuggguuc

SEQ ID NO: 69630 - RNA, 27 nt, Artificial Sequence
  Description of Artificial Sequence: Synthetic oligonucleotide
gugguggucuuguugcuuaaaguucua

SEQ ID NO: 69631 - RNA, 27 nt, Artificial Sequence
  Description of Artificial Sequence: Synthetic oligonucleotide
acuuuauuucucgccacugaauaguag

SEQ ID NO: 69632 - RNA, 27 nt, Artificial Sequence
  Description of Artificial Sequence: Synthetic oligonucleotide
aacuuuauuucucgccacugaauagua

SEQ ID NO: 69633 - RNA, 27 nt, Artificial Sequence
  Description of Artificial Sequence: Synthetic oligonucleotide
ggaucauuuccuguuaucuguguuugu

SEQ ID NO: 69634 - RNA, 27 nt, Artificial Sequence
  Description of Artificial Sequence: Synthetic oligonucleotide
guuucauuucuucucuuuucuuaaggc

SEQ ID NO: 69635 - RNA, 27 nt, Artificial Sequence
  Description of Artificial Sequence: Synthetic oligonucleotide
ggaggauggaaacacacuccuucaguu

SEQ ID NO: 69636 - RNA, 27 nt, Artificial Sequence
  Description of Artificial Sequence: Synthetic oligonucleotide
ucaaagauuuucagucccgcggugaca

SEQ ID NO: 69637 - RNA, 27 nt, Artificial Sequence
  Description of Artificial Sequence: Synthetic oligonucleotide
ccugaacggcacgcuuauuucugcugu

SEQ ID NO: 69638 - RNA, 27 nt, Artificial Sequence
  Description of Artificial Sequence: Synthetic oligonucleotide
cuucuggacccugaacggcacgcuuau

SEQ ID NO: 69639 - RNA, 27 nt, Artificial Sequence
  Description of Artificial Sequence: Synthetic oligonucleotide
caagcagucuugagugacuguuucuuc

SEQ ID NO: 69640 - RNA, 27 nt, Artificial Sequence
  Description of Artificial Sequence: Synthetic oligonucleotide
ccaaagacauggaccuucuuccucuga

SEQ ID NO: 69641 - RNA, 27 nt, Artificial Sequence
  Description of Artificial Sequence: Synthetic oligonucleotide
guguuucaggcauauuuugaauacauc

SEQ ID NO: 69642 - RNA, 27 nt, Artificial Sequence
  Description of Artificial Sequence: Synthetic oligonucleotide
gagguacagagaaagggaggaaaauag

SEQ ID NO: 69643 - RNA, 27 nt, Artificial Sequence
  Description of Artificial Sequence: Synthetic oligonucleotide
ucuugucuugcucuaucuuucuuuggu

SEQ ID NO: 69644 - RNA, 27 nt, Artificial Sequence
  Description of Artificial Sequence: Synthetic oligonucleotide
uuucuugucuugcucuaucuuucuuug

SEQ ID NO: 69645 - RNA, 27 nt, Artificial Sequence
  Description of Artificial Sequence: Synthetic oligonucleotide
ggaucuuguacaaacaaaugcuuucuc

SEQ ID NO: 69646 - RNA, 27 nt, Artificial Sequence
  Description of Artificial Sequence: Synthetic oligonucleotide
ucugcaaguacguucguuuaacucaag

SEQ ID NO: 69647 - RNA, 27 nt, Artificial Sequence
  Description of Artificial Sequence: Synthetic oligonucleotide
ucuguaucgaucguucuguaucagucu

SEQ ID NO: 69648 - RNA, 27 nt, Artificial Sequence
  Description of Artificial Sequence: Synthetic oligonucleotide
auuuauuuuuauauauauauaauauau

SEQ ID NO: 69649 - RNA, 27 nt, Artificial Sequence
  Description of Artificial Sequence: Synthetic oligonucleotide
auauuuauuuuuauauauauauaauau

SEQ ID NO: 69650 - RNA, 27 nt, Artificial Sequence
  Description of Artificial Sequence: Synthetic oligonucleotide
cacagcagucaaauacauccagugaag

SEQ ID NO: 69651 - RNA, 27 nt, Artificial Sequence
  Description of Artificial Sequence: Synthetic oligonucleotide
gucucucaucuccuccucuucccuguc

SEQ ID NO: 69652 - RNA, 27 nt, Artificial Sequence
  Description of Artificial Sequence: Synthetic oligonucleotide
ccaagugggacaaaaaaaagaucaugc

SEQ ID NO: 69653 - RNA, 14 nt, Artificial Sequence
  Description of Artificial Sequence: Synthetic oligonucleotide
guauuuugaugagg

SEQ ID NO: 69654 - RNA, 12 nt, Artificial Sequence
  Description of Artificial Sequence: Synthetic oligonucleotide
ggcccagaugau

SEQ ID NO: 69655 - RNA, 14 nt, Artificial Sequence
  Description of Artificial Sequence: Synthetic oligonucleotide
gggaagaaaacuau

SEQ ID NO: 69656 - RNA, 15 nt, Artificial Sequence
  Description of Artificial Sequence: Synthetic oligonucleotide
guuuuaauuuauuuc

SEQ ID NO: 69657 - RNA, 12 nt, Artificial Sequence
  Description of Artificial Sequence: Synthetic oligonucleotide
acguagggaaau

SEQ ID NO: 69658 - RNA, 12 nt, Artificial Sequence
  Description of Artificial Sequence: Synthetic oligonucleotide
ccaggguuuacc

SEQ ID NO: 69659 - RNA, 11 nt, Artificial Sequence
  Description of Artificial Sequence: Synthetic oligonucleotide
agcaagguuua

SEQ ID NO: 69660 - RNA, 12 nt, Artificial Sequence
  Description of Artificial Sequence: Synthetic oligonucleotide
uguauuauguug

SEQ ID NO: 69661 - RNA, 15 nt, Artificial Sequence
  Description of Artificial Sequence: Synthetic oligonucleotide
uuuuaaucuuuguga

SEQ ID NO: 69662 - RNA, 14 nt, Artificial Sequence
  Description of Artificial Sequence: Synthetic oligonucleotide
uuaaucuuugugac

SEQ ID NO: 69663 - RNA, 13 nt, Artificial Sequence
  Description of Artificial Sequence: Synthetic oligonucleotide
gcugcuuaugucu

SEQ ID NO: 69664 - RNA, 14 nt, Artificial Sequence
  Description of Artificial Sequence: Synthetic oligonucleotide
aaguguuucagaag

SEQ ID NO: 69665 - RNA, 13 nt, Artificial Sequence
  Description of Artificial Sequence: Synthetic oligonucleotide
gaccaucaauaag

SEQ ID NO: 69666 - RNA, 13 nt, Artificial Sequence
  Description of Artificial Sequence: Synthetic oligonucleotide
ccaucaauaagga

SEQ ID NO: 69667 - RNA, 14 nt, Artificial Sequence
  Description of Artificial Sequence: Synthetic oligonucleotide
ucaauaaggaagaa

SEQ ID NO: 69668 - RNA, 14 nt, Artificial Sequence
  Description of Artificial Sequence: Synthetic oligonucleotide
aauaaggaagaagc

SEQ ID NO: 69669 - RNA, 13 nt, Artificial Sequence
  Description of Artificial Sequence: Synthetic oligonucleotide
aggaagaagcccu

SEQ ID NO: 69670 - RNA, 13 nt, Artificial Sequence
  Description of Artificial Sequence: Synthetic oligonucleotide
gcauaacuaaagg

SEQ ID NO: 69671 - RNA, 14 nt, Artificial Sequence
  Description of Artificial Sequence: Synthetic oligonucleotide
cauaacuaaaggug

SEQ ID NO: 69672 - RNA, 12 nt, Artificial Sequence
  Description of Artificial Sequence: Synthetic oligonucleotide
cuacaucacgcc

SEQ ID NO: 69673 - RNA, 12 nt, Artificial Sequence
  Description of Artificial Sequence: Synthetic oligonucleotide
acuggauuuaag

SEQ ID NO: 69674 - RNA, 12 nt, Artificial Sequence
  Description of Artificial Sequence: Synthetic oligonucleotide
cuggauuuaagc

SEQ ID NO: 69675 - RNA, 13 nt, Artificial Sequence
  Description of Artificial Sequence: Synthetic oligonucleotide
gauuuaagcagag

SEQ ID NO: 69676 - RNA, 13 nt, Artificial Sequence
  Description of Artificial Sequence: Synthetic oligonucleotide
auuuaagcagagu

SEQ ID NO: 69677 - RNA, 13 nt, Artificial Sequence
  Description of Artificial Sequence: Synthetic oligonucleotide
uuaagcagaguuc

SEQ ID NO: 69678 - RNA, 13 nt, Artificial Sequence
  Description of Artificial Sequence: Synthetic oligonucleotide
uaagcagaguuca

SEQ ID NO: 69679 - RNA, 14 nt, Artificial Sequence
  Description of Artificial Sequence: Synthetic oligonucleotide
agcagaguucaaaa

SEQ ID NO: 69680 - RNA, 12 nt, Artificial Sequence
  Description of Artificial Sequence: Synthetic oligonucleotide
cucagggucuga

SEQ ID NO: 69681 - RNA, 13 nt, Artificial Sequence
  Description of Artificial Sequence: Synthetic oligonucleotide
caagcaacuacau

SEQ ID NO: 69682 - RNA, 12 nt, Artificial Sequence
  Description of Artificial Sequence: Synthetic oligonucleotide
aucaauggcagc

SEQ ID NO: 69683 - RNA, 11 nt, Artificial Sequence
  Description of Artificial Sequence: Synthetic oligonucleotide
uuccagcccac

SEQ ID NO: 69684 - RNA, 12 nt, Artificial Sequence
  Description of Artificial Sequence: Synthetic oligonucleotide
cagcugagaaug

SEQ ID NO: 69685 - RNA, 13 nt, Artificial Sequence
  Description of Artificial Sequence: Synthetic oligonucleotide
aacguaucuccua

SEQ ID NO: 69686 - RNA, 14 nt, Artificial Sequence
  Description of Artificial Sequence: Synthetic oligonucleotide
ccuaaaauaauuuc

SEQ ID NO: 69687 - RNA, 13 nt, Artificial Sequence
  Description of Artificial Sequence: Synthetic oligonucleotide
uggaagauucagc

SEQ ID NO: 69688 - RNA, 12 nt, Artificial Sequence
  Description of Artificial Sequence: Synthetic oligonucleotide
uuaaacucuccu

SEQ ID NO: 69689 - RNA, 12 nt, Artificial Sequence
  Description of Artificial Sequence: Synthetic oligonucleotide
cagccuacaguu

SEQ ID NO: 69690 - RNA, 13 nt, Artificial Sequence
  Description of Artificial Sequence: Synthetic oligonucleotide
guuauguucaguc

SEQ ID NO: 69691 - RNA, 13 nt, Artificial Sequence
  Description of Artificial Sequence: Synthetic oligonucleotide
cacauacaaaaug

SEQ ID NO: 69692 - RNA, 9 nt, Artificial Sequence
  Description of Artificial Sequence: Synthetic oligonucleotide
uccuuuugc

SEQ ID NO: 69693 - RNA, 12 nt, Artificial Sequence
  Description of Artificial Sequence: Synthetic oligonucleotide
ugaccugugaag

SEQ ID NO: 69694 - RNA, 12 nt, Artificial Sequence
  Description of Artificial Sequence: Synthetic oligonucleotide
cuaucucacaca

SEQ ID NO: 69695 - RNA, 13 nt, Artificial Sequence
  Description of Artificial Sequence: Synthetic oligonucleotide
uguccucaauugu

SEQ ID NO: 69696 - RNA, 12 nt, Artificial Sequence
  Description of Artificial Sequence: Synthetic oligonucleotide
aaaccguagcug

SEQ ID NO: 69697 - RNA, 12 nt, Artificial Sequence
  Description of Artificial Sequence: Synthetic oligonucleotide
uagcuggcaagc

SEQ ID NO: 69698 - RNA, 14 nt, Artificial Sequence
  Description of Artificial Sequence: Synthetic oligonucleotide
uuguaugguuaaaa

SEQ ID NO: 69699 - RNA, 14 nt, Artificial Sequence
  Description of Artificial Sequence: Synthetic oligonucleotide
ugguuaaaagaugg

SEQ ID NO: 69700 - RNA, 13 nt, Artificial Sequence
  Description of Artificial Sequence: Synthetic oligonucleotide
cagggaauuauac

SEQ ID NO: 69701 - RNA, 12 nt, Artificial Sequence
  Description of Artificial Sequence: Synthetic oligonucleotide
acaaucuugcug

SEQ ID NO: 69702 - RNA, 13 nt, Artificial Sequence
  Description of Artificial Sequence: Synthetic oligonucleotide
ccaauaaugaaga

SEQ ID NO: 69703 - RNA, 13 nt, Artificial Sequence
  Description of Artificial Sequence: Synthetic oligonucleotide
acuuuggauguuc

SEQ ID NO: 69704 - RNA, 12 nt, Artificial Sequence
  Description of Artificial Sequence: Synthetic oligonucleotide
aaugcuuccacu

SEQ ID NO: 69705 - RNA, 11 nt, Artificial Sequence
  Description of Artificial Sequence: Synthetic oligonucleotide
gagaaaguuug

SEQ ID NO: 69706 - RNA, 11 nt, Artificial Sequence
  Description of Artificial Sequence: Synthetic oligonucleotide
aaagaacuacu

SEQ ID NO: 69707 - RNA, 12 nt, Artificial Sequence
  Description of Artificial Sequence: Synthetic oligonucleotide
uuagaaauacgg

SEQ ID NO: 69708 - RNA, 12 nt, Artificial Sequence
  Description of Artificial Sequence: Synthetic oligonucleotide
aacauggguaca

SEQ ID NO: 69709 - RNA, 14 nt, Artificial Sequence
  Description of Artificial Sequence: Synthetic oligonucleotide
aaagacacagaaga

SEQ ID NO: 69710 - RNA, 11 nt, Artificial Sequence
  Description of Artificial Sequence: Synthetic oligonucleotide
uaguagggagg

SEQ ID NO: 69711 - RNA, 12 nt, Artificial Sequence
  Description of Artificial Sequence: Synthetic oligonucleotide
gccuucugcagc

SEQ ID NO: 69712 - RNA, 10 nt, Artificial Sequence
  Description of Artificial Sequence: Synthetic oligonucleotide
ggucugguac

SEQ ID NO: 69713 - RNA, 12 nt, Artificial Sequence
  Description of Artificial Sequence: Synthetic oligonucleotide
cuaguccuuccg

SEQ ID NO: 69714 - RNA, 12 nt, Artificial Sequence
  Description of Artificial Sequence: Synthetic oligonucleotide
ccagugaauauu

SEQ ID NO: 69715 - RNA, 13 nt, Artificial Sequence
  Description of Artificial Sequence: Synthetic oligonucleotide
augaauucaaguu

SEQ ID NO: 69716 - RNA, 12 nt, Artificial Sequence
  Description of Artificial Sequence: Synthetic oligonucleotide
caggacacagau

SEQ ID NO: 69717 - RNA, 12 nt, Artificial Sequence
  Description of Artificial Sequence: Synthetic oligonucleotide
cucaaagcacag

SEQ ID NO: 69718 - RNA, 10 nt, Artificial Sequence
  Description of Artificial Sequence: Synthetic oligonucleotide
accacugcca

SEQ ID NO: 69719 - RNA, 13 nt, Artificial Sequence
  Description of Artificial Sequence: Synthetic oligonucleotide
gaaacuacuagug

SEQ ID NO: 69720 - RNA, 12 nt, Artificial Sequence
  Description of Artificial Sequence: Synthetic oligonucleotide
aagucggacagc

SEQ ID NO: 69721 - RNA, 13 nt, Artificial Sequence
  Description of Artificial Sequence: Synthetic oligonucleotide
gaaagcgaaaaau

SEQ ID NO: 69722 - RNA, 13 nt, Artificial Sequence
  Description of Artificial Sequence: Synthetic oligonucleotide
cccucugauuuag

SEQ ID NO: 69723 - RNA, 12 nt, Artificial Sequence
  Description of Artificial Sequence: Synthetic oligonucleotide
ugagcuauuuaa

SEQ ID NO: 69724 - RNA, 13 nt, Artificial Sequence
  Description of Artificial Sequence: Synthetic oligonucleotide
aaaaggugaaaaa

SEQ ID NO: 69725 - RNA, 14 nt, Artificial Sequence
  Description of Artificial Sequence: Synthetic oligonucleotide
gaaaaagcacuauu

SEQ ID NO: 69726 - RNA, 12 nt, Artificial Sequence
  Description of Artificial Sequence: Synthetic oligonucleotide
ggcugaaaagaa

SEQ ID NO: 69727 - RNA, 12 nt, Artificial Sequence
  Description of Artificial Sequence: Synthetic oligonucleotide
uaaacccuuaua

SEQ ID NO: 69728 - RNA, 13 nt, Artificial Sequence
  Description of Artificial Sequence: Synthetic oligonucleotide
cauacuauuagcc

SEQ ID NO: 69729 - RNA, 12 nt, Artificial Sequence
  Description of Artificial Sequence: Synthetic oligonucleotide
gacagaagcauu

SEQ ID NO: 69730 - RNA, 14 nt, Artificial Sequence
  Description of Artificial Sequence: Synthetic oligonucleotide
agagcaaauaagau

SEQ ID NO: 69731 - RNA, 14 nt, Artificial Sequence
  Description of Artificial Sequence: Synthetic oligonucleotide
ccaacauuuuucuc

SEQ ID NO: 69732 - RNA, 15 nt, Artificial Sequence
  Description of Artificial Sequence: Synthetic oligonucleotide
uuaaguaugagaaaa

SEQ ID NO: 69733 - RNA, 14 nt, Artificial Sequence
  Description of Artificial Sequence: Synthetic oligonucleotide
caggaauaaagaug

SEQ ID NO: 69734 - RNA, 13 nt, Artificial Sequence
  Description of Artificial Sequence: Synthetic oligonucleotide
aauuugaaugacc

SEQ ID NO: 69735 - RNA, 14 nt, Artificial Sequence
  Description of Artificial Sequence: Synthetic oligonucleotide
auguauaaagauag

SEQ ID NO: 69736 - RNA, 12 nt, Artificial Sequence
  Description of Artificial Sequence: Synthetic oligonucleotide
ggcuguaacuau

SEQ ID NO: 69737 - RNA, 11 nt, Artificial Sequence
  Description of Artificial Sequence: Synthetic oligonucleotide
ucugugaagug

SEQ ID NO: 69738 - RNA, 14 nt, Artificial Sequence
  Description of Artificial Sequence: Synthetic oligonucleotide
ccuuuaaggaaaug

SEQ ID NO: 69739 - RNA, 13 nt, Artificial Sequence
  Description of Artificial Sequence: Synthetic oligonucleotide
aaggauacaaaaa

SEQ ID NO: 69740 - RNA, 12 nt, Artificial Sequence
  Description of Artificial Sequence: Synthetic oligonucleotide
agaugcaauuug

SEQ ID NO: 69741 - RNA, 12 nt, Artificial Sequence
  Description of Artificial Sequence: Synthetic oligonucleotide
guucaaaacgaa

SEQ ID NO: 69742 - RNA, 11 nt, Artificial Sequence
  Description of Artificial Sequence: Synthetic oligonucleotide
gugaaaccuca

SEQ ID NO: 69743 - RNA, 13 nt, Artificial Sequence
  Description of Artificial Sequence: Synthetic oligonucleotide
acgaaagagaagc

SEQ ID NO: 69744 - RNA, 12 nt, Artificial Sequence
  Description of Artificial Sequence: Synthetic oligonucleotide
cuccacaagcgc

SEQ ID NO: 69745 - RNA, 14 nt, Artificial Sequence
  Description of Artificial Sequence: Synthetic oligonucleotide
gagaagauuccaaa

SEQ ID NO: 69746 - RNA, 13 nt, Artificial Sequence
  Description of Artificial Sequence: Synthetic oligonucleotide
aaucuggauucaa

SEQ ID NO: 69747 - RNA, 13 nt, Artificial Sequence
  Description of Artificial Sequence: Synthetic oligonucleotide
agaacagauuuga

SEQ ID NO: 69748 - RNA, 11 nt, Artificial Sequence
  Description of Artificial Sequence: Synthetic oligonucleotide
ccagagcugug

SEQ ID NO: 69749 - RNA, 12 nt, Artificial Sequence
  Description of Artificial Sequence: Synthetic oligonucleotide
ccucagauuguu

SEQ ID NO: 69750 - RNA, 12 nt, Artificial Sequence
  Description of Artificial Sequence: Synthetic oligonucleotide
cuauuuuaauua

SEQ ID NO: 69751 - RNA, 13 nt, Artificial Sequence
  Description of Artificial Sequence: Synthetic oligonucleotide
uuuaauuuauuaa

SEQ ID NO: 69752 - RNA, 12 nt, Artificial Sequence
  Description of Artificial Sequence: Synthetic oligonucleotide
augcaguuugaa

SEQ ID NO: 69753 - RNA, 11 nt, Artificial Sequence
  Description of Artificial Sequence: Synthetic oligonucleotide
caugcugcugg

SEQ ID NO: 69754 - RNA, 13 nt, Artificial Sequence
  Description of Artificial Sequence: Synthetic oligonucleotide
agaugugcauuuc

SEQ ID NO: 69755 - RNA, 12 nt, Artificial Sequence
  Description of Artificial Sequence: Synthetic oligonucleotide
ucaaaaccugug

SEQ ID NO: 69756 - RNA, 11 nt, Artificial Sequence
  Description of Artificial Sequence: Synthetic oligonucleotide
gaaugugggua

SEQ ID NO: 69757 - RNA, 10 nt, Artificial Sequence
  Description of Artificial Sequence: Synthetic oligonucleotide
auguggguag

SEQ ID NO: 69758 - RNA, 13 nt, Artificial Sequence
  Description of Artificial Sequence: Synthetic oligonucleotide
ugaaaaugagcau

SEQ ID NO: 69759 - RNA, 13 nt, Artificial Sequence
  Description of Artificial Sequence: Synthetic oligonucleotide
uugcuuuucaugu

SEQ ID NO: 69760 - RNA, 12 nt, Artificial Sequence
  Description of Artificial Sequence: Synthetic oligonucleotide
uguauuucuaua

SEQ ID NO: 69761 - RNA, 13 nt, Artificial Sequence
  Description of Artificial Sequence: Synthetic oligonucleotide
uuugauuaauguu

SEQ ID NO: 69762 - RNA, 12 nt, Artificial Sequence
  Description of Artificial Sequence: Synthetic oligonucleotide
caacguguauag

SEQ ID NO: 69763 - RNA, 12 nt, Artificial Sequence
  Description of Artificial Sequence: Synthetic oligonucleotide
cauauccuuggc

SEQ ID NO: 69764 - RNA, 13 nt, Artificial Sequence
  Description of Artificial Sequence: Synthetic oligonucleotide
uacuaacaucugg

SEQ ID NO: 69765 - RNA, 11 nt, Artificial Sequence
  Description of Artificial Sequence: Synthetic oligonucleotide
cauaaguugug

SEQ ID NO: 69766 - RNA, 12 nt, Artificial Sequence
  Description of Artificial Sequence: Synthetic oligonucleotide
gcaucauuuugg

SEQ ID NO: 69767 - RNA, 10 nt, Artificial Sequence
  Description of Artificial Sequence: Synthetic oligonucleotide
gcucuucuua

SEQ ID NO: 69768 - RNA, 10 nt, Artificial Sequence
  Description of Artificial Sequence: Synthetic oligonucleotide
agauuagguc

SEQ ID NO: 69769 - RNA, 12 nt, Artificial Sequence
  Description of Artificial Sequence: Synthetic oligonucleotide
auggaauugaaa

SEQ ID NO: 69770 - RNA, 13 nt, Artificial Sequence
  Description of Artificial Sequence: Synthetic oligonucleotide
cacacucauuccu

SEQ ID NO: 69771 - RNA, 12 nt, Artificial Sequence
  Description of Artificial Sequence: Synthetic oligonucleotide
uguagagguaac

SEQ ID NO: 69772 - RNA, 11 nt, Artificial Sequence
  Description of Artificial Sequence: Synthetic oligonucleotide
caaccacaugc

SEQ ID NO: 69773 - RNA, 12 nt, Artificial Sequence
  Description of Artificial Sequence: Synthetic oligonucleotide
ucggaaacaagu

SEQ ID NO: 69774 - RNA, 11 nt, Artificial Sequence
  Description of Artificial Sequence: Synthetic oligonucleotide
acucccaauaa

SEQ ID NO: 69775 - RNA, 13 nt, Artificial Sequence
  Description of Artificial Sequence: Synthetic oligonucleotide
aaugcuaagaaau

SEQ ID NO: 69776 - RNA, 11 nt, Artificial Sequence
  Description of Artificial Sequence: Synthetic oligonucleotide
gucuuucucua

SEQ ID NO: 69777 - RNA, 11 nt, Artificial Sequence
  Description of Artificial Sequence: Synthetic oligonucleotide
ugaauuucagg

SEQ ID NO: 69778 - RNA, 13 nt, Artificial Sequence
  Description of Artificial Sequence: Synthetic oligonucleotide
cgauucccucuca

SEQ ID NO: 69779 - RNA, 11 nt, Artificial Sequence
  Description of Artificial Sequence: Synthetic oligonucleotide
aggaaagugaa

SEQ ID NO: 69780 - RNA, 12 nt, Artificial Sequence
  Description of Artificial Sequence: Synthetic oligonucleotide
gaggcugcaugc

SEQ ID NO: 69781 - RNA, 11 nt, Artificial Sequence
  Description of Artificial Sequence: Synthetic oligonucleotide
ucucugaacag

SEQ ID NO: 69782 - RNA, 12 nt, Artificial Sequence
  Description of Artificial Sequence: Synthetic oligonucleotide
aacuuggcugua

SEQ ID NO: 69783 - RNA, 12 nt, Artificial Sequence
  Description of Artificial Sequence: Synthetic oligonucleotide
agaagccaaaau

SEQ ID NO: 69784 - RNA, 14 nt, Artificial Sequence
  Description of Artificial Sequence: Synthetic oligonucleotide
auuaaaagaagucc

SEQ ID NO: 69785 - RNA, 14 nt, Artificial Sequence
  Description of Artificial Sequence: Synthetic oligonucleotide
gaauccggauuauc

SEQ ID NO: 69786 - RNA, 12 nt, Artificial Sequence
  Description of Artificial Sequence: Synthetic oligonucleotide
aaugugacauca

SEQ ID NO: 69787 - RNA, 13 nt, Artificial Sequence
  Description of Artificial Sequence: Synthetic oligonucleotide
caucaaagcaagu

SEQ ID NO: 69788 - RNA, 11 nt, Artificial Sequence
  Description of Artificial Sequence: Synthetic oligonucleotide
agagagagaaa

SEQ ID NO: 69789 - RNA, 13 nt, Artificial Sequence
  Description of Artificial Sequence: Synthetic oligonucleotide
ucgcuguaguauu

SEQ ID NO: 69790 - RNA, 14 nt, Artificial Sequence
  Description of Artificial Sequence: Synthetic oligonucleotide
cgcuguaguauuua

SEQ ID NO: 69791 - RNA, 13 nt, Artificial Sequence
  Description of Artificial Sequence: Synthetic oligonucleotide
auuuaagcccaua

SEQ ID NO: 69792 - RNA, 15 nt, Artificial Sequence
  Description of Artificial Sequence: Synthetic oligonucleotide
auuaaaauaaacaug

SEQ ID NO: 69793 - RNA, 12 nt, Artificial Sequence
  Description of Artificial Sequence: Synthetic oligonucleotide
cuguucugaucg

SEQ ID NO: 69794 - RNA, 16 nt, Artificial Sequence
  Description of Artificial Sequence: Synthetic oligonucleotide
aaauaauuugaacuuu

SEQ ID NO: 69795 - RNA, 12 nt, Artificial Sequence
  Description of Artificial Sequence: Synthetic oligonucleotide
ugcgaccuuaau

SEQ ID NO: 69796 - RNA, 11 nt, Artificial Sequence
  Description of Artificial Sequence: Synthetic oligonucleotide
cugagaaagcu

SEQ ID NO: 69797 - RNA, 13 nt, Artificial Sequence
  Description of Artificial Sequence: Synthetic oligonucleotide
aguaaagaugcua

SEQ ID NO: 69798 - RNA, 12 nt, Artificial Sequence
  Description of Artificial Sequence: Synthetic oligonucleotide
cugcuuaauugc

SEQ ID NO: 69799 - RNA, 14 nt, Artificial Sequence
  Description of Artificial Sequence: Synthetic oligonucleotide
uaccauaugaauga

SEQ ID NO: 69800 - RNA, 12 nt, Artificial Sequence
  Description of Artificial Sequence: Synthetic oligonucleotide
aacuuucuuauc

SEQ ID NO: 69801 - RNA, 13 nt, Artificial Sequence
  Description of Artificial Sequence: Synthetic oligonucleotide
ccuugcaugacau

SEQ ID NO: 69802 - RNA, 14 nt, Artificial Sequence
  Description of Artificial Sequence: Synthetic oligonucleotide
ugaauuuguauaug

SEQ ID NO: 69803 - RNA, 12 nt, Artificial Sequence
  Description of Artificial Sequence: Synthetic oligonucleotide
gaauccuaguag

SEQ ID NO: 69804 - RNA, 10 nt, Artificial Sequence
  Description of Artificial Sequence: Synthetic oligonucleotide
gaaagggaag

SEQ ID NO: 69805 - RNA, 11 nt, Artificial Sequence
  Description of Artificial Sequence: Synthetic oligonucleotide
uaucggcaugc

SEQ ID NO: 69806 - RNA, 12 nt, Artificial Sequence
  Description of Artificial Sequence: Synthetic oligonucleotide
caccucauagua

SEQ ID NO: 69807 - RNA, 11 nt, Artificial Sequence
  Description of Artificial Sequence: Synthetic oligonucleotide
ccagaauugcc

SEQ ID NO: 69808 - RNA, 11 nt, Artificial Sequence
  Description of Artificial Sequence: Synthetic oligonucleotide
uggugaucugg

SEQ ID NO: 69809 - RNA, 12 nt, Artificial Sequence
  Description of Artificial Sequence: Synthetic oligonucleotide
gaucuggguaau

SEQ ID NO: 69810 - RNA, 12 nt, Artificial Sequence
  Description of Artificial Sequence: Synthetic oligonucleotide
ggaugugaugaa

SEQ ID NO: 69811 - RNA, 12 nt, Artificial Sequence
  Description of Artificial Sequence: Synthetic oligonucleotide
cauuuccacagc

SEQ ID NO: 69812 - RNA, 11 nt, Artificial Sequence
  Description of Artificial Sequence: Synthetic oligonucleotide
acagcuacacc

SEQ ID NO: 69813 - RNA, 12 nt, Artificial Sequence
  Description of Artificial Sequence: Synthetic oligonucleotide
ugcaguucuuac

SEQ ID NO: 69814 - RNA, 12 nt, Artificial Sequence
  Description of Artificial Sequence: Synthetic oligonucleotide
acgagaagaaga

SEQ ID NO: 69815 - RNA, 12 nt, Artificial Sequence
  Description of Artificial Sequence: Synthetic oligonucleotide
cgagaagaagau

SEQ ID NO: 69816 - RNA, 15 nt, Artificial Sequence
  Description of Artificial Sequence: Synthetic oligonucleotide
aagaagaucauuuac

SEQ ID NO: 69817 - RNA, 11 nt, Artificial Sequence
  Description of Artificial Sequence: Synthetic oligonucleotide
agaggaagagg

SEQ ID NO: 69818 - RNA, 12 nt, Artificial Sequence
  Description of Artificial Sequence: Synthetic oligonucleotide
gaggaagaggug

SEQ ID NO: 69819 - RNA, 13 nt, Artificial Sequence
  Description of Artificial Sequence: Synthetic oligonucleotide
cuacuuugagggc

SEQ ID NO: 69820 - RNA, 12 nt, Artificial Sequence
  Description of Artificial Sequence: Synthetic oligonucleotide
agggcaucuccu

SEQ ID NO: 69821 - RNA, 10 nt, Artificial Sequence
  Description of Artificial Sequence: Synthetic oligonucleotide
ggagugauau

SEQ ID NO: 69822 - RNA, 11 nt, Artificial Sequence
  Description of Artificial Sequence: Synthetic oligonucleotide
gagugauaugg

SEQ ID NO: 69823 - RNA, 12 nt, Artificial Sequence
  Description of Artificial Sequence: Synthetic oligonucleotide
ugcaguaaagau

SEQ ID NO: 69824 - RNA, 13 nt, Artificial Sequence
  Description of Artificial Sequence: Synthetic oligonucleotide
aguaaagauccua

SEQ ID NO: 69825 - RNA, 12 nt, Artificial Sequence
  Description of Artificial Sequence: Synthetic oligonucleotide
ugacaaaggaca

SEQ ID NO: 69826 - RNA, 13 nt, Artificial Sequence
  Description of Artificial Sequence: Synthetic oligonucleotide
gcaauugugaccc

SEQ ID NO: 69827 - RNA, 12 nt, Artificial Sequence
  Description of Artificial Sequence: Synthetic oligonucleotide
aacaucauccau

SEQ ID NO: 69828 - RNA, 12 nt, Artificial Sequence
  Description of Artificial Sequence: Synthetic oligonucleotide
ugaaauccaaca

SEQ ID NO: 69829 - RNA, 15 nt, Artificial Sequence
  Description of Artificial Sequence: Synthetic oligonucleotide
aacaauauauuucuc

SEQ ID NO: 69830 - RNA, 14 nt, Artificial Sequence
  Description of Artificial Sequence: Synthetic oligonucleotide
aacaguaaagucac

SEQ ID NO: 69831 - RNA, 14 nt, Artificial Sequence
  Description of Artificial Sequence: Synthetic oligonucleotide
ugugaagaaaguaa

SEQ ID NO: 69832 - RNA, 13 nt, Artificial Sequence
  Description of Artificial Sequence: Synthetic oligonucleotide
cuuccgagccauc

SEQ ID NO: 69833 - RNA, 12 nt, Artificial Sequence
  Description of Artificial Sequence: Synthetic oligonucleotide
aauggagguuga

SEQ ID NO: 69834 - RNA, 12 nt, Artificial Sequence
  Description of Artificial Sequence: Synthetic oligonucleotide
ggagguugaaua

SEQ ID NO: 69835 - RNA, 13 nt, Artificial Sequence
  Description of Artificial Sequence: Synthetic oligonucleotide
auuuugaguuuuc

SEQ ID NO: 69836 - RNA, 12 nt, Artificial Sequence
  Description of Artificial Sequence: Synthetic oligonucleotide
uauccuguuugu

SEQ ID NO: 69837 - RNA, 11 nt, Artificial Sequence
  Description of Artificial Sequence: Synthetic oligonucleotide
ccuguuuguuc

SEQ ID NO: 69838 - RNA, 10 nt, Artificial Sequence
  Description of Artificial Sequence: Synthetic oligonucleotide
cucuacagcc

SEQ ID NO: 69839 - RNA, 12 nt, Artificial Sequence
  Description of Artificial Sequence: Synthetic oligonucleotide
ucuuccauagcu

SEQ ID NO: 69840 - RNA, 12 nt, Artificial Sequence
  Description of Artificial Sequence: Synthetic oligonucleotide
auaaucuuccug

SEQ ID NO: 69841 - RNA, 12 nt, Artificial Sequence
  Description of Artificial Sequence: Synthetic oligonucleotide
uaaucuuccugu

SEQ ID NO: 69842 - RNA, 12 nt, Artificial Sequence
  Description of Artificial Sequence: Synthetic oligonucleotide
cuucaugacuug

SEQ ID NO: 69843 - RNA, 12 nt, Artificial Sequence
  Description of Artificial Sequence: Synthetic oligonucleotide
aagagggagaga

SEQ ID NO: 69844 - RNA, 12 nt, Artificial Sequence
  Description of Artificial Sequence: Synthetic oligonucleotide
cgucuccuacca

SEQ ID NO: 69845 - RNA, 12 nt, Artificial Sequence
  Description of Artificial Sequence: Synthetic oligonucleotide
gaucaaucggcc

SEQ ID NO: 69846 - RNA, 12 nt, Artificial Sequence
  Description of Artificial Sequence: Synthetic oligonucleotide
ggacgaacaucc

SEQ ID NO: 69847 - RNA, 11 nt, Artificial Sequence
  Description of Artificial Sequence: Synthetic oligonucleotide
agggucggaac

SEQ ID NO: 69848 - RNA, 10 nt, Artificial Sequence
  Description of Artificial Sequence: Synthetic oligonucleotide
ucggaaccca

SEQ ID NO: 69849 - RNA, 11 nt, Artificial Sequence
  Description of Artificial Sequence: Synthetic oligonucleotide
acccaagcuua

SEQ ID NO: 69850 - RNA, 14 nt, Artificial Sequence
  Description of Artificial Sequence: Synthetic oligonucleotide
gaacuuuaagcaac

SEQ ID NO: 69851 - RNA, 11 nt, Artificial Sequence
  Description of Artificial Sequence: Synthetic oligonucleotide
acuauucagug

SEQ ID NO: 69852 - RNA, 11 nt, Artificial Sequence
  Description of Artificial Sequence: Synthetic oligonucleotide
cuauucagugg

SEQ ID NO: 69853 - RNA, 13 nt, Artificial Sequence
  Description of Artificial Sequence: Synthetic oligonucleotide
aaacacagauaac

SEQ ID NO: 69854 - RNA, 12 nt, Artificial Sequence
  Description of Artificial Sequence: Synthetic oligonucleotide
cuuaagaaaaga

SEQ ID NO: 69855 - RNA, 12 nt, Artificial Sequence
  Description of Artificial Sequence: Synthetic oligonucleotide
cugaaggagugu

SEQ ID NO: 69856 - RNA, 10 nt, Artificial Sequence
  Description of Artificial Sequence: Synthetic oligonucleotide
ucaccgcggg

SEQ ID NO: 69857 - RNA, 14 nt, Artificial Sequence
  Description of Artificial Sequence: Synthetic oligonucleotide
agcagaaauaagcg

SEQ ID NO: 69858 - RNA, 12 nt, Artificial Sequence
  Description of Artificial Sequence: Synthetic oligonucleotide
aagcgugccguu

SEQ ID NO: 69859 - RNA, 12 nt, Artificial Sequence
  Description of Artificial Sequence: Synthetic oligonucleotide
agaaacagucac

SEQ ID NO: 69860 - RNA, 12 nt, Artificial Sequence
  Description of Artificial Sequence: Synthetic oligonucleotide
agaggaagaagg

SEQ ID NO: 69861 - RNA, 14 nt, Artificial Sequence
  Description of Artificial Sequence: Synthetic oligonucleotide
uguauucaaaauau

SEQ ID NO: 69862 - RNA, 13 nt, Artificial Sequence
  Description of Artificial Sequence: Synthetic oligonucleotide
auuuuccucccuu

SEQ ID NO: 69863 - RNA, 13 nt, Artificial Sequence
  Description of Artificial Sequence: Synthetic oligonucleotide
caaagaaagauag

SEQ ID NO: 69864 - RNA, 12 nt, Artificial Sequence
  Description of Artificial Sequence: Synthetic oligonucleotide
aagaaagauaga

SEQ ID NO: 69865 - RNA, 13 nt, Artificial Sequence
  Description of Artificial Sequence: Synthetic oligonucleotide
gaaagcauuuguu

SEQ ID NO: 69866 - RNA, 13 nt, Artificial Sequence
  Description of Artificial Sequence: Synthetic oligonucleotide
ugaguuaaacgaa

SEQ ID NO: 69867 - RNA, 12 nt, Artificial Sequence
  Description of Artificial Sequence: Synthetic oligonucleotide
acugauacagaa

SEQ ID NO: 69868 - RNA, 12 nt, Artificial Sequence
  Description of Artificial Sequence: Synthetic oligonucleotide
auauuauauaua

SEQ ID NO: 69869 - RNA, 12 nt, Artificial Sequence
  Description of Artificial Sequence: Synthetic oligonucleotide
auuauauauaua

SEQ ID NO: 69870 - RNA, 12 nt, Artificial Sequence
  Description of Artificial Sequence: Synthetic oligonucleotide
ucacuggaugua

SEQ ID NO: 69871 - RNA, 12 nt, Artificial Sequence
  Description of Artificial Sequence: Synthetic oligonucleotide
cagggaagagga

SEQ ID NO: 69872 - RNA, 15 nt, Artificial Sequence
  Description of Artificial Sequence: Synthetic oligonucleotide
augaucuuuuuuuug

SEQ ID NO: 69873 - RNA, 11 nt, Artificial Sequence
  Description of Artificial Sequence: Synthetic oligonucleotide
aguucacggcc

SEQ ID NO: 69874 - RNA, 13 nt, Artificial Sequence
  Description of Artificial Sequence: Synthetic oligonucleotide
caccaucacacca

SEQ ID NO: 69875 - RNA, 11 nt, Artificial Sequence
  Description of Artificial Sequence: Synthetic oligonucleotide
ccugcggguuu

SEQ ID NO: 69876 - RNA, 10 nt, Artificial Sequence
  Description of Artificial Sequence: Synthetic oligonucleotide
auccaguuug

SEQ ID NO: 69877 - RNA, 13 nt, Artificial Sequence
  Description of Artificial Sequence: Synthetic oligonucleotide
guuaaggacuucu

SEQ ID NO: 69878 - RNA, 13 nt, Artificial Sequence
  Description of Artificial Sequence: Synthetic oligonucleotide
cagugggacagag

SEQ ID NO: 69879 - RNA, 14 nt, Artificial Sequence
  Description of Artificial Sequence: Synthetic oligonucleotide
aauuuguuauugug

SEQ ID NO: 69880 - RNA, 13 nt, Artificial Sequence
  Description of Artificial Sequence: Synthetic oligonucleotide
uucaaaugcauuu

SEQ ID NO: 69881 - RNA, 10 nt, Artificial Sequence
  Description of Artificial Sequence: Synthetic oligonucleotide
caggaaagcc

SEQ ID NO: 69882 - RNA, 11 nt, Artificial Sequence
  Description of Artificial Sequence: Synthetic oligonucleotide
aggaaagcccu

SEQ ID NO: 69883 - RNA, 12 nt, Artificial Sequence
  Description of Artificial Sequence: Synthetic oligonucleotide
cccagcauggcc

SEQ ID NO: 69884 - RNA, 11 nt, Artificial Sequence
  Description of Artificial Sequence: Synthetic oligonucleotide
cuucucccuga

SEQ ID NO: 69885 - RNA, 12 nt, Artificial Sequence
  Description of Artificial Sequence: Synthetic oligonucleotide
gaagaagcccuu

SEQ ID NO: 69886 - RNA, 12 nt, Artificial Sequence
  Description of Artificial Sequence: Synthetic oligonucleotide
agaagcccuuca

SEQ ID NO: 69887 - RNA, 11 nt, Artificial Sequence
  Description of Artificial Sequence: Synthetic oligonucleotide
gcccuucagcg

SEQ ID NO: 69888 - RNA, 11 nt, Artificial Sequence
  Description of Artificial Sequence: Synthetic oligonucleotide
ccuucagcggc

SEQ ID NO: 69889 - RNA, 12 nt, Artificial Sequence
  Description of Artificial Sequence: Synthetic oligonucleotide
ucagcggccagu

SEQ ID NO: 69890 - RNA, 12 nt, Artificial Sequence
  Description of Artificial Sequence: Synthetic oligonucleotide
ugaaaagcuccg

SEQ ID NO: 69891 - RNA, 11 nt, Artificial Sequence
  Description of Artificial Sequence: Synthetic oligonucleotide
aaaagcuccgg

SEQ ID NO: 69892 - RNA, 13 nt, Artificial Sequence
  Description of Artificial Sequence: Synthetic oligonucleotide
agucaacagucug

SEQ ID NO: 69893 - RNA, 13 nt, Artificial Sequence
  Description of Artificial Sequence: Synthetic oligonucleotide
cagaguucaaaag

SEQ ID NO: 69894 - RNA, 13 nt, Artificial Sequence
  Description of Artificial Sequence: Synthetic oligonucleotide
agaguucaaaagc

SEQ ID NO: 69895 - RNA, 12 nt, Artificial Sequence
  Description of Artificial Sequence: Synthetic oligonucleotide
uucaaaagcccu

SEQ ID NO: 69896 - RNA, 12 nt, Artificial Sequence
  Description of Artificial Sequence: Synthetic oligonucleotide
ucaaaagcccuu

SEQ ID NO: 69897 - RNA, 12 nt, Artificial Sequence
  Description of Artificial Sequence: Synthetic oligonucleotide
aaaagcccuuca

SEQ ID NO: 69898 - RNA, 12 nt, Artificial Sequence
  Description of Artificial Sequence: Synthetic oligonucleotide
aaagcccuucag

SEQ ID NO: 69899 - RNA, 13 nt, Artificial Sequence
  Description of Artificial Sequence: Synthetic oligonucleotide
gugaagccgcucg

SEQ ID NO: 69900 - RNA, 12 nt, Artificial Sequence
  Description of Artificial Sequence: Synthetic oligonucleotide
cacgccagucaa

SEQ ID NO: 69901 - RNA, 13 nt, Artificial Sequence
  Description of Artificial Sequence: Synthetic oligonucleotide
uucuuggugcgug

SEQ ID NO: 69902 - RNA, 14 nt, Artificial Sequence
  Description of Artificial Sequence: Synthetic oligonucleotide
auuggauucaucag

SEQ ID NO: 69903 - RNA, 13 nt, Artificial Sequence
  Description of Artificial Sequence: Synthetic oligonucleotide
uggaauaccuaag

SEQ ID NO: 69904 - RNA, 12 nt, Artificial Sequence
  Description of Artificial Sequence: Synthetic oligonucleotide
auuugaggcuca

SEQ ID NO: 69905 - RNA, 11 nt, Artificial Sequence
  Description of Artificial Sequence: Synthetic oligonucleotide
ucuacaauugg

SEQ ID NO: 69906 - RNA, 12 nt, Artificial Sequence
  Description of Artificial Sequence: Synthetic oligonucleotide
uaguuaggagcc

SEQ ID NO: 69907 - RNA, 13 nt, Artificial Sequence
  Description of Artificial Sequence: Synthetic oligonucleotide
agucaauauccac

SEQ ID NO: 69908 - RNA, 13 nt, Artificial Sequence
  Description of Artificial Sequence: Synthetic oligonucleotide
auguucagucaca

SEQ ID NO: 69909 - RNA, 12 nt, Artificial Sequence
  Description of Artificial Sequence: Synthetic oligonucleotide
acacacacauac

SEQ ID NO: 69910 - RNA, 12 nt, Artificial Sequence
  Description of Artificial Sequence: Synthetic oligonucleotide
uuccuuuugcuu

SEQ ID NO: 69911 - RNA, 16 nt, Artificial Sequence
  Description of Artificial Sequence: Synthetic oligonucleotide
uuuuaaaguaauuuuu

SEQ ID NO: 69912 - RNA, 13 nt, Artificial Sequence
  Description of Artificial Sequence: Synthetic oligonucleotide
caacagucaaugg

SEQ ID NO: 69913 - RNA, 13 nt, Artificial Sequence
  Description of Artificial Sequence: Synthetic oligonucleotide
ucgacaaaccaau

SEQ ID NO: 69914 - RNA, 12 nt, Artificial Sequence
  Description of Artificial Sequence: Synthetic oligonucleotide
acugcuaccacu

SEQ ID NO: 69915 - RNA, 13 nt, Artificial Sequence
  Description of Artificial Sequence: Synthetic oligonucleotide
gcaagcggucuua

SEQ ID NO: 69916 - RNA, 13 nt, Artificial Sequence
  Description of Artificial Sequence: Synthetic oligonucleotide
ggucuuaccggcu

SEQ ID NO: 69917 - RNA, 11 nt, Artificial Sequence
  Description of Artificial Sequence: Synthetic oligonucleotide
gauggguuacc

SEQ ID NO: 69918 - RNA, 11 nt, Artificial Sequence
  Description of Artificial Sequence: Synthetic oligonucleotide
guuaccugcga

SEQ ID NO: 69919 - RNA, 12 nt, Artificial Sequence
  Description of Artificial Sequence: Synthetic oligonucleotide
aaucuugcugag

SEQ ID NO: 69920 - RNA, 13 nt, Artificial Sequence
  Description of Artificial Sequence: Synthetic oligonucleotide
agcauaaaacagu

SEQ ID NO: 69921 - RNA, 12 nt, Artificial Sequence
  Description of Artificial Sequence: Synthetic oligonucleotide
guccuuuauccu

SEQ ID NO: 69922 - RNA, 12 nt, Artificial Sequence
  Description of Artificial Sequence: Synthetic oligonucleotide
caacgcaaguug

SEQ ID NO: 69923 - RNA, 13 nt, Artificial Sequence
  Description of Artificial Sequence: Synthetic oligonucleotide
aaacugaaaccau

SEQ ID NO: 69924 - RNA, 14 nt, Artificial Sequence
  Description of Artificial Sequence: Synthetic oligonucleotide
acuuuguuaaauau

SEQ ID NO: 69925 - RNA, 14 nt, Artificial Sequence
  Description of Artificial Sequence: Synthetic oligonucleotide
guauauuaaaaguu

SEQ ID NO: 69926 - RNA, 13 nt, Artificial Sequence
  Description of Artificial Sequence: Synthetic oligonucleotide
guuuugacuuaac

SEQ ID NO: 69927 - RNA, 13 nt, Artificial Sequence
  Description of Artificial Sequence: Synthetic oligonucleotide
gcaaacucagcac

SEQ ID NO: 69928 - RNA, 11 nt, Artificial Sequence
  Description of Artificial Sequence: Synthetic oligonucleotide
ugcugaccuca

SEQ ID NO: 69929 - RNA, 14 nt, Artificial Sequence
  Description of Artificial Sequence: Synthetic oligonucleotide
uuuauucagaucgc

SEQ ID NO: 69930 - RNA, 13 nt, Artificial Sequence
  Description of Artificial Sequence: Synthetic oligonucleotide
aggguucugggau

SEQ ID NO: 69931 - RNA, 15 nt, Artificial Sequence
  Description of Artificial Sequence: Synthetic oligonucleotide
auauuggaaauuaug

SEQ ID NO: 69932 - RNA, 13 nt, Artificial Sequence
  Description of Artificial Sequence: Synthetic oligonucleotide
auggaagcacuag

SEQ ID NO: 69933 - RNA, 13 nt, Artificial Sequence
  Description of Artificial Sequence: Synthetic oligonucleotide
guuuuuaugugga

SEQ ID NO: 69934 - RNA, 12 nt, Artificial Sequence
  Description of Artificial Sequence: Synthetic oligonucleotide
ggaauugguaga

SEQ ID NO: 69935 - RNA, 13 nt, Artificial Sequence
  Description of Artificial Sequence: Synthetic oligonucleotide
uuagacuuggaga

SEQ ID NO: 69936 - RNA, 13 nt, Artificial Sequence
  Description of Artificial Sequence: Synthetic oligonucleotide
uuacaguauucca

SEQ ID NO: 69937 - RNA, 15 nt, Artificial Sequence
  Description of Artificial Sequence: Synthetic oligonucleotide
ccacugaugaauuaa

SEQ ID NO: 69938 - RNA, 12 nt, Artificial Sequence
  Description of Artificial Sequence: Synthetic oligonucleotide
ccacaucaucac

SEQ ID NO: 69939 - RNA, 13 nt, Artificial Sequence
  Description of Artificial Sequence: Synthetic oligonucleotide
cucaccaaacaga

SEQ ID NO: 69940 - RNA, 12 nt, Artificial Sequence
  Description of Artificial Sequence: Synthetic oligonucleotide
ggaacaugaugg

SEQ ID NO: 69941 - RNA, 12 nt, Artificial Sequence
  Description of Artificial Sequence: Synthetic oligonucleotide
cauguagacugc

SEQ ID NO: 69942 - RNA, 13 nt, Artificial Sequence
  Description of Artificial Sequence: Synthetic oligonucleotide
ggaucuauuuaug

SEQ ID NO: 69943 - RNA, 12 nt, Artificial Sequence
  Description of Artificial Sequence: Synthetic oligonucleotide
gcacuauuauca

SEQ ID NO: 69944 - RNA, 11 nt, Artificial Sequence
  Description of Artificial Sequence: Synthetic oligonucleotide
aucaguucugc

SEQ ID NO: 69945 - RNA, 13 nt, Artificial Sequence
  Description of Artificial Sequence: Synthetic oligonucleotide
agauuaaaccuac

SEQ ID NO: 69946 - RNA, 13 nt, Artificial Sequence
  Description of Artificial Sequence: Synthetic oligonucleotide
auaaaauccuucu

SEQ ID NO: 69947 - RNA, 12 nt, Artificial Sequence
  Description of Artificial Sequence: Synthetic oligonucleotide
aaugcuguagac

SEQ ID NO: 69948 - RNA, 13 nt, Artificial Sequence
  Description of Artificial Sequence: Synthetic oligonucleotide
uugauaggaauag

SEQ ID NO: 69949 - RNA, 11 nt, Artificial Sequence
  Description of Artificial Sequence: Synthetic oligonucleotide
aauggcccuga

SEQ ID NO: 69950 - RNA, 11 nt, Artificial Sequence
  Description of Artificial Sequence: Synthetic oligonucleotide
uuccucaagca

SEQ ID NO: 69951 - RNA, 10 nt, Artificial Sequence
  Description of Artificial Sequence: Synthetic oligonucleotide
guucagccca

SEQ ID NO: 69952 - RNA, 11 nt, Artificial Sequence
  Description of Artificial Sequence: Synthetic oligonucleotide
gcugcugaacc

SEQ ID NO: 69953 - RNA, 12 nt, Artificial Sequence
  Description of Artificial Sequence: Synthetic oligonucleotide
aaguucucuuca

SEQ ID NO: 69954 - RNA, 11 nt, Artificial Sequence
  Description of Artificial Sequence: Synthetic oligonucleotide
ccagccuagag

SEQ ID NO: 69955 - RNA, 13 nt, Artificial Sequence
  Description of Artificial Sequence: Synthetic oligonucleotide
cucugugaagugu

SEQ ID NO: 69956 - RNA, 14 nt, Artificial Sequence
  Description of Artificial Sequence: Synthetic oligonucleotide
ugagaaaauuucaa

SEQ ID NO: 69957 - RNA, 11 nt, Artificial Sequence
  Description of Artificial Sequence: Synthetic oligonucleotide
aauccuccuga

SEQ ID NO: 69958 - RNA, 12 nt, Artificial Sequence
  Description of Artificial Sequence: Synthetic oligonucleotide
gugacaucauau

SEQ ID NO: 69959 - RNA, 13 nt, Artificial Sequence
  Description of Artificial Sequence: Synthetic oligonucleotide
aaucuucaucaua

SEQ ID NO: 69960 - RNA, 13 nt, Artificial Sequence
  Description of Artificial Sequence: Synthetic oligonucleotide
gacuagcuauuaa

SEQ ID NO: 69961 - RNA, 14 nt, Artificial Sequence
  Description of Artificial Sequence: Synthetic oligonucleotide
ucucuacuaaaaau

SEQ ID NO: 69962 - RNA, 12 nt, Artificial Sequence
  Description of Artificial Sequence: Synthetic oligonucleotide
ucuaucucgccu

SEQ ID NO: 69963 - RNA, 13 nt, Artificial Sequence
  Description of Artificial Sequence: Synthetic oligonucleotide
cuucgguccaguu

SEQ ID NO: 69964 - RNA, 11 nt, Artificial Sequence
  Description of Artificial Sequence: Synthetic oligonucleotide
gauguagccgc

SEQ ID NO: 69965 - RNA, 12 nt, Artificial Sequence
  Description of Artificial Sequence: Synthetic oligonucleotide
ugaggagacuug

SEQ ID NO: 69966 - RNA, 12 nt, Artificial Sequence
  Description of Artificial Sequence: Synthetic oligonucleotide
gaguagugagga

SEQ ID NO: 69967 - RNA, 14 nt, Artificial Sequence
  Description of Artificial Sequence: Synthetic oligonucleotide
cagaugaguacaaa

SEQ ID NO: 69968 - RNA, 13 nt, Artificial Sequence
  Description of Artificial Sequence: Synthetic oligonucleotide
guuguuaaugggc

SEQ ID NO: 69969 - RNA, 13 nt, Artificial Sequence
  Description of Artificial Sequence: Synthetic oligonucleotide
uuuuuaauuuauu

SEQ ID NO: 69970 - RNA, 12 nt, Artificial Sequence
  Description of Artificial Sequence: Synthetic oligonucleotide
uauuuaaauaug

SEQ ID NO: 69971 - RNA, 13 nt, Artificial Sequence
  Description of Artificial Sequence: Synthetic oligonucleotide
uauccuuuguuuc

SEQ ID NO: 69972 - RNA, 14 nt, Artificial Sequence
  Description of Artificial Sequence: Synthetic oligonucleotide
cgucuaaguguuug

SEQ ID NO: 69973 - RNA, 12 nt, Artificial Sequence
  Description of Artificial Sequence: Synthetic oligonucleotide
accugugacaaa

SEQ ID NO: 69974 - RNA, 13 nt, Artificial Sequence
  Description of Artificial Sequence: Synthetic oligonucleotide
ccaggcugaauua

SEQ ID NO: 69975 - RNA, 14 nt, Artificial Sequence
  Description of Artificial Sequence: Synthetic oligonucleotide
gucauucuuacaau

SEQ ID NO: 69976 - RNA, 15 nt, Artificial Sequence
  Description of Artificial Sequence: Synthetic oligonucleotide
ucauucuuacaauug

SEQ ID NO: 69977 - RNA, 12 nt, Artificial Sequence
  Description of Artificial Sequence: Synthetic oligonucleotide
cagagaguguac

SEQ ID NO: 69978 - RNA, 12 nt, Artificial Sequence
  Description of Artificial Sequence: Synthetic oligonucleotide
agaacucagcag

SEQ ID NO: 69979 - RNA, 13 nt, Artificial Sequence
  Description of Artificial Sequence: Synthetic oligonucleotide
uuuauuuucagua

SEQ ID NO: 69980 - RNA, 12 nt, Artificial Sequence
  Description of Artificial Sequence: Synthetic oligonucleotide
ucuuaaauggaa

SEQ ID NO: 69981 - RNA, 13 nt, Artificial Sequence
  Description of Artificial Sequence: Synthetic oligonucleotide
ugccuaaaauugu

SEQ ID NO: 69982 - RNA, 12 nt, Artificial Sequence
  Description of Artificial Sequence: Synthetic oligonucleotide
agacugugagcu

SEQ ID NO: 69983 - RNA, 14 nt, Artificial Sequence
  Description of Artificial Sequence: Synthetic oligonucleotide
ugcuuuuuauuaau

SEQ ID NO: 69984 - RNA, 13 nt, Artificial Sequence
  Description of Artificial Sequence: Synthetic oligonucleotide
cucuucuuacauu

SEQ ID NO: 69985 - RNA, 15 nt, Artificial Sequence
  Description of Artificial Sequence: Synthetic oligonucleotide
cauuuguaaaaaugu

SEQ ID NO: 69986 - RNA, 15 nt, Artificial Sequence
  Description of Artificial Sequence: Synthetic oligonucleotide
aucuuaauucauauu

SEQ ID NO: 69987 - RNA, 13 nt, Artificial Sequence
  Description of Artificial Sequence: Synthetic oligonucleotide
gaacuaaucauga

SEQ ID NO: 69988 - RNA, 12 nt, Artificial Sequence
  Description of Artificial Sequence: Synthetic oligonucleotide
ucugcucuuggg

SEQ ID NO: 69989 - RNA, 13 nt, Artificial Sequence
  Description of Artificial Sequence: Synthetic oligonucleotide
caguagcuuugag

SEQ ID NO: 69990 - RNA, 14 nt, Artificial Sequence
  Description of Artificial Sequence: Synthetic oligonucleotide
cacguaauauuuca

SEQ ID NO: 69991 - RNA, 13 nt, Artificial Sequence
  Description of Artificial Sequence: Synthetic oligonucleotide
uauucucuucacu

SEQ ID NO: 69992 - RNA, 14 nt, Artificial Sequence
  Description of Artificial Sequence: Synthetic oligonucleotide
cuaaugcuaagaaa

SEQ ID NO: 69993 - RNA, 12 nt, Artificial Sequence
  Description of Artificial Sequence: Synthetic oligonucleotide
gcugaaaaucaa

SEQ ID NO: 69994 - RNA, 14 nt, Artificial Sequence
  Description of Artificial Sequence: Synthetic oligonucleotide
aauaugauuacuuu

SEQ ID NO: 69995 - RNA, 14 nt, Artificial Sequence
  Description of Artificial Sequence: Synthetic oligonucleotide
cauuuuguucuaca

SEQ ID NO: 69996 - RNA, 12 nt, Artificial Sequence
  Description of Artificial Sequence: Synthetic oligonucleotide
cccgggacucuc

SEQ ID NO: 69997 - RNA, 14 nt, Artificial Sequence
  Description of Artificial Sequence: Synthetic oligonucleotide
ccuuuaaaguaaag

SEQ ID NO: 69998 - RNA, 13 nt, Artificial Sequence
  Description of Artificial Sequence: Synthetic oligonucleotide
ucuggaagccugg

SEQ ID NO: 69999 - RNA, 14 nt, Artificial Sequence
  Description of Artificial Sequence: Synthetic oligonucleotide
aaaacaaaagagag

SEQ ID NO: 70000 - RNA, 13 nt, Artificial Sequence
  Description of Artificial Sequence: Synthetic oligonucleotide
aucaguuaugccg

SEQ ID NO: 70001 - RNA, 13 nt, Artificial Sequence
  Description of Artificial Sequence: Synthetic oligonucleotide
uaaaagaagucca

SEQ ID NO: 70002 - RNA, 11 nt, Artificial Sequence
  Description of Artificial Sequence: Synthetic oligonucleotide
aggugagguua

SEQ ID NO: 70003 - RNA, 11 nt, Artificial Sequence
  Description of Artificial Sequence: Synthetic oligonucleotide
gggaagaggac

SEQ ID NO: 70004 - RNA, 13 nt, Artificial Sequence
  Description of Artificial Sequence: Synthetic oligonucleotide
aagcaaguauugu

SEQ ID NO: 70005 - RNA, 12 nt, Artificial Sequence
  Description of Artificial Sequence: Synthetic oligonucleotide
auuguagcacuc

SEQ ID NO: 70006 - RNA, 14 nt, Artificial Sequence
  Description of Artificial Sequence: Synthetic oligonucleotide
acaaaaccacaaau

SEQ ID NO: 70007 - RNA, 12 nt, Artificial Sequence
  Description of Artificial Sequence: Synthetic oligonucleotide
uaagcccauaca

SEQ ID NO: 70008 - RNA, 11 nt, Artificial Sequence
  Description of Artificial Sequence: Synthetic oligonucleotide
agcccauacag

SEQ ID NO: 70009 - RNA, 12 nt, Artificial Sequence
  Description of Artificial Sequence: Synthetic oligonucleotide
cagaaaccuucc

SEQ ID NO: 70010 - RNA, 10 nt, Artificial Sequence
  Description of Artificial Sequence: Synthetic oligonucleotide
guauaccuac

SEQ ID NO: 70011 - RNA, 13 nt, Artificial Sequence
  Description of Artificial Sequence: Synthetic oligonucleotide
gccaguuuucgga

SEQ ID NO: 70012 - RNA, 9 nt, Artificial Sequence
  Description of Artificial Sequence: Synthetic oligonucleotide
ggaacaggg

SEQ ID NO: 70013 - RNA, 13 nt, Artificial Sequence
  Description of Artificial Sequence: Synthetic oligonucleotide
uuaacuuuccagu

SEQ ID NO: 70014 - RNA, 14 nt, Artificial Sequence
  Description of Artificial Sequence: Synthetic oligonucleotide
aaaguuugguuuug

SEQ ID NO: 70015 - RNA, 12 nt, Artificial Sequence
  Description of Artificial Sequence: Synthetic oligonucleotide
cuucccacugua

SEQ ID NO: 70016 - RNA, 13 nt, Artificial Sequence
  Description of Artificial Sequence: Synthetic oligonucleotide
ugauaccauauga

SEQ ID NO: 70017 - RNA, 11 nt, Artificial Sequence
  Description of Artificial Sequence: Synthetic oligonucleotide
aacaugggcug

SEQ ID NO: 70018 - RNA, 13 nt, Artificial Sequence
  Description of Artificial Sequence: Synthetic oligonucleotide
caacuuuuucaua

SEQ ID NO: 70019 - RNA, 12 nt, Artificial Sequence
  Description of Artificial Sequence: Synthetic oligonucleotide
caugaggccgga

SEQ ID NO: 70020 - RNA, 11 nt, Artificial Sequence
  Description of Artificial Sequence: Synthetic oligonucleotide
acugcauuugu

SEQ ID NO: 70021 - RNA, 13 nt, Artificial Sequence
  Description of Artificial Sequence: Synthetic oligonucleotide
aauguuuacuacc

SEQ ID NO: 70022 - RNA, 15 nt, Artificial Sequence
  Description of Artificial Sequence: Synthetic oligonucleotide
aauuuuuugaugaaa

SEQ ID NO: 70023 - RNA, 14 nt, Artificial Sequence
  Description of Artificial Sequence: Synthetic oligonucleotide
cagugugugaauuu

SEQ ID NO: 70024 - RNA, 13 nt, Artificial Sequence
  Description of Artificial Sequence: Synthetic oligonucleotide
gagcaauguaugu

SEQ ID NO: 70025 - RNA, 14 nt, Artificial Sequence
  Description of Artificial Sequence: Synthetic oligonucleotide
aaagcacauauaua

SEQ ID NO: 70026 - RNA, 14 nt, Artificial Sequence
  Description of Artificial Sequence: Synthetic oligonucleotide
guaauaguuucucc

SEQ ID NO: 70027 - RNA, 13 nt, Artificial Sequence
  Description of Artificial Sequence: Synthetic oligonucleotide
aguuucuccaaau

SEQ ID NO: 70028 - RNA, 13 nt, Artificial Sequence
  Description of Artificial Sequence: Synthetic oligonucleotide
uacuuccuagaaa

SEQ ID NO: 70029 - RNA, 13 nt, Artificial Sequence
  Description of Artificial Sequence: Synthetic oligonucleotide
uacaccauauaug

SEQ ID NO: 70030 - RNA, 14 nt, Artificial Sequence
  Description of Artificial Sequence: Synthetic oligonucleotide
auauaugaauggag

SEQ ID NO: 70031 - RNA, 13 nt, Artificial Sequence
  Description of Artificial Sequence: Synthetic oligonucleotide
acgagaagaagau

SEQ ID NO: 70032 - RNA, 13 nt, Artificial Sequence
  Description of Artificial Sequence: Synthetic oligonucleotide
ucauuuacaggga

SEQ ID NO: 70033 - RNA, 13 nt, Artificial Sequence
  Description of Artificial Sequence: Synthetic oligonucleotide
cauuuacagggac

SEQ ID NO: 70034 - RNA, 10 nt, Artificial Sequence
  Description of Artificial Sequence: Synthetic oligonucleotide
agggaccuga

SEQ ID NO: 70035 - RNA, 14 nt, Artificial Sequence
  Description of Artificial Sequence: Synthetic oligonucleotide
uguuugacugcauc

SEQ ID NO: 70036 - RNA, 13 nt, Artificial Sequence
  Description of Artificial Sequence: Synthetic oligonucleotide
uuugacugcaucg

SEQ ID NO: 70037 - RNA, 12 nt, Artificial Sequence
  Description of Artificial Sequence: Synthetic oligonucleotide
gaguucacaggg

SEQ ID NO: 70038 - RNA, 13 nt, Artificial Sequence
  Description of Artificial Sequence: Synthetic oligonucleotide
ggcaccucugucc

SEQ ID NO: 70039 - RNA, 15 nt, Artificial Sequence
  Description of Artificial Sequence: Synthetic oligonucleotide
gguuugucuuuuuaa

SEQ ID NO: 70040 - RNA, 14 nt, Artificial Sequence
  Description of Artificial Sequence: Synthetic oligonucleotide
uuugucuuuuuaag

SEQ ID NO: 70041 - RNA, 13 nt, Artificial Sequence
  Description of Artificial Sequence: Synthetic oligonucleotide
ccuaaagguuguc

SEQ ID NO: 70042 - RNA, 12 nt, Artificial Sequence
  Description of Artificial Sequence: Synthetic oligonucleotide
aagguugucgac

SEQ ID NO: 70043 - RNA, 13 nt, Artificial Sequence
  Description of Artificial Sequence: Synthetic oligonucleotide
accuggcaauugu

SEQ ID NO: 70044 - RNA, 12 nt, Artificial Sequence
  Description of Artificial Sequence: Synthetic oligonucleotide
aguggugcgagg

SEQ ID NO: 70045 - RNA, 13 nt, Artificial Sequence
  Description of Artificial Sequence: Synthetic oligonucleotide
agagacaugaaau

SEQ ID NO: 70046 - RNA, 13 nt, Artificial Sequence
  Description of Artificial Sequence: Synthetic oligonucleotide
auauauuucucca

SEQ ID NO: 70047 - RNA, 10 nt, Artificial Sequence
  Description of Artificial Sequence: Synthetic oligonucleotide
caugaaggcu

SEQ ID NO: 70048 - RNA, 11 nt, Artificial Sequence
  Description of Artificial Sequence: Synthetic oligonucleotide
gcuggaguggu

SEQ ID NO: 70049 - RNA, 11 nt, Artificial Sequence
  Description of Artificial Sequence: Synthetic oligonucleotide
aggaagagagg

SEQ ID NO: 70050 - RNA, 12 nt, Artificial Sequence
  Description of Artificial Sequence: Synthetic oligonucleotide
cuugcaucgggc

SEQ ID NO: 70051 - RNA, 13 nt, Artificial Sequence
  Description of Artificial Sequence: Synthetic oligonucleotide
auauccuacugug

SEQ ID NO: 70052 - RNA, 13 nt, Artificial Sequence
  Description of Artificial Sequence: Synthetic oligonucleotide
uccuacuguguaa

SEQ ID NO: 70053 - RNA, 12 nt, Artificial Sequence
  Description of Artificial Sequence: Synthetic oligonucleotide
ccuuguagugua

SEQ ID NO: 70054 - RNA, 13 nt, Artificial Sequence
  Description of Artificial Sequence: Synthetic oligonucleotide
ucuuuguugauug

SEQ ID NO: 70055 - RNA, 14 nt, Artificial Sequence
  Description of Artificial Sequence: Synthetic oligonucleotide
uuuguugauugaaa

SEQ ID NO: 70056 - RNA, 15 nt, Artificial Sequence
  Description of Artificial Sequence: Synthetic oligonucleotide
uucuuuuucuuccau

SEQ ID NO: 70057 - RNA, 13 nt, Artificial Sequence
  Description of Artificial Sequence: Synthetic oligonucleotide
aaucuuccuucua

SEQ ID NO: 70058 - RNA, 13 nt, Artificial Sequence
  Description of Artificial Sequence: Synthetic oligonucleotide
uugaaugcuucau

SEQ ID NO: 70059 - RNA, 13 nt, Artificial Sequence
  Description of Artificial Sequence: Synthetic oligonucleotide
ugaaugcuucaug

SEQ ID NO: 70060 - RNA, 13 nt, Artificial Sequence
  Description of Artificial Sequence: Synthetic oligonucleotide
aauucuacuuuga

SEQ ID NO: 70061 - RNA, 13 nt, Artificial Sequence
  Description of Artificial Sequence: Synthetic oligonucleotide
agcaacuacagac

SEQ ID NO: 70062 - RNA, 13 nt, Artificial Sequence
  Description of Artificial Sequence: Synthetic oligonucleotide
gaccaaggucaac

SEQ ID NO: 70063 - RNA, 13 nt, Artificial Sequence
  Description of Artificial Sequence: Synthetic oligonucleotide
cgacuaucucgac

SEQ ID NO: 70064 - RNA, 13 nt, Artificial Sequence
  Description of Artificial Sequence: Synthetic oligonucleotide
aaccuucccaaac

SEQ ID NO: 70065 - RNA, 14 nt, Artificial Sequence
  Description of Artificial Sequence: Synthetic oligonucleotide
ccaagcuuagaacu

SEQ ID NO: 70066 - RNA, 15 nt, Artificial Sequence
  Description of Artificial Sequence: Synthetic oligonucleotide
agcuuagaacuuuaa

SEQ ID NO: 70067 - RNA, 11 nt, Artificial Sequence
  Description of Artificial Sequence: Synthetic oligonucleotide
aagaccaccac

SEQ ID NO: 70068 - RNA, 14 nt, Artificial Sequence
  Description of Artificial Sequence: Synthetic oligonucleotide
gcgagaaauaaagu

SEQ ID NO: 70069 - RNA, 14 nt, Artificial Sequence
  Description of Artificial Sequence: Synthetic oligonucleotide
cgagaaauaaaguu

SEQ ID NO: 70070 - RNA, 12 nt, Artificial Sequence
  Description of Artificial Sequence: Synthetic oligonucleotide
aggaaaugaucc

SEQ ID NO: 70071 - RNA, 13 nt, Artificial Sequence
  Description of Artificial Sequence: Synthetic oligonucleotide
gaagaaaugaaac

SEQ ID NO: 70072 - RNA, 13 nt, Artificial Sequence
  Description of Artificial Sequence: Synthetic oligonucleotide
guuuccauccucc

SEQ ID NO: 70073 - RNA, 15 nt, Artificial Sequence
  Description of Artificial Sequence: Synthetic oligonucleotide
acugaaaaucuuuga

SEQ ID NO: 70074 - RNA, 11 nt, Artificial Sequence
  Description of Artificial Sequence: Synthetic oligonucleotide
ugccguucagg

SEQ ID NO: 70075 - RNA, 13 nt, Artificial Sequence
  Description of Artificial Sequence: Synthetic oligonucleotide
caggguccagaag

SEQ ID NO: 70076 - RNA, 13 nt, Artificial Sequence
  Description of Artificial Sequence: Synthetic oligonucleotide
ucaagacugcuug

SEQ ID NO: 70077 - RNA, 13 nt, Artificial Sequence
  Description of Artificial Sequence: Synthetic oligonucleotide
uccaugucuuugg

SEQ ID NO: 70078 - RNA, 11 nt, Artificial Sequence
  Description of Artificial Sequence: Synthetic oligonucleotide
gccugaaacac

SEQ ID NO: 70079 - RNA, 12 nt, Artificial Sequence
  Description of Artificial Sequence: Synthetic oligonucleotide
ucucuguaccuc

SEQ ID NO: 70080 - RNA, 12 nt, Artificial Sequence
  Description of Artificial Sequence: Synthetic oligonucleotide
agcaagacaaga

SEQ ID NO: 70081 - RNA, 13 nt, Artificial Sequence
  Description of Artificial Sequence: Synthetic oligonucleotide
gcaagacaagaaa

SEQ ID NO: 70082 - RNA, 12 nt, Artificial Sequence
  Description of Artificial Sequence: Synthetic oligonucleotide
uguacaagaucc

SEQ ID NO: 70083 - RNA, 12 nt, Artificial Sequence
  Description of Artificial Sequence: Synthetic oligonucleotide
cguacuugcaga

SEQ ID NO: 70084 - RNA, 13 nt, Artificial Sequence
  Description of Artificial Sequence: Synthetic oligonucleotide
cgaucgauacaga

SEQ ID NO: 70085 - RNA, 13 nt, Artificial Sequence
  Description of Artificial Sequence: Synthetic oligonucleotide
uauaaaaauaaau

SEQ ID NO: 70086 - RNA, 13 nt, Artificial Sequence
  Description of Artificial Sequence: Synthetic oligonucleotide
uaaaaauaaauau

SEQ ID NO: 70087 - RNA, 13 nt, Artificial Sequence
  Description of Artificial Sequence: Synthetic oligonucleotide
uuugacugcugug

SEQ ID NO: 70088 - RNA, 13 nt, Artificial Sequence
  Description of Artificial Sequence: Synthetic oligonucleotide
ggagaugagagac

SEQ ID NO: 70089 - RNA, 10 nt, Artificial Sequence
  Description of Artificial Sequence: Synthetic oligonucleotide
ucccacuugg

SEQ ID NO: 70090 - RNA, 10 nt, Artificial Sequence
  Description of Artificial Sequence: Synthetic oligonucleotide
guucacggcc

SEQ ID NO: 70091 - RNA, 12 nt, Artificial Sequence
  Description of Artificial Sequence: Synthetic oligonucleotide
accaucacacca

SEQ ID NO: 70092 - RNA, 10 nt, Artificial Sequence
  Description of Artificial Sequence: Synthetic oligonucleotide
cugcggguuu

SEQ ID NO: 70093 - RNA, 9 nt, Artificial Sequence
  Description of Artificial Sequence: Synthetic oligonucleotide
uccaguuug

SEQ ID NO: 70094 - RNA, 12 nt, Artificial Sequence
  Description of Artificial Sequence: Synthetic oligonucleotide
uuaaggacuucu

SEQ ID NO: 70095 - RNA, 12 nt, Artificial Sequence
  Description of Artificial Sequence: Synthetic oligonucleotide
agugggacagag

SEQ ID NO: 70096 - RNA, 13 nt, Artificial Sequence
  Description of Artificial Sequence: Synthetic oligonucleotide
auuuguuauugug

SEQ ID NO: 70097 - RNA, 12 nt, Artificial Sequence
  Description of Artificial Sequence: Synthetic oligonucleotide
ucaaaugcauuu

SEQ ID NO: 70098 - RNA, 9 nt, Artificial Sequence
  Description of Artificial Sequence: Synthetic oligonucleotide
aggaaagcc

SEQ ID NO: 70099 - RNA, 10 nt, Artificial Sequence
  Description of Artificial Sequence: Synthetic oligonucleotide
ggaaagcccu

SEQ ID NO: 70100 - RNA, 11 nt, Artificial Sequence
  Description of Artificial Sequence: Synthetic oligonucleotide
ccagcauggcc

SEQ ID NO: 70101 - RNA, 10 nt, Artificial Sequence
  Description of Artificial Sequence: Synthetic oligonucleotide
uucucccuga

SEQ ID NO: 70102 - RNA, 11 nt, Artificial Sequence
  Description of Artificial Sequence: Synthetic oligonucleotide
aagaagcccuu

SEQ ID NO: 70103 - RNA, 11 nt, Artificial Sequence
  Description of Artificial Sequence: Synthetic oligonucleotide
gaagcccuuca

SEQ ID NO: 70104 - RNA, 10 nt, Artificial Sequence
  Description of Artificial Sequence: Synthetic oligonucleotide
cccuucagcg

SEQ ID NO: 70105 - RNA, 10 nt, Artificial Sequence
  Description of Artificial Sequence: Synthetic oligonucleotide
cuucagcggc

SEQ ID NO: 70106 - RNA, 11 nt, Artificial Sequence
  Description of Artificial Sequence: Synthetic oligonucleotide
cagcggccagu

SEQ ID NO: 70107 - RNA, 11 nt, Artificial Sequence
  Description of Artificial Sequence: Synthetic oligonucleotide
gaaaagcuccg

SEQ ID NO: 70108 - RNA, 10 nt, Artificial Sequence
  Description of Artificial Sequence: Synthetic oligonucleotide
aaagcuccgg

SEQ ID NO: 70109 - RNA, 12 nt, Artificial Sequence
  Description of Artificial Sequence: Synthetic oligonucleotide
gucaacagucug

SEQ ID NO: 70110 - RNA, 12 nt, Artificial Sequence
  Description of Artificial Sequence: Synthetic oligonucleotide
agaguucaaaag

SEQ ID NO: 70111 - RNA, 12 nt, Artificial Sequence
  Description of Artificial Sequence: Synthetic oligonucleotide
gaguucaaaagc

SEQ ID NO: 70112 - RNA, 11 nt, Artificial Sequence
  Description of Artificial Sequence: Synthetic oligonucleotide
ucaaaagcccu

SEQ ID NO: 70113 - RNA, 11 nt, Artificial Sequence
  Description of Artificial Sequence: Synthetic oligonucleotide
caaaagcccuu

SEQ ID NO: 70114 - RNA, 11 nt, Artificial Sequence
  Description of Artificial Sequence: Synthetic oligonucleotide
aaagcccuuca

SEQ ID NO: 70115 - RNA, 11 nt, Artificial Sequence
  Description of Artificial Sequence: Synthetic oligonucleotide
aagcccuucag

SEQ ID NO: 70116 - RNA, 12 nt, Artificial Sequence
  Description of Artificial Sequence: Synthetic oligonucleotide
ugaagccgcucg

SEQ ID NO: 70117 - RNA, 11 nt, Artificial Sequence
  Description of Artificial Sequence: Synthetic oligonucleotide
acgccagucaa

SEQ ID NO: 70118 - RNA, 12 nt, Artificial Sequence
  Description of Artificial Sequence: Synthetic oligonucleotide
ucuuggugcgug

SEQ ID NO: 70119 - RNA, 13 nt, Artificial Sequence
  Description of Artificial Sequence: Synthetic oligonucleotide
uuggauucaucag

SEQ ID NO: 70120 - RNA, 12 nt, Artificial Sequence
  Description of Artificial Sequence: Synthetic oligonucleotide
ggaauaccuaag

SEQ ID NO: 70121 - RNA, 11 nt, Artificial Sequence
  Description of Artificial Sequence: Synthetic oligonucleotide
uuugaggcuca

SEQ ID NO: 70122 - RNA, 10 nt, Artificial Sequence
  Description of Artificial Sequence: Synthetic oligonucleotide
cuacaauugg

SEQ ID NO: 70123 - RNA, 11 nt, Artificial Sequence
  Description of Artificial Sequence: Synthetic oligonucleotide
aguuaggagcc

SEQ ID NO: 70124 - RNA, 12 nt, Artificial Sequence
  Description of Artificial Sequence: Synthetic oligonucleotide
gucaauauccac

SEQ ID NO: 70125 - RNA, 12 nt, Artificial Sequence
  Description of Artificial Sequence: Synthetic oligonucleotide
uguucagucaca

SEQ ID NO: 70126 - RNA, 11 nt, Artificial Sequence
  Description of Artificial Sequence: Synthetic oligonucleotide
cacacacauac

SEQ ID NO: 70127 - RNA, 11 nt, Artificial Sequence
  Description of Artificial Sequence: Synthetic oligonucleotide
uccuuuugcuu

SEQ ID NO: 70128 - RNA, 15 nt, Artificial Sequence
  Description of Artificial Sequence: Synthetic oligonucleotide
uuuaaaguaauuuuu

SEQ ID NO: 70129 - RNA, 12 nt, Artificial Sequence
  Description of Artificial Sequence: Synthetic oligonucleotide
aacagucaaugg

SEQ ID NO: 70130 - RNA, 12 nt, Artificial Sequence
  Description of Artificial Sequence: Synthetic oligonucleotide
cgacaaaccaau

SEQ ID NO: 70131 - RNA, 11 nt, Artificial Sequence
  Description of Artificial Sequence: Synthetic oligonucleotide
cugcuaccacu

SEQ ID NO: 70132 - RNA, 12 nt, Artificial Sequence
  Description of Artificial Sequence: Synthetic oligonucleotide
caagcggucuua

SEQ ID NO: 70133 - RNA, 12 nt, Artificial Sequence
  Description of Artificial Sequence: Synthetic oligonucleotide
gucuuaccggcu

SEQ ID NO: 70134 - RNA, 10 nt, Artificial Sequence
  Description of Artificial Sequence: Synthetic oligonucleotide
auggguuacc

SEQ ID NO: 70135 - RNA, 10 nt, Artificial Sequence
  Description of Artificial Sequence: Synthetic oligonucleotide
uuaccugcga

SEQ ID NO: 70136 - RNA, 11 nt, Artificial Sequence
  Description of Artificial Sequence: Synthetic oligonucleotide
aucuugcugag

SEQ ID NO: 70137 - RNA, 12 nt, Artificial Sequence
  Description of Artificial Sequence: Synthetic oligonucleotide
gcauaaaacagu

SEQ ID NO: 70138 - RNA, 11 nt, Artificial Sequence
  Description of Artificial Sequence: Synthetic oligonucleotide
uccuuuauccu

SEQ ID NO: 70139 - RNA, 11 nt, Artificial Sequence
  Description of Artificial Sequence: Synthetic oligonucleotide
aacgcaaguug

SEQ ID NO: 70140 - RNA, 12 nt, Artificial Sequence
  Description of Artificial Sequence: Synthetic oligonucleotide
aacugaaaccau

SEQ ID NO: 70141 - RNA, 13 nt, Artificial Sequence
  Description of Artificial Sequence: Synthetic oligonucleotide
cuuuguuaaauau

SEQ ID NO: 70142 - RNA, 13 nt, Artificial Sequence
  Description of Artificial Sequence: Synthetic oligonucleotide
uauauuaaaaguu

SEQ ID NO: 70143 - RNA, 12 nt, Artificial Sequence
  Description of Artificial Sequence: Synthetic oligonucleotide
uuuugacuuaac

SEQ ID NO: 70144 - RNA, 12 nt, Artificial Sequence
  Description of Artificial Sequence: Synthetic oligonucleotide
caaacucagcac

SEQ ID NO: 70145 - RNA, 10 nt, Artificial Sequence
  Description of Artificial Sequence: Synthetic oligonucleotide
gcugaccuca

SEQ ID NO: 70146 - RNA, 13 nt, Artificial Sequence
  Description of Artificial Sequence: Synthetic oligonucleotide
uuauucagaucgc

SEQ ID NO: 70147 - RNA, 12 nt, Artificial Sequence
  Description of Artificial Sequence: Synthetic oligonucleotide
ggguucugggau

SEQ ID NO: 70148 - RNA, 14 nt, Artificial Sequence
  Description of Artificial Sequence: Synthetic oligonucleotide
uauuggaaauuaug

SEQ ID NO: 70149 - RNA, 12 nt, Artificial Sequence
  Description of Artificial Sequence: Synthetic oligonucleotide
uggaagcacuag

SEQ ID NO: 70150 - RNA, 12 nt, Artificial Sequence
  Description of Artificial Sequence: Synthetic oligonucleotide
uuuuuaugugga

SEQ ID NO: 70151 - RNA, 11 nt, Artificial Sequence
  Description of Artificial Sequence: Synthetic oligonucleotide
gaauugguaga

SEQ ID NO: 70152 - RNA, 12 nt, Artificial Sequence
  Description of Artificial Sequence: Synthetic oligonucleotide
uagacuuggaga

SEQ ID NO: 70153 - RNA, 12 nt, Artificial Sequence
  Description of Artificial Sequence: Synthetic oligonucleotide
uacaguauucca

SEQ ID NO: 70154 - RNA, 14 nt, Artificial Sequence
  Description of Artificial Sequence: Synthetic oligonucleotide
cacugaugaauuaa

SEQ ID NO: 70155 - RNA, 11 nt, Artificial Sequence
  Description of Artificial Sequence: Synthetic oligonucleotide
cacaucaucac

SEQ ID NO: 70156 - RNA, 12 nt, Artificial Sequence
  Description of Artificial Sequence: Synthetic oligonucleotide
ucaccaaacaga

SEQ ID NO: 70157 - RNA, 11 nt, Artificial Sequence
  Description of Artificial Sequence: Synthetic oligonucleotide
gaacaugaugg

SEQ ID NO: 70158 - RNA, 11 nt, Artificial Sequence
  Description of Artificial Sequence: Synthetic oligonucleotide
auguagacugc

SEQ ID NO: 70159 - RNA, 12 nt, Artificial Sequence
  Description of Artificial Sequence: Synthetic oligonucleotide
gaucuauuuaug

SEQ ID NO: 70160 - RNA, 11 nt, Artificial Sequence
  Description of Artificial Sequence: Synthetic oligonucleotide
cacuauuauca

SEQ ID NO: 70161 - RNA, 10 nt, Artificial Sequence
  Description of Artificial Sequence: Synthetic oligonucleotide
ucaguucugc

SEQ ID NO: 70162 - RNA, 12 nt, Artificial Sequence
  Description of Artificial Sequence: Synthetic oligonucleotide
gauuaaaccuac

SEQ ID NO: 70163 - RNA, 12 nt, Artificial Sequence
  Description of Artificial Sequence: Synthetic oligonucleotide
uaaaauccuucu

SEQ ID NO: 70164 - RNA, 11 nt, Artificial Sequence
  Description of Artificial Sequence: Synthetic oligonucleotide
augcuguagac

SEQ ID NO: 70165 - RNA, 12 nt, Artificial Sequence
  Description of Artificial Sequence: Synthetic oligonucleotide
ugauaggaauag

SEQ ID NO: 70166 - RNA, 10 nt, Artificial Sequence
  Description of Artificial Sequence: Synthetic oligonucleotide
auggcccuga

SEQ ID NO: 70167 - RNA, 10 nt, Artificial Sequence
  Description of Artificial Sequence: Synthetic oligonucleotide
uccucaagca

SEQ ID NO: 70168 - RNA, 9 nt, Artificial Sequence
  Description of Artificial Sequence: Synthetic oligonucleotide
uucagccca

SEQ ID NO: 70169 - RNA, 10 nt, Artificial Sequence
  Description of Artificial Sequence: Synthetic oligonucleotide
cugcugaacc

SEQ ID NO: 70170 - RNA, 11 nt, Artificial Sequence
  Description of Artificial Sequence: Synthetic oligonucleotide
aguucucuuca

SEQ ID NO: 70171 - RNA, 10 nt, Artificial Sequence
  Description of Artificial Sequence: Synthetic oligonucleotide
cagccuagag

SEQ ID NO: 70172 - RNA, 12 nt, Artificial Sequence
  Description of Artificial Sequence: Synthetic oligonucleotide
ucugugaagugu

SEQ ID NO: 70173 - RNA, 13 nt, Artificial Sequence
  Description of Artificial Sequence: Synthetic oligonucleotide
gagaaaauuucaa

SEQ ID NO: 70174 - RNA, 10 nt, Artificial Sequence
  Description of Artificial Sequence: Synthetic oligonucleotide
auccuccuga

SEQ ID NO: 70175 - RNA, 11 nt, Artificial Sequence
  Description of Artificial Sequence: Synthetic oligonucleotide
ugacaucauau

SEQ ID NO: 70176 - RNA, 12 nt, Artificial Sequence
  Description of Artificial Sequence: Synthetic oligonucleotide
aucuucaucaua

SEQ ID NO: 70177 - RNA, 12 nt, Artificial Sequence
  Description of Artificial Sequence: Synthetic oligonucleotide
acuagcuauuaa

SEQ ID NO: 70178 - RNA, 13 nt, Artificial Sequence
  Description of Artificial Sequence: Synthetic oligonucleotide
cucuacuaaaaau

SEQ ID NO: 70179 - RNA, 11 nt, Artificial Sequence
  Description of Artificial Sequence: Synthetic oligonucleotide
cuaucucgccu

SEQ ID NO: 70180 - RNA, 12 nt, Artificial Sequence
  Description of Artificial Sequence: Synthetic oligonucleotide
uucgguccaguu

SEQ ID NO: 70181 - RNA, 10 nt, Artificial Sequence
  Description of Artificial Sequence: Synthetic oligonucleotide
auguagccgc

SEQ ID NO: 70182 - RNA, 11 nt, Artificial Sequence
  Description of Artificial Sequence: Synthetic oligonucleotide
gaggagacuug

SEQ ID NO: 70183 - RNA, 11 nt, Artificial Sequence
  Description of Artificial Sequence: Synthetic oligonucleotide
aguagugagga

SEQ ID NO: 70184 - RNA, 13 nt, Artificial Sequence
  Description of Artificial Sequence: Synthetic oligonucleotide
agaugaguacaaa

SEQ ID NO: 70185 - RNA, 12 nt, Artificial Sequence
  Description of Artificial Sequence: Synthetic oligonucleotide
uuguuaaugggc

SEQ ID NO: 70186 - RNA, 12 nt, Artificial Sequence
  Description of Artificial Sequence: Synthetic oligonucleotide
uuuuaauuuauu

SEQ ID NO: 70187 - RNA, 11 nt, Artificial Sequence
  Description of Artificial Sequence: Synthetic oligonucleotide
auuuaaauaug

SEQ ID NO: 70188 - RNA, 12 nt, Artificial Sequence
  Description of Artificial Sequence: Synthetic oligonucleotide
auccuuuguuuc

SEQ ID NO: 70189 - RNA, 13 nt, Artificial Sequence
  Description of Artificial Sequence: Synthetic oligonucleotide
gucuaaguguuug

SEQ ID NO: 70190 - RNA, 11 nt, Artificial Sequence
  Description of Artificial Sequence: Synthetic oligonucleotide
ccugugacaaa

SEQ ID NO: 70191 - RNA, 12 nt, Artificial Sequence
  Description of Artificial Sequence: Synthetic oligonucleotide
caggcugaauua

SEQ ID NO: 70192 - RNA, 13 nt, Artificial Sequence
  Description of Artificial Sequence: Synthetic oligonucleotide
ucauucuuacaau

SEQ ID NO: 70193 - RNA, 14 nt, Artificial Sequence
  Description of Artificial Sequence: Synthetic oligonucleotide
cauucuuacaauug

SEQ ID NO: 70194 - RNA, 11 nt, Artificial Sequence
  Description of Artificial Sequence: Synthetic oligonucleotide
agagaguguac

SEQ ID NO: 70195 - RNA, 11 nt, Artificial Sequence
  Description of Artificial Sequence: Synthetic oligonucleotide
gaacucagcag

SEQ ID NO: 70196 - RNA, 12 nt, Artificial Sequence
  Description of Artificial Sequence: Synthetic oligonucleotide
uuauuuucagua

SEQ ID NO: 70197 - RNA, 11 nt, Artificial Sequence
  Description of Artificial Sequence: Synthetic oligonucleotide
cuuaaauggaa

SEQ ID NO: 70198 - RNA, 12 nt, Artificial Sequence
  Description of Artificial Sequence: Synthetic oligonucleotide
gccuaaaauugu

SEQ ID NO: 70199 - RNA, 12 nt, Artificial Sequence
  Description of Artificial Sequence: Synthetic oligonucleotide
acuaacaucugg

SEQ ID NO: 70200 - RNA, 11 nt, Artificial Sequence
  Description of Artificial Sequence: Synthetic oligonucleotide
gacugugagcu

SEQ ID NO: 70201 - RNA, 13 nt, Artificial Sequence
  Description of Artificial Sequence: Synthetic oligonucleotide
gcuuuuuauuaau

SEQ ID NO: 70202 - RNA, 12 nt, Artificial Sequence
  Description of Artificial Sequence: Synthetic oligonucleotide
ucuucuuacauu

SEQ ID NO: 70203 - RNA, 14 nt, Artificial Sequence
  Description of Artificial Sequence: Synthetic oligonucleotide
auuuguaaaaaugu

SEQ ID NO: 70204 - RNA, 14 nt, Artificial Sequence
  Description of Artificial Sequence: Synthetic oligonucleotide
ucuuaauucauauu

SEQ ID NO: 70205 - RNA, 12 nt, Artificial Sequence
  Description of Artificial Sequence: Synthetic oligonucleotide
aacuaaucauga

SEQ ID NO: 70206 - RNA, 11 nt, Artificial Sequence
  Description of Artificial Sequence: Synthetic oligonucleotide
cugcucuuggg

SEQ ID NO: 70207 - RNA, 12 nt, Artificial Sequence
  Description of Artificial Sequence: Synthetic oligonucleotide
aguagcuuugag

SEQ ID NO: 70208 - RNA, 13 nt, Artificial Sequence
  Description of Artificial Sequence: Synthetic oligonucleotide
acguaauauuuca

SEQ ID NO: 70209 - RNA, 12 nt, Artificial Sequence
  Description of Artificial Sequence: Synthetic oligonucleotide
auucucuucacu

SEQ ID NO: 70210 - RNA, 13 nt, Artificial Sequence
  Description of Artificial Sequence: Synthetic oligonucleotide
uaaugcuaagaaa

SEQ ID NO: 70211 - RNA, 11 nt, Artificial Sequence
  Description of Artificial Sequence: Synthetic oligonucleotide
cugaaaaucaa

SEQ ID NO: 70212 - RNA, 13 nt, Artificial Sequence
  Description of Artificial Sequence: Synthetic oligonucleotide
auaugauuacuuu

SEQ ID NO: 70213 - RNA, 13 nt, Artificial Sequence
  Description of Artificial Sequence: Synthetic oligonucleotide
auuuuguucuaca

SEQ ID NO: 70214 - RNA, 11 nt, Artificial Sequence
  Description of Artificial Sequence: Synthetic oligonucleotide
ccgggacucuc

SEQ ID NO: 70215 - RNA, 13 nt, Artificial Sequence
  Description of Artificial Sequence: Synthetic oligonucleotide
cuuuaaaguaaag

SEQ ID NO: 70216 - RNA, 12 nt, Artificial Sequence
  Description of Artificial Sequence: Synthetic oligonucleotide
cuggaagccugg

SEQ ID NO: 70217 - RNA, 13 nt, Artificial Sequence
  Description of Artificial Sequence: Synthetic oligonucleotide
aaacaaaagagag

SEQ ID NO: 70218 - RNA, 12 nt, Artificial Sequence
  Description of Artificial Sequence: Synthetic oligonucleotide
ucaguuaugccg

SEQ ID NO: 70219 - RNA, 12 nt, Artificial Sequence
  Description of Artificial Sequence: Synthetic oligonucleotide
aaaagaagucca

SEQ ID NO: 70220 - RNA, 10 nt, Artificial Sequence
  Description of Artificial Sequence: Synthetic oligonucleotide
ggugagguua

SEQ ID NO: 70221 - RNA, 10 nt, Artificial Sequence
  Description of Artificial Sequence: Synthetic oligonucleotide
ggaagaggac

SEQ ID NO: 70222 - RNA, 12 nt, Artificial Sequence
  Description of Artificial Sequence: Synthetic oligonucleotide
agcaaguauugu

SEQ ID NO: 70223 - RNA, 11 nt, Artificial Sequence
  Description of Artificial Sequence: Synthetic oligonucleotide
uuguagcacuc

SEQ ID NO: 70224 - RNA, 13 nt, Artificial Sequence
  Description of Artificial Sequence: Synthetic oligonucleotide
caaaaccacaaau

SEQ ID NO: 70225 - RNA, 11 nt, Artificial Sequence
  Description of Artificial Sequence: Synthetic oligonucleotide
aagcccauaca

SEQ ID NO: 70226 - RNA, 10 nt, Artificial Sequence
  Description of Artificial Sequence: Synthetic oligonucleotide
gcccauacag

SEQ ID NO: 70227 - RNA, 11 nt, Artificial Sequence
  Description of Artificial Sequence: Synthetic oligonucleotide
agaaaccuucc

SEQ ID NO: 70228 - RNA, 9 nt, Artificial Sequence
  Description of Artificial Sequence: Synthetic oligonucleotide
uauaccuac

SEQ ID NO: 70229 - RNA, 12 nt, Artificial Sequence
  Description of Artificial Sequence: Synthetic oligonucleotide
ccaguuuucgga

SEQ ID NO: 70230 - RNA, 8 nt, Artificial Sequence
  Description of Artificial Sequence: Synthetic oligonucleotide
gaacaggg

SEQ ID NO: 70231 - RNA, 12 nt, Artificial Sequence
  Description of Artificial Sequence: Synthetic oligonucleotide
uaacuuuccagu

SEQ ID NO: 70232 - RNA, 13 nt, Artificial Sequence
  Description of Artificial Sequence: Synthetic oligonucleotide
aaguuugguuuug

SEQ ID NO: 70233 - RNA, 11 nt, Artificial Sequence
  Description of Artificial Sequence: Synthetic oligonucleotide
uucccacugua

SEQ ID NO: 70234 - RNA, 12 nt, Artificial Sequence
  Description of Artificial Sequence: Synthetic oligonucleotide
gauaccauauga

SEQ ID NO: 70235 - RNA, 10 nt, Artificial Sequence
  Description of Artificial Sequence: Synthetic oligonucleotide
acaugggcug

SEQ ID NO: 70236 - RNA, 12 nt, Artificial Sequence
  Description of Artificial Sequence: Synthetic oligonucleotide
aacuuuuucaua

SEQ ID NO: 70237 - RNA, 11 nt, Artificial Sequence
  Description of Artificial Sequence: Synthetic oligonucleotide
augaggccgga

SEQ ID NO: 70238 - RNA, 10 nt, Artificial Sequence
  Description of Artificial Sequence: Synthetic oligonucleotide
cugcauuugu

SEQ ID NO: 70239 - RNA, 12 nt, Artificial Sequence
  Description of Artificial Sequence: Synthetic oligonucleotide
auguuuacuacc

SEQ ID NO: 70240 - RNA, 14 nt, Artificial Sequence
  Description of Artificial Sequence: Synthetic oligonucleotide
auuuuuugaugaaa

SEQ ID NO: 70241 - RNA, 13 nt, Artificial Sequence
  Description of Artificial Sequence: Synthetic oligonucleotide
agugugugaauuu

SEQ ID NO: 70242 - RNA, 12 nt, Artificial Sequence
  Description of Artificial Sequence: Synthetic oligonucleotide
agcaauguaugu

SEQ ID NO: 70243 - RNA, 13 nt, Artificial Sequence
  Description of Artificial Sequence: Synthetic oligonucleotide
aagcacauauaua

SEQ ID NO: 70244 - RNA, 13 nt, Artificial Sequence
  Description of Artificial Sequence: Synthetic oligonucleotide
uaauaguuucucc

SEQ ID NO: 70245 - RNA, 12 nt, Artificial Sequence
  Description of Artificial Sequence: Synthetic oligonucleotide
guuucuccaaau

SEQ ID NO: 70246 - RNA, 12 nt, Artificial Sequence
  Description of Artificial Sequence: Synthetic oligonucleotide
acuuccuagaaa

SEQ ID NO: 70247 - RNA, 12 nt, Artificial Sequence
  Description of Artificial Sequence: Synthetic oligonucleotide
acaccauauaug

SEQ ID NO: 70248 - RNA, 13 nt, Artificial Sequence
  Description of Artificial Sequence: Synthetic oligonucleotide
uauaugaauggag

SEQ ID NO: 70249 - RNA, 12 nt, Artificial Sequence
  Description of Artificial Sequence: Synthetic oligonucleotide
cauuuacaggga

SEQ ID NO: 70250 - RNA, 12 nt, Artificial Sequence
  Description of Artificial Sequence: Synthetic oligonucleotide
auuuacagggac

SEQ ID NO: 70251 - RNA, 9 nt, Artificial Sequence
  Description of Artificial Sequence: Synthetic oligonucleotide
gggaccuga

SEQ ID NO: 70252 - RNA, 13 nt, Artificial Sequence
  Description of Artificial Sequence: Synthetic oligonucleotide
guuugacugcauc

SEQ ID NO: 70253 - RNA, 12 nt, Artificial Sequence
  Description of Artificial Sequence: Synthetic oligonucleotide
uugacugcaucg

SEQ ID NO: 70254 - RNA, 11 nt, Artificial Sequence
  Description of Artificial Sequence: Synthetic oligonucleotide
aguucacaggg

SEQ ID NO: 70255 - RNA, 12 nt, Artificial Sequence
  Description of Artificial Sequence: Synthetic oligonucleotide
gcaccucugucc

SEQ ID NO: 70256 - RNA, 14 nt, Artificial Sequence
  Description of Artificial Sequence: Synthetic oligonucleotide
guuugucuuuuuaa

SEQ ID NO: 70257 - RNA, 13 nt, Artificial Sequence
  Description of Artificial Sequence: Synthetic oligonucleotide
uugucuuuuuaag

SEQ ID NO: 70258 - RNA, 12 nt, Artificial Sequence
  Description of Artificial Sequence: Synthetic oligonucleotide
cuaaagguuguc

SEQ ID NO: 70259 - RNA, 11 nt, Artificial Sequence
  Description of Artificial Sequence: Synthetic oligonucleotide
agguugucgac

SEQ ID NO: 70260 - RNA, 12 nt, Artificial Sequence
  Description of Artificial Sequence: Synthetic oligonucleotide
ccuggcaauugu

SEQ ID NO: 70261 - RNA, 11 nt, Artificial Sequence
  Description of Artificial Sequence: Synthetic oligonucleotide
guggugcgagg

SEQ ID NO: 70262 - RNA, 12 nt, Artificial Sequence
  Description of Artificial Sequence: Synthetic oligonucleotide
gagacaugaaau

SEQ ID NO: 70263 - RNA, 12 nt, Artificial Sequence
  Description of Artificial Sequence: Synthetic oligonucleotide
uauauuucucca

SEQ ID NO: 70264 - RNA, 9 nt, Artificial Sequence
  Description of Artificial Sequence: Synthetic oligonucleotide
augaaggcu

SEQ ID NO: 70265 - RNA, 10 nt, Artificial Sequence
  Description of Artificial Sequence: Synthetic oligonucleotide
cuggaguggu

SEQ ID NO: 70266 - RNA, 10 nt, Artificial Sequence
  Description of Artificial Sequence: Synthetic oligonucleotide
ggaagagagg

SEQ ID NO: 70267 - RNA, 11 nt, Artificial Sequence
  Description of Artificial Sequence: Synthetic oligonucleotide
uugcaucgggc

SEQ ID NO: 70268 - RNA, 12 nt, Artificial Sequence
  Description of Artificial Sequence: Synthetic oligonucleotide
uauccuacugug

SEQ ID NO: 70269 - RNA, 12 nt, Artificial Sequence
  Description of Artificial Sequence: Synthetic oligonucleotide
ccuacuguguaa

SEQ ID NO: 70270 - RNA, 11 nt, Artificial Sequence
  Description of Artificial Sequence: Synthetic oligonucleotide
cuuguagugua

SEQ ID NO: 70271 - RNA, 12 nt, Artificial Sequence
  Description of Artificial Sequence: Synthetic oligonucleotide
cuuuguugauug

SEQ ID NO: 70272 - RNA, 13 nt, Artificial Sequence
  Description of Artificial Sequence: Synthetic oligonucleotide
uuguugauugaaa

SEQ ID NO: 70273 - RNA, 14 nt, Artificial Sequence
  Description of Artificial Sequence: Synthetic oligonucleotide
ucuuuuucuuccau

SEQ ID NO: 70274 - RNA, 12 nt, Artificial Sequence
  Description of Artificial Sequence: Synthetic oligonucleotide
aucuuccuucua

SEQ ID NO: 70275 - RNA, 12 nt, Artificial Sequence
  Description of Artificial Sequence: Synthetic oligonucleotide
ugaaugcuucau

SEQ ID NO: 70276 - RNA, 12 nt, Artificial Sequence
  Description of Artificial Sequence: Synthetic oligonucleotide
gaaugcuucaug

SEQ ID NO: 70277 - RNA, 12 nt, Artificial Sequence
  Description of Artificial Sequence: Synthetic oligonucleotide
auucuacuuuga

SEQ ID NO: 70278 - RNA, 12 nt, Artificial Sequence
  Description of Artificial Sequence: Synthetic oligonucleotide
gcaacuacagac

SEQ ID NO: 70279 - RNA, 12 nt, Artificial Sequence
  Description of Artificial Sequence: Synthetic oligonucleotide
accaaggucaac

SEQ ID NO: 70280 - RNA, 12 nt, Artificial Sequence
  Description of Artificial Sequence: Synthetic oligonucleotide
gacuaucucgac

SEQ ID NO: 70281 - RNA, 12 nt, Artificial Sequence
  Description of Artificial Sequence: Synthetic oligonucleotide
accuucccaaac

SEQ ID NO: 70282 - RNA, 13 nt, Artificial Sequence
  Description of Artificial Sequence: Synthetic oligonucleotide
caagcuuagaacu

SEQ ID NO: 70283 - RNA, 14 nt, Artificial Sequence
  Description of Artificial Sequence: Synthetic oligonucleotide
gcuuagaacuuuaa

SEQ ID NO: 70284 - RNA, 13 nt, Artificial Sequence
  Description of Artificial Sequence: Synthetic oligonucleotide
aacuuuaagcaac

SEQ ID NO: 70285 - RNA, 10 nt, Artificial Sequence
  Description of Artificial Sequence: Synthetic oligonucleotide
agaccaccac

SEQ ID NO: 70286 - RNA, 13 nt, Artificial Sequence
  Description of Artificial Sequence: Synthetic oligonucleotide
cgagaaauaaagu

SEQ ID NO: 70287 - RNA, 13 nt, Artificial Sequence
  Description of Artificial Sequence: Synthetic oligonucleotide
gagaaauaaaguu

SEQ ID NO: 70288 - RNA, 11 nt, Artificial Sequence
  Description of Artificial Sequence: Synthetic oligonucleotide
ggaaaugaucc

SEQ ID NO: 70289 - RNA, 12 nt, Artificial Sequence
  Description of Artificial Sequence: Synthetic oligonucleotide
aagaaaugaaac

SEQ ID NO: 70290 - RNA, 12 nt, Artificial Sequence
  Description of Artificial Sequence: Synthetic oligonucleotide
uuuccauccucc

SEQ ID NO: 70291 - RNA, 14 nt, Artificial Sequence
  Description of Artificial Sequence: Synthetic oligonucleotide
cugaaaaucuuuga

SEQ ID NO: 70292 - RNA, 10 nt, Artificial Sequence
  Description of Artificial Sequence: Synthetic oligonucleotide
gccguucagg

SEQ ID NO: 70293 - RNA, 12 nt, Artificial Sequence
  Description of Artificial Sequence: Synthetic oligonucleotide
aggguccagaag

SEQ ID NO: 70294 - RNA, 12 nt, Artificial Sequence
  Description of Artificial Sequence: Synthetic oligonucleotide
caagacugcuug

SEQ ID NO: 70295 - RNA, 12 nt, Artificial Sequence
  Description of Artificial Sequence: Synthetic oligonucleotide
ccaugucuuugg

SEQ ID NO: 70296 - RNA, 10 nt, Artificial Sequence
  Description of Artificial Sequence: Synthetic oligonucleotide
ccugaaacac

SEQ ID NO: 70297 - RNA, 11 nt, Artificial Sequence
  Description of Artificial Sequence: Synthetic oligonucleotide
cucuguaccuc

SEQ ID NO: 70298 - RNA, 11 nt, Artificial Sequence
  Description of Artificial Sequence: Synthetic oligonucleotide
gcaagacaaga

SEQ ID NO: 70299 - RNA, 12 nt, Artificial Sequence
  Description of Artificial Sequence: Synthetic oligonucleotide
caagacaagaaa

SEQ ID NO: 70300 - RNA, 11 nt, Artificial Sequence
  Description of Artificial Sequence: Synthetic oligonucleotide
guacaagaucc

SEQ ID NO: 70301 - RNA, 11 nt, Artificial Sequence
  Description of Artificial Sequence: Synthetic oligonucleotide
guacuugcaga

SEQ ID NO: 70302 - RNA, 12 nt, Artificial Sequence
  Description of Artificial Sequence: Synthetic oligonucleotide
gaucgauacaga

SEQ ID NO: 70303 - RNA, 12 nt, Artificial Sequence
  Description of Artificial Sequence: Synthetic oligonucleotide
auaaaaauaaau

SEQ ID NO: 70304 - RNA, 12 nt, Artificial Sequence
  Description of Artificial Sequence: Synthetic oligonucleotide
aaaaauaaauau

SEQ ID NO: 70305 - RNA, 12 nt, Artificial Sequence
  Description of Artificial Sequence: Synthetic oligonucleotide
uugacugcugug

SEQ ID NO: 70306 - RNA, 12 nt, Artificial Sequence
  Description of Artificial Sequence: Synthetic oligonucleotide
gagaugagagac

SEQ ID NO: 70307 - RNA, 9 nt, Artificial Sequence
  Description of Artificial Sequence: Synthetic oligonucleotide
cccacuugg

SEQ ID NO: 70308 - RNA, 2037 nt, Homo sapiens
ccagucguucgccggaaagcauuugucucccaccucaucauaacaacaauuaauuuccucuggggccugaggagggcagaauuucaaccuucggugugcuugggaguggcgauugugauuuacacgacaaaaugccgaggugcucgguggagucauggcagugcccuuuguggaagacugggacuuggugcaaacccugggagaaggugccuauggagaaguucaacuugcugugaauagaguaacugaagaagcagucgcagugaagauuguagauaugaagcgugccguagacuguccagaaaauauuaagaaagagaucuguaucaauaaaaugcuaaaucaugaaaauguaguaaaauucuauggucacaggagagaaggcaauauccaauauuuauuucuggaguacuguaguggaggagagcuuuuugacagaauagagccagacauaggcaugccugaaccagaugcucagagauucuuccaucaacucauggcaggggugguuuaucugcaugguauuggaauaacucacagggauauuaaaccagaaaaucuucuguuggaugaaagggauaaccucaaaaucucagacuuuggcuuggcaacaguauuucgguauaauaaucgugagcguuuguugaacaagaugugugguacuuuaccauauguugcuccagaacuucugaagagaagagaauuucaugcagaaccaguugauguuugguccuguggaauaguacuuacugcaaugcucgcuggagaauugccaugggaccaacccagugacagcugucaggaguauucugacuggaaagaaaaaaaaacauaccucaacccuuggaaaaaaaucgauucugcuccucuagcucugcugcauaaaaucuuaguugagaauccaucagcaagaauuaccauuccagacaucaaaaaagauagaugguacaacaaaccccucaagaaaggggcaaaaaggccccgagucacuucagguggugugucagagucucccaguggauuuucuaagcacauucaauccaauuuggacuucucuccaguaaacagugcuucuagugaagaaaaugugaaguacuccaguucucagccagaaccccgcacaggucuuuccuuaugggauaccagccccucauacauugauaaauugguacaagggaucagcuuuucccagcccacauguccugaucauaugcuuuugaauagucaguuacuuggcaccccaggauccucacagaaccccuggcagcgguuggucaaaagaaugacacgauucuuuaccaaauuggaugcagacaaaucuuaucaaugccugaaagagacuugugagaaguugggcuaucaauggaagaaaaguuguaugaaucagguuacuauaucaacaacugauaggagaaacaauaaacucauuuucaaagugaauuuguuagaaauggaugauaaaauauugguugacuuccggcuuucuaagggugauggauuggaguucaagagacacuuccugaagauuaaagggaagcugauugauauugugagcagccagaagguuuggcuuccugccacaugaucggaccaucggcucuggggaauccuggugaauauagugcugcuauguugacauuauucuuccuagagaagauuauccuguccugcaaacugcaaauaguaguuccugaaguguucacuucccuguuuauccaaacaucuuccaauuuauuuuguuuguucggcauacaaauaauaccuauaucuuaauuguaagcaaaacuuuggggaaaggaugaauagaauucauuugauuauuucuucauguguguuuaguaucugaauuugaaacucaucugguggaaaccaaguuucaggggacaugaguuuuccagcuuuuauacacacguaucucauuuuuaucaaaacauuuuguuuaauucaaaaaguacauauuucuuccauguugauuuaauucuaagaugaaccaauaaagacauaauucuugcaaaaaaaaaaaaaaaaaaaaaaaaa

SEQ ID NO: 70309 - RNA, 19 nt, Artificial Sequence
  Description of Artificial Sequence: Synthetic oligonucleotide
ccagucguucgccggaaag

SEQ ID NO: 70310 - RNA, 19 nt, Artificial Sequence
  Description of Artificial Sequence: Synthetic oligonucleotide
gcauuugucucccaccuca

SEQ ID NO: 70311 - RNA, 19 nt, Artificial Sequence
  Description of Artificial Sequence: Synthetic oligonucleotide
aucauaacaacaauuaauu

SEQ ID NO: 70312 - RNA, 19 nt, Artificial Sequence
  Description of Artificial Sequence: Synthetic oligonucleotide
uuccucuggggccugagga

SEQ ID NO: 70313 - RNA, 19 nt, Artificial Sequence
  Description of Artificial Sequence: Synthetic oligonucleotide
agggcagaauuucaaccuu

SEQ ID NO: 70314 - RNA, 19 nt, Artificial Sequence
  Description of Artificial Sequence: Synthetic oligonucleotide
ucggugugcuugggagugg

SEQ ID NO: 70315 - RNA, 19 nt, Artificial Sequence
  Description of Artificial Sequence: Synthetic oligonucleotide
gcgauugugauuuacacga

SEQ ID NO: 70316 - RNA, 19 nt, Artificial Sequence
  Description of Artificial Sequence: Synthetic oligonucleotide
acaaaaugccgaggugcuc

SEQ ID NO: 70317 - RNA, 19 nt, Artificial Sequence
  Description of Artificial Sequence: Synthetic oligonucleotide
cgguggagucauggcagug

SEQ ID NO: 70318 - RNA, 19 nt, Artificial Sequence
  Description of Artificial Sequence: Synthetic oligonucleotide
gcccuuuguggaagacugg

SEQ ID NO: 70319 - RNA, 19 nt, Artificial Sequence
  Description of Artificial Sequence: Synthetic oligonucleotide
ggacuuggugcaaacccug

SEQ ID NO: 70320 - RNA, 19 nt, Artificial Sequence
  Description of Artificial Sequence: Synthetic oligonucleotide
gggagaaggugccuaugga

SEQ ID NO: 70321 - RNA, 19 nt, Artificial Sequence
  Description of Artificial Sequence: Synthetic oligonucleotide
agaaguucaacuugcugug

SEQ ID NO: 70322 - RNA, 19 nt, Artificial Sequence
  Description of Artificial Sequence: Synthetic oligonucleotide
gaauagaguaacugaagaa

SEQ ID NO: 70323 - RNA, 19 nt, Artificial Sequence
  Description of Artificial Sequence: Synthetic oligonucleotide
agcagucgcagugaagauu

SEQ ID NO: 70324 - RNA, 19 nt, Artificial Sequence
  Description of Artificial Sequence: Synthetic oligonucleotide
uguagauaugaagcgugcc

SEQ ID NO: 70325 - RNA, 19 nt, Artificial Sequence
  Description of Artificial Sequence: Synthetic oligonucleotide
cguagacuguccagaaaau

SEQ ID NO: 70326 - RNA, 19 nt, Artificial Sequence
  Description of Artificial Sequence: Synthetic oligonucleotide
uauuaagaaagagaucugu

SEQ ID NO: 70327 - RNA, 19 nt, Artificial Sequence
  Description of Artificial Sequence: Synthetic oligonucleotide
uaucaauaaaaugcuaaau

SEQ ID NO: 70328 - RNA, 19 nt, Artificial Sequence
  Description of Artificial Sequence: Synthetic oligonucleotide
ucaugaaaauguaguaaaa

SEQ ID NO: 70329 - RNA, 19 nt, Artificial Sequence
  Description of Artificial Sequence: Synthetic oligonucleotide
auucuauggucacaggaga

SEQ ID NO: 70330 - RNA, 19 nt, Artificial Sequence
  Description of Artificial Sequence: Synthetic oligonucleotide
agaaggcaauauccaauau

SEQ ID NO: 70331 - RNA, 19 nt, Artificial Sequence
  Description of Artificial Sequence: Synthetic oligonucleotide
uuuauuucuggaguacugu

SEQ ID NO: 70332 - RNA, 19 nt, Artificial Sequence
  Description of Artificial Sequence: Synthetic oligonucleotide
uaguggaggagagcuuuuu

SEQ ID NO: 70333 - RNA, 19 nt, Artificial Sequence
  Description of Artificial Sequence: Synthetic oligonucleotide
ugacagaauagagccagac

SEQ ID NO: 70334 - RNA, 19 nt, Artificial Sequence
  Description of Artificial Sequence: Synthetic oligonucleotide
cauaggcaugccugaacca

SEQ ID NO: 70335 - RNA, 19 nt, Artificial Sequence
  Description of Artificial Sequence: Synthetic oligonucleotide
agaugcucagagauucuuc

SEQ ID NO: 70336 - RNA, 19 nt, Artificial Sequence
  Description of Artificial Sequence: Synthetic oligonucleotide
ccaucaacucauggcaggg

SEQ ID NO: 70337 - RNA, 19 nt, Artificial Sequence
  Description of Artificial Sequence: Synthetic oligonucleotide
ggugguuuaucugcauggu

SEQ ID NO: 70338 - RNA, 19 nt, Artificial Sequence
  Description of Artificial Sequence: Synthetic oligonucleotide
uauuggaauaacucacagg

SEQ ID NO: 70339 - RNA, 19 nt, Artificial Sequence
  Description of Artificial Sequence: Synthetic oligonucleotide
ggauauuaaaccagaaaau

SEQ ID NO: 70340 - RNA, 19 nt, Artificial Sequence
  Description of Artificial Sequence: Synthetic oligonucleotide
ucuucuguuggaugaaagg

SEQ ID NO: 70341 - RNA, 19 nt, Artificial Sequence
  Description of Artificial Sequence: Synthetic oligonucleotide
ggauaaccucaaaaucuca

SEQ ID NO: 70342 - RNA, 19 nt, Artificial Sequence
  Description of Artificial Sequence: Synthetic oligonucleotide
agacuuuggcuuggcaaca

SEQ ID NO: 70343 - RNA, 19 nt, Artificial Sequence
  Description of Artificial Sequence: Synthetic oligonucleotide
aguauuucgguauaauaau

SEQ ID NO: 70344 - RNA, 19 nt, Artificial Sequence
  Description of Artificial Sequence: Synthetic oligonucleotide
ucgugagcguuuguugaac

SEQ ID NO: 70345 - RNA, 19 nt, Artificial Sequence
  Description of Artificial Sequence: Synthetic oligonucleotide
caagaugugugguacuuua

SEQ ID NO: 70346 - RNA, 19 nt, Artificial Sequence
  Description of Artificial Sequence: Synthetic oligonucleotide
accauauguugcuccagaa

SEQ ID NO: 70347 - RNA, 19 nt, Artificial Sequence
  Description of Artificial Sequence: Synthetic oligonucleotide
acuucugaagagaagagaa

SEQ ID NO: 70348 - RNA, 19 nt, Artificial Sequence
  Description of Artificial Sequence: Synthetic oligonucleotide
auuucaugcagaaccaguu

SEQ ID NO: 70349 - RNA, 19 nt, Artificial Sequence
  Description of Artificial Sequence: Synthetic oligonucleotide
ugauguuugguccugugga

SEQ ID NO: 70350 - RNA, 19 nt, Artificial Sequence
  Description of Artificial Sequence: Synthetic oligonucleotide
aauaguacuuacugcaaug

SEQ ID NO: 70351 - RNA, 19 nt, Artificial Sequence
  Description of Artificial Sequence: Synthetic oligonucleotide
gcucgcuggagaauugcca

SEQ ID NO: 70352 - RNA, 19 nt, Artificial Sequence
  Description of Artificial Sequence: Synthetic oligonucleotide
augggaccaacccagugac

SEQ ID NO: 70353 - RNA, 19 nt, Artificial Sequence
  Description of Artificial Sequence: Synthetic oligonucleotide
cagcugucaggaguauucu

SEQ ID NO: 70354 - RNA, 19 nt, Artificial Sequence
  Description of Artificial Sequence: Synthetic oligonucleotide
ugacuggaaagaaaaaaaa

SEQ ID NO: 70355 - RNA, 19 nt, Artificial Sequence
  Description of Artificial Sequence: Synthetic oligonucleotide
aacauaccucaacccuugg

SEQ ID NO: 70356 - RNA, 19 nt, Artificial Sequence
  Description of Artificial Sequence: Synthetic oligonucleotide
gaaaaaaaucgauucugcu

SEQ ID NO: 70357 - RNA, 19 nt, Artificial Sequence
  Description of Artificial Sequence: Synthetic oligonucleotide
uccucuagcucugcugcau

SEQ ID NO: 70358 - RNA, 19 nt, Artificial Sequence
  Description of Artificial Sequence: Synthetic oligonucleotide
uaaaaucuuaguugagaau

SEQ ID NO: 70359 - RNA, 19 nt, Artificial Sequence
  Description of Artificial Sequence: Synthetic oligonucleotide
uccaucagcaagaauuacc

SEQ ID NO: 70360 - RNA, 19 nt, Artificial Sequence
  Description of Artificial Sequence: Synthetic oligonucleotide
cauuccagacaucaaaaaa

SEQ ID NO: 70361 - RNA, 19 nt, Artificial Sequence
  Description of Artificial Sequence: Synthetic oligonucleotide
agauagaugguacaacaaa

SEQ ID NO: 70362 - RNA, 19 nt, Artificial Sequence
  Description of Artificial Sequence: Synthetic oligonucleotide
accccucaagaaaggggca

SEQ ID NO: 70363 - RNA, 19 nt, Artificial Sequence
  Description of Artificial Sequence: Synthetic oligonucleotide
aaaaaggccccgagucacu

SEQ ID NO: 70364 - RNA, 19 nt, Artificial Sequence
  Description of Artificial Sequence: Synthetic oligonucleotide
uucagguggugugucagag

SEQ ID NO: 70365 - RNA, 19 nt, Artificial Sequence
  Description of Artificial Sequence: Synthetic oligonucleotide
gucucccaguggauuuucu

SEQ ID NO: 70366 - RNA, 19 nt, Artificial Sequence
  Description of Artificial Sequence: Synthetic oligonucleotide
uaagcacauucaauccaau

SEQ ID NO: 70367 - RNA, 19 nt, Artificial Sequence
  Description of Artificial Sequence: Synthetic oligonucleotide
uuuggacuucucuccagua

SEQ ID NO: 70368 - RNA, 19 nt, Artificial Sequence
  Description of Artificial Sequence: Synthetic oligonucleotide
aaacagugcuucuagugaa

SEQ ID NO: 70369 - RNA, 19 nt, Artificial Sequence
  Description of Artificial Sequence: Synthetic oligonucleotide
agaaaaugugaaguacucc

SEQ ID NO: 70370 - RNA, 19 nt, Artificial Sequence
  Description of Artificial Sequence: Synthetic oligonucleotide
caguucucagccagaaccc

SEQ ID NO: 70371 - RNA, 19 nt, Artificial Sequence
  Description of Artificial Sequence: Synthetic oligonucleotide
ccgcacaggucuuuccuua

SEQ ID NO: 70372 - RNA, 19 nt, Artificial Sequence
  Description of Artificial Sequence: Synthetic oligonucleotide
augggauaccagccccuca

SEQ ID NO: 70373 - RNA, 19 nt, Artificial Sequence
  Description of Artificial Sequence: Synthetic oligonucleotide
auacauugauaaauuggua

SEQ ID NO: 70374 - RNA, 19 nt, Artificial Sequence
  Description of Artificial Sequence: Synthetic oligonucleotide
acaagggaucagcuuuucc

SEQ ID NO: 70375 - RNA, 19 nt, Artificial Sequence
  Description of Artificial Sequence: Synthetic oligonucleotide
ccagcccacauguccugau

SEQ ID NO: 70376 - RNA, 19 nt, Artificial Sequence
  Description of Artificial Sequence: Synthetic oligonucleotide
ucauaugcuuuugaauagu

SEQ ID NO: 70377 - RNA, 19 nt, Artificial Sequence
  Description of Artificial Sequence: Synthetic oligonucleotide
ucaguuacuuggcacccca

SEQ ID NO: 70378 - RNA, 19 nt, Artificial Sequence
  Description of Artificial Sequence: Synthetic oligonucleotide
aggauccucacagaacccc

SEQ ID NO: 70379 - RNA, 19 nt, Artificial Sequence
  Description of Artificial Sequence: Synthetic oligonucleotide
cuggcagcgguuggucaaa

SEQ ID NO: 70380 - RNA, 19 nt, Artificial Sequence
  Description of Artificial Sequence: Synthetic oligonucleotide
aagaaugacacgauucuuu

SEQ ID NO: 70381 - RNA, 19 nt, Artificial Sequence
  Description of Artificial Sequence: Synthetic oligonucleotide
uaccaaauuggaugcagac

SEQ ID NO: 70382 - RNA, 19 nt, Artificial Sequence
  Description of Artificial Sequence: Synthetic oligonucleotide
caaaucuuaucaaugccug

SEQ ID NO: 70383 - RNA, 19 nt, Artificial Sequence
  Description of Artificial Sequence: Synthetic oligonucleotide
gaaagagacuugugagaag

SEQ ID NO: 70384 - RNA, 19 nt, Artificial Sequence
  Description of Artificial Sequence: Synthetic oligonucleotide
guugggcuaucaauggaag

SEQ ID NO: 70385 - RNA, 19 nt, Artificial Sequence
  Description of Artificial Sequence: Synthetic oligonucleotide
gaaaaguuguaugaaucag

SEQ ID NO: 70386 - RNA, 19 nt, Artificial Sequence
  Description of Artificial Sequence: Synthetic oligonucleotide
gguuacuauaucaacaacu

SEQ ID NO: 70387 - RNA, 19 nt, Artificial Sequence
  Description of Artificial Sequence: Synthetic oligonucleotide
ugauaggagaaacaauaaa

SEQ ID NO: 70388 - RNA, 19 nt, Artificial Sequence
  Description of Artificial Sequence: Synthetic oligonucleotide
acucauuuucaaagugaau

SEQ ID NO: 70389 - RNA, 19 nt, Artificial Sequence
  Description of Artificial Sequence: Synthetic oligonucleotide
uuuguuagaaauggaugau

SEQ ID NO: 70390 - RNA, 19 nt, Artificial Sequence
  Description of Artificial Sequence: Synthetic oligonucleotide
uaaaauauugguugacuuc

SEQ ID NO: 70391 - RNA, 19 nt, Artificial Sequence
  Description of Artificial Sequence: Synthetic oligonucleotide
ccggcuuucuaagggugau

SEQ ID NO: 70392 - RNA, 19 nt, Artificial Sequence
  Description of Artificial Sequence: Synthetic oligonucleotide
uggauuggaguucaagaga

SEQ ID NO: 70393 - RNA, 19 nt, Artificial Sequence
  Description of Artificial Sequence: Synthetic oligonucleotide
acacuuccugaagauuaaa

SEQ ID NO: 70394 - RNA, 19 nt, Artificial Sequence
  Description of Artificial Sequence: Synthetic oligonucleotide
agggaagcugauugauauu

SEQ ID NO: 70395 - RNA, 19 nt, Artificial Sequence
  Description of Artificial Sequence: Synthetic oligonucleotide
ugugagcagccagaagguu

SEQ ID NO: 70396 - RNA, 19 nt, Artificial Sequence
  Description of Artificial Sequence: Synthetic oligonucleotide
uuggcuuccugccacauga

SEQ ID NO: 70397 - RNA, 19 nt, Artificial Sequence
  Description of Artificial Sequence: Synthetic oligonucleotide
aucggaccaucggcucugg

SEQ ID NO: 70398 - RNA, 19 nt, Artificial Sequence
  Description of Artificial Sequence: Synthetic oligonucleotide
gggaauccuggugaauaua

SEQ ID NO: 70399 - RNA, 19 nt, Artificial Sequence
  Description of Artificial Sequence: Synthetic oligonucleotide
agugcugcuauguugacau

SEQ ID NO: 70400 - RNA, 19 nt, Artificial Sequence
  Description of Artificial Sequence: Synthetic oligonucleotide
uuauucuuccuagagaaga

SEQ ID NO: 70401 - RNA, 19 nt, Artificial Sequence
  Description of Artificial Sequence: Synthetic oligonucleotide
auuauccuguccugcaaac

SEQ ID NO: 70402 - RNA, 19 nt, Artificial Sequence
  Description of Artificial Sequence: Synthetic oligonucleotide
cugcaaauaguaguuccug

SEQ ID NO: 70403 - RNA, 19 nt, Artificial Sequence
  Description of Artificial Sequence: Synthetic oligonucleotide
gaaguguucacuucccugu

SEQ ID NO: 70404 - RNA, 19 nt, Artificial Sequence
  Description of Artificial Sequence: Synthetic oligonucleotide
uuuauccaaacaucuucca

SEQ ID NO: 70405 - RNA, 19 nt, Artificial Sequence
  Description of Artificial Sequence: Synthetic oligonucleotide
aauuuauuuuguuuguucg

SEQ ID NO: 70406 - RNA, 19 nt, Artificial Sequence
  Description of Artificial Sequence: Synthetic oligonucleotide
ggcauacaaauaauaccua

SEQ ID NO: 70407 - RNA, 19 nt, Artificial Sequence
  Description of Artificial Sequence: Synthetic oligonucleotide
auaucuuaauuguaagcaa

SEQ ID NO: 70408 - RNA, 19 nt, Artificial Sequence
  Description of Artificial Sequence: Synthetic oligonucleotide
aaacuuuggggaaaggaug

SEQ ID NO: 70409 - RNA, 19 nt, Artificial Sequence
  Description of Artificial Sequence: Synthetic oligonucleotide
gaauagaauucauuugauu

SEQ ID NO: 70410 - RNA, 19 nt, Artificial Sequence
  Description of Artificial Sequence: Synthetic oligonucleotide
uauuucuucauguguguuu

SEQ ID NO: 70411 - RNA, 19 nt, Artificial Sequence
  Description of Artificial Sequence: Synthetic oligonucleotide
uaguaucugaauuugaaac

SEQ ID NO: 70412 - RNA, 19 nt, Artificial Sequence
  Description of Artificial Sequence: Synthetic oligonucleotide
cucaucugguggaaaccaa

SEQ ID NO: 70413 - RNA, 19 nt, Artificial Sequence
  Description of Artificial Sequence: Synthetic oligonucleotide
aguuucaggggacaugagu

SEQ ID NO: 70414 - RNA, 19 nt, Artificial Sequence
  Description of Artificial Sequence: Synthetic oligonucleotide
uuuuccagcuuuuauacac

SEQ ID NO: 70415 - RNA, 19 nt, Artificial Sequence
  Description of Artificial Sequence: Synthetic oligonucleotide
cacguaucucauuuuuauc

SEQ ID NO: 70416 - RNA, 19 nt, Artificial Sequence
  Description of Artificial Sequence: Synthetic oligonucleotide
caaaacauuuuguuuaauu

SEQ ID NO: 70417 - RNA, 19 nt, Artificial Sequence
  Description of Artificial Sequence: Synthetic oligonucleotide
ucaaaaaguacauauuucu

SEQ ID NO: 70418 - RNA, 19 nt, Artificial Sequence
  Description of Artificial Sequence: Synthetic oligonucleotide
uuccauguugauuuaauuc

SEQ ID NO: 70419 - RNA, 19 nt, Artificial Sequence
  Description of Artificial Sequence: Synthetic oligonucleotide
cuaagaugaaccaauaaag

SEQ ID NO: 70420 - RNA, 19 nt, Artificial Sequence
  Description of Artificial Sequence: Synthetic oligonucleotide
gacauaauucuugcaaaaa

SEQ ID NO: 70421 - RNA, 25 nt, Artificial Sequence
  Description of Artificial Sequence: Synthetic oligonucleotide
ccagucguucgccggaaagcauuug

SEQ ID NO: 70422 - RNA, 25 nt, Artificial Sequence
  Description of Artificial Sequence: Synthetic oligonucleotide
gucucccaccucaucauaacaacaa

SEQ ID NO: 70423 - RNA, 25 nt, Artificial Sequence
  Description of Artificial Sequence: Synthetic oligonucleotide
auuaauuuccucuggggccugagga

SEQ ID NO: 70424 - RNA, 25 nt, Artificial Sequence
  Description of Artificial Sequence: Synthetic oligonucleotide
agggcagaauuucaaccuucggugu

SEQ ID NO: 70425 - RNA, 25 nt, Artificial Sequence
  Description of Artificial Sequence: Synthetic oligonucleotide
ugcuugggaguggcgauugugauuu

SEQ ID NO: 70426 - RNA, 25 nt, Artificial Sequence
  Description of Artificial Sequence: Synthetic oligonucleotide
uacacgacaaaaugccgaggugcuc

SEQ ID NO: 70427 - RNA, 25 nt, Artificial Sequence
  Description of Artificial Sequence: Synthetic oligonucleotide
cgguggagucauggcagugcccuuu

SEQ ID NO: 70428 - RNA, 25 nt, Artificial Sequence
  Description of Artificial Sequence: Synthetic oligonucleotide
uguggaagacugggacuuggugcaa

SEQ ID NO: 70429 - RNA, 25 nt, Artificial Sequence
  Description of Artificial Sequence: Synthetic oligonucleotide
aacccugggagaaggugccuaugga

SEQ ID NO: 70430 - RNA, 25 nt, Artificial Sequence
  Description of Artificial Sequence: Synthetic oligonucleotide
agaaguucaacuugcugugaauaga

SEQ ID NO: 70431 - RNA, 25 nt, Artificial Sequence
  Description of Artificial Sequence: Synthetic oligonucleotide
aguaacugaagaagcagucgcagug

SEQ ID NO: 70432 - RNA, 25 nt, Artificial Sequence
  Description of Artificial Sequence: Synthetic oligonucleotide
gaagauuguagauaugaagcgugcc

SEQ ID NO: 70433 - RNA, 25 nt, Artificial Sequence
  Description of Artificial Sequence: Synthetic oligonucleotide
cguagacuguccagaaaauauuaag

SEQ ID NO: 70434 - RNA, 25 nt, Artificial Sequence
  Description of Artificial Sequence: Synthetic oligonucleotide
gaaagagaucuguaucaauaaaaug

SEQ ID NO: 70435 - RNA, 25 nt, Artificial Sequence
  Description of Artificial Sequence: Synthetic oligonucleotide
gcuaaaucaugaaaauguaguaaaa

SEQ ID NO: 70436 - RNA, 25 nt, Artificial Sequence
  Description of Artificial Sequence: Synthetic oligonucleotide
auucuauggucacaggagagaaggc

SEQ ID NO: 70437 - RNA, 25 nt, Artificial Sequence
  Description of Artificial Sequence: Synthetic oligonucleotide
caauauccaauauuuauuucuggag

SEQ ID NO: 70438 - RNA, 25 nt, Artificial Sequence
  Description of Artificial Sequence: Synthetic oligonucleotide
guacuguaguggaggagagcuuuuu

SEQ ID NO: 70439 - RNA, 25 nt, Artificial Sequence
  Description of Artificial Sequence: Synthetic oligonucleotide
ugacagaauagagccagacauaggc

SEQ ID NO: 70440 - RNA, 25 nt, Artificial Sequence
  Description of Artificial Sequence: Synthetic oligonucleotide
caugccugaaccagaugcucagaga

SEQ ID NO: 70441 - RNA, 25 nt, Artificial Sequence
  Description of Artificial Sequence: Synthetic oligonucleotide
auucuuccaucaacucauggcaggg

SEQ ID NO: 70442 - RNA, 25 nt, Artificial Sequence
  Description of Artificial Sequence: Synthetic oligonucleotide
ggugguuuaucugcaugguauugga

SEQ ID NO: 70443 - RNA, 25 nt, Artificial Sequence
  Description of Artificial Sequence: Synthetic oligonucleotide
aauaacucacagggauauuaaacca

SEQ ID NO: 70444 - RNA, 25 nt, Artificial Sequence
  Description of Artificial Sequence: Synthetic oligonucleotide
agaaaaucuucuguuggaugaaagg

SEQ ID NO: 70445 - RNA, 25 nt, Artificial Sequence
  Description of Artificial Sequence: Synthetic oligonucleotide
ggauaaccucaaaaucucagacuuu

SEQ ID NO: 70446 - RNA, 25 nt, Artificial Sequence
  Description of Artificial Sequence: Synthetic oligonucleotide
uggcuuggcaacaguauuucgguau

SEQ ID NO: 70447 - RNA, 25 nt, Artificial Sequence
  Description of Artificial Sequence: Synthetic oligonucleotide
uaauaaucgugagcguuuguugaac

SEQ ID NO: 70448 - RNA, 25 nt, Artificial Sequence
  Description of Artificial Sequence: Synthetic oligonucleotide
caagaugugugguacuuuaccauau

SEQ ID NO: 70449 - RNA, 25 nt, Artificial Sequence
  Description of Artificial Sequence: Synthetic oligonucleotide
uguugcuccagaacuucugaagaga

SEQ ID NO: 70450 - RNA, 25 nt, Artificial Sequence
  Description of Artificial Sequence: Synthetic oligonucleotide
aagagaauuucaugcagaaccaguu

SEQ ID NO: 70451 - RNA, 25 nt, Artificial Sequence
  Description of Artificial Sequence: Synthetic oligonucleotide
ugauguuugguccuguggaauagua

SEQ ID NO: 70452 - RNA, 25 nt, Artificial Sequence
  Description of Artificial Sequence: Synthetic oligonucleotide
acuuacugcaaugcucgcuggagaa

SEQ ID NO: 70453 - RNA, 25 nt, Artificial Sequence
  Description of Artificial Sequence: Synthetic oligonucleotide
auugccaugggaccaacccagugac

SEQ ID NO: 70454 - RNA, 25 nt, Artificial Sequence
  Description of Artificial Sequence: Synthetic oligonucleotide
cagcugucaggaguauucugacugg

SEQ ID NO: 70455 - RNA, 25 nt, Artificial Sequence
  Description of Artificial Sequence: Synthetic oligonucleotide
gaaagaaaaaaaaacauaccucaac

SEQ ID NO: 70456 - RNA, 25 nt, Artificial Sequence
  Description of Artificial Sequence: Synthetic oligonucleotide
cccuuggaaaaaaaucgauucugcu

SEQ ID NO: 70457 - RNA, 25 nt, Artificial Sequence
  Description of Artificial Sequence: Synthetic oligonucleotide
uccucuagcucugcugcauaaaauc

SEQ ID NO: 70458 - RNA, 25 nt, Artificial Sequence
  Description of Artificial Sequence: Synthetic oligonucleotide
cuuaguugagaauccaucagcaaga

SEQ ID NO: 70459 - RNA, 25 nt, Artificial Sequence
  Description of Artificial Sequence: Synthetic oligonucleotide
aauuaccauuccagacaucaaaaaa

SEQ ID NO: 70460 - RNA, 25 nt, Artificial Sequence
  Description of Artificial Sequence: Synthetic oligonucleotide
agauagaugguacaacaaaccccuc

SEQ ID NO: 70461 - RNA, 25 nt, Artificial Sequence
  Description of Artificial Sequence: Synthetic oligonucleotide
caagaaaggggcaaaaaggccccga

SEQ ID NO: 70462 - RNA, 25 nt, Artificial Sequence
  Description of Artificial Sequence: Synthetic oligonucleotide
agucacuucagguggugugucagag

SEQ ID NO: 70463 - RNA, 25 nt, Artificial Sequence
  Description of Artificial Sequence: Synthetic oligonucleotide
gucucccaguggauuuucuaagcac

SEQ ID NO: 70464 - RNA, 25 nt, Artificial Sequence
  Description of Artificial Sequence: Synthetic oligonucleotide
cauucaauccaauuuggacuucucu

SEQ ID NO: 70465 - RNA, 25 nt, Artificial Sequence
  Description of Artificial Sequence: Synthetic oligonucleotide
uccaguaaacagugcuucuagugaa

SEQ ID NO: 70466 - RNA, 25 nt, Artificial Sequence
  Description of Artificial Sequence: Synthetic oligonucleotide
agaaaaugugaaguacuccaguucu

SEQ ID NO: 70467 - RNA, 25 nt, Artificial Sequence
  Description of Artificial Sequence: Synthetic oligonucleotide
ucagccagaaccccgcacaggucuu

SEQ ID NO: 70468 - RNA, 25 nt, Artificial Sequence
  Description of Artificial Sequence: Synthetic oligonucleotide
uuccuuaugggauaccagccccuca

SEQ ID NO: 70469 - RNA, 25 nt, Artificial Sequence
  Description of Artificial Sequence: Synthetic oligonucleotide
auacauugauaaauugguacaaggg

SEQ ID NO: 70470 - RNA, 25 nt, Artificial Sequence
  Description of Artificial Sequence: Synthetic oligonucleotide
gaucagcuuuucccagcccacaugu

SEQ ID NO: 70471 - RNA, 25 nt, Artificial Sequence
  Description of Artificial Sequence: Synthetic oligonucleotide
uccugaucauaugcuuuugaauagu

SEQ ID NO: 70472 - RNA, 25 nt, Artificial Sequence
  Description of Artificial Sequence: Synthetic oligonucleotide
ucaguuacuuggcaccccaggaucc

SEQ ID NO: 70473 - RNA, 25 nt, Artificial Sequence
  Description of Artificial Sequence: Synthetic oligonucleotide
cucacagaaccccuggcagcgguug

SEQ ID NO: 70474 - RNA, 25 nt, Artificial Sequence
  Description of Artificial Sequence: Synthetic oligonucleotide
ggucaaaagaaugacacgauucuuu

SEQ ID NO: 70475 - RNA, 25 nt, Artificial Sequence
  Description of Artificial Sequence: Synthetic oligonucleotide
uaccaaauuggaugcagacaaaucu

SEQ ID NO: 70476 - RNA, 25 nt, Artificial Sequence
  Description of Artificial Sequence: Synthetic oligonucleotide
uuaucaaugccugaaagagacuugu

SEQ ID NO: 70477 - RNA, 25 nt, Artificial Sequence
  Description of Artificial Sequence: Synthetic oligonucleotide
ugagaaguugggcuaucaauggaag

SEQ ID NO: 70478 - RNA, 25 nt, Artificial Sequence
  Description of Artificial Sequence: Synthetic oligonucleotide
gaaaaguuguaugaaucagguuacu

SEQ ID NO: 70479 - RNA, 25 nt, Artificial Sequence
  Description of Artificial Sequence: Synthetic oligonucleotide
uauaucaacaacugauaggagaaac

SEQ ID NO: 70480 - RNA, 25 nt, Artificial Sequence
  Description of Artificial Sequence: Synthetic oligonucleotide
caauaaacucauuuucaaagugaau

SEQ ID NO: 70481 - RNA, 25 nt, Artificial Sequence
  Description of Artificial Sequence: Synthetic oligonucleotide
uuuguuagaaauggaugauaaaaua

SEQ ID NO: 70482 - RNA, 25 nt, Artificial Sequence
  Description of Artificial Sequence: Synthetic oligonucleotide
auugguugacuuccggcuuucuaag

SEQ ID NO: 70483 - RNA, 25 nt, Artificial Sequence
  Description of Artificial Sequence: Synthetic oligonucleotide
gggugauggauuggaguucaagaga

SEQ ID NO: 70484 - RNA, 25 nt, Artificial Sequence
  Description of Artificial Sequence: Synthetic oligonucleotide
acacuuccugaagauuaaagggaag

SEQ ID NO: 70485 - RNA, 25 nt, Artificial Sequence
  Description of Artificial Sequence: Synthetic oligonucleotide
gcugauugauauugugagcagccag

SEQ ID NO: 70486 - RNA, 25 nt, Artificial Sequence
  Description of Artificial Sequence: Synthetic oligonucleotide
gaagguuuggcuuccugccacauga

SEQ ID NO: 70487 - RNA, 25 nt, Artificial Sequence
  Description of Artificial Sequence: Synthetic oligonucleotide
aucggaccaucggcucuggggaauc

SEQ ID NO: 70488 - RNA, 25 nt, Artificial Sequence
  Description of Artificial Sequence: Synthetic oligonucleotide
ccuggugaauauagugcugcuaugu

SEQ ID NO: 70489 - RNA, 25 nt, Artificial Sequence
  Description of Artificial Sequence: Synthetic oligonucleotide
uugacauuauucuuccuagagaaga

SEQ ID NO: 70490 - RNA, 25 nt, Artificial Sequence
  Description of Artificial Sequence: Synthetic oligonucleotide
auuauccuguccugcaaacugcaaa

SEQ ID NO: 70491 - RNA, 25 nt, Artificial Sequence
  Description of Artificial Sequence: Synthetic oligonucleotide
auaguaguuccugaaguguucacuu

SEQ ID NO: 70492 - RNA, 25 nt, Artificial Sequence
  Description of Artificial Sequence: Synthetic oligonucleotide
ucccuguuuauccaaacaucuucca

SEQ ID NO: 70493 - RNA, 25 nt, Artificial Sequence
  Description of Artificial Sequence: Synthetic oligonucleotide
aauuuauuuuguuuguucggcauac

SEQ ID NO: 70494 - RNA, 25 nt, Artificial Sequence
  Description of Artificial Sequence: Synthetic oligonucleotide
caaauaauaccuauaucuuaauugu

SEQ ID NO: 70495 - RNA, 25 nt, Artificial Sequence
  Description of Artificial Sequence: Synthetic oligonucleotide
uaagcaaaacuuuggggaaaggaug

SEQ ID NO: 70496 - RNA, 25 nt, Artificial Sequence
  Description of Artificial Sequence: Synthetic oligonucleotide
gaauagaauucauuugauuauuucu

SEQ ID NO: 70497 - RNA, 25 nt, Artificial Sequence
  Description of Artificial Sequence: Synthetic oligonucleotide
uucauguguguuuaguaucugaauu

SEQ ID NO: 70498 - RNA, 25 nt, Artificial Sequence
  Description of Artificial Sequence: Synthetic oligonucleotide
uugaaacucaucugguggaaaccaa

SEQ ID NO: 70499 - RNA, 25 nt, Artificial Sequence
  Description of Artificial Sequence: Synthetic oligonucleotide
aguuucaggggacaugaguuuucca

SEQ ID NO: 70500 - RNA, 25 nt, Artificial Sequence
  Description of Artificial Sequence: Synthetic oligonucleotide
agcuuuuauacacacguaucucauu

SEQ ID NO: 70501 - RNA, 25 nt, Artificial Sequence
  Description of Artificial Sequence: Synthetic oligonucleotide
uuuuaucaaaacauuuuguuuaauu

SEQ ID NO: 70502 - RNA, 25 nt, Artificial Sequence
  Description of Artificial Sequence: Synthetic oligonucleotide
ucaaaaaguacauauuucuuccaug

SEQ ID NO: 70503 - RNA, 25 nt, Artificial Sequence
  Description of Artificial Sequence: Synthetic oligonucleotide
guugauuuaauucuaagaugaacca

SEQ ID NO: 70504 - RNA, 25 nt, Artificial Sequence
  Description of Artificial Sequence: Synthetic oligonucleotide
aauaaagacauaauucuugcaaaaa

SEQ ID NO: 70505 - DNA, 21 bp, Artificial Sequence
  Description of Artificial Sequence: Synthetic oligonucleotide
  Description of Combined DNA/RNA Molecule: Synthetic oligonucleotide
cuacacaaaucagcgauuutt

SEQ ID NO: 70506 - DNA, 21 bp, Artificial Sequence
  Description of Artificial Sequence: Synthetic oligonucleotide
  Description of Combined DNA/RNA Molecule: Synthetic oligonucleotide
aaaucgcugauuuguguagtt

SEQ ID NO: 70507 - DNA, 25 bp, Artificial Sequence
  Description of Artificial Sequence: Synthetic oligonucleotide
  Description of Combined DNA/RNA Molecule: Synthetic oligonucleotide
cuacacaaaucagcgauuuccaugt

SEQ ID NO: 70508 - RNA, 27 nt, Artificial Sequence
  Description of Artificial Sequence: Synthetic oligonucleotide
acauggaaaucgcugauuuguguaguc

SEQ ID NO: 70509 - RNA, 13 nt, Artificial Sequence
  Description of Artificial Sequence: Synthetic oligonucleotide
cuacacaaaucag

SEQ ID NO: 70510 - DNA, 11 bp, Artificial Sequence
  Description of Artificial Sequence: Synthetic oligonucleotide
  Description of Combined DNA/RNA Molecule: Synthetic oligonucleotide
gauuuccaugt

SEQ ID NO: 70511 - DNA, 21 bp, Artificial Sequence
  Description of Artificial Sequence: Synthetic oligonucleotide
  Description of Combined DNA/RNA Molecule: Synthetic oligonucleotide
ggaucuuauuucuucggagtt

SEQ ID NO: 70512 - DNA, 21 bp, Artificial Sequence
  Description of Artificial Sequence: Synthetic oligonucleotide
  Description of Combined DNA/RNA Molecule: Synthetic oligonucleotide
cuccgaagaaauaagaucctt

SEQ ID NO: 70513 - RNA, 11 nt, Artificial Sequence
  Description of Artificial Sequence: Synthetic oligonucleotide
ggaucuuauuu

SEQ ID NO: 70514 - DNA, 10 bp, Artificial Sequence
  Description of Artificial Sequence: Synthetic oligonucleotide
  Description of Combined DNA/RNA Molecule: Synthetic oligonucleotide
cuucggagtt

SEQ ID NO: 70515 - RNA, 27 nt, Artificial Sequence
  Description of Artificial Sequence: Synthetic oligonucleotide
cauugucuccgaagaaauaagauccuu

SEQ ID NO: 70516 - RNA, 8 nt, Artificial Sequence
  Description of Artificial Sequence: Synthetic oligonucleotide
  modified_base (2): LNA-G
ggaucuua

SEQ ID NO: 70517 - DNA, 17 bp, Artificial Sequence
  Description of Artificial Sequence: Synthetic oligonucleotide
  Description of Combined DNA/RNA Molecule: Synthetic oligonucleotide
uuucuucggagacaatg

SEQ ID NO: 70518 - DNA, 16 bp, Artificial Sequence
  Description of Artificial Sequence: Synthetic oligonucleotide
  Description of Combined DNA/RNA Molecule: Synthetic oligonucleotide
uucuucggagacaatg

SEQ ID NO: 70519 - DNA, 15 bp, Artificial Sequence
  Description of Artificial Sequence: Synthetic oligonucleotide
  Description of Combined DNA/RNA Molecule: Synthetic oligonucleotide
ucuucggagacaatg

SEQ ID NO: 70520 - DNA, 14 bp, Artificial Sequence
  Description of Artificial Sequence: Synthetic oligonucleotide
  Description of Combined DNA/RNA Molecule: Synthetic oligonucleotide
cuucggagacaatg

SEQ ID NO: 70521 - DNA, 13 bp, Artificial Sequence
  Description of Artificial Sequence: Synthetic oligonucleotide
  Description of Combined DNA/RNA Molecule: Synthetic oligonucleotide
uucggagacaatg

SEQ ID NO: 70522 - DNA, 12 bp, Artificial Sequence
  Description of Artificial Sequence: Synthetic oligonucleotide
  Description of Combined DNA/RNA Molecule: Synthetic oligonucleotide
ucggagacaatg

SEQ ID NO: 70523 - DNA, 11 bp, Artificial Sequence
  Description of Artificial Sequence: Synthetic oligonucleotide
  Description of Combined DNA/RNA Molecule: Synthetic oligonucleotide
cggagacaatg

SEQ ID NO: 70524 - RNA, 9 nt, Artificial Sequence
  Description of Artificial Sequence: Synthetic oligonucleotide
  modified_base (2): LNA-G
ggaucuuau

SEQ ID NO: 70525 - RNA, 10 nt, Artificial Sequence
  Description of Artificial Sequence: Synthetic oligonucleotide
  modified_base (2): LNA-G
ggaucuuauu

SEQ ID NO: 70526 - RNA, 11 nt, Artificial Sequence
  Description of Artificial Sequence: Synthetic oligonucleotide
  modified_base (2): LNA-G
ggaucuuauuu

SEQ ID NO: 70527 - RNA, 12 nt, Artificial Sequence
  Description of Artificial Sequence: Synthetic oligonucleotide
  modified_base (2): LNA-G
ggaucuuauuuc

SEQ ID NO: 70528 - RNA, 8 nt, Artificial Sequence
  Description of Artificial Sequence: Synthetic oligonucleotide
  modified_base (3): LNA-A
cuacacaa

SEQ ID NO: 70529 - DNA, 13 bp, Artificial Sequence
  Description of Artificial Sequence: Synthetic oligonucleotide
  Description of Combined DNA/RNA Molecule: Synthetic oligonucleotide
  modified_base (8): LNA-A
aucagcgauuutt

SEQ ID NO: 70530 - DNA, 12 bp, Artificial Sequence
  Description of Artificial Sequence: Synthetic oligonucleotide
  Description of Combined DNA/RNA Molecule: Synthetic oligonucleotide
  modified_base (7): LNA-A
ucagcgauuutt

SEQ ID NO: 70531 - DNA, 11 bp, Artificial Sequence
  Description of Artificial Sequence: Synthetic oligonucleotide
  Description of Combined DNA/RNA Molecule: Synthetic oligonucleotide
  modified_base (6): LNA-A
cagcgauuutt

SEQ ID NO: 70532 - DNA, 10 bp, Artificial Sequence
  Description of Artificial Sequence: Synthetic oligonucleotide
  Description of Combined DNA/RNA Molecule: Synthetic oligonucleotide
  modified_base (5): LNA-A
agcgauuutt

SEQ ID NO: 70533 - DNA, 9 bp, Artificial Sequence
  Description of Artificial Sequence: Synthetic oligonucleotide
  Description of Combined DNA/RNA Molecule: Synthetic oligonucleotide
  modified_base (4): LNA-A
gcgauuutt

SEQ ID NO: 70534 - DNA, 8 bp, Artificial Sequence
  Description of Artificial Sequence: Synthetic oligonucleotide
  Description of Combined DNA/RNA Molecule: Synthetic oligonucleotide
  modified_base (3): LNA-A
cgauuutt

SEQ ID NO: 70535 - DNA, 7 bp, Artificial Sequence
  Description of Artificial Sequence: Synthetic oligonucleotide
  Description of Combined DNA/RNA Molecule: Synthetic oligonucleotide
  modified_base (2): LNA-A
gauuutt

SEQ ID NO: 70536 - RNA, 9 nt, Artificial Sequence
  Description of Artificial Sequence: Synthetic oligonucleotide
  modified_base (3): LNA-A
cuacacaaa

SEQ ID NO: 70537 - RNA, 10 nt, Artificial Sequence
  Description of Artificial Sequence: Synthetic oligonucleotide
  modified_base (3): LNA-A
cuacacaaau

SEQ ID NO: 70538 - RNA, 11 nt, Artificial Sequence
  Description of Artificial Sequence: Synthetic oligonucleotide
  modified_base (3): LNA-A
cuacacaaauc

SEQ ID NO: 70539 - RNA, 12 nt, Artificial Sequence
  Description of Artificial Sequence: Synthetic oligonucleotide
  modified_base (3): LNA-A
cuacacaaauca

SEQ ID NO: 70540 - RNA, 13 nt, Artificial Sequence
  Description of Artificial Sequence: Synthetic oligonucleotide
  modified_base (3): LNA-A
cuacacaaaucag

SEQ ID NO: 70541 - RNA, 14 nt, Artificial Sequence
  Description of Artificial Sequence: Synthetic oligonucleotide
  modified_base (3): LNA-A
cuacacaaaucagc

SEQ ID NO: 70542 - RNA, 13 nt, Artificial Sequence
  Description of Artificial Sequence: Synthetic oligonucleotide
  modified_base (2): LNA-G
ggaucuuauuucu

SEQ ID NO: 70543 - RNA, 14 nt, Artificial Sequence
  Description of Artificial Sequence: Synthetic oligonucleotide
  modified_base (2): LNA-G
ggaucuuauuucuu

SEQ ID NO: 70544 - RNA, 8 nt, Artificial Sequence
  Description of Artificial Sequence: Synthetic oligonucleotide
  modified_base (2): LNA-G
  modified_base (8): LNA-A
ggaucuua

SEQ ID NO: 70545 - RNA, 9 nt, Artificial Sequence
  Description of Artificial Sequence: Synthetic oligonucleotide
  modified_base (2): LNA-G
  modified_base (9): LNA-U
ggaucuuau

SEQ ID NO: 70546 - RNA, 10 nt, Artificial Sequence
  Description of Artificial Sequence: Synthetic oligonucleotide
  modified_base (2): LNA-G
  modified_base (10): LNA-U
ggaucuuauu

SEQ ID NO: 70547 - RNA, 11 nt, Artificial Sequence
  Description of Artificial Sequence: Synthetic oligonucleotide
  modified_base (2): LNA-G
  modified_base (11): LNA-U
ggaucuuauuu

SEQ ID NO: 70548 - RNA, 12 nt, Artificial Sequence
  Description of Artificial Sequence: Synthetic oligonucleotide
  modified_base (2): LNA-G
  modified_base (12): LNA-C
ggaucuuauuuc

SEQ ID NO: 70549 - RNA, 13 nt, Artificial Sequence
  Description of Artificial Sequence: Synthetic oligonucleotide
  modified_base (2): LNA-G
  modified_base (13): LNA-U
ggaucuuauuucu

SEQ ID NO: 70550 - RNA, 14 nt, Artificial Sequence
  Description of Artificial Sequence: Synthetic oligonucleotide
  modified_base (2): LNA-G
  modified_base (14): LNA-U
ggaucuuauuucuu

SEQ ID NO: 70551 - DNA, 13 bp, Artificial Sequence
  Description of Artificial Sequence: Synthetic oligonucleotide
  Description of Combined DNA/RNA Molecule: Synthetic oligonucleotide
  modified_base (8): LNA-G
uuucuucggagtt

SEQ ID NO: 70552 - DNA, 12 bp, Artificial Sequence
  Description of Artificial Sequence: Synthetic oligonucleotide
  Description of Combined DNA/RNA Molecule: Synthetic oligonucleotide
  modified_base (7): LNA-G
uucuucggagtt

SEQ ID NO: 70553 - DNA, 11 bp, Artificial Sequence
  Description of Artificial Sequence: Synthetic oligonucleotide
  Description of Combined DNA/RNA Molecule: Synthetic oligonucleotide
  modified_base (6): LNA-G
ucuucggagtt

SEQ ID NO: 70554 - DNA, 10 bp, Artificial Sequence
  Description of Artificial Sequence: Synthetic oligonucleotide
  Description of Combined DNA/RNA Molecule: Synthetic oligonucleotide
  modified_base (5): LNA-G
cuucggagtt

SEQ ID NO: 70555 - DNA, 9 bp, Artificial Sequence
  Description of Artificial Sequence: Synthetic oligonucleotide
  Description of Combined DNA/RNA Molecule: Synthetic oligonucleotide
  modified_base (4): LNA-G
uucggagtt

SEQ ID NO: 70556 - DNA, 8 bp, Artificial Sequence
  Description of Artificial Sequence: Synthetic oligonucleotide
  Description of Combined DNA/RNA Molecule: Synthetic oligonucleotide
  modified_base (3): LNA-G
ucggagtt

SEQ ID NO: 70557 - DNA, 7 bp, Artificial Sequence
  Description of Artificial Sequence: Synthetic oligonucleotide
  Description of Combined DNA/RNA Molecule: Synthetic oligonucleotide
  modified_base (2): LNA-G
cggagtt

SEQ ID NO: 70558 - DNA, 13 bp, Artificial Sequence
  Description of Artificial Sequence: Synthetic oligonucleotide
  Description of Combined DNA/RNA Molecule: Synthetic oligonucleotide
  modified_base (1): LNA-U
  modified_base (8): LNA-G
uuucuucggagtt

SEQ ID NO: 70559 - DNA, 12 bp, Artificial Sequence
  Description of Artificial Sequence: Synthetic oligonucleotide
  Description of Combined DNA/RNA Molecule: Synthetic oligonucleotide
  modified_base (1): LNA-U
  modified_base (7): LNA-G
uucuucggagtt

SEQ ID NO: 70560 - DNA, 11 bp, Artificial Sequence
  Description of Artificial Sequence: Synthetic oligonucleotide
  Description of Combined DNA/RNA Molecule: Synthetic oligonucleotide
  modified_base (1): LNA-U
  modified_base (6): LNA-G
ucuucggagtt

SEQ ID NO: 70561 - DNA, 10 bp, Artificial Sequence
  Description of Artificial Sequence: Synthetic oligonucleotide
  Description of Combined DNA/RNA Molecule: Synthetic oligonucleotide
  modified_base (1): LNA-C
  modified_base (5): LNA-G
cuucggagtt

SEQ ID NO: 70562 - DNA, 9 bp, Artificial Sequence
  Description of Artificial Sequence: Synthetic oligonucleotide
  Description of Combined DNA/RNA Molecule: Synthetic oligonucleotide
  modified_base (1): LNA-U
  modified_base (4): LNA-G
uucggagtt

SEQ ID NO: 70563 - DNA, 8 bp, Artificial Sequence
  Description of Artificial Sequence: Synthetic oligonucleotide
  Description of Combined DNA/RNA Molecule: Synthetic oligonucleotide
  modified_base (1): LNA-U
  modified_base (3): LNA-G
ucggagtt

SEQ ID NO: 70564 - DNA, 7 bp, Artificial Sequence
  Description of Artificial Sequence: Synthetic oligonucleotide
  Description of Combined DNA/RNA Molecule: Synthetic oligonucleotide
  modified_base (1): LNA-C
  modified_base (2): LNA-G
cggagtt

SEQ ID NO: 70565 - DNA, 21 bp, Artificial Sequence
  Description of Artificial Sequence: Synthetic oligonucleotide
  Description of Combined DNA/RNA Molecule: Synthetic oligonucleotide
  modified_base (2): LNA-G
  modified_base (16): LNA-G
ggaucuuauuucuucggagtt

SEQ ID NO: 70566 - DNA, 25 bp, Artificial Sequence
  Description of Artificial Sequence: Synthetic oligonucleotide
  Description of Combined DNA/RNA Molecule: Synthetic oligonucleotide
ggaucuuauuucuucggagacaatg

SEQ ID NO: 70567 - RNA, 25 nt, Artificial Sequence
  Description of Artificial Sequence: Synthetic oligonucleotide
uuaagcagaguucaaaagcccuuca

SEQ ID NO: 70568 - RNA, 25 nt, Artificial Sequence
  Description of Artificial Sequence: Synthetic oligonucleotide
uaagcagaguucaaaagcccuucag

SEQ ID NO: 70569 - RNA, 25 nt, Artificial Sequence
  Description of Artificial Sequence: Synthetic oligonucleotide
agcagaguucaaaagcccuucagcg

SEQ ID NO: 70570 - RNA, 25 nt, Artificial Sequence
  Description of Artificial Sequence: Synthetic oligonucleotide
cucagggucugagugaagccgcucg

SEQ ID NO: 70571 - RNA, 25 nt, Artificial Sequence
  Description of Artificial Sequence: Synthetic oligonucleotide
caagcaacuacaucacgccagucaa

SEQ ID NO: 70572 - RNA, 25 nt, Artificial Sequence
  Description of Artificial Sequence: Synthetic oligonucleotide
aucaauggcagcuucuuggugcgug

SEQ ID NO: 70573 - RNA, 25 nt, Artificial Sequence
  Description of Artificial Sequence: Synthetic oligonucleotide
uuccagcccacauuggauucaucag

SEQ ID NO: 70574 - RNA, 25 nt, Artificial Sequence
  Description of Artificial Sequence: Synthetic oligonucleotide
cagcugagaauguggaauaccuaag

SEQ ID NO: 70575 - RNA, 25 nt, Artificial Sequence
  Description of Artificial Sequence: Synthetic oligonucleotide
aacguaucuccuaauuugaggcuca

SEQ ID NO: 70576 - RNA, 25 nt, Artificial Sequence
  Description of Artificial Sequence: Synthetic oligonucleotide
ccuaaaauaauuucucuacaauugg

SEQ ID NO: 70577 - RNA, 25 nt, Artificial Sequence
  Description of Artificial Sequence: Synthetic oligonucleotide
uggaagauucagcuaguuaggagcc

SEQ ID NO: 70578 - RNA, 25 nt, Artificial Sequence
  Description of Artificial Sequence: Synthetic oligonucleotide
uuaaacucuccuagucaauauccac

SEQ ID NO: 70579 - RNA, 25 nt, Artificial Sequence
  Description of Artificial Sequence: Synthetic oligonucleotide
cagccuacaguuauguucagucaca

SEQ ID NO: 70580 - RNA, 25 nt, Artificial Sequence
  Description of Artificial Sequence: Synthetic oligonucleotide
guuauguucagucacacacacauac

SEQ ID NO: 70581 - RNA, 25 nt, Artificial Sequence
  Description of Artificial Sequence: Synthetic oligonucleotide
cacauacaaaauguuccuuuugcuu

SEQ ID NO: 70582 - RNA, 25 nt, Artificial Sequence
  Description of Artificial Sequence: Synthetic oligonucleotide
uccuuuugcuuuuaaaguaauuuuu

SEQ ID NO: 70583 - RNA, 25 nt, Artificial Sequence
  Description of Artificial Sequence: Synthetic oligonucleotide
ugaccugugaagcaacagucaaugg

SEQ ID NO: 70584 - RNA, 25 nt, Artificial Sequence
  Description of Artificial Sequence: Synthetic oligonucleotide
cuaucucacacaucgacaaaccaau

SEQ ID NO: 70585 - RNA, 25 nt, Artificial Sequence
  Description of Artificial Sequence: Synthetic oligonucleotide
uguccucaauuguacugcuaccacu

SEQ ID NO: 70586 - RNA, 25 nt, Artificial Sequence
  Description of Artificial Sequence: Synthetic oligonucleotide
aaaccguagcuggcaagcggucuua

SEQ ID NO: 70587 - RNA, 25 nt, Artificial Sequence
  Description of Artificial Sequence: Synthetic oligonucleotide
uagcuggcaagcggucuuaccggcu

SEQ ID NO: 70588 - RNA, 25 nt, Artificial Sequence
  Description of Artificial Sequence: Synthetic oligonucleotide
uuguaugguuaaaagauggguuacc

SEQ ID NO: 70589 - RNA, 25 nt, Artificial Sequence
  Description of Artificial Sequence: Synthetic oligonucleotide
ugguuaaaagauggguuaccugcga

SEQ ID NO: 70590 - RNA, 25 nt, Artificial Sequence
  Description of Artificial Sequence: Synthetic oligonucleotide
cagggaauuauacaaucuugcugag

SEQ ID NO: 70591 - RNA, 25 nt, Artificial Sequence
  Description of Artificial Sequence: Synthetic oligonucleotide
acaaucuugcugagcauaaaacagu

SEQ ID NO: 70592 - RNA, 25 nt, Artificial Sequence
  Description of Artificial Sequence: Synthetic oligonucleotide
ccaauaaugaagaguccuuuauccu

SEQ ID NO: 70593 - RNA, 25 nt, Artificial Sequence
  Description of Artificial Sequence: Synthetic oligonucleotide
acuuuggauguuccaacgcaaguug

SEQ ID NO: 70594 - RNA, 25 nt, Artificial Sequence
  Description of Artificial Sequence: Synthetic oligonucleotide
aaugcuuccacuaaacugaaaccau

SEQ ID NO: 70595 - RNA, 25 nt, Artificial Sequence
  Description of Artificial Sequence: Synthetic oligonucleotide
gagaaaguuugacuuuguuaaauau

SEQ ID NO: 70596 - RNA, 25 nt, Artificial Sequence
  Description of Artificial Sequence: Synthetic oligonucleotide
aaagaacuacuguauauuaaaaguu

SEQ ID NO: 70597 - RNA, 25 nt, Artificial Sequence
  Description of Artificial Sequence: Synthetic oligonucleotide
uuagaaauacggguuuugacuuaac

SEQ ID NO: 70598 - RNA, 25 nt, Artificial Sequence
  Description of Artificial Sequence: Synthetic oligonucleotide
aacauggguacagcaaacucagcac

SEQ ID NO: 70599 - RNA, 25 nt, Artificial Sequence
  Description of Artificial Sequence: Synthetic oligonucleotide
aaagacacagaagaugcugaccuca

SEQ ID NO: 70600 - RNA, 25 nt, Artificial Sequence
  Description of Artificial Sequence: Synthetic oligonucleotide
uaguagggagguuuauucagaucgc

SEQ ID NO: 70601 - RNA, 25 nt, Artificial Sequence
  Description of Artificial Sequence: Synthetic oligonucleotide
gccuucugcagcaggguucugggau

SEQ ID NO: 70602 - RNA, 25 nt, Artificial Sequence
  Description of Artificial Sequence: Synthetic oligonucleotide
ggucugguacauauuggaaauuaug

SEQ ID NO: 70603 - RNA, 25 nt, Artificial Sequence
  Description of Artificial Sequence: Synthetic oligonucleotide
cuaguccuuccgauggaagcacuag

SEQ ID NO: 70604 - RNA, 25 nt, Artificial Sequence
  Description of Artificial Sequence: Synthetic oligonucleotide
ccagugaauauuguuuuuaugugga

SEQ ID NO: 70605 - RNA, 25 nt, Artificial Sequence
  Description of Artificial Sequence: Synthetic oligonucleotide
augaauucaaguuggaauugguaga

SEQ ID NO: 70606 - RNA, 25 nt, Artificial Sequence
  Description of Artificial Sequence: Synthetic oligonucleotide
caggacacagauuuagacuuggaga

SEQ ID NO: 70607 - RNA, 25 nt, Artificial Sequence
  Description of Artificial Sequence: Synthetic oligonucleotide
cucaaagcacaguuacaguauucca

SEQ ID NO: 70608 - RNA, 25 nt, Artificial Sequence
  Description of Artificial Sequence: Synthetic oligonucleotide
accacugccaccacugaugaauuaa

SEQ ID NO: 70609 - RNA, 25 nt, Artificial Sequence
  Description of Artificial Sequence: Synthetic oligonucleotide
gaaacuacuagugccacaucaucac

SEQ ID NO: 70610 - RNA, 25 nt, Artificial Sequence
  Description of Artificial Sequence: Synthetic oligonucleotide
aagucggacagccucaccaaacaga

SEQ ID NO: 70611 - RNA, 25 nt, Artificial Sequence
  Description of Artificial Sequence: Synthetic oligonucleotide
gaaagcgaaaaauggaacaugaugg

SEQ ID NO: 70612 - RNA, 25 nt, Artificial Sequence
  Description of Artificial Sequence: Synthetic oligonucleotide
cccucugauuuagcauguagacugc

SEQ ID NO: 70613 - RNA, 25 nt, Artificial Sequence
  Description of Artificial Sequence: Synthetic oligonucleotide
ugagcuauuuaaggaucuauuuaug

SEQ ID NO: 70614 - RNA, 25 nt, Artificial Sequence
  Description of Artificial Sequence: Synthetic oligonucleotide
aaaaggugaaaaagcacuauuauca

SEQ ID NO: 70615 - RNA, 25 nt, Artificial Sequence
  Description of Artificial Sequence: Synthetic oligonucleotide
gaaaaagcacuauuaucaguucugc

SEQ ID NO: 70616 - RNA, 25 nt, Artificial Sequence
  Description of Artificial Sequence: Synthetic oligonucleotide
ggcugaaaagaaagauuaaaccuac

SEQ ID NO: 70617 - RNA, 25 nt, Artificial Sequence
  Description of Artificial Sequence: Synthetic oligonucleotide
uaaacccuuauaauaaaauccuucu

SEQ ID NO: 70618 - RNA, 25 nt, Artificial Sequence
  Description of Artificial Sequence: Synthetic oligonucleotide
cauacuauuagccaaugcuguagac

SEQ ID NO: 70619 - RNA, 25 nt, Artificial Sequence
  Description of Artificial Sequence: Synthetic oligonucleotide
gacagaagcauuuugauaggaauag

SEQ ID NO: 70620 - RNA, 25 nt, Artificial Sequence
  Description of Artificial Sequence: Synthetic oligonucleotide
agagcaaauaagauaauggcccuga

SEQ ID NO: 70621 - RNA, 25 nt, Artificial Sequence
  Description of Artificial Sequence: Synthetic oligonucleotide
ccaacauuuuucucuuccucaagca

SEQ ID NO: 70622 - RNA, 25 nt, Artificial Sequence
  Description of Artificial Sequence: Synthetic oligonucleotide
uuaaguaugagaaaaguucagccca

SEQ ID NO: 70623 - RNA, 25 nt, Artificial Sequence
  Description of Artificial Sequence: Synthetic oligonucleotide
caggaauaaagauggcugcugaacc

SEQ ID NO: 70624 - RNA, 25 nt, Artificial Sequence
  Description of Artificial Sequence: Synthetic oligonucleotide
aauuugaaugaccaaguucucuuca

SEQ ID NO: 70625 - RNA, 25 nt, Artificial Sequence
  Description of Artificial Sequence: Synthetic oligonucleotide
auguauaaagauagccagccuagag

SEQ ID NO: 70626 - RNA, 25 nt, Artificial Sequence
  Description of Artificial Sequence: Synthetic oligonucleotide
ggcuguaacuaucucugugaagugu

SEQ ID NO: 70627 - RNA, 25 nt, Artificial Sequence
  Description of Artificial Sequence: Synthetic oligonucleotide
ucugugaagugugagaaaauuucaa

SEQ ID NO: 70628 - RNA, 25 nt, Artificial Sequence
  Description of Artificial Sequence: Synthetic oligonucleotide
ccuuuaaggaaaugaauccuccuga

SEQ ID NO: 70629 - RNA, 25 nt, Artificial Sequence
  Description of Artificial Sequence: Synthetic oligonucleotide
aaggauacaaaaagugacaucauau

SEQ ID NO: 70630 - RNA, 25 nt, Artificial Sequence
  Description of Artificial Sequence: Synthetic oligonucleotide
agaugcaauuugaaucuucaucaua

SEQ ID NO: 70631 - RNA, 25 nt, Artificial Sequence
  Description of Artificial Sequence: Synthetic oligonucleotide
guucaaaacgaagacuagcuauuaa

SEQ ID NO: 70632 - RNA, 25 nt, Artificial Sequence
  Description of Artificial Sequence: Synthetic oligonucleotide
gugaaaccucaucucuacuaaaaau

SEQ ID NO: 70633 - RNA, 25 nt, Artificial Sequence
  Description of Artificial Sequence: Synthetic oligonucleotide
acgaaagagaagcucuaucucgccu

SEQ ID NO: 70634 - RNA, 25 nt, Artificial Sequence
  Description of Artificial Sequence: Synthetic oligonucleotide
cuccacaagcgccuucgguccaguu

SEQ ID NO: 70635 - RNA, 25 nt, Artificial Sequence
  Description of Artificial Sequence: Synthetic oligonucleotide
gagaagauuccaaagauguagccgc

SEQ ID NO: 70636 - RNA, 25 nt, Artificial Sequence
  Description of Artificial Sequence: Synthetic oligonucleotide
aaucuggauucaaugaggagacuug

SEQ ID NO: 70637 - RNA, 25 nt, Artificial Sequence
  Description of Artificial Sequence: Synthetic oligonucleotide
agaacagauuugagaguagugagga

SEQ ID NO: 70638 - RNA, 25 nt, Artificial Sequence
  Description of Artificial Sequence: Synthetic oligonucleotide
ccagagcugugcagaugaguacaaa

SEQ ID NO: 70639 - RNA, 25 nt, Artificial Sequence
  Description of Artificial Sequence: Synthetic oligonucleotide
ccucagauuguuguuguuaaugggc

SEQ ID NO: 70640 - RNA, 25 nt, Artificial Sequence
  Description of Artificial Sequence: Synthetic oligonucleotide
cuauuuuaauuauuuuuaauuuauu

SEQ ID NO: 70641 - RNA, 25 nt, Artificial Sequence
  Description of Artificial Sequence: Synthetic oligonucleotide
uuuaauuuauuaauauuuaaauaug

SEQ ID NO: 70642 - RNA, 25 nt, Artificial Sequence
  Description of Artificial Sequence: Synthetic oligonucleotide
augcaguuugaauauccuuuguuuc

SEQ ID NO: 70643 - RNA, 25 nt, Artificial Sequence
  Description of Artificial Sequence: Synthetic oligonucleotide
caugcugcuggcgucuaaguguuug

SEQ ID NO: 70644 - RNA, 25 nt, Artificial Sequence
  Description of Artificial Sequence: Synthetic oligonucleotide
agaugugcauuucaccugugacaaa

SEQ ID NO: 70645 - RNA, 25 nt, Artificial Sequence
  Description of Artificial Sequence: Synthetic oligonucleotide
ucaaaaccugugccaggcugaauua

SEQ ID NO: 70646 - RNA, 25 nt, Artificial Sequence
  Description of Artificial Sequence: Synthetic oligonucleotide
gaauguggguagucauucuuacaau

SEQ ID NO: 70647 - RNA, 25 nt, Artificial Sequence
  Description of Artificial Sequence: Synthetic oligonucleotide
auguggguagucauucuuacaauug

SEQ ID NO: 70648 - RNA, 25 nt, Artificial Sequence
  Description of Artificial Sequence: Synthetic oligonucleotide
ugaaaaugagcaucagagaguguac

SEQ ID NO: 70649 - RNA, 25 nt, Artificial Sequence
  Description of Artificial Sequence: Synthetic oligonucleotide
uugcuuuucauguagaacucagcag

SEQ ID NO: 70650 - RNA, 25 nt, Artificial Sequence
  Description of Artificial Sequence: Synthetic oligonucleotide
uguauuucuauauuuauuuucagua

SEQ ID NO: 70651 - RNA, 25 nt, Artificial Sequence
  Description of Artificial Sequence: Synthetic oligonucleotide
uuugauuaauguuucuuaaauggaa

SEQ ID NO: 70652 - RNA, 25 nt, Artificial Sequence
  Description of Artificial Sequence: Synthetic oligonucleotide
caacguguauagugccuaaaauugu

SEQ ID NO: 70653 - RNA, 25 nt, Artificial Sequence
  Description of Artificial Sequence: Synthetic oligonucleotide
cauauccuuggcuacuaacaucugg

SEQ ID NO: 70654 - RNA, 25 nt, Artificial Sequence
  Description of Artificial Sequence: Synthetic oligonucleotide
uacuaacaucuggagacugugagcu

SEQ ID NO: 70655 - RNA, 25 nt, Artificial Sequence
  Description of Artificial Sequence: Synthetic oligonucleotide
cauaaguugugugcuuuuuauuaau

SEQ ID NO: 70656 - RNA, 25 nt, Artificial Sequence
  Description of Artificial Sequence: Synthetic oligonucleotide
gcaucauuuuggcucuucuuacauu

SEQ ID NO: 70657 - RNA, 25 nt, Artificial Sequence
  Description of Artificial Sequence: Synthetic oligonucleotide
gcucuucuuacauuuguaaaaaugu

SEQ ID NO: 70658 - RNA, 25 nt, Artificial Sequence
  Description of Artificial Sequence: Synthetic oligonucleotide
agauuaggucaucuuaauucauauu

SEQ ID NO: 70659 - RNA, 25 nt, Artificial Sequence
  Description of Artificial Sequence: Synthetic oligonucleotide
auggaauugaaagaacuaaucauga

SEQ ID NO: 70660 - RNA, 25 nt, Artificial Sequence
  Description of Artificial Sequence: Synthetic oligonucleotide
cacacucauuccuucugcucuuggg

SEQ ID NO: 70661 - RNA, 25 nt, Artificial Sequence
  Description of Artificial Sequence: Synthetic oligonucleotide
uguagagguaaccaguagcuuugag

SEQ ID NO: 70662 - RNA, 25 nt, Artificial Sequence
  Description of Artificial Sequence: Synthetic oligonucleotide
caaccacaugccacguaauauuuca

SEQ ID NO: 70663 - RNA, 25 nt, Artificial Sequence
  Description of Artificial Sequence: Synthetic oligonucleotide
ucggaaacaaguuauucucuucacu

SEQ ID NO: 70664 - RNA, 25 nt, Artificial Sequence
  Description of Artificial Sequence: Synthetic oligonucleotide
acucccaauaacuaaugcuaagaaa

SEQ ID NO: 70665 - RNA, 25 nt, Artificial Sequence
  Description of Artificial Sequence: Synthetic oligonucleotide
aaugcuaagaaaugcugaaaaucaa

SEQ ID NO: 70666 - RNA, 25 nt, Artificial Sequence
  Description of Artificial Sequence: Synthetic oligonucleotide
gucuuucucuaaauaugauuacuuu

SEQ ID NO: 70667 - RNA, 25 nt, Artificial Sequence
  Description of Artificial Sequence: Synthetic oligonucleotide
ugaauuucaggcauuuuguucuaca

SEQ ID NO: 70668 - RNA, 25 nt, Artificial Sequence
  Description of Artificial Sequence: Synthetic oligonucleotide
cgauucccucucacccgggacucuc

SEQ ID NO: 70669 - RNA, 25 nt, Artificial Sequence
  Description of Artificial Sequence: Synthetic oligonucleotide
aggaaagugaaccuuuaaaguaaag

SEQ ID NO: 70670 - RNA, 25 nt, Artificial Sequence
  Description of Artificial Sequence: Synthetic oligonucleotide
gaggcugcaugcucuggaagccugg

SEQ ID NO: 70671 - RNA, 25 nt, Artificial Sequence
  Description of Artificial Sequence: Synthetic oligonucleotide
ucucugaacagaaaacaaaagagag

SEQ ID NO: 70672 - RNA, 25 nt, Artificial Sequence
  Description of Artificial Sequence: Synthetic oligonucleotide
aacuuggcuguaaucaguuaugccg

SEQ ID NO: 70673 - RNA, 25 nt, Artificial Sequence
  Description of Artificial Sequence: Synthetic oligonucleotide
agaagccaaaauuaaaagaagucca

SEQ ID NO: 70674 - RNA, 25 nt, Artificial Sequence
  Description of Artificial Sequence: Synthetic oligonucleotide
auuaaaagaaguccaggugagguua

SEQ ID NO: 70675 - RNA, 25 nt, Artificial Sequence
  Description of Artificial Sequence: Synthetic oligonucleotide
gaauccggauuaucgggaagaggac

SEQ ID NO: 70676 - RNA, 25 nt, Artificial Sequence
  Description of Artificial Sequence: Synthetic oligonucleotide
aaugugacaucaaagcaaguauugu

SEQ ID NO: 70677 - RNA, 25 nt, Artificial Sequence
  Description of Artificial Sequence: Synthetic oligonucleotide
caucaaagcaaguauuguagcacuc

SEQ ID NO: 70678 - RNA, 25 nt, Artificial Sequence
  Description of Artificial Sequence: Synthetic oligonucleotide
agagagagaaaacaaaaccacaaau

SEQ ID NO: 70679 - RNA, 25 nt, Artificial Sequence
  Description of Artificial Sequence: Synthetic oligonucleotide
ucgcuguaguauuuaagcccauaca

SEQ ID NO: 70680 - RNA, 25 nt, Artificial Sequence
  Description of Artificial Sequence: Synthetic oligonucleotide
cgcuguaguauuuaagcccauacag

SEQ ID NO: 70681 - RNA, 25 nt, Artificial Sequence
  Description of Artificial Sequence: Synthetic oligonucleotide
auuuaagcccauacagaaaccuucc

SEQ ID NO: 70682 - RNA, 25 nt, Artificial Sequence
  Description of Artificial Sequence: Synthetic oligonucleotide
auuaaaauaaacaugguauaccuac

SEQ ID NO: 70683 - RNA, 25 nt, Artificial Sequence
  Description of Artificial Sequence: Synthetic oligonucleotide
cuguucugaucggccaguuuucgga

SEQ ID NO: 70684 - RNA, 25 nt, Artificial Sequence
  Description of Artificial Sequence: Synthetic oligonucleotide
aaauaauuugaacuuuggaacaggg

SEQ ID NO: 70685 - RNA, 25 nt, Artificial Sequence
  Description of Artificial Sequence: Synthetic oligonucleotide
ugcgaccuuaauuuaacuuuccagu

SEQ ID NO: 70686 - RNA, 25 nt, Artificial Sequence
  Description of Artificial Sequence: Synthetic oligonucleotide
cugagaaagcuaaaguuugguuuug

SEQ ID NO: 70687 - RNA, 25 nt, Artificial Sequence
  Description of Artificial Sequence: Synthetic oligonucleotide
aguaaagaugcuacuucccacugua

SEQ ID NO: 70688 - RNA, 25 nt, Artificial Sequence
  Description of Artificial Sequence: Synthetic oligonucleotide
cugcuuaauugcugauaccauauga

SEQ ID NO: 70689 - RNA, 25 nt, Artificial Sequence
  Description of Artificial Sequence: Synthetic oligonucleotide
uaccauaugaaugaaacaugggcug

SEQ ID NO: 70690 - RNA, 25 nt, Artificial Sequence
  Description of Artificial Sequence: Synthetic oligonucleotide
aacuuucuuauccaacuuuuucaua

SEQ ID NO: 70691 - RNA, 25 nt, Artificial Sequence
  Description of Artificial Sequence: Synthetic oligonucleotide
ccuugcaugacaucaugaggccgga

SEQ ID NO: 70692 - RNA, 25 nt, Artificial Sequence
  Description of Artificial Sequence: Synthetic oligonucleotide
ugaauuuguauaugacugcauuugu

SEQ ID NO: 70693 - RNA, 25 nt, Artificial Sequence
  Description of Artificial Sequence: Synthetic oligonucleotide
gaauccuaguagaauguuuacuacc

SEQ ID NO: 70694 - RNA, 25 nt, Artificial Sequence
  Description of Artificial Sequence: Synthetic oligonucleotide
gaaagggaagaauuuuuugaugaaa

SEQ ID NO: 70695 - RNA, 25 nt, Artificial Sequence
  Description of Artificial Sequence: Synthetic oligonucleotide
uaucggcaugccagugugugaauuu

SEQ ID NO: 70696 - RNA, 25 nt, Artificial Sequence
  Description of Artificial Sequence: Synthetic oligonucleotide
caccucauaguagagcaauguaugu

SEQ ID NO: 70697 - RNA, 25 nt, Artificial Sequence
  Description of Artificial Sequence: Synthetic oligonucleotide
ccagaauugccaaagcacauauaua

SEQ ID NO: 70698 - RNA, 25 nt, Artificial Sequence
  Description of Artificial Sequence: Synthetic oligonucleotide
uggugaucuggguaauaguuucucc

SEQ ID NO: 70699 - RNA, 25 nt, Artificial Sequence
  Description of Artificial Sequence: Synthetic oligonucleotide
gaucuggguaauaguuucuccaaau

SEQ ID NO: 70700 - RNA, 25 nt, Artificial Sequence
  Description of Artificial Sequence: Synthetic oligonucleotide
ggaugugaugaauacuuccuagaaa

SEQ ID NO: 70701 - RNA, 25 nt, Artificial Sequence
  Description of Artificial Sequence: Synthetic oligonucleotide
cauuuccacagcuacaccauauaug

SEQ ID NO: 70702 - RNA, 25 nt, Artificial Sequence
  Description of Artificial Sequence: Synthetic oligonucleotide
acagcuacaccauauaugaauggag

SEQ ID NO: 70703 - RNA, 25 nt, Artificial Sequence
  Description of Artificial Sequence: Synthetic oligonucleotide
ugcaguucuuacacgagaagaagau

SEQ ID NO: 70704 - RNA, 25 nt, Artificial Sequence
  Description of Artificial Sequence: Synthetic oligonucleotide
acgagaagaagaucauuuacaggga

SEQ ID NO: 70705 - RNA, 25 nt, Artificial Sequence
  Description of Artificial Sequence: Synthetic oligonucleotide
cgagaagaagaucauuuacagggac

SEQ ID NO: 70706 - RNA, 25 nt, Artificial Sequence
  Description of Artificial Sequence: Synthetic oligonucleotide
aagaagaucauuuacagggaccuga

SEQ ID NO: 70707 - RNA, 25 nt, Artificial Sequence
  Description of Artificial Sequence: Synthetic oligonucleotide
agaggaagagguguuugacugcauc

SEQ ID NO: 70708 - RNA, 25 nt, Artificial Sequence
  Description of Artificial Sequence: Synthetic oligonucleotide
gaggaagagguguuugacugcaucg

SEQ ID NO: 70709 - RNA, 25 nt, Artificial Sequence
  Description of Artificial Sequence: Synthetic oligonucleotide
cuacuuugagggcgaguucacaggg

SEQ ID NO: 70710 - RNA, 25 nt, Artificial Sequence
  Description of Artificial Sequence: Synthetic oligonucleotide
agggcaucuccuggcaccucugucc

SEQ ID NO: 70711 - RNA, 25 nt, Artificial Sequence
  Description of Artificial Sequence: Synthetic oligonucleotide
ggagugauaugguuugucuuuuuaa

SEQ ID NO: 70712 - RNA, 25 nt, Artificial Sequence
  Description of Artificial Sequence: Synthetic oligonucleotide
gagugauaugguuugucuuuuuaag

SEQ ID NO: 70713 - RNA, 25 nt, Artificial Sequence
  Description of Artificial Sequence: Synthetic oligonucleotide
ugcaguaaagauccuaaagguuguc

SEQ ID NO: 70714 - RNA, 25 nt, Artificial Sequence
  Description of Artificial Sequence: Synthetic oligonucleotide
aguaaagauccuaaagguugucgac

SEQ ID NO: 70715 - RNA, 25 nt, Artificial Sequence
  Description of Artificial Sequence: Synthetic oligonucleotide
ugacaaaggacaaccuggcaauugu

SEQ ID NO: 70716 - RNA, 25 nt, Artificial Sequence
  Description of Artificial Sequence: Synthetic oligonucleotide
gcaauugugacccaguggugcgagg

SEQ ID NO: 70717 - RNA, 25 nt, Artificial Sequence
  Description of Artificial Sequence: Synthetic oligonucleotide
aacaucauccauagagacaugaaau

SEQ ID NO: 70718 - RNA, 25 nt, Artificial Sequence
  Description of Artificial Sequence: Synthetic oligonucleotide
ugaaauccaacaauauauuucucca

SEQ ID NO: 70719 - RNA, 25 nt, Artificial Sequence
  Description of Artificial Sequence: Synthetic oligonucleotide
aacaauauauuucuccaugaaggcu

SEQ ID NO: 70720 - RNA, 25 nt, Artificial Sequence
  Description of Artificial Sequence: Synthetic oligonucleotide
aacaguaaagucacgcuggaguggu

SEQ ID NO: 70721 - RNA, 25 nt, Artificial Sequence
  Description of Artificial Sequence: Synthetic oligonucleotide
ugugaagaaaguaaaggaagagagg

SEQ ID NO: 70722 - RNA, 25 nt, Artificial Sequence
  Description of Artificial Sequence: Synthetic oligonucleotide
cuuccgagccauccuugcaucgggc

SEQ ID NO: 70723 - RNA, 25 nt, Artificial Sequence
  Description of Artificial Sequence: Synthetic oligonucleotide
aauggagguugaauauccuacugug

SEQ ID NO: 70724 - RNA, 25 nt, Artificial Sequence
  Description of Artificial Sequence: Synthetic oligonucleotide
ggagguugaauauccuacuguguaa

SEQ ID NO: 70725 - RNA, 25 nt, Artificial Sequence
  Description of Artificial Sequence: Synthetic oligonucleotide
auuuugaguuuucccuuguagugua

SEQ ID NO: 70726 - RNA, 25 nt, Artificial Sequence
  Description of Artificial Sequence: Synthetic oligonucleotide
uauccuguuuguucuuuguugauug

SEQ ID NO: 70727 - RNA, 25 nt, Artificial Sequence
  Description of Artificial Sequence: Synthetic oligonucleotide
ccuguuuguucuuuguugauugaaa

SEQ ID NO: 70728 - RNA, 25 nt, Artificial Sequence
  Description of Artificial Sequence: Synthetic oligonucleotide
cucuacagccuucuuuuucuuccau

SEQ ID NO: 70729 - RNA, 25 nt, Artificial Sequence
  Description of Artificial Sequence: Synthetic oligonucleotide
ucuuccauagcuaaucuuccuucua

SEQ ID NO: 70730 - RNA, 25 nt, Artificial Sequence
  Description of Artificial Sequence: Synthetic oligonucleotide
auaaucuuccuguugaaugcuucau

SEQ ID NO: 70731 - RNA, 25 nt, Artificial Sequence
  Description of Artificial Sequence: Synthetic oligonucleotide
uaaucuuccuguugaaugcuucaug

SEQ ID NO: 70732 - RNA, 25 nt, Artificial Sequence
  Description of Artificial Sequence: Synthetic oligonucleotide
cuucaugacuugaauucuacuuuga

SEQ ID NO: 70733 - RNA, 25 nt, Artificial Sequence
  Description of Artificial Sequence: Synthetic oligonucleotide
aagagggagagaagcaacuacagac

SEQ ID NO: 70734 - RNA, 25 nt, Artificial Sequence
  Description of Artificial Sequence: Synthetic oligonucleotide
cgucuccuaccagaccaaggucaac

SEQ ID NO: 70735 - RNA, 25 nt, Artificial Sequence
  Description of Artificial Sequence: Synthetic oligonucleotide
gaucaaucggcccgacuaucucgac

SEQ ID NO: 70736 - RNA, 25 nt, Artificial Sequence
  Description of Artificial Sequence: Synthetic oligonucleotide
ggacgaacauccaaccuucccaaac

SEQ ID NO: 70737 - RNA, 25 nt, Artificial Sequence
  Description of Artificial Sequence: Synthetic oligonucleotide
agggucggaacccaagcuuagaacu

SEQ ID NO: 70738 - RNA, 25 nt, Artificial Sequence
  Description of Artificial Sequence: Synthetic oligonucleotide
ucggaacccaagcuuagaacuuuaa

SEQ ID NO: 70739 - RNA, 25 nt, Artificial Sequence
  Description of Artificial Sequence: Synthetic oligonucleotide
acccaagcuuagaacuuuaagcaac

SEQ ID NO: 70740 - RNA, 25 nt, Artificial Sequence
  Description of Artificial Sequence: Synthetic oligonucleotide
gaacuuuaagcaacaagaccaccac

SEQ ID NO: 70741 - RNA, 25 nt, Artificial Sequence
  Description of Artificial Sequence: Synthetic oligonucleotide
acuauucaguggcgagaaauaaagu

SEQ ID NO: 70742 - RNA, 25 nt, Artificial Sequence
  Description of Artificial Sequence: Synthetic oligonucleotide
cuauucaguggcgagaaauaaaguu

SEQ ID NO: 70743 - RNA, 25 nt, Artificial Sequence
  Description of Artificial Sequence: Synthetic oligonucleotide
aaacacagauaacaggaaaugaucc

SEQ ID NO: 70744 - RNA, 25 nt, Artificial Sequence
  Description of Artificial Sequence: Synthetic oligonucleotide
cuuaagaaaagagaagaaaugaaac

SEQ ID NO: 70745 - RNA, 25 nt, Artificial Sequence
  Description of Artificial Sequence: Synthetic oligonucleotide
cugaaggaguguguuuccauccucc

SEQ ID NO: 70746 - RNA, 25 nt, Artificial Sequence
  Description of Artificial Sequence: Synthetic oligonucleotide
ucaccgcgggacugaaaaucuuuga

SEQ ID NO: 70747 - RNA, 25 nt, Artificial Sequence
  Description of Artificial Sequence: Synthetic oligonucleotide
agcagaaauaagcgugccguucagg

SEQ ID NO: 70748 - RNA, 25 nt, Artificial Sequence
  Description of Artificial Sequence: Synthetic oligonucleotide
aagcgugccguucaggguccagaag

SEQ ID NO: 70749 - RNA, 25 nt, Artificial Sequence
  Description of Artificial Sequence: Synthetic oligonucleotide
agaaacagucacucaagacugcuug

SEQ ID NO: 70750 - RNA, 25 nt, Artificial Sequence
  Description of Artificial Sequence: Synthetic oligonucleotide
agaggaagaagguccaugucuuugg

SEQ ID NO: 70751 - RNA, 25 nt, Artificial Sequence
  Description of Artificial Sequence: Synthetic oligonucleotide
uguauucaaaauaugccugaaacac

SEQ ID NO: 70752 - RNA, 25 nt, Artificial Sequence
  Description of Artificial Sequence: Synthetic oligonucleotide
auuuuccucccuuucucuguaccuc

SEQ ID NO: 70753 - RNA, 25 nt, Artificial Sequence
  Description of Artificial Sequence: Synthetic oligonucleotide
caaagaaagauagagcaagacaaga

SEQ ID NO: 70754 - RNA, 25 nt, Artificial Sequence
  Description of Artificial Sequence: Synthetic oligonucleotide
aagaaagauagagcaagacaagaaa

SEQ ID NO: 70755 - RNA, 25 nt, Artificial Sequence
  Description of Artificial Sequence: Synthetic oligonucleotide
gaaagcauuuguuuguacaagaucc

SEQ ID NO: 70756 - RNA, 25 nt, Artificial Sequence
  Description of Artificial Sequence: Synthetic oligonucleotide
ugaguuaaacgaacguacuugcaga

SEQ ID NO: 70757 - RNA, 25 nt, Artificial Sequence
  Description of Artificial Sequence: Synthetic oligonucleotide
acugauacagaacgaucgauacaga

SEQ ID NO: 70758 - RNA, 25 nt, Artificial Sequence
  Description of Artificial Sequence: Synthetic oligonucleotide
auauuauauauauauaaaaauaaau

SEQ ID NO: 70759 - RNA, 25 nt, Artificial Sequence
  Description of Artificial Sequence: Synthetic oligonucleotide
auuauauauauauaaaaauaaauau

SEQ ID NO: 70760 - RNA, 25 nt, Artificial Sequence
  Description of Artificial Sequence: Synthetic oligonucleotide
ucacuggauguauuugacugcugug

SEQ ID NO: 70761 - RNA, 25 nt, Artificial Sequence
  Description of Artificial Sequence: Synthetic oligonucleotide
cagggaagaggaggagaugagagac

SEQ ID NO: 70762 - RNA, 25 nt, Artificial Sequence
  Description of Artificial Sequence: Synthetic oligonucleotide
augaucuuuuuuuugucccacuugg

SEQ ID NO: 70763 - RNA, 27 nt, Artificial Sequence
  Description of Artificial Sequence: Synthetic oligonucleotide
ggccgugaacuccucaucaaaauaccu

SEQ ID NO: 70764 - RNA, 27 nt, Artificial Sequence
  Description of Artificial Sequence: Synthetic oligonucleotide
uggugugauggugaucaucugggccgu

SEQ ID NO: 70765 - RNA, 27 nt, Artificial Sequence
  Description of Artificial Sequence: Synthetic oligonucleotide
aaacccgcaggauaguuuucuucccua

SEQ ID NO: 70766 - RNA, 27 nt, Artificial Sequence
  Description of Artificial Sequence: Synthetic oligonucleotide
caaacuggaugaaauaaauuaaaaccc

SEQ ID NO: 70767 - RNA, 27 nt, Artificial Sequence
  Description of Artificial Sequence: Synthetic oligonucleotide
agaaguccuuaacauuucccuacguga

SEQ ID NO: 70768 - RNA, 27 nt, Artificial Sequence
  Description of Artificial Sequence: Synthetic oligonucleotide
cucugucccacuggguaaacccuggcc

SEQ ID NO: 70769 - RNA, 27 nt, Artificial Sequence
  Description of Artificial Sequence: Synthetic oligonucleotide
cacaauaacaaauuuaaaccuugcucc

SEQ ID NO: 70770 - RNA, 27 nt, Artificial Sequence
  Description of Artificial Sequence: Synthetic oligonucleotide
aaaugcauuugaacaacauaauacaca

SEQ ID NO: 70771 - RNA, 27 nt, Artificial Sequence
  Description of Artificial Sequence: Synthetic oligonucleotide
ggcuuuccugucacaaagauuaaaaac

SEQ ID NO: 70772 - RNA, 27 nt, Artificial Sequence
  Description of Artificial Sequence: Synthetic oligonucleotide
agggcuuuccugucacaaagauuaaaa

SEQ ID NO: 70773 - RNA, 27 nt, Artificial Sequence
  Description of Artificial Sequence: Synthetic oligonucleotide
ggccaugcugggagacauaagcagcag

SEQ ID NO: 70774 - RNA, 27 nt, Artificial Sequence
  Description of Artificial Sequence: Synthetic oligonucleotide
ucagggagaagcuucugaaacacuucu

SEQ ID NO: 70775 - RNA, 27 nt, Artificial Sequence
  Description of Artificial Sequence: Synthetic oligonucleotide
aagggcuucuuccuuauugauggucag

SEQ ID NO: 70776 - RNA, 27 nt, Artificial Sequence
  Description of Artificial Sequence: Synthetic oligonucleotide
ugaagggcuucuuccuuauugaugguc

SEQ ID NO: 70777 - RNA, 27 nt, Artificial Sequence
  Description of Artificial Sequence: Synthetic oligonucleotide
cgcugaagggcuucuuccuuauugaug

SEQ ID NO: 70778 - RNA, 27 nt, Artificial Sequence
  Description of Artificial Sequence: Synthetic oligonucleotide
gccgcugaagggcuucuuccuuauuga

SEQ ID NO: 70779 - RNA, 27 nt, Artificial Sequence
  Description of Artificial Sequence: Synthetic oligonucleotide
acuggccgcugaagggcuucuuccuua

SEQ ID NO: 70780 - RNA, 27 nt, Artificial Sequence
  Description of Artificial Sequence: Synthetic oligonucleotide
cggagcuuuucaccuuuaguuaugcuu

SEQ ID NO: 70781 - RNA, 27 nt, Artificial Sequence
  Description of Artificial Sequence: Synthetic oligonucleotide
ccggagcuuuucaccuuuaguuaugcu

SEQ ID NO: 70782 - RNA, 27 nt, Artificial Sequence
  Description of Artificial Sequence: Synthetic oligonucleotide
cagacuguugacuggcgugauguaguu

SEQ ID NO: 70783 - RNA, 27 nt, Artificial Sequence
  Description of Artificial Sequence: Synthetic oligonucleotide
cuuuugaacucugcuuaaauccagugg

SEQ ID NO: 70784 - RNA, 27 nt, Artificial Sequence
  Description of Artificial Sequence: Synthetic oligonucleotide
gcuuuugaacucugcuuaaauccagug

SEQ ID NO: 70785 - RNA, 27 nt, Artificial Sequence
  Description of Artificial Sequence: Synthetic oligonucleotide
agggcuuuugaacucugcuuaaaucca

SEQ ID NO: 70786 - RNA, 27 nt, Artificial Sequence
  Description of Artificial Sequence: Synthetic oligonucleotide
aagggcuuuugaacucugcuuaaaucc

SEQ ID NO: 70787 - RNA, 27 nt, Artificial Sequence
  Description of Artificial Sequence: Synthetic oligonucleotide
ugaagggcuuuugaacucugcuuaaau

SEQ ID NO: 70788 - RNA, 27 nt, Artificial Sequence
  Description of Artificial Sequence: Synthetic oligonucleotide
cugaagggcuuuugaacucugcuuaaa

SEQ ID NO: 70789 - RNA, 27 nt, Artificial Sequence
  Description of Artificial Sequence: Synthetic oligonucleotide
cgcugaagggcuuuugaacucugcuua

SEQ ID NO: 70790 - RNA, 27 nt, Artificial Sequence
  Description of Artificial Sequence: Synthetic oligonucleotide
cgagcggcuucacucagacccugaggc

SEQ ID NO: 70791 - RNA, 27 nt, Artificial Sequence
  Description of Artificial Sequence: Synthetic oligonucleotide
uugacuggcgugauguaguugcuuggg

SEQ ID NO: 70792 - RNA, 27 nt, Artificial Sequence
  Description of Artificial Sequence: Synthetic oligonucleotide
cacgcaccaagaagcugccauugaucc

SEQ ID NO: 70793 - RNA, 27 nt, Artificial Sequence
  Description of Artificial Sequence: Synthetic oligonucleotide
cugaugaauccaaugugggcuggaauc

SEQ ID NO: 70794 - RNA, 27 nt, Artificial Sequence
  Description of Artificial Sequence: Synthetic oligonucleotide
cuuagguauuccacauucucagcugug

SEQ ID NO: 70795 - RNA, 27 nt, Artificial Sequence
  Description of Artificial Sequence: Synthetic oligonucleotide
ugagccucaaauuaggagauacguuuu

SEQ ID NO: 70796 - RNA, 27 nt, Artificial Sequence
  Description of Artificial Sequence: Synthetic oligonucleotide
ccaauuguagagaaauuauuuuaggaa

SEQ ID NO: 70797 - RNA, 27 nt, Artificial Sequence
  Description of Artificial Sequence: Synthetic oligonucleotide
ggcuccuaacuagcugaaucuuccaau

SEQ ID NO: 70798 - RNA, 27 nt, Artificial Sequence
  Description of Artificial Sequence: Synthetic oligonucleotide
guggauauugacuaggagaguuuaaaa

SEQ ID NO: 70799 - RNA, 27 nt, Artificial Sequence
  Description of Artificial Sequence: Synthetic oligonucleotide
ugugacugaacauaacuguaggcugaa

SEQ ID NO: 70800 - RNA, 27 nt, Artificial Sequence
  Description of Artificial Sequence: Synthetic oligonucleotide
guaugugugugugacugaacauaacug

SEQ ID NO: 70801 - RNA, 27 nt, Artificial Sequence
  Description of Artificial Sequence: Synthetic oligonucleotide
aagcaaaaggaacauuuuguaugugug

SEQ ID NO: 70802 - RNA, 27 nt, Artificial Sequence
  Description of Artificial Sequence: Synthetic oligonucleotide
aaaaauuacuuuaaaagcaaaaggaac

SEQ ID NO: 70803 - RNA, 27 nt, Artificial Sequence
  Description of Artificial Sequence: Synthetic oligonucleotide
ccauugacuguugcuucacaggucaga

SEQ ID NO: 70804 - RNA, 27 nt, Artificial Sequence
  Description of Artificial Sequence: Synthetic oligonucleotide
auugguuugucgaugugugagauaguu

SEQ ID NO: 70805 - RNA, 27 nt, Artificial Sequence
  Description of Artificial Sequence: Synthetic oligonucleotide
agugguagcaguacaauugaggacaag

SEQ ID NO: 70806 - RNA, 27 nt, Artificial Sequence
  Description of Artificial Sequence: Synthetic oligonucleotide
uaagaccgcuugccagcuacgguuuca

SEQ ID NO: 70807 - RNA, 27 nt, Artificial Sequence
  Description of Artificial Sequence: Synthetic oligonucleotide
agccgguaagaccgcuugccagcuacg

SEQ ID NO: 70808 - RNA, 27 nt, Artificial Sequence
  Description of Artificial Sequence: Synthetic oligonucleotide
gguaacccaucuuuuaaccauacaacu

SEQ ID NO: 70809 - RNA, 27 nt, Artificial Sequence
  Description of Artificial Sequence: Synthetic oligonucleotide
ucgcagguaacccaucuuuuaaccaua

SEQ ID NO: 70810 - RNA, 27 nt, Artificial Sequence
  Description of Artificial Sequence: Synthetic oligonucleotide
cucagcaagauuguauaauucccugca

SEQ ID NO: 70811 - RNA, 27 nt, Artificial Sequence
  Description of Artificial Sequence: Synthetic oligonucleotide
acuguuuuaugcucagcaagauuguau

SEQ ID NO: 70812 - RNA, 27 nt, Artificial Sequence
  Description of Artificial Sequence: Synthetic oligonucleotide
aggauaaaggacucuucauuauuggaa

SEQ ID NO: 70813 - RNA, 27 nt, Artificial Sequence
  Description of Artificial Sequence: Synthetic oligonucleotide
caacuugcguuggaacauccaaagugu

SEQ ID NO: 70814 - RNA, 27 nt, Artificial Sequence
  Description of Artificial Sequence: Synthetic oligonucleotide
augguuucaguuuaguggaagcauuua

SEQ ID NO: 70815 - RNA, 27 nt, Artificial Sequence
  Description of Artificial Sequence: Synthetic oligonucleotide
auauuuaacaaagucaaacuuucucac

SEQ ID NO: 70816 - RNA, 27 nt, Artificial Sequence
  Description of Artificial Sequence: Synthetic oligonucleotide
aacuuuuaauauacaguaguucuuuuc

SEQ ID NO: 70817 - RNA, 27 nt, Artificial Sequence
  Description of Artificial Sequence: Synthetic oligonucleotide
guuaagucaaaacccguauuucuaaag

SEQ ID NO: 70818 - RNA, 27 nt, Artificial Sequence
  Description of Artificial Sequence: Synthetic oligonucleotide
gugcugaguuugcuguacccauguuga

SEQ ID NO: 70819 - RNA, 27 nt, Artificial Sequence
  Description of Artificial Sequence: Synthetic oligonucleotide
ugaggucagcaucuucugugucuuuac

SEQ ID NO: 70820 - RNA, 27 nt, Artificial Sequence
  Description of Artificial Sequence: Synthetic oligonucleotide
gcgaucugaauaaaccucccuacuagc

SEQ ID NO: 70821 - RNA, 27 nt, Artificial Sequence
  Description of Artificial Sequence: Synthetic oligonucleotide
aucccagaacccugcugcagaaggcca

SEQ ID NO: 70822 - RNA, 27 nt, Artificial Sequence
  Description of Artificial Sequence: Synthetic oligonucleotide
cauaauuuccaauauguaccagaccuu

SEQ ID NO: 70823 - RNA, 27 nt, Artificial Sequence
  Description of Artificial Sequence: Synthetic oligonucleotide
cuagugcuuccaucggaaggacuaggu

SEQ ID NO: 70824 - RNA, 27 nt, Artificial Sequence
  Description of Artificial Sequence: Synthetic oligonucleotide
uccacauaaaaacaauauucacuggga

SEQ ID NO: 70825 - RNA, 27 nt, Artificial Sequence
  Description of Artificial Sequence: Synthetic oligonucleotide
ucuaccaauuccaacuugaauucauug

SEQ ID NO: 70826 - RNA, 27 nt, Artificial Sequence
  Description of Artificial Sequence: Synthetic oligonucleotide
ucuccaagucuaaaucuguguccugag

SEQ ID NO: 70827 - RNA, 27 nt, Artificial Sequence
  Description of Artificial Sequence: Synthetic oligonucleotide
uggaauacuguaacugugcuuugagga

SEQ ID NO: 70828 - RNA, 27 nt, Artificial Sequence
  Description of Artificial Sequence: Synthetic oligonucleotide
uuaauucaucagugguggcagugguag

SEQ ID NO: 70829 - RNA, 27 nt, Artificial Sequence
  Description of Artificial Sequence: Synthetic oligonucleotide
gugaugauguggcacuaguaguuucuu

SEQ ID NO: 70830 - RNA, 27 nt, Artificial Sequence
  Description of Artificial Sequence: Synthetic oligonucleotide
ucuguuuggugaggcuguccgacuuug

SEQ ID NO: 70831 - RNA, 27 nt, Artificial Sequence
  Description of Artificial Sequence: Synthetic oligonucleotide
ccaucauguuccauuuuucgcuuucuc

SEQ ID NO: 70832 - RNA, 27 nt, Artificial Sequence
  Description of Artificial Sequence: Synthetic oligonucleotide
gcagucuacaugcuaaaucagagggua

SEQ ID NO: 70833 - RNA, 27 nt, Artificial Sequence
  Description of Artificial Sequence: Synthetic oligonucleotide
cauaaauagauccuuaaauagcucaaa

SEQ ID NO: 70834 - RNA, 27 nt, Artificial Sequence
  Description of Artificial Sequence: Synthetic oligonucleotide
ugauaauagugcuuuuucaccuuuuuc

SEQ ID NO: 70835 - RNA, 27 nt, Artificial Sequence
  Description of Artificial Sequence: Synthetic oligonucleotide
gcagaacugauaauagugcuuuuucac

SEQ ID NO: 70836 - RNA, 27 nt, Artificial Sequence
  Description of Artificial Sequence: Synthetic oligonucleotide
guagguuuaaucuuucuuuucagccau

SEQ ID NO: 70837 - RNA, 27 nt, Artificial Sequence
  Description of Artificial Sequence: Synthetic oligonucleotide
agaaggauuuuauuauaaggguuuaau

SEQ ID NO: 70838 - RNA, 27 nt, Artificial Sequence
  Description of Artificial Sequence: Synthetic oligonucleotide
gucuacagcauuggcuaauaguaugaa

SEQ ID NO: 70839 - RNA, 27 nt, Artificial Sequence
  Description of Artificial Sequence: Synthetic oligonucleotide
cuauuccuaucaaaaugcuucugucua

SEQ ID NO: 70840 - RNA, 27 nt, Artificial Sequence
  Description of Artificial Sequence: Synthetic oligonucleotide
ucagggccauuaucuuauuugcucuau

SEQ ID NO: 70841 - RNA, 27 nt, Artificial Sequence
  Description of Artificial Sequence: Synthetic oligonucleotide
ugcuugaggaagagaaaaauguugguc

SEQ ID NO: 70842 - RNA, 27 nt, Artificial Sequence
  Description of Artificial Sequence: Synthetic oligonucleotide
ugggcugaacuuuucucauacuuaaag

SEQ ID NO: 70843 - RNA, 27 nt, Artificial Sequence
  Description of Artificial Sequence: Synthetic oligonucleotide
gguucagcagccaucuuuauuccugcg

SEQ ID NO: 70844 - RNA, 27 nt, Artificial Sequence
  Description of Artificial Sequence: Synthetic oligonucleotide
ugaagagaacuuggucauucaaauuuc

SEQ ID NO: 70845 - RNA, 27 nt, Artificial Sequence
  Description of Artificial Sequence: Synthetic oligonucleotide
cucuaggcuggcuaucuuuauacauac

SEQ ID NO: 70846 - RNA, 27 nt, Artificial Sequence
  Description of Artificial Sequence: Synthetic oligonucleotide
acacuucacagagauaguuacagccau

SEQ ID NO: 70847 - RNA, 27 nt, Artificial Sequence
  Description of Artificial Sequence: Synthetic oligonucleotide
uugaaauuuucucacacuucacagaga

SEQ ID NO: 70848 - RNA, 27 nt, Artificial Sequence
  Description of Artificial Sequence: Synthetic oligonucleotide
ucaggaggauucauuuccuuaaaggaa

SEQ ID NO: 70849 - RNA, 27 nt, Artificial Sequence
  Description of Artificial Sequence: Synthetic oligonucleotide
auaugaugucacuuuuuguauccuuga

SEQ ID NO: 70850 - RNA, 27 nt, Artificial Sequence
  Description of Artificial Sequence: Synthetic oligonucleotide
uaugaugaagauucaaauugcaucuua

SEQ ID NO: 70851 - RNA, 27 nt, Artificial Sequence
  Description of Artificial Sequence: Synthetic oligonucleotide
uuaauagcuagucuucguuuugaacag

SEQ ID NO: 70852 - RNA, 27 nt, Artificial Sequence
  Description of Artificial Sequence: Synthetic oligonucleotide
auuuuuaguagagaugagguuucacca

SEQ ID NO: 70853 - RNA, 27 nt, Artificial Sequence
  Description of Artificial Sequence: Synthetic oligonucleotide
aggcgagauagagcuucucuuucguuc

SEQ ID NO: 70854 - RNA, 27 nt, Artificial Sequence
  Description of Artificial Sequence: Synthetic oligonucleotide
aacuggaccgaaggcgcuuguggagaa

SEQ ID NO: 70855 - RNA, 27 nt, Artificial Sequence
  Description of Artificial Sequence: Synthetic oligonucleotide
gcggcuacaucuuuggaaucuucuccu

SEQ ID NO: 70856 - RNA, 27 nt, Artificial Sequence
  Description of Artificial Sequence: Synthetic oligonucleotide
caagucuccucauugaauccagauugg

SEQ ID NO: 70857 - RNA, 27 nt, Artificial Sequence
  Description of Artificial Sequence: Synthetic oligonucleotide
uccucacuacucucaaaucuguucugg

SEQ ID NO: 70858 - RNA, 27 nt, Artificial Sequence
  Description of Artificial Sequence: Synthetic oligonucleotide
uuuguacucaucugcacagcucuggcu

SEQ ID NO: 70859 - RNA, 27 nt, Artificial Sequence
  Description of Artificial Sequence: Synthetic oligonucleotide
gcccauuaacaacaacaaucugaggug

SEQ ID NO: 70860 - RNA, 27 nt, Artificial Sequence
  Description of Artificial Sequence: Synthetic oligonucleotide
aauaaauuaaaaauaauuaaaauagug

SEQ ID NO: 70861 - RNA, 27 nt, Artificial Sequence
  Description of Artificial Sequence: Synthetic oligonucleotide
cauauuuaaauauuaauaaauuaaaaa

SEQ ID NO: 70862 - RNA, 27 nt, Artificial Sequence
  Description of Artificial Sequence: Synthetic oligonucleotide
gaaacaaaggauauucaaacugcauag

SEQ ID NO: 70863 - RNA, 27 nt, Artificial Sequence
  Description of Artificial Sequence: Synthetic oligonucleotide
caaacacuuagacgccagcagcauggg

SEQ ID NO: 70864 - RNA, 27 nt, Artificial Sequence
  Description of Artificial Sequence: Synthetic oligonucleotide
uuugucacaggugaaaugcacaucuga

SEQ ID NO: 70865 - RNA, 27 nt, Artificial Sequence
  Description of Artificial Sequence: Synthetic oligonucleotide
uaauucagccuggcacagguuuugauc

SEQ ID NO: 70866 - RNA, 27 nt, Artificial Sequence
  Description of Artificial Sequence: Synthetic oligonucleotide
auuguaagaaugacuacccacauucac

SEQ ID NO: 70867 - RNA, 27 nt, Artificial Sequence
  Description of Artificial Sequence: Synthetic oligonucleotide
caauuguaagaaugacuacccacauuc

SEQ ID NO: 70868 - RNA, 27 nt, Artificial Sequence
  Description of Artificial Sequence: Synthetic oligonucleotide
guacacucucugaugcucauuuucaua

SEQ ID NO: 70869 - RNA, 27 nt, Artificial Sequence
  Description of Artificial Sequence: Synthetic oligonucleotide
cugcugaguucuacaugaaaagcaaau

SEQ ID NO: 70870 - RNA, 27 nt, Artificial Sequence
  Description of Artificial Sequence: Synthetic oligonucleotide
uacugaaaauaaauauagaaauacaac

SEQ ID NO: 70871 - RNA, 27 nt, Artificial Sequence
  Description of Artificial Sequence: Synthetic oligonucleotide
uuccauuuaagaaacauuaaucaaaac

SEQ ID NO: 70872 - RNA, 27 nt, Artificial Sequence
  Description of Artificial Sequence: Synthetic oligonucleotide
acaauuuuaggcacuauacacguuguu

SEQ ID NO: 70873 - RNA, 27 nt, Artificial Sequence
  Description of Artificial Sequence: Synthetic oligonucleotide
ccagauguuaguagccaaggauauggu

SEQ ID NO: 70874 - RNA, 27 nt, Artificial Sequence
  Description of Artificial Sequence: Synthetic oligonucleotide
agcucacagucuccagauguuaguagc

SEQ ID NO: 70875 - RNA, 27 nt, Artificial Sequence
  Description of Artificial Sequence: Synthetic oligonucleotide
auuaauaaaaagcacacaacuuauggc

SEQ ID NO: 70876 - RNA, 27 nt, Artificial Sequence
  Description of Artificial Sequence: Synthetic oligonucleotide
aauguaagaagagccaaaaugaugcau

SEQ ID NO: 70877 - RNA, 27 nt, Artificial Sequence
  Description of Artificial Sequence: Synthetic oligonucleotide
acauuuuuacaaauguaagaagagcca

SEQ ID NO: 70878 - RNA, 27 nt, Artificial Sequence
  Description of Artificial Sequence: Synthetic oligonucleotide
aauaugaauuaagaugaccuaaucugu

SEQ ID NO: 70879 - RNA, 27 nt, Artificial Sequence
  Description of Artificial Sequence: Synthetic oligonucleotide
ucaugauuaguucuuucaauuccaucc

SEQ ID NO: 70880 - RNA, 27 nt, Artificial Sequence
  Description of Artificial Sequence: Synthetic oligonucleotide
cccaagagcagaaggaaugagugugca

SEQ ID NO: 70881 - RNA, 27 nt, Artificial Sequence
  Description of Artificial Sequence: Synthetic oligonucleotide
cucaaagcuacugguuaccucuacacc

SEQ ID NO: 70882 - RNA, 27 nt, Artificial Sequence
  Description of Artificial Sequence: Synthetic oligonucleotide
ugaaauauuacguggcaugugguuggg

SEQ ID NO: 70883 - RNA, 27 nt, Artificial Sequence
  Description of Artificial Sequence: Synthetic oligonucleotide
agugaagagaauaacuuguuuccgaag

SEQ ID NO: 70884 - RNA, 27 nt, Artificial Sequence
  Description of Artificial Sequence: Synthetic oligonucleotide
uuucuuagcauuaguuauugggaguga

SEQ ID NO: 70885 - RNA, 27 nt, Artificial Sequence
  Description of Artificial Sequence: Synthetic oligonucleotide
uugauuuucagcauuucuuagcauuag

SEQ ID NO: 70886 - RNA, 27 nt, Artificial Sequence
  Description of Artificial Sequence: Synthetic oligonucleotide
aaaguaaucauauuuagagaaagacag

SEQ ID NO: 70887 - RNA, 27 nt, Artificial Sequence
  Description of Artificial Sequence: Synthetic oligonucleotide
uguagaacaaaaugccugaaauucagc

SEQ ID NO: 70888 - RNA, 27 nt, Artificial Sequence
  Description of Artificial Sequence: Synthetic oligonucleotide
gagagucccgggugagagggaaucgcc

SEQ ID NO: 70889 - RNA, 27 nt, Artificial Sequence
  Description of Artificial Sequence: Synthetic oligonucleotide
cuuuacuuuaaagguucacuuuccuug

SEQ ID NO: 70890 - RNA, 27 nt, Artificial Sequence
  Description of Artificial Sequence: Synthetic oligonucleotide
ccaggcuuccagagcaugcagccuccu

SEQ ID NO: 70891 - RNA, 27 nt, Artificial Sequence
  Description of Artificial Sequence: Synthetic oligonucleotide
cucucuuuuguuuucuguucagagaaa

SEQ ID NO: 70892 - RNA, 27 nt, Artificial Sequence
  Description of Artificial Sequence: Synthetic oligonucleotide
cggcauaacugauuacagccaaguuca

SEQ ID NO: 70893 - RNA, 27 nt, Artificial Sequence
  Description of Artificial Sequence: Synthetic oligonucleotide
uggacuucuuuuaauuuuggcuucuuc

SEQ ID NO: 70894 - RNA, 27 nt, Artificial Sequence
  Description of Artificial Sequence: Synthetic oligonucleotide
uaaccucaccuggacuucuuuuaauuu

SEQ ID NO: 70895 - RNA, 27 nt, Artificial Sequence
  Description of Artificial Sequence: Synthetic oligonucleotide
guccucuucccgauaauccggauucag

SEQ ID NO: 70896 - RNA, 27 nt, Artificial Sequence
  Description of Artificial Sequence: Synthetic oligonucleotide
acaauacuugcuuugaugucacauuaa

SEQ ID NO: 70897 - RNA, 27 nt, Artificial Sequence
  Description of Artificial Sequence: Synthetic oligonucleotide
gagugcuacaauacuugcuuugauguc

SEQ ID NO: 70898 - RNA, 27 nt, Artificial Sequence
  Description of Artificial Sequence: Synthetic oligonucleotide
auuugugguuuuguuuucucucucucu

SEQ ID NO: 70899 - RNA, 27 nt, Artificial Sequence
  Description of Artificial Sequence: Synthetic oligonucleotide
uguaugggcuuaaauacuacagcgagg

SEQ ID NO: 70900 - RNA, 27 nt, Artificial Sequence
  Description of Artificial Sequence: Synthetic oligonucleotide
cuguaugggcuuaaauacuacagcgag

SEQ ID NO: 70901 - RNA, 27 nt, Artificial Sequence
  Description of Artificial Sequence: Synthetic oligonucleotide
ggaagguuucuguaugggcuuaaauac

SEQ ID NO: 70902 - RNA, 27 nt, Artificial Sequence
  Description of Artificial Sequence: Synthetic oligonucleotide
guagguauaccauguuuauuuuaauac

SEQ ID NO: 70903 - RNA, 27 nt, Artificial Sequence
  Description of Artificial Sequence: Synthetic oligonucleotide
uccgaaaacuggccgaucagaacagcc

SEQ ID NO: 70904 - RNA, 27 nt, Artificial Sequence
  Description of Artificial Sequence: Synthetic oligonucleotide
cccuguuccaaaguucaaauuauuugu

SEQ ID NO: 70905 - RNA, 27 nt, Artificial Sequence
  Description of Artificial Sequence: Synthetic oligonucleotide
acuggaaaguuaaauuaaggucgcaau

SEQ ID NO: 70906 - RNA, 27 nt, Artificial Sequence
  Description of Artificial Sequence: Synthetic oligonucleotide
caaaaccaaacuuuagcuuucucagcc

SEQ ID NO: 70907 - RNA, 27 nt, Artificial Sequence
  Description of Artificial Sequence: Synthetic oligonucleotide
uacagugggaaguagcaucuuuacuuu

SEQ ID NO: 70908 - RNA, 27 nt, Artificial Sequence
  Description of Artificial Sequence: Synthetic oligonucleotide
ucauaugguaucagcaauuaagcagua

SEQ ID NO: 70909 - RNA, 27 nt, Artificial Sequence
  Description of Artificial Sequence: Synthetic oligonucleotide
cagcccauguuucauucauaugguauc

SEQ ID NO: 70910 - RNA, 27 nt, Artificial Sequence
  Description of Artificial Sequence: Synthetic oligonucleotide
uaugaaaaaguuggauaagaaaguugg

SEQ ID NO: 70911 - RNA, 27 nt, Artificial Sequence
  Description of Artificial Sequence: Synthetic oligonucleotide
uccggccucaugaugucaugcaaggcu

SEQ ID NO: 70912 - RNA, 27 nt, Artificial Sequence
  Description of Artificial Sequence: Synthetic oligonucleotide
acaaaugcagucauauacaaauucagg

SEQ ID NO: 70913 - RNA, 27 nt, Artificial Sequence
  Description of Artificial Sequence: Synthetic oligonucleotide
gguaguaaacauucuacuaggauucuu

SEQ ID NO: 70914 - RNA, 27 nt, Artificial Sequence
  Description of Artificial Sequence: Synthetic oligonucleotide
uuucaucaaaaaauucuucccuuucug

SEQ ID NO: 70915 - RNA, 27 nt, Artificial Sequence
  Description of Artificial Sequence: Synthetic oligonucleotide
aaauucacacacuggcaugccgauagc

SEQ ID NO: 70916 - RNA, 27 nt, Artificial Sequence
  Description of Artificial Sequence: Synthetic oligonucleotide
acauacauugcucuacuaugaggugaa

SEQ ID NO: 70917 - RNA, 27 nt, Artificial Sequence
  Description of Artificial Sequence: Synthetic oligonucleotide
uauauaugugcuuuggcaauucuggug

SEQ ID NO: 70918 - RNA, 27 nt, Artificial Sequence
  Description of Artificial Sequence: Synthetic oligonucleotide
ggagaaacuauuacccagaucaccacu

SEQ ID NO: 70919 - RNA, 27 nt, Artificial Sequence
  Description of Artificial Sequence: Synthetic oligonucleotide
auuuggagaaacuauuacccagaucac

SEQ ID NO: 70920 - RNA, 27 nt, Artificial Sequence
  Description of Artificial Sequence: Synthetic oligonucleotide
uuucuaggaaguauucaucacauccac

SEQ ID NO: 70921 - RNA, 27 nt, Artificial Sequence
  Description of Artificial Sequence: Synthetic oligonucleotide
cauauaugguguagcuguggaaaugcg

SEQ ID NO: 70922 - RNA, 27 nt, Artificial Sequence
  Description of Artificial Sequence: Synthetic oligonucleotide
cuccauucauauaugguguagcugugg

SEQ ID NO: 70923 - RNA, 27 nt, Artificial Sequence
  Description of Artificial Sequence: Synthetic oligonucleotide
aucuucuucucguguaagaacugcagc

SEQ ID NO: 70924 - RNA, 27 nt, Artificial Sequence
  Description of Artificial Sequence: Synthetic oligonucleotide
ucccuguaaaugaucuucuucucgugu

SEQ ID NO: 70925 - RNA, 27 nt, Artificial Sequence
  Description of Artificial Sequence: Synthetic oligonucleotide
gucccuguaaaugaucuucuucucgug

SEQ ID NO: 70926 - RNA, 27 nt, Artificial Sequence
  Description of Artificial Sequence: Synthetic oligonucleotide
ucaggucccuguaaaugaucuucuucu

SEQ ID NO: 70927 - RNA, 27 nt, Artificial Sequence
  Description of Artificial Sequence: Synthetic oligonucleotide
gaugcagucaaacaccucuuccucugu

SEQ ID NO: 70928 - RNA, 27 nt, Artificial Sequence
  Description of Artificial Sequence: Synthetic oligonucleotide
cgaugcagucaaacaccucuuccucug

SEQ ID NO: 70929 - RNA, 27 nt, Artificial Sequence
  Description of Artificial Sequence: Synthetic oligonucleotide
cccugugaacucgcccucaaaguagcg

SEQ ID NO: 70930 - RNA, 27 nt, Artificial Sequence
  Description of Artificial Sequence: Synthetic oligonucleotide
ggacagaggugccaggagaugcccuca

SEQ ID NO: 70931 - RNA, 27 nt, Artificial Sequence
  Description of Artificial Sequence: Synthetic oligonucleotide
uuaaaaagacaaaccauaucacuccuu

SEQ ID NO: 70932 - RNA, 27 nt, Artificial Sequence
  Description of Artificial Sequence: Synthetic oligonucleotide
cuuaaaaagacaaaccauaucacuccu

SEQ ID NO: 70933 - RNA, 27 nt, Artificial Sequence
  Description of Artificial Sequence: Synthetic oligonucleotide
gacaaccuuuaggaucuuuacugcaac

SEQ ID NO: 70934 - RNA, 27 nt, Artificial Sequence
  Description of Artificial Sequence: Synthetic oligonucleotide
gucgacaaccuuuaggaucuuuacugc

SEQ ID NO: 70935 - RNA, 27 nt, Artificial Sequence
  Description of Artificial Sequence: Synthetic oligonucleotide
acaauugccagguuguccuuugucaug

SEQ ID NO: 70936 - RNA, 27 nt, Artificial Sequence
  Description of Artificial Sequence: Synthetic oligonucleotide
ccucgcaccacugggucacaauugcca

SEQ ID NO: 70937 - RNA, 27 nt, Artificial Sequence
  Description of Artificial Sequence: Synthetic oligonucleotide
auuucaugucucuauggaugauguucu

SEQ ID NO: 70938 - RNA, 27 nt, Artificial Sequence
  Description of Artificial Sequence: Synthetic oligonucleotide
uggagaaauauauuguuggauuucaug

SEQ ID NO: 70939 - RNA, 27 nt, Artificial Sequence
  Description of Artificial Sequence: Synthetic oligonucleotide
agccuucauggagaaauauauuguugg

SEQ ID NO: 70940 - RNA, 27 nt, Artificial Sequence
  Description of Artificial Sequence: Synthetic oligonucleotide
accacuccagcgugacuuuacuguugc

SEQ ID NO: 70941 - RNA, 27 nt, Artificial Sequence
  Description of Artificial Sequence: Synthetic oligonucleotide
ccucucuuccuuuacuuucuucacaca

SEQ ID NO: 70942 - RNA, 27 nt, Artificial Sequence
  Description of Artificial Sequence: Synthetic oligonucleotide
gcccgaugcaaggauggcucggaagcg

SEQ ID NO: 70943 - RNA, 27 nt, Artificial Sequence
  Description of Artificial Sequence: Synthetic oligonucleotide
cacaguaggauauucaaccuccauuuc

SEQ ID NO: 70944 - RNA, 27 nt, Artificial Sequence
  Description of Artificial Sequence: Synthetic oligonucleotide
uuacacaguaggauauucaaccuccau

SEQ ID NO: 70945 - RNA, 27 nt, Artificial Sequence
  Description of Artificial Sequence: Synthetic oligonucleotide
uacacuacaagggaaaacucaaaaucu

SEQ ID NO: 70946 - RNA, 27 nt, Artificial Sequence
  Description of Artificial Sequence: Synthetic oligonucleotide
caaucaacaaagaacaaacaggauaaa

SEQ ID NO: 70947 - RNA, 27 nt, Artificial Sequence
  Description of Artificial Sequence: Synthetic oligonucleotide
uuucaaucaacaaagaacaaacaggau

SEQ ID NO: 70948 - RNA, 27 nt, Artificial Sequence
  Description of Artificial Sequence: Synthetic oligonucleotide
auggaagaaaaagaaggcuguagagaa

SEQ ID NO: 70949 - RNA, 27 nt, Artificial Sequence
  Description of Artificial Sequence: Synthetic oligonucleotide
uagaaggaagauuagcuauggaagaaa

SEQ ID NO: 70950 - RNA, 27 nt, Artificial Sequence
  Description of Artificial Sequence: Synthetic oligonucleotide
augaagcauucaacaggaagauuauuu

SEQ ID NO: 70951 - RNA, 27 nt, Artificial Sequence
  Description of Artificial Sequence: Synthetic oligonucleotide
caugaagcauucaacaggaagauuauu

SEQ ID NO: 70952 - RNA, 27 nt, Artificial Sequence
  Description of Artificial Sequence: Synthetic oligonucleotide
ucaaaguagaauucaagucaugaagca

SEQ ID NO: 70953 - RNA, 27 nt, Artificial Sequence
  Description of Artificial Sequence: Synthetic oligonucleotide
gucuguaguugcuucucucccucuuag

SEQ ID NO: 70954 - RNA, 27 nt, Artificial Sequence
  Description of Artificial Sequence: Synthetic oligonucleotide
guugaccuuggucugguaggagacggc

SEQ ID NO: 70955 - RNA, 27 nt, Artificial Sequence
  Description of Artificial Sequence: Synthetic oligonucleotide
gucgagauagucgggccgauugaucuc

SEQ ID NO: 70956 - RNA, 27 nt, Artificial Sequence
  Description of Artificial Sequence: Synthetic oligonucleotide
guuugggaagguuggauguucguccuc

SEQ ID NO: 70957 - RNA, 27 nt, Artificial Sequence
  Description of Artificial Sequence: Synthetic oligonucleotide
aguucuaagcuuggguuccgacccuaa

SEQ ID NO: 70958 - RNA, 27 nt, Artificial Sequence
  Description of Artificial Sequence: Synthetic oligonucleotide
uuaaaguucuaagcuuggguuccgacc

SEQ ID NO: 70959 - RNA, 27 nt, Artificial Sequence
  Description of Artificial Sequence: Synthetic oligonucleotide
guugcuuaaaguucuaagcuuggguuc

SEQ ID NO: 70960 - RNA, 27 nt, Artificial Sequence
  Description of Artificial Sequence: Synthetic oligonucleotide
gugguggucuuguugcuuaaaguucua

SEQ ID NO: 70961 - RNA, 27 nt, Artificial Sequence
  Description of Artificial Sequence: Synthetic oligonucleotide
acuuuauuucucgccacugaauaguag

SEQ ID NO: 70962 - RNA, 27 nt, Artificial Sequence
  Description of Artificial Sequence: Synthetic oligonucleotide
aacuuuauuucucgccacugaauagua

SEQ ID NO: 70963 - RNA, 27 nt, Artificial Sequence
  Description of Artificial Sequence: Synthetic oligonucleotide
ggaucauuuccuguuaucuguguuugu

SEQ ID NO: 70964 - RNA, 27 nt, Artificial Sequence
  Description of Artificial Sequence: Synthetic oligonucleotide
guuucauuucuucucuuuucuuaaggc

SEQ ID NO: 70965 - RNA, 27 nt, Artificial Sequence
  Description of Artificial Sequence: Synthetic oligonucleotide
ggaggauggaaacacacuccuucaguu

SEQ ID NO: 70966 - RNA, 27 nt, Artificial Sequence
  Description of Artificial Sequence: Synthetic oligonucleotide
ucaaagauuuucagucccgcggugaca

SEQ ID NO: 70967 - RNA, 27 nt, Artificial Sequence
  Description of Artificial Sequence: Synthetic oligonucleotide
ccugaacggcacgcuuauuucugcugu

SEQ ID NO: 70968 - RNA, 27 nt, Artificial Sequence
  Description of Artificial Sequence: Synthetic oligonucleotide
cuucuggacccugaacggcacgcuuau

SEQ ID NO: 70969 - RNA, 27 nt, Artificial Sequence
  Description of Artificial Sequence: Synthetic oligonucleotide
caagcagucuugagugacuguuucuuc

SEQ ID NO: 70970 - RNA, 27 nt, Artificial Sequence
  Description of Artificial Sequence: Synthetic oligonucleotide
ccaaagacauggaccuucuuccucuga

SEQ ID NO: 70971 - RNA, 27 nt, Artificial Sequence
  Description of Artificial Sequence: Synthetic oligonucleotide
guguuucaggcauauuuugaauacauc

SEQ ID NO: 70972 - RNA, 27 nt, Artificial Sequence
  Description of Artificial Sequence: Synthetic oligonucleotide
gagguacagagaaagggaggaaaauag

SEQ ID NO: 70973 - RNA, 27 nt, Artificial Sequence
  Description of Artificial Sequence: Synthetic oligonucleotide
ucuugucuugcucuaucuuucuuuggu

SEQ ID NO: 70974 - RNA, 27 nt, Artificial Sequence
  Description of Artificial Sequence: Synthetic oligonucleotide
uuucuugucuugcucuaucuuucuuug

SEQ ID NO: 70975 - RNA, 27 nt, Artificial Sequence
  Description of Artificial Sequence: Synthetic oligonucleotide
ggaucuuguacaaacaaaugcuuucuc

SEQ ID NO: 70976 - RNA, 27 nt, Artificial Sequence
  Description of Artificial Sequence: Synthetic oligonucleotide
ucugcaaguacguucguuuaacucaag

SEQ ID NO: 70977 - RNA, 27 nt, Artificial Sequence
  Description of Artificial Sequence: Synthetic oligonucleotide
ucuguaucgaucguucuguaucagucu

SEQ ID NO: 70978 - RNA, 27 nt, Artificial Sequence
  Description of Artificial Sequence: Synthetic oligonucleotide
auuuauuuuuauauauauauaauauau

SEQ ID NO: 70979 - RNA, 27 nt, Artificial Sequence
  Description of Artificial Sequence: Synthetic oligonucleotide
auauuuauuuuuauauauauauaauau

SEQ ID NO: 70980 - RNA, 27 nt, Artificial Sequence
  Description of Artificial Sequence: Synthetic oligonucleotide
cacagcagucaaauacauccagugaag

SEQ ID NO: 70981 - RNA, 27 nt, Artificial Sequence
  Description of Artificial Sequence: Synthetic oligonucleotide
gucucucaucuccuccucuucccuguc

SEQ ID NO: 70982 - RNA, 27 nt, Artificial Sequence
  Description of Artificial Sequence: Synthetic oligonucleotide
ccaagugggacaaaaaaaagaucaugc

SEQ ID NO: 70983 - RNA, 14 nt, Artificial Sequence
  Description of Artificial Sequence: Synthetic oligonucleotide
guauuuugaugagg

SEQ ID NO: 70984 - RNA, 12 nt, Artificial Sequence
  Description of Artificial Sequence: Synthetic oligonucleotide
ggcccagaugau

SEQ ID NO: 70985 - RNA, 14 nt, Artificial Sequence
  Description of Artificial Sequence: Synthetic oligonucleotide
gggaagaaaacuau

SEQ ID NO: 70986 - RNA, 15 nt, Artificial Sequence
  Description of Artificial Sequence: Synthetic oligonucleotide
guuuuaauuuauuuc

SEQ ID NO: 70987 - RNA, 12 nt, Artificial Sequence
  Description of Artificial Sequence: Synthetic oligonucleotide
acguagggaaau

SEQ ID NO: 70988 - RNA, 12 nt, Artificial Sequence
  Description of Artificial Sequence: Synthetic oligonucleotide
ccaggguuuacc

SEQ ID NO: 70989 - RNA, 11 nt, Artificial Sequence
  Description of Artificial Sequence: Synthetic oligonucleotide
agcaagguuua

SEQ ID NO: 70990 - RNA, 12 nt, Artificial Sequence
  Description of Artificial Sequence: Synthetic oligonucleotide
uguauuauguug

SEQ ID NO: 70991 - RNA, 15 nt, Artificial Sequence
  Description of Artificial Sequence: Synthetic oligonucleotide
uuuuaaucuuuguga

SEQ ID NO: 70992 - RNA, 14 nt, Artificial Sequence
  Description of Artificial Sequence: Synthetic oligonucleotide
uuaaucuuugugac

SEQ ID NO: 70993 - RNA, 13 nt, Artificial Sequence
  Description of Artificial Sequence: Synthetic oligonucleotide
gcugcuuaugucu

SEQ ID NO: 70994 - RNA, 14 nt, Artificial Sequence
  Description of Artificial Sequence: Synthetic oligonucleotide
aaguguuucagaag

SEQ ID NO: 70995 - RNA, 13 nt, Artificial Sequence
  Description of Artificial Sequence: Synthetic oligonucleotide
gaccaucaauaag

SEQ ID NO: 70996 - RNA, 13 nt, Artificial Sequence
  Description of Artificial Sequence: Synthetic oligonucleotide
ccaucaauaagga

SEQ ID NO: 70997 - RNA, 14 nt, Artificial Sequence
  Description of Artificial Sequence: Synthetic oligonucleotide
ucaauaaggaagaa

SEQ ID NO: 70998 - RNA, 14 nt, Artificial Sequence
  Description of Artificial Sequence: Synthetic oligonucleotide
aauaaggaagaagc

SEQ ID NO: 70999 - RNA, 13 nt, Artificial Sequence
  Description of Artificial Sequence: Synthetic oligonucleotide
aggaagaagcccu

SEQ ID NO: 71000 - RNA, 13 nt, Artificial Sequence
  Description of Artificial Sequence: Synthetic oligonucleotide
gcauaacuaaagg

SEQ ID NO: 71001 - RNA, 14 nt, Artificial Sequence
  Description of Artificial Sequence: Synthetic oligonucleotide
cauaacuaaaggug

SEQ ID NO: 71002 - RNA, 12 nt, Artificial Sequence
  Description of Artificial Sequence: Synthetic oligonucleotide
cuacaucacgcc

SEQ ID NO: 71003 - RNA, 12 nt, Artificial Sequence
  Description of Artificial Sequence: Synthetic oligonucleotide
acuggauuuaag

SEQ ID NO: 71004 - RNA, 12 nt, Artificial Sequence
  Description of Artificial Sequence: Synthetic oligonucleotide
cuggauuuaagc

SEQ ID NO: 71005 - RNA, 13 nt, Artificial Sequence
  Description of Artificial Sequence: Synthetic oligonucleotide
gauuuaagcagag

SEQ ID NO: 71006 - RNA, 13 nt, Artificial Sequence
  Description of Artificial Sequence: Synthetic oligonucleotide
auuuaagcagagu

SEQ ID NO: 71007 - RNA, 13 nt, Artificial Sequence
  Description of Artificial Sequence: Synthetic oligonucleotide
uuaagcagaguuc

SEQ ID NO: 71008 - RNA, 13 nt, Artificial Sequence
  Description of Artificial Sequence: Synthetic oligonucleotide
uaagcagaguuca

SEQ ID NO: 71009 - RNA, 14 nt, Artificial Sequence
  Description of Artificial Sequence: Synthetic oligonucleotide
agcagaguucaaaa

SEQ ID NO: 71010 - RNA, 12 nt, Artificial Sequence
  Description of Artificial Sequence: Synthetic oligonucleotide
cucagggucuga

SEQ ID NO: 71011 - RNA, 13 nt, Artificial Sequence
  Description of Artificial Sequence: Synthetic oligonucleotide
caagcaacuacau

SEQ ID NO: 71012 - RNA, 12 nt, Artificial Sequence
  Description of Artificial Sequence: Synthetic oligonucleotide
aucaauggcagc

SEQ ID NO: 71013 - RNA, 11 nt, Artificial Sequence
  Description of Artificial Sequence: Synthetic oligonucleotide
uuccagcccac

SEQ ID NO: 71014 - RNA, 12 nt, Artificial Sequence
  Description of Artificial Sequence: Synthetic oligonucleotide
cagcugagaaug

SEQ ID NO: 71015 - RNA, 13 nt, Artificial Sequence
  Description of Artificial Sequence: Synthetic oligonucleotide
aacguaucuccua

SEQ ID NO: 71016 - RNA, 14 nt, Artificial Sequence
  Description of Artificial Sequence: Synthetic oligonucleotide
ccuaaaauaauuuc

SEQ ID NO: 71017 - RNA, 13 nt, Artificial Sequence
  Description of Artificial Sequence: Synthetic oligonucleotide
uggaagauucagc

SEQ ID NO: 71018 - RNA, 12 nt, Artificial Sequence
  Description of Artificial Sequence: Synthetic oligonucleotide
uuaaacucuccu

SEQ ID NO: 71019 - RNA, 12 nt, Artificial Sequence
  Description of Artificial Sequence: Synthetic oligonucleotide
cagccuacaguu

SEQ ID NO: 71020 - RNA, 13 nt, Artificial Sequence
  Description of Artificial Sequence: Synthetic oligonucleotide
guuauguucaguc

SEQ ID NO: 71021 - RNA, 13 nt, Artificial Sequence
  Description of Artificial Sequence: Synthetic oligonucleotide
cacauacaaaaug

SEQ ID NO: 71022 - RNA, 9 nt, Artificial Sequence
  Description of Artificial Sequence: Synthetic oligonucleotide
uccuuuugc

SEQ ID NO: 71023 - RNA, 12 nt, Artificial Sequence
  Description of Artificial Sequence: Synthetic oligonucleotide
ugaccugugaag

SEQ ID NO: 71024 - RNA, 12 nt, Artificial Sequence
  Description of Artificial Sequence: Synthetic oligonucleotide
cuaucucacaca

SEQ ID NO: 71025 - RNA, 13 nt, Artificial Sequence
  Description of Artificial Sequence: Synthetic oligonucleotide
uguccucaauugu

SEQ ID NO: 71026 - RNA, 12 nt, Artificial Sequence
  Description of Artificial Sequence: Synthetic oligonucleotide
aaaccguagcug

SEQ ID NO: 71027 - RNA, 12 nt, Artificial Sequence
  Description of Artificial Sequence: Synthetic oligonucleotide
uagcuggcaagc

SEQ ID NO: 71028 - RNA, 14 nt, Artificial Sequence
  Description of Artificial Sequence: Synthetic oligonucleotide
uuguaugguuaaaa

SEQ ID NO: 71029 - RNA, 14 nt, Artificial Sequence
  Description of Artificial Sequence: Synthetic oligonucleotide
ugguuaaaagaugg

SEQ ID NO: 71030 - RNA, 13 nt, Artificial Sequence
  Description of Artificial Sequence: Synthetic oligonucleotide
cagggaauuauac

SEQ ID NO: 71031 - RNA, 12 nt, Artificial Sequence
  Description of Artificial Sequence: Synthetic oligonucleotide
acaaucuugcug

SEQ ID NO: 71032 - RNA, 13 nt, Artificial Sequence
  Description of Artificial Sequence: Synthetic oligonucleotide
ccaauaaugaaga

SEQ ID NO: 71033 - RNA, 13 nt, Artificial Sequence
  Description of Artificial Sequence: Synthetic oligonucleotide
acuuuggauguuc

SEQ ID NO: 71034 - RNA, 12 nt, Artificial Sequence
  Description of Artificial Sequence: Synthetic oligonucleotide
aaugcuuccacu

SEQ ID NO: 71035 - RNA, 11 nt, Artificial Sequence
  Description of Artificial Sequence: Synthetic oligonucleotide
gagaaaguuug

SEQ ID NO: 71036 - RNA, 11 nt, Artificial Sequence
  Description of Artificial Sequence: Synthetic oligonucleotide
aaagaacuacu

SEQ ID NO: 71037 - RNA, 12 nt, Artificial Sequence
  Description of Artificial Sequence: Synthetic oligonucleotide
uuagaaauacgg

SEQ ID NO: 71038 - RNA, 12 nt, Artificial Sequence
  Description of Artificial Sequence: Synthetic oligonucleotide
aacauggguaca

SEQ ID NO: 71039 - RNA, 14 nt, Artificial Sequence
  Description of Artificial Sequence: Synthetic oligonucleotide
aaagacacagaaga

SEQ ID NO: 71040 - RNA, 11 nt, Artificial Sequence
  Description of Artificial Sequence: Synthetic oligonucleotide
uaguagggagg

SEQ ID NO: 71041 - RNA, 12 nt, Artificial Sequence
  Description of Artificial Sequence: Synthetic oligonucleotide
gccuucugcagc

SEQ ID NO: 71042 - RNA, 10 nt, Artificial Sequence
  Description of Artificial Sequence: Synthetic oligonucleotide
ggucugguac

SEQ ID NO: 71043 - RNA, 12 nt, Artificial Sequence
  Description of Artificial Sequence: Synthetic oligonucleotide
cuaguccuuccg

SEQ ID NO: 71044 - RNA, 12 nt, Artificial Sequence
  Description of Artificial Sequence: Synthetic oligonucleotide
ccagugaauauu

SEQ ID NO: 71045 - RNA, 13 nt, Artificial Sequence
  Description of Artificial Sequence: Synthetic oligonucleotide
augaauucaaguu

SEQ ID NO: 71046 - RNA, 12 nt, Artificial Sequence
  Description of Artificial Sequence: Synthetic oligonucleotide
caggacacagau

SEQ ID NO: 71047 - RNA, 12 nt, Artificial Sequence
  Description of Artificial Sequence: Synthetic oligonucleotide
cucaaagcacag

SEQ ID NO: 71048 - RNA, 10 nt, Artificial Sequence
  Description of Artificial Sequence: Synthetic oligonucleotide
accacugcca

SEQ ID NO: 71049 - RNA, 13 nt, Artificial Sequence
  Description of Artificial Sequence: Synthetic oligonucleotide
gaaacuacuagug

SEQ ID NO: 71050 - RNA, 12 nt, Artificial Sequence
  Description of Artificial Sequence: Synthetic oligonucleotide
aagucggacagc

SEQ ID NO: 71051 - RNA, 13 nt, Artificial Sequence
  Description of Artificial Sequence: Synthetic oligonucleotide
gaaagcgaaaaau

SEQ ID NO: 71052 - RNA, 13 nt, Artificial Sequence
  Description of Artificial Sequence: Synthetic oligonucleotide
cccucugauuuag

SEQ ID NO: 71053 - RNA, 12 nt, Artificial Sequence
  Description of Artificial Sequence: Synthetic oligonucleotide
ugagcuauuuaa

SEQ ID NO: 71054 - RNA, 13 nt, Artificial Sequence
  Description of Artificial Sequence: Synthetic oligonucleotide
aaaaggugaaaaa

SEQ ID NO: 71055 - RNA, 14 nt, Artificial Sequence
  Description of Artificial Sequence: Synthetic oligonucleotide
gaaaaagcacuauu

SEQ ID NO: 71056 - RNA, 12 nt, Artificial Sequence
  Description of Artificial Sequence: Synthetic oligonucleotide
ggcugaaaagaa

SEQ ID NO: 71057 - RNA, 12 nt, Artificial Sequence
  Description of Artificial Sequence: Synthetic oligonucleotide
uaaacccuuaua

SEQ ID NO: 71058 - RNA, 13 nt, Artificial Sequence
  Description of Artificial Sequence: Synthetic oligonucleotide
cauacuauuagcc

SEQ ID NO: 71059 - RNA, 12 nt, Artificial Sequence
  Description of Artificial Sequence: Synthetic oligonucleotide
gacagaagcauu

SEQ ID NO: 71060 - RNA, 14 nt, Artificial Sequence
  Description of Artificial Sequence: Synthetic oligonucleotide
agagcaaauaagau

SEQ ID NO: 71061 - RNA, 14 nt, Artificial Sequence
  Description of Artificial Sequence: Synthetic oligonucleotide
ccaacauuuuucuc

SEQ ID NO: 71062 - RNA, 15 nt, Artificial Sequence
  Description of Artificial Sequence: Synthetic oligonucleotide
uuaaguaugagaaaa

SEQ ID NO: 71063 - RNA, 14 nt, Artificial Sequence
  Description of Artificial Sequence: Synthetic oligonucleotide
caggaauaaagaug

SEQ ID NO: 71064 - RNA, 13 nt, Artificial Sequence
  Description of Artificial Sequence: Synthetic oligonucleotide
aauuugaaugacc

SEQ ID NO: 71065 - RNA, 14 nt, Artificial Sequence
  Description of Artificial Sequence: Synthetic oligonucleotide
auguauaaagauag

SEQ ID NO: 71066 - RNA, 12 nt, Artificial Sequence
  Description of Artificial Sequence: Synthetic oligonucleotide
ggcuguaacuau

SEQ ID NO: 71067 - RNA, 11 nt, Artificial Sequence
  Description of Artificial Sequence: Synthetic oligonucleotide
ucugugaagug

SEQ ID NO: 71068 - RNA, 14 nt, Artificial Sequence
  Description of Artificial Sequence: Synthetic oligonucleotide
ccuuuaaggaaaug

SEQ ID NO: 71069 - RNA, 13 nt, Artificial Sequence
  Description of Artificial Sequence: Synthetic oligonucleotide
aaggauacaaaaa

SEQ ID NO: 71070 - RNA, 12 nt, Artificial Sequence
  Description of Artificial Sequence: Synthetic oligonucleotide
agaugcaauuug

SEQ ID NO: 71071 - RNA, 12 nt, Artificial Sequence
  Description of Artificial Sequence: Synthetic oligonucleotide
guucaaaacgaa

SEQ ID NO: 71072 - RNA, 11 nt, Artificial Sequence
  Description of Artificial Sequence: Synthetic oligonucleotide
gugaaaccuca

SEQ ID NO: 71073 - RNA, 13 nt, Artificial Sequence
  Description of Artificial Sequence: Synthetic oligonucleotide
acgaaagagaagc

SEQ ID NO: 71074 - RNA, 12 nt, Artificial Sequence
  Description of Artificial Sequence: Synthetic oligonucleotide
cuccacaagcgc

SEQ ID NO: 71075 - RNA, 14 nt, Artificial Sequence
  Description of Artificial Sequence: Synthetic oligonucleotide
gagaagauuccaaa

SEQ ID NO: 71076 - RNA, 13 nt, Artificial Sequence
  Description of Artificial Sequence: Synthetic oligonucleotide
aaucuggauucaa

SEQ ID NO: 71077 - RNA, 13 nt, Artificial Sequence
  Description of Artificial Sequence: Synthetic oligonucleotide
agaacagauuuga

SEQ ID NO: 71078 - RNA, 11 nt, Artificial Sequence
  Description of Artificial Sequence: Synthetic oligonucleotide
ccagagcugug

SEQ ID NO: 71079 - RNA, 12 nt, Artificial Sequence
  Description of Artificial Sequence: Synthetic oligonucleotide
ccucagauuguu

SEQ ID NO: 71080 - RNA, 12 nt, Artificial Sequence
  Description of Artificial Sequence: Synthetic oligonucleotide
cuauuuuaauua

SEQ ID NO: 71081 - RNA, 13 nt, Artificial Sequence
  Description of Artificial Sequence: Synthetic oligonucleotide
uuuaauuuauuaa

SEQ ID NO: 71082 - RNA, 12 nt, Artificial Sequence
  Description of Artificial Sequence: Synthetic oligonucleotide
augcaguuugaa

SEQ ID NO: 71083 - RNA, 11 nt, Artificial Sequence
  Description of Artificial Sequence: Synthetic oligonucleotide
caugcugcugg

SEQ ID NO: 71084 - RNA, 13 nt, Artificial Sequence
  Description of Artificial Sequence: Synthetic oligonucleotide
agaugugcauuuc

SEQ ID NO: 71085 - RNA, 12 nt, Artificial Sequence
  Description of Artificial Sequence: Synthetic oligonucleotide
ucaaaaccugug

SEQ ID NO: 71086 - RNA, 11 nt, Artificial Sequence
  Description of Artificial Sequence: Synthetic oligonucleotide
gaaugugggua

SEQ ID NO: 71087 - RNA, 10 nt, Artificial Sequence
  Description of Artificial Sequence: Synthetic oligonucleotide
auguggguag

SEQ ID NO: 71088 - RNA, 13 nt, Artificial Sequence
  Description of Artificial Sequence: Synthetic oligonucleotide
ugaaaaugagcau

SEQ ID NO: 71089 - RNA, 13 nt, Artificial Sequence
  Description of Artificial Sequence: Synthetic oligonucleotide
uugcuuuucaugu

SEQ ID NO: 71090 - RNA, 12 nt, Artificial Sequence
  Description of Artificial Sequence: Synthetic oligonucleotide
uguauuucuaua

SEQ ID NO: 71091 - RNA, 13 nt, Artificial Sequence
  Description of Artificial Sequence: Synthetic oligonucleotide
uuugauuaauguu

SEQ ID NO: 71092 - RNA, 12 nt, Artificial Sequence
  Description of Artificial Sequence: Synthetic oligonucleotide
caacguguauag

SEQ ID NO: 71093 - RNA, 12 nt, Artificial Sequence
  Description of Artificial Sequence: Synthetic oligonucleotide
cauauccuuggc

SEQ ID NO: 71094 - RNA, 13 nt, Artificial Sequence
  Description of Artificial Sequence: Synthetic oligonucleotide
uacuaacaucugg

SEQ ID NO: 71095 - RNA, 11 nt, Artificial Sequence
  Description of Artificial Sequence: Synthetic oligonucleotide
cauaaguugug

SEQ ID NO: 71096 - RNA, 12 nt, Artificial Sequence
  Description of Artificial Sequence: Synthetic oligonucleotide
gcaucauuuugg

SEQ ID NO: 71097 - RNA, 10 nt, Artificial Sequence
  Description of Artificial Sequence: Synthetic oligonucleotide
gcucuucuua

SEQ ID NO: 71098 - RNA, 10 nt, Artificial Sequence
  Description of Artificial Sequence: Synthetic oligonucleotide
agauuagguc

SEQ ID NO: 71099 - RNA, 12 nt, Artificial Sequence
  Description of Artificial Sequence: Synthetic oligonucleotide
auggaauugaaa

SEQ ID NO: 71100 - RNA, 13 nt, Artificial Sequence
  Description of Artificial Sequence: Synthetic oligonucleotide
cacacucauuccu

SEQ ID NO: 71101 - RNA, 12 nt, Artificial Sequence
  Description of Artificial Sequence: Synthetic oligonucleotide
uguagagguaac

SEQ ID NO: 71102 - RNA, 11 nt, Artificial Sequence
  Description of Artificial Sequence: Synthetic oligonucleotide
caaccacaugc

SEQ ID NO: 71103 - RNA, 12 nt, Artificial Sequence
  Description of Artificial Sequence: Synthetic oligonucleotide
ucggaaacaagu

SEQ ID NO: 71104 - RNA, 11 nt, Artificial Sequence
  Description of Artificial Sequence: Synthetic oligonucleotide
acucccaauaa

SEQ ID NO: 71105 - RNA, 13 nt, Artificial Sequence
  Description of Artificial Sequence: Synthetic oligonucleotide
aaugcuaagaaau

SEQ ID NO: 71106 - RNA, 11 nt, Artificial Sequence
  Description of Artificial Sequence: Synthetic oligonucleotide
gucuuucucua

SEQ ID NO: 71107 - RNA, 11 nt, Artificial Sequence
  Description of Artificial Sequence: Synthetic oligonucleotide
ugaauuucagg

SEQ ID NO: 71108 - RNA, 13 nt, Artificial Sequence
  Description of Artificial Sequence: Synthetic oligonucleotide
cgauucccucuca

SEQ ID NO: 71109 - RNA, 11 nt, Artificial Sequence
  Description of Artificial Sequence: Synthetic oligonucleotide
aggaaagugaa

SEQ ID NO: 71110 - RNA, 12 nt, Artificial Sequence
  Description of Artificial Sequence: Synthetic oligonucleotide
gaggcugcaugc

SEQ ID NO: 71111 - RNA, 11 nt, Artificial Sequence
  Description of Artificial Sequence: Synthetic oligonucleotide
ucucugaacag

SEQ ID NO: 71112 - RNA, 12 nt, Artificial Sequence
  Description of Artificial Sequence: Synthetic oligonucleotide
aacuuggcugua

SEQ ID NO: 71113 - RNA, 12 nt, Artificial Sequence
  Description of Artificial Sequence: Synthetic oligonucleotide
agaagccaaaau

SEQ ID NO: 71114 - RNA, 14 nt, Artificial Sequence
  Description of Artificial Sequence: Synthetic oligonucleotide
auuaaaagaagucc

SEQ ID NO: 71115 - RNA, 14 nt, Artificial Sequence
  Description of Artificial Sequence: Synthetic oligonucleotide
gaauccggauuauc

SEQ ID NO: 71116 - RNA, 12 nt, Artificial Sequence
  Description of Artificial Sequence: Synthetic oligonucleotide
aaugugacauca

SEQ ID NO: 71117 - RNA, 13 nt, Artificial Sequence
  Description of Artificial Sequence: Synthetic oligonucleotide
caucaaagcaagu

SEQ ID NO: 71118 - RNA, 11 nt, Artificial Sequence
  Description of Artificial Sequence: Synthetic oligonucleotide
agagagagaaa

SEQ ID NO: 71119 - RNA, 13 nt, Artificial Sequence
  Description of Artificial Sequence: Synthetic oligonucleotide
ucgcuguaguauu

SEQ ID NO: 71120 - RNA, 14 nt, Artificial Sequence
  Description of Artificial Sequence: Synthetic oligonucleotide
cgcuguaguauuua

SEQ ID NO: 71121 - RNA, 13 nt, Artificial Sequence
  Description of Artificial Sequence: Synthetic oligonucleotide
auuuaagcccaua

SEQ ID NO: 71122 - RNA, 15 nt, Artificial Sequence
  Description of Artificial Sequence: Synthetic oligonucleotide
auuaaaauaaacaug

SEQ ID NO: 71123 - RNA, 12 nt, Artificial Sequence
  Description of Artificial Sequence: Synthetic oligonucleotide
cuguucugaucg

SEQ ID NO: 71124 - RNA, 16 nt, Artificial Sequence
  Description of Artificial Sequence: Synthetic oligonucleotide
aaauaauuugaacuuu

SEQ ID NO: 71125 - RNA, 12 nt, Artificial Sequence
  Description of Artificial Sequence: Synthetic oligonucleotide
ugcgaccuuaau

SEQ ID NO: 71126 - RNA, 11 nt, Artificial Sequence
  Description of Artificial Sequence: Synthetic oligonucleotide
cugagaaagcu

SEQ ID NO: 71127 - RNA, 13 nt, Artificial Sequence
  Description of Artificial Sequence: Synthetic oligonucleotide
aguaaagaugcua

SEQ ID NO: 71128 - RNA, 12 nt, Artificial Sequence
  Description of Artificial Sequence: Synthetic oligonucleotide
cugcuuaauugc

SEQ ID NO: 71129 - RNA, 14 nt, Artificial Sequence
  Description of Artificial Sequence: Synthetic oligonucleotide
uaccauaugaauga

SEQ ID NO: 71130 - RNA, 12 nt, Artificial Sequence
  Description of Artificial Sequence: Synthetic oligonucleotide
aacuuucuuauc

SEQ ID NO: 71131 - RNA, 13 nt, Artificial Sequence
  Description of Artificial Sequence: Synthetic oligonucleotide
ccuugcaugacau

SEQ ID NO: 71132 - RNA, 14 nt, Artificial Sequence
  Description of Artificial Sequence: Synthetic oligonucleotide
ugaauuuguauaug

SEQ ID NO: 71133 - RNA, 12 nt, Artificial Sequence
  Description of Artificial Sequence: Synthetic oligonucleotide
gaauccuaguag

SEQ ID NO: 71134 - RNA, 10 nt, Artificial Sequence
  Description of Artificial Sequence: Synthetic oligonucleotide
gaaagggaag

SEQ ID NO: 71135 - RNA, 11 nt, Artificial Sequence
  Description of Artificial Sequence: Synthetic oligonucleotide
uaucggcaugc

SEQ ID NO: 71136 - RNA, 12 nt, Artificial Sequence
  Description of Artificial Sequence: Synthetic oligonucleotide
caccucauagua

SEQ ID NO: 71137 - RNA, 11 nt, Artificial Sequence
  Description of Artificial Sequence: Synthetic oligonucleotide
ccagaauugcc

SEQ ID NO: 71138 - RNA, 11 nt, Artificial Sequence
  Description of Artificial Sequence: Synthetic oligonucleotide
uggugaucugg

SEQ ID NO: 71139 - RNA, 12 nt, Artificial Sequence
  Description of Artificial Sequence: Synthetic oligonucleotide
gaucuggguaau

SEQ ID NO: 71140 - RNA, 12 nt, Artificial Sequence
  Description of Artificial Sequence: Synthetic oligonucleotide
ggaugugaugaa

SEQ ID NO: 71141 - RNA, 12 nt, Artificial Sequence
  Description of Artificial Sequence: Synthetic oligonucleotide
cauuuccacagc

SEQ ID NO: 71142 - RNA, 11 nt, Artificial Sequence
  Description of Artificial Sequence: Synthetic oligonucleotide
acagcuacacc

SEQ ID NO: 71143 - RNA, 12 nt, Artificial Sequence
  Description of Artificial Sequence: Synthetic oligonucleotide
ugcaguucuuac

SEQ ID NO: 71144 - RNA, 12 nt, Artificial Sequence
  Description of Artificial Sequence: Synthetic oligonucleotide
acgagaagaaga

SEQ ID NO: 71145 - RNA, 12 nt, Artificial Sequence
  Description of Artificial Sequence: Synthetic oligonucleotide
cgagaagaagau

SEQ ID NO: 71146 - RNA, 15 nt, Artificial Sequence
  Description of Artificial Sequence: Synthetic oligonucleotide
aagaagaucauuuac

SEQ ID NO: 71147 - RNA, 11 nt, Artificial Sequence
  Description of Artificial Sequence: Synthetic oligonucleotide
agaggaagagg

SEQ ID NO: 71148 - RNA, 12 nt, Artificial Sequence
  Description of Artificial Sequence: Synthetic oligonucleotide
gaggaagaggug

SEQ ID NO: 71149 - RNA, 13 nt, Artificial Sequence
  Description of Artificial Sequence: Synthetic oligonucleotide
cuacuuugagggc

SEQ ID NO: 71150 - RNA, 12 nt, Artificial Sequence
  Description of Artificial Sequence: Synthetic oligonucleotide
agggcaucuccu

SEQ ID NO: 71151 - RNA, 10 nt, Artificial Sequence
  Description of Artificial Sequence: Synthetic oligonucleotide
ggagugauau

SEQ ID NO: 71152 - RNA, 11 nt, Artificial Sequence
  Description of Artificial Sequence: Synthetic oligonucleotide
gagugauaugg

SEQ ID NO: 71153 - RNA, 12 nt, Artificial Sequence
  Description of Artificial Sequence: Synthetic oligonucleotide
ugcaguaaagau

SEQ ID NO: 71154 - RNA, 13 nt, Artificial Sequence
  Description of Artificial Sequence: Synthetic oligonucleotide
aguaaagauccua

SEQ ID NO: 71155 - RNA, 12 nt, Artificial Sequence
  Description of Artificial Sequence: Synthetic oligonucleotide
ugacaaaggaca

SEQ ID NO: 71156 - RNA, 13 nt, Artificial Sequence
  Description of Artificial Sequence: Synthetic oligonucleotide
gcaauugugaccc

SEQ ID NO: 71157 - RNA, 12 nt, Artificial Sequence
  Description of Artificial Sequence: Synthetic oligonucleotide
aacaucauccau

SEQ ID NO: 71158 - RNA, 12 nt, Artificial Sequence
  Description of Artificial Sequence: Synthetic oligonucleotide
ugaaauccaaca

SEQ ID NO: 71159 - RNA, 15 nt, Artificial Sequence
  Description of Artificial Sequence: Synthetic oligonucleotide
aacaauauauuucuc

SEQ ID NO: 71160 - RNA, 14 nt, Artificial Sequence
  Description of Artificial Sequence: Synthetic oligonucleotide
aacaguaaagucac

SEQ ID NO: 71161 - RNA, 14 nt, Artificial Sequence
  Description of Artificial Sequence: Synthetic oligonucleotide
ugugaagaaaguaa

SEQ ID NO: 71162 - RNA, 13 nt, Artificial Sequence
  Description of Artificial Sequence: Synthetic oligonucleotide
cuuccgagccauc

SEQ ID NO: 71163 - RNA, 12 nt, Artificial Sequence
  Description of Artificial Sequence: Synthetic oligonucleotide
aauggagguuga

SEQ ID NO: 71164 - RNA, 12 nt, Artificial Sequence
  Description of Artificial Sequence: Synthetic oligonucleotide
ggagguugaaua

SEQ ID NO: 71165 - RNA, 13 nt, Artificial Sequence
  Description of Artificial Sequence: Synthetic oligonucleotide
auuuugaguuuuc

SEQ ID NO: 71166 - RNA, 12 nt, Artificial Sequence
  Description of Artificial Sequence: Synthetic oligonucleotide
uauccuguuugu

SEQ ID NO: 71167 - RNA, 11 nt, Artificial Sequence
  Description of Artificial Sequence: Synthetic oligonucleotide
ccuguuuguuc

SEQ ID NO: 71168 - RNA, 10 nt, Artificial Sequence
  Description of Artificial Sequence: Synthetic oligonucleotide
cucuacagcc

SEQ ID NO: 71169 - RNA, 12 nt, Artificial Sequence
  Description of Artificial Sequence: Synthetic oligonucleotide
ucuuccauagcu

SEQ ID NO: 71170 - RNA, 12 nt, Artificial Sequence
  Description of Artificial Sequence: Synthetic oligonucleotide
auaaucuuccug

SEQ ID NO: 71171 - RNA, 12 nt, Artificial Sequence
  Description of Artificial Sequence: Synthetic oligonucleotide
uaaucuuccugu

SEQ ID NO: 71172 - RNA, 12 nt, Artificial Sequence
  Description of Artificial Sequence: Synthetic oligonucleotide
cuucaugacuug

SEQ ID NO: 71173 - RNA, 12 nt, Artificial Sequence
  Description of Artificial Sequence: Synthetic oligonucleotide
aagagggagaga

SEQ ID NO: 71174 - RNA, 12 nt, Artificial Sequence
  Description of Artificial Sequence: Synthetic oligonucleotide
cgucuccuacca

SEQ ID NO: 71175 - RNA, 12 nt, Artificial Sequence
  Description of Artificial Sequence: Synthetic oligonucleotide
gaucaaucggcc

SEQ ID NO: 71176 - RNA, 12 nt, Artificial Sequence
  Description of Artificial Sequence: Synthetic oligonucleotide
ggacgaacaucc

SEQ ID NO: 71177 - RNA, 11 nt, Artificial Sequence
  Description of Artificial Sequence: Synthetic oligonucleotide
agggucggaac

SEQ ID NO: 71178 - RNA, 10 nt, Artificial Sequence
  Description of Artificial Sequence: Synthetic oligonucleotide
ucggaaccca

SEQ ID NO: 71179 - RNA, 11 nt, Artificial Sequence
  Description of Artificial Sequence: Synthetic oligonucleotide
acccaagcuua

SEQ ID NO: 71180 - RNA, 14 nt, Artificial Sequence
  Description of Artificial Sequence: Synthetic oligonucleotide
gaacuuuaagcaac

SEQ ID NO: 71181 - RNA, 11 nt, Artificial Sequence
  Description of Artificial Sequence: Synthetic oligonucleotide
acuauucagug

SEQ ID NO: 71182 - RNA, 11 nt, Artificial Sequence
  Description of Artificial Sequence: Synthetic oligonucleotide
cuauucagugg

SEQ ID NO: 71183 - RNA, 13 nt, Artificial Sequence
  Description of Artificial Sequence: Synthetic oligonucleotide
aaacacagauaac

SEQ ID NO: 71184 - RNA, 12 nt, Artificial Sequence
  Description of Artificial Sequence: Synthetic oligonucleotide
cuuaagaaaaga

SEQ ID NO: 71185 - RNA, 12 nt, Artificial Sequence
  Description of Artificial Sequence: Synthetic oligonucleotide
cugaaggagugu

SEQ ID NO: 71186 - RNA, 10 nt, Artificial Sequence
  Description of Artificial Sequence: Synthetic oligonucleotide
ucaccgcggg

SEQ ID NO: 71187 - RNA, 14 nt, Artificial Sequence
  Description of Artificial Sequence: Synthetic oligonucleotide
agcagaaauaagcg

SEQ ID NO: 71188 - RNA, 12 nt, Artificial Sequence
  Description of Artificial Sequence: Synthetic oligonucleotide
aagcgugccguu

SEQ ID NO: 71189 - RNA, 12 nt, Artificial Sequence
  Description of Artificial Sequence: Synthetic oligonucleotide
agaaacagucac

SEQ ID NO: 71190 - RNA, 12 nt, Artificial Sequence
  Description of Artificial Sequence: Synthetic oligonucleotide
agaggaagaagg

SEQ ID NO: 71191 - RNA, 14 nt, Artificial Sequence
  Description of Artificial Sequence: Synthetic oligonucleotide
uguauucaaaauau

SEQ ID NO: 71192 - RNA, 13 nt, Artificial Sequence
  Description of Artificial Sequence: Synthetic oligonucleotide
auuuuccucccuu

SEQ ID NO: 71193 - RNA, 13 nt, Artificial Sequence
  Description of Artificial Sequence: Synthetic oligonucleotide
caaagaaagauag

SEQ ID NO: 71194 - RNA, 12 nt, Artificial Sequence
  Description of Artificial Sequence: Synthetic oligonucleotide
aagaaagauaga

SEQ ID NO: 71195 - RNA, 13 nt, Artificial Sequence
  Description of Artificial Sequence: Synthetic oligonucleotide
gaaagcauuuguu

SEQ ID NO: 71196 - RNA, 13 nt, Artificial Sequence
  Description of Artificial Sequence: Synthetic oligonucleotide
ugaguuaaacgaa

SEQ ID NO: 71197 - RNA, 12 nt, Artificial Sequence
  Description of Artificial Sequence: Synthetic oligonucleotide
acugauacagaa

SEQ ID NO: 71198 - RNA, 12 nt, Artificial Sequence
  Description of Artificial Sequence: Synthetic oligonucleotide
auauuauauaua

SEQ ID NO: 71199 - RNA, 12 nt, Artificial Sequence
  Description of Artificial Sequence: Synthetic oligonucleotide
auuauauauaua

SEQ ID NO: 71200 - RNA, 12 nt, Artificial Sequence
  Description of Artificial Sequence: Synthetic oligonucleotide
ucacuggaugua

SEQ ID NO: 71201 - RNA, 12 nt, Artificial Sequence
  Description of Artificial Sequence: Synthetic oligonucleotide
cagggaagagga

SEQ ID NO: 71202 - RNA, 15 nt, Artificial Sequence
  Description of Artificial Sequence: Synthetic oligonucleotide
augaucuuuuuuuug

SEQ ID NO: 71203 - RNA, 11 nt, Artificial Sequence
  Description of Artificial Sequence: Synthetic oligonucleotide
aguucacggcc

SEQ ID NO: 71204 - RNA, 13 nt, Artificial Sequence
  Description of Artificial Sequence: Synthetic oligonucleotide
caccaucacacca

SEQ ID NO: 71205 - RNA, 11 nt, Artificial Sequence
  Description of Artificial Sequence: Synthetic oligonucleotide
ccugcggguuu

SEQ ID NO: 71206 - RNA, 10 nt, Artificial Sequence
  Description of Artificial Sequence: Synthetic oligonucleotide
auccaguuug

SEQ ID NO: 71207 - RNA, 13 nt, Artificial Sequence
  Description of Artificial Sequence: Synthetic oligonucleotide
guuaaggacuucu

SEQ ID NO: 71208 - RNA, 13 nt, Artificial Sequence
  Description of Artificial Sequence: Synthetic oligonucleotide
cagugggacagag

SEQ ID NO: 71209 - RNA, 14 nt, Artificial Sequence
  Description of Artificial Sequence: Synthetic oligonucleotide
aauuuguuauugug

SEQ ID NO: 71210 - RNA, 13 nt, Artificial Sequence
  Description of Artificial Sequence: Synthetic oligonucleotide
uucaaaugcauuu

SEQ ID NO: 71211 - RNA, 10 nt, Artificial Sequence
  Description of Artificial Sequence: Synthetic oligonucleotide
caggaaagcc

SEQ ID NO: 71212 - RNA, 11 nt, Artificial Sequence
  Description of Artificial Sequence: Synthetic oligonucleotide
aggaaagcccu

SEQ ID NO: 71213 - RNA, 12 nt, Artificial Sequence
  Description of Artificial Sequence: Synthetic oligonucleotide
cccagcauggcc

SEQ ID NO: 71214 - RNA, 11 nt, Artificial Sequence
  Description of Artificial Sequence: Synthetic oligonucleotide
cuucucccuga

SEQ ID NO: 71215 - RNA, 12 nt, Artificial Sequence
  Description of Artificial Sequence: Synthetic oligonucleotide
gaagaagcccuu

SEQ ID NO: 71216 - RNA, 12 nt, Artificial Sequence
  Description of Artificial Sequence: Synthetic oligonucleotide
agaagcccuuca

SEQ ID NO: 71217 - RNA, 11 nt, Artificial Sequence
  Description of Artificial Sequence: Synthetic oligonucleotide
gcccuucagcg

SEQ ID NO: 71218 - RNA, 11 nt, Artificial Sequence
  Description of Artificial Sequence: Synthetic oligonucleotide
ccuucagcggc

SEQ ID NO: 71219 - RNA, 12 nt, Artificial Sequence
  Description of Artificial Sequence: Synthetic oligonucleotide
ucagcggccagu

SEQ ID NO: 71220 - RNA, 12 nt, Artificial Sequence
  Description of Artificial Sequence: Synthetic oligonucleotide
ugaaaagcuccg

SEQ ID NO: 71221 - RNA, 11 nt, Artificial Sequence
  Description of Artificial Sequence: Synthetic oligonucleotide
aaaagcuccgg

SEQ ID NO: 71222 - RNA, 13 nt, Artificial Sequence
  Description of Artificial Sequence: Synthetic oligonucleotide
agucaacagucug

SEQ ID NO: 71223 - RNA, 13 nt, Artificial Sequence
  Description of Artificial Sequence: Synthetic oligonucleotide
cagaguucaaaag

SEQ ID NO: 71224 - RNA, 13 nt, Artificial Sequence
  Description of Artificial Sequence: Synthetic oligonucleotide
agaguucaaaagc

SEQ ID NO: 71225 - RNA, 12 nt, Artificial Sequence
  Description of Artificial Sequence: Synthetic oligonucleotide
uucaaaagcccu

SEQ ID NO: 71226 - RNA, 12 nt, Artificial Sequence
  Description of Artificial Sequence: Synthetic oligonucleotide
ucaaaagcccuu

SEQ ID NO: 71227 - RNA, 12 nt, Artificial Sequence
  Description of Artificial Sequence: Synthetic oligonucleotide
aaaagcccuuca

SEQ ID NO: 71228 - RNA, 12 nt, Artificial Sequence
  Description of Artificial Sequence: Synthetic oligonucleotide
aaagcccuucag

SEQ ID NO: 71229 - RNA, 13 nt, Artificial Sequence
  Description of Artificial Sequence: Synthetic oligonucleotide
gugaagccgcucg

SEQ ID NO: 71230 - RNA, 12 nt, Artificial Sequence
  Description of Artificial Sequence: Synthetic oligonucleotide
cacgccagucaa

SEQ ID NO: 71231 - RNA, 13 nt, Artificial Sequence
  Description of Artificial Sequence: Synthetic oligonucleotide
uucuuggugcgug

SEQ ID NO: 71232 - RNA, 14 nt, Artificial Sequence
  Description of Artificial Sequence: Synthetic oligonucleotide
auuggauucaucag

SEQ ID NO: 71233 - RNA, 13 nt, Artificial Sequence
  Description of Artificial Sequence: Synthetic oligonucleotide
uggaauaccuaag

SEQ ID NO: 71234 - RNA, 12 nt, Artificial Sequence
  Description of Artificial Sequence: Synthetic oligonucleotide
auuugaggcuca

SEQ ID NO: 71235 - RNA, 11 nt, Artificial Sequence
  Description of Artificial Sequence: Synthetic oligonucleotide
ucuacaauugg

SEQ ID NO: 71236 - RNA, 12 nt, Artificial Sequence
  Description of Artificial Sequence: Synthetic oligonucleotide
uaguuaggagcc

SEQ ID NO: 71237 - RNA, 13 nt, Artificial Sequence
  Description of Artificial Sequence: Synthetic oligonucleotide
agucaauauccac

SEQ ID NO: 71238 - RNA, 13 nt, Artificial Sequence
  Description of Artificial Sequence: Synthetic oligonucleotide
auguucagucaca

SEQ ID NO: 71239 - RNA, 12 nt, Artificial Sequence
  Description of Artificial Sequence: Synthetic oligonucleotide
acacacacauac

SEQ ID NO: 71240 - RNA, 12 nt, Artificial Sequence
  Description of Artificial Sequence: Synthetic oligonucleotide
uuccuuuugcuu

SEQ ID NO: 71241 - RNA, 16 nt, Artificial Sequence
  Description of Artificial Sequence: Synthetic oligonucleotide
uuuuaaaguaauuuuu

SEQ ID NO: 71242 - RNA, 13 nt, Artificial Sequence
  Description of Artificial Sequence: Synthetic oligonucleotide
caacagucaaugg

SEQ ID NO: 71243 - RNA, 13 nt, Artificial Sequence
  Description of Artificial Sequence: Synthetic oligonucleotide
ucgacaaaccaau

SEQ ID NO: 71244 - RNA, 12 nt, Artificial Sequence
  Description of Artificial Sequence: Synthetic oligonucleotide
acugcuaccacu

SEQ ID NO: 71245 - RNA, 13 nt, Artificial Sequence
  Description of Artificial Sequence: Synthetic oligonucleotide
gcaagcggucuua

SEQ ID NO: 71246 - RNA, 13 nt, Artificial Sequence
  Description of Artificial Sequence: Synthetic oligonucleotide
ggucuuaccggcu

SEQ ID NO: 71247 - RNA, 11 nt, Artificial Sequence
  Description of Artificial Sequence: Synthetic oligonucleotide
gauggguuacc

SEQ ID NO: 71248 - RNA, 11 nt, Artificial Sequence
  Description of Artificial Sequence: Synthetic oligonucleotide
guuaccugcga

SEQ ID NO: 71249 - RNA, 12 nt, Artificial Sequence
  Description of Artificial Sequence: Synthetic oligonucleotide
aaucuugcugag

SEQ ID NO: 71250 - RNA, 13 nt, Artificial Sequence
  Description of Artificial Sequence: Synthetic oligonucleotide
agcauaaaacagu

SEQ ID NO: 71251 - RNA, 12 nt, Artificial Sequence
  Description of Artificial Sequence: Synthetic oligonucleotide
guccuuuauccu

SEQ ID NO: 71252 - RNA, 12 nt, Artificial Sequence
  Description of Artificial Sequence: Synthetic oligonucleotide
caacgcaaguug

SEQ ID NO: 71253 - RNA, 13 nt, Artificial Sequence
  Description of Artificial Sequence: Synthetic oligonucleotide
aaacugaaaccau

SEQ ID NO: 71254 - RNA, 14 nt, Artificial Sequence
  Description of Artificial Sequence: Synthetic oligonucleotide
acuuuguuaaauau

SEQ ID NO: 71255 - RNA, 14 nt, Artificial Sequence
  Description of Artificial Sequence: Synthetic oligonucleotide
guauauuaaaaguu

SEQ ID NO: 71256 - RNA, 13 nt, Artificial Sequence
  Description of Artificial Sequence: Synthetic oligonucleotide
guuuugacuuaac

SEQ ID NO: 71257 - RNA, 13 nt, Artificial Sequence
  Description of Artificial Sequence: Synthetic oligonucleotide
gcaaacucagcac

SEQ ID NO: 71258 - RNA, 11 nt, Artificial Sequence
  Description of Artificial Sequence: Synthetic oligonucleotide
ugcugaccuca

SEQ ID NO: 71259 - RNA, 14 nt, Artificial Sequence
  Description of Artificial Sequence: Synthetic oligonucleotide
uuuauucagaucgc

SEQ ID NO: 71260 - RNA, 13 nt, Artificial Sequence
  Description of Artificial Sequence: Synthetic oligonucleotide
aggguucugggau

SEQ ID NO: 71261 - RNA, 15 nt, Artificial Sequence
  Description of Artificial Sequence: Synthetic oligonucleotide
auauuggaaauuaug

SEQ ID NO: 71262 - RNA, 13 nt, Artificial Sequence
  Description of Artificial Sequence: Synthetic oligonucleotide
auggaagcacuag

SEQ ID NO: 71263 - RNA, 13 nt, Artificial Sequence
  Description of Artificial Sequence: Synthetic oligonucleotide
guuuuuaugugga

SEQ ID NO: 71264 - RNA, 12 nt, Artificial Sequence
  Description of Artificial Sequence: Synthetic oligonucleotide
ggaauugguaga

SEQ ID NO: 71265 - RNA, 13 nt, Artificial Sequence
  Description of Artificial Sequence: Synthetic oligonucleotide
uuagacuuggaga

SEQ ID NO: 71266 - RNA, 13 nt, Artificial Sequence
  Description of Artificial Sequence: Synthetic oligonucleotide
uuacaguauucca

SEQ ID NO: 71267 - RNA, 15 nt, Artificial Sequence
  Description of Artificial Sequence: Synthetic oligonucleotide
ccacugaugaauuaa

SEQ ID NO: 71268 - RNA, 12 nt, Artificial Sequence
  Description of Artificial Sequence: Synthetic oligonucleotide
ccacaucaucac

SEQ ID NO: 71269 - RNA, 13 nt, Artificial Sequence
  Description of Artificial Sequence: Synthetic oligonucleotide
cucaccaaacaga

SEQ ID NO: 71270 - RNA, 12 nt, Artificial Sequence
  Description of Artificial Sequence: Synthetic oligonucleotide
ggaacaugaugg

SEQ ID NO: 71271 - RNA, 12 nt, Artificial Sequence
  Description of Artificial Sequence: Synthetic oligonucleotide
cauguagacugc

SEQ ID NO: 71272 - RNA, 13 nt, Artificial Sequence
  Description of Artificial Sequence: Synthetic oligonucleotide
ggaucuauuuaug

SEQ ID NO: 71273 - RNA, 12 nt, Artificial Sequence
  Description of Artificial Sequence: Synthetic oligonucleotide
gcacuauuauca

SEQ ID NO: 71274 - RNA, 11 nt, Artificial Sequence
  Description of Artificial Sequence: Synthetic oligonucleotide
aucaguucugc

SEQ ID NO: 71275 - RNA, 13 nt, Artificial Sequence
  Description of Artificial Sequence: Synthetic oligonucleotide
agauuaaaccuac

SEQ ID NO: 71276 - RNA, 13 nt, Artificial Sequence
  Description of Artificial Sequence: Synthetic oligonucleotide
auaaaauccuucu

SEQ ID NO: 71277 - RNA, 12 nt, Artificial Sequence
  Description of Artificial Sequence: Synthetic oligonucleotide
aaugcuguagac

SEQ ID NO: 71278 - RNA, 13 nt, Artificial Sequence
  Description of Artificial Sequence: Synthetic oligonucleotide
uugauaggaauag

SEQ ID NO: 71279 - RNA, 11 nt, Artificial Sequence
  Description of Artificial Sequence: Synthetic oligonucleotide
aauggcccuga

SEQ ID NO: 71280 - RNA, 11 nt, Artificial Sequence
  Description of Artificial Sequence: Synthetic oligonucleotide
uuccucaagca

SEQ ID NO: 71281 - RNA, 10 nt, Artificial Sequence
  Description of Artificial Sequence: Synthetic oligonucleotide
guucagccca

SEQ ID NO: 71282 - RNA, 11 nt, Artificial Sequence
  Description of Artificial Sequence: Synthetic oligonucleotide
gcugcugaacc

SEQ ID NO: 71283 - RNA, 12 nt, Artificial Sequence
  Description of Artificial Sequence: Synthetic oligonucleotide
aaguucucuuca

SEQ ID NO: 71284 - RNA, 11 nt, Artificial Sequence
  Description of Artificial Sequence: Synthetic oligonucleotide
ccagccuagag

SEQ ID NO: 71285 - RNA, 13 nt, Artificial Sequence
  Description of Artificial Sequence: Synthetic oligonucleotide
cucugugaagugu

SEQ ID NO: 71286 - RNA, 14 nt, Artificial Sequence
  Description of Artificial Sequence: Synthetic oligonucleotide
ugagaaaauuucaa

SEQ ID NO: 71287 - RNA, 11 nt, Artificial Sequence
  Description of Artificial Sequence: Synthetic oligonucleotide
aauccuccuga

SEQ ID NO: 71288 - RNA, 12 nt, Artificial Sequence
  Description of Artificial Sequence: Synthetic oligonucleotide
gugacaucauau

SEQ ID NO: 71289 - RNA, 13 nt, Artificial Sequence
  Description of Artificial Sequence: Synthetic oligonucleotide
aaucuucaucaua

SEQ ID NO: 71290 - RNA, 13 nt, Artificial Sequence
  Description of Artificial Sequence: Synthetic oligonucleotide
gacuagcuauuaa

SEQ ID NO: 71291 - RNA, 14 nt, Artificial Sequence
  Description of Artificial Sequence: Synthetic oligonucleotide
ucucuacuaaaaau

SEQ ID NO: 71292 - RNA, 12 nt, Artificial Sequence
  Description of Artificial Sequence: Synthetic oligonucleotide
ucuaucucgccu

SEQ ID NO: 71293 - RNA, 13 nt, Artificial Sequence
  Description of Artificial Sequence: Synthetic oligonucleotide
cuucgguccaguu

SEQ ID NO: 71294 - RNA, 11 nt, Artificial Sequence
  Description of Artificial Sequence: Synthetic oligonucleotide
gauguagccgc

SEQ ID NO: 71295 - RNA, 12 nt, Artificial Sequence
  Description of Artificial Sequence: Synthetic oligonucleotide
ugaggagacuug

SEQ ID NO: 71296 - RNA, 12 nt, Artificial Sequence
  Description of Artificial Sequence: Synthetic oligonucleotide
gaguagugagga

SEQ ID NO: 71297 - RNA, 14 nt, Artificial Sequence
  Description of Artificial Sequence: Synthetic oligonucleotide
cagaugaguacaaa

SEQ ID NO: 71298 - RNA, 13 nt, Artificial Sequence
  Description of Artificial Sequence: Synthetic oligonucleotide
guuguuaaugggc

SEQ ID NO: 71299 - RNA, 13 nt, Artificial Sequence
  Description of Artificial Sequence: Synthetic oligonucleotide
uuuuuaauuuauu

SEQ ID NO: 71300 - RNA, 12 nt, Artificial Sequence
  Description of Artificial Sequence: Synthetic oligonucleotide
uauuuaaauaug

SEQ ID NO: 71301 - RNA, 13 nt, Artificial Sequence
  Description of Artificial Sequence: Synthetic oligonucleotide
uauccuuuguuuc

SEQ ID NO: 71302 - RNA, 14 nt, Artificial Sequence
  Description of Artificial Sequence: Synthetic oligonucleotide
cgucuaaguguuug

SEQ ID NO: 71303 - RNA, 12 nt, Artificial Sequence
  Description of Artificial Sequence: Synthetic oligonucleotide
accugugacaaa

SEQ ID NO: 71304 - RNA, 13 nt, Artificial Sequence
  Description of Artificial Sequence: Synthetic oligonucleotide
ccaggcugaauua

SEQ ID NO: 71305 - RNA, 14 nt, Artificial Sequence
  Description of Artificial Sequence: Synthetic oligonucleotide
gucauucuuacaau

SEQ ID NO: 71306 - RNA, 15 nt, Artificial Sequence
  Description of Artificial Sequence: Synthetic oligonucleotide
ucauucuuacaauug

SEQ ID NO: 71307 - RNA, 12 nt, Artificial Sequence
  Description of Artificial Sequence: Synthetic oligonucleotide
cagagaguguac

SEQ ID NO: 71308 - RNA, 12 nt, Artificial Sequence
  Description of Artificial Sequence: Synthetic oligonucleotide
agaacucagcag

SEQ ID NO: 71309 - RNA, 13 nt, Artificial Sequence
  Description of Artificial Sequence: Synthetic oligonucleotide
uuuauuuucagua

SEQ ID NO: 71310 - RNA, 12 nt, Artificial Sequence
  Description of Artificial Sequence: Synthetic oligonucleotide
ucuuaaauggaa

SEQ ID NO: 71311 - RNA, 13 nt, Artificial Sequence
  Description of Artificial Sequence: Synthetic oligonucleotide
ugccuaaaauugu

SEQ ID NO: 71312 - RNA, 12 nt, Artificial Sequence
  Description of Artificial Sequence: Synthetic oligonucleotide
agacugugagcu

SEQ ID NO: 71313 - RNA, 14 nt, Artificial Sequence
  Description of Artificial Sequence: Synthetic oligonucleotide
ugcuuuuuauuaau

SEQ ID NO: 71314 - RNA, 13 nt, Artificial Sequence
  Description of Artificial Sequence: Synthetic oligonucleotide
cucuucuuacauu

SEQ ID NO: 71315 - RNA, 15 nt, Artificial Sequence
  Description of Artificial Sequence: Synthetic oligonucleotide
cauuuguaaaaaugu

SEQ ID NO: 71316 - RNA, 15 nt, Artificial Sequence
  Description of Artificial Sequence: Synthetic oligonucleotide
aucuuaauucauauu

SEQ ID NO: 71317 - RNA, 13 nt, Artificial Sequence
  Description of Artificial Sequence: Synthetic oligonucleotide
gaacuaaucauga

SEQ ID NO: 71318 - RNA, 12 nt, Artificial Sequence
  Description of Artificial Sequence: Synthetic oligonucleotide
ucugcucuuggg

SEQ ID NO: 71319 - RNA, 13 nt, Artificial Sequence
  Description of Artificial Sequence: Synthetic oligonucleotide
caguagcuuugag

SEQ ID NO: 71320 - RNA, 14 nt, Artificial Sequence
  Description of Artificial Sequence: Synthetic oligonucleotide
cacguaauauuuca

SEQ ID NO: 71321 - RNA, 13 nt, Artificial Sequence
  Description of Artificial Sequence: Synthetic oligonucleotide
uauucucuucacu

SEQ ID NO: 71322 - RNA, 14 nt, Artificial Sequence
  Description of Artificial Sequence: Synthetic oligonucleotide
cuaaugcuaagaaa

SEQ ID NO: 71323 - RNA, 12 nt, Artificial Sequence
  Description of Artificial Sequence: Synthetic oligonucleotide
gcugaaaaucaa

SEQ ID NO: 71324 - RNA, 14 nt, Artificial Sequence
  Description of Artificial Sequence: Synthetic oligonucleotide
aauaugauuacuuu

SEQ ID NO: 71325 - RNA, 14 nt, Artificial Sequence
  Description of Artificial Sequence: Synthetic oligonucleotide
cauuuuguucuaca

SEQ ID NO: 71326 - RNA, 12 nt, Artificial Sequence
  Description of Artificial Sequence: Synthetic oligonucleotide
cccgggacucuc

SEQ ID NO: 71327 - RNA, 14 nt, Artificial Sequence
  Description of Artificial Sequence: Synthetic oligonucleotide
ccuuuaaaguaaag

SEQ ID NO: 71328 - RNA, 13 nt, Artificial Sequence
  Description of Artificial Sequence: Synthetic oligonucleotide
ucuggaagccugg

SEQ ID NO: 71329 - RNA, 14 nt, Artificial Sequence
  Description of Artificial Sequence: Synthetic oligonucleotide
aaaacaaaagagag

SEQ ID NO: 71330 - RNA, 13 nt, Artificial Sequence
  Description of Artificial Sequence: Synthetic oligonucleotide
aucaguuaugccg

SEQ ID NO: 71331 - RNA, 13 nt, Artificial Sequence
  Description of Artificial Sequence: Synthetic oligonucleotide
uaaaagaagucca

SEQ ID NO: 71332 - RNA, 11 nt, Artificial Sequence
  Description of Artificial Sequence: Synthetic oligonucleotide
aggugagguua

SEQ ID NO: 71333 - RNA, 11 nt, Artificial Sequence
  Description of Artificial Sequence: Synthetic oligonucleotide
gggaagaggac

SEQ ID NO: 71334 - RNA, 13 nt, Artificial Sequence
  Description of Artificial Sequence: Synthetic oligonucleotide
aagcaaguauugu

SEQ ID NO: 71335 - RNA, 12 nt, Artificial Sequence
  Description of Artificial Sequence: Synthetic oligonucleotide
auuguagcacuc

SEQ ID NO: 71336 - RNA, 14 nt, Artificial Sequence
  Description of Artificial Sequence: Synthetic oligonucleotide
acaaaaccacaaau

SEQ ID NO: 71337 - RNA, 12 nt, Artificial Sequence
  Description of Artificial Sequence: Synthetic oligonucleotide
uaagcccauaca

SEQ ID NO: 71338 - RNA, 11 nt, Artificial Sequence
  Description of Artificial Sequence: Synthetic oligonucleotide
agcccauacag

SEQ ID NO: 71339 - RNA, 12 nt, Artificial Sequence
  Description of Artificial Sequence: Synthetic oligonucleotide
cagaaaccuucc

SEQ ID NO: 71340 - RNA, 10 nt, Artificial Sequence
  Description of Artificial Sequence: Synthetic oligonucleotide
guauaccuac

SEQ ID NO: 71341 - RNA, 13 nt, Artificial Sequence
  Description of Artificial Sequence: Synthetic oligonucleotide
gccaguuuucgga

SEQ ID NO: 71342 - RNA, 9 nt, Artificial Sequence
  Description of Artificial Sequence: Synthetic oligonucleotide
ggaacaggg

SEQ ID NO: 71343 - RNA, 13 nt, Artificial Sequence
  Description of Artificial Sequence: Synthetic oligonucleotide
uuaacuuuccagu

SEQ ID NO: 71344 - RNA, 14 nt, Artificial Sequence
  Description of Artificial Sequence: Synthetic oligonucleotide
aaaguuugguuuug

SEQ ID NO: 71345 - RNA, 12 nt, Artificial Sequence
  Description of Artificial Sequence: Synthetic oligonucleotide
cuucccacugua

SEQ ID NO: 71346 - RNA, 13 nt, Artificial Sequence
  Description of Artificial Sequence: Synthetic oligonucleotide
ugauaccauauga

SEQ ID NO: 71347 - RNA, 11 nt, Artificial Sequence
  Description of Artificial Sequence: Synthetic oligonucleotide
aacaugggcug

SEQ ID NO: 71348 - RNA, 13 nt, Artificial Sequence
  Description of Artificial Sequence: Synthetic oligonucleotide
caacuuuuucaua

SEQ ID NO: 71349 - RNA, 12 nt, Artificial Sequence
  Description of Artificial Sequence: Synthetic oligonucleotide
caugaggccgga

SEQ ID NO: 71350 - RNA, 11 nt, Artificial Sequence
  Description of Artificial Sequence: Synthetic oligonucleotide
acugcauuugu

SEQ ID NO: 71351 - RNA, 13 nt, Artificial Sequence
  Description of Artificial Sequence: Synthetic oligonucleotide
aauguuuacuacc

SEQ ID NO: 71352 - RNA, 15 nt, Artificial Sequence
  Description of Artificial Sequence: Synthetic oligonucleotide
aauuuuuugaugaaa

SEQ ID NO: 71353 - RNA, 14 nt, Artificial Sequence
  Description of Artificial Sequence: Synthetic oligonucleotide
cagugugugaauuu

SEQ ID NO: 71354 - RNA, 13 nt, Artificial Sequence
  Description of Artificial Sequence: Synthetic oligonucleotide
gagcaauguaugu

SEQ ID NO: 71355 - RNA, 14 nt, Artificial Sequence
  Description of Artificial Sequence: Synthetic oligonucleotide
aaagcacauauaua

SEQ ID NO: 71356 - RNA, 14 nt, Artificial Sequence
  Description of Artificial Sequence: Synthetic oligonucleotide
guaauaguuucucc

SEQ ID NO: 71357 - RNA, 13 nt, Artificial Sequence
  Description of Artificial Sequence: Synthetic oligonucleotide
aguuucuccaaau

SEQ ID NO: 71358 - RNA, 13 nt, Artificial Sequence
  Description of Artificial Sequence: Synthetic oligonucleotide
uacuuccuagaaa

SEQ ID NO: 71359 - RNA, 13 nt, Artificial Sequence
  Description of Artificial Sequence: Synthetic oligonucleotide
uacaccauauaug

SEQ ID NO: 71360 - RNA, 14 nt, Artificial Sequence
  Description of Artificial Sequence: Synthetic oligonucleotide
auauaugaauggag

SEQ ID NO: 71361 - RNA, 13 nt, Artificial Sequence
  Description of Artificial Sequence: Synthetic oligonucleotide
acgagaagaagau

SEQ ID NO: 71362 - RNA, 13 nt, Artificial Sequence
  Description of Artificial Sequence: Synthetic oligonucleotide
ucauuuacaggga

SEQ ID NO: 71363 - RNA, 13 nt, Artificial Sequence
  Description of Artificial Sequence: Synthetic oligonucleotide
cauuuacagggac

SEQ ID NO: 71364 - RNA, 10 nt, Artificial Sequence
  Description of Artificial Sequence: Synthetic oligonucleotide
agggaccuga

SEQ ID NO: 71365 - RNA, 14 nt, Artificial Sequence
  Description of Artificial Sequence: Synthetic oligonucleotide
uguuugacugcauc

SEQ ID NO: 71366 - RNA, 13 nt, Artificial Sequence
  Description of Artificial Sequence: Synthetic oligonucleotide
uuugacugcaucg

SEQ ID NO: 71367 - RNA, 12 nt, Artificial Sequence
  Description of Artificial Sequence: Synthetic oligonucleotide
gaguucacaggg

SEQ ID NO: 71368 - RNA, 13 nt, Artificial Sequence
  Description of Artificial Sequence: Synthetic oligonucleotide
ggcaccucugucc

SEQ ID NO: 71369 - RNA, 15 nt, Artificial Sequence
  Description of Artificial Sequence: Synthetic oligonucleotide
gguuugucuuuuuaa

SEQ ID NO: 71370 - RNA, 14 nt, Artificial Sequence
  Description of Artificial Sequence: Synthetic oligonucleotide
uuugucuuuuuaag

SEQ ID NO: 71371 - RNA, 13 nt, Artificial Sequence
  Description of Artificial Sequence: Synthetic oligonucleotide
ccuaaagguuguc

SEQ ID NO: 71372 - RNA, 12 nt, Artificial Sequence
  Description of Artificial Sequence: Synthetic oligonucleotide
aagguugucgac

SEQ ID NO: 71373 - RNA, 13 nt, Artificial Sequence
  Description of Artificial Sequence: Synthetic oligonucleotide
accuggcaauugu

SEQ ID NO: 71374 - RNA, 12 nt, Artificial Sequence
  Description of Artificial Sequence: Synthetic oligonucleotide
aguggugcgagg

SEQ ID NO: 71375 - RNA, 13 nt, Artificial Sequence
  Description of Artificial Sequence: Synthetic oligonucleotide
agagacaugaaau

SEQ ID NO: 71376 - RNA, 13 nt, Artificial Sequence
  Description of Artificial Sequence: Synthetic oligonucleotide
auauauuucucca

SEQ ID NO: 71377 - RNA, 10 nt, Artificial Sequence
  Description of Artificial Sequence: Synthetic oligonucleotide
caugaaggcu

SEQ ID NO: 71378 - RNA, 11 nt, Artificial Sequence
  Description of Artificial Sequence: Synthetic oligonucleotide
gcuggaguggu

SEQ ID NO: 71379 - RNA, 11 nt, Artificial Sequence
  Description of Artificial Sequence: Synthetic oligonucleotide
aggaagagagg

SEQ ID NO: 71380 - RNA, 12 nt, Artificial Sequence
  Description of Artificial Sequence: Synthetic oligonucleotide
cuugcaucgggc

SEQ ID NO: 71381 - RNA, 13 nt, Artificial Sequence
  Description of Artificial Sequence: Synthetic oligonucleotide
auauccuacugug

SEQ ID NO: 71382 - RNA, 13 nt, Artificial Sequence
  Description of Artificial Sequence: Synthetic oligonucleotide
uccuacuguguaa

SEQ ID NO: 71383 - RNA, 12 nt, Artificial Sequence
  Description of Artificial Sequence: Synthetic oligonucleotide
ccuuguagugua

SEQ ID NO: 71384 - RNA, 13 nt, Artificial Sequence
  Description of Artificial Sequence: Synthetic oligonucleotide
ucuuuguugauug

SEQ ID NO: 71385 - RNA, 14 nt, Artificial Sequence
  Description of Artificial Sequence: Synthetic oligonucleotide
uuuguugauugaaa

SEQ ID NO: 71386 - RNA, 15 nt, Artificial Sequence
  Description of Artificial Sequence: Synthetic oligonucleotide
uucuuuuucuuccau

SEQ ID NO: 71387 - RNA, 13 nt, Artificial Sequence
  Description of Artificial Sequence: Synthetic oligonucleotide
aaucuuccuucua

SEQ ID NO: 71388 - RNA, 13 nt, Artificial Sequence
  Description of Artificial Sequence: Synthetic oligonucleotide
uugaaugcuucau

SEQ ID NO: 71389 - RNA, 13 nt, Artificial Sequence
  Description of Artificial Sequence: Synthetic oligonucleotide
ugaaugcuucaug

SEQ ID NO: 71390 - RNA, 13 nt, Artificial Sequence
  Description of Artificial Sequence: Synthetic oligonucleotide
aauucuacuuuga

SEQ ID NO: 71391 - RNA, 13 nt, Artificial Sequence
  Description of Artificial Sequence: Synthetic oligonucleotide
agcaacuacagac

SEQ ID NO: 71392 - RNA, 13 nt, Artificial Sequence
  Description of Artificial Sequence: Synthetic oligonucleotide
gaccaaggucaac

SEQ ID NO: 71393 - RNA, 13 nt, Artificial Sequence
  Description of Artificial Sequence: Synthetic oligonucleotide
cgacuaucucgac

SEQ ID NO: 71394 - RNA, 13 nt, Artificial Sequence
  Description of Artificial Sequence: Synthetic oligonucleotide
aaccuucccaaac

SEQ ID NO: 71395 - RNA, 14 nt, Artificial Sequence
  Description of Artificial Sequence: Synthetic oligonucleotide
ccaagcuuagaacu

SEQ ID NO: 71396 - RNA, 15 nt, Artificial Sequence
  Description of Artificial Sequence: Synthetic oligonucleotide
agcuuagaacuuuaa

SEQ ID NO: 71397 - RNA, 11 nt, Artificial Sequence
  Description of Artificial Sequence: Synthetic oligonucleotide
aagaccaccac

SEQ ID NO: 71398 - RNA, 14 nt, Artificial Sequence
  Description of Artificial Sequence: Synthetic oligonucleotide
gcgagaaauaaagu

SEQ ID NO: 71399 - RNA, 14 nt, Artificial Sequence
  Description of Artificial Sequence: Synthetic oligonucleotide
cgagaaauaaaguu

SEQ ID NO: 71400 - RNA, 12 nt, Artificial Sequence
  Description of Artificial Sequence: Synthetic oligonucleotide
aggaaaugaucc

SEQ ID NO: 71401 - RNA, 13 nt, Artificial Sequence
  Description of Artificial Sequence: Synthetic oligonucleotide
gaagaaaugaaac

SEQ ID NO: 71402 - RNA, 13 nt, Artificial Sequence
  Description of Artificial Sequence: Synthetic oligonucleotide
guuuccauccucc

SEQ ID NO: 71403 - RNA, 15 nt, Artificial Sequence
  Description of Artificial Sequence: Synthetic oligonucleotide
acugaaaaucuuuga

SEQ ID NO: 71404 - RNA, 11 nt, Artificial Sequence
  Description of Artificial Sequence: Synthetic oligonucleotide
ugccguucagg

SEQ ID NO: 71405 - RNA, 13 nt, Artificial Sequence
  Description of Artificial Sequence: Synthetic oligonucleotide
caggguccagaag

SEQ ID NO: 71406 - RNA, 13 nt, Artificial Sequence
  Description of Artificial Sequence: Synthetic oligonucleotide
ucaagacugcuug

SEQ ID NO: 71407 - RNA, 13 nt, Artificial Sequence
  Description of Artificial Sequence: Synthetic oligonucleotide
uccaugucuuugg

SEQ ID NO: 71408 - RNA, 11 nt, Artificial Sequence
  Description of Artificial Sequence: Synthetic oligonucleotide
gccugaaacac

SEQ ID NO: 71409 - RNA, 12 nt, Artificial Sequence
  Description of Artificial Sequence: Synthetic oligonucleotide
ucucuguaccuc

SEQ ID NO: 71410 - RNA, 12 nt, Artificial Sequence
  Description of Artificial Sequence: Synthetic oligonucleotide
agcaagacaaga

SEQ ID NO: 71411 - RNA, 13 nt, Artificial Sequence
  Description of Artificial Sequence: Synthetic oligonucleotide
gcaagacaagaaa

SEQ ID NO: 71412 - RNA, 12 nt, Artificial Sequence
  Description of Artificial Sequence: Synthetic oligonucleotide
uguacaagaucc

SEQ ID NO: 71413 - RNA, 12 nt, Artificial Sequence
  Description of Artificial Sequence: Synthetic oligonucleotide
cguacuugcaga

SEQ ID NO: 71414 - RNA, 13 nt, Artificial Sequence
  Description of Artificial Sequence: Synthetic oligonucleotide
cgaucgauacaga

SEQ ID NO: 71415 - RNA, 13 nt, Artificial Sequence
  Description of Artificial Sequence: Synthetic oligonucleotide
uauaaaaauaaau

SEQ ID NO: 71416 - RNA, 13 nt, Artificial Sequence
  Description of Artificial Sequence: Synthetic oligonucleotide
uaaaaauaaauau

SEQ ID NO: 71417 - RNA, 13 nt, Artificial Sequence
  Description of Artificial Sequence: Synthetic oligonucleotide
uuugacugcugug

SEQ ID NO: 71418 - RNA, 13 nt, Artificial Sequence
  Description of Artificial Sequence: Synthetic oligonucleotide
ggagaugagagac

SEQ ID NO: 71419 - RNA, 10 nt, Artificial Sequence
  Description of Artificial Sequence: Synthetic oligonucleotide
ucccacuugg

SEQ ID NO: 71420 - RNA, 10 nt, Artificial Sequence
  Description of Artificial Sequence: Synthetic oligonucleotide
guucacggcc

SEQ ID NO: 71421 - RNA, 12 nt, Artificial Sequence
  Description of Artificial Sequence: Synthetic oligonucleotide
accaucacacca

SEQ ID NO: 71422 - RNA, 10 nt, Artificial Sequence
  Description of Artificial Sequence: Synthetic oligonucleotide
cugcggguuu

SEQ ID NO: 71423 - RNA, 9 nt, Artificial Sequence
  Description of Artificial Sequence: Synthetic oligonucleotide
uccaguuug

SEQ ID NO: 71424 - RNA, 12 nt, Artificial Sequence
  Description of Artificial Sequence: Synthetic oligonucleotide
uuaaggacuucu

SEQ ID NO: 71425 - RNA, 12 nt, Artificial Sequence
  Description of Artificial Sequence: Synthetic oligonucleotide
agugggacagag

SEQ ID NO: 71426 - RNA, 13 nt, Artificial Sequence
  Description of Artificial Sequence: Synthetic oligonucleotide
auuuguuauugug

SEQ ID NO: 71427 - RNA, 12 nt, Artificial Sequence
  Description of Artificial Sequence: Synthetic oligonucleotide
ucaaaugcauuu

SEQ ID NO: 71428 - RNA, 9 nt, Artificial Sequence
  Description of Artificial Sequence: Synthetic oligonucleotide
aggaaagcc

SEQ ID NO: 71429 - RNA, 10 nt, Artificial Sequence
  Description of Artificial Sequence: Synthetic oligonucleotide
ggaaagcccu

SEQ ID NO: 71430 - RNA, 11 nt, Artificial Sequence
  Description of Artificial Sequence: Synthetic oligonucleotide
ccagcauggcc

SEQ ID NO: 71431 - RNA, 10 nt, Artificial Sequence
  Description of Artificial Sequence: Synthetic oligonucleotide
uucucccuga

SEQ ID NO: 71432 - RNA, 11 nt, Artificial Sequence
  Description of Artificial Sequence: Synthetic oligonucleotide
aagaagcccuu

SEQ ID NO: 71433 - RNA, 11 nt, Artificial Sequence
  Description of Artificial Sequence: Synthetic oligonucleotide
gaagcccuuca

SEQ ID NO: 71434 - RNA, 10 nt, Artificial Sequence
  Description of Artificial Sequence: Synthetic oligonucleotide
cccuucagcg

SEQ ID NO: 71435 - RNA, 10 nt, Artificial Sequence
  Description of Artificial Sequence: Synthetic oligonucleotide
cuucagcggc

SEQ ID NO: 71436 - RNA, 11 nt, Artificial Sequence
  Description of Artificial Sequence: Synthetic oligonucleotide
cagcggccagu

SEQ ID NO: 71437 - RNA, 11 nt, Artificial Sequence
  Description of Artificial Sequence: Synthetic oligonucleotide
gaaaagcuccg

SEQ ID NO: 71438 - RNA, 10 nt, Artificial Sequence
  Description of Artificial Sequence: Synthetic oligonucleotide
aaagcuccgg

SEQ ID NO: 71439 - RNA, 12 nt, Artificial Sequence
  Description of Artificial Sequence: Synthetic oligonucleotide
gucaacagucug

SEQ ID NO: 71440 - RNA, 12 nt, Artificial Sequence
  Description of Artificial Sequence: Synthetic oligonucleotide
agaguucaaaag

SEQ ID NO: 71441 - RNA, 12 nt, Artificial Sequence
  Description of Artificial Sequence: Synthetic oligonucleotide
gaguucaaaagc

SEQ ID NO: 71442 - RNA, 11 nt, Artificial Sequence
  Description of Artificial Sequence: Synthetic oligonucleotide
ucaaaagcccu

SEQ ID NO: 71443 - RNA, 11 nt, Artificial Sequence
  Description of Artificial Sequence: Synthetic oligonucleotide
caaaagcccuu

SEQ ID NO: 71444 - RNA, 11 nt, Artificial Sequence
  Description of Artificial Sequence: Synthetic oligonucleotide
aaagcccuuca

SEQ ID NO: 71445 - RNA, 11 nt, Artificial Sequence
  Description of Artificial Sequence: Synthetic oligonucleotide
aagcccuucag

SEQ ID NO: 71446 - RNA, 12 nt, Artificial Sequence
  Description of Artificial Sequence: Synthetic oligonucleotide
ugaagccgcucg

SEQ ID NO: 71447 - RNA, 11 nt, Artificial Sequence
  Description of Artificial Sequence: Synthetic oligonucleotide
acgccagucaa

SEQ ID NO: 71448 - RNA, 12 nt, Artificial Sequence
  Description of Artificial Sequence: Synthetic oligonucleotide
ucuuggugcgug

SEQ ID NO: 71449 - RNA, 13 nt, Artificial Sequence
  Description of Artificial Sequence: Synthetic oligonucleotide
uuggauucaucag

SEQ ID NO: 71450 - RNA, 12 nt, Artificial Sequence
  Description of Artificial Sequence: Synthetic oligonucleotide
ggaauaccuaag

SEQ ID NO: 71451 - RNA, 11 nt, Artificial Sequence
  Description of Artificial Sequence: Synthetic oligonucleotide
uuugaggcuca

SEQ ID NO: 71452 - RNA, 10 nt, Artificial Sequence
  Description of Artificial Sequence: Synthetic oligonucleotide
cuacaauugg

SEQ ID NO: 71453 - RNA, 11 nt, Artificial Sequence
  Description of Artificial Sequence: Synthetic oligonucleotide
aguuaggagcc

SEQ ID NO: 71454 - RNA, 12 nt, Artificial Sequence
  Description of Artificial Sequence: Synthetic oligonucleotide
gucaauauccac

SEQ ID NO: 71455 - RNA, 12 nt, Artificial Sequence
  Description of Artificial Sequence: Synthetic oligonucleotide
uguucagucaca

SEQ ID NO: 71456 - RNA, 11 nt, Artificial Sequence
  Description of Artificial Sequence: Synthetic oligonucleotide
cacacacauac

SEQ ID NO: 71457 - RNA, 11 nt, Artificial Sequence
  Description of Artificial Sequence: Synthetic oligonucleotide
uccuuuugcuu

SEQ ID NO: 71458 - RNA, 15 nt, Artificial Sequence
  Description of Artificial Sequence: Synthetic oligonucleotide
uuuaaaguaauuuuu

SEQ ID NO: 71459 - RNA, 12 nt, Artificial Sequence
  Description of Artificial Sequence: Synthetic oligonucleotide
aacagucaaugg

SEQ ID NO: 71460 - RNA, 12 nt, Artificial Sequence
  Description of Artificial Sequence: Synthetic oligonucleotide
cgacaaaccaau

SEQ ID NO: 71461 - RNA, 11 nt, Artificial Sequence
  Description of Artificial Sequence: Synthetic oligonucleotide
cugcuaccacu

SEQ ID NO: 71462 - RNA, 12 nt, Artificial Sequence
  Description of Artificial Sequence: Synthetic oligonucleotide
caagcggucuua

SEQ ID NO: 71463 - RNA, 12 nt, Artificial Sequence
  Description of Artificial Sequence: Synthetic oligonucleotide
gucuuaccggcu

SEQ ID NO: 71464 - RNA, 10 nt, Artificial Sequence
  Description of Artificial Sequence: Synthetic oligonucleotide
auggguuacc

SEQ ID NO: 71465 - RNA, 10 nt, Artificial Sequence
  Description of Artificial Sequence: Synthetic oligonucleotide
uuaccugcga

SEQ ID NO: 71466 - RNA, 11 nt, Artificial Sequence
  Description of Artificial Sequence: Synthetic oligonucleotide
aucuugcugag

SEQ ID NO: 71467 - RNA, 12 nt, Artificial Sequence
  Description of Artificial Sequence: Synthetic oligonucleotide
gcauaaaacagu

SEQ ID NO: 71468 - RNA, 11 nt, Artificial Sequence
  Description of Artificial Sequence: Synthetic oligonucleotide
uccuuuauccu

SEQ ID NO: 71469 - RNA, 11 nt, Artificial Sequence
  Description of Artificial Sequence: Synthetic oligonucleotide
aacgcaaguug

SEQ ID NO: 71470 - RNA, 12 nt, Artificial Sequence
  Description of Artificial Sequence: Synthetic oligonucleotide
aacugaaaccau

SEQ ID NO: 71471 - RNA, 13 nt, Artificial Sequence
  Description of Artificial Sequence: Synthetic oligonucleotide
cuuuguuaaauau

SEQ ID NO: 71472 - RNA, 13 nt, Artificial Sequence
  Description of Artificial Sequence: Synthetic oligonucleotide
uauauuaaaaguu

SEQ ID NO: 71473 - RNA, 12 nt, Artificial Sequence
  Description of Artificial Sequence: Synthetic oligonucleotide
uuuugacuuaac

SEQ ID NO: 71474 - RNA, 12 nt, Artificial Sequence
  Description of Artificial Sequence: Synthetic oligonucleotide
caaacucagcac

SEQ ID NO: 71475 - RNA, 10 nt, Artificial Sequence
  Description of Artificial Sequence: Synthetic oligonucleotide
gcugaccuca

SEQ ID NO: 71476 - RNA, 13 nt, Artificial Sequence
  Description of Artificial Sequence: Synthetic oligonucleotide
uuauucagaucgc

SEQ ID NO: 71477 - RNA, 12 nt, Artificial Sequence
  Description of Artificial Sequence: Synthetic oligonucleotide
ggguucugggau

SEQ ID NO: 71478 - RNA, 14 nt, Artificial Sequence
  Description of Artificial Sequence: Synthetic oligonucleotide
uauuggaaauuaug

SEQ ID NO: 71479 - RNA, 12 nt, Artificial Sequence
  Description of Artificial Sequence: Synthetic oligonucleotide
uggaagcacuag

SEQ ID NO: 71480 - RNA, 12 nt, Artificial Sequence
  Description of Artificial Sequence: Synthetic oligonucleotide
uuuuuaugugga

SEQ ID NO: 71481 - RNA, 11 nt, Artificial Sequence
  Description of Artificial Sequence: Synthetic oligonucleotide
gaauugguaga

SEQ ID NO: 71482 - RNA, 12 nt, Artificial Sequence
  Description of Artificial Sequence: Synthetic oligonucleotide
uagacuuggaga

SEQ ID NO: 71483 - RNA, 12 nt, Artificial Sequence
  Description of Artificial Sequence: Synthetic oligonucleotide
uacaguauucca

SEQ ID NO: 71484 - RNA, 14 nt, Artificial Sequence
  Description of Artificial Sequence: Synthetic oligonucleotide
cacugaugaauuaa

SEQ ID NO: 71485 - RNA, 11 nt, Artificial Sequence
  Description of Artificial Sequence: Synthetic oligonucleotide
cacaucaucac

SEQ ID NO: 71486 - RNA, 12 nt, Artificial Sequence
  Description of Artificial Sequence: Synthetic oligonucleotide
ucaccaaacaga

SEQ ID NO: 71487 - RNA, 11 nt, Artificial Sequence
  Description of Artificial Sequence: Synthetic oligonucleotide
gaacaugaugg

SEQ ID NO: 71488 - RNA, 11 nt, Artificial Sequence
  Description of Artificial Sequence: Synthetic oligonucleotide
auguagacugc

SEQ ID NO: 71489 - RNA, 12 nt, Artificial Sequence
  Description of Artificial Sequence: Synthetic oligonucleotide
gaucuauuuaug

SEQ ID NO: 71490 - RNA, 11 nt, Artificial Sequence
  Description of Artificial Sequence: Synthetic oligonucleotide
cacuauuauca

SEQ ID NO: 71491 - RNA, 10 nt, Artificial Sequence
  Description of Artificial Sequence: Synthetic oligonucleotide
ucaguucugc

SEQ ID NO: 71492 - RNA, 12 nt, Artificial Sequence
  Description of Artificial Sequence: Synthetic oligonucleotide
gauuaaaccuac

SEQ ID NO: 71493 - RNA, 12 nt, Artificial Sequence
  Description of Artificial Sequence: Synthetic oligonucleotide
uaaaauccuucu

SEQ ID NO: 71494 - RNA, 11 nt, Artificial Sequence
  Description of Artificial Sequence: Synthetic oligonucleotide
augcuguagac

SEQ ID NO: 71495 - RNA, 12 nt, Artificial Sequence
  Description of Artificial Sequence: Synthetic oligonucleotide
ugauaggaauag

SEQ ID NO: 71496 - RNA, 10 nt, Artificial Sequence
  Description of Artificial Sequence: Synthetic oligonucleotide
auggcccuga

SEQ ID NO: 71497 - RNA, 10 nt, Artificial Sequence
  Description of Artificial Sequence: Synthetic oligonucleotide
uccucaagca

SEQ ID NO: 71498 - RNA, 9 nt, Artificial Sequence
  Description of Artificial Sequence: Synthetic oligonucleotide
uucagccca

SEQ ID NO: 71499 - RNA, 10 nt, Artificial Sequence
  Description of Artificial Sequence: Synthetic oligonucleotide
cugcugaacc

SEQ ID NO: 71500 - RNA, 11 nt, Artificial Sequence
  Description of Artificial Sequence: Synthetic oligonucleotide
aguucucuuca

SEQ ID NO: 71501 - RNA, 10 nt, Artificial Sequence
  Description of Artificial Sequence: Synthetic oligonucleotide
cagccuagag

SEQ ID NO: 71502 - RNA, 12 nt, Artificial Sequence
  Description of Artificial Sequence: Synthetic oligonucleotide
ucugugaagugu

SEQ ID NO: 71503 - RNA, 13 nt, Artificial Sequence
  Description of Artificial Sequence: Synthetic oligonucleotide
gagaaaauuucaa

SEQ ID NO: 71504 - RNA, 10 nt, Artificial Sequence
  Description of Artificial Sequence: Synthetic oligonucleotide
auccuccuga

SEQ ID NO: 71505 - RNA, 11 nt, Artificial Sequence
  Description of Artificial Sequence: Synthetic oligonucleotide
ugacaucauau

SEQ ID NO: 71506 - RNA, 12 nt, Artificial Sequence
  Description of Artificial Sequence: Synthetic oligonucleotide
aucuucaucaua

SEQ ID NO: 71507 - RNA, 12 nt, Artificial Sequence
  Description of Artificial Sequence: Synthetic oligonucleotide
acuagcuauuaa

SEQ ID NO: 71508 - RNA, 13 nt, Artificial Sequence
  Description of Artificial Sequence: Synthetic oligonucleotide
cucuacuaaaaau

SEQ ID NO: 71509 - RNA, 11 nt, Artificial Sequence
  Description of Artificial Sequence: Synthetic oligonucleotide
cuaucucgccu

SEQ ID NO: 71510 - RNA, 12 nt, Artificial Sequence
  Description of Artificial Sequence: Synthetic oligonucleotide
uucgguccaguu

SEQ ID NO: 71511 - RNA, 10 nt, Artificial Sequence
  Description of Artificial Sequence: Synthetic oligonucleotide
auguagccgc

SEQ ID NO: 71512 - RNA, 11 nt, Artificial Sequence
  Description of Artificial Sequence: Synthetic oligonucleotide
gaggagacuug

SEQ ID NO: 71513 - RNA, 11 nt, Artificial Sequence
  Description of Artificial Sequence: Synthetic oligonucleotide
aguagugagga

SEQ ID NO: 71514 - RNA, 13 nt, Artificial Sequence
  Description of Artificial Sequence: Synthetic oligonucleotide
agaugaguacaaa

SEQ ID NO: 71515 - RNA, 12 nt, Artificial Sequence
  Description of Artificial Sequence: Synthetic oligonucleotide
uuguuaaugggc

SEQ ID NO: 71516 - RNA, 12 nt, Artificial Sequence
  Description of Artificial Sequence: Synthetic oligonucleotide
uuuuaauuuauu

SEQ ID NO: 71517 - RNA, 11 nt, Artificial Sequence
  Description of Artificial Sequence: Synthetic oligonucleotide
auuuaaauaug

SEQ ID NO: 71518 - RNA, 12 nt, Artificial Sequence
  Description of Artificial Sequence: Synthetic oligonucleotide
auccuuuguuuc

SEQ ID NO: 71519 - RNA, 13 nt, Artificial Sequence
  Description of Artificial Sequence: Synthetic oligonucleotide
gucuaaguguuug

SEQ ID NO: 71520 - RNA, 11 nt, Artificial Sequence
  Description of Artificial Sequence: Synthetic oligonucleotide
ccugugacaaa

SEQ ID NO: 71521 - RNA, 12 nt, Artificial Sequence
  Description of Artificial Sequence: Synthetic oligonucleotide
caggcugaauua

SEQ ID NO: 71522 - RNA, 13 nt, Artificial Sequence
  Description of Artificial Sequence: Synthetic oligonucleotide
ucauucuuacaau

SEQ ID NO: 71523 - RNA, 14 nt, Artificial Sequence
  Description of Artificial Sequence: Synthetic oligonucleotide
cauucuuacaauug

SEQ ID NO: 71524 - RNA, 11 nt, Artificial Sequence
  Description of Artificial Sequence: Synthetic oligonucleotide
agagaguguac

SEQ ID NO: 71525 - RNA, 11 nt, Artificial Sequence
  Description of Artificial Sequence: Synthetic oligonucleotide
gaacucagcag

SEQ ID NO: 71526 - RNA, 12 nt, Artificial Sequence
  Description of Artificial Sequence: Synthetic oligonucleotide
uuauuuucagua

SEQ ID NO: 71527 - RNA, 11 nt, Artificial Sequence
  Description of Artificial Sequence: Synthetic oligonucleotide
cuuaaauggaa

SEQ ID NO: 71528 - RNA, 12 nt, Artificial Sequence
  Description of Artificial Sequence: Synthetic oligonucleotide
gccuaaaauugu

SEQ ID NO: 71529 - RNA, 12 nt, Artificial Sequence
  Description of Artificial Sequence: Synthetic oligonucleotide
acuaacaucugg

SEQ ID NO: 71530 - RNA, 11 nt, Artificial Sequence
  Description of Artificial Sequence: Synthetic oligonucleotide
gacugugagcu

SEQ ID NO: 71531 - RNA, 13 nt, Artificial Sequence
  Description of Artificial Sequence: Synthetic oligonucleotide
gcuuuuuauuaau

SEQ ID NO: 71532 - RNA, 12 nt, Artificial Sequence
  Description of Artificial Sequence: Synthetic oligonucleotide
ucuucuuacauu

SEQ ID NO: 71533 - RNA, 14 nt, Artificial Sequence
  Description of Artificial Sequence: Synthetic oligonucleotide
auuuguaaaaaugu

SEQ ID NO: 71534 - RNA, 14 nt, Artificial Sequence
  Description of Artificial Sequence: Synthetic oligonucleotide
ucuuaauucauauu

SEQ ID NO: 71535 - RNA, 12 nt, Artificial Sequence
  Description of Artificial Sequence: Synthetic oligonucleotide
aacuaaucauga

SEQ ID NO: 71536 - RNA, 11 nt, Artificial Sequence
  Description of Artificial Sequence: Synthetic oligonucleotide
cugcucuuggg

SEQ ID NO: 71537 - RNA, 12 nt, Artificial Sequence
  Description of Artificial Sequence: Synthetic oligonucleotide
aguagcuuugag

SEQ ID NO: 71538 - RNA, 13 nt, Artificial Sequence
  Description of Artificial Sequence: Synthetic oligonucleotide
acguaauauuuca

SEQ ID NO: 71539 - RNA, 12 nt, Artificial Sequence
  Description of Artificial Sequence: Synthetic oligonucleotide
auucucuucacu

SEQ ID NO: 71540 - RNA, 13 nt, Artificial Sequence
  Description of Artificial Sequence: Synthetic oligonucleotide
uaaugcuaagaaa

SEQ ID NO: 71541 - RNA, 11 nt, Artificial Sequence
  Description of Artificial Sequence: Synthetic oligonucleotide
cugaaaaucaa

SEQ ID NO: 71542 - RNA, 13 nt, Artificial Sequence
  Description of Artificial Sequence: Synthetic oligonucleotide
auaugauuacuuu

SEQ ID NO: 71543 - RNA, 13 nt, Artificial Sequence
  Description of Artificial Sequence: Synthetic oligonucleotide
auuuuguucuaca

SEQ ID NO: 71544 - RNA, 11 nt, Artificial Sequence
  Description of Artificial Sequence: Synthetic oligonucleotide
ccgggacucuc

SEQ ID NO: 71545 - RNA, 13 nt, Artificial Sequence
  Description of Artificial Sequence: Synthetic oligonucleotide
cuuuaaaguaaag

SEQ ID NO: 71546 - RNA, 12 nt, Artificial Sequence
  Description of Artificial Sequence: Synthetic oligonucleotide
cuggaagccugg

SEQ ID NO: 71547 - RNA, 13 nt, Artificial Sequence
  Description of Artificial Sequence: Synthetic oligonucleotide
aaacaaaagagag

SEQ ID NO: 71548 - RNA, 12 nt, Artificial Sequence
  Description of Artificial Sequence: Synthetic oligonucleotide
ucaguuaugccg

SEQ ID NO: 71549 - RNA, 12 nt, Artificial Sequence
  Description of Artificial Sequence: Synthetic oligonucleotide
aaaagaagucca

SEQ ID NO: 71550 - RNA, 10 nt, Artificial Sequence
  Description of Artificial Sequence: Synthetic oligonucleotide
ggugagguua

SEQ ID NO: 71551 - RNA, 10 nt, Artificial Sequence
  Description of Artificial Sequence: Synthetic oligonucleotide
ggaagaggac

SEQ ID NO: 71552 - RNA, 12 nt, Artificial Sequence
  Description of Artificial Sequence: Synthetic oligonucleotide
agcaaguauugu

SEQ ID NO: 71553 - RNA, 11 nt, Artificial Sequence
  Description of Artificial Sequence: Synthetic oligonucleotide
uuguagcacuc

SEQ ID NO: 71554 - RNA, 13 nt, Artificial Sequence
  Description of Artificial Sequence: Synthetic oligonucleotide
caaaaccacaaau

SEQ ID NO: 71555 - RNA, 11 nt, Artificial Sequence
  Description of Artificial Sequence: Synthetic oligonucleotide
aagcccauaca

SEQ ID NO: 71556 - RNA, 10 nt, Artificial Sequence
  Description of Artificial Sequence: Synthetic oligonucleotide
gcccauacag

SEQ ID NO: 71557 - RNA, 11 nt, Artificial Sequence
  Description of Artificial Sequence: Synthetic oligonucleotide
agaaaccuucc

SEQ ID NO: 71558 - RNA, 9 nt, Artificial Sequence
  Description of Artificial Sequence: Synthetic oligonucleotide
uauaccuac

SEQ ID NO: 71559 - RNA, 12 nt, Artificial Sequence
  Description of Artificial Sequence: Synthetic oligonucleotide
ccaguuuucgga

SEQ ID NO: 71560 - RNA, 8 nt, Artificial Sequence
  Description of Artificial Sequence: Synthetic oligonucleotide
gaacaggg

SEQ ID NO: 71561 - RNA, 12 nt, Artificial Sequence
  Description of Artificial Sequence: Synthetic oligonucleotide
uaacuuuccagu

SEQ ID NO: 71562 - RNA, 13 nt, Artificial Sequence
  Description of Artificial Sequence: Synthetic oligonucleotide
aaguuugguuuug

SEQ ID NO: 71563 - RNA, 11 nt, Artificial Sequence
  Description of Artificial Sequence: Synthetic oligonucleotide
uucccacugua

SEQ ID NO: 71564 - RNA, 12 nt, Artificial Sequence
  Description of Artificial Sequence: Synthetic oligonucleotide
gauaccauauga

SEQ ID NO: 71565 - RNA, 10 nt, Artificial Sequence
  Description of Artificial Sequence: Synthetic oligonucleotide
acaugggcug

SEQ ID NO: 71566 - RNA, 12 nt, Artificial Sequence
  Description of Artificial Sequence: Synthetic oligonucleotide
aacuuuuucaua

SEQ ID NO: 71567 - RNA, 11 nt, Artificial Sequence
  Description of Artificial Sequence: Synthetic oligonucleotide
augaggccgga

SEQ ID NO: 71568 - RNA, 10 nt, Artificial Sequence
  Description of Artificial Sequence: Synthetic oligonucleotide
cugcauuugu

SEQ ID NO: 71569 - RNA, 12 nt, Artificial Sequence
  Description of Artificial Sequence: Synthetic oligonucleotide
auguuuacuacc

SEQ ID NO: 71570 - RNA, 14 nt, Artificial Sequence
  Description of Artificial Sequence: Synthetic oligonucleotide
auuuuuugaugaaa

SEQ ID NO: 71571 - RNA, 13 nt, Artificial Sequence
  Description of Artificial Sequence: Synthetic oligonucleotide
agugugugaauuu

SEQ ID NO: 71572 - RNA, 12 nt, Artificial Sequence
  Description of Artificial Sequence: Synthetic oligonucleotide
agcaauguaugu

SEQ ID NO: 71573 - RNA, 13 nt, Artificial Sequence
  Description of Artificial Sequence: Synthetic oligonucleotide
aagcacauauaua

SEQ ID NO: 71574 - RNA, 13 nt, Artificial Sequence
  Description of Artificial Sequence: Synthetic oligonucleotide
uaauaguuucucc

SEQ ID NO: 71575 - RNA, 12 nt, Artificial Sequence
  Description of Artificial Sequence: Synthetic oligonucleotide
guuucuccaaau

SEQ ID NO: 71576 - RNA, 12 nt, Artificial Sequence
  Description of Artificial Sequence: Synthetic oligonucleotide
acuuccuagaaa

SEQ ID NO: 71577 - RNA, 12 nt, Artificial Sequence
  Description of Artificial Sequence: Synthetic oligonucleotide
acaccauauaug

SEQ ID NO: 71578 - RNA, 13 nt, Artificial Sequence
  Description of Artificial Sequence: Synthetic oligonucleotide
uauaugaauggag

SEQ ID NO: 71579 - RNA, 12 nt, Artificial Sequence
  Description of Artificial Sequence: Synthetic oligonucleotide
cauuuacaggga

SEQ ID NO: 71580 - RNA, 12 nt, Artificial Sequence
  Description of Artificial Sequence: Synthetic oligonucleotide
auuuacagggac

SEQ ID NO: 71581 - RNA, 9 nt, Artificial Sequence
  Description of Artificial Sequence: Synthetic oligonucleotide
gggaccuga

SEQ ID NO: 71582 - RNA, 13 nt, Artificial Sequence
  Description of Artificial Sequence: Synthetic oligonucleotide
guuugacugcauc

SEQ ID NO: 71583 - RNA, 12 nt, Artificial Sequence
  Description of Artificial Sequence: Synthetic oligonucleotide
uugacugcaucg

SEQ ID NO: 71584 - RNA, 11 nt, Artificial Sequence
  Description of Artificial Sequence: Synthetic oligonucleotide
aguucacaggg

SEQ ID NO: 71585 - RNA, 12 nt, Artificial Sequence
  Description of Artificial Sequence: Synthetic oligonucleotide
gcaccucugucc

SEQ ID NO: 71586 - RNA, 14 nt, Artificial Sequence
  Description of Artificial Sequence: Synthetic oligonucleotide
guuugucuuuuuaa

SEQ ID NO: 71587 - RNA, 13 nt, Artificial Sequence
  Description of Artificial Sequence: Synthetic oligonucleotide
uugucuuuuuaag

SEQ ID NO: 71588 - RNA, 12 nt, Artificial Sequence
  Description of Artificial Sequence: Synthetic oligonucleotide
cuaaagguuguc

SEQ ID NO: 71589 - RNA, 11 nt, Artificial Sequence
  Description of Artificial Sequence: Synthetic oligonucleotide
agguugucgac

SEQ ID NO: 71590 - RNA, 12 nt, Artificial Sequence
  Description of Artificial Sequence: Synthetic oligonucleotide
ccuggcaauugu

SEQ ID NO: 71591 - RNA, 11 nt, Artificial Sequence
  Description of Artificial Sequence: Synthetic oligonucleotide
guggugcgagg

SEQ ID NO: 71592 - RNA, 12 nt, Artificial Sequence
  Description of Artificial Sequence: Synthetic oligonucleotide
gagacaugaaau

SEQ ID NO: 71593 - RNA, 12 nt, Artificial Sequence
  Description of Artificial Sequence: Synthetic oligonucleotide
uauauuucucca

SEQ ID NO: 71594 - RNA, 9 nt, Artificial Sequence
  Description of Artificial Sequence: Synthetic oligonucleotide
augaaggcu

SEQ ID NO: 71595 - RNA, 10 nt, Artificial Sequence
  Description of Artificial Sequence: Synthetic oligonucleotide
cuggaguggu

SEQ ID NO: 71596 - RNA, 10 nt, Artificial Sequence
  Description of Artificial Sequence: Synthetic oligonucleotide
ggaagagagg

SEQ ID NO: 71597 - RNA, 11 nt, Artificial Sequence
  Description of Artificial Sequence: Synthetic oligonucleotide
uugcaucgggc

SEQ ID NO: 71598 - RNA, 12 nt, Artificial Sequence
  Description of Artificial Sequence: Synthetic oligonucleotide
uauccuacugug

SEQ ID NO: 71599 - RNA, 12 nt, Artificial Sequence
  Description of Artificial Sequence: Synthetic oligonucleotide
ccuacuguguaa

SEQ ID NO: 71600 - RNA, 11 nt, Artificial Sequence
  Description of Artificial Sequence: Synthetic oligonucleotide
cuuguagugua

SEQ ID NO: 71601 - RNA, 12 nt, Artificial Sequence
  Description of Artificial Sequence: Synthetic oligonucleotide
cuuuguugauug

SEQ ID NO: 71602 - RNA, 13 nt, Artificial Sequence
  Description of Artificial Sequence: Synthetic oligonucleotide
uuguugauugaaa

SEQ ID NO: 71603 - RNA, 14 nt, Artificial Sequence
  Description of Artificial Sequence: Synthetic oligonucleotide
ucuuuuucuuccau

SEQ ID NO: 71604 - RNA, 12 nt, Artificial Sequence
  Description of Artificial Sequence: Synthetic oligonucleotide
aucuuccuucua

SEQ ID NO: 71605 - RNA, 12 nt, Artificial Sequence
  Description of Artificial Sequence: Synthetic oligonucleotide
ugaaugcuucau

SEQ ID NO: 71606 - RNA, 12 nt, Artificial Sequence
  Description of Artificial Sequence: Synthetic oligonucleotide
gaaugcuucaug

SEQ ID NO: 71607 - RNA, 12 nt, Artificial Sequence
  Description of Artificial Sequence: Synthetic oligonucleotide
auucuacuuuga

SEQ ID NO: 71608 - RNA, 12 nt, Artificial Sequence
  Description of Artificial Sequence: Synthetic oligonucleotide
gcaacuacagac

SEQ ID NO: 71609 - RNA, 12 nt, Artificial Sequence
  Description of Artificial Sequence: Synthetic oligonucleotide
accaaggucaac

SEQ ID NO: 71610 - RNA, 12 nt, Artificial Sequence
  Description of Artificial Sequence: Synthetic oligonucleotide
gacuaucucgac

SEQ ID NO: 71611 - RNA, 12 nt, Artificial Sequence
  Description of Artificial Sequence: Synthetic oligonucleotide
accuucccaaac

SEQ ID NO: 71612 - RNA, 13 nt, Artificial Sequence
  Description of Artificial Sequence: Synthetic oligonucleotide
caagcuuagaacu

SEQ ID NO: 71613 - RNA, 14 nt, Artificial Sequence
  Description of Artificial Sequence: Synthetic oligonucleotide
gcuuagaacuuuaa

SEQ ID NO: 71614 - RNA, 13 nt, Artificial Sequence
  Description of Artificial Sequence: Synthetic oligonucleotide
aacuuuaagcaac

SEQ ID NO: 71615 - RNA, 10 nt, Artificial Sequence
  Description of Artificial Sequence: Synthetic oligonucleotide
agaccaccac

SEQ ID NO: 71616 - RNA, 13 nt, Artificial Sequence
  Description of Artificial Sequence: Synthetic oligonucleotide
cgagaaauaaagu

SEQ ID NO: 71617 - RNA, 13 nt, Artificial Sequence
  Description of Artificial Sequence: Synthetic oligonucleotide
gagaaauaaaguu

SEQ ID NO: 71618 - RNA, 11 nt, Artificial Sequence
  Description of Artificial Sequence: Synthetic oligonucleotide
ggaaaugaucc

SEQ ID NO: 71619 - RNA, 12 nt, Artificial Sequence
  Description of Artificial Sequence: Synthetic oligonucleotide
aagaaaugaaac

SEQ ID NO: 71620 - RNA, 12 nt, Artificial Sequence
  Description of Artificial Sequence: Synthetic oligonucleotide
uuuccauccucc

SEQ ID NO: 71621 - RNA, 14 nt, Artificial Sequence
  Description of Artificial Sequence: Synthetic oligonucleotide
cugaaaaucuuuga

SEQ ID NO: 71622 - RNA, 10 nt, Artificial Sequence
  Description of Artificial Sequence: Synthetic oligonucleotide
gccguucagg

SEQ ID NO: 71623 - RNA, 12 nt, Artificial Sequence
  Description of Artificial Sequence: Synthetic oligonucleotide
aggguccagaag

SEQ ID NO: 71624 - RNA, 12 nt, Artificial Sequence
  Description of Artificial Sequence: Synthetic oligonucleotide
caagacugcuug

SEQ ID NO: 71625 - RNA, 12 nt, Artificial Sequence
  Description of Artificial Sequence: Synthetic oligonucleotide
ccaugucuuugg

SEQ ID NO: 71626 - RNA, 10 nt, Artificial Sequence
  Description of Artificial Sequence: Synthetic oligonucleotide
ccugaaacac

SEQ ID NO: 71627 - RNA, 11 nt, Artificial Sequence
  Description of Artificial Sequence: Synthetic oligonucleotide
cucuguaccuc

SEQ ID NO: 71628 - RNA, 11 nt, Artificial Sequence
  Description of Artificial Sequence: Synthetic oligonucleotide
gcaagacaaga

SEQ ID NO: 71629 - RNA, 12 nt, Artificial Sequence
  Description of Artificial Sequence: Synthetic oligonucleotide
caagacaagaaa

SEQ ID NO: 71630 - RNA, 11 nt, Artificial Sequence
  Description of Artificial Sequence: Synthetic oligonucleotide
guacaagaucc

SEQ ID NO: 71631 - RNA, 11 nt, Artificial Sequence
  Description of Artificial Sequence: Synthetic oligonucleotide
guacuugcaga

SEQ ID NO: 71632 - RNA, 12 nt, Artificial Sequence
  Description of Artificial Sequence: Synthetic oligonucleotide
gaucgauacaga

SEQ ID NO: 71633 - RNA, 12 nt, Artificial Sequence
  Description of Artificial Sequence: Synthetic oligonucleotide
auaaaaauaaau

SEQ ID NO: 71634 - RNA, 12 nt, Artificial Sequence
  Description of Artificial Sequence: Synthetic oligonucleotide
aaaaauaaauau

SEQ ID NO: 71635 - RNA, 12 nt, Artificial Sequence
  Description of Artificial Sequence: Synthetic oligonucleotide
uugacugcugug

SEQ ID NO: 71636 - RNA, 12 nt, Artificial Sequence
  Description of Artificial Sequence: Synthetic oligonucleotide
gagaugagagac

SEQ ID NO: 71637 - RNA, 9 nt, Artificial Sequence
  Description of Artificial Sequence: Synthetic oligonucleotide
cccacuugg

SEQ ID NO: 71638 - RNA, 11242 nt, Homo sapiens
uuuuuuuuuuuuuuuuuugagaaaggggaauuucaucccaaauaaaaggaaugaagucuggcuccggaggaggguccccgaccucgcugugggggcuccuguuucucuccgccgcgcucucgcucuggccgacgaguggagaaaucugcgggccaggcaucgacauccgcaacgacuaucagcagcugaagcgccuggagaacugcacggugaucgagggcuaccuccacauccugcucaucuccaaggccgaggacuaccgcagcuaccgcuuccccaagcucacggucauuaccgaguacuugcugcuguuccgaguggcuggccucgagagccucggagaccucuuccccaaccucacggucauccgcggcuggaaacucuucuacaacuacgcccuggucaucuucgagaugaccaaucucaaggauauugggcuuuacaaccugaggaacauuacucggggggccaucaggauugagaaaaaugcugaccucuguuaccucuccacuguggacuggucccugauccuggaugcgguguccaauaacuacauuguggggaauaagcccccaaaggaauguggggaccuguguccagggaccauggaggagaagccgaugugugagaagaccaccaucaacaaugaguacaacuaccgcugcuggaccacaaaccgcugccagaaaaugugcccaagcacgugugggaagcgggcgugcaccgagaacaaugagugcugccaccccgagugccugggcagcugcagcgcgccugacaacgacacggccuguguagcuugccgccacuacuacuaugccggugucugugugccugccugcccgcccaacaccuacagguuugagggcuggcgcuguguggaccgugacuucugcgccaacauccucagcgccgagagcagcgacuccgagggguuugugauccacgacggcgagugcaugcaggagugccccucgggcuucauccgcaacggcagccagagcauguacugcaucccuugugaagguccuugcccgaaggucugugaggaagaaaagaaaacaaagaccauugauucuguuacuucugcucagaugcuccaaggaugcaccaucuucaagggcaauuugcucauuaacauccgacgggggaauaacauugcuucagagcuggagaacuucauggggcucaucgagguggugacgggcuacgugaagauccgccauucucaugccuuggucuccuuguccuuccuaaaaaaccuucgccucauccuaggagaggagcagcuagaagggaauuacuccuucuacguccucgacaaccagaacuugcagcaacugugggacugggaccaccgcaaccugaccaucaaagcagggaaaauguacuuugcuuucaaucccaaauuauguguuuccgaaauuuaccgcauggaggaagugacggggacuaaagggcgccaaagcaaaggggacauaaacaccaggaacaacggggagagagccuccugugaaagugacguccugcauuucaccuccaccaccacgucgaagaaucgcaucaucauaaccuggcaccgguaccggcccccugacuacagggaucucaucagcuucaccguuuacuacaaggaagcacccuuuaagaaugucacagaguaugaugggcaggaugccugcggcuccaacagcuggaacaugguggacguggaccucccgcccaacaaggacguggagcccggcaucuuacuacaugggcugaagcccuggacucaguacgccguuuacgucaaggcugugacccucaccaugguggagaacgaccauauccguggggccaagagugagaucuuguacauucgcaccaaugcuucaguuccuuccauucccuuggacguucuuucagcaucgaacuccucuucucaguuaaucgugaaguggaacccucccucucugcccaacggcaaccugaguuacuacauugugcgcuggcagcggcagccucaggacggcuaccuuuaccggcacaauuacugcuccaaagacaaaauccccaucaggaaguaugccgacggcaccaucgacauugaggaggucacagagaaccccaagacugaggugugugguggggagaaagggccuugcugcgccugccccaaaacugaagccgagaagcaggccgagaaggaggaggcugaauaccgcaaagucuuugagaauuuccugcacaacuccaucuucgugcccagaccugaaaggaagcggagagaugucaugcaaguggccaacaccaccauguccagccgaagcaggaacaccacggccgcagacaccuacaacaucaccgacccggaagagcuggagacagaguacccuuucuuugagagcagaguggauaacaaggagagaacugucauuucuaaccuucggccuuucacauuguaccgcaucgauauccacagcugcaaccacgaggcugagaagcugggcugcagcgccuccaacuucgucuuugcaaggacuaugcccgcagaaggagcagaugacauuccugggccagugaccugggagccaaggccugaaaacuccaucuuuuuaaaguggccggaaccugagaaucccaauggauugauucuaauguaugaaauaaaauacggaucacaaguugaggaucagcgagaauguguguccagacaggaauacaggaaguauggaggggccaagcuaaaccggcuaaacccggggaacuacacagcccggauucaggccacaucucucucugggaaugggucguggacagauccuguguucuucuauguccaggccaaaacaggauaugaaaacuucauccaucugaucaucgcucugcccgucgcuguccuguugaucgugggaggguuggugauuaugcuguacgucuuccauagaaagagaaauaacagcaggcuggggaauggagugcuguaugccucugugaacccggaguacuucagcgcugcugauguguacguuccugaugagugggagguggcucgggagaagaucaccaugagccgggaacuugggcaggggucguuugggauggucuaugaaggaguugccaaggguguggugaaagaugaaccugaaaccagaguggccauuaaaacagugaacgaggccgcaagcaugcgugagaggauugaguuucucaacgaagcuucugugaugaaggaguucaauugucaccauguggugcgauugcuggguguggugucccaaggccagccaacacuggucaucauggaacugaugacacggggcgaucucaaaaguuaucuccggucucugaggccagaaauggagaauaauccaguccuagcaccuccaagccugagcaagaugauucagauggccggagagauugcagacggcauggcauaccucaacgccaauaaguucguccacagagaccuugcugcccggaauugcaugguagccgaagauuucacagucaaaaucggagauuuugguaugacgcgagauaucuaugagacagacuauuaccggaaaggagggaaagggcugcugcccgugcgcuggaugucuccugagucccucaaggauggagucuucaccacuuacucggacgucugguccuucggggucguccucugggagaucgccacacuggccgagcagcccuaccagggcuuguccaacgagcaaguccuucgcuucgucauggagggcggccuucuggacaagccagacaacuguccugacaugcuguuugaacugaugcgcaugugcuggcaguauaaccccaagaugaggccuuccuuccuggagaucaucagcagcaucaaagaggagauggagccuggcuuccgggaggucuccuucuacuacagcgaggagaacaagcugcccgagccggaggagcuggaccuggagccagagaacauggagagcgucccccuggaccccucggccuccucguccucccugccacugcccgacagacacucaggacacaaggccgagaacggccccggcccuggggugcugguccuccgcgccagcuucgacgagagacagccuuacgcccacaugaacgggggccgcaagaacgagcgggccuugccgcugccccagucuucgaccugcugauccuuggauccugaaucugugcaaacaguaacgugugcgcacgcgcagcgggguggggggggagagagaguuuuaacaauccauucacaagccuccuguaccucaguggaucuucagaacugcccuugcugcccgcgggagacagcuucucugcaguaaaacacauuugggauguuccuuuuuucaauaugcaagcagcuuuuuauucccugcccaaacccuuaacugacaugggccuuuaagaaccuuaaugacaacacuuaauagcaacagagcacuugagaaccagucuccucacucugucccuguccuucccuguucucccuuucucucuccucucugcuucauaacggaaaaauaauugccacaaguccagcugggaagcccuuuuuaucaguuugaggaaguggcugucccuguggccccauccaaccacuguacacacccgccugacaccgugggucauuacaaaaaaacacguggagauggaaauuuuuaccuuuaucuuucaccuuucuagggacaugaaauuuacaaagggccaucguucauccaaggcuguuaccauuuuaacgcugccuaauuuugccaaaauccugaacuuucucccucaucggcccggcgcugauuccucguguccggaggcaugggugagcauggcagcugguugcuccauuugagagacacgcuggcgacacacuccguccauccgacugccccugcugugcugcucaaggccacaggcacacaggucucauugcuucugacuagauuauuauuugggggaacuggacacaauaggucuuucucucagugaagguggggagaagcugaaccggcuucccugcccugccuccccagcccccugcccaacccccaagaaucugguggccaugggccccgaagcagccuggcggacaggcuuggagucaaggggccccaugccugcuucucucccagccccagcucccccgcccgcccccaaggacacagaugggaagggguuuccagggacucagccccacuguugaugcagguuugcaaggaaagaaauucaaacaccacaacagcaguaagaagaaaagcagucaauggauucaagcauucuaagcuuuguugacauuuucucuguuccuaggacuucuucaugggucuuacaguucuauguuagaccaugaaacauuugcauacacaucgucuuuaaugucacuuuuauaacuuuuuuacgguucagauauucaucuauacgucuguacagaaaaaaaaaagcugcuauuuuuuuuguucuugaucuuuguggauuuaaucuaugaaaaccuucagguccacccucuccccuuucugcucacuccaagaaacuucuuaugcuuuguacuagagugcgugacuuucuuccucuuuucccgguaauggauacuucuaucacauaauuugccaugaacuguuggaugccuuuuuauaaauacaucccccaucccugcucccaccugccccuuuaguuguuuucuaacccguaggcucucugggcacgaggcagaaagcaggccgggcacccauccugagagggccgcgcuccucuccccagccugcccucacagcauuggagccuguuacagugcaagacaugauacaaacucaggucagaaaaacaaagguuaaauauuucacacgucuuuguucaguguuuccacucaccgugguugagaagccucacccucucuuucccuugccuuugcuuagguugugacacacauauauauauauuuuuuuaauucuuggguacaacagcaguguuaaccgcagacacuaggcauuuggauuacuauuuuucuuaauggcuauuuaauccuuccaucccacgaaaaacagcugcugaguccaagggagcagcagagcgugguccggcagggccuguuguggcccucgccaccccccucaccggaccgacugaccugucuuuggaaccagaacaucccaagggaacuccuucgcacuggcguugagugggaccccgggauccaggcuggcccagggcggcacccucagggcugugcccgcuggagugcuagguggaggcagcacagacgccacgguggcccaagagccccuuugcuucuugcugggggaccagggcuguggugcuggcccacuuucccucggccaggaauccagguccuuggggcccaggggucuugucuuguuucauuuuuagcacuucucaccagagagaugacagcacaagaguugcuucugggauagaaauguuuaggaguaagaacaaagcugggauacggugauugcuaguugugacugaagauucaacacagaaaagaaaguuuauacggcuuuuuugcuggucagcaguuugucccacugcuuucucuagucucuaucccauagcguguucccuuuaaaaaaaaaaaaaagguauuauauguaggaguuuucuuuuaauuuauuuugugauaaauuaccaguuucaaucacuguagaaaagccccauuaugaauuuaaauuucaaggaaaggguguguguguguguauguguggggugugugugugugagagugaugggacaguucuugauuuuuuggguuuuuuuucccccaaacauuuaucuaccucacucuuauuuuuuauauguguauauagacaaaagaauacaucucaccuuucucagcaccugacaauaggccguugauacugguaaccucauccacgccacaggcgccacacccaggugaugcagggggaagccaggcuguauuccggggucaaagcaacacuaacucaccucucugcucauuucagacagcuugccuuuuucugagauguccuguuuuguguugcuuuuuuuguuuuguuuucuaucuugguuuccaccaagguguuagauuucuccuccuccuagccagguggcccugugaggccaacgagggcaccagagcacaccugggggagccaccaggcugucccuggcugguugucuuuggaacaaacugcuucugugcagauggaaugaccaacacauuucguccuuaagagagcagugguuccucagguucugaggagaggaagguguccaggcagcaccaucucugugcgaauccccaggguaaaggcguggggcauuggguuugcuccccuugcugcugcuccaucccugcaggaggcucgcgcugaggcaggaccgugcggccauggcugcugcauucauugagcacaaaggugcagcugcagcagcagcuggagagcaagagucacccagccugugcgccagaaugcagaggcuccugaccucacagccagucccugauagaacacacgcaggagcagaguccccucccccuccaggcugcccucucaacuucucccucaccuccuucccuagggguagacagagauguaccaaaccuuccggcuggaaagcccaguggccggcgccgaggcucguggcgucacgccccccccgccagggcuguaccuccgucucccugguccugcugcucacaggacagacggcucgcuccccucuuccagcagcugcucuuacaggcacugaugauuucgcugggaaguguggcgggcagcuuugccuaagcguggauggcuccucggcaauuccagccuaagugaaggcgcucaggagccuccugcuggaacgcgacccaucucucccaggaccccggggaucuuaaggucauugagaaauacuguuggaucaggguuuuguucuuccacacuguaggugaccccuuggaauaacggccucuccucucgugcacauaccuaccgguuuccacaacuggauuucuacagaucauucagcugguuauaaggguuuuguuuaaacuguccgaguuacugaugucauuuuguuuuuguuuuauguagguagcuuuuaaguagaaaacacuaacaguguagugcccaucauagcaaaugcuucagaaacaccucaauaaaagagaaaacuuggcuugugugauggugcagucacuuuacuggaccaacccacccaccuugacuauaccaaggcaucaucuauccacaguucuagccuaacuucaugcugauuucucugccucuugauuuuucucuguguguuccaaauaaucuuaagcugaguuguggcauuuuccaugcaaccuccuucugccagcagcucacacugcuugaagucauaugaaccacugaggcacaucauggaauugaugugagcauuaagacguucucccacacagcccuucccugaggcagcaggagcugguguguacuggagacacuguugaacuugaucaagacccagaccaccccaggucuccuucgugggaugucaugacguuugacauaccuuuggaacgagccuccuccuuggaagauggaagaccguguucguggccgaccuggccucuccuggccuguuucuuaagaugcggagucacauuucaaugguacgaaaaguggcuucguaaaauagaagagcagucacuguggaacuaccaaauggcgagaugcucggugcacauuggggugcuuugggauaaaagauuuaugagccaacuauucucuggcaccagauucuaggccaguuuguuccacugaagcuuuucccacagcaguccaccucugcaggcuggcagccgaauggcuugccaguggcucuguggcaagaucacacugagaucgaugggugagaaggcuaggaugcuugucuaguguucuuagcugucacguuggcuccuuccaggguggccagacgguguuggccacucccuucuaaaacacaggcgcccuccuggugacagugacccgccgugguaugccuuggcccauuccagcagucccaguuaugcauuucaaguuugggguuuguucuuuucguuaauguuccucuguguugucagcugucuucauuuccugggcuaagcagcauugggagauguggaccagagauccacuccuuaagaaccaguggcgaaagacacuuucuuucuucacucugaaguagcuggugguacaaaugagaacuucaagagaggauguuauuuagacugaaccucuguugccagagaugcugaagauacagaccuuggacaggucagaggguuucauuuuuggccuucaucuuagaugacugguugcgucauuuggagaagugagugcuccuugaugguggaaugaccgggugguggguacagaaccauugucacagggauccuggcacagagaagaguuacgagcagcagggugcagggcuuggaaggaaugugggcaagguuuugaacuugauuguucuugaagcuaucagaccacaucgaggcucagcagucauccgugggcauuugguuucaacaaagaaaccuaacauccuacucuggaaacugaucucggaguuaaggcgaauuguucaagaacacaaacuacaucgcacucgucaguugucaguucuggggcaugacuuuagcguuuuguuucugcgagaacauaacgaucacucauuuuuaugucccacguguguguguccgcaucuuucuggucaacauuguuuuaacuagucacucauuagcguuuucaauagggcucuuaaguccaguagauuacggguagucaguugacgaagaucugguuuacaagaacuaauuaaauguuucauugcauuuuuguaagaacagaauaauuuuauaaaauguuuguaguuuauaauugccgaaaauaauuuaaagacacuuuuuuuuucucugugugugcaaauguguguuugugauccauuuuuuuuuuuuuuuuuuaggacaccuguuuacuagcuagcuuuacaauaugccaaaaaaggauuucucccugaccccauccgugguucacccucuuuuccccccaugcuuuuugcccuaguuuauaacaaaggaaugaugaugauuuaaaaaguaguucuguaucuucaguaucuuggucuuccagaacccucugguugggaaggggaucauuuuuuacuggucauuucccuuuggaguguagcuacuuuaacagauggaaagaaccucauuggccauggaaacagccgagguguuggagcccagcagugcauggcaccguucggcaucuggcuugauuggucuggcugccgucauugucagcacagugccauggacaugggaagacuugacugcacagccaaugguuuucaugaugauuacagcauacacagugaucacauaaacgaugacagcuauggggcacacaggccauuugcuuacaugccucguaucaugacugauuacugcuuuguuagaacacagaagagacccuauuuuauuuaaggcagaaccccgaagauacguauuuccaauacagaaaagaauuuuuaauaaaaacuauaacauacacaaaaauugguuuuaaaguugacuccacuuccucuaacuccaguggauuguuggccaugucuccccaacuccacaauaucucuaucaugggaaacaccugggguuuuugcgcuacauaggagaaagaucuggaaacuauuuggguuuuguuuucaacuuuucauuuggauguuuggcguugcacacacacauccaccgguggaagagacgcccggugaaaacaccugucugcuuucuaagccagugagguugaggugagagguuugccagaguuugucuaccucuggguaucccuuugucugggauaaaaaaaaucaaaccagaaggcgggauggaauggaugcaccgcaaauaaugcauuuucugaguuuucuuguuaaaaaaaaauuuuuuuaaguaagaaaaaaaaagguaauaacauggccaauuuguuacauaaaaugacuuucuguguauaaauuauuccuaaaaaauccuguuuauauaaaaaaucaguagaugaaaaaaauuucaaaauguuuuuguauauucuguuguaagaauuuauuccuguuauugcgauauacucuggauucuuuacauaauggaaaaaagaaacugucuauuuugaauggcugaagcuaaggcaacguuaguuucucuuacucugcuuuuuucuaguaaaguacuacaugguuuaaguuaaauaaaauaauucuguaugca

SEQ ID NO: 71639 - RNA, 19 nt, Artificial Sequence
  Description of Artificial Sequence: Synthetic oligonucleotide
gagaaaggggaauuucauc

SEQ ID NO: 71640 - RNA, 19 nt, Artificial Sequence
  Description of Artificial Sequence: Synthetic oligonucleotide
cccaaauaaaaggaaugaa

SEQ ID NO: 71641 - RNA, 19 nt, Artificial Sequence
  Description of Artificial Sequence: Synthetic oligonucleotide
agucuggcuccggaggagg

SEQ ID NO: 71642 - RNA, 19 nt, Artificial Sequence
  Description of Artificial Sequence: Synthetic oligonucleotide
gguccccgaccucgcugug

SEQ ID NO: 71643 - RNA, 19 nt, Artificial Sequence
  Description of Artificial Sequence: Synthetic oligonucleotide
gggggcuccuguuucucuc

SEQ ID NO: 71644 - RNA, 19 nt, Artificial Sequence
  Description of Artificial Sequence: Synthetic oligonucleotide
ccgccgcgcucucgcucug

SEQ ID NO: 71645 - RNA, 19 nt, Artificial Sequence
  Description of Artificial Sequence: Synthetic oligonucleotide
ggccgacgaguggagaaau

SEQ ID NO: 71646 - RNA, 19 nt, Artificial Sequence
  Description of Artificial Sequence: Synthetic oligonucleotide
ucugcgggccaggcaucga

SEQ ID NO: 71647 - RNA, 19 nt, Artificial Sequence
  Description of Artificial Sequence: Synthetic oligonucleotide
acauccgcaacgacuauca

SEQ ID NO: 71648 - RNA, 19 nt, Artificial Sequence
  Description of Artificial Sequence: Synthetic oligonucleotide
agcagcugaagcgccugga

SEQ ID NO: 71649 - RNA, 19 nt, Artificial Sequence
  Description of Artificial Sequence: Synthetic oligonucleotide
agaacugcacggugaucga

SEQ ID NO: 71650 - RNA, 19 nt, Artificial Sequence
  Description of Artificial Sequence: Synthetic oligonucleotide
agggcuaccuccacauccu

SEQ ID NO: 71651 - RNA, 19 nt, Artificial Sequence
  Description of Artificial Sequence: Synthetic oligonucleotide
ugcucaucuccaaggccga

SEQ ID NO: 71652 - RNA, 19 nt, Artificial Sequence
  Description of Artificial Sequence: Synthetic oligonucleotide
aggacuaccgcagcuaccg

SEQ ID NO: 71653 - RNA, 19 nt, Artificial Sequence
  Description of Artificial Sequence: Synthetic oligonucleotide
gcuuccccaagcucacggu

SEQ ID NO: 71654 - RNA, 19 nt, Artificial Sequence
  Description of Artificial Sequence: Synthetic oligonucleotide
ucauuaccgaguacuugcu

SEQ ID NO: 71655 - RNA, 19 nt, Artificial Sequence
  Description of Artificial Sequence: Synthetic oligonucleotide
ugcuguuccgaguggcugg

SEQ ID NO: 71656 - RNA, 19 nt, Artificial Sequence
  Description of Artificial Sequence: Synthetic oligonucleotide
gccucgagagccucggaga

SEQ ID NO: 71657 - RNA, 19 nt, Artificial Sequence
  Description of Artificial Sequence: Synthetic oligonucleotide
accucuuccccaaccucac

SEQ ID NO: 71658 - RNA, 19 nt, Artificial Sequence
  Description of Artificial Sequence: Synthetic oligonucleotide
cggucauccgcggcuggaa

SEQ ID NO: 71659 - RNA, 19 nt, Artificial Sequence
  Description of Artificial Sequence: Synthetic oligonucleotide
aacucuucuacaacuacgc

SEQ ID NO: 71660 - RNA, 19 nt, Artificial Sequence
  Description of Artificial Sequence: Synthetic oligonucleotide
cccuggucaucuucgagau

SEQ ID NO: 71661 - RNA, 19 nt, Artificial Sequence
  Description of Artificial Sequence: Synthetic oligonucleotide
ugaccaaucucaaggauau

SEQ ID NO: 71662 - RNA, 19 nt, Artificial Sequence
  Description of Artificial Sequence: Synthetic oligonucleotide
uugggcuuuacaaccugag

SEQ ID NO: 71663 - RNA, 19 nt, Artificial Sequence
  Description of Artificial Sequence: Synthetic oligonucleotide
ggaacauuacucggggggc

SEQ ID NO: 71664 - RNA, 19 nt, Artificial Sequence
  Description of Artificial Sequence: Synthetic oligonucleotide
ccaucaggauugagaaaaa

SEQ ID NO: 71665 - RNA, 19 nt, Artificial Sequence
  Description of Artificial Sequence: Synthetic oligonucleotide
augcugaccucuguuaccu

SEQ ID NO: 71666 - RNA, 19 nt, Artificial Sequence
  Description of Artificial Sequence: Synthetic oligonucleotide
ucuccacuguggacugguc

SEQ ID NO: 71667 - RNA, 19 nt, Artificial Sequence
  Description of Artificial Sequence: Synthetic oligonucleotide
cccugauccuggaugcggu

SEQ ID NO: 71668 - RNA, 19 nt, Artificial Sequence
  Description of Artificial Sequence: Synthetic oligonucleotide
uguccaauaacuacauugu

SEQ ID NO: 71669 - RNA, 19 nt, Artificial Sequence
  Description of Artificial Sequence: Synthetic oligonucleotide
uggggaauaagcccccaaa

SEQ ID NO: 71670 - RNA, 19 nt, Artificial Sequence
  Description of Artificial Sequence: Synthetic oligonucleotide
aggaauguggggaccugug

SEQ ID NO: 71671 - RNA, 19 nt, Artificial Sequence
  Description of Artificial Sequence: Synthetic oligonucleotide
guccagggaccauggagga

SEQ ID NO: 71672 - RNA, 19 nt, Artificial Sequence
  Description of Artificial Sequence: Synthetic oligonucleotide
agaagccgaugugugagaa

SEQ ID NO: 71673 - RNA, 19 nt, Artificial Sequence
  Description of Artificial Sequence: Synthetic oligonucleotide
agaccaccaucaacaauga

SEQ ID NO: 71674 - RNA, 19 nt, Artificial Sequence
  Description of Artificial Sequence: Synthetic oligonucleotide
aguacaacuaccgcugcug

SEQ ID NO: 71675 - RNA, 19 nt, Artificial Sequence
  Description of Artificial Sequence: Synthetic oligonucleotide
ggaccacaaaccgcugcca

SEQ ID NO: 71676 - RNA, 19 nt, Artificial Sequence
  Description of Artificial Sequence: Synthetic oligonucleotide
agaaaaugugcccaagcac

SEQ ID NO: 71677 - RNA, 19 nt, Artificial Sequence
  Description of Artificial Sequence: Synthetic oligonucleotide
cgugugggaagcgggcgug

SEQ ID NO: 71678 - RNA, 19 nt, Artificial Sequence
  Description of Artificial Sequence: Synthetic oligonucleotide
gcaccgagaacaaugagug

SEQ ID NO: 71679 - RNA, 19 nt, Artificial Sequence
  Description of Artificial Sequence: Synthetic oligonucleotide
gcugccaccccgagugccu

SEQ ID NO: 71680 - RNA, 19 nt, Artificial Sequence
  Description of Artificial Sequence: Synthetic oligonucleotide
ugggcagcugcagcgcgcc

SEQ ID NO: 71681 - RNA, 19 nt, Artificial Sequence
  Description of Artificial Sequence: Synthetic oligonucleotide
cugacaacgacacggccug

SEQ ID NO: 71682 - RNA, 19 nt, Artificial Sequence
  Description of Artificial Sequence: Synthetic oligonucleotide
guguagcuugccgccacua

SEQ ID NO: 71683 - RNA, 19 nt, Artificial Sequence
  Description of Artificial Sequence: Synthetic oligonucleotide
acuacuaugccggugucug

SEQ ID NO: 71684 - RNA, 19 nt, Artificial Sequence
  Description of Artificial Sequence: Synthetic oligonucleotide
gugugccugccugcccgcc

SEQ ID NO: 71685 - RNA, 19 nt, Artificial Sequence
  Description of Artificial Sequence: Synthetic oligonucleotide
ccaacaccuacagguuuga

SEQ ID NO: 71686 - RNA, 19 nt, Artificial Sequence
  Description of Artificial Sequence: Synthetic oligonucleotide
agggcuggcgcugugugga

SEQ ID NO: 71687 - RNA, 19 nt, Artificial Sequence
  Description of Artificial Sequence: Synthetic oligonucleotide
accgugacuucugcgccaa

SEQ ID NO: 71688 - RNA, 19 nt, Artificial Sequence
  Description of Artificial Sequence: Synthetic oligonucleotide
acauccucagcgccgagag

SEQ ID NO: 71689 - RNA, 19 nt, Artificial Sequence
  Description of Artificial Sequence: Synthetic oligonucleotide
gcagcgacuccgagggguu

SEQ ID NO: 71690 - RNA, 19 nt, Artificial Sequence
  Description of Artificial Sequence: Synthetic oligonucleotide
uugugauccacgacggcga

SEQ ID NO: 71691 - RNA, 19 nt, Artificial Sequence
  Description of Artificial Sequence: Synthetic oligonucleotide
agugcaugcaggagugccc

SEQ ID NO: 71692 - RNA, 19 nt, Artificial Sequence
  Description of Artificial Sequence: Synthetic oligonucleotide
ccucgggcuucauccgcaa

SEQ ID NO: 71693 - RNA, 19 nt, Artificial Sequence
  Description of Artificial Sequence: Synthetic oligonucleotide
acggcagccagagcaugua

SEQ ID NO: 71694 - RNA, 19 nt, Artificial Sequence
  Description of Artificial Sequence: Synthetic oligonucleotide
acugcaucccuugugaagg

SEQ ID NO: 71695 - RNA, 19 nt, Artificial Sequence
  Description of Artificial Sequence: Synthetic oligonucleotide
guccuugcccgaaggucug

SEQ ID NO: 71696 - RNA, 19 nt, Artificial Sequence
  Description of Artificial Sequence: Synthetic oligonucleotide
gugaggaagaaaagaaaac

SEQ ID NO: 71697 - RNA, 19 nt, Artificial Sequence
  Description of Artificial Sequence: Synthetic oligonucleotide
caaagaccauugauucugu

SEQ ID NO: 71698 - RNA, 19 nt, Artificial Sequence
  Description of Artificial Sequence: Synthetic oligonucleotide
uuacuucugcucagaugcu

SEQ ID NO: 71699 - RNA, 19 nt, Artificial Sequence
  Description of Artificial Sequence: Synthetic oligonucleotide
uccaaggaugcaccaucuu

SEQ ID NO: 71700 - RNA, 19 nt, Artificial Sequence
  Description of Artificial Sequence: Synthetic oligonucleotide
ucaagggcaauuugcucau

SEQ ID NO: 71701 - RNA, 19 nt, Artificial Sequence
  Description of Artificial Sequence: Synthetic oligonucleotide
uuaacauccgacgggggaa

SEQ ID NO: 71702 - RNA, 19 nt, Artificial Sequence
  Description of Artificial Sequence: Synthetic oligonucleotide
auaacauugcuucagagcu

SEQ ID NO: 71703 - RNA, 19 nt, Artificial Sequence
  Description of Artificial Sequence: Synthetic oligonucleotide
uggagaacuucauggggcu

SEQ ID NO: 71704 - RNA, 19 nt, Artificial Sequence
  Description of Artificial Sequence: Synthetic oligonucleotide
ucaucgagguggugacggg

SEQ ID NO: 71705 - RNA, 19 nt, Artificial Sequence
  Description of Artificial Sequence: Synthetic oligonucleotide
gcuacgugaagauccgcca

SEQ ID NO: 71706 - RNA, 19 nt, Artificial Sequence
  Description of Artificial Sequence: Synthetic oligonucleotide
auucucaugccuuggucuc

SEQ ID NO: 71707 - RNA, 19 nt, Artificial Sequence
  Description of Artificial Sequence: Synthetic oligonucleotide
ccuuguccuuccuaaaaaa

SEQ ID NO: 71708 - RNA, 19 nt, Artificial Sequence
  Description of Artificial Sequence: Synthetic oligonucleotide
accuucgccucauccuagg

SEQ ID NO: 71709 - RNA, 19 nt, Artificial Sequence
  Description of Artificial Sequence: Synthetic oligonucleotide
gagaggagcagcuagaagg

SEQ ID NO: 71710 - RNA, 19 nt, Artificial Sequence
  Description of Artificial Sequence: Synthetic oligonucleotide
ggaauuacuccuucuacgu

SEQ ID NO: 71711 - RNA, 19 nt, Artificial Sequence
  Description of Artificial Sequence: Synthetic oligonucleotide
uccucgacaaccagaacuu

SEQ ID NO: 71712 - RNA, 19 nt, Artificial Sequence
  Description of Artificial Sequence: Synthetic oligonucleotide
ugcagcaacugugggacug

SEQ ID NO: 71713 - RNA, 19 nt, Artificial Sequence
  Description of Artificial Sequence: Synthetic oligonucleotide
gggaccaccgcaaccugac

SEQ ID NO: 71714 - RNA, 19 nt, Artificial Sequence
  Description of Artificial Sequence: Synthetic oligonucleotide
ccaucaaagcagggaaaau

SEQ ID NO: 71715 - RNA, 19 nt, Artificial Sequence
  Description of Artificial Sequence: Synthetic oligonucleotide
uguacuuugcuuucaaucc

SEQ ID NO: 71716 - RNA, 19 nt, Artificial Sequence
  Description of Artificial Sequence: Synthetic oligonucleotide
ccaaauuauguguuuccga

SEQ ID NO: 71717 - RNA, 19 nt, Artificial Sequence
  Description of Artificial Sequence: Synthetic oligonucleotide
aaauuuaccgcauggagga

SEQ ID NO: 71718 - RNA, 19 nt, Artificial Sequence
  Description of Artificial Sequence: Synthetic oligonucleotide
aagugacggggacuaaagg

SEQ ID NO: 71719 - RNA, 19 nt, Artificial Sequence
  Description of Artificial Sequence: Synthetic oligonucleotide
ggcgccaaagcaaagggga

SEQ ID NO: 71720 - RNA, 19 nt, Artificial Sequence
  Description of Artificial Sequence: Synthetic oligonucleotide
acauaaacaccaggaacaa

SEQ ID NO: 71721 - RNA, 19 nt, Artificial Sequence
  Description of Artificial Sequence: Synthetic oligonucleotide
acggggagagagccuccug

SEQ ID NO: 71722 - RNA, 19 nt, Artificial Sequence
  Description of Artificial Sequence: Synthetic oligonucleotide
gugaaagugacguccugca

SEQ ID NO: 71723 - RNA, 19 nt, Artificial Sequence
  Description of Artificial Sequence: Synthetic oligonucleotide
auuucaccuccaccaccac

SEQ ID NO: 71724 - RNA, 19 nt, Artificial Sequence
  Description of Artificial Sequence: Synthetic oligonucleotide
cgucgaagaaucgcaucau

SEQ ID NO: 71725 - RNA, 19 nt, Artificial Sequence
  Description of Artificial Sequence: Synthetic oligonucleotide
ucauaaccuggcaccggua

SEQ ID NO: 71726 - RNA, 19 nt, Artificial Sequence
  Description of Artificial Sequence: Synthetic oligonucleotide
accggcccccugacuacag

SEQ ID NO: 71727 - RNA, 19 nt, Artificial Sequence
  Description of Artificial Sequence: Synthetic oligonucleotide
gggaucucaucagcuucac

SEQ ID NO: 71728 - RNA, 19 nt, Artificial Sequence
  Description of Artificial Sequence: Synthetic oligonucleotide
ccguuuacuacaaggaagc

SEQ ID NO: 71729 - RNA, 19 nt, Artificial Sequence
  Description of Artificial Sequence: Synthetic oligonucleotide
cacccuuuaagaaugucac

SEQ ID NO: 71730 - RNA, 19 nt, Artificial Sequence
  Description of Artificial Sequence: Synthetic oligonucleotide
cagaguaugaugggcagga

SEQ ID NO: 71731 - RNA, 19 nt, Artificial Sequence
  Description of Artificial Sequence: Synthetic oligonucleotide
augccugcggcuccaacag

SEQ ID NO: 71732 - RNA, 19 nt, Artificial Sequence
  Description of Artificial Sequence: Synthetic oligonucleotide
gcuggaacaugguggacgu

SEQ ID NO: 71733 - RNA, 19 nt, Artificial Sequence
  Description of Artificial Sequence: Synthetic oligonucleotide
uggaccucccgcccaacaa

SEQ ID NO: 71734 - RNA, 19 nt, Artificial Sequence
  Description of Artificial Sequence: Synthetic oligonucleotide
aggacguggagcccggcau

SEQ ID NO: 71735 - RNA, 19 nt, Artificial Sequence
  Description of Artificial Sequence: Synthetic oligonucleotide
ucuuacuacaugggcugaa

SEQ ID NO: 71736 - RNA, 19 nt, Artificial Sequence
  Description of Artificial Sequence: Synthetic oligonucleotide
agcccuggacucaguacgc

SEQ ID NO: 71737 - RNA, 19 nt, Artificial Sequence
  Description of Artificial Sequence: Synthetic oligonucleotide
ccguuuacgucaaggcugu

SEQ ID NO: 71738 - RNA, 19 nt, Artificial Sequence
  Description of Artificial Sequence: Synthetic oligonucleotide
ugacccucaccauggugga

SEQ ID NO: 71739 - RNA, 19 nt, Artificial Sequence
  Description of Artificial Sequence: Synthetic oligonucleotide
agaacgaccauauccgugg

SEQ ID NO: 71740 - RNA, 19 nt, Artificial Sequence
  Description of Artificial Sequence: Synthetic oligonucleotide
gggccaagagugagaucuu

SEQ ID NO: 71741 - RNA, 19 nt, Artificial Sequence
  Description of Artificial Sequence: Synthetic oligonucleotide
uguacauucgcaccaaugc

SEQ ID NO: 71742 - RNA, 19 nt, Artificial Sequence
  Description of Artificial Sequence: Synthetic oligonucleotide
cuucaguuccuuccauucc

SEQ ID NO: 71743 - RNA, 19 nt, Artificial Sequence
  Description of Artificial Sequence: Synthetic oligonucleotide
ccuuggacguucuuucagc

SEQ ID NO: 71744 - RNA, 19 nt, Artificial Sequence
  Description of Artificial Sequence: Synthetic oligonucleotide
caucgaacuccucuucuca

SEQ ID NO: 71745 - RNA, 19 nt, Artificial Sequence
  Description of Artificial Sequence: Synthetic oligonucleotide
aguuaaucgugaaguggaa

SEQ ID NO: 71746 - RNA, 19 nt, Artificial Sequence
  Description of Artificial Sequence: Synthetic oligonucleotide
acccucccucucugcccaa

SEQ ID NO: 71747 - RNA, 19 nt, Artificial Sequence
  Description of Artificial Sequence: Synthetic oligonucleotide
acggcaaccugaguuacua

SEQ ID NO: 71748 - RNA, 19 nt, Artificial Sequence
  Description of Artificial Sequence: Synthetic oligonucleotide
acauugugcgcuggcagcg

SEQ ID NO: 71749 - RNA, 19 nt, Artificial Sequence
  Description of Artificial Sequence: Synthetic oligonucleotide
ggcagccucaggacggcua

SEQ ID NO: 71750 - RNA, 19 nt, Artificial Sequence
  Description of Artificial Sequence: Synthetic oligonucleotide
accuuuaccggcacaauua

SEQ ID NO: 71751 - RNA, 19 nt, Artificial Sequence
  Description of Artificial Sequence: Synthetic oligonucleotide
acugcuccaaagacaaaau

SEQ ID NO: 71752 - RNA, 19 nt, Artificial Sequence
  Description of Artificial Sequence: Synthetic oligonucleotide
uccccaucaggaaguaugc

SEQ ID NO: 71753 - RNA, 19 nt, Artificial Sequence
  Description of Artificial Sequence: Synthetic oligonucleotide
ccgacggcaccaucgacau

SEQ ID NO: 71754 - RNA, 19 nt, Artificial Sequence
  Description of Artificial Sequence: Synthetic oligonucleotide
uugaggaggucacagagaa

SEQ ID NO: 71755 - RNA, 19 nt, Artificial Sequence
  Description of Artificial Sequence: Synthetic oligonucleotide
accccaagacugaggugug

SEQ ID NO: 71756 - RNA, 19 nt, Artificial Sequence
  Description of Artificial Sequence: Synthetic oligonucleotide
gugguggggagaaagggcc

SEQ ID NO: 71757 - RNA, 19 nt, Artificial Sequence
  Description of Artificial Sequence: Synthetic oligonucleotide
cuugcugcgccugccccaa

SEQ ID NO: 71758 - RNA, 19 nt, Artificial Sequence
  Description of Artificial Sequence: Synthetic oligonucleotide
aaacugaagccgagaagca

SEQ ID NO: 71759 - RNA, 19 nt, Artificial Sequence
  Description of Artificial Sequence: Synthetic oligonucleotide
aggccgagaaggaggaggc

SEQ ID NO: 71760 - RNA, 19 nt, Artificial Sequence
  Description of Artificial Sequence: Synthetic oligonucleotide
cugaauaccgcaaagucuu

SEQ ID NO: 71761 - RNA, 19 nt, Artificial Sequence
  Description of Artificial Sequence: Synthetic oligonucleotide
uugagaauuuccugcacaa

SEQ ID NO: 71762 - RNA, 19 nt, Artificial Sequence
  Description of Artificial Sequence: Synthetic oligonucleotide
acuccaucuucgugcccag

SEQ ID NO: 71763 - RNA, 19 nt, Artificial Sequence
  Description of Artificial Sequence: Synthetic oligonucleotide
gaccugaaaggaagcggag

SEQ ID NO: 71764 - RNA, 19 nt, Artificial Sequence
  Description of Artificial Sequence: Synthetic oligonucleotide
gagaugucaugcaaguggc

SEQ ID NO: 71765 - RNA, 19 nt, Artificial Sequence
  Description of Artificial Sequence: Synthetic oligonucleotide
ccaacaccaccauguccag

SEQ ID NO: 71766 - RNA, 19 nt, Artificial Sequence
  Description of Artificial Sequence: Synthetic oligonucleotide
gccgaagcaggaacaccac

SEQ ID NO: 71767 - RNA, 19 nt, Artificial Sequence
  Description of Artificial Sequence: Synthetic oligonucleotide
cggccgcagacaccuacaa

SEQ ID NO: 71768 - RNA, 19 nt, Artificial Sequence
  Description of Artificial Sequence: Synthetic oligonucleotide
acaucaccgacccggaaga

SEQ ID NO: 71769 - RNA, 19 nt, Artificial Sequence
  Description of Artificial Sequence: Synthetic oligonucleotide
agcuggagacagaguaccc

SEQ ID NO: 71770 - RNA, 19 nt, Artificial Sequence
  Description of Artificial Sequence: Synthetic oligonucleotide
cuuucuuugagagcagagu

SEQ ID NO: 71771 - RNA, 19 nt, Artificial Sequence
  Description of Artificial Sequence: Synthetic oligonucleotide
uggauaacaaggagagaac

SEQ ID NO: 71772 - RNA, 19 nt, Artificial Sequence
  Description of Artificial Sequence: Synthetic oligonucleotide
cugucauuucuaaccuucg

SEQ ID NO: 71773 - RNA, 19 nt, Artificial Sequence
  Description of Artificial Sequence: Synthetic oligonucleotide
ggccuuucacauuguaccg

SEQ ID NO: 71774 - RNA, 19 nt, Artificial Sequence
  Description of Artificial Sequence: Synthetic oligonucleotide
gcaucgauauccacagcug

SEQ ID NO: 71775 - RNA, 19 nt, Artificial Sequence
  Description of Artificial Sequence: Synthetic oligonucleotide
gcaaccacgaggcugagaa

SEQ ID NO: 71776 - RNA, 19 nt, Artificial Sequence
  Description of Artificial Sequence: Synthetic oligonucleotide
agcugggcugcagcgccuc

SEQ ID NO: 71777 - RNA, 19 nt, Artificial Sequence
  Description of Artificial Sequence: Synthetic oligonucleotide
ccaacuucgucuuugcaag

SEQ ID NO: 71778 - RNA, 19 nt, Artificial Sequence
  Description of Artificial Sequence: Synthetic oligonucleotide
ggacuaugcccgcagaagg

SEQ ID NO: 71779 - RNA, 19 nt, Artificial Sequence
  Description of Artificial Sequence: Synthetic oligonucleotide
gagcagaugacauuccugg

SEQ ID NO: 71780 - RNA, 19 nt, Artificial Sequence
  Description of Artificial Sequence: Synthetic oligonucleotide
ggccagugaccugggagcc

SEQ ID NO: 71781 - RNA, 19 nt, Artificial Sequence
  Description of Artificial Sequence: Synthetic oligonucleotide
caaggccugaaaacuccau

SEQ ID NO: 71782 - RNA, 19 nt, Artificial Sequence
  Description of Artificial Sequence: Synthetic oligonucleotide
ucuuuuuaaaguggccgga

SEQ ID NO: 71783 - RNA, 19 nt, Artificial Sequence
  Description of Artificial Sequence: Synthetic oligonucleotide
aaccugagaaucccaaugg

SEQ ID NO: 71784 - RNA, 19 nt, Artificial Sequence
  Description of Artificial Sequence: Synthetic oligonucleotide
gauugauucuaauguauga

SEQ ID NO: 71785 - RNA, 19 nt, Artificial Sequence
  Description of Artificial Sequence: Synthetic oligonucleotide
aaauaaaauacggaucaca

SEQ ID NO: 71786 - RNA, 19 nt, Artificial Sequence
  Description of Artificial Sequence: Synthetic oligonucleotide
aaguugaggaucagcgaga

SEQ ID NO: 71787 - RNA, 19 nt, Artificial Sequence
  Description of Artificial Sequence: Synthetic oligonucleotide
aauguguguccagacagga

SEQ ID NO: 71788 - RNA, 19 nt, Artificial Sequence
  Description of Artificial Sequence: Synthetic oligonucleotide
aauacaggaaguauggagg

SEQ ID NO: 71789 - RNA, 19 nt, Artificial Sequence
  Description of Artificial Sequence: Synthetic oligonucleotide
gggccaagcuaaaccggcu

SEQ ID NO: 71790 - RNA, 19 nt, Artificial Sequence
  Description of Artificial Sequence: Synthetic oligonucleotide
uaaacccggggaacuacac

SEQ ID NO: 71791 - RNA, 19 nt, Artificial Sequence
  Description of Artificial Sequence: Synthetic oligonucleotide
cagcccggauucaggccac

SEQ ID NO: 71792 - RNA, 19 nt, Artificial Sequence
  Description of Artificial Sequence: Synthetic oligonucleotide
caucucucucugggaaugg

SEQ ID NO: 71793 - RNA, 19 nt, Artificial Sequence
  Description of Artificial Sequence: Synthetic oligonucleotide
ggucguggacagauccugu

SEQ ID NO: 71794 - RNA, 19 nt, Artificial Sequence
  Description of Artificial Sequence: Synthetic oligonucleotide
uguucuucuauguccaggc

SEQ ID NO: 71795 - RNA, 19 nt, Artificial Sequence
  Description of Artificial Sequence: Synthetic oligonucleotide
ccaaaacaggauaugaaaa

SEQ ID NO: 71796 - RNA, 19 nt, Artificial Sequence
  Description of Artificial Sequence: Synthetic oligonucleotide
acuucauccaucugaucau

SEQ ID NO: 71797 - RNA, 19 nt, Artificial Sequence
  Description of Artificial Sequence: Synthetic oligonucleotide
ucgcucugcccgucgcugu

SEQ ID NO: 71798 - RNA, 19 nt, Artificial Sequence
  Description of Artificial Sequence: Synthetic oligonucleotide
uccuguugaucgugggagg

SEQ ID NO: 71799 - RNA, 19 nt, Artificial Sequence
  Description of Artificial Sequence: Synthetic oligonucleotide
gguuggugauuaugcugua

SEQ ID NO: 71800 - RNA, 19 nt, Artificial Sequence
  Description of Artificial Sequence: Synthetic oligonucleotide
acgucuuccauagaaagag

SEQ ID NO: 71801 - RNA, 19 nt, Artificial Sequence
  Description of Artificial Sequence: Synthetic oligonucleotide
gaaauaacagcaggcuggg

SEQ ID NO: 71802 - RNA, 19 nt, Artificial Sequence
  Description of Artificial Sequence: Synthetic oligonucleotide
ggaauggagugcuguaugc

SEQ ID NO: 71803 - RNA, 19 nt, Artificial Sequence
  Description of Artificial Sequence: Synthetic oligonucleotide
ccucugugaacccggagua

SEQ ID NO: 71804 - RNA, 19 nt, Artificial Sequence
  Description of Artificial Sequence: Synthetic oligonucleotide
acuucagcgcugcugaugu

SEQ ID NO: 71805 - RNA, 19 nt, Artificial Sequence
  Description of Artificial Sequence: Synthetic oligonucleotide
uguacguuccugaugagug

SEQ ID NO: 71806 - RNA, 19 nt, Artificial Sequence
  Description of Artificial Sequence: Synthetic oligonucleotide
gggagguggcucgggagaa

SEQ ID NO: 71807 - RNA, 19 nt, Artificial Sequence
  Description of Artificial Sequence: Synthetic oligonucleotide
agaucaccaugagccggga

SEQ ID NO: 71808 - RNA, 19 nt, Artificial Sequence
  Description of Artificial Sequence: Synthetic oligonucleotide
aacuugggcaggggucguu

SEQ ID NO: 71809 - RNA, 19 nt, Artificial Sequence
  Description of Artificial Sequence: Synthetic oligonucleotide
uugggauggucuaugaagg

SEQ ID NO: 71810 - RNA, 19 nt, Artificial Sequence
  Description of Artificial Sequence: Synthetic oligonucleotide
gaguugccaaggguguggu

SEQ ID NO: 71811 - RNA, 19 nt, Artificial Sequence
  Description of Artificial Sequence: Synthetic oligonucleotide
ugaaagaugaaccugaaac

SEQ ID NO: 71812 - RNA, 19 nt, Artificial Sequence
  Description of Artificial Sequence: Synthetic oligonucleotide
ccagaguggccauuaaaac

SEQ ID NO: 71813 - RNA, 19 nt, Artificial Sequence
  Description of Artificial Sequence: Synthetic oligonucleotide
cagugaacgaggccgcaag

SEQ ID NO: 71814 - RNA, 19 nt, Artificial Sequence
  Description of Artificial Sequence: Synthetic oligonucleotide
gcaugcgugagaggauuga

SEQ ID NO: 71815 - RNA, 19 nt, Artificial Sequence
  Description of Artificial Sequence: Synthetic oligonucleotide
aguuucucaacgaagcuuc

SEQ ID NO: 71816 - RNA, 19 nt, Artificial Sequence
  Description of Artificial Sequence: Synthetic oligonucleotide
cugugaugaaggaguucaa

SEQ ID NO: 71817 - RNA, 19 nt, Artificial Sequence
  Description of Artificial Sequence: Synthetic oligonucleotide
auugucaccauguggugcg

SEQ ID NO: 71818 - RNA, 19 nt, Artificial Sequence
  Description of Artificial Sequence: Synthetic oligonucleotide
gauugcugggugugguguc

SEQ ID NO: 71819 - RNA, 19 nt, Artificial Sequence
  Description of Artificial Sequence: Synthetic oligonucleotide
cccaaggccagccaacacu

SEQ ID NO: 71820 - RNA, 19 nt, Artificial Sequence
  Description of Artificial Sequence: Synthetic oligonucleotide
uggucaucauggaacugau

SEQ ID NO: 71821 - RNA, 19 nt, Artificial Sequence
  Description of Artificial Sequence: Synthetic oligonucleotide
ugacacggggcgaucucaa

SEQ ID NO: 71822 - RNA, 19 nt, Artificial Sequence
  Description of Artificial Sequence: Synthetic oligonucleotide
aaaguuaucuccggucucu

SEQ ID NO: 71823 - RNA, 19 nt, Artificial Sequence
  Description of Artificial Sequence: Synthetic oligonucleotide
ugaggccagaaauggagaa

SEQ ID NO: 71824 - RNA, 19 nt, Artificial Sequence
  Description of Artificial Sequence: Synthetic oligonucleotide
auaauccaguccuagcacc

SEQ ID NO: 71825 - RNA, 19 nt, Artificial Sequence
  Description of Artificial Sequence: Synthetic oligonucleotide
cuccaagccugagcaagau

SEQ ID NO: 71826 - RNA, 19 nt, Artificial Sequence
  Description of Artificial Sequence: Synthetic oligonucleotide
ugauucagauggccggaga

SEQ ID NO: 71827 - RNA, 19 nt, Artificial Sequence
  Description of Artificial Sequence: Synthetic oligonucleotide
agauugcagacggcauggc

SEQ ID NO: 71828 - RNA, 19 nt, Artificial Sequence
  Description of Artificial Sequence: Synthetic oligonucleotide
cauaccucaacgccaauaa

SEQ ID NO: 71829 - RNA, 19 nt, Artificial Sequence
  Description of Artificial Sequence: Synthetic oligonucleotide
aguucguccacagagaccu

SEQ ID NO: 71830 - RNA, 19 nt, Artificial Sequence
  Description of Artificial Sequence: Synthetic oligonucleotide
uugcugcccggaauugcau

SEQ ID NO: 71831 - RNA, 19 nt, Artificial Sequence
  Description of Artificial Sequence: Synthetic oligonucleotide
ugguagccgaagauuucac

SEQ ID NO: 71832 - RNA, 19 nt, Artificial Sequence
  Description of Artificial Sequence: Synthetic oligonucleotide
cagucaaaaucggagauuu

SEQ ID NO: 71833 - RNA, 19 nt, Artificial Sequence
  Description of Artificial Sequence: Synthetic oligonucleotide
uugguaugacgcgagauau

SEQ ID NO: 71834 - RNA, 19 nt, Artificial Sequence
  Description of Artificial Sequence: Synthetic oligonucleotide
ucuaugagacagacuauua

SEQ ID NO: 71835 - RNA, 19 nt, Artificial Sequence
  Description of Artificial Sequence: Synthetic oligonucleotide
accggaaaggagggaaagg

SEQ ID NO: 71836 - RNA, 19 nt, Artificial Sequence
  Description of Artificial Sequence: Synthetic oligonucleotide
ggcugcugcccgugcgcug

SEQ ID NO: 71837 - RNA, 19 nt, Artificial Sequence
  Description of Artificial Sequence: Synthetic oligonucleotide
ggaugucuccugagucccu

SEQ ID NO: 71838 - RNA, 19 nt, Artificial Sequence
  Description of Artificial Sequence: Synthetic oligonucleotide
ucaaggauggagucuucac

SEQ ID NO: 71839 - RNA, 19 nt, Artificial Sequence
  Description of Artificial Sequence: Synthetic oligonucleotide
ccacuuacucggacgucug

SEQ ID NO: 71840 - RNA, 19 nt, Artificial Sequence
  Description of Artificial Sequence: Synthetic oligonucleotide
gguccuucggggucguccu

SEQ ID NO: 71841 - RNA, 19 nt, Artificial Sequence
  Description of Artificial Sequence: Synthetic oligonucleotide
ucugggagaucgccacacu

SEQ ID NO: 71842 - RNA, 19 nt, Artificial Sequence
  Description of Artificial Sequence: Synthetic oligonucleotide
uggccgagcagcccuacca

SEQ ID NO: 71843 - RNA, 19 nt, Artificial Sequence
  Description of Artificial Sequence: Synthetic oligonucleotide
agggcuuguccaacgagca

SEQ ID NO: 71844 - RNA, 19 nt, Artificial Sequence
  Description of Artificial Sequence: Synthetic oligonucleotide
aaguccuucgcuucgucau

SEQ ID NO: 71845 - RNA, 19 nt, Artificial Sequence
  Description of Artificial Sequence: Synthetic oligonucleotide
uggagggcggccuucugga

SEQ ID NO: 71846 - RNA, 19 nt, Artificial Sequence
  Description of Artificial Sequence: Synthetic oligonucleotide
acaagccagacaacugucc

SEQ ID NO: 71847 - RNA, 19 nt, Artificial Sequence
  Description of Artificial Sequence: Synthetic oligonucleotide
cugacaugcuguuugaacu

SEQ ID NO: 71848 - RNA, 19 nt, Artificial Sequence
  Description of Artificial Sequence: Synthetic oligonucleotide
ugaugcgcaugugcuggca

SEQ ID NO: 71849 - RNA, 19 nt, Artificial Sequence
  Description of Artificial Sequence: Synthetic oligonucleotide
aguauaaccccaagaugag

SEQ ID NO: 71850 - RNA, 19 nt, Artificial Sequence
  Description of Artificial Sequence: Synthetic oligonucleotide
ggccuuccuuccuggagau

SEQ ID NO: 71851 - RNA, 19 nt, Artificial Sequence
  Description of Artificial Sequence: Synthetic oligonucleotide
ucaucagcagcaucaaaga

SEQ ID NO: 71852 - RNA, 19 nt, Artificial Sequence
  Description of Artificial Sequence: Synthetic oligonucleotide
aggagauggagccuggcuu

SEQ ID NO: 71853 - RNA, 19 nt, Artificial Sequence
  Description of Artificial Sequence: Synthetic oligonucleotide
uccgggaggucuccuucua

SEQ ID NO: 71854 - RNA, 19 nt, Artificial Sequence
  Description of Artificial Sequence: Synthetic oligonucleotide
acuacagcgaggagaacaa

SEQ ID NO: 71855 - RNA, 19 nt, Artificial Sequence
  Description of Artificial Sequence: Synthetic oligonucleotide
agcugcccgagccggagga

SEQ ID NO: 71856 - RNA, 19 nt, Artificial Sequence
  Description of Artificial Sequence: Synthetic oligonucleotide
agcuggaccuggagccaga

SEQ ID NO: 71857 - RNA, 19 nt, Artificial Sequence
  Description of Artificial Sequence: Synthetic oligonucleotide
agaacauggagagcguccc

SEQ ID NO: 71858 - RNA, 19 nt, Artificial Sequence
  Description of Artificial Sequence: Synthetic oligonucleotide
cccuggaccccucggccuc

SEQ ID NO: 71859 - RNA, 19 nt, Artificial Sequence
  Description of Artificial Sequence: Synthetic oligonucleotide
ccucguccucccugccacu

SEQ ID NO: 71860 - RNA, 19 nt, Artificial Sequence
  Description of Artificial Sequence: Synthetic oligonucleotide
ugcccgacagacacucagg

SEQ ID NO: 71861 - RNA, 19 nt, Artificial Sequence
  Description of Artificial Sequence: Synthetic oligonucleotide
gacacaaggccgagaacgg

SEQ ID NO: 71862 - RNA, 19 nt, Artificial Sequence
  Description of Artificial Sequence: Synthetic oligonucleotide
gccccggcccuggggugcu

SEQ ID NO: 71863 - RNA, 19 nt, Artificial Sequence
  Description of Artificial Sequence: Synthetic oligonucleotide
ugguccuccgcgccagcuu

SEQ ID NO: 71864 - RNA, 19 nt, Artificial Sequence
  Description of Artificial Sequence: Synthetic oligonucleotide
ucgacgagagacagccuua

SEQ ID NO: 71865 - RNA, 19 nt, Artificial Sequence
  Description of Artificial Sequence: Synthetic oligonucleotide
acgcccacaugaacggggg

SEQ ID NO: 71866 - RNA, 19 nt, Artificial Sequence
  Description of Artificial Sequence: Synthetic oligonucleotide
gccgcaagaacgagcgggc

SEQ ID NO: 71867 - RNA, 19 nt, Artificial Sequence
  Description of Artificial Sequence: Synthetic oligonucleotide
ccuugccgcugccccaguc

SEQ ID NO: 71868 - RNA, 19 nt, Artificial Sequence
  Description of Artificial Sequence: Synthetic oligonucleotide
cuucgaccugcugauccuu

SEQ ID NO: 71869 - RNA, 19 nt, Artificial Sequence
  Description of Artificial Sequence: Synthetic oligonucleotide
uggauccugaaucugugca

SEQ ID NO: 71870 - RNA, 19 nt, Artificial Sequence
  Description of Artificial Sequence: Synthetic oligonucleotide
aaacaguaacgugugcgca

SEQ ID NO: 71871 - RNA, 19 nt, Artificial Sequence
  Description of Artificial Sequence: Synthetic oligonucleotide
acgcgcagcgggguggggg

SEQ ID NO: 71872 - RNA, 19 nt, Artificial Sequence
  Description of Artificial Sequence: Synthetic oligonucleotide
ggggagagagaguuuuaac

SEQ ID NO: 71873 - RNA, 19 nt, Artificial Sequence
  Description of Artificial Sequence: Synthetic oligonucleotide
caauccauucacaagccuc

SEQ ID NO: 71874 - RNA, 19 nt, Artificial Sequence
  Description of Artificial Sequence: Synthetic oligonucleotide
ccuguaccucaguggaucu

SEQ ID NO: 71875 - RNA, 19 nt, Artificial Sequence
  Description of Artificial Sequence: Synthetic oligonucleotide
uucagaacugcccuugcug

SEQ ID NO: 71876 - RNA, 19 nt, Artificial Sequence
  Description of Artificial Sequence: Synthetic oligonucleotide
gcccgcgggagacagcuuc

SEQ ID NO: 71877 - RNA, 19 nt, Artificial Sequence
  Description of Artificial Sequence: Synthetic oligonucleotide
cucugcaguaaaacacauu

SEQ ID NO: 71878 - RNA, 19 nt, Artificial Sequence
  Description of Artificial Sequence: Synthetic oligonucleotide
uugggauguuccuuuuuuc

SEQ ID NO: 71879 - RNA, 19 nt, Artificial Sequence
  Description of Artificial Sequence: Synthetic oligonucleotide
caauaugcaagcagcuuuu

SEQ ID NO: 71880 - RNA, 19 nt, Artificial Sequence
  Description of Artificial Sequence: Synthetic oligonucleotide
uuauucccugcccaaaccc

SEQ ID NO: 71881 - RNA, 19 nt, Artificial Sequence
  Description of Artificial Sequence: Synthetic oligonucleotide
cuuaacugacaugggccuu

SEQ ID NO: 71882 - RNA, 19 nt, Artificial Sequence
  Description of Artificial Sequence: Synthetic oligonucleotide
uuaagaaccuuaaugacaa

SEQ ID NO: 71883 - RNA, 19 nt, Artificial Sequence
  Description of Artificial Sequence: Synthetic oligonucleotide
acacuuaauagcaacagag

SEQ ID NO: 71884 - RNA, 19 nt, Artificial Sequence
  Description of Artificial Sequence: Synthetic oligonucleotide
gcacuugagaaccagucuc

SEQ ID NO: 71885 - RNA, 19 nt, Artificial Sequence
  Description of Artificial Sequence: Synthetic oligonucleotide
ccucacucugucccugucc

SEQ ID NO: 71886 - RNA, 19 nt, Artificial Sequence
  Description of Artificial Sequence: Synthetic oligonucleotide
cuucccuguucucccuuuc

SEQ ID NO: 71887 - RNA, 19 nt, Artificial Sequence
  Description of Artificial Sequence: Synthetic oligonucleotide
cucucuccucucugcuuca

SEQ ID NO: 71888 - RNA, 19 nt, Artificial Sequence
  Description of Artificial Sequence: Synthetic oligonucleotide
auaacggaaaaauaauugc

SEQ ID NO: 71889 - RNA, 19 nt, Artificial Sequence
  Description of Artificial Sequence: Synthetic oligonucleotide
ccacaaguccagcugggaa

SEQ ID NO: 71890 - RNA, 19 nt, Artificial Sequence
  Description of Artificial Sequence: Synthetic oligonucleotide
agcccuuuuuaucaguuug

SEQ ID NO: 71891 - RNA, 19 nt, Artificial Sequence
  Description of Artificial Sequence: Synthetic oligonucleotide
gaggaaguggcugucccug

SEQ ID NO: 71892 - RNA, 19 nt, Artificial Sequence
  Description of Artificial Sequence: Synthetic oligonucleotide
guggccccauccaaccacu

SEQ ID NO: 71893 - RNA, 19 nt, Artificial Sequence
  Description of Artificial Sequence: Synthetic oligonucleotide
uguacacacccgccugaca

SEQ ID NO: 71894 - RNA, 19 nt, Artificial Sequence
  Description of Artificial Sequence: Synthetic oligonucleotide
accgugggucauuacaaaa

SEQ ID NO: 71895 - RNA, 19 nt, Artificial Sequence
  Description of Artificial Sequence: Synthetic oligonucleotide
aaaacacguggagauggaa

SEQ ID NO: 71896 - RNA, 19 nt, Artificial Sequence
  Description of Artificial Sequence: Synthetic oligonucleotide
aauuuuuaccuuuaucuuu

SEQ ID NO: 71897 - RNA, 19 nt, Artificial Sequence
  Description of Artificial Sequence: Synthetic oligonucleotide
ucaccuuucuagggacaug

SEQ ID NO: 71898 - RNA, 19 nt, Artificial Sequence
  Description of Artificial Sequence: Synthetic oligonucleotide
gaaauuuacaaagggccau

SEQ ID NO: 71899 - RNA, 19 nt, Artificial Sequence
  Description of Artificial Sequence: Synthetic oligonucleotide
ucguucauccaaggcuguu

SEQ ID NO: 71900 - RNA, 19 nt, Artificial Sequence
  Description of Artificial Sequence: Synthetic oligonucleotide
uaccauuuuaacgcugccu

SEQ ID NO: 71901 - RNA, 19 nt, Artificial Sequence
  Description of Artificial Sequence: Synthetic oligonucleotide
uaauuuugccaaaauccug

SEQ ID NO: 71902 - RNA, 19 nt, Artificial Sequence
  Description of Artificial Sequence: Synthetic oligonucleotide
gaacuuucucccucaucgg

SEQ ID NO: 71903 - RNA, 19 nt, Artificial Sequence
  Description of Artificial Sequence: Synthetic oligonucleotide
gcccggcgcugauuccucg

SEQ ID NO: 71904 - RNA, 19 nt, Artificial Sequence
  Description of Artificial Sequence: Synthetic oligonucleotide
guguccggaggcaugggug

SEQ ID NO: 71905 - RNA, 19 nt, Artificial Sequence
  Description of Artificial Sequence: Synthetic oligonucleotide
gagcauggcagcugguugc

SEQ ID NO: 71906 - RNA, 19 nt, Artificial Sequence
  Description of Artificial Sequence: Synthetic oligonucleotide
cuccauuugagagacacgc

SEQ ID NO: 71907 - RNA, 19 nt, Artificial Sequence
  Description of Artificial Sequence: Synthetic oligonucleotide
cuggcgacacacuccgucc

SEQ ID NO: 71908 - RNA, 19 nt, Artificial Sequence
  Description of Artificial Sequence: Synthetic oligonucleotide
cauccgacugccccugcug

SEQ ID NO: 71909 - RNA, 19 nt, Artificial Sequence
  Description of Artificial Sequence: Synthetic oligonucleotide
gugcugcucaaggccacag

SEQ ID NO: 71910 - RNA, 19 nt, Artificial Sequence
  Description of Artificial Sequence: Synthetic oligonucleotide
ggcacacaggucucauugc

SEQ ID NO: 71911 - RNA, 19 nt, Artificial Sequence
  Description of Artificial Sequence: Synthetic oligonucleotide
cuucugacuagauuauuau

SEQ ID NO: 71912 - RNA, 19 nt, Artificial Sequence
  Description of Artificial Sequence: Synthetic oligonucleotide
uuugggggaacuggacaca

SEQ ID NO: 71913 - RNA, 19 nt, Artificial Sequence
  Description of Artificial Sequence: Synthetic oligonucleotide
aauaggucuuucucucagu

SEQ ID NO: 71914 - RNA, 19 nt, Artificial Sequence
  Description of Artificial Sequence: Synthetic oligonucleotide
ugaagguggggagaagcug

SEQ ID NO: 71915 - RNA, 19 nt, Artificial Sequence
  Description of Artificial Sequence: Synthetic oligonucleotide
gaaccggcuucccugcccu

SEQ ID NO: 71916 - RNA, 19 nt, Artificial Sequence
  Description of Artificial Sequence: Synthetic oligonucleotide
ugccuccccagcccccugc

SEQ ID NO: 71917 - RNA, 19 nt, Artificial Sequence
  Description of Artificial Sequence: Synthetic oligonucleotide
cccaacccccaagaaucug

SEQ ID NO: 71918 - RNA, 19 nt, Artificial Sequence
  Description of Artificial Sequence: Synthetic oligonucleotide
gguggccaugggccccgaa

SEQ ID NO: 71919 - RNA, 19 nt, Artificial Sequence
  Description of Artificial Sequence: Synthetic oligonucleotide
agcagccuggcggacaggc

SEQ ID NO: 71920 - RNA, 19 nt, Artificial Sequence
  Description of Artificial Sequence: Synthetic oligonucleotide
cuuggagucaaggggcccc

SEQ ID NO: 71921 - RNA, 19 nt, Artificial Sequence
  Description of Artificial Sequence: Synthetic oligonucleotide
caugccugcuucucuccca

SEQ ID NO: 71922 - RNA, 19 nt, Artificial Sequence
  Description of Artificial Sequence: Synthetic oligonucleotide
agccccagcucccccgccc

SEQ ID NO: 71923 - RNA, 19 nt, Artificial Sequence
  Description of Artificial Sequence: Synthetic oligonucleotide
cgcccccaaggacacagau

SEQ ID NO: 71924 - RNA, 19 nt, Artificial Sequence
  Description of Artificial Sequence: Synthetic oligonucleotide
ugggaagggguuuccaggg

SEQ ID NO: 71925 - RNA, 19 nt, Artificial Sequence
  Description of Artificial Sequence: Synthetic oligonucleotide
gacucagccccacuguuga

SEQ ID NO: 71926 - RNA, 19 nt, Artificial Sequence
  Description of Artificial Sequence: Synthetic oligonucleotide
augcagguuugcaaggaaa

SEQ ID NO: 71927 - RNA, 19 nt, Artificial Sequence
  Description of Artificial Sequence: Synthetic oligonucleotide
agaaauucaaacaccacaa

SEQ ID NO: 71928 - RNA, 19 nt, Artificial Sequence
  Description of Artificial Sequence: Synthetic oligonucleotide
acagcaguaagaagaaaag

SEQ ID NO: 71929 - RNA, 19 nt, Artificial Sequence
  Description of Artificial Sequence: Synthetic oligonucleotide
gcagucaauggauucaagc

SEQ ID NO: 71930 - RNA, 19 nt, Artificial Sequence
  Description of Artificial Sequence: Synthetic oligonucleotide
cauucuaagcuuuguugac

SEQ ID NO: 71931 - RNA, 19 nt, Artificial Sequence
  Description of Artificial Sequence: Synthetic oligonucleotide
cauuuucucuguuccuagg

SEQ ID NO: 71932 - RNA, 19 nt, Artificial Sequence
  Description of Artificial Sequence: Synthetic oligonucleotide
gacuucuucaugggucuua

SEQ ID NO: 71933 - RNA, 19 nt, Artificial Sequence
  Description of Artificial Sequence: Synthetic oligonucleotide
acaguucuauguuagacca

SEQ ID NO: 71934 - RNA, 19 nt, Artificial Sequence
  Description of Artificial Sequence: Synthetic oligonucleotide
augaaacauuugcauacac

SEQ ID NO: 71935 - RNA, 19 nt, Artificial Sequence
  Description of Artificial Sequence: Synthetic oligonucleotide
caucgucuuuaaugucacu

SEQ ID NO: 71936 - RNA, 19 nt, Artificial Sequence
  Description of Artificial Sequence: Synthetic oligonucleotide
uuuuauaacuuuuuuacgg

SEQ ID NO: 71937 - RNA, 19 nt, Artificial Sequence
  Description of Artificial Sequence: Synthetic oligonucleotide
guucagauauucaucuaua

SEQ ID NO: 71938 - RNA, 19 nt, Artificial Sequence
  Description of Artificial Sequence: Synthetic oligonucleotide
acgucuguacagaaaaaaa

SEQ ID NO: 71939 - RNA, 19 nt, Artificial Sequence
  Description of Artificial Sequence: Synthetic oligonucleotide
aaaagcugcuauuuuuuuu

SEQ ID NO: 71940 - RNA, 19 nt, Artificial Sequence
  Description of Artificial Sequence: Synthetic oligonucleotide
uguucuugaucuuugugga

SEQ ID NO: 71941 - RNA, 19 nt, Artificial Sequence
  Description of Artificial Sequence: Synthetic oligonucleotide
auuuaaucuaugaaaaccu

SEQ ID NO: 71942 - RNA, 19 nt, Artificial Sequence
  Description of Artificial Sequence: Synthetic oligonucleotide
uucagguccacccucuccc

SEQ ID NO: 71943 - RNA, 19 nt, Artificial Sequence
  Description of Artificial Sequence: Synthetic oligonucleotide
ccuuucugcucacuccaag

SEQ ID NO: 71944 - RNA, 19 nt, Artificial Sequence
  Description of Artificial Sequence: Synthetic oligonucleotide
gaaacuucuuaugcuuugu

SEQ ID NO: 71945 - RNA, 19 nt, Artificial Sequence
  Description of Artificial Sequence: Synthetic oligonucleotide
uacuagagugcgugacuuu

SEQ ID NO: 71946 - RNA, 19 nt, Artificial Sequence
  Description of Artificial Sequence: Synthetic oligonucleotide
ucuuccucuuuucccggua

SEQ ID NO: 71947 - RNA, 19 nt, Artificial Sequence
  Description of Artificial Sequence: Synthetic oligonucleotide
aauggauacuucuaucaca

SEQ ID NO: 71948 - RNA, 19 nt, Artificial Sequence
  Description of Artificial Sequence: Synthetic oligonucleotide
auaauuugccaugaacugu

SEQ ID NO: 71949 - RNA, 19 nt, Artificial Sequence
  Description of Artificial Sequence: Synthetic oligonucleotide
uuggaugccuuuuuauaaa

SEQ ID NO: 71950 - RNA, 19 nt, Artificial Sequence
  Description of Artificial Sequence: Synthetic oligonucleotide
auacaucccccaucccugc

SEQ ID NO: 71951 - RNA, 19 nt, Artificial Sequence
  Description of Artificial Sequence: Synthetic oligonucleotide
cucccaccugccccuuuag

SEQ ID NO: 71952 - RNA, 19 nt, Artificial Sequence
  Description of Artificial Sequence: Synthetic oligonucleotide
guuguuuucuaacccguag

SEQ ID NO: 71953 - RNA, 19 nt, Artificial Sequence
  Description of Artificial Sequence: Synthetic oligonucleotide
ggcucucugggcacgaggc

SEQ ID NO: 71954 - RNA, 19 nt, Artificial Sequence
  Description of Artificial Sequence: Synthetic oligonucleotide
cagaaagcaggccgggcac

SEQ ID NO: 71955 - RNA, 19 nt, Artificial Sequence
  Description of Artificial Sequence: Synthetic oligonucleotide
cccauccugagagggccgc

SEQ ID NO: 71956 - RNA, 19 nt, Artificial Sequence
  Description of Artificial Sequence: Synthetic oligonucleotide
cgcuccucuccccagccug

SEQ ID NO: 71957 - RNA, 19 nt, Artificial Sequence
  Description of Artificial Sequence: Synthetic oligonucleotide
gcccucacagcauuggagc

SEQ ID NO: 71958 - RNA, 19 nt, Artificial Sequence
  Description of Artificial Sequence: Synthetic oligonucleotide
ccuguuacagugcaagaca

SEQ ID NO: 71959 - RNA, 19 nt, Artificial Sequence
  Description of Artificial Sequence: Synthetic oligonucleotide
augauacaaacucagguca

SEQ ID NO: 71960 - RNA, 19 nt, Artificial Sequence
  Description of Artificial Sequence: Synthetic oligonucleotide
agaaaaacaaagguuaaau

SEQ ID NO: 71961 - RNA, 19 nt, Artificial Sequence
  Description of Artificial Sequence: Synthetic oligonucleotide
uauuucacacgucuuuguu

SEQ ID NO: 71962 - RNA, 19 nt, Artificial Sequence
  Description of Artificial Sequence: Synthetic oligonucleotide
ucaguguuuccacucaccg

SEQ ID NO: 71963 - RNA, 19 nt, Artificial Sequence
  Description of Artificial Sequence: Synthetic oligonucleotide
gugguugagaagccucacc

SEQ ID NO: 71964 - RNA, 19 nt, Artificial Sequence
  Description of Artificial Sequence: Synthetic oligonucleotide
ccucucuuucccuugccuu

SEQ ID NO: 71965 - RNA, 19 nt, Artificial Sequence
  Description of Artificial Sequence: Synthetic oligonucleotide
uugcuuagguugugacaca

SEQ ID NO: 71966 - RNA, 19 nt, Artificial Sequence
  Description of Artificial Sequence: Synthetic oligonucleotide
acauauauauauauuuuuu

SEQ ID NO: 71967 - RNA, 19 nt, Artificial Sequence
  Description of Artificial Sequence: Synthetic oligonucleotide
uuaauucuuggguacaaca

SEQ ID NO: 71968 - RNA, 19 nt, Artificial Sequence
  Description of Artificial Sequence: Synthetic oligonucleotide
agcaguguuaaccgcagac

SEQ ID NO: 71969 - RNA, 19 nt, Artificial Sequence
  Description of Artificial Sequence: Synthetic oligonucleotide
cacuaggcauuuggauuac

SEQ ID NO: 71970 - RNA, 19 nt, Artificial Sequence
  Description of Artificial Sequence: Synthetic oligonucleotide
cuauuuuucuuaauggcua

SEQ ID NO: 71971 - RNA, 19 nt, Artificial Sequence
  Description of Artificial Sequence: Synthetic oligonucleotide
auuuaauccuuccauccca

SEQ ID NO: 71972 - RNA, 19 nt, Artificial Sequence
  Description of Artificial Sequence: Synthetic oligonucleotide
acgaaaaacagcugcugag

SEQ ID NO: 71973 - RNA, 19 nt, Artificial Sequence
  Description of Artificial Sequence: Synthetic oligonucleotide
guccaagggagcagcagag

SEQ ID NO: 71974 - RNA, 19 nt, Artificial Sequence
  Description of Artificial Sequence: Synthetic oligonucleotide
gcgugguccggcagggccu

SEQ ID NO: 71975 - RNA, 19 nt, Artificial Sequence
  Description of Artificial Sequence: Synthetic oligonucleotide
uguuguggcccucgccacc

SEQ ID NO: 71976 - RNA, 19 nt, Artificial Sequence
  Description of Artificial Sequence: Synthetic oligonucleotide
cccccucaccggaccgacu

SEQ ID NO: 71977 - RNA, 19 nt, Artificial Sequence
  Description of Artificial Sequence: Synthetic oligonucleotide
ugaccugucuuuggaacca

SEQ ID NO: 71978 - RNA, 19 nt, Artificial Sequence
  Description of Artificial Sequence: Synthetic oligonucleotide
agaacaucccaagggaacu

SEQ ID NO: 71979 - RNA, 19 nt, Artificial Sequence
  Description of Artificial Sequence: Synthetic oligonucleotide
uccuucgcacuggcguuga

SEQ ID NO: 71980 - RNA, 19 nt, Artificial Sequence
  Description of Artificial Sequence: Synthetic oligonucleotide
agugggaccccgggaucca

SEQ ID NO: 71981 - RNA, 19 nt, Artificial Sequence
  Description of Artificial Sequence: Synthetic oligonucleotide
aggcuggcccagggcggca

SEQ ID NO: 71982 - RNA, 19 nt, Artificial Sequence
  Description of Artificial Sequence: Synthetic oligonucleotide
acccucagggcugugcccg

SEQ ID NO: 71983 - RNA, 19 nt, Artificial Sequence
  Description of Artificial Sequence: Synthetic oligonucleotide
gcuggagugcuagguggag

SEQ ID NO: 71984 - RNA, 19 nt, Artificial Sequence
  Description of Artificial Sequence: Synthetic oligonucleotide
ggcagcacagacgccacgg

SEQ ID NO: 71985 - RNA, 19 nt, Artificial Sequence
  Description of Artificial Sequence: Synthetic oligonucleotide
guggcccaagagccccuuu

SEQ ID NO: 71986 - RNA, 19 nt, Artificial Sequence
  Description of Artificial Sequence: Synthetic oligonucleotide
ugcuucuugcugggggacc

SEQ ID NO: 71987 - RNA, 19 nt, Artificial Sequence
  Description of Artificial Sequence: Synthetic oligonucleotide
cagggcuguggugcuggcc

SEQ ID NO: 71988 - RNA, 19 nt, Artificial Sequence
  Description of Artificial Sequence: Synthetic oligonucleotide
ccacuuucccucggccagg

SEQ ID NO: 71989 - RNA, 19 nt, Artificial Sequence
  Description of Artificial Sequence: Synthetic oligonucleotide
gaauccagguccuuggggc

SEQ ID NO: 71990 - RNA, 19 nt, Artificial Sequence
  Description of Artificial Sequence: Synthetic oligonucleotide
cccaggggucuugucuugu

SEQ ID NO: 71991 - RNA, 19 nt, Artificial Sequence
  Description of Artificial Sequence: Synthetic oligonucleotide
uuucauuuuuagcacuucu

SEQ ID NO: 71992 - RNA, 19 nt, Artificial Sequence
  Description of Artificial Sequence: Synthetic oligonucleotide
ucaccagagagaugacagc

SEQ ID NO: 71993 - RNA, 19 nt, Artificial Sequence
  Description of Artificial Sequence: Synthetic oligonucleotide
cacaagaguugcuucuggg

SEQ ID NO: 71994 - RNA, 19 nt, Artificial Sequence
  Description of Artificial Sequence: Synthetic oligonucleotide
gauagaaauguuuaggagu

SEQ ID NO: 71995 - RNA, 19 nt, Artificial Sequence
  Description of Artificial Sequence: Synthetic oligonucleotide
uaagaacaaagcugggaua

SEQ ID NO: 71996 - RNA, 19 nt, Artificial Sequence
  Description of Artificial Sequence: Synthetic oligonucleotide
acggugauugcuaguugug

SEQ ID NO: 71997 - RNA, 19 nt, Artificial Sequence
  Description of Artificial Sequence: Synthetic oligonucleotide
gacugaagauucaacacag

SEQ ID NO: 71998 - RNA, 19 nt, Artificial Sequence
  Description of Artificial Sequence: Synthetic oligonucleotide
gaaaagaaaguuuauacgg

SEQ ID NO: 71999 - RNA, 19 nt, Artificial Sequence
  Description of Artificial Sequence: Synthetic oligonucleotide
gcuuuuuugcuggucagca

SEQ ID NO: 72000 - RNA, 19 nt, Artificial Sequence
  Description of Artificial Sequence: Synthetic oligonucleotide
aguuugucccacugcuuuc

SEQ ID NO: 72001 - RNA, 19 nt, Artificial Sequence
  Description of Artificial Sequence: Synthetic oligonucleotide
cucuagucucuaucccaua

SEQ ID NO: 72002 - RNA, 19 nt, Artificial Sequence
  Description of Artificial Sequence: Synthetic oligonucleotide
agcguguucccuuuaaaaa

SEQ ID NO: 72003 - RNA, 19 nt, Artificial Sequence
  Description of Artificial Sequence: Synthetic oligonucleotide
auguaggaguuuucuuuua

SEQ ID NO: 72004 - RNA, 19 nt, Artificial Sequence
  Description of Artificial Sequence: Synthetic oligonucleotide
aauuuauuuugugauaaau

SEQ ID NO: 72005 - RNA, 19 nt, Artificial Sequence
  Description of Artificial Sequence: Synthetic oligonucleotide
uuaccaguuucaaucacug

SEQ ID NO: 72006 - RNA, 19 nt, Artificial Sequence
  Description of Artificial Sequence: Synthetic oligonucleotide
guagaaaagccccauuaug

SEQ ID NO: 72007 - RNA, 19 nt, Artificial Sequence
  Description of Artificial Sequence: Synthetic oligonucleotide
gaauuuaaauuucaaggaa

SEQ ID NO: 72008 - RNA, 19 nt, Artificial Sequence
  Description of Artificial Sequence: Synthetic oligonucleotide
aagggugugugugugugua

SEQ ID NO: 72009 - RNA, 19 nt, Artificial Sequence
  Description of Artificial Sequence: Synthetic oligonucleotide
auguguggggugugugugu

SEQ ID NO: 72010 - RNA, 19 nt, Artificial Sequence
  Description of Artificial Sequence: Synthetic oligonucleotide
ugugagagugaugggacag

SEQ ID NO: 72011 - RNA, 19 nt, Artificial Sequence
  Description of Artificial Sequence: Synthetic oligonucleotide
guucuugauuuuuuggguu

SEQ ID NO: 72012 - RNA, 19 nt, Artificial Sequence
  Description of Artificial Sequence: Synthetic oligonucleotide
uuuuuuucccccaaacauu

SEQ ID NO: 72013 - RNA, 19 nt, Artificial Sequence
  Description of Artificial Sequence: Synthetic oligonucleotide
uuaucuaccucacucuuau

SEQ ID NO: 72014 - RNA, 19 nt, Artificial Sequence
  Description of Artificial Sequence: Synthetic oligonucleotide
uuuuuuauauguguauaua

SEQ ID NO: 72015 - RNA, 19 nt, Artificial Sequence
  Description of Artificial Sequence: Synthetic oligonucleotide
agacaaaagaauacaucuc

SEQ ID NO: 72016 - RNA, 19 nt, Artificial Sequence
  Description of Artificial Sequence: Synthetic oligonucleotide
caccuuucucagcaccuga

SEQ ID NO: 72017 - RNA, 19 nt, Artificial Sequence
  Description of Artificial Sequence: Synthetic oligonucleotide
acaauaggccguugauacu

SEQ ID NO: 72018 - RNA, 19 nt, Artificial Sequence
  Description of Artificial Sequence: Synthetic oligonucleotide
ugguaaccucauccacgcc

SEQ ID NO: 72019 - RNA, 19 nt, Artificial Sequence
  Description of Artificial Sequence: Synthetic oligonucleotide
cacaggcgccacacccagg

SEQ ID NO: 72020 - RNA, 19 nt, Artificial Sequence
  Description of Artificial Sequence: Synthetic oligonucleotide
gugaugcagggggaagcca

SEQ ID NO: 72021 - RNA, 19 nt, Artificial Sequence
  Description of Artificial Sequence: Synthetic oligonucleotide
aggcuguauuccgggguca

SEQ ID NO: 72022 - RNA, 19 nt, Artificial Sequence
  Description of Artificial Sequence: Synthetic oligonucleotide
aaagcaacacuaacucacc

SEQ ID NO: 72023 - RNA, 19 nt, Artificial Sequence
  Description of Artificial Sequence: Synthetic oligonucleotide
cucucugcucauuucagac

SEQ ID NO: 72024 - RNA, 19 nt, Artificial Sequence
  Description of Artificial Sequence: Synthetic oligonucleotide
cagcuugccuuuuucugag

SEQ ID NO: 72025 - RNA, 19 nt, Artificial Sequence
  Description of Artificial Sequence: Synthetic oligonucleotide
gauguccuguuuuguguug

SEQ ID NO: 72026 - RNA, 19 nt, Artificial Sequence
  Description of Artificial Sequence: Synthetic oligonucleotide
gcuuuuuuuguuuuguuuu

SEQ ID NO: 72027 - RNA, 19 nt, Artificial Sequence
  Description of Artificial Sequence: Synthetic oligonucleotide
ucuaucuugguuuccacca

SEQ ID NO: 72028 - RNA, 19 nt, Artificial Sequence
  Description of Artificial Sequence: Synthetic oligonucleotide
aagguguuagauuucuccu

SEQ ID NO: 72029 - RNA, 19 nt, Artificial Sequence
  Description of Artificial Sequence: Synthetic oligonucleotide
uccuccuagccagguggcc

SEQ ID NO: 72030 - RNA, 19 nt, Artificial Sequence
  Description of Artificial Sequence: Synthetic oligonucleotide
ccugugaggccaacgaggg

SEQ ID NO: 72031 - RNA, 19 nt, Artificial Sequence
  Description of Artificial Sequence: Synthetic oligonucleotide
gcaccagagcacaccuggg

SEQ ID NO: 72032 - RNA, 19 nt, Artificial Sequence
  Description of Artificial Sequence: Synthetic oligonucleotide
gggagccaccaggcugucc

SEQ ID NO: 72033 - RNA, 19 nt, Artificial Sequence
  Description of Artificial Sequence: Synthetic oligonucleotide
ccuggcugguugucuuugg

SEQ ID NO: 72034 - RNA, 19 nt, Artificial Sequence
  Description of Artificial Sequence: Synthetic oligonucleotide
gaacaaacugcuucugugc

SEQ ID NO: 72035 - RNA, 19 nt, Artificial Sequence
  Description of Artificial Sequence: Synthetic oligonucleotide
cagauggaaugaccaacac

SEQ ID NO: 72036 - RNA, 19 nt, Artificial Sequence
  Description of Artificial Sequence: Synthetic oligonucleotide
cauuucguccuuaagagag

SEQ ID NO: 72037 - RNA, 19 nt, Artificial Sequence
  Description of Artificial Sequence: Synthetic oligonucleotide
gcagugguuccucagguuc

SEQ ID NO: 72038 - RNA, 19 nt, Artificial Sequence
  Description of Artificial Sequence: Synthetic oligonucleotide
cugaggagaggaagguguc

SEQ ID NO: 72039 - RNA, 19 nt, Artificial Sequence
  Description of Artificial Sequence: Synthetic oligonucleotide
ccaggcagcaccaucucug

SEQ ID NO: 72040 - RNA, 19 nt, Artificial Sequence
  Description of Artificial Sequence: Synthetic oligonucleotide
gugcgaauccccaggguaa

SEQ ID NO: 72041 - RNA, 19 nt, Artificial Sequence
  Description of Artificial Sequence: Synthetic oligonucleotide
aaggcguggggcauugggu

SEQ ID NO: 72042 - RNA, 19 nt, Artificial Sequence
  Description of Artificial Sequence: Synthetic oligonucleotide
uuugcuccccuugcugcug

SEQ ID NO: 72043 - RNA, 19 nt, Artificial Sequence
  Description of Artificial Sequence: Synthetic oligonucleotide
gcuccaucccugcaggagg

SEQ ID NO: 72044 - RNA, 19 nt, Artificial Sequence
  Description of Artificial Sequence: Synthetic oligonucleotide
gcucgcgcugaggcaggac

SEQ ID NO: 72045 - RNA, 19 nt, Artificial Sequence
  Description of Artificial Sequence: Synthetic oligonucleotide
ccgugcggccauggcugcu

SEQ ID NO: 72046 - RNA, 19 nt, Artificial Sequence
  Description of Artificial Sequence: Synthetic oligonucleotide
ugcauucauugagcacaaa

SEQ ID NO: 72047 - RNA, 19 nt, Artificial Sequence
  Description of Artificial Sequence: Synthetic oligonucleotide
aggugcagcugcagcagca

SEQ ID NO: 72048 - RNA, 19 nt, Artificial Sequence
  Description of Artificial Sequence: Synthetic oligonucleotide
agcuggagagcaagaguca

SEQ ID NO: 72049 - RNA, 19 nt, Artificial Sequence
  Description of Artificial Sequence: Synthetic oligonucleotide
acccagccugugcgccaga

SEQ ID NO: 72050 - RNA, 19 nt, Artificial Sequence
  Description of Artificial Sequence: Synthetic oligonucleotide
aaugcagaggcuccugacc

SEQ ID NO: 72051 - RNA, 19 nt, Artificial Sequence
  Description of Artificial Sequence: Synthetic oligonucleotide
cucacagccagucccugau

SEQ ID NO: 72052 - RNA, 19 nt, Artificial Sequence
  Description of Artificial Sequence: Synthetic oligonucleotide
uagaacacacgcaggagca

SEQ ID NO: 72053 - RNA, 19 nt, Artificial Sequence
  Description of Artificial Sequence: Synthetic oligonucleotide
agaguccccucccccucca

SEQ ID NO: 72054 - RNA, 19 nt, Artificial Sequence
  Description of Artificial Sequence: Synthetic oligonucleotide
aggcugcccucucaacuuc

SEQ ID NO: 72055 - RNA, 19 nt, Artificial Sequence
  Description of Artificial Sequence: Synthetic oligonucleotide
cucccucaccuccuucccu

SEQ ID NO: 72056 - RNA, 19 nt, Artificial Sequence
  Description of Artificial Sequence: Synthetic oligonucleotide
uagggguagacagagaugu

SEQ ID NO: 72057 - RNA, 19 nt, Artificial Sequence
  Description of Artificial Sequence: Synthetic oligonucleotide
uaccaaaccuuccggcugg

SEQ ID NO: 72058 - RNA, 19 nt, Artificial Sequence
  Description of Artificial Sequence: Synthetic oligonucleotide
gaaagcccaguggccggcg

SEQ ID NO: 72059 - RNA, 19 nt, Artificial Sequence
  Description of Artificial Sequence: Synthetic oligonucleotide
gccgaggcucguggcguca

SEQ ID NO: 72060 - RNA, 19 nt, Artificial Sequence
  Description of Artificial Sequence: Synthetic oligonucleotide
acgccccccccgccagggc

SEQ ID NO: 72061 - RNA, 19 nt, Artificial Sequence
  Description of Artificial Sequence: Synthetic oligonucleotide
cuguaccuccgucucccug

SEQ ID NO: 72062 - RNA, 19 nt, Artificial Sequence
  Description of Artificial Sequence: Synthetic oligonucleotide
gguccugcugcucacagga

SEQ ID NO: 72063 - RNA, 19 nt, Artificial Sequence
  Description of Artificial Sequence: Synthetic oligonucleotide
acagacggcucgcuccccu

SEQ ID NO: 72064 - RNA, 19 nt, Artificial Sequence
  Description of Artificial Sequence: Synthetic oligonucleotide
ucuuccagcagcugcucuu

SEQ ID NO: 72065 - RNA, 19 nt, Artificial Sequence
  Description of Artificial Sequence: Synthetic oligonucleotide
uacaggcacugaugauuuc

SEQ ID NO: 72066 - RNA, 19 nt, Artificial Sequence
  Description of Artificial Sequence: Synthetic oligonucleotide
cgcugggaaguguggcggg

SEQ ID NO: 72067 - RNA, 19 nt, Artificial Sequence
  Description of Artificial Sequence: Synthetic oligonucleotide
gcagcuuugccuaagcgug

SEQ ID NO: 72068 - RNA, 19 nt, Artificial Sequence
  Description of Artificial Sequence: Synthetic oligonucleotide
ggauggcuccucggcaauu

SEQ ID NO: 72069 - RNA, 19 nt, Artificial Sequence
  Description of Artificial Sequence: Synthetic oligonucleotide
uccagccuaagugaaggcg

SEQ ID NO: 72070 - RNA, 19 nt, Artificial Sequence
  Description of Artificial Sequence: Synthetic oligonucleotide
gcucaggagccuccugcug

SEQ ID NO: 72071 - RNA, 19 nt, Artificial Sequence
  Description of Artificial Sequence: Synthetic oligonucleotide
ggaacgcgacccaucucuc

SEQ ID NO: 72072 - RNA, 19 nt, Artificial Sequence
  Description of Artificial Sequence: Synthetic oligonucleotide
cccaggaccccggggaucu

SEQ ID NO: 72073 - RNA, 19 nt, Artificial Sequence
  Description of Artificial Sequence: Synthetic oligonucleotide
uuaaggucauugagaaaua

SEQ ID NO: 72074 - RNA, 19 nt, Artificial Sequence
  Description of Artificial Sequence: Synthetic oligonucleotide
acuguuggaucaggguuuu

SEQ ID NO: 72075 - RNA, 19 nt, Artificial Sequence
  Description of Artificial Sequence: Synthetic oligonucleotide
uguucuuccacacuguagg

SEQ ID NO: 72076 - RNA, 19 nt, Artificial Sequence
  Description of Artificial Sequence: Synthetic oligonucleotide
gugaccccuuggaauaacg

SEQ ID NO: 72077 - RNA, 19 nt, Artificial Sequence
  Description of Artificial Sequence: Synthetic oligonucleotide
ggccucuccucucgugcac

SEQ ID NO: 72078 - RNA, 19 nt, Artificial Sequence
  Description of Artificial Sequence: Synthetic oligonucleotide
cauaccuaccgguuuccac

SEQ ID NO: 72079 - RNA, 19 nt, Artificial Sequence
  Description of Artificial Sequence: Synthetic oligonucleotide
caacuggauuucuacagau

SEQ ID NO: 72080 - RNA, 19 nt, Artificial Sequence
  Description of Artificial Sequence: Synthetic oligonucleotide
ucauucagcugguuauaag

SEQ ID NO: 72081 - RNA, 19 nt, Artificial Sequence
  Description of Artificial Sequence: Synthetic oligonucleotide
ggguuuuguuuaaacuguc

SEQ ID NO: 72082 - RNA, 19 nt, Artificial Sequence
  Description of Artificial Sequence: Synthetic oligonucleotide
ccgaguuacugaugucauu

SEQ ID NO: 72083 - RNA, 19 nt, Artificial Sequence
  Description of Artificial Sequence: Synthetic oligonucleotide
uuuguuuuuguuuuaugua

SEQ ID NO: 72084 - RNA, 19 nt, Artificial Sequence
  Description of Artificial Sequence: Synthetic oligonucleotide
agguagcuuuuaaguagaa

SEQ ID NO: 72085 - RNA, 19 nt, Artificial Sequence
  Description of Artificial Sequence: Synthetic oligonucleotide
aaacacuaacaguguagug

SEQ ID NO: 72086 - RNA, 19 nt, Artificial Sequence
  Description of Artificial Sequence: Synthetic oligonucleotide
gcccaucauagcaaaugcu

SEQ ID NO: 72087 - RNA, 19 nt, Artificial Sequence
  Description of Artificial Sequence: Synthetic oligonucleotide
uucagaaacaccucaauaa

SEQ ID NO: 72088 - RNA, 19 nt, Artificial Sequence
  Description of Artificial Sequence: Synthetic oligonucleotide
aaagagaaaacuuggcuug

SEQ ID NO: 72089 - RNA, 19 nt, Artificial Sequence
  Description of Artificial Sequence: Synthetic oligonucleotide
gugugauggugcagucacu

SEQ ID NO: 72090 - RNA, 19 nt, Artificial Sequence
  Description of Artificial Sequence: Synthetic oligonucleotide
uuuacuggaccaacccacc

SEQ ID NO: 72091 - RNA, 19 nt, Artificial Sequence
  Description of Artificial Sequence: Synthetic oligonucleotide
ccaccuugacuauaccaag

SEQ ID NO: 72092 - RNA, 19 nt, Artificial Sequence
  Description of Artificial Sequence: Synthetic oligonucleotide
ggcaucaucuauccacagu

SEQ ID NO: 72093 - RNA, 19 nt, Artificial Sequence
  Description of Artificial Sequence: Synthetic oligonucleotide
uucuagccuaacuucaugc

SEQ ID NO: 72094 - RNA, 19 nt, Artificial Sequence
  Description of Artificial Sequence: Synthetic oligonucleotide
cugauuucucugccucuug

SEQ ID NO: 72095 - RNA, 19 nt, Artificial Sequence
  Description of Artificial Sequence: Synthetic oligonucleotide
gauuuuucucuguguguuc

SEQ ID NO: 72096 - RNA, 19 nt, Artificial Sequence
  Description of Artificial Sequence: Synthetic oligonucleotide
ccaaauaaucuuaagcuga

SEQ ID NO: 72097 - RNA, 19 nt, Artificial Sequence
  Description of Artificial Sequence: Synthetic oligonucleotide
aguuguggcauuuuccaug

SEQ ID NO: 72098 - RNA, 19 nt, Artificial Sequence
  Description of Artificial Sequence: Synthetic oligonucleotide
gcaaccuccuucugccagc

SEQ ID NO: 72099 - RNA, 19 nt, Artificial Sequence
  Description of Artificial Sequence: Synthetic oligonucleotide
cagcucacacugcuugaag

SEQ ID NO: 72100 - RNA, 19 nt, Artificial Sequence
  Description of Artificial Sequence: Synthetic oligonucleotide
gucauaugaaccacugagg

SEQ ID NO: 72101 - RNA, 19 nt, Artificial Sequence
  Description of Artificial Sequence: Synthetic oligonucleotide
gcacaucauggaauugaug

SEQ ID NO: 72102 - RNA, 19 nt, Artificial Sequence
  Description of Artificial Sequence: Synthetic oligonucleotide
gugagcauuaagacguucu

SEQ ID NO: 72103 - RNA, 19 nt, Artificial Sequence
  Description of Artificial Sequence: Synthetic oligonucleotide
ucccacacagcccuucccu

SEQ ID NO: 72104 - RNA, 19 nt, Artificial Sequence
  Description of Artificial Sequence: Synthetic oligonucleotide
ugaggcagcaggagcuggu

SEQ ID NO: 72105 - RNA, 19 nt, Artificial Sequence
  Description of Artificial Sequence: Synthetic oligonucleotide
uguguacuggagacacugu

SEQ ID NO: 72106 - RNA, 19 nt, Artificial Sequence
  Description of Artificial Sequence: Synthetic oligonucleotide
uugaacuugaucaagaccc

SEQ ID NO: 72107 - RNA, 19 nt, Artificial Sequence
  Description of Artificial Sequence: Synthetic oligonucleotide
cagaccaccccaggucucc

SEQ ID NO: 72108 - RNA, 19 nt, Artificial Sequence
  Description of Artificial Sequence: Synthetic oligonucleotide
cuucgugggaugucaugac

SEQ ID NO: 72109 - RNA, 19 nt, Artificial Sequence
  Description of Artificial Sequence: Synthetic oligonucleotide
cguuugacauaccuuugga

SEQ ID NO: 72110 - RNA, 19 nt, Artificial Sequence
  Description of Artificial Sequence: Synthetic oligonucleotide
aacgagccuccuccuugga

SEQ ID NO: 72111 - RNA, 19 nt, Artificial Sequence
  Description of Artificial Sequence: Synthetic oligonucleotide
aagauggaagaccguguuc

SEQ ID NO: 72112 - RNA, 19 nt, Artificial Sequence
  Description of Artificial Sequence: Synthetic oligonucleotide
cguggccgaccuggccucu

SEQ ID NO: 72113 - RNA, 19 nt, Artificial Sequence
  Description of Artificial Sequence: Synthetic oligonucleotide
uccuggccuguuucuuaag

SEQ ID NO: 72114 - RNA, 19 nt, Artificial Sequence
  Description of Artificial Sequence: Synthetic oligonucleotide
gaugcggagucacauuuca

SEQ ID NO: 72115 - RNA, 19 nt, Artificial Sequence
  Description of Artificial Sequence: Synthetic oligonucleotide
aaugguacgaaaaguggcu

SEQ ID NO: 72116 - RNA, 19 nt, Artificial Sequence
  Description of Artificial Sequence: Synthetic oligonucleotide
uucguaaaauagaagagca

SEQ ID NO: 72117 - RNA, 19 nt, Artificial Sequence
  Description of Artificial Sequence: Synthetic oligonucleotide
agucacuguggaacuacca

SEQ ID NO: 72118 - RNA, 19 nt, Artificial Sequence
  Description of Artificial Sequence: Synthetic oligonucleotide
aaauggcgagaugcucggu

SEQ ID NO: 72119 - RNA, 19 nt, Artificial Sequence
  Description of Artificial Sequence: Synthetic oligonucleotide
ugcacauuggggugcuuug

SEQ ID NO: 72120 - RNA, 19 nt, Artificial Sequence
  Description of Artificial Sequence: Synthetic oligonucleotide
gggauaaaagauuuaugag

SEQ ID NO: 72121 - RNA, 19 nt, Artificial Sequence
  Description of Artificial Sequence: Synthetic oligonucleotide
gccaacuauucucuggcac

SEQ ID NO: 72122 - RNA, 19 nt, Artificial Sequence
  Description of Artificial Sequence: Synthetic oligonucleotide
ccagauucuaggccaguuu

SEQ ID NO: 72123 - RNA, 19 nt, Artificial Sequence
  Description of Artificial Sequence: Synthetic oligonucleotide
uguuccacugaagcuuuuc

SEQ ID NO: 72124 - RNA, 19 nt, Artificial Sequence
  Description of Artificial Sequence: Synthetic oligonucleotide
cccacagcaguccaccucu

SEQ ID NO: 72125 - RNA, 19 nt, Artificial Sequence
  Description of Artificial Sequence: Synthetic oligonucleotide
ugcaggcuggcagccgaau

SEQ ID NO: 72126 - RNA, 19 nt, Artificial Sequence
  Description of Artificial Sequence: Synthetic oligonucleotide
uggcuugccaguggcucug

SEQ ID NO: 72127 - RNA, 19 nt, Artificial Sequence
  Description of Artificial Sequence: Synthetic oligonucleotide
guggcaagaucacacugag

SEQ ID NO: 72128 - RNA, 19 nt, Artificial Sequence
  Description of Artificial Sequence: Synthetic oligonucleotide
gaucgaugggugagaaggc

SEQ ID NO: 72129 - RNA, 19 nt, Artificial Sequence
  Description of Artificial Sequence: Synthetic oligonucleotide
cuaggaugcuugucuagug

SEQ ID NO: 72130 - RNA, 19 nt, Artificial Sequence
  Description of Artificial Sequence: Synthetic oligonucleotide
guucuuagcugucacguug

SEQ ID NO: 72131 - RNA, 19 nt, Artificial Sequence
  Description of Artificial Sequence: Synthetic oligonucleotide
ggcuccuuccaggguggcc

SEQ ID NO: 72132 - RNA, 19 nt, Artificial Sequence
  Description of Artificial Sequence: Synthetic oligonucleotide
cagacgguguuggccacuc

SEQ ID NO: 72133 - RNA, 19 nt, Artificial Sequence
  Description of Artificial Sequence: Synthetic oligonucleotide
cccuucuaaaacacaggcg

SEQ ID NO: 72134 - RNA, 19 nt, Artificial Sequence
  Description of Artificial Sequence: Synthetic oligonucleotide
gcccuccuggugacaguga

SEQ ID NO: 72135 - RNA, 19 nt, Artificial Sequence
  Description of Artificial Sequence: Synthetic oligonucleotide
acccgccgugguaugccuu

SEQ ID NO: 72136 - RNA, 19 nt, Artificial Sequence
  Description of Artificial Sequence: Synthetic oligonucleotide
uggcccauuccagcagucc

SEQ ID NO: 72137 - RNA, 19 nt, Artificial Sequence
  Description of Artificial Sequence: Synthetic oligonucleotide
ccaguuaugcauuucaagu

SEQ ID NO: 72138 - RNA, 19 nt, Artificial Sequence
  Description of Artificial Sequence: Synthetic oligonucleotide
uuugggguuuguucuuuuc

SEQ ID NO: 72139 - RNA, 19 nt, Artificial Sequence
  Description of Artificial Sequence: Synthetic oligonucleotide
cguuaauguuccucugugu

SEQ ID NO: 72140 - RNA, 19 nt, Artificial Sequence
  Description of Artificial Sequence: Synthetic oligonucleotide
uugucagcugucuucauuu

SEQ ID NO: 72141 - RNA, 19 nt, Artificial Sequence
  Description of Artificial Sequence: Synthetic oligonucleotide
uccugggcuaagcagcauu

SEQ ID NO: 72142 - RNA, 19 nt, Artificial Sequence
  Description of Artificial Sequence: Synthetic oligonucleotide
ugggagauguggaccagag

SEQ ID NO: 72143 - RNA, 19 nt, Artificial Sequence
  Description of Artificial Sequence: Synthetic oligonucleotide
gauccacuccuuaagaacc

SEQ ID NO: 72144 - RNA, 19 nt, Artificial Sequence
  Description of Artificial Sequence: Synthetic oligonucleotide
caguggcgaaagacacuuu

SEQ ID NO: 72145 - RNA, 19 nt, Artificial Sequence
  Description of Artificial Sequence: Synthetic oligonucleotide
ucuuucuucacucugaagu

SEQ ID NO: 72146 - RNA, 19 nt, Artificial Sequence
  Description of Artificial Sequence: Synthetic oligonucleotide
uagcuggugguacaaauga

SEQ ID NO: 72147 - RNA, 19 nt, Artificial Sequence
  Description of Artificial Sequence: Synthetic oligonucleotide
agaacuucaagagaggaug

SEQ ID NO: 72148 - RNA, 19 nt, Artificial Sequence
  Description of Artificial Sequence: Synthetic oligonucleotide
guuauuuagacugaaccuc

SEQ ID NO: 72149 - RNA, 19 nt, Artificial Sequence
  Description of Artificial Sequence: Synthetic oligonucleotide
cuguugccagagaugcuga

SEQ ID NO: 72150 - RNA, 19 nt, Artificial Sequence
  Description of Artificial Sequence: Synthetic oligonucleotide
aagauacagaccuuggaca

SEQ ID NO: 72151 - RNA, 19 nt, Artificial Sequence
  Description of Artificial Sequence: Synthetic oligonucleotide
aggucagaggguuucauuu

SEQ ID NO: 72152 - RNA, 19 nt, Artificial Sequence
  Description of Artificial Sequence: Synthetic oligonucleotide
uuuggccuucaucuuagau

SEQ ID NO: 72153 - RNA, 19 nt, Artificial Sequence
  Description of Artificial Sequence: Synthetic oligonucleotide
ugacugguugcgucauuug

SEQ ID NO: 72154 - RNA, 19 nt, Artificial Sequence
  Description of Artificial Sequence: Synthetic oligonucleotide
ggagaagugagugcuccuu

SEQ ID NO: 72155 - RNA, 19 nt, Artificial Sequence
  Description of Artificial Sequence: Synthetic oligonucleotide
ugaugguggaaugaccggg

SEQ ID NO: 72156 - RNA, 19 nt, Artificial Sequence
  Description of Artificial Sequence: Synthetic oligonucleotide
gugguggguacagaaccau

SEQ ID NO: 72157 - RNA, 19 nt, Artificial Sequence
  Description of Artificial Sequence: Synthetic oligonucleotide
uugucacagggauccuggc

SEQ ID NO: 72158 - RNA, 19 nt, Artificial Sequence
  Description of Artificial Sequence: Synthetic oligonucleotide
cacagagaagaguuacgag

SEQ ID NO: 72159 - RNA, 19 nt, Artificial Sequence
  Description of Artificial Sequence: Synthetic oligonucleotide
gcagcagggugcagggcuu

SEQ ID NO: 72160 - RNA, 19 nt, Artificial Sequence
  Description of Artificial Sequence: Synthetic oligonucleotide
uggaaggaaugugggcaag

SEQ ID NO: 72161 - RNA, 19 nt, Artificial Sequence
  Description of Artificial Sequence: Synthetic oligonucleotide
gguuuugaacuugauuguu

SEQ ID NO: 72162 - RNA, 19 nt, Artificial Sequence
  Description of Artificial Sequence: Synthetic oligonucleotide
ucuugaagcuaucagacca

SEQ ID NO: 72163 - RNA, 19 nt, Artificial Sequence
  Description of Artificial Sequence: Synthetic oligonucleotide
acaucgaggcucagcaguc

SEQ ID NO: 72164 - RNA, 19 nt, Artificial Sequence
  Description of Artificial Sequence: Synthetic oligonucleotide
cauccgugggcauuugguu

SEQ ID NO: 72165 - RNA, 19 nt, Artificial Sequence
  Description of Artificial Sequence: Synthetic oligonucleotide
uucaacaaagaaaccuaac

SEQ ID NO: 72166 - RNA, 19 nt, Artificial Sequence
  Description of Artificial Sequence: Synthetic oligonucleotide
cauccuacucuggaaacug

SEQ ID NO: 72167 - RNA, 19 nt, Artificial Sequence
  Description of Artificial Sequence: Synthetic oligonucleotide
gaucucggaguuaaggcga

SEQ ID NO: 72168 - RNA, 19 nt, Artificial Sequence
  Description of Artificial Sequence: Synthetic oligonucleotide
aauuguucaagaacacaaa

SEQ ID NO: 72169 - RNA, 19 nt, Artificial Sequence
  Description of Artificial Sequence: Synthetic oligonucleotide
acuacaucgcacucgucag

SEQ ID NO: 72170 - RNA, 19 nt, Artificial Sequence
  Description of Artificial Sequence: Synthetic oligonucleotide
guugucaguucuggggcau

SEQ ID NO: 72171 - RNA, 19 nt, Artificial Sequence
  Description of Artificial Sequence: Synthetic oligonucleotide
ugacuuuagcguuuuguuu

SEQ ID NO: 72172 - RNA, 19 nt, Artificial Sequence
  Description of Artificial Sequence: Synthetic oligonucleotide
ucugcgagaacauaacgau

SEQ ID NO: 72173 - RNA, 19 nt, Artificial Sequence
  Description of Artificial Sequence: Synthetic oligonucleotide
ucacucauuuuuauguccc

SEQ ID NO: 72174 - RNA, 19 nt, Artificial Sequence
  Description of Artificial Sequence: Synthetic oligonucleotide
cacguguguguguccgcau

SEQ ID NO: 72175 - RNA, 19 nt, Artificial Sequence
  Description of Artificial Sequence: Synthetic oligonucleotide
ucuuucuggucaacauugu

SEQ ID NO: 72176 - RNA, 19 nt, Artificial Sequence
  Description of Artificial Sequence: Synthetic oligonucleotide
uuuuaacuagucacucauu

SEQ ID NO: 72177 - RNA, 19 nt, Artificial Sequence
  Description of Artificial Sequence: Synthetic oligonucleotide
uagcguuuucaauagggcu

SEQ ID NO: 72178 - RNA, 19 nt, Artificial Sequence
  Description of Artificial Sequence: Synthetic oligonucleotide
ucuuaaguccaguagauua

SEQ ID NO: 72179 - RNA, 19 nt, Artificial Sequence
  Description of Artificial Sequence: Synthetic oligonucleotide
acggguagucaguugacga

SEQ ID NO: 72180 - RNA, 19 nt, Artificial Sequence
  Description of Artificial Sequence: Synthetic oligonucleotide
aagaucugguuuacaagaa

SEQ ID NO: 72181 - RNA, 19 nt, Artificial Sequence
  Description of Artificial Sequence: Synthetic oligonucleotide
acuaauuaaauguuucauu

SEQ ID NO: 72182 - RNA, 19 nt, Artificial Sequence
  Description of Artificial Sequence: Synthetic oligonucleotide
ugcauuuuuguaagaacag

SEQ ID NO: 72183 - RNA, 19 nt, Artificial Sequence
  Description of Artificial Sequence: Synthetic oligonucleotide
gaauaauuuuauaaaaugu

SEQ ID NO: 72184 - RNA, 19 nt, Artificial Sequence
  Description of Artificial Sequence: Synthetic oligonucleotide
uuuguaguuuauaauugcc

SEQ ID NO: 72185 - RNA, 19 nt, Artificial Sequence
  Description of Artificial Sequence: Synthetic oligonucleotide
cgaaaauaauuuaaagaca

SEQ ID NO: 72186 - RNA, 19 nt, Artificial Sequence
  Description of Artificial Sequence: Synthetic oligonucleotide
acuuuuuuuuucucugugu

SEQ ID NO: 72187 - RNA, 19 nt, Artificial Sequence
  Description of Artificial Sequence: Synthetic oligonucleotide
ugugcaaauguguguuugu

SEQ ID NO: 72188 - RNA, 19 nt, Artificial Sequence
  Description of Artificial Sequence: Synthetic oligonucleotide
uuuuuuuaggacaccuguu

SEQ ID NO: 72189 - RNA, 19 nt, Artificial Sequence
  Description of Artificial Sequence: Synthetic oligonucleotide
uuacuagcuagcuuuacaa

SEQ ID NO: 72190 - RNA, 19 nt, Artificial Sequence
  Description of Artificial Sequence: Synthetic oligonucleotide
auaugccaaaaaaggauuu

SEQ ID NO: 72191 - RNA, 19 nt, Artificial Sequence
  Description of Artificial Sequence: Synthetic oligonucleotide
ucucccugaccccauccgu

SEQ ID NO: 72192 - RNA, 19 nt, Artificial Sequence
  Description of Artificial Sequence: Synthetic oligonucleotide
ugguucacccucuuuuccc

SEQ ID NO: 72193 - RNA, 19 nt, Artificial Sequence
  Description of Artificial Sequence: Synthetic oligonucleotide
ccccaugcuuuuugcccua

SEQ ID NO: 72194 - RNA, 19 nt, Artificial Sequence
  Description of Artificial Sequence: Synthetic oligonucleotide
aguuuauaacaaaggaaug

SEQ ID NO: 72195 - RNA, 19 nt, Artificial Sequence
  Description of Artificial Sequence: Synthetic oligonucleotide
gaugaugauuuaaaaagua

SEQ ID NO: 72196 - RNA, 19 nt, Artificial Sequence
  Description of Artificial Sequence: Synthetic oligonucleotide
aguucuguaucuucaguau

SEQ ID NO: 72197 - RNA, 19 nt, Artificial Sequence
  Description of Artificial Sequence: Synthetic oligonucleotide
ucuuggucuuccagaaccc

SEQ ID NO: 72198 - RNA, 19 nt, Artificial Sequence
  Description of Artificial Sequence: Synthetic oligonucleotide
cucugguugggaaggggau

SEQ ID NO: 72199 - RNA, 19 nt, Artificial Sequence
  Description of Artificial Sequence: Synthetic oligonucleotide
ucauuuuuuacuggucauu

SEQ ID NO: 72200 - RNA, 19 nt, Artificial Sequence
  Description of Artificial Sequence: Synthetic oligonucleotide
uucccuuuggaguguagcu

SEQ ID NO: 72201 - RNA, 19 nt, Artificial Sequence
  Description of Artificial Sequence: Synthetic oligonucleotide
uacuuuaacagauggaaag

SEQ ID NO: 72202 - RNA, 19 nt, Artificial Sequence
  Description of Artificial Sequence: Synthetic oligonucleotide
gaaccucauuggccaugga

SEQ ID NO: 72203 - RNA, 19 nt, Artificial Sequence
  Description of Artificial Sequence: Synthetic oligonucleotide
aaacagccgagguguugga

SEQ ID NO: 72204 - RNA, 19 nt, Artificial Sequence
  Description of Artificial Sequence: Synthetic oligonucleotide
agcccagcagugcauggca

SEQ ID NO: 72205 - RNA, 19 nt, Artificial Sequence
  Description of Artificial Sequence: Synthetic oligonucleotide
accguucggcaucuggcuu

SEQ ID NO: 72206 - RNA, 19 nt, Artificial Sequence
  Description of Artificial Sequence: Synthetic oligonucleotide
ugauuggucuggcugccgu

SEQ ID NO: 72207 - RNA, 19 nt, Artificial Sequence
  Description of Artificial Sequence: Synthetic oligonucleotide
ucauugucagcacagugcc

SEQ ID NO: 72208 - RNA, 19 nt, Artificial Sequence
  Description of Artificial Sequence: Synthetic oligonucleotide
cauggacaugggaagacuu

SEQ ID NO: 72209 - RNA, 19 nt, Artificial Sequence
  Description of Artificial Sequence: Synthetic oligonucleotide
ugacugcacagccaauggu

SEQ ID NO: 72210 - RNA, 19 nt, Artificial Sequence
  Description of Artificial Sequence: Synthetic oligonucleotide
uuuucaugaugauuacagc

SEQ ID NO: 72211 - RNA, 19 nt, Artificial Sequence
  Description of Artificial Sequence: Synthetic oligonucleotide
cauacacagugaucacaua

SEQ ID NO: 72212 - RNA, 19 nt, Artificial Sequence
  Description of Artificial Sequence: Synthetic oligonucleotide
aaacgaugacagcuauggg

SEQ ID NO: 72213 - RNA, 19 nt, Artificial Sequence
  Description of Artificial Sequence: Synthetic oligonucleotide
ggcacacaggccauuugcu

SEQ ID NO: 72214 - RNA, 19 nt, Artificial Sequence
  Description of Artificial Sequence: Synthetic oligonucleotide
uuacaugccucguaucaug

SEQ ID NO: 72215 - RNA, 19 nt, Artificial Sequence
  Description of Artificial Sequence: Synthetic oligonucleotide
gacugauuacugcuuuguu

SEQ ID NO: 72216 - RNA, 19 nt, Artificial Sequence
  Description of Artificial Sequence: Synthetic oligonucleotide
uagaacacagaagagaccc

SEQ ID NO: 72217 - RNA, 19 nt, Artificial Sequence
  Description of Artificial Sequence: Synthetic oligonucleotide
cuauuuuauuuaaggcaga

SEQ ID NO: 72218 - RNA, 19 nt, Artificial Sequence
  Description of Artificial Sequence: Synthetic oligonucleotide
aaccccgaagauacguauu

SEQ ID NO: 72219 - RNA, 19 nt, Artificial Sequence
  Description of Artificial Sequence: Synthetic oligonucleotide
uuccaauacagaaaagaau

SEQ ID NO: 72220 - RNA, 19 nt, Artificial Sequence
  Description of Artificial Sequence: Synthetic oligonucleotide
uuuuuaauaaaaacuauaa

SEQ ID NO: 72221 - RNA, 19 nt, Artificial Sequence
  Description of Artificial Sequence: Synthetic oligonucleotide
acauacacaaaaauugguu

SEQ ID NO: 72222 - RNA, 19 nt, Artificial Sequence
  Description of Artificial Sequence: Synthetic oligonucleotide
uuuaaaguugacuccacuu

SEQ ID NO: 72223 - RNA, 19 nt, Artificial Sequence
  Description of Artificial Sequence: Synthetic oligonucleotide
uccucuaacuccaguggau

SEQ ID NO: 72224 - RNA, 19 nt, Artificial Sequence
  Description of Artificial Sequence: Synthetic oligonucleotide
uuguuggccaugucucccc

SEQ ID NO: 72225 - RNA, 19 nt, Artificial Sequence
  Description of Artificial Sequence: Synthetic oligonucleotide
caacuccacaauaucucua

SEQ ID NO: 72226 - RNA, 19 nt, Artificial Sequence
  Description of Artificial Sequence: Synthetic oligonucleotide
aucaugggaaacaccuggg

SEQ ID NO: 72227 - RNA, 19 nt, Artificial Sequence
  Description of Artificial Sequence: Synthetic oligonucleotide
gguuuuugcgcuacauagg

SEQ ID NO: 72228 - RNA, 19 nt, Artificial Sequence
  Description of Artificial Sequence: Synthetic oligonucleotide
gagaaagaucuggaaacua

SEQ ID NO: 72229 - RNA, 19 nt, Artificial Sequence
  Description of Artificial Sequence: Synthetic oligonucleotide
auuuggguuuuguuuucaa

SEQ ID NO: 72230 - RNA, 19 nt, Artificial Sequence
  Description of Artificial Sequence: Synthetic oligonucleotide
acuuuucauuuggauguuu

SEQ ID NO: 72231 - RNA, 19 nt, Artificial Sequence
  Description of Artificial Sequence: Synthetic oligonucleotide
uggcguugcacacacacau

SEQ ID NO: 72232 - RNA, 19 nt, Artificial Sequence
  Description of Artificial Sequence: Synthetic oligonucleotide
uccaccgguggaagagacg

SEQ ID NO: 72233 - RNA, 19 nt, Artificial Sequence
  Description of Artificial Sequence: Synthetic oligonucleotide
gcccggugaaaacaccugu

SEQ ID NO: 72234 - RNA, 19 nt, Artificial Sequence
  Description of Artificial Sequence: Synthetic oligonucleotide
ucugcuuucuaagccagug

SEQ ID NO: 72235 - RNA, 19 nt, Artificial Sequence
  Description of Artificial Sequence: Synthetic oligonucleotide
gagguugaggugagagguu

SEQ ID NO: 72236 - RNA, 19 nt, Artificial Sequence
  Description of Artificial Sequence: Synthetic oligonucleotide
uugccagaguuugucuacc

SEQ ID NO: 72237 - RNA, 19 nt, Artificial Sequence
  Description of Artificial Sequence: Synthetic oligonucleotide
cucuggguaucccuuuguc

SEQ ID NO: 72238 - RNA, 19 nt, Artificial Sequence
  Description of Artificial Sequence: Synthetic oligonucleotide
cugggauaaaaaaaaucaa

SEQ ID NO: 72239 - RNA, 19 nt, Artificial Sequence
  Description of Artificial Sequence: Synthetic oligonucleotide
aaccagaaggcgggaugga

SEQ ID NO: 72240 - RNA, 19 nt, Artificial Sequence
  Description of Artificial Sequence: Synthetic oligonucleotide
aauggaugcaccgcaaaua

SEQ ID NO: 72241 - RNA, 19 nt, Artificial Sequence
  Description of Artificial Sequence: Synthetic oligonucleotide
aaugcauuuucugaguuuu

SEQ ID NO: 72242 - RNA, 19 nt, Artificial Sequence
  Description of Artificial Sequence: Synthetic oligonucleotide
ucuuguuaaaaaaaaauuu

SEQ ID NO: 72243 - RNA, 19 nt, Artificial Sequence
  Description of Artificial Sequence: Synthetic oligonucleotide
uuuuuaaguaagaaaaaaa

SEQ ID NO: 72244 - RNA, 19 nt, Artificial Sequence
  Description of Artificial Sequence: Synthetic oligonucleotide
aaagguaauaacauggcca

SEQ ID NO: 72245 - RNA, 19 nt, Artificial Sequence
  Description of Artificial Sequence: Synthetic oligonucleotide
aauuuguuacauaaaauga

SEQ ID NO: 72246 - RNA, 19 nt, Artificial Sequence
  Description of Artificial Sequence: Synthetic oligonucleotide
acuuucuguguauaaauua

SEQ ID NO: 72247 - RNA, 19 nt, Artificial Sequence
  Description of Artificial Sequence: Synthetic oligonucleotide
auuccuaaaaaauccuguu

SEQ ID NO: 72248 - RNA, 19 nt, Artificial Sequence
  Description of Artificial Sequence: Synthetic oligonucleotide
uuauauaaaaaaucaguag

SEQ ID NO: 72249 - RNA, 19 nt, Artificial Sequence
  Description of Artificial Sequence: Synthetic oligonucleotide
gaugaaaaaaauuucaaaa

SEQ ID NO: 72250 - RNA, 19 nt, Artificial Sequence
  Description of Artificial Sequence: Synthetic oligonucleotide
auguuuuuguauauucugu

SEQ ID NO: 72251 - RNA, 19 nt, Artificial Sequence
  Description of Artificial Sequence: Synthetic oligonucleotide
uuguaagaauuuauuccug

SEQ ID NO: 72252 - RNA, 19 nt, Artificial Sequence
  Description of Artificial Sequence: Synthetic oligonucleotide
guuauugcgauauacucug

SEQ ID NO: 72253 - RNA, 19 nt, Artificial Sequence
  Description of Artificial Sequence: Synthetic oligonucleotide
ggauucuuuacauaaugga

SEQ ID NO: 72254 - RNA, 19 nt, Artificial Sequence
  Description of Artificial Sequence: Synthetic oligonucleotide
aaaaaagaaacugucuauu

SEQ ID NO: 72255 - RNA, 19 nt, Artificial Sequence
  Description of Artificial Sequence: Synthetic oligonucleotide
uuugaauggcugaagcuaa

SEQ ID NO: 72256 - RNA, 19 nt, Artificial Sequence
  Description of Artificial Sequence: Synthetic oligonucleotide
aggcaacguuaguuucucu

SEQ ID NO: 72257 - RNA, 19 nt, Artificial Sequence
  Description of Artificial Sequence: Synthetic oligonucleotide
uuacucugcuuuuuucuag

SEQ ID NO: 72258 - RNA, 19 nt, Artificial Sequence
  Description of Artificial Sequence: Synthetic oligonucleotide
guaaaguacuacaugguuu

SEQ ID NO: 72259 - RNA, 19 nt, Artificial Sequence
  Description of Artificial Sequence: Synthetic oligonucleotide
uaaguuaaauaaaauaauu

SEQ ID NO: 72260 - RNA, 19 nt, Artificial Sequence
  Description of Artificial Sequence: Synthetic oligonucleotide
uaaaauaauucuguaugca

SEQ ID NO: 72261 - RNA, 25 nt, Artificial Sequence
  Description of Artificial Sequence: Synthetic oligonucleotide
ggggaauuucaucccaaauaaaagg

SEQ ID NO: 72262 - RNA, 25 nt, Artificial Sequence
  Description of Artificial Sequence: Synthetic oligonucleotide
gaaugaagucuggcuccggaggagg

SEQ ID NO: 72263 - RNA, 25 nt, Artificial Sequence
  Description of Artificial Sequence: Synthetic oligonucleotide
gguccccgaccucgcugugggggcu

SEQ ID NO: 72264 - RNA, 25 nt, Artificial Sequence
  Description of Artificial Sequence: Synthetic oligonucleotide
uccuguuucucuccgccgcgcucuc

SEQ ID NO: 72265 - RNA, 25 nt, Artificial Sequence
  Description of Artificial Sequence: Synthetic oligonucleotide
cgcucuggccgacgaguggagaaau

SEQ ID NO: 72266 - RNA, 25 nt, Artificial Sequence
  Description of Artificial Sequence: Synthetic oligonucleotide
ucugcgggccaggcaucgacauccg

SEQ ID NO: 72267 - RNA, 25 nt, Artificial Sequence
  Description of Artificial Sequence: Synthetic oligonucleotide
gcaacgacuaucagcagcugaagcg

SEQ ID NO: 72268 - RNA, 25 nt, Artificial Sequence
  Description of Artificial Sequence: Synthetic oligonucleotide
gccuggagaacugcacggugaucga

SEQ ID NO: 72269 - RNA, 25 nt, Artificial Sequence
  Description of Artificial Sequence: Synthetic oligonucleotide
agggcuaccuccacauccugcucau

SEQ ID NO: 72270 - RNA, 25 nt, Artificial Sequence
  Description of Artificial Sequence: Synthetic oligonucleotide
ucuccaaggccgaggacuaccgcag

SEQ ID NO: 72271 - RNA, 25 nt, Artificial Sequence
  Description of Artificial Sequence: Synthetic oligonucleotide
gcuaccgcuuccccaagcucacggu

SEQ ID NO: 72272 - RNA, 25 nt, Artificial Sequence
  Description of Artificial Sequence: Synthetic oligonucleotide
ucauuaccgaguacuugcugcuguu

SEQ ID NO: 72273 - RNA, 25 nt, Artificial Sequence
  Description of Artificial Sequence: Synthetic oligonucleotide
uccgaguggcuggccucgagagccu

SEQ ID NO: 72274 - RNA, 25 nt, Artificial Sequence
  Description of Artificial Sequence: Synthetic oligonucleotide
ucggagaccucuuccccaaccucac

SEQ ID NO: 72275 - RNA, 25 nt, Artificial Sequence
  Description of Artificial Sequence: Synthetic oligonucleotide
cggucauccgcggcuggaaacucuu

SEQ ID NO: 72276 - RNA, 25 nt, Artificial Sequence
  Description of Artificial Sequence: Synthetic oligonucleotide
ucuacaacuacgcccuggucaucuu

SEQ ID NO: 72277 - RNA, 25 nt, Artificial Sequence
  Description of Artificial Sequence: Synthetic oligonucleotide
ucgagaugaccaaucucaaggauau

SEQ ID NO: 72278 - RNA, 25 nt, Artificial Sequence
  Description of Artificial Sequence: Synthetic oligonucleotide
uugggcuuuacaaccugaggaacau

SEQ ID NO: 72279 - RNA, 25 nt, Artificial Sequence
  Description of Artificial Sequence: Synthetic oligonucleotide
uuacucggggggccaucaggauuga

SEQ ID NO: 72280 - RNA, 25 nt, Artificial Sequence
  Description of Artificial Sequence: Synthetic oligonucleotide
agaaaaaugcugaccucuguuaccu

SEQ ID NO: 72281 - RNA, 25 nt, Artificial Sequence
  Description of Artificial Sequence: Synthetic oligonucleotide
ucuccacuguggacuggucccugau

SEQ ID NO: 72282 - RNA, 25 nt, Artificial Sequence
  Description of Artificial Sequence: Synthetic oligonucleotide
uccuggaugcgguguccaauaacua

SEQ ID NO: 72283 - RNA, 25 nt, Artificial Sequence
  Description of Artificial Sequence: Synthetic oligonucleotide
acauuguggggaauaagcccccaaa

SEQ ID NO: 72284 - RNA, 25 nt, Artificial Sequence
  Description of Artificial Sequence: Synthetic oligonucleotide
aggaauguggggaccuguguccagg

SEQ ID NO: 72285 - RNA, 25 nt, Artificial Sequence
  Description of Artificial Sequence: Synthetic oligonucleotide
ggaccauggaggagaagccgaugug

SEQ ID NO: 72286 - RNA, 25 nt, Artificial Sequence
  Description of Artificial Sequence: Synthetic oligonucleotide
gugagaagaccaccaucaacaauga

SEQ ID NO: 72287 - RNA, 25 nt, Artificial Sequence
  Description of Artificial Sequence: Synthetic oligonucleotide
aguacaacuaccgcugcuggaccac

SEQ ID NO: 72288 - RNA, 25 nt, Artificial Sequence
  Description of Artificial Sequence: Synthetic oligonucleotide
caaaccgcugccagaaaaugugccc

SEQ ID NO: 72289 - RNA, 25 nt, Artificial Sequence
  Description of Artificial Sequence: Synthetic oligonucleotide
caagcacgugugggaagcgggcgug

SEQ ID NO: 72290 - RNA, 25 nt, Artificial Sequence
  Description of Artificial Sequence: Synthetic oligonucleotide
gcaccgagaacaaugagugcugcca

SEQ ID NO: 72291 - RNA, 25 nt, Artificial Sequence
  Description of Artificial Sequence: Synthetic oligonucleotide
accccgagugccugggcagcugcag

SEQ ID NO: 72292 - RNA, 25 nt, Artificial Sequence
  Description of Artificial Sequence: Synthetic oligonucleotide
gcgcgccugacaacgacacggccug

SEQ ID NO: 72293 - RNA, 25 nt, Artificial Sequence
  Description of Artificial Sequence: Synthetic oligonucleotide
guguagcuugccgccacuacuacua

SEQ ID NO: 72294 - RNA, 25 nt, Artificial Sequence
  Description of Artificial Sequence: Synthetic oligonucleotide
augccggugucugugugccugccug

SEQ ID NO: 72295 - RNA, 25 nt, Artificial Sequence
  Description of Artificial Sequence: Synthetic oligonucleotide
gcccgcccaacaccuacagguuuga

SEQ ID NO: 72296 - RNA, 25 nt, Artificial Sequence
  Description of Artificial Sequence: Synthetic oligonucleotide
agggcuggcgcuguguggaccguga

SEQ ID NO: 72297 - RNA, 25 nt, Artificial Sequence
  Description of Artificial Sequence: Synthetic oligonucleotide
acuucugcgccaacauccucagcgc

SEQ ID NO: 72298 - RNA, 25 nt, Artificial Sequence
  Description of Artificial Sequence: Synthetic oligonucleotide
ccgagagcagcgacuccgagggguu

SEQ ID NO: 72299 - RNA, 25 nt, Artificial Sequence
  Description of Artificial Sequence: Synthetic oligonucleotide
uugugauccacgacggcgagugcau

SEQ ID NO: 72300 - RNA, 25 nt, Artificial Sequence
  Description of Artificial Sequence: Synthetic oligonucleotide
ugcaggagugccccucgggcuucau

SEQ ID NO: 72301 - RNA, 25 nt, Artificial Sequence
  Description of Artificial Sequence: Synthetic oligonucleotide
uccgcaacggcagccagagcaugua

SEQ ID NO: 72302 - RNA, 25 nt, Artificial Sequence
  Description of Artificial Sequence: Synthetic oligonucleotide
acugcaucccuugugaagguccuug

SEQ ID NO: 72303 - RNA, 25 nt, Artificial Sequence
  Description of Artificial Sequence: Synthetic oligonucleotide
gcccgaaggucugugaggaagaaaa

SEQ ID NO: 72304 - RNA, 25 nt, Artificial Sequence
  Description of Artificial Sequence: Synthetic oligonucleotide
agaaaacaaagaccauugauucugu

SEQ ID NO: 72305 - RNA, 25 nt, Artificial Sequence
  Description of Artificial Sequence: Synthetic oligonucleotide
uuacuucugcucagaugcuccaagg

SEQ ID NO: 72306 - RNA, 25 nt, Artificial Sequence
  Description of Artificial Sequence: Synthetic oligonucleotide
gaugcaccaucuucaagggcaauuu

SEQ ID NO: 72307 - RNA, 25 nt, Artificial Sequence
  Description of Artificial Sequence: Synthetic oligonucleotide
ugcucauuaacauccgacgggggaa

SEQ ID NO: 72308 - RNA, 25 nt, Artificial Sequence
  Description of Artificial Sequence: Synthetic oligonucleotide
auaacauugcuucagagcuggagaa

SEQ ID NO: 72309 - RNA, 25 nt, Artificial Sequence
  Description of Artificial Sequence: Synthetic oligonucleotide
acuucauggggcucaucgagguggu

SEQ ID NO: 72310 - RNA, 25 nt, Artificial Sequence
  Description of Artificial Sequence: Synthetic oligonucleotide
ugacgggcuacgugaagauccgcca

SEQ ID NO: 72311 - RNA, 25 nt, Artificial Sequence
  Description of Artificial Sequence: Synthetic oligonucleotide
auucucaugccuuggucuccuuguc

SEQ ID NO: 72312 - RNA, 25 nt, Artificial Sequence
  Description of Artificial Sequence: Synthetic oligonucleotide
ccuuccuaaaaaaccuucgccucau

SEQ ID NO: 72313 - RNA, 25 nt, Artificial Sequence
  Description of Artificial Sequence: Synthetic oligonucleotide
uccuaggagaggagcagcuagaagg

SEQ ID NO: 72314 - RNA, 25 nt, Artificial Sequence
  Description of Artificial Sequence: Synthetic oligonucleotide
ggaauuacuccuucuacguccucga

SEQ ID NO: 72315 - RNA, 25 nt, Artificial Sequence
  Description of Artificial Sequence: Synthetic oligonucleotide
acaaccagaacuugcagcaacugug

SEQ ID NO: 72316 - RNA, 25 nt, Artificial Sequence
  Description of Artificial Sequence: Synthetic oligonucleotide
gggacugggaccaccgcaaccugac

SEQ ID NO: 72317 - RNA, 25 nt, Artificial Sequence
  Description of Artificial Sequence: Synthetic oligonucleotide
ccaucaaagcagggaaaauguacuu

SEQ ID NO: 72318 - RNA, 25 nt, Artificial Sequence
  Description of Artificial Sequence: Synthetic oligonucleotide
uugcuuucaaucccaaauuaugugu

SEQ ID NO: 72319 - RNA, 25 nt, Artificial Sequence
  Description of Artificial Sequence: Synthetic oligonucleotide
uuuccgaaauuuaccgcauggagga

SEQ ID NO: 72320 - RNA, 25 nt, Artificial Sequence
  Description of Artificial Sequence: Synthetic oligonucleotide
aagugacggggacuaaagggcgcca

SEQ ID NO: 72321 - RNA, 25 nt, Artificial Sequence
  Description of Artificial Sequence: Synthetic oligonucleotide
aaagcaaaggggacauaaacaccag

SEQ ID NO: 72322 - RNA, 25 nt, Artificial Sequence
  Description of Artificial Sequence: Synthetic oligonucleotide
ggaacaacggggagagagccuccug

SEQ ID NO: 72323 - RNA, 25 nt, Artificial Sequence
  Description of Artificial Sequence: Synthetic oligonucleotide
gugaaagugacguccugcauuucac

SEQ ID NO: 72324 - RNA, 25 nt, Artificial Sequence
  Description of Artificial Sequence: Synthetic oligonucleotide
ccuccaccaccacgucgaagaaucg

SEQ ID NO: 72325 - RNA, 25 nt, Artificial Sequence
  Description of Artificial Sequence: Synthetic oligonucleotide
gcaucaucauaaccuggcaccggua

SEQ ID NO: 72326 - RNA, 25 nt, Artificial Sequence
  Description of Artificial Sequence: Synthetic oligonucleotide
accggcccccugacuacagggaucu

SEQ ID NO: 72327 - RNA, 25 nt, Artificial Sequence
  Description of Artificial Sequence: Synthetic oligonucleotide
ucaucagcuucaccguuuacuacaa

SEQ ID NO: 72328 - RNA, 25 nt, Artificial Sequence
  Description of Artificial Sequence: Synthetic oligonucleotide
aggaagcacccuuuaagaaugucac

SEQ ID NO: 72329 - RNA, 25 nt, Artificial Sequence
  Description of Artificial Sequence: Synthetic oligonucleotide
cagaguaugaugggcaggaugccug

SEQ ID NO: 72330 - RNA, 25 nt, Artificial Sequence
  Description of Artificial Sequence: Synthetic oligonucleotide
gcggcuccaacagcuggaacauggu

SEQ ID NO: 72331 - RNA, 25 nt, Artificial Sequence
  Description of Artificial Sequence: Synthetic oligonucleotide
uggacguggaccucccgcccaacaa

SEQ ID NO: 72332 - RNA, 25 nt, Artificial Sequence
  Description of Artificial Sequence: Synthetic oligonucleotide
aggacguggagcccggcaucuuacu

SEQ ID NO: 72333 - RNA, 25 nt, Artificial Sequence
  Description of Artificial Sequence: Synthetic oligonucleotide
uacaugggcugaagcccuggacuca

SEQ ID NO: 72334 - RNA, 25 nt, Artificial Sequence
  Description of Artificial Sequence: Synthetic oligonucleotide
aguacgccguuuacgucaaggcugu

SEQ ID NO: 72335 - RNA, 25 nt, Artificial Sequence
  Description of Artificial Sequence: Synthetic oligonucleotide
ugacccucaccaugguggagaacga

SEQ ID NO: 72336 - RNA, 25 nt, Artificial Sequence
  Description of Artificial Sequence: Synthetic oligonucleotide
accauauccguggggccaagaguga

SEQ ID NO: 72337 - RNA, 25 nt, Artificial Sequence
  Description of Artificial Sequence: Synthetic oligonucleotide
agaucuuguacauucgcaccaaugc

SEQ ID NO: 72338 - RNA, 25 nt, Artificial Sequence
  Description of Artificial Sequence: Synthetic oligonucleotide
cuucaguuccuuccauucccuugga

SEQ ID NO: 72339 - RNA, 25 nt, Artificial Sequence
  Description of Artificial Sequence: Synthetic oligonucleotide
acguucuuucagcaucgaacuccuc

SEQ ID NO: 72340 - RNA, 25 nt, Artificial Sequence
  Description of Artificial Sequence: Synthetic oligonucleotide
cuucucaguuaaucgugaaguggaa

SEQ ID NO: 72341 - RNA, 25 nt, Artificial Sequence
  Description of Artificial Sequence: Synthetic oligonucleotide
acccucccucucugcccaacggcaa

SEQ ID NO: 72342 - RNA, 25 nt, Artificial Sequence
  Description of Artificial Sequence: Synthetic oligonucleotide
accugaguuacuacauugugcgcug

SEQ ID NO: 72343 - RNA, 25 nt, Artificial Sequence
  Description of Artificial Sequence: Synthetic oligonucleotide
ggcagcggcagccucaggacggcua

SEQ ID NO: 72344 - RNA, 25 nt, Artificial Sequence
  Description of Artificial Sequence: Synthetic oligonucleotide
accuuuaccggcacaauuacugcuc

SEQ ID NO: 72345 - RNA, 25 nt, Artificial Sequence
  Description of Artificial Sequence: Synthetic oligonucleotide
ccaaagacaaaauccccaucaggaa

SEQ ID NO: 72346 - RNA, 25 nt, Artificial Sequence
  Description of Artificial Sequence: Synthetic oligonucleotide
aguaugccgacggcaccaucgacau

SEQ ID NO: 72347 - RNA, 25 nt, Artificial Sequence
  Description of Artificial Sequence: Synthetic oligonucleotide
uugaggaggucacagagaaccccaa

SEQ ID NO: 72348 - RNA, 25 nt, Artificial Sequence
  Description of Artificial Sequence: Synthetic oligonucleotide
agacugaggugugugguggggagaa

SEQ ID NO: 72349 - RNA, 25 nt, Artificial Sequence
  Description of Artificial Sequence: Synthetic oligonucleotide
aagggccuugcugcgccugccccaa

SEQ ID NO: 72350 - RNA, 25 nt, Artificial Sequence
  Description of Artificial Sequence: Synthetic oligonucleotide
aaacugaagccgagaagcaggccga

SEQ ID NO: 72351 - RNA, 25 nt, Artificial Sequence
  Description of Artificial Sequence: Synthetic oligonucleotide
agaaggaggaggcugaauaccgcaa

SEQ ID NO: 72352 - RNA, 25 nt, Artificial Sequence
  Description of Artificial Sequence: Synthetic oligonucleotide
aagucuuugagaauuuccugcacaa

SEQ ID NO: 72353 - RNA, 25 nt, Artificial Sequence
  Description of Artificial Sequence: Synthetic oligonucleotide
acuccaucuucgugcccagaccuga

SEQ ID NO: 72354 - RNA, 25 nt, Artificial Sequence
  Description of Artificial Sequence: Synthetic oligonucleotide
aaaggaagcggagagaugucaugca

SEQ ID NO: 72355 - RNA, 25 nt, Artificial Sequence
  Description of Artificial Sequence: Synthetic oligonucleotide
aaguggccaacaccaccauguccag

SEQ ID NO: 72356 - RNA, 25 nt, Artificial Sequence
  Description of Artificial Sequence: Synthetic oligonucleotide
gccgaagcaggaacaccacggccgc

SEQ ID NO: 72357 - RNA, 25 nt, Artificial Sequence
  Description of Artificial Sequence: Synthetic oligonucleotide
cagacaccuacaacaucaccgaccc

SEQ ID NO: 72358 - RNA, 25 nt, Artificial Sequence
  Description of Artificial Sequence: Synthetic oligonucleotide
cggaagagcuggagacagaguaccc

SEQ ID NO: 72359 - RNA, 25 nt, Artificial Sequence
  Description of Artificial Sequence: Synthetic oligonucleotide
cuuucuuugagagcagaguggauaa

SEQ ID NO: 72360 - RNA, 25 nt, Artificial Sequence
  Description of Artificial Sequence: Synthetic oligonucleotide
acaaggagagaacugucauuucuaa

SEQ ID NO: 72361 - RNA, 25 nt, Artificial Sequence
  Description of Artificial Sequence: Synthetic oligonucleotide
accuucggccuuucacauuguaccg

SEQ ID NO: 72362 - RNA, 25 nt, Artificial Sequence
  Description of Artificial Sequence: Synthetic oligonucleotide
gcaucgauauccacagcugcaacca

SEQ ID NO: 72363 - RNA, 25 nt, Artificial Sequence
  Description of Artificial Sequence: Synthetic oligonucleotide
acgaggcugagaagcugggcugcag

SEQ ID NO: 72364 - RNA, 25 nt, Artificial Sequence
  Description of Artificial Sequence: Synthetic oligonucleotide
gcgccuccaacuucgucuuugcaag

SEQ ID NO: 72365 - RNA, 25 nt, Artificial Sequence
  Description of Artificial Sequence: Synthetic oligonucleotide
ggacuaugcccgcagaaggagcaga

SEQ ID NO: 72366 - RNA, 25 nt, Artificial Sequence
  Description of Artificial Sequence: Synthetic oligonucleotide
augacauuccugggccagugaccug

SEQ ID NO: 72367 - RNA, 25 nt, Artificial Sequence
  Description of Artificial Sequence: Synthetic oligonucleotide
gggagccaaggccugaaaacuccau

SEQ ID NO: 72368 - RNA, 25 nt, Artificial Sequence
  Description of Artificial Sequence: Synthetic oligonucleotide
ucuuuuuaaaguggccggaaccuga

SEQ ID NO: 72369 - RNA, 25 nt, Artificial Sequence
  Description of Artificial Sequence: Synthetic oligonucleotide
agaaucccaauggauugauucuaau

SEQ ID NO: 72370 - RNA, 25 nt, Artificial Sequence
  Description of Artificial Sequence: Synthetic oligonucleotide
uguaugaaauaaaauacggaucaca

SEQ ID NO: 72371 - RNA, 25 nt, Artificial Sequence
  Description of Artificial Sequence: Synthetic oligonucleotide
aaguugaggaucagcgagaaugugu

SEQ ID NO: 72372 - RNA, 25 nt, Artificial Sequence
  Description of Artificial Sequence: Synthetic oligonucleotide
uguccagacaggaauacaggaagua

SEQ ID NO: 72373 - RNA, 25 nt, Artificial Sequence
  Description of Artificial Sequence: Synthetic oligonucleotide
auggaggggccaagcuaaaccggcu

SEQ ID NO: 72374 - RNA, 25 nt, Artificial Sequence
  Description of Artificial Sequence: Synthetic oligonucleotide
uaaacccggggaacuacacagcccg

SEQ ID NO: 72375 - RNA, 25 nt, Artificial Sequence
  Description of Artificial Sequence: Synthetic oligonucleotide
ggauucaggccacaucucucucugg

SEQ ID NO: 72376 - RNA, 25 nt, Artificial Sequence
  Description of Artificial Sequence: Synthetic oligonucleotide
ggaaugggucguggacagauccugu

SEQ ID NO: 72377 - RNA, 25 nt, Artificial Sequence
  Description of Artificial Sequence: Synthetic oligonucleotide
uguucuucuauguccaggccaaaac

SEQ ID NO: 72378 - RNA, 25 nt, Artificial Sequence
  Description of Artificial Sequence: Synthetic oligonucleotide
caggauaugaaaacuucauccaucu

SEQ ID NO: 72379 - RNA, 25 nt, Artificial Sequence
  Description of Artificial Sequence: Synthetic oligonucleotide
ugaucaucgcucugcccgucgcugu

SEQ ID NO: 72380 - RNA, 25 nt, Artificial Sequence
  Description of Artificial Sequence: Synthetic oligonucleotide
uccuguugaucgugggaggguuggu

SEQ ID NO: 72381 - RNA, 25 nt, Artificial Sequence
  Description of Artificial Sequence: Synthetic oligonucleotide
ugauuaugcuguacgucuuccauag

SEQ ID NO: 72382 - RNA, 25 nt, Artificial Sequence
  Description of Artificial Sequence: Synthetic oligonucleotide
gaaagagaaauaacagcaggcuggg

SEQ ID NO: 72383 - RNA, 25 nt, Artificial Sequence
  Description of Artificial Sequence: Synthetic oligonucleotide
ggaauggagugcuguaugccucugu

SEQ ID NO: 72384 - RNA, 25 nt, Artificial Sequence
  Description of Artificial Sequence: Synthetic oligonucleotide
ugaacccggaguacuucagcgcugc

SEQ ID NO: 72385 - RNA, 25 nt, Artificial Sequence
  Description of Artificial Sequence: Synthetic oligonucleotide
cugauguguacguuccugaugagug

SEQ ID NO: 72386 - RNA, 25 nt, Artificial Sequence
  Description of Artificial Sequence: Synthetic oligonucleotide
gggagguggcucgggagaagaucac

SEQ ID NO: 72387 - RNA, 25 nt, Artificial Sequence
  Description of Artificial Sequence: Synthetic oligonucleotide
ccaugagccgggaacuugggcaggg

SEQ ID NO: 72388 - RNA, 25 nt, Artificial Sequence
  Description of Artificial Sequence: Synthetic oligonucleotide
ggucguuugggauggucuaugaagg

SEQ ID NO: 72389 - RNA, 25 nt, Artificial Sequence
  Description of Artificial Sequence: Synthetic oligonucleotide
gaguugccaaggguguggugaaaga

SEQ ID NO: 72390 - RNA, 25 nt, Artificial Sequence
  Description of Artificial Sequence: Synthetic oligonucleotide
augaaccugaaaccagaguggccau

SEQ ID NO: 72391 - RNA, 25 nt, Artificial Sequence
  Description of Artificial Sequence: Synthetic oligonucleotide
uuaaaacagugaacgaggccgcaag

SEQ ID NO: 72392 - RNA, 25 nt, Artificial Sequence
  Description of Artificial Sequence: Synthetic oligonucleotide
gcaugcgugagaggauugaguuucu

SEQ ID NO: 72393 - RNA, 25 nt, Artificial Sequence
  Description of Artificial Sequence: Synthetic oligonucleotide
ucaacgaagcuucugugaugaagga

SEQ ID NO: 72394 - RNA, 25 nt, Artificial Sequence
  Description of Artificial Sequence: Synthetic oligonucleotide
aguucaauugucaccauguggugcg

SEQ ID NO: 72395 - RNA, 25 nt, Artificial Sequence
  Description of Artificial Sequence: Synthetic oligonucleotide
gauugcuggguguggugucccaagg

SEQ ID NO: 72396 - RNA, 25 nt, Artificial Sequence
  Description of Artificial Sequence: Synthetic oligonucleotide
gccagccaacacuggucaucaugga

SEQ ID NO: 72397 - RNA, 25 nt, Artificial Sequence
  Description of Artificial Sequence: Synthetic oligonucleotide
aacugaugacacggggcgaucucaa

SEQ ID NO: 72398 - RNA, 25 nt, Artificial Sequence
  Description of Artificial Sequence: Synthetic oligonucleotide
aaaguuaucuccggucucugaggcc

SEQ ID NO: 72399 - RNA, 25 nt, Artificial Sequence
  Description of Artificial Sequence: Synthetic oligonucleotide
cagaaauggagaauaauccaguccu

SEQ ID NO: 72400 - RNA, 25 nt, Artificial Sequence
  Description of Artificial Sequence: Synthetic oligonucleotide
uagcaccuccaagccugagcaagau

SEQ ID NO: 72401 - RNA, 25 nt, Artificial Sequence
  Description of Artificial Sequence: Synthetic oligonucleotide
ugauucagauggccggagagauugc

SEQ ID NO: 72402 - RNA, 25 nt, Artificial Sequence
  Description of Artificial Sequence: Synthetic oligonucleotide
cagacggcauggcauaccucaacgc

SEQ ID NO: 72403 - RNA, 25 nt, Artificial Sequence
  Description of Artificial Sequence: Synthetic oligonucleotide
ccaauaaguucguccacagagaccu

SEQ ID NO: 72404 - RNA, 25 nt, Artificial Sequence
  Description of Artificial Sequence: Synthetic oligonucleotide
uugcugcccggaauugcaugguagc

SEQ ID NO: 72405 - RNA, 25 nt, Artificial Sequence
  Description of Artificial Sequence: Synthetic oligonucleotide
ccgaagauuucacagucaaaaucgg

SEQ ID NO: 72406 - RNA, 25 nt, Artificial Sequence
  Description of Artificial Sequence: Synthetic oligonucleotide
gagauuuugguaugacgcgagauau

SEQ ID NO: 72407 - RNA, 25 nt, Artificial Sequence
  Description of Artificial Sequence: Synthetic oligonucleotide
ucuaugagacagacuauuaccggaa

SEQ ID NO: 72408 - RNA, 25 nt, Artificial Sequence
  Description of Artificial Sequence: Synthetic oligonucleotide
aaggagggaaagggcugcugcccgu

SEQ ID NO: 72409 - RNA, 25 nt, Artificial Sequence
  Description of Artificial Sequence: Synthetic oligonucleotide
ugcgcuggaugucuccugagucccu

SEQ ID NO: 72410 - RNA, 25 nt, Artificial Sequence
  Description of Artificial Sequence: Synthetic oligonucleotide
ucaaggauggagucuucaccacuua

SEQ ID NO: 72411 - RNA, 25 nt, Artificial Sequence
  Description of Artificial Sequence: Synthetic oligonucleotide
acucggacgucugguccuucggggu

SEQ ID NO: 72412 - RNA, 25 nt, Artificial Sequence
  Description of Artificial Sequence: Synthetic oligonucleotide
ucguccucugggagaucgccacacu

SEQ ID NO: 72413 - RNA, 25 nt, Artificial Sequence
  Description of Artificial Sequence: Synthetic oligonucleotide
uggccgagcagcccuaccagggcuu

SEQ ID NO: 72414 - RNA, 25 nt, Artificial Sequence
  Description of Artificial Sequence: Synthetic oligonucleotide
uguccaacgagcaaguccuucgcuu

SEQ ID NO: 72415 - RNA, 25 nt, Artificial Sequence
  Description of Artificial Sequence: Synthetic oligonucleotide
ucgucauggagggcggccuucugga

SEQ ID NO: 72416 - RNA, 25 nt, Artificial Sequence
  Description of Artificial Sequence: Synthetic oligonucleotide
acaagccagacaacuguccugacau

SEQ ID NO: 72417 - RNA, 25 nt, Artificial Sequence
  Description of Artificial Sequence: Synthetic oligonucleotide
ugcuguuugaacugaugcgcaugug

SEQ ID NO: 72418 - RNA, 25 nt, Artificial Sequence
  Description of Artificial Sequence: Synthetic oligonucleotide
gcuggcaguauaaccccaagaugag

SEQ ID NO: 72419 - RNA, 25 nt, Artificial Sequence
  Description of Artificial Sequence: Synthetic oligonucleotide
ggccuuccuuccuggagaucaucag

SEQ ID NO: 72420 - RNA, 25 nt, Artificial Sequence
  Description of Artificial Sequence: Synthetic oligonucleotide
gcagcaucaaagaggagauggagcc

SEQ ID NO: 72421 - RNA, 25 nt, Artificial Sequence
  Description of Artificial Sequence: Synthetic oligonucleotide
cuggcuuccgggaggucuccuucua

SEQ ID NO: 72422 - RNA, 25 nt, Artificial Sequence
  Description of Artificial Sequence: Synthetic oligonucleotide
acuacagcgaggagaacaagcugcc

SEQ ID NO: 72423 - RNA, 25 nt, Artificial Sequence
  Description of Artificial Sequence: Synthetic oligonucleotide
ccgagccggaggagcuggaccugga

SEQ ID NO: 72424 - RNA, 25 nt, Artificial Sequence
  Description of Artificial Sequence: Synthetic oligonucleotide
agccagagaacauggagagcguccc

SEQ ID NO: 72425 - RNA, 25 nt, Artificial Sequence
  Description of Artificial Sequence: Synthetic oligonucleotide
cccuggaccccucggccuccucguc

SEQ ID NO: 72426 - RNA, 25 nt, Artificial Sequence
  Description of Artificial Sequence: Synthetic oligonucleotide
ccucccugccacugcccgacagaca

SEQ ID NO: 72427 - RNA, 25 nt, Artificial Sequence
  Description of Artificial Sequence: Synthetic oligonucleotide
acucaggacacaaggccgagaacgg

SEQ ID NO: 72428 - RNA, 25 nt, Artificial Sequence
  Description of Artificial Sequence: Synthetic oligonucleotide
gccccggcccuggggugcugguccu

SEQ ID NO: 72429 - RNA, 25 nt, Artificial Sequence
  Description of Artificial Sequence: Synthetic oligonucleotide
uccgcgccagcuucgacgagagaca

SEQ ID NO: 72430 - RNA, 25 nt, Artificial Sequence
  Description of Artificial Sequence: Synthetic oligonucleotide
agccuuacgcccacaugaacggggg

SEQ ID NO: 72431 - RNA, 25 nt, Artificial Sequence
  Description of Artificial Sequence: Synthetic oligonucleotide
gccgcaagaacgagcgggccuugcc

SEQ ID NO: 72432 - RNA, 25 nt, Artificial Sequence
  Description of Artificial Sequence: Synthetic oligonucleotide
cgcugccccagucuucgaccugcug

SEQ ID NO: 72433 - RNA, 25 nt, Artificial Sequence
  Description of Artificial Sequence: Synthetic oligonucleotide
gauccuuggauccugaaucugugca

SEQ ID NO: 72434 - RNA, 25 nt, Artificial Sequence
  Description of Artificial Sequence: Synthetic oligonucleotide
aaacaguaacgugugcgcacgcgca

SEQ ID NO: 72435 - RNA, 25 nt, Artificial Sequence
  Description of Artificial Sequence: Synthetic oligonucleotide
agcgggguggggggggagagagagu

SEQ ID NO: 72436 - RNA, 25 nt, Artificial Sequence
  Description of Artificial Sequence: Synthetic oligonucleotide
uuuuaacaauccauucacaagccuc

SEQ ID NO: 72437 - RNA, 25 nt, Artificial Sequence
  Description of Artificial Sequence: Synthetic oligonucleotide
ccuguaccucaguggaucuucagaa

SEQ ID NO: 72438 - RNA, 25 nt, Artificial Sequence
  Description of Artificial Sequence: Synthetic oligonucleotide
acugcccuugcugcccgcgggagac

SEQ ID NO: 72439 - RNA, 25 nt, Artificial Sequence
  Description of Artificial Sequence: Synthetic oligonucleotide
cagcuucucugcaguaaaacacauu

SEQ ID NO: 72440 - RNA, 25 nt, Artificial Sequence
  Description of Artificial Sequence: Synthetic oligonucleotide
uugggauguuccuuuuuucaauaug

SEQ ID NO: 72441 - RNA, 25 nt, Artificial Sequence
  Description of Artificial Sequence: Synthetic oligonucleotide
gcaagcagcuuuuuauucccugccc

SEQ ID NO: 72442 - RNA, 25 nt, Artificial Sequence
  Description of Artificial Sequence: Synthetic oligonucleotide
caaacccuuaacugacaugggccuu

SEQ ID NO: 72443 - RNA, 25 nt, Artificial Sequence
  Description of Artificial Sequence: Synthetic oligonucleotide
uuaagaaccuuaaugacaacacuua

SEQ ID NO: 72444 - RNA, 25 nt, Artificial Sequence
  Description of Artificial Sequence: Synthetic oligonucleotide
aauagcaacagagcacuugagaacc

SEQ ID NO: 72445 - RNA, 25 nt, Artificial Sequence
  Description of Artificial Sequence: Synthetic oligonucleotide
cagucuccucacucugucccugucc

SEQ ID NO: 72446 - RNA, 25 nt, Artificial Sequence
  Description of Artificial Sequence: Synthetic oligonucleotide
cuucccuguucucccuuucucucuc

SEQ ID NO: 72447 - RNA, 25 nt, Artificial Sequence
  Description of Artificial Sequence: Synthetic oligonucleotide
ccucucugcuucauaacggaaaaau

SEQ ID NO: 72448 - RNA, 25 nt, Artificial Sequence
  Description of Artificial Sequence: Synthetic oligonucleotide
uaauugccacaaguccagcugggaa

SEQ ID NO: 72449 - RNA, 25 nt, Artificial Sequence
  Description of Artificial Sequence: Synthetic oligonucleotide
agcccuuuuuaucaguuugaggaag

SEQ ID NO: 72450 - RNA, 25 nt, Artificial Sequence
  Description of Artificial Sequence: Synthetic oligonucleotide
guggcugucccuguggccccaucca

SEQ ID NO: 72451 - RNA, 25 nt, Artificial Sequence
  Description of Artificial Sequence: Synthetic oligonucleotide
aaccacuguacacacccgccugaca

SEQ ID NO: 72452 - RNA, 25 nt, Artificial Sequence
  Description of Artificial Sequence: Synthetic oligonucleotide
accgugggucauuacaaaaaaacac

SEQ ID NO: 72453 - RNA, 25 nt, Artificial Sequence
  Description of Artificial Sequence: Synthetic oligonucleotide
cguggagauggaaauuuuuaccuuu

SEQ ID NO: 72454 - RNA, 25 nt, Artificial Sequence
  Description of Artificial Sequence: Synthetic oligonucleotide
uaucuuucaccuuucuagggacaug

SEQ ID NO: 72455 - RNA, 25 nt, Artificial Sequence
  Description of Artificial Sequence: Synthetic oligonucleotide
gaaauuuacaaagggccaucguuca

SEQ ID NO: 72456 - RNA, 25 nt, Artificial Sequence
  Description of Artificial Sequence: Synthetic oligonucleotide
auccaaggcuguuaccauuuuaacg

SEQ ID NO: 72457 - RNA, 25 nt, Artificial Sequence
  Description of Artificial Sequence: Synthetic oligonucleotide
gcugccuaauuuugccaaaauccug

SEQ ID NO: 72458 - RNA, 25 nt, Artificial Sequence
  Description of Artificial Sequence: Synthetic oligonucleotide
gaacuuucucccucaucggcccggc

SEQ ID NO: 72459 - RNA, 25 nt, Artificial Sequence
  Description of Artificial Sequence: Synthetic oligonucleotide
cgcugauuccucguguccggaggca

SEQ ID NO: 72460 - RNA, 25 nt, Artificial Sequence
  Description of Artificial Sequence: Synthetic oligonucleotide
augggugagcauggcagcugguugc

SEQ ID NO: 72461 - RNA, 25 nt, Artificial Sequence
  Description of Artificial Sequence: Synthetic oligonucleotide
cuccauuugagagacacgcuggcga

SEQ ID NO: 72462 - RNA, 25 nt, Artificial Sequence
  Description of Artificial Sequence: Synthetic oligonucleotide
acacacuccguccauccgacugccc

SEQ ID NO: 72463 - RNA, 25 nt, Artificial Sequence
  Description of Artificial Sequence: Synthetic oligonucleotide
ccugcugugcugcucaaggccacag

SEQ ID NO: 72464 - RNA, 25 nt, Artificial Sequence
  Description of Artificial Sequence: Synthetic oligonucleotide
ggcacacaggucucauugcuucuga

SEQ ID NO: 72465 - RNA, 25 nt, Artificial Sequence
  Description of Artificial Sequence: Synthetic oligonucleotide
acuagauuauuauuugggggaacug

SEQ ID NO: 72466 - RNA, 25 nt, Artificial Sequence
  Description of Artificial Sequence: Synthetic oligonucleotide
ggacacaauaggucuuucucucagu

SEQ ID NO: 72467 - RNA, 25 nt, Artificial Sequence
  Description of Artificial Sequence: Synthetic oligonucleotide
ugaagguggggagaagcugaaccgg

SEQ ID NO: 72468 - RNA, 25 nt, Artificial Sequence
  Description of Artificial Sequence: Synthetic oligonucleotide
gcuucccugcccugccuccccagcc

SEQ ID NO: 72469 - RNA, 25 nt, Artificial Sequence
  Description of Artificial Sequence: Synthetic oligonucleotide
ccccugcccaacccccaagaaucug

SEQ ID NO: 72470 - RNA, 25 nt, Artificial Sequence
  Description of Artificial Sequence: Synthetic oligonucleotide
gguggccaugggccccgaagcagcc

SEQ ID NO: 72471 - RNA, 25 nt, Artificial Sequence
  Description of Artificial Sequence: Synthetic oligonucleotide
cuggcggacaggcuuggagucaagg

SEQ ID NO: 72472 - RNA, 25 nt, Artificial Sequence
  Description of Artificial Sequence: Synthetic oligonucleotide
gggccccaugccugcuucucuccca

SEQ ID NO: 72473 - RNA, 25 nt, Artificial Sequence
  Description of Artificial Sequence: Synthetic oligonucleotide
agccccagcucccccgcccgccccc

SEQ ID NO: 72474 - RNA, 25 nt, Artificial Sequence
  Description of Artificial Sequence: Synthetic oligonucleotide
caaggacacagaugggaagggguuu

SEQ ID NO: 72475 - RNA, 25 nt, Artificial Sequence
  Description of Artificial Sequence: Synthetic oligonucleotide
uccagggacucagccccacuguuga

SEQ ID NO: 72476 - RNA, 25 nt, Artificial Sequence
  Description of Artificial Sequence: Synthetic oligonucleotide
augcagguuugcaaggaaagaaauu

SEQ ID NO: 72477 - RNA, 25 nt, Artificial Sequence
  Description of Artificial Sequence: Synthetic oligonucleotide
ucaaacaccacaacagcaguaagaa

SEQ ID NO: 72478 - RNA, 25 nt, Artificial Sequence
  Description of Artificial Sequence: Synthetic oligonucleotide
agaaaagcagucaauggauucaagc

SEQ ID NO: 72479 - RNA, 25 nt, Artificial Sequence
  Description of Artificial Sequence: Synthetic oligonucleotide
cauucuaagcuuuguugacauuuuc

SEQ ID NO: 72480 - RNA, 25 nt, Artificial Sequence
  Description of Artificial Sequence: Synthetic oligonucleotide
cucuguuccuaggacuucuucaugg

SEQ ID NO: 72481 - RNA, 25 nt, Artificial Sequence
  Description of Artificial Sequence: Synthetic oligonucleotide
ggucuuacaguucuauguuagacca

SEQ ID NO: 72482 - RNA, 25 nt, Artificial Sequence
  Description of Artificial Sequence: Synthetic oligonucleotide
augaaacauuugcauacacaucguc

SEQ ID NO: 72483 - RNA, 25 nt, Artificial Sequence
  Description of Artificial Sequence: Synthetic oligonucleotide
cuuuaaugucacuuuuauaacuuuu

SEQ ID NO: 72484 - RNA, 25 nt, Artificial Sequence
  Description of Artificial Sequence: Synthetic oligonucleotide
uuuacgguucagauauucaucuaua

SEQ ID NO: 72485 - RNA, 25 nt, Artificial Sequence
  Description of Artificial Sequence: Synthetic oligonucleotide
ugcuauuuuuuuuguucuugaucuu

SEQ ID NO: 72486 - RNA, 25 nt, Artificial Sequence
  Description of Artificial Sequence: Synthetic oligonucleotide
uuguggauuuaaucuaugaaaaccu

SEQ ID NO: 72487 - RNA, 25 nt, Artificial Sequence
  Description of Artificial Sequence: Synthetic oligonucleotide
uucagguccacccucuccccuuucu

SEQ ID NO: 72488 - RNA, 25 nt, Artificial Sequence
  Description of Artificial Sequence: Synthetic oligonucleotide
ugcucacuccaagaaacuucuuaug

SEQ ID NO: 72489 - RNA, 25 nt, Artificial Sequence
  Description of Artificial Sequence: Synthetic oligonucleotide
gcuuuguacuagagugcgugacuuu

SEQ ID NO: 72490 - RNA, 25 nt, Artificial Sequence
  Description of Artificial Sequence: Synthetic oligonucleotide
ucuuccucuuuucccgguaauggau

SEQ ID NO: 72491 - RNA, 25 nt, Artificial Sequence
  Description of Artificial Sequence: Synthetic oligonucleotide
uacuucuaucacauaauuugccaug

SEQ ID NO: 72492 - RNA, 25 nt, Artificial Sequence
  Description of Artificial Sequence: Synthetic oligonucleotide
gaacuguuggaugccuuuuuauaaa

SEQ ID NO: 72493 - RNA, 25 nt, Artificial Sequence
  Description of Artificial Sequence: Synthetic oligonucleotide
auacaucccccaucccugcucccac

SEQ ID NO: 72494 - RNA, 25 nt, Artificial Sequence
  Description of Artificial Sequence: Synthetic oligonucleotide
ccugccccuuuaguuguuuucuaac

SEQ ID NO: 72495 - RNA, 25 nt, Artificial Sequence
  Description of Artificial Sequence: Synthetic oligonucleotide
cccguaggcucucugggcacgaggc

SEQ ID NO: 72496 - RNA, 25 nt, Artificial Sequence
  Description of Artificial Sequence: Synthetic oligonucleotide
cagaaagcaggccgggcacccaucc

SEQ ID NO: 72497 - RNA, 25 nt, Artificial Sequence
  Description of Artificial Sequence: Synthetic oligonucleotide
cugagagggccgcgcuccucucccc

SEQ ID NO: 72498 - RNA, 25 nt, Artificial Sequence
  Description of Artificial Sequence: Synthetic oligonucleotide
cagccugcccucacagcauuggagc

SEQ ID NO: 72499 - RNA, 25 nt, Artificial Sequence
  Description of Artificial Sequence: Synthetic oligonucleotide
ccuguuacagugcaagacaugauac

SEQ ID NO: 72500 - RNA, 25 nt, Artificial Sequence
  Description of Artificial Sequence: Synthetic oligonucleotide
caaacucaggucagaaaaacaaagg

SEQ ID NO: 72501 - RNA, 25 nt, Artificial Sequence
  Description of Artificial Sequence: Synthetic oligonucleotide
guuaaauauuucacacgucuuuguu

SEQ ID NO: 72502 - RNA, 25 nt, Artificial Sequence
  Description of Artificial Sequence: Synthetic oligonucleotide
ucaguguuuccacucaccgugguug

SEQ ID NO: 72503 - RNA, 25 nt, Artificial Sequence
  Description of Artificial Sequence: Synthetic oligonucleotide
gagaagccucacccucucuuucccu

SEQ ID NO: 72504 - RNA, 25 nt, Artificial Sequence
  Description of Artificial Sequence: Synthetic oligonucleotide
uugccuuugcuuagguugugacaca

SEQ ID NO: 72505 - RNA, 25 nt, Artificial Sequence
  Description of Artificial Sequence: Synthetic oligonucleotide
acauauauauauauuuuuuuaauuc

SEQ ID NO: 72506 - RNA, 25 nt, Artificial Sequence
  Description of Artificial Sequence: Synthetic oligonucleotide
cuuggguacaacagcaguguuaacc

SEQ ID NO: 72507 - RNA, 25 nt, Artificial Sequence
  Description of Artificial Sequence: Synthetic oligonucleotide
cgcagacacuaggcauuuggauuac

SEQ ID NO: 72508 - RNA, 25 nt, Artificial Sequence
  Description of Artificial Sequence: Synthetic oligonucleotide
cuauuuuucuuaauggcuauuuaau

SEQ ID NO: 72509 - RNA, 25 nt, Artificial Sequence
  Description of Artificial Sequence: Synthetic oligonucleotide
uccuuccaucccacgaaaaacagcu

SEQ ID NO: 72510 - RNA, 25 nt, Artificial Sequence
  Description of Artificial Sequence: Synthetic oligonucleotide
ugcugaguccaagggagcagcagag

SEQ ID NO: 72511 - RNA, 25 nt, Artificial Sequence
  Description of Artificial Sequence: Synthetic oligonucleotide
gcgugguccggcagggccuguugug

SEQ ID NO: 72512 - RNA, 25 nt, Artificial Sequence
  Description of Artificial Sequence: Synthetic oligonucleotide
ggcccucgccaccccccucaccgga

SEQ ID NO: 72513 - RNA, 25 nt, Artificial Sequence
  Description of Artificial Sequence: Synthetic oligonucleotide
accgacugaccugucuuuggaacca

SEQ ID NO: 72514 - RNA, 25 nt, Artificial Sequence
  Description of Artificial Sequence: Synthetic oligonucleotide
agaacaucccaagggaacuccuucg

SEQ ID NO: 72515 - RNA, 25 nt, Artificial Sequence
  Description of Artificial Sequence: Synthetic oligonucleotide
gcacuggcguugagugggaccccgg

SEQ ID NO: 72516 - RNA, 25 nt, Artificial Sequence
  Description of Artificial Sequence: Synthetic oligonucleotide
ggauccaggcuggcccagggcggca

SEQ ID NO: 72517 - RNA, 25 nt, Artificial Sequence
  Description of Artificial Sequence: Synthetic oligonucleotide
acccucagggcugugcccgcuggag

SEQ ID NO: 72518 - RNA, 25 nt, Artificial Sequence
  Description of Artificial Sequence: Synthetic oligonucleotide
gugcuagguggaggcagcacagacg

SEQ ID NO: 72519 - RNA, 25 nt, Artificial Sequence
  Description of Artificial Sequence: Synthetic oligonucleotide
gccacgguggcccaagagccccuuu

SEQ ID NO: 72520 - RNA, 25 nt, Artificial Sequence
  Description of Artificial Sequence: Synthetic oligonucleotide
ugcuucuugcugggggaccagggcu

SEQ ID NO: 72521 - RNA, 25 nt, Artificial Sequence
  Description of Artificial Sequence: Synthetic oligonucleotide
uguggugcuggcccacuuucccucg

SEQ ID NO: 72522 - RNA, 25 nt, Artificial Sequence
  Description of Artificial Sequence: Synthetic oligonucleotide
ggccaggaauccagguccuuggggc

SEQ ID NO: 72523 - RNA, 25 nt, Artificial Sequence
  Description of Artificial Sequence: Synthetic oligonucleotide
cccaggggucuugucuuguuucauu

SEQ ID NO: 72524 - RNA, 25 nt, Artificial Sequence
  Description of Artificial Sequence: Synthetic oligonucleotide
uuuuagcacuucucaccagagagau

SEQ ID NO: 72525 - RNA, 25 nt, Artificial Sequence
  Description of Artificial Sequence: Synthetic oligonucleotide
ugacagcacaagaguugcuucuggg

SEQ ID NO: 72526 - RNA, 25 nt, Artificial Sequence
  Description of Artificial Sequence: Synthetic oligonucleotide
gauagaaauguuuaggaguaagaac

SEQ ID NO: 72527 - RNA, 25 nt, Artificial Sequence
  Description of Artificial Sequence: Synthetic oligonucleotide
caaagcugggauacggugauugcua

SEQ ID NO: 72528 - RNA, 25 nt, Artificial Sequence
  Description of Artificial Sequence: Synthetic oligonucleotide
aguugugacugaagauucaacacag

SEQ ID NO: 72529 - RNA, 25 nt, Artificial Sequence
  Description of Artificial Sequence: Synthetic oligonucleotide
gaaaagaaaguuuauacggcuuuuu

SEQ ID NO: 72530 - RNA, 25 nt, Artificial Sequence
  Description of Artificial Sequence: Synthetic oligonucleotide
uugcuggucagcaguuugucccacu

SEQ ID NO: 72531 - RNA, 25 nt, Artificial Sequence
  Description of Artificial Sequence: Synthetic oligonucleotide
ugcuuucucuagucucuaucccaua

SEQ ID NO: 72532 - RNA, 25 nt, Artificial Sequence
  Description of Artificial Sequence: Synthetic oligonucleotide
aaaagguauuauauguaggaguuuu

SEQ ID NO: 72533 - RNA, 25 nt, Artificial Sequence
  Description of Artificial Sequence: Synthetic oligonucleotide
ucuuuuaauuuauuuugugauaaau

SEQ ID NO: 72534 - RNA, 25 nt, Artificial Sequence
  Description of Artificial Sequence: Synthetic oligonucleotide
uuaccaguuucaaucacuguagaaa

SEQ ID NO: 72535 - RNA, 25 nt, Artificial Sequence
  Description of Artificial Sequence: Synthetic oligonucleotide
aagccccauuaugaauuuaaauuuc

SEQ ID NO: 72536 - RNA, 25 nt, Artificial Sequence
  Description of Artificial Sequence: Synthetic oligonucleotide
caaggaaagggugugugugugugua

SEQ ID NO: 72537 - RNA, 25 nt, Artificial Sequence
  Description of Artificial Sequence: Synthetic oligonucleotide
auguguggggugugugugugugaga

SEQ ID NO: 72538 - RNA, 25 nt, Artificial Sequence
  Description of Artificial Sequence: Synthetic oligonucleotide
agugaugggacaguucuugauuuuu

SEQ ID NO: 72539 - RNA, 25 nt, Artificial Sequence
  Description of Artificial Sequence: Synthetic oligonucleotide
uuggguuuuuuuucccccaaacauu

SEQ ID NO: 72540 - RNA, 25 nt, Artificial Sequence
  Description of Artificial Sequence: Synthetic oligonucleotide
uuaucuaccucacucuuauuuuuua

SEQ ID NO: 72541 - RNA, 25 nt, Artificial Sequence
  Description of Artificial Sequence: Synthetic oligonucleotide
auauguguauauagacaaaagaaua

SEQ ID NO: 72542 - RNA, 25 nt, Artificial Sequence
  Description of Artificial Sequence: Synthetic oligonucleotide
acaucucaccuuucucagcaccuga

SEQ ID NO: 72543 - RNA, 25 nt, Artificial Sequence
  Description of Artificial Sequence: Synthetic oligonucleotide
acaauaggccguugauacugguaac

SEQ ID NO: 72544 - RNA, 25 nt, Artificial Sequence
  Description of Artificial Sequence: Synthetic oligonucleotide
ccucauccacgccacaggcgccaca

SEQ ID NO: 72545 - RNA, 25 nt, Artificial Sequence
  Description of Artificial Sequence: Synthetic oligonucleotide
acccaggugaugcagggggaagcca

SEQ ID NO: 72546 - RNA, 25 nt, Artificial Sequence
  Description of Artificial Sequence: Synthetic oligonucleotide
aggcuguauuccggggucaaagcaa

SEQ ID NO: 72547 - RNA, 25 nt, Artificial Sequence
  Description of Artificial Sequence: Synthetic oligonucleotide
acacuaacucaccucucugcucauu

SEQ ID NO: 72548 - RNA, 25 nt, Artificial Sequence
  Description of Artificial Sequence: Synthetic oligonucleotide
uucagacagcuugccuuuuucugag

SEQ ID NO: 72549 - RNA, 25 nt, Artificial Sequence
  Description of Artificial Sequence: Synthetic oligonucleotide
gauguccuguuuuguguugcuuuuu

SEQ ID NO: 72550 - RNA, 25 nt, Artificial Sequence
  Description of Artificial Sequence: Synthetic oligonucleotide
uuuguuuuguuuucuaucuugguuu

SEQ ID NO: 72551 - RNA, 25 nt, Artificial Sequence
  Description of Artificial Sequence: Synthetic oligonucleotide
uccaccaagguguuagauuucuccu

SEQ ID NO: 72552 - RNA, 25 nt, Artificial Sequence
  Description of Artificial Sequence: Synthetic oligonucleotide
uccuccuagccagguggcccuguga

SEQ ID NO: 72553 - RNA, 25 nt, Artificial Sequence
  Description of Artificial Sequence: Synthetic oligonucleotide
aggccaacgagggcaccagagcaca

SEQ ID NO: 72554 - RNA, 25 nt, Artificial Sequence
  Description of Artificial Sequence: Synthetic oligonucleotide
accugggggagccaccaggcugucc

SEQ ID NO: 72555 - RNA, 25 nt, Artificial Sequence
  Description of Artificial Sequence: Synthetic oligonucleotide
ccuggcugguugucuuuggaacaaa

SEQ ID NO: 72556 - RNA, 25 nt, Artificial Sequence
  Description of Artificial Sequence: Synthetic oligonucleotide
acugcuucugugcagauggaaugac

SEQ ID NO: 72557 - RNA, 25 nt, Artificial Sequence
  Description of Artificial Sequence: Synthetic oligonucleotide
ccaacacauuucguccuuaagagag

SEQ ID NO: 72558 - RNA, 25 nt, Artificial Sequence
  Description of Artificial Sequence: Synthetic oligonucleotide
gcagugguuccucagguucugagga

SEQ ID NO: 72559 - RNA, 25 nt, Artificial Sequence
  Description of Artificial Sequence: Synthetic oligonucleotide
agaggaagguguccaggcagcacca

SEQ ID NO: 72560 - RNA, 25 nt, Artificial Sequence
  Description of Artificial Sequence: Synthetic oligonucleotide
aucucugugcgaauccccaggguaa

SEQ ID NO: 72561 - RNA, 25 nt, Artificial Sequence
  Description of Artificial Sequence: Synthetic oligonucleotide
aaggcguggggcauuggguuugcuc

SEQ ID NO: 72562 - RNA, 25 nt, Artificial Sequence
  Description of Artificial Sequence: Synthetic oligonucleotide
ccccuugcugcugcuccaucccugc

SEQ ID NO: 72563 - RNA, 25 nt, Artificial Sequence
  Description of Artificial Sequence: Synthetic oligonucleotide
caggaggcucgcgcugaggcaggac

SEQ ID NO: 72564 - RNA, 25 nt, Artificial Sequence
  Description of Artificial Sequence: Synthetic oligonucleotide
ccgugcggccauggcugcugcauuc

SEQ ID NO: 72565 - RNA, 25 nt, Artificial Sequence
  Description of Artificial Sequence: Synthetic oligonucleotide
cauugagcacaaaggugcagcugca

SEQ ID NO: 72566 - RNA, 25 nt, Artificial Sequence
  Description of Artificial Sequence: Synthetic oligonucleotide
agcagcagcuggagagcaagaguca

SEQ ID NO: 72567 - RNA, 25 nt, Artificial Sequence
  Description of Artificial Sequence: Synthetic oligonucleotide
acccagccugugcgccagaaugcag

SEQ ID NO: 72568 - RNA, 25 nt, Artificial Sequence
  Description of Artificial Sequence: Synthetic oligonucleotide
gaggcuccugaccucacagccaguc

SEQ ID NO: 72569 - RNA, 25 nt, Artificial Sequence
  Description of Artificial Sequence: Synthetic oligonucleotide
cccugauagaacacacgcaggagca

SEQ ID NO: 72570 - RNA, 25 nt, Artificial Sequence
  Description of Artificial Sequence: Synthetic oligonucleotide
agaguccccucccccuccaggcugc

SEQ ID NO: 72571 - RNA, 25 nt, Artificial Sequence
  Description of Artificial Sequence: Synthetic oligonucleotide
cccucucaacuucucccucaccucc

SEQ ID NO: 72572 - RNA, 25 nt, Artificial Sequence
  Description of Artificial Sequence: Synthetic oligonucleotide
cuucccuagggguagacagagaugu

SEQ ID NO: 72573 - RNA, 25 nt, Artificial Sequence
  Description of Artificial Sequence: Synthetic oligonucleotide
uaccaaaccuuccggcuggaaagcc

SEQ ID NO: 72574 - RNA, 25 nt, Artificial Sequence
  Description of Artificial Sequence: Synthetic oligonucleotide
ccaguggccggcgccgaggcucgug

SEQ ID NO: 72575 - RNA, 25 nt, Artificial Sequence
  Description of Artificial Sequence: Synthetic oligonucleotide
ggcgucacgccccccccgccagggc

SEQ ID NO: 72576 - RNA, 25 nt, Artificial Sequence
  Description of Artificial Sequence: Synthetic oligonucleotide
cuguaccuccgucucccugguccug

SEQ ID NO: 72577 - RNA, 25 nt, Artificial Sequence
  Description of Artificial Sequence: Synthetic oligonucleotide
gcugcucacaggacagacggcucgc

SEQ ID NO: 72578 - RNA, 25 nt, Artificial Sequence
  Description of Artificial Sequence: Synthetic oligonucleotide
cuccccucuuccagcagcugcucuu

SEQ ID NO: 72579 - RNA, 25 nt, Artificial Sequence
  Description of Artificial Sequence: Synthetic oligonucleotide
uacaggcacugaugauuucgcuggg

SEQ ID NO: 72580 - RNA, 25 nt, Artificial Sequence
  Description of Artificial Sequence: Synthetic oligonucleotide
gaaguguggcgggcagcuuugccua

SEQ ID NO: 72581 - RNA, 25 nt, Artificial Sequence
  Description of Artificial Sequence: Synthetic oligonucleotide
aagcguggauggcuccucggcaauu

SEQ ID NO: 72582 - RNA, 25 nt, Artificial Sequence
  Description of Artificial Sequence: Synthetic oligonucleotide
uccagccuaagugaaggcgcucagg

SEQ ID NO: 72583 - RNA, 25 nt, Artificial Sequence
  Description of Artificial Sequence: Synthetic oligonucleotide
gagccuccugcuggaacgcgaccca

SEQ ID NO: 72584 - RNA, 25 nt, Artificial Sequence
  Description of Artificial Sequence: Synthetic oligonucleotide
aucucucccaggaccccggggaucu

SEQ ID NO: 72585 - RNA, 25 nt, Artificial Sequence
  Description of Artificial Sequence: Synthetic oligonucleotide
uuaaggucauugagaaauacuguug

SEQ ID NO: 72586 - RNA, 25 nt, Artificial Sequence
  Description of Artificial Sequence: Synthetic oligonucleotide
ggaucaggguuuuguucuuccacac

SEQ ID NO: 72587 - RNA, 25 nt, Artificial Sequence
  Description of Artificial Sequence: Synthetic oligonucleotide
cuguaggugaccccuuggaauaacg

SEQ ID NO: 72588 - RNA, 25 nt, Artificial Sequence
  Description of Artificial Sequence: Synthetic oligonucleotide
ggccucuccucucgugcacauaccu

SEQ ID NO: 72589 - RNA, 25 nt, Artificial Sequence
  Description of Artificial Sequence: Synthetic oligonucleotide
uaccgguuuccacaacuggauuucu

SEQ ID NO: 72590 - RNA, 25 nt, Artificial Sequence
  Description of Artificial Sequence: Synthetic oligonucleotide
uacagaucauucagcugguuauaag

SEQ ID NO: 72591 - RNA, 25 nt, Artificial Sequence
  Description of Artificial Sequence: Synthetic oligonucleotide
ggguuuuguuuaaacuguccgaguu

SEQ ID NO: 72592 - RNA, 25 nt, Artificial Sequence
  Description of Artificial Sequence: Synthetic oligonucleotide
uacugaugucauuuuguuuuuguuu

SEQ ID NO: 72593 - RNA, 25 nt, Artificial Sequence
  Description of Artificial Sequence: Synthetic oligonucleotide
uuauguagguagcuuuuaaguagaa

SEQ ID NO: 72594 - RNA, 25 nt, Artificial Sequence
  Description of Artificial Sequence: Synthetic oligonucleotide
aaacacuaacaguguagugcccauc

SEQ ID NO: 72595 - RNA, 25 nt, Artificial Sequence
  Description of Artificial Sequence: Synthetic oligonucleotide
cauagcaaaugcuucagaaacaccu

SEQ ID NO: 72596 - RNA, 25 nt, Artificial Sequence
  Description of Artificial Sequence: Synthetic oligonucleotide
ucaauaaaagagaaaacuuggcuug

SEQ ID NO: 72597 - RNA, 25 nt, Artificial Sequence
  Description of Artificial Sequence: Synthetic oligonucleotide
gugugauggugcagucacuuuacug

SEQ ID NO: 72598 - RNA, 25 nt, Artificial Sequence
  Description of Artificial Sequence: Synthetic oligonucleotide
ggaccaacccacccaccuugacuau

SEQ ID NO: 72599 - RNA, 25 nt, Artificial Sequence
  Description of Artificial Sequence: Synthetic oligonucleotide
uaccaaggcaucaucuauccacagu

SEQ ID NO: 72600 - RNA, 25 nt, Artificial Sequence
  Description of Artificial Sequence: Synthetic oligonucleotide
uucuagccuaacuucaugcugauuu

SEQ ID NO: 72601 - RNA, 25 nt, Artificial Sequence
  Description of Artificial Sequence: Synthetic oligonucleotide
ucucugccucuugauuuuucucugu

SEQ ID NO: 72602 - RNA, 25 nt, Artificial Sequence
  Description of Artificial Sequence: Synthetic oligonucleotide
uguguuccaaauaaucuuaagcuga

SEQ ID NO: 72603 - RNA, 25 nt, Artificial Sequence
  Description of Artificial Sequence: Synthetic oligonucleotide
aguuguggcauuuuccaugcaaccu

SEQ ID NO: 72604 - RNA, 25 nt, Artificial Sequence
  Description of Artificial Sequence: Synthetic oligonucleotide
uccuucugccagcagcucacacugc

SEQ ID NO: 72605 - RNA, 25 nt, Artificial Sequence
  Description of Artificial Sequence: Synthetic oligonucleotide
cuugaagucauaugaaccacugagg

SEQ ID NO: 72606 - RNA, 25 nt, Artificial Sequence
  Description of Artificial Sequence: Synthetic oligonucleotide
gcacaucauggaauugaugugagca

SEQ ID NO: 72607 - RNA, 25 nt, Artificial Sequence
  Description of Artificial Sequence: Synthetic oligonucleotide
auuaagacguucucccacacagccc

SEQ ID NO: 72608 - RNA, 25 nt, Artificial Sequence
  Description of Artificial Sequence: Synthetic oligonucleotide
cuucccugaggcagcaggagcuggu

SEQ ID NO: 72609 - RNA, 25 nt, Artificial Sequence
  Description of Artificial Sequence: Synthetic oligonucleotide
uguguacuggagacacuguugaacu

SEQ ID NO: 72610 - RNA, 25 nt, Artificial Sequence
  Description of Artificial Sequence: Synthetic oligonucleotide
uugaucaagacccagaccaccccag

SEQ ID NO: 72611 - RNA, 25 nt, Artificial Sequence
  Description of Artificial Sequence: Synthetic oligonucleotide
ggucuccuucgugggaugucaugac

SEQ ID NO: 72612 - RNA, 25 nt, Artificial Sequence
  Description of Artificial Sequence: Synthetic oligonucleotide
cguuugacauaccuuuggaacgagc

SEQ ID NO: 72613 - RNA, 25 nt, Artificial Sequence
  Description of Artificial Sequence: Synthetic oligonucleotide
ccuccuccuuggaagauggaagacc

SEQ ID NO: 72614 - RNA, 25 nt, Artificial Sequence
  Description of Artificial Sequence: Synthetic oligonucleotide
cguguucguggccgaccuggccucu

SEQ ID NO: 72615 - RNA, 25 nt, Artificial Sequence
  Description of Artificial Sequence: Synthetic oligonucleotide
uccuggccuguuucuuaagaugcgg

SEQ ID NO: 72616 - RNA, 25 nt, Artificial Sequence
  Description of Artificial Sequence: Synthetic oligonucleotide
gagucacauuucaaugguacgaaaa

SEQ ID NO: 72617 - RNA, 25 nt, Artificial Sequence
  Description of Artificial Sequence: Synthetic oligonucleotide
aguggcuucguaaaauagaagagca

SEQ ID NO: 72618 - RNA, 25 nt, Artificial Sequence
  Description of Artificial Sequence: Synthetic oligonucleotide
agucacuguggaacuaccaaauggc

SEQ ID NO: 72619 - RNA, 25 nt, Artificial Sequence
  Description of Artificial Sequence: Synthetic oligonucleotide
cgagaugcucggugcacauuggggu

SEQ ID NO: 72620 - RNA, 25 nt, Artificial Sequence
  Description of Artificial Sequence: Synthetic oligonucleotide
ugcuuugggauaaaagauuuaugag

SEQ ID NO: 72621 - RNA, 25 nt, Artificial Sequence
  Description of Artificial Sequence: Synthetic oligonucleotide
gccaacuauucucuggcaccagauu

SEQ ID NO: 72622 - RNA, 25 nt, Artificial Sequence
  Description of Artificial Sequence: Synthetic oligonucleotide
ucuaggccaguuuguuccacugaag

SEQ ID NO: 72623 - RNA, 25 nt, Artificial Sequence
  Description of Artificial Sequence: Synthetic oligonucleotide
gcuuuucccacagcaguccaccucu

SEQ ID NO: 72624 - RNA, 25 nt, Artificial Sequence
  Description of Artificial Sequence: Synthetic oligonucleotide
ugcaggcuggcagccgaauggcuug

SEQ ID NO: 72625 - RNA, 25 nt, Artificial Sequence
  Description of Artificial Sequence: Synthetic oligonucleotide
gccaguggcucuguggcaagaucac

SEQ ID NO: 72626 - RNA, 25 nt, Artificial Sequence
  Description of Artificial Sequence: Synthetic oligonucleotide
cacugagaucgaugggugagaaggc

SEQ ID NO: 72627 - RNA, 25 nt, Artificial Sequence
  Description of Artificial Sequence: Synthetic oligonucleotide
cuaggaugcuugucuaguguucuua

SEQ ID NO: 72628 - RNA, 25 nt, Artificial Sequence
  Description of Artificial Sequence: Synthetic oligonucleotide
agcugucacguuggcuccuuccagg

SEQ ID NO: 72629 - RNA, 25 nt, Artificial Sequence
  Description of Artificial Sequence: Synthetic oligonucleotide
gguggccagacgguguuggccacuc

SEQ ID NO: 72630 - RNA, 25 nt, Artificial Sequence
  Description of Artificial Sequence: Synthetic oligonucleotide
cccuucuaaaacacaggcgcccucc

SEQ ID NO: 72631 - RNA, 25 nt, Artificial Sequence
  Description of Artificial Sequence: Synthetic oligonucleotide
cuggugacagugacccgccguggua

SEQ ID NO: 72632 - RNA, 25 nt, Artificial Sequence
  Description of Artificial Sequence: Synthetic oligonucleotide
augccuuggcccauuccagcagucc

SEQ ID NO: 72633 - RNA, 25 nt, Artificial Sequence
  Description of Artificial Sequence: Synthetic oligonucleotide
ccaguuaugcauuucaaguuugggg

SEQ ID NO: 72634 - RNA, 25 nt, Artificial Sequence
  Description of Artificial Sequence: Synthetic oligonucleotide
guuuguucuuuucguuaauguuccu

SEQ ID NO: 72635 - RNA, 25 nt, Artificial Sequence
  Description of Artificial Sequence: Synthetic oligonucleotide
ucuguguugucagcugucuucauuu

SEQ ID NO: 72636 - RNA, 25 nt, Artificial Sequence
  Description of Artificial Sequence: Synthetic oligonucleotide
uccugggcuaagcagcauugggaga

SEQ ID NO: 72637 - RNA, 25 nt, Artificial Sequence
  Description of Artificial Sequence: Synthetic oligonucleotide
auguggaccagagauccacuccuua

SEQ ID NO: 72638 - RNA, 25 nt, Artificial Sequence
  Description of Artificial Sequence: Synthetic oligonucleotide
aagaaccaguggcgaaagacacuuu

SEQ ID NO: 72639 - RNA, 25 nt, Artificial Sequence
  Description of Artificial Sequence: Synthetic oligonucleotide
ucuuucuucacucugaaguagcugg

SEQ ID NO: 72640 - RNA, 25 nt, Artificial Sequence
  Description of Artificial Sequence: Synthetic oligonucleotide
gugguacaaaugagaacuucaagag

SEQ ID NO: 72641 - RNA, 25 nt, Artificial Sequence
  Description of Artificial Sequence: Synthetic oligonucleotide
gaggauguuauuuagacugaaccuc

SEQ ID NO: 72642 - RNA, 25 nt, Artificial Sequence
  Description of Artificial Sequence: Synthetic oligonucleotide
cuguugccagagaugcugaagauac

SEQ ID NO: 72643 - RNA, 25 nt, Artificial Sequence
  Description of Artificial Sequence: Synthetic oligonucleotide
cagaccuuggacaggucagaggguu

SEQ ID NO: 72644 - RNA, 25 nt, Artificial Sequence
  Description of Artificial Sequence: Synthetic oligonucleotide
uucauuuuuggccuucaucuuagau

SEQ ID NO: 72645 - RNA, 25 nt, Artificial Sequence
  Description of Artificial Sequence: Synthetic oligonucleotide
ugacugguugcgucauuuggagaag

SEQ ID NO: 72646 - RNA, 25 nt, Artificial Sequence
  Description of Artificial Sequence: Synthetic oligonucleotide
gugagugcuccuugaugguggaaug

SEQ ID NO: 72647 - RNA, 25 nt, Artificial Sequence
  Description of Artificial Sequence: Synthetic oligonucleotide
gaccgggugguggguacagaaccau

SEQ ID NO: 72648 - RNA, 25 nt, Artificial Sequence
  Description of Artificial Sequence: Synthetic oligonucleotide
uugucacagggauccuggcacagag

SEQ ID NO: 72649 - RNA, 25 nt, Artificial Sequence
  Description of Artificial Sequence: Synthetic oligonucleotide
gaagaguuacgagcagcagggugca

SEQ ID NO: 72650 - RNA, 25 nt, Artificial Sequence
  Description of Artificial Sequence: Synthetic oligonucleotide
agggcuuggaaggaaugugggcaag

SEQ ID NO: 72651 - RNA, 25 nt, Artificial Sequence
  Description of Artificial Sequence: Synthetic oligonucleotide
gguuuugaacuugauuguucuugaa

SEQ ID NO: 72652 - RNA, 25 nt, Artificial Sequence
  Description of Artificial Sequence: Synthetic oligonucleotide
agcuaucagaccacaucgaggcuca

SEQ ID NO: 72653 - RNA, 25 nt, Artificial Sequence
  Description of Artificial Sequence: Synthetic oligonucleotide
agcagucauccgugggcauuugguu

SEQ ID NO: 72654 - RNA, 25 nt, Artificial Sequence
  Description of Artificial Sequence: Synthetic oligonucleotide
uucaacaaagaaaccuaacauccua

SEQ ID NO: 72655 - RNA, 25 nt, Artificial Sequence
  Description of Artificial Sequence: Synthetic oligonucleotide
acucuggaaacugaucucggaguua

SEQ ID NO: 72656 - RNA, 25 nt, Artificial Sequence
  Description of Artificial Sequence: Synthetic oligonucleotide
aaggcgaauuguucaagaacacaaa

SEQ ID NO: 72657 - RNA, 25 nt, Artificial Sequence
  Description of Artificial Sequence: Synthetic oligonucleotide
acuacaucgcacucgucaguuguca

SEQ ID NO: 72658 - RNA, 25 nt, Artificial Sequence
  Description of Artificial Sequence: Synthetic oligonucleotide
aguucuggggcaugacuuuagcguu

SEQ ID NO: 72659 - RNA, 25 nt, Artificial Sequence
  Description of Artificial Sequence: Synthetic oligonucleotide
uuuguuucugcgagaacauaacgau

SEQ ID NO: 72660 - RNA, 25 nt, Artificial Sequence
  Description of Artificial Sequence: Synthetic oligonucleotide
ucacucauuuuuaugucccacgugu

SEQ ID NO: 72661 - RNA, 25 nt, Artificial Sequence
  Description of Artificial Sequence: Synthetic oligonucleotide
uguguguccgcaucuuucuggucaa

SEQ ID NO: 72662 - RNA, 25 nt, Artificial Sequence
  Description of Artificial Sequence: Synthetic oligonucleotide
acauuguuuuaacuagucacucauu

SEQ ID NO: 72663 - RNA, 25 nt, Artificial Sequence
  Description of Artificial Sequence: Synthetic oligonucleotide
uagcguuuucaauagggcucuuaag

SEQ ID NO: 72664 - RNA, 25 nt, Artificial Sequence
  Description of Artificial Sequence: Synthetic oligonucleotide
guccaguagauuacggguagucagu

SEQ ID NO: 72665 - RNA, 25 nt, Artificial Sequence
  Description of Artificial Sequence: Synthetic oligonucleotide
uugacgaagaucugguuuacaagaa

SEQ ID NO: 72666 - RNA, 25 nt, Artificial Sequence
  Description of Artificial Sequence: Synthetic oligonucleotide
acuaauuaaauguuucauugcauuu

SEQ ID NO: 72667 - RNA, 25 nt, Artificial Sequence
  Description of Artificial Sequence: Synthetic oligonucleotide
uuuguaagaacagaauaauuuuaua

SEQ ID NO: 72668 - RNA, 25 nt, Artificial Sequence
  Description of Artificial Sequence: Synthetic oligonucleotide
aaaauguuuguaguuuauaauugcc

SEQ ID NO: 72669 - RNA, 25 nt, Artificial Sequence
  Description of Artificial Sequence: Synthetic oligonucleotide
cgaaaauaauuuaaagacacuuuuu

SEQ ID NO: 72670 - RNA, 25 nt, Artificial Sequence
  Description of Artificial Sequence: Synthetic oligonucleotide
uuuuucucugugugugcaaaugugu

SEQ ID NO: 72671 - RNA, 25 nt, Artificial Sequence
  Description of Artificial Sequence: Synthetic oligonucleotide
uuuuuuuaggacaccuguuuacuag

SEQ ID NO: 72672 - RNA, 25 nt, Artificial Sequence
  Description of Artificial Sequence: Synthetic oligonucleotide
gcuagcuuuacaauaugccaaaaaa

SEQ ID NO: 72673 - RNA, 25 nt, Artificial Sequence
  Description of Artificial Sequence: Synthetic oligonucleotide
aggauuucucccugaccccauccgu

SEQ ID NO: 72674 - RNA, 25 nt, Artificial Sequence
  Description of Artificial Sequence: Synthetic oligonucleotide
ugguucacccucuuuuccccccaug

SEQ ID NO: 72675 - RNA, 25 nt, Artificial Sequence
  Description of Artificial Sequence: Synthetic oligonucleotide
gcuuuuugcccuaguuuauaacaaa

SEQ ID NO: 72676 - RNA, 25 nt, Artificial Sequence
  Description of Artificial Sequence: Synthetic oligonucleotide
aggaaugaugaugauuuaaaaagua

SEQ ID NO: 72677 - RNA, 25 nt, Artificial Sequence
  Description of Artificial Sequence: Synthetic oligonucleotide
aguucuguaucuucaguaucuuggu

SEQ ID NO: 72678 - RNA, 25 nt, Artificial Sequence
  Description of Artificial Sequence: Synthetic oligonucleotide
ucuuccagaacccucugguugggaa

SEQ ID NO: 72679 - RNA, 25 nt, Artificial Sequence
  Description of Artificial Sequence: Synthetic oligonucleotide
aggggaucauuuuuuacuggucauu

SEQ ID NO: 72680 - RNA, 25 nt, Artificial Sequence
  Description of Artificial Sequence: Synthetic oligonucleotide
uucccuuuggaguguagcuacuuua

SEQ ID NO: 72681 - RNA, 25 nt, Artificial Sequence
  Description of Artificial Sequence: Synthetic oligonucleotide
aacagauggaaagaaccucauuggc

SEQ ID NO: 72682 - RNA, 25 nt, Artificial Sequence
  Description of Artificial Sequence: Synthetic oligonucleotide
ccauggaaacagccgagguguugga

SEQ ID NO: 72683 - RNA, 25 nt, Artificial Sequence
  Description of Artificial Sequence: Synthetic oligonucleotide
agcccagcagugcauggcaccguuc

SEQ ID NO: 72684 - RNA, 25 nt, Artificial Sequence
  Description of Artificial Sequence: Synthetic oligonucleotide
cggcaucuggcuugauuggucuggc

SEQ ID NO: 72685 - RNA, 25 nt, Artificial Sequence
  Description of Artificial Sequence: Synthetic oligonucleotide
cugccgucauugucagcacagugcc

SEQ ID NO: 72686 - RNA, 25 nt, Artificial Sequence
  Description of Artificial Sequence: Synthetic oligonucleotide
cauggacaugggaagacuugacugc

SEQ ID NO: 72687 - RNA, 25 nt, Artificial Sequence
  Description of Artificial Sequence: Synthetic oligonucleotide
cacagccaaugguuuucaugaugau

SEQ ID NO: 72688 - RNA, 25 nt, Artificial Sequence
  Description of Artificial Sequence: Synthetic oligonucleotide
uuacagcauacacagugaucacaua

SEQ ID NO: 72689 - RNA, 25 nt, Artificial Sequence
  Description of Artificial Sequence: Synthetic oligonucleotide
aaacgaugacagcuauggggcacac

SEQ ID NO: 72690 - RNA, 25 nt, Artificial Sequence
  Description of Artificial Sequence: Synthetic oligonucleotide
caggccauuugcuuacaugccucgu

SEQ ID NO: 72691 - RNA, 25 nt, Artificial Sequence
  Description of Artificial Sequence: Synthetic oligonucleotide
uaucaugacugauuacugcuuuguu

SEQ ID NO: 72692 - RNA, 25 nt, Artificial Sequence
  Description of Artificial Sequence: Synthetic oligonucleotide
uagaacacagaagagacccuauuuu

SEQ ID NO: 72693 - RNA, 25 nt, Artificial Sequence
  Description of Artificial Sequence: Synthetic oligonucleotide
uauuuaaggcagaaccccgaagaua

SEQ ID NO: 72694 - RNA, 25 nt, Artificial Sequence
  Description of Artificial Sequence: Synthetic oligonucleotide
acguauuuccaauacagaaaagaau

SEQ ID NO: 72695 - RNA, 25 nt, Artificial Sequence
  Description of Artificial Sequence: Synthetic oligonucleotide
uuuuuaauaaaaacuauaacauaca

SEQ ID NO: 72696 - RNA, 25 nt, Artificial Sequence
  Description of Artificial Sequence: Synthetic oligonucleotide
acaaaaauugguuuuaaaguugacu

SEQ ID NO: 72697 - RNA, 25 nt, Artificial Sequence
  Description of Artificial Sequence: Synthetic oligonucleotide
uccacuuccucuaacuccaguggau

SEQ ID NO: 72698 - RNA, 25 nt, Artificial Sequence
  Description of Artificial Sequence: Synthetic oligonucleotide
uuguuggccaugucuccccaacucc

SEQ ID NO: 72699 - RNA, 25 nt, Artificial Sequence
  Description of Artificial Sequence: Synthetic oligonucleotide
cacaauaucucuaucaugggaaaca

SEQ ID NO: 72700 - RNA, 25 nt, Artificial Sequence
  Description of Artificial Sequence: Synthetic oligonucleotide
accugggguuuuugcgcuacauagg

SEQ ID NO: 72701 - RNA, 25 nt, Artificial Sequence
  Description of Artificial Sequence: Synthetic oligonucleotide
gagaaagaucuggaaacuauuuggg

SEQ ID NO: 72702 - RNA, 25 nt, Artificial Sequence
  Description of Artificial Sequence: Synthetic oligonucleotide
guuuuguuuucaacuuuucauuugg

SEQ ID NO: 72703 - RNA, 25 nt, Artificial Sequence
  Description of Artificial Sequence: Synthetic oligonucleotide
gauguuuggcguugcacacacacau

SEQ ID NO: 72704 - RNA, 25 nt, Artificial Sequence
  Description of Artificial Sequence: Synthetic oligonucleotide
uccaccgguggaagagacgcccggu

SEQ ID NO: 72705 - RNA, 25 nt, Artificial Sequence
  Description of Artificial Sequence: Synthetic oligonucleotide
ugaaaacaccugucugcuuucuaag

SEQ ID NO: 72706 - RNA, 25 nt, Artificial Sequence
  Description of Artificial Sequence: Synthetic oligonucleotide
gccagugagguugaggugagagguu

SEQ ID NO: 72707 - RNA, 25 nt, Artificial Sequence
  Description of Artificial Sequence: Synthetic oligonucleotide
uugccagaguuugucuaccucuggg

SEQ ID NO: 72708 - RNA, 25 nt, Artificial Sequence
  Description of Artificial Sequence: Synthetic oligonucleotide
guaucccuuugucugggauaaaaaa

SEQ ID NO: 72709 - RNA, 25 nt, Artificial Sequence
  Description of Artificial Sequence: Synthetic oligonucleotide
aaaucaaaccagaaggcgggaugga

SEQ ID NO: 72710 - RNA, 25 nt, Artificial Sequence
  Description of Artificial Sequence: Synthetic oligonucleotide
aauggaugcaccgcaaauaaugcau

SEQ ID NO: 72711 - RNA, 25 nt, Artificial Sequence
  Description of Artificial Sequence: Synthetic oligonucleotide
uuuucugaguuuucuuguuaaaaaa

SEQ ID NO: 72712 - RNA, 25 nt, Artificial Sequence
  Description of Artificial Sequence: Synthetic oligonucleotide
aaaauuuuuuuaaguaagaaaaaaa

SEQ ID NO: 72713 - RNA, 25 nt, Artificial Sequence
  Description of Artificial Sequence: Synthetic oligonucleotide
aaagguaauaacauggccaauuugu

SEQ ID NO: 72714 - RNA, 25 nt, Artificial Sequence
  Description of Artificial Sequence: Synthetic oligonucleotide
uuacauaaaaugacuuucuguguau

SEQ ID NO: 72715 - RNA, 25 nt, Artificial Sequence
  Description of Artificial Sequence: Synthetic oligonucleotide
uaaauuauuccuaaaaaauccuguu

SEQ ID NO: 72716 - RNA, 25 nt, Artificial Sequence
  Description of Artificial Sequence: Synthetic oligonucleotide
uuauauaaaaaaucaguagaugaaa

SEQ ID NO: 72717 - RNA, 25 nt, Artificial Sequence
  Description of Artificial Sequence: Synthetic oligonucleotide
aaaaauuucaaaauguuuuuguaua

SEQ ID NO: 72718 - RNA, 25 nt, Artificial Sequence
  Description of Artificial Sequence: Synthetic oligonucleotide
auucuguuguaagaauuuauuccug

SEQ ID NO: 72719 - RNA, 25 nt, Artificial Sequence
  Description of Artificial Sequence: Synthetic oligonucleotide
guuauugcgauauacucuggauucu

SEQ ID NO: 72720 - RNA, 25 nt, Artificial Sequence
  Description of Artificial Sequence: Synthetic oligonucleotide
uuuacauaauggaaaaaagaaacug

SEQ ID NO: 72721 - RNA, 25 nt, Artificial Sequence
  Description of Artificial Sequence: Synthetic oligonucleotide
gucuauuuugaauggcugaagcuaa

SEQ ID NO: 72722 - RNA, 25 nt, Artificial Sequence
  Description of Artificial Sequence: Synthetic oligonucleotide
aggcaacguuaguuucucuuacucu

SEQ ID NO: 72723 - RNA, 25 nt, Artificial Sequence
  Description of Artificial Sequence: Synthetic oligonucleotide
ugcuuuuuucuaguaaaguacuaca

SEQ ID NO: 72724 - RNA, 25 nt, Artificial Sequence
  Description of Artificial Sequence: Synthetic oligonucleotide
augguuuaaguuaaauaaaauaauu

SEQ ID NO: 72725 - RNA, 25 nt, Artificial Sequence
  Description of Artificial Sequence: Synthetic oligonucleotide
guuaaauaaaauaauucuguaugca

SEQ ID NO: 72726 - DNA, 21 bp, Artificial Sequence
  Description of Artificial Sequence: Synthetic oligonucleotide
  Description of Combined DNA/RNA Molecule: Synthetic oligonucleotide
cuacacaaaucagcgauuutt

SEQ ID NO: 72727 - DNA, 21 bp, Artificial Sequence
  Description of Artificial Sequence: Synthetic oligonucleotide
  Description of Combined DNA/RNA Molecule: Synthetic oligonucleotide
aaaucgcugauuuguguagtt

SEQ ID NO: 72728 - DNA, 25 bp, Artificial Sequence
  Description of Artificial Sequence: Synthetic oligonucleotide
  Description of Combined DNA/RNA Molecule: Synthetic oligonucleotide
cuacacaaaucagcgauuuccaugt

SEQ ID NO: 72729 - RNA, 27 nt, Artificial Sequence
  Description of Artificial Sequence: Synthetic oligonucleotide
acauggaaaucgcugauuuguguaguc

SEQ ID NO: 72730 - RNA, 13 nt, Artificial Sequence
  Description of Artificial Sequence: Synthetic oligonucleotide
cuacacaaaucag

SEQ ID NO: 72731 - DNA, 11 bp, Artificial Sequence
  Description of Artificial Sequence: Synthetic oligonucleotide
  Description of Combined DNA/RNA Molecule: Synthetic oligonucleotide
gauuuccaugt

SEQ ID NO: 72732 - DNA, 21 bp, Artificial Sequence
  Description of Artificial Sequence: Synthetic oligonucleotide
  Description of Combined DNA/RNA Molecule: Synthetic oligonucleotide
ggaucuuauuucuucggagtt

SEQ ID NO: 72733 - DNA, 21 bp, Artificial Sequence
  Description of Artificial Sequence: Synthetic oligonucleotide
  Description of Combined DNA/RNA Molecule: Synthetic oligonucleotide
cuccgaagaaauaagaucctt

SEQ ID NO: 72734 - RNA, 11 nt, Artificial Sequence
  Description of Artificial Sequence: Synthetic oligonucleotide
ggaucuuauuu

SEQ ID NO: 72735 - DNA, 10 bp, Artificial Sequence
  Description of Artificial Sequence: Synthetic oligonucleotide
  Description of Combined DNA/RNA Molecule: Synthetic oligonucleotide
cuucggagtt

SEQ ID NO: 72736 - RNA, 27 nt, Artificial Sequence
  Description of Artificial Sequence: Synthetic oligonucleotide
cauugucuccgaagaaauaagauccuu

SEQ ID NO: 72737 - RNA, 8 nt, Artificial Sequence
  Description of Artificial Sequence: Synthetic oligonucleotide
  modified_base (2): LNA-G
ggaucuua

SEQ ID NO: 72738 - DNA, 17 bp, Artificial Sequence
  Description of Artificial Sequence: Synthetic oligonucleotide
  Description of Combined DNA/RNA Molecule: Synthetic oligonucleotide
uuucuucggagacaatg

SEQ ID NO: 72739 - DNA, 16 bp, Artificial Sequence
  Description of Artificial Sequence: Synthetic oligonucleotide
  Description of Combined DNA/RNA Molecule: Synthetic oligonucleotide
uucuucggagacaatg

SEQ ID NO: 72740 - DNA, 15 bp, Artificial Sequence
  Description of Artificial Sequence: Synthetic oligonucleotide
  Description of Combined DNA/RNA Molecule: Synthetic oligonucleotide
ucuucggagacaatg

SEQ ID NO: 72741 - DNA, 14 bp, Artificial Sequence
  Description of Artificial Sequence: Synthetic oligonucleotide
  Description of Combined DNA/RNA Molecule: Synthetic oligonucleotide
cuucggagacaatg

SEQ ID NO: 72742 - DNA, 13 bp, Artificial Sequence
  Description of Artificial Sequence: Synthetic oligonucleotide
  Description of Combined DNA/RNA Molecule: Synthetic oligonucleotide
uucggagacaatg

SEQ ID NO: 72743 - DNA, 12 bp, Artificial Sequence
  Description of Artificial Sequence: Synthetic oligonucleotide
  Description of Combined DNA/RNA Molecule: Synthetic oligonucleotide
ucggagacaatg

SEQ ID NO: 72744 - DNA, 11 bp, Artificial Sequence
  Description of Artificial Sequence: Synthetic oligonucleotide
  Description of Combined DNA/RNA Molecule: Synthetic oligonucleotide
cggagacaatg

SEQ ID NO: 72745 - RNA, 9 nt, Artificial Sequence
  Description of Artificial Sequence: Synthetic oligonucleotide
  modified_base (2): LNA-G
ggaucuuau

SEQ ID NO: 72746 - RNA, 10 nt, Artificial Sequence
  Description of Artificial Sequence: Synthetic oligonucleotide
  modified_base (2): LNA-G
ggaucuuauu

SEQ ID NO: 72747 - RNA, 11 nt, Artificial Sequence
  Description of Artificial Sequence: Synthetic oligonucleotide
  modified_base (2): LNA-G
ggaucuuauuu

SEQ ID NO: 72748 - RNA, 12 nt, Artificial Sequence
  Description of Artificial Sequence: Synthetic oligonucleotide
  modified_base (2): LNA-G
ggaucuuauuuc

SEQ ID NO: 72749 - RNA, 8 nt, Artificial Sequence
  Description of Artificial Sequence: Synthetic oligonucleotide
  modified_base (3): LNA-A
cuacacaa

SEQ ID NO: 72750 - DNA, 13 bp, Artificial Sequence
  Description of Artificial Sequence: Synthetic oligonucleotide
  Description of Combined DNA/RNA Molecule: Synthetic oligonucleotide
  modified_base (8): LNA-A
aucagcgauuutt

SEQ ID NO: 72751 - DNA, 12 bp, Artificial Sequence
  Description of Artificial Sequence: Synthetic oligonucleotide
  Description of Combined DNA/RNA Molecule: Synthetic oligonucleotide
  modified_base (7): LNA-A
ucagcgauuutt

SEQ ID NO: 72752 - DNA, 11 bp, Artificial Sequence
  Description of Artificial Sequence: Synthetic oligonucleotide
  Description of Combined DNA/RNA Molecule: Synthetic oligonucleotide
  modified_base (6): LNA-A
cagcgauuutt

SEQ ID NO: 72753 - DNA, 10 bp, Artificial Sequence
  Description of Artificial Sequence: Synthetic oligonucleotide
  Description of Combined DNA/RNA Molecule: Synthetic oligonucleotide
  modified_base (5): LNA-A
agcgauuutt

SEQ ID NO: 72754 - DNA, 9 bp, Artificial Sequence
  Description of Artificial Sequence: Synthetic oligonucleotide
  Description of Combined DNA/RNA Molecule: Synthetic oligonucleotide
  modified_base (4): LNA-A
gcgauuutt

SEQ ID NO: 72755 - DNA, 8 bp, Artificial Sequence
  Description of Artificial Sequence: Synthetic oligonucleotide
  Description of Combined DNA/RNA Molecule: Synthetic oligonucleotide
  modified_base (3): LNA-A
cgauuutt

SEQ ID NO: 72756 - DNA, 7 bp, Artificial Sequence
  Description of Artificial Sequence: Synthetic oligonucleotide
  Description of Combined DNA/RNA Molecule: Synthetic oligonucleotide
  modified_base (2): LNA-A
gauuutt

SEQ ID NO: 72757 - RNA, 9 nt, Artificial Sequence
  Description of Artificial Sequence: Synthetic oligonucleotide
  modified_base (3): LNA-A
cuacacaaa

SEQ ID NO: 72758 - RNA, 10 nt, Artificial Sequence
  Description of Artificial Sequence: Synthetic oligonucleotide
  modified_base (3): LNA-A
cuacacaaau

SEQ ID NO: 72759 - RNA, 11 nt, Artificial Sequence
  Description of Artificial Sequence: Synthetic oligonucleotide
  modified_base (3): LNA-A
cuacacaaauc

SEQ ID NO: 72760 - RNA, 12 nt, Artificial Sequence
  Description of Artificial Sequence: Synthetic oligonucleotide
  modified_base (3): LNA-A
cuacacaaauca

SEQ ID NO: 72761 - RNA, 13 nt, Artificial Sequence
  Description of Artificial Sequence: Synthetic oligonucleotide
  modified_base (3): LNA-A
cuacacaaaucag

SEQ ID NO: 72762 - RNA, 14 nt, Artificial Sequence
  Description of Artificial Sequence: Synthetic oligonucleotide
  modified_base (3): LNA-A
cuacacaaaucagc

SEQ ID NO: 72763 - RNA, 13 nt, Artificial Sequence
  Description of Artificial Sequence: Synthetic oligonucleotide
  modified_base (2): LNA-G
ggaucuuauuucu

SEQ ID NO: 72764 - RNA, 14 nt, Artificial Sequence
  Description of Artificial Sequence: Synthetic oligonucleotide
  modified_base (2): LNA-G
ggaucuuauuucuu

SEQ ID NO: 72765 - RNA, 8 nt, Artificial Sequence
  Description of Artificial Sequence: Synthetic oligonucleotide
  modified_base (2): LNA-G
  modified_base (8): LNA-A
ggaucuua

SEQ ID NO: 72766 - RNA, 9 nt, Artificial Sequence
  Description of Artificial Sequence: Synthetic oligonucleotide
  modified_base (2): LNA-G
  modified_base (9): LNA-U
ggaucuuau

SEQ ID NO: 72767 - RNA, 10 nt, Artificial Sequence
  Description of Artificial Sequence: Synthetic oligonucleotide
  modified_base (2): LNA-G
  modified_base (10): LNA-U
ggaucuuauu

SEQ ID NO: 72768 - RNA, 11 nt, Artificial Sequence
  Description of Artificial Sequence: Synthetic oligonucleotide
  modified_base (2): LNA-G
  modified_base (11): LNA-U
ggaucuuauuu

SEQ ID NO: 72769 - RNA, 12 nt, Artificial Sequence
  Description of Artificial Sequence: Synthetic oligonucleotide
  modified_base (2): LNA-G
  modified_base (12): LNA-C
ggaucuuauuuc

SEQ ID NO: 72770 - RNA, 13 nt, Artificial Sequence
  Description of Artificial Sequence: Synthetic oligonucleotide
  modified_base (2): LNA-G
  modified_base (13): LNA-U
ggaucuuauuucu

SEQ ID NO: 72771 - RNA, 14 nt, Artificial Sequence
  Description of Artificial Sequence: Synthetic oligonucleotide
  modified_base (2): LNA-G
  modified_base (14): LNA-U
ggaucuuauuucuu

SEQ ID NO: 72772 - DNA, 13 bp, Artificial Sequence
  Description of Artificial Sequence: Synthetic oligonucleotide
  Description of Combined DNA/RNA Molecule: Synthetic oligonucleotide
  modified_base (8): LNA-G
uuucuucggagtt

SEQ ID NO: 72773 - DNA, 12 bp, Artificial Sequence
  Description of Artificial Sequence: Synthetic oligonucleotide
  Description of Combined DNA/RNA Molecule: Synthetic oligonucleotide
  modified_base (7): LNA-G
uucuucggagtt

SEQ ID NO: 72774 - DNA, 11 bp, Artificial Sequence
  Description of Artificial Sequence: Synthetic oligonucleotide
  Description of Combined DNA/RNA Molecule: Synthetic oligonucleotide
  modified_base (6): LNA-G
ucuucggagtt

SEQ ID NO: 72775 - DNA, 10 bp, Artificial Sequence
  Description of Artificial Sequence: Synthetic oligonucleotide
  Description of Combined DNA/RNA Molecule: Synthetic oligonucleotide
  modified_base (5): LNA-G
cuucggagtt

SEQ ID NO: 72776 - DNA, 9 bp, Artificial Sequence
  Description of Artificial Sequence: Synthetic oligonucleotide
  Description of Combined DNA/RNA Molecule: Synthetic oligonucleotide
  modified_base (4): LNA-G
uucggagtt

SEQ ID NO: 72777 - DNA, 8 bp, Artificial Sequence
  Description of Artificial Sequence: Synthetic oligonucleotide
  Description of Combined DNA/RNA Molecule: Synthetic oligonucleotide
  modified_base (3): LNA-G
ucggagtt

SEQ ID NO: 72778 - DNA, 7 bp, Artificial Sequence
  Description of Artificial Sequence: Synthetic oligonucleotide
  Description of Combined DNA/RNA Molecule: Synthetic oligonucleotide
  modified_base (2): LNA-G
cggagtt

SEQ ID NO: 72779 - DNA, 13 bp, Artificial Sequence
  Description of Artificial Sequence: Synthetic oligonucleotide
  Description of Combined DNA/RNA Molecule: Synthetic oligonucleotide
  modified_base (1): LNA-U
  modified_base (8): LNA-G
uuucuucggagtt

SEQ ID NO: 72780 - DNA, 12 bp, Artificial Sequence
  Description of Artificial Sequence: Synthetic oligonucleotide
  Description of Combined DNA/RNA Molecule: Synthetic oligonucleotide
  modified_base (1): LNA-U
  modified_base (7): LNA-G
uucuucggagtt

SEQ ID NO: 72781 - DNA, 11 bp, Artificial Sequence
  Description of Artificial Sequence: Synthetic oligonucleotide
  Description of Combined DNA/RNA Molecule: Synthetic oligonucleotide
  modified_base (1): LNA-U
  modified_base (6): LNA-G
ucuucggagtt

SEQ ID NO: 72782 - DNA, 10 bp, Artificial Sequence
  Description of Artificial Sequence: Synthetic oligonucleotide
  Description of Combined DNA/RNA Molecule: Synthetic oligonucleotide
  modified_base (1): LNA-C
  modified_base (5): LNA-G
cuucggagtt

SEQ ID NO: 72783 - DNA, 9 bp, Artificial Sequence
  Description of Artificial Sequence: Synthetic oligonucleotide
  Description of Combined DNA/RNA Molecule: Synthetic oligonucleotide
  modified_base (1): LNA-U
  modified_base (4): LNA-G
uucggagtt

SEQ ID NO: 72784 - DNA, 8 bp, Artificial Sequence
  Description of Artificial Sequence: Synthetic oligonucleotide
  Description of Combined DNA/RNA Molecule: Synthetic oligonucleotide
  modified_base (1): LNA-U
  modified_base (3): LNA-G
ucggagtt

SEQ ID NO: 72785 - DNA, 7 bp, Artificial Sequence
  Description of Artificial Sequence: Synthetic oligonucleotide
  Description of Combined DNA/RNA Molecule: Synthetic oligonucleotide
  modified_base (1): LNA-C
  modified_base (2): LNA-G
cggagtt

SEQ ID NO: 72786 - DNA, 21 bp, Artificial Sequence
  Description of Artificial Sequence: Synthetic oligonucleotide
  Description of Combined DNA/RNA Molecule: Synthetic oligonucleotide
  modified_base (2): LNA-G
  modified_base (16): LNA-G
ggaucuuauuucuucggagtt

SEQ ID NO: 72787 - DNA, 25 bp, Artificial Sequence
  Description of Artificial Sequence: Synthetic oligonucleotide
  Description of Combined DNA/RNA Molecule: Synthetic oligonucleotide
ggaucuuauuucuucggagacaatg

SEQ ID NO: 72788 - RNA, 25 nt, Artificial Sequence
  Description of Artificial Sequence: Synthetic oligonucleotide
uuaagcagaguucaaaagcccuuca

SEQ ID NO: 72789 - RNA, 25 nt, Artificial Sequence
  Description of Artificial Sequence: Synthetic oligonucleotide
uaagcagaguucaaaagcccuucag

SEQ ID NO: 72790 - RNA, 25 nt, Artificial Sequence
  Description of Artificial Sequence: Synthetic oligonucleotide
agcagaguucaaaagcccuucagcg

SEQ ID NO: 72791 - RNA, 25 nt, Artificial Sequence
  Description of Artificial Sequence: Synthetic oligonucleotide
cucagggucugagugaagccgcucg

SEQ ID NO: 72792 - RNA, 25 nt, Artificial Sequence
  Description of Artificial Sequence: Synthetic oligonucleotide
caagcaacuacaucacgccagucaa

SEQ ID NO: 72793 - RNA, 25 nt, Artificial Sequence
  Description of Artificial Sequence: Synthetic oligonucleotide
aucaauggcagcuucuuggugcgug

SEQ ID NO: 72794 - RNA, 25 nt, Artificial Sequence
  Description of Artificial Sequence: Synthetic oligonucleotide
uuccagcccacauuggauucaucag

SEQ ID NO: 72795 - RNA, 25 nt, Artificial Sequence
  Description of Artificial Sequence: Synthetic oligonucleotide
cagcugagaauguggaauaccuaag

SEQ ID NO: 72796 - RNA, 25 nt, Artificial Sequence
  Description of Artificial Sequence: Synthetic oligonucleotide
aacguaucuccuaauuugaggcuca

SEQ ID NO: 72797 - RNA, 25 nt, Artificial Sequence
  Description of Artificial Sequence: Synthetic oligonucleotide
ccuaaaauaauuucucuacaauugg

SEQ ID NO: 72798 - RNA, 25 nt, Artificial Sequence
  Description of Artificial Sequence: Synthetic oligonucleotide
uggaagauucagcuaguuaggagcc

SEQ ID NO: 72799 - RNA, 25 nt, Artificial Sequence
  Description of Artificial Sequence: Synthetic oligonucleotide
uuaaacucuccuagucaauauccac

SEQ ID NO: 72800 - RNA, 25 nt, Artificial Sequence
  Description of Artificial Sequence: Synthetic oligonucleotide
cagccuacaguuauguucagucaca

SEQ ID NO: 72801 - RNA, 25 nt, Artificial Sequence
  Description of Artificial Sequence: Synthetic oligonucleotide
guuauguucagucacacacacauac

SEQ ID NO: 72802 - RNA, 25 nt, Artificial Sequence
  Description of Artificial Sequence: Synthetic oligonucleotide
cacauacaaaauguuccuuuugcuu

SEQ ID NO: 72803 - RNA, 25 nt, Artificial Sequence
  Description of Artificial Sequence: Synthetic oligonucleotide
uccuuuugcuuuuaaaguaauuuuu

SEQ ID NO: 72804 - RNA, 25 nt, Artificial Sequence
  Description of Artificial Sequence: Synthetic oligonucleotide
ugaccugugaagcaacagucaaugg

SEQ ID NO: 72805 - RNA, 25 nt, Artificial Sequence
  Description of Artificial Sequence: Synthetic oligonucleotide
cuaucucacacaucgacaaaccaau

SEQ ID NO: 72806 - RNA, 25 nt, Artificial Sequence
  Description of Artificial Sequence: Synthetic oligonucleotide
uguccucaauuguacugcuaccacu

SEQ ID NO: 72807 - RNA, 25 nt, Artificial Sequence
  Description of Artificial Sequence: Synthetic oligonucleotide
aaaccguagcuggcaagcggucuua

SEQ ID NO: 72808 - RNA, 25 nt, Artificial Sequence
  Description of Artificial Sequence: Synthetic oligonucleotide
uagcuggcaagcggucuuaccggcu

SEQ ID NO: 72809 - RNA, 25 nt, Artificial Sequence
  Description of Artificial Sequence: Synthetic oligonucleotide
uuguaugguuaaaagauggguuacc

SEQ ID NO: 72810 - RNA, 25 nt, Artificial Sequence
  Description of Artificial Sequence: Synthetic oligonucleotide
ugguuaaaagauggguuaccugcga

SEQ ID NO: 72811 - RNA, 25 nt, Artificial Sequence
  Description of Artificial Sequence: Synthetic oligonucleotide
cagggaauuauacaaucuugcugag
